United States Patent Application Publication US 2007/0048756 A1 - sequence listing, part 18

SEQ ID NO: 617573 - DNA, 33 bp, Homo sapien
gtgctgcctctctacacagcgagaatgtggact

SEQ ID NO: 617574 - DNA, 33 bp, Homo sapien
gtgctgcctctctacagagcgagaatgtggact

SEQ ID NO: 617575 - DNA, 33 bp, Homo sapien
cgtgaagaagcccttacaggtctgtaggctctg

SEQ ID NO: 617576 - DNA, 33 bp, Homo sapien
cgtgaagaagcccttataggtctgtaggctctg

SEQ ID NO: 617577 - DNA, 33 bp, Homo sapien
attgtgaagtttccacacctttacaccactcag

SEQ ID NO: 617578 - DNA, 33 bp, Homo sapien
attgtgaagtttccacgcctttacaccactcag

SEQ ID NO: 617579 - DNA, 33 bp, Homo sapien
caaggtgaagctgggaccaaaaattgggtctct

SEQ ID NO: 617580 - DNA, 33 bp, Homo sapien
caaggtgaagctgggatcaaaaattgggtctct

SEQ ID NO: 617581 - DNA, 33 bp, Homo sapien
ataggcaagttttgtaacctctctgggccccat

SEQ ID NO: 617582 - DNA, 33 bp, Homo sapien
ataggcaagttttgtatcctctctgggccccat

SEQ ID NO: 617583 - DNA, 33 bp, Homo sapien
agctaaaattcaattacctttctcaattgtaat

SEQ ID NO: 617584 - DNA, 33 bp, Homo sapien
agctaaaattcaattagctttctcaattgtaat

SEQ ID NO: 617585 - DNA, 33 bp, Homo sapien
atcacaggaggcagaccgagataactgtaacac

SEQ ID NO: 617586 - DNA, 33 bp, Homo sapien
atcacaggaggcagactgagataactgtaacac

SEQ ID NO: 617587 - DNA, 33 bp, Homo sapien
tttggcaacttgagtcaaagtctcctctctaaa

SEQ ID NO: 617588 - DNA, 33 bp, Homo sapien
tttggcaacttgagtcgaagtctcctctctaaa

SEQ ID NO: 617589 - DNA, 33 bp, Homo sapien
aaatagggcattgaaaacacttcctgcagctga

SEQ ID NO: 617590 - DNA, 33 bp, Homo sapien
aaatagggcattgaaagcacttcctgcagctga

SEQ ID NO: 617591 - DNA, 33 bp, Homo sapien
tggagtgtagggaaaaccacatcatgtgaggaa

SEQ ID NO: 617592 - DNA, 33 bp, Homo sapien
tggagtgtagggaaaagcacatcatgtgaggaa

SEQ ID NO: 617593 - DNA, 33 bp, Homo sapien
atacctgtttggactacatatataatctcggac

SEQ ID NO: 617594 - DNA, 33 bp, Homo sapien
atacctgtttggactagatatataatctcggac

SEQ ID NO: 617595 - DNA, 33 bp, Homo sapien
tatctgtcaagcagggacaagaatttcagcctg

SEQ ID NO: 617596 - DNA, 33 bp, Homo sapien
tatctgtcaagcaggggcaagaatttcagcctg

SEQ ID NO: 617597 - DNA, 33 bp, Homo sapien
ttgatggcctagagtacctggtggaagaagttt

SEQ ID NO: 617598 - DNA, 33 bp, Homo sapien
ttgatggcctagagtatctggtggaagaagttt

SEQ ID NO: 617599 - DNA, 33 bp, Homo sapien
aattactcctttcttgaagcttctatggtatgt

SEQ ID NO: 617600 - DNA, 33 bp, Homo sapien
aattactcctttcttggagcttctatggtatgt

SEQ ID NO: 617601 - DNA, 33 bp, Homo sapien
gtggagctaaggacaacgatagagaaggagaaa

SEQ ID NO: 617602 - DNA, 33 bp, Homo sapien
gtggagctaaggacaatgatagagaaggagaaa

SEQ ID NO: 617603 - DNA, 33 bp, Homo sapien
gcctgatctggttgatgacagcttggcctcagg

SEQ ID NO: 617604 - DNA, 33 bp, Homo sapien
gcctgatctggttgattacagcttggcctcagg

SEQ ID NO: 617605 - DNA, 33 bp, Homo sapien
tgactctatatctctacgtaaggaaaatccttg

SEQ ID NO: 617606 - DNA, 33 bp, Homo sapien
tgactctatatctctatgtaaggaaaatccttg

SEQ ID NO: 617607 - DNA, 33 bp, Homo sapien
acgttcactgcctctaatacaagcattagacaa

SEQ ID NO: 617608 - DNA, 33 bp, Homo sapien
acgttcactgcctctattacaagcattagacaa

SEQ ID NO: 617609 - DNA, 33 bp, Homo sapien
ttcttgactcctactcactcctgctgctttctg

SEQ ID NO: 617610 - DNA, 33 bp, Homo sapien
ttcttgactcctactcgctcctgctgctttctg

SEQ ID NO: 617611 - DNA, 33 bp, Homo sapien
tcttattcaacacccaaatactctgagaacttg

SEQ ID NO: 617612 - DNA, 33 bp, Homo sapien
tcttattcaacacccagatactctgagaacttg

SEQ ID NO: 617613 - DNA, 33 bp, Homo sapien
agtgtagcgctgttccaaatatagatggtttgt

SEQ ID NO: 617614 - DNA, 33 bp, Homo sapien
agtgtagcgctgttccgaatatagatggtttgt

SEQ ID NO: 617615 - DNA, 33 bp, Homo sapien
aagaacctaatgtgcaaaatctctggaatgtgg

SEQ ID NO: 617616 - DNA, 33 bp, Homo sapien
aagaacctaatgtgcataatctctggaatgtgg

SEQ ID NO: 617617 - DNA, 33 bp, Homo sapien
acctgctgtgttttcacatctcctaaagggagt

SEQ ID NO: 617618 - DNA, 33 bp, Homo sapien
acctgctgtgttttcatatctcctaaagggagt

SEQ ID NO: 617619 - DNA, 33 bp, Homo sapien
ctgcttagaaatacccaagataatgcaggggag

SEQ ID NO: 617620 - DNA, 33 bp, Homo sapien
ctgcttagaaatacccgagataatgcaggggag

SEQ ID NO: 617621 - DNA, 33 bp, Homo sapien
cctctcatgaaggaccagcagatattttgcagg

SEQ ID NO: 617622 - DNA, 33 bp, Homo sapien
cctctcatgaaggaccggcagatattttgcagg

SEQ ID NO: 617623 - DNA, 33 bp, Homo sapien
gcccaaagaaataccacaggagtcattaatttt

SEQ ID NO: 617624 - DNA, 33 bp, Homo sapien
gcccaaagaaataccataggagtcattaatttt

SEQ ID NO: 617625 - DNA, 33 bp, Homo sapien
aagagtactagacaacaaagagtaaactgctct

SEQ ID NO: 617626 - DNA, 33 bp, Homo sapien
aagagtactagacaaccaagagtaaactgctct

SEQ ID NO: 617627 - DNA, 33 bp, Homo sapien
gttgcctgtagttttcaatacaggacaggatgg

SEQ ID NO: 617628 - DNA, 33 bp, Homo sapien
gttgcctgtagttttcgatacaggacaggatgg

SEQ ID NO: 617629 - DNA, 33 bp, Homo sapien
tctaaaaatgtggacaatcttccatccattgtt

SEQ ID NO: 617630 - DNA, 33 bp, Homo sapien
tctaaaaatgtggacagtcttccatccattgtt

SEQ ID NO: 617631 - DNA, 33 bp, Homo sapien
caaaggggaacagagggaaagatatgcattgga

SEQ ID NO: 617632 - DNA, 33 bp, Homo sapien
caaaggggaacagaggtaaagatatgcattgga

SEQ ID NO: 617633 - DNA, 33 bp, Homo sapien
attaaagggaagatgaaataacaaaactaaaga

SEQ ID NO: 617634 - DNA, 33 bp, Homo sapien
attaaagggaagatgagataacaaaactaaaga

SEQ ID NO: 617635 - DNA, 33 bp, Homo sapien
gcaatggatgtatcagcaagcacaatgtggtct

SEQ ID NO: 617636 - DNA, 33 bp, Homo sapien
gcaatggatgtatcagtaagcacaatgtggtct

SEQ ID NO: 617637 - DNA, 33 bp, Homo sapien
aagaggagtccaaggcaacaggatggctaagtg

SEQ ID NO: 617638 - DNA, 33 bp, Homo sapien
aagaggagtccaaggcgacaggatggctaagtg

SEQ ID NO: 617639 - DNA, 33 bp, Homo sapien
tctctttcctcgtctccgaagtaggggtattaa

SEQ ID NO: 617640 - DNA, 33 bp, Homo sapien
tctctttcctcgtctctgaagtaggggtattaa

SEQ ID NO: 617641 - DNA, 33 bp, Homo sapien
tttaattgatgtttcagaataactgttttgagg

SEQ ID NO: 617642 - DNA, 33 bp, Homo sapien
tttaattgatgtttcataataactgttttgagg

SEQ ID NO: 617643 - DNA, 33 bp, Homo sapien
attcacagaattatgaccttgcttttgaggtgg

SEQ ID NO: 617644 - DNA, 33 bp, Homo sapien
attcacagaattatgatcttgcttttgaggtgg

SEQ ID NO: 617645 - DNA, 33 bp, Homo sapien
tttatgggtaaaagaaactcgatgtgatgatac

SEQ ID NO: 617646 - DNA, 33 bp, Homo sapien
tttatgggtaaaagaacctcgatgtgatgatac

SEQ ID NO: 617647 - DNA, 33 bp, Homo sapien
aataagtaaagggagaaaacaaatgctacagaa

SEQ ID NO: 617648 - DNA, 33 bp, Homo sapien
aataagtaaagggagagaacaaatgctacagaa

SEQ ID NO: 617649 - DNA, 33 bp, Homo sapien
cacactttgagcatcactctctgcttcagagca

SEQ ID NO: 617650 - DNA, 33 bp, Homo sapien
cacactttgagcatcattctctgcttcagagca

SEQ ID NO: 617651 - DNA, 33 bp, Homo sapien
gcagcggtcttctaaccctggcatgaaggaagt

SEQ ID NO: 617652 - DNA, 33 bp, Homo sapien
gcagcggtcttctaactctggcatgaaggaagt

SEQ ID NO: 617653 - DNA, 33 bp, Homo sapien
attcaatagtggaggacgggcaaaatatcaaat

SEQ ID NO: 617654 - DNA, 33 bp, Homo sapien
attcaatagtggaggatgggcaaaatatcaaat

SEQ ID NO: 617655 - DNA, 33 bp, Homo sapien
atattatttcctgctacagttaacaaaatggga

SEQ ID NO: 617656 - DNA, 33 bp, Homo sapien
atattatttcctgctagagttaacaaaatggga

SEQ ID NO: 617657 - DNA, 33 bp, Homo sapien
tagctgtattttccatcaagacaaaacagcatc

SEQ ID NO: 617658 - DNA, 33 bp, Homo sapien
tagctgtattttccatgaagacaaaacagcatc

SEQ ID NO: 617659 - DNA, 33 bp, Homo sapien
atgcagcacacccctcacgaagcagacttttca

SEQ ID NO: 617660 - DNA, 33 bp, Homo sapien
atgcagcacacccctcgcgaagcagacttttca

SEQ ID NO: 617661 - DNA, 33 bp, Homo sapien
agaaacatctattagaatcacttcacctacttt

SEQ ID NO: 617662 - DNA, 33 bp, Homo sapien
agaaacatctattagattcacttcacctacttt

SEQ ID NO: 617663 - DNA, 33 bp, Homo sapien
tatgaaaatcaatccaccccagtcataaactca

SEQ ID NO: 617664 - DNA, 33 bp, Homo sapien
tatgaaaatcaatccatcccagtcataaactca

SEQ ID NO: 617665 - DNA, 33 bp, Homo sapien
attaaataatactgtacgtgtgtaggataggat

SEQ ID NO: 617666 - DNA, 33 bp, Homo sapien
attaaataatactgtatgtgtgtaggataggat

SEQ ID NO: 617667 - DNA, 33 bp, Homo sapien
cctgaaacagtaggtccaagacacgtttgttgt

SEQ ID NO: 617668 - DNA, 33 bp, Homo sapien
cctgaaacagtaggtctaagacacgtttgttgt

SEQ ID NO: 617669 - DNA, 33 bp, Homo sapien
ggatttgcctttcaaaaaaatgatacacgagag

SEQ ID NO: 617670 - DNA, 33 bp, Homo sapien
ggatttgcctttcaaacaaatgatacacgagag

SEQ ID NO: 617671 - DNA, 33 bp, Homo sapien
tcatcagagaatttataagacatgcacgtgact

SEQ ID NO: 617672 - DNA, 33 bp, Homo sapien
tcatcagagaatttatgagacatgcacgtgact

SEQ ID NO: 617673 - DNA, 33 bp, Homo sapien
agattctcctattgacccagaaagcgattcctt

SEQ ID NO: 617674 - DNA, 33 bp, Homo sapien
agattctcctattgacgcagaaagcgattcctt

SEQ ID NO: 617675 - DNA, 33 bp, Homo sapien
tagcacagaatgaaaactaacttgaatcacata

SEQ ID NO: 617676 - DNA, 33 bp, Homo sapien
tagcacagaatgaaaattaacttgaatcacata

SEQ ID NO: 617677 - DNA, 33 bp, Homo sapien
gttgagcttcaggagacgttgccaacagttctg

SEQ ID NO: 617678 - DNA, 33 bp, Homo sapien
gttgagcttcaggagatgttgccaacagttctg

SEQ ID NO: 617679 - DNA, 33 bp, Homo sapien
tttaaattacagaacgaacgggttttagtgttt

SEQ ID NO: 617680 - DNA, 33 bp, Homo sapien
tttaaattacagaacggacgggttttagtgttt

SEQ ID NO: 617681 - DNA, 33 bp, Homo sapien
tgctaattctttcaaaggtatctggccctgttt

SEQ ID NO: 617682 - DNA, 33 bp, Homo sapien
tgctaattctttcaaatgtatctggccctgttt

SEQ ID NO: 617683 - DNA, 33 bp, Homo sapien
ggtaagttacatacaccgctgagtggcctagga

SEQ ID NO: 617684 - DNA, 33 bp, Homo sapien
ggtaagttacatacactgctgagtggcctagga

SEQ ID NO: 617685 - DNA, 33 bp, Homo sapien
tagctctgttcttacactcacgatgtggtatca

SEQ ID NO: 617686 - DNA, 33 bp, Homo sapien
tagctctgttcttacattcacgatgtggtatca

SEQ ID NO: 617687 - DNA, 33 bp, Homo sapien
tgcagacatcagaatcaaagccaaaccctgtca

SEQ ID NO: 617688 - DNA, 33 bp, Homo sapien
tgcagacatcagaatcgaagccaaaccctgtca

SEQ ID NO: 617689 - DNA, 33 bp, Homo sapien
taatttgaaaagaacagaacagcacaaaaattt

SEQ ID NO: 617690 - DNA, 33 bp, Homo sapien
taatttgaaaagaacataacagcacaaaaattt

SEQ ID NO: 617691 - DNA, 33 bp, Homo sapien
ttaagttcttgaccaccgaggctttttttttat

SEQ ID NO: 617692 - DNA, 33 bp, Homo sapien
ttaagttcttgaccactgaggctttttttttat

SEQ ID NO: 617693 - DNA, 33 bp, Homo sapien
tgacttttcttaagtcacatggctcaccacaga

SEQ ID NO: 617694 - DNA, 33 bp, Homo sapien
tgacttttcttaagtctcatggctcaccacaga

SEQ ID NO: 617695 - DNA, 33 bp, Homo sapien
gaagcagcgccactcaatcctgccagtcacatt

SEQ ID NO: 617696 - DNA, 33 bp, Homo sapien
gaagcagcgccactcagtcctgccagtcacatt

SEQ ID NO: 617697 - DNA, 33 bp, Homo sapien
tttaatgggcagatcaaagaaaacattggctgg

SEQ ID NO: 617698 - DNA, 33 bp, Homo sapien
tttaatgggcagatcagagaaaacattggctgg

SEQ ID NO: 617699 - DNA, 33 bp, Homo sapien
attcagcaaagttataaatgtgtcctcttaata

SEQ ID NO: 617700 - DNA, 33 bp, Homo sapien
attcagcaaagttatacatgtgtcctcttaata

SEQ ID NO: 617701 - DNA, 33 bp, Homo sapien
ctgaagcagattcaaacgttctggtcctcttga

SEQ ID NO: 617702 - DNA, 33 bp, Homo sapien
ctgaagcagattcaaatgttctggtcctcttga

SEQ ID NO: 617703 - DNA, 33 bp, Homo sapien
tttctgagtagaaacacgttagcagaggaaact

SEQ ID NO: 617704 - DNA, 33 bp, Homo sapien
tttctgagtagaaacatgttagcagaggaaact

SEQ ID NO: 617705 - DNA, 33 bp, Homo sapien
ttttctggccaggatggaatctgtgtggtcagc

SEQ ID NO: 617706 - DNA, 33 bp, Homo sapien
ttttctggccaggatgtaatctgtgtggtcagc

SEQ ID NO: 617707 - DNA, 33 bp, Homo sapien
atctcttttctgaactcagaggctaactatccg

SEQ ID NO: 617708 - DNA, 33 bp, Homo sapien
atctcttttctgaactgagaggctaactatccg

SEQ ID NO: 617709 - DNA, 33 bp, Homo sapien
tggcttctggactccaatgactttttcttggct

SEQ ID NO: 617710 - DNA, 33 bp, Homo sapien
tggcttctggactccagtgactttttcttggct

SEQ ID NO: 617711 - DNA, 33 bp, Homo sapien
ggtctatttagtgccacgggcttgactcaagga

SEQ ID NO: 617712 - DNA, 33 bp, Homo sapien
ggtctatttagtgccatgggcttgactcaagga

SEQ ID NO: 617713 - DNA, 33 bp, Homo sapien
tgtccacctgtgcggaatattctccttgcccct

SEQ ID NO: 617714 - DNA, 33 bp, Homo sapien
tgtccacctgtgcggagtattctccttgcccct

SEQ ID NO: 617715 - DNA, 33 bp, Homo sapien
cctcttatctgtatgacggtcacagcctcctcg

SEQ ID NO: 617716 - DNA, 33 bp, Homo sapien
cctcttatctgtatgatggtcacagcctcctcg

SEQ ID NO: 617717 - DNA, 33 bp, Homo sapien
cacttctcttcgctgaaccttaatttcctcatc

SEQ ID NO: 617718 - DNA, 33 bp, Homo sapien
cacttctcttcgctgagccttaatttcctcatc

SEQ ID NO: 617719 - DNA, 33 bp, Homo sapien
atctggtttcactggaacatcattcaagctatc

SEQ ID NO: 617720 - DNA, 33 bp, Homo sapien
atctggtttcactggagcatcattcaagctatc

SEQ ID NO: 617721 - DNA, 33 bp, Homo sapien
atttaaaacatcctcaccacgtttaagaaatcg

SEQ ID NO: 617722 - DNA, 33 bp, Homo sapien
atttaaaacatcctcagcacgtttaagaaatcg

SEQ ID NO: 617723 - DNA, 33 bp, Homo sapien
attgtcgtaatcatgaatatcatccagcactgt

SEQ ID NO: 617724 - DNA, 33 bp, Homo sapien
attgtcgtaatcatgagtatcatccagcactgt

SEQ ID NO: 617725 - DNA, 33 bp, Homo sapien
cttctcctgctacttccgaaacttgtcagactt

SEQ ID NO: 617726 - DNA, 33 bp, Homo sapien
cttctcctgctacttctgaaacttgtcagactt

SEQ ID NO: 617727 - DNA, 33 bp, Homo sapien
tggatacaggagggcaatgcattaacaaaacat

SEQ ID NO: 617728 - DNA, 33 bp, Homo sapien
tggatacaggagggcagtgcattaacaaaacat

SEQ ID NO: 617729 - DNA, 33 bp, Homo sapien
gaaatgagataccaaacgttgaaggttgtagaa

SEQ ID NO: 617730 - DNA, 33 bp, Homo sapien
gaaatgagataccaaaggttgaaggttgtagaa

SEQ ID NO: 617731 - DNA, 33 bp, Homo sapien
gttaatcatttcagcacggaatatcttgaattc

SEQ ID NO: 617732 - DNA, 33 bp, Homo sapien
gttaatcatttcagcatggaatatcttgaattc

SEQ ID NO: 617733 - DNA, 33 bp, Homo sapien
cagataaggagctccacgccaaagccccatctg

SEQ ID NO: 617734 - DNA, 33 bp, Homo sapien
cagataaggagctccatgccaaagccccatctg

SEQ ID NO: 617735 - DNA, 33 bp, Homo sapien
gatgttcttagcgtaaaacctttctaatcgctt

SEQ ID NO: 617736 - DNA, 33 bp, Homo sapien
gatgttcttagcgtaacacctttctaatcgctt

SEQ ID NO: 617737 - DNA, 33 bp, Homo sapien
atcaaatcactataaaattactcaaatggccag

SEQ ID NO: 617738 - DNA, 33 bp, Homo sapien
atcaaatcactataaagttactcaaatggccag

SEQ ID NO: 617739 - DNA, 33 bp, Homo sapien
gagaattttaagattcacaaaatcacacaccta

SEQ ID NO: 617740 - DNA, 33 bp, Homo sapien
gagaattttaagattcgcaaaatcacacaccta

SEQ ID NO: 617741 - DNA, 33 bp, Homo sapien
gggaacaaacactaaaaatctaggaaagactga

SEQ ID NO: 617742 - DNA, 33 bp, Homo sapien
gggaacaaacactaaatatctaggaaagactga

SEQ ID NO: 617743 - DNA, 33 bp, Homo sapien
atactgtagtgctcctaaagagatgctcttcag

SEQ ID NO: 617744 - DNA, 33 bp, Homo sapien
atactgtagtgctcctgaagagatgctcttcag

SEQ ID NO: 617745 - DNA, 33 bp, Homo sapien
cctgcttattagtgaacagtttatcgctttcac

SEQ ID NO: 617746 - DNA, 33 bp, Homo sapien
cctgcttattagtgaatagtttatcgctttcac

SEQ ID NO: 617747 - DNA, 33 bp, Homo sapien
gacttcatgaatcctgcatcttttttgcaagat

SEQ ID NO: 617748 - DNA, 33 bp, Homo sapien
gacttcatgaatcctgtatcttttttgcaagat

SEQ ID NO: 617749 - DNA, 33 bp, Homo sapien
tgggaagtgttttgtaacttgggtgttagcttc

SEQ ID NO: 617750 - DNA, 33 bp, Homo sapien
tgggaagtgttttgtagcttgggtgttagcttc

SEQ ID NO: 617751 - DNA, 33 bp, Homo sapien
ggaaaaaggaaataaaggagaatcttcatagtg

SEQ ID NO: 617752 - DNA, 33 bp, Homo sapien
ggaaaaaggaaataaatgagaatcttcatagtg

SEQ ID NO: 617753 - DNA, 33 bp, Homo sapien
ttcataggatgttctgcaaattaaataatacat

SEQ ID NO: 617754 - DNA, 33 bp, Homo sapien
ttcataggatgttctggaaattaaataatacat

SEQ ID NO: 617755 - DNA, 33 bp, Homo sapien
taattgaagagctataaactgtatttacctcag

SEQ ID NO: 617756 - DNA, 33 bp, Homo sapien
taattgaagagctatagactgtatttacctcag

SEQ ID NO: 617757 - DNA, 33 bp, Homo sapien
agtgatgtatacacaacgaccagcacagttcct

SEQ ID NO: 617758 - DNA, 33 bp, Homo sapien
agtgatgtatacacaatgaccagcacagttcct

SEQ ID NO: 617759 - DNA, 33 bp, Homo sapien
cagcacacaagatcaaattgatattctagggtg

SEQ ID NO: 617760 - DNA, 33 bp, Homo sapien
cagcacacaagatcaatttgatattctagggtg

SEQ ID NO: 617761 - DNA, 33 bp, Homo sapien
ggtgatatggttctcaaatcaagtgcagctgcc

SEQ ID NO: 617762 - DNA, 33 bp, Homo sapien
ggtgatatggttctcagatcaagtgcagctgcc

SEQ ID NO: 617763 - DNA, 33 bp, Homo sapien
ttctagtcctcaaatgacattacctgtaatcaa

SEQ ID NO: 617764 - DNA, 33 bp, Homo sapien
ttctagtcctcaaatgccattacctgtaatcaa

SEQ ID NO: 617765 - DNA, 33 bp, Homo sapien
tcagtctgtagaattacgaactgagactcctta

SEQ ID NO: 617766 - DNA, 33 bp, Homo sapien
tcagtctgtagaattatgaactgagactcctta

SEQ ID NO: 617767 - DNA, 33 bp, Homo sapien
tgattgtgtaactaacgctcagttggccattta

SEQ ID NO: 617768 - DNA, 33 bp, Homo sapien
tgattgtgtaactaactctcagttggccattta

SEQ ID NO: 617769 - DNA, 33 bp, Homo sapien
agtttgtgcactgaaacaatcatcgaacttcaa

SEQ ID NO: 617770 - DNA, 33 bp, Homo sapien
agtttgtgcactgaaagaatcatcgaacttcaa

SEQ ID NO: 617771 - DNA, 33 bp, Homo sapien
catacttgttaaaaatcacctcatttctttaca

SEQ ID NO: 617772 - DNA, 33 bp, Homo sapien
catacttgttaaaaattacctcatttctttaca

SEQ ID NO: 617773 - DNA, 33 bp, Homo sapien
actgtggttaataaaaacgtgtatgggccgggc

SEQ ID NO: 617774 - DNA, 33 bp, Homo sapien
actgtggttaataaaagcgtgtatgggccgggc

SEQ ID NO: 617775 - DNA, 33 bp, Homo sapien
gccacttatttttaaaattcagcttatctcatt

SEQ ID NO: 617776 - DNA, 33 bp, Homo sapien
gccacttatttttaaagttcagcttatctcatt

SEQ ID NO: 617777 - DNA, 33 bp, Homo sapien
agacgtgtaatttttacgagcatgaattgcatg

SEQ ID NO: 617778 - DNA, 33 bp, Homo sapien
agacgtgtaatttttatgagcatgaattgcatg

SEQ ID NO: 617779 - DNA, 33 bp, Homo sapien
acagaagagagttacacagcagatgtgagactg

SEQ ID NO: 617780 - DNA, 33 bp, Homo sapien
acagaagagagttacatagcagatgtgagactg

SEQ ID NO: 617781 - DNA, 33 bp, Homo sapien
tcattttatagggaaaagtagcaaggcccaggg

SEQ ID NO: 617782 - DNA, 33 bp, Homo sapien
tcattttatagggaaaggtagcaaggcccaggg

SEQ ID NO: 617783 - DNA, 33 bp, Homo sapien
tggtgcttcttacataggactaggctgccagcc

SEQ ID NO: 617784 - DNA, 33 bp, Homo sapien
tggtgcttcttacatatgactaggctgccagcc

SEQ ID NO: 617785 - DNA, 33 bp, Homo sapien
acattctcctagctcccacagctaagacccctg

SEQ ID NO: 617786 - DNA, 33 bp, Homo sapien
acattctcctagctcctacagctaagacccctg

SEQ ID NO: 617787 - DNA, 33 bp, Homo sapien
tgcttttgagtttcgacgtgcccctgctgcctg

SEQ ID NO: 617788 - DNA, 33 bp, Homo sapien
tgcttttgagtttcgatgtgcccctgctgcctg

SEQ ID NO: 617789 - DNA, 33 bp, Homo sapien
acaaacctggctcttacctttgatcttttcttc

SEQ ID NO: 617790 - DNA, 33 bp, Homo sapien
acaaacctggctcttatctttgatcttttcttc

SEQ ID NO: 617791 - DNA, 33 bp, Homo sapien
ggtggtcatttttttcaagttctctcaagtgtc

SEQ ID NO: 617792 - DNA, 33 bp, Homo sapien
ggtggtcatttttttcgagttctctcaagtgtc

SEQ ID NO: 617793 - DNA, 33 bp, Homo sapien
cacacatgtaagtgcacgtatatttgagttctc

SEQ ID NO: 617794 - DNA, 33 bp, Homo sapien
cacacatgtaagtgcatgtatatttgagttctc

SEQ ID NO: 617795 - DNA, 33 bp, Homo sapien
aattgaagggtgagcacaaccttgtgaaccagc

SEQ ID NO: 617796 - DNA, 33 bp, Homo sapien
aattgaagggtgagcataaccttgtgaaccagc

SEQ ID NO: 617797 - DNA, 33 bp, Homo sapien
atcaacatccacttgcacatctacagaaggctg

SEQ ID NO: 617798 - DNA, 33 bp, Homo sapien
atcaacatccacttgcgcatctacagaaggctg

SEQ ID NO: 617799 - DNA, 33 bp, Homo sapien
tgagctaatggggggtaaatgaacaacagataa

SEQ ID NO: 617800 - DNA, 33 bp, Homo sapien
tgagctaatggggggtgaatgaacaacagataa

SEQ ID NO: 617801 - DNA, 33 bp, Homo sapien
ttcacaggatttcttaccttcatcccttctttc

SEQ ID NO: 617802 - DNA, 33 bp, Homo sapien
ttcacaggatttcttatcttcatcccttctttc

SEQ ID NO: 617803 - DNA, 33 bp, Homo sapien
tcgcttttctaaatccgcactactatgcaaata

SEQ ID NO: 617804 - DNA, 33 bp, Homo sapien
tcgcttttctaaatcctcactactatgcaaata

SEQ ID NO: 617805 - DNA, 33 bp, Homo sapien
caccacacctggcctagagaaagaatttttctt

SEQ ID NO: 617806 - DNA, 33 bp, Homo sapien
caccacacctggcctatagaaagaatttttctt

SEQ ID NO: 617807 - DNA, 33 bp, Homo sapien
ttctaaattcagattacaataaagcaaaaatca

SEQ ID NO: 617808 - DNA, 33 bp, Homo sapien
ttctaaattcagattataataaagcaaaaatca

SEQ ID NO: 617809 - DNA, 33 bp, Homo sapien
tagaccatgatgaaaacgtttttgctttcatgg

SEQ ID NO: 617810 - DNA, 33 bp, Homo sapien
tagaccatgatgaaaatgtttttgctttcatgg

SEQ ID NO: 617811 - DNA, 33 bp, Homo sapien
tgacttatagaccctacaactacagatttgagt

SEQ ID NO: 617812 - DNA, 33 bp, Homo sapien
tgacttatagaccctagaactacagatttgagt

SEQ ID NO: 617813 - DNA, 33 bp, Homo sapien
ttgcctatagaatacaagttcccagactgtctt

SEQ ID NO: 617814 - DNA, 33 bp, Homo sapien
ttgcctatagaatacaggttcccagactgtctt

SEQ ID NO: 617815 - DNA, 33 bp, Homo sapien
cctagtgagttttagcaagtaccaaaatagaga

SEQ ID NO: 617816 - DNA, 33 bp, Homo sapien
cctagtgagttttagcgagtaccaaaatagaga

SEQ ID NO: 617817 - DNA, 33 bp, Homo sapien
tactgctttgatttccaaaattactgagattac

SEQ ID NO: 617818 - DNA, 33 bp, Homo sapien
tactgctttgatttcccaaattactgagattac

SEQ ID NO: 617819 - DNA, 33 bp, Homo sapien
ctttttcatgaataccaaatcactatcacataa

SEQ ID NO: 617820 - DNA, 33 bp, Homo sapien
ctttttcatgaataccgaatcactatcacataa

SEQ ID NO: 617821 - DNA, 33 bp, Homo sapien
atgccaatgtttgatacgtgttacttaaattta

SEQ ID NO: 617822 - DNA, 33 bp, Homo sapien
atgccaatgtttgatatgtgttacttaaattta

SEQ ID NO: 617823 - DNA, 33 bp, Homo sapien
ttttcaggaacatgaaaaattggctgaagaaag

SEQ ID NO: 617824 - DNA, 33 bp, Homo sapien
ttttcaggaacatgaataattggctgaagaaag

SEQ ID NO: 617825 - DNA, 33 bp, Homo sapien
tcagtgtttatctgcaaaattggcacaaataac

SEQ ID NO: 617826 - DNA, 33 bp, Homo sapien
tcagtgtttatctgcataattggcacaaataac

SEQ ID NO: 617827 - DNA, 33 bp, Homo sapien
gaatctcaagaggtaaagcatggatattgtttt

SEQ ID NO: 617828 - DNA, 33 bp, Homo sapien
gaatctcaagaggtaatgcatggatattgtttt

SEQ ID NO: 617829 - DNA, 33 bp, Homo sapien
tgtgccattggcttagaaacagagcagtgggca

SEQ ID NO: 617830 - DNA, 33 bp, Homo sapien
tgtgccattggcttaggaacagagcagtgggca

SEQ ID NO: 617831 - DNA, 33 bp, Homo sapien
gcagtggattgtaatcagatacacaggaaacac

SEQ ID NO: 617832 - DNA, 33 bp, Homo sapien
gcagtggattgtaatctgatacacaggaaacac

SEQ ID NO: 617833 - DNA, 33 bp, Homo sapien
ccagcaggcaaaaaaaagagtcatgttcttggc

SEQ ID NO: 617834 - DNA, 33 bp, Homo sapien
ccagcaggcaaaaaaaggagtcatgttcttggc

SEQ ID NO: 617835 - DNA, 33 bp, Homo sapien
acacccaaaaatgggaaaaggaagaatagactc

SEQ ID NO: 617836 - DNA, 33 bp, Homo sapien
acacccaaaaatgggagaaggaagaatagactc

SEQ ID NO: 617837 - DNA, 33 bp, Homo sapien
tcatgtcaagctaaagccgggagctaaaagtgg

SEQ ID NO: 617838 - DNA, 33 bp, Homo sapien
tcatgtcaagctaaaggcgggagctaaaagtgg

SEQ ID NO: 617839 - DNA, 33 bp, Homo sapien
gcaatggaaaggagtccgacacatgaaacaact

SEQ ID NO: 617840 - DNA, 33 bp, Homo sapien
gcaatggaaaggagtctgacacatgaaacaact

SEQ ID NO: 617841 - DNA, 33 bp, Homo sapien
tgagttgtaggcatgcccatttttccaactaag

SEQ ID NO: 617842 - DNA, 33 bp, Homo sapien
tgagttgtaggcatgctcatttttccaactaag

SEQ ID NO: 617843 - DNA, 33 bp, Homo sapien
agcaatacgtaatgagaaaatagacataacaag

SEQ ID NO: 617844 - DNA, 33 bp, Homo sapien
agcaatacgtaatgaggaaatagacataacaag

SEQ ID NO: 617845 - DNA, 33 bp, Homo sapien
ctgctgcattgtggaccggtggagaagctgtga

SEQ ID NO: 617846 - DNA, 33 bp, Homo sapien
ctgctgcattgtggactggtggagaagctgtga

SEQ ID NO: 617847 - DNA, 33 bp, Homo sapien
gaaggcatagaaagagacccaggtttccagtca

SEQ ID NO: 617848 - DNA, 33 bp, Homo sapien
gaaggcatagaaagagtcccaggtttccagtca

SEQ ID NO: 617849 - DNA, 33 bp, Homo sapien
aaatggcatcagctacagccactgtttctctaa

SEQ ID NO: 617850 - DNA, 33 bp, Homo sapien
aaatggcatcagctacggccactgtttctctaa

SEQ ID NO: 617851 - DNA, 33 bp, Homo sapien
agagggagagacgaagcaagattggctaatgtt

SEQ ID NO: 617852 - DNA, 33 bp, Homo sapien
agagggagagacgaaggaagattggctaatgtt

SEQ ID NO: 617853 - DNA, 33 bp, Homo sapien
tgagctcacattcgtaacaaagtaagtatttat

SEQ ID NO: 617854 - DNA, 33 bp, Homo sapien
tgagctcacattcgtagcaaagtaagtatttat

SEQ ID NO: 617855 - DNA, 33 bp, Homo sapien
gtcacaattaatgaaccactgttgatacattat

SEQ ID NO: 617856 - DNA, 33 bp, Homo sapien
gtcacaattaatgaactactgttgatacattat

SEQ ID NO: 617857 - DNA, 33 bp, Homo sapien
cagctccaacctccacagactgcgtggtgacca

SEQ ID NO: 617858 - DNA, 33 bp, Homo sapien
cagctccaacctccacggactgcgtggtgacca

SEQ ID NO: 617859 - DNA, 33 bp, Homo sapien
tgagctcctgggccaccgggactatgcacttcc

SEQ ID NO: 617860 - DNA, 33 bp, Homo sapien
tgagctcctgggccactgggactatgcacttcc

SEQ ID NO: 617861 - DNA, 33 bp, Homo sapien
gagtggttctcagacactggtgtgcatcagaat

SEQ ID NO: 617862 - DNA, 33 bp, Homo sapien
gagtggttctcagacattggtgtgcatcagaat

SEQ ID NO: 617863 - DNA, 33 bp, Homo sapien
attaggccaggacatgaataatggttttgataa

SEQ ID NO: 617864 - DNA, 33 bp, Homo sapien
attaggccaggacatggataatggttttgataa

SEQ ID NO: 617865 - DNA, 33 bp, Homo sapien
gggtggtgtctggacaaccacagtgggccacgg

SEQ ID NO: 617866 - DNA, 33 bp, Homo sapien
gggtggtgtctggacagccacagtgggccacgg

SEQ ID NO: 617867 - DNA, 33 bp, Homo sapien
aacagaggctttgagaagttgttattggccaag

SEQ ID NO: 617868 - DNA, 33 bp, Homo sapien
aacagaggctttgagaggttgttattggccaag

SEQ ID NO: 617869 - DNA, 33 bp, Homo sapien
gggttttgtacaataccctgtaatcaaatacat

SEQ ID NO: 617870 - DNA, 33 bp, Homo sapien
gggttttgtacaatactctgtaatcaaatacat

SEQ ID NO: 617871 - DNA, 33 bp, Homo sapien
tgtgttcccatacttaactcctacagactgcag

SEQ ID NO: 617872 - DNA, 33 bp, Homo sapien
tgtgttcccatacttacctcctacagactgcag

SEQ ID NO: 617873 - DNA, 33 bp, Homo sapien
catccagaaggattccacttcagcccccagcac

SEQ ID NO: 617874 - DNA, 33 bp, Homo sapien
catccagaaggattccgcttcagcccccagcac

SEQ ID NO: 617875 - DNA, 33 bp, Homo sapien
actagcactgtacggacattcccatttctctgt

SEQ ID NO: 617876 - DNA, 33 bp, Homo sapien
actagcactgtacggagattcccatttctctgt

SEQ ID NO: 617877 - DNA, 33 bp, Homo sapien
ctaagtcaatgccaagaaaagtttggaaagact

SEQ ID NO: 617878 - DNA, 33 bp, Homo sapien
ctaagtcaatgccaagtaaagtttggaaagact

SEQ ID NO: 617879 - DNA, 33 bp, Homo sapien
ccgcacagtttctgggaccaggcctgtgttgac

SEQ ID NO: 617880 - DNA, 33 bp, Homo sapien
ccgcacagtttctggggccaggcctgtgttgac

SEQ ID NO: 617881 - DNA, 33 bp, Homo sapien
ggtcccagttaacctacgctgtgccagttccct

SEQ ID NO: 617882 - DNA, 33 bp, Homo sapien
ggtcccagttaacctatgctgtgccagttccct

SEQ ID NO: 617883 - DNA, 33 bp, Homo sapien
agcaaggaggggaagacagactctgaaggagca

SEQ ID NO: 617884 - DNA, 33 bp, Homo sapien
agcaaggaggggaagagagactctgaaggagca

SEQ ID NO: 617885 - DNA, 33 bp, Homo sapien
gttattgattagagcccacgggaagtggtaggc

SEQ ID NO: 617886 - DNA, 33 bp, Homo sapien
gttattgattagagccgacgggaagtggtaggc

SEQ ID NO: 617887 - DNA, 33 bp, Homo sapien
agatgggattcaagcccgaggtgtgtctgcaga

SEQ ID NO: 617888 - DNA, 33 bp, Homo sapien
agatgggattcaagcctgaggtgtgtctgcaga

SEQ ID NO: 617889 - DNA, 33 bp, Homo sapien
tcagttgctgacatcaatgaaacaggaaggccc

SEQ ID NO: 617890 - DNA, 33 bp, Homo sapien
tcagttgctgacatcagtgaaacaggaaggccc

SEQ ID NO: 617891 - DNA, 33 bp, Homo sapien
atttatatcagctaaaaagcaggaacaactcaa

SEQ ID NO: 617892 - DNA, 33 bp, Homo sapien
atttatatcagctaaacagcaggaacaactcaa

SEQ ID NO: 617893 - DNA, 33 bp, Homo sapien
cctgctgtgtggcagacgctcctgcaccgaatt

SEQ ID NO: 617894 - DNA, 33 bp, Homo sapien
cctgctgtgtggcagatgctcctgcaccgaatt

SEQ ID NO: 617895 - DNA, 33 bp, Homo sapien
cctcgggaccagaggaacggcccaaacaaccct

SEQ ID NO: 617896 - DNA, 33 bp, Homo sapien
cctcgggaccagaggagcggcccaaacaaccct

SEQ ID NO: 617897 - DNA, 33 bp, Homo sapien
gcagggagctctagtccaggagagagacatgag

SEQ ID NO: 617898 - DNA, 33 bp, Homo sapien
gcagggagctctagtcgaggagagagacatgag

SEQ ID NO: 617899 - DNA, 33 bp, Homo sapien
tctgtatgtaactgcaataatttgtgtgacttg

SEQ ID NO: 617900 - DNA, 33 bp, Homo sapien
tctgtatgtaactgcagtaatttgtgtgacttg

SEQ ID NO: 617901 - DNA, 33 bp, Homo sapien
ttccttgtttggtttgcagtaggcagctgtagt

SEQ ID NO: 617902 - DNA, 33 bp, Homo sapien
ttccttgtttggtttgtagtaggcagctgtagt

SEQ ID NO: 617903 - DNA, 33 bp, Homo sapien
agctgttgtggtcagcaagggcttctgtgtcca

SEQ ID NO: 617904 - DNA, 33 bp, Homo sapien
agctgttgtggtcagcgagggcttctgtgtcca

SEQ ID NO: 617905 - DNA, 33 bp, Homo sapien
ttcttcagcaaacgtgaacaaaagtgagcacag

SEQ ID NO: 617906 - DNA, 33 bp, Homo sapien
ttcttcagcaaacgtggacaaaagtgagcacag

SEQ ID NO: 617907 - DNA, 33 bp, Homo sapien
ccctgctgggtggacaatactcccattttatga

SEQ ID NO: 617908 - DNA, 33 bp, Homo sapien
ccctgctgggtggacagtactcccattttatga

SEQ ID NO: 617909 - DNA, 33 bp, Homo sapien
tgtgatgacccctacccactgcactgctattct

SEQ ID NO: 617910 - DNA, 33 bp, Homo sapien
tgtgatgacccctacctactgcactgctattct

SEQ ID NO: 617911 - DNA, 33 bp, Homo sapien
caaggcaaaaaagaaactcaagtcagagcagct

SEQ ID NO: 617912 - DNA, 33 bp, Homo sapien
caaggcaaaaaagaaattcaagtcagagcagct

SEQ ID NO: 617913 - DNA, 33 bp, Homo sapien
ctctgtattttttctacattccctcagtttctc

SEQ ID NO: 617914 - DNA, 33 bp, Homo sapien
ctctgtattttttctagattccctcagtttctc

SEQ ID NO: 617915 - DNA, 33 bp, Homo sapien
gtcactggcttagacaccgtggcagggccgggg

SEQ ID NO: 617916 - DNA, 33 bp, Homo sapien
gtcactggcttagacatcgtggcagggccgggg

SEQ ID NO: 617917 - DNA, 33 bp, Homo sapien
ttagcaaatgtcctcaaatcccaaatcagcttg

SEQ ID NO: 617918 - DNA, 33 bp, Homo sapien
ttagcaaatgtcctcagatcccaaatcagcttg

SEQ ID NO: 617919 - DNA, 33 bp, Homo sapien
ctccattgctcctaaaatctagctcatctgcca

SEQ ID NO: 617920 - DNA, 33 bp, Homo sapien
ctccattgctcctaaactctagctcatctgcca

SEQ ID NO: 617921 - DNA, 33 bp, Homo sapien
aggcctcagagctcacccccttctcagccctga

SEQ ID NO: 617922 - DNA, 33 bp, Homo sapien
aggcctcagagctcactcccttctcagccctga

SEQ ID NO: 617923 - DNA, 33 bp, Homo sapien
tcacagggctggtgacaaccgaatgaaaggaaa

SEQ ID NO: 617924 - DNA, 33 bp, Homo sapien
tcacagggctggtgacgaccgaatgaaaggaaa

SEQ ID NO: 617925 - DNA, 33 bp, Homo sapien
atagatcagatagtaacagcacctacctcatgg

SEQ ID NO: 617926 - DNA, 33 bp, Homo sapien
atagatcagatagtaatagcacctacctcatgg

SEQ ID NO: 617927 - DNA, 33 bp, Homo sapien
actcacgctcacgcacaaggggagggttcctgt

SEQ ID NO: 617928 - DNA, 33 bp, Homo sapien
actcacgctcacgcacgaggggagggttcctgt

SEQ ID NO: 617929 - DNA, 33 bp, Homo sapien
cccactggtggcaagaagcgggaaacgggtgtt

SEQ ID NO: 617930 - DNA, 33 bp, Homo sapien
cccactggtggcaagaggcgggaaacgggtgtt

SEQ ID NO: 617931 - DNA, 33 bp, Homo sapien
caactattctgctgaggacaagtttctcaaggc

SEQ ID NO: 617932 - DNA, 33 bp, Homo sapien
caactattctgctgagtacaagtttctcaaggc

SEQ ID NO: 617933 - DNA, 33 bp, Homo sapien
aactagtcccacatcccgaaccagacaacggca

SEQ ID NO: 617934 - DNA, 33 bp, Homo sapien
aactagtcccacatcctgaaccagacaacggca

SEQ ID NO: 617935 - DNA, 33 bp, Homo sapien
cgccgttttaaacaacagaatatggcatcaggc

SEQ ID NO: 617936 - DNA, 33 bp, Homo sapien
cgccgttttaaacaacggaatatggcatcaggc

SEQ ID NO: 617937 - DNA, 33 bp, Homo sapien
ccccacacaagggccacgagaggtgagctgagc

SEQ ID NO: 617938 - DNA, 33 bp, Homo sapien
ccccacacaagggccatgagaggtgagctgagc

SEQ ID NO: 617939 - DNA, 33 bp, Homo sapien
tgtgggaccaagcctcacatggtgcataaatga

SEQ ID NO: 617940 - DNA, 33 bp, Homo sapien
tgtgggaccaagcctcgcatggtgcataaatga

SEQ ID NO: 617941 - DNA, 33 bp, Homo sapien
gactaatccttgaggaactcccaacctacaaag

SEQ ID NO: 617942 - DNA, 33 bp, Homo sapien
gactaatccttgaggagctcccaacctacaaag

SEQ ID NO: 617943 - DNA, 33 bp, Homo sapien
gtgttcggtgcatcgacgtgaattggggaggag

SEQ ID NO: 617944 - DNA, 33 bp, Homo sapien
gtgttcggtgcatcgatgtgaattggggaggag

SEQ ID NO: 617945 - DNA, 33 bp, Homo sapien
ctctcacaggggcaacaaatgcatctgaaagga

SEQ ID NO: 617946 - DNA, 33 bp, Homo sapien
ctctcacaggggcaacgaatgcatctgaaagga

SEQ ID NO: 617947 - DNA, 33 bp, Homo sapien
ccctgaagacacagaacgtgaggtgtgctgcca

SEQ ID NO: 617948 - DNA, 33 bp, Homo sapien
ccctgaagacacagaatgtgaggtgtgctgcca

SEQ ID NO: 617949 - DNA, 33 bp, Homo sapien
aatgagagccttaagacacaggcagtgaatttc

SEQ ID NO: 617950 - DNA, 33 bp, Homo sapien
aatgagagccttaagatacaggcagtgaatttc

SEQ ID NO: 617951 - DNA, 33 bp, Homo sapien
cccacaccaagaatccacacagatatttatggg

SEQ ID NO: 617952 - DNA, 33 bp, Homo sapien
cccacaccaagaatccgcacagatatttatggg

SEQ ID NO: 617953 - DNA, 33 bp, Homo sapien
aggatgatagtattagacctcattggggttgtc

SEQ ID NO: 617954 - DNA, 33 bp, Homo sapien
aggatgatagtattaggcctcattggggttgtc

SEQ ID NO: 617955 - DNA, 33 bp, Homo sapien
aacaactggacctgacacaaagtgagccctcct

SEQ ID NO: 617956 - DNA, 33 bp, Homo sapien
aacaactggacctgacgcaaagtgagccctcct

SEQ ID NO: 617957 - DNA, 33 bp, Homo sapien
tgtggttatcggccaaagcgaggctctcgaggc

SEQ ID NO: 617958 - DNA, 33 bp, Homo sapien
tgtggttatcggccaatgcgaggctctcgaggc

SEQ ID NO: 617959 - DNA, 33 bp, Homo sapien
cctcctgctaggctaaatattaactcctttatt

SEQ ID NO: 617960 - DNA, 33 bp, Homo sapien
cctcctgctaggctaagtattaactcctttatt

SEQ ID NO: 617961 - DNA, 33 bp, Homo sapien
ccactgagtcaagaccggagtgacgagaagtct

SEQ ID NO: 617962 - DNA, 33 bp, Homo sapien
ccactgagtcaagacctgagtgacgagaagtct

SEQ ID NO: 617963 - DNA, 33 bp, Homo sapien
aagtcaaccagcccaagaatctacctccatctc

SEQ ID NO: 617964 - DNA, 33 bp, Homo sapien
aagtcaaccagcccaataatctacctccatctc

SEQ ID NO: 617965 - DNA, 33 bp, Homo sapien
ttgggaggtctgggtaaacccgagaatgtgcat

SEQ ID NO: 617966 - DNA, 33 bp, Homo sapien
ttgggaggtctgggtagacccgagaatgtgcat

SEQ ID NO: 617967 - DNA, 33 bp, Homo sapien
tcactgagcaggaagcaactcggcctctgagga

SEQ ID NO: 617968 - DNA, 33 bp, Homo sapien
tcactgagcaggaagcgactcggcctctgagga

SEQ ID NO: 617969 - DNA, 33 bp, Homo sapien
agcacgcctgtcgggacgggcaatttgcagagg

SEQ ID NO: 617970 - DNA, 33 bp, Homo sapien
agcacgcctgtcgggatgggcaatttgcagagg

SEQ ID NO: 617971 - DNA, 33 bp, Homo sapien
cagtaaagctgttacaaaataactttgtcatat

SEQ ID NO: 617972 - DNA, 33 bp, Homo sapien
cagtaaagctgttacagaataactttgtcatat

SEQ ID NO: 617973 - DNA, 33 bp, Homo sapien
cagaccagtgtccaataaacatttgtagaatta

SEQ ID NO: 617974 - DNA, 33 bp, Homo sapien
cagaccagtgtccaatgaacatttgtagaatta

SEQ ID NO: 617975 - DNA, 33 bp, Homo sapien
gacttgggtggttttccagaatggcttaaatca

SEQ ID NO: 617976 - DNA, 33 bp, Homo sapien
gacttgggtggttttctagaatggcttaaatca

SEQ ID NO: 617977 - DNA, 33 bp, Homo sapien
atcttggcaagaggaaacatgagtgctatgtgg

SEQ ID NO: 617978 - DNA, 33 bp, Homo sapien
atcttggcaagaggaagcatgagtgctatgtgg

SEQ ID NO: 617979 - DNA, 33 bp, Homo sapien
tttgtgttcaagaaggccagagtgagatgtcag

SEQ ID NO: 617980 - DNA, 33 bp, Homo sapien
tttgtgttcaagaaggtcagagtgagatgtcag

SEQ ID NO: 617981 - DNA, 33 bp, Homo sapien
ctggcctcagtgacgacgtgaacctcagtggtg

SEQ ID NO: 617982 - DNA, 33 bp, Homo sapien
ctggcctcagtgacgatgtgaacctcagtggtg

SEQ ID NO: 617983 - DNA, 33 bp, Homo sapien
ggttcaatatggaagaagcagcaggtaaacaca

SEQ ID NO: 617984 - DNA, 33 bp, Homo sapien
ggttcaatatggaagaggcagcaggtaaacaca

SEQ ID NO: 617985 - DNA, 33 bp, Homo sapien
tatttgtgccccttcacaatttatttcaaacct

SEQ ID NO: 617986 - DNA, 33 bp, Homo sapien
tatttgtgccccttcataatttatttcaaacct

SEQ ID NO: 617987 - DNA, 33 bp, Homo sapien
ggtgtgagtcgggtgaccttcatttcccacgtg

SEQ ID NO: 617988 - DNA, 33 bp, Homo sapien
ggtgtgagtcgggtgatcttcatttcccacgtg

SEQ ID NO: 617989 - DNA, 33 bp, Homo sapien
ccagacggacaaaaataagacatctcacaggac

SEQ ID NO: 617990 - DNA, 33 bp, Homo sapien
ccagacggacaaaaatgagacatctcacaggac

SEQ ID NO: 617991 - DNA, 33 bp, Homo sapien
ggctctgttctcagaaatcttggttactagaaa

SEQ ID NO: 617992 - DNA, 33 bp, Homo sapien
ggctctgttctcagaagtcttggttactagaaa

SEQ ID NO: 617993 - DNA, 33 bp, Homo sapien
agggacaagtttgtgaaaacagggctcatggca

SEQ ID NO: 617994 - DNA, 33 bp, Homo sapien
agggacaagtttgtgagaacagggctcatggca

SEQ ID NO: 617995 - DNA, 33 bp, Homo sapien
gtctttcactaaactacgatttccatgaagaca

SEQ ID NO: 617996 - DNA, 33 bp, Homo sapien
gtctttcactaaactatgatttccatgaagaca

SEQ ID NO: 617997 - DNA, 33 bp, Homo sapien
agtcatcaacgtgggacagagcagcttgtgttg

SEQ ID NO: 617998 - DNA, 33 bp, Homo sapien
agtcatcaacgtgggagagagcagcttgtgttg

SEQ ID NO: 617999 - DNA, 33 bp, Homo sapien
tcctcatttttctcccaaagtccactcactcct

SEQ ID NO: 618000 - DNA, 33 bp, Homo sapien
tcctcatttttctccccaagtccactcactcct

SEQ ID NO: 618001 - DNA, 33 bp, Homo sapien
cgttcagaggcccaaacttgactgtcagagctg

SEQ ID NO: 618002 - DNA, 33 bp, Homo sapien
cgttcagaggcccaaagttgactgtcagagctg

SEQ ID NO: 618003 - DNA, 33 bp, Homo sapien
ccacccaacagaaatgaaccttctctccctgcc

SEQ ID NO: 618004 - DNA, 33 bp, Homo sapien
ccacccaacagaaatggaccttctctccctgcc

SEQ ID NO: 618005 - DNA, 33 bp, Homo sapien
tgagcaggagggaatcccaggcgggtgcagacc

SEQ ID NO: 618006 - DNA, 33 bp, Homo sapien
tgagcaggagggaatctcaggcgggtgcagacc

SEQ ID NO: 618007 - DNA, 33 bp, Homo sapien
tcaaaaataagacaccagcacatacatgtttat

SEQ ID NO: 618008 - DNA, 33 bp, Homo sapien
tcaaaaataagacaccggcacatacatgtttat

SEQ ID NO: 618009 - DNA, 33 bp, Homo sapien
tcagactccccacagacactgcatcagatttga

SEQ ID NO: 618010 - DNA, 33 bp, Homo sapien
tcagactccccacagatactgcatcagatttga

SEQ ID NO: 618011 - DNA, 33 bp, Homo sapien
ggcccagtagtgcctccgaaagcaggctgaggg

SEQ ID NO: 618012 - DNA, 33 bp, Homo sapien
ggcccagtagtgcctctgaaagcaggctgaggg

SEQ ID NO: 618013 - DNA, 33 bp, Homo sapien
agatttcacactcattcaacagtcttcattgag

SEQ ID NO: 618014 - DNA, 33 bp, Homo sapien
agatttcacactcatttaacagtcttcattgag

SEQ ID NO: 618015 - DNA, 33 bp, Homo sapien
actcttttgattccacagtgctaagaaatgtcc

SEQ ID NO: 618016 - DNA, 33 bp, Homo sapien
actcttttgattccaccgtgctaagaaatgtcc

SEQ ID NO: 618017 - DNA, 33 bp, Homo sapien
gcaaatgctttcctgacgatccgctggagtgaa

SEQ ID NO: 618018 - DNA, 33 bp, Homo sapien
gcaaatgctttcctgatgatccgctggagtgaa

SEQ ID NO: 618019 - DNA, 33 bp, Homo sapien
gagccagttgtcattccgaagaaaggatccctg

SEQ ID NO: 618020 - DNA, 33 bp, Homo sapien
gagccagttgtcattctgaagaaaggatccctg

SEQ ID NO: 618021 - DNA, 33 bp, Homo sapien
tgaagctctctatttaggtctcttaggatctat

SEQ ID NO: 618022 - DNA, 33 bp, Homo sapien
tgaagctctctatttatgtctcttaggatctat

SEQ ID NO: 618023 - DNA, 33 bp, Homo sapien
ggaagccaggactgcactgacccagaacccaca

SEQ ID NO: 618024 - DNA, 33 bp, Homo sapien
ggaagccaggactgcattgacccagaacccaca

SEQ ID NO: 618025 - DNA, 33 bp, Homo sapien
cctgtccatttttttaaacagtggaaatgacag

SEQ ID NO: 618026 - DNA, 33 bp, Homo sapien
cctgtccatttttttatacagtggaaatgacag

SEQ ID NO: 618027 - DNA, 33 bp, Homo sapien
gtattatctggttgccacacagcccccagtccc

SEQ ID NO: 618028 - DNA, 33 bp, Homo sapien
gtattatctggttgccgcacagcccccagtccc

SEQ ID NO: 618029 - DNA, 33 bp, Homo sapien
ctgagacaggtcagaagcagatcccccgactcc

SEQ ID NO: 618030 - DNA, 33 bp, Homo sapien
ctgagacaggtcagaatcagatcccccgactcc

SEQ ID NO: 618031 - DNA, 33 bp, Homo sapien
caggtcctaacaagtgcactagagcaaggccaa

SEQ ID NO: 618032 - DNA, 33 bp, Homo sapien
caggtcctaacaagtgtactagagcaaggccaa

SEQ ID NO: 618033 - DNA, 33 bp, Homo sapien
ggtggctctccataagaaggtgggtcctcagca

SEQ ID NO: 618034 - DNA, 33 bp, Homo sapien
ggtggctctccataaggaggtgggtcctcagca

SEQ ID NO: 618035 - DNA, 33 bp, Homo sapien
cacttgaacgggaaacacttgctccctgcacac

SEQ ID NO: 618036 - DNA, 33 bp, Homo sapien
cacttgaacgggaaacgcttgctccctgcacac

SEQ ID NO: 618037 - DNA, 33 bp, Homo sapien
agaggccgctcaagtccaagtcagtgaggggac

SEQ ID NO: 618038 - DNA, 33 bp, Homo sapien
agaggccgctcaagtcgaagtcagtgaggggac

SEQ ID NO: 618039 - DNA, 33 bp, Homo sapien
ctgcctgcagtttccacgggcctggctttatct

SEQ ID NO: 618040 - DNA, 33 bp, Homo sapien
ctgcctgcagtttccaggggcctggctttatct

SEQ ID NO: 618041 - DNA, 33 bp, Homo sapien
atgaaagatcatattaaacctgctgaaatccaa

SEQ ID NO: 618042 - DNA, 33 bp, Homo sapien
atgaaagatcatattacacctgctgaaatccaa

SEQ ID NO: 618043 - DNA, 33 bp, Homo sapien
cgtggggcatccggtacgctttgctgatggaat

SEQ ID NO: 618044 - DNA, 33 bp, Homo sapien
cgtggggcatccggtatgctttgctgatggaat

SEQ ID NO: 618045 - DNA, 33 bp, Homo sapien
cccctctgacctcatacgttactgcacttcctc

SEQ ID NO: 618046 - DNA, 33 bp, Homo sapien
cccctctgacctcatatgttactgcacttcctc

SEQ ID NO: 618047 - DNA, 33 bp, Homo sapien
gatgtgacagtccacgaaagtgagctggagtca

SEQ ID NO: 618048 - DNA, 33 bp, Homo sapien
gatgtgacagtccacggaagtgagctggagtca

SEQ ID NO: 618049 - DNA, 33 bp, Homo sapien
tccaagaactacgttaacaaatgactgtagtcc

SEQ ID NO: 618050 - DNA, 33 bp, Homo sapien
tccaagaactacgttagcaaatgactgtagtcc

SEQ ID NO: 618051 - DNA, 33 bp, Homo sapien
gtgtagtggacggacacagaggcttcagccacg

SEQ ID NO: 618052 - DNA, 33 bp, Homo sapien
gtgtagtggacggacagagaggcttcagccacg

SEQ ID NO: 618053 - DNA, 33 bp, Homo sapien
aggatgttctgcttcaataaagtggctcacctg

SEQ ID NO: 618054 - DNA, 33 bp, Homo sapien
aggatgttctgcttcagtaaagtggctcacctg

SEQ ID NO: 618055 - DNA, 33 bp, Homo sapien
caagttctccaatcaaacccctcactactggga

SEQ ID NO: 618056 - DNA, 33 bp, Homo sapien
caagttctccaatcaaccccctcactactggga

SEQ ID NO: 618057 - DNA, 33 bp, Homo sapien
aggatcgtctgtctgtaaacaagaccctgtgtg

SEQ ID NO: 618058 - DNA, 33 bp, Homo sapien
aggatcgtctgtctgtgaacaagaccctgtgtg

SEQ ID NO: 618059 - DNA, 33 bp, Homo sapien
cactgtgtatctgctacctagggccactatgat

SEQ ID NO: 618060 - DNA, 33 bp, Homo sapien
cactgtgtatctgctagctagggccactatgat

SEQ ID NO: 618061 - DNA, 33 bp, Homo sapien
agcggggaaatgagttcaaagcagagtattacc

SEQ ID NO: 618062 - DNA, 33 bp, Homo sapien
agcggggaaatgagttgaaagcagagtattacc

SEQ ID NO: 618063 - DNA, 33 bp, Homo sapien
aagagggtggagggaaagaaagttgcaaccctc

SEQ ID NO: 618064 - DNA, 33 bp, Homo sapien
aagagggtggagggaaggaaagttgcaaccctc

SEQ ID NO: 618065 - DNA, 33 bp, Homo sapien
acctggtaacctggagaaactgtcccacccagc

SEQ ID NO: 618066 - DNA, 33 bp, Homo sapien
acctggtaacctggaggaactgtcccacccagc

SEQ ID NO: 618067 - DNA, 33 bp, Homo sapien
agtagggcccttgaaacacactgaacctgctgg

SEQ ID NO: 618068 - DNA, 33 bp, Homo sapien
agtagggcccttgaaagacactgaacctgctgg

SEQ ID NO: 618069 - DNA, 33 bp, Homo sapien
gactgaaatcacacaaagtatgatctctgaaca

SEQ ID NO: 618070 - DNA, 33 bp, Homo sapien
gactgaaatcacacaaggtatgatctctgaaca

SEQ ID NO: 618071 - DNA, 33 bp, Homo sapien
tccattgttgatgagcaataatagcaaccttga

SEQ ID NO: 618072 - DNA, 33 bp, Homo sapien
tccattgttgatgagctataatagcaaccttga

SEQ ID NO: 618073 - DNA, 33 bp, Homo sapien
aaagtgtaatattgtacgaatgaatgtctctca

SEQ ID NO: 618074 - DNA, 33 bp, Homo sapien
aaagtgtaatattgtatgaatgaatgtctctca

SEQ ID NO: 618075 - DNA, 33 bp, Homo sapien
acaagacacaaaagaccggatcagctgtcaaaa

SEQ ID NO: 618076 - DNA, 33 bp, Homo sapien
acaagacacaaaagactggatcagctgtcaaaa

SEQ ID NO: 618077 - DNA, 33 bp, Homo sapien
acctacttgtttccgacgtttggtttttgcctc

SEQ ID NO: 618078 - DNA, 33 bp, Homo sapien
acctacttgtttccgatgtttggtttttgcctc

SEQ ID NO: 618079 - DNA, 33 bp, Homo sapien
caaggtgatttatgcccaaggaacatgggataa

SEQ ID NO: 618080 - DNA, 33 bp, Homo sapien
caaggtgatttatgcctaaggaacatgggataa

SEQ ID NO: 618081 - DNA, 33 bp, Homo sapien
ctcggagcagcagggccagaacttccgacccag

SEQ ID NO: 618082 - DNA, 33 bp, Homo sapien
ctcggagcagcagggcgagaacttccgacccag

SEQ ID NO: 618083 - DNA, 33 bp, Homo sapien
ggacgtgtcttagaaacgagggacaattttaaa

SEQ ID NO: 618084 - DNA, 33 bp, Homo sapien
ggacgtgtcttagaaatgagggacaattttaaa

SEQ ID NO: 618085 - DNA, 33 bp, Homo sapien
ctccatctctgcactaactccttgctccctgag

SEQ ID NO: 618086 - DNA, 33 bp, Homo sapien
ctccatctctgcactacctccttgctccctgag

SEQ ID NO: 618087 - DNA, 33 bp, Homo sapien
atgcacatcctataaagcctaacgaggtcaaag

SEQ ID NO: 618088 - DNA, 33 bp, Homo sapien
atgcacatcctataaatcctaacgaggtcaaag

SEQ ID NO: 618089 - DNA, 33 bp, Homo sapien
tggttgtacacatctacgaatactctaaaggtc

SEQ ID NO: 618090 - DNA, 33 bp, Homo sapien
tggttgtacacatctatgaatactctaaaggtc

SEQ ID NO: 618091 - DNA, 33 bp, Homo sapien
taaaggtcatagagtgccacactttaaaatggt

SEQ ID NO: 618092 - DNA, 33 bp, Homo sapien
taaaggtcatagagtggcacactttaaaatggt

SEQ ID NO: 618093 - DNA, 33 bp, Homo sapien
cacgttctgtcctccacgcttcctgaatttttt

SEQ ID NO: 618094 - DNA, 33 bp, Homo sapien
cacgttctgtcctccatgcttcctgaatttttt

SEQ ID NO: 618095 - DNA, 33 bp, Homo sapien
gcctgaatatgttcagactatttccaagataca

SEQ ID NO: 618096 - DNA, 33 bp, Homo sapien
gcctgaatatgttcaggctatttccaagataca

SEQ ID NO: 618097 - DNA, 33 bp, Homo sapien
taataggtgagttgaaaacattgacatttattg

SEQ ID NO: 618098 - DNA, 33 bp, Homo sapien
taataggtgagttgaagacattgacatttattg

SEQ ID NO: 618099 - DNA, 33 bp, Homo sapien
ataaccaaatttgggactatattggagaggtct

SEQ ID NO: 618100 - DNA, 33 bp, Homo sapien
ataaccaaatttgggattatattggagaggtct

SEQ ID NO: 618101 - DNA, 33 bp, Homo sapien
atgaattctgccacagccagggtacaatctaaa

SEQ ID NO: 618102 - DNA, 33 bp, Homo sapien
atgaattctgccacagtcagggtacaatctaaa

SEQ ID NO: 618103 - DNA, 33 bp, Homo sapien
tgtcctcacttggctaccacttactcttcaaat

SEQ ID NO: 618104 - DNA, 33 bp, Homo sapien
tgtcctcacttggctatcacttactcttcaaat

SEQ ID NO: 618105 - DNA, 33 bp, Homo sapien
tgaagttatagatgtcaacttaaaatgttgggg

SEQ ID NO: 618106 - DNA, 33 bp, Homo sapien
tgaagttatagatgtcgacttaaaatgttgggg

SEQ ID NO: 618107 - DNA, 33 bp, Homo sapien
gggccctgcgcctgataagctgccatgaaagtg

SEQ ID NO: 618108 - DNA, 33 bp, Homo sapien
gggccctgcgcctgatgagctgccatgaaagtg

SEQ ID NO: 618109 - DNA, 33 bp, Homo sapien
ccctgctgggacatcccacgtgtgatccctttc

SEQ ID NO: 618110 - DNA, 33 bp, Homo sapien
ccctgctgggacatcctacgtgtgatccctttc

SEQ ID NO: 618111 - DNA, 33 bp, Homo sapien
cactaaatatgcaaacaattaggttaaactgct

SEQ ID NO: 618112 - DNA, 33 bp, Homo sapien
cactaaatatgcaaactattaggttaaactgct

SEQ ID NO: 618113 - DNA, 33 bp, Homo sapien
cccagtgtgtgtcaatcatgaagacaaagagaa

SEQ ID NO: 618114 - DNA, 33 bp, Homo sapien
cccagtgtgtgtcaattatgaagacaaagagaa

SEQ ID NO: 618115 - DNA, 33 bp, Homo sapien
caaagagtggcaccaacgtccctggtctcctcc

SEQ ID NO: 618116 - DNA, 33 bp, Homo sapien
caaagagtggcaccaatgtccctggtctcctcc

SEQ ID NO: 618117 - DNA, 33 bp, Homo sapien
gtggacatcacacttacactacaaaacaatagc

SEQ ID NO: 618118 - DNA, 33 bp, Homo sapien
gtggacatcacacttatactacaaaacaatagc

SEQ ID NO: 618119 - DNA, 33 bp, Homo sapien
gagacactccaaagccacacattcccgcaagcc

SEQ ID NO: 618120 - DNA, 33 bp, Homo sapien
gagacactccaaagccgcacattcccgcaagcc

SEQ ID NO: 618121 - DNA, 33 bp, Homo sapien
ggctttctccaataaacgcttcttcatttgctg

SEQ ID NO: 618122 - DNA, 33 bp, Homo sapien
ggctttctccaataaatgcttcttcatttgctg

SEQ ID NO: 618123 - DNA, 33 bp, Homo sapien
ctaaatgccaggatgaagcacttctattgtcct

SEQ ID NO: 618124 - DNA, 33 bp, Homo sapien
ctaaatgccaggatgaggcacttctattgtcct

SEQ ID NO: 618125 - DNA, 33 bp, Homo sapien
agccctgtttgtgaatcatgctcatggctgccc

SEQ ID NO: 618126 - DNA, 33 bp, Homo sapien
agccctgtttgtgaatgatgctcatggctgccc

SEQ ID NO: 618127 - DNA, 33 bp, Homo sapien
ccttgcctgtcctgatcagtgtgcaatccaaaa

SEQ ID NO: 618128 - DNA, 33 bp, Homo sapien
ccttgcctgtcctgattagtgtgcaatccaaaa

SEQ ID NO: 618129 - DNA, 33 bp, Homo sapien
gctggtgtagacaggcacgagggtgagcctgga

SEQ ID NO: 618130 - DNA, 33 bp, Homo sapien
gctggtgtagacaggcgcgagggtgagcctgga

SEQ ID NO: 618131 - DNA, 33 bp, Homo sapien
aaaacacccatggaacaaggaacagacgtggga

SEQ ID NO: 618132 - DNA, 33 bp, Homo sapien
aaaacacccatggaacgaggaacagacgtggga

SEQ ID NO: 618133 - DNA, 33 bp, Homo sapien
gaagacactaaaccaaactaacccagctggtgg

SEQ ID NO: 618134 - DNA, 33 bp, Homo sapien
gaagacactaaaccaagctaacccagctggtgg

SEQ ID NO: 618135 - DNA, 33 bp, Homo sapien
tgtccccatgaagtgacattctggcaaagagag

SEQ ID NO: 618136 - DNA, 33 bp, Homo sapien
tgtccccatgaagtgatattctggcaaagagag

SEQ ID NO: 618137 - DNA, 33 bp, Homo sapien
ggacaaaggatcttcacggtgtgaccaatgaga

SEQ ID NO: 618138 - DNA, 33 bp, Homo sapien
ggacaaaggatcttcatggtgtgaccaatgaga

SEQ ID NO: 618139 - DNA, 33 bp, Homo sapien
cctttccttatctttaaggcccgtttcacaggt

SEQ ID NO: 618140 - DNA, 33 bp, Homo sapien
cctttccttatctttagggcccgtttcacaggt

SEQ ID NO: 618141 - DNA, 33 bp, Homo sapien
aagtgcctttgctctacgtggcctaagccaggg

SEQ ID NO: 618142 - DNA, 33 bp, Homo sapien
aagtgcctttgctctatgtggcctaagccaggg

SEQ ID NO: 618143 - DNA, 33 bp, Homo sapien
atagccctgggaacacactactgagagccacat

SEQ ID NO: 618144 - DNA, 33 bp, Homo sapien
atagccctgggaacacgctactgagagccacat

SEQ ID NO: 618145 - DNA, 33 bp, Homo sapien
ttgcgaagttgcccacaggttttcctgaggagg

SEQ ID NO: 618146 - DNA, 33 bp, Homo sapien
ttgcgaagttgcccacgggttttcctgaggagg

SEQ ID NO: 618147 - DNA, 33 bp, Homo sapien
tcttgtccacagaaacacaaaaacatttcctca

SEQ ID NO: 618148 - DNA, 33 bp, Homo sapien
tcttgtccacagaaacgcaaaaacatttcctca

SEQ ID NO: 618149 - DNA, 33 bp, Homo sapien
aaatcatcagggtgacaggacatgaggctggca

SEQ ID NO: 618150 - DNA, 33 bp, Homo sapien
aaatcatcagggtgacgggacatgaggctggca

SEQ ID NO: 618151 - DNA, 33 bp, Homo sapien
actcctaggatgcccgcaacattccgagtgtct

SEQ ID NO: 618152 - DNA, 33 bp, Homo sapien
actcctaggatgcccgtaacattccgagtgtct

SEQ ID NO: 618153 - DNA, 33 bp, Homo sapien
ccaggtttccgagcagactcctaaattgtaaac

SEQ ID NO: 618154 - DNA, 33 bp, Homo sapien
ccaggtttccgagcagcctcctaaattgtaaac

SEQ ID NO: 618155 - DNA, 33 bp, Homo sapien
ccattgcaaaccagataaaagcattataagaaa

SEQ ID NO: 618156 - DNA, 33 bp, Homo sapien
ccattgcaaaccagatgaaagcattataagaaa

SEQ ID NO: 618157 - DNA, 33 bp, Homo sapien
acaagcactgatggacaacacatatttcaccga

SEQ ID NO: 618158 - DNA, 33 bp, Homo sapien
acaagcactgatggacgacacatatttcaccga

SEQ ID NO: 618159 - DNA, 33 bp, Homo sapien
aggctgccttttccgcacaagtctgttttttgt

SEQ ID NO: 618160 - DNA, 33 bp, Homo sapien
aggctgccttttccgcgcaagtctgttttttgt

SEQ ID NO: 618161 - DNA, 33 bp, Homo sapien
tataggcttccttccccatttctccttttctcc

SEQ ID NO: 618162 - DNA, 33 bp, Homo sapien
tataggcttccttcccgatttctccttttctcc

SEQ ID NO: 618163 - DNA, 33 bp, Homo sapien
tgtagtcctttcatcccgaatgagtatgtatac

SEQ ID NO: 618164 - DNA, 33 bp, Homo sapien
tgtagtcctttcatcctgaatgagtatgtatac

SEQ ID NO: 618165 - DNA, 33 bp, Homo sapien
aggagtagaattgttgcattatatagtaactca

SEQ ID NO: 618166 - DNA, 33 bp, Homo sapien
aggagtagaattgttggattatatagtaactca

SEQ ID NO: 618167 - DNA, 33 bp, Homo sapien
gcaagaagaactattacgcagacatcaagaggc

SEQ ID NO: 618168 - DNA, 33 bp, Homo sapien
gcaagaagaactattatgcagacatcaagaggc

SEQ ID NO: 618169 - DNA, 33 bp, Homo sapien
caaagcaagcataataatagtggtcgctgaatt

SEQ ID NO: 618170 - DNA, 33 bp, Homo sapien
caaagcaagcataatagtagtggtcgctgaatt

SEQ ID NO: 618171 - DNA, 33 bp, Homo sapien
tacgaaactgcccctaagctgctaccctctgca

SEQ ID NO: 618172 - DNA, 33 bp, Homo sapien
tacgaaactgcccctacgctgctaccctctgca

SEQ ID NO: 618173 - DNA, 33 bp, Homo sapien
acataacatcagtttaccatcttaaacatttta

SEQ ID NO: 618174 - DNA, 33 bp, Homo sapien
acataacatcagtttagcatcttaaacatttta

SEQ ID NO: 618175 - DNA, 33 bp, Homo sapien
catggatatcaccggcagaagagtgggaccatt

SEQ ID NO: 618176 - DNA, 33 bp, Homo sapien
catggatatcaccggcggaagagtgggaccatt

SEQ ID NO: 618177 - DNA, 33 bp, Homo sapien
aactacgaaatccaaacgcagggagagtggcct

SEQ ID NO: 618178 - DNA, 33 bp, Homo sapien
aactacgaaatccaaatgcagggagagtggcct

SEQ ID NO: 618179 - DNA, 33 bp, Homo sapien
ccaaagagagaaaaccacatgagttaaagtatg

SEQ ID NO: 618180 - DNA, 33 bp, Homo sapien
ccaaagagagaaaaccgcatgagttaaagtatg

SEQ ID NO: 618181 - DNA, 33 bp, Homo sapien
caagggcagggcagaaatggacccgagtgcctg

SEQ ID NO: 618182 - DNA, 33 bp, Homo sapien
caagggcagggcagaagtggacccgagtgcctg

SEQ ID NO: 618183 - DNA, 33 bp, Homo sapien
ttatttttctcagcttaaaaaagagcatcactc

SEQ ID NO: 618184 - DNA, 33 bp, Homo sapien
ttatttttctcagcttcaaaaagagcatcactc

SEQ ID NO: 618185 - DNA, 33 bp, Homo sapien
taaccctacaaatacaagtgggagcacaaacac

SEQ ID NO: 618186 - DNA, 33 bp, Homo sapien
taaccctacaaatacacgtgggagcacaaacac

SEQ ID NO: 618187 - DNA, 33 bp, Homo sapien
gagtgggattggtctgaataagtgggtttttaa

SEQ ID NO: 618188 - DNA, 33 bp, Homo sapien
gagtgggattggtctggataagtgggtttttaa

SEQ ID NO: 618189 - DNA, 33 bp, Homo sapien
atgggagagagcctgaagcttatgttggggatg

SEQ ID NO: 618190 - DNA, 33 bp, Homo sapien
atgggagagagcctgaggcttatgttggggatg

SEQ ID NO: 618191 - DNA, 33 bp, Homo sapien
atttttccaacacagactcctaatcacgatatg

SEQ ID NO: 618192 - DNA, 33 bp, Homo sapien
atttttccaacacagattcctaatcacgatatg

SEQ ID NO: 618193 - DNA, 33 bp, Homo sapien
accgtgtacgagccacaatgttttattcccttc

SEQ ID NO: 618194 - DNA, 33 bp, Homo sapien
accgtgtacgagccacgatgttttattcccttc

SEQ ID NO: 618195 - DNA, 33 bp, Homo sapien
ggcgatttcagatgaaacctgcaagaggcacag

SEQ ID NO: 618196 - DNA, 33 bp, Homo sapien
ggcgatttcagatgaaccctgcaagaggcacag

SEQ ID NO: 618197 - DNA, 33 bp, Homo sapien
gagctttgtaaattgtcaagtgctgtgcctcca

SEQ ID NO: 618198 - DNA, 33 bp, Homo sapien
gagctttgtaaattgttaagtgctgtgcctcca

SEQ ID NO: 618199 - DNA, 33 bp, Homo sapien
gatgtgaaaagcaaaccgtaaaggactgtccac

SEQ ID NO: 618200 - DNA, 33 bp, Homo sapien
gatgtgaaaagcaaactgtaaaggactgtccac

SEQ ID NO: 618201 - DNA, 33 bp, Homo sapien
aagggattatcatcgccatttacagaggaggaa

SEQ ID NO: 618202 - DNA, 33 bp, Homo sapien
aagggattatcatcgctatttacagaggaggaa

SEQ ID NO: 618203 - DNA, 33 bp, Homo sapien
ccagccagtgtgcgcagtccaccggttgtctcg

SEQ ID NO: 618204 - DNA, 33 bp, Homo sapien
ccagccagtgtgcgcattccaccggttgtctcg

SEQ ID NO: 618205 - DNA, 33 bp, Homo sapien
ctggtcctagttaccccacaatattgctgcctc

SEQ ID NO: 618206 - DNA, 33 bp, Homo sapien
ctggtcctagttacccgacaatattgctgcctc

SEQ ID NO: 618207 - DNA, 33 bp, Homo sapien
caggagagaaaacgcaaaggccgggcacatcgc

SEQ ID NO: 618208 - DNA, 33 bp, Homo sapien
caggagagaaaacgcagaggccgggcacatcgc

SEQ ID NO: 618209 - DNA, 33 bp, Homo sapien
tgctttttgcggggccagagtgtgtttcttccc

SEQ ID NO: 618210 - DNA, 33 bp, Homo sapien
tgctttttgcggggccggagtgtgtttcttccc

SEQ ID NO: 618211 - DNA, 33 bp, Homo sapien
agcctgggactggggaaagggagctcttcaagg

SEQ ID NO: 618212 - DNA, 33 bp, Homo sapien
agcctgggactggggagagggagctcttcaagg

SEQ ID NO: 618213 - DNA, 33 bp, Homo sapien
acagagtgtatgcttccatttgtctccaatgtc

SEQ ID NO: 618214 - DNA, 33 bp, Homo sapien
acagagtgtatgcttcgatttgtctccaatgtc

SEQ ID NO: 618215 - DNA, 33 bp, Homo sapien
ctctgctgcttagtagacatgggacctgggaga

SEQ ID NO: 618216 - DNA, 33 bp, Homo sapien
ctctgctgcttagtagccatgggacctgggaga

SEQ ID NO: 618217 - DNA, 33 bp, Homo sapien
aacaggcaccttacacagattagttcatttaat

SEQ ID NO: 618218 - DNA, 33 bp, Homo sapien
aacaggcaccttacacggattagttcatttaat

SEQ ID NO: 618219 - DNA, 33 bp, Homo sapien
atatggttaacagacacgagtttatttttcatc

SEQ ID NO: 618220 - DNA, 33 bp, Homo sapien
atatggttaacagacatgagtttatttttcatc

SEQ ID NO: 618221 - DNA, 33 bp, Homo sapien
cgtcttctcttgaaaaatcacaaggtctggtag

SEQ ID NO: 618222 - DNA, 33 bp, Homo sapien
cgtcttctcttgaaaagtcacaaggtctggtag

SEQ ID NO: 618223 - DNA, 33 bp, Homo sapien
gatgaatagctgcaaactaaaggactctagctc

SEQ ID NO: 618224 - DNA, 33 bp, Homo sapien
gatgaatagctgcaaagtaaaggactctagctc

SEQ ID NO: 618225 - DNA, 33 bp, Homo sapien
gggttgtgggaaaactcagctggagctcccagg

SEQ ID NO: 618226 - DNA, 33 bp, Homo sapien
gggttgtgggaaaactgagctggagctcccagg

SEQ ID NO: 618227 - DNA, 33 bp, Homo sapien
aagtcgtctgggcccccccaaatgcatgcagct

SEQ ID NO: 618228 - DNA, 33 bp, Homo sapien
aagtcgtctgggccccgccaaatgcatgcagct

SEQ ID NO: 618229 - DNA, 33 bp, Homo sapien
ccaaagtcacaggcaaaagctccttctccgact

SEQ ID NO: 618230 - DNA, 33 bp, Homo sapien
ccaaagtcacaggcaagagctccttctccgact

SEQ ID NO: 618231 - DNA, 33 bp, Homo sapien
acgctgtctataagaggcaggtacggccactgg

SEQ ID NO: 618232 - DNA, 33 bp, Homo sapien
acgctgtctataagagtcaggtacggccactgg

SEQ ID NO: 618233 - DNA, 33 bp, Homo sapien
aacttttataaatgaacgaccgtgccattgcgt

SEQ ID NO: 618234 - DNA, 33 bp, Homo sapien
aacttttataaatgaatgaccgtgccattgcgt

SEQ ID NO: 618235 - DNA, 33 bp, Homo sapien
cagtctctggtccccacggcccccactttccaa

SEQ ID NO: 618236 - DNA, 33 bp, Homo sapien
cagtctctggtccccatggcccccactttccaa

SEQ ID NO: 618237 - DNA, 33 bp, Homo sapien
cccccacttcccttcacggcctgaaccagtctt

SEQ ID NO: 618238 - DNA, 33 bp, Homo sapien
cccccacttcccttcatggcctgaaccagtctt

SEQ ID NO: 618239 - DNA, 33 bp, Homo sapien
cctgtggcctggaggcaccccccaatcttgctt

SEQ ID NO: 618240 - DNA, 33 bp, Homo sapien
cctgtggcctggaggcgccccccaatcttgctt

SEQ ID NO: 618241 - DNA, 33 bp, Homo sapien
atgcacttacatgaaaaaatttccacatgtact

SEQ ID NO: 618242 - DNA, 33 bp, Homo sapien
atgcacttacatgaaagaatttccacatgtact

SEQ ID NO: 618243 - DNA, 33 bp, Homo sapien
tcaccagaagtattcaaataaggagagtctccc

SEQ ID NO: 618244 - DNA, 33 bp, Homo sapien
tcaccagaagtattcagataaggagagtctccc

SEQ ID NO: 618245 - DNA, 33 bp, Homo sapien
gcaaagtttgaatgccaccttcatcatatattc

SEQ ID NO: 618246 - DNA, 33 bp, Homo sapien
gcaaagtttgaatgcctccttcatcatatattc

SEQ ID NO: 618247 - DNA, 33 bp, Homo sapien
ttcaattcccgtatgcacataggtctgtttctg

SEQ ID NO: 618248 - DNA, 33 bp, Homo sapien
ttcaattcccgtatgctcataggtctgtttctg

SEQ ID NO: 618249 - DNA, 33 bp, Homo sapien
gcaacccctttccacaaataacacttgacatgg

SEQ ID NO: 618250 - DNA, 33 bp, Homo sapien
gcaacccctttccacagataacacttgacatgg

SEQ ID NO: 618251 - DNA, 33 bp, Homo sapien
aattgtacattcctcgcatcttgctcactaggc

SEQ ID NO: 618252 - DNA, 33 bp, Homo sapien
aattgtacattcctcggatcttgctcactaggc

SEQ ID NO: 618253 - DNA, 33 bp, Homo sapien
ttcagccattctaccaatatggggcaacttagg

SEQ ID NO: 618254 - DNA, 33 bp, Homo sapien
ttcagccattctaccagtatggggcaacttagg

SEQ ID NO: 618255 - DNA, 33 bp, Homo sapien
ctcttgatcctagcataagcctcgcatctcacc

SEQ ID NO: 618256 - DNA, 33 bp, Homo sapien
ctcttgatcctagcatgagcctcgcatctcacc

SEQ ID NO: 618257 - DNA, 33 bp, Homo sapien
gatttctgatttacagcctggacttacagaggg

SEQ ID NO: 618258 - DNA, 33 bp, Homo sapien
gatttctgatttacaggctggacttacagaggg

SEQ ID NO: 618259 - DNA, 33 bp, Homo sapien
aatagataccattcacaaaagctcagagaagca

SEQ ID NO: 618260 - DNA, 33 bp, Homo sapien
aatagataccattcacgaaagctcagagaagca

SEQ ID NO: 618261 - DNA, 33 bp, Homo sapien
gaaactctaaggtccgaagagaagttgttctcc

SEQ ID NO: 618262 - DNA, 33 bp, Homo sapien
gaaactctaaggtccggagagaagttgttctcc

SEQ ID NO: 618263 - DNA, 33 bp, Homo sapien
tgtaaggacccccaaacctgtagcccattgctc

SEQ ID NO: 618264 - DNA, 33 bp, Homo sapien
tgtaaggacccccaaatctgtagcccattgctc

SEQ ID NO: 618265 - DNA, 33 bp, Homo sapien
cagttggctcactagaatataaggaaatgcaaa

SEQ ID NO: 618266 - DNA, 33 bp, Homo sapien
cagttggctcactagagtataaggaaatgcaaa

SEQ ID NO: 618267 - DNA, 33 bp, Homo sapien
gatcctggaaaccccactctcggctggtgcctg

SEQ ID NO: 618268 - DNA, 33 bp, Homo sapien
gatcctggaaaccccattctcggctggtgcctg

SEQ ID NO: 618269 - DNA, 33 bp, Homo sapien
gtctgggaggaggtcacaccatctgagacaacc

SEQ ID NO: 618270 - DNA, 33 bp, Homo sapien
gtctgggaggaggtcataccatctgagacaacc

SEQ ID NO: 618271 - DNA, 33 bp, Homo sapien
atgctggcgttgcccacctggctgaggtcgtgc

SEQ ID NO: 618272 - DNA, 33 bp, Homo sapien
atgctggcgttgcccatctggctgaggtcgtgc

SEQ ID NO: 618273 - DNA, 33 bp, Homo sapien
acccagttgctcagtcagaaacctggacagcct

SEQ ID NO: 618274 - DNA, 33 bp, Homo sapien
acccagttgctcagtcggaaacctggacagcct

SEQ ID NO: 618275 - DNA, 33 bp, Homo sapien
ctccatccagttcagacagcaggaggcgatgag

SEQ ID NO: 618276 - DNA, 33 bp, Homo sapien
ctccatccagttcagagagcaggaggcgatgag

SEQ ID NO: 618277 - DNA, 33 bp, Homo sapien
aggcacatttaagccaacgtgggtaaccagtaa

SEQ ID NO: 618278 - DNA, 33 bp, Homo sapien
aggcacatttaagccagcgtgggtaaccagtaa

SEQ ID NO: 618279 - DNA, 33 bp, Homo sapien
cccctttgtaacctgcactcccacttcctgctt

SEQ ID NO: 618280 - DNA, 33 bp, Homo sapien
cccctttgtaacctgcgctcccacttcctgctt

SEQ ID NO: 618281 - DNA, 33 bp, Homo sapien
tgtgtttctgtgcttcaagtgacgatctcttta

SEQ ID NO: 618282 - DNA, 33 bp, Homo sapien
tgtgtttctgtgcttcgagtgacgatctcttta

SEQ ID NO: 618283 - DNA, 33 bp, Homo sapien
tgcgcctcaaaataaaatgccaagtcctaaacc

SEQ ID NO: 618284 - DNA, 33 bp, Homo sapien
tgcgcctcaaaataaactgccaagtcctaaacc

SEQ ID NO: 618285 - DNA, 33 bp, Homo sapien
cctgctgaagccgccaaatgggacagggtactt

SEQ ID NO: 618286 - DNA, 33 bp, Homo sapien
cctgctgaagccgccacatgggacagggtactt

SEQ ID NO: 618287 - DNA, 33 bp, Homo sapien
tccaggcaaagaagcacgaactgaggcccctgt

SEQ ID NO: 618288 - DNA, 33 bp, Homo sapien
tccaggcaaagaagcatgaactgaggcccctgt

SEQ ID NO: 618289 - DNA, 33 bp, Homo sapien
cccctgggctgtggacagaagtaatgcctgcca

SEQ ID NO: 618290 - DNA, 33 bp, Homo sapien
cccctgggctgtggacggaagtaatgcctgcca

SEQ ID NO: 618291 - DNA, 33 bp, Homo sapien
cacctagaagtgtgcccgagggatgatgaacac

SEQ ID NO: 618292 - DNA, 33 bp, Homo sapien
cacctagaagtgtgcctgagggatgatgaacac

SEQ ID NO: 618293 - DNA, 33 bp, Homo sapien
ctcctccttgagttcaggttcttgagttcagat

SEQ ID NO: 618294 - DNA, 33 bp, Homo sapien
ctcctccttgagttcatgttcttgagttcagat

SEQ ID NO: 618295 - DNA, 33 bp, Homo sapien
ctttcttccatgtgcccccaccagtagacaagc

SEQ ID NO: 618296 - DNA, 33 bp, Homo sapien
ctttcttccatgtgcctccaccagtagacaagc

SEQ ID NO: 618297 - DNA, 33 bp, Homo sapien
ttctcttctgtattcactcttcgtttggccaat

SEQ ID NO: 618298 - DNA, 33 bp, Homo sapien
ttctcttctgtattcagtcttcgtttggccaat

SEQ ID NO: 618299 - DNA, 33 bp, Homo sapien
aatcttgtttaaccctcacaatagatatgcaaa

SEQ ID NO: 618300 - DNA, 33 bp, Homo sapien
aatcttgtttaaccctgacaatagatatgcaaa

SEQ ID NO: 618301 - DNA, 33 bp, Homo sapien
tgagtgtgaaaaaacacccttgagaggaccatg

SEQ ID NO: 618302 - DNA, 33 bp, Homo sapien
tgagtgtgaaaaaacatccttgagaggaccatg

SEQ ID NO: 618303 - DNA, 33 bp, Homo sapien
tggattttttttttgcagataagcgtgtgctat

SEQ ID NO: 618304 - DNA, 33 bp, Homo sapien
tggattttttttttgctgataagcgtgtgctat

SEQ ID NO: 618305 - DNA, 33 bp, Homo sapien
ttaggcgttgatccacgattccaaaaaagtcct

SEQ ID NO: 618306 - DNA, 33 bp, Homo sapien
ttaggcgttgatccactattccaaaaaagtcct

SEQ ID NO: 618307 - DNA, 33 bp, Homo sapien
catttgtggaatgtcaccaatggtattttcaag

SEQ ID NO: 618308 - DNA, 33 bp, Homo sapien
catttgtggaatgtcatcaatggtattttcaag

SEQ ID NO: 618309 - DNA, 33 bp, Homo sapien
tcgtgttagcattaccacaaccagaacattgtc

SEQ ID NO: 618310 - DNA, 33 bp, Homo sapien
tcgtgttagcattaccgcaaccagaacattgtc

SEQ ID NO: 618311 - DNA, 33 bp, Homo sapien
cctttgtagaagataaagtggttgtaggtgtgc

SEQ ID NO: 618312 - DNA, 33 bp, Homo sapien
cctttgtagaagataaggtggttgtaggtgtgc

SEQ ID NO: 618313 - DNA, 33 bp, Homo sapien
gaagagtgaccaccaaatactttaccaggcccc

SEQ ID NO: 618314 - DNA, 33 bp, Homo sapien
gaagagtgaccaccaagtactttaccaggcccc

SEQ ID NO: 618315 - DNA, 33 bp, Homo sapien
gaagatatagtgttgacacctctatagtcctcc

SEQ ID NO: 618316 - DNA, 33 bp, Homo sapien
gaagatatagtgttgatacctctatagtcctcc

SEQ ID NO: 618317 - DNA, 33 bp, Homo sapien
taactgaataatgtgaccctttgaaataaaggg

SEQ ID NO: 618318 - DNA, 33 bp, Homo sapien
taactgaataatgtgatcctttgaaataaaggg

SEQ ID NO: 618319 - DNA, 33 bp, Homo sapien
aaagcatactttgaataaccacatgaccattct

SEQ ID NO: 618320 - DNA, 33 bp, Homo sapien
aaagcatactttgaatgaccacatgaccattct

SEQ ID NO: 618321 - DNA, 33 bp, Homo sapien
tagaccatcagtcaacaggaatgagcagtgggg

SEQ ID NO: 618322 - DNA, 33 bp, Homo sapien
tagaccatcagtcaacgggaatgagcagtgggg

SEQ ID NO: 618323 - DNA, 33 bp, Homo sapien
agcccttgatccatgacgtccttacccaatgat

SEQ ID NO: 618324 - DNA, 33 bp, Homo sapien
agcccttgatccatgatgtccttacccaatgat

SEQ ID NO: 618325 - DNA, 33 bp, Homo sapien
tgaggtttccagatgaactgggggcacatagcc

SEQ ID NO: 618326 - DNA, 33 bp, Homo sapien
tgaggtttccagatgacctgggggcacatagcc

SEQ ID NO: 618327 - DNA, 33 bp, Homo sapien
ctgtcccatagaaacacagtgcaagcttcacgt

SEQ ID NO: 618328 - DNA, 33 bp, Homo sapien
ctgtcccatagaaacagagtgcaagcttcacgt

SEQ ID NO: 618329 - DNA, 33 bp, Homo sapien
tctagaggggctgacacggaatagccagccggc

SEQ ID NO: 618330 - DNA, 33 bp, Homo sapien
tctagaggggctgacagggaatagccagccggc

SEQ ID NO: 618331 - DNA, 33 bp, Homo sapien
ataggcacattttgggaccactggaaaccctgg

SEQ ID NO: 618332 - DNA, 33 bp, Homo sapien
ataggcacattttggggccactggaaaccctgg

SEQ ID NO: 618333 - DNA, 33 bp, Homo sapien
ctcacctgtctgcctcactcattcacccactgg

SEQ ID NO: 618334 - DNA, 33 bp, Homo sapien
ctcacctgtctgcctcgctcattcacccactgg

SEQ ID NO: 618335 - DNA, 33 bp, Homo sapien
aaagtgtagatcatcccgcacttctttgagatt

SEQ ID NO: 618336 - DNA, 33 bp, Homo sapien
aaagtgtagatcatcctgcacttctttgagatt

SEQ ID NO: 618337 - DNA, 33 bp, Homo sapien
ctttagcatttaattaggtgccacgtgggccct

SEQ ID NO: 618338 - DNA, 33 bp, Homo sapien
ctttagcatttaattatgtgccacgtgggccct

SEQ ID NO: 618339 - DNA, 33 bp, Homo sapien
tgtacactgtacccaacgtgcagtctttccttt

SEQ ID NO: 618340 - DNA, 33 bp, Homo sapien
tgtacactgtacccaatgtgcagtctttccttt

SEQ ID NO: 618341 - DNA, 33 bp, Homo sapien
tcagaggatcaggagaacaaaaggccaaaatta

SEQ ID NO: 618342 - DNA, 33 bp, Homo sapien
tcagaggatcaggagagcaaaaggccaaaatta

SEQ ID NO: 618343 - DNA, 33 bp, Homo sapien
tgctttggaaaacctaccagatctgccatgatc

SEQ ID NO: 618344 - DNA, 33 bp, Homo sapien
tgctttggaaaacctagcagatctgccatgatc

SEQ ID NO: 618345 - DNA, 33 bp, Homo sapien
tgatctcccaggcacacggagagaaacagacgc

SEQ ID NO: 618346 - DNA, 33 bp, Homo sapien
tgatctcccaggcacatggagagaaacagacgc

SEQ ID NO: 618347 - DNA, 33 bp, Homo sapien
tctgctgcaggatgacagtcaagtccctgtgag

SEQ ID NO: 618348 - DNA, 33 bp, Homo sapien
tctgctgcaggatgacggtcaagtccctgtgag

SEQ ID NO: 618349 - DNA, 33 bp, Homo sapien
gggccactgagtggtaacttcgaaatgagtcac

SEQ ID NO: 618350 - DNA, 33 bp, Homo sapien
gggccactgagtggtagcttcgaaatgagtcac

SEQ ID NO: 618351 - DNA, 33 bp, Homo sapien
tttgctctcttaaccacggaccttgcacagtgt

SEQ ID NO: 618352 - DNA, 33 bp, Homo sapien
tttgctctcttaaccatggaccttgcacagtgt

SEQ ID NO: 618353 - DNA, 33 bp, Homo sapien
cagccatggaaaccataagggagtcactgtcta

SEQ ID NO: 618354 - DNA, 33 bp, Homo sapien
cagccatggaaaccatgagggagtcactgtcta

SEQ ID NO: 618355 - DNA, 33 bp, Homo sapien
tcggtcctgcccattacgttggactgcctctgg

SEQ ID NO: 618356 - DNA, 33 bp, Homo sapien
tcggtcctgcccattatgttggactgcctctgg

SEQ ID NO: 618357 - DNA, 33 bp, Homo sapien
cgtaggctttcactcacgcacctgtttcacagt

SEQ ID NO: 618358 - DNA, 33 bp, Homo sapien
cgtaggctttcactcatgcacctgtttcacagt

SEQ ID NO: 618359 - DNA, 33 bp, Homo sapien
ggagctgtgaccacagaaacgggagcaagtttg

SEQ ID NO: 618360 - DNA, 33 bp, Homo sapien
ggagctgtgaccacaggaacgggagcaagtttg

SEQ ID NO: 618361 - DNA, 33 bp, Homo sapien
gggacaaccccaaagacggtggacttcaaagag

SEQ ID NO: 618362 - DNA, 33 bp, Homo sapien
gggacaaccccaaagatggtggacttcaaagag

SEQ ID NO: 618363 - DNA, 33 bp, Homo sapien
cttgaagactttatgccgagtgaaagatgctgg

SEQ ID NO: 618364 - DNA, 33 bp, Homo sapien
cttgaagactttatgctgagtgaaagatgctgg

SEQ ID NO: 618365 - DNA, 33 bp, Homo sapien
cctgagagcgtaggacaaggcactccaggggca

SEQ ID NO: 618366 - DNA, 33 bp, Homo sapien
cctgagagcgtaggacgaggcactccaggggca

SEQ ID NO: 618367 - DNA, 33 bp, Homo sapien
cagctccactgggcatgaggcttgtggctgttg

SEQ ID NO: 618368 - DNA, 33 bp, Homo sapien
cagctccactgggcattaggcttgtggctgttg

SEQ ID NO: 618369 - DNA, 33 bp, Homo sapien
tcagggcttataccacacacagggcttcccata

SEQ ID NO: 618370 - DNA, 33 bp, Homo sapien
tcagggcttataccacgcacagggcttcccata

SEQ ID NO: 618371 - DNA, 33 bp, Homo sapien
agacggcttaagcagcaagtgaggaggcagatg

SEQ ID NO: 618372 - DNA, 33 bp, Homo sapien
agacggcttaagcagcgagtgaggaggcagatg

SEQ ID NO: 618373 - DNA, 33 bp, Homo sapien
tggtccagcaataaaacccaacaatgcctttgc

SEQ ID NO: 618374 - DNA, 33 bp, Homo sapien
tggtccagcaataaaatccaacaatgcctttgc

SEQ ID NO: 618375 - DNA, 33 bp, Homo sapien
tccccgagagcctagaagagcaaagagaaagct

SEQ ID NO: 618376 - DNA, 33 bp, Homo sapien
tccccgagagcctagaggagcaaagagaaagct

SEQ ID NO: 618377 - DNA, 33 bp, Homo sapien
gcaccagctcacactcaagagtatcaaactcac

SEQ ID NO: 618378 - DNA, 33 bp, Homo sapien
gcaccagctcacactcgagagtatcaaactcac

SEQ ID NO: 618379 - DNA, 33 bp, Homo sapien
gcctgcctgtctaccacatgaaagctgggaaga

SEQ ID NO: 618380 - DNA, 33 bp, Homo sapien
gcctgcctgtctaccatatgaaagctgggaaga

SEQ ID NO: 618381 - DNA, 33 bp, Homo sapien
atattaaaggtgctgaaatgtcctgtagataag

SEQ ID NO: 618382 - DNA, 33 bp, Homo sapien
atattaaaggtgctgatatgtcctgtagataag

SEQ ID NO: 618383 - DNA, 33 bp, Homo sapien
cttctcaccccaaataaaaaactgcacgttcat

SEQ ID NO: 618384 - DNA, 33 bp, Homo sapien
cttctcaccccaaatacaaaactgcacgttcat

SEQ ID NO: 618385 - DNA, 33 bp, Homo sapien
aaacagccgtcactcacgcaacagagaaaacgg

SEQ ID NO: 618386 - DNA, 33 bp, Homo sapien
aaacagccgtcactcatgcaacagagaaaacgg

SEQ ID NO: 618387 - DNA, 33 bp, Homo sapien
gccttgtttatcttccaaatgacgggtctgggg

SEQ ID NO: 618388 - DNA, 33 bp, Homo sapien
gccttgtttatcttccgaatgacgggtctgggg

SEQ ID NO: 618389 - DNA, 33 bp, Homo sapien
gccccattgcaggcccaagaggctccaaaggca

SEQ ID NO: 618390 - DNA, 33 bp, Homo sapien
gccccattgcaggcccgagaggctccaaaggca

SEQ ID NO: 618391 - DNA, 33 bp, Homo sapien
gtaatttggatgcacagagtagtttgagaaaca

SEQ ID NO: 618392 - DNA, 33 bp, Homo sapien
gtaatttggatgcacatagtagtttgagaaaca

SEQ ID NO: 618393 - DNA, 33 bp, Homo sapien
tcaaacttgtaatgaactgtgagatatgccatt

SEQ ID NO: 618394 - DNA, 33 bp, Homo sapien
tcaaacttgtaatgaattgtgagatatgccatt

SEQ ID NO: 618395 - DNA, 33 bp, Homo sapien
acctcggctaatggcaagtagggattgggcact

SEQ ID NO: 618396 - DNA, 33 bp, Homo sapien
acctcggctaatggcatgtagggattgggcact

SEQ ID NO: 618397 - DNA, 33 bp, Homo sapien
ccaacttaagcctatacccctggaagagacaat

SEQ ID NO: 618398 - DNA, 33 bp, Homo sapien
ccaacttaagcctatatccctggaagagacaat

SEQ ID NO: 618399 - DNA, 33 bp, Homo sapien
aatgtagccaaagccccgattgaaaatatagtg

SEQ ID NO: 618400 - DNA, 33 bp, Homo sapien
aatgtagccaaagccctgattgaaaatatagtg

SEQ ID NO: 618401 - DNA, 33 bp, Homo sapien
tagagcctaggacctacaaagaagtgcagataa

SEQ ID NO: 618402 - DNA, 33 bp, Homo sapien
tagagcctaggacctagaaagaagtgcagataa

SEQ ID NO: 618403 - DNA, 33 bp, Homo sapien
gtgggaaggacagttacggaacaggtgactaaa

SEQ ID NO: 618404 - DNA, 33 bp, Homo sapien
gtgggaaggacagttatggaacaggtgactaaa

SEQ ID NO: 618405 - DNA, 33 bp, Homo sapien
actataaactgaaacacagatgtagtataaaca

SEQ ID NO: 618406 - DNA, 33 bp, Homo sapien
actataaactgaaacagagatgtagtataaaca

SEQ ID NO: 618407 - DNA, 33 bp, Homo sapien
ggctagaagggttcctgagagcatactttggga

SEQ ID NO: 618408 - DNA, 33 bp, Homo sapien
ggctagaagggttccttagagcatactttggga

SEQ ID NO: 618409 - DNA, 33 bp, Homo sapien
cattttgctccttccacccaaaaagcaccccta

SEQ ID NO: 618410 - DNA, 33 bp, Homo sapien
cattttgctccttccagccaaaaagcaccccta

SEQ ID NO: 618411 - DNA, 33 bp, Homo sapien; identical to SEQ ID NO: 618409

SEQ ID NO: 618412 - DNA, 33 bp, Homo sapien; identical to SEQ ID NO: 618410

SEQ ID NO: 618413 - DNA, 33 bp, Homo sapien
gggccattcggactccagctacaaatgtcaatt

SEQ ID NO: 618414 - DNA, 33 bp, Homo sapien
gggccattcggactccggctacaaatgtcaatt

SEQ ID NO: 618415 - DNA, 33 bp, Homo sapien
tatactgaaatgctcccaataggtcacctcaaa

SEQ ID NO: 618416 - DNA, 33 bp, Homo sapien
tatactgaaatgctcctaataggtcacctcaaa

SEQ ID NO: 618417 - DNA, 33 bp, Homo sapien
tccagggcaactaaaggagaaatacatcacaat

SEQ ID NO: 618418 - DNA, 33 bp, Homo sapien
tccagggcaactaaagtagaaatacatcacaat

SEQ ID NO: 618419 - DNA, 33 bp, Homo sapien
tgacacatgggagaaggcaagctattctgagag

SEQ ID NO: 618420 - DNA, 33 bp, Homo sapien
tgacacatgggagaagtcaagctattctgagag

SEQ ID NO: 618421 - DNA, 33 bp, Homo sapien
ttttgttctagccagacgaaaaaaggtaaattt

SEQ ID NO: 618422 - DNA, 33 bp, Homo sapien
ttttgttctagccagatgaaaaaaggtaaattt

SEQ ID NO: 618423 - DNA, 33 bp, Homo sapien
ttatttcagctcattcaaaaaggcctctttggg

SEQ ID NO: 618424 - DNA, 33 bp, Homo sapien
ttatttcagctcattcgaaaaggcctctttggg

SEQ ID NO: 618425 - DNA, 33 bp, Homo sapien
ttaagggttcctgcaaactttcaaattgaggag

SEQ ID NO: 618426 - DNA, 33 bp, Homo sapien
ttaagggttcctgcaacctttcaaattgaggag

SEQ ID NO: 618427 - DNA, 33 bp, Homo sapien
agaaagaaaaaaggaaatgaccttaggtgagaa

SEQ ID NO: 618428 - DNA, 33 bp, Homo sapien
agaaagaaaaaaggaagtgaccttaggtgagaa

SEQ ID NO: 618429 - DNA, 33 bp, Homo sapien
tggcatagcaaggttacatttaagcactattat

SEQ ID NO: 618430 - DNA, 33 bp, Homo sapien
tggcatagcaaggttatatttaagcactattat

SEQ ID NO: 618431 - DNA, 33 bp, Homo sapien
acctcccgcgagttcaaaaggggctctgcgtgt

SEQ ID NO: 618432 - DNA, 33 bp, Homo sapien
acctcccgcgagttcagaaggggctctgcgtgt

SEQ ID NO: 618433 - DNA, 33 bp, Homo sapien
tcttctaggaattttacagttagaggtcttacc

SEQ ID NO: 618434 - DNA, 33 bp, Homo sapien
tcttctaggaattttatagttagaggtcttacc

SEQ ID NO: 618435 - DNA, 33 bp, Homo sapien
atctttcacagtcccaaagtcgtttaggttgga

SEQ ID NO: 618436 - DNA, 33 bp, Homo sapien
atctttcacagtcccagagtcgtttaggttgga

SEQ ID NO: 618437 - DNA, 33 bp, Homo sapien
gataaggaattggcaccgtataagcaattggaa

SEQ ID NO: 618438 - DNA, 33 bp, Homo sapien
gataaggaattggcactgtataagcaattggaa

SEQ ID NO: 618439 - DNA, 33 bp, Homo sapien
cgaactgtctgcccaaatcgacttgggttaggc

SEQ ID NO: 618440 - DNA, 33 bp, Homo sapien
cgaactgtctgcccaactcgacttgggttaggc

SEQ ID NO: 618441 - DNA, 33 bp, Homo sapien
ggccagaatagtagaaccaaggttactaggtac

SEQ ID NO: 618442 - DNA, 33 bp, Homo sapien
ggccagaatagtagaatcaaggttactaggtac

SEQ ID NO: 618443 - DNA, 33 bp, Homo sapien
tgctgtaaatgtgtacccagctactggatgaat

SEQ ID NO: 618444 - DNA, 33 bp, Homo sapien
tgctgtaaatgtgtactcagctactggatgaat

SEQ ID NO: 618445 - DNA, 33 bp, Homo sapien
tctgagcaggaagcaaactcagggctaccagat

SEQ ID NO: 618446 - DNA, 33 bp, Homo sapien
tctgagcaggaagcaacctcagggctaccagat

SEQ ID NO: 618447 - DNA, 33 bp, Homo sapien
gtttgctctgcctacaacgattgcctgcagtca

SEQ ID NO: 618448 - DNA, 33 bp, Homo sapien
gtttgctctgcctacagcgattgcctgcagtca

SEQ ID NO: 618449 - DNA, 33 bp, Homo sapien
taggaggcttgcccccactccgtctggcctgtt

SEQ ID NO: 618450 - DNA, 33 bp, Homo sapien
taggaggcttgcccccgctccgtctggcctgtt

SEQ ID NO: 618451 - DNA, 33 bp, Homo sapien
tatgttgtaaccaggacgtcttaaatgattctt

SEQ ID NO: 618452 - DNA, 33 bp, Homo sapien
tatgttgtaaccaggatgtcttaaatgattctt

SEQ ID NO: 618453 - DNA, 33 bp, Homo sapien
actcccagcaggcacaaaacggtttctgaatat

SEQ ID NO: 618454 - DNA, 33 bp, Homo sapien
actcccagcaggcacagaacggtttctgaatat

SEQ ID NO: 618455 - DNA, 33 bp, Homo sapien
tgttagtaaaatagatcagtgttaaactagatt

SEQ ID NO: 618456 - DNA, 33 bp, Homo sapien
tgttagtaaaatagatgagtgttaaactagatt

SEQ ID NO: 618457 - DNA, 33 bp, Homo sapien
ctggtatctgattactaaccctcgcctgtgtcc

SEQ ID NO: 618458 - DNA, 33 bp, Homo sapien
ctggtatctgattactgaccctcgcctgtgtcc

SEQ ID NO: 618459 - DNA, 33 bp, Homo sapien
ttctttgcagagaagacaagctcagggtcagtt

SEQ ID NO: 618460 - DNA, 33 bp, Homo sapien
ttctttgcagagaagagaagctcagggtcagtt

SEQ ID NO: 618461 - DNA, 33 bp, Homo sapien
cctgtctgctctcacaagaaactgagagcagcg

SEQ ID NO: 618462 - DNA, 33 bp, Homo sapien
cctgtctgctctcacaggaaactgagagcagcg

SEQ ID NO: 618463 - DNA, 33 bp, Homo sapien
atcctgtaatctaataaggttaagtcaccagct

SEQ ID NO: 618464 - DNA, 33 bp, Homo sapien
atcctgtaatctaatagggttaagtcaccagct

SEQ ID NO: 618465 - DNA, 33 bp, Homo sapien
gaacaagcaccataacaaacaacattgaactca

SEQ ID NO: 618466 - DNA, 33 bp, Homo sapien
gaacaagcaccataaccaacaacattgaactca

SEQ ID NO: 618467 - DNA, 33 bp, Homo sapien
gccagactgtctaacactaggcgacggaaactc

SEQ ID NO: 618468 - DNA, 33 bp, Homo sapien
gccagactgtctaacagtaggcgacggaaactc

SEQ ID NO: 618469 - DNA, 33 bp, Homo sapien
ccagcccgtctagctaactcctatcatcactgc

SEQ ID NO: 618470 - DNA, 33 bp, Homo sapien
ccagcccgtctagctagctcctatcatcactgc

SEQ ID NO: 618471 - DNA, 33 bp, Homo sapien
acagtgttagcaactaaactgacagtcaccaaa

SEQ ID NO: 618472 - DNA, 33 bp, Homo sapien
acagtgttagcaactacactgacagtcaccaaa

SEQ ID NO: 618473 - DNA, 33 bp, Homo sapien
aactcacagccaccccacaaggcagttattaca

SEQ ID NO: 618474 - DNA, 33 bp, Homo sapien
aactcacagccaccccgcaaggcagttattaca

SEQ ID NO: 618475 - DNA, 33 bp, Homo sapien
gccgcggggacgcgaactgcgcagccagaaatc

SEQ ID NO: 618476 - DNA, 33 bp, Homo sapien
gccgcggggacgcgaagtgcgcagccagaaatc

SEQ ID NO: 618477 - DNA, 33 bp, Homo sapien
actaggctgctttttccagactcaggaaaaatg

SEQ ID NO: 618478 - DNA, 33 bp, Homo sapien
actaggctgctttttctagactcaggaaaaatg

SEQ ID NO: 618479 - DNA, 33 bp, Homo sapien
ggctgccaactggtgaataagataaatatattt

SEQ ID NO: 618480 - DNA, 33 bp, Homo sapien
ggctgccaactggtgagtaagataaatatattt

SEQ ID NO: 618481 - DNA, 33 bp, Homo sapien
ggagaatgagtctgatcaactgaaaaaagtagg

SEQ ID NO: 618482 - DNA, 33 bp, Homo sapien
ggagaatgagtctgatgaactgaaaaaagtagg

SEQ ID NO: 618483 - DNA, 33 bp, Homo sapien
ccaacacgaactaatacgcccaccagagtatac

SEQ ID NO: 618484 - DNA, 33 bp, Homo sapien
ccaacacgaactaatatgcccaccagagtatac

SEQ ID NO: 618485 - DNA, 33 bp, Homo sapien
ttagcagggcagtagaagaaacagaaaagctca

SEQ ID NO: 618486 - DNA, 33 bp, Homo sapien
ttagcagggcagtagacgaaacagaaaagctca

SEQ ID NO: 618487 - DNA, 33 bp, Homo sapien
taagaatagagtgaataaaccctcgtcaaaagg

SEQ ID NO: 618488 - DNA, 33 bp, Homo sapien
taagaatagagtgaatgaaccctcgtcaaaagg

SEQ ID NO: 618489 - DNA, 33 bp, Homo sapien
ccatcgcaatttctaccgctgtgctcaccctct

SEQ ID NO: 618490 - DNA, 33 bp, Homo sapien
ccatcgcaatttctactgctgtgctcaccctct

SEQ ID NO: 618491 - DNA, 33 bp, Homo sapien
agtgttatctccactggatgagctcagtttttc

SEQ ID NO: 618492 - DNA, 33 bp, Homo sapien
agtgttatctccactgtatgagctcagtttttc

SEQ ID NO: 618493 - DNA, 33 bp, Homo sapien
tcagttcccactatacccaagagcagctcagtc

SEQ ID NO: 618494 - DNA, 33 bp, Homo sapien
tcagttcccactatacgcaagagcagctcagtc

SEQ ID NO: 618495 - DNA, 33 bp, Homo sapien
gtctgcttcatcaccagaaccggccaatcagtg

SEQ ID NO: 618496 - DNA, 33 bp, Homo sapien
gtctgcttcatcaccataaccggccaatcagtg

SEQ ID NO: 618497 - DNA, 33 bp, Homo sapien
tggccaataagcacacaaaagatggttatcttc

SEQ ID NO: 618498 - DNA, 33 bp, Homo sapien
tggccaataagcacacgaaagatggttatcttc

SEQ ID NO: 618499 - DNA, 33 bp, Homo sapien
cgaatgaagcctaagacacctgaggtacacttt

SEQ ID NO: 618500 - DNA, 33 bp, Homo sapien
cgaatgaagcctaagatacctgaggtacacttt

SEQ ID NO: 618501 - DNA, 33 bp, Homo sapien
tttagtttgtcccaaccgttatctattgcccca

SEQ ID NO: 618502 - DNA, 33 bp, Homo sapien
tttagtttgtcccaactgttatctattgcccca

SEQ ID NO: 618503 - DNA, 33 bp, Homo sapien
tgacaggcaaaatcctaaaagaagcagtatcag

SEQ ID NO: 618504 - DNA, 33 bp, Homo sapien
tgacaggcaaaatcctgaaagaagcagtatcag

SEQ ID NO: 618505 - DNA, 33 bp, Homo sapien
tcaggctaacaaggggaagaatttgtctgttga

SEQ ID NO: 618506 - DNA, 33 bp, Homo sapien
tcaggctaacaagggggagaatttgtctgttga

SEQ ID NO: 618507 - DNA, 33 bp, Homo sapien
tgttgaagacaaacatcatgtgcagctgcttaa

SEQ ID NO: 618508 - DNA, 33 bp, Homo sapien
tgttgaagacaaacattatgtgcagctgcttaa

SEQ ID NO: 618509 - DNA, 33 bp, Homo sapien
aagctccagctgtcaacgagctctcaagccctg

SEQ ID NO: 618510 - DNA, 33 bp, Homo sapien
aagctccagctgtcaatgagctctcaagccctg

SEQ ID NO: 618511 - DNA, 33 bp, Homo sapien
agctataaaaggaggaactttggaacatcagga

SEQ ID NO: 618512 - DNA, 33 bp, Homo sapien
agctataaaaggaggacctttggaacatcagga

SEQ ID NO: 618513 - DNA, 33 bp, Homo sapien
tcttctctctgccccaacttgttccttcctttt

SEQ ID NO: 618514 - DNA, 33 bp, Homo sapien
tcttctctctgccccatcttgttccttcctttt

SEQ ID NO: 618515 - DNA, 33 bp, Homo sapien
ggttgggggaaggtgcaattctacagtgttaac

SEQ ID NO: 618516 - DNA, 33 bp, Homo sapien
ggttgggggaaggtgcgattctacagtgttaac

SEQ ID NO: 618517 - DNA, 33 bp, Homo sapien
cttgagtgcctttcatcaaaagtgtcctgtttt

SEQ ID NO: 618518 - DNA, 33 bp, Homo sapien
cttgagtgcctttcattaaaagtgtcctgtttt

SEQ ID NO: 618519 - DNA, 33 bp, Homo sapien
atcccacatttcaccacaacctgcaggcagccc

SEQ ID NO: 618520 - DNA, 33 bp, Homo sapien
atcccacatttcaccataacctgcaggcagccc

SEQ ID NO: 618521 - DNA, 33 bp, Homo sapien
gcagaaatgtgagctgaatcagtctcctgtatg

SEQ ID NO: 618522 - DNA, 33 bp, Homo sapien
gcagaaatgtgagctggatcagtctcctgtatg

SEQ ID NO: 618523 - DNA, 33 bp, Homo sapien
aggattcttgcaatgaccagaggctgaatggta

SEQ ID NO: 618524 - DNA, 33 bp, Homo sapien
aggattcttgcaatgagcagaggctgaatggta

SEQ ID NO: 618525 - DNA, 33 bp, Homo sapien
cagttctgatgattagcaagttctcaaatgacc

SEQ ID NO: 618526 - DNA, 33 bp, Homo sapien
cagttctgatgattaggaagttctcaaatgacc

SEQ ID NO: 618527 - DNA, 33 bp, Homo sapien
cactccttatgtaagcacaatagcttcccaggg

SEQ ID NO: 618528 - DNA, 33 bp, Homo sapien
cactccttatgtaagcccaatagcttcccaggg

SEQ ID NO: 618529 - DNA, 33 bp, Homo sapien
agccttaatcagctaacgatggggccctgaata

SEQ ID NO: 618530 - DNA, 33 bp, Homo sapien
agccttaatcagctaatgatggggccctgaata

SEQ ID NO: 618531 - DNA, 33 bp, Homo sapien
gactttcatgattttccacacccctgcacaaaa

SEQ ID NO: 618532 - DNA, 33 bp, Homo sapien
gactttcatgattttctacacccctgcacaaaa

SEQ ID NO: 618533 - DNA, 33 bp, Homo sapien
cttctagcttccaaaaaagttgtaataattatt

SEQ ID NO: 618534 - DNA, 33 bp, Homo sapien
cttctagcttccaaaagagttgtaataattatt

SEQ ID NO: 618535 - DNA, 33 bp, Homo sapien
cagttggtgctcaataaaagggtgttgggtaaa

SEQ ID NO: 618536 - DNA, 33 bp, Homo sapien
cagttggtgctcaatagaagggtgttgggtaaa

SEQ ID NO: 618537 - DNA, 33 bp, Homo sapien
acggctgcagttccagaatctgtagccctcaga

SEQ ID NO: 618538 - DNA, 33 bp, Homo sapien
acggctgcagttccaggatctgtagccctcaga

SEQ ID NO: 618539 - DNA, 33 bp, Homo sapien
ctctccatcaaaagacacccttcagaaagtgaa

SEQ ID NO: 618540 - DNA, 33 bp, Homo sapien
ctctccatcaaaagacgcccttcagaaagtgaa

SEQ ID NO: 618541 - DNA, 33 bp, Homo sapien
acgagatggtaaacagaaggagtacatgcctgg

SEQ ID NO: 618542 - DNA, 33 bp, Homo sapien
acgagatggtaaacaggaggagtacatgcctgg

SEQ ID NO: 618543 - DNA, 33 bp, Homo sapien
ccctaaactttatccaagtgccacctagactat

SEQ ID NO: 618544 - DNA, 33 bp, Homo sapien
ccctaaactttatccacgtgccacctagactat

SEQ ID NO: 618545 - DNA, 33 bp, Homo sapien
ccattgtgccaaggagacgctgtggaagaaggc

SEQ ID NO: 618546 - DNA, 33 bp, Homo sapien
ccattgtgccaaggagccgctgtggaagaaggc

SEQ ID NO: 618547 - DNA, 33 bp, Homo sapien
tgacgtagtctccaggaaacaggcgaaaagtcc

SEQ ID NO: 618548 - DNA, 33 bp, Homo sapien
tgacgtagtctccagggaacaggcgaaaagtcc

SEQ ID NO: 618549 - DNA, 33 bp, Homo sapien
tgacctgactctccacaacacaggtgcctatgc

SEQ ID NO: 618550 - DNA, 33 bp, Homo sapien
tgacctgactctccacgacacaggtgcctatgc

SEQ ID NO: 618551 - DNA, 33 bp, Homo sapien
actggcatggatgccaacagcaaacagccaagc

SEQ ID NO: 618552 - DNA, 33 bp, Homo sapien
actggcatggatgccagcagcaaacagccaagc

SEQ ID NO: 618553 - DNA, 33 bp, Homo sapien
ctgcttgatgccttaacggttggtgttctatgt

SEQ ID NO: 618554 - DNA, 33 bp, Homo sapien
ctgcttgatgccttaatggttggtgttctatgt

SEQ ID NO: 618555 - DNA, 33 bp, Homo sapien
ggccacacagtgagcaaatggtagtctctggat

SEQ ID NO: 618556 - DNA, 33 bp, Homo sapien
ggccacacagtgagcacatggtagtctctggat

SEQ ID NO: 618557 - DNA, 33 bp, Homo sapien
tgctcagtgctgccccaaggactggccaggcca

SEQ ID NO: 618558 - DNA, 33 bp, Homo sapien
tgctcagtgctgccccgaggactggccaggcca

SEQ ID NO: 618559 - DNA, 33 bp, Homo sapien
acaggttgtcaatctccaaatgcaagttatttt

SEQ ID NO: 618560 - DNA, 33 bp, Homo sapien
acaggttgtcaatctctaaatgcaagttatttt

SEQ ID NO: 618561 - DNA, 33 bp, Homo sapien
aagttatttttaccacggctagattaattaccc

SEQ ID NO: 618562 - DNA, 33 bp, Homo sapien
aagttatttttaccactgctagattaattaccc

SEQ ID NO: 618563 - DNA, 33 bp, Homo sapien
aaaagaaaaatgtaaaagcttctatgccgaggc

SEQ ID NO: 618564 - DNA, 33 bp, Homo sapien
aaaagaaaaatgtaaatgcttctatgccgaggc

SEQ ID NO: 618565 - DNA, 33 bp, Homo sapien
cttgtaacgatcagtcacactagagccccatcc

SEQ ID NO: 618566 - DNA, 33 bp, Homo sapien
cttgtaacgatcagtcgcactagagccccatcc

SEQ ID NO: 618567 - DNA, 33 bp, Homo sapien
cacctgtgctggccaacttcgtcacctgcattg

SEQ ID NO: 618568 - DNA, 33 bp, Homo sapien
cacctgtgctggccaagttcgtcacctgcattg

SEQ ID NO: 618569 - DNA, 33 bp, Homo sapien
tccacctctcaggatcacagcgtcctcagctat

SEQ ID NO: 618570 - DNA, 33 bp, Homo sapien
tccacctctcaggatcgcagcgtcctcagctat

SEQ ID NO: 618571 - DNA, 33 bp, Homo sapien
gtcaggaactatttaacggtaatctttcttgaa

SEQ ID NO: 618572 - DNA, 33 bp, Homo sapien
gtcaggaactatttaatggtaatctttcttgaa

SEQ ID NO: 618573 - DNA, 33 bp, Homo sapien
ctgctacttccccagcacctcatacagacccag

SEQ ID NO: 618574 - DNA, 33 bp, Homo sapien
ctgctacttccccagcgcctcatacagacccag

SEQ ID NO: 618575 - DNA, 33 bp, Homo sapien
agtgcttagaagtgcacggtgactaccaaggac

SEQ ID NO: 618576 - DNA, 33 bp, Homo sapien
agtgcttagaagtgcatggtgactaccaaggac

SEQ ID NO: 618577 - DNA, 33 bp, Homo sapien
aagccaagaacctgaccgtattcagcctccaac

SEQ ID NO: 618578 - DNA, 33 bp, Homo sapien
aagccaagaacctgactgtattcagcctccaac

SEQ ID NO: 618579 - DNA, 33 bp, Homo sapien
atcaccaagcgttgagcccgtcgatctgggctg

SEQ ID NO: 618580 - DNA, 33 bp, Homo sapien
atcaccaagcgttgagtccgtcgatctgggctg

SEQ ID NO: 618581 - DNA, 33 bp, Homo sapien
gttaaaagaaatgtgacgacgaataaacacatg

SEQ ID NO: 618582 - DNA, 33 bp, Homo sapien
gttaaaagaaatgtgatgacgaataaacacatg

SEQ ID NO: 618583 - DNA, 33 bp, Homo sapien
aaccgcttcccaagccgctgcttacattgcatt

SEQ ID NO: 618584 - DNA, 33 bp, Homo sapien
aaccgcttcccaagcctctgcttacattgcatt

SEQ ID NO: 618585 - DNA, 33 bp, Homo sapien
ttggttgggaccaagaagtatagatctcctgtc

SEQ ID NO: 618586 - DNA, 33 bp, Homo sapien
ttggttgggaccaagacgtatagatctcctgtc

SEQ ID NO: 618587 - DNA, 33 bp, Homo sapien
actgaggtcggctccaagaagtgtcaaggcctg

SEQ ID NO: 618588 - DNA, 33 bp, Homo sapien
actgaggtcggctccaggaagtgtcaaggcctg

SEQ ID NO: 618589 - DNA, 33 bp, Homo sapien
cttctccagggaggccacaccgttgtcatgcct

SEQ ID NO: 618590 - DNA, 33 bp, Homo sapien
cttctccagggaggccgcaccgttgtcatgcct

SEQ ID NO: 618591 - DNA, 33 bp, Homo sapien
gagaggacaggtatggacagcttgcagaaggcc

SEQ ID NO: 618592 - DNA, 33 bp, Homo sapien
gagaggacaggtatggccagcttgcagaaggcc

SEQ ID NO: 618593 - DNA, 33 bp, Homo sapien
agccttctggtgcccacgcatttgcctgtccac

SEQ ID NO: 618594 - DNA, 33 bp, Homo sapien
agccttctggtgcccatgcatttgcctgtccac

SEQ ID NO: 618595 - DNA, 33 bp, Homo sapien
cctgttgaactcctacagatcccttgatagcca

SEQ ID NO: 618596 - DNA, 33 bp, Homo sapien
cctgttgaactcctacggatcccttgatagcca

SEQ ID NO: 618597 - DNA, 33 bp, Homo sapien
tttaaaaatattgagacgtgccagacatatagg

SEQ ID NO: 618598 - DNA, 33 bp, Homo sapien
tttaaaaatattgagatgtgccagacatatagg

SEQ ID NO: 618599 - DNA, 33 bp, Homo sapien
ggctagggtcttgggcgcctattaggacagtct

SEQ ID NO: 618600 - DNA, 33 bp, Homo sapien
ggctagggtcttgggctcctattaggacagtct

SEQ ID NO: 618601 - DNA, 33 bp, Homo sapien
ccctagacaactcgagaaggtagggctcaaccc

SEQ ID NO: 618602 - DNA, 33 bp, Homo sapien
ccctagacaactcgagcaggtagggctcaaccc

SEQ ID NO: 618603 - DNA, 33 bp, Homo sapien
taagacagtgtttgaaaacataatatgcatgtg

SEQ ID NO: 618604 - DNA, 33 bp, Homo sapien
taagacagtgtttgaacacataatatgcatgtg

SEQ ID NO: 618605 - DNA, 33 bp, Homo sapien
tttggacagtgcccggcacaaaggatgcccaat

SEQ ID NO: 618606 - DNA, 33 bp, Homo sapien
tttggacagtgcccggtacaaaggatgcccaat

SEQ ID NO: 618607 - DNA, 33 bp, Homo sapien
gttcggctcctttctacgggtagagctcaggcc

SEQ ID NO: 618608 - DNA, 33 bp, Homo sapien
gttcggctcctttctatgggtagagctcaggcc

SEQ ID NO: 618609 - DNA, 33 bp, Homo sapien
tgcatatactcacgacaggatgttgttaacata

SEQ ID NO: 618610 - DNA, 33 bp, Homo sapien
tgcatatactcacgacgggatgttgttaacata

SEQ ID NO: 618611 - DNA, 33 bp, Homo sapien
ttatagaaggtaaaacagagccacagagaagtt

SEQ ID NO: 618612 - DNA, 33 bp, Homo sapien
ttatagaaggtaaaaccgagccacagagaagtt

SEQ ID NO: 618613 - DNA, 33 bp, Homo sapien
cctgtaatgccagctactagcggggctgaggca

SEQ ID NO: 618614 - DNA, 33 bp, Homo sapien
cctgtaatgccagctagtagcggggctgaggca

SEQ ID NO: 618615 - DNA, 33 bp, Homo sapien
gccagcgcaagacacacgagtgaaccatctatc

SEQ ID NO: 618616 - DNA, 33 bp, Homo sapien
gccagcgcaagacacatgagtgaaccatctatc

SEQ ID NO: 618617 - DNA, 33 bp, Homo sapien
tcatgaactgcaggaacagacgtcaagcaaaaa

SEQ ID NO: 618618 - DNA, 33 bp, Homo sapien
tcatgaactgcaggaatagacgtcaagcaaaaa

SEQ ID NO: 618619 - DNA, 33 bp, Homo sapien
ctttcagagaagtacacctcccaaatcctttga

SEQ ID NO: 618620 - DNA, 33 bp, Homo sapien
ctttcagagaagtacagctcccaaatcctttga

SEQ ID NO: 618621 - DNA, 33 bp, Homo sapien
ctggggtccaggagaccgagagtcaccgagcca

SEQ ID NO: 618622 - DNA, 33 bp, Homo sapien
ctggggtccaggagacggagagtcaccgagcca

SEQ ID NO: 618623 - DNA, 33 bp, Homo sapien
gtcatgaacaatatcaccgaaggtttgaggtgg

SEQ ID NO: 618624 - DNA, 33 bp, Homo sapien
gtcatgaacaatatcatcgaaggtttgaggtgg

SEQ ID NO: 618625 - DNA, 33 bp, Homo sapien
gtaggtgagcgtgaacactggccaagagccaga

SEQ ID NO: 618626 - DNA, 33 bp, Homo sapien
gtaggtgagcgtgaacgctggccaagagccaga

SEQ ID NO: 618627 - DNA, 33 bp, Homo sapien
tggtctagctaggagcagaaaccagccagacta

SEQ ID NO: 618628 - DNA, 33 bp, Homo sapien
tggtctagctaggagcggaaaccagccagacta

SEQ ID NO: 618629 - DNA, 33 bp, Homo sapien
tgacttagtggaggacactcagctcagaggaga

SEQ ID NO: 618630 - DNA, 33 bp, Homo sapien
tgacttagtggaggacgctcagctcagaggaga

SEQ ID NO: 618631 - DNA, 33 bp, Homo sapien
aggcctgggagagagacagttggaatagaaggg

SEQ ID NO: 618632 - DNA, 33 bp, Homo sapien
aggcctgggagagagatagttggaatagaaggg

SEQ ID NO: 618633 - DNA, 33 bp, Homo sapien
tcccctcataaaaacactggcaggtgaacataa

SEQ ID NO: 618634 - DNA, 33 bp, Homo sapien
tcccctcataaaaacattggcaggtgaacataa

SEQ ID NO: 618635 - DNA, 33 bp, Homo sapien
cctgggcctccggcaccgagcaaagcttagaaa

SEQ ID NO: 618636 - DNA, 33 bp, Homo sapien
cctgggcctccggcactgagcaaagcttagaaa

SEQ ID NO: 618637 - DNA, 33 bp, Homo sapien
ataaactaccaaagtcccttccacaataggagt

SEQ ID NO: 618638 - DNA, 33 bp, Homo sapien
ataaactaccaaagtctcttccacaataggagt

SEQ ID NO: 618639 - DNA, 33 bp, Homo sapien
gtggctgaaggaggagaaagtgatgctgcagtc

SEQ ID NO: 618640 - DNA, 33 bp, Homo sapien
gtggctgaaggaggaggaagtgatgctgcagtc

SEQ ID NO: 618641 - DNA, 33 bp, Homo sapien
agtattaagcttctcaaccagcttgccctgaag

SEQ ID NO: 618642 - DNA, 33 bp, Homo sapien
agtattaagcttctcagccagcttgccctgaag

SEQ ID NO: 618643 - DNA, 33 bp, Homo sapien
tatgctgataagatgcacagtcacaagacagcc

SEQ ID NO: 618644 - DNA, 33 bp, Homo sapien
tatgctgataagatgcccagtcacaagacagcc

SEQ ID NO: 618645 - DNA, 33 bp, Homo sapien
aatcttggatttattcaaagtccttatgttgaa

SEQ ID NO: 618646 - DNA, 33 bp, Homo sapien
aatcttggatttattcgaagtccttatgttgaa

SEQ ID NO: 618647 - DNA, 33 bp, Homo sapien
agggcagcaggaatcacctcggattggtgggag

SEQ ID NO: 618648 - DNA, 33 bp, Homo sapien
agggcagcaggaatcagctcggattggtgggag

SEQ ID NO: 618649 - DNA, 33 bp, Homo sapien
ggcaacactttatagacgaggagccagaggtct

SEQ ID NO: 618650 - DNA, 33 bp, Homo sapien
ggcaacactttatagatgaggagccagaggtct

SEQ ID NO: 618651 - DNA, 33 bp, Homo sapien
aatgctaccttaagacactcctttgacttttgg

SEQ ID NO: 618652 - DNA, 33 bp, Homo sapien
aatgctaccttaagacgctcctttgacttttgg

SEQ ID NO: 618653 - DNA, 33 bp, Homo sapien
ccagggcatcaacggaatccaggatttgaaccc

SEQ ID NO: 618654 - DNA, 33 bp, Homo sapien
ccagggcatcaacggagtccaggatttgaaccc

SEQ ID NO: 618655 - DNA, 33 bp, Homo sapien
gttgatgccctgggcaagtccttaaagcccacc

SEQ ID NO: 618656 - DNA, 33 bp, Homo sapien
gttgatgccctgggcacgtccttaaagcccacc

SEQ ID NO: 618657 - DNA, 33 bp, Homo sapien
ctgaaacactaggatcaaactgtccattcagcc

SEQ ID NO: 618658 - DNA, 33 bp, Homo sapien
ctgaaacactaggatcgaactgtccattcagcc

SEQ ID NO: 618659 - DNA, 33 bp, Homo sapien
tcagccaggcaccttcaaactcctcccaggcat

SEQ ID NO: 618660 - DNA, 33 bp, Homo sapien
tcagccaggcaccttcgaactcctcccaggcat

SEQ ID NO: 618661 - DNA, 33 bp, Homo sapien
acaatatatgtgtctacgaaaatacttcgttgt

SEQ ID NO: 618662 - DNA, 33 bp, Homo sapien
acaatatatgtgtctatgaaaatacttcgttgt

SEQ ID NO: 618663 - DNA, 33 bp, Homo sapien
gaacctaaattgccaccgaattatagcaaaccg

SEQ ID NO: 618664 - DNA, 33 bp, Homo sapien
gaacctaaattgccactgaattatagcaaaccg

SEQ ID NO: 618665 - DNA, 33 bp, Homo sapien
cagagaatactaacagaaattcaatttgagttg

SEQ ID NO: 618666 - DNA, 33 bp, Homo sapien
cagagaatactaacaggaattcaatttgagttg

SEQ ID NO: 618667 - DNA, 33 bp, Homo sapien
gggacattttctgacacagcgttcaaggccagc

SEQ ID NO: 618668 - DNA, 33 bp, Homo sapien
gggacattttctgacagagcgttcaaggccagc

SEQ ID NO: 618669 - DNA, 33 bp, Homo sapien
ccatgtctttgtcttacgggaaattaacaaatg

SEQ ID NO: 618670 - DNA, 33 bp, Homo sapien
ccatgtctttgtcttaggggaaattaacaaatg

SEQ ID NO: 618671 - DNA, 33 bp, Homo sapien
aaaaaaaagagagagaaattaggtggcctgcct

SEQ ID NO: 618672 - DNA, 33 bp, Homo sapien
aaaaaaaagagagagagattaggtggcctgcct

SEQ ID NO: 618673 - DNA, 33 bp, Homo sapien
tgaggcacagataggccaagtgactcctccagg

SEQ ID NO: 618674 - DNA, 33 bp, Homo sapien
tgaggcacagataggcgaagtgactcctccagg

SEQ ID NO: 618675 - DNA, 33 bp, Homo sapien
cttcaaagtcagaactaagatacacataaatta

SEQ ID NO: 618676 - DNA, 33 bp, Homo sapien
cttcaaagtcagaactgagatacacataaatta

SEQ ID NO: 618677 - DNA, 33 bp, Homo sapien
tttgagcactacactacatattgggagcttcac

SEQ ID NO: 618678 - DNA, 33 bp, Homo sapien
tttgagcactacactatatattgggagcttcac

SEQ ID NO: 618679 - DNA, 33 bp, Homo sapien
attgggagcttcacagccattctgtggttcact

SEQ ID NO: 618680 - DNA, 33 bp, Homo sapien
attgggagcttcacagtcattctgtggttcact

SEQ ID NO: 618681 - DNA, 33 bp, Homo sapien
aaactactgatacacacgacactgtggctgaat

SEQ ID NO: 618682 - DNA, 33 bp, Homo sapien
aaactactgatacacatgacactgtggctgaat

SEQ ID NO: 618683 - DNA, 33 bp, Homo sapien
ttagctccctgatagacgggtgaatattttcca

SEQ ID NO: 618684 - DNA, 33 bp, Homo sapien
ttagctccctgatagatgggtgaatattttcca

SEQ ID NO: 618685 - DNA, 33 bp, Homo sapien
tttaatggctcagagacacaggaaaagctacct

SEQ ID NO: 618686 - DNA, 33 bp, Homo sapien
tttaatggctcagagatacaggaaaagctacct

SEQ ID NO: 618687 - DNA, 33 bp, Homo sapien
agaaatggaaaacaagcaggatgagtgcaggtg

SEQ ID NO: 618688 - DNA, 33 bp, Homo sapien
agaaatggaaaacaagtaggatgagtgcaggtg

SEQ ID NO: 618689 - DNA, 33 bp, Homo sapien
gcccatttgtggagaactgatgtctttttcttt

SEQ ID NO: 618690 - DNA, 33 bp, Homo sapien
gcccatttgtggagaattgatgtctttttcttt

SEQ ID NO: 618691 - DNA, 33 bp, Homo sapien
ttaaaagttcagaatacgtactcgcttaggcag

SEQ ID NO: 618692 - DNA, 33 bp, Homo sapien
ttaaaagttcagaatatgtactcgcttaggcag

SEQ ID NO: 618693 - DNA, 33 bp, Homo sapien
ctcctccttccagcaacgggcaattatgagctt

SEQ ID NO: 618694 - DNA, 33 bp, Homo sapien
ctcctccttccagcaatgggcaattatgagctt

SEQ ID NO: 618695 - DNA, 33 bp, Homo sapien
gatcttaatggacacccgaggctcctcctctac

SEQ ID NO: 618696 - DNA, 33 bp, Homo sapien
gatcttaatggacacctgaggctcctcctctac

SEQ ID NO: 618697 - DNA, 33 bp, Homo sapien
gatctcaagttgcccaaagaggaaggcaccata

SEQ ID NO: 618698 - DNA, 33 bp, Homo sapien
gatctcaagttgcccagagaggaaggcaccata

SEQ ID NO: 618699 - DNA, 33 bp, Homo sapien
agaatgtgtgtgaattgaactgtgatttaaggc

SEQ ID NO: 618700 - DNA, 33 bp, Homo sapien
agaatgtgtgtgaatttaactgtgatttaaggc

SEQ ID NO: 618701 - DNA, 33 bp, Homo sapien
cctagaacaatacctacgacgtaatagatgctc

SEQ ID NO: 618702 - DNA, 33 bp, Homo sapien
cctagaacaatacctatgacgtaatagatgctc

SEQ ID NO: 618703 - DNA, 33 bp, Homo sapien
gctggtgaatgctaggccaaaggattccagaga

SEQ ID NO: 618704 - DNA, 33 bp, Homo sapien
gctggtgaatgctaggtcaaaggattccagaga

SEQ ID NO: 618705 - DNA, 33 bp, Homo sapien
ggtagtgtggaagagccgaaaggagactcctgc

SEQ ID NO: 618706 - DNA, 33 bp, Homo sapien
ggtagtgtggaagagctgaaaggagactcctgc

SEQ ID NO: 618707 - DNA, 33 bp, Homo sapien
gcctcaccttctgccagtagtgcctcctgatgc

SEQ ID NO: 618708 - DNA, 33 bp, Homo sapien
gcctcaccttctgccattagtgcctcctgatgc

SEQ ID NO: 618709 - DNA, 33 bp, Homo sapien
ctgagcttgggacgagacagagaaatacaccga

SEQ ID NO: 618710 - DNA, 33 bp, Homo sapien
ctgagcttgggacgaggcagagaaatacaccga

SEQ ID NO: 618711 - DNA, 33 bp, Homo sapien
tgcagcatggccaataactgtgtgatctttctc

SEQ ID NO: 618712 - DNA, 33 bp, Homo sapien
tgcagcatggccaatatctgtgtgatctttctc

SEQ ID NO: 618713 - DNA, 33 bp, Homo sapien
ggccaggatgccaaaccgggagccagctggaac

SEQ ID NO: 618714 - DNA, 33 bp, Homo sapien
ggccaggatgccaaactgggagccagctggaac

SEQ ID NO: 618715 - DNA, 33 bp, Homo sapien
gagcatggcctcctcacggaaatagcccctcat

SEQ ID NO: 618716 - DNA, 33 bp, Homo sapien
gagcatggcctcctcatggaaatagcccctcat

SEQ ID NO: 618717 - DNA, 33 bp, Homo sapien
aacccaatcaaggtacaattagaacattcccac

SEQ ID NO: 618718 - DNA, 33 bp, Homo sapien
aacccaatcaaggtaccattagaacattcccac

SEQ ID NO: 618719 - DNA, 33 bp, Homo sapien
gggagacgagagataccggtcaggagcatgacg

SEQ ID NO: 618720 - DNA, 33 bp, Homo sapien
gggagacgagagatactggtcaggagcatgacg

SEQ ID NO: 618721 - DNA, 33 bp, Homo sapien
aggtagacactgactacgtgttcatttcccaga

SEQ ID NO: 618722 - DNA, 33 bp, Homo sapien
aggtagacactgactatgtgttcatttcccaga

SEQ ID NO: 618723 - DNA, 33 bp, Homo sapien
ctcgctacaaggaagaggatttcgctgtgtgga

SEQ ID NO: 618724 - DNA, 33 bp, Homo sapien
ctcgctacaaggaagatgatttcgctgtgtgga

SEQ ID NO: 618725 - DNA, 33 bp, Homo sapien
gatttaatatatttgaacctgatgttagtgagc

SEQ ID NO: 618726 - DNA, 33 bp, Homo sapien
gatttaatatatttgagcctgatgttagtgagc

SEQ ID NO: 618727 - DNA, 33 bp, Homo sapien
cctatatgaattgcatgatagactgatggcagc

SEQ ID NO: 618728 - DNA, 33 bp, Homo sapien
cctatatgaattgcattatagactgatggcagc

SEQ ID NO: 618729 - DNA, 33 bp, Homo sapien
tcttcacctggctttacaggatcagtatttccc

SEQ ID NO: 618730 - DNA, 33 bp, Homo sapien
tcttcacctggctttataggatcagtatttccc

SEQ ID NO: 618731 - DNA, 33 bp, Homo sapien
gggtccagagctcctacagttctcccaagatga

SEQ ID NO: 618732 - DNA, 33 bp, Homo sapien
gggtccagagctcctatagttctcccaagatga

SEQ ID NO: 618733 - DNA, 33 bp, Homo sapien
tttgtgtgacaaaccaccaacgatgccacccca

SEQ ID NO: 618734 - DNA, 33 bp, Homo sapien
tttgtgtgacaaaccagcaacgatgccacccca

SEQ ID NO: 618735 - DNA, 33 bp, Homo sapien
ggttacaaatggtccacgaggtcatgccaaatg

SEQ ID NO: 618736 - DNA, 33 bp, Homo sapien
ggttacaaatggtccatgaggtcatgccaaatg

SEQ ID NO: 618737 - DNA, 33 bp, Homo sapien
caaagccttagacagagactcgtactcaagtgt

SEQ ID NO: 618738 - DNA, 33 bp, Homo sapien
caaagccttagacagatactcgtactcaagtgt

SEQ ID NO: 618739 - DNA, 33 bp, Homo sapien
ggagtggggatgctgcagagttaaatggcaagg

SEQ ID NO: 618740 - DNA, 33 bp, Homo sapien
ggagtggggatgctgcggagttaaatggcaagg

SEQ ID NO: 618741 - DNA, 33 bp, Homo sapien
tttctgggtgatcggcacaccctacatcagatg

SEQ ID NO: 618742 - DNA, 33 bp, Homo sapien
tttctgggtgatcggcgcaccctacatcagatg

SEQ ID NO: 618743 - DNA, 33 bp, Homo sapien
gaatattttcaacaagacatagaggtgcttttg

SEQ ID NO: 618744 - DNA, 33 bp, Homo sapien
gaatattttcaacaagccatagaggtgcttttg

SEQ ID NO: 618745 - DNA, 33 bp, Homo sapien
cctctgaggaagcctgaaccaagacagaggaat

SEQ ID NO: 618746 - DNA, 33 bp, Homo sapien
cctctgaggaagcctggaccaagacagaggaat

SEQ ID NO: 618747 - DNA, 33 bp, Homo sapien
gagaagaaacagtaacgcaatgaacgaacaccc

SEQ ID NO: 618748 - DNA, 33 bp, Homo sapien
gagaagaaacagtaactcaatgaacgaacaccc

SEQ ID NO: 618749 - DNA, 33 bp, Homo sapien
gaagtttccacgacaacagaggtcttagcaaaa

SEQ ID NO: 618750 - DNA, 33 bp, Homo sapien
gaagtttccacgacaatagaggtcttagcaaaa

SEQ ID NO: 618751 - DNA, 33 bp, Homo sapien
cagtaacatacaaataccctgacatttcttcag

SEQ ID NO: 618752 - DNA, 33 bp, Homo sapien
cagtaacatacaaatatcctgacatttcttcag

SEQ ID NO: 618753 - DNA, 33 bp, Homo sapien
gcaatagcggcaatgaaaacaagaatagcagct

SEQ ID NO: 618754 - DNA, 33 bp, Homo sapien
gcaatagcggcaatgacaacaagaatagcagct

SEQ ID NO: 618755 - DNA, 33 bp, Homo sapien
cttgtcttatggtgcccagacacttagcacagg

SEQ ID NO: 618756 - DNA, 33 bp, Homo sapien
cttgtcttatggtgccgagacacttagcacagg

SEQ ID NO: 618757 - DNA, 33 bp, Homo sapien
tcccagttctacaattcaacaagctacatgacc

SEQ ID NO: 618758 - DNA, 33 bp, Homo sapien
tcccagttctacaatttaacaagctacatgacc

SEQ ID NO: 618759 - DNA, 33 bp, Homo sapien
ggccaacatctcataacgtggacagctccctct

SEQ ID NO: 618760 - DNA, 33 bp, Homo sapien
ggccaacatctcataatgtggacagctccctct

SEQ ID NO: 618761 - DNA, 33 bp, Homo sapien
tgttactccagatttgaaagctcggctgggctc

SEQ ID NO: 618762 - DNA, 33 bp, Homo sapien
tgttactccagatttgcaagctcggctgggctc

SEQ ID NO: 618763 - DNA, 33 bp, Homo sapien
caagaatcctagaagcagacctattatccacca

SEQ ID NO: 618764 - DNA, 33 bp, Homo sapien
caagaatcctagaagcggacctattatccacca

SEQ ID NO: 618765 - DNA, 33 bp, Homo sapien
actgacttaagaatccaacaacttaatttaact

SEQ ID NO: 618766 - DNA, 33 bp, Homo sapien
actgacttaagaatccgacaacttaatttaact

SEQ ID NO: 618767 - DNA, 33 bp, Homo sapien
ttttatgaggcagggaaagtgaatatgtaatca

SEQ ID NO: 618768 - DNA, 33 bp, Homo sapien
ttttatgaggcagggagagtgaatatgtaatca

SEQ ID NO: 618769 - DNA, 33 bp, Homo sapien
gtgactgcttcttgtcaattccatgtgtgattt

SEQ ID NO: 618770 - DNA, 33 bp, Homo sapien
gtgactgcttcttgtccattccatgtgtgattt

SEQ ID NO: 618771 - DNA, 33 bp, Homo sapien
taaagagaaatggctccataacaacccaacaaa

SEQ ID NO: 618772 - DNA, 33 bp, Homo sapien
taaagagaaatggctcgataacaacccaacaaa

SEQ ID NO: 618773 - DNA, 33 bp, Homo sapien
tgtagcctggaacactcacttcttgaagggggg

SEQ ID NO: 618774 - DNA, 33 bp, Homo sapien
tgtagcctggaacacttacttcttgaagggggg

SEQ ID NO: 618775 - DNA, 33 bp, Homo sapien
ctgctacaaagagtcccgagcagttcctaacaa

SEQ ID NO: 618776 - DNA, 33 bp, Homo sapien
ctgctacaaagagtcctgagcagttcctaacaa

SEQ ID NO: 618777 - DNA, 33 bp, Homo sapien
gaggtgtggcccacagaactgagctctggccag

SEQ ID NO: 618778 - DNA, 33 bp, Homo sapien
gaggtgtggcccacaggactgagctctggccag

SEQ ID NO: 618779 - DNA, 33 bp, Homo sapien
ccttttcctttgggtaacagaatgccccccggt

SEQ ID NO: 618780 - DNA, 33 bp, Homo sapien
ccttttcctttgggtagcagaatgccccccggt

SEQ ID NO: 618781 - DNA, 33 bp, Homo sapien
ataatttggatgctaacgtttcatcaggaatac

SEQ ID NO: 618782 - DNA, 33 bp, Homo sapien
ataatttggatgctaatgtttcatcaggaatac

SEQ ID NO: 618783 - DNA, 33 bp, Homo sapien
cctagaggagagattacaatgaacgtaaataat

SEQ ID NO: 618784 - DNA, 33 bp, Homo sapien
cctagaggagagattataatgaacgtaaataat

SEQ ID NO: 618785 - DNA, 33 bp, Homo sapien
cgccttgcagagagcactctgacttactgtagc

SEQ ID NO: 618786 - DNA, 33 bp, Homo sapien
cgccttgcagagagcattctgacttactgtagc

SEQ ID NO: 618787 - DNA, 33 bp, Homo sapien
ctctgtccatctatcaataacaaaatctccaag

SEQ ID NO: 618788 - DNA, 33 bp, Homo sapien
ctctgtccatctatcagtaacaaaatctccaag

SEQ ID NO: 618789 - DNA, 33 bp, Homo sapien
ggaaggttagtaatagaaatgtgcgaggtcaga

SEQ ID NO: 618790 - DNA, 33 bp, Homo sapien
ggaaggttagtaataggaatgtgcgaggtcaga

SEQ ID NO: 618791 - DNA, 33 bp, Homo sapien
ctcatgcacgtgcaacagactacttagcagctg

SEQ ID NO: 618792 - DNA, 33 bp, Homo sapien
ctcatgcacgtgcaacggactacttagcagctg

SEQ ID NO: 618793 - DNA, 33 bp, Homo sapien
catcactcaccatatcaagctgatcctatactc

SEQ ID NO: 618794 - DNA, 33 bp, Homo sapien
catcactcaccatatcgagctgatcctatactc

SEQ ID NO: 618795 - DNA, 33 bp, Homo sapien
tgaagctgccaagtgcaaatcaattatagctta

SEQ ID NO: 618796 - DNA, 33 bp, Homo sapien
tgaagctgccaagtgctaatcaattatagctta

SEQ ID NO: 618797 - DNA, 33 bp, Homo sapien
caaatgcataagcagcaaaagaaaggtggaaaa

SEQ ID NO: 618798 - DNA, 33 bp, Homo sapien
caaatgcataagcagcgaaagaaaggtggaaaa

SEQ ID NO: 618799 - DNA, 33 bp, Homo sapien
ttaaagaggcaggtgacggttctccctctgcag

SEQ ID NO: 618800 - DNA, 33 bp, Homo sapien
ttaaagaggcaggtgatggttctccctctgcag

SEQ ID NO: 618801 - DNA, 33 bp, Homo sapien
ccttcagtattgaatacggccagcaaggagaat

SEQ ID NO: 618802 - DNA, 33 bp, Homo sapien
ccttcagtattgaatagggccagcaaggagaat

SEQ ID NO: 618803 - DNA, 33 bp, Homo sapien
ttacatttccttaagacagttatgctctttgat

SEQ ID NO: 618804 - DNA, 33 bp, Homo sapien
ttacatttccttaagatagttatgctctttgat

SEQ ID NO: 618805 - DNA, 33 bp, Homo sapien
gtcacaatgctaagtaataagatgtataattag

SEQ ID NO: 618806 - DNA, 33 bp, Homo sapien
gtcacaatgctaagtagtaagatgtataattag

SEQ ID NO: 618807 - DNA, 33 bp, Homo sapien
gctattccttccttgacaatgctgttccctgtg

SEQ ID NO: 618808 - DNA, 33 bp, Homo sapien
gctattccttccttgagaatgctgttccctgtg

SEQ ID NO: 618809 - DNA, 33 bp, Homo sapien
aactttgctagattacaatttttcctttgtggc

SEQ ID NO: 618810 - DNA, 33 bp, Homo sapien
aactttgctagattacgatttttcctttgtggc

SEQ ID NO: 618811 - DNA, 33 bp, Homo sapien
ggaattcagggcccaccgaggtagaagactctg

SEQ ID NO: 618812 - DNA, 33 bp, Homo sapien
ggaattcagggcccactgaggtagaagactctg

SEQ ID NO: 618813 - DNA, 33 bp, Homo sapien
atcctgacactgagggacaactagcctaacttc

SEQ ID NO: 618814 - DNA, 33 bp, Homo sapien
atcctgacactgaggggcaactagcctaacttc

SEQ ID NO: 618815 - DNA, 33 bp, Homo sapien
ttgttgatctagtcaacggatgtggtttttgag

SEQ ID NO: 618816 - DNA, 33 bp, Homo sapien
ttgttgatctagtcaatggatgtggtttttgag

SEQ ID NO: 618817 - DNA, 33 bp, Homo sapien
aaaggaaaagcatccacaagaacaggcccttgt

SEQ ID NO: 618818 - DNA, 33 bp, Homo sapien
aaaggaaaagcatccataagaacaggcccttgt

SEQ ID NO: 618819 - DNA, 33 bp, Homo sapien
ttacgaatatcgcaagccatttcaaattcattt

SEQ ID NO: 618820 - DNA, 33 bp, Homo sapien
ttacgaatatcgcaagtcatttcaaattcattt

SEQ ID NO: 618821 - DNA, 33 bp, Homo sapien
aacgctagaaatactgaataacataaattaaat

SEQ ID NO: 618822 - DNA, 33 bp, Homo sapien
aacgctagaaatactggataacataaattaaat

SEQ ID NO: 618823 - DNA, 33 bp, Homo sapien
gatataaacacccaccaaaggcagcctggtttt

SEQ ID NO: 618824 - DNA, 33 bp, Homo sapien
gatataaacacccaccgaaggcagcctggtttt

SEQ ID NO: 618825 - DNA, 33 bp, Homo sapien
gcagagtggggtccacaagacatcccagggagg

SEQ ID NO: 618826 - DNA, 33 bp, Homo sapien
gcagagtggggtccacgagacatcccagggagg

SEQ ID NO: 618827 - DNA, 33 bp, Homo sapien
ccaactccaaagtataaactccatgagggcagg

SEQ ID NO: 618828 - DNA, 33 bp, Homo sapien
ccaactccaaagtatatactccatgagggcagg

SEQ ID NO: 618829 - DNA, 33 bp, Homo sapien
cctctgactcatccacaactccagctaccacat

SEQ ID NO: 618830 - DNA, 33 bp, Homo sapien
cctctgactcatccaccactccagctaccacat

SEQ ID NO: 618831 - DNA, 33 bp, Homo sapien
ggaaggcaggtgggcacggtgagaaatgtttgt

SEQ ID NO: 618832 - DNA, 33 bp, Homo sapien
ggaaggcaggtgggcatggtgagaaatgtttgt

SEQ ID NO: 618833 - DNA, 33 bp, Homo sapien
attgtcatgagatgtacggaaagggtggagcac

SEQ ID NO: 618834 - DNA, 33 bp, Homo sapien
attgtcatgagatgtatggaaagggtggagcac

SEQ ID NO: 618835 - DNA, 33 bp, Homo sapien
tacatccttttccagagatccatgttggcacgt

SEQ ID NO: 618836 - DNA, 33 bp, Homo sapien
tacatccttttccagatatccatgttggcacgt

SEQ ID NO: 618837 - DNA, 33 bp, Homo sapien
ctcgaggctccagagcactgtccaggatcacat

SEQ ID NO: 618838 - DNA, 33 bp, Homo sapien
ctcgaggctccagagcgctgtccaggatcacat

SEQ ID NO: 618839 - DNA, 33 bp, Homo sapien
agtcaactcacaacccaccattactggagaagt

SEQ ID NO: 618840 - DNA, 33 bp, Homo sapien
agtcaactcacaacccgccattactggagaagt

SEQ ID NO: 618841 - DNA, 33 bp, Homo sapien
gatctctatacactcactagttaatcagattat

SEQ ID NO: 618842 - DNA, 33 bp, Homo sapien
gatctctatacactcagtagttaatcagattat

SEQ ID NO: 618843 - DNA, 33 bp, Homo sapien
gactttccaggaacaaaaaagatttgagtgcag

SEQ ID NO: 618844 - DNA, 33 bp, Homo sapien
gactttccaggaacaagaaagatttgagtgcag

SEQ ID NO: 618845 - DNA, 33 bp, Homo sapien
ggtttattgacataaaagtgactgattgttaga

SEQ ID NO: 618846 - DNA, 33 bp, Homo sapien
ggtttattgacataaaggtgactgattgttaga

SEQ ID NO: 618847 - DNA, 33 bp, Homo sapien
gaggtgacagtgaaccaaatgaatggatgtgtc

SEQ ID NO: 618848 - DNA, 33 bp, Homo sapien
gaggtgacagtgaaccgaatgaatggatgtgtc

SEQ ID NO: 618849 - DNA, 33 bp, Homo sapien
cttcctcaccaggccacgcttttaaatcactag

SEQ ID NO: 618850 - DNA, 33 bp, Homo sapien
cttcctcaccaggccatgcttttaaatcactag

SEQ ID NO: 618851 - DNA, 33 bp, Homo sapien
tcatcagactccagagaataccggcatgagcag

SEQ ID NO: 618852 - DNA, 33 bp, Homo sapien
tcatcagactccagaggataccggcatgagcag

SEQ ID NO: 618853 - DNA, 33 bp, Homo sapien
atgtgttaaaggctataagggaattttgtgaac

SEQ ID NO: 618854 - DNA, 33 bp, Homo sapien
atgtgttaaaggctatcagggaattttgtgaac

SEQ ID NO: 618855 - DNA, 33 bp, Homo sapien
ctggcctgcagtgacacagccggaagaagagat

SEQ ID NO: 618856 - DNA, 33 bp, Homo sapien
ctggcctgcagtgacatagccggaagaagagat

SEQ ID NO: 618857 - DNA, 33 bp, Homo sapien
ttggacactcccaggaataaggagctagcaaga

SEQ ID NO: 618858 - DNA, 33 bp, Homo sapien
ttggacactcccaggactaaggagctagcaaga

SEQ ID NO: 618859 - DNA, 33 bp, Homo sapien
aatctgcccaagttcaaccgggactcagcagtg

SEQ ID NO: 618860 - DNA, 33 bp, Homo sapien
aatctgcccaagttcagccgggactcagcagtg

SEQ ID NO: 618861 - DNA, 33 bp, Homo sapien
agaattgaagtcaaaacctacactttaattgca

SEQ ID NO: 618862 - DNA, 33 bp, Homo sapien
agaattgaagtcaaaagctacactttaattgca

SEQ ID NO: 618863 - DNA, 33 bp, Homo sapien
cactcccagaaaacaagactcatctcctagtga

SEQ ID NO: 618864 - DNA, 33 bp, Homo sapien
cactcccagaaaacaatactcatctcctagtga

SEQ ID NO: 618865 - DNA, 33 bp, Homo sapien
gttagtcagtgtctgacggtggctgagctgcaa

SEQ ID NO: 618866 - DNA, 33 bp, Homo sapien
gttagtcagtgtctgatggtggctgagctgcaa

SEQ ID NO: 618867 - DNA, 33 bp, Homo sapien
cacatcatgactgggaactcaatctttaaggtt

SEQ ID NO: 618868 - DNA, 33 bp, Homo sapien
cacatcatgactgggagctcaatctttaaggtt

SEQ ID NO: 618869 - DNA, 33 bp, Homo sapien
aagtttataggaggcaaaaacagatgggatgaa

SEQ ID NO: 618870 - DNA, 33 bp, Homo sapien
aagtttataggaggcagaaacagatgggatgaa

SEQ ID NO: 618871 - DNA, 33 bp, Homo sapien
acaacttccagagttacctcccaatcagcaaac

SEQ ID NO: 618872 - DNA, 33 bp, Homo sapien
acaacttccagagttatctcccaatcagcaaac

SEQ ID NO: 618873 - DNA, 33 bp, Homo sapien
gagcaaatctgaagtccaaaataagtgaacgag

SEQ ID NO: 618874 - DNA, 33 bp, Homo sapien
gagcaaatctgaagtcgaaaataagtgaacgag

SEQ ID NO: 618875 - DNA, 33 bp, Homo sapien
ggaggagaggtgaaaaaaatggggagcgcttgc

SEQ ID NO: 618876 - DNA, 33 bp, Homo sapien
ggaggagaggtgaaaagaatggggagcgcttgc

SEQ ID NO: 618877 - DNA, 33 bp, Homo sapien
acatagctttactagaaactgccagataggttt

SEQ ID NO: 618878 - DNA, 33 bp, Homo sapien
acatagctttactagatactgccagataggttt

SEQ ID NO: 618879 - DNA, 33 bp, Homo sapien
agtcccacaagagagacggttgcctgcagcccc

SEQ ID NO: 618880 - DNA, 33 bp, Homo sapien
agtcccacaagagagatggttgcctgcagcccc

SEQ ID NO: 618881 - DNA, 33 bp, Homo sapien
gtggctaacccagtgaagtactgacaaggcaca

SEQ ID NO: 618882 - DNA, 33 bp, Homo sapien
gtggctaacccagtgacgtactgacaaggcaca

SEQ ID NO: 618883 - DNA, 33 bp, Homo sapien
ttcagaacagagcctcagaaggtctactaaaac

SEQ ID NO: 618884 - DNA, 33 bp, Homo sapien
ttcagaacagagcctcggaaggtctactaaaac

SEQ ID NO: 618885 - DNA, 33 bp, Homo sapien
gctggttagatcctgccccatggtacacttact

SEQ ID NO: 618886 - DNA, 33 bp, Homo sapien
gctggttagatcctgctccatggtacacttact

SEQ ID NO: 618887 - DNA, 33 bp, Homo sapien
tgatgcatttcactataaaaataaagctcgata

SEQ ID NO: 618888 - DNA, 33 bp, Homo sapien
tgatgcatttcactatcaaaataaagctcgata

SEQ ID NO: 618889 - DNA, 33 bp, Homo sapien
gttacactgtgatatacacttgtcagtaccaac

SEQ ID NO: 618890 - DNA, 33 bp, Homo sapien
gttacactgtgatatatacttgtcagtaccaac

SEQ ID NO: 618891 - DNA, 33 bp, Homo sapien
aatagtggtaatgacaacagtaacaggcattgg

SEQ ID NO: 618892 - DNA, 33 bp, Homo sapien
aatagtggtaatgacagcagtaacaggcattgg

SEQ ID NO: 618893 - DNA, 33 bp, Homo sapien
gtgcaggctcaaggggcatctgagtgagaacct

SEQ ID NO: 618894 - DNA, 33 bp, Homo sapien
gtgcaggctcaaggggtatctgagtgagaacct

SEQ ID NO: 618895 - DNA, 33 bp, Homo sapien
ccaagcacaatagccacgtatgctacggttttc

SEQ ID NO: 618896 - DNA, 33 bp, Homo sapien
ccaagcacaatagccatgtatgctacggttttc

SEQ ID NO: 618897 - DNA, 33 bp, Homo sapien
caggccgctctgtaaccgaaagaagccacatgg

SEQ ID NO: 618898 - DNA, 33 bp, Homo sapien
caggccgctctgtaactgaaagaagccacatgg

SEQ ID NO: 618899 - DNA, 33 bp, Homo sapien
ctacctcagttagttagactggttttcctcctc

SEQ ID NO: 618900 - DNA, 33 bp, Homo sapien
ctacctcagttagttatactggttttcctcctc

SEQ ID NO: 618901 - DNA, 33 bp, Homo sapien
ggttcaagttatccacagactatacctcctttt

SEQ ID NO: 618902 - DNA, 33 bp, Homo sapien
ggttcaagttatccacggactatacctcctttt

SEQ ID NO: 618903 - DNA, 33 bp, Homo sapien
tctccttgcctattaactgctactaaagattta

SEQ ID NO: 618904 - DNA, 33 bp, Homo sapien
tctccttgcctattaattgctactaaagattta

SEQ ID NO: 618905 - DNA, 33 bp, Homo sapien
cacaaacccaggcaccactatctaaaagagaaa

SEQ ID NO: 618906 - DNA, 33 bp, Homo sapien
cacaaacccaggcaccgctatctaaaagagaaa

SEQ ID NO: 618907 - DNA, 33 bp, Homo sapien
ttttctgtttgagagacacattagcacattgta

SEQ ID NO: 618908 - DNA, 33 bp, Homo sapien
ttttctgtttgagagagacattagcacattgta

SEQ ID NO: 618909 - DNA, 33 bp, Homo sapien
ttaatgacttgtttaaagtgacagtacaagttt

SEQ ID NO: 618910 - DNA, 33 bp, Homo sapien
ttaatgacttgtttaaggtgacagtacaagttt

SEQ ID NO: 618911 - DNA, 33 bp, Homo sapien
ttattctgccagtgaagaattttcaatacagtc

SEQ ID NO: 618912 - DNA, 33 bp, Homo sapien
ttattctgccagtgaataattttcaatacagtc

SEQ ID NO: 618913 - DNA, 33 bp, Homo sapien
agtatctattaatgtaccttacttggaagtagg

SEQ ID NO: 618914 - DNA, 33 bp, Homo sapien
agtatctattaatgtatcttacttggaagtagg

SEQ ID NO: 618915 - DNA, 33 bp, Homo sapien
ttgagtttctgttctccaattgttgggtttgga

SEQ ID NO: 618916 - DNA, 33 bp, Homo sapien
ttgagtttctgttctctaattgttgggtttgga

SEQ ID NO: 618917 - DNA, 33 bp, Homo sapien
gatagatggtaagacacggtttttgctctgaca

SEQ ID NO: 618918 - DNA, 33 bp, Homo sapien
gatagatggtaagacatggtttttgctctgaca

SEQ ID NO: 618919 - DNA, 33 bp, Homo sapien
gtaaaaatattcatcactgagaaaaaggacagc

SEQ ID NO: 618920 - DNA, 33 bp, Homo sapien
gtaaaaatattcatcattgagaaaaaggacagc

SEQ ID NO: 618921 - DNA, 33 bp, Homo sapien
actattcttatggcccaacaaccaggtctgttt

SEQ ID NO: 618922 - DNA, 33 bp, Homo sapien
actattcttatggcccgacaaccaggtctgttt

SEQ ID NO: 618923 - DNA, 33 bp, Homo sapien
agccacatctgggcaacagaagtgcgccaaaag

SEQ ID NO: 618924 - DNA, 33 bp, Homo sapien
agccacatctgggcaatagaagtgcgccaaaag

SEQ ID NO: 618925 - DNA, 33 bp, Homo sapien
gggttgagttgagctaagtgaaggggtcttggg

SEQ ID NO: 618926 - DNA, 33 bp, Homo sapien
gggttgagttgagctaggtgaaggggtcttggg

SEQ ID NO: 618927 - DNA, 33 bp, Homo sapien
atggtgcagattggacagcatagtgtagaagga

SEQ ID NO: 618928 - DNA, 33 bp, Homo sapien
atggtgcagattggaccgcatagtgtagaagga

SEQ ID NO: 618929 - DNA, 33 bp, Homo sapien
caccgtgggtattcacagaaatgagataccagg

SEQ ID NO: 618930 - DNA, 33 bp, Homo sapien
caccgtgggtattcacggaaatgagataccagg

SEQ ID NO: 618931 - DNA, 33 bp, Homo sapien
agatattctttgcacactatttcctctcagagt

SEQ ID NO: 618932 - DNA, 33 bp, Homo sapien
agatattctttgcacattatttcctctcagagt

SEQ ID NO: 618933 - DNA, 33 bp, Homo sapien
agaaagtatcaaggtaaagtgacctggtatatg

SEQ ID NO: 618934 - DNA, 33 bp, Homo sapien
agaaagtatcaaggtacagtgacctggtatatg

SEQ ID NO: 618935 - DNA, 33 bp, Homo sapien
cataaatattaactgcgaaaatttgccattcat

SEQ ID NO: 618936 - DNA, 33 bp, Homo sapien
cataaatattaactgctaaaatttgccattcat

SEQ ID NO: 618937 - DNA, 33 bp, Homo sapien
aggacttcagcagttcaactcagacatctcact

SEQ ID NO: 618938 - DNA, 33 bp, Homo sapien
aggacttcagcagttcgactcagacatctcact

SEQ ID NO: 618939 - DNA, 33 bp, Homo sapien
gcaaagaggtcgttcacagaattttaagcaaaa

SEQ ID NO: 618940 - DNA, 33 bp, Homo sapien
gcaaagaggtcgttcatagaattttaagcaaaa

SEQ ID NO: 618941 - DNA, 33 bp, Homo sapien
tattctttaaattatcaagctcttggctcctgg

SEQ ID NO: 618942 - DNA, 33 bp, Homo sapien
tattctttaaattatcgagctcttggctcctgg

SEQ ID NO: 618943 - DNA, 33 bp, Homo sapien
aggaactacttcctccaaactctccattattcc

SEQ ID NO: 618944 - DNA, 33 bp, Homo sapien
aggaactacttcctccgaactctccattattcc

SEQ ID NO: 618945 - DNA, 33 bp, Homo sapien; identical to SEQ ID NO: 618943

SEQ ID NO: 618946 - DNA, 33 bp, Homo sapien; identical to SEQ ID NO: 618944

SEQ ID NO: 618947 - DNA, 33 bp, Homo sapien
attgtatcctgaaaaacagatccatatcacata

SEQ ID NO: 618948 - DNA, 33 bp, Homo sapien
attgtatcctgaaaaagagatccatatcacata

SEQ ID NO: 618949 - DNA, 33 bp, Homo sapien
ttgaaattcgacaaacaaggtgatttctagttg

SEQ ID NO: 618950 - DNA, 33 bp, Homo sapien
ttgaaattcgacaaacgaggtgatttctagttg

SEQ ID NO: 618951 - DNA, 33 bp, Homo sapien
cttcaggccttcagaaaccaaagtgatgacaac

SEQ ID NO: 618952 - DNA, 33 bp, Homo sapien
cttcaggccttcagaagccaaagtgatgacaac

SEQ ID NO: 618953 - DNA, 33 bp, Homo sapien
ctaatgatgaggacaaagtgtaccatgatgtaa

SEQ ID NO: 618954 - DNA, 33 bp, Homo sapien
ctaatgatgaggacaacgtgtaccatgatgtaa

SEQ ID NO: 618955 - DNA, 33 bp, Homo sapien
agatcaaagcagatacagaccttgaaactatgt

SEQ ID NO: 618956 - DNA, 33 bp, Homo sapien
agatcaaagcagatacggaccttgaaactatgt

SEQ ID NO: 618957 - DNA, 33 bp, Homo sapien
caaaatgccattagtaactcccttgagtgtctt

SEQ ID NO: 618958 - DNA, 33 bp, Homo sapien
caaaatgccattagtatctcccttgagtgtctt

SEQ ID NO: 618959 - DNA, 33 bp, Homo sapien
acattgacccctaccacataacacaacaactcc

SEQ ID NO: 618960 - DNA, 33 bp, Homo sapien
acattgacccctaccatataacacaacaactcc

SEQ ID NO: 618961 - DNA, 33 bp, Homo sapien
acaaaaaatcataatgcatggttactctgctca

SEQ ID NO: 618962 - DNA, 33 bp, Homo sapien
acaaaaaatcataatggatggttactctgctca

SEQ ID NO: 618963 - DNA, 33 bp, Homo sapien
gcacaaatacttaccactgcatgtaactgcaca

SEQ ID NO: 618964 - DNA, 33 bp, Homo sapien
gcacaaatacttaccattgcatgtaactgcaca

SEQ ID NO: 618965 - DNA, 33 bp, Homo sapien
tgctgcctctcgtttgcacttctcacaggggca

SEQ ID NO: 618966 - DNA, 33 bp, Homo sapien
tgctgcctctcgtttgtacttctcacaggggca

SEQ ID NO: 618967 - DNA, 33 bp, Homo sapien
tgaaatgggtagtggaagaaggaagtgtcatag

SEQ ID NO: 618968 - DNA, 33 bp, Homo sapien
tgaaatgggtagtggaggaaggaagtgtcatag

SEQ ID NO: 618969 - DNA, 33 bp, Homo sapien
tccccaatgtaatcatcaactccttgaaatggt

SEQ ID NO: 618970 - DNA, 33 bp, Homo sapien
tccccaatgtaatcattaactccttgaaatggt

SEQ ID NO: 618971 - DNA, 33 bp, Homo sapien
aacaccatctggaaaacagcccaagctaggata

SEQ ID NO: 618972 - DNA, 33 bp, Homo sapien
aacaccatctggaaaatagcccaagctaggata

SEQ ID NO: 618973 - DNA, 33 bp, Homo sapien
tactcacttttgataacccttgtatttctatag

SEQ ID NO: 618974 - DNA, 33 bp, Homo sapien
tactcacttttgataatccttgtatttctatag

SEQ ID NO: 618975 - DNA, 33 bp, Homo sapien
actcagccctgtagaactcccactgttacctac

SEQ ID NO: 618976 - DNA, 33 bp, Homo sapien
actcagccctgtagaagtcccactgttacctac

SEQ ID NO: 618977 - DNA, 33 bp, Homo sapien
gggacagaaaatgggcccagacctgaattgaat

SEQ ID NO: 618978 - DNA, 33 bp, Homo sapien
gggacagaaaatgggctcagacctgaattgaat

SEQ ID NO: 618979 - DNA, 33 bp, Homo sapien
actctcactggtggaacaaaccccatcagggaa

SEQ ID NO: 618980 - DNA, 33 bp, Homo sapien
actctcactggtggaataaaccccatcagggaa

SEQ ID NO: 618981 - DNA, 33 bp, Homo sapien
taatacagtgaccacaatcaactccacaagatg

SEQ ID NO: 618982 - DNA, 33 bp, Homo sapien
taatacagtgaccacagtcaactccacaagatg

SEQ ID NO: 618983 - DNA, 33 bp, Homo sapien
taagtagccacctagacctcctcccgttcacac

SEQ ID NO: 618984 - DNA, 33 bp, Homo sapien
taagtagccacctagagctcctcccgttcacac

SEQ ID NO: 618985 - DNA, 33 bp, Homo sapien
gtaattcattgaggcactcttggttttctatga

SEQ ID NO: 618986 - DNA, 33 bp, Homo sapien
gtaattcattgaggcattcttggttttctatga

SEQ ID NO: 618987 - DNA, 33 bp, Homo sapien
aacacttggaaagctccgagcccatggcaatac

SEQ ID NO: 618988 - DNA, 33 bp, Homo sapien
aacacttggaaagctctgagcccatggcaatac

SEQ ID NO: 618989 - DNA, 33 bp, Homo sapien
aaccccagcactaagcagaaaactgatcctttg

SEQ ID NO: 618990 - DNA, 33 bp, Homo sapien
aaccccagcactaagcggaaaactgatcctttg

SEQ ID NO: 618991 - DNA, 33 bp, Homo sapien
acctttcaaaaaataagcatcccaaggaccagg

SEQ ID NO: 618992 - DNA, 33 bp, Homo sapien
acctttcaaaaaataatcatcccaaggaccagg

SEQ ID NO: 618993 - DNA, 33 bp, Homo sapien
aggccttggcattccaatctgaaaagtttagtg

SEQ ID NO: 618994 - DNA, 33 bp, Homo sapien
aggccttggcattccattctgaaaagtttagtg

SEQ ID NO: 618995 - DNA, 33 bp, Homo sapien
agagctttaaatcatcacagaagagactgaagt

SEQ ID NO: 618996 - DNA, 33 bp, Homo sapien
agagctttaaatcatcgcagaagagactgaagt

SEQ ID NO: 618997 - DNA, 33 bp, Homo sapien
cagttcaagaccaaagaccgtctgctgcagaat

SEQ ID NO: 618998 - DNA, 33 bp, Homo sapien
cagttcaagaccaaaggccgtctgctgcagaat

SEQ ID NO: 618999 - DNA, 33 bp, Homo sapien
gacttttcatttctacacagtgggatgtccttg

SEQ ID NO: 619000 - DNA, 33 bp, Homo sapien
gacttttcatttctacccagtgggatgtccttg

SEQ ID NO: 619001 - DNA, 33 bp, Homo sapien
gccagcctgtgtcgacaaaactcgtagcagaaa

SEQ ID NO: 619002 - DNA, 33 bp, Homo sapien
gccagcctgtgtcgacgaaactcgtagcagaaa

SEQ ID NO: 619003 - DNA, 33 bp, Homo sapien
ctcctttgctattcacagaggcatggctgagcc

SEQ ID NO: 619004 - DNA, 33 bp, Homo sapien
ctcctttgctattcacggaggcatggctgagcc

SEQ ID NO: 619005 - DNA, 33 bp, Homo sapien
ttttgccattttttgaacgctaatgatgtatta

SEQ ID NO: 619006 - DNA, 33 bp, Homo sapien
ttttgccattttttgagcgctaatgatgtatta

SEQ ID NO: 619007 - DNA, 33 bp, Homo sapien
gttgctagttgctgtcaccaggatggatggcca

SEQ ID NO: 619008 - DNA, 33 bp, Homo sapien
gttgctagttgctgtcgccaggatggatggcca

SEQ ID NO: 619009 - DNA, 33 bp, Homo sapien
tttataccaggaggaaaaaaattgtatgcattt

SEQ ID NO: 619010 - DNA, 33 bp, Homo sapien
tttataccaggaggaagaaaattgtatgcattt

SEQ ID NO: 619011 - DNA, 33 bp, Homo sapien
attgcaggagacaaagaatcacagtcaagtctt

SEQ ID NO: 619012 - DNA, 33 bp, Homo sapien
attgcaggagacaaaggatcacagtcaagtctt

SEQ ID NO: 619013 - DNA, 33 bp, Homo sapien
cagattcccctctttacggaaggctctgagcct

SEQ ID NO: 619014 - DNA, 33 bp, Homo sapien
cagattcccctctttatggaaggctctgagcct

SEQ ID NO: 619015 - DNA, 33 bp, Homo sapien
agccctagaatgatagcaaagtctccattagca

SEQ ID NO: 619016 - DNA, 33 bp, Homo sapien
agccctagaatgataggaaagtctccattagca

SEQ ID NO: 619017 - DNA, 33 bp, Homo sapien
tactagaattctatgacaaaaggcactatgaaa

SEQ ID NO: 619018 - DNA, 33 bp, Homo sapien
tactagaattctatgataaaaggcactatgaaa

SEQ ID NO: 619019 - DNA, 33 bp, Homo sapien
gcctctccttattctcaaaagtgtcctgtttga

SEQ ID NO: 619020 - DNA, 33 bp, Homo sapien
gcctctccttattctcgaaagtgtcctgtttga

SEQ ID NO: 619021 - DNA, 33 bp, Homo sapien
atgccagacacttaacaaacatcaccatattta

SEQ ID NO: 619022 - DNA, 33 bp, Homo sapien
atgccagacacttaacgaacatcaccatattta

SEQ ID NO: 619023 - DNA, 33 bp, Homo sapien
catcaagcaaacccacaacatcaggttttatct

SEQ ID NO: 619024 - DNA, 33 bp, Homo sapien
catcaagcaaacccacgacatcaggttttatct

SEQ ID NO: 619025 - DNA, 33 bp, Homo sapien
aaataaataaaccacaagcagtactatatacag

SEQ ID NO: 619026 - DNA, 33 bp, Homo sapien
aaataaataaaccacaggcagtactatatacag

SEQ ID NO: 619027 - DNA, 33 bp, Homo sapien
aatacttctgtgtcccaagaagaaaaatgactc

SEQ ID NO: 619028 - DNA, 33 bp, Homo sapien
aatacttctgtgtcccgagaagaaaaatgactc

SEQ ID NO: 619029 - DNA, 33 bp, Homo sapien
ctgttgtgtttcatccaatttcccaataagcca

SEQ ID NO: 619030 - DNA, 33 bp, Homo sapien
ctgttgtgtttcatccgatttcccaataagcca

SEQ ID NO: 619031 - DNA, 33 bp, Homo sapien
catttccaacaagttcccagcgatgccacggct

SEQ ID NO: 619032 - DNA, 33 bp, Homo sapien
catttccaacaagttcgcagcgatgccacggct

SEQ ID NO: 619033 - DNA, 33 bp, Homo sapien
gagtcctaatcctccacgactggcattcttata

SEQ ID NO: 619034 - DNA, 33 bp, Homo sapien
gagtcctaatcctccatgactggcattcttata

SEQ ID NO: 619035 - DNA, 33 bp, Homo sapien
atagatagatgatttaagcagaaatagataagc

SEQ ID NO: 619036 - DNA, 33 bp, Homo sapien
atagatagatgatttaggcagaaatagataagc

SEQ ID NO: 619037 - DNA, 33 bp, Homo sapien
gtcctactgcgcattacatgataattaaatata

SEQ ID NO: 619038 - DNA, 33 bp, Homo sapien
gtcctactgcgcattatatgataattaaatata

SEQ ID NO: 619039 - DNA, 33 bp, Homo sapien
agaaacgctgtggaaaacgtgagtgccataact

SEQ ID NO: 619040 - DNA, 33 bp, Homo sapien
agaaacgctgtggaaatcgtgagtgccataact

SEQ ID NO: 619041 - DNA, 33 bp, Homo sapien
ttggactcatcatttaacccttgctactgcttc

SEQ ID NO: 619042 - DNA, 33 bp, Homo sapien
ttggactcatcatttaccccttgctactgcttc

SEQ ID NO: 619043 - DNA, 33 bp, Homo sapien
gtagttactatcttaaccctgtgatcaaaacca

SEQ ID NO: 619044 - DNA, 33 bp, Homo sapien
gtagttactatcttaatcctgtgatcaaaacca

SEQ ID NO: 619045 - DNA, 33 bp, Homo sapien
caaaagaactcccggagaatccgaattcgtggt

SEQ ID NO: 619046 - DNA, 33 bp, Homo sapien
caaaagaactcccggataatccgaattcgtggt

SEQ ID NO: 619047 - DNA, 33 bp, Homo sapien
ttgcaatggactccacaccaaagtagctcagtc

SEQ ID NO: 619048 - DNA, 33 bp, Homo sapien
ttgcaatggactccacgccaaagtagctcagtc

SEQ ID NO: 619049 - DNA, 33 bp, Homo sapien
ctgcaggctgttttagaatgttttgatctcttt

SEQ ID NO: 619050 - DNA, 33 bp, Homo sapien
ctgcaggctgttttagtatgttttgatctcttt

SEQ ID NO: 619051 - DNA, 33 bp, Homo sapien
cactgttagacacacacagacctgcaggctgtt

SEQ ID NO: 619052 - DNA, 33 bp, Homo sapien
cactgttagacacacatagacctgcaggctgtt

SEQ ID NO: 619053 - DNA, 33 bp, Homo sapien
tgcctgtaaggtttaacgccctgtctcggatga

SEQ ID NO: 619054 - DNA, 33 bp, Homo sapien
tgcctgtaaggtttaatgccctgtctcggatga

SEQ ID NO: 619055 - DNA, 33 bp, Homo sapien
ttcttgccgacaaacacattattgactgttaac

SEQ ID NO: 619056 - DNA, 33 bp, Homo sapien
ttcttgccgacaaacatattattgactgttaac

SEQ ID NO: 619057 - DNA, 33 bp, Homo sapien
agttcagttttcagaaatcttgatggaattggt

SEQ ID NO: 619058 - DNA, 33 bp, Homo sapien
agttcagttttcagaagtcttgatggaattggt

SEQ ID NO: 619059 - DNA, 33 bp, Homo sapien
atccttagcggactggaatcttaatggtctcac

SEQ ID NO: 619060 - DNA, 33 bp, Homo sapien
atccttagcggactgggatcttaatggtctcac

SEQ ID NO: 619061 - DNA, 33 bp, Homo sapien
tcattccgaatctatgccaactgggctgccctg

SEQ ID NO: 619062 - DNA, 33 bp, Homo sapien
tcattccgaatctatgtcaactgggctgccctg

SEQ ID NO: 619063 - DNA, 33 bp, Homo sapien
gctggaactcaaaccaatgcttactaagagtgg

SEQ ID NO: 619064 - DNA, 33 bp, Homo sapien
gctggaactcaaaccagtgcttactaagagtgg

SEQ ID NO: 619065 - DNA, 33 bp, Homo sapien
atatgatggtttgagaactatgttaaaataaca

SEQ ID NO: 619066 - DNA, 33 bp, Homo sapien
atatgatggtttgagacctatgttaaaataaca

SEQ ID NO: 619067 - DNA, 33 bp, Homo sapien
cagtaaatagcaaaacagtggtatatagagatg

SEQ ID NO: 619068 - DNA, 33 bp, Homo sapien
cagtaaatagcaaaactgtggtatatagagatg

SEQ ID NO: 619069 - DNA, 33 bp, Homo sapien
ggggctgctacttgcactgacatttatcatttc

SEQ ID NO: 619070 - DNA, 33 bp, Homo sapien
ggggctgctacttgcattgacatttatcatttc

SEQ ID NO: 619071 - DNA, 33 bp, Homo sapien
aaacaaacccagttgccctgacttttgttcttg

SEQ ID NO: 619072 - DNA, 33 bp, Homo sapien
aaacaaacccagttgcgctgacttttgttcttg

SEQ ID NO: 619073 - DNA, 33 bp, Homo sapien
ctcatccccactctccaaagactgatggcctga

SEQ ID NO: 619074 - DNA, 33 bp, Homo sapien
ctcatccccactctccgaagactgatggcctga

SEQ ID NO: 619075 - DNA, 33 bp, Homo sapien
gagcttgagagtgtcaactgcccaaaggtaagg

SEQ ID NO: 619076 - DNA, 33 bp, Homo sapien
gagcttgagagtgtcagctgcccaaaggtaagg

SEQ ID NO: 619077 - DNA, 33 bp, Homo sapien
tttgctgaggtcagtgaatactggcactgaatt

SEQ ID NO: 619078 - DNA, 33 bp, Homo sapien
tttgctgaggtcagtggatactggcactgaatt

SEQ ID NO: 619079 - DNA, 33 bp, Homo sapien
catgtgtttggttcacgcagagtcaccgtgacc

SEQ ID NO: 619080 - DNA, 33 bp, Homo sapien
catgtgtttggttcactcagagtcaccgtgacc

SEQ ID NO: 619081 - DNA, 33 bp, Homo sapien
cagcacatatgggataacactggtgtattttga

SEQ ID NO: 619082 - DNA, 33 bp, Homo sapien
cagcacatatgggataccactggtgtattttga

SEQ ID NO: 619083 - DNA, 33 bp, Homo sapien
attacagttacaatcagacaaacacttgatgac

SEQ ID NO: 619084 - DNA, 33 bp, Homo sapien
attacagttacaatcatacaaacacttgatgac

SEQ ID NO: 619085 - DNA, 33 bp, Homo sapien
gaggccagaatttacccagcaaagagtcagtgt

SEQ ID NO: 619086 - DNA, 33 bp, Homo sapien
gaggccagaatttacctagcaaagagtcagtgt

SEQ ID NO: 619087 - DNA, 33 bp, Homo sapien
ggtattttgagtcaaggcggtttttgagccaaa

SEQ ID NO: 619088 - DNA, 33 bp, Homo sapien
ggtattttgagtcaagtcggtttttgagccaaa

SEQ ID NO: 619089 - DNA, 33 bp, Homo sapien
ttacaaaacatgaccaatctcattccttcatgt

SEQ ID NO: 619090 - DNA, 33 bp, Homo sapien
ttacaaaacatgaccactctcattccttcatgt

SEQ ID NO: 619091 - DNA, 33 bp, Homo sapien
tctttccaatcaaacccaatgactgttcatctc

SEQ ID NO: 619092 - DNA, 33 bp, Homo sapien
tctttccaatcaaaccgaatgactgttcatctc

SEQ ID NO: 619093 - DNA, 33 bp, Homo sapien
agggtctttccacgcaatcacagttgtcagcag

SEQ ID NO: 619094 - DNA, 33 bp, Homo sapien
agggtctttccacgcagtcacagttgtcagcag

SEQ ID NO: 619095 - DNA, 33 bp, Homo sapien
taggtaaacagacccacgagtgttttgttaaag

SEQ ID NO: 619096 - DNA, 33 bp, Homo sapien
taggtaaacagacccatgagtgttttgttaaag

SEQ ID NO: 619097 - DNA, 33 bp, Homo sapien
acaaattctgtcaatacgtcctaccggtgacac

SEQ ID NO: 619098 - DNA, 33 bp, Homo sapien
acaaattctgtcaatatgtcctaccggtgacac

SEQ ID NO: 619099 - DNA, 33 bp, Homo sapien
atctcgcccatagttacatctccagggccagga

SEQ ID NO: 619100 - DNA, 33 bp, Homo sapien
atctcgcccatagttatatctccagggccagga

SEQ ID NO: 619101 - DNA, 33 bp, Homo sapien
ctgggctaggataaagactgtgtgcccctacaa

SEQ ID NO: 619102 - DNA, 33 bp, Homo sapien
ctgggctaggataaaggctgtgtgcccctacaa

SEQ ID NO: 619103 - DNA, 33 bp, Homo sapien
gcacactgttaaataccccttttctgtactgac

SEQ ID NO: 619104 - DNA, 33 bp, Homo sapien
gcacactgttaaatactccttttctgtactgac

SEQ ID NO: 619105 - DNA, 33 bp, Homo sapien
ctagtggcagtaacccacggtctttctcttcca

SEQ ID NO: 619106 - DNA, 33 bp, Homo sapien
ctagtggcagtaacccgcggtctttctcttcca

SEQ ID NO: 619107 - DNA, 33 bp, Homo sapien
attttagtgctagtagcagacagtttgatggtt

SEQ ID NO: 619108 - DNA, 33 bp, Homo sapien
attttagtgctagtagtagacagtttgatggtt

SEQ ID NO: 619109 - DNA, 33 bp, Homo sapien
caacccaggacactcaatcttcaagaagagagt

SEQ ID NO: 619110 - DNA, 33 bp, Homo sapien
caacccaggacactcagtcttcaagaagagagt

SEQ ID NO: 619111 - DNA, 33 bp, Homo sapien
gagaatagctagatgaccttgtgttggacaaaa

SEQ ID NO: 619112 - DNA, 33 bp, Homo sapien
gagaatagctagatgatcttgtgttggacaaaa

SEQ ID NO: 619113 - DNA, 33 bp, Homo sapien
aagagacaagagagaacgaaaacagaaaaagca

SEQ ID NO: 619114 - DNA, 33 bp, Homo sapien
aagagacaagagagaatgaaaacagaaaaagca

SEQ ID NO: 619115 - DNA, 33 bp, Homo sapien
tcaatccatcctgcacagtcgggcaacgtgccc

SEQ ID NO: 619116 - DNA, 33 bp, Homo sapien
tcaatccatcctgcactgtcgggcaacgtgccc

SEQ ID NO: 619117 - DNA, 33 bp, Homo sapien
cctacatgagaaaccacgcaaaccaagccactt

SEQ ID NO: 619118 - DNA, 33 bp, Homo sapien
cctacatgagaaaccatgcaaaccaagccactt

SEQ ID NO: 619119 - DNA, 33 bp, Homo sapien
cacagaactgggtgaactaacaatgtccatgct

SEQ ID NO: 619120 - DNA, 33 bp, Homo sapien
cacagaactgggtgaattaacaatgtccatgct

SEQ ID NO: 619121 - DNA, 33 bp, Homo sapien
caagaattttactagacaaagcgcctatgtgaa

SEQ ID NO: 619122 - DNA, 33 bp, Homo sapien
caagaattttactagagaaagcgcctatgtgaa

SEQ ID NO: 619123 - DNA, 33 bp, Homo sapien
cccagcttgaagcagtcacccacacaagctgat

SEQ ID NO: 619124 - DNA, 33 bp, Homo sapien
cccagcttgaagcagttacccacacaagctgat

SEQ ID NO: 619125 - DNA, 33 bp, Homo sapien
tagtaaagaatagttacaatatgcttcattgag

SEQ ID NO: 619126 - DNA, 33 bp, Homo sapien
tagtaaagaatagttagaatatgcttcattgag

SEQ ID NO: 619127 - DNA, 33 bp, Homo sapien
tcacacactctaacaacggcaattaacatttat

SEQ ID NO: 619128 - DNA, 33 bp, Homo sapien
tcacacactctaacaatggcaattaacatttat

SEQ ID NO: 619129 - DNA, 33 bp, Homo sapien
tgtgccgtgtaagtaaagccagaatgaatcaga

SEQ ID NO: 619130 - DNA, 33 bp, Homo sapien
tgtgccgtgtaagtaacgccagaatgaatcaga

SEQ ID NO: 619131 - DNA, 33 bp, Homo sapien
tggaccagatattgatcaacagtcaatacagtc

SEQ ID NO: 619132 - DNA, 33 bp, Homo sapien
tggaccagatattgatgaacagtcaatacagtc

SEQ ID NO: 619133 - DNA, 33 bp, Homo sapien
tctcagtctgtactcaaatggtgagtggttctc

SEQ ID NO: 619134 - DNA, 33 bp, Homo sapien
tctcagtctgtactcagatggtgagtggttctc

SEQ ID NO: 619135 - DNA, 33 bp, Homo sapien
caagttttagaaaaacactggctgtagatacta

SEQ ID NO: 619136 - DNA, 33 bp, Homo sapien
caagttttagaaaaaccctggctgtagatacta

SEQ ID NO: 619137 - DNA, 33 bp, Homo sapien
gtgttggctatatgcaataagcgactatataga

SEQ ID NO: 619138 - DNA, 33 bp, Homo sapien
gtgttggctatatgcagtaagcgactatataga

SEQ ID NO: 619139 - DNA, 33 bp, Homo sapien
caaatgtccagtatgactaaaattaggaatcaa

SEQ ID NO: 619140 - DNA, 33 bp, Homo sapien
caaatgtccagtatgagtaaaattaggaatcaa

SEQ ID NO: 619141 - DNA, 33 bp, Homo sapien
accacctcaggtcttccctttatccattgttct

SEQ ID NO: 619142 - DNA, 33 bp, Homo sapien
accacctcaggtcttctctttatccattgttct

SEQ ID NO: 619143 - DNA, 33 bp, Homo sapien
tgatcttgaaaatgtgaacttcattagagggtg

SEQ ID NO: 619144 - DNA, 33 bp, Homo sapien
tgatcttgaaaatgtggacttcattagagggtg

SEQ ID NO: 619145 - DNA, 33 bp, Homo sapien
caactactccattcccccatctatctcctcttc

SEQ ID NO: 619146 - DNA, 33 bp, Homo sapien
caactactccattccctcatctatctcctcttc

SEQ ID NO: 619147 - DNA, 33 bp, Homo sapien
tagtcctaggccccacccaactacatagaaagg

SEQ ID NO: 619148 - DNA, 33 bp, Homo sapien
tagtcctaggccccactcaactacatagaaagg

SEQ ID NO: 619149 - DNA, 33 bp, Homo sapien
aaaagaaataatgcaacgaggtgttaaggtaat

SEQ ID NO: 619150 - DNA, 33 bp, Homo sapien
aaaagaaataatgcaatgaggtgttaaggtaat

SEQ ID NO: 619151 - DNA, 33 bp, Homo sapien
gctgaagagaggtctaacgttgtgaagacacag

SEQ ID NO: 619152 - DNA, 33 bp, Homo sapien
gctgaagagaggtctatcgttgtgaagacacag

SEQ ID NO: 619153 - DNA, 33 bp, Homo sapien
gcagaattcagatccaagcagtttgactacaga

SEQ ID NO: 619154 - DNA, 33 bp, Homo sapien
gcagaattcagatccaggcagtttgactacaga

SEQ ID NO: 619155 - DNA, 33 bp, Homo sapien
gctactctatatactcaacttcactgaatttaa

SEQ ID NO: 619156 - DNA, 33 bp, Homo sapien
gctactctatatactctacttcactgaatttaa

SEQ ID NO: 619157 - DNA, 33 bp, Homo sapien
gataagacaatgtagacagactatgagagctag

SEQ ID NO: 619158 - DNA, 33 bp, Homo sapien
gataagacaatgtagagagactatgagagctag

SEQ ID NO: 619159 - DNA, 33 bp, Homo sapien
aatgtgttcttattacacagaggttaccatacc

SEQ ID NO: 619160 - DNA, 33 bp, Homo sapien
aatgtgttcttattactcagaggttaccatacc

SEQ ID NO: 619161 - DNA, 33 bp, Homo sapien
acaattggaaacactaaggcaaacagtgaacag

SEQ ID NO: 619162 - DNA, 33 bp, Homo sapien
acaattggaaacactagggcaaacagtgaacag

SEQ ID NO: 619163 - DNA, 33 bp, Homo sapien
taggtcgtaagaacaactgaaatcaaacacttg

SEQ ID NO: 619164 - DNA, 33 bp, Homo sapien
taggtcgtaagaacaattgaaatcaaacacttg

SEQ ID NO: 619165 - DNA, 33 bp, Homo sapien
ctgtagtaactatgtacaatggtgagagtgtct

SEQ ID NO: 619166 - DNA, 33 bp, Homo sapien
ctgtagtaactatgtagaatggtgagagtgtct

SEQ ID NO: 619167 - DNA, 33 bp, Homo sapien
tgtttcaggaccatcagagtaatcatttagtca

SEQ ID NO: 619168 - DNA, 33 bp, Homo sapien
tgtttcaggaccatcatagtaatcatttagtca

SEQ ID NO: 619169 - DNA, 33 bp, Homo sapien
aaaagaccatgtacacacatatggttttaggac

SEQ ID NO: 619170 - DNA, 33 bp, Homo sapien
aaaagaccatgtacacgcatatggttttaggac

SEQ ID NO: 619171 - DNA, 33 bp, Homo sapien
gtcagccataaaaaaacagacccagtcatttgc

SEQ ID NO: 619172 - DNA, 33 bp, Homo sapien
gtcagccataaaaaaagagacccagtcatttgc

SEQ ID NO: 619173 - DNA, 33 bp, Homo sapien; identical to SEQ ID NO: 619171

SEQ ID NO: 619174 - DNA, 33 bp, Homo sapien; identical to SEQ ID NO: 619172

SEQ ID NO: 619175 - DNA, 33 bp, Homo sapien
atatgattccttatcaaacaaaatcagatgata

SEQ ID NO: 619176 - DNA, 33 bp, Homo sapien
atatgattccttatcagacaaaatcagatgata

SEQ ID NO: 619177 - DNA, 33 bp, Homo sapien
aagcaatacgtgtgtaaatatgatgcagtattt

SEQ ID NO: 619178 - DNA, 33 bp, Homo sapien
aagcaatacgtgtgtagatatgatgcagtattt

SEQ ID NO: 619179 - DNA, 33 bp, Homo sapien
agagataagctaaatcaatgaataataaacagg

SEQ ID NO: 619180 - DNA, 33 bp, Homo sapien
agagataagctaaatcgatgaataataaacagg

SEQ ID NO: 619181 - DNA, 33 bp, Homo sapien
ataccagtctgtacaaatgttgtcaacttgatt

SEQ ID NO: 619182 - DNA, 33 bp, Homo sapien
ataccagtctgtacaagtgttgtcaacttgatt

SEQ ID NO: 619183 - DNA, 33 bp, Homo sapien
acaccactgggaaagacgcttcagtactaggaa

SEQ ID NO: 619184 - DNA, 33 bp, Homo sapien
acaccactgggaaagatgcttcagtactaggaa

SEQ ID NO: 619185 - DNA, 33 bp, Homo sapien
ggagagtactggtaacacaaattttacaacaga

SEQ ID NO: 619186 - DNA, 33 bp, Homo sapien
ggagagtactggtaacgcaaattttacaacaga

SEQ ID NO: 619187 - DNA, 33 bp, Homo sapien
atctctttagaaatccaggaaacacaaattaaa

SEQ ID NO: 619188 - DNA, 33 bp, Homo sapien
atctctttagaaatccgggaaacacaaattaaa

SEQ ID NO: 619189 - DNA, 33 bp, Homo sapien
gtatcttatgcacaccacagagggaagatagac

SEQ ID NO: 619190 - DNA, 33 bp, Homo sapien
gtatcttatgcacaccgcagagggaagatagac

SEQ ID NO: 619191 - DNA, 33 bp, Homo sapien
aagaaaacgataggccaatatcactgagtaata

SEQ ID NO: 619192 - DNA, 33 bp, Homo sapien
aagaaaacgataggccgatatcactgagtaata

SEQ ID NO: 619193 - DNA, 33 bp, Homo sapien
ctttctttgggttataccaagcagatggattac

SEQ ID NO: 619194 - DNA, 33 bp, Homo sapien
ctttctttgggttatatcaagcagatggattac

SEQ ID NO: 619195 - DNA, 33 bp, Homo sapien
aaaaaaatggcctagacaaaacttagttaatga

SEQ ID NO: 619196 - DNA, 33 bp, Homo sapien
aaaaaaatggcctagagaaaacttagttaatga

SEQ ID NO: 619197 - DNA, 33 bp, Homo sapien
cttttatgatgactacacattacttgttaattc

SEQ ID NO: 619198 - DNA, 33 bp, Homo sapien
cttttatgatgactacccattacttgttaattc

SEQ ID NO: 619199 - DNA, 33 bp, Homo sapien
ttaagtttatataaaacgccaacatatttggag

SEQ ID NO: 619200 - DNA, 33 bp, Homo sapien
ttaagtttatataaaatgccaacatatttggag

SEQ ID NO: 619201 - DNA, 33 bp, Homo sapien
tatttgatcctaatacaaagaaataacaaatgt

SEQ ID NO: 619202 - DNA, 33 bp, Homo sapien
tatttgatcctaatacgaagaaataacaaatgt

SEQ ID NO: 619203 - DNA, 33 bp, Homo sapien
attcattttcttcacaatatcataccgtacatc

SEQ ID NO: 619204 - DNA, 33 bp, Homo sapien
attcattttcttcacagtatcataccgtacatc

SEQ ID NO: 619205 - DNA, 33 bp, Homo sapien
caatcacagacagttccaaatactcatcgtggt

SEQ ID NO: 619206 - DNA, 33 bp, Homo sapien
caatcacagacagttctaaatactcatcgtggt

SEQ ID NO: 619207 - DNA, 33 bp, Homo sapien
agcggtgtcaatagcacgtccactgtagaaaca

SEQ ID NO: 619208 - DNA, 33 bp, Homo sapien
agcggtgtcaatagcatgtccactgtagaaaca

SEQ ID NO: 619209 - DNA, 33 bp, Homo sapien
actctcacctgtgtcacatggggaagggttgaa

SEQ ID NO: 619210 - DNA, 33 bp, Homo sapien
actctcacctgtgtcatatggggaagggttgaa

SEQ ID NO: 619211 - DNA, 33 bp, Homo sapien
aaacctgaacaacttgcaggagtttgtaccttg

SEQ ID NO: 619212 - DNA, 33 bp, Homo sapien
aaacctgaacaacttgtaggagtttgtaccttg

SEQ ID NO: 619213 - DNA, 33 bp, Homo sapien
agacctgtttttaagcaaaagcacacatggaag

SEQ ID NO: 619214 - DNA, 33 bp, Homo sapien
agacctgtttttaagccaaagcacacatggaag

SEQ ID NO: 619215 - DNA, 33 bp, Homo sapien
ccactgtgctccatcacggaaggacacttgagt

SEQ ID NO: 619216 - DNA, 33 bp, Homo sapien
ccactgtgctccatcatggaaggacacttgagt

SEQ ID NO: 619217 - DNA, 33 bp, Homo sapien
tttatatgagaatgaaaagtccaagcctcttaa

SEQ ID NO: 619218 - DNA, 33 bp, Homo sapien
tttatatgagaatgaagagtccaagcctcttaa

SEQ ID NO: 619219 - DNA, 33 bp, Homo sapien
gtgaagatttattgaccacctgatctagctctc

SEQ ID NO: 619220 - DNA, 33 bp, Homo sapien
gtgaagatttattgactacctgatctagctctc

SEQ ID NO: 619221 - DNA, 33 bp, Homo sapien
taaacaccaataatcaataattttcattgctgt

SEQ ID NO: 619222 - DNA, 33 bp, Homo sapien
taaacaccaataatcagtaattttcattgctgt

SEQ ID NO: 619223 - DNA, 33 bp, Homo sapien
agaagagatgttttaacacttagagctttatag

SEQ ID NO: 619224 - DNA, 33 bp, Homo sapien
agaagagatgttttaatacttagagctttatag

SEQ ID NO: 619225 - DNA, 33 bp, Homo sapien
taaaatccatgaagacagatattataattggta

SEQ ID NO: 619226 - DNA, 33 bp, Homo sapien
taaaatccatgaagacggatattataattggta

SEQ ID NO: 619227 - DNA, 33 bp, Homo sapien
catctgagcctctccactaggatgttccacctt

SEQ ID NO: 619228 - DNA, 33 bp, Homo sapien
catctgagcctctccattaggatgttccacctt

SEQ ID NO: 619229 - DNA, 33 bp, Homo sapien
gaaaaatagtagatcacggtataagagattagg

SEQ ID NO: 619230 - DNA, 33 bp, Homo sapien
gaaaaatagtagatcatggtataagagattagg

SEQ ID NO: 619231 - DNA, 33 bp, Homo sapien
aaagtttcacacaagacgtgacaattgagctga

SEQ ID NO: 619232 - DNA, 33 bp, Homo sapien
aaagtttcacacaagaggtgacaattgagctga

SEQ ID NO: 619233 - DNA, 33 bp, Homo sapien
tcctggggcaaccaatcagtggtctacacagaa

SEQ ID NO: 619234 - DNA, 33 bp, Homo sapien
tcctggggcaaccaatgagtggtctacacagaa

SEQ ID NO: 619235 - DNA, 33 bp, Homo sapien
tggatacaaaatgccacgcttcaaagattttga

SEQ ID NO: 619236 - DNA, 33 bp, Homo sapien
tggatacaaaatgccatgcttcaaagattttga

SEQ ID NO: 619237 - DNA, 33 bp, Homo sapien
aagaaggttgtaggaacagtcctaagttaccct

SEQ ID NO: 619238 - DNA, 33 bp, Homo sapien
aagaaggttgtaggaagagtcctaagttaccct

SEQ ID NO: 619239 - DNA, 33 bp, Homo sapien
ccatgtctgataaccaaaggctgtaatgttcaa

SEQ ID NO: 619240 - DNA, 33 bp, Homo sapien
ccatgtctgataaccagaggctgtaatgttcaa

SEQ ID NO: 619241 - DNA, 33 bp, Homo sapien
aagagggaccatattacccagtaaccccactct

SEQ ID NO: 619242 - DNA, 33 bp, Homo sapien
aagagggaccatattatccagtaaccccactct

SEQ ID NO: 619243 - DNA, 33 bp, Homo sapien
aacatcattttcactacggtaattattcagtgg

SEQ ID NO: 619244 - DNA, 33 bp, Homo sapien
aacatcattttcactatggtaattattcagtgg

SEQ ID NO: 619245 - DNA, 33 bp, Homo sapien
aaatcacaataaaaacaatcttcaagataatgt

SEQ ID NO: 619246 - DNA, 33 bp, Homo sapien
aaatcacaataaaaaccatcttcaagataatgt

SEQ ID NO: 619247 - DNA, 33 bp, Homo sapien
gtgagactcctttctacgaaaccataactaaaa

SEQ ID NO: 619248 - DNA, 33 bp, Homo sapien
gtgagactcctttctaggaaaccataactaaaa

SEQ ID NO: 619249 - DNA, 33 bp, Homo sapien
tgtgtctctgcccactcaagcagggaatttggt

SEQ ID NO: 619250 - DNA, 33 bp, Homo sapien
tgtgtctctgcccactgaagcagggaatttggt

SEQ ID NO: 619251 - DNA, 33 bp, Homo sapien
gccatcccaggaaggagtatgaccttgggtgag

SEQ ID NO: 619252 - DNA, 33 bp, Homo sapien
gccatcccaggaaggattatgaccttgggtgag

SEQ ID NO: 619253 - DNA, 33 bp, Homo sapien
gtatatatttgctccaacagtggagatgcagca

SEQ ID NO: 619254 - DNA, 33 bp, Homo sapien
gtatatatttgctccagcagtggagatgcagca

SEQ ID NO: 619255 - DNA, 33 bp, Homo sapien
ctccaagtgttcttacagctatgtgcccatcca

SEQ ID NO: 619256 - DNA, 33 bp, Homo sapien
ctccaagtgttcttaccgctatgtgcccatcca

SEQ ID NO: 619257 - DNA, 33 bp, Homo sapien
ggccgtaagcaggtgaaaagtaggtttattcag

SEQ ID NO: 619258 - DNA, 33 bp, Homo sapien
ggccgtaagcaggtgacaagtaggtttattcag

SEQ ID NO: 619259 - DNA, 33 bp, Homo sapien
ccctcattcttcctcaacaatacaagaaaggat

SEQ ID NO: 619260 - DNA, 33 bp, Homo sapien
ccctcattcttcctcatcaatacaagaaaggat

SEQ ID NO: 619261 - DNA, 33 bp, Homo sapien
cacgtctggtcaggcgaaaaaccctggacttgc

SEQ ID NO: 619262 - DNA, 33 bp, Homo sapien
cacgtctggtcaggcggaaaaccctggacttgc

SEQ ID NO: 619263 - DNA, 33 bp, Homo sapien
atcttacatagatgacaagcaggtaaagagaga

SEQ ID NO: 619264 - DNA, 33 bp, Homo sapien
atcttacatagatgacgagcaggtaaagagaga

SEQ ID NO: 619265 - DNA, 33 bp, Homo sapien
tcaaaatttgaagtacagcttctgttgagtgtg

SEQ ID NO: 619266 - DNA, 33 bp, Homo sapien
tcaaaatttgaagtacggcttctgttgagtgtg

SEQ ID NO: 619267 - DNA, 33 bp, Homo sapien
tcttgtttttgatccacggttgcaattcttgta

SEQ ID NO: 619268 - DNA, 33 bp, Homo sapien
tcttgtttttgatccatggttgcaattcttgta

SEQ ID NO: 619269 - DNA, 33 bp, Homo sapien
aatataagcagatagacgaaattataagaaaaa

SEQ ID NO: 619270 - DNA, 33 bp, Homo sapien
aatataagcagatagatgaaattataagaaaaa

SEQ ID NO: 619271 - DNA, 33 bp, Homo sapien
cttttgggtatgtttccaagagtgaaattgcta

SEQ ID NO: 619272 - DNA, 33 bp, Homo sapien
cttttgggtatgtttcgaagagtgaaattgcta

SEQ ID NO: 619273 - DNA, 33 bp, Homo sapien
actgctagaccagagacaaatgttacctaaacc

SEQ ID NO: 619274 - DNA, 33 bp, Homo sapien
actgctagaccagagagaaatgttacctaaacc

SEQ ID NO: 619275 - DNA, 33 bp, Homo sapien
actgaaaatacttcccaactagaggactggtat

SEQ ID NO: 619276 - DNA, 33 bp, Homo sapien
actgaaaatacttcccgactagaggactggtat

SEQ ID NO: 619277 - DNA, 33 bp, Homo sapien
tagtgagggagaaaagacaactgtttgcttgct

SEQ ID NO: 619278 - DNA, 33 bp, Homo sapien
tagtgagggagaaaaggcaactgtttgcttgct

SEQ ID NO: 619279 - DNA, 33 bp, Homo sapien
ctcccgtcagtcataaactccaagaaaggtcag

SEQ ID NO: 619280 - DNA, 33 bp, Homo sapien
ctcccgtcagtcataacctccaagaaaggtcag

SEQ ID NO: 619281 - DNA, 33 bp, Homo sapien
aagacactctccccccaatatccatgtggctca

SEQ ID NO: 619282 - DNA, 33 bp, Homo sapien
aagacactctccccccgatatccatgtggctca

SEQ ID NO: 619283 - DNA, 33 bp, Homo sapien
cattgctaggaaggaaaggcaattgtttggagg

SEQ ID NO: 619284 - DNA, 33 bp, Homo sapien
cattgctaggaaggaagggcaattgtttggagg

SEQ ID NO: 619285 - DNA, 33 bp, Homo sapien
actctggcggtccttaaaaatagaataacttct

SEQ ID NO: 619286 - DNA, 33 bp, Homo sapien
actctggcggtccttagaaatagaataacttct

SEQ ID NO: 619287 - DNA, 33 bp, Homo sapien
aagacgctttgcaacacgcccagatactagagc

SEQ ID NO: 619288 - DNA, 33 bp, Homo sapien
aagacgctttgcaacatgcccagatactagagc

SEQ ID NO: 619289 - DNA, 33 bp, Homo sapien
cattgaaaggagatgaagcattgactgaattag

SEQ ID NO: 619290 - DNA, 33 bp, Homo sapien
cattgaaaggagatgatgcattgactgaattag

SEQ ID NO: 619291 - DNA, 33 bp, Homo sapien
cagagtagtgagtgtaacagttaagatgctttt

SEQ ID NO: 619292 - DNA, 33 bp, Homo sapien
cagagtagtgagtgtatcagttaagatgctttt

SEQ ID NO: 619293 - DNA, 33 bp, Homo sapien
cctacaaagtaggagaccttcaaaacaagaaat

SEQ ID NO: 619294 - DNA, 33 bp, Homo sapien
cctacaaagtaggagatcttcaaaacaagaaat

SEQ ID NO: 619295 - DNA, 33 bp, Homo sapien
gtctctcagctggacccgcaattgatgagcaag

SEQ ID NO: 619296 - DNA, 33 bp, Homo sapien
gtctctcagctggacctgcaattgatgagcaag

SEQ ID NO: 619297 - DNA, 33 bp, Homo sapien
aaagctctttcacaccaaagtctttttaactct

SEQ ID NO: 619298 - DNA, 33 bp, Homo sapien
aaagctctttcacaccgaagtctttttaactct

SEQ ID NO: 619299 - DNA, 33 bp, Homo sapien
gcaaatcaaaacctcaaggaggcatcatctcac

SEQ ID NO: 619300 - DNA, 33 bp, Homo sapien
gcaaatcaaaacctcagggaggcatcatctcac

SEQ ID NO: 619301 - DNA, 33 bp, Homo sapien
ccattgtgtatatgcaccaacttcctttatcca

SEQ ID NO: 619302 - DNA, 33 bp, Homo sapien
ccattgtgtatatgcatcaacttcctttatcca

SEQ ID NO: 619303 - DNA, 33 bp, Homo sapien
ttgtcatttgaccttccgaacatccctattgga

SEQ ID NO: 619304 - DNA, 33 bp, Homo sapien
ttgtcatttgaccttctgaacatccctattgga

SEQ ID NO: 619305 - DNA, 33 bp, Homo sapien
atgttctaggataataaggtgacaggaagggag

SEQ ID NO: 619306 - DNA, 33 bp, Homo sapien
atgttctaggataatatggtgacaggaagggag

SEQ ID NO: 619307 - DNA, 33 bp, Homo sapien
ttggcttctttcattcaatattttagtcgtgag

SEQ ID NO: 619308 - DNA, 33 bp, Homo sapien
ttggcttctttcattccatattttagtcgtgag

SEQ ID NO: 619309 - DNA, 33 bp, Homo sapien
tctttagtctgtttgcacatgaagagactagag

SEQ ID NO: 619310 - DNA, 33 bp, Homo sapien
tctttagtctgtttgcccatgaagagactagag

SEQ ID NO: 619311 - DNA, 33 bp, Homo sapien
agccacacccttgacacgaactcatcccattaa

SEQ ID NO: 619312 - DNA, 33 bp, Homo sapien
agccacacccttgacatgaactcatcccattaa

SEQ ID NO: 619313 - DNA, 33 bp, Homo sapien
acattagccaatgatgccaatggaggcttgata

SEQ ID NO: 619314 - DNA, 33 bp, Homo sapien
acattagccaatgatgtcaatggaggcttgata

SEQ ID NO: 619315 - DNA, 33 bp, Homo sapien
aatgagtcagttgataaaagtgagttcacagac

SEQ ID NO: 619316 - DNA, 33 bp, Homo sapien
aatgagtcagttgatataagtgagttcacagac

SEQ ID NO: 619317 - DNA, 33 bp, Homo sapien
ttgctgctgttttaagccactatattttggggt

SEQ ID NO: 619318 - DNA, 33 bp, Homo sapien
ttgctgctgttttaagtcactatattttggggt

SEQ ID NO: 619319 - DNA, 33 bp, Homo sapien
tacctctataagcaacagtggaaaatagaaggt

SEQ ID NO: 619320 - DNA, 33 bp, Homo sapien
tacctctataagcaacggtggaaaatagaaggt

SEQ ID NO: 619321 - DNA, 33 bp, Homo sapien
agacccaaaggctaaggagatgctatgtaagtg

SEQ ID NO: 619322 - DNA, 33 bp, Homo sapien
agacccaaaggctaagtagatgctatgtaagtg

SEQ ID NO: 619323 - DNA, 33 bp, Homo sapien
atttcaagtacctaggaatccttttgtcttgga

SEQ ID NO: 619324 - DNA, 33 bp, Homo sapien
atttcaagtacctagggatccttttgtcttgga

SEQ ID NO: 619325 - DNA, 33 bp, Homo sapien
ataagggtggaaatcaaagagagtcagatcaac

SEQ ID NO: 619326 - DNA, 33 bp, Homo sapien
ataagggtggaaatcacagagagtcagatcaac

SEQ ID NO: 619327 - DNA, 33 bp, Homo sapien
gatgtcaaagaagagacgaaggcagagacaggc

SEQ ID NO: 619328 - DNA, 33 bp, Homo sapien
gatgtcaaagaagagatgaaggcagagacaggc

SEQ ID NO: 619329 - DNA, 33 bp, Homo sapien
ttatcaaagcagccaaatggaagataggcaggg

SEQ ID NO: 619330 - DNA, 33 bp, Homo sapien
ttatcaaagcagccaagtggaagataggcaggg

SEQ ID NO: 619331 - DNA, 33 bp, Homo sapien
aactggaaagagaaagaagaggtcagatgatct

SEQ ID NO: 619332 - DNA, 33 bp, Homo sapien
aactggaaagagaaaggagaggtcagatgatct

SEQ ID NO: 619333 - DNA, 33 bp, Homo sapien
cagtcaggcaatagggaactcgactccctcaca

SEQ ID NO: 619334 - DNA, 33 bp, Homo sapien
cagtcaggcaatagggcactcgactccctcaca

SEQ ID NO: 619335 - DNA, 33 bp, Homo sapien
cgttttactaagtcctaagatataaaggtgact

SEQ ID NO: 619336 - DNA, 33 bp, Homo sapien
cgttttactaagtcctgagatataaaggtgact

SEQ ID NO: 619337 - DNA, 33 bp, Homo sapien
cacccaccaagaaataccaagactaaacaaagc

SEQ ID NO: 619338 - DNA, 33 bp, Homo sapien
cacccaccaagaaatatcaagactaaacaaagc

SEQ ID NO: 619339 - DNA, 33 bp, Homo sapien
aaatatatacatgccaacccaaagaacgtgata

SEQ ID NO: 619340 - DNA, 33 bp, Homo sapien
aaatatatacatgccaccccaaagaacgtgata

SEQ ID NO: 619341 - DNA, 33 bp, Homo sapien
gcaggttgatattgagaattttacccagttgca

SEQ ID NO: 619342 - DNA, 33 bp, Homo sapien
gcaggttgatattgagtattttacccagttgca

SEQ ID NO: 619343 - DNA, 33 bp, Homo sapien
ctatgaatgacacctcaataaagaactgaaaaa

SEQ ID NO: 619344 - DNA, 33 bp, Homo sapien
ctatgaatgacacctccataaagaactgaaaaa

SEQ ID NO: 619345 - DNA, 33 bp, Homo sapien
gtagatcaacggttagacatgagtaaacaagct

SEQ ID NO: 619346 - DNA, 33 bp, Homo sapien
gtagatcaacggttagtcatgagtaaacaagct

SEQ ID NO: 619347 - DNA, 33 bp, Homo sapien
tagtaagataaactcccccacattcctttgtat

SEQ ID NO: 619348 - DNA, 33 bp, Homo sapien
tagtaagataaactcctccacattcctttgtat

SEQ ID NO: 619349 - DNA, 33 bp, Homo sapien
tgacaagagaccctgcagaaagaaggcaaagca

SEQ ID NO: 619350 - DNA, 33 bp, Homo sapien
tgacaagagaccctgcggaaagaaggcaaagca

SEQ ID NO: 619351 - DNA, 33 bp, Homo sapien
aaatattttctctccacgttcttgccatttaaa

SEQ ID NO: 619352 - DNA, 33 bp, Homo sapien
aaatattttctctccaggttcttgccatttaaa

SEQ ID NO: 619353 - DNA, 33 bp, Homo sapien
tccctgactcatgcagaaaaagtactaatgccc

SEQ ID NO: 619354 - DNA, 33 bp, Homo sapien
tccctgactcatgcaggaaaagtactaatgccc

SEQ ID NO: 619355 - DNA, 33 bp, Homo sapien
cttgtaacccggtagaaagaatcatagccttga

SEQ ID NO: 619356 - DNA, 33 bp, Homo sapien
cttgtaacccggtagagagaatcatagccttga

SEQ ID NO: 619357 - DNA, 33 bp, Homo sapien
tagaatagagactgtccgaaggagcttacaatt

SEQ ID NO: 619358 - DNA, 33 bp, Homo sapien
tagaatagagactgtctgaaggagcttacaatt

SEQ ID NO: 619359 - DNA, 33 bp, Homo sapien
caagcactgtgtgtcaataaggttccagggaca

SEQ ID NO: 619360 - DNA, 33 bp, Homo sapien
caagcactgtgtgtcagtaaggttccagggaca

SEQ ID NO: 619361 - DNA, 33 bp, Homo sapien
tctccaacactctctaactttcctctttcaggc

SEQ ID NO: 619362 - DNA, 33 bp, Homo sapien
tctccaacactctctagctttcctctttcaggc

SEQ ID NO: 619363 - DNA, 33 bp, Homo sapien
gagagagacaaagacgaaacaaccactaatgga

SEQ ID NO: 619364 - DNA, 33 bp, Homo sapien
gagagagacaaagacggaacaaccactaatgga

SEQ ID NO: 619365 - DNA, 33 bp, Homo sapien
atgctatgtgccaaaactgttctgggaactgga

SEQ ID NO: 619366 - DNA, 33 bp, Homo sapien
atgctatgtgccaaaattgttctgggaactgga

SEQ ID NO: 619367 - DNA, 33 bp, Homo sapien
cctacttccatttcaaacccgctacactgtttt

SEQ ID NO: 619368 - DNA, 33 bp, Homo sapien
cctacttccatttcaaccccgctacactgtttt

SEQ ID NO: 619369 - DNA, 33 bp, Homo sapien
tgactcccagttcctaacaaatcagtggaggcg

SEQ ID NO: 619370 - DNA, 33 bp, Homo sapien
tgactcccagttcctatcaaatcagtggaggcg

SEQ ID NO: 619371 - DNA, 33 bp, Homo sapien
tctagtgctgtataacacaccttatcaaaactt

SEQ ID NO: 619372 - DNA, 33 bp, Homo sapien
tctagtgctgtataacgcaccttatcaaaactt

SEQ ID NO: 619373 - DNA, 33 bp, Homo sapien
agcagggcctccttcaatgaaagaaatttgtat

SEQ ID NO: 619374 - DNA, 33 bp, Homo sapien
agcagggcctccttcagtgaaagaaatttgtat

SEQ ID NO: 619375 - DNA, 33 bp, Homo sapien
aatgaactttatatgaacttttatagtctgagt

SEQ ID NO: 619376 - DNA, 33 bp, Homo sapien
aatgaactttatatgagcttttatagtctgagt

SEQ ID NO: 619377 - DNA, 33 bp, Homo sapien
gattctatcacactacactatgctgtcatgacc

SEQ ID NO: 619378 - DNA, 33 bp, Homo sapien
gattctatcacactactctatgctgtcatgacc

SEQ ID NO: 619379 - DNA, 33 bp, Homo sapien
acatatttcaaataggaaaaaggcgaagaagag

SEQ ID NO: 619380 - DNA, 33 bp, Homo sapien
acatatttcaaatagggaaaaggcgaagaagag

SEQ ID NO: 619381 - DNA, 33 bp, Homo sapien
ctaattttttttttccaaagagcacaaaccgga

SEQ ID NO: 619382 - DNA, 33 bp, Homo sapien
ctaattttttttttccgaagagcacaaaccgga

SEQ ID NO: 619383 - DNA, 33 bp, Homo sapien
aatcaaccttcctaaccgtctggactcttggtc

SEQ ID NO: 619384 - DNA, 33 bp, Homo sapien
aatcaaccttcctaactgtctggactcttggtc

SEQ ID NO: 619385 - DNA, 33 bp, Homo sapien
ccttgtttaattccacaattctttccaggagcc

SEQ ID NO: 619386 - DNA, 33 bp, Homo sapien
ccttgtttaattccactattctttccaggagcc

SEQ ID NO: 619387 - DNA, 33 bp, Homo sapien
aaaaattcatcatcaaaagtgcagagatctaat

SEQ ID NO: 619388 - DNA, 33 bp, Homo sapien
aaaaattcatcatcaagagtgcagagatctaat

SEQ ID NO: 619389 - DNA, 33 bp, Homo sapien
ccatctgttgttaggaagaataaatacgttaat

SEQ ID NO: 619390 - DNA, 33 bp, Homo sapien
ccatctgttgttaggatgaataaatacgttaat

SEQ ID NO: 619391 - DNA, 33 bp, Homo sapien
gtagccatgacaataacgatggtattaatagta

SEQ ID NO: 619392 - DNA, 33 bp, Homo sapien
gtagccatgacaataatgatggtattaatagta

SEQ ID NO: 619393 - DNA, 33 bp, Homo sapien
tagcaacagggagcaactggccttctacagagt

SEQ ID NO: 619394 - DNA, 33 bp, Homo sapien
tagcaacagggagcaagtggccttctacagagt

SEQ ID NO: 619395 - DNA, 33 bp, Homo sapien
ttcagtcctgggacaactgaaccctgcctgaat

SEQ ID NO: 619396 - DNA, 33 bp, Homo sapien
ttcagtcctgggacaattgaaccctgcctgaat

SEQ ID NO: 619397 - DNA, 33 bp, Homo sapien
tgtgaggatcttgtgaggattaattagaagtca

SEQ ID NO: 619398 - DNA, 33 bp, Homo sapien
tgtgaggatcttgtgatgattaattagaagtca

SEQ ID NO: 619399 - DNA, 33 bp, Homo sapien
atgatacggtaaataaagtaacagagaaacatg

SEQ ID NO: 619400 - DNA, 33 bp, Homo sapien
atgatacggtaaataacgtaacagagaaacatg

SEQ ID NO: 619401 - DNA, 33 bp, Homo sapien
gcccctagacctcagcactatagtgggttcttc

SEQ ID NO: 619402 - DNA, 33 bp, Homo sapien
gcccctagacctcagctctatagtgggttcttc

SEQ ID NO: 619403 - DNA, 33 bp, Homo sapien
aaggctttaccataagacagatgcttaagacaa

SEQ ID NO: 619404 - DNA, 33 bp, Homo sapien
aaggctttaccataaggcagatgcttaagacaa

SEQ ID NO: 619405 - DNA, 33 bp, Homo sapien
aaaagagaaaagcagcaatttagactgtgtgcc

SEQ ID NO: 619406 - DNA, 33 bp, Homo sapien
aaaagagaaaagcagccatttagactgtgtgcc

SEQ ID NO: 619407 - DNA, 33 bp, Homo sapien
ctttgccaatgtatcaatcaggagttgttacac

SEQ ID NO: 619408 - DNA, 33 bp, Homo sapien
ctttgccaatgtatcagtcaggagttgttacac

SEQ ID NO: 619409 - DNA, 33 bp, Homo sapien
atgatccctttactcactgaagaccaataatgt

SEQ ID NO: 619410 - DNA, 33 bp, Homo sapien
atgatccctttactcattgaagaccaataatgt

SEQ ID NO: 619411 - DNA, 33 bp, Homo sapien
ccacagagttgcataaccacttggcccagaaca

SEQ ID NO: 619412 - DNA, 33 bp, Homo sapien
ccacagagttgcataagcacttggcccagaaca

SEQ ID NO: 619413 - DNA, 33 bp, Homo sapien
aagatgaaagccaacccaccagcgcctctgcag

SEQ ID NO: 619414 - DNA, 33 bp, Homo sapien
aagatgaaagccaaccgaccagcgcctctgcag

SEQ ID NO: 619415 - DNA, 33 bp, Homo sapien
atcacacctgctttgcacatggaccaaggaaag

SEQ ID NO: 619416 - DNA, 33 bp, Homo sapien
atcacacctgctttgcgcatggaccaaggaaag

SEQ ID NO: 619417 - DNA, 33 bp, Homo sapien
taactattctaactccaaaaggaattaaacatt

SEQ ID NO: 619418 - DNA, 33 bp, Homo sapien
taactattctaactccgaaaggaattaaacatt

SEQ ID NO: 619419 - DNA, 33 bp, Homo sapien
atccagatttcacaaaccagaatataattatta

SEQ ID NO: 619420 - DNA, 33 bp, Homo sapien
atccagatttcacaaagcagaatataattatta

SEQ ID NO: 619421 - DNA, 33 bp, Homo sapien
actggactctgagatacgactaaagttctgtgt

SEQ ID NO: 619422 - DNA, 33 bp, Homo sapien
actggactctgagatatgactaaagttctgtgt

SEQ ID NO: 619423 - DNA, 33 bp, Homo sapien
gcatcagctgcaaagcaaaatgaactgtcccat

SEQ ID NO: 619424 - DNA, 33 bp, Homo sapien
gcatcagctgcaaagcgaaatgaactgtcccat

SEQ ID NO: 619425 - DNA, 33 bp, Homo sapien
tgttttaacgtccaatcaatgtgtgcagtacat

SEQ ID NO: 619426 - DNA, 33 bp, Homo sapien
tgttttaacgtccaatgaatgtgtgcagtacat

SEQ ID NO: 619427 - DNA, 33 bp, Homo sapien
tcctaaaacaacctgacggacatcactgcatta

SEQ ID NO: 619428 - DNA, 33 bp, Homo sapien
tcctaaaacaacctgatggacatcactgcatta

SEQ ID NO: 619429 - DNA, 33 bp, Homo sapien
atatgccaaaagcacaactaccagccatggaaa

SEQ ID NO: 619430 - DNA, 33 bp, Homo sapien
atatgccaaaagcacagctaccagccatggaaa

SEQ ID NO: 619431 - DNA, 33 bp, Homo sapien
tgtcctgacttccaagaaatatgcagaatataa

SEQ ID NO: 619432 - DNA, 33 bp, Homo sapien
tgtcctgacttccaaggaatatgcagaatataa

SEQ ID NO: 619433 - DNA, 33 bp, Homo sapien
ggtatagaaactggaaatgtggtactgatgaag

SEQ ID NO: 619434 - DNA, 33 bp, Homo sapien
ggtatagaaactggaagtgtggtactgatgaag

SEQ ID NO: 619435 - DNA, 33 bp, Homo sapien
tcagcactttgcgccaccttactctaaccaggt

SEQ ID NO: 619436 - DNA, 33 bp, Homo sapien
tcagcactttgcgccatcttactctaaccaggt

SEQ ID NO: 619437 - DNA, 33 bp, Homo sapien
aggtgctgattttccaatgcttataatccgctt

SEQ ID NO: 619438 - DNA, 33 bp, Homo sapien
aggtgctgattttccagtgcttataatccgctt

SEQ ID NO: 619439 - DNA, 33 bp, Homo sapien
actctgcattggacacaaagaagactactttta

SEQ ID NO: 619440 - DNA, 33 bp, Homo sapien
actctgcattggacacgaagaagactactttta

SEQ ID NO: 619441 - DNA, 33 bp, Homo sapien
tcatgtgtatatcgtccagaaagtattaaggct

SEQ ID NO: 619442 - DNA, 33 bp, Homo sapien
tcatgtgtatatcgtctagaaagtattaaggct

SEQ ID NO: 619443 - DNA, 33 bp, Homo sapien
cttgaacattctgcaaaagtaggtgcagagaca

SEQ ID NO: 619444 - DNA, 33 bp, Homo sapien
cttgaacattctgcaagagtaggtgcagagaca

SEQ ID NO: 619445 - DNA, 33 bp, Homo sapien
ttttctgaggtagacaaggtctctgaagaaaga

SEQ ID NO: 619446 - DNA, 33 bp, Homo sapien
ttttctgaggtagacacggtctctgaagaaaga

SEQ ID NO: 619447 - DNA, 33 bp, Homo sapien
ggctcaccaggatcctcagattccacattaggt

SEQ ID NO: 619448 - DNA, 33 bp, Homo sapien
ggctcaccaggatccttagattccacattaggt

SEQ ID NO: 619449 - DNA, 33 bp, Homo sapien
atcccgaggcggaagcacagaaaagaggggaga

SEQ ID NO: 619450 - DNA, 33 bp, Homo sapien
atcccgaggcggaagcgcagaaaagaggggaga

SEQ ID NO: 619451 - DNA, 33 bp, Homo sapien
aagtaatcataacctcacaaagcttgagagtgt

SEQ ID NO: 619452 - DNA, 33 bp, Homo sapien
aagtaatcataacctcgcaaagcttgagagtgt

SEQ ID NO: 619453 - DNA, 33 bp, Homo sapien
aagtgggagagctgaacggtgaaaacacatgtg

SEQ ID NO: 619454 - DNA, 33 bp, Homo sapien
aagtgggagagctgaatggtgaaaacacatgtg

SEQ ID NO: 619455 - DNA, 33 bp, Homo sapien
tagcagctgccaccagaccttgctgtcggccac

SEQ ID NO: 619456 - DNA, 33 bp, Homo sapien
tagcagctgccaccagtccttgctgtcggccac

SEQ ID NO: 619457 - DNA, 33 bp, Homo sapien
gccatctataagactaccagctggctttgctct

SEQ ID NO: 619458 - DNA, 33 bp, Homo sapien
gccatctataagactatcagctggctttgctct

SEQ ID NO: 619459 - DNA, 33 bp, Homo sapien
tgacttctgatctgaaactttgaccctgtcctt

SEQ ID NO: 619460 - DNA, 33 bp, Homo sapien
tgacttctgatctgaagctttgaccctgtcctt

SEQ ID NO: 619461 - DNA, 33 bp, Homo sapien
gaattccttgaatagactcagcaaagaacaatc

SEQ ID NO: 619462 - DNA, 33 bp, Homo sapien
gaattccttgaatagagtcagcaaagaacaatc

SEQ ID NO: 619463 - DNA, 33 bp, Homo sapien
caagtctgggaaccaaaagagattgtccataat

SEQ ID NO: 619464 - DNA, 33 bp, Homo sapien
caagtctgggaaccaagagagattgtccataat

SEQ ID NO: 619465 - DNA, 33 bp, Homo sapien
ttaatacaggtataacacaagtaaatggacaac

SEQ ID NO: 619466 - DNA, 33 bp, Homo sapien
ttaatacaggtataacgcaagtaaatggacaac

SEQ ID NO: 619467 - DNA, 33 bp, Homo sapien
ctaagcaagcaaggaacatggatctgcagggtt

SEQ ID NO: 619468 - DNA, 33 bp, Homo sapien
ctaagcaagcaaggaagatggatctgcagggtt

SEQ ID NO: 619469 - DNA, 33 bp, Homo sapien
ccaacttcttgtttcccatcctgagagtctgtt

SEQ ID NO: 619470 - DNA, 33 bp, Homo sapien
ccaacttcttgtttcctatcctgagagtctgtt

SEQ ID NO: 619471 - DNA, 33 bp, Homo sapien
tggcttggcccttgaactccacatgaacatgga

SEQ ID NO: 619472 - DNA, 33 bp, Homo sapien
tggcttggcccttgaattccacatgaacatgga

SEQ ID NO: 619473 - DNA, 33 bp, Homo sapien
ggaggtggcaggacccaatggaagcaagaatga

SEQ ID NO: 619474 - DNA, 33 bp, Homo sapien
ggaggtggcaggacccgatggaagcaagaatga

SEQ ID NO: 619475 - DNA, 33 bp, Homo sapien
aggggagtaatgcctcaagaacagaagctctgg

SEQ ID NO: 619476 - DNA, 33 bp, Homo sapien
aggggagtaatgcctcgagaacagaagctctgg

SEQ ID NO: 619477 - DNA, 33 bp, Homo sapien
gttcctcttatgattacgattagcttgccattt

SEQ ID NO: 619478 - DNA, 33 bp, Homo sapien
gttcctcttatgattatgattagcttgccattt

SEQ ID NO: 619479 - DNA, 33 bp, Homo sapien
cctgaggaattaatgaatcaggagtgaccttca

SEQ ID NO: 619480 - DNA, 33 bp, Homo sapien
cctgaggaattaatgattcaggagtgaccttca

SEQ ID NO: 619481 - DNA, 33 bp, Homo sapien
cgtagtcctttttaaccagacgaccacatttag

SEQ ID NO: 619482 - DNA, 33 bp, Homo sapien
cgtagtcctttttaactagacgaccacatttag

SEQ ID NO: 619483 - DNA, 33 bp, Homo sapien; identical to SEQ ID NO: 619481

SEQ ID NO: 619484 - DNA, 33 bp, Homo sapien; identical to SEQ ID NO: 619482

SEQ ID NO: 619485 - DNA, 33 bp, Homo sapien
tgtagagtggaggagagctggcagccggggatg

SEQ ID NO: 619486 - DNA, 33 bp, Homo sapien
tgtagagtggaggagatctggcagccggggatg

SEQ ID NO: 619487 - DNA, 33 bp, Homo sapien
ctatgtccaaaatgaacaccatgttgctaatga

SEQ ID NO: 619488 - DNA, 33 bp, Homo sapien
ctatgtccaaaatgaataccatgttgctaatga

SEQ ID NO: 619489 - DNA, 33 bp, Homo sapien
cctgtagtagatagcaggggtaaagagtcagag

SEQ ID NO: 619490 - DNA, 33 bp, Homo sapien
cctgtagtagatagcatgggtaaagagtcagag

SEQ ID NO: 619491 - DNA, 33 bp, Homo sapien; identical to SEQ ID NO: 619489

SEQ ID NO: 619492 - DNA, 33 bp, Homo sapien; identical to SEQ ID NO: 619490

SEQ ID NO: 619493 - DNA, 33 bp, Homo sapien
tttatgtgatttattacgctctatagcagagct

SEQ ID NO: 619494 - DNA, 33 bp, Homo sapien
tttatgtgatttattatgctctatagcagagct

SEQ ID NO: 619495 - DNA, 33 bp, Homo sapien
ccttgtggccctaaaacggagctaaacatccag

SEQ ID NO: 619496 - DNA, 33 bp, Homo sapien
ccttgtggccctaaaatggagctaaacatccag

SEQ ID NO: 619497 - DNA, 33 bp, Homo sapien
agtaaaataataattacgcttagatgacaggca

SEQ ID NO: 619498 - DNA, 33 bp, Homo sapien
agtaaaataataattatgcttagatgacaggca

SEQ ID NO: 619499 - DNA, 33 bp, Homo sapien
gagatggtgccattggccattgctatcctagtt

SEQ ID NO: 619500 - DNA, 33 bp, Homo sapien
gagatggtgccattgggcattgctatcctagtt

SEQ ID NO: 619501 - DNA, 33 bp, Homo sapien
ccatagcacatacttcagaaaatgtaccaaatc

SEQ ID NO: 619502 - DNA, 33 bp, Homo sapien
ccatagcacatacttcggaaaatgtaccaaatc

SEQ ID NO: 619503 - DNA, 33 bp, Homo sapien
gagggcttacttacaacgtgtgtgcctctgaaa

SEQ ID NO: 619504 - DNA, 33 bp, Homo sapien
gagggcttacttacaatgtgtgtgcctctgaaa

SEQ ID NO: 619505 - DNA, 33 bp, Homo sapien
ttgctcacagcagacactcatgtttgtttttgg

SEQ ID NO: 619506 - DNA, 33 bp, Homo sapien
ttgctcacagcagacagtcatgtttgtttttgg

SEQ ID NO: 619507 - DNA, 33 bp, Homo sapien
cctcctagcaacaagcagaatggagacatcccc

SEQ ID NO: 619508 - DNA, 33 bp, Homo sapien
cctcctagcaacaagcggaatggagacatcccc

SEQ ID NO: 619509 - DNA, 33 bp, Homo sapien
ggtggagcgtcttgacagagatgtagagaggta

SEQ ID NO: 619510 - DNA, 33 bp, Homo sapien
ggtggagcgtcttgacggagatgtagagaggta

SEQ ID NO: 619511 - DNA, 33 bp, Homo sapien
acccactcttgacccacaagccagtcactaacc

SEQ ID NO: 619512 - DNA, 33 bp, Homo sapien
acccactcttgacccagaagccagtcactaacc

SEQ ID NO: 619513 - DNA, 33 bp, Homo sapien
tttgccaattcataacagagatatactttggta

SEQ ID NO: 619514 - DNA, 33 bp, Homo sapien
tttgccaattcataacggagatatactttggta

SEQ ID NO: 619515 - DNA, 33 bp, Homo sapien
tcttcaggaaacagcccgatttgcgagctactg

SEQ ID NO: 619516 - DNA, 33 bp, Homo sapien
tcttcaggaaacagccggatttgcgagctactg

SEQ ID NO: 619517 - DNA, 33 bp, Homo sapien
cactgcaatgggtcagccatgcaataacctaat

SEQ ID NO: 619518 - DNA, 33 bp, Homo sapien
cactgcaatgggtcagtcatgcaataacctaat

SEQ ID NO: 619519 - DNA, 33 bp, Homo sapien
tcttgatcttttgtgcccctttcagttcagatg

SEQ ID NO: 619520 - DNA, 33 bp, Homo sapien
tcttgatcttttgtgctcctttcagttcagatg

SEQ ID NO: 619521 - DNA, 33 bp, Homo sapien
tctccattaatgtagcaagagaagggttaagaa

SEQ ID NO: 619522 - DNA, 33 bp, Homo sapien
tctccattaatgtagcgagagaagggttaagaa

SEQ ID NO: 619523 - DNA, 33 bp, Homo sapien
ttatctggcagataataatataaattgggcaga

SEQ ID NO: 619524 - DNA, 33 bp, Homo sapien
ttatctggcagataatcatataaattgggcaga

SEQ ID NO: 619525 - DNA, 33 bp, Homo sapien
tctacggtttaattaacagtgaagtaccaatgt

SEQ ID NO: 619526 - DNA, 33 bp, Homo sapien
tctacggtttaattaatagtgaagtaccaatgt

SEQ ID NO: 619527 - DNA, 33 bp, Homo sapien
gtagcagtctttgttacagagaatgagatggac

SEQ ID NO: 619528 - DNA, 33 bp, Homo sapien
gtagcagtctttgttagagagaatgagatggac

SEQ ID NO: 619529 - DNA, 33 bp, Homo sapien
tttctctttggacaccacgttccacttgttcca

SEQ ID NO: 619530 - DNA, 33 bp, Homo sapien
tttctctttggacaccgcgttccacttgttcca

SEQ ID NO: 619531 - DNA, 33 bp, Homo sapien
gctggtccctgtaccacgtaaggcattactcta

SEQ ID NO: 619532 - DNA, 33 bp, Homo sapien
gctggtccctgtaccatgtaaggcattactcta

SEQ ID NO: 619533 - DNA, 33 bp, Homo sapien
tgagtccagccatagaagtactaccagtagtag

SEQ ID NO: 619534 - DNA, 33 bp, Homo sapien
tgagtccagccatagacgtactaccagtagtag

SEQ ID NO: 619535 - DNA, 33 bp, Homo sapien
tatagttttatcaaagaagaggggatcttggtg

SEQ ID NO: 619536 - DNA, 33 bp, Homo sapien
tatagttttatcaaaggagaggggatcttggtg

SEQ ID NO: 619537 - DNA, 33 bp, Homo sapien
gaccaacaggctacaactggtatgtccatccaa

SEQ ID NO: 619538 - DNA, 33 bp, Homo sapien
gaccaacaggctacaattggtatgtccatccaa

SEQ ID NO: 619539 - DNA, 33 bp, Homo sapien
ccagacttctccatggcccatctcagtaagtga

SEQ ID NO: 619540 - DNA, 33 bp, Homo sapien
ccagacttctccatggtccatctcagtaagtga

SEQ ID NO: 619541 - DNA, 33 bp, Homo sapien
agctcaataaagatccactattgaaaagctact

SEQ ID NO: 619542 - DNA, 33 bp, Homo sapien
agctcaataaagatccgctattgaaaagctact

SEQ ID NO: 619543 - DNA, 33 bp, Homo sapien
cctgtaatggttctcacccactagagacagaaa

SEQ ID NO: 619544 - DNA, 33 bp, Homo sapien
cctgtaatggttctcatccactagagacagaaa

SEQ ID NO: 619545 - DNA, 33 bp, Homo sapien
gatttgctgaaagtaaacaaacagtttccccca

SEQ ID NO: 619546 - DNA, 33 bp, Homo sapien
gatttgctgaaagtaagcaaacagtttccccca

SEQ ID NO: 619547 - DNA, 33 bp, Homo sapien
agctactctaaatccacaccaagaagcaacact

SEQ ID NO: 619548 - DNA, 33 bp, Homo sapien
agctactctaaatccagaccaagaagcaacact

SEQ ID NO: 619549 - DNA, 33 bp, Homo sapien
gtttgaagagattttcaaaagataaatgagata

SEQ ID NO: 619550 - DNA, 33 bp, Homo sapien
gtttgaagagattttcgaaagataaatgagata

SEQ ID NO: 619551 - DNA, 33 bp, Homo sapien
tgcaggacagcaaaaaatctgacaccatctgaa

SEQ ID NO: 619552 - DNA, 33 bp, Homo sapien
tgcaggacagcaaaaagtctgacaccatctgaa

SEQ ID NO: 619553 - DNA, 33 bp, Homo sapien
tatgccaactagaaaaaaacaatgcagggggga

SEQ ID NO: 619554 - DNA, 33 bp, Homo sapien
tatgccaactagaaaacaacaatgcagggggga

SEQ ID NO: 619555 - DNA, 33 bp, Homo sapien
agctggaaaatcaggtcacattctgcagtgatg

SEQ ID NO: 619556 - DNA, 33 bp, Homo sapien
agctggaaaatcaggtgacattctgcagtgatg

SEQ ID NO: 619557 - DNA, 33 bp, Homo sapien
agatgtcagggccccacgatgtattttactcga

SEQ ID NO: 619558 - DNA, 33 bp, Homo sapien
agatgtcagggccccaggatgtattttactcga

SEQ ID NO: 619559 - DNA, 33 bp, Homo sapien
gggtatcacgagtcacaaaatcactcagccaat

SEQ ID NO: 619560 - DNA, 33 bp, Homo sapien
gggtatcacgagtcacgaaatcactcagccaat

SEQ ID NO: 619561 - DNA, 33 bp, Homo sapien
ggattcctaatttgtacctctgaacagctgaat

SEQ ID NO: 619562 - DNA, 33 bp, Homo sapien
ggattcctaatttgtatctctgaacagctgaat

SEQ ID NO: 619563 - DNA, 33 bp, Homo sapien
ggagctgggcgctcaactagactaggcatcttc

SEQ ID NO: 619564 - DNA, 33 bp, Homo sapien
ggagctgggcgctcaattagactaggcatcttc

SEQ ID NO: 619565 - DNA, 33 bp, Homo sapien
tttgttttaagcccccaaagaaactcactgaca

SEQ ID NO: 619566 - DNA, 33 bp, Homo sapien
tttgttttaagcccccgaagaaactcactgaca

SEQ ID NO: 619567 - DNA, 33 bp, Homo sapien
tgctcatctgtctagaaccctgagtgattgtga

SEQ ID NO: 619568 - DNA, 33 bp, Homo sapien
tgctcatctgtctagatccctgagtgattgtga

SEQ ID NO: 619569 - DNA, 33 bp, Homo sapien
ttatttcaatatatacacatcagctcctggtat

SEQ ID NO: 619570 - DNA, 33 bp, Homo sapien
ttatttcaatatatacgcatcagctcctggtat

SEQ ID NO: 619571 - DNA, 33 bp, Homo sapien
gagctctattccaaaaatcccatttcagctgag

SEQ ID NO: 619572 - DNA, 33 bp, Homo sapien
gagctctattccaaaactcccatttcagctgag

SEQ ID NO: 619573 - DNA, 33 bp, Homo sapien
agcaagtggagtgccacatattcctggcagata

SEQ ID NO: 619574 - DNA, 33 bp, Homo sapien
agcaagtggagtgccatatattcctggcagata

SEQ ID NO: 619575 - DNA, 33 bp, Homo sapien
caatcagtagacttccggccctaaaccccaagt

SEQ ID NO: 619576 - DNA, 33 bp, Homo sapien
caatcagtagacttcctgccctaaaccccaagt

SEQ ID NO: 619577 - DNA, 33 bp, Homo sapien
aaaaaaaagatggtaactagccattcctgagct

SEQ ID NO: 619578 - DNA, 33 bp, Homo sapien
aaaaaaaagatggtaagtagccattcctgagct

SEQ ID NO: 619579 - DNA, 33 bp, Homo sapien
tcattcatttcctctacgtgatttggagccctt

SEQ ID NO: 619580 - DNA, 33 bp, Homo sapien
tcattcatttcctctatgtgatttggagccctt

SEQ ID NO: 619581 - DNA, 33 bp, Homo sapien
ttaacttcatactgtcaagaggcccttcacttg

SEQ ID NO: 619582 - DNA, 33 bp, Homo sapien
ttaacttcatactgtcgagaggcccttcacttg

SEQ ID NO: 619583 - DNA, 33 bp, Homo sapien
acagagttactatcacactttggaaggatgtct

SEQ ID NO: 619584 - DNA, 33 bp, Homo sapien
acagagttactatcacgctttggaaggatgtct

SEQ ID NO: 619585 - DNA, 33 bp, Homo sapien
ggccaggcactgtgcagcctcttgctcggtcct

SEQ ID NO: 619586 - DNA, 33 bp, Homo sapien
ggccaggcactgtgcatcctcttgctcggtcct

SEQ ID NO: 619587 - DNA, 33 bp, Homo sapien
gtgtgtctgtggcggagaagagggacaatggat

SEQ ID NO: 619588 - DNA, 33 bp, Homo sapien
gtgtgtctgtggcggataagagggacaatggat

SEQ ID NO: 619589 - DNA, 33 bp, Homo sapien
tttcctaccaacaagcaccttttaagatggtcc

SEQ ID NO: 619590 - DNA, 33 bp, Homo sapien
tttcctaccaacaagcgccttttaagatggtcc

SEQ ID NO: 619591 - DNA, 33 bp, Homo sapien; identical to SEQ ID NO: 619589

SEQ ID NO: 619592 - DNA, 33 bp, Homo sapien; identical to SEQ ID NO: 619590

SEQ ID NO: 619593 - DNA, 33 bp, Homo sapien
gaagatggtagagcagcaaaaacaagctaaaac

SEQ ID NO: 619594 - DNA, 33 bp, Homo sapien
gaagatggtagagcaggaaaaacaagctaaaac

SEQ ID NO: 619595 - DNA, 33 bp, Homo sapien
tgttcaacctctactacgcacaatcctggacaa

SEQ ID NO: 619596 - DNA, 33 bp, Homo sapien
tgttcaacctctactatgcacaatcctggacaa

SEQ ID NO: 619597 - DNA, 33 bp, Homo sapien
cttgagggcagccatcaactgcagttcatttcc

SEQ ID NO: 619598 - DNA, 33 bp, Homo sapien
cttgagggcagccatcgactgcagttcatttcc

SEQ ID NO: 619599 - DNA, 33 bp, Homo sapien
gtgttgtccagttcaacgcagccccagtttcct

SEQ ID NO: 619600 - DNA, 33 bp, Homo sapien
gtgttgtccagttcaatgcagccccagtttcct

SEQ ID NO: 619601 - DNA, 33 bp, Homo sapien
gagcctagcatgatgacctacttcctactacca

SEQ ID NO: 619602 - DNA, 33 bp, Homo sapien
gagcctagcatgatgagctacttcctactacca

SEQ ID NO: 619603 - DNA, 33 bp, Homo sapien
ctagtacctaagtgatcagagacatttaagaat

SEQ ID NO: 619604 - DNA, 33 bp, Homo sapien
ctagtacctaagtgattagagacatttaagaat

SEQ ID NO: 619605 - DNA, 33 bp, Homo sapien
tatatgcgtatatctacggttacgtatatacca

SEQ ID NO: 619606 - DNA, 33 bp, Homo sapien
tatatgcgtatatctatggttacgtatatacca

SEQ ID NO: 619607 - DNA, 33 bp, Homo sapien; identical to SEQ ID NO: 619605

SEQ ID NO: 619608 - DNA, 33 bp, Homo sapien; identical to SEQ ID NO: 619606

SEQ ID NO: 619609 - DNA, 33 bp, Homo sapien
tagatatacgcatatacagacacacatatgtat

SEQ ID NO: 619610 - DNA, 33 bp, Homo sapien
tagatatacgcatatatagacacacatatgtat

SEQ ID NO: 619611 - DNA, 33 bp, Homo sapien
tcagtaagcttactaaatgatgaaatatagaag

SEQ ID NO: 619612 - DNA, 33 bp, Homo sapien
tcagtaagcttactaactgatgaaatatagaag

SEQ ID NO: 619613 - DNA, 33 bp, Homo sapien
atatctatgtaaagagactcaaagaactactat

SEQ ID NO: 619614 - DNA, 33 bp, Homo sapien
atatctatgtaaagagtctcaaagaactactat

SEQ ID NO: 619615 - DNA, 33 bp, Homo sapien
aattatccaattcttacagcacagaattcaaat

SEQ ID NO: 619616 - DNA, 33 bp, Homo sapien
aattatccaattcttagagcacagaattcaaat

SEQ ID NO: 619617 - DNA, 33 bp, Homo sapien
gtctggctgtttcggccatttgacagcaaagat

SEQ ID NO: 619618 - DNA, 33 bp, Homo sapien
gtctggctgtttcggctatttgacagcaaagat

SEQ ID NO: 619619 - DNA, 33 bp, Homo sapien
catgtccctcacatcacaatggcttttactgtc

SEQ ID NO: 619620 - DNA, 33 bp, Homo sapien
catgtccctcacatcagaatggcttttactgtc

SEQ ID NO: 619621 - DNA, 33 bp, Homo sapien
tgtaaaagtttggaaaatgtgtaacctcatgat

SEQ ID NO: 619622 - DNA, 33 bp, Homo sapien
tgtaaaagtttggaaagtgtgtaacctcatgat

SEQ ID NO: 619623 - DNA, 33 bp, Homo sapien
gttatgtaagtatcacaccttcctatcacagga

SEQ ID NO: 619624 - DNA, 33 bp, Homo sapien
gttatgtaagtatcacgccttcctatcacagga

SEQ ID NO: 619625 - DNA, 33 bp, Homo sapien
ctcaacactactatcaatatgtttgttggaagg

SEQ ID NO: 619626 - DNA, 33 bp, Homo sapien
ctcaacactactatcactatgtttgttggaagg

SEQ ID NO: 619627 - DNA, 33 bp, Homo sapien
aatgtaaacagggttacgtgcactgtgcatgtc

SEQ ID NO: 619628 - DNA, 33 bp, Homo sapien
aatgtaaacagggttatgtgcactgtgcatgtc

SEQ ID NO: 619629 - DNA, 33 bp, Homo sapien
tctgcacacatatttaaatttgactgttcagtc

SEQ ID NO: 619630 - DNA, 33 bp, Homo sapien
tctgcacacatatttacatttgactgttcagtc

SEQ ID NO: 619631 - DNA, 33 bp, Homo sapien
caaatgacacacttgagataaatgagacacagg

SEQ ID NO: 619632 - DNA, 33 bp, Homo sapien
caaatgacacacttgatataaatgagacacagg

SEQ ID NO: 619633 - DNA, 33 bp, Homo sapien
ggtgctgtagacatatcacttctgctgacacta

SEQ ID NO: 619634 - DNA, 33 bp, Homo sapien
ggtgctgtagacatatgacttctgctgacacta

SEQ ID NO: 619635 - DNA, 33 bp, Homo sapien
cttttgagtttttttgaactggaactacctctc

SEQ ID NO: 619636 - DNA, 33 bp, Homo sapien
cttttgagtttttttgcactggaactacctctc

SEQ ID NO: 619637 - DNA, 33 bp, Homo sapien
tagacccttgtcagcacgattctcatcaattat

SEQ ID NO: 619638 - DNA, 33 bp, Homo sapien
tagacccttgtcagcatgattctcatcaattat

SEQ ID NO: 619639 - DNA, 33 bp, Homo sapien
aacacaaccttttcccagagcaatgtttaggta

SEQ ID NO: 619640 - DNA, 33 bp, Homo sapien
aacacaaccttttcccggagcaatgtttaggta

SEQ ID NO: 619641 - DNA, 33 bp, Homo sapien
accctggcaagagaaacactgtaaatgtggtgt

SEQ ID NO: 619642 - DNA, 33 bp, Homo sapien
accctggcaagagaaatactgtaaatgtggtgt

SEQ ID NO: 619643 - DNA, 33 bp, Homo sapien
cacattgattgctccaacatccttcaaatattt

SEQ ID NO: 619644 - DNA, 33 bp, Homo sapien
cacattgattgctccatcatccttcaaatattt

SEQ ID NO: 619645 - DNA, 33 bp, Homo sapien
aataggtgtttaataaagtttgtaatgcagatt

SEQ ID NO: 619646 - DNA, 33 bp, Homo sapien
aataggtgtttaataaggtttgtaatgcagatt

SEQ ID NO: 619647 - DNA, 33 bp, Homo sapien
ggtaaaaagaaacagacggacattcagggtcag

SEQ ID NO: 619648 - DNA, 33 bp, Homo sapien
ggtaaaaagaaacagatggacattcagggtcag

SEQ ID NO: 619649 - DNA, 33 bp, Homo sapien
aattatctgatattgacgaggcctttcattttt

SEQ ID NO: 619650 - DNA, 33 bp, Homo sapien
aattatctgatattgatgaggcctttcattttt

SEQ ID NO: 619651 - DNA, 33 bp, Homo sapien
gaccatcttgggctcacgtcttcaggacttcct

SEQ ID NO: 619652 - DNA, 33 bp, Homo sapien
gaccatcttgggctcatgtcttcaggacttcct

SEQ ID NO: 619653 - DNA, 33 bp, Homo sapien
gaggatgtgcaccagtaacacagacttagaagg

SEQ ID NO: 619654 - DNA, 33 bp, Homo sapien
gaggatgtgcaccagtgacacagacttagaagg

SEQ ID NO: 619655 - DNA, 33 bp, Homo sapien
gtatggagtattaccaaccctggaaactcaccc

SEQ ID NO: 619656 - DNA, 33 bp, Homo sapien
gtatggagtattaccacccctggaaactcaccc

SEQ ID NO: 619657 - DNA, 33 bp, Homo sapien
tatccaaacttgaggtaaaaggcaaggtcctcc

SEQ ID NO: 619658 - DNA, 33 bp, Homo sapien
tatccaaacttgaggtgaaaggcaaggtcctcc

SEQ ID NO: 619659 - DNA, 33 bp, Homo sapien
gtgggggatgtggttacaaaactaagcttctgc

SEQ ID NO: 619660 - DNA, 33 bp, Homo sapien
gtgggggatgtggttagaaaactaagcttctgc

SEQ ID NO: 619661 - DNA, 33 bp, Homo sapien
agtactttgaactgaacgatattgaaaggacct

SEQ ID NO: 619662 - DNA, 33 bp, Homo sapien
agtactttgaactgaaggatattgaaaggacct

SEQ ID NO: 619663 - DNA, 33 bp, Homo sapien
cctatacctgggaagaaggaacgctgcacagaa

SEQ ID NO: 619664 - DNA, 33 bp, Homo sapien
cctatacctgggaagacggaacgctgcacagaa

SEQ ID NO: 619665 - DNA, 33 bp, Homo sapien
tggatagccgtgtaaacatgtgattggacaaaa

SEQ ID NO: 619666 - DNA, 33 bp, Homo sapien
tggatagccgtgtaaatatgtgattggacaaaa

SEQ ID NO: 619667 - DNA, 33 bp, Homo sapien
gaaatgaggacccgaacacccaggaaaactatt

SEQ ID NO: 619668 - DNA, 33 bp, Homo sapien
gaaatgaggacccgaagacccaggaaaactatt

SEQ ID NO: 619669 - DNA, 33 bp, Homo sapien
aggaaactttcactagacataaacagggtctaa

SEQ ID NO: 619670 - DNA, 33 bp, Homo sapien
aggaaactttcactagccataaacagggtctaa

SEQ ID NO: 619671 - DNA, 33 bp, Homo sapien
agaggtacttgaattaccaggctagagtcagat

SEQ ID NO: 619672 - DNA, 33 bp, Homo sapien
agaggtacttgaattatcaggctagagtcagat

SEQ ID NO: 619673 - DNA, 33 bp, Homo sapien
gagtgaatattgatacaaaaagaaggctaagaa

SEQ ID NO: 619674 - DNA, 33 bp, Homo sapien
gagtgaatattgatacgaaaagaaggctaagaa

SEQ ID NO: 619675 - DNA, 33 bp, Homo sapien
acctattgacagatataaacaggaatcttaata

SEQ ID NO: 619676 - DNA, 33 bp, Homo sapien
acctattgacagatatgaacaggaatcttaata

SEQ ID NO: 619677 - DNA, 33 bp, Homo sapien
tcttaggaatcccatcccatattttccagttaa

SEQ ID NO: 619678 - DNA, 33 bp, Homo sapien
tcttaggaatcccatcgcatattttccagttaa

SEQ ID NO: 619679 - DNA, 33 bp, Homo sapien
aatagtaagtgccatcagagtaggtatatcagt

SEQ ID NO: 619680 - DNA, 33 bp, Homo sapien
aatagtaagtgccatcggagtaggtatatcagt

SEQ ID NO: 619681 - DNA, 33 bp, Homo sapien
aaaataatctcaaaaacgaaagcaagcagcctt

SEQ ID NO: 619682 - DNA, 33 bp, Homo sapien
aaaataatctcaaaaatgaaagcaagcagcctt

SEQ ID NO: 619683 - DNA, 33 bp, Homo sapien
caacaagggccatgccgggaaagtaaagggcac

SEQ ID NO: 619684 - DNA, 33 bp, Homo sapien
caacaagggccatgcctggaaagtaaagggcac

SEQ ID NO: 619685 - DNA, 33 bp, Homo sapien
tcaattcagctgttgacacttgtatatgctgca

SEQ ID NO: 619686 - DNA, 33 bp, Homo sapien
tcaattcagctgttgatacttgtatatgctgca

SEQ ID NO: 619687 - DNA, 33 bp, Homo sapien
aagacataatgagagaggtgaacaaatatttat

SEQ ID NO: 619688 - DNA, 33 bp, Homo sapien
aagacataatgagagatgtgaacaaatatttat

SEQ ID NO: 619689 - DNA, 33 bp, Homo sapien
cagaatagtgagaaataaatcattgtctttgtt

SEQ ID NO: 619690 - DNA, 33 bp, Homo sapien
cagaatagtgagaaatgaatcattgtctttgtt

SEQ ID NO: 619691 - DNA, 33 bp, Homo sapien
taccagctgagccacagcaggataaggtaccag

SEQ ID NO: 619692 - DNA, 33 bp, Homo sapien
taccagctgagccacatcaggataaggtaccag

SEQ ID NO: 619693 - DNA, 33 bp, Homo sapien
ccaaaatcactgatggcagttaagcctggaaat

SEQ ID NO: 619694 - DNA, 33 bp, Homo sapien
ccaaaatcactgatgggagttaagcctggaaat

SEQ ID NO: 619695 - DNA, 33 bp, Homo sapien
atcattcctgtgaacaatggccctagtcccttg

SEQ ID NO: 619696 - DNA, 33 bp, Homo sapien
atcattcctgtgaacagtggccctagtcccttg

SEQ ID NO: 619697 - DNA, 33 bp, Homo sapien
atcatgatgcaaactacctgctttcctttgtct

SEQ ID NO: 619698 - DNA, 33 bp, Homo sapien
atcatgatgcaaactatctgctttcctttgtct

SEQ ID NO: 619699 - DNA, 33 bp, Homo sapien
ttttcagctacacaacacttttacacaattaat

SEQ ID NO: 619700 - DNA, 33 bp, Homo sapien
ttttcagctacacaacgcttttacacaattaat

SEQ ID NO: 619701 - DNA, 33 bp, Homo sapien
gaacctgttgggatgaggactgttagctgatgg

SEQ ID NO: 619702 - DNA, 33 bp, Homo sapien
gaacctgttgggatgatgactgttagctgatgg

SEQ ID NO: 619703 - DNA, 33 bp, Homo sapien
gagtagttagcatttaccagaaatgaaataaac

SEQ ID NO: 619704 - DNA, 33 bp, Homo sapien
gagtagttagcatttatcagaaatgaaataaac

SEQ ID NO: 619705 - DNA, 33 bp, Homo sapien
ggtcaggaagccaggaagtctgtttggattttg

SEQ ID NO: 619706 - DNA, 33 bp, Homo sapien
ggtcaggaagccaggaggtctgtttggattttg

SEQ ID NO: 619707 - DNA, 33 bp, Homo sapien
aaagtctccatcagccaatgaagtctatgtgtc

SEQ ID NO: 619708 - DNA, 33 bp, Homo sapien
aaagtctccatcagcccatgaagtctatgtgtc

SEQ ID NO: 619709 - DNA, 33 bp, Homo sapien
ggtgagcttctatgccgcagatacctgctggga

SEQ ID NO: 619710 - DNA, 33 bp, Homo sapien
ggtgagcttctatgcctcagatacctgctggga

SEQ ID NO: 619711 - DNA, 33 bp, Homo sapien
agctctcagaaatttaagccatcccagctgagg

SEQ ID NO: 619712 - DNA, 33 bp, Homo sapien
agctctcagaaatttaggccatcccagctgagg

SEQ ID NO: 619713 - DNA, 33 bp, Homo sapien
aaaagagagggtcagacatcagcttttatagcc

SEQ ID NO: 619714 - DNA, 33 bp, Homo sapien
aaaagagagggtcagatatcagcttttatagcc

SEQ ID NO: 619715 - DNA, 33 bp, Homo sapien
gctttctgcattaaaaagaaaatgaagaatgga

SEQ ID NO: 619716 - DNA, 33 bp, Homo sapien
gctttctgcattaaaatgaaaatgaagaatgga

SEQ ID NO: 619717 - DNA, 33 bp, Homo sapien
taagtggagtgcgtggaatgtgccttctcttag

SEQ ID NO: 619718 - DNA, 33 bp, Homo sapien
taagtggagtgcgtgggatgtgccttctcttag

SEQ ID NO: 619719 - DNA, 33 bp, Homo sapien
atccattcattttaaactcagtatgtaatgagc

SEQ ID NO: 619720 - DNA, 33 bp, Homo sapien
atccattcattttaaattcagtatgtaatgagc

SEQ ID NO: 619721 - DNA, 33 bp, Homo sapien
cctggcagaggaagtacggttgcaaatgttacc

SEQ ID NO: 619722 - DNA, 33 bp, Homo sapien
cctggcagaggaagtatggttgcaaatgttacc

SEQ ID NO: 619723 - DNA, 33 bp, Homo sapien
ttttacctcttgccaagttccccaagcactctc

SEQ ID NO: 619724 - DNA, 33 bp, Homo sapien
ttttacctcttgccaatttccccaagcactctc

SEQ ID NO: 619725 - DNA, 33 bp, Homo sapien
taatgtgagagtccaacgtcactgtttttcatg

SEQ ID NO: 619726 - DNA, 33 bp, Homo sapien
taatgtgagagtccaatgtcactgtttttcatg

SEQ ID NO: 619727 - DNA, 33 bp, Homo sapien
ttatttcctcatctacagaattcagggcttgga

SEQ ID NO: 619728 - DNA, 33 bp, Homo sapien
ttatttcctcatctaccgaattcagggcttgga

SEQ ID NO: 619729 - DNA, 33 bp, Homo sapien
ccgagaccctggttaacatgaatttagcataca

SEQ ID NO: 619730 - DNA, 33 bp, Homo sapien
ccgagaccctggttaatatgaatttagcataca

SEQ ID NO: 619731 - DNA, 33 bp, Homo sapien
atatcatctggaatgcacaatatcgtaagtgcg

SEQ ID NO: 619732 - DNA, 33 bp, Homo sapien
atatcatctggaatgcccaatatcgtaagtgcg

SEQ ID NO: 619733 - DNA, 33 bp, Homo sapien
agtaatgtactattacaccaaatactgttacat

SEQ ID NO: 619734 - DNA, 33 bp, Homo sapien
agtaatgtactattacgccaaatactgttacat

SEQ ID NO: 619735 - DNA, 33 bp, Homo sapien
aatatgaggaatggacagcaaccacttagtgac

SEQ ID NO: 619736 - DNA, 33 bp, Homo sapien
aatatgaggaatggacggcaaccacttagtgac

SEQ ID NO: 619737 - DNA, 33 bp, Homo sapien
gttttattcagtctcaactcttttctttctttt

SEQ ID NO: 619738 - DNA, 33 bp, Homo sapien
gttttattcagtctcagctcttttctttctttt

SEQ ID NO: 619739 - DNA, 33 bp, Homo sapien
taaaccttaacttgccgcggtggagtttttctt

SEQ ID NO: 619740 - DNA, 33 bp, Homo sapien
taaaccttaacttgcctcggtggagtttttctt

SEQ ID NO: 619741 - DNA, 33 bp, Homo sapien
cctcaactggactgcaaaaattattagaggttg

SEQ ID NO: 619742 - DNA, 33 bp, Homo sapien
cctcaactggactgcacaaattattagaggttg

SEQ ID NO: 619743 - DNA, 33 bp, Homo sapien
aatgcatggaaatcacacaattgtttaatttta

SEQ ID NO: 619744 - DNA, 33 bp, Homo sapien
aatgcatggaaatcacgcaattgtttaatttta

SEQ ID NO: 619745 - DNA, 33 bp, Homo sapien
tactgcagggaagaacaagtattgggaacagct

SEQ ID NO: 619746 - DNA, 33 bp, Homo sapien
tactgcagggaagaaccagtattgggaacagct

SEQ ID NO: 619747 - DNA, 33 bp, Homo sapien
ctcctaatctcaagtcacttattttcttatgct

SEQ ID NO: 619748 - DNA, 33 bp, Homo sapien
ctcctaatctcaagtcgcttattttcttatgct

SEQ ID NO: 619749 - DNA, 33 bp, Homo sapien
tcagctgttagcatacacattgtctcaaggact

SEQ ID NO: 619750 - DNA, 33 bp, Homo sapien
tcagctgttagcatacgcattgtctcaaggact

SEQ ID NO: 619751 - DNA, 33 bp, Homo sapien
aaactgcattacaaggcatttacacactgtgga

SEQ ID NO: 619752 - DNA, 33 bp, Homo sapien
aaactgcattacaaggtatttacacactgtgga

SEQ ID NO: 619753 - DNA, 33 bp, Homo sapien
aaactccttaagaaccaggaccattcttatctt

SEQ ID NO: 619754 - DNA, 33 bp, Homo sapien
aaactccttaagaaccgggaccattcttatctt

SEQ ID NO: 619755 - DNA, 33 bp, Homo sapien
ccactttgggattatccagcttgtacacaatga

SEQ ID NO: 619756 - DNA, 33 bp, Homo sapien
ccactttgggattatctagcttgtacacaatga

SEQ ID NO: 619757 - DNA, 33 bp, Homo sapien
ttttccacacctggaaactctacattggtattt

SEQ ID NO: 619758 - DNA, 33 bp, Homo sapien
ttttccacacctggaagctctacattggtattt

SEQ ID NO: 619759 - DNA, 33 bp, Homo sapien
cgaataaggaaccaaagcatagactcactctcc

SEQ ID NO: 619760 - DNA, 33 bp, Homo sapien
cgaataaggaaccaaatcatagactcactctcc

SEQ ID NO: 619761 - DNA, 33 bp, Homo sapien
ctgtctgagcacctacaaaccttggtttcagca

SEQ ID NO: 619762 - DNA, 33 bp, Homo sapien
ctgtctgagcacctacgaaccttggtttcagca

SEQ ID NO: 619763 - DNA, 33 bp, Homo sapien
gaatgatgaggatgacaatgacgatgatggtga

SEQ ID NO: 619764 - DNA, 33 bp, Homo sapien
gaatgatgaggatgacgatgacgatgatggtga

SEQ ID NO: 619765 - DNA, 33 bp, Homo sapien
caggaaataaacaaaaagcagtcataaggattc

SEQ ID NO: 619766 - DNA, 33 bp, Homo sapien
caggaaataaacaaaacgcagtcataaggattc

SEQ ID NO: 619767 - DNA, 33 bp, Homo sapien
ttgaaaggtgaggagaactttggtgaagcctac

SEQ ID NO: 619768 - DNA, 33 bp, Homo sapien
ttgaaaggtgaggagacctttggtgaagcctac

SEQ ID NO: 619769 - DNA, 33 bp, Homo sapien
gtctgcagcccaggaacgtgcactctcaggccg

SEQ ID NO: 619770 - DNA, 33 bp, Homo sapien
gtctgcagcccaggaatgtgcactctcaggccg

SEQ ID NO: 619771 - DNA, 33 bp, Homo sapien
ttaacctgactttgaaagcttcctgttacagaa

SEQ ID NO: 619772 - DNA, 33 bp, Homo sapien
ttaacctgactttgaaggcttcctgttacagaa

SEQ ID NO: 619773 - DNA, 33 bp, Homo sapien
acacagaaagccaaaacagaatatcacttctac

SEQ ID NO: 619774 - DNA, 33 bp, Homo sapien
acacagaaagccaaaatagaatatcacttctac

SEQ ID NO: 619775 - DNA, 33 bp, Homo sapien
gtgaaaagcatggcaacgttcttaaagccacag

SEQ ID NO: 619776 - DNA, 33 bp, Homo sapien
gtgaaaagcatggcaatgttcttaaagccacag

SEQ ID NO: 619777 - DNA, 33 bp, Homo sapien
ggcccatgctttgagtcaccgtgagtaataaca

SEQ ID NO: 619778 - DNA, 33 bp, Homo sapien
ggcccatgctttgagtgaccgtgagtaataaca

SEQ ID NO: 619779 - DNA, 33 bp, Homo sapien
tctttgtgaaaacggaaaatgcagatcgttgtc

SEQ ID NO: 619780 - DNA, 33 bp, Homo sapien
tctttgtgaaaacggagaatgcagatcgttgtc

SEQ ID NO: 619781 - DNA, 33 bp, Homo sapien
gaaaactagaatgatcaacattgatttcaaaga

SEQ ID NO: 619782 - DNA, 33 bp, Homo sapien
gaaaactagaatgatcgacattgatttcaaaga

SEQ ID NO: 619783 - DNA, 33 bp, Homo sapien
cactgccttagaacataagtgcttccatacaga

SEQ ID NO: 619784 - DNA, 33 bp, Homo sapien
cactgccttagaacatgagtgcttccatacaga

SEQ ID NO: 619785 - DNA, 33 bp, Homo sapien
ttatgaaatggagtaaccatgctctgtataaat

SEQ ID NO: 619786 - DNA, 33 bp, Homo sapien
ttatgaaatggagtaatcatgctctgtataaat

SEQ ID NO: 619787 - DNA, 33 bp, Homo sapien
ttgtgctcaagtattccctgcagacatgaaagg

SEQ ID NO: 619788 - DNA, 33 bp, Homo sapien
ttgtgctcaagtattctctgcagacatgaaagg

SEQ ID NO: 619789 - DNA, 33 bp, Homo sapien
taaggatgtcgtgtaaacatatcattaatgtag

SEQ ID NO: 619790 - DNA, 33 bp, Homo sapien
taaggatgtcgtgtaagcatatcattaatgtag

SEQ ID NO: 619791 - DNA, 33 bp, Homo sapien
ccatcctctcccagccacttttcagcttttcta

SEQ ID NO: 619792 - DNA, 33 bp, Homo sapien
ccatcctctcccagccgcttttcagcttttcta

SEQ ID NO: 619793 - DNA, 33 bp, Homo sapien
ggaaacatggatagaaaaggagtgagggccaga

SEQ ID NO: 619794 - DNA, 33 bp, Homo sapien
ggaaacatggatagaagaggagtgagggccaga

SEQ ID NO: 619795 - DNA, 33 bp, Homo sapien
cttacattctctaatacgagttgaggtgcctag

SEQ ID NO: 619796 - DNA, 33 bp, Homo sapien
cttacattctctaatatgagttgaggtgcctag

SEQ ID NO: 619797 - DNA, 33 bp, Homo sapien
gatgaatacagaacagcaaatgtgatcatggat

SEQ ID NO: 619798 - DNA, 33 bp, Homo sapien
gatgaatacagaacagtaaatgtgatcatggat

SEQ ID NO: 619799 - DNA, 33 bp, Homo sapien
agggccaggtgtatacagcaccatttttgtaag

SEQ ID NO: 619800 - DNA, 33 bp, Homo sapien
agggccaggtgtatactgcaccatttttgtaag

SEQ ID NO: 619801 - DNA, 33 bp, Homo sapien
ccctgtttacctcgtcaatggaaaacactcctc

SEQ ID NO: 619802 - DNA, 33 bp, Homo sapien
ccctgtttacctcgtcgatggaaaacactcctc

SEQ ID NO: 619803 - DNA, 33 bp, Homo sapien
caaggacgaaagatacacaaccaagggaatcac

SEQ ID NO: 619804 - DNA, 33 bp, Homo sapien
caaggacgaaagatacgcaaccaagggaatcac

SEQ ID NO: 619805 - DNA, 33 bp, Homo sapien
attagagtcagtcagaaattttttaaaactcac

SEQ ID NO: 619806 - DNA, 33 bp, Homo sapien
attagagtcagtcagatattttttaaaactcac

SEQ ID NO: 619807 - DNA, 33 bp, Homo sapien
tctgtggatttgggccgcatgacggtttaaaat

SEQ ID NO: 619808 - DNA, 33 bp, Homo sapien
tctgtggatttgggcctcatgacggtttaaaat

SEQ ID NO: 619809 - DNA, 33 bp, Homo sapien
tgtgctttaaaatcccaaatattattctcatta

SEQ ID NO: 619810 - DNA, 33 bp, Homo sapien
tgtgctttaaaatcccgaatattattctcatta

SEQ ID NO: 619811 - DNA, 33 bp, Homo sapien
aagtacctcaacataccaaatgaggccgcatgg

SEQ ID NO: 619812 - DNA, 33 bp, Homo sapien
aagtacctcaacatactaaatgaggccgcatgg

SEQ ID NO: 619813 - DNA, 33 bp, Homo sapien
ctctagcctatgcaaccgagcgagattctgttt

SEQ ID NO: 619814 - DNA, 33 bp, Homo sapien
ctctagcctatgcaactgagcgagattctgttt

SEQ ID NO: 619815 - DNA, 33 bp, Homo sapien
taattgggaagagagagacatttattcaaataa

SEQ ID NO: 619816 - DNA, 33 bp, Homo sapien
taattgggaagagagatacatttattcaaataa

SEQ ID NO: 619817 - DNA, 33 bp, Homo sapien
ggctctaaggcaggaaccagctcagttaggtgg

SEQ ID NO: 619818 - DNA, 33 bp, Homo sapien
ggctctaaggcaggaagcagctcagttaggtgg

SEQ ID NO: 619819 - DNA, 33 bp, Homo sapien
ccctggccttttctgacagggatacaggacaag

SEQ ID NO: 619820 - DNA, 33 bp, Homo sapien
ccctggccttttctgagagggatacaggacaag

SEQ ID NO: 619821 - DNA, 33 bp, Homo sapien
tcggtaactcactagacgatcctgccctcctgc

SEQ ID NO: 619822 - DNA, 33 bp, Homo sapien
tcggtaactcactagatgatcctgccctcctgc

SEQ ID NO: 619823 - DNA, 33 bp, Homo sapien
atttggaggtcacttacatttgagcaagggtag

SEQ ID NO: 619824 - DNA, 33 bp, Homo sapien
atttggaggtcacttatatttgagcaagggtag

SEQ ID NO: 619825 - DNA, 33 bp, Homo sapien
ttccctaagacccgcacgtgccacaagccttca

SEQ ID NO: 619826 - DNA, 33 bp, Homo sapien
ttccctaagacccgcatgtgccacaagccttca

SEQ ID NO: 619827 - DNA, 33 bp, Homo sapien
caggtgacagccagacccagggcctggagtttg

SEQ ID NO: 619828 - DNA, 33 bp, Homo sapien
caggtgacagccagacgcagggcctggagtttg

SEQ ID NO: 619829 - DNA, 33 bp, Homo sapien
ttctttgctttcattcccataaacgttgcccct

SEQ ID NO: 619830 - DNA, 33 bp, Homo sapien
ttctttgctttcattctcataaacgttgcccct

SEQ ID NO: 619831 - DNA, 33 bp, Homo sapien
ctccagtggcccaagcgcagtcccttcaaggga

SEQ ID NO: 619832 - DNA, 33 bp, Homo sapien
ctccagtggcccaagctcagtcccttcaaggga

SEQ ID NO: 619833 - DNA, 33 bp, Homo sapien
taactcctacacaagcaaagaaaaacatagcac

SEQ ID NO: 619834 - DNA, 33 bp, Homo sapien
taactcctacacaagcgaagaaaaacatagcac

SEQ ID NO: 619835 - DNA, 33 bp, Homo sapien
acactatcttaaaacaagaagcacaatttgcct

SEQ ID NO: 619836 - DNA, 33 bp, Homo sapien
acactatcttaaaacaggaagcacaatttgcct

SEQ ID NO: 619837 - DNA, 33 bp, Homo sapien
caataaaagacaatgcaacctactaatcttgtc

SEQ ID NO: 619838 - DNA, 33 bp, Homo sapien
caataaaagacaatgcgacctactaatcttgtc

SEQ ID NO: 619839 - DNA, 33 bp, Homo sapien
tcaagggccagtaacaccaagtcattcaaagtc

SEQ ID NO: 619840 - DNA, 33 bp, Homo sapien
tcaagggccagtaacagcaagtcattcaaagtc

SEQ ID NO: 619841 - DNA, 33 bp, Homo sapien
tctctcactaaataccaacaattcctattagct

SEQ ID NO: 619842 - DNA, 33 bp, Homo sapien
tctctcactaaatacctacaattcctattagct

SEQ ID NO: 619843 - DNA, 33 bp, Homo sapien
ttcctactttgtttcacgtggcactgatgacct

SEQ ID NO: 619844 - DNA, 33 bp, Homo sapien
ttcctactttgtttcatgtggcactgatgacct

SEQ ID NO: 619845 - DNA, 33 bp, Homo sapien
atctttttgcatcacccaaatcatgtaactcta

SEQ ID NO: 619846 - DNA, 33 bp, Homo sapien
atctttttgcatcacctaaatcatgtaactcta

SEQ ID NO: 619847 - DNA, 33 bp, Homo sapien
taagcatcatgagccactggaaaattgcaaatc

SEQ ID NO: 619848 - DNA, 33 bp, Homo sapien
taagcatcatgagccattggaaaattgcaaatc

SEQ ID NO: 619849 - DNA, 33 bp, Homo sapien
tattttcagactaacaagctaaagaaaaaagca

SEQ ID NO: 619850 - DNA, 33 bp, Homo sapien
tattttcagactaacaggctaaagaaaaaagca

SEQ ID NO: 619851 - DNA, 33 bp, Homo sapien
caacttaacagtttccagattagctggccatgc

SEQ ID NO: 619852 - DNA, 33 bp, Homo sapien
caacttaacagtttccggattagctggccatgc

SEQ ID NO: 619853 - DNA, 33 bp, Homo sapien
aaccttacagtatggcaagcaaattaaaattag

SEQ ID NO: 619854 - DNA, 33 bp, Homo sapien
aaccttacagtatggccagcaaattaaaattag

SEQ ID NO: 619855 - DNA, 33 bp, Homo sapien
tgctcatcatatagacaaaagtttgcctgctgc

SEQ ID NO: 619856 - DNA, 33 bp, Homo sapien
tgctcatcatatagacgaaagtttgcctgctgc

SEQ ID NO: 619857 - DNA, 33 bp, Homo sapien
ctacgcttctgactttccaaaatgcttctgtta

SEQ ID NO: 619858 - DNA, 33 bp, Homo sapien
ctacgcttctgactttgcaaaatgcttctgtta

SEQ ID NO: 619859 - DNA, 33 bp, Homo sapien
agacacaggcataaaaacaaatggagaagtaag

SEQ ID NO: 619860 - DNA, 33 bp, Homo sapien
agacacaggcataaaatcaaatggagaagtaag

SEQ ID NO: 619861 - DNA, 33 bp, Homo sapien
aataatctacaaaccaatctcctccattttatt

SEQ ID NO: 619862 - DNA, 33 bp, Homo sapien
aataatctacaaaccagtctcctccattttatt

SEQ ID NO: 619863 - DNA, 33 bp, Homo sapien
tgtagaatgaggaaaccggaccacataatctca

SEQ ID NO: 619864 - DNA, 33 bp, Homo sapien
tgtagaatgaggaaactggaccacataatctca

SEQ ID NO: 619865 - DNA, 33 bp, Homo sapien
cttcaaagacaaaggacgttctgcttacacagg

SEQ ID NO: 619866 - DNA, 33 bp, Homo sapien
cttcaaagacaaaggatgttctgcttacacagg

SEQ ID NO: 619867 - DNA, 33 bp, Homo sapien
caaactagtaaggatccgacacaataagaattt

SEQ ID NO: 619868 - DNA, 33 bp, Homo sapien
caaactagtaaggatctgacacaataagaattt

SEQ ID NO: 619869 - DNA, 33 bp, Homo sapien
ctggcctagtcacttacaatatggtgaatttag

SEQ ID NO: 619870 - DNA, 33 bp, Homo sapien
ctggcctagtcacttataatatggtgaatttag

SEQ ID NO: 619871 - DNA, 33 bp, Homo sapien
gtaaaccatctcttcacaccactccagaatagt

SEQ ID NO: 619872 - DNA, 33 bp, Homo sapien
gtaaaccatctcttcagaccactccagaatagt

SEQ ID NO: 619873 - DNA, 33 bp, Homo sapien
tgtaggtatgcctttccctgggtcaaatgtcta

SEQ ID NO: 619874 - DNA, 33 bp, Homo sapien
tgtaggtatgcctttctctgggtcaaatgtcta

SEQ ID NO: 619875 - DNA, 33 bp, Homo sapien
ctgagcatcctacaaaagtagctccaaaagaac

SEQ ID NO: 619876 - DNA, 33 bp, Homo sapien
ctgagcatcctacaaatgtagctccaaaagaac

SEQ ID NO: 619877 - DNA, 33 bp, Homo sapien
ttgcatgggaggtcaggactaattagatgagct

SEQ ID NO: 619878 - DNA, 33 bp, Homo sapien
ttgcatgggaggtcagtactaattagatgagct

SEQ ID NO: 619879 - DNA, 33 bp, Homo sapien
aacgatgtagctagagaacagtgcaggggcaag

SEQ ID NO: 619880 - DNA, 33 bp, Homo sapien
aacgatgtagctagaggacagtgcaggggcaag

SEQ ID NO: 619881 - DNA, 33 bp, Homo sapien
aatagtaacacaaggcgagaaaagtccactcac

SEQ ID NO: 619882 - DNA, 33 bp, Homo sapien
aatagtaacacaaggctagaaaagtccactcac

SEQ ID NO: 619883 - DNA, 33 bp, Homo sapien
aacaactgcacgttaactctttgtatatttaat

SEQ ID NO: 619884 - DNA, 33 bp, Homo sapien
aacaactgcacgttaattctttgtatatttaat

SEQ ID NO: 619885 - DNA, 33 bp, Homo sapien
acattttccagagaaacgcactgataaacaaat

SEQ ID NO: 619886 - DNA, 33 bp, Homo sapien
acattttccagagaaaggcactgataaacaaat

SEQ ID NO: 619887 - DNA, 33 bp, Homo sapien
ttttaagtcaagcttaacgaaatatagtttggc

SEQ ID NO: 619888 - DNA, 33 bp, Homo sapien
ttttaagtcaagcttatcgaaatatagtttggc

SEQ ID NO: 619889 - DNA, 33 bp, Homo sapien
gttgacacttcgacctaaacagtgattagaggg

SEQ ID NO: 619890 - DNA, 33 bp, Homo sapien
gttgacacttcgacctgaacagtgattagaggg

SEQ ID NO: 619891 - DNA, 33 bp, Homo sapien
ttagatgtttaagaagacaggaaatatagtagg

SEQ ID NO: 619892 - DNA, 33 bp, Homo sapien
ttagatgtttaagaagtcaggaaatatagtagg

SEQ ID NO: 619893 - DNA, 33 bp, Homo sapien
atgatggggtggggagaactagcttccttgcag

SEQ ID NO: 619894 - DNA, 33 bp, Homo sapien
atgatggggtggggaggactagcttccttgcag

SEQ ID NO: 619895 - DNA, 33 bp, Homo sapien
gattgtatctgaaagtaaatgattctgttgtat

SEQ ID NO: 619896 - DNA, 33 bp, Homo sapien
gattgtatctgaaagtgaatgattctgttgtat

SEQ ID NO: 619897 - DNA, 33 bp, Homo sapien
aaaaaccctcaaacaacgtttcatctaacgttt

SEQ ID NO: 619898 - DNA, 33 bp, Homo sapien
aaaaaccctcaaacaatgtttcatctaacgttt

SEQ ID NO: 619899 - DNA, 33 bp, Homo sapien
gcctagaggtgatcgacgtagagaaaagggagt

SEQ ID NO: 619900 - DNA, 33 bp, Homo sapien
gcctagaggtgatcgaggtagagaaaagggagt

SEQ ID NO: 619901 - DNA, 33 bp, Homo sapien
ctcctattcaatggaaagcaacagaaaagctaa

SEQ ID NO: 619902 - DNA, 33 bp, Homo sapien
ctcctattcaatggaacgcaacagaaaagctaa

SEQ ID NO: 619903 - DNA, 33 bp, Homo sapien
atacttgaaaatatagacagtggtttgagtaaa

SEQ ID NO: 619904 - DNA, 33 bp, Homo sapien
atacttgaaaatatagtcagtggtttgagtaaa

SEQ ID NO: 619905 - DNA, 33 bp, Homo sapien
tataataattttgtaacgaagcacttatgctgc

SEQ ID NO: 619906 - DNA, 33 bp, Homo sapien
tataataattttgtaatgaagcacttatgctgc

SEQ ID NO: 619907 - DNA, 33 bp, Homo sapien
gtctatgcctctatgccacatgaactatctaat

SEQ ID NO: 619908 - DNA, 33 bp, Homo sapien
gtctatgcctctatgcgacatgaactatctaat

SEQ ID NO: 619909 - DNA, 33 bp, Homo sapien
tttgtaattggattcaacttaggctaattgtta

SEQ ID NO: 619910 - DNA, 33 bp, Homo sapien
tttgtaattggattcaccttaggctaattgtta

SEQ ID NO: 619911 - DNA, 33 bp, Homo sapien
atttaatgatttcaccaatacgattttcctctt

SEQ ID NO: 619912 - DNA, 33 bp, Homo sapien
atttaatgatttcaccgatacgattttcctctt

SEQ ID NO: 619913 - DNA, 33 bp, Homo sapien
tgtgtttgaggatcacaacgctactgggttaaa

SEQ ID NO: 619914 - DNA, 33 bp, Homo sapien
tgtgtttgaggatcacgacgctactgggttaaa

SEQ ID NO: 619915 - DNA, 33 bp, Homo sapien
acccaagatttggatcacgaacgtaatataatc

SEQ ID NO: 619916 - DNA, 33 bp, Homo sapien
acccaagatttggatcgcgaacgtaatataatc

SEQ ID NO: 619917 - DNA, 33 bp, Homo sapien
tcacaagtgctttttcaacgtttgtctatatct

SEQ ID NO: 619918 - DNA, 33 bp, Homo sapien
tcacaagtgctttttcgacgtttgtctatatct

SEQ ID NO: 619919 - DNA, 33 bp, Homo sapien
ttttagctttaactgaagtcatgtttaacaaag

SEQ ID NO: 619920 - DNA, 33 bp, Homo sapien
ttttagctttaactgaggtcatgtttaacaaag

SEQ ID NO: 619921 - DNA, 33 bp, Homo sapien
ctctgttatatttctaagacatcaggtagcttt

SEQ ID NO: 619922 - DNA, 33 bp, Homo sapien
ctctgttatatttctacgacatcaggtagcttt

SEQ ID NO: 619923 - DNA, 33 bp, Homo sapien
cagaccaaacagggcaaaaagagcatcccacta

SEQ ID NO: 619924 - DNA, 33 bp, Homo sapien
cagaccaaacagggcataaagagcatcccacta

SEQ ID NO: 619925 - DNA, 33 bp, Homo sapien
gccttagggtaccacaaagcttcttatccagtc

SEQ ID NO: 619926 - DNA, 33 bp, Homo sapien
gccttagggtaccacacagcttcttatccagtc

SEQ ID NO: 619927 - DNA, 33 bp, Homo sapien
tatgcctagatatagccctgtatgttcaagtgc

SEQ ID NO: 619928 - DNA, 33 bp, Homo sapien
tatgcctagatatagctctgtatgttcaagtgc

SEQ ID NO: 619929 - DNA, 33 bp, Homo sapien
gacatcattaaaacagaatatgcccttagcact

SEQ ID NO: 619930 - DNA, 33 bp, Homo sapien
gacatcattaaaacagcatatgcccttagcact

SEQ ID NO: 619931 - DNA, 33 bp, Homo sapien
atattttggggggtagaatcttttgcatttgtt

SEQ ID NO: 619932 - DNA, 33 bp, Homo sapien
atattttggggggtagtatcttttgcatttgtt

SEQ ID NO: 619933 - DNA, 33 bp, Homo sapien
tctgatagttactgaacgttctgcaatgcttta

SEQ ID NO: 619934 - DNA, 33 bp, Homo sapien
tctgatagttactgaatgttctgcaatgcttta

SEQ ID NO: 619935 - DNA, 33 bp, Homo sapien
ctgactccaagtgaagaaaagagactaaagaaa

SEQ ID NO: 619936 - DNA, 33 bp, Homo sapien
ctgactccaagtgaagtaaagagactaaagaaa

SEQ ID NO: 619937 - DNA, 33 bp, Homo sapien
tttggaagtattttcagagagaagtgattgcca

SEQ ID NO: 619938 - DNA, 33 bp, Homo sapien
tttggaagtattttcatagagaagtgattgcca

SEQ ID NO: 619939 - DNA, 33 bp, Homo sapien
tccctattctacagcaccataacatatttggtg

SEQ ID NO: 619940 - DNA, 33 bp, Homo sapien
tccctattctacagcagcataacatatttggtg

SEQ ID NO: 619941 - DNA, 33 bp, Homo sapien
ggaaggtataatatcacagaagcaaaggcaaaa

SEQ ID NO: 619942 - DNA, 33 bp, Homo sapien
ggaaggtataatatcatagaagcaaaggcaaaa

SEQ ID NO: 619943 - DNA, 33 bp, Homo sapien
ctaatccctccactaggaagtccaaaccttttc

SEQ ID NO: 619944 - DNA, 33 bp, Homo sapien
ctaatccctccactagtaagtccaaaccttttc

SEQ ID NO: 619945 - DNA, 33 bp, Homo sapien
tctgtgtggtatttaaagtctgctccttccatt

SEQ ID NO: 619946 - DNA, 33 bp, Homo sapien
tctgtgtggtatttaaggtctgctccttccatt

SEQ ID NO: 619947 - DNA, 33 bp, Homo sapien
ggagagtaataaccaactgacttagagctttta

SEQ ID NO: 619948 - DNA, 33 bp, Homo sapien
ggagagtaataaccaattgacttagagctttta

SEQ ID NO: 619949 - DNA, 33 bp, Homo sapien
ttactgccaaaatgaacaaagaaatggaacaaa

SEQ ID NO: 619950 - DNA, 33 bp, Homo sapien
ttactgccaaaatgaagaaagaaatggaacaaa

SEQ ID NO: 619951 - DNA, 33 bp, Homo sapien
taagaaaacagctttacgatcaataagcatccc

SEQ ID NO: 619952 - DNA, 33 bp, Homo sapien
taagaaaacagctttaggatcaataagcatccc

SEQ ID NO: 619953 - DNA, 33 bp, Homo sapien
tatgttagatacatcgaaagaatgattatattc

SEQ ID NO: 619954 - DNA, 33 bp, Homo sapien
tatgttagatacatcggaagaatgattatattc

SEQ ID NO: 619955 - DNA, 33 bp, Homo sapien
gctttaaaaatagaacaagtggatttgtgtgag

SEQ ID NO: 619956 - DNA, 33 bp, Homo sapien
gctttaaaaatagaacgagtggatttgtgtgag

SEQ ID NO: 619957 - DNA, 33 bp, Homo sapien
attaaataggttgataagcaactagcagaatag

SEQ ID NO: 619958 - DNA, 33 bp, Homo sapien
attaaataggttgatacgcaactagcagaatag

SEQ ID NO: 619959 - DNA, 33 bp, Homo sapien
cttttagtgattcatacagtaccctaccggtca

SEQ ID NO: 619960 - DNA, 33 bp, Homo sapien
cttttagtgattcatatagtaccctaccggtca

SEQ ID NO: 619961 - DNA, 33 bp, Homo sapien
tgctttaaatatggaagttattggatctcctat

SEQ ID NO: 619962 - DNA, 33 bp, Homo sapien
tgctttaaatatggaatttattggatctcctat

SEQ ID NO: 619963 - DNA, 33 bp, Homo sapien
gcacaaacttaatggtcaatgccagtcaaaaca

SEQ ID NO: 619964 - DNA, 33 bp, Homo sapien
gcacaaacttaatggttaatgccagtcaaaaca

SEQ ID NO: 619965 - DNA, 33 bp, Homo sapien
ggaaaattatttgtgacaattccctggagccta

SEQ ID NO: 619966 - DNA, 33 bp, Homo sapien
ggaaaattatttgtgagaattccctggagccta

SEQ ID NO: 619967 - DNA, 33 bp, Homo sapien
agaccaaccaaaaaaaattcataaagagaataa

SEQ ID NO: 619968 - DNA, 33 bp, Homo sapien
agaccaaccaaaaaaatttcataaagagaataa

SEQ ID NO: 619969 - DNA, 33 bp, Homo sapien
atgtgatcatagaagaagggtcagaggaatgtt

SEQ ID NO: 619970 - DNA, 33 bp, Homo sapien
atgtgatcatagaagacgggtcagaggaatgtt

SEQ ID NO: 619971 - DNA, 33 bp, Homo sapien
aatgtagttaacactactaaattgcacatataa

SEQ ID NO: 619972 - DNA, 33 bp, Homo sapien
aatgtagttaacactattaaattgcacatataa

SEQ ID NO: 619973 - DNA, 33 bp, Homo sapien
ttaagggaataaaagaatctccttgcaggaaat

SEQ ID NO: 619974 - DNA, 33 bp, Homo sapien
ttaagggaataaaagactctccttgcaggaaat

SEQ ID NO: 619975 - DNA, 33 bp, Homo sapien
ccttaccacggttcacactggcacactaagtct

SEQ ID NO: 619976 - DNA, 33 bp, Homo sapien
ccttaccacggttcacgctggcacactaagtct

SEQ ID NO: 619977 - DNA, 33 bp, Homo sapien
ttctgagtccaaataaagtgtggagagaacgta

SEQ ID NO: 619978 - DNA, 33 bp, Homo sapien
ttctgagtccaaataaggtgtggagagaacgta

SEQ ID NO: 619979 - DNA, 33 bp, Homo sapien
cttcactatggaaaacactctatttagtcagtt

SEQ ID NO: 619980 - DNA, 33 bp, Homo sapien
cttcactatggaaaacgctctatttagtcagtt

SEQ ID NO: 619981 - DNA, 33 bp, Homo sapien
ctcctcaatattctacccagggtgtggcacaca

SEQ ID NO: 619982 - DNA, 33 bp, Homo sapien
ctcctcaatattctactcagggtgtggcacaca

SEQ ID NO: 619983 - DNA, 33 bp, Homo sapien
tagaaataaattaccacgtcatgtcctgtggca

SEQ ID NO: 619984 - DNA, 33 bp, Homo sapien
tagaaataaattaccatgtcatgtcctgtggca

SEQ ID NO: 619985 - DNA, 33 bp, Homo sapien
tggatattttcccatcaatatagctggagcaca

SEQ ID NO: 619986 - DNA, 33 bp, Homo sapien
tggatattttcccatcgatatagctggagcaca

SEQ ID NO: 619987 - DNA, 33 bp, Homo sapien
ggttacatttcagttacggcaaggagttccaga

SEQ ID NO: 619988 - DNA, 33 bp, Homo sapien
ggttacatttcagttatggcaaggagttccaga

SEQ ID NO: 619989 - DNA, 33 bp, Homo sapien
ctcctgtcagtttagacgctcacaatgccagat

SEQ ID NO: 619990 - DNA, 33 bp, Homo sapien
ctcctgtcagtttagatgctcacaatgccagat

SEQ ID NO: 619991 - DNA, 33 bp, Homo sapien
ctaagtcattttttataagtcattgcaaattct

SEQ ID NO: 619992 - DNA, 33 bp, Homo sapien
ctaagtcattttttatgagtcattgcaaattct

SEQ ID NO: 619993 - DNA, 33 bp, Homo sapien
ggtagacactctctcaaatggcctcatatgatc

SEQ ID NO: 619994 - DNA, 33 bp, Homo sapien
ggtagacactctctcagatggcctcatatgatc

SEQ ID NO: 619995 - DNA, 33 bp, Homo sapien
tacatggaacactgctcaaatggaaggtacatt

SEQ ID NO: 619996 - DNA, 33 bp, Homo sapien
tacatggaacactgctgaaatggaaggtacatt

SEQ ID NO: 619997 - DNA, 33 bp, Homo sapien
cctggtatttttcacactggggctgaggacaag

SEQ ID NO: 619998 - DNA, 33 bp, Homo sapien
cctggtatttttcacattggggctgaggacaag

SEQ ID NO: 619999 - DNA, 33 bp, Homo sapien
aaaggctccctctgtacggcaagtaacgtggca

SEQ ID NO: 620000 - DNA, 33 bp, Homo sapien
aaaggctccctctgtatggcaagtaacgtggca

SEQ ID NO: 620001 - DNA, 33 bp, Homo sapien
atgagatattttgctacgggcatacagtgtgta

SEQ ID NO: 620002 - DNA, 33 bp, Homo sapien
atgagatattttgctatgggcatacagtgtgta

SEQ ID NO: 620003 - DNA, 33 bp, Homo sapien
aatgagataatgcactcagaagaactgagacat

SEQ ID NO: 620004 - DNA, 33 bp, Homo sapien
aatgagataatgcacttagaagaactgagacat

SEQ ID NO: 620005 - DNA, 33 bp, Homo sapien
tgagaggtcattaaacagggagtaataattaaa

SEQ ID NO: 620006 - DNA, 33 bp, Homo sapien
tgagaggtcattaaactgggagtaataattaaa

SEQ ID NO: 620007 - DNA, 33 bp, Homo sapien
ttaaggaaaggtgctacggttattatttcttct

SEQ ID NO: 620008 - DNA, 33 bp, Homo sapien
ttaaggaaaggtgctatggttattatttcttct

SEQ ID NO: 620009 - DNA, 33 bp, Homo sapien
ttatccatctataacacaatccatataaactga

SEQ ID NO: 620010 - DNA, 33 bp, Homo sapien
ttatccatctataacataatccatataaactga

SEQ ID NO: 620011 - DNA, 33 bp, Homo sapien
aagagtaaaggctttgcagtcagaatgcctggg

SEQ ID NO: 620012 - DNA, 33 bp, Homo sapien
aagagtaaaggctttggagtcagaatgcctggg

SEQ ID NO: 620013 - DNA, 33 bp, Homo sapien
ttagatgctttccactcaactagtctctgccgt

SEQ ID NO: 620014 - DNA, 33 bp, Homo sapien
ttagatgctttccacttaactagtctctgccgt

SEQ ID NO: 620015 - DNA, 33 bp, Homo sapien; identical to SEQ ID NO: 620013

SEQ ID NO: 620016 - DNA, 33 bp, Homo sapien; identical to SEQ ID NO: 620014

SEQ ID NO: 620017 - DNA, 33 bp, Homo sapien
tctgacctctgcttgaacccaccactctttgct

SEQ ID NO: 620018 - DNA, 33 bp, Homo sapien
tctgacctctgcttgaccccaccactctttgct

SEQ ID NO: 620019 - DNA, 33 bp, Homo sapien
gtagactagaatcaagaacatttttaatgtgca

SEQ ID NO: 620020 - DNA, 33 bp, Homo sapien
gtagactagaatcaaggacatttttaatgtgca

SEQ ID NO: 620021 - DNA, 33 bp, Homo sapien
gaattggagctattcaaataatccactacagtc

SEQ ID NO: 620022 - DNA, 33 bp, Homo sapien
gaattggagctattcagataatccactacagtc

SEQ ID NO: 620023 - DNA, 33 bp, Homo sapien
catgacactcttgagacgatagcagggttggaa

SEQ ID NO: 620024 - DNA, 33 bp, Homo sapien
catgacactcttgagatgatagcagggttggaa

SEQ ID NO: 620025 - DNA, 33 bp, Homo sapien
gtatatgtatgattaaagaaaggccagtcctcg

SEQ ID NO: 620026 - DNA, 33 bp, Homo sapien
gtatatgtatgattaaggaaaggccagtcctcg

SEQ ID NO: 620027 - DNA, 33 bp, Homo sapien
ataatctaccacagtacaaaattgggattattt

SEQ ID NO: 620028 - DNA, 33 bp, Homo sapien
ataatctaccacagtataaaattgggattattt

SEQ ID NO: 620029 - DNA, 33 bp, Homo sapien
atttacatgaatcagaaataaacttttcacttt

SEQ ID NO: 620030 - DNA, 33 bp, Homo sapien
atttacatgaatcagatataaacttttcacttt

SEQ ID NO: 620031 - DNA, 33 bp, Homo sapien
ccagatgatttgtttccacattaaagttagaga

SEQ ID NO: 620032 - DNA, 33 bp, Homo sapien
ccagatgatttgtttctacattaaagttagaga

SEQ ID NO: 620033 - DNA, 33 bp, Homo sapien
cctggctttccccaaacaacagatggttttagg

SEQ ID NO: 620034 - DNA, 33 bp, Homo sapien
cctggctttccccaaataacagatggttttagg

SEQ ID NO: 620035 - DNA, 33 bp, Homo sapien
ttcaggatcccagcaacaaacgatgatacactt

SEQ ID NO: 620036 - DNA, 33 bp, Homo sapien
ttcaggatcccagcaagaaacgatgatacactt

SEQ ID NO: 620037 - DNA, 33 bp, Homo sapien
ttcttttggtttggcaagtgcctagatttttat

SEQ ID NO: 620038 - DNA, 33 bp, Homo sapien
ttcttttggtttggcaggtgcctagatttttat

SEQ ID NO: 620039 - DNA, 33 bp, Homo sapien
ggtcttttattctggcaatttacctcatttttc

SEQ ID NO: 620040 - DNA, 33 bp, Homo sapien
ggtcttttattctggcgatttacctcatttttc

SEQ ID NO: 620041 - DNA, 33 bp, Homo sapien
ccgtctactcaacttacattaaaggaacatgtg

SEQ ID NO: 620042 - DNA, 33 bp, Homo sapien
ccgtctactcaacttatattaaaggaacatgtg

SEQ ID NO: 620043 - DNA, 33 bp, Homo sapien
tttttattttctcagcaagggagaatctggaag

SEQ ID NO: 620044 - DNA, 33 bp, Homo sapien
tttttattttctcagcgagggagaatctggaag

SEQ ID NO: 620045 - DNA, 33 bp, Homo sapien
ctctgggggagttggacaccagtcatttttatt

SEQ ID NO: 620046 - DNA, 33 bp, Homo sapien
ctctgggggagttggataccagtcatttttatt

SEQ ID NO: 620047 - DNA, 33 bp, Homo sapien
taatcttttagcacaacgaatggtagttcccaa

SEQ ID NO: 620048 - DNA, 33 bp, Homo sapien
taatcttttagcacaatgaatggtagttcccaa

SEQ ID NO: 620049 - DNA, 33 bp, Homo sapien
gtaagtaagacaactaactcggtcacaaccact

SEQ ID NO: 620050 - DNA, 33 bp, Homo sapien
gtaagtaagacaactacctcggtcacaaccact

SEQ ID NO: 620051 - DNA, 33 bp, Homo sapien
ttgtgtttttacaccacaatgaagaggatggag

SEQ ID NO: 620052 - DNA, 33 bp, Homo sapien
ttgtgtttttacaccataatgaagaggatggag

SEQ ID NO: 620053 - DNA, 33 bp, Homo sapien
ggagtcatgcatcctacaatgtggttcactaaa

SEQ ID NO: 620054 - DNA, 33 bp, Homo sapien
ggagtcatgcatcctataatgtggttcactaaa

SEQ ID NO: 620055 - DNA, 33 bp, Homo sapien
atttgagggatgagaaaacagaattctcttgga

SEQ ID NO: 620056 - DNA, 33 bp, Homo sapien
atttgagggatgagaagacagaattctcttgga

SEQ ID NO: 620057 - DNA, 33 bp, Homo sapien
acacttagacagattagatattgacggcatttt

SEQ ID NO: 620058 - DNA, 33 bp, Homo sapien
acacttagacagattatatattgacggcatttt

SEQ ID NO: 620059 - DNA, 33 bp, Homo sapien
cctttgagggcctccaacaacttgaactggact

SEQ ID NO: 620060 - DNA, 33 bp, Homo sapien
cctttgagggcctccagcaacttgaactggact

SEQ ID NO: 620061 - DNA, 33 bp, Homo sapien
tggtatgcaggccaccaacatatggctaattca

SEQ ID NO: 620062 - DNA, 33 bp, Homo sapien
tggtatgcaggccaccgacatatggctaattca

SEQ ID NO: 620063 - DNA, 33 bp, Homo sapien
ggtgctctcattgcaacagtggtcctcactgtc

SEQ ID NO: 620064 - DNA, 33 bp, Homo sapien
ggtgctctcattgcaagagtggtcctcactgtc

SEQ ID NO: 620065 - DNA, 33 bp, Homo sapien
ggtaacatcgtgtaaaagaaaatgctattacac

SEQ ID NO: 620066 - DNA, 33 bp, Homo sapien
ggtaacatcgtgtaaaggaaaatgctattacac

SEQ ID NO: 620067 - DNA, 33 bp, Homo sapien
agggcatctgtgataactactgtggtagattaa

SEQ ID NO: 620068 - DNA, 33 bp, Homo sapien
agggcatctgtgataattactgtggtagattaa

SEQ ID NO: 620069 - DNA, 33 bp, Homo sapien
ggtaggatgtggtataactagaattggaaatgg

SEQ ID NO: 620070 - DNA, 33 bp, Homo sapien
ggtaggatgtggtatagctagaattggaaatgg

SEQ ID NO: 620071 - DNA, 33 bp, Homo sapien
gccctctgacaaagacacaggtgctaaccatca

SEQ ID NO: 620072 - DNA, 33 bp, Homo sapien
gccctctgacaaagacgcaggtgctaaccatca

SEQ ID NO: 620073 - DNA, 33 bp, Homo sapien
ttcccatatgctcttcaatgtatgtatctcttt

SEQ ID NO: 620074 - DNA, 33 bp, Homo sapien
ttcccatatgctcttcgatgtatgtatctcttt

SEQ ID NO: 620075 - DNA, 33 bp, Homo sapien
tctggaactaaaatcccgaatgatctcaacatg

SEQ ID NO: 620076 - DNA, 33 bp, Homo sapien
tctggaactaaaatcctgaatgatctcaacatg

SEQ ID NO: 620077 - DNA, 33 bp, Homo sapien
tgaccactgccttcataaacttttctcctacct

SEQ ID NO: 620078 - DNA, 33 bp, Homo sapien
tgaccactgccttcatgaacttttctcctacct

SEQ ID NO: 620079 - DNA, 33 bp, Homo sapien
gcaaacttaagaagcaagtcagtattcagatca

SEQ ID NO: 620080 - DNA, 33 bp, Homo sapien
gcaaacttaagaagcaggtcagtattcagatca

SEQ ID NO: 620081 - DNA, 33 bp, Homo sapien
aaaagtaagatttagcagacttcgaagtatgat

SEQ ID NO: 620082 - DNA, 33 bp, Homo sapien
aaaagtaagatttagcggacttcgaagtatgat

SEQ ID NO: 620083 - DNA, 33 bp, Homo sapien
tttaaaagtacacgtacgccggacatggtgttt

SEQ ID NO: 620084 - DNA, 33 bp, Homo sapien
tttaaaagtacacgtatgccggacatggtgttt

SEQ ID NO: 620085 - DNA, 33 bp, Homo sapien
attaggctaagggttacaggatgtgaaattaga

SEQ ID NO: 620086 - DNA, 33 bp, Homo sapien
attaggctaagggttagaggatgtgaaattaga

SEQ ID NO: 620087 - DNA, 33 bp, Homo sapien
ggttaagttcaccccgaagactgagggcatgca

SEQ ID NO: 620088 - DNA, 33 bp, Homo sapien
ggttaagttcaccccgcagactgagggcatgca

SEQ ID NO: 620089 - DNA, 33 bp, Homo sapien
gtcaccttgattgtctaaaaagcaaagggggtt

SEQ ID NO: 620090 - DNA, 33 bp, Homo sapien
gtcaccttgattgtctcaaaagcaaagggggtt

SEQ ID NO: 620091 - DNA, 33 bp, Homo sapien
gctttctaaatttgaccatggatgcttatacct

SEQ ID NO: 620092 - DNA, 33 bp, Homo sapien
gctttctaaatttgacgatggatgcttatacct

SEQ ID NO: 620093 - DNA, 33 bp, Homo sapien
tttatgtgactctaaaactgctgttggttttca

SEQ ID NO: 620094 - DNA, 33 bp, Homo sapien
tttatgtgactctaaagctgctgttggttttca

SEQ ID NO: 620095 - DNA, 33 bp, Homo sapien
attctgggagaaaagaggattgttgttaattgt

SEQ ID NO: 620096 - DNA, 33 bp, Homo sapien
attctgggagaaaagatgattgttgttaattgt

SEQ ID NO: 620097 - DNA, 33 bp, Homo sapien
acccctaatgcccagtcaaatttgaattttaaa

SEQ ID NO: 620098 - DNA, 33 bp, Homo sapien
acccctaatgcccagtgaaatttgaattttaaa

SEQ ID NO: 620099 - DNA, 33 bp, Homo sapien
tgtgctgggtccctcacattctttgagacctaa

SEQ ID NO: 620100 - DNA, 33 bp, Homo sapien
tgtgctgggtccctcatattctttgagacctaa

SEQ ID NO: 620101 - DNA, 33 bp, Homo sapien
ctttcaattgctaatacggtggattgcattgat

SEQ ID NO: 620102 - DNA, 33 bp, Homo sapien
ctttcaattgctaatatggtggattgcattgat

SEQ ID NO: 620103 - DNA, 33 bp, Homo sapien
gtcttgtcttgaatgacgtcagaacaaaagaaa

SEQ ID NO: 620104 - DNA, 33 bp, Homo sapien
gtcttgtcttgaatgaggtcagaacaaaagaaa

SEQ ID NO: 620105 - DNA, 33 bp, Homo sapien
gtcaaaacatcaattgaatactgtaaatatgta

SEQ ID NO: 620106 - DNA, 33 bp, Homo sapien
gtcaaaacatcaattgtatactgtaaatatgta

SEQ ID NO: 620107 - DNA, 33 bp, Homo sapien
tcatgtacttatatcactcaaatcctgccacag

SEQ ID NO: 620108 - DNA, 33 bp, Homo sapien
tcatgtacttatatcattcaaatcctgccacag

SEQ ID NO: 620109 - DNA, 33 bp, Homo sapien
atatgtttatttttcaaagtgtggtttctgata

SEQ ID NO: 620110 - DNA, 33 bp, Homo sapien
atatgtttatttttcagagtgtggtttctgata

SEQ ID NO: 620111 - DNA, 33 bp, Homo sapien
atggtaaagagctattaaaaaagggtcatagac

SEQ ID NO: 620112 - DNA, 33 bp, Homo sapien
atggtaaagagctatttaaaaagggtcatagac

SEQ ID NO: 620113 - DNA, 33 bp, Homo sapien
attattccttaaactccgacttatcaaagtaca

SEQ ID NO: 620114 - DNA, 33 bp, Homo sapien
attattccttaaactctgacttatcaaagtaca

SEQ ID NO: 620115 - DNA, 33 bp, Homo sapien
gaaaatgtgagtcaggccaaaaaataagataaa

SEQ ID NO: 620116 - DNA, 33 bp, Homo sapien
gaaaatgtgagtcaggtcaaaaaataagataaa

SEQ ID NO: 620117 - DNA, 33 bp, Homo sapien
tcaaggctattggcaggattccaggcttctagc

SEQ ID NO: 620118 - DNA, 33 bp, Homo sapien
tcaaggctattggcagtattccaggcttctagc

SEQ ID NO: 620119 - DNA, 33 bp, Homo sapien
gataaagataagtcacaataggtcatctttttg

SEQ ID NO: 620120 - DNA, 33 bp, Homo sapien
gataaagataagtcacgataggtcatctttttg

SEQ ID NO: 620121 - DNA, 33 bp, Homo sapien
cagcaaattttggttacggtaatttcaatgact

SEQ ID NO: 620122 - DNA, 33 bp, Homo sapien
cagcaaattttggttatggtaatttcaatgact

SEQ ID NO: 620123 - DNA, 33 bp, Homo sapien
ccaataaaaatagacaggactccaagttacctg

SEQ ID NO: 620124 - DNA, 33 bp, Homo sapien
ccaataaaaatagacatgactccaagttacctg

SEQ ID NO: 620125 - DNA, 33 bp, Homo sapien
ggagcttcaccaagtaaccttttcatcacatac

SEQ ID NO: 620126 - DNA, 33 bp, Homo sapien
ggagcttcaccaagtagccttttcatcacatac

SEQ ID NO: 620127 - DNA, 33 bp, Homo sapien
ctagcttccaggaaaactgcatctaaagaatgc

SEQ ID NO: 620128 - DNA, 33 bp, Homo sapien
ctagcttccaggaaaattgcatctaaagaatgc

SEQ ID NO: 620129 - DNA, 33 bp, Homo sapien
aggctacaggggagaaatggttcatccaaggta

SEQ ID NO: 620130 - DNA, 33 bp, Homo sapien
aggctacaggggagaagtggttcatccaaggta

SEQ ID NO: 620131 - DNA, 33 bp, Homo sapien
ctgaatgttggactcaactgaagttccttagct

SEQ ID NO: 620132 - DNA, 33 bp, Homo sapien
ctgaatgttggactcatctgaagttccttagct

SEQ ID NO: 620133 - DNA, 33 bp, Homo sapien
gagctctgtaattgtagtaaaccatagtggtgg

SEQ ID NO: 620134 - DNA, 33 bp, Homo sapien
gagctctgtaattgtattaaaccatagtggtgg

SEQ ID NO: 620135 - DNA, 33 bp, Homo sapien
ggatggacatactaccccaaaccattcttgaag

SEQ ID NO: 620136 - DNA, 33 bp, Homo sapien
ggatggacatactacctcaaaccattcttgaag

SEQ ID NO: 620137 - DNA, 33 bp, Homo sapien
ttaaaaccttagcagaaaatttagcacaaaata

SEQ ID NO: 620138 - DNA, 33 bp, Homo sapien
ttaaaaccttagcagataatttagcacaaaata

SEQ ID NO: 620139 - DNA, 33 bp, Homo sapien
tctgtttcttcccaaccatgtacatccaatgac

SEQ ID NO: 620140 - DNA, 33 bp, Homo sapien
tctgtttcttcccaacgatgtacatccaatgac

SEQ ID NO: 620141 - DNA, 33 bp, Homo sapien
ataagggctaatagtcaagaaaggagggtagga

SEQ ID NO: 620142 - DNA, 33 bp, Homo sapien
ataagggctaatagtccagaaaggagggtagga

SEQ ID NO: 620143 - DNA, 33 bp, Homo sapien
tgaatatataagtctgcagttgaggaaagaggc

SEQ ID NO: 620144 - DNA, 33 bp, Homo sapien
tgaatatataagtctgtagttgaggaaagaggc

SEQ ID NO: 620145 - DNA, 33 bp, Homo sapien
atatgcataggagggaactacaacaaattataa

SEQ ID NO: 620146 - DNA, 33 bp, Homo sapien
atatgcataggagggagctacaacaaattataa

SEQ ID NO: 620147 - DNA, 33 bp, Homo sapien
tcagaaaccagtcacccattgttgtatgtcgtg

SEQ ID NO: 620148 - DNA, 33 bp, Homo sapien
tcagaaaccagtcacctattgttgtatgtcgtg

SEQ ID NO: 620149 - DNA, 33 bp, Homo sapien
agcaagccctcattcacggctttgtcacagact

SEQ ID NO: 620150 - DNA, 33 bp, Homo sapien
agcaagccctcattcatggctttgtcacagact

SEQ ID NO: 620151 - DNA, 33 bp, Homo sapien
gattttattactctaaagtttgtgttggctatt

SEQ ID NO: 620152 - DNA, 33 bp, Homo sapien
gattttattactctaaggtttgtgttggctatt

SEQ ID NO: 620153 - DNA, 33 bp, Homo sapien
agtcaaccatatgcaaaatctgaacattaaata

SEQ ID NO: 620154 - DNA, 33 bp, Homo sapien
agtcaaccatatgcaagatctgaacattaaata

SEQ ID NO: 620155 - DNA, 33 bp, Homo sapien
atgcccctcccttgtagacacgccgaggtctat

SEQ ID NO: 620156 - DNA, 33 bp, Homo sapien
atgcccctcccttgtatacacgccgaggtctat

SEQ ID NO: 620157 - DNA, 33 bp, Homo sapien
attaaaggataccaaacaattggagaatgagga

SEQ ID NO: 620158 - DNA, 33 bp, Homo sapien
attaaaggataccaaagaattggagaatgagga

SEQ ID NO: 620159 - DNA, 33 bp, Homo sapien
aatatttttttacagcaactggcagaatttttt

SEQ ID NO: 620160 - DNA, 33 bp, Homo sapien
aatatttttttacagcgactggcagaatttttt

SEQ ID NO: 620161 - DNA, 33 bp, Homo sapien
gatttaagtgtttttacatgtggtcctgactaa

SEQ ID NO: 620162 - DNA, 33 bp, Homo sapien
gatttaagtgtttttatatgtggtcctgactaa

SEQ ID NO: 620163 - DNA, 33 bp, Homo sapien
gtaggttctaggaagaaaatgtgtattaattac

SEQ ID NO: 620164 - DNA, 33 bp, Homo sapien
gtaggttctaggaagacaatgtgtattaattac

SEQ ID NO: 620165 - DNA, 33 bp, Homo sapien
ttactcctaatagttacgccatgttaattatca

SEQ ID NO: 620166 - DNA, 33 bp, Homo sapien
ttactcctaatagttatgccatgttaattatca

SEQ ID NO: 620167 - DNA, 33 bp, Homo sapien
tgcaaaacaccagaacaattactcctaatagtt

SEQ ID NO: 620168 - DNA, 33 bp, Homo sapien
tgcaaaacaccagaacgattactcctaatagtt

SEQ ID NO: 620169 - DNA, 33 bp, Homo sapien
taattcataagttatcaagcaaagcagactagg

SEQ ID NO: 620170 - DNA, 33 bp, Homo sapien
taattcataagttatccagcaaagcagactagg

SEQ ID NO: 620171 - DNA, 33 bp, Homo sapien
atgtcctcatctttacacttccttgtctattac

SEQ ID NO: 620172 - DNA, 33 bp, Homo sapien
atgtcctcatctttacgcttccttgtctattac

SEQ ID NO: 620173 - DNA, 33 bp, Homo sapien
cttgcatgatgaatcaaattaccaagaatgctt

SEQ ID NO: 620174 - DNA, 33 bp, Homo sapien
cttgcatgatgaatcagattaccaagaatgctt

SEQ ID NO: 620175 - DNA, 33 bp, Homo sapien
atgaaaagagtcaggggaagtaaaaattgcatg

SEQ ID NO: 620176 - DNA, 33 bp, Homo sapien
atgaaaagagtcagggtaagtaaaaattgcatg

SEQ ID NO: 620177 - DNA, 33 bp, Homo sapien
cactgagaaatgcaaccgattttttgttctctc

SEQ ID NO: 620178 - DNA, 33 bp, Homo sapien
cactgagaaatgcaactgattttttgttctctc

SEQ ID NO: 620179 - DNA, 33 bp, Homo sapien
gagttttaatggtggaaaaattatgggagggac

SEQ ID NO: 620180 - DNA, 33 bp, Homo sapien
gagttttaatggtggacaaattatgggagggac

SEQ ID NO: 620181 - DNA, 33 bp, Homo sapien
agactcatgtttgtcaactaaactgttagaggt

SEQ ID NO: 620182 - DNA, 33 bp, Homo sapien
agactcatgtttgtcacctaaactgttagaggt

SEQ ID NO: 620183 - DNA, 33 bp, Homo sapien
gatgatttaacctatacgaatgaggcatattac

SEQ ID NO: 620184 - DNA, 33 bp, Homo sapien
gatgatttaacctatatgaatgaggcatattac

SEQ ID NO: 620185 - DNA, 33 bp, Homo sapien
ttttaattggattttcactcacgtcacttaaga

SEQ ID NO: 620186 - DNA, 33 bp, Homo sapien
ttttaattggattttccctcacgtcacttaaga

SEQ ID NO: 620187 - DNA, 33 bp, Homo sapien
ttcactttctcttttaacttctgtaggaccttg

SEQ ID NO: 620188 - DNA, 33 bp, Homo sapien
ttcactttctcttttaccttctgtaggaccttg

SEQ ID NO: 620189 - DNA, 33 bp, Homo sapien
tgagaaaccacatggaaagagatgtcccagctt

SEQ ID NO: 620190 - DNA, 33 bp, Homo sapien
tgagaaaccacatggagagagatgtcccagctt

SEQ ID NO: 620191 - DNA, 33 bp, Homo sapien
tccaaagaagactcaacctacaaacagagacat

SEQ ID NO: 620192 - DNA, 33 bp, Homo sapien
tccaaagaagactcaatctacaaacagagacat

SEQ ID NO: 620193 - DNA, 33 bp, Homo sapien
agcataacgatggggcaagggagagaaagaaat

SEQ ID NO: 620194 - DNA, 33 bp, Homo sapien
agcataacgatggggcgagggagagaaagaaat

SEQ ID NO: 620195 - DNA, 33 bp, Homo sapien
gtagtcttaacatcaaaacccttgcactacatt

SEQ ID NO: 620196 - DNA, 33 bp, Homo sapien
gtagtcttaacatcaacacccttgcactacatt

SEQ ID NO: 620197 - DNA, 33 bp, Homo sapien
cttaataaatcccttgcatgcagatcctcatct

SEQ ID NO: 620198 - DNA, 33 bp, Homo sapien
cttaataaatcccttgtatgcagatcctcatct

SEQ ID NO: 620199 - DNA, 33 bp, Homo sapien
tctacagtaacaaatacacgcaatcacaggaat

SEQ ID NO: 620200 - DNA, 33 bp, Homo sapien
tctacagtaacaaatatacgcaatcacaggaat

SEQ ID NO: 620201 - DNA, 33 bp, Homo sapien
ggcatagggaggcacccgagcgctagtaatctc

SEQ ID NO: 620202 - DNA, 33 bp, Homo sapien
ggcatagggaggcacctgagcgctagtaatctc

SEQ ID NO: 620203 - DNA, 33 bp, Homo sapien
catcattggggaacagaaagacatggatgataa

SEQ ID NO: 620204 - DNA, 33 bp, Homo sapien
catcattggggaacaggaagacatggatgataa

SEQ ID NO: 620205 - DNA, 33 bp, Homo sapien
caatgcaatagaaatacggtagctatcagaaac

SEQ ID NO: 620206 - DNA, 33 bp, Homo sapien
caatgcaatagaaatatggtagctatcagaaac

SEQ ID NO: 620207 - DNA, 33 bp, Homo sapien
ctaaaagtataaatcagtcgtgaaagccaggtt

SEQ ID NO: 620208 - DNA, 33 bp, Homo sapien
ctaaaagtataaatcattcgtgaaagccaggtt

SEQ ID NO: 620209 - DNA, 33 bp, Homo sapien
gaaagccaaatcttaaaaagtgaaatagcctgc

SEQ ID NO: 620210 - DNA, 33 bp, Homo sapien
gaaagccaaatcttaagaagtgaaatagcctgc

SEQ ID NO: 620211 - DNA, 33 bp, Homo sapien
ctggaaggattgggtacctccacgtgctcagcc

SEQ ID NO: 620212 - DNA, 33 bp, Homo sapien
ctggaaggattgggtatctccacgtgctcagcc

SEQ ID NO: 620213 - DNA, 33 bp, Homo sapien
ctgtttaaatacaaatcatacttacctctgtaa

SEQ ID NO: 620214 - DNA, 33 bp, Homo sapien
ctgtttaaatacaaatgatacttacctctgtaa

SEQ ID NO: 620215 - DNA, 33 bp, Homo sapien
attttcccaggtaaacaaatactacttgcatac

SEQ ID NO: 620216 - DNA, 33 bp, Homo sapien
attttcccaggtaaacgaatactacttgcatac

SEQ ID NO: 620217 - DNA, 33 bp, Homo sapien
tggctccaacaaaatcactaaatttgattcacc

SEQ ID NO: 620218 - DNA, 33 bp, Homo sapien
tggctccaacaaaatctctaaatttgattcacc

SEQ ID NO: 620219 - DNA, 33 bp, Homo sapien
ttgttttgctcactaacgtattcccatgtgcct

SEQ ID NO: 620220 - DNA, 33 bp, Homo sapien
ttgttttgctcactaatgtattcccatgtgcct

SEQ ID NO: 620221 - DNA, 33 bp, Homo sapien
tgtacaactactctcaatacttttttccattag

SEQ ID NO: 620222 - DNA, 33 bp, Homo sapien
tgtacaactactctcagtacttttttccattag

SEQ ID NO: 620223 - DNA, 33 bp, Homo sapien
caatggatacaaggcaaaaactggcctgggaag

SEQ ID NO: 620224 - DNA, 33 bp, Homo sapien
caatggatacaaggcagaaactggcctgggaag

SEQ ID NO: 620225 - DNA, 33 bp, Homo sapien
tttttgaaagcctaccaattatgcaagactcga

SEQ ID NO: 620226 - DNA, 33 bp, Homo sapien
tttttgaaagcctacctattatgcaagactcga

SEQ ID NO: 620227 - DNA, 33 bp, Homo sapien
attacattggccagaactgagtcatcagaaacc

SEQ ID NO: 620228 - DNA, 33 bp, Homo sapien
attacattggccagaattgagtcatcagaaacc

SEQ ID NO: 620229 - DNA, 33 bp, Homo sapien
ctcttcgctctataagaaattttgttaaactgt

SEQ ID NO: 620230 - DNA, 33 bp, Homo sapien
ctcttcgctctataaggaattttgttaaactgt

SEQ ID NO: 620231 - DNA, 33 bp, Homo sapien
aggcagatgaaacagcaattatatacctgagtg

SEQ ID NO: 620232 - DNA, 33 bp, Homo sapien
aggcagatgaaacagcgattatatacctgagtg

SEQ ID NO: 620233 - DNA, 33 bp, Homo sapien
ttgaattaatagagaacttcatgagtgagtaca

SEQ ID NO: 620234 - DNA, 33 bp, Homo sapien
ttgaattaatagagaatttcatgagtgagtaca

SEQ ID NO: 620235 - DNA, 33 bp, Homo sapien
ctctattttctccacagatcagctttcaccccg

SEQ ID NO: 620236 - DNA, 33 bp, Homo sapien
ctctattttctccacatatcagctttcaccccg

SEQ ID NO: 620237 - DNA, 33 bp, Homo sapien
atcaatcagtatagtaactagcaaagtaggtgc

SEQ ID NO: 620238 - DNA, 33 bp, Homo sapien
atcaatcagtatagtatctagcaaagtaggtgc

SEQ ID NO: 620239 - DNA, 33 bp, Homo sapien
acaatctctccaaaaaatgtgagaacaacttgt

SEQ ID NO: 620240 - DNA, 33 bp, Homo sapien
acaatctctccaaaaagtgtgagaacaacttgt

SEQ ID NO: 620241 - DNA, 33 bp, Homo sapien
agaaacaatgggcttgcagctttggaaccgcac

SEQ ID NO: 620242 - DNA, 33 bp, Homo sapien
agaaacaatgggcttggagctttggaaccgcac

SEQ ID NO: 620243 - DNA, 33 bp, Homo sapien
ggaactaaactcaatcacttgatgtgaggaaca

SEQ ID NO: 620244 - DNA, 33 bp, Homo sapien
ggaactaaactcaatctcttgatgtgaggaaca

SEQ ID NO: 620245 - DNA, 33 bp, Homo sapien
tactttcaaaagtcaacgctcgtagtgaccaca

SEQ ID NO: 620246 - DNA, 33 bp, Homo sapien
tactttcaaaagtcaatgctcgtagtgaccaca

SEQ ID NO: 620247 - DNA, 33 bp, Homo sapien
tttattaattttaccaaaagcctacagacatat

SEQ ID NO: 620248 - DNA, 33 bp, Homo sapien
tttattaattttaccataagcctacagacatat

SEQ ID NO: 620249 - DNA, 33 bp, Homo sapien
actgagggagactaccaccttcaactccaaact

SEQ ID NO: 620250 - DNA, 33 bp, Homo sapien
actgagggagactacctccttcaactccaaact

SEQ ID NO: 620251 - DNA, 33 bp, Homo sapien
taaaaaatggtactacagaatttgagaatacag

SEQ ID NO: 620252 - DNA, 33 bp, Homo sapien
taaaaaatggtactaccgaatttgagaatacag

SEQ ID NO: 620253 - DNA, 33 bp, Homo sapien
tgcattgcaaaactctaaagaacagcattctta

SEQ ID NO: 620254 - DNA, 33 bp, Homo sapien
tgcattgcaaaactctgaagaacagcattctta

SEQ ID NO: 620255 - DNA, 33 bp, Homo sapien
atcttttctgaggcaccattgtcccttattacc

SEQ ID NO: 620256 - DNA, 33 bp, Homo sapien
atcttttctgaggcacgattgtcccttattacc

SEQ ID NO: 620257 - DNA, 33 bp, Homo sapien
ccaggtgcttgtacagacacatggtgaaaagct

SEQ ID NO: 620258 - DNA, 33 bp, Homo sapien
ccaggtgcttgtacagtcacatggtgaaaagct

SEQ ID NO: 620259 - DNA, 33 bp, Homo sapien
tttagtaaagagtagaagttggaagaaaaatgc

SEQ ID NO: 620260 - DNA, 33 bp, Homo sapien
tttagtaaagagtagaggttggaagaaaaatgc

SEQ ID NO: 620261 - DNA, 33 bp, Homo sapien
tctcaggaaagctgccaaacttatctgagagct

SEQ ID NO: 620262 - DNA, 33 bp, Homo sapien
tctcaggaaagctgccgaacttatctgagagct

SEQ ID NO: 620263 - DNA, 33 bp, Homo sapien
tatttcaagtatttagcagtcgtaagtggctag

SEQ ID NO: 620264 - DNA, 33 bp, Homo sapien
tatttcaagtatttagtagtcgtaagtggctag

SEQ ID NO: 620265 - DNA, 33 bp, Homo sapien
tcgactttcactaaataacacgtggatcactat

SEQ ID NO: 620266 - DNA, 33 bp, Homo sapien
tcgactttcactaaatgacacgtggatcactat

SEQ ID NO: 620267 - DNA, 33 bp, Homo sapien
tctgcagtattgcccacagtgaacaattagcta

SEQ ID NO: 620268 - DNA, 33 bp, Homo sapien
tctgcagtattgcccatagtgaacaattagcta

SEQ ID NO: 620269 - DNA, 33 bp, Homo sapien
ctctcacaacccaagacagtcatcgaggaaatt

SEQ ID NO: 620270 - DNA, 33 bp, Homo sapien
ctctcacaacccaagatagtcatcgaggaaatt

SEQ ID NO: 620271 - DNA, 33 bp, Homo sapien
ttaacttctaagctctcaagattatgcttgctt

SEQ ID NO: 620272 - DNA, 33 bp, Homo sapien
ttaacttctaagctctgaagattatgcttgctt

SEQ ID NO: 620273 - DNA, 33 bp, Homo sapien
agagcattttggcaagcccatgattatttctaa

SEQ ID NO: 620274 - DNA, 33 bp, Homo sapien
agagcattttggcaagtccatgattatttctaa

SEQ ID NO: 620275 - DNA, 33 bp, Homo sapien
actaaacttaaaagaacagattccaatggtatt

SEQ ID NO: 620276 - DNA, 33 bp, Homo sapien
actaaacttaaaagaagagattccaatggtatt

SEQ ID NO: 620277 - DNA, 33 bp, Homo sapien
atatataatacctataaacaaacaacttttacc

SEQ ID NO: 620278 - DNA, 33 bp, Homo sapien
atatataatacctatagacaaacaacttttacc

SEQ ID NO: 620279 - DNA, 33 bp, Homo sapien
cagttgcggtgtcagaagaatgctctttattta

SEQ ID NO: 620280 - DNA, 33 bp, Homo sapien
cagttgcggtgtcagaggaatgctctttattta

SEQ ID NO: 620281 - DNA, 33 bp, Homo sapien
cgtcctgctgcatttcaaagaatggatgctgac

SEQ ID NO: 620282 - DNA, 33 bp, Homo sapien
cgtcctgctgcatttcgaagaatggatgctgac

SEQ ID NO: 620283 - DNA, 33 bp, Homo sapien
cataaggggcaggcaagaattttattactgatg

SEQ ID NO: 620284 - DNA, 33 bp, Homo sapien
cataaggggcaggcaataattttattactgatg

SEQ ID NO: 620285 - DNA, 33 bp, Homo sapien
gcagctgacaaaagtacaaaaattgtgccagcc

SEQ ID NO: 620286 - DNA, 33 bp, Homo sapien
gcagctgacaaaagtataaaaattgtgccagcc

SEQ ID NO: 620287 - DNA, 33 bp, Homo sapien
caactggagcttaataccactggagaatcctag

SEQ ID NO: 620288 - DNA, 33 bp, Homo sapien
caactggagcttaatagcactggagaatcctag

SEQ ID NO: 620289 - DNA, 33 bp, Homo sapien
gaagactataaagcagacacttgttctttggta

SEQ ID NO: 620290 - DNA, 33 bp, Homo sapien
gaagactataaagcagtcacttgttctttggta

SEQ ID NO: 620291 - DNA, 33 bp, Homo sapien
ttgatctcaaaaatcactccgagcctcaaaaaa

SEQ ID NO: 620292 - DNA, 33 bp, Homo sapien
ttgatctcaaaaatcattccgagcctcaaaaaa

SEQ ID NO: 620293 - DNA, 33 bp, Homo sapien
gtggtatttcactataaaagttgtctaagcagc

SEQ ID NO: 620294 - DNA, 33 bp, Homo sapien
gtggtatttcactatataagttgtctaagcagc

SEQ ID NO: 620295 - DNA, 33 bp, Homo sapien
agcccctgggtcatcacctatcagtctgtcatg

SEQ ID NO: 620296 - DNA, 33 bp, Homo sapien
agcccctgggtcatcagctatcagtctgtcatg

SEQ ID NO: 620297 - DNA, 33 bp, Homo sapien
gggagcaactttggcaacttctggtttacagtg

SEQ ID NO: 620298 - DNA, 33 bp, Homo sapien
gggagcaactttggcagcttctggtttacagtg

SEQ ID NO: 620299 - DNA, 33 bp, Homo sapien
aacttccagctacaaacgcttgcagctctttat

SEQ ID NO: 620300 - DNA, 33 bp, Homo sapien
aacttccagctacaaatgcttgcagctctttat

SEQ ID NO: 620301 - DNA, 33 bp, Homo sapien
ttgtagacatcaataccgtacaatagaaccttc

SEQ ID NO: 620302 - DNA, 33 bp, Homo sapien
ttgtagacatcaatactgtacaatagaaccttc

SEQ ID NO: 620303 - DNA, 33 bp, Homo sapien
agattagcaaacctataaatcataatttcttga

SEQ ID NO: 620304 - DNA, 33 bp, Homo sapien
agattagcaaacctatgaatcataatttcttga

SEQ ID NO: 620305 - DNA, 33 bp, Homo sapien
ctatgtttctgtaaccaacattaaaacatttgg

SEQ ID NO: 620306 - DNA, 33 bp, Homo sapien
ctatgtttctgtaaccgacattaaaacatttgg

SEQ ID NO: 620307 - DNA, 33 bp, Homo sapien
cctagattaactgtcacgaaattttccaaatgt

SEQ ID NO: 620308 - DNA, 33 bp, Homo sapien
cctagattaactgtcatgaaattttccaaatgt

SEQ ID NO: 620309 - DNA, 33 bp, Homo sapien
attatgcagtctccaacgtagcaatgcaagaat

SEQ ID NO: 620310 - DNA, 33 bp, Homo sapien
attatgcagtctccaatgtagcaatgcaagaat

SEQ ID NO: 620311 - DNA, 33 bp, Homo sapien
gcaagaatggcctaacacaccatgtgatgtgtc

SEQ ID NO: 620312 - DNA, 33 bp, Homo sapien
gcaagaatggcctaacgcaccatgtgatgtgtc

SEQ ID NO: 620313 - DNA, 33 bp, Homo sapien
taaattgttccagtcccgactcaaagatggcaa

SEQ ID NO: 620314 - DNA, 33 bp, Homo sapien
taaattgttccagtcctgactcaaagatggcaa

SEQ ID NO: 620315 - DNA, 33 bp, Homo sapien
gcatgtattcaccatacagagttttacaaaatg

SEQ ID NO: 620316 - DNA, 33 bp, Homo sapien
gcatgtattcaccatatagagttttacaaaatg

SEQ ID NO: 620317 - DNA, 33 bp, Homo sapien
aatgtacccctctgctaagagatactgatagtg

SEQ ID NO: 620318 - DNA, 33 bp, Homo sapien
aatgtacccctctgctgagagatactgatagtg

SEQ ID NO: 620319 - DNA, 33 bp, Homo sapien
gttttagcagctgcctaacactgagaataaatc

SEQ ID NO: 620320 - DNA, 33 bp, Homo sapien
gttttagcagctgcctgacactgagaataaatc

SEQ ID NO: 620321 - DNA, 33 bp, Homo sapien
gacccaataattccaacgtatatgttccaaaga

SEQ ID NO: 620322 - DNA, 33 bp, Homo sapien
gacccaataattccaaggtatatgttccaaaga

SEQ ID NO: 620323 - DNA, 33 bp, Homo sapien
ccttgagatagtttacaaaatagaaaggagtta

SEQ ID NO: 620324 - DNA, 33 bp, Homo sapien
ccttgagatagtttacgaaatagaaaggagtta

SEQ ID NO: 620325 - DNA, 33 bp, Homo sapien
caattgctccagttgccaaatatgaactaggtc

SEQ ID NO: 620326 - DNA, 33 bp, Homo sapien
caattgctccagttgctaaatatgaactaggtc

SEQ ID NO: 620327 - DNA, 33 bp, Homo sapien
tgctagtgattcggcaccaccaaaaagaagtca

SEQ ID NO: 620328 - DNA, 33 bp, Homo sapien
tgctagtgattcggcatcaccaaaaagaagtca

SEQ ID NO: 620329 - DNA, 33 bp, Homo sapien
gagaaaacaaagatgactaagaataaggtgtgt

SEQ ID NO: 620330 - DNA, 33 bp, Homo sapien
gagaaaacaaagatgagtaagaataaggtgtgt

SEQ ID NO: 620331 - DNA, 33 bp, Homo sapien
gaaaactgtggtttaacagtgagaaaggatcat

SEQ ID NO: 620332 - DNA, 33 bp, Homo sapien
gaaaactgtggtttaagagtgagaaaggatcat

SEQ ID NO: 620333 - DNA, 33 bp, Homo sapien
gagtcatactctagtaagtagcattgagtaggc

SEQ ID NO: 620334 - DNA, 33 bp, Homo sapien
gagtcatactctagtaggtagcattgagtaggc

SEQ ID NO: 620335 - DNA, 33 bp, Homo sapien
gaatgtagattttagaatagggattagcaaatt

SEQ ID NO: 620336 - DNA, 33 bp, Homo sapien
gaatgtagattttagagtagggattagcaaatt

SEQ ID NO: 620337 - DNA, 33 bp, Homo sapien
aaatgtaaatacatagcattgacaaagtactac

SEQ ID NO: 620338 - DNA, 33 bp, Homo sapien
aaatgtaaatacataggattgacaaagtactac

SEQ ID NO: 620339 - DNA, 33 bp, Homo sapien
aagacaaggctagaaaaccagtttcaaccattt

SEQ ID NO: 620340 - DNA, 33 bp, Homo sapien
aagacaaggctagaaagccagtttcaaccattt

SEQ ID NO: 620341 - DNA, 33 bp, Homo sapien
catcaaccctttgaggaatatcctattactatc

SEQ ID NO: 620342 - DNA, 33 bp, Homo sapien
catcaaccctttgaggtatatcctattactatc

SEQ ID NO: 620343 - DNA, 33 bp, Homo sapien
attgacaaactatcaaagaaggagtagctcaat

SEQ ID NO: 620344 - DNA, 33 bp, Homo sapien
attgacaaactatcaaggaaggagtagctcaat

SEQ ID NO: 620345 - DNA, 33 bp, Homo sapien
ggccttgtacatcataaccatttaatgaatatt

SEQ ID NO: 620346 - DNA, 33 bp, Homo sapien
ggccttgtacatcatagccatttaatgaatatt

SEQ ID NO: 620347 - DNA, 33 bp, Homo sapien
agcagaaatattgagacgagaatttggaaataa

SEQ ID NO: 620348 - DNA, 33 bp, Homo sapien
agcagaaatattgagatgagaatttggaaataa

SEQ ID NO: 620349 - DNA, 33 bp, Homo sapien
atccaaggtcaaaaacaaaggaattacgttcat

SEQ ID NO: 620350 - DNA, 33 bp, Homo sapien
atccaaggtcaaaaacgaaggaattacgttcat

SEQ ID NO: 620351 - DNA, 33 bp, Homo sapien
tactctcctgtaatcacagacaggacaggcaca

SEQ ID NO: 620352 - DNA, 33 bp, Homo sapien
tactctcctgtaatcagagacaggacaggcaca

SEQ ID NO: 620353 - DNA, 33 bp, Homo sapien
gtgcagagatggagacagggtaaagttcagggc

SEQ ID NO: 620354 - DNA, 33 bp, Homo sapien
gtgcagagatggagacggggtaaagttcagggc

SEQ ID NO: 620355 - DNA, 33 bp, Homo sapien
atattcgaagtacataacaatcaccgtagattt

SEQ ID NO: 620356 - DNA, 33 bp, Homo sapien
atattcgaagtacatatcaatcaccgtagattt

SEQ ID NO: 620357 - DNA, 33 bp, Homo sapien
aaaatatctgcagccagtcaaaatactctcgtg

SEQ ID NO: 620358 - DNA, 33 bp, Homo sapien
aaaatatctgcagccattcaaaatactctcgtg

SEQ ID NO: 620359 - DNA, 33 bp, Homo sapien
agaacgtttgcaagtacattcgaagttcaaata

SEQ ID NO: 620360 - DNA, 33 bp, Homo sapien
agaacgtttgcaagtatattcgaagttcaaata

SEQ ID NO: 620361 - DNA, 33 bp, Homo sapien
actccttcaacgcctaagatcaccagctcaggt

SEQ ID NO: 620362 - DNA, 33 bp, Homo sapien
actccttcaacgcctacgatcaccagctcaggt

SEQ ID NO: 620363 - DNA, 33 bp, Homo sapien
aatttcattctagcaagttacagtaccagcaag

SEQ ID NO: 620364 - DNA, 33 bp, Homo sapien
aatttcattctagcaatttacagtaccagcaag

SEQ ID NO: 620365 - DNA, 33 bp, Homo sapien
tatgaatgtgtaatacaacttgctgcatcattt

SEQ ID NO: 620366 - DNA, 33 bp, Homo sapien
tatgaatgtgtaatacgacttgctgcatcattt

SEQ ID NO: 620367 - DNA, 33 bp, Homo sapien
atctcgttcctcaccccgggctcatacatcttt

SEQ ID NO: 620368 - DNA, 33 bp, Homo sapien
atctcgttcctcaccctgggctcatacatcttt

SEQ ID NO: 620369 - DNA, 33 bp, Homo sapien
ggcacaccagcacggacatggttgatggtcctt

SEQ ID NO: 620370 - DNA, 33 bp, Homo sapien
ggcacaccagcacggatatggttgatggtcctt

SEQ ID NO: 620371 - DNA, 33 bp, Homo sapien
tgtctggcccatgtcaaagtgcatctgtgtcag

SEQ ID NO: 620372 - DNA, 33 bp, Homo sapien
tgtctggcccatgtcagagtgcatctgtgtcag

SEQ ID NO: 620373 - DNA, 33 bp, Homo sapien
aaatgtgtttcagcaactaacagaaaataccgt

SEQ ID NO: 620374 - DNA, 33 bp, Homo sapien
aaatgtgtttcagcaagtaacagaaaataccgt

SEQ ID NO: 620375 - DNA, 33 bp, Homo sapien
atgtttcctctgtccactgataacgttggaagt

SEQ ID NO: 620376 - DNA, 33 bp, Homo sapien
atgtttcctctgtccattgataacgttggaagt

SEQ ID NO: 620377 - DNA, 33 bp, Homo sapien
caaagagatccttctgaaacatttctttgcagc

SEQ ID NO: 620378 - DNA, 33 bp, Homo sapien
caaagagatccttctggaacatttctttgcagc

SEQ ID NO: 620379 - DNA, 33 bp, Homo sapien
gtactcacttcacataatatctggtacatagtg

SEQ ID NO: 620380 - DNA, 33 bp, Homo sapien
gtactcacttcacatagtatctggtacatagtg

SEQ ID NO: 620381 - DNA, 33 bp, Homo sapien
gcccacttgtctgattcaacagcccgacctgcc

SEQ ID NO: 620382 - DNA, 33 bp, Homo sapien
gcccacttgtctgatttaacagcccgacctgcc

SEQ ID NO: 620383 - DNA, 33 bp, Homo sapien
attgataagatcttcaactgtattttgaggttc

SEQ ID NO: 620384 - DNA, 33 bp, Homo sapien
attgataagatcttcagctgtattttgaggttc

SEQ ID NO: 620385 - DNA, 33 bp, Homo sapien
cggagagatggactcaatgaaggtaatgtttta

SEQ ID NO: 620386 - DNA, 33 bp, Homo sapien
cggagagatggactcagtgaaggtaatgtttta

SEQ ID NO: 620387 - DNA, 33 bp, Homo sapien
cctaagtcttgacctactaatttggaaaaatgt

SEQ ID NO: 620388 - DNA, 33 bp, Homo sapien
cctaagtcttgacctagtaatttggaaaaatgt

SEQ ID NO: 620389 - DNA, 33 bp, Homo sapien
catttttcagatgacaaatctaaagtatggaga

SEQ ID NO: 620390 - DNA, 33 bp, Homo sapien
catttttcagatgacagatctaaagtatggaga

SEQ ID NO: 620391 - DNA, 33 bp, Homo sapien
ctttctctcagtttcacagttccaggtgtgtcc

SEQ ID NO: 620392 - DNA, 33 bp, Homo sapien
ctttctctcagtttcatagttccaggtgtgtcc

SEQ ID NO: 620393 - DNA, 33 bp, Homo sapien
agagctgatgtctgagaccatatttctgccatt

SEQ ID NO: 620394 - DNA, 33 bp, Homo sapien
agagctgatgtctgaggccatatttctgccatt

SEQ ID NO: 620395 - DNA, 33 bp, Homo sapien
tgaagagttgagataacagacaagaacgagaaa

SEQ ID NO: 620396 - DNA, 33 bp, Homo sapien
tgaagagttgagataagagacaagaacgagaaa

SEQ ID NO: 620397 - DNA, 33 bp, Homo sapien
gccttattatcaaggacggctaaaacttagttt

SEQ ID NO: 620398 - DNA, 33 bp, Homo sapien
gccttattatcaaggatggctaaaacttagttt

SEQ ID NO: 620399 - DNA, 33 bp, Homo sapien
caagtgcttcttcatagcatggtaagaagacat

SEQ ID NO: 620400 - DNA, 33 bp, Homo sapien
caagtgcttcttcatatcatggtaagaagacat

SEQ ID NO: 620401 - DNA, 33 bp, Homo sapien
acatctcacactaacaagcaaattcagatgctg

SEQ ID NO: 620402 - DNA, 33 bp, Homo sapien
acatctcacactaacaggcaaattcagatgctg

SEQ ID NO: 620403 - DNA, 33 bp, Homo sapien
agcccagattatgaagactacaacaaggaccta

SEQ ID NO: 620404 - DNA, 33 bp, Homo sapien
agcccagattatgaaggctacaacaaggaccta

SEQ ID NO: 620405 - DNA, 33 bp, Homo sapien
gccacagcagaatagaatagaatagcatctatg

SEQ ID NO: 620406 - DNA, 33 bp, Homo sapien
gccacagcagaatagactagaatagcatctatg

SEQ ID NO: 620407 - DNA, 33 bp, Homo sapien
ttatttctaagtaaggccatattcacaggtaca

SEQ ID NO: 620408 - DNA, 33 bp, Homo sapien
ttatttctaagtaaggtcatattcacaggtaca

SEQ ID NO: 620409 - DNA, 33 bp, Homo sapien
gattattgtcaggaacaattttctgtagacatc

SEQ ID NO: 620410 - DNA, 33 bp, Homo sapien
gattattgtcaggaacgattttctgtagacatc

SEQ ID NO: 620411 - DNA, 33 bp, Homo sapien
gtaggaatgtttaagacagccatcaatgatcat

SEQ ID NO: 620412 - DNA, 33 bp, Homo sapien
gtaggaatgtttaagatagccatcaatgatcat

SEQ ID NO: 620413 - DNA, 33 bp, Homo sapien
ttccatcacccatacaagaattctccaaatgat

SEQ ID NO: 620414 - DNA, 33 bp, Homo sapien
ttccatcacccatacaggaattctccaaatgat

SEQ ID NO: 620415 - DNA, 33 bp, Homo sapien
aagtagtagttctccagattgcttggtttcctc

SEQ ID NO: 620416 - DNA, 33 bp, Homo sapien
aagtagtagttctccatattgcttggtttcctc

SEQ ID NO: 620417 - DNA, 33 bp, Homo sapien
ttattgcttgcagtgaaggtatgatggaaaatc

SEQ ID NO: 620418 - DNA, 33 bp, Homo sapien
ttattgcttgcagtgagggtatgatggaaaatc

SEQ ID NO: 620419 - DNA, 33 bp, Homo sapien
agagaagttctctataagctgaaaaaggcaaga

SEQ ID NO: 620420 - DNA, 33 bp, Homo sapien
agagaagttctctataggctgaaaaaggcaaga

SEQ ID NO: 620421 - DNA, 33 bp, Homo sapien
acctcagttttgtctgcataagcaatcccaaac

SEQ ID NO: 620422 - DNA, 33 bp, Homo sapien
acctcagttttgtctgtataagcaatcccaaac

SEQ ID NO: 620423 - DNA, 33 bp, Homo sapien
agagtttataacctaccgacaaaagagcccctt

SEQ ID NO: 620424 - DNA, 33 bp, Homo sapien
agagtttataacctactgacaaaagagcccctt

SEQ ID NO: 620425 - DNA, 33 bp, Homo sapien
ctaatccagcacccacaattaacataaaggaaa

SEQ ID NO: 620426 - DNA, 33 bp, Homo sapien
ctaatccagcacccacgattaacataaaggaaa

SEQ ID NO: 620427 - DNA, 33 bp, Homo sapien
aatttggaccatattcatcttcatctttatttc

SEQ ID NO: 620428 - DNA, 33 bp, Homo sapien
aatttggaccatattcttcttcatctttatttc

SEQ ID NO: 620429 - DNA, 33 bp, Homo sapien
gtcagaaatgaactgagagtaagcagtaatatt

SEQ ID NO: 620430 - DNA, 33 bp, Homo sapien
gtcagaaatgaactgatagtaagcagtaatatt

SEQ ID NO: 620431 - DNA, 33 bp, Homo sapien
tcatctcattgtaataactgaacagtgatttgc

SEQ ID NO: 620432 - DNA, 33 bp, Homo sapien
tcatctcattgtaatacctgaacagtgatttgc

SEQ ID NO: 620433 - DNA, 33 bp, Homo sapien
gcacataagcttataaaaattggatgttttgca

SEQ ID NO: 620434 - DNA, 33 bp, Homo sapien
gcacataagcttataagaattggatgttttgca

SEQ ID NO: 620435 - DNA, 33 bp, Homo sapien
gaagatttcaatgtaacgatgtgaggagggaaa

SEQ ID NO: 620436 - DNA, 33 bp, Homo sapien
gaagatttcaatgtaatgatgtgaggagggaaa

SEQ ID NO: 620437 - DNA, 33 bp, Homo sapien
gaaaataatgacttgaaatgccttagtgtgaag

SEQ ID NO: 620438 - DNA, 33 bp, Homo sapien
gaaaataatgacttgagatgccttagtgtgaag

SEQ ID NO: 620439 - DNA, 33 bp, Homo sapien
cttccagagaaacttacggagataagaaactta

SEQ ID NO: 620440 - DNA, 33 bp, Homo sapien
cttccagagaaacttatggagataagaaactta

SEQ ID NO: 620441 - DNA, 33 bp, Homo sapien
agagaacagaggataacgtgtgctttgttatca

SEQ ID NO: 620442 - DNA, 33 bp, Homo sapien
agagaacagaggataatgtgtgctttgttatca

SEQ ID NO: 620443 - DNA, 33 bp, Homo sapien
gatggtggcaatgaagacagagtgcatgaagtt

SEQ ID NO: 620444 - DNA, 33 bp, Homo sapien
gatggtggcaatgaaggcagagtgcatgaagtt

SEQ ID NO: 620445 - DNA, 33 bp, Homo sapien
gcaggaatgactcaaaaactaggactacagcag

SEQ ID NO: 620446 - DNA, 33 bp, Homo sapien
gcaggaatgactcaaacactaggactacagcag

SEQ ID NO: 620447 - DNA, 33 bp, Homo sapien
attaaagaagcagctaactacacagttttaaca

SEQ ID NO: 620448 - DNA, 33 bp, Homo sapien
attaaagaagcagctagctacacagttttaaca

SEQ ID NO: 620449 - DNA, 33 bp, Homo sapien
ctctaggcacacatcaatcccattttttgagag

SEQ ID NO: 620450 - DNA, 33 bp, Homo sapien
ctctaggcacacatcagtcccattttttgagag

SEQ ID NO: 620451 - DNA, 33 bp, Homo sapien
cgtaaactgcatttaaacaagattccaggtgat

SEQ ID NO: 620452 - DNA, 33 bp, Homo sapien
cgtaaactgcatttaagcaagattccaggtgat

SEQ ID NO: 620453 - DNA, 33 bp, Homo sapien
aatccatcagagccaacagtagagtcttttaat

SEQ ID NO: 620454 - DNA, 33 bp, Homo sapien
aatccatcagagccaatagtagagtcttttaat

SEQ ID NO: 620455 - DNA, 33 bp, Homo sapien
gtcaattgtatttcaaatgtaaaattgccttac

SEQ ID NO: 620456 - DNA, 33 bp, Homo sapien
gtcaattgtatttcaagtgtaaaattgccttac

SEQ ID NO: 620457 - DNA, 33 bp, Homo sapien
gtgcaatatatcaccacattttcaaaactccat

SEQ ID NO: 620458 - DNA, 33 bp, Homo sapien
gtgcaatatatcaccagattttcaaaactccat

SEQ ID NO: 620459 - DNA, 33 bp, Homo sapien
atccacagacctaaaaagtggaagtcaaactag

SEQ ID NO: 620460 - DNA, 33 bp, Homo sapien
atccacagacctaaaaggtggaagtcaaactag

SEQ ID NO: 620461 - DNA, 33 bp, Homo sapien
ttgtgttgttcataaacgagatgaataaattga

SEQ ID NO: 620462 - DNA, 33 bp, Homo sapien
ttgtgttgttcataaaggagatgaataaattga

SEQ ID NO: 620463 - DNA, 33 bp, Homo sapien
aggaaatcagaactcagagtaactgcagaacaa

SEQ ID NO: 620464 - DNA, 33 bp, Homo sapien
aggaaatcagaactcatagtaactgcagaacaa

SEQ ID NO: 620465 - DNA, 33 bp, Homo sapien
cttacacagtatctagaccagtgtttagtcaaa

SEQ ID NO: 620466 - DNA, 33 bp, Homo sapien
cttacacagtatctagcccagtgtttagtcaaa

SEQ ID NO: 620467 - DNA, 33 bp, Homo sapien
gaaaattatctgcaaaaatgaccacccataatt

SEQ ID NO: 620468 - DNA, 33 bp, Homo sapien
gaaaattatctgcaaagatgaccacccataatt

SEQ ID NO: 620469 - DNA, 33 bp, Homo sapien
cttgcttactgccccaatccacaagtaaagaac

SEQ ID NO: 620470 - DNA, 33 bp, Homo sapien
cttgcttactgccccagtccacaagtaaagaac

SEQ ID NO: 620471 - DNA, 33 bp, Homo sapien
agtggccttggaattacaggacagaggtataga

SEQ ID NO: 620472 - DNA, 33 bp, Homo sapien
agtggccttggaattataggacagaggtataga

SEQ ID NO: 620473 - DNA, 33 bp, Homo sapien
tattgtaactcaaaaaagcattgttagtagact

SEQ ID NO: 620474 - DNA, 33 bp, Homo sapien
tattgtaactcaaaaatgcattgttagtagact

SEQ ID NO: 620475 - DNA, 33 bp, Homo sapien
tgttaacctctaactagcccagctcttcacgtc

SEQ ID NO: 620476 - DNA, 33 bp, Homo sapien
tgttaacctctaactatcccagctcttcacgtc

SEQ ID NO: 620477 - DNA, 33 bp, Homo sapien
tgagcttcaattttagcaagtcaaagatgtaac

SEQ ID NO: 620478 - DNA, 33 bp, Homo sapien
tgagcttcaattttaggaagtcaaagatgtaac

SEQ ID NO: 620479 - DNA, 33 bp, Homo sapien
aatgatttagtgttgccatagaaaaagacacaa

SEQ ID NO: 620480 - DNA, 33 bp, Homo sapien
aatgatttagtgttgctatagaaaaagacacaa

SEQ ID NO: 620481 - DNA, 33 bp, Homo sapien
gcattccttggttataagcacatcacaccaatg

SEQ ID NO: 620482 - DNA, 33 bp, Homo sapien
gcattccttggttataggcacatcacaccaatg

SEQ ID NO: 620483 - DNA, 33 bp, Homo sapien
tctaaatgtgataggacaagaaagagagtgtca

SEQ ID NO: 620484 - DNA, 33 bp, Homo sapien
tctaaatgtgataggataagaaagagagtgtca

SEQ ID NO: 620485 - DNA, 33 bp, Homo sapien
ttggttctgcaatttacagcttctgatctgatc

SEQ ID NO: 620486 - DNA, 33 bp, Homo sapien
ttggttctgcaatttatagcttctgatctgatc

SEQ ID NO: 620487 - DNA, 33 bp, Homo sapien
atccagaaatgggaaccggtgtggtcaagtaaa

SEQ ID NO: 620488 - DNA, 33 bp, Homo sapien
atccagaaatgggaactggtgtggtcaagtaaa

SEQ ID NO: 620489 - DNA, 33 bp, Homo sapien
ctttgacccaaaaagacggggcttagtagtgag

SEQ ID NO: 620490 - DNA, 33 bp, Homo sapien
ctttgacccaaaaagatggggcttagtagtgag

SEQ ID NO: 620491 - DNA, 33 bp, Homo sapien
cctcattacatcttaactggaatcttgcaatca

SEQ ID NO: 620492 - DNA, 33 bp, Homo sapien
cctcattacatcttaagtggaatcttgcaatca

SEQ ID NO: 620493 - DNA, 33 bp, Homo sapien
gagctgtagtacaggccgcagtaaggtggcaag

SEQ ID NO: 620494 - DNA, 33 bp, Homo sapien
gagctgtagtacaggctgcagtaaggtggcaag

SEQ ID NO: 620495 - DNA, 33 bp, Homo sapien
gcgtgtagttccactcacacactgggctatttt

SEQ ID NO: 620496 - DNA, 33 bp, Homo sapien
gcgtgtagttccactcgcacactgggctatttt

SEQ ID NO: 620497 - DNA, 33 bp, Homo sapien
atcaaatctataacacaaagttgttggagggtg

SEQ ID NO: 620498 - DNA, 33 bp, Homo sapien
atcaaatctataacactaagttgttggagggtg

SEQ ID NO: 620499 - DNA, 33 bp, Homo sapien
ctttaaaggaattggacagatcattccaaactg

SEQ ID NO: 620500 - DNA, 33 bp, Homo sapien
ctttaaaggaattggagagatcattccaaactg

SEQ ID NO: 620501 - DNA, 33 bp, Homo sapien
ccattttagcaagaaaaacattaaatgtgtggt

SEQ ID NO: 620502 - DNA, 33 bp, Homo sapien
ccattttagcaagaaagacattaaatgtgtggt

SEQ ID NO: 620503 - DNA, 33 bp, Homo sapien
gaagaatgacatacaaaagcaacaaatcttgag

SEQ ID NO: 620504 - DNA, 33 bp, Homo sapien
gaagaatgacatacaagagcaacaaatcttgag

SEQ ID NO: 620505 - DNA, 33 bp, Homo sapien
ccacttaggtggaaaacactgacaaccaagtgg

SEQ ID NO: 620506 - DNA, 33 bp, Homo sapien
ccacttaggtggaaaagactgacaaccaagtgg

SEQ ID NO: 620507 - DNA, 33 bp, Homo sapien
tggggagctccgcctaccttcaacttccaaaga

SEQ ID NO: 620508 - DNA, 33 bp, Homo sapien
tggggagctccgcctatcttcaacttccaaaga

SEQ ID NO: 620509 - DNA, 33 bp, Homo sapien
taatatctaacttgcacagctgatgtgacaatt

SEQ ID NO: 620510 - DNA, 33 bp, Homo sapien
taatatctaacttgcatagctgatgtgacaatt

SEQ ID NO: 620511 - DNA, 33 bp, Homo sapien
tacaaagaagtcattcggaaggctaacaagtga

SEQ ID NO: 620512 - DNA, 33 bp, Homo sapien
tacaaagaagtcattctgaaggctaacaagtga

SEQ ID NO: 620513 - DNA, 33 bp, Homo sapien
gagtcaaaattcaagaagtttataaggtttaca

SEQ ID NO: 620514 - DNA, 33 bp, Homo sapien
gagtcaaaattcaagaggtttataaggtttaca

SEQ ID NO: 620515 - DNA, 33 bp, Homo sapien
tctttgggaaaaagaactgagtgggctagatag

SEQ ID NO: 620516 - DNA, 33 bp, Homo sapien
tctttgggaaaaagaattgagtgggctagatag

SEQ ID NO: 620517 - DNA, 33 bp, Homo sapien
tgtttttttctgaaatcagaatgttgcacttct

SEQ ID NO: 620518 - DNA, 33 bp, Homo sapien
tgtttttttctgaaattagaatgttgcacttct

SEQ ID NO: 620519 - DNA, 33 bp, Homo sapien
tatccacatacatttagacatactcaacacttc

SEQ ID NO: 620520 - DNA, 33 bp, Homo sapien
tatccacatacatttatacatactcaacacttc

SEQ ID NO: 620521 - DNA, 33 bp, Homo sapien
caaaagaagagacttacgatagagtcaagtttc

SEQ ID NO: 620522 - DNA, 33 bp, Homo sapien
caaaagaagagacttatgatagagtcaagtttc

SEQ ID NO: 620523 - DNA, 33 bp, Homo sapien
gtttagagaagaatacacagcaatagaagacct

SEQ ID NO: 620524 - DNA, 33 bp, Homo sapien
gtttagagaagaatacgcagcaatagaagacct

SEQ ID NO: 620525 - DNA, 33 bp, Homo sapien
ctaatatgatgagaaaagttctgtagggcctgg

SEQ ID NO: 620526 - DNA, 33 bp, Homo sapien
ctaatatgatgagaaaggttctgtagggcctgg

SEQ ID NO: 620527 - DNA, 33 bp, Homo sapien
ctaggtgctgggcctacgacacacagaatttgt

SEQ ID NO: 620528 - DNA, 33 bp, Homo sapien
ctaggtgctgggcctatgacacacagaatttgt

SEQ ID NO: 620529 - DNA, 33 bp, Homo sapien
aacctggagagtgacactatctcagatttgctt

SEQ ID NO: 620530 - DNA, 33 bp, Homo sapien
aacctggagagtgacattatctcagatttgctt

SEQ ID NO: 620531 - DNA, 33 bp, Homo sapien
tgggcttcagagttcaagctaatctgaattcaa

SEQ ID NO: 620532 - DNA, 33 bp, Homo sapien
tgggcttcagagttcaggctaatctgaattcaa

SEQ ID NO: 620533 - DNA, 33 bp, Homo sapien
cacttaactatgagtaagtgttgttccagctcc

SEQ ID NO: 620534 - DNA, 33 bp, Homo sapien
cacttaactatgagtaggtgttgttccagctcc

SEQ ID NO: 620535 - DNA, 33 bp, Homo sapien
ccaaaataaatgcatccatctccttcacatctg

SEQ ID NO: 620536 - DNA, 33 bp, Homo sapien
ccaaaataaatgcatctatctccttcacatctg

SEQ ID NO: 620537 - DNA, 33 bp, Homo sapien
tatatcactgtctccacattacagctgcgaaat

SEQ ID NO: 620538 - DNA, 33 bp, Homo sapien
tatatcactgtctccatattacagctgcgaaat

SEQ ID NO: 620539 - DNA, 33 bp, Homo sapien
gccttttcaggggtaacgcatgcttaggtttgc

SEQ ID NO: 620540 - DNA, 33 bp, Homo sapien
gccttttcaggggtaatgcatgcttaggtttgc

SEQ ID NO: 620541 - DNA, 33 bp, Homo sapien
attacttgcaatgaaaaataaagaagtgctgac

SEQ ID NO: 620542 - DNA, 33 bp, Homo sapien
attacttgcaatgaaagataaagaagtgctgac

SEQ ID NO: 620543 - DNA, 33 bp, Homo sapien
tcatatcctgcaaaaaatactgaaacaagtaag

SEQ ID NO: 620544 - DNA, 33 bp, Homo sapien
tcatatcctgcaaaaattactgaaacaagtaag

SEQ ID NO: 620545 - DNA, 33 bp, Homo sapien
atagtaatatggaggccgcatgtattatttaac

SEQ ID NO: 620546 - DNA, 33 bp, Homo sapien
atagtaatatggaggctgcatgtattatttaac

SEQ ID NO: 620547 - DNA, 33 bp, Homo sapien
tgtagccaagagtgaacatgatgtagccttctt

SEQ ID NO: 620548 - DNA, 33 bp, Homo sapien
tgtagccaagagtgaatatgatgtagccttctt

SEQ ID NO: 620549 - DNA, 33 bp, Homo sapien
tccatttttaggccgaagagtcttgtaaatgta

SEQ ID NO: 620550 - DNA, 33 bp, Homo sapien
tccatttttaggccgaggagtcttgtaaatgta

SEQ ID NO: 620551 - DNA, 33 bp, Homo sapien
agtctcacgctacaatgaactcgttatactttc

SEQ ID NO: 620552 - DNA, 33 bp, Homo sapien
agtctcacgctacaattaactcgttatactttc

SEQ ID NO: 620553 - DNA, 33 bp, Homo sapien
gaacgaaacaaaacaaccactaactctgaatgg

SEQ ID NO: 620554 - DNA, 33 bp, Homo sapien
gaacgaaacaaaacaatcactaactctgaatgg

SEQ ID NO: 620555 - DNA, 33 bp, Homo sapien
agtaataaaatgggatcatactcatgaaacatc

SEQ ID NO: 620556 - DNA, 33 bp, Homo sapien
agtaataaaatgggattatactcatgaaacatc

SEQ ID NO: 620557 - DNA, 33 bp, Homo sapien
gaaccgaaatgaattacgggacctccagctagt

SEQ ID NO: 620558 - DNA, 33 bp, Homo sapien
gaaccgaaatgaattatgggacctccagctagt

SEQ ID NO: 620559 - DNA, 33 bp, Homo sapien
tgtgatgctatctccaagtaggtcatgtcagaa

SEQ ID NO: 620560 - DNA, 33 bp, Homo sapien
tgtgatgctatctccaggtaggtcatgtcagaa

SEQ ID NO: 620561 - DNA, 33 bp, Homo sapien
acctttgcttctgaccgaccggctataaatcag

SEQ ID NO: 620562 - DNA, 33 bp, Homo sapien
acctttgcttctgacctaccggctataaatcag

SEQ ID NO: 620563 - DNA, 33 bp, Homo sapien
tttacctaagtgtccaacccaacaaatgaatgg

SEQ ID NO: 620564 - DNA, 33 bp, Homo sapien
tttacctaagtgtccaccccaacaaatgaatgg

SEQ ID NO: 620565 - DNA, 33 bp, Homo sapien
ttcaggaataaactgacctgccctagttcacag

SEQ ID NO: 620566 - DNA, 33 bp, Homo sapien
ttcaggaataaactgatctgccctagttcacag

SEQ ID NO: 620567 - DNA, 33 bp, Homo sapien
tttactcaaaggactaagtggttaattctgatt

SEQ ID NO: 620568 - DNA, 33 bp, Homo sapien
tttactcaaaggactaggtggttaattctgatt

SEQ ID NO: 620569 - DNA, 33 bp, Homo sapien
cgctgttactgctccaggagaagtcatcaactg

SEQ ID NO: 620570 - DNA, 33 bp, Homo sapien
cgctgttactgctccatgagaagtcatcaactg

SEQ ID NO: 620571 - DNA, 33 bp, Homo sapien
ctcacaagcccccataatacacattgacctaga

SEQ ID NO: 620572 - DNA, 33 bp, Homo sapien
ctcacaagcccccatattacacattgacctaga

SEQ ID NO: 620573 - DNA, 33 bp, Homo sapien
gcctctaatgcctccagcaaagaaaaaatgatt

SEQ ID NO: 620574 - DNA, 33 bp, Homo sapien
gcctctaatgcctccatcaaagaaaaaatgatt

SEQ ID NO: 620575 - DNA, 33 bp, Homo sapien
ccatagactctttactgagattcagcagttaac

SEQ ID NO: 620576 - DNA, 33 bp, Homo sapien
ccatagactctttacttagattcagcagttaac

SEQ ID NO: 620577 - DNA, 33 bp, Homo sapien
cagactggacatctagaaggaaatggaaagatc

SEQ ID NO: 620578 - DNA, 33 bp, Homo sapien
cagactggacatctaggaggaaatggaaagatc

SEQ ID NO: 620579 - DNA, 33 bp, Homo sapien
tcattgttaatttacacatacacgcaaacatgt

SEQ ID NO: 620580 - DNA, 33 bp, Homo sapien
tcattgttaatttacatatacacgcaaacatgt

SEQ ID NO: 620581 - DNA, 33 bp, Homo sapien
gattatggatgaaggggacaaatttatagtttc

SEQ ID NO: 620582 - DNA, 33 bp, Homo sapien
gattatggatgaagggtacaaatttatagtttc

SEQ ID NO: 620583 - DNA, 33 bp, Homo sapien
ctattaactccttacaagatggtgcatacaaca

SEQ ID NO: 620584 - DNA, 33 bp, Homo sapien
ctattaactccttacaggatggtgcatacaaca

SEQ ID NO: 620585 - DNA, 33 bp, Homo sapien
acaacaatctctcttgcatcgacatccgtgtta

SEQ ID NO: 620586 - DNA, 33 bp, Homo sapien
acaacaatctctcttgtatcgacatccgtgtta

SEQ ID NO: 620587 - DNA, 33 bp, Homo sapien
ttaaagtgaatttcatcagaagacacatttctt

SEQ ID NO: 620588 - DNA, 33 bp, Homo sapien
ttaaagtgaatttcattagaagacacatttctt

SEQ ID NO: 620589 - DNA, 33 bp, Homo sapien
agtattatttgttccaactgtgaaaaacccctc

SEQ ID NO: 620590 - DNA, 33 bp, Homo sapien
agtattatttgttccagctgtgaaaaacccctc

SEQ ID NO: 620591 - DNA, 33 bp, Homo sapien
ttaccattccacacagaaatcctattactgagc

SEQ ID NO: 620592 - DNA, 33 bp, Homo sapien
ttaccattccacacagcaatcctattactgagc

SEQ ID NO: 620593 - DNA, 33 bp, Homo sapien
ggcacatagccagtaacggtcagaattagaagc

SEQ ID NO: 620594 - DNA, 33 bp, Homo sapien
ggcacatagccagtaatggtcagaattagaagc

SEQ ID NO: 620595 - DNA, 33 bp, Homo sapien
caagtaggctatgatcaacgagatctgctagac

SEQ ID NO: 620596 - DNA, 33 bp, Homo sapien
caagtaggctatgatcgacgagatctgctagac

SEQ ID NO: 620597 - DNA, 33 bp, Homo sapien
catgggtaacaagaagacatgcttgggccagac

SEQ ID NO: 620598 - DNA, 33 bp, Homo sapien
catgggtaacaagaagtcatgcttgggccagac

SEQ ID NO: 620599 - DNA, 33 bp, Homo sapien
gaaaggacatgaaaacagaataatttaatggtg

SEQ ID NO: 620600 - DNA, 33 bp, Homo sapien
gaaaggacatgaaaactgaataatttaatggtg

SEQ ID NO: 620601 - DNA, 33 bp, Homo sapien
aattgaaaaaactctacgaaggccagaggaaga

SEQ ID NO: 620602 - DNA, 33 bp, Homo sapien
aattgaaaaaactctatgaaggccagaggaaga

SEQ ID NO: 620603 - DNA, 33 bp, Homo sapien
tgatgcttttgtggtgaatttaggatattgatg

SEQ ID NO: 620604 - DNA, 33 bp, Homo sapien
tgatgcttttgtggtggatttaggatattgatg

SEQ ID NO: 620605 - DNA, 33 bp, Homo sapien
ctctgggtatgtgtatgaaattttatgagctga

SEQ ID NO: 620606 - DNA, 33 bp, Homo sapien
ctctgggtatgtgtattaaattttatgagctga

SEQ ID NO: 620607 - DNA, 33 bp, Homo sapien
ttaaacaatatccaacaaaaccttcattgtatt

SEQ ID NO: 620608 - DNA, 33 bp, Homo sapien
ttaaacaatatccaacgaaaccttcattgtatt

SEQ ID NO: 620609 - DNA, 33 bp, Homo sapien
cgacatctctaaaaacgggctcagaaaatattt

SEQ ID NO: 620610 - DNA, 33 bp, Homo sapien
cgacatctctaaaaactggctcagaaaatattt

SEQ ID NO: 620611 - DNA, 33 bp, Homo sapien
aaccagacgtcgaaggaaggatagtatttgaat

SEQ ID NO: 620612 - DNA, 33 bp, Homo sapien
aaccagacgtcgaaggcaggatagtatttgaat

SEQ ID NO: 620613 - DNA, 33 bp, Homo sapien
taaaaacatggtacacagaaaagtatgactgaa

SEQ ID NO: 620614 - DNA, 33 bp, Homo sapien
taaaaacatggtacacggaaaagtatgactgaa

SEQ ID NO: 620615 - DNA, 33 bp, Homo sapien
tgtgattcatttatgaaaggaaatgtgcatcat

SEQ ID NO: 620616 - DNA, 33 bp, Homo sapien
tgtgattcatttatgacaggaaatgtgcatcat

SEQ ID NO: 620617 - DNA, 33 bp, Homo sapien
ataactgaagtattcacaagaaagcattaattt

SEQ ID NO: 620618 - DNA, 33 bp, Homo sapien
ataactgaagtattcataagaaagcattaattt

SEQ ID NO: 620619 - DNA, 33 bp, Homo sapien
ccccttgtctcccccaaagatgctgtatacttc

SEQ ID NO: 620620 - DNA, 33 bp, Homo sapien
ccccttgtctcccccacagatgctgtatacttc

SEQ ID NO: 620621 - DNA, 33 bp, Homo sapien
aaatgcctgacatttaaaggtagaatgaggaag

SEQ ID NO: 620622 - DNA, 33 bp, Homo sapien
aaatgcctgacatttacaggtagaatgaggaag

SEQ ID NO: 620623 - DNA, 33 bp, Homo sapien
tactgggaggttcctaacagagatagggtagct

SEQ ID NO: 620624 - DNA, 33 bp, Homo sapien
tactgggaggttcctagcagagatagggtagct

SEQ ID NO: 620625 - DNA, 33 bp, Homo sapien
atatagctggccctgaccaaaggctttgaggtt

SEQ ID NO: 620626 - DNA, 33 bp, Homo sapien
atatagctggccctgagcaaaggctttgaggtt

SEQ ID NO: 620627 - DNA, 33 bp, Homo sapien
ataatattgataaaaactcaggagaagtccaag

SEQ ID NO: 620628 - DNA, 33 bp, Homo sapien
ataatattgataaaaattcaggagaagtccaag

SEQ ID NO: 620629 - DNA, 33 bp, Homo sapien
tcatggaatgtggtgcagattaacttgaatagc

SEQ ID NO: 620630 - DNA, 33 bp, Homo sapien
tcatggaatgtggtgcggattaacttgaatagc

SEQ ID NO: 620631 - DNA, 33 bp, Homo sapien
aaatattgatggaaaggattctacagaaaggtt

SEQ ID NO: 620632 - DNA, 33 bp, Homo sapien
aaatattgatggaaagtattctacagaaaggtt

SEQ ID NO: 620633 - DNA, 33 bp, Homo sapien
gccaaactgccttaataatagtcttgaattagt

SEQ ID NO: 620634 - DNA, 33 bp, Homo sapien
gccaaactgccttaatgatagtcttgaattagt

SEQ ID NO: 620635 - DNA, 33 bp, Homo sapien
ataaagtagatcacaaaactatctttcctagag

SEQ ID NO: 620636 - DNA, 33 bp, Homo sapien
ataaagtagatcacaagactatctttcctagag

SEQ ID NO: 620637 - DNA, 33 bp, Homo sapien
tgaaaagtcttgcatcaagtacaagtatttcat

SEQ ID NO: 620638 - DNA, 33 bp, Homo sapien
tgaaaagtcttgcatcgagtacaagtatttcat

SEQ ID NO: 620639 - DNA, 33 bp, Homo sapien
ggatagaattcaatgacgcaattacttgggaaa

SEQ ID NO: 620640 - DNA, 33 bp, Homo sapien
ggatagaattcaatgatgcaattacttgggaaa

SEQ ID NO: 620641 - DNA, 33 bp, Homo sapien
gagggtgaaatcaccacgcaaagacatctgagg

SEQ ID NO: 620642 - DNA, 33 bp, Homo sapien
gagggtgaaatcaccatgcaaagacatctgagg

SEQ ID NO: 620643 - DNA, 33 bp, Homo sapien
ctgtcttcttctgagaccttcaaatgtttccaa

SEQ ID NO: 620644 - DNA, 33 bp, Homo sapien
ctgtcttcttctgagatcttcaaatgtttccaa

SEQ ID NO: 620645 - DNA, 33 bp, Homo sapien
cagagagcttcacctaataaacaaggatgaggt

SEQ ID NO: 620646 - DNA, 33 bp, Homo sapien
cagagagcttcacctagtaaacaaggatgaggt

SEQ ID NO: 620647 - DNA, 33 bp, Homo sapien
atatctgtgagcaggcaagttatgggcagaatt

SEQ ID NO: 620648 - DNA, 33 bp, Homo sapien
atatctgtgagcaggcgagttatgggcagaatt

SEQ ID NO: 620649 - DNA, 33 bp, Homo sapien
aatgaagtcacgcggaggaattgaaagacggtg

SEQ ID NO: 620650 - DNA, 33 bp, Homo sapien
aatgaagtcacgcggatgaattgaaagacggtg

SEQ ID NO: 620651 - DNA, 33 bp, Homo sapien
ccagctgctttagcaaaggagcgaactccatgg

SEQ ID NO: 620652 - DNA, 33 bp, Homo sapien
ccagctgctttagcaacggagcgaactccatgg

SEQ ID NO: 620653 - DNA, 33 bp, Homo sapien
atagccttttgatcaacaatctcacttttagaa

SEQ ID NO: 620654 - DNA, 33 bp, Homo sapien
atagccttttgatcaataatctcacttttagaa

SEQ ID NO: 620655 - DNA, 33 bp, Homo sapien
atttcaatgcctcaataaagagaaactcctcgc

SEQ ID NO: 620656 - DNA, 33 bp, Homo sapien
atttcaatgcctcaatgaagagaaactcctcgc

SEQ ID NO: 620657 - DNA, 33 bp, Homo sapien
taaagtcataattctcaagttcttccgttattc

SEQ ID NO: 620658 - DNA, 33 bp, Homo sapien
taaagtcataattctcgagttcttccgttattc

SEQ ID NO: 620659 - DNA, 33 bp, Homo sapien
gagagaattaaatctgcaagctaagtgccttgg

SEQ ID NO: 620660 - DNA, 33 bp, Homo sapien
gagagaattaaatctggaagctaagtgccttgg

SEQ ID NO: 620661 - DNA, 33 bp, Homo sapien
gttgtttgggggtggactaattagagtaaagct

SEQ ID NO: 620662 - DNA, 33 bp, Homo sapien
gttgtttgggggtggattaattagagtaaagct

SEQ ID NO: 620663 - DNA, 33 bp, Homo sapien
ctacagaaaaatccaacgtttggtggtaagaag

SEQ ID NO: 620664 - DNA, 33 bp, Homo sapien
ctacagaaaaatccaatgtttggtggtaagaag

SEQ ID NO: 620665 - DNA, 33 bp, Homo sapien
atcatggccaatttcacgctactaacctgatgc

SEQ ID NO: 620666 - DNA, 33 bp, Homo sapien
atcatggccaatttcatgctactaacctgatgc

SEQ ID NO: 620667 - DNA, 33 bp, Homo sapien
attgcttgacctttacaaagtctactgactaga

SEQ ID NO: 620668 - DNA, 33 bp, Homo sapien
attgcttgacctttacgaagtctactgactaga

SEQ ID NO: 620669 - DNA, 33 bp, Homo sapien
gctcaatcacctaccacgggacatttatctact

SEQ ID NO: 620670 - DNA, 33 bp, Homo sapien
gctcaatcacctaccatgggacatttatctact

SEQ ID NO: 620671 - DNA, 33 bp, Homo sapien
acatggagaccacaaacagaggagttaattaca

SEQ ID NO: 620672 - DNA, 33 bp, Homo sapien
acatggagaccacaaatagaggagttaattaca

SEQ ID NO: 620673 - DNA, 33 bp, Homo sapien
agaacccaaactaagacatcgattttggtagaa

SEQ ID NO: 620674 - DNA, 33 bp, Homo sapien
agaacccaaactaagagatcgattttggtagaa

SEQ ID NO: 620675 - DNA, 33 bp, Homo sapien
cgtgggtctcatgactaaactccaacaggccag

SEQ ID NO: 620676 - DNA, 33 bp, Homo sapien
cgtgggtctcatgacttaactccaacaggccag

SEQ ID NO: 620677 - DNA, 33 bp, Homo sapien
gagatgggaaaatgtacatagatgaagcagatt

SEQ ID NO: 620678 - DNA, 33 bp, Homo sapien
gagatgggaaaatgtatatagatgaagcagatt

SEQ ID NO: 620679 - DNA, 33 bp, Homo sapien
tgacacatactgaagacaaaagtcaatcaatcc

SEQ ID NO: 620680 - DNA, 33 bp, Homo sapien
tgacacatactgaagagaaaagtcaatcaatcc

SEQ ID NO: 620681 - DNA, 33 bp, Homo sapien
aaaagacttgcagggaagattttctaatgcaaa

SEQ ID NO: 620682 - DNA, 33 bp, Homo sapien
aaaagacttgcagggaggattttctaatgcaaa

SEQ ID NO: 620683 - DNA, 33 bp, Homo sapien
ctttaactttctcagaactacctcagtattggt

SEQ ID NO: 620684 - DNA, 33 bp, Homo sapien
ctttaactttctcagatctacctcagtattggt

SEQ ID NO: 620685 - DNA, 33 bp, Homo sapien
gtagctgaggcaataacccttgttctcgatagt

SEQ ID NO: 620686 - DNA, 33 bp, Homo sapien
gtagctgaggcaataatccttgttctcgatagt

SEQ ID NO: 620687 - DNA, 33 bp, Homo sapien
aaacgtgttctaaacccgactctgttattcttc

SEQ ID NO: 620688 - DNA, 33 bp, Homo sapien
aaacgtgttctaaacctgactctgttattcttc

SEQ ID NO: 620689 - DNA, 33 bp, Homo sapien
ccttttctgatcttgaaattccttggcttctgt

SEQ ID NO: 620690 - DNA, 33 bp, Homo sapien
ccttttctgatcttgacattccttggcttctgt

SEQ ID NO: 620691 - DNA, 33 bp, Homo sapien
tcaatgggtcccaagaagcatttctcactgtta

SEQ ID NO: 620692 - DNA, 33 bp, Homo sapien
tcaatgggtcccaagatgcatttctcactgtta

SEQ ID NO: 620693 - DNA, 33 bp, Homo sapien
gagtcacctttcccgaacatatggagaaaagaa

SEQ ID NO: 620694 - DNA, 33 bp, Homo sapien
gagtcacctttcccgatcatatggagaaaagaa

SEQ ID NO: 620695 - DNA, 33 bp, Homo sapien
ttataataataatgacacataatttgccatatg

SEQ ID NO: 620696 - DNA, 33 bp, Homo sapien
ttataataataatgacgcataatttgccatatg

SEQ ID NO: 620697 - DNA, 33 bp, Homo sapien
tttaaatgcatggaaacgatgcaggattttttg

SEQ ID NO: 620698 - DNA, 33 bp, Homo sapien
tttaaatgcatggaaatgatgcaggattttttg

SEQ ID NO: 620699 - DNA, 33 bp, Homo sapien
tcatcttcagtctacacatctcttgaatccatc

SEQ ID NO: 620700 - DNA, 33 bp, Homo sapien
tcatcttcagtctacatatctcttgaatccatc

SEQ ID NO: 620701 - DNA, 33 bp, Homo sapien
tgcagagatttcaggaacacagttgtatataaa

SEQ ID NO: 620702 - DNA, 33 bp, Homo sapien
tgcagagatttcaggatcacagttgtatataaa

SEQ ID NO: 620703 - DNA, 33 bp, Homo sapien
tttgttttacaaaaatcatctatccaactattc

SEQ ID NO: 620704 - DNA, 33 bp, Homo sapien
tttgttttacaaaaattatctatccaactattc

SEQ ID NO: 620705 - DNA, 33 bp, Homo sapien
gttttaggattctaataataagtatagcaaagt

SEQ ID NO: 620706 - DNA, 33 bp, Homo sapien
gttttaggattctaatcataagtatagcaaagt

SEQ ID NO: 620707 - DNA, 33 bp, Homo sapien
tgagtttcctataaaaataagtgtgatcccctc

SEQ ID NO: 620708 - DNA, 33 bp, Homo sapien
tgagtttcctataaaagtaagtgtgatcccctc

SEQ ID NO: 620709 - DNA, 33 bp, Homo sapien
aggcccataatccaaactcagcccacatatgtc

SEQ ID NO: 620710 - DNA, 33 bp, Homo sapien
aggcccataatccaaattcagcccacatatgtc

SEQ ID NO: 620711 - DNA, 33 bp, Homo sapien
ttaaggcctacctataataaaacaactctccac

SEQ ID NO: 620712 - DNA, 33 bp, Homo sapien
ttaaggcctacctatagtaaaacaactctccac

SEQ ID NO: 620713 - DNA, 33 bp, Homo sapien
agggtggacagtggcaaagggtattcaggaaat

SEQ ID NO: 620714 - DNA, 33 bp, Homo sapien
agggtggacagtggcagagggtattcaggaaat

SEQ ID NO: 620715 - DNA, 33 bp, Homo sapien
tggagactaaagcaaagaaagtagactcagagt

SEQ ID NO: 620716 - DNA, 33 bp, Homo sapien
tggagactaaagcaaataaagtagactcagagt

SEQ ID NO: 620717 - DNA, 33 bp, Homo sapien
acctatcaatagctaccggatgaagctaatgtg

SEQ ID NO: 620718 - DNA, 33 bp, Homo sapien
acctatcaatagctactggatgaagctaatgtg

SEQ ID NO: 620719 - DNA, 33 bp, Homo sapien
aagcaatcaaggatagaccttcgaagttctcat

SEQ ID NO: 620720 - DNA, 33 bp, Homo sapien
aagcaatcaaggataggccttcgaagttctcat

SEQ ID NO: 620721 - DNA, 33 bp, Homo sapien
ggaacatctttcaaaagacaggaaatgaaagaa

SEQ ID NO: 620722 - DNA, 33 bp, Homo sapien
ggaacatctttcaaaatacaggaaatgaaagaa

SEQ ID NO: 620723 - DNA, 33 bp, Homo sapien
tctcttgaactggaatgaatatgaagtagcctg

SEQ ID NO: 620724 - DNA, 33 bp, Homo sapien
tctcttgaactggaattaatatgaagtagcctg

SEQ ID NO: 620725 - DNA, 33 bp, Homo sapien
tggttccataactcaacgtacttgttccaattc

SEQ ID NO: 620726 - DNA, 33 bp, Homo sapien
tggttccataactcaatgtacttgttccaattc

SEQ ID NO: 620727 - DNA, 33 bp, Homo sapien
tttgaaccgacactgaaaatacatggtgatatt

SEQ ID NO: 620728 - DNA, 33 bp, Homo sapien
tttgaaccgacactgacaatacatggtgatatt

SEQ ID NO: 620729 - DNA, 33 bp, Homo sapien
agtaggccaggtgagagattcaagtcattcaaa

SEQ ID NO: 620730 - DNA, 33 bp, Homo sapien
agtaggccaggtgagatattcaagtcattcaaa

SEQ ID NO: 620731 - DNA, 33 bp, Homo sapien
caaaagccctgagtgaaatagtgtgaaatgatt

SEQ ID NO: 620732 - DNA, 33 bp, Homo sapien
caaaagccctgagtgagatagtgtgaaatgatt

SEQ ID NO: 620733 - DNA, 33 bp, Homo sapien
caataaaccaataaaaactaatcattgagatca

SEQ ID NO: 620734 - DNA, 33 bp, Homo sapien
caataaaccaataaaagctaatcattgagatca

SEQ ID NO: 620735 - DNA, 33 bp, Homo sapien
tgatcatagctgaaaacaaaaaatccaacaaaa

SEQ ID NO: 620736 - DNA, 33 bp, Homo sapien
tgatcatagctgaaaataaaaaatccaacaaaa

SEQ ID NO: 620737 - DNA, 33 bp, Homo sapien
atcattccaaagaaacacaatcatcagattctc

SEQ ID NO: 620738 - DNA, 33 bp, Homo sapien
atcattccaaagaaacgcaatcatcagattctc

SEQ ID NO: 620739 - DNA, 33 bp, Homo sapien
tagctacacaggagaaataatcccagctcattc

SEQ ID NO: 620740 - DNA, 33 bp, Homo sapien
tagctacacaggagaagtaatcccagctcattc

SEQ ID NO: 620741 - DNA, 33 bp, Homo sapien
caaataactggaatacacagtacttgtcctctt

SEQ ID NO: 620742 - DNA, 33 bp, Homo sapien
caaataactggaatacgcagtacttgtcctctt

SEQ ID NO: 620743 - DNA, 33 bp, Homo sapien
ttaaatgtctactaaaatcacttttgagacatt

SEQ ID NO: 620744 - DNA, 33 bp, Homo sapien
ttaaatgtctactaaattcacttttgagacatt

SEQ ID NO: 620745 - DNA, 33 bp, Homo sapien
taacccatcaaaagtaataactacagcaacttt

SEQ ID NO: 620746 - DNA, 33 bp, Homo sapien
taacccatcaaaagtagtaactacagcaacttt

SEQ ID NO: 620747 - DNA, 33 bp, Homo sapien
agtagattcataaatacaaaaccatatggcaac

SEQ ID NO: 620748 - DNA, 33 bp, Homo sapien
agtagattcataaatagaaaaccatatggcaac

SEQ ID NO: 620749 - DNA, 33 bp, Homo sapien
ggagtaaagagcctcacgtcagggccgggcacg

SEQ ID NO: 620750 - DNA, 33 bp, Homo sapien
ggagtaaagagcctcatgtcagggccgggcacg

SEQ ID NO: 620751 - DNA, 33 bp, Homo sapien
tgcttctatctagcaactgtatttcaaattgat

SEQ ID NO: 620752 - DNA, 33 bp, Homo sapien
tgcttctatctagcaagtgtatttcaaattgat

SEQ ID NO: 620753 - DNA, 33 bp, Homo sapien
tgcttctttttcccaacgagactggttggtttt

SEQ ID NO: 620754 - DNA, 33 bp, Homo sapien
tgcttctttttcccaatgagactggttggtttt

SEQ ID NO: 620755 - DNA, 33 bp, Homo sapien
gactagaaatagaccaagtcaaagaaacattgg

SEQ ID NO: 620756 - DNA, 33 bp, Homo sapien
gactagaaatagaccaggtcaaagaaacattgg

SEQ ID NO: 620757 - DNA, 33 bp, Homo sapien
gctctcaatgggagaagtatcaaagaacttaca

SEQ ID NO: 620758 - DNA, 33 bp, Homo sapien
gctctcaatgggagaattatcaaagaacttaca

SEQ ID NO: 620759 - DNA, 33 bp, Homo sapien
atgtatagttttataactgaaataccatcatat

SEQ ID NO: 620760 - DNA, 33 bp, Homo sapien
atgtatagttttataagtgaaataccatcatat

SEQ ID NO: 620761 - DNA, 33 bp, Homo sapien
taagtatttccacttgaatgtccttgaccagaa

SEQ ID NO: 620762 - DNA, 33 bp, Homo sapien
taagtatttccacttgtatgtccttgaccagaa

SEQ ID NO: 620763 - DNA, 33 bp, Homo sapien
catcgtctgaagttaacatagttccccctacta

SEQ ID NO: 620764 - DNA, 33 bp, Homo sapien
catcgtctgaagttaatatagttccccctacta

SEQ ID NO: 620765 - DNA, 33 bp, Homo sapien
tgttttcctttaacagaccttgaacttcttgtt

SEQ ID NO: 620766 - DNA, 33 bp, Homo sapien
tgttttcctttaacaggccttgaacttcttgtt

SEQ ID NO: 620767 - DNA, 33 bp, Homo sapien
agaaaataagattagaagcaagaagatcaacta

SEQ ID NO: 620768 - DNA, 33 bp, Homo sapien
agaaaataagattagaggcaagaagatcaacta

SEQ ID NO: 620769 - DNA, 33 bp, Homo sapien
gtgattatgtaatcaacagggcagaagaagagc

SEQ ID NO: 620770 - DNA, 33 bp, Homo sapien
gtgattatgtaatcaatagggcagaagaagagc

SEQ ID NO: 620771 - DNA, 33 bp, Homo sapien
gtaagtctggaaaataaaatcaaacaaacagaa

SEQ ID NO: 620772 - DNA, 33 bp, Homo sapien
gtaagtctggaaaatagaatcaaacaaacagaa

SEQ ID NO: 620773 - DNA, 33 bp, Homo sapien
gcgaaatggcgaaaatgacaggtgtagaattta

SEQ ID NO: 620774 - DNA, 33 bp, Homo sapien
gcgaaatggcgaaaattacaggtgtagaattta

SEQ ID NO: 620775 - DNA, 33 bp, Homo sapien
cacttctgaaaagaagacatacgcgtggtcaac

SEQ ID NO: 620776 - DNA, 33 bp, Homo sapien
cacttctgaaaagaaggcatacgcgtggtcaac

SEQ ID NO: 620777 - DNA, 33 bp, Homo sapien
atagagacctttaacagcagactaatgaagcaa

SEQ ID NO: 620778 - DNA, 33 bp, Homo sapien
atagagacctttaacatcagactaatgaagcaa

SEQ ID NO: 620779 - DNA, 33 bp, Homo sapien
tatgatagcggttatcaccactgccatgagtat

SEQ ID NO: 620780 - DNA, 33 bp, Homo sapien
tatgatagcggttatcgccactgccatgagtat

SEQ ID NO: 620781 - DNA, 33 bp, Homo sapien
attcattatatgaacaaaactaaagacaaaaaa

SEQ ID NO: 620782 - DNA, 33 bp, Homo sapien
attcattatatgaacagaactaaagacaaaaaa

SEQ ID NO: 620783 - DNA, 33 bp, Homo sapien
ttagattataaatgtcaatgtttattgcaaagc

SEQ ID NO: 620784 - DNA, 33 bp, Homo sapien
ttagattataaatgtctatgtttattgcaaagc

SEQ ID NO: 620785 - DNA, 33 bp, Homo sapien
gcaaggaattgttggtaaaaagaaatcttggtt

SEQ ID NO: 620786 - DNA, 33 bp, Homo sapien
gcaaggaattgttggtgaaaagaaatcttggtt

SEQ ID NO: 620787 - DNA, 33 bp, Homo sapien
acagaaagcattaccactaaagcacatacacaa

SEQ ID NO: 620788 - DNA, 33 bp, Homo sapien
acagaaagcattaccattaaagcacatacacaa

SEQ ID NO: 620789 - DNA, 33 bp, Homo sapien
agaaacctttaaatgaatacggatgttccaaag

SEQ ID NO: 620790 - DNA, 33 bp, Homo sapien
agaaacctttaaatgagtacggatgttccaaag

SEQ ID NO: 620791 - DNA, 33 bp, Homo sapien
aaagtgcttttaaaaaggatgttgtagccgttc

SEQ ID NO: 620792 - DNA, 33 bp, Homo sapien
aaagtgcttttaaaaatgatgttgtagccgttc

SEQ ID NO: 620793 - DNA, 33 bp, Homo sapien
tgaaaaacacgggtctaactttatgatctatat

SEQ ID NO: 620794 - DNA, 33 bp, Homo sapien
tgaaaaacacgggtctgactttatgatctatat

SEQ ID NO: 620795 - DNA, 33 bp, Homo sapien
cacctcctccaggcaactcccaatcttgtctgg

SEQ ID NO: 620796 - DNA, 33 bp, Homo sapien
cacctcctccaggcaattcccaatcttgtctgg

SEQ ID NO: 620797 - DNA, 33 bp, Homo sapien
ccaccagcaagggggcaaattaagtttataatg

SEQ ID NO: 620798 - DNA, 33 bp, Homo sapien
ccaccagcaagggggcgaattaagtttataatg

SEQ ID NO: 620799 - DNA, 33 bp, Homo sapien
cctaaaataatgattaggagtatggttctatgg

SEQ ID NO: 620800 - DNA, 33 bp, Homo sapien
cctaaaataatgattatgagtatggttctatgg

SEQ ID NO: 620801 - DNA, 33 bp, Homo sapien
agatatgctttaatggaaaaaacaacttttaga

SEQ ID NO: 620802 - DNA, 33 bp, Homo sapien
agatatgctttaatggcaaaaacaacttttaga

SEQ ID NO: 620803 - DNA, 33 bp, Homo sapien
tctgtgtgtgtaaatgaaggccttttcccttgt

SEQ ID NO: 620804 - DNA, 33 bp, Homo sapien
tctgtgtgtgtaaatggaggccttttcccttgt

SEQ ID NO: 620805 - DNA, 33 bp, Homo sapien
gttggcacagccttatgaggaagataatccaat

SEQ ID NO: 620806 - DNA, 33 bp, Homo sapien
gttggcacagccttattaggaagataatccaat

SEQ ID NO: 620807 - DNA, 33 bp, Homo sapien
aagaaagtttaattacccttctccatgtcacat

SEQ ID NO: 620808 - DNA, 33 bp, Homo sapien
aagaaagtttaattacgcttctccatgtcacat

SEQ ID NO: 620809 - DNA, 33 bp, Homo sapien
agcttccagaagaacactcagagagtaaagaaa

SEQ ID NO: 620810 - DNA, 33 bp, Homo sapien
agcttccagaagaacattcagagagtaaagaaa

SEQ ID NO: 620811 - DNA, 33 bp, Homo sapien
ttcctgctaaggataacacataaactacaagag

SEQ ID NO: 620812 - DNA, 33 bp, Homo sapien
ttcctgctaaggataatacataaactacaagag

SEQ ID NO: 620813 - DNA, 33 bp, Homo sapien
gctctctcccaccaaaaaaactgcaccctaaat

SEQ ID NO: 620814 - DNA, 33 bp, Homo sapien
gctctctcccaccaaagaaactgcaccctaaat

SEQ ID NO: 620815 - DNA, 33 bp, Homo sapien
agaatgtgcatttcaagaatatctcaggtgatt

SEQ ID NO: 620816 - DNA, 33 bp, Homo sapien
agaatgtgcatttcaataatatctcaggtgatt

SEQ ID NO: 620817 - DNA, 33 bp, Homo sapien
agccttcaagattcggaacacaataaggatgcc

SEQ ID NO: 620818 - DNA, 33 bp, Homo sapien
agccttcaagattcgggacacaataaggatgcc

SEQ ID NO: 620819 - DNA, 33 bp, Homo sapien
attaaagtgccatgaacaacaaaaggaatttga

SEQ ID NO: 620820 - DNA, 33 bp, Homo sapien
attaaagtgccatgaataacaaaaggaatttga

SEQ ID NO: 620821 - DNA, 33 bp, Homo sapien
gagagtttggtgcataatagactcaaataaaat

SEQ ID NO: 620822 - DNA, 33 bp, Homo sapien
gagagtttggtgcatagtagactcaaataaaat

SEQ ID NO: 620823 - DNA, 33 bp, Homo sapien
aaggtaaataatcacaaatcaatagcatcctta

SEQ ID NO: 620824 - DNA, 33 bp, Homo sapien
aaggtaaataatcacagatcaatagcatcctta

SEQ ID NO: 620825 - DNA, 33 bp, Homo sapien
gtttttacaccaacaccatgctgttttgtttac

SEQ ID NO: 620826 - DNA, 33 bp, Homo sapien
gtttttacaccaacactatgctgttttgtttac

SEQ ID NO: 620827 - DNA, 33 bp, Homo sapien
aaaggaggacattctacgcctgctgcaatttgt

SEQ ID NO: 620828 - DNA, 33 bp, Homo sapien
aaaggaggacattctatgcctgctgcaatttgt

SEQ ID NO: 620829 - DNA, 33 bp, Homo sapien
tgattaatcccaatgcaagtacctcaatgtttc

SEQ ID NO: 620830 - DNA, 33 bp, Homo sapien
tgattaatcccaatgcgagtacctcaatgtttc

SEQ ID NO: 620831 - DNA, 33 bp, Homo sapien
ctggctggaattcccaaccagttgttatcttgt

SEQ ID NO: 620832 - DNA, 33 bp, Homo sapien
ctggctggaattcccacccagttgttatcttgt

SEQ ID NO: 620833 - DNA, 33 bp, Homo sapien
aagatacagtaaaatacggtatgaaagattaaa

SEQ ID NO: 620834 - DNA, 33 bp, Homo sapien
aagatacagtaaaatatggtatgaaagattaaa

SEQ ID NO: 620835 - DNA, 33 bp, Homo sapien
catatcccaatacaaaacctgatgaaagaaatg

SEQ ID NO: 620836 - DNA, 33 bp, Homo sapien
catatcccaatacaaatcctgatgaaagaaatg

SEQ ID NO: 620837 - DNA, 33 bp, Homo sapien
agactctgaaattggaggaccattatctttgac

SEQ ID NO: 620838 - DNA, 33 bp, Homo sapien
agactctgaaattggatgaccattatctttgac

SEQ ID NO: 620839 - DNA, 33 bp, Homo sapien
ctgtttatgctcaatagaatgtagcttcctctt

SEQ ID NO: 620840 - DNA, 33 bp, Homo sapien
ctgtttatgctcaatataatgtagcttcctctt

SEQ ID NO: 620841 - DNA, 33 bp, Homo sapien
tcctgagagaggaaaaagttggaattgttgccc

SEQ ID NO: 620842 - DNA, 33 bp, Homo sapien
tcctgagagaggaaaaggttggaattgttgccc

SEQ ID NO: 620843 - DNA, 33 bp, Homo sapien
tgagcaacaggagaaaatcaaccttgggaaagt

SEQ ID NO: 620844 - DNA, 33 bp, Homo sapien
tgagcaacaggagaaagtcaaccttgggaaagt

SEQ ID NO: 620845 - DNA, 33 bp, Homo sapien
catttttaggctccaacagttcagagaaactgc

SEQ ID NO: 620846 - DNA, 33 bp, Homo sapien
catttttaggctccaatagttcagagaaactgc

SEQ ID NO: 620847 - DNA, 33 bp, Homo sapien
cagaggtccgaaaacacgcttcatgctgtcctg

SEQ ID NO: 620848 - DNA, 33 bp, Homo sapien
cagaggtccgaaaacatgcttcatgctgtcctg

SEQ ID NO: 620849 - DNA, 33 bp, Homo sapien
gcttctgtaatgagtacgctgtgtcgcatttag

SEQ ID NO: 620850 - DNA, 33 bp, Homo sapien
gcttctgtaatgagtatgctgtgtcgcatttag

SEQ ID NO: 620851 - DNA, 33 bp, Homo sapien
gatgaactggggtatacgaatctggagcagtag

SEQ ID NO: 620852 - DNA, 33 bp, Homo sapien
gatgaactggggtatatgaatctggagcagtag

SEQ ID NO: 620853 - DNA, 33 bp, Homo sapien
caatcagcatatcaaaatgtttttttcccaaag

SEQ ID NO: 620854 - DNA, 33 bp, Homo sapien
caatcagcatatcaaagtgtttttttcccaaag

SEQ ID NO: 620855 - DNA, 33 bp, Homo sapien
ctgcctctgtctctataagaaagcagacacaaa

SEQ ID NO: 620856 - DNA, 33 bp, Homo sapien
ctgcctctgtctctattagaaagcagacacaaa

SEQ ID NO: 620857 - DNA, 33 bp, Homo sapien
accaagatctattattcaagcaagtcactaagc

SEQ ID NO: 620858 - DNA, 33 bp, Homo sapien
accaagatctattattgaagcaagtcactaagc

SEQ ID NO: 620859 - DNA, 33 bp, Homo sapien
tttttagaaaacagagccaatttacctgccctt

SEQ ID NO: 620860 - DNA, 33 bp, Homo sapien
tttttagaaaacagaggcaatttacctgccctt

SEQ ID NO: 620861 - DNA, 33 bp, Homo sapien
gagatgtgatgtgtataacccacaatttgttgg

SEQ ID NO: 620862 - DNA, 33 bp, Homo sapien
gagatgtgatgtgtattacccacaatttgttgg

SEQ ID NO: 620863 - DNA, 33 bp, Homo sapien
tatttgttttattcgacggcctaatttcaagtg

SEQ ID NO: 620864 - DNA, 33 bp, Homo sapien
tatttgttttattcgatggcctaatttcaagtg

SEQ ID NO: 620865 - DNA, 33 bp, Homo sapien
tacccacttggctagacggaacagggaatccta

SEQ ID NO: 620866 - DNA, 33 bp, Homo sapien
tacccacttggctagatggaacagggaatccta

SEQ ID NO: 620867 - DNA, 33 bp, Homo sapien
taacagtggtatattgcatcatttctcccagtt

SEQ ID NO: 620868 - DNA, 33 bp, Homo sapien
taacagtggtatattggatcatttctcccagtt

SEQ ID NO: 620869 - DNA, 33 bp, Homo sapien
cccctgaagagccatcacagtttgttgtaacat

SEQ ID NO: 620870 - DNA, 33 bp, Homo sapien
cccctgaagagccatctcagtttgttgtaacat

SEQ ID NO: 620871 - DNA, 33 bp, Homo sapien
ttgatagaatttgtgacgagtctattagtcaat

SEQ ID NO: 620872 - DNA, 33 bp, Homo sapien
ttgatagaatttgtgatgagtctattagtcaat

SEQ ID NO: 620873 - DNA, 33 bp, Homo sapien
ttggaagaacaattaaatcttttggtccattag

SEQ ID NO: 620874 - DNA, 33 bp, Homo sapien
ttggaagaacaattaactcttttggtccattag

SEQ ID NO: 620875 - DNA, 33 bp, Homo sapien
tatacattattggcgcaaatataaaatcataca

SEQ ID NO: 620876 - DNA, 33 bp, Homo sapien
tatacattattggcgcgaatataaaatcataca

SEQ ID NO: 620877 - DNA, 33 bp, Homo sapien
catatgcagtcacttaaagagccaagatctcaa

SEQ ID NO: 620878 - DNA, 33 bp, Homo sapien
catatgcagtcacttatagagccaagatctcaa

SEQ ID NO: 620879 - DNA, 33 bp, Homo sapien
acccgctcctttccaccactaatctgtgcatat

SEQ ID NO: 620880 - DNA, 33 bp, Homo sapien
acccgctcctttccacgactaatctgtgcatat

SEQ ID NO: 620881 - DNA, 33 bp, Homo sapien
aaagcttctaagttgaactatttatcagtctgg

SEQ ID NO: 620882 - DNA, 33 bp, Homo sapien
aaagcttctaagttgatctatttatcagtctgg

SEQ ID NO: 620883 - DNA, 33 bp, Homo sapien
taggtagtatggtgaccagatctgaccacattg

SEQ ID NO: 620884 - DNA, 33 bp, Homo sapien
taggtagtatggtgactagatctgaccacattg

SEQ ID NO: 620885 - DNA, 33 bp, Homo sapien
atagataattcaaagcaagagaatgacaagaaa

SEQ ID NO: 620886 - DNA, 33 bp, Homo sapien
atagataattcaaagcgagagaatgacaagaaa

SEQ ID NO: 620887 - DNA, 33 bp, Homo sapien
tctgtgagtttataaacactaaaggcaaattca

SEQ ID NO: 620888 - DNA, 33 bp, Homo sapien
tctgtgagtttataaatactaaaggcaaattca

SEQ ID NO: 620889 - DNA, 33 bp, Homo sapien
tttccactgtctggaacctggcagaaatacagg

SEQ ID NO: 620890 - DNA, 33 bp, Homo sapien
tttccactgtctggaatctggcagaaatacagg

SEQ ID NO: 620891 - DNA, 33 bp, Homo sapien
tctggttgttctgcaacgctcaagagtgattac

SEQ ID NO: 620892 - DNA, 33 bp, Homo sapien
tctggttgttctgcaatgctcaagagtgattac

SEQ ID NO: 620893 - DNA, 33 bp, Homo sapien
caaattgatcccacaacgttcaaataaatgaat

SEQ ID NO: 620894 - DNA, 33 bp, Homo sapien
caaattgatcccacaatgttcaaataaatgaat

SEQ ID NO: 620895 - DNA, 33 bp, Homo sapien
agagcttcctctgtacaataaaatttggtctcc

SEQ ID NO: 620896 - DNA, 33 bp, Homo sapien
agagcttcctctgtacgataaaatttggtctcc

SEQ ID NO: 620897 - DNA, 33 bp, Homo sapien
tccttgcttcctttccagattcaggaggtaatc

SEQ ID NO: 620898 - DNA, 33 bp, Homo sapien
tccttgcttcctttcccgattcaggaggtaatc

SEQ ID NO: 620899 - DNA, 33 bp, Homo sapien
acaaaatttgaacaacccttaatatagcagtca

SEQ ID NO: 620900 - DNA, 33 bp, Homo sapien
acaaaatttgaacaacgcttaatatagcagtca

SEQ ID NO: 620901 - DNA, 33 bp, Homo sapien
ttactagctgcatgaaattagacaagttaattt

SEQ ID NO: 620902 - DNA, 33 bp, Homo sapien
ttactagctgcatgaacttagacaagttaattt

SEQ ID NO: 620903 - DNA, 33 bp, Homo sapien
tgctctttattgtgccaaagaatagcatggtgg

SEQ ID NO: 620904 - DNA, 33 bp, Homo sapien
tgctctttattgtgccgaagaatagcatggtgg

SEQ ID NO: 620905 - DNA, 33 bp, Homo sapien
agctgtggtcctatacagagaatgcagacttgc

SEQ ID NO: 620906 - DNA, 33 bp, Homo sapien
agctgtggtcctatacggagaatgcagacttgc

SEQ ID NO: 620907 - DNA, 33 bp, Homo sapien
ttttttccactccaaactgagcgatctgtgctc

SEQ ID NO: 620908 - DNA, 33 bp, Homo sapien
ttttttccactccaaattgagcgatctgtgctc

SEQ ID NO: 620909 - DNA, 33 bp, Homo sapien
tcttaaaatatagctacgactcaatccagcaac

SEQ ID NO: 620910 - DNA, 33 bp, Homo sapien
tcttaaaatatagctatgactcaatccagcaac

SEQ ID NO: 620911 - DNA, 33 bp, Homo sapien
gagtctacacaccaaaactatacaactttgatg

SEQ ID NO: 620912 - DNA, 33 bp, Homo sapien
gagtctacacaccaaacctatacaactttgatg

SEQ ID NO: 620913 - DNA, 33 bp, Homo sapien
atggaaggaacaaaaacagtggcaaagtatagg

SEQ ID NO: 620914 - DNA, 33 bp, Homo sapien
atggaaggaacaaaaatagtggcaaagtatagg

SEQ ID NO: 620915 - DNA, 33 bp, Homo sapien
tgcatttgtttaattaccagagtctaaacctat

SEQ ID NO: 620916 - DNA, 33 bp, Homo sapien
tgcatttgtttaattatcagagtctaaacctat

SEQ ID NO: 620917 - DNA, 33 bp, Homo sapien
tgtgtatttgtttaaagtcctcatagatgttgg

SEQ ID NO: 620918 - DNA, 33 bp, Homo sapien
tgtgtatttgtttaaattcctcatagatgttgg

SEQ ID NO: 620919 - DNA, 33 bp, Homo sapien
caatgagagcctgcacaagttgacttctccaca

SEQ ID NO: 620920 - DNA, 33 bp, Homo sapien
caatgagagcctgcaccagttgacttctccaca

SEQ ID NO: 620921 - DNA, 33 bp, Homo sapien
cttacatttggaagaaagtcatggccagagata

SEQ ID NO: 620922 - DNA, 33 bp, Homo sapien
cttacatttggaagaaggtcatggccagagata

SEQ ID NO: 620923 - DNA, 33 bp, Homo sapien
acttttggtagacctgcactcaactatttgtag

SEQ ID NO: 620924 - DNA, 33 bp, Homo sapien
acttttggtagacctggactcaactatttgtag

SEQ ID NO: 620925 - DNA, 33 bp, Homo sapien
aaggaagcaggagtagacagagggagaattggg

SEQ ID NO: 620926 - DNA, 33 bp, Homo sapien
aaggaagcaggagtaggcagagggagaattggg

SEQ ID NO: 620927 - DNA, 33 bp, Homo sapien
aatcatgtttcaaagacccttctgccatttaaa

SEQ ID NO: 620928 - DNA, 33 bp, Homo sapien
aatcatgtttcaaagatccttctgccatttaaa

SEQ ID NO: 620929 - DNA, 33 bp, Homo sapien
gctgacaaacaaatccagaacacaatctcattt

SEQ ID NO: 620930 - DNA, 33 bp, Homo sapien
gctgacaaacaaatccggaacacaatctcattt

SEQ ID NO: 620931 - DNA, 33 bp, Homo sapien
taaaaatatgagatgaaaatggcttagaagtat

SEQ ID NO: 620932 - DNA, 33 bp, Homo sapien
taaaaatatgagatgagaatggcttagaagtat

SEQ ID NO: 620933 - DNA, 33 bp, Homo sapien
tcatttagtgatatataactcatcaggaatata

SEQ ID NO: 620934 - DNA, 33 bp, Homo sapien
tcatttagtgatatatgactcatcaggaatata

SEQ ID NO: 620935 - DNA, 33 bp, Homo sapien
ttaaagtgctaaatcactgagaaccattcattt

SEQ ID NO: 620936 - DNA, 33 bp, Homo sapien
ttaaagtgctaaatcattgagaaccattcattt

SEQ ID NO: 620937 - DNA, 33 bp, Homo sapien
ctatccaggattctaacggcagagattagtttt

SEQ ID NO: 620938 - DNA, 33 bp, Homo sapien
ctatccaggattctaatggcagagattagtttt

SEQ ID NO: 620939 - DNA, 33 bp, Homo sapien
aactagcaataattcacgtgtatttaaagccaa

SEQ ID NO: 620940 - DNA, 33 bp, Homo sapien
aactagcaataattcatgtgtatttaaagccaa

SEQ ID NO: 620941 - DNA, 33 bp, Homo sapien
gcaatgaagtgaagcaaaataatacaaagttgg

SEQ ID NO: 620942 - DNA, 33 bp, Homo sapien
gcaatgaagtgaagcacaataatacaaagttgg

SEQ ID NO: 620943 - DNA, 33 bp, Homo sapien
gttgcacagccttccaatacaatttcttaagta

SEQ ID NO: 620944 - DNA, 33 bp, Homo sapien
gttgcacagccttccagtacaatttcttaagta

SEQ ID NO: 620945 - DNA, 33 bp, Homo sapien
cccctaacaaagctccgctctttgacctcctac

SEQ ID NO: 620946 - DNA, 33 bp, Homo sapien
cccctaacaaagctcctctctttgacctcctac

SEQ ID NO: 620947 - DNA, 33 bp, Homo sapien
agtcttactgcaaagcattcaagagctggtggc

SEQ ID NO: 620948 - DNA, 33 bp, Homo sapien
agtcttactgcaaagcgttcaagagctggtggc

SEQ ID NO: 620949 - DNA, 33 bp, Homo sapien
gggactttattcaccacggagtagtgcagagaa

SEQ ID NO: 620950 - DNA, 33 bp, Homo sapien
gggactttattcaccatggagtagtgcagagaa

SEQ ID NO: 620951 - DNA, 33 bp, Homo sapien
caagactgtaggaaacaaagtggtgttattttt

SEQ ID NO: 620952 - DNA, 33 bp, Homo sapien
caagactgtaggaaacgaagtggtgttattttt

SEQ ID NO: 620953 - DNA, 33 bp, Homo sapien
tttttgctggtttctacagatattggcatattg

SEQ ID NO: 620954 - DNA, 33 bp, Homo sapien
tttttgctggtttctatagatattggcatattg

SEQ ID NO: 620955 - DNA, 33 bp, Homo sapien
aagcaaccagtgaaaactgatacttcttccatt

SEQ ID NO: 620956 - DNA, 33 bp, Homo sapien
aagcaaccagtgaaaattgatacttcttccatt

SEQ ID NO: 620957 - DNA, 33 bp, Homo sapien
gaatcaagtcgccttaaaaaatgatcctcacac

SEQ ID NO: 620958 - DNA, 33 bp, Homo sapien
gaatcaagtcgccttacaaaatgatcctcacac

SEQ ID NO: 620959 - DNA, 33 bp, Homo sapien
tagctactctgagctcgaagactgtgagatgtc

SEQ ID NO: 620960 - DNA, 33 bp, Homo sapien
tagctactctgagctctaagactgtgagatgtc

SEQ ID NO: 620961 - DNA, 33 bp, Homo sapien
tatctgtcaccatattaaagttacaccagatca

SEQ ID NO: 620962 - DNA, 33 bp, Homo sapien
tatctgtcaccatattgaagttacaccagatca

SEQ ID NO: 620963 - DNA, 33 bp, Homo sapien
ttgattccatgtacaccgcctttatttgggcct

SEQ ID NO: 620964 - DNA, 33 bp, Homo sapien
ttgattccatgtacactgcctttatttgggcct

SEQ ID NO: 620965 - DNA, 33 bp, Homo sapien
ctcttcccataaaccacaaaatgtgaacataga

SEQ ID NO: 620966 - DNA, 33 bp, Homo sapien
ctcttcccataaaccataaaatgtgaacataga

SEQ ID NO: 620967 - DNA, 33 bp, Homo sapien
atagcacaagaaccagaatttttactcagaaag

SEQ ID NO: 620968 - DNA, 33 bp, Homo sapien
atagcacaagaaccagcatttttactcagaaag

SEQ ID NO: 620969 - DNA, 33 bp, Homo sapien
cccccatctagtgcacactggatatttttaatt

SEQ ID NO: 620970 - DNA, 33 bp, Homo sapien
cccccatctagtgcacgctggatatttttaatt

SEQ ID NO: 620971 - DNA, 33 bp, Homo sapien
acttcctttttggcaacgaaaacctagaggaaa

SEQ ID NO: 620972 - DNA, 33 bp, Homo sapien
acttcctttttggcaatgaaaacctagaggaaa

SEQ ID NO: 620973 - DNA, 33 bp, Homo sapien
tgttacataggttgaaaccagagagagaagatg

SEQ ID NO: 620974 - DNA, 33 bp, Homo sapien
tgttacataggttgaagccagagagagaagatg

SEQ ID NO: 620975 - DNA, 33 bp, Homo sapien
cttgatctactggcaccgctttgcctcaaactg

SEQ ID NO: 620976 - DNA, 33 bp, Homo sapien
cttgatctactggcactgctttgcctcaaactg

SEQ ID NO: 620977 - DNA, 33 bp, Homo sapien
aatacacagttgttacgcttcttaacaacttat

SEQ ID NO: 620978 - DNA, 33 bp, Homo sapien
aatacacagttgttactcttcttaacaacttat

SEQ ID NO: 620979 - DNA, 33 bp, Homo sapien
aaccctcatcacactcaatatacaatggtggag

SEQ ID NO: 620980 - DNA, 33 bp, Homo sapien
aaccctcatcacactccatatacaatggtggag

SEQ ID NO: 620981 - DNA, 33 bp, Homo sapien
tttccagcaaatagagaaagcagaatcattttg

SEQ ID NO: 620982 - DNA, 33 bp, Homo sapien
tttccagcaaatagaggaagcagaatcattttg

SEQ ID NO: 620983 - DNA, 33 bp, Homo sapien
tcatgtgtggagaaataacttttacatgttaga

SEQ ID NO: 620984 - DNA, 33 bp, Homo sapien
tcatgtgtggagaaatgacttttacatgttaga

SEQ ID NO: 620985 - DNA, 33 bp, Homo sapien
atacaaatgtgaagtacaatcattccctgacat

SEQ ID NO: 620986 - DNA, 33 bp, Homo sapien
atacaaatgtgaagtataatcattccctgacat

SEQ ID NO: 620987 - DNA, 33 bp, Homo sapien
ttagcccagtaagctactaccttcgatgtgtat

SEQ ID NO: 620988 - DNA, 33 bp, Homo sapien
ttagcccagtaagctattaccttcgatgtgtat

SEQ ID NO: 620989 - DNA, 33 bp, Homo sapien
tcaaagcatggattgaaagaaagttcaacaaga

SEQ ID NO: 620990 - DNA, 33 bp, Homo sapien
tcaaagcatggattgacagaaagttcaacaaga

SEQ ID NO: 620991 - DNA, 33 bp, Homo sapien
atacattcttctcacccgcacatgaaacatact

SEQ ID NO: 620992 - DNA, 33 bp, Homo sapien
atacattcttctcacctgcacatgaaacatact

SEQ ID NO: 620993 - DNA, 33 bp, Homo sapien
atctttcaggctgttacagaaccttgttttgtc

SEQ ID NO: 620994 - DNA, 33 bp, Homo sapien
atctttcaggctgttatagaaccttgttttgtc

SEQ ID NO: 620995 - DNA, 33 bp, Homo sapien
catgtccagaaggcagaatatggagtcaagaag

SEQ ID NO: 620996 - DNA, 33 bp, Homo sapien
catgtccagaaggcaggatatggagtcaagaag

SEQ ID NO: 620997 - DNA, 33 bp, Homo sapien
attcttccaaaaaataaaagtgaagagcatact

SEQ ID NO: 620998 - DNA, 33 bp, Homo sapien
attcttccaaaaaatacaagtgaagagcatact

SEQ ID NO: 620999 - DNA, 33 bp, Homo sapien
atcacaatcaaaatcaaagtgtcattttacaga

SEQ ID NO: 621000 - DNA, 33 bp, Homo sapien
atcacaatcaaaatcagagtgtcattttacaga

SEQ ID NO: 621001 - DNA, 33 bp, Homo sapien
ctcctttcatgtgtgacgacttctctcacttct

SEQ ID NO: 621002 - DNA, 33 bp, Homo sapien
ctcctttcatgtgtgatgacttctctcacttct

SEQ ID NO: 621003 - DNA, 33 bp, Homo sapien
tcttgacccaaaatcaccttccaattttatacc

SEQ ID NO: 621004 - DNA, 33 bp, Homo sapien
tcttgacccaaaatcatcttccaattttatacc

SEQ ID NO: 621005 - DNA, 33 bp, Homo sapien
ccaaatgagatgttgaatagacatttgagtatg

SEQ ID NO: 621006 - DNA, 33 bp, Homo sapien
ccaaatgagatgttgagtagacatttgagtatg

SEQ ID NO: 621007 - DNA, 33 bp, Homo sapien
ttagaatattcagcaagtcatatatactgcttt

SEQ ID NO: 621008 - DNA, 33 bp, Homo sapien
ttagaatattcagcaattcatatatactgcttt

SEQ ID NO: 621009 - DNA, 33 bp, Homo sapien
tactaagtaggggtacacatagcagatattttc

SEQ ID NO: 621010 - DNA, 33 bp, Homo sapien
tactaagtaggggtacgcatagcagatattttc

SEQ ID NO: 621011 - DNA, 33 bp, Homo sapien
tttgtctaagctacagaaaattcttacctacat

SEQ ID NO: 621012 - DNA, 33 bp, Homo sapien
tttgtctaagctacagcaaattcttacctacat

SEQ ID NO: 621013 - DNA, 33 bp, Homo sapien
atctttttaaagcgcactgcaggatgggatatt

SEQ ID NO: 621014 - DNA, 33 bp, Homo sapien
atctttttaaagcgcattgcaggatgggatatt

SEQ ID NO: 621015 - DNA, 33 bp, Homo sapien
gtagcattccatacacaagttcttccaccctgc

SEQ ID NO: 621016 - DNA, 33 bp, Homo sapien
gtagcattccatacacgagttcttccaccctgc

SEQ ID NO: 621017 - DNA, 33 bp, Homo sapien
tactctgtagattaagcaaacattttcagagaa

SEQ ID NO: 621018 - DNA, 33 bp, Homo sapien
tactctgtagattaaggaaacattttcagagaa

SEQ ID NO: 621019 - DNA, 33 bp, Homo sapien
aagtttatgaaagagacagctggtggtctaaga

SEQ ID NO: 621020 - DNA, 33 bp, Homo sapien
aagtttatgaaagagatagctggtggtctaaga

SEQ ID NO: 621021 - DNA, 33 bp, Homo sapien
acaaacagtgacatgccctaaacttgaaatgag

SEQ ID NO: 621022 - DNA, 33 bp, Homo sapien
acaaacagtgacatgctctaaacttgaaatgag

SEQ ID NO: 621023 - DNA, 33 bp, Homo sapien
caccaaatcacaatgactaacaatgagaggaaa

SEQ ID NO: 621024 - DNA, 33 bp, Homo sapien
caccaaatcacaatgagtaacaatgagaggaaa

SEQ ID NO: 621025 - DNA, 33 bp, Homo sapien
ctccttctggggtctccgacaaatggatcaaga

SEQ ID NO: 621026 - DNA, 33 bp, Homo sapien
ctccttctggggtctctgacaaatggatcaaga

SEQ ID NO: 621027 - DNA, 33 bp, Homo sapien
acattttatgtcttctcaattagattccctcat

SEQ ID NO: 621028 - DNA, 33 bp, Homo sapien
acattttatgtcttctgaattagattccctcat

SEQ ID NO: 621029 - DNA, 33 bp, Homo sapien
agtagaaaacgaggtccattgtggccactgttt

SEQ ID NO: 621030 - DNA, 33 bp, Homo sapien
agtagaaaacgaggtctattgtggccactgttt

SEQ ID NO: 621031 - DNA, 33 bp, Homo sapien
agaaactatgactaaaaatattccccgaagaaa

SEQ ID NO: 621032 - DNA, 33 bp, Homo sapien
agaaactatgactaaagatattccccgaagaaa

SEQ ID NO: 621033 - DNA, 33 bp, Homo sapien
atagatttatgttgaaaaatcctattagtgaga

SEQ ID NO: 621034 - DNA, 33 bp, Homo sapien
atagatttatgttgaacaatcctattagtgaga

SEQ ID NO: 621035 - DNA, 33 bp, Homo sapien
ctcttgtgtttttgtacggtttgcttcagtagc

SEQ ID NO: 621036 - DNA, 33 bp, Homo sapien
ctcttgtgtttttgtatggtttgcttcagtagc

SEQ ID NO: 621037 - DNA, 33 bp, Homo sapien
acttgtctgtggaagaaatggtcttaataaggc

SEQ ID NO: 621038 - DNA, 33 bp, Homo sapien
acttgtctgtggaagagatggtcttaataaggc

SEQ ID NO: 621039 - DNA, 33 bp, Homo sapien
tgttttctatagtcacactttcagggcattatg

SEQ ID NO: 621040 - DNA, 33 bp, Homo sapien
tgttttctatagtcacgctttcagggcattatg

SEQ ID NO: 621041 - DNA, 33 bp, Homo sapien
ggtgaatgttctttatcacactgaaagagactt

SEQ ID NO: 621042 - DNA, 33 bp, Homo sapien
ggtgaatgttctttatgacactgaaagagactt

SEQ ID NO: 621043 - DNA, 33 bp, Homo sapien
gaagtaaatacccacaatgtcacgctggcttca

SEQ ID NO: 621044 - DNA, 33 bp, Homo sapien
gaagtaaatacccacagtgtcacgctggcttca

SEQ ID NO: 621045 - DNA, 33 bp, Homo sapien
ttaatctgaaaatggcacatagtatagatcata

SEQ ID NO: 621046 - DNA, 33 bp, Homo sapien
ttaatctgaaaatggcgcatagtatagatcata

SEQ ID NO: 621047 - DNA, 33 bp, Homo sapien
gtttaaatgtacattaacctctggggtcagaga

SEQ ID NO: 621048 - DNA, 33 bp, Homo sapien
gtttaaatgtacattatcctctggggtcagaga

SEQ ID NO: 621049 - DNA, 33 bp, Homo sapien
aggctactatggggaacaacttgtcacttgatg

SEQ ID NO: 621050 - DNA, 33 bp, Homo sapien
aggctactatggggaagaacttgtcacttgatg

SEQ ID NO: 621051 - DNA, 33 bp, Homo sapien
tttgatgaaatggtgacacaattacaatgaatg

SEQ ID NO: 621052 - DNA, 33 bp, Homo sapien
tttgatgaaatggtgatacaattacaatgaatg

SEQ ID NO: 621053 - DNA, 33 bp, Homo sapien
ggatcttgttacgtaaaagttaaatcacaacat

SEQ ID NO: 621054 - DNA, 33 bp, Homo sapien
ggatcttgttacgtaagagttaaatcacaacat

SEQ ID NO: 621055 - DNA, 33 bp, Homo sapien
ttatttgaagattaagaaggactaaacaaatgt

SEQ ID NO: 621056 - DNA, 33 bp, Homo sapien
ttatttgaagattaaggaggactaaacaaatgt

SEQ ID NO: 621057 - DNA, 33 bp, Homo sapien
ctttctaattccagaacattttcagcactgtga

SEQ ID NO: 621058 - DNA, 33 bp, Homo sapien
ctttctaattccagaagattttcagcactgtga

SEQ ID NO: 621059 - DNA, 33 bp, Homo sapien
gagagaatgaaacaacccagaaaataaagtgat

SEQ ID NO: 621060 - DNA, 33 bp, Homo sapien
gagagaatgaaacaactcagaaaataaagtgat

SEQ ID NO: 621061 - DNA, 33 bp, Homo sapien
cagctctaaactaacacgatgctctgaaaaaca

SEQ ID NO: 621062 - DNA, 33 bp, Homo sapien
cagctctaaactaacatgatgctctgaaaaaca

SEQ ID NO: 621063 - DNA, 33 bp, Homo sapien
atttttttcagctgctgaatgttttgttgttgt

SEQ ID NO: 621064 - DNA, 33 bp, Homo sapien
atttttttcagctgcttaatgttttgttgttgt

SEQ ID NO: 621065 - DNA, 33 bp, Homo sapien
gtaagttggaagacaaagtaagactgtttctct

SEQ ID NO: 621066 - DNA, 33 bp, Homo sapien
gtaagttggaagacaaggtaagactgtttctct

SEQ ID NO: 621067 - DNA, 33 bp, Homo sapien
gggtattgaccacaataagaaaccatgtaacac

SEQ ID NO: 621068 - DNA, 33 bp, Homo sapien
gggtattgaccacaatgagaaaccatgtaacac

SEQ ID NO: 621069 - DNA, 33 bp, Homo sapien
gatctctggacaatgactaggtgccccagaaac

SEQ ID NO: 621070 - DNA, 33 bp, Homo sapien
gatctctggacaatgagtaggtgccccagaaac

SEQ ID NO: 621071 - DNA, 33 bp, Homo sapien
agcaacttctgagaaaacaatattcttatgtgt

SEQ ID NO: 621072 - DNA, 33 bp, Homo sapien
agcaacttctgagaaagcaatattcttatgtgt

SEQ ID NO: 621073 - DNA, 33 bp, Homo sapien
cacagctctgtaaacactgctcatctctgaact

SEQ ID NO: 621074 - DNA, 33 bp, Homo sapien
cacagctctgtaaacattgctcatctctgaact

SEQ ID NO: 621075 - DNA, 33 bp, Homo sapien
catttgatcagagtcacctcagtggttttcaac

SEQ ID NO: 621076 - DNA, 33 bp, Homo sapien
catttgatcagagtcatctcagtggttttcaac

SEQ ID NO: 621077 - DNA, 33 bp, Homo sapien
ttcctaataacacaaacccaagaaacctgggag

SEQ ID NO: 621078 - DNA, 33 bp, Homo sapien
ttcctaataacacaaatccaagaaacctgggag

SEQ ID NO: 621079 - DNA, 33 bp, Homo sapien
tagatatttggtaagcactgtctctacttcaaa

SEQ ID NO: 621080 - DNA, 33 bp, Homo sapien
tagatatttggtaagcgctgtctctacttcaaa

SEQ ID NO: 621081 - DNA, 33 bp, Homo sapien
aaaagggactattcaaccaggaaagagtgtgac

SEQ ID NO: 621082 - DNA, 33 bp, Homo sapien
aaaagggactattcaatcaggaaagagtgtgac

SEQ ID NO: 621083 - DNA, 33 bp, Homo sapien
gtgtttgaaaggccagcacttgggtttatgaga

SEQ ID NO: 621084 - DNA, 33 bp, Homo sapien
gtgtttgaaaggccagtacttgggtttatgaga

SEQ ID NO: 621085 - DNA, 33 bp, Homo sapien
atgagtttatgcagaagcctagaagtaggaatg

SEQ ID NO: 621086 - DNA, 33 bp, Homo sapien
atgagtttatgcagaatcctagaagtaggaatg

SEQ ID NO: 621087 - DNA, 33 bp, Homo sapien
tttagagattgaaaaacagaagggaaattcaga

SEQ ID NO: 621088 - DNA, 33 bp, Homo sapien
tttagagattgaaaaagagaagggaaattcaga

SEQ ID NO: 621089 - DNA, 33 bp, Homo sapien
cagattggtcaaagaaagagattttatcaagtg

SEQ ID NO: 621090 - DNA, 33 bp, Homo sapien
cagattggtcaaagaacgagattttatcaagtg

SEQ ID NO: 621091 - DNA, 33 bp, Homo sapien
aaacaaatgaaaaaaaacagtcctcatcctgac

SEQ ID NO: 621092 - DNA, 33 bp, Homo sapien
aaacaaatgaaaaaaaccagtcctcatcctgac

SEQ ID NO: 621093 - DNA, 33 bp, Homo sapien
tacttggatggctttcaagcatcaatacttaac

SEQ ID NO: 621094 - DNA, 33 bp, Homo sapien
tacttggatggctttctagcatcaatacttaac

SEQ ID NO: 621095 - DNA, 33 bp, Homo sapien
agtttactatgtatgcagaaacttttaggccaa

SEQ ID NO: 621096 - DNA, 33 bp, Homo sapien
agtttactatgtatgcggaaacttttaggccaa

SEQ ID NO: 621097 - DNA, 33 bp, Homo sapien
gccaatcttgaaatagcacatgacaccattaaa

SEQ ID NO: 621098 - DNA, 33 bp, Homo sapien
gccaatcttgaaatagtacatgacaccattaaa

SEQ ID NO: 621099 - DNA, 33 bp, Homo sapien
ccaatcagagttaataaaactaggctgattgga

SEQ ID NO: 621100 - DNA, 33 bp, Homo sapien
ccaatcagagttaatacaactaggctgattgga

SEQ ID NO: 621101 - DNA, 33 bp, Homo sapien
tatacattcatcttaaaaagcctggacttcagc

SEQ ID NO: 621102 - DNA, 33 bp, Homo sapien
tatacattcatcttaagaagcctggacttcagc

SEQ ID NO: 621103 - DNA, 33 bp, Homo sapien
gtagctttacccattaccaatattcccctctag

SEQ ID NO: 621104 - DNA, 33 bp, Homo sapien
gtagctttacccattatcaatattcccctctag

SEQ ID NO: 621105 - DNA, 33 bp, Homo sapien
aaattgaggactggaaagagaaattatgtccca

SEQ ID NO: 621106 - DNA, 33 bp, Homo sapien
aaattgaggactggaaggagaaattatgtccca

SEQ ID NO: 621107 - DNA, 33 bp, Homo sapien
ttcaaggtggatatcaatagcatgttcaggaat

SEQ ID NO: 621108 - DNA, 33 bp, Homo sapien
ttcaaggtggatatcagtagcatgttcaggaat

SEQ ID NO: 621109 - DNA, 33 bp, Homo sapien
ttcagtagcctattgcccttgaaaaagtcaact

SEQ ID NO: 621110 - DNA, 33 bp, Homo sapien
ttcagtagcctattgcgcttgaaaaagtcaact

SEQ ID NO: 621111 - DNA, 33 bp, Homo sapien
aaggacagagcaaaaaatactgggtttagctgc

SEQ ID NO: 621112 - DNA, 33 bp, Homo sapien
aaggacagagcaaaaagtactgggtttagctgc

SEQ ID NO: 621113 - DNA, 33 bp, Homo sapien
ttgcagtactgtaacaaccattttgaaaaactt

SEQ ID NO: 621114 - DNA, 33 bp, Homo sapien
ttgcagtactgtaacagccattttgaaaaactt

SEQ ID NO: 621115 - DNA, 33 bp, Homo sapien
cccagtccttgaattacatggttagtctttctg

SEQ ID NO: 621116 - DNA, 33 bp, Homo sapien
cccagtccttgaattatatggttagtctttctg

SEQ ID NO: 621117 - DNA, 33 bp, Homo sapien
tcagttaggaatttgcagactttattcacgtag

SEQ ID NO: 621118 - DNA, 33 bp, Homo sapien
tcagttaggaatttgcggactttattcacgtag

SEQ ID NO: 621119 - DNA, 33 bp, Homo sapien
ttcttttggagatctacggataggactaggtaa

SEQ ID NO: 621120 - DNA, 33 bp, Homo sapien
ttcttttggagatctagggataggactaggtaa

SEQ ID NO: 621121 - DNA, 33 bp, Homo sapien
taacaaacataaaacaactggaagcaaatatga

SEQ ID NO: 621122 - DNA, 33 bp, Homo sapien
taacaaacataaaacagctggaagcaaatatga

SEQ ID NO: 621123 - DNA, 33 bp, Homo sapien
ataaacctggatgtcaatcttacagctataaca

SEQ ID NO: 621124 - DNA, 33 bp, Homo sapien
ataaacctggatgtcagtcttacagctataaca

SEQ ID NO: 621125 - DNA, 33 bp, Homo sapien
atttaaatctctaggcactaagaaagatgagaa

SEQ ID NO: 621126 - DNA, 33 bp, Homo sapien
atttaaatctctaggcgctaagaaagatgagaa

SEQ ID NO: 621127 - DNA, 33 bp, Homo sapien
atcaagccttattttacagctatggattaagtt

SEQ ID NO: 621128 - DNA, 33 bp, Homo sapien
atcaagccttattttatagctatggattaagtt

SEQ ID NO: 621129 - DNA, 33 bp, Homo sapien
taaatgctcagtaatactaattgagtgagtgga

SEQ ID NO: 621130 - DNA, 33 bp, Homo sapien
taaatgctcagtaatattaattgagtgagtgga

SEQ ID NO: 621131 - DNA, 33 bp, Homo sapien
acagcacaataagaaaagaatgcagctaaatgt

SEQ ID NO: 621132 - DNA, 33 bp, Homo sapien
acagcacaataagaaaggaatgcagctaaatgt

SEQ ID NO: 621133 - DNA, 33 bp, Homo sapien
gatagagggacaaacaaactcctcatttccttt

SEQ ID NO: 621134 - DNA, 33 bp, Homo sapien
gatagagggacaaacagactcctcatttccttt

SEQ ID NO: 621135 - DNA, 33 bp, Homo sapien
agactgtaactcaaagaagcttgtggacagagt

SEQ ID NO: 621136 - DNA, 33 bp, Homo sapien
agactgtaactcaaagtagcttgtggacagagt

SEQ ID NO: 621137 - DNA, 33 bp, Homo sapien
tgctggaagtgtagtgcagcaactgaaacatga

SEQ ID NO: 621138 - DNA, 33 bp, Homo sapien
tgctggaagtgtagtgtagcaactgaaacatga

SEQ ID NO: 621139 - DNA, 33 bp, Homo sapien
agagaacacaattagaagagggtaattcaagac

SEQ ID NO: 621140 - DNA, 33 bp, Homo sapien
agagaacacaattagaggagggtaattcaagac

SEQ ID NO: 621141 - DNA, 33 bp, Homo sapien
attcaaattcctaaaacagaagttgccattcct

SEQ ID NO: 621142 - DNA, 33 bp, Homo sapien
attcaaattcctaaaatagaagttgccattcct

SEQ ID NO: 621143 - DNA, 33 bp, Homo sapien
gctgacccacaagaacacagggaatgaaaggca

SEQ ID NO: 621144 - DNA, 33 bp, Homo sapien
gctgacccacaagaacgcagggaatgaaaggca

SEQ ID NO: 621145 - DNA, 33 bp, Homo sapien
gtaaagaagatagtcacgaaggtctagagtgat

SEQ ID NO: 621146 - DNA, 33 bp, Homo sapien
gtaaagaagatagtcatgaaggtctagagtgat

SEQ ID NO: 621147 - DNA, 33 bp, Homo sapien
atgaaggattggagcccgacatatgatatagtt

SEQ ID NO: 621148 - DNA, 33 bp, Homo sapien
atgaaggattggagcctgacatatgatatagtt

SEQ ID NO: 621149 - DNA, 33 bp, Homo sapien
aacaaggttgaatccacatactccacttgatgg

SEQ ID NO: 621150 - DNA, 33 bp, Homo sapien
aacaaggttgaatccatatactccacttgatgg

SEQ ID NO: 621151 - DNA, 33 bp, Homo sapien
atgaatgaagtaaaacagtcaaaactccagcta

SEQ ID NO: 621152 - DNA, 33 bp, Homo sapien
atgaatgaagtaaaacggtcaaaactccagcta

SEQ ID NO: 621153 - DNA, 33 bp, Homo sapien
aaactccagctaatgacgccatttgtgcaaatt

SEQ ID NO: 621154 - DNA, 33 bp, Homo sapien
aaactccagctaatgaggccatttgtgcaaatt

SEQ ID NO: 621155 - DNA, 33 bp, Homo sapien
gacttttattagcaaaagaggccatatgcttaa

SEQ ID NO: 621156 - DNA, 33 bp, Homo sapien
gacttttattagcaaaggaggccatatgcttaa

SEQ ID NO: 621157 - DNA, 33 bp, Homo sapien
attttatgttcagagacaataaagcacgtgtat

SEQ ID NO: 621158 - DNA, 33 bp, Homo sapien
attttatgttcagagagaataaagcacgtgtat

SEQ ID NO: 621159 - DNA, 33 bp, Homo sapien
gtataaatgttgagcaaccctcctgagttaggc

SEQ ID NO: 621160 - DNA, 33 bp, Homo sapien
gtataaatgttgagcatccctcctgagttaggc

SEQ ID NO: 621161 - DNA, 33 bp, Homo sapien
tgtaactatcaagcacgttcatgaggagttacc

SEQ ID NO: 621162 - DNA, 33 bp, Homo sapien
tgtaactatcaagcactttcatgaggagttacc

SEQ ID NO: 621163 - DNA, 33 bp, Homo sapien
attttcagaagaacacgagagtaagagtaaagt

SEQ ID NO: 621164 - DNA, 33 bp, Homo sapien
attttcagaagaacactagagtaagagtaaagt

SEQ ID NO: 621165 - DNA, 33 bp, Homo sapien
ttgtcctttgttgtaacagaagctcattatgag

SEQ ID NO: 621166 - DNA, 33 bp, Homo sapien
ttgtcctttgttgtaatagaagctcattatgag

SEQ ID NO: 621167 - DNA, 33 bp, Homo sapien
tgggtgtgtttacctacgactgtgaaaatttct

SEQ ID NO: 621168 - DNA, 33 bp, Homo sapien
tgggtgtgtttacctaggactgtgaaaatttct

SEQ ID NO: 621169 - DNA, 33 bp, Homo sapien
cattattcaaagctaaatgggttcaagattggg

SEQ ID NO: 621170 - DNA, 33 bp, Homo sapien
cattattcaaagctaagtgggttcaagattggg

SEQ ID NO: 621171 - DNA, 33 bp, Homo sapien
ttcatgaagcattcaccgccacaaccaaaagac

SEQ ID NO: 621172 - DNA, 33 bp, Homo sapien
ttcatgaagcattcactgccacaaccaaaagac

SEQ ID NO: 621173 - DNA, 33 bp, Homo sapien
cagttaaagaacaaaactctacccaacataaag

SEQ ID NO: 621174 - DNA, 33 bp, Homo sapien
cagttaaagaacaaaagtctacccaacataaag

SEQ ID NO: 621175 - DNA, 33 bp, Homo sapien
ctcttaccaccattccccagatggacaaagact

SEQ ID NO: 621176 - DNA, 33 bp, Homo sapien
ctcttaccaccattcctcagatggacaaagact

SEQ ID NO: 621177 - DNA, 33 bp, Homo sapien
tggtaaaacataaagcagagtcattaaaggcag

SEQ ID NO: 621178 - DNA, 33 bp, Homo sapien
tggtaaaacataaagcggagtcattaaaggcag

SEQ ID NO: 621179 - DNA, 33 bp, Homo sapien
gggagctttttgtgataagagcagccaatgtgc

SEQ ID NO: 621180 - DNA, 33 bp, Homo sapien
gggagctttttgtgatgagagcagccaatgtgc

SEQ ID NO: 621181 - DNA, 33 bp, Homo sapien
gaatcacatttctatacagcttgccccagatga

SEQ ID NO: 621182 - DNA, 33 bp, Homo sapien
gaatcacatttctatatagcttgccccagatga

SEQ ID NO: 621183 - DNA, 33 bp, Homo sapien
atccatttatgtctctcaaaaagcaaactacca

SEQ ID NO: 621184 - DNA, 33 bp, Homo sapien
atccatttatgtctctgaaaaagcaaactacca

SEQ ID NO: 621185 - DNA, 33 bp, Homo sapien
acataaatggattgaaccataaatctagtcaag

SEQ ID NO: 621186 - DNA, 33 bp, Homo sapien
acataaatggattgaagcataaatctagtcaag

SEQ ID NO: 621187 - DNA, 33 bp, Homo sapien
acaaaatcattcacacaatctttgtctgaatcc

SEQ ID NO: 621188 - DNA, 33 bp, Homo sapien
acaaaatcattcacacgatctttgtctgaatcc

SEQ ID NO: 621189 - DNA, 33 bp, Homo sapien
agatatgtcagaggcacaggttgtagaacaaac

SEQ ID NO: 621190 - DNA, 33 bp, Homo sapien
agatatgtcagaggcagaggttgtagaacaaac

SEQ ID NO: 621191 - DNA, 33 bp, Homo sapien
cacctttattttcaaaatcgtaactgcacttct

SEQ ID NO: 621192 - DNA, 33 bp, Homo sapien
cacctttattttcaaattcgtaactgcacttct

SEQ ID NO: 621193 - DNA, 33 bp, Homo sapien
agtgttatggtactaagaggtgagacctttggg

SEQ ID NO: 621194 - DNA, 33 bp, Homo sapien
agtgttatggtactaataggtgagacctttggg

SEQ ID NO: 621195 - DNA, 33 bp, Homo sapien
tcactgttagagtctaaatgccctaagtcacca

SEQ ID NO: 621196 - DNA, 33 bp, Homo sapien
tcactgttagagtctagatgccctaagtcacca

SEQ ID NO: 621197 - DNA, 33 bp, Homo sapien
catttgtgtgcaaatacatgtctgagtcaccac

SEQ ID NO: 621198 - DNA, 33 bp, Homo sapien
catttgtgtgcaaatatatgtctgagtcaccac

SEQ ID NO: 621199 - DNA, 33 bp, Homo sapien
ctcccttgacacgtgcagattattgggattaca

SEQ ID NO: 621200 - DNA, 33 bp, Homo sapien
ctcccttgacacgtgcggattattgggattaca

SEQ ID NO: 621201 - DNA, 33 bp, Homo sapien
tattgaagcttacaccgcattttgtgatccagt

SEQ ID NO: 621202 - DNA, 33 bp, Homo sapien
tattgaagcttacacctcattttgtgatccagt

SEQ ID NO: 621203 - DNA, 33 bp, Homo sapien
tgccacttaagagagaactaagttgcaggggaa

SEQ ID NO: 621204 - DNA, 33 bp, Homo sapien
tgccacttaagagagagctaagttgcaggggaa

SEQ ID NO: 621205 - DNA, 33 bp, Homo sapien
acagaggacccagtacagtacccagtgtatgga

SEQ ID NO: 621206 - DNA, 33 bp, Homo sapien
acagaggacccagtaccgtacccagtgtatgga

SEQ ID NO: 621207 - DNA, 33 bp, Homo sapien
tgtatgtaaagttatccagcaaagaacctagac

SEQ ID NO: 621208 - DNA, 33 bp, Homo sapien
tgtatgtaaagttatctagcaaagaacctagac

SEQ ID NO: 621209 - DNA, 33 bp, Homo sapien
cagggttaaggagctagcaccaatgcaacacat

SEQ ID NO: 621210 - DNA, 33 bp, Homo sapien
cagggttaaggagctatcaccaatgcaacacat

SEQ ID NO: 621211 - DNA, 33 bp, Homo sapien
aacacataaggaaagggacatctatattatgat

SEQ ID NO: 621212 - DNA, 33 bp, Homo sapien
aacacataaggaaaggtacatctatattatgat

SEQ ID NO: 621213 - DNA, 33 bp, Homo sapien
actaacatgaaagggacgcaaataatcagtggg

SEQ ID NO: 621214 - DNA, 33 bp, Homo sapien
actaacatgaaagggatgcaaataatcagtggg

SEQ ID NO: 621215 - DNA, 33 bp, Homo sapien
gtgggtcttcaaggtaagtgttatacacagtgg

SEQ ID NO: 621216 - DNA, 33 bp, Homo sapien
gtgggtcttcaaggtaggtgttatacacagtgg

SEQ ID NO: 621217 - DNA, 33 bp, Homo sapien
ttaaggagtgtctgacaggtgatttgtatcttt

SEQ ID NO: 621218 - DNA, 33 bp, Homo sapien
ttaaggagtgtctgacgggtgatttgtatcttt

SEQ ID NO: 621219 - DNA, 33 bp, Homo sapien
agttaaataactggcccgacactacacagttag

SEQ ID NO: 621220 - DNA, 33 bp, Homo sapien
agttaaataactggccggacactacacagttag

SEQ ID NO: 621221 - DNA, 33 bp, Homo sapien
gtagctctttaaaaaactgatcattgtccatca

SEQ ID NO: 621222 - DNA, 33 bp, Homo sapien
gtagctctttaaaaaattgatcattgtccatca

SEQ ID NO: 621223 - DNA, 33 bp, Homo sapien
ctattaaaatgttttcaattacacagtttcagc

SEQ ID NO: 621224 - DNA, 33 bp, Homo sapien
ctattaaaatgttttccattacacagtttcagc

SEQ ID NO: 621225 - DNA, 33 bp, Homo sapien
ggttgtggttggtaaaagacataaacaggcagg

SEQ ID NO: 621226 - DNA, 33 bp, Homo sapien
ggttgtggttggtaaaggacataaacaggcagg

SEQ ID NO: 621227 - DNA, 33 bp, Homo sapien
cagcaaaatccacctcaaatgcaaacagtctga

SEQ ID NO: 621228 - DNA, 33 bp, Homo sapien
cagcaaaatccacctcgaatgcaaacagtctga

SEQ ID NO: 621229 - DNA, 33 bp, Homo sapien
gagctaggctgattaactgatccacagccttga

SEQ ID NO: 621230 - DNA, 33 bp, Homo sapien
gagctaggctgattaattgatccacagccttga

SEQ ID NO: 621231 - DNA, 33 bp, Homo sapien
atgattcacctcactcacttcaacacatttttt

SEQ ID NO: 621232 - DNA, 33 bp, Homo sapien
atgattcacctcactcgcttcaacacatttttt

SEQ ID NO: 621233 - DNA, 33 bp, Homo sapien
tatagtttggaacttcccttgtacactgctggc

SEQ ID NO: 621234 - DNA, 33 bp, Homo sapien
tatagtttggaacttcgcttgtacactgctggc

SEQ ID NO: 621235 - DNA, 33 bp, Homo sapien
cacttactgttaatgaccatgggttttaattga

SEQ ID NO: 621236 - DNA, 33 bp, Homo sapien
cacttactgttaatgatcatgggttttaattga

SEQ ID NO: 621237 - DNA, 33 bp, Homo sapien
tagcaaatatgtaagacgaacaagtggaaagat

SEQ ID NO: 621238 - DNA, 33 bp, Homo sapien
tagcaaatatgtaagatgaacaagtggaaagat

SEQ ID NO: 621239 - DNA, 33 bp, Homo sapien
gcattaactctataaaccacttcgggcagtata

SEQ ID NO: 621240 - DNA, 33 bp, Homo sapien
gcattaactctataaatcacttcgggcagtata

SEQ ID NO: 621241 - DNA, 33 bp, Homo sapien
ggttctcagaaagttgaagggtttctattgctt

SEQ ID NO: 621242 - DNA, 33 bp, Homo sapien
ggttctcagaaagttgtagggtttctattgctt

SEQ ID NO: 621243 - DNA, 33 bp, Homo sapien
atttaattgcctagcccgaataagcaaccagta

SEQ ID NO: 621244 - DNA, 33 bp, Homo sapien
atttaattgcctagcctgaataagcaaccagta

SEQ ID NO: 621245 - DNA, 33 bp, Homo sapien
agcggtcaatcactgcacttaatgatatgctaa

SEQ ID NO: 621246 - DNA, 33 bp, Homo sapien
agcggtcaatcactgcccttaatgatatgctaa

SEQ ID NO: 621247 - DNA, 33 bp, Homo sapien
agggctgggaaaatgagcacctctactttacat

SEQ ID NO: 621248 - DNA, 33 bp, Homo sapien
agggctgggaaaatgatcacctctactttacat

SEQ ID NO: 621249 - DNA, 33 bp, Homo sapien
ctgcttggcttgtacactgagaggagttttgtt

SEQ ID NO: 621250 - DNA, 33 bp, Homo sapien
ctgcttggcttgtacattgagaggagttttgtt

SEQ ID NO: 621251 - DNA, 33 bp, Homo sapien
agggagtaccgagtcaggtctataagcagcaat

SEQ ID NO: 621252 - DNA, 33 bp, Homo sapien
agggagtaccgagtcatgtctataagcagcaat

SEQ ID NO: 621253 - DNA, 33 bp, Homo sapien
aactatattactgtgaacctgaatcaactactg

SEQ ID NO: 621254 - DNA, 33 bp, Homo sapien
aactatattactgtgatcctgaatcaactactg

SEQ ID NO: 621255 - DNA, 33 bp, Homo sapien
gcctgggttctttccccacgacacattgtctcc

SEQ ID NO: 621256 - DNA, 33 bp, Homo sapien
gcctgggttctttccctacgacacattgtctcc

SEQ ID NO: 621257 - DNA, 33 bp, Homo sapien
gagaattctcaaaggaaaccaagaggtccataa

SEQ ID NO: 621258 - DNA, 33 bp, Homo sapien
gagaattctcaaaggacaccaagaggtccataa

SEQ ID NO: 621259 - DNA, 33 bp, Homo sapien
tacacagcccttgaaacggaaggtattttcatg

SEQ ID NO: 621260 - DNA, 33 bp, Homo sapien
tacacagcccttgaaatggaaggtattttcatg

SEQ ID NO: 621261 - DNA, 33 bp, Homo sapien
ggctataagcttaccacagtctctacctgcttg

SEQ ID NO: 621262 - DNA, 33 bp, Homo sapien
ggctataagcttaccatagtctctacctgcttg

SEQ ID NO: 621263 - DNA, 33 bp, Homo sapien
gtgaatgcaagatccaagattgatagaataagt

SEQ ID NO: 621264 - DNA, 33 bp, Homo sapien
gtgaatgcaagatccaggattgatagaataagt

SEQ ID NO: 621265 - DNA, 33 bp, Homo sapien
ttcagtcaccgtggacacttttgttacttattc

SEQ ID NO: 621266 - DNA, 33 bp, Homo sapien
ttcagtcaccgtggacgcttttgttacttattc

SEQ ID NO: 621267 - DNA, 33 bp, Homo sapien
cacactgctcactagacaatgttttccttttcc

SEQ ID NO: 621268 - DNA, 33 bp, Homo sapien
cacactgctcactagagaatgttttccttttcc

SEQ ID NO: 621269 - DNA, 33 bp, Homo sapien
aatcaattttatgaccaaattcttacttgatgt

SEQ ID NO: 621270 - DNA, 33 bp, Homo sapien
aatcaattttatgaccgaattcttacttgatgt

SEQ ID NO: 621271 - DNA, 33 bp, Homo sapien
ttatcatatgtctccaaagtcagtgaaatctag

SEQ ID NO: 621272 - DNA, 33 bp, Homo sapien
ttatcatatgtctccacagtcagtgaaatctag

SEQ ID NO: 621273 - DNA, 33 bp, Homo sapien
acagactagacataaaggcagagacatgtatat

SEQ ID NO: 621274 - DNA, 33 bp, Homo sapien
acagactagacataaatgcagagacatgtatat

SEQ ID NO: 621275 - DNA, 33 bp, Homo sapien
aggtagaagactttcaatagatttattcactca

SEQ ID NO: 621276 - DNA, 33 bp, Homo sapien
aggtagaagactttcagtagatttattcactca

SEQ ID NO: 621277 - DNA, 33 bp, Homo sapien
caacttaacagatcacggaaatgccatctaata

SEQ ID NO: 621278 - DNA, 33 bp, Homo sapien
caacttaacagatcactgaaatgccatctaata

SEQ ID NO: 621279 - DNA, 33 bp, Homo sapien
gttgctatccctccagaagaatgaaggctctta

SEQ ID NO: 621280 - DNA, 33 bp, Homo sapien
gttgctatccctccagtagaatgaaggctctta

SEQ ID NO: 621281 - DNA, 33 bp, Homo sapien
tcctgatccccttgcaataagaagcgttacaca

SEQ ID NO: 621282 - DNA, 33 bp, Homo sapien
tcctgatccccttgcagtaagaagcgttacaca

SEQ ID NO: 621283 - DNA, 33 bp, Homo sapien
agctctccacagctgaaatgatacctctagggg

SEQ ID NO: 621284 - DNA, 33 bp, Homo sapien
agctctccacagctgagatgatacctctagggg

SEQ ID NO: 621285 - DNA, 33 bp, Homo sapien
cctcttctcccttccacagtgctgacctagagc

SEQ ID NO: 621286 - DNA, 33 bp, Homo sapien
cctcttctcccttccatagtgctgacctagagc

SEQ ID NO: 621287 - DNA, 33 bp, Homo sapien
tggtattttcctcaaaatgtcatttcttccatg

SEQ ID NO: 621288 - DNA, 33 bp, Homo sapien
tggtattttcctcaaagtgtcatttcttccatg

SEQ ID NO: 621289 - DNA, 33 bp, Homo sapien
aataatttctgtcacactatggatgcccttgct

SEQ ID NO: 621290 - DNA, 33 bp, Homo sapien
aataatttctgtcacattatggatgcccttgct

SEQ ID NO: 621291 - DNA, 33 bp, Homo sapien
acacagggctttctcactcctggacataactga

SEQ ID NO: 621292 - DNA, 33 bp, Homo sapien
acacagggctttctcattcctggacataactga

SEQ ID NO: 621293 - DNA, 33 bp, Homo sapien
atgaaatggtagttgaaaatatttagataaaag

SEQ ID NO: 621294 - DNA, 33 bp, Homo sapien
atgaaatggtagttgacaatatttagataaaag

SEQ ID NO: 621295 - DNA, 33 bp, Homo sapien
gagtcttcatcataaaatctttcatgggcaaag

SEQ ID NO: 621296 - DNA, 33 bp, Homo sapien
gagtcttcatcataaagtctttcatgggcaaag

SEQ ID NO: 621297 - DNA, 33 bp, Homo sapien
gtactaactatagctcagacaatctaaaaattt

SEQ ID NO: 621298 - DNA, 33 bp, Homo sapien
gtactaactatagctcggacaatctaaaaattt

SEQ ID NO: 621299 - DNA, 33 bp, Homo sapien
aaggaaacaataagtaataagcacaaaaactaa

SEQ ID NO: 621300 - DNA, 33 bp, Homo sapien
aaggaaacaataagtagtaagcacaaaaactaa

SEQ ID NO: 621301 - DNA, 33 bp, Homo sapien
aagatattgagaaagaacgtgagggctgcgcag

SEQ ID NO: 621302 - DNA, 33 bp, Homo sapien
aagatattgagaaagagcgtgagggctgcgcag

SEQ ID NO: 621303 - DNA, 33 bp, Homo sapien
agagcagctagaatggaaaccctggtcggtggt

SEQ ID NO: 621304 - DNA, 33 bp, Homo sapien
agagcagctagaatgggaaccctggtcggtggt

SEQ ID NO: 621305 - DNA, 33 bp, Homo sapien
gggagaaacaatgtagaaaaatggttaaaatac

SEQ ID NO: 621306 - DNA, 33 bp, Homo sapien
gggagaaacaatgtagcaaaatggttaaaatac

SEQ ID NO: 621307 - DNA, 33 bp, Homo sapien
tttatgaaggttaaatgaagtcacatggtaaaa

SEQ ID NO: 621308 - DNA, 33 bp, Homo sapien
tttatgaaggttaaattaagtcacatggtaaaa

SEQ ID NO: 621309 - DNA, 33 bp, Homo sapien
gcatcatcacttataccgtaaccaatttggggc

SEQ ID NO: 621310 - DNA, 33 bp, Homo sapien
gcatcatcacttatactgtaaccaatttggggc

SEQ ID NO: 621311 - DNA, 33 bp, Homo sapien
aatctgacaacagtgacaagttgaaagaaccca

SEQ ID NO: 621312 - DNA, 33 bp, Homo sapien
aatctgacaacagtgagaagttgaaagaaccca

SEQ ID NO: 621313 - DNA, 33 bp, Homo sapien
aggctagtaacagcttcaaagtgtttcattttg

SEQ ID NO: 621314 - DNA, 33 bp, Homo sapien
aggctagtaacagcttgaaagtgtttcattttg

SEQ ID NO: 621315 - DNA, 33 bp, Homo sapien
aagctgttactagcctcagatagatgtacatga

SEQ ID NO: 621316 - DNA, 33 bp, Homo sapien
aagctgttactagccttagatagatgtacatga

SEQ ID NO: 621317 - DNA, 33 bp, Homo sapien
tgaatctgtcccccgacacttcttcctcagagg

SEQ ID NO: 621318 - DNA, 33 bp, Homo sapien
tgaatctgtcccccgagacttcttcctcagagg

SEQ ID NO: 621319 - DNA, 33 bp, Homo sapien
ttggagacaaaagtctaaaattctgccagtgct

SEQ ID NO: 621320 - DNA, 33 bp, Homo sapien
ttggagacaaaagtctgaaattctgccagtgct

SEQ ID NO: 621321 - DNA, 33 bp, Homo sapien
cacagtctacatattaagcctggatctaatcgt

SEQ ID NO: 621322 - DNA, 33 bp, Homo sapien
cacagtctacatattaggcctggatctaatcgt

SEQ ID NO: 621323 - DNA, 33 bp, Homo sapien
tgctgacagtgtcatcaagaaaaacaaatgaga

SEQ ID NO: 621324 - DNA, 33 bp, Homo sapien
tgctgacagtgtcatcgagaaaaacaaatgaga

SEQ ID NO: 621325 - DNA, 33 bp, Homo sapien
taggcactcagtatgactatcaaatagcacaga

SEQ ID NO: 621326 - DNA, 33 bp, Homo sapien
taggcactcagtatgattatcaaatagcacaga

SEQ ID NO: 621327 - DNA, 33 bp, Homo sapien
taagttcttttacttacctttgtagcaaattat

SEQ ID NO: 621328 - DNA, 33 bp, Homo sapien
taagttcttttacttatctttgtagcaaattat

SEQ ID NO: 621329 - DNA, 33 bp, Homo sapien
cttagctccaaggaaacaggaaaatctaccaga

SEQ ID NO: 621330 - DNA, 33 bp, Homo sapien
cttagctccaaggaaataggaaaatctaccaga

SEQ ID NO: 621331 - DNA, 33 bp, Homo sapien
ggagcatattagagaaactcactgctgcagtaa

SEQ ID NO: 621332 - DNA, 33 bp, Homo sapien
ggagcatattagagaacctcactgctgcagtaa

SEQ ID NO: 621333 - DNA, 33 bp, Homo sapien
atccagaggtctgtacaactgaagtctttgtgc

SEQ ID NO: 621334 - DNA, 33 bp, Homo sapien
atccagaggtctgtacgactgaagtctttgtgc

SEQ ID NO: 621335 - DNA, 33 bp, Homo sapien
ggcaagcaccacttgaataccagacaaataagc

SEQ ID NO: 621336 - DNA, 33 bp, Homo sapien
ggcaagcaccacttgagtaccagacaaataagc

SEQ ID NO: 621337 - DNA, 33 bp, Homo sapien
tgtattactggcatgactatttcgggattgtat

SEQ ID NO: 621338 - DNA, 33 bp, Homo sapien
tgtattactggcatgagtatttcgggattgtat

SEQ ID NO: 621339 - DNA, 33 bp, Homo sapien
ccttgtctgtcgaagacgagattgacctctaga

SEQ ID NO: 621340 - DNA, 33 bp, Homo sapien
ccttgtctgtcgaagatgagattgacctctaga

SEQ ID NO: 621341 - DNA, 33 bp, Homo sapien
gcctgtcaaatgttaaataagtgttccttgttg

SEQ ID NO: 621342 - DNA, 33 bp, Homo sapien
gcctgtcaaatgttaagtaagtgttccttgttg

SEQ ID NO: 621343 - DNA, 33 bp, Homo sapien
ttggggtagacagaaactctggagtgtatccag

SEQ ID NO: 621344 - DNA, 33 bp, Homo sapien
ttggggtagacagaaattctggagtgtatccag

SEQ ID NO: 621345 - DNA, 33 bp, Homo sapien
gttattccaaagtgaacgtcttaaaacaacaga

SEQ ID NO: 621346 - DNA, 33 bp, Homo sapien
gttattccaaagtgaatgtcttaaaacaacaga

SEQ ID NO: 621347 - DNA, 33 bp, Homo sapien
catcatctgttacaaactcatcataaaagatga

SEQ ID NO: 621348 - DNA, 33 bp, Homo sapien
catcatctgttacaaattcatcataaaagatga

SEQ ID NO: 621349 - DNA, 33 bp, Homo sapien
taatttatcttcccacggagcattctaggttac

SEQ ID NO: 621350 - DNA, 33 bp, Homo sapien
taatttatcttcccactgagcattctaggttac

SEQ ID NO: 621351 - DNA, 33 bp, Homo sapien
aaattagcaaaacttacgacttgtaacctagaa

SEQ ID NO: 621352 - DNA, 33 bp, Homo sapien
aaattagcaaaacttatgacttgtaacctagaa

SEQ ID NO: 621353 - DNA, 33 bp, Homo sapien
acaggctattcacaaaaatggaaaattttcagc

SEQ ID NO: 621354 - DNA, 33 bp, Homo sapien
acaggctattcacaaagatggaaaattttcagc

SEQ ID NO: 621355 - DNA, 33 bp, Homo sapien
cttctaggagggattgcaatgttgagaggtttt

SEQ ID NO: 621356 - DNA, 33 bp, Homo sapien
cttctaggagggattgtaatgttgagaggtttt

SEQ ID NO: 621357 - DNA, 33 bp, Homo sapien
ttttcgtggttaatgacagcttctaagaatcaa

SEQ ID NO: 621358 - DNA, 33 bp, Homo sapien
ttttcgtggttaatgagagcttctaagaatcaa

SEQ ID NO: 621359 - DNA, 33 bp, Homo sapien
ttccaactcctgtgaccccgatggacacagcct

SEQ ID NO: 621360 - DNA, 33 bp, Homo sapien
ttccaactcctgtgactccgatggacacagcct

SEQ ID NO: 621361 - DNA, 33 bp, Homo sapien
tagatcgcccctccaccgcagtagtactctgct

SEQ ID NO: 621362 - DNA, 33 bp, Homo sapien
tagatcgcccctccactgcagtagtactctgct

SEQ ID NO: 621363 - DNA, 33 bp, Homo sapien
cttgctgaccaaaatacagtatctgtccttgac

SEQ ID NO: 621364 - DNA, 33 bp, Homo sapien
cttgctgaccaaaatatagtatctgtccttgac

SEQ ID NO: 621365 - DNA, 33 bp, Homo sapien
ataatgttcatgtttacggaatgatggctatgt

SEQ ID NO: 621366 - DNA, 33 bp, Homo sapien
ataatgttcatgtttatggaatgatggctatgt

SEQ ID NO: 621367 - DNA, 33 bp, Homo sapien
tttccaacattgcacaaaaagaaatatgggatt

SEQ ID NO: 621368 - DNA, 33 bp, Homo sapien
tttccaacattgcacagaaagaaatatgggatt

SEQ ID NO: 621369 - DNA, 33 bp, Homo sapien
caagagtgcctataatcactttccataaaagga

SEQ ID NO: 621370 - DNA, 33 bp, Homo sapien
caagagtgcctataattactttccataaaagga

SEQ ID NO: 621371 - DNA, 33 bp, Homo sapien
ttgaaatagatccatcaaagaagtctgtgaaga

SEQ ID NO: 621372 - DNA, 33 bp, Homo sapien
ttgaaatagatccatcgaagaagtctgtgaaga

SEQ ID NO: 621373 - DNA, 33 bp, Homo sapien
aggtgctcaataatgacctattcaacaaataaa

SEQ ID NO: 621374 - DNA, 33 bp, Homo sapien
aggtgctcaataatgatctattcaacaaataaa

SEQ ID NO: 621375 - DNA, 33 bp, Homo sapien
atccaatcatgttgacacacaatattaactatc

SEQ ID NO: 621376 - DNA, 33 bp, Homo sapien
atccaatcatgttgacgcacaatattaactatc

SEQ ID NO: 621377 - DNA, 33 bp, Homo sapien
ttcccctggcacctaaagaatacaacttactat

SEQ ID NO: 621378 - DNA, 33 bp, Homo sapien
ttcccctggcacctaaggaatacaacttactat

SEQ ID NO: 621379 - DNA, 33 bp, Homo sapien
cagaggaggatgaaacaatctgagggacaactg

SEQ ID NO: 621380 - DNA, 33 bp, Homo sapien
cagaggaggatgaaacgatctgagggacaactg

SEQ ID NO: 621381 - DNA, 33 bp, Homo sapien
gggacaactggagaacaatcagcacatagggac

SEQ ID NO: 621382 - DNA, 33 bp, Homo sapien
gggacaactggagaacgatcagcacatagggac

SEQ ID NO: 621383 - DNA, 33 bp, Homo sapien
aaaagaaatcagggcaactaaatgagaatcaga

SEQ ID NO: 621384 - DNA, 33 bp, Homo sapien
aaaagaaatcagggcacctaaatgagaatcaga

SEQ ID NO: 621385 - DNA, 33 bp, Homo sapien
cagaacctagcaaatactaaatcttcacataca

SEQ ID NO: 621386 - DNA, 33 bp, Homo sapien
cagaacctagcaaatagtaaatcttcacataca

SEQ ID NO: 621387 - DNA, 33 bp, Homo sapien
atatggattgtctatgaatgctttcagtgcaat

SEQ ID NO: 621388 - DNA, 33 bp, Homo sapien
atatggattgtctatggatgctttcagtgcaat

SEQ ID NO: 621389 - DNA, 33 bp, Homo sapien
acgtagattaagccaacagaaagagatcatttt

SEQ ID NO: 621390 - DNA, 33 bp, Homo sapien
acgtagattaagccaatagaaagagatcatttt

SEQ ID NO: 621391 - DNA, 33 bp, Homo sapien
gacataggtattccaacagagttatcaaaataa

SEQ ID NO: 621392 - DNA, 33 bp, Homo sapien
gacataggtattccaatagagttatcaaaataa

SEQ ID NO: 621393 - DNA, 33 bp, Homo sapien
agcctgacagtatcaacgttactctctaaatgc

SEQ ID NO: 621394 - DNA, 33 bp, Homo sapien
agcctgacagtatcaaggttactctctaaatgc

SEQ ID NO: 621395 - DNA, 33 bp, Homo sapien
aaagtgtttataaaatgatcatgcataccaaag

SEQ ID NO: 621396 - DNA, 33 bp, Homo sapien
aaagtgtttataaaattatcatgcataccaaag

SEQ ID NO: 621397 - DNA, 33 bp, Homo sapien
atcaacatgacagatacagtgaaagaatttgaa

SEQ ID NO: 621398 - DNA, 33 bp, Homo sapien
atcaacatgacagatatagtgaaagaatttgaa

SEQ ID NO: 621399 - DNA, 33 bp, Homo sapien
cgtgcatcaacaaaacgcatttctcatcatttc

SEQ ID NO: 621400 - DNA, 33 bp, Homo sapien
cgtgcatcaacaaaactcatttctcatcatttc

SEQ ID NO: 621401 - DNA, 33 bp, Homo sapien
tgtagcacgtacagtaacattcttggcatctag

SEQ ID NO: 621402 - DNA, 33 bp, Homo sapien
tgtagcacgtacagtatcattcttggcatctag

SEQ ID NO: 621403 - DNA, 33 bp, Homo sapien
caatagtatcagaaaacttgaagtcttgcttaa

SEQ ID NO: 621404 - DNA, 33 bp, Homo sapien
caatagtatcagaaaagttgaagtcttgcttaa

SEQ ID NO: 621405 - DNA, 33 bp, Homo sapien
tagctggaatttatatgaattatggatgcttag

SEQ ID NO: 621406 - DNA, 33 bp, Homo sapien
tagctggaatttatattaattatggatgcttag

SEQ ID NO: 621407 - DNA, 33 bp, Homo sapien
aattatggatgcttagaagaaaacctacaaata

SEQ ID NO: 621408 - DNA, 33 bp, Homo sapien
aattatggatgcttaggagaaaacctacaaata

SEQ ID NO: 621409 - DNA, 33 bp, Homo sapien
ctgtgagttcctttataagtagccatgtccagc

SEQ ID NO: 621410 - DNA, 33 bp, Homo sapien
ctgtgagttcctttatgagtagccatgtccagc

SEQ ID NO: 621411 - DNA, 33 bp, Homo sapien
aaagttctcaactccacctatttttcaagaatc

SEQ ID NO: 621412 - DNA, 33 bp, Homo sapien
aaagttctcaactccatctatttttcaagaatc

SEQ ID NO: 621413 - DNA, 33 bp, Homo sapien
tttctcagctgaacaaacttttaaaatttcaaa

SEQ ID NO: 621414 - DNA, 33 bp, Homo sapien
tttctcagctgaacaatcttttaaaatttcaaa

SEQ ID NO: 621415 - DNA, 33 bp, Homo sapien
aatttcaaaatgaagacagcctttgcacttacc

SEQ ID NO: 621416 - DNA, 33 bp, Homo sapien
aatttcaaaatgaagagagcctttgcacttacc

SEQ ID NO: 621417 - DNA, 33 bp, Homo sapien
aagtgcacagttcagtaactattggtaaatgcc

SEQ ID NO: 621418 - DNA, 33 bp, Homo sapien
aagtgcacagttcagtgactattggtaaatgcc

SEQ ID NO: 621419 - DNA, 33 bp, Homo sapien
acaagtagttactttccgaaaggcctgtaaaga

SEQ ID NO: 621420 - DNA, 33 bp, Homo sapien
acaagtagttactttctgaaaggcctgtaaaga

SEQ ID NO: 621421 - DNA, 33 bp, Homo sapien
atactgttacatttgacgacaagaattatgact

SEQ ID NO: 621422 - DNA, 33 bp, Homo sapien
atactgttacatttgatgacaagaattatgact

SEQ ID NO: 621423 - DNA, 33 bp, Homo sapien
ctgaactgacaaggaaacttgattgaattttta

SEQ ID NO: 621424 - DNA, 33 bp, Homo sapien
ctgaactgacaaggaagcttgattgaattttta

SEQ ID NO: 621425 - DNA, 33 bp, Homo sapien
tctgtttttctgaatgacaacattagtggtaca

SEQ ID NO: 621426 - DNA, 33 bp, Homo sapien
tctgtttttctgaatgccaacattagtggtaca

SEQ ID NO: 621427 - DNA, 33 bp, Homo sapien
cttcttaatgtgatcacctcacaaaatgatttt

SEQ ID NO: 621428 - DNA, 33 bp, Homo sapien
cttcttaatgtgatcagctcacaaaatgatttt

SEQ ID NO: 621429 - DNA, 33 bp, Homo sapien
ggacactggagattgaaaatagaggtcaggaac

SEQ ID NO: 621430 - DNA, 33 bp, Homo sapien
ggacactggagattgacaatagaggtcaggaac

SEQ ID NO: 621431 - DNA, 33 bp, Homo sapien
atactttattgctttccagtcacaggaatttgt

SEQ ID NO: 621432 - DNA, 33 bp, Homo sapien
atactttattgctttctagtcacaggaatttgt

SEQ ID NO: 621433 - DNA, 33 bp, Homo sapien
tgaggtatgaaacttacacaaattcctgtgact

SEQ ID NO: 621434 - DNA, 33 bp, Homo sapien
tgaggtatgaaacttatacaaattcctgtgact

SEQ ID NO: 621435 - DNA, 33 bp, Homo sapien
aaaaaatatacttgtacatggatctgttaagag

SEQ ID NO: 621436 - DNA, 33 bp, Homo sapien
aaaaaatatacttgtagatggatctgttaagag

SEQ ID NO: 621437 - DNA, 33 bp, Homo sapien
acatctactgggattgcagcataaaatacaggt

SEQ ID NO: 621438 - DNA, 33 bp, Homo sapien
acatctactgggattgtagcataaaatacaggt

SEQ ID NO: 621439 - DNA, 33 bp, Homo sapien
ttgtttctatttcatgcagttaataaagttact

SEQ ID NO: 621440 - DNA, 33 bp, Homo sapien
ttgtttctatttcatgtagttaataaagttact

SEQ ID NO: 621441 - DNA, 33 bp, Homo sapien
tcaccttcatttcctaccatacctgaaagagaa

SEQ ID NO: 621442 - DNA, 33 bp, Homo sapien
tcaccttcatttcctatcatacctgaaagagaa

SEQ ID NO: 621443 - DNA, 33 bp, Homo sapien
tttgtttgtttgagacgcagtcacactctgtag

SEQ ID NO: 621444 - DNA, 33 bp, Homo sapien
tttgtttgtttgagactcagtcacactctgtag

SEQ ID NO: 621445 - DNA, 33 bp, Homo sapien
ggtgtgtctagaaataaagtatgacagctaggg

SEQ ID NO: 621446 - DNA, 33 bp, Homo sapien
ggtgtgtctagaaatatagtatgacagctaggg

SEQ ID NO: 621447 - DNA, 33 bp, Homo sapien
ctctggcccaagccaaatccagcaatatcatcc

SEQ ID NO: 621448 - DNA, 33 bp, Homo sapien
ctctggcccaagccaagtccagcaatatcatcc

SEQ ID NO: 621449 - DNA, 33 bp, Homo sapien
atggcatcatgcaacacgtactcttttgtacct

SEQ ID NO: 621450 - DNA, 33 bp, Homo sapien
atggcatcatgcaacatgtactcttttgtacct

SEQ ID NO: 621451 - DNA, 33 bp, Homo sapien
aatattagatatgctacgtgttttgcctttgct

SEQ ID NO: 621452 - DNA, 33 bp, Homo sapien
aatattagatatgctaggtgttttgcctttgct

SEQ ID NO: 621453 - DNA, 33 bp, Homo sapien
tatttgccgtttcaagcacctatgagacaaaca

SEQ ID NO: 621454 - DNA, 33 bp, Homo sapien
tatttgccgtttcaaggacctatgagacaaaca

SEQ ID NO: 621455 - DNA, 33 bp, Homo sapien
tcttgccttcaccaaacgaacttgtgtttcaaa

SEQ ID NO: 621456 - DNA, 33 bp, Homo sapien
tcttgccttcaccaaatgaacttgtgtttcaaa

SEQ ID NO: 621457 - DNA, 33 bp, Homo sapien
atgagtaatagtagcactgaagtgaaaaacagt

SEQ ID NO: 621458 - DNA, 33 bp, Homo sapien
atgagtaatagtagcattgaagtgaaaaacagt

SEQ ID NO: 621459 - DNA, 33 bp, Homo sapien
tattattgtggaaagaaaacatgatgtcataag

SEQ ID NO: 621460 - DNA, 33 bp, Homo sapien
tattattgtggaaagacaacatgatgtcataag

SEQ ID NO: 621461 - DNA, 33 bp, Homo sapien
agaaattctcactcaacggcttgacatatacca

SEQ ID NO: 621462 - DNA, 33 bp, Homo sapien
agaaattctcactcaatggcttgacatatacca

SEQ ID NO: 621463 - DNA, 33 bp, Homo sapien
tgatctaatggcaataccaacagtgcactgtac

SEQ ID NO: 621464 - DNA, 33 bp, Homo sapien
tgatctaatggcaatagcaacagtgcactgtac

SEQ ID NO: 621465 - DNA, 33 bp, Homo sapien
caagtatttactgttgaagacgtgccataatac

SEQ ID NO: 621466 - DNA, 33 bp, Homo sapien
caagtatttactgttggagacgtgccataatac

SEQ ID NO: 621467 - DNA, 33 bp, Homo sapien
atccatgcaggcatgcactataactcactcata

SEQ ID NO: 621468 - DNA, 33 bp, Homo sapien
atccatgcaggcatgcgctataactcactcata

SEQ ID NO: 621469 - DNA, 33 bp, Homo sapien
gttgcttttaggaaagaagaatatctgaaaatt

SEQ ID NO: 621470 - DNA, 33 bp, Homo sapien
gttgcttttaggaaagtagaatatctgaaaatt

SEQ ID NO: 621471 - DNA, 33 bp, Homo sapien
ctaaactgatgaagcagaatgttggaaatgaat

SEQ ID NO: 621472 - DNA, 33 bp, Homo sapien
ctaaactgatgaagcataatgttggaaatgaat

SEQ ID NO: 621473 - DNA, 33 bp, Homo sapien
ggaaagccaggagatgaagagcaattagaagag

SEQ ID NO: 621474 - DNA, 33 bp, Homo sapien
ggaaagccaggagatggagagcaattagaagag

SEQ ID NO: 621475 - DNA, 33 bp, Homo sapien
ggatagaaacaaagaacagtgaccctaaaatag

SEQ ID NO: 621476 - DNA, 33 bp, Homo sapien
ggatagaaacaaagaatagtgaccctaaaatag

SEQ ID NO: 621477 - DNA, 33 bp, Homo sapien
acttgattggattgaacgatatacaaagtattg

SEQ ID NO: 621478 - DNA, 33 bp, Homo sapien
acttgattggattgaaggatatacaaagtattg

SEQ ID NO: 621479 - DNA, 33 bp, Homo sapien
catgcaaatcagtccaaagcatatagtaagtac

SEQ ID NO: 621480 - DNA, 33 bp, Homo sapien
catgcaaatcagtccagagcatatagtaagtac

SEQ ID NO: 621481 - DNA, 33 bp, Homo sapien
ttactttataacacttaaaatgagcaagtctaa

SEQ ID NO: 621482 - DNA, 33 bp, Homo sapien
ttactttataacactttaaatgagcaagtctaa

SEQ ID NO: 621483 - DNA, 33 bp, Homo sapien
ctgaagctattagaagcaaaaggatggcataag

SEQ ID NO: 621484 - DNA, 33 bp, Homo sapien
ctgaagctattagaaggaaaaggatggcataag

SEQ ID NO: 621485 - DNA, 33 bp, Homo sapien
cttctgtcccatgaaacagtcagacccaagcca

SEQ ID NO: 621486 - DNA, 33 bp, Homo sapien
cttctgtcccatgaaatagtcagacccaagcca

SEQ ID NO: 621487 - DNA, 33 bp, Homo sapien
tgtcaacagctgatcactaacattctttctctg

SEQ ID NO: 621488 - DNA, 33 bp, Homo sapien
tgtcaacagctgatcagtaacattctttctctg

SEQ ID NO: 621489 - DNA, 33 bp, Homo sapien
gcagctagtattgaaggagagctttgtctaaaa

SEQ ID NO: 621490 - DNA, 33 bp, Homo sapien
gcagctagtattgaagtagagctttgtctaaaa

SEQ ID NO: 621491 - DNA, 33 bp, Homo sapien
aaaacaagtggctcacaagactgagtgttacca

SEQ ID NO: 621492 - DNA, 33 bp, Homo sapien
aaaacaagtggctcaccagactgagtgttacca

SEQ ID NO: 621493 - DNA, 33 bp, Homo sapien
catctctgcttccttacggtcttctcttgatgc

SEQ ID NO: 621494 - DNA, 33 bp, Homo sapien
catctctgcttccttatggtcttctcttgatgc

SEQ ID NO: 621495 - DNA, 33 bp, Homo sapien
atacttgcttggaaaaattatctgtaaatataa

SEQ ID NO: 621496 - DNA, 33 bp, Homo sapien
atacttgcttggaaaagttatctgtaaatataa

SEQ ID NO: 621497 - DNA, 33 bp, Homo sapien
cacttgggctcttaaggcactggcttcagttgg

SEQ ID NO: 621498 - DNA, 33 bp, Homo sapien
cacttgggctcttaagtcactggcttcagttgg

SEQ ID NO: 621499 - DNA, 33 bp, Homo sapien
agaatatttagtgtagccacaggaccgatattg

SEQ ID NO: 621500 - DNA, 33 bp, Homo sapien
agaatatttagtgtagtcacaggaccgatattg

SEQ ID NO: 621501 - DNA, 33 bp, Homo sapien
cagattggcacgtggaacctggtcagtgaactt

SEQ ID NO: 621502 - DNA, 33 bp, Homo sapien
cagattggcacgtggatcctggtcagtgaactt

SEQ ID NO: 621503 - DNA, 33 bp, Homo sapien
tactgtgtcaaagtcaggcaaaaacaatggtga

SEQ ID NO: 621504 - DNA, 33 bp, Homo sapien
tactgtgtcaaagtcatgcaaaaacaatggtga

SEQ ID NO: 621505 - DNA, 33 bp, Homo sapien
tgttatgggagataaactgtaccacctagtaaa

SEQ ID NO: 621506 - DNA, 33 bp, Homo sapien
tgttatgggagataaattgtaccacctagtaaa

SEQ ID NO: 621507 - DNA, 33 bp, Homo sapien
cataaatattaggttgcaaggaaactggtcatc

SEQ ID NO: 621508 - DNA, 33 bp, Homo sapien
cataaatattaggttgtaaggaaactggtcatc

SEQ ID NO: 621509 - DNA, 33 bp, Homo sapien
atgcccttaacacataatatctattctacacaa

SEQ ID NO: 621510 - DNA, 33 bp, Homo sapien
atgcccttaacacatagtatctattctacacaa

SEQ ID NO: 621511 - DNA, 33 bp, Homo sapien
tccttacttcatccaactgttgtgtagaataga

SEQ ID NO: 621512 - DNA, 33 bp, Homo sapien
tccttacttcatccaagtgttgtgtagaataga

SEQ ID NO: 621513 - DNA, 33 bp, Homo sapien
ctttcaaatgtaagcaataattgtccttacttc

SEQ ID NO: 621514 - DNA, 33 bp, Homo sapien
ctttcaaatgtaagcagtaattgtccttacttc

SEQ ID NO: 621515 - DNA, 33 bp, Homo sapien
ttgatgcccttattagccagcttgagtctctct

SEQ ID NO: 621516 - DNA, 33 bp, Homo sapien
ttgatgcccttattagtcagcttgagtctctct

SEQ ID NO: 621517 - DNA, 33 bp, Homo sapien
atatatcaacaattggaaaacagcttttgatag

SEQ ID NO: 621518 - DNA, 33 bp, Homo sapien
atatatcaacaattggcaaacagcttttgatag

SEQ ID NO: 621519 - DNA, 33 bp, Homo sapien
cagtgtattgatcttacacccccaaacctccag

SEQ ID NO: 621520 - DNA, 33 bp, Homo sapien
cagtgtattgatcttagacccccaaacctccag

SEQ ID NO: 621521 - DNA, 33 bp, Homo sapien
tttctgtccactacccagcaagaagatgtaatg

SEQ ID NO: 621522 - DNA, 33 bp, Homo sapien
tttctgtccactacccggcaagaagatgtaatg

SEQ ID NO: 621523 - DNA, 33 bp, Homo sapien
aatccagagatgaacaaatgacagttatatgtt

SEQ ID NO: 621524 - DNA, 33 bp, Homo sapien
aatccagagatgaacatatgacagttatatgtt

SEQ ID NO: 621525 - DNA, 33 bp, Homo sapien
ttacaacctgctggctaaagaatccttgagcct

SEQ ID NO: 621526 - DNA, 33 bp, Homo sapien
ttacaacctgctggcttaagaatccttgagcct

SEQ ID NO: 621527 - DNA, 33 bp, Homo sapien
agggtaatttaggtaacgtatttagtgcaaaca

SEQ ID NO: 621528 - DNA, 33 bp, Homo sapien
agggtaatttaggtaatgtatttagtgcaaaca

SEQ ID NO: 621529 - DNA, 33 bp, Homo sapien
aaattattgcttctgagatgttatttactacat

SEQ ID NO: 621530 - DNA, 33 bp, Homo sapien
aaattattgcttctgatatgttatttactacat

SEQ ID NO: 621531 - DNA, 33 bp, Homo sapien
aggttaaaataggcgaactctgtgggagatctg

SEQ ID NO: 621532 - DNA, 33 bp, Homo sapien
aggttaaaataggcgacctctgtgggagatctg

SEQ ID NO: 621533 - DNA, 33 bp, Homo sapien
ttctatagatctacaccaggcctggcactcctt

SEQ ID NO: 621534 - DNA, 33 bp, Homo sapien
ttctatagatctacactaggcctggcactcctt

SEQ ID NO: 621535 - DNA, 33 bp, Homo sapien
tacctacacagaaaccaagctaaaaatgttgat

SEQ ID NO: 621536 - DNA, 33 bp, Homo sapien
tacctacacagaaacctagctaaaaatgttgat

SEQ ID NO: 621537 - DNA, 33 bp, Homo sapien
tattaagaaaaaaagccgagtagtttggtcttt

SEQ ID NO: 621538 - DNA, 33 bp, Homo sapien
tattaagaaaaaaagctgagtagtttggtcttt

SEQ ID NO: 621539 - DNA, 33 bp, Homo sapien
tggagcccagattaagaccaaattcatcatacc

SEQ ID NO: 621540 - DNA, 33 bp, Homo sapien
tggagcccagattaaggccaaattcatcatacc

SEQ ID NO: 621541 - DNA, 33 bp, Homo sapien
atgatggtgtgctaaaatcacaatatgcatagc

SEQ ID NO: 621542 - DNA, 33 bp, Homo sapien
atgatggtgtgctaaactcacaatatgcatagc

SEQ ID NO: 621543 - DNA, 33 bp, Homo sapien
tctactgcttaaaaggaagaaaggaatgcattt

SEQ ID NO: 621544 - DNA, 33 bp, Homo sapien
tctactgcttaaaagggagaaaggaatgcattt

SEQ ID NO: 621545 - DNA, 33 bp, Homo sapien
gaagtttgagaagagacagataatgtaggctag

SEQ ID NO: 621546 - DNA, 33 bp, Homo sapien
gaagtttgagaagagagagataatgtaggctag

SEQ ID NO: 621547 - DNA, 33 bp, Homo sapien
ttaaatgtacaatacactcagcaataacatccc

SEQ ID NO: 621548 - DNA, 33 bp, Homo sapien
ttaaatgtacaatacagtcagcaataacatccc

SEQ ID NO: 621549 - DNA, 33 bp, Homo sapien
aataggttttgttgcacataattctagttttaa

SEQ ID NO: 621550 - DNA, 33 bp, Homo sapien
aataggttttgttgcagataattctagttttaa

SEQ ID NO: 621551 - DNA, 33 bp, Homo sapien
catttcaaatgagtggaaagttccttttgaagt

SEQ ID NO: 621552 - DNA, 33 bp, Homo sapien
catttcaaatgagtggtaagttccttttgaagt

SEQ ID NO: 621553 - DNA, 33 bp, Homo sapien
tatattcagtgaccacaacaaattccttgacac

SEQ ID NO: 621554 - DNA, 33 bp, Homo sapien
tatattcagtgaccacgacaaattccttgacac

SEQ ID NO: 621555 - DNA, 33 bp, Homo sapien
ttaaggactaactctacattatgcaccaaaaat

SEQ ID NO: 621556 - DNA, 33 bp, Homo sapien
ttaaggactaactctatattatgcaccaaaaat

SEQ ID NO: 621557 - DNA, 33 bp, Homo sapien
attgttactactggagaagaactgtgctaatcc

SEQ ID NO: 621558 - DNA, 33 bp, Homo sapien
attgttactactggaggagaactgtgctaatcc

SEQ ID NO: 621559 - DNA, 33 bp, Homo sapien
aagtcttttatacgtcagaaataattgatgagc

SEQ ID NO: 621560 - DNA, 33 bp, Homo sapien
aagtcttttatacgtcggaaataattgatgagc

SEQ ID NO: 621561 - DNA, 33 bp, Homo sapien
gggacagaagggaatacgctgcctgaaggggag

SEQ ID NO: 621562 - DNA, 33 bp, Homo sapien
gggacagaagggaatatgctgcctgaaggggag

SEQ ID NO: 621563 - DNA, 33 bp, Homo sapien
atgcagatcccagctaaaatgagatgtcacctc

SEQ ID NO: 621564 - DNA, 33 bp, Homo sapien
atgcagatcccagctacaatgagatgtcacctc

SEQ ID NO: 621565 - DNA, 33 bp, Homo sapien
acctatggcaaatgtaacccatgtgtgatgaat

SEQ ID NO: 621566 - DNA, 33 bp, Homo sapien
acctatggcaaatgtaccccatgtgtgatgaat

SEQ ID NO: 621567 - DNA, 33 bp, Homo sapien
agtataaatgaattcaatacaggtagatttcag

SEQ ID NO: 621568 - DNA, 33 bp, Homo sapien
agtataaatgaattcagtacaggtagatttcag

SEQ ID NO: 621569 - DNA, 33 bp, Homo sapien
actagctaacttgaacaattaatgtagggttga

SEQ ID NO: 621570 - DNA, 33 bp, Homo sapien
actagctaacttgaaccattaatgtagggttga

SEQ ID NO: 621571 - DNA, 33 bp, Homo sapien
ctttatacaaggaaaaatttggccggttttcat

SEQ ID NO: 621572 - DNA, 33 bp, Homo sapien
ctttatacaaggaaaattttggccggttttcat

SEQ ID NO: 621573 - DNA, 33 bp, Homo sapien
ctcagctaaatgaccccgaaactgtagaatttt

SEQ ID NO: 621574 - DNA, 33 bp, Homo sapien
ctcagctaaatgaccctgaaactgtagaatttt

SEQ ID NO: 621575 - DNA, 33 bp, Homo sapien
tctacccctatgatccaatcattttccaccagg

SEQ ID NO: 621576 - DNA, 33 bp, Homo sapien
tctacccctatgatcccatcattttccaccagg

SEQ ID NO: 621577 - DNA, 33 bp, Homo sapien
tagttacaatatgagcccaagaaagtgagggat

SEQ ID NO: 621578 - DNA, 33 bp, Homo sapien
tagttacaatatgagcgcaagaaagtgagggat

SEQ ID NO: 621579 - DNA, 33 bp, Homo sapien
aacatattcacgtaaactcttatacataaatat

SEQ ID NO: 621580 - DNA, 33 bp, Homo sapien
aacatattcacgtaaattcttatacataaatat

SEQ ID NO: 621581 - DNA, 33 bp, Homo sapien
tccatttacctaatttcaaatgagttgagcatc

SEQ ID NO: 621582 - DNA, 33 bp, Homo sapien
tccatttacctaattttaaatgagttgagcatc

SEQ ID NO: 621583 - DNA, 33 bp, Homo sapien
gtcctaagccaaaatccgaaatagtgaggggaa

SEQ ID NO: 621584 - DNA, 33 bp, Homo sapien
gtcctaagccaaaatctgaaatagtgaggggaa

SEQ ID NO: 621585 - DNA, 33 bp, Homo sapien
ctacaatgattttagaactcgctgatacttttt

SEQ ID NO: 621586 - DNA, 33 bp, Homo sapien
ctacaatgattttagagctcgctgatacttttt

SEQ ID NO: 621587 - DNA, 33 bp, Homo sapien
tcaaaaaagaaacaggaacacttttgcaaagaa

SEQ ID NO: 621588 - DNA, 33 bp, Homo sapien
tcaaaaaagaaacagggacacttttgcaaagaa

SEQ ID NO: 621589 - DNA, 33 bp, Homo sapien
agaaccatactcataacccttctgatgcacttc

SEQ ID NO: 621590 - DNA, 33 bp, Homo sapien
agaaccatactcataagccttctgatgcacttc

SEQ ID NO: 621591 - DNA, 33 bp, Homo sapien
tatttttctgaggtaaaggcgattgattggtgt

SEQ ID NO: 621592 - DNA, 33 bp, Homo sapien
tatttttctgaggtaagggcgattgattggtgt

SEQ ID NO: 621593 - DNA, 33 bp, Homo sapien
aatgttatttaaaagccgaaattgaaatgcaac

SEQ ID NO: 621594 - DNA, 33 bp, Homo sapien
aatgttatttaaaagctgaaattgaaatgcaac

SEQ ID NO: 621595 - DNA, 33 bp, Homo sapien
tgctgaagttgagattcaaaacctgcaaactga

SEQ ID NO: 621596 - DNA, 33 bp, Homo sapien
tgctgaagttgagattgaaaacctgcaaactga

SEQ ID NO: 621597 - DNA, 33 bp, Homo sapien
tttggcagagtcaagcaagcataaaatttaaag

SEQ ID NO: 621598 - DNA, 33 bp, Homo sapien
tttggcagagtcaagcgagcataaaatttaaag

SEQ ID NO: 621599 - DNA, 33 bp, Homo sapien
catccctactttcaataacctcaaaatgtacat

SEQ ID NO: 621600 - DNA, 33 bp, Homo sapien
catccctactttcaatgacctcaaaatgtacat

SEQ ID NO: 621601 - DNA, 33 bp, Homo sapien
acatggagttaacacacatggaagaatgggtaa

SEQ ID NO: 621602 - DNA, 33 bp, Homo sapien
acatggagttaacacatatggaagaatgggtaa

SEQ ID NO: 621603 - DNA, 33 bp, Homo sapien
gatcagcagcttgctacagagtcagactcagat

SEQ ID NO: 621604 - DNA, 33 bp, Homo sapien
gatcagcagcttgctagagagtcagactcagat

SEQ ID NO: 621605 - DNA, 33 bp, Homo sapien
agaaactgagttaataaatgtgtgatgtgctca

SEQ ID NO: 621606 - DNA, 33 bp, Homo sapien
agaaactgagttaatatatgtgtgatgtgctca

SEQ ID NO: 621607 - DNA, 33 bp, Homo sapien
tatgtcagctcagttaactctctaatgcagcct

SEQ ID NO: 621608 - DNA, 33 bp, Homo sapien
tatgtcagctcagttagctctctaatgcagcct

SEQ ID NO: 621609 - DNA, 33 bp, Homo sapien
agctttgagttttagccccttttctgcctcaat

SEQ ID NO: 621610 - DNA, 33 bp, Homo sapien
agctttgagttttagctccttttctgcctcaat

SEQ ID NO: 621611 - DNA, 33 bp, Homo sapien
tgttggttctttcacacggctaatttaaagatc

SEQ ID NO: 621612 - DNA, 33 bp, Homo sapien
tgttggttctttcacatggctaatttaaagatc

SEQ ID NO: 621613 - DNA, 33 bp, Homo sapien
tcttttgtgcaaaaataatgtcctaatgtattg

SEQ ID NO: 621614 - DNA, 33 bp, Homo sapien
tcttttgtgcaaaaattatgtcctaatgtattg

SEQ ID NO: 621615 - DNA, 33 bp, Homo sapien
atattggatgaaaatacgcgttgtacgtttaaa

SEQ ID NO: 621616 - DNA, 33 bp, Homo sapien
atattggatgaaaatatgcgttgtacgtttaaa

SEQ ID NO: 621617 - DNA, 33 bp, Homo sapien
tgaggattgatccaagaagaaataagacctcca

SEQ ID NO: 621618 - DNA, 33 bp, Homo sapien
tgaggattgatccaagcagaaataagacctcca

SEQ ID NO: 621619 - DNA, 33 bp, Homo sapien
gaagaggatgagctacgcagagaatagattaca

SEQ ID NO: 621620 - DNA, 33 bp, Homo sapien
gaagaggatgagctactcagagaatagattaca

SEQ ID NO: 621621 - DNA, 33 bp, Homo sapien
atctacgtaataaaacaacctttgatgctgtgc

SEQ ID NO: 621622 - DNA, 33 bp, Homo sapien
atctacgtaataaaaccacctttgatgctgtgc

SEQ ID NO: 621623 - DNA, 33 bp, Homo sapien
atatttttccttctgaactccagatactatttc

SEQ ID NO: 621624 - DNA, 33 bp, Homo sapien
atatttttccttctgacctccagatactatttc

SEQ ID NO: 621625 - DNA, 33 bp, Homo sapien
atgatattcagtgagacataatagaacagatgg

SEQ ID NO: 621626 - DNA, 33 bp, Homo sapien
atgatattcagtgagagataatagaacagatgg

SEQ ID NO: 621627 - DNA, 33 bp, Homo sapien
ggttaagtgtcttgctcaaggtcatacagatgg

SEQ ID NO: 621628 - DNA, 33 bp, Homo sapien
ggttaagtgtcttgctgaaggtcatacagatgg

SEQ ID NO: 621629 - DNA, 33 bp, Homo sapien
tgctttgggtcattaactcctccctgtaaggga

SEQ ID NO: 621630 - DNA, 33 bp, Homo sapien
tgctttgggtcattaagtcctccctgtaaggga

SEQ ID NO: 621631 - DNA, 33 bp, Homo sapien
agaaatattgactaaaatgaattctgaagattg

SEQ ID NO: 621632 - DNA, 33 bp, Homo sapien
agaaatattgactaaagtgaattctgaagattg

SEQ ID NO: 621633 - DNA, 33 bp, Homo sapien
gcagcacaataaggtgaacatagccatacccca

SEQ ID NO: 621634 - DNA, 33 bp, Homo sapien
gcagcacaataaggtggacatagccatacccca

SEQ ID NO: 621635 - DNA, 33 bp, Homo sapien
tttggaatagtcaggaagcttttgagattgagg

SEQ ID NO: 621636 - DNA, 33 bp, Homo sapien
tttggaatagtcaggaggcttttgagattgagg

SEQ ID NO: 621637 - DNA, 33 bp, Homo sapien
tgttggctacatgaacagtatgaggtaatgata

SEQ ID NO: 621638 - DNA, 33 bp, Homo sapien
tgttggctacatgaacggtatgaggtaatgata

SEQ ID NO: 621639 - DNA, 33 bp, Homo sapien
tgcttcatgtctgatacgttgatttttagaagt

SEQ ID NO: 621640 - DNA, 33 bp, Homo sapien
tgcttcatgtctgatatgttgatttttagaagt

SEQ ID NO: 621641 - DNA, 33 bp, Homo sapien
gggcaaatctaagaaacgtgagaagcagataga

SEQ ID NO: 621642 - DNA, 33 bp, Homo sapien
gggcaaatctaagaaaggtgagaagcagataga

SEQ ID NO: 621643 - DNA, 33 bp, Homo sapien
tctcctcatctcaaaaagattactgtcccaatg

SEQ ID NO: 621644 - DNA, 33 bp, Homo sapien
tctcctcatctcaaaaggattactgtcccaatg

SEQ ID NO: 621645 - DNA, 33 bp, Homo sapien
cacctggtaaatagcaagtcacagcaggggtag

SEQ ID NO: 621646 - DNA, 33 bp, Homo sapien
cacctggtaaatagcacgtcacagcaggggtag

SEQ ID NO: 621647 - DNA, 33 bp, Homo sapien
caaactctacagctaacgtaaatgcctaacaat

SEQ ID NO: 621648 - DNA, 33 bp, Homo sapien
caaactctacagctaatgtaaatgcctaacaat

SEQ ID NO: 621649 - DNA, 33 bp, Homo sapien
gaatcaggaactagaggagcgacccagcaatct

SEQ ID NO: 621650 - DNA, 33 bp, Homo sapien
gaatcaggaactagagtagcgacccagcaatct

SEQ ID NO: 621651 - DNA, 33 bp, Homo sapien
ggctttgaagcaacaaatacatctaagagaggt

SEQ ID NO: 621652 - DNA, 33 bp, Homo sapien
ggctttgaagcaacaattacatctaagagaggt

SEQ ID NO: 621653 - DNA, 33 bp, Homo sapien
taggtaccttcattcaagctagaattgagtcca

SEQ ID NO: 621654 - DNA, 33 bp, Homo sapien
taggtaccttcattcaggctagaattgagtcca

SEQ ID NO: 621655 - DNA, 33 bp, Homo sapien
aggacatggtccagcactcaggaaccagtgtgg

SEQ ID NO: 621656 - DNA, 33 bp, Homo sapien
aggacatggtccagcattcaggaaccagtgtgg

SEQ ID NO: 621657 - DNA, 33 bp, Homo sapien
tgtgtggtgtgagaacagagaaagaaaaagttt

SEQ ID NO: 621658 - DNA, 33 bp, Homo sapien
tgtgtggtgtgagaacggagaaagaaaaagttt

SEQ ID NO: 621659 - DNA, 33 bp, Homo sapien
cctgagttggtgtacaaagttctaattctaagc

SEQ ID NO: 621660 - DNA, 33 bp, Homo sapien
cctgagttggtgtacacagttctaattctaagc

SEQ ID NO: 621661 - DNA, 33 bp, Homo sapien
tcaggtctattttgtaggttttctccatcccta

SEQ ID NO: 621662 - DNA, 33 bp, Homo sapien
tcaggtctattttgtatgttttctccatcccta

SEQ ID NO: 621663 - DNA, 33 bp, Homo sapien
tatggagtatcataccaacaaggcagataacag

SEQ ID NO: 621664 - DNA, 33 bp, Homo sapien
tatggagtatcatacctacaaggcagataacag

SEQ ID NO: 621665 - DNA, 33 bp, Homo sapien
ttcctctcagcttaaacaaaagtgtctgctact

SEQ ID NO: 621666 - DNA, 33 bp, Homo sapien
ttcctctcagcttaaagaaaagtgtctgctact

SEQ ID NO: 621667 - DNA, 33 bp, Homo sapien
cctgttgccagtgaataatcagagcagtggcat

SEQ ID NO: 621668 - DNA, 33 bp, Homo sapien
cctgttgccagtgaattatcagagcagtggcat

SEQ ID NO: 621669 - DNA, 33 bp, Homo sapien
aatagtgaattttggaaggaaatctctttgcga

SEQ ID NO: 621670 - DNA, 33 bp, Homo sapien
aatagtgaattttggagggaaatctctttgcga

SEQ ID NO: 621671 - DNA, 33 bp, Homo sapien
ctcagtgaggaagaataagaagtttcactcaca

SEQ ID NO: 621672 - DNA, 33 bp, Homo sapien
ctcagtgaggaagaatgagaagtttcactcaca

SEQ ID NO: 621673 - DNA, 33 bp, Homo sapien
ataagccttaccctcaatagtgaaaggaaacag

SEQ ID NO: 621674 - DNA, 33 bp, Homo sapien
ataagccttaccctcagtagtgaaaggaaacag

SEQ ID NO: 621675 - DNA, 33 bp, Homo sapien
gtgtttcctatacaaactttggtcatgtgcata

SEQ ID NO: 621676 - DNA, 33 bp, Homo sapien
gtgtttcctatacaaattttggtcatgtgcata

SEQ ID NO: 621677 - DNA, 33 bp, Homo sapien
cattaacaaccttaaccgggagaatgcttccta

SEQ ID NO: 621678 - DNA, 33 bp, Homo sapien
cattaacaaccttaactgggagaatgcttccta

SEQ ID NO: 621679 - DNA, 33 bp, Homo sapien
ctatgcgttaaaaggaaagaacgatgagttcct

SEQ ID NO: 621680 - DNA, 33 bp, Homo sapien
ctatgcgttaaaaggacagaacgatgagttcct

SEQ ID NO: 621681 - DNA, 33 bp, Homo sapien
ttaataaaagatggaacacttttgcattctagc

SEQ ID NO: 621682 - DNA, 33 bp, Homo sapien
ttaataaaagatggaagacttttgcattctagc

SEQ ID NO: 621683 - DNA, 33 bp, Homo sapien
ctctcttcagcccagacgctgccttgagaattg

SEQ ID NO: 621684 - DNA, 33 bp, Homo sapien
ctctcttcagcccagatgctgccttgagaattg

SEQ ID NO: 621685 - DNA, 33 bp, Homo sapien
tgcaattagatgaaaaatccacttccatatatg

SEQ ID NO: 621686 - DNA, 33 bp, Homo sapien
tgcaattagatgaaaagtccacttccatatatg

SEQ ID NO: 621687 - DNA, 33 bp, Homo sapien
aaatacgtttgaaaatcatgcttgcagtttatt

SEQ ID NO: 621688 - DNA, 33 bp, Homo sapien
aaatacgtttgaaaattatgcttgcagtttatt

SEQ ID NO: 621689 - DNA, 33 bp, Homo sapien
aaagggcttatcgagaagacaacagaaatgaag

SEQ ID NO: 621690 - DNA, 33 bp, Homo sapien
aaagggcttatcgagaggacaacagaaatgaag

SEQ ID NO: 621691 - DNA, 33 bp, Homo sapien
cattactgaatgtatacctttgatggggttaaa

SEQ ID NO: 621692 - DNA, 33 bp, Homo sapien
cattactgaatgtatatctttgatggggttaaa

SEQ ID NO: 621693 - DNA, 33 bp, Homo sapien
agaacaagcactgttaactgggtaaatgactca

SEQ ID NO: 621694 - DNA, 33 bp, Homo sapien
agaacaagcactgttatctgggtaaatgactca

SEQ ID NO: 621695 - DNA, 33 bp, Homo sapien
atctccagaacttttacgtcgtctaattctgat

SEQ ID NO: 621696 - DNA, 33 bp, Homo sapien
atctccagaacttttatgtcgtctaattctgat

SEQ ID NO: 621697 - DNA, 33 bp, Homo sapien
tcttagctactctgaacttactttcaaaaatga

SEQ ID NO: 621698 - DNA, 33 bp, Homo sapien
tcttagctactctgaagttactttcaaaaatga

SEQ ID NO: 621699 - DNA, 33 bp, Homo sapien
gctgatacttcaaacacatattacctgactaaa

SEQ ID NO: 621700 - DNA, 33 bp, Homo sapien
gctgatacttcaaacatatattacctgactaaa

SEQ ID NO: 621701 - DNA, 33 bp, Homo sapien
catgccagagaactcacaagcatggctgatact

SEQ ID NO: 621702 - DNA, 33 bp, Homo sapien
catgccagagaactcagaagcatggctgatact

SEQ ID NO: 621703 - DNA, 33 bp, Homo sapien
tgatggtggtactaaaaacaggcatatctcatt

SEQ ID NO: 621704 - DNA, 33 bp, Homo sapien
tgatggtggtactaaatacaggcatatctcatt

SEQ ID NO: 621705 - DNA, 33 bp, Homo sapien
cgaaacattcagaatcccaatgtataagttaca

SEQ ID NO: 621706 - DNA, 33 bp, Homo sapien
cgaaacattcagaatctcaatgtataagttaca

SEQ ID NO: 621707 - DNA, 33 bp, Homo sapien
ctaggacttagagacacacattcatctacaagg

SEQ ID NO: 621708 - DNA, 33 bp, Homo sapien
ctaggacttagagacatacattcatctacaagg

SEQ ID NO: 621709 - DNA, 33 bp, Homo sapien
ttaataactcatgttaaagaaggcagctaggac

SEQ ID NO: 621710 - DNA, 33 bp, Homo sapien
ttaataactcatgttagagaaggcagctaggac

SEQ ID NO: 621711 - DNA, 33 bp, Homo sapien
caggcaaatatcaacacggagtagagtctcaaa

SEQ ID NO: 621712 - DNA, 33 bp, Homo sapien
caggcaaatatcaacatggagtagagtctcaaa

SEQ ID NO: 621713 - DNA, 33 bp, Homo sapien
cacattctgtctatcactgaactcatgaatagg

SEQ ID NO: 621714 - DNA, 33 bp, Homo sapien
cacattctgtctatcattgaactcatgaatagg

SEQ ID NO: 621715 - DNA, 33 bp, Homo sapien
gtagggaaacaatgaacgatttggggcagaggt

SEQ ID NO: 621716 - DNA, 33 bp, Homo sapien
gtagggaaacaatgaatgatttggggcagaggt

SEQ ID NO: 621717 - DNA, 33 bp, Homo sapien
aatttcctgcagaacaataagattactctgtct

SEQ ID NO: 621718 - DNA, 33 bp, Homo sapien
aatttcctgcagaacattaagattactctgtct

SEQ ID NO: 621719 - DNA, 33 bp, Homo sapien
ttgatccatgattacaaattcagggggccatgt

SEQ ID NO: 621720 - DNA, 33 bp, Homo sapien
ttgatccatgattacagattcagggggccatgt

SEQ ID NO: 621721 - DNA, 33 bp, Homo sapien
agagccaagttctggaatcagggaccccaagtg

SEQ ID NO: 621722 - DNA, 33 bp, Homo sapien
agagccaagttctggagtcagggaccccaagtg

SEQ ID NO: 621723 - DNA, 33 bp, Homo sapien
aggtgagaggtatttaccaggttaaagcaaaaa

SEQ ID NO: 621724 - DNA, 33 bp, Homo sapien
aggtgagaggtatttagcaggttaaagcaaaaa

SEQ ID NO: 621725 - DNA, 33 bp, Homo sapien
ggccttaggactatacactcttgatctgaaagg

SEQ ID NO: 621726 - DNA, 33 bp, Homo sapien
ggccttaggactatactctcttgatctgaaagg

SEQ ID NO: 621727 - DNA, 33 bp, Homo sapien
tctggggcaatggtgaagcaaagagtgatgtct

SEQ ID NO: 621728 - DNA, 33 bp, Homo sapien
tctggggcaatggtgaggcaaagagtgatgtct

SEQ ID NO: 621729 - DNA, 33 bp, Homo sapien
ttgttaatgtagatgacggtatgattgattaat

SEQ ID NO: 621730 - DNA, 33 bp, Homo sapien
ttgttaatgtagatgatggtatgattgattaat

SEQ ID NO: 621731 - DNA, 33 bp, Homo sapien
ttcttgcctgcaaaaacagttcattcatatata

SEQ ID NO: 621732 - DNA, 33 bp, Homo sapien
ttcttgcctgcaaaaagagttcattcatatata

SEQ ID NO: 621733 - DNA, 33 bp, Homo sapien
agcattaatcaaaaacacatagttgtatgacac

SEQ ID NO: 621734 - DNA, 33 bp, Homo sapien
agcattaatcaaaaacccatagttgtatgacac

SEQ ID NO: 621735 - DNA, 33 bp, Homo sapien
ttcagaaattgagaaaagtgcagatcctaataa

SEQ ID NO: 621736 - DNA, 33 bp, Homo sapien
ttcagaaattgagaaaggtgcagatcctaataa

SEQ ID NO: 621737 - DNA, 33 bp, Homo sapien
tagatatgtactcaaacaatgatgtgatggata

SEQ ID NO: 621738 - DNA, 33 bp, Homo sapien
tagatatgtactcaaataatgatgtgatggata

SEQ ID NO: 621739 - DNA, 33 bp, Homo sapien
gcagaagatggcaggagaaagaagatagactag

SEQ ID NO: 621740 - DNA, 33 bp, Homo sapien
gcagaagatggcaggataaagaagatagactag

SEQ ID NO: 621741 - DNA, 33 bp, Homo sapien
ggcatcaagaccttcacagaagggggatctggg

SEQ ID NO: 621742 - DNA, 33 bp, Homo sapien
ggcatcaagaccttcatagaagggggatctggg

SEQ ID NO: 621743 - DNA, 33 bp, Homo sapien
agtatatgtgcttatggagtttatgtgcttaga

SEQ ID NO: 621744 - DNA, 33 bp, Homo sapien
agtatatgtgcttatgtagtttatgtgcttaga

SEQ ID NO: 621745 - DNA, 33 bp, Homo sapien
atttaggagattactacactttttaatacatta

SEQ ID NO: 621746 - DNA, 33 bp, Homo sapien
atttaggagattactagactttttaatacatta

SEQ ID NO: 621747 - DNA, 33 bp, Homo sapien
tatggtatagccttacaaacactgttgtcactt

SEQ ID NO: 621748 - DNA, 33 bp, Homo sapien
tatggtatagccttactaacactgttgtcactt

SEQ ID NO: 621749 - DNA, 33 bp, Homo sapien
gccccatgggaattaaccacccacgtcctcttt

SEQ ID NO: 621750 - DNA, 33 bp, Homo sapien
gccccatgggaattaatcacccacgtcctcttt

SEQ ID NO: 621751 - DNA, 33 bp, Homo sapien
gtttcaaggtgatccaatcagctagtgtttgtc

SEQ ID NO: 621752 - DNA, 33 bp, Homo sapien
gtttcaaggtgatccagtcagctagtgtttgtc

SEQ ID NO: 621753 - DNA, 33 bp, Homo sapien
tctgttagctaaagtacggttttcatgcttagt

SEQ ID NO: 621754 - DNA, 33 bp, Homo sapien
tctgttagctaaagtatggttttcatgcttagt

SEQ ID NO: 621755 - DNA, 33 bp, Homo sapien
tgtaggcaaacatgaacaatgaaacacttactt

SEQ ID NO: 621756 - DNA, 33 bp, Homo sapien
tgtaggcaaacatgaataatgaaacacttactt

SEQ ID NO: 621757 - DNA, 33 bp, Homo sapien
ctgcccttgatatgtaaaagtaaggctttggaa

SEQ ID NO: 621758 - DNA, 33 bp, Homo sapien
ctgcccttgatatgtacaagtaaggctttggaa

SEQ ID NO: 621759 - DNA, 33 bp, Homo sapien
cttccaatgtctgctacgctcaccacattgctg

SEQ ID NO: 621760 - DNA, 33 bp, Homo sapien
cttccaatgtctgctatgctcaccacattgctg

SEQ ID NO: 621761 - DNA, 33 bp, Homo sapien
ccgggatagtgagagaatacacttctgttgtaa

SEQ ID NO: 621762 - DNA, 33 bp, Homo sapien
ccgggatagtgagagagtacacttctgttgtaa

SEQ ID NO: 621763 - DNA, 33 bp, Homo sapien
aagctagtagaagggacacaataatacagaaca

SEQ ID NO: 621764 - DNA, 33 bp, Homo sapien
aagctagtagaagggagacaataatacagaaca

SEQ ID NO: 621765 - DNA, 33 bp, Homo sapien
agtttatagactcatcaaaaactgttcacaatg

SEQ ID NO: 621766 - DNA, 33 bp, Homo sapien
agtttatagactcatcgaaaactgttcacaatg

SEQ ID NO: 621767 - DNA, 33 bp, Homo sapien
caatagctgaatataacgttggtgcttcataaa

SEQ ID NO: 621768 - DNA, 33 bp, Homo sapien
caatagctgaatataatgttggtgcttcataaa

SEQ ID NO: 621769 - DNA, 33 bp, Homo sapien
tttgtggccaagtacaggattaattttcgtata

SEQ ID NO: 621770 - DNA, 33 bp, Homo sapien
tttgtggccaagtacatgattaattttcgtata

SEQ ID NO: 621771 - DNA, 33 bp, Homo sapien
accaatgcatagtcacagtcagcttttctgagc

SEQ ID NO: 621772 - DNA, 33 bp, Homo sapien
accaatgcatagtcactgtcagcttttctgagc

SEQ ID NO: 621773 - DNA, 33 bp, Homo sapien
atgtaggaagcacaccagcaggctggaaaagga

SEQ ID NO: 621774 - DNA, 33 bp, Homo sapien
atgtaggaagcacaccggcaggctggaaaagga

SEQ ID NO: 621775 - DNA, 33 bp, Homo sapien
acatggtaataagtccaagacatggttgtgagc

SEQ ID NO: 621776 - DNA, 33 bp, Homo sapien
acatggtaataagtccgagacatggttgtgagc

SEQ ID NO: 621777 - DNA, 33 bp, Homo sapien
acagtgcaaaatagaacaaagtgggaggtggag

SEQ ID NO: 621778 - DNA, 33 bp, Homo sapien
acagtgcaaaatagaataaagtgggaggtggag

SEQ ID NO: 621779 - DNA, 33 bp, Homo sapien
ccctaactatgcagaacccagcctgtacaggtg

SEQ ID NO: 621780 - DNA, 33 bp, Homo sapien
ccctaactatgcagaatccagcctgtacaggtg

SEQ ID NO: 621781 - DNA, 33 bp, Homo sapien
aatccattgagctgcaaacactccaactacact

SEQ ID NO: 621782 - DNA, 33 bp, Homo sapien
aatccattgagctgcagacactccaactacact

SEQ ID NO: 621783 - DNA, 33 bp, Homo sapien
aattcagccagcaagaagcaacttcagccagaa

SEQ ID NO: 621784 - DNA, 33 bp, Homo sapien
aattcagccagcaagaggcaacttcagccagaa

SEQ ID NO: 621785 - DNA, 33 bp, Homo sapien
tacatgctagtcaacactgaggttctccatata

SEQ ID NO: 621786 - DNA, 33 bp, Homo sapien
tacatgctagtcaacagtgaggttctccatata

SEQ ID NO: 621787 - DNA, 33 bp, Homo sapien
ttccataaaacatctacagctccaccacggcag

SEQ ID NO: 621788 - DNA, 33 bp, Homo sapien
ttccataaaacatctatagctccaccacggcag

SEQ ID NO: 621789 - DNA, 33 bp, Homo sapien
gtctggccacgtactgcatagacaaagaaagtt

SEQ ID NO: 621790 - DNA, 33 bp, Homo sapien
gtctggccacgtactgtatagacaaagaaagtt

SEQ ID NO: 621791 - DNA, 33 bp, Homo sapien
tgacacaggcaggtaacataaaatttacctttt

SEQ ID NO: 621792 - DNA, 33 bp, Homo sapien
tgacacaggcaggtaagataaaatttacctttt

SEQ ID NO: 621793 - DNA, 33 bp, Homo sapien
atttaaaggcctgaggacagaataatcaataca

SEQ ID NO: 621794 - DNA, 33 bp, Homo sapien
atttaaaggcctgagggcagaataatcaataca

SEQ ID NO: 621795 - DNA, 33 bp, Homo sapien
ctaattggtccactcaataaggatgggtgatta

SEQ ID NO: 621796 - DNA, 33 bp, Homo sapien
ctaattggtccactcagtaaggatgggtgatta

SEQ ID NO: 621797 - DNA, 33 bp, Homo sapien
ggtcatttattcattgaaaagtgtcataattta

SEQ ID NO: 621798 - DNA, 33 bp, Homo sapien
ggtcatttattcattggaaagtgtcataattta

SEQ ID NO: 621799 - DNA, 33 bp, Homo sapien
tggtgttgaccgaaaagaaaagaggtccaaaga

SEQ ID NO: 621800 - DNA, 33 bp, Homo sapien
tggtgttgaccgaaaataaaagaggtccaaaga

SEQ ID NO: 621801 - DNA, 33 bp, Homo sapien
gatacagctttggaacacttaatgaatgcacaa

SEQ ID NO: 621802 - DNA, 33 bp, Homo sapien
gatacagctttggaacccttaatgaatgcacaa

SEQ ID NO: 621803 - DNA, 33 bp, Homo sapien
tgttaagtcctataaaaccatcctgttccatgg

SEQ ID NO: 621804 - DNA, 33 bp, Homo sapien
tgttaagtcctataaagccatcctgttccatgg

SEQ ID NO: 621805 - DNA, 33 bp, Homo sapien
gactgtagttattctgcagctctgcatttcacc

SEQ ID NO: 621806 - DNA, 33 bp, Homo sapien
gactgtagttattctgtagctctgcatttcacc

SEQ ID NO: 621807 - DNA, 33 bp, Homo sapien
atttatcaactcttaaagtgccatggagagtaa

SEQ ID NO: 621808 - DNA, 33 bp, Homo sapien
atttatcaactcttaaggtgccatggagagtaa

SEQ ID NO: 621809 - DNA, 33 bp, Homo sapien
tctttgaaggggctcaaattttcagagagagca

SEQ ID NO: 621810 - DNA, 33 bp, Homo sapien
tctttgaaggggctcagattttcagagagagca

SEQ ID NO: 621811 - DNA, 33 bp, Homo sapien
tggagctgcctaacaactaataaatgcaagatc

SEQ ID NO: 621812 - DNA, 33 bp, Homo sapien
tggagctgcctaacaattaataaatgcaagatc

SEQ ID NO: 621813 - DNA, 33 bp, Homo sapien
tggtcacctaataatcagacagaaatttcctta

SEQ ID NO: 621814 - DNA, 33 bp, Homo sapien
tggtcacctaataatcggacagaaatttcctta

SEQ ID NO: 621815 - DNA, 33 bp, Homo sapien
cgggcctccaggtatacgaacagccaacaaaat

SEQ ID NO: 621816 - DNA, 33 bp, Homo sapien
cgggcctccaggtatatgaacagccaacaaaat

SEQ ID NO: 621817 - DNA, 33 bp, Homo sapien
ctgatgttactcatacgcctgttcttgtcacag

SEQ ID NO: 621818 - DNA, 33 bp, Homo sapien
ctgatgttactcatactcctgttcttgtcacag

SEQ ID NO: 621819 - DNA, 33 bp, Homo sapien
ttattctttgcccacaataagatcacaaattcc

SEQ ID NO: 621820 - DNA, 33 bp, Homo sapien
ttattctttgcccacagtaagatcacaaattcc

SEQ ID NO: 621821 - DNA, 33 bp, Homo sapien
tccccctaacaaggccaacaggtatttgccata

SEQ ID NO: 621822 - DNA, 33 bp, Homo sapien
tccccctaacaaggccgacaggtatttgccata

SEQ ID NO: 621823 - DNA, 33 bp, Homo sapien
ctgtccagtgaattaaggctttgtgtttccaaa

SEQ ID NO: 621824 - DNA, 33 bp, Homo sapien
ctgtccagtgaattaatgctttgtgtttccaaa

SEQ ID NO: 621825 - DNA, 33 bp, Homo sapien
ccaaagtaggggtagaccttcctggtgtgaatg

SEQ ID NO: 621826 - DNA, 33 bp, Homo sapien
ccaaagtaggggtagatcttcctggtgtgaatg

SEQ ID NO: 621827 - DNA, 33 bp, Homo sapien
tacttgctttacttccaaaggagacactaagat

SEQ ID NO: 621828 - DNA, 33 bp, Homo sapien
tacttgctttacttccgaaggagacactaagat

SEQ ID NO: 621829 - DNA, 33 bp, Homo sapien
ccatcacctcaaatgcagatcatttctttgtgt

SEQ ID NO: 621830 - DNA, 33 bp, Homo sapien
ccatcacctcaaatgcggatcatttctttgtgt

SEQ ID NO: 621831 - DNA, 33 bp, Homo sapien
aataaaatgcaaataagaactggctgaacactg

SEQ ID NO: 621832 - DNA, 33 bp, Homo sapien
aataaaatgcaaataataactggctgaacactg

SEQ ID NO: 621833 - DNA, 33 bp, Homo sapien
tgggatgctttcaacaagaagggcctttggagg

SEQ ID NO: 621834 - DNA, 33 bp, Homo sapien
tgggatgctttcaacaggaagggcctttggagg

SEQ ID NO: 621835 - DNA, 33 bp, Homo sapien
catagaccagtacaataacaggcagtagccccg

SEQ ID NO: 621836 - DNA, 33 bp, Homo sapien
catagaccagtacaatcacaggcagtagccccg

SEQ ID NO: 621837 - DNA, 33 bp, Homo sapien
tgacaggaggagtacaggtggaaggccagcaga

SEQ ID NO: 621838 - DNA, 33 bp, Homo sapien
tgacaggaggagtacatgtggaaggccagcaga

SEQ ID NO: 621839 - DNA, 33 bp, Homo sapien
ctcctttgcatcagccaccgtaataagtagtcc

SEQ ID NO: 621840 - DNA, 33 bp, Homo sapien
ctcctttgcatcagccgccgtaataagtagtcc

SEQ ID NO: 621841 - DNA, 33 bp, Homo sapien
tgactaagtctagttcaatgagtttcattttcc

SEQ ID NO: 621842 - DNA, 33 bp, Homo sapien
tgactaagtctagttcgatgagtttcattttcc

SEQ ID NO: 621843 - DNA, 33 bp, Homo sapien
ttcaccagtcaaatgaagtgggaacagctacct

SEQ ID NO: 621844 - DNA, 33 bp, Homo sapien
ttcaccagtcaaatgaggtgggaacagctacct

SEQ ID NO: 621845 - DNA, 33 bp, Homo sapien
aaaagaagtatgctcactatcatcactggcagt

SEQ ID NO: 621846 - DNA, 33 bp, Homo sapien
aaaagaagtatgctcattatcatcactggcagt

SEQ ID NO: 621847 - DNA, 33 bp, Homo sapien
cttaataatcccttaaataggcaataaagtaca

SEQ ID NO: 621848 - DNA, 33 bp, Homo sapien
cttaataatcccttaactaggcaataaagtaca

SEQ ID NO: 621849 - DNA, 33 bp, Homo sapien
caataatctctgataccccttgttaaaacctaa

SEQ ID NO: 621850 - DNA, 33 bp, Homo sapien
caataatctctgatactccttgttaaaacctaa

SEQ ID NO: 621851 - DNA, 33 bp, Homo sapien
acctaaaggtcaaaggaatcaaatcatgactcc

SEQ ID NO: 621852 - DNA, 33 bp, Homo sapien
acctaaaggtcaaagggatcaaatcatgactcc

SEQ ID NO: 621853 - DNA, 33 bp, Homo sapien
caaatatcgctaaaacccttgaacacctataaa

SEQ ID NO: 621854 - DNA, 33 bp, Homo sapien
caaatatcgctaaaacgcttgaacacctataaa

SEQ ID NO: 621855 - DNA, 33 bp, Homo sapien
agatactaaaaaatacaagagctactatctaaa

SEQ ID NO: 621856 - DNA, 33 bp, Homo sapien
agatactaaaaaataccagagctactatctaaa

SEQ ID NO: 621857 - DNA, 33 bp, Homo sapien
ggtaacttggagtcaacgccacagggacattca

SEQ ID NO: 621858 - DNA, 33 bp, Homo sapien
ggtaacttggagtcaatgccacagggacattca

SEQ ID NO: 621859 - DNA, 33 bp, Homo sapien
cctaacacagccaaaaaacacaactattttgtg

SEQ ID NO: 621860 - DNA, 33 bp, Homo sapien
cctaacacagccaaaagacacaactattttgtg

SEQ ID NO: 621861 - DNA, 33 bp, Homo sapien
gatcattgttcttccccagaaattttgctaatg

SEQ ID NO: 621862 - DNA, 33 bp, Homo sapien
gatcattgttcttccctagaaattttgctaatg

SEQ ID NO: 621863 - DNA, 33 bp, Homo sapien
ccaggagacctagctacgccaccctacttgtct

SEQ ID NO: 621864 - DNA, 33 bp, Homo sapien
ccaggagacctagctatgccaccctacttgtct

SEQ ID NO: 621865 - DNA, 33 bp, Homo sapien
atctgagccaaatatgaagaaacattaagattt

SEQ ID NO: 621866 - DNA, 33 bp, Homo sapien
atctgagccaaatatggagaaacattaagattt

SEQ ID NO: 621867 - DNA, 33 bp, Homo sapien
aatgattcatacagagaaccacttgcaattaaa

SEQ ID NO: 621868 - DNA, 33 bp, Homo sapien
aatgattcatacagaggaccacttgcaattaaa

SEQ ID NO: 621869 - DNA, 33 bp, Homo sapien
cccctacttggctaaaaccatccatatgccaac

SEQ ID NO: 621870 - DNA, 33 bp, Homo sapien
cccctacttggctaaatccatccatatgccaac

SEQ ID NO: 621871 - DNA, 33 bp, Homo sapien
gtatgaagaatatacaaatccacaattataccc

SEQ ID NO: 621872 - DNA, 33 bp, Homo sapien
gtatgaagaatatacagatccacaattataccc

SEQ ID NO: 621873 - DNA, 33 bp, Homo sapien
ctcatcatcactggtcactaaagaaatgcaaat

SEQ ID NO: 621874 - DNA, 33 bp, Homo sapien
ctcatcatcactggtcgctaaagaaatgcaaat

SEQ ID NO: 621875 - DNA, 33 bp, Homo sapien
atgcttcagcagtgacgactacaaatggttatt

SEQ ID NO: 621876 - DNA, 33 bp, Homo sapien
atgcttcagcagtgactactacaaatggttatt

SEQ ID NO: 621877 - DNA, 33 bp, Homo sapien
gaacattacgtggaaccacagactcatggaaca

SEQ ID NO: 621878 - DNA, 33 bp, Homo sapien
gaacattacgtggaactacagactcatggaaca

SEQ ID NO: 621879 - DNA, 33 bp, Homo sapien
gaccttcttctaggtacgtttagggaatgtcca

SEQ ID NO: 621880 - DNA, 33 bp, Homo sapien
gaccttcttctaggtatgtttagggaatgtcca

SEQ ID NO: 621881 - DNA, 33 bp, Homo sapien
tgcactccaagccagaacaatgaacgttagcca

SEQ ID NO: 621882 - DNA, 33 bp, Homo sapien
tgcactccaagccagagcaatgaacgttagcca

SEQ ID NO: 621883 - DNA, 33 bp, Homo sapien
tgtggagaaataggaacattttttcactgttgg

SEQ ID NO: 621884 - DNA, 33 bp, Homo sapien
tgtggagaaataggaagattttttcactgttgg

SEQ ID NO: 621885 - DNA, 33 bp, Homo sapien
tggtattggaagctcaatagtggcatttggagg

SEQ ID NO: 621886 - DNA, 33 bp, Homo sapien
tggtattggaagctcagtagtggcatttggagg

SEQ ID NO: 621887 - DNA, 33 bp, Homo sapien
aaccagagctataaaactgccaatatccaaaat

SEQ ID NO: 621888 - DNA, 33 bp, Homo sapien
aaccagagctataaaattgccaatatccaaaat

SEQ ID NO: 621889 - DNA, 33 bp, Homo sapien
ggcatgagatggagtccgaaaggggtggttctt

SEQ ID NO: 621890 - DNA, 33 bp, Homo sapien
ggcatgagatggagtctgaaaggggtggttctt

SEQ ID NO: 621891 - DNA, 33 bp, Homo sapien
aaggccacagatcacaatatcctgttctttgcc

SEQ ID NO: 621892 - DNA, 33 bp, Homo sapien
aaggccacagatcacagtatcctgttctttgcc

SEQ ID NO: 621893 - DNA, 33 bp, Homo sapien
ttttaaattgaagtagaagtcaataggttacca

SEQ ID NO: 621894 - DNA, 33 bp, Homo sapien
ttttaaattgaagtaggagtcaataggttacca

SEQ ID NO: 621895 - DNA, 33 bp, Homo sapien
aatacgttgaggataactggaaccaagtcttgc

SEQ ID NO: 621896 - DNA, 33 bp, Homo sapien
aatacgttgaggataagtggaaccaagtcttgc

SEQ ID NO: 621897 - DNA, 33 bp, Homo sapien
ctttgtggagcagagactagcctttcctgctgc

SEQ ID NO: 621898 - DNA, 33 bp, Homo sapien
ctttgtggagcagagattagcctttcctgctgc

SEQ ID NO: 621899 - DNA, 33 bp, Homo sapien
taaaattattaacttacgtgacattacagcatg

SEQ ID NO: 621900 - DNA, 33 bp, Homo sapien
taaaattattaacttatgtgacattacagcatg

SEQ ID NO: 621901 - DNA, 33 bp, Homo sapien
tgttccagactttgaaatccttgaggatagagc

SEQ ID NO: 621902 - DNA, 33 bp, Homo sapien
tgttccagactttgaactccttgaggatagagc

SEQ ID NO: 621903 - DNA, 33 bp, Homo sapien
ttatgatgcttgtcgacgactgcctcgtcttcg

SEQ ID NO: 621904 - DNA, 33 bp, Homo sapien
ttatgatgcttgtcgaggactgcctcgtcttcg

SEQ ID NO: 621905 - DNA, 33 bp, Homo sapien
cctgtgtgattgcaaaggagagagaaaggagta

SEQ ID NO: 621906 - DNA, 33 bp, Homo sapien
cctgtgtgattgcaaatgagagagaaaggagta

SEQ ID NO: 621907 - DNA, 33 bp, Homo sapien
tatttatggtatattacgcctcttcttgggcct

SEQ ID NO: 621908 - DNA, 33 bp, Homo sapien
tatttatggtatattatgcctcttcttgggcct

SEQ ID NO: 621909 - DNA, 33 bp, Homo sapien
gtggaaccctgataaacggaatcgtcaaaatat

SEQ ID NO: 621910 - DNA, 33 bp, Homo sapien
gtggaaccctgataaatggaatcgtcaaaatat

SEQ ID NO: 621911 - DNA, 33 bp, Homo sapien
cttctttcaaatgtcacattaactatcaccacc

SEQ ID NO: 621912 - DNA, 33 bp, Homo sapien
cttctttcaaatgtcatattaactatcaccacc

SEQ ID NO: 621913 - DNA, 33 bp, Homo sapien
ccagctatggtagttccaagaagggttctttca

SEQ ID NO: 621914 - DNA, 33 bp, Homo sapien
ccagctatggtagttctaagaagggttctttca

SEQ ID NO: 621915 - DNA, 33 bp, Homo sapien
cagtgtaccccttcagaatacagctcatccctt

SEQ ID NO: 621916 - DNA, 33 bp, Homo sapien
cagtgtaccccttcaggatacagctcatccctt

SEQ ID NO: 621917 - DNA, 33 bp, Homo sapien
acagtgacacaagccagaaagagagctctcaac

SEQ ID NO: 621918 - DNA, 33 bp, Homo sapien
acagtgacacaagccataaagagagctctcaac

SEQ ID NO: 621919 - DNA, 33 bp, Homo sapien
aatctcttccaataagccctcactcaaattctc

SEQ ID NO: 621920 - DNA, 33 bp, Homo sapien
aatctcttccaataaggcctcactcaaattctc

SEQ ID NO: 621921 - DNA, 33 bp, Homo sapien
atcttggcttgcctgggacttgcagggactttt

SEQ ID NO: 621922 - DNA, 33 bp, Homo sapien
atcttggcttgcctggtacttgcagggactttt

SEQ ID NO: 621923 - DNA, 33 bp, Homo sapien
actcatctgaatttgcacaggtctttcccactt

SEQ ID NO: 621924 - DNA, 33 bp, Homo sapien
actcatctgaatttgcgcaggtctttcccactt

SEQ ID NO: 621925 - DNA, 33 bp, Homo sapien
cctttagaaacttttacggcaagtttggcattg

SEQ ID NO: 621926 - DNA, 33 bp, Homo sapien
cctttagaaacttttatggcaagtttggcattg

SEQ ID NO: 621927 - DNA, 33 bp, Homo sapien
tcatagggctactgtaaggattaaacacataaa

SEQ ID NO: 621928 - DNA, 33 bp, Homo sapien
tcatagggctactgtacggattaaacacataaa

SEQ ID NO: 621929 - DNA, 33 bp, Homo sapien
atttcctggttgaaaaatagtaacagggtctat

SEQ ID NO: 621930 - DNA, 33 bp, Homo sapien
atttcctggttgaaaagtagtaacagggtctat

SEQ ID NO: 621931 - DNA, 33 bp, Homo sapien
tggagcccaaatataaaaagtgcaactatccta

SEQ ID NO: 621932 - DNA, 33 bp, Homo sapien
tggagcccaaatataagaagtgcaactatccta

SEQ ID NO: 621933 - DNA, 33 bp, Homo sapien
gtgcctactctttttaggtcgcaattgcttgat

SEQ ID NO: 621934 - DNA, 33 bp, Homo sapien
gtgcctactctttttatgtcgcaattgcttgat

SEQ ID NO: 621935 - DNA, 33 bp, Homo sapien
agctagaatcaatttacagcagattttacatat

SEQ ID NO: 621936 - DNA, 33 bp, Homo sapien
agctagaatcaatttagagcagattttacatat

SEQ ID NO: 621937 - DNA, 33 bp, Homo sapien
attctagctcagtgtaacaaactgctgtaacaa

SEQ ID NO: 621938 - DNA, 33 bp, Homo sapien
attctagctcagtgtagcaaactgctgtaacaa

SEQ ID NO: 621939 - DNA, 33 bp, Homo sapien
atgaagtaataaaccgccactgccagtacttat

SEQ ID NO: 621940 - DNA, 33 bp, Homo sapien
atgaagtaataaaccgtcactgccagtacttat

SEQ ID NO: 621941 - DNA, 33 bp, Homo sapien
ttctgcggttacagtacatttcagccacatagt

SEQ ID NO: 621942 - DNA, 33 bp, Homo sapien
ttctgcggttacagtatatttcagccacatagt

SEQ ID NO: 621943 - DNA, 33 bp, Homo sapien
ggaaaactgctatttacgttctttccatgcatc

SEQ ID NO: 621944 - DNA, 33 bp, Homo sapien
ggaaaactgctatttatgttctttccatgcatc

SEQ ID NO: 621945 - DNA, 33 bp, Homo sapien
tttacatcaacatcaccgctaaaacagttggac

SEQ ID NO: 621946 - DNA, 33 bp, Homo sapien
tttacatcaacatcactgctaaaacagttggac

SEQ ID NO: 621947 - DNA, 33 bp, Homo sapien
tctggaatttatgaaccatcatcagcaaaatcc

SEQ ID NO: 621948 - DNA, 33 bp, Homo sapien
tctggaatttatgaactatcatcagcaaaatcc

SEQ ID NO: 621949 - DNA, 33 bp, Homo sapien
cacatatcaattttgacaatcttttacatgtcc

SEQ ID NO: 621950 - DNA, 33 bp, Homo sapien
cacatatcaattttgagaatcttttacatgtcc

SEQ ID NO: 621951 - DNA, 33 bp, Homo sapien
aagtaagatttacccccaggaatacaagtatgt

SEQ ID NO: 621952 - DNA, 33 bp, Homo sapien
aagtaagatttaccccgaggaatacaagtatgt

SEQ ID NO: 621953 - DNA, 33 bp, Homo sapien
ttctcaattaagtttacaagtttatcattaggg

SEQ ID NO: 621954 - DNA, 33 bp, Homo sapien
ttctcaattaagtttagaagtttatcattaggg

SEQ ID NO: 621955 - DNA, 33 bp, Homo sapien
aagaggtagataaacactgagtactcgtggaca

SEQ ID NO: 621956 - DNA, 33 bp, Homo sapien
aagaggtagataaacattgagtactcgtggaca

SEQ ID NO: 621957 - DNA, 33 bp, Homo sapien
tttcatttcctaaaagccttcaggatagttccc

SEQ ID NO: 621958 - DNA, 33 bp, Homo sapien
tttcatttcctaaaaggcttcaggatagttccc

SEQ ID NO: 621959 - DNA, 33 bp, Homo sapien
caccaccaaaagacaaacggcaaactgacagaa

SEQ ID NO: 621960 - DNA, 33 bp, Homo sapien
caccaccaaaagacaagcggcaaactgacagaa

SEQ ID NO: 621961 - DNA, 33 bp, Homo sapien
gggacccctgatttataaaacactgctcagaac

SEQ ID NO: 621962 - DNA, 33 bp, Homo sapien
gggacccctgatttatcaaacactgctcagaac

SEQ ID NO: 621963 - DNA, 33 bp, Homo sapien
cactgctcagaacataacatctaggctggacgc

SEQ ID NO: 621964 - DNA, 33 bp, Homo sapien
cactgctcagaacataccatctaggctggacgc

SEQ ID NO: 621965 - DNA, 33 bp, Homo sapien
aaagtcccagaactgacgctaatttaacctaac

SEQ ID NO: 621966 - DNA, 33 bp, Homo sapien
aaagtcccagaactgatgctaatttaacctaac

SEQ ID NO: 621967 - DNA, 33 bp, Homo sapien
tatgttccttttatgcaccatcttctatgcacc

SEQ ID NO: 621968 - DNA, 33 bp, Homo sapien
tatgttccttttatgcgccatcttctatgcacc

SEQ ID NO: 621969 - DNA, 33 bp, Homo sapien
gaactgtaaaataactcacttccttctctcctc

SEQ ID NO: 621970 - DNA, 33 bp, Homo sapien
gaactgtaaaataactgacttccttctctcctc

SEQ ID NO: 621971 - DNA, 33 bp, Homo sapien
ctcaacatgaccccgaaaactcactcttccctg

SEQ ID NO: 621972 - DNA, 33 bp, Homo sapien
ctcaacatgaccccgacaactcactcttccctg

SEQ ID NO: 621973 - DNA, 33 bp, Homo sapien
aggcggaagtttatgaatcagaagacactaaag

SEQ ID NO: 621974 - DNA, 33 bp, Homo sapien
aggcggaagtttatgagtcagaagacactaaag

SEQ ID NO: 621975 - DNA, 33 bp, Homo sapien
cattatttccagaaaggcttgctccagatatgg

SEQ ID NO: 621976 - DNA, 33 bp, Homo sapien
cattatttccagaaagtcttgctccagatatgg

SEQ ID NO: 621977 - DNA, 33 bp, Homo sapien
ggaaagtaaaacaaaaaagtaatgcatgatgga

SEQ ID NO: 621978 - DNA, 33 bp, Homo sapien
ggaaagtaaaacaaaagagtaatgcatgatgga

SEQ ID NO: 621979 - DNA, 33 bp, Homo sapien
tcagctcttcttgccacgaagtatccatgaagg

SEQ ID NO: 621980 - DNA, 33 bp, Homo sapien
tcagctcttcttgccatgaagtatccatgaagg

SEQ ID NO: 621981 - DNA, 33 bp, Homo sapien
aaagtctatcagtgacagcatcagttttgagag

SEQ ID NO: 621982 - DNA, 33 bp, Homo sapien
aaagtctatcagtgacggcatcagttttgagag

SEQ ID NO: 621983 - DNA, 33 bp, Homo sapien
cagacttgaaaaatatcaccgtagattttaact

SEQ ID NO: 621984 - DNA, 33 bp, Homo sapien
cagacttgaaaaatatgaccgtagattttaact

SEQ ID NO: 621985 - DNA, 33 bp, Homo sapien
ttcaatatatttctgcaagacaaaacaaatggg

SEQ ID NO: 621986 - DNA, 33 bp, Homo sapien
ttcaatatatttctgcgagacaaaacaaatggg

SEQ ID NO: 621987 - DNA, 33 bp, Homo sapien
gtcagagagtggagaacgattttttctactggt

SEQ ID NO: 621988 - DNA, 33 bp, Homo sapien
gtcagagagtggagaatgattttttctactggt

SEQ ID NO: 621989 - DNA, 33 bp, Homo sapien
caaggcaccaaggtaacgagcaattctaaccaa

SEQ ID NO: 621990 - DNA, 33 bp, Homo sapien
caaggcaccaaggtaatgagcaattctaaccaa

SEQ ID NO: 621991 - DNA, 33 bp, Homo sapien
gtttgtattaggtttacgagcaggggaatgaca

SEQ ID NO: 621992 - DNA, 33 bp, Homo sapien
gtttgtattaggtttatgagcaggggaatgaca

SEQ ID NO: 621993 - DNA, 33 bp, Homo sapien
atataagggctcaaaaattgttagttgttgatg

SEQ ID NO: 621994 - DNA, 33 bp, Homo sapien
atataagggctcaaaatttgttagttgttgatg

SEQ ID NO: 621995 - DNA, 33 bp, Homo sapien
cctattacctcgataacttagtagttccataat

SEQ ID NO: 621996 - DNA, 33 bp, Homo sapien
cctattacctcgataagttagtagttccataat

SEQ ID NO: 621997 - DNA, 33 bp, Homo sapien
ttctaccacagttacactgcttaccaaatactg

SEQ ID NO: 621998 - DNA, 33 bp, Homo sapien
ttctaccacagttacattgcttaccaaatactg

SEQ ID NO: 621999 - DNA, 33 bp, Homo sapien
ttagctaacttggttacggtaagtttcacaata

SEQ ID NO: 622000 - DNA, 33 bp, Homo sapien
ttagctaacttggttatggtaagtttcacaata

SEQ ID NO: 622001 - DNA, 33 bp, Homo sapien
gaaactgaaagcacacacttggctgaagggagg

SEQ ID NO: 622002 - DNA, 33 bp, Homo sapien
gaaactgaaagcacacgcttggctgaagggagg

SEQ ID NO: 622003 - DNA, 33 bp, Homo sapien
gctttggcaagtcctaaatgaagttcactatga

SEQ ID NO: 622004 - DNA, 33 bp, Homo sapien
gctttggcaagtcctagatgaagttcactatga

SEQ ID NO: 622005 - DNA, 33 bp, Homo sapien
atacgatggctgtctcaaaggaaagcatttgta

SEQ ID NO: 622006 - DNA, 33 bp, Homo sapien
atacgatggctgtctcgaaggaaagcatttgta

SEQ ID NO: 622007 - DNA, 33 bp, Homo sapien
cataatgcccggctcaaggttatcctttaactt

SEQ ID NO: 622008 - DNA, 33 bp, Homo sapien
cataatgcccggctcagggttatcctttaactt

SEQ ID NO: 622009 - DNA, 33 bp, Homo sapien
agattacaggtagaagccataatgcccggctca

SEQ ID NO: 622010 - DNA, 33 bp, Homo sapien
agattacaggtagaagtcataatgcccggctca

SEQ ID NO: 622011 - DNA, 33 bp, Homo sapien
aactccttcaatggacacagggaagaagggact

SEQ ID NO: 622012 - DNA, 33 bp, Homo sapien
aactccttcaatggacgcagggaagaagggact

SEQ ID NO: 622013 - DNA, 33 bp, Homo sapien
gagaagacctctctgacaaagtgacacaaagac

SEQ ID NO: 622014 - DNA, 33 bp, Homo sapien
gagaagacctctctgataaagtgacacaaagac

SEQ ID NO: 622015 - DNA, 33 bp, Homo sapien
actcctctccagtcacactaatctcccactggt

SEQ ID NO: 622016 - DNA, 33 bp, Homo sapien
actcctctccagtcactctaatctcccactggt

SEQ ID NO: 622017 - DNA, 33 bp, Homo sapien
aaccaatatagagataccagtgggacctgcaga

SEQ ID NO: 622018 - DNA, 33 bp, Homo sapien
aaccaatatagagatatcagtgggacctgcaga

SEQ ID NO: 622019 - DNA, 33 bp, Homo sapien
ttttccagtggtgtcaaataaatgaggtacagc

SEQ ID NO: 622020 - DNA, 33 bp, Homo sapien
ttttccagtggtgtcagataaatgaggtacagc

SEQ ID NO: 622021 - DNA, 33 bp, Homo sapien
aggatgcctgagactaataagaatcctgttatg

SEQ ID NO: 622022 - DNA, 33 bp, Homo sapien
aggatgcctgagactagtaagaatcctgttatg

SEQ ID NO: 622023 - DNA, 33 bp, Homo sapien
atgtatgtttgggtgaatatagtaattagagaa

SEQ ID NO: 622024 - DNA, 33 bp, Homo sapien
atgtatgtttgggtgactatagtaattagagaa

SEQ ID NO: 622025 - DNA, 33 bp, Homo sapien
ctgcgcctgaccttgaagtcttacactaaaaaa

SEQ ID NO: 622026 - DNA, 33 bp, Homo sapien
ctgcgcctgaccttgatgtcttacactaaaaaa

SEQ ID NO: 622027 - DNA, 33 bp, Homo sapien
ttcagatgacatctgagacaacctggtataaac

SEQ ID NO: 622028 - DNA, 33 bp, Homo sapien
ttcagatgacatctgatacaacctggtataaac

SEQ ID NO: 622029 - DNA, 33 bp, Homo sapien
tgtggtatgtatttcacattagtgacttcaaaa

SEQ ID NO: 622030 - DNA, 33 bp, Homo sapien
tgtggtatgtatttcatattagtgacttcaaaa

SEQ ID NO: 622031 - DNA, 33 bp, Homo sapien
atgataatatttagacactgtgactcttcagaa

SEQ ID NO: 622032 - DNA, 33 bp, Homo sapien
atgataatatttagacgctgtgactcttcagaa

SEQ ID NO: 622033 - DNA, 33 bp, Homo sapien
aaatatcatggaacagcagaatgaacctgggca

SEQ ID NO: 622034 - DNA, 33 bp, Homo sapien
aaatatcatggaacaggagaatgaacctgggca

SEQ ID NO: 622035 - DNA, 33 bp, Homo sapien
cttttacccttaatgaggaagatgaaggtcaga

SEQ ID NO: 622036 - DNA, 33 bp, Homo sapien
cttttacccttaatgatgaagatgaaggtcaga

SEQ ID NO: 622037 - DNA, 33 bp, Homo sapien
cttagtatctgcataacatcaaccattgacata

SEQ ID NO: 622038 - DNA, 33 bp, Homo sapien
cttagtatctgcataatatcaaccattgacata

SEQ ID NO: 622039 - DNA, 33 bp, Homo sapien
cctgagctttcattgacacacaaattttcatct

SEQ ID NO: 622040 - DNA, 33 bp, Homo sapien
cctgagctttcattgagacacaaattttcatct

SEQ ID NO: 622041 - DNA, 33 bp, Homo sapien
cttattctggctaatgaatttccaatttggcca

SEQ ID NO: 622042 - DNA, 33 bp, Homo sapien
cttattctggctaatgcatttccaatttggcca

SEQ ID NO: 622043 - DNA, 33 bp, Homo sapien
tttacaaagtggctaactctgagaaaatggcaa

SEQ ID NO: 622044 - DNA, 33 bp, Homo sapien
tttacaaagtggctaattctgagaaaatggcaa

SEQ ID NO: 622045 - DNA, 33 bp, Homo sapien
gagcaaacaatcatggaatctagtcactgtgca

SEQ ID NO: 622046 - DNA, 33 bp, Homo sapien
gagcaaacaatcatgggatctagtcactgtgca

SEQ ID NO: 622047 - DNA, 33 bp, Homo sapien
ctgcccccataggcttcaaagtacctgttccca

SEQ ID NO: 622048 - DNA, 33 bp, Homo sapien
ctgcccccataggcttgaaagtacctgttccca

SEQ ID NO: 622049 - DNA, 33 bp, Homo sapien
ggtctgatttgggatccaggcctttttgttgtt

SEQ ID NO: 622050 - DNA, 33 bp, Homo sapien
ggtctgatttgggatctaggcctttttgttgtt

SEQ ID NO: 622051 - DNA, 33 bp, Homo sapien
ctggggagggagcagcaaacttaatgaccccaa

SEQ ID NO: 622052 - DNA, 33 bp, Homo sapien
ctggggagggagcagcgaacttaatgaccccaa

SEQ ID NO: 622053 - DNA, 33 bp, Homo sapien
ttggcagatgtagtgacaggataagagtcttca

SEQ ID NO: 622054 - DNA, 33 bp, Homo sapien
ttggcagatgtagtgataggataagagtcttca

SEQ ID NO: 622055 - DNA, 33 bp, Homo sapien
atgggagacagtgtcaagtcattaggtactaga

SEQ ID NO: 622056 - DNA, 33 bp, Homo sapien
atgggagacagtgtcaggtcattaggtactaga

SEQ ID NO: 622057 - DNA, 33 bp, Homo sapien
cattatcccatgaaaccattgttgttaccaggc

SEQ ID NO: 622058 - DNA, 33 bp, Homo sapien
cattatcccatgaaactattgttgttaccaggc

SEQ ID NO: 622059 - DNA, 33 bp, Homo sapien
cttggtgttcttttatgaagtgataccaacata

SEQ ID NO: 622060 - DNA, 33 bp, Homo sapien
cttggtgttcttttattaagtgataccaacata

SEQ ID NO: 622061 - DNA, 33 bp, Homo sapien
ctactttttgctttggcaacactatctaagcat

SEQ ID NO: 622062 - DNA, 33 bp, Homo sapien
ctactttttgctttggtaacactatctaagcat

SEQ ID NO: 622063 - DNA, 33 bp, Homo sapien
agtagattcctggttgcacactcttggaaaacc

SEQ ID NO: 622064 - DNA, 33 bp, Homo sapien
agtagattcctggttgtacactcttggaaaacc

SEQ ID NO: 622065 - DNA, 33 bp, Homo sapien
ttgtggcctgtgcgcaacttaacctccatggag

SEQ ID NO: 622066 - DNA, 33 bp, Homo sapien
ttgtggcctgtgcgcagcttaacctccatggag

SEQ ID NO: 622067 - DNA, 33 bp, Homo sapien
ttgccatcacaaataacgtttcactgagtatct

SEQ ID NO: 622068 - DNA, 33 bp, Homo sapien
ttgccatcacaaataatgtttcactgagtatct

SEQ ID NO: 622069 - DNA, 33 bp, Homo sapien
aagaattgaggccacaatactgaattggtgaac

SEQ ID NO: 622070 - DNA, 33 bp, Homo sapien
aagaattgaggccacagtactgaattggtgaac

SEQ ID NO: 622071 - DNA, 33 bp, Homo sapien
ggtccatgatggatgacagaatttcaataggaa

SEQ ID NO: 622072 - DNA, 33 bp, Homo sapien
ggtccatgatggatgatagaatttcaataggaa

SEQ ID NO: 622073 - DNA, 33 bp, Homo sapien
catacttgagggtaatcatatttttcccctatg

SEQ ID NO: 622074 - DNA, 33 bp, Homo sapien
catacttgagggtaatgatatttttcccctatg

SEQ ID NO: 622075 - DNA, 33 bp, Homo sapien
agaaaagaaccagtgaactttattcattatagg

SEQ ID NO: 622076 - DNA, 33 bp, Homo sapien
agaaaagaaccagtgacctttattcattatagg

SEQ ID NO: 622077 - DNA, 33 bp, Homo sapien
atctaaggaccgcaaacaattccttatcagttt

SEQ ID NO: 622078 - DNA, 33 bp, Homo sapien
atctaaggaccgcaaataattccttatcagttt

SEQ ID NO: 622079 - DNA, 33 bp, Homo sapien
cactgcctggcatacagaaagagcccactgttt

SEQ ID NO: 622080 - DNA, 33 bp, Homo sapien
cactgcctggcatacataaagagcccactgttt

SEQ ID NO: 622081 - DNA, 33 bp, Homo sapien
tttgaagaattaatgtaacactaccaatgtctg

SEQ ID NO: 622082 - DNA, 33 bp, Homo sapien
tttgaagaattaatgttacactaccaatgtctg

SEQ ID NO: 622083 - DNA, 33 bp, Homo sapien
taagctccaggatctactaaagaacaaatatga

SEQ ID NO: 622084 - DNA, 33 bp, Homo sapien
taagctccaggatctattaaagaacaaatatga

SEQ ID NO: 622085 - DNA, 33 bp, Homo sapien
gattagagagaaggaacaaccaagaatacaccg

SEQ ID NO: 622086 - DNA, 33 bp, Homo sapien
gattagagagaaggaataaccaagaatacaccg

SEQ ID NO: 622087 - DNA, 33 bp, Homo sapien
acaatatgcaagacagaaagttgaaagtaaaga

SEQ ID NO: 622088 - DNA, 33 bp, Homo sapien
acaatatgcaagacaggaagttgaaagtaaaga

SEQ ID NO: 622089 - DNA, 33 bp, Homo sapien
cagataaaaatcttccacttgtttgcagcttga

SEQ ID NO: 622090 - DNA, 33 bp, Homo sapien
cagataaaaatcttccccttgtttgcagcttga

SEQ ID NO: 622091 - DNA, 33 bp, Homo sapien
gattaagcaactggaagtattgatgaagtcaat

SEQ ID NO: 622092 - DNA, 33 bp, Homo sapien
gattaagcaactggaattattgatgaagtcaat

SEQ ID NO: 622093 - DNA, 33 bp, Homo sapien
tccaaattggctgtgaagtgaataaacattact

SEQ ID NO: 622094 - DNA, 33 bp, Homo sapien
tccaaattggctgtgaggtgaataaacattact

SEQ ID NO: 622095 - DNA, 33 bp, Homo sapien
tcttaataagtgacaaataagtatcatgttcct

SEQ ID NO: 622096 - DNA, 33 bp, Homo sapien
tcttaataagtgacaagtaagtatcatgttcct

SEQ ID NO: 622097 - DNA, 33 bp, Homo sapien
cttcctcaaaaggccactgagctctgaaagatt

SEQ ID NO: 622098 - DNA, 33 bp, Homo sapien
cttcctcaaaaggccattgagctctgaaagatt

SEQ ID NO: 622099 - DNA, 33 bp, Homo sapien
tttagtcctttgcctaagggtcagtttcctgaa

SEQ ID NO: 622100 - DNA, 33 bp, Homo sapien
tttagtcctttgcctacgggtcagtttcctgaa

SEQ ID NO: 622101 - DNA, 33 bp, Homo sapien
ggatgctacaacataaagggcacacgttctaga

SEQ ID NO: 622102 - DNA, 33 bp, Homo sapien
ggatgctacaacataaggggcacacgttctaga

SEQ ID NO: 622103 - DNA, 33 bp, Homo sapien
tcaaaaatgaactgaaagaaaccaaactcaaaa

SEQ ID NO: 622104 - DNA, 33 bp, Homo sapien
tcaaaaatgaactgaaggaaaccaaactcaaaa

SEQ ID NO: 622105 - DNA, 33 bp, Homo sapien
ctctctgtagcatctccgacctcacagttctgc

SEQ ID NO: 622106 - DNA, 33 bp, Homo sapien
ctctctgtagcatctctgacctcacagttctgc

SEQ ID NO: 622107 - DNA, 33 bp, Homo sapien
tgtcccttgcagtgtgcagcctctgacattcaa

SEQ ID NO: 622108 - DNA, 33 bp, Homo sapien
tgtcccttgcagtgtgtagcctctgacattcaa

SEQ ID NO: 622109 - DNA, 33 bp, Homo sapien
ttcatacaggaggtgcaagctatatagacaaag

SEQ ID NO: 622110 - DNA, 33 bp, Homo sapien
ttcatacaggaggtgcgagctatatagacaaag

SEQ ID NO: 622111 - DNA, 33 bp, Homo sapien
cagtaggacaagagaaaaagtgaactataagag

SEQ ID NO: 622112 - DNA, 33 bp, Homo sapien
cagtaggacaagagaagaagtgaactataagag

SEQ ID NO: 622113 - DNA, 33 bp, Homo sapien
caaacccttacctgatcaagccattgtgatggc

SEQ ID NO: 622114 - DNA, 33 bp, Homo sapien
caaacccttacctgattaagccattgtgatggc

SEQ ID NO: 622115 - DNA, 33 bp, Homo sapien
ctgctgtccctccaccagcattgacaagcccta

SEQ ID NO: 622116 - DNA, 33 bp, Homo sapien
ctgctgtccctccaccggcattgacaagcccta

SEQ ID NO: 622117 - DNA, 33 bp, Homo sapien
gcaactttaagcggaacgacataggacagatca

SEQ ID NO: 622118 - DNA, 33 bp, Homo sapien
gcaactttaagcggaatgacataggacagatca

SEQ ID NO: 622119 - DNA, 33 bp, Homo sapien
gcagcctttggggaacaggccaagtatcaaaag

SEQ ID NO: 622120 - DNA, 33 bp, Homo sapien
gcagcctttggggaaccggccaagtatcaaaag

SEQ ID NO: 622121 - DNA, 33 bp, Homo sapien
ctagggctgctatacgaaagtaccacaaggcag

SEQ ID NO: 622122 - DNA, 33 bp, Homo sapien
ctagggctgctatacggaagtaccacaaggcag

SEQ ID NO: 622123 - DNA, 33 bp, Homo sapien
ctagaaactaatacacactatgttaagattatt

SEQ ID NO: 622124 - DNA, 33 bp, Homo sapien
ctagaaactaatacacgctatgttaagattatt

SEQ ID NO: 622125 - DNA, 33 bp, Homo sapien
aatgtcagcttttcccacagagtcaactgaatg

SEQ ID NO: 622126 - DNA, 33 bp, Homo sapien
aatgtcagcttttcccgcagagtcaactgaatg

SEQ ID NO: 622127 - DNA, 33 bp, Homo sapien
ctggaattccaggatcaaggggctggtttcttc

SEQ ID NO: 622128 - DNA, 33 bp, Homo sapien
ctggaattccaggatcgaggggctggtttcttc

SEQ ID NO: 622129 - DNA, 33 bp, Homo sapien
taactgcccctttctacggctgcagagactgta

SEQ ID NO: 622130 - DNA, 33 bp, Homo sapien
taactgcccctttctatggctgcagagactgta

SEQ ID NO: 622131 - DNA, 33 bp, Homo sapien
ccaaacccagccttgacaatgattaatagtaaa

SEQ ID NO: 622132 - DNA, 33 bp, Homo sapien
ccaaacccagccttgagaatgattaatagtaaa

SEQ ID NO: 622133 - DNA, 33 bp, Homo sapien
agccactagattgcaccgaagattggccgtgca

SEQ ID NO: 622134 - DNA, 33 bp, Homo sapien
agccactagattgcactgaagattggccgtgca

SEQ ID NO: 622135 - DNA, 33 bp, Homo sapien
caggttgattccagacagagaggggcacctcca

SEQ ID NO: 622136 - DNA, 33 bp, Homo sapien
caggttgattccagacggagaggggcacctcca

SEQ ID NO: 622137 - DNA, 33 bp, Homo sapien
ataagagggactcagtcaagaaatgcaaaagga

SEQ ID NO: 622138 - DNA, 33 bp, Homo sapien
ataagagggactcagtgaagaaatgcaaaagga

SEQ ID NO: 622139 - DNA, 33 bp, Homo sapien
tggcttacaggatgcaacctatttgatggaact

SEQ ID NO: 622140 - DNA, 33 bp, Homo sapien
tggcttacaggatgcagcctatttgatggaact

SEQ ID NO: 622141 - DNA, 33 bp, Homo sapien
ctatagaagtgactataagttccatcaaatagg

SEQ ID NO: 622142 - DNA, 33 bp, Homo sapien
ctatagaagtgactatgagttccatcaaatagg

SEQ ID NO: 622143 - DNA, 33 bp, Homo sapien
attcccctggagcctcactcggtaagatgagca

SEQ ID NO: 622144 - DNA, 33 bp, Homo sapien
attcccctggagcctcgctcggtaagatgagca

SEQ ID NO: 622145 - DNA, 33 bp, Homo sapien
aaagaagaaattataccgatgctgtacaatctc

SEQ ID NO: 622146 - DNA, 33 bp, Homo sapien
aaagaagaaattatactgatgctgtacaatctc

SEQ ID NO: 622147 - DNA, 33 bp, Homo sapien
ccagttgattcatgacaccattgagttagaagt

SEQ ID NO: 622148 - DNA, 33 bp, Homo sapien
ccagttgattcatgacgccattgagttagaagt

SEQ ID NO: 622149 - DNA, 33 bp, Homo sapien
ccattaattttcccaaagtgttcaaaatgagtt

SEQ ID NO: 622150 - DNA, 33 bp, Homo sapien
ccattaattttcccaaggtgttcaaaatgagtt

SEQ ID NO: 622151 - DNA, 33 bp, Homo sapien
tcttctctgaaaacaactgaacatttttcagag

SEQ ID NO: 622152 - DNA, 33 bp, Homo sapien
tcttctctgaaaacaattgaacatttttcagag

SEQ ID NO: 622153 - DNA, 33 bp, Homo sapien
caaacacgtttgtctgaatcttaaaagtaactg

SEQ ID NO: 622154 - DNA, 33 bp, Homo sapien
caaacacgtttgtctggatcttaaaagtaactg

SEQ ID NO: 622155 - DNA, 33 bp, Homo sapien
gtgacaaaatccctacacgtggctaccaatggc

SEQ ID NO: 622156 - DNA, 33 bp, Homo sapien
gtgacaaaatccctactcgtggctaccaatggc

SEQ ID NO: 622157 - DNA, 33 bp, Homo sapien
gccaggccaaggtcacccccatcaagaaggagg

SEQ ID NO: 622158 - DNA, 33 bp, Homo sapien
gccaggccaaggtcactcccatcaagaaggagg

SEQ ID NO: 622159 - DNA, 33 bp, Homo sapien
tctccctttgcatggagtaagactgactgcttc

SEQ ID NO: 622160 - DNA, 33 bp, Homo sapien
tctccctttgcatggattaagactgactgcttc

SEQ ID NO: 622161 - DNA, 33 bp, Homo sapien
gtgtagcctttagtgacacaaagttatatgggt

SEQ ID NO: 622162 - DNA, 33 bp, Homo sapien
gtgtagcctttagtgatacaaagttatatgggt

SEQ ID NO: 622163 - DNA, 33 bp, Homo sapien
tgggtggagccacacacctgagttatttgtcat

SEQ ID NO: 622164 - DNA, 33 bp, Homo sapien
tgggtggagccacacatctgagttatttgtcat

SEQ ID NO: 622165 - DNA, 33 bp, Homo sapien
gcaatatagcgataacccacctcttaaagaaaa

SEQ ID NO: 622166 - DNA, 33 bp, Homo sapien
gcaatatagcgataactcacctcttaaagaaaa

SEQ ID NO: 622167 - DNA, 33 bp, Homo sapien
cctttgctttctgagacggaaagttggtgtggc

SEQ ID NO: 622168 - DNA, 33 bp, Homo sapien
cctttgctttctgagatggaaagttggtgtggc

SEQ ID NO: 622169 - DNA, 33 bp, Homo sapien
ctgcttagacgcatcaaatggttaatctgagac

SEQ ID NO: 622170 - DNA, 33 bp, Homo sapien
ctgcttagacgcatcagatggttaatctgagac

SEQ ID NO: 622171 - DNA, 33 bp, Homo sapien
ttcagatttacattcacagttaacacatttatt

SEQ ID NO: 622172 - DNA, 33 bp, Homo sapien
ttcagatttacattcagagttaacacatttatt

SEQ ID NO: 622173 - DNA, 33 bp, Homo sapien
atctcagagatccttgaactaacatccagtcat

SEQ ID NO: 622174 - DNA, 33 bp, Homo sapien
atctcagagatccttgtactaacatccagtcat

SEQ ID NO: 622175 - DNA, 33 bp, Homo sapien
tgaaccgaatgtagagaccttagttataatcct

SEQ ID NO: 622176 - DNA, 33 bp, Homo sapien
tgaaccgaatgtagaggccttagttataatcct

SEQ ID NO: 622177 - DNA, 33 bp, Homo sapien
acggatgaatgaaaaaacaaaataggtacattt

SEQ ID NO: 622178 - DNA, 33 bp, Homo sapien
acggatgaatgaaaaatcaaaataggtacattt

SEQ ID NO: 622179 - DNA, 33 bp, Homo sapien
aattatacccaaacaaagtgaccatgcaatttc

SEQ ID NO: 622180 - DNA, 33 bp, Homo sapien
aattatacccaaacaaggtgaccatgcaatttc

SEQ ID NO: 622181 - DNA, 33 bp, Homo sapien
gaaaagtctcttcagaacttggtgaagtagtag

SEQ ID NO: 622182 - DNA, 33 bp, Homo sapien
gaaaagtctcttcagatcttggtgaagtagtag

SEQ ID NO: 622183 - DNA, 33 bp, Homo sapien
ctcaatttacattttaaaaaaccagccagtcac

SEQ ID NO: 622184 - DNA, 33 bp, Homo sapien
ctcaatttacattttagaaaaccagccagtcac

SEQ ID NO: 622185 - DNA, 33 bp, Homo sapien
ctaaagaaaccagagaatatgccacgaaaatat

SEQ ID NO: 622186 - DNA, 33 bp, Homo sapien
ctaaagaaaccagagagtatgccacgaaaatat

SEQ ID NO: 622187 - DNA, 33 bp, Homo sapien
taaaatgcagatatcacgttataaagtttcaga

SEQ ID NO: 622188 - DNA, 33 bp, Homo sapien
taaaatgcagatatcatgttataaagtttcaga

SEQ ID NO: 622189 - DNA, 33 bp, Homo sapien
agctgcatcacatctaaaacttttctccaagta

SEQ ID NO: 622190 - DNA, 33 bp, Homo sapien
agctgcatcacatctagaacttttctccaagta

SEQ ID NO: 622191 - DNA, 33 bp, Homo sapien
caaactctctacttagcacggtttacataatca

SEQ ID NO: 622192 - DNA, 33 bp, Homo sapien
caaactctctacttagtacggtttacataatca

SEQ ID NO: 622193 - DNA, 33 bp, Homo sapien
aacaagtagaggtagacggcaattccaatgaaa

SEQ ID NO: 622194 - DNA, 33 bp, Homo sapien
aacaagtagaggtagatggcaattccaatgaaa

SEQ ID NO: 622195 - DNA, 33 bp, Homo sapien
gatgaacaagatgtcgcaaagcaatggtaatgt

SEQ ID NO: 622196 - DNA, 33 bp, Homo sapien
gatgaacaagatgtcggaaagcaatggtaatgt

SEQ ID NO: 622197 - DNA, 33 bp, Homo sapien
tgttgtttaagtggtacggcagatttagtatct

SEQ ID NO: 622198 - DNA, 33 bp, Homo sapien
tgttgtttaagtggtagggcagatttagtatct

SEQ ID NO: 622199 - DNA, 33 bp, Homo sapien
gggctaaagggataaaaatgtagtggaataagc

SEQ ID NO: 622200 - DNA, 33 bp, Homo sapien
gggctaaagggataaagatgtagtggaataagc

SEQ ID NO: 622201 - DNA, 33 bp, Homo sapien
caaaaagggccaggacgcttcaacatcttttac

SEQ ID NO: 622202 - DNA, 33 bp, Homo sapien
caaaaagggccaggactcttcaacatcttttac

SEQ ID NO: 622203 - DNA, 33 bp, Homo sapien
cacattcagaccatagcaagaggtttctaaatt

SEQ ID NO: 622204 - DNA, 33 bp, Homo sapien
cacattcagaccatagtaagaggtttctaaatt

SEQ ID NO: 622205 - DNA, 33 bp, Homo sapien
taaatttagctcaaagaatggcaaagtaatgaa

SEQ ID NO: 622206 - DNA, 33 bp, Homo sapien
taaatttagctcaaagtatggcaaagtaatgaa

SEQ ID NO: 622207 - DNA, 33 bp, Homo sapien
tattattttatagacactatcatcgaagagagg

SEQ ID NO: 622208 - DNA, 33 bp, Homo sapien
tattattttatagacattatcatcgaagagagg

SEQ ID NO: 622209 - DNA, 33 bp, Homo sapien
cagaatttgaatccacaaaatttacttgggaac

SEQ ID NO: 622210 - DNA, 33 bp, Homo sapien
cagaatttgaatccacgaaatttacttgggaac

SEQ ID NO: 622211 - DNA, 33 bp, Homo sapien
gactatccttttccaccagctataacctacata

SEQ ID NO: 622212 - DNA, 33 bp, Homo sapien
gactatccttttccactagctataacctacata

SEQ ID NO: 622213 - DNA, 33 bp, Homo sapien
ctacaatcagtgaattcaaacacaaattggccc

SEQ ID NO: 622214 - DNA, 33 bp, Homo sapien
ctacaatcagtgaatttaaacacaaattggccc

SEQ ID NO: 622215 - DNA, 33 bp, Homo sapien
gtttaaactaagttccaacaaggcagaagtagt

SEQ ID NO: 622216 - DNA, 33 bp, Homo sapien
gtttaaactaagttcccacaaggcagaagtagt

SEQ ID NO: 622217 - DNA, 33 bp, Homo sapien
gaagttggtctttccaagatcattacctgctga

SEQ ID NO: 622218 - DNA, 33 bp, Homo sapien
gaagttggtctttccaggatcattacctgctga

SEQ ID NO: 622219 - DNA, 33 bp, Homo sapien
tgtagttcgtcatatacactagataggtatggg

SEQ ID NO: 622220 - DNA, 33 bp, Homo sapien
tgtagttcgtcatatatactagataggtatggg

SEQ ID NO: 622221 - DNA, 33 bp, Homo sapien
tccaccgtagttgccaatgaactcagacatgga

SEQ ID NO: 622222 - DNA, 33 bp, Homo sapien
tccaccgtagttgccattgaactcagacatgga

SEQ ID NO: 622223 - DNA, 33 bp, Homo sapien
atcttggatgtcggaaacttcaattatctgcag

SEQ ID NO: 622224 - DNA, 33 bp, Homo sapien
atcttggatgtcggaaccttcaattatctgcag

SEQ ID NO: 622225 - DNA, 33 bp, Homo sapien
atacaggtggtggcaaagaaaatagaaggcgat

SEQ ID NO: 622226 - DNA, 33 bp, Homo sapien
atacaggtggtggcaatgaaaatagaaggcgat

SEQ ID NO: 622227 - DNA, 33 bp, Homo sapien
acatagtttccaaatcacataagtcctagaatc

SEQ ID NO: 622228 - DNA, 33 bp, Homo sapien
acatagtttccaaatcgcataagtcctagaatc

SEQ ID NO: 622229 - DNA, 33 bp, Homo sapien
cctattaagacaatgaacagatttgcaagaatg

SEQ ID NO: 622230 - DNA, 33 bp, Homo sapien
cctattaagacaatgatcagatttgcaagaatg

SEQ ID NO: 622231 - DNA, 33 bp, Homo sapien
tgaggcaagactatttcaaagatatcagcgata

SEQ ID NO: 622232 - DNA, 33 bp, Homo sapien
tgaggcaagactatttgaaagatatcagcgata

SEQ ID NO: 622233 - DNA, 33 bp, Homo sapien
tcagctgctactccgcaatgagagccactggag

SEQ ID NO: 622234 - DNA, 33 bp, Homo sapien
tcagctgctactccgcgatgagagccactggag

SEQ ID NO: 622235 - DNA, 33 bp, Homo sapien
ttggagtctaatgctaaccatgtttcctcatac

SEQ ID NO: 622236 - DNA, 33 bp, Homo sapien
ttggagtctaatgctagccatgtttcctcatac

SEQ ID NO: 622237 - DNA, 33 bp, Homo sapien
cactctagttcctgaagcaattggtctgcagtg

SEQ ID NO: 622238 - DNA, 33 bp, Homo sapien
cactctagttcctgaatcaattggtctgcagtg

SEQ ID NO: 622239 - DNA, 33 bp, Homo sapien
cttcccaacatgtgaacattaccttatctggca

SEQ ID NO: 622240 - DNA, 33 bp, Homo sapien
cttcccaacatgtgaatattaccttatctggca

SEQ ID NO: 622241 - DNA, 33 bp, Homo sapien
tgggatggatatgagacattatatgggaaaggc

SEQ ID NO: 622242 - DNA, 33 bp, Homo sapien
tgggatggatatgagatattatatgggaaaggc

SEQ ID NO: 622243 - DNA, 33 bp, Homo sapien
aaatctcaaaattagaccaatagaagagacagg

SEQ ID NO: 622244 - DNA, 33 bp, Homo sapien
aaatctcaaaattagatcaatagaagagacagg

SEQ ID NO: 622245 - DNA, 33 bp, Homo sapien
cgcagggctgaagttaacagagcacagaccacc

SEQ ID NO: 622246 - DNA, 33 bp, Homo sapien
cgcagggctgaagttagcagagcacagaccacc

SEQ ID NO: 622247 - DNA, 33 bp, Homo sapien
gtcaggaacaacatacagtatcttaaaagcaat

SEQ ID NO: 622248 - DNA, 33 bp, Homo sapien
gtcaggaacaacatactgtatcttaaaagcaat

SEQ ID NO: 622249 - DNA, 33 bp, Homo sapien
agcacgtttgctcttggagcctcttggcacaaa

SEQ ID NO: 622250 - DNA, 33 bp, Homo sapien
agcacgtttgctcttgtagcctcttggcacaaa

SEQ ID NO: 622251 - DNA, 33 bp, Homo sapien
agaaccaggctcttaacatccccacaaatcttt

SEQ ID NO: 622252 - DNA, 33 bp, Homo sapien
agaaccaggctcttaatatccccacaaatcttt

SEQ ID NO: 622253 - DNA, 33 bp, Homo sapien
ctttaattatagcttaagaaaggccaacatttt

SEQ ID NO: 622254 - DNA, 33 bp, Homo sapien
ctttaattatagcttatgaaaggccaacatttt

SEQ ID NO: 622255 - DNA, 33 bp, Homo sapien
aaaaattcctgcagaacgtttcaggctcttttc

SEQ ID NO: 622256 - DNA, 33 bp, Homo sapien
aaaaattcctgcagaatgtttcaggctcttttc

SEQ ID NO: 622257 - DNA, 33 bp, Homo sapien
gttattgcttccaatgaaatgttttgacatttc

SEQ ID NO: 622258 - DNA, 33 bp, Homo sapien
gttattgcttccaatggaatgttttgacatttc

SEQ ID NO: 622259 - DNA, 33 bp, Homo sapien
tattcctactgaaacacacttaattcaagagcc

SEQ ID NO: 622260 - DNA, 33 bp, Homo sapien
tattcctactgaaacagacttaattcaagagcc

SEQ ID NO: 622261 - DNA, 33 bp, Homo sapien
tgacacactgagtttacaattggtatgtgaggt

SEQ ID NO: 622262 - DNA, 33 bp, Homo sapien
tgacacactgagtttagaattggtatgtgaggt

SEQ ID NO: 622263 - DNA, 33 bp, Homo sapien
caatcctgcttgtagacatgactgttcctgttt

SEQ ID NO: 622264 - DNA, 33 bp, Homo sapien
caatcctgcttgtagatatgactgttcctgttt

SEQ ID NO: 622265 - DNA, 33 bp, Homo sapien
gaagcctgtgaaaaccccttagagacaagtcct

SEQ ID NO: 622266 - DNA, 33 bp, Homo sapien
gaagcctgtgaaaacctcttagagacaagtcct

SEQ ID NO: 622267 - DNA, 33 bp, Homo sapien
aaatagtaggcatcaacgttaaacttcccaatt

SEQ ID NO: 622268 - DNA, 33 bp, Homo sapien
aaatagtaggcatcaatgttaaacttcccaatt

SEQ ID NO: 622269 - DNA, 33 bp, Homo sapien
cagcccttgacaaacaatgagataggtgacatt

SEQ ID NO: 622270 - DNA, 33 bp, Homo sapien
cagcccttgacaaacagtgagataggtgacatt

SEQ ID NO: 622271 - DNA, 33 bp, Homo sapien
aggatattgcccttgacgtccaagcataagaaa

SEQ ID NO: 622272 - DNA, 33 bp, Homo sapien
aggatattgcccttgatgtccaagcataagaaa

SEQ ID NO: 622273 - DNA, 33 bp, Homo sapien
tggccacatacgctaaaagtaaatctcaattgt

SEQ ID NO: 622274 - DNA, 33 bp, Homo sapien
tggccacatacgctaagagtaaatctcaattgt

SEQ ID NO: 622275 - DNA, 33 bp, Homo sapien
gtaaagggcttcagtacagtcccaagttggcaa

SEQ ID NO: 622276 - DNA, 33 bp, Homo sapien
gtaaagggcttcagtagagtcccaagttggcaa

SEQ ID NO: 622277 - DNA, 33 bp, Homo sapien
cgagcattctagaaaccatcatatcttgttatt

SEQ ID NO: 622278 - DNA, 33 bp, Homo sapien
cgagcattctagaaacgatcatatcttgttatt

SEQ ID NO: 622279 - DNA, 33 bp, Homo sapien
ttcccattggtgacaaatatgatgaagaaccta

SEQ ID NO: 622280 - DNA, 33 bp, Homo sapien
ttcccattggtgacaagtatgatgaagaaccta

SEQ ID NO: 622281 - DNA, 33 bp, Homo sapien
gtgcaggacactgttccaagacctttttatata

SEQ ID NO: 622282 - DNA, 33 bp, Homo sapien
gtgcaggacactgttctaagacctttttatata

SEQ ID NO: 622283 - DNA, 33 bp, Homo sapien
attaaattgtcttctacgtgcctgtcttgtgga

SEQ ID NO: 622284 - DNA, 33 bp, Homo sapien
attaaattgtcttctatgtgcctgtcttgtgga

SEQ ID NO: 622285 - DNA, 33 bp, Homo sapien
aaaggagacgacaatacaatcagatgtattgtg

SEQ ID NO: 622286 - DNA, 33 bp, Homo sapien
aaaggagacgacaatataatcagatgtattgtg

SEQ ID NO: 622287 - DNA, 33 bp, Homo sapien
aaggaggataacaccaagtcggcatctcagcca

SEQ ID NO: 622288 - DNA, 33 bp, Homo sapien
aaggaggataacaccatgtcggcatctcagcca

SEQ ID NO: 622289 - DNA, 33 bp, Homo sapien
cataagaggtgtttcacaggccagacctggaaa

SEQ ID NO: 622290 - DNA, 33 bp, Homo sapien
cataagaggtgtttcataggccagacctggaaa

SEQ ID NO: 622291 - DNA, 33 bp, Homo sapien
gtggcttggcaggtaaaatgtttgaaagcacgg

SEQ ID NO: 622292 - DNA, 33 bp, Homo sapien
gtggcttggcaggtaagatgtttgaaagcacgg

SEQ ID NO: 622293 - DNA, 33 bp, Homo sapien
gatgctctactcctgaggactgtgtaggtgtct

SEQ ID NO: 622294 - DNA, 33 bp, Homo sapien
gatgctctactcctgatgactgtgtaggtgtct

SEQ ID NO: 622295 - DNA, 33 bp, Homo sapien
ttcaaagagagggatcaaatttctggtcacctg

SEQ ID NO: 622296 - DNA, 33 bp, Homo sapien
ttcaaagagagggatcgaatttctggtcacctg

SEQ ID NO: 622297 - DNA, 33 bp, Homo sapien
aatttagtcagattagcaaaaacctccctcaaa

SEQ ID NO: 622298 - DNA, 33 bp, Homo sapien
aatttagtcagattaggaaaaacctccctcaaa

SEQ ID NO: 622299 - DNA, 33 bp, Homo sapien
cacgaccctcggctccacttcccacagtgccat

SEQ ID NO: 622300 - DNA, 33 bp, Homo sapien
cacgaccctcggctccgcttcccacagtgccat

SEQ ID NO: 622301 - DNA, 33 bp, Homo sapien
acttgcttaaggttgaagatttttctctctcat

SEQ ID NO: 622302 - DNA, 33 bp, Homo sapien
acttgcttaaggttgaggatttttctctctcat

SEQ ID NO: 622303 - DNA, 33 bp, Homo sapien
agcatagggcaatttacgctgagatgcgaatat

SEQ ID NO: 622304 - DNA, 33 bp, Homo sapien
agcatagggcaatttaggctgagatgcgaatat

SEQ ID NO: 622305 - DNA, 33 bp, Homo sapien
ctggcaaagtacttgacgttttcattgaaactg

SEQ ID NO: 622306 - DNA, 33 bp, Homo sapien
ctggcaaagtacttgatgttttcattgaaactg

SEQ ID NO: 622307 - DNA, 33 bp, Homo sapien
atatgagtagctaaaacgttaaataccaaagtt

SEQ ID NO: 622308 - DNA, 33 bp, Homo sapien
atatgagtagctaaaatgttaaataccaaagtt

SEQ ID NO: 622309 - DNA, 33 bp, Homo sapien
gtgccagggaataggccgataacaccagtgatg

SEQ ID NO: 622310 - DNA, 33 bp, Homo sapien
gtgccagggaataggctgataacaccagtgatg

SEQ ID NO: 622311 - DNA, 33 bp, Homo sapien
atttgctgtttatcccaagagtggctaagatgt

SEQ ID NO: 622312 - DNA, 33 bp, Homo sapien
atttgctgtttatcccgagagtggctaagatgt

SEQ ID NO: 622313 - DNA, 33 bp, Homo sapien
actggttggagaagaaaaagaacgaggcagagg

SEQ ID NO: 622314 - DNA, 33 bp, Homo sapien
actggttggagaagaagaagaacgaggcagagg

SEQ ID NO: 622315 - DNA, 33 bp, Homo sapien
atgtatctgacattccactcagtgtagaagata

SEQ ID NO: 622316 - DNA, 33 bp, Homo sapien
atgtatctgacattccgctcagtgtagaagata

SEQ ID NO: 622317 - DNA, 33 bp, Homo sapien
ggtagagacccttgaccagctaatcagaggcaa

SEQ ID NO: 622318 - DNA, 33 bp, Homo sapien
ggtagagacccttgacgagctaatcagaggcaa

SEQ ID NO: 622319 - DNA, 33 bp, Homo sapien
tcatcttactagtccacctcaagtcttaagcca

SEQ ID NO: 622320 - DNA, 33 bp, Homo sapien
tcatcttactagtccagctcaagtcttaagcca

SEQ ID NO: 622321 - DNA, 33 bp, Homo sapien
tagggacagaatttatcagaagttaaaactcta

SEQ ID NO: 622322 - DNA, 33 bp, Homo sapien
tagggacagaatttattagaagttaaaactcta

SEQ ID NO: 622323 - DNA, 33 bp, Homo sapien
tttgccaggaaggaaacaaaaacagcgaagggc

SEQ ID NO: 622324 - DNA, 33 bp, Homo sapien
tttgccaggaaggaaagaaaaacagcgaagggc

SEQ ID NO: 622325 - DNA, 33 bp, Homo sapien
gccacccctttctaacccaacaactccttgacc

SEQ ID NO: 622326 - DNA, 33 bp, Homo sapien
gccacccctttctaactcaacaactccttgacc

SEQ ID NO: 622327 - DNA, 33 bp, Homo sapien
agagagaaacagggcacgttttaatgaatgaca

SEQ ID NO: 622328 - DNA, 33 bp, Homo sapien
agagagaaacagggcatgttttaatgaatgaca

SEQ ID NO: 622329 - DNA, 33 bp, Homo sapien
tttctctctggtcagggaagggttttcagttag

SEQ ID NO: 622330 - DNA, 33 bp, Homo sapien
tttctctctggtcaggtaagggttttcagttag

SEQ ID NO: 622331 - DNA, 33 bp, Homo sapien
ggagagaattgcaccaaataaatgcaaaaatat

SEQ ID NO: 622332 - DNA, 33 bp, Homo sapien
ggagagaattgcaccagataaatgcaaaaatat

SEQ ID NO: 622333 - DNA, 33 bp, Homo sapien
gagtggtcttcaaatacctgaaaagctgtcacg

SEQ ID NO: 622334 - DNA, 33 bp, Homo sapien
gagtggtcttcaaatatctgaaaagctgtcacg

SEQ ID NO: 622335 - DNA, 33 bp, Homo sapien
atcaacctaatagcaacgatcccactcaaagag

SEQ ID NO: 622336 - DNA, 33 bp, Homo sapien
atcaacctaatagcaatgatcccactcaaagag

SEQ ID NO: 622337 - DNA, 33 bp, Homo sapien
aacagggctcatctatcaatacttcagcaggtg

SEQ ID NO: 622338 - DNA, 33 bp, Homo sapien
aacagggctcatctattaatacttcagcaggtg

SEQ ID NO: 622339 - DNA, 33 bp, Homo sapien
aaactctgggaatggaacccagcaattggtttt

SEQ ID NO: 622340 - DNA, 33 bp, Homo sapien
aaactctgggaatggagcccagcaattggtttt

SEQ ID NO: 622341 - DNA, 33 bp, Homo sapien
ctctgtaggcctgaggaagttgagcaggacata

SEQ ID NO: 622342 - DNA, 33 bp, Homo sapien
ctctgtaggcctgagggagttgagcaggacata

SEQ ID NO: 622343 - DNA, 33 bp, Homo sapien
gatagtagagtagaaggcttcaaaggatcaaac

SEQ ID NO: 622344 - DNA, 33 bp, Homo sapien
gatagtagagtagaagtcttcaaaggatcaaac

SEQ ID NO: 622345 - DNA, 33 bp, Homo sapien
ttttcaaacatttccaaggtgatcaggaatcat

SEQ ID NO: 622346 - DNA, 33 bp, Homo sapien
ttttcaaacatttccagggtgatcaggaatcat

SEQ ID NO: 622347 - DNA, 33 bp, Homo sapien
atataaccttgccacaccacaagaaaacttgtt

SEQ ID NO: 622348 - DNA, 33 bp, Homo sapien
atataaccttgccacatcacaagaaaacttgtt

SEQ ID NO: 622349 - DNA, 33 bp, Homo sapien
tccaggagtgagtctacgaaaaattttgaaaga

SEQ ID NO: 622350 - DNA, 33 bp, Homo sapien
tccaggagtgagtctatgaaaaattttgaaaga

SEQ ID NO: 622351 - DNA, 33 bp, Homo sapien
caccaatttgatctcaaaaaactacagaccctg

SEQ ID NO: 622352 - DNA, 33 bp, Homo sapien
caccaatttgatctcagaaaactacagaccctg

SEQ ID NO: 622353 - DNA, 33 bp, Homo sapien
gaggaaagatgaaaaaatgatgtttttgctcct

SEQ ID NO: 622354 - DNA, 33 bp, Homo sapien
gaggaaagatgaaaaagtgatgtttttgctcct

SEQ ID NO: 622355 - DNA, 33 bp, Homo sapien
tctttcctttgccactcaataactctgttcgtc

SEQ ID NO: 622356 - DNA, 33 bp, Homo sapien
tctttcctttgccactgaataactctgttcgtc

SEQ ID NO: 622357 - DNA, 33 bp, Homo sapien
gcccaatctagtcacccgaatccttgagcggca

SEQ ID NO: 622358 - DNA, 33 bp, Homo sapien
gcccaatctagtcacctgaatccttgagcggca

SEQ ID NO: 622359 - DNA, 33 bp, Homo sapien
ttgaccttaccctacacatgcaacttctattgc

SEQ ID NO: 622360 - DNA, 33 bp, Homo sapien
ttgaccttaccctacatatgcaacttctattgc

SEQ ID NO: 622361 - DNA, 33 bp, Homo sapien
acctgattttgaatgccgcatagaactaggtat

SEQ ID NO: 622362 - DNA, 33 bp, Homo sapien
acctgattttgaatgctgcatagaactaggtat

SEQ ID NO: 622363 - DNA, 33 bp, Homo sapien
tttaaaagcaaaccacaattacagatcattctt

SEQ ID NO: 622364 - DNA, 33 bp, Homo sapien
tttaaaagcaaaccactattacagatcattctt

SEQ ID NO: 622365 - DNA, 33 bp, Homo sapien
caccagtgattttacacagtaggacctcaaaca

SEQ ID NO: 622366 - DNA, 33 bp, Homo sapien
caccagtgattttacatagtaggacctcaaaca

SEQ ID NO: 622367 - DNA, 33 bp, Homo sapien
ctctcctctcaactccaatatacttacaccagc

SEQ ID NO: 622368 - DNA, 33 bp, Homo sapien
ctctcctctcaactcccatatacttacaccagc

SEQ ID NO: 622369 - DNA, 33 bp, Homo sapien
taattgcagggagaagcagttcactccactaat

SEQ ID NO: 622370 - DNA, 33 bp, Homo sapien
taattgcagggagaagtagttcactccactaat

SEQ ID NO: 622371 - DNA, 33 bp, Homo sapien
actggcacagagagcaccgataatttggcttaa

SEQ ID NO: 622372 - DNA, 33 bp, Homo sapien
actggcacagagagcagcgataatttggcttaa

SEQ ID NO: 622373 - DNA, 33 bp, Homo sapien
gcattttcaattcataactgggcacctcaggag

SEQ ID NO: 622374 - DNA, 33 bp, Homo sapien
gcattttcaattcatagctgggcacctcaggag

SEQ ID NO: 622375 - DNA, 33 bp, Homo sapien
gagggtggtttatcaactctctcctctacttaa

SEQ ID NO: 622376 - DNA, 33 bp, Homo sapien
gagggtggtttatcaagtctctcctctacttaa

SEQ ID NO: 622377 - DNA, 33 bp, Homo sapien
ctgatggtgttgggaaccttctgccgtgagcac

SEQ ID NO: 622378 - DNA, 33 bp, Homo sapien
ctgatggtgttgggaatcttctgccgtgagcac

SEQ ID NO: 622379 - DNA, 33 bp, Homo sapien
ctctctgcctcagacaatatctctgacaacagt

SEQ ID NO: 622380 - DNA, 33 bp, Homo sapien
ctctctgcctcagacagtatctctgacaacagt

SEQ ID NO: 622381 - DNA, 33 bp, Homo sapien
ccagaacaagtccttaaaacacactctcaaagt

SEQ ID NO: 622382 - DNA, 33 bp, Homo sapien
ccagaacaagtccttacaacacactctcaaagt

SEQ ID NO: 622383 - DNA, 33 bp, Homo sapien
ttttgtgtcaacagaaaagctagcaaacatgtt

SEQ ID NO: 622384 - DNA, 33 bp, Homo sapien
ttttgtgtcaacagaagagctagcaaacatgtt

SEQ ID NO: 622385 - DNA, 33 bp, Homo sapien
ttagctctggcaaacaaatccatacataaggag

SEQ ID NO: 622386 - DNA, 33 bp, Homo sapien
ttagctctggcaaacagatccatacataaggag

SEQ ID NO: 622387 - DNA, 33 bp, Homo sapien
gctggtcaagatcccaactgaagtcgtcatttg

SEQ ID NO: 622388 - DNA, 33 bp, Homo sapien
gctggtcaagatcccagctgaagtcgtcatttg

SEQ ID NO: 622389 - DNA, 33 bp, Homo sapien
caaactgacaaacttaacttaagattaaagcac

SEQ ID NO: 622390 - DNA, 33 bp, Homo sapien
caaactgacaaacttagcttaagattaaagcac

SEQ ID NO: 622391 - DNA, 33 bp, Homo sapien
aaaccctttgtattccactgttttacatactgg

SEQ ID NO: 622392 - DNA, 33 bp, Homo sapien
aaaccctttgtattcctctgttttacatactgg

SEQ ID NO: 622393 - DNA, 33 bp, Homo sapien
gctttaaggcaaattaagttagagcttcctttg

SEQ ID NO: 622394 - DNA, 33 bp, Homo sapien
gctttaaggcaaattaggttagagcttcctttg

SEQ ID NO: 622395 - DNA, 33 bp, Homo sapien
ctcacttccccatttaggtacaccaatattcac

SEQ ID NO: 622396 - DNA, 33 bp, Homo sapien
ctcacttccccatttatgtacaccaatattcac

SEQ ID NO: 622397 - DNA, 33 bp, Homo sapien
attattcagacataacactctgagaagggagta

SEQ ID NO: 622398 - DNA, 33 bp, Homo sapien
attattcagacataacgctctgagaagggagta

SEQ ID NO: 622399 - DNA, 33 bp, Homo sapien
atgcaagtaaaattcaatctccatttcaacact

SEQ ID NO: 622400 - DNA, 33 bp, Homo sapien
atgcaagtaaaattcagtctccatttcaacact

SEQ ID NO: 622401 - DNA, 33 bp, Homo sapien
gagacatttggcaatacctgggaacattttttg

SEQ ID NO: 622402 - DNA, 33 bp, Homo sapien
gagacatttggcaatatctgggaacattttttg

SEQ ID NO: 622403 - DNA, 33 bp, Homo sapien
tgttaaatttgttgtaactatgaggaaaaaaat

SEQ ID NO: 622404 - DNA, 33 bp, Homo sapien
tgttaaatttgttgtacctatgaggaaaaaaat

SEQ ID NO: 622405 - DNA, 33 bp, Homo sapien
accaaagctatgtaggaactggcaggcaaccta

SEQ ID NO: 622406 - DNA, 33 bp, Homo sapien
accaaagctatgtaggcactggcaggcaaccta

SEQ ID NO: 622407 - DNA, 33 bp, Homo sapien
cagagaaagcagatgcagaaagatggacatgga

SEQ ID NO: 622408 - DNA, 33 bp, Homo sapien
cagagaaagcagatgcggaaagatggacatgga

SEQ ID NO: 622409 - DNA, 33 bp, Homo sapien
tttttctctttttaaccgctctatgtttctgct

SEQ ID NO: 622410 - DNA, 33 bp, Homo sapien
tttttctctttttaactgctctatgtttctgct

SEQ ID NO: 622411 - DNA, 33 bp, Homo sapien
gtcatttagtctcttgcattctcttatctcaga

SEQ ID NO: 622412 - DNA, 33 bp, Homo sapien
gtcatttagtctcttgtattctcttatctcaga

SEQ ID NO: 622413 - DNA, 33 bp, Homo sapien
tcatatcctcacaatcagatgaggaaaccacgg

SEQ ID NO: 622414 - DNA, 33 bp, Homo sapien
tcatatcctcacaatcggatgaggaaaccacgg

SEQ ID NO: 622415 - DNA, 33 bp, Homo sapien
cctagaatgaatgatacggccttgaatagtttt

SEQ ID NO: 622416 - DNA, 33 bp, Homo sapien
cctagaatgaatgatatggccttgaatagtttt

SEQ ID NO: 622417 - DNA, 33 bp, Homo sapien
tccctgtgagatcatgcagtaaaattagaggaa

SEQ ID NO: 622418 - DNA, 33 bp, Homo sapien
tccctgtgagatcatggagtaaaattagaggaa

SEQ ID NO: 622419 - DNA, 33 bp, Homo sapien
acacacacaaataaaaaggtgatcaaatgaatt

SEQ ID NO: 622420 - DNA, 33 bp, Homo sapien
acacacacaaataaaatggtgatcaaatgaatt

SEQ ID NO: 622421 - DNA, 33 bp, Homo sapien
ggggagtatccaaatcactgagtcacaagtaat

SEQ ID NO: 622422 - DNA, 33 bp, Homo sapien
ggggagtatccaaatcgctgagtcacaagtaat

SEQ ID NO: 622423 - DNA, 33 bp, Homo sapien
actccaacaggtatacccatctcatcacaatgg

SEQ ID NO: 622424 - DNA, 33 bp, Homo sapien
actccaacaggtatactcatctcatcacaatgg

SEQ ID NO: 622425 - DNA, 33 bp, Homo sapien
agttccagaagcattgccagtgctaagagtgaa

SEQ ID NO: 622426 - DNA, 33 bp, Homo sapien
agttccagaagcattgtcagtgctaagagtgaa

SEQ ID NO: 622427 - DNA, 33 bp, Homo sapien
taactagaagtgagaaatattggttcaagtggt

SEQ ID NO: 622428 - DNA, 33 bp, Homo sapien
taactagaagtgagaagtattggttcaagtggt

SEQ ID NO: 622429 - DNA, 33 bp, Homo sapien
tctagactcagttgtcccttcacagaagccttt

SEQ ID NO: 622430 - DNA, 33 bp, Homo sapien
tctagactcagttgtctcttcacagaagccttt

SEQ ID NO: 622431 - DNA, 33 bp, Homo sapien
ctacatactcacaataccaccattgaaatcggg

SEQ ID NO: 622432 - DNA, 33 bp, Homo sapien
ctacatactcacaatatcaccattgaaatcggg

SEQ ID NO: 622433 - DNA, 33 bp, Homo sapien
aaatatgtagtccacaagtttgtttgaaaaaca

SEQ ID NO: 622434 - DNA, 33 bp, Homo sapien
aaatatgtagtccacaggtttgtttgaaaaaca

SEQ ID NO: 622435 - DNA, 33 bp, Homo sapien
gagaacagtgtggaaccaaaccatgagtcagta

SEQ ID NO: 622436 - DNA, 33 bp, Homo sapien
gagaacagtgtggaacgaaaccatgagtcagta

SEQ ID NO: 622437 - DNA, 33 bp, Homo sapien
taaaataacataactagattctctctcagttct

SEQ ID NO: 622438 - DNA, 33 bp, Homo sapien
taaaataacataactatattctctctcagttct

SEQ ID NO: 622439 - DNA, 33 bp, Homo sapien
atagggaaggtttttaacactaggcatgatcag

SEQ ID NO: 622440 - DNA, 33 bp, Homo sapien
atagggaaggtttttagcactaggcatgatcag

SEQ ID NO: 622441 - DNA, 33 bp, Homo sapien
ctctgctattgggacacatttcttcatggctta

SEQ ID NO: 622442 - DNA, 33 bp, Homo sapien
ctctgctattgggacatatttcttcatggctta

SEQ ID NO: 622443 - DNA, 33 bp, Homo sapien
tgcctgtgatctagaaaccagcttgactgtcct

SEQ ID NO: 622444 - DNA, 33 bp, Homo sapien
tgcctgtgatctagaagccagcttgactgtcct

SEQ ID NO: 622445 - DNA, 33 bp, Homo sapien
cagcagtaaatatgccagctgagtgatatccat

SEQ ID NO: 622446 - DNA, 33 bp, Homo sapien
cagcagtaaatatgccggctgagtgatatccat

SEQ ID NO: 622447 - DNA, 33 bp, Homo sapien
gctatacactcctatcactgaaaaacacatgat

SEQ ID NO: 622448 - DNA, 33 bp, Homo sapien
gctatacactcctatcgctgaaaaacacatgat

SEQ ID NO: 622449 - DNA, 33 bp, Homo sapien
aagatatttgagttggaaagcgaagaggctaac

SEQ ID NO: 622450 - DNA, 33 bp, Homo sapien
aagatatttgagttggtaagcgaagaggctaac

SEQ ID NO: 622451 - DNA, 33 bp, Homo sapien
ttaataaagggcttaccaaattaaggctgtgat

SEQ ID NO: 622452 - DNA, 33 bp, Homo sapien
ttaataaagggcttacgaaattaaggctgtgat

SEQ ID NO: 622453 - DNA, 33 bp, Homo sapien
caacaagagatgaatacaaggtttgccaagcag

SEQ ID NO: 622454 - DNA, 33 bp, Homo sapien
caacaagagatgaatataaggtttgccaagcag

SEQ ID NO: 622455 - DNA, 33 bp, Homo sapien
gtacacctaaatgatacacttccgcttgtactt

SEQ ID NO: 622456 - DNA, 33 bp, Homo sapien
gtacacctaaatgatatacttccgcttgtactt

SEQ ID NO: 622457 - DNA, 33 bp, Homo sapien
cagataggccaatgtgacaaataatgatacaac

SEQ ID NO: 622458 - DNA, 33 bp, Homo sapien
cagataggccaatgtggcaaataatgatacaac

SEQ ID NO: 622459 - DNA, 33 bp, Homo sapien
ccctttaatgtcaggccgccaatattgtcctgt

SEQ ID NO: 622460 - DNA, 33 bp, Homo sapien
ccctttaatgtcaggctgccaatattgtcctgt

SEQ ID NO: 622461 - DNA, 33 bp, Homo sapien
ttaacagtggaaaaaaataacttgcaacatgta

SEQ ID NO: 622462 - DNA, 33 bp, Homo sapien
ttaacagtggaaaaaagtaacttgcaacatgta

SEQ ID NO: 622463 - DNA, 33 bp, Homo sapien
cctactctgggaatcaaggaaagttgctctaac

SEQ ID NO: 622464 - DNA, 33 bp, Homo sapien
cctactctgggaatcacggaaagttgctctaac

SEQ ID NO: 622465 - DNA, 33 bp, Homo sapien
ccatgcccgacaatcagacacttttacatcacc

SEQ ID NO: 622466 - DNA, 33 bp, Homo sapien
ccatgcccgacaatcatacacttttacatcacc

SEQ ID NO: 622467 - DNA, 33 bp, Homo sapien
ataagaaaacttcagacgctaacaattcatgaa

SEQ ID NO: 622468 - DNA, 33 bp, Homo sapien
ataagaaaacttcagatgctaacaattcatgaa

SEQ ID NO: 622469 - DNA, 33 bp, Homo sapien
atggcttcatccagacaggataaatcaaagtat

SEQ ID NO: 622470 - DNA, 33 bp, Homo sapien
atggcttcatccagacgggataaatcaaagtat

SEQ ID NO: 622471 - DNA, 33 bp, Homo sapien
tttgaggtgtctctgaagtacgttttaaagtct

SEQ ID NO: 622472 - DNA, 33 bp, Homo sapien
tttgaggtgtctctgatgtacgttttaaagtct

SEQ ID NO: 622473 - DNA, 33 bp, Homo sapien
ttaagataacacagtacggtaaaggtgtcaatt

SEQ ID NO: 622474 - DNA, 33 bp, Homo sapien
ttaagataacacagtatggtaaaggtgtcaatt

SEQ ID NO: 622475 - DNA, 33 bp, Homo sapien
tttactatttgtaccaccgtgcattccatcaat

SEQ ID NO: 622476 - DNA, 33 bp, Homo sapien
tttactatttgtaccatcgtgcattccatcaat

SEQ ID NO: 622477 - DNA, 33 bp, Homo sapien
cccaacttatcccacaaatactgccaagaatgt

SEQ ID NO: 622478 - DNA, 33 bp, Homo sapien
cccaacttatcccacatatactgccaagaatgt

SEQ ID NO: 622479 - DNA, 33 bp, Homo sapien
ctttaagtgaaaaaacagttagaatgtgcacca

SEQ ID NO: 622480 - DNA, 33 bp, Homo sapien
ctttaagtgaaaaaactgttagaatgtgcacca

SEQ ID NO: 622481 - DNA, 33 bp, Homo sapien
aaggcaataaaaatacaatttggaaatgtgtca

SEQ ID NO: 622482 - DNA, 33 bp, Homo sapien
aaggcaataaaaataccatttggaaatgtgtca

SEQ ID NO: 622483 - DNA, 33 bp, Homo sapien
gttatcgttgttaacccatcattaattttcaca

SEQ ID NO: 622484 - DNA, 33 bp, Homo sapien
gttatcgttgttaacctatcattaattttcaca

SEQ ID NO: 622485 - DNA, 33 bp, Homo sapien
actaaatgatgtttcacaagcattttaaacaac

SEQ ID NO: 622486 - DNA, 33 bp, Homo sapien
actaaatgatgtttcataagcattttaaacaac

SEQ ID NO: 622487 - DNA, 33 bp, Homo sapien
tcccagctccaggtccagctttgtccttgttga

SEQ ID NO: 622488 - DNA, 33 bp, Homo sapien
tcccagctccaggtccggctttgtccttgttga

SEQ ID NO: 622489 - DNA, 33 bp, Homo sapien
tttgtgaaagagacccaccttgtccaaggacat

SEQ ID NO: 622490 - DNA, 33 bp, Homo sapien
tttgtgaaagagacccgccttgtccaaggacat

SEQ ID NO: 622491 - DNA, 33 bp, Homo sapien
gacagtgttttggcaagaaaaaaatttagtttc

SEQ ID NO: 622492 - DNA, 33 bp, Homo sapien
gacagtgttttggcaataaaaaaatttagtttc

SEQ ID NO: 622493 - DNA, 33 bp, Homo sapien
aaacagactttgataactgatattttatgtagt

SEQ ID NO: 622494 - DNA, 33 bp, Homo sapien
aaacagactttgataagtgatattttatgtagt

SEQ ID NO: 622495 - DNA, 33 bp, Homo sapien
gttctcaaaatccacccagtagaattccctttg

SEQ ID NO: 622496 - DNA, 33 bp, Homo sapien
gttctcaaaatccacctagtagaattccctttg

SEQ ID NO: 622497 - DNA, 33 bp, Homo sapien
catagcgccttgtacaaaggatgtcgataaatg

SEQ ID NO: 622498 - DNA, 33 bp, Homo sapien
catagcgccttgtacataggatgtcgataaatg

SEQ ID NO: 622499 - DNA, 33 bp, Homo sapien
ggtgaataatcattagaaatagaccatcctgat

SEQ ID NO: 622500 - DNA, 33 bp, Homo sapien
ggtgaataatcattaggaatagaccatcctgat

SEQ ID NO: 622501 - DNA, 33 bp, Homo sapien
attattacattcccaactcacttcttactcaga

SEQ ID NO: 622502 - DNA, 33 bp, Homo sapien
attattacattcccaattcacttcttactcaga

SEQ ID NO: 622503 - DNA, 33 bp, Homo sapien
ttctggaacatcaaaaaagcaatggcctaatta

SEQ ID NO: 622504 - DNA, 33 bp, Homo sapien
ttctggaacatcaaaagagcaatggcctaatta

SEQ ID NO: 622505 - DNA, 33 bp, Homo sapien
cctactgggcaaccagactgaatccactgtttc

SEQ ID NO: 622506 - DNA, 33 bp, Homo sapien
cctactgggcaaccagcctgaatccactgtttc

SEQ ID NO: 622507 - DNA, 33 bp, Homo sapien
gtttggatgcccttgaaaaaagcaaatggatga

SEQ ID NO: 622508 - DNA, 33 bp, Homo sapien
gtttggatgcccttgagaaaagcaaatggatga

SEQ ID NO: 622509 - DNA, 33 bp, Homo sapien
ttttatttgaagtgtagataaagccatctatgt

SEQ ID NO: 622510 - DNA, 33 bp, Homo sapien
ttttatttgaagtgtatataaagccatctatgt

SEQ ID NO: 622511 - DNA, 33 bp, Homo sapien
cacggtgccattgtcacacaatctttgcaaaca

SEQ ID NO: 622512 - DNA, 33 bp, Homo sapien
cacggtgccattgtcatacaatctttgcaaaca

SEQ ID NO: 622513 - DNA, 33 bp, Homo sapien
aggaagaaaaagttagaaaagtattcagaggac

SEQ ID NO: 622514 - DNA, 33 bp, Homo sapien
aggaagaaaaagttaggaaagtattcagaggac

SEQ ID NO: 622515 - DNA, 33 bp, Homo sapien
cttttcatttgataacaaagtgcaacttgttat

SEQ ID NO: 622516 - DNA, 33 bp, Homo sapien
cttttcatttgataaccaagtgcaacttgttat

SEQ ID NO: 622517 - DNA, 33 bp, Homo sapien
agagtaattctcctatcacctgatatttcatat

SEQ ID NO: 622518 - DNA, 33 bp, Homo sapien
agagtaattctcctattacctgatatttcatat

SEQ ID NO: 622519 - DNA, 33 bp, Homo sapien
ctaggacactgcaattaaaaatgtgatttacgg

SEQ ID NO: 622520 - DNA, 33 bp, Homo sapien
ctaggacactgcaattcaaaatgtgatttacgg

SEQ ID NO: 622521 - DNA, 33 bp, Homo sapien
aataccaactaaactagaatttcacagtcactg

SEQ ID NO: 622522 - DNA, 33 bp, Homo sapien
aataccaactaaactataatttcacagtcactg

SEQ ID NO: 622523 - DNA, 33 bp, Homo sapien
ggcattgttggaagaacgaagagtacatatata

SEQ ID NO: 622524 - DNA, 33 bp, Homo sapien
ggcattgttggaagaatgaagagtacatatata

SEQ ID NO: 622525 - DNA, 33 bp, Homo sapien
gtggatcctttaaaaactgaagtgaatgcatcc

SEQ ID NO: 622526 - DNA, 33 bp, Homo sapien
gtggatcctttaaaaattgaagtgaatgcatcc

SEQ ID NO: 622527 - DNA, 33 bp, Homo sapien
tttcactgatccatccccagcacatgtgggtgg

SEQ ID NO: 622528 - DNA, 33 bp, Homo sapien
tttcactgatccatcctcagcacatgtgggtgg

SEQ ID NO: 622529 - DNA, 33 bp, Homo sapien
atttcttcagaatgctaagaaatgccactgcca

SEQ ID NO: 622530 - DNA, 33 bp, Homo sapien
atttcttcagaatgctgagaaatgccactgcca

SEQ ID NO: 622531 - DNA, 33 bp, Homo sapien
atcttcaagtctgaaacgctatatgggcagcac

SEQ ID NO: 622532 - DNA, 33 bp, Homo sapien
atcttcaagtctgaaatgctatatgggcagcac

SEQ ID NO: 622533 - DNA, 33 bp, Homo sapien
caggcagatcagtcataaggagtaggaaattca

SEQ ID NO: 622534 - DNA, 33 bp, Homo sapien
caggcagatcagtcatcaggagtaggaaattca

SEQ ID NO: 622535 - DNA, 33 bp, Homo sapien
tgcctatttgactacaactaatgggtccttgct

SEQ ID NO: 622536 - DNA, 33 bp, Homo sapien
tgcctatttgactacacctaatgggtccttgct

SEQ ID NO: 622537 - DNA, 33 bp, Homo sapien
aagagctctcacatccgcaccttttggctacca

SEQ ID NO: 622538 - DNA, 33 bp, Homo sapien
aagagctctcacatcctcaccttttggctacca

SEQ ID NO: 622539 - DNA, 33 bp, Homo sapien
gctaggaacaaaaaggaacattaaatcataata

SEQ ID NO: 622540 - DNA, 33 bp, Homo sapien
gctaggaacaaaaagggacattaaatcataata

SEQ ID NO: 622541 - DNA, 33 bp, Homo sapien
cagtttaagacttcaacgtaatgacagtgcaga

SEQ ID NO: 622542 - DNA, 33 bp, Homo sapien
cagtttaagacttcaatgtaatgacagtgcaga

SEQ ID NO: 622543 - DNA, 33 bp, Homo sapien
ctcttgaggtaaaataccatgtcggagatttcc

SEQ ID NO: 622544 - DNA, 33 bp, Homo sapien
ctcttgaggtaaaatatcatgtcggagatttcc

SEQ ID NO: 622545 - DNA, 33 bp, Homo sapien
aaagttgcaattaacaaataaggcacataaaag

SEQ ID NO: 622546 - DNA, 33 bp, Homo sapien
aaagttgcaattaacagataaggcacataaaag

SEQ ID NO: 622547 - DNA, 33 bp, Homo sapien
tttatatttcatttaccaccagttctagttcat

SEQ ID NO: 622548 - DNA, 33 bp, Homo sapien
tttatatttcatttactaccagttctagttcat

SEQ ID NO: 622549 - DNA, 33 bp, Homo sapien
gattccctggccaaagacagtaccaggttccaa

SEQ ID NO: 622550 - DNA, 33 bp, Homo sapien
gattccctggccaaaggcagtaccaggttccaa

SEQ ID NO: 622551 - DNA, 33 bp, Homo sapien
gaggggatgaaggcccccactctccgctaatta

SEQ ID NO: 622552 - DNA, 33 bp, Homo sapien
gaggggatgaaggccctcactctccgctaatta

SEQ ID NO: 622553 - DNA, 33 bp, Homo sapien
gggccttcatcccctccgagcaatgagatgcca

SEQ ID NO: 622554 - DNA, 33 bp, Homo sapien
gggccttcatcccctctgagcaatgagatgcca

SEQ ID NO: 622555 - DNA, 33 bp, Homo sapien
acctctaatttatgaactgccactttgaactaa

SEQ ID NO: 622556 - DNA, 33 bp, Homo sapien
acctctaatttatgaattgccactttgaactaa

SEQ ID NO: 622557 - DNA, 33 bp, Homo sapien
actggactgtttgcccagcatttatgccctctc

SEQ ID NO: 622558 - DNA, 33 bp, Homo sapien
actggactgtttgcccggcatttatgccctctc

SEQ ID NO: 622559 - DNA, 33 bp, Homo sapien
ggcccctgctcctccacagtcatgagcataaca

SEQ ID NO: 622560 - DNA, 33 bp, Homo sapien
ggcccctgctcctccatagtcatgagcataaca

SEQ ID NO: 622561 - DNA, 33 bp, Homo sapien
gtagctagattccaagaagaagctgccagtctt

SEQ ID NO: 622562 - DNA, 33 bp, Homo sapien
gtagctagattccaagtagaagctgccagtctt

SEQ ID NO: 622563 - DNA, 33 bp, Homo sapien
tttgatgtttaccatcaactgtgcctacgtgtg

SEQ ID NO: 622564 - DNA, 33 bp, Homo sapien
tttgatgtttaccatctactgtgcctacgtgtg

SEQ ID NO: 622565 - DNA, 33 bp, Homo sapien
aattaaattaccagaacagcaaagaaggaatat

SEQ ID NO: 622566 - DNA, 33 bp, Homo sapien
aattaaattaccagaagagcaaagaaggaatat

SEQ ID NO: 622567 - DNA, 33 bp, Homo sapien
tttgtttttggattaacgaagtgtttgagcctt

SEQ ID NO: 622568 - DNA, 33 bp, Homo sapien
tttgtttttggattaatgaagtgtttgagcctt

SEQ ID NO: 622569 - DNA, 33 bp, Homo sapien
gcagacaataagtagaaaattatccgtagagaa

SEQ ID NO: 622570 - DNA, 33 bp, Homo sapien
gcagacaataagtagagaattatccgtagagaa

SEQ ID NO: 622571 - DNA, 33 bp, Homo sapien
agttgtggtttagaagcagctcacttaagcatg

SEQ ID NO: 622572 - DNA, 33 bp, Homo sapien
agttgtggtttagaagtagctcacttaagcatg

SEQ ID NO: 622573 - DNA, 33 bp, Homo sapien
gaacttcagtttttacgccctgctacagctact

SEQ ID NO: 622574 - DNA, 33 bp, Homo sapien
gaacttcagtttttactccctgctacagctact

SEQ ID NO: 622575 - DNA, 33 bp, Homo sapien
gatgtctgaatttgggcaacagttctcagaaac

SEQ ID NO: 622576 - DNA, 33 bp, Homo sapien
gatgtctgaatttgggtaacagttctcagaaac

SEQ ID NO: 622577 - DNA, 33 bp, Homo sapien
gggaacatattgtccaaaaggagtaataaaata

SEQ ID NO: 622578 - DNA, 33 bp, Homo sapien
gggaacatattgtccagaaggagtaataaaata

SEQ ID NO: 622579 - DNA, 33 bp, Homo sapien
atttagggaatacttacgccacatcagagcaga

SEQ ID NO: 622580 - DNA, 33 bp, Homo sapien
atttagggaatacttatgccacatcagagcaga

SEQ ID NO: 622581 - DNA, 33 bp, Homo sapien
ccctagtgtccaggccaatatcacctttcacct

SEQ ID NO: 622582 - DNA, 33 bp, Homo sapien
ccctagtgtccaggccgatatcacctttcacct

SEQ ID NO: 622583 - DNA, 33 bp, Homo sapien
agcatccagaagttccaatatactaccgttatt

SEQ ID NO: 622584 - DNA, 33 bp, Homo sapien
agcatccagaagttccgatatactaccgttatt

SEQ ID NO: 622585 - DNA, 33 bp, Homo sapien
ggggtccagagaataacggtatgaacttcactg

SEQ ID NO: 622586 - DNA, 33 bp, Homo sapien
ggggtccagagaataatggtatgaacttcactg

SEQ ID NO: 622587 - DNA, 33 bp, Homo sapien
ccttttctctgcctcacgaagggtacctctgtc

SEQ ID NO: 622588 - DNA, 33 bp, Homo sapien
ccttttctctgcctcatgaagggtacctctgtc

SEQ ID NO: 622589 - DNA, 33 bp, Homo sapien
aagctcaaatgaaacaaacttcatagcaatgaa

SEQ ID NO: 622590 - DNA, 33 bp, Homo sapien
aagctcaaatgaaacatacttcatagcaatgaa

SEQ ID NO: 622591 - DNA, 33 bp, Homo sapien
acagaaatttgacttacgacagaaacactatta

SEQ ID NO: 622592 - DNA, 33 bp, Homo sapien
acagaaatttgacttatgacagaaacactatta

SEQ ID NO: 622593 - DNA, 33 bp, Homo sapien
cactttcctaatccccccatctctgtcaagtct

SEQ ID NO: 622594 - DNA, 33 bp, Homo sapien
cactttcctaatcccctcatctctgtcaagtct

SEQ ID NO: 622595 - DNA, 33 bp, Homo sapien
atgagaacagtaaagaaaggcacaaagtgagtg

SEQ ID NO: 622596 - DNA, 33 bp, Homo sapien
atgagaacagtaaagacaggcacaaagtgagtg

SEQ ID NO: 622597 - DNA, 33 bp, Homo sapien
cacgggtacaaagggccgactgtaatcagttat

SEQ ID NO: 622598 - DNA, 33 bp, Homo sapien
cacgggtacaaagggctgactgtaatcagttat

SEQ ID NO: 622599 - DNA, 33 bp, Homo sapien
agtctatttagagaggccagacatatccaagct

SEQ ID NO: 622600 - DNA, 33 bp, Homo sapien
agtctatttagagaggtcagacatatccaagct

SEQ ID NO: 622601 - DNA, 33 bp, Homo sapien
ccctgacctcccagcagaaagtatctgtaaaca

SEQ ID NO: 622602 - DNA, 33 bp, Homo sapien
ccctgacctcccagcataaagtatctgtaaaca

SEQ ID NO: 622603 - DNA, 33 bp, Homo sapien
tcacagctcctcctgccagaagtgatgcacaat

SEQ ID NO: 622604 - DNA, 33 bp, Homo sapien
tcacagctcctcctgctagaagtgatgcacaat

SEQ ID NO: 622605 - DNA, 33 bp, Homo sapien
atacctctaattatccccattttgcaggagaag

SEQ ID NO: 622606 - DNA, 33 bp, Homo sapien
atacctctaattatcctcattttgcaggagaag

SEQ ID NO: 622607 - DNA, 33 bp, Homo sapien
ttatgatgaaaaggcaaatgaatattaaatatt

SEQ ID NO: 622608 - DNA, 33 bp, Homo sapien
ttatgatgaaaaggcagatgaatattaaatatt

SEQ ID NO: 622609 - DNA, 33 bp, Homo sapien
catcctagagtagataagttgagaaagagttgc

SEQ ID NO: 622610 - DNA, 33 bp, Homo sapien
catcctagagtagatacgttgagaaagagttgc

SEQ ID NO: 622611 - DNA, 33 bp, Homo sapien
acaactgagcagtttacaccatcaactggacta

SEQ ID NO: 622612 - DNA, 33 bp, Homo sapien
acaactgagcagtttataccatcaactggacta

SEQ ID NO: 622613 - DNA, 33 bp, Homo sapien
ctaagttgaaaatgcaaggaacatatttatttt

SEQ ID NO: 622614 - DNA, 33 bp, Homo sapien
ctaagttgaaaatgcagggaacatatttatttt

SEQ ID NO: 622615 - DNA, 33 bp, Homo sapien
atatgaggcttttgcaaatttgtctgtgagcat

SEQ ID NO: 622616 - DNA, 33 bp, Homo sapien
atatgaggcttttgcagatttgtctgtgagcat

SEQ ID NO: 622617 - DNA, 33 bp, Homo sapien
gaaatgatagatacagacaactacccaaaatgg

SEQ ID NO: 622618 - DNA, 33 bp, Homo sapien
gaaatgatagatacagccaactacccaaaatgg

SEQ ID NO: 622619 - DNA, 33 bp, Homo sapien
ccctaacttgagctgcaaaaatcacccctgagc

SEQ ID NO: 622620 - DNA, 33 bp, Homo sapien
ccctaacttgagctgcgaaaatcacccctgagc

SEQ ID NO: 622621 - DNA, 33 bp, Homo sapien
gccatcaatttactccaagctttttatccaatt

SEQ ID NO: 622622 - DNA, 33 bp, Homo sapien
gccatcaatttactcctagctttttatccaatt

SEQ ID NO: 622623 - DNA, 33 bp, Homo sapien
agtggtccaaggagcaccctttggaaatgttcc

SEQ ID NO: 622624 - DNA, 33 bp, Homo sapien
agtggtccaaggagcatcctttggaaatgttcc

SEQ ID NO: 622625 - DNA, 33 bp, Homo sapien
ctgagcgtctctgggaggttgataaagataaca

SEQ ID NO: 622626 - DNA, 33 bp, Homo sapien
ctgagcgtctctgggatgttgataaagataaca

SEQ ID NO: 622627 - DNA, 33 bp, Homo sapien
aaaaggaaatgttgagaccttaatagacctgtt

SEQ ID NO: 622628 - DNA, 33 bp, Homo sapien
aaaaggaaatgttgagcccttaatagacctgtt

SEQ ID NO: 622629 - DNA, 33 bp, Homo sapien
ctagctcttcttacccaaaacccactaataatg

SEQ ID NO: 622630 - DNA, 33 bp, Homo sapien
ctagctcttcttaccccaaacccactaataatg

SEQ ID NO: 622631 - DNA, 33 bp, Homo sapien
ttccagggccctagaacccatttgtcactgaga

SEQ ID NO: 622632 - DNA, 33 bp, Homo sapien
ttccagggccctagaatccatttgtcactgaga

SEQ ID NO: 622633 - DNA, 33 bp, Homo sapien
atttcctagcaatttacgagcagtctttggtct

SEQ ID NO: 622634 - DNA, 33 bp, Homo sapien
atttcctagcaatttatgagcagtctttggtct

SEQ ID NO: 622635 - DNA, 33 bp, Homo sapien
tctggttcaactgataggtgacatgaggtgact

SEQ ID NO: 622636 - DNA, 33 bp, Homo sapien
tctggttcaactgatatgtgacatgaggtgact

SEQ ID NO: 622637 - DNA, 33 bp, Homo sapien
gcctcgctcttcagatcaacctttcttcttttc

SEQ ID NO: 622638 - DNA, 33 bp, Homo sapien
gcctcgctcttcagatgaacctttcttcttttc

SEQ ID NO: 622639 - DNA, 33 bp, Homo sapien
atctgtataaacctgtaaaatggagataaaaat

SEQ ID NO: 622640 - DNA, 33 bp, Homo sapien
atctgtataaacctgtgaaatggagataaaaat

SEQ ID NO: 622641 - DNA, 33 bp, Homo sapien
tacccaaatttttaagccctgataattaagcag

SEQ ID NO: 622642 - DNA, 33 bp, Homo sapien
tacccaaatttttaaggcctgataattaagcag

SEQ ID NO: 622643 - DNA, 33 bp, Homo sapien
atgccattggaagtcaccaggtataaagtcaat

SEQ ID NO: 622644 - DNA, 33 bp, Homo sapien
atgccattggaagtcagcaggtataaagtcaat

SEQ ID NO: 622645 - DNA, 33 bp, Homo sapien
ttgtgtatttggaggaataggagattttcaggc

SEQ ID NO: 622646 - DNA, 33 bp, Homo sapien
ttgtgtatttggaggagtaggagattttcaggc

SEQ ID NO: 622647 - DNA, 33 bp, Homo sapien
acttggcattcagttgcaatcacctctattttt

SEQ ID NO: 622648 - DNA, 33 bp, Homo sapien
acttggcattcagttggaatcacctctattttt

SEQ ID NO: 622649 - DNA, 33 bp, Homo sapien
aatatctctgggctacactgattcagcctgaga

SEQ ID NO: 622650 - DNA, 33 bp, Homo sapien
aatatctctgggctactctgattcagcctgaga

SEQ ID NO: 622651 - DNA, 33 bp, Homo sapien
atcttcgaagtcatctaaacagtacatgaaaaa

SEQ ID NO: 622652 - DNA, 33 bp, Homo sapien
atcttcgaagtcatctgaacagtacatgaaaaa

SEQ ID NO: 622653 - DNA, 33 bp, Homo sapien
tgtacataaaagttcacggaagcattgttcaca

SEQ ID NO: 622654 - DNA, 33 bp, Homo sapien
tgtacataaaagttcatggaagcattgttcaca

SEQ ID NO: 622655 - DNA, 33 bp, Homo sapien
ggagacgtgtctagataactgccaacaatgaca

SEQ ID NO: 622656 - DNA, 33 bp, Homo sapien
ggagacgtgtctagattactgccaacaatgaca

SEQ ID NO: 622657 - DNA, 33 bp, Homo sapien
aactccttttgtactacgaaaagatgaaacgat

SEQ ID NO: 622658 - DNA, 33 bp, Homo sapien
aactccttttgtactatgaaaagatgaaacgat

SEQ ID NO: 622659 - DNA, 33 bp, Homo sapien
aattgcaaactctttacgtctaaagcgcactat

SEQ ID NO: 622660 - DNA, 33 bp, Homo sapien
aattgcaaactctttatgtctaaagcgcactat

SEQ ID NO: 622661 - DNA, 33 bp, Homo sapien
agcctcaatccttccaccaaattaccttcagtt

SEQ ID NO: 622662 - DNA, 33 bp, Homo sapien
agcctcaatccttccatcaaattaccttcagtt

SEQ ID NO: 622663 - DNA, 33 bp, Homo sapien
ttgccttattcttaaccaccttactgaggtaca

SEQ ID NO: 622664 - DNA, 33 bp, Homo sapien
ttgccttattcttaactaccttactgaggtaca

SEQ ID NO: 622665 - DNA, 33 bp, Homo sapien
gtaggaagtgcagtgacgtttcccaagttggta

SEQ ID NO: 622666 - DNA, 33 bp, Homo sapien
gtaggaagtgcagtgaggtttcccaagttggta

SEQ ID NO: 622667 - DNA, 33 bp, Homo sapien
tgcaggactgggagaactggagacctgaaggac

SEQ ID NO: 622668 - DNA, 33 bp, Homo sapien
tgcaggactgggagaattggagacctgaaggac

SEQ ID NO: 622669 - DNA, 33 bp, Homo sapien
atgacttattgctcccaaaaaaaattgttaaca

SEQ ID NO: 622670 - DNA, 33 bp, Homo sapien
atgacttattgctcccgaaaaaaattgttaaca

SEQ ID NO: 622671 - DNA, 33 bp, Homo sapien
ccaggctgctagaatacatttggaaacaactag

SEQ ID NO: 622672 - DNA, 33 bp, Homo sapien
ccaggctgctagaatatatttggaaacaactag

SEQ ID NO: 622673 - DNA, 33 bp, Homo sapien
tctttggccatgaaaacaatatgacaacatagc

SEQ ID NO: 622674 - DNA, 33 bp, Homo sapien
tctttggccatgaaaataatatgacaacatagc

SEQ ID NO: 622675 - DNA, 33 bp, Homo sapien
tggaacatcaaggaaaaatcacactgtcaatta

SEQ ID NO: 622676 - DNA, 33 bp, Homo sapien
tggaacatcaaggaaagatcacactgtcaatta

SEQ ID NO: 622677 - DNA, 33 bp, Homo sapien
ccttcagcctgcctacagattcctataatctta

SEQ ID NO: 622678 - DNA, 33 bp, Homo sapien
ccttcagcctgcctacggattcctataatctta

SEQ ID NO: 622679 - DNA, 33 bp, Homo sapien
tctcttctagatgcctcaggatttgttcttgat

SEQ ID NO: 622680 - DNA, 33 bp, Homo sapien
tctcttctagatgcctgaggatttgttcttgat

SEQ ID NO: 622681 - DNA, 33 bp, Homo sapien
tgttaaaaatcattcacgtgatcattatgtcca

SEQ ID NO: 622682 - DNA, 33 bp, Homo sapien
tgttaaaaatcattcaggtgatcattatgtcca

SEQ ID NO: 622683 - DNA, 33 bp, Homo sapien
gaactatagtcttagcaaaagaatgaagatctt

SEQ ID NO: 622684 - DNA, 33 bp, Homo sapien
gaactatagtcttagcgaaagaatgaagatctt

SEQ ID NO: 622685 - DNA, 33 bp, Homo sapien
aactatattcagcctacggatctattgaacacc

SEQ ID NO: 622686 - DNA, 33 bp, Homo sapien
aactatattcagcctatggatctattgaacacc

SEQ ID NO: 622687 - DNA, 33 bp, Homo sapien
gcttgtatttttgtcacgctgctgctaaatttt

SEQ ID NO: 622688 - DNA, 33 bp, Homo sapien
gcttgtatttttgtcatgctgctgctaaatttt

SEQ ID NO: 622689 - DNA, 33 bp, Homo sapien
agagttaaacaaaaacagtcagggaattatgga

SEQ ID NO: 622690 - DNA, 33 bp, Homo sapien
agagttaaacaaaaactgtcagggaattatgga

SEQ ID NO: 622691 - DNA, 33 bp, Homo sapien
gcacaattacatatacacatacaaaaaccaaaa

SEQ ID NO: 622692 - DNA, 33 bp, Homo sapien
gcacaattacatatacgcatacaaaaaccaaaa

SEQ ID NO: 622693 - DNA, 33 bp, Homo sapien
aatttaagcaataataaatgagcccagtcccta

SEQ ID NO: 622694 - DNA, 33 bp, Homo sapien
aatttaagcaataatatatgagcccagtcccta

SEQ ID NO: 622695 - DNA, 33 bp, Homo sapien
tgtgaacatctccaaacaataaatatctacagg

SEQ ID NO: 622696 - DNA, 33 bp, Homo sapien
tgtgaacatctccaaagaataaatatctacagg

SEQ ID NO: 622697 - DNA, 33 bp, Homo sapien
agtagccagcctcgaacatagctttcattgatt

SEQ ID NO: 622698 - DNA, 33 bp, Homo sapien
agtagccagcctcgaagatagctttcattgatt

SEQ ID NO: 622699 - DNA, 33 bp, Homo sapien
ggtggggacaagaccaggaggagcgtagtagcc

SEQ ID NO: 622700 - DNA, 33 bp, Homo sapien
ggtggggacaagaccatgaggagcgtagtagcc

SEQ ID NO: 622701 - DNA, 33 bp, Homo sapien
tctccagtttttcaagaccttgtcagcaaaaaa

SEQ ID NO: 622702 - DNA, 33 bp, Homo sapien
tctccagtttttcaagtccttgtcagcaaaaaa

SEQ ID NO: 622703 - DNA, 33 bp, Homo sapien
ttaactaagtcacaaaattatagaacgaagtac

SEQ ID NO: 622704 - DNA, 33 bp, Homo sapien
ttaactaagtcacaaacttatagaacgaagtac

SEQ ID NO: 622705 - DNA, 33 bp, Homo sapien
tgaggtaatgaatgtgaaagtgcccactttgtt

SEQ ID NO: 622706 - DNA, 33 bp, Homo sapien
tgaggtaatgaatgtggaagtgcccactttgtt

SEQ ID NO: 622707 - DNA, 33 bp, Homo sapien
atatcaaaaagagtcacggcaatattttctgag

SEQ ID NO: 622708 - DNA, 33 bp, Homo sapien
atatcaaaaagagtcatggcaatattttctgag

SEQ ID NO: 622709 - DNA, 33 bp, Homo sapien
taacctatatctgttccattgttatttgttgat

SEQ ID NO: 622710 - DNA, 33 bp, Homo sapien
taacctatatctgttcgattgttatttgttgat

SEQ ID NO: 622711 - DNA, 33 bp, Homo sapien
tagggctgcggagttacaaagcagatcggggga

SEQ ID NO: 622712 - DNA, 33 bp, Homo sapien
tagggctgcggagttataaagcagatcggggga

SEQ ID NO: 622713 - DNA, 33 bp, Homo sapien
tgtttagtggggtcaaggtaatccagagacatg

SEQ ID NO: 622714 - DNA, 33 bp, Homo sapien
tgtttagtggggtcaatgtaatccagagacatg

SEQ ID NO: 622715 - DNA, 33 bp, Homo sapien
gtatcattcaggtttccaacatccagaaggagg

SEQ ID NO: 622716 - DNA, 33 bp, Homo sapien
gtatcattcaggtttctaacatccagaaggagg

SEQ ID NO: 622717 - DNA, 33 bp, Homo sapien
tcacaaagttagaagacgagatggttaagaata

SEQ ID NO: 622718 - DNA, 33 bp, Homo sapien
tcacaaagttagaagatgagatggttaagaata

SEQ ID NO: 622719 - DNA, 33 bp, Homo sapien
agaaactcaaaacttacctccttatcagctcaa

SEQ ID NO: 622720 - DNA, 33 bp, Homo sapien
agaaactcaaaacttatctccttatcagctcaa

SEQ ID NO: 622721 - DNA, 33 bp, Homo sapien
aatctttgtttttacactgactatcatcctcct

SEQ ID NO: 622722 - DNA, 33 bp, Homo sapien
aatctttgtttttacagtgactatcatcctcct

SEQ ID NO: 622723 - DNA, 33 bp, Homo sapien
tcctgtctgaccaaaaacagaaaagaatagcct

SEQ ID NO: 622724 - DNA, 33 bp, Homo sapien
tcctgtctgaccaaaaccagaaaagaatagcct

SEQ ID NO: 622725 - DNA, 33 bp, Homo sapien
ttcacaaacagaacgtcaccagcatctcagaag

SEQ ID NO: 622726 - DNA, 33 bp, Homo sapien
ttcacaaacagaacgtgaccagcatctcagaag

SEQ ID NO: 622727 - DNA, 33 bp, Homo sapien
atctgtcctcatctccaactgtccactcctgtt

SEQ ID NO: 622728 - DNA, 33 bp, Homo sapien
atctgtcctcatctccgactgtccactcctgtt

SEQ ID NO: 622729 - DNA, 33 bp, Homo sapien
tttactgaggttaagacgaatgttggctttgtc

SEQ ID NO: 622730 - DNA, 33 bp, Homo sapien
tttactgaggttaagaggaatgttggctttgtc

SEQ ID NO: 622731 - DNA, 33 bp, Homo sapien
atctgtaggagctatacgtcaaattatgttaaa

SEQ ID NO: 622732 - DNA, 33 bp, Homo sapien
atctgtaggagctatatgtcaaattatgttaaa

SEQ ID NO: 622733 - DNA, 33 bp, Homo sapien
gaaactcattagaatgcaattctcaggccctac

SEQ ID NO: 622734 - DNA, 33 bp, Homo sapien
gaaactcattagaatgtaattctcaggccctac

SEQ ID NO: 622735 - DNA, 33 bp, Homo sapien
tttgttgctgaaggaaagtgatgaagtggtgcc

SEQ ID NO: 622736 - DNA, 33 bp, Homo sapien
tttgttgctgaaggaaggtgatgaagtggtgcc

SEQ ID NO: 622737 - DNA, 33 bp, Homo sapien
aagtcaacttaatggtaacattctcctgatatc

SEQ ID NO: 622738 - DNA, 33 bp, Homo sapien
aagtcaacttaatggtgacattctcctgatatc

SEQ ID NO: 622739 - DNA, 33 bp, Homo sapien
agcctgaatgattcaaagtcagctcattgctgg

SEQ ID NO: 622740 - DNA, 33 bp, Homo sapien
agcctgaatgattcaacgtcagctcattgctgg

SEQ ID NO: 622741 - DNA, 33 bp, Homo sapien
ttgaaagtcagatctaaagaccttgttctatga

SEQ ID NO: 622742 - DNA, 33 bp, Homo sapien
ttgaaagtcagatctacagaccttgttctatga

SEQ ID NO: 622743 - DNA, 33 bp, Homo sapien
tgccttcagaggccaaacagataaccttagtga

SEQ ID NO: 622744 - DNA, 33 bp, Homo sapien
tgccttcagaggccaagcagataaccttagtga

SEQ ID NO: 622745 - DNA, 33 bp, Homo sapien
tcccatctaaaagcaacaaaattcaatcttgaa

SEQ ID NO: 622746 - DNA, 33 bp, Homo sapien
tcccatctaaaagcaataaaattcaatcttgaa

SEQ ID NO: 622747 - DNA, 33 bp, Homo sapien
aaataaatgagcttgcaaaagagattgaaaaga

SEQ ID NO: 622748 - DNA, 33 bp, Homo sapien
aaataaatgagcttgcgaaagagattgaaaaga

SEQ ID NO: 622749 - DNA, 33 bp, Homo sapien
taataatagtagcaaaccatttatatagcatag

SEQ ID NO: 622750 - DNA, 33 bp, Homo sapien
taataatagtagcaaatcatttatatagcatag

SEQ ID NO: 622751 - DNA, 33 bp, Homo sapien
acatagagattatcaactgatgacctgcattga

SEQ ID NO: 622752 - DNA, 33 bp, Homo sapien
acatagagattatcaagtgatgacctgcattga

SEQ ID NO: 622753 - DNA, 33 bp, Homo sapien
gcctgatggctaagcacagaggatgtttttacc

SEQ ID NO: 622754 - DNA, 33 bp, Homo sapien
gcctgatggctaagcatagaggatgtttttacc

SEQ ID NO: 622755 - DNA, 33 bp, Homo sapien
tttctgtgggctgtaaacataatgctgccactg

SEQ ID NO: 622756 - DNA, 33 bp, Homo sapien
tttctgtgggctgtaaccataatgctgccactg

SEQ ID NO: 622757 - DNA, 33 bp, Homo sapien
agagacctgatgtcctcacttacaatgatgttt

SEQ ID NO: 622758 - DNA, 33 bp, Homo sapien
agagacctgatgtccttacttacaatgatgttt

SEQ ID NO: 622759 - DNA, 33 bp, Homo sapien
aaaggtgatattaagaagttttcagagtaacaa

SEQ ID NO: 622760 - DNA, 33 bp, Homo sapien
aaaggtgatattaagacgttttcagagtaacaa

SEQ ID NO: 622761 - DNA, 33 bp, Homo sapien
cctacaatctgaaccactacacctaacctcact

SEQ ID NO: 622762 - DNA, 33 bp, Homo sapien
cctacaatctgaaccattacacctaacctcact

SEQ ID NO: 622763 - DNA, 33 bp, Homo sapien
ttattctgtgctttcactcagattaactataga

SEQ ID NO: 622764 - DNA, 33 bp, Homo sapien
ttattctgtgctttcattcagattaactataga

SEQ ID NO: 622765 - DNA, 33 bp, Homo sapien
ctgttagaaaaaagaacgaacaccagaagcata

SEQ ID NO: 622766 - DNA, 33 bp, Homo sapien
ctgttagaaaaaagaatgaacaccagaagcata

SEQ ID NO: 622767 - DNA, 33 bp, Homo sapien
gatgtgtatcttcgaacctcagaaggcatccag

SEQ ID NO: 622768 - DNA, 33 bp, Homo sapien
gatgtgtatcttcgaatctcagaaggcatccag

SEQ ID NO: 622769 - DNA, 33 bp, Homo sapien
aactgaaattcagaaactgagaaagctctgaat

SEQ ID NO: 622770 - DNA, 33 bp, Homo sapien
aactgaaattcagaaattgagaaagctctgaat

SEQ ID NO: 622771 - DNA, 33 bp, Homo sapien
tttacctttagcgtaaaaatgtttgaattagtg

SEQ ID NO: 622772 - DNA, 33 bp, Homo sapien
tttacctttagcgtaacaatgtttgaattagtg

SEQ ID NO: 622773 - DNA, 33 bp, Homo sapien
ttaaggcatgtatttcccaagtatagaaatgaa

SEQ ID NO: 622774 - DNA, 33 bp, Homo sapien
ttaaggcatgtatttctcaagtatagaaatgaa

SEQ ID NO: 622775 - DNA, 33 bp, Homo sapien
tttgcgacagaacttacagttgtggtgtttcaa

SEQ ID NO: 622776 - DNA, 33 bp, Homo sapien
tttgcgacagaacttatagttgtggtgtttcaa

SEQ ID NO: 622777 - DNA, 33 bp, Homo sapien
tggtaggataatgaacacaaagcctcagctact

SEQ ID NO: 622778 - DNA, 33 bp, Homo sapien
tggtaggataatgaacgcaaagcctcagctact

SEQ ID NO: 622779 - DNA, 33 bp, Homo sapien
tagtgaaaactctcaagtatttccaagtggagt

SEQ ID NO: 622780 - DNA, 33 bp, Homo sapien
tagtgaaaactctcaattatttccaagtggagt

SEQ ID NO: 622781 - DNA, 33 bp, Homo sapien
atgtactactaagacaaagaaaacactgccaat

SEQ ID NO: 622782 - DNA, 33 bp, Homo sapien
atgtactactaagacacagaaaacactgccaat

SEQ ID NO: 622783 - DNA, 33 bp, Homo sapien
gcttacttcttgtctacgcaataatttcaattt

SEQ ID NO: 622784 - DNA, 33 bp, Homo sapien
gcttacttcttgtctatgcaataatttcaattt

SEQ ID NO: 622785 - DNA, 33 bp, Homo sapien
gcaaacagcatgtgcaaatatccagaacaggaa

SEQ ID NO: 622786 - DNA, 33 bp, Homo sapien
gcaaacagcatgtgcacatatccagaacaggaa

SEQ ID NO: 622787 - DNA, 33 bp, Homo sapien
ctagccaaccagggaccaggcatgtacagaaga

SEQ ID NO: 622788 - DNA, 33 bp, Homo sapien
ctagccaaccagggacgaggcatgtacagaaga

SEQ ID NO: 622789 - DNA, 33 bp, Homo sapien
gttttgcctggacagcagaaaacagttatgaaa

SEQ ID NO: 622790 - DNA, 33 bp, Homo sapien
gttttgcctggacagcggaaaacagttatgaaa

SEQ ID NO: 622791 - DNA, 33 bp, Homo sapien
catctgtttaggggtgaaatagtcatagaattt

SEQ ID NO: 622792 - DNA, 33 bp, Homo sapien
catctgtttaggggtggaatagtcatagaattt

SEQ ID NO: 622793 - DNA, 33 bp, Homo sapien
atgggcacaaatagagcagaagcccactatgat

SEQ ID NO: 622794 - DNA, 33 bp, Homo sapien
atgggcacaaatagaggagaagcccactatgat

SEQ ID NO: 622795 - DNA, 33 bp, Homo sapien
cttggaagagtataaactgaactatgtcacact

SEQ ID NO: 622796 - DNA, 33 bp, Homo sapien
cttggaagagtataaattgaactatgtcacact

SEQ ID NO: 622797 - DNA, 33 bp, Homo sapien
atacatatatttttacaaagagtagttcacttc

SEQ ID NO: 622798 - DNA, 33 bp, Homo sapien
atacatatatttttacgaagagtagttcacttc

SEQ ID NO: 622799 - DNA, 33 bp, Homo sapien
ccctacctgtaaatgaacaaaacatagcataca

SEQ ID NO: 622800 - DNA, 33 bp, Homo sapien
ccctacctgtaaatgagcaaaacatagcataca

SEQ ID NO: 622801 - DNA, 33 bp, Homo sapien
acctctttgtcttctgaaaatcaagcttcaagg

SEQ ID NO: 622802 - DNA, 33 bp, Homo sapien
acctctttgtcttctggaaatcaagcttcaagg

SEQ ID NO: 622803 - DNA, 33 bp, Homo sapien
tgactccagctaaacacaaaatgattaggaact

SEQ ID NO: 622804 - DNA, 33 bp, Homo sapien
tgactccagctaaacagaaaatgattaggaact

SEQ ID NO: 622805 - DNA, 33 bp, Homo sapien
gattttgtgctagtaacggtgaaaaacttctca

SEQ ID NO: 622806 - DNA, 33 bp, Homo sapien
gattttgtgctagtaatggtgaaaaacttctca

SEQ ID NO: 622807 - DNA, 33 bp, Homo sapien
aattcagaatcactgactattttccctaagagt

SEQ ID NO: 622808 - DNA, 33 bp, Homo sapien
aattcagaatcactgattattttccctaagagt

SEQ ID NO: 622809 - DNA, 33 bp, Homo sapien
tgaactctttgaagcacactatccagaaaaact

SEQ ID NO: 622810 - DNA, 33 bp, Homo sapien
tgaactctttgaagcatactatccagaaaaact

SEQ ID NO: 622811 - DNA, 33 bp, Homo sapien
gacaaattactttcaaaattatgaatactgttc

SEQ ID NO: 622812 - DNA, 33 bp, Homo sapien
gacaaattactttcaagattatgaatactgttc

SEQ ID NO: 622813 - DNA, 33 bp, Homo sapien
acttttgacactgacaaacatacattctaccac

SEQ ID NO: 622814 - DNA, 33 bp, Homo sapien
acttttgacactgacagacatacattctaccac

SEQ ID NO: 622815 - DNA, 33 bp, Homo sapien
atacattctaccactacctaaattcaatatact

SEQ ID NO: 622816 - DNA, 33 bp, Homo sapien
atacattctaccactatctaaattcaatatact

SEQ ID NO: 622817 - DNA, 33 bp, Homo sapien
ttagtaagtatttccaatgctcaatcttataac

SEQ ID NO: 622818 - DNA, 33 bp, Homo sapien
ttagtaagtatttccagtgctcaatcttataac

SEQ ID NO: 622819 - DNA, 33 bp, Homo sapien
agaatgacagatgccaaaaaagatcattctacc

SEQ ID NO: 622820 - DNA, 33 bp, Homo sapien
agaatgacagatgccagaaaagatcattctacc

SEQ ID NO: 622821 - DNA, 33 bp, Homo sapien
gtaatgtacaaactgaatatccactacccaaaa

SEQ ID NO: 622822 - DNA, 33 bp, Homo sapien
gtaatgtacaaactgagtatccactacccaaaa

SEQ ID NO: 622823 - DNA, 33 bp, Homo sapien
taagatgctacttagaacagtaatgctttgacc

SEQ ID NO: 622824 - DNA, 33 bp, Homo sapien
taagatgctacttagagcagtaatgctttgacc

SEQ ID NO: 622825 - DNA, 33 bp, Homo sapien
atagcaattacacacacagagaggcacaaagac

SEQ ID NO: 622826 - DNA, 33 bp, Homo sapien
atagcaattacacacagagagaggcacaaagac

SEQ ID NO: 622827 - DNA, 33 bp, Homo sapien
acgacttctgctgttaccaaaggacagatcaga

SEQ ID NO: 622828 - DNA, 33 bp, Homo sapien
acgacttctgctgttatcaaaggacagatcaga

SEQ ID NO: 622829 - DNA, 33 bp, Homo sapien
taactacagtagcgaactatttatcaaacaact

SEQ ID NO: 622830 - DNA, 33 bp, Homo sapien
taactacagtagcgaattatttatcaaacaact

SEQ ID NO: 622831 - DNA, 33 bp, Homo sapien
atatatccattagcaccggttgatgtgaaaaca

SEQ ID NO: 622832 - DNA, 33 bp, Homo sapien
atatatccattagcactggttgatgtgaaaaca

SEQ ID NO: 622833 - DNA, 33 bp, Homo sapien
gaatgcctaagacaccaagaaagacagagagag

SEQ ID NO: 622834 - DNA, 33 bp, Homo sapien
gaatgcctaagacacctagaaagacagagagag

SEQ ID NO: 622835 - DNA, 33 bp, Homo sapien
ccagaggaaatggatacgttttctccaaaaatc

SEQ ID NO: 622836 - DNA, 33 bp, Homo sapien
ccagaggaaatggatatgttttctccaaaaatc

SEQ ID NO: 622837 - DNA, 33 bp, Homo sapien
agttaaacactttgaaatggtgagaagtgttag

SEQ ID NO: 622838 - DNA, 33 bp, Homo sapien
agttaaacactttgaagtggtgagaagtgttag

SEQ ID NO: 622839 - DNA, 33 bp, Homo sapien
ttagagttggccttgacacacaggagttaaaca

SEQ ID NO: 622840 - DNA, 33 bp, Homo sapien
ttagagttggccttgagacacaggagttaaaca

SEQ ID NO: 622841 - DNA, 33 bp, Homo sapien
cactccaaatagccacagtaaaatccaaagtta

SEQ ID NO: 622842 - DNA, 33 bp, Homo sapien
cactccaaatagccaccgtaaaatccaaagtta

SEQ ID NO: 622843 - DNA, 33 bp, Homo sapien
ttaaactgcgaagctgaacgacgaaagcatcct

SEQ ID NO: 622844 - DNA, 33 bp, Homo sapien
ttaaactgcgaagctggacgacgaaagcatcct

SEQ ID NO: 622845 - DNA, 33 bp, Homo sapien
tcataaaatgcaaacacaaaaagtgatgagcat

SEQ ID NO: 622846 - DNA, 33 bp, Homo sapien
tcataaaatgcaaacagaaaaagtgatgagcat

SEQ ID NO: 622847 - DNA, 33 bp, Homo sapien
aggttcaggtctaggaaataaagctgacaagag

SEQ ID NO: 622848 - DNA, 33 bp, Homo sapien
aggttcaggtctaggagataaagctgacaagag

SEQ ID NO: 622849 - DNA, 33 bp, Homo sapien
agaaattcagagaggtcaaatgactgcaaagta

SEQ ID NO: 622850 - DNA, 33 bp, Homo sapien
agaaattcagagaggttaaatgactgcaaagta

SEQ ID NO: 622851 - DNA, 33 bp, Homo sapien
tccttaaacttatgcaatgactctactggacag

SEQ ID NO: 622852 - DNA, 33 bp, Homo sapien
tccttaaacttatgcagtgactctactggacag

SEQ ID NO: 622853 - DNA, 33 bp, Homo sapien
acacaagtttgtggaactggtgacttgaatacc

SEQ ID NO: 622854 - DNA, 33 bp, Homo sapien
acacaagtttgtggaattggtgacttgaatacc

SEQ ID NO: 622855 - DNA, 33 bp, Homo sapien
gggagttaataagtgaaatggacaaaggagggc

SEQ ID NO: 622856 - DNA, 33 bp, Homo sapien
gggagttaataagtgagatggacaaaggagggc

SEQ ID NO: 622857 - DNA, 33 bp, Homo sapien
ggatttacccagaaaactctcacagagcttctg

SEQ ID NO: 622858 - DNA, 33 bp, Homo sapien
ggatttacccagaaaattctcacagagcttctg

SEQ ID NO: 622859 - DNA, 33 bp, Homo sapien
acaggtactgggggtaaaggcttcaacatctct

SEQ ID NO: 622860 - DNA, 33 bp, Homo sapien
acaggtactgggggtacaggcttcaacatctct

SEQ ID NO: 622861 - DNA, 33 bp, Homo sapien
aaaggatcctcatctacgaaaaatagccttaaa

SEQ ID NO: 622862 - DNA, 33 bp, Homo sapien
aaaggatcctcatctatgaaaaatagccttaaa

SEQ ID NO: 622863 - DNA, 33 bp, Homo sapien
taaccacatggttaaaaagaactctacacttaa

SEQ ID NO: 622864 - DNA, 33 bp, Homo sapien
taaccacatggttaaagagaactctacacttaa

SEQ ID NO: 622865 - DNA, 33 bp, Homo sapien
tgtgtttgagacaacacagatattagcacagac

SEQ ID NO: 622866 - DNA, 33 bp, Homo sapien
tgtgtttgagacaacagagatattagcacagac

SEQ ID NO: 622867 - DNA, 33 bp, Homo sapien
cccaaactgaggaataaattgggcttaactgag

SEQ ID NO: 622868 - DNA, 33 bp, Homo sapien
cccaaactgaggaatacattgggcttaactgag

SEQ ID NO: 622869 - DNA, 33 bp, Homo sapien
acccctatgcatcacaatcgataaattgaccca

SEQ ID NO: 622870 - DNA, 33 bp, Homo sapien
acccctatgcatcacagtcgataaattgaccca

SEQ ID NO: 622871 - DNA, 33 bp, Homo sapien
atttatcatttgaaaccagaaaactgttgccat

SEQ ID NO: 622872 - DNA, 33 bp, Homo sapien
atttatcatttgaaactagaaaactgttgccat

SEQ ID NO: 622873 - DNA, 33 bp, Homo sapien
ccttcctccaaaaaggaacctcaaagagaaagg

SEQ ID NO: 622874 - DNA, 33 bp, Homo sapien
ccttcctccaaaaaggcacctcaaagagaaagg

SEQ ID NO: 622875 - DNA, 33 bp, Homo sapien
cttagcgtctcattcaaaacaataaaatatgct

SEQ ID NO: 622876 - DNA, 33 bp, Homo sapien
cttagcgtctcattcagaacaataaaatatgct

SEQ ID NO: 622877 - DNA, 33 bp, Homo sapien
gtgttgaagacactacagagtttattcttctct

SEQ ID NO: 622878 - DNA, 33 bp, Homo sapien
gtgttgaagacactacggagtttattcttctct

SEQ ID NO: 622879 - DNA, 33 bp, Homo sapien
ggtacacttggaaacacaacaccatagaatgtt

SEQ ID NO: 622880 - DNA, 33 bp, Homo sapien
ggtacacttggaaacataacaccatagaatgtt

SEQ ID NO: 622881 - DNA, 33 bp, Homo sapien
tcattgtaagaccttacgctttctagaatcttt

SEQ ID NO: 622882 - DNA, 33 bp, Homo sapien
tcattgtaagaccttatgctttctagaatcttt

SEQ ID NO: 622883 - DNA, 33 bp, Homo sapien
gtaggattggctacacactgttctcctcttgac

SEQ ID NO: 622884 - DNA, 33 bp, Homo sapien
gtaggattggctacacgctgttctcctcttgac

SEQ ID NO: 622885 - DNA, 33 bp, Homo sapien
atgtgtatataatgcccataagaatgcctgaca

SEQ ID NO: 622886 - DNA, 33 bp, Homo sapien
atgtgtatataatgcctataagaatgcctgaca

SEQ ID NO: 622887 - DNA, 33 bp, Homo sapien
atagccttattgacaaatgataactcatataca

SEQ ID NO: 622888 - DNA, 33 bp, Homo sapien
atagccttattgacaactgataactcatataca

SEQ ID NO: 622889 - DNA, 33 bp, Homo sapien
accgcaggacttggacaaacttggacacagggc

SEQ ID NO: 622890 - DNA, 33 bp, Homo sapien
accgcaggacttggacgaacttggacacagggc

SEQ ID NO: 622891 - DNA, 33 bp, Homo sapien
agatgtccaagtcctacctcctaaaaactataa

SEQ ID NO: 622892 - DNA, 33 bp, Homo sapien
agatgtccaagtcctatctcctaaaaactataa

SEQ ID NO: 622893 - DNA, 33 bp, Homo sapien
ctccttaagtattctgaaatgaaagatcatgag

SEQ ID NO: 622894 - DNA, 33 bp, Homo sapien
ctccttaagtattctggaatgaaagatcatgag

SEQ ID NO: 622895 - DNA, 33 bp, Homo sapien
ttatgtgctatacttcaatacaaatttacttta

SEQ ID NO: 622896 - DNA, 33 bp, Homo sapien
ttatgtgctatacttcgatacaaatttacttta

SEQ ID NO: 622897 - DNA, 33 bp, Homo sapien
attcttagctttgataaataccttgaactggtc

SEQ ID NO: 622898 - DNA, 33 bp, Homo sapien
attcttagctttgatagataccttgaactggtc

SEQ ID NO: 622899 - DNA, 33 bp, Homo sapien
cagcagcaaaagaaatcatctagtgaaactttg

SEQ ID NO: 622900 - DNA, 33 bp, Homo sapien
cagcagcaaaagaaatgatctagtgaaactttg

SEQ ID NO: 622901 - DNA, 33 bp, Homo sapien
ttcaaaagcagaccataaagcagttaatcgctt

SEQ ID NO: 622902 - DNA, 33 bp, Homo sapien
ttcaaaagcagaccatgaagcagttaatcgctt

SEQ ID NO: 622903 - DNA, 33 bp, Homo sapien
tctaatccactacgtgaaacagctgaaaaggct

SEQ ID NO: 622904 - DNA, 33 bp, Homo sapien
tctaatccactacgtgcaacagctgaaaaggct

SEQ ID NO: 622905 - DNA, 33 bp, Homo sapien
atcagtcacctctcaaccacaaagagttccctt

SEQ ID NO: 622906 - DNA, 33 bp, Homo sapien
atcagtcacctctcaatcacaaagagttccctt

SEQ ID NO: 622907 - DNA, 33 bp, Homo sapien
gtgtttctcaaaagtgcatcttgttggctcagt

SEQ ID NO: 622908 - DNA, 33 bp, Homo sapien
gtgtttctcaaaagtgtatcttgttggctcagt

SEQ ID NO: 622909 - DNA, 33 bp, Homo sapien
actcttaataaaattacgtgagtgtttacatag

SEQ ID NO: 622910 - DNA, 33 bp, Homo sapien
actcttaataaaattatgtgagtgtttacatag

SEQ ID NO: 622911 - DNA, 33 bp, Homo sapien
accaaaaagtcagacaataacaggtgttagcaa

SEQ ID NO: 622912 - DNA, 33 bp, Homo sapien
accaaaaagtcagacagtaacaggtgttagcaa

SEQ ID NO: 622913 - DNA, 33 bp, Homo sapien
agtgtggataagtggaaccttactcacagggcc

SEQ ID NO: 622914 - DNA, 33 bp, Homo sapien
agtgtggataagtggatccttactcacagggcc

SEQ ID NO: 622915 - DNA, 33 bp, Homo sapien
ttcggaaggccttgaccatctgccagacagttc

SEQ ID NO: 622916 - DNA, 33 bp, Homo sapien
ttcggaaggccttgactatctgccagacagttc

SEQ ID NO: 622917 - DNA, 33 bp, Homo sapien
tggtctctattccaacgactcaaccctgatgct

SEQ ID NO: 622918 - DNA, 33 bp, Homo sapien
tggtctctattccaactactcaaccctgatgct

SEQ ID NO: 622919 - DNA, 33 bp, Homo sapien
aggattgtgttcctctaaaactgtcccctaaat

SEQ ID NO: 622920 - DNA, 33 bp, Homo sapien
aggattgtgttcctctgaaactgtcccctaaat

SEQ ID NO: 622921 - DNA, 33 bp, Homo sapien
attcaaatggctagaaatggatagagccaggat

SEQ ID NO: 622922 - DNA, 33 bp, Homo sapien
attcaaatggctagaagtggatagagccaggat

SEQ ID NO: 622923 - DNA, 33 bp, Homo sapien
ttacaagttaaacacaatatcaacagattttac

SEQ ID NO: 622924 - DNA, 33 bp, Homo sapien
ttacaagttaaacacagtatcaacagattttac

SEQ ID NO: 622925 - DNA, 33 bp, Homo sapien
acaagagcacataagcacagatacccaaaatgc

SEQ ID NO: 622926 - DNA, 33 bp, Homo sapien
acaagagcacataagcgcagatacccaaaatgc

SEQ ID NO: 622927 - DNA, 33 bp, Homo sapien
gcccacagggattccaggctgccctattcctaa

SEQ ID NO: 622928 - DNA, 33 bp, Homo sapien
gcccacagggattccatgctgccctattcctaa

SEQ ID NO: 622929 - DNA, 33 bp, Homo sapien
catccctgacagttccagccttcccaaattacc

SEQ ID NO: 622930 - DNA, 33 bp, Homo sapien
catccctgacagttccggccttcccaaattacc

SEQ ID NO: 622931 - DNA, 33 bp, Homo sapien
ggtggtgtctgaagaactaattgaaaaatatga

SEQ ID NO: 622932 - DNA, 33 bp, Homo sapien
ggtggtgtctgaagaagtaattgaaaaatatga

SEQ ID NO: 622933 - DNA, 33 bp, Homo sapien
aaaacaaaacattactgagaagcaagtgaggac

SEQ ID NO: 622934 - DNA, 33 bp, Homo sapien
aaaacaaaacattacttagaagcaagtgaggac

SEQ ID NO: 622935 - DNA, 33 bp, Homo sapien
ttggctagacaggtgaaaaacaagagagatttt

SEQ ID NO: 622936 - DNA, 33 bp, Homo sapien
ttggctagacaggtgataaacaagagagatttt

SEQ ID NO: 622937 - DNA, 33 bp, Homo sapien
gttgtacctgagcaaaacaatacgatgagttct

SEQ ID NO: 622938 - DNA, 33 bp, Homo sapien
gttgtacctgagcaaagcaatacgatgagttct

SEQ ID NO: 622939 - DNA, 33 bp, Homo sapien
gtttagatatgagtaacagaagacttttggtct

SEQ ID NO: 622940 - DNA, 33 bp, Homo sapien
gtttagatatgagtaagagaagacttttggtct

SEQ ID NO: 622941 - DNA, 33 bp, Homo sapien
ccaaactgagcacttccgaaacatgaattgtag

SEQ ID NO: 622942 - DNA, 33 bp, Homo sapien
ccaaactgagcacttctgaaacatgaattgtag

SEQ ID NO: 622943 - DNA, 33 bp, Homo sapien
gaaaatcaacacccacagatattttctacaagg

SEQ ID NO: 622944 - DNA, 33 bp, Homo sapien
gaaaatcaacacccacggatattttctacaagg

SEQ ID NO: 622945 - DNA, 33 bp, Homo sapien
agtgctgtaagagtcaaatgtaacctctggagg

SEQ ID NO: 622946 - DNA, 33 bp, Homo sapien
agtgctgtaagagtcagatgtaacctctggagg

SEQ ID NO: 622947 - DNA, 33 bp, Homo sapien
cgcatcaaacagcaaaacctcaatttttgaggg

SEQ ID NO: 622948 - DNA, 33 bp, Homo sapien
cgcatcaaacagcaaaccctcaatttttgaggg

SEQ ID NO: 622949 - DNA, 33 bp, Homo sapien
ttgcattcactcttccacctgtcacattgattc

SEQ ID NO: 622950 - DNA, 33 bp, Homo sapien
ttgcattcactcttccgcctgtcacattgattc

SEQ ID NO: 622951 - DNA, 33 bp, Homo sapien
aatgagatattttacaatcaaaagcacagacag

SEQ ID NO: 622952 - DNA, 33 bp, Homo sapien
aatgagatattttacagtcaaaagcacagacag

SEQ ID NO: 622953 - DNA, 33 bp, Homo sapien
tcttcctcatacattgaagaactggaagctgaa

SEQ ID NO: 622954 - DNA, 33 bp, Homo sapien
tcttcctcatacattgtagaactggaagctgaa

SEQ ID NO: 622955 - DNA, 33 bp, Homo sapien
aacctaaccacaacaaacagcccgatggtggca

SEQ ID NO: 622956 - DNA, 33 bp, Homo sapien
aacctaaccacaacaaccagcccgatggtggca

SEQ ID NO: 622957 - DNA, 33 bp, Homo sapien
tcttaaagtccttggaaagtgggagatcagcca

SEQ ID NO: 622958 - DNA, 33 bp, Homo sapien
tcttaaagtccttggagagtgggagatcagcca

SEQ ID NO: 622959 - DNA, 33 bp, Homo sapien
acactcttaagaaaccacatcaagtaatgggca

SEQ ID NO: 622960 - DNA, 33 bp, Homo sapien
acactcttaagaaaccgcatcaagtaatgggca

SEQ ID NO: 622961 - DNA, 33 bp, Homo sapien
acatctaagttttcaactgatgctttgttttga

SEQ ID NO: 622962 - DNA, 33 bp, Homo sapien
acatctaagttttcaattgatgctttgttttga

SEQ ID NO: 622963 - DNA, 33 bp, Homo sapien
attgtagcaacaggcaaaatgtcgtaaagaaat

SEQ ID NO: 622964 - DNA, 33 bp, Homo sapien
attgtagcaacaggcagaatgtcgtaaagaaat

SEQ ID NO: 622965 - DNA, 33 bp, Homo sapien
gaatgactatccaaacaggtctaaatcatctgt

SEQ ID NO: 622966 - DNA, 33 bp, Homo sapien
gaatgactatccaaacgggtctaaatcatctgt

SEQ ID NO: 622967 - DNA, 33 bp, Homo sapien
attttatatatgacaccgtaaggcattgggcac

SEQ ID NO: 622968 - DNA, 33 bp, Homo sapien
attttatatatgacactgtaaggcattgggcac

SEQ ID NO: 622969 - DNA, 33 bp, Homo sapien
gccatgaaagtgaacaactttgaatctgcttgc

SEQ ID NO: 622970 - DNA, 33 bp, Homo sapien
gccatgaaagtgaacatctttgaatctgcttgc

SEQ ID NO: 622971 - DNA, 33 bp, Homo sapien
gaaatgcccatcacccagatattcccactgttc

SEQ ID NO: 622972 - DNA, 33 bp, Homo sapien
gaaatgcccatcaccccgatattcccactgttc

SEQ ID NO: 622973 - DNA, 33 bp, Homo sapien
gctaaatatcctacaacacataggacaggcctc

SEQ ID NO: 622974 - DNA, 33 bp, Homo sapien
gctaaatatcctacaatacataggacaggcctc

SEQ ID NO: 622975 - DNA, 33 bp, Homo sapien
acctgggagactctacaatacacgtgccattcc

SEQ ID NO: 622976 - DNA, 33 bp, Homo sapien
acctgggagactctacgatacacgtgccattcc

SEQ ID NO: 622977 - DNA, 33 bp, Homo sapien
atgttgtcattagcccagggatgaggataatgt

SEQ ID NO: 622978 - DNA, 33 bp, Homo sapien
atgttgtcattagcccggggatgaggataatgt

SEQ ID NO: 622979 - DNA, 33 bp, Homo sapien
gggattgagatggagacggctacattctatatt

SEQ ID NO: 622980 - DNA, 33 bp, Homo sapien
gggattgagatggagatggctacattctatatt

SEQ ID NO: 622981 - DNA, 33 bp, Homo sapien
attgaacatttattgccagttgtcctgattatt

SEQ ID NO: 622982 - DNA, 33 bp, Homo sapien
attgaacatttattgctagttgtcctgattatt

SEQ ID NO: 622983 - DNA, 33 bp, Homo sapien
ggaaagttatgacccacgatctactgttgcttt

SEQ ID NO: 622984 - DNA, 33 bp, Homo sapien
ggaaagttatgacccatgatctactgttgcttt

SEQ ID NO: 622985 - DNA, 33 bp, Homo sapien
taagccctgtactgaaaacagaagggatgctca

SEQ ID NO: 622986 - DNA, 33 bp, Homo sapien
taagccctgtactgaagacagaagggatgctca

SEQ ID NO: 622987 - DNA, 33 bp, Homo sapien
atgtatgaatatctgccctctcaaaattcacac

SEQ ID NO: 622988 - DNA, 33 bp, Homo sapien
atgtatgaatatctgctctctcaaaattcacac

SEQ ID NO: 622989 - DNA, 33 bp, Homo sapien
ttgagtcttgaacaaaagtcaaccaaatgggga

SEQ ID NO: 622990 - DNA, 33 bp, Homo sapien
ttgagtcttgaacaaaggtcaaccaaatgggga

SEQ ID NO: 622991 - DNA, 33 bp, Homo sapien
tatgcttggaacagaagggatactcaatacttt

SEQ ID NO: 622992 - DNA, 33 bp, Homo sapien
tatgcttggaacagaatggatactcaatacttt

SEQ ID NO: 622993 - DNA, 33 bp, Homo sapien
ggttaggagatgggagccctctaaggcaggaag

SEQ ID NO: 622994 - DNA, 33 bp, Homo sapien
ggttaggagatgggagtcctctaaggcaggaag

SEQ ID NO: 622995 - DNA, 33 bp, Homo sapien
gtgaaggtcagagtcacgggaatggagagatag

SEQ ID NO: 622996 - DNA, 33 bp, Homo sapien
gtgaaggtcagagtcatgggaatggagagatag

SEQ ID NO: 622997 - DNA, 33 bp, Homo sapien
ctttcattaactacacggaacaggctctgtgtc

SEQ ID NO: 622998 - DNA, 33 bp, Homo sapien
ctttcattaactacactgaacaggctctgtgtc

SEQ ID NO: 622999 - DNA, 33 bp, Homo sapien
tgagttgtaattgacactcaataaactgcacat

SEQ ID NO: 623000 - DNA, 33 bp, Homo sapien
tgagttgtaattgacattcaataaactgcacat

SEQ ID NO: 623001 - DNA, 33 bp, Homo sapien
tactattagattatgcccctttggccaatcata

SEQ ID NO: 623002 - DNA, 33 bp, Homo sapien
tactattagattatgctcctttggccaatcata

SEQ ID NO: 623003 - DNA, 33 bp, Homo sapien
tttgtgttccagctgtcaacaattcactgctga

SEQ ID NO: 623004 - DNA, 33 bp, Homo sapien
tttgtgttccagctgttaacaattcactgctga

SEQ ID NO: 623005 - DNA, 33 bp, Homo sapien
agacagtctatccagcaatcaccaaatatcatc

SEQ ID NO: 623006 - DNA, 33 bp, Homo sapien
agacagtctatccagcgatcaccaaatatcatc

SEQ ID NO: 623007 - DNA, 33 bp, Homo sapien
agaaacaggtagaatacggtatatgaaaattca

SEQ ID NO: 623008 - DNA, 33 bp, Homo sapien
agaaacaggtagaatatggtatatgaaaattca

SEQ ID NO: 623009 - DNA, 33 bp, Homo sapien
ggggtttgtagtatgactatctgaatttgtgtc

SEQ ID NO: 623010 - DNA, 33 bp, Homo sapien
ggggtttgtagtatgattatctgaatttgtgtc

SEQ ID NO: 623011 - DNA, 33 bp, Homo sapien
aagaacactacaagaacagtactaagattataa

SEQ ID NO: 623012 - DNA, 33 bp, Homo sapien
aagaacactacaagaagagtactaagattataa

SEQ ID NO: 623013 - DNA, 33 bp, Homo sapien
gcatgagagctttgggacaccagcttctgagtt

SEQ ID NO: 623014 - DNA, 33 bp, Homo sapien
gcatgagagctttggggcaccagcttctgagtt

SEQ ID NO: 623015 - DNA, 33 bp, Homo sapien
aaatattctccaaagacagcatcatgttcatgt

SEQ ID NO: 623016 - DNA, 33 bp, Homo sapien
aaatattctccaaagagagcatcatgttcatgt

SEQ ID NO: 623017 - DNA, 33 bp, Homo sapien
agaatgttattggtcaacgtggatatggcagag

SEQ ID NO: 623018 - DNA, 33 bp, Homo sapien
agaatgttattggtcagcgtggatatggcagag

SEQ ID NO: 623019 - DNA, 33 bp, Homo sapien
ccagaacatggctctaccataacatgctggttg

SEQ ID NO: 623020 - DNA, 33 bp, Homo sapien
ccagaacatggctctatcataacatgctggttg

SEQ ID NO: 623021 - DNA, 33 bp, Homo sapien
agccaaaacatgctcaaatatactgaaaccctt

SEQ ID NO: 623022 - DNA, 33 bp, Homo sapien
agccaaaacatgctcatatatactgaaaccctt

SEQ ID NO: 623023 - DNA, 33 bp, Homo sapien
agaaaatgaaagagtaacattacggtgtcagca

SEQ ID NO: 623024 - DNA, 33 bp, Homo sapien
agaaaatgaaagagtaccattacggtgtcagca

SEQ ID NO: 623025 - DNA, 33 bp, Homo sapien
acattactacccggtaacgctttctgcaatgat

SEQ ID NO: 623026 - DNA, 33 bp, Homo sapien
acattactacccggtagcgctttctgcaatgat

SEQ ID NO: 623027 - DNA, 33 bp, Homo sapien
tgctctttttgagtaacgaagtgatggcagcag

SEQ ID NO: 623028 - DNA, 33 bp, Homo sapien
tgctctttttgagtaatgaagtgatggcagcag

SEQ ID NO: 623029 - DNA, 33 bp, Homo sapien
ttatcttatcctcaccaatacaggcgaagatcc

SEQ ID NO: 623030 - DNA, 33 bp, Homo sapien
ttatcttatcctcaccgatacaggcgaagatcc

SEQ ID NO: 623031 - DNA, 33 bp, Homo sapien
aaatgccagtgtcccaaattttgaaatgtttct

SEQ ID NO: 623032 - DNA, 33 bp, Homo sapien
aaatgccagtgtcccagattttgaaatgtttct

SEQ ID NO: 623033 - DNA, 33 bp, Homo sapien
gctggaacataaaatacactgattggctttaat

SEQ ID NO: 623034 - DNA, 33 bp, Homo sapien
gctggaacataaaatatactgattggctttaat

SEQ ID NO: 623035 - DNA, 33 bp, Homo sapien
ccaagactacagtgaaatcggccacctctcctc

SEQ ID NO: 623036 - DNA, 33 bp, Homo sapien
ccaagactacagtgaagtcggccacctctcctc

SEQ ID NO: 623037 - DNA, 33 bp, Homo sapien
ttatagtaatagctaactggacagggtattttc

SEQ ID NO: 623038 - DNA, 33 bp, Homo sapien
ttatagtaatagctaagtggacagggtattttc

SEQ ID NO: 623039 - DNA, 33 bp, Homo sapien
atcaatctaacttcaccgagcaaagcttcatgc

SEQ ID NO: 623040 - DNA, 33 bp, Homo sapien
atcaatctaacttcactgagcaaagcttcatgc

SEQ ID NO: 623041 - DNA, 33 bp, Homo sapien
tcaattctcatgtcacacctgggctgttagtca

SEQ ID NO: 623042 - DNA, 33 bp, Homo sapien
tcaattctcatgtcacgcctgggctgttagtca

SEQ ID NO: 623043 - DNA, 33 bp, Homo sapien
agaatatttgatgtggcagcgaatacaggtgaa

SEQ ID NO: 623044 - DNA, 33 bp, Homo sapien
agaatatttgatgtgggagcgaatacaggtgaa

SEQ ID NO: 623045 - DNA, 33 bp, Homo sapien
gctgaactctgtgcacaacttgaggatgggaag

SEQ ID NO: 623046 - DNA, 33 bp, Homo sapien
gctgaactctgtgcaccacttgaggatgggaag

SEQ ID NO: 623047 - DNA, 33 bp, Homo sapien
aggaaatgaattaatacatggcaggggctaaaa

SEQ ID NO: 623048 - DNA, 33 bp, Homo sapien
aggaaatgaattaatatatggcaggggctaaaa

SEQ ID NO: 623049 - DNA, 33 bp, Homo sapien
acttagctaagcgttaactcctgttactgttcc

SEQ ID NO: 623050 - DNA, 33 bp, Homo sapien
acttagctaagcgttagctcctgttactgttcc

SEQ ID NO: 623051 - DNA, 33 bp, Homo sapien
agagggaaaactcatcacacagaaggtccctca

SEQ ID NO: 623052 - DNA, 33 bp, Homo sapien
agagggaaaactcatcgcacagaaggtccctca

SEQ ID NO: 623053 - DNA, 33 bp, Homo sapien
tgtgttgttacaaatacgagatcaaactgtgca

SEQ ID NO: 623054 - DNA, 33 bp, Homo sapien
tgtgttgttacaaatatgagatcaaactgtgca

SEQ ID NO: 623055 - DNA, 33 bp, Homo sapien
atacaggtaagcttaaaaaacgtggcaataact

SEQ ID NO: 623056 - DNA, 33 bp, Homo sapien
atacaggtaagcttaacaaacgtggcaataact

SEQ ID NO: 623057 - DNA, 33 bp, Homo sapien
cctcctctgtataccaaacacagaccgcttgtc

SEQ ID NO: 623058 - DNA, 33 bp, Homo sapien
cctcctctgtataccagacacagaccgcttgtc

SEQ ID NO: 623059 - DNA, 33 bp, Homo sapien
ccttctttgagcagcacgggcttagagcagtga

SEQ ID NO: 623060 - DNA, 33 bp, Homo sapien
ccttctttgagcagcatgggcttagagcagtga

SEQ ID NO: 623061 - DNA, 33 bp, Homo sapien
gtcctgaacagctaaagcaaatgctggccatct

SEQ ID NO: 623062 - DNA, 33 bp, Homo sapien
gtcctgaacagctaaatcaaatgctggccatct

SEQ ID NO: 623063 - DNA, 33 bp, Homo sapien
taattgtccctgcttccctcaaatagaatgctg

SEQ ID NO: 623064 - DNA, 33 bp, Homo sapien
taattgtccctgcttcgctcaaatagaatgctg

SEQ ID NO: 623065 - DNA, 33 bp, Homo sapien
gcgaggtgcctttaggaaaaaattctttctggc

SEQ ID NO: 623066 - DNA, 33 bp, Homo sapien
gcgaggtgcctttaggtaaaaattctttctggc

SEQ ID NO: 623067 - DNA, 33 bp, Homo sapien
gaaggcaaaaagaaaggccgttgaaagtgctca

SEQ ID NO: 623068 - DNA, 33 bp, Homo sapien
gaaggcaaaaagaaagtccgttgaaagtgctca

SEQ ID NO: 623069 - DNA, 33 bp, Homo sapien
tgattaggggtataggaaccactgaagtagttg

SEQ ID NO: 623070 - DNA, 33 bp, Homo sapien
tgattaggggtatagggaccactgaagtagttg

SEQ ID NO: 623071 - DNA, 33 bp, Homo sapien
ttggtcattcctaccactcaaagatcccaccca

SEQ ID NO: 623072 - DNA, 33 bp, Homo sapien
ttggtcattcctaccagtcaaagatcccaccca

SEQ ID NO: 623073 - DNA, 33 bp, Homo sapien
aaagtaagtctctaacaattagtaatagatcca

SEQ ID NO: 623074 - DNA, 33 bp, Homo sapien
aaagtaagtctctaaccattagtaatagatcca

SEQ ID NO: 623075 - DNA, 33 bp, Homo sapien
tgcaagaataatgagtcacagttggtgattaga

SEQ ID NO: 623076 - DNA, 33 bp, Homo sapien
tgcaagaataatgagttacagttggtgattaga

SEQ ID NO: 623077 - DNA, 33 bp, Homo sapien
ctgtcccaaatatcaaatgagcttaaggcagcc

SEQ ID NO: 623078 - DNA, 33 bp, Homo sapien
ctgtcccaaatatcaagtgagcttaaggcagcc

SEQ ID NO: 623079 - DNA, 33 bp, Homo sapien
ctgctaggaaatactcaaaagattctagagacc

SEQ ID NO: 623080 - DNA, 33 bp, Homo sapien
ctgctaggaaatactcgaaagattctagagacc

SEQ ID NO: 623081 - DNA, 33 bp, Homo sapien
accatgcctttaagatcacgccctcctgtctac

SEQ ID NO: 623082 - DNA, 33 bp, Homo sapien
accatgcctttaagatgacgccctcctgtctac

SEQ ID NO: 623083 - DNA, 33 bp, Homo sapien
catgttccctcaagtgcactgtataccaccaag

SEQ ID NO: 623084 - DNA, 33 bp, Homo sapien
catgttccctcaagtgtactgtataccaccaag

SEQ ID NO: 623085 - DNA, 33 bp, Homo sapien
gacactgtaaaaacgaaggtggtcaactttgcc

SEQ ID NO: 623086 - DNA, 33 bp, Homo sapien
gacactgtaaaaacgatggtggtcaactttgcc

SEQ ID NO: 623087 - DNA, 33 bp, Homo sapien
caaacttgaatctgaccgagactctagataacc

SEQ ID NO: 623088 - DNA, 33 bp, Homo sapien
caaacttgaatctgactgagactctagataacc

SEQ ID NO: 623089 - DNA, 33 bp, Homo sapien
tgagtgttacattttaagttcttgtcaggaaag

SEQ ID NO: 623090 - DNA, 33 bp, Homo sapien
tgagtgttacattttaggttcttgtcaggaaag

SEQ ID NO: 623091 - DNA, 33 bp, Homo sapien
agacgcccaggcgcaacgctgaagcctgagctc

SEQ ID NO: 623092 - DNA, 33 bp, Homo sapien
agacgcccaggcgcaatgctgaagcctgagctc

SEQ ID NO: 623093 - DNA, 33 bp, Homo sapien
aagtgcccagtaaggccgatatcgaaatcagta

SEQ ID NO: 623094 - DNA, 33 bp, Homo sapien
aagtgcccagtaaggctgatatcgaaatcagta

SEQ ID NO: 623095 - DNA, 33 bp, Homo sapien
gtgtgtttcacactggcactcaaaaatttctta

SEQ ID NO: 623096 - DNA, 33 bp, Homo sapien
gtgtgtttcacactgggactcaaaaatttctta

SEQ ID NO: 623097 - DNA, 33 bp, Homo sapien
ggaagtcctcaggcaaagaaaggcagatattgc

SEQ ID NO: 623098 - DNA, 33 bp, Homo sapien
ggaagtcctcaggcaacgaaaggcagatattgc

SEQ ID NO: 623099 - DNA, 33 bp, Homo sapien
acaaagtagccaggagaagaaacacacagaggc

SEQ ID NO: 623100 - DNA, 33 bp, Homo sapien
acaaagtagccaggaggagaaacacacagaggc

SEQ ID NO: 623101 - DNA, 33 bp, Homo sapien
gtgtcattaactgggagaaggcaaagaacagat

SEQ ID NO: 623102 - DNA, 33 bp, Homo sapien
gtgtcattaactgggataaggcaaagaacagat

SEQ ID NO: 623103 - DNA, 33 bp, Homo sapien
acactaatgaatacaaagtgtttttaagcatcc

SEQ ID NO: 623104 - DNA, 33 bp, Homo sapien
acactaatgaatacaatgtgtttttaagcatcc

SEQ ID NO: 623105 - DNA, 33 bp, Homo sapien
actagccggcaaattccagacgttgacatttct

SEQ ID NO: 623106 - DNA, 33 bp, Homo sapien
actagccggcaaattctagacgttgacatttct

SEQ ID NO: 623107 - DNA, 33 bp, Homo sapien
gacaactttctgctgacaaacaggagttgaaag

SEQ ID NO: 623108 - DNA, 33 bp, Homo sapien
gacaactttctgctgataaacaggagttgaaag

SEQ ID NO: 623109 - DNA, 33 bp, Homo sapien
ctttagttattttaaccggctgtccttgaaatc

SEQ ID NO: 623110 - DNA, 33 bp, Homo sapien
ctttagttattttaactggctgtccttgaaatc

SEQ ID NO: 623111 - DNA, 33 bp, Homo sapien
aaggtgatagtaagaacggtaaatatcagtact

SEQ ID NO: 623112 - DNA, 33 bp, Homo sapien
aaggtgatagtaagaatggtaaatatcagtact

SEQ ID NO: 623113 - DNA, 33 bp, Homo sapien
ctgtggtgatactacaatggctttctgtttgga

SEQ ID NO: 623114 - DNA, 33 bp, Homo sapien
ctgtggtgatactacactggctttctgtttgga

SEQ ID NO: 623115 - DNA, 33 bp, Homo sapien
ctgttgtttacatggaagaaaggcatatagaca

SEQ ID NO: 623116 - DNA, 33 bp, Homo sapien
ctgttgtttacatggaggaaaggcatatagaca

SEQ ID NO: 623117 - DNA, 33 bp, Homo sapien
agtttggtggataggaatcaagttagaacatgt

SEQ ID NO: 623118 - DNA, 33 bp, Homo sapien
agtttggtggataggactcaagttagaacatgt

SEQ ID NO: 623119 - DNA, 33 bp, Homo sapien
gagcaggtagatttcccatctttcctatttcta

SEQ ID NO: 623120 - DNA, 33 bp, Homo sapien
gagcaggtagatttccgatctttcctatttcta

SEQ ID NO: 623121 - DNA, 33 bp, Homo sapien
tttttgttttttaagcacacgacaagtaggaaa

SEQ ID NO: 623122 - DNA, 33 bp, Homo sapien
tttttgttttttaagctcacgacaagtaggaaa

SEQ ID NO: 623123 - DNA, 33 bp, Homo sapien
taaaaatccagcaggcaattggtttgcttccaa

SEQ ID NO: 623124 - DNA, 33 bp, Homo sapien
taaaaatccagcaggcgattggtttgcttccaa

SEQ ID NO: 623125 - DNA, 33 bp, Homo sapien
aaagccctgctacaatcagcatccttctacaca

SEQ ID NO: 623126 - DNA, 33 bp, Homo sapien
aaagccctgctacaatgagcatccttctacaca

SEQ ID NO: 623127 - DNA, 33 bp, Homo sapien
acctaaaccaatagtcaccactttttgagtttt

SEQ ID NO: 623128 - DNA, 33 bp, Homo sapien
acctaaaccaatagtcgccactttttgagtttt

SEQ ID NO: 623129 - DNA, 33 bp, Homo sapien
ccgaagggctacacatcaggagtaagtgcagat

SEQ ID NO: 623130 - DNA, 33 bp, Homo sapien
ccgaagggctacacattaggagtaagtgcagat

SEQ ID NO: 623131 - DNA, 33 bp, Homo sapien
acttattcattcctaaacagttgatagtttaac

SEQ ID NO: 623132 - DNA, 33 bp, Homo sapien
acttattcattcctaagcagttgatagtttaac

SEQ ID NO: 623133 - DNA, 33 bp, Homo sapien
gccattttacattttcacaagcagtatgtaagt

SEQ ID NO: 623134 - DNA, 33 bp, Homo sapien
gccattttacattttcgcaagcagtatgtaagt

SEQ ID NO: 623135 - DNA, 33 bp, Homo sapien
gctgaaagtaggactactaaacagtaacaccca

SEQ ID NO: 623136 - DNA, 33 bp, Homo sapien
gctgaaagtaggactattaaacagtaacaccca

SEQ ID NO: 623137 - DNA, 33 bp, Homo sapien
aggttggtacagttacagaagctcacttaacat

SEQ ID NO: 623138 - DNA, 33 bp, Homo sapien
aggttggtacagttacggaagctcacttaacat

SEQ ID NO: 623139 - DNA, 33 bp, Homo sapien
aaatcttcacaaactaagtatccgacaaaggac

SEQ ID NO: 623140 - DNA, 33 bp, Homo sapien
aaatcttcacaaactaggtatccgacaaaggac

SEQ ID NO: 623141 - DNA, 33 bp, Homo sapien
cacctcttagccaagacgattttgtgatattac

SEQ ID NO: 623142 - DNA, 33 bp, Homo sapien
cacctcttagccaagatgattttgtgatattac

SEQ ID NO: 623143 - DNA, 33 bp, Homo sapien
gaatagattaggaagcaatcaggatggtgttaa

SEQ ID NO: 623144 - DNA, 33 bp, Homo sapien
gaatagattaggaagcgatcaggatggtgttaa

SEQ ID NO: 623145 - DNA, 33 bp, Homo sapien
gacagtttaactcaaaaaatgctgatgcaaact

SEQ ID NO: 623146 - DNA, 33 bp, Homo sapien
gacagtttaactcaaagaatgctgatgcaaact

SEQ ID NO: 623147 - DNA, 33 bp, Homo sapien
caaggggacgtggcccaagtcatgaacaatttc

SEQ ID NO: 623148 - DNA, 33 bp, Homo sapien
caaggggacgtggcccgagtcatgaacaatttc

SEQ ID NO: 623149 - DNA, 33 bp, Homo sapien
aggaaaaggtctgaaaaagcagaacagtatctt

SEQ ID NO: 623150 - DNA, 33 bp, Homo sapien
aggaaaaggtctgaaagagcagaacagtatctt

SEQ ID NO: 623151 - DNA, 33 bp, Homo sapien
ggcttcccatttgactcaggttgaattcaaaca

SEQ ID NO: 623152 - DNA, 33 bp, Homo sapien
ggcttcccatttgacttaggttgaattcaaaca

SEQ ID NO: 623153 - DNA, 33 bp, Homo sapien
gggttgattatagtcccaatatttgtgaggaac

SEQ ID NO: 623154 - DNA, 33 bp, Homo sapien
gggttgattatagtcctaatatttgtgaggaac

SEQ ID NO: 623155 - DNA, 33 bp, Homo sapien
taattgagagtaaaaaataattgacccaaagaa

SEQ ID NO: 623156 - DNA, 33 bp, Homo sapien
taattgagagtaaaaattaattgacccaaagaa

SEQ ID NO: 623157 - DNA, 33 bp, Homo sapien
taaggactttagctgaatatgttaggaaactgc

SEQ ID NO: 623158 - DNA, 33 bp, Homo sapien
taaggactttagctgagtatgttaggaaactgc

SEQ ID NO: 623159 - DNA, 33 bp, Homo sapien
gactccagactggtggcagagcagggttgaagc

SEQ ID NO: 623160 - DNA, 33 bp, Homo sapien
gactccagactggtggtagagcagggttgaagc

SEQ ID NO: 623161 - DNA, 33 bp, Homo sapien
taaaatattgatggaaataattgaagaagccac

SEQ ID NO: 623162 - DNA, 33 bp, Homo sapien
taaaatattgatggaagtaattgaagaagccac

SEQ ID NO: 623163 - DNA, 33 bp, Homo sapien
tttctaacaatgttctcaagtcaactggtagcc

SEQ ID NO: 623164 - DNA, 33 bp, Homo sapien
tttctaacaatgttcttaagtcaactggtagcc

SEQ ID NO: 623165 - DNA, 33 bp, Homo sapien
agtaggcaatcataaactcaagactgtgggtac

SEQ ID NO: 623166 - DNA, 33 bp, Homo sapien
agtaggcaatcataaagtcaagactgtgggtac

SEQ ID NO: 623167 - DNA, 33 bp, Homo sapien
ctctaggccagcttcaataagaaaaaaagaact

SEQ ID NO: 623168 - DNA, 33 bp, Homo sapien
ctctaggccagcttcagtaagaaaaaaagaact

SEQ ID NO: 623169 - DNA, 33 bp, Homo sapien
tcccagccctcagtcacgtgcccgttctccagc

SEQ ID NO: 623170 - DNA, 33 bp, Homo sapien
tcccagccctcagtcatgtgcccgttctccagc

SEQ ID NO: 623171 - DNA, 33 bp, Homo sapien
acaccattaaatgtacactccagaatgtggtag

SEQ ID NO: 623172 - DNA, 33 bp, Homo sapien
acaccattaaatgtacgctccagaatgtggtag

SEQ ID NO: 623173 - DNA, 33 bp, Homo sapien
taaaaaaataagcaaaagtaatgaacagacagt

SEQ ID NO: 623174 - DNA, 33 bp, Homo sapien
taaaaaaataagcaaaggtaatgaacagacagt

SEQ ID NO: 623175 - DNA, 33 bp, Homo sapien
gctaaaagtgtcacaacgctttggttactagag

SEQ ID NO: 623176 - DNA, 33 bp, Homo sapien
gctaaaagtgtcacaaggctttggttactagag

SEQ ID NO: 623177 - DNA, 33 bp, Homo sapien
gttcttattttggttcacttgctatttctatca

SEQ ID NO: 623178 - DNA, 33 bp, Homo sapien
gttcttattttggttcccttgctatttctatca

SEQ ID NO: 623179 - DNA, 33 bp, Homo sapien
ttcagtttacttcactcagatccatgagaggaa

SEQ ID NO: 623180 - DNA, 33 bp, Homo sapien
ttcagtttacttcacttagatccatgagaggaa

SEQ ID NO: 623181 - DNA, 33 bp, Homo sapien
ctcaagctgaaaatagccatagtaattaggatt

SEQ ID NO: 623182 - DNA, 33 bp, Homo sapien
ctcaagctgaaaataggcatagtaattaggatt

SEQ ID NO: 623183 - DNA, 33 bp, Homo sapien
aaggacagcataattgaatactgaataaattaa

SEQ ID NO: 623184 - DNA, 33 bp, Homo sapien
aaggacagcataattgtatactgaataaattaa

SEQ ID NO: 623185 - DNA, 33 bp, Homo sapien
caggataggatggagaagggtaaagagtaaact

SEQ ID NO: 623186 - DNA, 33 bp, Homo sapien
caggataggatggagacgggtaaagagtaaact

SEQ ID NO: 623187 - DNA, 33 bp, Homo sapien
aaacttcagcaactaaataaaactagaaccacc

SEQ ID NO: 623188 - DNA, 33 bp, Homo sapien
aaacttcagcaactaagtaaaactagaaccacc

SEQ ID NO: 623189 - DNA, 33 bp, Homo sapien
caatgactcaaggtagaagaattataaaagaag

SEQ ID NO: 623190 - DNA, 33 bp, Homo sapien
caatgactcaaggtaggagaattataaaagaag

SEQ ID NO: 623191 - DNA, 33 bp, Homo sapien
ttgccttctaagaaataagtcaggtacacagtt

SEQ ID NO: 623192 - DNA, 33 bp, Homo sapien
ttgccttctaagaaatgagtcaggtacacagtt

SEQ ID NO: 623193 - DNA, 33 bp, Homo sapien
aagaatctgttagttacacagtgttaagacaat

SEQ ID NO: 623194 - DNA, 33 bp, Homo sapien
aagaatctgttagttatacagtgttaagacaat

SEQ ID NO: 623195 - DNA, 33 bp, Homo sapien
tcttgccgattcatcaataagagtgaaaatgca

SEQ ID NO: 623196 - DNA, 33 bp, Homo sapien
tcttgccgattcatcagtaagagtgaaaatgca

SEQ ID NO: 623197 - DNA, 33 bp, Homo sapien
aaaaagtgataaatccaacttcataaaaattta

SEQ ID NO: 623198 - DNA, 33 bp, Homo sapien
aaaaagtgataaatccgacttcataaaaattta

SEQ ID NO: 623199 - DNA, 33 bp, Homo sapien
aattatttcagagacacggtggattaggggata

SEQ ID NO: 623200 - DNA, 33 bp, Homo sapien
aattatttcagagacatggtggattaggggata

SEQ ID NO: 623201 - DNA, 33 bp, Homo sapien
gtgtagcttcataccaccgtacatgacctcgaa

SEQ ID NO: 623202 - DNA, 33 bp, Homo sapien
gtgtagcttcataccatcgtacatgacctcgaa

SEQ ID NO: 623203 - DNA, 33 bp, Homo sapien
aagacctcagtcccgcaagatattaaagatgga

SEQ ID NO: 623204 - DNA, 33 bp, Homo sapien
aagacctcagtcccgcgagatattaaagatgga

SEQ ID NO: 623205 - DNA, 33 bp, Homo sapien
aaacccaattttcttacagtctaaggtacctgc

SEQ ID NO: 623206 - DNA, 33 bp, Homo sapien
aaacccaattttcttatagtctaaggtacctgc

SEQ ID NO: 623207 - DNA, 33 bp, Homo sapien
ttctacatgtcaagtcgaaaatgtaggtaggta

SEQ ID NO: 623208 - DNA, 33 bp, Homo sapien
ttctacatgtcaagtctaaaatgtaggtaggta

SEQ ID NO: 623209 - DNA, 33 bp, Homo sapien
actcagaagcaatgccagaattcaattttaatt

SEQ ID NO: 623210 - DNA, 33 bp, Homo sapien
actcagaagcaatgccggaattcaattttaatt

SEQ ID NO: 623211 - DNA, 33 bp, Homo sapien
ccatagttaaaacccaagagcttatgggggact

SEQ ID NO: 623212 - DNA, 33 bp, Homo sapien
ccatagttaaaacccaggagcttatgggggact

SEQ ID NO: 623213 - DNA, 33 bp, Homo sapien
ctgcttgctatcttgaacccctgaatccactat

SEQ ID NO: 623214 - DNA, 33 bp, Homo sapien
ctgcttgctatcttgagcccctgaatccactat

SEQ ID NO: 623215 - DNA, 33 bp, Homo sapien
atgatcaaaaaaataacgcacatctcaattcta

SEQ ID NO: 623216 - DNA, 33 bp, Homo sapien
atgatcaaaaaaataatgcacatctcaattcta

SEQ ID NO: 623217 - DNA, 33 bp, Homo sapien
atacaaaaattaagtcaaagttgatcaaagatt

SEQ ID NO: 623218 - DNA, 33 bp, Homo sapien
atacaaaaattaagtccaagttgatcaaagatt

SEQ ID NO: 623219 - DNA, 33 bp, Homo sapien
ttcatccaaacagagcaattcgtattttccttt

SEQ ID NO: 623220 - DNA, 33 bp, Homo sapien
ttcatccaaacagagccattcgtattttccttt

SEQ ID NO: 623221 - DNA, 33 bp, Homo sapien
tttgccatttaatgcacatttggatgctttgca

SEQ ID NO: 623222 - DNA, 33 bp, Homo sapien
tttgccatttaatgcagatttggatgctttgca

SEQ ID NO: 623223 - DNA, 33 bp, Homo sapien
ctgttggtcagcttccgactttgcacttaaatt

SEQ ID NO: 623224 - DNA, 33 bp, Homo sapien
ctgttggtcagcttcctactttgcacttaaatt

SEQ ID NO: 623225 - DNA, 33 bp, Homo sapien
atcagtttacatactcactgatactctgaatac

SEQ ID NO: 623226 - DNA, 33 bp, Homo sapien
atcagtttacatactccctgatactctgaatac

SEQ ID NO: 623227 - DNA, 33 bp, Homo sapien
gaaagatacaagactaaaaagataggcaggatc

SEQ ID NO: 623228 - DNA, 33 bp, Homo sapien
gaaagatacaagactagaaagataggcaggatc

SEQ ID NO: 623229 - DNA, 33 bp, Homo sapien
aatgtccttctttgtcgctttcaactgctgctg

SEQ ID NO: 623230 - DNA, 33 bp, Homo sapien
aatgtccttctttgtctctttcaactgctgctg

SEQ ID NO: 623231 - DNA, 33 bp, Homo sapien
catgtgcacaagaccacgagagtaactgatcct

SEQ ID NO: 623232 - DNA, 33 bp, Homo sapien
catgtgcacaagaccaggagagtaactgatcct

SEQ ID NO: 623233 - DNA, 33 bp, Homo sapien
ggtttaacctagttacaatgtattctgtggaag

SEQ ID NO: 623234 - DNA, 33 bp, Homo sapien
ggtttaacctagttacgatgtattctgtggaag

SEQ ID NO: 623235 - DNA, 33 bp, Homo sapien
ttcatgcagattaataagtcccacaagctcagg

SEQ ID NO: 623236 - DNA, 33 bp, Homo sapien
ttcatgcagattaataggtcccacaagctcagg

SEQ ID NO: 623237 - DNA, 33 bp, Homo sapien
agaactgttatgttacccaactgctctttagca

SEQ ID NO: 623238 - DNA, 33 bp, Homo sapien
agaactgttatgttactcaactgctctttagca

SEQ ID NO: 623239 - DNA, 33 bp, Homo sapien
aatgaaaggcaaaatacgtttaaggaactgtac

SEQ ID NO: 623240 - DNA, 33 bp, Homo sapien
aatgaaaggcaaaatatgtttaaggaactgtac

SEQ ID NO: 623241 - DNA, 33 bp, Homo sapien
actcagtggttttacacctagaatttagcctaa

SEQ ID NO: 623242 - DNA, 33 bp, Homo sapien
actcagtggttttacatctagaatttagcctaa

SEQ ID NO: 623243 - DNA, 33 bp, Homo sapien
ctcaaaaccgtgaaaacggctcatggaaattgt

SEQ ID NO: 623244 - DNA, 33 bp, Homo sapien
ctcaaaaccgtgaaaatggctcatggaaattgt

SEQ ID NO: 623245 - DNA, 33 bp, Homo sapien
gttttgtccgtcaaataagtgagttagagagct

SEQ ID NO: 623246 - DNA, 33 bp, Homo sapien
gttttgtccgtcaaatcagtgagttagagagct

SEQ ID NO: 623247 - DNA, 33 bp, Homo sapien
tatgactatgctgagactcctgtccttctagaa

SEQ ID NO: 623248 - DNA, 33 bp, Homo sapien
tatgactatgctgagattcctgtccttctagaa

SEQ ID NO: 623249 - DNA, 33 bp, Homo sapien
gatatagtgatattaactcaaacagcatttatt

SEQ ID NO: 623250 - DNA, 33 bp, Homo sapien
gatatagtgatattaattcaaacagcatttatt

SEQ ID NO: 623251 - DNA, 33 bp, Homo sapien
tgtccgttggcgttaccctacccttatacggtt

SEQ ID NO: 623252 - DNA, 33 bp, Homo sapien
tgtccgttggcgttactctacccttatacggtt

SEQ ID NO: 623253 - DNA, 33 bp, Homo sapien
cctctcagtgatgaaaatcgtttagtaaaatac

SEQ ID NO: 623254 - DNA, 33 bp, Homo sapien
cctctcagtgatgaaagtcgtttagtaaaatac

SEQ ID NO: 623255 - DNA, 33 bp, Homo sapien
cattctgttcacaagaatatagatgtaaagtat

SEQ ID NO: 623256 - DNA, 33 bp, Homo sapien
cattctgttcacaagagtatagatgtaaagtat

SEQ ID NO: 623257 - DNA, 33 bp, Homo sapien
tctcagcctgtgaggaatccacttgcagagcag

SEQ ID NO: 623258 - DNA, 33 bp, Homo sapien
tctcagcctgtgaggattccacttgcagagcag

SEQ ID NO: 623259 - DNA, 33 bp, Homo sapien
gtggattacagtagacaaattgcttacaagcac

SEQ ID NO: 623260 - DNA, 33 bp, Homo sapien
gtggattacagtagacgaattgcttacaagcac

SEQ ID NO: 623261 - DNA, 33 bp, Homo sapien
ctgctatgatacaaaacttctgaacaattaaaa

SEQ ID NO: 623262 - DNA, 33 bp, Homo sapien
ctgctatgatacaaaatttctgaacaattaaaa

SEQ ID NO: 623263 - DNA, 33 bp, Homo sapien
agtggtgcatcctaaacgtagtccctggtccaa

SEQ ID NO: 623264 - DNA, 33 bp, Homo sapien
agtggtgcatcctaaatgtagtccctggtccaa

SEQ ID NO: 623265 - DNA, 33 bp, Homo sapien
ttggctgtcctcaccaagtctcaagctaggcat

SEQ ID NO: 623266 - DNA, 33 bp, Homo sapien
ttggctgtcctcaccacgtctcaagctaggcat

SEQ ID NO: 623267 - DNA, 33 bp, Homo sapien
atgaaatagcacagccactcaatatgcccttct

SEQ ID NO: 623268 - DNA, 33 bp, Homo sapien
atgaaatagcacagccgctcaatatgcccttct

SEQ ID NO: 623269 - DNA, 33 bp, Homo sapien
tagactggatttcagcccaggtttaaagccaac

SEQ ID NO: 623270 - DNA, 33 bp, Homo sapien
tagactggatttcagcgcaggtttaaagccaac

SEQ ID NO: 623271 - DNA, 33 bp, Homo sapien
tcaatcaaaataatcaacacaggatgggacagc

SEQ ID NO: 623272 - DNA, 33 bp, Homo sapien
tcaatcaaaataatcagcacaggatgggacagc

SEQ ID NO: 623273 - DNA, 33 bp, Homo sapien
gggagatcagctggcacgagaaatcgttgaatt

SEQ ID NO: 623274 - DNA, 33 bp, Homo sapien
gggagatcagctggcatgagaaatcgttgaatt

SEQ ID NO: 623275 - DNA, 33 bp, Homo sapien
aacaatgggtaccaaaagcacactggaggaagt

SEQ ID NO: 623276 - DNA, 33 bp, Homo sapien
aacaatgggtaccaaaggcacactggaggaagt

SEQ ID NO: 623277 - DNA, 33 bp, Homo sapien
cccaaattctgttccacgttgaatacttcatgg

SEQ ID NO: 623278 - DNA, 33 bp, Homo sapien
cccaaattctgttccatgttgaatacttcatgg

SEQ ID NO: 623279 - DNA, 33 bp, Homo sapien
acacacactcacctcaactagtcagcaacaaga

SEQ ID NO: 623280 - DNA, 33 bp, Homo sapien
acacacactcacctcagctagtcagcaacaaga

SEQ ID NO: 623281 - DNA, 33 bp, Homo sapien
gactggcaatgttcccaatgttaacaatgtaaa

SEQ ID NO: 623282 - DNA, 33 bp, Homo sapien
gactggcaatgttccccatgttaacaatgtaaa

SEQ ID NO: 623283 - DNA, 33 bp, Homo sapien
gacgaaatctcaaaggcagtagctctcagagag

SEQ ID NO: 623284 - DNA, 33 bp, Homo sapien
gacgaaatctcaaaggtagtagctctcagagag

SEQ ID NO: 623285 - DNA, 33 bp, Homo sapien
agatcagtgttggagactatgctggaaaaaagg

SEQ ID NO: 623286 - DNA, 33 bp, Homo sapien
agatcagtgttggagagtatgctggaaaaaagg

SEQ ID NO: 623287 - DNA, 33 bp, Homo sapien
ttgtgggaaacaacaacgaaatacaatgtgtga

SEQ ID NO: 623288 - DNA, 33 bp, Homo sapien
ttgtgggaaacaacaatgaaatacaatgtgtga

SEQ ID NO: 623289 - DNA, 33 bp, Homo sapien
taagtacatcgtgatgaatggggtatccatcgc

SEQ ID NO: 623290 - DNA, 33 bp, Homo sapien
taagtacatcgtgatgcatggggtatccatcgc

SEQ ID NO: 623291 - DNA, 33 bp, Homo sapien
ttatcatacgctgaaaaccgtacacgtaacaat

SEQ ID NO: 623292 - DNA, 33 bp, Homo sapien
ttatcatacgctgaaagccgtacacgtaacaat

SEQ ID NO: 623293 - DNA, 33 bp, Homo sapien
aagaattcccaggcaaactcaatattttgacaa

SEQ ID NO: 623294 - DNA, 33 bp, Homo sapien
aagaattcccaggcaacctcaatattttgacaa

SEQ ID NO: 623295 - DNA, 33 bp, Homo sapien
aattagctgcacacacgaggctgagaggattta

SEQ ID NO: 623296 - DNA, 33 bp, Homo sapien
aattagctgcacacactaggctgagaggattta

SEQ ID NO: 623297 - DNA, 33 bp, Homo sapien
tgtttaaatagagtgactacatttcaggaatgc

SEQ ID NO: 623298 - DNA, 33 bp, Homo sapien
tgtttaaatagagtgattacatttcaggaatgc

SEQ ID NO: 623299 - DNA, 33 bp, Homo sapien
ctgtagtctgctttacaattaattatgtacatg

SEQ ID NO: 623300 - DNA, 33 bp, Homo sapien
ctgtagtctgctttaccattaattatgtacatg

SEQ ID NO: 623301 - DNA, 33 bp, Homo sapien
gagaaattggattctgcattgaataaatatcta

SEQ ID NO: 623302 - DNA, 33 bp, Homo sapien
gagaaattggattctggattgaataaatatcta

SEQ ID NO: 623303 - DNA, 33 bp, Homo sapien
ccaagactcatgtctacacaatcaaccctttag

SEQ ID NO: 623304 - DNA, 33 bp, Homo sapien
ccaagactcatgtctatacaatcaaccctttag

SEQ ID NO: 623305 - DNA, 33 bp, Homo sapien
tgtttacatctatgaaaaaagtctatctataac

SEQ ID NO: 623306 - DNA, 33 bp, Homo sapien
tgtttacatctatgaacaaagtctatctataac

SEQ ID NO: 623307 - DNA, 33 bp, Homo sapien
gcaacaatgtggatcaatctcacagatattagg

SEQ ID NO: 623308 - DNA, 33 bp, Homo sapien
gcaacaatgtggatcagtctcacagatattagg

SEQ ID NO: 623309 - DNA, 33 bp, Homo sapien
atgagaccactgcagaagacctgtatatataag

SEQ ID NO: 623310 - DNA, 33 bp, Homo sapien
atgagaccactgcagaggacctgtatatataag

SEQ ID NO: 623311 - DNA, 33 bp, Homo sapien
tgcttctggctatggtaaagtagactgcaacag

SEQ ID NO: 623312 - DNA, 33 bp, Homo sapien
tgcttctggctatggtgaagtagactgcaacag

SEQ ID NO: 623313 - DNA, 33 bp, Homo sapien
ttaaagagacctcctgcaataattgtcatgttg

SEQ ID NO: 623314 - DNA, 33 bp, Homo sapien
ttaaagagacctcctggaataattgtcatgttg

SEQ ID NO: 623315 - DNA, 33 bp, Homo sapien
tcgaaagtggcagccacctgcataaaatcttaa

SEQ ID NO: 623316 - DNA, 33 bp, Homo sapien
tcgaaagtggcagccatctgcataaaatcttaa

SEQ ID NO: 623317 - DNA, 33 bp, Homo sapien
ctttctcaccagctcacgattttgaacttgtcc

SEQ ID NO: 623318 - DNA, 33 bp, Homo sapien
ctttctcaccagctcaggattttgaacttgtcc

SEQ ID NO: 623319 - DNA, 33 bp, Homo sapien
cccgtagcatttaacacctcctagcatagcgta

SEQ ID NO: 623320 - DNA, 33 bp, Homo sapien
cccgtagcatttaacatctcctagcatagcgta

SEQ ID NO: 623321 - DNA, 33 bp, Homo sapien
ccattgtccagattcaataagtgatatttacta

SEQ ID NO: 623322 - DNA, 33 bp, Homo sapien
ccattgtccagattcagtaagtgatatttacta

SEQ ID NO: 623323 - DNA, 33 bp, Homo sapien
tcagtggtcatttactcaatggttaaagcaatg

SEQ ID NO: 623324 - DNA, 33 bp, Homo sapien
tcagtggtcatttactgaatggttaaagcaatg

SEQ ID NO: 623325 - DNA, 33 bp, Homo sapien
gagatggctgttagagacaaaaataaacaccca

SEQ ID NO: 623326 - DNA, 33 bp, Homo sapien
gagatggctgttagagtcaaaaataaacaccca

SEQ ID NO: 623327 - DNA, 33 bp, Homo sapien
acacacttagttgaacagactccttaaacatgt

SEQ ID NO: 623328 - DNA, 33 bp, Homo sapien
acacacttagttgaacggactccttaaacatgt

SEQ ID NO: 623329 - DNA, 33 bp, Homo sapien
gctcgggggtggttaacagcatgaatatctatt

SEQ ID NO: 623330 - DNA, 33 bp, Homo sapien
gctcgggggtggttaagagcatgaatatctatt

SEQ ID NO: 623331 - DNA, 33 bp, Homo sapien
aaaccttaattgacaactcatatgagacatttg

SEQ ID NO: 623332 - DNA, 33 bp, Homo sapien
aaaccttaattgacaattcatatgagacatttg

SEQ ID NO: 623333 - DNA, 33 bp, Homo sapien
ttaaagcaatgcttgacgtacaggatatgttca

SEQ ID NO: 623334 - DNA, 33 bp, Homo sapien
ttaaagcaatgcttgatgtacaggatatgttca

SEQ ID NO: 623335 - DNA, 33 bp, Homo sapien
agaataatgtgaaaaacaccattgtaccaaata

SEQ ID NO: 623336 - DNA, 33 bp, Homo sapien
agaataatgtgaaaaataccattgtaccaaata

SEQ ID NO: 623337 - DNA, 33 bp, Homo sapien
aggtacccatgcaaatcacttgagtacatgagc

SEQ ID NO: 623338 - DNA, 33 bp, Homo sapien
aggtacccatgcaaattacttgagtacatgagc

SEQ ID NO: 623339 - DNA, 33 bp, Homo sapien
tctgctgggtgtggaaacaaattagtgagaaaa

SEQ ID NO: 623340 - DNA, 33 bp, Homo sapien
tctgctgggtgtggaaccaaattagtgagaaaa

SEQ ID NO: 623341 - DNA, 33 bp, Homo sapien
gtagtctactttgtcaactggtattggaatgtc

SEQ ID NO: 623342 - DNA, 33 bp, Homo sapien
gtagtctactttgtcagctggtattggaatgtc

SEQ ID NO: 623343 - DNA, 33 bp, Homo sapien
cagatattgtactaccacactgctttcttgaca

SEQ ID NO: 623344 - DNA, 33 bp, Homo sapien
cagatattgtactaccgcactgctttcttgaca

SEQ ID NO: 623345 - DNA, 33 bp, Homo sapien
tgtcactggtttaaaacgcatattgtaagtgat

SEQ ID NO: 623346 - DNA, 33 bp, Homo sapien
tgtcactggtttaaaatgcatattgtaagtgat

SEQ ID NO: 623347 - DNA, 33 bp, Homo sapien
gatgagaaacctgtaactggcagtacaaaaatc

SEQ ID NO: 623348 - DNA, 33 bp, Homo sapien
gatgagaaacctgtaattggcagtacaaaaatc

SEQ ID NO: 623349 - DNA, 33 bp, Homo sapien
tgagagtctatgaaatcattatcttctggatct

SEQ ID NO: 623350 - DNA, 33 bp, Homo sapien
tgagagtctatgaaattattatcttctggatct

SEQ ID NO: 623351 - DNA, 33 bp, Homo sapien
aggctgagtggagtcaagtagccctgccttgtg

SEQ ID NO: 623352 - DNA, 33 bp, Homo sapien
aggctgagtggagtcacgtagccctgccttgtg

SEQ ID NO: 623353 - DNA, 33 bp, Homo sapien
ctgatgcagaatgcacaaatattcagaggcatt

SEQ ID NO: 623354 - DNA, 33 bp, Homo sapien
ctgatgcagaatgcacgaatattcagaggcatt

SEQ ID NO: 623355 - DNA, 33 bp, Homo sapien
tactgctactaatttacgtctgtggtcagcatt

SEQ ID NO: 623356 - DNA, 33 bp, Homo sapien
tactgctactaatttatgtctgtggtcagcatt

SEQ ID NO: 623357 - DNA, 33 bp, Homo sapien
ctttctgagagatgaaaatttttccaagaaaat

SEQ ID NO: 623358 - DNA, 33 bp, Homo sapien
ctttctgagagatgaatatttttccaagaaaat

SEQ ID NO: 623359 - DNA, 33 bp, Homo sapien
tgatcagcttgagggccacacctggttgtctca

SEQ ID NO: 623360 - DNA, 33 bp, Homo sapien
tgatcagcttgagggctacacctggttgtctca

SEQ ID NO: 623361 - DNA, 33 bp, Homo sapien
cagaggaggttgctcaagatctgagatgatcag

SEQ ID NO: 623362 - DNA, 33 bp, Homo sapien
cagaggaggttgctcaggatctgagatgatcag

SEQ ID NO: 623363 - DNA, 33 bp, Homo sapien
gtgacaaaaaatcaatcatagaggttcagggct

SEQ ID NO: 623364 - DNA, 33 bp, Homo sapien
gtgacaaaaaatcaatgatagaggttcagggct

SEQ ID NO: 623365 - DNA, 33 bp, Homo sapien
catcaaactttatggtaaaaatggctaacatgt

SEQ ID NO: 623366 - DNA, 33 bp, Homo sapien
catcaaactttatggtgaaaatggctaacatgt

SEQ ID NO: 623367 - DNA, 33 bp, Homo sapien
gatatgaaacacaaaaaactgccaggaatatag

SEQ ID NO: 623368 - DNA, 33 bp, Homo sapien
gatatgaaacacaaaacactgccaggaatatag

SEQ ID NO: 623369 - DNA, 33 bp, Homo sapien
aagctacattaaataaaaaccagcgagtactgg

SEQ ID NO: 623370 - DNA, 33 bp, Homo sapien
aagctacattaaataagaaccagcgagtactgg

SEQ ID NO: 623371 - DNA, 33 bp, Homo sapien
atgtaacctggaaacacggtagatcattaacaa

SEQ ID NO: 623372 - DNA, 33 bp, Homo sapien
atgtaacctggaaacatggtagatcattaacaa

SEQ ID NO: 623373 - DNA, 33 bp, Homo sapien
gccacagtgcctggaaaggaaatagtctctcta

SEQ ID NO: 623374 - DNA, 33 bp, Homo sapien
gccacagtgcctggaagggaaatagtctctcta

SEQ ID NO: 623375 - DNA, 33 bp, Homo sapien
atctggggaccttcaaacataaaattctgtgga

SEQ ID NO: 623376 - DNA, 33 bp, Homo sapien
atctggggaccttcaaccataaaattctgtgga

SEQ ID NO: 623377 - DNA, 33 bp, Homo sapien
cggctgagctccttagacagaatggaagggcta

SEQ ID NO: 623378 - DNA, 33 bp, Homo sapien
cggctgagctccttaggcagaatggaagggcta

SEQ ID NO: 623379 - DNA, 33 bp, Homo sapien
aacttgcctcattttacacaaccgatgtgcttt

SEQ ID NO: 623380 - DNA, 33 bp, Homo sapien
aacttgcctcattttatacaaccgatgtgcttt

SEQ ID NO: 623381 - DNA, 33 bp, Homo sapien
caaggccatgcaaagacataaagatgaatgcat

SEQ ID NO: 623382 - DNA, 33 bp, Homo sapien
caaggccatgcaaagatataaagatgaatgcat

SEQ ID NO: 623383 - DNA, 33 bp, Homo sapien
cagtctggtatacttaacttagcaatatgcatt

SEQ ID NO: 623384 - DNA, 33 bp, Homo sapien
cagtctggtatacttagcttagcaatatgcatt

SEQ ID NO: 623385 - DNA, 33 bp, Homo sapien
cttgtccaatgtcaaacagctcctaggttgtaa

SEQ ID NO: 623386 - DNA, 33 bp, Homo sapien
cttgtccaatgtcaaatagctcctaggttgtaa

SEQ ID NO: 623387 - DNA, 33 bp, Homo sapien
tgagagggatctctgccgacaccatatacaagc

SEQ ID NO: 623388 - DNA, 33 bp, Homo sapien
tgagagggatctctgctgacaccatatacaagc

SEQ ID NO: 623389 - DNA, 33 bp, Homo sapien
ttattgatatgcaggcaagtcctatttgctgtt

SEQ ID NO: 623390 - DNA, 33 bp, Homo sapien
ttattgatatgcaggccagtcctatttgctgtt

SEQ ID NO: 623391 - DNA, 33 bp, Homo sapien
atggttttgttagtccactccaacagcaaatag

SEQ ID NO: 623392 - DNA, 33 bp, Homo sapien
atggttttgttagtcctctccaacagcaaatag

SEQ ID NO: 623393 - DNA, 33 bp, Homo sapien
tttgacaaagttcaagaagtgtgtaggtgtcaa

SEQ ID NO: 623394 - DNA, 33 bp, Homo sapien
tttgacaaagttcaaggagtgtgtaggtgtcaa

SEQ ID NO: 623395 - DNA, 33 bp, Homo sapien
tggtgatagtgaacataatggttttgacaaagt

SEQ ID NO: 623396 - DNA, 33 bp, Homo sapien
tggtgatagtgaacatgatggttttgacaaagt

SEQ ID NO: 623397 - DNA, 33 bp, Homo sapien
actcagagagctgtaaatgtctgaaattctatg

SEQ ID NO: 623398 - DNA, 33 bp, Homo sapien
actcagagagctgtaagtgtctgaaattctatg

SEQ ID NO: 623399 - DNA, 33 bp, Homo sapien
ctgtcgcaaaaatatccagttatctgagccaat

SEQ ID NO: 623400 - DNA, 33 bp, Homo sapien
ctgtcgcaaaaatatctagttatctgagccaat

SEQ ID NO: 623401 - DNA, 33 bp, Homo sapien
taattgggacaaaatacactaagagattaaaag

SEQ ID NO: 623402 - DNA, 33 bp, Homo sapien
taattgggacaaaatatactaagagattaaaag

SEQ ID NO: 623403 - DNA, 33 bp, Homo sapien
aatctctttctggtgaccgcagcatttacaatg

SEQ ID NO: 623404 - DNA, 33 bp, Homo sapien
aatctctttctggtgatcgcagcatttacaatg

SEQ ID NO: 623405 - DNA, 33 bp, Homo sapien
taatatggagagctataactgaatggtaattgg

SEQ ID NO: 623406 - DNA, 33 bp, Homo sapien
taatatggagagctatgactgaatggtaattgg

SEQ ID NO: 623407 - DNA, 33 bp, Homo sapien
tggagttgctttgggcaaaagtctgagatttca

SEQ ID NO: 623408 - DNA, 33 bp, Homo sapien
tggagttgctttgggcgaaagtctgagatttca

SEQ ID NO: 623409 - DNA, 33 bp, Homo sapien
agatagtgcaaatgaaatgaaataaaaacacac

SEQ ID NO: 623410 - DNA, 33 bp, Homo sapien
agatagtgcaaatgaagtgaaataaaaacacac

SEQ ID NO: 623411 - DNA, 33 bp, Homo sapien
aaagtgtgtgagatgacggataggttaacttga

SEQ ID NO: 623412 - DNA, 33 bp, Homo sapien
aaagtgtgtgagatgatggataggttaacttga

SEQ ID NO: 623413 - DNA, 33 bp, Homo sapien
aacacatggcagaggacgtttttactgagatga

SEQ ID NO: 623414 - DNA, 33 bp, Homo sapien
aacacatggcagaggatgtttttactgagatga

SEQ ID NO: 623415 - DNA, 33 bp, Homo sapien
aaactcgttgtcacagaatagccctaatgcaat

SEQ ID NO: 623416 - DNA, 33 bp, Homo sapien
aaactcgttgtcacagtatagccctaatgcaat

SEQ ID NO: 623417 - DNA, 33 bp, Homo sapien
atttatcatttcccaccgggacactttggagaa

SEQ ID NO: 623418 - DNA, 33 bp, Homo sapien
atttatcatttcccactgggacactttggagaa

SEQ ID NO: 623419 - DNA, 33 bp, Homo sapien
tcattgctgctttaccactgtacataggctaac

SEQ ID NO: 623420 - DNA, 33 bp, Homo sapien
tcattgctgctttaccgctgtacataggctaac

SEQ ID NO: 623421 - DNA, 33 bp, Homo sapien
ctttttggtatcagaacccttttagacactcag

SEQ ID NO: 623422 - DNA, 33 bp, Homo sapien
ctttttggtatcagaatccttttagacactcag

SEQ ID NO: 623423 - DNA, 33 bp, Homo sapien
agagaagctaaggagaaataagccagagaactt

SEQ ID NO: 623424 - DNA, 33 bp, Homo sapien
agagaagctaaggagacataagccagagaactt

SEQ ID NO: 623425 - DNA, 33 bp, Homo sapien
catcactctaaagatacggcgtttctgacacat

SEQ ID NO: 623426 - DNA, 33 bp, Homo sapien
catcactctaaagatatggcgtttctgacacat

SEQ ID NO: 623427 - DNA, 33 bp, Homo sapien
cctaaagcccaactcaatctagccctagcctct

SEQ ID NO: 623428 - DNA, 33 bp, Homo sapien
cctaaagcccaactcagtctagccctagcctct

SEQ ID NO: 623429 - DNA, 33 bp, Homo sapien
ccacatgaacaccaaactatgcatggttcttct

SEQ ID NO: 623430 - DNA, 33 bp, Homo sapien
ccacatgaacaccaaattatgcatggttcttct

SEQ ID NO: 623431 - DNA, 33 bp, Homo sapien
ttatttttttcagtcaatgaacattaaggagct

SEQ ID NO: 623432 - DNA, 33 bp, Homo sapien
ttatttttttcagtcagtgaacattaaggagct

SEQ ID NO: 623433 - DNA, 33 bp, Homo sapien
taaggcacttatcatacaaggaagccatgtttt

SEQ ID NO: 623434 - DNA, 33 bp, Homo sapien
taaggcacttatcatagaaggaagccatgtttt

SEQ ID NO: 623435 - DNA, 33 bp, Homo sapien
ggtgcttctgcaagaaagatgatagcaggtagt

SEQ ID NO: 623436 - DNA, 33 bp, Homo sapien
ggtgcttctgcaagaaggatgatagcaggtagt

SEQ ID NO: 623437 - DNA, 33 bp, Homo sapien
gtgtgaagatatgggaagtcaattgtttgtttg

SEQ ID NO: 623438 - DNA, 33 bp, Homo sapien
gtgtgaagatatgggaggtcaattgtttgtttg

SEQ ID NO: 623439 - DNA, 33 bp, Homo sapien
agggtgcaaccttatgcatgtatggttccaccc

SEQ ID NO: 623440 - DNA, 33 bp, Homo sapien
agggtgcaaccttatgtatgtatggttccaccc

SEQ ID NO: 623441 - DNA, 33 bp, Homo sapien
tgataatatctatttcacatggtttgatagatt

SEQ ID NO: 623442 - DNA, 33 bp, Homo sapien
tgataatatctatttcgcatggtttgatagatt

SEQ ID NO: 623443 - DNA, 33 bp, Homo sapien
atttccctgagttggaagaaaaagtcttggacc

SEQ ID NO: 623444 - DNA, 33 bp, Homo sapien
atttccctgagttggatgaaaaagtcttggacc

SEQ ID NO: 623445 - DNA, 33 bp, Homo sapien
ttgattactcttcacaacaacactctgaagtag

SEQ ID NO: 623446 - DNA, 33 bp, Homo sapien
ttgattactcttcacagcaacactctgaagtag

SEQ ID NO: 623447 - DNA, 33 bp, Homo sapien
tgacttgcagaacaacaatcaagagaaataact

SEQ ID NO: 623448 - DNA, 33 bp, Homo sapien
tgacttgcagaacaacgatcaagagaaataact

SEQ ID NO: 623449 - DNA, 33 bp, Homo sapien
cctcaagtgacttcaacgtgcaagaagattgtg

SEQ ID NO: 623450 - DNA, 33 bp, Homo sapien
cctcaagtgacttcaatgtgcaagaagattgtg

SEQ ID NO: 623451 - DNA, 33 bp, Homo sapien
taggccttagacacaacatgactgatgtctctg

SEQ ID NO: 623452 - DNA, 33 bp, Homo sapien
taggccttagacacaatatgactgatgtctctg

SEQ ID NO: 623453 - DNA, 33 bp, Homo sapien
ctgcacagatggggaacagtctctatacaaaaa

SEQ ID NO: 623454 - DNA, 33 bp, Homo sapien
ctgcacagatggggaatagtctctatacaaaaa

SEQ ID NO: 623455 - DNA, 33 bp, Homo sapien
aagagggcagggttgaataacaagctagatttg

SEQ ID NO: 623456 - DNA, 33 bp, Homo sapien
aagagggcagggttgagtaacaagctagatttg

SEQ ID NO: 623457 - DNA, 33 bp, Homo sapien
cagcagacaggtgctacatttttggtaataaag

SEQ ID NO: 623458 - DNA, 33 bp, Homo sapien
cagcagacaggtgctatatttttggtaataaag

SEQ ID NO: 623459 - DNA, 33 bp, Homo sapien
catgctatacccagctgaattccttaaagtcca

SEQ ID NO: 623460 - DNA, 33 bp, Homo sapien
catgctatacccagcttaattccttaaagtcca

SEQ ID NO: 623461 - DNA, 33 bp, Homo sapien
atgtccacatggattgaagctagaattactata

SEQ ID NO: 623462 - DNA, 33 bp, Homo sapien
atgtccacatggattggagctagaattactata

SEQ ID NO: 623463 - DNA, 33 bp, Homo sapien
gctttttgcttgtaccacatgctccacattact

SEQ ID NO: 623464 - DNA, 33 bp, Homo sapien
gctttttgcttgtaccgcatgctccacattact

SEQ ID NO: 623465 - DNA, 33 bp, Homo sapien
gctttttgcttctttgaatgcctcggctgaccc

SEQ ID NO: 623466 - DNA, 33 bp, Homo sapien
gctttttgcttctttggatgcctcggctgaccc

SEQ ID NO: 623467 - DNA, 33 bp, Homo sapien
aatctcagagtagtgaagtaaaaataaactctt

SEQ ID NO: 623468 - DNA, 33 bp, Homo sapien
aatctcagagtagtgaggtaaaaataaactctt

SEQ ID NO: 623469 - DNA, 33 bp, Homo sapien
cttattctatcaaccacaaggaagaaacaggtt

SEQ ID NO: 623470 - DNA, 33 bp, Homo sapien
cttattctatcaaccataaggaagaaacaggtt

SEQ ID NO: 623471 - DNA, 33 bp, Homo sapien
ccaaagatgtccaagaggatcacattctaattc

SEQ ID NO: 623472 - DNA, 33 bp, Homo sapien
ccaaagatgtccaagatgatcacattctaattc

SEQ ID NO: 623473 - DNA, 33 bp, Homo sapien
agagctgattgtttaaaagatgctggcacctcc

SEQ ID NO: 623474 - DNA, 33 bp, Homo sapien
agagctgattgtttaagagatgctggcacctcc

SEQ ID NO: 623475 - DNA, 33 bp, Homo sapien
tagccacagtaaaacactacaaagcaacgggtg

SEQ ID NO: 623476 - DNA, 33 bp, Homo sapien
tagccacagtaaaacagtacaaagcaacgggtg

SEQ ID NO: 623477 - DNA, 33 bp, Homo sapien
tcctcaagattaatgaaaagaatatgttagagt

SEQ ID NO: 623478 - DNA, 33 bp, Homo sapien
tcctcaagattaatgagaagaatatgttagagt

SEQ ID NO: 623479 - DNA, 33 bp, Homo sapien
cagatttctggcaacactgtctgaacatctgga

SEQ ID NO: 623480 - DNA, 33 bp, Homo sapien
cagatttctggcaacattgtctgaacatctgga

SEQ ID NO: 623481 - DNA, 33 bp, Homo sapien
tatttctgtcattacaactaattgtctgtgtga

SEQ ID NO: 623482 - DNA, 33 bp, Homo sapien
tatttctgtcattacatctaattgtctgtgtga

SEQ ID NO: 623483 - DNA, 33 bp, Homo sapien
gaaggcacatttgaacactctgcagacaaaatc

SEQ ID NO: 623484 - DNA, 33 bp, Homo sapien
gaaggcacatttgaacgctctgcagacaaaatc

SEQ ID NO: 623485 - DNA, 33 bp, Homo sapien
gtgtgctcctgaataactctgcattgccagtca

SEQ ID NO: 623486 - DNA, 33 bp, Homo sapien
gtgtgctcctgaataagtctgcattgccagtca

SEQ ID NO: 623487 - DNA, 33 bp, Homo sapien
ggcggtcattttcactaacgatagacagaagca

SEQ ID NO: 623488 - DNA, 33 bp, Homo sapien
ggcggtcattttcactcacgatagacagaagca

SEQ ID NO: 623489 - DNA, 33 bp, Homo sapien
tagcaggtcatgtcaaactacttccaccaaaat

SEQ ID NO: 623490 - DNA, 33 bp, Homo sapien
tagcaggtcatgtcaagctacttccaccaaaat

SEQ ID NO: 623491 - DNA, 33 bp, Homo sapien
ttcctaagtatatttacccaacagaaatgttca

SEQ ID NO: 623492 - DNA, 33 bp, Homo sapien
ttcctaagtatatttatccaacagaaatgttca

SEQ ID NO: 623493 - DNA, 33 bp, Homo sapien
aatgtaagatgtataaagccacaatcaccaaga

SEQ ID NO: 623494 - DNA, 33 bp, Homo sapien
aatgtaagatgtataatgccacaatcaccaaga

SEQ ID NO: 623495 - DNA, 33 bp, Homo sapien
atccttgcattctagacataaatcccacttggt

SEQ ID NO: 623496 - DNA, 33 bp, Homo sapien
atccttgcattctagagataaatcccacttggt

SEQ ID NO: 623497 - DNA, 33 bp, Homo sapien
tcatgtctctgactaacgccctatcttgctgtg

SEQ ID NO: 623498 - DNA, 33 bp, Homo sapien
tcatgtctctgactaatgccctatcttgctgtg

SEQ ID NO: 623499 - DNA, 33 bp, Homo sapien
tacttggcactcaagaaattctgctgttgttat

SEQ ID NO: 623500 - DNA, 33 bp, Homo sapien
tacttggcactcaagatattctgctgttgttat

SEQ ID NO: 623501 - DNA, 33 bp, Homo sapien
tcatagtttttggtcactctgtgaaggtttcat

SEQ ID NO: 623502 - DNA, 33 bp, Homo sapien
tcatagtttttggtcattctgtgaaggtttcat

SEQ ID NO: 623503 - DNA, 33 bp, Homo sapien
aatttgttggctttcacccggaaggcagataaa

SEQ ID NO: 623504 - DNA, 33 bp, Homo sapien
aatttgttggctttcatccggaaggcagataaa

SEQ ID NO: 623505 - DNA, 33 bp, Homo sapien
tttcattcctgccctacggaaacacaggagatt

SEQ ID NO: 623506 - DNA, 33 bp, Homo sapien
tttcattcctgccctatggaaacacaggagatt

SEQ ID NO: 623507 - DNA, 33 bp, Homo sapien
aaaacaaatttaattcactttgagaagtattta

SEQ ID NO: 623508 - DNA, 33 bp, Homo sapien
aaaacaaatttaattccctttgagaagtattta

SEQ ID NO: 623509 - DNA, 33 bp, Homo sapien
atgtgcatacttttcacattaacagttgtgttt

SEQ ID NO: 623510 - DNA, 33 bp, Homo sapien
atgtgcatacttttcatattaacagttgtgttt

SEQ ID NO: 623511 - DNA, 33 bp, Homo sapien
tatatacgttgagtcacatggtaggtacttttg

SEQ ID NO: 623512 - DNA, 33 bp, Homo sapien
tatatacgttgagtcatatggtaggtacttttg

SEQ ID NO: 623513 - DNA, 33 bp, Homo sapien
ttatttttttcagacccctgacaactagtagac

SEQ ID NO: 623514 - DNA, 33 bp, Homo sapien
ttatttttttcagacctctgacaactagtagac

SEQ ID NO: 623515 - DNA, 33 bp, Homo sapien
attaatgtggtaagaaaaaggtatataaatgta

SEQ ID NO: 623516 - DNA, 33 bp, Homo sapien
attaatgtggtaagaagaaggtatataaatgta

SEQ ID NO: 623517 - DNA, 33 bp, Homo sapien
catccaagtaaaatgaaagagctgcagtaaaaa

SEQ ID NO: 623518 - DNA, 33 bp, Homo sapien
catccaagtaaaatgacagagctgcagtaaaaa

SEQ ID NO: 623519 - DNA, 33 bp, Homo sapien
cccatttattaagcgaaagctgagggaaaatag

SEQ ID NO: 623520 - DNA, 33 bp, Homo sapien
cccatttattaagcgacagctgagggaaaatag

SEQ ID NO: 623521 - DNA, 33 bp, Homo sapien
aactagaactctcatacattccaagtaggagca

SEQ ID NO: 623522 - DNA, 33 bp, Homo sapien
aactagaactctcatatattccaagtaggagca

SEQ ID NO: 623523 - DNA, 33 bp, Homo sapien
ataacactgtaatgcaataagattggtatcctt

SEQ ID NO: 623524 - DNA, 33 bp, Homo sapien
ataacactgtaatgcagtaagattggtatcctt

SEQ ID NO: 623525 - DNA, 33 bp, Homo sapien
aatttgattactggcccgagtggagaccttcaa

SEQ ID NO: 623526 - DNA, 33 bp, Homo sapien
aatttgattactggcctgagtggagaccttcaa

SEQ ID NO: 623527 - DNA, 33 bp, Homo sapien
tgcttcattagatacacccgaatttgatgaact

SEQ ID NO: 623528 - DNA, 33 bp, Homo sapien
tgcttcattagatacatccgaatttgatgaact

SEQ ID NO: 623529 - DNA, 33 bp, Homo sapien
gtgaatatacccagtgaagtttccaaccaatga

SEQ ID NO: 623530 - DNA, 33 bp, Homo sapien
gtgaatatacccagtgcagtttccaaccaatga

SEQ ID NO: 623531 - DNA, 33 bp, Homo sapien
ttggtatgtcaaaagaataatagtttcaagtga

SEQ ID NO: 623532 - DNA, 33 bp, Homo sapien
ttggtatgtcaaaagagtaatagtttcaagtga

SEQ ID NO: 623533 - DNA, 33 bp, Homo sapien
tggtcagttaaagggacaagttagagtctgtca

SEQ ID NO: 623534 - DNA, 33 bp, Homo sapien
tggtcagttaaagggagaagttagagtctgtca

SEQ ID NO: 623535 - DNA, 33 bp, Homo sapien
ataagaaattaccacaaagttattgacttaaaa

SEQ ID NO: 623536 - DNA, 33 bp, Homo sapien
ataagaaattaccacagagttattgacttaaaa

SEQ ID NO: 623537 - DNA, 33 bp, Homo sapien
actttgcagcaacaaaaagaccacccaagtaat

SEQ ID NO: 623538 - DNA, 33 bp, Homo sapien
actttgcagcaacaaacagaccacccaagtaat

SEQ ID NO: 623539 - DNA, 33 bp, Homo sapien
taatgatctctaggcaataagaactaagattgg

SEQ ID NO: 623540 - DNA, 33 bp, Homo sapien
taatgatctctaggcagtaagaactaagattgg

SEQ ID NO: 623541 - DNA, 33 bp, Homo sapien
aaagggcatgaactcgaccttttccatggctgc

SEQ ID NO: 623542 - DNA, 33 bp, Homo sapien
aaagggcatgaactcgtccttttccatggctgc

SEQ ID NO: 623543 - DNA, 33 bp, Homo sapien
actcaacaagatcatacccaatcaaaatacctt

SEQ ID NO: 623544 - DNA, 33 bp, Homo sapien
actcaacaagatcatatccaatcaaaatacctt

SEQ ID NO: 623545 - DNA, 33 bp, Homo sapien
agtgatcagtaatctacagaaaacttgaggggt

SEQ ID NO: 623546 - DNA, 33 bp, Homo sapien
agtgatcagtaatctatagaaaacttgaggggt

SEQ ID NO: 623547 - DNA, 33 bp, Homo sapien
aattttgccaaagatcaagtcaaaatggaagga

SEQ ID NO: 623548 - DNA, 33 bp, Homo sapien
aattttgccaaagatcgagtcaaaatggaagga

SEQ ID NO: 623549 - DNA, 33 bp, Homo sapien
aagatttccttattcacgttatatttcgaaaaa

SEQ ID NO: 623550 - DNA, 33 bp, Homo sapien
aagatttccttattcatgttatatttcgaaaaa

SEQ ID NO: 623551 - DNA, 33 bp, Homo sapien
tgctcactgcatgccacgcactaactaccctgg

SEQ ID NO: 623552 - DNA, 33 bp, Homo sapien
tgctcactgcatgccaggcactaactaccctgg

SEQ ID NO: 623553 - DNA, 33 bp, Homo sapien
cagactgaattttggcaaattttttctcataac

SEQ ID NO: 623554 - DNA, 33 bp, Homo sapien
cagactgaattttggccaattttttctcataac

SEQ ID NO: 623555 - DNA, 33 bp, Homo sapien
agaactcttccacgtagcattagtccagaggta

SEQ ID NO: 623556 - DNA, 33 bp, Homo sapien
agaactcttccacgtatcattagtccagaggta

SEQ ID NO: 623557 - DNA, 33 bp, Homo sapien
catgcaatattcttccagctctggacaatacag

SEQ ID NO: 623558 - DNA, 33 bp, Homo sapien
catgcaatattcttcctgctctggacaatacag

SEQ ID NO: 623559 - DNA, 33 bp, Homo sapien
agatctaataggcatagcttcactccgacctgg

SEQ ID NO: 623560 - DNA, 33 bp, Homo sapien
agatctaataggcatatcttcactccgacctgg

SEQ ID NO: 623561 - DNA, 33 bp, Homo sapien
attcacttgataaacagtaacactttaacaggg

SEQ ID NO: 623562 - DNA, 33 bp, Homo sapien
attcacttgataaacattaacactttaacaggg

SEQ ID NO: 623563 - DNA, 33 bp, Homo sapien
tgttgtgtttgctacacgaatgagagggtgcat

SEQ ID NO: 623564 - DNA, 33 bp, Homo sapien
tgttgtgtttgctacatgaatgagagggtgcat

SEQ ID NO: 623565 - DNA, 33 bp, Homo sapien
aagatatgtccattgccattgtcactactagaa

SEQ ID NO: 623566 - DNA, 33 bp, Homo sapien
aagatatgtccattgctattgtcactactagaa

SEQ ID NO: 623567 - DNA, 33 bp, Homo sapien
acttccagaaatgtgaagaggatattggtcaga

SEQ ID NO: 623568 - DNA, 33 bp, Homo sapien
acttccagaaatgtgatgaggatattggtcaga

SEQ ID NO: 623569 - DNA, 33 bp, Homo sapien
catgttcccatctcaactgagcgttttacttaa

SEQ ID NO: 623570 - DNA, 33 bp, Homo sapien
catgttcccatctcaattgagcgttttacttaa

SEQ ID NO: 623571 - DNA, 33 bp, Homo sapien
gcaattaatattcatgcaaacgtgatgataact

SEQ ID NO: 623572 - DNA, 33 bp, Homo sapien
gcaattaatattcatgtaaacgtgatgataact

SEQ ID NO: 623573 - DNA, 33 bp, Homo sapien
tccagagaacattatagctgtatatggtagggc

SEQ ID NO: 623574 - DNA, 33 bp, Homo sapien
tccagagaacattatatctgtatatggtagggc

SEQ ID NO: 623575 - DNA, 33 bp, Homo sapien
agctcaggttcagcaacgtgtgcctagtcttac

SEQ ID NO: 623576 - DNA, 33 bp, Homo sapien
agctcaggttcagcaatgtgtgcctagtcttac

SEQ ID NO: 623577 - DNA, 33 bp, Homo sapien
aaatgacctgggggtaagtaaattgtgtttgct

SEQ ID NO: 623578 - DNA, 33 bp, Homo sapien
aaatgacctgggggtaggtaaattgtgtttgct

SEQ ID NO: 623579 - DNA, 33 bp, Homo sapien
tatataactgttgaaaataaaaattatgacatt

SEQ ID NO: 623580 - DNA, 33 bp, Homo sapien
tatataactgttgaaagtaaaaattatgacatt

SEQ ID NO: 623581 - DNA, 33 bp, Homo sapien
caatagaatgttctcaacacttgcttacagatt

SEQ ID NO: 623582 - DNA, 33 bp, Homo sapien
caatagaatgttctcagcacttgcttacagatt

SEQ ID NO: 623583 - DNA, 33 bp, Homo sapien
gccctgcagggtgtgacgtttacactttgctac

SEQ ID NO: 623584 - DNA, 33 bp, Homo sapien
gccctgcagggtgtgatgtttacactttgctac

SEQ ID NO: 623585 - DNA, 33 bp, Homo sapien
acttcttgggagaacagctaggagcagatccct

SEQ ID NO: 623586 - DNA, 33 bp, Homo sapien
acttcttgggagaacatctaggagcagatccct

SEQ ID NO: 623587 - DNA, 33 bp, Homo sapien
gagtcaagtgttaggtcaattgctttatgtgct

SEQ ID NO: 623588 - DNA, 33 bp, Homo sapien
gagtcaagtgttaggttaattgctttatgtgct

SEQ ID NO: 623589 - DNA, 33 bp, Homo sapien
acattcttaagtatcacgttaggttgtgctgtg

SEQ ID NO: 623590 - DNA, 33 bp, Homo sapien
acattcttaagtatcatgttaggttgtgctgtg

SEQ ID NO: 623591 - DNA, 33 bp, Homo sapien
tattgagagacccaaacttacttcttccaacac

SEQ ID NO: 623592 - DNA, 33 bp, Homo sapien
tattgagagacccaaagttacttcttccaacac

SEQ ID NO: 623593 - DNA, 33 bp, Homo sapien
ttgcttatgactctcaaaccgtgaagtaattga

SEQ ID NO: 623594 - DNA, 33 bp, Homo sapien
ttgcttatgactctcataccgtgaagtaattga

SEQ ID NO: 623595 - DNA, 33 bp, Homo sapien
attaactacaatgaccaaagtttattactggcc

SEQ ID NO: 623596 - DNA, 33 bp, Homo sapien
attaactacaatgaccgaagtttattactggcc

SEQ ID NO: 623597 - DNA, 33 bp, Homo sapien
agttcttcattagtataagctgaaataatgggg

SEQ ID NO: 623598 - DNA, 33 bp, Homo sapien
agttcttcattagtattagctgaaataatgggg

SEQ ID NO: 623599 - DNA, 33 bp, Homo sapien
tacgcacttatcgcaaccatttcttgagtatat

SEQ ID NO: 623600 - DNA, 33 bp, Homo sapien
tacgcacttatcgcaagcatttcttgagtatat

SEQ ID NO: 623601 - DNA, 33 bp, Homo sapien
tcctgccaacactccacacttcctgattgccct

SEQ ID NO: 623602 - DNA, 33 bp, Homo sapien
tcctgccaacactccatacttcctgattgccct

SEQ ID NO: 623603 - DNA, 33 bp, Homo sapien
gtaaatctgaaaaatagagagttctctagttga

SEQ ID NO: 623604 - DNA, 33 bp, Homo sapien
gtaaatctgaaaaatatagagttctctagttga

SEQ ID NO: 623605 - DNA, 33 bp, Homo sapien
agaatttcttaccgatcagtctctggcctcttt

SEQ ID NO: 623606 - DNA, 33 bp, Homo sapien
agaatttcttaccgattagtctctggcctcttt

SEQ ID NO: 623607 - DNA, 33 bp, Homo sapien; identical to SEQ ID NO: 623605

SEQ ID NO: 623608 - DNA, 33 bp, Homo sapien; identical to SEQ ID NO: 623606

SEQ ID NO: 623609 - DNA, 33 bp, Homo sapien
tgtgccaagtagcatgaaatctgaggacagatt

SEQ ID NO: 623610 - DNA, 33 bp, Homo sapien
tgtgccaagtagcatggaatctgaggacagatt

SEQ ID NO: 623611 - DNA, 33 bp, Homo sapien
ttagttgaaacaatacacatggcaaagaaatct

SEQ ID NO: 623612 - DNA, 33 bp, Homo sapien
ttagttgaaacaatactcatggcaaagaaatct

SEQ ID NO: 623613 - DNA, 33 bp, Homo sapien
tcatagatgtcaccagaattgatgtacacacct

SEQ ID NO: 623614 - DNA, 33 bp, Homo sapien
tcatagatgtcaccaggattgatgtacacacct

SEQ ID NO: 623615 - DNA, 33 bp, Homo sapien
aactaagtaacaaaaaacggcaattcaatttgt

SEQ ID NO: 623616 - DNA, 33 bp, Homo sapien
aactaagtaacaaaaatcggcaattcaatttgt

SEQ ID NO: 623617 - DNA, 33 bp, Homo sapien
ttctgcatttaagacactccagttttagtgttt

SEQ ID NO: 623618 - DNA, 33 bp, Homo sapien
ttctgcatttaagacattccagttttagtgttt

SEQ ID NO: 623619 - DNA, 33 bp, Homo sapien
ggctcactgagaacaactgagtgtgtagacaag

SEQ ID NO: 623620 - DNA, 33 bp, Homo sapien
ggctcactgagaacaattgagtgtgtagacaag

SEQ ID NO: 623621 - DNA, 33 bp, Homo sapien
tactgggtaggcggcaaaccatggccactatgt

SEQ ID NO: 623622 - DNA, 33 bp, Homo sapien
tactgggtaggcggcagaccatggccactatgt

SEQ ID NO: 623623 - DNA, 33 bp, Homo sapien
tggttctaaaaattcaatatcaaatacgtcctt

SEQ ID NO: 623624 - DNA, 33 bp, Homo sapien
tggttctaaaaattcagtatcaaatacgtcctt

SEQ ID NO: 623625 - DNA, 33 bp, Homo sapien
tatgatcttttctgaccgcttctcttagacatg

SEQ ID NO: 623626 - DNA, 33 bp, Homo sapien
tatgatcttttctgactgcttctcttagacatg

SEQ ID NO: 623627 - DNA, 33 bp, Homo sapien
aacctgcatattcagagtagcaaaagaaaagca

SEQ ID NO: 623628 - DNA, 33 bp, Homo sapien
aacctgcatattcagattagcaaaagaaaagca

SEQ ID NO: 623629 - DNA, 33 bp, Homo sapien
ctgccactattaaagacacaaccaacacctgga

SEQ ID NO: 623630 - DNA, 33 bp, Homo sapien
ctgccactattaaagatacaaccaacacctgga

SEQ ID NO: 623631 - DNA, 33 bp, Homo sapien
tcactgcagagttaacagaagagttttcttctt

SEQ ID NO: 623632 - DNA, 33 bp, Homo sapien
tcactgcagagttaacggaagagttttcttctt

SEQ ID NO: 623633 - DNA, 33 bp, Homo sapien
ctctgtcctcatcctgaaagaaacgacttggga

SEQ ID NO: 623634 - DNA, 33 bp, Homo sapien
ctctgtcctcatcctggaagaaacgacttggga

SEQ ID NO: 623635 - DNA, 33 bp, Homo sapien
cctcatttaaagctcaaaaaacaccataaatca

SEQ ID NO: 623636 - DNA, 33 bp, Homo sapien
cctcatttaaagctcacaaaacaccataaatca

SEQ ID NO: 623637 - DNA, 33 bp, Homo sapien
gtttgcttttgtattcaagtacctgaaacagta

SEQ ID NO: 623638 - DNA, 33 bp, Homo sapien
gtttgcttttgtattcgagtacctgaaacagta

SEQ ID NO: 623639 - DNA, 33 bp, Homo sapien
aggtgtcactgttgtgaatgaacaatctaatat

SEQ ID NO: 623640 - DNA, 33 bp, Homo sapien
aggtgtcactgttgtggatgaacaatctaatat

SEQ ID NO: 623641 - DNA, 33 bp, Homo sapien
cctgtcttgcatgtacagcctgaaatctctact

SEQ ID NO: 623642 - DNA, 33 bp, Homo sapien
cctgtcttgcatgtacggcctgaaatctctact

SEQ ID NO: 623643 - DNA, 33 bp, Homo sapien
atagtaagactgtgttaaaaaaggatgaggatg

SEQ ID NO: 623644 - DNA, 33 bp, Homo sapien
atagtaagactgtgttcaaaaaggatgaggatg

SEQ ID NO: 623645 - DNA, 33 bp, Homo sapien
gaaaacttgccaagaacagcgaatgtaagctcc

SEQ ID NO: 623646 - DNA, 33 bp, Homo sapien
gaaaacttgccaagaagagcgaatgtaagctcc

SEQ ID NO: 623647 - DNA, 33 bp, Homo sapien
cccaaatttgtagctaacctgggctctcttctg

SEQ ID NO: 623648 - DNA, 33 bp, Homo sapien
cccaaatttgtagctagcctgggctctcttctg

SEQ ID NO: 623649 - DNA, 33 bp, Homo sapien
aatataaaattcttcacgttcaacaactaaatg

SEQ ID NO: 623650 - DNA, 33 bp, Homo sapien
aatataaaattcttcatgttcaacaactaaatg

SEQ ID NO: 623651 - DNA, 33 bp, Homo sapien
taggaatttcattgcacaacaaatcattaaaaa

SEQ ID NO: 623652 - DNA, 33 bp, Homo sapien
taggaatttcattgcataacaaatcattaaaaa

SEQ ID NO: 623653 - DNA, 33 bp, Homo sapien
ctgggacattcctaaaacctgtatctgtatcag

SEQ ID NO: 623654 - DNA, 33 bp, Homo sapien
ctgggacattcctaaagcctgtatctgtatcag

SEQ ID NO: 623655 - DNA, 33 bp, Homo sapien
aattcagctgcacaaaataatctatatcacaca

SEQ ID NO: 623656 - DNA, 33 bp, Homo sapien
aattcagctgcacaaagtaatctatatcacaca

SEQ ID NO: 623657 - DNA, 33 bp, Homo sapien
gttcttagatctgtgacgacattttgaatggga

SEQ ID NO: 623658 - DNA, 33 bp, Homo sapien
gttcttagatctgtgatgacattttgaatggga

SEQ ID NO: 623659 - DNA, 33 bp, Homo sapien
aacaagcaaattgacaaactatgaactaattct

SEQ ID NO: 623660 - DNA, 33 bp, Homo sapien
aacaagcaaattgacagactatgaactaattct

SEQ ID NO: 623661 - DNA, 33 bp, Homo sapien
agagtgcatcatgaacagattgaaatatttgca

SEQ ID NO: 623662 - DNA, 33 bp, Homo sapien
agagtgcatcatgaaccgattgaaatatttgca

SEQ ID NO: 623663 - DNA, 33 bp, Homo sapien
ctttagcatgtattatgactctgattcagttgc

SEQ ID NO: 623664 - DNA, 33 bp, Homo sapien
ctttagcatgtattattactctgattcagttgc

SEQ ID NO: 623665 - DNA, 33 bp, Homo sapien
gaaaagagactggaagcctggacaagcccacta

SEQ ID NO: 623666 - DNA, 33 bp, Homo sapien
gaaaagagactggaaggctggacaagcccacta

SEQ ID NO: 623667 - DNA, 33 bp, Homo sapien
taaatgggtataagagacattaacacagataca

SEQ ID NO: 623668 - DNA, 33 bp, Homo sapien
taaatgggtataagagtcattaacacagataca

SEQ ID NO: 623669 - DNA, 33 bp, Homo sapien
gatgtgcaggaagaaacgacatcaatttggaat

SEQ ID NO: 623670 - DNA, 33 bp, Homo sapien
gatgtgcaggaagaaatgacatcaatttggaat

SEQ ID NO: 623671 - DNA, 33 bp, Homo sapien
tgtaaagtaagtgcagaaaaccatagatagtgt

SEQ ID NO: 623672 - DNA, 33 bp, Homo sapien
tgtaaagtaagtgcaggaaaccatagatagtgt

SEQ ID NO: 623673 - DNA, 33 bp, Homo sapien
tagcactctgtataacaagaccaccttcactag

SEQ ID NO: 623674 - DNA, 33 bp, Homo sapien
tagcactctgtataacgagaccaccttcactag

SEQ ID NO: 623675 - DNA, 33 bp, Homo sapien
ttagaatcaagcaaccccagattaatatctcac

SEQ ID NO: 623676 - DNA, 33 bp, Homo sapien
ttagaatcaagcaaccgcagattaatatctcac

SEQ ID NO: 623677 - DNA, 33 bp, Homo sapien
tatcttccttagtgaaatggctgctcaaatttt

SEQ ID NO: 623678 - DNA, 33 bp, Homo sapien
tatcttccttagtgaagtggctgctcaaatttt

SEQ ID NO: 623679 - DNA, 33 bp, Homo sapien
tccataaaaacacagagagttgagaggtattct

SEQ ID NO: 623680 - DNA, 33 bp, Homo sapien
tccataaaaacacagatagttgagaggtattct

SEQ ID NO: 623681 - DNA, 33 bp, Homo sapien
aagactaaggttaataaagtagagttcatttta

SEQ ID NO: 623682 - DNA, 33 bp, Homo sapien
aagactaaggttaatacagtagagttcatttta

SEQ ID NO: 623683 - DNA, 33 bp, Homo sapien
tttttctcagtcaacagattggcctcatgttag

SEQ ID NO: 623684 - DNA, 33 bp, Homo sapien
tttttctcagtcaacatattggcctcatgttag

SEQ ID NO: 623685 - DNA, 33 bp, Homo sapien
tgataactcttaaatcagattggagacaaaggt

SEQ ID NO: 623686 - DNA, 33 bp, Homo sapien
tgataactcttaaatcggattggagacaaaggt

SEQ ID NO: 623687 - DNA, 33 bp, Homo sapien
ttaataatctgatgcacagtcttaatcaaaatg

SEQ ID NO: 623688 - DNA, 33 bp, Homo sapien
ttaataatctgatgcatagtcttaatcaaaatg

SEQ ID NO: 623689 - DNA, 33 bp, Homo sapien
gaaaaaataaaagggaacgcacataacataatg

SEQ ID NO: 623690 - DNA, 33 bp, Homo sapien
gaaaaaataaaagggaccgcacataacataatg

SEQ ID NO: 623691 - DNA, 33 bp, Homo sapien
ctcagtgcaaaataccaccaaaggctgccacag

SEQ ID NO: 623692 - DNA, 33 bp, Homo sapien
ctcagtgcaaaataccgccaaaggctgccacag

SEQ ID NO: 623693 - DNA, 33 bp, Homo sapien
aagttcatggaaaaagaaaactgagaataatca

SEQ ID NO: 623694 - DNA, 33 bp, Homo sapien
aagttcatggaaaaaggaaactgagaataatca

SEQ ID NO: 623695 - DNA, 33 bp, Homo sapien
tagactgttgacaacccacttgcttcatgaatg

SEQ ID NO: 623696 - DNA, 33 bp, Homo sapien
tagactgttgacaacctacttgcttcatgaatg

SEQ ID NO: 623697 - DNA, 33 bp, Homo sapien
ctcactggcttcatggcagaactagactgttct

SEQ ID NO: 623698 - DNA, 33 bp, Homo sapien
ctcactggcttcatgggagaactagactgttct

SEQ ID NO: 623699 - DNA, 33 bp, Homo sapien
gaggcattagagaaaaaagtaccagccatggct

SEQ ID NO: 623700 - DNA, 33 bp, Homo sapien
gaggcattagagaaaagagtaccagccatggct

SEQ ID NO: 623701 - DNA, 33 bp, Homo sapien
tatgagttccctcttacccacatcctcatctgt

SEQ ID NO: 623702 - DNA, 33 bp, Homo sapien
tatgagttccctcttatccacatcctcatctgt

SEQ ID NO: 623703 - DNA, 33 bp, Homo sapien
tatatgtggagttagcagaaaagagacagctat

SEQ ID NO: 623704 - DNA, 33 bp, Homo sapien
tatatgtggagttagcggaaaagagacagctat

SEQ ID NO: 623705 - DNA, 33 bp, Homo sapien
gttttggccatcccagaatattcctgaacttcc

SEQ ID NO: 623706 - DNA, 33 bp, Homo sapien
gttttggccatcccaggatattcctgaacttcc

SEQ ID NO: 623707 - DNA, 33 bp, Homo sapien
aaacatttaattatcacgtcaaatatagcatat

SEQ ID NO: 623708 - DNA, 33 bp, Homo sapien
aaacatttaattatcatgtcaaatatagcatat

SEQ ID NO: 623709 - DNA, 33 bp, Homo sapien
actccttatctgagaccatgttcagaaatcaaa

SEQ ID NO: 623710 - DNA, 33 bp, Homo sapien
actccttatctgagactatgttcagaaatcaaa

SEQ ID NO: 623711 - DNA, 33 bp, Homo sapien
agaatttagtattggacgatttaaatgtatact

SEQ ID NO: 623712 - DNA, 33 bp, Homo sapien
agaatttagtattggatgatttaaatgtatact

SEQ ID NO: 623713 - DNA, 33 bp, Homo sapien
gtattcaagtgataaaattccaatgtattcaga

SEQ ID NO: 623714 - DNA, 33 bp, Homo sapien
gtattcaagtgataaagttccaatgtattcaga

SEQ ID NO: 623715 - DNA, 33 bp, Homo sapien
aactttgacggacagaataaagagggtatgaaa

SEQ ID NO: 623716 - DNA, 33 bp, Homo sapien
aactttgacggacagagtaaagagggtatgaaa

SEQ ID NO: 623717 - DNA, 33 bp, Homo sapien
tgtgaacaacctcaccaatggaaactgacactt

SEQ ID NO: 623718 - DNA, 33 bp, Homo sapien
tgtgaacaacctcaccgatggaaactgacactt

SEQ ID NO: 623719 - DNA, 33 bp, Homo sapien
ctaaaggaaatcagaaaactaggaaaagcaacc

SEQ ID NO: 623720 - DNA, 33 bp, Homo sapien
ctaaaggaaatcagaagactaggaaaagcaacc

SEQ ID NO: 623721 - DNA, 33 bp, Homo sapien
accaagctaccaaggcaagacgcaatcaatggc

SEQ ID NO: 623722 - DNA, 33 bp, Homo sapien
accaagctaccaaggccagacgcaatcaatggc

SEQ ID NO: 623723 - DNA, 33 bp, Homo sapien
agatttaaaggtcaagacatttgaacacttcag

SEQ ID NO: 623724 - DNA, 33 bp, Homo sapien
agatttaaaggtcaaggcatttgaacacttcag

SEQ ID NO: 623725 - DNA, 33 bp, Homo sapien
ctccagaagttcccaaaagagtcagcgtcaggc

SEQ ID NO: 623726 - DNA, 33 bp, Homo sapien
ctccagaagttcccaagagagtcagcgtcaggc

SEQ ID NO: 623727 - DNA, 33 bp, Homo sapien
aaggaagaagatgaccaagaagaagagataaag

SEQ ID NO: 623728 - DNA, 33 bp, Homo sapien
aaggaagaagatgaccgagaagaagagataaag

SEQ ID NO: 623729 - DNA, 33 bp, Homo sapien
ttgtttcagttttcaacgagagtgttttcatgc

SEQ ID NO: 623730 - DNA, 33 bp, Homo sapien
ttgtttcagttttcaatgagagtgttttcatgc

SEQ ID NO: 623731 - DNA, 33 bp, Homo sapien
agggatttgagtgggacgaagggaaggttaagc

SEQ ID NO: 623732 - DNA, 33 bp, Homo sapien
agggatttgagtgggaggaagggaaggttaagc

SEQ ID NO: 623733 - DNA, 33 bp, Homo sapien
gtcttgaaggaataataaaagacatacatctag

SEQ ID NO: 623734 - DNA, 33 bp, Homo sapien
gtcttgaaggaataattaaagacatacatctag

SEQ ID NO: 623735 - DNA, 33 bp, Homo sapien
tcgcagcaataagcagcacaaatgtcaacacaa

SEQ ID NO: 623736 - DNA, 33 bp, Homo sapien
tcgcagcaataagcaggacaaatgtcaacacaa

SEQ ID NO: 623737 - DNA, 33 bp, Homo sapien
ctgtgaaatacaattcgctttgacattaacttg

SEQ ID NO: 623738 - DNA, 33 bp, Homo sapien
ctgtgaaatacaattctctttgacattaacttg

SEQ ID NO: 623739 - DNA, 33 bp, Homo sapien
caggattacgtgacccaagggcagatgacctga

SEQ ID NO: 623740 - DNA, 33 bp, Homo sapien
caggattacgtgacccgagggcagatgacctga

SEQ ID NO: 623741 - DNA, 33 bp, Homo sapien
cacggtagatacttcacgtgctcaacaaattat

SEQ ID NO: 623742 - DNA, 33 bp, Homo sapien
cacggtagatacttcatgtgctcaacaaattat

SEQ ID NO: 623743 - DNA, 33 bp, Homo sapien
taacaacagagtggaaagttttcaggtagcagt

SEQ ID NO: 623744 - DNA, 33 bp, Homo sapien
taacaacagagtggaacgttttcaggtagcagt

SEQ ID NO: 623745 - DNA, 33 bp, Homo sapien
atgcttaatctcagaagggtttcctcttgtttc

SEQ ID NO: 623746 - DNA, 33 bp, Homo sapien
atgcttaatctcagaatggtttcctcttgtttc

SEQ ID NO: 623747 - DNA, 33 bp, Homo sapien
tctaaaatacacagaaagacaaaggacagaaag

SEQ ID NO: 623748 - DNA, 33 bp, Homo sapien
tctaaaatacacagaaggacaaaggacagaaag

SEQ ID NO: 623749 - DNA, 33 bp, Homo sapien
tgtcacttggtagttaaatgaatgcatactctg

SEQ ID NO: 623750 - DNA, 33 bp, Homo sapien
tgtcacttggtagttagatgaatgcatactctg

SEQ ID NO: 623751 - DNA, 33 bp, Homo sapien
cagcttgccacttagggataacatatgccagaa

SEQ ID NO: 623752 - DNA, 33 bp, Homo sapien
cagcttgccacttaggtataacatatgccagaa

SEQ ID NO: 623753 - DNA, 33 bp, Homo sapien
atcattcagccagataagtaattatttggaatc

SEQ ID NO: 623754 - DNA, 33 bp, Homo sapien
atcattcagccagataggtaattatttggaatc

SEQ ID NO: 623755 - DNA, 33 bp, Homo sapien
cgagttaatatcagcaacatgagatcccagact

SEQ ID NO: 623756 - DNA, 33 bp, Homo sapien
cgagttaatatcagcatcatgagatcccagact

SEQ ID NO: 623757 - DNA, 33 bp, Homo sapien
tagtatctaacatttacagcactttcacagttt

SEQ ID NO: 623758 - DNA, 33 bp, Homo sapien
tagtatctaacatttatagcactttcacagttt

SEQ ID NO: 623759 - DNA, 33 bp, Homo sapien
ctgggataactccccaaatcaagatgcttctct

SEQ ID NO: 623760 - DNA, 33 bp, Homo sapien
ctgggataactccccacatcaagatgcttctct

SEQ ID NO: 623761 - DNA, 33 bp, Homo sapien
ggctccatgatgcagacgctggaaggtggaagt

SEQ ID NO: 623762 - DNA, 33 bp, Homo sapien
ggctccatgatgcagatgctggaaggtggaagt

SEQ ID NO: 623763 - DNA, 33 bp, Homo sapien
gcaatatcatggagcaactgaatacaagttttg

SEQ ID NO: 623764 - DNA, 33 bp, Homo sapien
gcaatatcatggagcacctgaatacaagttttg

SEQ ID NO: 623765 - DNA, 33 bp, Homo sapien
aggagcaaacattggtaacaacccaagagtaat

SEQ ID NO: 623766 - DNA, 33 bp, Homo sapien
aggagcaaacattggtgacaacccaagagtaat

SEQ ID NO: 623767 - DNA, 33 bp, Homo sapien
caccagtcctgggtcaatcactgagctctgcac

SEQ ID NO: 623768 - DNA, 33 bp, Homo sapien
caccagtcctgggtcactcactgagctctgcac

SEQ ID NO: 623769 - DNA, 33 bp, Homo sapien
tgtctccacacctaagaaatgggaggaggcagg

SEQ ID NO: 623770 - DNA, 33 bp, Homo sapien
tgtctccacacctaaggaatgggaggaggcagg

SEQ ID NO: 623771 - DNA, 33 bp, Homo sapien
atgatcctgattctcacgagccagttgattgca

SEQ ID NO: 623772 - DNA, 33 bp, Homo sapien
atgatcctgattctcatgagccagttgattgca

SEQ ID NO: 623773 - DNA, 33 bp, Homo sapien
cccttacgaagggagcaatgaagcagctagaac

SEQ ID NO: 623774 - DNA, 33 bp, Homo sapien
cccttacgaagggagccatgaagcagctagaac

SEQ ID NO: 623775 - DNA, 33 bp, Homo sapien
cttacgcttaccttaccgatttttccagggttt

SEQ ID NO: 623776 - DNA, 33 bp, Homo sapien
cttacgcttaccttactgatttttccagggttt

SEQ ID NO: 623777 - DNA, 33 bp, Homo sapien
tttgggtgctttgacacgggcggttttctgcac

SEQ ID NO: 623778 - DNA, 33 bp, Homo sapien
tttgggtgctttgacatgggcggttttctgcac

SEQ ID NO: 623779 - DNA, 33 bp, Homo sapien
agaaaagaccatgtgacgatgcaacaagaaggt

SEQ ID NO: 623780 - DNA, 33 bp, Homo sapien
agaaaagaccatgtgaggatgcaacaagaaggt

SEQ ID NO: 623781 - DNA, 33 bp, Homo sapien
tgtcctcctaaaaatcaactgttggagccctaa

SEQ ID NO: 623782 - DNA, 33 bp, Homo sapien
tgtcctcctaaaaatccactgttggagccctaa

SEQ ID NO: 623783 - DNA, 33 bp, Homo sapien
agatttttctctcctcaaagacagaagaggaag

SEQ ID NO: 623784 - DNA, 33 bp, Homo sapien
agatttttctctcctcgaagacagaagaggaag

SEQ ID NO: 623785 - DNA, 33 bp, Homo sapien
gacagctaaagactgaagattaaattagacaac

SEQ ID NO: 623786 - DNA, 33 bp, Homo sapien
gacagctaaagactgatgattaaattagacaac

SEQ ID NO: 623787 - DNA, 33 bp, Homo sapien
agcagaggcattttgacgttgagccataaaaaa

SEQ ID NO: 623788 - DNA, 33 bp, Homo sapien
agcagaggcattttgaggttgagccataaaaaa

SEQ ID NO: 623789 - DNA, 33 bp, Homo sapien
agctctatatcttcacaaattttcccattccat

SEQ ID NO: 623790 - DNA, 33 bp, Homo sapien
agctctatatcttcacgaattttcccattccat

SEQ ID NO: 623791 - DNA, 33 bp, Homo sapien
gtagaattattcaataagaaagagatgaactat

SEQ ID NO: 623792 - DNA, 33 bp, Homo sapien
gtagaattattcaataggaaagagatgaactat

SEQ ID NO: 623793 - DNA, 33 bp, Homo sapien
ggaatactgattcacactgaagtattggtgact

SEQ ID NO: 623794 - DNA, 33 bp, Homo sapien
ggaatactgattcacattgaagtattggtgact

SEQ ID NO: 623795 - DNA, 33 bp, Homo sapien
ggctcagcctagagaaacggatatgactaggtc

SEQ ID NO: 623796 - DNA, 33 bp, Homo sapien
ggctcagcctagagaagcggatatgactaggtc

SEQ ID NO: 623797 - DNA, 33 bp, Homo sapien
tgatgccttttgggtacgtagttgatgtgaaac

SEQ ID NO: 623798 - DNA, 33 bp, Homo sapien
tgatgccttttgggtatgtagttgatgtgaaac

SEQ ID NO: 623799 - DNA, 33 bp, Homo sapien
agtcatggcacttccaaagggataaagcagcac

SEQ ID NO: 623800 - DNA, 33 bp, Homo sapien
agtcatggcacttccagagggataaagcagcac

SEQ ID NO: 623801 - DNA, 33 bp, Homo sapien
ggcctcaagacatgcaaggctcatgtgacacgt

SEQ ID NO: 623802 - DNA, 33 bp, Homo sapien
ggcctcaagacatgcagggctcatgtgacacgt

SEQ ID NO: 623803 - DNA, 33 bp, Homo sapien
gatctatgtagagaacaagagtctaccagcctc

SEQ ID NO: 623804 - DNA, 33 bp, Homo sapien
gatctatgtagagaaccagagtctaccagcctc

SEQ ID NO: 623805 - DNA, 33 bp, Homo sapien
tcagagcaaatctttaccccaacttcttcacaa

SEQ ID NO: 623806 - DNA, 33 bp, Homo sapien
tcagagcaaatctttatcccaacttcttcacaa

SEQ ID NO: 623807 - DNA, 33 bp, Homo sapien
tgccacataatccaaacactactcaaggtaggg

SEQ ID NO: 623808 - DNA, 33 bp, Homo sapien
tgccacataatccaaagactactcaaggtaggg

SEQ ID NO: 623809 - DNA, 33 bp, Homo sapien
aaaacagaagacagaacgagcaagtggagaagc

SEQ ID NO: 623810 - DNA, 33 bp, Homo sapien
aaaacagaagacagaatgagcaagtggagaagc

SEQ ID NO: 623811 - DNA, 33 bp, Homo sapien
aaggatccatgccacacgagagtctagtcttgt

SEQ ID NO: 623812 - DNA, 33 bp, Homo sapien
aaggatccatgccacatgagagtctagtcttgt

SEQ ID NO: 623813 - DNA, 33 bp, Homo sapien
ctgcctttctgagtgaaaacctgctctagcaca

SEQ ID NO: 623814 - DNA, 33 bp, Homo sapien
ctgcctttctgagtgagaacctgctctagcaca

SEQ ID NO: 623815 - DNA, 33 bp, Homo sapien
gctcaagtggaatcaggccttctcttattatta

SEQ ID NO: 623816 - DNA, 33 bp, Homo sapien
gctcaagtggaatcagtccttctcttattatta

SEQ ID NO: 623817 - DNA, 33 bp, Homo sapien
ttcatatcatttagaactctgttgttgtgacct

SEQ ID NO: 623818 - DNA, 33 bp, Homo sapien
ttcatatcatttagaattctgttgttgtgacct

SEQ ID NO: 623819 - DNA, 33 bp, Homo sapien
tcttgtctgagatgacactccttaatttgagct

SEQ ID NO: 623820 - DNA, 33 bp, Homo sapien
tcttgtctgagatgacgctccttaatttgagct

SEQ ID NO: 623821 - DNA, 33 bp, Homo sapien
attaaacacagagaaaattagaaagtctacagc

SEQ ID NO: 623822 - DNA, 33 bp, Homo sapien
attaaacacagagaaagttagaaagtctacagc

SEQ ID NO: 623823 - DNA, 33 bp, Homo sapien
cctcatcaattccaacggatgcaacaaaattag

SEQ ID NO: 623824 - DNA, 33 bp, Homo sapien
cctcatcaattccaactgatgcaacaaaattag

SEQ ID NO: 623825 - DNA, 33 bp, Homo sapien
aacttcaagtacttgccgattcctaatgtccca

SEQ ID NO: 623826 - DNA, 33 bp, Homo sapien
aacttcaagtacttgctgattcctaatgtccca

SEQ ID NO: 623827 - DNA, 33 bp, Homo sapien
ctaatgaagcttaagcaccgtgactcctcgtct

SEQ ID NO: 623828 - DNA, 33 bp, Homo sapien
ctaatgaagcttaagcgccgtgactcctcgtct

SEQ ID NO: 623829 - DNA, 33 bp, Homo sapien
atgtcctttccttaaaacaagaaggtctgacat

SEQ ID NO: 623830 - DNA, 33 bp, Homo sapien
atgtcctttccttaaagcaagaaggtctgacat

SEQ ID NO: 623831 - DNA, 33 bp, Homo sapien
gagacttccagtataacgggaggcatcttacct

SEQ ID NO: 623832 - DNA, 33 bp, Homo sapien
gagacttccagtataatgggaggcatcttacct

SEQ ID NO: 623833 - DNA, 33 bp, Homo sapien
taaacacaagtggatgcatttaacaagtgaata

SEQ ID NO: 623834 - DNA, 33 bp, Homo sapien
taaacacaagtggatgtatttaacaagtgaata

SEQ ID NO: 623835 - DNA, 33 bp, Homo sapien
gcttaacacctaaatacactgcattactcgtgt

SEQ ID NO: 623836 - DNA, 33 bp, Homo sapien
gcttaacacctaaatatactgcattactcgtgt

SEQ ID NO: 623837 - DNA, 33 bp, Homo sapien
tgagggtaagtgtataagttgggcatgtgttgg

SEQ ID NO: 623838 - DNA, 33 bp, Homo sapien
tgagggtaagtgtatatgttgggcatgtgttgg

SEQ ID NO: 623839 - DNA, 33 bp, Homo sapien
atatcctgcacgtgtaccgagaacttacaataa

SEQ ID NO: 623840 - DNA, 33 bp, Homo sapien
atatcctgcacgtgtatcgagaacttacaataa

SEQ ID NO: 623841 - DNA, 33 bp, Homo sapien
ttgtaacatgtacttacgatgcagcaaaaaatc

SEQ ID NO: 623842 - DNA, 33 bp, Homo sapien
ttgtaacatgtacttatgatgcagcaaaaaatc

SEQ ID NO: 623843 - DNA, 33 bp, Homo sapien
caccgcactggtatgacaatgggtactattatc

SEQ ID NO: 623844 - DNA, 33 bp, Homo sapien
caccgcactggtatgataatgggtactattatc

SEQ ID NO: 623845 - DNA, 33 bp, Homo sapien
ttaaaattatcttagacgtcctggagatttctg

SEQ ID NO: 623846 - DNA, 33 bp, Homo sapien
ttaaaattatcttagatgtcctggagatttctg

SEQ ID NO: 623847 - DNA, 33 bp, Homo sapien
agatgataaagatcaacatagcttctgtctaga

SEQ ID NO: 623848 - DNA, 33 bp, Homo sapien
agatgataaagatcaatatagcttctgtctaga

SEQ ID NO: 623849 - DNA, 33 bp, Homo sapien
gcgtggcacttacaaaggaggattccagtcgtt

SEQ ID NO: 623850 - DNA, 33 bp, Homo sapien
gcgtggcacttacaaatgaggattccagtcgtt

SEQ ID NO: 623851 - DNA, 33 bp, Homo sapien
aggacagtacacagaaagactggcactgagatc

SEQ ID NO: 623852 - DNA, 33 bp, Homo sapien
aggacagtacacagaaggactggcactgagatc

SEQ ID NO: 623853 - DNA, 33 bp, Homo sapien
acagtgttacctcccaaatttacaagtgaagta

SEQ ID NO: 623854 - DNA, 33 bp, Homo sapien
acagtgttacctcccatatttacaagtgaagta

SEQ ID NO: 623855 - DNA, 33 bp, Homo sapien
taatacaaaatgcttacgggaaagaggataata

SEQ ID NO: 623856 - DNA, 33 bp, Homo sapien
taatacaaaatgcttatgggaaagaggataata

SEQ ID NO: 623857 - DNA, 33 bp, Homo sapien
tgcaaggcaatgggtcaaggagttaggtgttcg

SEQ ID NO: 623858 - DNA, 33 bp, Homo sapien
tgcaaggcaatgggtcgaggagttaggtgttcg

SEQ ID NO: 623859 - DNA, 33 bp, Homo sapien
tagcaaaattggaaagacatatctagcaaacaa

SEQ ID NO: 623860 - DNA, 33 bp, Homo sapien
tagcaaaattggaaaggcatatctagcaaacaa

SEQ ID NO: 623861 - DNA, 33 bp, Homo sapien
aatctgatgaaaaatacggataatctccttgaa

SEQ ID NO: 623862 - DNA, 33 bp, Homo sapien
aatctgatgaaaaatatggataatctccttgaa

SEQ ID NO: 623863 - DNA, 33 bp, Homo sapien
tttagagtctcagaaaagttttctcgttggttt

SEQ ID NO: 623864 - DNA, 33 bp, Homo sapien
tttagagtctcagaaaggttttctcgttggttt

SEQ ID NO: 623865 - DNA, 33 bp, Homo sapien
gtgctgaagttttgctaagagtttgtgcttctt

SEQ ID NO: 623866 - DNA, 33 bp, Homo sapien
gtgctgaagttttgctgagagtttgtgcttctt

SEQ ID NO: 623867 - DNA, 33 bp, Homo sapien
gggttactgtgaaaagcaggctgtgtagttatt

SEQ ID NO: 623868 - DNA, 33 bp, Homo sapien
gggttactgtgaaaagtaggctgtgtagttatt

SEQ ID NO: 623869 - DNA, 33 bp, Homo sapien
atttattattaggataacaggtgtcagcaccca

SEQ ID NO: 623870 - DNA, 33 bp, Homo sapien
atttattattaggataccaggtgtcagcaccca

SEQ ID NO: 623871 - DNA, 33 bp, Homo sapien
atcattagactggtaactaatgggcccatagca

SEQ ID NO: 623872 - DNA, 33 bp, Homo sapien
atcattagactggtaattaatgggcccatagca

SEQ ID NO: 623873 - DNA, 33 bp, Homo sapien
caagcatctgtattacccatgccttctatttct

SEQ ID NO: 623874 - DNA, 33 bp, Homo sapien
caagcatctgtattactcatgccttctatttct

SEQ ID NO: 623875 - DNA, 33 bp, Homo sapien
cctgagttcaaacagaaaatgacacccagataa

SEQ ID NO: 623876 - DNA, 33 bp, Homo sapien
cctgagttcaaacagataatgacacccagataa

SEQ ID NO: 623877 - DNA, 33 bp, Homo sapien
gatcccatgattcacaacacaaatataaaagca

SEQ ID NO: 623878 - DNA, 33 bp, Homo sapien
gatcccatgattcacagcacaaatataaaagca

SEQ ID NO: 623879 - DNA, 33 bp, Homo sapien
ctttaccatttcctcaaaagactcacagaagaa

SEQ ID NO: 623880 - DNA, 33 bp, Homo sapien
ctttaccatttcctcagaagactcacagaagaa

SEQ ID NO: 623881 - DNA, 33 bp, Homo sapien
tgtattgccaatgagacagagttaacaagcagt

SEQ ID NO: 623882 - DNA, 33 bp, Homo sapien
tgtattgccaatgagagagagttaacaagcagt

SEQ ID NO: 623883 - DNA, 33 bp, Homo sapien
aaaatttgaatgatcaaagtaaaaaagatgata

SEQ ID NO: 623884 - DNA, 33 bp, Homo sapien
aaaatttgaatgatcagagtaaaaaagatgata

SEQ ID NO: 623885 - DNA, 33 bp, Homo sapien
ttcagaacacgtaaaagattagtctatggaaga

SEQ ID NO: 623886 - DNA, 33 bp, Homo sapien
ttcagaacacgtaaaatattagtctatggaaga

SEQ ID NO: 623887 - DNA, 33 bp, Homo sapien
tctctcttagtcatgcacagttttatttgcttc

SEQ ID NO: 623888 - DNA, 33 bp, Homo sapien
tctctcttagtcatgcgcagttttatttgcttc

SEQ ID NO: 623889 - DNA, 33 bp, Homo sapien
ctctacctaactcgtaccctctttctggtacaa

SEQ ID NO: 623890 - DNA, 33 bp, Homo sapien
ctctacctaactcgtatcctctttctggtacaa

SEQ ID NO: 623891 - DNA, 33 bp, Homo sapien
gaggtttgttagcaaacagtggcctgattatga

SEQ ID NO: 623892 - DNA, 33 bp, Homo sapien
gaggtttgttagcaaatagtggcctgattatga

SEQ ID NO: 623893 - DNA, 33 bp, Homo sapien
tcaggatgcttcatgagtacatattttagtgag

SEQ ID NO: 623894 - DNA, 33 bp, Homo sapien
tcaggatgcttcatgattacatattttagtgag

SEQ ID NO: 623895 - DNA, 33 bp, Homo sapien
aagaattccgatcacaaaagtatctaacaagga

SEQ ID NO: 623896 - DNA, 33 bp, Homo sapien
aagaattccgatcacagaagtatctaacaagga

SEQ ID NO: 623897 - DNA, 33 bp, Homo sapien
caacaaccttacgaaaaaaagctcatcatcact

SEQ ID NO: 623898 - DNA, 33 bp, Homo sapien
caacaaccttacgaaagaaagctcatcatcact

SEQ ID NO: 623899 - DNA, 33 bp, Homo sapien
atataggccaatggaacagaacggatgcctcag

SEQ ID NO: 623900 - DNA, 33 bp, Homo sapien
atataggccaatggaatagaacggatgcctcag

SEQ ID NO: 623901 - DNA, 33 bp, Homo sapien
ttttgttatttggctacgaggacagcccttttc

SEQ ID NO: 623902 - DNA, 33 bp, Homo sapien
ttttgttatttggctatgaggacagcccttttc

SEQ ID NO: 623903 - DNA, 33 bp, Homo sapien
aaagtatacaggatgacatgtgtgggttgcaca

SEQ ID NO: 623904 - DNA, 33 bp, Homo sapien
aaagtatacaggatgatatgtgtgggttgcaca

SEQ ID NO: 623905 - DNA, 33 bp, Homo sapien
cctgaaaagagagcccaggacaatatacgaagc

SEQ ID NO: 623906 - DNA, 33 bp, Homo sapien
cctgaaaagagagcccgggacaatatacgaagc

SEQ ID NO: 623907 - DNA, 33 bp, Homo sapien
agctctgattctcctacgtattaggtgacttga

SEQ ID NO: 623908 - DNA, 33 bp, Homo sapien
agctctgattctcctatgtattaggtgacttga

SEQ ID NO: 623909 - DNA, 33 bp, Homo sapien
cagagctacccagccaaactcaatctacgttaa

SEQ ID NO: 623910 - DNA, 33 bp, Homo sapien
cagagctacccagccacactcaatctacgttaa

SEQ ID NO: 623911 - DNA, 33 bp, Homo sapien
acttacaagtgtcatcagaagaaaaattctcat

SEQ ID NO: 623912 - DNA, 33 bp, Homo sapien
acttacaagtgtcatcggaagaaaaattctcat

SEQ ID NO: 623913 - DNA, 33 bp, Homo sapien
ggttgctttaccaagccgcttaggggaagaaaa

SEQ ID NO: 623914 - DNA, 33 bp, Homo sapien
ggttgctttaccaagctgcttaggggaagaaaa

SEQ ID NO: 623915 - DNA, 33 bp, Homo sapien
attacaaaagttcaaacgccaggaaaaatgggt

SEQ ID NO: 623916 - DNA, 33 bp, Homo sapien
attacaaaagttcaaatgccaggaaaaatgggt

SEQ ID NO: 623917 - DNA, 33 bp, Homo sapien
tgattaaacactgaagaatttagtatgagtatg

SEQ ID NO: 623918 - DNA, 33 bp, Homo sapien
tgattaaacactgaaggatttagtatgagtatg

SEQ ID NO: 623919 - DNA, 33 bp, Homo sapien
ttttcctccagaatgacccctataccaccagct

SEQ ID NO: 623920 - DNA, 33 bp, Homo sapien
ttttcctccagaatgatccctataccaccagct

SEQ ID NO: 623921 - DNA, 33 bp, Homo sapien
taggtgtttggaataacaacatttacaagagaa

SEQ ID NO: 623922 - DNA, 33 bp, Homo sapien
taggtgtttggaataataacatttacaagagaa

SEQ ID NO: 623923 - DNA, 33 bp, Homo sapien
aggaaatgttcttgatcacccactaggtgccag

SEQ ID NO: 623924 - DNA, 33 bp, Homo sapien
aggaaatgttcttgattacccactaggtgccag

SEQ ID NO: 623925 - DNA, 33 bp, Homo sapien
gtcaaaggtgaataaaccttggaatggatttag

SEQ ID NO: 623926 - DNA, 33 bp, Homo sapien
gtcaaaggtgaataaatcttggaatggatttag

SEQ ID NO: 623927 - DNA, 33 bp, Homo sapien
ggacactgaaaatcaagatgccttcattggtaa

SEQ ID NO: 623928 - DNA, 33 bp, Homo sapien
ggacactgaaaatcaatatgccttcattggtaa

SEQ ID NO: 623929 - DNA, 33 bp, Homo sapien
ttgctggattccacccaaagagattctgattca

SEQ ID NO: 623930 - DNA, 33 bp, Homo sapien
ttgctggattccacccgaagagattctgattca

SEQ ID NO: 623931 - DNA, 33 bp, Homo sapien
acccttttcaccaatgacatcatcaaggatatc

SEQ ID NO: 623932 - DNA, 33 bp, Homo sapien
acccttttcaccaatggcatcatcaaggatatc

SEQ ID NO: 623933 - DNA, 33 bp, Homo sapien
ctcagaatctcattcaatataaaatgcaaggga

SEQ ID NO: 623934 - DNA, 33 bp, Homo sapien
ctcagaatctcattcagtataaaatgcaaggga

SEQ ID NO: 623935 - DNA, 33 bp, Homo sapien
ataaagatccatgatgaacattgacatttggga

SEQ ID NO: 623936 - DNA, 33 bp, Homo sapien
ataaagatccatgatggacattgacatttggga

SEQ ID NO: 623937 - DNA, 33 bp, Homo sapien
aggcctggaagtcagggcacatgtcttacggac

SEQ ID NO: 623938 - DNA, 33 bp, Homo sapien
aggcctggaagtcaggtcacatgtcttacggac

SEQ ID NO: 623939 - DNA, 33 bp, Homo sapien
cctttgccctttgttcacctgctactgcacgtt

SEQ ID NO: 623940 - DNA, 33 bp, Homo sapien
cctttgccctttgttctcctgctactgcacgtt

SEQ ID NO: 623941 - DNA, 33 bp, Homo sapien
aaccagcttgaccataatatgagtgattgggta

SEQ ID NO: 623942 - DNA, 33 bp, Homo sapien
aaccagcttgaccatagtatgagtgattgggta

SEQ ID NO: 623943 - DNA, 33 bp, Homo sapien
ctctgatgtgcagttacaaattcagagagggca

SEQ ID NO: 623944 - DNA, 33 bp, Homo sapien
ctctgatgtgcagttataaattcagagagggca

SEQ ID NO: 623945 - DNA, 33 bp, Homo sapien
ctgttgacacttaaaccatatgtggacagcaga

SEQ ID NO: 623946 - DNA, 33 bp, Homo sapien
ctgttgacacttaaactatatgtggacagcaga

SEQ ID NO: 623947 - DNA, 33 bp, Homo sapien
ctgtaaatggttcataccacttaagtacttttt

SEQ ID NO: 623948 - DNA, 33 bp, Homo sapien
ctgtaaatggttcatatcacttaagtacttttt

SEQ ID NO: 623949 - DNA, 33 bp, Homo sapien
ccacagtcttgctttcaatgaacttataatgtt

SEQ ID NO: 623950 - DNA, 33 bp, Homo sapien
ccacagtcttgctttcgatgaacttataatgtt

SEQ ID NO: 623951 - DNA, 33 bp, Homo sapien
atactctctagttttacggtaacctgaagcctg

SEQ ID NO: 623952 - DNA, 33 bp, Homo sapien
atactctctagttttatggtaacctgaagcctg

SEQ ID NO: 623953 - DNA, 33 bp, Homo sapien
gaattgctaaaaaggaagaacatattgaagaca

SEQ ID NO: 623954 - DNA, 33 bp, Homo sapien
gaattgctaaaaaggaggaacatattgaagaca

SEQ ID NO: 623955 - DNA, 33 bp, Homo sapien
atttgtcaaggctgcactaaaaacattttggtc

SEQ ID NO: 623956 - DNA, 33 bp, Homo sapien
atttgtcaaggctgcagtaaaaacattttggtc

SEQ ID NO: 623957 - DNA, 33 bp, Homo sapien
ctgaattcgaaatatacggtacttggttcgggt

SEQ ID NO: 623958 - DNA, 33 bp, Homo sapien
ctgaattcgaaatatagggtacttggttcgggt

SEQ ID NO: 623959 - DNA, 33 bp, Homo sapien
caaatggtcaggtaataaaaactcagctcacat

SEQ ID NO: 623960 - DNA, 33 bp, Homo sapien
caaatggtcaggtaatgaaaactcagctcacat

SEQ ID NO: 623961 - DNA, 33 bp, Homo sapien
atcaccattgccagaaagagcatagtaggccct

SEQ ID NO: 623962 - DNA, 33 bp, Homo sapien
atcaccattgccagaaggagcatagtaggccct

SEQ ID NO: 623963 - DNA, 33 bp, Homo sapien
caagcatcaaagcacaactccagtctccagttc

SEQ ID NO: 623964 - DNA, 33 bp, Homo sapien
caagcatcaaagcacatctccagtctccagttc

SEQ ID NO: 623965 - DNA, 33 bp, Homo sapien
cctgctgtatgtgatacgattcagttcagtgtt

SEQ ID NO: 623966 - DNA, 33 bp, Homo sapien
cctgctgtatgtgatatgattcagttcagtgtt

SEQ ID NO: 623967 - DNA, 33 bp, Homo sapien
tattttgttatggcaaccttagtaaataaatta

SEQ ID NO: 623968 - DNA, 33 bp, Homo sapien
tattttgttatggcaatcttagtaaataaatta

SEQ ID NO: 623969 - DNA, 33 bp, Homo sapien
gcagatcatttacttagctttgtttaacacagg

SEQ ID NO: 623970 - DNA, 33 bp, Homo sapien
gcagatcatttacttatctttgtttaacacagg

SEQ ID NO: 623971 - DNA, 33 bp, Homo sapien
aagatgagcccaaactaagctaggtttccatgt

SEQ ID NO: 623972 - DNA, 33 bp, Homo sapien
aagatgagcccaaactgagctaggtttccatgt

SEQ ID NO: 623973 - DNA, 33 bp, Homo sapien
gctcatgatgaacttacattgtgctttcattct

SEQ ID NO: 623974 - DNA, 33 bp, Homo sapien
gctcatgatgaacttatattgtgctttcattct

SEQ ID NO: 623975 - DNA, 33 bp, Homo sapien
agcacttacaatgtgacaagtcttgtgctaaat

SEQ ID NO: 623976 - DNA, 33 bp, Homo sapien
agcacttacaatgtgataagtcttgtgctaaat

SEQ ID NO: 623977 - DNA, 33 bp, Homo sapien
ccacttcagggttgacaagctacactgagacct

SEQ ID NO: 623978 - DNA, 33 bp, Homo sapien
ccacttcagggttgacgagctacactgagacct

SEQ ID NO: 623979 - DNA, 33 bp, Homo sapien
agaacaatgcttttgaagggctcatttgcaggc

SEQ ID NO: 623980 - DNA, 33 bp, Homo sapien
agaacaatgcttttgacgggctcatttgcaggc

SEQ ID NO: 623981 - DNA, 33 bp, Homo sapien
ctcctcttggaaatgacgtggttactagcaaaa

SEQ ID NO: 623982 - DNA, 33 bp, Homo sapien
ctcctcttggaaatgatgtggttactagcaaaa

SEQ ID NO: 623983 - DNA, 33 bp, Homo sapien
aagaggagaagtggaactggaagagaaagaagc

SEQ ID NO: 623984 - DNA, 33 bp, Homo sapien
aagaggagaagtggaattggaagagaaagaagc

SEQ ID NO: 623985 - DNA, 33 bp, Homo sapien
gatcagattgtggatacgcttaaacacccagga

SEQ ID NO: 623986 - DNA, 33 bp, Homo sapien
gatcagattgtggatatgcttaaacacccagga

SEQ ID NO: 623987 - DNA, 33 bp, Homo sapien
ttcttcttgctactgaaggcagataaagaaggc

SEQ ID NO: 623988 - DNA, 33 bp, Homo sapien
ttcttcttgctactgacggcagataaagaaggc

SEQ ID NO: 623989 - DNA, 33 bp, Homo sapien
tggaacagatttgccgcatattttccatcaacc

SEQ ID NO: 623990 - DNA, 33 bp, Homo sapien
tggaacagatttgccgtatattttccatcaacc

SEQ ID NO: 623991 - DNA, 33 bp, Homo sapien
ggtgaggcttcatgggaactgaaagcaagtgta

SEQ ID NO: 623992 - DNA, 33 bp, Homo sapien
ggtgaggcttcatggggactgaaagcaagtgta

SEQ ID NO: 623993 - DNA, 33 bp, Homo sapien
ctcccatgcacaaggacgctcgcctgctgactc

SEQ ID NO: 623994 - DNA, 33 bp, Homo sapien
ctcccatgcacaaggatgctcgcctgctgactc

SEQ ID NO: 623995 - DNA, 33 bp, Homo sapien
ttcacacataacacataagtagaatttcttttg

SEQ ID NO: 623996 - DNA, 33 bp, Homo sapien
ttcacacataacacattagtagaatttcttttg

SEQ ID NO: 623997 - DNA, 33 bp, Homo sapien
gtcaagcccatcacaacagcacttgcagcttct

SEQ ID NO: 623998 - DNA, 33 bp, Homo sapien
gtcaagcccatcacaatagcacttgcagcttct

SEQ ID NO: 623999 - DNA, 33 bp, Homo sapien
ctcttccgcttctaaaccaacaggacacagctg

SEQ ID NO: 624000 - DNA, 33 bp, Homo sapien
ctcttccgcttctaaatcaacaggacacagctg

SEQ ID NO: 624001 - DNA, 33 bp, Homo sapien
cattctgtgaggttaacattactctgatttaaa

SEQ ID NO: 624002 - DNA, 33 bp, Homo sapien
cattctgtgaggttaatattactctgatttaaa

SEQ ID NO: 624003 - DNA, 33 bp, Homo sapien
tacattgaatgaggaccatagagctggttagag

SEQ ID NO: 624004 - DNA, 33 bp, Homo sapien
tacattgaatgaggactatagagctggttagag

SEQ ID NO: 624005 - DNA, 33 bp, Homo sapien
atgccacggccatcgcaatttttttgacagttc

SEQ ID NO: 624006 - DNA, 33 bp, Homo sapien
atgccacggccatcgcgatttttttgacagttc

SEQ ID NO: 624007 - DNA, 33 bp, Homo sapien
aacaaggaatcccgaaacattcaagtattttct

SEQ ID NO: 624008 - DNA, 33 bp, Homo sapien
aacaaggaatcccgaagcattcaagtattttct

SEQ ID NO: 624009 - DNA, 33 bp, Homo sapien
attcactggaaactgactactcatagcacagca

SEQ ID NO: 624010 - DNA, 33 bp, Homo sapien
attcactggaaactgattactcatagcacagca

SEQ ID NO: 624011 - DNA, 33 bp, Homo sapien
tgtatccaagtaataaagcagagagaatgattt

SEQ ID NO: 624012 - DNA, 33 bp, Homo sapien
tgtatccaagtaataaggcagagagaatgattt

SEQ ID NO: 624013 - DNA, 33 bp, Homo sapien
ccatagatatacatagacaagtaaataatatcg

SEQ ID NO: 624014 - DNA, 33 bp, Homo sapien
ccatagatatacataggcaagtaaataatatcg

SEQ ID NO: 624015 - DNA, 33 bp, Homo sapien
tgatcaataaggagagaatactgtgatgatgaa

SEQ ID NO: 624016 - DNA, 33 bp, Homo sapien
tgatcaataaggagaggatactgtgatgatgaa

SEQ ID NO: 624017 - DNA, 33 bp, Homo sapien
atgattttcaatacaacttctaggtcaagcaaa

SEQ ID NO: 624018 - DNA, 33 bp, Homo sapien
atgattttcaatacaatttctaggtcaagcaaa

SEQ ID NO: 624019 - DNA, 33 bp, Homo sapien
ttctaggtcaagcaaactataatgtagtatggc

SEQ ID NO: 624020 - DNA, 33 bp, Homo sapien
ttctaggtcaagcaaagtataatgtagtatggc

SEQ ID NO: 624021 - DNA, 33 bp, Homo sapien
taatacttaataactcaacttttctctggtaag

SEQ ID NO: 624022 - DNA, 33 bp, Homo sapien
taatacttaataactcgacttttctctggtaag

SEQ ID NO: 624023 - DNA, 33 bp, Homo sapien
acaaaacactctctaacgctaaaaccattacta

SEQ ID NO: 624024 - DNA, 33 bp, Homo sapien
acaaaacactctctaaggctaaaaccattacta

SEQ ID NO: 624025 - DNA, 33 bp, Homo sapien
ctaggtccaaattaaacgtgcagtggggcagag

SEQ ID NO: 624026 - DNA, 33 bp, Homo sapien
ctaggtccaaattaaaggtgcagtggggcagag

SEQ ID NO: 624027 - DNA, 33 bp, Homo sapien
tatgaagtattcaaaacgccttcatagagcagg

SEQ ID NO: 624028 - DNA, 33 bp, Homo sapien
tatgaagtattcaaaatgccttcatagagcagg

SEQ ID NO: 624029 - DNA, 33 bp, Homo sapien
cgaacgagcctggttgaaaaaggtcacaaacag

SEQ ID NO: 624030 - DNA, 33 bp, Homo sapien
cgaacgagcctggttggaaaaggtcacaaacag

SEQ ID NO: 624031 - DNA, 33 bp, Homo sapien
tcctgatgtctgtcaaccaaaatggaattcaag

SEQ ID NO: 624032 - DNA, 33 bp, Homo sapien
tcctgatgtctgtcaagcaaaatggaattcaag

SEQ ID NO: 624033 - DNA, 33 bp, Homo sapien
tgttgaacaaaatctacactccttatcatggcc

SEQ ID NO: 624034 - DNA, 33 bp, Homo sapien
tgttgaacaaaatctagactccttatcatggcc

SEQ ID NO: 624035 - DNA, 33 bp, Homo sapien
tcgttaggatttggtaagagtgctatgaatgtg

SEQ ID NO: 624036 - DNA, 33 bp, Homo sapien
tcgttaggatttggtaggagtgctatgaatgtg

SEQ ID NO: 624037 - DNA, 33 bp, Homo sapien
ttctctatgattttcccgactttacctccactg

SEQ ID NO: 624038 - DNA, 33 bp, Homo sapien
ttctctatgattttcctgactttacctccactg

SEQ ID NO: 624039 - DNA, 33 bp, Homo sapien
agataataacattgcccactatatcaattagta

SEQ ID NO: 624040 - DNA, 33 bp, Homo sapien
agataataacattgcctactatatcaattagta

SEQ ID NO: 624041 - DNA, 33 bp, Homo sapien
gccaactaatcttcaacgaagccaacaagaata

SEQ ID NO: 624042 - DNA, 33 bp, Homo sapien
gccaactaatcttcaatgaagccaacaagaata

SEQ ID NO: 624043 - DNA, 33 bp, Homo sapien
tcttcctttaagaaaacctctgttctgtttgac

SEQ ID NO: 624044 - DNA, 33 bp, Homo sapien
tcttcctttaagaaaatctctgttctgtttgac

SEQ ID NO: 624045 - DNA, 33 bp, Homo sapien
ataactgtaagtctgaactatcattgctttcag

SEQ ID NO: 624046 - DNA, 33 bp, Homo sapien
ataactgtaagtctgagctatcattgctttcag

SEQ ID NO: 624047 - DNA, 33 bp, Homo sapien
gatgtctagcgccataaattaacaaatattaat

SEQ ID NO: 624048 - DNA, 33 bp, Homo sapien
gatgtctagcgccatagattaacaaatattaat

SEQ ID NO: 624049 - DNA, 33 bp, Homo sapien
caaagaacaaggaaagccatccacatagataaa

SEQ ID NO: 624050 - DNA, 33 bp, Homo sapien
caaagaacaaggaaagtcatccacatagataaa

SEQ ID NO: 624051 - DNA, 33 bp, Homo sapien
ctgtattattcacctcactttctttgtgaaata

SEQ ID NO: 624052 - DNA, 33 bp, Homo sapien
ctgtattattcacctcgctttctttgtgaaata

SEQ ID NO: 624053 - DNA, 33 bp, Homo sapien
ggcatcagctattgtaggaggcattcttacagg

SEQ ID NO: 624054 - DNA, 33 bp, Homo sapien
ggcatcagctattgtatgaggcattcttacagg

SEQ ID NO: 624055 - DNA, 33 bp, Homo sapien
gaatgtaatcctaggccctaacttgccagtgat

SEQ ID NO: 624056 - DNA, 33 bp, Homo sapien
gaatgtaatcctaggctctaacttgccagtgat

SEQ ID NO: 624057 - DNA, 33 bp, Homo sapien
ttaatgcataaacttcaagtcagtcccttacat

SEQ ID NO: 624058 - DNA, 33 bp, Homo sapien
ttaatgcataaacttccagtcagtcccttacat

SEQ ID NO: 624059 - DNA, 33 bp, Homo sapien
tggttgataatacctacgtcataaatttgttgg

SEQ ID NO: 624060 - DNA, 33 bp, Homo sapien
tggttgataatacctatgtcataaatttgttgg

SEQ ID NO: 624061 - DNA, 33 bp, Homo sapien
ccttgacttcttaataacattcgacaccacaca

SEQ ID NO: 624062 - DNA, 33 bp, Homo sapien
ccttgacttcttaatatcattcgacaccacaca

SEQ ID NO: 624063 - DNA, 33 bp, Homo sapien
taattggacacaaatgacagcctaactttaaga

SEQ ID NO: 624064 - DNA, 33 bp, Homo sapien
taattggacacaaatggcagcctaactttaaga

SEQ ID NO: 624065 - DNA, 33 bp, Homo sapien
tgaagctgtaaccctcaatgtgactgtgtttgg

SEQ ID NO: 624066 - DNA, 33 bp, Homo sapien
tgaagctgtaaccctcgatgtgactgtgtttgg

SEQ ID NO: 624067 - DNA, 33 bp, Homo sapien
attgtatgtaagttaacgtagcagaaattgcag

SEQ ID NO: 624068 - DNA, 33 bp, Homo sapien
attgtatgtaagttaatgtagcagaaattgcag

SEQ ID NO: 624069 - DNA, 33 bp, Homo sapien
ctgagcttatttcacgcaagagtctttcaaaat

SEQ ID NO: 624070 - DNA, 33 bp, Homo sapien
ctgagcttatttcacggaagagtctttcaaaat

SEQ ID NO: 624071 - DNA, 33 bp, Homo sapien
aatgtttcaagtaataactatggcagaaatggt

SEQ ID NO: 624072 - DNA, 33 bp, Homo sapien
aatgtttcaagtaatagctatggcagaaatggt

SEQ ID NO: 624073 - DNA, 33 bp, Homo sapien
aattccagtttttgtacgtcagcagctgggtgg

SEQ ID NO: 624074 - DNA, 33 bp, Homo sapien
aattccagtttttgtatgtcagcagctgggtgg

SEQ ID NO: 624075 - DNA, 33 bp, Homo sapien
tgctaagaaggccacacgtatgctgtcatttat

SEQ ID NO: 624076 - DNA, 33 bp, Homo sapien
tgctaagaaggccacaggtatgctgtcatttat

SEQ ID NO: 624077 - DNA, 33 bp, Homo sapien
gtgtggttttgttaccaagaatagaatctgatt

SEQ ID NO: 624078 - DNA, 33 bp, Homo sapien
gtgtggttttgttacccagaatagaatctgatt

SEQ ID NO: 624079 - DNA, 33 bp, Homo sapien
aatctctgaaagaaaaaaaggcagattagatca

SEQ ID NO: 624080 - DNA, 33 bp, Homo sapien
aatctctgaaagaaaacaaggcagattagatca

SEQ ID NO: 624081 - DNA, 33 bp, Homo sapien
tcatcgtggtggataaacgtcttgatgtgctgc

SEQ ID NO: 624082 - DNA, 33 bp, Homo sapien
tcatcgtggtggataagcgtcttgatgtgctgc

SEQ ID NO: 624083 - DNA, 33 bp, Homo sapien; identical to SEQ ID NO: 624081

SEQ ID NO: 624084 - DNA, 33 bp, Homo sapien; identical to SEQ ID NO: 624082

SEQ ID NO: 624085 - DNA, 33 bp, Homo sapien
ttctctgtccttaccaagatgatggttctgttg

SEQ ID NO: 624086 - DNA, 33 bp, Homo sapien
ttctctgtccttaccaggatgatggttctgttg

SEQ ID NO: 624087 - DNA, 33 bp, Homo sapien
gacaaaagagtgttagaaagaatccgagaattg

SEQ ID NO: 624088 - DNA, 33 bp, Homo sapien
gacaaaagagtgttaggaagaatccgagaattg

SEQ ID NO: 624089 - DNA, 33 bp, Homo sapien
ttttattcccttcgaaagatgctataaacttta

SEQ ID NO: 624090 - DNA, 33 bp, Homo sapien
ttttattcccttcgaaggatgctataaacttta

SEQ ID NO: 624091 - DNA, 33 bp, Homo sapien
gagtgtaatagaaggacgagtcaaggataaccc

SEQ ID NO: 624092 - DNA, 33 bp, Homo sapien
gagtgtaatagaaggaggagtcaaggataaccc

SEQ ID NO: 624093 - DNA, 33 bp, Homo sapien
cctcaaaagggtttgcacagtggaatgacaaga

SEQ ID NO: 624094 - DNA, 33 bp, Homo sapien
cctcaaaagggtttgcgcagtggaatgacaaga

SEQ ID NO: 624095 - DNA, 33 bp, Homo sapien
tgtgtctgtgttttccagaaaaggactgaggtt

SEQ ID NO: 624096 - DNA, 33 bp, Homo sapien
tgtgtctgtgttttccggaaaaggactgaggtt

SEQ ID NO: 624097 - DNA, 33 bp, Homo sapien
gtctaaagttccagtacagtcttaaaaatgcaa

SEQ ID NO: 624098 - DNA, 33 bp, Homo sapien
gtctaaagttccagtatagtcttaaaaatgcaa

SEQ ID NO: 624099 - DNA, 33 bp, Homo sapien
tttcagttctattctcaagtgcttccaagaaat

SEQ ID NO: 624100 - DNA, 33 bp, Homo sapien
tttcagttctattctcgagtgcttccaagaaat

SEQ ID NO: 624101 - DNA, 33 bp, Homo sapien
aagacacgttgtaggacgagcaaaaggagccca

SEQ ID NO: 624102 - DNA, 33 bp, Homo sapien
aagacacgttgtaggatgagcaaaaggagccca

SEQ ID NO: 624103 - DNA, 33 bp, Homo sapien
acatggaaatcattgacgacatgacaagagcaa

SEQ ID NO: 624104 - DNA, 33 bp, Homo sapien
acatggaaatcattgatgacatgacaagagcaa

SEQ ID NO: 624105 - DNA, 33 bp, Homo sapien
ggatattcaaggttgacgagatgtcccagccca

SEQ ID NO: 624106 - DNA, 33 bp, Homo sapien
ggatattcaaggttgatgagatgtcccagccca

SEQ ID NO: 624107 - DNA, 33 bp, Homo sapien
ggttacagctttaagacagtgcaagataagagt

SEQ ID NO: 624108 - DNA, 33 bp, Homo sapien
ggttacagctttaagatagtgcaagataagagt

SEQ ID NO: 624109 - DNA, 33 bp, Homo sapien
acagaataattacctactaagaaagctactaaa

SEQ ID NO: 624110 - DNA, 33 bp, Homo sapien
acagaataattacctagtaagaaagctactaaa

SEQ ID NO: 624111 - DNA, 33 bp, Homo sapien
ctagttagctttattacagagagtcaacttttt

SEQ ID NO: 624112 - DNA, 33 bp, Homo sapien
ctagttagctttattatagagagtcaacttttt

SEQ ID NO: 624113 - DNA, 33 bp, Homo sapien
gtacaactgagaggagaaaaaatgatacaaaga

SEQ ID NO: 624114 - DNA, 33 bp, Homo sapien
gtacaactgagaggaggaaaaatgatacaaaga

SEQ ID NO: 624115 - DNA, 33 bp, Homo sapien
tctataccatgcatcaacttaaaaaaatagccc

SEQ ID NO: 624116 - DNA, 33 bp, Homo sapien
tctataccatgcatcagcttaaaaaaatagccc

SEQ ID NO: 624117 - DNA, 33 bp, Homo sapien
ccacaccttcacaaaagaatcttttcagagtct

SEQ ID NO: 624118 - DNA, 33 bp, Homo sapien
ccacaccttcacaaaataatcttttcagagtct

SEQ ID NO: 624119 - DNA, 33 bp, Homo sapien
cttttagtctttccaccgaagagcagtttacac

SEQ ID NO: 624120 - DNA, 33 bp, Homo sapien
cttttagtctttccactgaagagcagtttacac

SEQ ID NO: 624121 - DNA, 33 bp, Homo sapien
tgctgcctatcaaaacaacaaggtgtataaata

SEQ ID NO: 624122 - DNA, 33 bp, Homo sapien
tgctgcctatcaaaactacaaggtgtataaata

SEQ ID NO: 624123 - DNA, 33 bp, Homo sapien
ctgttgaatctgatagcataaaatggagcttgt

SEQ ID NO: 624124 - DNA, 33 bp, Homo sapien
ctgttgaatctgatagtataaaatggagcttgt

SEQ ID NO: 624125 - DNA, 33 bp, Homo sapien
atttgtctattctatgacagtttgcctctctat

SEQ ID NO: 624126 - DNA, 33 bp, Homo sapien
atttgtctattctatgtcagtttgcctctctat

SEQ ID NO: 624127 - DNA, 33 bp, Homo sapien
ggttctcgaaattatcaactattttactgaaca

SEQ ID NO: 624128 - DNA, 33 bp, Homo sapien
ggttctcgaaattatcgactattttactgaaca

SEQ ID NO: 624129 - DNA, 33 bp, Homo sapien
tggtgagagcacttcaacataatccttctactg

SEQ ID NO: 624130 - DNA, 33 bp, Homo sapien
tggtgagagcacttcagcataatccttctactg

SEQ ID NO: 624131 - DNA, 33 bp, Homo sapien
actgtgttctaaccaacgacaatttagttggaa

SEQ ID NO: 624132 - DNA, 33 bp, Homo sapien
actgtgttctaaccaatgacaatttagttggaa

SEQ ID NO: 624133 - DNA, 33 bp, Homo sapien
agttttctttcacctcaacttatctattaaatg

SEQ ID NO: 624134 - DNA, 33 bp, Homo sapien
agttttctttcacctcgacttatctattaaatg

SEQ ID NO: 624135 - DNA, 33 bp, Homo sapien
gtcactttgggtccaccggtgaaagtaggggct

SEQ ID NO: 624136 - DNA, 33 bp, Homo sapien
gtcactttgggtccactggtgaaagtaggggct

SEQ ID NO: 624137 - DNA, 33 bp, Homo sapien
aaaagtgacgttctgacagtataaatagaatgc

SEQ ID NO: 624138 - DNA, 33 bp, Homo sapien
aaaagtgacgttctgagagtataaatagaatgc

SEQ ID NO: 624139 - DNA, 33 bp, Homo sapien
taagatcaggcagacaaattcacccagtcacaa

SEQ ID NO: 624140 - DNA, 33 bp, Homo sapien
taagatcaggcagacagattcacccagtcacaa

SEQ ID NO: 624141 - DNA, 33 bp, Homo sapien
caactttccattatacaccaacaagatgcttgg

SEQ ID NO: 624142 - DNA, 33 bp, Homo sapien
caactttccattatacgccaacaagatgcttgg

SEQ ID NO: 624143 - DNA, 33 bp, Homo sapien
tcttatatggttacatgaaacattgggagtctg

SEQ ID NO: 624144 - DNA, 33 bp, Homo sapien
tcttatatggttacattaaacattgggagtctg

SEQ ID NO: 624145 - DNA, 33 bp, Homo sapien
ctgacaatgggtgcaactgggccctgatgtttt

SEQ ID NO: 624146 - DNA, 33 bp, Homo sapien
ctgacaatgggtgcaattgggccctgatgtttt

SEQ ID NO: 624147 - DNA, 33 bp, Homo sapien
tacaaggccttcatgacaaataaacctccagct

SEQ ID NO: 624148 - DNA, 33 bp, Homo sapien
tacaaggccttcatgataaataaacctccagct

SEQ ID NO: 624149 - DNA, 33 bp, Homo sapien
gcctgggaaggaaatacagcaaaggattccatt

SEQ ID NO: 624150 - DNA, 33 bp, Homo sapien
gcctgggaaggaaatagagcaaaggattccatt

SEQ ID NO: 624151 - DNA, 33 bp, Homo sapien
ttcttaaagatagcatcaaggaaacctttgata

SEQ ID NO: 624152 - DNA, 33 bp, Homo sapien
ttcttaaagatagcatgaaggaaacctttgata

SEQ ID NO: 624153 - DNA, 33 bp, Homo sapien
agttttttgaggtaccagccttgtacagatgaa

SEQ ID NO: 624154 - DNA, 33 bp, Homo sapien
agttttttgaggtaccggccttgtacagatgaa

SEQ ID NO: 624155 - DNA, 33 bp, Homo sapien
ctgaggtgaaaataaacgtaggcccttgaggta

SEQ ID NO: 624156 - DNA, 33 bp, Homo sapien
ctgaggtgaaaataaatgtaggcccttgaggta

SEQ ID NO: 624157 - DNA, 33 bp, Homo sapien
agttgaatccggtagcactctttcaccaattca

SEQ ID NO: 624158 - DNA, 33 bp, Homo sapien
agttgaatccggtagcgctctttcaccaattca

SEQ ID NO: 624159 - DNA, 33 bp, Homo sapien
atgaagtagaaacacactgcttggttaatttag

SEQ ID NO: 624160 - DNA, 33 bp, Homo sapien
atgaagtagaaacacattgcttggttaatttag

SEQ ID NO: 624161 - DNA, 33 bp, Homo sapien
gagtgcctaagtaaaacaaaaagatggagaagg

SEQ ID NO: 624162 - DNA, 33 bp, Homo sapien
gagtgcctaagtaaaataaaaagatggagaagg

SEQ ID NO: 624163 - DNA, 33 bp, Homo sapien
tccaagtgtactagagaataccatgctataagt

SEQ ID NO: 624164 - DNA, 33 bp, Homo sapien
tccaagtgtactagagtataccatgctataagt

SEQ ID NO: 624165 - DNA, 33 bp, Homo sapien
agcactttttttgttagccatcacatggttaag

SEQ ID NO: 624166 - DNA, 33 bp, Homo sapien
agcactttttttgttatccatcacatggttaag

SEQ ID NO: 624167 - DNA, 33 bp, Homo sapien
tcccagttctctcttgcaaagcccctatttcaa

SEQ ID NO: 624168 - DNA, 33 bp, Homo sapien
tcccagttctctcttgtaaagcccctatttcaa

SEQ ID NO: 624169 - DNA, 33 bp, Homo sapien
ctctgatttcactgaaacgccactcagaggaac

SEQ ID NO: 624170 - DNA, 33 bp, Homo sapien
ctctgatttcactgaaccgccactcagaggaac

SEQ ID NO: 624171 - DNA, 33 bp, Homo sapien
agcaacaccattatacaataaaccactaatttc

SEQ ID NO: 624172 - DNA, 33 bp, Homo sapien
agcaacaccattatacgataaaccactaatttc

SEQ ID NO: 624173 - DNA, 33 bp, Homo sapien
tacaaacaagtagcacactgctgttaaataaac

SEQ ID NO: 624174 - DNA, 33 bp, Homo sapien
tacaaacaagtagcacgctgctgttaaataaac

SEQ ID NO: 624175 - DNA, 33 bp, Homo sapien
caggtttcctgatagtaaaacagaaaccagagt

SEQ ID NO: 624176 - DNA, 33 bp, Homo sapien
caggtttcctgatagtgaaacagaaaccagagt

SEQ ID NO: 624177 - DNA, 33 bp, Homo sapien
agatagaactgttcacaatcctgaaattttcat

SEQ ID NO: 624178 - DNA, 33 bp, Homo sapien
agatagaactgttcacgatcctgaaattttcat

SEQ ID NO: 624179 - DNA, 33 bp, Homo sapien
tttctctcactattgcccgtattaagtaaaact

SEQ ID NO: 624180 - DNA, 33 bp, Homo sapien
tttctctcactattgctcgtattaagtaaaact

SEQ ID NO: 624181 - DNA, 33 bp, Homo sapien
aaatgaatggattcaacaggctggttaatacat

SEQ ID NO: 624182 - DNA, 33 bp, Homo sapien
aaatgaatggattcaagaggctggttaatacat

SEQ ID NO: 624183 - DNA, 33 bp, Homo sapien
acattccttgtttacactggagactctgtgtga

SEQ ID NO: 624184 - DNA, 33 bp, Homo sapien
acattccttgtttacattggagactctgtgtga

SEQ ID NO: 624185 - DNA, 33 bp, Homo sapien
ttcacctcaccaaagccgaacacctgtactacc

SEQ ID NO: 624186 - DNA, 33 bp, Homo sapien
ttcacctcaccaaagctgaacacctgtactacc

SEQ ID NO: 624187 - DNA, 33 bp, Homo sapien
gccagttggttgaaggaatgttgtaattgataa

SEQ ID NO: 624188 - DNA, 33 bp, Homo sapien
gccagttggttgaagggatgttgtaattgataa

SEQ ID NO: 624189 - DNA, 33 bp, Homo sapien
aggcattcattttctcaactgcagctagtgagg

SEQ ID NO: 624190 - DNA, 33 bp, Homo sapien
aggcattcattttctctactgcagctagtgagg

SEQ ID NO: 624191 - DNA, 33 bp, Homo sapien
tgcctccaccatcagacgtcccattctctcttg

SEQ ID NO: 624192 - DNA, 33 bp, Homo sapien
tgcctccaccatcagatgtcccattctctcttg

SEQ ID NO: 624193 - DNA, 33 bp, Homo sapien
ggagctcccagccactcagctatgtcattccag

SEQ ID NO: 624194 - DNA, 33 bp, Homo sapien
ggagctcccagccactgagctatgtcattccag

SEQ ID NO: 624195 - DNA, 33 bp, Homo sapien
agtaagatgttacttcactctgacaattgggat

SEQ ID NO: 624196 - DNA, 33 bp, Homo sapien
agtaagatgttacttcgctctgacaattgggat

SEQ ID NO: 624197 - DNA, 33 bp, Homo sapien
gcatccatccagaacacgagatttgtggaaagg

SEQ ID NO: 624198 - DNA, 33 bp, Homo sapien
gcatccatccagaacatgagatttgtggaaagg

SEQ ID NO: 624199 - DNA, 33 bp, Homo sapien
aaaatggcaaacgcatcaatttttgctttccgg

SEQ ID NO: 624200 - DNA, 33 bp, Homo sapien
aaaatggcaaacgcatgaatttttgctttccgg

SEQ ID NO: 624201 - DNA, 33 bp, Homo sapien
acaagcaaggtgtggaatccaagaaggggcaaa

SEQ ID NO: 624202 - DNA, 33 bp, Homo sapien
acaagcaaggtgtggagtccaagaaggggcaaa

SEQ ID NO: 624203 - DNA, 33 bp, Homo sapien
gcttgtgtcttttctcaccaatcttctcttcct

SEQ ID NO: 624204 - DNA, 33 bp, Homo sapien
gcttgtgtcttttctcgccaatcttctcttcct

SEQ ID NO: 624205 - DNA, 33 bp, Homo sapien
cctacctgtccatgaactctgaggaatgctttg

SEQ ID NO: 624206 - DNA, 33 bp, Homo sapien
cctacctgtccatgaattctgaggaatgctttg

SEQ ID NO: 624207 - DNA, 33 bp, Homo sapien
gaccaccagatctctcccctacagaaggttttg

SEQ ID NO: 624208 - DNA, 33 bp, Homo sapien
gaccaccagatctctctcctacagaaggttttg

SEQ ID NO: 624209 - DNA, 33 bp, Homo sapien
atttcacagattgagaaagggctctgaagcagt

SEQ ID NO: 624210 - DNA, 33 bp, Homo sapien
atttcacagattgagagagggctctgaagcagt

SEQ ID NO: 624211 - DNA, 33 bp, Homo sapien
gtcaatgccataaaaccgcattacaagaccagg

SEQ ID NO: 624212 - DNA, 33 bp, Homo sapien
gtcaatgccataaaactgcattacaagaccagg

SEQ ID NO: 624213 - DNA, 33 bp, Homo sapien
ggactacttctactgacattggctttaaaataa

SEQ ID NO: 624214 - DNA, 33 bp, Homo sapien
ggactacttctactgatattggctttaaaataa

SEQ ID NO: 624215 - DNA, 33 bp, Homo sapien
ttttataaaggataagcaagtttagctccttca

SEQ ID NO: 624216 - DNA, 33 bp, Homo sapien
ttttataaaggataaggaagtttagctccttca

SEQ ID NO: 624217 - DNA, 33 bp, Homo sapien
caattcatccttgatccaaacagcatagcacct

SEQ ID NO: 624218 - DNA, 33 bp, Homo sapien
caattcatccttgatctaaacagcatagcacct

SEQ ID NO: 624219 - DNA, 33 bp, Homo sapien
taagtcatatgcttaacgtaaatactggagcta

SEQ ID NO: 624220 - DNA, 33 bp, Homo sapien
taagtcatatgcttaatgtaaatactggagcta

SEQ ID NO: 624221 - DNA, 33 bp, Homo sapien
gctgtagaagtgattaaggtgacctgagaaaca

SEQ ID NO: 624222 - DNA, 33 bp, Homo sapien
gctgtagaagtgattacggtgacctgagaaaca

SEQ ID NO: 624223 - DNA, 33 bp, Homo sapien
ctgatgtggtaggtagcataatgggcttccaaa

SEQ ID NO: 624224 - DNA, 33 bp, Homo sapien
ctgatgtggtaggtaggataatgggcttccaaa

SEQ ID NO: 624225 - DNA, 33 bp, Homo sapien
tggtgatttccttttgagttcttggcattgatt

SEQ ID NO: 624226 - DNA, 33 bp, Homo sapien
tggtgatttccttttgtgttcttggcattgatt

SEQ ID NO: 624227 - DNA, 33 bp, Homo sapien
gtcctatgttttgctaagtaggtagacctgtag

SEQ ID NO: 624228 - DNA, 33 bp, Homo sapien
gtcctatgttttgctacgtaggtagacctgtag

SEQ ID NO: 624229 - DNA, 33 bp, Homo sapien
ttacatcaggtgggtcaaaatgcatatggaggg

SEQ ID NO: 624230 - DNA, 33 bp, Homo sapien
ttacatcaggtgggtcgaaatgcatatggaggg

SEQ ID NO: 624231 - DNA, 33 bp, Homo sapien
ctcagtggttaacacaatcacacaaaactcctg

SEQ ID NO: 624232 - DNA, 33 bp, Homo sapien
ctcagtggttaacacattcacacaaaactcctg

SEQ ID NO: 624233 - DNA, 33 bp, Homo sapien
cgctgatctagagagtaaccaaatacctgtttt

SEQ ID NO: 624234 - DNA, 33 bp, Homo sapien
cgctgatctagagagtcaccaaatacctgtttt

SEQ ID NO: 624235 - DNA, 33 bp, Homo sapien
ctggtaaacacagtgaaaaacgtccagatgact

SEQ ID NO: 624236 - DNA, 33 bp, Homo sapien
ctggtaaacacagtgagaaacgtccagatgact

SEQ ID NO: 624237 - DNA, 33 bp, Homo sapien
tggaaaatagggataaagataccaccttcacaa

SEQ ID NO: 624238 - DNA, 33 bp, Homo sapien
tggaaaatagggataatgataccaccttcacaa

SEQ ID NO: 624239 - DNA, 33 bp, Homo sapien
tactctctcatcaatcaatcaaatttctattat

SEQ ID NO: 624240 - DNA, 33 bp, Homo sapien
tactctctcatcaatcgatcaaatttctattat

SEQ ID NO: 624241 - DNA, 33 bp, Homo sapien
agctgatattgagaataaaatttgataagcctg

SEQ ID NO: 624242 - DNA, 33 bp, Homo sapien
agctgatattgagaatgaaatttgataagcctg

SEQ ID NO: 624243 - DNA, 33 bp, Homo sapien
cttctccatggcattaacatccttactacagat

SEQ ID NO: 624244 - DNA, 33 bp, Homo sapien
cttctccatggcattagcatccttactacagat

SEQ ID NO: 624245 - DNA, 33 bp, Homo sapien
ataataaatggtgccaatgattcacctcctgga

SEQ ID NO: 624246 - DNA, 33 bp, Homo sapien
ataataaatggtgccagtgattcacctcctgga

SEQ ID NO: 624247 - DNA, 33 bp, Homo sapien
tgtactccctgaaagccgaggccatcccttctg

SEQ ID NO: 624248 - DNA, 33 bp, Homo sapien
tgtactccctgaaagctgaggccatcccttctg

SEQ ID NO: 624249 - DNA, 33 bp, Homo sapien
aatctttaatattcaactactttagacattaat

SEQ ID NO: 624250 - DNA, 33 bp, Homo sapien
aatctttaatattcaagtactttagacattaat

SEQ ID NO: 624251 - DNA, 33 bp, Homo sapien
tccatctatgcccccaagaaggaaattatctca

SEQ ID NO: 624252 - DNA, 33 bp, Homo sapien
tccatctatgcccccacgaaggaaattatctca

SEQ ID NO: 624253 - DNA, 33 bp, Homo sapien
caaaagagggcagtaacctactcatgaaggatc

SEQ ID NO: 624254 - DNA, 33 bp, Homo sapien
caaaagagggcagtaatctactcatgaaggatc

SEQ ID NO: 624255 - DNA, 33 bp, Homo sapien
ccatggtgtgctccaaatataaattatcaacat

SEQ ID NO: 624256 - DNA, 33 bp, Homo sapien
ccatggtgtgctccaagtataaattatcaacat

SEQ ID NO: 624257 - DNA, 33 bp, Homo sapien
ttcttccacaggccccaagttttggccagacga

SEQ ID NO: 624258 - DNA, 33 bp, Homo sapien
ttcttccacaggccccgagttttggccagacga

SEQ ID NO: 624259 - DNA, 33 bp, Homo sapien
aaactagaaccaagaaacacctaaagtggactc

SEQ ID NO: 624260 - DNA, 33 bp, Homo sapien
aaactagaaccaagaagcacctaaagtggactc

SEQ ID NO: 624261 - DNA, 33 bp, Homo sapien
gagaatgagaatagaccgaaatcacaaataagg

SEQ ID NO: 624262 - DNA, 33 bp, Homo sapien
gagaatgagaatagactgaaatcacaaataagg

SEQ ID NO: 624263 - DNA, 33 bp, Homo sapien
tacaacaaaggtttgcaacagatagcatcttgg

SEQ ID NO: 624264 - DNA, 33 bp, Homo sapien
tacaacaaaggtttgcgacagatagcatcttgg

SEQ ID NO: 624265 - DNA, 33 bp, Homo sapien
tagtgggtcagtctgacatgctttctagagcat

SEQ ID NO: 624266 - DNA, 33 bp, Homo sapien
tagtgggtcagtctgatatgctttctagagcat

SEQ ID NO: 624267 - DNA, 33 bp, Homo sapien
gttttattagtagcaacagcatttaaatgtttt

SEQ ID NO: 624268 - DNA, 33 bp, Homo sapien
gttttattagtagcaagagcatttaaatgtttt

SEQ ID NO: 624269 - DNA, 33 bp, Homo sapien
ctattgaaatccaacagaatcttcaaagatgca

SEQ ID NO: 624270 - DNA, 33 bp, Homo sapien
ctattgaaatccaacataatcttcaaagatgca

SEQ ID NO: 624271 - DNA, 33 bp, Homo sapien
tcaatctgtgattctccacttttactatgcatc

SEQ ID NO: 624272 - DNA, 33 bp, Homo sapien
tcaatctgtgattctctacttttactatgcatc

SEQ ID NO: 624273 - DNA, 33 bp, Homo sapien
gcctcctaccgaacacacaacttaccccagaca

SEQ ID NO: 624274 - DNA, 33 bp, Homo sapien
gcctcctaccgaacacgcaacttaccccagaca

SEQ ID NO: 624275 - DNA, 33 bp, Homo sapien
ctttcatctcttctctcaagtttatggatttta

SEQ ID NO: 624276 - DNA, 33 bp, Homo sapien
ctttcatctcttctctgaagtttatggatttta

SEQ ID NO: 624277 - DNA, 33 bp, Homo sapien
ttctacaggacagaggaagaatcatcttacata

SEQ ID NO: 624278 - DNA, 33 bp, Homo sapien
ttctacaggacagagggagaatcatcttacata

SEQ ID NO: 624279 - DNA, 33 bp, Homo sapien
gagatgcaagaggcataactaagaaagtgggga

SEQ ID NO: 624280 - DNA, 33 bp, Homo sapien
gagatgcaagaggcattactaagaaagtgggga

SEQ ID NO: 624281 - DNA, 33 bp, Homo sapien
cagtgtcctataattaacaaaattgtaagcatg

SEQ ID NO: 624282 - DNA, 33 bp, Homo sapien
cagtgtcctataattagcaaaattgtaagcatg

SEQ ID NO: 624283 - DNA, 33 bp, Homo sapien
acacttcagagtgacccaaaactagaaaactgg

SEQ ID NO: 624284 - DNA, 33 bp, Homo sapien
acacttcagagtgacctaaaactagaaaactgg

SEQ ID NO: 624285 - DNA, 33 bp, Homo sapien
aactattgagcacttacggatctaaaagtatgt

SEQ ID NO: 624286 - DNA, 33 bp, Homo sapien
aactattgagcacttatggatctaaaagtatgt

SEQ ID NO: 624287 - DNA, 33 bp, Homo sapien
gggggttggcttagaaaggaattgctaaatttt

SEQ ID NO: 624288 - DNA, 33 bp, Homo sapien
gggggttggcttagaagggaattgctaaatttt

SEQ ID NO: 624289 - DNA, 33 bp, Homo sapien
ctctgattttggacaaaccatgattaagacatg

SEQ ID NO: 624290 - DNA, 33 bp, Homo sapien
ctctgattttggacaatccatgattaagacatg

SEQ ID NO: 624291 - DNA, 33 bp, Homo sapien
tgccctctttaattgccctttatcctcacacca

SEQ ID NO: 624292 - DNA, 33 bp, Homo sapien
tgccctctttaattgctctttatcctcacacca

SEQ ID NO: 624293 - DNA, 33 bp, Homo sapien
ttctaagaacttggcacgattgcacttttcagc

SEQ ID NO: 624294 - DNA, 33 bp, Homo sapien
ttctaagaacttggcaggattgcacttttcagc

SEQ ID NO: 624295 - DNA, 33 bp, Homo sapien
ctatactgcacatgctcaaaacactaatgtatt

SEQ ID NO: 624296 - DNA, 33 bp, Homo sapien
ctatactgcacatgctgaaaacactaatgtatt

SEQ ID NO: 624297 - DNA, 33 bp, Homo sapien
atcaccactttgagcacgtggattgcacagcta

SEQ ID NO: 624298 - DNA, 33 bp, Homo sapien
atcaccactttgagcatgtggattgcacagcta

SEQ ID NO: 624299 - DNA, 33 bp, Homo sapien
aacttattttcaaatgcaagtcgaaatgtttaa

SEQ ID NO: 624300 - DNA, 33 bp, Homo sapien
aacttattttcaaatgtaagtcgaaatgtttaa

SEQ ID NO: 624301 - DNA, 33 bp, Homo sapien
atgcctatttttgtcaacacagaggttattctc

SEQ ID NO: 624302 - DNA, 33 bp, Homo sapien
atgcctatttttgtcagcacagaggttattctc

SEQ ID NO: 624303 - DNA, 33 bp, Homo sapien
gccttagcctactccactggaaagttgtgaata

SEQ ID NO: 624304 - DNA, 33 bp, Homo sapien
gccttagcctactccattggaaagttgtgaata

SEQ ID NO: 624305 - DNA, 33 bp, Homo sapien
aagtgcaatgctgctaacaaacttttaactgct

SEQ ID NO: 624306 - DNA, 33 bp, Homo sapien
aagtgcaatgctgctatcaaacttttaactgct

SEQ ID NO: 624307 - DNA, 33 bp, Homo sapien
actggcagtcaaggaaatggaactctgggattt

SEQ ID NO: 624308 - DNA, 33 bp, Homo sapien
actggcagtcaaggaactggaactctgggattt

SEQ ID NO: 624309 - DNA, 33 bp, Homo sapien
cctttttcagcacataacctactgtctagttca

SEQ ID NO: 624310 - DNA, 33 bp, Homo sapien
cctttttcagcacatagcctactgtctagttca

SEQ ID NO: 624311 - DNA, 33 bp, Homo sapien
cattaaaatgaagacacctgaggaaataacaca

SEQ ID NO: 624312 - DNA, 33 bp, Homo sapien
cattaaaatgaagacagctgaggaaataacaca

SEQ ID NO: 624313 - DNA, 33 bp, Homo sapien
aggcatataagcgtaactgaaagtaatgatcta

SEQ ID NO: 624314 - DNA, 33 bp, Homo sapien
aggcatataagcgtaattgaaagtaatgatcta

SEQ ID NO: 624315 - DNA, 33 bp, Homo sapien
cttgaagcatagctaaagcagtctacctgaagg

SEQ ID NO: 624316 - DNA, 33 bp, Homo sapien
cttgaagcatagctaacgcagtctacctgaagg

SEQ ID NO: 624317 - DNA, 33 bp, Homo sapien
cttagcagatggtcccagaagtgaatggctgtt

SEQ ID NO: 624318 - DNA, 33 bp, Homo sapien
cttagcagatggtcccggaagtgaatggctgtt

SEQ ID NO: 624319 - DNA, 33 bp, Homo sapien
aaacaattatagaatcacatttgctcagatcac

SEQ ID NO: 624320 - DNA, 33 bp, Homo sapien
aaacaattatagaatcgcatttgctcagatcac

SEQ ID NO: 624321 - DNA, 33 bp, Homo sapien
gtgtagtttctcatctcaaagacccagaaatgt

SEQ ID NO: 624322 - DNA, 33 bp, Homo sapien
gtgtagtttctcatcttaaagacccagaaatgt

SEQ ID NO: 624323 - DNA, 33 bp, Homo sapien
tgtgtgcagactctagcatggaaagagagaaat

SEQ ID NO: 624324 - DNA, 33 bp, Homo sapien
tgtgtgcagactctagtatggaaagagagaaat

SEQ ID NO: 624325 - DNA, 33 bp, Homo sapien
gaaaattgcaaagtccagagaggttatgtgatt

SEQ ID NO: 624326 - DNA, 33 bp, Homo sapien
gaaaattgcaaagtccggagaggttatgtgatt

SEQ ID NO: 624327 - DNA, 33 bp, Homo sapien
ctgataaaagatgtcacagagaatataataagc

SEQ ID NO: 624328 - DNA, 33 bp, Homo sapien
ctgataaaagatgtcatagagaatataataagc

SEQ ID NO: 624329 - DNA, 33 bp, Homo sapien
acatgaattccatagcacactaaattaagtcct

SEQ ID NO: 624330 - DNA, 33 bp, Homo sapien
acatgaattccatagctcactaaattaagtcct

SEQ ID NO: 624331 - DNA, 33 bp, Homo sapien
gtcactcatgtaggataatattgctcttgaccc

SEQ ID NO: 624332 - DNA, 33 bp, Homo sapien
gtcactcatgtaggatgatattgctcttgaccc

SEQ ID NO: 624333 - DNA, 33 bp, Homo sapien
cccactgccatctccaagcgggaatggggccaa

SEQ ID NO: 624334 - DNA, 33 bp, Homo sapien
cccactgccatctccacgcgggaatggggccaa

SEQ ID NO: 624335 - DNA, 33 bp, Homo sapien
tatttcaactcttgtgaatgaaaatcttttata

SEQ ID NO: 624336 - DNA, 33 bp, Homo sapien
tatttcaactcttgtggatgaaaatcttttata

SEQ ID NO: 624337 - DNA, 33 bp, Homo sapien
ccatgatacttcagccaaactctaccagtacaa

SEQ ID NO: 624338 - DNA, 33 bp, Homo sapien
ccatgatacttcagccgaactctaccagtacaa

SEQ ID NO: 624339 - DNA, 33 bp, Homo sapien
tctcaaatatgacctgcaacaatgtatcatgcc

SEQ ID NO: 624340 - DNA, 33 bp, Homo sapien
tctcaaatatgacctgtaacaatgtatcatgcc

SEQ ID NO: 624341 - DNA, 33 bp, Homo sapien
agtgtagtaattaagaagcaaaggaccagacat

SEQ ID NO: 624342 - DNA, 33 bp, Homo sapien
agtgtagtaattaagaggcaaaggaccagacat

SEQ ID NO: 624343 - DNA, 33 bp, Homo sapien
gagtatttaaagtgaaattcaagctatttaaag

SEQ ID NO: 624344 - DNA, 33 bp, Homo sapien
gagtatttaaagtgaacttcaagctatttaaag

SEQ ID NO: 624345 - DNA, 33 bp, Homo sapien
atagcaaatgccttgaagtgctctgatactgag

SEQ ID NO: 624346 - DNA, 33 bp, Homo sapien
atagcaaatgccttgaggtgctctgatactgag

SEQ ID NO: 624347 - DNA, 33 bp, Homo sapien
aggcatgaggtttatccgaggccaagagtttga

SEQ ID NO: 624348 - DNA, 33 bp, Homo sapien
aggcatgaggtttatctgaggccaagagtttga

SEQ ID NO: 624349 - DNA, 33 bp, Homo sapien
ttctcatggttagatgcagattatggcttttat

SEQ ID NO: 624350 - DNA, 33 bp, Homo sapien
ttctcatggttagatggagattatggcttttat

SEQ ID NO: 624351 - DNA, 33 bp, Homo sapien
attaactgaaaaaacaggaatagagcctcagga

SEQ ID NO: 624352 - DNA, 33 bp, Homo sapien
attaactgaaaaaacatgaatagagcctcagga

SEQ ID NO: 624353 - DNA, 33 bp, Homo sapien
acaattgaaatgaacactgtgcctgaaagtctc

SEQ ID NO: 624354 - DNA, 33 bp, Homo sapien
acaattgaaatgaacattgtgcctgaaagtctc

SEQ ID NO: 624355 - DNA, 33 bp, Homo sapien
tcatcagggaagtaataaaatagagatcagtgg

SEQ ID NO: 624356 - DNA, 33 bp, Homo sapien
tcatcagggaagtaatgaaatagagatcagtgg

SEQ ID NO: 624357 - DNA, 33 bp, Homo sapien
tgataaagatgttgagaaaatgttcaggaaaat

SEQ ID NO: 624358 - DNA, 33 bp, Homo sapien
tgataaagatgttgagcaaatgttcaggaaaat

SEQ ID NO: 624359 - DNA, 33 bp, Homo sapien
caaatttatgccagaaatcaagttcagttcctg

SEQ ID NO: 624360 - DNA, 33 bp, Homo sapien
caaatttatgccagaagtcaagttcagttcctg

SEQ ID NO: 624361 - DNA, 33 bp, Homo sapien
agatagctgagatagaataacaatggacaacag

SEQ ID NO: 624362 - DNA, 33 bp, Homo sapien
agatagctgagatagagtaacaatggacaacag

SEQ ID NO: 624363 - DNA, 33 bp, Homo sapien
tgaccacattagccacaatccacagctagagga

SEQ ID NO: 624364 - DNA, 33 bp, Homo sapien
tgaccacattagccacgatccacagctagagga

SEQ ID NO: 624365 - DNA, 33 bp, Homo sapien
ggactttgtgagagaacagtgtttgatggccag

SEQ ID NO: 624366 - DNA, 33 bp, Homo sapien
ggactttgtgagagaatagtgtttgatggccag

SEQ ID NO: 624367 - DNA, 33 bp, Homo sapien; identical to SEQ ID NO: 624365

SEQ ID NO: 624368 - DNA, 33 bp, Homo sapien; identical to SEQ ID NO: 624366

SEQ ID NO: 624369 - DNA, 33 bp, Homo sapien
tcagctctaggcccaaggaaactcgattctaat

SEQ ID NO: 624370 - DNA, 33 bp, Homo sapien
tcagctctaggcccaatgaaactcgattctaat

SEQ ID NO: 624371 - DNA, 33 bp, Homo sapien
aagataaccagaattacatttggatcttccaaa

SEQ ID NO: 624372 - DNA, 33 bp, Homo sapien
aagataaccagaattagatttggatcttccaaa

SEQ ID NO: 624373 - DNA, 33 bp, Homo sapien
aaatctgtgttcttctcaaagacagtttttaca

SEQ ID NO: 624374 - DNA, 33 bp, Homo sapien
aaatctgtgttcttctgaaagacagtttttaca

SEQ ID NO: 624375 - DNA, 33 bp, Homo sapien
taggcctgtggttcgacggccattctgtctttg

SEQ ID NO: 624376 - DNA, 33 bp, Homo sapien
taggcctgtggttcgatggccattctgtctttg

SEQ ID NO: 624377 - DNA, 33 bp, Homo sapien
ggtgagctcagaacacagcgttttgtatgtcaa

SEQ ID NO: 624378 - DNA, 33 bp, Homo sapien
ggtgagctcagaacacggcgttttgtatgtcaa

SEQ ID NO: 624379 - DNA, 33 bp, Homo sapien
gcttttccaggaccaaatatgcaagcttcccct

SEQ ID NO: 624380 - DNA, 33 bp, Homo sapien
gcttttccaggaccaagtatgcaagcttcccct

SEQ ID NO: 624381 - DNA, 33 bp, Homo sapien
cacctccctgcaagaaagttaataaactgtata

SEQ ID NO: 624382 - DNA, 33 bp, Homo sapien
cacctccctgcaagaatgttaataaactgtata

SEQ ID NO: 624383 - DNA, 33 bp, Homo sapien
ttgtcttaacttgtcaccagcaataaacaaact

SEQ ID NO: 624384 - DNA, 33 bp, Homo sapien
ttgtcttaacttgtcatcagcaataaacaaact

SEQ ID NO: 624385 - DNA, 33 bp, Homo sapien
catctatccagcatgacaaacattaagcatgaa

SEQ ID NO: 624386 - DNA, 33 bp, Homo sapien
catctatccagcatgataaacattaagcatgaa

SEQ ID NO: 624387 - DNA, 33 bp, Homo sapien
tcaagcatgattgaaactcagttacctctggat

SEQ ID NO: 624388 - DNA, 33 bp, Homo sapien
tcaagcatgattgaaattcagttacctctggat

SEQ ID NO: 624389 - DNA, 33 bp, Homo sapien
aagtgaaatgtaaaaacatgagcaaagctaatt

SEQ ID NO: 624390 - DNA, 33 bp, Homo sapien
aagtgaaatgtaaaaatatgagcaaagctaatt

SEQ ID NO: 624391 - DNA, 33 bp, Homo sapien
actcatctttgaggaaagttacaaaagataatg

SEQ ID NO: 624392 - DNA, 33 bp, Homo sapien
actcatctttgaggaatgttacaaaagataatg

SEQ ID NO: 624393 - DNA, 33 bp, Homo sapien
ggtgaatgatgatttcaaatccttcaccatttt

SEQ ID NO: 624394 - DNA, 33 bp, Homo sapien
ggtgaatgatgatttcgaatccttcaccatttt

SEQ ID NO: 624395 - DNA, 33 bp, Homo sapien
aattaatagatacccacgctagattgaaaatgt

SEQ ID NO: 624396 - DNA, 33 bp, Homo sapien
aattaatagatacccatgctagattgaaaatgt

SEQ ID NO: 624397 - DNA, 33 bp, Homo sapien
caaaatcactaatcacaagagacatacaaatta

SEQ ID NO: 624398 - DNA, 33 bp, Homo sapien
caaaatcactaatcacgagagacatacaaatta

SEQ ID NO: 624399 - DNA, 33 bp, Homo sapien
agcacttatggaatcccgaacctatttagttaa

SEQ ID NO: 624400 - DNA, 33 bp, Homo sapien
agcacttatggaatcctgaacctatttagttaa

SEQ ID NO: 624401 - DNA, 33 bp, Homo sapien
ccataagtgctgagaaaggggaatgactattgg

SEQ ID NO: 624402 - DNA, 33 bp, Homo sapien
ccataagtgctgagaagggggaatgactattgg

SEQ ID NO: 624403 - DNA, 33 bp, Homo sapien
aaataatagggttaaaataggactccatgcaat

SEQ ID NO: 624404 - DNA, 33 bp, Homo sapien
aaataatagggttaaagtaggactccatgcaat

SEQ ID NO: 624405 - DNA, 33 bp, Homo sapien
ctgtggcaatgtttcaatacagaagagggtgga

SEQ ID NO: 624406 - DNA, 33 bp, Homo sapien
ctgtggcaatgtttcagtacagaagagggtgga

SEQ ID NO: 624407 - DNA, 33 bp, Homo sapien
atttccacatatatcactagtcacccaggtccc

SEQ ID NO: 624408 - DNA, 33 bp, Homo sapien
atttccacatatatcattagtcacccaggtccc

SEQ ID NO: 624409 - DNA, 33 bp, Homo sapien
actgtacaaatcctagaagaaccgaacttagag

SEQ ID NO: 624410 - DNA, 33 bp, Homo sapien
actgtacaaatcctaggagaaccgaacttagag

SEQ ID NO: 624411 - DNA, 33 bp, Homo sapien
caagtactgctattaactaaccagttgaagaaa

SEQ ID NO: 624412 - DNA, 33 bp, Homo sapien
caagtactgctattaattaaccagttgaagaaa

SEQ ID NO: 624413 - DNA, 33 bp, Homo sapien
gaacagaggtggtaaacaggtgatgcacatact

SEQ ID NO: 624414 - DNA, 33 bp, Homo sapien
gaacagaggtggtaaataggtgatgcacatact

SEQ ID NO: 624415 - DNA, 33 bp, Homo sapien
gttgtaacggaagataagctctttgaacagaat

SEQ ID NO: 624416 - DNA, 33 bp, Homo sapien
gttgtaacggaagataggctctttgaacagaat

SEQ ID NO: 624417 - DNA, 33 bp, Homo sapien
atgggaaacatttaaacgatgtgtagatgatga

SEQ ID NO: 624418 - DNA, 33 bp, Homo sapien
atgggaaacatttaaatgatgtgtagatgatga

SEQ ID NO: 624419 - DNA, 33 bp, Homo sapien
gtgagcagatattgggacaaccagtaacctgtc

SEQ ID NO: 624420 - DNA, 33 bp, Homo sapien
gtgagcagatattggggcaaccagtaacctgtc

SEQ ID NO: 624421 - DNA, 33 bp, Homo sapien
cacagtattctggcaaggggggagaaacagcat

SEQ ID NO: 624422 - DNA, 33 bp, Homo sapien
cacagtattctggcaatgggggagaaacagcat

SEQ ID NO: 624423 - DNA, 33 bp, Homo sapien
tgtttctttccttgtcaaatctttttcaccagc

SEQ ID NO: 624424 - DNA, 33 bp, Homo sapien
tgtttctttccttgtcgaatctttttcaccagc

SEQ ID NO: 624425 - DNA, 33 bp, Homo sapien
catgttactaccatccacatcaaggtatagaac

SEQ ID NO: 624426 - DNA, 33 bp, Homo sapien
catgttactaccatccgcatcaaggtatagaac

SEQ ID NO: 624427 - DNA, 33 bp, Homo sapien
gttttgctttggaatacaaaagggatgagagaa

SEQ ID NO: 624428 - DNA, 33 bp, Homo sapien
gttttgctttggaatagaaaagggatgagagaa

SEQ ID NO: 624429 - DNA, 33 bp, Homo sapien
acaggtacatcttcaacagaaatggaggcctgt

SEQ ID NO: 624430 - DNA, 33 bp, Homo sapien
acaggtacatcttcaagagaaatggaggcctgt

SEQ ID NO: 624431 - DNA, 33 bp, Homo sapien
gttattttatttcacacagcttgacattgggaa

SEQ ID NO: 624432 - DNA, 33 bp, Homo sapien
gttattttatttcacatagcttgacattgggaa

SEQ ID NO: 624433 - DNA, 33 bp, Homo sapien
ctttgcaaattataagaaaagaaagttcagtgt

SEQ ID NO: 624434 - DNA, 33 bp, Homo sapien
ctttgcaaattataaggaaagaaagttcagtgt

SEQ ID NO: 624435 - DNA, 33 bp, Homo sapien
ctcactcaggctggaaatgttgggttcttattc

SEQ ID NO: 624436 - DNA, 33 bp, Homo sapien
ctcactcaggctggaagtgttgggttcttattc

SEQ ID NO: 624437 - DNA, 33 bp, Homo sapien
tgtaaaaacgatagaaaatattaaccattgtca

SEQ ID NO: 624438 - DNA, 33 bp, Homo sapien
tgtaaaaacgatagaacatattaaccattgtca

SEQ ID NO: 624439 - DNA, 33 bp, Homo sapien
gtttaaggcactctctaaatcagaagacagctg

SEQ ID NO: 624440 - DNA, 33 bp, Homo sapien
gtttaaggcactctctgaatcagaagacagctg

SEQ ID NO: 624441 - DNA, 33 bp, Homo sapien
tcaggacacttgacgacctgtctggccctggct

SEQ ID NO: 624442 - DNA, 33 bp, Homo sapien
tcaggacacttgacgagctgtctggccctggct

SEQ ID NO: 624443 - DNA, 33 bp, Homo sapien
agtacactgaatcagacactaaaaatgacactg

SEQ ID NO: 624444 - DNA, 33 bp, Homo sapien
agtacactgaatcagatactaaaaatgacactg

SEQ ID NO: 624445 - DNA, 33 bp, Homo sapien
ttaaagcatcaatgcaacaaaataatcataaag

SEQ ID NO: 624446 - DNA, 33 bp, Homo sapien
ttaaagcatcaatgcatcaaaataatcataaag

SEQ ID NO: 624447 - DNA, 33 bp, Homo sapien
caaaatctgttaacacactagagccagacgcat

SEQ ID NO: 624448 - DNA, 33 bp, Homo sapien
caaaatctgttaacacgctagagccagacgcat

SEQ ID NO: 624449 - DNA, 33 bp, Homo sapien
tacaatctctgaatctcagaatagtagcctaga

SEQ ID NO: 624450 - DNA, 33 bp, Homo sapien
tacaatctctgaatctgagaatagtagcctaga

SEQ ID NO: 624451 - DNA, 33 bp, Homo sapien
acatgaatattcttgcaaagtgaaaaaaaccta

SEQ ID NO: 624452 - DNA, 33 bp, Homo sapien
acatgaatattcttgcgaagtgaaaaaaaccta

SEQ ID NO: 624453 - DNA, 33 bp, Homo sapien
acgaataataacaataacagctagccttttatg

SEQ ID NO: 624454 - DNA, 33 bp, Homo sapien
acgaataataacaatagcagctagccttttatg

SEQ ID NO: 624455 - DNA, 33 bp, Homo sapien
cccctctgtgttttgacgacaggattgtactct

SEQ ID NO: 624456 - DNA, 33 bp, Homo sapien
cccctctgtgttttgatgacaggattgtactct

SEQ ID NO: 624457 - DNA, 33 bp, Homo sapien
atctaactgtccatcaataaaggaatagattaa

SEQ ID NO: 624458 - DNA, 33 bp, Homo sapien
atctaactgtccatcagtaaaggaatagattaa

SEQ ID NO: 624459 - DNA, 33 bp, Homo sapien
gtatgaatgagattacaaaaagtgaggatatca

SEQ ID NO: 624460 - DNA, 33 bp, Homo sapien
gtatgaatgagattaccaaaagtgaggatatca

SEQ ID NO: 624461 - DNA, 33 bp, Homo sapien
tttgctttagttaacccagttggcttttgtttt

SEQ ID NO: 624462 - DNA, 33 bp, Homo sapien
tttgctttagttaacctagttggcttttgtttt

SEQ ID NO: 624463 - DNA, 33 bp, Homo sapien
cttgcactgaacaacagcatggtcccaaggaaa

SEQ ID NO: 624464 - DNA, 33 bp, Homo sapien
cttgcactgaacaacatcatggtcccaaggaaa

SEQ ID NO: 624465 - DNA, 33 bp, Homo sapien
tatatacagttttctaaaggatgctccatctat

SEQ ID NO: 624466 - DNA, 33 bp, Homo sapien
tatatacagttttctataggatgctccatctat

SEQ ID NO: 624467 - DNA, 33 bp, Homo sapien
cattaagcccttacaacctcctgcactaaagtt

SEQ ID NO: 624468 - DNA, 33 bp, Homo sapien
cattaagcccttacaatctcctgcactaaagtt

SEQ ID NO: 624469 - DNA, 33 bp, Homo sapien
ttaggtttgtcactcaatagcttctgcattcag

SEQ ID NO: 624470 - DNA, 33 bp, Homo sapien
ttaggtttgtcactcagtagcttctgcattcag

SEQ ID NO: 624471 - DNA, 33 bp, Homo sapien
atgaccagatactcccccaaagagttcacagtc

SEQ ID NO: 624472 - DNA, 33 bp, Homo sapien
atgaccagatactcccgcaaagagttcacagtc

SEQ ID NO: 624473 - DNA, 33 bp, Homo sapien
ctttggggttgaggccacaaacaccgtctcaca

SEQ ID NO: 624474 - DNA, 33 bp, Homo sapien
ctttggggttgaggccgcaaacaccgtctcaca

SEQ ID NO: 624475 - DNA, 33 bp, Homo sapien
ttcttctagtctccaggaaaagtgaaagccttt

SEQ ID NO: 624476 - DNA, 33 bp, Homo sapien
ttcttctagtctccagtaaaagtgaaagccttt

SEQ ID NO: 624477 - DNA, 33 bp, Homo sapien
aacaaccaatccaaaacggcagagatcagcaag

SEQ ID NO: 624478 - DNA, 33 bp, Homo sapien
aacaaccaatccaaaatggcagagatcagcaag

SEQ ID NO: 624479 - DNA, 33 bp, Homo sapien
ctgaaaatgaaatggaaccaagagctttttttc

SEQ ID NO: 624480 - DNA, 33 bp, Homo sapien
ctgaaaatgaaatggagccaagagctttttttc

SEQ ID NO: 624481 - DNA, 33 bp, Homo sapien
attgagaaggggtaaccggtaagcaatgaggga

SEQ ID NO: 624482 - DNA, 33 bp, Homo sapien
attgagaaggggtaactggtaagcaatgaggga

SEQ ID NO: 624483 - DNA, 33 bp, Homo sapien
attattggaaatcaaaatacagaaatatcaatg

SEQ ID NO: 624484 - DNA, 33 bp, Homo sapien
attattggaaatcaaagtacagaaatatcaatg

SEQ ID NO: 624485 - DNA, 33 bp, Homo sapien
tcagcaggctacaaagacaactgcatttcatta

SEQ ID NO: 624486 - DNA, 33 bp, Homo sapien
tcagcaggctacaaaggcaactgcatttcatta

SEQ ID NO: 624487 - DNA, 33 bp, Homo sapien
atgagcaagtattcaaactatgataaggaagga

SEQ ID NO: 624488 - DNA, 33 bp, Homo sapien
atgagcaagtattcaagctatgataaggaagga

SEQ ID NO: 624489 - DNA, 33 bp, Homo sapien
ttagtgaagctgccgacactgtaatttagataa

SEQ ID NO: 624490 - DNA, 33 bp, Homo sapien
ttagtgaagctgccgatactgtaatttagataa

SEQ ID NO: 624491 - DNA, 33 bp, Homo sapien
tatcaacattcttctcaagtggattatgtggta

SEQ ID NO: 624492 - DNA, 33 bp, Homo sapien
tatcaacattcttctcgagtggattatgtggta

SEQ ID NO: 624493 - DNA, 33 bp, Homo sapien
aaatagcatcaaaataaaaacagaatcattgga

SEQ ID NO: 624494 - DNA, 33 bp, Homo sapien
aaatagcatcaaaatacaaacagaatcattgga

SEQ ID NO: 624495 - DNA, 33 bp, Homo sapien
tgaatttttttaacaaaggcacaggattataga

SEQ ID NO: 624496 - DNA, 33 bp, Homo sapien
tgaatttttttaacaagggcacaggattataga

SEQ ID NO: 624497 - DNA, 33 bp, Homo sapien
cagaaaacaagcaaacggtagataccggcaatt

SEQ ID NO: 624498 - DNA, 33 bp, Homo sapien
cagaaaacaagcaaactgtagataccggcaatt

SEQ ID NO: 624499 - DNA, 33 bp, Homo sapien
tccatatgtgaagtgaagtgctctgaatagaaa

SEQ ID NO: 624500 - DNA, 33 bp, Homo sapien
tccatatgtgaagtgacgtgctctgaatagaaa

SEQ ID NO: 624501 - DNA, 33 bp, Homo sapien
ttttcatgccatgatacaacacttggaagtacc

SEQ ID NO: 624502 - DNA, 33 bp, Homo sapien
ttttcatgccatgatataacacttggaagtacc

SEQ ID NO: 624503 - DNA, 33 bp, Homo sapien
ctctccttttttgctgcaaaccttttgattgtc

SEQ ID NO: 624504 - DNA, 33 bp, Homo sapien
ctctccttttttgctggaaaccttttgattgtc

SEQ ID NO: 624505 - DNA, 33 bp, Homo sapien
ctaataaagcaacaaaactattttatgtcatgg

SEQ ID NO: 624506 - DNA, 33 bp, Homo sapien
ctaataaagcaacaaatctattttatgtcatgg

SEQ ID NO: 624507 - DNA, 33 bp, Homo sapien
aacaattatgcttagactaacattcttacactt

SEQ ID NO: 624508 - DNA, 33 bp, Homo sapien
aacaattatgcttagagtaacattcttacactt

SEQ ID NO: 624509 - DNA, 33 bp, Homo sapien
gagaatcactattttaagtagatccagaccatc

SEQ ID NO: 624510 - DNA, 33 bp, Homo sapien
gagaatcactattttacgtagatccagaccatc

SEQ ID NO: 624511 - DNA, 33 bp, Homo sapien
aaatgaggtatatgaacaaagcacactaaatga

SEQ ID NO: 624512 - DNA, 33 bp, Homo sapien
aaatgaggtatatgaagaaagcacactaaatga

SEQ ID NO: 624513 - DNA, 33 bp, Homo sapien
agttagggcgattagcaaaggtatctctgagga

SEQ ID NO: 624514 - DNA, 33 bp, Homo sapien
agttagggcgattagcgaaggtatctctgagga

SEQ ID NO: 624515 - DNA, 33 bp, Homo sapien
aatcaaggaattccaacatcgtgttttgggtct

SEQ ID NO: 624516 - DNA, 33 bp, Homo sapien
aatcaaggaattccaatatcgtgttttgggtct

SEQ ID NO: 624517 - DNA, 33 bp, Homo sapien
actttcataggctctaacaatttcatgggacct

SEQ ID NO: 624518 - DNA, 33 bp, Homo sapien
actttcataggctctagcaatttcatgggacct

SEQ ID NO: 624519 - DNA, 33 bp, Homo sapien
atcacaagagtagcacagaattttgagtccatt

SEQ ID NO: 624520 - DNA, 33 bp, Homo sapien
atcacaagagtagcacggaattttgagtccatt

SEQ ID NO: 624521 - DNA, 33 bp, Homo sapien
agtatatttgaatagaaagtttcagtacagcgt

SEQ ID NO: 624522 - DNA, 33 bp, Homo sapien
agtatatttgaatagagagtttcagtacagcgt

SEQ ID NO: 624523 - DNA, 33 bp, Homo sapien
gcactgttcattagcagaaaggagggatcttaa

SEQ ID NO: 624524 - DNA, 33 bp, Homo sapien
gcactgttcattagcataaaggagggatcttaa

SEQ ID NO: 624525 - DNA, 33 bp, Homo sapien
ctcaaatgaagcactgcaggcataaatgaataa

SEQ ID NO: 624526 - DNA, 33 bp, Homo sapien
ctcaaatgaagcactgtaggcataaatgaataa

SEQ ID NO: 624527 - DNA, 33 bp, Homo sapien
atgcaactgtttttcaagaaagtttccaagcat

SEQ ID NO: 624528 - DNA, 33 bp, Homo sapien
atgcaactgtttttcaggaaagtttccaagcat

SEQ ID NO: 624529 - DNA, 33 bp, Homo sapien
atacatttaggcatgacgtcagataacagggat

SEQ ID NO: 624530 - DNA, 33 bp, Homo sapien
atacatttaggcatgatgtcagataacagggat

SEQ ID NO: 624531 - DNA, 33 bp, Homo sapien
gttgagccacaggaatcagttattattaatgtc

SEQ ID NO: 624532 - DNA, 33 bp, Homo sapien
gttgagccacaggaattagttattattaatgtc

SEQ ID NO: 624533 - DNA, 33 bp, Homo sapien
ttcagggtcaagtttacatagcctgaaaatgtt

SEQ ID NO: 624534 - DNA, 33 bp, Homo sapien
ttcagggtcaagtttatatagcctgaaaatgtt

SEQ ID NO: 624535 - DNA, 33 bp, Homo sapien
agtattaggttctatacgtccagaatgcattaa

SEQ ID NO: 624536 - DNA, 33 bp, Homo sapien
agtattaggttctatatgtccagaatgcattaa

SEQ ID NO: 624537 - DNA, 33 bp, Homo sapien
attaatagcaagattacaagtattaggttctat

SEQ ID NO: 624538 - DNA, 33 bp, Homo sapien
attaatagcaagattataagtattaggttctat

SEQ ID NO: 624539 - DNA, 33 bp, Homo sapien
agctctttgaatccccactgcttcccttgcttg

SEQ ID NO: 624540 - DNA, 33 bp, Homo sapien
agctctttgaatccccgctgcttcccttgcttg

SEQ ID NO: 624541 - DNA, 33 bp, Homo sapien
aacatcaaactattctcaaggtccagaagttct

SEQ ID NO: 624542 - DNA, 33 bp, Homo sapien
aacatcaaactattctgaaggtccagaagttct

SEQ ID NO: 624543 - DNA, 33 bp, Homo sapien
tgtcctgggtggtgacacggattagagacaata

SEQ ID NO: 624544 - DNA, 33 bp, Homo sapien
tgtcctgggtggtgacgcggattagagacaata

SEQ ID NO: 624545 - DNA, 33 bp, Homo sapien
attcactccggagaacaatcctctgcaatttat

SEQ ID NO: 624546 - DNA, 33 bp, Homo sapien
attcactccggagaacgatcctctgcaatttat

SEQ ID NO: 624547 - DNA, 33 bp, Homo sapien
tcctctgcaatttatccaatccactgtgtgcca

SEQ ID NO: 624548 - DNA, 33 bp, Homo sapien
tcctctgcaatttatctaatccactgtgtgcca

SEQ ID NO: 624549 - DNA, 33 bp, Homo sapien
gaagaagggaggtgtaaaagatgtctgccagat

SEQ ID NO: 624550 - DNA, 33 bp, Homo sapien
gaagaagggaggtgtagaagatgtctgccagat

SEQ ID NO: 624551 - DNA, 33 bp, Homo sapien
gagacctaggtggaggaagtcaaaggaaggatg

SEQ ID NO: 624552 - DNA, 33 bp, Homo sapien
gagacctaggtggaggtagtcaaaggaaggatg

SEQ ID NO: 624553 - DNA, 33 bp, Homo sapien
gttgtcttttgcctacaggcttttataactgct

SEQ ID NO: 624554 - DNA, 33 bp, Homo sapien
gttgtcttttgcctacgggcttttataactgct

SEQ ID NO: 624555 - DNA, 33 bp, Homo sapien
agtctcatcatgtagaacttgactagcatttaa

SEQ ID NO: 624556 - DNA, 33 bp, Homo sapien
agtctcatcatgtagagcttgactagcatttaa

SEQ ID NO: 624557 - DNA, 33 bp, Homo sapien
ttatccacctgtttaacattccataaggacaaa

SEQ ID NO: 624558 - DNA, 33 bp, Homo sapien
ttatccacctgtttaagattccataaggacaaa

SEQ ID NO: 624559 - DNA, 33 bp, Homo sapien
agagtcctggagagaggaactatggcatagaga

SEQ ID NO: 624560 - DNA, 33 bp, Homo sapien
agagtcctggagagagtaactatggcatagaga

SEQ ID NO: 624561 - DNA, 33 bp, Homo sapien
catttgtctcttaagtaaaaaccaataattaaa

SEQ ID NO: 624562 - DNA, 33 bp, Homo sapien
catttgtctcttaagtcaaaaccaataattaaa

SEQ ID NO: 624563 - DNA, 33 bp, Homo sapien
atataccctggaatgaagatatacttgaaataa

SEQ ID NO: 624564 - DNA, 33 bp, Homo sapien
atataccctggaatgatgatatacttgaaataa

SEQ ID NO: 624565 - DNA, 33 bp, Homo sapien
aaagattgtgcatgaccccatgaactattgttt

SEQ ID NO: 624566 - DNA, 33 bp, Homo sapien
aaagattgtgcatgacgccatgaactattgttt

SEQ ID NO: 624567 - DNA, 33 bp, Homo sapien
cagctgctacagtacacggaatttctcttttag

SEQ ID NO: 624568 - DNA, 33 bp, Homo sapien
cagctgctacagtacatggaatttctcttttag

SEQ ID NO: 624569 - DNA, 33 bp, Homo sapien
atacattatattgagcacatttccttcatttca

SEQ ID NO: 624570 - DNA, 33 bp, Homo sapien
atacattatattgagcgcatttccttcatttca

SEQ ID NO: 624571 - DNA, 33 bp, Homo sapien
gactggccagaggactgaattttatctgagctt

SEQ ID NO: 624572 - DNA, 33 bp, Homo sapien
gactggccagaggacttaattttatctgagctt

SEQ ID NO: 624573 - DNA, 33 bp, Homo sapien
cacttgttgcctctcacctctagtgccacctgc

SEQ ID NO: 624574 - DNA, 33 bp, Homo sapien
cacttgttgcctctcagctctagtgccacctgc

SEQ ID NO: 624575 - DNA, 33 bp, Homo sapien
tgctccattaccatccccaaatgccaaagaatg

SEQ ID NO: 624576 - DNA, 33 bp, Homo sapien
tgctccattaccatcctcaaatgccaaagaatg

SEQ ID NO: 624577 - DNA, 33 bp, Homo sapien
cctttcatttcttacaactagaggagataaaat

SEQ ID NO: 624578 - DNA, 33 bp, Homo sapien
cctttcatttcttacagctagaggagataaaat

SEQ ID NO: 624579 - DNA, 33 bp, Homo sapien
attatcaaaatgactactacctcatgcctatta

SEQ ID NO: 624580 - DNA, 33 bp, Homo sapien
attatcaaaatgactattacctcatgcctatta

SEQ ID NO: 624581 - DNA, 33 bp, Homo sapien
caagatttcagggtacagatgcccttacacata

SEQ ID NO: 624582 - DNA, 33 bp, Homo sapien
caagatttcagggtacggatgcccttacacata

SEQ ID NO: 624583 - DNA, 33 bp, Homo sapien
gcaatgttactagaaagacaacttatcaaaaca

SEQ ID NO: 624584 - DNA, 33 bp, Homo sapien
gcaatgttactagaaatacaacttatcaaaaca

SEQ ID NO: 624585 - DNA, 33 bp, Homo sapien
aggtctagatgcactacaattcgcattctaatg

SEQ ID NO: 624586 - DNA, 33 bp, Homo sapien
aggtctagatgcactataattcgcattctaatg

SEQ ID NO: 624587 - DNA, 33 bp, Homo sapien
acaaatatgaaatgaccgccttgctgttatgct

SEQ ID NO: 624588 - DNA, 33 bp, Homo sapien
acaaatatgaaatgactgccttgctgttatgct

SEQ ID NO: 624589 - DNA, 33 bp, Homo sapien
atagaggaaggataccaaaggcagcttgggcta

SEQ ID NO: 624590 - DNA, 33 bp, Homo sapien
atagaggaaggatacctaaggcagcttgggcta

SEQ ID NO: 624591 - DNA, 33 bp, Homo sapien
ggttgatctatgatatcagtgctctttaaatct

SEQ ID NO: 624592 - DNA, 33 bp, Homo sapien
ggttgatctatgatatgagtgctctttaaatct

SEQ ID NO: 624593 - DNA, 33 bp, Homo sapien
ccaagagctaacctagacagggaaccctctata

SEQ ID NO: 624594 - DNA, 33 bp, Homo sapien
ccaagagctaacctaggcagggaaccctctata

SEQ ID NO: 624595 - DNA, 33 bp, Homo sapien
aagacttgaggattaccactaaggacttttcag

SEQ ID NO: 624596 - DNA, 33 bp, Homo sapien
aagacttgaggattactactaaggacttttcag

SEQ ID NO: 624597 - DNA, 33 bp, Homo sapien
cctagtacatttatcactacttgttacttaata

SEQ ID NO: 624598 - DNA, 33 bp, Homo sapien
cctagtacatttatcattacttgttacttaata

SEQ ID NO: 624599 - DNA, 33 bp, Homo sapien
acctggcttcagcgtcaattctcctaaccacta

SEQ ID NO: 624600 - DNA, 33 bp, Homo sapien
acctggcttcagcgtcgattctcctaaccacta

SEQ ID NO: 624601 - DNA, 33 bp, Homo sapien
atgacagtgggaacccagacaactgataatggg

SEQ ID NO: 624602 - DNA, 33 bp, Homo sapien
atgacagtgggaacccggacaactgataatggg

SEQ ID NO: 624603 - DNA, 33 bp, Homo sapien
gccaaatcagattttacgtaagttcctagcctt

SEQ ID NO: 624604 - DNA, 33 bp, Homo sapien
gccaaatcagattttatgtaagttcctagcctt

SEQ ID NO: 624605 - DNA, 33 bp, Homo sapien
ctgtaagcataccctgaaacaaattatttatat

SEQ ID NO: 624606 - DNA, 33 bp, Homo sapien
ctgtaagcataccctggaacaaattatttatat

SEQ ID NO: 624607 - DNA, 33 bp, Homo sapien
tttcaaaatcacaacactctttaattccattgt

SEQ ID NO: 624608 - DNA, 33 bp, Homo sapien
tttcaaaatcacaacattctttaattccattgt

SEQ ID NO: 624609 - DNA, 33 bp, Homo sapien
tcattttgtacatataagcaggagaagaattgc

SEQ ID NO: 624610 - DNA, 33 bp, Homo sapien
tcattttgtacatataggcaggagaagaattgc

SEQ ID NO: 624611 - DNA, 33 bp, Homo sapien
actgaatcaggctgtaaattttgacaagatccc

SEQ ID NO: 624612 - DNA, 33 bp, Homo sapien
actgaatcaggctgtacattttgacaagatccc

SEQ ID NO: 624613 - DNA, 33 bp, Homo sapien
gccagaggagatccaacttctcagaagggtgag

SEQ ID NO: 624614 - DNA, 33 bp, Homo sapien
gccagaggagatccaatttctcagaagggtgag

SEQ ID NO: 624615 - DNA, 33 bp, Homo sapien
tgactgcatgagcaagaccaacatattaataaa

SEQ ID NO: 624616 - DNA, 33 bp, Homo sapien
tgactgcatgagcaagcccaacatattaataaa

SEQ ID NO: 624617 - DNA, 33 bp, Homo sapien
ttcagtggctcacctcaaaacttctaaatgaga

SEQ ID NO: 624618 - DNA, 33 bp, Homo sapien
ttcagtggctcacctcgaaacttctaaatgaga

SEQ ID NO: 624619 - DNA, 33 bp, Homo sapien
tgaagttgccaagaacagtaacagccaaaattc

SEQ ID NO: 624620 - DNA, 33 bp, Homo sapien
tgaagttgccaagaacggtaacagccaaaattc

SEQ ID NO: 624621 - DNA, 33 bp, Homo sapien
ccccttggctatccagaatccatgacatcaata

SEQ ID NO: 624622 - DNA, 33 bp, Homo sapien
ccccttggctatccagcatccatgacatcaata

SEQ ID NO: 624623 - DNA, 33 bp, Homo sapien
tttagaaacactagaacgggtctacatattaaa

SEQ ID NO: 624624 - DNA, 33 bp, Homo sapien
tttagaaacactagaatgggtctacatattaaa

SEQ ID NO: 624625 - DNA, 33 bp, Homo sapien
atctcaggcttaacagacatctttcttatttgc

SEQ ID NO: 624626 - DNA, 33 bp, Homo sapien
atctcaggcttaacaggcatctttcttatttgc

SEQ ID NO: 624627 - DNA, 33 bp, Homo sapien
tagagtaaatctcagtcaagcaatcacaaaaga

SEQ ID NO: 624628 - DNA, 33 bp, Homo sapien
tagagtaaatctcagttaagcaatcacaaaaga

SEQ ID NO: 624629 - DNA, 33 bp, Homo sapien
gaaaaatgggatacaaacaaatgatagcatata

SEQ ID NO: 624630 - DNA, 33 bp, Homo sapien
gaaaaatgggatacaagcaaatgatagcatata

SEQ ID NO: 624631 - DNA, 33 bp, Homo sapien
tagtattttaggtacaatggtcaggaaaagcct

SEQ ID NO: 624632 - DNA, 33 bp, Homo sapien
tagtattttaggtacagtggtcaggaaaagcct

SEQ ID NO: 624633 - DNA, 33 bp, Homo sapien
attatagttggttaaaagttggggccaggaaag

SEQ ID NO: 624634 - DNA, 33 bp, Homo sapien
attatagttggttaaacgttggggccaggaaag

SEQ ID NO: 624635 - DNA, 33 bp, Homo sapien
ttttaacactgagaaaactacagactaccgagg

SEQ ID NO: 624636 - DNA, 33 bp, Homo sapien
ttttaacactgagaaacctacagactaccgagg

SEQ ID NO: 624637 - DNA, 33 bp, Homo sapien
tattaaggcaaacacaagtcctttaatttttag

SEQ ID NO: 624638 - DNA, 33 bp, Homo sapien
tattaaggcaaacacaggtcctttaatttttag

SEQ ID NO: 624639 - DNA, 33 bp, Homo sapien
acagtctgatctctaaataaatcccttaatgct

SEQ ID NO: 624640 - DNA, 33 bp, Homo sapien
acagtctgatctctaagtaaatcccttaatgct

SEQ ID NO: 624641 - DNA, 33 bp, Homo sapien
catgtctaactccaaaaccattaatgtattaga

SEQ ID NO: 624642 - DNA, 33 bp, Homo sapien
catgtctaactccaaagccattaatgtattaga

SEQ ID NO: 624643 - DNA, 33 bp, Homo sapien
cttttccacctgtataaatttctcccaaccagc

SEQ ID NO: 624644 - DNA, 33 bp, Homo sapien
cttttccacctgtatatatttctcccaaccagc

SEQ ID NO: 624645 - DNA, 33 bp, Homo sapien
atggggcagaactttaaactcttatgccctctg

SEQ ID NO: 624646 - DNA, 33 bp, Homo sapien
atggggcagaactttagactcttatgccctctg

SEQ ID NO: 624647 - DNA, 33 bp, Homo sapien
cttctgataagttataagttgtcctttccaact

SEQ ID NO: 624648 - DNA, 33 bp, Homo sapien
cttctgataagttataggttgtcctttccaact

SEQ ID NO: 624649 - DNA, 33 bp, Homo sapien
gtatctaatctaacggccattcatttgcaagga

SEQ ID NO: 624650 - DNA, 33 bp, Homo sapien
gtatctaatctaacggtcattcatttgcaagga

SEQ ID NO: 624651 - DNA, 33 bp, Homo sapien
atgggtccaggtggaaaaatggaaaagaatcaa

SEQ ID NO: 624652 - DNA, 33 bp, Homo sapien
atgggtccaggtggaagaatggaaaagaatcaa

SEQ ID NO: 624653 - DNA, 33 bp, Homo sapien
tcactgaaactattcaggtatgtgcgaggggag

SEQ ID NO: 624654 - DNA, 33 bp, Homo sapien
tcactgaaactattcatgtatgtgcgaggggag

SEQ ID NO: 624655 - DNA, 33 bp, Homo sapien
taacagaagatggtgacgaataaactatcaagt

SEQ ID NO: 624656 - DNA, 33 bp, Homo sapien
taacagaagatggtgatgaataaactatcaagt

SEQ ID NO: 624657 - DNA, 33 bp, Homo sapien
atttgcagtacaattcgcaattcttgccgtcct

SEQ ID NO: 624658 - DNA, 33 bp, Homo sapien
atttgcagtacaattctcaattcttgccgtcct

SEQ ID NO: 624659 - DNA, 33 bp, Homo sapien
tactctggtttacttacaaaggcacaaaaatga

SEQ ID NO: 624660 - DNA, 33 bp, Homo sapien
tactctggtttacttataaaggcacaaaaatga

SEQ ID NO: 624661 - DNA, 33 bp, Homo sapien
ggtgaggctttaggcacgtttacatggtctacc

SEQ ID NO: 624662 - DNA, 33 bp, Homo sapien
ggtgaggctttaggcatgtttacatggtctacc

SEQ ID NO: 624663 - DNA, 33 bp, Homo sapien
cacacacacgaaagaccgaaagaaaacagcaaa

SEQ ID NO: 624664 - DNA, 33 bp, Homo sapien
cacacacacgaaagacggaaagaaaacagcaaa

SEQ ID NO: 624665 - DNA, 33 bp, Homo sapien
tcctcattgttatgcacgtaatatatgctcaat

SEQ ID NO: 624666 - DNA, 33 bp, Homo sapien
tcctcattgttatgcaggtaatatatgctcaat

SEQ ID NO: 624667 - DNA, 33 bp, Homo sapien
gttcatacagtatacaagagagaaaaaaacaag

SEQ ID NO: 624668 - DNA, 33 bp, Homo sapien
gttcatacagtatacaggagagaaaaaaacaag

SEQ ID NO: 624669 - DNA, 33 bp, Homo sapien
tcatgtcactgaaatacccagtacagcagaaca

SEQ ID NO: 624670 - DNA, 33 bp, Homo sapien
tcatgtcactgaaatatccagtacagcagaaca

SEQ ID NO: 624671 - DNA, 33 bp, Homo sapien
cccttatgacttgtaacagcctaagtaatgcac

SEQ ID NO: 624672 - DNA, 33 bp, Homo sapien
cccttatgacttgtaagagcctaagtaatgcac

SEQ ID NO: 624673 - DNA, 33 bp, Homo sapien
cttgtccttgtttcatcaatgacaatgtgtcat

SEQ ID NO: 624674 - DNA, 33 bp, Homo sapien
cttgtccttgtttcatgaatgacaatgtgtcat

SEQ ID NO: 624675 - DNA, 33 bp, Homo sapien
gactgacttaatcacaacatcttcagatcaaca

SEQ ID NO: 624676 - DNA, 33 bp, Homo sapien
gactgacttaatcacagcatcttcagatcaaca

SEQ ID NO: 624677 - DNA, 33 bp, Homo sapien
tcttcagtgataatgacgacaatgaggataaga

SEQ ID NO: 624678 - DNA, 33 bp, Homo sapien
tcttcagtgataatgatgacaatgaggataaga

SEQ ID NO: 624679 - DNA, 33 bp, Homo sapien
caagaaacttgactcacggcaaaattaggaaaa

SEQ ID NO: 624680 - DNA, 33 bp, Homo sapien
caagaaacttgactcatggcaaaattaggaaaa

SEQ ID NO: 624681 - DNA, 33 bp, Homo sapien
gaagtcacaatctctaccaggtcacgttttctt

SEQ ID NO: 624682 - DNA, 33 bp, Homo sapien
gaagtcacaatctctatcaggtcacgttttctt

SEQ ID NO: 624683 - DNA, 33 bp, Homo sapien
atgaaagcacacatgagtcaaatgccacttagt

SEQ ID NO: 624684 - DNA, 33 bp, Homo sapien
atgaaagcacacatgattcaaatgccacttagt

SEQ ID NO: 624685 - DNA, 33 bp, Homo sapien
gaagcataaagtagcaatgagaattctgagatt

SEQ ID NO: 624686 - DNA, 33 bp, Homo sapien
gaagcataaagtagcagtgagaattctgagatt

SEQ ID NO: 624687 - DNA, 33 bp, Homo sapien
tacctaaggctctgacccataaccgttttttat

SEQ ID NO: 624688 - DNA, 33 bp, Homo sapien
tacctaaggctctgactcataaccgttttttat

SEQ ID NO: 624689 - DNA, 33 bp, Homo sapien
ggcaaatgactggaaacactttatgcttgacaa

SEQ ID NO: 624690 - DNA, 33 bp, Homo sapien
ggcaaatgactggaaatactttatgcttgacaa

SEQ ID NO: 624691 - DNA, 33 bp, Homo sapien
ataagtttcagaattaacttgccaagaattaca

SEQ ID NO: 624692 - DNA, 33 bp, Homo sapien
ataagtttcagaattagcttgccaagaattaca

SEQ ID NO: 624693 - DNA, 33 bp, Homo sapien
gattatctgctctttagctatgaatgtaatcat

SEQ ID NO: 624694 - DNA, 33 bp, Homo sapien
gattatctgctctttatctatgaatgtaatcat

SEQ ID NO: 624695 - DNA, 33 bp, Homo sapien
gttgtcatataagagcccgtgtgtactggcatt

SEQ ID NO: 624696 - DNA, 33 bp, Homo sapien
gttgtcatataagagctcgtgtgtactggcatt

SEQ ID NO: 624697 - DNA, 33 bp, Homo sapien
catgctaactcctggccagaaatatatagggac

SEQ ID NO: 624698 - DNA, 33 bp, Homo sapien
catgctaactcctggctagaaatatatagggac

SEQ ID NO: 624699 - DNA, 33 bp, Homo sapien
gaaagcaaaacaaaaccgatgatatacttgtag

SEQ ID NO: 624700 - DNA, 33 bp, Homo sapien
gaaagcaaaacaaaactgatgatatacttgtag

SEQ ID NO: 624701 - DNA, 33 bp, Homo sapien
gaaatgaaacattgctgaaggtattgattttct

SEQ ID NO: 624702 - DNA, 33 bp, Homo sapien
gaaatgaaacattgcttaaggtattgattttct

SEQ ID NO: 624703 - DNA, 33 bp, Homo sapien
agaaacccacgaacaaatcatgaaaagagaagt

SEQ ID NO: 624704 - DNA, 33 bp, Homo sapien
agaaacccacgaacaagtcatgaaaagagaagt

SEQ ID NO: 624705 - DNA, 33 bp, Homo sapien
ctactgaatcataatcagaaggaggttacacag

SEQ ID NO: 624706 - DNA, 33 bp, Homo sapien
ctactgaatcataatctgaaggaggttacacag

SEQ ID NO: 624707 - DNA, 33 bp, Homo sapien
atggagttctttttcactctcttccatatgttg

SEQ ID NO: 624708 - DNA, 33 bp, Homo sapien
atggagttctttttcagtctcttccatatgttg

SEQ ID NO: 624709 - DNA, 33 bp, Homo sapien
aatctggttagaggacacacgagggagattata

SEQ ID NO: 624710 - DNA, 33 bp, Homo sapien
aatctggttagaggacgcacgagggagattata

SEQ ID NO: 624711 - DNA, 33 bp, Homo sapien
cgttggagattggacagtgcgctttttagaaag

SEQ ID NO: 624712 - DNA, 33 bp, Homo sapien
cgttggagattggacattgcgctttttagaaag

SEQ ID NO: 624713 - DNA, 33 bp, Homo sapien
gcggtaacagtttaatcatgccagtgatcatgt

SEQ ID NO: 624714 - DNA, 33 bp, Homo sapien
gcggtaacagtttaattatgccagtgatcatgt

SEQ ID NO: 624715 - DNA, 33 bp, Homo sapien
tttcaccaaataaaacaatagctttctcgccca

SEQ ID NO: 624716 - DNA, 33 bp, Homo sapien
tttcaccaaataaaacgatagctttctcgccca

SEQ ID NO: 624717 - DNA, 33 bp, Homo sapien
gtaaggagttgaaagaccttccagcatttgtta

SEQ ID NO: 624718 - DNA, 33 bp, Homo sapien
gtaaggagttgaaagatcttccagcatttgtta

SEQ ID NO: 624719 - DNA, 33 bp, Homo sapien
tgcaacctcaattcacagagaagcattatcatg

SEQ ID NO: 624720 - DNA, 33 bp, Homo sapien
tgcaacctcaattcacggagaagcattatcatg

SEQ ID NO: 624721 - DNA, 33 bp, Homo sapien
tattggtattcagattaaagaactaaggtggca

SEQ ID NO: 624722 - DNA, 33 bp, Homo sapien
tattggtattcagatttaagaactaaggtggca

SEQ ID NO: 624723 - DNA, 33 bp, Homo sapien
tactataaaaacaaacaaaacatctgacaagaa

SEQ ID NO: 624724 - DNA, 33 bp, Homo sapien
tactataaaaacaaacgaaacatctgacaagaa

SEQ ID NO: 624725 - DNA, 33 bp, Homo sapien
gcctacaaaatacggaacagcttatagttatat

SEQ ID NO: 624726 - DNA, 33 bp, Homo sapien
gcctacaaaatacggagcagcttatagttatat

SEQ ID NO: 624727 - DNA, 33 bp, Homo sapien
caatcacttgatgttcaatgaaacttaacaata

SEQ ID NO: 624728 - DNA, 33 bp, Homo sapien
caatcacttgatgttcgatgaaacttaacaata

SEQ ID NO: 624729 - DNA, 33 bp, Homo sapien
atgatactctctaaacagaaggtgcaatcagcc

SEQ ID NO: 624730 - DNA, 33 bp, Homo sapien
atgatactctctaaacggaaggtgcaatcagcc

SEQ ID NO: 624731 - DNA, 33 bp, Homo sapien
gccaccatttcaggggcatggctatttttggct

SEQ ID NO: 624732 - DNA, 33 bp, Homo sapien
gccaccatttcaggggtatggctatttttggct

SEQ ID NO: 624733 - DNA, 33 bp, Homo sapien
gagctatccaaagatacatgagcagttgtcatc

SEQ ID NO: 624734 - DNA, 33 bp, Homo sapien
gagctatccaaagatatatgagcagttgtcatc

SEQ ID NO: 624735 - DNA, 33 bp, Homo sapien
gagtatggaagttgaaaaataaatgctccagac

SEQ ID NO: 624736 - DNA, 33 bp, Homo sapien
gagtatggaagttgaacaataaatgctccagac

SEQ ID NO: 624737 - DNA, 33 bp, Homo sapien
atataggtatgctaaacattcctccataaaaca

SEQ ID NO: 624738 - DNA, 33 bp, Homo sapien
atataggtatgctaaatattcctccataaaaca

SEQ ID NO: 624739 - DNA, 33 bp, Homo sapien
gtggtgattttgttaacgtcaatattccttcta

SEQ ID NO: 624740 - DNA, 33 bp, Homo sapien
gtggtgattttgttaatgtcaatattccttcta

SEQ ID NO: 624741 - DNA, 33 bp, Homo sapien
tctaatatacactgcaaaatattcattcaatga

SEQ ID NO: 624742 - DNA, 33 bp, Homo sapien
tctaatatacactgcacaatattcattcaatga

SEQ ID NO: 624743 - DNA, 33 bp, Homo sapien
gataataatctccaaaatgctcttgaaagtgct

SEQ ID NO: 624744 - DNA, 33 bp, Homo sapien
gataataatctccaaagtgctcttgaaagtgct

SEQ ID NO: 624745 - DNA, 33 bp, Homo sapien
tactcagaacttaccacatttgttactttcctt

SEQ ID NO: 624746 - DNA, 33 bp, Homo sapien
tactcagaacttaccatatttgttactttcctt

SEQ ID NO: 624747 - DNA, 33 bp, Homo sapien
gatgttttgaagaaagcatagtagatgaactaa

SEQ ID NO: 624748 - DNA, 33 bp, Homo sapien
gatgttttgaagaaagtatagtagatgaactaa

SEQ ID NO: 624749 - DNA, 33 bp, Homo sapien
taatgaagattgctaactcaacgtcaatcaaaa

SEQ ID NO: 624750 - DNA, 33 bp, Homo sapien
taatgaagattgctaagtcaacgtcaatcaaaa

SEQ ID NO: 624751 - DNA, 33 bp, Homo sapien
gatcttacttttggacgaagtaaaatctgccag

SEQ ID NO: 624752 - DNA, 33 bp, Homo sapien
gatcttacttttggactaagtaaaatctgccag

SEQ ID NO: 624753 - DNA, 33 bp, Homo sapien
tgaaatgtcagaagcaatgcagagtttagtact

SEQ ID NO: 624754 - DNA, 33 bp, Homo sapien
tgaaatgtcagaagcagtgcagagtttagtact

SEQ ID NO: 624755 - DNA, 33 bp, Homo sapien
ccaacaaataaaccaaactgccttattcagatg

SEQ ID NO: 624756 - DNA, 33 bp, Homo sapien
ccaacaaataaaccaacctgccttattcagatg

SEQ ID NO: 624757 - DNA, 33 bp, Homo sapien
tcttatgatgataacacagctcccatgtggcat

SEQ ID NO: 624758 - DNA, 33 bp, Homo sapien
tcttatgatgataacatagctcccatgtggcat

SEQ ID NO: 624759 - DNA, 33 bp, Homo sapien
atatcataagctggacaaatggcgctcttttct

SEQ ID NO: 624760 - DNA, 33 bp, Homo sapien
atatcataagctggacgaatggcgctcttttct

SEQ ID NO: 624761 - DNA, 33 bp, Homo sapien
ttaccatgctttctggacaaagaatctgcgtgt

SEQ ID NO: 624762 - DNA, 33 bp, Homo sapien
ttaccatgctttctgggcaaagaatctgcgtgt

SEQ ID NO: 624763 - DNA, 33 bp, Homo sapien
tccattaggataaagacgagtgacctcaaaaat

SEQ ID NO: 624764 - DNA, 33 bp, Homo sapien
tccattaggataaagatgagtgacctcaaaaat

SEQ ID NO: 624765 - DNA, 33 bp, Homo sapien
ttcttaggaagttgtgaaagatattggtctttt

SEQ ID NO: 624766 - DNA, 33 bp, Homo sapien
ttcttaggaagttgtggaagatattggtctttt

SEQ ID NO: 624767 - DNA, 33 bp, Homo sapien
tatcaaagcactcaataacggtctctttaaaac

SEQ ID NO: 624768 - DNA, 33 bp, Homo sapien
tatcaaagcactcaatgacggtctctttaaaac

SEQ ID NO: 624769 - DNA, 33 bp, Homo sapien
gtgagtctcctatagcaattgttcactataaaa

SEQ ID NO: 624770 - DNA, 33 bp, Homo sapien
gtgagtctcctatagccattgttcactataaaa

SEQ ID NO: 624771 - DNA, 33 bp, Homo sapien
catacagctaggggaactggacacttactaact

SEQ ID NO: 624772 - DNA, 33 bp, Homo sapien
catacagctaggggaattggacacttactaact

SEQ ID NO: 624773 - DNA, 33 bp, Homo sapien
tgagtggttggaagaaactgggaacaggaaacg

SEQ ID NO: 624774 - DNA, 33 bp, Homo sapien
tgagtggttggaagaagctgggaacaggaaacg

SEQ ID NO: 624775 - DNA, 33 bp, Homo sapien
gagtctcagtggaagaagggatgacagtaggaa

SEQ ID NO: 624776 - DNA, 33 bp, Homo sapien
gagtctcagtggaagaggggatgacagtaggaa

SEQ ID NO: 624777 - DNA, 33 bp, Homo sapien
agacttaattttcacaactcagtttcaccactt

SEQ ID NO: 624778 - DNA, 33 bp, Homo sapien
agacttaattttcacatctcagtttcaccactt

SEQ ID NO: 624779 - DNA, 33 bp, Homo sapien
tattgttttatttcctgaagtagctgttctcaa

SEQ ID NO: 624780 - DNA, 33 bp, Homo sapien
tattgttttatttccttaagtagctgttctcaa

SEQ ID NO: 624781 - DNA, 33 bp, Homo sapien
taataccgtctaggctcagaatatcttagatca

SEQ ID NO: 624782 - DNA, 33 bp, Homo sapien
taataccgtctaggcttagaatatcttagatca

SEQ ID NO: 624783 - DNA, 33 bp, Homo sapien
catcaagtttaactagcaagttcaatgcatgat

SEQ ID NO: 624784 - DNA, 33 bp, Homo sapien
catcaagtttaactagtaagttcaatgcatgat

SEQ ID NO: 624785 - DNA, 33 bp, Homo sapien
atcttgtattcattcccgacccttttgcaatga

SEQ ID NO: 624786 - DNA, 33 bp, Homo sapien
atcttgtattcattcctgacccttttgcaatga

SEQ ID NO: 624787 - DNA, 33 bp, Homo sapien
tctgagttatatttgacggctaaattgcataga

SEQ ID NO: 624788 - DNA, 33 bp, Homo sapien
tctgagttatatttgatggctaaattgcataga

SEQ ID NO: 624789 - DNA, 33 bp, Homo sapien
catgtttctgtattaacgtgaaggttatgagat

SEQ ID NO: 624790 - DNA, 33 bp, Homo sapien
catgtttctgtattaatgtgaaggttatgagat

SEQ ID NO: 624791 - DNA, 33 bp, Homo sapien
cagttccagagagaccaaaagagacctcagggg

SEQ ID NO: 624792 - DNA, 33 bp, Homo sapien
cagttccagagagaccgaaagagacctcagggg

SEQ ID NO: 624793 - DNA, 33 bp, Homo sapien
catttatctttgcctaagtcttccagggtttct

SEQ ID NO: 624794 - DNA, 33 bp, Homo sapien
catttatctttgcctaggtcttccagggtttct

SEQ ID NO: 624795 - DNA, 33 bp, Homo sapien
ttaccagatgtcaaacaatgtaagattcttcag

SEQ ID NO: 624796 - DNA, 33 bp, Homo sapien
ttaccagatgtcaaactatgtaagattcttcag

SEQ ID NO: 624797 - DNA, 33 bp, Homo sapien
atctcaccattgcactaacagaattttaatagt

SEQ ID NO: 624798 - DNA, 33 bp, Homo sapien
atctcaccattgcactgacagaattttaatagt

SEQ ID NO: 624799 - DNA, 33 bp, Homo sapien
gattgtgaaatgccacagtcttaacaaaattag

SEQ ID NO: 624800 - DNA, 33 bp, Homo sapien
gattgtgaaatgccacggtcttaacaaaattag

SEQ ID NO: 624801 - DNA, 33 bp, Homo sapien
aattctggcacaaactaaacaatcttgccatct

SEQ ID NO: 624802 - DNA, 33 bp, Homo sapien
aattctggcacaaactgaacaatcttgccatct

SEQ ID NO: 624803 - DNA, 33 bp, Homo sapien
ttttaaattctcatggcccacatcaaatagttc

SEQ ID NO: 624804 - DNA, 33 bp, Homo sapien
ttttaaattctcatggtccacatcaaatagttc

SEQ ID NO: 624805 - DNA, 33 bp, Homo sapien
tggctctgctaggaaaccaatgctgtaacaatt

SEQ ID NO: 624806 - DNA, 33 bp, Homo sapien
tggctctgctaggaaatcaatgctgtaacaatt

SEQ ID NO: 624807 - DNA, 33 bp, Homo sapien
tgttcttgattctgctaaaaacatttcaggaat

SEQ ID NO: 624808 - DNA, 33 bp, Homo sapien
tgttcttgattctgctgaaaacatttcaggaat

SEQ ID NO: 624809 - DNA, 33 bp, Homo sapien
ttttaacgtacttaggaaaaaattgtcgcatga

SEQ ID NO: 624810 - DNA, 33 bp, Homo sapien
ttttaacgtacttagggaaaaattgtcgcatga

SEQ ID NO: 624811 - DNA, 33 bp, Homo sapien
tggaatgtctaagggcaaatattctaaaaagat

SEQ ID NO: 624812 - DNA, 33 bp, Homo sapien
tggaatgtctaagggcgaatattctaaaaagat

SEQ ID NO: 624813 - DNA, 33 bp, Homo sapien
gcagctgcaagacttcaattctcttcttgaact

SEQ ID NO: 624814 - DNA, 33 bp, Homo sapien
gcagctgcaagacttcgattctcttcttgaact

SEQ ID NO: 624815 - DNA, 33 bp, Homo sapien
ttcaaccaaaaagtggcactttgacaacattct

SEQ ID NO: 624816 - DNA, 33 bp, Homo sapien
ttcaaccaaaaagtggtactttgacaacattct

SEQ ID NO: 624817 - DNA, 33 bp, Homo sapien
gttagcatttggccgcaaagtcatttcggtcct

SEQ ID NO: 624818 - DNA, 33 bp, Homo sapien
gttagcatttggccgcgaagtcatttcggtcct

SEQ ID NO: 624819 - DNA, 33 bp, Homo sapien
aggacaaaatgaaagacgattttgattgtgtgt

SEQ ID NO: 624820 - DNA, 33 bp, Homo sapien
aggacaaaatgaaagatgattttgattgtgtgt

SEQ ID NO: 624821 - DNA, 33 bp, Homo sapien
gtctgagttaactgtacattctggatatcggtc

SEQ ID NO: 624822 - DNA, 33 bp, Homo sapien
gtctgagttaactgtagattctggatatcggtc

SEQ ID NO: 624823 - DNA, 33 bp, Homo sapien; identical to SEQ ID NO: 624821

SEQ ID NO: 624824 - DNA, 33 bp, Homo sapien; identical to SEQ ID NO: 624822

SEQ ID NO: 624825 - DNA, 33 bp, Homo sapien
aagtgtcatttgaagaagtttagctaagattca

SEQ ID NO: 624826 - DNA, 33 bp, Homo sapien
aagtgtcatttgaagatgtttagctaagattca

SEQ ID NO: 624827 - DNA, 33 bp, Homo sapien
aattttaacactgatacgagaatgaaatgggag

SEQ ID NO: 624828 - DNA, 33 bp, Homo sapien
aattttaacactgatatgagaatgaaatgggag

SEQ ID NO: 624829 - DNA, 33 bp, Homo sapien
tctcagaatttcaagaatagtaaagagcaagcc

SEQ ID NO: 624830 - DNA, 33 bp, Homo sapien
tctcagaatttcaagactagtaaagagcaagcc

SEQ ID NO: 624831 - DNA, 33 bp, Homo sapien
agaaatgaatattgaaagccattcatccctttt

SEQ ID NO: 624832 - DNA, 33 bp, Homo sapien
agaaatgaatattgaaggccattcatccctttt

SEQ ID NO: 624833 - DNA, 33 bp, Homo sapien
tcatatttaagagccaataatatcctgttctgt

SEQ ID NO: 624834 - DNA, 33 bp, Homo sapien
tcatatttaagagccagtaatatcctgttctgt

SEQ ID NO: 624835 - DNA, 33 bp, Homo sapien
aggatgatgtggcagagggaaaaggagtatata

SEQ ID NO: 624836 - DNA, 33 bp, Homo sapien
aggatgatgtggcagatggaaaaggagtatata

SEQ ID NO: 624837 - DNA, 33 bp, Homo sapien
caagagtgctctgagacagggattggaaaattg

SEQ ID NO: 624838 - DNA, 33 bp, Homo sapien
caagagtgctctgagatagggattggaaaattg

SEQ ID NO: 624839 - DNA, 33 bp, Homo sapien
actaattttcaagctccgagacgaaatgagaag

SEQ ID NO: 624840 - DNA, 33 bp, Homo sapien
actaattttcaagctctgagacgaaatgagaag

SEQ ID NO: 624841 - DNA, 33 bp, Homo sapien
aaataagcttaaaggcaccattggaaatacgga

SEQ ID NO: 624842 - DNA, 33 bp, Homo sapien
aaataagcttaaaggcgccattggaaatacgga

SEQ ID NO: 624843 - DNA, 33 bp, Homo sapien
ttatattttcatcttaggtactctactatttga

SEQ ID NO: 624844 - DNA, 33 bp, Homo sapien
ttatattttcatcttatgtactctactatttga

SEQ ID NO: 624845 - DNA, 33 bp, Homo sapien
atgtgaaatcataaaacggaaaacttgtaaaac

SEQ ID NO: 624846 - DNA, 33 bp, Homo sapien
atgtgaaatcataaaatggaaaacttgtaaaac

SEQ ID NO: 624847 - DNA, 33 bp, Homo sapien
agtgaagggaaagaacaaagcaagtttataaat

SEQ ID NO: 624848 - DNA, 33 bp, Homo sapien
agtgaagggaaagaacgaagcaagtttataaat

SEQ ID NO: 624849 - DNA, 33 bp, Homo sapien
ataaattgatgcaaaacgaaaaggctaatttat

SEQ ID NO: 624850 - DNA, 33 bp, Homo sapien
ataaattgatgcaaaatgaaaaggctaatttat

SEQ ID NO: 624851 - DNA, 33 bp, Homo sapien
tctgattatatgttcacaagaatccagtctcca

SEQ ID NO: 624852 - DNA, 33 bp, Homo sapien
tctgattatatgttcagaagaatccagtctcca

SEQ ID NO: 624853 - DNA, 33 bp, Homo sapien
agttaaaccacaatgagatattgctttacatca

SEQ ID NO: 624854 - DNA, 33 bp, Homo sapien
agttaaaccacaatgatatattgctttacatca

SEQ ID NO: 624855 - DNA, 33 bp, Homo sapien
ggaatcactggggagacggtcattattaccctt

SEQ ID NO: 624856 - DNA, 33 bp, Homo sapien
ggaatcactggggagatggtcattattaccctt

SEQ ID NO: 624857 - DNA, 33 bp, Homo sapien
tggtaaatgtggatgcactaaaatggcagggta

SEQ ID NO: 624858 - DNA, 33 bp, Homo sapien
tggtaaatgtggatgcgctaaaatggcagggta

SEQ ID NO: 624859 - DNA, 33 bp, Homo sapien
tccagttggcttcacaaaagtggtagctagctt

SEQ ID NO: 624860 - DNA, 33 bp, Homo sapien
tccagttggcttcacagaagtggtagctagctt

SEQ ID NO: 624861 - DNA, 33 bp, Homo sapien
tggctgagctacaagaaagacaatgagaaacac

SEQ ID NO: 624862 - DNA, 33 bp, Homo sapien
tggctgagctacaagacagacaatgagaaacac

SEQ ID NO: 624863 - DNA, 33 bp, Homo sapien
acctccacattcgtcactcccatgaatagctaa

SEQ ID NO: 624864 - DNA, 33 bp, Homo sapien
acctccacattcgtcattcccatgaatagctaa

SEQ ID NO: 624865 - DNA, 33 bp, Homo sapien
aggaatacagtgacaaatggaagccattggtta

SEQ ID NO: 624866 - DNA, 33 bp, Homo sapien
aggaatacagtgacaagtggaagccattggtta

SEQ ID NO: 624867 - DNA, 33 bp, Homo sapien
cagcagggtacacagaacagagaaagcccttag

SEQ ID NO: 624868 - DNA, 33 bp, Homo sapien
cagcagggtacacagaccagagaaagcccttag

SEQ ID NO: 624869 - DNA, 33 bp, Homo sapien
actttttctgccctctaaaatgcttttctgtca

SEQ ID NO: 624870 - DNA, 33 bp, Homo sapien
actttttctgccctctgaaatgcttttctgtca

SEQ ID NO: 624871 - DNA, 33 bp, Homo sapien
cctgagagtggaaaaaatccctcttaaactcat

SEQ ID NO: 624872 - DNA, 33 bp, Homo sapien
cctgagagtggaaaaagtccctcttaaactcat

SEQ ID NO: 624873 - DNA, 33 bp, Homo sapien
tgaactatttagaggaccgcaagaggagatgag

SEQ ID NO: 624874 - DNA, 33 bp, Homo sapien
tgaactatttagaggatcgcaagaggagatgag

SEQ ID NO: 624875 - DNA, 33 bp, Homo sapien
agtttcaactagctaacgatggtggctccaatg

SEQ ID NO: 624876 - DNA, 33 bp, Homo sapien
agtttcaactagctaatgatggtggctccaatg

SEQ ID NO: 624877 - DNA, 33 bp, Homo sapien
tttatgtttttaaatgccaaagctctgttactc

SEQ ID NO: 624878 - DNA, 33 bp, Homo sapien
tttatgtttttaaatgtcaaagctctgttactc

SEQ ID NO: 624879 - DNA, 33 bp, Homo sapien
aattcattgaaaaaaacgatcaatcttggtgaa

SEQ ID NO: 624880 - DNA, 33 bp, Homo sapien
aattcattgaaaaaaatgatcaatcttggtgaa

SEQ ID NO: 624881 - DNA, 33 bp, Homo sapien
tttctcatgggattggcaatgtcaggacaatgt

SEQ ID NO: 624882 - DNA, 33 bp, Homo sapien
tttctcatgggattggtaatgtcaggacaatgt

SEQ ID NO: 624883 - DNA, 33 bp, Homo sapien
tatggatttgggaacacggaagagcagaggatg

SEQ ID NO: 624884 - DNA, 33 bp, Homo sapien
tatggatttgggaacatggaagagcagaggatg

SEQ ID NO: 624885 - DNA, 33 bp, Homo sapien
cctgcttgggtatgcaagtgatcaaaatgcaga

SEQ ID NO: 624886 - DNA, 33 bp, Homo sapien
cctgcttgggtatgcaggtgatcaaaatgcaga

SEQ ID NO: 624887 - DNA, 33 bp, Homo sapien
tcagtcaagaaaacaaaatcactctgtattcta

SEQ ID NO: 624888 - DNA, 33 bp, Homo sapien
tcagtcaagaaaacaagatcactctgtattcta

SEQ ID NO: 624889 - DNA, 33 bp, Homo sapien
acagtgagagtcaccacgtatgtgtgtaaacag

SEQ ID NO: 624890 - DNA, 33 bp, Homo sapien
acagtgagagtcaccatgtatgtgtgtaaacag

SEQ ID NO: 624891 - DNA, 33 bp, Homo sapien
agccctagcagactaacaaagggagaaaaaagt

SEQ ID NO: 624892 - DNA, 33 bp, Homo sapien
agccctagcagactaataaagggagaaaaaagt

SEQ ID NO: 624893 - DNA, 33 bp, Homo sapien
acaagtagcctgatggaaatcattagtgaaagc

SEQ ID NO: 624894 - DNA, 33 bp, Homo sapien
acaagtagcctgatgggaatcattagtgaaagc

SEQ ID NO: 624895 - DNA, 33 bp, Homo sapien
cttcctttgggcttctcaatcactgttagtaaa

SEQ ID NO: 624896 - DNA, 33 bp, Homo sapien
cttcctttgggcttcttaatcactgttagtaaa

SEQ ID NO: 624897 - DNA, 33 bp, Homo sapien
tttaggaaaggttcaacaagtcttaaagagctc

SEQ ID NO: 624898 - DNA, 33 bp, Homo sapien
tttaggaaaggttcaagaagtcttaaagagctc

SEQ ID NO: 624899 - DNA, 33 bp, Homo sapien
ccctcatttcttgtaaagcattaagtctctagg

SEQ ID NO: 624900 - DNA, 33 bp, Homo sapien
ccctcatttcttgtaaggcattaagtctctagg

SEQ ID NO: 624901 - DNA, 33 bp, Homo sapien
caattccatgtgttcaaaaaacgcagctctttt

SEQ ID NO: 624902 - DNA, 33 bp, Homo sapien
caattccatgtgttcacaaaacgcagctctttt

SEQ ID NO: 624903 - DNA, 33 bp, Homo sapien
tttttgttagccattgcatacggtgacttatgc

SEQ ID NO: 624904 - DNA, 33 bp, Homo sapien
tttttgttagccattgtatacggtgacttatgc

SEQ ID NO: 624905 - DNA, 33 bp, Homo sapien
tgttgaaaattttgaacgaagcattttatttat

SEQ ID NO: 624906 - DNA, 33 bp, Homo sapien
tgttgaaaattttgaaggaagcattttatttat

SEQ ID NO: 624907 - DNA, 33 bp, Homo sapien
tcctactttgagtccaggtaagtttgtggacat

SEQ ID NO: 624908 - DNA, 33 bp, Homo sapien
tcctactttgagtccatgtaagtttgtggacat

SEQ ID NO: 624909 - DNA, 33 bp, Homo sapien
tatttgatggatcactaagtacagatgaagtaa

SEQ ID NO: 624910 - DNA, 33 bp, Homo sapien
tatttgatggatcactcagtacagatgaagtaa

SEQ ID NO: 624911 - DNA, 33 bp, Homo sapien
ttgggcttaagcaatcgaaggttggtctttcga

SEQ ID NO: 624912 - DNA, 33 bp, Homo sapien
ttgggcttaagcaatctaaggttggtctttcga

SEQ ID NO: 624913 - DNA, 33 bp, Homo sapien
taaaagatattttctgaaattcctgaggtattt

SEQ ID NO: 624914 - DNA, 33 bp, Homo sapien
taaaagatattttctggaattcctgaggtattt

SEQ ID NO: 624915 - DNA, 33 bp, Homo sapien
tattttgactgagaaaaccatctaactttgaga

SEQ ID NO: 624916 - DNA, 33 bp, Homo sapien
tattttgactgagaaagccatctaactttgaga

SEQ ID NO: 624917 - DNA, 33 bp, Homo sapien
ttctgcacatagcaagcattcaataagtagtag

SEQ ID NO: 624918 - DNA, 33 bp, Homo sapien
ttctgcacatagcaagtattcaataagtagtag

SEQ ID NO: 624919 - DNA, 33 bp, Homo sapien
gtaagcttatatttcagtagtcaggtatgttta

SEQ ID NO: 624920 - DNA, 33 bp, Homo sapien
gtaagcttatatttcattagtcaggtatgttta

SEQ ID NO: 624921 - DNA, 33 bp, Homo sapien
ctcatttacttgggttccgctcagcaacaaaga

SEQ ID NO: 624922 - DNA, 33 bp, Homo sapien
ctcatttacttgggtttcgctcagcaacaaaga

SEQ ID NO: 624923 - DNA, 33 bp, Homo sapien
aggaaattgtcaacagaattaaaggtcatggag

SEQ ID NO: 624924 - DNA, 33 bp, Homo sapien
aggaaattgtcaacagcattaaaggtcatggag

SEQ ID NO: 624925 - DNA, 33 bp, Homo sapien
ccctctgtgttcttcaaacggctttttcatgtc

SEQ ID NO: 624926 - DNA, 33 bp, Homo sapien
ccctctgtgttcttcagacggctttttcatgtc

SEQ ID NO: 624927 - DNA, 33 bp, Homo sapien
agcatcctgagtaacccaccgtgtaccactttg

SEQ ID NO: 624928 - DNA, 33 bp, Homo sapien
agcatcctgagtaacctaccgtgtaccactttg

SEQ ID NO: 624929 - DNA, 33 bp, Homo sapien
acttttcatttgctcaaaaagtgatgctaagtt

SEQ ID NO: 624930 - DNA, 33 bp, Homo sapien
acttttcatttgctcataaagtgatgctaagtt

SEQ ID NO: 624931 - DNA, 33 bp, Homo sapien
taaacataagattttcacaatcagttatactca

SEQ ID NO: 624932 - DNA, 33 bp, Homo sapien
taaacataagattttcgcaatcagttatactca

SEQ ID NO: 624933 - DNA, 33 bp, Homo sapien
ctcttcaggatatagtaaagagctagagaagga

SEQ ID NO: 624934 - DNA, 33 bp, Homo sapien
ctcttcaggatatagttaagagctagagaagga

SEQ ID NO: 624935 - DNA, 33 bp, Homo sapien
gcatgacaccaggtgcaatagatacaaagataa

SEQ ID NO: 624936 - DNA, 33 bp, Homo sapien
gcatgacaccaggtgcgatagatacaaagataa

SEQ ID NO: 624937 - DNA, 33 bp, Homo sapien
ccatgtatctcacaggaatccagaagccttatg

SEQ ID NO: 624938 - DNA, 33 bp, Homo sapien
ccatgtatctcacaggtatccagaagccttatg

SEQ ID NO: 624939 - DNA, 33 bp, Homo sapien
caggtctactgaactcaaaagccacgatatttt

SEQ ID NO: 624940 - DNA, 33 bp, Homo sapien
caggtctactgaactcgaaagccacgatatttt

SEQ ID NO: 624941 - DNA, 33 bp, Homo sapien
ctgttatcacagattacgctaaacacaaatatc

SEQ ID NO: 624942 - DNA, 33 bp, Homo sapien
ctgttatcacagattatgctaaacacaaatatc

SEQ ID NO: 624943 - DNA, 33 bp, Homo sapien
gtgaataatcttaggaaaatccttgaaccactt

SEQ ID NO: 624944 - DNA, 33 bp, Homo sapien
gtgaataatcttaggacaatccttgaaccactt

SEQ ID NO: 624945 - DNA, 33 bp, Homo sapien
cagaagaaggttacagcctgattgcacatccag

SEQ ID NO: 624946 - DNA, 33 bp, Homo sapien
cagaagaaggttacagtctgattgcacatccag

SEQ ID NO: 624947 - DNA, 33 bp, Homo sapien
gagtctgtccatgtgaaaacttcgctgccagca

SEQ ID NO: 624948 - DNA, 33 bp, Homo sapien
gagtctgtccatgtgacaacttcgctgccagca

SEQ ID NO: 624949 - DNA, 33 bp, Homo sapien
aggtgttggtatccacagtggagagacctgaag

SEQ ID NO: 624950 - DNA, 33 bp, Homo sapien
aggtgttggtatccacggtggagagacctgaag

SEQ ID NO: 624951 - DNA, 33 bp, Homo sapien
cagagaagttacatgacaaccaactttgagatt

SEQ ID NO: 624952 - DNA, 33 bp, Homo sapien
cagagaagttacatgagaaccaactttgagatt

SEQ ID NO: 624953 - DNA, 33 bp, Homo sapien
tcaaggaagaaagtgaagggagttctttatggc

SEQ ID NO: 624954 - DNA, 33 bp, Homo sapien
tcaaggaagaaagtgaggggagttctttatggc

SEQ ID NO: 624955 - DNA, 33 bp, Homo sapien
atcagtggtcataggcactgtatttttactggg

SEQ ID NO: 624956 - DNA, 33 bp, Homo sapien
atcagtggtcataggctctgtatttttactggg

SEQ ID NO: 624957 - DNA, 33 bp, Homo sapien
atgtaagaaacccattaaagtgctgctttttcc

SEQ ID NO: 624958 - DNA, 33 bp, Homo sapien
atgtaagaaacccatttaagtgctgctttttcc

SEQ ID NO: 624959 - DNA, 33 bp, Homo sapien
ttattaatgccaaaaaatatgagtataaacaca

SEQ ID NO: 624960 - DNA, 33 bp, Homo sapien
ttattaatgccaaaaattatgagtataaacaca

SEQ ID NO: 624961 - DNA, 33 bp, Homo sapien
tatctctatccttcccgacatccatcttggctt

SEQ ID NO: 624962 - DNA, 33 bp, Homo sapien
tatctctatccttccctacatccatcttggctt

SEQ ID NO: 624963 - DNA, 33 bp, Homo sapien
agtggcaaaaatgcaaccccactgtataggaat

SEQ ID NO: 624964 - DNA, 33 bp, Homo sapien
agtggcaaaaatgcaatcccactgtataggaat

SEQ ID NO: 624965 - DNA, 33 bp, Homo sapien
ttccaatttactatagcagaaaaatgtcttctt

SEQ ID NO: 624966 - DNA, 33 bp, Homo sapien
ttccaatttactataggagaaaaatgtcttctt

SEQ ID NO: 624967 - DNA, 33 bp, Homo sapien
gcagaaaccctaatgcagcagctacctttggga

SEQ ID NO: 624968 - DNA, 33 bp, Homo sapien
gcagaaaccctaatgcggcagctacctttggga

SEQ ID NO: 624969 - DNA, 33 bp, Homo sapien
ttctttttatgttccactaagtggttctaagga

SEQ ID NO: 624970 - DNA, 33 bp, Homo sapien
ttctttttatgttccattaagtggttctaagga

SEQ ID NO: 624971 - DNA, 33 bp, Homo sapien
atacaggtctaaaaataagagtaggaatttgga

SEQ ID NO: 624972 - DNA, 33 bp, Homo sapien
atacaggtctaaaaattagagtaggaatttgga

SEQ ID NO: 624973 - DNA, 33 bp, Homo sapien
atgacatcaaggctcccggaaacatcagcaaac

SEQ ID NO: 624974 - DNA, 33 bp, Homo sapien
atgacatcaaggctcctggaaacatcagcaaac

SEQ ID NO: 624975 - DNA, 33 bp, Homo sapien
gagggaatagataatcccagttctaggagaaaa

SEQ ID NO: 624976 - DNA, 33 bp, Homo sapien
gagggaatagataatctcagttctaggagaaaa

SEQ ID NO: 624977 - DNA, 33 bp, Homo sapien
tgacctgacttgtattaaaacatctcaggcaaa

SEQ ID NO: 624978 - DNA, 33 bp, Homo sapien
tgacctgacttgtattgaaacatctcaggcaaa

SEQ ID NO: 624979 - DNA, 33 bp, Homo sapien
ctgttctattcatgaccaagttctaataaaatt

SEQ ID NO: 624980 - DNA, 33 bp, Homo sapien
ctgttctattcatgacgaagttctaataaaatt

SEQ ID NO: 624981 - DNA, 33 bp, Homo sapien
cacatatcattttcacgcacattttattactga

SEQ ID NO: 624982 - DNA, 33 bp, Homo sapien
cacatatcattttcactcacattttattactga

SEQ ID NO: 624983 - DNA, 33 bp, Homo sapien
aatttaagtgacaccaacatgagtttcattgga

SEQ ID NO: 624984 - DNA, 33 bp, Homo sapien
aatttaagtgacaccagcatgagtttcattgga

SEQ ID NO: 624985 - DNA, 33 bp, Homo sapien
aaacattatttgtgtccgaaaagtatcttttca

SEQ ID NO: 624986 - DNA, 33 bp, Homo sapien
aaacattatttgtgtctgaaaagtatcttttca

SEQ ID NO: 624987 - DNA, 33 bp, Homo sapien
tgcatctgtagcatgaacacacctatgttattt

SEQ ID NO: 624988 - DNA, 33 bp, Homo sapien
tgcatctgtagcatgatcacacctatgttattt

SEQ ID NO: 624989 - DNA, 33 bp, Homo sapien
aagatatgaagttgtaataagttatcagtgctg

SEQ ID NO: 624990 - DNA, 33 bp, Homo sapien
aagatatgaagttgtagtaagttatcagtgctg

SEQ ID NO: 624991 - DNA, 33 bp, Homo sapien
ctacctggtcttgtcaacttccaaaagtgactc

SEQ ID NO: 624992 - DNA, 33 bp, Homo sapien
ctacctggtcttgtcagcttccaaaagtgactc

SEQ ID NO: 624993 - DNA, 33 bp, Homo sapien
aggaaagactgtttgacgaagcctggatttttc

SEQ ID NO: 624994 - DNA, 33 bp, Homo sapien
aggaaagactgtttgatgaagcctggatttttc

SEQ ID NO: 624995 - DNA, 33 bp, Homo sapien
tttattctacaccttacgaatagagtacaagca

SEQ ID NO: 624996 - DNA, 33 bp, Homo sapien
tttattctacaccttatgaatagagtacaagca

SEQ ID NO: 624997 - DNA, 33 bp, Homo sapien
acctccatagtcgaccactattctgatttttat

SEQ ID NO: 624998 - DNA, 33 bp, Homo sapien
acctccatagtcgacctctattctgatttttat

SEQ ID NO: 624999 - DNA, 33 bp, Homo sapien
acgttctgtttattcactcactccaaaagcacc

SEQ ID NO: 625000 - DNA, 33 bp, Homo sapien
acgttctgtttattcattcactccaaaagcacc

SEQ ID NO: 625001 - DNA, 33 bp, Homo sapien
acaaaggcaaatgtaacaacttgctgaagagaa

SEQ ID NO: 625002 - DNA, 33 bp, Homo sapien
acaaaggcaaatgtaagaacttgctgaagagaa

SEQ ID NO: 625003 - DNA, 33 bp, Homo sapien
acagtggttcatgatgacaaaggtcttattcca

SEQ ID NO: 625004 - DNA, 33 bp, Homo sapien
acagtggttcatgatgtcaaaggtcttattcca

SEQ ID NO: 625005 - DNA, 33 bp, Homo sapien
aggtgtttgaagtaaaatgatttgttcccattc

SEQ ID NO: 625006 - DNA, 33 bp, Homo sapien
aggtgtttgaagtaaagtgatttgttcccattc

SEQ ID NO: 625007 - DNA, 33 bp, Homo sapien
atttcacaaaagcgaacgctcaaatgttaaaat

SEQ ID NO: 625008 - DNA, 33 bp, Homo sapien
atttcacaaaagcgaatgctcaaatgttaaaat

SEQ ID NO: 625009 - DNA, 33 bp, Homo sapien
tggcagaacccatggaatagcctgccccacagg

SEQ ID NO: 625010 - DNA, 33 bp, Homo sapien
tggcagaacccatggactagcctgccccacagg

SEQ ID NO: 625011 - DNA, 33 bp, Homo sapien
gatcttggatttctaaacctgattttctatctg

SEQ ID NO: 625012 - DNA, 33 bp, Homo sapien
gatcttggatttctaaccctgattttctatctg

SEQ ID NO: 625013 - DNA, 33 bp, Homo sapien
tgtatgtttatcaacacgaggattggactagga

SEQ ID NO: 625014 - DNA, 33 bp, Homo sapien
tgtatgtttatcaacatgaggattggactagga

SEQ ID NO: 625015 - DNA, 33 bp, Homo sapien
cgagacaccactccaacgaataggcaatgggaa

SEQ ID NO: 625016 - DNA, 33 bp, Homo sapien
cgagacaccactccaatgaataggcaatgggaa

SEQ ID NO: 625017 - DNA, 33 bp, Homo sapien
ttcccaaattttaaaaatgcttatcggagatgt

SEQ ID NO: 625018 - DNA, 33 bp, Homo sapien
ttcccaaattttaaaagtgcttatcggagatgt

SEQ ID NO: 625019 - DNA, 33 bp, Homo sapien
ttccaggaaggagatcaaaggggattggaccag

SEQ ID NO: 625020 - DNA, 33 bp, Homo sapien
ttccaggaaggagatcgaaggggattggaccag

SEQ ID NO: 625021 - DNA, 33 bp, Homo sapien
ctgtggttgataatcacgaggggtagaaacatg

SEQ ID NO: 625022 - DNA, 33 bp, Homo sapien
ctgtggttgataatcatgaggggtagaaacatg

SEQ ID NO: 625023 - DNA, 33 bp, Homo sapien
gtttgcaggagctgataagaacaaaggcaaaac

SEQ ID NO: 625024 - DNA, 33 bp, Homo sapien
gtttgcaggagctgatgagaacaaaggcaaaac

SEQ ID NO: 625025 - DNA, 33 bp, Homo sapien
aactgaattattttaacgtgaaagatgaatgaa

SEQ ID NO: 625026 - DNA, 33 bp, Homo sapien
aactgaattattttaatgtgaaagatgaatgaa

SEQ ID NO: 625027 - DNA, 33 bp, Homo sapien
gagaggagttaagtgaaatggtaaagtaacaaa

SEQ ID NO: 625028 - DNA, 33 bp, Homo sapien
gagaggagttaagtgacatggtaaagtaacaaa

SEQ ID NO: 625029 - DNA, 33 bp, Homo sapien
gccctcactcttgggacgctcaaaactacttct

SEQ ID NO: 625030 - DNA, 33 bp, Homo sapien
gccctcactcttgggatgctcaaaactacttct

SEQ ID NO: 625031 - DNA, 33 bp, Homo sapien
agaatgtaccttcataaaaatcaggaacaaagc

SEQ ID NO: 625032 - DNA, 33 bp, Homo sapien
agaatgtaccttcatagaaatcaggaacaaagc

SEQ ID NO: 625033 - DNA, 33 bp, Homo sapien
tacatctcgatcacgaactctgacacattccat

SEQ ID NO: 625034 - DNA, 33 bp, Homo sapien
tacatctcgatcacgatctctgacacattccat

SEQ ID NO: 625035 - DNA, 33 bp, Homo sapien
catcattacatatccagtaagggtacagtatca

SEQ ID NO: 625036 - DNA, 33 bp, Homo sapien
catcattacatatccattaagggtacagtatca

SEQ ID NO: 625037 - DNA, 33 bp, Homo sapien
cataacacttgtgagactcacctattttgttat

SEQ ID NO: 625038 - DNA, 33 bp, Homo sapien
cataacacttgtgagattcacctattttgttat

SEQ ID NO: 625039 - DNA, 33 bp, Homo sapien
aaaatctaaagatggacgcttagatttatttgt

SEQ ID NO: 625040 - DNA, 33 bp, Homo sapien
aaaatctaaagatggatgcttagatttatttgt

SEQ ID NO: 625041 - DNA, 33 bp, Homo sapien
cagtagttaattttgacggaaggaaattagagt

SEQ ID NO: 625042 - DNA, 33 bp, Homo sapien
cagtagttaattttgatggaaggaaattagagt

SEQ ID NO: 625043 - DNA, 33 bp, Homo sapien
cccaagttgccaatgccaatgctgctgacttat

SEQ ID NO: 625044 - DNA, 33 bp, Homo sapien
cccaagttgccaatgctaatgctgctgacttat

SEQ ID NO: 625045 - DNA, 33 bp, Homo sapien
tctctcctattaactcccattgtatcttgagtt

SEQ ID NO: 625046 - DNA, 33 bp, Homo sapien
tctctcctattaactctcattgtatcttgagtt

SEQ ID NO: 625047 - DNA, 33 bp, Homo sapien
ttagcctcttatctcaacttctgaaacattctt

SEQ ID NO: 625048 - DNA, 33 bp, Homo sapien
ttagcctcttatctcagcttctgaaacattctt

SEQ ID NO: 625049 - DNA, 33 bp, Homo sapien
tggaagaatgatgatgccacttgctgagatggg

SEQ ID NO: 625050 - DNA, 33 bp, Homo sapien
tggaagaatgatgatgtcacttgctgagatggg

SEQ ID NO: 625051 - DNA, 33 bp, Homo sapien
ttaaagtctaaaaagacagcttcgtcaggtggg

SEQ ID NO: 625052 - DNA, 33 bp, Homo sapien
ttaaagtctaaaaagatagcttcgtcaggtggg

SEQ ID NO: 625053 - DNA, 33 bp, Homo sapien
gtttcctctaatattccatggttgcagcatttt

SEQ ID NO: 625054 - DNA, 33 bp, Homo sapien
gtttcctctaatattctatggttgcagcatttt

SEQ ID NO: 625055 - DNA, 33 bp, Homo sapien
tttagtggcttaaatacatccatacatatgcaa

SEQ ID NO: 625056 - DNA, 33 bp, Homo sapien
tttagtggcttaaatatatccatacatatgcaa

SEQ ID NO: 625057 - DNA, 33 bp, Homo sapien
gcactgtgtaaatgtccgaagggccagaaagat

SEQ ID NO: 625058 - DNA, 33 bp, Homo sapien
gcactgtgtaaatgtctgaagggccagaaagat

SEQ ID NO: 625059 - DNA, 33 bp, Homo sapien
tgagaataggcagatacagtaccataaaaaaag

SEQ ID NO: 625060 - DNA, 33 bp, Homo sapien
tgagaataggcagatagagtaccataaaaaaag

SEQ ID NO: 625061 - DNA, 33 bp, Homo sapien
aggatgctaaggattgaacacaacacaaacaga

SEQ ID NO: 625062 - DNA, 33 bp, Homo sapien
aggatgctaaggattggacacaacacaaacaga

SEQ ID NO: 625063 - DNA, 33 bp, Homo sapien
ggtccctggagaatcacagatccaccccacaag

SEQ ID NO: 625064 - DNA, 33 bp, Homo sapien
ggtccctggagaatcatagatccaccccacaag

SEQ ID NO: 625065 - DNA, 33 bp, Homo sapien
ttcactggtttttctcaaatgtatgcatgagga

SEQ ID NO: 625066 - DNA, 33 bp, Homo sapien
ttcactggtttttctccaatgtatgcatgagga

SEQ ID NO: 625067 - DNA, 33 bp, Homo sapien
tctaaagagtgctctaaatacgccctgagcttg

SEQ ID NO: 625068 - DNA, 33 bp, Homo sapien
tctaaagagtgctctagatacgccctgagcttg

SEQ ID NO: 625069 - DNA, 33 bp, Homo sapien
actcaacccaagcaaagttgtcctagtgtgccc

SEQ ID NO: 625070 - DNA, 33 bp, Homo sapien
actcaacccaagcaaatttgtcctagtgtgccc

SEQ ID NO: 625071 - DNA, 33 bp, Homo sapien
gcgcctggagaagaagcctcaattctatctctt

SEQ ID NO: 625072 - DNA, 33 bp, Homo sapien
gcgcctggagaagaaggctcaattctatctctt

SEQ ID NO: 625073 - DNA, 33 bp, Homo sapien
catactgtcttcaaacacaatatatggtactag

SEQ ID NO: 625074 - DNA, 33 bp, Homo sapien
catactgtcttcaaacgcaatatatggtactag

SEQ ID NO: 625075 - DNA, 33 bp, Homo sapien
gtaatgtcaagatcataaaagctcagacttgtg

SEQ ID NO: 625076 - DNA, 33 bp, Homo sapien
gtaatgtcaagatcatgaaagctcagacttgtg

SEQ ID NO: 625077 - DNA, 33 bp, Homo sapien
tttacattatttgcagcatgatattttatctaa

SEQ ID NO: 625078 - DNA, 33 bp, Homo sapien
tttacattatttgcagtatgatattttatctaa

SEQ ID NO: 625079 - DNA, 33 bp, Homo sapien
tatatgtaacttaacacgtatctgtgctttaca

SEQ ID NO: 625080 - DNA, 33 bp, Homo sapien
tatatgtaacttaacatgtatctgtgctttaca

SEQ ID NO: 625081 - DNA, 33 bp, Homo sapien
aagagcagtcagataaacaatttgtattttagc

SEQ ID NO: 625082 - DNA, 33 bp, Homo sapien
aagagcagtcagataatcaatttgtattttagc

SEQ ID NO: 625083 - DNA, 33 bp, Homo sapien
cctaatgattgtaaagcccttaaaagcacaaaa

SEQ ID NO: 625084 - DNA, 33 bp, Homo sapien
cctaatgattgtaaagtccttaaaagcacaaaa

SEQ ID NO: 625085 - DNA, 33 bp, Homo sapien
agaggtgccttattgagccagagttaaaaacta

SEQ ID NO: 625086 - DNA, 33 bp, Homo sapien
agaggtgccttattgatccagagttaaaaacta

SEQ ID NO: 625087 - DNA, 33 bp, Homo sapien
aggaaaatgagccccaatgggaagaaagacagc

SEQ ID NO: 625088 - DNA, 33 bp, Homo sapien
aggaaaatgagccccagtgggaagaaagacagc

SEQ ID NO: 625089 - DNA, 33 bp, Homo sapien
tgctatgcctaggagaagtaaagcctaaaggaa

SEQ ID NO: 625090 - DNA, 33 bp, Homo sapien
tgctatgcctaggagatgtaaagcctaaaggaa

SEQ ID NO: 625091 - DNA, 33 bp, Homo sapien
tgaattctccagtccacgtagcataagtccctt

SEQ ID NO: 625092 - DNA, 33 bp, Homo sapien
tgaattctccagtccatgtagcataagtccctt

SEQ ID NO: 625093 - DNA, 33 bp, Homo sapien
ttattccagaggtgtccctaggctactgtgtgc

SEQ ID NO: 625094 - DNA, 33 bp, Homo sapien
ttattccagaggtgtctctaggctactgtgtgc

SEQ ID NO: 625095 - DNA, 33 bp, Homo sapien
ggtatcataatgaataaggcagttatggagcat

SEQ ID NO: 625096 - DNA, 33 bp, Homo sapien
ggtatcataatgaatagggcagttatggagcat

SEQ ID NO: 625097 - DNA, 33 bp, Homo sapien
gccagtcatttaataccagactcattccttaag

SEQ ID NO: 625098 - DNA, 33 bp, Homo sapien
gccagtcatttaatacgagactcattccttaag

SEQ ID NO: 625099 - DNA, 33 bp, Homo sapien
gtgaaataatcattaactgtaaacattcaggtg

SEQ ID NO: 625100 - DNA, 33 bp, Homo sapien
gtgaaataatcattaattgtaaacattcaggtg

SEQ ID NO: 625101 - DNA, 33 bp, Homo sapien
ttttaatctgcatttcacttgttagcaatgagg

SEQ ID NO: 625102 - DNA, 33 bp, Homo sapien
ttttaatctgcatttctcttgttagcaatgagg

SEQ ID NO: 625103 - DNA, 33 bp, Homo sapien
gcttattctctggtgacatgatcaggaagtaat

SEQ ID NO: 625104 - DNA, 33 bp, Homo sapien
gcttattctctggtgatatgatcaggaagtaat

SEQ ID NO: 625105 - DNA, 33 bp, Homo sapien
acttaagcactaaaaaagtggtattggtcaaag

SEQ ID NO: 625106 - DNA, 33 bp, Homo sapien
acttaagcactaaaaaggtggtattggtcaaag

SEQ ID NO: 625107 - DNA, 33 bp, Homo sapien
ggtggatgtcagactaaccttgttggacagtca

SEQ ID NO: 625108 - DNA, 33 bp, Homo sapien
ggtggatgtcagactagccttgttggacagtca

SEQ ID NO: 625109 - DNA, 33 bp, Homo sapien
cctaggaaatgctcaactggccgtcagtgtaca

SEQ ID NO: 625110 - DNA, 33 bp, Homo sapien
cctaggaaatgctcaattggccgtcagtgtaca

SEQ ID NO: 625111 - DNA, 33 bp, Homo sapien
ataaaagaaatggaaaaggatgtcagggtgttc

SEQ ID NO: 625112 - DNA, 33 bp, Homo sapien
ataaaagaaatggaaagggatgtcagggtgttc

SEQ ID NO: 625113 - DNA, 33 bp, Homo sapien
cacacccctagtttaactggcaaaatctgtcct

SEQ ID NO: 625114 - DNA, 33 bp, Homo sapien
cacacccctagtttaagtggcaaaatctgtcct

SEQ ID NO: 625115 - DNA, 33 bp, Homo sapien
gacttaaatatgtaaaattctccaccaggactg

SEQ ID NO: 625116 - DNA, 33 bp, Homo sapien
gacttaaatatgtaaagttctccaccaggactg

SEQ ID NO: 625117 - DNA, 33 bp, Homo sapien
catcttgtcagggcaacgctttccagattactc

SEQ ID NO: 625118 - DNA, 33 bp, Homo sapien
catcttgtcagggcaatgctttccagattactc

SEQ ID NO: 625119 - DNA, 33 bp, Homo sapien
ttcttttaaaaggtgaactacttgaagaaagct

SEQ ID NO: 625120 - DNA, 33 bp, Homo sapien
ttcttttaaaaggtgatctacttgaagaaagct

SEQ ID NO: 625121 - DNA, 33 bp, Homo sapien
tgatatgtaggtatccaaatgctcagtttatgc

SEQ ID NO: 625122 - DNA, 33 bp, Homo sapien
tgatatgtaggtatccgaatgctcagtttatgc

SEQ ID NO: 625123 - DNA, 33 bp, Homo sapien
cgggagcttattagaactgcacaaccttgggtc

SEQ ID NO: 625124 - DNA, 33 bp, Homo sapien
cgggagcttattagaattgcacaaccttgggtc

SEQ ID NO: 625125 - DNA, 33 bp, Homo sapien
agtaaagtatatttagctcatttccaaatgacc

SEQ ID NO: 625126 - DNA, 33 bp, Homo sapien
agtaaagtatatttagttcatttccaaatgacc

SEQ ID NO: 625127 - DNA, 33 bp, Homo sapien
cgcaaatgtcttcttgctttgggaaatattaag

SEQ ID NO: 625128 - DNA, 33 bp, Homo sapien
cgcaaatgtcttcttgttttgggaaatattaag

SEQ ID NO: 625129 - DNA, 33 bp, Homo sapien
ttctatgattctcctacggacaaaaagtgagga

SEQ ID NO: 625130 - DNA, 33 bp, Homo sapien
ttctatgattctcctatggacaaaaagtgagga

SEQ ID NO: 625131 - DNA, 33 bp, Homo sapien
ctggttcacaacaaaaagctgcttcagctctga

SEQ ID NO: 625132 - DNA, 33 bp, Homo sapien
ctggttcacaacaaaaggctgcttcagctctga

SEQ ID NO: 625133 - DNA, 33 bp, Homo sapien
caaatcaacatagctgaatttgggagataggct

SEQ ID NO: 625134 - DNA, 33 bp, Homo sapien
caaatcaacatagctgtatttgggagataggct

SEQ ID NO: 625135 - DNA, 33 bp, Homo sapien
catgtgcagcacaacaaatcaagccaggcagat

SEQ ID NO: 625136 - DNA, 33 bp, Homo sapien
catgtgcagcacaacagatcaagccaggcagat

SEQ ID NO: 625137 - DNA, 33 bp, Homo sapien
attgttacctaggaaaagtataaggtgctatga

SEQ ID NO: 625138 - DNA, 33 bp, Homo sapien
attgttacctaggaaacgtataaggtgctatga

SEQ ID NO: 625139 - DNA, 33 bp, Homo sapien
gcgtcaggtactcctgcaggttgcccttggcgt

SEQ ID NO: 625140 - DNA, 33 bp, Homo sapien
gcgtcaggtactcctgtaggttgcccttggcgt

SEQ ID NO: 625141 - DNA, 33 bp, Homo sapien
atatcctcgtgaagaacgacctaacctgctgcc

SEQ ID NO: 625142 - DNA, 33 bp, Homo sapien
atatcctcgtgaagaatgacctaacctgctgcc

SEQ ID NO: 625143 - DNA, 33 bp, Homo sapien
ctcctaatcagtcttgcaggcttaagcagtaag

SEQ ID NO: 625144 - DNA, 33 bp, Homo sapien
ctcctaatcagtcttggaggcttaagcagtaag

SEQ ID NO: 625145 - DNA, 33 bp, Homo sapien
ggtatagtaatgtagacctcaactgttcttgcc

SEQ ID NO: 625146 - DNA, 33 bp, Homo sapien
ggtatagtaatgtagatctcaactgttcttgcc

SEQ ID NO: 625147 - DNA, 33 bp, Homo sapien
tcaaagctttcaagcagaaaattattctcagtg

SEQ ID NO: 625148 - DNA, 33 bp, Homo sapien
tcaaagctttcaagcataaaattattctcagtg

SEQ ID NO: 625149 - DNA, 33 bp, Homo sapien
cacagtttggacccaaagattttgccaaagtgg

SEQ ID NO: 625150 - DNA, 33 bp, Homo sapien
cacagtttggacccaatgattttgccaaagtgg

SEQ ID NO: 625151 - DNA, 33 bp, Homo sapien
gccatagtaggaaaaacgagcaatgttgcctga

SEQ ID NO: 625152 - DNA, 33 bp, Homo sapien
gccatagtaggaaaaatgagcaatgttgcctga

SEQ ID NO: 625153 - DNA, 33 bp, Homo sapien
aatgtgctaggtgttacgctgggggacacagtg

SEQ ID NO: 625154 - DNA, 33 bp, Homo sapien
aatgtgctaggtgttatgctgggggacacagtg

SEQ ID NO: 625155 - DNA, 33 bp, Homo sapien
tggtggcagctgtgctcaaaacctaccatactt

SEQ ID NO: 625156 - DNA, 33 bp, Homo sapien
tggtggcagctgtgctgaaaacctaccatactt

SEQ ID NO: 625157 - DNA, 33 bp, Homo sapien
ttttggaccctgcttgaactcactatagcaaca

SEQ ID NO: 625158 - DNA, 33 bp, Homo sapien
ttttggaccctgcttgcactcactatagcaaca

SEQ ID NO: 625159 - DNA, 33 bp, Homo sapien
cccaactgagatcccaatcaactactggtacta

SEQ ID NO: 625160 - DNA, 33 bp, Homo sapien
cccaactgagatcccagtcaactactggtacta

SEQ ID NO: 625161 - DNA, 33 bp, Homo sapien
accctgaggacatggaagatataaggaaattgc

SEQ ID NO: 625162 - DNA, 33 bp, Homo sapien
accctgaggacatggaggatataaggaaattgc

SEQ ID NO: 625163 - DNA, 33 bp, Homo sapien
aatgagcacttatttgcatatccatcatgataa

SEQ ID NO: 625164 - DNA, 33 bp, Homo sapien
aatgagcacttatttgtatatccatcatgataa

SEQ ID NO: 625165 - DNA, 33 bp, Homo sapien
tttttataattacaaaatgctgagtagacagac

SEQ ID NO: 625166 - DNA, 33 bp, Homo sapien
tttttataattacaaagtgctgagtagacagac

SEQ ID NO: 625167 - DNA, 33 bp, Homo sapien
ctctgaataaggaaccaagaaatagactacaca

SEQ ID NO: 625168 - DNA, 33 bp, Homo sapien
ctctgaataaggaacccagaaatagactacaca

SEQ ID NO: 625169 - DNA, 33 bp, Homo sapien
atgttatagtgctttacgtttacccaaatattc

SEQ ID NO: 625170 - DNA, 33 bp, Homo sapien
atgttatagtgctttatgtttacccaaatattc

SEQ ID NO: 625171 - DNA, 33 bp, Homo sapien
tctcacgaacttaaagcacaaacctgaatcacc

SEQ ID NO: 625172 - DNA, 33 bp, Homo sapien
tctcacgaacttaaaggacaaacctgaatcacc

SEQ ID NO: 625173 - DNA, 33 bp, Homo sapien
tttcttaaaaatcctcaatcgctttttgtttgc

SEQ ID NO: 625174 - DNA, 33 bp, Homo sapien
tttcttaaaaatcctccatcgctttttgtttgc

SEQ ID NO: 625175 - DNA, 33 bp, Homo sapien
ctagaagatcttctaaccagctacccttgtgcc

SEQ ID NO: 625176 - DNA, 33 bp, Homo sapien
ctagaagatcttctaatcagctacccttgtgcc

SEQ ID NO: 625177 - DNA, 33 bp, Homo sapien
tactggattgtaccaagacattttagaagtgaa

SEQ ID NO: 625178 - DNA, 33 bp, Homo sapien
tactggattgtaccaatacattttagaagtgaa

SEQ ID NO: 625179 - DNA, 33 bp, Homo sapien
aaatcaggtgtccacaaggattacagtctcatt

SEQ ID NO: 625180 - DNA, 33 bp, Homo sapien
aaatcaggtgtccacagggattacagtctcatt

SEQ ID NO: 625181 - DNA, 33 bp, Homo sapien
atattttaaagatctacagctgacatgagaagt

SEQ ID NO: 625182 - DNA, 33 bp, Homo sapien
atattttaaagatctatagctgacatgagaagt

SEQ ID NO: 625183 - DNA, 33 bp, Homo sapien
cagtagtatggccaccaaagagctaggttgtaa

SEQ ID NO: 625184 - DNA, 33 bp, Homo sapien
cagtagtatggccaccgaagagctaggttgtaa

SEQ ID NO: 625185 - DNA, 33 bp, Homo sapien
cacagagccttctcaaaggatgttcaaggttaa

SEQ ID NO: 625186 - DNA, 33 bp, Homo sapien
cacagagccttctcaagggatgttcaaggttaa

SEQ ID NO: 625187 - DNA, 33 bp, Homo sapien
aacaagtgtacttttacgatgaacctaagtcaa

SEQ ID NO: 625188 - DNA, 33 bp, Homo sapien
aacaagtgtacttttatgatgaacctaagtcaa

SEQ ID NO: 625189 - DNA, 33 bp, Homo sapien
ttgagctctttcatcaccagaaacagatgaaat

SEQ ID NO: 625190 - DNA, 33 bp, Homo sapien
ttgagctctttcatcatcagaaacagatgaaat

SEQ ID NO: 625191 - DNA, 33 bp, Homo sapien
attgattctttgagcaatcaaaactaagaggct

SEQ ID NO: 625192 - DNA, 33 bp, Homo sapien
attgattctttgagcagtcaaaactaagaggct

SEQ ID NO: 625193 - DNA, 33 bp, Homo sapien
tattcaatgagtatcactccatctgagaggaga

SEQ ID NO: 625194 - DNA, 33 bp, Homo sapien
tattcaatgagtatcattccatctgagaggaga

SEQ ID NO: 625195 - DNA, 33 bp, Homo sapien
aaattactatttcacacaattgaacctctacgt

SEQ ID NO: 625196 - DNA, 33 bp, Homo sapien
aaattactatttcacataattgaacctctacgt

SEQ ID NO: 625197 - DNA, 33 bp, Homo sapien
tactattcaggactcaaagtagattattagtga

SEQ ID NO: 625198 - DNA, 33 bp, Homo sapien
tactattcaggactcagagtagattattagtga

SEQ ID NO: 625199 - DNA, 33 bp, Homo sapien
tcaatagcttttatcgccagaaaatcggtacca

SEQ ID NO: 625200 - DNA, 33 bp, Homo sapien
tcaatagcttttatcgtcagaaaatcggtacca

SEQ ID NO: 625201 - DNA, 33 bp, Homo sapien
gaactcctgaagattcaagagtccgtcattggc

SEQ ID NO: 625202 - DNA, 33 bp, Homo sapien
gaactcctgaagattcgagagtccgtcattggc

SEQ ID NO: 625203 - DNA, 33 bp, Homo sapien
ataataaatggtcaaacattgaaaaaccaagag

SEQ ID NO: 625204 - DNA, 33 bp, Homo sapien
ataataaatggtcaaatattgaaaaaccaagag

SEQ ID NO: 625205 - DNA, 33 bp, Homo sapien
aggaagcagaccaaaacgggggagcactttagc

SEQ ID NO: 625206 - DNA, 33 bp, Homo sapien
aggaagcagaccaaaaggggggagcactttagc

SEQ ID NO: 625207 - DNA, 33 bp, Homo sapien
gacatttaaacactaccgctattaggctagtat

SEQ ID NO: 625208 - DNA, 33 bp, Homo sapien
gacatttaaacactactgctattaggctagtat

SEQ ID NO: 625209 - DNA, 33 bp, Homo sapien
gatgaacctcgaggaagatgattgtgcaggaag

SEQ ID NO: 625210 - DNA, 33 bp, Homo sapien
gatgaacctcgaggaatatgattgtgcaggaag

SEQ ID NO: 625211 - DNA, 33 bp, Homo sapien
gaaagaggaaacagaacgaaatattgctggatg

SEQ ID NO: 625212 - DNA, 33 bp, Homo sapien
gaaagaggaaacagaaggaaatattgctggatg

SEQ ID NO: 625213 - DNA, 33 bp, Homo sapien
agcagggcagtcaagacatttggtgatgtagac

SEQ ID NO: 625214 - DNA, 33 bp, Homo sapien
agcagggcagtcaagatatttggtgatgtagac

SEQ ID NO: 625215 - DNA, 33 bp, Homo sapien
aattccactatgtaaaaactttcctgctgcctt

SEQ ID NO: 625216 - DNA, 33 bp, Homo sapien
aattccactatgtaaagactttcctgctgcctt

SEQ ID NO: 625217 - DNA, 33 bp, Homo sapien
tttaacttttgtgggcaccatagtaggtgtata

SEQ ID NO: 625218 - DNA, 33 bp, Homo sapien
tttaacttttgtgggctccatagtaggtgtata

SEQ ID NO: 625219 - DNA, 33 bp, Homo sapien
ctattatgactgcacaatagagtgactattcaa

SEQ ID NO: 625220 - DNA, 33 bp, Homo sapien
ctattatgactgcacagtagagtgactattcaa

SEQ ID NO: 625221 - DNA, 33 bp, Homo sapien
cttcaggaagccacaacaagcatataagttgcc

SEQ ID NO: 625222 - DNA, 33 bp, Homo sapien
cttcaggaagccacaataagcatataagttgcc

SEQ ID NO: 625223 - DNA, 33 bp, Homo sapien
tttgtctgtttctctcacctctagcttgacata

SEQ ID NO: 625224 - DNA, 33 bp, Homo sapien
tttgtctgtttctctcgcctctagcttgacata

SEQ ID NO: 625225 - DNA, 33 bp, Homo sapien
aaatataaaagaaatcacctgcaactttatctc

SEQ ID NO: 625226 - DNA, 33 bp, Homo sapien
aaatataaaagaaatcgcctgcaactttatctc

SEQ ID NO: 625227 - DNA, 33 bp, Homo sapien
accatcgtcattaggaaattgcaaacactcatg

SEQ ID NO: 625228 - DNA, 33 bp, Homo sapien
accatcgtcattaggagattgcaaacactcatg

SEQ ID NO: 625229 - DNA, 33 bp, Homo sapien
tcttttgacagagctgaaagtgatgagaaaaaa

SEQ ID NO: 625230 - DNA, 33 bp, Homo sapien
tcttttgacagagctggaagtgatgagaaaaaa

SEQ ID NO: 625231 - DNA, 33 bp, Homo sapien
ttcaacaggccggtgacgtgaggaaaacagagg

SEQ ID NO: 625232 - DNA, 33 bp, Homo sapien
ttcaacaggccggtgatgtgaggaaaacagagg

SEQ ID NO: 625233 - DNA, 33 bp, Homo sapien
ctactaggtacctaaaattaaaagtcacaataa

SEQ ID NO: 625234 - DNA, 33 bp, Homo sapien
ctactaggtacctaaagttaaaagtcacaataa

SEQ ID NO: 625235 - DNA, 33 bp, Homo sapien
tcaggatgaaatcataacaagcttttgagttaa

SEQ ID NO: 625236 - DNA, 33 bp, Homo sapien
tcaggatgaaatcatagcaagcttttgagttaa

SEQ ID NO: 625237 - DNA, 33 bp, Homo sapien
tgaaatgtgttgttggaaggaaagccaaaatgt

SEQ ID NO: 625238 - DNA, 33 bp, Homo sapien
tgaaatgtgttgttgggaggaaagccaaaatgt

SEQ ID NO: 625239 - DNA, 33 bp, Homo sapien
aagttacgaggaataaatcatccctagaaacat

SEQ ID NO: 625240 - DNA, 33 bp, Homo sapien
aagttacgaggaataagtcatccctagaaacat

SEQ ID NO: 625241 - DNA, 33 bp, Homo sapien
ctgtggggtaagaacacattagtattctggctt

SEQ ID NO: 625242 - DNA, 33 bp, Homo sapien
ctgtggggtaagaacatattagtattctggctt

SEQ ID NO: 625243 - DNA, 33 bp, Homo sapien
ttctaggcctttgttacggcattcaggttaaat

SEQ ID NO: 625244 - DNA, 33 bp, Homo sapien
ttctaggcctttgttatggcattcaggttaaat

SEQ ID NO: 625245 - DNA, 33 bp, Homo sapien
caggtttaaaactaccactatggcacaaagcca

SEQ ID NO: 625246 - DNA, 33 bp, Homo sapien
caggtttaaaactaccgctatggcacaaagcca

SEQ ID NO: 625247 - DNA, 33 bp, Homo sapien
tttcccaggggaatataaagagggctatctgat

SEQ ID NO: 625248 - DNA, 33 bp, Homo sapien
tttcccaggggaatatgaagagggctatctgat

SEQ ID NO: 625249 - DNA, 33 bp, Homo sapien
atgcacagtgactaaacggtggtggagagtgtg

SEQ ID NO: 625250 - DNA, 33 bp, Homo sapien
atgcacagtgactaaatggtggtggagagtgtg

SEQ ID NO: 625251 - DNA, 33 bp, Homo sapien
gttaacaatcactgtaccaattgttcttgagtt

SEQ ID NO: 625252 - DNA, 33 bp, Homo sapien
gttaacaatcactgtagcaattgttcttgagtt

SEQ ID NO: 625253 - DNA, 33 bp, Homo sapien
tttctgcctctacaaagttggaaatgactatct

SEQ ID NO: 625254 - DNA, 33 bp, Homo sapien
tttctgcctctacaaatttggaaatgactatct

SEQ ID NO: 625255 - DNA, 33 bp, Homo sapien
atcactgctcagcataccctctaaaaagtcagc

SEQ ID NO: 625256 - DNA, 33 bp, Homo sapien
atcactgctcagcatatcctctaaaaagtcagc

SEQ ID NO: 625257 - DNA, 33 bp, Homo sapien
ccttcctcttgaagaccacatttaggaattttc

SEQ ID NO: 625258 - DNA, 33 bp, Homo sapien
ccttcctcttgaagactacatttaggaattttc

SEQ ID NO: 625259 - DNA, 33 bp, Homo sapien
atcattcagaacagaaacgaaaatggggctaag

SEQ ID NO: 625260 - DNA, 33 bp, Homo sapien
atcattcagaacagaagcgaaaatggggctaag

SEQ ID NO: 625261 - DNA, 33 bp, Homo sapien
ccagtgacctaaaggaaataagaccagctttac

SEQ ID NO: 625262 - DNA, 33 bp, Homo sapien
ccagtgacctaaaggacataagaccagctttac

SEQ ID NO: 625263 - DNA, 33 bp, Homo sapien
aggttaaatccagatcacaaaagtttaatttct

SEQ ID NO: 625264 - DNA, 33 bp, Homo sapien
aggttaaatccagatcgcaaaagtttaatttct

SEQ ID NO: 625265 - DNA, 33 bp, Homo sapien
ctaatgtatgaagagcaacatatccaatgtttg

SEQ ID NO: 625266 - DNA, 33 bp, Homo sapien
ctaatgtatgaagagcgacatatccaatgtttg

SEQ ID NO: 625267 - DNA, 33 bp, Homo sapien
agtggcaaatcataatcactgctttatgctaat

SEQ ID NO: 625268 - DNA, 33 bp, Homo sapien
agtggcaaatcataattactgctttatgctaat

SEQ ID NO: 625269 - DNA, 33 bp, Homo sapien
ctccctaaagttgccaatgacgtccatgtagct

SEQ ID NO: 625270 - DNA, 33 bp, Homo sapien
ctccctaaagttgccagtgacgtccatgtagct

SEQ ID NO: 625271 - DNA, 33 bp, Homo sapien
agaagagataggaatacagcgggaaagaatgag

SEQ ID NO: 625272 - DNA, 33 bp, Homo sapien
agaagagataggaatagagcgggaaagaatgag

SEQ ID NO: 625273 - DNA, 33 bp, Homo sapien
gtgctagttcaagaagaaagcagctagctcttt

SEQ ID NO: 625274 - DNA, 33 bp, Homo sapien
gtgctagttcaagaaggaagcagctagctcttt

SEQ ID NO: 625275 - DNA, 33 bp, Homo sapien
atacaggcttaacaaaccattgtgctgctttct

SEQ ID NO: 625276 - DNA, 33 bp, Homo sapien
atacaggcttaacaaatcattgtgctgctttct

SEQ ID NO: 625277 - DNA, 33 bp, Homo sapien
ttttgcctgtgcttaaactgcaaggttgaaaag

SEQ ID NO: 625278 - DNA, 33 bp, Homo sapien
ttttgcctgtgcttaagctgcaaggttgaaaag

SEQ ID NO: 625279 - DNA, 33 bp, Homo sapien
tctgtggactattctcaacacagtacctcctac

SEQ ID NO: 625280 - DNA, 33 bp, Homo sapien
tctgtggactattctcgacacagtacctcctac

SEQ ID NO: 625281 - DNA, 33 bp, Homo sapien
tttattttatactctcacctacaataccattac

SEQ ID NO: 625282 - DNA, 33 bp, Homo sapien
tttattttatactctctcctacaataccattac

SEQ ID NO: 625283 - DNA, 33 bp, Homo sapien
ttacattatgagactacgttgtgttagaatctc

SEQ ID NO: 625284 - DNA, 33 bp, Homo sapien
ttacattatgagactatgttgtgttagaatctc

SEQ ID NO: 625285 - DNA, 33 bp, Homo sapien
aaattcagcttgaaaaaacttatgcaattgggc

SEQ ID NO: 625286 - DNA, 33 bp, Homo sapien
aaattcagcttgaaaacacttatgcaattgggc

SEQ ID NO: 625287 - DNA, 33 bp, Homo sapien
ggcctgggttattcctcagctgaaactcactga

SEQ ID NO: 625288 - DNA, 33 bp, Homo sapien
ggcctgggttattccttagctgaaactcactga

SEQ ID NO: 625289 - DNA, 33 bp, Homo sapien
ttttctgacagttcacaaatacctcctgtgtaa

SEQ ID NO: 625290 - DNA, 33 bp, Homo sapien
ttttctgacagttcacgaatacctcctgtgtaa

SEQ ID NO: 625291 - DNA, 33 bp, Homo sapien
attaggaataatatgcacaatgcatggcaggta

SEQ ID NO: 625292 - DNA, 33 bp, Homo sapien
attaggaataatatgcgcaatgcatggcaggta

SEQ ID NO: 625293 - DNA, 33 bp, Homo sapien
ctcctagtgttatttacgttttcatcactagat

SEQ ID NO: 625294 - DNA, 33 bp, Homo sapien
ctcctagtgttatttatgttttcatcactagat

SEQ ID NO: 625295 - DNA, 33 bp, Homo sapien
tgtagagataggaaacaggctttataataagag

SEQ ID NO: 625296 - DNA, 33 bp, Homo sapien
tgtagagataggaaacgggctttataataagag

SEQ ID NO: 625297 - DNA, 33 bp, Homo sapien
cccctttccggtagcactaccatctccacttcc

SEQ ID NO: 625298 - DNA, 33 bp, Homo sapien
cccctttccggtagcattaccatctccacttcc

SEQ ID NO: 625299 - DNA, 33 bp, Homo sapien
aacttgagtattcagcacaaaggatcgttattg

SEQ ID NO: 625300 - DNA, 33 bp, Homo sapien
aacttgagtattcagcgcaaaggatcgttattg

SEQ ID NO: 625301 - DNA, 33 bp, Homo sapien
ctcggctttttagaaacgttggtatctactctt

SEQ ID NO: 625302 - DNA, 33 bp, Homo sapien
ctcggctttttagaaatgttggtatctactctt

SEQ ID NO: 625303 - DNA, 33 bp, Homo sapien
ttaggaaagtcactgaagatggtgtggtctcct

SEQ ID NO: 625304 - DNA, 33 bp, Homo sapien
ttaggaaagtcactgacgatggtgtggtctcct

SEQ ID NO: 625305 - DNA, 33 bp, Homo sapien
tttgtgatgaatacataagttttccaaagtcta

SEQ ID NO: 625306 - DNA, 33 bp, Homo sapien
tttgtgatgaatacatgagttttccaaagtcta

SEQ ID NO: 625307 - DNA, 33 bp, Homo sapien
caaatggacaggctaaagataagagtctaatat

SEQ ID NO: 625308 - DNA, 33 bp, Homo sapien
caaatggacaggctaaggataagagtctaatat

SEQ ID NO: 625309 - DNA, 33 bp, Homo sapien
tatgcataaagtctaccaaagcattggtcctct

SEQ ID NO: 625310 - DNA, 33 bp, Homo sapien
tatgcataaagtctacgaaagcattggtcctct

SEQ ID NO: 625311 - DNA, 33 bp, Homo sapien
gttcagttctcaagacaaatgagttagaattct

SEQ ID NO: 625312 - DNA, 33 bp, Homo sapien
gttcagttctcaagacgaatgagttagaattct

SEQ ID NO: 625313 - DNA, 33 bp, Homo sapien
atagaagcaaaatgaaagtcactctcataatga

SEQ ID NO: 625314 - DNA, 33 bp, Homo sapien
atagaagcaaaatgaaggtcactctcataatga

SEQ ID NO: 625315 - DNA, 33 bp, Homo sapien
tgtgacctaagacaaaacctctcccggttgttg

SEQ ID NO: 625316 - DNA, 33 bp, Homo sapien
tgtgacctaagacaaatcctctcccggttgttg

SEQ ID NO: 625317 - DNA, 33 bp, Homo sapien
gatcaatgcaaagaaacgtgtcttgcctctctc

SEQ ID NO: 625318 - DNA, 33 bp, Homo sapien
gatcaatgcaaagaaatgtgtcttgcctctctc

SEQ ID NO: 625319 - DNA, 33 bp, Homo sapien
gtatcaataaagaaaaacttatcctgggccacg

SEQ ID NO: 625320 - DNA, 33 bp, Homo sapien
gtatcaataaagaaaaccttatcctgggccacg

SEQ ID NO: 625321 - DNA, 33 bp, Homo sapien
tcactgagaacttcaacatagctctcctatggg

SEQ ID NO: 625322 - DNA, 33 bp, Homo sapien
tcactgagaacttcaagatagctctcctatggg

SEQ ID NO: 625323 - DNA, 33 bp, Homo sapien
cagcttgttggcaaaaatggttcccttatcacg

SEQ ID NO: 625324 - DNA, 33 bp, Homo sapien
cagcttgttggcaaaagtggttcccttatcacg

SEQ ID NO: 625325 - DNA, 33 bp, Homo sapien
aacaaaacttgaaagcaatggctgaaactgctg

SEQ ID NO: 625326 - DNA, 33 bp, Homo sapien
aacaaaacttgaaagcgatggctgaaactgctg

SEQ ID NO: 625327 - DNA, 33 bp, Homo sapien
ttatgtagaatattcccaatgagatgcactagg

SEQ ID NO: 625328 - DNA, 33 bp, Homo sapien
ttatgtagaatattcctaatgagatgcactagg

SEQ ID NO: 625329 - DNA, 33 bp, Homo sapien
aacaggaattgaaagactatgcttgggagaaca

SEQ ID NO: 625330 - DNA, 33 bp, Homo sapien
aacaggaattgaaagagtatgcttgggagaaca

SEQ ID NO: 625331 - DNA, 33 bp, Homo sapien
gatgtcacagagaaagaaagtcttagaactaga

SEQ ID NO: 625332 - DNA, 33 bp, Homo sapien
gatgtcacagagaaagcaagtcttagaactaga

SEQ ID NO: 625333 - DNA, 33 bp, Homo sapien
taactcctttaatctacgcaacaagcctatgag

SEQ ID NO: 625334 - DNA, 33 bp, Homo sapien
taactcctttaatctatgcaacaagcctatgag

SEQ ID NO: 625335 - DNA, 33 bp, Homo sapien
caaatacctacatgcacggagcaggtgacgtaa

SEQ ID NO: 625336 - DNA, 33 bp, Homo sapien
caaatacctacatgcagggagcaggtgacgtaa

SEQ ID NO: 625337 - DNA, 33 bp, Homo sapien
tctattactcaaatacaaatacaaatagcttcc

SEQ ID NO: 625338 - DNA, 33 bp, Homo sapien
tctattactcaaatacgaatacaaatagcttcc

SEQ ID NO: 625339 - DNA, 33 bp, Homo sapien
ttcaattattgtctcacgtgtacctgtaggacc

SEQ ID NO: 625340 - DNA, 33 bp, Homo sapien
ttcaattattgtctcatgtgtacctgtaggacc

SEQ ID NO: 625341 - DNA, 33 bp, Homo sapien
ttctatttagattatgccacaatgtatatgcag

SEQ ID NO: 625342 - DNA, 33 bp, Homo sapien
ttctatttagattatgtcacaatgtatatgcag

SEQ ID NO: 625343 - DNA, 33 bp, Homo sapien
ctccaccagtttctccgacttcaatttgtatgt

SEQ ID NO: 625344 - DNA, 33 bp, Homo sapien
ctccaccagtttctcctacttcaatttgtatgt

SEQ ID NO: 625345 - DNA, 33 bp, Homo sapien
ttcttcagagaaggagacatccatgagccatta

SEQ ID NO: 625346 - DNA, 33 bp, Homo sapien
ttcttcagagaaggaggcatccatgagccatta

SEQ ID NO: 625347 - DNA, 33 bp, Homo sapien
tttccattaccatgaaaaaaagacatgtacgta

SEQ ID NO: 625348 - DNA, 33 bp, Homo sapien
tttccattaccatgaataaaagacatgtacgta

SEQ ID NO: 625349 - DNA, 33 bp, Homo sapien
aatttgtgtaacctaactgaaatttgctgatgt

SEQ ID NO: 625350 - DNA, 33 bp, Homo sapien
aatttgtgtaacctaattgaaatttgctgatgt

SEQ ID NO: 625351 - DNA, 33 bp, Homo sapien
aggcaggcagacatacaaaagagcctctggttt

SEQ ID NO: 625352 - DNA, 33 bp, Homo sapien
aggcaggcagacatacgaaagagcctctggttt

SEQ ID NO: 625353 - DNA, 33 bp, Homo sapien
caaataagcagaagccaatcatcagagaaaagc

SEQ ID NO: 625354 - DNA, 33 bp, Homo sapien
caaataagcagaagccgatcatcagagaaaagc

SEQ ID NO: 625355 - DNA, 33 bp, Homo sapien
aacaaattttgtgcccacattgagtttactgta

SEQ ID NO: 625356 - DNA, 33 bp, Homo sapien
aacaaattttgtgcccgcattgagtttactgta

SEQ ID NO: 625357 - DNA, 33 bp, Homo sapien
taaaattaaccaacacactatcaaagtcaagtt

SEQ ID NO: 625358 - DNA, 33 bp, Homo sapien
taaaattaaccaacacgctatcaaagtcaagtt

SEQ ID NO: 625359 - DNA, 33 bp, Homo sapien
agattatgttctgcaaagtatgtctagaactga

SEQ ID NO: 625360 - DNA, 33 bp, Homo sapien
agattatgttctgcaaggtatgtctagaactga

SEQ ID NO: 625361 - DNA, 33 bp, Homo sapien
gggaccatggctctaaaggtccaaacactgaca

SEQ ID NO: 625362 - DNA, 33 bp, Homo sapien
gggaccatggctctaatggtccaaacactgaca

SEQ ID NO: 625363 - DNA, 33 bp, Homo sapien
tttgtgctttcctaaactggattagaaataggt

SEQ ID NO: 625364 - DNA, 33 bp, Homo sapien
tttgtgctttcctaaattggattagaaataggt

SEQ ID NO: 625365 - DNA, 33 bp, Homo sapien
aaaaggagaaaattccaaacaactaatatagta

SEQ ID NO: 625366 - DNA, 33 bp, Homo sapien
aaaaggagaaaattccgaacaactaatatagta

SEQ ID NO: 625367 - DNA, 33 bp, Homo sapien
gaaggttattttgtggacatgaacaaactgatt

SEQ ID NO: 625368 - DNA, 33 bp, Homo sapien
gaaggttattttgtggtcatgaacaaactgatt

SEQ ID NO: 625369 - DNA, 33 bp, Homo sapien
acaaataaataatagcaacccacaacaccactg

SEQ ID NO: 625370 - DNA, 33 bp, Homo sapien
acaaataaataatagcgacccacaacaccactg

SEQ ID NO: 625371 - DNA, 33 bp, Homo sapien
tgccataaagagtacaactagtgatgggtttct

SEQ ID NO: 625372 - DNA, 33 bp, Homo sapien
tgccataaagagtacagctagtgatgggtttct

SEQ ID NO: 625373 - DNA, 33 bp, Homo sapien
ggtatctgacttggacaacattacctgcaagtc

SEQ ID NO: 625374 - DNA, 33 bp, Homo sapien
ggtatctgacttggacgacattacctgcaagtc

SEQ ID NO: 625375 - DNA, 33 bp, Homo sapien
ataggatataaggtccaatctggcgcataaggc

SEQ ID NO: 625376 - DNA, 33 bp, Homo sapien
ataggatataaggtccgatctggcgcataaggc

SEQ ID NO: 625377 - DNA, 33 bp, Homo sapien
ccctgaccacagaaaaatctaaatgaggtggcc

SEQ ID NO: 625378 - DNA, 33 bp, Homo sapien
ccctgaccacagaaaattctaaatgaggtggcc

SEQ ID NO: 625379 - DNA, 33 bp, Homo sapien
tcaaatctgaagacataagtgacttgcaggaga

SEQ ID NO: 625380 - DNA, 33 bp, Homo sapien
tcaaatctgaagacatgagtgacttgcaggaga

SEQ ID NO: 625381 - DNA, 33 bp, Homo sapien
acatactctattcaacggtatcttttgccaaag

SEQ ID NO: 625382 - DNA, 33 bp, Homo sapien
acatactctattcaactgtatcttttgccaaag

SEQ ID NO: 625383 - DNA, 33 bp, Homo sapien
aatcaattctgaaagcacagtatttctacccag

SEQ ID NO: 625384 - DNA, 33 bp, Homo sapien
aatcaattctgaaagcgcagtatttctacccag

SEQ ID NO: 625385 - DNA, 33 bp, Homo sapien
ttatgattctatataccatttcagaaggtgaac

SEQ ID NO: 625386 - DNA, 33 bp, Homo sapien
ttatgattctatatactatttcagaaggtgaac

SEQ ID NO: 625387 - DNA, 33 bp, Homo sapien
tgcaataaaataaagacgatgttggtaatttag

SEQ ID NO: 625388 - DNA, 33 bp, Homo sapien
tgcaataaaataaagatgatgttggtaatttag

SEQ ID NO: 625389 - DNA, 33 bp, Homo sapien
aaccacttgcgtaagactaagaggttcttcccc

SEQ ID NO: 625390 - DNA, 33 bp, Homo sapien
aaccacttgcgtaagagtaagaggttcttcccc

SEQ ID NO: 625391 - DNA, 33 bp, Homo sapien
ctaaagaaagataagcacttggatcaaacattt

SEQ ID NO: 625392 - DNA, 33 bp, Homo sapien
ctaaagaaagataagcgcttggatcaaacattt

SEQ ID NO: 625393 - DNA, 33 bp, Homo sapien
gtgagctggactttgacggtgttaaggctattt

SEQ ID NO: 625394 - DNA, 33 bp, Homo sapien
gtgagctggactttgatggtgttaaggctattt

SEQ ID NO: 625395 - DNA, 33 bp, Homo sapien
gactatcgaggtggagcctaaatgtaatctaaa

SEQ ID NO: 625396 - DNA, 33 bp, Homo sapien
gactatcgaggtggagtctaaatgtaatctaaa

SEQ ID NO: 625397 - DNA, 33 bp, Homo sapien
catattcataagggaaacataacttgcaactaa

SEQ ID NO: 625398 - DNA, 33 bp, Homo sapien
catattcataagggaaccataacttgcaactaa

SEQ ID NO: 625399 - DNA, 33 bp, Homo sapien
tcaacataaaatggtcaaagagaatgattggga

SEQ ID NO: 625400 - DNA, 33 bp, Homo sapien
tcaacataaaatggtcgaagagaatgattggga

SEQ ID NO: 625401 - DNA, 33 bp, Homo sapien
gtggtgactcatgcaccgaacattaattcaaaa

SEQ ID NO: 625402 - DNA, 33 bp, Homo sapien
gtggtgactcatgcactgaacattaattcaaaa

SEQ ID NO: 625403 - DNA, 33 bp, Homo sapien
gaaaaatctgcaatgacatccaataacaaatga

SEQ ID NO: 625404 - DNA, 33 bp, Homo sapien
gaaaaatctgcaatgatatccaataacaaatga

SEQ ID NO: 625405 - DNA, 33 bp, Homo sapien
atgaaatagcctagagcaagcaatgtctgtgac

SEQ ID NO: 625406 - DNA, 33 bp, Homo sapien
atgaaatagcctagagtaagcaatgtctgtgac

SEQ ID NO: 625407 - DNA, 33 bp, Homo sapien
tggggcagttcagtccaaggtctcaaccaacct

SEQ ID NO: 625408 - DNA, 33 bp, Homo sapien
tggggcagttcagtcccaggtctcaaccaacct

SEQ ID NO: 625409 - DNA, 33 bp, Homo sapien
attggggacgttttcacggagaatatccacata

SEQ ID NO: 625410 - DNA, 33 bp, Homo sapien
attggggacgttttcatggagaatatccacata

SEQ ID NO: 625411 - DNA, 33 bp, Homo sapien
tgttcactgtagtcaactcaaggaaagagacag

SEQ ID NO: 625412 - DNA, 33 bp, Homo sapien
tgttcactgtagtcaattcaaggaaagagacag

SEQ ID NO: 625413 - DNA, 33 bp, Homo sapien
ggagatcctgcttgaaattaaattcaatgcaga

SEQ ID NO: 625414 - DNA, 33 bp, Homo sapien
ggagatcctgcttgaagttaaattcaatgcaga

SEQ ID NO: 625415 - DNA, 33 bp, Homo sapien
ttaatcagtcctgatacagctgccaggcttatt

SEQ ID NO: 625416 - DNA, 33 bp, Homo sapien
ttaatcagtcctgatatagctgccaggcttatt

SEQ ID NO: 625417 - DNA, 33 bp, Homo sapien
gggtgtgttctcacccaatgagtggttccggga

SEQ ID NO: 625418 - DNA, 33 bp, Homo sapien
gggtgtgttctcacccgatgagtggttccggga

SEQ ID NO: 625419 - DNA, 33 bp, Homo sapien
gcaggagcttaatagcagcatatggacagagtg

SEQ ID NO: 625420 - DNA, 33 bp, Homo sapien
gcaggagcttaatagcggcatatggacagagtg

SEQ ID NO: 625421 - DNA, 33 bp, Homo sapien
agagatttgcagaaggaccatctccacagattc

SEQ ID NO: 625422 - DNA, 33 bp, Homo sapien
agagatttgcagaagggccatctccacagattc

SEQ ID NO: 625423 - DNA, 33 bp, Homo sapien
gggcttgctctattgcactgcacatctgctatt

SEQ ID NO: 625424 - DNA, 33 bp, Homo sapien
gggcttgctctattgcgctgcacatctgctatt

SEQ ID NO: 625425 - DNA, 33 bp, Homo sapien
ttgaggcagaagtccactctccgatgttacttt

SEQ ID NO: 625426 - DNA, 33 bp, Homo sapien
ttgaggcagaagtccattctccgatgttacttt

SEQ ID NO: 625427 - DNA, 33 bp, Homo sapien
gtgatttttaaggctaggttatcaaagaaacgg

SEQ ID NO: 625428 - DNA, 33 bp, Homo sapien
gtgatttttaaggctatgttatcaaagaaacgg

SEQ ID NO: 625429 - DNA, 33 bp, Homo sapien
acaatctatgctgaaaggaccagtcttgtacat

SEQ ID NO: 625430 - DNA, 33 bp, Homo sapien
acaatctatgctgaaatgaccagtcttgtacat

SEQ ID NO: 625431 - DNA, 33 bp, Homo sapien
cgaaacttttcttgaaattatgatatgcaggta

SEQ ID NO: 625432 - DNA, 33 bp, Homo sapien
cgaaacttttcttgaagttatgatatgcaggta

SEQ ID NO: 625433 - DNA, 33 bp, Homo sapien
caaattcaggctgctaaatatagatgcgacaat

SEQ ID NO: 625434 - DNA, 33 bp, Homo sapien
caaattcaggctgctacatatagatgcgacaat

SEQ ID NO: 625435 - DNA, 33 bp, Homo sapien
actacataagctgtggaaaccctgaattttcct

SEQ ID NO: 625436 - DNA, 33 bp, Homo sapien
actacataagctgtggcaaccctgaattttcct

SEQ ID NO: 625437 - DNA, 33 bp, Homo sapien
agattcctgcctaggaaaggaaaacaaggattt

SEQ ID NO: 625438 - DNA, 33 bp, Homo sapien
agattcctgcctaggagaggaaaacaaggattt

SEQ ID NO: 625439 - DNA, 33 bp, Homo sapien
gcagagtgagaaagcacggaaatatacacaggc

SEQ ID NO: 625440 - DNA, 33 bp, Homo sapien
gcagagtgagaaagcatggaaatatacacaggc

SEQ ID NO: 625441 - DNA, 33 bp, Homo sapien
tgcaaattaagattgacgaatatagagagacag

SEQ ID NO: 625442 - DNA, 33 bp, Homo sapien
tgcaaattaagattgatgaatatagagagacag

SEQ ID NO: 625443 - DNA, 33 bp, Homo sapien
taggagatatttaccacctattccctccgaagc

SEQ ID NO: 625444 - DNA, 33 bp, Homo sapien
taggagatatttaccatctattccctccgaagc

SEQ ID NO: 625445 - DNA, 33 bp, Homo sapien
aaccaaacttttatcaagatgtagaacatgacc

SEQ ID NO: 625446 - DNA, 33 bp, Homo sapien
aaccaaacttttatcaggatgtagaacatgacc

SEQ ID NO: 625447 - DNA, 33 bp, Homo sapien
gctaaggccatcttcacgttgtgcttttatttt

SEQ ID NO: 625448 - DNA, 33 bp, Homo sapien
gctaaggccatcttcatgttgtgcttttatttt

SEQ ID NO: 625449 - DNA, 33 bp, Homo sapien
atgaactgctttcttcaactctgaaataaagtg

SEQ ID NO: 625450 - DNA, 33 bp, Homo sapien
atgaactgctttcttcgactctgaaataaagtg

SEQ ID NO: 625451 - DNA, 33 bp, Homo sapien
aatctcaatgtaagtacctaactcaggaatgtg

SEQ ID NO: 625452 - DNA, 33 bp, Homo sapien
aatctcaatgtaagtatctaactcaggaatgtg

SEQ ID NO: 625453 - DNA, 33 bp, Homo sapien
gcttcctgttcacatacgactttcggaaacctc

SEQ ID NO: 625454 - DNA, 33 bp, Homo sapien
gcttcctgttcacatatgactttcggaaacctc

SEQ ID NO: 625455 - DNA, 33 bp, Homo sapien
caggcaggaagtgctaagggagaacacaccctg

SEQ ID NO: 625456 - DNA, 33 bp, Homo sapien
caggcaggaagtgctaggggagaacacaccctg

SEQ ID NO: 625457 - DNA, 33 bp, Homo sapien
ctctaaattctgtctccgaagaccctttgtggc

SEQ ID NO: 625458 - DNA, 33 bp, Homo sapien
ctctaaattctgtctctgaagaccctttgtggc

SEQ ID NO: 625459 - DNA, 33 bp, Homo sapien
tgggaattaccagacaactttgggtatgttctc

SEQ ID NO: 625460 - DNA, 33 bp, Homo sapien
tgggaattaccagacacctttgggtatgttctc

SEQ ID NO: 625461 - DNA, 33 bp, Homo sapien
ataccaataggaaagacgccattaatctcaata

SEQ ID NO: 625462 - DNA, 33 bp, Homo sapien
ataccaataggaaagatgccattaatctcaata

SEQ ID NO: 625463 - DNA, 33 bp, Homo sapien
gtaaattgataatgtcccatgaaccgaggaata

SEQ ID NO: 625464 - DNA, 33 bp, Homo sapien
gtaaattgataatgtctcatgaaccgaggaata

SEQ ID NO: 625465 - DNA, 33 bp, Homo sapien
ggcattaaatattggacactcatagacataaag

SEQ ID NO: 625466 - DNA, 33 bp, Homo sapien
ggcattaaatattggatactcatagacataaag

SEQ ID NO: 625467 - DNA, 33 bp, Homo sapien
cttataaatgagaatacgtagcattttgttttc

SEQ ID NO: 625468 - DNA, 33 bp, Homo sapien
cttataaatgagaatatgtagcattttgttttc

SEQ ID NO: 625469 - DNA, 33 bp, Homo sapien
ctgtgagtgggaaccaggtctaaacccaccagt

SEQ ID NO: 625470 - DNA, 33 bp, Homo sapien
ctgtgagtgggaaccatgtctaaacccaccagt

SEQ ID NO: 625471 - DNA, 33 bp, Homo sapien
gcctttgatgaactcacgagctagttaggtgag

SEQ ID NO: 625472 - DNA, 33 bp, Homo sapien
gcctttgatgaactcatgagctagttaggtgag

SEQ ID NO: 625473 - DNA, 33 bp, Homo sapien
tgcagtaagacaaacagtatcttaggggacaca

SEQ ID NO: 625474 - DNA, 33 bp, Homo sapien
tgcagtaagacaaacattatcttaggggacaca

SEQ ID NO: 625475 - DNA, 33 bp, Homo sapien
gccttgtaatacacaacaagaaaagtcacatag

SEQ ID NO: 625476 - DNA, 33 bp, Homo sapien
gccttgtaatacacaataagaaaagtcacatag

SEQ ID NO: 625477 - DNA, 33 bp, Homo sapien
atgtagttggcagtcaccccatagaagtgatgt

SEQ ID NO: 625478 - DNA, 33 bp, Homo sapien
atgtagttggcagtcagcccatagaagtgatgt

SEQ ID NO: 625479 - DNA, 33 bp, Homo sapien
ccaccttggaaatagaggatccaaccccactca

SEQ ID NO: 625480 - DNA, 33 bp, Homo sapien
ccaccttggaaatagatgatccaaccccactca

SEQ ID NO: 625481 - DNA, 33 bp, Homo sapien
atcggacatctgtggtcaaaagtctccatgttg

SEQ ID NO: 625482 - DNA, 33 bp, Homo sapien
atcggacatctgtggttaaaagtctccatgttg

SEQ ID NO: 625483 - DNA, 33 bp, Homo sapien
tctctagtcataacaacctttgggctcttcttc

SEQ ID NO: 625484 - DNA, 33 bp, Homo sapien
tctctagtcataacaatctttgggctcttcttc

SEQ ID NO: 625485 - DNA, 33 bp, Homo sapien
tctgggtatatatccaaaagaattcaaagcagg

SEQ ID NO: 625486 - DNA, 33 bp, Homo sapien
tctgggtatatatccacaagaattcaaagcagg

SEQ ID NO: 625487 - DNA, 33 bp, Homo sapien
taattttttgtgagtacatagcaggtgtatgta

SEQ ID NO: 625488 - DNA, 33 bp, Homo sapien
taattttttgtgagtatatagcaggtgtatgta

SEQ ID NO: 625489 - DNA, 33 bp, Homo sapien
ctagattcttgtctcaagtcatgctattgggag

SEQ ID NO: 625490 - DNA, 33 bp, Homo sapien
ctagattcttgtctcaggtcatgctattgggag

SEQ ID NO: 625491 - DNA, 33 bp, Homo sapien
ccaagctacctcttcaactctctttcagttggg

SEQ ID NO: 625492 - DNA, 33 bp, Homo sapien
ccaagctacctcttcatctctctttcagttggg

SEQ ID NO: 625493 - DNA, 33 bp, Homo sapien
aatgaaggagttggacggattgctccactctta

SEQ ID NO: 625494 - DNA, 33 bp, Homo sapien
aatgaaggagttggactgattgctccactctta

SEQ ID NO: 625495 - DNA, 33 bp, Homo sapien
ggacatttgcagtactcacctattgagaaatta

SEQ ID NO: 625496 - DNA, 33 bp, Homo sapien
ggacatttgcagtacttacctattgagaaatta

SEQ ID NO: 625497 - DNA, 33 bp, Homo sapien
catgaggaagaatgaacgtatatgtgagtatat

SEQ ID NO: 625498 - DNA, 33 bp, Homo sapien
catgaggaagaatgaatgtatatgtgagtatat

SEQ ID NO: 625499 - DNA, 33 bp, Homo sapien
gtgaagagcttgtatagctagagatgggaaacc

SEQ ID NO: 625500 - DNA, 33 bp, Homo sapien
gtgaagagcttgtatatctagagatgggaaacc

SEQ ID NO: 625501 - DNA, 33 bp, Homo sapien
ggagttaaagaggaacaaagttatcctaagtat

SEQ ID NO: 625502 - DNA, 33 bp, Homo sapien
ggagttaaagaggaacgaagttatcctaagtat

SEQ ID NO: 625503 - DNA, 33 bp, Homo sapien
ggtctgcgtgcttagacgacaaaaacgaacacc

SEQ ID NO: 625504 - DNA, 33 bp, Homo sapien
ggtctgcgtgcttagatgacaaaaacgaacacc

SEQ ID NO: 625505 - DNA, 33 bp, Homo sapien
tggcagctatttaagacgatttttctcgtaggt

SEQ ID NO: 625506 - DNA, 33 bp, Homo sapien
tggcagctatttaagatgatttttctcgtaggt

SEQ ID NO: 625507 - DNA, 33 bp, Homo sapien
ttttcatttgccactacgttgagaacgattttc

SEQ ID NO: 625508 - DNA, 33 bp, Homo sapien
ttttcatttgccactatgttgagaacgattttc

SEQ ID NO: 625509 - DNA, 33 bp, Homo sapien
catagaaaaacccagccatgattcaatgcatag

SEQ ID NO: 625510 - DNA, 33 bp, Homo sapien
catagaaaaacccagctatgattcaatgcatag

SEQ ID NO: 625511 - DNA, 33 bp, Homo sapien
cagacatgtgaacaagcccattgcagactaatg

SEQ ID NO: 625512 - DNA, 33 bp, Homo sapien
cagacatgtgaacaagtccattgcagactaatg

SEQ ID NO: 625513 - DNA, 33 bp, Homo sapien
aaaagaggtcaggggaacctgcattatcagctt

SEQ ID NO: 625514 - DNA, 33 bp, Homo sapien
aaaagaggtcaggggatcctgcattatcagctt

SEQ ID NO: 625515 - DNA, 33 bp, Homo sapien
gctaggagtggcttaccgcatgcttctatacta

SEQ ID NO: 625516 - DNA, 33 bp, Homo sapien
gctaggagtggcttactgcatgcttctatacta

SEQ ID NO: 625517 - DNA, 33 bp, Homo sapien
cgatcgggtacttatgcaaattctcaggatatc

SEQ ID NO: 625518 - DNA, 33 bp, Homo sapien
cgatcgggtacttatggaaattctcaggatatc

SEQ ID NO: 625519 - DNA, 33 bp, Homo sapien
aaaagacaggaaagaaggtgaacagaaagagtc

SEQ ID NO: 625520 - DNA, 33 bp, Homo sapien
aaaagacaggaaagaatgtgaacagaaagagtc

SEQ ID NO: 625521 - DNA, 33 bp, Homo sapien
ccaattggtggaaatcaatccaattgaagtacc

SEQ ID NO: 625522 - DNA, 33 bp, Homo sapien
ccaattggtggaaatcgatccaattgaagtacc

SEQ ID NO: 625523 - DNA, 33 bp, Homo sapien
cggtgaacattccagccatagagtgaggtatgg

SEQ ID NO: 625524 - DNA, 33 bp, Homo sapien
cggtgaacattccagcgatagagtgaggtatgg

SEQ ID NO: 625525 - DNA, 33 bp, Homo sapien
ttccttctatgagggaacttcatcagcaaagaa

SEQ ID NO: 625526 - DNA, 33 bp, Homo sapien
ttccttctatgagggaccttcatcagcaaagaa

SEQ ID NO: 625527 - DNA, 33 bp, Homo sapien
catacaccacgacgtgaatcagaatacccagcc

SEQ ID NO: 625528 - DNA, 33 bp, Homo sapien
catacaccacgacgtggatcagaatacccagcc

SEQ ID NO: 625529 - DNA, 33 bp, Homo sapien
ttgcatttcactgaagcaagttgccagaactct

SEQ ID NO: 625530 - DNA, 33 bp, Homo sapien
ttgcatttcactgaagtaagttgccagaactct

SEQ ID NO: 625531 - DNA, 33 bp, Homo sapien
aaggataatttccttcccacacaatgaggagaa

SEQ ID NO: 625532 - DNA, 33 bp, Homo sapien
aaggataatttccttctcacacaatgaggagaa

SEQ ID NO: 625533 - DNA, 33 bp, Homo sapien
aaatacctagacaggaacacaaactggacactt

SEQ ID NO: 625534 - DNA, 33 bp, Homo sapien
aaatacctagacaggagcacaaactggacactt

SEQ ID NO: 625535 - DNA, 33 bp, Homo sapien
gccttgactaaactccaggaaatgagacacagc

SEQ ID NO: 625536 - DNA, 33 bp, Homo sapien
gccttgactaaactcctggaaatgagacacagc

SEQ ID NO: 625537 - DNA, 33 bp, Homo sapien
gttgaaagtccaagagaaaatgtggtccgggcc

SEQ ID NO: 625538 - DNA, 33 bp, Homo sapien
gttgaaagtccaagagcaaatgtggtccgggcc

SEQ ID NO: 625539 - DNA, 33 bp, Homo sapien
ctttcattgtcttctgcagtttaaatggaaagg

SEQ ID NO: 625540 - DNA, 33 bp, Homo sapien
ctttcattgtcttctgtagtttaaatggaaagg

SEQ ID NO: 625541 - DNA, 33 bp, Homo sapien
gcatttgaggaaataaacatccaagcgaataaa

SEQ ID NO: 625542 - DNA, 33 bp, Homo sapien
gcatttgaggaaataagcatccaagcgaataaa

SEQ ID NO: 625543 - DNA, 33 bp, Homo sapien
catcacaacctgttgacgtgtttagcaaccagg

SEQ ID NO: 625544 - DNA, 33 bp, Homo sapien
catcacaacctgttgatgtgtttagcaaccagg

SEQ ID NO: 625545 - DNA, 33 bp, Homo sapien
ttcctttggcctttcccagtaagttaaaatcag

SEQ ID NO: 625546 - DNA, 33 bp, Homo sapien
ttcctttggcctttcctagtaagttaaaatcag

SEQ ID NO: 625547 - DNA, 33 bp, Homo sapien
tcactccatgacaaaacaaatctagtttgcttt

SEQ ID NO: 625548 - DNA, 33 bp, Homo sapien
tcactccatgacaaaataaatctagtttgcttt

SEQ ID NO: 625549 - DNA, 33 bp, Homo sapien
ctccttcttaacccacactagtgaacaagggca

SEQ ID NO: 625550 - DNA, 33 bp, Homo sapien
ctccttcttaacccacgctagtgaacaagggca

SEQ ID NO: 625551 - DNA, 33 bp, Homo sapien
atggtaaaaaggaccacgttgaggtgaaaaaat

SEQ ID NO: 625552 - DNA, 33 bp, Homo sapien
atggtaaaaaggaccatgttgaggtgaaaaaat

SEQ ID NO: 625553 - DNA, 33 bp, Homo sapien
atgagtctcttgagtacgtaaccccctccagga

SEQ ID NO: 625554 - DNA, 33 bp, Homo sapien
atgagtctcttgagtatgtaaccccctccagga

SEQ ID NO: 625555 - DNA, 33 bp, Homo sapien
gttttccatttttttcaccattaagagcagtga

SEQ ID NO: 625556 - DNA, 33 bp, Homo sapien
gttttccatttttttcgccattaagagcagtga

SEQ ID NO: 625557 - DNA, 33 bp, Homo sapien
tggactaagacaatgcagaaaatacatggaact

SEQ ID NO: 625558 - DNA, 33 bp, Homo sapien
tggactaagacaatgcggaaaatacatggaact

SEQ ID NO: 625559 - DNA, 33 bp, Homo sapien
gtctgggccagaaaagcaatgtgaaagcaaaca

SEQ ID NO: 625560 - DNA, 33 bp, Homo sapien
gtctgggccagaaaagtaatgtgaaagcaaaca

SEQ ID NO: 625561 - DNA, 33 bp, Homo sapien
atctcttttcctatcacgtttgctcacagaatg

SEQ ID NO: 625562 - DNA, 33 bp, Homo sapien
atctcttttcctatcatgtttgctcacagaatg

SEQ ID NO: 625563 - DNA, 33 bp, Homo sapien
tgcactttatctaaacaccttttatgaactttg

SEQ ID NO: 625564 - DNA, 33 bp, Homo sapien
tgcactttatctaaactccttttatgaactttg

SEQ ID NO: 625565 - DNA, 33 bp, Homo sapien
tgctaaacaacacaacacatattctgaaagtag

SEQ ID NO: 625566 - DNA, 33 bp, Homo sapien
tgctaaacaacacaacgcatattctgaaagtag

SEQ ID NO: 625567 - DNA, 33 bp, Homo sapien
tgaaagtagtgtacaacacaggatacaaccata

SEQ ID NO: 625568 - DNA, 33 bp, Homo sapien
tgaaagtagtgtacaatacaggatacaaccata

SEQ ID NO: 625569 - DNA, 33 bp, Homo sapien
gagaacatcttgttggccagcaatcctggaagg

SEQ ID NO: 625570 - DNA, 33 bp, Homo sapien
gagaacatcttgttggtcagcaatcctggaagg

SEQ ID NO: 625571 - DNA, 33 bp, Homo sapien
aatctgctttgaaatgcacagtggattggggcc

SEQ ID NO: 625572 - DNA, 33 bp, Homo sapien
aatctgctttgaaatgtacagtggattggggcc

SEQ ID NO: 625573 - DNA, 33 bp, Homo sapien
tatatttaatgaatcaggttgaaaattccctat

SEQ ID NO: 625574 - DNA, 33 bp, Homo sapien
tatatttaatgaatcatgttgaaaattccctat

SEQ ID NO: 625575 - DNA, 33 bp, Homo sapien
actttcgttccttccactccaccaaacttgatg

SEQ ID NO: 625576 - DNA, 33 bp, Homo sapien
actttcgttccttccattccaccaaacttgatg

SEQ ID NO: 625577 - DNA, 33 bp, Homo sapien
tgatgcaatcagttagaacgggacattgatcaa

SEQ ID NO: 625578 - DNA, 33 bp, Homo sapien
tgatgcaatcagttaggacgggacattgatcaa

SEQ ID NO: 625579 - DNA, 33 bp, Homo sapien
aataaagtctccaagacagctttgtggataaga

SEQ ID NO: 625580 - DNA, 33 bp, Homo sapien
aataaagtctccaagatagctttgtggataaga

SEQ ID NO: 625581 - DNA, 33 bp, Homo sapien
attaaagtttgagagaacccgatgtaatgatta

SEQ ID NO: 625582 - DNA, 33 bp, Homo sapien
attaaagtttgagagaccccgatgtaatgatta

SEQ ID NO: 625583 - DNA, 33 bp, Homo sapien
atatggtccttgcaacaacataaggtccaagaa

SEQ ID NO: 625584 - DNA, 33 bp, Homo sapien
atatggtccttgcaaccacataaggtccaagaa

SEQ ID NO: 625585 - DNA, 33 bp, Homo sapien
cgtaaattcattcatgcatcagttattttttga

SEQ ID NO: 625586 - DNA, 33 bp, Homo sapien
cgtaaattcattcatgtatcagttattttttga

SEQ ID NO: 625587 - DNA, 33 bp, Homo sapien
aacatcattaacacacaagatggccatctgggt

SEQ ID NO: 625588 - DNA, 33 bp, Homo sapien
aacatcattaacacaccagatggccatctgggt

SEQ ID NO: 625589 - DNA, 33 bp, Homo sapien
acccttagacattcaaacatattgaccttggtc

SEQ ID NO: 625590 - DNA, 33 bp, Homo sapien
acccttagacattcaagcatattgaccttggtc

SEQ ID NO: 625591 - DNA, 33 bp, Homo sapien
gaagtaagttagaaaacgtgtggaaactaggga

SEQ ID NO: 625592 - DNA, 33 bp, Homo sapien
gaagtaagttagaaaatgtgtggaaactaggga

SEQ ID NO: 625593 - DNA, 33 bp, Homo sapien
aaccatagagggaacactccaaagcaaagatat

SEQ ID NO: 625594 - DNA, 33 bp, Homo sapien
aaccatagagggaacagtccaaagcaaagatat

SEQ ID NO: 625595 - DNA, 33 bp, Homo sapien
gtgtctgtgtgcatacacttcattgtgcttttg

SEQ ID NO: 625596 - DNA, 33 bp, Homo sapien
gtgtctgtgtgcatacgcttcattgtgcttttg

SEQ ID NO: 625597 - DNA, 33 bp, Homo sapien
aataggactgcattccaacctaattatacatca

SEQ ID NO: 625598 - DNA, 33 bp, Homo sapien
aataggactgcattcccacctaattatacatca

SEQ ID NO: 625599 - DNA, 33 bp, Homo sapien
atcaagattaaaaaaaattttgctgaagtgaac

SEQ ID NO: 625600 - DNA, 33 bp, Homo sapien
atcaagattaaaaaaatttttgctgaagtgaac

SEQ ID NO: 625601 - DNA, 33 bp, Homo sapien
atcttgattaaaggacacaatgtcaaagaatct

SEQ ID NO: 625602 - DNA, 33 bp, Homo sapien
atcttgattaaaggacccaatgtcaaagaatct

SEQ ID NO: 625603 - DNA, 33 bp, Homo sapien
tgctgacttcaaggaccggagtgttattactct

SEQ ID NO: 625604 - DNA, 33 bp, Homo sapien
tgctgacttcaaggactggagtgttattactct

SEQ ID NO: 625605 - DNA, 33 bp, Homo sapien
tcactctttattcaaaactccctaagatgtgta

SEQ ID NO: 625606 - DNA, 33 bp, Homo sapien
tcactctttattcaaacctccctaagatgtgta

SEQ ID NO: 625607 - DNA, 33 bp, Homo sapien
agaaagcaagctgacaatctggtgtgcctctta

SEQ ID NO: 625608 - DNA, 33 bp, Homo sapien
agaaagcaagctgacagtctggtgtgcctctta

SEQ ID NO: 625609 - DNA, 33 bp, Homo sapien
cccttgattatttcctaaagactaagtccttga

SEQ ID NO: 625610 - DNA, 33 bp, Homo sapien
cccttgattatttcctgaagactaagtccttga

SEQ ID NO: 625611 - DNA, 33 bp, Homo sapien
ttaagtcctagatgaaatattgggtccaaagac

SEQ ID NO: 625612 - DNA, 33 bp, Homo sapien
ttaagtcctagatgaagtattgggtccaaagac

SEQ ID NO: 625613 - DNA, 33 bp, Homo sapien
atcagggcttagaagactcaaagtgtttctcct

SEQ ID NO: 625614 - DNA, 33 bp, Homo sapien
atcagggcttagaagagtcaaagtgtttctcct

SEQ ID NO: 625615 - DNA, 33 bp, Homo sapien
gtcaatgtgtctcagactccttgcaaattattc

SEQ ID NO: 625616 - DNA, 33 bp, Homo sapien
gtcaatgtgtctcagattccttgcaaattattc

SEQ ID NO: 625617 - DNA, 33 bp, Homo sapien
caagagacagaacagtgaatgagacagcaaaag

SEQ ID NO: 625618 - DNA, 33 bp, Homo sapien
caagagacagaacagttaatgagacagcaaaag

SEQ ID NO: 625619 - DNA, 33 bp, Homo sapien
ggagtttggaaggtgaaagtaaggaagaaatat

SEQ ID NO: 625620 - DNA, 33 bp, Homo sapien
ggagtttggaaggtgagagtaaggaagaaatat

SEQ ID NO: 625621 - DNA, 33 bp, Homo sapien
ttcagctagatgttcccgaggcattgtggactg

SEQ ID NO: 625622 - DNA, 33 bp, Homo sapien
ttcagctagatgttcctgaggcattgtggactg

SEQ ID NO: 625623 - DNA, 33 bp, Homo sapien
cctgaaacctgttcctgaaaagctatgaaaagc

SEQ ID NO: 625624 - DNA, 33 bp, Homo sapien
cctgaaacctgttccttaaaagctatgaaaagc

SEQ ID NO: 625625 - DNA, 33 bp, Homo sapien
gactctgagaagtttacgcatgggcctgactca

SEQ ID NO: 625626 - DNA, 33 bp, Homo sapien
gactctgagaagtttatgcatgggcctgactca

SEQ ID NO: 625627 - DNA, 33 bp, Homo sapien
aagtacataagcatgacggaaaaattggaatat

SEQ ID NO: 625628 - DNA, 33 bp, Homo sapien
aagtacataagcatgatggaaaaattggaatat

SEQ ID NO: 625629 - DNA, 33 bp, Homo sapien
aatcccagccaccaaaaagacaatcaatagaaa

SEQ ID NO: 625630 - DNA, 33 bp, Homo sapien
aatcccagccaccaaagagacaatcaatagaaa

SEQ ID NO: 625631 - DNA, 33 bp, Homo sapien
gctttggtgccttttacgacccagcctcagagg

SEQ ID NO: 625632 - DNA, 33 bp, Homo sapien
gctttggtgccttttatgacccagcctcagagg

SEQ ID NO: 625633 - DNA, 33 bp, Homo sapien
agagatgatcaaatcacggaagtaagtgagaaa

SEQ ID NO: 625634 - DNA, 33 bp, Homo sapien
agagatgatcaaatcatggaagtaagtgagaaa

SEQ ID NO: 625635 - DNA, 33 bp, Homo sapien
ttgaagtttctttacagctattacatctgtatg

SEQ ID NO: 625636 - DNA, 33 bp, Homo sapien
ttgaagtttctttacatctattacatctgtatg

SEQ ID NO: 625637 - DNA, 33 bp, Homo sapien
ctttttaaagtcagaaatcaacagaacaataaa

SEQ ID NO: 625638 - DNA, 33 bp, Homo sapien
ctttttaaagtcagaagtcaacagaacaataaa

SEQ ID NO: 625639 - DNA, 33 bp, Homo sapien
actccatatttaccacaggtgctatatttgcct

SEQ ID NO: 625640 - DNA, 33 bp, Homo sapien
actccatatttaccacgggtgctatatttgcct

SEQ ID NO: 625641 - DNA, 33 bp, Homo sapien
gggaaagaatggtatcacatgttaacagtagct

SEQ ID NO: 625642 - DNA, 33 bp, Homo sapien
gggaaagaatggtatcgcatgttaacagtagct

SEQ ID NO: 625643 - DNA, 33 bp, Homo sapien
tccatgtcttcatcaccaaaacgagagtgatga

SEQ ID NO: 625644 - DNA, 33 bp, Homo sapien
tccatgtcttcatcactaaaacgagagtgatga

SEQ ID NO: 625645 - DNA, 33 bp, Homo sapien
tagtgagctcactatcacacagaagcagttgga

SEQ ID NO: 625646 - DNA, 33 bp, Homo sapien
tagtgagctcactatcgcacagaagcagttgga

SEQ ID NO: 625647 - DNA, 33 bp, Homo sapien
gtgatcattcttctacactcacaacgctatatg

SEQ ID NO: 625648 - DNA, 33 bp, Homo sapien
gtgatcattcttctacgctcacaacgctatatg

SEQ ID NO: 625649 - DNA, 33 bp, Homo sapien
tgctatcatttgaatactaagtgtaacaaaaag

SEQ ID NO: 625650 - DNA, 33 bp, Homo sapien
tgctatcatttgaatagtaagtgtaacaaaaag

SEQ ID NO: 625651 - DNA, 33 bp, Homo sapien
atgagtgaactgccagaaactatgagataactc

SEQ ID NO: 625652 - DNA, 33 bp, Homo sapien
atgagtgaactgccaggaactatgagataactc

SEQ ID NO: 625653 - DNA, 33 bp, Homo sapien
aatctgaagtagaacaaaatttttatgtgttga

SEQ ID NO: 625654 - DNA, 33 bp, Homo sapien
aatctgaagtagaacagaatttttatgtgttga

SEQ ID NO: 625655 - DNA, 33 bp, Homo sapien
acatcctcttcattgacagatttgtatatttcc

SEQ ID NO: 625656 - DNA, 33 bp, Homo sapien
acatcctcttcattgatagatttgtatatttcc

SEQ ID NO: 625657 - DNA, 33 bp, Homo sapien
cccgttgcttctcctccaggtgccgcttctgct

SEQ ID NO: 625658 - DNA, 33 bp, Homo sapien
cccgttgcttctcctctaggtgccgcttctgct

SEQ ID NO: 625659 - DNA, 33 bp, Homo sapien
agctgaaaggttctgcccctaagtgacacacag

SEQ ID NO: 625660 - DNA, 33 bp, Homo sapien
agctgaaaggttctgctcctaagtgacacacag

SEQ ID NO: 625661 - DNA, 33 bp, Homo sapien
ttagctgagtttagaaccgccttctccatcttt

SEQ ID NO: 625662 - DNA, 33 bp, Homo sapien
ttagctgagtttagaatcgccttctccatcttt

SEQ ID NO: 625663 - DNA, 33 bp, Homo sapien
tctctctgacactgagaaaacaaacttgattca

SEQ ID NO: 625664 - DNA, 33 bp, Homo sapien
tctctctgacactgaggaaacaaacttgattca

SEQ ID NO: 625665 - DNA, 33 bp, Homo sapien
aagaaaatcactcagaacagtcttgtccacaaa

SEQ ID NO: 625666 - DNA, 33 bp, Homo sapien
aagaaaatcactcagagcagtcttgtccacaaa

SEQ ID NO: 625667 - DNA, 33 bp, Homo sapien
tagcagtaatgagttacgggcttcccagtttca

SEQ ID NO: 625668 - DNA, 33 bp, Homo sapien
tagcagtaatgagttatgggcttcccagtttca

SEQ ID NO: 625669 - DNA, 33 bp, Homo sapien
ctgcactagggactcacagaacaattaattaca

SEQ ID NO: 625670 - DNA, 33 bp, Homo sapien
ctgcactagggactcagagaacaattaattaca

SEQ ID NO: 625671 - DNA, 33 bp, Homo sapien
agatacgagcaacaggcattagacacaaacttg

SEQ ID NO: 625672 - DNA, 33 bp, Homo sapien
agatacgagcaacagggattagacacaaacttg

SEQ ID NO: 625673 - DNA, 33 bp, Homo sapien
catcattacctgtgtacgctttaatggatatat

SEQ ID NO: 625674 - DNA, 33 bp, Homo sapien
catcattacctgtgtatgctttaatggatatat

SEQ ID NO: 625675 - DNA, 33 bp, Homo sapien
gaatggttgcagtagacacaatacggtctgcaa

SEQ ID NO: 625676 - DNA, 33 bp, Homo sapien
gaatggttgcagtagatacaatacggtctgcaa

SEQ ID NO: 625677 - DNA, 33 bp, Homo sapien
tggcaatttcaatttcccttacaatctctttcc

SEQ ID NO: 625678 - DNA, 33 bp, Homo sapien
tggcaatttcaatttctcttacaatctctttcc

SEQ ID NO: 625679 - DNA, 33 bp, Homo sapien
tcaccagctggcccaacagaagttagaaataaa

SEQ ID NO: 625680 - DNA, 33 bp, Homo sapien
tcaccagctggcccaatagaagttagaaataaa

SEQ ID NO: 625681 - DNA, 33 bp, Homo sapien
ccccagctggtgctggcatgagaggaattctgc

SEQ ID NO: 625682 - DNA, 33 bp, Homo sapien
ccccagctggtgctgggatgagaggaattctgc

SEQ ID NO: 625683 - DNA, 33 bp, Homo sapien
ctctctgaatctctgcaaattttcacttataaa

SEQ ID NO: 625684 - DNA, 33 bp, Homo sapien
ctctctgaatctctgcgaattttcacttataaa

SEQ ID NO: 625685 - DNA, 33 bp, Homo sapien
actatgacttttatcccaaatactcatgagctt

SEQ ID NO: 625686 - DNA, 33 bp, Homo sapien
actatgacttttatccgaaatactcatgagctt

SEQ ID NO: 625687 - DNA, 33 bp, Homo sapien
tgcccacaggtaacaaagcaccacattagatac

SEQ ID NO: 625688 - DNA, 33 bp, Homo sapien
tgcccacaggtaacaacgcaccacattagatac

SEQ ID NO: 625689 - DNA, 33 bp, Homo sapien
ttgagacttagttcaaacatgtttcacagaggt

SEQ ID NO: 625690 - DNA, 33 bp, Homo sapien
ttgagacttagttcaaccatgtttcacagaggt

SEQ ID NO: 625691 - DNA, 33 bp, Homo sapien
tatttactgagatgaggaggatcatattttgga

SEQ ID NO: 625692 - DNA, 33 bp, Homo sapien
tatttactgagatgagtaggatcatattttgga

SEQ ID NO: 625693 - DNA, 33 bp, Homo sapien
gccctccttccttctcaatcttagcaactcaca

SEQ ID NO: 625694 - DNA, 33 bp, Homo sapien
gccctccttccttctcgatcttagcaactcaca

SEQ ID NO: 625695 - DNA, 33 bp, Homo sapien
taaacccacagccacacggcaccaggacctaca

SEQ ID NO: 625696 - DNA, 33 bp, Homo sapien
taaacccacagccacatggcaccaggacctaca

SEQ ID NO: 625697 - DNA, 33 bp, Homo sapien
tgcatagatgaatcatcactgtttaactatact

SEQ ID NO: 625698 - DNA, 33 bp, Homo sapien
tgcatagatgaatcatgactgtttaactatact

SEQ ID NO: 625699 - DNA, 33 bp, Homo sapien
atgcttaaaaatatacggctccctcaattagtt

SEQ ID NO: 625700 - DNA, 33 bp, Homo sapien
atgcttaaaaatatactgctccctcaattagtt

SEQ ID NO: 625701 - DNA, 33 bp, Homo sapien
atcatgtcaataggcaccatgttaacgggtctg

SEQ ID NO: 625702 - DNA, 33 bp, Homo sapien
atcatgtcaataggcatcatgttaacgggtctg

SEQ ID NO: 625703 - DNA, 33 bp, Homo sapien
atcaatgggaaaaaaacgcacatctagatgcag

SEQ ID NO: 625704 - DNA, 33 bp, Homo sapien
atcaatgggaaaaaaatgcacatctagatgcag

SEQ ID NO: 625705 - DNA, 33 bp, Homo sapien
tgacacaggtacccgtcaacacaaatggggaca

SEQ ID NO: 625706 - DNA, 33 bp, Homo sapien
tgacacaggtacccgtgaacacaaatggggaca

SEQ ID NO: 625707 - DNA, 33 bp, Homo sapien
gaggcaagttaggtgacaggaagtaaagccaga

SEQ ID NO: 625708 - DNA, 33 bp, Homo sapien
gaggcaagttaggtgataggaagtaaagccaga

SEQ ID NO: 625709 - DNA, 33 bp, Homo sapien
aatgtgcaccgaacacactgagttgaccctcac

SEQ ID NO: 625710 - DNA, 33 bp, Homo sapien
aatgtgcaccgaacacgctgagttgaccctcac

SEQ ID NO: 625711 - DNA, 33 bp, Homo sapien
gtcaggaagagaaaaaacagaaattctagaccc

SEQ ID NO: 625712 - DNA, 33 bp, Homo sapien
gtcaggaagagaaaaaccagaaattctagaccc

SEQ ID NO: 625713 - DNA, 33 bp, Homo sapien
tttctttcagggttcaatcaacttcttttggat

SEQ ID NO: 625714 - DNA, 33 bp, Homo sapien
tttctttcagggttcattcaacttcttttggat

SEQ ID NO: 625715 - DNA, 33 bp, Homo sapien
tttttgctaaaggaaacagtgaagtggaagaaa

SEQ ID NO: 625716 - DNA, 33 bp, Homo sapien
tttttgctaaaggaaatagtgaagtggaagaaa

SEQ ID NO: 625717 - DNA, 33 bp, Homo sapien
tgccagcacggttctccagcaaatttgagaact

SEQ ID NO: 625718 - DNA, 33 bp, Homo sapien
tgccagcacggttctctagcaaatttgagaact

SEQ ID NO: 625719 - DNA, 33 bp, Homo sapien
ggtactggagagaaataatggttaagcctgaag

SEQ ID NO: 625720 - DNA, 33 bp, Homo sapien
ggtactggagagaaatgatggttaagcctgaag

SEQ ID NO: 625721 - DNA, 33 bp, Homo sapien
tgaatcagtccatatacgtgaatcactcagaaa

SEQ ID NO: 625722 - DNA, 33 bp, Homo sapien
tgaatcagtccatatatgtgaatcactcagaaa

SEQ ID NO: 625723 - DNA, 33 bp, Homo sapien
tggcacagcttgctacaaaaaacagttgggcag

SEQ ID NO: 625724 - DNA, 33 bp, Homo sapien
tggcacagcttgctacgaaaaacagttgggcag

SEQ ID NO: 625725 - DNA, 33 bp, Homo sapien
agggaaatcttttaggaacaggtctcacctcct

SEQ ID NO: 625726 - DNA, 33 bp, Homo sapien
agggaaatcttttaggtacaggtctcacctcct

SEQ ID NO: 625727 - DNA, 33 bp, Homo sapien
agaggatatttccatccctccaaactacaattt

SEQ ID NO: 625728 - DNA, 33 bp, Homo sapien
agaggatatttccatctctccaaactacaattt

SEQ ID NO: 625729 - DNA, 33 bp, Homo sapien
aaccctgcaaaaggtcacagctatttttccaca

SEQ ID NO: 625730 - DNA, 33 bp, Homo sapien
aaccctgcaaaaggtcgcagctatttttccaca

SEQ ID NO: 625731 - DNA, 33 bp, Homo sapien
catgtccacaatacaacgtaccagaaagatcaa

SEQ ID NO: 625732 - DNA, 33 bp, Homo sapien
catgtccacaatacaatgtaccagaaagatcaa

SEQ ID NO: 625733 - DNA, 33 bp, Homo sapien
agtcttgacgatgccaatgactctctgtgtgac

SEQ ID NO: 625734 - DNA, 33 bp, Homo sapien
agtcttgacgatgccagtgactctctgtgtgac

SEQ ID NO: 625735 - DNA, 33 bp, Homo sapien
gttcttgtacctgacagtcagtatccagggact

SEQ ID NO: 625736 - DNA, 33 bp, Homo sapien
gttcttgtacctgacattcagtatccagggact

SEQ ID NO: 625737 - DNA, 33 bp, Homo sapien
acaataacgatgacgacggtagcagggtttaat

SEQ ID NO: 625738 - DNA, 33 bp, Homo sapien
acaataacgatgacgatggtagcagggtttaat

SEQ ID NO: 625739 - DNA, 33 bp, Homo sapien
gatcaatattcgcaacagatgagtttattcctg

SEQ ID NO: 625740 - DNA, 33 bp, Homo sapien
gatcaatattcgcaacggatgagtttattcctg

SEQ ID NO: 625741 - DNA, 33 bp, Homo sapien
tcataaatcacagcgacaatacttcataattac

SEQ ID NO: 625742 - DNA, 33 bp, Homo sapien
tcataaatcacagcgataatacttcataattac

SEQ ID NO: 625743 - DNA, 33 bp, Homo sapien
tagtcaggctcccttcactttccagaaacaagc

SEQ ID NO: 625744 - DNA, 33 bp, Homo sapien
tagtcaggctcccttcgctttccagaaacaagc

SEQ ID NO: 625745 - DNA, 33 bp, Homo sapien
ctctgctgagagttgcagagacatcctactggc

SEQ ID NO: 625746 - DNA, 33 bp, Homo sapien
ctctgctgagagttgcggagacatcctactggc

SEQ ID NO: 625747 - DNA, 33 bp, Homo sapien
catcctcaagccagtaagggtacaagggaggcc

SEQ ID NO: 625748 - DNA, 33 bp, Homo sapien
catcctcaagccagtaggggtacaagggaggcc

SEQ ID NO: 625749 - DNA, 33 bp, Homo sapien
atagagacctctctcactattctcttacagctt

SEQ ID NO: 625750 - DNA, 33 bp, Homo sapien
atagagacctctctcattattctcttacagctt

SEQ ID NO: 625751 - DNA, 33 bp, Homo sapien
gagagaggtctctatgaattgatctggaaatat

SEQ ID NO: 625752 - DNA, 33 bp, Homo sapien
gagagaggtctctatggattgatctggaaatat

SEQ ID NO: 625753 - DNA, 33 bp, Homo sapien
ttcactttgaactatacgtatgtattccctatt

SEQ ID NO: 625754 - DNA, 33 bp, Homo sapien
ttcactttgaactatatgtatgtattccctatt

SEQ ID NO: 625755 - DNA, 33 bp, Homo sapien
tgcccagataagaagaaatgtccagcatagcta

SEQ ID NO: 625756 - DNA, 33 bp, Homo sapien
tgcccagataagaagagatgtccagcatagcta

SEQ ID NO: 625757 - DNA, 33 bp, Homo sapien
tactcagatcctattcaactttaaatgttataa

SEQ ID NO: 625758 - DNA, 33 bp, Homo sapien
tactcagatcctattctactttaaatgttataa

SEQ ID NO: 625759 - DNA, 33 bp, Homo sapien
gaccatccaataacaaaatgcttaattctttcc

SEQ ID NO: 625760 - DNA, 33 bp, Homo sapien
gaccatccaataacaagatgcttaattctttcc

SEQ ID NO: 625761 - DNA, 33 bp, Homo sapien
tatagttgataaaaaactttcaggaatgtgata

SEQ ID NO: 625762 - DNA, 33 bp, Homo sapien
tatagttgataaaaaattttcaggaatgtgata

SEQ ID NO: 625763 - DNA, 33 bp, Homo sapien
attaaacctcagaatgacagagactggcagaag

SEQ ID NO: 625764 - DNA, 33 bp, Homo sapien
attaaacctcagaatggcagagactggcagaag

SEQ ID NO: 625765 - DNA, 33 bp, Homo sapien
aggtgattcctggaaacctgtgttcactggatt

SEQ ID NO: 625766 - DNA, 33 bp, Homo sapien
aggtgattcctggaaatctgtgttcactggatt

SEQ ID NO: 625767 - DNA, 33 bp, Homo sapien
tttttcttaaactggaagcagctacaagcatct

SEQ ID NO: 625768 - DNA, 33 bp, Homo sapien
tttttcttaaactggaggcagctacaagcatct

SEQ ID NO: 625769 - DNA, 33 bp, Homo sapien
agtcttcatatttagaacacctcatttgcggta

SEQ ID NO: 625770 - DNA, 33 bp, Homo sapien
agtcttcatatttagaccacctcatttgcggta

SEQ ID NO: 625771 - DNA, 33 bp, Homo sapien
agagtcaatgccgtaagagacaaatatatttct

SEQ ID NO: 625772 - DNA, 33 bp, Homo sapien
agagtcaatgccgtaatagacaaatatatttct

SEQ ID NO: 625773 - DNA, 33 bp, Homo sapien
ctgggtctcgatggatcagtaggaattcaccag

SEQ ID NO: 625774 - DNA, 33 bp, Homo sapien
ctgggtctcgatggatgagtaggaattcaccag

SEQ ID NO: 625775 - DNA, 33 bp, Homo sapien
atttccaactttacaacaagcttttacattaag

SEQ ID NO: 625776 - DNA, 33 bp, Homo sapien
atttccaactttacaagaagcttttacattaag

SEQ ID NO: 625777 - DNA, 33 bp, Homo sapien
tctttgggaaatgctacgtttatgaatagaaat

SEQ ID NO: 625778 - DNA, 33 bp, Homo sapien
tctttgggaaatgctatgtttatgaatagaaat

SEQ ID NO: 625779 - DNA, 33 bp, Homo sapien
ctagcaagatagaaagaaacccaggagtgtgtg

SEQ ID NO: 625780 - DNA, 33 bp, Homo sapien
ctagcaagatagaaaggaacccaggagtgtgtg

SEQ ID NO: 625781 - DNA, 33 bp, Homo sapien
actgcataggagttgacataagcccagcctccg

SEQ ID NO: 625782 - DNA, 33 bp, Homo sapien
actgcataggagttgagataagcccagcctccg

SEQ ID NO: 625783 - DNA, 33 bp, Homo sapien
ttaaactttttagagacgaggccactaaatgag

SEQ ID NO: 625784 - DNA, 33 bp, Homo sapien
ttaaactttttagagatgaggccactaaatgag

SEQ ID NO: 625785 - DNA, 33 bp, Homo sapien
agtatctccccgcataaggtaactgctattctg

SEQ ID NO: 625786 - DNA, 33 bp, Homo sapien
agtatctccccgcatacggtaactgctattctg

SEQ ID NO: 625787 - DNA, 33 bp, Homo sapien
acattgaactaatgaaaagagtaacatcatttc

SEQ ID NO: 625788 - DNA, 33 bp, Homo sapien
acattgaactaatgaagagagtaacatcatttc

SEQ ID NO: 625789 - DNA, 33 bp, Homo sapien
gaaaagaagacactgcaaacgtggaaccaacct

SEQ ID NO: 625790 - DNA, 33 bp, Homo sapien
gaaaagaagacactgcgaacgtggaaccaacct

SEQ ID NO: 625791 - DNA, 33 bp, Homo sapien
cagcagcctgagaggacgaaccaagaacttggt

SEQ ID NO: 625792 - DNA, 33 bp, Homo sapien
cagcagcctgagaggatgaaccaagaacttggt

SEQ ID NO: 625793 - DNA, 33 bp, Homo sapien
ttcaattatctattcacagactgttttattgag

SEQ ID NO: 625794 - DNA, 33 bp, Homo sapien
ttcaattatctattcagagactgttttattgag

SEQ ID NO: 625795 - DNA, 33 bp, Homo sapien
cagaggctctgaaacccggaaaactgctccaga

SEQ ID NO: 625796 - DNA, 33 bp, Homo sapien
cagaggctctgaaaccgggaaaactgctccaga

SEQ ID NO: 625797 - DNA, 33 bp, Homo sapien
atgggacaaatgataccggctgtaataaactat

SEQ ID NO: 625798 - DNA, 33 bp, Homo sapien
atgggacaaatgatactggctgtaataaactat

SEQ ID NO: 625799 - DNA, 33 bp, Homo sapien
tttctgtcaaaatcaactgactatattcatatg

SEQ ID NO: 625800 - DNA, 33 bp, Homo sapien
tttctgtcaaaatcaagtgactatattcatatg

SEQ ID NO: 625801 - DNA, 33 bp, Homo sapien
ttgaggctcctgaaaggccataaaacaaatacc

SEQ ID NO: 625802 - DNA, 33 bp, Homo sapien
ttgaggctcctgaaagtccataaaacaaatacc

SEQ ID NO: 625803 - DNA, 33 bp, Homo sapien
gtttgtttctaagtcacccttcatttcctctgt

SEQ ID NO: 625804 - DNA, 33 bp, Homo sapien
gtttgtttctaagtcagccttcatttcctctgt

SEQ ID NO: 625805 - DNA, 33 bp, Homo sapien
agttcagatctcttaaagggcaaaactttgaac

SEQ ID NO: 625806 - DNA, 33 bp, Homo sapien
agttcagatctcttaatgggcaaaactttgaac

SEQ ID NO: 625807 - DNA, 33 bp, Homo sapien
tggctataattatgtacgaaaacaatgaaatat

SEQ ID NO: 625808 - DNA, 33 bp, Homo sapien
tggctataattatgtaggaaaacaatgaaatat

SEQ ID NO: 625809 - DNA, 33 bp, Homo sapien
cctaaggccagcactacgtgtagcagggagccc

SEQ ID NO: 625810 - DNA, 33 bp, Homo sapien
cctaaggccagcactatgtgtagcagggagccc

SEQ ID NO: 625811 - DNA, 33 bp, Homo sapien
tgcccctattcagcccaaagaaattacagaaga

SEQ ID NO: 625812 - DNA, 33 bp, Homo sapien
tgcccctattcagcccgaagaaattacagaaga

SEQ ID NO: 625813 - DNA, 33 bp, Homo sapien
gtggaaagcagtgggtcaagtttggataaacag

SEQ ID NO: 625814 - DNA, 33 bp, Homo sapien
gtggaaagcagtgggtgaagtttggataaacag

SEQ ID NO: 625815 - DNA, 33 bp, Homo sapien
ttcactggatctagtacatgtctgctagtagtt

SEQ ID NO: 625816 - DNA, 33 bp, Homo sapien
ttcactggatctagtatatgtctgctagtagtt

SEQ ID NO: 625817 - DNA, 33 bp, Homo sapien
tcgtcagaaatcctgacgacttagcccttttct

SEQ ID NO: 625818 - DNA, 33 bp, Homo sapien
tcgtcagaaatcctgatgacttagcccttttct

SEQ ID NO: 625819 - DNA, 33 bp, Homo sapien
gagggtggtcatgcccaaggagcagtgtttctt

SEQ ID NO: 625820 - DNA, 33 bp, Homo sapien
gagggtggtcatgcccgaggagcagtgtttctt

SEQ ID NO: 625821 - DNA, 33 bp, Homo sapien
gctttggtcaatgaaccggagcagaggagatat

SEQ ID NO: 625822 - DNA, 33 bp, Homo sapien
gctttggtcaatgaactggagcagaggagatat

SEQ ID NO: 625823 - DNA, 33 bp, Homo sapien
tttctaaacagagctaacatcagagttgtctga

SEQ ID NO: 625824 - DNA, 33 bp, Homo sapien
tttctaaacagagctatcatcagagttgtctga

SEQ ID NO: 625825 - DNA, 33 bp, Homo sapien
aggagtagaatctggacagagggttgctgcttt

SEQ ID NO: 625826 - DNA, 33 bp, Homo sapien
aggagtagaatctggagagagggttgctgcttt

SEQ ID NO: 625827 - DNA, 33 bp, Homo sapien
aagtcattgccagtgacgggacaaactgataca

SEQ ID NO: 625828 - DNA, 33 bp, Homo sapien
aagtcattgccagtgatgggacaaactgataca

SEQ ID NO: 625829 - DNA, 33 bp, Homo sapien
aaggtcgtttgatatccaagttcagatttcagg

SEQ ID NO: 625830 - DNA, 33 bp, Homo sapien
aaggtcgtttgatatcgaagttcagatttcagg

SEQ ID NO: 625831 - DNA, 33 bp, Homo sapien
ggacataggctctaccgctcgttaaaagaagtg

SEQ ID NO: 625832 - DNA, 33 bp, Homo sapien
ggacataggctctacctctcgttaaaagaagtg

SEQ ID NO: 625833 - DNA, 33 bp, Homo sapien
aagatggactagtaaaactttattaatcctttc

SEQ ID NO: 625834 - DNA, 33 bp, Homo sapien
aagatggactagtaaagctttattaatcctttc

SEQ ID NO: 625835 - DNA, 33 bp, Homo sapien
agtctttccatcccctaaccaatggtttgttct

SEQ ID NO: 625836 - DNA, 33 bp, Homo sapien
agtctttccatcccctcaccaatggtttgttct

SEQ ID NO: 625837 - DNA, 33 bp, Homo sapien
acagcctgacattttccctgataccgaaggtca

SEQ ID NO: 625838 - DNA, 33 bp, Homo sapien
acagcctgacattttctctgataccgaaggtca

SEQ ID NO: 625839 - DNA, 33 bp, Homo sapien
acccttttgtctgtgcaactcagtttctgttgt

SEQ ID NO: 625840 - DNA, 33 bp, Homo sapien
acccttttgtctgtgctactcagtttctgttgt

SEQ ID NO: 625841 - DNA, 33 bp, Homo sapien
agctgaggtagctacacgaattactaatttcag

SEQ ID NO: 625842 - DNA, 33 bp, Homo sapien
agctgaggtagctacatgaattactaatttcag

SEQ ID NO: 625843 - DNA, 33 bp, Homo sapien
tggatccacccagtgacaggaagtgccttttgt

SEQ ID NO: 625844 - DNA, 33 bp, Homo sapien
tggatccacccagtgagaggaagtgccttttgt

SEQ ID NO: 625845 - DNA, 33 bp, Homo sapien
caccagagtctcaacaatgcaaaatctcagctt

SEQ ID NO: 625846 - DNA, 33 bp, Homo sapien
caccagagtctcaacagtgcaaaatctcagctt

SEQ ID NO: 625847 - DNA, 33 bp, Homo sapien
caaactttttagataaatacattctgcaagccc

SEQ ID NO: 625848 - DNA, 33 bp, Homo sapien
caaactttttagataagtacattctgcaagccc

SEQ ID NO: 625849 - DNA, 33 bp, Homo sapien
gtactagggatacacacgaaaccaaatgacact

SEQ ID NO: 625850 - DNA, 33 bp, Homo sapien
gtactagggatacacatgaaaccaaatgacact

SEQ ID NO: 625851 - DNA, 33 bp, Homo sapien
tgaagctcatttctgacatcatccgtgagaaga

SEQ ID NO: 625852 - DNA, 33 bp, Homo sapien
tgaagctcatttctgatatcatccgtgagaaga

SEQ ID NO: 625853 - DNA, 33 bp, Homo sapien
tgagtcttctgtttccggaactagtaagccttt

SEQ ID NO: 625854 - DNA, 33 bp, Homo sapien
tgagtcttctgtttcctgaactagtaagccttt

SEQ ID NO: 625855 - DNA, 33 bp, Homo sapien
aggtgggcttgatttacagcaatctcatatttt

SEQ ID NO: 625856 - DNA, 33 bp, Homo sapien
aggtgggcttgatttatagcaatctcatatttt

SEQ ID NO: 625857 - DNA, 33 bp, Homo sapien
catcgtgtctggccaaaaaaaactttagattca

SEQ ID NO: 625858 - DNA, 33 bp, Homo sapien
catcgtgtctggccaagaaaaactttagattca

SEQ ID NO: 625859 - DNA, 33 bp, Homo sapien
tgtaaatgatcacctcgattggaaacgggatat

SEQ ID NO: 625860 - DNA, 33 bp, Homo sapien
tgtaaatgatcacctctattggaaacgggatat

SEQ ID NO: 625861 - DNA, 33 bp, Homo sapien
aatgagaggcataagcagcaaccgcagtaagct

SEQ ID NO: 625862 - DNA, 33 bp, Homo sapien
aatgagaggcataagcggcaaccgcagtaagct

SEQ ID NO: 625863 - DNA, 33 bp, Homo sapien
tctgtggggagtagacagaaacttcaggaggcc

SEQ ID NO: 625864 - DNA, 33 bp, Homo sapien
tctgtggggagtagacggaaacttcaggaggcc

SEQ ID NO: 625865 - DNA, 33 bp, Homo sapien
gagaagctcatgctctaaattagccacaatcag

SEQ ID NO: 625866 - DNA, 33 bp, Homo sapien
gagaagctcatgctctgaattagccacaatcag

SEQ ID NO: 625867 - DNA, 33 bp, Homo sapien
tttcagtacagaactccatggctgattaatttg

SEQ ID NO: 625868 - DNA, 33 bp, Homo sapien
tttcagtacagaactctatggctgattaatttg

SEQ ID NO: 625869 - DNA, 33 bp, Homo sapien
aaataaagtgcaaattaaaaaggtaagacaaat

SEQ ID NO: 625870 - DNA, 33 bp, Homo sapien
aaataaagtgcaaatttaaaaggtaagacaaat

SEQ ID NO: 625871 - DNA, 33 bp, Homo sapien
ctgtctgtctgaaacccgaaggagtggttcttc

SEQ ID NO: 625872 - DNA, 33 bp, Homo sapien
ctgtctgtctgaaacctgaaggagtggttcttc

SEQ ID NO: 625873 - DNA, 33 bp, Homo sapien
atgagtaagtcctgagcaatgggatgcaagatt

SEQ ID NO: 625874 - DNA, 33 bp, Homo sapien
atgagtaagtcctgaggaatgggatgcaagatt

SEQ ID NO: 625875 - DNA, 33 bp, Homo sapien
ttcagtcccaggcaaaccgaaaaggctgtacct

SEQ ID NO: 625876 - DNA, 33 bp, Homo sapien
ttcagtcccaggcaaatcgaaaaggctgtacct

SEQ ID NO: 625877 - DNA, 33 bp, Homo sapien
atgttttgtggctcaactgttgtgtggaatgtc

SEQ ID NO: 625878 - DNA, 33 bp, Homo sapien
atgttttgtggctcaattgttgtgtggaatgtc

SEQ ID NO: 625879 - DNA, 33 bp, Homo sapien
gacagacacttagaccagatggaagcaatgaac

SEQ ID NO: 625880 - DNA, 33 bp, Homo sapien
gacagacacttagaccggatggaagcaatgaac

SEQ ID NO: 625881 - DNA, 33 bp, Homo sapien
tttcgattctgggtacaactaacttaggcaaca

SEQ ID NO: 625882 - DNA, 33 bp, Homo sapien
tttcgattctgggtaccactaacttaggcaaca

SEQ ID NO: 625883 - DNA, 33 bp, Homo sapien
gggaggtcaaatattcaagaccttttgtaatct

SEQ ID NO: 625884 - DNA, 33 bp, Homo sapien
gggaggtcaaatattcgagaccttttgtaatct

SEQ ID NO: 625885 - DNA, 33 bp, Homo sapien
attcaaaatctgaagggatcctttgttaatcag

SEQ ID NO: 625886 - DNA, 33 bp, Homo sapien
attcaaaatctgaaggtatcctttgttaatcag

SEQ ID NO: 625887 - DNA, 33 bp, Homo sapien
catttcttgttcaagcaatttgaggttttttag

SEQ ID NO: 625888 - DNA, 33 bp, Homo sapien
catttcttgttcaagctatttgaggttttttag

SEQ ID NO: 625889 - DNA, 33 bp, Homo sapien
ggaggctgaggtatgaagattgcttaaacccag

SEQ ID NO: 625890 - DNA, 33 bp, Homo sapien
ggaggctgaggtatgaggattgcttaaacccag

SEQ ID NO: 625891 - DNA, 33 bp, Homo sapien
gatctacaatgtctacaatatgaatggtgcccc

SEQ ID NO: 625892 - DNA, 33 bp, Homo sapien
gatctacaatgtctaccatatgaatggtgcccc

SEQ ID NO: 625893 - DNA, 33 bp, Homo sapien
aacaagtaaagtgacactgacctccagaaaaag

SEQ ID NO: 625894 - DNA, 33 bp, Homo sapien
aacaagtaaagtgacattgacctccagaaaaag

SEQ ID NO: 625895 - DNA, 33 bp, Homo sapien
gggagatgccacaactcagtgtgacctgtgcta

SEQ ID NO: 625896 - DNA, 33 bp, Homo sapien
gggagatgccacaacttagtgtgacctgtgcta

SEQ ID NO: 625897 - DNA, 33 bp, Homo sapien
ggagaaactatggatacgacagctggaaaaaac

SEQ ID NO: 625898 - DNA, 33 bp, Homo sapien
ggagaaactatggatatgacagctggaaaaaac

SEQ ID NO: 625899 - DNA, 33 bp, Homo sapien
atacatggccatttgaataaaggctcttcacaa

SEQ ID NO: 625900 - DNA, 33 bp, Homo sapien
atacatggccatttgagtaaaggctcttcacaa

SEQ ID NO: 625901 - DNA, 33 bp, Homo sapien
cattatcctggagtgaaataattctgagccatg

SEQ ID NO: 625902 - DNA, 33 bp, Homo sapien
cattatcctggagtgagataattctgagccatg

SEQ ID NO: 625903 - DNA, 33 bp, Homo sapien
atagcatcagagggaaataattgaaagctactg

SEQ ID NO: 625904 - DNA, 33 bp, Homo sapien
atagcatcagagggaagtaattgaaagctactg

SEQ ID NO: 625905 - DNA, 33 bp, Homo sapien
gtcaccatttcccacaagtagaccggtaacaga

SEQ ID NO: 625906 - DNA, 33 bp, Homo sapien
gtcaccatttcccacaggtagaccggtaacaga

SEQ ID NO: 625907 - DNA, 33 bp, Homo sapien
ggaatgatgggaaatcacaaggcagtggctgct

SEQ ID NO: 625908 - DNA, 33 bp, Homo sapien
ggaatgatgggaaatcgcaaggcagtggctgct

SEQ ID NO: 625909 - DNA, 33 bp, Homo sapien
ccatcattccacagaactcctagagcagctcct

SEQ ID NO: 625910 - DNA, 33 bp, Homo sapien
ccatcattccacagaagtcctagagcagctcct

SEQ ID NO: 625911 - DNA, 33 bp, Homo sapien
gacattggttttagagaaaagatcatctgagtt

SEQ ID NO: 625912 - DNA, 33 bp, Homo sapien
gacattggttttagaggaaagatcatctgagtt

SEQ ID NO: 625913 - DNA, 33 bp, Homo sapien
gtgggtgagggaacaccaataaacagcattata

SEQ ID NO: 625914 - DNA, 33 bp, Homo sapien
gtgggtgagggaacactaataaacagcattata

SEQ ID NO: 625915 - DNA, 33 bp, Homo sapien
atcaccaagattgaagccctcgccatcttccaa

SEQ ID NO: 625916 - DNA, 33 bp, Homo sapien
atcaccaagattgaagtcctcgccatcttccaa

SEQ ID NO: 625917 - DNA, 33 bp, Homo sapien
gttcagaggtcattggaaaaaaaaagtattatc

SEQ ID NO: 625918 - DNA, 33 bp, Homo sapien
gttcagaggtcattgggaaaaaaaagtattatc

SEQ ID NO: 625919 - DNA, 33 bp, Homo sapien
atttctagctatgcaaactttacaactgacctg

SEQ ID NO: 625920 - DNA, 33 bp, Homo sapien
atttctagctatgcaacctttacaactgacctg

SEQ ID NO: 625921 - DNA, 33 bp, Homo sapien
tttatagaatacagaacgcagctgggcgtggtg

SEQ ID NO: 625922 - DNA, 33 bp, Homo sapien
tttatagaatacagaatgcagctgggcgtggtg

SEQ ID NO: 625923 - DNA, 33 bp, Homo sapien
ggaagcttaagagtccccaaggtttaacaaact

SEQ ID NO: 625924 - DNA, 33 bp, Homo sapien
ggaagcttaagagtcctcaaggtttaacaaact

SEQ ID NO: 625925 - DNA, 33 bp, Homo sapien
tctctaaaggacaaaaatattctcctgcataac

SEQ ID NO: 625926 - DNA, 33 bp, Homo sapien
tctctaaaggacaaaagtattctcctgcataac

SEQ ID NO: 625927 - DNA, 33 bp, Homo sapien
aggaaattttaacatcacagataaactgtctat

SEQ ID NO: 625928 - DNA, 33 bp, Homo sapien
aggaaattttaacatctcagataaactgtctat

SEQ ID NO: 625929 - DNA, 33 bp, Homo sapien
ataagcaagaaatgagacaatccaggcaggcac

SEQ ID NO: 625930 - DNA, 33 bp, Homo sapien
ataagcaagaaatgaggcaatccaggcaggcac

SEQ ID NO: 625931 - DNA, 33 bp, Homo sapien
cataactattctttcacccaaacatctgacttc

SEQ ID NO: 625932 - DNA, 33 bp, Homo sapien
cataactattctttcatccaaacatctgacttc

SEQ ID NO: 625933 - DNA, 33 bp, Homo sapien
actatctgacccttgacggaaaaagtctgccgc

SEQ ID NO: 625934 - DNA, 33 bp, Homo sapien
actatctgacccttgatggaaaaagtctgccgc

SEQ ID NO: 625935 - DNA, 33 bp, Homo sapien
tcagacagaagtttcaatctctggttcatcaca

SEQ ID NO: 625936 - DNA, 33 bp, Homo sapien
tcagacagaagtttcactctctggttcatcaca

SEQ ID NO: 625937 - DNA, 33 bp, Homo sapien
gaagtgaaagccccaacgataacggatctaatt

SEQ ID NO: 625938 - DNA, 33 bp, Homo sapien
gaagtgaaagccccaatgataacggatctaatt

SEQ ID NO: 625939 - DNA, 33 bp, Homo sapien
agatgctactgtaactaagtgaccaaacttagc

SEQ ID NO: 625940 - DNA, 33 bp, Homo sapien
agatgctactgtaactcagtgaccaaacttagc

SEQ ID NO: 625941 - DNA, 33 bp, Homo sapien
aggacacccattttcacccccctgccaacaccc

SEQ ID NO: 625942 - DNA, 33 bp, Homo sapien
aggacacccattttcagccccctgccaacaccc

SEQ ID NO: 625943 - DNA, 33 bp, Homo sapien
ggtaatcattgcaggccactaactccagacaaa

SEQ ID NO: 625944 - DNA, 33 bp, Homo sapien
ggtaatcattgcaggctactaactccagacaaa

SEQ ID NO: 625945 - DNA, 33 bp, Homo sapien
tttagccaacagaatacggcagaaatgactgtg

SEQ ID NO: 625946 - DNA, 33 bp, Homo sapien
tttagccaacagaatatggcagaaatgactgtg

SEQ ID NO: 625947 - DNA, 33 bp, Homo sapien
tctcaacaaggaagtacccagtctcatcttctg

SEQ ID NO: 625948 - DNA, 33 bp, Homo sapien
tctcaacaaggaagtatccagtctcatcttctg

SEQ ID NO: 625949 - DNA, 33 bp, Homo sapien
gactatgaatactagagaggaaacaggagtttc

SEQ ID NO: 625950 - DNA, 33 bp, Homo sapien
gactatgaatactagataggaaacaggagtttc

SEQ ID NO: 625951 - DNA, 33 bp, Homo sapien
caaagtatagccaatcactcatcaatgttactt

SEQ ID NO: 625952 - DNA, 33 bp, Homo sapien
caaagtatagccaatctctcatcaatgttactt

SEQ ID NO: 625953 - DNA, 33 bp, Homo sapien
tggaacagccctggaccaataaaggtgaaaaaa

SEQ ID NO: 625954 - DNA, 33 bp, Homo sapien
tggaacagccctggactaataaaggtgaaaaaa

SEQ ID NO: 625955 - DNA, 33 bp, Homo sapien
agcagcttagtaaaaaattgacagaaggcatga

SEQ ID NO: 625956 - DNA, 33 bp, Homo sapien
agcagcttagtaaaaagttgacagaaggcatga

SEQ ID NO: 625957 - DNA, 33 bp, Homo sapien
tactttaacagataataaactaactccttcctt

SEQ ID NO: 625958 - DNA, 33 bp, Homo sapien
tactttaacagataattaactaactccttcctt

SEQ ID NO: 625959 - DNA, 33 bp, Homo sapien
tttcccttcacaacaaatggagtctggggggtc

SEQ ID NO: 625960 - DNA, 33 bp, Homo sapien
tttcccttcacaacaagtggagtctggggggtc

SEQ ID NO: 625961 - DNA, 33 bp, Homo sapien
ggagataggtagggaaaaagcactgtcacagag

SEQ ID NO: 625962 - DNA, 33 bp, Homo sapien
ggagataggtagggaagaagcactgtcacagag

SEQ ID NO: 625963 - DNA, 33 bp, Homo sapien
gaatgagggtcactaaagttactggacaccagg

SEQ ID NO: 625964 - DNA, 33 bp, Homo sapien
gaatgagggtcactaaggttactggacaccagg

SEQ ID NO: 625965 - DNA, 33 bp, Homo sapien
tgcattctcttctgaacagtacttctctgaggc

SEQ ID NO: 625966 - DNA, 33 bp, Homo sapien
tgcattctcttctgaatagtacttctctgaggc

SEQ ID NO: 625967 - DNA, 33 bp, Homo sapien
catatatgtagtcaaaagatctatggactttcc

SEQ ID NO: 625968 - DNA, 33 bp, Homo sapien
catatatgtagtcaaatgatctatggactttcc

SEQ ID NO: 625969 - DNA, 33 bp, Homo sapien
accagccaggcctgcacggacagaggtggccct

SEQ ID NO: 625970 - DNA, 33 bp, Homo sapien
accagccaggcctgcatggacagaggtggccct

SEQ ID NO: 625971 - DNA, 33 bp, Homo sapien
atcaatgtatgcacaacagtgcttgcgaggtgc

SEQ ID NO: 625972 - DNA, 33 bp, Homo sapien
atcaatgtatgcacaagagtgcttgcgaggtgc

SEQ ID NO: 625973 - DNA, 33 bp, Homo sapien
aaccaatatcgccataccttgctgttctacttc

SEQ ID NO: 625974 - DNA, 33 bp, Homo sapien
aaccaatatcgccatatcttgctgttctacttc

SEQ ID NO: 625975 - DNA, 33 bp, Homo sapien
cccgttctttgaaagacggctcagttaacaata

SEQ ID NO: 625976 - DNA, 33 bp, Homo sapien
cccgttctttgaaagatggctcagttaacaata

SEQ ID NO: 625977 - DNA, 33 bp, Homo sapien
ctttatttgtttaacacgggagcacctacaata

SEQ ID NO: 625978 - DNA, 33 bp, Homo sapien
ctttatttgtttaacatgggagcacctacaata

SEQ ID NO: 625979 - DNA, 33 bp, Homo sapien
agcaatagtcatccaaatgctgacaagtaagac

SEQ ID NO: 625980 - DNA, 33 bp, Homo sapien
agcaatagtcatccaactgctgacaagtaagac

SEQ ID NO: 625981 - DNA, 33 bp, Homo sapien
gctttcaagggacgaacctctgggcattccctg

SEQ ID NO: 625982 - DNA, 33 bp, Homo sapien
gctttcaagggacgaatctctgggcattccctg

SEQ ID NO: 625983 - DNA, 33 bp, Homo sapien
tcatttagctactttgaatttgccaaccagatt

SEQ ID NO: 625984 - DNA, 33 bp, Homo sapien
tcatttagctactttgtatttgccaaccagatt

SEQ ID NO: 625985 - DNA, 33 bp, Homo sapien
tggttaacaccatgtacccaactcacaaatgct

SEQ ID NO: 625986 - DNA, 33 bp, Homo sapien
tggttaacaccatgtatccaactcacaaatgct

SEQ ID NO: 625987 - DNA, 33 bp, Homo sapien
actttttccagtctccactctggatatttggtt

SEQ ID NO: 625988 - DNA, 33 bp, Homo sapien
actttttccagtctccgctctggatatttggtt

SEQ ID NO: 625989 - DNA, 33 bp, Homo sapien
tcccagcacaaatcagcagcatagcaagtgtca

SEQ ID NO: 625990 - DNA, 33 bp, Homo sapien
tcccagcacaaatcaggagcatagcaagtgtca

SEQ ID NO: 625991 - DNA, 33 bp, Homo sapien
ttatagatccataatccctgagtcaaaaccttt

SEQ ID NO: 625992 - DNA, 33 bp, Homo sapien
ttatagatccataatctctgagtcaaaaccttt

SEQ ID NO: 625993 - DNA, 33 bp, Homo sapien
gctgtactagcaagaaccgtcctatctaaaaac

SEQ ID NO: 625994 - DNA, 33 bp, Homo sapien
gctgtactagcaagaatcgtcctatctaaaaac

SEQ ID NO: 625995 - DNA, 33 bp, Homo sapien
cttttacatataccaaaaacccaagtttatata

SEQ ID NO: 625996 - DNA, 33 bp, Homo sapien
cttttacatataccaagaacccaagtttatata

SEQ ID NO: 625997 - DNA, 33 bp, Homo sapien
gtcagataaccgaggaagctgtggtcgtcatct

SEQ ID NO: 625998 - DNA, 33 bp, Homo sapien
gtcagataaccgaggaggctgtggtcgtcatct

SEQ ID NO: 625999 - DNA, 33 bp, Homo sapien
cagatactgtggccatcacttaaatacaagagc

SEQ ID NO: 626000 - DNA, 33 bp, Homo sapien
cagatactgtggccattacttaaatacaagagc

SEQ ID NO: 626001 - DNA, 33 bp, Homo sapien
tgcagtgatcacaacaccattttcagtgtttaa

SEQ ID NO: 626002 - DNA, 33 bp, Homo sapien
tgcagtgatcacaacatcattttcagtgtttaa

SEQ ID NO: 626003 - DNA, 33 bp, Homo sapien
ggctagtgtgggagacggctttccatacatgga

SEQ ID NO: 626004 - DNA, 33 bp, Homo sapien
ggctagtgtgggagactgctttccatacatgga

SEQ ID NO: 626005 - DNA, 33 bp, Homo sapien
ctggctctgaagaagtaaactgccttgttgaga

SEQ ID NO: 626006 - DNA, 33 bp, Homo sapien
ctggctctgaagaagtgaactgccttgttgaga

SEQ ID NO: 626007 - DNA, 33 bp, Homo sapien
agaggctgacagcttgaagatggagtcagtttg

SEQ ID NO: 626008 - DNA, 33 bp, Homo sapien
agaggctgacagcttggagatggagtcagtttg

SEQ ID NO: 626009 - DNA, 33 bp, Homo sapien
aaagttaatgggaagcaaaattatttctgcagc

SEQ ID NO: 626010 - DNA, 33 bp, Homo sapien
aaagttaatgggaagccaaattatttctgcagc

SEQ ID NO: 626011 - DNA, 33 bp, Homo sapien
agctcaacttgaactactaactattaacttcag

SEQ ID NO: 626012 - DNA, 33 bp, Homo sapien
agctcaacttgaactattaactattaacttcag

SEQ ID NO: 626013 - DNA, 33 bp, Homo sapien
aaagggattctggctggcaaagtgctgtaatga

SEQ ID NO: 626014 - DNA, 33 bp, Homo sapien
aaagggattctggctgtcaaagtgctgtaatga

SEQ ID NO: 626015 - DNA, 33 bp, Homo sapien
tatttcctgtgttccacgcaccaccttacgaac

SEQ ID NO: 626016 - DNA, 33 bp, Homo sapien
tatttcctgtgttccaggcaccaccttacgaac

SEQ ID NO: 626017 - DNA, 33 bp, Homo sapien
ggctttgccaacatccccaccatagctaactgt

SEQ ID NO: 626018 - DNA, 33 bp, Homo sapien
ggctttgccaacatccgcaccatagctaactgt

SEQ ID NO: 626019 - DNA, 33 bp, Homo sapien
aggacagcttagacacagaccctgtcctaaagg

SEQ ID NO: 626020 - DNA, 33 bp, Homo sapien
aggacagcttagacacggaccctgtcctaaagg

SEQ ID NO: 626021 - DNA, 33 bp, Homo sapien
tccccaggatagtggcaaaagtactcagcagca

SEQ ID NO: 626022 - DNA, 33 bp, Homo sapien
tccccaggatagtggccaaagtactcagcagca

SEQ ID NO: 626023 - DNA, 33 bp, Homo sapien
ttggcaaaatggcaacaagtgccgtctcgtagc

SEQ ID NO: 626024 - DNA, 33 bp, Homo sapien
ttggcaaaatggcaaccagtgccgtctcgtagc

SEQ ID NO: 626025 - DNA, 33 bp, Homo sapien
accagcccggtcaacactgctgacttcagagga

SEQ ID NO: 626026 - DNA, 33 bp, Homo sapien
accagcccggtcaacattgctgacttcagagga

SEQ ID NO: 626027 - DNA, 33 bp, Homo sapien
accgagttgtttcagcccaagctcgcttcttga

SEQ ID NO: 626028 - DNA, 33 bp, Homo sapien
accgagttgtttcagctcaagctcgcttcttga

SEQ ID NO: 626029 - DNA, 33 bp, Homo sapien
atcacaaaatggatctaactccagttaaaacag

SEQ ID NO: 626030 - DNA, 33 bp, Homo sapien
atcacaaaatggatcttactccagttaaaacag

SEQ ID NO: 626031 - DNA, 33 bp, Homo sapien
cccagttgctcttcccagaccagaaatggacgg

SEQ ID NO: 626032 - DNA, 33 bp, Homo sapien
cccagttgctcttcccggaccagaaatggacgg

SEQ ID NO: 626033 - DNA, 33 bp, Homo sapien
tgcaggagaaggaggacgtgaatataattgaga

SEQ ID NO: 626034 - DNA, 33 bp, Homo sapien
tgcaggagaaggaggatgtgaatataattgaga

SEQ ID NO: 626035 - DNA, 33 bp, Homo sapien
gctttccttcctcactaagcagactctggctcc

SEQ ID NO: 626036 - DNA, 33 bp, Homo sapien
gctttccttcctcactgagcagactctggctcc

SEQ ID NO: 626037 - DNA, 33 bp, Homo sapien
agagctaaggatggtggaaagacagtcaggctg

SEQ ID NO: 626038 - DNA, 33 bp, Homo sapien
agagctaaggatggtgtaaagacagtcaggctg

SEQ ID NO: 626039 - DNA, 33 bp, Homo sapien
gagcaggttaatgttgcaaaagtgatcgaatca

SEQ ID NO: 626040 - DNA, 33 bp, Homo sapien
gagcaggttaatgttggaaaagtgatcgaatca

SEQ ID NO: 626041 - DNA, 33 bp, Homo sapien
gggaggacccccacgaatcagctcagagccggc

SEQ ID NO: 626042 - DNA, 33 bp, Homo sapien
gggaggacccccacgactcagctcagagccggc

SEQ ID NO: 626043 - DNA, 33 bp, Homo sapien
agccagtgtccccttcaccaggttagacgaggt

SEQ ID NO: 626044 - DNA, 33 bp, Homo sapien
agccagtgtccccttcgccaggttagacgaggt

SEQ ID NO: 626045 - DNA, 33 bp, Homo sapien
cactggggctaaaagaactggagaagcagagga

SEQ ID NO: 626046 - DNA, 33 bp, Homo sapien
cactggggctaaaagagctggagaagcagagga

SEQ ID NO: 626047 - DNA, 33 bp, Homo sapien
ccgtgctgcactgtgaagagttaatgcctgggt

SEQ ID NO: 626048 - DNA, 33 bp, Homo sapien
ccgtgctgcactgtgatgagttaatgcctgggt

SEQ ID NO: 626049 - DNA, 33 bp, Homo sapien
actgaggccagatatcacagagctttgtgaact

SEQ ID NO: 626050 - DNA, 33 bp, Homo sapien
actgaggccagatatcgcagagctttgtgaact

SEQ ID NO: 626051 - DNA, 33 bp, Homo sapien
agcactactcaaaagcaatacagacagccttaa

SEQ ID NO: 626052 - DNA, 33 bp, Homo sapien
agcactactcaaaagccatacagacagccttaa

SEQ ID NO: 626053 - DNA, 33 bp, Homo sapien
gagtcttcagccactaaacttctcaaacaagca

SEQ ID NO: 626054 - DNA, 33 bp, Homo sapien
gagtcttcagccactatacttctcaaacaagca

SEQ ID NO: 626055 - DNA, 33 bp, Homo sapien
ctctgttggtataaaacctgtgtgagaagacca

SEQ ID NO: 626056 - DNA, 33 bp, Homo sapien
ctctgttggtataaaatctgtgtgagaagacca

SEQ ID NO: 626057 - DNA, 33 bp, Homo sapien
ctcaaaaaaagaaagcgctgtatagcacctctg

SEQ ID NO: 626058 - DNA, 33 bp, Homo sapien
ctcaaaaaaagaaagctctgtatagcacctctg

SEQ ID NO: 626059 - DNA, 33 bp, Homo sapien
aaagcaaatgaatataaggtctggagctcaaag

SEQ ID NO: 626060 - DNA, 33 bp, Homo sapien
aaagcaaatgaatatatggtctggagctcaaag

SEQ ID NO: 626061 - DNA, 33 bp, Homo sapien
gccatcgcatctggccaacagaatttcatattg

SEQ ID NO: 626062 - DNA, 33 bp, Homo sapien
gccatcgcatctggccgacagaatttcatattg

SEQ ID NO: 626063 - DNA, 33 bp, Homo sapien
actgttggggtcaccacggttgctgcgtcctga

SEQ ID NO: 626064 - DNA, 33 bp, Homo sapien
actgttggggtcaccatggttgctgcgtcctga

SEQ ID NO: 626065 - DNA, 33 bp, Homo sapien
acatttaaaaggcatacgaggcaagtggctacc

SEQ ID NO: 626066 - DNA, 33 bp, Homo sapien
acatttaaaaggcatatgaggcaagtggctacc

SEQ ID NO: 626067 - DNA, 33 bp, Homo sapien
gtataacacatacccaatctattttcttcccag

SEQ ID NO: 626068 - DNA, 33 bp, Homo sapien
gtataacacatacccagtctattttcttcccag

SEQ ID NO: 626069 - DNA, 33 bp, Homo sapien
agttacctgctgaaataaagcaatttctaaatt

SEQ ID NO: 626070 - DNA, 33 bp, Homo sapien
agttacctgctgaaatgaagcaatttctaaatt

SEQ ID NO: 626071 - DNA, 33 bp, Homo sapien
taatttgaatgcatgaaatttaggatgtgaagg

SEQ ID NO: 626072 - DNA, 33 bp, Homo sapien
taatttgaatgcatgagatttaggatgtgaagg

SEQ ID NO: 626073 - DNA, 33 bp, Homo sapien
acctttaaagtggccaatacagaaaaggggttt

SEQ ID NO: 626074 - DNA, 33 bp, Homo sapien
acctttaaagtggccagtacagaaaaggggttt

SEQ ID NO: 626075 - DNA, 33 bp, Homo sapien
acagaaaaggggtttcaaacgatacttgaaata

SEQ ID NO: 626076 - DNA, 33 bp, Homo sapien
acagaaaaggggtttccaacgatacttgaaata

SEQ ID NO: 626077 - DNA, 33 bp, Homo sapien
atgtgtgacagagacccatgtggcctgagaagc

SEQ ID NO: 626078 - DNA, 33 bp, Homo sapien
atgtgtgacagagacctatgtggcctgagaagc

SEQ ID NO: 626079 - DNA, 33 bp, Homo sapien
gaaaaagaaaatctcaaattccacacatggtca

SEQ ID NO: 626080 - DNA, 33 bp, Homo sapien
gaaaaagaaaatctcagattccacacatggtca

SEQ ID NO: 626081 - DNA, 33 bp, Homo sapien
atggatgataatagtaaagcattttaaatccat

SEQ ID NO: 626082 - DNA, 33 bp, Homo sapien
atggatgataatagtacagcattttaaatccat

SEQ ID NO: 626083 - DNA, 33 bp, Homo sapien
gagaaaaacatgactcaaaggaaagcaaatata

SEQ ID NO: 626084 - DNA, 33 bp, Homo sapien
gagaaaaacatgactcgaaggaaagcaaatata

SEQ ID NO: 626085 - DNA, 33 bp, Homo sapien
aggggctggtgactgcaaaatgaattagatacc

SEQ ID NO: 626086 - DNA, 33 bp, Homo sapien
aggggctggtgactgcgaaatgaattagatacc

SEQ ID NO: 626087 - DNA, 33 bp, Homo sapien
tgttctctgtacatgaaggtttcggtgagcagt

SEQ ID NO: 626088 - DNA, 33 bp, Homo sapien
tgttctctgtacatgagggtttcggtgagcagt

SEQ ID NO: 626089 - DNA, 33 bp, Homo sapien
ctcacattatgaggccagagtttatgtggacag

SEQ ID NO: 626090 - DNA, 33 bp, Homo sapien
ctcacattatgaggccggagtttatgtggacag

SEQ ID NO: 626091 - DNA, 33 bp, Homo sapien
tacttgttgatggtaaaagggacctggaatcat

SEQ ID NO: 626092 - DNA, 33 bp, Homo sapien
tacttgttgatggtaacagggacctggaatcat

SEQ ID NO: 626093 - DNA, 33 bp, Homo sapien
tgtataataggctgtacaattaattctgtatgc

SEQ ID NO: 626094 - DNA, 33 bp, Homo sapien
tgtataataggctgtataattaattctgtatgc

SEQ ID NO: 626095 - DNA, 33 bp, Homo sapien
atatatccgactaccacgcatcagatggactgg

SEQ ID NO: 626096 - DNA, 33 bp, Homo sapien
atatatccgactaccatgcatcagatggactgg

SEQ ID NO: 626097 - DNA, 33 bp, Homo sapien
aaatcaggttggttaacacactttcgcagctag

SEQ ID NO: 626098 - DNA, 33 bp, Homo sapien
aaatcaggttggttaatacactttcgcagctag

SEQ ID NO: 626099 - DNA, 33 bp, Homo sapien
gttcagttttggattgcagggaaggaaatgagc

SEQ ID NO: 626100 - DNA, 33 bp, Homo sapien
gttcagttttggattgtagggaaggaaatgagc

SEQ ID NO: 626101 - DNA, 33 bp, Homo sapien
cactgcaacaccagagaaattcagaaaagcagc

SEQ ID NO: 626102 - DNA, 33 bp, Homo sapien
cactgcaacaccagaggaattcagaaaagcagc

SEQ ID NO: 626103 - DNA, 33 bp, Homo sapien
catttccactgctggacgtttagtgagtatatt

SEQ ID NO: 626104 - DNA, 33 bp, Homo sapien
catttccactgctggatgtttagtgagtatatt

SEQ ID NO: 626105 - DNA, 33 bp, Homo sapien
cagatggagcaaagtcaatgtaagagaccaact

SEQ ID NO: 626106 - DNA, 33 bp, Homo sapien
cagatggagcaaagtctatgtaagagaccaact

SEQ ID NO: 626107 - DNA, 33 bp, Homo sapien
ttagaagggagttgggacaaacaaggaggcttg

SEQ ID NO: 626108 - DNA, 33 bp, Homo sapien
ttagaagggagttgggtcaaacaaggaggcttg

SEQ ID NO: 626109 - DNA, 33 bp, Homo sapien
acccagccaaggcagaaaaataatacagttgaa

SEQ ID NO: 626110 - DNA, 33 bp, Homo sapien
acccagccaaggcagagaaataatacagttgaa

SEQ ID NO: 626111 - DNA, 33 bp, Homo sapien
agtttatagtgctgctcaaacaaattatttagt

SEQ ID NO: 626112 - DNA, 33 bp, Homo sapien
agtttatagtgctgctgaaacaaattatttagt

SEQ ID NO: 626113 - DNA, 33 bp, Homo sapien
ggtctgtgttcctccactcaacctgtatttgtt

SEQ ID NO: 626114 - DNA, 33 bp, Homo sapien
ggtctgtgttcctccattcaacctgtatttgtt

SEQ ID NO: 626115 - DNA, 33 bp, Homo sapien
atttacattcatgttggaattggacctacaagg

SEQ ID NO: 626116 - DNA, 33 bp, Homo sapien
atttacattcatgttgtaattggacctacaagg

SEQ ID NO: 626117 - DNA, 33 bp, Homo sapien
tcactgtcctttataacctgatagtcaatgttt

SEQ ID NO: 626118 - DNA, 33 bp, Homo sapien
tcactgtcctttataagctgatagtcaatgttt

SEQ ID NO: 626119 - DNA, 33 bp, Homo sapien
gtttggtattagtggaaaaagtatataaggctg

SEQ ID NO: 626120 - DNA, 33 bp, Homo sapien
gtttggtattagtggagaaagtatataaggctg

SEQ ID NO: 626121 - DNA, 33 bp, Homo sapien
ccaaatccaacagaaacagaagtacaacacaaa

SEQ ID NO: 626122 - DNA, 33 bp, Homo sapien
ccaaatccaacagaaatagaagtacaacacaaa

SEQ ID NO: 626123 - DNA, 33 bp, Homo sapien
atcaatgtaacttaaacgttgtcttcacatatg

SEQ ID NO: 626124 - DNA, 33 bp, Homo sapien
atcaatgtaacttaaatgttgtcttcacatatg

SEQ ID NO: 626125 - DNA, 33 bp, Homo sapien
ttgggtatttttgtgacgttgtacttttcagtt

SEQ ID NO: 626126 - DNA, 33 bp, Homo sapien
ttgggtatttttgtgatgttgtacttttcagtt

SEQ ID NO: 626127 - DNA, 33 bp, Homo sapien
agtccaatcagaataaaaagctgggacactggc

SEQ ID NO: 626128 - DNA, 33 bp, Homo sapien
agtccaatcagaataagaagctgggacactggc

SEQ ID NO: 626129 - DNA, 33 bp, Homo sapien
cgggggccacgattacaacagtctaccccaaca

SEQ ID NO: 626130 - DNA, 33 bp, Homo sapien
cgggggccacgattacgacagtctaccccaaca

SEQ ID NO: 626131 - DNA, 33 bp, Homo sapien
gaagtgaagtcctaacacagaatgccagtttct

SEQ ID NO: 626132 - DNA, 33 bp, Homo sapien
gaagtgaagtcctaacgcagaatgccagtttct

SEQ ID NO: 626133 - DNA, 33 bp, Homo sapien
agtagagaagccaccacgttaagccaaagaatg

SEQ ID NO: 626134 - DNA, 33 bp, Homo sapien
agtagagaagccaccatgttaagccaaagaatg

SEQ ID NO: 626135 - DNA, 33 bp, Homo sapien
cacatgcattttgggaagccggggatcacttga

SEQ ID NO: 626136 - DNA, 33 bp, Homo sapien
cacatgcattttgggaggccggggatcacttga

SEQ ID NO: 626137 - DNA, 33 bp, Homo sapien
ccacacaaaataacgaagacgcgagaaagcatg

SEQ ID NO: 626138 - DNA, 33 bp, Homo sapien
ccacacaaaataacgacgacgcgagaaagcatg

SEQ ID NO: 626139 - DNA, 33 bp, Homo sapien
agattggttatgaatacctagtacaatgtaaat

SEQ ID NO: 626140 - DNA, 33 bp, Homo sapien
agattggttatgaatatctagtacaatgtaaat

SEQ ID NO: 626141 - DNA, 33 bp, Homo sapien
caacgttcttttcaacaagcaaacaaagtaacc

SEQ ID NO: 626142 - DNA, 33 bp, Homo sapien
caacgttcttttcaacgagcaaacaaagtaacc

SEQ ID NO: 626143 - DNA, 33 bp, Homo sapien
tgcctcttgcgagatagaacttaagataatatt

SEQ ID NO: 626144 - DNA, 33 bp, Homo sapien
tgcctcttgcgagatataacttaagataatatt

SEQ ID NO: 626145 - DNA, 33 bp, Homo sapien
gcctctgaccccactgcagattgttcttggaca

SEQ ID NO: 626146 - DNA, 33 bp, Homo sapien
gcctctgaccccactgtagattgttcttggaca

SEQ ID NO: 626147 - DNA, 33 bp, Homo sapien
tcaccctgacagcagaagttggtttcaatttca

SEQ ID NO: 626148 - DNA, 33 bp, Homo sapien
tcaccctgacagcagacgttggtttcaatttca

SEQ ID NO: 626149 - DNA, 33 bp, Homo sapien
agatgctagcaagtgcagagcccaaagggatgt

SEQ ID NO: 626150 - DNA, 33 bp, Homo sapien
agatgctagcaagtgcggagcccaaagggatgt

SEQ ID NO: 626151 - DNA, 33 bp, Homo sapien
tgggggtgtcagcagaataaatttggaggagcc

SEQ ID NO: 626152 - DNA, 33 bp, Homo sapien
tgggggtgtcagcagagtaaatttggaggagcc

SEQ ID NO: 626153 - DNA, 33 bp, Homo sapien
ctggtttcatcacttcactaattgtttcttcat

SEQ ID NO: 626154 - DNA, 33 bp, Homo sapien
ctggtttcatcacttcgctaattgtttcttcat

SEQ ID NO: 626155 - DNA, 33 bp, Homo sapien
tggctaagccattacacgaagtcacaaagaaga

SEQ ID NO: 626156 - DNA, 33 bp, Homo sapien
tggctaagccattacatgaagtcacaaagaaga

SEQ ID NO: 626157 - DNA, 33 bp, Homo sapien; identical to SEQ ID NO: 626155

SEQ ID NO: 626158 - DNA, 33 bp, Homo sapien; identical to SEQ ID NO: 626156

SEQ ID NO: 626159 - DNA, 33 bp, Homo sapien
aagaccttgattccaccgtgagtttcttgacaa

SEQ ID NO: 626160 - DNA, 33 bp, Homo sapien
aagaccttgattccacggtgagtttcttgacaa

SEQ ID NO: 626161 - DNA, 33 bp, Homo sapien
ctctgaccacactggaagctaagctcttaccct

SEQ ID NO: 626162 - DNA, 33 bp, Homo sapien
ctctgaccacactggaggctaagctcttaccct

SEQ ID NO: 626163 - DNA, 33 bp, Homo sapien
ttctaaaacagtgaacaagatcaacaatccaaa

SEQ ID NO: 626164 - DNA, 33 bp, Homo sapien
ttctaaaacagtgaacgagatcaacaatccaaa

SEQ ID NO: 626165 - DNA, 33 bp, Homo sapien
atggtcctaatccttacgtctgaatttctgaca

SEQ ID NO: 626166 - DNA, 33 bp, Homo sapien
atggtcctaatccttatgtctgaatttctgaca

SEQ ID NO: 626167 - DNA, 33 bp, Homo sapien
tgataggttgtaagcacaggctagccctagtgt

SEQ ID NO: 626168 - DNA, 33 bp, Homo sapien
tgataggttgtaagcagaggctagccctagtgt

SEQ ID NO: 626169 - DNA, 33 bp, Homo sapien
tgtcaggacaggaataccagaaacaccacatcc

SEQ ID NO: 626170 - DNA, 33 bp, Homo sapien
tgtcaggacaggaatatcagaaacaccacatcc

SEQ ID NO: 626171 - DNA, 33 bp, Homo sapien
gagaaggaaagaacaaaaagtagtggagagtgg

SEQ ID NO: 626172 - DNA, 33 bp, Homo sapien
gagaaggaaagaacaagaagtagtggagagtgg

SEQ ID NO: 626173 - DNA, 33 bp, Homo sapien
tatttgagagatgttcaaagttggatcaataaa

SEQ ID NO: 626174 - DNA, 33 bp, Homo sapien
tatttgagagatgttcgaagttggatcaataaa

SEQ ID NO: 626175 - DNA, 33 bp, Homo sapien
ctgtggcaaactcttcacttgtaggaagcctct

SEQ ID NO: 626176 - DNA, 33 bp, Homo sapien
ctgtggcaaactcttcgcttgtaggaagcctct

SEQ ID NO: 626177 - DNA, 33 bp, Homo sapien
tcctcattctgttgtacgattttcgtggttaat

SEQ ID NO: 626178 - DNA, 33 bp, Homo sapien
tcctcattctgttgtatgattttcgtggttaat

SEQ ID NO: 626179 - DNA, 33 bp, Homo sapien
acgcagaaacaagacaccatgaacaagaggtca

SEQ ID NO: 626180 - DNA, 33 bp, Homo sapien
acgcagaaacaagacatcatgaacaagaggtca

SEQ ID NO: 626181 - DNA, 33 bp, Homo sapien
ggtcacagaaacaacaaaaggcagaatgagaca

SEQ ID NO: 626182 - DNA, 33 bp, Homo sapien
ggtcacagaaacaacagaaggcagaatgagaca

SEQ ID NO: 626183 - DNA, 33 bp, Homo sapien
aggactgtgcagataacgacggcagcatttaat

SEQ ID NO: 626184 - DNA, 33 bp, Homo sapien
aggactgtgcagataatgacggcagcatttaat

SEQ ID NO: 626185 - DNA, 33 bp, Homo sapien
tcaagttctatgttacgaccaattaggaaaaaa

SEQ ID NO: 626186 - DNA, 33 bp, Homo sapien
tcaagttctatgttactaccaattaggaaaaaa

SEQ ID NO: 626187 - DNA, 33 bp, Homo sapien
caccagctataaacagcaacaataatacctatc

SEQ ID NO: 626188 - DNA, 33 bp, Homo sapien
caccagctataaacaggaacaataatacctatc

SEQ ID NO: 626189 - DNA, 33 bp, Homo sapien
gactgctgttggaacacatcggttgtatcttca

SEQ ID NO: 626190 - DNA, 33 bp, Homo sapien
gactgctgttggaacatatcggttgtatcttca

SEQ ID NO: 626191 - DNA, 33 bp, Homo sapien
ccctgctgtatcacacaagacctggactgtctg

SEQ ID NO: 626192 - DNA, 33 bp, Homo sapien
ccctgctgtatcacacgagacctggactgtctg

SEQ ID NO: 626193 - DNA, 33 bp, Homo sapien
tctagcttatgcattcaatttttattaacttta

SEQ ID NO: 626194 - DNA, 33 bp, Homo sapien
tctagcttatgcattcgatttttattaacttta

SEQ ID NO: 626195 - DNA, 33 bp, Homo sapien
gatcctttacaaagaaatctcctcattaattat

SEQ ID NO: 626196 - DNA, 33 bp, Homo sapien
gatcctttacaaagaactctcctcattaattat

SEQ ID NO: 626197 - DNA, 33 bp, Homo sapien
attggaacagctgacaaaaccggaaatggaaca

SEQ ID NO: 626198 - DNA, 33 bp, Homo sapien
attggaacagctgacataaccggaaatggaaca

SEQ ID NO: 626199 - DNA, 33 bp, Homo sapien
aattttccaacacatacaaaggtagaatgaacc

SEQ ID NO: 626200 - DNA, 33 bp, Homo sapien
aattttccaacacatataaaggtagaatgaacc

SEQ ID NO: 626201 - DNA, 33 bp, Homo sapien
atgggctgggtaagtaaggaatttggtgcaaag

SEQ ID NO: 626202 - DNA, 33 bp, Homo sapien
atgggctgggtaagtatggaatttggtgcaaag

SEQ ID NO: 626203 - DNA, 33 bp, Homo sapien
acagttttaaggtagcaatgaagagaagcttgg

SEQ ID NO: 626204 - DNA, 33 bp, Homo sapien
acagttttaaggtagcgatgaagagaagcttgg

SEQ ID NO: 626205 - DNA, 33 bp, Homo sapien
aagcttccacccactcaaaagcataggccatca

SEQ ID NO: 626206 - DNA, 33 bp, Homo sapien
aagcttccacccactcgaaagcataggccatca

SEQ ID NO: 626207 - DNA, 33 bp, Homo sapien
tataaatagacaatcaaaagtggacaccatgta

SEQ ID NO: 626208 - DNA, 33 bp, Homo sapien
tataaatagacaatcagaagtggacaccatgta

SEQ ID NO: 626209 - DNA, 33 bp, Homo sapien
gacacttacagtctgaactatgtgtgtttgttt

SEQ ID NO: 626210 - DNA, 33 bp, Homo sapien
gacacttacagtctgagctatgtgtgtttgttt

SEQ ID NO: 626211 - DNA, 33 bp, Homo sapien
agcctgtgacttcaaccgtctgttacttgggtg

SEQ ID NO: 626212 - DNA, 33 bp, Homo sapien
agcctgtgacttcaactgtctgttacttgggtg

SEQ ID NO: 626213 - DNA, 33 bp, Homo sapien
agcagaaatttgaacccgagttgtcagtccttg

SEQ ID NO: 626214 - DNA, 33 bp, Homo sapien
agcagaaatttgaacctgagttgtcagtccttg

SEQ ID NO: 626215 - DNA, 33 bp, Homo sapien
tctgctctatctaaaacgagtatagctactccc

SEQ ID NO: 626216 - DNA, 33 bp, Homo sapien
tctgctctatctaaaatgagtatagctactccc

SEQ ID NO: 626217 - DNA, 33 bp, Homo sapien
tcatcaattacagctacgttttcctaccctggc

SEQ ID NO: 626218 - DNA, 33 bp, Homo sapien
tcatcaattacagctatgttttcctaccctggc

SEQ ID NO: 626219 - DNA, 33 bp, Homo sapien
ctcatatgcaaaaaaccgttgtttggcactgag

SEQ ID NO: 626220 - DNA, 33 bp, Homo sapien
ctcatatgcaaaaaacggttgtttggcactgag

SEQ ID NO: 626221 - DNA, 33 bp, Homo sapien
cttatcaacttattgccattatttcaataatgt

SEQ ID NO: 626222 - DNA, 33 bp, Homo sapien
cttatcaacttattgctattatttcaataatgt

SEQ ID NO: 626223 - DNA, 33 bp, Homo sapien
aaatgatttgagattaacaggcatttagatgaa

SEQ ID NO: 626224 - DNA, 33 bp, Homo sapien
aaatgatttgagattaccaggcatttagatgaa

SEQ ID NO: 626225 - DNA, 33 bp, Homo sapien
ccagctggtgccatccagaccactaaactggct

SEQ ID NO: 626226 - DNA, 33 bp, Homo sapien
ccagctggtgccatccggaccactaaactggct

SEQ ID NO: 626227 - DNA, 33 bp, Homo sapien
cattcctgaaacttaacaaggtcctgaataaaa

SEQ ID NO: 626228 - DNA, 33 bp, Homo sapien
cattcctgaaacttaataaggtcctgaataaaa

SEQ ID NO: 626229 - DNA, 33 bp, Homo sapien
agcagagctgggaacacagaggattactgatgg

SEQ ID NO: 626230 - DNA, 33 bp, Homo sapien
agcagagctgggaacagagaggattactgatgg

SEQ ID NO: 626231 - DNA, 33 bp, Homo sapien
gagatggataagttgaagggataataggtgggg

SEQ ID NO: 626232 - DNA, 33 bp, Homo sapien
gagatggataagttgaggggataataggtgggg

SEQ ID NO: 626233 - DNA, 33 bp, Homo sapien
aacaaacaatttagccaatgtaggatttgtcac

SEQ ID NO: 626234 - DNA, 33 bp, Homo sapien
aacaaacaatttagccgatgtaggatttgtcac

SEQ ID NO: 626235 - DNA, 33 bp, Homo sapien
taaatcagtgccttagacatcaagtgacctaac

SEQ ID NO: 626236 - DNA, 33 bp, Homo sapien
taaatcagtgccttagtcatcaagtgacctaac

SEQ ID NO: 626237 - DNA, 33 bp, Homo sapien
gccagtcacctatggaagtgtttatttaaaatt

SEQ ID NO: 626238 - DNA, 33 bp, Homo sapien
gccagtcacctatggatgtgtttatttaaaatt

SEQ ID NO: 626239 - DNA, 33 bp, Homo sapien
aacaattactgagagggatagtagtttaaaatt

SEQ ID NO: 626240 - DNA, 33 bp, Homo sapien
aacaattactgagaggtatagtagtttaaaatt

SEQ ID NO: 626241 - DNA, 33 bp, Homo sapien
agagcttccccctcccactggaagtgctgccag

SEQ ID NO: 626242 - DNA, 33 bp, Homo sapien
agagcttccccctcccgctggaagtgctgccag

SEQ ID NO: 626243 - DNA, 33 bp, Homo sapien
agaagaaaatgtatgaataagtgtagaaggaat

SEQ ID NO: 626244 - DNA, 33 bp, Homo sapien
agaagaaaatgtatgagtaagtgtagaaggaat

SEQ ID NO: 626245 - DNA, 33 bp, Homo sapien
taatttacaaaccatgcatttcacccatttaaa

SEQ ID NO: 626246 - DNA, 33 bp, Homo sapien
taatttacaaaccatgtatttcacccatttaaa

SEQ ID NO: 626247 - DNA, 33 bp, Homo sapien
tagcctacattttgacaggattatttgctttta

SEQ ID NO: 626248 - DNA, 33 bp, Homo sapien
tagcctacattttgacgggattatttgctttta

SEQ ID NO: 626249 - DNA, 33 bp, Homo sapien
tctttcacaaagttgaaatgagaaggaattaat

SEQ ID NO: 626250 - DNA, 33 bp, Homo sapien
tctttcacaaagttgagatgagaaggaattaat

SEQ ID NO: 626251 - DNA, 33 bp, Homo sapien
acccacctcagcaggacccttcttagctctctt

SEQ ID NO: 626252 - DNA, 33 bp, Homo sapien
acccacctcagcaggatccttcttagctctctt

SEQ ID NO: 626253 - DNA, 33 bp, Homo sapien
ccagtcagtaactttgcacctcaaggaactaga

SEQ ID NO: 626254 - DNA, 33 bp, Homo sapien
ccagtcagtaactttgtacctcaaggaactaga

SEQ ID NO: 626255 - DNA, 33 bp, Homo sapien
tttcatctctctgttaccactttgaatccactc

SEQ ID NO: 626256 - DNA, 33 bp, Homo sapien
tttcatctctctgttatcactttgaatccactc

SEQ ID NO: 626257 - DNA, 33 bp, Homo sapien
agtttgtgctgaaccactgcagtacctagtttg

SEQ ID NO: 626258 - DNA, 33 bp, Homo sapien
agtttgtgctgaaccattgcagtacctagtttg

SEQ ID NO: 626259 - DNA, 33 bp, Homo sapien
caccacttcagaaaacagtttgtcactgccctg

SEQ ID NO: 626260 - DNA, 33 bp, Homo sapien
caccacttcagaaaactgtttgtcactgccctg

SEQ ID NO: 626261 - DNA, 33 bp, Homo sapien
tcagtaaaattgctaaacctttagtcagactaa

SEQ ID NO: 626262 - DNA, 33 bp, Homo sapien
tcagtaaaattgctaatcctttagtcagactaa

SEQ ID NO: 626263 - DNA, 33 bp, Homo sapien
tgaagtaccaagatcaaaaatgaaagggattgt

SEQ ID NO: 626264 - DNA, 33 bp, Homo sapien
tgaagtaccaagatcagaaatgaaagggattgt

SEQ ID NO: 626265 - DNA, 33 bp, Homo sapien
ataggaccttgacttacgtgtagcatagcagtg

SEQ ID NO: 626266 - DNA, 33 bp, Homo sapien
ataggaccttgacttatgtgtagcatagcagtg

SEQ ID NO: 626267 - DNA, 33 bp, Homo sapien
ttcatttgttccttcaaataaatgagttctaac

SEQ ID NO: 626268 - DNA, 33 bp, Homo sapien
ttcatttgttccttcagataaatgagttctaac

SEQ ID NO: 626269 - DNA, 33 bp, Homo sapien
ttgttcatttagaaaactgcacaaatagctgag

SEQ ID NO: 626270 - DNA, 33 bp, Homo sapien
ttgttcatttagaaaattgcacaaatagctgag

SEQ ID NO: 626271 - DNA, 33 bp, Homo sapien
cccactatcaacgcccacattccaacactgtct

SEQ ID NO: 626272 - DNA, 33 bp, Homo sapien
cccactatcaacgcccgcattccaacactgtct

SEQ ID NO: 626273 - DNA, 33 bp, Homo sapien
acaatgtcagttatgcaaggtaaaaactgtact

SEQ ID NO: 626274 - DNA, 33 bp, Homo sapien
acaatgtcagttatgcgaggtaaaaactgtact

SEQ ID NO: 626275 - DNA, 33 bp, Homo sapien
aaccttcagcatatcaacagtgactcaaagctg

SEQ ID NO: 626276 - DNA, 33 bp, Homo sapien
aaccttcagcatatcagcagtgactcaaagctg

SEQ ID NO: 626277 - DNA, 33 bp, Homo sapien
gttgaaaataattgcaaaaaaaatgagctacaa

SEQ ID NO: 626278 - DNA, 33 bp, Homo sapien
gttgaaaataattgcagaaaaaatgagctacaa

SEQ ID NO: 626279 - DNA, 33 bp, Homo sapien
aaattcaccctcatcaatcttggatatatgtat

SEQ ID NO: 626280 - DNA, 33 bp, Homo sapien
aaattcaccctcatcagtcttggatatatgtat

SEQ ID NO: 626281 - DNA, 33 bp, Homo sapien
cattttacttagaagcacaaggatagtggtaca

SEQ ID NO: 626282 - DNA, 33 bp, Homo sapien
cattttacttagaagctcaaggatagtggtaca

SEQ ID NO: 626283 - DNA, 33 bp, Homo sapien
tgctttaaaaatgaacccttttcaatcagtggg

SEQ ID NO: 626284 - DNA, 33 bp, Homo sapien
tgctttaaaaatgaacgcttttcaatcagtggg

SEQ ID NO: 626285 - DNA, 33 bp, Homo sapien
ctttactaattttccactgatctcaggcatatc

SEQ ID NO: 626286 - DNA, 33 bp, Homo sapien
ctttactaattttccattgatctcaggcatatc

SEQ ID NO: 626287 - DNA, 33 bp, Homo sapien
aaagtacagctataaggccctagaaacagcatg

SEQ ID NO: 626288 - DNA, 33 bp, Homo sapien
aaagtacagctataagtccctagaaacagcatg

SEQ ID NO: 626289 - DNA, 33 bp, Homo sapien
acatcaatacatggaggctatacattagtttgg

SEQ ID NO: 626290 - DNA, 33 bp, Homo sapien
acatcaatacatggagtctatacattagtttgg

SEQ ID NO: 626291 - DNA, 33 bp, Homo sapien
aataagaaaatgtctaggctgttgctaacacta

SEQ ID NO: 626292 - DNA, 33 bp, Homo sapien
aataagaaaatgtctatgctgttgctaacacta

SEQ ID NO: 626293 - DNA, 33 bp, Homo sapien
ctgtaaaaagccaataaagccggatgcagtggc

SEQ ID NO: 626294 - DNA, 33 bp, Homo sapien
ctgtaaaaagccaatagagccggatgcagtggc

SEQ ID NO: 626295 - DNA, 33 bp, Homo sapien
gattcaactctacatacctcctgcatcatcacg

SEQ ID NO: 626296 - DNA, 33 bp, Homo sapien
gattcaactctacatatctcctgcatcatcacg

SEQ ID NO: 626297 - DNA, 33 bp, Homo sapien
gagtctgccattaacactgaatgaatacaggga

SEQ ID NO: 626298 - DNA, 33 bp, Homo sapien
gagtctgccattaacattgaatgaatacaggga

SEQ ID NO: 626299 - DNA, 33 bp, Homo sapien
caccattaaagcaataataacaaacaattgagt

SEQ ID NO: 626300 - DNA, 33 bp, Homo sapien
caccattaaagcaatagtaacaaacaattgagt

SEQ ID NO: 626301 - DNA, 33 bp, Homo sapien
ttatagatgaggaaataacaatatagaatggtt

SEQ ID NO: 626302 - DNA, 33 bp, Homo sapien
ttatagatgaggaaatcacaatatagaatggtt

SEQ ID NO: 626303 - DNA, 33 bp, Homo sapien
tatagaatggttaagtgactgcctgaggtcaca

SEQ ID NO: 626304 - DNA, 33 bp, Homo sapien
tatagaatggttaagttactgcctgaggtcaca

SEQ ID NO: 626305 - DNA, 33 bp, Homo sapien
aattcctatttttgccaacttcttacccacccc

SEQ ID NO: 626306 - DNA, 33 bp, Homo sapien
aattcctatttttgcccacttcttacccacccc

SEQ ID NO: 626307 - DNA, 33 bp, Homo sapien
tctgctatctctgctactacctccttacttgca

SEQ ID NO: 626308 - DNA, 33 bp, Homo sapien
tctgctatctctgctattacctccttacttgca

SEQ ID NO: 626309 - DNA, 33 bp, Homo sapien
tttatctgtctatcgacctctctttctttctct

SEQ ID NO: 626310 - DNA, 33 bp, Homo sapien
tttatctgtctatcgatctctctttctttctct

SEQ ID NO: 626311 - DNA, 33 bp, Homo sapien
gcagagagttaagaaaagaaataatgcagatga

SEQ ID NO: 626312 - DNA, 33 bp, Homo sapien
gcagagagttaagaaacgaaataatgcagatga

SEQ ID NO: 626313 - DNA, 33 bp, Homo sapien
tggacaactacggtagaaattcaatctgtggct

SEQ ID NO: 626314 - DNA, 33 bp, Homo sapien
tggacaactacggtaggaattcaatctgtggct

SEQ ID NO: 626315 - DNA, 33 bp, Homo sapien
tcactgagtagacaagacgtaccttttggaagg

SEQ ID NO: 626316 - DNA, 33 bp, Homo sapien
tcactgagtagacaaggcgtaccttttggaagg

SEQ ID NO: 626317 - DNA, 33 bp, Homo sapien
gcagcccaccattgacggaaactttgtgaggtg

SEQ ID NO: 626318 - DNA, 33 bp, Homo sapien
gcagcccaccattgactgaaactttgtgaggtg

SEQ ID NO: 626319 - DNA, 33 bp, Homo sapien
tcctcataggtcaaccccctcttatgtataaac

SEQ ID NO: 626320 - DNA, 33 bp, Homo sapien
tcctcataggtcaacctcctcttatgtataaac

SEQ ID NO: 626321 - DNA, 33 bp, Homo sapien
ataaaacaagtggatacgatagaaaataaaata

SEQ ID NO: 626322 - DNA, 33 bp, Homo sapien
ataaaacaagtggatatgatagaaaataaaata

SEQ ID NO: 626323 - DNA, 33 bp, Homo sapien
cactgctggatatgcaaaagtgtaaaacagctc

SEQ ID NO: 626324 - DNA, 33 bp, Homo sapien
cactgctggatatgcagaagtgtaaaacagctc

SEQ ID NO: 626325 - DNA, 33 bp, Homo sapien
atggaaaataccaaacacacatttgggacccta

SEQ ID NO: 626326 - DNA, 33 bp, Homo sapien
atggaaaataccaaacgcacatttgggacccta

SEQ ID NO: 626327 - DNA, 33 bp, Homo sapien
catatcaaaaagttaaatgtgatgatatactga

SEQ ID NO: 626328 - DNA, 33 bp, Homo sapien
catatcaaaaagttaagtgtgatgatatactga

SEQ ID NO: 626329 - DNA, 33 bp, Homo sapien
tgacctgttctgtcataaaatctcctctgactg

SEQ ID NO: 626330 - DNA, 33 bp, Homo sapien
tgacctgttctgtcatcaaatctcctctgactg

SEQ ID NO: 626331 - DNA, 33 bp, Homo sapien
agtgtgggttattcagaagtggacttgagatac

SEQ ID NO: 626332 - DNA, 33 bp, Homo sapien
agtgtgggttattcaggagtggacttgagatac

SEQ ID NO: 626333 - DNA, 33 bp, Homo sapien
cttgactggattactacggtagcttcctaactg

SEQ ID NO: 626334 - DNA, 33 bp, Homo sapien
cttgactggattactatggtagcttcctaactg

SEQ ID NO: 626335 - DNA, 33 bp, Homo sapien
ccttttgatgattcacactcttacactatatag

SEQ ID NO: 626336 - DNA, 33 bp, Homo sapien
ccttttgatgattcaccctcttacactatatag

SEQ ID NO: 626337 - DNA, 33 bp, Homo sapien
tcaagttcaagaaggaaagctcgacattgaaca

SEQ ID NO: 626338 - DNA, 33 bp, Homo sapien
tcaagttcaagaaggacagctcgacattgaaca

SEQ ID NO: 626339 - DNA, 33 bp, Homo sapien
ggttactagagtcaagaaagagtagggggtggg

SEQ ID NO: 626340 - DNA, 33 bp, Homo sapien
ggttactagagtcaaggaagagtagggggtggg

SEQ ID NO: 626341 - DNA, 33 bp, Homo sapien
attccgcatcaagtccaaatgtactccttctcc

SEQ ID NO: 626342 - DNA, 33 bp, Homo sapien
attccgcatcaagtcccaatgtactccttctcc

SEQ ID NO: 626343 - DNA, 33 bp, Homo sapien
caggttgcctttaagcagatgtgttttaactga

SEQ ID NO: 626344 - DNA, 33 bp, Homo sapien
caggttgcctttaagcggatgtgttttaactga

SEQ ID NO: 626345 - DNA, 33 bp, Homo sapien
agcaggactccaacccacctaatcacaactcca

SEQ ID NO: 626346 - DNA, 33 bp, Homo sapien
agcaggactccaacccgcctaatcacaactcca

SEQ ID NO: 626347 - DNA, 33 bp, Homo sapien
aactgcctgcacaagaccaacctttgaatatct

SEQ ID NO: 626348 - DNA, 33 bp, Homo sapien
aactgcctgcacaagatcaacctttgaatatct

SEQ ID NO: 626349 - DNA, 33 bp, Homo sapien
cggttcaaatatataacggaaaaatgtctagga

SEQ ID NO: 626350 - DNA, 33 bp, Homo sapien
cggttcaaatatataatggaaaaatgtctagga

SEQ ID NO: 626351 - DNA, 33 bp, Homo sapien
ttcctacttcatggataaggaagcagaggccct

SEQ ID NO: 626352 - DNA, 33 bp, Homo sapien
ttcctacttcatggatgaggaagcagaggccct

SEQ ID NO: 626353 - DNA, 33 bp, Homo sapien
agatatcctctccccagtgcccagctatgtctt

SEQ ID NO: 626354 - DNA, 33 bp, Homo sapien
agatatcctctccccattgcccagctatgtctt

SEQ ID NO: 626355 - DNA, 33 bp, Homo sapien
atgggcaaataaaaaaatgaatgcaggagtgaa

SEQ ID NO: 626356 - DNA, 33 bp, Homo sapien
atgggcaaataaaaaagtgaatgcaggagtgaa

SEQ ID NO: 626357 - DNA, 33 bp, Homo sapien
aaccttctgaaccctcaacacatttaatttttt

SEQ ID NO: 626358 - DNA, 33 bp, Homo sapien
aaccttctgaaccctcgacacatttaatttttt

SEQ ID NO: 626359 - DNA, 33 bp, Homo sapien
ataacgaaagagccacaagtggaatgatgcctt

SEQ ID NO: 626360 - DNA, 33 bp, Homo sapien
ataacgaaagagccacgagtggaatgatgcctt

SEQ ID NO: 626361 - DNA, 33 bp, Homo sapien
aaaagtacaaactgtacgacaccattgctatga

SEQ ID NO: 626362 - DNA, 33 bp, Homo sapien
aaaagtacaaactgtatgacaccattgctatga

SEQ ID NO: 626363 - DNA, 33 bp, Homo sapien
gttactacaagggcacaggacttgctagaatca

SEQ ID NO: 626364 - DNA, 33 bp, Homo sapien
gttactacaagggcacgggacttgctagaatca

SEQ ID NO: 626365 - DNA, 33 bp, Homo sapien
gccaaatgaaatgccaatagtgaaccaattttg

SEQ ID NO: 626366 - DNA, 33 bp, Homo sapien
gccaaatgaaatgccagtagtgaaccaattttg

SEQ ID NO: 626367 - DNA, 33 bp, Homo sapien
tgtaaagaaaagaataacttctgattcgtttgt

SEQ ID NO: 626368 - DNA, 33 bp, Homo sapien
tgtaaagaaaagaataccttctgattcgtttgt

SEQ ID NO: 626369 - DNA, 33 bp, Homo sapien
acttgttagtacaccacgtcacaaagatttgca

SEQ ID NO: 626370 - DNA, 33 bp, Homo sapien
acttgttagtacaccatgtcacaaagatttgca

SEQ ID NO: 626371 - DNA, 33 bp, Homo sapien
ggtgagcagaatcgagaaggaagagaaggtatt

SEQ ID NO: 626372 - DNA, 33 bp, Homo sapien
ggtgagcagaatcgaggaggaagagaaggtatt

SEQ ID NO: 626373 - DNA, 33 bp, Homo sapien
aaataagactcaaacaagtaggattcactcatg

SEQ ID NO: 626374 - DNA, 33 bp, Homo sapien
aaataagactcaaacaggtaggattcactcatg

SEQ ID NO: 626375 - DNA, 33 bp, Homo sapien
aaatgtaaccttaaggacaattgcaacctctct

SEQ ID NO: 626376 - DNA, 33 bp, Homo sapien
aaatgtaaccttaaggtcaattgcaacctctct

SEQ ID NO: 626377 - DNA, 33 bp, Homo sapien
tgtcagtaagaattaaatctgttgatgccaccc

SEQ ID NO: 626378 - DNA, 33 bp, Homo sapien
tgtcagtaagaattaagtctgttgatgccaccc

SEQ ID NO: 626379 - DNA, 33 bp, Homo sapien
acccaaaggatgaagacgagttactcaagtaag

SEQ ID NO: 626380 - DNA, 33 bp, Homo sapien
acccaaaggatgaagatgagttactcaagtaag

SEQ ID NO: 626381 - DNA, 33 bp, Homo sapien
ccagcatctcccttacactagatggagctacca

SEQ ID NO: 626382 - DNA, 33 bp, Homo sapien
ccagcatctcccttacgctagatggagctacca

SEQ ID NO: 626383 - DNA, 33 bp, Homo sapien
gctgactaaatcctgacctggggagatttgatg

SEQ ID NO: 626384 - DNA, 33 bp, Homo sapien
gctgactaaatcctgagctggggagatttgatg

SEQ ID NO: 626385 - DNA, 33 bp, Homo sapien
aatagactaatacaagaacctactatgtgctca

SEQ ID NO: 626386 - DNA, 33 bp, Homo sapien
aatagactaatacaagcacctactatgtgctca

SEQ ID NO: 626387 - DNA, 33 bp, Homo sapien
gggaggacatacctcaataagtcatagcacagc

SEQ ID NO: 626388 - DNA, 33 bp, Homo sapien
gggaggacatacctcagtaagtcatagcacagc

SEQ ID NO: 626389 - DNA, 33 bp, Homo sapien
cccagggaagctggaagtatcaaagctggtgcc

SEQ ID NO: 626390 - DNA, 33 bp, Homo sapien
cccagggaagctggaattatcaaagctggtgcc

SEQ ID NO: 626391 - DNA, 33 bp, Homo sapien
aggagaattactgcaaaccatctacactgagct

SEQ ID NO: 626392 - DNA, 33 bp, Homo sapien
aggagaattactgcaagccatctacactgagct

SEQ ID NO: 626393 - DNA, 33 bp, Homo sapien
cgggcttagcatagcacctgaaacatcttaaga

SEQ ID NO: 626394 - DNA, 33 bp, Homo sapien
cgggcttagcatagcatctgaaacatcttaaga

SEQ ID NO: 626395 - DNA, 33 bp, Homo sapien
cattaactaattccccaaaaaatgatttccata

SEQ ID NO: 626396 - DNA, 33 bp, Homo sapien
cattaactaattcccccaaaaatgatttccata

SEQ ID NO: 626397 - DNA, 33 bp, Homo sapien
atttgctgtagagatacctgtgttgttgttttt

SEQ ID NO: 626398 - DNA, 33 bp, Homo sapien
atttgctgtagagatatctgtgttgttgttttt

SEQ ID NO: 626399 - DNA, 33 bp, Homo sapien
agatactgtagcaacccccctgagatttaactg

SEQ ID NO: 626400 - DNA, 33 bp, Homo sapien
agatactgtagcaacctccctgagatttaactg

SEQ ID NO: 626401 - DNA, 33 bp, Homo sapien
ggggtagctccagaagaataaatctgacaaaca

SEQ ID NO: 626402 - DNA, 33 bp, Homo sapien
ggggtagctccagaaggataaatctgacaaaca

SEQ ID NO: 626403 - DNA, 33 bp, Homo sapien
gaaaaggaagcttccacgagtaggcacttgacc

SEQ ID NO: 626404 - DNA, 33 bp, Homo sapien
gaaaaggaagcttccatgagtaggcacttgacc

SEQ ID NO: 626405 - DNA, 33 bp, Homo sapien
aaagctatgtactagacagaatgttggaaatag

SEQ ID NO: 626406 - DNA, 33 bp, Homo sapien
aaagctatgtactagatagaatgttggaaatag

SEQ ID NO: 626407 - DNA, 33 bp, Homo sapien
ttctcatcagtagggcacaagtgttccaatttc

SEQ ID NO: 626408 - DNA, 33 bp, Homo sapien
ttctcatcagtagggcgcaagtgttccaatttc

SEQ ID NO: 626409 - DNA, 33 bp, Homo sapien
attacaggaatccttcaatcactatccaaataa

SEQ ID NO: 626410 - DNA, 33 bp, Homo sapien
attacaggaatccttcgatcactatccaaataa

SEQ ID NO: 626411 - DNA, 33 bp, Homo sapien
gaaaaaagtcttgcccaagtttacaaagcaagt

SEQ ID NO: 626412 - DNA, 33 bp, Homo sapien
gaaaaaagtcttgccccagtttacaaagcaagt

SEQ ID NO: 626413 - DNA, 33 bp, Homo sapien
aaggcagcaagaatgaccttcctccaaaacaat

SEQ ID NO: 626414 - DNA, 33 bp, Homo sapien
aaggcagcaagaatgatcttcctccaaaacaat

SEQ ID NO: 626415 - DNA, 33 bp, Homo sapien
attttctatggtgatacgttttaatttcttgct

SEQ ID NO: 626416 - DNA, 33 bp, Homo sapien
attttctatggtgatatgttttaatttcttgct

SEQ ID NO: 626417 - DNA, 33 bp, Homo sapien
aaaccactatggcctaagtttacctatgtaaca

SEQ ID NO: 626418 - DNA, 33 bp, Homo sapien
aaaccactatggcctatgtttacctatgtaaca

SEQ ID NO: 626419 - DNA, 33 bp, Homo sapien
tttttgctcatccagtaaatgtggccaggggct

SEQ ID NO: 626420 - DNA, 33 bp, Homo sapien
tttttgctcatccagtgaatgtggccaggggct

SEQ ID NO: 626421 - DNA, 33 bp, Homo sapien
ttgaaagctggctgttcaaaagagcctggcacc

SEQ ID NO: 626422 - DNA, 33 bp, Homo sapien
ttgaaagctggctgtttaaaagagcctggcacc

SEQ ID NO: 626423 - DNA, 33 bp, Homo sapien
tcagcatgagacattaagaatacaggaagaaca

SEQ ID NO: 626424 - DNA, 33 bp, Homo sapien
tcagcatgagacattatgaatacaggaagaaca

SEQ ID NO: 626425 - DNA, 33 bp, Homo sapien
acattaaagtgattaccaccttctagctctcca

SEQ ID NO: 626426 - DNA, 33 bp, Homo sapien
acattaaagtgattactaccttctagctctcca

SEQ ID NO: 626427 - DNA, 33 bp, Homo sapien
aattggagagacttcccgaagaccaggggtgac

SEQ ID NO: 626428 - DNA, 33 bp, Homo sapien
aattggagagacttcctgaagaccaggggtgac

SEQ ID NO: 626429 - DNA, 33 bp, Homo sapien
agaattggaatccaaaacttgggcatagactat

SEQ ID NO: 626430 - DNA, 33 bp, Homo sapien
agaattggaatccaaagcttgggcatagactat

SEQ ID NO: 626431 - DNA, 33 bp, Homo sapien
ttacactaaacttctcactttgaagaccggaat

SEQ ID NO: 626432 - DNA, 33 bp, Homo sapien
ttacactaaacttctcgctttgaagaccggaat

SEQ ID NO: 626433 - DNA, 33 bp, Homo sapien
ttttctctcaactttccatctggaactcctatt

SEQ ID NO: 626434 - DNA, 33 bp, Homo sapien
ttttctctcaactttctatctggaactcctatt

SEQ ID NO: 626435 - DNA, 33 bp, Homo sapien
cagtgagcattgcagaaaatggctgtgttacaa

SEQ ID NO: 626436 - DNA, 33 bp, Homo sapien
cagtgagcattgcagagaatggctgtgttacaa

SEQ ID NO: 626437 - DNA, 33 bp, Homo sapien
gtagacatagagatgcactaccttgatcccctt

SEQ ID NO: 626438 - DNA, 33 bp, Homo sapien
gtagacatagagatgcgctaccttgatcccctt

SEQ ID NO: 626439 - DNA, 33 bp, Homo sapien
ggcatattgatgtggaatacaaaaagtgtcctt

SEQ ID NO: 626440 - DNA, 33 bp, Homo sapien
ggcatattgatgtggagtacaaaaagtgtcctt

SEQ ID NO: 626441 - DNA, 33 bp, Homo sapien
ggaactgagccttgtccaggaccatagaagggt

SEQ ID NO: 626442 - DNA, 33 bp, Homo sapien
ggaactgagccttgtctaggaccatagaagggt

SEQ ID NO: 626443 - DNA, 33 bp, Homo sapien
gtggtgtgaatcacaccattttcaatcacactc

SEQ ID NO: 626444 - DNA, 33 bp, Homo sapien
gtggtgtgaatcacactattttcaatcacactc

SEQ ID NO: 626445 - DNA, 33 bp, Homo sapien
gtaaagaggaaaataacggctaacaaaggatac

SEQ ID NO: 626446 - DNA, 33 bp, Homo sapien
gtaaagaggaaaataatggctaacaaaggatac

SEQ ID NO: 626447 - DNA, 33 bp, Homo sapien
ttgggtcttctatgccaataatttgtgaaatac

SEQ ID NO: 626448 - DNA, 33 bp, Homo sapien
ttgggtcttctatgcccataatttgtgaaatac

SEQ ID NO: 626449 - DNA, 33 bp, Homo sapien
tttacttctgttcaaccatcatccgttgggtct

SEQ ID NO: 626450 - DNA, 33 bp, Homo sapien
tttacttctgttcaactatcatccgttgggtct

SEQ ID NO: 626451 - DNA, 33 bp, Homo sapien
ttgctccactggtaaaaggaaggaggatttgct

SEQ ID NO: 626452 - DNA, 33 bp, Homo sapien
ttgctccactggtaaagggaaggaggatttgct

SEQ ID NO: 626453 - DNA, 33 bp, Homo sapien
ctataatttgaggtaaagaagcacataaatgat

SEQ ID NO: 626454 - DNA, 33 bp, Homo sapien
ctataatttgaggtaaggaagcacataaatgat

SEQ ID NO: 626455 - DNA, 33 bp, Homo sapien
ggggaaattttccaaaatacaaaggcaggagct

SEQ ID NO: 626456 - DNA, 33 bp, Homo sapien
ggggaaattttccaaactacaaaggcaggagct

SEQ ID NO: 626457 - DNA, 33 bp, Homo sapien
ctagactgcactgaccagagaaatggaaacccc

SEQ ID NO: 626458 - DNA, 33 bp, Homo sapien
ctagactgcactgaccggagaaatggaaacccc

SEQ ID NO: 626459 - DNA, 33 bp, Homo sapien; identical to SEQ ID NO: 626457

SEQ ID NO: 626460 - DNA, 33 bp, Homo sapien; identical to SEQ ID NO: 626458

SEQ ID NO: 626461 - DNA, 33 bp, Homo sapien
ttttaagaagccatagaaaatagtgccgggaca

SEQ ID NO: 626462 - DNA, 33 bp, Homo sapien
ttttaagaagccataggaaatagtgccgggaca

SEQ ID NO: 626463 - DNA, 33 bp, Homo sapien; identical to SEQ ID NO: 626461

SEQ ID NO: 626464 - DNA, 33 bp, Homo sapien; identical to SEQ ID NO: 626462

SEQ ID NO: 626465 - DNA, 33 bp, Homo sapien
agggaactctgtaagacgtgaataatggaggtg

SEQ ID NO: 626466 - DNA, 33 bp, Homo sapien
agggaactctgtaagatgtgaataatggaggtg

SEQ ID NO: 626467 - DNA, 33 bp, Homo sapien
ggtctcaggcaaacccaactgccactcaggcaa

SEQ ID NO: 626468 - DNA, 33 bp, Homo sapien
ggtctcaggcaaacccgactgccactcaggcaa

SEQ ID NO: 626469 - DNA, 33 bp, Homo sapien
caacgaccataaaatacgtgtgagcatgtaata

SEQ ID NO: 626470 - DNA, 33 bp, Homo sapien
caacgaccataaaatatgtgtgagcatgtaata

SEQ ID NO: 626471 - DNA, 33 bp, Homo sapien; identical to SEQ ID NO: 626469

SEQ ID NO: 626472 - DNA, 33 bp, Homo sapien; identical to SEQ ID NO: 626470

SEQ ID NO: 626473 - DNA, 33 bp, Homo sapien
accctgacactgcgtcacttctccagtcctggg

SEQ ID NO: 626474 - DNA, 33 bp, Homo sapien
accctgacactgcgtcgcttctccagtcctggg

SEQ ID NO: 626475 - DNA, 33 bp, Homo sapien
tgtctgaaactgcctgcaatcaaggtttctctg

SEQ ID NO: 626476 - DNA, 33 bp, Homo sapien
tgtctgaaactgcctgtaatcaaggtttctctg

SEQ ID NO: 626477 - DNA, 33 bp, Homo sapien
caaaatcttgtcttgagatctgtttcccaaaaa

SEQ ID NO: 626478 - DNA, 33 bp, Homo sapien
caaaatcttgtcttgatatctgtttcccaaaaa

SEQ ID NO: 626479 - DNA, 33 bp, Homo sapien
tcttgagttcccttcacgtcccaaataaaatgt

SEQ ID NO: 626480 - DNA, 33 bp, Homo sapien
tcttgagttcccttcatgtcccaaataaaatgt

SEQ ID NO: 626481 - DNA, 33 bp, Homo sapien
ccaatcttcttcccaacggtgtggtcacagcca

SEQ ID NO: 626482 - DNA, 33 bp, Homo sapien
ccaatcttcttcccaatggtgtggtcacagcca

SEQ ID NO: 626483 - DNA, 33 bp, Homo sapien
tgtgtcgtcaataaaacaagtatgcacacatct

SEQ ID NO: 626484 - DNA, 33 bp, Homo sapien
tgtgtcgtcaataaaataagtatgcacacatct

SEQ ID NO: 626485 - DNA, 33 bp, Homo sapien
atccaactaagcaaaaagcccaaagtagaaaaa

SEQ ID NO: 626486 - DNA, 33 bp, Homo sapien
atccaactaagcaaaaggcccaaagtagaaaaa

SEQ ID NO: 626487 - DNA, 33 bp, Homo sapien
ttagaaccatattacaaaatagttcagggagaa

SEQ ID NO: 626488 - DNA, 33 bp, Homo sapien
ttagaaccatattacagaatagttcagggagaa

SEQ ID NO: 626489 - DNA, 33 bp, Homo sapien
cttccttctttttcccaatgaacccatgaaaca

SEQ ID NO: 626490 - DNA, 33 bp, Homo sapien
cttccttctttttccccatgaacccatgaaaca

SEQ ID NO: 626491 - DNA, 33 bp, Homo sapien
tcatcatctctacccccattagctccctttcct

SEQ ID NO: 626492 - DNA, 33 bp, Homo sapien
tcatcatctctacccctattagctccctttcct

SEQ ID NO: 626493 - DNA, 33 bp, Homo sapien
ccagctgggccccagcaacatgacactgtctct

SEQ ID NO: 626494 - DNA, 33 bp, Homo sapien
ccagctgggccccagcgacatgacactgtctct

SEQ ID NO: 626495 - DNA, 33 bp, Homo sapien
ctctttggtgactatgaagctttagtcagtctt

SEQ ID NO: 626496 - DNA, 33 bp, Homo sapien
ctctttggtgactatggagctttagtcagtctt

SEQ ID NO: 626497 - DNA, 33 bp, Homo sapien
tcagccagcgcaagacaaagtgcagcctgtgct

SEQ ID NO: 626498 - DNA, 33 bp, Homo sapien
tcagccagcgcaagacgaagtgcagcctgtgct

SEQ ID NO: 626499 - DNA, 33 bp, Homo sapien
gaatcaaaatcacctggaggatttgttagaaca

SEQ ID NO: 626500 - DNA, 33 bp, Homo sapien
gaatcaaaatcacctgtaggatttgttagaaca

SEQ ID NO: 626501 - DNA, 33 bp, Homo sapien
ctcatctatccaacaactgacgtaagattctaa

SEQ ID NO: 626502 - DNA, 33 bp, Homo sapien
ctcatctatccaacaattgacgtaagattctaa

SEQ ID NO: 626503 - DNA, 33 bp, Homo sapien
tcaaaaatatctttaactgaaagtttggatgga

SEQ ID NO: 626504 - DNA, 33 bp, Homo sapien
tcaaaaatatctttaattgaaagtttggatgga

SEQ ID NO: 626505 - DNA, 33 bp, Homo sapien
caactctacccaatcacatcaggtctcctagat

SEQ ID NO: 626506 - DNA, 33 bp, Homo sapien
caactctacccaatcatatcaggtctcctagat

SEQ ID NO: 626507 - DNA, 33 bp, Homo sapien
cataatcctcacaaaaatctagacaggcagtta

SEQ ID NO: 626508 - DNA, 33 bp, Homo sapien
cataatcctcacaaaattctagacaggcagtta

SEQ ID NO: 626509 - DNA, 33 bp, Homo sapien
gaaatgctaagagaaaccgttccatttttccaa

SEQ ID NO: 626510 - DNA, 33 bp, Homo sapien
gaaatgctaagagaaatcgttccatttttccaa

SEQ ID NO: 626511 - DNA, 33 bp, Homo sapien
taaaaactcaaatacaaactgcagtcaattagt

SEQ ID NO: 626512 - DNA, 33 bp, Homo sapien
taaaaactcaaatacacactgcagtcaattagt

SEQ ID NO: 626513 - DNA, 33 bp, Homo sapien
ggtgccaggatggtaacgtactgctccatgcag

SEQ ID NO: 626514 - DNA, 33 bp, Homo sapien
ggtgccaggatggtaatgtactgctccatgcag

SEQ ID NO: 626515 - DNA, 33 bp, Homo sapien
ctaattttttctgcaacagcaatgaaaggcaaa

SEQ ID NO: 626516 - DNA, 33 bp, Homo sapien
ctaattttttctgcaagagcaatgaaaggcaaa

SEQ ID NO: 626517 - DNA, 33 bp, Homo sapien
ccaaaagaaatataaacttccaaaggctgttta

SEQ ID NO: 626518 - DNA, 33 bp, Homo sapien
ccaaaagaaatataaagttccaaaggctgttta

SEQ ID NO: 626519 - DNA, 33 bp, Homo sapien
aactgccaaccaagagcagtttgtctggcaaag

SEQ ID NO: 626520 - DNA, 33 bp, Homo sapien
aactgccaaccaagagtagtttgtctggcaaag

SEQ ID NO: 626521 - DNA, 33 bp, Homo sapien
ttgtgggattttaatccaattgatggaaagaaa

SEQ ID NO: 626522 - DNA, 33 bp, Homo sapien
ttgtgggattttaatctaattgatggaaagaaa

SEQ ID NO: 626523 - DNA, 33 bp, Homo sapien
taattcatgtataacacctagtatgagcctggc

SEQ ID NO: 626524 - DNA, 33 bp, Homo sapien
taattcatgtataacatctagtatgagcctggc

SEQ ID NO: 626525 - DNA, 33 bp, Homo sapien
ctattcatgaccacagaatttagttcacttgag

SEQ ID NO: 626526 - DNA, 33 bp, Homo sapien
ctattcatgaccacaggatttagttcacttgag

SEQ ID NO: 626527 - DNA, 33 bp, Homo sapien
tacaagaaagttcttaggcatctgacaactggt

SEQ ID NO: 626528 - DNA, 33 bp, Homo sapien
tacaagaaagttcttatgcatctgacaactggt

SEQ ID NO: 626529 - DNA, 33 bp, Homo sapien
agtttaaagaccactggacacaataattaattt

SEQ ID NO: 626530 - DNA, 33 bp, Homo sapien
agtttaaagaccactgtacacaataattaattt

SEQ ID NO: 626531 - DNA, 33 bp, Homo sapien
agaaatcagagccacaagaaacaatttggtctg

SEQ ID NO: 626532 - DNA, 33 bp, Homo sapien
agaaatcagagccacaggaaacaatttggtctg

SEQ ID NO: 626533 - DNA, 33 bp, Homo sapien
ccatgattggaaaagcagagagaagatagcatc

SEQ ID NO: 626534 - DNA, 33 bp, Homo sapien
ccatgattggaaaagcggagagaagatagcatc

SEQ ID NO: 626535 - DNA, 33 bp, Homo sapien
atgtcacactgtaaaaggtcatttggaatggga

SEQ ID NO: 626536 - DNA, 33 bp, Homo sapien
atgtcacactgtaaaatgtcatttggaatggga

SEQ ID NO: 626537 - DNA, 33 bp, Homo sapien
ttttagagagggaaccaaatttagtcttcctaa

SEQ ID NO: 626538 - DNA, 33 bp, Homo sapien
ttttagagagggaaccgaatttagtcttcctaa

SEQ ID NO: 626539 - DNA, 33 bp, Homo sapien
tctgtgaaacatgaataactctggttggtgtgt

SEQ ID NO: 626540 - DNA, 33 bp, Homo sapien
tctgtgaaacatgaatcactctggttggtgtgt

SEQ ID NO: 626541 - DNA, 33 bp, Homo sapien
aatgagaattacaaaaagctactcaaagtcatc

SEQ ID NO: 626542 - DNA, 33 bp, Homo sapien
aatgagaattacaaaacgctactcaaagtcatc

SEQ ID NO: 626543 - DNA, 33 bp, Homo sapien
acatccaaagaatgtaacccaaagttggatttc

SEQ ID NO: 626544 - DNA, 33 bp, Homo sapien
acatccaaagaatgtagcccaaagttggatttc

SEQ ID NO: 626545 - DNA, 33 bp, Homo sapien
attcttcagcaacagactccagtgaaaaataag

SEQ ID NO: 626546 - DNA, 33 bp, Homo sapien
attcttcagcaacagagtccagtgaaaaataag

SEQ ID NO: 626547 - DNA, 33 bp, Homo sapien
tagggtccagagctgggattaaatttggtgggc

SEQ ID NO: 626548 - DNA, 33 bp, Homo sapien
tagggtccagagctggtattaaatttggtgggc

SEQ ID NO: 626549 - DNA, 33 bp, Homo sapien
tgtagtttgaagccagacaatgtggtgcctctg

SEQ ID NO: 626550 - DNA, 33 bp, Homo sapien
tgtagtttgaagccaggcaatgtggtgcctctg

SEQ ID NO: 626551 - DNA, 33 bp, Homo sapien
ttcagcaggattccaaaagaatgagcagaagaa

SEQ ID NO: 626552 - DNA, 33 bp, Homo sapien
ttcagcaggattccaagagaatgagcagaagaa

SEQ ID NO: 626553 - DNA, 33 bp, Homo sapien
tttctcttttcttttacggcaaactcctcaaaa

SEQ ID NO: 626554 - DNA, 33 bp, Homo sapien
tttctcttttcttttatggcaaactcctcaaaa

SEQ ID NO: 626555 - DNA, 33 bp, Homo sapien
caaaagaacaattagaatcacctattatatttc

SEQ ID NO: 626556 - DNA, 33 bp, Homo sapien
caaaagaacaattagactcacctattatatttc

SEQ ID NO: 626557 - DNA, 33 bp, Homo sapien
aataatcacccagtcagcaagctgaaattatct

SEQ ID NO: 626558 - DNA, 33 bp, Homo sapien
aataatcacccagtcatcaagctgaaattatct

SEQ ID NO: 626559 - DNA, 33 bp, Homo sapien
ttaaatgtgccagatgccatcctaggcagtggg

SEQ ID NO: 626560 - DNA, 33 bp, Homo sapien
ttaaatgtgccagatgtcatcctaggcagtggg

SEQ ID NO: 626561 - DNA, 33 bp, Homo sapien
cttggggcattcaatacggttcttaggctctag

SEQ ID NO: 626562 - DNA, 33 bp, Homo sapien
cttggggcattcaatagggttcttaggctctag

SEQ ID NO: 626563 - DNA, 33 bp, Homo sapien
tcttaggctctagaagcaaacaaatatcaacta

SEQ ID NO: 626564 - DNA, 33 bp, Homo sapien
tcttaggctctagaaggaaacaaatatcaacta

SEQ ID NO: 626565 - DNA, 33 bp, Homo sapien
agagaagtaatcctacacaccttacttcacgtg

SEQ ID NO: 626566 - DNA, 33 bp, Homo sapien
agagaagtaatcctacgcaccttacttcacgtg

SEQ ID NO: 626567 - DNA, 33 bp, Homo sapien
acatagtatgtgtgtaacaaaaagctaaaaagt

SEQ ID NO: 626568 - DNA, 33 bp, Homo sapien
acatagtatgtgtgtagcaaaaagctaaaaagt

SEQ ID NO: 626569 - DNA, 33 bp, Homo sapien
acaatggcagttattcaacaaaattagttaaga

SEQ ID NO: 626570 - DNA, 33 bp, Homo sapien
acaatggcagttattccacaaaattagttaaga

SEQ ID NO: 626571 - DNA, 33 bp, Homo sapien
atatataaaatatgcaactagactcagtgatgt

SEQ ID NO: 626572 - DNA, 33 bp, Homo sapien
atatataaaatatgcacctagactcagtgatgt

SEQ ID NO: 626573 - DNA, 33 bp, Homo sapien
tttgtgaaccaggccacgtcttaaaaatgagat

SEQ ID NO: 626574 - DNA, 33 bp, Homo sapien
tttgtgaaccaggccaggtcttaaaaatgagat

SEQ ID NO: 626575 - DNA, 33 bp, Homo sapien
caactagcctattaaaactgaaatcaataaaca

SEQ ID NO: 626576 - DNA, 33 bp, Homo sapien
caactagcctattaaatctgaaatcaataaaca

SEQ ID NO: 626577 - DNA, 33 bp, Homo sapien
tttgccccctcaacatgatcctggaggcactgt

SEQ ID NO: 626578 - DNA, 33 bp, Homo sapien
tttgccccctcaacattatcctggaggcactgt

SEQ ID NO: 626579 - DNA, 33 bp, Homo sapien
gattaacatgcagattcgttttcacccttgagt

SEQ ID NO: 626580 - DNA, 33 bp, Homo sapien
gattaacatgcagatttgttttcacccttgagt

SEQ ID NO: 626581 - DNA, 33 bp, Homo sapien
tgacttcatgtctgtcacttcctctctttcctt

SEQ ID NO: 626582 - DNA, 33 bp, Homo sapien
tgacttcatgtctgtctcttcctctctttcctt

SEQ ID NO: 626583 - DNA, 33 bp, Homo sapien
gattagtgactacaaagataaggaggtaaaaac

SEQ ID NO: 626584 - DNA, 33 bp, Homo sapien
gattagtgactacaaatataaggaggtaaaaac

SEQ ID NO: 626585 - DNA, 33 bp, Homo sapien
ctgtgtcttgccaggacgaattattcacttata

SEQ ID NO: 626586 - DNA, 33 bp, Homo sapien
ctgtgtcttgccaggatgaattattcacttata

SEQ ID NO: 626587 - DNA, 33 bp, Homo sapien
ctttttttctcttacacatttagtgtctggtat

SEQ ID NO: 626588 - DNA, 33 bp, Homo sapien
ctttttttctcttacatatttagtgtctggtat

SEQ ID NO: 626589 - DNA, 33 bp, Homo sapien
ccatacctactaggacaaaaagcctaagtcaca

SEQ ID NO: 626590 - DNA, 33 bp, Homo sapien
ccatacctactaggacgaaaagcctaagtcaca

SEQ ID NO: 626591 - DNA, 33 bp, Homo sapien
tccaattgcttcatggaaaatggagatttgtgt

SEQ ID NO: 626592 - DNA, 33 bp, Homo sapien
tccaattgcttcatgggaaatggagatttgtgt

SEQ ID NO: 626593 - DNA, 33 bp, Homo sapien
gttagtccactataaactgtaagtctgtatctt

SEQ ID NO: 626594 - DNA, 33 bp, Homo sapien
gttagtccactataaagtgtaagtctgtatctt

SEQ ID NO: 626595 - DNA, 33 bp, Homo sapien
aaagagtgaacactggccattatccttaaaggt

SEQ ID NO: 626596 - DNA, 33 bp, Homo sapien
aaagagtgaacactgggcattatccttaaaggt

SEQ ID NO: 626597 - DNA, 33 bp, Homo sapien
gcaccaaattaataaaagatagaagttctatgc

SEQ ID NO: 626598 - DNA, 33 bp, Homo sapien
gcaccaaattaataaatgatagaagttctatgc

SEQ ID NO: 626599 - DNA, 33 bp, Homo sapien
ggccatgacttagagcaatatctactgtctgac

SEQ ID NO: 626600 - DNA, 33 bp, Homo sapien
ggccatgacttagagcgatatctactgtctgac

SEQ ID NO: 626601 - DNA, 33 bp, Homo sapien
gatataagtaggctcaaaggtgtaggccatgac

SEQ ID NO: 626602 - DNA, 33 bp, Homo sapien
gatataagtaggctcacaggtgtaggccatgac

SEQ ID NO: 626603 - DNA, 33 bp, Homo sapien
ttgctatttggatactaaatgttttgtacatac

SEQ ID NO: 626604 - DNA, 33 bp, Homo sapien
ttgctatttggatactgaatgttttgtacatac

SEQ ID NO: 626605 - DNA, 33 bp, Homo sapien
ggccataacactttgaggggtggtggcagtgag

SEQ ID NO: 626606 - DNA, 33 bp, Homo sapien
ggccataacactttgatgggtggtggcagtgag

SEQ ID NO: 626607 - DNA, 33 bp, Homo sapien
ttaatgatgtaacctgaacgccagtttattcct

SEQ ID NO: 626608 - DNA, 33 bp, Homo sapien
ttaatgatgtaacctgtacgccagtttattcct

SEQ ID NO: 626609 - DNA, 33 bp, Homo sapien
cccttgcttcccattgccaactgaatttaacat

SEQ ID NO: 626610 - DNA, 33 bp, Homo sapien
cccttgcttcccattgtcaactgaatttaacat

SEQ ID NO: 626611 - DNA, 33 bp, Homo sapien
tggccacatgtaactgaaaattagaagttaaaa

SEQ ID NO: 626612 - DNA, 33 bp, Homo sapien
tggccacatgtaactggaaattagaagttaaaa

SEQ ID NO: 626613 - DNA, 33 bp, Homo sapien
tatagaaactggagataatagcagttcaatgag

SEQ ID NO: 626614 - DNA, 33 bp, Homo sapien
tatagaaactggagattatagcagttcaatgag

SEQ ID NO: 626615 - DNA, 33 bp, Homo sapien
taacacaaagaagagacggcagatggacaaagt

SEQ ID NO: 626616 - DNA, 33 bp, Homo sapien
taacacaaagaagagatggcagatggacaaagt

SEQ ID NO: 626617 - DNA, 33 bp, Homo sapien
agctgtatactaaaaactgttgagatggtaatt

SEQ ID NO: 626618 - DNA, 33 bp, Homo sapien
agctgtatactaaaaattgttgagatggtaatt

SEQ ID NO: 626619 - DNA, 33 bp, Homo sapien
gtgaaggtgggtcaggaccatagatttcttaga

SEQ ID NO: 626620 - DNA, 33 bp, Homo sapien
gtgaaggtgggtcaggtccatagatttcttaga

SEQ ID NO: 626621 - DNA, 33 bp, Homo sapien
aaagggatagggttaactcgtatgtttcaacat

SEQ ID NO: 626622 - DNA, 33 bp, Homo sapien
aaagggatagggttaagtcgtatgtttcaacat

SEQ ID NO: 626623 - DNA, 33 bp, Homo sapien
agaaactgcagcaatacgaagcatactcagcaa

SEQ ID NO: 626624 - DNA, 33 bp, Homo sapien
agaaactgcagcaatatgaagcatactcagcaa

SEQ ID NO: 626625 - DNA, 33 bp, Homo sapien
gaaaaggactgagtacaagcaccctacctagta

SEQ ID NO: 626626 - DNA, 33 bp, Homo sapien
gaaaaggactgagtacgagcaccctacctagta

SEQ ID NO: 626627 - DNA, 33 bp, Homo sapien
agctaagtatcaatacactcaaacaaatgtgtc

SEQ ID NO: 626628 - DNA, 33 bp, Homo sapien
agctaagtatcaatacgctcaaacaaatgtgtc

SEQ ID NO: 626629 - DNA, 33 bp, Homo sapien
aatgttgtcatttccaaaatattatataaataa

SEQ ID NO: 626630 - DNA, 33 bp, Homo sapien
aatgttgtcatttccagaatattatataaataa

SEQ ID NO: 626631 - DNA, 33 bp, Homo sapien
cctaatctcttttccaactctgaaatgttgtca

SEQ ID NO: 626632 - DNA, 33 bp, Homo sapien
cctaatctcttttccatctctgaaatgttgtca

SEQ ID NO: 626633 - DNA, 33 bp, Homo sapien
aataaattaggatagaccataaagcagtaacaa

SEQ ID NO: 626634 - DNA, 33 bp, Homo sapien
aataaattaggatagatcataaagcagtaacaa

SEQ ID NO: 626635 - DNA, 33 bp, Homo sapien
tagctagatacttatacacaagatgggaacaag

SEQ ID NO: 626636 - DNA, 33 bp, Homo sapien
tagctagatacttatatacaagatgggaacaag

SEQ ID NO: 626637 - DNA, 33 bp, Homo sapien
cattaataagatttcacggatagggatgggaag

SEQ ID NO: 626638 - DNA, 33 bp, Homo sapien
cattaataagatttcatggatagggatgggaag

SEQ ID NO: 626639 - DNA, 33 bp, Homo sapien
catcaggtctgccaccaactatctccataccct

SEQ ID NO: 626640 - DNA, 33 bp, Homo sapien
catcaggtctgccaccgactatctccataccct

SEQ ID NO: 626641 - DNA, 33 bp, Homo sapien
taatagatttctaagccatggtgaacatgaatt

SEQ ID NO: 626642 - DNA, 33 bp, Homo sapien
taatagatttctaagctatggtgaacatgaatt

SEQ ID NO: 626643 - DNA, 33 bp, Homo sapien
ctatagcttaaaaacacgaggatagggttatac

SEQ ID NO: 626644 - DNA, 33 bp, Homo sapien
ctatagcttaaaaacatgaggatagggttatac

SEQ ID NO: 626645 - DNA, 33 bp, Homo sapien
tcatcatgtgccaactaaagaacacttggacct

SEQ ID NO: 626646 - DNA, 33 bp, Homo sapien
tcatcatgtgccaactgaagaacacttggacct

SEQ ID NO: 626647 - DNA, 33 bp, Homo sapien
agtattactagagctaaagagagagaccgtaat

SEQ ID NO: 626648 - DNA, 33 bp, Homo sapien
agtattactagagctacagagagagaccgtaat

SEQ ID NO: 626649 - DNA, 33 bp, Homo sapien
gaccaaagagtcacaaaaaaacatctagtaagg

SEQ ID NO: 626650 - DNA, 33 bp, Homo sapien
gaccaaagagtcacaagaaaacatctagtaagg

SEQ ID NO: 626651 - DNA, 33 bp, Homo sapien
atagacagagagataactggccttgtgtttagg

SEQ ID NO: 626652 - DNA, 33 bp, Homo sapien
atagacagagagataattggccttgtgtttagg

SEQ ID NO: 626653 - DNA, 33 bp, Homo sapien
actttatggtagatacaggtgctgaacactcgg

SEQ ID NO: 626654 - DNA, 33 bp, Homo sapien
actttatggtagatacgggtgctgaacactcgg

SEQ ID NO: 626655 - DNA, 33 bp, Homo sapien
gagactctatgagagacgcaaaatttgtaaaga

SEQ ID NO: 626656 - DNA, 33 bp, Homo sapien
gagactctatgagagatgcaaaatttgtaaaga

SEQ ID NO: 626657 - DNA, 33 bp, Homo sapien
aatgccgcacacagtccctttttgctcaagtcc

SEQ ID NO: 626658 - DNA, 33 bp, Homo sapien
aatgccgcacacagtctctttttgctcaagtcc

SEQ ID NO: 626659 - DNA, 33 bp, Homo sapien
ggattccaaattactcactcttggcaaaaacat

SEQ ID NO: 626660 - DNA, 33 bp, Homo sapien
ggattccaaattactcgctcttggcaaaaacat

SEQ ID NO: 626661 - DNA, 33 bp, Homo sapien
gttcagccgaccaccccctatcataactcagat

SEQ ID NO: 626662 - DNA, 33 bp, Homo sapien
gttcagccgaccaccctctatcataactcagat

SEQ ID NO: 626663 - DNA, 33 bp, Homo sapien
aaactggaagggtagaagccataaagaggaatt

SEQ ID NO: 626664 - DNA, 33 bp, Homo sapien
aaactggaagggtagaggccataaagaggaatt

SEQ ID NO: 626665 - DNA, 33 bp, Homo sapien
agtctaccatccttagcaaactcacccaggaac

SEQ ID NO: 626666 - DNA, 33 bp, Homo sapien
agtctaccatccttaggaaactcacccaggaac

SEQ ID NO: 626667 - DNA, 33 bp, Homo sapien
gcaccagtgtctgttccctctttgtgtccgtca

SEQ ID NO: 626668 - DNA, 33 bp, Homo sapien
gcaccagtgtctgttctctctttgtgtccgtca

SEQ ID NO: 626669 - DNA, 33 bp, Homo sapien
gtgatagtctacacaacaaaactccatgacaca

SEQ ID NO: 626670 - DNA, 33 bp, Homo sapien
gtgatagtctacacaagaaaactccatgacaca

SEQ ID NO: 626671 - DNA, 33 bp, Homo sapien
agatccgtgaaaagcacgggcaactgcaaaagc

SEQ ID NO: 626672 - DNA, 33 bp, Homo sapien
agatccgtgaaaagcatgggcaactgcaaaagc

SEQ ID NO: 626673 - DNA, 33 bp, Homo sapien
gtgatggaaatggctaccactaatggagtcatt

SEQ ID NO: 626674 - DNA, 33 bp, Homo sapien
gtgatggaaatggctatcactaatggagtcatt

SEQ ID NO: 626675 - DNA, 33 bp, Homo sapien
agttccatatcttattcaattcctggccattca

SEQ ID NO: 626676 - DNA, 33 bp, Homo sapien
agttccatatcttatttaattcctggccattca

SEQ ID NO: 626677 - DNA, 33 bp, Homo sapien
gaaatggatgagaaagaaatacagaagttttcc

SEQ ID NO: 626678 - DNA, 33 bp, Homo sapien
gaaatggatgagaaaggaatacagaagttttcc

SEQ ID NO: 626679 - DNA, 33 bp, Homo sapien
agcagctgctttaaatgacagagctctgatgga

SEQ ID NO: 626680 - DNA, 33 bp, Homo sapien
agcagctgctttaaattacagagctctgatgga

SEQ ID NO: 626681 - DNA, 33 bp, Homo sapien
cactgtgatagactcaagatgagacatccagaa

SEQ ID NO: 626682 - DNA, 33 bp, Homo sapien
cactgtgatagactcatgatgagacatccagaa

SEQ ID NO: 626683 - DNA, 33 bp, Homo sapien
gatccaactaaactgccgagctttgcacagcaa

SEQ ID NO: 626684 - DNA, 33 bp, Homo sapien
gatccaactaaactgctgagctttgcacagcaa

SEQ ID NO: 626685 - DNA, 33 bp, Homo sapien
aaaggtatttgtgtggccaagtaacctatgagg

SEQ ID NO: 626686 - DNA, 33 bp, Homo sapien
aaaggtatttgtgtggtcaagtaacctatgagg

SEQ ID NO: 626687 - DNA, 33 bp, Homo sapien
tgatatggacaataaaattcaggataagacgtt

SEQ ID NO: 626688 - DNA, 33 bp, Homo sapien
tgatatggacaataaacttcaggataagacgtt

SEQ ID NO: 626689 - DNA, 33 bp, Homo sapien
taacagcatacgtatacatcctcttgcattagt

SEQ ID NO: 626690 - DNA, 33 bp, Homo sapien
taacagcatacgtatagatcctcttgcattagt

SEQ ID NO: 626691 - DNA, 33 bp, Homo sapien
ggcagcttttgtctaacgagtaattgcttctgc

SEQ ID NO: 626692 - DNA, 33 bp, Homo sapien
ggcagcttttgtctaatgagtaattgcttctgc

SEQ ID NO: 626693 - DNA, 33 bp, Homo sapien
ttataaaaactagagacacactgatgttaagaa

SEQ ID NO: 626694 - DNA, 33 bp, Homo sapien
ttataaaaactagagagacactgatgttaagaa

SEQ ID NO: 626695 - DNA, 33 bp, Homo sapien
catcatgcctacagccaagaggaatacctttga

SEQ ID NO: 626696 - DNA, 33 bp, Homo sapien
catcatgcctacagccgagaggaatacctttga

SEQ ID NO: 626697 - DNA, 33 bp, Homo sapien
ctcacttaggttgacacggacatcatcttcagt

SEQ ID NO: 626698 - DNA, 33 bp, Homo sapien
ctcacttaggttgacatggacatcatcttcagt

SEQ ID NO: 626699 - DNA, 33 bp, Homo sapien
agcccagcctgagacccagtgaaaattagaaag

SEQ ID NO: 626700 - DNA, 33 bp, Homo sapien
agcccagcctgagacctagtgaaaattagaaag

SEQ ID NO: 626701 - DNA, 33 bp, Homo sapien
cagaaatacatagtgccgattgtccctgcacta

SEQ ID NO: 626702 - DNA, 33 bp, Homo sapien
cagaaatacatagtgctgattgtccctgcacta

SEQ ID NO: 626703 - DNA, 33 bp, Homo sapien
gtgtcaggtacagtgccctaccttttaactagc

SEQ ID NO: 626704 - DNA, 33 bp, Homo sapien
gtgtcaggtacagtgctctaccttttaactagc

SEQ ID NO: 626705 - DNA, 33 bp, Homo sapien
ctgtagcaggttccagaatggtcagatcctcca

SEQ ID NO: 626706 - DNA, 33 bp, Homo sapien
ctgtagcaggttccaggatggtcagatcctcca

SEQ ID NO: 626707 - DNA, 33 bp, Homo sapien
gggctattgtttcaaacagggctcatattttta

SEQ ID NO: 626708 - DNA, 33 bp, Homo sapien
gggctattgtttcaaatagggctcatattttta

SEQ ID NO: 626709 - DNA, 33 bp, Homo sapien
gatgtacgcatgtaggcaagtctagcagattta

SEQ ID NO: 626710 - DNA, 33 bp, Homo sapien
gatgtacgcatgtaggtaagtctagcagattta

SEQ ID NO: 626711 - DNA, 33 bp, Homo sapien
agtgagatctaaagcacgaggccagggttcagg

SEQ ID NO: 626712 - DNA, 33 bp, Homo sapien
agtgagatctaaagcatgaggccagggttcagg

SEQ ID NO: 626713 - DNA, 33 bp, Homo sapien
tgtgctgagacctggacgtctaagtctgctgta

SEQ ID NO: 626714 - DNA, 33 bp, Homo sapien
tgtgctgagacctggatgtctaagtctgctgta

SEQ ID NO: 626715 - DNA, 33 bp, Homo sapien
gaaagatctgtgttcccgatgtaaatttggaag

SEQ ID NO: 626716 - DNA, 33 bp, Homo sapien
gaaagatctgtgttcctgatgtaaatttggaag

SEQ ID NO: 626717 - DNA, 33 bp, Homo sapien
actcagatcagtctaaatatttctcaagtaaac

SEQ ID NO: 626718 - DNA, 33 bp, Homo sapien
actcagatcagtctaagtatttctcaagtaaac

SEQ ID NO: 626719 - DNA, 33 bp, Homo sapien
gcataatgtattaaagccttgaagtatttagtc

SEQ ID NO: 626720 - DNA, 33 bp, Homo sapien
gcataatgtattaaagtcttgaagtatttagtc

SEQ ID NO: 626721 - DNA, 33 bp, Homo sapien
agtatacctgactgtgaatcttgaaaccaccct

SEQ ID NO: 626722 - DNA, 33 bp, Homo sapien
agtatacctgactgtggatcttgaaaccaccct

SEQ ID NO: 626723 - DNA, 33 bp, Homo sapien
tgactgggaataattacgatatgggagtgctgg

SEQ ID NO: 626724 - DNA, 33 bp, Homo sapien
tgactgggaataattatgatatgggagtgctgg

SEQ ID NO: 626725 - DNA, 33 bp, Homo sapien
agttatgagagcatcaaaattgtgagaaagaaa

SEQ ID NO: 626726 - DNA, 33 bp, Homo sapien
agttatgagagcatcagaattgtgagaaagaaa

SEQ ID NO: 626727 - DNA, 33 bp, Homo sapien
actatgacctactataggatcttcattgtcaat

SEQ ID NO: 626728 - DNA, 33 bp, Homo sapien
actatgacctactatatgatcttcattgtcaat

SEQ ID NO: 626729 - DNA, 33 bp, Homo sapien
ttcctggctttttaggccaaataaggctttttg

SEQ ID NO: 626730 - DNA, 33 bp, Homo sapien
ttcctggctttttagggcaaataaggctttttg

SEQ ID NO: 626731 - DNA, 33 bp, Homo sapien
aatgacatatgtcaaaatgaaaacacatacaag

SEQ ID NO: 626732 - DNA, 33 bp, Homo sapien
aatgacatatgtcaaattgaaaacacatacaag

SEQ ID NO: 626733 - DNA, 33 bp, Homo sapien
tttgcccattgtcttacccagaaataatgactc

SEQ ID NO: 626734 - DNA, 33 bp, Homo sapien
tttgcccattgtcttatccagaaataatgactc

SEQ ID NO: 626735 - DNA, 33 bp, Homo sapien
ttctgtcattcatgtagcaaggtgaacactctt

SEQ ID NO: 626736 - DNA, 33 bp, Homo sapien
ttctgtcattcatgtatcaaggtgaacactctt

SEQ ID NO: 626737 - DNA, 33 bp, Homo sapien
ccatgccaggtaaatgaaataatcactttgtcc

SEQ ID NO: 626738 - DNA, 33 bp, Homo sapien
ccatgccaggtaaatggaataatcactttgtcc

SEQ ID NO: 626739 - DNA, 33 bp, Homo sapien
tattttcaaaatttccaaaatgatcaaatagca

SEQ ID NO: 626740 - DNA, 33 bp, Homo sapien
tattttcaaaatttcccaaatgatcaaatagca

SEQ ID NO: 626741 - DNA, 33 bp, Homo sapien
gagatcacagtccacaaagtcaaggaaacatac

SEQ ID NO: 626742 - DNA, 33 bp, Homo sapien
gagatcacagtccacagagtcaaggaaacatac

SEQ ID NO: 626743 - DNA, 33 bp, Homo sapien
gccctgctttcccaaacctaatagtaatactga

SEQ ID NO: 626744 - DNA, 33 bp, Homo sapien
gccctgctttcccaaatctaatagtaatactga

SEQ ID NO: 626745 - DNA, 33 bp, Homo sapien
taagcactgtatataaaagatctattaaacgat

SEQ ID NO: 626746 - DNA, 33 bp, Homo sapien
taagcactgtatataagagatctattaaacgat

SEQ ID NO: 626747 - DNA, 33 bp, Homo sapien
tacttatgccatttggcaagaaaagaaattgca

SEQ ID NO: 626748 - DNA, 33 bp, Homo sapien
tacttatgccatttgggaagaaaagaaattgca

SEQ ID NO: 626749 - DNA, 33 bp, Homo sapien
ctatcctgaaaaagtacgaaacaatatagttct

SEQ ID NO: 626750 - DNA, 33 bp, Homo sapien
ctatcctgaaaaagtatgaaacaatatagttct

SEQ ID NO: 626751 - DNA, 33 bp, Homo sapien
attggcagataagcaaagtaaacctaagctagg

SEQ ID NO: 626752 - DNA, 33 bp, Homo sapien
attggcagataagcaatgtaaacctaagctagg

SEQ ID NO: 626753 - DNA, 33 bp, Homo sapien
ccattagtgtcagacacagaatttcaaatgtgt

SEQ ID NO: 626754 - DNA, 33 bp, Homo sapien
ccattagtgtcagacatagaatttcaaatgtgt

SEQ ID NO: 626755 - DNA, 33 bp, Homo sapien
aaaatgaagctaaaacagagaatatagaatttt

SEQ ID NO: 626756 - DNA, 33 bp, Homo sapien
aaaatgaagctaaaacggagaatatagaatttt

SEQ ID NO: 626757 - DNA, 33 bp, Homo sapien
aaacatcagtgaattcaaagagaagagaatcac

SEQ ID NO: 626758 - DNA, 33 bp, Homo sapien
aaacatcagtgaattcgaagagaagagaatcac

SEQ ID NO: 626759 - DNA, 33 bp, Homo sapien
cagggatttctctaccactggacctaatttaat

SEQ ID NO: 626760 - DNA, 33 bp, Homo sapien
cagggatttctctacctctggacctaatttaat

SEQ ID NO: 626761 - DNA, 33 bp, Homo sapien
ccctggaggtgggtcaaatacccattttacata

SEQ ID NO: 626762 - DNA, 33 bp, Homo sapien
ccctggaggtgggtcacatacccattttacata

SEQ ID NO: 626763 - DNA, 33 bp, Homo sapien
taggcataacagaaaacgatgatgatgttaaca

SEQ ID NO: 626764 - DNA, 33 bp, Homo sapien
taggcataacagaaaatgatgatgatgttaaca

SEQ ID NO: 626765 - DNA, 33 bp, Homo sapien
ttagatgtcttctgtacgaggctcaattcagat

SEQ ID NO: 626766 - DNA, 33 bp, Homo sapien
ttagatgtcttctgtatgaggctcaattcagat

SEQ ID NO: 626767 - DNA, 33 bp, Homo sapien
ttaccaacgataacaccgaaatgctgtagaaac

SEQ ID NO: 626768 - DNA, 33 bp, Homo sapien
ttaccaacgataacactgaaatgctgtagaaac

SEQ ID NO: 626769 - DNA, 33 bp, Homo sapien
atgagtgtggagttgaaaacatcagaagagcag

SEQ ID NO: 626770 - DNA, 33 bp, Homo sapien
atgagtgtggagttgacaacatcagaagagcag

SEQ ID NO: 626771 - DNA, 33 bp, Homo sapien
tggcttacttggtgcactcacctatccagttaa

SEQ ID NO: 626772 - DNA, 33 bp, Homo sapien
tggcttacttggtgcattcacctatccagttaa

SEQ ID NO: 626773 - DNA, 33 bp, Homo sapien
caagattggtatgaaaagcaataacatgataat

SEQ ID NO: 626774 - DNA, 33 bp, Homo sapien
caagattggtatgaaatgcaataacatgataat

SEQ ID NO: 626775 - DNA, 33 bp, Homo sapien
ccagcactagatgctacgaaaaaagtaaagccc

SEQ ID NO: 626776 - DNA, 33 bp, Homo sapien
ccagcactagatgctatgaaaaaagtaaagccc

SEQ ID NO: 626777 - DNA, 33 bp, Homo sapien
aatgcatgggccagaactgtaaccagctccttg

SEQ ID NO: 626778 - DNA, 33 bp, Homo sapien
aatgcatgggccagaattgtaaccagctccttg

SEQ ID NO: 626779 - DNA, 33 bp, Homo sapien
gagttgggctagaaaccatgcaaattaacaccc

SEQ ID NO: 626780 - DNA, 33 bp, Homo sapien
gagttgggctagaaactatgcaaattaacaccc

SEQ ID NO: 626781 - DNA, 33 bp, Homo sapien
aacactaaaatcagaaaatcatctactaccaaa

SEQ ID NO: 626782 - DNA, 33 bp, Homo sapien
aacactaaaatcagaagatcatctactaccaaa

SEQ ID NO: 626783 - DNA, 33 bp, Homo sapien
cagctagtagtacctgaagcaacctcatctggc

SEQ ID NO: 626784 - DNA, 33 bp, Homo sapien
cagctagtagtacctggagcaacctcatctggc

SEQ ID NO: 626785 - DNA, 33 bp, Homo sapien
gtaggagtttggtttacgcacacactctgaaat

SEQ ID NO: 626786 - DNA, 33 bp, Homo sapien
gtaggagtttggtttatgcacacactctgaaat

SEQ ID NO: 626787 - DNA, 33 bp, Homo sapien
aaataagtcattatacaaaacagacacctgcac

SEQ ID NO: 626788 - DNA, 33 bp, Homo sapien
aaataagtcattatacgaaacagacacctgcac

SEQ ID NO: 626789 - DNA, 33 bp, Homo sapien
tgccaaagtaatgacaatcaggagaaaaatgag

SEQ ID NO: 626790 - DNA, 33 bp, Homo sapien
tgccaaagtaatgacagtcaggagaaaaatgag

SEQ ID NO: 626791 - DNA, 33 bp, Homo sapien
acaagtctaaaatccaatagaaagccattaaac

SEQ ID NO: 626792 - DNA, 33 bp, Homo sapien
acaagtctaaaatccagtagaaagccattaaac

SEQ ID NO: 626793 - DNA, 33 bp, Homo sapien; identical to SEQ ID NO: 626791

SEQ ID NO: 626794 - DNA, 33 bp, Homo sapien; identical to SEQ ID NO: 626792

SEQ ID NO: 626795 - DNA, 33 bp, Homo sapien
tctttctgtgagaatgaatacgcttatacacgt

SEQ ID NO: 626796 - DNA, 33 bp, Homo sapien
tctttctgtgagaatggatacgcttatacacgt

SEQ ID NO: 626797 - DNA, 33 bp, Homo sapien
catgttttacattgtaactctctgaagtctccc

SEQ ID NO: 626798 - DNA, 33 bp, Homo sapien
catgttttacattgtagctctctgaagtctccc

SEQ ID NO: 626799 - DNA, 33 bp, Homo sapien
tttgactattgcagagaattccataaattcatc

SEQ ID NO: 626800 - DNA, 33 bp, Homo sapien
tttgactattgcagagtattccataaattcatc

SEQ ID NO: 626801 - DNA, 33 bp, Homo sapien
aaatgcaataaagcaacaaaggaaatgtggcaa

SEQ ID NO: 626802 - DNA, 33 bp, Homo sapien
aaatgcaataaagcaagaaaggaaatgtggcaa

SEQ ID NO: 626803 - DNA, 33 bp, Homo sapien
ggaattctagactgtggaattctagctcatcta

SEQ ID NO: 626804 - DNA, 33 bp, Homo sapien
ggaattctagactgtgtaattctagctcatcta

SEQ ID NO: 626805 - DNA, 33 bp, Homo sapien
atgctaactcagaattgaaaatcttgctctttc

SEQ ID NO: 626806 - DNA, 33 bp, Homo sapien
atgctaactcagaatttaaaatcttgctctttc

SEQ ID NO: 626807 - DNA, 33 bp, Homo sapien
tagaaaagttgaagaacgtagcatttattttag

SEQ ID NO: 626808 - DNA, 33 bp, Homo sapien
tagaaaagttgaagaatgtagcatttattttag

SEQ ID NO: 626809 - DNA, 33 bp, Homo sapien
attgcagaacaattggaagaatggattggtatg

SEQ ID NO: 626810 - DNA, 33 bp, Homo sapien
attgcagaacaattgggagaatggattggtatg

SEQ ID NO: 626811 - DNA, 33 bp, Homo sapien
tcaaaaagattggtaacagtggatgctggggaa

SEQ ID NO: 626812 - DNA, 33 bp, Homo sapien
tcaaaaagattggtaatagtggatgctggggaa

SEQ ID NO: 626813 - DNA, 33 bp, Homo sapien
taatgagtaaatatgacaatgcctgcgatatac

SEQ ID NO: 626814 - DNA, 33 bp, Homo sapien
taatgagtaaatatgataatgcctgcgatatac

SEQ ID NO: 626815 - DNA, 33 bp, Homo sapien
agacataaacaaggaccaagtgaaaaaagcaaa

SEQ ID NO: 626816 - DNA, 33 bp, Homo sapien
agacataaacaaggacgaagtgaaaaaagcaaa

SEQ ID NO: 626817 - DNA, 33 bp, Homo sapien
gatcatttgtgtcttacattaactttgtcagaa

SEQ ID NO: 626818 - DNA, 33 bp, Homo sapien
gatcatttgtgtcttatattaactttgtcagaa

SEQ ID NO: 626819 - DNA, 33 bp, Homo sapien
aatagttttgttcatacgctggttcttgccctg

SEQ ID NO: 626820 - DNA, 33 bp, Homo sapien
aatagttttgttcatatgctggttcttgccctg

SEQ ID NO: 626821 - DNA, 33 bp, Homo sapien
aaatacactggagttcaaaagaccacatgaatc

SEQ ID NO: 626822 - DNA, 33 bp, Homo sapien
aaatacactggagttcgaaagaccacatgaatc

SEQ ID NO: 626823 - DNA, 33 bp, Homo sapien
caacactgctaagagcaaggagctggaaaaagg

SEQ ID NO: 626824 - DNA, 33 bp, Homo sapien
caacactgctaagagcgaggagctggaaaaagg

SEQ ID NO: 626825 - DNA, 33 bp, Homo sapien
gtgtaatcaagacccaatgaaaactccagacac

SEQ ID NO: 626826 - DNA, 33 bp, Homo sapien
gtgtaatcaagacccagtgaaaactccagacac

SEQ ID NO: 626827 - DNA, 33 bp, Homo sapien
aatgcagttttctggaatattcagcaactagaa

SEQ ID NO: 626828 - DNA, 33 bp, Homo sapien
aatgcagttttctggagtattcagcaactagaa

SEQ ID NO: 626829 - DNA, 33 bp, Homo sapien
aagaataacaacaaaaatgtgtgaatggctatt

SEQ ID NO: 626830 - DNA, 33 bp, Homo sapien
aagaataacaacaaaattgtgtgaatggctatt

SEQ ID NO: 626831 - DNA, 33 bp, Homo sapien
gagaagtgttaaataacgtcttgtgtagtaata

SEQ ID NO: 626832 - DNA, 33 bp, Homo sapien
gagaagtgttaaataatgtcttgtgtagtaata

SEQ ID NO: 626833 - DNA, 33 bp, Homo sapien
ttttctgtgaatgaacacaaaacccaatttcag

SEQ ID NO: 626834 - DNA, 33 bp, Homo sapien
ttttctgtgaatgaacgcaaaacccaatttcag

SEQ ID NO: 626835 - DNA, 33 bp, Homo sapien
ttgacatttatcatgcacatagtttgaaaatac

SEQ ID NO: 626836 - DNA, 33 bp, Homo sapien
ttgacatttatcatgcgcatagtttgaaaatac

SEQ ID NO: 626837 - DNA, 33 bp, Homo sapien
tcatggaagcattaaactatacctcaaagaaca

SEQ ID NO: 626838 - DNA, 33 bp, Homo sapien
tcatggaagcattaaagtatacctcaaagaaca

SEQ ID NO: 626839 - DNA, 33 bp, Homo sapien
tattccacatgaaaccgactcaactctaaacac

SEQ ID NO: 626840 - DNA, 33 bp, Homo sapien
tattccacatgaaacctactcaactctaaacac

SEQ ID NO: 626841 - DNA, 33 bp, Homo sapien
gaaactaatgaaaaagccaaattttgtccccta

SEQ ID NO: 626842 - DNA, 33 bp, Homo sapien
gaaactaatgaaaaagtcaaattttgtccccta

SEQ ID NO: 626843 - DNA, 33 bp, Homo sapien
ggaaagcctgctgagaataggggacaaaatttg

SEQ ID NO: 626844 - DNA, 33 bp, Homo sapien
ggaaagcctgctgagagtaggggacaaaatttg

SEQ ID NO: 626845 - DNA, 33 bp, Homo sapien
atgtagatgtaacctacctgaaaaactaaatat

SEQ ID NO: 626846 - DNA, 33 bp, Homo sapien
atgtagatgtaacctatctgaaaaactaaatat

SEQ ID NO: 626847 - DNA, 33 bp, Homo sapien
gttcaatgtagtgaaacggaaacccctcagaag

SEQ ID NO: 626848 - DNA, 33 bp, Homo sapien
gttcaatgtagtgaaatggaaacccctcagaag

SEQ ID NO: 626849 - DNA, 33 bp, Homo sapien
ataataaagtttaatacgctagctgaaaaatca

SEQ ID NO: 626850 - DNA, 33 bp, Homo sapien
ataataaagtttaataggctagctgaaaaatca

SEQ ID NO: 626851 - DNA, 33 bp, Homo sapien
actctgttgtcaatcaataaacatttctcttcc

SEQ ID NO: 626852 - DNA, 33 bp, Homo sapien
actctgttgtcaatcagtaaacatttctcttcc

SEQ ID NO: 626853 - DNA, 33 bp, Homo sapien
aggagtgatgttattacaagatgaaaatatgta

SEQ ID NO: 626854 - DNA, 33 bp, Homo sapien
aggagtgatgttattagaagatgaaaatatgta

SEQ ID NO: 626855 - DNA, 33 bp, Homo sapien
caggagaaaattctcaatcatttccaaaagaga

SEQ ID NO: 626856 - DNA, 33 bp, Homo sapien
caggagaaaattctcagtcatttccaaaagaga

SEQ ID NO: 626857 - DNA, 33 bp, Homo sapien
gcttgacctctgctaactcttttaggatagcaa

SEQ ID NO: 626858 - DNA, 33 bp, Homo sapien
gcttgacctctgctaattcttttaggatagcaa

SEQ ID NO: 626859 - DNA, 33 bp, Homo sapien
cagatcatgcaataacagggagacagtttcaaa

SEQ ID NO: 626860 - DNA, 33 bp, Homo sapien
cagatcatgcaataaccgggagacagtttcaaa

SEQ ID NO: 626861 - DNA, 33 bp, Homo sapien
gaaggtgcaggtttaccatatggaaatacgtgt

SEQ ID NO: 626862 - DNA, 33 bp, Homo sapien
gaaggtgcaggtttactatatggaaatacgtgt

SEQ ID NO: 626863 - DNA, 33 bp, Homo sapien
tttacctgtgcacatcacaaggaaaccagggac

SEQ ID NO: 626864 - DNA, 33 bp, Homo sapien
tttacctgtgcacatctcaaggaaaccagggac

SEQ ID NO: 626865 - DNA, 33 bp, Homo sapien
agtttgtgttctctacaatctttaaatcaaact

SEQ ID NO: 626866 - DNA, 33 bp, Homo sapien
agtttgtgttctctacgatctttaaatcaaact

SEQ ID NO: 626867 - DNA, 33 bp, Homo sapien
tgagcgagttaacaaacaggcagctgaccacag

SEQ ID NO: 626868 - DNA, 33 bp, Homo sapien
tgagcgagttaacaaataggcagctgaccacag

SEQ ID NO: 626869 - DNA, 33 bp, Homo sapien
gtgatgaaagtggacaatctttctttgttcgta

SEQ ID NO: 626870 - DNA, 33 bp, Homo sapien
gtgatgaaagtggacattctttctttgttcgta

SEQ ID NO: 626871 - DNA, 33 bp, Homo sapien
tccactgggcaaatatcaatagaatttaaacat

SEQ ID NO: 626872 - DNA, 33 bp, Homo sapien
tccactgggcaaatatgaatagaatttaaacat

SEQ ID NO: 626873 - DNA, 33 bp, Homo sapien
acagaattaaaaagtgcactcaatttgacctaa

SEQ ID NO: 626874 - DNA, 33 bp, Homo sapien
acagaattaaaaagtggactcaatttgacctaa

SEQ ID NO: 626875 - DNA, 33 bp, Homo sapien
ttatctccattgtttaaagtcatcatccagctt

SEQ ID NO: 626876 - DNA, 33 bp, Homo sapien
ttatctccattgtttatagtcatcatccagctt

SEQ ID NO: 626877 - DNA, 33 bp, Homo sapien
tctaccttcagccagagaaagctctgcacttta

SEQ ID NO: 626878 - DNA, 33 bp, Homo sapien
tctaccttcagccagataaagctctgcacttta

SEQ ID NO: 626879 - DNA, 33 bp, Homo sapien
tgaattcctctatccacgtttgcaggtgagtgg

SEQ ID NO: 626880 - DNA, 33 bp, Homo sapien
tgaattcctctatccatgtttgcaggtgagtgg

SEQ ID NO: 626881 - DNA, 33 bp, Homo sapien
atgccatagagggatacctaaattacagttgga

SEQ ID NO: 626882 - DNA, 33 bp, Homo sapien
atgccatagagggatatctaaattacagttgga

SEQ ID NO: 626883 - DNA, 33 bp, Homo sapien
ctgttgtacatacagcacagatgcttaagagct

SEQ ID NO: 626884 - DNA, 33 bp, Homo sapien
ctgttgtacatacagctcagatgcttaagagct

SEQ ID NO: 626885 - DNA, 33 bp, Homo sapien
taagtcaccaaagaacactaacctcatctgaaa

SEQ ID NO: 626886 - DNA, 33 bp, Homo sapien
taagtcaccaaagaactctaacctcatctgaaa

SEQ ID NO: 626887 - DNA, 33 bp, Homo sapien
atggtgatataaagtaacaatcacctgtgaagc

SEQ ID NO: 626888 - DNA, 33 bp, Homo sapien
atggtgatataaagtagcaatcacctgtgaagc

SEQ ID NO: 626889 - DNA, 33 bp, Homo sapien
tacaagcctaccatacacttgacaatgtatcac

SEQ ID NO: 626890 - DNA, 33 bp, Homo sapien
tacaagcctaccatactcttgacaatgtatcac

SEQ ID NO: 626891 - DNA, 33 bp, Homo sapien
actgacagttgcaaaacgaatgccaaaatgaga

SEQ ID NO: 626892 - DNA, 33 bp, Homo sapien
actgacagttgcaaaatgaatgccaaaatgaga

SEQ ID NO: 626893 - DNA, 33 bp, Homo sapien
ccattctaaagacaaacttcctcaaataccaca

SEQ ID NO: 626894 - DNA, 33 bp, Homo sapien
ccattctaaagacaaatttcctcaaataccaca

SEQ ID NO: 626895 - DNA, 33 bp, Homo sapien
tcaaaaccacagcaacaaggtaaattatgatac

SEQ ID NO: 626896 - DNA, 33 bp, Homo sapien
tcaaaaccacagcaacgaggtaaattatgatac

SEQ ID NO: 626897 - DNA, 33 bp, Homo sapien
aggactggttgggtcacgagtcataagtctggc

SEQ ID NO: 626898 - DNA, 33 bp, Homo sapien
aggactggttgggtcatgagtcataagtctggc

SEQ ID NO: 626899 - DNA, 33 bp, Homo sapien
tattgtctttgctagacgatttaaggacaaaaa

SEQ ID NO: 626900 - DNA, 33 bp, Homo sapien
tattgtctttgctagatgatttaaggacaaaaa

SEQ ID NO: 626901 - DNA, 33 bp, Homo sapien
ccttacagacaccctgaagtataggtatgctca

SEQ ID NO: 626902 - DNA, 33 bp, Homo sapien
ccttacagacaccctgcagtataggtatgctca

SEQ ID NO: 626903 - DNA, 33 bp, Homo sapien
ggcagagtatataccactgagatacaatagatg

SEQ ID NO: 626904 - DNA, 33 bp, Homo sapien
ggcagagtatataccattgagatacaatagatg

SEQ ID NO: 626905 - DNA, 33 bp, Homo sapien
gctgctgattttgggacgttcagaaaagaggag

SEQ ID NO: 626906 - DNA, 33 bp, Homo sapien
gctgctgattttgggatgttcagaaaagaggag

SEQ ID NO: 626907 - DNA, 33 bp, Homo sapien
gattcaatgaacaattcaaagtctagcacagaa

SEQ ID NO: 626908 - DNA, 33 bp, Homo sapien
gattcaatgaacaattgaaagtctagcacagaa

SEQ ID NO: 626909 - DNA, 33 bp, Homo sapien
tgttaatctactaagcagcaataaatgtaaact

SEQ ID NO: 626910 - DNA, 33 bp, Homo sapien
tgttaatctactaagcggcaataaatgtaaact

SEQ ID NO: 626911 - DNA, 33 bp, Homo sapien
tggtggaatcacaaaaattgactcatgattttt

SEQ ID NO: 626912 - DNA, 33 bp, Homo sapien
tggtggaatcacaaaagttgactcatgattttt

SEQ ID NO: 626913 - DNA, 33 bp, Homo sapien
gatagataatgatgaagagaatgccttttaatc

SEQ ID NO: 626914 - DNA, 33 bp, Homo sapien
gatagataatgatgaatagaatgccttttaatc

SEQ ID NO: 626915 - DNA, 33 bp, Homo sapien
tcttgcaaaatggaaagtatctgctcctgtttt

SEQ ID NO: 626916 - DNA, 33 bp, Homo sapien
tcttgcaaaatggaaattatctgctcctgtttt

SEQ ID NO: 626917 - DNA, 33 bp, Homo sapien
gcaaacaaaaatctgcaaacaatgaaactaaat

SEQ ID NO: 626918 - DNA, 33 bp, Homo sapien
gcaaacaaaaatctgcgaacaatgaaactaaat

SEQ ID NO: 626919 - DNA, 33 bp, Homo sapien
cacaaagcaggagcaaagtttaagaggtgaaat

SEQ ID NO: 626920 - DNA, 33 bp, Homo sapien
cacaaagcaggagcaaggtttaagaggtgaaat

SEQ ID NO: 626921 - DNA, 33 bp, Homo sapien
tccaagatgccatttccacaagtaccgtcatcc

SEQ ID NO: 626922 - DNA, 33 bp, Homo sapien
tccaagatgccatttctacaagtaccgtcatcc

SEQ ID NO: 626923 - DNA, 33 bp, Homo sapien
tattctgactccaaacacaaacatcagagccac

SEQ ID NO: 626924 - DNA, 33 bp, Homo sapien
tattctgactccaaactcaaacatcagagccac

SEQ ID NO: 626925 - DNA, 33 bp, Homo sapien
tacatcacagttgtaacatacttttctcttgtt

SEQ ID NO: 626926 - DNA, 33 bp, Homo sapien
tacatcacagttgtaatatacttttctcttgtt

SEQ ID NO: 626927 - DNA, 33 bp, Homo sapien
ttttatttctgattccccttgatattttgagag

SEQ ID NO: 626928 - DNA, 33 bp, Homo sapien
ttttatttctgattcctcttgatattttgagag

SEQ ID NO: 626929 - DNA, 33 bp, Homo sapien
tcaagacacatagagacgaaaaatatgcaactg

SEQ ID NO: 626930 - DNA, 33 bp, Homo sapien
tcaagacacatagagatgaaaaatatgcaactg

SEQ ID NO: 626931 - DNA, 33 bp, Homo sapien
agctgtacatcagaaggactgtttttgtatgtt

SEQ ID NO: 626932 - DNA, 33 bp, Homo sapien
agctgtacatcagaagtactgtttttgtatgtt

SEQ ID NO: 626933 - DNA, 33 bp, Homo sapien
aatacaagtactaacccatctaagtagcctata

SEQ ID NO: 626934 - DNA, 33 bp, Homo sapien
aatacaagtactaacctatctaagtagcctata

SEQ ID NO: 626935 - DNA, 33 bp, Homo sapien
tattggcataaagactaaaggcatacagttatt

SEQ ID NO: 626936 - DNA, 33 bp, Homo sapien
tattggcataaagactgaaggcatacagttatt

SEQ ID NO: 626937 - DNA, 33 bp, Homo sapien
gagaactggactatgcaaaacccaactatatca

SEQ ID NO: 626938 - DNA, 33 bp, Homo sapien
gagaactggactatgcgaaacccaactatatca

SEQ ID NO: 626939 - DNA, 33 bp, Homo sapien
tttatttagtcacttacgttcactcatttaaaa

SEQ ID NO: 626940 - DNA, 33 bp, Homo sapien
tttatttagtcacttatgttcactcatttaaaa

SEQ ID NO: 626941 - DNA, 33 bp, Homo sapien
agatcctttagtgagcaaagaaaagcctagttg

SEQ ID NO: 626942 - DNA, 33 bp, Homo sapien
agatcctttagtgagcgaagaaaagcctagttg

SEQ ID NO: 626943 - DNA, 33 bp, Homo sapien
gatcacttacatgaacaaaagttggcctccagt

SEQ ID NO: 626944 - DNA, 33 bp, Homo sapien
gatcacttacatgaaccaaagttggcctccagt

SEQ ID NO: 626945 - DNA, 33 bp, Homo sapien
ttgtgtaactgcacaaaatccttgtgaggcttt

SEQ ID NO: 626946 - DNA, 33 bp, Homo sapien
ttgtgtaactgcacaatatccttgtgaggcttt

SEQ ID NO: 626947 - DNA, 33 bp, Homo sapien
tttggtttgtttctcccctaatggtcactttat

SEQ ID NO: 626948 - DNA, 33 bp, Homo sapien
tttggtttgtttctcctctaatggtcactttat

SEQ ID NO: 626949 - DNA, 33 bp, Homo sapien
ttcttccttctgttcacaggagagtttgttagc

SEQ ID NO: 626950 - DNA, 33 bp, Homo sapien
ttcttccttctgttcataggagagtttgttagc

SEQ ID NO: 626951 - DNA, 33 bp, Homo sapien
ccagttttaaggaacccggcattacctgcaaat

SEQ ID NO: 626952 - DNA, 33 bp, Homo sapien
ccagttttaaggaaccgggcattacctgcaaat

SEQ ID NO: 626953 - DNA, 33 bp, Homo sapien
cagtaaaaggatcagtaaatgtcaagggttggg

SEQ ID NO: 626954 - DNA, 33 bp, Homo sapien
cagtaaaaggatcagtgaatgtcaagggttggg

SEQ ID NO: 626955 - DNA, 33 bp, Homo sapien
aattcacacataaaaaaactaaccttaactcaa

SEQ ID NO: 626956 - DNA, 33 bp, Homo sapien
aattcacacataaaaatactaaccttaactcaa

SEQ ID NO: 626957 - DNA, 33 bp, Homo sapien
tttgtttttgtctacacggaacccattcagatt

SEQ ID NO: 626958 - DNA, 33 bp, Homo sapien
tttgtttttgtctacatggaacccattcagatt

SEQ ID NO: 626959 - DNA, 33 bp, Homo sapien
tgcttatagaaaaaaacagccaactgaattgaa

SEQ ID NO: 626960 - DNA, 33 bp, Homo sapien
tgcttatagaaaaaaatagccaactgaattgaa

SEQ ID NO: 626961 - DNA, 33 bp, Homo sapien
cagccagctgaaataactggaagagtgaaacat

SEQ ID NO: 626962 - DNA, 33 bp, Homo sapien
cagccagctgaaataattggaagagtgaaacat

SEQ ID NO: 626963 - DNA, 33 bp, Homo sapien
aacattacattacgtaaggatcttggaatgtga

SEQ ID NO: 626964 - DNA, 33 bp, Homo sapien
aacattacattacgtagggatcttggaatgtga

SEQ ID NO: 626965 - DNA, 33 bp, Homo sapien
ccatttacttgttcaaaagcaattcaatttcct

SEQ ID NO: 626966 - DNA, 33 bp, Homo sapien
ccatttacttgttcaagagcaattcaatttcct

SEQ ID NO: 626967 - DNA, 33 bp, Homo sapien
gagggaggagagctgaaagtgaattttgtggca

SEQ ID NO: 626968 - DNA, 33 bp, Homo sapien
gagggaggagagctgacagtgaattttgtggca

SEQ ID NO: 626969 - DNA, 33 bp, Homo sapien
ttgccaatcagaataccacctactttgaagtag

SEQ ID NO: 626970 - DNA, 33 bp, Homo sapien
ttgccaatcagaatactacctactttgaagtag

SEQ ID NO: 626971 - DNA, 33 bp, Homo sapien
gatgcactaaagtgataaaaacctggctcaaag

SEQ ID NO: 626972 - DNA, 33 bp, Homo sapien
gatgcactaaagtgatcaaaacctggctcaaag

SEQ ID NO: 626973 - DNA, 33 bp, Homo sapien
taatagctgagaaaataagttcctgagataaag

SEQ ID NO: 626974 - DNA, 33 bp, Homo sapien
taatagctgagaaaatcagttcctgagataaag

SEQ ID NO: 626975 - DNA, 33 bp, Homo sapien
ctacttgatgagtgaaactgtaagtaaaagaac

SEQ ID NO: 626976 - DNA, 33 bp, Homo sapien
ctacttgatgagtgaacctgtaagtaaaagaac

SEQ ID NO: 626977 - DNA, 33 bp, Homo sapien
attctgtggtagcttacgagttctattctttta

SEQ ID NO: 626978 - DNA, 33 bp, Homo sapien
attctgtggtagcttatgagttctattctttta

SEQ ID NO: 626979 - DNA, 33 bp, Homo sapien
aggaagagaagggaacgaggtatgcttgctgtc

SEQ ID NO: 626980 - DNA, 33 bp, Homo sapien
aggaagagaagggaactaggtatgcttgctgtc

SEQ ID NO: 626981 - DNA, 33 bp, Homo sapien
actcataatgaagccaatgaaccccaatgagca

SEQ ID NO: 626982 - DNA, 33 bp, Homo sapien
actcataatgaagccagtgaaccccaatgagca

SEQ ID NO: 626983 - DNA, 33 bp, Homo sapien
atgactaaggttctaacatcagttcaatcaatg

SEQ ID NO: 626984 - DNA, 33 bp, Homo sapien
atgactaaggttctaagatcagttcaatcaatg

SEQ ID NO: 626985 - DNA, 33 bp, Homo sapien
tacctcctttatggaaatgctgtgtggtttgga

SEQ ID NO: 626986 - DNA, 33 bp, Homo sapien
tacctcctttatggaattgctgtgtggtttgga

SEQ ID NO: 626987 - DNA, 33 bp, Homo sapien
acatattgctaaaaaacgtcatacttgatgaag

SEQ ID NO: 626988 - DNA, 33 bp, Homo sapien
acatattgctaaaaaatgtcatacttgatgaag

SEQ ID NO: 626989 - DNA, 33 bp, Homo sapien
agcaaaatggacataactgacagaaaaatagac

SEQ ID NO: 626990 - DNA, 33 bp, Homo sapien
agcaaaatggacataattgacagaaaaatagac

SEQ ID NO: 626991 - DNA, 33 bp, Homo sapien
aacagtataaaccaacaggacctgacagacatt

SEQ ID NO: 626992 - DNA, 33 bp, Homo sapien
aacagtataaaccaacgggacctgacagacatt

SEQ ID NO: 626993 - DNA, 33 bp, Homo sapien
ctgcacctggaaggtacgagaacaaaggacaaa

SEQ ID NO: 626994 - DNA, 33 bp, Homo sapien
ctgcacctggaaggtatgagaacaaaggacaaa

SEQ ID NO: 626995 - DNA, 33 bp, Homo sapien
cttaagtttagagggcagaagtccaccaatgaa

SEQ ID NO: 626996 - DNA, 33 bp, Homo sapien
cttaagtttagagggcggaagtccaccaatgaa

SEQ ID NO: 626997 - DNA, 33 bp, Homo sapien
aagtgcagctaataacagattcaaggaggagtc

SEQ ID NO: 626998 - DNA, 33 bp, Homo sapien
aagtgcagctaataacggattcaaggaggagtc

SEQ ID NO: 626999 - DNA, 33 bp, Homo sapien
atgtaatgatgaaggaccctaaaggaaatacaa

SEQ ID NO: 627000 - DNA, 33 bp, Homo sapien
atgtaatgatgaaggatcctaaaggaaatacaa

SEQ ID NO: 627001 - DNA, 33 bp, Homo sapien
aaatcttccagaaacaactcatattttctagca

SEQ ID NO: 627002 - DNA, 33 bp, Homo sapien
aaatcttccagaaacagctcatattttctagca

SEQ ID NO: 627003 - DNA, 33 bp, Homo sapien
cacttctgatactgcaaatctccactcaggaaa

SEQ ID NO: 627004 - DNA, 33 bp, Homo sapien
cacttctgatactgcacatctccactcaggaaa

SEQ ID NO: 627005 - DNA, 33 bp, Homo sapien
tggcatagttctactcactctttaagaccttgc

SEQ ID NO: 627006 - DNA, 33 bp, Homo sapien
tggcatagttctactcgctctttaagaccttgc

SEQ ID NO: 627007 - DNA, 33 bp, Homo sapien
aagtaattactgccaacatagtagattactcgg

SEQ ID NO: 627008 - DNA, 33 bp, Homo sapien
aagtaattactgccaagatagtagattactcgg

SEQ ID NO: 627009 - DNA, 33 bp, Homo sapien
aatgcatagcaatccaagtatcttaaacatttc

SEQ ID NO: 627010 - DNA, 33 bp, Homo sapien
aatgcatagcaatccacgtatcttaaacatttc

SEQ ID NO: 627011 - DNA, 33 bp, Homo sapien
atgcattcatgttttaaatttatcctctccagg

SEQ ID NO: 627012 - DNA, 33 bp, Homo sapien
atgcattcatgttttagatttatcctctccagg

SEQ ID NO: 627013 - DNA, 33 bp, Homo sapien
catttctttgggcaaagcgtgtaaagatattta

SEQ ID NO: 627014 - DNA, 33 bp, Homo sapien
catttctttgggcaaatcgtgtaaagatattta

SEQ ID NO: 627015 - DNA, 33 bp, Homo sapien
tttaagaattgtatcaacttgaagtagtgtgaa

SEQ ID NO: 627016 - DNA, 33 bp, Homo sapien
tttaagaattgtatcatcttgaagtagtgtgaa

SEQ ID NO: 627017 - DNA, 33 bp, Homo sapien
cattcgtgccataaacagcaaccacaagtatag

SEQ ID NO: 627018 - DNA, 33 bp, Homo sapien
cattcgtgccataaacggcaaccacaagtatag

SEQ ID NO: 627019 - DNA, 33 bp, Homo sapien
aaaaaatactacggcacatctaaatccatattt

SEQ ID NO: 627020 - DNA, 33 bp, Homo sapien
aaaaaatactacggcatatctaaatccatattt

SEQ ID NO: 627021 - DNA, 33 bp, Homo sapien
ctgtaaactcagggaaaggcactacattattta

SEQ ID NO: 627022 - DNA, 33 bp, Homo sapien
ctgtaaactcagggaagggcactacattattta

SEQ ID NO: 627023 - DNA, 33 bp, Homo sapien
aaggtatggaatttaccgatattgagcatgaaa

SEQ ID NO: 627024 - DNA, 33 bp, Homo sapien
aaggtatggaatttactgatattgagcatgaaa

SEQ ID NO: 627025 - DNA, 33 bp, Homo sapien
ttgttttctgccaagcaaaccaaacacctggaa

SEQ ID NO: 627026 - DNA, 33 bp, Homo sapien
ttgttttctgccaagcgaaccaaacacctggaa

SEQ ID NO: 627027 - DNA, 33 bp, Homo sapien
gattctaagaaaaataccgaatgagaaaatagg

SEQ ID NO: 627028 - DNA, 33 bp, Homo sapien
gattctaagaaaaatatcgaatgagaaaatagg

SEQ ID NO: 627029 - DNA, 33 bp, Homo sapien
gccacaaaatattctgcacagtaggagatcaat

SEQ ID NO: 627030 - DNA, 33 bp, Homo sapien
gccacaaaatattctggacagtaggagatcaat

SEQ ID NO: 627031 - DNA, 33 bp, Homo sapien
gcttaacaagaccaaaaccttcatgagatccaa

SEQ ID NO: 627032 - DNA, 33 bp, Homo sapien
gcttaacaagaccaaagccttcatgagatccaa

SEQ ID NO: 627033 - DNA, 33 bp, Homo sapien
atgttacatccacagaactagtctgtatacata

SEQ ID NO: 627034 - DNA, 33 bp, Homo sapien
atgttacatccacagagctagtctgtatacata

SEQ ID NO: 627035 - DNA, 33 bp, Homo sapien
taaatgttttaatgaacatccttgtttaagctt

SEQ ID NO: 627036 - DNA, 33 bp, Homo sapien
taaatgttttaatgaatatccttgtttaagctt

SEQ ID NO: 627037 - DNA, 33 bp, Homo sapien
agccatcatgaaaatgccaaaattgccagagaa

SEQ ID NO: 627038 - DNA, 33 bp, Homo sapien
agccatcatgaaaatgtcaaaattgccagagaa

SEQ ID NO: 627039 - DNA, 33 bp, Homo sapien
ggttgagtgtttcttacacactattgaacgatt

SEQ ID NO: 627040 - DNA, 33 bp, Homo sapien
ggttgagtgtttcttatacactattgaacgatt

SEQ ID NO: 627041 - DNA, 33 bp, Homo sapien
gccatcaaaatgggtcaacaaatcttagagaca

SEQ ID NO: 627042 - DNA, 33 bp, Homo sapien
gccatcaaaatgggtcgacaaatcttagagaca

SEQ ID NO: 627043 - DNA, 33 bp, Homo sapien
agagtacttgaaggagaaaaaaagactgggagt

SEQ ID NO: 627044 - DNA, 33 bp, Homo sapien
agagtacttgaaggaggaaaaaagactgggagt

SEQ ID NO: 627045 - DNA, 33 bp, Homo sapien
gatcctgctaatgtaaccacttctgagaggcag

SEQ ID NO: 627046 - DNA, 33 bp, Homo sapien
gatcctgctaatgtaatcacttctgagaggcag

SEQ ID NO: 627047 - DNA, 33 bp, Homo sapien
tttattcctgtaacaagtcatttattcatcatt

SEQ ID NO: 627048 - DNA, 33 bp, Homo sapien
tttattcctgtaacaattcatttattcatcatt

SEQ ID NO: 627049 - DNA, 33 bp, Homo sapien
tctaaaactagctctaccagggagaagggtgta

SEQ ID NO: 627050 - DNA, 33 bp, Homo sapien
tctaaaactagctctatcagggagaagggtgta

SEQ ID NO: 627051 - DNA, 33 bp, Homo sapien
taaaacacaaatgctactaaaaggcaagggact

SEQ ID NO: 627052 - DNA, 33 bp, Homo sapien
taaaacacaaatgctagtaaaaggcaagggact

SEQ ID NO: 627053 - DNA, 33 bp, Homo sapien
ctagaggaggttttcacgtcagaaactgcacaa

SEQ ID NO: 627054 - DNA, 33 bp, Homo sapien
ctagaggaggttttcatgtcagaaactgcacaa

SEQ ID NO: 627055 - DNA, 33 bp, Homo sapien
tctggattggtagaaaacatggaatatagagag

SEQ ID NO: 627056 - DNA, 33 bp, Homo sapien
tctggattggtagaaatcatggaatatagagag

SEQ ID NO: 627057 - DNA, 33 bp, Homo sapien
cagttctttccatctccccttggtgagcataaa

SEQ ID NO: 627058 - DNA, 33 bp, Homo sapien
cagttctttccatctctccttggtgagcataaa

SEQ ID NO: 627059 - DNA, 33 bp, Homo sapien
ctctctctacttaagcaaatccttagtgctttt

SEQ ID NO: 627060 - DNA, 33 bp, Homo sapien
ctctctctacttaagcgaatccttagtgctttt

SEQ ID NO: 627061 - DNA, 33 bp, Homo sapien
ttgtgtgttagtaacaagaaactttgaatgttg

SEQ ID NO: 627062 - DNA, 33 bp, Homo sapien
ttgtgtgttagtaacaggaaactttgaatgttg

SEQ ID NO: 627063 - DNA, 33 bp, Homo sapien
agaaagcagagaatgaaaatgtagataatgtaa

SEQ ID NO: 627064 - DNA, 33 bp, Homo sapien
agaaagcagagaatgagaatgtagataatgtaa

SEQ ID NO: 627065 - DNA, 33 bp, Homo sapien
acctactacttttccacacagagtcaatcaaat

SEQ ID NO: 627066 - DNA, 33 bp, Homo sapien
acctactacttttccatacagagtcaatcaaat

SEQ ID NO: 627067 - DNA, 33 bp, Homo sapien
tcatggcctatttaaaatctgtgggagaagaat

SEQ ID NO: 627068 - DNA, 33 bp, Homo sapien
tcatggcctatttaaagtctgtgggagaagaat

SEQ ID NO: 627069 - DNA, 33 bp, Homo sapien
catagagttgctctcacaaatgactgccatgac

SEQ ID NO: 627070 - DNA, 33 bp, Homo sapien
catagagttgctctcataaatgactgccatgac

SEQ ID NO: 627071 - DNA, 33 bp, Homo sapien
acacttcctgccataccaaagtgaaaataggta

SEQ ID NO: 627072 - DNA, 33 bp, Homo sapien
acacttcctgccatactaaagtgaaaataggta

SEQ ID NO: 627073 - DNA, 33 bp, Homo sapien
tgtttcaattttggtacgcctagtgatttggga

SEQ ID NO: 627074 - DNA, 33 bp, Homo sapien
tgtttcaattttggtatgcctagtgatttggga

SEQ ID NO: 627075 - DNA, 33 bp, Homo sapien
tctcagttgtcacctacatctatgaactaccct

SEQ ID NO: 627076 - DNA, 33 bp, Homo sapien
tctcagttgtcacctagatctatgaactaccct

SEQ ID NO: 627077 - DNA, 33 bp, Homo sapien
ttcactagttggttcagtagttatagtatgatt

SEQ ID NO: 627078 - DNA, 33 bp, Homo sapien
ttcactagttggttcattagttatagtatgatt

SEQ ID NO: 627079 - DNA, 33 bp, Homo sapien
ctactgcacgttggtaacatactctcccaaaga

SEQ ID NO: 627080 - DNA, 33 bp, Homo sapien
ctactgcacgttggtatcatactctcccaaaga

SEQ ID NO: 627081 - DNA, 33 bp, Homo sapien
aggtgatgaaaacttcagaaataatacaattta

SEQ ID NO: 627082 - DNA, 33 bp, Homo sapien
aggtgatgaaaacttcggaaataatacaattta

SEQ ID NO: 627083 - DNA, 33 bp, Homo sapien
aaaaaacatcaggctacaagaatctcatcttgt

SEQ ID NO: 627084 - DNA, 33 bp, Homo sapien
aaaaaacatcaggctataagaatctcatcttgt

SEQ ID NO: 627085 - DNA, 33 bp, Homo sapien
cattgccccatgccaaaatcaagaagtagaatt

SEQ ID NO: 627086 - DNA, 33 bp, Homo sapien
cattgccccatgccaacatcaagaagtagaatt

SEQ ID NO: 627087 - DNA, 33 bp, Homo sapien
tacattagataacctacaactaatcaattgctg

SEQ ID NO: 627088 - DNA, 33 bp, Homo sapien
tacattagataacctagaactaatcaattgctg

SEQ ID NO: 627089 - DNA, 33 bp, Homo sapien
gttgggaagaaagttacgatttaggtgaaaatg

SEQ ID NO: 627090 - DNA, 33 bp, Homo sapien
gttgggaagaaagttatgatttaggtgaaaatg

SEQ ID NO: 627091 - DNA, 33 bp, Homo sapien
tgggactgaggcaagtaaccaagaatgcactat

SEQ ID NO: 627092 - DNA, 33 bp, Homo sapien
tgggactgaggcaagtgaccaagaatgcactat

SEQ ID NO: 627093 - DNA, 33 bp, Homo sapien
tgctatacctacaacacgggatataaaaagcat

SEQ ID NO: 627094 - DNA, 33 bp, Homo sapien
tgctatacctacaacatgggatataaaaagcat

SEQ ID NO: 627095 - DNA, 33 bp, Homo sapien
ggaaacagcctgatctgaacagaagtctccaaa

SEQ ID NO: 627096 - DNA, 33 bp, Homo sapien
ggaaacagcctgatcttaacagaagtctccaaa

SEQ ID NO: 627097 - DNA, 33 bp, Homo sapien
catcttctttctttagacaggttattcagtctt

SEQ ID NO: 627098 - DNA, 33 bp, Homo sapien
catcttctttctttagtcaggttattcagtctt

SEQ ID NO: 627099 - DNA, 33 bp, Homo sapien
gagggtgatgcaacaaacatgaaggtgagggtg

SEQ ID NO: 627100 - DNA, 33 bp, Homo sapien
gagggtgatgcaacaagcatgaaggtgagggtg

SEQ ID NO: 627101 - DNA, 33 bp, Homo sapien
ctctatatttattgaacgggcaggaaaacaatt

SEQ ID NO: 627102 - DNA, 33 bp, Homo sapien
ctctatatttattgaatgggcaggaaaacaatt

SEQ ID NO: 627103 - DNA, 33 bp, Homo sapien
tacatgggatggtaagcccagcaggtgcactat

SEQ ID NO: 627104 - DNA, 33 bp, Homo sapien
tacatgggatggtaagtccagcaggtgcactat

SEQ ID NO: 627105 - DNA, 33 bp, Homo sapien
tttgagtcttcacttacggtattggtgaatctt

SEQ ID NO: 627106 - DNA, 33 bp, Homo sapien
tttgagtcttcacttatggtattggtgaatctt

SEQ ID NO: 627107 - DNA, 33 bp, Homo sapien
ccatgtggcaatgttccatatgccttatcttct

SEQ ID NO: 627108 - DNA, 33 bp, Homo sapien
ccatgtggcaatgttctatatgccttatcttct

SEQ ID NO: 627109 - DNA, 33 bp, Homo sapien
tgctccagaatgtaaccaaaagcatacaacaaa

SEQ ID NO: 627110 - DNA, 33 bp, Homo sapien
tgctccagaatgtaacgaaaagcatacaacaaa

SEQ ID NO: 627111 - DNA, 33 bp, Homo sapien
tttctacacaccatcagggaaagaatgattcaa

SEQ ID NO: 627112 - DNA, 33 bp, Homo sapien
tttctacacaccatcatggaaagaatgattcaa

SEQ ID NO: 627113 - DNA, 33 bp, Homo sapien
aagaaaaaaaaaagctaagagagttcatcacca

SEQ ID NO: 627114 - DNA, 33 bp, Homo sapien
aagaaaaaaaaaagcttagagagttcatcacca

SEQ ID NO: 627115 - DNA, 33 bp, Homo sapien
caggcagagtagatgacggtagaagtgaccatg

SEQ ID NO: 627116 - DNA, 33 bp, Homo sapien
caggcagagtagatgatggtagaagtgaccatg

SEQ ID NO: 627117 - DNA, 33 bp, Homo sapien
aatgtgagtttttcaacagagaactttcaaatg

SEQ ID NO: 627118 - DNA, 33 bp, Homo sapien
aatgtgagtttttcaatagagaactttcaaatg

SEQ ID NO: 627119 - DNA, 33 bp, Homo sapien
tggattgaaagtgaaacgaattttactgagctt

SEQ ID NO: 627120 - DNA, 33 bp, Homo sapien
tggattgaaagtgaaatgaattttactgagctt

SEQ ID NO: 627121 - DNA, 33 bp, Homo sapien
attggtgtgctctccaaagaatttgtagctatt

SEQ ID NO: 627122 - DNA, 33 bp, Homo sapien
attggtgtgctctccagagaatttgtagctatt

SEQ ID NO: 627123 - DNA, 33 bp, Homo sapien
ctaagaaggtagtagacgagattagcgaccagg

SEQ ID NO: 627124 - DNA, 33 bp, Homo sapien
ctaagaaggtagtagatgagattagcgaccagg

SEQ ID NO: 627125 - DNA, 33 bp, Homo sapien
tatggtgggtgaaaaactgacacttctccatca

SEQ ID NO: 627126 - DNA, 33 bp, Homo sapien
tatggtgggtgaaaaattgacacttctccatca

SEQ ID NO: 627127 - DNA, 33 bp, Homo sapien
caaagcaacactcaataaagcttgtgtgcgcta

SEQ ID NO: 627128 - DNA, 33 bp, Homo sapien
caaagcaacactcaatgaagcttgtgtgcgcta

SEQ ID NO: 627129 - DNA, 33 bp, Homo sapien
agtctcttatcagatacgtaatgtgcaaatact

SEQ ID NO: 627130 - DNA, 33 bp, Homo sapien
agtctcttatcagatatgtaatgtgcaaatact

SEQ ID NO: 627131 - DNA, 33 bp, Homo sapien
tggaatgttgtgatacagccttaagatagaaag

SEQ ID NO: 627132 - DNA, 33 bp, Homo sapien
tggaatgttgtgatacggccttaagatagaaag

SEQ ID NO: 627133 - DNA, 33 bp, Homo sapien
atttgttcaacagatacgtattcacttatttaa

SEQ ID NO: 627134 - DNA, 33 bp, Homo sapien
atttgttcaacagatatgtattcacttatttaa

SEQ ID NO: 627135 - DNA, 33 bp, Homo sapien
tgactaaaattatggaagcataaaagctgcagg

SEQ ID NO: 627136 - DNA, 33 bp, Homo sapien
tgactaaaattatggacgcataaaagctgcagg

SEQ ID NO: 627137 - DNA, 33 bp, Homo sapien
agtacttgatgtccaaagtctaattgaatatat

SEQ ID NO: 627138 - DNA, 33 bp, Homo sapien
agtacttgatgtccaacgtctaattgaatatat

SEQ ID NO: 627139 - DNA, 33 bp, Homo sapien
ggcttgttaaccctcacagatctggaccccatt

SEQ ID NO: 627140 - DNA, 33 bp, Homo sapien
ggcttgttaaccctcatagatctggaccccatt

SEQ ID NO: 627141 - DNA, 33 bp, Homo sapien
gcttccaattgtattccaaaattcctgtagtta

SEQ ID NO: 627142 - DNA, 33 bp, Homo sapien
gcttccaattgtattctaaaattcctgtagtta

SEQ ID NO: 627143 - DNA, 33 bp, Homo sapien
ataacaatgatggtgaacatttacagagtattt

SEQ ID NO: 627144 - DNA, 33 bp, Homo sapien
ataacaatgatggtgagcatttacagagtattt

SEQ ID NO: 627145 - DNA, 33 bp, Homo sapien
tagatgtgagaatgcacgtggaagtacacgctg

SEQ ID NO: 627146 - DNA, 33 bp, Homo sapien
tagatgtgagaatgcatgtggaagtacacgctg

SEQ ID NO: 627147 - DNA, 33 bp, Homo sapien
gacttcacactccatacggtcaactgattacca

SEQ ID NO: 627148 - DNA, 33 bp, Homo sapien
gacttcacactccatatggtcaactgattacca

SEQ ID NO: 627149 - DNA, 33 bp, Homo sapien
ccctggcaagaactaaaagagtgagcactcact

SEQ ID NO: 627150 - DNA, 33 bp, Homo sapien
ccctggcaagaactaagagagtgagcactcact

SEQ ID NO: 627151 - DNA, 33 bp, Homo sapien
tcactaggaatgaaacaaagaggatgagctaat

SEQ ID NO: 627152 - DNA, 33 bp, Homo sapien
tcactaggaatgaaacgaagaggatgagctaat

SEQ ID NO: 627153 - DNA, 33 bp, Homo sapien
ctagttaagtaataaacaagggtgagaaagaca

SEQ ID NO: 627154 - DNA, 33 bp, Homo sapien
ctagttaagtaataaataagggtgagaaagaca

SEQ ID NO: 627155 - DNA, 33 bp, Homo sapien
ctcatctcagcttttgaaaacttgagtgaactt

SEQ ID NO: 627156 - DNA, 33 bp, Homo sapien
ctcatctcagcttttgcaaacttgagtgaactt

SEQ ID NO: 627157 - DNA, 33 bp, Homo sapien
gctgcaaagagaagaccgcttcatgggctcaga

SEQ ID NO: 627158 - DNA, 33 bp, Homo sapien
gctgcaaagagaagactgcttcatgggctcaga

SEQ ID NO: 627159 - DNA, 33 bp, Homo sapien
tataaattgtataataaaaaatcctgtggctaa

SEQ ID NO: 627160 - DNA, 33 bp, Homo sapien
tataaattgtataatagaaaatcctgtggctaa

SEQ ID NO: 627161 - DNA, 33 bp, Homo sapien
gttaaaaccagatagaatagtgaaagtgcctcc

SEQ ID NO: 627162 - DNA, 33 bp, Homo sapien
gttaaaaccagatagagtagtgaaagtgcctcc

SEQ ID NO: 627163 - DNA, 33 bp, Homo sapien
aaaagtgccaaagtgaaaattcatttccctcta

SEQ ID NO: 627164 - DNA, 33 bp, Homo sapien
aaaagtgccaaagtgagaattcatttccctcta

SEQ ID NO: 627165 - DNA, 33 bp, Homo sapien
tttttccctcttacacagtaatcagcaacatcc

SEQ ID NO: 627166 - DNA, 33 bp, Homo sapien
tttttccctcttacacggtaatcagcaacatcc

SEQ ID NO: 627167 - DNA, 33 bp, Homo sapien
tacaattttctgcatacggctaaccagttctcc

SEQ ID NO: 627168 - DNA, 33 bp, Homo sapien
tacaattttctgcatatggctaaccagttctcc

SEQ ID NO: 627169 - DNA, 33 bp, Homo sapien
ttttgcggttccagataaactttaggatagatt

SEQ ID NO: 627170 - DNA, 33 bp, Homo sapien
ttttgcggttccagatgaactttaggatagatt

SEQ ID NO: 627171 - DNA, 33 bp, Homo sapien
atttagtgtatattttcaaaaaagctataagac

SEQ ID NO: 627172 - DNA, 33 bp, Homo sapien
atttagtgtatattttgaaaaaagctataagac

SEQ ID NO: 627173 - DNA, 33 bp, Homo sapien
gtaagtaatactcaaaacttccagtataaaaat

SEQ ID NO: 627174 - DNA, 33 bp, Homo sapien
gtaagtaatactcaaagcttccagtataaaaat

SEQ ID NO: 627175 - DNA, 33 bp, Homo sapien
caagtctagtgttgatgaaatctcccaactttg

SEQ ID NO: 627176 - DNA, 33 bp, Homo sapien
caagtctagtgttgattaaatctcccaactttg

SEQ ID NO: 627177 - DNA, 33 bp, Homo sapien
attctttcattggagactagaagtcataggcta

SEQ ID NO: 627178 - DNA, 33 bp, Homo sapien
attctttcattggagattagaagtcataggcta

SEQ ID NO: 627179 - DNA, 33 bp, Homo sapien
actaaccaatggagaacatccggtgtttggttt

SEQ ID NO: 627180 - DNA, 33 bp, Homo sapien
actaaccaatggagaatatccggtgtttggttt

SEQ ID NO: 627181 - DNA, 33 bp, Homo sapien
tttgagataaaattcaacttgttctgaacacat

SEQ ID NO: 627182 - DNA, 33 bp, Homo sapien
tttgagataaaattcagcttgttctgaacacat

SEQ ID NO: 627183 - DNA, 33 bp, Homo sapien
aggtagggattaaaaaatgaagcacagggaatt

SEQ ID NO: 627184 - DNA, 33 bp, Homo sapien
aggtagggattaaaaagtgaagcacagggaatt

SEQ ID NO: 627185 - DNA, 33 bp, Homo sapien
aaggacatgatcttgcgcctatttatggctgtg

SEQ ID NO: 627186 - DNA, 33 bp, Homo sapien
aaggacatgatcttgctcctatttatggctgtg

SEQ ID NO: 627187 - DNA, 33 bp, Homo sapien
aatgccttccttctgaaagattataaactaaga

SEQ ID NO: 627188 - DNA, 33 bp, Homo sapien
aatgccttccttctgagagattataaactaaga

SEQ ID NO: 627189 - DNA, 33 bp, Homo sapien
tatggcacctgctcataaactatgtcagaaaag

SEQ ID NO: 627190 - DNA, 33 bp, Homo sapien
tatggcacctgctcatgaactatgtcagaaaag

SEQ ID NO: 627191 - DNA, 33 bp, Homo sapien
tttgagaggactttgaaatgtccaggaggatct

SEQ ID NO: 627192 - DNA, 33 bp, Homo sapien
tttgagaggactttgagatgtccaggaggatct

SEQ ID NO: 627193 - DNA, 33 bp, Homo sapien
ctcaaactcatgttcaaaaccaattcatatcct

SEQ ID NO: 627194 - DNA, 33 bp, Homo sapien
ctcaaactcatgttcacaaccaattcatatcct

SEQ ID NO: 627195 - DNA, 33 bp, Homo sapien
caggaaaattgtggaaagctttgaaatgggcaa

SEQ ID NO: 627196 - DNA, 33 bp, Homo sapien
caggaaaattgtggaaggctttgaaatgggcaa

SEQ ID NO: 627197 - DNA, 33 bp, Homo sapien
aacctgcagaaagatactaccttgcagacccaa

SEQ ID NO: 627198 - DNA, 33 bp, Homo sapien
aacctgcagaaagatattaccttgcagacccaa

SEQ ID NO: 627199 - DNA, 33 bp, Homo sapien
catgaagtaacacttgacaaaaaggaatgagag

SEQ ID NO: 627200 - DNA, 33 bp, Homo sapien
catgaagtaacacttggcaaaaaggaatgagag

SEQ ID NO: 627201 - DNA, 33 bp, Homo sapien
cctgattcatcctctacaagtagcaaatcttaa

SEQ ID NO: 627202 - DNA, 33 bp, Homo sapien
cctgattcatcctctagaagtagcaaatcttaa

SEQ ID NO: 627203 - DNA, 33 bp, Homo sapien
ctcacgttggtatccaagtttgaaggaacacta

SEQ ID NO: 627204 - DNA, 33 bp, Homo sapien
ctcacgttggtatccacgtttgaaggaacacta

SEQ ID NO: 627205 - DNA, 33 bp, Homo sapien
atcttctttttcctaaaacttctgcctgagtac

SEQ ID NO: 627206 - DNA, 33 bp, Homo sapien
atcttctttttcctaagacttctgcctgagtac

SEQ ID NO: 627207 - DNA, 33 bp, Homo sapien
acagctttattgaggaataattgacacacaata

SEQ ID NO: 627208 - DNA, 33 bp, Homo sapien
acagctttattgaggagtaattgacacacaata

SEQ ID NO: 627209 - DNA, 33 bp, Homo sapien
attggagaaggtgtgacctgagagagctgaaaa

SEQ ID NO: 627210 - DNA, 33 bp, Homo sapien
attggagaaggtgtgatctgagagagctgaaaa

SEQ ID NO: 627211 - DNA, 33 bp, Homo sapien
tctccaattattttcaacctaccagcaaacact

SEQ ID NO: 627212 - DNA, 33 bp, Homo sapien
tctccaattattttcagcctaccagcaaacact

SEQ ID NO: 627213 - DNA, 33 bp, Homo sapien
ttccttgtctgtgtgaactacttccctctactc

SEQ ID NO: 627214 - DNA, 33 bp, Homo sapien
ttccttgtctgtgtgagctacttccctctactc

SEQ ID NO: 627215 - DNA, 33 bp, Homo sapien
attgccatatccatgccatgttgtagagtagag

SEQ ID NO: 627216 - DNA, 33 bp, Homo sapien
attgccatatccatgctatgttgtagagtagag

SEQ ID NO: 627217 - DNA, 33 bp, Homo sapien
tctaatttctgataaaacatcatgctaaacagg

SEQ ID NO: 627218 - DNA, 33 bp, Homo sapien
tctaatttctgataaagcatcatgctaaacagg

SEQ ID NO: 627219 - DNA, 33 bp, Homo sapien
aattagaatgccttgccattgaagtattagtct

SEQ ID NO: 627220 - DNA, 33 bp, Homo sapien
aattagaatgccttgctattgaagtattagtct

SEQ ID NO: 627221 - DNA, 33 bp, Homo sapien
cttactatatgtcaagaattatgctgagtcatt

SEQ ID NO: 627222 - DNA, 33 bp, Homo sapien
cttactatatgtcaaggattatgctgagtcatt

SEQ ID NO: 627223 - DNA, 33 bp, Homo sapien
ataaatgcagaattagaagtttatgtgttctga

SEQ ID NO: 627224 - DNA, 33 bp, Homo sapien
ataaatgcagaattagcagtttatgtgttctga

SEQ ID NO: 627225 - DNA, 33 bp, Homo sapien
cctttgaatttggactaagaaatgtcccagtga

SEQ ID NO: 627226 - DNA, 33 bp, Homo sapien
cctttgaatttggactcagaaatgtcccagtga

SEQ ID NO: 627227 - DNA, 33 bp, Homo sapien
tatattagtcctagccaatgctgagaaagtttg

SEQ ID NO: 627228 - DNA, 33 bp, Homo sapien
tatattagtcctagcctatgctgagaaagtttg

SEQ ID NO: 627229 - DNA, 33 bp, Homo sapien
tgaattaaaatttgaacctgtaaacttcactgg

SEQ ID NO: 627230 - DNA, 33 bp, Homo sapien
tgaattaaaatttgaatctgtaaacttcactgg

SEQ ID NO: 627231 - DNA, 33 bp, Homo sapien
caggcatcttgactcccgaatcgtgtaacctca

SEQ ID NO: 627232 - DNA, 33 bp, Homo sapien
caggcatcttgactcctgaatcgtgtaacctca

SEQ ID NO: 627233 - DNA, 33 bp, Homo sapien
atagaggtgctactgacctttctatgttgattt

SEQ ID NO: 627234 - DNA, 33 bp, Homo sapien
atagaggtgctactgatctttctatgttgattt

SEQ ID NO: 627235 - DNA, 33 bp, Homo sapien
ataatttcctcatttgaaaattgaaagtatcct

SEQ ID NO: 627236 - DNA, 33 bp, Homo sapien
ataatttcctcatttgtaaattgaaagtatcct

SEQ ID NO: 627237 - DNA, 33 bp, Homo sapien
tcatgggaatgtacagaaaaaacctaatatgtg

SEQ ID NO: 627238 - DNA, 33 bp, Homo sapien
tcatgggaatgtacaggaaaaacctaatatgtg

SEQ ID NO: 627239 - DNA, 33 bp, Homo sapien
ggaatatcccagtacaagaaggtgaaagaacac

SEQ ID NO: 627240 - DNA, 33 bp, Homo sapien
ggaatatcccagtacaggaaggtgaaagaacac

SEQ ID NO: 627241 - DNA, 33 bp, Homo sapien
tacctaaaagaaactcacttcacctgtaaacac

SEQ ID NO: 627242 - DNA, 33 bp, Homo sapien
tacctaaaagaaactcgcttcacctgtaaacac

SEQ ID NO: 627243 - DNA, 33 bp, Homo sapien
ttctcctgcagaaatacaatgggccacttctca

SEQ ID NO: 627244 - DNA, 33 bp, Homo sapien
ttctcctgcagaaatataatgggccacttctca

SEQ ID NO: 627245 - DNA, 33 bp, Homo sapien
aaaaatctgctaaaaaatcatcaaacaggtcgt

SEQ ID NO: 627246 - DNA, 33 bp, Homo sapien
aaaaatctgctaaaaagtcatcaaacaggtcgt

SEQ ID NO: 627247 - DNA, 33 bp, Homo sapien
cctggagaagggaagacaagccatcagttgagg

SEQ ID NO: 627248 - DNA, 33 bp, Homo sapien
cctggagaagggaagagaagccatcagttgagg

SEQ ID NO: 627249 - DNA, 33 bp, Homo sapien
ttagtattggtagataacttcactaactgggta

SEQ ID NO: 627250 - DNA, 33 bp, Homo sapien
ttagtattggtagataccttcactaactgggta

SEQ ID NO: 627251 - DNA, 33 bp, Homo sapien
actttggattccctaactacctcaagaatgata

SEQ ID NO: 627252 - DNA, 33 bp, Homo sapien
actttggattccctaagtacctcaagaatgata

SEQ ID NO: 627253 - DNA, 33 bp, Homo sapien
taacctccttgtaaaacctgtttcttctcacct

SEQ ID NO: 627254 - DNA, 33 bp, Homo sapien
taacctccttgtaaaatctgtttcttctcacct

SEQ ID NO: 627255 - DNA, 33 bp, Homo sapien
ctgtattttttgaacaatgtgaagaaaactgaa

SEQ ID NO: 627256 - DNA, 33 bp, Homo sapien
ctgtattttttgaacactgtgaagaaaactgaa

SEQ ID NO: 627257 - DNA, 33 bp, Homo sapien
tgatctgtatagttgcacaaaatctggtgcata

SEQ ID NO: 627258 - DNA, 33 bp, Homo sapien
tgatctgtatagttgcgcaaaatctggtgcata

SEQ ID NO: 627259 - DNA, 33 bp, Homo sapien
aaaagacaaaaaataaccgacgttgacaaggat

SEQ ID NO: 627260 - DNA, 33 bp, Homo sapien
aaaagacaaaaaataatcgacgttgacaaggat

SEQ ID NO: 627261 - DNA, 33 bp, Homo sapien
gttatctcagcaaaagcaatgcggtaggagagc

SEQ ID NO: 627262 - DNA, 33 bp, Homo sapien
gttatctcagcaaaaggaatgcggtaggagagc

SEQ ID NO: 627263 - DNA, 33 bp, Homo sapien
aactgtgaattcctacaagctaagagtaagtca

SEQ ID NO: 627264 - DNA, 33 bp, Homo sapien
aactgtgaattcctactagctaagagtaagtca

SEQ ID NO: 627265 - DNA, 33 bp, Homo sapien
gtcacaggtgcgcacaaaagtggatctcctcta

SEQ ID NO: 627266 - DNA, 33 bp, Homo sapien
gtcacaggtgcgcacagaagtggatctcctcta

SEQ ID NO: 627267 - DNA, 33 bp, Homo sapien
acattgtgtgcaatggccatgcttaatctcata

SEQ ID NO: 627268 - DNA, 33 bp, Homo sapien
acattgtgtgcaatggtcatgcttaatctcata

SEQ ID NO: 627269 - DNA, 33 bp, Homo sapien
ttacttgattactttccagttactatatatgca

SEQ ID NO: 627270 - DNA, 33 bp, Homo sapien
ttacttgattactttctagttactatatatgca

SEQ ID NO: 627271 - DNA, 33 bp, Homo sapien
aatggagctgaagtccacacaagggctgttcct

SEQ ID NO: 627272 - DNA, 33 bp, Homo sapien
aatggagctgaagtccgcacaagggctgttcct

SEQ ID NO: 627273 - DNA, 33 bp, Homo sapien
agagggaggaaatcagaacacttatttggctct

SEQ ID NO: 627274 - DNA, 33 bp, Homo sapien
agagggaggaaatcagtacacttatttggctct

SEQ ID NO: 627275 - DNA, 33 bp, Homo sapien
caacatgagagcttcccagactttcctggtttg

SEQ ID NO: 627276 - DNA, 33 bp, Homo sapien
caacatgagagcttccgagactttcctggtttg

SEQ ID NO: 627277 - DNA, 33 bp, Homo sapien
ggattttccttctcaaatcatcctttatatatt

SEQ ID NO: 627278 - DNA, 33 bp, Homo sapien
ggattttccttctcaagtcatcctttatatatt

SEQ ID NO: 627279 - DNA, 33 bp, Homo sapien
tgggatcataggaagactaaactcattcattca

SEQ ID NO: 627280 - DNA, 33 bp, Homo sapien
tgggatcataggaagattaaactcattcattca

SEQ ID NO: 627281 - DNA, 33 bp, Homo sapien
tatttactgtgtacaacaaggaagatctgaatc

SEQ ID NO: 627282 - DNA, 33 bp, Homo sapien
tatttactgtgtacaagaaggaagatctgaatc

SEQ ID NO: 627283 - DNA, 33 bp, Homo sapien
aagttgacaaactcatcaaagatgctcaacatg

SEQ ID NO: 627284 - DNA, 33 bp, Homo sapien
aagttgacaaactcattaaagatgctcaacatg

SEQ ID NO: 627285 - DNA, 33 bp, Homo sapien
gaattcccaacttttcaagaagtcccaaaggca

SEQ ID NO: 627286 - DNA, 33 bp, Homo sapien
gaattcccaacttttcgagaagtcccaaaggca

SEQ ID NO: 627287 - DNA, 33 bp, Homo sapien
gattaacaggaaaatacatggcccttgctacta

SEQ ID NO: 627288 - DNA, 33 bp, Homo sapien
gattaacaggaaaatatatggcccttgctacta

SEQ ID NO: 627289 - DNA, 33 bp, Homo sapien
agaacttgaagtaaccagctgttagccatagct

SEQ ID NO: 627290 - DNA, 33 bp, Homo sapien
agaacttgaagtaaccggctgttagccatagct

SEQ ID NO: 627291 - DNA, 33 bp, Homo sapien
cacttgtttgggataccgctttggctcctctaa

SEQ ID NO: 627292 - DNA, 33 bp, Homo sapien
cacttgtttgggatactgctttggctcctctaa

SEQ ID NO: 627293 - DNA, 33 bp, Homo sapien
ctcactcaaatgacaactgacctcctcaaatgt

SEQ ID NO: 627294 - DNA, 33 bp, Homo sapien
ctcactcaaatgacaagtgacctcctcaaatgt

SEQ ID NO: 627295 - DNA, 33 bp, Homo sapien
gtgctgctatgataccaaccatcttaataacat

SEQ ID NO: 627296 - DNA, 33 bp, Homo sapien
gtgctgctatgataccgaccatcttaataacat

SEQ ID NO: 627297 - DNA, 33 bp, Homo sapien
ctgattcaaaaatgtcccccagatcagaataac

SEQ ID NO: 627298 - DNA, 33 bp, Homo sapien
ctgattcaaaaatgtctcccagatcagaataac

SEQ ID NO: 627299 - DNA, 33 bp, Homo sapien
tctggtaacatcagacagtaagacaatgtggag

SEQ ID NO: 627300 - DNA, 33 bp, Homo sapien
tctggtaacatcagacggtaagacaatgtggag

SEQ ID NO: 627301 - DNA, 33 bp, Homo sapien
tcatgtttgcgaactcaaagaatgggcagggga

SEQ ID NO: 627302 - DNA, 33 bp, Homo sapien
tcatgtttgcgaactcgaagaatgggcagggga

SEQ ID NO: 627303 - DNA, 33 bp, Homo sapien
ccaattccacaaaaaggcttaatgtcttctgtt

SEQ ID NO: 627304 - DNA, 33 bp, Homo sapien
ccaattccacaaaaagtcttaatgtcttctgtt

SEQ ID NO: 627305 - DNA, 33 bp, Homo sapien
taaaataacagcaaaacttgacaggatctagaa

SEQ ID NO: 627306 - DNA, 33 bp, Homo sapien
taaaataacagcaaaatttgacaggatctagaa

SEQ ID NO: 627307 - DNA, 33 bp, Homo sapien
catttaactgtaaagccgatattgtctctatgg

SEQ ID NO: 627308 - DNA, 33 bp, Homo sapien
catttaactgtaaagctgatattgtctctatgg

SEQ ID NO: 627309 - DNA, 33 bp, Homo sapien
tctttcacaaacctgaaaaaaaccagaaatgga

SEQ ID NO: 627310 - DNA, 33 bp, Homo sapien
tctttcacaaacctgacaaaaaccagaaatgga

SEQ ID NO: 627311 - DNA, 33 bp, Homo sapien
gaaggaagaagaataacgcagtggggacagggg

SEQ ID NO: 627312 - DNA, 33 bp, Homo sapien
gaaggaagaagaataatgcagtggggacagggg

SEQ ID NO: 627313 - DNA, 33 bp, Homo sapien
gccaggatggctatagcagacactgttggtgcc

SEQ ID NO: 627314 - DNA, 33 bp, Homo sapien
gccaggatggctatagtagacactgttggtgcc

SEQ ID NO: 627315 - DNA, 33 bp, Homo sapien
ttgtaaacttggcataaaacaaagacctggcac

SEQ ID NO: 627316 - DNA, 33 bp, Homo sapien
ttgtaaacttggcatacaacaaagacctggcac

SEQ ID NO: 627317 - DNA, 33 bp, Homo sapien
gctagtccaaagtctccatggtggtaacaaact

SEQ ID NO: 627318 - DNA, 33 bp, Homo sapien
gctagtccaaagtctctatggtggtaacaaact

SEQ ID NO: 627319 - DNA, 33 bp, Homo sapien
cttatgtccgtttgtacctaatgcttagctccc

SEQ ID NO: 627320 - DNA, 33 bp, Homo sapien
cttatgtccgtttgtatctaatgcttagctccc

SEQ ID NO: 627321 - DNA, 33 bp, Homo sapien
tgttagtatgtactgcaataactatggtccctt

SEQ ID NO: 627322 - DNA, 33 bp, Homo sapien
tgttagtatgtactgcgataactatggtccctt

SEQ ID NO: 627323 - DNA, 33 bp, Homo sapien
gtcagcctgtgctagaacaacatgttagtatgt

SEQ ID NO: 627324 - DNA, 33 bp, Homo sapien
gtcagcctgtgctagatcaacatgttagtatgt

SEQ ID NO: 627325 - DNA, 33 bp, Homo sapien
gcagctaagaccataagaaaacattacaggagc

SEQ ID NO: 627326 - DNA, 33 bp, Homo sapien
gcagctaagaccataataaaacattacaggagc

SEQ ID NO: 627327 - DNA, 33 bp, Homo sapien
gatatgttacttgctcaaacaaatactatggtt

SEQ ID NO: 627328 - DNA, 33 bp, Homo sapien
gatatgttacttgctcgaacaaatactatggtt

SEQ ID NO: 627329 - DNA, 33 bp, Homo sapien
gcaaatagaaagacagaaggtttgtgcaatcac

SEQ ID NO: 627330 - DNA, 33 bp, Homo sapien
gcaaatagaaagacaggaggtttgtgcaatcac

SEQ ID NO: 627331 - DNA, 33 bp, Homo sapien
aaaggaattatgacccagagctaccttcttaag

SEQ ID NO: 627332 - DNA, 33 bp, Homo sapien
aaaggaattatgacccggagctaccttcttaag

SEQ ID NO: 627333 - DNA, 33 bp, Homo sapien
tcttctcttgttacatcaatttgccctgcatct

SEQ ID NO: 627334 - DNA, 33 bp, Homo sapien
tcttctcttgttacattaatttgccctgcatct

SEQ ID NO: 627335 - DNA, 33 bp, Homo sapien
ttctctcatttttatcccaaagttaattagcta

SEQ ID NO: 627336 - DNA, 33 bp, Homo sapien
ttctctcatttttatctcaaagttaattagcta

SEQ ID NO: 627337 - DNA, 33 bp, Homo sapien
atgtttacgttgcctacagaggtgctaaaatta

SEQ ID NO: 627338 - DNA, 33 bp, Homo sapien
atgtttacgttgcctatagaggtgctaaaatta

SEQ ID NO: 627339 - DNA, 33 bp, Homo sapien
cagtcttcagttttacacagctacacaaaatta

SEQ ID NO: 627340 - DNA, 33 bp, Homo sapien
cagtcttcagttttacgcagctacacaaaatta

SEQ ID NO: 627341 - DNA, 33 bp, Homo sapien
tctgcatttgtaatgaaaagaaatgctgcattt

SEQ ID NO: 627342 - DNA, 33 bp, Homo sapien
tctgcatttgtaatgagaagaaatgctgcattt

SEQ ID NO: 627343 - DNA, 33 bp, Homo sapien
ggtaatgattggaagaagagacacaatgctgac

SEQ ID NO: 627344 - DNA, 33 bp, Homo sapien
ggtaatgattggaagacgagacacaatgctgac

SEQ ID NO: 627345 - DNA, 33 bp, Homo sapien
tttgagattttgataaaagtcataacagctcca

SEQ ID NO: 627346 - DNA, 33 bp, Homo sapien
tttgagattttgataagagtcataacagctcca

SEQ ID NO: 627347 - DNA, 33 bp, Homo sapien
gctgctatggggcacaagtgtatctgtttagaa

SEQ ID NO: 627348 - DNA, 33 bp, Homo sapien
gctgctatggggcacaggtgtatctgtttagaa

SEQ ID NO: 627349 - DNA, 33 bp, Homo sapien
tagaagtaaagttctagacaaagatttgtgatt

SEQ ID NO: 627350 - DNA, 33 bp, Homo sapien
tagaagtaaagttctatacaaagatttgtgatt

SEQ ID NO: 627351 - DNA, 33 bp, Homo sapien
gaaattgggtagccaccgattgacaagagtaag

SEQ ID NO: 627352 - DNA, 33 bp, Homo sapien
gaaattgggtagccactgattgacaagagtaag

SEQ ID NO: 627353 - DNA, 33 bp, Homo sapien
tattacaataggaaaagaattcaatgtaaactg

SEQ ID NO: 627354 - DNA, 33 bp, Homo sapien
tattacaataggaaaataattcaatgtaaactg

SEQ ID NO: 627355 - DNA, 33 bp, Homo sapien
aatacgactatatttggagataaggtatattag

SEQ ID NO: 627356 - DNA, 33 bp, Homo sapien
aatacgactatatttgtagataaggtatattag

SEQ ID NO: 627357 - DNA, 33 bp, Homo sapien
ttgttctaaaatctctcaaatcccaagctgcaa

SEQ ID NO: 627358 - DNA, 33 bp, Homo sapien
ttgttctaaaatctcttaaatcccaagctgcaa

SEQ ID NO: 627359 - DNA, 33 bp, Homo sapien
ttaagttttgtaagcaagctcatttttagggtt

SEQ ID NO: 627360 - DNA, 33 bp, Homo sapien
ttaagttttgtaagcacgctcatttttagggtt

SEQ ID NO: 627361 - DNA, 33 bp, Homo sapien
gtgagaaaatgtgatacctgccaatttcaggtt

SEQ ID NO: 627362 - DNA, 33 bp, Homo sapien
gtgagaaaatgtgatatctgccaatttcaggtt

SEQ ID NO: 627363 - DNA, 33 bp, Homo sapien
ctccacaactgggcaaacagtggtaaagctaga

SEQ ID NO: 627364 - DNA, 33 bp, Homo sapien
ctccacaactgggcaagcagtggtaaagctaga

SEQ ID NO: 627365 - DNA, 33 bp, Homo sapien
gtacttactgtgtgaacggggcctttttgtatt

SEQ ID NO: 627366 - DNA, 33 bp, Homo sapien
gtacttactgtgtgaatggggcctttttgtatt

SEQ ID NO: 627367 - DNA, 33 bp, Homo sapien
cagcaattatttactcaactcagtagtctgtga

SEQ ID NO: 627368 - DNA, 33 bp, Homo sapien
cagcaattatttactccactcagtagtctgtga

SEQ ID NO: 627369 - DNA, 33 bp, Homo sapien
atgagtgtttatatccaactaaagtcagaaatg

SEQ ID NO: 627370 - DNA, 33 bp, Homo sapien
atgagtgtttatatcccactaaagtcagaaatg

SEQ ID NO: 627371 - DNA, 33 bp, Homo sapien
cagcagtttcaccttcaaataatgctgcaaatg

SEQ ID NO: 627372 - DNA, 33 bp, Homo sapien
cagcagtttcaccttcgaataatgctgcaaatg

SEQ ID NO: 627373 - DNA, 33 bp, Homo sapien
gcttaccactaaccccggaaaggtatgcttctg

SEQ ID NO: 627374 - DNA, 33 bp, Homo sapien
gcttaccactaacccctgaaaggtatgcttctg

SEQ ID NO: 627375 - DNA, 33 bp, Homo sapien
gttttgtggagattagcatcctgaaagtcatga

SEQ ID NO: 627376 - DNA, 33 bp, Homo sapien
gttttgtggagattaggatcctgaaagtcatga

SEQ ID NO: 627377 - DNA, 33 bp, Homo sapien
ttcagattgtggaagacaaagcaactctatctt

SEQ ID NO: 627378 - DNA, 33 bp, Homo sapien
ttcagattgtggaagataaagcaactctatctt

SEQ ID NO: 627379 - DNA, 33 bp, Homo sapien
ccaaacatgctcttccactctgaaggatttaaa

SEQ ID NO: 627380 - DNA, 33 bp, Homo sapien
ccaaacatgctcttccgctctgaaggatttaaa

SEQ ID NO: 627381 - DNA, 33 bp, Homo sapien
gccctgtgggattccaaatgaagaagattcata

SEQ ID NO: 627382 - DNA, 33 bp, Homo sapien
gccctgtgggattccacatgaagaagattcata

SEQ ID NO: 627383 - DNA, 33 bp, Homo sapien
aaaaagtttctgggtaacattgcctcccattga

SEQ ID NO: 627384 - DNA, 33 bp, Homo sapien
aaaaagtttctgggtatcattgcctcccattga

SEQ ID NO: 627385 - DNA, 33 bp, Homo sapien
caaatccagatctaagaaatcagtgttacacag

SEQ ID NO: 627386 - DNA, 33 bp, Homo sapien
caaatccagatctaaggaatcagtgttacacag

SEQ ID NO: 627387 - DNA, 33 bp, Homo sapien
tcagagtctgtgcagcaaagcagacctaagcag

SEQ ID NO: 627388 - DNA, 33 bp, Homo sapien
tcagagtctgtgcagcgaagcagacctaagcag

SEQ ID NO: 627389 - DNA, 33 bp, Homo sapien
aatgtaaacatagaaccccgaaacagatgggtg

SEQ ID NO: 627390 - DNA, 33 bp, Homo sapien
aatgtaaacatagaactccgaaacagatgggtg

SEQ ID NO: 627391 - DNA, 33 bp, Homo sapien
tctttcacagggaaccaactggagatgatgggc

SEQ ID NO: 627392 - DNA, 33 bp, Homo sapien
tctttcacagggaaccgactggagatgatgggc

SEQ ID NO: 627393 - DNA, 33 bp, Homo sapien
tttgtctgctttaaaaatatgtaggttataact

SEQ ID NO: 627394 - DNA, 33 bp, Homo sapien
tttgtctgctttaaaattatgtaggttataact

SEQ ID NO: 627395 - DNA, 33 bp, Homo sapien
tacttttttcaagccagagatttttcttaagcc

SEQ ID NO: 627396 - DNA, 33 bp, Homo sapien
tacttttttcaagccatagatttttcttaagcc

SEQ ID NO: 627397 - DNA, 33 bp, Homo sapien
cagatcacggaaaggacattagattttattgta

SEQ ID NO: 627398 - DNA, 33 bp, Homo sapien
cagatcacggaaaggatattagattttattgta

SEQ ID NO: 627399 - DNA, 33 bp, Homo sapien
tgtctggctcaaaatcaatctcgctaaactatc

SEQ ID NO: 627400 - DNA, 33 bp, Homo sapien
tgtctggctcaaaatccatctcgctaaactatc

SEQ ID NO: 627401 - DNA, 33 bp, Homo sapien
gaacagtctctcttacaatcaatggatcaagca

SEQ ID NO: 627402 - DNA, 33 bp, Homo sapien
gaacagtctctcttacgatcaatggatcaagca

SEQ ID NO: 627403 - DNA, 33 bp, Homo sapien
ccttgccttcaacacactgctaccctttatgat

SEQ ID NO: 627404 - DNA, 33 bp, Homo sapien
ccttgccttcaacacattgctaccctttatgat

SEQ ID NO: 627405 - DNA, 33 bp, Homo sapien
ctcttgtacttggctacaggaacatacttcctc

SEQ ID NO: 627406 - DNA, 33 bp, Homo sapien
ctcttgtacttggctagaggaacatacttcctc

SEQ ID NO: 627407 - DNA, 33 bp, Homo sapien
aagaacatattatatacctgccgaaagatgaga

SEQ ID NO: 627408 - DNA, 33 bp, Homo sapien
aagaacatattatatatctgccgaaagatgaga

SEQ ID NO: 627409 - DNA, 33 bp, Homo sapien
agtggtcttggacaaccgatttaccttctctca

SEQ ID NO: 627410 - DNA, 33 bp, Homo sapien
agtggtcttggacaactgatttaccttctctca

SEQ ID NO: 627411 - DNA, 33 bp, Homo sapien
cagtccattctttggaaacctgaggatcaatac

SEQ ID NO: 627412 - DNA, 33 bp, Homo sapien
cagtccattctttggagacctgaggatcaatac

SEQ ID NO: 627413 - DNA, 33 bp, Homo sapien
attagaatctcttcctcaccatccacaaaaatt

SEQ ID NO: 627414 - DNA, 33 bp, Homo sapien
attagaatctcttccttaccatccacaaaaatt

SEQ ID NO: 627415 - DNA, 33 bp, Homo sapien
cttttattaataaagcaaggaagcatccaggaa

SEQ ID NO: 627416 - DNA, 33 bp, Homo sapien
cttttattaataaagcgaggaagcatccaggaa

SEQ ID NO: 627417 - DNA, 33 bp, Homo sapien
ataatagaagaggagacgtcctgttgtaatagg

SEQ ID NO: 627418 - DNA, 33 bp, Homo sapien
ataatagaagaggagatgtcctgttgtaatagg

SEQ ID NO: 627419 - DNA, 33 bp, Homo sapien
atattcaaggacaaaccgctgatgaatagagct

SEQ ID NO: 627420 - DNA, 33 bp, Homo sapien
atattcaaggacaaactgctgatgaatagagct

SEQ ID NO: 627421 - DNA, 33 bp, Homo sapien
atgcagtttgagaaacaacatggagaaaacacc

SEQ ID NO: 627422 - DNA, 33 bp, Homo sapien
atgcagtttgagaaaccacatggagaaaacacc

SEQ ID NO: 627423 - DNA, 33 bp, Homo sapien
tggaagaccacctgaaagctgggtcacagaggg

SEQ ID NO: 627424 - DNA, 33 bp, Homo sapien
tggaagaccacctgaacgctgggtcacagaggg

SEQ ID NO: 627425 - DNA, 33 bp, Homo sapien
cacttacgatccatacactgaaattacattgca

SEQ ID NO: 627426 - DNA, 33 bp, Homo sapien
cacttacgatccatacgctgaaattacattgca

SEQ ID NO: 627427 - DNA, 33 bp, Homo sapien
ggagagctaataaaaacgaaaatgatttagatg

SEQ ID NO: 627428 - DNA, 33 bp, Homo sapien
ggagagctaataaaaatgaaaatgatttagatg

SEQ ID NO: 627429 - DNA, 33 bp, Homo sapien
aatttagattcatgaacggccgctcctggaagc

SEQ ID NO: 627430 - DNA, 33 bp, Homo sapien
aatttagattcatgaatggccgctcctggaagc

SEQ ID NO: 627431 - DNA, 33 bp, Homo sapien
ctaatcagaatgaaaaattgtacctccacaaaa

SEQ ID NO: 627432 - DNA, 33 bp, Homo sapien
ctaatcagaatgaaaacttgtacctccacaaaa

SEQ ID NO: 627433 - DNA, 33 bp, Homo sapien
ccctttacttcccatcactagcagacatctaca

SEQ ID NO: 627434 - DNA, 33 bp, Homo sapien
ccctttacttcccatcgctagcagacatctaca

SEQ ID NO: 627435 - DNA, 33 bp, Homo sapien
tgagaatgctttactgaagaatttcccaaagta

SEQ ID NO: 627436 - DNA, 33 bp, Homo sapien
tgagaatgctttactgcagaatttcccaaagta

SEQ ID NO: 627437 - DNA, 33 bp, Homo sapien
gtaggagaataagctaaagtatgaatctgtata

SEQ ID NO: 627438 - DNA, 33 bp, Homo sapien
gtaggagaataagctagagtatgaatctgtata

SEQ ID NO: 627439 - DNA, 33 bp, Homo sapien
ttcccagatttatacaacctactccatgctggt

SEQ ID NO: 627440 - DNA, 33 bp, Homo sapien
ttcccagatttatacagcctactccatgctggt

SEQ ID NO: 627441 - DNA, 33 bp, Homo sapien
tcattgaaatctaagaaaaaacatgctctaagg

SEQ ID NO: 627442 - DNA, 33 bp, Homo sapien
tcattgaaatctaagagaaaacatgctctaagg

SEQ ID NO: 627443 - DNA, 33 bp, Homo sapien
gtgtgtgttaattaaaacattgtgcactatagt

SEQ ID NO: 627444 - DNA, 33 bp, Homo sapien
gtgtgtgttaattaaaccattgtgcactatagt

SEQ ID NO: 627445 - DNA, 33 bp, Homo sapien
tgtgttatcttagaacaatggagatcagaggtc

SEQ ID NO: 627446 - DNA, 33 bp, Homo sapien
tgtgttatcttagaactatggagatcagaggtc

SEQ ID NO: 627447 - DNA, 33 bp, Homo sapien
acaatgaaataagaacaatgtctgaggagttag

SEQ ID NO: 627448 - DNA, 33 bp, Homo sapien
acaatgaaataagaacgatgtctgaggagttag

SEQ ID NO: 627449 - DNA, 33 bp, Homo sapien
ggcaacattctcttcccaaaagacaattttaaa

SEQ ID NO: 627450 - DNA, 33 bp, Homo sapien
ggcaacattctcttcctaaaagacaattttaaa

SEQ ID NO: 627451 - DNA, 33 bp, Homo sapien
cctcctcctttccccaatgctgtgtgtctttta

SEQ ID NO: 627452 - DNA, 33 bp, Homo sapien
cctcctcctttccccagtgctgtgtgtctttta

SEQ ID NO: 627453 - DNA, 33 bp, Homo sapien
aataagtgttctttacacaccaatggcttccta

SEQ ID NO: 627454 - DNA, 33 bp, Homo sapien
aataagtgttctttacgcaccaatggcttccta

SEQ ID NO: 627455 - DNA, 33 bp, Homo sapien
agattactctgtgtggccactttacatttgtca

SEQ ID NO: 627456 - DNA, 33 bp, Homo sapien
agattactctgtgtggtcactttacatttgtca

SEQ ID NO: 627457 - DNA, 33 bp, Homo sapien
gtgagggtggtagatcaaagtggcgtatttttc

SEQ ID NO: 627458 - DNA, 33 bp, Homo sapien
gtgagggtggtagatcgaagtggcgtatttttc

SEQ ID NO: 627459 - DNA, 33 bp, Homo sapien
agggtaaatcggaggcaactgcatcatgatctt

SEQ ID NO: 627460 - DNA, 33 bp, Homo sapien
agggtaaatcggaggcgactgcatcatgatctt

SEQ ID NO: 627461 - DNA, 33 bp, Homo sapien
ccggcttctgatataaactcttataagcaaggg

SEQ ID NO: 627462 - DNA, 33 bp, Homo sapien
ccggcttctgatataagctcttataagcaaggg

SEQ ID NO: 627463 - DNA, 33 bp, Homo sapien
gttcagattagtacccactctttatacctgact

SEQ ID NO: 627464 - DNA, 33 bp, Homo sapien
gttcagattagtacccgctctttatacctgact

SEQ ID NO: 627465 - DNA, 33 bp, Homo sapien
gattatatttttactacgttcgccttcccctcc

SEQ ID NO: 627466 - DNA, 33 bp, Homo sapien
gattatatttttactaggttcgccttcccctcc

SEQ ID NO: 627467 - DNA, 33 bp, Homo sapien
gctttacgggaacttacaagcaaggcaaagata

SEQ ID NO: 627468 - DNA, 33 bp, Homo sapien
gctttacgggaacttataagcaaggcaaagata

SEQ ID NO: 627469 - DNA, 33 bp, Homo sapien
aaacctgaacataaacacttctatctttgcctt

SEQ ID NO: 627470 - DNA, 33 bp, Homo sapien
aaacctgaacataaacccttctatctttgcctt

SEQ ID NO: 627471 - DNA, 33 bp, Homo sapien
aaaacgtgagagctaaagatgaaacacgagggc

SEQ ID NO: 627472 - DNA, 33 bp, Homo sapien
aaaacgtgagagctaaggatgaaacacgagggc

SEQ ID NO: 627473 - DNA, 33 bp, Homo sapien
ggtacccgtaagtgacagcatcaagtgccaccg

SEQ ID NO: 627474 - DNA, 33 bp, Homo sapien
ggtacccgtaagtgacggcatcaagtgccaccg

SEQ ID NO: 627475 - DNA, 33 bp, Homo sapien
acactaggctggaacaaaaagcagtgatttcct

SEQ ID NO: 627476 - DNA, 33 bp, Homo sapien
acactaggctggaacataaagcagtgatttcct

SEQ ID NO: 627477 - DNA, 33 bp, Homo sapien
ctaaatgcaaaagcgacccatgctctagagcag

SEQ ID NO: 627478 - DNA, 33 bp, Homo sapien
ctaaatgcaaaagcgatccatgctctagagcag

SEQ ID NO: 627479 - DNA, 33 bp, Homo sapien
gggaaagttagtgcaaatacaagtccatcaacc

SEQ ID NO: 627480 - DNA, 33 bp, Homo sapien
gggaaagttagtgcaactacaagtccatcaacc

SEQ ID NO: 627481 - DNA, 33 bp, Homo sapien
tgtattttactccacaataatccatcctttatt

SEQ ID NO: 627482 - DNA, 33 bp, Homo sapien
tgtattttactccacagtaatccatcctttatt

SEQ ID NO: 627483 - DNA, 33 bp, Homo sapien
ttttgcatttgtctaaacatgtcttttacttcc

SEQ ID NO: 627484 - DNA, 33 bp, Homo sapien
ttttgcatttgtctaagcatgtcttttacttcc

SEQ ID NO: 627485 - DNA, 33 bp, Homo sapien
ccatcaccatatataaatacagccggatggtat

SEQ ID NO: 627486 - DNA, 33 bp, Homo sapien
ccatcaccatatataagtacagccggatggtat

SEQ ID NO: 627487 - DNA, 33 bp, Homo sapien
aaattccaatgagccaggttagtaatgccccct

SEQ ID NO: 627488 - DNA, 33 bp, Homo sapien
aaattccaatgagccatgttagtaatgccccct

SEQ ID NO: 627489 - DNA, 33 bp, Homo sapien
ataaccttcttttctaccacctttcagtaatac

SEQ ID NO: 627490 - DNA, 33 bp, Homo sapien
ataaccttcttttctatcacctttcagtaatac

SEQ ID NO: 627491 - DNA, 33 bp, Homo sapien
tgcactccaattgaagaaattctaaaatgtgaa

SEQ ID NO: 627492 - DNA, 33 bp, Homo sapien
tgcactccaattgaaggaattctaaaatgtgaa

SEQ ID NO: 627493 - DNA, 33 bp, Homo sapien
aggaaaaacagcaatgaagattctatctcagaa

SEQ ID NO: 627494 - DNA, 33 bp, Homo sapien
aggaaaaacagcaatggagattctatctcagaa

SEQ ID NO: 627495 - DNA, 33 bp, Homo sapien
ttctaaaatgtaatggaaagccatcttaagctg

SEQ ID NO: 627496 - DNA, 33 bp, Homo sapien
ttctaaaatgtaatgggaagccatcttaagctg

SEQ ID NO: 627497 - DNA, 33 bp, Homo sapien
gagagcgctcttgaacacacttcagaactgtct

SEQ ID NO: 627498 - DNA, 33 bp, Homo sapien
gagagcgctcttgaacgcacttcagaactgtct

SEQ ID NO: 627499 - DNA, 33 bp, Homo sapien
ttatttgggaggcaaaaccaagaagtgtggaga

SEQ ID NO: 627500 - DNA, 33 bp, Homo sapien
ttatttgggaggcaaacccaagaagtgtggaga

SEQ ID NO: 627501 - DNA, 33 bp, Homo sapien
agggaagctcacatccaataacaggttgatctg

SEQ ID NO: 627502 - DNA, 33 bp, Homo sapien
agggaagctcacatccgataacaggttgatctg

SEQ ID NO: 627503 - DNA, 33 bp, Homo sapien
atgattgcccaactcaagaggcactggagccaa

SEQ ID NO: 627504 - DNA, 33 bp, Homo sapien
atgattgcccaactcaggaggcactggagccaa

SEQ ID NO: 627505 - DNA, 33 bp, Homo sapien
atcactgtgtgaatgacaaatgcatcctgctgg

SEQ ID NO: 627506 - DNA, 33 bp, Homo sapien
atcactgtgtgaatgagaaatgcatcctgctgg

SEQ ID NO: 627507 - DNA, 33 bp, Homo sapien
caattaactaccatccactaaaaattcagccag

SEQ ID NO: 627508 - DNA, 33 bp, Homo sapien
caattaactaccatccgctaaaaattcagccag

SEQ ID NO: 627509 - DNA, 33 bp, Homo sapien
tggcaacatcttgaacaagtttagcttcaatat

SEQ ID NO: 627510 - DNA, 33 bp, Homo sapien
tggcaacatcttgaacgagtttagcttcaatat

SEQ ID NO: 627511 - DNA, 33 bp, Homo sapien; identical to SEQ ID NO: 627509

SEQ ID NO: 627512 - DNA, 33 bp, Homo sapien; identical to SEQ ID NO: 627510

SEQ ID NO: 627513 - DNA, 33 bp, Homo sapien
tgtgatgaatggagaaaataaagtgttagaaaa

SEQ ID NO: 627514 - DNA, 33 bp, Homo sapien
tgtgatgaatggagaatataaagtgttagaaaa

SEQ ID NO: 627515 - DNA, 33 bp, Homo sapien
attccaatatccaaaccaaatagcagagctaga

SEQ ID NO: 627516 - DNA, 33 bp, Homo sapien
attccaatatccaaacgaaatagcagagctaga

SEQ ID NO: 627517 - DNA, 33 bp, Homo sapien
taaaatgagaaggagccaagtaagtagtatttc

SEQ ID NO: 627518 - DNA, 33 bp, Homo sapien
taaaatgagaaggagctaagtaagtagtatttc

SEQ ID NO: 627519 - DNA, 33 bp, Homo sapien
ttatttcatcctcaaaacaaacatgtaaagcag

SEQ ID NO: 627520 - DNA, 33 bp, Homo sapien
ttatttcatcctcaaagcaaacatgtaaagcag

SEQ ID NO: 627521 - DNA, 33 bp, Homo sapien
cagttgatgactgttacagacatagctcccata

SEQ ID NO: 627522 - DNA, 33 bp, Homo sapien
cagttgatgactgttatagacatagctcccata

SEQ ID NO: 627523 - DNA, 33 bp, Homo sapien
ctaataaacaccatgaaccctgcattctgtctc

SEQ ID NO: 627524 - DNA, 33 bp, Homo sapien
ctaataaacaccatgagccctgcattctgtctc

SEQ ID NO: 627525 - DNA, 33 bp, Homo sapien
catgttagatttgagacgcttgtgtgacaacta

SEQ ID NO: 627526 - DNA, 33 bp, Homo sapien
catgttagatttgagatgcttgtgtgacaacta

SEQ ID NO: 627527 - DNA, 33 bp, Homo sapien
ttccagagcacactttaaaaaagagaagtaaga

SEQ ID NO: 627528 - DNA, 33 bp, Homo sapien
ttccagagcacactttgaaaaagagaagtaaga

SEQ ID NO: 627529 - DNA, 33 bp, Homo sapien
cttctattattaaacaacaaacgactatattga

SEQ ID NO: 627530 - DNA, 33 bp, Homo sapien
cttctattattaaacagcaaacgactatattga

SEQ ID NO: 627531 - DNA, 33 bp, Homo sapien
ctcccttacacagacaactttcttcactctgct

SEQ ID NO: 627532 - DNA, 33 bp, Homo sapien
ctcccttacacagacacctttcttcactctgct

SEQ ID NO: 627533 - DNA, 33 bp, Homo sapien
tagcgtgtatctaccacaaagaggacattttcc

SEQ ID NO: 627534 - DNA, 33 bp, Homo sapien
tagcgtgtatctaccataaagaggacattttcc

SEQ ID NO: 627535 - DNA, 33 bp, Homo sapien
ctgcttctgaacttccaggaaagagagaaataa

SEQ ID NO: 627536 - DNA, 33 bp, Homo sapien
ctgcttctgaacttccgggaaagagagaaataa

SEQ ID NO: 627537 - DNA, 33 bp, Homo sapien
atctaagggtagccaaatggttacgttctgatc

SEQ ID NO: 627538 - DNA, 33 bp, Homo sapien
atctaagggtagccaagtggttacgttctgatc

SEQ ID NO: 627539 - DNA, 33 bp, Homo sapien
aagaattctctttgacaatcctctggttctctt

SEQ ID NO: 627540 - DNA, 33 bp, Homo sapien
aagaattctctttgacgatcctctggttctctt

SEQ ID NO: 627541 - DNA, 33 bp, Homo sapien
acatagctgagcagacaaatattcttttgttat

SEQ ID NO: 627542 - DNA, 33 bp, Homo sapien
acatagctgagcagactaatattcttttgttat

SEQ ID NO: 627543 - DNA, 33 bp, Homo sapien
atggtatgtagctaacaaagcaacattgtgcta

SEQ ID NO: 627544 - DNA, 33 bp, Homo sapien
atggtatgtagctaacgaagcaacattgtgcta

SEQ ID NO: 627545 - DNA, 33 bp, Homo sapien
aagcctctcaaaggccagatttggaaagggcac

SEQ ID NO: 627546 - DNA, 33 bp, Homo sapien
aagcctctcaaaggccggatttggaaagggcac

SEQ ID NO: 627547 - DNA, 33 bp, Homo sapien
gggaggggtaatccaaacaatgaggttcgctat

SEQ ID NO: 627548 - DNA, 33 bp, Homo sapien
gggaggggtaatccaaccaatgaggttcgctat

SEQ ID NO: 627549 - DNA, 33 bp, Homo sapien
ggtagaaatggggataaagatggtatcacaaca

SEQ ID NO: 627550 - DNA, 33 bp, Homo sapien
ggtagaaatggggatagagatggtatcacaaca

SEQ ID NO: 627551 - DNA, 33 bp, Homo sapien
caggggcactcatagcagcacatacggagtcag

SEQ ID NO: 627552 - DNA, 33 bp, Homo sapien
caggggcactcatagcggcacatacggagtcag

SEQ ID NO: 627553 - DNA, 33 bp, Homo sapien
ctttgcaactactcaactctgtcattttggtgc

SEQ ID NO: 627554 - DNA, 33 bp, Homo sapien
ctttgcaactactcaattctgtcattttggtgc

SEQ ID NO: 627555 - DNA, 33 bp, Homo sapien
ggaagtctgcaacaagaactgggacacagccag

SEQ ID NO: 627556 - DNA, 33 bp, Homo sapien
ggaagtctgcaacaaggactgggacacagccag

SEQ ID NO: 627557 - DNA, 33 bp, Homo sapien
acagtgtgtcatgggccagttccccctgtgccc

SEQ ID NO: 627558 - DNA, 33 bp, Homo sapien
acagtgtgtcatgggctagttccccctgtgccc

SEQ ID NO: 627559 - DNA, 33 bp, Homo sapien
ccacaaaactctctcaacacagcaacatatctc

SEQ ID NO: 627560 - DNA, 33 bp, Homo sapien
ccacaaaactctctcagcacagcaacatatctc

SEQ ID NO: 627561 - DNA, 33 bp, Homo sapien
tgcagtgatctaagacaatgtcccaaatccgga

SEQ ID NO: 627562 - DNA, 33 bp, Homo sapien
tgcagtgatctaagacgatgtcccaaatccgga

SEQ ID NO: 627563 - DNA, 33 bp, Homo sapien
ttgttttacatccagaggaatgaacattccaat

SEQ ID NO: 627564 - DNA, 33 bp, Homo sapien
ttgttttacatccagatgaatgaacattccaat

SEQ ID NO: 627565 - DNA, 33 bp, Homo sapien
cagtagaacttgtggaaaagcctaaataaagcc

SEQ ID NO: 627566 - DNA, 33 bp, Homo sapien
cagtagaacttgtggagaagcctaaataaagcc

SEQ ID NO: 627567 - DNA, 33 bp, Homo sapien
cctatagaaaggaatcaccaaatgtcctgaaaa

SEQ ID NO: 627568 - DNA, 33 bp, Homo sapien
cctatagaaaggaatcgccaaatgtcctgaaaa

SEQ ID NO: 627569 - DNA, 33 bp, Homo sapien
aagtgagggctacacaactagaatacttggaca

SEQ ID NO: 627570 - DNA, 33 bp, Homo sapien
aagtgagggctacacagctagaatacttggaca

SEQ ID NO: 627571 - DNA, 33 bp, Homo sapien
cagacaaaaaagaccacgtgttgtgtgattccg

SEQ ID NO: 627572 - DNA, 33 bp, Homo sapien
cagacaaaaaagaccatgtgttgtgtgattccg

SEQ ID NO: 627573 - DNA, 33 bp, Homo sapien
gggtgcaaggatgagaaggaagtgacatttctt

SEQ ID NO: 627574 - DNA, 33 bp, Homo sapien
gggtgcaaggatgagacggaagtgacatttctt

SEQ ID NO: 627575 - DNA, 33 bp, Homo sapien
ctgccactatgacctccaacgaatgaggcttct

SEQ ID NO: 627576 - DNA, 33 bp, Homo sapien
ctgccactatgacctctaacgaatgaggcttct

SEQ ID NO: 627577 - DNA, 33 bp, Homo sapien
ctgaggtagatcttgaaagctacaggtattact

SEQ ID NO: 627578 - DNA, 33 bp, Homo sapien
ctgaggtagatcttgacagctacaggtattact

SEQ ID NO: 627579 - DNA, 33 bp, Homo sapien
gtgagaggatgagttacagaaagctacccataa

SEQ ID NO: 627580 - DNA, 33 bp, Homo sapien
gtgagaggatgagttatagaaagctacccataa

SEQ ID NO: 627581 - DNA, 33 bp, Homo sapien
ctggcttctgacagaacagtgacatttaaaaga

SEQ ID NO: 627582 - DNA, 33 bp, Homo sapien
ctggcttctgacagaatagtgacatttaaaaga

SEQ ID NO: 627583 - DNA, 33 bp, Homo sapien
cagtttgattgataacagtctatccattgtcag

SEQ ID NO: 627584 - DNA, 33 bp, Homo sapien
cagtttgattgataacggtctatccattgtcag

SEQ ID NO: 627585 - DNA, 33 bp, Homo sapien
ctgttgtttttaaatacggtgtttgatcaaatt

SEQ ID NO: 627586 - DNA, 33 bp, Homo sapien
ctgttgtttttaaatatggtgtttgatcaaatt

SEQ ID NO: 627587 - DNA, 33 bp, Homo sapien
gttccagggatactacagagctggttattcctt

SEQ ID NO: 627588 - DNA, 33 bp, Homo sapien
gttccagggatactaccgagctggttattcctt

SEQ ID NO: 627589 - DNA, 33 bp, Homo sapien
aatacacaaaagcctcaaatagataaacttaaa

SEQ ID NO: 627590 - DNA, 33 bp, Homo sapien
aatacacaaaagcctcgaatagataaacttaaa

SEQ ID NO: 627591 - DNA, 33 bp, Homo sapien
tttcctggtcctggtacggggatgacctctctt

SEQ ID NO: 627592 - DNA, 33 bp, Homo sapien
tttcctggtcctggtatggggatgacctctctt

SEQ ID NO: 627593 - DNA, 33 bp, Homo sapien
tacacgcattatactaggttttgcctcaataaa

SEQ ID NO: 627594 - DNA, 33 bp, Homo sapien
tacacgcattatactatgttttgcctcaataaa

SEQ ID NO: 627595 - DNA, 33 bp, Homo sapien
gaagttgcccagtttcaacccttgttcctctgt

SEQ ID NO: 627596 - DNA, 33 bp, Homo sapien
gaagttgcccagtttcgacccttgttcctctgt

SEQ ID NO: 627597 - DNA, 33 bp, Homo sapien; identical to SEQ ID NO: 627595

SEQ ID NO: 627598 - DNA, 33 bp, Homo sapien; identical to SEQ ID NO: 627596

SEQ ID NO: 627599 - DNA, 33 bp, Homo sapien
tgctttccctagaagaagcctgaattctttttt

SEQ ID NO: 627600 - DNA, 33 bp, Homo sapien
tgctttccctagaagatgcctgaattctttttt

SEQ ID NO: 627601 - DNA, 33 bp, Homo sapien
acaaaagggcttggacactaaacatcaacataa

SEQ ID NO: 627602 - DNA, 33 bp, Homo sapien
acaaaagggcttggaccctaaacatcaacataa

SEQ ID NO: 627603 - DNA, 33 bp, Homo sapien
tatggtgagcacagggcaggtactgtgaggctc

SEQ ID NO: 627604 - DNA, 33 bp, Homo sapien
tatggtgagcacagggtaggtactgtgaggctc

SEQ ID NO: 627605 - DNA, 33 bp, Homo sapien
tgccctgcctacatcccgaagattatctgacaa

SEQ ID NO: 627606 - DNA, 33 bp, Homo sapien
tgccctgcctacatcctgaagattatctgacaa

SEQ ID NO: 627607 - DNA, 33 bp, Homo sapien
gtggcgctctacacaaccaacctcagcagctgg

SEQ ID NO: 627608 - DNA, 33 bp, Homo sapien
gtggcgctctacacaatcaacctcagcagctgg

SEQ ID NO: 627609 - DNA, 33 bp, Homo sapien
acaccattcttagttgcagttccaaatagatct

SEQ ID NO: 627610 - DNA, 33 bp, Homo sapien
acaccattcttagttggagttccaaatagatct

SEQ ID NO: 627611 - DNA, 33 bp, Homo sapien
gaggtggttaaagttaccttgaattatgtagca

SEQ ID NO: 627612 - DNA, 33 bp, Homo sapien
gaggtggttaaagttatcttgaattatgtagca

SEQ ID NO: 627613 - DNA, 33 bp, Homo sapien
ccacagacaaccatcacggtaggaaataccgct

SEQ ID NO: 627614 - DNA, 33 bp, Homo sapien
ccacagacaaccatcagggtaggaaataccgct

SEQ ID NO: 627615 - DNA, 33 bp, Homo sapien
cacttgaacacttgatgactttagctttgagga

SEQ ID NO: 627616 - DNA, 33 bp, Homo sapien
cacttgaacacttgattactttagctttgagga

SEQ ID NO: 627617 - DNA, 33 bp, Homo sapien
actgcaaggccaaaatcaaactgccttcctaga

SEQ ID NO: 627618 - DNA, 33 bp, Homo sapien
actgcaaggccaaaatgaaactgccttcctaga

SEQ ID NO: 627619 - DNA, 33 bp, Homo sapien
actgtaattatacaggaagatttattgagggat

SEQ ID NO: 627620 - DNA, 33 bp, Homo sapien
actgtaattatacaggtagatttattgagggat

SEQ ID NO: 627621 - DNA, 33 bp, Homo sapien
aggaccttttttacaacatagccacgaggagaa

SEQ ID NO: 627622 - DNA, 33 bp, Homo sapien
aggaccttttttacaatatagccacgaggagaa

SEQ ID NO: 627623 - DNA, 33 bp, Homo sapien
gccagtcattttacaaacacattctgttaaact

SEQ ID NO: 627624 - DNA, 33 bp, Homo sapien
gccagtcattttacaaccacattctgttaaact

SEQ ID NO: 627625 - DNA, 33 bp, Homo sapien
aaataaaaagatttgacgtatccttgtctacag

SEQ ID NO: 627626 - DNA, 33 bp, Homo sapien
aaataaaaagatttgatgtatccttgtctacag

SEQ ID NO: 627627 - DNA, 33 bp, Homo sapien
tagaaagcaataaaggaagaaaaaaataagact

SEQ ID NO: 627628 - DNA, 33 bp, Homo sapien
tagaaagcaataaaggcagaaaaaaataagact

SEQ ID NO: 627629 - DNA, 33 bp, Homo sapien
tcagccaagtaatagaaaacatgataaggcagt

SEQ ID NO: 627630 - DNA, 33 bp, Homo sapien
tcagccaagtaatagacaacatgataaggcagt

SEQ ID NO: 627631 - DNA, 33 bp, Homo sapien
tgggtttaatctcaccacttagtgcccatgcca

SEQ ID NO: 627632 - DNA, 33 bp, Homo sapien
tgggtttaatctcaccgcttagtgcccatgcca

SEQ ID NO: 627633 - DNA, 33 bp, Homo sapien
gccaatctgtaaagaaaaattgataaaatctgc

SEQ ID NO: 627634 - DNA, 33 bp, Homo sapien
gccaatctgtaaagaacaattgataaaatctgc

SEQ ID NO: 627635 - DNA, 33 bp, Homo sapien
tggattgtatctgtgaaatgaaagaacatgaat

SEQ ID NO: 627636 - DNA, 33 bp, Homo sapien
tggattgtatctgtgagatgaaagaacatgaat

SEQ ID NO: 627637 - DNA, 33 bp, Homo sapien
tcagcagtcccatttacagttttaacgcctaaa

SEQ ID NO: 627638 - DNA, 33 bp, Homo sapien
tcagcagtcccatttatagttttaacgcctaaa

SEQ ID NO: 627639 - DNA, 33 bp, Homo sapien
gtcttggataattggacgaatctatttggaact

SEQ ID NO: 627640 - DNA, 33 bp, Homo sapien
gtcttggataattggatgaatctatttggaact

SEQ ID NO: 627641 - DNA, 33 bp, Homo sapien
gacccttatcgtatcacccacattcattcaaaa

SEQ ID NO: 627642 - DNA, 33 bp, Homo sapien
gacccttatcgtatcagccacattcattcaaaa

SEQ ID NO: 627643 - DNA, 33 bp, Homo sapien
accaggacaaatctcagtatctccatcattcct

SEQ ID NO: 627644 - DNA, 33 bp, Homo sapien
accaggacaaatctcattatctccatcattcct

SEQ ID NO: 627645 - DNA, 33 bp, Homo sapien
ggagatagaggttgtacgttgcagtgaactgag

SEQ ID NO: 627646 - DNA, 33 bp, Homo sapien
ggagatagaggttgtatgttgcagtgaactgag

SEQ ID NO: 627647 - DNA, 33 bp, Homo sapien
tcaggtttctgcaagcaaagggactctgccaca

SEQ ID NO: 627648 - DNA, 33 bp, Homo sapien
tcaggtttctgcaagcgaagggactctgccaca

SEQ ID NO: 627649 - DNA, 33 bp, Homo sapien
atttgactgtacactaaaaattttcaaacataa

SEQ ID NO: 627650 - DNA, 33 bp, Homo sapien
atttgactgtacactacaaattttcaaacataa

SEQ ID NO: 627651 - DNA, 33 bp, Homo sapien
acagcctctctttacacaggtgaacttcatacg

SEQ ID NO: 627652 - DNA, 33 bp, Homo sapien
acagcctctctttacataggtgaacttcatacg

SEQ ID NO: 627653 - DNA, 33 bp, Homo sapien
atatcagaagaattacagaaatagttgatgttc

SEQ ID NO: 627654 - DNA, 33 bp, Homo sapien
atatcagaagaattacggaaatagttgatgttc

SEQ ID NO: 627655 - DNA, 33 bp, Homo sapien
cctgatgaatgtgggaacaatggataggcacac

SEQ ID NO: 627656 - DNA, 33 bp, Homo sapien
cctgatgaatgtgggagcaatggataggcacac

SEQ ID NO: 627657 - DNA, 33 bp, Homo sapien
ctgtggaaaaatctccacatagaacccatcagc

SEQ ID NO: 627658 - DNA, 33 bp, Homo sapien
ctgtggaaaaatctccgcatagaacccatcagc

SEQ ID NO: 627659 - DNA, 33 bp, Homo sapien
aaatgtaaatcagtgacgaattcctaaagatca

SEQ ID NO: 627660 - DNA, 33 bp, Homo sapien
aaatgtaaatcagtgatgaattcctaaagatca

SEQ ID NO: 627661 - DNA, 33 bp, Homo sapien
agtataattgctttagccacccagtggagagtg

SEQ ID NO: 627662 - DNA, 33 bp, Homo sapien
agtataattgctttagtcacccagtggagagtg

SEQ ID NO: 627663 - DNA, 33 bp, Homo sapien
tgtgttgaaagcaccacgtcgtgagggatccac

SEQ ID NO: 627664 - DNA, 33 bp, Homo sapien
tgtgttgaaagcaccatgtcgtgagggatccac

SEQ ID NO: 627665 - DNA, 33 bp, Homo sapien
ttgcgattgcttttgaacatgaaattttttgcc

SEQ ID NO: 627666 - DNA, 33 bp, Homo sapien
ttgcgattgcttttgatcatgaaattttttgcc

SEQ ID NO: 627667 - DNA, 33 bp, Homo sapien
aggaagtggtagtgcaatcagttgaacttggat

SEQ ID NO: 627668 - DNA, 33 bp, Homo sapien
aggaagtggtagtgcagtcagttgaacttggat

SEQ ID NO: 627669 - DNA, 33 bp, Homo sapien
aaatgcttacaaaggaagagaacctatataatt

SEQ ID NO: 627670 - DNA, 33 bp, Homo sapien
aaatgcttacaaaggatgagaacctatataatt

SEQ ID NO: 627671 - DNA, 33 bp, Homo sapien
gtaggaaagacttaaaagtgtgaaacaggccag

SEQ ID NO: 627672 - DNA, 33 bp, Homo sapien
gtaggaaagacttaaatgtgtgaaacaggccag

SEQ ID NO: 627673 - DNA, 33 bp, Homo sapien
tctactacctctctaaatctgttagtcaggata

SEQ ID NO: 627674 - DNA, 33 bp, Homo sapien
tctactacctctctaagtctgttagtcaggata

SEQ ID NO: 627675 - DNA, 33 bp, Homo sapien
atctttgggtggaccacaggtaaagcatatgac

SEQ ID NO: 627676 - DNA, 33 bp, Homo sapien
atctttgggtggaccagaggtaaagcatatgac

SEQ ID NO: 627677 - DNA, 33 bp, Homo sapien
cccatagtttggctccaagcaaacctgtggact

SEQ ID NO: 627678 - DNA, 33 bp, Homo sapien
cccatagtttggctccgagcaaacctgtggact

SEQ ID NO: 627679 - DNA, 33 bp, Homo sapien
tcttaaaggataattacagtgctgcaacaaggc

SEQ ID NO: 627680 - DNA, 33 bp, Homo sapien
tcttaaaggataattagagtgctgcaacaaggc

SEQ ID NO: 627681 - DNA, 33 bp, Homo sapien
cttagtcctgtattaacagtccaggcttacatt

SEQ ID NO: 627682 - DNA, 33 bp, Homo sapien
cttagtcctgtattaatagtccaggcttacatt

SEQ ID NO: 627683 - DNA, 33 bp, Homo sapien
cacagtatcaattacacgtttctttaggccagc

SEQ ID NO: 627684 - DNA, 33 bp, Homo sapien
cacagtatcaattacaggtttctttaggccagc

SEQ ID NO: 627685 - DNA, 33 bp, Homo sapien
ggcaggctggtactaactggttctgcaatcaaa

SEQ ID NO: 627686 - DNA, 33 bp, Homo sapien
ggcaggctggtactaattggttctgcaatcaaa

SEQ ID NO: 627687 - DNA, 33 bp, Homo sapien
atatgcagaaacaggaagtttaaggtccaataa

SEQ ID NO: 627688 - DNA, 33 bp, Homo sapien
atatgcagaaacaggaggtttaaggtccaataa

SEQ ID NO: 627689 - DNA, 33 bp, Homo sapien
agttggtctataactactagaattgcttctttg

SEQ ID NO: 627690 - DNA, 33 bp, Homo sapien
agttggtctataactattagaattgcttctttg

SEQ ID NO: 627691 - DNA, 33 bp, Homo sapien
attgtgataagcaaaactgtaagatgaccccaa

SEQ ID NO: 627692 - DNA, 33 bp, Homo sapien
attgtgataagcaaaattgtaagatgaccccaa

SEQ ID NO: 627693 - DNA, 33 bp, Homo sapien
gtcagcaaacagcaaaaacaggatgtaaacttg

SEQ ID NO: 627694 - DNA, 33 bp, Homo sapien
gtcagcaaacagcaaagacaggatgtaaacttg

SEQ ID NO: 627695 - DNA, 33 bp, Homo sapien
tttgaccgaaagtcctaaagtcttccaggtgag

SEQ ID NO: 627696 - DNA, 33 bp, Homo sapien
tttgaccgaaagtcctgaagtcttccaggtgag

SEQ ID NO: 627697 - DNA, 33 bp, Homo sapien
atgtacttaagctgaaccaccaaacttttccaa

SEQ ID NO: 627698 - DNA, 33 bp, Homo sapien
atgtacttaagctgaatcaccaaacttttccaa

SEQ ID NO: 627699 - DNA, 33 bp, Homo sapien
agtccaatatttgtgaaattcagccaagtcagc

SEQ ID NO: 627700 - DNA, 33 bp, Homo sapien
agtccaatatttgtgagattcagccaagtcagc

SEQ ID NO: 627701 - DNA, 33 bp, Homo sapien
taaactggtagcattcaatatatggtaaatggt

SEQ ID NO: 627702 - DNA, 33 bp, Homo sapien
taaactggtagcattcgatatatggtaaatggt

SEQ ID NO: 627703 - DNA, 33 bp, Homo sapien
ccaaaagaggtgcccacgttcgcctggaggttg

SEQ ID NO: 627704 - DNA, 33 bp, Homo sapien
ccaaaagaggtgcccatgttcgcctggaggttg

SEQ ID NO: 627705 - DNA, 33 bp, Homo sapien
gcctcctgggtttatgcaagaagctcaagtcta

SEQ ID NO: 627706 - DNA, 33 bp, Homo sapien
gcctcctgggtttatgtaagaagctcaagtcta

SEQ ID NO: 627707 - DNA, 33 bp, Homo sapien
tgtggactctgaaaaaggaaatgcatgtggggt

SEQ ID NO: 627708 - DNA, 33 bp, Homo sapien
tgtggactctgaaaaatgaaatgcatgtggggt

SEQ ID NO: 627709 - DNA, 33 bp, Homo sapien
ctatttcatcctcaaaatgcatctaatgtctcc

SEQ ID NO: 627710 - DNA, 33 bp, Homo sapien
ctatttcatcctcaaagtgcatctaatgtctcc

SEQ ID NO: 627711 - DNA, 33 bp, Homo sapien
aatatatctaaaaacaacaatgtgcaaacatta

SEQ ID NO: 627712 - DNA, 33 bp, Homo sapien
aatatatctaaaaacagcaatgtgcaaacatta

SEQ ID NO: 627713 - DNA, 33 bp, Homo sapien
agtgctgatttttcacggtaggatgctgtgggt

SEQ ID NO: 627714 - DNA, 33 bp, Homo sapien
agtgctgatttttcactgtaggatgctgtgggt

SEQ ID NO: 627715 - DNA, 33 bp, Homo sapien
ctcactaattgagcagccgttgggagctgtccc

SEQ ID NO: 627716 - DNA, 33 bp, Homo sapien
ctcactaattgagcagtcgttgggagctgtccc

SEQ ID NO: 627717 - DNA, 33 bp, Homo sapien
aaaaggtcattgaaaaagcaaagaaataaatca

SEQ ID NO: 627718 - DNA, 33 bp, Homo sapien
aaaaggtcattgaaaacgcaaagaaataaatca

SEQ ID NO: 627719 - DNA, 33 bp, Homo sapien
tgtgtttctgcaatcaagttttttcagtttaga

SEQ ID NO: 627720 - DNA, 33 bp, Homo sapien
tgtgtttctgcaatcacgttttttcagtttaga

SEQ ID NO: 627721 - DNA, 33 bp, Homo sapien
aaaaaaaaaagaatgaactgcttaaagaaaagc

SEQ ID NO: 627722 - DNA, 33 bp, Homo sapien
aaaaaaaaaagaatgacctgcttaaagaaaagc

SEQ ID NO: 627723 - DNA, 33 bp, Homo sapien
atccccgttttaaatcaaagtaggctgaacacc

SEQ ID NO: 627724 - DNA, 33 bp, Homo sapien
atccccgttttaaatccaagtaggctgaacacc

SEQ ID NO: 627725 - DNA, 33 bp, Homo sapien
ttcctcactgaacaacactctgacaactttaac

SEQ ID NO: 627726 - DNA, 33 bp, Homo sapien
ttcctcactgaacaacgctctgacaactttaac

SEQ ID NO: 627727 - DNA, 33 bp, Homo sapien
accaaaagcagcaacaatgtatctgaatattca

SEQ ID NO: 627728 - DNA, 33 bp, Homo sapien
accaaaagcagcaacagtgtatctgaatattca

SEQ ID NO: 627729 - DNA, 33 bp, Homo sapien
gcatgagtgagtcctgcagagaacagaagaacc

SEQ ID NO: 627730 - DNA, 33 bp, Homo sapien
gcatgagtgagtcctggagagaacagaagaacc

SEQ ID NO: 627731 - DNA, 33 bp, Homo sapien
ctttgtaatatattaccggtggtgaaagcatcc

SEQ ID NO: 627732 - DNA, 33 bp, Homo sapien
ctttgtaatatattactggtggtgaaagcatcc

SEQ ID NO: 627733 - DNA, 33 bp, Homo sapien
taacttcagaaaagacccactcatgggctggct

SEQ ID NO: 627734 - DNA, 33 bp, Homo sapien
taacttcagaaaagactcactcatgggctggct

SEQ ID NO: 627735 - DNA, 33 bp, Homo sapien
atattaagacaagtaactgagagagaaaagacc

SEQ ID NO: 627736 - DNA, 33 bp, Homo sapien
atattaagacaagtaattgagagagaaaagacc

SEQ ID NO: 627737 - DNA, 33 bp, Homo sapien
aaagcctatgtcagaacagttgttcactcacca

SEQ ID NO: 627738 - DNA, 33 bp, Homo sapien
aaagcctatgtcagaatagttgttcactcacca

SEQ ID NO: 627739 - DNA, 33 bp, Homo sapien
tttatcagaagctgtacgaagatttttgttata

SEQ ID NO: 627740 - DNA, 33 bp, Homo sapien
tttatcagaagctgtatgaagatttttgttata

SEQ ID NO: 627741 - DNA, 33 bp, Homo sapien
tcccctcttgagcttacgcttttataacaaaaa

SEQ ID NO: 627742 - DNA, 33 bp, Homo sapien
tcccctcttgagcttatgcttttataacaaaaa

SEQ ID NO: 627743 - DNA, 33 bp, Homo sapien
aaactctgtataggcactgactgctgctcagac

SEQ ID NO: 627744 - DNA, 33 bp, Homo sapien
aaactctgtataggcattgactgctgctcagac

SEQ ID NO: 627745 - DNA, 33 bp, Homo sapien
attttcattaggtgaacgtcctcagaataacat

SEQ ID NO: 627746 - DNA, 33 bp, Homo sapien
attttcattaggtgaatgtcctcagaataacat

SEQ ID NO: 627747 - DNA, 33 bp, Homo sapien
gaatcacttattgttacctaatttgtgggtaaa

SEQ ID NO: 627748 - DNA, 33 bp, Homo sapien
gaatcacttattgttatctaatttgtgggtaaa

SEQ ID NO: 627749 - DNA, 33 bp, Homo sapien
attttagcacaaaacaatatcaaggagaggagt

SEQ ID NO: 627750 - DNA, 33 bp, Homo sapien
attttagcacaaaacagtatcaaggagaggagt

SEQ ID NO: 627751 - DNA, 33 bp, Homo sapien
tcgttggtttcagaaacgcaaagcatgtgtcaa

SEQ ID NO: 627752 - DNA, 33 bp, Homo sapien
tcgttggtttcagaaatgcaaagcatgtgtcaa

SEQ ID NO: 627753 - DNA, 33 bp, Homo sapien
cttaatgatggttaaaaggaactggtgaagaaa

SEQ ID NO: 627754 - DNA, 33 bp, Homo sapien
cttaatgatggttaaatggaactggtgaagaaa

SEQ ID NO: 627755 - DNA, 33 bp, Homo sapien
cagggccaagaactacagaaactttcaatttag

SEQ ID NO: 627756 - DNA, 33 bp, Homo sapien
cagggccaagaactacggaaactttcaatttag

SEQ ID NO: 627757 - DNA, 33 bp, Homo sapien
gtggccttaaaagccaaagtaggtctagtttaa

SEQ ID NO: 627758 - DNA, 33 bp, Homo sapien
gtggccttaaaagccatagtaggtctagtttaa

SEQ ID NO: 627759 - DNA, 33 bp, Homo sapien
ttcagatggtcaggtaaaaatgagtgtgatgga

SEQ ID NO: 627760 - DNA, 33 bp, Homo sapien
ttcagatggtcaggtagaaatgagtgtgatgga

SEQ ID NO: 627761 - DNA, 33 bp, Homo sapien
tttttgcaattttaacaatccgaataggtacac

SEQ ID NO: 627762 - DNA, 33 bp, Homo sapien
tttttgcaattttaactatccgaataggtacac

SEQ ID NO: 627763 - DNA, 33 bp, Homo sapien
gaaatgagtgaggagaaaattagaaacccagac

SEQ ID NO: 627764 - DNA, 33 bp, Homo sapien
gaaatgagtgaggagagaattagaaacccagac

SEQ ID NO: 627765 - DNA, 33 bp, Homo sapien
gtccaaacagacctagacattaggtacatatgc

SEQ ID NO: 627766 - DNA, 33 bp, Homo sapien
gtccaaacagacctaggcattaggtacatatgc

SEQ ID NO: 627767 - DNA, 33 bp, Homo sapien
gattctgtggccataccgccacttatgaccttg

SEQ ID NO: 627768 - DNA, 33 bp, Homo sapien
gattctgtggccatactgccacttatgaccttg

SEQ ID NO: 627769 - DNA, 33 bp, Homo sapien
cctcttttcattagaaatacataacaggagatt

SEQ ID NO: 627770 - DNA, 33 bp, Homo sapien
cctcttttcattagaagtacataacaggagatt

SEQ ID NO: 627771 - DNA, 33 bp, Homo sapien
tcatcacatatccacacaggcagcactgattca

SEQ ID NO: 627772 - DNA, 33 bp, Homo sapien
tcatcacatatccacagaggcagcactgattca

SEQ ID NO: 627773 - DNA, 33 bp, Homo sapien
tgtaggaaatcaaaagaactcagctgaagaaga

SEQ ID NO: 627774 - DNA, 33 bp, Homo sapien
tgtaggaaatcaaaagcactcagctgaagaaga

SEQ ID NO: 627775 - DNA, 33 bp, Homo sapien
ctctccatccagccaaacagatgatctatagat

SEQ ID NO: 627776 - DNA, 33 bp, Homo sapien
ctctccatccagccaaccagatgatctatagat

SEQ ID NO: 627777 - DNA, 33 bp, Homo sapien
tagcaggcagttgaagaccacacactcctttat

SEQ ID NO: 627778 - DNA, 33 bp, Homo sapien
tagcaggcagttgaaggccacacactcctttat

SEQ ID NO: 627779 - DNA, 33 bp, Homo sapien
agaggggtatgaccagacagaggcacaaggaaa

SEQ ID NO: 627780 - DNA, 33 bp, Homo sapien
agaggggtatgaccagccagaggcacaaggaaa

SEQ ID NO: 627781 - DNA, 33 bp, Homo sapien
caatgtgaaattctagaatgggcaagatggatc

SEQ ID NO: 627782 - DNA, 33 bp, Homo sapien
caatgtgaaattctagcatgggcaagatggatc

SEQ ID NO: 627783 - DNA, 33 bp, Homo sapien
ggaacgatgggcaatacatatctatgtgtgctt

SEQ ID NO: 627784 - DNA, 33 bp, Homo sapien
ggaacgatgggcaatatatatctatgtgtgctt

SEQ ID NO: 627785 - DNA, 33 bp, Homo sapien
aggagactgaaaaccacgagtgtccaaagcctc

SEQ ID NO: 627786 - DNA, 33 bp, Homo sapien
aggagactgaaaaccatgagtgtccaaagcctc

SEQ ID NO: 627787 - DNA, 33 bp, Homo sapien
cattcacctaagctaccgctcaaccttctcccc

SEQ ID NO: 627788 - DNA, 33 bp, Homo sapien
cattcacctaagctactgctcaaccttctcccc

SEQ ID NO: 627789 - DNA, 33 bp, Homo sapien
aatgaaactcaataaaaagccatactctcctcc

SEQ ID NO: 627790 - DNA, 33 bp, Homo sapien
aatgaaactcaataaatagccatactctcctcc

SEQ ID NO: 627791 - DNA, 33 bp, Homo sapien
ttaagaggatttcctagagcagatgccatgatt

SEQ ID NO: 627792 - DNA, 33 bp, Homo sapien
ttaagaggatttcctatagcagatgccatgatt

SEQ ID NO: 627793 - DNA, 33 bp, Homo sapien
cacagactgctaagcacaattagaatgaaggtc

SEQ ID NO: 627794 - DNA, 33 bp, Homo sapien
cacagactgctaagcataattagaatgaaggtc

SEQ ID NO: 627795 - DNA, 33 bp, Homo sapien
gatcctgtgacaaggaaaagaggtggcctcatc

SEQ ID NO: 627796 - DNA, 33 bp, Homo sapien
gatcctgtgacaaggacaagaggtggcctcatc

SEQ ID NO: 627797 - DNA, 33 bp, Homo sapien
gaatatgacacaaaccaggcctctgacttctgt

SEQ ID NO: 627798 - DNA, 33 bp, Homo sapien
gaatatgacacaaaccgggcctctgacttctgt

SEQ ID NO: 627799 - DNA, 33 bp, Homo sapien
aaggttctgcctgacaagtatccccaaagcagg

SEQ ID NO: 627800 - DNA, 33 bp, Homo sapien
aaggttctgcctgacaggtatccccaaagcagg

SEQ ID NO: 627801 - DNA, 33 bp, Homo sapien
gcctgtcatgcataggcatttgatctcacaaaa

SEQ ID NO: 627802 - DNA, 33 bp, Homo sapien
gcctgtcatgcataggtatttgatctcacaaaa

SEQ ID NO: 627803 - DNA, 33 bp, Homo sapien
tacactagacgagggaatatgcacatcagcttt

SEQ ID NO: 627804 - DNA, 33 bp, Homo sapien
tacactagacgagggagtatgcacatcagcttt

SEQ ID NO: 627805 - DNA, 33 bp, Homo sapien
aaagacaaggcatagaagagtgaagggacttgc

SEQ ID NO: 627806 - DNA, 33 bp, Homo sapien
aaagacaaggcatagaggagtgaagggacttgc

SEQ ID NO: 627807 - DNA, 33 bp, Homo sapien
gaaacaagaaagaaaaaagactctgataatcaa

SEQ ID NO: 627808 - DNA, 33 bp, Homo sapien
gaaacaagaaagaaaacagactctgataatcaa

SEQ ID NO: 627809 - DNA, 33 bp, Homo sapien
gaatcccaaatgtgcacggaatgagggtgaaaa

SEQ ID NO: 627810 - DNA, 33 bp, Homo sapien
gaatcccaaatgtgcatggaatgagggtgaaaa

SEQ ID NO: 627811 - DNA, 33 bp, Homo sapien
aggggtcatctaaaacagacttaagcatacatg

SEQ ID NO: 627812 - DNA, 33 bp, Homo sapien
aggggtcatctaaaacggacttaagcatacatg

SEQ ID NO: 627813 - DNA, 33 bp, Homo sapien
gggataagggggcatcacgtctccgacttactc

SEQ ID NO: 627814 - DNA, 33 bp, Homo sapien
gggataagggggcatcgcgtctccgacttactc

SEQ ID NO: 627815 - DNA, 33 bp, Homo sapien
caaggacattcttttacgtaaccatagcacaat

SEQ ID NO: 627816 - DNA, 33 bp, Homo sapien
caaggacattcttttatgtaaccatagcacaat

SEQ ID NO: 627817 - DNA, 33 bp, Homo sapien
aatattgtaatatgtcccaaacctaaaatgcct

SEQ ID NO: 627818 - DNA, 33 bp, Homo sapien
aatattgtaatatgtctcaaacctaaaatgcct

SEQ ID NO: 627819 - DNA, 33 bp, Homo sapien
ttttaatcagaagccaaggtaacactccagggt

SEQ ID NO: 627820 - DNA, 33 bp, Homo sapien
ttttaatcagaagccagggtaacactccagggt

SEQ ID NO: 627821 - DNA, 33 bp, Homo sapien
ttgaggatgggactaaaggctaaacttcatatt

SEQ ID NO: 627822 - DNA, 33 bp, Homo sapien
ttgaggatgggactaagggctaaacttcatatt

SEQ ID NO: 627823 - DNA, 33 bp, Homo sapien
agctcaggccttaaaaattccatgtactatcta

SEQ ID NO: 627824 - DNA, 33 bp, Homo sapien
agctcaggccttaaaagttccatgtactatcta

SEQ ID NO: 627825 - DNA, 33 bp, Homo sapien
gccaagcatggaggtcccaaccataatgtgttt

SEQ ID NO: 627826 - DNA, 33 bp, Homo sapien
gccaagcatggaggtctcaaccataatgtgttt

SEQ ID NO: 627827 - DNA, 33 bp, Homo sapien
ctccaagtgacgctcacgactaaataaaaatgt

SEQ ID NO: 627828 - DNA, 33 bp, Homo sapien
ctccaagtgacgctcatgactaaataaaaatgt

SEQ ID NO: 627829 - DNA, 33 bp, Homo sapien
ttagtggaagttaaataatgttaaggataggag

SEQ ID NO: 627830 - DNA, 33 bp, Homo sapien
ttagtggaagttaaatcatgttaaggataggag

SEQ ID NO: 627831 - DNA, 33 bp, Homo sapien
caaagagggtccaaaaatcagccaatcagtctt

SEQ ID NO: 627832 - DNA, 33 bp, Homo sapien
caaagagggtccaaaagtcagccaatcagtctt

SEQ ID NO: 627833 - DNA, 33 bp, Homo sapien
ctgcatgcccctcttgaatttttgccatcacca

SEQ ID NO: 627834 - DNA, 33 bp, Homo sapien
ctgcatgcccctcttgcatttttgccatcacca

SEQ ID NO: 627835 - DNA, 33 bp, Homo sapien
tttatgccatattacactccaagaagggaacat

SEQ ID NO: 627836 - DNA, 33 bp, Homo sapien
tttatgccatattacattccaagaagggaacat

SEQ ID NO: 627837 - DNA, 33 bp, Homo sapien
aatgtttgtggctaaaaaagtctcaacacaagg

SEQ ID NO: 627838 - DNA, 33 bp, Homo sapien
aatgtttgtggctaaagaagtctcaacacaagg

SEQ ID NO: 627839 - DNA, 33 bp, Homo sapien
tgggagaaaacagttaagttcaggtcctaactc

SEQ ID NO: 627840 - DNA, 33 bp, Homo sapien
tgggagaaaacagttacgttcaggtcctaactc

SEQ ID NO: 627841 - DNA, 33 bp, Homo sapien
gaatcaattgttatcaaatgggaagatttctga

SEQ ID NO: 627842 - DNA, 33 bp, Homo sapien
gaatcaattgttatcagatgggaagatttctga

SEQ ID NO: 627843 - DNA, 33 bp, Homo sapien
tgcttcccctacccaacagaagtggttctcccg

SEQ ID NO: 627844 - DNA, 33 bp, Homo sapien
tgcttcccctacccaatagaagtggttctcccg

SEQ ID NO: 627845 - DNA, 33 bp, Homo sapien
atcatcatgagatgtaactcctttcacatatct

SEQ ID NO: 627846 - DNA, 33 bp, Homo sapien
atcatcatgagatgtacctcctttcacatatct

SEQ ID NO: 627847 - DNA, 33 bp, Homo sapien
gactccagacacttcactgaaactgtgtgaatc

SEQ ID NO: 627848 - DNA, 33 bp, Homo sapien
gactccagacacttcattgaaactgtgtgaatc

SEQ ID NO: 627849 - DNA, 33 bp, Homo sapien
aggagagtagaacagactataagaaagaatgag

SEQ ID NO: 627850 - DNA, 33 bp, Homo sapien
aggagagtagaacagattataagaaagaatgag

SEQ ID NO: 627851 - DNA, 33 bp, Homo sapien
actgagtggagcctaccggagctcaaggaggtc

SEQ ID NO: 627852 - DNA, 33 bp, Homo sapien
actgagtggagcctactggagctcaaggaggtc

SEQ ID NO: 627853 - DNA, 33 bp, Homo sapien
attaacaaaatgtccaggcactctttcgttgtt

SEQ ID NO: 627854 - DNA, 33 bp, Homo sapien
attaacaaaatgtccatgcactctttcgttgtt

SEQ ID NO: 627855 - DNA, 33 bp, Homo sapien
aggtggcagctgcacacagcagaaataatggcc

SEQ ID NO: 627856 - DNA, 33 bp, Homo sapien
aggtggcagctgcacagagcagaaataatggcc

SEQ ID NO: 627857 - DNA, 33 bp, Homo sapien
agctggattcattgaaatcttttttttcctggc

SEQ ID NO: 627858 - DNA, 33 bp, Homo sapien
agctggattcattgaattcttttttttcctggc

SEQ ID NO: 627859 - DNA, 33 bp, Homo sapien
ttcacctgctagttggccaaagccctgtctagt

SEQ ID NO: 627860 - DNA, 33 bp, Homo sapien
ttcacctgctagttggtcaaagccctgtctagt

SEQ ID NO: 627861 - DNA, 33 bp, Homo sapien
ggtgagaacggaagaaaaggatgtgacctaaat

SEQ ID NO: 627862 - DNA, 33 bp, Homo sapien
ggtgagaacggaagaacaggatgtgacctaaat

SEQ ID NO: 627863 - DNA, 33 bp, Homo sapien
tggggaaaataacagcagcaccttataaggtta

SEQ ID NO: 627864 - DNA, 33 bp, Homo sapien
tggggaaaataacagcggcaccttataaggtta

SEQ ID NO: 627865 - DNA, 33 bp, Homo sapien
actcagattttttttacaggagtctcaaagctg

SEQ ID NO: 627866 - DNA, 33 bp, Homo sapien
actcagattttttttagaggagtctcaaagctg

SEQ ID NO: 627867 - DNA, 33 bp, Homo sapien
cggctccagggcaaaaaattaaaatgaggcttt

SEQ ID NO: 627868 - DNA, 33 bp, Homo sapien
cggctccagggcaaaatattaaaatgaggcttt

SEQ ID NO: 627869 - DNA, 33 bp, Homo sapien
gtcttagtcctcctaccggaattaggttaggtt

SEQ ID NO: 627870 - DNA, 33 bp, Homo sapien
gtcttagtcctcctactggaattaggttaggtt

SEQ ID NO: 627871 - DNA, 33 bp, Homo sapien
aatctgaatcttgtcacaggaggatggaagctc

SEQ ID NO: 627872 - DNA, 33 bp, Homo sapien
aatctgaatcttgtcataggaggatggaagctc

SEQ ID NO: 627873 - DNA, 33 bp, Homo sapien
ttcaaagggcttctgacaggagagacagaaatt

SEQ ID NO: 627874 - DNA, 33 bp, Homo sapien
ttcaaagggcttctgagaggagagacagaaatt

SEQ ID NO: 627875 - DNA, 33 bp, Homo sapien
agttacatggatattgccaagtagcctgagttc

SEQ ID NO: 627876 - DNA, 33 bp, Homo sapien
agttacatggatattggcaagtagcctgagttc

SEQ ID NO: 627877 - DNA, 33 bp, Homo sapien
cttaagttttctagccccatttattttagaagg

SEQ ID NO: 627878 - DNA, 33 bp, Homo sapien
cttaagttttctagcctcatttattttagaagg

SEQ ID NO: 627879 - DNA, 33 bp, Homo sapien
atacaagcatttgatgccagtctagactctggc

SEQ ID NO: 627880 - DNA, 33 bp, Homo sapien
atacaagcatttgatgtcagtctagactctggc

SEQ ID NO: 627881 - DNA, 33 bp, Homo sapien
ggtcctccaatttccaagactcacatctcagct

SEQ ID NO: 627882 - DNA, 33 bp, Homo sapien
ggtcctccaatttccaggactcacatctcagct

SEQ ID NO: 627883 - DNA, 33 bp, Homo sapien
gttacccaaatcacaggatgttcacactgggag

SEQ ID NO: 627884 - DNA, 33 bp, Homo sapien
gttacccaaatcacagtatgttcacactgggag

SEQ ID NO: 627885 - DNA, 33 bp, Homo sapien
ctctagtggagtgttaaattttgtcaaattttt

SEQ ID NO: 627886 - DNA, 33 bp, Homo sapien
ctctagtggagtgttacattttgtcaaattttt

SEQ ID NO: 627887 - DNA, 33 bp, Homo sapien
acccttttcaccttagccagttcagtcatctat

SEQ ID NO: 627888 - DNA, 33 bp, Homo sapien
acccttttcaccttagtcagttcagtcatctat

SEQ ID NO: 627889 - DNA, 33 bp, Homo sapien
gaggctgttctcttaagaaactgtagtatagtt

SEQ ID NO: 627890 - DNA, 33 bp, Homo sapien
gaggctgttctcttaataaactgtagtatagtt

SEQ ID NO: 627891 - DNA, 33 bp, Homo sapien
tattgacactattttcaagatcacataatttac

SEQ ID NO: 627892 - DNA, 33 bp, Homo sapien
tattgacactattttcgagatcacataatttac

SEQ ID NO: 627893 - DNA, 33 bp, Homo sapien
gtcttctattttgacaagggaaatctcttccat

SEQ ID NO: 627894 - DNA, 33 bp, Homo sapien
gtcttctattttgacatgggaaatctcttccat

SEQ ID NO: 627895 - DNA, 33 bp, Homo sapien
catcttggcagtctgacaaatttaagtttttta

SEQ ID NO: 627896 - DNA, 33 bp, Homo sapien
catcttggcagtctgataaatttaagtttttta

SEQ ID NO: 627897 - DNA, 33 bp, Homo sapien
caggggttgcacagaagataccaaatgttctta

SEQ ID NO: 627898 - DNA, 33 bp, Homo sapien
caggggttgcacagaatataccaaatgttctta

SEQ ID NO: 627899 - DNA, 33 bp, Homo sapien
agcacctcatgcactcgcttttatgcttctact

SEQ ID NO: 627900 - DNA, 33 bp, Homo sapien
agcacctcatgcactctcttttatgcttctact

SEQ ID NO: 627901 - DNA, 33 bp, Homo sapien
aaataagtgaactaaactgacaacataaaaact

SEQ ID NO: 627902 - DNA, 33 bp, Homo sapien
aaataagtgaactaaattgacaacataaaaact

SEQ ID NO: 627903 - DNA, 33 bp, Homo sapien
taaggacctggtttaccatctgagaactttagt

SEQ ID NO: 627904 - DNA, 33 bp, Homo sapien
taaggacctggtttactatctgagaactttagt

SEQ ID NO: 627905 - DNA, 33 bp, Homo sapien
ttagggccattactgaaatcagcagtgtctgtg

SEQ ID NO: 627906 - DNA, 33 bp, Homo sapien
ttagggccattactgagatcagcagtgtctgtg

SEQ ID NO: 627907 - DNA, 33 bp, Homo sapien
aaatgggtcaggattaggtttgccttaaatctt

SEQ ID NO: 627908 - DNA, 33 bp, Homo sapien
aaatgggtcaggattatgtttgccttaaatctt

SEQ ID NO: 627909 - DNA, 33 bp, Homo sapien
ctaaagagaatctgaccgcatctggaaattctt

SEQ ID NO: 627910 - DNA, 33 bp, Homo sapien
ctaaagagaatctgacggcatctggaaattctt

SEQ ID NO: 627911 - DNA, 33 bp, Homo sapien
agtagcatgaaattagccatgttcatattaagg

SEQ ID NO: 627912 - DNA, 33 bp, Homo sapien
agtagcatgaaattaggcatgttcatattaagg

SEQ ID NO: 627913 - DNA, 33 bp, Homo sapien
catgaaaaaagcatcacgtccccttgactttga

SEQ ID NO: 627914 - DNA, 33 bp, Homo sapien
catgaaaaaagcatcatgtccccttgactttga

SEQ ID NO: 627915 - DNA, 33 bp, Homo sapien
caacaggaggcccaatgacaaccagaggctccc

SEQ ID NO: 627916 - DNA, 33 bp, Homo sapien
caacaggaggcccaattacaaccagaggctccc

SEQ ID NO: 627917 - DNA, 33 bp, Homo sapien
cactctttctgatgttcaaattgaggaactgtt

SEQ ID NO: 627918 - DNA, 33 bp, Homo sapien
cactctttctgatgtttaaattgaggaactgtt

SEQ ID NO: 627919 - DNA, 33 bp, Homo sapien
agatgtgactaggaaacaggaagacttaaggag

SEQ ID NO: 627920 - DNA, 33 bp, Homo sapien
agatgtgactaggaaataggaagacttaaggag

SEQ ID NO: 627921 - DNA, 33 bp, Homo sapien
tgaggacaccaattcaaatgctttcctttttcc

SEQ ID NO: 627922 - DNA, 33 bp, Homo sapien
tgaggacaccaattcagatgctttcctttttcc

SEQ ID NO: 627923 - DNA, 33 bp, Homo sapien
caagtatggcacaggcaataaaactgtctgcag

SEQ ID NO: 627924 - DNA, 33 bp, Homo sapien
caagtatggcacaggcgataaaactgtctgcag

SEQ ID NO: 627925 - DNA, 33 bp, Homo sapien
actttatggaggagaagggggtggtaaatagtt

SEQ ID NO: 627926 - DNA, 33 bp, Homo sapien
actttatggaggagaatggggtggtaaatagtt

SEQ ID NO: 627927 - DNA, 33 bp, Homo sapien
tttctgtgggcctcaaacaacactttctgcatt

SEQ ID NO: 627928 - DNA, 33 bp, Homo sapien
tttctgtgggcctcaagcaacactttctgcatt

SEQ ID NO: 627929 - DNA, 33 bp, Homo sapien
agggcatgattaactacgtttctcctgttcttc

SEQ ID NO: 627930 - DNA, 33 bp, Homo sapien
agggcatgattaactaggtttctcctgttcttc

SEQ ID NO: 627931 - DNA, 33 bp, Homo sapien
tagaggcaaagtttaccgcttttactgtcatga

SEQ ID NO: 627932 - DNA, 33 bp, Homo sapien
tagaggcaaagtttactgcttttactgtcatga

SEQ ID NO: 627933 - DNA, 33 bp, Homo sapien
tggttgtgaaaagccactcaatttgggggcagt

SEQ ID NO: 627934 - DNA, 33 bp, Homo sapien
tggttgtgaaaagccattcaatttgggggcagt

SEQ ID NO: 627935 - DNA, 33 bp, Homo sapien
tcttaagggttttccaatatgacttgggaattg

SEQ ID NO: 627936 - DNA, 33 bp, Homo sapien
tcttaagggttttccagtatgacttgggaattg

SEQ ID NO: 627937 - DNA, 33 bp, Homo sapien
acatggcatccagtgcagatgaaacaatctata

SEQ ID NO: 627938 - DNA, 33 bp, Homo sapien
acatggcatccagtgcggatgaaacaatctata

SEQ ID NO: 627939 - DNA, 33 bp, Homo sapien
ctactaaaggctccaactgacaatcctttccag

SEQ ID NO: 627940 - DNA, 33 bp, Homo sapien
ctactaaaggctccaagtgacaatcctttccag

SEQ ID NO: 627941 - DNA, 33 bp, Homo sapien
attttttccactaagcgctacgttcttaacatt

SEQ ID NO: 627942 - DNA, 33 bp, Homo sapien
attttttccactaagctctacgttcttaacatt

SEQ ID NO: 627943 - DNA, 33 bp, Homo sapien
ttcattctatccttcaatcaccttctatgttca

SEQ ID NO: 627944 - DNA, 33 bp, Homo sapien
ttcattctatccttcagtcaccttctatgttca

SEQ ID NO: 627945 - DNA, 33 bp, Homo sapien
agttactgtaaggaaacatcagttttgctttac

SEQ ID NO: 627946 - DNA, 33 bp, Homo sapien
agttactgtaaggaaatatcagttttgctttac

SEQ ID NO: 627947 - DNA, 33 bp, Homo sapien
aacagaatcctgaagacctatttgtactccatg

SEQ ID NO: 627948 - DNA, 33 bp, Homo sapien
aacagaatcctgaagagctatttgtactccatg

SEQ ID NO: 627949 - DNA, 33 bp, Homo sapien
aaaagttggctagttgaagtggagtgcacctgt

SEQ ID NO: 627950 - DNA, 33 bp, Homo sapien
aaaagttggctagttgtagtggagtgcacctgt

SEQ ID NO: 627951 - DNA, 33 bp, Homo sapien
ctcaactgcttttcaaatgaattgtcccagttt

SEQ ID NO: 627952 - DNA, 33 bp, Homo sapien
ctcaactgcttttcaagtgaattgtcccagttt

SEQ ID NO: 627953 - DNA, 33 bp, Homo sapien
tgcatagttgagaataggtactttgagtctctg

SEQ ID NO: 627954 - DNA, 33 bp, Homo sapien
tgcatagttgagaatatgtactttgagtctctg

SEQ ID NO: 627955 - DNA, 33 bp, Homo sapien
aaagggaaatccttgacagaggtagatgaggta

SEQ ID NO: 627956 - DNA, 33 bp, Homo sapien
aaagggaaatccttgatagaggtagatgaggta

SEQ ID NO: 627957 - DNA, 33 bp, Homo sapien
ttatgagactataataataaaagctaaaatgta

SEQ ID NO: 627958 - DNA, 33 bp, Homo sapien
ttatgagactataatagtaaaagctaaaatgta

SEQ ID NO: 627959 - DNA, 33 bp, Homo sapien
cagcagagagacaagtcaaaaagcaactgtagt

SEQ ID NO: 627960 - DNA, 33 bp, Homo sapien
cagcagagagacaagtgaaaaagcaactgtagt

SEQ ID NO: 627961 - DNA, 33 bp, Homo sapien
ttggataaacagaaagaatgtgtcactccctcc

SEQ ID NO: 627962 - DNA, 33 bp, Homo sapien
ttggataaacagaaaggatgtgtcactccctcc

SEQ ID NO: 627963 - DNA, 33 bp, Homo sapien
cgagtgaggttggccaaagatacctagcatttt

SEQ ID NO: 627964 - DNA, 33 bp, Homo sapien
cgagtgaggttggccagagatacctagcatttt

SEQ ID NO: 627965 - DNA, 33 bp, Homo sapien
acactttttcccgagaatccaccataagtgggt

SEQ ID NO: 627966 - DNA, 33 bp, Homo sapien
acactttttcccgagagtccaccataagtgggt

SEQ ID NO: 627967 - DNA, 33 bp, Homo sapien
tacagtcacgtggtacaaaggattaatttctct

SEQ ID NO: 627968 - DNA, 33 bp, Homo sapien
tacagtcacgtggtacgaaggattaatttctct

SEQ ID NO: 627969 - DNA, 33 bp, Homo sapien
tgttcccttgttcaaactgaggccaatccaaag

SEQ ID NO: 627970 - DNA, 33 bp, Homo sapien
tgttcccttgttcaaattgaggccaatccaaag

SEQ ID NO: 627971 - DNA, 33 bp, Homo sapien
ttgcccgatgaagcacagcaaggagtcggaaga

SEQ ID NO: 627972 - DNA, 33 bp, Homo sapien
ttgcccgatgaagcacggcaaggagtcggaaga

SEQ ID NO: 627973 - DNA, 33 bp, Homo sapien
tgcagagctttgtctcactggcctgttttctca

SEQ ID NO: 627974 - DNA, 33 bp, Homo sapien
tgcagagctttgtctcgctggcctgttttctca

SEQ ID NO: 627975 - DNA, 33 bp, Homo sapien
tgatgatatttggagacaaggcctttggaagat

SEQ ID NO: 627976 - DNA, 33 bp, Homo sapien
tgatgatatttggagataaggcctttggaagat

SEQ ID NO: 627977 - DNA, 33 bp, Homo sapien
aaatacacagtcacacactagaccaccactcac

SEQ ID NO: 627978 - DNA, 33 bp, Homo sapien
aaatacacagtcacaccctagaccaccactcac

SEQ ID NO: 627979 - DNA, 33 bp, Homo sapien
tttctgtttttacaaacggcacctcttgcaggg

SEQ ID NO: 627980 - DNA, 33 bp, Homo sapien
tttctgtttttacaaatggcacctcttgcaggg

SEQ ID NO: 627981 - DNA, 33 bp, Homo sapien
cacagaaacattgtacagctatgcaaagtatgc

SEQ ID NO: 627982 - DNA, 33 bp, Homo sapien
cacagaaacattgtacggctatgcaaagtatgc

SEQ ID NO: 627983 - DNA, 33 bp, Homo sapien
gggctattgcggaaaacgagcgggtcatgagcc

SEQ ID NO: 627984 - DNA, 33 bp, Homo sapien
gggctattgcggaaaatgagcgggtcatgagcc

SEQ ID NO: 627985 - DNA, 33 bp, Homo sapien
catatcacgccacaaaaatcacaacctcacaca

SEQ ID NO: 627986 - DNA, 33 bp, Homo sapien
catatcacgccacaaagatcacaacctcacaca

SEQ ID NO: 627987 - DNA, 33 bp, Homo sapien
gctccaactcatcaggaacacgctcccttgctt

SEQ ID NO: 627988 - DNA, 33 bp, Homo sapien
gctccaactcatcaggtacacgctcccttgctt

SEQ ID NO: 627989 - DNA, 33 bp, Homo sapien
cagaccaaacggaggaccatctaggttaactct

SEQ ID NO: 627990 - DNA, 33 bp, Homo sapien
cagaccaaacggaggatcatctaggttaactct

SEQ ID NO: 627991 - DNA, 33 bp, Homo sapien
ccttcttgcttgctagaatactcacttagaagt

SEQ ID NO: 627992 - DNA, 33 bp, Homo sapien
ccttcttgcttgctaggatactcacttagaagt

SEQ ID NO: 627993 - DNA, 33 bp, Homo sapien
cttctgggccaaagccacgctgatggcaggaaa

SEQ ID NO: 627994 - DNA, 33 bp, Homo sapien
cttctgggccaaagccgcgctgatggcaggaaa

SEQ ID NO: 627995 - DNA, 33 bp, Homo sapien
taagagaggtgataccacttgcccagcatggta

SEQ ID NO: 627996 - DNA, 33 bp, Homo sapien
taagagaggtgataccgcttgcccagcatggta

SEQ ID NO: 627997 - DNA, 33 bp, Homo sapien
aaaggtgtggactagcaaggctcaggtttgtga

SEQ ID NO: 627998 - DNA, 33 bp, Homo sapien
aaaggtgtggactagcgaggctcaggtttgtga

SEQ ID NO: 627999 - DNA, 33 bp, Homo sapien
cccgtcccagtccttacgctaaaccactgtcac

SEQ ID NO: 628000 - DNA, 33 bp, Homo sapien
cccgtcccagtccttatgctaaaccactgtcac

SEQ ID NO: 628001 - DNA, 33 bp, Homo sapien
ttatagtgaaaagtgccatttgagtcgaaataa

SEQ ID NO: 628002 - DNA, 33 bp, Homo sapien
ttatagtgaaaagtgctatttgagtcgaaataa

SEQ ID NO: 628003 - DNA, 33 bp, Homo sapien
cagagcacagttagaagcttacagacctcagcc

SEQ ID NO: 628004 - DNA, 33 bp, Homo sapien
cagagcacagttagaatcttacagacctcagcc

SEQ ID NO: 628005 - DNA, 33 bp, Homo sapien
agaaactcaaaatgacccataatccattcccta

SEQ ID NO: 628006 - DNA, 33 bp, Homo sapien
agaaactcaaaatgacgcataatccattcccta

SEQ ID NO: 628007 - DNA, 33 bp, Homo sapien
atgtgcaattgtgttacgtgcgtagattatata

SEQ ID NO: 628008 - DNA, 33 bp, Homo sapien
atgtgcaattgtgttatgtgcgtagattatata

SEQ ID NO: 628009 - DNA, 33 bp, Homo sapien
tcattccatcattaaggattgcattgcacgtaa

SEQ ID NO: 628010 - DNA, 33 bp, Homo sapien
tcattccatcattaagtattgcattgcacgtaa

SEQ ID NO: 628011 - DNA, 33 bp, Homo sapien
agggaagggacatgagcaagttgccctttacag

SEQ ID NO: 628012 - DNA, 33 bp, Homo sapien
agggaagggacatgagtaagttgccctttacag

SEQ ID NO: 628013 - DNA, 33 bp, Homo sapien
ccactcctataccatgacatcagtgttcacatt

SEQ ID NO: 628014 - DNA, 33 bp, Homo sapien
ccactcctataccatgtcatcagtgttcacatt

SEQ ID NO: 628015 - DNA, 33 bp, Homo sapien
taaggtggctccttcacatagtatctgggtccc

SEQ ID NO: 628016 - DNA, 33 bp, Homo sapien
taaggtggctccttcatatagtatctgggtccc

SEQ ID NO: 628017 - DNA, 33 bp, Homo sapien
catttcacacttttacaagttttacacccaatt

SEQ ID NO: 628018 - DNA, 33 bp, Homo sapien
catttcacacttttaccagttttacacccaatt

SEQ ID NO: 628019 - DNA, 33 bp, Homo sapien
gacagtgcacagctagcaggagatgcccagtat

SEQ ID NO: 628020 - DNA, 33 bp, Homo sapien
gacagtgcacagctaggaggagatgcccagtat

SEQ ID NO: 628021 - DNA, 33 bp, Homo sapien
ctctctctgtgcttcactagaggtataaatact

SEQ ID NO: 628022 - DNA, 33 bp, Homo sapien
ctctctctgtgcttcattagaggtataaatact

SEQ ID NO: 628023 - DNA, 33 bp, Homo sapien
attttaaagccatctcaagaggcatcttctaca

SEQ ID NO: 628024 - DNA, 33 bp, Homo sapien
attttaaagccatctcgagaggcatcttctaca

SEQ ID NO: 628025 - DNA, 33 bp, Homo sapien
atgctggagagaaagactcggcctcaggggttc

SEQ ID NO: 628026 - DNA, 33 bp, Homo sapien
atgctggagagaaagattcggcctcaggggttc

SEQ ID NO: 628027 - DNA, 33 bp, Homo sapien
ttcccatcaaaagtgaacaaaggttccgatttg

SEQ ID NO: 628028 - DNA, 33 bp, Homo sapien
ttcccatcaaaagtgatcaaaggttccgatttg

SEQ ID NO: 628029 - DNA, 33 bp, Homo sapien
tctggctacactgaaaagcatcaaataacaagg

SEQ ID NO: 628030 - DNA, 33 bp, Homo sapien
tctggctacactgaaaggcatcaaataacaagg

SEQ ID NO: 628031 - DNA, 33 bp, Homo sapien
aggcaagatgttttcacaaggaagaagggatga

SEQ ID NO: 628032 - DNA, 33 bp, Homo sapien
aggcaagatgttttcataaggaagaagggatga

SEQ ID NO: 628033 - DNA, 33 bp, Homo sapien
acttctttcactgacaaatgaagagaagtatgc

SEQ ID NO: 628034 - DNA, 33 bp, Homo sapien
acttctttcactgacagatgaagagaagtatgc

SEQ ID NO: 628035 - DNA, 33 bp, Homo sapien
cctgtgataactcaccactatccaaagattcct

SEQ ID NO: 628036 - DNA, 33 bp, Homo sapien
cctgtgataactcaccgctatccaaagattcct

SEQ ID NO: 628037 - DNA, 33 bp, Homo sapien
aggcccaagttccaaccgcaatgccagcactgt

SEQ ID NO: 628038 - DNA, 33 bp, Homo sapien
aggcccaagttccaactgcaatgccagcactgt

SEQ ID NO: 628039 - DNA, 33 bp, Homo sapien
agctgcactctggaaccgagcttgggattagca

SEQ ID NO: 628040 - DNA, 33 bp, Homo sapien
agctgcactctggaactgagcttgggattagca

SEQ ID NO: 628041 - DNA, 33 bp, Homo sapien
tcctctccaaaactcacgttgaaacttcatctc

SEQ ID NO: 628042 - DNA, 33 bp, Homo sapien
tcctctccaaaactcatgttgaaacttcatctc

SEQ ID NO: 628043 - DNA, 33 bp, Homo sapien
atggtctgccttgtaccaggccctgtgctggtt

SEQ ID NO: 628044 - DNA, 33 bp, Homo sapien
atggtctgccttgtactaggccctgtgctggtt

SEQ ID NO: 628045 - DNA, 33 bp, Homo sapien
acacctgagaactcacactttctgggagggcag

SEQ ID NO: 628046 - DNA, 33 bp, Homo sapien
acacctgagaactcacgctttctgggagggcag

SEQ ID NO: 628047 - DNA, 33 bp, Homo sapien
caccctgatttgtttacgtcttgcacatgttca

SEQ ID NO: 628048 - DNA, 33 bp, Homo sapien
caccctgatttgtttatgtcttgcacatgttca

SEQ ID NO: 628049 - DNA, 33 bp, Homo sapien
catttctcacctatcacattggcacattttgtt

SEQ ID NO: 628050 - DNA, 33 bp, Homo sapien
catttctcacctatcatattggcacattttgtt

SEQ ID NO: 628051 - DNA, 33 bp, Homo sapien
gtgaatacataaaagtcaattgcatttctgtaa

SEQ ID NO: 628052 - DNA, 33 bp, Homo sapien
gtgaatacataaaagttaattgcatttctgtaa

SEQ ID NO: 628053 - DNA, 33 bp, Homo sapien
aaaaccccaaagaatccacagagaatcagaaac

SEQ ID NO: 628054 - DNA, 33 bp, Homo sapien
aaaaccccaaagaatctacagagaatcagaaac

SEQ ID NO: 628055 - DNA, 33 bp, Homo sapien
aacttgccgttcaacaagctttcatttttaaaa

SEQ ID NO: 628056 - DNA, 33 bp, Homo sapien
aacttgccgttcaacaggctttcatttttaaaa

SEQ ID NO: 628057 - DNA, 33 bp, Homo sapien
tctgcaagactctcacagaggtacatcaagcaa

SEQ ID NO: 628058 - DNA, 33 bp, Homo sapien
tctgcaagactctcacggaggtacatcaagcaa

SEQ ID NO: 628059 - DNA, 33 bp, Homo sapien
gggcccccacctgtccaaagctgagcagctgaa

SEQ ID NO: 628060 - DNA, 33 bp, Homo sapien
gggcccccacctgtccgaagctgagcagctgaa

SEQ ID NO: 628061 - DNA, 33 bp, Homo sapien
acataccaagtcaaacggtgggtcagacacaga

SEQ ID NO: 628062 - DNA, 33 bp, Homo sapien
acataccaagtcaaactgtgggtcagacacaga

SEQ ID NO: 628063 - DNA, 33 bp, Homo sapien
ctaggtggccaaagcacgaatacactcagagca

SEQ ID NO: 628064 - DNA, 33 bp, Homo sapien
ctaggtggccaaagcatgaatacactcagagca

SEQ ID NO: 628065 - DNA, 33 bp, Homo sapien
atacactcagagcaaaaacaaggacaatgattc

SEQ ID NO: 628066 - DNA, 33 bp, Homo sapien
atacactcagagcaaagacaaggacaatgattc

SEQ ID NO: 628067 - DNA, 33 bp, Homo sapien
tctcctaatcatatacacagcttccatcccgct

SEQ ID NO: 628068 - DNA, 33 bp, Homo sapien
tctcctaatcatatacgcagcttccatcccgct

SEQ ID NO: 628069 - DNA, 33 bp, Homo sapien
gtgagcaccgggcccacgccattatcctgggac

SEQ ID NO: 628070 - DNA, 33 bp, Homo sapien
gtgagcaccgggcccatgccattatcctgggac

SEQ ID NO: 628071 - DNA, 33 bp, Homo sapien
atccctgtcagcaacacggccccaacagcgaaa

SEQ ID NO: 628072 - DNA, 33 bp, Homo sapien
atccctgtcagcaacatggccccaacagcgaaa

SEQ ID NO: 628073 - DNA, 33 bp, Homo sapien
tgccagtggggaagaccgtaggcgatccctgtc

SEQ ID NO: 628074 - DNA, 33 bp, Homo sapien
tgccagtggggaagactgtaggcgatccctgtc

SEQ ID NO: 628075 - DNA, 33 bp, Homo sapien
gtgagcaagcgagtacagggcatgtacagggct

SEQ ID NO: 628076 - DNA, 33 bp, Homo sapien
gtgagcaagcgagtaccgggcatgtacagggct

SEQ ID NO: 628077 - DNA, 33 bp, Homo sapien
gacccacgaatggacccgagagtgatggtattt

SEQ ID NO: 628078 - DNA, 33 bp, Homo sapien
gacccacgaatggacctgagagtgatggtattt

SEQ ID NO: 628079 - DNA, 33 bp, Homo sapien
ggtggcacatattaaccctcctataatctctct

SEQ ID NO: 628080 - DNA, 33 bp, Homo sapien
ggtggcacatattaactctcctataatctctct

SEQ ID NO: 628081 - DNA, 33 bp, Homo sapien
ctgatctcgcgtttcccgcagcagggaggagag

SEQ ID NO: 628082 - DNA, 33 bp, Homo sapien
ctgatctcgcgtttccggcagcagggaggagag

SEQ ID NO: 628083 - DNA, 33 bp, Homo sapien
attgcacctattcttaaaaatgttttgaaatgt

SEQ ID NO: 628084 - DNA, 33 bp, Homo sapien
attgcacctattcttacaaatgttttgaaatgt

SEQ ID NO: 628085 - DNA, 33 bp, Homo sapien
cttcaagagaacagggaaagtgcccaacaggtg

SEQ ID NO: 628086 - DNA, 33 bp, Homo sapien
cttcaagagaacaggggaagtgcccaacaggtg

SEQ ID NO: 628087 - DNA, 33 bp, Homo sapien
ttttctgtgcagtggtcaagaataacccattgg

SEQ ID NO: 628088 - DNA, 33 bp, Homo sapien
ttttctgtgcagtggtgaagaataacccattgg

SEQ ID NO: 628089 - DNA, 33 bp, Homo sapien
cactgagatgttaagaactcaacttaaataaag

SEQ ID NO: 628090 - DNA, 33 bp, Homo sapien
cactgagatgttaagagctcaacttaaataaag

SEQ ID NO: 628091 - DNA, 33 bp, Homo sapien
aagccctacctcccagaaaggttctagtgcagg

SEQ ID NO: 628092 - DNA, 33 bp, Homo sapien
aagccctacctcccaggaaggttctagtgcagg

SEQ ID NO: 628093 - DNA, 33 bp, Homo sapien
tatgaatgacaggttgcatttttgttttgaaaa

SEQ ID NO: 628094 - DNA, 33 bp, Homo sapien
tatgaatgacaggttgtatttttgttttgaaaa

SEQ ID NO: 628095 - DNA, 33 bp, Homo sapien
ctttgcaatgtgactgcaattcctcccatcaag

SEQ ID NO: 628096 - DNA, 33 bp, Homo sapien
ctttgcaatgtgactgtaattcctcccatcaag

SEQ ID NO: 628097 - DNA, 33 bp, Homo sapien
ctaggacttgagagaagtcgaagcccgaagcct

SEQ ID NO: 628098 - DNA, 33 bp, Homo sapien
ctaggacttgagagaattcgaagcccgaagcct

SEQ ID NO: 628099 - DNA, 33 bp, Homo sapien
tgaggatttgaaaatacagtaatccagcatgga

SEQ ID NO: 628100 - DNA, 33 bp, Homo sapien
tgaggatttgaaaatatagtaatccagcatgga

SEQ ID NO: 628101 - DNA, 33 bp, Homo sapien
agatagcgctggagaaaagatggtagagtcaag

SEQ ID NO: 628102 - DNA, 33 bp, Homo sapien
agatagcgctggagaagagatggtagagtcaag

SEQ ID NO: 628103 - DNA, 33 bp, Homo sapien
gcctgaagaatagggacgaaagtatcctattca

SEQ ID NO: 628104 - DNA, 33 bp, Homo sapien
gcctgaagaatagggatgaaagtatcctattca

SEQ ID NO: 628105 - DNA, 33 bp, Homo sapien
gttttacaaaaggcatcaaaatccagaccaata

SEQ ID NO: 628106 - DNA, 33 bp, Homo sapien
gttttacaaaaggcattaaaatccagaccaata

SEQ ID NO: 628107 - DNA, 33 bp, Homo sapien
tttctcacactcacacaacgtagccacagttac

SEQ ID NO: 628108 - DNA, 33 bp, Homo sapien
tttctcacactcacaccacgtagccacagttac

SEQ ID NO: 628109 - DNA, 33 bp, Homo sapien
tcctacacagaatgaacaattacctccacaaag

SEQ ID NO: 628110 - DNA, 33 bp, Homo sapien
tcctacacagaatgaataattacctccacaaag

SEQ ID NO: 628111 - DNA, 33 bp, Homo sapien
aatgtctgcttatcaacgttttcagtcactgca

SEQ ID NO: 628112 - DNA, 33 bp, Homo sapien
aatgtctgcttatcaatgttttcagtcactgca

SEQ ID NO: 628113 - DNA, 33 bp, Homo sapien
gcttctgacacacacaaagcatgaaaaaaaatt

SEQ ID NO: 628114 - DNA, 33 bp, Homo sapien
gcttctgacacacacacagcatgaaaaaaaatt

SEQ ID NO: 628115 - DNA, 33 bp, Homo sapien
aggttgctgcaggaacccttggatgagcctaag

SEQ ID NO: 628116 - DNA, 33 bp, Homo sapien
aggttgctgcaggaactcttggatgagcctaag

SEQ ID NO: 628117 - DNA, 33 bp, Homo sapien
aagagtgtggacagaacgggggtagagaatgca

SEQ ID NO: 628118 - DNA, 33 bp, Homo sapien
aagagtgtggacagaatgggggtagagaatgca

SEQ ID NO: 628119 - DNA, 33 bp, Homo sapien
gaaaacttcccatgaactcccacgaggctcaga

SEQ ID NO: 628120 - DNA, 33 bp, Homo sapien
gaaaacttcccatgaattcccacgaggctcaga

SEQ ID NO: 628121 - DNA, 33 bp, Homo sapien
tggtttgttctctctaccttaaatctcaagatc

SEQ ID NO: 628122 - DNA, 33 bp, Homo sapien
tggtttgttctctctatcttaaatctcaagatc

SEQ ID NO: 628123 - DNA, 33 bp, Homo sapien
gagccccaggtagagacagggagcttgggtttc

SEQ ID NO: 628124 - DNA, 33 bp, Homo sapien
gagccccaggtagagagagggagcttgggtttc

SEQ ID NO: 628125 - DNA, 33 bp, Homo sapien
tacacaggaggctgacacagaggagccccaggt

SEQ ID NO: 628126 - DNA, 33 bp, Homo sapien
tacacaggaggctgacgcagaggagccccaggt

SEQ ID NO: 628127 - DNA, 33 bp, Homo sapien
tttttcaaggtgcccacacttcacattgctcaa

SEQ ID NO: 628128 - DNA, 33 bp, Homo sapien
tttttcaaggtgcccatacttcacattgctcaa

SEQ ID NO: 628129 - DNA, 33 bp, Homo sapien
tttttatcacaaaagagtcatgcaaaacagaaa

SEQ ID NO: 628130 - DNA, 33 bp, Homo sapien
tttttatcacaaaagattcatgcaaaacagaaa

SEQ ID NO: 628131 - DNA, 33 bp, Homo sapien
ttataaaacatattaaccaaacatctgatgatc

SEQ ID NO: 628132 - DNA, 33 bp, Homo sapien
ttataaaacatattaatcaaacatctgatgatc

SEQ ID NO: 628133 - DNA, 33 bp, Homo sapien
ggtcatatgtttctggcataatgaaggaccaga

SEQ ID NO: 628134 - DNA, 33 bp, Homo sapien
ggtcatatgtttctggtataatgaaggaccaga

SEQ ID NO: 628135 - DNA, 33 bp, Homo sapien
tctgtggtataattcacgttccagagccccacc

SEQ ID NO: 628136 - DNA, 33 bp, Homo sapien
tctgtggtataattcatgttccagagccccacc

SEQ ID NO: 628137 - DNA, 33 bp, Homo sapien
ggaggtagtgctgcaaaccattagtagccagta

SEQ ID NO: 628138 - DNA, 33 bp, Homo sapien
ggaggtagtgctgcaagccattagtagccagta

SEQ ID NO: 628139 - DNA, 33 bp, Homo sapien
gagcatgtttcatgggcataatggtgaagtttc

SEQ ID NO: 628140 - DNA, 33 bp, Homo sapien
gagcatgtttcatggggataatggtgaagtttc

SEQ ID NO: 628141 - DNA, 33 bp, Homo sapien
catatgtcttctgaccccttccattccacctcg

SEQ ID NO: 628142 - DNA, 33 bp, Homo sapien
catatgtcttctgacctcttccattccacctcg

SEQ ID NO: 628143 - DNA, 33 bp, Homo sapien
ttaagggaagctccccaatctaggcgagttctg

SEQ ID NO: 628144 - DNA, 33 bp, Homo sapien
ttaagggaagctccccgatctaggcgagttctg

SEQ ID NO: 628145 - DNA, 33 bp, Homo sapien
caggtgagagaccatcagaatttgtttgtagca

SEQ ID NO: 628146 - DNA, 33 bp, Homo sapien
caggtgagagaccatcggaatttgtttgtagca

SEQ ID NO: 628147 - DNA, 33 bp, Homo sapien
cacatccagagctgcaatatccaatacagtagc

SEQ ID NO: 628148 - DNA, 33 bp, Homo sapien
cacatccagagctgcactatccaatacagtagc

SEQ ID NO: 628149 - DNA, 33 bp, Homo sapien
catatacattaatatacgacagattgaatagat

SEQ ID NO: 628150 - DNA, 33 bp, Homo sapien
catatacattaatataggacagattgaatagat

SEQ ID NO: 628151 - DNA, 33 bp, Homo sapien
aaagaatgcttttagcgaatctacaatctatag

SEQ ID NO: 628152 - DNA, 33 bp, Homo sapien
aaagaatgcttttagctaatctacaatctatag

SEQ ID NO: 628153 - DNA, 33 bp, Homo sapien
atgtccctcagagtcactaagtgtagcgaagcg

SEQ ID NO: 628154 - DNA, 33 bp, Homo sapien
atgtccctcagagtcattaagtgtagcgaagcg

SEQ ID NO: 628155 - DNA, 33 bp, Homo sapien
gatgtctctgactaagacagtggtaggtactgg

SEQ ID NO: 628156 - DNA, 33 bp, Homo sapien
gatgtctctgactaaggcagtggtaggtactgg

SEQ ID NO: 628157 - DNA, 33 bp, Homo sapien
gcctttgggcatgttacgatcctgaaaatatgt

SEQ ID NO: 628158 - DNA, 33 bp, Homo sapien
gcctttgggcatgttatgatcctgaaaatatgt

SEQ ID NO: 628159 - DNA, 33 bp, Homo sapien
ttgtttgaatatcagcacttcaaggcaagtagt

SEQ ID NO: 628160 - DNA, 33 bp, Homo sapien
ttgtttgaatatcagcgcttcaaggcaagtagt

SEQ ID NO: 628161 - DNA, 33 bp, Homo sapien
gacagcaaacagacaaacatttacccggggcaa

SEQ ID NO: 628162 - DNA, 33 bp, Homo sapien
gacagcaaacagacaagcatttacccggggcaa

SEQ ID NO: 628163 - DNA, 33 bp, Homo sapien
taacacatttccagtcactaatgctcaaatgta

SEQ ID NO: 628164 - DNA, 33 bp, Homo sapien
taacacatttccagtcgctaatgctcaaatgta

SEQ ID NO: 628165 - DNA, 33 bp, Homo sapien
agttccttgaagtcaacagttgcttttatccat

SEQ ID NO: 628166 - DNA, 33 bp, Homo sapien
agttccttgaagtcaatagttgcttttatccat

SEQ ID NO: 628167 - DNA, 33 bp, Homo sapien
aagtaactgttaataaacgacaggtcacaagtt

SEQ ID NO: 628168 - DNA, 33 bp, Homo sapien
aagtaactgttaataagcgacaggtcacaagtt

SEQ ID NO: 628169 - DNA, 33 bp, Homo sapien
ggaaggagggaggaaacaagtaatccaaattaa

SEQ ID NO: 628170 - DNA, 33 bp, Homo sapien
ggaaggagggaggaaataagtaatccaaattaa

SEQ ID NO: 628171 - DNA, 33 bp, Homo sapien
atccatatttctggagaagcatatggtttttca

SEQ ID NO: 628172 - DNA, 33 bp, Homo sapien
atccatatttctggaggagcatatggtttttca

SEQ ID NO: 628173 - DNA, 33 bp, Homo sapien
ttgaatgagatgcatacataaagctacttacat

SEQ ID NO: 628174 - DNA, 33 bp, Homo sapien
ttgaatgagatgcatatataaagctacttacat

SEQ ID NO: 628175 - DNA, 33 bp, Homo sapien
caaggctttaaggatcaagtctcaggcatatag

SEQ ID NO: 628176 - DNA, 33 bp, Homo sapien
caaggctttaaggatcgagtctcaggcatatag

SEQ ID NO: 628177 - DNA, 33 bp, Homo sapien
tgtgtttttctgaatacccaactaggacctgtc

SEQ ID NO: 628178 - DNA, 33 bp, Homo sapien
tgtgtttttctgaatatccaactaggacctgtc

SEQ ID NO: 628179 - DNA, 33 bp, Homo sapien
aggaactaattattaagggagctttgacacctg

SEQ ID NO: 628180 - DNA, 33 bp, Homo sapien
aggaactaattattaatggagctttgacacctg

SEQ ID NO: 628181 - DNA, 33 bp, Homo sapien
atgaatggggattgacgattaaatgggtagagt

SEQ ID NO: 628182 - DNA, 33 bp, Homo sapien
atgaatggggattgactattaaatgggtagagt

SEQ ID NO: 628183 - DNA, 33 bp, Homo sapien
ttcaacctaagtgcagacagaattagcctccac

SEQ ID NO: 628184 - DNA, 33 bp, Homo sapien
ttcaacctaagtgcaggcagaattagcctccac

SEQ ID NO: 628185 - DNA, 33 bp, Homo sapien
cttcttgattgaggccaagagtctgagggggct

SEQ ID NO: 628186 - DNA, 33 bp, Homo sapien
cttcttgattgaggccgagagtctgagggggct

SEQ ID NO: 628187 - DNA, 33 bp, Homo sapien
tttgattccagagggacgcaatgagacactagg

SEQ ID NO: 628188 - DNA, 33 bp, Homo sapien
tttgattccagagggatgcaatgagacactagg

SEQ ID NO: 628189 - DNA, 33 bp, Homo sapien
gtaggcgcactttggtcacatttgagcgggttt

SEQ ID NO: 628190 - DNA, 33 bp, Homo sapien
gtaggcgcactttggtgacatttgagcgggttt

SEQ ID NO: 628191 - DNA, 33 bp, Homo sapien
agcagagggattcctacgcaaatgacttgttga

SEQ ID NO: 628192 - DNA, 33 bp, Homo sapien
agcagagggattcctatgcaaatgacttgttga

SEQ ID NO: 628193 - DNA, 33 bp, Homo sapien
cttggcactaggggtaaggcatgtgataccatt

SEQ ID NO: 628194 - DNA, 33 bp, Homo sapien
cttggcactaggggtagggcatgtgataccatt

SEQ ID NO: 628195 - DNA, 33 bp, Homo sapien
gggaggcagaggtgaccagtcagagatggtttg

SEQ ID NO: 628196 - DNA, 33 bp, Homo sapien
gggaggcagaggtgacgagtcagagatggtttg

SEQ ID NO: 628197 - DNA, 33 bp, Homo sapien
agaatgaggagaggaaactagtgctgctcttca

SEQ ID NO: 628198 - DNA, 33 bp, Homo sapien
agaatgaggagaggaacctagtgctgctcttca

SEQ ID NO: 628199 - DNA, 33 bp, Homo sapien
ttcctctctcttctagaaacattcctgagtggg

SEQ ID NO: 628200 - DNA, 33 bp, Homo sapien
ttcctctctcttctaggaacattcctgagtggg

SEQ ID NO: 628201 - DNA, 33 bp, Homo sapien
cagtctcatacaagcaaggggcaaagtaagtct

SEQ ID NO: 628202 - DNA, 33 bp, Homo sapien
cagtctcatacaagcagggggcaaagtaagtct

SEQ ID NO: 628203 - DNA, 33 bp, Homo sapien
agttaaaggaattagcaaaccaagatggagaca

SEQ ID NO: 628204 - DNA, 33 bp, Homo sapien
agttaaaggaattagcgaaccaagatggagaca

SEQ ID NO: 628205 - DNA, 33 bp, Homo sapien
gcctgtccacagattacgctttgtttcacaaaa

SEQ ID NO: 628206 - DNA, 33 bp, Homo sapien
gcctgtccacagattatgctttgtttcacaaaa

SEQ ID NO: 628207 - DNA, 33 bp, Homo sapien
gagttttcctctttcactccgggtgtgtgtggg

SEQ ID NO: 628208 - DNA, 33 bp, Homo sapien
gagttttcctctttcattccgggtgtgtgtggg

SEQ ID NO: 628209 - DNA, 33 bp, Homo sapien
cacggtggggcctacactgaacctaaatttttt

SEQ ID NO: 628210 - DNA, 33 bp, Homo sapien
cacggtggggcctacattgaacctaaatttttt

SEQ ID NO: 628211 - DNA, 33 bp, Homo sapien
ctcagaagtccttgaaatcatgaggtggaggtg

SEQ ID NO: 628212 - DNA, 33 bp, Homo sapien
ctcagaagtccttgaagtcatgaggtggaggtg

SEQ ID NO: 628213 - DNA, 33 bp, Homo sapien
cactcagccttcaaaacgcctttgatggttgag

SEQ ID NO: 628214 - DNA, 33 bp, Homo sapien
cactcagccttcaaaatgcctttgatggttgag

SEQ ID NO: 628215 - DNA, 33 bp, Homo sapien
caactcaaattaatgccagaagttggcaggact

SEQ ID NO: 628216 - DNA, 33 bp, Homo sapien
caactcaaattaatgctagaagttggcaggact

SEQ ID NO: 628217 - DNA, 33 bp, Homo sapien
acactgtttttagaaagtaagtccaagcaaaag

SEQ ID NO: 628218 - DNA, 33 bp, Homo sapien
acactgtttttagaaattaagtccaagcaaaag

SEQ ID NO: 628219 - DNA, 33 bp, Homo sapien
gaggtgctagcatctacgggatgagcgactgtg

SEQ ID NO: 628220 - DNA, 33 bp, Homo sapien
gaggtgctagcatctaggggatgagcgactgtg

SEQ ID NO: 628221 - DNA, 33 bp, Homo sapien
atctgggccctggccacgcatttgtcttgtgtc

SEQ ID NO: 628222 - DNA, 33 bp, Homo sapien
atctgggccctggccatgcatttgtcttgtgtc

SEQ ID NO: 628223 - DNA, 33 bp, Homo sapien
cagagagtgggataaaagctcatggcttgccta

SEQ ID NO: 628224 - DNA, 33 bp, Homo sapien
cagagagtgggataaaggctcatggcttgccta

SEQ ID NO: 628225 - DNA, 33 bp, Homo sapien
tggcaagcttgatgaacagcaaaggaaaagtga

SEQ ID NO: 628226 - DNA, 33 bp, Homo sapien
tggcaagcttgatgaagagcaaaggaaaagtga

SEQ ID NO: 628227 - DNA, 33 bp, Homo sapien
gctttgtagggtaagaagcaccagactgttgtg

SEQ ID NO: 628228 - DNA, 33 bp, Homo sapien
gctttgtagggtaagaggcaccagactgttgtg

SEQ ID NO: 628229 - DNA, 33 bp, Homo sapien
agtagataccaggataataaacaggcacacaaa

SEQ ID NO: 628230 - DNA, 33 bp, Homo sapien
agtagataccaggatagtaaacaggcacacaaa

SEQ ID NO: 628231 - DNA, 33 bp, Homo sapien
atgagagcttgaggtaaacccataaaatctccc

SEQ ID NO: 628232 - DNA, 33 bp, Homo sapien
atgagagcttgaggtacacccataaaatctccc

SEQ ID NO: 628233 - DNA, 33 bp, Homo sapien
attgactacagaagtaagaggcaagcaatgtgc

SEQ ID NO: 628234 - DNA, 33 bp, Homo sapien
attgactacagaagtatgaggcaagcaatgtgc

SEQ ID NO: 628235 - DNA, 33 bp, Homo sapien
gctttgggaccaagtaaatcctcacctcccctc

SEQ ID NO: 628236 - DNA, 33 bp, Homo sapien
gctttgggaccaagtagatcctcacctcccctc

SEQ ID NO: 628237 - DNA, 33 bp, Homo sapien
cagaaggtaaggaagcactcactctcagtttca

SEQ ID NO: 628238 - DNA, 33 bp, Homo sapien
cagaaggtaaggaagctctcactctcagtttca

SEQ ID NO: 628239 - DNA, 33 bp, Homo sapien
tcttttgggggcttaactcctattttatctctt

SEQ ID NO: 628240 - DNA, 33 bp, Homo sapien
tcttttgggggcttaattcctattttatctctt

SEQ ID NO: 628241 - DNA, 33 bp, Homo sapien
accatggagttctacaacacgagatgcgaagtc

SEQ ID NO: 628242 - DNA, 33 bp, Homo sapien
accatggagttctacagcacgagatgcgaagtc

SEQ ID NO: 628243 - DNA, 33 bp, Homo sapien
ttccctgcccagttctaacattgtgaccagtgg

SEQ ID NO: 628244 - DNA, 33 bp, Homo sapien
ttccctgcccagttctgacattgtgaccagtgg

SEQ ID NO: 628245 - DNA, 33 bp, Homo sapien
atctaaatacaacttaacagcatttcatcaacc

SEQ ID NO: 628246 - DNA, 33 bp, Homo sapien
atctaaatacaacttagcagcatttcatcaacc

SEQ ID NO: 628247 - DNA, 33 bp, Homo sapien
tttttaaatcaaggtacaggatttgcataattt

SEQ ID NO: 628248 - DNA, 33 bp, Homo sapien
tttttaaatcaaggtataggatttgcataattt

SEQ ID NO: 628249 - DNA, 33 bp, Homo sapien
ggagtgtcttgccacaaccagtgtcggaacggt

SEQ ID NO: 628250 - DNA, 33 bp, Homo sapien
ggagtgtcttgccacatccagtgtcggaacggt

SEQ ID NO: 628251 - DNA, 33 bp, Homo sapien
tagataggcgctgttccagatttgcgtaactga

SEQ ID NO: 628252 - DNA, 33 bp, Homo sapien
tagataggcgctgttctagatttgcgtaactga

SEQ ID NO: 628253 - DNA, 33 bp, Homo sapien
aattaaaacagctcatcaagtgctgtaacaggc

SEQ ID NO: 628254 - DNA, 33 bp, Homo sapien
aattaaaacagctcattaagtgctgtaacaggc

SEQ ID NO: 628255 - DNA, 33 bp, Homo sapien
actgatgctgtatgagaaacagactaataggtg

SEQ ID NO: 628256 - DNA, 33 bp, Homo sapien
actgatgctgtatgaggaacagactaataggtg

SEQ ID NO: 628257 - DNA, 33 bp, Homo sapien
aacctgtggccagtaacccctgcattagagaat

SEQ ID NO: 628258 - DNA, 33 bp, Homo sapien
aacctgtggccagtaatccctgcattagagaat

SEQ ID NO: 628259 - DNA, 33 bp, Homo sapien
ttgagaatcacctgggaagctatgaaatatgca

SEQ ID NO: 628260 - DNA, 33 bp, Homo sapien
ttgagaatcacctggggagctatgaaatatgca

SEQ ID NO: 628261 - DNA, 33 bp, Homo sapien
tggccctgcatccatacatgggtcttctggacc

SEQ ID NO: 628262 - DNA, 33 bp, Homo sapien
tggccctgcatccatagatgggtcttctggacc

SEQ ID NO: 628263 - DNA, 33 bp, Homo sapien
gacttgcctacaagggacactccatagatactc

SEQ ID NO: 628264 - DNA, 33 bp, Homo sapien
gacttgcctacaaggggcactccatagatactc

SEQ ID NO: 628265 - DNA, 33 bp, Homo sapien
ctcgagttctgcattacagtgtggtcaatgaca

SEQ ID NO: 628266 - DNA, 33 bp, Homo sapien
ctcgagttctgcattatagtgtggtcaatgaca

SEQ ID NO: 628267 - DNA, 33 bp, Homo sapien
cctattacgactctggcagcatgaagcatcctt

SEQ ID NO: 628268 - DNA, 33 bp, Homo sapien
cctattacgactctggtagcatgaagcatcctt

SEQ ID NO: 628269 - DNA, 33 bp, Homo sapien
gctgaggagaaagttcacagacacaaatagcaa

SEQ ID NO: 628270 - DNA, 33 bp, Homo sapien
gctgaggagaaagttcgcagacacaaatagcaa

SEQ ID NO: 628271 - DNA, 33 bp, Homo sapien
tattctcgaaaactgtgaagcttcctccttctc

SEQ ID NO: 628272 - DNA, 33 bp, Homo sapien
tattctcgaaaactgttaagcttcctccttctc

SEQ ID NO: 628273 - DNA, 33 bp, Homo sapien
aaaaccaagaaacctaactggccaagaaagaaa

SEQ ID NO: 628274 - DNA, 33 bp, Homo sapien
aaaaccaagaaacctatctggccaagaaagaaa

SEQ ID NO: 628275 - DNA, 33 bp, Homo sapien
aagtctatcctaccccaagatacctgactattc

SEQ ID NO: 628276 - DNA, 33 bp, Homo sapien
aagtctatcctaccccgagatacctgactattc

SEQ ID NO: 628277 - DNA, 33 bp, Homo sapien
ttaggtctatttaccacatgaatgtacctggga

SEQ ID NO: 628278 - DNA, 33 bp, Homo sapien
ttaggtctatttaccagatgaatgtacctggga

SEQ ID NO: 628279 - DNA, 33 bp, Homo sapien
acttctttaatgctaactgatttattggagccc

SEQ ID NO: 628280 - DNA, 33 bp, Homo sapien
acttctttaatgctaattgatttattggagccc

SEQ ID NO: 628281 - DNA, 33 bp, Homo sapien
ttgatcttttgcctaaagtctttctgctcatgc

SEQ ID NO: 628282 - DNA, 33 bp, Homo sapien
ttgatcttttgcctaacgtctttctgctcatgc

SEQ ID NO: 628283 - DNA, 33 bp, Homo sapien
acctggaatggtcttcactgaaactatctcgta

SEQ ID NO: 628284 - DNA, 33 bp, Homo sapien
acctggaatggtcttcgctgaaactatctcgta

SEQ ID NO: 628285 - DNA, 33 bp, Homo sapien
ctaaagcaagttgcagcccagtagagatccaag

SEQ ID NO: 628286 - DNA, 33 bp, Homo sapien
ctaaagcaagttgcagtccagtagagatccaag

SEQ ID NO: 628287 - DNA, 33 bp, Homo sapien
actggggcataaatagaacttgtgccaagcaca

SEQ ID NO: 628288 - DNA, 33 bp, Homo sapien
actggggcataaataggacttgtgccaagcaca

SEQ ID NO: 628289 - DNA, 33 bp, Homo sapien
tagcagaaagagctctaaccagggaagcaatct

SEQ ID NO: 628290 - DNA, 33 bp, Homo sapien
tagcagaaagagctctgaccagggaagcaatct

SEQ ID NO: 628291 - DNA, 33 bp, Homo sapien
gtgagaggagagaacccatcaggccacagaggg

SEQ ID NO: 628292 - DNA, 33 bp, Homo sapien
gtgagaggagagaacctatcaggccacagaggg

SEQ ID NO: 628293 - DNA, 33 bp, Homo sapien
caggattttagacctacggaaacagtgaagata

SEQ ID NO: 628294 - DNA, 33 bp, Homo sapien
caggattttagacctatggaaacagtgaagata

SEQ ID NO: 628295 - DNA, 33 bp, Homo sapien
caaaggacaagaatacacaattctcaaaagaag

SEQ ID NO: 628296 - DNA, 33 bp, Homo sapien
caaaggacaagaatacgcaattctcaaaagaag

SEQ ID NO: 628297 - DNA, 33 bp, Homo sapien
tgtgatgagaattagacagctatacttcagaat

SEQ ID NO: 628298 - DNA, 33 bp, Homo sapien
tgtgatgagaattagagagctatacttcagaat

SEQ ID NO: 628299 - DNA, 33 bp, Homo sapien
aaatagataagccactaagaaagtgtgataagc

SEQ ID NO: 628300 - DNA, 33 bp, Homo sapien
aaatagataagccactgagaaagtgtgataagc

SEQ ID NO: 628301 - DNA, 33 bp, Homo sapien
acttctactgacttgacgtcccagcaggatttg

SEQ ID NO: 628302 - DNA, 33 bp, Homo sapien
acttctactgacttgatgtcccagcaggatttg

SEQ ID NO: 628303 - DNA, 33 bp, Homo sapien
caactgttggttggaaaagttgcacattaggaa

SEQ ID NO: 628304 - DNA, 33 bp, Homo sapien
caactgttggttggaagagttgcacattaggaa

SEQ ID NO: 628305 - DNA, 33 bp, Homo sapien
attgaggaatacatacacaaagtacaccaagtt

SEQ ID NO: 628306 - DNA, 33 bp, Homo sapien
attgaggaatacatacgcaaagtacaccaagtt

SEQ ID NO: 628307 - DNA, 33 bp, Homo sapien
ccaagggtattattcaaccttcagtgtagcatt

SEQ ID NO: 628308 - DNA, 33 bp, Homo sapien
ccaagggtattattcagccttcagtgtagcatt

SEQ ID NO: 628309 - DNA, 33 bp, Homo sapien
tgtctttccttccacacagtattctctgcatgt

SEQ ID NO: 628310 - DNA, 33 bp, Homo sapien
tgtctttccttccacatagtattctctgcatgt

SEQ ID NO: 628311 - DNA, 33 bp, Homo sapien
ggcatcaaaacacccacctttagtactctgttc

SEQ ID NO: 628312 - DNA, 33 bp, Homo sapien
ggcatcaaaacacccagctttagtactctgttc

SEQ ID NO: 628313 - DNA, 33 bp, Homo sapien
atgccttcttattatcaaaatacgctagaactc

SEQ ID NO: 628314 - DNA, 33 bp, Homo sapien
atgccttcttattatctaaatacgctagaactc

SEQ ID NO: 628315 - DNA, 33 bp, Homo sapien
gaatattagtgtactacctgaaaggaacacaaa

SEQ ID NO: 628316 - DNA, 33 bp, Homo sapien
gaatattagtgtactatctgaaaggaacacaaa

SEQ ID NO: 628317 - DNA, 33 bp, Homo sapien
agaaagtatctccaaactgtgtcccttcagctt

SEQ ID NO: 628318 - DNA, 33 bp, Homo sapien
agaaagtatctccaaattgtgtcccttcagctt

SEQ ID NO: 628319 - DNA, 33 bp, Homo sapien
attaaagagagatgataagatctgacctgagca

SEQ ID NO: 628320 - DNA, 33 bp, Homo sapien
attaaagagagatgatgagatctgacctgagca

SEQ ID NO: 628321 - DNA, 33 bp, Homo sapien
ttgtactactttataacccaatgctctaaagta

SEQ ID NO: 628322 - DNA, 33 bp, Homo sapien
ttgtactactttataatccaatgctctaaagta

SEQ ID NO: 628323 - DNA, 33 bp, Homo sapien
catgcctgtattccaacacaactttatttaggg

SEQ ID NO: 628324 - DNA, 33 bp, Homo sapien
catgcctgtattccaagacaactttatttaggg

SEQ ID NO: 628325 - DNA, 33 bp, Homo sapien
tgtgtaaaagtaatacaaagtgactggaatgga

SEQ ID NO: 628326 - DNA, 33 bp, Homo sapien
tgtgtaaaagtaatacgaagtgactggaatgga

SEQ ID NO: 628327 - DNA, 33 bp, Homo sapien
ccaagctctcctagtccaagatacaacccaaat

SEQ ID NO: 628328 - DNA, 33 bp, Homo sapien
ccaagctctcctagtctaagatacaacccaaat

SEQ ID NO: 628329 - DNA, 33 bp, Homo sapien
tcttcaaagttaaatccatcctgaacatagcca

SEQ ID NO: 628330 - DNA, 33 bp, Homo sapien
tcttcaaagttaaatctatcctgaacatagcca

SEQ ID NO: 628331 - DNA, 33 bp, Homo sapien
tactgtgcatgtagcccagtcttgtatcactcc

SEQ ID NO: 628332 - DNA, 33 bp, Homo sapien
tactgtgcatgtagcctagtcttgtatcactcc

SEQ ID NO: 628333 - DNA, 33 bp, Homo sapien
ctgaaataaaatggcaaaagttaaagacaaaag

SEQ ID NO: 628334 - DNA, 33 bp, Homo sapien
ctgaaataaaatggcacaagttaaagacaaaag

SEQ ID NO: 628335 - DNA, 33 bp, Homo sapien
agttgagttcagaccacccctgatttccctggc

SEQ ID NO: 628336 - DNA, 33 bp, Homo sapien
agttgagttcagaccatccctgatttccctggc

SEQ ID NO: 628337 - DNA, 33 bp, Homo sapien
ggatgggacttcagacaaaatgcataaacaggg

SEQ ID NO: 628338 - DNA, 33 bp, Homo sapien
ggatgggacttcagaccaaatgcataaacaggg

SEQ ID NO: 628339 - DNA, 33 bp, Homo sapien
cttctaagacatgccccaaattactgactagac

SEQ ID NO: 628340 - DNA, 33 bp, Homo sapien
cttctaagacatgccctaaattactgactagac

SEQ ID NO: 628341 - DNA, 33 bp, Homo sapien
taaatgcaatatttggaagaagactccaaagaa

SEQ ID NO: 628342 - DNA, 33 bp, Homo sapien
taaatgcaatatttggtagaagactccaaagaa

SEQ ID NO: 628343 - DNA, 33 bp, Homo sapien
agtcgttggaaggaaaaagaagcttggctgtgg

SEQ ID NO: 628344 - DNA, 33 bp, Homo sapien
agtcgttggaaggaaagagaagcttggctgtgg

SEQ ID NO: 628345 - DNA, 33 bp, Homo sapien
ggcttaatcacctgtacaagttgatgagagggt

SEQ ID NO: 628346 - DNA, 33 bp, Homo sapien
ggcttaatcacctgtataagttgatgagagggt

SEQ ID NO: 628347 - DNA, 33 bp, Homo sapien
tgtgcatacaaagccacgtgtaagagagtggcg

SEQ ID NO: 628348 - DNA, 33 bp, Homo sapien
tgtgcatacaaagccatgtgtaagagagtggcg

SEQ ID NO: 628349 - DNA, 33 bp, Homo sapien
taaaaggcacacaatggcaagctggataaaaaa

SEQ ID NO: 628350 - DNA, 33 bp, Homo sapien
taaaaggcacacaatgtcaagctggataaaaaa

SEQ ID NO: 628351 - DNA, 33 bp, Homo sapien
gaatgatcctcaacaagatcaatgcagtgtgtg

SEQ ID NO: 628352 - DNA, 33 bp, Homo sapien
gaatgatcctcaacaatatcaatgcagtgtgtg

SEQ ID NO: 628353 - DNA, 33 bp, Homo sapien
ggagataattgagtcacggcgagggtttccccc

SEQ ID NO: 628354 - DNA, 33 bp, Homo sapien
ggagataattgagtcatggcgagggtttccccc

SEQ ID NO: 628355 - DNA, 33 bp, Homo sapien
caaatacaaagacacaaaaggtttgagagtaaa

SEQ ID NO: 628356 - DNA, 33 bp, Homo sapien
caaatacaaagacacagaaggtttgagagtaaa

SEQ ID NO: 628357 - DNA, 33 bp, Homo sapien
tagtatacttgaaggaccatacattgcctttat

SEQ ID NO: 628358 - DNA, 33 bp, Homo sapien
tagtatacttgaaggatcatacattgcctttat

SEQ ID NO: 628359 - DNA, 33 bp, Homo sapien
cctgtcctttacaggagtcactcatcttgcaag

SEQ ID NO: 628360 - DNA, 33 bp, Homo sapien
cctgtcctttacaggattcactcatcttgcaag

SEQ ID NO: 628361 - DNA, 33 bp, Homo sapien
tttgtaagctcttataaggtagaattaaggagt

SEQ ID NO: 628362 - DNA, 33 bp, Homo sapien
tttgtaagctcttatacggtagaattaaggagt

SEQ ID NO: 628363 - DNA, 33 bp, Homo sapien
gattattatgctgacaaattgcaaggtgaaact

SEQ ID NO: 628364 - DNA, 33 bp, Homo sapien
gattattatgctgacatattgcaaggtgaaact

SEQ ID NO: 628365 - DNA, 33 bp, Homo sapien
ggcaagtctagttaaacggaagttgtcaaaaaa

SEQ ID NO: 628366 - DNA, 33 bp, Homo sapien
ggcaagtctagttaaatggaagttgtcaaaaaa

SEQ ID NO: 628367 - DNA, 33 bp, Homo sapien
actcctcttatttaacaggaaattgagagcaag

SEQ ID NO: 628368 - DNA, 33 bp, Homo sapien
actcctcttatttaacgggaaattgagagcaag

SEQ ID NO: 628369 - DNA, 33 bp, Homo sapien
agagtttagacagacacgccttgctggatatcc

SEQ ID NO: 628370 - DNA, 33 bp, Homo sapien
agagtttagacagacaggccttgctggatatcc

SEQ ID NO: 628371 - DNA, 33 bp, Homo sapien
tattacataaaacttacgagacagttgactcta

SEQ ID NO: 628372 - DNA, 33 bp, Homo sapien
tattacataaaacttatgagacagttgactcta

SEQ ID NO: 628373 - DNA, 33 bp, Homo sapien
gatacctgtcctcccacagttactgcagcacta

SEQ ID NO: 628374 - DNA, 33 bp, Homo sapien
gatacctgtcctcccatagttactgcagcacta

SEQ ID NO: 628375 - DNA, 33 bp, Homo sapien
gcattatacttgcacaatggttttgtttttagg

SEQ ID NO: 628376 - DNA, 33 bp, Homo sapien
gcattatacttgcacagtggttttgtttttagg

SEQ ID NO: 628377 - DNA, 33 bp, Homo sapien
ttagtagtatgacttaaaactttgaaaacttat

SEQ ID NO: 628378 - DNA, 33 bp, Homo sapien
ttagtagtatgacttacaactttgaaaacttat

SEQ ID NO: 628379 - DNA, 33 bp, Homo sapien
tgttggaacccagcaactggtgctttaacaggc

SEQ ID NO: 628380 - DNA, 33 bp, Homo sapien
tgttggaacccagcaattggtgctttaacaggc

SEQ ID NO: 628381 - DNA, 33 bp, Homo sapien
gtttatgttcctgttacataccagttaacaatt

SEQ ID NO: 628382 - DNA, 33 bp, Homo sapien
gtttatgttcctgttagataccagttaacaatt

SEQ ID NO: 628383 - DNA, 33 bp, Homo sapien
ctggacaatcaagaaacctgggactcattcttg

SEQ ID NO: 628384 - DNA, 33 bp, Homo sapien
ctggacaatcaagaaatctgggactcattcttg

SEQ ID NO: 628385 - DNA, 33 bp, Homo sapien
cctagccttaacctccaaaggcacctggggtgg

SEQ ID NO: 628386 - DNA, 33 bp, Homo sapien
cctagccttaacctccgaaggcacctggggtgg

SEQ ID NO: 628387 - DNA, 33 bp, Homo sapien
gtggtggaactttccaagggagaagggaatcct

SEQ ID NO: 628388 - DNA, 33 bp, Homo sapien
gtggtggaactttccaggggagaagggaatcct

SEQ ID NO: 628389 - DNA, 33 bp, Homo sapien
aatgtgactgtaaatacactgttttttctggta

SEQ ID NO: 628390 - DNA, 33 bp, Homo sapien
aatgtgactgtaaatatactgttttttctggta

SEQ ID NO: 628391 - DNA, 33 bp, Homo sapien
cggtatatctgaggcactaacatttcttggaag

SEQ ID NO: 628392 - DNA, 33 bp, Homo sapien
cggtatatctgaggcattaacatttcttggaag

SEQ ID NO: 628393 - DNA, 33 bp, Homo sapien
taagtcttcattatacagaataatcctcttgtt

SEQ ID NO: 628394 - DNA, 33 bp, Homo sapien
taagtcttcattatacggaataatcctcttgtt

SEQ ID NO: 628395 - DNA, 33 bp, Homo sapien
tagcaaatcaaacttacctctaccctgcccagc

SEQ ID NO: 628396 - DNA, 33 bp, Homo sapien
tagcaaatcaaacttatctctaccctgcccagc

SEQ ID NO: 628397 - DNA, 33 bp, Homo sapien
caaaccaaatactgccacttcagagttcaccac

SEQ ID NO: 628398 - DNA, 33 bp, Homo sapien
caaaccaaatactgccgcttcagagttcaccac

SEQ ID NO: 628399 - DNA, 33 bp, Homo sapien
agcctgacatgttgaaccagaagtcaagataaa

SEQ ID NO: 628400 - DNA, 33 bp, Homo sapien
agcctgacatgttgaatcagaagtcaagataaa

SEQ ID NO: 628401 - DNA, 33 bp, Homo sapien
acatagcagcgtggaccagaaactttgaagaat

SEQ ID NO: 628402 - DNA, 33 bp, Homo sapien
acatagcagcgtggactagaaactttgaagaat

SEQ ID NO: 628403 - DNA, 33 bp, Homo sapien
ggatttactcatttgacctgtgctggtaatagt

SEQ ID NO: 628404 - DNA, 33 bp, Homo sapien
ggatttactcatttgatctgtgctggtaatagt

SEQ ID NO: 628405 - DNA, 33 bp, Homo sapien
ttcccctgagcttctggatggagctgtgaagtg

SEQ ID NO: 628406 - DNA, 33 bp, Homo sapien
ttcccctgagcttctgtatggagctgtgaagtg

SEQ ID NO: 628407 - DNA, 33 bp, Homo sapien
gagtgaagcagaacaaaactggctaaaatactc

SEQ ID NO: 628408 - DNA, 33 bp, Homo sapien
gagtgaagcagaacaagactggctaaaatactc

SEQ ID NO: 628409 - DNA, 33 bp, Homo sapien
acccctgcctttggacaagcagaaagatctacg

SEQ ID NO: 628410 - DNA, 33 bp, Homo sapien
acccctgcctttggacgagcagaaagatctacg

SEQ ID NO: 628411 - DNA, 33 bp, Homo sapien
tgtgaagtcagctataccatctgggtgtgtgga

SEQ ID NO: 628412 - DNA, 33 bp, Homo sapien
tgtgaagtcagctatatcatctgggtgtgtgga

SEQ ID NO: 628413 - DNA, 33 bp, Homo sapien
acattgctgaaaatcacgttagtctgacatttt

SEQ ID NO: 628414 - DNA, 33 bp, Homo sapien
acattgctgaaaatcatgttagtctgacatttt

SEQ ID NO: 628415 - DNA, 33 bp, Homo sapien
tgtctcgaattccccaagtgaacgtcctggcct

SEQ ID NO: 628416 - DNA, 33 bp, Homo sapien
tgtctcgaattccccacgtgaacgtcctggcct

SEQ ID NO: 628417 - DNA, 33 bp, Homo sapien
catcgttgcagatttcaatggcctccacaaatt

SEQ ID NO: 628418 - DNA, 33 bp, Homo sapien
catcgttgcagatttcgatggcctccacaaatt

SEQ ID NO: 628419 - DNA, 33 bp, Homo sapien
tcattctccatatagacagacctgtcaacaaac

SEQ ID NO: 628420 - DNA, 33 bp, Homo sapien
tcattctccatatagatagacctgtcaacaaac

SEQ ID NO: 628421 - DNA, 33 bp, Homo sapien
cagaaacatgaaaatcaatgcaagttgcaaaca

SEQ ID NO: 628422 - DNA, 33 bp, Homo sapien
cagaaacatgaaaatcgatgcaagttgcaaaca

SEQ ID NO: 628423 - DNA, 33 bp, Homo sapien
agccccacttcccaaccgcaggtacgagtctac

SEQ ID NO: 628424 - DNA, 33 bp, Homo sapien
agccccacttcccaactgcaggtacgagtctac

SEQ ID NO: 628425 - DNA, 33 bp, Homo sapien
ggggcctacaaagctgaaataatcggccctttc

SEQ ID NO: 628426 - DNA, 33 bp, Homo sapien
ggggcctacaaagctggaataatcggccctttc

SEQ ID NO: 628427 - DNA, 33 bp, Homo sapien
atgtctgagctaggggaatctcaaaggtctttt

SEQ ID NO: 628428 - DNA, 33 bp, Homo sapien
atgtctgagctagggggatctcaaaggtctttt

SEQ ID NO: 628429 - DNA, 33 bp, Homo sapien
aagtaggaagctcttacaggaactgtctatgga

SEQ ID NO: 628430 - DNA, 33 bp, Homo sapien
aagtaggaagctcttataggaactgtctatgga

SEQ ID NO: 628431 - DNA, 33 bp, Homo sapien
ccttttgccaacaagaatatgggtgaccgacaa

SEQ ID NO: 628432 - DNA, 33 bp, Homo sapien
ccttttgccaacaagagtatgggtgaccgacaa

SEQ ID NO: 628433 - DNA, 33 bp, Homo sapien
ttaagtgcaattaaaccagactaaatgtaaacc

SEQ ID NO: 628434 - DNA, 33 bp, Homo sapien
ttaagtgcaattaaactagactaaatgtaaacc

SEQ ID NO: 628435 - DNA, 33 bp, Homo sapien
ctacattcgtgagtcactgaatgtaggctaatt

SEQ ID NO: 628436 - DNA, 33 bp, Homo sapien
ctacattcgtgagtcattgaatgtaggctaatt

SEQ ID NO: 628437 - DNA, 33 bp, Homo sapien
aaattgagaaggactaagatgaacaaacaggaa

SEQ ID NO: 628438 - DNA, 33 bp, Homo sapien
aaattgagaaggactacgatgaacaaacaggaa

SEQ ID NO: 628439 - DNA, 33 bp, Homo sapien
aatttctcaactttcacagaccataagacttac

SEQ ID NO: 628440 - DNA, 33 bp, Homo sapien
aatttctcaactttcatagaccataagacttac

SEQ ID NO: 628441 - DNA, 33 bp, Homo sapien
acttgcatgatcctgacggtgagggcttcctta

SEQ ID NO: 628442 - DNA, 33 bp, Homo sapien
acttgcatgatcctgagggtgagggcttcctta

SEQ ID NO: 628443 - DNA, 33 bp, Homo sapien
aagtcctcctaatgccccacaaggccccacaga

SEQ ID NO: 628444 - DNA, 33 bp, Homo sapien
aagtcctcctaatgcctcacaaggccccacaga

SEQ ID NO: 628445 - DNA, 33 bp, Homo sapien
cctaccttttttcgtaacctatagttctctacc

SEQ ID NO: 628446 - DNA, 33 bp, Homo sapien
cctaccttttttcgtaccctatagttctctacc

SEQ ID NO: 628447 - DNA, 33 bp, Homo sapien
ggagcactaaaaacatcacttgccccagggaag

SEQ ID NO: 628448 - DNA, 33 bp, Homo sapien
ggagcactaaaaacatgacttgccccagggaag

SEQ ID NO: 628449 - DNA, 33 bp, Homo sapien
aaggtgtgaataggaaaagtgggcttcttcaac

SEQ ID NO: 628450 - DNA, 33 bp, Homo sapien
aaggtgtgaataggaagagtgggcttcttcaac

SEQ ID NO: 628451 - DNA, 33 bp, Homo sapien
gaagtgtgaaatatgacaagcttcccactgggg

SEQ ID NO: 628452 - DNA, 33 bp, Homo sapien
gaagtgtgaaatatgataagcttcccactgggg

SEQ ID NO: 628453 - DNA, 33 bp, Homo sapien
cttcccactggggtccactcaagctctggacag

SEQ ID NO: 628454 - DNA, 33 bp, Homo sapien
cttcccactggggtccgctcaagctctggacag

SEQ ID NO: 628455 - DNA, 33 bp, Homo sapien
tccaaagctgaatggaaaagctgcttcaagaaa

SEQ ID NO: 628456 - DNA, 33 bp, Homo sapien
tccaaagctgaatggagaagctgcttcaagaaa

SEQ ID NO: 628457 - DNA, 33 bp, Homo sapien
attaaaaggcgttagaagcggagtgggtggtag

SEQ ID NO: 628458 - DNA, 33 bp, Homo sapien
attaaaaggcgttagaggcggagtgggtggtag

SEQ ID NO: 628459 - DNA, 33 bp, Homo sapien
cagagctattccaaagacaatgagaccaagcct

SEQ ID NO: 628460 - DNA, 33 bp, Homo sapien
cagagctattccaaaggcaatgagaccaagcct

SEQ ID NO: 628461 - DNA, 33 bp, Homo sapien
aaccatctgtacattacgattgcaactctaaac

SEQ ID NO: 628462 - DNA, 33 bp, Homo sapien
aaccatctgtacattatgattgcaactctaaac

SEQ ID NO: 628463 - DNA, 33 bp, Homo sapien
gaagagtcaaggactcaatgactatcaaacagt

SEQ ID NO: 628464 - DNA, 33 bp, Homo sapien
gaagagtcaaggactcgatgactatcaaacagt

SEQ ID NO: 628465 - DNA, 33 bp, Homo sapien
cttcccacagaaactaagagatagaagcactat

SEQ ID NO: 628466 - DNA, 33 bp, Homo sapien
cttcccacagaaactaggagatagaagcactat

SEQ ID NO: 628467 - DNA, 33 bp, Homo sapien
tagagtgaaccatgtacggcaaacggtgctggc

SEQ ID NO: 628468 - DNA, 33 bp, Homo sapien
tagagtgaaccatgtatggcaaacggtgctggc

SEQ ID NO: 628469 - DNA, 33 bp, Homo sapien
tagaaatggcaataaaccatggactagtcacac

SEQ ID NO: 628470 - DNA, 33 bp, Homo sapien
tagaaatggcaataaatcatggactagtcacac

SEQ ID NO: 628471 - DNA, 33 bp, Homo sapien
ccttaacttttagagacgcacacaagtgtttat

SEQ ID NO: 628472 - DNA, 33 bp, Homo sapien
ccttaacttttagagatgcacacaagtgtttat

SEQ ID NO: 628473 - DNA, 33 bp, Homo sapien
ctccatgtctctaaaacgtaattactaatgctt

SEQ ID NO: 628474 - DNA, 33 bp, Homo sapien
ctccatgtctctaaaatgtaattactaatgctt

SEQ ID NO: 628475 - DNA, 33 bp, Homo sapien
tgggcaggaagttccaatcctgacttgaccctt

SEQ ID NO: 628476 - DNA, 33 bp, Homo sapien
tgggcaggaagttccactcctgacttgaccctt

SEQ ID NO: 628477 - DNA, 33 bp, Homo sapien
attatctgtacagcgaagacagaaaaggctgtt

SEQ ID NO: 628478 - DNA, 33 bp, Homo sapien
attatctgtacagcgaggacagaaaaggctgtt

SEQ ID NO: 628479 - DNA, 33 bp, Homo sapien
tatgacaactgttgctcaattcacatcctaagt

SEQ ID NO: 628480 - DNA, 33 bp, Homo sapien
tatgacaactgttgcttaattcacatcctaagt

SEQ ID NO: 628481 - DNA, 33 bp, Homo sapien
ggtcaggttggagatgaattgcttgtgtacaaa

SEQ ID NO: 628482 - DNA, 33 bp, Homo sapien
ggtcaggttggagatgcattgcttgtgtacaaa

SEQ ID NO: 628483 - DNA, 33 bp, Homo sapien
gagggccaccacaggtcacaaatttacctacat

SEQ ID NO: 628484 - DNA, 33 bp, Homo sapien
gagggccaccacaggttacaaatttacctacat

SEQ ID NO: 628485 - DNA, 33 bp, Homo sapien
tgaggccctggtggggacattagcaggctgagt

SEQ ID NO: 628486 - DNA, 33 bp, Homo sapien
tgaggccctggtgggggcattagcaggctgagt

SEQ ID NO: 628487 - DNA, 33 bp, Homo sapien
attaaaatggcatgtaagagagaattttcaatg

SEQ ID NO: 628488 - DNA, 33 bp, Homo sapien
attaaaatggcatgtatgagagaattttcaatg

SEQ ID NO: 628489 - DNA, 33 bp, Homo sapien
ggcatagtgttttggtaaaagtattaggatgta

SEQ ID NO: 628490 - DNA, 33 bp, Homo sapien
ggcatagtgttttggtgaaagtattaggatgta

SEQ ID NO: 628491 - DNA, 33 bp, Homo sapien
gctcccatcctaaacacgcacaacctgaaagag

SEQ ID NO: 628492 - DNA, 33 bp, Homo sapien
gctcccatcctaaacatgcacaacctgaaagag

SEQ ID NO: 628493 - DNA, 33 bp, Homo sapien
ggcctctcaggtctaacgggcatcttatgatag

SEQ ID NO: 628494 - DNA, 33 bp, Homo sapien
ggcctctcaggtctaatgggcatcttatgatag

SEQ ID NO: 628495 - DNA, 33 bp, Homo sapien
tcaagggtgggaaggtcaaggacagcagcaaat

SEQ ID NO: 628496 - DNA, 33 bp, Homo sapien
tcaagggtgggaaggtgaaggacagcagcaaat

SEQ ID NO: 628497 - DNA, 33 bp, Homo sapien
tgttgctgtagaagcccgaaggagaggcactga

SEQ ID NO: 628498 - DNA, 33 bp, Homo sapien
tgttgctgtagaagccggaaggagaggcactga

SEQ ID NO: 628499 - DNA, 33 bp, Homo sapien
agcccagtggctaagccgaactatcctgaggcc

SEQ ID NO: 628500 - DNA, 33 bp, Homo sapien
agcccagtggctaagctgaactatcctgaggcc

SEQ ID NO: 628501 - DNA, 33 bp, Homo sapien
tttcctgactacctaacctaatggctcccagga

SEQ ID NO: 628502 - DNA, 33 bp, Homo sapien
tttcctgactacctaagctaatggctcccagga

SEQ ID NO: 628503 - DNA, 33 bp, Homo sapien
aagtgatttttggaagaataggaatgagttcaa

SEQ ID NO: 628504 - DNA, 33 bp, Homo sapien
aagtgatttttggaaggataggaatgagttcaa

SEQ ID NO: 628505 - DNA, 33 bp, Homo sapien
ggatccataaatctcactgaatgccattcaact

SEQ ID NO: 628506 - DNA, 33 bp, Homo sapien
ggatccataaatctcattgaatgccattcaact

SEQ ID NO: 628507 - DNA, 33 bp, Homo sapien
tgcaagtggttagcaacactggtagagattgct

SEQ ID NO: 628508 - DNA, 33 bp, Homo sapien
tgcaagtggttagcaatactggtagagattgct

SEQ ID NO: 628509 - DNA, 33 bp, Homo sapien
actacaccaactagcacaccaggagaccacacc

SEQ ID NO: 628510 - DNA, 33 bp, Homo sapien
actacaccaactagcataccaggagaccacacc

SEQ ID NO: 628511 - DNA, 33 bp, Homo sapien
acaaggatttggaacaagaactcctatactagg

SEQ ID NO: 628512 - DNA, 33 bp, Homo sapien
acaaggatttggaacaggaactcctatactagg

SEQ ID NO: 628513 - DNA, 33 bp, Homo sapien
ctcatggacaaccactaaaaactctgggagaaa

SEQ ID NO: 628514 - DNA, 33 bp, Homo sapien
ctcatggacaaccactgaaaactctgggagaaa

SEQ ID NO: 628515 - DNA, 33 bp, Homo sapien
ctgccattcactccaaactccattccaaacttc

SEQ ID NO: 628516 - DNA, 33 bp, Homo sapien
ctgccattcactccaagctccattccaaacttc

SEQ ID NO: 628517 - DNA, 33 bp, Homo sapien
ttaacttgacagataacgttgtttgttgttatt

SEQ ID NO: 628518 - DNA, 33 bp, Homo sapien
ttaacttgacagataatgttgtttgttgttatt

SEQ ID NO: 628519 - DNA, 33 bp, Homo sapien
tatgaaatcacctccacaatcaatttgaatatt

SEQ ID NO: 628520 - DNA, 33 bp, Homo sapien
tatgaaatcacctccataatcaatttgaatatt

SEQ ID NO: 628521 - DNA, 33 bp, Homo sapien
ccctgggaggcagcctcactttcttcgctggtt

SEQ ID NO: 628522 - DNA, 33 bp, Homo sapien
ccctgggaggcagccttactttcttcgctggtt

SEQ ID NO: 628523 - DNA, 33 bp, Homo sapien
caggctgcagggtagaacaaaggttgtcgaggt

SEQ ID NO: 628524 - DNA, 33 bp, Homo sapien
caggctgcagggtagagcaaaggttgtcgaggt

SEQ ID NO: 628525 - DNA, 33 bp, Homo sapien
cccagtcacaaagtcaggggaagaaatgtgatc

SEQ ID NO: 628526 - DNA, 33 bp, Homo sapien
cccagtcacaaagtcatgggaagaaatgtgatc

SEQ ID NO: 628527 - DNA, 33 bp, Homo sapien
gaaactcaaactcaaaaatcttcagtaacttgc

SEQ ID NO: 628528 - DNA, 33 bp, Homo sapien
gaaactcaaactcaaagatcttcagtaacttgc

SEQ ID NO: 628529 - DNA, 33 bp, Homo sapien
cctcagactgcttccactcatggcggaaaaaga

SEQ ID NO: 628530 - DNA, 33 bp, Homo sapien
cctcagactgcttccattcatggcggaaaaaga

SEQ ID NO: 628531 - DNA, 33 bp, Homo sapien
aaaactttggctgtgaactgaaaactataaaaa

SEQ ID NO: 628532 - DNA, 33 bp, Homo sapien
aaaactttggctgtgacctgaaaactataaaaa

SEQ ID NO: 628533 - DNA, 33 bp, Homo sapien
ttctcaaatttggtcaacagctgagaagcgata

SEQ ID NO: 628534 - DNA, 33 bp, Homo sapien
ttctcaaatttggtcaccagctgagaagcgata

SEQ ID NO: 628535 - DNA, 33 bp, Homo sapien
gttaatatgtgttcaccggtggaaagaatgcct

SEQ ID NO: 628536 - DNA, 33 bp, Homo sapien
gttaatatgtgttcactggtggaaagaatgcct

SEQ ID NO: 628537 - DNA, 33 bp, Homo sapien
ggtaatccagtgagaccacaaacattgactata

SEQ ID NO: 628538 - DNA, 33 bp, Homo sapien
ggtaatccagtgagactacaaacattgactata

SEQ ID NO: 628539 - DNA, 33 bp, Homo sapien
ataaatgtcaacattaccaccaagtttctcttt

SEQ ID NO: 628540 - DNA, 33 bp, Homo sapien
ataaatgtcaacattatcaccaagtttctcttt

SEQ ID NO: 628541 - DNA, 33 bp, Homo sapien
gttttatctttgtttcactctttgtttaaactt

SEQ ID NO: 628542 - DNA, 33 bp, Homo sapien
gttttatctttgtttcgctctttgtttaaactt

SEQ ID NO: 628543 - DNA, 33 bp, Homo sapien
ctgtatgaggaaaaaaattgttcctagataaga

SEQ ID NO: 628544 - DNA, 33 bp, Homo sapien
ctgtatgaggaaaaaagttgttcctagataaga

SEQ ID NO: 628545 - DNA, 33 bp, Homo sapien
ccaagtctggaacgtcaccattccaagttcttt

SEQ ID NO: 628546 - DNA, 33 bp, Homo sapien
ccaagtctggaacgtctccattccaagttcttt

SEQ ID NO: 628547 - DNA, 33 bp, Homo sapien
agagagctagtaattacgcatagaaggaatcta

SEQ ID NO: 628548 - DNA, 33 bp, Homo sapien
agagagctagtaattatgcatagaaggaatcta

SEQ ID NO: 628549 - DNA, 33 bp, Homo sapien
ctaatcatattttacaagttttaccactaaagt

SEQ ID NO: 628550 - DNA, 33 bp, Homo sapien
ctaatcatattttacaggttttaccactaaagt

SEQ ID NO: 628551 - DNA, 33 bp, Homo sapien
cagaaagaaacagaggaaggagttaggggatgc

SEQ ID NO: 628552 - DNA, 33 bp, Homo sapien
cagaaagaaacagaggtaggagttaggggatgc

SEQ ID NO: 628553 - DNA, 33 bp, Homo sapien
cttcctctctacttcccattagcacttatgcat

SEQ ID NO: 628554 - DNA, 33 bp, Homo sapien
cttcctctctacttcctattagcacttatgcat

SEQ ID NO: 628555 - DNA, 33 bp, Homo sapien
taattggtggctttagcaagagttgattccatg

SEQ ID NO: 628556 - DNA, 33 bp, Homo sapien
taattggtggctttagtaagagttgattccatg

SEQ ID NO: 628557 - DNA, 33 bp, Homo sapien
ttctcttctacctctcccattcagccatcaaag

SEQ ID NO: 628558 - DNA, 33 bp, Homo sapien
ttctcttctacctctctcattcagccatcaaag

SEQ ID NO: 628559 - DNA, 33 bp, Homo sapien
tgtgaatagttcagagaagaagttggctcgaga

SEQ ID NO: 628560 - DNA, 33 bp, Homo sapien
tgtgaatagttcagaggagaagttggctcgaga

SEQ ID NO: 628561 - DNA, 33 bp, Homo sapien
tcattcacagtccagaagatgacatcactgcga

SEQ ID NO: 628562 - DNA, 33 bp, Homo sapien
tcattcacagtccagaggatgacatcactgcga

SEQ ID NO: 628563 - DNA, 33 bp, Homo sapien
actcttccaagttcataacatttattcatctat

SEQ ID NO: 628564 - DNA, 33 bp, Homo sapien
actcttccaagttcatgacatttattcatctat

SEQ ID NO: 628565 - DNA, 33 bp, Homo sapien
atggactggcagcttacataccaagaatcatac

SEQ ID NO: 628566 - DNA, 33 bp, Homo sapien
atggactggcagcttatataccaagaatcatac

SEQ ID NO: 628567 - DNA, 33 bp, Homo sapien
tttttctcttctttcccattcttttggctagaa

SEQ ID NO: 628568 - DNA, 33 bp, Homo sapien
tttttctcttctttcctattcttttggctagaa

SEQ ID NO: 628569 - DNA, 33 bp, Homo sapien
ataagagtatgaaaaacctgagtatcttcatgg

SEQ ID NO: 628570 - DNA, 33 bp, Homo sapien
ataagagtatgaaaaagctgagtatcttcatgg

SEQ ID NO: 628571 - DNA, 33 bp, Homo sapien
tctcacatagggttcaagtcctgggtgcacagt

SEQ ID NO: 628572 - DNA, 33 bp, Homo sapien
tctcacatagggttcaggtcctgggtgcacagt

SEQ ID NO: 628573 - DNA, 33 bp, Homo sapien
aaggttgtgagggagccgagtgaaagaattgaa

SEQ ID NO: 628574 - DNA, 33 bp, Homo sapien
aaggttgtgagggagctgagtgaaagaattgaa

SEQ ID NO: 628575 - DNA, 33 bp, Homo sapien
cttcatatctgcatggcatcacaggaagtcaga

SEQ ID NO: 628576 - DNA, 33 bp, Homo sapien
cttcatatctgcatggtatcacaggaagtcaga

SEQ ID NO: 628577 - DNA, 33 bp, Homo sapien
gtcctacataggtcgcgaagttcagctagagtt

SEQ ID NO: 628578 - DNA, 33 bp, Homo sapien
gtcctacataggtcgctaagttcagctagagtt

SEQ ID NO: 628579 - DNA, 33 bp, Homo sapien
ggtgaatacactgatcaaggttaggtccagaca

SEQ ID NO: 628580 - DNA, 33 bp, Homo sapien
ggtgaatacactgatccaggttaggtccagaca

SEQ ID NO: 628581 - DNA, 33 bp, Homo sapien
tgcataagtgaagtcaggggacattacgaatga

SEQ ID NO: 628582 - DNA, 33 bp, Homo sapien
tgcataagtgaagtcatgggacattacgaatga

SEQ ID NO: 628583 - DNA, 33 bp, Homo sapien
aaagattttctgaagccaacttgctttctgaaa

SEQ ID NO: 628584 - DNA, 33 bp, Homo sapien
aaagattttctgaagctaacttgctttctgaaa

SEQ ID NO: 628585 - DNA, 33 bp, Homo sapien
tcccagataggaaagagtatatgccacagatag

SEQ ID NO: 628586 - DNA, 33 bp, Homo sapien
tcccagataggaaagattatatgccacagatag

SEQ ID NO: 628587 - DNA, 33 bp, Homo sapien
atatctgtcttatacccctgggaaaaccccagc

SEQ ID NO: 628588 - DNA, 33 bp, Homo sapien
atatctgtcttataccgctgggaaaaccccagc

SEQ ID NO: 628589 - DNA, 33 bp, Homo sapien
aacacgatttgttcccccatcaaagtggaaaca

SEQ ID NO: 628590 - DNA, 33 bp, Homo sapien
aacacgatttgttccctcatcaaagtggaaaca

SEQ ID NO: 628591 - DNA, 33 bp, Homo sapien
aatgagtccaggagccaaggttgttcattcagt

SEQ ID NO: 628592 - DNA, 33 bp, Homo sapien
aatgagtccaggagccgaggttgttcattcagt

SEQ ID NO: 628593 - DNA, 33 bp, Homo sapien
agtaagatattaggctgccatatgatccagaga

SEQ ID NO: 628594 - DNA, 33 bp, Homo sapien
agtaagatattaggcttccatatgatccagaga

SEQ ID NO: 628595 - DNA, 33 bp, Homo sapien
atgtagccaacgaattatgtcagaagcagagag

SEQ ID NO: 628596 - DNA, 33 bp, Homo sapien
atgtagccaacgaattgtgtcagaagcagagag

SEQ ID NO: 628597 - DNA, 33 bp, Homo sapien
tctcattttctctctcacacaaaaatactcggg

SEQ ID NO: 628598 - DNA, 33 bp, Homo sapien
tctcattttctctctcgcacaaaaatactcggg

SEQ ID NO: 628599 - DNA, 33 bp, Homo sapien
tttttgtgcgtataaacggtatgttgtgatata

SEQ ID NO: 628600 - DNA, 33 bp, Homo sapien
tttttgtgcgtataaatggtatgttgtgatata

SEQ ID NO: 628601 - DNA, 33 bp, Homo sapien
gaagcacctctgagacaatatttgagcagaagg

SEQ ID NO: 628602 - DNA, 33 bp, Homo sapien
gaagcacctctgagacgatatttgagcagaagg

SEQ ID NO: 628603 - DNA, 33 bp, Homo sapien
catagttgatgctcaaaaagaagaagttatttt

SEQ ID NO: 628604 - DNA, 33 bp, Homo sapien
catagttgatgctcaacaagaagaagttatttt

SEQ ID NO: 628605 - DNA, 33 bp, Homo sapien
tctcttaagtacatcaatctttgggtttgctac

SEQ ID NO: 628606 - DNA, 33 bp, Homo sapien
tctcttaagtacatcagtctttgggtttgctac

SEQ ID NO: 628607 - DNA, 33 bp, Homo sapien
caaatcttacagtatacggaaccttttgtgtaa

SEQ ID NO: 628608 - DNA, 33 bp, Homo sapien
caaatcttacagtatatggaaccttttgtgtaa

SEQ ID NO: 628609 - DNA, 33 bp, Homo sapien
cattggaaacacttcacagtagaggttaccatt

SEQ ID NO: 628610 - DNA, 33 bp, Homo sapien
cattggaaacacttcatagtagaggttaccatt

SEQ ID NO: 628611 - DNA, 33 bp, Homo sapien
gttgagaattcccactcaagaagtttacacaga

SEQ ID NO: 628612 - DNA, 33 bp, Homo sapien
gttgagaattcccactgaagaagtttacacaga

SEQ ID NO: 628613 - DNA, 33 bp, Homo sapien
tctgctctggacaccactgaaaacctattgcct

SEQ ID NO: 628614 - DNA, 33 bp, Homo sapien
tctgctctggacaccattgaaaacctattgcct

SEQ ID NO: 628615 - DNA, 33 bp, Homo sapien
tcctaatctcctatgaatcaaacacacagctgt

SEQ ID NO: 628616 - DNA, 33 bp, Homo sapien
tcctaatctcctatgagtcaaacacacagctgt

SEQ ID NO: 628617 - DNA, 33 bp, Homo sapien
atcttctgagtgggcaagatgagttgagtatag

SEQ ID NO: 628618 - DNA, 33 bp, Homo sapien
atcttctgagtgggcaggatgagttgagtatag

SEQ ID NO: 628619 - DNA, 33 bp, Homo sapien
tactcgtcacactccaatgattctggttgcagt

SEQ ID NO: 628620 - DNA, 33 bp, Homo sapien
tactcgtcacactccagtgattctggttgcagt

SEQ ID NO: 628621 - DNA, 33 bp, Homo sapien
agtgcaccgttgctcacagcacaatccctcagg

SEQ ID NO: 628622 - DNA, 33 bp, Homo sapien
agtgcaccgttgctcatagcacaatccctcagg

SEQ ID NO: 628623 - DNA, 33 bp, Homo sapien
gtgctaggagacctaactgaaaaatgggtttag

SEQ ID NO: 628624 - DNA, 33 bp, Homo sapien
gtgctaggagacctaattgaaaaatgggtttag

SEQ ID NO: 628625 - DNA, 33 bp, Homo sapien
cctgacttgattccaccagatatcctgtcctac

SEQ ID NO: 628626 - DNA, 33 bp, Homo sapien
cctgacttgattccacgagatatcctgtcctac

SEQ ID NO: 628627 - DNA, 33 bp, Homo sapien
ccccctttatcttctaacaaagcctttgggctc

SEQ ID NO: 628628 - DNA, 33 bp, Homo sapien
ccccctttatcttctagcaaagcctttgggctc

SEQ ID NO: 628629 - DNA, 33 bp, Homo sapien
tctgcaaaaaagagacccagctaccaaagggag

SEQ ID NO: 628630 - DNA, 33 bp, Homo sapien
tctgcaaaaaagagactcagctaccaaagggag

SEQ ID NO: 628631 - DNA, 33 bp, Homo sapien
agaagtctgattgctacagaagatatgcagtgg

SEQ ID NO: 628632 - DNA, 33 bp, Homo sapien
agaagtctgattgctatagaagatatgcagtgg

SEQ ID NO: 628633 - DNA, 33 bp, Homo sapien
cagccacgctgaaaccacaatttgtagtcaata

SEQ ID NO: 628634 - DNA, 33 bp, Homo sapien
cagccacgctgaaaccgcaatttgtagtcaata

SEQ ID NO: 628635 - DNA, 33 bp, Homo sapien
acagaaaaatgtgggcaacgatatcaggattca

SEQ ID NO: 628636 - DNA, 33 bp, Homo sapien
acagaaaaatgtgggcgacgatatcaggattca

SEQ ID NO: 628637 - DNA, 33 bp, Homo sapien
ttaattgttattagaaatcctggaagatgctgc

SEQ ID NO: 628638 - DNA, 33 bp, Homo sapien
ttaattgttattagaactcctggaagatgctgc

SEQ ID NO: 628639 - DNA, 33 bp, Homo sapien
cctttgccataagtagaagtagcctgaagcctt

SEQ ID NO: 628640 - DNA, 33 bp, Homo sapien
cctttgccataagtagcagtagcctgaagcctt

SEQ ID NO: 628641 - DNA, 33 bp, Homo sapien
aagtggattagtgacacgtggccttcctagaag

SEQ ID NO: 628642 - DNA, 33 bp, Homo sapien
aagtggattagtgacatgtggccttcctagaag

SEQ ID NO: 628643 - DNA, 33 bp, Homo sapien
ctacacttctgcccaaacaaaggggattgtgag

SEQ ID NO: 628644 - DNA, 33 bp, Homo sapien
ctacacttctgcccaagcaaaggggattgtgag

SEQ ID NO: 628645 - DNA, 33 bp, Homo sapien
ttccatctgattcaaggcctctccactgagcta

SEQ ID NO: 628646 - DNA, 33 bp, Homo sapien
ttccatctgattcaagtcctctccactgagcta

SEQ ID NO: 628647 - DNA, 33 bp, Homo sapien
gtttttaggtgcacagaattcgcttggccatgt

SEQ ID NO: 628648 - DNA, 33 bp, Homo sapien
gtttttaggtgcacaggattcgcttggccatgt

SEQ ID NO: 628649 - DNA, 33 bp, Homo sapien
ttgggagttacaaatacgcttcagtgtttagcc

SEQ ID NO: 628650 - DNA, 33 bp, Homo sapien
ttgggagttacaaatatgcttcagtgtttagcc

SEQ ID NO: 628651 - DNA, 33 bp, Homo sapien
taatagtgactctccagtgagtggctaacacac

SEQ ID NO: 628652 - DNA, 33 bp, Homo sapien
taatagtgactctccattgagtggctaacacac

SEQ ID NO: 628653 - DNA, 33 bp, Homo sapien
tggtcttcttatgtaacatcttgcagaggttct

SEQ ID NO: 628654 - DNA, 33 bp, Homo sapien
tggtcttcttatgtaatatcttgcagaggttct

SEQ ID NO: 628655 - DNA, 33 bp, Homo sapien
ttctcctcctaaagccagataagactccgacgg

SEQ ID NO: 628656 - DNA, 33 bp, Homo sapien
ttctcctcctaaagccggataagactccgacgg

SEQ ID NO: 628657 - DNA, 33 bp, Homo sapien
ataagaggtcagtggaaacatgagcaaatcggg

SEQ ID NO: 628658 - DNA, 33 bp, Homo sapien
ataagaggtcagtggagacatgagcaaatcggg

SEQ ID NO: 628659 - DNA, 33 bp, Homo sapien
cttttccaagcatacaagatcacacctataatc

SEQ ID NO: 628660 - DNA, 33 bp, Homo sapien
cttttccaagcatacaggatcacacctataatc

SEQ ID NO: 628661 - DNA, 33 bp, Homo sapien
ggcagagttgtcttggcattcccgcatgcaacc

SEQ ID NO: 628662 - DNA, 33 bp, Homo sapien
ggcagagttgtcttggtattcccgcatgcaacc

SEQ ID NO: 628663 - DNA, 33 bp, Homo sapien
gattgaactccagctaagtttgggggtgatgaa

SEQ ID NO: 628664 - DNA, 33 bp, Homo sapien
gattgaactccagctaggtttgggggtgatgaa

SEQ ID NO: 628665 - DNA, 33 bp, Homo sapien
catctgcaccatggtagctgttgctagggttac

SEQ ID NO: 628666 - DNA, 33 bp, Homo sapien
catctgcaccatggtatctgttgctagggttac

SEQ ID NO: 628667 - DNA, 33 bp, Homo sapien
ggtactccatcagctcaaagtatttttgaagca

SEQ ID NO: 628668 - DNA, 33 bp, Homo sapien
ggtactccatcagctccaagtatttttgaagca

SEQ ID NO: 628669 - DNA, 33 bp, Homo sapien
gagattcagtgtaatcaatattccaaagatggt

SEQ ID NO: 628670 - DNA, 33 bp, Homo sapien
gagattcagtgtaatcgatattccaaagatggt

SEQ ID NO: 628671 - DNA, 33 bp, Homo sapien
cctcctttaagctgaaatggggaatggttttca

SEQ ID NO: 628672 - DNA, 33 bp, Homo sapien
cctcctttaagctgaagtggggaatggttttca

SEQ ID NO: 628673 - DNA, 33 bp, Homo sapien
cctctaactaggccccacataatttgacacaag

SEQ ID NO: 628674 - DNA, 33 bp, Homo sapien
cctctaactaggccccgcataatttgacacaag

SEQ ID NO: 628675 - DNA, 33 bp, Homo sapien
aagctaagaagacacaaagtgatgttaccaaag

SEQ ID NO: 628676 - DNA, 33 bp, Homo sapien
aagctaagaagacacagagtgatgttaccaaag

SEQ ID NO: 628677 - DNA, 33 bp, Homo sapien
tatgatctttttttcacgcccaaacacaccaac

SEQ ID NO: 628678 - DNA, 33 bp, Homo sapien
tatgatctttttttcaggcccaaacacaccaac

SEQ ID NO: 628679 - DNA, 33 bp, Homo sapien
gtaatccagtctcctacgtttactcttagcttg

SEQ ID NO: 628680 - DNA, 33 bp, Homo sapien
gtaatccagtctcctatgtttactcttagcttg

SEQ ID NO: 628681 - DNA, 33 bp, Homo sapien
ttcctcttctctgtacacatgtctcttctgaag

SEQ ID NO: 628682 - DNA, 33 bp, Homo sapien
ttcctcttctctgtactcatgtctcttctgaag

SEQ ID NO: 628683 - DNA, 33 bp, Homo sapien
ggactagactgcaaaacgttaaggaaaaggagg

SEQ ID NO: 628684 - DNA, 33 bp, Homo sapien
ggactagactgcaaaatgttaaggaaaaggagg

SEQ ID NO: 628685 - DNA, 33 bp, Homo sapien
ctgttccaagtgtccaatgacatctagtatgta

SEQ ID NO: 628686 - DNA, 33 bp, Homo sapien
ctgttccaagtgtccagtgacatctagtatgta

SEQ ID NO: 628687 - DNA, 33 bp, Homo sapien
agtaatgggatctgagaaagtaccacaaagagc

SEQ ID NO: 628688 - DNA, 33 bp, Homo sapien
agtaatgggatctgagcaagtaccacaaagagc

SEQ ID NO: 628689 - DNA, 33 bp, Homo sapien
ccctacttagctcttacacaaatgggggaggtg

SEQ ID NO: 628690 - DNA, 33 bp, Homo sapien
ccctacttagctcttatacaaatgggggaggtg

SEQ ID NO: 628691 - DNA, 33 bp, Homo sapien
tcagaaatcttggacaacccattgctgctaaca

SEQ ID NO: 628692 - DNA, 33 bp, Homo sapien
tcagaaatcttggacagcccattgctgctaaca

SEQ ID NO: 628693 - DNA, 33 bp, Homo sapien
tcaatagttgagtgaaaaaattgcagtatggtc

SEQ ID NO: 628694 - DNA, 33 bp, Homo sapien
tcaatagttgagtgaataaattgcagtatggtc

SEQ ID NO: 628695 - DNA, 33 bp, Homo sapien
ctgaatccttctgtgaataatccttgtccttgt

SEQ ID NO: 628696 - DNA, 33 bp, Homo sapien
ctgaatccttctgtgagtaatccttgtccttgt

SEQ ID NO: 628697 - DNA, 33 bp, Homo sapien
tcagaccacctatgacaagaattctgacccaca

SEQ ID NO: 628698 - DNA, 33 bp, Homo sapien
tcagaccacctatgacgagaattctgacccaca

SEQ ID NO: 628699 - DNA, 33 bp, Homo sapien
ggagatcactaaaataaagttactttgagaaat

SEQ ID NO: 628700 - DNA, 33 bp, Homo sapien
ggagatcactaaaatagagttactttgagaaat

SEQ ID NO: 628701 - DNA, 33 bp, Homo sapien
attcaattttgtcatacaagtacaccactttgt

SEQ ID NO: 628702 - DNA, 33 bp, Homo sapien
attcaattttgtcatataagtacaccactttgt

SEQ ID NO: 628703 - DNA, 33 bp, Homo sapien
tagactctaagtgcccaaagttaaagctatgtc

SEQ ID NO: 628704 - DNA, 33 bp, Homo sapien
tagactctaagtgcccgaagttaaagctatgtc

SEQ ID NO: 628705 - DNA, 33 bp, Homo sapien
aggtttggcatctgaaaatgattttggataaca

SEQ ID NO: 628706 - DNA, 33 bp, Homo sapien
aggtttggcatctgaagatgattttggataaca

SEQ ID NO: 628707 - DNA, 33 bp, Homo sapien
agcagtcagtattagcactggtgaagaaaggtg

SEQ ID NO: 628708 - DNA, 33 bp, Homo sapien
agcagtcagtattagcgctggtgaagaaaggtg

SEQ ID NO: 628709 - DNA, 33 bp, Homo sapien
catctctacagagacacactttgactcctcaga

SEQ ID NO: 628710 - DNA, 33 bp, Homo sapien
catctctacagagacatactttgactcctcaga

SEQ ID NO: 628711 - DNA, 33 bp, Homo sapien
acaataataattcgaaagcaaaatcagggggaa

SEQ ID NO: 628712 - DNA, 33 bp, Homo sapien
acaataataattcgaaggcaaaatcagggggaa

SEQ ID NO: 628713 - DNA, 33 bp, Homo sapien
ttaacttggctttccgacaagagtctgtgcata

SEQ ID NO: 628714 - DNA, 33 bp, Homo sapien
ttaacttggctttccggcaagagtctgtgcata

SEQ ID NO: 628715 - DNA, 33 bp, Homo sapien
taaaatttctgttgagaagtctactcttagtct

SEQ ID NO: 628716 - DNA, 33 bp, Homo sapien
taaaatttctgttgaggagtctactcttagtct

SEQ ID NO: 628717 - DNA, 33 bp, Homo sapien
gagtgttacgtgctccaaactccccatgctaga

SEQ ID NO: 628718 - DNA, 33 bp, Homo sapien
gagtgttacgtgctccgaactccccatgctaga

SEQ ID NO: 628719 - DNA, 33 bp, Homo sapien
tgaaataaatgtttgaactagactggagtgtac

SEQ ID NO: 628720 - DNA, 33 bp, Homo sapien
tgaaataaatgtttgagctagactggagtgtac

SEQ ID NO: 628721 - DNA, 33 bp, Homo sapien
cacagtctggcgtctacaacactagaaggctgc

SEQ ID NO: 628722 - DNA, 33 bp, Homo sapien
cacagtctggcgtctataacactagaaggctgc

SEQ ID NO: 628723 - DNA, 33 bp, Homo sapien
ctccctagcctgttgaagttaggaacctgctgc

SEQ ID NO: 628724 - DNA, 33 bp, Homo sapien
ctccctagcctgttgaggttaggaacctgctgc

SEQ ID NO: 628725 - DNA, 33 bp, Homo sapien
cacttttcaaaacaagacatacccatggtcaac

SEQ ID NO: 628726 - DNA, 33 bp, Homo sapien
cacttttcaaaacaaggcatacccatggtcaac

SEQ ID NO: 628727 - DNA, 33 bp, Homo sapien
atgcaaagttgcccaacgtacaagcctaatata

SEQ ID NO: 628728 - DNA, 33 bp, Homo sapien
atgcaaagttgcccaatgtacaagcctaatata

SEQ ID NO: 628729 - DNA, 33 bp, Homo sapien
tgaactttcaggtttccacacttagctttgatt

SEQ ID NO: 628730 - DNA, 33 bp, Homo sapien
tgaactttcaggtttctacacttagctttgatt

SEQ ID NO: 628731 - DNA, 33 bp, Homo sapien
atcctagataaacccaatagttttgactctttt

SEQ ID NO: 628732 - DNA, 33 bp, Homo sapien
atcctagataaacccagtagttttgactctttt

SEQ ID NO: 628733 - DNA, 33 bp, Homo sapien
ataaattccttgccaaagtcgatgtctagaatg

SEQ ID NO: 628734 - DNA, 33 bp, Homo sapien
ataaattccttgccaaggtcgatgtctagaatg

SEQ ID NO: 628735 - DNA, 33 bp, Homo sapien
ctctcaaaattcttgacgatggatctctctgac

SEQ ID NO: 628736 - DNA, 33 bp, Homo sapien
ctctcaaaattcttgatgatggatctctctgac

SEQ ID NO: 628737 - DNA, 33 bp, Homo sapien
tcaggatctgatgagaagctttaagatgtgcac

SEQ ID NO: 628738 - DNA, 33 bp, Homo sapien
tcaggatctgatgagaggctttaagatgtgcac

SEQ ID NO: 628739 - DNA, 33 bp, Homo sapien
aacgtttctcatctacaaaaacattaactttta

SEQ ID NO: 628740 - DNA, 33 bp, Homo sapien
aacgtttctcatctacgaaaacattaactttta

SEQ ID NO: 628741 - DNA, 33 bp, Homo sapien
acagatataatttgaaagcagatgggcagtggc

SEQ ID NO: 628742 - DNA, 33 bp, Homo sapien
acagatataatttgaaggcagatgggcagtggc

SEQ ID NO: 628743 - DNA, 33 bp, Homo sapien
aatacctcccctctagccccacactgtgtttcc

SEQ ID NO: 628744 - DNA, 33 bp, Homo sapien
aatacctcccctctagtcccacactgtgtttcc

SEQ ID NO: 628745 - DNA, 33 bp, Homo sapien
gtttaaaggaattcaccgatgtcaaggacaagc

SEQ ID NO: 628746 - DNA, 33 bp, Homo sapien
gtttaaaggaattcactgatgtcaaggacaagc

SEQ ID NO: 628747 - DNA, 33 bp, Homo sapien
gaatcaattctcactgaacatttatccctgaga

SEQ ID NO: 628748 - DNA, 33 bp, Homo sapien
gaatcaattctcactggacatttatccctgaga

SEQ ID NO: 628749 - DNA, 33 bp, Homo sapien
ttgtttttattcaccaaacagaactctaaagaa

SEQ ID NO: 628750 - DNA, 33 bp, Homo sapien
ttgtttttattcaccagacagaactctaaagaa

SEQ ID NO: 628751 - DNA, 33 bp, Homo sapien
atatctcgactagtaacgggttatttcaaaatc

SEQ ID NO: 628752 - DNA, 33 bp, Homo sapien
atatctcgactagtaatgggttatttcaaaatc

SEQ ID NO: 628753 - DNA, 33 bp, Homo sapien
ggacataatttggagacggataaggaccccaaa

SEQ ID NO: 628754 - DNA, 33 bp, Homo sapien
ggacataatttggagatggataaggaccccaaa

SEQ ID NO: 628755 - DNA, 33 bp, Homo sapien
ttaggtttggcgtatacgtgaaagtttgtcatg

SEQ ID NO: 628756 - DNA, 33 bp, Homo sapien
ttaggtttggcgtatatgtgaaagtttgtcatg

SEQ ID NO: 628757 - DNA, 33 bp, Homo sapien
cttcggcagattaaaacggtaacacatgggaag

SEQ ID NO: 628758 - DNA, 33 bp, Homo sapien
cttcggcagattaaaatggtaacacatgggaag

SEQ ID NO: 628759 - DNA, 33 bp, Homo sapien
tttatctctcggtgcaactgatgagtaatgtga

SEQ ID NO: 628760 - DNA, 33 bp, Homo sapien
tttatctctcggtgcagctgatgagtaatgtga

SEQ ID NO: 628761 - DNA, 33 bp, Homo sapien
ccagggctagctctggacatttcaagagatgta

SEQ ID NO: 628762 - DNA, 33 bp, Homo sapien
ccagggctagctctgggcatttcaagagatgta

SEQ ID NO: 628763 - DNA, 33 bp, Homo sapien
tcagcttcccttaatgcaccttttctccattgc

SEQ ID NO: 628764 - DNA, 33 bp, Homo sapien
tcagcttcccttaatgtaccttttctccattgc

SEQ ID NO: 628765 - DNA, 33 bp, Homo sapien
tgctttgagagtcacaaggggatttaatttgac

SEQ ID NO: 628766 - DNA, 33 bp, Homo sapien
tgctttgagagtcacagggggatttaatttgac

SEQ ID NO: 628767 - DNA, 33 bp, Homo sapien
tggagggaccattaaccgagcctcagatgccta

SEQ ID NO: 628768 - DNA, 33 bp, Homo sapien
tggagggaccattaactgagcctcagatgccta

SEQ ID NO: 628769 - DNA, 33 bp, Homo sapien
caagagtgatattgctaaaagaacacgaagtca

SEQ ID NO: 628770 - DNA, 33 bp, Homo sapien
caagagtgatattgctgaaagaacacgaagtca

SEQ ID NO: 628771 - DNA, 33 bp, Homo sapien
atgcaacattttctcaataaagatgattttcct

SEQ ID NO: 628772 - DNA, 33 bp, Homo sapien
atgcaacattttctcagtaaagatgattttcct

SEQ ID NO: 628773 - DNA, 33 bp, Homo sapien
agggttggttttagtcacacctcatggcccacc

SEQ ID NO: 628774 - DNA, 33 bp, Homo sapien
agggttggttttagtcgcacctcatggcccacc

SEQ ID NO: 628775 - DNA, 33 bp, Homo sapien
tctccaggattgacacaagagtaataatggaag

SEQ ID NO: 628776 - DNA, 33 bp, Homo sapien
tctccaggattgacacgagagtaataatggaag

SEQ ID NO: 628777 - DNA, 33 bp, Homo sapien
tgcatcatgcattgtaagtgaactcctacttta

SEQ ID NO: 628778 - DNA, 33 bp, Homo sapien
tgcatcatgcattgtatgtgaactcctacttta

SEQ ID NO: 628779 - DNA, 33 bp, Homo sapien
tgaaatgtgagtcttcaaggaaaaagataaatt

SEQ ID NO: 628780 - DNA, 33 bp, Homo sapien
tgaaatgtgagtcttcgaggaaaaagataaatt

SEQ ID NO: 628781 - DNA, 33 bp, Homo sapien
acattctctgtcagccacctttattctcatccc

SEQ ID NO: 628782 - DNA, 33 bp, Homo sapien
acattctctgtcagcctcctttattctcatccc

SEQ ID NO: 628783 - DNA, 33 bp, Homo sapien
aggagcgtctatactaaattttactacagcatt

SEQ ID NO: 628784 - DNA, 33 bp, Homo sapien
aggagcgtctatactatattttactacagcatt

SEQ ID NO: 628785 - DNA, 33 bp, Homo sapien
tctaaaattcctaaaggctcattctgtactatg

SEQ ID NO: 628786 - DNA, 33 bp, Homo sapien
tctaaaattcctaaagtctcattctgtactatg

SEQ ID NO: 628787 - DNA, 33 bp, Homo sapien
atggaactcagttggaaaggaggaatcaggaga

SEQ ID NO: 628788 - DNA, 33 bp, Homo sapien
atggaactcagttggagaggaggaatcaggaga

SEQ ID NO: 628789 - DNA, 33 bp, Homo sapien
tttatacttccccagcaatggaaaagagtgcca

SEQ ID NO: 628790 - DNA, 33 bp, Homo sapien
tttatacttccccagccatggaaaagagtgcca

SEQ ID NO: 628791 - DNA, 33 bp, Homo sapien
cactttactgttttcaaatgttttggttgagga

SEQ ID NO: 628792 - DNA, 33 bp, Homo sapien
cactttactgttttcatatgttttggttgagga

SEQ ID NO: 628793 - DNA, 33 bp, Homo sapien
aggccaaaggtctaaaatcagcaagtacttagc

SEQ ID NO: 628794 - DNA, 33 bp, Homo sapien
aggccaaaggtctaaagtcagcaagtacttagc

SEQ ID NO: 628795 - DNA, 33 bp, Homo sapien
ttcagtagaaagggagaaattgatgattggggc

SEQ ID NO: 628796 - DNA, 33 bp, Homo sapien
ttcagtagaaagggagcaattgatgattggggc

SEQ ID NO: 628797 - DNA, 33 bp, Homo sapien
attggggcacaagggtaaactctaggtgtgagg

SEQ ID NO: 628798 - DNA, 33 bp, Homo sapien
attggggcacaagggtcaactctaggtgtgagg

SEQ ID NO: 628799 - DNA, 33 bp, Homo sapien
cttcccttgttcctacaccagagctctgaatgc

SEQ ID NO: 628800 - DNA, 33 bp, Homo sapien
cttcccttgttcctaccccagagctctgaatgc

SEQ ID NO: 628801 - DNA, 33 bp, Homo sapien
cagcgccatgccctataaccaggacaatgctgg

SEQ ID NO: 628802 - DNA, 33 bp, Homo sapien
cagcgccatgccctatgaccaggacaatgctgg

SEQ ID NO: 628803 - DNA, 33 bp, Homo sapien
cagaaataaaactgaacatgttgattattcttg

SEQ ID NO: 628804 - DNA, 33 bp, Homo sapien
cagaaataaaactgaatatgttgattattcttg

SEQ ID NO: 628805 - DNA, 33 bp, Homo sapien
tattgacattttacagccatttccaaaaatgca

SEQ ID NO: 628806 - DNA, 33 bp, Homo sapien
tattgacattttacagtcatttccaaaaatgca

SEQ ID NO: 628807 - DNA, 33 bp, Homo sapien
tttcattgatgttttgcaacagaactatgtcaa

SEQ ID NO: 628808 - DNA, 33 bp, Homo sapien
tttcattgatgttttggaacagaactatgtcaa

SEQ ID NO: 628809 - DNA, 33 bp, Homo sapien
tcacccaccagttgccacctaagaagttctcaa

SEQ ID NO: 628810 - DNA, 33 bp, Homo sapien
tcacccaccagttgcctcctaagaagttctcaa

SEQ ID NO: 628811 - DNA, 33 bp, Homo sapien
tgagcacctcttaagcgcttatctttcttggct

SEQ ID NO: 628812 - DNA, 33 bp, Homo sapien
tgagcacctcttaagctcttatctttcttggct

SEQ ID NO: 628813 - DNA, 33 bp, Homo sapien
gaggcctgatgtaataagacaaacaaaaagttg

SEQ ID NO: 628814 - DNA, 33 bp, Homo sapien
gaggcctgatgtaataggacaaacaaaaagttg

SEQ ID NO: 628815 - DNA, 33 bp, Homo sapien
caagagaatttgttggctcatataatggtaaag

SEQ ID NO: 628816 - DNA, 33 bp, Homo sapien
caagagaatttgttggttcatataatggtaaag

SEQ ID NO: 628817 - DNA, 33 bp, Homo sapien
atgttctgacaatcaaaattctgaaaataagta

SEQ ID NO: 628818 - DNA, 33 bp, Homo sapien
atgttctgacaatcaacattctgaaaataagta

SEQ ID NO: 628819 - DNA, 33 bp, Homo sapien
atccgcatagtgaagacgttctgtaggtgaaag

SEQ ID NO: 628820 - DNA, 33 bp, Homo sapien
atccgcatagtgaagatgttctgtaggtgaaag

SEQ ID NO: 628821 - DNA, 33 bp, Homo sapien
aatgaatatgattatcaaaggtcttcagtgaac

SEQ ID NO: 628822 - DNA, 33 bp, Homo sapien
aatgaatatgattatcgaaggtcttcagtgaac

SEQ ID NO: 628823 - DNA, 33 bp, Homo sapien
caaagccttaagacgcaatatcctagaaggcac

SEQ ID NO: 628824 - DNA, 33 bp, Homo sapien
caaagccttaagacgcgatatcctagaaggcac

SEQ ID NO: 628825 - DNA, 33 bp, Homo sapien
tccagccagggtggaaaaagacagttctgagac

SEQ ID NO: 628826 - DNA, 33 bp, Homo sapien
tccagccagggtggaagaagacagttctgagac

SEQ ID NO: 628827 - DNA, 33 bp, Homo sapien
tacgacatgggatgagaatactgttaatgcttt

SEQ ID NO: 628828 - DNA, 33 bp, Homo sapien
tacgacatgggatgaggatactgttaatgcttt

SEQ ID NO: 628829 - DNA, 33 bp, Homo sapien
aaatgcacacagaaaacggactgttagattcca

SEQ ID NO: 628830 - DNA, 33 bp, Homo sapien
aaatgcacacagaaaatggactgttagattcca

SEQ ID NO: 628831 - DNA, 33 bp, Homo sapien
aaatgtttagcaggaaacaaattattcctacag

SEQ ID NO: 628832 - DNA, 33 bp, Homo sapien
aaatgtttagcaggaagcaaattattcctacag

SEQ ID NO: 628833 - DNA, 33 bp, Homo sapien
ccaataccacagtctcccggtccatcaggaaca

SEQ ID NO: 628834 - DNA, 33 bp, Homo sapien
ccaataccacagtctctcggtccatcaggaaca

SEQ ID NO: 628835 - DNA, 33 bp, Homo sapien
cctgtatagaaaatgcagaataagctcctccct

SEQ ID NO: 628836 - DNA, 33 bp, Homo sapien
cctgtatagaaaatgcggaataagctcctccct

SEQ ID NO: 628837 - DNA, 33 bp, Homo sapien
caaaatccatggatcccataacttagtctatgc

SEQ ID NO: 628838 - DNA, 33 bp, Homo sapien
caaaatccatggatcctataacttagtctatgc

SEQ ID NO: 628839 - DNA, 33 bp, Homo sapien
attttagccttgtaaactagtctttcattgtct

SEQ ID NO: 628840 - DNA, 33 bp, Homo sapien
attttagccttgtaaattagtctttcattgtct

SEQ ID NO: 628841 - DNA, 33 bp, Homo sapien
caggtggtatggaaaaatcaggcctgggtcagt

SEQ ID NO: 628842 - DNA, 33 bp, Homo sapien
caggtggtatggaaaagtcaggcctgggtcagt

SEQ ID NO: 628843 - DNA, 33 bp, Homo sapien
tgagaacctgctcagaagtcattcttcctgtgg

SEQ ID NO: 628844 - DNA, 33 bp, Homo sapien
tgagaacctgctcagaggtcattcttcctgtgg

SEQ ID NO: 628845 - DNA, 33 bp, Homo sapien
atcacctttggatagacgtctccctttagaatt

SEQ ID NO: 628846 - DNA, 33 bp, Homo sapien
atcacctttggatagatgtctccctttagaatt

SEQ ID NO: 628847 - DNA, 33 bp, Homo sapien
actcaggggttattggaaacaagaagcaacatg

SEQ ID NO: 628848 - DNA, 33 bp, Homo sapien
actcaggggttattgggaacaagaagcaacatg

SEQ ID NO: 628849 - DNA, 33 bp, Homo sapien
tagctctgaaacttaccagatgtgagccctggg

SEQ ID NO: 628850 - DNA, 33 bp, Homo sapien
tagctctgaaacttactagatgtgagccctggg

SEQ ID NO: 628851 - DNA, 33 bp, Homo sapien
aacaaattttttttcacaagcacattaaacttg

SEQ ID NO: 628852 - DNA, 33 bp, Homo sapien
aacaaattttttttcataagcacattaaacttg

SEQ ID NO: 628853 - DNA, 33 bp, Homo sapien
cagtggtcccagtgaagatgaccaactcgtgcc

SEQ ID NO: 628854 - DNA, 33 bp, Homo sapien
cagtggtcccagtgaatatgaccaactcgtgcc

SEQ ID NO: 628855 - DNA, 33 bp, Homo sapien
gccacatcaagctacaaggtcctgaaaagtggg

SEQ ID NO: 628856 - DNA, 33 bp, Homo sapien
gccacatcaagctacagggtcctgaaaagtggg

SEQ ID NO: 628857 - DNA, 33 bp, Homo sapien
tttgccctgccccaaacgcctaatatttgacaa

SEQ ID NO: 628858 - DNA, 33 bp, Homo sapien
tttgccctgccccaaatgcctaatatttgacaa

SEQ ID NO: 628859 - DNA, 33 bp, Homo sapien
gagacaagataattctcaaatacccatgccctc

SEQ ID NO: 628860 - DNA, 33 bp, Homo sapien
gagacaagataattctgaaatacccatgccctc

SEQ ID NO: 628861 - DNA, 33 bp, Homo sapien
taccatgtctgagtaacctatgaccccttcaaa

SEQ ID NO: 628862 - DNA, 33 bp, Homo sapien
taccatgtctgagtaatctatgaccccttcaaa

SEQ ID NO: 628863 - DNA, 33 bp, Homo sapien
gtgcaatttccagtacacttaccatgttacgac

SEQ ID NO: 628864 - DNA, 33 bp, Homo sapien
gtgcaatttccagtacgcttaccatgttacgac

SEQ ID NO: 628865 - DNA, 33 bp, Homo sapien; identical to SEQ ID NO: 628863

SEQ ID NO: 628866 - DNA, 33 bp, Homo sapien; identical to SEQ ID NO: 628864

SEQ ID NO: 628867 - DNA, 33 bp, Homo sapien
actctattgtcaatacggattctagaatgggat

SEQ ID NO: 628868 - DNA, 33 bp, Homo sapien
actctattgtcaatactgattctagaatgggat

SEQ ID NO: 628869 - DNA, 33 bp, Homo sapien
ctatctgccctttacacattgaatcaggtctaa

SEQ ID NO: 628870 - DNA, 33 bp, Homo sapien
ctatctgccctttacatattgaatcaggtctaa

SEQ ID NO: 628871 - DNA, 33 bp, Homo sapien
agctttccatcttttacgatgctttgaaacatt

SEQ ID NO: 628872 - DNA, 33 bp, Homo sapien
agctttccatcttttatgatgctttgaaacatt

SEQ ID NO: 628873 - DNA, 33 bp, Homo sapien
tgcctaactgcttttcaatgtaagaacaattgt

SEQ ID NO: 628874 - DNA, 33 bp, Homo sapien
tgcctaactgcttttcgatgtaagaacaattgt

SEQ ID NO: 628875 - DNA, 33 bp, Homo sapien
atgattaggtcatgaggatgattaggtcatgat

SEQ ID NO: 628876 - DNA, 33 bp, Homo sapien
atgattaggtcatgagtatgattaggtcatgat

SEQ ID NO: 628877 - DNA, 33 bp, Homo sapien
agacctaatcttgctagatcttattagtgtatt

SEQ ID NO: 628878 - DNA, 33 bp, Homo sapien
agacctaatcttgctatatcttattagtgtatt

SEQ ID NO: 628879 - DNA, 33 bp, Homo sapien
cccgagactttgggaactggctcactcaggcag

SEQ ID NO: 628880 - DNA, 33 bp, Homo sapien
cccgagactttgggaattggctcactcaggcag

SEQ ID NO: 628881 - DNA, 33 bp, Homo sapien
gaatggttttccaggaaggaagaaatatagcct

SEQ ID NO: 628882 - DNA, 33 bp, Homo sapien
gaatggttttccaggagggaagaaatatagcct

SEQ ID NO: 628883 - DNA, 33 bp, Homo sapien
agctactatctaccaccgtgctgttagaaggaa

SEQ ID NO: 628884 - DNA, 33 bp, Homo sapien
agctactatctaccacggtgctgttagaaggaa

SEQ ID NO: 628885 - DNA, 33 bp, Homo sapien
aatcaagactcctaaactgtcgcttgttgagaa

SEQ ID NO: 628886 - DNA, 33 bp, Homo sapien
aatcaagactcctaaattgtcgcttgttgagaa

SEQ ID NO: 628887 - DNA, 33 bp, Homo sapien
aaaaatgaatgcctggaagggacatattctacc

SEQ ID NO: 628888 - DNA, 33 bp, Homo sapien
aaaaatgaatgcctggcagggacatattctacc

SEQ ID NO: 628889 - DNA, 33 bp, Homo sapien
caacaatgccccgaaaactgttgccatcagctg

SEQ ID NO: 628890 - DNA, 33 bp, Homo sapien
caacaatgccccgaaagctgttgccatcagctg

SEQ ID NO: 628891 - DNA, 33 bp, Homo sapien
gcccagtaacagtggacaaaagcctatttagag

SEQ ID NO: 628892 - DNA, 33 bp, Homo sapien
gcccagtaacagtggataaaagcctatttagag

SEQ ID NO: 628893 - DNA, 33 bp, Homo sapien
actgaatgaacctccacgtagctgattctttgt

SEQ ID NO: 628894 - DNA, 33 bp, Homo sapien
actgaatgaacctccatgtagctgattctttgt

SEQ ID NO: 628895 - DNA, 33 bp, Homo sapien
atgtatagatgagcaacaattaggtcaaaggat

SEQ ID NO: 628896 - DNA, 33 bp, Homo sapien
atgtatagatgagcaataattaggtcaaaggat

SEQ ID NO: 628897 - DNA, 33 bp, Homo sapien
gaaataataggagaaaggaaggatgtatacgtg

SEQ ID NO: 628898 - DNA, 33 bp, Homo sapien
gaaataataggagaaatgaaggatgtatacgtg

SEQ ID NO: 628899 - DNA, 33 bp, Homo sapien
aagaacttattgtgaacatttgaccagaaaagt

SEQ ID NO: 628900 - DNA, 33 bp, Homo sapien
aagaacttattgtgaagatttgaccagaaaagt

SEQ ID NO: 628901 - DNA, 33 bp, Homo sapien
agctgaatcactggacaatgggctaaaaaagac

SEQ ID NO: 628902 - DNA, 33 bp, Homo sapien
agctgaatcactggacgatgggctaaaaaagac

SEQ ID NO: 628903 - DNA, 33 bp, Homo sapien
aagaattcaatcttgcacagaaagaagttctga

SEQ ID NO: 628904 - DNA, 33 bp, Homo sapien
aagaattcaatcttgcccagaaagaagttctga

SEQ ID NO: 628905 - DNA, 33 bp, Homo sapien
aagaaaattgtagaccaacttgattcaccagta

SEQ ID NO: 628906 - DNA, 33 bp, Homo sapien
aagaaaattgtagaccgacttgattcaccagta

SEQ ID NO: 628907 - DNA, 33 bp, Homo sapien
ataattccaatatgcaaacaatagttactatct

SEQ ID NO: 628908 - DNA, 33 bp, Homo sapien
ataattccaatatgcagacaatagttactatct

SEQ ID NO: 628909 - DNA, 33 bp, Homo sapien
ggtattgtaatctcaaacttttcaaggaagaag

SEQ ID NO: 628910 - DNA, 33 bp, Homo sapien
ggtattgtaatctcaagcttttcaaggaagaag

SEQ ID NO: 628911 - DNA, 33 bp, Homo sapien
agcaagagaagaagtgacacactttaacaccat

SEQ ID NO: 628912 - DNA, 33 bp, Homo sapien
agcaagagaagaagtgccacactttaacaccat

SEQ ID NO: 628913 - DNA, 33 bp, Homo sapien
tcatctcaatagacacagaaaaagcttttgata

SEQ ID NO: 628914 - DNA, 33 bp, Homo sapien
tcatctcaatagacacggaaaaagcttttgata

SEQ ID NO: 628915 - DNA, 33 bp, Homo sapien
agtagaagattcaggaactaaatttttataact

SEQ ID NO: 628916 - DNA, 33 bp, Homo sapien
agtagaagattcaggagctaaatttttataact

SEQ ID NO: 628917 - DNA, 33 bp, Homo sapien
gccttgtgctttcaaaaataatggaatcacagc

SEQ ID NO: 628918 - DNA, 33 bp, Homo sapien
gccttgtgctttcaaagataatggaatcacagc

SEQ ID NO: 628919 - DNA, 33 bp, Homo sapien
tcaaaatggaaagtgcactaaccggtaaatttt

SEQ ID NO: 628920 - DNA, 33 bp, Homo sapien
tcaaaatggaaagtgcgctaaccggtaaatttt

SEQ ID NO: 628921 - DNA, 33 bp, Homo sapien
gataatgagtaaagaccgaggctgagcacagtg

SEQ ID NO: 628922 - DNA, 33 bp, Homo sapien
gataatgagtaaagactgaggctgagcacagtg

SEQ ID NO: 628923 - DNA, 33 bp, Homo sapien
tactgtgatgtagaaccatccatcttccacctg

SEQ ID NO: 628924 - DNA, 33 bp, Homo sapien
tactgtgatgtagaactatccatcttccacctg

SEQ ID NO: 628925 - DNA, 33 bp, Homo sapien
taatagcctgtatttacgagtagccattaagca

SEQ ID NO: 628926 - DNA, 33 bp, Homo sapien
taatagcctgtatttatgagtagccattaagca

SEQ ID NO: 628927 - DNA, 33 bp, Homo sapien
tatgtcaacaaatgaacaggcaggtgttgctgg

SEQ ID NO: 628928 - DNA, 33 bp, Homo sapien
tatgtcaacaaatgaagaggcaggtgttgctgg

SEQ ID NO: 628929 - DNA, 33 bp, Homo sapien
agacaaaaaaataaacaggcatataacgagtgt

SEQ ID NO: 628930 - DNA, 33 bp, Homo sapien
agacaaaaaaataaacgggcatataacgagtgt

SEQ ID NO: 628931 - DNA, 33 bp, Homo sapien
caacagacaaatgacaacaccataagccgtggg

SEQ ID NO: 628932 - DNA, 33 bp, Homo sapien
caacagacaaatgacagcaccataagccgtggg

SEQ ID NO: 628933 - DNA, 33 bp, Homo sapien
agtagactcacattcccgcacggtaacaggaac

SEQ ID NO: 628934 - DNA, 33 bp, Homo sapien
agtagactcacattcctgcacggtaacaggaac

SEQ ID NO: 628935 - DNA, 33 bp, Homo sapien
gactggtgggtctgtggcaaactggagagtcca

SEQ ID NO: 628936 - DNA, 33 bp, Homo sapien
gactggtgggtctgtgtcaaactggagagtcca

SEQ ID NO: 628937 - DNA, 33 bp, Homo sapien
tgtctgcagggttctcacatctgtcctttccag

SEQ ID NO: 628938 - DNA, 33 bp, Homo sapien
tgtctgcagggttctcgcatctgtcctttccag

SEQ ID NO: 628939 - DNA, 33 bp, Homo sapien
gccagccaaatttaaaagattagcctctctgat

SEQ ID NO: 628940 - DNA, 33 bp, Homo sapien
gccagccaaatttaaaggattagcctctctgat

SEQ ID NO: 628941 - DNA, 33 bp, Homo sapien
gtatccagcagtccacagagaagaagtaaatac

SEQ ID NO: 628942 - DNA, 33 bp, Homo sapien
gtatccagcagtccacggagaagaagtaaatac

SEQ ID NO: 628943 - DNA, 33 bp, Homo sapien
gaagatttgctgcacaaaagacttacaatgaaa

SEQ ID NO: 628944 - DNA, 33 bp, Homo sapien
gaagatttgctgcacagaagacttacaatgaaa

SEQ ID NO: 628945 - DNA, 33 bp, Homo sapien
acacagcaaggctgccactgtgaagaaagcgag

SEQ ID NO: 628946 - DNA, 33 bp, Homo sapien
acacagcaaggctgccgctgtgaagaaagcgag

SEQ ID NO: 628947 - DNA, 33 bp, Homo sapien
tacattttgttgttaaatgtagccaatctctga

SEQ ID NO: 628948 - DNA, 33 bp, Homo sapien
tacattttgttgttaattgtagccaatctctga

SEQ ID NO: 628949 - DNA, 33 bp, Homo sapien
ctcctatcttgagagtaaaagcaagtccttcca

SEQ ID NO: 628950 - DNA, 33 bp, Homo sapien
ctcctatcttgagagtgaaagcaagtccttcca

SEQ ID NO: 628951 - DNA, 33 bp, Homo sapien
actagaaatagaaccagggtgcaaagagctttc

SEQ ID NO: 628952 - DNA, 33 bp, Homo sapien
actagaaatagaaccatggtgcaaagagctttc

SEQ ID NO: 628953 - DNA, 33 bp, Homo sapien
ctttgcaaaagatctagaacttccccattgata

SEQ ID NO: 628954 - DNA, 33 bp, Homo sapien
ctttgcaaaagatctataacttccccattgata

SEQ ID NO: 628955 - DNA, 33 bp, Homo sapien
taataactaaccttccagagaagtgacctaacc

SEQ ID NO: 628956 - DNA, 33 bp, Homo sapien
taataactaaccttccggagaagtgacctaacc

SEQ ID NO: 628957 - DNA, 33 bp, Homo sapien
ggactgcctgcctgtaaccagattggcccctgt

SEQ ID NO: 628958 - DNA, 33 bp, Homo sapien
ggactgcctgcctgtagccagattggcccctgt

SEQ ID NO: 628959 - DNA, 33 bp, Homo sapien
tttgatggccctgaacagataagtaatgttaca

SEQ ID NO: 628960 - DNA, 33 bp, Homo sapien
tttgatggccctgaacggataagtaatgttaca

SEQ ID NO: 628961 - DNA, 33 bp, Homo sapien
gaaaagaagatggcaaatctaaacaaaggcaaa

SEQ ID NO: 628962 - DNA, 33 bp, Homo sapien
gaaaagaagatggcaagtctaaacaaaggcaaa

SEQ ID NO: 628963 - DNA, 33 bp, Homo sapien
catgtcaaaaaagaaccgctattcactgcctca

SEQ ID NO: 628964 - DNA, 33 bp, Homo sapien
catgtcaaaaaagaactgctattcactgcctca

SEQ ID NO: 628965 - DNA, 33 bp, Homo sapien
cttagcacatcacagtcacaggatttgttttat

SEQ ID NO: 628966 - DNA, 33 bp, Homo sapien
cttagcacatcacagttacaggatttgttttat

SEQ ID NO: 628967 - DNA, 33 bp, Homo sapien
caaaccaatctttacaatgatgactgcatagta

SEQ ID NO: 628968 - DNA, 33 bp, Homo sapien
caaaccaatctttacagtgatgactgcatagta

SEQ ID NO: 628969 - DNA, 33 bp, Homo sapien
agggcttataaagagacacaaacagctattaat

SEQ ID NO: 628970 - DNA, 33 bp, Homo sapien
agggcttataaagagatacaaacagctattaat

SEQ ID NO: 628971 - DNA, 33 bp, Homo sapien
taaaaaaaatccagagacatatattttggcttt

SEQ ID NO: 628972 - DNA, 33 bp, Homo sapien
taaaaaaaatccagaggcatatattttggcttt

SEQ ID NO: 628973 - DNA, 33 bp, Homo sapien
atgaccctgagaaccaatcagatattgggtcat

SEQ ID NO: 628974 - DNA, 33 bp, Homo sapien
atgaccctgagaaccactcagatattgggtcat

SEQ ID NO: 628975 - DNA, 33 bp, Homo sapien
cacggaaaatggtgtaaaagtccagctaagaat

SEQ ID NO: 628976 - DNA, 33 bp, Homo sapien
cacggaaaatggtgtagaagtccagctaagaat

SEQ ID NO: 628977 - DNA, 33 bp, Homo sapien
tttataaacagaatgacatgatgtctgaaattt

SEQ ID NO: 628978 - DNA, 33 bp, Homo sapien
tttataaacagaatgatatgatgtctgaaattt

SEQ ID NO: 628979 - DNA, 33 bp, Homo sapien
agatgtgaagggcttgcataaaagaactgcaaa

SEQ ID NO: 628980 - DNA, 33 bp, Homo sapien
agatgtgaagggcttgtataaaagaactgcaaa

SEQ ID NO: 628981 - DNA, 33 bp, Homo sapien
acctggagagatgttaaggacaccaggttacac

SEQ ID NO: 628982 - DNA, 33 bp, Homo sapien
acctggagagatgttagggacaccaggttacac

SEQ ID NO: 628983 - DNA, 33 bp, Homo sapien
tgaacccaaaccaagacgggctatcctatggtt

SEQ ID NO: 628984 - DNA, 33 bp, Homo sapien
tgaacccaaaccaagatgggctatcctatggtt

SEQ ID NO: 628985 - DNA, 33 bp, Homo sapien
ctgtgctttaaggataggtttttgggtcctttt

SEQ ID NO: 628986 - DNA, 33 bp, Homo sapien
ctgtgctttaaggatatgtttttgggtcctttt

SEQ ID NO: 628987 - DNA, 33 bp, Homo sapien
caaataaactacttgcacatgaatgcttgtctc

SEQ ID NO: 628988 - DNA, 33 bp, Homo sapien
caaataaactacttgcgcatgaatgcttgtctc

SEQ ID NO: 628989 - DNA, 33 bp, Homo sapien
gttaacccctcagcaaacttcttggtttgacac

SEQ ID NO: 628990 - DNA, 33 bp, Homo sapien
gttaacccctcagcaaccttcttggtttgacac

SEQ ID NO: 628991 - DNA, 33 bp, Homo sapien
atttttaaaaggcttccctctcagaggatgttt

SEQ ID NO: 628992 - DNA, 33 bp, Homo sapien
atttttaaaaggcttctctctcagaggatgttt

SEQ ID NO: 628993 - DNA, 33 bp, Homo sapien
aggcaaactttgcttacgaacagctgtttatga

SEQ ID NO: 628994 - DNA, 33 bp, Homo sapien
aggcaaactttgcttatgaacagctgtttatga

SEQ ID NO: 628995 - DNA, 33 bp, Homo sapien
agtttagcagaaagacagaatttgattcaaaac

SEQ ID NO: 628996 - DNA, 33 bp, Homo sapien
agtttagcagaaagacggaatttgattcaaaac

SEQ ID NO: 628997 - DNA, 33 bp, Homo sapien
ccactgccctgaacaacggtcctgagtaaacac

SEQ ID NO: 628998 - DNA, 33 bp, Homo sapien
ccactgccctgaacaatggtcctgagtaaacac

SEQ ID NO: 628999 - DNA, 33 bp, Homo sapien
gtgtcagtgcaggttcaacaatggtaactaatg

SEQ ID NO: 629000 - DNA, 33 bp, Homo sapien
gtgtcagtgcaggttcgacaatggtaactaatg

SEQ ID NO: 629001 - DNA, 33 bp, Homo sapien
cttgaaaaatgcacaaacttatctacctatact

SEQ ID NO: 629002 - DNA, 33 bp, Homo sapien
cttgaaaaatgcacaaccttatctacctatact

SEQ ID NO: 629003 - DNA, 33 bp, Homo sapien
aaagattcagctccacaaatgcactgtggatta

SEQ ID NO: 629004 - DNA, 33 bp, Homo sapien
aaagattcagctccaccaatgcactgtggatta

SEQ ID NO: 629005 - DNA, 33 bp, Homo sapien
acgtgcaagatcacggaaaacactcagcactga

SEQ ID NO: 629006 - DNA, 33 bp, Homo sapien
acgtgcaagatcacgggaaacactcagcactga

SEQ ID NO: 629007 - DNA, 33 bp, Homo sapien
ggttcctttctatgcacaatcacaccaagcacc

SEQ ID NO: 629008 - DNA, 33 bp, Homo sapien
ggttcctttctatgcataatcacaccaagcacc

SEQ ID NO: 629009 - DNA, 33 bp, Homo sapien
tgtcgccaacaaggcaacttactacagattgca

SEQ ID NO: 629010 - DNA, 33 bp, Homo sapien
tgtcgccaacaaggcaccttactacagattgca

SEQ ID NO: 629011 - DNA, 33 bp, Homo sapien
ttttatacagtctgttaaaatttcccagattgt

SEQ ID NO: 629012 - DNA, 33 bp, Homo sapien
ttttatacagtctgtttaaatttcccagattgt

SEQ ID NO: 629013 - DNA, 33 bp, Homo sapien
agaatggtaagagacaagatattttccgtctta

SEQ ID NO: 629014 - DNA, 33 bp, Homo sapien
agaatggtaagagacaggatattttccgtctta

SEQ ID NO: 629015 - DNA, 33 bp, Homo sapien
gtggaaatgataagaagtaaggggatgtgggta

SEQ ID NO: 629016 - DNA, 33 bp, Homo sapien
gtggaaatgataagaattaaggggatgtgggta

SEQ ID NO: 629017 - DNA, 33 bp, Homo sapien
ttggaaaatgtatgcactatcttggtgtgaata

SEQ ID NO: 629018 - DNA, 33 bp, Homo sapien
ttggaaaatgtatgcagtatcttggtgtgaata

SEQ ID NO: 629019 - DNA, 33 bp, Homo sapien
tcttccttaaagtctcactgggagtatttcctt

SEQ ID NO: 629020 - DNA, 33 bp, Homo sapien
tcttccttaaagtctcgctgggagtatttcctt

SEQ ID NO: 629021 - DNA, 33 bp, Homo sapien
ctgtgagtcacccaggaatcttgatgtatctgt

SEQ ID NO: 629022 - DNA, 33 bp, Homo sapien
ctgtgagtcacccaggtatcttgatgtatctgt

SEQ ID NO: 629023 - DNA, 33 bp, Homo sapien
ggaggagacacaagcagtccataatagttggtg

SEQ ID NO: 629024 - DNA, 33 bp, Homo sapien
ggaggagacacaagcattccataatagttggtg

SEQ ID NO: 629025 - DNA, 33 bp, Homo sapien
gagattccaaaactcagtctctaaccactttat

SEQ ID NO: 629026 - DNA, 33 bp, Homo sapien
gagattccaaaactcattctctaaccactttat

SEQ ID NO: 629027 - DNA, 33 bp, Homo sapien
atgtgactcagagtaaaccactttcctggtagg

SEQ ID NO: 629028 - DNA, 33 bp, Homo sapien
atgtgactcagagtaagccactttcctggtagg

SEQ ID NO: 629029 - DNA, 33 bp, Homo sapien
atacatgaatattccaaattgcaacaactctac

SEQ ID NO: 629030 - DNA, 33 bp, Homo sapien
atacatgaatattccagattgcaacaactctac

SEQ ID NO: 629031 - DNA, 33 bp, Homo sapien
tcttggattatctggacgaacccaacatgatca

SEQ ID NO: 629032 - DNA, 33 bp, Homo sapien
tcttggattatctggatgaacccaacatgatca

SEQ ID NO: 629033 - DNA, 33 bp, Homo sapien
ctcactgcattatccacatttccttacctatct

SEQ ID NO: 629034 - DNA, 33 bp, Homo sapien
ctcactgcattatccatatttccttacctatct

SEQ ID NO: 629035 - DNA, 33 bp, Homo sapien
gccttttatacctcacacaagctagtcattggc

SEQ ID NO: 629036 - DNA, 33 bp, Homo sapien
gccttttatacctcacgcaagctagtcattggc

SEQ ID NO: 629037 - DNA, 33 bp, Homo sapien
ccttgtgtggtatcctcacgttgtctccaggct

SEQ ID NO: 629038 - DNA, 33 bp, Homo sapien
ccttgtgtggtatccttacgttgtctccaggct

SEQ ID NO: 629039 - DNA, 33 bp, Homo sapien
cttttattgactgttacaattttaaagaaaaat

SEQ ID NO: 629040 - DNA, 33 bp, Homo sapien
cttttattgactgttataattttaaagaaaaat

SEQ ID NO: 629041 - DNA, 33 bp, Homo sapien
agcaaaaaactccaacaggatgatgcccctggt

SEQ ID NO: 629042 - DNA, 33 bp, Homo sapien
agcaaaaaactccaaccggatgatgcccctggt

SEQ ID NO: 629043 - DNA, 33 bp, Homo sapien
caccccaggatttgcagtagaacatttttatca

SEQ ID NO: 629044 - DNA, 33 bp, Homo sapien
caccccaggatttgcattagaacatttttatca

SEQ ID NO: 629045 - DNA, 33 bp, Homo sapien
ccttcatttgcctacaatcgccatcacatgccc

SEQ ID NO: 629046 - DNA, 33 bp, Homo sapien
ccttcatttgcctacagtcgccatcacatgccc

SEQ ID NO: 629047 - DNA, 33 bp, Homo sapien
ttctacccaggagccaaggaggtaattgtcatt

SEQ ID NO: 629048 - DNA, 33 bp, Homo sapien
ttctacccaggagccagggaggtaattgtcatt

SEQ ID NO: 629049 - DNA, 33 bp, Homo sapien
cacaaaatatgctgttcaaaaaatgacacaaat

SEQ ID NO: 629050 - DNA, 33 bp, Homo sapien
cacaaaatatgctgttgaaaaaatgacacaaat

SEQ ID NO: 629051 - DNA, 33 bp, Homo sapien
ttctcatcctctcttccattcatccttaaacat

SEQ ID NO: 629052 - DNA, 33 bp, Homo sapien
ttctcatcctctcttctattcatccttaaacat

SEQ ID NO: 629053 - DNA, 33 bp, Homo sapien
acctctaactgcttatcaaacagctacaaataa

SEQ ID NO: 629054 - DNA, 33 bp, Homo sapien
acctctaactgcttatgaaacagctacaaataa

SEQ ID NO: 629055 - DNA, 33 bp, Homo sapien
tgtaagctataagaacaaggattgagatgacaa

SEQ ID NO: 629056 - DNA, 33 bp, Homo sapien
tgtaagctataagaacgaggattgagatgacaa

SEQ ID NO: 629057 - DNA, 33 bp, Homo sapien
gagcaaacaaatttcaatctcattccctgtaat

SEQ ID NO: 629058 - DNA, 33 bp, Homo sapien
gagcaaacaaatttcagtctcattccctgtaat

SEQ ID NO: 629059 - DNA, 33 bp, Homo sapien
attgctaactaggaccactcatcttggactgtt

SEQ ID NO: 629060 - DNA, 33 bp, Homo sapien
attgctaactaggaccgctcatcttggactgtt

SEQ ID NO: 629061 - DNA, 33 bp, Homo sapien
gactctctcactggaactctgctgagtctgatg

SEQ ID NO: 629062 - DNA, 33 bp, Homo sapien
gactctctcactggaattctgctgagtctgatg

SEQ ID NO: 629063 - DNA, 33 bp, Homo sapien
gtctgaagcaagttcccctataagtgactagat

SEQ ID NO: 629064 - DNA, 33 bp, Homo sapien
gtctgaagcaagttcctctataagtgactagat

SEQ ID NO: 629065 - DNA, 33 bp, Homo sapien
cccagttagtgagggacaaagaattaaacggac

SEQ ID NO: 629066 - DNA, 33 bp, Homo sapien
cccagttagtgagggataaagaattaaacggac

SEQ ID NO: 629067 - DNA, 33 bp, Homo sapien
aacataggagaatccgccactcagagatttttc

SEQ ID NO: 629068 - DNA, 33 bp, Homo sapien
aacataggagaatccgtcactcagagatttttc

SEQ ID NO: 629069 - DNA, 33 bp, Homo sapien
aaataagtgtgcagcaaacaatgtcagtgatct

SEQ ID NO: 629070 - DNA, 33 bp, Homo sapien
aaataagtgtgcagcagacaatgtcagtgatct

SEQ ID NO: 629071 - DNA, 33 bp, Homo sapien
ctgcctccaccaataccgccacaattgctgggg

SEQ ID NO: 629072 - DNA, 33 bp, Homo sapien
ctgcctccaccaatactgccacaattgctgggg

SEQ ID NO: 629073 - DNA, 33 bp, Homo sapien
ggatcttaggagacaactagagagagaagagaa

SEQ ID NO: 629074 - DNA, 33 bp, Homo sapien
ggatcttaggagacaattagagagagaagagaa

SEQ ID NO: 629075 - DNA, 33 bp, Homo sapien
tgatgttagagacaaacgtgacaaagaactcaa

SEQ ID NO: 629076 - DNA, 33 bp, Homo sapien
tgatgttagagacaaatgtgacaaagaactcaa

SEQ ID NO: 629077 - DNA, 33 bp, Homo sapien
actgagatgaagatgcaaagtaactatctagta

SEQ ID NO: 629078 - DNA, 33 bp, Homo sapien
actgagatgaagatgcgaagtaactatctagta

SEQ ID NO: 629079 - DNA, 33 bp, Homo sapien
gtgtagtagagaaggaaagaatgctagtttctg

SEQ ID NO: 629080 - DNA, 33 bp, Homo sapien
gtgtagtagagaaggagagaatgctagtttctg

SEQ ID NO: 629081 - DNA, 33 bp, Homo sapien
ccactctatcactctgaatactgagtctacttc

SEQ ID NO: 629082 - DNA, 33 bp, Homo sapien
ccactctatcactctggatactgagtctacttc

SEQ ID NO: 629083 - DNA, 33 bp, Homo sapien
gtgtctttggagtgaacctactcagagatgcca

SEQ ID NO: 629084 - DNA, 33 bp, Homo sapien
gtgtctttggagtgaagctactcagagatgcca

SEQ ID NO: 629085 - DNA, 33 bp, Homo sapien
gtggtggcacctgttcaagagggttaaaaggcc

SEQ ID NO: 629086 - DNA, 33 bp, Homo sapien
gtggtggcacctgttcgagagggttaaaaggcc

SEQ ID NO: 629087 - DNA, 33 bp, Homo sapien
ctttcatagtcagacaaggctctgttccaggga

SEQ ID NO: 629088 - DNA, 33 bp, Homo sapien
ctttcatagtcagacagggctctgttccaggga

SEQ ID NO: 629089 - DNA, 33 bp, Homo sapien
aagggctttatttacaagttgccaaagctccct

SEQ ID NO: 629090 - DNA, 33 bp, Homo sapien
aagggctttatttacacgttgccaaagctccct

SEQ ID NO: 629091 - DNA, 33 bp, Homo sapien
gcacctctgagttaaccgaggacttagcacttc

SEQ ID NO: 629092 - DNA, 33 bp, Homo sapien
gcacctctgagttaactgaggacttagcacttc

SEQ ID NO: 629093 - DNA, 33 bp, Homo sapien
ttactcccatttcacaaacaaggaagctgaggc

SEQ ID NO: 629094 - DNA, 33 bp, Homo sapien
ttactcccatttcacacacaaggaagctgaggc

SEQ ID NO: 629095 - DNA, 33 bp, Homo sapien
ggttgggaggagaaacaaagcataatgtatcct

SEQ ID NO: 629096 - DNA, 33 bp, Homo sapien
ggttgggaggagaaacgaagcataatgtatcct

SEQ ID NO: 629097 - DNA, 33 bp, Homo sapien
gggcagagcagaaacaacgcaggatttttctga

SEQ ID NO: 629098 - DNA, 33 bp, Homo sapien
gggcagagcagaaacagcgcaggatttttctga

SEQ ID NO: 629099 - DNA, 33 bp, Homo sapien
ttcaccctgaatgtgacgagtggccaatgaaga

SEQ ID NO: 629100 - DNA, 33 bp, Homo sapien
ttcaccctgaatgtgatgagtggccaatgaaga

SEQ ID NO: 629101 - DNA, 33 bp, Homo sapien
acagggaacacacagaatcattttcaacactct

SEQ ID NO: 629102 - DNA, 33 bp, Homo sapien
acagggaacacacagagtcattttcaacactct

SEQ ID NO: 629103 - DNA, 33 bp, Homo sapien
gttttgtgttttcttacgcagtgacccatcttt

SEQ ID NO: 629104 - DNA, 33 bp, Homo sapien
gttttgtgttttcttatgcagtgacccatcttt

SEQ ID NO: 629105 - DNA, 33 bp, Homo sapien
gctgtcaataagcaaagaatggtaggaggcatt

SEQ ID NO: 629106 - DNA, 33 bp, Homo sapien
gctgtcaataagcaaataatggtaggaggcatt

SEQ ID NO: 629107 - DNA, 33 bp, Homo sapien
catgggcaaatggctacaccactcttgagcact

SEQ ID NO: 629108 - DNA, 33 bp, Homo sapien
catgggcaaatggctataccactcttgagcact

SEQ ID NO: 629109 - DNA, 33 bp, Homo sapien
aggttacctcacctaaaagagactttcacacaa

SEQ ID NO: 629110 - DNA, 33 bp, Homo sapien
aggttacctcacctaagagagactttcacacaa

SEQ ID NO: 629111 - DNA, 33 bp, Homo sapien
tcaaagaaggcctaacacagaagaccatgactg

SEQ ID NO: 629112 - DNA, 33 bp, Homo sapien
tcaaagaaggcctaacgcagaagaccatgactg

SEQ ID NO: 629113 - DNA, 33 bp, Homo sapien
ttgatgggaattatggaatgttctcagactttt

SEQ ID NO: 629114 - DNA, 33 bp, Homo sapien
ttgatgggaattatggtatgttctcagactttt

SEQ ID NO: 629115 - DNA, 33 bp, Homo sapien
ctggatccctaaggacagcattgcctggcagct

SEQ ID NO: 629116 - DNA, 33 bp, Homo sapien
ctggatccctaaggacggcattgcctggcagct

SEQ ID NO: 629117 - DNA, 33 bp, Homo sapien
agtccacagggcgaaaaggcactctctctctga

SEQ ID NO: 629118 - DNA, 33 bp, Homo sapien
agtccacagggcgaaagggcactctctctctga

SEQ ID NO: 629119 - DNA, 33 bp, Homo sapien
tgcttgcacgaagacccaaaccaagacaatgaa

SEQ ID NO: 629120 - DNA, 33 bp, Homo sapien
tgcttgcacgaagaccgaaaccaagacaatgaa

SEQ ID NO: 629121 - DNA, 33 bp, Homo sapien
tcagtctcagtcaagactccaggatcaggtctc

SEQ ID NO: 629122 - DNA, 33 bp, Homo sapien
tcagtctcagtcaagattccaggatcaggtctc

SEQ ID NO: 629123 - DNA, 33 bp, Homo sapien
actgacattttatctcactcgtcttcatagctc

SEQ ID NO: 629124 - DNA, 33 bp, Homo sapien
actgacattttatctcgctcgtcttcatagctc

SEQ ID NO: 629125 - DNA, 33 bp, Homo sapien
ccctttgttgagatgacaaaactgaagtcaagg

SEQ ID NO: 629126 - DNA, 33 bp, Homo sapien
ccctttgttgagatgagaaaactgaagtcaagg

SEQ ID NO: 629127 - DNA, 33 bp, Homo sapien
ctcacttgatgacaagaaaaagaagtcagacac

SEQ ID NO: 629128 - DNA, 33 bp, Homo sapien
ctcacttgatgacaagcaaaagaagtcagacac

SEQ ID NO: 629129 - DNA, 33 bp, Homo sapien
ctgggtgtccaaactagggggtacagagcaaaa

SEQ ID NO: 629130 - DNA, 33 bp, Homo sapien
ctgggtgtccaaactatggggtacagagcaaaa

SEQ ID NO: 629131 - DNA, 33 bp, Homo sapien
tgatgggaaggaaggacgttgacccaataggcc

SEQ ID NO: 629132 - DNA, 33 bp, Homo sapien
tgatgggaaggaaggatgttgacccaataggcc

SEQ ID NO: 629133 - DNA, 33 bp, Homo sapien
aggaatatattgattacagcctagagagttcaa

SEQ ID NO: 629134 - DNA, 33 bp, Homo sapien
aggaatatattgattatagcctagagagttcaa

SEQ ID NO: 629135 - DNA, 33 bp, Homo sapien
acatgaccagaacatgcagtctcattcatagtt

SEQ ID NO: 629136 - DNA, 33 bp, Homo sapien
acatgaccagaacatggagtctcattcatagtt

SEQ ID NO: 629137 - DNA, 33 bp, Homo sapien
atctaaccatttctgaagcagggccttatactc

SEQ ID NO: 629138 - DNA, 33 bp, Homo sapien
atctaaccatttctgaggcagggccttatactc

SEQ ID NO: 629139 - DNA, 33 bp, Homo sapien
cactaaacactatgtcaccaacacaaagagtgg

SEQ ID NO: 629140 - DNA, 33 bp, Homo sapien
cactaaacactatgtcgccaacacaaagagtgg

SEQ ID NO: 629141 - DNA, 33 bp, Homo sapien
cttggcatagatcaaaattagtgcatggccaat

SEQ ID NO: 629142 - DNA, 33 bp, Homo sapien
cttggcatagatcaaagttagtgcatggccaat

SEQ ID NO: 629143 - DNA, 33 bp, Homo sapien
aagacacacactattaacaagcaagtaagtgaa

SEQ ID NO: 629144 - DNA, 33 bp, Homo sapien
aagacacacactattagcaagcaagtaagtgaa

SEQ ID NO: 629145 - DNA, 33 bp, Homo sapien
tgtccagttgtttcaactaaggaattattgttc

SEQ ID NO: 629146 - DNA, 33 bp, Homo sapien
tgtccagttgtttcaattaaggaattattgttc

SEQ ID NO: 629147 - DNA, 33 bp, Homo sapien
caggacataattcctccagagaaacagcagcat

SEQ ID NO: 629148 - DNA, 33 bp, Homo sapien
caggacataattcctctagagaaacagcagcat

SEQ ID NO: 629149 - DNA, 33 bp, Homo sapien
gttaattctcaaagtacgtccgtcaacgtgcaa

SEQ ID NO: 629150 - DNA, 33 bp, Homo sapien
gttaattctcaaagtatgtccgtcaacgtgcaa

SEQ ID NO: 629151 - DNA, 33 bp, Homo sapien
agcaggagttggtagacaaatattccagctcct

SEQ ID NO: 629152 - DNA, 33 bp, Homo sapien
agcaggagttggtagagaaatattccagctcct

SEQ ID NO: 629153 - DNA, 33 bp, Homo sapien
agcaggcttcttaaacagtcagaaaccacacag

SEQ ID NO: 629154 - DNA, 33 bp, Homo sapien
agcaggcttcttaaacggtcagaaaccacacag

SEQ ID NO: 629155 - DNA, 33 bp, Homo sapien
tcccaggagatgagatcactagctaaaattcca

SEQ ID NO: 629156 - DNA, 33 bp, Homo sapien
tcccaggagatgagattactagctaaaattcca

SEQ ID NO: 629157 - DNA, 33 bp, Homo sapien
gttgggcatgtaccttaaagcaatgactgagcc

SEQ ID NO: 629158 - DNA, 33 bp, Homo sapien
gttgggcatgtaccttgaagcaatgactgagcc

SEQ ID NO: 629159 - DNA, 33 bp, Homo sapien
tacatgcccaacacccacttggatgctatgaga

SEQ ID NO: 629160 - DNA, 33 bp, Homo sapien
tacatgcccaacacccgcttggatgctatgaga

SEQ ID NO: 629161 - DNA, 33 bp, Homo sapien
agcttgtcgtattctcacaaagtaccttcttgc

SEQ ID NO: 629162 - DNA, 33 bp, Homo sapien
agcttgtcgtattctcgcaaagtaccttcttgc

SEQ ID NO: 629163 - DNA, 33 bp, Homo sapien
gaggcattcattgacaaaggtcatctcagtaga

SEQ ID NO: 629164 - DNA, 33 bp, Homo sapien
gaggcattcattgacacaggtcatctcagtaga

SEQ ID NO: 629165 - DNA, 33 bp, Homo sapien
gcctggaccatataaaaaagggccttattccaa

SEQ ID NO: 629166 - DNA, 33 bp, Homo sapien
gcctggaccatataaagaagggccttattccaa

SEQ ID NO: 629167 - DNA, 33 bp, Homo sapien
gggatttgcattataaatagtggctttgaagaa

SEQ ID NO: 629168 - DNA, 33 bp, Homo sapien
gggatttgcattataagtagtggctttgaagaa

SEQ ID NO: 629169 - DNA, 33 bp, Homo sapien
ttccacatatcccacacgaggtccagtatcttc

SEQ ID NO: 629170 - DNA, 33 bp, Homo sapien
ttccacatatcccacatgaggtccagtatcttc

SEQ ID NO: 629171 - DNA, 33 bp, Homo sapien
aagctgctaagtgtcacgtagtattgctgtact

SEQ ID NO: 629172 - DNA, 33 bp, Homo sapien
aagctgctaagtgtcatgtagtattgctgtact

SEQ ID NO: 629173 - DNA, 33 bp, Homo sapien
tagcaagctgtcctcccgcgatgctctgtgttc

SEQ ID NO: 629174 - DNA, 33 bp, Homo sapien
tagcaagctgtcctcctgcgatgctctgtgttc

SEQ ID NO: 629175 - DNA, 33 bp, Homo sapien
ggaacagacgaagcaaatggaagtaatgaatta

SEQ ID NO: 629176 - DNA, 33 bp, Homo sapien
ggaacagacgaagcaactggaagtaatgaatta

SEQ ID NO: 629177 - DNA, 33 bp, Homo sapien
cacttatctagggaaaacacattgtgagccatt

SEQ ID NO: 629178 - DNA, 33 bp, Homo sapien
cacttatctagggaaagcacattgtgagccatt

SEQ ID NO: 629179 - DNA, 33 bp, Homo sapien
aagagctaaaactatccaccagactgcagtcca

SEQ ID NO: 629180 - DNA, 33 bp, Homo sapien
aagagctaaaactatcgaccagactgcagtcca

SEQ ID NO: 629181 - DNA, 33 bp, Homo sapien
aatgtgttatcaagcacgcaatcactatgggag

SEQ ID NO: 629182 - DNA, 33 bp, Homo sapien
aatgtgttatcaagcatgcaatcactatgggag

SEQ ID NO: 629183 - DNA, 33 bp, Homo sapien
agccaaggtaaaggatcagagcatttccatagt

SEQ ID NO: 629184 - DNA, 33 bp, Homo sapien
agccaaggtaaaggattagagcatttccatagt

SEQ ID NO: 629185 - DNA, 33 bp, Homo sapien
aatggtaagtgactcactgaaaatactcagtgc

SEQ ID NO: 629186 - DNA, 33 bp, Homo sapien
aatggtaagtgactcattgaaaatactcagtgc

SEQ ID NO: 629187 - DNA, 33 bp, Homo sapien
tgtgtccttttagggacgagaaacaagaccaga

SEQ ID NO: 629188 - DNA, 33 bp, Homo sapien
tgtgtccttttagggatgagaaacaagaccaga

SEQ ID NO: 629189 - DNA, 33 bp, Homo sapien
cctgtttccttacagacctttctggcagcactt

SEQ ID NO: 629190 - DNA, 33 bp, Homo sapien
cctgtttccttacagatctttctggcagcactt

SEQ ID NO: 629191 - DNA, 33 bp, Homo sapien
ccactctatgtgctcaaccttctgtttttacac

SEQ ID NO: 629192 - DNA, 33 bp, Homo sapien
ccactctatgtgctcagccttctgtttttacac

SEQ ID NO: 629193 - DNA, 33 bp, Homo sapien
aactatatgatttcagcaagttccatttggtag

SEQ ID NO: 629194 - DNA, 33 bp, Homo sapien
aactatatgatttcaggaagttccatttggtag

SEQ ID NO: 629195 - DNA, 33 bp, Homo sapien
aattattgattatcagaagctaggaaaccacaa

SEQ ID NO: 629196 - DNA, 33 bp, Homo sapien
aattattgattatcagcagctaggaaaccacaa

SEQ ID NO: 629197 - DNA, 33 bp, Homo sapien
tcccattgactttgaccggagacatttataggg

SEQ ID NO: 629198 - DNA, 33 bp, Homo sapien
tcccattgactttgactggagacatttataggg

SEQ ID NO: 629199 - DNA, 33 bp, Homo sapien
tcaaattttcagtgaagcagttttgatataact

SEQ ID NO: 629200 - DNA, 33 bp, Homo sapien
tcaaattttcagtgaatcagttttgatataact

SEQ ID NO: 629201 - DNA, 33 bp, Homo sapien
tcacgtatgtttagaaactcctatgtaagagtc

SEQ ID NO: 629202 - DNA, 33 bp, Homo sapien
tcacgtatgtttagaacctcctatgtaagagtc

SEQ ID NO: 629203 - DNA, 33 bp, Homo sapien
ataccttactcagttaaagccacatatctctcc

SEQ ID NO: 629204 - DNA, 33 bp, Homo sapien
ataccttactcagttacagccacatatctctcc

SEQ ID NO: 629205 - DNA, 33 bp, Homo sapien
gccttcagatctcataaatacaagtaaaaacaa

SEQ ID NO: 629206 - DNA, 33 bp, Homo sapien
gccttcagatctcatacatacaagtaaaaacaa

SEQ ID NO: 629207 - DNA, 33 bp, Homo sapien
aaaacaagcaggtaacgatgataactttacttc

SEQ ID NO: 629208 - DNA, 33 bp, Homo sapien
aaaacaagcaggtaactatgataactttacttc

SEQ ID NO: 629209 - DNA, 33 bp, Homo sapien
ttgtgttatcttgtataaatggcttgcactgct

SEQ ID NO: 629210 - DNA, 33 bp, Homo sapien
ttgtgttatcttgtatgaatggcttgcactgct

SEQ ID NO: 629211 - DNA, 33 bp, Homo sapien
gcactttcttacgacactggaggtctcaaattc

SEQ ID NO: 629212 - DNA, 33 bp, Homo sapien
gcactttcttacgacagtggaggtctcaaattc

SEQ ID NO: 629213 - DNA, 33 bp, Homo sapien
aagagtctgcctcatcaaccatatggaaacaga

SEQ ID NO: 629214 - DNA, 33 bp, Homo sapien
aagagtctgcctcatccaccatatggaaacaga

SEQ ID NO: 629215 - DNA, 33 bp, Homo sapien
taagtggaaaatataaacctcttgccagctacc

SEQ ID NO: 629216 - DNA, 33 bp, Homo sapien
taagtggaaaatataaccctcttgccagctacc

SEQ ID NO: 629217 - DNA, 33 bp, Homo sapien
caaaaagatgagtccccaaagagttaaggattt

SEQ ID NO: 629218 - DNA, 33 bp, Homo sapien
caaaaagatgagtcccgaaagagttaaggattt

SEQ ID NO: 629219 - DNA, 33 bp, Homo sapien
agtcatcacaaagtaccaagggtagcaaaaaga

SEQ ID NO: 629220 - DNA, 33 bp, Homo sapien
agtcatcacaaagtactaagggtagcaaaaaga

SEQ ID NO: 629221 - DNA, 33 bp, Homo sapien
aggagaatgaaagaaccaactagtcagtgcatt

SEQ ID NO: 629222 - DNA, 33 bp, Homo sapien
aggagaatgaaagaactaactagtcagtgcatt

SEQ ID NO: 629223 - DNA, 33 bp, Homo sapien
ttctagttacctttccagaccttcgagtctccc

SEQ ID NO: 629224 - DNA, 33 bp, Homo sapien
ttctagttacctttccggaccttcgagtctccc

SEQ ID NO: 629225 - DNA, 33 bp, Homo sapien
gcacaattctgtcttccagtctttgtctatagt

SEQ ID NO: 629226 - DNA, 33 bp, Homo sapien
gcacaattctgtcttctagtctttgtctatagt

SEQ ID NO: 629227 - DNA, 33 bp, Homo sapien
gaatataaatgagcaaatgttataactttttta

SEQ ID NO: 629228 - DNA, 33 bp, Homo sapien
gaatataaatgagcaactgttataactttttta

SEQ ID NO: 629229 - DNA, 33 bp, Homo sapien
ggaagaataaaaaataaaacagcgcacgaggga

SEQ ID NO: 629230 - DNA, 33 bp, Homo sapien
ggaagaataaaaaatataacagcgcacgaggga

SEQ ID NO: 629231 - DNA, 33 bp, Homo sapien
gaaggaatcagaaaagaaaagatcaggacacag

SEQ ID NO: 629232 - DNA, 33 bp, Homo sapien
gaaggaatcagaaaaggaaagatcaggacacag

SEQ ID NO: 629233 - DNA, 33 bp, Homo sapien
ggaaataataactactaagcagagtaatgaaac

SEQ ID NO: 629234 - DNA, 33 bp, Homo sapien
ggaaataataactactgagcagagtaatgaaac

SEQ ID NO: 629235 - DNA, 33 bp, Homo sapien
agtaatgaaacagaaacgaacacatgccaaaaa

SEQ ID NO: 629236 - DNA, 33 bp, Homo sapien
agtaatgaaacagaaatgaacacatgccaaaaa

SEQ ID NO: 629237 - DNA, 33 bp, Homo sapien
ggagggggcttgctcacctattcagaaggcagg

SEQ ID NO: 629238 - DNA, 33 bp, Homo sapien
ggagggggcttgctcagctattcagaaggcagg

SEQ ID NO: 629239 - DNA, 33 bp, Homo sapien
ctgtggcaatgtttcacgtaagggctcttgact

SEQ ID NO: 629240 - DNA, 33 bp, Homo sapien
ctgtggcaatgtttcatgtaagggctcttgact

SEQ ID NO: 629241 - DNA, 33 bp, Homo sapien
cctattctacaatgaaaaggtgttaattatgtt

SEQ ID NO: 629242 - DNA, 33 bp, Homo sapien
cctattctacaatgaagaggtgttaattatgtt

SEQ ID NO: 629243 - DNA, 33 bp, Homo sapien
tatgtgggttcagacacatgatattctctggtt

SEQ ID NO: 629244 - DNA, 33 bp, Homo sapien
tatgtgggttcagacatatgatattctctggtt

SEQ ID NO: 629245 - DNA, 33 bp, Homo sapien
taaagttcctgtaaaagtaaacatcaatacaaa

SEQ ID NO: 629246 - DNA, 33 bp, Homo sapien
taaagttcctgtaaaattaaacatcaatacaaa

SEQ ID NO: 629247 - DNA, 33 bp, Homo sapien
agtcagagggtcagagccaagtcataggctgag

SEQ ID NO: 629248 - DNA, 33 bp, Homo sapien
agtcagagggtcagagtcaagtcataggctgag

SEQ ID NO: 629249 - DNA, 33 bp, Homo sapien
aaagttgttttgagacaaatttcttagcactta

SEQ ID NO: 629250 - DNA, 33 bp, Homo sapien
aaagttgttttgagacgaatttcttagcactta

SEQ ID NO: 629251 - DNA, 33 bp, Homo sapien
aacaaagcattgcacagtgagatccagaggatg

SEQ ID NO: 629252 - DNA, 33 bp, Homo sapien
aacaaagcattgcacattgagatccagaggatg

SEQ ID NO: 629253 - DNA, 33 bp, Homo sapien
tcagaagcagaataaactgaagatatcatctac

SEQ ID NO: 629254 - DNA, 33 bp, Homo sapien
tcagaagcagaataaattgaagatatcatctac

SEQ ID NO: 629255 - DNA, 33 bp, Homo sapien
ggctcaactgactccaaagaagcttgggccatg

SEQ ID NO: 629256 - DNA, 33 bp, Homo sapien
ggctcaactgactccagagaagcttgggccatg

SEQ ID NO: 629257 - DNA, 33 bp, Homo sapien
tggggatctactgatcaaggtgaaatagtgcca

SEQ ID NO: 629258 - DNA, 33 bp, Homo sapien
tggggatctactgatctaggtgaaatagtgcca

SEQ ID NO: 629259 - DNA, 33 bp, Homo sapien
tgtggtgatgggaagaaggctaaacacggaggg

SEQ ID NO: 629260 - DNA, 33 bp, Homo sapien
tgtggtgatgggaagagggctaaacacggaggg

SEQ ID NO: 629261 - DNA, 33 bp, Homo sapien
aaagcttataaggaaacgtatctgaaaatgatg

SEQ ID NO: 629262 - DNA, 33 bp, Homo sapien
aaagcttataaggaaatgtatctgaaaatgatg

SEQ ID NO: 629263 - DNA, 33 bp, Homo sapien
cagctcattgtcagtaacatggaggagcctaac

SEQ ID NO: 629264 - DNA, 33 bp, Homo sapien
cagctcattgtcagtagcatggaggagcctaac

SEQ ID NO: 629265 - DNA, 33 bp, Homo sapien
cataagacctggatctaagacctgaatttgctg

SEQ ID NO: 629266 - DNA, 33 bp, Homo sapien
cataagacctggatctgagacctgaatttgctg

SEQ ID NO: 629267 - DNA, 33 bp, Homo sapien
agagagttttctcaaacggaacaaagcaatttc

SEQ ID NO: 629268 - DNA, 33 bp, Homo sapien
agagagttttctcaaatggaacaaagcaatttc

SEQ ID NO: 629269 - DNA, 33 bp, Homo sapien
gctgggcaaatcaaaaagtgactgtcctgggag

SEQ ID NO: 629270 - DNA, 33 bp, Homo sapien
gctgggcaaatcaaaaggtgactgtcctgggag

SEQ ID NO: 629271 - DNA, 33 bp, Homo sapien
atgcttctataaaggaaagaggatcactcaaaa

SEQ ID NO: 629272 - DNA, 33 bp, Homo sapien
atgcttctataaaggacagaggatcactcaaaa

SEQ ID NO: 629273 - DNA, 33 bp, Homo sapien
tacaaatcttttttacggcttcaataatcaccc

SEQ ID NO: 629274 - DNA, 33 bp, Homo sapien
tacaaatcttttttactgcttcaataatcaccc

SEQ ID NO: 629275 - DNA, 33 bp, Homo sapien
ctttgaagaatggataaaaatgttatatgcata

SEQ ID NO: 629276 - DNA, 33 bp, Homo sapien
ctttgaagaatggatacaaatgttatatgcata

SEQ ID NO: 629277 - DNA, 33 bp, Homo sapien
gtcacccaggtactgaatatagcactcaatagt

SEQ ID NO: 629278 - DNA, 33 bp, Homo sapien
gtcacccaggtactgagtatagcactcaatagt

SEQ ID NO: 629279 - DNA, 33 bp, Homo sapien
ggactactagattggaaagaaagagagggtggc

SEQ ID NO: 629280 - DNA, 33 bp, Homo sapien
ggactactagattggagagaaagagagggtggc

SEQ ID NO: 629281 - DNA, 33 bp, Homo sapien
ttatctgaagttcaaaggtatctgggcgctcct

SEQ ID NO: 629282 - DNA, 33 bp, Homo sapien
ttatctgaagttcaaatgtatctgggcgctcct

SEQ ID NO: 629283 - DNA, 33 bp, Homo sapien
aggcatcagacttagacgtgattctggaaggaa

SEQ ID NO: 629284 - DNA, 33 bp, Homo sapien
aggcatcagacttagatgtgattctggaaggaa

SEQ ID NO: 629285 - DNA, 33 bp, Homo sapien
acccacttaaggaagcacttttggtccttctgg

SEQ ID NO: 629286 - DNA, 33 bp, Homo sapien
acccacttaaggaagcgcttttggtccttctgg

SEQ ID NO: 629287 - DNA, 33 bp, Homo sapien
atggttcatttattcaaagactgatccaaaatt

SEQ ID NO: 629288 - DNA, 33 bp, Homo sapien
atggttcatttattcagagactgatccaaaatt

SEQ ID NO: 629289 - DNA, 33 bp, Homo sapien
cagcttgaagttcaaaaacagtcagaagtagct

SEQ ID NO: 629290 - DNA, 33 bp, Homo sapien
cagcttgaagttcaaacacagtcagaagtagct

SEQ ID NO: 629291 - DNA, 33 bp, Homo sapien
tagccacagaacctggaccaaattcactgaagg

SEQ ID NO: 629292 - DNA, 33 bp, Homo sapien
tagccacagaacctgggccaaattcactgaagg

SEQ ID NO: 629293 - DNA, 33 bp, Homo sapien
accttccactcttgataaacttggataggaagt

SEQ ID NO: 629294 - DNA, 33 bp, Homo sapien
accttccactcttgatgaacttggataggaagt

SEQ ID NO: 629295 - DNA, 33 bp, Homo sapien
ctctgtaacaggccccaaagtgaagcaaaccga

SEQ ID NO: 629296 - DNA, 33 bp, Homo sapien
ctctgtaacaggcccccaagtgaagcaaaccga

SEQ ID NO: 629297 - DNA, 33 bp, Homo sapien
tgtcttctccatggtaaagtcagagtgttcttt

SEQ ID NO: 629298 - DNA, 33 bp, Homo sapien
tgtcttctccatggtacagtcagagtgttcttt

SEQ ID NO: 629299 - DNA, 33 bp, Homo sapien
ccaagccaagaacgtgaacatcattcttgtctt

SEQ ID NO: 629300 - DNA, 33 bp, Homo sapien
ccaagccaagaacgtggacatcattcttgtctt

SEQ ID NO: 629301 - DNA, 33 bp, Homo sapien
aatcttctgattttgaacttggtagatgcatac

SEQ ID NO: 629302 - DNA, 33 bp, Homo sapien
aatcttctgattttgatcttggtagatgcatac

SEQ ID NO: 629303 - DNA, 33 bp, Homo sapien
cctctggattaactgcaaacacgttaaactctt

SEQ ID NO: 629304 - DNA, 33 bp, Homo sapien
cctctggattaactgcgaacacgttaaactctt

SEQ ID NO: 629305 - DNA, 33 bp, Homo sapien
gaggatgaggtaacaaacttccccataccacct

SEQ ID NO: 629306 - DNA, 33 bp, Homo sapien
gaggatgaggtaacaagcttccccataccacct

SEQ ID NO: 629307 - DNA, 33 bp, Homo sapien
aagtgggaagggtagacgaagatagaaactacc

SEQ ID NO: 629308 - DNA, 33 bp, Homo sapien
aagtgggaagggtagaggaagatagaaactacc

SEQ ID NO: 629309 - DNA, 33 bp, Homo sapien
aagacgtatgacagaaccaagaagttgaagtgt

SEQ ID NO: 629310 - DNA, 33 bp, Homo sapien
aagacgtatgacagaagcaagaagttgaagtgt

SEQ ID NO: 629311 - DNA, 33 bp, Homo sapien
agtaaataagaagggagagaaaattgttatggc

SEQ ID NO: 629312 - DNA, 33 bp, Homo sapien
agtaaataagaagggatagaaaattgttatggc

SEQ ID NO: 629313 - DNA, 33 bp, Homo sapien
gttatggcagcaagaaattctaccttgaaaata

SEQ ID NO: 629314 - DNA, 33 bp, Homo sapien
gttatggcagcaagaagttctaccttgaaaata

SEQ ID NO: 629315 - DNA, 33 bp, Homo sapien
ctaatgattcattggcaacaaatttctagaatg

SEQ ID NO: 629316 - DNA, 33 bp, Homo sapien
ctaatgattcattggcgacaaatttctagaatg

SEQ ID NO: 629317 - DNA, 33 bp, Homo sapien
ttctaaatcattatacacagaaacgctctcagt

SEQ ID NO: 629318 - DNA, 33 bp, Homo sapien
ttctaaatcattatacccagaaacgctctcagt

SEQ ID NO: 629319 - DNA, 33 bp, Homo sapien
aatagcaacgaaaagacgagatcactgagaaca

SEQ ID NO: 629320 - DNA, 33 bp, Homo sapien
aatagcaacgaaaagatgagatcactgagaaca

SEQ ID NO: 629321 - DNA, 33 bp, Homo sapien
aaatcctactcccacaacttataacacggtaca

SEQ ID NO: 629322 - DNA, 33 bp, Homo sapien
aaatcctactcccacagcttataacacggtaca

SEQ ID NO: 629323 - DNA, 33 bp, Homo sapien
tgtgaagtgttttacacatcctgaggttgtcaa

SEQ ID NO: 629324 - DNA, 33 bp, Homo sapien
tgtgaagtgttttacatatcctgaggttgtcaa

SEQ ID NO: 629325 - DNA, 33 bp, Homo sapien
tacttaacctggcaaccctaaggcaaatttgca

SEQ ID NO: 629326 - DNA, 33 bp, Homo sapien
tacttaacctggcaacgctaaggcaaatttgca

SEQ ID NO: 629327 - DNA, 33 bp, Homo sapien
tctaaaagttggagcaaaactcctaaattaaac

SEQ ID NO: 629328 - DNA, 33 bp, Homo sapien
tctaaaagttggagcagaactcctaaattaaac

SEQ ID NO: 629329 - DNA, 33 bp, Homo sapien
caacagtgagcaaatacgtgttattttaagtcg

SEQ ID NO: 629330 - DNA, 33 bp, Homo sapien
caacagtgagcaaatatgtgttattttaagtcg

SEQ ID NO: 629331 - DNA, 33 bp, Homo sapien
ttagaactacaccttacactcaatgcaagtgct

SEQ ID NO: 629332 - DNA, 33 bp, Homo sapien
ttagaactacaccttatactcaatgcaagtgct

SEQ ID NO: 629333 - DNA, 33 bp, Homo sapien
tgttctttatgctctccgaaccttcttcctttt

SEQ ID NO: 629334 - DNA, 33 bp, Homo sapien
tgttctttatgctctctgaaccttcttcctttt

SEQ ID NO: 629335 - DNA, 33 bp, Homo sapien
ttctactttttaaatgaaagtgtctatagtggt

SEQ ID NO: 629336 - DNA, 33 bp, Homo sapien
ttctactttttaaatgtaagtgtctatagtggt

SEQ ID NO: 629337 - DNA, 33 bp, Homo sapien
gttagctggccactgaactaaatgaatggacca

SEQ ID NO: 629338 - DNA, 33 bp, Homo sapien
gttagctggccactgagctaaatgaatggacca

SEQ ID NO: 629339 - DNA, 33 bp, Homo sapien
tttctgacctttctaaatatgtagataaatatg

SEQ ID NO: 629340 - DNA, 33 bp, Homo sapien
tttctgacctttctaagtatgtagataaatatg

SEQ ID NO: 629341 - DNA, 33 bp, Homo sapien
cagtccttgctatgcacctgagtaaagctaaac

SEQ ID NO: 629342 - DNA, 33 bp, Homo sapien
cagtccttgctatgcatctgagtaaagctaaac

SEQ ID NO: 629343 - DNA, 33 bp, Homo sapien
gagagctgaactgacacgatgatgaatggtaat

SEQ ID NO: 629344 - DNA, 33 bp, Homo sapien
gagagctgaactgacatgatgatgaatggtaat

SEQ ID NO: 629345 - DNA, 33 bp, Homo sapien
tctgccctgttaatccgcactagctcacatccc

SEQ ID NO: 629346 - DNA, 33 bp, Homo sapien
tctgccctgttaatcctcactagctcacatccc

SEQ ID NO: 629347 - DNA, 33 bp, Homo sapien
taacatagacagaataaggctgtggtccttgag

SEQ ID NO: 629348 - DNA, 33 bp, Homo sapien
taacatagacagaatagggctgtggtccttgag

SEQ ID NO: 629349 - DNA, 33 bp, Homo sapien
tataatgtgctcctgaaaaggtatgcatattgg

SEQ ID NO: 629350 - DNA, 33 bp, Homo sapien
tataatgtgctcctgagaaggtatgcatattgg

SEQ ID NO: 629351 - DNA, 33 bp, Homo sapien
gatctttattcttttacacagcaacatcctatt

SEQ ID NO: 629352 - DNA, 33 bp, Homo sapien
gatctttattcttttagacagcaacatcctatt

SEQ ID NO: 629353 - DNA, 33 bp, Homo sapien
caagtggagttcttcacagaaatatgacttggg

SEQ ID NO: 629354 - DNA, 33 bp, Homo sapien
caagtggagttcttcagagaaatatgacttggg

SEQ ID NO: 629355 - DNA, 33 bp, Homo sapien
aactaagacatttacactgatactaacaactca

SEQ ID NO: 629356 - DNA, 33 bp, Homo sapien
aactaagacatttacagtgatactaacaactca

SEQ ID NO: 629357 - DNA, 33 bp, Homo sapien
actccttgctttatcaatgagctctgaggattg

SEQ ID NO: 629358 - DNA, 33 bp, Homo sapien
actccttgctttatcagtgagctctgaggattg

SEQ ID NO: 629359 - DNA, 33 bp, Homo sapien
atttaaaattaattcaatcatttacctcataaa

SEQ ID NO: 629360 - DNA, 33 bp, Homo sapien
atttaaaattaattcagtcatttacctcataaa

SEQ ID NO: 629361 - DNA, 33 bp, Homo sapien
ttcctcactaatgtcaacaagctcaccttcacc

SEQ ID NO: 629362 - DNA, 33 bp, Homo sapien
ttcctcactaatgtcagcaagctcaccttcacc

SEQ ID NO: 629363 - DNA, 33 bp, Homo sapien
aaatgtagctgtgacactgatcagagaaatgaa

SEQ ID NO: 629364 - DNA, 33 bp, Homo sapien
aaatgtagctgtgacattgatcagagaaatgaa

SEQ ID NO: 629365 - DNA, 33 bp, Homo sapien
tattccatccccctacacacacctcatgcacac

SEQ ID NO: 629366 - DNA, 33 bp, Homo sapien
tattccatccccctacgcacacctcatgcacac

SEQ ID NO: 629367 - DNA, 33 bp, Homo sapien
gaatggtccatcctgcactttggccactcagta

SEQ ID NO: 629368 - DNA, 33 bp, Homo sapien
gaatggtccatcctgcgctttggccactcagta

SEQ ID NO: 629369 - DNA, 33 bp, Homo sapien
ttcattttccagttcccgaatcaattagaagta

SEQ ID NO: 629370 - DNA, 33 bp, Homo sapien
ttcattttccagttcctgaatcaattagaagta

SEQ ID NO: 629371 - DNA, 33 bp, Homo sapien
aaccaggtcaactggcggaaagcaatggtaaaa

SEQ ID NO: 629372 - DNA, 33 bp, Homo sapien
aaccaggtcaactggctgaaagcaatggtaaaa

SEQ ID NO: 629373 - DNA, 33 bp, Homo sapien
aatgggtgaaactggaatatgatctacagttcg

SEQ ID NO: 629374 - DNA, 33 bp, Homo sapien
aatgggtgaaactggagtatgatctacagttcg

SEQ ID NO: 629375 - DNA, 33 bp, Homo sapien
attgtcttgcaacaaagaatttctatggtgtcg

SEQ ID NO: 629376 - DNA, 33 bp, Homo sapien
attgtcttgcaacaaataatttctatggtgtcg

SEQ ID NO: 629377 - DNA, 33 bp, Homo sapien
tgtcttcagtgctgcacattttaacatcatcag

SEQ ID NO: 629378 - DNA, 33 bp, Homo sapien
tgtcttcagtgctgcatattttaacatcatcag

SEQ ID NO: 629379 - DNA, 33 bp, Homo sapien
caaggtctatattacaagactactggaacatga

SEQ ID NO: 629380 - DNA, 33 bp, Homo sapien
caaggtctatattacacgactactggaacatga

SEQ ID NO: 629381 - DNA, 33 bp, Homo sapien
gattcagcactgctacaactggtgagtttttcc

SEQ ID NO: 629382 - DNA, 33 bp, Homo sapien
gattcagcactgctacgactggtgagtttttcc

SEQ ID NO: 629383 - DNA, 33 bp, Homo sapien
aaagaaaaagaaagacacaacaaatagaagacc

SEQ ID NO: 629384 - DNA, 33 bp, Homo sapien
aaagaaaaagaaagacccaacaaatagaagacc

SEQ ID NO: 629385 - DNA, 33 bp, Homo sapien
cccacgcagcataggcaaaaacagtcattcagt

SEQ ID NO: 629386 - DNA, 33 bp, Homo sapien
cccacgcagcataggccaaaacagtcattcagt

SEQ ID NO: 629387 - DNA, 33 bp, Homo sapien
gttgggttgtcattaaagcgtacaattttaatt

SEQ ID NO: 629388 - DNA, 33 bp, Homo sapien
gttgggttgtcattaacgcgtacaattttaatt

SEQ ID NO: 629389 - DNA, 33 bp, Homo sapien
caggaatgaaaactaaaaaaagaagcatacaaa

SEQ ID NO: 629390 - DNA, 33 bp, Homo sapien
caggaatgaaaactaagaaaagaagcatacaaa

SEQ ID NO: 629391 - DNA, 33 bp, Homo sapien
cttgggaataatgagaaggaattgctgtagaga

SEQ ID NO: 629392 - DNA, 33 bp, Homo sapien
cttgggaataatgagatggaattgctgtagaga

SEQ ID NO: 629393 - DNA, 33 bp, Homo sapien
tctagtttctggtaaacgtgaattaggttattc

SEQ ID NO: 629394 - DNA, 33 bp, Homo sapien
tctagtttctggtaaatgtgaattaggttattc

SEQ ID NO: 629395 - DNA, 33 bp, Homo sapien
tagcttcctgaactgcaattggcccgtgaggag

SEQ ID NO: 629396 - DNA, 33 bp, Homo sapien
tagcttcctgaactgcgattggcccgtgaggag

SEQ ID NO: 629397 - DNA, 33 bp, Homo sapien
caagctaagatgtaaacgcagtgtgcttggcta

SEQ ID NO: 629398 - DNA, 33 bp, Homo sapien
caagctaagatgtaaatgcagtgtgcttggcta

SEQ ID NO: 629399 - DNA, 33 bp, Homo sapien
tttacttatccggacaaaaaggatgtctttaaa

SEQ ID NO: 629400 - DNA, 33 bp, Homo sapien
tttacttatccggacacaaaggatgtctttaaa

SEQ ID NO: 629401 - DNA, 33 bp, Homo sapien
gaccaatagtaagtgacagtgaggtatgttact

SEQ ID NO: 629402 - DNA, 33 bp, Homo sapien
gaccaatagtaagtgatagtgaggtatgttact

SEQ ID NO: 629403 - DNA, 33 bp, Homo sapien
tgcagatggtccctaacctataatggcttgact

SEQ ID NO: 629404 - DNA, 33 bp, Homo sapien
tgcagatggtccctaatctataatggcttgact

SEQ ID NO: 629405 - DNA, 33 bp, Homo sapien
atttatgagaaggtcaagaaaatatgaactctg

SEQ ID NO: 629406 - DNA, 33 bp, Homo sapien
atttatgagaaggtcaggaaaatatgaactctg

SEQ ID NO: 629407 - DNA, 33 bp, Homo sapien
tgaagagttgcataaactgacttaaacacacat

SEQ ID NO: 629408 - DNA, 33 bp, Homo sapien
tgaagagttgcataaattgacttaaacacacat

SEQ ID NO: 629409 - DNA, 33 bp, Homo sapien
atacagttctgtgatacgaatttagtacttaca

SEQ ID NO: 629410 - DNA, 33 bp, Homo sapien
atacagttctgtgatatgaatttagtacttaca

SEQ ID NO: 629411 - DNA, 33 bp, Homo sapien
ttgggatagttctcatcagatgtcttcactttt

SEQ ID NO: 629412 - DNA, 33 bp, Homo sapien
ttgggatagttctcattagatgtcttcactttt

SEQ ID NO: 629413 - DNA, 33 bp, Homo sapien
taagccttaactggacaggtaccctacttggag

SEQ ID NO: 629414 - DNA, 33 bp, Homo sapien
taagccttaactggacgggtaccctacttggag

SEQ ID NO: 629415 - DNA, 33 bp, Homo sapien
cctttgaattcttgatcacattcagctaatgtg

SEQ ID NO: 629416 - DNA, 33 bp, Homo sapien
cctttgaattcttgatgacattcagctaatgtg

SEQ ID NO: 629417 - DNA, 33 bp, Homo sapien
ggcgccattccatttacatagagttcagcatta

SEQ ID NO: 629418 - DNA, 33 bp, Homo sapien
ggcgccattccatttatatagagttcagcatta

SEQ ID NO: 629419 - DNA, 33 bp, Homo sapien
ctcctgcccaaaacctaaactatcagtctcttt

SEQ ID NO: 629420 - DNA, 33 bp, Homo sapien
ctcctgcccaaaacctgaactatcagtctcttt

SEQ ID NO: 629421 - DNA, 33 bp, Homo sapien
gtatctcattttgaaaacaagaccctcctcatc

SEQ ID NO: 629422 - DNA, 33 bp, Homo sapien
gtatctcattttgaaaccaagaccctcctcatc

SEQ ID NO: 629423 - DNA, 33 bp, Homo sapien
aacttcaggaacagcaaattaaaacagtgcctt

SEQ ID NO: 629424 - DNA, 33 bp, Homo sapien
aacttcaggaacagcagattaaaacagtgcctt

SEQ ID NO: 629425 - DNA, 33 bp, Homo sapien
ctcataaagctaagtacacctgatgttgactga

SEQ ID NO: 629426 - DNA, 33 bp, Homo sapien
ctcataaagctaagtagacctgatgttgactga

SEQ ID NO: 629427 - DNA, 33 bp, Homo sapien
tcctactgcttcatagaaagtgagacaattaaa

SEQ ID NO: 629428 - DNA, 33 bp, Homo sapien
tcctactgcttcataggaagtgagacaattaaa

SEQ ID NO: 629429 - DNA, 33 bp, Homo sapien
ctcctggccaaaaggaatattaacagacatttt

SEQ ID NO: 629430 - DNA, 33 bp, Homo sapien
ctcctggccaaaaggagtattaacagacatttt

SEQ ID NO: 629431 - DNA, 33 bp, Homo sapien
tgaaagctgcaggttccaaattacagaatcaag

SEQ ID NO: 629432 - DNA, 33 bp, Homo sapien
tgaaagctgcaggttctaaattacagaatcaag

SEQ ID NO: 629433 - DNA, 33 bp, Homo sapien; identical to SEQ ID NO: 629431

SEQ ID NO: 629434 - DNA, 33 bp, Homo sapien; identical to SEQ ID NO: 629432

SEQ ID NO: 629435 - DNA, 33 bp, Homo sapien
gaaataccttttcaaaccacattgaatgtcatt

SEQ ID NO: 629436 - DNA, 33 bp, Homo sapien
gaaataccttttcaaatcacattgaatgtcatt

SEQ ID NO: 629437 - DNA, 33 bp, Homo sapien
agctgactaaggtacacactgattatcctagac

SEQ ID NO: 629438 - DNA, 33 bp, Homo sapien
agctgactaaggtacatactgattatcctagac

SEQ ID NO: 629439 - DNA, 33 bp, Homo sapien
cacaattcaaaacatgaaggacataactacaga

SEQ ID NO: 629440 - DNA, 33 bp, Homo sapien
cacaattcaaaacatgcaggacataactacaga

SEQ ID NO: 629441 - DNA, 33 bp, Homo sapien
accggcaggaaagctacgtcactgtagtccctc

SEQ ID NO: 629442 - DNA, 33 bp, Homo sapien
accggcaggaaagctatgtcactgtagtccctc

SEQ ID NO: 629443 - DNA, 33 bp, Homo sapien
ctaaatggctgagaaaaaaatcaaaataatatt

SEQ ID NO: 629444 - DNA, 33 bp, Homo sapien
ctaaatggctgagaaacaaatcaaaataatatt

SEQ ID NO: 629445 - DNA, 33 bp, Homo sapien
aggtttaattatattcccatacagatggcctgc

SEQ ID NO: 629446 - DNA, 33 bp, Homo sapien
aggtttaattatattctcatacagatggcctgc

SEQ ID NO: 629447 - DNA, 33 bp, Homo sapien
gtccctggtgtcaaaaaaagttgggtaccggtg

SEQ ID NO: 629448 - DNA, 33 bp, Homo sapien
gtccctggtgtcaaaacaagttgggtaccggtg

SEQ ID NO: 629449 - DNA, 33 bp, Homo sapien
gccacacagggctactcagaactcgaaaagtgg

SEQ ID NO: 629450 - DNA, 33 bp, Homo sapien
gccacacagggctactgagaactcgaaaagtgg

SEQ ID NO: 629451 - DNA, 33 bp, Homo sapien
catttggattccaaacggatgtaagtggtaaag

SEQ ID NO: 629452 - DNA, 33 bp, Homo sapien
catttggattccaaactgatgtaagtggtaaag

SEQ ID NO: 629453 - DNA, 33 bp, Homo sapien
tgtactgataagtgcaaaaggcctgaaataacc

SEQ ID NO: 629454 - DNA, 33 bp, Homo sapien
tgtactgataagtgcagaaggcctgaaataacc

SEQ ID NO: 629455 - DNA, 33 bp, Homo sapien
ccgacttctcacatacaatagaataacagcatc

SEQ ID NO: 629456 - DNA, 33 bp, Homo sapien
ccgacttctcacatacgatagaataacagcatc

SEQ ID NO: 629457 - DNA, 33 bp, Homo sapien
catctctagctcctaaaaagtaaacaaaaatga

SEQ ID NO: 629458 - DNA, 33 bp, Homo sapien
catctctagctcctaagaagtaaacaaaaatga

SEQ ID NO: 629459 - DNA, 33 bp, Homo sapien
gtgatttacctgagatcagaacagtttttctag

SEQ ID NO: 629460 - DNA, 33 bp, Homo sapien
gtgatttacctgagattagaacagtttttctag

SEQ ID NO: 629461 - DNA, 33 bp, Homo sapien
aggtcggcacaagctacaggtcaaaagaccttg

SEQ ID NO: 629462 - DNA, 33 bp, Homo sapien
aggtcggcacaagctagaggtcaaaagaccttg

SEQ ID NO: 629463 - DNA, 33 bp, Homo sapien
agagtaagtaggacaacgccacataaaaagagg

SEQ ID NO: 629464 - DNA, 33 bp, Homo sapien
agagtaagtaggacaatgccacataaaaagagg

SEQ ID NO: 629465 - DNA, 33 bp, Homo sapien
tggtgcagagagggtaactttctggcaggaaat

SEQ ID NO: 629466 - DNA, 33 bp, Homo sapien
tggtgcagagagggtacctttctggcaggaaat

SEQ ID NO: 629467 - DNA, 33 bp, Homo sapien
gattaaaagatgtcaccgtctactaatttatgt

SEQ ID NO: 629468 - DNA, 33 bp, Homo sapien
gattaaaagatgtcactgtctactaatttatgt

SEQ ID NO: 629469 - DNA, 33 bp, Homo sapien
gctagtttgtgccaccaagacagatcctatccc

SEQ ID NO: 629470 - DNA, 33 bp, Homo sapien
gctagtttgtgccaccgagacagatcctatccc

SEQ ID NO: 629471 - DNA, 33 bp, Homo sapien
gtgctaagtccataaaacaccttctagtcctgg

SEQ ID NO: 629472 - DNA, 33 bp, Homo sapien
gtgctaagtccataaaccaccttctagtcctgg

SEQ ID NO: 629473 - DNA, 33 bp, Homo sapien
accaggcacaaatgaaagtaggattgagaatgg

SEQ ID NO: 629474 - DNA, 33 bp, Homo sapien
accaggcacaaatgaaggtaggattgagaatgg

SEQ ID NO: 629475 - DNA, 33 bp, Homo sapien
atccccagtatgccaaatgttatcactggcatc

SEQ ID NO: 629476 - DNA, 33 bp, Homo sapien
atccccagtatgccaactgttatcactggcatc

SEQ ID NO: 629477 - DNA, 33 bp, Homo sapien
tattccctgaagcaaacataactaagtcagtga

SEQ ID NO: 629478 - DNA, 33 bp, Homo sapien
tattccctgaagcaaatataactaagtcagtga

SEQ ID NO: 629479 - DNA, 33 bp, Homo sapien
atctccacaactgccaaggtacatgagtattat

SEQ ID NO: 629480 - DNA, 33 bp, Homo sapien
atctccacaactgccagggtacatgagtattat

SEQ ID NO: 629481 - DNA, 33 bp, Homo sapien
tgcacctccgctaatacggcactcctttataat

SEQ ID NO: 629482 - DNA, 33 bp, Homo sapien
tgcacctccgctaatatggcactcctttataat

SEQ ID NO: 629483 - DNA, 33 bp, Homo sapien
tcttttttggcaatcacctttttccatgtgaat

SEQ ID NO: 629484 - DNA, 33 bp, Homo sapien
tcttttttggcaatcagctttttccatgtgaat

SEQ ID NO: 629485 - DNA, 33 bp, Homo sapien
acaacagtgaactaaaacaggtagaagtgagtc

SEQ ID NO: 629486 - DNA, 33 bp, Homo sapien
acaacagtgaactaaagcaggtagaagtgagtc

SEQ ID NO: 629487 - DNA, 33 bp, Homo sapien
aaccctcttgtcgtaacaggggcaaaggaactc

SEQ ID NO: 629488 - DNA, 33 bp, Homo sapien
aaccctcttgtcgtaataggggcaaaggaactc

SEQ ID NO: 629489 - DNA, 33 bp, Homo sapien
taatatgtgccaacaccggtccatgctttcaag

SEQ ID NO: 629490 - DNA, 33 bp, Homo sapien
taatatgtgccaacactggtccatgctttcaag

SEQ ID NO: 629491 - DNA, 33 bp, Homo sapien
ggaggggacatacataccatacaaacgcatgca

SEQ ID NO: 629492 - DNA, 33 bp, Homo sapien
ggaggggacatacatatcatacaaacgcatgca

SEQ ID NO: 629493 - DNA, 33 bp, Homo sapien
aacctgctttcaggacccctctctctgagtgtc

SEQ ID NO: 629494 - DNA, 33 bp, Homo sapien
aacctgctttcaggacgcctctctctgagtgtc

SEQ ID NO: 629495 - DNA, 33 bp, Homo sapien
agaaaaaacgtaaccacaagaaatgtgaaagta

SEQ ID NO: 629496 - DNA, 33 bp, Homo sapien
agaaaaaacgtaaccataagaaatgtgaaagta

SEQ ID NO: 629497 - DNA, 33 bp, Homo sapien
ccatgcgttcttaatacgctttcaaagatttct

SEQ ID NO: 629498 - DNA, 33 bp, Homo sapien
ccatgcgttcttaatatgctttcaaagatttct

SEQ ID NO: 629499 - DNA, 33 bp, Homo sapien
ggaaagtccatcctaaacatggtataaaggcta

SEQ ID NO: 629500 - DNA, 33 bp, Homo sapien
ggaaagtccatcctaagcatggtataaaggcta

SEQ ID NO: 629501 - DNA, 33 bp, Homo sapien
tggaaacagggtgtccaacgtgaggctaaaggg

SEQ ID NO: 629502 - DNA, 33 bp, Homo sapien
tggaaacagggtgtccgacgtgaggctaaaggg

SEQ ID NO: 629503 - DNA, 33 bp, Homo sapien
cgtctagggatttgcactgattctcaggtgaca

SEQ ID NO: 629504 - DNA, 33 bp, Homo sapien
cgtctagggatttgcattgattctcaggtgaca

SEQ ID NO: 629505 - DNA, 33 bp, Homo sapien
gggaggctttgcaatacagagtgacatttgaat

SEQ ID NO: 629506 - DNA, 33 bp, Homo sapien
gggaggctttgcaatagagagtgacatttgaat

SEQ ID NO: 629507 - DNA, 33 bp, Homo sapien
cagcagccaggtcagaaaacgggtctgggatat

SEQ ID NO: 629508 - DNA, 33 bp, Homo sapien
cagcagccaggtcagagaacgggtctgggatat

SEQ ID NO: 629509 - DNA, 33 bp, Homo sapien
cttttttccaccttcacagcttccaggtggaca

SEQ ID NO: 629510 - DNA, 33 bp, Homo sapien
cttttttccaccttcagagcttccaggtggaca

SEQ ID NO: 629511 - DNA, 33 bp, Homo sapien
attatttatctttggccacttgtggttgtgacc

SEQ ID NO: 629512 - DNA, 33 bp, Homo sapien
attatttatctttggcgacttgtggttgtgacc

SEQ ID NO: 629513 - DNA, 33 bp, Homo sapien
caagacacacagtcataatcttccacctcctcg

SEQ ID NO: 629514 - DNA, 33 bp, Homo sapien
caagacacacagtcatgatcttccacctcctcg

SEQ ID NO: 629515 - DNA, 33 bp, Homo sapien
cctaaaaaatcagcaacgttcgccagttcaatc

SEQ ID NO: 629516 - DNA, 33 bp, Homo sapien
cctaaaaaatcagcaatgttcgccagttcaatc

SEQ ID NO: 629517 - DNA, 33 bp, Homo sapien
aatccttgttactcaaaatagttaaagatgtac

SEQ ID NO: 629518 - DNA, 33 bp, Homo sapien
aatccttgttactcaagatagttaaagatgtac

SEQ ID NO: 629519 - DNA, 33 bp, Homo sapien
gaaaatgcattatctacggtgtctcaagccgtc

SEQ ID NO: 629520 - DNA, 33 bp, Homo sapien
gaaaatgcattatctatggtgtctcaagccgtc

SEQ ID NO: 629521 - DNA, 33 bp, Homo sapien
gctcagatgatacaagaaagctggggatggcag

SEQ ID NO: 629522 - DNA, 33 bp, Homo sapien
gctcagatgatacaagcaagctggggatggcag

SEQ ID NO: 629523 - DNA, 33 bp, Homo sapien
gcctagcagtgtctctcacctgacacctttcct

SEQ ID NO: 629524 - DNA, 33 bp, Homo sapien
gcctagcagtgtctcttacctgacacctttcct

SEQ ID NO: 629525 - DNA, 33 bp, Homo sapien
tcaagatgagcatgagccctggtgagtctatcc

SEQ ID NO: 629526 - DNA, 33 bp, Homo sapien
tcaagatgagcatgagtcctggtgagtctatcc

SEQ ID NO: 629527 - DNA, 33 bp, Homo sapien
ctacatatctctggcacgaataaatgaatattt

SEQ ID NO: 629528 - DNA, 33 bp, Homo sapien
ctacatatctctggcatgaataaatgaatattt

SEQ ID NO: 629529 - DNA, 33 bp, Homo sapien
agtgatgtcccctttcaagatgggcatgagatg

SEQ ID NO: 629530 - DNA, 33 bp, Homo sapien
agtgatgtcccctttcgagatgggcatgagatg

SEQ ID NO: 629531 - DNA, 33 bp, Homo sapien
ttaatccaacagcctcaatgcttgtcaatctaa

SEQ ID NO: 629532 - DNA, 33 bp, Homo sapien
ttaatccaacagcctcgatgcttgtcaatctaa

SEQ ID NO: 629533 - DNA, 33 bp, Homo sapien
ccacccttcttaaagcgacttgtcaggcttcga

SEQ ID NO: 629534 - DNA, 33 bp, Homo sapien
ccacccttcttaaagctacttgtcaggcttcga

SEQ ID NO: 629535 - DNA, 33 bp, Homo sapien
atgtgactggtgagaaagcatgctgggtcagcc

SEQ ID NO: 629536 - DNA, 33 bp, Homo sapien
atgtgactggtgagaaggcatgctgggtcagcc

SEQ ID NO: 629537 - DNA, 33 bp, Homo sapien
cttctttgggccttcacatctctatcatcccac

SEQ ID NO: 629538 - DNA, 33 bp, Homo sapien
cttctttgggccttcagatctctatcatcccac

SEQ ID NO: 629539 - DNA, 33 bp, Homo sapien
gtgtttttaacagagcaagctgtagagcacctg

SEQ ID NO: 629540 - DNA, 33 bp, Homo sapien
gtgtttttaacagagcgagctgtagagcacctg

SEQ ID NO: 629541 - DNA, 33 bp, Homo sapien
ctgaaaacctgaaaaacgcataccactagaggg

SEQ ID NO: 629542 - DNA, 33 bp, Homo sapien
ctgaaaacctgaaaaatgcataccactagaggg

SEQ ID NO: 629543 - DNA, 33 bp, Homo sapien
cccttccccgtctcagcatggccattgttgtat

SEQ ID NO: 629544 - DNA, 33 bp, Homo sapien
cccttccccgtctcagtatggccattgttgtat

SEQ ID NO: 629545 - DNA, 33 bp, Homo sapien
tgagacggggaagggaaatttactccagaagac

SEQ ID NO: 629546 - DNA, 33 bp, Homo sapien
tgagacggggaagggacatttactccagaagac

SEQ ID NO: 629547 - DNA, 33 bp, Homo sapien
taaaaatattattccaagaaggagtccacagac

SEQ ID NO: 629548 - DNA, 33 bp, Homo sapien
taaaaatattattccaggaaggagtccacagac

SEQ ID NO: 629549 - DNA, 33 bp, Homo sapien
aataataataaaaacaaactagcccaccctctt

SEQ ID NO: 629550 - DNA, 33 bp, Homo sapien
aataataataaaaacagactagcccaccctctt

SEQ ID NO: 629551 - DNA, 33 bp, Homo sapien
ataagaatgactataacgaaagagggtatcaca

SEQ ID NO: 629552 - DNA, 33 bp, Homo sapien
ataagaatgactataatgaaagagggtatcaca

SEQ ID NO: 629553 - DNA, 33 bp, Homo sapien
gtctaaagcaggggagcccatcttctcgatgac

SEQ ID NO: 629554 - DNA, 33 bp, Homo sapien
gtctaaagcaggggagtccatcttctcgatgac

SEQ ID NO: 629555 - DNA, 33 bp, Homo sapien
tggaaaagcttagtgacgttctccgaaggttta

SEQ ID NO: 629556 - DNA, 33 bp, Homo sapien
tggaaaagcttagtgatgttctccgaaggttta

SEQ ID NO: 629557 - DNA, 33 bp, Homo sapien
taagatgtcaagatgcaatgattcgtgtaagtt

SEQ ID NO: 629558 - DNA, 33 bp, Homo sapien
taagatgtcaagatgccatgattcgtgtaagtt

SEQ ID NO: 629559 - DNA, 33 bp, Homo sapien
ggatgcgggaaggaaaacgccattagaagggaa

SEQ ID NO: 629560 - DNA, 33 bp, Homo sapien
ggatgcgggaaggaaagcgccattagaagggaa

SEQ ID NO: 629561 - DNA, 33 bp, Homo sapien
cctcccagggaaaatacgtaggaagcccactgc

SEQ ID NO: 629562 - DNA, 33 bp, Homo sapien
cctcccagggaaaatatgtaggaagcccactgc

SEQ ID NO: 629563 - DNA, 33 bp, Homo sapien
ctctgtaagagtgaaagtaagagtggttctcac

SEQ ID NO: 629564 - DNA, 33 bp, Homo sapien
ctctgtaagagtgaaattaagagtggttctcac

SEQ ID NO: 629565 - DNA, 33 bp, Homo sapien
agggagtgtaagatggacattttagagacgtag

SEQ ID NO: 629566 - DNA, 33 bp, Homo sapien
agggagtgtaagatgggcattttagagacgtag

SEQ ID NO: 629567 - DNA, 33 bp, Homo sapien
atcacgattctcttcccgcaataaggtctagaa

SEQ ID NO: 629568 - DNA, 33 bp, Homo sapien
atcacgattctcttcctgcaataaggtctagaa

SEQ ID NO: 629569 - DNA, 33 bp, Homo sapien
ctgggaagtcagtagcaagagaaggctcttttt

SEQ ID NO: 629570 - DNA, 33 bp, Homo sapien
ctgggaagtcagtagccagagaaggctcttttt

SEQ ID NO: 629571 - DNA, 33 bp, Homo sapien
ttcctccattaggcacaaggttgatttgtctag

SEQ ID NO: 629572 - DNA, 33 bp, Homo sapien
ttcctccattaggcacgaggttgatttgtctag

SEQ ID NO: 629573 - DNA, 33 bp, Homo sapien
tcagtttcatgacaaacactaaggaactgttcc

SEQ ID NO: 629574 - DNA, 33 bp, Homo sapien
tcagtttcatgacaaagactaaggaactgttcc

SEQ ID NO: 629575 - DNA, 33 bp, Homo sapien
gacagtgttgggacaaccagaaatttgaatata

SEQ ID NO: 629576 - DNA, 33 bp, Homo sapien
gacagtgttgggacaatcagaaatttgaatata

SEQ ID NO: 629577 - DNA, 33 bp, Homo sapien
attcctggttttcaaacatgaaaggaaggaagg

SEQ ID NO: 629578 - DNA, 33 bp, Homo sapien
attcctggttttcaaatatgaaaggaaggaagg

SEQ ID NO: 629579 - DNA, 33 bp, Homo sapien
ccctaaagacagagaaccaggcttggaagccag

SEQ ID NO: 629580 - DNA, 33 bp, Homo sapien
ccctaaagacagagaatcaggcttggaagccag

SEQ ID NO: 629581 - DNA, 33 bp, Homo sapien
gccctatcttctagtcagaacaagtctccagct

SEQ ID NO: 629582 - DNA, 33 bp, Homo sapien
gccctatcttctagtcggaacaagtctccagct

SEQ ID NO: 629583 - DNA, 33 bp, Homo sapien
attttccaaaccagaaacgtcttgggaatcaca

SEQ ID NO: 629584 - DNA, 33 bp, Homo sapien
attttccaaaccagaagcgtcttgggaatcaca

SEQ ID NO: 629585 - DNA, 33 bp, Homo sapien
cagttattgccaaagacaccagttgccccagcc

SEQ ID NO: 629586 - DNA, 33 bp, Homo sapien
cagttattgccaaagagaccagttgccccagcc

SEQ ID NO: 629587 - DNA, 33 bp, Homo sapien
tatagcataaatcttaactggaaagttctttct

SEQ ID NO: 629588 - DNA, 33 bp, Homo sapien
tatagcataaatcttagctggaaagttctttct

SEQ ID NO: 629589 - DNA, 33 bp, Homo sapien
tacaaaggaccgccagaaatcatgttgcttgtt

SEQ ID NO: 629590 - DNA, 33 bp, Homo sapien
tacaaaggaccgccaggaatcatgttgcttgtt

SEQ ID NO: 629591 - DNA, 33 bp, Homo sapien
ctgaaaatgctagtccaccaagcacactttgag

SEQ ID NO: 629592 - DNA, 33 bp, Homo sapien
ctgaaaatgctagtccgccaagcacactttgag

SEQ ID NO: 629593 - DNA, 33 bp, Homo sapien
accagtgaacagtcacaggtttcctctctccac

SEQ ID NO: 629594 - DNA, 33 bp, Homo sapien
accagtgaacagtcacgggtttcctctctccac

SEQ ID NO: 629595 - DNA, 33 bp, Homo sapien
agccttctaaccatcacgtttctgatcacagca

SEQ ID NO: 629596 - DNA, 33 bp, Homo sapien
agccttctaaccatcatgtttctgatcacagca

SEQ ID NO: 629597 - DNA, 33 bp, Homo sapien
attcattgagcagctacgtcccaagccctattg

SEQ ID NO: 629598 - DNA, 33 bp, Homo sapien
attcattgagcagctatgtcccaagccctattg

SEQ ID NO: 629599 - DNA, 33 bp, Homo sapien
ttcctgctttcctgcacgtcagatggcagatga

SEQ ID NO: 629600 - DNA, 33 bp, Homo sapien
ttcctgctttcctgcatgtcagatggcagatga

SEQ ID NO: 629601 - DNA, 33 bp, Homo sapien
cagagaatttccaccaataaagggcacatttct

SEQ ID NO: 629602 - DNA, 33 bp, Homo sapien
cagagaatttccaccactaaagggcacatttct

SEQ ID NO: 629603 - DNA, 33 bp, Homo sapien
ctccccattgtggttacatgcaacttaacaaca

SEQ ID NO: 629604 - DNA, 33 bp, Homo sapien
ctccccattgtggttagatgcaacttaacaaca

SEQ ID NO: 629605 - DNA, 33 bp, Homo sapien
aaaatgtgagtgaggaaagaatgtgttacaagg

SEQ ID NO: 629606 - DNA, 33 bp, Homo sapien
aaaatgtgagtgaggagagaatgtgttacaagg

SEQ ID NO: 629607 - DNA, 33 bp, Homo sapien
aaaggcacagggacaccaagtgttgctctctga

SEQ ID NO: 629608 - DNA, 33 bp, Homo sapien
aaaggcacagggacactaagtgttgctctctga

SEQ ID NO: 629609 - DNA, 33 bp, Homo sapien
ctctctgatgactgaccgtatcagccacatccc

SEQ ID NO: 629610 - DNA, 33 bp, Homo sapien
ctctctgatgactgactgtatcagccacatccc

SEQ ID NO: 629611 - DNA, 33 bp, Homo sapien
cagtaaggatctaaaacaaggcagagggaatga

SEQ ID NO: 629612 - DNA, 33 bp, Homo sapien
cagtaaggatctaaaataaggcagagggaatga

SEQ ID NO: 629613 - DNA, 33 bp, Homo sapien
ccattctttgtcatgaataaagtattttgccac

SEQ ID NO: 629614 - DNA, 33 bp, Homo sapien
ccattctttgtcatgagtaaagtattttgccac

SEQ ID NO: 629615 - DNA, 33 bp, Homo sapien
aggccacacagtaaaacggcagactggggacca

SEQ ID NO: 629616 - DNA, 33 bp, Homo sapien
aggccacacagtaaaatggcagactggggacca

SEQ ID NO: 629617 - DNA, 33 bp, Homo sapien
gaccagggaggtgtgacgttcaatggtaaaaga

SEQ ID NO: 629618 - DNA, 33 bp, Homo sapien
gaccagggaggtgtgaggttcaatggtaaaaga

SEQ ID NO: 629619 - DNA, 33 bp, Homo sapien
cctgaagccctacaagaagaaactagataattt

SEQ ID NO: 629620 - DNA, 33 bp, Homo sapien
cctgaagccctacaagcagaaactagataattt

SEQ ID NO: 629621 - DNA, 33 bp, Homo sapien
agatgtctccttgttacgtggagcaattaagac

SEQ ID NO: 629622 - DNA, 33 bp, Homo sapien
agatgtctccttgttatgtggagcaattaagac

SEQ ID NO: 629623 - DNA, 33 bp, Homo sapien
ggcattccagacaagacatttttttacagtctt

SEQ ID NO: 629624 - DNA, 33 bp, Homo sapien
ggcattccagacaagatatttttttacagtctt

SEQ ID NO: 629625 - DNA, 33 bp, Homo sapien
gttctttagcatctccaagttcctggaacataa

SEQ ID NO: 629626 - DNA, 33 bp, Homo sapien
gttctttagcatctccgagttcctggaacataa

SEQ ID NO: 629627 - DNA, 33 bp, Homo sapien
ttctaggttgtgcaaaagttctatgtatacagt

SEQ ID NO: 629628 - DNA, 33 bp, Homo sapien
ttctaggttgtgcaaaggttctatgtatacagt

SEQ ID NO: 629629 - DNA, 33 bp, Homo sapien
ctgtggtgaggatgaaatcaatctaaggaaggg

SEQ ID NO: 629630 - DNA, 33 bp, Homo sapien
ctgtggtgaggatgaagtcaatctaaggaaggg

SEQ ID NO: 629631 - DNA, 33 bp, Homo sapien
ttggattgctttgatccatcccttctcctaccc

SEQ ID NO: 629632 - DNA, 33 bp, Homo sapien
ttggattgctttgatcgatcccttctcctaccc

SEQ ID NO: 629633 - DNA, 33 bp, Homo sapien
attttcactggtcaaaacttacctcacaaggag

SEQ ID NO: 629634 - DNA, 33 bp, Homo sapien
attttcactggtcaaaccttacctcacaaggag

SEQ ID NO: 629635 - DNA, 33 bp, Homo sapien
aattatccttctgggaacatgaaaggggaacac

SEQ ID NO: 629636 - DNA, 33 bp, Homo sapien
aattatccttctgggagcatgaaaggggaacac

SEQ ID NO: 629637 - DNA, 33 bp, Homo sapien
ctcctgtttccccatcaatgttaactcctgggt

SEQ ID NO: 629638 - DNA, 33 bp, Homo sapien
ctcctgtttccccatcgatgttaactcctgggt

SEQ ID NO: 629639 - DNA, 33 bp, Homo sapien
ctcttatgggcttgtaacttcaaagtaaagtgt

SEQ ID NO: 629640 - DNA, 33 bp, Homo sapien
ctcttatgggcttgtatcttcaaagtaaagtgt

SEQ ID NO: 629641 - DNA, 33 bp, Homo sapien
atagtttgattatttacgacaacacaagagaat

SEQ ID NO: 629642 - DNA, 33 bp, Homo sapien
atagtttgattatttatgacaacacaagagaat

SEQ ID NO: 629643 - DNA, 33 bp, Homo sapien
tatctgtttatagcctcactggatattggacac

SEQ ID NO: 629644 - DNA, 33 bp, Homo sapien
tatctgtttatagccttactggatattggacac

SEQ ID NO: 629645 - DNA, 33 bp, Homo sapien
cctctttcttggatcccgacaacagactcacac

SEQ ID NO: 629646 - DNA, 33 bp, Homo sapien
cctctttcttggatcctgacaacagactcacac

SEQ ID NO: 629647 - DNA, 33 bp, Homo sapien
ataggttcatcatttgcaataactgcaccactc

SEQ ID NO: 629648 - DNA, 33 bp, Homo sapien
ataggttcatcatttgtaataactgcaccactc

SEQ ID NO: 629649 - DNA, 33 bp, Homo sapien
gtcaagtgaactgtgaagaagcaattaaattaa

SEQ ID NO: 629650 - DNA, 33 bp, Homo sapien
gtcaagtgaactgtgaggaagcaattaaattaa

SEQ ID NO: 629651 - DNA, 33 bp, Homo sapien
attagacgaacatgccaagtacctactatgtgc

SEQ ID NO: 629652 - DNA, 33 bp, Homo sapien
attagacgaacatgccgagtacctactatgtgc

SEQ ID NO: 629653 - DNA, 33 bp, Homo sapien
tagtaatagctatcggccacagattaactacta

SEQ ID NO: 629654 - DNA, 33 bp, Homo sapien
tagtaatagctatcggtcacagattaactacta

SEQ ID NO: 629655 - DNA, 33 bp, Homo sapien
gtcccatgttgccctacgtcatcccaatagaga

SEQ ID NO: 629656 - DNA, 33 bp, Homo sapien
gtcccatgttgccctaggtcatcccaatagaga

SEQ ID NO: 629657 - DNA, 33 bp, Homo sapien
gaacctccagactgctcagaattagtcaatttt

SEQ ID NO: 629658 - DNA, 33 bp, Homo sapien
gaacctccagactgcttagaattagtcaatttt

SEQ ID NO: 629659 - DNA, 33 bp, Homo sapien
attggtacaaaatcagcattccattcccatctc

SEQ ID NO: 629660 - DNA, 33 bp, Homo sapien
attggtacaaaatcaggattccattcccatctc

SEQ ID NO: 629661 - DNA, 33 bp, Homo sapien
ttagtgggcagctgaaccatgttaaataatact

SEQ ID NO: 629662 - DNA, 33 bp, Homo sapien
ttagtgggcagctgaatcatgttaaataatact

SEQ ID NO: 629663 - DNA, 33 bp, Homo sapien
gtcataggacacatacagatcacctactgtttg

SEQ ID NO: 629664 - DNA, 33 bp, Homo sapien
gtcataggacacatacggatcacctactgtttg

SEQ ID NO: 629665 - DNA, 33 bp, Homo sapien
tggccagcatagaacaaacacagccggagttgc

SEQ ID NO: 629666 - DNA, 33 bp, Homo sapien
tggccagcatagaacagacacagccggagttgc

SEQ ID NO: 629667 - DNA, 33 bp, Homo sapien
taggcggcctcagagactcaggaacaaccggca

SEQ ID NO: 629668 - DNA, 33 bp, Homo sapien
taggcggcctcagagattcaggaacaaccggca

SEQ ID NO: 629669 - DNA, 33 bp, Homo sapien
agtagatgaaaacagaaaagaaatctgaggact

SEQ ID NO: 629670 - DNA, 33 bp, Homo sapien
agtagatgaaaacagagaagaaatctgaggact

SEQ ID NO: 629671 - DNA, 33 bp, Homo sapien
tgcttacaccatcaaaaaaacatattgtaatat

SEQ ID NO: 629672 - DNA, 33 bp, Homo sapien
tgcttacaccatcaaagaaacatattgtaatat

SEQ ID NO: 629673 - DNA, 33 bp, Homo sapien
tgccactctgtaactacgaggggccagaggtcc

SEQ ID NO: 629674 - DNA, 33 bp, Homo sapien
tgccactctgtaactatgaggggccagaggtcc

SEQ ID NO: 629675 - DNA, 33 bp, Homo sapien
ggacagtctatacttaacttttggtgaatatgt

SEQ ID NO: 629676 - DNA, 33 bp, Homo sapien
ggacagtctatacttatcttttggtgaatatgt

SEQ ID NO: 629677 - DNA, 33 bp, Homo sapien
ggttgaacttgctctcaaagtaggccaggcaca

SEQ ID NO: 629678 - DNA, 33 bp, Homo sapien
ggttgaacttgctctcgaagtaggccaggcaca

SEQ ID NO: 629679 - DNA, 33 bp, Homo sapien
cactctgccatagtcaccttgcacatttctttt

SEQ ID NO: 629680 - DNA, 33 bp, Homo sapien
cactctgccatagtcatcttgcacatttctttt

SEQ ID NO: 629681 - DNA, 33 bp, Homo sapien
gaggagaaggactcaaggattgcaagcacaggg

SEQ ID NO: 629682 - DNA, 33 bp, Homo sapien
gaggagaaggactcaatgattgcaagcacaggg

SEQ ID NO: 629683 - DNA, 33 bp, Homo sapien
ctgacatcactgagcccctgagccaatatcagc

SEQ ID NO: 629684 - DNA, 33 bp, Homo sapien
ctgacatcactgagcctctgagccaatatcagc

SEQ ID NO: 629685 - DNA, 33 bp, Homo sapien
aagctggactgcaatacattctcaatggagagc

SEQ ID NO: 629686 - DNA, 33 bp, Homo sapien
aagctggactgcaatatattctcaatggagagc

SEQ ID NO: 629687 - DNA, 33 bp, Homo sapien
tagaaaagaacagttacgcctgagataccgtgt

SEQ ID NO: 629688 - DNA, 33 bp, Homo sapien
tagaaaagaacagttatgcctgagataccgtgt

SEQ ID NO: 629689 - DNA, 33 bp, Homo sapien
actcattccagcactaactcaaacattcaagtc

SEQ ID NO: 629690 - DNA, 33 bp, Homo sapien
actcattccagcactagctcaaacattcaagtc

SEQ ID NO: 629691 - DNA, 33 bp, Homo sapien
cctcgaaatatgaaacggatgtaagagattcca

SEQ ID NO: 629692 - DNA, 33 bp, Homo sapien
cctcgaaatatgaaactgatgtaagagattcca

SEQ ID NO: 629693 - DNA, 33 bp, Homo sapien
aagactacaaagcaacaggctaacaacactatg

SEQ ID NO: 629694 - DNA, 33 bp, Homo sapien
aagactacaaagcaaccggctaacaacactatg

SEQ ID NO: 629695 - DNA, 33 bp, Homo sapien
agtcagaagtatgatacaggtctctctgggtta

SEQ ID NO: 629696 - DNA, 33 bp, Homo sapien
agtcagaagtatgatataggtctctctgggtta

SEQ ID NO: 629697 - DNA, 33 bp, Homo sapien
aaagactaataacaggaataaggaagatctttt

SEQ ID NO: 629698 - DNA, 33 bp, Homo sapien
aaagactaataacagggataaggaagatctttt

SEQ ID NO: 629699 - DNA, 33 bp, Homo sapien
agtccagttccaagttagaggtccacattcaaa

SEQ ID NO: 629700 - DNA, 33 bp, Homo sapien
agtccagttccaagttggaggtccacattcaaa

SEQ ID NO: 629701 - DNA, 33 bp, Homo sapien
caaaatattaaaaacacattttggccgcagtaa

SEQ ID NO: 629702 - DNA, 33 bp, Homo sapien
caaaatattaaaaacatattttggccgcagtaa

SEQ ID NO: 629703 - DNA, 33 bp, Homo sapien
ctccaggaaagtcctgaaatgtggactctatca

SEQ ID NO: 629704 - DNA, 33 bp, Homo sapien
ctccaggaaagtcctggaatgtggactctatca

SEQ ID NO: 629705 - DNA, 33 bp, Homo sapien
cgcgaccacatctccagcctcgattgtgcaggc

SEQ ID NO: 629706 - DNA, 33 bp, Homo sapien
cgcgaccacatctccatcctcgattgtgcaggc

SEQ ID NO: 629707 - DNA, 33 bp, Homo sapien
gtaagccatccacaggaacacatatcacaccca

SEQ ID NO: 629708 - DNA, 33 bp, Homo sapien
gtaagccatccacaggcacacatatcacaccca

SEQ ID NO: 629709 - DNA, 33 bp, Homo sapien
gtaaaatgggcttcaggagactcaatgagtgct

SEQ ID NO: 629710 - DNA, 33 bp, Homo sapien
gtaaaatgggcttcagtagactcaatgagtgct

SEQ ID NO: 629711 - DNA, 33 bp, Homo sapien
cagttagacctagacaaaggttgattttctccc

SEQ ID NO: 629712 - DNA, 33 bp, Homo sapien
cagttagacctagacagaggttgattttctccc

SEQ ID NO: 629713 - DNA, 33 bp, Homo sapien
agggctgcacgttctcacccactcacgtgcaaa

SEQ ID NO: 629714 - DNA, 33 bp, Homo sapien
agggctgcacgttctcgcccactcacgtgcaaa

SEQ ID NO: 629715 - DNA, 33 bp, Homo sapien
caaaagccagcaaggacgggaaggtgagctgct

SEQ ID NO: 629716 - DNA, 33 bp, Homo sapien
caaaagccagcaaggatgggaaggtgagctgct

SEQ ID NO: 629717 - DNA, 33 bp, Homo sapien
gagaaagaactgtctgcaaattgccaagcatgc

SEQ ID NO: 629718 - DNA, 33 bp, Homo sapien
gagaaagaactgtctgtaaattgccaagcatgc

SEQ ID NO: 629719 - DNA, 33 bp, Homo sapien
gtgccctctctttatacccactgtcctgcccag

SEQ ID NO: 629720 - DNA, 33 bp, Homo sapien
gtgccctctctttatatccactgtcctgcccag

SEQ ID NO: 629721 - DNA, 33 bp, Homo sapien
gcaaggctgtgagaagcctggtgtagctgcagc

SEQ ID NO: 629722 - DNA, 33 bp, Homo sapien
gcaaggctgtgagaagtctggtgtagctgcagc

SEQ ID NO: 629723 - DNA, 33 bp, Homo sapien
atccatcctgttttgacgttacagtgttatgag

SEQ ID NO: 629724 - DNA, 33 bp, Homo sapien
atccatcctgttttgatgttacagtgttatgag

SEQ ID NO: 629725 - DNA, 33 bp, Homo sapien
aatgatgggacacaaggcagggtagccagtacc

SEQ ID NO: 629726 - DNA, 33 bp, Homo sapien
aatgatgggacacaagtcagggtagccagtacc

SEQ ID NO: 629727 - DNA, 33 bp, Homo sapien
ttgtgccacccgcaaaaagacaaagcagttaca

SEQ ID NO: 629728 - DNA, 33 bp, Homo sapien
ttgtgccacccgcaaagagacaaagcagttaca

SEQ ID NO: 629729 - DNA, 33 bp, Homo sapien
tatattccgggcatacagcaaagtttggaaata

SEQ ID NO: 629730 - DNA, 33 bp, Homo sapien
tatattccgggcatacggcaaagtttggaaata

SEQ ID NO: 629731 - DNA, 33 bp, Homo sapien
gcgaatgctaggtctcagactaagcctacctgc

SEQ ID NO: 629732 - DNA, 33 bp, Homo sapien
gcgaatgctaggtctcggactaagcctacctgc

SEQ ID NO: 629733 - DNA, 33 bp, Homo sapien
agcacagagagataagaatggctggtgtgacag

SEQ ID NO: 629734 - DNA, 33 bp, Homo sapien
agcacagagagataagtatggctggtgtgacag

SEQ ID NO: 629735 - DNA, 33 bp, Homo sapien
aggaatgtgaaagcacagactcttactgctaac

SEQ ID NO: 629736 - DNA, 33 bp, Homo sapien
aggaatgtgaaagcacggactcttactgctaac

SEQ ID NO: 629737 - DNA, 33 bp, Homo sapien
ggcctctctcctgagcaccatgcagagtgagat

SEQ ID NO: 629738 - DNA, 33 bp, Homo sapien
ggcctctctcctgagcgccatgcagagtgagat

SEQ ID NO: 629739 - DNA, 33 bp, Homo sapien
tctgagtgaacaccaccaagctaccctcagctc

SEQ ID NO: 629740 - DNA, 33 bp, Homo sapien
tctgagtgaacaccactaagctaccctcagctc

SEQ ID NO: 629741 - DNA, 33 bp, Homo sapien
gctgctaattattggacgaaagtgaggatttgg

SEQ ID NO: 629742 - DNA, 33 bp, Homo sapien
gctgctaattattggatgaaagtgaggatttgg

SEQ ID NO: 629743 - DNA, 33 bp, Homo sapien
agaaataaaagccacgaaagactattgccagtg

SEQ ID NO: 629744 - DNA, 33 bp, Homo sapien
agaaataaaagccacggaagactattgccagtg

SEQ ID NO: 629745 - DNA, 33 bp, Homo sapien
cctctgtggctctttcaaaacgtgaaaatgtga

SEQ ID NO: 629746 - DNA, 33 bp, Homo sapien
cctctgtggctctttcgaaacgtgaaaatgtga

SEQ ID NO: 629747 - DNA, 33 bp, Homo sapien
acagccctgaggtgagaagtagtatacagtcag

SEQ ID NO: 629748 - DNA, 33 bp, Homo sapien
acagccctgaggtgaggagtagtatacagtcag

SEQ ID NO: 629749 - DNA, 33 bp, Homo sapien
agaaataatatccacaatccagactattcaatt

SEQ ID NO: 629750 - DNA, 33 bp, Homo sapien
agaaataatatccacagtccagactattcaatt

SEQ ID NO: 629751 - DNA, 33 bp, Homo sapien
tatttaattacgctgagaaattttgagggtttt

SEQ ID NO: 629752 - DNA, 33 bp, Homo sapien
tatttaattacgctgataaattttgagggtttt

SEQ ID NO: 629753 - DNA, 33 bp, Homo sapien
gcttcataaaaggaaacgattatgcaaactggg

SEQ ID NO: 629754 - DNA, 33 bp, Homo sapien
gcttcataaaaggaaatgattatgcaaactggg

SEQ ID NO: 629755 - DNA, 33 bp, Homo sapien
tgaggaaaaagtacacaaaaacagatacaggtt

SEQ ID NO: 629756 - DNA, 33 bp, Homo sapien
tgaggaaaaagtacacgaaaacagatacaggtt

SEQ ID NO: 629757 - DNA, 33 bp, Homo sapien
cctgtctgaggtggagaaaaaacaagcttcatg

SEQ ID NO: 629758 - DNA, 33 bp, Homo sapien
cctgtctgaggtggaggaaaaacaagcttcatg

SEQ ID NO: 629759 - DNA, 33 bp, Homo sapien
ggtctccatcatgtccactttttaaggctacat

SEQ ID NO: 629760 - DNA, 33 bp, Homo sapien
ggtctccatcatgtccgctttttaaggctacat

SEQ ID NO: 629761 - DNA, 33 bp, Homo sapien
ttgcttaaatagaaccacttgctagcagtagcc

SEQ ID NO: 629762 - DNA, 33 bp, Homo sapien
ttgcttaaatagaaccgcttgctagcagtagcc

SEQ ID NO: 629763 - DNA, 33 bp, Homo sapien
atgtggctgctgcagaagttgaaacctgtgaag

SEQ ID NO: 629764 - DNA, 33 bp, Homo sapien
atgtggctgctgcagacgttgaaacctgtgaag

SEQ ID NO: 629765 - DNA, 33 bp, Homo sapien
caaaagtagagaggataatattctgacctctca

SEQ ID NO: 629766 - DNA, 33 bp, Homo sapien
caaaagtagagaggatcatattctgacctctca

SEQ ID NO: 629767 - DNA, 33 bp, Homo sapien
attcagaatgtcactccctagaatgttaaaacc

SEQ ID NO: 629768 - DNA, 33 bp, Homo sapien
attcagaatgtcactctctagaatgttaaaacc

SEQ ID NO: 629769 - DNA, 33 bp, Homo sapien
tgtggatgcagaggaaagcaggttaatgtagac

SEQ ID NO: 629770 - DNA, 33 bp, Homo sapien
tgtggatgcagaggaaggcaggttaatgtagac

SEQ ID NO: 629771 - DNA, 33 bp, Homo sapien
ggctccttaaggatgaccaaaaccaatgtctca

SEQ ID NO: 629772 - DNA, 33 bp, Homo sapien
ggctccttaaggatgatcaaaaccaatgtctca

SEQ ID NO: 629773 - DNA, 33 bp, Homo sapien
ctcaaccctctatcctaagctgacttcattcaa

SEQ ID NO: 629774 - DNA, 33 bp, Homo sapien
ctcaaccctctatcctgagctgacttcattcaa

SEQ ID NO: 629775 - DNA, 33 bp, Homo sapien
gttttttgtaaacttacaggaagccatctattt

SEQ ID NO: 629776 - DNA, 33 bp, Homo sapien
gttttttgtaaacttataggaagccatctattt

SEQ ID NO: 629777 - DNA, 33 bp, Homo sapien
cacaaaaattgaaaccacacaaggaaataattt

SEQ ID NO: 629778 - DNA, 33 bp, Homo sapien
cacaaaaattgaaaccgcacaaggaaataattt

SEQ ID NO: 629779 - DNA, 33 bp, Homo sapien
agggccttgatctctgacacttgtgcctgccag

SEQ ID NO: 629780 - DNA, 33 bp, Homo sapien
agggccttgatctctgtcacttgtgcctgccag

SEQ ID NO: 629781 - DNA, 33 bp, Homo sapien
cagtaggaacaaagggcccatttacaccctctg

SEQ ID NO: 629782 - DNA, 33 bp, Homo sapien
cagtaggaacaaagggtccatttacaccctctg

SEQ ID NO: 629783 - DNA, 33 bp, Homo sapien
accaaacttctctcacactgtgtagtcattttc

SEQ ID NO: 629784 - DNA, 33 bp, Homo sapien
accaaacttctctcacgctgtgtagtcattttc

SEQ ID NO: 629785 - DNA, 33 bp, Homo sapien
ggagatgcagcacaaacggttacagaagcagat

SEQ ID NO: 629786 - DNA, 33 bp, Homo sapien
ggagatgcagcacaaatggttacagaagcagat

SEQ ID NO: 629787 - DNA, 33 bp, Homo sapien
tgtcctaaaatctgcccccatgtctccattccc

SEQ ID NO: 629788 - DNA, 33 bp, Homo sapien
tgtcctaaaatctgcctccatgtctccattccc

SEQ ID NO: 629789 - DNA, 33 bp, Homo sapien
tctcttaggagcgggtaaaaggccaaacatgtt

SEQ ID NO: 629790 - DNA, 33 bp, Homo sapien
tctcttaggagcgggtcaaaggccaaacatgtt

SEQ ID NO: 629791 - DNA, 33 bp, Homo sapien
tgctgtgtatccaccagtaaagtatacagaaca

SEQ ID NO: 629792 - DNA, 33 bp, Homo sapien
tgctgtgtatccaccattaaagtatacagaaca

SEQ ID NO: 629793 - DNA, 33 bp, Homo sapien
ccctgggccaaaaataccctctaggcagtttgt

SEQ ID NO: 629794 - DNA, 33 bp, Homo sapien
ccctgggccaaaaatatcctctaggcagtttgt

SEQ ID NO: 629795 - DNA, 33 bp, Homo sapien
atcctctacctaataaatatcatcctttattgt

SEQ ID NO: 629796 - DNA, 33 bp, Homo sapien
atcctctacctaataattatcatcctttattgt

SEQ ID NO: 629797 - DNA, 33 bp, Homo sapien
gtaaacatgagaataacttaaggattctagttt

SEQ ID NO: 629798 - DNA, 33 bp, Homo sapien
gtaaacatgagaataatttaaggattctagttt

SEQ ID NO: 629799 - DNA, 33 bp, Homo sapien
gatgatttctgagccaatagtccaagacctttt

SEQ ID NO: 629800 - DNA, 33 bp, Homo sapien
gatgatttctgagccagtagtccaagacctttt

SEQ ID NO: 629801 - DNA, 33 bp, Homo sapien
gtacttccagcagaagaagagtggtcctggaga

SEQ ID NO: 629802 - DNA, 33 bp, Homo sapien
gtacttccagcagaaggagagtggtcctggaga

SEQ ID NO: 629803 - DNA, 33 bp, Homo sapien; identical to SEQ ID NO: 629801

SEQ ID NO: 629804 - DNA, 33 bp, Homo sapien; identical to SEQ ID NO: 629802

SEQ ID NO: 629805 - DNA, 33 bp, Homo sapien
atgccctttaccgtgaacagattcttgaacaac

SEQ ID NO: 629806 - DNA, 33 bp, Homo sapien
atgccctttaccgtgagcagattcttgaacaac

SEQ ID NO: 629807 - DNA, 33 bp, Homo sapien
tcagcattattgttcgacccctagtgccctgtc

SEQ ID NO: 629808 - DNA, 33 bp, Homo sapien
tcagcattattgttcggcccctagtgccctgtc

SEQ ID NO: 629809 - DNA, 33 bp, Homo sapien
ctaacagtggtcttaccgcttcttatacaaaga

SEQ ID NO: 629810 - DNA, 33 bp, Homo sapien
ctaacagtggtcttactgcttcttatacaaaga

SEQ ID NO: 629811 - DNA, 33 bp, Homo sapien
cacactcataccccaaaatggagtcaacacccc

SEQ ID NO: 629812 - DNA, 33 bp, Homo sapien
cacactcataccccaagatggagtcaacacccc

SEQ ID NO: 629813 - DNA, 33 bp, Homo sapien
aatccagttgtaatcaatcttagtcatgattac

SEQ ID NO: 629814 - DNA, 33 bp, Homo sapien
aatccagttgtaatcagtcttagtcatgattac

SEQ ID NO: 629815 - DNA, 33 bp, Homo sapien
acattgggttgagtgacgaaccaatgtggtggc

SEQ ID NO: 629816 - DNA, 33 bp, Homo sapien
acattgggttgagtgatgaaccaatgtggtggc

SEQ ID NO: 629817 - DNA, 33 bp, Homo sapien
ttccaggcattacagacatttggtgcctctaag

SEQ ID NO: 629818 - DNA, 33 bp, Homo sapien
ttccaggcattacagatatttggtgcctctaag

SEQ ID NO: 629819 - DNA, 33 bp, Homo sapien
ttgctgtaatgattgcactcctagaatgtgatg

SEQ ID NO: 629820 - DNA, 33 bp, Homo sapien
ttgctgtaatgattgcgctcctagaatgtgatg

SEQ ID NO: 629821 - DNA, 33 bp, Homo sapien
tcttcaaagagcatcaaacagttttggagaaac

SEQ ID NO: 629822 - DNA, 33 bp, Homo sapien
tcttcaaagagcatcagacagttttggagaaac

SEQ ID NO: 629823 - DNA, 33 bp, Homo sapien
ccagctgagtggaagacggaaggtgctttataa

SEQ ID NO: 629824 - DNA, 33 bp, Homo sapien
ccagctgagtggaagatggaaggtgctttataa

SEQ ID NO: 629825 - DNA, 33 bp, Homo sapien
cagtcaatgactgtcactaagtagacaagtagg

SEQ ID NO: 629826 - DNA, 33 bp, Homo sapien
cagtcaatgactgtcattaagtagacaagtagg

SEQ ID NO: 629827 - DNA, 33 bp, Homo sapien
tctcttttgaccaaacacatgacaacaggggag

SEQ ID NO: 629828 - DNA, 33 bp, Homo sapien
tctcttttgaccaaacccatgacaacaggggag

SEQ ID NO: 629829 - DNA, 33 bp, Homo sapien
aacagcacagctctaaaccaaggcagaggtcct

SEQ ID NO: 629830 - DNA, 33 bp, Homo sapien
aacagcacagctctaagccaaggcagaggtcct

SEQ ID NO: 629831 - DNA, 33 bp, Homo sapien
gtgagaagtcattcatcagccttcgctctgagc

SEQ ID NO: 629832 - DNA, 33 bp, Homo sapien
gtgagaagtcattcattagccttcgctctgagc

SEQ ID NO: 629833 - DNA, 33 bp, Homo sapien
gctaatacatctgtgaataggttttaagtagtc

SEQ ID NO: 629834 - DNA, 33 bp, Homo sapien
gctaatacatctgtgagtaggttttaagtagtc

SEQ ID NO: 629835 - DNA, 33 bp, Homo sapien
gggggtttccaaagaaagaaattgatgtgtgct

SEQ ID NO: 629836 - DNA, 33 bp, Homo sapien
gggggtttccaaagaaggaaattgatgtgtgct

SEQ ID NO: 629837 - DNA, 33 bp, Homo sapien
tttttatcctatcagcaccagtcctttacctgt

SEQ ID NO: 629838 - DNA, 33 bp, Homo sapien
tttttatcctatcagcgccagtcctttacctgt

SEQ ID NO: 629839 - DNA, 33 bp, Homo sapien
atgctttagaagtcaactgcacttaggagcagc

SEQ ID NO: 629840 - DNA, 33 bp, Homo sapien
atgctttagaagtcaagtgcacttaggagcagc

SEQ ID NO: 629841 - DNA, 33 bp, Homo sapien
tcccagtatccttcacaccctgttgtctaccag

SEQ ID NO: 629842 - DNA, 33 bp, Homo sapien
tcccagtatccttcactccctgttgtctaccag

SEQ ID NO: 629843 - DNA, 33 bp, Homo sapien
ccctccagggcctacactgacttactgggcaat

SEQ ID NO: 629844 - DNA, 33 bp, Homo sapien
ccctccagggcctacattgacttactgggcaat

SEQ ID NO: 629845 - DNA, 33 bp, Homo sapien
gactgcgcagcatccacgaaacccattctcact

SEQ ID NO: 629846 - DNA, 33 bp, Homo sapien
gactgcgcagcatccatgaaacccattctcact

SEQ ID NO: 629847 - DNA, 33 bp, Homo sapien
agccagtctgcagggaaagagaaggaaaccgtt

SEQ ID NO: 629848 - DNA, 33 bp, Homo sapien
agccagtctgcagggagagagaaggaaaccgtt

SEQ ID NO: 629849 - DNA, 33 bp, Homo sapien
gatactgctggtcccacgtgaacttcagtcaac

SEQ ID NO: 629850 - DNA, 33 bp, Homo sapien
gatactgctggtcccatgtgaacttcagtcaac

SEQ ID NO: 629851 - DNA, 33 bp, Homo sapien
gaaaggccagggtggccaacttccttttaagca

SEQ ID NO: 629852 - DNA, 33 bp, Homo sapien
gaaaggccagggtggctaacttccttttaagca

SEQ ID NO: 629853 - DNA, 33 bp, Homo sapien
agcatttattatatagacacgaagctgcaaaag

SEQ ID NO: 629854 - DNA, 33 bp, Homo sapien
agcatttattatatagtcacgaagctgcaaaag

SEQ ID NO: 629855 - DNA, 33 bp, Homo sapien
aaactcttctgtagaaacagattatggtcagtg

SEQ ID NO: 629856 - DNA, 33 bp, Homo sapien
aaactcttctgtagaatcagattatggtcagtg

SEQ ID NO: 629857 - DNA, 33 bp, Homo sapien
ttttgaggataaaggacatgtctgtgatctcag

SEQ ID NO: 629858 - DNA, 33 bp, Homo sapien
ttttgaggataaaggatatgtctgtgatctcag

SEQ ID NO: 629859 - DNA, 33 bp, Homo sapien
gtagactcaggcttaacaaatgaaacataatgc

SEQ ID NO: 629860 - DNA, 33 bp, Homo sapien
gtagactcaggcttaagaaatgaaacataatgc

SEQ ID NO: 629861 - DNA, 33 bp, Homo sapien
taaacaaatttgactacgtggaaattaacattt

SEQ ID NO: 629862 - DNA, 33 bp, Homo sapien
taaacaaatttgactatgtggaaattaacattt

SEQ ID NO: 629863 - DNA, 33 bp, Homo sapien
gcttggtcttttcaaaaagaaactctacataca

SEQ ID NO: 629864 - DNA, 33 bp, Homo sapien
gcttggtcttttcaaagagaaactctacataca

SEQ ID NO: 629865 - DNA, 33 bp, Homo sapien
gcaaccttctagatgcaataccagcaattcccc

SEQ ID NO: 629866 - DNA, 33 bp, Homo sapien
gcaaccttctagatgcgataccagcaattcccc

SEQ ID NO: 629867 - DNA, 33 bp, Homo sapien
gagtgataggtccaccacaggcatgtcccctga

SEQ ID NO: 629868 - DNA, 33 bp, Homo sapien
gagtgataggtccaccgcaggcatgtcccctga

SEQ ID NO: 629869 - DNA, 33 bp, Homo sapien
cttcatacaaatggaaccatacagtaagtattt

SEQ ID NO: 629870 - DNA, 33 bp, Homo sapien
cttcatacaaatggaatcatacagtaagtattt

SEQ ID NO: 629871 - DNA, 33 bp, Homo sapien
ttcatacaatggacacaacaattttaaaaagaa

SEQ ID NO: 629872 - DNA, 33 bp, Homo sapien
ttcatacaatggacacgacaattttaaaaagaa

SEQ ID NO: 629873 - DNA, 33 bp, Homo sapien
aacagtacatgattacgcggtttccagaaatct

SEQ ID NO: 629874 - DNA, 33 bp, Homo sapien
aacagtacatgattactcggtttccagaaatct

SEQ ID NO: 629875 - DNA, 33 bp, Homo sapien
accccaaattctatacacagtgaaaatatcctt

SEQ ID NO: 629876 - DNA, 33 bp, Homo sapien
accccaaattctatacgcagtgaaaatatcctt

SEQ ID NO: 629877 - DNA, 33 bp, Homo sapien
tcataacattatgaccaaaatgtccaggataag

SEQ ID NO: 629878 - DNA, 33 bp, Homo sapien
tcataacattatgaccgaaatgtccaggataag

SEQ ID NO: 629879 - DNA, 33 bp, Homo sapien
ttcctcagtcttttccaacccatacacccattg

SEQ ID NO: 629880 - DNA, 33 bp, Homo sapien
ttcctcagtcttttcctacccatacacccattg

SEQ ID NO: 629881 - DNA, 33 bp, Homo sapien
tttgtgtatacaaaaaatgtttgaactgtgctt

SEQ ID NO: 629882 - DNA, 33 bp, Homo sapien
tttgtgtatacaaaaagtgtttgaactgtgctt

SEQ ID NO: 629883 - DNA, 33 bp, Homo sapien
ttttgcccggatcaaaaaatagcttccaacaga

SEQ ID NO: 629884 - DNA, 33 bp, Homo sapien
ttttgcccggatcaaagaatagcttccaacaga

SEQ ID NO: 629885 - DNA, 33 bp, Homo sapien
caagattttgccaaagaataaataccttggtca

SEQ ID NO: 629886 - DNA, 33 bp, Homo sapien
caagattttgccaaaggataaataccttggtca

SEQ ID NO: 629887 - DNA, 33 bp, Homo sapien
ttaaaatgctgggaaacacctcaaaaagccagc

SEQ ID NO: 629888 - DNA, 33 bp, Homo sapien
ttaaaatgctgggaaagacctcaaaaagccagc

SEQ ID NO: 629889 - DNA, 33 bp, Homo sapien
caaagcaagtgggaaacgggaagccagataatc

SEQ ID NO: 629890 - DNA, 33 bp, Homo sapien
caaagcaagtgggaaatgggaagccagataatc

SEQ ID NO: 629891 - DNA, 33 bp, Homo sapien
aaataaaccaactgaaaagaatgtcacaacaaa

SEQ ID NO: 629892 - DNA, 33 bp, Homo sapien
aaataaaccaactgaagagaatgtcacaacaaa

SEQ ID NO: 629893 - DNA, 33 bp, Homo sapien
ataacaaaatttaccaacttagcaatttgtcag

SEQ ID NO: 629894 - DNA, 33 bp, Homo sapien
ataacaaaatttaccatcttagcaatttgtcag

SEQ ID NO: 629895 - DNA, 33 bp, Homo sapien
aatccctctgttttctaaagggtacatcagaga

SEQ ID NO: 629896 - DNA, 33 bp, Homo sapien
aatccctctgttttctgaagggtacatcagaga

SEQ ID NO: 629897 - DNA, 33 bp, Homo sapien
cagcaattctcatgggaatcacaaatagattgg

SEQ ID NO: 629898 - DNA, 33 bp, Homo sapien
cagcaattctcatgggcatcacaaatagattgg

SEQ ID NO: 629899 - DNA, 33 bp, Homo sapien
tttggttggataggcccaagacctaaccccaca

SEQ ID NO: 629900 - DNA, 33 bp, Homo sapien
tttggttggataggccgaagacctaaccccaca

SEQ ID NO: 629901 - DNA, 33 bp, Homo sapien
tgctgactttgctgaacttatattatcccacca

SEQ ID NO: 629902 - DNA, 33 bp, Homo sapien
tgctgactttgctgaagttatattatcccacca

SEQ ID NO: 629903 - DNA, 33 bp, Homo sapien
agccttctgtgcatgaccctttctttattcccc

SEQ ID NO: 629904 - DNA, 33 bp, Homo sapien
agccttctgtgcatgatcctttctttattcccc

SEQ ID NO: 629905 - DNA, 33 bp, Homo sapien
ctagccagcaaaagccaaagaaccattctgaat

SEQ ID NO: 629906 - DNA, 33 bp, Homo sapien
ctagccagcaaaagccgaagaaccattctgaat

SEQ ID NO: 629907 - DNA, 33 bp, Homo sapien
cacaagggtcagaggaacattctgtggcattta

SEQ ID NO: 629908 - DNA, 33 bp, Homo sapien
cacaagggtcagaggagcattctgtggcattta

SEQ ID NO: 629909 - DNA, 33 bp, Homo sapien
ctgagtctcctgggccccctgttcctgcaggag

SEQ ID NO: 629910 - DNA, 33 bp, Homo sapien
ctgagtctcctgggcctcctgttcctgcaggag

SEQ ID NO: 629911 - DNA, 33 bp, Homo sapien
ttatgaattaatctacacttattagcatttaaa

SEQ ID NO: 629912 - DNA, 33 bp, Homo sapien
ttatgaattaatctactcttattagcatttaaa

SEQ ID NO: 629913 - DNA, 33 bp, Homo sapien
ctgtatactatggataatagagcacacattatg

SEQ ID NO: 629914 - DNA, 33 bp, Homo sapien
ctgtatactatggatactagagcacacattatg

SEQ ID NO: 629915 - DNA, 33 bp, Homo sapien
gcacagattggcagaacagttacctgagcagtg

SEQ ID NO: 629916 - DNA, 33 bp, Homo sapien
gcacagattggcagaatagttacctgagcagtg

SEQ ID NO: 629917 - DNA, 33 bp, Homo sapien
gggcttctatcagggaaaaacccagggacaata

SEQ ID NO: 629918 - DNA, 33 bp, Homo sapien
gggcttctatcagggacaaacccagggacaata

SEQ ID NO: 629919 - DNA, 33 bp, Homo sapien
gtaccactaagtgtagacaatcaggaagccaca

SEQ ID NO: 629920 - DNA, 33 bp, Homo sapien
gtaccactaagtgtaggcaatcaggaagccaca

SEQ ID NO: 629921 - DNA, 33 bp, Homo sapien
aagaaataaaacaaagcagtaataaggcagatg

SEQ ID NO: 629922 - DNA, 33 bp, Homo sapien
aagaaataaaacaaaggagtaataaggcagatg

SEQ ID NO: 629923 - DNA, 33 bp, Homo sapien
agaaacttggtcaagaccgacaagtaagaggca

SEQ ID NO: 629924 - DNA, 33 bp, Homo sapien
agaaacttggtcaagagcgacaagtaagaggca

SEQ ID NO: 629925 - DNA, 33 bp, Homo sapien
ctctattggttaaaagaaactccatgcttgatt

SEQ ID NO: 629926 - DNA, 33 bp, Homo sapien
ctctattggttaaaaggaactccatgcttgatt

SEQ ID NO: 629927 - DNA, 33 bp, Homo sapien
ttcacctttccctgctgaacaatgccagtaagt

SEQ ID NO: 629928 - DNA, 33 bp, Homo sapien
ttcacctttccctgcttaacaatgccagtaagt

SEQ ID NO: 629929 - DNA, 33 bp, Homo sapien
ccttcagaaagcagaaactgagcaaggattgag

SEQ ID NO: 629930 - DNA, 33 bp, Homo sapien
ccttcagaaagcagaacctgagcaaggattgag

SEQ ID NO: 629931 - DNA, 33 bp, Homo sapien
gcccaagctgtaagagaaacaaggctgaacaag

SEQ ID NO: 629932 - DNA, 33 bp, Homo sapien
gcccaagctgtaagaggaacaaggctgaacaag

SEQ ID NO: 629933 - DNA, 33 bp, Homo sapien
taaactgttcagggtcaatgtaaaatgcgtgga

SEQ ID NO: 629934 - DNA, 33 bp, Homo sapien
taaactgttcagggtcgatgtaaaatgcgtgga

SEQ ID NO: 629935 - DNA, 33 bp, Homo sapien
acagtttattatccatcaccaaacaatccagtc

SEQ ID NO: 629936 - DNA, 33 bp, Homo sapien
acagtttattatccatgaccaaacaatccagtc

SEQ ID NO: 629937 - DNA, 33 bp, Homo sapien
tcatgcatcaagtacacgcctgttggtttccaa

SEQ ID NO: 629938 - DNA, 33 bp, Homo sapien
tcatgcatcaagtacatgcctgttggtttccaa

SEQ ID NO: 629939 - DNA, 33 bp, Homo sapien
cacaacatgagtgcaaagtattattagtaatca

SEQ ID NO: 629940 - DNA, 33 bp, Homo sapien
cacaacatgagtgcaaggtattattagtaatca

SEQ ID NO: 629941 - DNA, 33 bp, Homo sapien
cctgggtgtaaggaacacctttatctcattctc

SEQ ID NO: 629942 - DNA, 33 bp, Homo sapien
cctgggtgtaaggaactcctttatctcattctc

SEQ ID NO: 629943 - DNA, 33 bp, Homo sapien
aggcggtagagaggccaggattattgtgcccat

SEQ ID NO: 629944 - DNA, 33 bp, Homo sapien
aggcggtagagaggccgggattattgtgcccat

SEQ ID NO: 629945 - DNA, 33 bp, Homo sapien
ggcaatggcagaggtacaagaggacacacacag

SEQ ID NO: 629946 - DNA, 33 bp, Homo sapien
ggcaatggcagaggtagaagaggacacacacag

SEQ ID NO: 629947 - DNA, 33 bp, Homo sapien
agaagtgacgcacagaagggttgaaatgtgctt

SEQ ID NO: 629948 - DNA, 33 bp, Homo sapien
agaagtgacgcacagaggggttgaaatgtgctt

SEQ ID NO: 629949 - DNA, 33 bp, Homo sapien
agcctccatatttcaggattgcaggttgcattc

SEQ ID NO: 629950 - DNA, 33 bp, Homo sapien
agcctccatatttcagtattgcaggttgcattc

SEQ ID NO: 629951 - DNA, 33 bp, Homo sapien
catactaactacttccaactgtcatagggacta

SEQ ID NO: 629952 - DNA, 33 bp, Homo sapien
catactaactacttccgactgtcatagggacta

SEQ ID NO: 629953 - DNA, 33 bp, Homo sapien
ggaagagaggaactcaagctaagctgaagggag

SEQ ID NO: 629954 - DNA, 33 bp, Homo sapien
ggaagagaggaactcaggctaagctgaagggag

SEQ ID NO: 629955 - DNA, 33 bp, Homo sapien
ttcaggcaagaccttgaattcctggagcatttc

SEQ ID NO: 629956 - DNA, 33 bp, Homo sapien
ttcaggcaagaccttgcattcctggagcatttc

SEQ ID NO: 629957 - DNA, 33 bp, Homo sapien
gggcaaaaaaaacaggacagttgctggcaagat

SEQ ID NO: 629958 - DNA, 33 bp, Homo sapien
gggcaaaaaaaacagggcagttgctggcaagat

SEQ ID NO: 629959 - DNA, 33 bp, Homo sapien
acccagctacaactcactaagtaaacgcacctt

SEQ ID NO: 629960 - DNA, 33 bp, Homo sapien
acccagctacaactcattaagtaaacgcacctt

SEQ ID NO: 629961 - DNA, 33 bp, Homo sapien
tgcaaagatatggaaccaacgtaagtgcacatc

SEQ ID NO: 629962 - DNA, 33 bp, Homo sapien
tgcaaagatatggaactaacgtaagtgcacatc

SEQ ID NO: 629963 - DNA, 33 bp, Homo sapien
gtcaagagagaatagagccagtaaaaggagact

SEQ ID NO: 629964 - DNA, 33 bp, Homo sapien
gtcaagagagaatagatccagtaaaaggagact

SEQ ID NO: 629965 - DNA, 33 bp, Homo sapien
gctgggtagaaggaagcccaatcacctatgaca

SEQ ID NO: 629966 - DNA, 33 bp, Homo sapien
gctgggtagaaggaaggccaatcacctatgaca

SEQ ID NO: 629967 - DNA, 33 bp, Homo sapien
ggatttcctggttcaacggattatggcaagggt

SEQ ID NO: 629968 - DNA, 33 bp, Homo sapien
ggatttcctggttcaatggattatggcaagggt

SEQ ID NO: 629969 - DNA, 33 bp, Homo sapien
tgtgactctgatggtaccttttcagagaggaga

SEQ ID NO: 629970 - DNA, 33 bp, Homo sapien
tgtgactctgatggtatcttttcagagaggaga

SEQ ID NO: 629971 - DNA, 33 bp, Homo sapien
ggaagccatgtttggaagatggcagagcaacaa

SEQ ID NO: 629972 - DNA, 33 bp, Homo sapien
ggaagccatgtttggaggatggcagagcaacaa

SEQ ID NO: 629973 - DNA, 33 bp, Homo sapien
tgccccaaatttcaccacatgtattctgaaacc

SEQ ID NO: 629974 - DNA, 33 bp, Homo sapien
tgccccaaatttcaccgcatgtattctgaaacc

SEQ ID NO: 629975 - DNA, 33 bp, Homo sapien
acaatcatattcttcacacaagactttattcta

SEQ ID NO: 629976 - DNA, 33 bp, Homo sapien
acaatcatattcttcatacaagactttattcta

SEQ ID NO: 629977 - DNA, 33 bp, Homo sapien
gcagcaaagtgaaaacagtgaatcagctagaat

SEQ ID NO: 629978 - DNA, 33 bp, Homo sapien
gcagcaaagtgaaaaccgtgaatcagctagaat

SEQ ID NO: 629979 - DNA, 33 bp, Homo sapien
tttgcgtaggaaaccaaaaatgtgtgtgcatcg

SEQ ID NO: 629980 - DNA, 33 bp, Homo sapien
tttgcgtaggaaaccagaaatgtgtgtgcatcg

SEQ ID NO: 629981 - DNA, 33 bp, Homo sapien
ggttctccctacccatcagtagattaccagccc

SEQ ID NO: 629982 - DNA, 33 bp, Homo sapien
ggttctccctacccattagtagattaccagccc

SEQ ID NO: 629983 - DNA, 33 bp, Homo sapien
atgaaagtctacccaaatctgaggtttgctata

SEQ ID NO: 629984 - DNA, 33 bp, Homo sapien
atgaaagtctacccaagtctgaggtttgctata

SEQ ID NO: 629985 - DNA, 33 bp, Homo sapien
actgtagaagtctataaaaagaaccctgttgaa

SEQ ID NO: 629986 - DNA, 33 bp, Homo sapien
actgtagaagtctatagaaagaaccctgttgaa

SEQ ID NO: 629987 - DNA, 33 bp, Homo sapien
ggcttgggcagccagtaaagggtatctccccag

SEQ ID NO: 629988 - DNA, 33 bp, Homo sapien
ggcttgggcagccagtgaagggtatctccccag

SEQ ID NO: 629989 - DNA, 33 bp, Homo sapien
gagacactcatttgaaaaccttaaagaactcga

SEQ ID NO: 629990 - DNA, 33 bp, Homo sapien
gagacactcatttgaacaccttaaagaactcga

SEQ ID NO: 629991 - DNA, 33 bp, Homo sapien
gaatgaagacagggcagatccccaaacaaaaat

SEQ ID NO: 629992 - DNA, 33 bp, Homo sapien
gaatgaagacagggcatatccccaaacaaaaat

SEQ ID NO: 629993 - DNA, 33 bp, Homo sapien
gaaacattggtcacccagaatattctccactca

SEQ ID NO: 629994 - DNA, 33 bp, Homo sapien
gaaacattggtcacccggaatattctccactca

SEQ ID NO: 629995 - DNA, 33 bp, Homo sapien
ctagagaataaaatccaaagtctcaggcacaac

SEQ ID NO: 629996 - DNA, 33 bp, Homo sapien
ctagagaataaaatccgaagtctcaggcacaac

SEQ ID NO: 629997 - DNA, 33 bp, Homo sapien
ttttaatcatataaagcagtcattggatgatgg

SEQ ID NO: 629998 - DNA, 33 bp, Homo sapien
ttttaatcatataaaggagtcattggatgatgg

SEQ ID NO: 629999 - DNA, 33 bp, Homo sapien
gaaatgctatatttgccctggcattactgcatc

SEQ ID NO: 630000 - DNA, 33 bp, Homo sapien
gaaatgctatatttgctctggcattactgcatc

SEQ ID NO: 630001 - DNA, 33 bp, Homo sapien
ccagtctcttgtcaagcatgccctgatgggctt

SEQ ID NO: 630002 - DNA, 33 bp, Homo sapien
ccagtctcttgtcaagtatgccctgatgggctt

SEQ ID NO: 630003 - DNA, 33 bp, Homo sapien
agctgactatctcaggaaatctttggaagccca

SEQ ID NO: 630004 - DNA, 33 bp, Homo sapien
agctgactatctcagggaatctttggaagccca

SEQ ID NO: 630005 - DNA, 33 bp, Homo sapien
ctgttaccagtagtgcaaggaagtgaatttgaa

SEQ ID NO: 630006 - DNA, 33 bp, Homo sapien
ctgttaccagtagtgcgaggaagtgaatttgaa

SEQ ID NO: 630007 - DNA, 33 bp, Homo sapien
tattttaaacatatgacaggattgacacagtgc

SEQ ID NO: 630008 - DNA, 33 bp, Homo sapien
tattttaaacatatgataggattgacacagtgc

SEQ ID NO: 630009 - DNA, 33 bp, Homo sapien
aataaatattcatggaacccttactctgcgcct

SEQ ID NO: 630010 - DNA, 33 bp, Homo sapien
aataaatattcatggagcccttactctgcgcct

SEQ ID NO: 630011 - DNA, 33 bp, Homo sapien
gtaaggaatgaaccagaaaaaatgtaaagggaa

SEQ ID NO: 630012 - DNA, 33 bp, Homo sapien
gtaaggaatgaaccagcaaaaatgtaaagggaa

SEQ ID NO: 630013 - DNA, 33 bp, Homo sapien
tccacttactacacccacagtttcctgaattcc

SEQ ID NO: 630014 - DNA, 33 bp, Homo sapien
tccacttactacacccgcagtttcctgaattcc

SEQ ID NO: 630015 - DNA, 33 bp, Homo sapien
acagagaccttcctagcatccagtacaggtgtt

SEQ ID NO: 630016 - DNA, 33 bp, Homo sapien
acagagaccttcctagtatccagtacaggtgtt

SEQ ID NO: 630017 - DNA, 33 bp, Homo sapien
gagatctatgaaatacaccaatttttctgaaaa

SEQ ID NO: 630018 - DNA, 33 bp, Homo sapien
gagatctatgaaatacgccaatttttctgaaaa

SEQ ID NO: 630019 - DNA, 33 bp, Homo sapien
aacttaagtaaaggaactaacactctctcaatg

SEQ ID NO: 630020 - DNA, 33 bp, Homo sapien
aacttaagtaaaggaattaacactctctcaatg

SEQ ID NO: 630021 - DNA, 33 bp, Homo sapien
gtggacattaggaacacagagagagggatggtg

SEQ ID NO: 630022 - DNA, 33 bp, Homo sapien
gtggacattaggaacagagagagagggatggtg

SEQ ID NO: 630023 - DNA, 33 bp, Homo sapien
tctcttgttgtctttcgaaaatacacacactta

SEQ ID NO: 630024 - DNA, 33 bp, Homo sapien
tctcttgttgtctttctaaaatacacacactta

SEQ ID NO: 630025 - DNA, 33 bp, Homo sapien
actttccacatcagagaactgtggtagaacaaa

SEQ ID NO: 630026 - DNA, 33 bp, Homo sapien
actttccacatcagaggactgtggtagaacaaa

SEQ ID NO: 630027 - DNA, 33 bp, Homo sapien
acgaagagcgtctcaccctaaaaggtcttgttt

SEQ ID NO: 630028 - DNA, 33 bp, Homo sapien
acgaagagcgtctcactctaaaaggtcttgttt

SEQ ID NO: 630029 - DNA, 33 bp, Homo sapien
ctggattccaaagtcaaggcaaagaaatgacag

SEQ ID NO: 630030 - DNA, 33 bp, Homo sapien
ctggattccaaagtcagggcaaagaaatgacag

SEQ ID NO: 630031 - DNA, 33 bp, Homo sapien
tcctttccagcctaatcacacggatgctacaga

SEQ ID NO: 630032 - DNA, 33 bp, Homo sapien
tcctttccagcctaattacacggatgctacaga

SEQ ID NO: 630033 - DNA, 33 bp, Homo sapien
tattagtttcttcagcaaagtactaaatacagg

SEQ ID NO: 630034 - DNA, 33 bp, Homo sapien
tattagtttcttcagccaagtactaaatacagg

SEQ ID NO: 630035 - DNA, 33 bp, Homo sapien
tgaatttcaccttggacacttcctttgtaatct

SEQ ID NO: 630036 - DNA, 33 bp, Homo sapien
tgaatttcaccttggatacttcctttgtaatct

SEQ ID NO: 630037 - DNA, 33 bp, Homo sapien
tagttgccattttaaagacagtctcctgactca

SEQ ID NO: 630038 - DNA, 33 bp, Homo sapien
tagttgccattttaaatacagtctcctgactca

SEQ ID NO: 630039 - DNA, 33 bp, Homo sapien
agatgaattttttaaaggaggctctctagctgc

SEQ ID NO: 630040 - DNA, 33 bp, Homo sapien
agatgaattttttaaatgaggctctctagctgc

SEQ ID NO: 630041 - DNA, 33 bp, Homo sapien
acaaatagtttaccaggcataaagaaggaacat

SEQ ID NO: 630042 - DNA, 33 bp, Homo sapien
acaaatagtttaccagtcataaagaaggaacat

SEQ ID NO: 630043 - DNA, 33 bp, Homo sapien
tcttctgacgacttgccaatctgtaacaccttg

SEQ ID NO: 630044 - DNA, 33 bp, Homo sapien
tcttctgacgacttgctaatctgtaacaccttg

SEQ ID NO: 630045 - DNA, 33 bp, Homo sapien
ccaggccccgttctcacgcgcaagcccgttcca

SEQ ID NO: 630046 - DNA, 33 bp, Homo sapien
ccaggccccgttctcatgcgcaagcccgttcca

SEQ ID NO: 630047 - DNA, 33 bp, Homo sapien
ccccgctcactctcaaatgaggctcctgtgatg

SEQ ID NO: 630048 - DNA, 33 bp, Homo sapien
ccccgctcactctcaactgaggctcctgtgatg

SEQ ID NO: 630049 - DNA, 33 bp, Homo sapien
ctcctactctcctagcgaaaagaggcaggtgaa

SEQ ID NO: 630050 - DNA, 33 bp, Homo sapien
ctcctactctcctagctaaaagaggcaggtgaa

SEQ ID NO: 630051 - DNA, 33 bp, Homo sapien
aactgcagtcccttgcagatcgaggtttctggt

SEQ ID NO: 630052 - DNA, 33 bp, Homo sapien
aactgcagtcccttgcggatcgaggtttctggt

SEQ ID NO: 630053 - DNA, 33 bp, Homo sapien
atttatgaagacttgaagttggaaagaatgaca

SEQ ID NO: 630054 - DNA, 33 bp, Homo sapien
atttatgaagacttgaggttggaaagaatgaca

SEQ ID NO: 630055 - DNA, 33 bp, Homo sapien
gtcagggtgtgaagtacaggaaaatgcttcttc

SEQ ID NO: 630056 - DNA, 33 bp, Homo sapien
gtcagggtgtgaagtataggaaaatgcttcttc

SEQ ID NO: 630057 - DNA, 33 bp, Homo sapien
ttgtaactctgaccacaagtatacctgccctct

SEQ ID NO: 630058 - DNA, 33 bp, Homo sapien
ttgtaactctgaccaccagtatacctgccctct

SEQ ID NO: 630059 - DNA, 33 bp, Homo sapien
gctgggttcacccagcaaatgcatgagttggtc

SEQ ID NO: 630060 - DNA, 33 bp, Homo sapien
gctgggttcacccagcgaatgcatgagttggtc

SEQ ID NO: 630061 - DNA, 33 bp, Homo sapien
agatagtattgtggaaccatttcaaaatacgtc

SEQ ID NO: 630062 - DNA, 33 bp, Homo sapien
agatagtattgtggaagcatttcaaaatacgtc

SEQ ID NO: 630063 - DNA, 33 bp, Homo sapien
ggaataaatattttagccacacagtctctgtca

SEQ ID NO: 630064 - DNA, 33 bp, Homo sapien
ggaataaatattttagtcacacagtctctgtca

SEQ ID NO: 630065 - DNA, 33 bp, Homo sapien
cagctgggtgccaatacaactttaataataggc

SEQ ID NO: 630066 - DNA, 33 bp, Homo sapien
cagctgggtgccaatataactttaataataggc

SEQ ID NO: 630067 - DNA, 33 bp, Homo sapien
aggccttttgtgatataagtggttccctgtcat

SEQ ID NO: 630068 - DNA, 33 bp, Homo sapien
aggccttttgtgatattagtggttccctgtcat

SEQ ID NO: 630069 - DNA, 33 bp, Homo sapien
taatcttggacttctcaacttccggaagcatga

SEQ ID NO: 630070 - DNA, 33 bp, Homo sapien
taatcttggacttctcgacttccggaagcatga

SEQ ID NO: 630071 - DNA, 33 bp, Homo sapien
gggacctgaaaatcaaatgaaaacagtgtttcc

SEQ ID NO: 630072 - DNA, 33 bp, Homo sapien
gggacctgaaaatcaagtgaaaacagtgtttcc

SEQ ID NO: 630073 - DNA, 33 bp, Homo sapien
tttgaaccattagtccaccaagacaccacttct

SEQ ID NO: 630074 - DNA, 33 bp, Homo sapien
tttgaaccattagtccgccaagacaccacttct

SEQ ID NO: 630075 - DNA, 33 bp, Homo sapien
tcagggtcacaaaccactaaatggcagcatggg

SEQ ID NO: 630076 - DNA, 33 bp, Homo sapien
tcagggtcacaaaccagtaaatggcagcatggg

SEQ ID NO: 630077 - DNA, 33 bp, Homo sapien
gtatctatacttttgaaagttcatggaatttat

SEQ ID NO: 630078 - DNA, 33 bp, Homo sapien
gtatctatacttttgacagttcatggaatttat

SEQ ID NO: 630079 - DNA, 33 bp, Homo sapien
tgccaggtactaagaccgatactcaatttgtgc

SEQ ID NO: 630080 - DNA, 33 bp, Homo sapien
tgccaggtactaagactgatactcaatttgtgc

SEQ ID NO: 630081 - DNA, 33 bp, Homo sapien
taatcatttgtcaacaagtcccacttctggtac

SEQ ID NO: 630082 - DNA, 33 bp, Homo sapien
taatcatttgtcaacaggtcccacttctggtac

SEQ ID NO: 630083 - DNA, 33 bp, Homo sapien; identical to SEQ ID NO: 630081

SEQ ID NO: 630084 - DNA, 33 bp, Homo sapien; identical to SEQ ID NO: 630082

SEQ ID NO: 630085 - DNA, 33 bp, Homo sapien
ctctcgtagtgtgcccaagaccttcatggcgtc

SEQ ID NO: 630086 - DNA, 33 bp, Homo sapien
ctctcgtagtgtgcccgagaccttcatggcgtc

SEQ ID NO: 630087 - DNA, 33 bp, Homo sapien
aaccgtgcttcacacacattagactggagagaa

SEQ ID NO: 630088 - DNA, 33 bp, Homo sapien
aaccgtgcttcacacatattagactggagagaa

SEQ ID NO: 630089 - DNA, 33 bp, Homo sapien
tgtgcttccttcctacactgttttataatctca

SEQ ID NO: 630090 - DNA, 33 bp, Homo sapien
tgtgcttccttcctactctgttttataatctca

SEQ ID NO: 630091 - DNA, 33 bp, Homo sapien
ggtttgaagtgaccaaatgtcattagatttctc

SEQ ID NO: 630092 - DNA, 33 bp, Homo sapien
ggtttgaagtgaccaactgtcattagatttctc

SEQ ID NO: 630093 - DNA, 33 bp, Homo sapien
ctattggcaattaacaaaattttcaatgtaaag

SEQ ID NO: 630094 - DNA, 33 bp, Homo sapien
ctattggcaattaacagaattttcaatgtaaag

SEQ ID NO: 630095 - DNA, 33 bp, Homo sapien
agtttatggctcaccaagaggcattttgttccc

SEQ ID NO: 630096 - DNA, 33 bp, Homo sapien
agtttatggctcaccaggaggcattttgttccc

SEQ ID NO: 630097 - DNA, 33 bp, Homo sapien
tgtcatacagttttagcaaatgataacagtgac

SEQ ID NO: 630098 - DNA, 33 bp, Homo sapien
tgtcatacagttttagtaaatgataacagtgac

SEQ ID NO: 630099 - DNA, 33 bp, Homo sapien
cctcatcaagacttgcggattctgacttctgaa

SEQ ID NO: 630100 - DNA, 33 bp, Homo sapien
cctcatcaagacttgctgattctgacttctgaa

SEQ ID NO: 630101 - DNA, 33 bp, Homo sapien
tggagagcctggcccaagacaacaaatctagag

SEQ ID NO: 630102 - DNA, 33 bp, Homo sapien
tggagagcctggcccatgacaacaaatctagag

SEQ ID NO: 630103 - DNA, 33 bp, Homo sapien
acactaccaatgtctccattttatatccaagga

SEQ ID NO: 630104 - DNA, 33 bp, Homo sapien
acactaccaatgtctctattttatatccaagga

SEQ ID NO: 630105 - DNA, 33 bp, Homo sapien
accactctcacaaggcaaggcatagatgaggtt

SEQ ID NO: 630106 - DNA, 33 bp, Homo sapien
accactctcacaaggcgaggcatagatgaggtt

SEQ ID NO: 630107 - DNA, 33 bp, Homo sapien
tctaggaagcaacacagcttagtcctgggctgg

SEQ ID NO: 630108 - DNA, 33 bp, Homo sapien
tctaggaagcaacacatcttagtcctgggctgg

SEQ ID NO: 630109 - DNA, 33 bp, Homo sapien
actctaacagcaaaaagatagtattcattaact

SEQ ID NO: 630110 - DNA, 33 bp, Homo sapien
actctaacagcaaaaatatagtattcattaact

SEQ ID NO: 630111 - DNA, 33 bp, Homo sapien
acaggattctacacataaacttccagaacagcc

SEQ ID NO: 630112 - DNA, 33 bp, Homo sapien
acaggattctacacatgaacttccagaacagcc

SEQ ID NO: 630113 - DNA, 33 bp, Homo sapien
gttattgttaattccaagtcatacaatagtcat

SEQ ID NO: 630114 - DNA, 33 bp, Homo sapien
gttattgttaattccaggtcatacaatagtcat

SEQ ID NO: 630115 - DNA, 33 bp, Homo sapien
gctcacctaactccaactgtgtggaaaatgtag

SEQ ID NO: 630116 - DNA, 33 bp, Homo sapien
gctcacctaactccaattgtgtggaaaatgtag

SEQ ID NO: 630117 - DNA, 33 bp, Homo sapien
tcctggctgagagtcccgatcaaaggaggatat

SEQ ID NO: 630118 - DNA, 33 bp, Homo sapien
tcctggctgagagtcctgatcaaaggaggatat

SEQ ID NO: 630119 - DNA, 33 bp, Homo sapien
gatattgaaactggatgaattaaaactcagctc

SEQ ID NO: 630120 - DNA, 33 bp, Homo sapien
gatattgaaactggattaattaaaactcagctc

SEQ ID NO: 630121 - DNA, 33 bp, Homo sapien
aaacaattttcttaagcactgaactctgtatca

SEQ ID NO: 630122 - DNA, 33 bp, Homo sapien
aaacaattttcttaagtactgaactctgtatca

SEQ ID NO: 630123 - DNA, 33 bp, Homo sapien
acttaaataactttgccagagcctttgaaaagc

SEQ ID NO: 630124 - DNA, 33 bp, Homo sapien
acttaaataactttgctagagcctttgaaaagc

SEQ ID NO: 630125 - DNA, 33 bp, Homo sapien
ggggttctaggtatgcagaaagagagaacagat

SEQ ID NO: 630126 - DNA, 33 bp, Homo sapien
ggggttctaggtatgcggaaagagagaacagat

SEQ ID NO: 630127 - DNA, 33 bp, Homo sapien
tatccaggtgtgacaaaggccagaaaaaggagg

SEQ ID NO: 630128 - DNA, 33 bp, Homo sapien
tatccaggtgtgacaagggccagaaaaaggagg

SEQ ID NO: 630129 - DNA, 33 bp, Homo sapien
tttggcctcgtcttgaaccttacataaagattc

SEQ ID NO: 630130 - DNA, 33 bp, Homo sapien
tttggcctcgtcttgagccttacataaagattc

SEQ ID NO: 630131 - DNA, 33 bp, Homo sapien
gtcctgcatcagataactgattaaacaaactat

SEQ ID NO: 630132 - DNA, 33 bp, Homo sapien
gtcctgcatcagataattgattaaacaaactat

SEQ ID NO: 630133 - DNA, 33 bp, Homo sapien
aacaaaccattttagactcacttatatgacctc

SEQ ID NO: 630134 - DNA, 33 bp, Homo sapien
aacaaaccattttagagtcacttatatgacctc

SEQ ID NO: 630135 - DNA, 33 bp, Homo sapien
ttagaaaacattagacaaagcctgctggattca

SEQ ID NO: 630136 - DNA, 33 bp, Homo sapien
ttagaaaacattagacgaagcctgctggattca

SEQ ID NO: 630137 - DNA, 33 bp, Homo sapien
tttgttttttatcaggcatgtattatgtctgtg

SEQ ID NO: 630138 - DNA, 33 bp, Homo sapien
tttgttttttatcaggtatgtattatgtctgtg

SEQ ID NO: 630139 - DNA, 33 bp, Homo sapien
cactcaggttggtggccatcgaatagtaagtat

SEQ ID NO: 630140 - DNA, 33 bp, Homo sapien
cactcaggttggtggctatcgaatagtaagtat

SEQ ID NO: 630141 - DNA, 33 bp, Homo sapien
agatttagcatattaacgtgcttttcaatctcc

SEQ ID NO: 630142 - DNA, 33 bp, Homo sapien
agatttagcatattaaggtgcttttcaatctcc

SEQ ID NO: 630143 - DNA, 33 bp, Homo sapien
tcacaagggttccctcaagctattacccacttt

SEQ ID NO: 630144 - DNA, 33 bp, Homo sapien
tcacaagggttccctccagctattacccacttt

SEQ ID NO: 630145 - DNA, 33 bp, Homo sapien
actttgataaggaagacgccatacagacaggac

SEQ ID NO: 630146 - DNA, 33 bp, Homo sapien
actttgataaggaagatgccatacagacaggac

SEQ ID NO: 630147 - DNA, 33 bp, Homo sapien
gtctcctctggcaatacgtagaattttcacctt

SEQ ID NO: 630148 - DNA, 33 bp, Homo sapien
gtctcctctggcaatatgtagaattttcacctt

SEQ ID NO: 630149 - DNA, 33 bp, Homo sapien
gagaggctcatcacccaagtaaaggtgacacag

SEQ ID NO: 630150 - DNA, 33 bp, Homo sapien
gagaggctcatcacccgagtaaaggtgacacag

SEQ ID NO: 630151 - DNA, 33 bp, Homo sapien
tatttgtattctttgcccacattatctctggat

SEQ ID NO: 630152 - DNA, 33 bp, Homo sapien
tatttgtattctttgctcacattatctctggat

SEQ ID NO: 630153 - DNA, 33 bp, Homo sapien
aagagtagcagagcaaatctttggatagataag

SEQ ID NO: 630154 - DNA, 33 bp, Homo sapien
aagagtagcagagcaagtctttggatagataag

SEQ ID NO: 630155 - DNA, 33 bp, Homo sapien
ccctcctttaagtcagcagtcagaagctgagct

SEQ ID NO: 630156 - DNA, 33 bp, Homo sapien
ccctcctttaagtcagtagtcagaagctgagct

SEQ ID NO: 630157 - DNA, 33 bp, Homo sapien
ggatgagggtgaagcaccacagtccctgcactc

SEQ ID NO: 630158 - DNA, 33 bp, Homo sapien
ggatgagggtgaagcatcacagtccctgcactc

SEQ ID NO: 630159 - DNA, 33 bp, Homo sapien
cagtccaagatcctgacccactctgaccttctg

SEQ ID NO: 630160 - DNA, 33 bp, Homo sapien
cagtccaagatcctgatccactctgaccttctg

SEQ ID NO: 630161 - DNA, 33 bp, Homo sapien
ttattcatggtgcatacagttgtgcttcattca

SEQ ID NO: 630162 - DNA, 33 bp, Homo sapien
ttattcatggtgcatatagttgtgcttcattca

SEQ ID NO: 630163 - DNA, 33 bp, Homo sapien
agtggtaatgattccactgattcccaagagcat

SEQ ID NO: 630164 - DNA, 33 bp, Homo sapien
agtggtaatgattccattgattcccaagagcat

SEQ ID NO: 630165 - DNA, 33 bp, Homo sapien
tgtcaggcactttgcaccacccagctgtttggt

SEQ ID NO: 630166 - DNA, 33 bp, Homo sapien
tgtcaggcactttgcagcacccagctgtttggt

SEQ ID NO: 630167 - DNA, 33 bp, Homo sapien
cctaagctatgggtcaaggagtcccaaacaaac

SEQ ID NO: 630168 - DNA, 33 bp, Homo sapien
cctaagctatgggtcagggagtcccaaacaaac

SEQ ID NO: 630169 - DNA, 33 bp, Homo sapien
tcacttgaagtcacaacgaaatggaaggacagg

SEQ ID NO: 630170 - DNA, 33 bp, Homo sapien
tcacttgaagtcacaatgaaatggaaggacagg

SEQ ID NO: 630171 - DNA, 33 bp, Homo sapien
atcacctacccagaaaactatctaaataccatc

SEQ ID NO: 630172 - DNA, 33 bp, Homo sapien
atcacctacccagaaagctatctaaataccatc

SEQ ID NO: 630173 - DNA, 33 bp, Homo sapien
ggggctgaaatcttgaagacacacctgctccag

SEQ ID NO: 630174 - DNA, 33 bp, Homo sapien
ggggctgaaatcttgaggacacacctgctccag

SEQ ID NO: 630175 - DNA, 33 bp, Homo sapien
gctctggaggacagtagaacaggcacagggacc

SEQ ID NO: 630176 - DNA, 33 bp, Homo sapien
gctctggaggacagtataacaggcacagggacc

SEQ ID NO: 630177 - DNA, 33 bp, Homo sapien
aagcaagtaacgtgaccaagtctagagcccatg

SEQ ID NO: 630178 - DNA, 33 bp, Homo sapien
aagcaagtaacgtgactaagtctagagcccatg

SEQ ID NO: 630179 - DNA, 33 bp, Homo sapien
ccactaaatgggaacacgaatatttcttaggca

SEQ ID NO: 630180 - DNA, 33 bp, Homo sapien
ccactaaatgggaacatgaatatttcttaggca

SEQ ID NO: 630181 - DNA, 33 bp, Homo sapien
ccccacatttgctgaaaattagtgactgactct

SEQ ID NO: 630182 - DNA, 33 bp, Homo sapien
ccccacatttgctgaagattagtgactgactct

SEQ ID NO: 630183 - DNA, 33 bp, Homo sapien
ctgtgcctgtgggagcaagaggatgagacaacc

SEQ ID NO: 630184 - DNA, 33 bp, Homo sapien
ctgtgcctgtgggagcgagaggatgagacaacc

SEQ ID NO: 630185 - DNA, 33 bp, Homo sapien
ctgaggtggactcttacggcatcacagagatga

SEQ ID NO: 630186 - DNA, 33 bp, Homo sapien
ctgaggtggactcttatggcatcacagagatga

SEQ ID NO: 630187 - DNA, 33 bp, Homo sapien
ccaatgaggttaaacactgggcatcccaccaca

SEQ ID NO: 630188 - DNA, 33 bp, Homo sapien
ccaatgaggttaaacattgggcatcccaccaca

SEQ ID NO: 630189 - DNA, 33 bp, Homo sapien
tgcccccattaactatcaagtcattggtttcag

SEQ ID NO: 630190 - DNA, 33 bp, Homo sapien
tgcccccattaactattaagtcattggtttcag

SEQ ID NO: 630191 - DNA, 33 bp, Homo sapien
taaaaaaggcagatcacaacaagtattggtgag

SEQ ID NO: 630192 - DNA, 33 bp, Homo sapien
taaaaaaggcagatcataacaagtattggtgag

SEQ ID NO: 630193 - DNA, 33 bp, Homo sapien
gaaaaacttgagaagaagatacaggtttgtgtt

SEQ ID NO: 630194 - DNA, 33 bp, Homo sapien
gaaaaacttgagaagaggatacaggtttgtgtt

SEQ ID NO: 630195 - DNA, 33 bp, Homo sapien
cttcctcaatccttcacgcttcccactatcagg

SEQ ID NO: 630196 - DNA, 33 bp, Homo sapien
cttcctcaatccttcatgcttcccactatcagg

SEQ ID NO: 630197 - DNA, 33 bp, Homo sapien
aagaaggaaggacaaaagagatgactccaagat

SEQ ID NO: 630198 - DNA, 33 bp, Homo sapien
aagaaggaaggacaaaggagatgactccaagat

SEQ ID NO: 630199 - DNA, 33 bp, Homo sapien
ccttaaaaagtggccaaatgacatgaacagaca

SEQ ID NO: 630200 - DNA, 33 bp, Homo sapien
ccttaaaaagtggccagatgacatgaacagaca

SEQ ID NO: 630201 - DNA, 33 bp, Homo sapien
cagggacaagacagtaaatttcccagagactca

SEQ ID NO: 630202 - DNA, 33 bp, Homo sapien
cagggacaagacagtacatttcccagagactca

SEQ ID NO: 630203 - DNA, 33 bp, Homo sapien
tcccacctcaccctcaaaagaaactgggactac

SEQ ID NO: 630204 - DNA, 33 bp, Homo sapien
tcccacctcaccctcacaagaaactgggactac

SEQ ID NO: 630205 - DNA, 33 bp, Homo sapien
gataagtgagtgtagcaaaggtttttaatctcc

SEQ ID NO: 630206 - DNA, 33 bp, Homo sapien
gataagtgagtgtagcgaaggtttttaatctcc

SEQ ID NO: 630207 - DNA, 33 bp, Homo sapien
agtcatctctgtatcacgggatctcagtatacc

SEQ ID NO: 630208 - DNA, 33 bp, Homo sapien
agtcatctctgtatcatgggatctcagtatacc

SEQ ID NO: 630209 - DNA, 33 bp, Homo sapien
aagtctttgttttcaccgctatctcccctacct

SEQ ID NO: 630210 - DNA, 33 bp, Homo sapien
aagtctttgttttcactgctatctcccctacct

SEQ ID NO: 630211 - DNA, 33 bp, Homo sapien
ataagagcttagtctaaagagtggattcccact

SEQ ID NO: 630212 - DNA, 33 bp, Homo sapien
ataagagcttagtctagagagtggattcccact

SEQ ID NO: 630213 - DNA, 33 bp, Homo sapien
tgaggccccaccaccacgtcagtttccagtggc

SEQ ID NO: 630214 - DNA, 33 bp, Homo sapien
tgaggccccaccaccaggtcagtttccagtggc

SEQ ID NO: 630215 - DNA, 33 bp, Homo sapien
gtgggaatgaagaagactattaacagcactggc

SEQ ID NO: 630216 - DNA, 33 bp, Homo sapien
gtgggaatgaagaagattattaacagcactggc

SEQ ID NO: 630217 - DNA, 33 bp, Homo sapien
agtctcttgcaactgaactttgtttacttcagt

SEQ ID NO: 630218 - DNA, 33 bp, Homo sapien
agtctcttgcaactgatctttgtttacttcagt

SEQ ID NO: 630219 - DNA, 33 bp, Homo sapien
ccccatttgcaacttaaagcttcatcacctagg

SEQ ID NO: 630220 - DNA, 33 bp, Homo sapien
ccccatttgcaacttacagcttcatcacctagg

SEQ ID NO: 630221 - DNA, 33 bp, Homo sapien
tcttaccaaataggcaccttctattattattga

SEQ ID NO: 630222 - DNA, 33 bp, Homo sapien
tcttaccaaataggcatcttctattattattga

SEQ ID NO: 630223 - DNA, 33 bp, Homo sapien
cgactcttcacacagacgtatcaaaccttcttc

SEQ ID NO: 630224 - DNA, 33 bp, Homo sapien
cgactcttcacacagatgtatcaaaccttcttc

SEQ ID NO: 630225 - DNA, 33 bp, Homo sapien
gtcacaatgacctctaggtaaatttctgcagtg

SEQ ID NO: 630226 - DNA, 33 bp, Homo sapien
gtcacaatgacctctatgtaaatttctgcagtg

SEQ ID NO: 630227 - DNA, 33 bp, Homo sapien
gcctggcagtctaagacattctttccccacctc

SEQ ID NO: 630228 - DNA, 33 bp, Homo sapien
gcctggcagtctaagatattctttccccacctc

SEQ ID NO: 630229 - DNA, 33 bp, Homo sapien
ttgggaaggtccttcaatatcatcttggtccag

SEQ ID NO: 630230 - DNA, 33 bp, Homo sapien
ttgggaaggtccttcagtatcatcttggtccag

SEQ ID NO: 630231 - DNA, 33 bp, Homo sapien
tctggatcagaagacaaaaccaaattagaaatt

SEQ ID NO: 630232 - DNA, 33 bp, Homo sapien
tctggatcagaagacagaaccaaattagaaatt

SEQ ID NO: 630233 - DNA, 33 bp, Homo sapien
aaaacttagacctactaaaaagttgcaagaata

SEQ ID NO: 630234 - DNA, 33 bp, Homo sapien
aaaacttagacctactgaaaagttgcaagaata

SEQ ID NO: 630235 - DNA, 33 bp, Homo sapien
ccccttctccacaaagcatatctccaaacagat

SEQ ID NO: 630236 - DNA, 33 bp, Homo sapien
ccccttctccacaaagtatatctccaaacagat

SEQ ID NO: 630237 - DNA, 33 bp, Homo sapien
cagaggcaacaactggaatatgtgtcctccaac

SEQ ID NO: 630238 - DNA, 33 bp, Homo sapien
cagaggcaacaactgggatatgtgtcctccaac

SEQ ID NO: 630239 - DNA, 33 bp, Homo sapien
cttgctgctccaaaaggacattgggcaaaacag

SEQ ID NO: 630240 - DNA, 33 bp, Homo sapien
cttgctgctccaaaagtacattgggcaaaacag

SEQ ID NO: 630241 - DNA, 33 bp, Homo sapien
atggatgctgtgagtgcaggtccttaagtctgg

SEQ ID NO: 630242 - DNA, 33 bp, Homo sapien
atggatgctgtgagtgtaggtccttaagtctgg

SEQ ID NO: 630243 - DNA, 33 bp, Homo sapien
cttcgcatgtagccccaaatgtccctgatgcat

SEQ ID NO: 630244 - DNA, 33 bp, Homo sapien
cttcgcatgtagccccgaatgtccctgatgcat

SEQ ID NO: 630245 - DNA, 33 bp, Homo sapien
tagagtaacaagttccaatgtcaggaatcaaaa

SEQ ID NO: 630246 - DNA, 33 bp, Homo sapien
tagagtaacaagttccgatgtcaggaatcaaaa

SEQ ID NO: 630247 - DNA, 33 bp, Homo sapien
tgcaggagaacaacaacgcaggcctctaaatag

SEQ ID NO: 630248 - DNA, 33 bp, Homo sapien
tgcaggagaacaacaatgcaggcctctaaatag

SEQ ID NO: 630249 - DNA, 33 bp, Homo sapien
gaggaggggagcagaacgggagtagcttttgta

SEQ ID NO: 630250 - DNA, 33 bp, Homo sapien
gaggaggggagcagaatgggagtagcttttgta

SEQ ID NO: 630251 - DNA, 33 bp, Homo sapien
tcagagtaacagcaaaagcacaacagcaagcaa

SEQ ID NO: 630252 - DNA, 33 bp, Homo sapien
tcagagtaacagcaaaggcacaacagcaagcaa

SEQ ID NO: 630253 - DNA, 33 bp, Homo sapien
tacccttgtctaactacggaactccaacagtgg

SEQ ID NO: 630254 - DNA, 33 bp, Homo sapien
tacccttgtctaactatggaactccaacagtgg

SEQ ID NO: 630255 - DNA, 33 bp, Homo sapien
aagaaagaaaagcaaccgatagtcataaagcca

SEQ ID NO: 630256 - DNA, 33 bp, Homo sapien
aagaaagaaaagcaactgatagtcataaagcca

SEQ ID NO: 630257 - DNA, 33 bp, Homo sapien
cgcggcgctgtgtctacgtggccttttgtttac

SEQ ID NO: 630258 - DNA, 33 bp, Homo sapien
cgcggcgctgtgtctatgtggccttttgtttac

SEQ ID NO: 630259 - DNA, 33 bp, Homo sapien
ttgaataggcaatggacagattgttttggtatc

SEQ ID NO: 630260 - DNA, 33 bp, Homo sapien
ttgaataggcaatggatagattgttttggtatc

SEQ ID NO: 630261 - DNA, 33 bp, Homo sapien
ggtggctgtgggaatacgtggatgaacttccct

SEQ ID NO: 630262 - DNA, 33 bp, Homo sapien
ggtggctgtgggaatatgtggatgaacttccct

SEQ ID NO: 630263 - DNA, 33 bp, Homo sapien
catttctataacatcaccactttttacaagagc

SEQ ID NO: 630264 - DNA, 33 bp, Homo sapien
catttctataacatcagcactttttacaagagc

SEQ ID NO: 630265 - DNA, 33 bp, Homo sapien
ctctgccgattttaaacgtaagctacaaacagg

SEQ ID NO: 630266 - DNA, 33 bp, Homo sapien
ctctgccgattttaaatgtaagctacaaacagg

SEQ ID NO: 630267 - DNA, 33 bp, Homo sapien
tggcagagaagtctaacagtgtgaaatgcatca

SEQ ID NO: 630268 - DNA, 33 bp, Homo sapien
tggcagagaagtctaatagtgtgaaatgcatca

SEQ ID NO: 630269 - DNA, 33 bp, Homo sapien
gatagaagacttaaaccgtgatgctctgtgaaa

SEQ ID NO: 630270 - DNA, 33 bp, Homo sapien
gatagaagacttaaactgtgatgctctgtgaaa

SEQ ID NO: 630271 - DNA, 33 bp, Homo sapien
tcccagtacacaatgcgagaaagaagtggtgaa

SEQ ID NO: 630272 - DNA, 33 bp, Homo sapien
tcccagtacacaatgctagaaagaagtggtgaa

SEQ ID NO: 630273 - DNA, 33 bp, Homo sapien
ggtggatattggccaaatcttatcgttcaacct

SEQ ID NO: 630274 - DNA, 33 bp, Homo sapien
ggtggatattggccaattcttatcgttcaacct

SEQ ID NO: 630275 - DNA, 33 bp, Homo sapien
ttacagacacatttgaaactccctttgcaggtt

SEQ ID NO: 630276 - DNA, 33 bp, Homo sapien
ttacagacacatttgagactccctttgcaggtt

SEQ ID NO: 630277 - DNA, 33 bp, Homo sapien
gaatgttttcataaaaatttgatgtcaattagg

SEQ ID NO: 630278 - DNA, 33 bp, Homo sapien
gaatgttttcataaaactttgatgtcaattagg

SEQ ID NO: 630279 - DNA, 33 bp, Homo sapien
tcataacacagacttacgcatatttattcataa

SEQ ID NO: 630280 - DNA, 33 bp, Homo sapien
tcataacacagacttatgcatatttattcataa

SEQ ID NO: 630281 - DNA, 33 bp, Homo sapien
ttcaggaagttcttcactctattatgcacatac

SEQ ID NO: 630282 - DNA, 33 bp, Homo sapien
ttcaggaagttcttcattctattatgcacatac

SEQ ID NO: 630283 - DNA, 33 bp, Homo sapien
gcctgaaaacatttaactgcagactaaactcat

SEQ ID NO: 630284 - DNA, 33 bp, Homo sapien
gcctgaaaacatttaattgcagactaaactcat

SEQ ID NO: 630285 - DNA, 33 bp, Homo sapien
cctcccccacaaacgacggcattccccttctcc

SEQ ID NO: 630286 - DNA, 33 bp, Homo sapien
cctcccccacaaacgatggcattccccttctcc

SEQ ID NO: 630287 - DNA, 33 bp, Homo sapien
ctgtcagatctcctggccattatttagagaaat

SEQ ID NO: 630288 - DNA, 33 bp, Homo sapien
ctgtcagatctcctggtcattatttagagaaat

SEQ ID NO: 630289 - DNA, 33 bp, Homo sapien
tacctgcacggggacacgaactagaagagcagc

SEQ ID NO: 630290 - DNA, 33 bp, Homo sapien
tacctgcacggggacatgaactagaagagcagc

SEQ ID NO: 630291 - DNA, 33 bp, Homo sapien
tcctctttctgcagtcacagttctggagctagc

SEQ ID NO: 630292 - DNA, 33 bp, Homo sapien
tcctctttctgcagtcccagttctggagctagc

SEQ ID NO: 630293 - DNA, 33 bp, Homo sapien
agaggatctgccttcaataaatgctcaaaggga

SEQ ID NO: 630294 - DNA, 33 bp, Homo sapien
agaggatctgccttcagtaaatgctcaaaggga

SEQ ID NO: 630295 - DNA, 33 bp, Homo sapien
ccaaatcgcctttttacatgaactgttccaatg

SEQ ID NO: 630296 - DNA, 33 bp, Homo sapien
ccaaatcgcctttttagatgaactgttccaatg

SEQ ID NO: 630297 - DNA, 33 bp, Homo sapien
aactgctatcggtgcacaaaaactgaaatcctg

SEQ ID NO: 630298 - DNA, 33 bp, Homo sapien
aactgctatcggtgcataaaaactgaaatcctg

SEQ ID NO: 630299 - DNA, 33 bp, Homo sapien
aatactatggagaacacgagctgtagaagagaa

SEQ ID NO: 630300 - DNA, 33 bp, Homo sapien
aatactatggagaacatgagctgtagaagagaa

SEQ ID NO: 630301 - DNA, 33 bp, Homo sapien
ttactgggtcatgaaccgcctggatagcaacag

SEQ ID NO: 630302 - DNA, 33 bp, Homo sapien
ttactgggtcatgaactgcctggatagcaacag

SEQ ID NO: 630303 - DNA, 33 bp, Homo sapien
ctctatgcataattcacggatttactcattcat

SEQ ID NO: 630304 - DNA, 33 bp, Homo sapien
ctctatgcataattcatggatttactcattcat

SEQ ID NO: 630305 - DNA, 33 bp, Homo sapien
tccctctagctgtgaacactttaaatagacttc

SEQ ID NO: 630306 - DNA, 33 bp, Homo sapien
tccctctagctgtgaatactttaaatagacttc

SEQ ID NO: 630307 - DNA, 33 bp, Homo sapien
ttagagaaaatataccaatcaatagccctttgg

SEQ ID NO: 630308 - DNA, 33 bp, Homo sapien
ttagagaaaatatacccatcaatagccctttgg

SEQ ID NO: 630309 - DNA, 33 bp, Homo sapien
attcagctacactgcccaccccagagcagacag

SEQ ID NO: 630310 - DNA, 33 bp, Homo sapien
attcagctacactgccgaccccagagcagacag

SEQ ID NO: 630311 - DNA, 33 bp, Homo sapien
tcctgcaagccacgtgaaagcaggctcttcatt

SEQ ID NO: 630312 - DNA, 33 bp, Homo sapien
tcctgcaagccacgtggaagcaggctcttcatt

SEQ ID NO: 630313 - DNA, 33 bp, Homo sapien
taaatttccttctgccaagttctttctgtacct

SEQ ID NO: 630314 - DNA, 33 bp, Homo sapien
taaatttccttctgcccagttctttctgtacct

SEQ ID NO: 630315 - DNA, 33 bp, Homo sapien
ttgccctgaacagccacagagagatagggaaag

SEQ ID NO: 630316 - DNA, 33 bp, Homo sapien
ttgccctgaacagccagagagagatagggaaag

SEQ ID NO: 630317 - DNA, 33 bp, Homo sapien
accgcctgcaagtaaccgaggcctagctaatgc

SEQ ID NO: 630318 - DNA, 33 bp, Homo sapien
accgcctgcaagtaactgaggcctagctaatgc

SEQ ID NO: 630319 - DNA, 33 bp, Homo sapien
tactaggttcagtatcaccttcatatgttgatg

SEQ ID NO: 630320 - DNA, 33 bp, Homo sapien
tactaggttcagtatcgccttcatatgttgatg

SEQ ID NO: 630321 - DNA, 33 bp, Homo sapien
tccaatccttgtttcaaagggtctactgttcag

SEQ ID NO: 630322 - DNA, 33 bp, Homo sapien
tccaatccttgtttcagagggtctactgttcag

SEQ ID NO: 630323 - DNA, 33 bp, Homo sapien
cgcttctttgggtcaacaatcaaacaatactgc

SEQ ID NO: 630324 - DNA, 33 bp, Homo sapien
cgcttctttgggtcaataatcaaacaatactgc

SEQ ID NO: 630325 - DNA, 33 bp, Homo sapien
gagtgaagtaggtttacggaagagatttgggaa

SEQ ID NO: 630326 - DNA, 33 bp, Homo sapien
gagtgaagtaggtttatggaagagatttgggaa

SEQ ID NO: 630327 - DNA, 33 bp, Homo sapien
ttcagaggagtgttggaaagagtttgtatatat

SEQ ID NO: 630328 - DNA, 33 bp, Homo sapien
ttcagaggagtgttgggaagagtttgtatatat

SEQ ID NO: 630329 - DNA, 33 bp, Homo sapien
tgacatttatttttaacgactgaccagtggcaa

SEQ ID NO: 630330 - DNA, 33 bp, Homo sapien
tgacatttatttttaaggactgaccagtggcaa

SEQ ID NO: 630331 - DNA, 33 bp, Homo sapien
tcatcttggaattcaaccttaatattttgtgta

SEQ ID NO: 630332 - DNA, 33 bp, Homo sapien
tcatcttggaattcaatcttaatattttgtgta

SEQ ID NO: 630333 - DNA, 33 bp, Homo sapien
tcaaaaagagtgcgaacagacaaggcaatccta

SEQ ID NO: 630334 - DNA, 33 bp, Homo sapien
tcaaaaagagtgcgaatagacaaggcaatccta

SEQ ID NO: 630335 - DNA, 33 bp, Homo sapien
aataagcctataaaggcatttgagtgctttctc

SEQ ID NO: 630336 - DNA, 33 bp, Homo sapien
aataagcctataaaggtatttgagtgctttctc

SEQ ID NO: 630337 - DNA, 33 bp, Homo sapien
ctttcatcacagaaaactattcagcctgttttt

SEQ ID NO: 630338 - DNA, 33 bp, Homo sapien
ctttcatcacagaaaagtattcagcctgttttt

SEQ ID NO: 630339 - DNA, 33 bp, Homo sapien
gtatggtacactgctaaaataaagaggaggaaa

SEQ ID NO: 630340 - DNA, 33 bp, Homo sapien
gtatggtacactgctagaataaagaggaggaaa

SEQ ID NO: 630341 - DNA, 33 bp, Homo sapien
aatgattgacagcagaccctgttagtatatagg

SEQ ID NO: 630342 - DNA, 33 bp, Homo sapien
aatgattgacagcagatcctgttagtatatagg

SEQ ID NO: 630343 - DNA, 33 bp, Homo sapien
tcaaataaccagaagagaagctctggaatgtcc

SEQ ID NO: 630344 - DNA, 33 bp, Homo sapien
tcaaataaccagaagataagctctggaatgtcc

SEQ ID NO: 630345 - DNA, 33 bp, Homo sapien
accctgttgattgatgaaggtgtttagttctat

SEQ ID NO: 630346 - DNA, 33 bp, Homo sapien
accctgttgattgatggaggtgtttagttctat

SEQ ID NO: 630347 - DNA, 33 bp, Homo sapien
tttttatgcaaccttacatttcaatcttttttc

SEQ ID NO: 630348 - DNA, 33 bp, Homo sapien
tttttatgcaaccttatatttcaatcttttttc

SEQ ID NO: 630349 - DNA, 33 bp, Homo sapien
aacgatgctttgaaaacaggaaaaccattgttg

SEQ ID NO: 630350 - DNA, 33 bp, Homo sapien
aacgatgctttgaaaataggaaaaccattgttg

SEQ ID NO: 630351 - DNA, 33 bp, Homo sapien
acaggcaaaacttaaacatatgtactcagagaa

SEQ ID NO: 630352 - DNA, 33 bp, Homo sapien
acaggcaaaacttaaatatatgtactcagagaa

SEQ ID NO: 630353 - DNA, 33 bp, Homo sapien
tatctgcattaacatcacagtgtagtctagagt

SEQ ID NO: 630354 - DNA, 33 bp, Homo sapien
tatctgcattaacatcgcagtgtagtctagagt

SEQ ID NO: 630355 - DNA, 33 bp, Homo sapien
tcaatcttgggctaagactcccaaagctattcc

SEQ ID NO: 630356 - DNA, 33 bp, Homo sapien
tcaatcttgggctaagtctcccaaagctattcc

SEQ ID NO: 630357 - DNA, 33 bp, Homo sapien
aggaagtgaataggaactgggtaaacgaaacag

SEQ ID NO: 630358 - DNA, 33 bp, Homo sapien
aggaagtgaataggaattgggtaaacgaaacag

SEQ ID NO: 630359 - DNA, 33 bp, Homo sapien
gagttaaggctaaaacaggatacactgtaattt

SEQ ID NO: 630360 - DNA, 33 bp, Homo sapien
gagttaaggctaaaacgggatacactgtaattt

SEQ ID NO: 630361 - DNA, 33 bp, Homo sapien
tttcaggagtgatttaaaattctctagttgttt

SEQ ID NO: 630362 - DNA, 33 bp, Homo sapien
tttcaggagtgatttacaattctctagttgttt

SEQ ID NO: 630363 - DNA, 33 bp, Homo sapien
aggcaccatgaatctccctactaggcagtcact

SEQ ID NO: 630364 - DNA, 33 bp, Homo sapien
aggcaccatgaatctctctactaggcagtcact

SEQ ID NO: 630365 - DNA, 33 bp, Homo sapien
atccaattggctgaacagtcatcagtgaagtct

SEQ ID NO: 630366 - DNA, 33 bp, Homo sapien
atccaattggctgaacggtcatcagtgaagtct

SEQ ID NO: 630367 - DNA, 33 bp, Homo sapien
aaagggtccctgagaccataacatttgaggacc

SEQ ID NO: 630368 - DNA, 33 bp, Homo sapien
aaagggtccctgagactataacatttgaggacc

SEQ ID NO: 630369 - DNA, 33 bp, Homo sapien
gatagtaggcatcaaaggaggtaatgtgtgtga

SEQ ID NO: 630370 - DNA, 33 bp, Homo sapien
gatagtaggcatcaaatgaggtaatgtgtgtga

SEQ ID NO: 630371 - DNA, 33 bp, Homo sapien
ttgcaaaccgtatatcggacaaagacattatat

SEQ ID NO: 630372 - DNA, 33 bp, Homo sapien
ttgcaaaccgtatatctgacaaagacattatat

SEQ ID NO: 630373 - DNA, 33 bp, Homo sapien
atggagtcccagtggccgcagatgttaagtggc

SEQ ID NO: 630374 - DNA, 33 bp, Homo sapien
atggagtcccagtggctgcagatgttaagtggc

SEQ ID NO: 630375 - DNA, 33 bp, Homo sapien
cagccagtgtcatagaaatgcccagagagatac

SEQ ID NO: 630376 - DNA, 33 bp, Homo sapien
cagccagtgtcatagagatgcccagagagatac

SEQ ID NO: 630377 - DNA, 33 bp, Homo sapien
aggtgaaggaatttgacggaaagaaagtaggaa

SEQ ID NO: 630378 - DNA, 33 bp, Homo sapien
aggtgaaggaatttgatggaaagaaagtaggaa

SEQ ID NO: 630379 - DNA, 33 bp, Homo sapien
ttcacacataaggaaactgatgcagaggttcat

SEQ ID NO: 630380 - DNA, 33 bp, Homo sapien
ttcacacataaggaaattgatgcagaggttcat

SEQ ID NO: 630381 - DNA, 33 bp, Homo sapien
gaagagcgtttgcacaaaggtatatgccagtat

SEQ ID NO: 630382 - DNA, 33 bp, Homo sapien
gaagagcgtttgcacagaggtatatgccagtat

SEQ ID NO: 630383 - DNA, 33 bp, Homo sapien
tgtggaaaggcaatggaattagaatagctaaaa

SEQ ID NO: 630384 - DNA, 33 bp, Homo sapien
tgtggaaaggcaatgggattagaatagctaaaa

SEQ ID NO: 630385 - DNA, 33 bp, Homo sapien
ttgtgaggactctttcactcttgtaaggaaatg

SEQ ID NO: 630386 - DNA, 33 bp, Homo sapien
ttgtgaggactctttcgctcttgtaaggaaatg

SEQ ID NO: 630387 - DNA, 33 bp, Homo sapien
agagagaaactgtgcacgactgcttttcccaac

SEQ ID NO: 630388 - DNA, 33 bp, Homo sapien
agagagaaactgtgcatgactgcttttcccaac

SEQ ID NO: 630389 - DNA, 33 bp, Homo sapien
taattttaaaaagtgacaggaagattctgtgag

SEQ ID NO: 630390 - DNA, 33 bp, Homo sapien
taattttaaaaagtgataggaagattctgtgag

SEQ ID NO: 630391 - DNA, 33 bp, Homo sapien
cagaatactctccccacgccactggacaagagc

SEQ ID NO: 630392 - DNA, 33 bp, Homo sapien
cagaatactctccccatgccactggacaagagc

SEQ ID NO: 630393 - DNA, 33 bp, Homo sapien
gccagcatgattcactaaaattaaaccaatcag

SEQ ID NO: 630394 - DNA, 33 bp, Homo sapien
gccagcatgattcactgaaattaaaccaatcag

SEQ ID NO: 630395 - DNA, 33 bp, Homo sapien
ttcaaactcaaactggaatccataccattggct

SEQ ID NO: 630396 - DNA, 33 bp, Homo sapien
ttcaaactcaaactggcatccataccattggct

SEQ ID NO: 630397 - DNA, 33 bp, Homo sapien
gtggatagagggaaaagagttttgtgctccaag

SEQ ID NO: 630398 - DNA, 33 bp, Homo sapien
gtggatagagggaaaatagttttgtgctccaag

SEQ ID NO: 630399 - DNA, 33 bp, Homo sapien
actttctgttcttttacacttgttgcttgctgt

SEQ ID NO: 630400 - DNA, 33 bp, Homo sapien
actttctgttcttttatacttgttgcttgctgt

SEQ ID NO: 630401 - DNA, 33 bp, Homo sapien
tcctgtgaatctattagcttgccacaagcctcg

SEQ ID NO: 630402 - DNA, 33 bp, Homo sapien
tcctgtgaatctattatcttgccacaagcctcg

SEQ ID NO: 630403 - DNA, 33 bp, Homo sapien
tcttttgctatgtagacgtttttttagtttaac

SEQ ID NO: 630404 - DNA, 33 bp, Homo sapien
tcttttgctatgtagaggtttttttagtttaac

SEQ ID NO: 630405 - DNA, 33 bp, Homo sapien
attgtgggattactcaatacaaatgaaggcaga

SEQ ID NO: 630406 - DNA, 33 bp, Homo sapien
attgtgggattactcagtacaaatgaaggcaga

SEQ ID NO: 630407 - DNA, 33 bp, Homo sapien
tcttcaagttccagtacaaatgctacctccttt

SEQ ID NO: 630408 - DNA, 33 bp, Homo sapien
tcttcaagttccagtataaatgctacctccttt

SEQ ID NO: 630409 - DNA, 33 bp, Homo sapien
accctgtacataaacacctagtaaaattctatg

SEQ ID NO: 630410 - DNA, 33 bp, Homo sapien
accctgtacataaacatctagtaaaattctatg

SEQ ID NO: 630411 - DNA, 33 bp, Homo sapien
tggaggtgctgaaatcacatacttcgttttatg

SEQ ID NO: 630412 - DNA, 33 bp, Homo sapien
tggaggtgctgaaatcccatacttcgttttatg

SEQ ID NO: 630413 - DNA, 33 bp, Homo sapien
tggaactgctgaggtaacaagcaggacttgact

SEQ ID NO: 630414 - DNA, 33 bp, Homo sapien
tggaactgctgaggtagcaagcaggacttgact

SEQ ID NO: 630415 - DNA, 33 bp, Homo sapien
gtaagaatattttcaacgaagctgagaaaacac

SEQ ID NO: 630416 - DNA, 33 bp, Homo sapien
gtaagaatattttcaatgaagctgagaaaacac

SEQ ID NO: 630417 - DNA, 33 bp, Homo sapien
cctgaagtgttttccaatcaaagcgaagagacg

SEQ ID NO: 630418 - DNA, 33 bp, Homo sapien
cctgaagtgttttccagtcaaagcgaagagacg

SEQ ID NO: 630419 - DNA, 33 bp, Homo sapien
atcacaggaatttgaactatggaatagaacatg

SEQ ID NO: 630420 - DNA, 33 bp, Homo sapien
atcacaggaatttgaagtatggaatagaacatg

SEQ ID NO: 630421 - DNA, 33 bp, Homo sapien
aaaggtgactgaatgaagaaggattggtgagat

SEQ ID NO: 630422 - DNA, 33 bp, Homo sapien
aaaggtgactgaatgaggaaggattggtgagat

SEQ ID NO: 630423 - DNA, 33 bp, Homo sapien
caggaaggccctagcaagatcttcgtggccttt

SEQ ID NO: 630424 - DNA, 33 bp, Homo sapien
caggaaggccctagcaggatcttcgtggccttt

SEQ ID NO: 630425 - DNA, 33 bp, Homo sapien
tatggatgtttttgggccaacatttagatcttt

SEQ ID NO: 630426 - DNA, 33 bp, Homo sapien
tatggatgtttttgggtcaacatttagatcttt

SEQ ID NO: 630427 - DNA, 33 bp, Homo sapien
ttcctaaagtgttgacagaaaagaacaaaaatt

SEQ ID NO: 630428 - DNA, 33 bp, Homo sapien
ttcctaaagtgttgacggaaaagaacaaaaatt

SEQ ID NO: 630429 - DNA, 33 bp, Homo sapien
ttaagtggcctacttcaaggctttgaatcaact

SEQ ID NO: 630430 - DNA, 33 bp, Homo sapien
ttaagtggcctacttcgaggctttgaatcaact

SEQ ID NO: 630431 - DNA, 33 bp, Homo sapien
ccccttatttgtcaaaaatgatgaaagaagctc

SEQ ID NO: 630432 - DNA, 33 bp, Homo sapien
ccccttatttgtcaaagatgatgaaagaagctc

SEQ ID NO: 630433 - DNA, 33 bp, Homo sapien
ttgattagaaataataaaatcccggaatcttcc

SEQ ID NO: 630434 - DNA, 33 bp, Homo sapien
ttgattagaaataatacaatcccggaatcttcc

SEQ ID NO: 630435 - DNA, 33 bp, Homo sapien
caaggtctaaatcaccaaagacagtcatctcct

SEQ ID NO: 630436 - DNA, 33 bp, Homo sapien
caaggtctaaatcaccgaagacagtcatctcct

SEQ ID NO: 630437 - DNA, 33 bp, Homo sapien
tgacactggagaggacgcttggaagacctgcct

SEQ ID NO: 630438 - DNA, 33 bp, Homo sapien
tgacactggagaggactcttggaagacctgcct

SEQ ID NO: 630439 - DNA, 33 bp, Homo sapien
tcatggctgcacgaagccattggccctccactc

SEQ ID NO: 630440 - DNA, 33 bp, Homo sapien
tcatggctgcacgaaggcattggccctccactc

SEQ ID NO: 630441 - DNA, 33 bp, Homo sapien
tgtgaatgagaatggcaagaaaatcaccagtat

SEQ ID NO: 630442 - DNA, 33 bp, Homo sapien
tgtgaatgagaatggcgagaaaatcaccagtat

SEQ ID NO: 630443 - DNA, 33 bp, Homo sapien
aagatgtcacctttgcagatggcggtcagtggt

SEQ ID NO: 630444 - DNA, 33 bp, Homo sapien
aagatgtcacctttgcggatggcggtcagtggt

SEQ ID NO: 630445 - DNA, 33 bp, Homo sapien
gtctccattgaaattacgtgtaactcctcctgc

SEQ ID NO: 630446 - DNA, 33 bp, Homo sapien
gtctccattgaaattatgtgtaactcctcctgc

SEQ ID NO: 630447 - DNA, 33 bp, Homo sapien
atttcgaagccacagagtctctccctggagcag

SEQ ID NO: 630448 - DNA, 33 bp, Homo sapien
atttcgaagccacagattctctccctggagcag

SEQ ID NO: 630449 - DNA, 33 bp, Homo sapien
aaggactcagggaccacagagttttcttgaagt

SEQ ID NO: 630450 - DNA, 33 bp, Homo sapien
aaggactcagggaccagagagttttcttgaagt

SEQ ID NO: 630451 - DNA, 33 bp, Homo sapien
attctgcttagcctcaaactgaaagcattgcaa

SEQ ID NO: 630452 - DNA, 33 bp, Homo sapien
attctgcttagcctcagactgaaagcattgcaa

SEQ ID NO: 630453 - DNA, 33 bp, Homo sapien
atcagggaagtcagtgcaacatcagaaggacag

SEQ ID NO: 630454 - DNA, 33 bp, Homo sapien
atcagggaagtcagtgtaacatcagaaggacag

SEQ ID NO: 630455 - DNA, 33 bp, Homo sapien
ctcctccaaaccatagacttcgtagtatgtatt

SEQ ID NO: 630456 - DNA, 33 bp, Homo sapien
ctcctccaaaccatagccttcgtagtatgtatt

SEQ ID NO: 630457 - DNA, 33 bp, Homo sapien
gagggctctctccttacctacttggagttaagc

SEQ ID NO: 630458 - DNA, 33 bp, Homo sapien
gagggctctctccttagctacttggagttaagc

SEQ ID NO: 630459 - DNA, 33 bp, Homo sapien
ggaagccttcagagcaatacaagtccctggaat

SEQ ID NO: 630460 - DNA, 33 bp, Homo sapien
ggaagccttcagagcattacaagtccctggaat

SEQ ID NO: 630461 - DNA, 33 bp, Homo sapien
ataagccacctctctccaaatctgcaattctta

SEQ ID NO: 630462 - DNA, 33 bp, Homo sapien
ataagccacctctctctaaatctgcaattctta

SEQ ID NO: 630463 - DNA, 33 bp, Homo sapien
ggtacaatgctttaagcaacataagaaagccac

SEQ ID NO: 630464 - DNA, 33 bp, Homo sapien
ggtacaatgctttaagtaacataagaaagccac

SEQ ID NO: 630465 - DNA, 33 bp, Homo sapien
cagcatggactctataaaatcacatattaaagc

SEQ ID NO: 630466 - DNA, 33 bp, Homo sapien
cagcatggactctatacaatcacatattaaagc

SEQ ID NO: 630467 - DNA, 33 bp, Homo sapien
ctcagtaagtaccccccatctcatttctatgtg

SEQ ID NO: 630468 - DNA, 33 bp, Homo sapien
ctcagtaagtacccccgatctcatttctatgtg

SEQ ID NO: 630469 - DNA, 33 bp, Homo sapien
tggacagttctgacagaaggcaagttcatctca

SEQ ID NO: 630470 - DNA, 33 bp, Homo sapien
tggacagttctgacaggaggcaagttcatctca

SEQ ID NO: 630471 - DNA, 33 bp, Homo sapien
agacaagccaaacctagacttgaagaggctcca

SEQ ID NO: 630472 - DNA, 33 bp, Homo sapien
agacaagccaaacctatacttgaagaggctcca

SEQ ID NO: 630473 - DNA, 33 bp, Homo sapien
tggtgtgctgtgattacgtaggagagtgtcttt

SEQ ID NO: 630474 - DNA, 33 bp, Homo sapien
tggtgtgctgtgattatgtaggagagtgtcttt

SEQ ID NO: 630475 - DNA, 33 bp, Homo sapien
caccagcatttcaccacgaggaaacccaggctg

SEQ ID NO: 630476 - DNA, 33 bp, Homo sapien
caccagcatttcaccatgaggaaacccaggctg

SEQ ID NO: 630477 - DNA, 33 bp, Homo sapien
cgactcaggacagtgccgaagggtcatcccgtc

SEQ ID NO: 630478 - DNA, 33 bp, Homo sapien
cgactcaggacagtgctgaagggtcatcccgtc

SEQ ID NO: 630479 - DNA, 33 bp, Homo sapien
actgagtgggaatggacagaggggagtgcagac

SEQ ID NO: 630480 - DNA, 33 bp, Homo sapien
actgagtgggaatggatagaggggagtgcagac

SEQ ID NO: 630481 - DNA, 33 bp, Homo sapien
agaatttgtggacaccgcagagtcccttgcctg

SEQ ID NO: 630482 - DNA, 33 bp, Homo sapien
agaatttgtggacacctcagagtcccttgcctg

SEQ ID NO: 630483 - DNA, 33 bp, Homo sapien
ctgtggtggccactaacgtacagatccagatcc

SEQ ID NO: 630484 - DNA, 33 bp, Homo sapien
ctgtggtggccactaatgtacagatccagatcc

SEQ ID NO: 630485 - DNA, 33 bp, Homo sapien
ttctctcccatacaaccagtgcttatgcagcaa

SEQ ID NO: 630486 - DNA, 33 bp, Homo sapien
ttctctcccatacaactagtgcttatgcagcaa

SEQ ID NO: 630487 - DNA, 33 bp, Homo sapien
gctaggccaaaggcaaattaggaaactagggct

SEQ ID NO: 630488 - DNA, 33 bp, Homo sapien
gctaggccaaaggcaagttaggaaactagggct

SEQ ID NO: 630489 - DNA, 33 bp, Homo sapien
tactctgcttccacgagccaggctagctttcta

SEQ ID NO: 630490 - DNA, 33 bp, Homo sapien
tactctgcttccacgatccaggctagctttcta

SEQ ID NO: 630491 - DNA, 33 bp, Homo sapien
ttttttcctacccaggcaaagtcatgctttttg

SEQ ID NO: 630492 - DNA, 33 bp, Homo sapien
ttttttcctacccaggtaaagtcatgctttttg

SEQ ID NO: 630493 - DNA, 33 bp, Homo sapien
ccggttaggaaaaccaatgcttctaggagagac

SEQ ID NO: 630494 - DNA, 33 bp, Homo sapien
ccggttaggaaaaccagtgcttctaggagagac

SEQ ID NO: 630495 - DNA, 33 bp, Homo sapien
aactcatctccgctaccggataccgagactctg

SEQ ID NO: 630496 - DNA, 33 bp, Homo sapien
aactcatctccgctactggataccgagactctg

SEQ ID NO: 630497 - DNA, 33 bp, Homo sapien
gacatgtatctgagtacagtgaagggatgcagc

SEQ ID NO: 630498 - DNA, 33 bp, Homo sapien
gacatgtatctgagtatagtgaagggatgcagc

SEQ ID NO: 630499 - DNA, 33 bp, Homo sapien
ctgagtctccttcaaaagcttgtctcctaccac

SEQ ID NO: 630500 - DNA, 33 bp, Homo sapien
ctgagtctccttcaaaggcttgtctcctaccac

SEQ ID NO: 630501 - DNA, 33 bp, Homo sapien
atgtataattatgcagaagaatgtataacgtat

SEQ ID NO: 630502 - DNA, 33 bp, Homo sapien
atgtataattatgcagcagaatgtataacgtat

SEQ ID NO: 630503 - DNA, 33 bp, Homo sapien
cacctgggcagacgaaaaagctagatgcaagca

SEQ ID NO: 630504 - DNA, 33 bp, Homo sapien
cacctgggcagacgaagaagctagatgcaagca

SEQ ID NO: 630505 - DNA, 33 bp, Homo sapien
aaaaaaattgttcttaggaagcctgaggctagg

SEQ ID NO: 630506 - DNA, 33 bp, Homo sapien
aaaaaaattgttcttatgaagcctgaggctagg

SEQ ID NO: 630507 - DNA, 33 bp, Homo sapien
accctgaaatgttttacgtaagtggggcctggg

SEQ ID NO: 630508 - DNA, 33 bp, Homo sapien
accctgaaatgttttatgtaagtggggcctggg

SEQ ID NO: 630509 - DNA, 33 bp, Homo sapien
gtgggtatctacaatgacaacatcaatactgag

SEQ ID NO: 630510 - DNA, 33 bp, Homo sapien
gtgggtatctacaatggcaacatcaatactgag

SEQ ID NO: 630511 - DNA, 33 bp, Homo sapien
taaaccactcttctaccacctgtgatctctgtt

SEQ ID NO: 630512 - DNA, 33 bp, Homo sapien
taaaccactcttctactacctgtgatctctgtt

SEQ ID NO: 630513 - DNA, 33 bp, Homo sapien
gaagagacttcccctacgtaaaagagagatgaa

SEQ ID NO: 630514 - DNA, 33 bp, Homo sapien
gaagagacttcccctatgtaaaagagagatgaa

SEQ ID NO: 630515 - DNA, 33 bp, Homo sapien
tggagacaagtcagaaacacagattgagtcctg

SEQ ID NO: 630516 - DNA, 33 bp, Homo sapien
tggagacaagtcagaatcacagattgagtcctg

SEQ ID NO: 630517 - DNA, 33 bp, Homo sapien
tcagaaatgctctcaacgtagctactatattca

SEQ ID NO: 630518 - DNA, 33 bp, Homo sapien
tcagaaatgctctcaatgtagctactatattca

SEQ ID NO: 630519 - DNA, 33 bp, Homo sapien
atcacccatcagcgccagcgaatgagttcaatt

SEQ ID NO: 630520 - DNA, 33 bp, Homo sapien
atcacccatcagcgccggcgaatgagttcaatt

SEQ ID NO: 630521 - DNA, 33 bp, Homo sapien
tgctgtctattttccacgtaaattttgacatca

SEQ ID NO: 630522 - DNA, 33 bp, Homo sapien
tgctgtctattttccatgtaaattttgacatca

SEQ ID NO: 630523 - DNA, 33 bp, Homo sapien
ctaatctctttgtttgaacaagtgttgtgtctt

SEQ ID NO: 630524 - DNA, 33 bp, Homo sapien
ctaatctctttgtttggacaagtgttgtgtctt

SEQ ID NO: 630525 - DNA, 33 bp, Homo sapien
atcctctgaacctctacgtggaccctaaatttc

SEQ ID NO: 630526 - DNA, 33 bp, Homo sapien
atcctctgaacctctatgtggaccctaaatttc

SEQ ID NO: 630527 - DNA, 33 bp, Homo sapien
taagtgacatgggtcacgcattcctagtgtgaa

SEQ ID NO: 630528 - DNA, 33 bp, Homo sapien
taagtgacatgggtcatgcattcctagtgtgaa

SEQ ID NO: 630529 - DNA, 33 bp, Homo sapien
attaccaataaaacaggcaataacataaggagg

SEQ ID NO: 630530 - DNA, 33 bp, Homo sapien
attaccaataaaacagtcaataacataaggagg

SEQ ID NO: 630531 - DNA, 33 bp, Homo sapien
ggttggcacactcatacccattcttttagaccc

SEQ ID NO: 630532 - DNA, 33 bp, Homo sapien
ggttggcacactcatatccattcttttagaccc

SEQ ID NO: 630533 - DNA, 33 bp, Homo sapien
ataataaatctgagaacgtcttgaaaagaaaat

SEQ ID NO: 630534 - DNA, 33 bp, Homo sapien
ataataaatctgagaatgtcttgaaaagaaaat

SEQ ID NO: 630535 - DNA, 33 bp, Homo sapien
acccagggagtgtgaacatatcatttgatctgt

SEQ ID NO: 630536 - DNA, 33 bp, Homo sapien
acccagggagtgtgaatatatcatttgatctgt

SEQ ID NO: 630537 - DNA, 33 bp, Homo sapien
tctaatttacacctgccaaacacaaatccaccc

SEQ ID NO: 630538 - DNA, 33 bp, Homo sapien
tctaatttacacctgctaaacacaaatccaccc

SEQ ID NO: 630539 - DNA, 33 bp, Homo sapien
ccctgccggccatacaccaagtccaggccacag

SEQ ID NO: 630540 - DNA, 33 bp, Homo sapien
ccctgccggccatacatcaagtccaggccacag

SEQ ID NO: 630541 - DNA, 33 bp, Homo sapien
cacccctgtccacaagaaggattggggcagcct

SEQ ID NO: 630542 - DNA, 33 bp, Homo sapien
cacccctgtccacaaggaggattggggcagcct

SEQ ID NO: 630543 - DNA, 33 bp, Homo sapien
atacccacaacagtaccagaatggcagtgtatt

SEQ ID NO: 630544 - DNA, 33 bp, Homo sapien
atacccacaacagtactagaatggcagtgtatt

SEQ ID NO: 630545 - DNA, 33 bp, Homo sapien
gaaagaaatctcaatgaattacaaatggaaaaa

SEQ ID NO: 630546 - DNA, 33 bp, Homo sapien
gaaagaaatctcaatgtattacaaatggaaaaa

SEQ ID NO: 630547 - DNA, 33 bp, Homo sapien
tcgacgtaccttataccgctgttgcaagtacct

SEQ ID NO: 630548 - DNA, 33 bp, Homo sapien
tcgacgtaccttatactgctgttgcaagtacct

SEQ ID NO: 630549 - DNA, 33 bp, Homo sapien
gaatcttctgccagcaacttgacactagttccc

SEQ ID NO: 630550 - DNA, 33 bp, Homo sapien
gaatcttctgccagcatcttgacactagttccc

SEQ ID NO: 630551 - DNA, 33 bp, Homo sapien
tgaataaaaatcaatcacatttcacccataaaa

SEQ ID NO: 630552 - DNA, 33 bp, Homo sapien
tgaataaaaatcaatctcatttcacccataaaa

SEQ ID NO: 630553 - DNA, 33 bp, Homo sapien
aatagttaaagaaaacaaggttcagccacttga

SEQ ID NO: 630554 - DNA, 33 bp, Homo sapien
aatagttaaagaaaacgaggttcagccacttga

SEQ ID NO: 630555 - DNA, 33 bp, Homo sapien
accgtgcccggctataacaggattttaaaaacg

SEQ ID NO: 630556 - DNA, 33 bp, Homo sapien
accgtgcccggctataccaggattttaaaaacg

SEQ ID NO: 630557 - DNA, 33 bp, Homo sapien
gaacagagtagttaccacagaacagtgcatgct

SEQ ID NO: 630558 - DNA, 33 bp, Homo sapien
gaacagagtagttaccgcagaacagtgcatgct

SEQ ID NO: 630559 - DNA, 33 bp, Homo sapien
ggatggagttgtggtcaatttttggccctcacc

SEQ ID NO: 630560 - DNA, 33 bp, Homo sapien
ggatggagttgtggtcgatttttggccctcacc

SEQ ID NO: 630561 - DNA, 33 bp, Homo sapien
gttgatttaagatggaacagtaggagaaaagca

SEQ ID NO: 630562 - DNA, 33 bp, Homo sapien
gttgatttaagatggatcagtaggagaaaagca

SEQ ID NO: 630563 - DNA, 33 bp, Homo sapien
gaaaaacaggacctagcaagttcctgagccctg

SEQ ID NO: 630564 - DNA, 33 bp, Homo sapien
gaaaaacaggacctaggaagttcctgagccctg

SEQ ID NO: 630565 - DNA, 33 bp, Homo sapien
aaggaaaactcagcacactagtagctggagacc

SEQ ID NO: 630566 - DNA, 33 bp, Homo sapien
aaggaaaactcagcactctagtagctggagacc

SEQ ID NO: 630567 - DNA, 33 bp, Homo sapien
gctataaaatatgtaaatgtttggcatagttcc

SEQ ID NO: 630568 - DNA, 33 bp, Homo sapien
gctataaaatatgtaagtgtttggcatagttcc

SEQ ID NO: 630569 - DNA, 33 bp, Homo sapien
acgtgctaccactctacgtaaggtacaaacaag

SEQ ID NO: 630570 - DNA, 33 bp, Homo sapien
acgtgctaccactctaggtaaggtacaaacaag

SEQ ID NO: 630571 - DNA, 33 bp, Homo sapien
gatccaggcaggttagaagctgtttgcgcttgt

SEQ ID NO: 630572 - DNA, 33 bp, Homo sapien
gatccaggcaggttaggagctgtttgcgcttgt

SEQ ID NO: 630573 - DNA, 33 bp, Homo sapien
gtggttaagagatcagcccaagcctcacaggag

SEQ ID NO: 630574 - DNA, 33 bp, Homo sapien
gtggttaagagatcagtccaagcctcacaggag

SEQ ID NO: 630575 - DNA, 33 bp, Homo sapien
ggtgtaagacagaagacgtttggaagaaaacat

SEQ ID NO: 630576 - DNA, 33 bp, Homo sapien
ggtgtaagacagaagatgtttggaagaaaacat

SEQ ID NO: 630577 - DNA, 33 bp, Homo sapien
aaacatttactatcccacagtttcagtgggtca

SEQ ID NO: 630578 - DNA, 33 bp, Homo sapien
aaacatttactatcccgcagtttcagtgggtca

SEQ ID NO: 630579 - DNA, 33 bp, Homo sapien
gctggggagagcatcaaataagcatgggcactg

SEQ ID NO: 630580 - DNA, 33 bp, Homo sapien
gctggggagagcatcagataagcatgggcactg

SEQ ID NO: 630581 - DNA, 33 bp, Homo sapien
gtgccatctctactcaacgcaatctctgcctcc

SEQ ID NO: 630582 - DNA, 33 bp, Homo sapien
gtgccatctctactcaccgcaatctctgcctcc

SEQ ID NO: 630583 - DNA, 33 bp, Homo sapien
ctgcgcatgaattgacagaggacaagacacaat

SEQ ID NO: 630584 - DNA, 33 bp, Homo sapien
ctgcgcatgaattgacggaggacaagacacaat

SEQ ID NO: 630585 - DNA, 33 bp, Homo sapien
gttgtgggggaaaggaaataaaaggaagctaag

SEQ ID NO: 630586 - DNA, 33 bp, Homo sapien
gttgtgggggaaaggagataaaaggaagctaag

SEQ ID NO: 630587 - DNA, 33 bp, Homo sapien
caacaaatgccctctcaagtctgtgacatcgtt

SEQ ID NO: 630588 - DNA, 33 bp, Homo sapien
caacaaatgccctctcgagtctgtgacatcgtt

SEQ ID NO: 630589 - DNA, 33 bp, Homo sapien
gagccaagacttacccgggactttctcactctc

SEQ ID NO: 630590 - DNA, 33 bp, Homo sapien
gagccaagacttaccctggactttctcactctc

SEQ ID NO: 630591 - DNA, 33 bp, Homo sapien
aggcaaagtgactctacaacgaagagctgcaga

SEQ ID NO: 630592 - DNA, 33 bp, Homo sapien
aggcaaagtgactctataacgaagagctgcaga

SEQ ID NO: 630593 - DNA, 33 bp, Homo sapien
gctctaaagtaaggaacagaagaaattagcatg

SEQ ID NO: 630594 - DNA, 33 bp, Homo sapien
gctctaaagtaaggaagagaagaaattagcatg

SEQ ID NO: 630595 - DNA, 33 bp, Homo sapien
ttcaactccctctccgaccaacaatgctgacca

SEQ ID NO: 630596 - DNA, 33 bp, Homo sapien
ttcaactccctctccggccaacaatgctgacca

SEQ ID NO: 630597 - DNA, 33 bp, Homo sapien
cctgtggtaactggcaagagaaaagtcaataat

SEQ ID NO: 630598 - DNA, 33 bp, Homo sapien
cctgtggtaactggcaggagaaaagtcaataat

SEQ ID NO: 630599 - DNA, 33 bp, Homo sapien
atccttaagtatttcactattggcagaatttat

SEQ ID NO: 630600 - DNA, 33 bp, Homo sapien
atccttaagtatttcagtattggcagaatttat

SEQ ID NO: 630601 - DNA, 33 bp, Homo sapien
agaagagatcctagagaccacctaatccaaact

SEQ ID NO: 630602 - DNA, 33 bp, Homo sapien
agaagagatcctagaggccacctaatccaaact

SEQ ID NO: 630603 - DNA, 33 bp, Homo sapien
caggtttattgaggaagaattggtatacaaata

SEQ ID NO: 630604 - DNA, 33 bp, Homo sapien
caggtttattgaggaataattggtatacaaata

SEQ ID NO: 630605 - DNA, 33 bp, Homo sapien
actcttcttgcttttacagggttctaagactag

SEQ ID NO: 630606 - DNA, 33 bp, Homo sapien
actcttcttgcttttagagggttctaagactag

SEQ ID NO: 630607 - DNA, 33 bp, Homo sapien
tttgtttaaccaaagaaatgcagatcaggaccc

SEQ ID NO: 630608 - DNA, 33 bp, Homo sapien
tttgtttaaccaaagagatgcagatcaggaccc

SEQ ID NO: 630609 - DNA, 33 bp, Homo sapien
tccagatcaaagcttcactaactaatgtccctc

SEQ ID NO: 630610 - DNA, 33 bp, Homo sapien
tccagatcaaagcttcgctaactaatgtccctc

SEQ ID NO: 630611 - DNA, 33 bp, Homo sapien
tcctgtacttggcttacgtttcctgtctggcat

SEQ ID NO: 630612 - DNA, 33 bp, Homo sapien
tcctgtacttggcttatgtttcctgtctggcat

SEQ ID NO: 630613 - DNA, 33 bp, Homo sapien
gtctttttgggagatgaacatgggaggaccatt

SEQ ID NO: 630614 - DNA, 33 bp, Homo sapien
gtctttttgggagatggacatgggaggaccatt

SEQ ID NO: 630615 - DNA, 33 bp, Homo sapien
ctccttcttaacagcaccaacgaggcctctcta

SEQ ID NO: 630616 - DNA, 33 bp, Homo sapien
ctccttcttaacagcatcaacgaggcctctcta

SEQ ID NO: 630617 - DNA, 33 bp, Homo sapien
aggtgatgagtagaaacgtggccaatatacaaa

SEQ ID NO: 630618 - DNA, 33 bp, Homo sapien
aggtgatgagtagaaatgtggccaatatacaaa

SEQ ID NO: 630619 - DNA, 33 bp, Homo sapien
tattatcctcttttctcaaatcaagcttaagac

SEQ ID NO: 630620 - DNA, 33 bp, Homo sapien
tattatcctcttttctgaaatcaagcttaagac

SEQ ID NO: 630621 - DNA, 33 bp, Homo sapien
caggaaatacacaaaaagtttgttaccagttat

SEQ ID NO: 630622 - DNA, 33 bp, Homo sapien
caggaaatacacaaaaggtttgttaccagttat

SEQ ID NO: 630623 - DNA, 33 bp, Homo sapien
gtttctcagacccacactgaaattcctcactga

SEQ ID NO: 630624 - DNA, 33 bp, Homo sapien
gtttctcagacccacattgaaattcctcactga

SEQ ID NO: 630625 - DNA, 33 bp, Homo sapien
ccctggtgactaaaaacgttgaggcctgtttca

SEQ ID NO: 630626 - DNA, 33 bp, Homo sapien
ccctggtgactaaaaatgttgaggcctgtttca

SEQ ID NO: 630627 - DNA, 33 bp, Homo sapien
gaggcttggatttgtgcaaaattttgtggctct

SEQ ID NO: 630628 - DNA, 33 bp, Homo sapien
gaggcttggatttgtgtaaaattttgtggctct

SEQ ID NO: 630629 - DNA, 33 bp, Homo sapien
gtgattcagaaaagcacgaggaacctgagcctt

SEQ ID NO: 630630 - DNA, 33 bp, Homo sapien
gtgattcagaaaagcaggaggaacctgagcctt

SEQ ID NO: 630631 - DNA, 33 bp, Homo sapien
aaattgttgacttctacgggcattccaattttc

SEQ ID NO: 630632 - DNA, 33 bp, Homo sapien
aaattgttgacttctatgggcattccaattttc

SEQ ID NO: 630633 - DNA, 33 bp, Homo sapien
gttttcattgttaccacgctgttcctgttaact

SEQ ID NO: 630634 - DNA, 33 bp, Homo sapien
gttttcattgttaccatgctgttcctgttaact

SEQ ID NO: 630635 - DNA, 33 bp, Homo sapien
gtggacagctataaccacagtctatattccatg

SEQ ID NO: 630636 - DNA, 33 bp, Homo sapien
gtggacagctataaccgcagtctatattccatg

SEQ ID NO: 630637 - DNA, 33 bp, Homo sapien
aggaaaagaaaatgtcacttctctccagaaagg

SEQ ID NO: 630638 - DNA, 33 bp, Homo sapien
aggaaaagaaaatgtcgcttctctccagaaagg

SEQ ID NO: 630639 - DNA, 33 bp, Homo sapien
ggttatcaaactgatggagtccccggagtcttc

SEQ ID NO: 630640 - DNA, 33 bp, Homo sapien
ggttatcaaactgatgtagtccccggagtcttc

SEQ ID NO: 630641 - DNA, 33 bp, Homo sapien
tgggatgttgaaattaactagattcttgtagaa

SEQ ID NO: 630642 - DNA, 33 bp, Homo sapien
tgggatgttgaaattagctagattcttgtagaa

SEQ ID NO: 630643 - DNA, 33 bp, Homo sapien
tatttggctcctgtaactgctgaggtctgattt

SEQ ID NO: 630644 - DNA, 33 bp, Homo sapien
tatttggctcctgtaagtgctgaggtctgattt

SEQ ID NO: 630645 - DNA, 33 bp, Homo sapien
cttgatggcttttctaagattcacccaggtatt

SEQ ID NO: 630646 - DNA, 33 bp, Homo sapien
cttgatggcttttctaggattcacccaggtatt

SEQ ID NO: 630647 - DNA, 33 bp, Homo sapien
gaagccacaatttagagaaacccaagaccaact

SEQ ID NO: 630648 - DNA, 33 bp, Homo sapien
gaagccacaatttagataaacccaagaccaact

SEQ ID NO: 630649 - DNA, 33 bp, Homo sapien
tgcagaacaccatccacagaaattagacaagat

SEQ ID NO: 630650 - DNA, 33 bp, Homo sapien
tgcagaacaccatccatagaaattagacaagat

SEQ ID NO: 630651 - DNA, 33 bp, Homo sapien
acaggggcgatgaaaaacatctgagataaaggc

SEQ ID NO: 630652 - DNA, 33 bp, Homo sapien
acaggggcgatgaaaagcatctgagataaaggc

SEQ ID NO: 630653 - DNA, 33 bp, Homo sapien
aatcttattggagttaccttatgcacatgagtt

SEQ ID NO: 630654 - DNA, 33 bp, Homo sapien
aatcttattggagttatcttatgcacatgagtt

SEQ ID NO: 630655 - DNA, 33 bp, Homo sapien
aaacaactagatctaacagacatctatggaaca

SEQ ID NO: 630656 - DNA, 33 bp, Homo sapien
aaacaactagatctaatagacatctatggaaca

SEQ ID NO: 630657 - DNA, 33 bp, Homo sapien
acaatgatgatcaagaactgatacccctcttca

SEQ ID NO: 630658 - DNA, 33 bp, Homo sapien
acaatgatgatcaagacctgatacccctcttca

SEQ ID NO: 630659 - DNA, 33 bp, Homo sapien
tccctggcattgaaacagaggcagatttaatac

SEQ ID NO: 630660 - DNA, 33 bp, Homo sapien
tccctggcattgaaacggaggcagatttaatac

SEQ ID NO: 630661 - DNA, 33 bp, Homo sapien
ttgcccccttccctacaatgctcataccgtatt

SEQ ID NO: 630662 - DNA, 33 bp, Homo sapien
ttgcccccttccctacgatgctcataccgtatt

SEQ ID NO: 630663 - DNA, 33 bp, Homo sapien
cagacctggaggcaacaatgagctctaggctac

SEQ ID NO: 630664 - DNA, 33 bp, Homo sapien
cagacctggaggcaacgatgagctctaggctac

SEQ ID NO: 630665 - DNA, 33 bp, Homo sapien
ccagcaccttttttagacattgaaagctgggct

SEQ ID NO: 630666 - DNA, 33 bp, Homo sapien
ccagcaccttttttaggcattgaaagctgggct

SEQ ID NO: 630667 - DNA, 33 bp, Homo sapien
gtggaaacactttcaacaactgaagcagcaggc

SEQ ID NO: 630668 - DNA, 33 bp, Homo sapien
gtggaaacactttcaagaactgaagcagcaggc

SEQ ID NO: 630669 - DNA, 33 bp, Homo sapien
agagacagtaaaatgaacatccctgcagcatca

SEQ ID NO: 630670 - DNA, 33 bp, Homo sapien
agagacagtaaaatgagcatccctgcagcatca

SEQ ID NO: 630671 - DNA, 33 bp, Homo sapien
ccatgtactttagagcaagacaattaaacccag

SEQ ID NO: 630672 - DNA, 33 bp, Homo sapien
ccatgtactttagagccagacaattaaacccag

SEQ ID NO: 630673 - DNA, 33 bp, Homo sapien
ttgatgagttttgctacgcttttgactcaaatg

SEQ ID NO: 630674 - DNA, 33 bp, Homo sapien
ttgatgagttttgctatgcttttgactcaaatg

SEQ ID NO: 630675 - DNA, 33 bp, Homo sapien
tcctgcaataataatgacatccaacatttccaa

SEQ ID NO: 630676 - DNA, 33 bp, Homo sapien
tcctgcaataataatggcatccaacatttccaa

SEQ ID NO: 630677 - DNA, 33 bp, Homo sapien
tttcagcaaacaagacagagtccagagatcttt

SEQ ID NO: 630678 - DNA, 33 bp, Homo sapien
tttcagcaaacaagacggagtccagagatcttt

SEQ ID NO: 630679 - DNA, 33 bp, Homo sapien
catgcatgtggagaggaagagaaagccatctgg

SEQ ID NO: 630680 - DNA, 33 bp, Homo sapien
catgcatgtggagagggagagaaagccatctgg

SEQ ID NO: 630681 - DNA, 33 bp, Homo sapien
aatacatattcacggggacaaatattcttagta

SEQ ID NO: 630682 - DNA, 33 bp, Homo sapien
aatacatattcacgggtacaaatattcttagta

SEQ ID NO: 630683 - DNA, 33 bp, Homo sapien
gtaagggatccaagcgacagaaagaggaaggaa

SEQ ID NO: 630684 - DNA, 33 bp, Homo sapien
gtaagggatccaagcggcagaaagaggaaggaa

SEQ ID NO: 630685 - DNA, 33 bp, Homo sapien
gtttggtgtgtagatccagcaaaggtacaggtg

SEQ ID NO: 630686 - DNA, 33 bp, Homo sapien
gtttggtgtgtagatctagcaaaggtacaggtg

SEQ ID NO: 630687 - DNA, 33 bp, Homo sapien
tccaagcatcctgttaagtggttcaaaagtgct

SEQ ID NO: 630688 - DNA, 33 bp, Homo sapien
tccaagcatcctgttaggtggttcaaaagtgct

SEQ ID NO: 630689 - DNA, 33 bp, Homo sapien
acaggacttctgctagaaatactagatcccaga

SEQ ID NO: 630690 - DNA, 33 bp, Homo sapien
acaggacttctgctaggaatactagatcccaga

SEQ ID NO: 630691 - DNA, 33 bp, Homo sapien
tgtaaaaacttcagtaacttaatacaaagaata

SEQ ID NO: 630692 - DNA, 33 bp, Homo sapien
tgtaaaaacttcagtaccttaatacaaagaata

SEQ ID NO: 630693 - DNA, 33 bp, Homo sapien
cctaattcattgtaagcagtaaggcatgaattg

SEQ ID NO: 630694 - DNA, 33 bp, Homo sapien
cctaattcattgtaaggagtaaggcatgaattg

SEQ ID NO: 630695 - DNA, 33 bp, Homo sapien
ttttgtcactgagatacgtgagttctaaagttt

SEQ ID NO: 630696 - DNA, 33 bp, Homo sapien
ttttgtcactgagatatgtgagttctaaagttt

SEQ ID NO: 630697 - DNA, 33 bp, Homo sapien
ctgagtagagtttggcaatggaagggaaggaag

SEQ ID NO: 630698 - DNA, 33 bp, Homo sapien
ctgagtagagtttggcgatggaagggaaggaag

SEQ ID NO: 630699 - DNA, 33 bp, Homo sapien
gtcagcccttctgccgcacaaaaagcaagggat

SEQ ID NO: 630700 - DNA, 33 bp, Homo sapien
gtcagcccttctgccgtacaaaaagcaagggat

SEQ ID NO: 630701 - DNA, 33 bp, Homo sapien
cttccaaactgctaggcagattcacccatttcc

SEQ ID NO: 630702 - DNA, 33 bp, Homo sapien
cttccaaactgctaggtagattcacccatttcc

SEQ ID NO: 630703 - DNA, 33 bp, Homo sapien
agttctgacaaagaaaccaagtggtaattaagt

SEQ ID NO: 630704 - DNA, 33 bp, Homo sapien
agttctgacaaagaaatcaagtggtaattaagt

SEQ ID NO: 630705 - DNA, 33 bp, Homo sapien
gccacgatcagttcaccgtaatctcgaactcct

SEQ ID NO: 630706 - DNA, 33 bp, Homo sapien
gccacgatcagttcactgtaatctcgaactcct

SEQ ID NO: 630707 - DNA, 33 bp, Homo sapien
aaactgtcagataatacgctgatgttgttttaa

SEQ ID NO: 630708 - DNA, 33 bp, Homo sapien
aaactgtcagataatatgctgatgttgttttaa

SEQ ID NO: 630709 - DNA, 33 bp, Homo sapien
aaaatgcttcaacaagcaattatgaacacacct

SEQ ID NO: 630710 - DNA, 33 bp, Homo sapien
aaaatgcttcaacaagtaattatgaacacacct

SEQ ID NO: 630711 - DNA, 33 bp, Homo sapien
tttatgggaagggatgaactcatgttgtatcaa

SEQ ID NO: 630712 - DNA, 33 bp, Homo sapien
tttatgggaagggatggactcatgttgtatcaa

SEQ ID NO: 630713 - DNA, 33 bp, Homo sapien
ttctctgtaattttcacatcaggcactgtcttt

SEQ ID NO: 630714 - DNA, 33 bp, Homo sapien
ttctctgtaattttcatatcaggcactgtcttt

SEQ ID NO: 630715 - DNA, 33 bp, Homo sapien
ccccaccaatgcctagacacatctgtatgtagt

SEQ ID NO: 630716 - DNA, 33 bp, Homo sapien
ccccaccaatgcctagtcacatctgtatgtagt

SEQ ID NO: 630717 - DNA, 33 bp, Homo sapien
aagaagtcagggctaacggaaatgagatgatga

SEQ ID NO: 630718 - DNA, 33 bp, Homo sapien
aagaagtcagggctaagggaaatgagatgatga

SEQ ID NO: 630719 - DNA, 33 bp, Homo sapien
tctgccccatatcactcagctaattggaaccag

SEQ ID NO: 630720 - DNA, 33 bp, Homo sapien
tctgccccatatcacttagctaattggaaccag

SEQ ID NO: 630721 - DNA, 33 bp, Homo sapien
ctgagttagaagaggaagcaggtacaggggtca

SEQ ID NO: 630722 - DNA, 33 bp, Homo sapien
ctgagttagaagaggaggcaggtacaggggtca

SEQ ID NO: 630723 - DNA, 33 bp, Homo sapien
tatactaggtatattgcactttgctcgttgcta

SEQ ID NO: 630724 - DNA, 33 bp, Homo sapien
tatactaggtatattgtactttgctcgttgcta

SEQ ID NO: 630725 - DNA, 33 bp, Homo sapien
tcagatcagtgtttcaagaagttgtttgaagaa

SEQ ID NO: 630726 - DNA, 33 bp, Homo sapien
tcagatcagtgtttcatgaagttgtttgaagaa

SEQ ID NO: 630727 - DNA, 33 bp, Homo sapien
gaggcattctttatacggccaaatacattctgt

SEQ ID NO: 630728 - DNA, 33 bp, Homo sapien
gaggcattctttatactgccaaatacattctgt

SEQ ID NO: 630729 - DNA, 33 bp, Homo sapien
attgtgtgaaaactgaaagatataaagctaagg

SEQ ID NO: 630730 - DNA, 33 bp, Homo sapien
attgtgtgaaaactgagagatataaagctaagg

SEQ ID NO: 630731 - DNA, 33 bp, Homo sapien
ccttgccagtgaaagacgcgatgttgggcaggg

SEQ ID NO: 630732 - DNA, 33 bp, Homo sapien
ccttgccagtgaaagatgcgatgttgggcaggg

SEQ ID NO: 630733 - DNA, 33 bp, Homo sapien
agtagttgctaagagaacaagtgtgctcagggc

SEQ ID NO: 630734 - DNA, 33 bp, Homo sapien
agtagttgctaagagagcaagtgtgctcagggc

SEQ ID NO: 630735 - DNA, 33 bp, Homo sapien
ctaattatttcccaaaatagtgtctgtgttctg

SEQ ID NO: 630736 - DNA, 33 bp, Homo sapien
ctaattatttcccaaagtagtgtctgtgttctg

SEQ ID NO: 630737 - DNA, 33 bp, Homo sapien
tcatcccttctccccaaattctccaataacacc

SEQ ID NO: 630738 - DNA, 33 bp, Homo sapien
tcatcccttctccccagattctccaataacacc

SEQ ID NO: 630739 - DNA, 33 bp, Homo sapien
ccctttaatctgcacaagcatttccccccaaga

SEQ ID NO: 630740 - DNA, 33 bp, Homo sapien
ccctttaatctgcacaggcatttccccccaaga

SEQ ID NO: 630741 - DNA, 33 bp, Homo sapien
attctacctatgtaaacttcaaacacaggaaaa

SEQ ID NO: 630742 - DNA, 33 bp, Homo sapien
attctacctatgtaaagttcaaacacaggaaaa

SEQ ID NO: 630743 - DNA, 33 bp, Homo sapien
aagtttatattcttcaaaggaaatgttctccag

SEQ ID NO: 630744 - DNA, 33 bp, Homo sapien
aagtttatattcttcagaggaaatgttctccag

SEQ ID NO: 630745 - DNA, 33 bp, Homo sapien
aaagaccacaggcaaaagttcccaaagagtgct

SEQ ID NO: 630746 - DNA, 33 bp, Homo sapien
aaagaccacaggcaaaggttcccaaagagtgct

SEQ ID NO: 630747 - DNA, 33 bp, Homo sapien
aaaccaaatgtccaaaatgggacctattcttaa

SEQ ID NO: 630748 - DNA, 33 bp, Homo sapien
aaaccaaatgtccaaagtgggacctattcttaa

SEQ ID NO: 630749 - DNA, 33 bp, Homo sapien
tattccagaggattcaagttacttggattaatc

SEQ ID NO: 630750 - DNA, 33 bp, Homo sapien
tattccagaggattcatgttacttggattaatc

SEQ ID NO: 630751 - DNA, 33 bp, Homo sapien
agggaattaggatagaaaacaaatatgcaaata

SEQ ID NO: 630752 - DNA, 33 bp, Homo sapien
agggaattaggatagacaacaaatatgcaaata

SEQ ID NO: 630753 - DNA, 33 bp, Homo sapien
ggattctatgatcagcaaataaggatgttttct

SEQ ID NO: 630754 - DNA, 33 bp, Homo sapien
ggattctatgatcagcgaataaggatgttttct

SEQ ID NO: 630755 - DNA, 33 bp, Homo sapien
gtttagaaaggcaattaaaaaaatcctttattc

SEQ ID NO: 630756 - DNA, 33 bp, Homo sapien
gtttagaaaggcaatttaaaaaatcctttattc

SEQ ID NO: 630757 - DNA, 33 bp, Homo sapien
tgccaccaagttctgcaaaactgaaaaaatgaa

SEQ ID NO: 630758 - DNA, 33 bp, Homo sapien
tgccaccaagttctgcgaaactgaaaaaatgaa

SEQ ID NO: 630759 - DNA, 33 bp, Homo sapien
gtgtgtagatttcggaacaatgggattgaggat

SEQ ID NO: 630760 - DNA, 33 bp, Homo sapien
gtgtgtagatttcggagcaatgggattgaggat

SEQ ID NO: 630761 - DNA, 33 bp, Homo sapien
tggctctgccttaggcacttctcgggaatttga

SEQ ID NO: 630762 - DNA, 33 bp, Homo sapien
tggctctgccttaggcgcttctcgggaatttga

SEQ ID NO: 630763 - DNA, 33 bp, Homo sapien
taataagtaggagaaccgggatccaagcccaca

SEQ ID NO: 630764 - DNA, 33 bp, Homo sapien
taataagtaggagaactgggatccaagcccaca

SEQ ID NO: 630765 - DNA, 33 bp, Homo sapien
tactccctttgtgccacagattgagcttgacag

SEQ ID NO: 630766 - DNA, 33 bp, Homo sapien
tactccctttgtgccatagattgagcttgacag

SEQ ID NO: 630767 - DNA, 33 bp, Homo sapien
ctatcttaggagtctaactcaaggtattaagta

SEQ ID NO: 630768 - DNA, 33 bp, Homo sapien
ctatcttaggagtctacctcaaggtattaagta

SEQ ID NO: 630769 - DNA, 33 bp, Homo sapien
ccaggggccttgctgacgaagtggtttagggat

SEQ ID NO: 630770 - DNA, 33 bp, Homo sapien
ccaggggccttgctgatgaagtggtttagggat

SEQ ID NO: 630771 - DNA, 33 bp, Homo sapien
agaatgcagctcttgaacagatgggcccctctc

SEQ ID NO: 630772 - DNA, 33 bp, Homo sapien
agaatgcagctcttgatcagatgggcccctctc

SEQ ID NO: 630773 - DNA, 33 bp, Homo sapien
ttcttttcttccttaaaggagttccatagttcc

SEQ ID NO: 630774 - DNA, 33 bp, Homo sapien
ttcttttcttccttaagggagttccatagttcc

SEQ ID NO: 630775 - DNA, 33 bp, Homo sapien
ggccagactgggaatcaaaggtgctggcacaga

SEQ ID NO: 630776 - DNA, 33 bp, Homo sapien
ggccagactgggaatcgaaggtgctggcacaga

SEQ ID NO: 630777 - DNA, 33 bp, Homo sapien
gtttgagcatctgggagagttgagtgagagttg

SEQ ID NO: 630778 - DNA, 33 bp, Homo sapien
gtttgagcatctgggatagttgagtgagagttg

SEQ ID NO: 630779 - DNA, 33 bp, Homo sapien
cacctcacctgtgctacaactgccttctgaaca

SEQ ID NO: 630780 - DNA, 33 bp, Homo sapien
cacctcacctgtgctataactgccttctgaaca

SEQ ID NO: 630781 - DNA, 33 bp, Homo sapien
tctcttatcaggagaaatgtatagaaatcagtc

SEQ ID NO: 630782 - DNA, 33 bp, Homo sapien
tctcttatcaggagaattgtatagaaatcagtc

SEQ ID NO: 630783 - DNA, 33 bp, Homo sapien
ttctttatgttgctaacagggcggcccatgagc

SEQ ID NO: 630784 - DNA, 33 bp, Homo sapien
ttctttatgttgctaatagggcggcccatgagc

SEQ ID NO: 630785 - DNA, 33 bp, Homo sapien
ggcccagcttgagccacgcgattactcccagct

SEQ ID NO: 630786 - DNA, 33 bp, Homo sapien
ggcccagcttgagccaggcgattactcccagct

SEQ ID NO: 630787 - DNA, 33 bp, Homo sapien
gatcttcagttgggcagtcgtcattgacagctc

SEQ ID NO: 630788 - DNA, 33 bp, Homo sapien
gatcttcagttgggcattcgtcattgacagctc

SEQ ID NO: 630789 - DNA, 33 bp, Homo sapien
tggactttttaaccaacctcctattcacagaca

SEQ ID NO: 630790 - DNA, 33 bp, Homo sapien
tggactttttaaccaatctcctattcacagaca

SEQ ID NO: 630791 - DNA, 33 bp, Homo sapien
cagatcttttagtgccaccatttgcccagtggg

SEQ ID NO: 630792 - DNA, 33 bp, Homo sapien
cagatcttttagtgccgccatttgcccagtggg

SEQ ID NO: 630793 - DNA, 33 bp, Homo sapien
aagtatggttaatggactccatatcaccaggga

SEQ ID NO: 630794 - DNA, 33 bp, Homo sapien
aagtatggttaatggattccatatcaccaggga

SEQ ID NO: 630795 - DNA, 33 bp, Homo sapien
gacacagcgacagtcacacaacaagaaagatga

SEQ ID NO: 630796 - DNA, 33 bp, Homo sapien
gacacagcgacagtcagacaacaagaaagatga

SEQ ID NO: 630797 - DNA, 33 bp, Homo sapien
aggggaacagggaagccgctgttattgtcagaa

SEQ ID NO: 630798 - DNA, 33 bp, Homo sapien
aggggaacagggaagctgctgttattgtcagaa

SEQ ID NO: 630799 - DNA, 33 bp, Homo sapien
aaaggcatctcctaccaacatgagagcgctcat

SEQ ID NO: 630800 - DNA, 33 bp, Homo sapien
aaaggcatctcctacccacatgagagcgctcat

SEQ ID NO: 630801 - DNA, 33 bp, Homo sapien
gtagctcgtgcctgaacaaagcttctctcatac

SEQ ID NO: 630802 - DNA, 33 bp, Homo sapien
gtagctcgtgcctgaagaaagcttctctcatac

SEQ ID NO: 630803 - DNA, 33 bp, Homo sapien
acaaaatggattaagacatggcgatactaaaat

SEQ ID NO: 630804 - DNA, 33 bp, Homo sapien
acaaaatggattaagatatggcgatactaaaat

SEQ ID NO: 630805 - DNA, 33 bp, Homo sapien
ggcatttattaaacatcacaagtgccaacacgg

SEQ ID NO: 630806 - DNA, 33 bp, Homo sapien
ggcatttattaaacattacaagtgccaacacgg

SEQ ID NO: 630807 - DNA, 33 bp, Homo sapien
tttagatccatttagccacaaggatgaaatctt

SEQ ID NO: 630808 - DNA, 33 bp, Homo sapien
tttagatccatttagctacaaggatgaaatctt

SEQ ID NO: 630809 - DNA, 33 bp, Homo sapien
ccccataagaagccaaataggtaggaaaagatt

SEQ ID NO: 630810 - DNA, 33 bp, Homo sapien
ccccataagaagccaagtaggtaggaaaagatt

SEQ ID NO: 630811 - DNA, 33 bp, Homo sapien
cctagcacagatacaaaacaaggaagccacctg

SEQ ID NO: 630812 - DNA, 33 bp, Homo sapien
cctagcacagatacaacacaaggaagccacctg

SEQ ID NO: 630813 - DNA, 33 bp, Homo sapien
tccagggtgacgagaccgcttaaaggagcctta

SEQ ID NO: 630814 - DNA, 33 bp, Homo sapien
tccagggtgacgagactgcttaaaggagcctta

SEQ ID NO: 630815 - DNA, 33 bp, Homo sapien
aagcccaggaattctgaacattagcataacagt

SEQ ID NO: 630816 - DNA, 33 bp, Homo sapien
aagcccaggaattctggacattagcataacagt

SEQ ID NO: 630817 - DNA, 33 bp, Homo sapien
cttacaccgagcaatacaaacagtaggttacac

SEQ ID NO: 630818 - DNA, 33 bp, Homo sapien
cttacaccgagcaatataaacagtaggttacac

SEQ ID NO: 630819 - DNA, 33 bp, Homo sapien
acaaaatagctggcaagaaccctccagtccttc

SEQ ID NO: 630820 - DNA, 33 bp, Homo sapien
acaaaatagctggcaataaccctccagtccttc

SEQ ID NO: 630821 - DNA, 33 bp, Homo sapien
caaaggccgagaaagacatgagaacgtttagag

SEQ ID NO: 630822 - DNA, 33 bp, Homo sapien
caaaggccgagaaagagatgagaacgtttagag

SEQ ID NO: 630823 - DNA, 33 bp, Homo sapien
atgtttagggctttcacatatatttttaaatgc

SEQ ID NO: 630824 - DNA, 33 bp, Homo sapien
atgtttagggctttcagatatatttttaaatgc

SEQ ID NO: 630825 - DNA, 33 bp, Homo sapien
ttagagtattgccaaagcttcccctccaagtat

SEQ ID NO: 630826 - DNA, 33 bp, Homo sapien
ttagagtattgccaaatcttcccctccaagtat

SEQ ID NO: 630827 - DNA, 33 bp, Homo sapien
gcgcaaggcagatagcaacaagactgtcaaaga

SEQ ID NO: 630828 - DNA, 33 bp, Homo sapien
gcgcaaggcagatagcgacaagactgtcaaaga

SEQ ID NO: 630829 - DNA, 33 bp, Homo sapien
ttccttcaaagtacaaagctgtgtggtttgcca

SEQ ID NO: 630830 - DNA, 33 bp, Homo sapien
ttccttcaaagtacaaggctgtgtggtttgcca

SEQ ID NO: 630831 - DNA, 33 bp, Homo sapien
tcactctaatgcttacaacaattctgcaaggtc

SEQ ID NO: 630832 - DNA, 33 bp, Homo sapien
tcactctaatgcttacgacaattctgcaaggtc

SEQ ID NO: 630833 - DNA, 33 bp, Homo sapien
accatctagagcacacactatcatgtttccgat

SEQ ID NO: 630834 - DNA, 33 bp, Homo sapien
accatctagagcacacgctatcatgtttccgat

SEQ ID NO: 630835 - DNA, 33 bp, Homo sapien
acagcctatctgggtaccgaagcctgcctgccc

SEQ ID NO: 630836 - DNA, 33 bp, Homo sapien
acagcctatctgggtatcgaagcctgcctgccc

SEQ ID NO: 630837 - DNA, 33 bp, Homo sapien
attattcacagacaagaaaagtgtggatgctaa

SEQ ID NO: 630838 - DNA, 33 bp, Homo sapien
attattcacagacaaggaaagtgtggatgctaa

SEQ ID NO: 630839 - DNA, 33 bp, Homo sapien
atgattgtttttcagcggccagaacactaaatt

SEQ ID NO: 630840 - DNA, 33 bp, Homo sapien
atgattgtttttcagctgccagaacactaaatt

SEQ ID NO: 630841 - DNA, 33 bp, Homo sapien
ggaataaaaatggaaactctaactcataaaccc

SEQ ID NO: 630842 - DNA, 33 bp, Homo sapien
ggaataaaaatggaaattctaactcataaaccc

SEQ ID NO: 630843 - DNA, 33 bp, Homo sapien
tgacctataggatcaaacttgcatttcttagcc

SEQ ID NO: 630844 - DNA, 33 bp, Homo sapien
tgacctataggatcaagcttgcatttcttagcc

SEQ ID NO: 630845 - DNA, 33 bp, Homo sapien
tcctcagtacctaacacagagccttgtgcagag

SEQ ID NO: 630846 - DNA, 33 bp, Homo sapien
tcctcagtacctaacatagagccttgtgcagag

SEQ ID NO: 630847 - DNA, 33 bp, Homo sapien
cactgggaagacaatacacatgaaatgactttt

SEQ ID NO: 630848 - DNA, 33 bp, Homo sapien
cactgggaagacaatatacatgaaatgactttt

SEQ ID NO: 630849 - DNA, 33 bp, Homo sapien
ctaaaaggttcagtggaaagttagaggtgcaaa

SEQ ID NO: 630850 - DNA, 33 bp, Homo sapien
ctaaaaggttcagtggcaagttagaggtgcaaa

SEQ ID NO: 630851 - DNA, 33 bp, Homo sapien
gcagcctgatgcagtaactaaaggattccctgc

SEQ ID NO: 630852 - DNA, 33 bp, Homo sapien
gcagcctgatgcagtatctaaaggattccctgc

SEQ ID NO: 630853 - DNA, 33 bp, Homo sapien
tctgtgttcccacctacatcctattccctgaat

SEQ ID NO: 630854 - DNA, 33 bp, Homo sapien
tctgtgttcccacctatatcctattccctgaat

SEQ ID NO: 630855 - DNA, 33 bp, Homo sapien
accacagctacataaaccagagcccagcctaat

SEQ ID NO: 630856 - DNA, 33 bp, Homo sapien
accacagctacataaatcagagcccagcctaat

SEQ ID NO: 630857 - DNA, 33 bp, Homo sapien
tcaccattcaagggacagtaggtatgcagccag

SEQ ID NO: 630858 - DNA, 33 bp, Homo sapien
tcaccattcaagggactgtaggtatgcagccag

SEQ ID NO: 630859 - DNA, 33 bp, Homo sapien
atcctgtttaaatatgaatacaggcagtcttta

SEQ ID NO: 630860 - DNA, 33 bp, Homo sapien
atcctgtttaaatatggatacaggcagtcttta

SEQ ID NO: 630861 - DNA, 33 bp, Homo sapien
gtaaattacatccataaggctttcccatttggg

SEQ ID NO: 630862 - DNA, 33 bp, Homo sapien
gtaaattacatccatagggctttcccatttggg

SEQ ID NO: 630863 - DNA, 33 bp, Homo sapien
ttcaagtgtgtgttcccgaatttgtaccagtca

SEQ ID NO: 630864 - DNA, 33 bp, Homo sapien
ttcaagtgtgtgttcctgaatttgtaccagtca

SEQ ID NO: 630865 - DNA, 33 bp, Homo sapien
aactttctgcacagccagaggtaatgtacacga

SEQ ID NO: 630866 - DNA, 33 bp, Homo sapien
aactttctgcacagccggaggtaatgtacacga

SEQ ID NO: 630867 - DNA, 33 bp, Homo sapien
gtgccctgaagaaaacagtgatgacatctatca

SEQ ID NO: 630868 - DNA, 33 bp, Homo sapien
gtgccctgaagaaaacggtgatgacatctatca

SEQ ID NO: 630869 - DNA, 33 bp, Homo sapien
cttgagctcccaattcactttcctttgaagccc

SEQ ID NO: 630870 - DNA, 33 bp, Homo sapien
cttgagctcccaattcgctttcctttgaagccc

SEQ ID NO: 630871 - DNA, 33 bp, Homo sapien
tggtctccatgaacctcagaatagttacttcta

SEQ ID NO: 630872 - DNA, 33 bp, Homo sapien
tggtctccatgaacctgagaatagttacttcta

SEQ ID NO: 630873 - DNA, 33 bp, Homo sapien
tgtgaacctaccatccaacttcaaaacagtacc

SEQ ID NO: 630874 - DNA, 33 bp, Homo sapien
tgtgaacctaccatccgacttcaaaacagtacc

SEQ ID NO: 630875 - DNA, 33 bp, Homo sapien
gaaaaaactaatacaacctaccgacaactttaa

SEQ ID NO: 630876 - DNA, 33 bp, Homo sapien
gaaaaaactaatacaatctaccgacaactttaa

SEQ ID NO: 630877 - DNA, 33 bp, Homo sapien
tatgaagaaactggaactctggtgtattgttgg

SEQ ID NO: 630878 - DNA, 33 bp, Homo sapien
tatgaagaaactggaattctggtgtattgttgg

SEQ ID NO: 630879 - DNA, 33 bp, Homo sapien
cctttttctgataccactctctcctttgaaata

SEQ ID NO: 630880 - DNA, 33 bp, Homo sapien
cctttttctgataccattctctcctttgaaata

SEQ ID NO: 630881 - DNA, 33 bp, Homo sapien
cactagacattctatcacaagtattttgttgtt

SEQ ID NO: 630882 - DNA, 33 bp, Homo sapien
cactagacattctatcgcaagtattttgttgtt

SEQ ID NO: 630883 - DNA, 33 bp, Homo sapien
tgctttttttctgtgacgttttgccatgaacac

SEQ ID NO: 630884 - DNA, 33 bp, Homo sapien
tgctttttttctgtgaggttttgccatgaacac

SEQ ID NO: 630885 - DNA, 33 bp, Homo sapien
agaatctgatgagtgccacctaatctacctccc

SEQ ID NO: 630886 - DNA, 33 bp, Homo sapien
agaatctgatgagtgctacctaatctacctccc

SEQ ID NO: 630887 - DNA, 33 bp, Homo sapien
tgacctaccatttttgaaaatcttctcaaattc

SEQ ID NO: 630888 - DNA, 33 bp, Homo sapien
tgacctaccatttttgtaaatcttctcaaattc

SEQ ID NO: 630889 - DNA, 33 bp, Homo sapien
tggaaaaattaacttacgccaccttataggtag

SEQ ID NO: 630890 - DNA, 33 bp, Homo sapien
tggaaaaattaacttatgccaccttataggtag

SEQ ID NO: 630891 - DNA, 33 bp, Homo sapien
ataaaactctaagcaaatgtatctacagttttt

SEQ ID NO: 630892 - DNA, 33 bp, Homo sapien
ataaaactctaagcaagtgtatctacagttttt

SEQ ID NO: 630893 - DNA, 33 bp, Homo sapien
tcaaatgtatgataaccggacaatcaggtgaag

SEQ ID NO: 630894 - DNA, 33 bp, Homo sapien
tcaaatgtatgataactggacaatcaggtgaag

SEQ ID NO: 630895 - DNA, 33 bp, Homo sapien
gacgaagagaagatcacgagaaagagaaaaagc

SEQ ID NO: 630896 - DNA, 33 bp, Homo sapien
gacgaagagaagatcatgagaaagagaaaaagc

SEQ ID NO: 630897 - DNA, 33 bp, Homo sapien
gtctttgctgatttccgcaagtcctgagatgcg

SEQ ID NO: 630898 - DNA, 33 bp, Homo sapien
gtctttgctgatttcctcaagtcctgagatgcg

SEQ ID NO: 630899 - DNA, 33 bp, Homo sapien
gtgtcacttatgaacaaaggagcctcaatggtg

SEQ ID NO: 630900 - DNA, 33 bp, Homo sapien
gtgtcacttatgaacagaggagcctcaatggtg

SEQ ID NO: 630901 - DNA, 33 bp, Homo sapien
tggccagctttgaacacgatatgggtcaaagca

SEQ ID NO: 630902 - DNA, 33 bp, Homo sapien
tggccagctttgaacaggatatgggtcaaagca

SEQ ID NO: 630903 - DNA, 33 bp, Homo sapien
acccaagcattcctcacgcccccacagagtcaa

SEQ ID NO: 630904 - DNA, 33 bp, Homo sapien
acccaagcattcctcatgcccccacagagtcaa

SEQ ID NO: 630905 - DNA, 33 bp, Homo sapien
tgtgtacattgaaagcactcactagtcctaggt

SEQ ID NO: 630906 - DNA, 33 bp, Homo sapien
tgtgtacattgaaagcgctcactagtcctaggt

SEQ ID NO: 630907 - DNA, 33 bp, Homo sapien
ggcacaggtgagaaaaattaaagccgtctttac

SEQ ID NO: 630908 - DNA, 33 bp, Homo sapien
ggcacaggtgagaaaatttaaagccgtctttac

SEQ ID NO: 630909 - DNA, 33 bp, Homo sapien
gtttcttccgtgcacaggtttatgtaaaatagt

SEQ ID NO: 630910 - DNA, 33 bp, Homo sapien
gtttcttccgtgcacatgtttatgtaaaatagt

SEQ ID NO: 630911 - DNA, 33 bp, Homo sapien
atatgggacatctgccactgggagtacgtaagg

SEQ ID NO: 630912 - DNA, 33 bp, Homo sapien
atatgggacatctgccgctgggagtacgtaagg

SEQ ID NO: 630913 - DNA, 33 bp, Homo sapien
agaagcatctttaaaaacttctagatctgctta

SEQ ID NO: 630914 - DNA, 33 bp, Homo sapien
agaagcatctttaaaaccttctagatctgctta

SEQ ID NO: 630915 - DNA, 33 bp, Homo sapien
tatattgcagttagaactctctgaccgtattgt

SEQ ID NO: 630916 - DNA, 33 bp, Homo sapien
tatattgcagttagaattctctgaccgtattgt

SEQ ID NO: 630917 - DNA, 33 bp, Homo sapien
caatgacagatacatacagtggtggaggcctaa

SEQ ID NO: 630918 - DNA, 33 bp, Homo sapien
caatgacagatacatatagtggtggaggcctaa

SEQ ID NO: 630919 - DNA, 33 bp, Homo sapien
taagctatgcagtttacggtaatttgttacagt

SEQ ID NO: 630920 - DNA, 33 bp, Homo sapien
taagctatgcagtttatggtaatttgttacagt

SEQ ID NO: 630921 - DNA, 33 bp, Homo sapien
tttcatggcttaagcaatacttggccaggaaac

SEQ ID NO: 630922 - DNA, 33 bp, Homo sapien
tttcatggcttaagcagtacttggccaggaaac

SEQ ID NO: 630923 - DNA, 33 bp, Homo sapien
gaatacgtgcttttatcagttgcaatgaaaatc

SEQ ID NO: 630924 - DNA, 33 bp, Homo sapien
gaatacgtgcttttattagttgcaatgaaaatc

SEQ ID NO: 630925 - DNA, 33 bp, Homo sapien
agaaatttcttagccagaaatatgacccaaagg

SEQ ID NO: 630926 - DNA, 33 bp, Homo sapien
agaaatttcttagccataaatatgacccaaagg

SEQ ID NO: 630927 - DNA, 33 bp, Homo sapien
tagtgcgggttggtcaccaaagcaaacaattcg

SEQ ID NO: 630928 - DNA, 33 bp, Homo sapien
tagtgcgggttggtcatcaaagcaaacaattcg

SEQ ID NO: 630929 - DNA, 33 bp, Homo sapien
ttaagtgaacaaacaccgatttctgtggcaaac

SEQ ID NO: 630930 - DNA, 33 bp, Homo sapien
ttaagtgaacaaacactgatttctgtggcaaac

SEQ ID NO: 630931 - DNA, 33 bp, Homo sapien
taaaatgcaaaagcccaggaagctcagaagtgc

SEQ ID NO: 630932 - DNA, 33 bp, Homo sapien
taaaatgcaaaagcccgggaagctcagaagtgc

SEQ ID NO: 630933 - DNA, 33 bp, Homo sapien
taccatggcttcacacccttccactgcctggat

SEQ ID NO: 630934 - DNA, 33 bp, Homo sapien
taccatggcttcacactcttccactgcctggat

SEQ ID NO: 630935 - DNA, 33 bp, Homo sapien
gaagcaggaaaaagaaaacgccatgccttccag

SEQ ID NO: 630936 - DNA, 33 bp, Homo sapien
gaagcaggaaaaagaagacgccatgccttccag

SEQ ID NO: 630937 - DNA, 33 bp, Homo sapien
actgtggactagaaacagcaatccacaacgctg

SEQ ID NO: 630938 - DNA, 33 bp, Homo sapien
actgtggactagaaacggcaatccacaacgctg

SEQ ID NO: 630939 - DNA, 33 bp, Homo sapien
tctaaatggaaaaaggccaacaaataggtcatc

SEQ ID NO: 630940 - DNA, 33 bp, Homo sapien
tctaaatggaaaaaggtcaacaaataggtcatc

SEQ ID NO: 630941 - DNA, 33 bp, Homo sapien
aagactgaatcccagacaaggacattgtgtcct

SEQ ID NO: 630942 - DNA, 33 bp, Homo sapien
aagactgaatcccagataaggacattgtgtcct

SEQ ID NO: 630943 - DNA, 33 bp, Homo sapien
ctcactttattcctcagtctcatgtgctttaga

SEQ ID NO: 630944 - DNA, 33 bp, Homo sapien
ctcactttattcctcattctcatgtgctttaga

SEQ ID NO: 630945 - DNA, 33 bp, Homo sapien
gttatttgaagttggacaacctcaaaaccgtgg

SEQ ID NO: 630946 - DNA, 33 bp, Homo sapien
gttatttgaagttggataacctcaaaaccgtgg

SEQ ID NO: 630947 - DNA, 33 bp, Homo sapien
agggtagctggaggaactgccgggcccagctct

SEQ ID NO: 630948 - DNA, 33 bp, Homo sapien
agggtagctggaggaattgccgggcccagctct

SEQ ID NO: 630949 - DNA, 33 bp, Homo sapien
ctggcaccgactcgcacgatggctgtgtacctc

SEQ ID NO: 630950 - DNA, 33 bp, Homo sapien
ctggcaccgactcgcatgatggctgtgtacctc

SEQ ID NO: 630951 - DNA, 33 bp, Homo sapien
acatggtaagactctgcaagcatgagcctgtgt

SEQ ID NO: 630952 - DNA, 33 bp, Homo sapien
acatggtaagactctgtaagcatgagcctgtgt

SEQ ID NO: 630953 - DNA, 33 bp, Homo sapien
tttccttctctaaatgaaagcaaatgtaaccag

SEQ ID NO: 630954 - DNA, 33 bp, Homo sapien
tttccttctctaaatggaagcaaatgtaaccag

SEQ ID NO: 630955 - DNA, 33 bp, Homo sapien
gtcataacctcctaaactgattcacagcccact

SEQ ID NO: 630956 - DNA, 33 bp, Homo sapien
gtcataacctcctaaattgattcacagcccact

SEQ ID NO: 630957 - DNA, 33 bp, Homo sapien
gggacagacaagttgacggactagaacatgtgc

SEQ ID NO: 630958 - DNA, 33 bp, Homo sapien
gggacagacaagttgatggactagaacatgtgc

SEQ ID NO: 630959 - DNA, 33 bp, Homo sapien
ccagtgccttgtagtgaagagggtactagggag

SEQ ID NO: 630960 - DNA, 33 bp, Homo sapien
ccagtgccttgtagtggagagggtactagggag

SEQ ID NO: 630961 - DNA, 33 bp, Homo sapien
aacagacaccatggcaaagcatgattaccatga

SEQ ID NO: 630962 - DNA, 33 bp, Homo sapien
aacagacaccatggcagagcatgattaccatga

SEQ ID NO: 630963 - DNA, 33 bp, Homo sapien
tatgcatgtttattaaatcctggcagtctgttc

SEQ ID NO: 630964 - DNA, 33 bp, Homo sapien
tatgcatgtttattaagtcctggcagtctgttc

SEQ ID NO: 630965 - DNA, 33 bp, Homo sapien
acttctctgcgcattccacttagctgttgtcag

SEQ ID NO: 630966 - DNA, 33 bp, Homo sapien
acttctctgcgcattctacttagctgttgtcag

SEQ ID NO: 630967 - DNA, 33 bp, Homo sapien
gcccatcagggagtggaaattatctcattttat

SEQ ID NO: 630968 - DNA, 33 bp, Homo sapien
gcccatcagggagtgggaattatctcattttat

SEQ ID NO: 630969 - DNA, 33 bp, Homo sapien
aaaaagtgtctgacaacgcagcctttaactgac

SEQ ID NO: 630970 - DNA, 33 bp, Homo sapien
aaaaagtgtctgacaatgcagcctttaactgac

SEQ ID NO: 630971 - DNA, 33 bp, Homo sapien
gtcacagaagtgacagaagtagacatgatcttg

SEQ ID NO: 630972 - DNA, 33 bp, Homo sapien
gtcacagaagtgacagtagtagacatgatcttg

SEQ ID NO: 630973 - DNA, 33 bp, Homo sapien
tcaagccaagaaagacaggccttaatagtgatg

SEQ ID NO: 630974 - DNA, 33 bp, Homo sapien
tcaagccaagaaagacgggccttaatagtgatg

SEQ ID NO: 630975 - DNA, 33 bp, Homo sapien
acactgacaacttcccaagcgccgatgctcttc

SEQ ID NO: 630976 - DNA, 33 bp, Homo sapien
acactgacaacttcccgagcgccgatgctcttc

SEQ ID NO: 630977 - DNA, 33 bp, Homo sapien
cagccgcatttgggtcaagagaatcagtttcag

SEQ ID NO: 630978 - DNA, 33 bp, Homo sapien
cagccgcatttgggtcgagagaatcagtttcag

SEQ ID NO: 630979 - DNA, 33 bp, Homo sapien
taaataatgctgaaaacgtggccgactctgttt

SEQ ID NO: 630980 - DNA, 33 bp, Homo sapien
taaataatgctgaaaatgtggccgactctgttt

SEQ ID NO: 630981 - DNA, 33 bp, Homo sapien
acagaagtttgtaaaactagtagccaacattga

SEQ ID NO: 630982 - DNA, 33 bp, Homo sapien
acagaagtttgtaaaattagtagccaacattga

SEQ ID NO: 630983 - DNA, 33 bp, Homo sapien
ccttcaccaggcgctccaggctggcccgggcat

SEQ ID NO: 630984 - DNA, 33 bp, Homo sapien
ccttcaccaggcgctctaggctggcccgggcat

SEQ ID NO: 630985 - DNA, 33 bp, Homo sapien
attgctctggctggaacaacgggcatctgagaa

SEQ ID NO: 630986 - DNA, 33 bp, Homo sapien
attgctctggctggaagaacgggcatctgagaa

SEQ ID NO: 630987 - DNA, 33 bp, Homo sapien
ctggtctgtaacagataaattccatggctagag

SEQ ID NO: 630988 - DNA, 33 bp, Homo sapien
ctggtctgtaacagatgaattccatggctagag

SEQ ID NO: 630989 - DNA, 33 bp, Homo sapien
ttactctcttaactcccgataccaggcattttc

SEQ ID NO: 630990 - DNA, 33 bp, Homo sapien
ttactctcttaactcctgataccaggcattttc

SEQ ID NO: 630991 - DNA, 33 bp, Homo sapien
gtggaagacaatgatagatgtggaaggagtctg

SEQ ID NO: 630992 - DNA, 33 bp, Homo sapien
gtggaagacaatgatatatgtggaaggagtctg

SEQ ID NO: 630993 - DNA, 33 bp, Homo sapien
ctttggctctatgtaaactgctttttccagctc

SEQ ID NO: 630994 - DNA, 33 bp, Homo sapien
ctttggctctatgtaatctgctttttccagctc

SEQ ID NO: 630995 - DNA, 33 bp, Homo sapien
tcactgtgtctgaatagaagtgtgtcagaaaca

SEQ ID NO: 630996 - DNA, 33 bp, Homo sapien
tcactgtgtctgaatataagtgtgtcagaaaca

SEQ ID NO: 630997 - DNA, 33 bp, Homo sapien
ttgccagcaaacattacaaccttgcactggata

SEQ ID NO: 630998 - DNA, 33 bp, Homo sapien
ttgccagcaaacattataaccttgcactggata

SEQ ID NO: 630999 - DNA, 33 bp, Homo sapien
gaggtcaaatgacttccccaggacagatagagt

SEQ ID NO: 631000 - DNA, 33 bp, Homo sapien
gaggtcaaatgacttctccaggacagatagagt

SEQ ID NO: 631001 - DNA, 33 bp, Homo sapien
gtcacattctcccttaaacagagtttgccatag

SEQ ID NO: 631002 - DNA, 33 bp, Homo sapien
gtcacattctcccttagacagagtttgccatag

SEQ ID NO: 631003 - DNA, 33 bp, Homo sapien; identical to SEQ ID NO: 631001

SEQ ID NO: 631004 - DNA, 33 bp, Homo sapien; identical to SEQ ID NO: 631002

SEQ ID NO: 631005 - DNA, 33 bp, Homo sapien
tgtcccagtatccaaactctgcaatatcctgtg

SEQ ID NO: 631006 - DNA, 33 bp, Homo sapien
tgtcccagtatccaaagtctgcaatatcctgtg

SEQ ID NO: 631007 - DNA, 33 bp, Homo sapien
gcttgggatactcctactaagtatgggcctcaa

SEQ ID NO: 631008 - DNA, 33 bp, Homo sapien
gcttgggatactcctattaagtatgggcctcaa

SEQ ID NO: 631009 - DNA, 33 bp, Homo sapien
tgtactcctggtaaaaaccctctgatctaattc

SEQ ID NO: 631010 - DNA, 33 bp, Homo sapien
tgtactcctggtaaaatccctctgatctaattc

SEQ ID NO: 631011 - DNA, 33 bp, Homo sapien
gtcttctacttatggaagatctgggttagggat

SEQ ID NO: 631012 - DNA, 33 bp, Homo sapien
gtcttctacttatggaggatctgggttagggat

SEQ ID NO: 631013 - DNA, 33 bp, Homo sapien
cgtgggctaggacttgaatccaggatacagaac

SEQ ID NO: 631014 - DNA, 33 bp, Homo sapien
cgtgggctaggacttggatccaggatacagaac

SEQ ID NO: 631015 - DNA, 33 bp, Homo sapien
ctaataaataagctcaaggtacaagatcaatat

SEQ ID NO: 631016 - DNA, 33 bp, Homo sapien
ctaataaataagctcagggtacaagatcaatat

SEQ ID NO: 631017 - DNA, 33 bp, Homo sapien
attgacctttaggtccccaatgtctccagttaa

SEQ ID NO: 631018 - DNA, 33 bp, Homo sapien
attgacctttaggtccgcaatgtctccagttaa

SEQ ID NO: 631019 - DNA, 33 bp, Homo sapien
aagtacatgattttaccatagtgactcaaccat

SEQ ID NO: 631020 - DNA, 33 bp, Homo sapien
aagtacatgattttactatagtgactcaaccat

SEQ ID NO: 631021 - DNA, 33 bp, Homo sapien
tccgtttccagcagcacggttctatccagcctg

SEQ ID NO: 631022 - DNA, 33 bp, Homo sapien
tccgtttccagcagcatggttctatccagcctg

SEQ ID NO: 631023 - DNA, 33 bp, Homo sapien
taaagttttgttgaaacaaactggtgctcaggt

SEQ ID NO: 631024 - DNA, 33 bp, Homo sapien
taaagttttgttgaaataaactggtgctcaggt

SEQ ID NO: 631025 - DNA, 33 bp, Homo sapien
aagtggtccacagacacggatgatcagtcaaat

SEQ ID NO: 631026 - DNA, 33 bp, Homo sapien
aagtggtccacagacatggatgatcagtcaaat

SEQ ID NO: 631027 - DNA, 33 bp, Homo sapien
ctctttgttgattgtaacctttggcacactgtt

SEQ ID NO: 631028 - DNA, 33 bp, Homo sapien
ctctttgttgattgtaccctttggcacactgtt

SEQ ID NO: 631029 - DNA, 33 bp, Homo sapien
tttacagaacattccactcaaaactatagaata

SEQ ID NO: 631030 - DNA, 33 bp, Homo sapien
tttacagaacattccattcaaaactatagaata

SEQ ID NO: 631031 - DNA, 33 bp, Homo sapien
tcgagtccctaaaaaacgttcttgtggtgagga

SEQ ID NO: 631032 - DNA, 33 bp, Homo sapien
tcgagtccctaaaaaatgttcttgtggtgagga

SEQ ID NO: 631033 - DNA, 33 bp, Homo sapien
tcattgtggtcaaaagcagtttttggtttaggg

SEQ ID NO: 631034 - DNA, 33 bp, Homo sapien
tcattgtggtcaaaagtagtttttggtttaggg

SEQ ID NO: 631035 - DNA, 33 bp, Homo sapien
tcagggccacataaaaccaaacctgttaatcag

SEQ ID NO: 631036 - DNA, 33 bp, Homo sapien
tcagggccacataaaagcaaacctgttaatcag

SEQ ID NO: 631037 - DNA, 33 bp, Homo sapien
cccaccacaggccaagcaaatcacaatctctga

SEQ ID NO: 631038 - DNA, 33 bp, Homo sapien
cccaccacaggccaaggaaatcacaatctctga

SEQ ID NO: 631039 - DNA, 33 bp, Homo sapien
tgagagcccttctccacgccttactttgcacaa

SEQ ID NO: 631040 - DNA, 33 bp, Homo sapien
tgagagcccttctccatgccttactttgcacaa

SEQ ID NO: 631041 - DNA, 33 bp, Homo sapien
ctctcaatccctatccacactttccacacagag

SEQ ID NO: 631042 - DNA, 33 bp, Homo sapien
ctctcaatccctatccgcactttccacacagag

SEQ ID NO: 631043 - DNA, 33 bp, Homo sapien
ggagcaaggcaatcacaggggacaggaaccttg

SEQ ID NO: 631044 - DNA, 33 bp, Homo sapien
ggagcaaggcaatcacgggggacaggaaccttg

SEQ ID NO: 631045 - DNA, 33 bp, Homo sapien
ggtgctgatgggtaaaccttgctttcttctgtg

SEQ ID NO: 631046 - DNA, 33 bp, Homo sapien
ggtgctgatgggtaaatcttgctttcttctgtg

SEQ ID NO: 631047 - DNA, 33 bp, Homo sapien
gtttatatttatgcaaaagtcataatagtatcc

SEQ ID NO: 631048 - DNA, 33 bp, Homo sapien
gtttatatttatgcaagagtcataatagtatcc

SEQ ID NO: 631049 - DNA, 33 bp, Homo sapien
caaggccaaactctcacgatgaccaggaagtag

SEQ ID NO: 631050 - DNA, 33 bp, Homo sapien
caaggccaaactctcatgatgaccaggaagtag

SEQ ID NO: 631051 - DNA, 33 bp, Homo sapien
ctaattgcctatatccaaattgcctttgcctcc

SEQ ID NO: 631052 - DNA, 33 bp, Homo sapien
ctaattgcctatatccgaattgcctttgcctcc

SEQ ID NO: 631053 - DNA, 33 bp, Homo sapien
tagggagaggaagtgacgtgtttaaaagcatga

SEQ ID NO: 631054 - DNA, 33 bp, Homo sapien
tagggagaggaagtgatgtgtttaaaagcatga

SEQ ID NO: 631055 - DNA, 33 bp, Homo sapien
gaagacaagtgtcattcaaatatttctgcataa

SEQ ID NO: 631056 - DNA, 33 bp, Homo sapien
gaagacaagtgtcatttaaatatttctgcataa

SEQ ID NO: 631057 - DNA, 33 bp, Homo sapien
aggtcttactctgtgggaatttagaaaatcaga

SEQ ID NO: 631058 - DNA, 33 bp, Homo sapien
aggtcttactctgtggtaatttagaaaatcaga

SEQ ID NO: 631059 - DNA, 33 bp, Homo sapien
aattcaggcagtaaaaaagctaaagcaggccct

SEQ ID NO: 631060 - DNA, 33 bp, Homo sapien
aattcaggcagtaaaagagctaaagcaggccct

SEQ ID NO: 631061 - DNA, 33 bp, Homo sapien
ctctcccagttggttacggtcactctcctaatt

SEQ ID NO: 631062 - DNA, 33 bp, Homo sapien
ctctcccagttggttatggtcactctcctaatt

SEQ ID NO: 631063 - DNA, 33 bp, Homo sapien; identical to SEQ ID NO: 631061

SEQ ID NO: 631064 - DNA, 33 bp, Homo sapien; identical to SEQ ID NO: 631062

SEQ ID NO: 631065 - DNA, 33 bp, Homo sapien
gatagggaagttctcaatagtcctcttacactg

SEQ ID NO: 631066 - DNA, 33 bp, Homo sapien
gatagggaagttctcagtagtcctcttacactg

SEQ ID NO: 631067 - DNA, 33 bp, Homo sapien
gagtgcagagtcccaaaccgcagttccgttctc

SEQ ID NO: 631068 - DNA, 33 bp, Homo sapien
gagtgcagagtcccaatccgcagttccgttctc

SEQ ID NO: 631069 - DNA, 33 bp, Homo sapien
actccatagaaagccacgtgaagcttttcataa

SEQ ID NO: 631070 - DNA, 33 bp, Homo sapien
actccatagaaagccatgtgaagcttttcataa

SEQ ID NO: 631071 - DNA, 33 bp, Homo sapien
aataacaatacaagtacatgaaataaggactga

SEQ ID NO: 631072 - DNA, 33 bp, Homo sapien
aataacaatacaagtagatgaaataaggactga

SEQ ID NO: 631073 - DNA, 33 bp, Homo sapien
cacacaaaaagctgtacgccattgttaatagtt

SEQ ID NO: 631074 - DNA, 33 bp, Homo sapien
cacacaaaaagctgtatgccattgttaatagtt

SEQ ID NO: 631075 - DNA, 33 bp, Homo sapien
tccctgcatacacacaacaaagcccaggctctt

SEQ ID NO: 631076 - DNA, 33 bp, Homo sapien
tccctgcatacacacagcaaagcccaggctctt

SEQ ID NO: 631077 - DNA, 33 bp, Homo sapien
gctagatatactcaacaatgatcttaattaagt

SEQ ID NO: 631078 - DNA, 33 bp, Homo sapien
gctagatatactcaacgatgatcttaattaagt

SEQ ID NO: 631079 - DNA, 33 bp, Homo sapien
caaaaaaggccttgcacgtgtgattaagtcaag

SEQ ID NO: 631080 - DNA, 33 bp, Homo sapien
caaaaaaggccttgcatgtgtgattaagtcaag

SEQ ID NO: 631081 - DNA, 33 bp, Homo sapien
aaactgttcaacccacagagaatgtagaaaagc

SEQ ID NO: 631082 - DNA, 33 bp, Homo sapien
aaactgttcaacccacggagaatgtagaaaagc

SEQ ID NO: 631083 - DNA, 33 bp, Homo sapien
acgggagtcatactaaactttgtgcaggtccca

SEQ ID NO: 631084 - DNA, 33 bp, Homo sapien
acgggagtcatactaacctttgtgcaggtccca

SEQ ID NO: 631085 - DNA, 33 bp, Homo sapien
ctccacacccttaccccggaatgttcatcccac

SEQ ID NO: 631086 - DNA, 33 bp, Homo sapien
ctccacacccttaccctggaatgttcatcccac

SEQ ID NO: 631087 - DNA, 33 bp, Homo sapien
cagacagtgtgccccaagattaggcaacaggga

SEQ ID NO: 631088 - DNA, 33 bp, Homo sapien
cagacagtgtgccccaggattaggcaacaggga

SEQ ID NO: 631089 - DNA, 33 bp, Homo sapien
taaatatgattcaataagtgtctggcacttggt

SEQ ID NO: 631090 - DNA, 33 bp, Homo sapien
taaatatgattcaatatgtgtctggcacttggt

SEQ ID NO: 631091 - DNA, 33 bp, Homo sapien
cagaatgttccctagcacttcttcccagtcagt

SEQ ID NO: 631092 - DNA, 33 bp, Homo sapien
cagaatgttccctagcgcttcttcccagtcagt

SEQ ID NO: 631093 - DNA, 33 bp, Homo sapien
tagagatctggacagacgtaaccttcatgttca

SEQ ID NO: 631094 - DNA, 33 bp, Homo sapien
tagagatctggacagatgtaaccttcatgttca

SEQ ID NO: 631095 - DNA, 33 bp, Homo sapien
agagtgccttgactaccctgtgacttggcaagt

SEQ ID NO: 631096 - DNA, 33 bp, Homo sapien
agagtgccttgactacgctgtgacttggcaagt

SEQ ID NO: 631097 - DNA, 33 bp, Homo sapien
ttatatacatctgttaaggtgacacacattcag

SEQ ID NO: 631098 - DNA, 33 bp, Homo sapien
ttatatacatctgttagggtgacacacattcag

SEQ ID NO: 631099 - DNA, 33 bp, Homo sapien
ctatggtttatcatcccgatcatgttgatttta

SEQ ID NO: 631100 - DNA, 33 bp, Homo sapien
ctatggtttatcatcctgatcatgttgatttta

SEQ ID NO: 631101 - DNA, 33 bp, Homo sapien
taccttgagaaatgccaatcggcctgtatattc

SEQ ID NO: 631102 - DNA, 33 bp, Homo sapien
taccttgagaaatgcccatcggcctgtatattc

SEQ ID NO: 631103 - DNA, 33 bp, Homo sapien
gtaccacatcctactacgatgacgtgggcctgc

SEQ ID NO: 631104 - DNA, 33 bp, Homo sapien
gtaccacatcctactatgatgacgtgggcctgc

SEQ ID NO: 631105 - DNA, 33 bp, Homo sapien
gatatgggcttgaataagaaaatacctaatgat

SEQ ID NO: 631106 - DNA, 33 bp, Homo sapien
gatatgggcttgaatatgaaaatacctaatgat

SEQ ID NO: 631107 - DNA, 33 bp, Homo sapien
aagactttctttcactaaggaaggcctctcaat

SEQ ID NO: 631108 - DNA, 33 bp, Homo sapien
aagactttctttcactgaggaaggcctctcaat

SEQ ID NO: 631109 - DNA, 33 bp, Homo sapien
taggggaatatgtagaccttgagccacacacag

SEQ ID NO: 631110 - DNA, 33 bp, Homo sapien
taggggaatatgtagatcttgagccacacacag

SEQ ID NO: 631111 - DNA, 33 bp, Homo sapien
gcatgtgctattttccaagtttcttccatcctg

SEQ ID NO: 631112 - DNA, 33 bp, Homo sapien
gcatgtgctattttccgagtttcttccatcctg

SEQ ID NO: 631113 - DNA, 33 bp, Homo sapien
ttgggtctcattcaaagaaatccattgacatac

SEQ ID NO: 631114 - DNA, 33 bp, Homo sapien
ttgggtctcattcaaataaatccattgacatac

SEQ ID NO: 631115 - DNA, 33 bp, Homo sapien
gaatgggtaaatggaaagtaaattgcaaaatcc

SEQ ID NO: 631116 - DNA, 33 bp, Homo sapien
gaatgggtaaatggaaggtaaattgcaaaatcc

SEQ ID NO: 631117 - DNA, 33 bp, Homo sapien
gagtgcaaatatttccaacccgatactgccgtc

SEQ ID NO: 631118 - DNA, 33 bp, Homo sapien
gagtgcaaatatttccgacccgatactgccgtc

SEQ ID NO: 631119 - DNA, 33 bp, Homo sapien
tattttcaatagtttcaaaagcaaggcttatgt

SEQ ID NO: 631120 - DNA, 33 bp, Homo sapien
tattttcaatagtttcgaaagcaaggcttatgt

SEQ ID NO: 631121 - DNA, 33 bp, Homo sapien
ccttatttttgaatggcactgaatccctatata

SEQ ID NO: 631122 - DNA, 33 bp, Homo sapien
ccttatttttgaatggtactgaatccctatata

SEQ ID NO: 631123 - DNA, 33 bp, Homo sapien
taggctgaagattataaatgtcagctcgcaatg

SEQ ID NO: 631124 - DNA, 33 bp, Homo sapien
taggctgaagattatacatgtcagctcgcaatg

SEQ ID NO: 631125 - DNA, 33 bp, Homo sapien
aaagtagattcaaaggaagtcatacaagacctg

SEQ ID NO: 631126 - DNA, 33 bp, Homo sapien
aaagtagattcaaaggcagtcatacaagacctg

SEQ ID NO: 631127 - DNA, 33 bp, Homo sapien
acagattccctcttacaaagaagcaccaattac

SEQ ID NO: 631128 - DNA, 33 bp, Homo sapien
acagattccctcttacgaagaagcaccaattac

SEQ ID NO: 631129 - DNA, 33 bp, Homo sapien
tgcttaaatgttagaaaaaaactgactggatgg

SEQ ID NO: 631130 - DNA, 33 bp, Homo sapien
tgcttaaatgttagaagaaaactgactggatgg

SEQ ID NO: 631131 - DNA, 33 bp, Homo sapien
tccacttggttataggcagccttgataacatct

SEQ ID NO: 631132 - DNA, 33 bp, Homo sapien
tccacttggttataggtagccttgataacatct

SEQ ID NO: 631133 - DNA, 33 bp, Homo sapien
ataaaatatatacaagaagaaggattctgggag

SEQ ID NO: 631134 - DNA, 33 bp, Homo sapien
ataaaatatatacaaggagaaggattctgggag

SEQ ID NO: 631135 - DNA, 33 bp, Homo sapien
ccaggtttggaagaagacaatggcaggtaggaa

SEQ ID NO: 631136 - DNA, 33 bp, Homo sapien
ccaggtttggaagaaggcaatggcaggtaggaa

SEQ ID NO: 631137 - DNA, 33 bp, Homo sapien
ttataagcaacagaaaataaatgaaaacagtac

SEQ ID NO: 631138 - DNA, 33 bp, Homo sapien
ttataagcaacagaaagtaaatgaaaacagtac

SEQ ID NO: 631139 - DNA, 33 bp, Homo sapien
attttcaaactatagcacctaccctatagccca

SEQ ID NO: 631140 - DNA, 33 bp, Homo sapien
attttcaaactatagcgcctaccctatagccca

SEQ ID NO: 631141 - DNA, 33 bp, Homo sapien
cagacacttataaataatataggcactgttaga

SEQ ID NO: 631142 - DNA, 33 bp, Homo sapien
cagacacttataaatactataggcactgttaga

SEQ ID NO: 631143 - DNA, 33 bp, Homo sapien
tccagatgaaccaggaatagacaagaatgtatg

SEQ ID NO: 631144 - DNA, 33 bp, Homo sapien
tccagatgaaccaggagtagacaagaatgtatg

SEQ ID NO: 631145 - DNA, 33 bp, Homo sapien
acaacagcaaaaaagcaaacttcttgaaatctg

SEQ ID NO: 631146 - DNA, 33 bp, Homo sapien
acaacagcaaaaaagccaacttcttgaaatctg

SEQ ID NO: 631147 - DNA, 33 bp, Homo sapien
aagactgggggtctatcagggtaaatggaccta

SEQ ID NO: 631148 - DNA, 33 bp, Homo sapien
aagactgggggtctatgagggtaaatggaccta

SEQ ID NO: 631149 - DNA, 33 bp, Homo sapien
agagcagagagtggaaatgttccaggtataaag

SEQ ID NO: 631150 - DNA, 33 bp, Homo sapien
agagcagagagtggaagtgttccaggtataaag

SEQ ID NO: 631151 - DNA, 33 bp, Homo sapien
ggaggttttaagctaaaagtgactattcaattt

SEQ ID NO: 631152 - DNA, 33 bp, Homo sapien
ggaggttttaagctaagagtgactattcaattt

SEQ ID NO: 631153 - DNA, 33 bp, Homo sapien
tgccagactatttggaagatcatggattgcggt

SEQ ID NO: 631154 - DNA, 33 bp, Homo sapien
tgccagactatttggaggatcatggattgcggt

SEQ ID NO: 631155 - DNA, 33 bp, Homo sapien
tctggactccctataacattgtcattctcctga

SEQ ID NO: 631156 - DNA, 33 bp, Homo sapien
tctggactccctataatattgtcattctcctga

SEQ ID NO: 631157 - DNA, 33 bp, Homo sapien
tttgattagaagccaacttgatttaggagttcc

SEQ ID NO: 631158 - DNA, 33 bp, Homo sapien
tttgattagaagccaatttgatttaggagttcc

SEQ ID NO: 631159 - DNA, 33 bp, Homo sapien
gagggagaggtttttcccagcataaccctcagc

SEQ ID NO: 631160 - DNA, 33 bp, Homo sapien
gagggagaggtttttctcagcataaccctcagc

SEQ ID NO: 631161 - DNA, 33 bp, Homo sapien
gcttggaacataggtgcagtgactagacatggg

SEQ ID NO: 631162 - DNA, 33 bp, Homo sapien
gcttggaacataggtgtagtgactagacatggg

SEQ ID NO: 631163 - DNA, 33 bp, Homo sapien
attaaatgtcttccaacgttagcacgaagaaaa

SEQ ID NO: 631164 - DNA, 33 bp, Homo sapien
attaaatgtcttccaatgttagcacgaagaaaa

SEQ ID NO: 631165 - DNA, 33 bp, Homo sapien
tataggagctatcgaaatgttttcacgtttttg

SEQ ID NO: 631166 - DNA, 33 bp, Homo sapien
tataggagctatcgaagtgttttcacgtttttg

SEQ ID NO: 631167 - DNA, 33 bp, Homo sapien
acaatgacacaaaacggattatcaaaccacgta

SEQ ID NO: 631168 - DNA, 33 bp, Homo sapien
acaatgacacaaaacgtattatcaaaccacgta

SEQ ID NO: 631169 - DNA, 33 bp, Homo sapien
aaagggctaagtagaaagtggggtacaagagga

SEQ ID NO: 631170 - DNA, 33 bp, Homo sapien
aaagggctaagtagaacgtggggtacaagagga

SEQ ID NO: 631171 - DNA, 33 bp, Homo sapien
ttctcagacttggctacacttagaatcacctgg

SEQ ID NO: 631172 - DNA, 33 bp, Homo sapien
ttctcagacttggctatacttagaatcacctgg

SEQ ID NO: 631173 - DNA, 33 bp, Homo sapien
taattacattttattagattcagcggtatgcag

SEQ ID NO: 631174 - DNA, 33 bp, Homo sapien
taattacattttattatattcagcggtatgcag

SEQ ID NO: 631175 - DNA, 33 bp, Homo sapien
aagcacatctttgagaaaactggagaaatttga

SEQ ID NO: 631176 - DNA, 33 bp, Homo sapien
aagcacatctttgagacaactggagaaatttga

SEQ ID NO: 631177 - DNA, 33 bp, Homo sapien
cctactatgaattctaagtgtgtactacccaag

SEQ ID NO: 631178 - DNA, 33 bp, Homo sapien
cctactatgaattctaggtgtgtactacccaag

SEQ ID NO: 631179 - DNA, 33 bp, Homo sapien
ggagacatcagtgttacctggagacattttagt

SEQ ID NO: 631180 - DNA, 33 bp, Homo sapien
ggagacatcagtgttatctggagacattttagt

SEQ ID NO: 631181 - DNA, 33 bp, Homo sapien
cacccttgtatataccgaattggctctggtata

SEQ ID NO: 631182 - DNA, 33 bp, Homo sapien
cacccttgtatatacctaattggctctggtata

SEQ ID NO: 631183 - DNA, 33 bp, Homo sapien
aataagacaaattccaaaagagtaagacaccct

SEQ ID NO: 631184 - DNA, 33 bp, Homo sapien
aataagacaaattccacaagagtaagacaccct

SEQ ID NO: 631185 - DNA, 33 bp, Homo sapien
gagacagtaaatggtccgaccaatgtttgaggt

SEQ ID NO: 631186 - DNA, 33 bp, Homo sapien
gagacagtaaatggtctgaccaatgtttgaggt

SEQ ID NO: 631187 - DNA, 33 bp, Homo sapien
aacatagtcttggaagcaagggcatcattttct

SEQ ID NO: 631188 - DNA, 33 bp, Homo sapien
aacatagtcttggaaggaagggcatcattttct

SEQ ID NO: 631189 - DNA, 33 bp, Homo sapien
gtatcacagctactaaatattgggtactgaggt

SEQ ID NO: 631190 - DNA, 33 bp, Homo sapien
gtatcacagctactaattattgggtactgaggt

SEQ ID NO: 631191 - DNA, 33 bp, Homo sapien
atctaatacctatttcccaagatcaagttagat

SEQ ID NO: 631192 - DNA, 33 bp, Homo sapien
atctaatacctatttctcaagatcaagttagat

SEQ ID NO: 631193 - DNA, 33 bp, Homo sapien
gtgaaatttcccaagtaaaaacacagaatcatg

SEQ ID NO: 631194 - DNA, 33 bp, Homo sapien
gtgaaatttcccaagtgaaaacacagaatcatg

SEQ ID NO: 631195 - DNA, 33 bp, Homo sapien
cagcaaggccctggtaactttgaggcctcaaag

SEQ ID NO: 631196 - DNA, 33 bp, Homo sapien
cagcaaggccctggtagctttgaggcctcaaag

SEQ ID NO: 631197 - DNA, 33 bp, Homo sapien
ccaggggacaatcaccactcccggctgagtcct

SEQ ID NO: 631198 - DNA, 33 bp, Homo sapien
ccaggggacaatcaccgctcccggctgagtcct

SEQ ID NO: 631199 - DNA, 33 bp, Homo sapien
acaaaggatccctacactccaaaggcgaatgcc

SEQ ID NO: 631200 - DNA, 33 bp, Homo sapien
acaaaggatccctacattccaaaggcgaatgcc

SEQ ID NO: 631201 - DNA, 33 bp, Homo sapien
tacatacatcttgcacaccatggaaagtttctc

SEQ ID NO: 631202 - DNA, 33 bp, Homo sapien
tacatacatcttgcacgccatggaaagtttctc

SEQ ID NO: 631203 - DNA, 33 bp, Homo sapien
tattatgcttacacacactgtgacgggtaccca

SEQ ID NO: 631204 - DNA, 33 bp, Homo sapien
tattatgcttacacacgctgtgacgggtaccca

SEQ ID NO: 631205 - DNA, 33 bp, Homo sapien
tggctgatgcctggaacgcaacgtggcaagttt

SEQ ID NO: 631206 - DNA, 33 bp, Homo sapien
tggctgatgcctggaatgcaacgtggcaagttt

SEQ ID NO: 631207 - DNA, 33 bp, Homo sapien
ggtcctgtattcatgccaaagtcacaggggagc

SEQ ID NO: 631208 - DNA, 33 bp, Homo sapien
ggtcctgtattcatgcgaaagtcacaggggagc

SEQ ID NO: 631209 - DNA, 33 bp, Homo sapien
actgtttgtaggaaaaaggccagggaagaaact

SEQ ID NO: 631210 - DNA, 33 bp, Homo sapien
actgtttgtaggaaaacggccagggaagaaact

SEQ ID NO: 631211 - DNA, 33 bp, Homo sapien
taaaagctaatctcctaaggaaaaatgtatgca

SEQ ID NO: 631212 - DNA, 33 bp, Homo sapien
taaaagctaatctcctgaggaaaaatgtatgca

SEQ ID NO: 631213 - DNA, 33 bp, Homo sapien
ctgtttggaaacacataaagaatgagggagaga

SEQ ID NO: 631214 - DNA, 33 bp, Homo sapien
ctgtttggaaacacattaagaatgagggagaga

SEQ ID NO: 631215 - DNA, 33 bp, Homo sapien
tggattttatgactgaagtggcaaaaagaaata

SEQ ID NO: 631216 - DNA, 33 bp, Homo sapien
tggattttatgactgaggtggcaaaaagaaata

SEQ ID NO: 631217 - DNA, 33 bp, Homo sapien
aggctgaatgtaaaaaactgaaagaatctgttg

SEQ ID NO: 631218 - DNA, 33 bp, Homo sapien
aggctgaatgtaaaaatctgaaagaatctgttg

SEQ ID NO: 631219 - DNA, 33 bp, Homo sapien
agccaccttaacttgcaaaggcattactgtagt

SEQ ID NO: 631220 - DNA, 33 bp, Homo sapien
agccaccttaacttgcgaaggcattactgtagt

SEQ ID NO: 631221 - DNA, 33 bp, Homo sapien
gatggacaacatatcaagccataattcaaagta

SEQ ID NO: 631222 - DNA, 33 bp, Homo sapien
gatggacaacatatcaggccataattcaaagta

SEQ ID NO: 631223 - DNA, 33 bp, Homo sapien
atagtacggatagtgacggcactgtcatgaaat

SEQ ID NO: 631224 - DNA, 33 bp, Homo sapien
atagtacggatagtgatggcactgtcatgaaat

SEQ ID NO: 631225 - DNA, 33 bp, Homo sapien
caggaaataacaatgacgcatgggctaaggatt

SEQ ID NO: 631226 - DNA, 33 bp, Homo sapien
caggaaataacaatgaggcatgggctaaggatt

SEQ ID NO: 631227 - DNA, 33 bp, Homo sapien
caagagtacatttcaccaccagatggcgtcatg

SEQ ID NO: 631228 - DNA, 33 bp, Homo sapien
caagagtacatttcacgaccagatggcgtcatg

SEQ ID NO: 631229 - DNA, 33 bp, Homo sapien
atgtactcttggcaaaaggaggaaaaggaacag

SEQ ID NO: 631230 - DNA, 33 bp, Homo sapien
atgtactcttggcaaatggaggaaaaggaacag

SEQ ID NO: 631231 - DNA, 33 bp, Homo sapien
tctgccatctctttgcaatttctaaggccaaag

SEQ ID NO: 631232 - DNA, 33 bp, Homo sapien
tctgccatctctttgccatttctaaggccaaag

SEQ ID NO: 631233 - DNA, 33 bp, Homo sapien
gcgtgcccaacagcaacgagagatactacggct

SEQ ID NO: 631234 - DNA, 33 bp, Homo sapien
gcgtgcccaacagcaatgagagatactacggct

SEQ ID NO: 631235 - DNA, 33 bp, Homo sapien
tctctcttgttgtttacagtgtttgttgctgta

SEQ ID NO: 631236 - DNA, 33 bp, Homo sapien
tctctcttgttgtttatagtgtttgttgctgta

SEQ ID NO: 631237 - DNA, 33 bp, Homo sapien
ctaccagcaccagggcaatgcagtcctctgtgg

SEQ ID NO: 631238 - DNA, 33 bp, Homo sapien
ctaccagcaccagggcgatgcagtcctctgtgg

SEQ ID NO: 631239 - DNA, 33 bp, Homo sapien
gggaaaaggagtgaccaccacaaagtagggcca

SEQ ID NO: 631240 - DNA, 33 bp, Homo sapien
gggaaaaggagtgaccgccacaaagtagggcca

SEQ ID NO: 631241 - DNA, 33 bp, Homo sapien
ttctaatgctcactaaaacctctatgaacccag

SEQ ID NO: 631242 - DNA, 33 bp, Homo sapien
ttctaatgctcactaagacctctatgaacccag

SEQ ID NO: 631243 - DNA, 33 bp, Homo sapien
ggacacaagtggtcacaaggaaaaacactgagg

SEQ ID NO: 631244 - DNA, 33 bp, Homo sapien
ggacacaagtggtcacgaggaaaaacactgagg

SEQ ID NO: 631245 - DNA, 33 bp, Homo sapien
tgattagtaaggggaacatctcacaagtatttt

SEQ ID NO: 631246 - DNA, 33 bp, Homo sapien
tgattagtaaggggaatatctcacaagtatttt

SEQ ID NO: 631247 - DNA, 33 bp, Homo sapien
ccacccattaccaagccgatttctgataccagc

SEQ ID NO: 631248 - DNA, 33 bp, Homo sapien
ccacccattaccaagctgatttctgataccagc

SEQ ID NO: 631249 - DNA, 33 bp, Homo sapien
ccacccaatgctcacacggcttagatccagctg

SEQ ID NO: 631250 - DNA, 33 bp, Homo sapien
ccacccaatgctcacatggcttagatccagctg

SEQ ID NO: 631251 - DNA, 33 bp, Homo sapien
cttcctgagacatcaactcacgcttggacaata

SEQ ID NO: 631252 - DNA, 33 bp, Homo sapien
cttcctgagacatcaattcacgcttggacaata

SEQ ID NO: 631253 - DNA, 33 bp, Homo sapien
acacacacacacacaagaatcttttccaaaatt

SEQ ID NO: 631254 - DNA, 33 bp, Homo sapien
acacacacacacacaataatcttttccaaaatt

SEQ ID NO: 631255 - DNA, 33 bp, Homo sapien
ccaataatgttgttgccaaatgttgccccattt

SEQ ID NO: 631256 - DNA, 33 bp, Homo sapien
ccaataatgttgttgctaaatgttgccccattt

SEQ ID NO: 631257 - DNA, 33 bp, Homo sapien
gactgcttgttgcaataagataaccaatttata

SEQ ID NO: 631258 - DNA, 33 bp, Homo sapien
gactgcttgttgcaatcagataaccaatttata

SEQ ID NO: 631259 - DNA, 33 bp, Homo sapien
gtaatagtgaaaaaacaatctttaatgaagtta

SEQ ID NO: 631260 - DNA, 33 bp, Homo sapien
gtaatagtgaaaaaacgatctttaatgaagtta

SEQ ID NO: 631261 - DNA, 33 bp, Homo sapien
caacccacagggtgaaagcaaggttgaaatgag

SEQ ID NO: 631262 - DNA, 33 bp, Homo sapien
caacccacagggtgaatgcaaggttgaaatgag

SEQ ID NO: 631263 - DNA, 33 bp, Homo sapien
ggtgtattatcttgtaccctgtctgaagccagt

SEQ ID NO: 631264 - DNA, 33 bp, Homo sapien
ggtgtattatcttgtatcctgtctgaagccagt

SEQ ID NO: 631265 - DNA, 33 bp, Homo sapien
gaatagggagaccacaatcccagtcatgccttt

SEQ ID NO: 631266 - DNA, 33 bp, Homo sapien
gaatagggagaccacagtcccagtcatgccttt

SEQ ID NO: 631267 - DNA, 33 bp, Homo sapien
ggaggacatggtctaaggagcaaatagtttctg

SEQ ID NO: 631268 - DNA, 33 bp, Homo sapien
ggaggacatggtctaatgagcaaatagtttctg

SEQ ID NO: 631269 - DNA, 33 bp, Homo sapien
caagattgaactctgccgatagtaagcacttac

SEQ ID NO: 631270 - DNA, 33 bp, Homo sapien
caagattgaactctgctgatagtaagcacttac

SEQ ID NO: 631271 - DNA, 33 bp, Homo sapien
aacagagcatgggaaggcaatcatactagaatt

SEQ ID NO: 631272 - DNA, 33 bp, Homo sapien
aacagagcatgggaagtcaatcatactagaatt

SEQ ID NO: 631273 - DNA, 33 bp, Homo sapien
atctaaccattgtaaactggggatcatctgtaa

SEQ ID NO: 631274 - DNA, 33 bp, Homo sapien
atctaaccattgtaaattggggatcatctgtaa

SEQ ID NO: 631275 - DNA, 33 bp, Homo sapien
aaagccattaccctgcaaaataaaaacagaaca

SEQ ID NO: 631276 - DNA, 33 bp, Homo sapien
aaagccattaccctgccaaataaaaacagaaca

SEQ ID NO: 631277 - DNA, 33 bp, Homo sapien
atccatttgaaaaaacaaacagcaaacagctcg

SEQ ID NO: 631278 - DNA, 33 bp, Homo sapien
atccatttgaaaaaactaacagcaaacagctcg

SEQ ID NO: 631279 - DNA, 33 bp, Homo sapien
aaaacttaggttggcaggatataatttcaaagg

SEQ ID NO: 631280 - DNA, 33 bp, Homo sapien
aaaacttaggttggcatgatataatttcaaagg

SEQ ID NO: 631281 - DNA, 33 bp, Homo sapien
aaaccacccagcaatcaatgagtcagggcttca

SEQ ID NO: 631282 - DNA, 33 bp, Homo sapien
aaaccacccagcaatccatgagtcagggcttca

SEQ ID NO: 631283 - DNA, 33 bp, Homo sapien
gggctcctctgggagaagttgtagtggcttgga

SEQ ID NO: 631284 - DNA, 33 bp, Homo sapien
gggctcctctgggagatgttgtagtggcttgga

SEQ ID NO: 631285 - DNA, 33 bp, Homo sapien
actaaatcacacagaaaagctaataaggaaaag

SEQ ID NO: 631286 - DNA, 33 bp, Homo sapien
actaaatcacacagaagagctaataaggaaaag

SEQ ID NO: 631287 - DNA, 33 bp, Homo sapien
gaaatatcactctctccgaatgaaacttgatca

SEQ ID NO: 631288 - DNA, 33 bp, Homo sapien
gaaatatcactctctctgaatgaaacttgatca

SEQ ID NO: 631289 - DNA, 33 bp, Homo sapien
tgatacacaaacagaaaacagttttaacataaa

SEQ ID NO: 631290 - DNA, 33 bp, Homo sapien
tgatacacaaacagaagacagttttaacataaa

SEQ ID NO: 631291 - DNA, 33 bp, Homo sapien
cttttagaaaagcaatgataacaccgcctatgt

SEQ ID NO: 631292 - DNA, 33 bp, Homo sapien
cttttagaaaagcaattataacaccgcctatgt

SEQ ID NO: 631293 - DNA, 33 bp, Homo sapien
atagctgaatagcaccacgaagactgaaaacag

SEQ ID NO: 631294 - DNA, 33 bp, Homo sapien
atagctgaatagcaccgcgaagactgaaaacag

SEQ ID NO: 631295 - DNA, 33 bp, Homo sapien
agaagcacttttaaatgagattgtccaggtcat

SEQ ID NO: 631296 - DNA, 33 bp, Homo sapien
agaagcacttttaaattagattgtccaggtcat

SEQ ID NO: 631297 - DNA, 33 bp, Homo sapien
caaggtgctaagtagagaagtagcgcccacaat

SEQ ID NO: 631298 - DNA, 33 bp, Homo sapien
caaggtgctaagtagataagtagcgcccacaat

SEQ ID NO: 631299 - DNA, 33 bp, Homo sapien
tcagaccataaaatgtcaaatagacttgaaata

SEQ ID NO: 631300 - DNA, 33 bp, Homo sapien
tcagaccataaaatgttaaatagacttgaaata

SEQ ID NO: 631301 - DNA, 33 bp, Homo sapien
tggagctaaaattcacaatgtgagcctccgcat

SEQ ID NO: 631302 - DNA, 33 bp, Homo sapien
tggagctaaaattcaccatgtgagcctccgcat

SEQ ID NO: 631303 - DNA, 33 bp, Homo sapien
gaggagcctggaaagaaccgatcctgcattaat

SEQ ID NO: 631304 - DNA, 33 bp, Homo sapien
gaggagcctggaaagacccgatcctgcattaat

SEQ ID NO: 631305 - DNA, 33 bp, Homo sapien
ttctcagagcccccataacaaaggatagagatg

SEQ ID NO: 631306 - DNA, 33 bp, Homo sapien
ttctcagagcccccatcacaaaggatagagatg

SEQ ID NO: 631307 - DNA, 33 bp, Homo sapien
acccgaagaagccctacggatagtacaaatgtc

SEQ ID NO: 631308 - DNA, 33 bp, Homo sapien
acccgaagaagccctatggatagtacaaatgtc

SEQ ID NO: 631309 - DNA, 33 bp, Homo sapien
tgctaacatcaaaaaaagtgatctataaccaga

SEQ ID NO: 631310 - DNA, 33 bp, Homo sapien
tgctaacatcaaaaaaggtgatctataaccaga

SEQ ID NO: 631311 - DNA, 33 bp, Homo sapien
aaaaggttcacctcaccgtgaagatattacact

SEQ ID NO: 631312 - DNA, 33 bp, Homo sapien
aaaaggttcacctcactgtgaagatattacact

SEQ ID NO: 631313 - DNA, 33 bp, Homo sapien
ctgcatggagcttcgacattaaataagctatct

SEQ ID NO: 631314 - DNA, 33 bp, Homo sapien
ctgcatggagcttcgatattaaataagctatct

SEQ ID NO: 631315 - DNA, 33 bp, Homo sapien
caccatttcacctaggaaacacagctttatgga

SEQ ID NO: 631316 - DNA, 33 bp, Homo sapien
caccatttcacctagggaacacagctttatgga

SEQ ID NO: 631317 - DNA, 33 bp, Homo sapien
tgtggcttccagagctaacacctctgttttttt

SEQ ID NO: 631318 - DNA, 33 bp, Homo sapien
tgtggcttccagagctgacacctctgttttttt

SEQ ID NO: 631319 - DNA, 33 bp, Homo sapien
ttctatactatatctaagcagcgccctgaggag

SEQ ID NO: 631320 - DNA, 33 bp, Homo sapien
ttctatactatatctaggcagcgccctgaggag

SEQ ID NO: 631321 - DNA, 33 bp, Homo sapien
ttttgttgcagaataaaccctgacccccaaatc

SEQ ID NO: 631322 - DNA, 33 bp, Homo sapien
ttttgttgcagaataatccctgacccccaaatc

SEQ ID NO: 631323 - DNA, 33 bp, Homo sapien
aagtgcttgatttaacacccttcccttatgagt

SEQ ID NO: 631324 - DNA, 33 bp, Homo sapien
aagtgcttgatttaacgcccttcccttatgagt

SEQ ID NO: 631325 - DNA, 33 bp, Homo sapien
atgccccctatatgccaatctcagtattccggg

SEQ ID NO: 631326 - DNA, 33 bp, Homo sapien
atgccccctatatgcctatctcagtattccggg

SEQ ID NO: 631327 - DNA, 33 bp, Homo sapien
tgtaaacttagacttccacaaacttgatcaaat

SEQ ID NO: 631328 - DNA, 33 bp, Homo sapien
tgtaaacttagacttctacaaacttgatcaaat

SEQ ID NO: 631329 - DNA, 33 bp, Homo sapien
ttcctgttagagtgggaacttgtgaggtgcagg

SEQ ID NO: 631330 - DNA, 33 bp, Homo sapien
ttcctgttagagtggggacttgtgaggtgcagg

SEQ ID NO: 631331 - DNA, 33 bp, Homo sapien
cttgagggctattggacacagggtctcagttga

SEQ ID NO: 631332 - DNA, 33 bp, Homo sapien
cttgagggctattggatacagggtctcagttga

SEQ ID NO: 631333 - DNA, 33 bp, Homo sapien
ctggagaaagagtctgcaaaacatgcctagtct

SEQ ID NO: 631334 - DNA, 33 bp, Homo sapien
ctggagaaagagtctggaaaacatgcctagtct

SEQ ID NO: 631335 - DNA, 33 bp, Homo sapien
gaatagtgaggatttcaaaaagcggagcagctc

SEQ ID NO: 631336 - DNA, 33 bp, Homo sapien
gaatagtgaggatttcgaaaagcggagcagctc

SEQ ID NO: 631337 - DNA, 33 bp, Homo sapien
acctgtcgtctcagaacgctgtggtcaccttgt

SEQ ID NO: 631338 - DNA, 33 bp, Homo sapien
acctgtcgtctcagaatgctgtggtcaccttgt

SEQ ID NO: 631339 - DNA, 33 bp, Homo sapien
cttcctcaagatcaccactgaagagagaatcct

SEQ ID NO: 631340 - DNA, 33 bp, Homo sapien
cttcctcaagatcaccgctgaagagagaatcct

SEQ ID NO: 631341 - DNA, 33 bp, Homo sapien
ccactgcactctaacccgggcgataaagtgaga

SEQ ID NO: 631342 - DNA, 33 bp, Homo sapien
ccactgcactctaacctgggcgataaagtgaga

SEQ ID NO: 631343 - DNA, 33 bp, Homo sapien
acagaccataataacaagaacagccatcaggcc

SEQ ID NO: 631344 - DNA, 33 bp, Homo sapien
acagaccataataacaggaacagccatcaggcc

SEQ ID NO: 631345 - DNA, 33 bp, Homo sapien
tagactcaatgaactaacaagaatggagcactt

SEQ ID NO: 631346 - DNA, 33 bp, Homo sapien
tagactcaatgaactagcaagaatggagcactt

SEQ ID NO: 631347 - DNA, 33 bp, Homo sapien
tgcactgattactaaacaaggacagacacgaga

SEQ ID NO: 631348 - DNA, 33 bp, Homo sapien
tgcactgattactaaataaggacagacacgaga

SEQ ID NO: 631349 - DNA, 33 bp, Homo sapien
aatattctggatacaaattctatgttcattgtg

SEQ ID NO: 631350 - DNA, 33 bp, Homo sapien
aatattctggatacaagttctatgttcattgtg

SEQ ID NO: 631351 - DNA, 33 bp, Homo sapien
caggcatacacgtcccactctctcaagaatgcc

SEQ ID NO: 631352 - DNA, 33 bp, Homo sapien
caggcatacacgtcccgctctctcaagaatgcc

SEQ ID NO: 631353 - DNA, 33 bp, Homo sapien
cttcccagggacctacagacagggtgtgtgaga

SEQ ID NO: 631354 - DNA, 33 bp, Homo sapien
cttcccagggacctacggacagggtgtgtgaga

SEQ ID NO: 631355 - DNA, 33 bp, Homo sapien
cagctcgttctacagaaccacagagagaagtca

SEQ ID NO: 631356 - DNA, 33 bp, Homo sapien
cagctcgttctacagacccacagagagaagtca

SEQ ID NO: 631357 - DNA, 33 bp, Homo sapien
ggactaatggctcacagctatttctgagtcctt

SEQ ID NO: 631358 - DNA, 33 bp, Homo sapien
ggactaatggctcacatctatttctgagtcctt

SEQ ID NO: 631359 - DNA, 33 bp, Homo sapien
aatgctgacagctgtaactcttctcagcctggc

SEQ ID NO: 631360 - DNA, 33 bp, Homo sapien
aatgctgacagctgtatctcttctcagcctggc

SEQ ID NO: 631361 - DNA, 33 bp, Homo sapien
ccccattagacttgtcaccatcttccctttaga

SEQ ID NO: 631362 - DNA, 33 bp, Homo sapien
ccccattagacttgtctccatcttccctttaga

SEQ ID NO: 631363 - DNA, 33 bp, Homo sapien
ggggcttgacctgtgaagagaagttgaggctca

SEQ ID NO: 631364 - DNA, 33 bp, Homo sapien
ggggcttgacctgtgaggagaagttgaggctca

SEQ ID NO: 631365 - DNA, 33 bp, Homo sapien
tcatgctgttttgtaacattttttcatgagccg

SEQ ID NO: 631366 - DNA, 33 bp, Homo sapien
tcatgctgttttgtaatattttttcatgagccg

SEQ ID NO: 631367 - DNA, 33 bp, Homo sapien
cgcatcagagacaactcagtctttcccatccag

SEQ ID NO: 631368 - DNA, 33 bp, Homo sapien
cgcatcagagacaacttagtctttcccatccag

SEQ ID NO: 631369 - DNA, 33 bp, Homo sapien
ctctttttgaagtctacagagtcatgttcatct

SEQ ID NO: 631370 - DNA, 33 bp, Homo sapien
ctctttttgaagtctagagagtcatgttcatct

SEQ ID NO: 631371 - DNA, 33 bp, Homo sapien
atcacataataaaggagaaagtccaggaagaca

SEQ ID NO: 631372 - DNA, 33 bp, Homo sapien
atcacataataaaggataaagtccaggaagaca

SEQ ID NO: 631373 - DNA, 33 bp, Homo sapien
gctcacagatctctctcagaacactgctctgcg

SEQ ID NO: 631374 - DNA, 33 bp, Homo sapien
gctcacagatctctcttagaacactgctctgcg

SEQ ID NO: 631375 - DNA, 33 bp, Homo sapien
cctgctgtccctcagcaatgggcctaattcgaa

SEQ ID NO: 631376 - DNA, 33 bp, Homo sapien
cctgctgtccctcagcgatgggcctaattcgaa

SEQ ID NO: 631377 - DNA, 33 bp, Homo sapien
ccccttgccctgacacaaaaaccaagaaagcac

SEQ ID NO: 631378 - DNA, 33 bp, Homo sapien
ccccttgccctgacacgaaaaccaagaaagcac

SEQ ID NO: 631379 - DNA, 33 bp, Homo sapien
ctctccatgccatccactcaatccctcaagtgt

SEQ ID NO: 631380 - DNA, 33 bp, Homo sapien
ctctccatgccatccattcaatccctcaagtgt

SEQ ID NO: 631381 - DNA, 33 bp, Homo sapien
cgtggaggagagcgctcaacccagtatcgatat

SEQ ID NO: 631382 - DNA, 33 bp, Homo sapien
cgtggaggagagcgctgaacccagtatcgatat

SEQ ID NO: 631383 - DNA, 33 bp, Homo sapien
ccacatctggctgttacaagtgttattgttgag

SEQ ID NO: 631384 - DNA, 33 bp, Homo sapien
ccacatctggctgttataagtgttattgttgag

SEQ ID NO: 631385 - DNA, 33 bp, Homo sapien
aatatgtgttacctccaatagttgcttcagggt

SEQ ID NO: 631386 - DNA, 33 bp, Homo sapien
aatatgtgttacctccgatagttgcttcagggt

SEQ ID NO: 631387 - DNA, 33 bp, Homo sapien
catactctggacctaccgagccaggggtgttct

SEQ ID NO: 631388 - DNA, 33 bp, Homo sapien
catactctggacctactgagccaggggtgttct

SEQ ID NO: 631389 - DNA, 33 bp, Homo sapien
atgccaattaagtcacaggaaactcttctaaaa

SEQ ID NO: 631390 - DNA, 33 bp, Homo sapien
atgccaattaagtcacgggaaactcttctaaaa

SEQ ID NO: 631391 - DNA, 33 bp, Homo sapien
ggtggaggtatagtggcatccttttgtggttta

SEQ ID NO: 631392 - DNA, 33 bp, Homo sapien
ggtggaggtatagtggtatccttttgtggttta

SEQ ID NO: 631393 - DNA, 33 bp, Homo sapien
acccagctggcctggactccactggcaccacac

SEQ ID NO: 631394 - DNA, 33 bp, Homo sapien
acccagctggcctggattccactggcaccacac

SEQ ID NO: 631395 - DNA, 33 bp, Homo sapien
tcctccagagatgcaccgtcgaataaggcaatc

SEQ ID NO: 631396 - DNA, 33 bp, Homo sapien
tcctccagagatgcactgtcgaataaggcaatc

SEQ ID NO: 631397 - DNA, 33 bp, Homo sapien
gcccaattcagggcaaacgctcaggaaagcttg

SEQ ID NO: 631398 - DNA, 33 bp, Homo sapien
gcccaattcagggcaatcgctcaggaaagcttg

SEQ ID NO: 631399 - DNA, 33 bp, Homo sapien
cgggcaagatggaggcaactacggctggtgtgg

SEQ ID NO: 631400 - DNA, 33 bp, Homo sapien
cgggcaagatggaggcgactacggctggtgtgg

SEQ ID NO: 631401 - DNA, 33 bp, Homo sapien
gggacaccggccttccacattcccacaaccttc

SEQ ID NO: 631402 - DNA, 33 bp, Homo sapien
gggacaccggccttccgcattcccacaaccttc

SEQ ID NO: 631403 - DNA, 33 bp, Homo sapien
tgcccctcagtcaagccagtcactcaaaatgtg

SEQ ID NO: 631404 - DNA, 33 bp, Homo sapien
tgcccctcagtcaagctagtcactcaaaatgtg

SEQ ID NO: 631405 - DNA, 33 bp, Homo sapien
agtttagggacagagacaagagaagacatcttg

SEQ ID NO: 631406 - DNA, 33 bp, Homo sapien
agtttagggacagagagaagagaagacatcttg

SEQ ID NO: 631407 - DNA, 33 bp, Homo sapien
gcatctccacccatcccggagacacaggaggta

SEQ ID NO: 631408 - DNA, 33 bp, Homo sapien
gcatctccacccatcctggagacacaggaggta

SEQ ID NO: 631409 - DNA, 33 bp, Homo sapien
tggaggtgggcctacaagtgtccattccccatc

SEQ ID NO: 631410 - DNA, 33 bp, Homo sapien
tggaggtgggcctacacgtgtccattccccatc

SEQ ID NO: 631411 - DNA, 33 bp, Homo sapien
cagtggctgactccaaagaagaggtgttcagca

SEQ ID NO: 631412 - DNA, 33 bp, Homo sapien
cagtggctgactccaaggaagaggtgttcagca

SEQ ID NO: 631413 - DNA, 33 bp, Homo sapien
gcgtgcgcaccagtggcaccagccaggagcagc

SEQ ID NO: 631414 - DNA, 33 bp, Homo sapien
gcgtgcgcaccagtggtaccagccaggagcagc

SEQ ID NO: 631415 - DNA, 33 bp, Homo sapien
agccccaggagtattaaccactaacagagccat

SEQ ID NO: 631416 - DNA, 33 bp, Homo sapien
agccccaggagtattacccactaacagagccat

SEQ ID NO: 631417 - DNA, 33 bp, Homo sapien
gctctgttctggggaagaaaaccgaagatccag

SEQ ID NO: 631418 - DNA, 33 bp, Homo sapien
gctctgttctggggaataaaaccgaagatccag

SEQ ID NO: 631419 - DNA, 33 bp, Homo sapien
agtagggatccaaagggcagaaccactcctcac

SEQ ID NO: 631420 - DNA, 33 bp, Homo sapien
agtagggatccaaaggtcagaaccactcctcac

SEQ ID NO: 631421 - DNA, 33 bp, Homo sapien
cacaggctgtgtaacaaaacagaatcacccttt

SEQ ID NO: 631422 - DNA, 33 bp, Homo sapien
cacaggctgtgtaacacaacagaatcacccttt

SEQ ID NO: 631423 - DNA, 33 bp, Homo sapien
ttgttggtgacattgagatggtcgagctagtct

SEQ ID NO: 631424 - DNA, 33 bp, Homo sapien
ttgttggtgacattgatatggtcgagctagtct

SEQ ID NO: 631425 - DNA, 33 bp, Homo sapien
tcttgagtatagagaaattaatctgattgattg

SEQ ID NO: 631426 - DNA, 33 bp, Homo sapien
tcttgagtatagagaagttaatctgattgattg

SEQ ID NO: 631427 - DNA, 33 bp, Homo sapien
ctatttgctaaggaaaaacctatacgagatttt

SEQ ID NO: 631428 - DNA, 33 bp, Homo sapien
ctatttgctaaggaaagacctatacgagatttt

SEQ ID NO: 631429 - DNA, 33 bp, Homo sapien
ccagacagtctaactcaagagcacttttatctt

SEQ ID NO: 631430 - DNA, 33 bp, Homo sapien
ccagacagtctaactcgagagcacttttatctt

SEQ ID NO: 631431 - DNA, 33 bp, Homo sapien
gaaaacaaatagataaccgcctgcctgaacttt

SEQ ID NO: 631432 - DNA, 33 bp, Homo sapien
gaaaacaaatagataatcgcctgcctgaacttt

SEQ ID NO: 631433 - DNA, 33 bp, Homo sapien
gttttggaataatccacagtcataactggcata

SEQ ID NO: 631434 - DNA, 33 bp, Homo sapien
gttttggaataatccagagtcataactggcata

SEQ ID NO: 631435 - DNA, 33 bp, Homo sapien
ctggtctagtaacttactaaaagctgtttggct

SEQ ID NO: 631436 - DNA, 33 bp, Homo sapien
ctggtctagtaacttattaaaagctgtttggct

SEQ ID NO: 631437 - DNA, 33 bp, Homo sapien
gacagtaacagtaggacaaagtataaatatata

SEQ ID NO: 631438 - DNA, 33 bp, Homo sapien
gacagtaacagtaggagaaagtataaatatata

SEQ ID NO: 631439 - DNA, 33 bp, Homo sapien
gttccctgactcacatcagctacaactcccacc

SEQ ID NO: 631440 - DNA, 33 bp, Homo sapien
gttccctgactcacatgagctacaactcccacc

SEQ ID NO: 631441 - DNA, 33 bp, Homo sapien
catgaagaaagaggaggaatccaatgacaattt

SEQ ID NO: 631442 - DNA, 33 bp, Homo sapien
catgaagaaagaggagtaatccaatgacaattt

SEQ ID NO: 631443 - DNA, 33 bp, Homo sapien
gtagaaggacccataaacattattcataaaacc

SEQ ID NO: 631444 - DNA, 33 bp, Homo sapien
gtagaaggacccataagcattattcataaaacc

SEQ ID NO: 631445 - DNA, 33 bp, Homo sapien
attctatttggttctaaaaccagcttttctaat

SEQ ID NO: 631446 - DNA, 33 bp, Homo sapien
attctatttggttctataaccagcttttctaat

SEQ ID NO: 631447 - DNA, 33 bp, Homo sapien
atacatacaactactacatatcaattttaaaaa

SEQ ID NO: 631448 - DNA, 33 bp, Homo sapien
atacatacaactactagatatcaattttaaaaa

SEQ ID NO: 631449 - DNA, 33 bp, Homo sapien
actgcactgattatccagaagcagaacagagag

SEQ ID NO: 631450 - DNA, 33 bp, Homo sapien
actgcactgattatccggaagcagaacagagag

SEQ ID NO: 631451 - DNA, 33 bp, Homo sapien
agtgaagcctttcagcccaaacctgtggagact

SEQ ID NO: 631452 - DNA, 33 bp, Homo sapien
agtgaagcctttcagctcaaacctgtggagact

SEQ ID NO: 631453 - DNA, 33 bp, Homo sapien
ccactgaccccctgcaggaccactgacagatct

SEQ ID NO: 631454 - DNA, 33 bp, Homo sapien
ccactgaccccctgcatgaccactgacagatct

SEQ ID NO: 631455 - DNA, 33 bp, Homo sapien
atactcatacgaatacccatattcattcacaaa

SEQ ID NO: 631456 - DNA, 33 bp, Homo sapien
atactcatacgaatactcatattcattcacaaa

SEQ ID NO: 631457 - DNA, 33 bp, Homo sapien
caagagtctttacatcagaagttctcatcaaga

SEQ ID NO: 631458 - DNA, 33 bp, Homo sapien
caagagtctttacatcggaagttctcatcaaga

SEQ ID NO: 631459 - DNA, 33 bp, Homo sapien
gatgtggatttttgcacctggaaaccaagtgtc

SEQ ID NO: 631460 - DNA, 33 bp, Homo sapien
gatgtggatttttgcatctggaaaccaagtgtc

SEQ ID NO: 631461 - DNA, 33 bp, Homo sapien
tagtggagtagcagacaataaacagatggaaga

SEQ ID NO: 631462 - DNA, 33 bp, Homo sapien
tagtggagtagcagaccataaacagatggaaga

SEQ ID NO: 631463 - DNA, 33 bp, Homo sapien
gtcctactccccttaccggtctgagcaggatgt

SEQ ID NO: 631464 - DNA, 33 bp, Homo sapien
gtcctactccccttactggtctgagcaggatgt

SEQ ID NO: 631465 - DNA, 33 bp, Homo sapien
gatctgccaccttctaaacctgtgttgtctaat

SEQ ID NO: 631466 - DNA, 33 bp, Homo sapien
gatctgccaccttctagacctgtgttgtctaat

SEQ ID NO: 631467 - DNA, 33 bp, Homo sapien
caaagtgccccaataccggaagaggatttatat

SEQ ID NO: 631468 - DNA, 33 bp, Homo sapien
caaagtgccccaatactggaagaggatttatat

SEQ ID NO: 631469 - DNA, 33 bp, Homo sapien
actttttcagtagtgaaattgtaggtgattgtg

SEQ ID NO: 631470 - DNA, 33 bp, Homo sapien
actttttcagtagtgacattgtaggtgattgtg

SEQ ID NO: 631471 - DNA, 33 bp, Homo sapien
aaagggcctgggctaagtaatgtcagttcagtt

SEQ ID NO: 631472 - DNA, 33 bp, Homo sapien
aaagggcctgggctaattaatgtcagttcagtt

SEQ ID NO: 631473 - DNA, 33 bp, Homo sapien
tgttgatttttgtcaacctactcaccttattct

SEQ ID NO: 631474 - DNA, 33 bp, Homo sapien
tgttgatttttgtcaatctactcaccttattct

SEQ ID NO: 631475 - DNA, 33 bp, Homo sapien
caagacaagcaaagaccacctcagctagtgtag

SEQ ID NO: 631476 - DNA, 33 bp, Homo sapien
caagacaagcaaagactacctcagctagtgtag

SEQ ID NO: 631477 - DNA, 33 bp, Homo sapien
actatttattgagcgcaaagtttattctagaac

SEQ ID NO: 631478 - DNA, 33 bp, Homo sapien
actatttattgagcgctaagtttattctagaac

SEQ ID NO: 631479 - DNA, 33 bp, Homo sapien
aggaaaggactctcaacgcgttcttgggagggg

SEQ ID NO: 631480 - DNA, 33 bp, Homo sapien
aggaaaggactctcaatgcgttcttgggagggg

SEQ ID NO: 631481 - DNA, 33 bp, Homo sapien
ttgcctgttgggaaacacttcagtcacactttt

SEQ ID NO: 631482 - DNA, 33 bp, Homo sapien
ttgcctgttgggaaactcttcagtcacactttt

SEQ ID NO: 631483 - DNA, 33 bp, Homo sapien
agtgtgagaacagacactcatagctcatggcat

SEQ ID NO: 631484 - DNA, 33 bp, Homo sapien
agtgtgagaacagacattcatagctcatggcat

SEQ ID NO: 631485 - DNA, 33 bp, Homo sapien
aaggacagcatagaaacatgtgatctgcagtgt

SEQ ID NO: 631486 - DNA, 33 bp, Homo sapien
aaggacagcatagaaatatgtgatctgcagtgt

SEQ ID NO: 631487 - DNA, 33 bp, Homo sapien
gcttctccctcaaaaacgggaaacaggtgtgac

SEQ ID NO: 631488 - DNA, 33 bp, Homo sapien
gcttctccctcaaaaatgggaaacaggtgtgac

SEQ ID NO: 631489 - DNA, 33 bp, Homo sapien
ggccctgctggtagaaactggggatctggggtt

SEQ ID NO: 631490 - DNA, 33 bp, Homo sapien
ggccctgctggtagaagctggggatctggggtt

SEQ ID NO: 631491 - DNA, 33 bp, Homo sapien
aataacacatctactaagggcaaagcactgtgg

SEQ ID NO: 631492 - DNA, 33 bp, Homo sapien
aataacacatctactatgggcaaagcactgtgg

SEQ ID NO: 631493 - DNA, 33 bp, Homo sapien
gcctcattccatcctcaataaatctttctaaag

SEQ ID NO: 631494 - DNA, 33 bp, Homo sapien
gcctcattccatcctcgataaatctttctaaag

SEQ ID NO: 631495 - DNA, 33 bp, Homo sapien
tttgccagcatcagcaataagactggtaatggg

SEQ ID NO: 631496 - DNA, 33 bp, Homo sapien
tttgccagcatcagcagtaagactggtaatggg

SEQ ID NO: 631497 - DNA, 33 bp, Homo sapien
aaatacaaaccaaaaaacagcccttcagcttcc

SEQ ID NO: 631498 - DNA, 33 bp, Homo sapien
aaatacaaaccaaaaatcagcccttcagcttcc

SEQ ID NO: 631499 - DNA, 33 bp, Homo sapien
tgcttgcaagagggtcacaaaagatgacaaaag

SEQ ID NO: 631500 - DNA, 33 bp, Homo sapien
tgcttgcaagagggtcgcaaaagatgacaaaag

SEQ ID NO: 631501 - DNA, 33 bp, Homo sapien
ccagctacctcactgacgtggagttctaactgg

SEQ ID NO: 631502 - DNA, 33 bp, Homo sapien
ccagctacctcactgatgtggagttctaactgg

SEQ ID NO: 631503 - DNA, 33 bp, Homo sapien
ttttaacttctcccaactaaatattcaggtaaa

SEQ ID NO: 631504 - DNA, 33 bp, Homo sapien
ttttaacttctcccaattaaatattcaggtaaa

SEQ ID NO: 631505 - DNA, 33 bp, Homo sapien
aactgagtggctatcaccatccaagactgctgc

SEQ ID NO: 631506 - DNA, 33 bp, Homo sapien
aactgagtggctatcatcatccaagactgctgc

SEQ ID NO: 631507 - DNA, 33 bp, Homo sapien
accagtctttagtttccataaaggattaacctc

SEQ ID NO: 631508 - DNA, 33 bp, Homo sapien
accagtctttagtttcgataaaggattaacctc

SEQ ID NO: 631509 - DNA, 33 bp, Homo sapien
tgtcctgacttctagcaccgtagactagttggg

SEQ ID NO: 631510 - DNA, 33 bp, Homo sapien
tgtcctgacttctagcgccgtagactagttggg

SEQ ID NO: 631511 - DNA, 33 bp, Homo sapien
caccccaccttttacaatcattttgcctcttac

SEQ ID NO: 631512 - DNA, 33 bp, Homo sapien
caccccaccttttacagtcattttgcctcttac

SEQ ID NO: 631513 - DNA, 33 bp, Homo sapien
gatggcccttatggagacaactggtagcctgtt

SEQ ID NO: 631514 - DNA, 33 bp, Homo sapien
gatggcccttatggagccaactggtagcctgtt

SEQ ID NO: 631515 - DNA, 33 bp, Homo sapien
tataatgtaaacatacaagtcacatcccttctg

SEQ ID NO: 631516 - DNA, 33 bp, Homo sapien
tataatgtaaacatacgagtcacatcccttctg

SEQ ID NO: 631517 - DNA, 33 bp, Homo sapien
ttggaagaactgaacccactactgctgacaaaa

SEQ ID NO: 631518 - DNA, 33 bp, Homo sapien
ttggaagaactgaacctactactgctgacaaaa

SEQ ID NO: 631519 - DNA, 33 bp, Homo sapien
acaaaagcccacagtaagctgttatatttatga

SEQ ID NO: 631520 - DNA, 33 bp, Homo sapien
acaaaagcccacagtaggctgttatatttatga

SEQ ID NO: 631521 - DNA, 33 bp, Homo sapien
ttttaaaatgcagaataaaaaaacagctctagg

SEQ ID NO: 631522 - DNA, 33 bp, Homo sapien
ttttaaaatgcagaattaaaaaacagctctagg

SEQ ID NO: 631523 - DNA, 33 bp, Homo sapien
ccatgttcctagcagacctcttcatgacctggt

SEQ ID NO: 631524 - DNA, 33 bp, Homo sapien
ccatgttcctagcagagctcttcatgacctggt

SEQ ID NO: 631525 - DNA, 33 bp, Homo sapien
gaaaatgctgggtcacaggcaaagtatctccac

SEQ ID NO: 631526 - DNA, 33 bp, Homo sapien
gaaaatgctgggtcacgggcaaagtatctccac

SEQ ID NO: 631527 - DNA, 33 bp, Homo sapien
tgctgcacaagtcgaccattaacaggtgagggc

SEQ ID NO: 631528 - DNA, 33 bp, Homo sapien
tgctgcacaagtcgactattaacaggtgagggc

SEQ ID NO: 631529 - DNA, 33 bp, Homo sapien
ctgattgacagtgacacgttgtgaaaattgtct

SEQ ID NO: 631530 - DNA, 33 bp, Homo sapien
ctgattgacagtgacaggttgtgaaaattgtct

SEQ ID NO: 631531 - DNA, 33 bp, Homo sapien
ggctctacaaaatggcagatgggctattacctg

SEQ ID NO: 631532 - DNA, 33 bp, Homo sapien
ggctctacaaaatggcggatgggctattacctg

SEQ ID NO: 631533 - DNA, 33 bp, Homo sapien
tctgatgtggaacttactaactccttcaatgaa

SEQ ID NO: 631534 - DNA, 33 bp, Homo sapien
tctgatgtggaacttattaactccttcaatgaa

SEQ ID NO: 631535 - DNA, 33 bp, Homo sapien
cacacatatacaccctcaatttactgacatggt

SEQ ID NO: 631536 - DNA, 33 bp, Homo sapien
cacacatatacacccttaatttactgacatggt

SEQ ID NO: 631537 - DNA, 33 bp, Homo sapien
tgccttggtattttccacttcttcagaatataa

SEQ ID NO: 631538 - DNA, 33 bp, Homo sapien
tgccttggtattttccgcttcttcagaatataa

SEQ ID NO: 631539 - DNA, 33 bp, Homo sapien
ggtggctttgtcctcacaaacagaggtagccct

SEQ ID NO: 631540 - DNA, 33 bp, Homo sapien
ggtggctttgtcctcagaaacagaggtagccct

SEQ ID NO: 631541 - DNA, 33 bp, Homo sapien
agaggatatttctgtggatgatataatgtcatt

SEQ ID NO: 631542 - DNA, 33 bp, Homo sapien
agaggatatttctgtgtatgatataatgtcatt

SEQ ID NO: 631543 - DNA, 33 bp, Homo sapien
ctgctctcatggaactcagatcaccaccatcac

SEQ ID NO: 631544 - DNA, 33 bp, Homo sapien
ctgctctcatggaacttagatcaccaccatcac

SEQ ID NO: 631545 - DNA, 33 bp, Homo sapien
gttaagaactcaaatacgggcctggtatagagg

SEQ ID NO: 631546 - DNA, 33 bp, Homo sapien
gttaagaactcaaatatgggcctggtatagagg

SEQ ID NO: 631547 - DNA, 33 bp, Homo sapien
attatggttaagtaaaaaacattcttcaagtca

SEQ ID NO: 631548 - DNA, 33 bp, Homo sapien
attatggttaagtaaagaacattcttcaagtca

SEQ ID NO: 631549 - DNA, 33 bp, Homo sapien
tgctaccctgagaccacaatacaggctaagttg

SEQ ID NO: 631550 - DNA, 33 bp, Homo sapien
tgctaccctgagaccataatacaggctaagttg

SEQ ID NO: 631551 - DNA, 33 bp, Homo sapien
tgtaacctatgttgcaaaaaaaagctcggaaga

SEQ ID NO: 631552 - DNA, 33 bp, Homo sapien
tgtaacctatgttgcacaaaaaagctcggaaga

SEQ ID NO: 631553 - DNA, 33 bp, Homo sapien
cgtacaaattcaattcgaatgttgtggtgctct

SEQ ID NO: 631554 - DNA, 33 bp, Homo sapien
cgtacaaattcaattctaatgttgtggtgctct

SEQ ID NO: 631555 - DNA, 33 bp, Homo sapien
ctgaacagctattggaaccacgctgtaaattgg

SEQ ID NO: 631556 - DNA, 33 bp, Homo sapien
ctgaacagctattggagccacgctgtaaattgg

SEQ ID NO: 631557 - DNA, 33 bp, Homo sapien
agttcagcttgatgtagaacaggcctctgaaag

SEQ ID NO: 631558 - DNA, 33 bp, Homo sapien
agttcagcttgatgtataacaggcctctgaaag

SEQ ID NO: 631559 - DNA, 33 bp, Homo sapien
acggtaaacaataacacggcgaatattttcatg

SEQ ID NO: 631560 - DNA, 33 bp, Homo sapien
acggtaaacaataacatggcgaatattttcatg

SEQ ID NO: 631561 - DNA, 33 bp, Homo sapien
tggggggggagggaaacttgcaggagtttaagt

SEQ ID NO: 631562 - DNA, 33 bp, Homo sapien
tggggggggagggaaatttgcaggagtttaagt

SEQ ID NO: 631563 - DNA, 33 bp, Homo sapien
aaccgaatctttctgagaaatgaaaaatagtat

SEQ ID NO: 631564 - DNA, 33 bp, Homo sapien
aaccgaatctttctgataaatgaaaaatagtat

SEQ ID NO: 631565 - DNA, 33 bp, Homo sapien
cttgagcaacaaaatacagtactggattataag

SEQ ID NO: 631566 - DNA, 33 bp, Homo sapien
cttgagcaacaaaatatagtactggattataag

SEQ ID NO: 631567 - DNA, 33 bp, Homo sapien
agccatctaactacaaaggagctcaaagccaat

SEQ ID NO: 631568 - DNA, 33 bp, Homo sapien
agccatctaactacaagggagctcaaagccaat

SEQ ID NO: 631569 - DNA, 33 bp, Homo sapien
tctgaaaagctgtatgccaacaccaagtggcat

SEQ ID NO: 631570 - DNA, 33 bp, Homo sapien
tctgaaaagctgtatgtcaacaccaagtggcat

SEQ ID NO: 631571 - DNA, 33 bp, Homo sapien
gcatcggccgccttgcagagcactgggacaggt

SEQ ID NO: 631572 - DNA, 33 bp, Homo sapien
gcatcggccgccttgccgagcactgggacaggt

SEQ ID NO: 631573 - DNA, 33 bp, Homo sapien
acaaagcagcacagaacggtgggaagggtgctg

SEQ ID NO: 631574 - DNA, 33 bp, Homo sapien
acaaagcagcacagaatggtgggaagggtgctg

SEQ ID NO: 631575 - DNA, 33 bp, Homo sapien
ctggtgtgtgaaatataagtgttgattttttgt

SEQ ID NO: 631576 - DNA, 33 bp, Homo sapien
ctggtgtgtgaaatatgagtgttgattttttgt

SEQ ID NO: 631577 - DNA, 33 bp, Homo sapien
ttcacctcaggataaaattacatatgaaaatgg

SEQ ID NO: 631578 - DNA, 33 bp, Homo sapien
ttcacctcaggataaagttacatatgaaaatgg

SEQ ID NO: 631579 - DNA, 33 bp, Homo sapien
ttgtcaagaatccacaagtcagtagttagactg

SEQ ID NO: 631580 - DNA, 33 bp, Homo sapien
ttgtcaagaatccacacgtcagtagttagactg

SEQ ID NO: 631581 - DNA, 33 bp, Homo sapien
ttctgaatggaacttccgaaaacattcacttgg

SEQ ID NO: 631582 - DNA, 33 bp, Homo sapien
ttctgaatggaacttctgaaaacattcacttgg

SEQ ID NO: 631583 - DNA, 33 bp, Homo sapien
acctattgaccaactacagtgtatagactttat

SEQ ID NO: 631584 - DNA, 33 bp, Homo sapien
acctattgaccaactatagtgtatagactttat

SEQ ID NO: 631585 - DNA, 33 bp, Homo sapien
ctctcctttccgtagacattggagggtggggct

SEQ ID NO: 631586 - DNA, 33 bp, Homo sapien
ctctcctttccgtagatattggagggtggggct

SEQ ID NO: 631587 - DNA, 33 bp, Homo sapien
ctagctgtcatctctccaaccttttaagactgt

SEQ ID NO: 631588 - DNA, 33 bp, Homo sapien
ctagctgtcatctctctaaccttttaagactgt

SEQ ID NO: 631589 - DNA, 33 bp, Homo sapien
gtctatgtaaattttacgttttagcaggcttcc

SEQ ID NO: 631590 - DNA, 33 bp, Homo sapien
gtctatgtaaattttatgttttagcaggcttcc

SEQ ID NO: 631591 - DNA, 33 bp, Homo sapien
gtttcacctaattccaacaatagatctgcgtaa

SEQ ID NO: 631592 - DNA, 33 bp, Homo sapien
gtttcacctaattccagcaatagatctgcgtaa

SEQ ID NO: 631593 - DNA, 33 bp, Homo sapien
cctaaaggatctttgcaccaatggtcttatctg

SEQ ID NO: 631594 - DNA, 33 bp, Homo sapien
cctaaaggatctttgccccaatggtcttatctg

SEQ ID NO: 631595 - DNA, 33 bp, Homo sapien
gttcaactttcatcccaactctgtctcagtact

SEQ ID NO: 631596 - DNA, 33 bp, Homo sapien
gttcaactttcatcccgactctgtctcagtact

SEQ ID NO: 631597 - DNA, 33 bp, Homo sapien
agtgaggattagcaacacctcgaatttctttct

SEQ ID NO: 631598 - DNA, 33 bp, Homo sapien
agtgaggattagcaacccctcgaatttctttct

SEQ ID NO: 631599 - DNA, 33 bp, Homo sapien
tatgtttacttctgaaacattaacctaacaggt

SEQ ID NO: 631600 - DNA, 33 bp, Homo sapien
tatgtttacttctgaagcattaacctaacaggt

SEQ ID NO: 631601 - DNA, 33 bp, Homo sapien
cgtagttctcggggcgaaatgcggcttgtgcag

SEQ ID NO: 631602 - DNA, 33 bp, Homo sapien
cgtagttctcggggcggaatgcggcttgtgcag

SEQ ID NO: 631603 - DNA, 33 bp, Homo sapien
aagaagctgagtcagaaaagaggtactcagggt

SEQ ID NO: 631604 - DNA, 33 bp, Homo sapien
aagaagctgagtcagagaagaggtactcagggt

SEQ ID NO: 631605 - DNA, 33 bp, Homo sapien
caggagagaaaccttacgcatgcatcgagtgtg

SEQ ID NO: 631606 - DNA, 33 bp, Homo sapien
caggagagaaaccttaggcatgcatcgagtgtg

SEQ ID NO: 631607 - DNA, 33 bp, Homo sapien
tccaagctcctaattcaccaggtcgcttttgct

SEQ ID NO: 631608 - DNA, 33 bp, Homo sapien
tccaagctcctaattcgccaggtcgcttttgct

SEQ ID NO: 631609 - DNA, 33 bp, Homo sapien
aaatggaaaggaatcacggtctcaatttttatt

SEQ ID NO: 631610 - DNA, 33 bp, Homo sapien
aaatggaaaggaatcatggtctcaatttttatt

SEQ ID NO: 631611 - DNA, 33 bp, Homo sapien
acggatgatgaaaccaatggacaaacaaccagc

SEQ ID NO: 631612 - DNA, 33 bp, Homo sapien
acggatgatgaaaccattggacaaacaaccagc

SEQ ID NO: 631613 - DNA, 33 bp, Homo sapien
gtggctgtggtctacactccctggggtcggggg

SEQ ID NO: 631614 - DNA, 33 bp, Homo sapien
gtggctgtggtctacattccctggggtcggggg

SEQ ID NO: 631615 - DNA, 33 bp, Homo sapien
aagcaataatagaaccaaatatcaagacaatgt

SEQ ID NO: 631616 - DNA, 33 bp, Homo sapien
aagcaataatagaaccgaatatcaagacaatgt

SEQ ID NO: 631617 - DNA, 33 bp, Homo sapien
caaacccctgctcctcactattccccttgggct

SEQ ID NO: 631618 - DNA, 33 bp, Homo sapien
caaacccctgctcctcgctattccccttgggct

SEQ ID NO: 631619 - DNA, 33 bp, Homo sapien
aggttccaatgcctggaagtagaagagagtgag

SEQ ID NO: 631620 - DNA, 33 bp, Homo sapien
aggttccaatgcctggcagtagaagagagtgag

SEQ ID NO: 631621 - DNA, 33 bp, Homo sapien
agcattcaaatttgtaccaattgtctataatta

SEQ ID NO: 631622 - DNA, 33 bp, Homo sapien
agcattcaaatttgtatcaattgtctataatta

SEQ ID NO: 631623 - DNA, 33 bp, Homo sapien
atgctcttatatttcactgaaacgtaaacatca

SEQ ID NO: 631624 - DNA, 33 bp, Homo sapien
atgctcttatatttcattgaaacgtaaacatca

SEQ ID NO: 631625 - DNA, 33 bp, Homo sapien
aataaagattcaagcaataagtgattttgtggt

SEQ ID NO: 631626 - DNA, 33 bp, Homo sapien
aataaagattcaagcagtaagtgattttgtggt

SEQ ID NO: 631627 - DNA, 33 bp, Homo sapien
tttccttttgcagatacatttgcccaccacaaa

SEQ ID NO: 631628 - DNA, 33 bp, Homo sapien
tttccttttgcagatatatttgcccaccacaaa

SEQ ID NO: 631629 - DNA, 33 bp, Homo sapien
atgacaccgtatttgacgtatagaacagttcca

SEQ ID NO: 631630 - DNA, 33 bp, Homo sapien
atgacaccgtatttgaggtatagaacagttcca

SEQ ID NO: 631631 - DNA, 33 bp, Homo sapien
ggcacttgatacaaacccaggcagtaagggaag

SEQ ID NO: 631632 - DNA, 33 bp, Homo sapien
ggcacttgatacaaactcaggcagtaagggaag

SEQ ID NO: 631633 - DNA, 33 bp, Homo sapien
gtgcactcagaaggtacatggctagaacagatc

SEQ ID NO: 631634 - DNA, 33 bp, Homo sapien
gtgcactcagaaggtatatggctagaacagatc

SEQ ID NO: 631635 - DNA, 33 bp, Homo sapien
gtggaatgggagagaagtatggacaggaggtct

SEQ ID NO: 631636 - DNA, 33 bp, Homo sapien
gtggaatgggagagaattatggacaggaggtct

SEQ ID NO: 631637 - DNA, 33 bp, Homo sapien
ctgctctctgcctgggcatgggatgaaagtgtt

SEQ ID NO: 631638 - DNA, 33 bp, Homo sapien
ctgctctctgcctgggtatgggatgaaagtgtt

SEQ ID NO: 631639 - DNA, 33 bp, Homo sapien
aaaaagataccaataaaatctacaaactacatt

SEQ ID NO: 631640 - DNA, 33 bp, Homo sapien
aaaaagataccaataacatctacaaactacatt

SEQ ID NO: 631641 - DNA, 33 bp, Homo sapien
ggctgctctgaatttaaaggctttgccaaagtc

SEQ ID NO: 631642 - DNA, 33 bp, Homo sapien
ggctgctctgaatttataggctttgccaaagtc

SEQ ID NO: 631643 - DNA, 33 bp, Homo sapien
attcgggcttcatgaacgagtttttgttaaaca

SEQ ID NO: 631644 - DNA, 33 bp, Homo sapien
attcgggcttcatgaatgagtttttgttaaaca

SEQ ID NO: 631645 - DNA, 33 bp, Homo sapien
aaaggtagacagaggaacactgccttctgatgg

SEQ ID NO: 631646 - DNA, 33 bp, Homo sapien
aaaggtagacagaggatcactgccttctgatgg

SEQ ID NO: 631647 - DNA, 33 bp, Homo sapien
agaacatcattccccagtgagcagagcctctgc

SEQ ID NO: 631648 - DNA, 33 bp, Homo sapien
agaacatcattccccattgagcagagcctctgc

SEQ ID NO: 631649 - DNA, 33 bp, Homo sapien
ctggacagacctgcttcaaatcctagctcagcc

SEQ ID NO: 631650 - DNA, 33 bp, Homo sapien
ctggacagacctgcttgaaatcctagctcagcc

SEQ ID NO: 631651 - DNA, 33 bp, Homo sapien
cccatggggagttgtcaagaaggcgcgaatcct

SEQ ID NO: 631652 - DNA, 33 bp, Homo sapien
cccatggggagttgtcgagaaggcgcgaatcct

SEQ ID NO: 631653 - DNA, 33 bp, Homo sapien
acgttacgtaagctcacggtctgtttcagtgga

SEQ ID NO: 631654 - DNA, 33 bp, Homo sapien
acgttacgtaagctcatggtctgtttcagtgga

SEQ ID NO: 631655 - DNA, 33 bp, Homo sapien
ggtcctctttgctgtcacagcttctgaaggttc

SEQ ID NO: 631656 - DNA, 33 bp, Homo sapien
ggtcctctttgctgtctcagcttctgaaggttc

SEQ ID NO: 631657 - DNA, 33 bp, Homo sapien
acacaggctgagatcccataacacccctgcagg

SEQ ID NO: 631658 - DNA, 33 bp, Homo sapien
acacaggctgagatcctataacacccctgcagg

SEQ ID NO: 631659 - DNA, 33 bp, Homo sapien
ctggtagtctccgtcagatagcttcccaagtgt

SEQ ID NO: 631660 - DNA, 33 bp, Homo sapien
ctggtagtctccgtcatatagcttcccaagtgt

SEQ ID NO: 631661 - DNA, 33 bp, Homo sapien
cagcaatctgacttaactgggatgattggaaca

SEQ ID NO: 631662 - DNA, 33 bp, Homo sapien
cagcaatctgacttaagtgggatgattggaaca

SEQ ID NO: 631663 - DNA, 33 bp, Homo sapien
gcccaggatggaaccaatctgttcttgttctag

SEQ ID NO: 631664 - DNA, 33 bp, Homo sapien
gcccaggatggaaccactctgttcttgttctag

SEQ ID NO: 631665 - DNA, 33 bp, Homo sapien
agacaagaaaaggaccccaaagacaattcaatc

SEQ ID NO: 631666 - DNA, 33 bp, Homo sapien
agacaagaaaaggacctcaaagacaattcaatc

SEQ ID NO: 631667 - DNA, 33 bp, Homo sapien
ctccagtagactttaaaccttgggaataatcct

SEQ ID NO: 631668 - DNA, 33 bp, Homo sapien
ctccagtagactttaagccttgggaataatcct

SEQ ID NO: 631669 - DNA, 33 bp, Homo sapien
gaaaaaaaacacttcacaaatggagaactggct

SEQ ID NO: 631670 - DNA, 33 bp, Homo sapien
gaaaaaaaacacttcagaaatggagaactggct

SEQ ID NO: 631671 - DNA, 33 bp, Homo sapien
tccttcctagtttaaaatgttggcacgcaggtg

SEQ ID NO: 631672 - DNA, 33 bp, Homo sapien
tccttcctagtttaaagtgttggcacgcaggtg

SEQ ID NO: 631673 - DNA, 33 bp, Homo sapien
tcactctgatgtcttacggcttctagtgtggct

SEQ ID NO: 631674 - DNA, 33 bp, Homo sapien
tcactctgatgtcttatggcttctagtgtggct

SEQ ID NO: 631675 - DNA, 33 bp, Homo sapien
tcccccacctatgaccaaacactgactatacag

SEQ ID NO: 631676 - DNA, 33 bp, Homo sapien
tcccccacctatgaccgaacactgactatacag

SEQ ID NO: 631677 - DNA, 33 bp, Homo sapien
agaagtgtgaacgactcacccagcagcatctag

SEQ ID NO: 631678 - DNA, 33 bp, Homo sapien
agaagtgtgaacgacttacccagcagcatctag

SEQ ID NO: 631679 - DNA, 33 bp, Homo sapien
acacattgcagctctcaaaacagagcacgtgga

SEQ ID NO: 631680 - DNA, 33 bp, Homo sapien
acacattgcagctctcgaaacagagcacgtgga

SEQ ID NO: 631681 - DNA, 33 bp, Homo sapien
agcaagtggagtttccagctctaggagttacag

SEQ ID NO: 631682 - DNA, 33 bp, Homo sapien
agcaagtggagtttccggctctaggagttacag

SEQ ID NO: 631683 - DNA, 33 bp, Homo sapien
agattctttctctggcactggagcacagacagc

SEQ ID NO: 631684 - DNA, 33 bp, Homo sapien
agattctttctctggcgctggagcacagacagc

SEQ ID NO: 631685 - DNA, 33 bp, Homo sapien
gcagaaggtgtaggaaagactcgggaggttagg

SEQ ID NO: 631686 - DNA, 33 bp, Homo sapien
gcagaaggtgtaggaaggactcgggaggttagg

SEQ ID NO: 631687 - DNA, 33 bp, Homo sapien
acctgacttcccgctacgaggtgccttgtgtcc

SEQ ID NO: 631688 - DNA, 33 bp, Homo sapien
acctgacttcccgctatgaggtgccttgtgtcc

SEQ ID NO: 631689 - DNA, 33 bp, Homo sapien
tacattctaaccattccaggctctatccagaag

SEQ ID NO: 631690 - DNA, 33 bp, Homo sapien
tacattctaaccattctaggctctatccagaag

SEQ ID NO: 631691 - DNA, 33 bp, Homo sapien
tgttcaatttgttacccaagattatcccactag

SEQ ID NO: 631692 - DNA, 33 bp, Homo sapien
tgttcaatttgttacctaagattatcccactag

SEQ ID NO: 631693 - DNA, 33 bp, Homo sapien
tatcttctgtttcagcagccttccccaatagct

SEQ ID NO: 631694 - DNA, 33 bp, Homo sapien
tatcttctgtttcagcggccttccccaatagct

SEQ ID NO: 631695 - DNA, 33 bp, Homo sapien
gtgcctggccaatgccaatttttgaaaacagat

SEQ ID NO: 631696 - DNA, 33 bp, Homo sapien
gtgcctggccaatgccgatttttgaaaacagat

SEQ ID NO: 631697 - DNA, 33 bp, Homo sapien
tgccacatttaggaacagaatattttgactcta

SEQ ID NO: 631698 - DNA, 33 bp, Homo sapien
tgccacatttaggaacggaatattttgactcta

SEQ ID NO: 631699 - DNA, 33 bp, Homo sapien
cctcttggtcattagacgttattgaacacctgc

SEQ ID NO: 631700 - DNA, 33 bp, Homo sapien
cctcttggtcattagatgttattgaacacctgc

SEQ ID NO: 631701 - DNA, 33 bp, Homo sapien
ctgtctacctcaggaaacatggaagtcatgtgt

SEQ ID NO: 631702 - DNA, 33 bp, Homo sapien
ctgtctacctcaggaaccatggaagtcatgtgt

SEQ ID NO: 631703 - DNA, 33 bp, Homo sapien
tagaggtgctgaagacaggaccactgccccctg

SEQ ID NO: 631704 - DNA, 33 bp, Homo sapien
tagaggtgctgaagacgggaccactgccccctg

SEQ ID NO: 631705 - DNA, 33 bp, Homo sapien
tgtaagagggaatatccaaatgctatgcctggt

SEQ ID NO: 631706 - DNA, 33 bp, Homo sapien
tgtaagagggaatatctaaatgctatgcctggt

SEQ ID NO: 631707 - DNA, 33 bp, Homo sapien
ttggacctgctttggcagaagttggttgacaag

SEQ ID NO: 631708 - DNA, 33 bp, Homo sapien
ttggacctgctttggcggaagttggttgacaag

SEQ ID NO: 631709 - DNA, 33 bp, Homo sapien
agtgaagagtgtggaaactatccaagaggcctt

SEQ ID NO: 631710 - DNA, 33 bp, Homo sapien
agtgaagagtgtggaagctatccaagaggcctt

SEQ ID NO: 631711 - DNA, 33 bp, Homo sapien
taactgcactgactaacccaaggatcacaaaaa

SEQ ID NO: 631712 - DNA, 33 bp, Homo sapien
taactgcactgactaatccaaggatcacaaaaa

SEQ ID NO: 631713 - DNA, 33 bp, Homo sapien
ctgctattaacaggcaccggccccagctcctgg

SEQ ID NO: 631714 - DNA, 33 bp, Homo sapien
ctgctattaacaggcatcggccccagctcctgg

SEQ ID NO: 631715 - DNA, 33 bp, Homo sapien
ttaaagaagtctgggactagttaggtgttctca

SEQ ID NO: 631716 - DNA, 33 bp, Homo sapien
ttaaagaagtctgggagtagttaggtgttctca

SEQ ID NO: 631717 - DNA, 33 bp, Homo sapien
gcaaacggacagataaacggacacttggacact

SEQ ID NO: 631718 - DNA, 33 bp, Homo sapien
gcaaacggacagataagcggacacttggacact

SEQ ID NO: 631719 - DNA, 33 bp, Homo sapien
aaggcagcagctcaaagctaggttggaaaggat

SEQ ID NO: 631720 - DNA, 33 bp, Homo sapien
aaggcagcagctcaaatctaggttggaaaggat

SEQ ID NO: 631721 - DNA, 33 bp, Homo sapien
ataagcagacctccatgacaatgcaatttagtt

SEQ ID NO: 631722 - DNA, 33 bp, Homo sapien
ataagcagacctccattacaatgcaatttagtt

SEQ ID NO: 631723 - DNA, 33 bp, Homo sapien
attgtgagccaaagaaacctttataatattaat

SEQ ID NO: 631724 - DNA, 33 bp, Homo sapien
attgtgagccaaagaagcctttataatattaat

SEQ ID NO: 631725 - DNA, 33 bp, Homo sapien
aaggcttcccgtaaccacgcgaggaaggcagaa

SEQ ID NO: 631726 - DNA, 33 bp, Homo sapien
aaggcttcccgtaaccgcgcgaggaaggcagaa

SEQ ID NO: 631727 - DNA, 33 bp, Homo sapien
ggttacagacaaactcagacatgttcagccctc

SEQ ID NO: 631728 - DNA, 33 bp, Homo sapien
ggttacagacaaactcggacatgttcagccctc

SEQ ID NO: 631729 - DNA, 33 bp, Homo sapien
cgtaggcctatgggaaacaaagcactcagttct

SEQ ID NO: 631730 - DNA, 33 bp, Homo sapien
cgtaggcctatgggaatcaaagcactcagttct

SEQ ID NO: 631731 - DNA, 33 bp, Homo sapien
tatatggttttacagaaagccactgagtcacgt

SEQ ID NO: 631732 - DNA, 33 bp, Homo sapien
tatatggttttacagatagccactgagtcacgt

SEQ ID NO: 631733 - DNA, 33 bp, Homo sapien
tgggaaggcagaggagacctttgtattgtcctc

SEQ ID NO: 631734 - DNA, 33 bp, Homo sapien
tgggaaggcagaggaggcctttgtattgtcctc

SEQ ID NO: 631735 - DNA, 33 bp, Homo sapien
ttaaatcttactgtgtaaattttcaagcatata

SEQ ID NO: 631736 - DNA, 33 bp, Homo sapien
ttaaatcttactgtgttaattttcaagcatata

SEQ ID NO: 631737 - DNA, 33 bp, Homo sapien
ctttttctgttctgtaaagagaagttcagcctc

SEQ ID NO: 631738 - DNA, 33 bp, Homo sapien
ctttttctgttctgtagagagaagttcagcctc

SEQ ID NO: 631739 - DNA, 33 bp, Homo sapien
aacactagtaaaaaaaagaggcaaaaatgtaga

SEQ ID NO: 631740 - DNA, 33 bp, Homo sapien
aacactagtaaaaaaaggaggcaaaaatgtaga

SEQ ID NO: 631741 - DNA, 33 bp, Homo sapien
ttacggatgacttcaacgggctcaagacatcag

SEQ ID NO: 631742 - DNA, 33 bp, Homo sapien
ttacggatgacttcaaggggctcaagacatcag

SEQ ID NO: 631743 - DNA, 33 bp, Homo sapien
gtaccaggtcctattccaggagatgaatataca

SEQ ID NO: 631744 - DNA, 33 bp, Homo sapien
gtaccaggtcctattctaggagatgaatataca

SEQ ID NO: 631745 - DNA, 33 bp, Homo sapien
ctgcactgcgttaggaaatggctccaaatctgt

SEQ ID NO: 631746 - DNA, 33 bp, Homo sapien
ctgcactgcgttaggatatggctccaaatctgt

SEQ ID NO: 631747 - DNA, 33 bp, Homo sapien
gtgaattagagccagacgcttaagtccaggtga

SEQ ID NO: 631748 - DNA, 33 bp, Homo sapien
gtgaattagagccagatgcttaagtccaggtga

SEQ ID NO: 631749 - DNA, 33 bp, Homo sapien
gccaccatacgcagcccgccttctgtttctgaa

SEQ ID NO: 631750 - DNA, 33 bp, Homo sapien
gccaccatacgcagcctgccttctgtttctgaa

SEQ ID NO: 631751 - DNA, 33 bp, Homo sapien
tcttgaaggtagagaaaatgctagtggggagga

SEQ ID NO: 631752 - DNA, 33 bp, Homo sapien
tcttgaaggtagagaagatgctagtggggagga

SEQ ID NO: 631753 - DNA, 33 bp, Homo sapien
ggcccacccactaatactactgcacagagtcag

SEQ ID NO: 631754 - DNA, 33 bp, Homo sapien
ggcccacccactaatattactgcacagagtcag

SEQ ID NO: 631755 - DNA, 33 bp, Homo sapien
tagactggcccctttcaaggagaacctattcca

SEQ ID NO: 631756 - DNA, 33 bp, Homo sapien
tagactggcccctttcgaggagaacctattcca

SEQ ID NO: 631757 - DNA, 33 bp, Homo sapien
agggcagggtgcagcgaaggcgtgtggggttga

SEQ ID NO: 631758 - DNA, 33 bp, Homo sapien
agggcagggtgcagcggaggcgtgtggggttga

SEQ ID NO: 631759 - DNA, 33 bp, Homo sapien
ggctggatgttggtttcaaaaggggttatttca

SEQ ID NO: 631760 - DNA, 33 bp, Homo sapien
ggctggatgttggtttgaaaaggggttatttca

SEQ ID NO: 631761 - DNA, 33 bp, Homo sapien
cctaaaaactctgaaacaacagctctctattag

SEQ ID NO: 631762 - DNA, 33 bp, Homo sapien
cctaaaaactctgaaagaacagctctctattag

SEQ ID NO: 631763 - DNA, 33 bp, Homo sapien
ggtaccatagacaacaccctggaggcactccca

SEQ ID NO: 631764 - DNA, 33 bp, Homo sapien
ggtaccatagacaacatcctggaggcactccca

SEQ ID NO: 631765 - DNA, 33 bp, Homo sapien
atgatgtctacctgcacacagtcattccggccg

SEQ ID NO: 631766 - DNA, 33 bp, Homo sapien
atgatgtctacctgcatacagtcattccggccg

SEQ ID NO: 631767 - DNA, 33 bp, Homo sapien
gtttgttcatagagaactcttcgcttcattttt

SEQ ID NO: 631768 - DNA, 33 bp, Homo sapien
gtttgttcatagagaattcttcgcttcattttt

SEQ ID NO: 631769 - DNA, 33 bp, Homo sapien
ccaagtttaggcaatgccaggattgattaaaac

SEQ ID NO: 631770 - DNA, 33 bp, Homo sapien
ccaagtttaggcaatgtcaggattgattaaaac

SEQ ID NO: 631771 - DNA, 33 bp, Homo sapien
agaagaaccaaaggccactgatcttgggtgttc

SEQ ID NO: 631772 - DNA, 33 bp, Homo sapien
agaagaaccaaaggccgctgatcttgggtgttc

SEQ ID NO: 631773 - DNA, 33 bp, Homo sapien
gataggaggagccacacggtagagtgctttgaa

SEQ ID NO: 631774 - DNA, 33 bp, Homo sapien
gataggaggagccacatggtagagtgctttgaa

SEQ ID NO: 631775 - DNA, 33 bp, Homo sapien
ggactggttagcaaagccaacatatgcggataa

SEQ ID NO: 631776 - DNA, 33 bp, Homo sapien
ggactggttagcaaaggcaacatatgcggataa

SEQ ID NO: 631777 - DNA, 33 bp, Homo sapien
tctgaagagctgcttaagtggaagctccctggg

SEQ ID NO: 631778 - DNA, 33 bp, Homo sapien
tctgaagagctgcttacgtggaagctccctggg

SEQ ID NO: 631779 - DNA, 33 bp, Homo sapien
aggctcagcgtgactacactagcagctccaggc

SEQ ID NO: 631780 - DNA, 33 bp, Homo sapien
aggctcagcgtgactatactagcagctccaggc

SEQ ID NO: 631781 - DNA, 33 bp, Homo sapien
ctgggcccaggaaagcagaagacacctttacct

SEQ ID NO: 631782 - DNA, 33 bp, Homo sapien
ctgggcccaggaaagcggaagacacctttacct

SEQ ID NO: 631783 - DNA, 33 bp, Homo sapien
acaacaaggacaggccaatgtgcagaagggcag

SEQ ID NO: 631784 - DNA, 33 bp, Homo sapien
acaacaaggacaggccgatgtgcagaagggcag

SEQ ID NO: 631785 - DNA, 33 bp, Homo sapien
tgctagggacttggaaacataggaccctgtggg

SEQ ID NO: 631786 - DNA, 33 bp, Homo sapien
tgctagggacttggaatcataggaccctgtggg

SEQ ID NO: 631787 - DNA, 33 bp, Homo sapien
cggaatggaaacgagcagaagaataagggaatg

SEQ ID NO: 631788 - DNA, 33 bp, Homo sapien
cggaatggaaacgagcggaagaataagggaatg

SEQ ID NO: 631789 - DNA, 33 bp, Homo sapien
ttggtcagagcacttaacattaggtctgcttcc

SEQ ID NO: 631790 - DNA, 33 bp, Homo sapien
ttggtcagagcacttagcattaggtctgcttcc

SEQ ID NO: 631791 - DNA, 33 bp, Homo sapien
ggcctgcatacaccaacacttcactacccaaga

SEQ ID NO: 631792 - DNA, 33 bp, Homo sapien
ggcctgcatacaccaagacttcactacccaaga

SEQ ID NO: 631793 - DNA, 33 bp, Homo sapien
atgatgcgtggccaaaataagaaaagagacaac

SEQ ID NO: 631794 - DNA, 33 bp, Homo sapien
atgatgcgtggccaaagtaagaaaagagacaac

SEQ ID NO: 631795 - DNA, 33 bp, Homo sapien
aagctggcaaactgacagaaggtatgcactgcc

SEQ ID NO: 631796 - DNA, 33 bp, Homo sapien
aagctggcaaactgacggaaggtatgcactgcc

SEQ ID NO: 631797 - DNA, 33 bp, Homo sapien
ttggaatgtcacactcaagaggctctggacccg

SEQ ID NO: 631798 - DNA, 33 bp, Homo sapien
ttggaatgtcacactcgagaggctctggacccg

SEQ ID NO: 631799 - DNA, 33 bp, Homo sapien
gtgaaaagagcgtcgaaggggctgggaatgttg

SEQ ID NO: 631800 - DNA, 33 bp, Homo sapien
gtgaaaagagcgtcgagggggctgggaatgttg

SEQ ID NO: 631801 - DNA, 33 bp, Homo sapien
ctgagggaaagagtaacaggtattctctgagct

SEQ ID NO: 631802 - DNA, 33 bp, Homo sapien
ctgagggaaagagtaagaggtattctctgagct

SEQ ID NO: 631803 - DNA, 33 bp, Homo sapien
ttggatttggtaaggccgaagcttaaaacttgg

SEQ ID NO: 631804 - DNA, 33 bp, Homo sapien
ttggatttggtaaggctgaagcttaaaacttgg

SEQ ID NO: 631805 - DNA, 33 bp, Homo sapien
acagactcacagtttcaagccctgagcttatct

SEQ ID NO: 631806 - DNA, 33 bp, Homo sapien
acagactcacagtttcgagccctgagcttatct

SEQ ID NO: 631807 - DNA, 33 bp, Homo sapien
agaggggagattgtagcattaattaagggggct

SEQ ID NO: 631808 - DNA, 33 bp, Homo sapien
agaggggagattgtagtattaattaagggggct

SEQ ID NO: 631809 - DNA, 33 bp, Homo sapien
accacatctggagtagaagggctcctggaacct

SEQ ID NO: 631810 - DNA, 33 bp, Homo sapien
accacatctggagtaggagggctcctggaacct

SEQ ID NO: 631811 - DNA, 33 bp, Homo sapien
aaaaataggcctctgacgctgtcacatttgagg

SEQ ID NO: 631812 - DNA, 33 bp, Homo sapien
aaaaataggcctctgatgctgtcacatttgagg

SEQ ID NO: 631813 - DNA, 33 bp, Homo sapien
atattcaggccaatgcccagtaaggactggtaa

SEQ ID NO: 631814 - DNA, 33 bp, Homo sapien
atattcaggccaatgcgcagtaaggactggtaa

SEQ ID NO: 631815 - DNA, 33 bp, Homo sapien
cggaaatatggcccagcctcactgaggtcttag

SEQ ID NO: 631816 - DNA, 33 bp, Homo sapien
cggaaatatggcccagtctcactgaggtcttag

SEQ ID NO: 631817 - DNA, 33 bp, Homo sapien
attggatacactataccaaaactgcagaaagcc

SEQ ID NO: 631818 - DNA, 33 bp, Homo sapien
attggatacactatactaaaactgcagaaagcc

SEQ ID NO: 631819 - DNA, 33 bp, Homo sapien
ctaaaatctgacttcaatagctacaacggaagc

SEQ ID NO: 631820 - DNA, 33 bp, Homo sapien
ctaaaatctgacttcagtagctacaacggaagc

SEQ ID NO: 631821 - DNA, 33 bp, Homo sapien
ttcttcttgcaggattgaactttttttaaatgt

SEQ ID NO: 631822 - DNA, 33 bp, Homo sapien
ttcttcttgcaggatttaactttttttaaatgt

SEQ ID NO: 631823 - DNA, 33 bp, Homo sapien
gtagattccagctctacgcctaaatcaagagta

SEQ ID NO: 631824 - DNA, 33 bp, Homo sapien
gtagattccagctctatgcctaaatcaagagta

SEQ ID NO: 631825 - DNA, 33 bp, Homo sapien
ttgtgggagcccaacaacatctcatcatggagg

SEQ ID NO: 631826 - DNA, 33 bp, Homo sapien
ttgtgggagcccaacagcatctcatcatggagg

SEQ ID NO: 631827 - DNA, 33 bp, Homo sapien
cacaaattgtagcaaacagtgtgaaagaatgac

SEQ ID NO: 631828 - DNA, 33 bp, Homo sapien
cacaaattgtagcaaatagtgtgaaagaatgac

SEQ ID NO: 631829 - DNA, 33 bp, Homo sapien
tggtcccaacagcccactgaataggtccacacg

SEQ ID NO: 631830 - DNA, 33 bp, Homo sapien
tggtcccaacagcccattgaataggtccacacg

SEQ ID NO: 631831 - DNA, 33 bp, Homo sapien
tgctgggcaaacactgcacggggtgattcacac

SEQ ID NO: 631832 - DNA, 33 bp, Homo sapien
tgctgggcaaacactggacggggtgattcacac

SEQ ID NO: 631833 - DNA, 33 bp, Homo sapien
tcttagattctctagcaatcatcctgtggccct

SEQ ID NO: 631834 - DNA, 33 bp, Homo sapien
tcttagattctctagctatcatcctgtggccct

SEQ ID NO: 631835 - DNA, 33 bp, Homo sapien
aaaattcaaaggacaactgattctgggtcactc

SEQ ID NO: 631836 - DNA, 33 bp, Homo sapien
aaaattcaaaggacaagtgattctgggtcactc

SEQ ID NO: 631837 - DNA, 33 bp, Homo sapien
cattctgaagaagttacctagttaatgcaaaat

SEQ ID NO: 631838 - DNA, 33 bp, Homo sapien
cattctgaagaagttatctagttaatgcaaaat

SEQ ID NO: 631839 - DNA, 33 bp, Homo sapien
tcttgatgattccatacggttcctagcaattct

SEQ ID NO: 631840 - DNA, 33 bp, Homo sapien
tcttgatgattccatatggttcctagcaattct

SEQ ID NO: 631841 - DNA, 33 bp, Homo sapien
ccattgtaatgtttcacagttaacttggagtat

SEQ ID NO: 631842 - DNA, 33 bp, Homo sapien
ccattgtaatgtttcatagttaacttggagtat

SEQ ID NO: 631843 - DNA, 33 bp, Homo sapien
gagtgctataaagaaaatgaagcagggtattgg

SEQ ID NO: 631844 - DNA, 33 bp, Homo sapien
gagtgctataaagaaagtgaagcagggtattgg

SEQ ID NO: 631845 - DNA, 33 bp, Homo sapien
gagagaaagaaggacactgaatttcaaattaat

SEQ ID NO: 631846 - DNA, 33 bp, Homo sapien
gagagaaagaaggacattgaatttcaaattaat

SEQ ID NO: 631847 - DNA, 33 bp, Homo sapien
cttttgagcgtttcaagcattacttctagttat

SEQ ID NO: 631848 - DNA, 33 bp, Homo sapien
cttttgagcgtttcaatcattacttctagttat

SEQ ID NO: 631849 - DNA, 33 bp, Homo sapien
tgttgtctgagaagtacaaagtgccttagaaat

SEQ ID NO: 631850 - DNA, 33 bp, Homo sapien
tgttgtctgagaagtataaagtgccttagaaat

SEQ ID NO: 631851 - DNA, 33 bp, Homo sapien
tattttcagcaacaaacagtatctggtaccaaa

SEQ ID NO: 631852 - DNA, 33 bp, Homo sapien
tattttcagcaacaaagagtatctggtaccaaa

SEQ ID NO: 631853 - DNA, 33 bp, Homo sapien
accaagtggcatttgacgagtacttaatcctac

SEQ ID NO: 631854 - DNA, 33 bp, Homo sapien
accaagtggcatttgatgagtacttaatcctac

SEQ ID NO: 631855 - DNA, 33 bp, Homo sapien
ttcttcagtctcaaaccgcctcagatactgctc

SEQ ID NO: 631856 - DNA, 33 bp, Homo sapien
ttcttcagtctcaaactgcctcagatactgctc

SEQ ID NO: 631857 - DNA, 33 bp, Homo sapien
agtccaacgagacttaccgagatgctgttcgaa

SEQ ID NO: 631858 - DNA, 33 bp, Homo sapien
agtccaacgagacttatcgagatgctgttcgaa

SEQ ID NO: 631859 - DNA, 33 bp, Homo sapien
gaagagaattgcaagaaattaacacagagcgtc

SEQ ID NO: 631860 - DNA, 33 bp, Homo sapien
gaagagaattgcaagacattaacacagagcgtc

SEQ ID NO: 631861 - DNA, 33 bp, Homo sapien
taaggaattacttataaaaatgccgccacagac

SEQ ID NO: 631862 - DNA, 33 bp, Homo sapien
taaggaattacttatacaaatgccgccacagac

SEQ ID NO: 631863 - DNA, 33 bp, Homo sapien
aaaacatggacatctaccgacgatccaggctga

SEQ ID NO: 631864 - DNA, 33 bp, Homo sapien
aaaacatggacatctatcgacgatccaggctga

SEQ ID NO: 631865 - DNA, 33 bp, Homo sapien
agctcttaattatatgcacccagctcagcaaag

SEQ ID NO: 631866 - DNA, 33 bp, Homo sapien
agctcttaattatatgtacccagctcagcaaag

SEQ ID NO: 631867 - DNA, 33 bp, Homo sapien
agatctgtcctcctccagatttggtgtgaggtc

SEQ ID NO: 631868 - DNA, 33 bp, Homo sapien
agatctgtcctcctcctgatttggtgtgaggtc

SEQ ID NO: 631869 - DNA, 33 bp, Homo sapien
gaacataatcgaaataatagtaggagcccatga

SEQ ID NO: 631870 - DNA, 33 bp, Homo sapien
gaacataatcgaaatagtagtaggagcccatga

SEQ ID NO: 631871 - DNA, 33 bp, Homo sapien
ttctgagctattaccaactctggaggagtcaag

SEQ ID NO: 631872 - DNA, 33 bp, Homo sapien
ttctgagctattaccacctctggaggagtcaag

SEQ ID NO: 631873 - DNA, 33 bp, Homo sapien
cctcctgacaacacaacgaggccagtattgttc

SEQ ID NO: 631874 - DNA, 33 bp, Homo sapien
cctcctgacaacacaatgaggccagtattgttc

SEQ ID NO: 631875 - DNA, 33 bp, Homo sapien
ggggctgggcacaatcaagggttctgtggggat

SEQ ID NO: 631876 - DNA, 33 bp, Homo sapien
ggggctgggcacaatcgagggttctgtggggat

SEQ ID NO: 631877 - DNA, 33 bp, Homo sapien
ggatgtgagtccttgcacagtggtgaaatgtag

SEQ ID NO: 631878 - DNA, 33 bp, Homo sapien
ggatgtgagtccttgcgcagtggtgaaatgtag

SEQ ID NO: 631879 - DNA, 33 bp, Homo sapien
gaacaggcatacccagaaacactttccatagaa

SEQ ID NO: 631880 - DNA, 33 bp, Homo sapien
gaacaggcatacccaggaacactttccatagaa

SEQ ID NO: 631881 - DNA, 33 bp, Homo sapien
ggcatatggaaatcccacatgggtgcctctaca

SEQ ID NO: 631882 - DNA, 33 bp, Homo sapien
ggcatatggaaatcccgcatgggtgcctctaca

SEQ ID NO: 631883 - DNA, 33 bp, Homo sapien
tggaagagatgtactgcataagccacctgcctg

SEQ ID NO: 631884 - DNA, 33 bp, Homo sapien
tggaagagatgtactgtataagccacctgcctg

SEQ ID NO: 631885 - DNA, 33 bp, Homo sapien
cagtccaagtacatgacagataccacagggaag

SEQ ID NO: 631886 - DNA, 33 bp, Homo sapien
cagtccaagtacatgatagataccacagggaag

SEQ ID NO: 631887 - DNA, 33 bp, Homo sapien
ctttctctattctccagacattaggcacccact

SEQ ID NO: 631888 - DNA, 33 bp, Homo sapien
ctttctctattctccatacattaggcacccact

SEQ ID NO: 631889 - DNA, 33 bp, Homo sapien
gtgtgctagcaggtcacgcagtggaggctgctg

SEQ ID NO: 631890 - DNA, 33 bp, Homo sapien
gtgtgctagcaggtcatgcagtggaggctgctg

SEQ ID NO: 631891 - DNA, 33 bp, Homo sapien
attcttctgggacaaagtattggtcagcgctga

SEQ ID NO: 631892 - DNA, 33 bp, Homo sapien
attcttctgggacaaattattggtcagcgctga

SEQ ID NO: 631893 - DNA, 33 bp, Homo sapien
ctggggggagcacaaaattgtgacagaatgcaa

SEQ ID NO: 631894 - DNA, 33 bp, Homo sapien
ctggggggagcacaaagttgtgacagaatgcaa

SEQ ID NO: 631895 - DNA, 33 bp, Homo sapien
tttctttggaggaaacaaccgcatcagatctgc

SEQ ID NO: 631896 - DNA, 33 bp, Homo sapien
tttctttggaggaaaccaccgcatcagatctgc

SEQ ID NO: 631897 - DNA, 33 bp, Homo sapien
tcgttgtcctgtgtcagtcggtgttcgtgtggg

SEQ ID NO: 631898 - DNA, 33 bp, Homo sapien
tcgttgtcctgtgtcattcggtgttcgtgtggg

SEQ ID NO: 631899 - DNA, 33 bp, Homo sapien
gaatcttgggtcctctgaatcagccagcagtct

SEQ ID NO: 631900 - DNA, 33 bp, Homo sapien
gaatcttgggtcctcttaatcagccagcagtct

SEQ ID NO: 631901 - DNA, 33 bp, Homo sapien
tcctctgtggccagaacagctgggcgccatcct

SEQ ID NO: 631902 - DNA, 33 bp, Homo sapien
tcctctgtggccagaagagctgggcgccatcct

SEQ ID NO: 631903 - DNA, 33 bp, Homo sapien
ttgcaggtcactgtatcaaagcctctgacaagt

SEQ ID NO: 631904 - DNA, 33 bp, Homo sapien
ttgcaggtcactgtattaaagcctctgacaagt

SEQ ID NO: 631905 - DNA, 33 bp, Homo sapien
gctgaatgttggacaccggcttctggctctact

SEQ ID NO: 631906 - DNA, 33 bp, Homo sapien
gctgaatgttggacacgggcttctggctctact

SEQ ID NO: 631907 - DNA, 33 bp, Homo sapien
gcaactgcccatcaaacaggactttttctgcac

SEQ ID NO: 631908 - DNA, 33 bp, Homo sapien
gcaactgcccatcaaataggactttttctgcac

SEQ ID NO: 631909 - DNA, 33 bp, Homo sapien
ttcattgggatagagacggcagaaacccggtca

SEQ ID NO: 631910 - DNA, 33 bp, Homo sapien
ttcattgggatagagatggcagaaacccggtca

SEQ ID NO: 631911 - DNA, 33 bp, Homo sapien
ctccttctgaaaaatgcattaagtagcaccagc

SEQ ID NO: 631912 - DNA, 33 bp, Homo sapien
ctccttctgaaaaatggattaagtagcaccagc

SEQ ID NO: 631913 - DNA, 33 bp, Homo sapien
aattcacatttaaatcaaaaacaacccctccaa

SEQ ID NO: 631914 - DNA, 33 bp, Homo sapien
aattcacatttaaatcgaaaacaacccctccaa

SEQ ID NO: 631915 - DNA, 33 bp, Homo sapien
catctatggctgtaccactctgaacgtgcacta

SEQ ID NO: 631916 - DNA, 33 bp, Homo sapien
catctatggctgtaccgctctgaacgtgcacta

SEQ ID NO: 631917 - DNA, 33 bp, Homo sapien
ggaggcaggaagcttcaagcagctggatacttt

SEQ ID NO: 631918 - DNA, 33 bp, Homo sapien
ggaggcaggaagcttcgagcagctggatacttt

SEQ ID NO: 631919 - DNA, 33 bp, Homo sapien
gcaggtggtttacatacatgacatcactgatct

SEQ ID NO: 631920 - DNA, 33 bp, Homo sapien
gcaggtggtttacatagatgacatcactgatct

SEQ ID NO: 631921 - DNA, 33 bp, Homo sapien
agtccttgtcatttgacagctctgggaaataga

SEQ ID NO: 631922 - DNA, 33 bp, Homo sapien
agtccttgtcatttgatagctctgggaaataga

SEQ ID NO: 631923 - DNA, 33 bp, Homo sapien
cgcaatgaacaaagtaaggtgcatgtgttcctg

SEQ ID NO: 631924 - DNA, 33 bp, Homo sapien
cgcaatgaacaaagtagggtgcatgtgttcctg

SEQ ID NO: 631925 - DNA, 33 bp, Homo sapien
cacaaacacccgtcagaccgcacatacctcaac

SEQ ID NO: 631926 - DNA, 33 bp, Homo sapien
cacaaacacccgtcaggccgcacatacctcaac

SEQ ID NO: 631927 - DNA, 33 bp, Homo sapien
ttttggccaggctccaagctaagctctgtagga

SEQ ID NO: 631928 - DNA, 33 bp, Homo sapien
ttttggccaggctccaggctaagctctgtagga

SEQ ID NO: 631929 - DNA, 33 bp, Homo sapien
ccacactgctgaaccacaatctgaacccagtca

SEQ ID NO: 631930 - DNA, 33 bp, Homo sapien
ccacactgctgaaccagaatctgaacccagtca

SEQ ID NO: 631931 - DNA, 33 bp, Homo sapien
ttgctttgctaaaggagtcaccacagagcaccc

SEQ ID NO: 631932 - DNA, 33 bp, Homo sapien
ttgctttgctaaaggattcaccacagagcaccc

SEQ ID NO: 631933 - DNA, 33 bp, Homo sapien
cttaagccaatcatgaagctcaccaggcaaggt

SEQ ID NO: 631934 - DNA, 33 bp, Homo sapien
cttaagccaatcatgaggctcaccaggcaaggt

SEQ ID NO: 631935 - DNA, 33 bp, Homo sapien
acctgaagagcttccaaagctgcctgtggctaa

SEQ ID NO: 631936 - DNA, 33 bp, Homo sapien
acctgaagagcttccagagctgcctgtggctaa

SEQ ID NO: 631937 - DNA, 33 bp, Homo sapien
aaatggacttcaatcacagtgcttaaaaaaagc

SEQ ID NO: 631938 - DNA, 33 bp, Homo sapien
aaatggacttcaatcatagtgcttaaaaaaagc

SEQ ID NO: 631939 - DNA, 33 bp, Homo sapien
cctagttaagcaaatacaaggagcatctgctca

SEQ ID NO: 631940 - DNA, 33 bp, Homo sapien
cctagttaagcaaatataaggagcatctgctca

SEQ ID NO: 631941 - DNA, 33 bp, Homo sapien
cctccataaatcccccagaaatggagtatctgg

SEQ ID NO: 631942 - DNA, 33 bp, Homo sapien
cctccataaatcccccggaaatggagtatctgg

SEQ ID NO: 631943 - DNA, 33 bp, Homo sapien
catacttcttgtaaaaggtgcctgcatcctagc

SEQ ID NO: 631944 - DNA, 33 bp, Homo sapien
catacttcttgtaaaatgtgcctgcatcctagc

SEQ ID NO: 631945 - DNA, 33 bp, Homo sapien
tgagggcatcagactcagagccaggaacctggc

SEQ ID NO: 631946 - DNA, 33 bp, Homo sapien
tgagggcatcagactcggagccaggaacctggc

SEQ ID NO: 631947 - DNA, 33 bp, Homo sapien
cagagttgctgagaaaagaacaagaagtatgta

SEQ ID NO: 631948 - DNA, 33 bp, Homo sapien
cagagttgctgagaaaggaacaagaagtatgta

SEQ ID NO: 631949 - DNA, 33 bp, Homo sapien
gaattaggattttcaactgtggaagagaacact

SEQ ID NO: 631950 - DNA, 33 bp, Homo sapien
gaattaggattttcaattgtggaagagaacact

SEQ ID NO: 631951 - DNA, 33 bp, Homo sapien
ccccagtgtttattccgcggccagaaacagagg

SEQ ID NO: 631952 - DNA, 33 bp, Homo sapien
ccccagtgtttattcctcggccagaaacagagg

SEQ ID NO: 631953 - DNA, 33 bp, Homo sapien
cacgggaggactcagtaacgacttgaaagcatc

SEQ ID NO: 631954 - DNA, 33 bp, Homo sapien
cacgggaggactcagtgacgacttgaaagcatc

SEQ ID NO: 631955 - DNA, 33 bp, Homo sapien
tgcccagtacacattaagagcagaggagcctgc

SEQ ID NO: 631956 - DNA, 33 bp, Homo sapien
tgcccagtacacattaggagcagaggagcctgc

SEQ ID NO: 631957 - DNA, 33 bp, Homo sapien
aggaaggcaaggaaaaatgccacaatgtgccaa

SEQ ID NO: 631958 - DNA, 33 bp, Homo sapien
aggaaggcaaggaaaagtgccacaatgtgccaa

SEQ ID NO: 631959 - DNA, 33 bp, Homo sapien
ttggggacaatgttatcacttgccttatggaat

SEQ ID NO: 631960 - DNA, 33 bp, Homo sapien
ttggggacaatgttattacttgccttatggaat

SEQ ID NO: 631961 - DNA, 33 bp, Homo sapien
cgggggtgtgaagcaccaagggagagtaggagg

SEQ ID NO: 631962 - DNA, 33 bp, Homo sapien
cgggggtgtgaagcacgaagggagagtaggagg

SEQ ID NO: 631963 - DNA, 33 bp, Homo sapien
attttatttgaggatgacaaagcacctcttcag

SEQ ID NO: 631964 - DNA, 33 bp, Homo sapien
attttatttgaggatggcaaagcacctcttcag

SEQ ID NO: 631965 - DNA, 33 bp, Homo sapien
ccagtctggactagaacccggacacctccgccc

SEQ ID NO: 631966 - DNA, 33 bp, Homo sapien
ccagtctggactagaatccggacacctccgccc

SEQ ID NO: 631967 - DNA, 33 bp, Homo sapien
tgctggtttgagggccaccactgcagttctgct

SEQ ID NO: 631968 - DNA, 33 bp, Homo sapien
tgctggtttgagggccgccactgcagttctgct

SEQ ID NO: 631969 - DNA, 33 bp, Homo sapien
aggagagggattatcccagaagagaagaatcta

SEQ ID NO: 631970 - DNA, 33 bp, Homo sapien
aggagagggattatcctagaagagaagaatcta

SEQ ID NO: 631971 - DNA, 33 bp, Homo sapien
ccactgaatgttctgtaaagatgtcttctttct

SEQ ID NO: 631972 - DNA, 33 bp, Homo sapien
ccactgaatgttctgtgaagatgtcttctttct

SEQ ID NO: 631973 - DNA, 33 bp, Homo sapien
caggatgtcaggagggaagaaaattcgggcctc

SEQ ID NO: 631974 - DNA, 33 bp, Homo sapien
caggatgtcaggaggggagaaaattcgggcctc

SEQ ID NO: 631975 - DNA, 33 bp, Homo sapien
actgtggcattcaaagcctctgcagtccagccc

SEQ ID NO: 631976 - DNA, 33 bp, Homo sapien
actgtggcattcaaagtctctgcagtccagccc

SEQ ID NO: 631977 - DNA, 33 bp, Homo sapien
atgaggtgcaacctaccgccatttttacagagg

SEQ ID NO: 631978 - DNA, 33 bp, Homo sapien
atgaggtgcaacctactgccatttttacagagg

SEQ ID NO: 631979 - DNA, 33 bp, Homo sapien
atgtcaggcacaaacactgcagaatcagaatgg

SEQ ID NO: 631980 - DNA, 33 bp, Homo sapien
atgtcaggcacaaacattgcagaatcagaatgg

SEQ ID NO: 631981 - DNA, 33 bp, Homo sapien
cgcttcattaagttccaaccacatcctgtcctc

SEQ ID NO: 631982 - DNA, 33 bp, Homo sapien
cgcttcattaagttccgaccacatcctgtcctc

SEQ ID NO: 631983 - DNA, 33 bp, Homo sapien
ctctcccatcaacgagacagtaataaattaaga

SEQ ID NO: 631984 - DNA, 33 bp, Homo sapien
ctctcccatcaacgaggcagtaataaattaaga

SEQ ID NO: 631985 - DNA, 33 bp, Homo sapien
agggtcccatagctggaaagagggggagccaag

SEQ ID NO: 631986 - DNA, 33 bp, Homo sapien
agggtcccatagctgggaagagggggagccaag

SEQ ID NO: 631987 - DNA, 33 bp, Homo sapien
attggttaagcagcagcagataactcatacagg

SEQ ID NO: 631988 - DNA, 33 bp, Homo sapien
attggttaagcagcagtagataactcatacagg

SEQ ID NO: 631989 - DNA, 33 bp, Homo sapien
tccagcatcgggtgtcgctcttacaagccagga

SEQ ID NO: 631990 - DNA, 33 bp, Homo sapien
tccagcatcgggtgtctctcttacaagccagga

SEQ ID NO: 631991 - DNA, 33 bp, Homo sapien
ttcagggaccagaggccatagaaggtcacaccc

SEQ ID NO: 631992 - DNA, 33 bp, Homo sapien
ttcagggaccagaggcgatagaaggtcacaccc

SEQ ID NO: 631993 - DNA, 33 bp, Homo sapien
gtgagttgtatcttacagcatcttggtgtgaaa

SEQ ID NO: 631994 - DNA, 33 bp, Homo sapien
gtgagttgtatcttacggcatcttggtgtgaaa

SEQ ID NO: 631995 - DNA, 33 bp, Homo sapien
tgcccctacatttcagaccatctccagggagcc

SEQ ID NO: 631996 - DNA, 33 bp, Homo sapien
tgcccctacatttcaggccatctccagggagcc

SEQ ID NO: 631997 - DNA, 33 bp, Homo sapien
agccaagcaaaactaccactctcctctcgtgat

SEQ ID NO: 631998 - DNA, 33 bp, Homo sapien
agccaagcaaaactactactctcctctcgtgat

SEQ ID NO: 631999 - DNA, 33 bp, Homo sapien
tagatatgtttgaatacaggccaaatacatatc

SEQ ID NO: 632000 - DNA, 33 bp, Homo sapien
tagatatgtttgaatataggccaaatacatatc

SEQ ID NO: 632001 - DNA, 33 bp, Homo sapien
accagtccctggtgtcaaaaagcttagagactg

SEQ ID NO: 632002 - DNA, 33 bp, Homo sapien
accagtccctggtgtcgaaaagcttagagactg

SEQ ID NO: 632003 - DNA, 33 bp, Homo sapien
cctttggggcaggctaataactaagccgaaagg

SEQ ID NO: 632004 - DNA, 33 bp, Homo sapien
cctttggggcaggctagtaactaagccgaaagg

SEQ ID NO: 632005 - DNA, 33 bp, Homo sapien
tattaaaatcacttgggaagttacagtgcagaa

SEQ ID NO: 632006 - DNA, 33 bp, Homo sapien
tattaaaatcacttggtaagttacagtgcagaa

SEQ ID NO: 632007 - DNA, 33 bp, Homo sapien
ttgtagacaacgacaccacccagaaccccgaca

SEQ ID NO: 632008 - DNA, 33 bp, Homo sapien
ttgtagacaacgacactacccagaaccccgaca

SEQ ID NO: 632009 - DNA, 33 bp, Homo sapien
gaaagcctggggcataaaaggctggcagctggc

SEQ ID NO: 632010 - DNA, 33 bp, Homo sapien
gaaagcctggggcatacaaggctggcagctggc

SEQ ID NO: 632011 - DNA, 33 bp, Homo sapien
aagaaagaggctgataaattttgatacaagggt

SEQ ID NO: 632012 - DNA, 33 bp, Homo sapien
aagaaagaggctgatacattttgatacaagggt

SEQ ID NO: 632013 - DNA, 33 bp, Homo sapien
tctaaagtagtattagccgataataggtctact

SEQ ID NO: 632014 - DNA, 33 bp, Homo sapien
tctaaagtagtattaggcgataataggtctact

SEQ ID NO: 632015 - DNA, 33 bp, Homo sapien
aactgtttgtgcccaacgtggatgctcatgtgg

SEQ ID NO: 632016 - DNA, 33 bp, Homo sapien
aactgtttgtgcccaatgtggatgctcatgtgg

SEQ ID NO: 632017 - DNA, 33 bp, Homo sapien
tacttaaaatttttcaacttcatgatgggttta

SEQ ID NO: 632018 - DNA, 33 bp, Homo sapien
tacttaaaatttttcagcttcatgatgggttta

SEQ ID NO: 632019 - DNA, 33 bp, Homo sapien
gtctttgtgacccttacgttgcaaaatcagtcc

SEQ ID NO: 632020 - DNA, 33 bp, Homo sapien
gtctttgtgacccttatgttgcaaaatcagtcc

SEQ ID NO: 632021 - DNA, 33 bp, Homo sapien
gagagccatttacaaaatctgttgggttgtatg

SEQ ID NO: 632022 - DNA, 33 bp, Homo sapien
gagagccatttacaaattctgttgggttgtatg

SEQ ID NO: 632023 - DNA, 33 bp, Homo sapien
ttcatttattcacttactaaagtagcctagtag

SEQ ID NO: 632024 - DNA, 33 bp, Homo sapien
ttcatttattcacttattaaagtagcctagtag

SEQ ID NO: 632025 - DNA, 33 bp, Homo sapien
tttaggtagatgaatgaactaataacctttgag

SEQ ID NO: 632026 - DNA, 33 bp, Homo sapien
tttaggtagatgaatggactaataacctttgag

SEQ ID NO: 632027 - DNA, 33 bp, Homo sapien
aagagtggaaactgtcacttagtagagctgaga

SEQ ID NO: 632028 - DNA, 33 bp, Homo sapien
aagagtggaaactgtcgcttagtagagctgaga

SEQ ID NO: 632029 - DNA, 33 bp, Homo sapien
caggattttgagagccaagtacaggatgaaggc

SEQ ID NO: 632030 - DNA, 33 bp, Homo sapien
caggattttgagagccgagtacaggatgaaggc

SEQ ID NO: 632031 - DNA, 33 bp, Homo sapien
aaaattccttagggcaacctgtattaaagcctc

SEQ ID NO: 632032 - DNA, 33 bp, Homo sapien
aaaattccttagggcagcctgtattaaagcctc

SEQ ID NO: 632033 - DNA, 33 bp, Homo sapien
atggcctttctgagaagataacatttgggcaga

SEQ ID NO: 632034 - DNA, 33 bp, Homo sapien
atggcctttctgagaatataacatttgggcaga

SEQ ID NO: 632035 - DNA, 33 bp, Homo sapien
ttttaacgctcaagaactgtgtgacctaacaga

SEQ ID NO: 632036 - DNA, 33 bp, Homo sapien
ttttaacgctcaagaattgtgtgacctaacaga

SEQ ID NO: 632037 - DNA, 33 bp, Homo sapien
ttcagtgaccatctacaacaaggaatgcagtct

SEQ ID NO: 632038 - DNA, 33 bp, Homo sapien
ttcagtgaccatctaccacaaggaatgcagtct

SEQ ID NO: 632039 - DNA, 33 bp, Homo sapien
ttaggctatctaaagtgaacacctacaaccaac

SEQ ID NO: 632040 - DNA, 33 bp, Homo sapien
ttaggctatctaaagttaacacctacaaccaac

SEQ ID NO: 632041 - DNA, 33 bp, Homo sapien
tgctcattttctgtgcaccccacttctttggtt

SEQ ID NO: 632042 - DNA, 33 bp, Homo sapien
tgctcattttctgtgcgccccacttctttggtt

SEQ ID NO: 632043 - DNA, 33 bp, Homo sapien
tttctttggagaaccccaatgtgctacaattct

SEQ ID NO: 632044 - DNA, 33 bp, Homo sapien
tttctttggagaaccctaatgtgctacaattct

SEQ ID NO: 632045 - DNA, 33 bp, Homo sapien
cctctataagtgtgggccaatttctagactaaa

SEQ ID NO: 632046 - DNA, 33 bp, Homo sapien
cctctataagtgtgggtcaatttctagactaaa

SEQ ID NO: 632047 - DNA, 33 bp, Homo sapien
actgtgggaaaatagactccatgtcatgctgga

SEQ ID NO: 632048 - DNA, 33 bp, Homo sapien
actgtgggaaaatagattccatgtcatgctgga

SEQ ID NO: 632049 - DNA, 33 bp, Homo sapien
tcacacttgcagaacacaacaaagatcaaatag

SEQ ID NO: 632050 - DNA, 33 bp, Homo sapien
tcacacttgcagaacagaacaaagatcaaatag

SEQ ID NO: 632051 - DNA, 33 bp, Homo sapien
aaagagcacaatgtagaaagtgcggtttctatc

SEQ ID NO: 632052 - DNA, 33 bp, Homo sapien
aaagagcacaatgtagtaagtgcggtttctatc

SEQ ID NO: 632053 - DNA, 33 bp, Homo sapien
atttcaggtgtcctaaagctggaaaatatcagt

SEQ ID NO: 632054 - DNA, 33 bp, Homo sapien
atttcaggtgtcctaacgctggaaaatatcagt

SEQ ID NO: 632055 - DNA, 33 bp, Homo sapien
atttgagatctataaacatatgtgaactagcct

SEQ ID NO: 632056 - DNA, 33 bp, Homo sapien
atttgagatctataaatatatgtgaactagcct

SEQ ID NO: 632057 - DNA, 33 bp, Homo sapien
agctattcttcacttaactgaaacaatttcagg

SEQ ID NO: 632058 - DNA, 33 bp, Homo sapien
agctattcttcacttatctgaaacaatttcagg

SEQ ID NO: 632059 - DNA, 33 bp, Homo sapien
atggtttcctggagaactaagatatttgtcacc

SEQ ID NO: 632060 - DNA, 33 bp, Homo sapien
atggtttcctggagaattaagatatttgtcacc

SEQ ID NO: 632061 - DNA, 33 bp, Homo sapien
gcaagtaaaagccataaagcactcctaacacaa

SEQ ID NO: 632062 - DNA, 33 bp, Homo sapien
gcaagtaaaagccatacagcactcctaacacaa

SEQ ID NO: 632063 - DNA, 33 bp, Homo sapien
ctgagtagcgggactacgggtgtacaccaccgc

SEQ ID NO: 632064 - DNA, 33 bp, Homo sapien
ctgagtagcgggactatgggtgtacaccaccgc

SEQ ID NO: 632065 - DNA, 33 bp, Homo sapien
cccttggttatttggcacactgttctgatgtca

SEQ ID NO: 632066 - DNA, 33 bp, Homo sapien
cccttggttatttggcgcactgttctgatgtca

SEQ ID NO: 632067 - DNA, 33 bp, Homo sapien
acactcctctagagcacgtaccaaaccctgtgt

SEQ ID NO: 632068 - DNA, 33 bp, Homo sapien
acactcctctagagcatgtaccaaaccctgtgt

SEQ ID NO: 632069 - DNA, 33 bp, Homo sapien
gctttgcagacaaggacgctggacttaaaagac

SEQ ID NO: 632070 - DNA, 33 bp, Homo sapien
gctttgcagacaaggatgctggacttaaaagac

SEQ ID NO: 632071 - DNA, 33 bp, Homo sapien
catgtgttttgctaatcacacccatggggacta

SEQ ID NO: 632072 - DNA, 33 bp, Homo sapien
catgtgttttgctaattacacccatggggacta

SEQ ID NO: 632073 - DNA, 33 bp, Homo sapien
ttagcctttgctaggacgggattttacaaagat

SEQ ID NO: 632074 - DNA, 33 bp, Homo sapien
ttagcctttgctaggatgggattttacaaagat

SEQ ID NO: 632075 - DNA, 33 bp, Homo sapien
tcaacattatcacatacgttaaggtcatgacaa

SEQ ID NO: 632076 - DNA, 33 bp, Homo sapien
tcaacattatcacataggttaaggtcatgacaa

SEQ ID NO: 632077 - DNA, 33 bp, Homo sapien
acacatttttttgtccaacaaacagaacacatc

SEQ ID NO: 632078 - DNA, 33 bp, Homo sapien
acacatttttttgtccgacaaacagaacacatc

SEQ ID NO: 632079 - DNA, 33 bp, Homo sapien
gtgaggtcccctgtgacgtagaatgaggaatgg

SEQ ID NO: 632080 - DNA, 33 bp, Homo sapien
gtgaggtcccctgtgatgtagaatgaggaatgg

SEQ ID NO: 632081 - DNA, 33 bp, Homo sapien
gaagtagaacgtgcaacgaggaataccagaggc

SEQ ID NO: 632082 - DNA, 33 bp, Homo sapien
gaagtagaacgtgcaatgaggaataccagaggc

SEQ ID NO: 632083 - DNA, 33 bp, Homo sapien
gagcccgggtctgaataaggaggctggggtgtt

SEQ ID NO: 632084 - DNA, 33 bp, Homo sapien
gagcccgggtctgaattaggaggctggggtgtt

SEQ ID NO: 632085 - DNA, 33 bp, Homo sapien
aggcaggtaccctgacactggcatctgctagca

SEQ ID NO: 632086 - DNA, 33 bp, Homo sapien
aggcaggtaccctgactctggcatctgctagca

SEQ ID NO: 632087 - DNA, 33 bp, Homo sapien
tctctaccgtgactgcacaaaagttgccagtag

SEQ ID NO: 632088 - DNA, 33 bp, Homo sapien
tctctaccgtgactgcgcaaaagttgccagtag

SEQ ID NO: 632089 - DNA, 33 bp, Homo sapien
agcaacttgctcttaccaatggcctctggaacc

SEQ ID NO: 632090 - DNA, 33 bp, Homo sapien
agcaacttgctcttactaatggcctctggaacc

SEQ ID NO: 632091 - DNA, 33 bp, Homo sapien
tctggaatggataaaaactaatctaaattttct

SEQ ID NO: 632092 - DNA, 33 bp, Homo sapien
tctggaatggataaaagctaatctaaattttct

SEQ ID NO: 632093 - DNA, 33 bp, Homo sapien
ctttcacccatccatcaatttatcattcactaa

SEQ ID NO: 632094 - DNA, 33 bp, Homo sapien
ctttcacccatccatcgatttatcattcactaa

SEQ ID NO: 632095 - DNA, 33 bp, Homo sapien
tataaacatcttagacaaggggcaacaggaatc

SEQ ID NO: 632096 - DNA, 33 bp, Homo sapien
tataaacatcttagacgaggggcaacaggaatc

SEQ ID NO: 632097 - DNA, 33 bp, Homo sapien
agccctgaggtggggacgtgataaacagttttc

SEQ ID NO: 632098 - DNA, 33 bp, Homo sapien
agccctgaggtggggatgtgataaacagttttc

SEQ ID NO: 632099 - DNA, 33 bp, Homo sapien
tgtcctaagtcatttacactcaagtctctcatc

SEQ ID NO: 632100 - DNA, 33 bp, Homo sapien
tgtcctaagtcatttatactcaagtctctcatc

SEQ ID NO: 632101 - DNA, 33 bp, Homo sapien
aacacacaatgaaaaaaggagagtctcatcaat

SEQ ID NO: 632102 - DNA, 33 bp, Homo sapien
aacacacaatgaaaaagggagagtctcatcaat

SEQ ID NO: 632103 - DNA, 33 bp, Homo sapien
aaagaatgatatcgcacctctaccttatagtat

SEQ ID NO: 632104 - DNA, 33 bp, Homo sapien
aaagaatgatatcgcatctctaccttatagtat

SEQ ID NO: 632105 - DNA, 33 bp, Homo sapien
gttatatctacgaaaccactgcttaacacaaca

SEQ ID NO: 632106 - DNA, 33 bp, Homo sapien
gttatatctacgaaactactgcttaacacaaca

SEQ ID NO: 632107 - DNA, 33 bp, Homo sapien
tgcctcagtctcttgaataaagaaagtctcaac

SEQ ID NO: 632108 - DNA, 33 bp, Homo sapien
tgcctcagtctcttgagtaaagaaagtctcaac

SEQ ID NO: 632109 - DNA, 33 bp, Homo sapien
ggatgagtcccatgtacgctctgtaagaaacaa

SEQ ID NO: 632110 - DNA, 33 bp, Homo sapien
ggatgagtcccatgtatgctctgtaagaaacaa

SEQ ID NO: 632111 - DNA, 33 bp, Homo sapien
cacagatacttcctcaaatagtgacttttccat

SEQ ID NO: 632112 - DNA, 33 bp, Homo sapien
cacagatacttcctcatatagtgacttttccat

SEQ ID NO: 632113 - DNA, 33 bp, Homo sapien
ttctgactctttgatccagtgattacaggttga

SEQ ID NO: 632114 - DNA, 33 bp, Homo sapien
ttctgactctttgatctagtgattacaggttga

SEQ ID NO: 632115 - DNA, 33 bp, Homo sapien
tagtccaaacatgacaatgaagccacaactgca

SEQ ID NO: 632116 - DNA, 33 bp, Homo sapien
tagtccaaacatgacagtgaagccacaactgca

SEQ ID NO: 632117 - DNA, 33 bp, Homo sapien
gtcctcttttgtaaggcaagacagaatgacaaa

SEQ ID NO: 632118 - DNA, 33 bp, Homo sapien
gtcctcttttgtaaggtaagacagaatgacaaa

SEQ ID NO: 632119 - DNA, 33 bp, Homo sapien
tttcttcttgaaaacccggaatattttcaagaa

SEQ ID NO: 632120 - DNA, 33 bp, Homo sapien
tttcttcttgaaaacctggaatattttcaagaa

SEQ ID NO: 632121 - DNA, 33 bp, Homo sapien
ctgccttagacaacacaatctcccttggtccca

SEQ ID NO: 632122 - DNA, 33 bp, Homo sapien
ctgccttagacaacacgatctcccttggtccca

SEQ ID NO: 632123 - DNA, 33 bp, Homo sapien
ggattgaaactgcaggaccaattaaaaagacta

SEQ ID NO: 632124 - DNA, 33 bp, Homo sapien
ggattgaaactgcagggccaattaaaaagacta

SEQ ID NO: 632125 - DNA, 33 bp, Homo sapien
accaaaagcatttccaaaaagtcctttgacaaa

SEQ ID NO: 632126 - DNA, 33 bp, Homo sapien
accaaaagcatttccagaaagtcctttgacaaa

SEQ ID NO: 632127 - DNA, 33 bp, Homo sapien
gtttcaaagaccctgggaatggaggaaaaataa

SEQ ID NO: 632128 - DNA, 33 bp, Homo sapien
gtttcaaagaccctggtaatggaggaaaaataa

SEQ ID NO: 632129 - DNA, 33 bp, Homo sapien
acaacagaagtggaaacggtccagggagtctca

SEQ ID NO: 632130 - DNA, 33 bp, Homo sapien
acaacagaagtggaaagggtccagggagtctca

SEQ ID NO: 632131 - DNA, 33 bp, Homo sapien
ctgtttcctagctccaatcagccttttgatcag

SEQ ID NO: 632132 - DNA, 33 bp, Homo sapien
ctgtttcctagctccagtcagccttttgatcag

SEQ ID NO: 632133 - DNA, 33 bp, Homo sapien
tttcttgtttcttcagcagcaagctcccagctc

SEQ ID NO: 632134 - DNA, 33 bp, Homo sapien
tttcttgtttcttcagtagcaagctcccagctc

SEQ ID NO: 632135 - DNA, 33 bp, Homo sapien
catcattaatgtgaacgcgagcaaataaaagaa

SEQ ID NO: 632136 - DNA, 33 bp, Homo sapien
catcattaatgtgaactcgagcaaataaaagaa

SEQ ID NO: 632137 - DNA, 33 bp, Homo sapien
tataacaggtataaaactagccaagatttgaat

SEQ ID NO: 632138 - DNA, 33 bp, Homo sapien
tataacaggtataaaattagccaagatttgaat

SEQ ID NO: 632139 - DNA, 33 bp, Homo sapien
actatctctacagaaacttaggtgttaatctaa

SEQ ID NO: 632140 - DNA, 33 bp, Homo sapien
actatctctacagaaatttaggtgttaatctaa

SEQ ID NO: 632141 - DNA, 33 bp, Homo sapien
ttttatagtaccatcaatagtaggcggaaatga

SEQ ID NO: 632142 - DNA, 33 bp, Homo sapien
ttttatagtaccatcagtagtaggcggaaatga

SEQ ID NO: 632143 - DNA, 33 bp, Homo sapien
ggcccaaagtgaagcactccctgttttcctgtg

SEQ ID NO: 632144 - DNA, 33 bp, Homo sapien
ggcccaaagtgaagcattccctgttttcctgtg

SEQ ID NO: 632145 - DNA, 33 bp, Homo sapien
tggcctacaacataccaactacacttgaggctg

SEQ ID NO: 632146 - DNA, 33 bp, Homo sapien
tggcctacaacataccgactacacttgaggctg

SEQ ID NO: 632147 - DNA, 33 bp, Homo sapien
attacaaaaagcctcccaaagaaagcagaggct

SEQ ID NO: 632148 - DNA, 33 bp, Homo sapien
attacaaaaagcctccgaaagaaagcagaggct

SEQ ID NO: 632149 - DNA, 33 bp, Homo sapien
ctactgtataaaactacagacaaaatgtatctg

SEQ ID NO: 632150 - DNA, 33 bp, Homo sapien
ctactgtataaaactatagacaaaatgtatctg

SEQ ID NO: 632151 - DNA, 33 bp, Homo sapien
tctaaacttttctcaccgcatttcattcatttg

SEQ ID NO: 632152 - DNA, 33 bp, Homo sapien
tctaaacttttctcacggcatttcattcatttg

SEQ ID NO: 632153 - DNA, 33 bp, Homo sapien
gctggtggcagcgaaaacattcttattgcatgt

SEQ ID NO: 632154 - DNA, 33 bp, Homo sapien
gctggtggcagcgaaagcattcttattgcatgt

SEQ ID NO: 632155 - DNA, 33 bp, Homo sapien
ctgccatggtaagttgcaattttctgtatctgc

SEQ ID NO: 632156 - DNA, 33 bp, Homo sapien
ctgccatggtaagttgtaattttctgtatctgc

SEQ ID NO: 632157 - DNA, 33 bp, Homo sapien
gtggtgattgttgcacaatatataagtactaaa

SEQ ID NO: 632158 - DNA, 33 bp, Homo sapien
gtggtgattgttgcaccatatataagtactaaa

SEQ ID NO: 632159 - DNA, 33 bp, Homo sapien
atcagcctgggaatcaagttcttatcaaaagct

SEQ ID NO: 632160 - DNA, 33 bp, Homo sapien
atcagcctgggaatcatgttcttatcaaaagct

SEQ ID NO: 632161 - DNA, 33 bp, Homo sapien
ggaaacatggtgcgccagacgttactgcaggca

SEQ ID NO: 632162 - DNA, 33 bp, Homo sapien
ggaaacatggtgcgccggacgttactgcaggca

SEQ ID NO: 632163 - DNA, 33 bp, Homo sapien
aaaaaatatatatcaagcaagaagaaaagaaca

SEQ ID NO: 632164 - DNA, 33 bp, Homo sapien
aaaaaatatatatcaatcaagaagaaaagaaca

SEQ ID NO: 632165 - DNA, 33 bp, Homo sapien
gcccaagacaatgtggcaccttgctacacagaa

SEQ ID NO: 632166 - DNA, 33 bp, Homo sapien
gcccaagacaatgtgggaccttgctacacagaa

SEQ ID NO: 632167 - DNA, 33 bp, Homo sapien
gtgtgtgtatgtggacaagatttttcaaatatc

SEQ ID NO: 632168 - DNA, 33 bp, Homo sapien
gtgtgtgtatgtggacgagatttttcaaatatc

SEQ ID NO: 632169 - DNA, 33 bp, Homo sapien
aacttcagcttacctacacataagtggactcat

SEQ ID NO: 632170 - DNA, 33 bp, Homo sapien
aacttcagcttacctatacataagtggactcat

SEQ ID NO: 632171 - DNA, 33 bp, Homo sapien
tggggaaaagagggtactacattctagatagaa

SEQ ID NO: 632172 - DNA, 33 bp, Homo sapien
tggggaaaagagggtattacattctagatagaa

SEQ ID NO: 632173 - DNA, 33 bp, Homo sapien
cagacatttattagggcagtgcagcctgttctc

SEQ ID NO: 632174 - DNA, 33 bp, Homo sapien
cagacatttattagggtagtgcagcctgttctc

SEQ ID NO: 632175 - DNA, 33 bp, Homo sapien
aaaatttgtgtagccacagcttcagatttagtg

SEQ ID NO: 632176 - DNA, 33 bp, Homo sapien
aaaatttgtgtagccatagcttcagatttagtg

SEQ ID NO: 632177 - DNA, 33 bp, Homo sapien
attgaaaatactcatcaagaaggaaaaataaag

SEQ ID NO: 632178 - DNA, 33 bp, Homo sapien
attgaaaatactcatccagaaggaaaaataaag

SEQ ID NO: 632179 - DNA, 33 bp, Homo sapien
cagaattaaatgggaaatacataaatgagttaa

SEQ ID NO: 632180 - DNA, 33 bp, Homo sapien
cagaattaaatgggaagtacataaatgagttaa

SEQ ID NO: 632181 - DNA, 33 bp, Homo sapien
catcctgatcaaaatactaaatgagttccacaa

SEQ ID NO: 632182 - DNA, 33 bp, Homo sapien
catcctgatcaaaatattaaatgagttccacaa

SEQ ID NO: 632183 - DNA, 33 bp, Homo sapien
caggatgcataggttacaatttttgcaaacact

SEQ ID NO: 632184 - DNA, 33 bp, Homo sapien
caggatgcataggttataatttttgcaaacact

SEQ ID NO: 632185 - DNA, 33 bp, Homo sapien
atgaccaggtctgctacatctgtgtccccagct

SEQ ID NO: 632186 - DNA, 33 bp, Homo sapien
atgaccaggtctgctatatctgtgtccccagct

SEQ ID NO: 632187 - DNA, 33 bp, Homo sapien
cacactcagggtatgccaggaaggggccctgat

SEQ ID NO: 632188 - DNA, 33 bp, Homo sapien
cacactcagggtatgctaggaaggggccctgat

SEQ ID NO: 632189 - DNA, 33 bp, Homo sapien
gccactctttgtacaacaaattacagggtcata

SEQ ID NO: 632190 - DNA, 33 bp, Homo sapien
gccactctttgtacaataaattacagggtcata

SEQ ID NO: 632191 - DNA, 33 bp, Homo sapien
ccactatcattccacacattggttcctgttagg

SEQ ID NO: 632192 - DNA, 33 bp, Homo sapien
ccactatcattccacatattggttcctgttagg

SEQ ID NO: 632193 - DNA, 33 bp, Homo sapien
ttactaagaagacatacggataccaactaagca

SEQ ID NO: 632194 - DNA, 33 bp, Homo sapien
ttactaagaagacatatggataccaactaagca

SEQ ID NO: 632195 - DNA, 33 bp, Homo sapien
gctacccactcgctaccccaggatgcaggttcc

SEQ ID NO: 632196 - DNA, 33 bp, Homo sapien
gctacccactcgctactccaggatgcaggttcc

SEQ ID NO: 632197 - DNA, 33 bp, Homo sapien
taagtcctgccccctacgctctccatgtctgtc

SEQ ID NO: 632198 - DNA, 33 bp, Homo sapien
taagtcctgccccctatgctctccatgtctgtc

SEQ ID NO: 632199 - DNA, 33 bp, Homo sapien
ggcacactgggtgttacaggaacctggccacag

SEQ ID NO: 632200 - DNA, 33 bp, Homo sapien
ggcacactgggtgttataggaacctggccacag

SEQ ID NO: 632201 - DNA, 33 bp, Homo sapien
ttcgtggactcctccaatctggggtctctgcca

SEQ ID NO: 632202 - DNA, 33 bp, Homo sapien
ttcgtggactcctccagtctggggtctctgcca

SEQ ID NO: 632203 - DNA, 33 bp, Homo sapien
tggatgactcattaccaaagcattcctgagaaa

SEQ ID NO: 632204 - DNA, 33 bp, Homo sapien
tggatgactcattaccgaagcattcctgagaaa

SEQ ID NO: 632205 - DNA, 33 bp, Homo sapien
gaaaatggagcaatacacactagcccaccattt

SEQ ID NO: 632206 - DNA, 33 bp, Homo sapien
gaaaatggagcaatacgcactagcccaccattt

SEQ ID NO: 632207 - DNA, 33 bp, Homo sapien
agacagtgctgttcaccggtcagctgaggctct

SEQ ID NO: 632208 - DNA, 33 bp, Homo sapien
agacagtgctgttcacgggtcagctgaggctct

SEQ ID NO: 632209 - DNA, 33 bp, Homo sapien
aatactttccagaaaagctcccaactgcttctg

SEQ ID NO: 632210 - DNA, 33 bp, Homo sapien
aatactttccagaaaatctcccaactgcttctg

SEQ ID NO: 632211 - DNA, 33 bp, Homo sapien
ggagtggtcaaacagcactatggagagtggagc

SEQ ID NO: 632212 - DNA, 33 bp, Homo sapien
ggagtggtcaaacagccctatggagagtggagc

SEQ ID NO: 632213 - DNA, 33 bp, Homo sapien
aagaccaccatccagcccaccaatcacaacttg

SEQ ID NO: 632214 - DNA, 33 bp, Homo sapien
aagaccaccatccagctcaccaatcacaacttg

SEQ ID NO: 632215 - DNA, 33 bp, Homo sapien
agaaaggtggatttcacagagattccaaactcg

SEQ ID NO: 632216 - DNA, 33 bp, Homo sapien
agaaaggtggatttcatagagattccaaactcg

SEQ ID NO: 632217 - DNA, 33 bp, Homo sapien
atgatgcttcagacccaaatgagaggaccacat

SEQ ID NO: 632218 - DNA, 33 bp, Homo sapien
atgatgcttcagacccgaatgagaggaccacat

SEQ ID NO: 632219 - DNA, 33 bp, Homo sapien
gaatgtgaccactaaacgtgtctaaattatttg

SEQ ID NO: 632220 - DNA, 33 bp, Homo sapien
gaatgtgaccactaaatgtgtctaaattatttg

SEQ ID NO: 632221 - DNA, 33 bp, Homo sapien
gcggctttggacttgaaaaaaagtggatcatgc

SEQ ID NO: 632222 - DNA, 33 bp, Homo sapien
gcggctttggacttgacaaaaagtggatcatgc

SEQ ID NO: 632223 - DNA, 33 bp, Homo sapien
cacaaactgggtcaacaggggccatttattatc

SEQ ID NO: 632224 - DNA, 33 bp, Homo sapien
cacaaactgggtcaacgggggccatttattatc

SEQ ID NO: 632225 - DNA, 33 bp, Homo sapien
ggagagaaggcgaaggcattaaggtaatgaagg

SEQ ID NO: 632226 - DNA, 33 bp, Homo sapien
ggagagaaggcgaagggattaaggtaatgaagg

SEQ ID NO: 632227 - DNA, 33 bp, Homo sapien
agggaggcccctaaccacatccattcattgaaa

SEQ ID NO: 632228 - DNA, 33 bp, Homo sapien
agggaggcccctaaccgcatccattcattgaaa

SEQ ID NO: 632229 - DNA, 33 bp, Homo sapien
tcctcaggctccacgaagagcacaatgccattc

SEQ ID NO: 632230 - DNA, 33 bp, Homo sapien
tcctcaggctccacgatgagcacaatgccattc

SEQ ID NO: 632231 - DNA, 33 bp, Homo sapien
cactaatggttcacaactcatctcttacctttc

SEQ ID NO: 632232 - DNA, 33 bp, Homo sapien
cactaatggttcacaattcatctcttacctttc

SEQ ID NO: 632233 - DNA, 33 bp, Homo sapien
ttgtatttcaccaaaacgcagctgtgtttcaca

SEQ ID NO: 632234 - DNA, 33 bp, Homo sapien
ttgtatttcaccaaaatgcagctgtgtttcaca

SEQ ID NO: 632235 - DNA, 33 bp, Homo sapien
ctgtgtttcacaaccaccattctgtactgtctt

SEQ ID NO: 632236 - DNA, 33 bp, Homo sapien
ctgtgtttcacaaccatcattctgtactgtctt

SEQ ID NO: 632237 - DNA, 33 bp, Homo sapien
cacacaaaaggactcaatgagaattgaaaacca

SEQ ID NO: 632238 - DNA, 33 bp, Homo sapien
cacacaaaaggactcattgagaattgaaaacca

SEQ ID NO: 632239 - DNA, 33 bp, Homo sapien
tctaaggatatttagaagctgacggcattaaat

SEQ ID NO: 632240 - DNA, 33 bp, Homo sapien
tctaaggatatttagaggctgacggcattaaat

SEQ ID NO: 632241 - DNA, 33 bp, Homo sapien
agcagctcaagcagaaaatggtcaactacatcc

SEQ ID NO: 632242 - DNA, 33 bp, Homo sapien
agcagctcaagcagaagatggtcaactacatcc

SEQ ID NO: 632243 - DNA, 33 bp, Homo sapien
ctaggcaataatatgacgaaaaattttgtcact

SEQ ID NO: 632244 - DNA, 33 bp, Homo sapien
ctaggcaataatatgatgaaaaattttgtcact

SEQ ID NO: 632245 - DNA, 33 bp, Homo sapien
cgagctctaggctataagaagagacagctggac

SEQ ID NO: 632246 - DNA, 33 bp, Homo sapien
cgagctctaggctataggaagagacagctggac

SEQ ID NO: 632247 - DNA, 33 bp, Homo sapien
ttaatgaaaggaaataaaggcctagcccaagca

SEQ ID NO: 632248 - DNA, 33 bp, Homo sapien
ttaatgaaaggaaatagaggcctagcccaagca

SEQ ID NO: 632249 - DNA, 33 bp, Homo sapien
gtatcatgccacggtcccaactacagggtccta

SEQ ID NO: 632250 - DNA, 33 bp, Homo sapien
gtatcatgccacggtctcaactacagggtccta

SEQ ID NO: 632251 - DNA, 33 bp, Homo sapien
acagacgaactttcttaaaaggctggtgggggc

SEQ ID NO: 632252 - DNA, 33 bp, Homo sapien
acagacgaactttctttaaaggctggtgggggc

SEQ ID NO: 632253 - DNA, 33 bp, Homo sapien
cttgataaccaaatacagaattaaattgcttac

SEQ ID NO: 632254 - DNA, 33 bp, Homo sapien
cttgataaccaaatacggaattaaattgcttac

SEQ ID NO: 632255 - DNA, 33 bp, Homo sapien
agcagggccagttctagcctgagcatcttctct

SEQ ID NO: 632256 - DNA, 33 bp, Homo sapien
agcagggccagttctatcctgagcatcttctct

SEQ ID NO: 632257 - DNA, 33 bp, Homo sapien
gcagcgcggaccctgacgacacgccccaagatg

SEQ ID NO: 632258 - DNA, 33 bp, Homo sapien
gcagcgcggaccctgatgacacgccccaagatg

SEQ ID NO: 632259 - DNA, 33 bp, Homo sapien
ccccgatgggcatgcgacactgttcccaattta

SEQ ID NO: 632260 - DNA, 33 bp, Homo sapien
ccccgatgggcatgcggcactgttcccaattta

SEQ ID NO: 632261 - DNA, 33 bp, Homo sapien
gaggatgctgtgcagcactgggccttacctcca

SEQ ID NO: 632262 - DNA, 33 bp, Homo sapien
gaggatgctgtgcagcgctgggccttacctcca

SEQ ID NO: 632263 - DNA, 33 bp, Homo sapien
caccttatgattaaatcaggacacccaacatca

SEQ ID NO: 632264 - DNA, 33 bp, Homo sapien
caccttatgattaaattaggacacccaacatca

SEQ ID NO: 632265 - DNA, 33 bp, Homo sapien
gagtccagtagtgacaaatgcagagtgtttctt

SEQ ID NO: 632266 - DNA, 33 bp, Homo sapien
gagtccagtagtgacagatgcagagtgtttctt

SEQ ID NO: 632267 - DNA, 33 bp, Homo sapien
agcatttttgaaaagaaaagtcagtaatgaata

SEQ ID NO: 632268 - DNA, 33 bp, Homo sapien
agcatttttgaaaagagaagtcagtaatgaata

SEQ ID NO: 632269 - DNA, 33 bp, Homo sapien
accaatcagagcatcacggggactgctccaggc

SEQ ID NO: 632270 - DNA, 33 bp, Homo sapien
accaatcagagcatcagggggactgctccaggc

SEQ ID NO: 632271 - DNA, 33 bp, Homo sapien
agttccttcgcaagcacgctcccttctcgggaa

SEQ ID NO: 632272 - DNA, 33 bp, Homo sapien
agttccttcgcaagcaggctcccttctcgggaa

SEQ ID NO: 632273 - DNA, 33 bp, Homo sapien
agagaaagaccgtggcacaaagcagaggacgcc

SEQ ID NO: 632274 - DNA, 33 bp, Homo sapien
agagaaagaccgtggcgcaaagcagaggacgcc

SEQ ID NO: 632275 - DNA, 33 bp, Homo sapien
gagctggaagaggctcagactccagagggcatt

SEQ ID NO: 632276 - DNA, 33 bp, Homo sapien
gagctggaagaggctccgactccagagggcatt

SEQ ID NO: 632277 - DNA, 33 bp, Homo sapien
tgggcggagtctacccagaggagaaagaggctt

SEQ ID NO: 632278 - DNA, 33 bp, Homo sapien
tgggcggagtctacccggaggagaaagaggctt

SEQ ID NO: 632279 - DNA, 33 bp, Homo sapien
actgtcagttaagagaatacatataaacaatac

SEQ ID NO: 632280 - DNA, 33 bp, Homo sapien
actgtcagttaagagactacatataaacaatac

SEQ ID NO: 632281 - DNA, 33 bp, Homo sapien
gatttgacttccatcacaatttgcttctgaatg

SEQ ID NO: 632282 - DNA, 33 bp, Homo sapien
gatttgacttccatcataatttgcttctgaatg

SEQ ID NO: 632283 - DNA, 33 bp, Homo sapien
ttcattcagggacctaacatacttccaggctaa

SEQ ID NO: 632284 - DNA, 33 bp, Homo sapien
ttcattcagggacctagcatacttccaggctaa

SEQ ID NO: 632285 - DNA, 33 bp, Homo sapien
gacagaattcgagttacccttctcagaacatgt

SEQ ID NO: 632286 - DNA, 33 bp, Homo sapien
gacagaattcgagttatccttctcagaacatgt

SEQ ID NO: 632287 - DNA, 33 bp, Homo sapien
catatggacttccacccggtgctggagtcccta

SEQ ID NO: 632288 - DNA, 33 bp, Homo sapien
catatggacttccacctggtgctggagtcccta

SEQ ID NO: 632289 - DNA, 33 bp, Homo sapien
gttaaatgccacttccaggaagcataagagagc

SEQ ID NO: 632290 - DNA, 33 bp, Homo sapien
gttaaatgccacttccgggaagcataagagagc

SEQ ID NO: 632291 - DNA, 33 bp, Homo sapien
ggattccagaaatagcgacattcattttcactt

SEQ ID NO: 632292 - DNA, 33 bp, Homo sapien
ggattccagaaatagctacattcattttcactt

SEQ ID NO: 632293 - DNA, 33 bp, Homo sapien
tatgtagcaatggacaatgtactgaaagaacca

SEQ ID NO: 632294 - DNA, 33 bp, Homo sapien
tatgtagcaatggacagtgtactgaaagaacca

SEQ ID NO: 632295 - DNA, 33 bp, Homo sapien
aattcgtctgaaaagggcctcttaaaatcagtg

SEQ ID NO: 632296 - DNA, 33 bp, Homo sapien
aattcgtctgaaaaggtcctcttaaaatcagtg

SEQ ID NO: 632297 - DNA, 33 bp, Homo sapien
gtgattcactagttaccgctttattgacacgtt

SEQ ID NO: 632298 - DNA, 33 bp, Homo sapien
gtgattcactagttactgctttattgacacgtt

SEQ ID NO: 632299 - DNA, 33 bp, Homo sapien
gaactaatatttctggaatgcctagctttgtta

SEQ ID NO: 632300 - DNA, 33 bp, Homo sapien
gaactaatatttctgggatgcctagctttgtta

SEQ ID NO: 632301 - DNA, 33 bp, Homo sapien
tcagtctaacctcaggacaacaccttagagcta

SEQ ID NO: 632302 - DNA, 33 bp, Homo sapien
tcagtctaacctcaggtcaacaccttagagcta

SEQ ID NO: 632303 - DNA, 33 bp, Homo sapien
cacatatcctcaaaataaaaatggctttgaaaa

SEQ ID NO: 632304 - DNA, 33 bp, Homo sapien
cacatatcctcaaaatgaaaatggctttgaaaa

SEQ ID NO: 632305 - DNA, 33 bp, Homo sapien
actccggctcattgtacgtacaggcattattaa

SEQ ID NO: 632306 - DNA, 33 bp, Homo sapien
actccggctcattgtatgtacaggcattattaa

SEQ ID NO: 632307 - DNA, 33 bp, Homo sapien
ttttttttccttggtaggtatgtctgacaatta

SEQ ID NO: 632308 - DNA, 33 bp, Homo sapien
ttttttttccttggtatgtatgtctgacaatta

SEQ ID NO: 632309 - DNA, 33 bp, Homo sapien
tacagcattatacgtacagaaaaatctattctt

SEQ ID NO: 632310 - DNA, 33 bp, Homo sapien
tacagcattatacgtagagaaaaatctattctt

SEQ ID NO: 632311 - DNA, 33 bp, Homo sapien
gaagcattagcccaggccagatactcgaaaatt

SEQ ID NO: 632312 - DNA, 33 bp, Homo sapien
gaagcattagcccaggtcagatactcgaaaatt

SEQ ID NO: 632313 - DNA, 33 bp, Homo sapien
aaaagagagatagataagtcagagtccattcat

SEQ ID NO: 632314 - DNA, 33 bp, Homo sapien
aaaagagagatagatatgtcagagtccattcat

SEQ ID NO: 632315 - DNA, 33 bp, Homo sapien
agcaaattaaaatgcccatatcactacaacaga

SEQ ID NO: 632316 - DNA, 33 bp, Homo sapien
agcaaattaaaatgcctatatcactacaacaga

SEQ ID NO: 632317 - DNA, 33 bp, Homo sapien
catatcttaaggctcaatcaatccaaaacaacc

SEQ ID NO: 632318 - DNA, 33 bp, Homo sapien
catatcttaaggctcactcaatccaaaacaacc

SEQ ID NO: 632319 - DNA, 33 bp, Homo sapien
ccttttgccatcacccgattcaaggtccttgtc

SEQ ID NO: 632320 - DNA, 33 bp, Homo sapien
ccttttgccatcaccctattcaaggtccttgtc

SEQ ID NO: 632321 - DNA, 33 bp, Homo sapien
gactctgagacttttggaaagaagaaaggacaa

SEQ ID NO: 632322 - DNA, 33 bp, Homo sapien
gactctgagacttttgtaaagaagaaaggacaa

SEQ ID NO: 632323 - DNA, 33 bp, Homo sapien
ccattttaaaacttggaattgaactctggaatc

SEQ ID NO: 632324 - DNA, 33 bp, Homo sapien
ccattttaaaacttggcattgaactctggaatc

SEQ ID NO: 632325 - DNA, 33 bp, Homo sapien
cttctctgagcaagcacagtaaaaaattccaga

SEQ ID NO: 632326 - DNA, 33 bp, Homo sapien
cttctctgagcaagcatagtaaaaaattccaga

SEQ ID NO: 632327 - DNA, 33 bp, Homo sapien
cttccagattgaagccacttttcatgtctacca

SEQ ID NO: 632328 - DNA, 33 bp, Homo sapien
cttccagattgaagccgcttttcatgtctacca

SEQ ID NO: 632329 - DNA, 33 bp, Homo sapien
aaaaggacatacatgaagaattgccaaaacgga

SEQ ID NO: 632330 - DNA, 33 bp, Homo sapien
aaaaggacatacatgaggaattgccaaaacgga

SEQ ID NO: 632331 - DNA, 33 bp, Homo sapien
tccaaggatacaaaaccgtggatacaaaaaaaa

SEQ ID NO: 632332 - DNA, 33 bp, Homo sapien
tccaaggatacaaaactgtggatacaaaaaaaa

SEQ ID NO: 632333 - DNA, 33 bp, Homo sapien
gtttcttatttgtgtcaatgtagtttaccttct

SEQ ID NO: 632334 - DNA, 33 bp, Homo sapien
gtttcttatttgtgtcgatgtagtttaccttct

SEQ ID NO: 632335 - DNA, 33 bp, Homo sapien
ggccaaaggtttaaccacattagcctattcctt

SEQ ID NO: 632336 - DNA, 33 bp, Homo sapien
ggccaaaggtttaacctcattagcctattcctt

SEQ ID NO: 632337 - DNA, 33 bp, Homo sapien
tctgaagctgaaaacactggcaggggatgcaaa

SEQ ID NO: 632338 - DNA, 33 bp, Homo sapien
tctgaagctgaaaacattggcaggggatgcaaa

SEQ ID NO: 632339 - DNA, 33 bp, Homo sapien
tgttttcataatcgagaactcatttgtgtcatg

SEQ ID NO: 632340 - DNA, 33 bp, Homo sapien
tgttttcataatcgaggactcatttgtgtcatg

SEQ ID NO: 632341 - DNA, 33 bp, Homo sapien
atgacacaggtctgtacgagtccctggaagatg

SEQ ID NO: 632342 - DNA, 33 bp, Homo sapien
atgacacaggtctgtatgagtccctggaagatg

SEQ ID NO: 632343 - DNA, 33 bp, Homo sapien
gagaaagagaaaataagtagagccccagaggtt

SEQ ID NO: 632344 - DNA, 33 bp, Homo sapien
gagaaagagaaaataattagagccccagaggtt

SEQ ID NO: 632345 - DNA, 33 bp, Homo sapien
ctataaatgaggctcaaaagggaccagacagaa

SEQ ID NO: 632346 - DNA, 33 bp, Homo sapien
ctataaatgaggctcacaagggaccagacagaa

SEQ ID NO: 632347 - DNA, 33 bp, Homo sapien
ataaagtctgcatgacaactctggttcctccaa

SEQ ID NO: 632348 - DNA, 33 bp, Homo sapien
ataaagtctgcatgacgactctggttcctccaa

SEQ ID NO: 632349 - DNA, 33 bp, Homo sapien
tccctaaccattctgaacctcacttgcctcagc

SEQ ID NO: 632350 - DNA, 33 bp, Homo sapien
tccctaaccattctgagcctcacttgcctcagc

SEQ ID NO: 632351 - DNA, 33 bp, Homo sapien
gccccaggttttccaacgagccagctacagagc

SEQ ID NO: 632352 - DNA, 33 bp, Homo sapien
gccccaggttttccaatgagccagctacagagc

SEQ ID NO: 632353 - DNA, 33 bp, Homo sapien
tatctcttacccatcaataaagattctgatttt

SEQ ID NO: 632354 - DNA, 33 bp, Homo sapien
tatctcttacccatcagtaaagattctgatttt

SEQ ID NO: 632355 - DNA, 33 bp, Homo sapien
aggcccgtttcttcaacaggattatcagagcaa

SEQ ID NO: 632356 - DNA, 33 bp, Homo sapien
aggcccgtttcttcaataggattatcagagcaa

SEQ ID NO: 632357 - DNA, 33 bp, Homo sapien
ccacccccaattaactcacagggatcctcaggc

SEQ ID NO: 632358 - DNA, 33 bp, Homo sapien
ccacccccaattaacttacagggatcctcaggc

SEQ ID NO: 632359 - DNA, 33 bp, Homo sapien
ggacacagtcacagtcacgcaggatgggtaagc

SEQ ID NO: 632360 - DNA, 33 bp, Homo sapien
ggacacagtcacagtcgcgcaggatgggtaagc

SEQ ID NO: 632361 - DNA, 33 bp, Homo sapien
tgaagacaaacttgagcactcatgaaaatagga

SEQ ID NO: 632362 - DNA, 33 bp, Homo sapien
tgaagacaaacttgaggactcatgaaaatagga

SEQ ID NO: 632363 - DNA, 33 bp, Homo sapien
ttagacaccaagggacaagtggagagattgtgg

SEQ ID NO: 632364 - DNA, 33 bp, Homo sapien
ttagacaccaagggacgagtggagagattgtgg

SEQ ID NO: 632365 - DNA, 33 bp, Homo sapien
ctcgtgtcatgaatatcaaaatcgaaggtgccc

SEQ ID NO: 632366 - DNA, 33 bp, Homo sapien
ctcgtgtcatgaatatgaaaatcgaaggtgccc

SEQ ID NO: 632367 - DNA, 33 bp, Homo sapien
aagagaccttttcacaatgcggatcagatctgc

SEQ ID NO: 632368 - DNA, 33 bp, Homo sapien
aagagaccttttcacagtgcggatcagatctgc

SEQ ID NO: 632369 - DNA, 33 bp, Homo sapien
gagccacactgaccgacacctggaactgctcca

SEQ ID NO: 632370 - DNA, 33 bp, Homo sapien
gagccacactgaccgatacctggaactgctcca

SEQ ID NO: 632371 - DNA, 33 bp, Homo sapien
ggaaattgagacatagacagcataaatcattct

SEQ ID NO: 632372 - DNA, 33 bp, Homo sapien
ggaaattgagacatagtcagcataaatcattct

SEQ ID NO: 632373 - DNA, 33 bp, Homo sapien
aagggtcatgcaggctaagaatctggtgttcca

SEQ ID NO: 632374 - DNA, 33 bp, Homo sapien
aagggtcatgcaggctgagaatctggtgttcca

SEQ ID NO: 632375 - DNA, 33 bp, Homo sapien
aatgtgggagtcttacacctgctgtttggaaga

SEQ ID NO: 632376 - DNA, 33 bp, Homo sapien
aatgtgggagtcttacccctgctgtttggaaga

SEQ ID NO: 632377 - DNA, 33 bp, Homo sapien
gattatttttatcctcaaaggctccaggcagat

SEQ ID NO: 632378 - DNA, 33 bp, Homo sapien
gattatttttatcctcgaaggctccaggcagat

SEQ ID NO: 632379 - DNA, 33 bp, Homo sapien
gctgctctgagccaaccctgtaactgctgaaga

SEQ ID NO: 632380 - DNA, 33 bp, Homo sapien
gctgctctgagccaactctgtaactgctgaaga

SEQ ID NO: 632381 - DNA, 33 bp, Homo sapien
atcttagaacatattacggtgtcatgacgaaat

SEQ ID NO: 632382 - DNA, 33 bp, Homo sapien
atcttagaacatattatggtgtcatgacgaaat

SEQ ID NO: 632383 - DNA, 33 bp, Homo sapien
ggagtttgaggatacaataagccgtgttcatgc

SEQ ID NO: 632384 - DNA, 33 bp, Homo sapien
ggagtttgaggatacagtaagccgtgttcatgc

SEQ ID NO: 632385 - DNA, 33 bp, Homo sapien
tcgtccaagccaacaacagtcgctgggtttatc

SEQ ID NO: 632386 - DNA, 33 bp, Homo sapien
tcgtccaagccaacaagagtcgctgggtttatc

SEQ ID NO: 632387 - DNA, 33 bp, Homo sapien
gagccacatggtatcgcagagggtcagtactgg

SEQ ID NO: 632388 - DNA, 33 bp, Homo sapien
gagccacatggtatcgtagagggtcagtactgg

SEQ ID NO: 632389 - DNA, 33 bp, Homo sapien
acaggagtgtctctgcgctggaaccaggacaca

SEQ ID NO: 632390 - DNA, 33 bp, Homo sapien
acaggagtgtctctgctctggaaccaggacaca

SEQ ID NO: 632391 - DNA, 33 bp, Homo sapien
taatgacaaagcggaacgcagctgcttctaact

SEQ ID NO: 632392 - DNA, 33 bp, Homo sapien
taatgacaaagcggaatgcagctgcttctaact

SEQ ID NO: 632393 - DNA, 33 bp, Homo sapien
taacagcaattttgaaaatgcaaattagtattg

SEQ ID NO: 632394 - DNA, 33 bp, Homo sapien
taacagcaattttgaagatgcaaattagtattg

SEQ ID NO: 632395 - DNA, 33 bp, Homo sapien
tcagaaaggccaagcacagttcatgagatccta

SEQ ID NO: 632396 - DNA, 33 bp, Homo sapien
tcagaaaggccaagcatagttcatgagatccta

SEQ ID NO: 632397 - DNA, 33 bp, Homo sapien
ctacctcatgcctctacgtcatttcatactatt

SEQ ID NO: 632398 - DNA, 33 bp, Homo sapien
ctacctcatgcctctatgtcatttcatactatt

SEQ ID NO: 632399 - DNA, 33 bp, Homo sapien
actttgagatcatgtgaatactctgtttcccag

SEQ ID NO: 632400 - DNA, 33 bp, Homo sapien
actttgagatcatgtggatactctgtttcccag

SEQ ID NO: 632401 - DNA, 33 bp, Homo sapien
actaaaatactgctataaagcacagagaagctc

SEQ ID NO: 632402 - DNA, 33 bp, Homo sapien
actaaaatactgctatgaagcacagagaagctc

SEQ ID NO: 632403 - DNA, 33 bp, Homo sapien
tcacttctctacttgggataaatgtctatggcc

SEQ ID NO: 632404 - DNA, 33 bp, Homo sapien
tcacttctctacttggtataaatgtctatggcc

SEQ ID NO: 632405 - DNA, 33 bp, Homo sapien
tgtaggtattttcataaagccaagctgtccagg

SEQ ID NO: 632406 - DNA, 33 bp, Homo sapien
tgtaggtattttcatagagccaagctgtccagg

SEQ ID NO: 632407 - DNA, 33 bp, Homo sapien
aactaacatacacctgcaattaatgaagttaat

SEQ ID NO: 632408 - DNA, 33 bp, Homo sapien
aactaacatacacctggaattaatgaagttaat

SEQ ID NO: 632409 - DNA, 33 bp, Homo sapien
gtgtttttgagacttacctgtgtcaacgctagc

SEQ ID NO: 632410 - DNA, 33 bp, Homo sapien
gtgtttttgagacttatctgtgtcaacgctagc

SEQ ID NO: 632411 - DNA, 33 bp, Homo sapien
cactgtggttgatatccaaaatgttggtattat

SEQ ID NO: 632412 - DNA, 33 bp, Homo sapien
cactgtggttgatatctaaaatgttggtattat

SEQ ID NO: 632413 - DNA, 33 bp, Homo sapien
caaactgtcaatatacacgagagcttggatgga

SEQ ID NO: 632414 - DNA, 33 bp, Homo sapien
caaactgtcaatatacgcgagagcttggatgga

SEQ ID NO: 632415 - DNA, 33 bp, Homo sapien
gtggagattatccactaaattagagccatagaa

SEQ ID NO: 632416 - DNA, 33 bp, Homo sapien
gtggagattatccactgaattagagccatagaa

SEQ ID NO: 632417 - DNA, 33 bp, Homo sapien
atcaataacagagacacatcaatcacaagagac

SEQ ID NO: 632418 - DNA, 33 bp, Homo sapien
atcaataacagagacatatcaatcacaagagac

SEQ ID NO: 632419 - DNA, 33 bp, Homo sapien
caaggtggaggccctacgttacacaggtgaatg

SEQ ID NO: 632420 - DNA, 33 bp, Homo sapien
caaggtggaggccctatgttacacaggtgaatg

SEQ ID NO: 632421 - DNA, 33 bp, Homo sapien
ccttatcctgccatacagtagctaggactacag

SEQ ID NO: 632422 - DNA, 33 bp, Homo sapien
ccttatcctgccatacggtagctaggactacag

SEQ ID NO: 632423 - DNA, 33 bp, Homo sapien
gggagctttcctgtggaacttgaggtcttattc

SEQ ID NO: 632424 - DNA, 33 bp, Homo sapien
gggagctttcctgtgggacttgaggtcttattc

SEQ ID NO: 632425 - DNA, 33 bp, Homo sapien
cttaaaaggttacagaaggcaaagacagaaagg

SEQ ID NO: 632426 - DNA, 33 bp, Homo sapien
cttaaaaggttacagagggcaaagacagaaagg

SEQ ID NO: 632427 - DNA, 33 bp, Homo sapien
ttctatttcagtgcaaacatctctggcaattag

SEQ ID NO: 632428 - DNA, 33 bp, Homo sapien
ttctatttcagtgcaaccatctctggcaattag

SEQ ID NO: 632429 - DNA, 33 bp, Homo sapien
ttctacgcagtgtcacccattgctatcttgaga

SEQ ID NO: 632430 - DNA, 33 bp, Homo sapien
ttctacgcagtgtcactcattgctatcttgaga

SEQ ID NO: 632431 - DNA, 33 bp, Homo sapien
agctgggaaacaactcaacttttctgctcccag

SEQ ID NO: 632432 - DNA, 33 bp, Homo sapien
agctgggaaacaactccacttttctgctcccag

SEQ ID NO: 632433 - DNA, 33 bp, Homo sapien
cattcggtacactacaccaatcatgaatgcata

SEQ ID NO: 632434 - DNA, 33 bp, Homo sapien
cattcggtacactacagcaatcatgaatgcata

SEQ ID NO: 632435 - DNA, 33 bp, Homo sapien
gcagggtgagttgaaaaaaggaagcactaatat

SEQ ID NO: 632436 - DNA, 33 bp, Homo sapien
gcagggtgagttgaaagaaggaagcactaatat

SEQ ID NO: 632437 - DNA, 33 bp, Homo sapien
cttgatcctttagaccacactcagggtatgtgc

SEQ ID NO: 632438 - DNA, 33 bp, Homo sapien
cttgatcctttagaccgcactcagggtatgtgc

SEQ ID NO: 632439 - DNA, 33 bp, Homo sapien
tattgctcaaccttaaaactatgggtcaagaag

SEQ ID NO: 632440 - DNA, 33 bp, Homo sapien
tattgctcaaccttaagactatgggtcaagaag

SEQ ID NO: 632441 - DNA, 33 bp, Homo sapien
ttcaatgctttttcaactgctacagaacatacc

SEQ ID NO: 632442 - DNA, 33 bp, Homo sapien
ttcaatgctttttcaattgctacagaacatacc

SEQ ID NO: 632443 - DNA, 33 bp, Homo sapien
gttaacaattaagatacagtttgttggagcatg

SEQ ID NO: 632444 - DNA, 33 bp, Homo sapien
gttaacaattaagatatagtttgttggagcatg

SEQ ID NO: 632445 - DNA, 33 bp, Homo sapien
ggcttccctgaagtcacgtcattttgtcagtgc

SEQ ID NO: 632446 - DNA, 33 bp, Homo sapien
ggcttccctgaagtcatgtcattttgtcagtgc

SEQ ID NO: 632447 - DNA, 33 bp, Homo sapien
cctattcatgctgatgaaaaaagggaacagact

SEQ ID NO: 632448 - DNA, 33 bp, Homo sapien
cctattcatgctgatggaaaaagggaacagact

SEQ ID NO: 632449 - DNA, 33 bp, Homo sapien
gagctgtagttttaaaaatatatcgaatctgag

SEQ ID NO: 632450 - DNA, 33 bp, Homo sapien
gagctgtagttttaaagatatatcgaatctgag

SEQ ID NO: 632451 - DNA, 33 bp, Homo sapien
ttataaaagatgaagacagaaaagttaatgtta

SEQ ID NO: 632452 - DNA, 33 bp, Homo sapien
ttataaaagatgaagagagaaaagttaatgtta

SEQ ID NO: 632453 - DNA, 33 bp, Homo sapien
tacagcagctttttcacggagactctcctctaa

SEQ ID NO: 632454 - DNA, 33 bp, Homo sapien
tacagcagctttttcatggagactctcctctaa

SEQ ID NO: 632455 - DNA, 33 bp, Homo sapien
tgagaatcttcttaacaggccagtgagaagttt

SEQ ID NO: 632456 - DNA, 33 bp, Homo sapien
tgagaatcttcttaacgggccagtgagaagttt

SEQ ID NO: 632457 - DNA, 33 bp, Homo sapien
gtacatcttcactgatcagccttcgctcaggtg

SEQ ID NO: 632458 - DNA, 33 bp, Homo sapien
gtacatcttcactgattagccttcgctcaggtg

SEQ ID NO: 632459 - DNA, 33 bp, Homo sapien
gaaagccttggtcttacgtggaaagacgctgtc

SEQ ID NO: 632460 - DNA, 33 bp, Homo sapien
gaaagccttggtcttatgtggaaagacgctgtc

SEQ ID NO: 632461 - DNA, 33 bp, Homo sapien
gctctgaagataaattaaaatgttggaagcaga

SEQ ID NO: 632462 - DNA, 33 bp, Homo sapien
gctctgaagataaattgaaatgttggaagcaga

SEQ ID NO: 632463 - DNA, 33 bp, Homo sapien
gacccgaggttttagggccaggagagactgaac

SEQ ID NO: 632464 - DNA, 33 bp, Homo sapien
gacccgaggttttaggtccaggagagactgaac

SEQ ID NO: 632465 - DNA, 33 bp, Homo sapien
tgagccgggaggcaccaccaaacaggctctccc

SEQ ID NO: 632466 - DNA, 33 bp, Homo sapien
tgagccgggaggcaccgccaaacaggctctccc

SEQ ID NO: 632467 - DNA, 33 bp, Homo sapien
tttgcagccctatagcaactcagtggcctctgc

SEQ ID NO: 632468 - DNA, 33 bp, Homo sapien
tttgcagccctatagcgactcagtggcctctgc

SEQ ID NO: 632469 - DNA, 33 bp, Homo sapien
agacttcttacacagaacggctaccagtggaag

SEQ ID NO: 632470 - DNA, 33 bp, Homo sapien
agacttcttacacagagcggctaccagtggaag

SEQ ID NO: 632471 - DNA, 33 bp, Homo sapien
ctctgcttcacttagaaatgagacagaagaccc

SEQ ID NO: 632472 - DNA, 33 bp, Homo sapien
ctctgcttcacttagagatgagacagaagaccc

SEQ ID NO: 632473 - DNA, 33 bp, Homo sapien
acataaaaacataccacgtacaacttgctgtac

SEQ ID NO: 632474 - DNA, 33 bp, Homo sapien
acataaaaacataccatgtacaacttgctgtac

SEQ ID NO: 632475 - DNA, 33 bp, Homo sapien
gaaacagataaactgacgatacaggatgtggca

SEQ ID NO: 632476 - DNA, 33 bp, Homo sapien
gaaacagataaactgaggatacaggatgtggca

SEQ ID NO: 632477 - DNA, 33 bp, Homo sapien
gtggagaggtgtcaaccgctggaccggccaggg

SEQ ID NO: 632478 - DNA, 33 bp, Homo sapien
gtggagaggtgtcaactgctggaccggccaggg

SEQ ID NO: 632479 - DNA, 33 bp, Homo sapien
attttgaaaacatggacaaaacattgttcctta

SEQ ID NO: 632480 - DNA, 33 bp, Homo sapien
attttgaaaacatggataaaacattgttcctta

SEQ ID NO: 632481 - DNA, 33 bp, Homo sapien
ccaacccagtcgacaaactgagtatttctgcag

SEQ ID NO: 632482 - DNA, 33 bp, Homo sapien
ccaacccagtcgacaagctgagtatttctgcag

SEQ ID NO: 632483 - DNA, 33 bp, Homo sapien
ctcaggtatatgaggacgttctgagtgggggtt

SEQ ID NO: 632484 - DNA, 33 bp, Homo sapien
ctcaggtatatgaggatgttctgagtgggggtt

SEQ ID NO: 632485 - DNA, 33 bp, Homo sapien
ggtcagggacttgcccagggacagaggaagtct

SEQ ID NO: 632486 - DNA, 33 bp, Homo sapien
ggtcagggacttgcccggggacagaggaagtct

SEQ ID NO: 632487 - DNA, 33 bp, Homo sapien
ggatatgcagaacagacggcatttacactcgag

SEQ ID NO: 632488 - DNA, 33 bp, Homo sapien
ggatatgcagaacagatggcatttacactcgag

SEQ ID NO: 632489 - DNA, 33 bp, Homo sapien
tctctgccaaataaaacgctcttaaacatgcat

SEQ ID NO: 632490 - DNA, 33 bp, Homo sapien
tctctgccaaataaaatgctcttaaacatgcat

SEQ ID NO: 632491 - DNA, 33 bp, Homo sapien
gagcctaaccatgtcaatcactcatcagaaggg

SEQ ID NO: 632492 - DNA, 33 bp, Homo sapien
gagcctaaccatgtcagtcactcatcagaaggg

SEQ ID NO: 632493 - DNA, 33 bp, Homo sapien
ttctaccaagtaaacacgcacaaaagaagaacg

SEQ ID NO: 632494 - DNA, 33 bp, Homo sapien
ttctaccaagtaaacatgcacaaaagaagaacg

SEQ ID NO: 632495 - DNA, 33 bp, Homo sapien
cccaaaggcccgctaggaagttgagcttgaaag

SEQ ID NO: 632496 - DNA, 33 bp, Homo sapien
cccaaaggcccgctagtaagttgagcttgaaag

SEQ ID NO: 632497 - DNA, 33 bp, Homo sapien
cttcctgtgccctgaactacccgagctggcttc

SEQ ID NO: 632498 - DNA, 33 bp, Homo sapien
cttcctgtgccctgaagtacccgagctggcttc

SEQ ID NO: 632499 - DNA, 33 bp, Homo sapien
agtgcacaaatgaatacatgatgtatcctagta

SEQ ID NO: 632500 - DNA, 33 bp, Homo sapien
agtgcacaaatgaatatatgatgtatcctagta

SEQ ID NO: 632501 - DNA, 33 bp, Homo sapien
gtgccattgtcagagaccagagtgataaggatg

SEQ ID NO: 632502 - DNA, 33 bp, Homo sapien
gtgccattgtcagagatcagagtgataaggatg

SEQ ID NO: 632503 - DNA, 33 bp, Homo sapien
ctctccgggagctgacaaaagatcatgcagata

SEQ ID NO: 632504 - DNA, 33 bp, Homo sapien
ctctccgggagctgaccaaagatcatgcagata

SEQ ID NO: 632505 - DNA, 33 bp, Homo sapien
gaaaacataagccaggaaaaggacaaatgcttg

SEQ ID NO: 632506 - DNA, 33 bp, Homo sapien
gaaaacataagccaggcaaaggacaaatgcttg

SEQ ID NO: 632507 - DNA, 33 bp, Homo sapien
gagatgcttctggctacatttcgcagaacccca

SEQ ID NO: 632508 - DNA, 33 bp, Homo sapien
gagatgcttctggctagatttcgcagaacccca

SEQ ID NO: 632509 - DNA, 33 bp, Homo sapien
cccctgccttggcaaactcgctttccatgttgt

SEQ ID NO: 632510 - DNA, 33 bp, Homo sapien
cccctgccttggcaaattcgctttccatgttgt

SEQ ID NO: 632511 - DNA, 33 bp, Homo sapien
ccaggtgattaggtaacctatactttgctgaat

SEQ ID NO: 632512 - DNA, 33 bp, Homo sapien
ccaggtgattaggtaagctatactttgctgaat

SEQ ID NO: 632513 - DNA, 33 bp, Homo sapien
ttgaaacagagtaaccactagtctaagcgaagc

SEQ ID NO: 632514 - DNA, 33 bp, Homo sapien
ttgaaacagagtaaccgctagtctaagcgaagc

SEQ ID NO: 632515 - DNA, 33 bp, Homo sapien
tagaggacaggtgaccacaaagcagaagtgatg

SEQ ID NO: 632516 - DNA, 33 bp, Homo sapien
tagaggacaggtgaccgcaaagcagaagtgatg

SEQ ID NO: 632517 - DNA, 33 bp, Homo sapien
aggttacactcttttgaactatgtcttgggcag

SEQ ID NO: 632518 - DNA, 33 bp, Homo sapien
aggttacactcttttggactatgtcttgggcag

SEQ ID NO: 632519 - DNA, 33 bp, Homo sapien
ctgggcggccaccagtgaaaggtcaggcttgag

SEQ ID NO: 632520 - DNA, 33 bp, Homo sapien
ctgggcggccaccagttaaaggtcaggcttgag

SEQ ID NO: 632521 - DNA, 33 bp, Homo sapien
caatagcaatgaacacccaactttttcccccgc

SEQ ID NO: 632522 - DNA, 33 bp, Homo sapien
caatagcaatgaacactcaactttttcccccgc

SEQ ID NO: 632523 - DNA, 33 bp, Homo sapien
gctggccagctggttaccctgtgaatcgggagg

SEQ ID NO: 632524 - DNA, 33 bp, Homo sapien
gctggccagctggttatcctgtgaatcgggagg

SEQ ID NO: 632525 - DNA, 33 bp, Homo sapien
aacctctgtcgagaaaaaactgaaactcattta

SEQ ID NO: 632526 - DNA, 33 bp, Homo sapien
aacctctgtcgagaaagaactgaaactcattta

SEQ ID NO: 632527 - DNA, 33 bp, Homo sapien
cacacctaagccctggcattctcaattttgtag

SEQ ID NO: 632528 - DNA, 33 bp, Homo sapien
cacacctaagccctggtattctcaattttgtag

SEQ ID NO: 632529 - DNA, 33 bp, Homo sapien
tacttctatgtggtcagacctctggggtttact

SEQ ID NO: 632530 - DNA, 33 bp, Homo sapien
tacttctatgtggtcatacctctggggtttact

SEQ ID NO: 632531 - DNA, 33 bp, Homo sapien
agagagataaagtccacctgctttcaaggtatg

SEQ ID NO: 632532 - DNA, 33 bp, Homo sapien
agagagataaagtccatctgctttcaaggtatg

SEQ ID NO: 632533 - DNA, 33 bp, Homo sapien
gcctgtgttatatttacgactgggaccagcctg

SEQ ID NO: 632534 - DNA, 33 bp, Homo sapien
gcctgtgttatatttatgactgggaccagcctg

SEQ ID NO: 632535 - DNA, 33 bp, Homo sapien
gtcgacgttaattcccagagtactaaataagca

SEQ ID NO: 632536 - DNA, 33 bp, Homo sapien
gtcgacgttaattccccgagtactaaataagca

SEQ ID NO: 632537 - DNA, 33 bp, Homo sapien
gatggcccctttcataacatttgaagaggctct

SEQ ID NO: 632538 - DNA, 33 bp, Homo sapien
gatggcccctttcatagcatttgaagaggctct

SEQ ID NO: 632539 - DNA, 33 bp, Homo sapien
gatgtgattttccaaaatgatgaacaattctcg

SEQ ID NO: 632540 - DNA, 33 bp, Homo sapien
gatgtgattttccaaagtgatgaacaattctcg

SEQ ID NO: 632541 - DNA, 33 bp, Homo sapien
agagagggctcccaaacggaataagctttggag

SEQ ID NO: 632542 - DNA, 33 bp, Homo sapien
agagagggctcccaaatggaataagctttggag

SEQ ID NO: 632543 - DNA, 33 bp, Homo sapien
cttaacaacaggacaactggattggtggatggt

SEQ ID NO: 632544 - DNA, 33 bp, Homo sapien
cttaacaacaggacaattggattggtggatggt

SEQ ID NO: 632545 - DNA, 33 bp, Homo sapien
tacagaatattctccaatctattcatccacatt

SEQ ID NO: 632546 - DNA, 33 bp, Homo sapien
tacagaatattctccagtctattcatccacatt

SEQ ID NO: 632547 - DNA, 33 bp, Homo sapien
taagcttcctctgataagactttccatttgtca

SEQ ID NO: 632548 - DNA, 33 bp, Homo sapien
taagcttcctctgatatgactttccatttgtca

SEQ ID NO: 632549 - DNA, 33 bp, Homo sapien
tagaacactaaactcaacaaccacagaatatac

SEQ ID NO: 632550 - DNA, 33 bp, Homo sapien
tagaacactaaactcagcaaccacagaatatac

SEQ ID NO: 632551 - DNA, 33 bp, Homo sapien
tttagaaagggaaaatgacttgctagcagttac

SEQ ID NO: 632552 - DNA, 33 bp, Homo sapien
tttagaaagggaaaattacttgctagcagttac

SEQ ID NO: 632553 - DNA, 33 bp, Homo sapien
ttattatggatttggaaatagagtcttgctctg

SEQ ID NO: 632554 - DNA, 33 bp, Homo sapien
ttattatggatttggagatagagtcttgctctg

SEQ ID NO: 632555 - DNA, 33 bp, Homo sapien
aagctatgggtagaaaattcagaatcctgaaag

SEQ ID NO: 632556 - DNA, 33 bp, Homo sapien
aagctatgggtagaaagttcagaatcctgaaag

SEQ ID NO: 632557 - DNA, 33 bp, Homo sapien
tagcatccattttaaaccataagcatgaagctg

SEQ ID NO: 632558 - DNA, 33 bp, Homo sapien
tagcatccattttaaatcataagcatgaagctg

SEQ ID NO: 632559 - DNA, 33 bp, Homo sapien
ccaaagtcctgtttaaaaagcttatgtcagtat

SEQ ID NO: 632560 - DNA, 33 bp, Homo sapien
ccaaagtcctgtttaacaagcttatgtcagtat

SEQ ID NO: 632561 - DNA, 33 bp, Homo sapien
aaggaagataaacagaacctgaaggctatatgc

SEQ ID NO: 632562 - DNA, 33 bp, Homo sapien
aaggaagataaacagatcctgaaggctatatgc

SEQ ID NO: 632563 - DNA, 33 bp, Homo sapien
gcacagaaaatagccaactaaagacagagggca

SEQ ID NO: 632564 - DNA, 33 bp, Homo sapien
gcacagaaaatagccagctaaagacagagggca

SEQ ID NO: 632565 - DNA, 33 bp, Homo sapien
tcctttgacctcttcacatagtattctgaaact

SEQ ID NO: 632566 - DNA, 33 bp, Homo sapien
tcctttgacctcttcatatagtattctgaaact

SEQ ID NO: 632567 - DNA, 33 bp, Homo sapien
gcggcatttctgaccccgacaaaagcacggcga

SEQ ID NO: 632568 - DNA, 33 bp, Homo sapien
gcggcatttctgaccctgacaaaagcacggcga

SEQ ID NO: 632569 - DNA, 33 bp, Homo sapien
agtgcatctgtcccaccgaatagcctaagactt

SEQ ID NO: 632570 - DNA, 33 bp, Homo sapien
agtgcatctgtcccactgaatagcctaagactt

SEQ ID NO: 632571 - DNA, 33 bp, Homo sapien
gtgaagctgtgcgagacgacaaagactgttgta

SEQ ID NO: 632572 - DNA, 33 bp, Homo sapien
gtgaagctgtgcgagatgacaaagactgttgta

SEQ ID NO: 632573 - DNA, 33 bp, Homo sapien
cgtattagacgacatacgggttgtttccatgat

SEQ ID NO: 632574 - DNA, 33 bp, Homo sapien
cgtattagacgacatatgggttgtttccatgat

SEQ ID NO: 632575 - DNA, 33 bp, Homo sapien
agaagtagcgacctgaagaaatggaataattct

SEQ ID NO: 632576 - DNA, 33 bp, Homo sapien
agaagtagcgacctgaggaaatggaataattct

SEQ ID NO: 632577 - DNA, 33 bp, Homo sapien
cagtctggaagtgaagcaaacagccaatagtcc

SEQ ID NO: 632578 - DNA, 33 bp, Homo sapien
cagtctggaagtgaaggaaacagccaatagtcc

SEQ ID NO: 632579 - DNA, 33 bp, Homo sapien
ttgtgactattggagacaatgcctggaacaaag

SEQ ID NO: 632580 - DNA, 33 bp, Homo sapien
ttgtgactattggagataatgcctggaacaaag

SEQ ID NO: 632581 - DNA, 33 bp, Homo sapien
ttacacctcagtgggacagaaaaaacatcagcc

SEQ ID NO: 632582 - DNA, 33 bp, Homo sapien
ttacacctcagtgggatagaaaaaacatcagcc

SEQ ID NO: 632583 - DNA, 33 bp, Homo sapien
cagctcccccacggaacgtttcttatgcacctc

SEQ ID NO: 632584 - DNA, 33 bp, Homo sapien
cagctcccccacggaatgtttcttatgcacctc

SEQ ID NO: 632585 - DNA, 33 bp, Homo sapien
aaagggccactgccataatcgttaacagcgggt

SEQ ID NO: 632586 - DNA, 33 bp, Homo sapien
aaagggccactgccattatcgttaacagcgggt

SEQ ID NO: 632587 - DNA, 33 bp, Homo sapien
agaacctttgaactcaccagtcctaatttttac

SEQ ID NO: 632588 - DNA, 33 bp, Homo sapien
agaacctttgaactcatcagtcctaatttttac

SEQ ID NO: 632589 - DNA, 33 bp, Homo sapien
ggttacaaatggataaaatgtaagccaccaatg

SEQ ID NO: 632590 - DNA, 33 bp, Homo sapien
ggttacaaatggataagatgtaagccaccaatg

SEQ ID NO: 632591 - DNA, 33 bp, Homo sapien
ttataaggctatcactaaatcaagagaagtatg

SEQ ID NO: 632592 - DNA, 33 bp, Homo sapien
ttataaggctatcactgaatcaagagaagtatg

SEQ ID NO: 632593 - DNA, 33 bp, Homo sapien
agcgtgtcctgtgtgacgatgactgtgactgtc

SEQ ID NO: 632594 - DNA, 33 bp, Homo sapien
agcgtgtcctgtgtgatgatgactgtgactgtc

SEQ ID NO: 632595 - DNA, 33 bp, Homo sapien
agcattcctggcagagcaacaagtagtagatga

SEQ ID NO: 632596 - DNA, 33 bp, Homo sapien
agcattcctggcagaggaacaagtagtagatga

SEQ ID NO: 632597 - DNA, 33 bp, Homo sapien
ggtttctactgacaccggcctgacctaactcgg

SEQ ID NO: 632598 - DNA, 33 bp, Homo sapien
ggtttctactgacacctgcctgacctaactcgg

SEQ ID NO: 632599 - DNA, 33 bp, Homo sapien
agatctagaaacattaacaccttcatttcaagg

SEQ ID NO: 632600 - DNA, 33 bp, Homo sapien
agatctagaaacattagcaccttcatttcaagg

SEQ ID NO: 632601 - DNA, 33 bp, Homo sapien
cctaagaacttcccacagtgccagacacacaaa

SEQ ID NO: 632602 - DNA, 33 bp, Homo sapien
cctaagaacttcccacggtgccagacacacaaa

SEQ ID NO: 632603 - DNA, 33 bp, Homo sapien
gcagacacttcaggaaagcatgataccttcttt

SEQ ID NO: 632604 - DNA, 33 bp, Homo sapien
gcagacacttcaggaaggcatgataccttcttt

SEQ ID NO: 632605 - DNA, 33 bp, Homo sapien
ctttggtcccattatgccaccaaaccaacaggc

SEQ ID NO: 632606 - DNA, 33 bp, Homo sapien
ctttggtcccattatgtcaccaaaccaacaggc

SEQ ID NO: 632607 - DNA, 33 bp, Homo sapien
tcagcaactttaagcccactggtttggagatct

SEQ ID NO: 632608 - DNA, 33 bp, Homo sapien
tcagcaactttaagcctactggtttggagatct

SEQ ID NO: 632609 - DNA, 33 bp, Homo sapien
agggctttggagagaactgggggagacagtgga

SEQ ID NO: 632610 - DNA, 33 bp, Homo sapien
agggctttggagagaattgggggagacagtgga

SEQ ID NO: 632611 - DNA, 33 bp, Homo sapien
cattgggcagaaaccacaccaataaaacgggca

SEQ ID NO: 632612 - DNA, 33 bp, Homo sapien
cattgggcagaaaccataccaataaaacgggca

SEQ ID NO: 632613 - DNA, 33 bp, Homo sapien
cggaggggctgtacaacggtccagacactttgg

SEQ ID NO: 632614 - DNA, 33 bp, Homo sapien
cggaggggctgtacaatggtccagacactttgg

SEQ ID NO: 632615 - DNA, 33 bp, Homo sapien
ccttgctgtgttgggaatagacaaggaatttgc

SEQ ID NO: 632616 - DNA, 33 bp, Homo sapien
ccttgctgtgttgggagtagacaaggaatttgc

SEQ ID NO: 632617 - DNA, 33 bp, Homo sapien
tgaatttagcccaagacggtagctttgcttgtc

SEQ ID NO: 632618 - DNA, 33 bp, Homo sapien
tgaatttagcccaagatggtagctttgcttgtc

SEQ ID NO: 632619 - DNA, 33 bp, Homo sapien
gcagagttagtaccaactgctaccatttataca

SEQ ID NO: 632620 - DNA, 33 bp, Homo sapien
gcagagttagtaccaagtgctaccatttataca

SEQ ID NO: 632621 - DNA, 33 bp, Homo sapien
ggaagtcatccagctcaatttcagcttgcctcc

SEQ ID NO: 632622 - DNA, 33 bp, Homo sapien
ggaagtcatccagctcgatttcagcttgcctcc

SEQ ID NO: 632623 - DNA, 33 bp, Homo sapien
tcctagtgagacaaaacggagcaaacaaatata

SEQ ID NO: 632624 - DNA, 33 bp, Homo sapien
tcctagtgagacaaaatggagcaaacaaatata

SEQ ID NO: 632625 - DNA, 33 bp, Homo sapien
agggagtgactatggacggtgaactatattgac

SEQ ID NO: 632626 - DNA, 33 bp, Homo sapien
agggagtgactatggatggtgaactatattgac

SEQ ID NO: 632627 - DNA, 33 bp, Homo sapien
actcttgtaaacttgacgcttcagacttgcctt

SEQ ID NO: 632628 - DNA, 33 bp, Homo sapien
actcttgtaaacttgatgcttcagacttgcctt

SEQ ID NO: 632629 - DNA, 33 bp, Homo sapien
agggctgaatccagccaacaaaagaacttctta

SEQ ID NO: 632630 - DNA, 33 bp, Homo sapien
agggctgaatccagccgacaaaagaacttctta

SEQ ID NO: 632631 - DNA, 33 bp, Homo sapien
gtggataaagcagggacggcaaagacatggagg

SEQ ID NO: 632632 - DNA, 33 bp, Homo sapien
gtggataaagcagggatggcaaagacatggagg

SEQ ID NO: 632633 - DNA, 33 bp, Homo sapien
ttaaaaatgtttctgaatataaagtgttctctt

SEQ ID NO: 632634 - DNA, 33 bp, Homo sapien
ttaaaaatgtttctgagtataaagtgttctctt

SEQ ID NO: 632635 - DNA, 33 bp, Homo sapien
tggagggctggacagacgtgctctactgggtaa

SEQ ID NO: 632636 - DNA, 33 bp, Homo sapien
tggagggctggacagatgtgctctactgggtaa

SEQ ID NO: 632637 - DNA, 33 bp, Homo sapien
ggggcaagagagacaaacttcggctctgagaac

SEQ ID NO: 632638 - DNA, 33 bp, Homo sapien
ggggcaagagagacaagcttcggctctgagaac

SEQ ID NO: 632639 - DNA, 33 bp, Homo sapien
ctctctgccgctggctcacagctactgtttcca

SEQ ID NO: 632640 - DNA, 33 bp, Homo sapien
ctctctgccgctggcttacagctactgtttcca

SEQ ID NO: 632641 - DNA, 33 bp, Homo sapien
tgctctgggttgttgacgtgcaggttagaagag

SEQ ID NO: 632642 - DNA, 33 bp, Homo sapien
tgctctgggttgttgatgtgcaggttagaagag

SEQ ID NO: 632643 - DNA, 33 bp, Homo sapien
cacagcaagggtctccaagactcagaggcccaa

SEQ ID NO: 632644 - DNA, 33 bp, Homo sapien
cacagcaagggtctccgagactcagaggcccaa

SEQ ID NO: 632645 - DNA, 33 bp, Homo sapien
tcatgaaacacagctgacaagaaatgcatggga

SEQ ID NO: 632646 - DNA, 33 bp, Homo sapien
tcatgaaacacagctgccaagaaatgcatggga

SEQ ID NO: 632647 - DNA, 33 bp, Homo sapien
tacagaattccatccacctgggcagccttctcc

SEQ ID NO: 632648 - DNA, 33 bp, Homo sapien
tacagaattccatccatctgggcagccttctcc

SEQ ID NO: 632649 - DNA, 33 bp, Homo sapien
aagctcacagggttgcagaattgagaagagtgt

SEQ ID NO: 632650 - DNA, 33 bp, Homo sapien
aagctcacagggttgcggaattgagaagagtgt

SEQ ID NO: 632651 - DNA, 33 bp, Homo sapien
gctctaggtaaattcaccaaatgattctctgaa

SEQ ID NO: 632652 - DNA, 33 bp, Homo sapien
gctctaggtaaattcatcaaatgattctctgaa

SEQ ID NO: 632653 - DNA, 33 bp, Homo sapien
attagaaagaatcccactcagacagaggttgcg

SEQ ID NO: 632654 - DNA, 33 bp, Homo sapien
attagaaagaatcccagtcagacagaggttgcg

SEQ ID NO: 632655 - DNA, 33 bp, Homo sapien
gacacacagcactgagaatagtcacatgagcac

SEQ ID NO: 632656 - DNA, 33 bp, Homo sapien
gacacacagcactgagtatagtcacatgagcac

SEQ ID NO: 632657 - DNA, 33 bp, Homo sapien
ttcttctcctgtggtaaaagaatatgtgtctca

SEQ ID NO: 632658 - DNA, 33 bp, Homo sapien
ttcttctcctgtggtacaagaatatgtgtctca

SEQ ID NO: 632659 - DNA, 33 bp, Homo sapien
caggtgttaaggggcacgtgagtcagtgacagc

SEQ ID NO: 632660 - DNA, 33 bp, Homo sapien
caggtgttaaggggcatgtgagtcagtgacagc

SEQ ID NO: 632661 - DNA, 33 bp, Homo sapien
ctacctagttgcctctgactgcaatgtttgctt

SEQ ID NO: 632662 - DNA, 33 bp, Homo sapien
ctacctagttgcctcttactgcaatgtttgctt

SEQ ID NO: 632663 - DNA, 33 bp, Homo sapien
aatggaagatactcaagtaaaagctgtaaagca

SEQ ID NO: 632664 - DNA, 33 bp, Homo sapien
aatggaagatactcaattaaaagctgtaaagca

SEQ ID NO: 632665 - DNA, 33 bp, Homo sapien
tacattttaattatggaagtaatatttgcctac

SEQ ID NO: 632666 - DNA, 33 bp, Homo sapien
tacattttaattatggtagtaatatttgcctac

SEQ ID NO: 632667 - DNA, 33 bp, Homo sapien
taaagactgacataggaatatagctctggagag

SEQ ID NO: 632668 - DNA, 33 bp, Homo sapien
taaagactgacatagggatatagctctggagag

SEQ ID NO: 632669 - DNA, 33 bp, Homo sapien
gtcacctgatgataagaaccaggctttcctgac

SEQ ID NO: 632670 - DNA, 33 bp, Homo sapien
gtcacctgatgataagcaccaggctttcctgac

SEQ ID NO: 632671 - DNA, 33 bp, Homo sapien
cttgtgaagccaatacacagaaagttcttaccc

SEQ ID NO: 632672 - DNA, 33 bp, Homo sapien
cttgtgaagccaatacgcagaaagttcttaccc

SEQ ID NO: 632673 - DNA, 33 bp, Homo sapien
gggtcttttaaacttccccatcagaccctgtcc

SEQ ID NO: 632674 - DNA, 33 bp, Homo sapien
gggtcttttaaacttctccatcagaccctgtcc

SEQ ID NO: 632675 - DNA, 33 bp, Homo sapien
agtcccttgctgacaaacattgagttctgtctg

SEQ ID NO: 632676 - DNA, 33 bp, Homo sapien
agtcccttgctgacaagcattgagttctgtctg

SEQ ID NO: 632677 - DNA, 33 bp, Homo sapien
tctctcaatagagtacaggatcttgcacatagt

SEQ ID NO: 632678 - DNA, 33 bp, Homo sapien
tctctcaatagagtacgggatcttgcacatagt

SEQ ID NO: 632679 - DNA, 33 bp, Homo sapien
gttttaaatcatctggcactgagtggaatgcca

SEQ ID NO: 632680 - DNA, 33 bp, Homo sapien
gttttaaatcatctgggactgagtggaatgcca

SEQ ID NO: 632681 - DNA, 33 bp, Homo sapien
ctctgtggaaaagtgacgtaggtccatagagcc

SEQ ID NO: 632682 - DNA, 33 bp, Homo sapien
ctctgtggaaaagtgatgtaggtccatagagcc

SEQ ID NO: 632683 - DNA, 33 bp, Homo sapien
atggatttcataattacaaagtctcatatgtat

SEQ ID NO: 632684 - DNA, 33 bp, Homo sapien
atggatttcataattataaagtctcatatgtat

SEQ ID NO: 632685 - DNA, 33 bp, Homo sapien
tcccccgtatgtgtgacaaagaggaaaggcagt

SEQ ID NO: 632686 - DNA, 33 bp, Homo sapien
tcccccgtatgtgtgataaagaggaaaggcagt

SEQ ID NO: 632687 - DNA, 33 bp, Homo sapien
gagtttttggctgtacggggaaagaaaatgagg

SEQ ID NO: 632688 - DNA, 33 bp, Homo sapien
gagtttttggctgtactgggaaagaaaatgagg

SEQ ID NO: 632689 - DNA, 33 bp, Homo sapien
ataacatctggccatgcattaggtgccaaattt

SEQ ID NO: 632690 - DNA, 33 bp, Homo sapien
ataacatctggccatgtattaggtgccaaattt

SEQ ID NO: 632691 - DNA, 33 bp, Homo sapien
tatttgtctggactgacggaaaaggttgcaaag

SEQ ID NO: 632692 - DNA, 33 bp, Homo sapien
tatttgtctggactgatggaaaaggttgcaaag

SEQ ID NO: 632693 - DNA, 33 bp, Homo sapien
gtagacagagggagaaaactccgagctggaagc

SEQ ID NO: 632694 - DNA, 33 bp, Homo sapien
gtagacagagggagaagactccgagctggaagc

SEQ ID NO: 632695 - DNA, 33 bp, Homo sapien
ttccttttgctgcctgcattcactcccatctgc

SEQ ID NO: 632696 - DNA, 33 bp, Homo sapien
ttccttttgctgcctggattcactcccatctgc

SEQ ID NO: 632697 - DNA, 33 bp, Homo sapien
ggctagacatctgccaccttaatcatctcacaa

SEQ ID NO: 632698 - DNA, 33 bp, Homo sapien
ggctagacatctgccagcttaatcatctcacaa

SEQ ID NO: 632699 - DNA, 33 bp, Homo sapien
ggcctataatggaagcaaaaatacaataaacca

SEQ ID NO: 632700 - DNA, 33 bp, Homo sapien
ggcctataatggaagcgaaaatacaataaacca

SEQ ID NO: 632701 - DNA, 33 bp, Homo sapien
cttctgaaatgtgcacaacttatgtatcagacc

SEQ ID NO: 632702 - DNA, 33 bp, Homo sapien
cttctgaaatgtgcacgacttatgtatcagacc

SEQ ID NO: 632703 - DNA, 33 bp, Homo sapien
aaggggtttcagcataccacagaaaaactgaaa

SEQ ID NO: 632704 - DNA, 33 bp, Homo sapien
aaggggtttcagcatatcacagaaaaactgaaa

SEQ ID NO: 632705 - DNA, 33 bp, Homo sapien
tcactcggaaaagacgaaaaaaggtgatggaga

SEQ ID NO: 632706 - DNA, 33 bp, Homo sapien
tcactcggaaaagacggaaaaaggtgatggaga

SEQ ID NO: 632707 - DNA, 33 bp, Homo sapien
gatacatcaggtgataagaaaggcgaagagtgt

SEQ ID NO: 632708 - DNA, 33 bp, Homo sapien
gatacatcaggtgataggaaaggcgaagagtgt

SEQ ID NO: 632709 - DNA, 33 bp, Homo sapien
cttctcctttttttcactaatctcaatggagat

SEQ ID NO: 632710 - DNA, 33 bp, Homo sapien
cttctcctttttttcattaatctcaatggagat

SEQ ID NO: 632711 - DNA, 33 bp, Homo sapien
agatggcaggaaaggaaagagacatcacatccc

SEQ ID NO: 632712 - DNA, 33 bp, Homo sapien
agatggcaggaaaggagagagacatcacatccc

SEQ ID NO: 632713 - DNA, 33 bp, Homo sapien
gtccagaatttagctcgccatcgaagctccctt

SEQ ID NO: 632714 - DNA, 33 bp, Homo sapien
gtccagaatttagctctccatcgaagctccctt

SEQ ID NO: 632715 - DNA, 33 bp, Homo sapien
ggtaaaccactttggacgtgtaaatgtgcccca

SEQ ID NO: 632716 - DNA, 33 bp, Homo sapien
ggtaaaccactttggatgtgtaaatgtgcccca

SEQ ID NO: 632717 - DNA, 33 bp, Homo sapien
catatgcgggttggcaagtggaccatgaatccg

SEQ ID NO: 632718 - DNA, 33 bp, Homo sapien
catatgcgggttggcaggtggaccatgaatccg

SEQ ID NO: 632719 - DNA, 33 bp, Homo sapien
tcctgtgtcatgttatcaagtgaagtcgggagc

SEQ ID NO: 632720 - DNA, 33 bp, Homo sapien
tcctgtgtcatgttatgaagtgaagtcgggagc

SEQ ID NO: 632721 - DNA, 33 bp, Homo sapien
tcccaggttcaaagacaatgctatgtatgcaaa

SEQ ID NO: 632722 - DNA, 33 bp, Homo sapien
tcccaggttcaaagactatgctatgtatgcaaa

SEQ ID NO: 632723 - DNA, 33 bp, Homo sapien
ctcattcaattgcatacaaaagccctcaaagag

SEQ ID NO: 632724 - DNA, 33 bp, Homo sapien
ctcattcaattgcatataaaagccctcaaagag

SEQ ID NO: 632725 - DNA, 33 bp, Homo sapien
aaacaggaatgaggttcaaaagaaaagatggta

SEQ ID NO: 632726 - DNA, 33 bp, Homo sapien
aaacaggaatgaggtttaaaagaaaagatggta

SEQ ID NO: 632727 - DNA, 33 bp, Homo sapien
acagcctaaagtgacacggtgggggacgacaga

SEQ ID NO: 632728 - DNA, 33 bp, Homo sapien
acagcctaaagtgacatggtgggggacgacaga

SEQ ID NO: 632729 - DNA, 33 bp, Homo sapien
gtgcctgggccaggaaatggtagtttaaaatcc

SEQ ID NO: 632730 - DNA, 33 bp, Homo sapien
gtgcctgggccaggaactggtagtttaaaatcc

SEQ ID NO: 632731 - DNA, 33 bp, Homo sapien
accgcctgtattcacaaaaggccccagggctct

SEQ ID NO: 632732 - DNA, 33 bp, Homo sapien
accgcctgtattcacacaaggccccagggctct

SEQ ID NO: 632733 - DNA, 33 bp, Homo sapien
gcttctagctctccccaactgctgtctgtaagt

SEQ ID NO: 632734 - DNA, 33 bp, Homo sapien
gcttctagctctcccccactgctgtctgtaagt

SEQ ID NO: 632735 - DNA, 33 bp, Homo sapien
aatcttcccttcccaccgtctgctgcgccgact

SEQ ID NO: 632736 - DNA, 33 bp, Homo sapien
aatcttcccttcccactgtctgctgcgccgact

SEQ ID NO: 632737 - DNA, 33 bp, Homo sapien
ccagctgtgaacttgacaaaatcactatgtggt

SEQ ID NO: 632738 - DNA, 33 bp, Homo sapien
ccagctgtgaacttgataaaatcactatgtggt

SEQ ID NO: 632739 - DNA, 33 bp, Homo sapien
caaagaagcaaaggtcggaataacaatgacaga

SEQ ID NO: 632740 - DNA, 33 bp, Homo sapien
caaagaagcaaaggtctgaataacaatgacaga

SEQ ID NO: 632741 - DNA, 33 bp, Homo sapien
aaatgttagagccccacaaaaaattagccgggc

SEQ ID NO: 632742 - DNA, 33 bp, Homo sapien
aaatgttagagccccataaaaaattagccgggc

SEQ ID NO: 632743 - DNA, 33 bp, Homo sapien
aaatttctgagtaatacagtgttggaatgctaa

SEQ ID NO: 632744 - DNA, 33 bp, Homo sapien
aaatttctgagtaatatagtgttggaatgctaa

SEQ ID NO: 632745 - DNA, 33 bp, Homo sapien
tactttgatgaattcaacagataaaaacaagtc

SEQ ID NO: 632746 - DNA, 33 bp, Homo sapien
tactttgatgaattcagcagataaaaacaagtc

SEQ ID NO: 632747 - DNA, 33 bp, Homo sapien
tcagaagctctttagagagtctgccaatcatat

SEQ ID NO: 632748 - DNA, 33 bp, Homo sapien
tcagaagctctttagatagtctgccaatcatat

SEQ ID NO: 632749 - DNA, 33 bp, Homo sapien
ctatctggtggtagcaactttatcactaacatc

SEQ ID NO: 632750 - DNA, 33 bp, Homo sapien
ctatctggtggtagcagctttatcactaacatc

SEQ ID NO: 632751 - DNA, 33 bp, Homo sapien
aaagaattatgcaaaccattaaactagaaataa

SEQ ID NO: 632752 - DNA, 33 bp, Homo sapien
aaagaattatgcaaacgattaaactagaaataa

SEQ ID NO: 632753 - DNA, 33 bp, Homo sapien
tggaaataggcagggaatcaatgctgaaaataa

SEQ ID NO: 632754 - DNA, 33 bp, Homo sapien
tggaaataggcagggactcaatgctgaaaataa

SEQ ID NO: 632755 - DNA, 33 bp, Homo sapien
tccaattagtgggaaccggctgatttcttctag

SEQ ID NO: 632756 - DNA, 33 bp, Homo sapien
tccaattagtgggaactggctgatttcttctag

SEQ ID NO: 632757 - DNA, 33 bp, Homo sapien
gtgttttgtgatctaacctatccttttcaaaag

SEQ ID NO: 632758 - DNA, 33 bp, Homo sapien
gtgttttgtgatctaagctatccttttcaaaag

SEQ ID NO: 632759 - DNA, 33 bp, Homo sapien
ctgaggcccaggataaaggggcagttactactc

SEQ ID NO: 632760 - DNA, 33 bp, Homo sapien
ctgaggcccaggataagggggcagttactactc

SEQ ID NO: 632761 - DNA, 33 bp, Homo sapien
tatcagatagagagaaagtagatagaatttaga

SEQ ID NO: 632762 - DNA, 33 bp, Homo sapien
tatcagatagagagaaggtagatagaatttaga

SEQ ID NO: 632763 - DNA, 33 bp, Homo sapien
cctatgaggcgaacacgctcagtatctctattg

SEQ ID NO: 632764 - DNA, 33 bp, Homo sapien
cctatgaggcgaacactctcagtatctctattg

SEQ ID NO: 632765 - DNA, 33 bp, Homo sapien
acatgacactctcaagcagaacatggttcctgg

SEQ ID NO: 632766 - DNA, 33 bp, Homo sapien
acatgacactctcaagtagaacatggttcctgg

SEQ ID NO: 632767 - DNA, 33 bp, Homo sapien
tgagtgaagctctttcacagacctgaatcttaa

SEQ ID NO: 632768 - DNA, 33 bp, Homo sapien
tgagtgaagctctttcgcagacctgaatcttaa

SEQ ID NO: 632769 - DNA, 33 bp, Homo sapien
ctccaatcctcactgaaggctgaaggaccccag

SEQ ID NO: 632770 - DNA, 33 bp, Homo sapien
ctccaatcctcactgatggctgaaggaccccag

SEQ ID NO: 632771 - DNA, 33 bp, Homo sapien
ggaggttgaggtgcaaatggctgtttctggtct

SEQ ID NO: 632772 - DNA, 33 bp, Homo sapien
ggaggttgaggtgcaagtggctgtttctggtct

SEQ ID NO: 632773 - DNA, 33 bp, Homo sapien
ttcttttctcctgtgaaatgtcccagtgagatt

SEQ ID NO: 632774 - DNA, 33 bp, Homo sapien
ttcttttctcctgtgagatgtcccagtgagatt

SEQ ID NO: 632775 - DNA, 33 bp, Homo sapien
agagatcagccatgtagaaaactctaattactt

SEQ ID NO: 632776 - DNA, 33 bp, Homo sapien
agagatcagccatgtataaaactctaattactt

SEQ ID NO: 632777 - DNA, 33 bp, Homo sapien
tgctgcacaaagcctaaaatcctgttttccttt

SEQ ID NO: 632778 - DNA, 33 bp, Homo sapien
tgctgcacaaagcctagaatcctgttttccttt

SEQ ID NO: 632779 - DNA, 33 bp, Homo sapien
acaaagtaagtgctcaataaggatttctcctcc

SEQ ID NO: 632780 - DNA, 33 bp, Homo sapien
acaaagtaagtgctcagtaaggatttctcctcc

SEQ ID NO: 632781 - DNA, 33 bp, Homo sapien
gggaattggcgattgcgcttgctcatttccaca

SEQ ID NO: 632782 - DNA, 33 bp, Homo sapien
gggaattggcgattgctcttgctcatttccaca

SEQ ID NO: 632783 - DNA, 33 bp, Homo sapien
gtagaaagatagacaacgaatgtaaaaggaatg

SEQ ID NO: 632784 - DNA, 33 bp, Homo sapien
gtagaaagatagacaatgaatgtaaaaggaatg

SEQ ID NO: 632785 - DNA, 33 bp, Homo sapien
cacctttgaatgctgacgtctttccaggatttt

SEQ ID NO: 632786 - DNA, 33 bp, Homo sapien
cacctttgaatgctgatgtctttccaggatttt

SEQ ID NO: 632787 - DNA, 33 bp, Homo sapien
cagctctccgatttggaaaagaagccatataca

SEQ ID NO: 632788 - DNA, 33 bp, Homo sapien
cagctctccgatttggtaaagaagccatataca

SEQ ID NO: 632789 - DNA, 33 bp, Homo sapien
tgtcctcctgagaagccgaataaccttgttctt

SEQ ID NO: 632790 - DNA, 33 bp, Homo sapien
tgtcctcctgagaagctgaataaccttgttctt

SEQ ID NO: 632791 - DNA, 33 bp, Homo sapien
gagggaagagaggcagacaggataaatgaggag

SEQ ID NO: 632792 - DNA, 33 bp, Homo sapien
gagggaagagaggcaggcaggataaatgaggag

SEQ ID NO: 632793 - DNA, 33 bp, Homo sapien
acatgcagagacccaaatgtcacataaatggat

SEQ ID NO: 632794 - DNA, 33 bp, Homo sapien
acatgcagagacccaagtgtcacataaatggat

SEQ ID NO: 632795 - DNA, 33 bp, Homo sapien
ttctgtcagacaaacaggtgattctgacccatc

SEQ ID NO: 632796 - DNA, 33 bp, Homo sapien
ttctgtcagacaaacatgtgattctgacccatc

SEQ ID NO: 632797 - DNA, 33 bp, Homo sapien
gaatccagaaccagtacccctcgttcattcaac

SEQ ID NO: 632798 - DNA, 33 bp, Homo sapien
gaatccagaaccagtatccctcgttcattcaac

SEQ ID NO: 632799 - DNA, 33 bp, Homo sapien
tatttattcaagaacaagtatttgggaatagag

SEQ ID NO: 632800 - DNA, 33 bp, Homo sapien
tatttattcaagaacacgtatttgggaatagag

SEQ ID NO: 632801 - DNA, 33 bp, Homo sapien
ttaaagccaagtcctacgctttcactcttctgc

SEQ ID NO: 632802 - DNA, 33 bp, Homo sapien
ttaaagccaagtcctatgctttcactcttctgc

SEQ ID NO: 632803 - DNA, 33 bp, Homo sapien
accatttaggaggtaactgtcaaaagagtgaat

SEQ ID NO: 632804 - DNA, 33 bp, Homo sapien
accatttaggaggtaattgtcaaaagagtgaat

SEQ ID NO: 632805 - DNA, 33 bp, Homo sapien
agagataagtgaagtcagaaatatcgaaaaggg

SEQ ID NO: 632806 - DNA, 33 bp, Homo sapien
agagataagtgaagtcggaaatatcgaaaaggg

SEQ ID NO: 632807 - DNA, 33 bp, Homo sapien
ccgtggtgctaactgaatatgtagaagttaata

SEQ ID NO: 632808 - DNA, 33 bp, Homo sapien
ccgtggtgctaactgagtatgtagaagttaata

SEQ ID NO: 632809 - DNA, 33 bp, Homo sapien
ggatgacccagtaggaatcagtcgcagaagtat

SEQ ID NO: 632810 - DNA, 33 bp, Homo sapien
ggatgacccagtaggagtcagtcgcagaagtat

SEQ ID NO: 632811 - DNA, 33 bp, Homo sapien
ctccgtatgttcgtgtaaagtcagttctttgtt

SEQ ID NO: 632812 - DNA, 33 bp, Homo sapien
ctccgtatgttcgtgtgaagtcagttctttgtt

SEQ ID NO: 632813 - DNA, 33 bp, Homo sapien
gcctccaacgcaaggtcaaaggcatcacaaaat

SEQ ID NO: 632814 - DNA, 33 bp, Homo sapien
gcctccaacgcaaggtgaaaggcatcacaaaat

SEQ ID NO: 632815 - DNA, 33 bp, Homo sapien
tttcatatcttttatcccacattttctaggaac

SEQ ID NO: 632816 - DNA, 33 bp, Homo sapien
tttcatatcttttatctcacattttctaggaac

SEQ ID NO: 632817 - DNA, 33 bp, Homo sapien
cacaaaactccgtcaaccttattatttgctact

SEQ ID NO: 632818 - DNA, 33 bp, Homo sapien
cacaaaactccgtcaatcttattatttgctact

SEQ ID NO: 632819 - DNA, 33 bp, Homo sapien
acagcaaattggaaaaagctgaaatgcttctct

SEQ ID NO: 632820 - DNA, 33 bp, Homo sapien
acagcaaattggaaaaggctgaaatgcttctct

SEQ ID NO: 632821 - DNA, 33 bp, Homo sapien
gacaaaagcaaagcaaagctagtgaattcaata

SEQ ID NO: 632822 - DNA, 33 bp, Homo sapien
gacaaaagcaaagcaaggctagtgaattcaata

SEQ ID NO: 632823 - DNA, 33 bp, Homo sapien
aaaatgaagcaagataaaggcagctgaatactg

SEQ ID NO: 632824 - DNA, 33 bp, Homo sapien
aaaatgaagcaagatagaggcagctgaatactg

SEQ ID NO: 632825 - DNA, 33 bp, Homo sapien
atttcaggcctgtcacaaatcctgatttaccat

SEQ ID NO: 632826 - DNA, 33 bp, Homo sapien
atttcaggcctgtcacgaatcctgatttaccat

SEQ ID NO: 632827 - DNA, 33 bp, Homo sapien
aaaaccagactctaagccccttcgacagcccag

SEQ ID NO: 632828 - DNA, 33 bp, Homo sapien
aaaaccagactctaaggcccttcgacagcccag

SEQ ID NO: 632829 - DNA, 33 bp, Homo sapien
gtcagcctctctaacacccaagaggacaagaac

SEQ ID NO: 632830 - DNA, 33 bp, Homo sapien
gtcagcctctctaacatccaagaggacaagaac

SEQ ID NO: 632831 - DNA, 33 bp, Homo sapien
cttgcttcgcaaattacagcacaatgttacagc

SEQ ID NO: 632832 - DNA, 33 bp, Homo sapien
cttgcttcgcaaattatagcacaatgttacagc

SEQ ID NO: 632833 - DNA, 33 bp, Homo sapien
tattattattactgccaaaaaccccttgtagag

SEQ ID NO: 632834 - DNA, 33 bp, Homo sapien
tattattattactgccgaaaaccccttgtagag

SEQ ID NO: 632835 - DNA, 33 bp, Homo sapien
gggggcacactgggacaaagtgaaaagaagaaa

SEQ ID NO: 632836 - DNA, 33 bp, Homo sapien
gggggcacactgggacgaagtgaaaagaagaaa

SEQ ID NO: 632837 - DNA, 33 bp, Homo sapien
agctatgttataatggcaagatattttaaagca

SEQ ID NO: 632838 - DNA, 33 bp, Homo sapien
agctatgttataatgggaagatattttaaagca

SEQ ID NO: 632839 - DNA, 33 bp, Homo sapien
atatgctcataagataaagttgggagaaaatgc

SEQ ID NO: 632840 - DNA, 33 bp, Homo sapien
atatgctcataagatacagttgggagaaaatgc

SEQ ID NO: 632841 - DNA, 33 bp, Homo sapien
ccttccatatactacacacagtgctgggatgca

SEQ ID NO: 632842 - DNA, 33 bp, Homo sapien
ccttccatatactacatacagtgctgggatgca

SEQ ID NO: 632843 - DNA, 33 bp, Homo sapien
aaggggctctggacagaagggtaattttcttct

SEQ ID NO: 632844 - DNA, 33 bp, Homo sapien
aaggggctctggacaggagggtaattttcttct

SEQ ID NO: 632845 - DNA, 33 bp, Homo sapien
gtgtttaaggatgacccgatgtttatcatacag

SEQ ID NO: 632846 - DNA, 33 bp, Homo sapien
gtgtttaaggatgacctgatgtttatcatacag

SEQ ID NO: 632847 - DNA, 33 bp, Homo sapien
aattcagctctacagaccccaacaccctgtgtt

SEQ ID NO: 632848 - DNA, 33 bp, Homo sapien
aattcagctctacagatcccaacaccctgtgtt

SEQ ID NO: 632849 - DNA, 33 bp, Homo sapien
gatgcattggcattgaagcggtttgtttggagg

SEQ ID NO: 632850 - DNA, 33 bp, Homo sapien
gatgcattggcattgaggcggtttgtttggagg

SEQ ID NO: 632851 - DNA, 33 bp, Homo sapien
ctcctgtatccaaaagacagaataaggaggaac

SEQ ID NO: 632852 - DNA, 33 bp, Homo sapien
ctcctgtatccaaaaggcagaataaggaggaac

SEQ ID NO: 632853 - DNA, 33 bp, Homo sapien
cattatgcttttaagaccatttaagaccaagtt

SEQ ID NO: 632854 - DNA, 33 bp, Homo sapien
cattatgcttttaagagcatttaagaccaagtt

SEQ ID NO: 632855 - DNA, 33 bp, Homo sapien
aatagatgcaccgagaaagctaatccaaagtaa

SEQ ID NO: 632856 - DNA, 33 bp, Homo sapien
aatagatgcaccgagatagctaatccaaagtaa

SEQ ID NO: 632857 - DNA, 33 bp, Homo sapien
acagctcagtgttgtcaatttgattttgtgata

SEQ ID NO: 632858 - DNA, 33 bp, Homo sapien
acagctcagtgttgtcgatttgattttgtgata

SEQ ID NO: 632859 - DNA, 33 bp, Homo sapien
ctgatggaagaaagacaggagccgtagtcagta

SEQ ID NO: 632860 - DNA, 33 bp, Homo sapien
ctgatggaagaaagacgggagccgtagtcagta

SEQ ID NO: 632861 - DNA, 33 bp, Homo sapien
aagggaaaagaggtgacagatgagctttctgtg

SEQ ID NO: 632862 - DNA, 33 bp, Homo sapien
aagggaaaagaggtgagagatgagctttctgtg

SEQ ID NO: 632863 - DNA, 33 bp, Homo sapien
gctgcccctgaaggtaagttgaagaattgagta

SEQ ID NO: 632864 - DNA, 33 bp, Homo sapien
gctgcccctgaaggtaggttgaagaattgagta

SEQ ID NO: 632865 - DNA, 33 bp, Homo sapien
atcctttactttttaacctgttactcagccgca

SEQ ID NO: 632866 - DNA, 33 bp, Homo sapien
atcctttactttttaatctgttactcagccgca

SEQ ID NO: 632867 - DNA, 33 bp, Homo sapien
catttgtatgacttggaacaggattttagtcag

SEQ ID NO: 632868 - DNA, 33 bp, Homo sapien
catttgtatgacttgggacaggattttagtcag

SEQ ID NO: 632869 - DNA, 33 bp, Homo sapien
gccagtacataagtaacgcgtcccttgtatgag

SEQ ID NO: 632870 - DNA, 33 bp, Homo sapien
gccagtacataagtaatgcgtcccttgtatgag

SEQ ID NO: 632871 - DNA, 33 bp, Homo sapien
attttagagattcaaaaggcacagttagcacaa

SEQ ID NO: 632872 - DNA, 33 bp, Homo sapien
attttagagattcaaacggcacagttagcacaa

SEQ ID NO: 632873 - DNA, 33 bp, Homo sapien
aaatacgtaaaccactaacatcattgtttatta

SEQ ID NO: 632874 - DNA, 33 bp, Homo sapien
aaatacgtaaaccactgacatcattgtttatta

SEQ ID NO: 632875 - DNA, 33 bp, Homo sapien
accgggagaaatgtccagcaccgggattttgct

SEQ ID NO: 632876 - DNA, 33 bp, Homo sapien
accgggagaaatgtccggcaccgggattttgct

SEQ ID NO: 632877 - DNA, 33 bp, Homo sapien
agggtcttccatgaaaacaaatgtgagctgctc

SEQ ID NO: 632878 - DNA, 33 bp, Homo sapien
agggtcttccatgaaatcaaatgtgagctgctc

SEQ ID NO: 632879 - DNA, 33 bp, Homo sapien
gacaacttctatgcacagagtttttatatgttg

SEQ ID NO: 632880 - DNA, 33 bp, Homo sapien
gacaacttctatgcaccgagtttttatatgttg

SEQ ID NO: 632881 - DNA, 33 bp, Homo sapien
actgcattcttgcttacagagttgaaagcaaag

SEQ ID NO: 632882 - DNA, 33 bp, Homo sapien
actgcattcttgcttatagagttgaaagcaaag

SEQ ID NO: 632883 - DNA, 33 bp, Homo sapien
ggagagacaagatataaattcatggacaaagtt

SEQ ID NO: 632884 - DNA, 33 bp, Homo sapien
ggagagacaagatatatattcatggacaaagtt

SEQ ID NO: 632885 - DNA, 33 bp, Homo sapien
gccttttatgcggaagccagaacaagaactcaa

SEQ ID NO: 632886 - DNA, 33 bp, Homo sapien
gccttttatgcggaagtcagaacaagaactcaa

SEQ ID NO: 632887 - DNA, 33 bp, Homo sapien
cctgggtaaatcagaacgaaagagtaccctagc

SEQ ID NO: 632888 - DNA, 33 bp, Homo sapien
cctgggtaaatcagaatgaaagagtaccctagc

SEQ ID NO: 632889 - DNA, 33 bp, Homo sapien
caaaacaaccaaaatcactgaacaacagaggtt

SEQ ID NO: 632890 - DNA, 33 bp, Homo sapien
caaaacaaccaaaatcgctgaacaacagaggtt

SEQ ID NO: 632891 - DNA, 33 bp, Homo sapien
atctactctctcatcaactgtccggtagataat

SEQ ID NO: 632892 - DNA, 33 bp, Homo sapien
atctactctctcatcatctgtccggtagataat

SEQ ID NO: 632893 - DNA, 33 bp, Homo sapien
cctcttttcaaaacacgggagcaagatcagtgt

SEQ ID NO: 632894 - DNA, 33 bp, Homo sapien
cctcttttcaaaacactggagcaagatcagtgt

SEQ ID NO: 632895 - DNA, 33 bp, Homo sapien
aataaaacctattggacatcagctaagacacca

SEQ ID NO: 632896 - DNA, 33 bp, Homo sapien
aataaaacctattggatatcagctaagacacca

SEQ ID NO: 632897 - DNA, 33 bp, Homo sapien
tgacataaatctatagcaaggatgggtagattt

SEQ ID NO: 632898 - DNA, 33 bp, Homo sapien
tgacataaatctataggaaggatgggtagattt

SEQ ID NO: 632899 - DNA, 33 bp, Homo sapien
agccctgccgccaaagcaaacacatcagcaaaa

SEQ ID NO: 632900 - DNA, 33 bp, Homo sapien
agccctgccgccaaaggaaacacatcagcaaaa

SEQ ID NO: 632901 - DNA, 33 bp, Homo sapien
ccttctatgttacatccatacaggcagaaggaa

SEQ ID NO: 632902 - DNA, 33 bp, Homo sapien
ccttctatgttacatctatacaggcagaaggaa

SEQ ID NO: 632903 - DNA, 33 bp, Homo sapien
ctttttagtcagttgaaccaaacactaccaagt

SEQ ID NO: 632904 - DNA, 33 bp, Homo sapien
ctttttagtcagttgatccaaacactaccaagt

SEQ ID NO: 632905 - DNA, 33 bp, Homo sapien
tttgtggcaatgaaagaaaacttggtagtgttt

SEQ ID NO: 632906 - DNA, 33 bp, Homo sapien
tttgtggcaatgaaaggaaacttggtagtgttt

SEQ ID NO: 632907 - DNA, 33 bp, Homo sapien
ttcacctgtacctgtaccgatcactcacatcca

SEQ ID NO: 632908 - DNA, 33 bp, Homo sapien
ttcacctgtacctgtagcgatcactcacatcca

SEQ ID NO: 632909 - DNA, 33 bp, Homo sapien
aaagaggaaactcacaccagaacaaaagaaatt

SEQ ID NO: 632910 - DNA, 33 bp, Homo sapien
aaagaggaaactcacatcagaacaaaagaaatt

SEQ ID NO: 632911 - DNA, 33 bp, Homo sapien
ttagtaacaccttaaacagcaagatgtgcagca

SEQ ID NO: 632912 - DNA, 33 bp, Homo sapien
ttagtaacaccttaaatagcaagatgtgcagca

SEQ ID NO: 632913 - DNA, 33 bp, Homo sapien
gtttttcggcaatctggatacacagtggaaaag

SEQ ID NO: 632914 - DNA, 33 bp, Homo sapien
gtttttcggcaatctgtatacacagtggaaaag

SEQ ID NO: 632915 - DNA, 33 bp, Homo sapien
ccagttggtgcggttaggttttattgatgtctt

SEQ ID NO: 632916 - DNA, 33 bp, Homo sapien
ccagttggtgcggttatgttttattgatgtctt

SEQ ID NO: 632917 - DNA, 33 bp, Homo sapien
tgtgtgttaaagcaaactgttcattgctccctc

SEQ ID NO: 632918 - DNA, 33 bp, Homo sapien
tgtgtgttaaagcaaagtgttcattgctccctc

SEQ ID NO: 632919 - DNA, 33 bp, Homo sapien
caaattatgtgatgaaaagccttctatgtcagt

SEQ ID NO: 632920 - DNA, 33 bp, Homo sapien
caaattatgtgatgaagagccttctatgtcagt

SEQ ID NO: 632921 - DNA, 33 bp, Homo sapien
ccagtttgttaaaatgcatgttgaacgctgaga

SEQ ID NO: 632922 - DNA, 33 bp, Homo sapien
ccagtttgttaaaatgtatgttgaacgctgaga

SEQ ID NO: 632923 - DNA, 33 bp, Homo sapien
agaatataccaaaaacccttacagctcaataat

SEQ ID NO: 632924 - DNA, 33 bp, Homo sapien
agaatataccaaaaactcttacagctcaataat

SEQ ID NO: 632925 - DNA, 33 bp, Homo sapien
ctgtggctttaatttacatctcactgaggcaaa

SEQ ID NO: 632926 - DNA, 33 bp, Homo sapien
ctgtggctttaatttatatctcactgaggcaaa

SEQ ID NO: 632927 - DNA, 33 bp, Homo sapien
ccaggtctgttggagaaggaaacttactaacct

SEQ ID NO: 632928 - DNA, 33 bp, Homo sapien
ccaggtctgttggagagggaaacttactaacct

SEQ ID NO: 632929 - DNA, 33 bp, Homo sapien
gggatcattattcaaacggcagcctctcttttt

SEQ ID NO: 632930 - DNA, 33 bp, Homo sapien
gggatcattattcaaatggcagcctctcttttt

SEQ ID NO: 632931 - DNA, 33 bp, Homo sapien
atgcatatgaatctcccgaggtgctttgttaaa

SEQ ID NO: 632932 - DNA, 33 bp, Homo sapien
atgcatatgaatctcctgaggtgctttgttaaa

SEQ ID NO: 632933 - DNA, 33 bp, Homo sapien
acccagtttttctcaacctctggactcttgaca

SEQ ID NO: 632934 - DNA, 33 bp, Homo sapien
acccagtttttctcaagctctggactcttgaca

SEQ ID NO: 632935 - DNA, 33 bp, Homo sapien
ttcatttccatgcttcccaaccccctaaggagg

SEQ ID NO: 632936 - DNA, 33 bp, Homo sapien
ttcatttccatgcttctcaaccccctaaggagg

SEQ ID NO: 632937 - DNA, 33 bp, Homo sapien
tgcggcaaaagaatgacgtatttcagaaatttt

SEQ ID NO: 632938 - DNA, 33 bp, Homo sapien
tgcggcaaaagaatgatgtatttcagaaatttt

SEQ ID NO: 632939 - DNA, 33 bp, Homo sapien
cacacccttcctcgagacaaggagaaactgagc

SEQ ID NO: 632940 - DNA, 33 bp, Homo sapien
cacacccttcctcgagtcaaggagaaactgagc

SEQ ID NO: 632941 - DNA, 33 bp, Homo sapien
ccttctaatctgtgaacatctgataggaggtag

SEQ ID NO: 632942 - DNA, 33 bp, Homo sapien
ccttctaatctgtgaatatctgataggaggtag

SEQ ID NO: 632943 - DNA, 33 bp, Homo sapien
cttgcagctttaggaaacacctggatgatgaca

SEQ ID NO: 632944 - DNA, 33 bp, Homo sapien
cttgcagctttaggaagcacctggatgatgaca

SEQ ID NO: 632945 - DNA, 33 bp, Homo sapien
attttttttctagggaagtatgttcagtacaca

SEQ ID NO: 632946 - DNA, 33 bp, Homo sapien
attttttttctagggaggtatgttcagtacaca

SEQ ID NO: 632947 - DNA, 33 bp, Homo sapien
ggaaagggacagttcaaatgtgctggatgtggt

SEQ ID NO: 632948 - DNA, 33 bp, Homo sapien
ggaaagggacagttcagatgtgctggatgtggt

SEQ ID NO: 632949 - DNA, 33 bp, Homo sapien
gtaagtgtgcttcagaaaatggaaatgatatga

SEQ ID NO: 632950 - DNA, 33 bp, Homo sapien
gtaagtgtgcttcagagaatggaaatgatatga

SEQ ID NO: 632951 - DNA, 33 bp, Homo sapien
agcagatgtatgaacacatgcaagtgataaaag

SEQ ID NO: 632952 - DNA, 33 bp, Homo sapien
agcagatgtatgaacatatgcaagtgataaaag

SEQ ID NO: 632953 - DNA, 33 bp, Homo sapien
tggtttcgattaataccacactggtggcttcag

SEQ ID NO: 632954 - DNA, 33 bp, Homo sapien
tggtttcgattaatacgacactggtggcttcag

SEQ ID NO: 632955 - DNA, 33 bp, Homo sapien
gctcccctccacataaccttcatatgccaagcc

SEQ ID NO: 632956 - DNA, 33 bp, Homo sapien
gctcccctccacataatcttcatatgccaagcc

SEQ ID NO: 632957 - DNA, 33 bp, Homo sapien
accttatattcccagacgaacacagtgcctggc

SEQ ID NO: 632958 - DNA, 33 bp, Homo sapien
accttatattcccagatgaacacagtgcctggc

SEQ ID NO: 632959 - DNA, 33 bp, Homo sapien
taataaagtcatgtagcaccaacaaaaaagaga

SEQ ID NO: 632960 - DNA, 33 bp, Homo sapien
taataaagtcatgtaggaccaacaaaaaagaga

SEQ ID NO: 632961 - DNA, 33 bp, Homo sapien
tgggataatgatacccaagtactctcttgcttt

SEQ ID NO: 632962 - DNA, 33 bp, Homo sapien
tgggataatgataccccagtactctcttgcttt

SEQ ID NO: 632963 - DNA, 33 bp, Homo sapien
ttaacaaatatatacacaactttccatccaaca

SEQ ID NO: 632964 - DNA, 33 bp, Homo sapien
ttaacaaatatatacagaactttccatccaaca

SEQ ID NO: 632965 - DNA, 33 bp, Homo sapien
taaaatcttctgcaaaatggatctgcagtgtgg

SEQ ID NO: 632966 - DNA, 33 bp, Homo sapien
taaaatcttctgcaaagtggatctgcagtgtgg

SEQ ID NO: 632967 - DNA, 33 bp, Homo sapien
ctgagaatttattccacataccagagagggctg

SEQ ID NO: 632968 - DNA, 33 bp, Homo sapien
ctgagaatttattccatataccagagagggctg

SEQ ID NO: 632969 - DNA, 33 bp, Homo sapien
gccatttgaaaattacaagagaagaaagaaaga

SEQ ID NO: 632970 - DNA, 33 bp, Homo sapien
gccatttgaaaattacgagagaagaaagaaaga

SEQ ID NO: 632971 - DNA, 33 bp, Homo sapien
cccagtgggaagctaacgtacactcccacccag

SEQ ID NO: 632972 - DNA, 33 bp, Homo sapien
cccagtgggaagctaatgtacactcccacccag

SEQ ID NO: 632973 - DNA, 33 bp, Homo sapien
tctgcattctccagtacatttaaatcagactga

SEQ ID NO: 632974 - DNA, 33 bp, Homo sapien
tctgcattctccagtatatttaaatcagactga

SEQ ID NO: 632975 - DNA, 33 bp, Homo sapien
cagcgctggcagtgcacgatatctgacatatct

SEQ ID NO: 632976 - DNA, 33 bp, Homo sapien
cagcgctggcagtgcatgatatctgacatatct

SEQ ID NO: 632977 - DNA, 33 bp, Homo sapien
gctaagtcaatctacaaatcaggttcatggttc

SEQ ID NO: 632978 - DNA, 33 bp, Homo sapien
gctaagtcaatctacacatcaggttcatggttc

SEQ ID NO: 632979 - DNA, 33 bp, Homo sapien
atgcctaatctctccagaggaagtgtgtacagt

SEQ ID NO: 632980 - DNA, 33 bp, Homo sapien
atgcctaatctctccataggaagtgtgtacagt

SEQ ID NO: 632981 - DNA, 33 bp, Homo sapien
aatgtctgtatttctcccagcagtctctttaaa

SEQ ID NO: 632982 - DNA, 33 bp, Homo sapien
aatgtctgtatttctcgcagcagtctctttaaa

SEQ ID NO: 632983 - DNA, 33 bp, Homo sapien
tactggtcaacaaatacctccacagtgactagt

SEQ ID NO: 632984 - DNA, 33 bp, Homo sapien
tactggtcaacaaatatctccacagtgactagt

SEQ ID NO: 632985 - DNA, 33 bp, Homo sapien
ataacccctgattctaaggcaaatccatatttt

SEQ ID NO: 632986 - DNA, 33 bp, Homo sapien
ataacccctgattctacggcaaatccatatttt

SEQ ID NO: 632987 - DNA, 33 bp, Homo sapien
gtattcgtaatacacacatctgaaaaatgacct

SEQ ID NO: 632988 - DNA, 33 bp, Homo sapien
gtattcgtaatacacatatctgaaaaatgacct

SEQ ID NO: 632989 - DNA, 33 bp, Homo sapien
ctctacctaattcaaaacagcccctaacagcct

SEQ ID NO: 632990 - DNA, 33 bp, Homo sapien
ctctacctaattcaaaccagcccctaacagcct

SEQ ID NO: 632991 - DNA, 33 bp, Homo sapien
gcatatataactaactaagtcagcccagggaca

SEQ ID NO: 632992 - DNA, 33 bp, Homo sapien
gcatatataactaactgagtcagcccagggaca

SEQ ID NO: 632993 - DNA, 33 bp, Homo sapien
tatgggtcaggataaacacaggtacaagagggg

SEQ ID NO: 632994 - DNA, 33 bp, Homo sapien
tatgggtcaggataaatacaggtacaagagggg

SEQ ID NO: 632995 - DNA, 33 bp, Homo sapien
gacaggaataattagaagaaaggttcacacgta

SEQ ID NO: 632996 - DNA, 33 bp, Homo sapien
gacaggaataattagaggaaaggttcacacgta

SEQ ID NO: 632997 - DNA, 33 bp, Homo sapien
tcagtcttcctgttctaaacataaaattccctc

SEQ ID NO: 632998 - DNA, 33 bp, Homo sapien
tcagtcttcctgttctgaacataaaattccctc

SEQ ID NO: 632999 - DNA, 33 bp, Homo sapien
agagagagaggccatacaccattacagcgggaa

SEQ ID NO: 633000 - DNA, 33 bp, Homo sapien
agagagagaggccatataccattacagcgggaa

SEQ ID NO: 633001 - DNA, 33 bp, Homo sapien
tactggaatgatgaagcataaaacaatttcagt

SEQ ID NO: 633002 - DNA, 33 bp, Homo sapien
tactggaatgatgaaggataaaacaatttcagt

SEQ ID NO: 633003 - DNA, 33 bp, Homo sapien
tctctaattcaggacagatcctcagtctttctt

SEQ ID NO: 633004 - DNA, 33 bp, Homo sapien
tctctaattcaggacatatcctcagtctttctt

SEQ ID NO: 633005 - DNA, 33 bp, Homo sapien
gtcctaacgcatttgacgactaattttattaca

SEQ ID NO: 633006 - DNA, 33 bp, Homo sapien
gtcctaacgcatttgatgactaattttattaca

SEQ ID NO: 633007 - DNA, 33 bp, Homo sapien
tttttttaaatcactgaactgaaggcaaggagt

SEQ ID NO: 633008 - DNA, 33 bp, Homo sapien
tttttttaaatcactgcactgaaggcaaggagt

SEQ ID NO: 633009 - DNA, 33 bp, Homo sapien
gaggacatttgaaaataaagggaatcctcataa

SEQ ID NO: 633010 - DNA, 33 bp, Homo sapien
gaggacatttgaaaatgaagggaatcctcataa

SEQ ID NO: 633011 - DNA, 33 bp, Homo sapien
tctttcagggcttgcactgcaaaaaggtcttac

SEQ ID NO: 633012 - DNA, 33 bp, Homo sapien
tctttcagggcttgcattgcaaaaaggtcttac

SEQ ID NO: 633013 - DNA, 33 bp, Homo sapien
ggagttgaaagcctgacggttcaggatttcagg

SEQ ID NO: 633014 - DNA, 33 bp, Homo sapien
ggagttgaaagcctgatggttcaggatttcagg

SEQ ID NO: 633015 - DNA, 33 bp, Homo sapien
cctttcctgaagtggacagaaaaggagaacatg

SEQ ID NO: 633016 - DNA, 33 bp, Homo sapien
cctttcctgaagtggagagaaaaggagaacatg

SEQ ID NO: 633017 - DNA, 33 bp, Homo sapien
acaagctaaaagagaacaggaagtcataggttg

SEQ ID NO: 633018 - DNA, 33 bp, Homo sapien
acaagctaaaagagaagaggaagtcataggttg

SEQ ID NO: 633019 - DNA, 33 bp, Homo sapien
aatcggaaaaaaagaacctcaatgccatcagct

SEQ ID NO: 633020 - DNA, 33 bp, Homo sapien
aatcggaaaaaaagaatctcaatgccatcagct

SEQ ID NO: 633021 - DNA, 33 bp, Homo sapien
gaaatgacttcggctacctttatccctagccaa

SEQ ID NO: 633022 - DNA, 33 bp, Homo sapien
gaaatgacttcggctatctttatccctagccaa

SEQ ID NO: 633023 - DNA, 33 bp, Homo sapien
gcaatgttaaccagtcactaccaaaagatcaaa

SEQ ID NO: 633024 - DNA, 33 bp, Homo sapien
gcaatgttaaccagtcgctaccaaaagatcaaa

SEQ ID NO: 633025 - DNA, 33 bp, Homo sapien
aaagcagatgaacacacattattttgaccaaca

SEQ ID NO: 633026 - DNA, 33 bp, Homo sapien
aaagcagatgaacacagattattttgaccaaca

SEQ ID NO: 633027 - DNA, 33 bp, Homo sapien
taagaaaagtaaaaaacggttcattgtcactct

SEQ ID NO: 633028 - DNA, 33 bp, Homo sapien
taagaaaagtaaaaaatggttcattgtcactct

SEQ ID NO: 633029 - DNA, 33 bp, Homo sapien
cttatttcatcctcacagtgagctcatgaaaga

SEQ ID NO: 633030 - DNA, 33 bp, Homo sapien
cttatttcatcctcacggtgagctcatgaaaga

SEQ ID NO: 633031 - DNA, 33 bp, Homo sapien
gtgaaagctgtttgtccatttccttaccgtgta

SEQ ID NO: 633032 - DNA, 33 bp, Homo sapien
gtgaaagctgtttgtctatttccttaccgtgta

SEQ ID NO: 633033 - DNA, 33 bp, Homo sapien
atatcagattatttcactagggatcaaggagag

SEQ ID NO: 633034 - DNA, 33 bp, Homo sapien
atatcagattatttcattagggatcaaggagag

SEQ ID NO: 633035 - DNA, 33 bp, Homo sapien
aatctctgccttgacactgatggtcttaagaac

SEQ ID NO: 633036 - DNA, 33 bp, Homo sapien
aatctctgccttgacattgatggtcttaagaac

SEQ ID NO: 633037 - DNA, 33 bp, Homo sapien
ctgtgccaggcctcaaatgagtttcttatagtc

SEQ ID NO: 633038 - DNA, 33 bp, Homo sapien
ctgtgccaggcctcaagtgagtttcttatagtc

SEQ ID NO: 633039 - DNA, 33 bp, Homo sapien
ggaatgaaacaagagacgccagtactgaacctg

SEQ ID NO: 633040 - DNA, 33 bp, Homo sapien
ggaatgaaacaagagatgccagtactgaacctg

SEQ ID NO: 633041 - DNA, 33 bp, Homo sapien
aattgagttgataattaaaaagcaccctctccc

SEQ ID NO: 633042 - DNA, 33 bp, Homo sapien
aattgagttgataatttaaaagcaccctctccc

SEQ ID NO: 633043 - DNA, 33 bp, Homo sapien
cgctagccttataaaaggagctggggtgatttc

SEQ ID NO: 633044 - DNA, 33 bp, Homo sapien
cgctagccttataaaatgagctggggtgatttc

SEQ ID NO: 633045 - DNA, 33 bp, Homo sapien
aaacaacatttaactcaaacggatcaaagactt

SEQ ID NO: 633046 - DNA, 33 bp, Homo sapien
aaacaacatttaactccaacggatcaaagactt

SEQ ID NO: 633047 - DNA, 33 bp, Homo sapien
gccaaccctggactcaaataatttcacccacaa

SEQ ID NO: 633048 - DNA, 33 bp, Homo sapien
gccaaccctggactcagataatttcacccacaa

SEQ ID NO: 633049 - DNA, 33 bp, Homo sapien
ctggatcaggaaagacaaagagagaaagctggt

SEQ ID NO: 633050 - DNA, 33 bp, Homo sapien
ctggatcaggaaagacgaagagagaaagctggt

SEQ ID NO: 633051 - DNA, 33 bp, Homo sapien
ttgagaggtgtttacaacccagatggttcgaat

SEQ ID NO: 633052 - DNA, 33 bp, Homo sapien
ttgagaggtgtttacatcccagatggttcgaat

SEQ ID NO: 633053 - DNA, 33 bp, Homo sapien
cccagacctaaggaaccagcagagtgaagccac

SEQ ID NO: 633054 - DNA, 33 bp, Homo sapien
cccagacctaaggaacgagcagagtgaagccac

SEQ ID NO: 633055 - DNA, 33 bp, Homo sapien
gaccccatgacgttgaagccattgagttgtgat

SEQ ID NO: 633056 - DNA, 33 bp, Homo sapien
gaccccatgacgttgaggccattgagttgtgat

SEQ ID NO: 633057 - DNA, 33 bp, Homo sapien
cgatgctacatttggcaaagaaaagccagggat

SEQ ID NO: 633058 - DNA, 33 bp, Homo sapien
cgatgctacatttggcgaagaaaagccagggat

SEQ ID NO: 633059 - DNA, 33 bp, Homo sapien
tcgcatattggagttacgtggcattttctgttt

SEQ ID NO: 633060 - DNA, 33 bp, Homo sapien
tcgcatattggagttatgtggcattttctgttt

SEQ ID NO: 633061 - DNA, 33 bp, Homo sapien
acatatggaccagataggtaccaggaagaaaca

SEQ ID NO: 633062 - DNA, 33 bp, Homo sapien
acatatggaccagatatgtaccaggaagaaaca

SEQ ID NO: 633063 - DNA, 33 bp, Homo sapien
aagaagcagaccttccacaggttcacctaccgt

SEQ ID NO: 633064 - DNA, 33 bp, Homo sapien
aagaagcagaccttccgcaggttcacctaccgt

SEQ ID NO: 633065 - DNA, 33 bp, Homo sapien; identical to SEQ ID NO: 633063

SEQ ID NO: 633066 - DNA, 33 bp, Homo sapien; identical to SEQ ID NO: 633064

SEQ ID NO: 633067 - DNA, 33 bp, Homo sapien
aacagataaagcagtaaggacttggcctggact

SEQ ID NO: 633068 - DNA, 33 bp, Homo sapien
aacagataaagcagtacggacttggcctggact

SEQ ID NO: 633069 - DNA, 33 bp, Homo sapien
ccagtataagtaaacacgagtagggccatggac

SEQ ID NO: 633070 - DNA, 33 bp, Homo sapien
ccagtataagtaaacatgagtagggccatggac

SEQ ID NO: 633071 - DNA, 33 bp, Homo sapien
gaaaaagagaagagagaaatgtcagcacccaag

SEQ ID NO: 633072 - DNA, 33 bp, Homo sapien
gaaaaagagaagagaggaatgtcagcacccaag

SEQ ID NO: 633073 - DNA, 33 bp, Homo sapien
aggtggtagctcgccaacattcacagaatcagt

SEQ ID NO: 633074 - DNA, 33 bp, Homo sapien
aggtggtagctcgccagcattcacagaatcagt

SEQ ID NO: 633075 - DNA, 33 bp, Homo sapien
atatttattcgtgaaacaggtgataaagaaaaa

SEQ ID NO: 633076 - DNA, 33 bp, Homo sapien
atatttattcgtgaaataggtgataaagaaaaa

SEQ ID NO: 633077 - DNA, 33 bp, Homo sapien
tgtgctgctatgaacacagagaggatacagact

SEQ ID NO: 633078 - DNA, 33 bp, Homo sapien
tgtgctgctatgaacagagagaggatacagact

SEQ ID NO: 633079 - DNA, 33 bp, Homo sapien
ctttgaaaaccaatcaccaggccatacacattc

SEQ ID NO: 633080 - DNA, 33 bp, Homo sapien
ctttgaaaaccaatcatcaggccatacacattc

SEQ ID NO: 633081 - DNA, 33 bp, Homo sapien
gtgttaatgtggaagcagaaattcagtaggagt

SEQ ID NO: 633082 - DNA, 33 bp, Homo sapien
gtgttaatgtggaagcggaaattcagtaggagt

SEQ ID NO: 633083 - DNA, 33 bp, Homo sapien
caaaactgagaaggagacactatcagcaaggct

SEQ ID NO: 633084 - DNA, 33 bp, Homo sapien
caaaactgagaaggagccactatcagcaaggct

SEQ ID NO: 633085 - DNA, 33 bp, Homo sapien
gcctctctgaagtgaaattaagaggcagatgtc

SEQ ID NO: 633086 - DNA, 33 bp, Homo sapien
gcctctctgaagtgaagttaagaggcagatgtc

SEQ ID NO: 633087 - DNA, 33 bp, Homo sapien
aggatactttctctaacgcagtatttgccccag

SEQ ID NO: 633088 - DNA, 33 bp, Homo sapien
aggatactttctctaatgcagtatttgccccag

SEQ ID NO: 633089 - DNA, 33 bp, Homo sapien
gtctcagaatcttgtaaaacacagtcaccccat

SEQ ID NO: 633090 - DNA, 33 bp, Homo sapien
gtctcagaatcttgtacaacacagtcaccccat

SEQ ID NO: 633091 - DNA, 33 bp, Homo sapien
attcttcccaaacttacctgatcaggaaaacat

SEQ ID NO: 633092 - DNA, 33 bp, Homo sapien
attcttcccaaacttatctgatcaggaaaacat

SEQ ID NO: 633093 - DNA, 33 bp, Homo sapien
agtatcttctctgctaggtattgccaaatccaa

SEQ ID NO: 633094 - DNA, 33 bp, Homo sapien
agtatcttctctgctatgtattgccaaatccaa

SEQ ID NO: 633095 - DNA, 33 bp, Homo sapien
gtcttgtaaatgcacccccatagttgtgcttga

SEQ ID NO: 633096 - DNA, 33 bp, Homo sapien
gtcttgtaaatgcacctccatagttgtgcttga

SEQ ID NO: 633097 - DNA, 33 bp, Homo sapien
atttcaaatgtactgaatacccactatctggat

SEQ ID NO: 633098 - DNA, 33 bp, Homo sapien
atttcaaatgtactgagtacccactatctggat

SEQ ID NO: 633099 - DNA, 33 bp, Homo sapien
gctcttggtgctgccaaattatattgtttgtgt

SEQ ID NO: 633100 - DNA, 33 bp, Homo sapien
gctcttggtgctgccagattatattgtttgtgt

SEQ ID NO: 633101 - DNA, 33 bp, Homo sapien
tcttctcaacaagtgaagaatctagaataggct

SEQ ID NO: 633102 - DNA, 33 bp, Homo sapien
tcttctcaacaagtgaggaatctagaataggct

SEQ ID NO: 633103 - DNA, 33 bp, Homo sapien
tgtttataataggtaaatgttgattgagcagag

SEQ ID NO: 633104 - DNA, 33 bp, Homo sapien
tgtttataataggtaagtgttgattgagcagag

SEQ ID NO: 633105 - DNA, 33 bp, Homo sapien
tctttgacattttatacgaagcacactactatt

SEQ ID NO: 633106 - DNA, 33 bp, Homo sapien
tctttgacattttatatgaagcacactactatt

SEQ ID NO: 633107 - DNA, 33 bp, Homo sapien
taacacaaaattaataagaccttccattgctat

SEQ ID NO: 633108 - DNA, 33 bp, Homo sapien
taacacaaaattaatatgaccttccattgctat

SEQ ID NO: 633109 - DNA, 33 bp, Homo sapien
taccaaatgacttctcactaggacagatgccaa

SEQ ID NO: 633110 - DNA, 33 bp, Homo sapien
taccaaatgacttctcgctaggacagatgccaa

SEQ ID NO: 633111 - DNA, 33 bp, Homo sapien
acagtttaggtatcagcctatggcaaagtcaga

SEQ ID NO: 633112 - DNA, 33 bp, Homo sapien
acagtttaggtatcagtctatggcaaagtcaga

SEQ ID NO: 633113 - DNA, 33 bp, Homo sapien
gccaattgtattttaaataactgcctgcttcag

SEQ ID NO: 633114 - DNA, 33 bp, Homo sapien
gccaattgtattttaattaactgcctgcttcag

SEQ ID NO: 633115 - DNA, 33 bp, Homo sapien
tcccaaatttgtgaaaaggatagaaaaggtggg

SEQ ID NO: 633116 - DNA, 33 bp, Homo sapien
tcccaaatttgtgaaagggatagaaaaggtggg

SEQ ID NO: 633117 - DNA, 33 bp, Homo sapien
tcctcttttctccactaaagtccaaacactgga

SEQ ID NO: 633118 - DNA, 33 bp, Homo sapien
tcctcttttctccactgaagtccaaacactgga

SEQ ID NO: 633119 - DNA, 33 bp, Homo sapien
gctccttggtaattaccgaatcattgctgattc

SEQ ID NO: 633120 - DNA, 33 bp, Homo sapien
gctccttggtaattactgaatcattgctgattc

SEQ ID NO: 633121 - DNA, 33 bp, Homo sapien
tggataataggaaatcactaagggctagaatct

SEQ ID NO: 633122 - DNA, 33 bp, Homo sapien
tggataataggaaatcgctaagggctagaatct

SEQ ID NO: 633123 - DNA, 33 bp, Homo sapien
tgtgtacaaaccccaaatagccagtttgttcag

SEQ ID NO: 633124 - DNA, 33 bp, Homo sapien
tgtgtacaaaccccaagtagccagtttgttcag

SEQ ID NO: 633125 - DNA, 33 bp, Homo sapien
accccatcatttataccgggtcaaaacagggtt

SEQ ID NO: 633126 - DNA, 33 bp, Homo sapien
accccatcatttatacggggtcaaaacagggtt

SEQ ID NO: 633127 - DNA, 33 bp, Homo sapien
agacaccataggtaagaacatttcacctgactt

SEQ ID NO: 633128 - DNA, 33 bp, Homo sapien
agacaccataggtaaggacatttcacctgactt

SEQ ID NO: 633129 - DNA, 33 bp, Homo sapien
gctggcttaagtaggaccaccacgggcttaaaa

SEQ ID NO: 633130 - DNA, 33 bp, Homo sapien
gctggcttaagtaggatcaccacgggcttaaaa

SEQ ID NO: 633131 - DNA, 33 bp, Homo sapien
aggtgaactccagagaaatttgatactgggaga

SEQ ID NO: 633132 - DNA, 33 bp, Homo sapien
aggtgaactccagagagatttgatactgggaga

SEQ ID NO: 633133 - DNA, 33 bp, Homo sapien
catttttaggaaatacagcctaagtccttgcag

SEQ ID NO: 633134 - DNA, 33 bp, Homo sapien
catttttaggaaatacggcctaagtccttgcag

SEQ ID NO: 633135 - DNA, 33 bp, Homo sapien
tttggaaatagcttcacggattttcccagccta

SEQ ID NO: 633136 - DNA, 33 bp, Homo sapien
tttggaaatagcttcatggattttcccagccta

SEQ ID NO: 633137 - DNA, 33 bp, Homo sapien
tatgagcctaagcaaaacctgttacttttcttc

SEQ ID NO: 633138 - DNA, 33 bp, Homo sapien
tatgagcctaagcaaatcctgttacttttcttc

SEQ ID NO: 633139 - DNA, 33 bp, Homo sapien
caacagatgtcttcaacagagaacctgcagaga

SEQ ID NO: 633140 - DNA, 33 bp, Homo sapien
caacagatgtcttcaagagagaacctgcagaga

SEQ ID NO: 633141 - DNA, 33 bp, Homo sapien
gtgagcttggagccaaggtaggtctatataagg

SEQ ID NO: 633142 - DNA, 33 bp, Homo sapien
gtgagcttggagccaatgtaggtctatataagg

SEQ ID NO: 633143 - DNA, 33 bp, Homo sapien
aagttttaattaaaaccagcagcttagagcatc

SEQ ID NO: 633144 - DNA, 33 bp, Homo sapien
aagttttaattaaaactagcagcttagagcatc

SEQ ID NO: 633145 - DNA, 33 bp, Homo sapien
agggtagaatagcacacatttagatcagatcct

SEQ ID NO: 633146 - DNA, 33 bp, Homo sapien
agggtagaatagcacatatttagatcagatcct

SEQ ID NO: 633147 - DNA, 33 bp, Homo sapien
aaaacattcacagcaacgtttggtagcaagtac

SEQ ID NO: 633148 - DNA, 33 bp, Homo sapien
aaaacattcacagcaatgtttggtagcaagtac

SEQ ID NO: 633149 - DNA, 33 bp, Homo sapien
atggcatggaacctggaacatagctgatgctcg

SEQ ID NO: 633150 - DNA, 33 bp, Homo sapien
atggcatggaacctggcacatagctgatgctcg

SEQ ID NO: 633151 - DNA, 33 bp, Homo sapien
gcaattacacttgcccaggctttaagcaggcct

SEQ ID NO: 633152 - DNA, 33 bp, Homo sapien
gcaattacacttgcccgggctttaagcaggcct

SEQ ID NO: 633153 - DNA, 33 bp, Homo sapien
ggtttgtgtgtacttagctaatttttaaagaag

SEQ ID NO: 633154 - DNA, 33 bp, Homo sapien
ggtttgtgtgtacttatctaatttttaaagaag

SEQ ID NO: 633155 - DNA, 33 bp, Homo sapien
gatgatggagctctcacatgaactgtttctaaa

SEQ ID NO: 633156 - DNA, 33 bp, Homo sapien
gatgatggagctctcatatgaactgtttctaaa

SEQ ID NO: 633157 - DNA, 33 bp, Homo sapien
gaatgtggagccctgaatagatctccttttctt

SEQ ID NO: 633158 - DNA, 33 bp, Homo sapien
gaatgtggagccctgagtagatctccttttctt

SEQ ID NO: 633159 - DNA, 33 bp, Homo sapien
gttcctgtcccataaaaaggaatcagtgaatgt

SEQ ID NO: 633160 - DNA, 33 bp, Homo sapien
gttcctgtcccataaacaggaatcagtgaatgt

SEQ ID NO: 633161 - DNA, 33 bp, Homo sapien
aaagaatgttctttaaccctgaagctgtgtcct

SEQ ID NO: 633162 - DNA, 33 bp, Homo sapien
aaagaatgttctttaatcctgaagctgtgtcct

SEQ ID NO: 633163 - DNA, 33 bp, Homo sapien
ttctaaaatctctacacctcttcactgtggaga

SEQ ID NO: 633164 - DNA, 33 bp, Homo sapien
ttctaaaatctctacatctcttcactgtggaga

SEQ ID NO: 633165 - DNA, 33 bp, Homo sapien
tatttgtatttcagcccggataaacatgggctt

SEQ ID NO: 633166 - DNA, 33 bp, Homo sapien
tatttgtatttcagcctggataaacatgggctt

SEQ ID NO: 633167 - DNA, 33 bp, Homo sapien
ttcataactcagaggaaagccaaatgtcccttg

SEQ ID NO: 633168 - DNA, 33 bp, Homo sapien
ttcataactcagaggacagccaaatgtcccttg

SEQ ID NO: 633169 - DNA, 33 bp, Homo sapien
ctgtaggcaaaggagtaacgctgagaaaagaat

SEQ ID NO: 633170 - DNA, 33 bp, Homo sapien
ctgtaggcaaaggagtgacgctgagaaaagaat

SEQ ID NO: 633171 - DNA, 33 bp, Homo sapien
gtcccattgccggcacaaaaggttcctcccagc

SEQ ID NO: 633172 - DNA, 33 bp, Homo sapien
gtcccattgccggcacgaaaggttcctcccagc

SEQ ID NO: 633173 - DNA, 33 bp, Homo sapien
tgtgctaacagcggtaagtgtctcgtttcattt

SEQ ID NO: 633174 - DNA, 33 bp, Homo sapien
tgtgctaacagcggtacgtgtctcgtttcattt

SEQ ID NO: 633175 - DNA, 33 bp, Homo sapien
agggtattgggaatcacagccagatgtaatggc

SEQ ID NO: 633176 - DNA, 33 bp, Homo sapien
agggtattgggaatcatagccagatgtaatggc

SEQ ID NO: 633177 - DNA, 33 bp, Homo sapien
gaacaataatacaccacggctcctagagagatg

SEQ ID NO: 633178 - DNA, 33 bp, Homo sapien
gaacaataatacaccatggctcctagagagatg

SEQ ID NO: 633179 - DNA, 33 bp, Homo sapien
agaagtagcaaaataccagacctatcacacaat

SEQ ID NO: 633180 - DNA, 33 bp, Homo sapien
agaagtagcaaaatactagacctatcacacaat

SEQ ID NO: 633181 - DNA, 33 bp, Homo sapien
aaagcctgaatgtcaccgccttaagtgaggacc

SEQ ID NO: 633182 - DNA, 33 bp, Homo sapien
aaagcctgaatgtcactgccttaagtgaggacc

SEQ ID NO: 633183 - DNA, 33 bp, Homo sapien
tttatttttgaagatacaggaaattgtgtttaa

SEQ ID NO: 633184 - DNA, 33 bp, Homo sapien
tttatttttgaagatataggaaattgtgtttaa

SEQ ID NO: 633185 - DNA, 33 bp, Homo sapien
cccttcacctctaccaaagatggagtgcccact

SEQ ID NO: 633186 - DNA, 33 bp, Homo sapien
cccttcacctctaccagagatggagtgcccact

SEQ ID NO: 633187 - DNA, 33 bp, Homo sapien
cacaccctgcaactacggaatgctttcctgaac

SEQ ID NO: 633188 - DNA, 33 bp, Homo sapien
cacaccctgcaactactgaatgctttcctgaac

SEQ ID NO: 633189 - DNA, 33 bp, Homo sapien
tcatgctaagttgtaactggttggtttcctgaa

SEQ ID NO: 633190 - DNA, 33 bp, Homo sapien
tcatgctaagttgtaattggttggtttcctgaa

SEQ ID NO: 633191 - DNA, 33 bp, Homo sapien
ctggttttacctgatgaaggctgtcggggtgct

SEQ ID NO: 633192 - DNA, 33 bp, Homo sapien
ctggttttacctgatgtaggctgtcggggtgct

SEQ ID NO: 633193 - DNA, 33 bp, Homo sapien
gattcttttccacttcaagggacttcctgaaag

SEQ ID NO: 633194 - DNA, 33 bp, Homo sapien
gattcttttccacttcgagggacttcctgaaag

SEQ ID NO: 633195 - DNA, 33 bp, Homo sapien
aaatgttctccttgtcaccagctttcaggaagt

SEQ ID NO: 633196 - DNA, 33 bp, Homo sapien
aaatgttctccttgtcgccagctttcaggaagt

SEQ ID NO: 633197 - DNA, 33 bp, Homo sapien
cccccactttatttctgacttggcctgtgtata

SEQ ID NO: 633198 - DNA, 33 bp, Homo sapien
cccccactttatttcttacttggcctgtgtata

SEQ ID NO: 633199 - DNA, 33 bp, Homo sapien
actggaatatgtcttagacccagattcagtctt

SEQ ID NO: 633200 - DNA, 33 bp, Homo sapien
actggaatatgtcttatacccagattcagtctt

SEQ ID NO: 633201 - DNA, 33 bp, Homo sapien
aaattattattgtcgccctcttcattaagaatt

SEQ ID NO: 633202 - DNA, 33 bp, Homo sapien
aaattattattgtcgctctcttcattaagaatt

SEQ ID NO: 633203 - DNA, 33 bp, Homo sapien
gatttgttcactcaccaatttaaacatgtttct

SEQ ID NO: 633204 - DNA, 33 bp, Homo sapien
gatttgttcactcacctatttaaacatgtttct

SEQ ID NO: 633205 - DNA, 33 bp, Homo sapien
agattaactaaatcaccgtcttgacttacaatg

SEQ ID NO: 633206 - DNA, 33 bp, Homo sapien
agattaactaaatcactgtcttgacttacaatg

SEQ ID NO: 633207 - DNA, 33 bp, Homo sapien
aatatccttctttatgaacgtagtgactacttt

SEQ ID NO: 633208 - DNA, 33 bp, Homo sapien
aatatccttctttatggacgtagtgactacttt

SEQ ID NO: 633209 - DNA, 33 bp, Homo sapien
agaagattccatgtccagataataggactcagg

SEQ ID NO: 633210 - DNA, 33 bp, Homo sapien
agaagattccatgtccggataataggactcagg

SEQ ID NO: 633211 - DNA, 33 bp, Homo sapien
agcttgccacaagagtcaaagtctatttcattt

SEQ ID NO: 633212 - DNA, 33 bp, Homo sapien
agcttgccacaagagtgaaagtctatttcattt

SEQ ID NO: 633213 - DNA, 33 bp, Homo sapien
tgaatttcaaaatatgacaaacatctgccaagg

SEQ ID NO: 633214 - DNA, 33 bp, Homo sapien
tgaatttcaaaatatggcaaacatctgccaagg

SEQ ID NO: 633215 - DNA, 33 bp, Homo sapien
tgcacaggtccactaagacacagattggaaaat

SEQ ID NO: 633216 - DNA, 33 bp, Homo sapien
tgcacaggtccactaatacacagattggaaaat

SEQ ID NO: 633217 - DNA, 33 bp, Homo sapien
cacatgaacaaaagccactggccatgcttgctt

SEQ ID NO: 633218 - DNA, 33 bp, Homo sapien
cacatgaacaaaagccgctggccatgcttgctt

SEQ ID NO: 633219 - DNA, 33 bp, Homo sapien
acaatgaatggaggggaaaaacgacagatgaaa

SEQ ID NO: 633220 - DNA, 33 bp, Homo sapien
acaatgaatggagggggaaaacgacagatgaaa

SEQ ID NO: 633221 - DNA, 33 bp, Homo sapien
ctaaccatttgactggacatagaatacctggct

SEQ ID NO: 633222 - DNA, 33 bp, Homo sapien
ctaaccatttgactggccatagaatacctggct

SEQ ID NO: 633223 - DNA, 33 bp, Homo sapien
gccacgcttattcgcccagctctttccaaacag

SEQ ID NO: 633224 - DNA, 33 bp, Homo sapien
gccacgcttattcgcctagctctttccaaacag

SEQ ID NO: 633225 - DNA, 33 bp, Homo sapien
agctacctcggctgtacggaaatagttctccca

SEQ ID NO: 633226 - DNA, 33 bp, Homo sapien
agctacctcggctgtatggaaatagttctccca

SEQ ID NO: 633227 - DNA, 33 bp, Homo sapien
gtttgccagctcagaaaaaaacaagaaagctac

SEQ ID NO: 633228 - DNA, 33 bp, Homo sapien
gtttgccagctcagaacaaaacaagaaagctac

SEQ ID NO: 633229 - DNA, 33 bp, Homo sapien
tttcacagcatacacacgttccctaaaatgagg

SEQ ID NO: 633230 - DNA, 33 bp, Homo sapien
tttcacagcatacacaggttccctaaaatgagg

SEQ ID NO: 633231 - DNA, 33 bp, Homo sapien
agttccaagccatcgacaccattagggacatgg

SEQ ID NO: 633232 - DNA, 33 bp, Homo sapien
agttccaagccatcgataccattagggacatgg

SEQ ID NO: 633233 - DNA, 33 bp, Homo sapien
tctcatattaagcagacggaatgtcaatctttt

SEQ ID NO: 633234 - DNA, 33 bp, Homo sapien
tctcatattaagcagatggaatgtcaatctttt

SEQ ID NO: 633235 - DNA, 33 bp, Homo sapien
ctgagtagcctcttgaagtcaccccgttttgct

SEQ ID NO: 633236 - DNA, 33 bp, Homo sapien
ctgagtagcctcttgaggtcaccccgttttgct

SEQ ID NO: 633237 - DNA, 33 bp, Homo sapien
taattggcatgaaaggcatattagccatgaaac

SEQ ID NO: 633238 - DNA, 33 bp, Homo sapien
taattggcatgaaaggtatattagccatgaaac

SEQ ID NO: 633239 - DNA, 33 bp, Homo sapien
gagtggtagtatggacaggtttgtggagaattg

SEQ ID NO: 633240 - DNA, 33 bp, Homo sapien
gagtggtagtatggacgggtttgtggagaattg

SEQ ID NO: 633241 - DNA, 33 bp, Homo sapien
ggtttgtggagaattgcaccttccatccttaag

SEQ ID NO: 633242 - DNA, 33 bp, Homo sapien
ggtttgtggagaattgtaccttccatccttaag

SEQ ID NO: 633243 - DNA, 33 bp, Homo sapien
ttcaacctaaataaaactggaacacccatcaaa

SEQ ID NO: 633244 - DNA, 33 bp, Homo sapien
ttcaacctaaataaaattggaacacccatcaaa

SEQ ID NO: 633245 - DNA, 33 bp, Homo sapien
gcccatgacttggatagcttgtccttaagtagc

SEQ ID NO: 633246 - DNA, 33 bp, Homo sapien
gcccatgacttggatatcttgtccttaagtagc

SEQ ID NO: 633247 - DNA, 33 bp, Homo sapien
aagtacaaactcaggacatttgagcatcagatc

SEQ ID NO: 633248 - DNA, 33 bp, Homo sapien
aagtacaaactcaggatatttgagcatcagatc

SEQ ID NO: 633249 - DNA, 33 bp, Homo sapien
ggtaacatttaagtcaaccaaagaaggagatga

SEQ ID NO: 633250 - DNA, 33 bp, Homo sapien
ggtaacatttaagtcagccaaagaaggagatga

SEQ ID NO: 633251 - DNA, 33 bp, Homo sapien
tttgaggacgatttgaatagcaaaggaggacaa

SEQ ID NO: 633252 - DNA, 33 bp, Homo sapien
tttgaggacgatttgagtagcaaaggaggacaa

SEQ ID NO: 633253 - DNA, 33 bp, Homo sapien
gtcaagcgtattccacaatggaaatattaggga

SEQ ID NO: 633254 - DNA, 33 bp, Homo sapien
gtcaagcgtattccaccatggaaatattaggga

SEQ ID NO: 633255 - DNA, 33 bp, Homo sapien
aaagtagcaaggagtgacaccttcctgtgcctg

SEQ ID NO: 633256 - DNA, 33 bp, Homo sapien
aaagtagcaaggagtggcaccttcctgtgcctg

SEQ ID NO: 633257 - DNA, 33 bp, Homo sapien
gtttctccaatcaaacaaaaggcatccttccaa

SEQ ID NO: 633258 - DNA, 33 bp, Homo sapien
gtttctccaatcaaacgaaaggcatccttccaa

SEQ ID NO: 633259 - DNA, 33 bp, Homo sapien
aggttgtttttaaaaaggcagcaataaagggca

SEQ ID NO: 633260 - DNA, 33 bp, Homo sapien
aggttgtttttaaaaatgcagcaataaagggca

SEQ ID NO: 633261 - DNA, 33 bp, Homo sapien
tgtaagcacctactccacaactacctttggcaa

SEQ ID NO: 633262 - DNA, 33 bp, Homo sapien
tgtaagcacctactccgcaactacctttggcaa

SEQ ID NO: 633263 - DNA, 33 bp, Homo sapien
aggagttcaaacagacacttgtaagcacctact

SEQ ID NO: 633264 - DNA, 33 bp, Homo sapien
aggagttcaaacagacccttgtaagcacctact

SEQ ID NO: 633265 - DNA, 33 bp, Homo sapien
tgttttatttgtagcaagtattttttcatcttt

SEQ ID NO: 633266 - DNA, 33 bp, Homo sapien
tgttttatttgtagcaggtattttttcatcttt

SEQ ID NO: 633267 - DNA, 33 bp, Homo sapien
ttaaacagctccaatcacacaggaagccattgg

SEQ ID NO: 633268 - DNA, 33 bp, Homo sapien
ttaaacagctccaatcgcacaggaagccattgg

SEQ ID NO: 633269 - DNA, 33 bp, Homo sapien
gtcaatattcaaatccccacagctgcatataag

SEQ ID NO: 633270 - DNA, 33 bp, Homo sapien
gtcaatattcaaatcctcacagctgcatataag

SEQ ID NO: 633271 - DNA, 33 bp, Homo sapien
tgcagttgagaatccaccctttctcagaatcac

SEQ ID NO: 633272 - DNA, 33 bp, Homo sapien
tgcagttgagaatccatcctttctcagaatcac

SEQ ID NO: 633273 - DNA, 33 bp, Homo sapien
tacctggtgctaagtgaaaagcaaattcaagac

SEQ ID NO: 633274 - DNA, 33 bp, Homo sapien
tacctggtgctaagtggaaagcaaattcaagac

SEQ ID NO: 633275 - DNA, 33 bp, Homo sapien
gcaaatatgaatgtaaaaagaaaaactctgcag

SEQ ID NO: 633276 - DNA, 33 bp, Homo sapien
gcaaatatgaatgtaagaagaaaaactctgcag

SEQ ID NO: 633277 - DNA, 33 bp, Homo sapien
ccaacactcagaggtactaacatttattaagcc

SEQ ID NO: 633278 - DNA, 33 bp, Homo sapien
ccaacactcagaggtagtaacatttattaagcc

SEQ ID NO: 633279 - DNA, 33 bp, Homo sapien
agcccctcccatggaaattagcttcacttatga

SEQ ID NO: 633280 - DNA, 33 bp, Homo sapien
agcccctcccatggaacttagcttcacttatga

SEQ ID NO: 633281 - DNA, 33 bp, Homo sapien
tgtgtccagactggtactaagccctgggaggat

SEQ ID NO: 633282 - DNA, 33 bp, Homo sapien
tgtgtccagactggtagtaagccctgggaggat

SEQ ID NO: 633283 - DNA, 33 bp, Homo sapien
tattttttaagctccccaaggaattctaatgtg

SEQ ID NO: 633284 - DNA, 33 bp, Homo sapien
tattttttaagctccctaaggaattctaatgtg

SEQ ID NO: 633285 - DNA, 33 bp, Homo sapien
ccaagattatcagcacactagtaatcaaagggg

SEQ ID NO: 633286 - DNA, 33 bp, Homo sapien
ccaagattatcagcacgctagtaatcaaagggg

SEQ ID NO: 633287 - DNA, 33 bp, Homo sapien
tagcaactgtggggctcaacatttattaaacac

SEQ ID NO: 633288 - DNA, 33 bp, Homo sapien
tagcaactgtggggcttaacatttattaaacac

SEQ ID NO: 633289 - DNA, 33 bp, Homo sapien
tttaggtgtagagacaacattgggcagtgggaa

SEQ ID NO: 633290 - DNA, 33 bp, Homo sapien
tttaggtgtagagacagcattgggcagtgggaa

SEQ ID NO: 633291 - DNA, 33 bp, Homo sapien
ccgtaagttactgtccagataaggagcctccac

SEQ ID NO: 633292 - DNA, 33 bp, Homo sapien
ccgtaagttactgtccggataaggagcctccac

SEQ ID NO: 633293 - DNA, 33 bp, Homo sapien
actgctcaccttgtagaacatagcatcaattgg

SEQ ID NO: 633294 - DNA, 33 bp, Homo sapien
actgctcaccttgtagtacatagcatcaattgg

SEQ ID NO: 633295 - DNA, 33 bp, Homo sapien
tcagctccagggaaaacgatgctgaaacccagt

SEQ ID NO: 633296 - DNA, 33 bp, Homo sapien
tcagctccagggaaaaggatgctgaaacccagt

SEQ ID NO: 633297 - DNA, 33 bp, Homo sapien
tttaagttgtaccaaactctctcattcttattt

SEQ ID NO: 633298 - DNA, 33 bp, Homo sapien
tttaagttgtaccaaattctctcattcttattt

SEQ ID NO: 633299 - DNA, 33 bp, Homo sapien
gtaggaaaatgaacatcaatgaaggaaagaaag

SEQ ID NO: 633300 - DNA, 33 bp, Homo sapien
gtaggaaaatgaacatgaatgaaggaaagaaag

SEQ ID NO: 633301 - DNA, 33 bp, Homo sapien
tcctatctcttctttaccattattgcctcactg

SEQ ID NO: 633302 - DNA, 33 bp, Homo sapien
tcctatctcttctttatcattattgcctcactg

SEQ ID NO: 633303 - DNA, 33 bp, Homo sapien
tagtatcctagcatgacggtttcttatatgtag

SEQ ID NO: 633304 - DNA, 33 bp, Homo sapien
tagtatcctagcatgatggtttcttatatgtag

SEQ ID NO: 633305 - DNA, 33 bp, Homo sapien
cactgtaaaagccatcagaaacgggggagaggt

SEQ ID NO: 633306 - DNA, 33 bp, Homo sapien
cactgtaaaagccatccgaaacgggggagaggt

SEQ ID NO: 633307 - DNA, 33 bp, Homo sapien
caagagctattttatcgaggacagtctcatcag

SEQ ID NO: 633308 - DNA, 33 bp, Homo sapien
caagagctattttatctaggacagtctcatcag

SEQ ID NO: 633309 - DNA, 33 bp, Homo sapien
attacccaagtcaaaagagttcctgtctcaatt

SEQ ID NO: 633310 - DNA, 33 bp, Homo sapien
attacccaagtcaaaatagttcctgtctcaatt

SEQ ID NO: 633311 - DNA, 33 bp, Homo sapien
gaagaccacttggcaccccagggtagagacagt

SEQ ID NO: 633312 - DNA, 33 bp, Homo sapien
gaagaccacttggcactccagggtagagacagt

SEQ ID NO: 633313 - DNA, 33 bp, Homo sapien
ggcacgaacaacatacagaaattaatgactgtc

SEQ ID NO: 633314 - DNA, 33 bp, Homo sapien
ggcacgaacaacatacggaaattaatgactgtc

SEQ ID NO: 633315 - DNA, 33 bp, Homo sapien
agactgaaaaagagcaaaacatttcataacaca

SEQ ID NO: 633316 - DNA, 33 bp, Homo sapien
agactgaaaaagagcagaacatttcataacaca

SEQ ID NO: 633317 - DNA, 33 bp, Homo sapien
gttgagattaatggaccctgattaaaacaggat

SEQ ID NO: 633318 - DNA, 33 bp, Homo sapien
gttgagattaatggacgctgattaaaacaggat

SEQ ID NO: 633319 - DNA, 33 bp, Homo sapien
aactggctcagagaaacatggtgaacctacagc

SEQ ID NO: 633320 - DNA, 33 bp, Homo sapien
aactggctcagagaaagatggtgaacctacagc

SEQ ID NO: 633321 - DNA, 33 bp, Homo sapien
cacaaccaaattttccaactattacagactttg

SEQ ID NO: 633322 - DNA, 33 bp, Homo sapien
cacaaccaaattttccgactattacagactttg

SEQ ID NO: 633323 - DNA, 33 bp, Homo sapien
tttgataacaactttcgcgtctttggcctgtgg

SEQ ID NO: 633324 - DNA, 33 bp, Homo sapien
tttgataacaactttctcgtctttggcctgtgg

SEQ ID NO: 633325 - DNA, 33 bp, Homo sapien
aatagttctacttccaaatcaaaattgcgtgat

SEQ ID NO: 633326 - DNA, 33 bp, Homo sapien
aatagttctacttccacatcaaaattgcgtgat

SEQ ID NO: 633327 - DNA, 33 bp, Homo sapien
agtgaaacttttccagaatcattaattgaaaga

SEQ ID NO: 633328 - DNA, 33 bp, Homo sapien
agtgaaacttttccaggatcattaattgaaaga

SEQ ID NO: 633329 - DNA, 33 bp, Homo sapien
agtagaaggatttaaacggtgtgatacttcccc

SEQ ID NO: 633330 - DNA, 33 bp, Homo sapien
agtagaaggatttaaatggtgtgatacttcccc

SEQ ID NO: 633331 - DNA, 33 bp, Homo sapien
ggttagaacccctatcacataatatttcattaa

SEQ ID NO: 633332 - DNA, 33 bp, Homo sapien
ggttagaacccctatcgcataatatttcattaa

SEQ ID NO: 633333 - DNA, 33 bp, Homo sapien
ctaatttccttctcccagagcctaaacattacc

SEQ ID NO: 633334 - DNA, 33 bp, Homo sapien
ctaatttccttctcccggagcctaaacattacc

SEQ ID NO: 633335 - DNA, 33 bp, Homo sapien
tcaccacgagagtctcacactggtcaaagaact

SEQ ID NO: 633336 - DNA, 33 bp, Homo sapien
tcaccacgagagtctcgcactggtcaaagaact

SEQ ID NO: 633337 - DNA, 33 bp, Homo sapien
ctctccccctctctaacgtaagaacgaagtctt

SEQ ID NO: 633338 - DNA, 33 bp, Homo sapien
ctctccccctctctaatgtaagaacgaagtctt

SEQ ID NO: 633339 - DNA, 33 bp, Homo sapien
cagtttaaaatcatgacgagatgctgatggttg

SEQ ID NO: 633340 - DNA, 33 bp, Homo sapien
cagtttaaaatcatgatgagatgctgatggttg

SEQ ID NO: 633341 - DNA, 33 bp, Homo sapien
actttattgctaagaacaccaactgaaaacaat

SEQ ID NO: 633342 - DNA, 33 bp, Homo sapien
actttattgctaagaataccaactgaaaacaat

SEQ ID NO: 633343 - DNA, 33 bp, Homo sapien
aactaaacttcaatgaaaatcataatttggatg

SEQ ID NO: 633344 - DNA, 33 bp, Homo sapien
aactaaacttcaatgagaatcataatttggatg

SEQ ID NO: 633345 - DNA, 33 bp, Homo sapien
atttccatgcctaggcagagtagagaatgcctt

SEQ ID NO: 633346 - DNA, 33 bp, Homo sapien
atttccatgcctaggcggagtagagaatgcctt

SEQ ID NO: 633347 - DNA, 33 bp, Homo sapien
acaaggttgtattcaaagcaaaaacagcaaaat

SEQ ID NO: 633348 - DNA, 33 bp, Homo sapien
acaaggttgtattcaaggcaaaaacagcaaaat

SEQ ID NO: 633349 - DNA, 33 bp, Homo sapien
ccttactgacctgtcacgttttgagagaggtga

SEQ ID NO: 633350 - DNA, 33 bp, Homo sapien
ccttactgacctgtcatgttttgagagaggtga

SEQ ID NO: 633351 - DNA, 33 bp, Homo sapien
ccagcacaggtgctaacagcctaaagaagcgac

SEQ ID NO: 633352 - DNA, 33 bp, Homo sapien
ccagcacaggtgctaatagcctaaagaagcgac

SEQ ID NO: 633353 - DNA, 33 bp, Homo sapien
gtatcaactctataaagtcgggagcaaagtcct

SEQ ID NO: 633354 - DNA, 33 bp, Homo sapien
gtatcaactctataaattcgggagcaaagtcct

SEQ ID NO: 633355 - DNA, 33 bp, Homo sapien
ggggtccaggagagctaagagaatgggtttcaa

SEQ ID NO: 633356 - DNA, 33 bp, Homo sapien
ggggtccaggagagctcagagaatgggtttcaa

SEQ ID NO: 633357 - DNA, 33 bp, Homo sapien
gaggaagaaggagcacccatgagggaataggaa

SEQ ID NO: 633358 - DNA, 33 bp, Homo sapien
gaggaagaaggagcactcatgagggaataggaa

SEQ ID NO: 633359 - DNA, 33 bp, Homo sapien
tgagcctcacactgcccctttccagatcagcaa

SEQ ID NO: 633360 - DNA, 33 bp, Homo sapien
tgagcctcacactgcctctttccagatcagcaa

SEQ ID NO: 633361 - DNA, 33 bp, Homo sapien
ctactgtgacatccagaaagggtgtaggaattt

SEQ ID NO: 633362 - DNA, 33 bp, Homo sapien
ctactgtgacatccaggaagggtgtaggaattt

SEQ ID NO: 633363 - DNA, 33 bp, Homo sapien
ttacaaatgagcatcagcatactacggcaccta

SEQ ID NO: 633364 - DNA, 33 bp, Homo sapien
ttacaaatgagcatcatcatactacggcaccta

SEQ ID NO: 633365 - DNA, 33 bp, Homo sapien
catttggttttctgaacatggtgcaaccagagg

SEQ ID NO: 633366 - DNA, 33 bp, Homo sapien
catttggttttctgaatatggtgcaaccagagg

SEQ ID NO: 633367 - DNA, 33 bp, Homo sapien
gcctgtcgctcctggacgaaaggctaagtcgtc

SEQ ID NO: 633368 - DNA, 33 bp, Homo sapien
gcctgtcgctcctggatgaaaggctaagtcgtc

SEQ ID NO: 633369 - DNA, 33 bp, Homo sapien
caattagtgaggtttacgctgtcattttttttt

SEQ ID NO: 633370 - DNA, 33 bp, Homo sapien
caattagtgaggtttatgctgtcattttttttt

SEQ ID NO: 633371 - DNA, 33 bp, Homo sapien
tgatgtgctagttaaacgtgaggtccctggagc

SEQ ID NO: 633372 - DNA, 33 bp, Homo sapien
tgatgtgctagttaaatgtgaggtccctggagc

SEQ ID NO: 633373 - DNA, 33 bp, Homo sapien
ctgtctttacacaaaccgaacatgtgcagggcc

SEQ ID NO: 633374 - DNA, 33 bp, Homo sapien
ctgtctttacacaaactgaacatgtgcagggcc

SEQ ID NO: 633375 - DNA, 33 bp, Homo sapien
ccctagtcattaaaccaacttcagagacaaagg

SEQ ID NO: 633376 - DNA, 33 bp, Homo sapien
ccctagtcattaaaccgacttcagagacaaagg

SEQ ID NO: 633377 - DNA, 33 bp, Homo sapien
agctacaaagtctacaaggtcacatttttttta

SEQ ID NO: 633378 - DNA, 33 bp, Homo sapien
agctacaaagtctacagggtcacatttttttta

SEQ ID NO: 633379 - DNA, 33 bp, Homo sapien
tctgactggcttatccaagtccacatgaagata

SEQ ID NO: 633380 - DNA, 33 bp, Homo sapien
tctgactggcttatccgagtccacatgaagata

SEQ ID NO: 633381 - DNA, 33 bp, Homo sapien
taatattcaatgaaccaagagaccaaatagaag

SEQ ID NO: 633382 - DNA, 33 bp, Homo sapien
taatattcaatgaaccgagagaccaaatagaag

SEQ ID NO: 633383 - DNA, 33 bp, Homo sapien
tgcccattttgcagacaaagaagttaaaatgat

SEQ ID NO: 633384 - DNA, 33 bp, Homo sapien
tgcccattttgcagacgaagaagttaaaatgat

SEQ ID NO: 633385 - DNA, 33 bp, Homo sapien
attcattcctaaagcacgaactttccatatcac

SEQ ID NO: 633386 - DNA, 33 bp, Homo sapien
attcattcctaaagcatgaactttccatatcac

SEQ ID NO: 633387 - DNA, 33 bp, Homo sapien
cttgagctatgacaagaacaagtctggcaaaga

SEQ ID NO: 633388 - DNA, 33 bp, Homo sapien
cttgagctatgacaaggacaagtctggcaaaga

SEQ ID NO: 633389 - DNA, 33 bp, Homo sapien
agccaataggtatccaagctaaatttacagagg

SEQ ID NO: 633390 - DNA, 33 bp, Homo sapien
agccaataggtatccaggctaaatttacagagg

SEQ ID NO: 633391 - DNA, 33 bp, Homo sapien
caagaggctgttgcaaaagcttagggagaaatg

SEQ ID NO: 633392 - DNA, 33 bp, Homo sapien
caagaggctgttgcaatagcttagggagaaatg

SEQ ID NO: 633393 - DNA, 33 bp, Homo sapien
gcattttaaagccagcaaggtgcctctaagcca

SEQ ID NO: 633394 - DNA, 33 bp, Homo sapien
gcattttaaagccagcgaggtgcctctaagcca

SEQ ID NO: 633395 - DNA, 33 bp, Homo sapien
ggctttctgaagcagagataaaagtctaagact

SEQ ID NO: 633396 - DNA, 33 bp, Homo sapien
ggctttctgaagcagatataaaagtctaagact

SEQ ID NO: 633397 - DNA, 33 bp, Homo sapien
tttcctcatctgtaaagtagaatactactatct

SEQ ID NO: 633398 - DNA, 33 bp, Homo sapien
tttcctcatctgtaaattagaatactactatct

SEQ ID NO: 633399 - DNA, 33 bp, Homo sapien
ctcatctgcctgtaataatactcatgcaatagg

SEQ ID NO: 633400 - DNA, 33 bp, Homo sapien
ctcatctgcctgtaatgatactcatgcaatagg

SEQ ID NO: 633401 - DNA, 33 bp, Homo sapien
tcatttattgaaaggaatacaatacacaaaaag

SEQ ID NO: 633402 - DNA, 33 bp, Homo sapien
tcatttattgaaaggagtacaatacacaaaaag

SEQ ID NO: 633403 - DNA, 33 bp, Homo sapien
taaatggctccaatgtcaagtatatcatatcaa

SEQ ID NO: 633404 - DNA, 33 bp, Homo sapien
taaatggctccaatgttaagtatatcatatcaa

SEQ ID NO: 633405 - DNA, 33 bp, Homo sapien
aaactccccttcaacactgacaatgcataggaa

SEQ ID NO: 633406 - DNA, 33 bp, Homo sapien
aaactccccttcaacagtgacaatgcataggaa

SEQ ID NO: 633407 - DNA, 33 bp, Homo sapien
atttagaggaattccaatactcacatcaatggg

SEQ ID NO: 633408 - DNA, 33 bp, Homo sapien
atttagaggaattccagtactcacatcaatggg

SEQ ID NO: 633409 - DNA, 33 bp, Homo sapien
tggaagagggagctgcaaacatagccaggacgt

SEQ ID NO: 633410 - DNA, 33 bp, Homo sapien
tggaagagggagctgcgaacatagccaggacgt

SEQ ID NO: 633411 - DNA, 33 bp, Homo sapien
acctttatctttttcccagcgccttgacaccaa

SEQ ID NO: 633412 - DNA, 33 bp, Homo sapien
acctttatctttttcctagcgccttgacaccaa

SEQ ID NO: 633413 - DNA, 33 bp, Homo sapien
cccttaggcaagaaagaaaggtatgcaaacaga

SEQ ID NO: 633414 - DNA, 33 bp, Homo sapien
cccttaggcaagaaaggaaggtatgcaaacaga

SEQ ID NO: 633415 - DNA, 33 bp, Homo sapien
ctctccggattagcacagtattgtaacagcctt

SEQ ID NO: 633416 - DNA, 33 bp, Homo sapien
ctctccggattagcacggtattgtaacagcctt

SEQ ID NO: 633417 - DNA, 33 bp, Homo sapien
atcaagtctaaaataccattgcagaagcataac

SEQ ID NO: 633418 - DNA, 33 bp, Homo sapien
atcaagtctaaaatactattgcagaagcataac

SEQ ID NO: 633419 - DNA, 33 bp, Homo sapien
ggtgaacttgggtgaacgtcttgtttaacctgc

SEQ ID NO: 633420 - DNA, 33 bp, Homo sapien
ggtgaacttgggtgaatgtcttgtttaacctgc

SEQ ID NO: 633421 - DNA, 33 bp, Homo sapien
aatattggtaacctaacagaaagtctttcaaag

SEQ ID NO: 633422 - DNA, 33 bp, Homo sapien
aatattggtaacctaagagaaagtctttcaaag

SEQ ID NO: 633423 - DNA, 33 bp, Homo sapien
actaaaacttacatgaccagagtggcacagatt

SEQ ID NO: 633424 - DNA, 33 bp, Homo sapien
actaaaacttacatgatcagagtggcacagatt

SEQ ID NO: 633425 - DNA, 33 bp, Homo sapien
aataggaaccctaagaaagactagttgtctggg

SEQ ID NO: 633426 - DNA, 33 bp, Homo sapien
aataggaaccctaagagagactagttgtctggg

SEQ ID NO: 633427 - DNA, 33 bp, Homo sapien
gcctctcagtaagtgacggaagagcatttcagg

SEQ ID NO: 633428 - DNA, 33 bp, Homo sapien
gcctctcagtaagtgatggaagagcatttcagg

SEQ ID NO: 633429 - DNA, 33 bp, Homo sapien
tgtgggtgaagatctccagtcttaggacacttc

SEQ ID NO: 633430 - DNA, 33 bp, Homo sapien
tgtgggtgaagatctctagtcttaggacacttc

SEQ ID NO: 633431 - DNA, 33 bp, Homo sapien
caaacagttccgtagtaaattaaacatgagaca

SEQ ID NO: 633432 - DNA, 33 bp, Homo sapien
caaacagttccgtagtcaattaaacatgagaca

SEQ ID NO: 633433 - DNA, 33 bp, Homo sapien
ctaacctataaattaaacctgatcctgtaggcc

SEQ ID NO: 633434 - DNA, 33 bp, Homo sapien
ctaacctataaattaagcctgatcctgtaggcc

SEQ ID NO: 633435 - DNA, 33 bp, Homo sapien
cctgtggtacagatgcactgaatcaaagacctg

SEQ ID NO: 633436 - DNA, 33 bp, Homo sapien
cctgtggtacagatgcgctgaatcaaagacctg

SEQ ID NO: 633437 - DNA, 33 bp, Homo sapien
aaataagaaatgaatcagaggcccaggtagttc

SEQ ID NO: 633438 - DNA, 33 bp, Homo sapien
aaataagaaatgaatcggaggcccaggtagttc

SEQ ID NO: 633439 - DNA, 33 bp, Homo sapien
agcataattctctgggaagtcatccaagttctg

SEQ ID NO: 633440 - DNA, 33 bp, Homo sapien
agcataattctctggggagtcatccaagttctg

SEQ ID NO: 633441 - DNA, 33 bp, Homo sapien
catggaacacaccacacggctaacctttctgaa

SEQ ID NO: 633442 - DNA, 33 bp, Homo sapien
catggaacacaccacatggctaacctttctgaa

SEQ ID NO: 633443 - DNA, 33 bp, Homo sapien
atagccaaagctactaaaagagcccactggctt

SEQ ID NO: 633444 - DNA, 33 bp, Homo sapien
atagccaaagctactagaagagcccactggctt

SEQ ID NO: 633445 - DNA, 33 bp, Homo sapien
ggtgtctgggagtttacatcctccagggacagc

SEQ ID NO: 633446 - DNA, 33 bp, Homo sapien
ggtgtctgggagtttatatcctccagggacagc

SEQ ID NO: 633447 - DNA, 33 bp, Homo sapien
ggaatgggcaggccaaactcgtgtcccagcaat

SEQ ID NO: 633448 - DNA, 33 bp, Homo sapien
ggaatgggcaggccaagctcgtgtcccagcaat

SEQ ID NO: 633449 - DNA, 33 bp, Homo sapien
gcttgggatttacaatcatgagaggtgcaggag

SEQ ID NO: 633450 - DNA, 33 bp, Homo sapien
gcttgggatttacaattatgagaggtgcaggag

SEQ ID NO: 633451 - DNA, 33 bp, Homo sapien
gtgtttcttgccaacaaacgaatgaaagcaccc

SEQ ID NO: 633452 - DNA, 33 bp, Homo sapien
gtgtttcttgccaacagacgaatgaaagcaccc

SEQ ID NO: 633453 - DNA, 33 bp, Homo sapien
gggaccctcgtgtctaagtatcagaagaagcta

SEQ ID NO: 633454 - DNA, 33 bp, Homo sapien
gggaccctcgtgtctacgtatcagaagaagcta

SEQ ID NO: 633455 - DNA, 33 bp, Homo sapien
ctttgggagttatcaacctaataaagtttccaa

SEQ ID NO: 633456 - DNA, 33 bp, Homo sapien
ctttgggagttatcaatctaataaagtttccaa

SEQ ID NO: 633457 - DNA, 33 bp, Homo sapien
ctcaatgcctttttgccctacacaaagcaacga

SEQ ID NO: 633458 - DNA, 33 bp, Homo sapien
ctcaatgcctttttgctctacacaaagcaacga

SEQ ID NO: 633459 - DNA, 33 bp, Homo sapien
gctgctgtcacagaaagttgagtcatacagaca

SEQ ID NO: 633460 - DNA, 33 bp, Homo sapien
gctgctgtcacagaaatttgagtcatacagaca

SEQ ID NO: 633461 - DNA, 33 bp, Homo sapien
aactctaggtctgaaacgcaatcattctaaaat

SEQ ID NO: 633462 - DNA, 33 bp, Homo sapien
aactctaggtctgaaatgcaatcattctaaaat

SEQ ID NO: 633463 - DNA, 33 bp, Homo sapien
agggaaaagaagttaacaagacctaatatttca

SEQ ID NO: 633464 - DNA, 33 bp, Homo sapien
agggaaaagaagttaataagacctaatatttca

SEQ ID NO: 633465 - DNA, 33 bp, Homo sapien
ggcagatagattcttacggtagcagccccacaa

SEQ ID NO: 633466 - DNA, 33 bp, Homo sapien
ggcagatagattcttatggtagcagccccacaa

SEQ ID NO: 633467 - DNA, 33 bp, Homo sapien
taaaaacctatgtatgaaggtcctgcaaaccaa

SEQ ID NO: 633468 - DNA, 33 bp, Homo sapien
taaaaacctatgtatgtaggtcctgcaaaccaa

SEQ ID NO: 633469 - DNA, 33 bp, Homo sapien
attgaaggatgcaatactaatcctgggtgtgtc

SEQ ID NO: 633470 - DNA, 33 bp, Homo sapien
attgaaggatgcaatattaatcctgggtgtgtc

SEQ ID NO: 633471 - DNA, 33 bp, Homo sapien
ttgattactgctttacaatacttattccaccaa

SEQ ID NO: 633472 - DNA, 33 bp, Homo sapien
ttgattactgctttacgatacttattccaccaa

SEQ ID NO: 633473 - DNA, 33 bp, Homo sapien
ctggatctttaaaacaatgttctctaagagaga

SEQ ID NO: 633474 - DNA, 33 bp, Homo sapien
ctggatctttaaaacagtgttctctaagagaga

SEQ ID NO: 633475 - DNA, 33 bp, Homo sapien
tttcaagagcaaacaccggctatgggacccaag

SEQ ID NO: 633476 - DNA, 33 bp, Homo sapien
tttcaagagcaaacactggctatgggacccaag

SEQ ID NO: 633477 - DNA, 33 bp, Homo sapien
agggtgattggcataaagataaatttttgataa

SEQ ID NO: 633478 - DNA, 33 bp, Homo sapien
agggtgattggcataaggataaatttttgataa

SEQ ID NO: 633479 - DNA, 33 bp, Homo sapien
acacagctctgatcacagtaaggagatgtggcc

SEQ ID NO: 633480 - DNA, 33 bp, Homo sapien
acacagctctgatcacggtaaggagatgtggcc

SEQ ID NO: 633481 - DNA, 33 bp, Homo sapien
aaggaggcataaatacacaagaacctacatgga

SEQ ID NO: 633482 - DNA, 33 bp, Homo sapien
aaggaggcataaatacgcaagaacctacatgga

SEQ ID NO: 633483 - DNA, 33 bp, Homo sapien
tttagtctgaacagaactgaagcacacatctca

SEQ ID NO: 633484 - DNA, 33 bp, Homo sapien
tttagtctgaacagaattgaagcacacatctca

SEQ ID NO: 633485 - DNA, 33 bp, Homo sapien
cattttaatgaaagtcaccttctagctccaaag

SEQ ID NO: 633486 - DNA, 33 bp, Homo sapien
cattttaatgaaagtcgccttctagctccaaag

SEQ ID NO: 633487 - DNA, 33 bp, Homo sapien
ttgactaggagacaaaatgttcgtatcggaaac

SEQ ID NO: 633488 - DNA, 33 bp, Homo sapien
ttgactaggagacaaagtgttcgtatcggaaac

SEQ ID NO: 633489 - DNA, 33 bp, Homo sapien
taaagcagagtggaaacagtataatcagtaaaa

SEQ ID NO: 633490 - DNA, 33 bp, Homo sapien
taaagcagagtggaaatagtataatcagtaaaa

SEQ ID NO: 633491 - DNA, 33 bp, Homo sapien
aaaactcaatattcaaagttcaataaaattcgt

SEQ ID NO: 633492 - DNA, 33 bp, Homo sapien
aaaactcaatattcaacgttcaataaaattcgt

SEQ ID NO: 633493 - DNA, 33 bp, Homo sapien
tggagaacctcttttccatcatttgagagcaaa

SEQ ID NO: 633494 - DNA, 33 bp, Homo sapien
tggagaacctcttttctatcatttgagagcaaa

SEQ ID NO: 633495 - DNA, 33 bp, Homo sapien
agcctgaggaacaaaacgaagcttaaacaagaa

SEQ ID NO: 633496 - DNA, 33 bp, Homo sapien
agcctgaggaacaaaatgaagcttaaacaagaa

SEQ ID NO: 633497 - DNA, 33 bp, Homo sapien
gttccattgagtgaaacggtatgagaagcatca

SEQ ID NO: 633498 - DNA, 33 bp, Homo sapien
gttccattgagtgaaatggtatgagaagcatca

SEQ ID NO: 633499 - DNA, 33 bp, Homo sapien
tccaactacacttgcaacaatgagaccaataag

SEQ ID NO: 633500 - DNA, 33 bp, Homo sapien
tccaactacacttgcagcaatgagaccaataag

SEQ ID NO: 633501 - DNA, 33 bp, Homo sapien
gaagtaaatggtggagccaagcccaagctatgt

SEQ ID NO: 633502 - DNA, 33 bp, Homo sapien
gaagtaaatggtggagtcaagcccaagctatgt

SEQ ID NO: 633503 - DNA, 33 bp, Homo sapien
ttacttgtatactccacgcttaccttcttagaa

SEQ ID NO: 633504 - DNA, 33 bp, Homo sapien
ttacttgtatactccatgcttaccttcttagaa

SEQ ID NO: 633505 - DNA, 33 bp, Homo sapien
tgccaccagttggagacagactgcttgaaaaag

SEQ ID NO: 633506 - DNA, 33 bp, Homo sapien
tgccaccagttggagatagactgcttgaaaaag

SEQ ID NO: 633507 - DNA, 33 bp, Homo sapien
tggcttgattccgatgaactgattgatagtcaa

SEQ ID NO: 633508 - DNA, 33 bp, Homo sapien
tggcttgattccgatggactgattgatagtcaa

SEQ ID NO: 633509 - DNA, 33 bp, Homo sapien
tgtctgcattgtctaacagctgtgaaatcttaa

SEQ ID NO: 633510 - DNA, 33 bp, Homo sapien
tgtctgcattgtctaatagctgtgaaatcttaa

SEQ ID NO: 633511 - DNA, 33 bp, Homo sapien
ccctggattcttagaaaccctctgttccaaaca

SEQ ID NO: 633512 - DNA, 33 bp, Homo sapien
ccctggattcttagaagccctctgttccaaaca

SEQ ID NO: 633513 - DNA, 33 bp, Homo sapien
cataagctggttatcactaagcttgtatttttc

SEQ ID NO: 633514 - DNA, 33 bp, Homo sapien
cataagctggttatcattaagcttgtatttttc

SEQ ID NO: 633515 - DNA, 33 bp, Homo sapien
ataggctttggcttcccgagtatttataatgtt

SEQ ID NO: 633516 - DNA, 33 bp, Homo sapien
ataggctttggcttcctgagtatttataatgtt

SEQ ID NO: 633517 - DNA, 33 bp, Homo sapien
tgctggggcatcccaaacactgatgtggacaga

SEQ ID NO: 633518 - DNA, 33 bp, Homo sapien
tgctggggcatcccaagcactgatgtggacaga

SEQ ID NO: 633519 - DNA, 33 bp, Homo sapien
ccctgggagggaggaacggtcagctttggtagc

SEQ ID NO: 633520 - DNA, 33 bp, Homo sapien
ccctgggagggaggaatggtcagctttggtagc

SEQ ID NO: 633521 - DNA, 33 bp, Homo sapien
ggactgagttggtgtaactaaaatgagacttga

SEQ ID NO: 633522 - DNA, 33 bp, Homo sapien
ggactgagttggtgtagctaaaatgagacttga

SEQ ID NO: 633523 - DNA, 33 bp, Homo sapien
tgcaaggtagtttcccaaagaacaatcagaatc

SEQ ID NO: 633524 - DNA, 33 bp, Homo sapien
tgcaaggtagtttccccaagaacaatcagaatc

SEQ ID NO: 633525 - DNA, 33 bp, Homo sapien
ccaaataatcctgcaaattgatattgttattct

SEQ ID NO: 633526 - DNA, 33 bp, Homo sapien
ccaaataatcctgcaagttgatattgttattct

SEQ ID NO: 633527 - DNA, 33 bp, Homo sapien
atttggctttagcatgaacaacaacaatttctg

SEQ ID NO: 633528 - DNA, 33 bp, Homo sapien
atttggctttagcatggacaacaacaatttctg

SEQ ID NO: 633529 - DNA, 33 bp, Homo sapien
taaaatggcaatcaaggacataaaaaaggagca

SEQ ID NO: 633530 - DNA, 33 bp, Homo sapien
taaaatggcaatcaagtacataaaaaaggagca

SEQ ID NO: 633531 - DNA, 33 bp, Homo sapien
taagtcagtactgtgcaacttatgaggataaat

SEQ ID NO: 633532 - DNA, 33 bp, Homo sapien
taagtcagtactgtgcgacttatgaggataaat

SEQ ID NO: 633533 - DNA, 33 bp, Homo sapien
tcacaaagcaggtaccaattcatttatgcctca

SEQ ID NO: 633534 - DNA, 33 bp, Homo sapien
tcacaaagcaggtaccgattcatttatgcctca

SEQ ID NO: 633535 - DNA, 33 bp, Homo sapien
ggttgtctgtaaaagaagactcacaaagcaggt

SEQ ID NO: 633536 - DNA, 33 bp, Homo sapien
ggttgtctgtaaaagaggactcacaaagcaggt

SEQ ID NO: 633537 - DNA, 33 bp, Homo sapien
ttaagaaatgcaatacaaggagaaattagcacc

SEQ ID NO: 633538 - DNA, 33 bp, Homo sapien
ttaagaaatgcaatacgaggagaaattagcacc

SEQ ID NO: 633539 - DNA, 33 bp, Homo sapien
aggtatgaacacatcacgcaaggctatgggtga

SEQ ID NO: 633540 - DNA, 33 bp, Homo sapien
aggtatgaacacatcaggcaaggctatgggtga

SEQ ID NO: 633541 - DNA, 33 bp, Homo sapien
agcttttccccttgcccagctgtaaactccaat

SEQ ID NO: 633542 - DNA, 33 bp, Homo sapien
agcttttccccttgcctagctgtaaactccaat

SEQ ID NO: 633543 - DNA, 33 bp, Homo sapien
atggagctcgcctgtgcactgtggccttctcaa

SEQ ID NO: 633544 - DNA, 33 bp, Homo sapien
atggagctcgcctgtgtactgtggccttctcaa

SEQ ID NO: 633545 - DNA, 33 bp, Homo sapien
aagaaggcaaacaaagactcttctccaaatggg

SEQ ID NO: 633546 - DNA, 33 bp, Homo sapien
aagaaggcaaacaaaggctcttctccaaatggg

SEQ ID NO: 633547 - DNA, 33 bp, Homo sapien
cactcttcttaggaaaaggtgaaaaggtctaga

SEQ ID NO: 633548 - DNA, 33 bp, Homo sapien
cactcttcttaggaaagggtgaaaaggtctaga

SEQ ID NO: 633549 - DNA, 33 bp, Homo sapien
aactctgctttcttacgcattgactaaaggatg

SEQ ID NO: 633550 - DNA, 33 bp, Homo sapien
aactctgctttcttactcattgactaaaggatg

SEQ ID NO: 633551 - DNA, 33 bp, Homo sapien
tgatagaaacaaagtgcgaagttcagaagttca

SEQ ID NO: 633552 - DNA, 33 bp, Homo sapien
tgatagaaacaaagtgtgaagttcagaagttca

SEQ ID NO: 633553 - DNA, 33 bp, Homo sapien
ggttgtaggtcaagaaaaacagggcctaggctg

SEQ ID NO: 633554 - DNA, 33 bp, Homo sapien
ggttgtaggtcaagaagaacagggcctaggctg

SEQ ID NO: 633555 - DNA, 33 bp, Homo sapien
tgcatgctttcagcaaagaacataattttatca

SEQ ID NO: 633556 - DNA, 33 bp, Homo sapien
tgcatgctttcagcaaggaacataattttatca

SEQ ID NO: 633557 - DNA, 33 bp, Homo sapien
tttctaatagccacccaagtatttctagccaac

SEQ ID NO: 633558 - DNA, 33 bp, Homo sapien
tttctaatagccacccgagtatttctagccaac

SEQ ID NO: 633559 - DNA, 33 bp, Homo sapien
ggcttcatttctaagaatcaaaaattgtaagca

SEQ ID NO: 633560 - DNA, 33 bp, Homo sapien
ggcttcatttctaagagtcaaaaattgtaagca

SEQ ID NO: 633561 - DNA, 33 bp, Homo sapien
catgcaaccatgtggacagatttcaaaaatact

SEQ ID NO: 633562 - DNA, 33 bp, Homo sapien
catgcaaccatgtggatagatttcaaaaatact

SEQ ID NO: 633563 - DNA, 33 bp, Homo sapien
cgtgccattttttaacaatcactagtctcattg

SEQ ID NO: 633564 - DNA, 33 bp, Homo sapien
cgtgccattttttaaccatcactagtctcattg

SEQ ID NO: 633565 - DNA, 33 bp, Homo sapien
tcttgtatccctgttccacctactcgctctgcc

SEQ ID NO: 633566 - DNA, 33 bp, Homo sapien
tcttgtatccctgttctacctactcgctctgcc

SEQ ID NO: 633567 - DNA, 33 bp, Homo sapien
gctgctgcaaatggcaatctggagggactatga

SEQ ID NO: 633568 - DNA, 33 bp, Homo sapien
gctgctgcaaatggcagtctggagggactatga

SEQ ID NO: 633569 - DNA, 33 bp, Homo sapien
tgacaatttcctgtgaagaagggtcagtataca

SEQ ID NO: 633570 - DNA, 33 bp, Homo sapien
tgacaatttcctgtgacgaagggtcagtataca

SEQ ID NO: 633571 - DNA, 33 bp, Homo sapien
ttggtttacccagctcactaaaaagtcactttt

SEQ ID NO: 633572 - DNA, 33 bp, Homo sapien
ttggtttacccagctcgctaaaaagtcactttt

SEQ ID NO: 633573 - DNA, 33 bp, Homo sapien
agaaaggatgccaccactgattactgcttccca

SEQ ID NO: 633574 - DNA, 33 bp, Homo sapien
agaaaggatgccaccattgattactgcttccca

SEQ ID NO: 633575 - DNA, 33 bp, Homo sapien
gggacctcagagatcacgtagctacccacaagc

SEQ ID NO: 633576 - DNA, 33 bp, Homo sapien
gggacctcagagatcatgtagctacccacaagc

SEQ ID NO: 633577 - DNA, 33 bp, Homo sapien
ttgggaggaccaacaaaacagcaaatgcagaat

SEQ ID NO: 633578 - DNA, 33 bp, Homo sapien
ttgggaggaccaacaagacagcaaatgcagaat

SEQ ID NO: 633579 - DNA, 33 bp, Homo sapien
acaagaatagataaatcagtaaaatgcatggat

SEQ ID NO: 633580 - DNA, 33 bp, Homo sapien
acaagaatagataaatgagtaaaatgcatggat

SEQ ID NO: 633581 - DNA, 33 bp, Homo sapien
aagagcataagagagaagtgggacttggtgaaa

SEQ ID NO: 633582 - DNA, 33 bp, Homo sapien
aagagcataagagagacgtgggacttggtgaaa

SEQ ID NO: 633583 - DNA, 33 bp, Homo sapien
aaatggattcccataggaaagtgcaatctgcta

SEQ ID NO: 633584 - DNA, 33 bp, Homo sapien
aaatggattcccatagtaaagtgcaatctgcta

SEQ ID NO: 633585 - DNA, 33 bp, Homo sapien
cagcatgtaggcagtacgtacaactccacggtg

SEQ ID NO: 633586 - DNA, 33 bp, Homo sapien
cagcatgtaggcagtatgtacaactccacggtg

SEQ ID NO: 633587 - DNA, 33 bp, Homo sapien
cagggcacagccaggaaccttgacatcatgttt

SEQ ID NO: 633588 - DNA, 33 bp, Homo sapien
cagggcacagccaggacccttgacatcatgttt

SEQ ID NO: 633589 - DNA, 33 bp, Homo sapien
aggtccacaccaggtacgatggagatatctatg

SEQ ID NO: 633590 - DNA, 33 bp, Homo sapien
aggtccacaccaggtatgatggagatatctatg

SEQ ID NO: 633591 - DNA, 33 bp, Homo sapien
ataaaagactaaaatgaattggcttgatttttg

SEQ ID NO: 633592 - DNA, 33 bp, Homo sapien
ataaaagactaaaatgcattggcttgatttttg

SEQ ID NO: 633593 - DNA, 33 bp, Homo sapien
tgggagtttgtagaaacacctagatttgcaggg

SEQ ID NO: 633594 - DNA, 33 bp, Homo sapien
tgggagtttgtagaaatacctagatttgcaggg

SEQ ID NO: 633595 - DNA, 33 bp, Homo sapien
tttctatccagctgttatttttgtatgtgggaa

SEQ ID NO: 633596 - DNA, 33 bp, Homo sapien
tttctatccagctgttctttttgtatgtgggaa

SEQ ID NO: 633597 - DNA, 33 bp, Homo sapien
tataaagctcctaacacactcctacaacttgac

SEQ ID NO: 633598 - DNA, 33 bp, Homo sapien
tataaagctcctaacatactcctacaacttgac

SEQ ID NO: 633599 - DNA, 33 bp, Homo sapien
cccctcgatacataagactgacccccccagtgg

SEQ ID NO: 633600 - DNA, 33 bp, Homo sapien
cccctcgatacataagtctgacccccccagtgg

SEQ ID NO: 633601 - DNA, 33 bp, Homo sapien
tagctggtgctttctaagtccctagagcatcaa

SEQ ID NO: 633602 - DNA, 33 bp, Homo sapien
tagctggtgctttctacgtccctagagcatcaa

SEQ ID NO: 633603 - DNA, 33 bp, Homo sapien
attttgagtcatgtgacgaactgcccacagaag

SEQ ID NO: 633604 - DNA, 33 bp, Homo sapien
attttgagtcatgtgatgaactgcccacagaag

SEQ ID NO: 633605 - DNA, 33 bp, Homo sapien
actgcccacagaaggcagatttcaacaggagct

SEQ ID NO: 633606 - DNA, 33 bp, Homo sapien
actgcccacagaaggcggatttcaacaggagct

SEQ ID NO: 633607 - DNA, 33 bp, Homo sapien
ccctgcggacagatcagaactatttttaggttg

SEQ ID NO: 633608 - DNA, 33 bp, Homo sapien
ccctgcggacagatcataactatttttaggttg

SEQ ID NO: 633609 - DNA, 33 bp, Homo sapien
ctcaccagcatgattagctctttttaatctttt

SEQ ID NO: 633610 - DNA, 33 bp, Homo sapien
ctcaccagcatgattatctctttttaatctttt

SEQ ID NO: 633611 - DNA, 33 bp, Homo sapien
agtaaagcttggggataaaggaaaatcaaagac

SEQ ID NO: 633612 - DNA, 33 bp, Homo sapien
agtaaagcttggggatgaaggaaaatcaaagac

SEQ ID NO: 633613 - DNA, 33 bp, Homo sapien
ttactataggaagtcaagagtcagacttagatt

SEQ ID NO: 633614 - DNA, 33 bp, Homo sapien
ttactataggaagtcatgagtcagacttagatt

SEQ ID NO: 633615 - DNA, 33 bp, Homo sapien
gtcagactgggaactaccaagaaatttttcctg

SEQ ID NO: 633616 - DNA, 33 bp, Homo sapien
gtcagactgggaactatcaagaaatttttcctg

SEQ ID NO: 633617 - DNA, 33 bp, Homo sapien
atatggcaggatttgaagtcctattctccacct

SEQ ID NO: 633618 - DNA, 33 bp, Homo sapien
atatggcaggatttgacgtcctattctccacct

SEQ ID NO: 633619 - DNA, 33 bp, Homo sapien
agtgagattttgaggcggagaatagggaaatga

SEQ ID NO: 633620 - DNA, 33 bp, Homo sapien
agtgagattttgaggctgagaatagggaaatga

SEQ ID NO: 633621 - DNA, 33 bp, Homo sapien
gaggtagaacttctagccagtcatcctggtggt

SEQ ID NO: 633622 - DNA, 33 bp, Homo sapien
gaggtagaacttctagtcagtcatcctggtggt

SEQ ID NO: 633623 - DNA, 33 bp, Homo sapien
ggcattctgtacaccaagaaactaatccatttt

SEQ ID NO: 633624 - DNA, 33 bp, Homo sapien
ggcattctgtacaccatgaaactaatccatttt

SEQ ID NO: 633625 - DNA, 33 bp, Homo sapien
aggagagaactaaaacaatgttcaagatgaaga

SEQ ID NO: 633626 - DNA, 33 bp, Homo sapien
aggagagaactaaaacgatgttcaagatgaaga

SEQ ID NO: 633627 - DNA, 33 bp, Homo sapien
tacgtgtgtttttctgaataccctaagccgtaa

SEQ ID NO: 633628 - DNA, 33 bp, Homo sapien
tacgtgtgtttttctggataccctaagccgtaa

SEQ ID NO: 633629 - DNA, 33 bp, Homo sapien
agagtaaatactctgaataagagaccggtacta

SEQ ID NO: 633630 - DNA, 33 bp, Homo sapien
agagtaaatactctgattaagagaccggtacta

SEQ ID NO: 633631 - DNA, 33 bp, Homo sapien
gatattttcatagaacccattaagctactatgt

SEQ ID NO: 633632 - DNA, 33 bp, Homo sapien
gatattttcatagaactcattaagctactatgt

SEQ ID NO: 633633 - DNA, 33 bp, Homo sapien
gtgtgtcagcctggtaaccttcttaccaaaaag

SEQ ID NO: 633634 - DNA, 33 bp, Homo sapien
gtgtgtcagcctggtacccttcttaccaaaaag

SEQ ID NO: 633635 - DNA, 33 bp, Homo sapien
gtatcctgctggttcactctaattggtcattcc

SEQ ID NO: 633636 - DNA, 33 bp, Homo sapien
gtatcctgctggttcagtctaattggtcattcc

SEQ ID NO: 633637 - DNA, 33 bp, Homo sapien
agagggccagcaaacaatcctcatagaagatga

SEQ ID NO: 633638 - DNA, 33 bp, Homo sapien
agagggccagcaaacattcctcatagaagatga

SEQ ID NO: 633639 - DNA, 33 bp, Homo sapien
caggacctggtgcaaaataatagctcaataaat

SEQ ID NO: 633640 - DNA, 33 bp, Homo sapien
caggacctggtgcaaagtaatagctcaataaat

SEQ ID NO: 633641 - DNA, 33 bp, Homo sapien
tggtcaatggaagacacaacggtgaagaggcag

SEQ ID NO: 633642 - DNA, 33 bp, Homo sapien
tggtcaatggaagacataacggtgaagaggcag

SEQ ID NO: 633643 - DNA, 33 bp, Homo sapien
aataattatatgtggcaaaagttcttaggtgac

SEQ ID NO: 633644 - DNA, 33 bp, Homo sapien
aataattatatgtggcgaaagttcttaggtgac

SEQ ID NO: 633645 - DNA, 33 bp, Homo sapien
gggtaattcttgtagaaagccttagaaaccaaa

SEQ ID NO: 633646 - DNA, 33 bp, Homo sapien
gggtaattcttgtagagagccttagaaaccaaa

SEQ ID NO: 633647 - DNA, 33 bp, Homo sapien
gttcctttcaagagcaaggtcagttcggaccgg

SEQ ID NO: 633648 - DNA, 33 bp, Homo sapien
gttcctttcaagagcagggtcagttcggaccgg

SEQ ID NO: 633649 - DNA, 33 bp, Homo sapien
tgagaatctgaattgaagatcgtggggaggtgg

SEQ ID NO: 633650 - DNA, 33 bp, Homo sapien
tgagaatctgaattgaggatcgtggggaggtgg

SEQ ID NO: 633651 - DNA, 33 bp, Homo sapien
atccgttcagggaggccgattcacaggagtcca

SEQ ID NO: 633652 - DNA, 33 bp, Homo sapien
atccgttcagggaggctgattcacaggagtcca

SEQ ID NO: 633653 - DNA, 33 bp, Homo sapien
ttccgtccatgtattcacttctcacagcattac

SEQ ID NO: 633654 - DNA, 33 bp, Homo sapien
ttccgtccatgtattctcttctcacagcattac

SEQ ID NO: 633655 - DNA, 33 bp, Homo sapien
tcagaatgcctgcgttgaaattctggctccagt

SEQ ID NO: 633656 - DNA, 33 bp, Homo sapien
tcagaatgcctgcgtttaaattctggctccagt

SEQ ID NO: 633657 - DNA, 33 bp, Homo sapien
tttattcatctttgaaaccacagatgtttgcaa

SEQ ID NO: 633658 - DNA, 33 bp, Homo sapien
tttattcatctttgaagccacagatgtttgcaa

SEQ ID NO: 633659 - DNA, 33 bp, Homo sapien
gaaaaactttcagaaggctcaggagtcaggaag

SEQ ID NO: 633660 - DNA, 33 bp, Homo sapien
gaaaaactttcagaagtctcaggagtcaggaag

SEQ ID NO: 633661 - DNA, 33 bp, Homo sapien
gaaggcttttgctttcactgtgaacgaggaggg

SEQ ID NO: 633662 - DNA, 33 bp, Homo sapien
gaaggcttttgctttcgctgtgaacgaggaggg

SEQ ID NO: 633663 - DNA, 33 bp, Homo sapien
gtcataaaaattgtgacgaaccacatgaggagc

SEQ ID NO: 633664 - DNA, 33 bp, Homo sapien
gtcataaaaattgtgatgaaccacatgaggagc

SEQ ID NO: 633665 - DNA, 33 bp, Homo sapien
cactgatttggttggcccttgaaggagtcagtt

SEQ ID NO: 633666 - DNA, 33 bp, Homo sapien
cactgatttggttggctcttgaaggagtcagtt

SEQ ID NO: 633667 - DNA, 33 bp, Homo sapien
agtgcatcagttacacaagccatttggagcatt

SEQ ID NO: 633668 - DNA, 33 bp, Homo sapien
agtgcatcagttacacgagccatttggagcatt

SEQ ID NO: 633669 - DNA, 33 bp, Homo sapien
tcattggccatcgttaccctacaattgcccact

SEQ ID NO: 633670 - DNA, 33 bp, Homo sapien
tcattggccatcgttatcctacaattgcccact

SEQ ID NO: 633671 - DNA, 33 bp, Homo sapien
gaggtaaaactacacgaactgacctgaaaggag

SEQ ID NO: 633672 - DNA, 33 bp, Homo sapien
gaggtaaaactacacgcactgacctgaaaggag

SEQ ID NO: 633673 - DNA, 33 bp, Homo sapien
tgcccagccatatctccataactttaaggggta

SEQ ID NO: 633674 - DNA, 33 bp, Homo sapien
tgcccagccatatctctataactttaaggggta

SEQ ID NO: 633675 - DNA, 33 bp, Homo sapien
aagtgaaaatcaaccacaattctaccccttaaa

SEQ ID NO: 633676 - DNA, 33 bp, Homo sapien
aagtgaaaatcaaccataattctaccccttaaa

SEQ ID NO: 633677 - DNA, 33 bp, Homo sapien
cattttaacgggtacaatagttaagcaaatgac

SEQ ID NO: 633678 - DNA, 33 bp, Homo sapien
cattttaacgggtacagtagttaagcaaatgac

SEQ ID NO: 633679 - DNA, 33 bp, Homo sapien
aaggcagtgaactagtaacaaataggatgactt

SEQ ID NO: 633680 - DNA, 33 bp, Homo sapien
aaggcagtgaactagtgacaaataggatgactt

SEQ ID NO: 633681 - DNA, 33 bp, Homo sapien
aagaaattctcagttgaaatattcatgctcaat

SEQ ID NO: 633682 - DNA, 33 bp, Homo sapien
aagaaattctcagttggaatattcatgctcaat

SEQ ID NO: 633683 - DNA, 33 bp, Homo sapien
gctaccacaacctaacacaacctaacacctaag

SEQ ID NO: 633684 - DNA, 33 bp, Homo sapien
gctaccacaacctaacgcaacctaacacctaag

SEQ ID NO: 633685 - DNA, 33 bp, Homo sapien
actctcataatcaacaactgaagacttcccaaa

SEQ ID NO: 633686 - DNA, 33 bp, Homo sapien
actctcataatcaacagctgaagacttcccaaa

SEQ ID NO: 633687 - DNA, 33 bp, Homo sapien
atacaggtaattatgcaatgtaggtgtttagga

SEQ ID NO: 633688 - DNA, 33 bp, Homo sapien
atacaggtaattatgcgatgtaggtgtttagga

SEQ ID NO: 633689 - DNA, 33 bp, Homo sapien
cattatgcgtgtttctaaacttgaactctagtt

SEQ ID NO: 633690 - DNA, 33 bp, Homo sapien
cattatgcgtgtttctgaacttgaactctagtt

SEQ ID NO: 633691 - DNA, 33 bp, Homo sapien
tctgttaggctcttaacccagattcctcttact

SEQ ID NO: 633692 - DNA, 33 bp, Homo sapien
tctgttaggctcttaagccagattcctcttact

SEQ ID NO: 633693 - DNA, 33 bp, Homo sapien
atatctgaggccagcgaagacaatgtattcaca

SEQ ID NO: 633694 - DNA, 33 bp, Homo sapien
atatctgaggccagcgcagacaatgtattcaca

SEQ ID NO: 633695 - DNA, 33 bp, Homo sapien
tctgtggaaagcgtagcagccagagagaaaatc

SEQ ID NO: 633696 - DNA, 33 bp, Homo sapien
tctgtggaaagcgtaggagccagagagaaaatc

SEQ ID NO: 633697 - DNA, 33 bp, Homo sapien
tctccatcttacagaccaggaaagtgacgtaca

SEQ ID NO: 633698 - DNA, 33 bp, Homo sapien
tctccatcttacagacgaggaaagtgacgtaca

SEQ ID NO: 633699 - DNA, 33 bp, Homo sapien
gagatggtgagagtgacgggtagctttgcttcc

SEQ ID NO: 633700 - DNA, 33 bp, Homo sapien
gagatggtgagagtgatgggtagctttgcttcc

SEQ ID NO: 633701 - DNA, 33 bp, Homo sapien
ttcacctgcttcttcaactcaccacaggccgac

SEQ ID NO: 633702 - DNA, 33 bp, Homo sapien
ttcacctgcttcttcagctcaccacaggccgac

SEQ ID NO: 633703 - DNA, 33 bp, Homo sapien
actcttctaatagacaaactctggatctgatgg

SEQ ID NO: 633704 - DNA, 33 bp, Homo sapien
actcttctaatagacagactctggatctgatgg

SEQ ID NO: 633705 - DNA, 33 bp, Homo sapien
aatctgataagctgataagaacaggattggttg

SEQ ID NO: 633706 - DNA, 33 bp, Homo sapien
aatctgataagctgatgagaacaggattggttg

SEQ ID NO: 633707 - DNA, 33 bp, Homo sapien
tactttggatttaccaatattaactaagtggct

SEQ ID NO: 633708 - DNA, 33 bp, Homo sapien
tactttggatttaccagtattaactaagtggct

SEQ ID NO: 633709 - DNA, 33 bp, Homo sapien
actattctgtaaactacgcgcttgtttgtaaat

SEQ ID NO: 633710 - DNA, 33 bp, Homo sapien
actattctgtaaactatgcgcttgtttgtaaat

SEQ ID NO: 633711 - DNA, 33 bp, Homo sapien
ccatctcgcctttgatcaggaggtagaagtaat

SEQ ID NO: 633712 - DNA, 33 bp, Homo sapien
ccatctcgcctttgattaggaggtagaagtaat

SEQ ID NO: 633713 - DNA, 33 bp, Homo sapien
catacatggactctgccaggtaggcactagaaa

SEQ ID NO: 633714 - DNA, 33 bp, Homo sapien
catacatggactctgctaggtaggcactagaaa

SEQ ID NO: 633715 - DNA, 33 bp, Homo sapien
ctgtgaggttccttcaatctgcgggtcaaactc

SEQ ID NO: 633716 - DNA, 33 bp, Homo sapien
ctgtgaggttccttcagtctgcgggtcaaactc

SEQ ID NO: 633717 - DNA, 33 bp, Homo sapien
gtacctgctatgtgcaactcaacagaagctaaa

SEQ ID NO: 633718 - DNA, 33 bp, Homo sapien
gtacctgctatgtgcacctcaacagaagctaaa

SEQ ID NO: 633719 - DNA, 33 bp, Homo sapien
agggttctttgttgataagatgaaaaactaagc

SEQ ID NO: 633720 - DNA, 33 bp, Homo sapien
agggttctttgttgatgagatgaaaaactaagc

SEQ ID NO: 633721 - DNA, 33 bp, Homo sapien
cctaaggtggagaggacgaaaatggacagagcc

SEQ ID NO: 633722 - DNA, 33 bp, Homo sapien
cctaaggtggagaggatgaaaatggacagagcc

SEQ ID NO: 633723 - DNA, 33 bp, Homo sapien
tggctggtttcgctgacgtttactgagctgctt

SEQ ID NO: 633724 - DNA, 33 bp, Homo sapien
tggctggtttcgctgatgtttactgagctgctt

SEQ ID NO: 633725 - DNA, 33 bp, Homo sapien
aaataccactcttgaaggaccatagtgagacaa

SEQ ID NO: 633726 - DNA, 33 bp, Homo sapien
aaataccactcttgaatgaccatagtgagacaa

SEQ ID NO: 633727 - DNA, 33 bp, Homo sapien
cgagtcttgccttcaaatagcatggcaggtagt

SEQ ID NO: 633728 - DNA, 33 bp, Homo sapien
cgagtcttgccttcaagtagcatggcaggtagt

SEQ ID NO: 633729 - DNA, 33 bp, Homo sapien
ttgataacattgcatacgatgttttattcagaa

SEQ ID NO: 633730 - DNA, 33 bp, Homo sapien
ttgataacattgcatatgatgttttattcagaa

SEQ ID NO: 633731 - DNA, 33 bp, Homo sapien
tagaaaagagccagtacgtatttgcacctcctc

SEQ ID NO: 633732 - DNA, 33 bp, Homo sapien
tagaaaagagccagtatgtatttgcacctcctc

SEQ ID NO: 633733 - DNA, 33 bp, Homo sapien
tttatatccacagacacattctggaaattacca

SEQ ID NO: 633734 - DNA, 33 bp, Homo sapien
tttatatccacagacagattctggaaattacca

SEQ ID NO: 633735 - DNA, 33 bp, Homo sapien
agggacagcaggaatacagaagagtaaaaggga

SEQ ID NO: 633736 - DNA, 33 bp, Homo sapien
agggacagcaggaatagagaagagtaaaaggga

SEQ ID NO: 633737 - DNA, 33 bp, Homo sapien
gggagcaataggtaacaaaatagaaccatctgg

SEQ ID NO: 633738 - DNA, 33 bp, Homo sapien
gggagcaataggtaacgaaatagaaccatctgg

SEQ ID NO: 633739 - DNA, 33 bp, Homo sapien
ttaactttggtgaaaaaagctctgtcacatcct

SEQ ID NO: 633740 - DNA, 33 bp, Homo sapien
ttaactttggtgaaaagagctctgtcacatcct

SEQ ID NO: 633741 - DNA, 33 bp, Homo sapien
gaaagggggctagggaagcattgcaagcaaagg

SEQ ID NO: 633742 - DNA, 33 bp, Homo sapien
gaaagggggctagggaggcattgcaagcaaagg

SEQ ID NO: 633743 - DNA, 33 bp, Homo sapien
cttttttcctgctaaaatcaggggagggaaatt

SEQ ID NO: 633744 - DNA, 33 bp, Homo sapien
cttttttcctgctaaagtcaggggagggaaatt

SEQ ID NO: 633745 - DNA, 33 bp, Homo sapien
acagcccatgaggaagcattatttataaagaaa

SEQ ID NO: 633746 - DNA, 33 bp, Homo sapien
acagcccatgaggaaggattatttataaagaaa

SEQ ID NO: 633747 - DNA, 33 bp, Homo sapien
tgacttaatgagatgacgccaacacagtgttgt

SEQ ID NO: 633748 - DNA, 33 bp, Homo sapien
tgacttaatgagatgatgccaacacagtgttgt

SEQ ID NO: 633749 - DNA, 33 bp, Homo sapien
agtaataagaagcttcaaccaaggcaaatattc

SEQ ID NO: 633750 - DNA, 33 bp, Homo sapien
agtaataagaagcttctaccaaggcaaatattc

SEQ ID NO: 633751 - DNA, 33 bp, Homo sapien
tggagcgtgaacattccagtagaactctaggag

SEQ ID NO: 633752 - DNA, 33 bp, Homo sapien
tggagcgtgaacattctagtagaactctaggag

SEQ ID NO: 633753 - DNA, 33 bp, Homo sapien
ggtaaacaaaagtatacgcatagagtggaataa

SEQ ID NO: 633754 - DNA, 33 bp, Homo sapien
ggtaaacaaaagtatatgcatagagtggaataa

SEQ ID NO: 633755 - DNA, 33 bp, Homo sapien
cagtttgctaaacttaagagagattggtgatgc

SEQ ID NO: 633756 - DNA, 33 bp, Homo sapien
cagtttgctaaacttaggagagattggtgatgc

SEQ ID NO: 633757 - DNA, 33 bp, Homo sapien
atacttcaaatttccaagtctcaaaagctgtac

SEQ ID NO: 633758 - DNA, 33 bp, Homo sapien
atacttcaaatttccatgtctcaaaagctgtac

SEQ ID NO: 633759 - DNA, 33 bp, Homo sapien
atttattctcaaactcagagaatgcaaaggata

SEQ ID NO: 633760 - DNA, 33 bp, Homo sapien
atttattctcaaactcggagaatgcaaaggata

SEQ ID NO: 633761 - DNA, 33 bp, Homo sapien
gcagctataatatcaacaaattcaataatccca

SEQ ID NO: 633762 - DNA, 33 bp, Homo sapien
gcagctataatatcaagaaattcaataatccca

SEQ ID NO: 633763 - DNA, 33 bp, Homo sapien
gctgtttgtgtcccaccggtagaatctagccac

SEQ ID NO: 633764 - DNA, 33 bp, Homo sapien
gctgtttgtgtcccactggtagaatctagccac

SEQ ID NO: 633765 - DNA, 33 bp, Homo sapien
aataaatcatgatggcaagaaaagaaacatcat

SEQ ID NO: 633766 - DNA, 33 bp, Homo sapien
aataaatcatgatggcgagaaaagaaacatcat

SEQ ID NO: 633767 - DNA, 33 bp, Homo sapien
ataaggactgagaatacggtaacatgagttttt

SEQ ID NO: 633768 - DNA, 33 bp, Homo sapien
ataaggactgagaatatggtaacatgagttttt

SEQ ID NO: 633769 - DNA, 33 bp, Homo sapien
cagtccatagtagtgacgaggggagccctccct

SEQ ID NO: 633770 - DNA, 33 bp, Homo sapien
cagtccatagtagtgatgaggggagccctccct

SEQ ID NO: 633771 - DNA, 33 bp, Homo sapien
cttgtaagcaatgattaaagatattcactaaga

SEQ ID NO: 633772 - DNA, 33 bp, Homo sapien
cttgtaagcaatgattgaagatattcactaaga

SEQ ID NO: 633773 - DNA, 33 bp, Homo sapien
ctaacttgtgcagaaaattccttgctctctgga

SEQ ID NO: 633774 - DNA, 33 bp, Homo sapien
ctaacttgtgcagaaagttccttgctctctgga

SEQ ID NO: 633775 - DNA, 33 bp, Homo sapien
aaatcacctgtttgccccgttatcctgtgtttt

SEQ ID NO: 633776 - DNA, 33 bp, Homo sapien
aaatcacctgtttgccgcgttatcctgtgtttt

SEQ ID NO: 633777 - DNA, 33 bp, Homo sapien
tcctacctggttttagcagcttgagcccacagg

SEQ ID NO: 633778 - DNA, 33 bp, Homo sapien
tcctacctggttttaggagcttgagcccacagg

SEQ ID NO: 633779 - DNA, 33 bp, Homo sapien
gtttgtatagtgactacctttgaaagacagagg

SEQ ID NO: 633780 - DNA, 33 bp, Homo sapien
gtttgtatagtgactagctttgaaagacagagg

SEQ ID NO: 633781 - DNA, 33 bp, Homo sapien
tatacatttgtatgtcaaaaactatgaagggtc

SEQ ID NO: 633782 - DNA, 33 bp, Homo sapien
tatacatttgtatgtcgaaaactatgaagggtc

SEQ ID NO: 633783 - DNA, 33 bp, Homo sapien
ataatcaccatttcaacgtgacaggatgaataa

SEQ ID NO: 633784 - DNA, 33 bp, Homo sapien
ataatcaccatttcaaggtgacaggatgaataa

SEQ ID NO: 633785 - DNA, 33 bp, Homo sapien
tgttagttacctgaaagttctggactcatgaat

SEQ ID NO: 633786 - DNA, 33 bp, Homo sapien
tgttagttacctgaaatttctggactcatgaat

SEQ ID NO: 633787 - DNA, 33 bp, Homo sapien
ccatcctcttcatcccaaatgcctagtataatc

SEQ ID NO: 633788 - DNA, 33 bp, Homo sapien
ccatcctcttcatcccgaatgcctagtataatc

SEQ ID NO: 633789 - DNA, 33 bp, Homo sapien
caacaaaatgaacaaacgaaagagaggcagagt

SEQ ID NO: 633790 - DNA, 33 bp, Homo sapien
caacaaaatgaacaaaggaaagagaggcagagt

SEQ ID NO: 633791 - DNA, 33 bp, Homo sapien
tgtcccttgttcagcactcttggcaaaactgtt

SEQ ID NO: 633792 - DNA, 33 bp, Homo sapien
tgtcccttgttcagcagtcttggcaaaactgtt

SEQ ID NO: 633793 - DNA, 33 bp, Homo sapien
tatgtatttcctattgaaggctctatggcctgt

SEQ ID NO: 633794 - DNA, 33 bp, Homo sapien
tatgtatttcctattgtaggctctatggcctgt

SEQ ID NO: 633795 - DNA, 33 bp, Homo sapien
ctcctgcttcttttctcaacacagtagccaggg

SEQ ID NO: 633796 - DNA, 33 bp, Homo sapien
ctcctgcttcttttcttaacacagtagccaggg

SEQ ID NO: 633797 - DNA, 33 bp, Homo sapien
ctactcatcctccaaccatcacacaggcttcct

SEQ ID NO: 633798 - DNA, 33 bp, Homo sapien
ctactcatcctccaactatcacacaggcttcct

SEQ ID NO: 633799 - DNA, 33 bp, Homo sapien
tctagtcaagagaatcaaccccaagtagaggca

SEQ ID NO: 633800 - DNA, 33 bp, Homo sapien
tctagtcaagagaatcgaccccaagtagaggca

SEQ ID NO: 633801 - DNA, 33 bp, Homo sapien
ctgtggtcaaggaatgaaaccagctgtccagtg

SEQ ID NO: 633802 - DNA, 33 bp, Homo sapien
ctgtggtcaaggaatgcaaccagctgtccagtg

SEQ ID NO: 633803 - DNA, 33 bp, Homo sapien
ggctgaattctcaaggaaagattcacaggacaa

SEQ ID NO: 633804 - DNA, 33 bp, Homo sapien
ggctgaattctcaagggaagattcacaggacaa

SEQ ID NO: 633805 - DNA, 33 bp, Homo sapien
ctctaatttttcattcaagtcctatattcaaaa

SEQ ID NO: 633806 - DNA, 33 bp, Homo sapien
ctctaatttttcattcgagtcctatattcaaaa

SEQ ID NO: 633807 - DNA, 33 bp, Homo sapien
ataaactaatccatcaagcaaatacttgttgtg

SEQ ID NO: 633808 - DNA, 33 bp, Homo sapien
ataaactaatccatcacgcaaatacttgttgtg

SEQ ID NO: 633809 - DNA, 33 bp, Homo sapien
ttatcattccttcaaaattatttctcctattaa

SEQ ID NO: 633810 - DNA, 33 bp, Homo sapien
ttatcattccttcaaagttatttctcctattaa

SEQ ID NO: 633811 - DNA, 33 bp, Homo sapien
agggatctttcactcaaagcggtgacccatatt

SEQ ID NO: 633812 - DNA, 33 bp, Homo sapien
agggatctttcactcatagcggtgacccatatt

SEQ ID NO: 633813 - DNA, 33 bp, Homo sapien
gtcccacactgtgcaaagccctttatggagact

SEQ ID NO: 633814 - DNA, 33 bp, Homo sapien
gtcccacactgtgcaaggccctttatggagact

SEQ ID NO: 633815 - DNA, 33 bp, Homo sapien
ctatgccaagttcacaatctcttgaacaactgc

SEQ ID NO: 633816 - DNA, 33 bp, Homo sapien
ctatgccaagttcacagtctcttgaacaactgc

SEQ ID NO: 633817 - DNA, 33 bp, Homo sapien
tctgagataagagtcccggaccaccatatgaat

SEQ ID NO: 633818 - DNA, 33 bp, Homo sapien
tctgagataagagtcctggaccaccatatgaat

SEQ ID NO: 633819 - DNA, 33 bp, Homo sapien
ccagacttgactgttacgtgagaaaacatatta

SEQ ID NO: 633820 - DNA, 33 bp, Homo sapien
ccagacttgactgttatgtgagaaaacatatta

SEQ ID NO: 633821 - DNA, 33 bp, Homo sapien
atttatgtcttctgcactctactgagtatatgg

SEQ ID NO: 633822 - DNA, 33 bp, Homo sapien
atttatgtcttctgcagtctactgagtatatgg

SEQ ID NO: 633823 - DNA, 33 bp, Homo sapien
gttctggtgccattgaagccgaagtgaatggtg

SEQ ID NO: 633824 - DNA, 33 bp, Homo sapien
gttctggtgccattgaggccgaagtgaatggtg

SEQ ID NO: 633825 - DNA, 33 bp, Homo sapien
aataccttcatgagggaaaggtaatgccaaaaa

SEQ ID NO: 633826 - DNA, 33 bp, Homo sapien
aataccttcatgaggggaaggtaatgccaaaaa

SEQ ID NO: 633827 - DNA, 33 bp, Homo sapien
tacatgcatacacataaatgtctgttaggaata

SEQ ID NO: 633828 - DNA, 33 bp, Homo sapien
tacatgcatacacatacatgtctgttaggaata

SEQ ID NO: 633829 - DNA, 33 bp, Homo sapien
tttaggcaggtgtacacgggtcaagagttggct

SEQ ID NO: 633830 - DNA, 33 bp, Homo sapien
tttaggcaggtgtacatgggtcaagagttggct

SEQ ID NO: 633831 - DNA, 33 bp, Homo sapien
tactttcctaccccataaatcagtggtcccttc

SEQ ID NO: 633832 - DNA, 33 bp, Homo sapien
tactttcctaccccatgaatcagtggtcccttc

SEQ ID NO: 633833 - DNA, 33 bp, Homo sapien
taatggaggtggccaaatagcctggacaaatgg

SEQ ID NO: 633834 - DNA, 33 bp, Homo sapien
taatggaggtggccaagtagcctggacaaatgg

SEQ ID NO: 633835 - DNA, 33 bp, Homo sapien
catccttgggactagacggcatttacaacatga

SEQ ID NO: 633836 - DNA, 33 bp, Homo sapien
catccttgggactagatggcatttacaacatga

SEQ ID NO: 633837 - DNA, 33 bp, Homo sapien
taccaccagcaggtaccggtttccttattatta

SEQ ID NO: 633838 - DNA, 33 bp, Homo sapien
taccaccagcaggtactggtttccttattatta

SEQ ID NO: 633839 - DNA, 33 bp, Homo sapien
tttttccatgtcgcagcaatcgccgagaggagg

SEQ ID NO: 633840 - DNA, 33 bp, Homo sapien
tttttccatgtcgcagtaatcgccgagaggagg

SEQ ID NO: 633841 - DNA, 33 bp, Homo sapien
gggagcgatgctcagacggagaagccttccagg

SEQ ID NO: 633842 - DNA, 33 bp, Homo sapien
gggagcgatgctcagagggagaagccttccagg

SEQ ID NO: 633843 - DNA, 33 bp, Homo sapien
tggcaaccatcaagtagcattgtagggctgaaa

SEQ ID NO: 633844 - DNA, 33 bp, Homo sapien
tggcaaccatcaagtatcattgtagggctgaaa

SEQ ID NO: 633845 - DNA, 33 bp, Homo sapien
aaccctatgctgtttaacattatttcagcactt

SEQ ID NO: 633846 - DNA, 33 bp, Homo sapien
aaccctatgctgtttatcattatttcagcactt

SEQ ID NO: 633847 - DNA, 33 bp, Homo sapien
catttctttctgaaaccaaggtgtattataaat

SEQ ID NO: 633848 - DNA, 33 bp, Homo sapien
catttctttctgaaacgaaggtgtattataaat

SEQ ID NO: 633849 - DNA, 33 bp, Homo sapien
tggagtaaaggctacaactttggagtaggtcac

SEQ ID NO: 633850 - DNA, 33 bp, Homo sapien
tggagtaaaggctacatctttggagtaggtcac

SEQ ID NO: 633851 - DNA, 33 bp, Homo sapien
gtacctcattaagaaaactgatatgaagcaaat

SEQ ID NO: 633852 - DNA, 33 bp, Homo sapien
gtacctcattaagaaagctgatatgaagcaaat

SEQ ID NO: 633853 - DNA, 33 bp, Homo sapien
tttctttgcagaaggacgtgtatatcttaagca

SEQ ID NO: 633854 - DNA, 33 bp, Homo sapien
tttctttgcagaaggatgtgtatatcttaagca

SEQ ID NO: 633855 - DNA, 33 bp, Homo sapien
caccctcaactatatccacacactaaggccacc

SEQ ID NO: 633856 - DNA, 33 bp, Homo sapien
caccctcaactatatctacacactaaggccacc

SEQ ID NO: 633857 - DNA, 33 bp, Homo sapien
gagctagacaggcccaagttaggtttgtctaag

SEQ ID NO: 633858 - DNA, 33 bp, Homo sapien
gagctagacaggcccaggttaggtttgtctaag

SEQ ID NO: 633859 - DNA, 33 bp, Homo sapien
cccctcaccaaattcaaagaccaatacttcctg

SEQ ID NO: 633860 - DNA, 33 bp, Homo sapien
cccctcaccaaattcagagaccaatacttcctg

SEQ ID NO: 633861 - DNA, 33 bp, Homo sapien
agaggaaaagaaggaaatagggattgaaagtga

SEQ ID NO: 633862 - DNA, 33 bp, Homo sapien
agaggaaaagaaggaagtagggattgaaagtga

SEQ ID NO: 633863 - DNA, 33 bp, Homo sapien
agcatgagagtctacacagagtttgaagaggaa

SEQ ID NO: 633864 - DNA, 33 bp, Homo sapien
agcatgagagtctacatagagtttgaagaggaa

SEQ ID NO: 633865 - DNA, 33 bp, Homo sapien
tgatattggaatgatacgaaccttgatgtaact

SEQ ID NO: 633866 - DNA, 33 bp, Homo sapien
tgatattggaatgatatgaaccttgatgtaact

SEQ ID NO: 633867 - DNA, 33 bp, Homo sapien
ccattttggagccatgcagaaatgtttgcaatt

SEQ ID NO: 633868 - DNA, 33 bp, Homo sapien
ccattttggagccatggagaaatgtttgcaatt

SEQ ID NO: 633869 - DNA, 33 bp, Homo sapien
ctttccactgtgctggaagataactggtttaag

SEQ ID NO: 633870 - DNA, 33 bp, Homo sapien
ctttccactgtgctgggagataactggtttaag

SEQ ID NO: 633871 - DNA, 33 bp, Homo sapien
caccttgcatctcggagctctgggtttcctcac

SEQ ID NO: 633872 - DNA, 33 bp, Homo sapien
caccttgcatctcggatctctgggtttcctcac

SEQ ID NO: 633873 - DNA, 33 bp, Homo sapien
tttaattgcacaaatccccctgtaacaaggcat

SEQ ID NO: 633874 - DNA, 33 bp, Homo sapien
tttaattgcacaaatctccctgtaacaaggcat

SEQ ID NO: 633875 - DNA, 33 bp, Homo sapien
aatgaacaattaagaacgtgacatgagctctgg

SEQ ID NO: 633876 - DNA, 33 bp, Homo sapien
aatgaacaattaagaatgtgacatgagctctgg

SEQ ID NO: 633877 - DNA, 33 bp, Homo sapien
ctgctggcttcttccacataaccagtatcattc

SEQ ID NO: 633878 - DNA, 33 bp, Homo sapien
ctgctggcttcttccatataaccagtatcattc

SEQ ID NO: 633879 - DNA, 33 bp, Homo sapien
gtgtattcagaaccacagtggatttgcgtacat

SEQ ID NO: 633880 - DNA, 33 bp, Homo sapien
gtgtattcagaaccacggtggatttgcgtacat

SEQ ID NO: 633881 - DNA, 33 bp, Homo sapien
tgccaacaatctgtaactgctggcaacttggac

SEQ ID NO: 633882 - DNA, 33 bp, Homo sapien
tgccaacaatctgtaagtgctggcaacttggac

SEQ ID NO: 633883 - DNA, 33 bp, Homo sapien
tttaagtgacttttgaacaataagtttttgctt

SEQ ID NO: 633884 - DNA, 33 bp, Homo sapien
tttaagtgacttttgaccaataagtttttgctt

SEQ ID NO: 633885 - DNA, 33 bp, Homo sapien
tgtctcagtctgggacaccctccagttggatct

SEQ ID NO: 633886 - DNA, 33 bp, Homo sapien
tgtctcagtctgggacgccctccagttggatct

SEQ ID NO: 633887 - DNA, 33 bp, Homo sapien
aggaagggactttaaaagatgaattattcaaag

SEQ ID NO: 633888 - DNA, 33 bp, Homo sapien
aggaagggactttaaaggatgaattattcaaag

SEQ ID NO: 633889 - DNA, 33 bp, Homo sapien
gtttaatgaggagagaaacataaagatacaaca

SEQ ID NO: 633890 - DNA, 33 bp, Homo sapien
gtttaatgaggagagagacataaagatacaaca

SEQ ID NO: 633891 - DNA, 33 bp, Homo sapien
gggacatggaaagaagaaaaggaaaagtgtaat

SEQ ID NO: 633892 - DNA, 33 bp, Homo sapien
gggacatggaaagaaggaaaggaaaagtgtaat

SEQ ID NO: 633893 - DNA, 33 bp, Homo sapien
aatttgttgcttcacaaaggagcttagttttac

SEQ ID NO: 633894 - DNA, 33 bp, Homo sapien
aatttgttgcttcacagaggagcttagttttac

SEQ ID NO: 633895 - DNA, 33 bp, Homo sapien
tcataatcatgttgccaaaaggagccataatat

SEQ ID NO: 633896 - DNA, 33 bp, Homo sapien
tcataatcatgttgccgaaaggagccataatat

SEQ ID NO: 633897 - DNA, 33 bp, Homo sapien
tcagcatacagtgttcaatataagcaagttcaa

SEQ ID NO: 633898 - DNA, 33 bp, Homo sapien
tcagcatacagtgttccatataagcaagttcaa

SEQ ID NO: 633899 - DNA, 33 bp, Homo sapien
ctgcaggattgggctccctctggccagtctggc

SEQ ID NO: 633900 - DNA, 33 bp, Homo sapien
ctgcaggattgggctctctctggccagtctggc

SEQ ID NO: 633901 - DNA, 33 bp, Homo sapien
ataaatagcaaccaaagcagtggagagaatgtg

SEQ ID NO: 633902 - DNA, 33 bp, Homo sapien
ataaatagcaaccaaatcagtggagagaatgtg

SEQ ID NO: 633903 - DNA, 33 bp, Homo sapien
gcacctccagagatacaatagaattacactggc

SEQ ID NO: 633904 - DNA, 33 bp, Homo sapien
gcacctccagagatacgatagaattacactggc

SEQ ID NO: 633905 - DNA, 33 bp, Homo sapien
agtattaatgtttaacaaggacacaacaataag

SEQ ID NO: 633906 - DNA, 33 bp, Homo sapien
agtattaatgtttaacgaggacacaacaataag

SEQ ID NO: 633907 - DNA, 33 bp, Homo sapien
gctctccattttttcaacattacaaatttaaaa

SEQ ID NO: 633908 - DNA, 33 bp, Homo sapien
gctctccattttttcagcattacaaatttaaaa

SEQ ID NO: 633909 - DNA, 33 bp, Homo sapien
tcatctgaaaaaatgaagggctctcaaagaccc

SEQ ID NO: 633910 - DNA, 33 bp, Homo sapien
tcatctgaaaaaatgatgggctctcaaagaccc

SEQ ID NO: 633911 - DNA, 33 bp, Homo sapien
aagagctaaagcactcagaaactattccccatc

SEQ ID NO: 633912 - DNA, 33 bp, Homo sapien
aagagctaaagcactcggaaactattccccatc

SEQ ID NO: 633913 - DNA, 33 bp, Homo sapien
ctaacaaagtaagggaaaaatgtgagacatgac

SEQ ID NO: 633914 - DNA, 33 bp, Homo sapien
ctaacaaagtaagggagaaatgtgagacatgac

SEQ ID NO: 633915 - DNA, 33 bp, Homo sapien
agttgctattacagtacgaatcagttactattt

SEQ ID NO: 633916 - DNA, 33 bp, Homo sapien
agttgctattacagtaggaatcagttactattt

SEQ ID NO: 633917 - DNA, 33 bp, Homo sapien
gtaggagagcctgctgcaggatacaagattaat

SEQ ID NO: 633918 - DNA, 33 bp, Homo sapien
gtaggagagcctgctgtaggatacaagattaat

SEQ ID NO: 633919 - DNA, 33 bp, Homo sapien
tttcagggaggggctaccatttttgtttcaaaa

SEQ ID NO: 633920 - DNA, 33 bp, Homo sapien
tttcagggaggggctatcatttttgtttcaaaa

SEQ ID NO: 633921 - DNA, 33 bp, Homo sapien
caaatcctggtttgccactgtaatggggccttc

SEQ ID NO: 633922 - DNA, 33 bp, Homo sapien
caaatcctggtttgccgctgtaatggggccttc

SEQ ID NO: 633923 - DNA, 33 bp, Homo sapien
actccttccttttgaacagcttactgagcactc

SEQ ID NO: 633924 - DNA, 33 bp, Homo sapien
actccttccttttgaagagcttactgagcactc

SEQ ID NO: 633925 - DNA, 33 bp, Homo sapien
ctatttcagaaagatcaatgaaccgagaaagag

SEQ ID NO: 633926 - DNA, 33 bp, Homo sapien
ctatttcagaaagatcgatgaaccgagaaagag

SEQ ID NO: 633927 - DNA, 33 bp, Homo sapien
ttgtacttgctgaaaacccaggagtgttctaat

SEQ ID NO: 633928 - DNA, 33 bp, Homo sapien
ttgtacttgctgaaaatccaggagtgttctaat

SEQ ID NO: 633929 - DNA, 33 bp, Homo sapien
actggaatgagtagataaaaaatgtgctagact

SEQ ID NO: 633930 - DNA, 33 bp, Homo sapien
actggaatgagtagatgaaaaatgtgctagact

SEQ ID NO: 633931 - DNA, 33 bp, Homo sapien
tggaaacttccatgtaaccactcatttaattct

SEQ ID NO: 633932 - DNA, 33 bp, Homo sapien
tggaaacttccatgtagccactcatttaattct

SEQ ID NO: 633933 - DNA, 33 bp, Homo sapien
cttgtttccagctatcgcacatatctattactt

SEQ ID NO: 633934 - DNA, 33 bp, Homo sapien
cttgtttccagctatctcacatatctattactt

SEQ ID NO: 633935 - DNA, 33 bp, Homo sapien
cttacgaaaagacttcaacagcaacacacaata

SEQ ID NO: 633936 - DNA, 33 bp, Homo sapien
cttacgaaaagacttcgacagcaacacacaata

SEQ ID NO: 633937 - DNA, 33 bp, Homo sapien
atagcattatcgaacaaaagtgatggtaactgg

SEQ ID NO: 633938 - DNA, 33 bp, Homo sapien
atagcattatcgaacagaagtgatggtaactgg

SEQ ID NO: 633939 - DNA, 33 bp, Homo sapien
ttctcttgcaggcccacggtgaccagcaaactc

SEQ ID NO: 633940 - DNA, 33 bp, Homo sapien
ttctcttgcaggcccatggtgaccagcaaactc

SEQ ID NO: 633941 - DNA, 33 bp, Homo sapien
accacctgaggagtaactctttttcctgagatt

SEQ ID NO: 633942 - DNA, 33 bp, Homo sapien
accacctgaggagtaattctttttcctgagatt

SEQ ID NO: 633943 - DNA, 33 bp, Homo sapien
atcatatgtaaagccccatgcttcccatctagt

SEQ ID NO: 633944 - DNA, 33 bp, Homo sapien
atcatatgtaaagccctatgcttcccatctagt

SEQ ID NO: 633945 - DNA, 33 bp, Homo sapien
gaagcaactgcagataccaatataaaccaagtg

SEQ ID NO: 633946 - DNA, 33 bp, Homo sapien
gaagcaactgcagatagcaatataaaccaagtg

SEQ ID NO: 633947 - DNA, 33 bp, Homo sapien
agccaaatgttggaaaattctatgggggatgcc

SEQ ID NO: 633948 - DNA, 33 bp, Homo sapien
agccaaatgttggaaagttctatgggggatgcc

SEQ ID NO: 633949 - DNA, 33 bp, Homo sapien
gaccataaacatagaaatgtccttaacctggct

SEQ ID NO: 633950 - DNA, 33 bp, Homo sapien
gaccataaacatagaagtgtccttaacctggct

SEQ ID NO: 633951 - DNA, 33 bp, Homo sapien
tcctagattatgcggcaaggcccgatccaatga

SEQ ID NO: 633952 - DNA, 33 bp, Homo sapien
tcctagattatgcggcgaggcccgatccaatga

SEQ ID NO: 633953 - DNA, 33 bp, Homo sapien
gctttctcaatgaatgaaccagtgatgcatcag

SEQ ID NO: 633954 - DNA, 33 bp, Homo sapien
gctttctcaatgaatggaccagtgatgcatcag

SEQ ID NO: 633955 - DNA, 33 bp, Homo sapien
gtaaacgtttaacaaccggctgtcataatggat

SEQ ID NO: 633956 - DNA, 33 bp, Homo sapien
gtaaacgtttaacaactggctgtcataatggat

SEQ ID NO: 633957 - DNA, 33 bp, Homo sapien
attgagtgttgggaatgaattctttgccagaca

SEQ ID NO: 633958 - DNA, 33 bp, Homo sapien
attgagtgttgggaattaattctttgccagaca

SEQ ID NO: 633959 - DNA, 33 bp, Homo sapien
acaatatataactatcagacacataaatgttgc

SEQ ID NO: 633960 - DNA, 33 bp, Homo sapien
acaatatataactatcggacacataaatgttgc

SEQ ID NO: 633961 - DNA, 33 bp, Homo sapien
ctctgccttttcctaacgtaactgcttgcctca

SEQ ID NO: 633962 - DNA, 33 bp, Homo sapien
ctctgccttttcctaatgtaactgcttgcctca

SEQ ID NO: 633963 - DNA, 33 bp, Homo sapien
catctccttcactgaagaaatcagcaaggaata

SEQ ID NO: 633964 - DNA, 33 bp, Homo sapien
catctccttcactgaataaatcagcaaggaata

SEQ ID NO: 633965 - DNA, 33 bp, Homo sapien
aagttttctagactcccgaagtgtgcagttctc

SEQ ID NO: 633966 - DNA, 33 bp, Homo sapien
aagttttctagactcctgaagtgtgcagttctc

SEQ ID NO: 633967 - DNA, 33 bp, Homo sapien
agaagttaactcagtgacaaaagacattttggt

SEQ ID NO: 633968 - DNA, 33 bp, Homo sapien
agaagttaactcagtggcaaaagacattttggt

SEQ ID NO: 633969 - DNA, 33 bp, Homo sapien
gactttaggctgagaactgaaggacaagaaggc

SEQ ID NO: 633970 - DNA, 33 bp, Homo sapien
gactttaggctgagaattgaaggacaagaaggc

SEQ ID NO: 633971 - DNA, 33 bp, Homo sapien
ttggaaggacagagcacattaaagttatagatt

SEQ ID NO: 633972 - DNA, 33 bp, Homo sapien
ttggaaggacagagcagattaaagttatagatt

SEQ ID NO: 633973 - DNA, 33 bp, Homo sapien
tatagacatcctttaacgtaaacactaaggtcc

SEQ ID NO: 633974 - DNA, 33 bp, Homo sapien
tatagacatcctttaatgtaaacactaaggtcc

SEQ ID NO: 633975 - DNA, 33 bp, Homo sapien
ggttttaatatgcaagaatacccacagttacaa

SEQ ID NO: 633976 - DNA, 33 bp, Homo sapien
ggttttaatatgcaagtatacccacagttacaa

SEQ ID NO: 633977 - DNA, 33 bp, Homo sapien
ttgaatttcaactaaaataggtctaagcctcag

SEQ ID NO: 633978 - DNA, 33 bp, Homo sapien
ttgaatttcaactaaattaggtctaagcctcag

SEQ ID NO: 633979 - DNA, 33 bp, Homo sapien
aaacttcagtgtataagtgatcctcctgcctca

SEQ ID NO: 633980 - DNA, 33 bp, Homo sapien
aaacttcagtgtataattgatcctcctgcctca

SEQ ID NO: 633981 - DNA, 33 bp, Homo sapien
gagtaggtcttggatgcaaatacagtgggaatc

SEQ ID NO: 633982 - DNA, 33 bp, Homo sapien
gagtaggtcttggatgtaaatacagtgggaatc

SEQ ID NO: 633983 - DNA, 33 bp, Homo sapien
atcacttgagaaaccacatccactcgaagaaaa

SEQ ID NO: 633984 - DNA, 33 bp, Homo sapien
atcacttgagaaaccatatccactcgaagaaaa

SEQ ID NO: 633985 - DNA, 33 bp, Homo sapien
ttcagcagggaaagaaaacctaagatgggatga

SEQ ID NO: 633986 - DNA, 33 bp, Homo sapien
ttcagcagggaaagaacacctaagatgggatga

SEQ ID NO: 633987 - DNA, 33 bp, Homo sapien
tgtaatgtgctaaaaaagatcttgtctaaaact

SEQ ID NO: 633988 - DNA, 33 bp, Homo sapien
tgtaatgtgctaaaaaggatcttgtctaaaact

SEQ ID NO: 633989 - DNA, 33 bp, Homo sapien
gccttatagctggtcaagttccatggcaggtgt

SEQ ID NO: 633990 - DNA, 33 bp, Homo sapien
gccttatagctggtcatgttccatggcaggtgt

SEQ ID NO: 633991 - DNA, 33 bp, Homo sapien
ccagaagtggagttacagaatcaaaaggttaga

SEQ ID NO: 633992 - DNA, 33 bp, Homo sapien
ccagaagtggagttacggaatcaaaaggttaga

SEQ ID NO: 633993 - DNA, 33 bp, Homo sapien
ccccaacaactatactcagcccaagagttaaca

SEQ ID NO: 633994 - DNA, 33 bp, Homo sapien
ccccaacaactatacttagcccaagagttaaca

SEQ ID NO: 633995 - DNA, 33 bp, Homo sapien
ctcatcatttagttccaacttacaagtgagaac

SEQ ID NO: 633996 - DNA, 33 bp, Homo sapien
ctcatcatttagttccgacttacaagtgagaac

SEQ ID NO: 633997 - DNA, 33 bp, Homo sapien
gtttaacatcctttcacgttgaaaattctcaag

SEQ ID NO: 633998 - DNA, 33 bp, Homo sapien
gtttaacatcctttcatgttgaaaattctcaag

SEQ ID NO: 633999 - DNA, 33 bp, Homo sapien
tataactgaattcaagcaagtaggagtctcttg

SEQ ID NO: 634000 - DNA, 33 bp, Homo sapien
tataactgaattcaagtaagtaggagtctcttg

SEQ ID NO: 634001 - DNA, 33 bp, Homo sapien
attattttgcacaccaaagtagaagctcccaaa

SEQ ID NO: 634002 - DNA, 33 bp, Homo sapien
attattttgcacaccagagtagaagctcccaaa

SEQ ID NO: 634003 - DNA, 33 bp, Homo sapien
gttctctcgcccttgacggccctgttttctggg

SEQ ID NO: 634004 - DNA, 33 bp, Homo sapien
gttctctcgcccttgatggccctgttttctggg

SEQ ID NO: 634005 - DNA, 33 bp, Homo sapien
aaaagaaagcggcacaaataaacctaaaagaaa

SEQ ID NO: 634006 - DNA, 33 bp, Homo sapien
aaaagaaagcggcacagataaacctaaaagaaa

SEQ ID NO: 634007 - DNA, 33 bp, Homo sapien
atccactgtcaactgaccatcttctctggtcat

SEQ ID NO: 634008 - DNA, 33 bp, Homo sapien
atccactgtcaactgatcatcttctctggtcat

SEQ ID NO: 634009 - DNA, 33 bp, Homo sapien
ccaaacaagtgactcaaaagaagcaccaccatc

SEQ ID NO: 634010 - DNA, 33 bp, Homo sapien
ccaaacaagtgactcacaagaagcaccaccatc

SEQ ID NO: 634011 - DNA, 33 bp, Homo sapien
tgtaaagtggggataacagtgtagacctcacaa

SEQ ID NO: 634012 - DNA, 33 bp, Homo sapien
tgtaaagtggggataatagtgtagacctcacaa

SEQ ID NO: 634013 - DNA, 33 bp, Homo sapien
agccctcaagaaaagcaagtcctcaacttcaaa

SEQ ID NO: 634014 - DNA, 33 bp, Homo sapien
agccctcaagaaaagcgagtcctcaacttcaaa

SEQ ID NO: 634015 - DNA, 33 bp, Homo sapien
atgaatcttggcaaaacgtcacatattatcaac

SEQ ID NO: 634016 - DNA, 33 bp, Homo sapien
atgaatcttggcaaaatgtcacatattatcaac

SEQ ID NO: 634017 - DNA, 33 bp, Homo sapien
atttttccccagatcacgtaactggttagttgc

SEQ ID NO: 634018 - DNA, 33 bp, Homo sapien
atttttccccagatcatgtaactggttagttgc

SEQ ID NO: 634019 - DNA, 33 bp, Homo sapien
ggaccttagaagatataagcaaaactgcctaac

SEQ ID NO: 634020 - DNA, 33 bp, Homo sapien
ggaccttagaagatatgagcaaaactgcctaac

SEQ ID NO: 634021 - DNA, 33 bp, Homo sapien
cttgcaagccaaagcccgaggaaagtccaagtt

SEQ ID NO: 634022 - DNA, 33 bp, Homo sapien
cttgcaagccaaagcctgaggaaagtccaagtt

SEQ ID NO: 634023 - DNA, 33 bp, Homo sapien
ccatgcagaagaccgaaatttggttaatcctca

SEQ ID NO: 634024 - DNA, 33 bp, Homo sapien
ccatgcagaagaccgacatttggttaatcctca

SEQ ID NO: 634025 - DNA, 33 bp, Homo sapien
catcccagtgtaaccacgtgttgcatattggaa

SEQ ID NO: 634026 - DNA, 33 bp, Homo sapien
catcccagtgtaaccatgtgttgcatattggaa

SEQ ID NO: 634027 - DNA, 33 bp, Homo sapien
ctcattcaacatatacaaagtgccaggatacag

SEQ ID NO: 634028 - DNA, 33 bp, Homo sapien
ctcattcaacatataccaagtgccaggatacag

SEQ ID NO: 634029 - DNA, 33 bp, Homo sapien
ggcaccattctcaggcacttgtcttatctctgt

SEQ ID NO: 634030 - DNA, 33 bp, Homo sapien
ggcaccattctcaggcccttgtcttatctctgt

SEQ ID NO: 634031 - DNA, 33 bp, Homo sapien
agaaactcttccctaacacttccctctcatcct

SEQ ID NO: 634032 - DNA, 33 bp, Homo sapien
agaaactcttccctaatacttccctctcatcct

SEQ ID NO: 634033 - DNA, 33 bp, Homo sapien
ccgggctcatctgcacagacaaaacgaggataa

SEQ ID NO: 634034 - DNA, 33 bp, Homo sapien
ccgggctcatctgcacggacaaaacgaggataa

SEQ ID NO: 634035 - DNA, 33 bp, Homo sapien
gttattttatgtcatccagtagttctgcttaat

SEQ ID NO: 634036 - DNA, 33 bp, Homo sapien
gttattttatgtcatctagtagttctgcttaat

SEQ ID NO: 634037 - DNA, 33 bp, Homo sapien
aaatacatttctgtcaactgagttagcccctta

SEQ ID NO: 634038 - DNA, 33 bp, Homo sapien
aaatacatttctgtcacctgagttagcccctta

SEQ ID NO: 634039 - DNA, 33 bp, Homo sapien
ggatctttaaatgcaaatggcatcttggggcct

SEQ ID NO: 634040 - DNA, 33 bp, Homo sapien
ggatctttaaatgcaagtggcatcttggggcct

SEQ ID NO: 634041 - DNA, 33 bp, Homo sapien
tatgacccagcaattccaaatctagtatattaa

SEQ ID NO: 634042 - DNA, 33 bp, Homo sapien
tatgacccagcaattctaaatctagtatattaa

SEQ ID NO: 634043 - DNA, 33 bp, Homo sapien
caattttgtttaagccactgttatcttgagtac

SEQ ID NO: 634044 - DNA, 33 bp, Homo sapien
caattttgtttaagccgctgttatcttgagtac

SEQ ID NO: 634045 - DNA, 33 bp, Homo sapien
tcagctttattaaccacgatcttgcaaaaaaag

SEQ ID NO: 634046 - DNA, 33 bp, Homo sapien
tcagctttattaaccatgatcttgcaaaaaaag

SEQ ID NO: 634047 - DNA, 33 bp, Homo sapien
atgtggggagatggatgaatattgggactagtt

SEQ ID NO: 634048 - DNA, 33 bp, Homo sapien
atgtggggagatggattaatattgggactagtt

SEQ ID NO: 634049 - DNA, 33 bp, Homo sapien
ttttctgttctcacaccgctaatacatacatac

SEQ ID NO: 634050 - DNA, 33 bp, Homo sapien
ttttctgttctcacactgctaatacatacatac

SEQ ID NO: 634051 - DNA, 33 bp, Homo sapien
tgccttgttcgggtccacagcttggagtgaggg

SEQ ID NO: 634052 - DNA, 33 bp, Homo sapien
tgccttgttcgggtccgcagcttggagtgaggg

SEQ ID NO: 634053 - DNA, 33 bp, Homo sapien
ggattttttgattaggcaaggaagcttgctact

SEQ ID NO: 634054 - DNA, 33 bp, Homo sapien
ggattttttgattaggtaaggaagcttgctact

SEQ ID NO: 634055 - DNA, 33 bp, Homo sapien
ccaaaccaaataaccaccaatctgttgttgttg

SEQ ID NO: 634056 - DNA, 33 bp, Homo sapien
ccaaaccaaataaccatcaatctgttgttgttg

SEQ ID NO: 634057 - DNA, 33 bp, Homo sapien
cacttatttgtaattgcaactcaaatctcatac

SEQ ID NO: 634058 - DNA, 33 bp, Homo sapien
cacttatttgtaattgtaactcaaatctcatac

SEQ ID NO: 634059 - DNA, 33 bp, Homo sapien
caaggcacaatcaagcactggcttcacagagaa

SEQ ID NO: 634060 - DNA, 33 bp, Homo sapien
caaggcacaatcaagcgctggcttcacagagaa

SEQ ID NO: 634061 - DNA, 33 bp, Homo sapien
ctctgaggatgctgtcaatagcgaacaacagtg

SEQ ID NO: 634062 - DNA, 33 bp, Homo sapien
ctctgaggatgctgtcgatagcgaacaacagtg

SEQ ID NO: 634063 - DNA, 33 bp, Homo sapien
tatgtggttccttccacgtctgggccttccaaa

SEQ ID NO: 634064 - DNA, 33 bp, Homo sapien
tatgtggttccttccatgtctgggccttccaaa

SEQ ID NO: 634065 - DNA, 33 bp, Homo sapien
atgtgaagtaagcagacgccttaagcaacacat

SEQ ID NO: 634066 - DNA, 33 bp, Homo sapien
atgtgaagtaagcagatgccttaagcaacacat

SEQ ID NO: 634067 - DNA, 33 bp, Homo sapien
atccagaagacagaaacatgactccagccaaat

SEQ ID NO: 634068 - DNA, 33 bp, Homo sapien
atccagaagacagaaatatgactccagccaaat

SEQ ID NO: 634069 - DNA, 33 bp, Homo sapien
ttctgtcttctggatacgcaatcttgaacaaag

SEQ ID NO: 634070 - DNA, 33 bp, Homo sapien
ttctgtcttctggatatgcaatcttgaacaaag

SEQ ID NO: 634071 - DNA, 33 bp, Homo sapien
atgatgtgaatcagtaaggggaaagtccagctt

SEQ ID NO: 634072 - DNA, 33 bp, Homo sapien
atgatgtgaatcagtagggggaaagtccagctt

SEQ ID NO: 634073 - DNA, 33 bp, Homo sapien
aattgctttcccatcactctccaaaaagctcta

SEQ ID NO: 634074 - DNA, 33 bp, Homo sapien
aattgctttcccatcattctccaaaaagctcta

SEQ ID NO: 634075 - DNA, 33 bp, Homo sapien
agaggaagagagaaatcagagataaatcagtga

SEQ ID NO: 634076 - DNA, 33 bp, Homo sapien
agaggaagagagaaatgagagataaatcagtga

SEQ ID NO: 634077 - DNA, 33 bp, Homo sapien
ctgctaggaggtgacaaagttgtacaaacaatc

SEQ ID NO: 634078 - DNA, 33 bp, Homo sapien
ctgctaggaggtgacatagttgtacaaacaatc

SEQ ID NO: 634079 - DNA, 33 bp, Homo sapien
tcctgaaactgagagacgtagtttatcttctat

SEQ ID NO: 634080 - DNA, 33 bp, Homo sapien
tcctgaaactgagagatgtagtttatcttctat

SEQ ID NO: 634081 - DNA, 33 bp, Homo sapien
cattatcttttttaaaacttgtggagcccctgt

SEQ ID NO: 634082 - DNA, 33 bp, Homo sapien
cattatcttttttaaaccttgtggagcccctgt

SEQ ID NO: 634083 - DNA, 33 bp, Homo sapien
aacccacaggacctaggagaaagtagatgctca

SEQ ID NO: 634084 - DNA, 33 bp, Homo sapien
aacccacaggacctagtagaaagtagatgctca

SEQ ID NO: 634085 - DNA, 33 bp, Homo sapien
tatattcagacaccacacagttttccttctaaa

SEQ ID NO: 634086 - DNA, 33 bp, Homo sapien
tatattcagacaccacgcagttttccttctaaa

SEQ ID NO: 634087 - DNA, 33 bp, Homo sapien
taagtgatgggtccatcaatcagcctgctgcag

SEQ ID NO: 634088 - DNA, 33 bp, Homo sapien
taagtgatgggtccattaatcagcctgctgcag

SEQ ID NO: 634089 - DNA, 33 bp, Homo sapien
aatgttcaaaaagacaagttcagcggacactgc

SEQ ID NO: 634090 - DNA, 33 bp, Homo sapien
aatgttcaaaaagacaggttcagcggacactgc

SEQ ID NO: 634091 - DNA, 33 bp, Homo sapien
gcttagtgtatagaaaacattcagaaaacattt

SEQ ID NO: 634092 - DNA, 33 bp, Homo sapien
gcttagtgtatagaaagcattcagaaaacattt

SEQ ID NO: 634093 - DNA, 33 bp, Homo sapien
ttcagctgaacttgaaagactcccgtaataata

SEQ ID NO: 634094 - DNA, 33 bp, Homo sapien
ttcagctgaacttgaaggactcccgtaataata

SEQ ID NO: 634095 - DNA, 33 bp, Homo sapien
aagtgaattcccagacaaggatcagctgagcag

SEQ ID NO: 634096 - DNA, 33 bp, Homo sapien
aagtgaattcccagacgaggatcagctgagcag

SEQ ID NO: 634097 - DNA, 33 bp, Homo sapien
gtttatcttaagacaccaagttttggaattatt

SEQ ID NO: 634098 - DNA, 33 bp, Homo sapien
gtttatcttaagacactaagttttggaattatt

SEQ ID NO: 634099 - DNA, 33 bp, Homo sapien
atgtaagagatatgtaaactgagattttaaaaa

SEQ ID NO: 634100 - DNA, 33 bp, Homo sapien
atgtaagagatatgtatactgagattttaaaaa

SEQ ID NO: 634101 - DNA, 33 bp, Homo sapien
tgtgaactagggataaaaaaagtatgcgtctta

SEQ ID NO: 634102 - DNA, 33 bp, Homo sapien
tgtgaactagggataagaaaagtatgcgtctta

SEQ ID NO: 634103 - DNA, 33 bp, Homo sapien
atagtagcctgaactacaacagggattttgtat

SEQ ID NO: 634104 - DNA, 33 bp, Homo sapien
atagtagcctgaactataacagggattttgtat

SEQ ID NO: 634105 - DNA, 33 bp, Homo sapien
tccatatgcttagtagccccacagtttcccacc

SEQ ID NO: 634106 - DNA, 33 bp, Homo sapien
tccatatgcttagtagtcccacagtttcccacc

SEQ ID NO: 634107 - DNA, 33 bp, Homo sapien
tagaggcctagagttacctgagggtttatagaa

SEQ ID NO: 634108 - DNA, 33 bp, Homo sapien
tagaggcctagagttatctgagggtttatagaa

SEQ ID NO: 634109 - DNA, 33 bp, Homo sapien
agttatttgcagagcacataaagaaccaaaaag

SEQ ID NO: 634110 - DNA, 33 bp, Homo sapien
agttatttgcagagcatataaagaaccaaaaag

SEQ ID NO: 634111 - DNA, 33 bp, Homo sapien
ggtatgttgttctgtaccccattttgtgagagg

SEQ ID NO: 634112 - DNA, 33 bp, Homo sapien
ggtatgttgttctgtatcccattttgtgagagg

SEQ ID NO: 634113 - DNA, 33 bp, Homo sapien
cttctaagaatctgaaccatgaactgtaaaaca

SEQ ID NO: 634114 - DNA, 33 bp, Homo sapien
cttctaagaatctgaatcatgaactgtaaaaca

SEQ ID NO: 634115 - DNA, 33 bp, Homo sapien
gattctggtcaatctaaataaaacacaaaaaca

SEQ ID NO: 634116 - DNA, 33 bp, Homo sapien
gattctggtcaatctatataaaacacaaaaaca

SEQ ID NO: 634117 - DNA, 33 bp, Homo sapien
tttctttgccttccaccactgtaaatttcctga

SEQ ID NO: 634118 - DNA, 33 bp, Homo sapien
tttctttgccttccacgactgtaaatttcctga

SEQ ID NO: 634119 - DNA, 33 bp, Homo sapien
agtagattcaacctcaacattggcaaagacaag

SEQ ID NO: 634120 - DNA, 33 bp, Homo sapien
agtagattcaacctcagcattggcaaagacaag

SEQ ID NO: 634121 - DNA, 33 bp, Homo sapien
ctgccataacaaaacgaattaagcaacacaatt

SEQ ID NO: 634122 - DNA, 33 bp, Homo sapien
ctgccataacaaaacggattaagcaacacaatt

SEQ ID NO: 634123 - DNA, 33 bp, Homo sapien
tttcagaattgtaactaaaggactgtgctacat

SEQ ID NO: 634124 - DNA, 33 bp, Homo sapien
tttcagaattgtaactgaaggactgtgctacat

SEQ ID NO: 634125 - DNA, 33 bp, Homo sapien
ctttctcaaaattcaaacagctttgttaagtcc

SEQ ID NO: 634126 - DNA, 33 bp, Homo sapien
ctttctcaaaattcaatcagctttgttaagtcc

SEQ ID NO: 634127 - DNA, 33 bp, Homo sapien
taaagatggatttctacggcctacaaaagccac

SEQ ID NO: 634128 - DNA, 33 bp, Homo sapien
taaagatggatttctagggcctacaaaagccac

SEQ ID NO: 634129 - DNA, 33 bp, Homo sapien
cttgtggttccatttcccttcattctgtcaatg

SEQ ID NO: 634130 - DNA, 33 bp, Homo sapien
cttgtggttccatttctcttcattctgtcaatg

SEQ ID NO: 634131 - DNA, 33 bp, Homo sapien
attcatccattgtaacaaatgtactactctagt

SEQ ID NO: 634132 - DNA, 33 bp, Homo sapien
attcatccattgtaacgaatgtactactctagt

SEQ ID NO: 634133 - DNA, 33 bp, Homo sapien
cagttttcttgcattaacaccttagtatgcttt

SEQ ID NO: 634134 - DNA, 33 bp, Homo sapien
cagttttcttgcattaccaccttagtatgcttt

SEQ ID NO: 634135 - DNA, 33 bp, Homo sapien
agtggcttccatattcaataatactgattttat

SEQ ID NO: 634136 - DNA, 33 bp, Homo sapien
agtggcttccatattcgataatactgattttat

SEQ ID NO: 634137 - DNA, 33 bp, Homo sapien
gttcttacatgtcttacacgttacttaaattaa

SEQ ID NO: 634138 - DNA, 33 bp, Homo sapien
gttcttacatgtcttatacgttacttaaattaa

SEQ ID NO: 634139 - DNA, 33 bp, Homo sapien
acaatctgagtgtccactgatgaacaaatagat

SEQ ID NO: 634140 - DNA, 33 bp, Homo sapien
acaatctgagtgtccattgatgaacaaatagat

SEQ ID NO: 634141 - DNA, 33 bp, Homo sapien
tagtttgagtttcttaggcattctggatagtag

SEQ ID NO: 634142 - DNA, 33 bp, Homo sapien
tagtttgagtttcttatgcattctggatagtag

SEQ ID NO: 634143 - DNA, 33 bp, Homo sapien
acagggaccaaaaacagacgaatagggctacat

SEQ ID NO: 634144 - DNA, 33 bp, Homo sapien
acagggaccaaaaacatacgaatagggctacat

SEQ ID NO: 634145 - DNA, 33 bp, Homo sapien
acactggcaactgtacaaataaatagaaattaa

SEQ ID NO: 634146 - DNA, 33 bp, Homo sapien
acactggcaactgtaccaataaatagaaattaa

SEQ ID NO: 634147 - DNA, 33 bp, Homo sapien
gtcgggagcttctcccacaaagactttcagctt

SEQ ID NO: 634148 - DNA, 33 bp, Homo sapien
gtcgggagcttctcccgcaaagactttcagctt

SEQ ID NO: 634149 - DNA, 33 bp, Homo sapien
tgtgttactaaattcaactattaaacatacaaa

SEQ ID NO: 634150 - DNA, 33 bp, Homo sapien
tgtgttactaaattcatctattaaacatacaaa

SEQ ID NO: 634151 - DNA, 33 bp, Homo sapien
ccaagatttttaatcaatctagaagtgtcatgt

SEQ ID NO: 634152 - DNA, 33 bp, Homo sapien
ccaagatttttaatcagtctagaagtgtcatgt

SEQ ID NO: 634153 - DNA, 33 bp, Homo sapien
ttgactctggaaaaaaatatatctattccattg

SEQ ID NO: 634154 - DNA, 33 bp, Homo sapien
ttgactctggaaaaaactatatctattccattg

SEQ ID NO: 634155 - DNA, 33 bp, Homo sapien
gtagttctttccagtacgaaatcatcagacagt

SEQ ID NO: 634156 - DNA, 33 bp, Homo sapien
gtagttctttccagtatgaaatcatcagacagt

SEQ ID NO: 634157 - DNA, 33 bp, Homo sapien
agtgtttgttagaacactgacgtacatcccaaa

SEQ ID NO: 634158 - DNA, 33 bp, Homo sapien
agtgtttgttagaacattgacgtacatcccaaa

SEQ ID NO: 634159 - DNA, 33 bp, Homo sapien
atttattatactgtagccagtgtaagttgtaag

SEQ ID NO: 634160 - DNA, 33 bp, Homo sapien
atttattatactgtagtcagtgtaagttgtaag

SEQ ID NO: 634161 - DNA, 33 bp, Homo sapien
gtgctaagatagcatcaaatcctctggaaaggc

SEQ ID NO: 634162 - DNA, 33 bp, Homo sapien
gtgctaagatagcatcgaatcctctggaaaggc

SEQ ID NO: 634163 - DNA, 33 bp, Homo sapien
tattgatggagtatcaaaaatgcaagtagcaac

SEQ ID NO: 634164 - DNA, 33 bp, Homo sapien
tattgatggagtatcagaaatgcaagtagcaac

SEQ ID NO: 634165 - DNA, 33 bp, Homo sapien
gaatcctgttaatcagcagagttggtagaaaga

SEQ ID NO: 634166 - DNA, 33 bp, Homo sapien
gaatcctgttaatcagtagagttggtagaaaga

SEQ ID NO: 634167 - DNA, 33 bp, Homo sapien
tgaaataaaaagttacaaagcacaagattttca

SEQ ID NO: 634168 - DNA, 33 bp, Homo sapien
tgaaataaaaagttacgaagcacaagattttca

SEQ ID NO: 634169 - DNA, 33 bp, Homo sapien
ccagggagatgatacacgaaataagattatatt

SEQ ID NO: 634170 - DNA, 33 bp, Homo sapien
ccagggagatgatacatgaaataagattatatt

SEQ ID NO: 634171 - DNA, 33 bp, Homo sapien
cttcttactttctcaccgcatatgaacataatt

SEQ ID NO: 634172 - DNA, 33 bp, Homo sapien
cttcttactttctcactgcatatgaacataatt

SEQ ID NO: 634173 - DNA, 33 bp, Homo sapien
gtctgaaagaaaatttaaaaaacatgtttgcct

SEQ ID NO: 634174 - DNA, 33 bp, Homo sapien
gtctgaaagaaaattttaaaaacatgtttgcct

SEQ ID NO: 634175 - DNA, 33 bp, Homo sapien
ccttgaagacccactgcatgtttctgagacatc

SEQ ID NO: 634176 - DNA, 33 bp, Homo sapien
ccttgaagacccactgtatgtttctgagacatc

SEQ ID NO: 634177 - DNA, 33 bp, Homo sapien
ctatactggccagtcaactgatagaagaaaacc

SEQ ID NO: 634178 - DNA, 33 bp, Homo sapien
ctatactggccagtcagctgatagaagaaaacc

SEQ ID NO: 634179 - DNA, 33 bp, Homo sapien
gaaatgttagaattagccaacaaggatgttaaa

SEQ ID NO: 634180 - DNA, 33 bp, Homo sapien
gaaatgttagaattagtcaacaaggatgttaaa

SEQ ID NO: 634181 - DNA, 33 bp, Homo sapien
aatccaaactgacttacacctgacagaaatgtt

SEQ ID NO: 634182 - DNA, 33 bp, Homo sapien
aatccaaactgacttagacctgacagaaatgtt

SEQ ID NO: 634183 - DNA, 33 bp, Homo sapien
gctcacctcatttatacctcttctcttagggtc

SEQ ID NO: 634184 - DNA, 33 bp, Homo sapien
gctcacctcatttatatctcttctcttagggtc

SEQ ID NO: 634185 - DNA, 33 bp, Homo sapien
gagaataaaacacttgcaggatgtcattttcaa

SEQ ID NO: 634186 - DNA, 33 bp, Homo sapien
gagaataaaacacttgtaggatgtcattttcaa

SEQ ID NO: 634187 - DNA, 33 bp, Homo sapien
gagtcagtttcaaaaacggatcccaaagtcaga

SEQ ID NO: 634188 - DNA, 33 bp, Homo sapien
gagtcagtttcaaaaatggatcccaaagtcaga

SEQ ID NO: 634189 - DNA, 33 bp, Homo sapien
ataaagacagttctcacgaagcaccactttagg

SEQ ID NO: 634190 - DNA, 33 bp, Homo sapien
ataaagacagttctcatgaagcaccactttagg

SEQ ID NO: 634191 - DNA, 33 bp, Homo sapien
aactaagaagaaacacagtcagttgacgaacat

SEQ ID NO: 634192 - DNA, 33 bp, Homo sapien
aactaagaagaaacacggtcagttgacgaacat

SEQ ID NO: 634193 - DNA, 33 bp, Homo sapien
attcataatcaataaacgtcaaacctcaaagac

SEQ ID NO: 634194 - DNA, 33 bp, Homo sapien
attcataatcaataaatgtcaaacctcaaagac

SEQ ID NO: 634195 - DNA, 33 bp, Homo sapien
gcttggggcagtagctcaaccatcttcattggg

SEQ ID NO: 634196 - DNA, 33 bp, Homo sapien
gcttggggcagtagcttaaccatcttcattggg

SEQ ID NO: 634197 - DNA, 33 bp, Homo sapien
tatctatgatgaaccacgttctgcacaaagtac

SEQ ID NO: 634198 - DNA, 33 bp, Homo sapien
tatctatgatgaaccaggttctgcacaaagtac

SEQ ID NO: 634199 - DNA, 33 bp, Homo sapien
gtgttattactaaataaaaaatgacaagcttta

SEQ ID NO: 634200 - DNA, 33 bp, Homo sapien
gtgttattactaaatagaaaatgacaagcttta

SEQ ID NO: 634201 - DNA, 33 bp, Homo sapien
gaaacagacccaaacccatagctaattacgtga

SEQ ID NO: 634202 - DNA, 33 bp, Homo sapien
gaaacagacccaaacctatagctaattacgtga

SEQ ID NO: 634203 - DNA, 33 bp, Homo sapien
acagtgactgagaaaccctagcataaacaaata

SEQ ID NO: 634204 - DNA, 33 bp, Homo sapien
acagtgactgagaaactctagcataaacaaata

SEQ ID NO: 634205 - DNA, 33 bp, Homo sapien
tgcatgtccagctgcacggagaatatgcaaatc

SEQ ID NO: 634206 - DNA, 33 bp, Homo sapien
tgcatgtccagctgcagggagaatatgcaaatc

SEQ ID NO: 634207 - DNA, 33 bp, Homo sapien
atggtgcggtggacaacacaggaacgtagggca

SEQ ID NO: 634208 - DNA, 33 bp, Homo sapien
atggtgcggtggacaatacaggaacgtagggca

SEQ ID NO: 634209 - DNA, 33 bp, Homo sapien
tgaccaagtcattaacaacacgacaatacgggt

SEQ ID NO: 634210 - DNA, 33 bp, Homo sapien
tgaccaagtcattaacgacacgacaatacgggt

SEQ ID NO: 634211 - DNA, 33 bp, Homo sapien
cccaccagagtgaaggaaaaaaggaacaggatg

SEQ ID NO: 634212 - DNA, 33 bp, Homo sapien
cccaccagagtgaagggaaaaaggaacaggatg

SEQ ID NO: 634213 - DNA, 33 bp, Homo sapien
attgagccatcattccaaggctgttcagttgga

SEQ ID NO: 634214 - DNA, 33 bp, Homo sapien
attgagccatcattccgaggctgttcagttgga

SEQ ID NO: 634215 - DNA, 33 bp, Homo sapien
ctatgtgccagagaaaaaacacgcaagaggaaa

SEQ ID NO: 634216 - DNA, 33 bp, Homo sapien
ctatgtgccagagaaataacacgcaagaggaaa

SEQ ID NO: 634217 - DNA, 33 bp, Homo sapien
ggcagactaaacataacctgggagcactccttc

SEQ ID NO: 634218 - DNA, 33 bp, Homo sapien
ggcagactaaacataatctgggagcactccttc

SEQ ID NO: 634219 - DNA, 33 bp, Homo sapien
aatatggcagtattcacatcatctggcctgaat

SEQ ID NO: 634220 - DNA, 33 bp, Homo sapien
aatatggcagtattcatatcatctggcctgaat

SEQ ID NO: 634221 - DNA, 33 bp, Homo sapien
atcaaagaacacgtcacggaggaagcaaatcca

SEQ ID NO: 634222 - DNA, 33 bp, Homo sapien
atcaaagaacacgtcatggaggaagcaaatcca

SEQ ID NO: 634223 - DNA, 33 bp, Homo sapien
caagatcttgaggttaaggtatgcctttttttt

SEQ ID NO: 634224 - DNA, 33 bp, Homo sapien
caagatcttgaggttagggtatgcctttttttt

SEQ ID NO: 634225 - DNA, 33 bp, Homo sapien
tacgttcagaaaacataatcaacattttaagaa

SEQ ID NO: 634226 - DNA, 33 bp, Homo sapien
tacgttcagaaaacatgatcaacattttaagaa

SEQ ID NO: 634227 - DNA, 33 bp, Homo sapien
tttggcatcccaaacacgattgtagggactctg

SEQ ID NO: 634228 - DNA, 33 bp, Homo sapien
tttggcatcccaaacatgattgtagggactctg

SEQ ID NO: 634229 - DNA, 33 bp, Homo sapien
agcatgaattcatgccacatatttggagaatgg

SEQ ID NO: 634230 - DNA, 33 bp, Homo sapien
agcatgaattcatgccgcatatttggagaatgg

SEQ ID NO: 634231 - DNA, 33 bp, Homo sapien
tccattgagcagtcaactccagttagctcagct

SEQ ID NO: 634232 - DNA, 33 bp, Homo sapien
tccattgagcagtcaattccagttagctcagct

SEQ ID NO: 634233 - DNA, 33 bp, Homo sapien
ggccctgctccatacaacattttttgccctcca

SEQ ID NO: 634234 - DNA, 33 bp, Homo sapien
ggccctgctccatacagcattttttgccctcca

SEQ ID NO: 634235 - DNA, 33 bp, Homo sapien
tttcactgagtctagcagagaaagcttgtacct

SEQ ID NO: 634236 - DNA, 33 bp, Homo sapien
tttcactgagtctagccgagaaagcttgtacct

SEQ ID NO: 634237 - DNA, 33 bp, Homo sapien
atcctgcagaaatgcaaaccacttcttgtccta

SEQ ID NO: 634238 - DNA, 33 bp, Homo sapien
atcctgcagaaatgcagaccacttcttgtccta

SEQ ID NO: 634239 - DNA, 33 bp, Homo sapien
cccactttctccatcacggcagtcacttacaag

SEQ ID NO: 634240 - DNA, 33 bp, Homo sapien
cccactttctccatcatggcagtcacttacaag

SEQ ID NO: 634241 - DNA, 33 bp, Homo sapien
tatcattgctctctgaaaaaaagtattatagaa

SEQ ID NO: 634242 - DNA, 33 bp, Homo sapien
tatcattgctctctgagaaaaagtattatagaa

SEQ ID NO: 634243 - DNA, 33 bp, Homo sapien
ttgcactgggaattacagaactaatgccaatcc

SEQ ID NO: 634244 - DNA, 33 bp, Homo sapien
ttgcactgggaattacggaactaatgccaatcc

SEQ ID NO: 634245 - DNA, 33 bp, Homo sapien
tgagtctggtaacccaagctattgaaaatgaac

SEQ ID NO: 634246 - DNA, 33 bp, Homo sapien
tgagtctggtaacccatgctattgaaaatgaac

SEQ ID NO: 634247 - DNA, 33 bp, Homo sapien
cgacaagtaacaggaactaatcattagagacgg

SEQ ID NO: 634248 - DNA, 33 bp, Homo sapien
cgacaagtaacaggaattaatcattagagacgg

SEQ ID NO: 634249 - DNA, 33 bp, Homo sapien
tttcccttttccagcaaataagttcttcccttt

SEQ ID NO: 634250 - DNA, 33 bp, Homo sapien
tttcccttttccagcagataagttcttcccttt

SEQ ID NO: 634251 - DNA, 33 bp, Homo sapien
aaagggaaacatatcaacccagtggctactggc

SEQ ID NO: 634252 - DNA, 33 bp, Homo sapien
aaagggaaacatatcaccccagtggctactggc

SEQ ID NO: 634253 - DNA, 33 bp, Homo sapien
tggtaactctaaacaacgtccatgataaaaata

SEQ ID NO: 634254 - DNA, 33 bp, Homo sapien
tggtaactctaaacaatgtccatgataaaaata

SEQ ID NO: 634255 - DNA, 33 bp, Homo sapien
tatatcattcatatcccagagtgtgtcctgaaa

SEQ ID NO: 634256 - DNA, 33 bp, Homo sapien
tatatcattcatatccgagagtgtgtcctgaaa

SEQ ID NO: 634257 - DNA, 33 bp, Homo sapien
gtgggtgcccagtatgcacaggcaatgtgttta

SEQ ID NO: 634258 - DNA, 33 bp, Homo sapien
gtgggtgcccagtatgtacaggcaatgtgttta

SEQ ID NO: 634259 - DNA, 33 bp, Homo sapien
ttagttggactgaagacaactgtatttgaaata

SEQ ID NO: 634260 - DNA, 33 bp, Homo sapien
ttagttggactgaagataactgtatttgaaata

SEQ ID NO: 634261 - DNA, 33 bp, Homo sapien
gtagcctatggtctggacaattcataacaggag

SEQ ID NO: 634262 - DNA, 33 bp, Homo sapien
gtagcctatggtctgggcaattcataacaggag

SEQ ID NO: 634263 - DNA, 33 bp, Homo sapien
cagggtttcatgattaccaagtggcagagcctg

SEQ ID NO: 634264 - DNA, 33 bp, Homo sapien
cagggtttcatgattagcaagtggcagagcctg

SEQ ID NO: 634265 - DNA, 33 bp, Homo sapien
atagatagattggaaaggaaagcatcagaatga

SEQ ID NO: 634266 - DNA, 33 bp, Homo sapien
atagatagattggaaatgaaagcatcagaatga

SEQ ID NO: 634267 - DNA, 33 bp, Homo sapien
attgtctacattgtaacaaagctggagaaaatg

SEQ ID NO: 634268 - DNA, 33 bp, Homo sapien
attgtctacattgtaataaagctggagaaaatg

SEQ ID NO: 634269 - DNA, 33 bp, Homo sapien
atatatacgtgagtagcactgtccagaatgaac

SEQ ID NO: 634270 - DNA, 33 bp, Homo sapien
atatatacgtgagtagtactgtccagaatgaac

SEQ ID NO: 634271 - DNA, 33 bp, Homo sapien
gccactctccctgcctcaaacctctggagttgg

SEQ ID NO: 634272 - DNA, 33 bp, Homo sapien
gccactctccctgcctgaaacctctggagttgg

SEQ ID NO: 634273 - DNA, 33 bp, Homo sapien
tggtaatgttccattcaaagaagatagtgggga

SEQ ID NO: 634274 - DNA, 33 bp, Homo sapien
tggtaatgttccattcgaagaagatagtgggga

SEQ ID NO: 634275 - DNA, 33 bp, Homo sapien
taatgagaatggtatcaagtctgagtctccact

SEQ ID NO: 634276 - DNA, 33 bp, Homo sapien
taatgagaatggtatccagtctgagtctccact

SEQ ID NO: 634277 - DNA, 33 bp, Homo sapien
cagttttagaagttcacgctggttggagcaact

SEQ ID NO: 634278 - DNA, 33 bp, Homo sapien
cagttttagaagttcatgctggttggagcaact

SEQ ID NO: 634279 - DNA, 33 bp, Homo sapien
tcactgtcacacattcaaaccacacagaagtat

SEQ ID NO: 634280 - DNA, 33 bp, Homo sapien
tcactgtcacacattcgaaccacacagaagtat

SEQ ID NO: 634281 - DNA, 33 bp, Homo sapien
gctttcatctaataggcagtggtgctttaagaa

SEQ ID NO: 634282 - DNA, 33 bp, Homo sapien
gctttcatctaataggtagtggtgctttaagaa

SEQ ID NO: 634283 - DNA, 33 bp, Homo sapien
attaagaaatatttccactaccaaactcaaaga

SEQ ID NO: 634284 - DNA, 33 bp, Homo sapien
attaagaaatatttccgctaccaaactcaaaga

SEQ ID NO: 634285 - DNA, 33 bp, Homo sapien
acataataaagcctcccgctgccttattcttcc

SEQ ID NO: 634286 - DNA, 33 bp, Homo sapien
acataataaagcctcctgctgccttattcttcc

SEQ ID NO: 634287 - DNA, 33 bp, Homo sapien
caaatatttgtcttatgacttcagctttttgtt

SEQ ID NO: 634288 - DNA, 33 bp, Homo sapien
caaatatttgtcttattacttcagctttttgtt

SEQ ID NO: 634289 - DNA, 33 bp, Homo sapien
atctctgtgtactgccacagactggtactgaac

SEQ ID NO: 634290 - DNA, 33 bp, Homo sapien
atctctgtgtactgccgcagactggtactgaac

SEQ ID NO: 634291 - DNA, 33 bp, Homo sapien
gaagagaaaatacataggaccagtaatccgagt

SEQ ID NO: 634292 - DNA, 33 bp, Homo sapien
gaagagaaaatacatatgaccagtaatccgagt

SEQ ID NO: 634293 - DNA, 33 bp, Homo sapien
tcacttaaaccaagtacgtatctaacaggttcc

SEQ ID NO: 634294 - DNA, 33 bp, Homo sapien
tcacttaaaccaagtatgtatctaacaggttcc

SEQ ID NO: 634295 - DNA, 33 bp, Homo sapien
gtgaatttttaagcacaactctggtttatagaa

SEQ ID NO: 634296 - DNA, 33 bp, Homo sapien
gtgaatttttaagcacgactctggtttatagaa

SEQ ID NO: 634297 - DNA, 33 bp, Homo sapien
ggcaacatggcgaagccgctactctacaaaaaa

SEQ ID NO: 634298 - DNA, 33 bp, Homo sapien
ggcaacatggcgaagctgctactctacaaaaaa

SEQ ID NO: 634299 - DNA, 33 bp, Homo sapien
caagaaatggcccaaacaaggtggatggagttt

SEQ ID NO: 634300 - DNA, 33 bp, Homo sapien
caagaaatggcccaaataaggtggatggagttt

SEQ ID NO: 634301 - DNA, 33 bp, Homo sapien
ataaaaaagtcagaccagactcccaatctttgt

SEQ ID NO: 634302 - DNA, 33 bp, Homo sapien
ataaaaaagtcagaccggactcccaatctttgt

SEQ ID NO: 634303 - DNA, 33 bp, Homo sapien
atattttgtccttttaacgtttctgaattcaga

SEQ ID NO: 634304 - DNA, 33 bp, Homo sapien
atattttgtccttttagcgtttctgaattcaga

SEQ ID NO: 634305 - DNA, 33 bp, Homo sapien
ctcttgtggattaggcagccagaaaaatcttga

SEQ ID NO: 634306 - DNA, 33 bp, Homo sapien
ctcttgtggattaggcggccagaaaaatcttga

SEQ ID NO: 634307 - DNA, 33 bp, Homo sapien
tgctatgaatattatgccactctgtctcctatt

SEQ ID NO: 634308 - DNA, 33 bp, Homo sapien
tgctatgaatattatgtcactctgtctcctatt

SEQ ID NO: 634309 - DNA, 33 bp, Homo sapien
ggggctggtatcaagaagaagatggctaagggt

SEQ ID NO: 634310 - DNA, 33 bp, Homo sapien
ggggctggtatcaagaggaagatggctaagggt

SEQ ID NO: 634311 - DNA, 33 bp, Homo sapien
cagcatctgtatcctacgctgattgtgaggaat

SEQ ID NO: 634312 - DNA, 33 bp, Homo sapien
cagcatctgtatcctaggctgattgtgaggaat

SEQ ID NO: 634313 - DNA, 33 bp, Homo sapien
ccacatttgcaagagacaaaaagctggcaaggg

SEQ ID NO: 634314 - DNA, 33 bp, Homo sapien
ccacatttgcaagagataaaaagctggcaaggg

SEQ ID NO: 634315 - DNA, 33 bp, Homo sapien
tgcagattctaagaaaacatctataaagaggaa

SEQ ID NO: 634316 - DNA, 33 bp, Homo sapien
tgcagattctaagaaagcatctataaagaggaa

SEQ ID NO: 634317 - DNA, 33 bp, Homo sapien
cggattatttaggaccaatgaaaagctacgatc

SEQ ID NO: 634318 - DNA, 33 bp, Homo sapien
cggattatttaggacctatgaaaagctacgatc

SEQ ID NO: 634319 - DNA, 33 bp, Homo sapien
ttggctcaaccgagaacgaagaccacgctcacg

SEQ ID NO: 634320 - DNA, 33 bp, Homo sapien
ttggctcaaccgagaatgaagaccacgctcacg

SEQ ID NO: 634321 - DNA, 33 bp, Homo sapien
ctatgatgaacatgcaaccggcgagggaaaatc

SEQ ID NO: 634322 - DNA, 33 bp, Homo sapien
ctatgatgaacatgcagccggcgagggaaaatc

SEQ ID NO: 634323 - DNA, 33 bp, Homo sapien
acatgatctaaaacaacgatttcaccttttttc

SEQ ID NO: 634324 - DNA, 33 bp, Homo sapien
acatgatctaaaacaatgatttcaccttttttc

SEQ ID NO: 634325 - DNA, 33 bp, Homo sapien
tgttcctcctttcccacgatgtcgtcacggctg

SEQ ID NO: 634326 - DNA, 33 bp, Homo sapien
tgttcctcctttcccatgatgtcgtcacggctg

SEQ ID NO: 634327 - DNA, 33 bp, Homo sapien
gctgcctgatgctgggaaatggttagtcttctc

SEQ ID NO: 634328 - DNA, 33 bp, Homo sapien
gctgcctgatgctggggaatggttagtcttctc

SEQ ID NO: 634329 - DNA, 33 bp, Homo sapien
ggaaggtgagacacgacataaacgtaaagcatc

SEQ ID NO: 634330 - DNA, 33 bp, Homo sapien
ggaaggtgagacacgatataaacgtaaagcatc

SEQ ID NO: 634331 - DNA, 33 bp, Homo sapien
gagggatgagaatgaccgagtccaatgttaagc

SEQ ID NO: 634332 - DNA, 33 bp, Homo sapien
gagggatgagaatgactgagtccaatgttaagc

SEQ ID NO: 634333 - DNA, 33 bp, Homo sapien
ccaaggtctagagagagaagtgatttgtcacag

SEQ ID NO: 634334 - DNA, 33 bp, Homo sapien
ccaaggtctagagagataagtgatttgtcacag

SEQ ID NO: 634335 - DNA, 33 bp, Homo sapien
ataagaaacctgatcccgaagaattgtgccggg

SEQ ID NO: 634336 - DNA, 33 bp, Homo sapien
ataagaaacctgatcctgaagaattgtgccggg

SEQ ID NO: 634337 - DNA, 33 bp, Homo sapien
aaatcaatcaatcatgaaaatagatggaaatag

SEQ ID NO: 634338 - DNA, 33 bp, Homo sapien
aaatcaatcaatcatggaaatagatggaaatag

SEQ ID NO: 634339 - DNA, 33 bp, Homo sapien
tgcaaatcagtgacagaatcaggattttaagtc

SEQ ID NO: 634340 - DNA, 33 bp, Homo sapien
tgcaaatcagtgacagcatcaggattttaagtc

SEQ ID NO: 634341 - DNA, 33 bp, Homo sapien
tgatgagacggtcatacgtgtggatcagcctga

SEQ ID NO: 634342 - DNA, 33 bp, Homo sapien
tgatgagacggtcatatgtgtggatcagcctga

SEQ ID NO: 634343 - DNA, 33 bp, Homo sapien
cagggcagggaccaccacatccgcttcattcac

SEQ ID NO: 634344 - DNA, 33 bp, Homo sapien
cagggcagggaccacctcatccgcttcattcac

SEQ ID NO: 634345 - DNA, 33 bp, Homo sapien
cttggtaaatcgtggagcattgtgtcattgtaa

SEQ ID NO: 634346 - DNA, 33 bp, Homo sapien
cttggtaaatcgtggatcattgtgtcattgtaa

SEQ ID NO: 634347 - DNA, 33 bp, Homo sapien
cgacgatgtttggagccaatgtatataaaaagc

SEQ ID NO: 634348 - DNA, 33 bp, Homo sapien
cgacgatgtttggagcgaatgtatataaaaagc

SEQ ID NO: 634349 - DNA, 33 bp, Homo sapien
ttagacagtcagtttaagggagagtccccagcc

SEQ ID NO: 634350 - DNA, 33 bp, Homo sapien
ttagacagtcagtttaggggagagtccccagcc

SEQ ID NO: 634351 - DNA, 33 bp, Homo sapien
ttgcaagttaaagaccagcactggaggcagtgg

SEQ ID NO: 634352 - DNA, 33 bp, Homo sapien
ttgcaagttaaagaccggcactggaggcagtgg

SEQ ID NO: 634353 - DNA, 33 bp, Homo sapien
ccctgtcaggggccaccgctctggcttccatca

SEQ ID NO: 634354 - DNA, 33 bp, Homo sapien
ccctgtcaggggccactgctctggcttccatca

SEQ ID NO: 634355 - DNA, 33 bp, Homo sapien
agataagcgctgttctaactcttcagatggaaa

SEQ ID NO: 634356 - DNA, 33 bp, Homo sapien
agataagcgctgttctgactcttcagatggaaa

SEQ ID NO: 634357 - DNA, 33 bp, Homo sapien
atggatgacctacaaccacatgcggcaacaaga

SEQ ID NO: 634358 - DNA, 33 bp, Homo sapien
atggatgacctacaactacatgcggcaacaaga

SEQ ID NO: 634359 - DNA, 33 bp, Homo sapien
tctacagaaagtaccaaaacagggccaggcaca

SEQ ID NO: 634360 - DNA, 33 bp, Homo sapien
tctacagaaagtaccacaacagggccaggcaca

SEQ ID NO: 634361 - DNA, 33 bp, Homo sapien
aatgacatgagcagccaagacattaggtcagtt

SEQ ID NO: 634362 - DNA, 33 bp, Homo sapien
aatgacatgagcagccgagacattaggtcagtt

SEQ ID NO: 634363 - DNA, 33 bp, Homo sapien
cattcagtgaactgtgcactcttccactctaat

SEQ ID NO: 634364 - DNA, 33 bp, Homo sapien
cattcagtgaactgtgtactcttccactctaat

SEQ ID NO: 634365 - DNA, 33 bp, Homo sapien
caaacctgctgtggaaacaggacacccgcgcca

SEQ ID NO: 634366 - DNA, 33 bp, Homo sapien
caaacctgctgtggaatcaggacacccgcgcca

SEQ ID NO: 634367 - DNA, 33 bp, Homo sapien
ccatttgacagtatgacaactcctccaagaacc

SEQ ID NO: 634368 - DNA, 33 bp, Homo sapien
ccatttgacagtatgagaactcctccaagaacc

SEQ ID NO: 634369 - DNA, 33 bp, Homo sapien
tctgtgctgcctactgcatgataggcatggacc

SEQ ID NO: 634370 - DNA, 33 bp, Homo sapien
tctgtgctgcctactgtatgataggcatggacc

SEQ ID NO: 634371 - DNA, 33 bp, Homo sapien
gtgttcagctgcactgcaggtaaagttggtggt

SEQ ID NO: 634372 - DNA, 33 bp, Homo sapien
gtgttcagctgcactgtaggtaaagttggtggt

SEQ ID NO: 634373 - DNA, 33 bp, Homo sapien
atcccagctccggaagccttcagattctatctc

SEQ ID NO: 634374 - DNA, 33 bp, Homo sapien
atcccagctccggaaggcttcagattctatctc

SEQ ID NO: 634375 - DNA, 33 bp, Homo sapien
tactgagggacagagcagcctattgatcaggag

SEQ ID NO: 634376 - DNA, 33 bp, Homo sapien
tactgagggacagagccgcctattgatcaggag

SEQ ID NO: 634377 - DNA, 33 bp, Homo sapien
caagggcacaaacaagaaattggcagcactgga

SEQ ID NO: 634378 - DNA, 33 bp, Homo sapien
caagggcacaaacaaggaattggcagcactgga

SEQ ID NO: 634379 - DNA, 33 bp, Homo sapien
ggtttcattgcccaataagttggcaccaaaagt

SEQ ID NO: 634380 - DNA, 33 bp, Homo sapien
ggtttcattgcccaatcagttggcaccaaaagt

SEQ ID NO: 634381 - DNA, 33 bp, Homo sapien
aaaggggacctatctcaacactctcatagcctc

SEQ ID NO: 634382 - DNA, 33 bp, Homo sapien
aaaggggacctatctcgacactctcatagcctc

SEQ ID NO: 634383 - DNA, 33 bp, Homo sapien
ttccaaattttctacaataactattacactaat

SEQ ID NO: 634384 - DNA, 33 bp, Homo sapien
ttccaaattttctacagtaactattacactaat

SEQ ID NO: 634385 - DNA, 33 bp, Homo sapien
gagcaaactacagagacgaccagctgcctcctt

SEQ ID NO: 634386 - DNA, 33 bp, Homo sapien
gagcaaactacagagatgaccagctgcctcctt

SEQ ID NO: 634387 - DNA, 33 bp, Homo sapien
agtggcgatactttgaaacttgatagataagaa

SEQ ID NO: 634388 - DNA, 33 bp, Homo sapien
agtggcgatactttgagacttgatagataagaa

SEQ ID NO: 634389 - DNA, 33 bp, Homo sapien
aattcctcatggccaccatatttggaattaagg

SEQ ID NO: 634390 - DNA, 33 bp, Homo sapien
aattcctcatggccactatatttggaattaagg

SEQ ID NO: 634391 - DNA, 33 bp, Homo sapien
tgagggctctagagcaactgaagtattatttgg

SEQ ID NO: 634392 - DNA, 33 bp, Homo sapien
tgagggctctagagcagctgaagtattatttgg

SEQ ID NO: 634393 - DNA, 33 bp, Homo sapien
ttcccagaacctgtgactatgctattttacaga

SEQ ID NO: 634394 - DNA, 33 bp, Homo sapien
ttcccagaacctgtgagtatgctattttacaga

SEQ ID NO: 634395 - DNA, 33 bp, Homo sapien
gtcagaattctaaaacagatcttaatgtggcca

SEQ ID NO: 634396 - DNA, 33 bp, Homo sapien
gtcagaattctaaaacggatcttaatgtggcca

SEQ ID NO: 634397 - DNA, 33 bp, Homo sapien
ctggatctgctgatggaagttggcattggcgat

SEQ ID NO: 634398 - DNA, 33 bp, Homo sapien
ctggatctgctgatgggagttggcattggcgat

SEQ ID NO: 634399 - DNA, 33 bp, Homo sapien
tcccggcatcaagcccaggaatggaaagtcaca

SEQ ID NO: 634400 - DNA, 33 bp, Homo sapien
tcccggcatcaagcccgggaatggaaagtcaca

SEQ ID NO: 634401 - DNA, 33 bp, Homo sapien
attggcagtacaaatacaatttccatgataata

SEQ ID NO: 634402 - DNA, 33 bp, Homo sapien
attggcagtacaaatagaatttccatgataata

SEQ ID NO: 634403 - DNA, 33 bp, Homo sapien
acactctctactaagcaacatttcgcccacacc

SEQ ID NO: 634404 - DNA, 33 bp, Homo sapien
acactctctactaagcgacatttcgcccacacc

SEQ ID NO: 634405 - DNA, 33 bp, Homo sapien
tgccagcatctaaatcactgctttctggccttt

SEQ ID NO: 634406 - DNA, 33 bp, Homo sapien
tgccagcatctaaatcgctgctttctggccttt

SEQ ID NO: 634407 - DNA, 33 bp, Homo sapien
gtgtttgcaagtagacactctccaatggcctct

SEQ ID NO: 634408 - DNA, 33 bp, Homo sapien
gtgtttgcaagtagacgctctccaatggcctct

SEQ ID NO: 634409 - DNA, 33 bp, Homo sapien
ggacaacatggccatacgataggcagaccagat

SEQ ID NO: 634410 - DNA, 33 bp, Homo sapien
ggacaacatggccataggataggcagaccagat

SEQ ID NO: 634411 - DNA, 33 bp, Homo sapien
cctgcactgcgaccgcacaacaagtctttctag

SEQ ID NO: 634412 - DNA, 33 bp, Homo sapien
cctgcactgcgaccgcgcaacaagtctttctag

SEQ ID NO: 634413 - DNA, 33 bp, Homo sapien
gagaatggtatgcaaggccatagattgggttcc

SEQ ID NO: 634414 - DNA, 33 bp, Homo sapien
gagaatggtatgcaagtccatagattgggttcc

SEQ ID NO: 634415 - DNA, 33 bp, Homo sapien
cgtgatgctcatgcacacttatatttcagagtt

SEQ ID NO: 634416 - DNA, 33 bp, Homo sapien
cgtgatgctcatgcacccttatatttcagagtt

SEQ ID NO: 634417 - DNA, 33 bp, Homo sapien
gactataaacggctcacaatggattgcacactg

SEQ ID NO: 634418 - DNA, 33 bp, Homo sapien
gactataaacggctcagaatggattgcacactg

SEQ ID NO: 634419 - DNA, 33 bp, Homo sapien
acttcagattatgagcaaaggagaagccaatgg

SEQ ID NO: 634420 - DNA, 33 bp, Homo sapien
acttcagattatgagcgaaggagaagccaatgg

SEQ ID NO: 634421 - DNA, 33 bp, Homo sapien
gactaatacaatgctaaaaactgatcaaaattc

SEQ ID NO: 634422 - DNA, 33 bp, Homo sapien
gactaatacaatgctacaaactgatcaaaattc

SEQ ID NO: 634423 - DNA, 33 bp, Homo sapien
acttgccaaccagggactaaagctattatcttg

SEQ ID NO: 634424 - DNA, 33 bp, Homo sapien
acttgccaaccagggattaaagctattatcttg

SEQ ID NO: 634425 - DNA, 33 bp, Homo sapien
ttataactatgagaaaagtgaccttagtttgga

SEQ ID NO: 634426 - DNA, 33 bp, Homo sapien
ttataactatgagaaacgtgaccttagtttgga

SEQ ID NO: 634427 - DNA, 33 bp, Homo sapien
aactatgtttcattcacgttaatgctcaaattg

SEQ ID NO: 634428 - DNA, 33 bp, Homo sapien
aactatgtttcattcatgttaatgctcaaattg

SEQ ID NO: 634429 - DNA, 33 bp, Homo sapien
aggagagctgtcaccaataacctgaccatgatg

SEQ ID NO: 634430 - DNA, 33 bp, Homo sapien
aggagagctgtcaccagtaacctgaccatgatg

SEQ ID NO: 634431 - DNA, 33 bp, Homo sapien
agacacacaagcatagaccaaaaatgtggagaa

SEQ ID NO: 634432 - DNA, 33 bp, Homo sapien
agacacacaagcataggccaaaaatgtggagaa

SEQ ID NO: 634433 - DNA, 33 bp, Homo sapien
gagctgtgacaaaggacgtcagagtagtttgcc

SEQ ID NO: 634434 - DNA, 33 bp, Homo sapien
gagctgtgacaaaggatgtcagagtagtttgcc

SEQ ID NO: 634435 - DNA, 33 bp, Homo sapien
gtattgttaactataaagacaatgttgtacagc

SEQ ID NO: 634436 - DNA, 33 bp, Homo sapien
gtattgttaactataaggacaatgttgtacagc

SEQ ID NO: 634437 - DNA, 33 bp, Homo sapien
aatacttacggtgccaacgtagcttgctcaatg

SEQ ID NO: 634438 - DNA, 33 bp, Homo sapien
aatacttacggtgccagcgtagcttgctcaatg

SEQ ID NO: 634439 - DNA, 33 bp, Homo sapien
tccctctgcttaatgacactttctgtgtaccct

SEQ ID NO: 634440 - DNA, 33 bp, Homo sapien
tccctctgcttaatgatactttctgtgtaccct

SEQ ID NO: 634441 - DNA, 33 bp, Homo sapien
aggcataagaatggtacgttggactttggggac

SEQ ID NO: 634442 - DNA, 33 bp, Homo sapien
aggcataagaatggtatgttggactttggggac

SEQ ID NO: 634443 - DNA, 33 bp, Homo sapien
gtgtgtgtgtggtctaaggaaatgtcaaatttt

SEQ ID NO: 634444 - DNA, 33 bp, Homo sapien
gtgtgtgtgtggtctagggaaatgtcaaatttt

SEQ ID NO: 634445 - DNA, 33 bp, Homo sapien
tgttctcacttatatgcaggagccaaaaaagtt

SEQ ID NO: 634446 - DNA, 33 bp, Homo sapien
tgttctcacttatatgtaggagccaaaaaagtt

SEQ ID NO: 634447 - DNA, 33 bp, Homo sapien
gtgttcaatagtacaacagcgcaactatattta

SEQ ID NO: 634448 - DNA, 33 bp, Homo sapien
gtgttcaatagtacaatagcgcaactatattta

SEQ ID NO: 634449 - DNA, 33 bp, Homo sapien
cagtttgagatgagaaaaaatcaggacattgct

SEQ ID NO: 634450 - DNA, 33 bp, Homo sapien
cagtttgagatgagaagaaatcaggacattgct

SEQ ID NO: 634451 - DNA, 33 bp, Homo sapien
ttaaagccaataaaaccaatgagtagacaaata

SEQ ID NO: 634452 - DNA, 33 bp, Homo sapien
ttaaagccaataaaacgaatgagtagacaaata

SEQ ID NO: 634453 - DNA, 33 bp, Homo sapien
actcaatgtatgcaaaaggacatcttgaaggca

SEQ ID NO: 634454 - DNA, 33 bp, Homo sapien
actcaatgtatgcaaagggacatcttgaaggca

SEQ ID NO: 634455 - DNA, 33 bp, Homo sapien
taaaaattgtcagagaaatgactatgtggctta

SEQ ID NO: 634456 - DNA, 33 bp, Homo sapien
taaaaattgtcagagagatgactatgtggctta

SEQ ID NO: 634457 - DNA, 33 bp, Homo sapien
tcttcaactgcactaagccacacttcaaatgct

SEQ ID NO: 634458 - DNA, 33 bp, Homo sapien
tcttcaactgcactaatccacacttcaaatgct

SEQ ID NO: 634459 - DNA, 33 bp, Homo sapien
agactggtagagagtacctcacaaaggcagacc

SEQ ID NO: 634460 - DNA, 33 bp, Homo sapien
agactggtagagagtatctcacaaaggcagacc

SEQ ID NO: 634461 - DNA, 33 bp, Homo sapien
gctgtctagaatcaaacagataaaaagctgatt

SEQ ID NO: 634462 - DNA, 33 bp, Homo sapien
gctgtctagaatcaaatagataaaaagctgatt

SEQ ID NO: 634463 - DNA, 33 bp, Homo sapien
cccagagaagaaaatgaaaatggaaagacctct

SEQ ID NO: 634464 - DNA, 33 bp, Homo sapien
cccagagaagaaaatggaaatggaaagacctct

SEQ ID NO: 634465 - DNA, 33 bp, Homo sapien
acgttcaaaaaagtgaaaatgtatcaaaacttg

SEQ ID NO: 634466 - DNA, 33 bp, Homo sapien
acgttcaaaaaagtgacaatgtatcaaaacttg

SEQ ID NO: 634467 - DNA, 33 bp, Homo sapien
gcaaactgcagagttcacttattccccctaccc

SEQ ID NO: 634468 - DNA, 33 bp, Homo sapien
gcaaactgcagagttcgcttattccccctaccc

SEQ ID NO: 634469 - DNA, 33 bp, Homo sapien
ttccctcggtatgataaataatcaattgtgctg

SEQ ID NO: 634470 - DNA, 33 bp, Homo sapien
ttccctcggtatgatagataatcaattgtgctg

SEQ ID NO: 634471 - DNA, 33 bp, Homo sapien
ttgatcaggaaaaacaaaactgtcatcatttgc

SEQ ID NO: 634472 - DNA, 33 bp, Homo sapien
ttgatcaggaaaaacagaactgtcatcatttgc

SEQ ID NO: 634473 - DNA, 33 bp, Homo sapien
taaggatccaggtaagaaattttaatttgcata

SEQ ID NO: 634474 - DNA, 33 bp, Homo sapien
taaggatccaggtaaggaattttaatttgcata

SEQ ID NO: 634475 - DNA, 33 bp, Homo sapien
atggctgaaataaaaaacagtgacaatttcagc

SEQ ID NO: 634476 - DNA, 33 bp, Homo sapien
atggctgaaataaaaatcagtgacaatttcagc

SEQ ID NO: 634477 - DNA, 33 bp, Homo sapien
aacagaatagatgacccagaaatagacgcacac

SEQ ID NO: 634478 - DNA, 33 bp, Homo sapien
aacagaatagatgacctagaaatagacgcacac

SEQ ID NO: 634479 - DNA, 33 bp, Homo sapien
atcatgaatgtcatcaataactactaactgcca

SEQ ID NO: 634480 - DNA, 33 bp, Homo sapien
atcatgaatgtcatcagtaactactaactgcca

SEQ ID NO: 634481 - DNA, 33 bp, Homo sapien
atgagtggcaacaggggacttatgatatgattg

SEQ ID NO: 634482 - DNA, 33 bp, Homo sapien
atgagtggcaacagggtacttatgatatgattg

SEQ ID NO: 634483 - DNA, 33 bp, Homo sapien
tagctatgattattcacgtttttgccaccccct

SEQ ID NO: 634484 - DNA, 33 bp, Homo sapien
tagctatgattattcatgtttttgccaccccct

SEQ ID NO: 634485 - DNA, 33 bp, Homo sapien
agctcattctttgaaaactaactttatcttgtg

SEQ ID NO: 634486 - DNA, 33 bp, Homo sapien
agctcattctttgaaagctaactttatcttgtg

SEQ ID NO: 634487 - DNA, 33 bp, Homo sapien
tcagccctcctagttacgttcctgatgtcttcg

SEQ ID NO: 634488 - DNA, 33 bp, Homo sapien
tcagccctcctagttatgttcctgatgtcttcg

SEQ ID NO: 634489 - DNA, 33 bp, Homo sapien
aatcatatgccttcaaataagacagaactgttt

SEQ ID NO: 634490 - DNA, 33 bp, Homo sapien
aatcatatgccttcaagtaagacagaactgttt

SEQ ID NO: 634491 - DNA, 33 bp, Homo sapien
caattttcaactagccaagataagactaatctg

SEQ ID NO: 634492 - DNA, 33 bp, Homo sapien
caattttcaactagccgagataagactaatctg

SEQ ID NO: 634493 - DNA, 33 bp, Homo sapien
gattaaatgaagtacagggcttagcaagtgatc

SEQ ID NO: 634494 - DNA, 33 bp, Homo sapien
gattaaatgaagtacatggcttagcaagtgatc

SEQ ID NO: 634495 - DNA, 33 bp, Homo sapien
accgcacccagcaaaaataacgatggttagatg

SEQ ID NO: 634496 - DNA, 33 bp, Homo sapien
accgcacccagcaaaagtaacgatggttagatg

SEQ ID NO: 634497 - DNA, 33 bp, Homo sapien
gaccataaatgccttcacaaaacctctttttca

SEQ ID NO: 634498 - DNA, 33 bp, Homo sapien
gaccataaatgccttcgcaaaacctctttttca

SEQ ID NO: 634499 - DNA, 33 bp, Homo sapien
aattacgttcaggctacgtgtataaggtgtata

SEQ ID NO: 634500 - DNA, 33 bp, Homo sapien
aattacgttcaggctatgtgtataaggtgtata

SEQ ID NO: 634501 - DNA, 33 bp, Homo sapien
aatggccaaatgcagaaagagaacattgtcaaa

SEQ ID NO: 634502 - DNA, 33 bp, Homo sapien
aatggccaaatgcagagagagaacattgtcaaa

SEQ ID NO: 634503 - DNA, 33 bp, Homo sapien
gctgtctacaaagaagaaatgtgttgagacgaa

SEQ ID NO: 634504 - DNA, 33 bp, Homo sapien
gctgtctacaaagaagcaatgtgttgagacgaa

SEQ ID NO: 634505 - DNA, 33 bp, Homo sapien
ttcccccctctcaaacccttactactcttccca

SEQ ID NO: 634506 - DNA, 33 bp, Homo sapien
ttcccccctctcaaactcttactactcttccca

SEQ ID NO: 634507 - DNA, 33 bp, Homo sapien
taaggctctaatggtaccttctattcctatggc

SEQ ID NO: 634508 - DNA, 33 bp, Homo sapien
taaggctctaatggtatcttctattcctatggc

SEQ ID NO: 634509 - DNA, 33 bp, Homo sapien
ctgataatagtttataaccatgggcagatgaag

SEQ ID NO: 634510 - DNA, 33 bp, Homo sapien
ctgataatagtttatagccatgggcagatgaag

SEQ ID NO: 634511 - DNA, 33 bp, Homo sapien
accactgtaacagatacaatagtaacaaaaaag

SEQ ID NO: 634512 - DNA, 33 bp, Homo sapien
accactgtaacagatagaatagtaacaaaaaag

SEQ ID NO: 634513 - DNA, 33 bp, Homo sapien
gcttgtcaatcagtcaacttttccattcttatg

SEQ ID NO: 634514 - DNA, 33 bp, Homo sapien
gcttgtcaatcagtcagcttttccattcttatg

SEQ ID NO: 634515 - DNA, 33 bp, Homo sapien
aaaatcccactagaaaacagacctcttagacac

SEQ ID NO: 634516 - DNA, 33 bp, Homo sapien
aaaatcccactagaaaccagacctcttagacac

SEQ ID NO: 634517 - DNA, 33 bp, Homo sapien
actgaataaatagtaacaatagcagctcccatt

SEQ ID NO: 634518 - DNA, 33 bp, Homo sapien
actgaataaatagtaataatagcagctcccatt

SEQ ID NO: 634519 - DNA, 33 bp, Homo sapien
aaaagtcaatgggaaacgcaaaaggaaatgtgc

SEQ ID NO: 634520 - DNA, 33 bp, Homo sapien
aaaagtcaatgggaaaggcaaaaggaaatgtgc

SEQ ID NO: 634521 - DNA, 33 bp, Homo sapien
ctgcacattgtctaagcataaccagtgaacatc

SEQ ID NO: 634522 - DNA, 33 bp, Homo sapien
ctgcacattgtctaagtataaccagtgaacatc

SEQ ID NO: 634523 - DNA, 33 bp, Homo sapien
tacttttctaggtgacagagatgaaaaaacagg

SEQ ID NO: 634524 - DNA, 33 bp, Homo sapien
tacttttctaggtgacggagatgaaaaaacagg

SEQ ID NO: 634525 - DNA, 33 bp, Homo sapien
agggatctgaaacaaactgattggaagagagga

SEQ ID NO: 634526 - DNA, 33 bp, Homo sapien
agggatctgaaacaaattgattggaagagagga

SEQ ID NO: 634527 - DNA, 33 bp, Homo sapien
agttcttaaagctaaaaagccattttccttact

SEQ ID NO: 634528 - DNA, 33 bp, Homo sapien
agttcttaaagctaaagagccattttccttact

SEQ ID NO: 634529 - DNA, 33 bp, Homo sapien
aattaagttatatcgacagtttactgttctctg

SEQ ID NO: 634530 - DNA, 33 bp, Homo sapien
aattaagttatatcgatagtttactgttctctg

SEQ ID NO: 634531 - DNA, 33 bp, Homo sapien
tggttctgcttcacaaatcctgcaatggagaaa

SEQ ID NO: 634532 - DNA, 33 bp, Homo sapien
tggttctgcttcacaactcctgcaatggagaaa

SEQ ID NO: 634533 - DNA, 33 bp, Homo sapien
tgctgttttaaactgccaaagttttggaggtaa

SEQ ID NO: 634534 - DNA, 33 bp, Homo sapien
tgctgttttaaactgctaaagttttggaggtaa

SEQ ID NO: 634535 - DNA, 33 bp, Homo sapien
ccgtctcaacaaaaaaagacttgattagagtga

SEQ ID NO: 634536 - DNA, 33 bp, Homo sapien
ccgtctcaacaaaaaacgacttgattagagtga

SEQ ID NO: 634537 - DNA, 33 bp, Homo sapien
agaaagtcttgctaaactgggaaggaaccttgc

SEQ ID NO: 634538 - DNA, 33 bp, Homo sapien
agaaagtcttgctaaagtgggaaggaaccttgc

SEQ ID NO: 634539 - DNA, 33 bp, Homo sapien
attgttccaagagccaaagatacatataaacct

SEQ ID NO: 634540 - DNA, 33 bp, Homo sapien
attgttccaagagccatagatacatataaacct

SEQ ID NO: 634541 - DNA, 33 bp, Homo sapien
ggacacagacgaatctaacaataattatgctaa

SEQ ID NO: 634542 - DNA, 33 bp, Homo sapien
ggacacagacgaatctcacaataattatgctaa

SEQ ID NO: 634543 - DNA, 33 bp, Homo sapien
gaaaacttgtctggcacggtaaaggctgacagc

SEQ ID NO: 634544 - DNA, 33 bp, Homo sapien
gaaaacttgtctggcatggtaaaggctgacagc

SEQ ID NO: 634545 - DNA, 33 bp, Homo sapien
tattttcttgggacacaggggaaactgagaaat

SEQ ID NO: 634546 - DNA, 33 bp, Homo sapien
tattttcttgggacacgggggaaactgagaaat

SEQ ID NO: 634547 - DNA, 33 bp, Homo sapien
agctgtaagcaaaatcccctaaaagtagaaaaa

SEQ ID NO: 634548 - DNA, 33 bp, Homo sapien
agctgtaagcaaaatcgcctaaaagtagaaaaa

SEQ ID NO: 634549 - DNA, 33 bp, Homo sapien
aatcttgttataaccaacagtatgaccaaaatt

SEQ ID NO: 634550 - DNA, 33 bp, Homo sapien
aatcttgttataaccatcagtatgaccaaaatt

SEQ ID NO: 634551 - DNA, 33 bp, Homo sapien
aggagtgtgtgtataaactaatcaaaatgtgtt

SEQ ID NO: 634552 - DNA, 33 bp, Homo sapien
aggagtgtgtgtataagctaatcaaaatgtgtt

SEQ ID NO: 634553 - DNA, 33 bp, Homo sapien
ctttctgtcattatcactcagttttcatctttt

SEQ ID NO: 634554 - DNA, 33 bp, Homo sapien
ctttctgtcattatcagtcagttttcatctttt

SEQ ID NO: 634555 - DNA, 33 bp, Homo sapien
tttgtctggcttcttccagcatagttattctga

SEQ ID NO: 634556 - DNA, 33 bp, Homo sapien
tttgtctggcttcttctagcatagttattctga

SEQ ID NO: 634557 - DNA, 33 bp, Homo sapien
aaatggcaacctagtgacacaggaagccacgtg

SEQ ID NO: 634558 - DNA, 33 bp, Homo sapien
aaatggcaacctagtgtcacaggaagccacgtg

SEQ ID NO: 634559 - DNA, 33 bp, Homo sapien
ttacctgagcatcccaacagcagcgcttcaccc

SEQ ID NO: 634560 - DNA, 33 bp, Homo sapien
ttacctgagcatcccagcagcagcgcttcaccc

SEQ ID NO: 634561 - DNA, 33 bp, Homo sapien
gggggtcccaagtgacaaatggccaggctggga

SEQ ID NO: 634562 - DNA, 33 bp, Homo sapien
gggggtcccaagtgacgaatggccaggctggga

SEQ ID NO: 634563 - DNA, 33 bp, Homo sapien
cttctgcttccttgtgcaagatttcactattag

SEQ ID NO: 634564 - DNA, 33 bp, Homo sapien
cttctgcttccttgtgtaagatttcactattag

SEQ ID NO: 634565 - DNA, 33 bp, Homo sapien
tttttcttctgtaaaaaagaatagccactaata

SEQ ID NO: 634566 - DNA, 33 bp, Homo sapien
tttttcttctgtaaaagagaatagccactaata

SEQ ID NO: 634567 - DNA, 33 bp, Homo sapien
gctcagccataccaagcatatccagtgttcaat

SEQ ID NO: 634568 - DNA, 33 bp, Homo sapien
gctcagccataccaagtatatccagtgttcaat

SEQ ID NO: 634569 - DNA, 33 bp, Homo sapien
ggattgttcaaaccgacgtatctagtcaagcta

SEQ ID NO: 634570 - DNA, 33 bp, Homo sapien
ggattgttcaaaccgatgtatctagtcaagcta

SEQ ID NO: 634571 - DNA, 33 bp, Homo sapien
tgtgaggaaacaggcacctgtgttatgaattgc

SEQ ID NO: 634572 - DNA, 33 bp, Homo sapien
tgtgaggaaacaggcagctgtgttatgaattgc

SEQ ID NO: 634573 - DNA, 33 bp, Homo sapien
ctcagaacctacataaaccccatccaatccgct

SEQ ID NO: 634574 - DNA, 33 bp, Homo sapien
ctcagaacctacataacccccatccaatccgct

SEQ ID NO: 634575 - DNA, 33 bp, Homo sapien
gttcccgctgcacacaatcagctccttaaacat

SEQ ID NO: 634576 - DNA, 33 bp, Homo sapien
gttcccgctgcacacagtcagctccttaaacat

SEQ ID NO: 634577 - DNA, 33 bp, Homo sapien
gttctgttaagcaaggaaaggactagaaagggg

SEQ ID NO: 634578 - DNA, 33 bp, Homo sapien
gttctgttaagcaagggaaggactagaaagggg

SEQ ID NO: 634579 - DNA, 33 bp, Homo sapien
ccctgtctcaaaaattcaaagaaatcatttcac

SEQ ID NO: 634580 - DNA, 33 bp, Homo sapien
ccctgtctcaaaaattgaaagaaatcatttcac

SEQ ID NO: 634581 - DNA, 33 bp, Homo sapien
gacaagctgcagagtaagttgtttcttaggctg

SEQ ID NO: 634582 - DNA, 33 bp, Homo sapien
gacaagctgcagagtacgttgtttcttaggctg

SEQ ID NO: 634583 - DNA, 33 bp, Homo sapien
gctctttgtcttggcaacctttcgagttctgtt

SEQ ID NO: 634584 - DNA, 33 bp, Homo sapien
gctctttgtcttggcagcctttcgagttctgtt

SEQ ID NO: 634585 - DNA, 33 bp, Homo sapien
gatataaagacttgtccaagatattttctgtac

SEQ ID NO: 634586 - DNA, 33 bp, Homo sapien
gatataaagacttgtctaagatattttctgtac

SEQ ID NO: 634587 - DNA, 33 bp, Homo sapien
ctctatccattgtcagcctcttcagttatttcc

SEQ ID NO: 634588 - DNA, 33 bp, Homo sapien
ctctatccattgtcaggctcttcagttatttcc

SEQ ID NO: 634589 - DNA, 33 bp, Homo sapien
gggaatgagctgtcgtaacatagaataggtgct

SEQ ID NO: 634590 - DNA, 33 bp, Homo sapien
gggaatgagctgtcgtgacatagaataggtgct

SEQ ID NO: 634591 - DNA, 33 bp, Homo sapien
ctggagataagaagccacgtttataacctgcac

SEQ ID NO: 634592 - DNA, 33 bp, Homo sapien
ctggagataagaagccgcgtttataacctgcac

SEQ ID NO: 634593 - DNA, 33 bp, Homo sapien
gaccaaagtcctcagggaaatcacaagtgtgaa

SEQ ID NO: 634594 - DNA, 33 bp, Homo sapien
gaccaaagtcctcaggtaaatcacaagtgtgaa

SEQ ID NO: 634595 - DNA, 33 bp, Homo sapien
aaggccgtggtgtgaaataactgtgactgtgtc

SEQ ID NO: 634596 - DNA, 33 bp, Homo sapien
aaggccgtggtgtgaagtaactgtgactgtgtc

SEQ ID NO: 634597 - DNA, 33 bp, Homo sapien
caggcctggacttggaaacctaatgtccattcc

SEQ ID NO: 634598 - DNA, 33 bp, Homo sapien
caggcctggacttggagacctaatgtccattcc

SEQ ID NO: 634599 - DNA, 33 bp, Homo sapien
gagttatttttaacaacgtgtcctgtcttaccc

SEQ ID NO: 634600 - DNA, 33 bp, Homo sapien
gagttatttttaacaatgtgtcctgtcttaccc

SEQ ID NO: 634601 - DNA, 33 bp, Homo sapien
gtcctttgtgttctaactgaaatcagattcatg

SEQ ID NO: 634602 - DNA, 33 bp, Homo sapien
gtcctttgtgttctaattgaaatcagattcatg

SEQ ID NO: 634603 - DNA, 33 bp, Homo sapien
attaactgtcatcaaactgacaaagtaataagt

SEQ ID NO: 634604 - DNA, 33 bp, Homo sapien
attaactgtcatcaaagtgacaaagtaataagt

SEQ ID NO: 634605 - DNA, 33 bp, Homo sapien
ggaaaaatccttcttcactaagccttagtcaat

SEQ ID NO: 634606 - DNA, 33 bp, Homo sapien
ggaaaaatccttcttcgctaagccttagtcaat

SEQ ID NO: 634607 - DNA, 33 bp, Homo sapien
gcccaccgtatttgacactgatcaggtagttac

SEQ ID NO: 634608 - DNA, 33 bp, Homo sapien
gcccaccgtatttgacgctgatcaggtagttac

SEQ ID NO: 634609 - DNA, 33 bp, Homo sapien
gcagccgggcaccctacagaaactcagagggca

SEQ ID NO: 634610 - DNA, 33 bp, Homo sapien
gcagccgggcaccctagagaaactcagagggca

SEQ ID NO: 634611 - DNA, 33 bp, Homo sapien
gcaagaaataatcaccagagcgaggggacaggt

SEQ ID NO: 634612 - DNA, 33 bp, Homo sapien
gcaagaaataatcaccggagcgaggggacaggt

SEQ ID NO: 634613 - DNA, 33 bp, Homo sapien
actttcaggccaaagacccgcaggagtttcatt

SEQ ID NO: 634614 - DNA, 33 bp, Homo sapien
actttcaggccaaagagccgcaggagtttcatt

SEQ ID NO: 634615 - DNA, 33 bp, Homo sapien
atttgggctcaggcaacgtccctgacactttaa

SEQ ID NO: 634616 - DNA, 33 bp, Homo sapien
atttgggctcaggcaatgtccctgacactttaa

SEQ ID NO: 634617 - DNA, 33 bp, Homo sapien
tctcatctgtaaaatacggaaataatgggaaac

SEQ ID NO: 634618 - DNA, 33 bp, Homo sapien
tctcatctgtaaaatagggaaataatgggaaac

SEQ ID NO: 634619 - DNA, 33 bp, Homo sapien
cccctggcatgggaaccggcacctcaatgattg

SEQ ID NO: 634620 - DNA, 33 bp, Homo sapien
cccctggcatgggaactggcacctcaatgattg

SEQ ID NO: 634621 - DNA, 33 bp, Homo sapien
actgcccagggaaaaccagacaagatagttgca

SEQ ID NO: 634622 - DNA, 33 bp, Homo sapien
actgcccagggaaaacgagacaagatagttgca

SEQ ID NO: 634623 - DNA, 33 bp, Homo sapien
aagatgatggatataaagcatggaggatgtgcc

SEQ ID NO: 634624 - DNA, 33 bp, Homo sapien
aagatgatggatataaggcatggaggatgtgcc

SEQ ID NO: 634625 - DNA, 33 bp, Homo sapien
cccttctcctaagccaaagctcatagtcccagg

SEQ ID NO: 634626 - DNA, 33 bp, Homo sapien
cccttctcctaagccagagctcatagtcccagg

SEQ ID NO: 634627 - DNA, 33 bp, Homo sapien
tattgtttattgctgccaggtgtaaatttaaaa

SEQ ID NO: 634628 - DNA, 33 bp, Homo sapien
tattgtttattgctgcgaggtgtaaatttaaaa

SEQ ID NO: 634629 - DNA, 33 bp, Homo sapien
atgtgtttcttccaagccgagagctaatcacat

SEQ ID NO: 634630 - DNA, 33 bp, Homo sapien
atgtgtttcttccaaggcgagagctaatcacat

SEQ ID NO: 634631 - DNA, 33 bp, Homo sapien
tggcctgtacctgtggaaggccactgagaccct

SEQ ID NO: 634632 - DNA, 33 bp, Homo sapien
tggcctgtacctgtgggaggccactgagaccct

SEQ ID NO: 634633 - DNA, 33 bp, Homo sapien
tgagatcagatgtgacacaagttcaaaggtagg

SEQ ID NO: 634634 - DNA, 33 bp, Homo sapien
tgagatcagatgtgacgcaagttcaaaggtagg

SEQ ID NO: 634635 - DNA, 33 bp, Homo sapien
gcggctctggctcatgaatacccaccttgctgc

SEQ ID NO: 634636 - DNA, 33 bp, Homo sapien
gcggctctggctcatggatacccaccttgctgc

SEQ ID NO: 634637 - DNA, 33 bp, Homo sapien
gtatttggatgtggtcaccattttactagggga

SEQ ID NO: 634638 - DNA, 33 bp, Homo sapien
gtatttggatgtggtcgccattttactagggga

SEQ ID NO: 634639 - DNA, 33 bp, Homo sapien
gaacataagggctcctaaaaggctagcccaatg

SEQ ID NO: 634640 - DNA, 33 bp, Homo sapien
gaacataagggctccttaaaggctagcccaatg

SEQ ID NO: 634641 - DNA, 33 bp, Homo sapien
ttcgtcaccctggtgcagaaattggcatgcctc

SEQ ID NO: 634642 - DNA, 33 bp, Homo sapien
ttcgtcaccctggtgcggaaattggcatgcctc

SEQ ID NO: 634643 - DNA, 33 bp, Homo sapien
atggcatgcaaccgcaagaccgatgactagatg

SEQ ID NO: 634644 - DNA, 33 bp, Homo sapien
atggcatgcaaccgcaggaccgatgactagatg

SEQ ID NO: 634645 - DNA, 33 bp, Homo sapien
ttaagcaggttaaacaatgcccatgcaaacacg

SEQ ID NO: 634646 - DNA, 33 bp, Homo sapien
ttaagcaggttaaacattgcccatgcaaacacg

SEQ ID NO: 634647 - DNA, 33 bp, Homo sapien
aaagcttcctttgaccaagttgcacacaaagac

SEQ ID NO: 634648 - DNA, 33 bp, Homo sapien
aaagcttcctttgacccagttgcacacaaagac

SEQ ID NO: 634649 - DNA, 33 bp, Homo sapien
aggcctgcccttcagaaagtgactcttgaggtc

SEQ ID NO: 634650 - DNA, 33 bp, Homo sapien
aggcctgcccttcagacagtgactcttgaggtc

SEQ ID NO: 634651 - DNA, 33 bp, Homo sapien
tctctttccaggggcaaaaaaatggttgggaac

SEQ ID NO: 634652 - DNA, 33 bp, Homo sapien
tctctttccaggggcacaaaaatggttgggaac

SEQ ID NO: 634653 - DNA, 33 bp, Homo sapien
caggtccacagagataacacaaaatgtggggat

SEQ ID NO: 634654 - DNA, 33 bp, Homo sapien
caggtccacagagatagcacaaaatgtggggat

SEQ ID NO: 634655 - DNA, 33 bp, Homo sapien
caatttattcaccaaacagcgggttgctcagtc

SEQ ID NO: 634656 - DNA, 33 bp, Homo sapien
caatttattcaccaaagagcgggttgctcagtc

SEQ ID NO: 634657 - DNA, 33 bp, Homo sapien
catgttttgatgaaagaagcccacagtgcagtg

SEQ ID NO: 634658 - DNA, 33 bp, Homo sapien
catgttttgatgaaaggagcccacagtgcagtg

SEQ ID NO: 634659 - DNA, 33 bp, Homo sapien
aataggcaggtgatagaagaagatgacccttga

SEQ ID NO: 634660 - DNA, 33 bp, Homo sapien
aataggcaggtgataggagaagatgacccttga

SEQ ID NO: 634661 - DNA, 33 bp, Homo sapien
ctgggtcctagagaaagtaagcaagctgctcaa

SEQ ID NO: 634662 - DNA, 33 bp, Homo sapien
ctgggtcctagagaaattaagcaagctgctcaa

SEQ ID NO: 634663 - DNA, 33 bp, Homo sapien
atttgtggccatatgagcagagtgaaggaatgc

SEQ ID NO: 634664 - DNA, 33 bp, Homo sapien
atttgtggccatatgatcagagtgaaggaatgc

SEQ ID NO: 634665 - DNA, 33 bp, Homo sapien
aataacaataaaaagaacactggctggaccctc

SEQ ID NO: 634666 - DNA, 33 bp, Homo sapien
aataacaataaaaagatcactggctggaccctc

SEQ ID NO: 634667 - DNA, 33 bp, Homo sapien
gtttccaggatagaacaataagaacgtttatca

SEQ ID NO: 634668 - DNA, 33 bp, Homo sapien
gtttccaggatagaacgataagaacgtttatca

SEQ ID NO: 634669 - DNA, 33 bp, Homo sapien
acaacttgcctaagcacatctgagtgttgacag

SEQ ID NO: 634670 - DNA, 33 bp, Homo sapien
acaacttgcctaagcatatctgagtgttgacag

SEQ ID NO: 634671 - DNA, 33 bp, Homo sapien
ccatcatttccaggtacatcagtcaaacataga

SEQ ID NO: 634672 - DNA, 33 bp, Homo sapien
ccatcatttccaggtatatcagtcaaacataga

SEQ ID NO: 634673 - DNA, 33 bp, Homo sapien; identical to SEQ ID NO: 634671

SEQ ID NO: 634674 - DNA, 33 bp, Homo sapien; identical to SEQ ID NO: 634672

SEQ ID NO: 634675 - DNA, 33 bp, Homo sapien
ttcctttctcccagcactgatctcttcccagaa

SEQ ID NO: 634676 - DNA, 33 bp, Homo sapien
ttcctttctcccagcagtgatctcttcccagaa

SEQ ID NO: 634677 - DNA, 33 bp, Homo sapien
gtggaggatggatggacacaagatgaatagata

SEQ ID NO: 634678 - DNA, 33 bp, Homo sapien
gtggaggatggatggatacaagatgaatagata

SEQ ID NO: 634679 - DNA, 33 bp, Homo sapien
tagatatgtgggtacaggtggatagctgaacaa

SEQ ID NO: 634680 - DNA, 33 bp, Homo sapien
tagatatgtgggtacatgtggatagctgaacaa

SEQ ID NO: 634681 - DNA, 33 bp, Homo sapien
cacaggactcctgagagagtgtaattaaagggt

SEQ ID NO: 634682 - DNA, 33 bp, Homo sapien
cacaggactcctgagatagtgtaattaaagggt

SEQ ID NO: 634683 - DNA, 33 bp, Homo sapien
gtctatcctggagagagatcagaaaccacaact

SEQ ID NO: 634684 - DNA, 33 bp, Homo sapien
gtctatcctggagagatatcagaaaccacaact

SEQ ID NO: 634685 - DNA, 33 bp, Homo sapien
ataggtgaaaacagcacgaaaaagtggaaactc

SEQ ID NO: 634686 - DNA, 33 bp, Homo sapien
ataggtgaaaacagcatgaaaaagtggaaactc

SEQ ID NO: 634687 - DNA, 33 bp, Homo sapien
ctttcttcttcccgaccgtcatcaaaggcacac

SEQ ID NO: 634688 - DNA, 33 bp, Homo sapien
ctttcttcttcccgactgtcatcaaaggcacac

SEQ ID NO: 634689 - DNA, 33 bp, Homo sapien
tacccactcttcgtcggactagcctgacgcctg

SEQ ID NO: 634690 - DNA, 33 bp, Homo sapien
tacccactcttcgtcgtactagcctgacgcctg

SEQ ID NO: 634691 - DNA, 33 bp, Homo sapien
gtgggccagtcagcttcaaactcaggaaaacct

SEQ ID NO: 634692 - DNA, 33 bp, Homo sapien
gtgggccagtcagctttaaactcaggaaaacct

SEQ ID NO: 634693 - DNA, 33 bp, Homo sapien
ctgacaccctgaaaaaatggtctgttacgttta

SEQ ID NO: 634694 - DNA, 33 bp, Homo sapien
ctgacaccctgaaaaactggtctgttacgttta

SEQ ID NO: 634695 - DNA, 33 bp, Homo sapien
ccacctaaaggttacaaaaagagtgtgggctcg

SEQ ID NO: 634696 - DNA, 33 bp, Homo sapien
ccacctaaaggttacagaaagagtgtgggctcg

SEQ ID NO: 634697 - DNA, 33 bp, Homo sapien
tggtcaccatcacttaagataacgtacatataa

SEQ ID NO: 634698 - DNA, 33 bp, Homo sapien
tggtcaccatcacttaggataacgtacatataa

SEQ ID NO: 634699 - DNA, 33 bp, Homo sapien
gctcccttgtcaaaggaaaaaaggtgcatttat

SEQ ID NO: 634700 - DNA, 33 bp, Homo sapien
gctcccttgtcaaaggcaaaaaggtgcatttat

SEQ ID NO: 634701 - DNA, 33 bp, Homo sapien
tctttcatattcaccacgactctgaaggtgtga

SEQ ID NO: 634702 - DNA, 33 bp, Homo sapien
tctttcatattcaccatgactctgaaggtgtga

SEQ ID NO: 634703 - DNA, 33 bp, Homo sapien
ttcttgctcctttaaacggcattggcagatagt

SEQ ID NO: 634704 - DNA, 33 bp, Homo sapien
ttcttgctcctttaaatggcattggcagatagt

SEQ ID NO: 634705 - DNA, 33 bp, Homo sapien
aaaacagtggattttaaatgttctcaccacaaa

SEQ ID NO: 634706 - DNA, 33 bp, Homo sapien
aaaacagtggattttagatgttctcaccacaaa

SEQ ID NO: 634707 - DNA, 33 bp, Homo sapien
cgaaggaatctgtgaactatggtcacatggcta

SEQ ID NO: 634708 - DNA, 33 bp, Homo sapien
cgaaggaatctgtgaattatggtcacatggcta

SEQ ID NO: 634709 - DNA, 33 bp, Homo sapien
tctatctttttcactaaatctaaactgaagtgc

SEQ ID NO: 634710 - DNA, 33 bp, Homo sapien
tctatctttttcactacatctaaactgaagtgc

SEQ ID NO: 634711 - DNA, 33 bp, Homo sapien
tatatttcaaagataactggaggaaggattcaa

SEQ ID NO: 634712 - DNA, 33 bp, Homo sapien
tatatttcaaagataattggaggaaggattcaa

SEQ ID NO: 634713 - DNA, 33 bp, Homo sapien
ggtactgtagtaaagactcttgcggtccctgca

SEQ ID NO: 634714 - DNA, 33 bp, Homo sapien
ggtactgtagtaaagattcttgcggtccctgca

SEQ ID NO: 634715 - DNA, 33 bp, Homo sapien
cactgaagcatcttagcaaatttcttcagcctt

SEQ ID NO: 634716 - DNA, 33 bp, Homo sapien
cactgaagcatcttaggaaatttcttcagcctt

SEQ ID NO: 634717 - DNA, 33 bp, Homo sapien
gtttcaggttgtaagccctagagacctgttata

SEQ ID NO: 634718 - DNA, 33 bp, Homo sapien
gtttcaggttgtaagctctagagacctgttata

SEQ ID NO: 634719 - DNA, 33 bp, Homo sapien
ggctggctgagagtaaatatgcttaaaatattt

SEQ ID NO: 634720 - DNA, 33 bp, Homo sapien
ggctggctgagagtaagtatgcttaaaatattt

SEQ ID NO: 634721 - DNA, 33 bp, Homo sapien
tcagagaccggacccaatgacaggcttttactc

SEQ ID NO: 634722 - DNA, 33 bp, Homo sapien
tcagagaccggacccagtgacaggcttttactc

SEQ ID NO: 634723 - DNA, 33 bp, Homo sapien
tggatacatctttcatcaggactctgccacatc

SEQ ID NO: 634724 - DNA, 33 bp, Homo sapien
tggatacatctttcatgaggactctgccacatc

SEQ ID NO: 634725 - DNA, 33 bp, Homo sapien
tggaagagtcagaacacacacaataaaagcttt

SEQ ID NO: 634726 - DNA, 33 bp, Homo sapien
tggaagagtcagaacatacacaataaaagcttt

SEQ ID NO: 634727 - DNA, 33 bp, Homo sapien
acacaattgattttcacgtgttgatattatgtc

SEQ ID NO: 634728 - DNA, 33 bp, Homo sapien
acacaattgattttcatgtgttgatattatgtc

SEQ ID NO: 634729 - DNA, 33 bp, Homo sapien
ctcaccagtgtcaggaaagaggccctgtggttg

SEQ ID NO: 634730 - DNA, 33 bp, Homo sapien
ctcaccagtgtcaggagagaggccctgtggttg

SEQ ID NO: 634731 - DNA, 33 bp, Homo sapien
ttctctttggccgaaaccatcagtccatactga

SEQ ID NO: 634732 - DNA, 33 bp, Homo sapien
ttctctttggccgaaatcatcagtccatactga

SEQ ID NO: 634733 - DNA, 33 bp, Homo sapien
cctttctaacttgctccctttcattccatcctg

SEQ ID NO: 634734 - DNA, 33 bp, Homo sapien
cctttctaacttgctcgctttcattccatcctg

SEQ ID NO: 634735 - DNA, 33 bp, Homo sapien
aatacttgttagccaaaattggacagggcctga

SEQ ID NO: 634736 - DNA, 33 bp, Homo sapien
aatacttgttagccaagattggacagggcctga

SEQ ID NO: 634737 - DNA, 33 bp, Homo sapien
ccttccccatatagcccacctagcatgagtctg

SEQ ID NO: 634738 - DNA, 33 bp, Homo sapien
ccttccccatatagcctacctagcatgagtctg

SEQ ID NO: 634739 - DNA, 33 bp, Homo sapien
cacactgaccagcgaacagagagagctgtaggg

SEQ ID NO: 634740 - DNA, 33 bp, Homo sapien
cacactgaccagcgaagagagagagctgtaggg

SEQ ID NO: 634741 - DNA, 33 bp, Homo sapien
gtattttctgaccccaataagctgtttgccact

SEQ ID NO: 634742 - DNA, 33 bp, Homo sapien
gtattttctgaccccagtaagctgtttgccact

SEQ ID NO: 634743 - DNA, 33 bp, Homo sapien
gacatgatgttccgcaacgtggaagtggccgtg

SEQ ID NO: 634744 - DNA, 33 bp, Homo sapien
gacatgatgttccgcatcgtggaagtggccgtg

SEQ ID NO: 634745 - DNA, 33 bp, Homo sapien
tatatgtataaagaaccagtgtggaggcaaata

SEQ ID NO: 634746 - DNA, 33 bp, Homo sapien
tatatgtataaagaactagtgtggaggcaaata

SEQ ID NO: 634747 - DNA, 33 bp, Homo sapien
cagtgtatctcaaatactattactagatgtcat

SEQ ID NO: 634748 - DNA, 33 bp, Homo sapien
cagtgtatctcaaatattattactagatgtcat

SEQ ID NO: 634749 - DNA, 33 bp, Homo sapien
gactagagtcagaacaatctcaacagtgtaaaa

SEQ ID NO: 634750 - DNA, 33 bp, Homo sapien
gactagagtcagaacagtctcaacagtgtaaaa

SEQ ID NO: 634751 - DNA, 33 bp, Homo sapien
cttagcaccagacacaaaatagatcctcaaaat

SEQ ID NO: 634752 - DNA, 33 bp, Homo sapien
cttagcaccagacacagaatagatcctcaaaat

SEQ ID NO: 634753 - DNA, 33 bp, Homo sapien
tggagaggactttgaccctgaccagtcccttca

SEQ ID NO: 634754 - DNA, 33 bp, Homo sapien
tggagaggactttgactctgaccagtcccttca

SEQ ID NO: 634755 - DNA, 33 bp, Homo sapien
tttgctcacacggagacaagcagctggcatttg

SEQ ID NO: 634756 - DNA, 33 bp, Homo sapien
tttgctcacacggagataagcagctggcatttg

SEQ ID NO: 634757 - DNA, 33 bp, Homo sapien
agccccagttcactctcaaccctataacagctg

SEQ ID NO: 634758 - DNA, 33 bp, Homo sapien
agccccagttcactcttaaccctataacagctg

SEQ ID NO: 634759 - DNA, 33 bp, Homo sapien
aacctgcaaggtggtacagttatccccatttta

SEQ ID NO: 634760 - DNA, 33 bp, Homo sapien
aacctgcaaggtggtatagttatccccatttta

SEQ ID NO: 634761 - DNA, 33 bp, Homo sapien
gagacagcagctgaatcacgtgcaggatagaaa

SEQ ID NO: 634762 - DNA, 33 bp, Homo sapien
gagacagcagctgaattacgtgcaggatagaaa

SEQ ID NO: 634763 - DNA, 33 bp, Homo sapien
accagatacagcaccacaggccaggcatcatgc

SEQ ID NO: 634764 - DNA, 33 bp, Homo sapien
accagatacagcaccataggccaggcatcatgc

SEQ ID NO: 634765 - DNA, 33 bp, Homo sapien
ctgaggctcagaggtcaccagtaaggaagtggc

SEQ ID NO: 634766 - DNA, 33 bp, Homo sapien
ctgaggctcagaggtcgccagtaaggaagtggc

SEQ ID NO: 634767 - DNA, 33 bp, Homo sapien
agatttggctgcccccaagtctgtcctagagat

SEQ ID NO: 634768 - DNA, 33 bp, Homo sapien
agatttggctgcccccgagtctgtcctagagat

SEQ ID NO: 634769 - DNA, 33 bp, Homo sapien
tgctgcccagttgaataaaggagtctgctctca

SEQ ID NO: 634770 - DNA, 33 bp, Homo sapien
tgctgcccagttgaatgaaggagtctgctctca

SEQ ID NO: 634771 - DNA, 33 bp, Homo sapien
agctgccattccgtaaatcatctgtgtatgtgt

SEQ ID NO: 634772 - DNA, 33 bp, Homo sapien
agctgccattccgtaagtcatctgtgtatgtgt

SEQ ID NO: 634773 - DNA, 33 bp, Homo sapien
tcggtgtttattgtccatctcctctgccattcc

SEQ ID NO: 634774 - DNA, 33 bp, Homo sapien
tcggtgtttattgtccgtctcctctgccattcc

SEQ ID NO: 634775 - DNA, 33 bp, Homo sapien
tcaggcaggtcttgacaccgtatccttgggcct

SEQ ID NO: 634776 - DNA, 33 bp, Homo sapien
tcaggcaggtcttgaccccgtatccttgggcct

SEQ ID NO: 634777 - DNA, 33 bp, Homo sapien
ggaaggcagccagtgaagggtatggtttcaacc

SEQ ID NO: 634778 - DNA, 33 bp, Homo sapien
ggaaggcagccagtgacgggtatggtttcaacc

SEQ ID NO: 634779 - DNA, 33 bp, Homo sapien
aaggactcaagggcagccagtatatttgggagg

SEQ ID NO: 634780 - DNA, 33 bp, Homo sapien
aaggactcaagggcagtcagtatatttgggagg

SEQ ID NO: 634781 - DNA, 33 bp, Homo sapien
gcaaggacctgcagcaacttccacgcagcaccc

SEQ ID NO: 634782 - DNA, 33 bp, Homo sapien
gcaaggacctgcagcaccttccacgcagcaccc

SEQ ID NO: 634783 - DNA, 33 bp, Homo sapien
cagaaactatgacataaggtgacataggatatg

SEQ ID NO: 634784 - DNA, 33 bp, Homo sapien
cagaaactatgacatacggtgacataggatatg

SEQ ID NO: 634785 - DNA, 33 bp, Homo sapien
ggactacttgctcacaatgcttctgtttctggg

SEQ ID NO: 634786 - DNA, 33 bp, Homo sapien
ggactacttgctcacagtgcttctgtttctggg

SEQ ID NO: 634787 - DNA, 33 bp, Homo sapien
cagatcctgagacaggaattcaagtgcaatgct

SEQ ID NO: 634788 - DNA, 33 bp, Homo sapien
cagatcctgagacagggattcaagtgcaatgct

SEQ ID NO: 634789 - DNA, 33 bp, Homo sapien
ccctgcacttcactccagagaaagccttttctc

SEQ ID NO: 634790 - DNA, 33 bp, Homo sapien
ccctgcacttcactccggagaaagccttttctc

SEQ ID NO: 634791 - DNA, 33 bp, Homo sapien
taggctctgggcaaacaccagaagtggtcccca

SEQ ID NO: 634792 - DNA, 33 bp, Homo sapien
taggctctgggcaaactccagaagtggtcccca

SEQ ID NO: 634793 - DNA, 33 bp, Homo sapien
accatgtctgttgagacggatttttaggataaa

SEQ ID NO: 634794 - DNA, 33 bp, Homo sapien
accatgtctgttgagatggatttttaggataaa

SEQ ID NO: 634795 - DNA, 33 bp, Homo sapien
acctgtgatactgggaaaagagaacgaatttgt

SEQ ID NO: 634796 - DNA, 33 bp, Homo sapien
acctgtgatactgggagaagagaacgaatttgt

SEQ ID NO: 634797 - DNA, 33 bp, Homo sapien
atgctcagactctaggacctaactagtctcttc

SEQ ID NO: 634798 - DNA, 33 bp, Homo sapien
atgctcagactctagggcctaactagtctcttc

SEQ ID NO: 634799 - DNA, 33 bp, Homo sapien
aattattgatcatgtcaccaatacagacgggga

SEQ ID NO: 634800 - DNA, 33 bp, Homo sapien
aattattgatcatgtcgccaatacagacgggga

SEQ ID NO: 634801 - DNA, 33 bp, Homo sapien
gcttgggaagccattaagagataagtcttgcct

SEQ ID NO: 634802 - DNA, 33 bp, Homo sapien
gcttgggaagccattaggagataagtcttgcct

SEQ ID NO: 634803 - DNA, 33 bp, Homo sapien
agctggtttaaatacaataactttgcatgggag

SEQ ID NO: 634804 - DNA, 33 bp, Homo sapien
agctggtttaaatacagtaactttgcatgggag

SEQ ID NO: 634805 - DNA, 33 bp, Homo sapien
gggccacacagcctacagaagcattcagagtca

SEQ ID NO: 634806 - DNA, 33 bp, Homo sapien
gggccacacagcctacggaagcattcagagtca

SEQ ID NO: 634807 - DNA, 33 bp, Homo sapien
aaaatggctttctctacccttctagctgccttg

SEQ ID NO: 634808 - DNA, 33 bp, Homo sapien
aaaatggctttctctagccttctagctgccttg

SEQ ID NO: 634809 - DNA, 33 bp, Homo sapien
aaatcatttactctccactacggtgctgacacc

SEQ ID NO: 634810 - DNA, 33 bp, Homo sapien
aaatcatttactctccgctacggtgctgacacc

SEQ ID NO: 634811 - DNA, 33 bp, Homo sapien
acagattgtccagagcaaacgcagtggccatga

SEQ ID NO: 634812 - DNA, 33 bp, Homo sapien
acagattgtccagagcgaacgcagtggccatga

SEQ ID NO: 634813 - DNA, 33 bp, Homo sapien
taagaggtagaaaaataattgggaactgacggg

SEQ ID NO: 634814 - DNA, 33 bp, Homo sapien
taagaggtagaaaaatcattgggaactgacggg

SEQ ID NO: 634815 - DNA, 33 bp, Homo sapien
gttgctctggattttaagcattttatgtatagt

SEQ ID NO: 634816 - DNA, 33 bp, Homo sapien
gttgctctggattttaggcattttatgtatagt

SEQ ID NO: 634817 - DNA, 33 bp, Homo sapien
cttttaactcagggtcccaggctttagggtgca

SEQ ID NO: 634818 - DNA, 33 bp, Homo sapien
cttttaactcagggtcgcaggctttagggtgca

SEQ ID NO: 634819 - DNA, 33 bp, Homo sapien
ccttttttgctggcaccaaaggatcatttataa

SEQ ID NO: 634820 - DNA, 33 bp, Homo sapien
ccttttttgctggcactaaaggatcatttataa

SEQ ID NO: 634821 - DNA, 33 bp, Homo sapien
tggacatcacaaaccccgaacagaggtcacctg

SEQ ID NO: 634822 - DNA, 33 bp, Homo sapien
tggacatcacaaacccggaacagaggtcacctg

SEQ ID NO: 634823 - DNA, 33 bp, Homo sapien
tatagcagaccaaaaaattcctgcactatagga

SEQ ID NO: 634824 - DNA, 33 bp, Homo sapien
tatagcagaccaaaaacttcctgcactatagga

SEQ ID NO: 634825 - DNA, 33 bp, Homo sapien
gtctgggtaagaagccaacccacgaaatggttc

SEQ ID NO: 634826 - DNA, 33 bp, Homo sapien
gtctgggtaagaagccgacccacgaaatggttc

SEQ ID NO: 634827 - DNA, 33 bp, Homo sapien
tatgttagactgaccaaaattatagttgccata

SEQ ID NO: 634828 - DNA, 33 bp, Homo sapien
tatgttagactgaccagaattatagttgccata

SEQ ID NO: 634829 - DNA, 33 bp, Homo sapien
actgttctatctgttacggtgatacgtgacagt

SEQ ID NO: 634830 - DNA, 33 bp, Homo sapien
actgttctatctgttatggtgatacgtgacagt

SEQ ID NO: 634831 - DNA, 33 bp, Homo sapien
ttatttacgtggagaccctactgacagggagag

SEQ ID NO: 634832 - DNA, 33 bp, Homo sapien
ttatttacgtggagactctactgacagggagag

SEQ ID NO: 634833 - DNA, 33 bp, Homo sapien
tcagaaaatgccatcaatacccctctccacctt

SEQ ID NO: 634834 - DNA, 33 bp, Homo sapien
tcagaaaatgccatcattacccctctccacctt

SEQ ID NO: 634835 - DNA, 33 bp, Homo sapien
gcgtgtctagatttgcaacaaagccatttcccc

SEQ ID NO: 634836 - DNA, 33 bp, Homo sapien
gcgtgtctagatttgcgacaaagccatttcccc

SEQ ID NO: 634837 - DNA, 33 bp, Homo sapien
acttgcttccaatggaacttgatctttttcctt

SEQ ID NO: 634838 - DNA, 33 bp, Homo sapien
acttgcttccaatggagcttgatctttttcctt

SEQ ID NO: 634839 - DNA, 33 bp, Homo sapien
aactttatgaatttgaaaaggtttcatttgctt

SEQ ID NO: 634840 - DNA, 33 bp, Homo sapien
aactttatgaatttgagaaggtttcatttgctt

SEQ ID NO: 634841 - DNA, 33 bp, Homo sapien
aacattgcattatttcaaaacacctgtttgaga

SEQ ID NO: 634842 - DNA, 33 bp, Homo sapien
aacattgcattatttcgaaacacctgtttgaga

SEQ ID NO: 634843 - DNA, 33 bp, Homo sapien
atttgtgctccataaacttagagaaaaaatgaa

SEQ ID NO: 634844 - DNA, 33 bp, Homo sapien
atttgtgctccataaagttagagaaaaaatgaa

SEQ ID NO: 634845 - DNA, 33 bp, Homo sapien
ggaacacagcaggatgaattgccggcatctgta

SEQ ID NO: 634846 - DNA, 33 bp, Homo sapien
ggaacacagcaggatgtattgccggcatctgta

SEQ ID NO: 634847 - DNA, 33 bp, Homo sapien
tttccatttagtgctacagaacatccagctgcc

SEQ ID NO: 634848 - DNA, 33 bp, Homo sapien
tttccatttagtgctagagaacatccagctgcc

SEQ ID NO: 634849 - DNA, 33 bp, Homo sapien
aggacaaaggataacacagtataggacaaattg

SEQ ID NO: 634850 - DNA, 33 bp, Homo sapien
aggacaaaggataacatagtataggacaaattg

SEQ ID NO: 634851 - DNA, 33 bp, Homo sapien
atgcatagtagaatgacctttcctcctgggaac

SEQ ID NO: 634852 - DNA, 33 bp, Homo sapien
atgcatagtagaatgatctttcctcctgggaac

SEQ ID NO: 634853 - DNA, 33 bp, Homo sapien
agttgagaaaccagtaaaagaggccatttcaag

SEQ ID NO: 634854 - DNA, 33 bp, Homo sapien
agttgagaaaccagtagaagaggccatttcaag

SEQ ID NO: 634855 - DNA, 33 bp, Homo sapien
ggccctcagtgtagtacgttggtatcactgctg

SEQ ID NO: 634856 - DNA, 33 bp, Homo sapien
ggccctcagtgtagtatgttggtatcactgctg

SEQ ID NO: 634857 - DNA, 33 bp, Homo sapien
tctctggaatcttatacagtacacattgaacag

SEQ ID NO: 634858 - DNA, 33 bp, Homo sapien
tctctggaatcttatatagtacacattgaacag

SEQ ID NO: 634859 - DNA, 33 bp, Homo sapien
ccctaactgctacaaacacatagtctgcgaaaa

SEQ ID NO: 634860 - DNA, 33 bp, Homo sapien
ccctaactgctacaaatacatagtctgcgaaaa

SEQ ID NO: 634861 - DNA, 33 bp, Homo sapien
gaagctcacaacctcacggaagagatactacca

SEQ ID NO: 634862 - DNA, 33 bp, Homo sapien
gaagctcacaacctcatggaagagatactacca

SEQ ID NO: 634863 - DNA, 33 bp, Homo sapien
cacagtcagtcttccacagagttggcctctgtg

SEQ ID NO: 634864 - DNA, 33 bp, Homo sapien
cacagtcagtcttccatagagttggcctctgtg

SEQ ID NO: 634865 - DNA, 33 bp, Homo sapien
cctcagaaatgagctcacaaaatgttctgtact

SEQ ID NO: 634866 - DNA, 33 bp, Homo sapien
cctcagaaatgagctcgcaaaatgttctgtact

SEQ ID NO: 634867 - DNA, 33 bp, Homo sapien
ctttatagtacatttcaccaaagatgcataaca

SEQ ID NO: 634868 - DNA, 33 bp, Homo sapien
ctttatagtacatttcgccaaagatgcataaca

SEQ ID NO: 634869 - DNA, 33 bp, Homo sapien
acctgttgttggtacccgattttatcattttaa

SEQ ID NO: 634870 - DNA, 33 bp, Homo sapien
acctgttgttggtacctgattttatcattttaa

SEQ ID NO: 634871 - DNA, 33 bp, Homo sapien
agccataaaactcactaaatggttctattgcat

SEQ ID NO: 634872 - DNA, 33 bp, Homo sapien
agccataaaactcactgaatggttctattgcat

SEQ ID NO: 634873 - DNA, 33 bp, Homo sapien
agcctcagcttgcagaatctaacatctgggagg

SEQ ID NO: 634874 - DNA, 33 bp, Homo sapien
agcctcagcttgcagagtctaacatctgggagg

SEQ ID NO: 634875 - DNA, 33 bp, Homo sapien
tctccccaagtcttacagagaatgaaccacctt

SEQ ID NO: 634876 - DNA, 33 bp, Homo sapien
tctccccaagtcttacggagaatgaaccacctt

SEQ ID NO: 634877 - DNA, 33 bp, Homo sapien
aagtgcaaggggccctaagatgcggaaagtggt

SEQ ID NO: 634878 - DNA, 33 bp, Homo sapien
aagtgcaaggggccctgagatgcggaaagtggt

SEQ ID NO: 634879 - DNA, 33 bp, Homo sapien
gactaaatccacagcacctgctcttagtagcta

SEQ ID NO: 634880 - DNA, 33 bp, Homo sapien
gactaaatccacagcatctgctcttagtagcta

SEQ ID NO: 634881 - DNA, 33 bp, Homo sapien
aattaagaggctagaagaagtctaaaaatgaga

SEQ ID NO: 634882 - DNA, 33 bp, Homo sapien
aattaagaggctagaataagtctaaaaatgaga

SEQ ID NO: 634883 - DNA, 33 bp, Homo sapien
taaatgtttgagataacggacatcctaattacc

SEQ ID NO: 634884 - DNA, 33 bp, Homo sapien
taaatgtttgagataatggacatcctaattacc

SEQ ID NO: 634885 - DNA, 33 bp, Homo sapien
gtctttgttgaggacaatctaagtactactagt

SEQ ID NO: 634886 - DNA, 33 bp, Homo sapien
gtctttgttgaggacagtctaagtactactagt

SEQ ID NO: 634887 - DNA, 33 bp, Homo sapien
cttaggtttagttgttcaacatcatctcagact

SEQ ID NO: 634888 - DNA, 33 bp, Homo sapien
cttaggtttagttgttgaacatcatctcagact

SEQ ID NO: 634889 - DNA, 33 bp, Homo sapien
tgtcttaatttagtaacgatgagacttcagtaa

SEQ ID NO: 634890 - DNA, 33 bp, Homo sapien
tgtcttaatttagtaatgatgagacttcagtaa

SEQ ID NO: 634891 - DNA, 33 bp, Homo sapien
gtttataagccaccagactatgatattttgtta

SEQ ID NO: 634892 - DNA, 33 bp, Homo sapien
gtttataagccaccagtctatgatattttgtta

SEQ ID NO: 634893 - DNA, 33 bp, Homo sapien
acccttctgattacaccgggccactcagataat

SEQ ID NO: 634894 - DNA, 33 bp, Homo sapien
acccttctgattacacggggccactcagataat

SEQ ID NO: 634895 - DNA, 33 bp, Homo sapien
gataaagatctgcatcaaaatctcagttctgcc

SEQ ID NO: 634896 - DNA, 33 bp, Homo sapien
gataaagatctgcatcgaaatctcagttctgcc

SEQ ID NO: 634897 - DNA, 33 bp, Homo sapien
agtgagtaagcctaaactgaaacctaactctcc

SEQ ID NO: 634898 - DNA, 33 bp, Homo sapien
agtgagtaagcctaaattgaaacctaactctcc

SEQ ID NO: 634899 - DNA, 33 bp, Homo sapien
catctcattcaagttacgaatcattagccctgt

SEQ ID NO: 634900 - DNA, 33 bp, Homo sapien
catctcattcaagttaggaatcattagccctgt

SEQ ID NO: 634901 - DNA, 33 bp, Homo sapien
cacacaacctgagttcaatgaggccagatcccc

SEQ ID NO: 634902 - DNA, 33 bp, Homo sapien
cacacaacctgagttccatgaggccagatcccc

SEQ ID NO: 634903 - DNA, 33 bp, Homo sapien
cacatttgctttaaatcaggacatgtttttctc

SEQ ID NO: 634904 - DNA, 33 bp, Homo sapien
cacatttgctttaaatgaggacatgtttttctc

SEQ ID NO: 634905 - DNA, 33 bp, Homo sapien
agcagtacaaactcaaacagttctggttggttg

SEQ ID NO: 634906 - DNA, 33 bp, Homo sapien
agcagtacaaactcaagcagttctggttggttg

SEQ ID NO: 634907 - DNA, 33 bp, Homo sapien
agtgatgagataaatcagaacttccctatagat

SEQ ID NO: 634908 - DNA, 33 bp, Homo sapien
agtgatgagataaatcggaacttccctatagat

SEQ ID NO: 634909 - DNA, 33 bp, Homo sapien
ttcattagcaaagaaaatgcttcaccagaaatc

SEQ ID NO: 634910 - DNA, 33 bp, Homo sapien
ttcattagcaaagaaagtgcttcaccagaaatc

SEQ ID NO: 634911 - DNA, 33 bp, Homo sapien
tccttggataaaaatccagtgagatggtttcag

SEQ ID NO: 634912 - DNA, 33 bp, Homo sapien
tccttggataaaaatctagtgagatggtttcag

SEQ ID NO: 634913 - DNA, 33 bp, Homo sapien
tccagaatgctttaaccacacacaacttgaaga

SEQ ID NO: 634914 - DNA, 33 bp, Homo sapien
tccagaatgctttaactacacacaacttgaaga

SEQ ID NO: 634915 - DNA, 33 bp, Homo sapien
cttgcaggagaaaaacaaactgagcattcaaag

SEQ ID NO: 634916 - DNA, 33 bp, Homo sapien
cttgcaggagaaaaacgaactgagcattcaaag

SEQ ID NO: 634917 - DNA, 33 bp, Homo sapien
tgtggggatcagagccagaagaaataagaaggg

SEQ ID NO: 634918 - DNA, 33 bp, Homo sapien
tgtggggatcagagccggaagaaataagaaggg

SEQ ID NO: 634919 - DNA, 33 bp, Homo sapien
taatcatcaggccacaatatagaagtggtcagg

SEQ ID NO: 634920 - DNA, 33 bp, Homo sapien
taatcatcaggccacattatagaagtggtcagg

SEQ ID NO: 634921 - DNA, 33 bp, Homo sapien
atctgacttctctaagacagactaagacatggc

SEQ ID NO: 634922 - DNA, 33 bp, Homo sapien
atctgacttctctaaggcagactaagacatggc

SEQ ID NO: 634923 - DNA, 33 bp, Homo sapien
ctgaggcagtccagataagtcaggagaaagcat

SEQ ID NO: 634924 - DNA, 33 bp, Homo sapien
ctgaggcagtccagattagtcaggagaaagcat

SEQ ID NO: 634925 - DNA, 33 bp, Homo sapien
taggtcaccctcatcacctggaatggcacattc

SEQ ID NO: 634926 - DNA, 33 bp, Homo sapien
taggtcaccctcatcatctggaatggcacattc

SEQ ID NO: 634927 - DNA, 33 bp, Homo sapien
tccccattttgcacataaagtaacagaagtccc

SEQ ID NO: 634928 - DNA, 33 bp, Homo sapien
tccccattttgcacatgaagtaacagaagtccc

SEQ ID NO: 634929 - DNA, 33 bp, Homo sapien
tgtcatacatggataacggaaagacatatgaag

SEQ ID NO: 634930 - DNA, 33 bp, Homo sapien
tgtcatacatggataatggaaagacatatgaag

SEQ ID NO: 634931 - DNA, 33 bp, Homo sapien
tttgtattccctaccacgttctaggcacttgtt

SEQ ID NO: 634932 - DNA, 33 bp, Homo sapien
tttgtattccctaccatgttctaggcacttgtt

SEQ ID NO: 634933 - DNA, 33 bp, Homo sapien
ggtctcaaatacatgacgtctgcaataaaaata

SEQ ID NO: 634934 - DNA, 33 bp, Homo sapien
ggtctcaaatacatgatgtctgcaataaaaata

SEQ ID NO: 634935 - DNA, 33 bp, Homo sapien
aaactctggcaacacacgcttattgctgtgatt

SEQ ID NO: 634936 - DNA, 33 bp, Homo sapien
aaactctggcaacacaggcttattgctgtgatt

SEQ ID NO: 634937 - DNA, 33 bp, Homo sapien
tattttgacctccgcacgaattggactccctta

SEQ ID NO: 634938 - DNA, 33 bp, Homo sapien
tattttgacctccgcatgaattggactccctta

SEQ ID NO: 634939 - DNA, 33 bp, Homo sapien
tgcccagcatcaccaacgacactgcaagaacct

SEQ ID NO: 634940 - DNA, 33 bp, Homo sapien
tgcccagcatcaccaaggacactgcaagaacct

SEQ ID NO: 634941 - DNA, 33 bp, Homo sapien
ggctttgtgtcagataaataggtggcaattctg

SEQ ID NO: 634942 - DNA, 33 bp, Homo sapien
ggctttgtgtcagatagataggtggcaattctg

SEQ ID NO: 634943 - DNA, 33 bp, Homo sapien
agattttgaaagcttaacatgaagaagtcagtg

SEQ ID NO: 634944 - DNA, 33 bp, Homo sapien
agattttgaaagcttagcatgaagaagtcagtg

SEQ ID NO: 634945 - DNA, 33 bp, Homo sapien
aaaaagtcacaaaactcagtagtatgagaccca

SEQ ID NO: 634946 - DNA, 33 bp, Homo sapien
aaaaagtcacaaaactgagtagtatgagaccca

SEQ ID NO: 634947 - DNA, 33 bp, Homo sapien
tctataggtgggctaaagtgaaatgtacattat

SEQ ID NO: 634948 - DNA, 33 bp, Homo sapien
tctataggtgggctaaggtgaaatgtacattat

SEQ ID NO: 634949 - DNA, 33 bp, Homo sapien
ccacccaggttctatcacttcctgaaataaaaa

SEQ ID NO: 634950 - DNA, 33 bp, Homo sapien
ccacccaggttctatcgcttcctgaaataaaaa

SEQ ID NO: 634951 - DNA, 33 bp, Homo sapien
cccatgtcacttgattagatgccctctgttctt

SEQ ID NO: 634952 - DNA, 33 bp, Homo sapien
cccatgtcacttgattcgatgccctctgttctt

SEQ ID NO: 634953 - DNA, 33 bp, Homo sapien
atgtagaggcctttcgaactagacttcaaaaca

SEQ ID NO: 634954 - DNA, 33 bp, Homo sapien
atgtagaggcctttcgcactagacttcaaaaca

SEQ ID NO: 634955 - DNA, 33 bp, Homo sapien
taggagccagattccaatagtaaccatctgacc

SEQ ID NO: 634956 - DNA, 33 bp, Homo sapien
taggagccagattccagtagtaaccatctgacc

SEQ ID NO: 634957 - DNA, 33 bp, Homo sapien
ttttcaattttcctataaaagaacgcaacaaac

SEQ ID NO: 634958 - DNA, 33 bp, Homo sapien
ttttcaattttcctattaaagaacgcaacaaac

SEQ ID NO: 634959 - DNA, 33 bp, Homo sapien
aaaagaaagttccttacgtatgagtacagagaa

SEQ ID NO: 634960 - DNA, 33 bp, Homo sapien
aaaagaaagttccttaggtatgagtacagagaa

SEQ ID NO: 634961 - DNA, 33 bp, Homo sapien
agctacactgaatatcaccacctacctcccacc

SEQ ID NO: 634962 - DNA, 33 bp, Homo sapien
agctacactgaatatcgccacctacctcccacc

SEQ ID NO: 634963 - DNA, 33 bp, Homo sapien
tgatcagccttttgcacaagtctcggctccaac

SEQ ID NO: 634964 - DNA, 33 bp, Homo sapien
tgatcagccttttgcagaagtctcggctccaac

SEQ ID NO: 634965 - DNA, 33 bp, Homo sapien
tttcattttccttccccaacaaatggcactaat

SEQ ID NO: 634966 - DNA, 33 bp, Homo sapien
tttcattttccttcccgaacaaatggcactaat

SEQ ID NO: 634967 - DNA, 33 bp, Homo sapien
aattagaaagtgtccaagccactgaagacatcc

SEQ ID NO: 634968 - DNA, 33 bp, Homo sapien
aattagaaagtgtccaggccactgaagacatcc

SEQ ID NO: 634969 - DNA, 33 bp, Homo sapien
agatcctttgactaagactcaagactaggctcg

SEQ ID NO: 634970 - DNA, 33 bp, Homo sapien
agatcctttgactaaggctcaagactaggctcg

SEQ ID NO: 634971 - DNA, 33 bp, Homo sapien
cccatattcttcagcacactgtgagctccatca

SEQ ID NO: 634972 - DNA, 33 bp, Homo sapien
cccatattcttcagcatactgtgagctccatca

SEQ ID NO: 634973 - DNA, 33 bp, Homo sapien
ccacctcttcttttccaccttaagtctatttta

SEQ ID NO: 634974 - DNA, 33 bp, Homo sapien
ccacctcttcttttccgccttaagtctatttta

SEQ ID NO: 634975 - DNA, 33 bp, Homo sapien
aagatccttacttcccagagttcctattgtctg

SEQ ID NO: 634976 - DNA, 33 bp, Homo sapien
aagatccttacttcccggagttcctattgtctg

SEQ ID NO: 634977 - DNA, 33 bp, Homo sapien
ggaagtaaggatcttacaagagtggaaacagct

SEQ ID NO: 634978 - DNA, 33 bp, Homo sapien
ggaagtaaggatcttataagagtggaaacagct

SEQ ID NO: 634979 - DNA, 33 bp, Homo sapien
cttgctgctttctgaaagttctctcactcagtt

SEQ ID NO: 634980 - DNA, 33 bp, Homo sapien
cttgctgctttctgaaggttctctcactcagtt

SEQ ID NO: 634981 - DNA, 33 bp, Homo sapien
tttttgggtcttgaaacactgtttaagtgactt

SEQ ID NO: 634982 - DNA, 33 bp, Homo sapien
tttttgggtcttgaaatactgtttaagtgactt

SEQ ID NO: 634983 - DNA, 33 bp, Homo sapien
tttaccaggggagaaactacatgccagtggcct

SEQ ID NO: 634984 - DNA, 33 bp, Homo sapien
tttaccaggggagaaagtacatgccagtggcct

SEQ ID NO: 634985 - DNA, 33 bp, Homo sapien
attatctgagtcctctaaagtctggccataagg

SEQ ID NO: 634986 - DNA, 33 bp, Homo sapien
attatctgagtcctctgaagtctggccataagg

SEQ ID NO: 634987 - DNA, 33 bp, Homo sapien
tcatatggttcatcccagaagacttgtaggcca

SEQ ID NO: 634988 - DNA, 33 bp, Homo sapien
tcatatggttcatcccggaagacttgtaggcca

SEQ ID NO: 634989 - DNA, 33 bp, Homo sapien
tgataataacaagaaacgcagcttgaattggcc

SEQ ID NO: 634990 - DNA, 33 bp, Homo sapien
tgataataacaagaaatgcagcttgaattggcc

SEQ ID NO: 634991 - DNA, 33 bp, Homo sapien
ttacaacatagaaagacaggtagaatgctgaag

SEQ ID NO: 634992 - DNA, 33 bp, Homo sapien
ttacaacatagaaagagaggtagaatgctgaag

SEQ ID NO: 634993 - DNA, 33 bp, Homo sapien
atagagcaatttaaagacatttgacaataataa

SEQ ID NO: 634994 - DNA, 33 bp, Homo sapien
atagagcaatttaaaggcatttgacaataataa

SEQ ID NO: 634995 - DNA, 33 bp, Homo sapien
taataggacagctataaaggttaaacaagataa

SEQ ID NO: 634996 - DNA, 33 bp, Homo sapien
taataggacagctatagaggttaaacaagataa

SEQ ID NO: 634997 - DNA, 33 bp, Homo sapien
cttgtccacctgtgtacatttgacaccaatgca

SEQ ID NO: 634998 - DNA, 33 bp, Homo sapien
cttgtccacctgtgtatatttgacaccaatgca

SEQ ID NO: 634999 - DNA, 33 bp, Homo sapien
atgtttaaactgcaccaattaaagaaaatcatc

SEQ ID NO: 635000 - DNA, 33 bp, Homo sapien
atgtttaaactgcaccgattaaagaaaatcatc

SEQ ID NO: 635001 - DNA, 33 bp, Homo sapien
taaagaaaatcatctgaacgttttgtccaagca

SEQ ID NO: 635002 - DNA, 33 bp, Homo sapien
taaagaaaatcatctggacgttttgtccaagca

SEQ ID NO: 635003 - DNA, 33 bp, Homo sapien
gttaagttgtgagaaaagccctcaagtggccga

SEQ ID NO: 635004 - DNA, 33 bp, Homo sapien
gttaagttgtgagaaaggccctcaagtggccga

SEQ ID NO: 635005 - DNA, 33 bp, Homo sapien
atccaggataataaagccaaccaattaacttca

SEQ ID NO: 635006 - DNA, 33 bp, Homo sapien
atccaggataataaagtcaaccaattaacttca

SEQ ID NO: 635007 - DNA, 33 bp, Homo sapien
aatgactacaggcaaaagacgccgtctccctgc

SEQ ID NO: 635008 - DNA, 33 bp, Homo sapien
aatgactacaggcaaaggacgccgtctccctgc

SEQ ID NO: 635009 - DNA, 33 bp, Homo sapien
atttgtggtcagtaaaagcagggttctgggtga

SEQ ID NO: 635010 - DNA, 33 bp, Homo sapien
atttgtggtcagtaaaggcagggttctgggtga

SEQ ID NO: 635011 - DNA, 33 bp, Homo sapien
atttgtagctctgtccaccaatactccaaatgt

SEQ ID NO: 635012 - DNA, 33 bp, Homo sapien
atttgtagctctgtccgccaatactccaaatgt

SEQ ID NO: 635013 - DNA, 33 bp, Homo sapien
tccatcgtacttaaaccatgatagaatgtctcc

SEQ ID NO: 635014 - DNA, 33 bp, Homo sapien
tccatcgtacttaaactatgatagaatgtctcc

SEQ ID NO: 635015 - DNA, 33 bp, Homo sapien
ccctgatccccatttcaatttctgtgcacttgt

SEQ ID NO: 635016 - DNA, 33 bp, Homo sapien
ccctgatccccatttcgatttctgtgcacttgt

SEQ ID NO: 635017 - DNA, 33 bp, Homo sapien
gaacttagccagtgtacctagagccagaggtgg

SEQ ID NO: 635018 - DNA, 33 bp, Homo sapien
gaacttagccagtgtagctagagccagaggtgg

SEQ ID NO: 635019 - DNA, 33 bp, Homo sapien
cagctgtgatcgtgaaacaactctgtcatcaat

SEQ ID NO: 635020 - DNA, 33 bp, Homo sapien
cagctgtgatcgtgaagcaactctgtcatcaat

SEQ ID NO: 635021 - DNA, 33 bp, Homo sapien
acagcactgaactgcaatatttttgtcccagtc

SEQ ID NO: 635022 - DNA, 33 bp, Homo sapien
acagcactgaactgcagtatttttgtcccagtc

SEQ ID NO: 635023 - DNA, 33 bp, Homo sapien
ggacgataagcatcagaaaactctagattcaaa

SEQ ID NO: 635024 - DNA, 33 bp, Homo sapien
ggacgataagcatcaggaaactctagattcaaa

SEQ ID NO: 635025 - DNA, 33 bp, Homo sapien
attgcaggtatacttacactgtgacattcattt

SEQ ID NO: 635026 - DNA, 33 bp, Homo sapien
attgcaggtatacttatactgtgacattcattt

SEQ ID NO: 635027 - DNA, 33 bp, Homo sapien
ctgtgctgatagggaacaatcacagagaagcag

SEQ ID NO: 635028 - DNA, 33 bp, Homo sapien
ctgtgctgatagggaataatcacagagaagcag

SEQ ID NO: 635029 - DNA, 33 bp, Homo sapien
tcccattttatgactaagaacactgagcctttg

SEQ ID NO: 635030 - DNA, 33 bp, Homo sapien
tcccattttatgactaggaacactgagcctttg

SEQ ID NO: 635031 - DNA, 33 bp, Homo sapien
cacatctcttcttatccagtcaaaggtaaattg

SEQ ID NO: 635032 - DNA, 33 bp, Homo sapien
cacatctcttcttatctagtcaaaggtaaattg

SEQ ID NO: 635033 - DNA, 33 bp, Homo sapien
aattagaaattagcaaacctaccaaaccaatgt

SEQ ID NO: 635034 - DNA, 33 bp, Homo sapien
aattagaaattagcaagcctaccaaaccaatgt

SEQ ID NO: 635035 - DNA, 33 bp, Homo sapien
cgattacttcttagaacgaaaatagaggccaat

SEQ ID NO: 635036 - DNA, 33 bp, Homo sapien
cgattacttcttagaatgaaaatagaggccaat

SEQ ID NO: 635037 - DNA, 33 bp, Homo sapien
agggctagctgatccaaaggcggatagtagatg

SEQ ID NO: 635038 - DNA, 33 bp, Homo sapien
agggctagctgatccagaggcggatagtagatg

SEQ ID NO: 635039 - DNA, 33 bp, Homo sapien
acttaactcgctctcaccatgatagcataaggt

SEQ ID NO: 635040 - DNA, 33 bp, Homo sapien
acttaactcgctctcagcatgatagcataaggt

SEQ ID NO: 635041 - DNA, 33 bp, Homo sapien
cctagagattggagaaaatttccatggaaagat

SEQ ID NO: 635042 - DNA, 33 bp, Homo sapien
cctagagattggagaacatttccatggaaagat

SEQ ID NO: 635043 - DNA, 33 bp, Homo sapien
ttttcctgtctctctccaatagtctaatagtgt

SEQ ID NO: 635044 - DNA, 33 bp, Homo sapien
ttttcctgtctctctctaatagtctaatagtgt

SEQ ID NO: 635045 - DNA, 33 bp, Homo sapien
tctgtacgacaactacaacatacatattttgat

SEQ ID NO: 635046 - DNA, 33 bp, Homo sapien
tctgtacgacaactacgacatacatattttgat

SEQ ID NO: 635047 - DNA, 33 bp, Homo sapien
accttgcatggtactcaccaaatgaggatctca

SEQ ID NO: 635048 - DNA, 33 bp, Homo sapien
accttgcatggtactcgccaaatgaggatctca

SEQ ID NO: 635049 - DNA, 33 bp, Homo sapien
cggcagcagtgtctcacgtaaaatacaacaata

SEQ ID NO: 635050 - DNA, 33 bp, Homo sapien
cggcagcagtgtctcaggtaaaatacaacaata

SEQ ID NO: 635051 - DNA, 33 bp, Homo sapien
gtaagattagaggacacagtatacctgtaagcc

SEQ ID NO: 635052 - DNA, 33 bp, Homo sapien
gtaagattagaggacatagtatacctgtaagcc

SEQ ID NO: 635053 - DNA, 33 bp, Homo sapien
actcttcctggcaataataattataggtgaaga

SEQ ID NO: 635054 - DNA, 33 bp, Homo sapien
actcttcctggcaatattaattataggtgaaga

SEQ ID NO: 635055 - DNA, 33 bp, Homo sapien
aaggagaacagttagaactcattgcaataataa

SEQ ID NO: 635056 - DNA, 33 bp, Homo sapien
aaggagaacagttagagctcattgcaataataa

SEQ ID NO: 635057 - DNA, 33 bp, Homo sapien
tttcattacatacctacgaaagttgctgaaaat

SEQ ID NO: 635058 - DNA, 33 bp, Homo sapien
tttcattacatacctatgaaagttgctgaaaat

SEQ ID NO: 635059 - DNA, 33 bp, Homo sapien
cacaaatctgcttgtgaaatatttcctgtattc

SEQ ID NO: 635060 - DNA, 33 bp, Homo sapien
cacaaatctgcttgtgtaatatttcctgtattc

SEQ ID NO: 635061 - DNA, 33 bp, Homo sapien
agtgaaacttgagtaagtatccatgttgtgtgt

SEQ ID NO: 635062 - DNA, 33 bp, Homo sapien
agtgaaacttgagtaattatccatgttgtgtgt

SEQ ID NO: 635063 - DNA, 33 bp, Homo sapien
aatataccatgtagatcagacaatggtgctgtg

SEQ ID NO: 635064 - DNA, 33 bp, Homo sapien
aatataccatgtagatgagacaatggtgctgtg

SEQ ID NO: 635065 - DNA, 33 bp, Homo sapien
ctggctcttaaccagaaaaaattgctgacccct

SEQ ID NO: 635066 - DNA, 33 bp, Homo sapien
ctggctcttaaccagagaaaattgctgacccct

SEQ ID NO: 635067 - DNA, 33 bp, Homo sapien
ctcatgcccatacatacagaaaaacagcactct

SEQ ID NO: 635068 - DNA, 33 bp, Homo sapien
ctcatgcccatacatatagaaaaacagcactct

SEQ ID NO: 635069 - DNA, 33 bp, Homo sapien
agttagagacaaagtcacaagtcagtctccttt

SEQ ID NO: 635070 - DNA, 33 bp, Homo sapien
agttagagacaaagtcgcaagtcagtctccttt

SEQ ID NO: 635071 - DNA, 33 bp, Homo sapien
gcacttagtagccagaacaacactgaagtgcta

SEQ ID NO: 635072 - DNA, 33 bp, Homo sapien
gcacttagtagccagagcaacactgaagtgcta

SEQ ID NO: 635073 - DNA, 33 bp, Homo sapien
tgcctgactgcaaagaaaacaagtaagaattca

SEQ ID NO: 635074 - DNA, 33 bp, Homo sapien
tgcctgactgcaaagagaacaagtaagaattca

SEQ ID NO: 635075 - DNA, 33 bp, Homo sapien
gcaatcagtaaggaggacatctaattagcagct

SEQ ID NO: 635076 - DNA, 33 bp, Homo sapien
gcaatcagtaaggaggccatctaattagcagct

SEQ ID NO: 635077 - DNA, 33 bp, Homo sapien
ctacaggtgtgtgatgcactaaactaagaaggt

SEQ ID NO: 635078 - DNA, 33 bp, Homo sapien
ctacaggtgtgtgatggactaaactaagaaggt

SEQ ID NO: 635079 - DNA, 33 bp, Homo sapien
aggactcattgcatcagctgtcatctagggatg

SEQ ID NO: 635080 - DNA, 33 bp, Homo sapien
aggactcattgcatcatctgtcatctagggatg

SEQ ID NO: 635081 - DNA, 33 bp, Homo sapien
aggtgttgacatctggaaataagccattccccg

SEQ ID NO: 635082 - DNA, 33 bp, Homo sapien
aggtgttgacatctggcaataagccattccccg

SEQ ID NO: 635083 - DNA, 33 bp, Homo sapien
tgggaaacactgtgtacgacatgactctttttc

SEQ ID NO: 635084 - DNA, 33 bp, Homo sapien
tgggaaacactgtgtatgacatgactctttttc

SEQ ID NO: 635085 - DNA, 33 bp, Homo sapien
tttaatcttagtgatacccaagcaggaacttca

SEQ ID NO: 635086 - DNA, 33 bp, Homo sapien
tttaatcttagtgatatccaagcaggaacttca

SEQ ID NO: 635087 - DNA, 33 bp, Homo sapien
attttatcctgcaccaaaatttcacataccaac

SEQ ID NO: 635088 - DNA, 33 bp, Homo sapien
attttatcctgcaccataatttcacataccaac

SEQ ID NO: 635089 - DNA, 33 bp, Homo sapien
cttaaaccttcatgcaagtttttagaacaagag

SEQ ID NO: 635090 - DNA, 33 bp, Homo sapien
cttaaaccttcatgcaggtttttagaacaagag

SEQ ID NO: 635091 - DNA, 33 bp, Homo sapien
cctggttcttctaaacaaaactcagaaaatgtc

SEQ ID NO: 635092 - DNA, 33 bp, Homo sapien
cctggttcttctaaacgaaactcagaaaatgtc

SEQ ID NO: 635093 - DNA, 33 bp, Homo sapien
tctttgggtccaatacacatattccaacccact

SEQ ID NO: 635094 - DNA, 33 bp, Homo sapien
tctttgggtccaatacgcatattccaacccact

SEQ ID NO: 635095 - DNA, 33 bp, Homo sapien
caaatcagcttccttccaacaaaactacatttc

SEQ ID NO: 635096 - DNA, 33 bp, Homo sapien
caaatcagcttccttcgaacaaaactacatttc

SEQ ID NO: 635097 - DNA, 33 bp, Homo sapien
ccgcattttggttccacccttctttgcagaaac

SEQ ID NO: 635098 - DNA, 33 bp, Homo sapien
ccgcattttggttccatccttctttgcagaaac

SEQ ID NO: 635099 - DNA, 33 bp, Homo sapien
atgagctataacactcactgtggaggtctgtgg

SEQ ID NO: 635100 - DNA, 33 bp, Homo sapien
atgagctataacactcgctgtggaggtctgtgg

SEQ ID NO: 635101 - DNA, 33 bp, Homo sapien
ccttgccttgaagggcacccagagagtgttcct

SEQ ID NO: 635102 - DNA, 33 bp, Homo sapien
ccttgccttgaagggctcccagagagtgttcct

SEQ ID NO: 635103 - DNA, 33 bp, Homo sapien
gggctggaggaaaaaaagttgccacaaggaaca

SEQ ID NO: 635104 - DNA, 33 bp, Homo sapien
gggctggaggaaaaaatgttgccacaaggaaca

SEQ ID NO: 635105 - DNA, 33 bp, Homo sapien
tttaggttcagctttacaaggtgttaataggcc

SEQ ID NO: 635106 - DNA, 33 bp, Homo sapien
tttaggttcagctttagaaggtgttaataggcc

SEQ ID NO: 635107 - DNA, 33 bp, Homo sapien
acaaggaactcaaaacagtggattttccagttt

SEQ ID NO: 635108 - DNA, 33 bp, Homo sapien
acaaggaactcaaaacggtggattttccagttt

SEQ ID NO: 635109 - DNA, 33 bp, Homo sapien
gcagctagttagctcacatcaaatcaagaactt

SEQ ID NO: 635110 - DNA, 33 bp, Homo sapien
gcagctagttagctcatatcaaatcaagaactt

SEQ ID NO: 635111 - DNA, 33 bp, Homo sapien
tacctacacacatagacgggaagtacaaaaggc

SEQ ID NO: 635112 - DNA, 33 bp, Homo sapien
tacctacacacatagatgggaagtacaaaaggc

SEQ ID NO: 635113 - DNA, 33 bp, Homo sapien
ggtgagctccagaggaaaatttcttgagaatat

SEQ ID NO: 635114 - DNA, 33 bp, Homo sapien
ggtgagctccagaggacaatttcttgagaatat

SEQ ID NO: 635115 - DNA, 33 bp, Homo sapien
agggaggaagccacataatattctcaagaaatt

SEQ ID NO: 635116 - DNA, 33 bp, Homo sapien
agggaggaagccacatgatattctcaagaaatt

SEQ ID NO: 635117 - DNA, 33 bp, Homo sapien
acactaatatcagggaaattttgagaggcaatg

SEQ ID NO: 635118 - DNA, 33 bp, Homo sapien
acactaatatcagggagattttgagaggcaatg

SEQ ID NO: 635119 - DNA, 33 bp, Homo sapien
cttcgaccaatgtaaccattccagactgtcaga

SEQ ID NO: 635120 - DNA, 33 bp, Homo sapien
cttcgaccaatgtaactattccagactgtcaga

SEQ ID NO: 635121 - DNA, 33 bp, Homo sapien
aaattctggcctgaagacctgtcagccaacatc

SEQ ID NO: 635122 - DNA, 33 bp, Homo sapien
aaattctggcctgaagtcctgtcagccaacatc

SEQ ID NO: 635123 - DNA, 33 bp, Homo sapien
catactcctgctagacccttctgtgtcattaat

SEQ ID NO: 635124 - DNA, 33 bp, Homo sapien
catactcctgctagactcttctgtgtcattaat

SEQ ID NO: 635125 - DNA, 33 bp, Homo sapien
ctcaggcatccgtaatcatgggaattctaggta

SEQ ID NO: 635126 - DNA, 33 bp, Homo sapien
ctcaggcatccgtaatgatgggaattctaggta

SEQ ID NO: 635127 - DNA, 33 bp, Homo sapien
ccaaaagcatctttaacggcggaatattagaat

SEQ ID NO: 635128 - DNA, 33 bp, Homo sapien
ccaaaagcatctttaatggcggaatattagaat

SEQ ID NO: 635129 - DNA, 33 bp, Homo sapien
ttgaacctaatttaaaccatatgtcactaataa

SEQ ID NO: 635130 - DNA, 33 bp, Homo sapien
ttgaacctaatttaaatcatatgtcactaataa

SEQ ID NO: 635131 - DNA, 33 bp, Homo sapien
atcaataagtagcaaaagcataaaaatgtacca

SEQ ID NO: 635132 - DNA, 33 bp, Homo sapien
atcaataagtagcaaaggcataaaaatgtacca

SEQ ID NO: 635133 - DNA, 33 bp, Homo sapien
agacgtgggaagaccaatgcagaacgtgtgtcc

SEQ ID NO: 635134 - DNA, 33 bp, Homo sapien
agacgtgggaagaccagtgcagaacgtgtgtcc

SEQ ID NO: 635135 - DNA, 33 bp, Homo sapien
gggtctatccttaccccaaccttcgctgctgct

SEQ ID NO: 635136 - DNA, 33 bp, Homo sapien
gggtctatccttaccctaaccttcgctgctgct

SEQ ID NO: 635137 - DNA, 33 bp, Homo sapien
gtgagcagctcttgtcaagtccttattttattt

SEQ ID NO: 635138 - DNA, 33 bp, Homo sapien
gtgagcagctcttgtcgagtccttattttattt

SEQ ID NO: 635139 - DNA, 33 bp, Homo sapien
gctcttacaagcagaacgtcagactaatgatga

SEQ ID NO: 635140 - DNA, 33 bp, Homo sapien
gctcttacaagcagaatgtcagactaatgatga

SEQ ID NO: 635141 - DNA, 33 bp, Homo sapien
aggtttttgtttcatacacagcgacaaagaaaa

SEQ ID NO: 635142 - DNA, 33 bp, Homo sapien
aggtttttgtttcatatacagcgacaaagaaaa

SEQ ID NO: 635143 - DNA, 33 bp, Homo sapien
actaactacaaccccaaataattattgctatct

SEQ ID NO: 635144 - DNA, 33 bp, Homo sapien
actaactacaaccccagataattattgctatct

SEQ ID NO: 635145 - DNA, 33 bp, Homo sapien
acctgaggtaacataactcagggttcccgaggc

SEQ ID NO: 635146 - DNA, 33 bp, Homo sapien
acctgaggtaacataattcagggttcccgaggc

SEQ ID NO: 635147 - DNA, 33 bp, Homo sapien
ctcatcttgcactgtacctcctgtaattcccac

SEQ ID NO: 635148 - DNA, 33 bp, Homo sapien
ctcatcttgcactgtagctcctgtaattcccac

SEQ ID NO: 635149 - DNA, 33 bp, Homo sapien
atgggtgacgtacagcaacgttggaccatctgg

SEQ ID NO: 635150 - DNA, 33 bp, Homo sapien
atgggtgacgtacagccacgttggaccatctgg

SEQ ID NO: 635151 - DNA, 33 bp, Homo sapien
tgaaatcatgaatgagcagcatcgtgcaacaga

SEQ ID NO: 635152 - DNA, 33 bp, Homo sapien
tgaaatcatgaatgagtagcatcgtgcaacaga

SEQ ID NO: 635153 - DNA, 33 bp, Homo sapien
ctctaactctaaataaatgacataactgaacat

SEQ ID NO: 635154 - DNA, 33 bp, Homo sapien
ctctaactctaaataagtgacataactgaacat

SEQ ID NO: 635155 - DNA, 33 bp, Homo sapien
atcaagaactacgtggagacaaaagtgctataa

SEQ ID NO: 635156 - DNA, 33 bp, Homo sapien
atcaagaactacgtggtgacaaaagtgctataa

SEQ ID NO: 635157 - DNA, 33 bp, Homo sapien
taatctgccttctctacgttctgcacattaaag

SEQ ID NO: 635158 - DNA, 33 bp, Homo sapien
taatctgccttctctatgttctgcacattaaag

SEQ ID NO: 635159 - DNA, 33 bp, Homo sapien
ccattattctctgaaaccccgggcaagaaactt

SEQ ID NO: 635160 - DNA, 33 bp, Homo sapien
ccattattctctgaaatcccgggcaagaaactt

SEQ ID NO: 635161 - DNA, 33 bp, Homo sapien
atacacctaaaaaaaactggctaactgaatttg

SEQ ID NO: 635162 - DNA, 33 bp, Homo sapien
atacacctaaaaaaaattggctaactgaatttg

SEQ ID NO: 635163 - DNA, 33 bp, Homo sapien
tctagctcatagtacaatacggccaggactagg

SEQ ID NO: 635164 - DNA, 33 bp, Homo sapien
tctagctcatagtacagtacggccaggactagg

SEQ ID NO: 635165 - DNA, 33 bp, Homo sapien
ttgaatgcttttgtaccaatcagcttggaaaac

SEQ ID NO: 635166 - DNA, 33 bp, Homo sapien
ttgaatgcttttgtactaatcagcttggaaaac

SEQ ID NO: 635167 - DNA, 33 bp, Homo sapien
tgtatctaggattccaagactccaatgttgaat

SEQ ID NO: 635168 - DNA, 33 bp, Homo sapien
tgtatctaggattccaggactccaatgttgaat

SEQ ID NO: 635169 - DNA, 33 bp, Homo sapien
tgtttgttatgtatgacaatttgcctaacctcc

SEQ ID NO: 635170 - DNA, 33 bp, Homo sapien
tgtttgttatgtatgagaatttgcctaacctcc

SEQ ID NO: 635171 - DNA, 33 bp, Homo sapien
tgtaattaggagaggacgatctttggcagtatg

SEQ ID NO: 635172 - DNA, 33 bp, Homo sapien
tgtaattaggagaggatgatctttggcagtatg

SEQ ID NO: 635173 - DNA, 33 bp, Homo sapien
ttagacttggcttctgaataaaattgtcagaga

SEQ ID NO: 635174 - DNA, 33 bp, Homo sapien
ttagacttggcttctggataaaattgtcagaga

SEQ ID NO: 635175 - DNA, 33 bp, Homo sapien
taacccactgcagcaacaactaactgactcctg

SEQ ID NO: 635176 - DNA, 33 bp, Homo sapien
taacccactgcagcaataactaactgactcctg

SEQ ID NO: 635177 - DNA, 33 bp, Homo sapien
atgcaatgggcaatgaatatctacgtacctgtt

SEQ ID NO: 635178 - DNA, 33 bp, Homo sapien
atgcaatgggcaatgagtatctacgtacctgtt

SEQ ID NO: 635179 - DNA, 33 bp, Homo sapien
agtcatgcaagcaagagggtcaacgtcagatac

SEQ ID NO: 635180 - DNA, 33 bp, Homo sapien
agtcatgcaagcaagatggtcaacgtcagatac

SEQ ID NO: 635181 - DNA, 33 bp, Homo sapien
cagctgtaatcttcatcagcaatgtctgtgatt

SEQ ID NO: 635182 - DNA, 33 bp, Homo sapien
cagctgtaatcttcattagcaatgtctgtgatt

SEQ ID NO: 635183 - DNA, 33 bp, Homo sapien
acagaaacctgtcagacggcatcctgtctccta

SEQ ID NO: 635184 - DNA, 33 bp, Homo sapien
acagaaacctgtcagatggcatcctgtctccta

SEQ ID NO: 635185 - DNA, 33 bp, Homo sapien
cagcatttcccactcaccatcgagccaaaattg

SEQ ID NO: 635186 - DNA, 33 bp, Homo sapien
cagcatttcccactcagcatcgagccaaaattg

SEQ ID NO: 635187 - DNA, 33 bp, Homo sapien
tcaggcagagcaaataaaaaagcatctgtaaca

SEQ ID NO: 635188 - DNA, 33 bp, Homo sapien
tcaggcagagcaaatacaaaagcatctgtaaca

SEQ ID NO: 635189 - DNA, 33 bp, Homo sapien
cagttagatgttccaaagtccaaaaggcaagtt

SEQ ID NO: 635190 - DNA, 33 bp, Homo sapien
cagttagatgttccaaggtccaaaaggcaagtt

SEQ ID NO: 635191 - DNA, 33 bp, Homo sapien
ctttataaaccatgaaaggccacttaactgtga

SEQ ID NO: 635192 - DNA, 33 bp, Homo sapien
ctttataaaccatgaagggccacttaactgtga

SEQ ID NO: 635193 - DNA, 33 bp, Homo sapien
ctgaagagagagttgaagaattaggtccaatat

SEQ ID NO: 635194 - DNA, 33 bp, Homo sapien
ctgaagagagagttgacgaattaggtccaatat

SEQ ID NO: 635195 - DNA, 33 bp, Homo sapien
gctttttcactctatcacaagctaatacctgga

SEQ ID NO: 635196 - DNA, 33 bp, Homo sapien
gctttttcactctatcgcaagctaatacctgga

SEQ ID NO: 635197 - DNA, 33 bp, Homo sapien
gccctgcttctaaccacccctaattgagagctg

SEQ ID NO: 635198 - DNA, 33 bp, Homo sapien
gccctgcttctaaccatccctaattgagagctg

SEQ ID NO: 635199 - DNA, 33 bp, Homo sapien
atactagaaggcctacgagaccatcttctttac

SEQ ID NO: 635200 - DNA, 33 bp, Homo sapien
atactagaaggcctactagaccatcttctttac

SEQ ID NO: 635201 - DNA, 33 bp, Homo sapien
ggaatctctaagcttacatcaccaatgtgagaa

SEQ ID NO: 635202 - DNA, 33 bp, Homo sapien
ggaatctctaagcttatatcaccaatgtgagaa

SEQ ID NO: 635203 - DNA, 33 bp, Homo sapien
tttttgtcctggcctacgataacctcaaactat

SEQ ID NO: 635204 - DNA, 33 bp, Homo sapien
tttttgtcctggcctatgataacctcaaactat

SEQ ID NO: 635205 - DNA, 33 bp, Homo sapien
gttaaaaattgatgtcaaatgatcagaatataa

SEQ ID NO: 635206 - DNA, 33 bp, Homo sapien
gttaaaaattgatgtcgaatgatcagaatataa

SEQ ID NO: 635207 - DNA, 33 bp, Homo sapien
cttttaatgtggaaaaatttctgaaaacactgc

SEQ ID NO: 635208 - DNA, 33 bp, Homo sapien
cttttaatgtggaaaactttctgaaaacactgc

SEQ ID NO: 635209 - DNA, 33 bp, Homo sapien
cgacttctagtgaccaaatctttcttggacttc

SEQ ID NO: 635210 - DNA, 33 bp, Homo sapien
cgacttctagtgaccacatctttcttggacttc

SEQ ID NO: 635211 - DNA, 33 bp, Homo sapien
cacgacagtctatccacatagcacaggtcagga

SEQ ID NO: 635212 - DNA, 33 bp, Homo sapien
cacgacagtctatccatatagcacaggtcagga

SEQ ID NO: 635213 - DNA, 33 bp, Homo sapien
ttcattttttatcatggaaatgcaaattaaagc

SEQ ID NO: 635214 - DNA, 33 bp, Homo sapien
ttcattttttatcatgtaaatgcaaattaaagc

SEQ ID NO: 635215 - DNA, 33 bp, Homo sapien
tgactgaaccacctcaataggctcccttccagc

SEQ ID NO: 635216 - DNA, 33 bp, Homo sapien
tgactgaaccacctcagtaggctcccttccagc

SEQ ID NO: 635217 - DNA, 33 bp, Homo sapien
tgctccatactagagactcatcctgtctgtgac

SEQ ID NO: 635218 - DNA, 33 bp, Homo sapien
tgctccatactagagattcatcctgtctgtgac

SEQ ID NO: 635219 - DNA, 33 bp, Homo sapien
actcaataggaatgaacgtctgaagagccctca

SEQ ID NO: 635220 - DNA, 33 bp, Homo sapien
actcaataggaatgaaggtctgaagagccctca

SEQ ID NO: 635221 - DNA, 33 bp, Homo sapien
aatttctctttcatgaaatctttccaggttgct

SEQ ID NO: 635222 - DNA, 33 bp, Homo sapien
aatttctctttcatgacatctttccaggttgct

SEQ ID NO: 635223 - DNA, 33 bp, Homo sapien
ttcctgactccaacacccctgctttaagccaat

SEQ ID NO: 635224 - DNA, 33 bp, Homo sapien
ttcctgactccaacactcctgctttaagccaat

SEQ ID NO: 635225 - DNA, 33 bp, Homo sapien
aagctagaggcagagagatcattcagcaacgag

SEQ ID NO: 635226 - DNA, 33 bp, Homo sapien
aagctagaggcagagatatcattcagcaacgag

SEQ ID NO: 635227 - DNA, 33 bp, Homo sapien
tacaggaatgtttataaatatcagactctgctt

SEQ ID NO: 635228 - DNA, 33 bp, Homo sapien
tacaggaatgtttatagatatcagactctgctt

SEQ ID NO: 635229 - DNA, 33 bp, Homo sapien
gttcagttggagaagaaggagcatcctgatagg

SEQ ID NO: 635230 - DNA, 33 bp, Homo sapien
gttcagttggagaagagggagcatcctgatagg

SEQ ID NO: 635231 - DNA, 33 bp, Homo sapien
aaatctaggtattgccaccaaagaggcagtgaa

SEQ ID NO: 635232 - DNA, 33 bp, Homo sapien
aaatctaggtattgccgccaaagaggcagtgaa

SEQ ID NO: 635233 - DNA, 33 bp, Homo sapien
aataaatgaataaatgaaagacatctgatatct

SEQ ID NO: 635234 - DNA, 33 bp, Homo sapien
aataaatgaataaatggaagacatctgatatct

SEQ ID NO: 635235 - DNA, 33 bp, Homo sapien
ataaaggcagtcatctcaacgacttttttaaga

SEQ ID NO: 635236 - DNA, 33 bp, Homo sapien
ataaaggcagtcatcttaacgacttttttaaga

SEQ ID NO: 635237 - DNA, 33 bp, Homo sapien
aatcaaaagaattataaaggcaactcgagtcat

SEQ ID NO: 635238 - DNA, 33 bp, Homo sapien
aatcaaaagaattatagaggcaactcgagtcat

SEQ ID NO: 635239 - DNA, 33 bp, Homo sapien
tgacagtttttactgcactttacattcatgttt

SEQ ID NO: 635240 - DNA, 33 bp, Homo sapien
tgacagtttttactgcgctttacattcatgttt

SEQ ID NO: 635241 - DNA, 33 bp, Homo sapien
acaagaagagcctttaaaattctggtttgaatc

SEQ ID NO: 635242 - DNA, 33 bp, Homo sapien
acaagaagagcctttagaattctggtttgaatc

SEQ ID NO: 635243 - DNA, 33 bp, Homo sapien
cctattccacataccacctaaaattcactacac

SEQ ID NO: 635244 - DNA, 33 bp, Homo sapien
cctattccacataccagctaaaattcactacac

SEQ ID NO: 635245 - DNA, 33 bp, Homo sapien
tggggaactgtgctcaatctgtagtttgtcttt

SEQ ID NO: 635246 - DNA, 33 bp, Homo sapien
tggggaactgtgctcattctgtagtttgtcttt

SEQ ID NO: 635247 - DNA, 33 bp, Homo sapien
tgcttcctccaatacaacacaagctcctgttga

SEQ ID NO: 635248 - DNA, 33 bp, Homo sapien
tgcttcctccaatacagcacaagctcctgttga

SEQ ID NO: 635249 - DNA, 33 bp, Homo sapien
ctcacacacgtggatgaagaatgaggagaagta

SEQ ID NO: 635250 - DNA, 33 bp, Homo sapien
ctcacacacgtggatggagaatgaggagaagta

SEQ ID NO: 635251 - DNA, 33 bp, Homo sapien
ccgctgaactcaacaacatctattccattgcct

SEQ ID NO: 635252 - DNA, 33 bp, Homo sapien
ccgctgaactcaacaatatctattccattgcct

SEQ ID NO: 635253 - DNA, 33 bp, Homo sapien
acacatcaatgaaataataaactcctggatgag

SEQ ID NO: 635254 - DNA, 33 bp, Homo sapien
acacatcaatgaaatagtaaactcctggatgag

SEQ ID NO: 635255 - DNA, 33 bp, Homo sapien
tctaaggaagaatgccaaagaatcagggtcaac

SEQ ID NO: 635256 - DNA, 33 bp, Homo sapien
tctaaggaagaatgccgaagaatcagggtcaac

SEQ ID NO: 635257 - DNA, 33 bp, Homo sapien
agtcttgatgggtcgaataagaggctacttttc

SEQ ID NO: 635258 - DNA, 33 bp, Homo sapien
agtcttgatgggtcgagtaagaggctacttttc

SEQ ID NO: 635259 - DNA, 33 bp, Homo sapien
aggaacactggcctcaataagtctcttgcgagg

SEQ ID NO: 635260 - DNA, 33 bp, Homo sapien
aggaacactggcctcagtaagtctcttgcgagg

SEQ ID NO: 635261 - DNA, 33 bp, Homo sapien
tatgctaaatgcctcccactcactcccatgcat

SEQ ID NO: 635262 - DNA, 33 bp, Homo sapien
tatgctaaatgcctccgactcactcccatgcat

SEQ ID NO: 635263 - DNA, 33 bp, Homo sapien
ggagaagcttggattaaaagaatggaagaaggg

SEQ ID NO: 635264 - DNA, 33 bp, Homo sapien
ggagaagcttggattagaagaatggaagaaggg

SEQ ID NO: 635265 - DNA, 33 bp, Homo sapien
gatcctagaatattcagagccttcagtaacctt

SEQ ID NO: 635266 - DNA, 33 bp, Homo sapien
gatcctagaatattcatagccttcagtaacctt

SEQ ID NO: 635267 - DNA, 33 bp, Homo sapien
gaagagaaataaatccagcaaagagggtttcat

SEQ ID NO: 635268 - DNA, 33 bp, Homo sapien
gaagagaaataaatccggcaaagagggtttcat

SEQ ID NO: 635269 - DNA, 33 bp, Homo sapien
gtactgatgacattccaaagaagattctcccgt

SEQ ID NO: 635270 - DNA, 33 bp, Homo sapien
gtactgatgacattccgaagaagattctcccgt

SEQ ID NO: 635271 - DNA, 33 bp, Homo sapien
cagagtggctctctgacccttgccatttctccc

SEQ ID NO: 635272 - DNA, 33 bp, Homo sapien
cagagtggctctctgatccttgccatttctccc

SEQ ID NO: 635273 - DNA, 33 bp, Homo sapien
tccctcttttgagttgctggaacataaatcatt

SEQ ID NO: 635274 - DNA, 33 bp, Homo sapien
tccctcttttgagttgttggaacataaatcatt

SEQ ID NO: 635275 - DNA, 33 bp, Homo sapien
ttctcttgtacctgtagcctaaagaaaatctat

SEQ ID NO: 635276 - DNA, 33 bp, Homo sapien
ttctcttgtacctgtatcctaaagaaaatctat

SEQ ID NO: 635277 - DNA, 33 bp, Homo sapien
gacagatccttgatgaagctggcaatcctttcg

SEQ ID NO: 635278 - DNA, 33 bp, Homo sapien
gacagatccttgatgaggctggcaatcctttcg

SEQ ID NO: 635279 - DNA, 33 bp, Homo sapien
gtgggtggggaaacagacaaatcgtataactag

SEQ ID NO: 635280 - DNA, 33 bp, Homo sapien
gtgggtggggaaacagccaaatcgtataactag

SEQ ID NO: 635281 - DNA, 33 bp, Homo sapien
aagacagcctctgttacagcacttgccatatcc

SEQ ID NO: 635282 - DNA, 33 bp, Homo sapien
aagacagcctctgttatagcacttgccatatcc

SEQ ID NO: 635283 - DNA, 33 bp, Homo sapien
catatatttaaagctacccagtaaagacttact

SEQ ID NO: 635284 - DNA, 33 bp, Homo sapien
catatatttaaagctatccagtaaagacttact

SEQ ID NO: 635285 - DNA, 33 bp, Homo sapien
tttctagctaaaaatcatgatcactaagtggtt

SEQ ID NO: 635286 - DNA, 33 bp, Homo sapien
tttctagctaaaaatcctgatcactaagtggtt

SEQ ID NO: 635287 - DNA, 33 bp, Homo sapien
tttatgcagtgtctaacgagctcatgcctagat

SEQ ID NO: 635288 - DNA, 33 bp, Homo sapien
tttatgcagtgtctaaggagctcatgcctagat

SEQ ID NO: 635289 - DNA, 33 bp, Homo sapien
ttcctggttattaggcaaccgtctgttattgtc

SEQ ID NO: 635290 - DNA, 33 bp, Homo sapien
ttcctggttattaggcgaccgtctgttattgtc

SEQ ID NO: 635291 - DNA, 33 bp, Homo sapien
catgggatgtctggcccacaaggcttgtcttag

SEQ ID NO: 635292 - DNA, 33 bp, Homo sapien
catgggatgtctggcctacaaggcttgtcttag

SEQ ID NO: 635293 - DNA, 33 bp, Homo sapien
aatgccaggggccagaactagcactggaacact

SEQ ID NO: 635294 - DNA, 33 bp, Homo sapien
aatgccaggggccagacctagcactggaacact

SEQ ID NO: 635295 - DNA, 33 bp, Homo sapien
gtagggaggttacacaccaaacggctgattctt

SEQ ID NO: 635296 - DNA, 33 bp, Homo sapien
gtagggaggttacacagcaaacggctgattctt

SEQ ID NO: 635297 - DNA, 33 bp, Homo sapien
tcaaaagcctttgcaaggaggctagctctatcc

SEQ ID NO: 635298 - DNA, 33 bp, Homo sapien
tcaaaagcctttgcaatgaggctagctctatcc

SEQ ID NO: 635299 - DNA, 33 bp, Homo sapien
tgccgtgcctgacacacagttaagtggtattta

SEQ ID NO: 635300 - DNA, 33 bp, Homo sapien
tgccgtgcctgacacatagttaagtggtattta

SEQ ID NO: 635301 - DNA, 33 bp, Homo sapien
cagcgagcactaaaaactccacagaggttgttt

SEQ ID NO: 635302 - DNA, 33 bp, Homo sapien
cagcgagcactaaaaattccacagaggttgttt

SEQ ID NO: 635303 - DNA, 33 bp, Homo sapien
actgtactataacagaacccaattgcttatcca

SEQ ID NO: 635304 - DNA, 33 bp, Homo sapien
actgtactataacagaccccaattgcttatcca

SEQ ID NO: 635305 - DNA, 33 bp, Homo sapien
catgctatgtaccctaaataaacctccacgaac

SEQ ID NO: 635306 - DNA, 33 bp, Homo sapien
catgctatgtaccctatataaacctccacgaac

SEQ ID NO: 635307 - DNA, 33 bp, Homo sapien
tgactggccaaggaaactgctttttgaataaat

SEQ ID NO: 635308 - DNA, 33 bp, Homo sapien
tgactggccaaggaaattgctttttgaataaat

SEQ ID NO: 635309 - DNA, 33 bp, Homo sapien
tataaaatacactgaaaacatgttcatatttgt

SEQ ID NO: 635310 - DNA, 33 bp, Homo sapien
tataaaatacactgaatacatgttcatatttgt

SEQ ID NO: 635311 - DNA, 33 bp, Homo sapien
tttaatagtcttctgcacctagcacaaagtagg

SEQ ID NO: 635312 - DNA, 33 bp, Homo sapien
tttaatagtcttctgcgcctagcacaaagtagg

SEQ ID NO: 635313 - DNA, 33 bp, Homo sapien
acactttggggctcaacgtttgcttactgggtc

SEQ ID NO: 635314 - DNA, 33 bp, Homo sapien
acactttggggctcaatgtttgcttactgggtc

SEQ ID NO: 635315 - DNA, 33 bp, Homo sapien
gctgagatgcttaagacgtactggagaaacagc

SEQ ID NO: 635316 - DNA, 33 bp, Homo sapien
gctgagatgcttaagatgtactggagaaacagc

SEQ ID NO: 635317 - DNA, 33 bp, Homo sapien
tatgatggaaaacaaacagaaatgatcatcctt

SEQ ID NO: 635318 - DNA, 33 bp, Homo sapien
tatgatggaaaacaaagagaaatgatcatcctt

SEQ ID NO: 635319 - DNA, 33 bp, Homo sapien
tcagcttctggttgaacgagggcatgataagtt

SEQ ID NO: 635320 - DNA, 33 bp, Homo sapien
tcagcttctggttgaatgagggcatgataagtt

SEQ ID NO: 635321 - DNA, 33 bp, Homo sapien
tggatctattccaggagatattcttggagaatt

SEQ ID NO: 635322 - DNA, 33 bp, Homo sapien
tggatctattccaggatatattcttggagaatt

SEQ ID NO: 635323 - DNA, 33 bp, Homo sapien
acttcacaacactctacggggggtttcaccctc

SEQ ID NO: 635324 - DNA, 33 bp, Homo sapien
acttcacaacactctatggggggtttcaccctc

SEQ ID NO: 635325 - DNA, 33 bp, Homo sapien
actttttagaatctgaccaaagctatgtatgac

SEQ ID NO: 635326 - DNA, 33 bp, Homo sapien
actttttagaatctgatcaaagctatgtatgac

SEQ ID NO: 635327 - DNA, 33 bp, Homo sapien
gaggtgggtgtgctaaaatggagatacaagcca

SEQ ID NO: 635328 - DNA, 33 bp, Homo sapien
gaggtgggtgtgctaacatggagatacaagcca

SEQ ID NO: 635329 - DNA, 33 bp, Homo sapien
tgtagattagtgaatgcagatcaacgaagcaca

SEQ ID NO: 635330 - DNA, 33 bp, Homo sapien
tgtagattagtgaatgtagatcaacgaagcaca

SEQ ID NO: 635331 - DNA, 33 bp, Homo sapien
gactgccacaacgaacacatttgtaggctttcc

SEQ ID NO: 635332 - DNA, 33 bp, Homo sapien
gactgccacaacgaacgcatttgtaggctttcc

SEQ ID NO: 635333 - DNA, 33 bp, Homo sapien
agacactagagggtccaaaaagctgcgtatctt

SEQ ID NO: 635334 - DNA, 33 bp, Homo sapien
agacactagagggtccgaaaagctgcgtatctt

SEQ ID NO: 635335 - DNA, 33 bp, Homo sapien
tttaaagtattgaggaatcatttgggatggggc

SEQ ID NO: 635336 - DNA, 33 bp, Homo sapien
tttaaagtattgaggattcatttgggatggggc

SEQ ID NO: 635337 - DNA, 33 bp, Homo sapien
gacaagccgttttacaagggcctggtagtcaca

SEQ ID NO: 635338 - DNA, 33 bp, Homo sapien
gacaagccgttttacaggggcctggtagtcaca

SEQ ID NO: 635339 - DNA, 33 bp, Homo sapien
acttttaaaagggtcactccctggctggattaa

SEQ ID NO: 635340 - DNA, 33 bp, Homo sapien
acttttaaaagggtcattccctggctggattaa

SEQ ID NO: 635341 - DNA, 33 bp, Homo sapien
attgatccctgataaaattccaggcactggggg

SEQ ID NO: 635342 - DNA, 33 bp, Homo sapien
attgatccctgataaagttccaggcactggggg

SEQ ID NO: 635343 - DNA, 33 bp, Homo sapien
tagcctggctgaaggacgtctggcatatgagag

SEQ ID NO: 635344 - DNA, 33 bp, Homo sapien
tagcctggctgaaggatgtctggcatatgagag

SEQ ID NO: 635345 - DNA, 33 bp, Homo sapien
ctggacaacagagacaaaagagttaataatgtg

SEQ ID NO: 635346 - DNA, 33 bp, Homo sapien
ctggacaacagagacagaagagttaataatgtg

SEQ ID NO: 635347 - DNA, 33 bp, Homo sapien
gagattatgccattgaaagtaactgccatgttt

SEQ ID NO: 635348 - DNA, 33 bp, Homo sapien
gagattatgccattgacagtaactgccatgttt

SEQ ID NO: 635349 - DNA, 33 bp, Homo sapien
taaaggccacagataaagaaagtttaaccacaa

SEQ ID NO: 635350 - DNA, 33 bp, Homo sapien
taaaggccacagataatgaaagtttaaccacaa

SEQ ID NO: 635351 - DNA, 33 bp, Homo sapien
gcccaagttaagctacaggatcattgctgagcc

SEQ ID NO: 635352 - DNA, 33 bp, Homo sapien
gcccaagttaagctacgggatcattgctgagcc

SEQ ID NO: 635353 - DNA, 33 bp, Homo sapien
aactttgcacagaccacgctggcccaagttaag

SEQ ID NO: 635354 - DNA, 33 bp, Homo sapien
aactttgcacagaccatgctggcccaagttaag

SEQ ID NO: 635355 - DNA, 33 bp, Homo sapien
agtgacaaaggtacagcatttcacacaggaaca

SEQ ID NO: 635356 - DNA, 33 bp, Homo sapien
agtgacaaaggtacagtatttcacacaggaaca

SEQ ID NO: 635357 - DNA, 33 bp, Homo sapien
caggcaacaaattagacgttatgaaatgcttat

SEQ ID NO: 635358 - DNA, 33 bp, Homo sapien
caggcaacaaattagatgttatgaaatgcttat

SEQ ID NO: 635359 - DNA, 33 bp, Homo sapien
aaatggccattaaagaatcaataagaatatcaa

SEQ ID NO: 635360 - DNA, 33 bp, Homo sapien
aaatggccattaaagagtcaataagaatatcaa

SEQ ID NO: 635361 - DNA, 33 bp, Homo sapien
ggctctattctgtgcaactcttattccaagacc

SEQ ID NO: 635362 - DNA, 33 bp, Homo sapien
ggctctattctgtgcatctcttattccaagacc

SEQ ID NO: 635363 - DNA, 33 bp, Homo sapien
gacctgatataagtcaatattcatttaaaccag

SEQ ID NO: 635364 - DNA, 33 bp, Homo sapien
gacctgatataagtcagtattcatttaaaccag

SEQ ID NO: 635365 - DNA, 33 bp, Homo sapien
cttagttatccaaaccagcacaaatgtgtcaaa

SEQ ID NO: 635366 - DNA, 33 bp, Homo sapien
cttagttatccaaacctgcacaaatgtgtcaaa

SEQ ID NO: 635367 - DNA, 33 bp, Homo sapien
tcttggctctagcttacaatggccagtttgaaa

SEQ ID NO: 635368 - DNA, 33 bp, Homo sapien
tcttggctctagcttataatggccagtttgaaa

SEQ ID NO: 635369 - DNA, 33 bp, Homo sapien
caaagcattgcagctcaaattcagctcctgctc

SEQ ID NO: 635370 - DNA, 33 bp, Homo sapien
caaagcattgcagctcgaattcagctcctgctc

SEQ ID NO: 635371 - DNA, 33 bp, Homo sapien
gcctgtaatctgacataaaggcttcccattttt

SEQ ID NO: 635372 - DNA, 33 bp, Homo sapien
gcctgtaatctgacatgaaggcttcccattttt

SEQ ID NO: 635373 - DNA, 33 bp, Homo sapien
gctaattttcttttcacagtccattgataagta

SEQ ID NO: 635374 - DNA, 33 bp, Homo sapien
gctaattttcttttcagagtccattgataagta

SEQ ID NO: 635375 - DNA, 33 bp, Homo sapien
gcatctgtcttcttccgcacagtgtacttcagt

SEQ ID NO: 635376 - DNA, 33 bp, Homo sapien
gcatctgtcttcttcctcacagtgtacttcagt

SEQ ID NO: 635377 - DNA, 33 bp, Homo sapien
caacaatgacacaataaatgtcttagcctctag

SEQ ID NO: 635378 - DNA, 33 bp, Homo sapien
caacaatgacacaatagatgtcttagcctctag

SEQ ID NO: 635379 - DNA, 33 bp, Homo sapien
tgaagttccgtaaaaccatttcctatctctaaa

SEQ ID NO: 635380 - DNA, 33 bp, Homo sapien
tgaagttccgtaaaactatttcctatctctaaa

SEQ ID NO: 635381 - DNA, 33 bp, Homo sapien
ggagtcacgctatgggacagtaggaaaatccac

SEQ ID NO: 635382 - DNA, 33 bp, Homo sapien
ggagtcacgctatgggtcagtaggaaaatccac

SEQ ID NO: 635383 - DNA, 33 bp, Homo sapien
tcttcagacactgaaaatattgctgaagaaaca

SEQ ID NO: 635384 - DNA, 33 bp, Homo sapien
tcttcagacactgaaagtattgctgaagaaaca

SEQ ID NO: 635385 - DNA, 33 bp, Homo sapien
gagcaccatctttgggccaaaagcctggggaag

SEQ ID NO: 635386 - DNA, 33 bp, Homo sapien
gagcaccatctttggggcaaaagcctggggaag

SEQ ID NO: 635387 - DNA, 33 bp, Homo sapien
acgtgtgcagataacacagaagtaaaataccag

SEQ ID NO: 635388 - DNA, 33 bp, Homo sapien
acgtgtgcagataacatagaagtaaaataccag

SEQ ID NO: 635389 - DNA, 33 bp, Homo sapien
ccagctatgtccctcccgatgatgtaaaaatct

SEQ ID NO: 635390 - DNA, 33 bp, Homo sapien
ccagctatgtccctcctgatgatgtaaaaatct

SEQ ID NO: 635391 - DNA, 33 bp, Homo sapien
ctcctggttatgatgccaatgtttatgaagtgt

SEQ ID NO: 635392 - DNA, 33 bp, Homo sapien
ctcctggttatgatgctaatgtttatgaagtgt

SEQ ID NO: 635393 - DNA, 33 bp, Homo sapien
ccagttcactgattcaatcatataaagaactgt

SEQ ID NO: 635394 - DNA, 33 bp, Homo sapien
ccagttcactgattcagtcatataaagaactgt

SEQ ID NO: 635395 - DNA, 33 bp, Homo sapien
atgagatgatgtaggtcaaacactgaacttctc

SEQ ID NO: 635396 - DNA, 33 bp, Homo sapien
atgagatgatgtaggtgaaacactgaacttctc

SEQ ID NO: 635397 - DNA, 33 bp, Homo sapien
agattctaggttttaaaatttcagctttagttg

SEQ ID NO: 635398 - DNA, 33 bp, Homo sapien
agattctaggttttaacatttcagctttagttg

SEQ ID NO: 635399 - DNA, 33 bp, Homo sapien
tactttttgcttcttacgaataatcgttctgtg

SEQ ID NO: 635400 - DNA, 33 bp, Homo sapien
tactttttgcttcttatgaataatcgttctgtg

SEQ ID NO: 635401 - DNA, 33 bp, Homo sapien
aatcccctgtctgatacatggtttccaaatatg

SEQ ID NO: 635402 - DNA, 33 bp, Homo sapien
aatcccctgtctgatatatggtttccaaatatg

SEQ ID NO: 635403 - DNA, 33 bp, Homo sapien
cttatgtattttggaacttaatcccctgtctga

SEQ ID NO: 635404 - DNA, 33 bp, Homo sapien
cttatgtattttggaatttaatcccctgtctga

SEQ ID NO: 635405 - DNA, 33 bp, Homo sapien
cccatgtgtagcaggccaatatttcaaagtaat

SEQ ID NO: 635406 - DNA, 33 bp, Homo sapien
cccatgtgtagcaggctaatatttcaaagtaat

SEQ ID NO: 635407 - DNA, 33 bp, Homo sapien
gctgaatgcacattcaatctactcttagagtct

SEQ ID NO: 635408 - DNA, 33 bp, Homo sapien
gctgaatgcacattcagtctactcttagagtct

SEQ ID NO: 635409 - DNA, 33 bp, Homo sapien
actttgctaagacctgaaggaaattaggtgcct

SEQ ID NO: 635410 - DNA, 33 bp, Homo sapien
actttgctaagacctgcaggaaattaggtgcct

SEQ ID NO: 635411 - DNA, 33 bp, Homo sapien
tagctgctaccaaattcaacattaatggtagac

SEQ ID NO: 635412 - DNA, 33 bp, Homo sapien
tagctgctaccaaattgaacattaatggtagac

SEQ ID NO: 635413 - DNA, 33 bp, Homo sapien
tgaattctcgctccaaacagatacattccatca

SEQ ID NO: 635414 - DNA, 33 bp, Homo sapien
tgaattctcgctccaaccagatacattccatca

SEQ ID NO: 635415 - DNA, 33 bp, Homo sapien
gatccaagttcaacaacaaatatcatcagcaat

SEQ ID NO: 635416 - DNA, 33 bp, Homo sapien
gatccaagttcaacaataaatatcatcagcaat

SEQ ID NO: 635417 - DNA, 33 bp, Homo sapien
ataacaaatacagatgaaggatttgctgaaagc

SEQ ID NO: 635418 - DNA, 33 bp, Homo sapien
ataacaaatacagatgtaggatttgctgaaagc

SEQ ID NO: 635419 - DNA, 33 bp, Homo sapien
aaaacagatttggagactaattgatggtgggaa

SEQ ID NO: 635420 - DNA, 33 bp, Homo sapien
aaaacagatttggagagtaattgatggtgggaa

SEQ ID NO: 635421 - DNA, 33 bp, Homo sapien
ggtctaatgtacattaagttctattccaataat

SEQ ID NO: 635422 - DNA, 33 bp, Homo sapien
ggtctaatgtacattacgttctattccaataat

SEQ ID NO: 635423 - DNA, 33 bp, Homo sapien
agtaagttcaaatcccagtggcatctactaacc

SEQ ID NO: 635424 - DNA, 33 bp, Homo sapien
agtaagttcaaatcccggtggcatctactaacc

SEQ ID NO: 635425 - DNA, 33 bp, Homo sapien
aagtatgtcccccacacggtagagcagattaga

SEQ ID NO: 635426 - DNA, 33 bp, Homo sapien
aagtatgtcccccacatggtagagcagattaga

SEQ ID NO: 635427 - DNA, 33 bp, Homo sapien
ccagtctttgggatgacgatgagctactcaggc

SEQ ID NO: 635428 - DNA, 33 bp, Homo sapien
ccagtctttgggatgatgatgagctactcaggc

SEQ ID NO: 635429 - DNA, 33 bp, Homo sapien
gggcttctcatccagactaggaaagggagctgt

SEQ ID NO: 635430 - DNA, 33 bp, Homo sapien
gggcttctcatccagagtaggaaagggagctgt

SEQ ID NO: 635431 - DNA, 33 bp, Homo sapien
aactaaggccgaggaacgtggaatgaggaggtc

SEQ ID NO: 635432 - DNA, 33 bp, Homo sapien
aactaaggccgaggaatgtggaatgaggaggtc

SEQ ID NO: 635433 - DNA, 33 bp, Homo sapien
gacaagcttgtgctaactctctttccagtgcta

SEQ ID NO: 635434 - DNA, 33 bp, Homo sapien
gacaagcttgtgctaattctctttccagtgcta

SEQ ID NO: 635435 - DNA, 33 bp, Homo sapien
gatctcggcaaaactacgtgcttttgaggatgt

SEQ ID NO: 635436 - DNA, 33 bp, Homo sapien
gatctcggcaaaactatgtgcttttgaggatgt

SEQ ID NO: 635437 - DNA, 33 bp, Homo sapien
aggaaggtacaaaataatacagagagatccctg

SEQ ID NO: 635438 - DNA, 33 bp, Homo sapien
aggaaggtacaaaatagtacagagagatccctg

SEQ ID NO: 635439 - DNA, 33 bp, Homo sapien
cacacaaattagaaaaagtacaagaagtggata

SEQ ID NO: 635440 - DNA, 33 bp, Homo sapien
cacacaaattagaaaacgtacaagaagtggata

SEQ ID NO: 635441 - DNA, 33 bp, Homo sapien
tgtgcatagggagacactcactggaggaggagg

SEQ ID NO: 635442 - DNA, 33 bp, Homo sapien
tgtgcatagggagacattcactggaggaggagg

SEQ ID NO: 635443 - DNA, 33 bp, Homo sapien
gacgcctaccttggtccaaacacttgcagacat

SEQ ID NO: 635444 - DNA, 33 bp, Homo sapien
gacgcctaccttggtcgaaacacttgcagacat

SEQ ID NO: 635445 - DNA, 33 bp, Homo sapien
aaaggactatctttgacactctaagacgattct

SEQ ID NO: 635446 - DNA, 33 bp, Homo sapien
aaaggactatctttgagactctaagacgattct

SEQ ID NO: 635447 - DNA, 33 bp, Homo sapien
ttccagctatgaatcaatcaagcagtaagatcg

SEQ ID NO: 635448 - DNA, 33 bp, Homo sapien
ttccagctatgaatcagtcaagcagtaagatcg

SEQ ID NO: 635449 - DNA, 33 bp, Homo sapien
aaatgaaataataatacaacaactgaatccatc

SEQ ID NO: 635450 - DNA, 33 bp, Homo sapien
aaatgaaataataatagaacaactgaatccatc

SEQ ID NO: 635451 - DNA, 33 bp, Homo sapien
taatttgaggaactaacggtactagcatttaac

SEQ ID NO: 635452 - DNA, 33 bp, Homo sapien
taatttgaggaactaatggtactagcatttaac

SEQ ID NO: 635453 - DNA, 33 bp, Homo sapien
tgttgttgttgagcaacttgaattacttagttt

SEQ ID NO: 635454 - DNA, 33 bp, Homo sapien
tgttgttgttgagcaagttgaattacttagttt

SEQ ID NO: 635455 - DNA, 33 bp, Homo sapien
ggctaaatctaataaacctaaactccagtgcta

SEQ ID NO: 635456 - DNA, 33 bp, Homo sapien
ggctaaatctaataaatctaaactccagtgcta

SEQ ID NO: 635457 - DNA, 33 bp, Homo sapien
ttgctcttgtttgatacagccaagaggaggaaa

SEQ ID NO: 635458 - DNA, 33 bp, Homo sapien
ttgctcttgtttgatagagccaagaggaggaaa

SEQ ID NO: 635459 - DNA, 33 bp, Homo sapien
tgctgtaattcttcacaggctccaaaaagcaat

SEQ ID NO: 635460 - DNA, 33 bp, Homo sapien
tgctgtaattcttcacgggctccaaaaagcaat

SEQ ID NO: 635461 - DNA, 33 bp, Homo sapien
cttgctagctggtccacgagttacataatgatg

SEQ ID NO: 635462 - DNA, 33 bp, Homo sapien
cttgctagctggtccatgagttacataatgatg

SEQ ID NO: 635463 - DNA, 33 bp, Homo sapien
tgagttcacagcttaaagtcttcacagcaagtc

SEQ ID NO: 635464 - DNA, 33 bp, Homo sapien
tgagttcacagcttaaggtcttcacagcaagtc

SEQ ID NO: 635465 - DNA, 33 bp, Homo sapien
tacaattgacggtacaaagaatgcttctgcttg

SEQ ID NO: 635466 - DNA, 33 bp, Homo sapien
tacaattgacggtacagagaatgcttctgcttg

SEQ ID NO: 635467 - DNA, 33 bp, Homo sapien
acctaactcctcaaagccagagatattttttat

SEQ ID NO: 635468 - DNA, 33 bp, Homo sapien
acctaactcctcaaagtcagagatattttttat

SEQ ID NO: 635469 - DNA, 33 bp, Homo sapien
aatatgtgataagaaaccaatgagggcaatgct

SEQ ID NO: 635470 - DNA, 33 bp, Homo sapien
aatatgtgataagaaagcaatgagggcaatgct

SEQ ID NO: 635471 - DNA, 33 bp, Homo sapien
gattttgggatccataagaaaaaaaatgtcccc

SEQ ID NO: 635472 - DNA, 33 bp, Homo sapien
gattttgggatccataggaaaaaaaatgtcccc

SEQ ID NO: 635473 - DNA, 33 bp, Homo sapien
cccaaatgaactaaaccactgttttcataattt

SEQ ID NO: 635474 - DNA, 33 bp, Homo sapien
cccaaatgaactaaactactgttttcataattt

SEQ ID NO: 635475 - DNA, 33 bp, Homo sapien
aaaacaagagcctctaagtactgaagtgatagg

SEQ ID NO: 635476 - DNA, 33 bp, Homo sapien
aaaacaagagcctctacgtactgaagtgatagg

SEQ ID NO: 635477 - DNA, 33 bp, Homo sapien
aagagaaagaatatgaagttcagcatatctcct

SEQ ID NO: 635478 - DNA, 33 bp, Homo sapien
aagagaaagaatatgaggttcagcatatctcct

SEQ ID NO: 635479 - DNA, 33 bp, Homo sapien
ttgcttgaagcactaacattcttataaatgttt

SEQ ID NO: 635480 - DNA, 33 bp, Homo sapien
ttgcttgaagcactaatattcttataaatgttt

SEQ ID NO: 635481 - DNA, 33 bp, Homo sapien
tggtattggctaaacactgttcctaaagtcaat

SEQ ID NO: 635482 - DNA, 33 bp, Homo sapien
tggtattggctaaacattgttcctaaagtcaat

SEQ ID NO: 635483 - DNA, 33 bp, Homo sapien
atttgggctctgcaggacacatttgaagtcact

SEQ ID NO: 635484 - DNA, 33 bp, Homo sapien
atttgggctctgcagggcacatttgaagtcact

SEQ ID NO: 635485 - DNA, 33 bp, Homo sapien
ttccttgacatgtgcaaaccgcaaaggaagtga

SEQ ID NO: 635486 - DNA, 33 bp, Homo sapien
ttccttgacatgtgcagaccgcaaaggaagtga

SEQ ID NO: 635487 - DNA, 33 bp, Homo sapien
cagcagaagcagaggtcaagtaagtaggaagta

SEQ ID NO: 635488 - DNA, 33 bp, Homo sapien
cagcagaagcagaggttaagtaagtaggaagta

SEQ ID NO: 635489 - DNA, 33 bp, Homo sapien
ggcttccaatggcagacaaatttcctttcggga

SEQ ID NO: 635490 - DNA, 33 bp, Homo sapien
ggcttccaatggcagataaatttcctttcggga

SEQ ID NO: 635491 - DNA, 33 bp, Homo sapien
tattctacccgtaagaagtccaggtcgttaatg

SEQ ID NO: 635492 - DNA, 33 bp, Homo sapien
tattctacccgtaagacgtccaggtcgttaatg

SEQ ID NO: 635493 - DNA, 33 bp, Homo sapien
tgcttttcatcttcaactcactccttggtcgtt

SEQ ID NO: 635494 - DNA, 33 bp, Homo sapien
tgcttttcatcttcaagtcactccttggtcgtt

SEQ ID NO: 635495 - DNA, 33 bp, Homo sapien
tagagaggctgtttgcaaattggggtttgaggt

SEQ ID NO: 635496 - DNA, 33 bp, Homo sapien
tagagaggctgtttgccaattggggtttgaggt

SEQ ID NO: 635497 - DNA, 33 bp, Homo sapien
agaaagtgggtaataacctcagctcccagcagc

SEQ ID NO: 635498 - DNA, 33 bp, Homo sapien
agaaagtgggtaataagctcagctcccagcagc

SEQ ID NO: 635499 - DNA, 33 bp, Homo sapien
acacagctttatggaaagacacttggggccgtc

SEQ ID NO: 635500 - DNA, 33 bp, Homo sapien
acacagctttatggaaggacacttggggccgtc

SEQ ID NO: 635501 - DNA, 33 bp, Homo sapien
aagcatgcatttcccaagagtgagagagacatt

SEQ ID NO: 635502 - DNA, 33 bp, Homo sapien
aagcatgcatttcccatgagtgagagagacatt

SEQ ID NO: 635503 - DNA, 33 bp, Homo sapien
ggtggcttactaggcaatatttgctccataaaa

SEQ ID NO: 635504 - DNA, 33 bp, Homo sapien
ggtggcttactaggcagtatttgctccataaaa

SEQ ID NO: 635505 - DNA, 33 bp, Homo sapien
atttagtagccacaaaattaggatgggtttgaa

SEQ ID NO: 635506 - DNA, 33 bp, Homo sapien
atttagtagccacaaagttaggatgggtttgaa

SEQ ID NO: 635507 - DNA, 33 bp, Homo sapien
atattagtggccaattcaacctcagtagatgag

SEQ ID NO: 635508 - DNA, 33 bp, Homo sapien
atattagtggccaatttaacctcagtagatgag

SEQ ID NO: 635509 - DNA, 33 bp, Homo sapien
tccaaatggtatcatgcaaatcaaagttaacaa

SEQ ID NO: 635510 - DNA, 33 bp, Homo sapien
tccaaatggtatcatggaaatcaaagttaacaa

SEQ ID NO: 635511 - DNA, 33 bp, Homo sapien
agccttatcttgaggaggaaaatgattttcttt

SEQ ID NO: 635512 - DNA, 33 bp, Homo sapien
agccttatcttgaggatgaaaatgattttcttt

SEQ ID NO: 635513 - DNA, 33 bp, Homo sapien
ctttctgtacacatcaaatctttcctagaaatt

SEQ ID NO: 635514 - DNA, 33 bp, Homo sapien
ctttctgtacacatcagatctttcctagaaatt

SEQ ID NO: 635515 - DNA, 33 bp, Homo sapien
cagcagccccctacaactgcttcttatcactcc

SEQ ID NO: 635516 - DNA, 33 bp, Homo sapien
cagcagccccctacaagtgcttcttatcactcc

SEQ ID NO: 635517 - DNA, 33 bp, Homo sapien
tgtccgaacatttttagcctctggtgtatgcac

SEQ ID NO: 635518 - DNA, 33 bp, Homo sapien
tgtccgaacatttttatcctctggtgtatgcac

SEQ ID NO: 635519 - DNA, 33 bp, Homo sapien
accatgtactgaacatcaatacgtcagtttttc

SEQ ID NO: 635520 - DNA, 33 bp, Homo sapien
accatgtactgaacatgaatacgtcagtttttc

SEQ ID NO: 635521 - DNA, 33 bp, Homo sapien
ctaacggaacctctgacgccaaagtatgttaac

SEQ ID NO: 635522 - DNA, 33 bp, Homo sapien
ctaacggaacctctgatgccaaagtatgttaac

SEQ ID NO: 635523 - DNA, 33 bp, Homo sapien
catcttgaattaaagacagacaaaaggtaaggc

SEQ ID NO: 635524 - DNA, 33 bp, Homo sapien
catcttgaattaaagagagacaaaaggtaaggc

SEQ ID NO: 635525 - DNA, 33 bp, Homo sapien
catgcaagcttccaacaaagtccataagtgcta

SEQ ID NO: 635526 - DNA, 33 bp, Homo sapien
catgcaagcttccaacgaagtccataagtgcta

SEQ ID NO: 635527 - DNA, 33 bp, Homo sapien
ttgttggacagtctaactactgagaattatgga

SEQ ID NO: 635528 - DNA, 33 bp, Homo sapien
ttgttggacagtctaattactgagaattatgga

SEQ ID NO: 635529 - DNA, 33 bp, Homo sapien
gtaagccttaagcaaactcagagattctgcatc

SEQ ID NO: 635530 - DNA, 33 bp, Homo sapien
gtaagccttaagcaaattcagagattctgcatc

SEQ ID NO: 635531 - DNA, 33 bp, Homo sapien
tcaatcttctttgaccacacagttttttttctg

SEQ ID NO: 635532 - DNA, 33 bp, Homo sapien
tcaatcttctttgaccgcacagttttttttctg

SEQ ID NO: 635533 - DNA, 33 bp, Homo sapien
tctatcaggttttgaaattatggattccaaatt

SEQ ID NO: 635534 - DNA, 33 bp, Homo sapien
tctatcaggttttgaagttatggattccaaatt

SEQ ID NO: 635535 - DNA, 33 bp, Homo sapien
cttatgtcatttaagacactaaaaattccagtt

SEQ ID NO: 635536 - DNA, 33 bp, Homo sapien
cttatgtcatttaagagactaaaaattccagtt

SEQ ID NO: 635537 - DNA, 33 bp, Homo sapien
acagagcttaacatagaattggcctttaataaa

SEQ ID NO: 635538 - DNA, 33 bp, Homo sapien
acagagcttaacatagcattggcctttaataaa

SEQ ID NO: 635539 - DNA, 33 bp, Homo sapien
actggtctttccttcacacatcaaaagtagtgc

SEQ ID NO: 635540 - DNA, 33 bp, Homo sapien
actggtctttccttcatacatcaaaagtagtgc

SEQ ID NO: 635541 - DNA, 33 bp, Homo sapien
aaaagattttttaatgccataacaccgaagtca

SEQ ID NO: 635542 - DNA, 33 bp, Homo sapien
aaaagattttttaatggcataacaccgaagtca

SEQ ID NO: 635543 - DNA, 33 bp, Homo sapien
ctccagttctaacttacgactttttcaaaatat

SEQ ID NO: 635544 - DNA, 33 bp, Homo sapien
ctccagttctaacttaggactttttcaaaatat

SEQ ID NO: 635545 - DNA, 33 bp, Homo sapien
taaaggtgttggaatccgaactctatggcgtag

SEQ ID NO: 635546 - DNA, 33 bp, Homo sapien
taaaggtgttggaatctgaactctatggcgtag

SEQ ID NO: 635547 - DNA, 33 bp, Homo sapien
gattactaagtggacaatgcatggtttccgctt

SEQ ID NO: 635548 - DNA, 33 bp, Homo sapien
gattactaagtggacattgcatggtttccgctt

SEQ ID NO: 635549 - DNA, 33 bp, Homo sapien
gcattctcaatagaaaacaagtaatcataaatg

SEQ ID NO: 635550 - DNA, 33 bp, Homo sapien
gcattctcaatagaaatcaagtaatcataaatg

SEQ ID NO: 635551 - DNA, 33 bp, Homo sapien
cagtccactatttgctcaactacaagatggaga

SEQ ID NO: 635552 - DNA, 33 bp, Homo sapien
cagtccactatttgctgaactacaagatggaga

SEQ ID NO: 635553 - DNA, 33 bp, Homo sapien
tacagtgaccaacacacagtaaacattcagtaa

SEQ ID NO: 635554 - DNA, 33 bp, Homo sapien
tacagtgaccaacacatagtaaacattcagtaa

SEQ ID NO: 635555 - DNA, 33 bp, Homo sapien
agaagagggtcaaggtaaatggctttgctagtt

SEQ ID NO: 635556 - DNA, 33 bp, Homo sapien
agaagagggtcaaggtgaatggctttgctagtt

SEQ ID NO: 635557 - DNA, 33 bp, Homo sapien
ctgaaacatgttgacgaagatataccacggaca

SEQ ID NO: 635558 - DNA, 33 bp, Homo sapien
ctgaaacatgttgacggagatataccacggaca

SEQ ID NO: 635559 - DNA, 33 bp, Homo sapien
ggttctcagagagtcacgagagtcttatgaggt

SEQ ID NO: 635560 - DNA, 33 bp, Homo sapien
ggttctcagagagtcatgagagtcttatgaggt

SEQ ID NO: 635561 - DNA, 33 bp, Homo sapien
ttcaatcattcaagcaatatttatctagcaagg

SEQ ID NO: 635562 - DNA, 33 bp, Homo sapien
ttcaatcattcaagcagtatttatctagcaagg

SEQ ID NO: 635563 - DNA, 33 bp, Homo sapien
gctttaaattaacggaaattttattgcagaaaa

SEQ ID NO: 635564 - DNA, 33 bp, Homo sapien
gctttaaattaacggagattttattgcagaaaa

SEQ ID NO: 635565 - DNA, 33 bp, Homo sapien
catgtgctctctcccacacggtggcttcaaggt

SEQ ID NO: 635566 - DNA, 33 bp, Homo sapien
catgtgctctctcccatacggtggcttcaaggt

SEQ ID NO: 635567 - DNA, 33 bp, Homo sapien
gtccaatggaagatctcagaaccaaatgtattg

SEQ ID NO: 635568 - DNA, 33 bp, Homo sapien
gtccaatggaagatcttagaaccaaatgtattg

SEQ ID NO: 635569 - DNA, 33 bp, Homo sapien
ccaactgctcctcagactctcacttgcacaggg

SEQ ID NO: 635570 - DNA, 33 bp, Homo sapien
ccaactgctcctcagagtctcacttgcacaggg

SEQ ID NO: 635571 - DNA, 33 bp, Homo sapien
aaaggtgtacaaaaacacatctcttgcagatgg

SEQ ID NO: 635572 - DNA, 33 bp, Homo sapien
aaaggtgtacaaaaacgcatctcttgcagatgg

SEQ ID NO: 635573 - DNA, 33 bp, Homo sapien
gcttctaataaatttccaatgccttttcctggg

SEQ ID NO: 635574 - DNA, 33 bp, Homo sapien
gcttctaataaatttctaatgccttttcctggg

SEQ ID NO: 635575 - DNA, 33 bp, Homo sapien
acaatggtacctttccactttggggcattagac

SEQ ID NO: 635576 - DNA, 33 bp, Homo sapien
acaatggtacctttccgctttggggcattagac

SEQ ID NO: 635577 - DNA, 33 bp, Homo sapien
atgggtttgctgaatacagtagaaagacgtgac

SEQ ID NO: 635578 - DNA, 33 bp, Homo sapien
atgggtttgctgaatatagtagaaagacgtgac

SEQ ID NO: 635579 - DNA, 33 bp, Homo sapien
ttgatccagagacttgaaaatcacccatgatct

SEQ ID NO: 635580 - DNA, 33 bp, Homo sapien
ttgatccagagacttggaaatcacccatgatct

SEQ ID NO: 635581 - DNA, 33 bp, Homo sapien
tgatacttggaaaccacgttcatcagaagagtg

SEQ ID NO: 635582 - DNA, 33 bp, Homo sapien
tgatacttggaaaccatgttcatcagaagagtg

SEQ ID NO: 635583 - DNA, 33 bp, Homo sapien
agttttccacttgcatgagccgtatttcaaatg

SEQ ID NO: 635584 - DNA, 33 bp, Homo sapien
agttttccacttgcattagccgtatttcaaatg

SEQ ID NO: 635585 - DNA, 33 bp, Homo sapien
catatatatatgtcagaccataaacattttatt

SEQ ID NO: 635586 - DNA, 33 bp, Homo sapien
catatatatatgtcagtccataaacattttatt

SEQ ID NO: 635587 - DNA, 33 bp, Homo sapien
acctatggatctgctcacttaaaccattgaaat

SEQ ID NO: 635588 - DNA, 33 bp, Homo sapien
acctatggatctgctctcttaaaccattgaaat

SEQ ID NO: 635589 - DNA, 33 bp, Homo sapien
gtggtaaacatggataagtcagtgttctggctt

SEQ ID NO: 635590 - DNA, 33 bp, Homo sapien
gtggtaaacatggataggtcagtgttctggctt

SEQ ID NO: 635591 - DNA, 33 bp, Homo sapien
gttgataactgtgaaaatggttaaggtgaaagg

SEQ ID NO: 635592 - DNA, 33 bp, Homo sapien
gttgataactgtgaaagtggttaaggtgaaagg

SEQ ID NO: 635593 - DNA, 33 bp, Homo sapien
aggtgttaggaatgagaaatgggcaaactgagc

SEQ ID NO: 635594 - DNA, 33 bp, Homo sapien
aggtgttaggaatgagcaatgggcaaactgagc

SEQ ID NO: 635595 - DNA, 33 bp, Homo sapien
cttgtgagggaatggacgcaatagggagcaata

SEQ ID NO: 635596 - DNA, 33 bp, Homo sapien
cttgtgagggaatggaggcaatagggagcaata

SEQ ID NO: 635597 - DNA, 33 bp, Homo sapien
ccagttttattctgtacgccttttaggtaaatt

SEQ ID NO: 635598 - DNA, 33 bp, Homo sapien
ccagttttattctgtatgccttttaggtaaatt

SEQ ID NO: 635599 - DNA, 33 bp, Homo sapien
ggggctttgctgactacggtaaagtttatgtga

SEQ ID NO: 635600 - DNA, 33 bp, Homo sapien
ggggctttgctgactatggtaaagtttatgtga

SEQ ID NO: 635601 - DNA, 33 bp, Homo sapien
acatataagctgtgtaaaaaattatgaatagga

SEQ ID NO: 635602 - DNA, 33 bp, Homo sapien
acatataagctgtgtagaaaattatgaatagga

SEQ ID NO: 635603 - DNA, 33 bp, Homo sapien
aagaggccaatacagacacggttgcagtgcccg

SEQ ID NO: 635604 - DNA, 33 bp, Homo sapien
aagaggccaatacagatacggttgcagtgcccg

SEQ ID NO: 635605 - DNA, 33 bp, Homo sapien
agttcaccagatatacaaaataaccctgtattt

SEQ ID NO: 635606 - DNA, 33 bp, Homo sapien
agttcaccagatatacgaaataaccctgtattt

SEQ ID NO: 635607 - DNA, 33 bp, Homo sapien
tccaactctcctttgcccagaatagaagcttaa

SEQ ID NO: 635608 - DNA, 33 bp, Homo sapien
tccaactctcctttgctcagaatagaagcttaa

SEQ ID NO: 635609 - DNA, 33 bp, Homo sapien
ggattgaaagcatcaccgtgaattcataatttt

SEQ ID NO: 635610 - DNA, 33 bp, Homo sapien
ggattgaaagcatcactgtgaattcataatttt

SEQ ID NO: 635611 - DNA, 33 bp, Homo sapien
ctttcctggcaaggtcacaagaacagtcatcta

SEQ ID NO: 635612 - DNA, 33 bp, Homo sapien
ctttcctggcaaggtcgcaagaacagtcatcta

SEQ ID NO: 635613 - DNA, 33 bp, Homo sapien
ggaggagtgaaagagaaggctagagttctagtc

SEQ ID NO: 635614 - DNA, 33 bp, Homo sapien
ggaggagtgaaagagagggctagagttctagtc

SEQ ID NO: 635615 - DNA, 33 bp, Homo sapien
caaacttggagaagcactgcattcctctaagat

SEQ ID NO: 635616 - DNA, 33 bp, Homo sapien
caaacttggagaagcattgcattcctctaagat

SEQ ID NO: 635617 - DNA, 33 bp, Homo sapien
caaggctttgaagacacccatttatactgttgg

SEQ ID NO: 635618 - DNA, 33 bp, Homo sapien
caaggctttgaagacatccatttatactgttgg

SEQ ID NO: 635619 - DNA, 33 bp, Homo sapien
tgagttgagttttaagcaacttcaggatcactc

SEQ ID NO: 635620 - DNA, 33 bp, Homo sapien
tgagttgagttttaaggaacttcaggatcactc

SEQ ID NO: 635621 - DNA, 33 bp, Homo sapien
gggtaggatatgctggcatctcaatcaggatat

SEQ ID NO: 635622 - DNA, 33 bp, Homo sapien
gggtaggatatgctggtatctcaatcaggatat

SEQ ID NO: 635623 - DNA, 33 bp, Homo sapien
tagttaataaaccgcagcataattaaataagag

SEQ ID NO: 635624 - DNA, 33 bp, Homo sapien
tagttaataaaccgcatcataattaaataagag

SEQ ID NO: 635625 - DNA, 33 bp, Homo sapien
catttggtgggaaaggaaacattttcagaagag

SEQ ID NO: 635626 - DNA, 33 bp, Homo sapien
catttggtgggaaagggaacattttcagaagag

SEQ ID NO: 635627 - DNA, 33 bp, Homo sapien
acctccaaactcttccaactgctgcccattacc

SEQ ID NO: 635628 - DNA, 33 bp, Homo sapien
acctccaaactcttccgactgctgcccattacc

SEQ ID NO: 635629 - DNA, 33 bp, Homo sapien
ccaggcaaggacatatcagtttgttatctgaag

SEQ ID NO: 635630 - DNA, 33 bp, Homo sapien
ccaggcaaggacatatgagtttgttatctgaag

SEQ ID NO: 635631 - DNA, 33 bp, Homo sapien
gcaatgattgtctttacgtattgacttacttat

SEQ ID NO: 635632 - DNA, 33 bp, Homo sapien
gcaatgattgtctttatgtattgacttacttat

SEQ ID NO: 635633 - DNA, 33 bp, Homo sapien
ggggtacaatgccaaacaagataaacaagggct

SEQ ID NO: 635634 - DNA, 33 bp, Homo sapien
ggggtacaatgccaaagaagataaacaagggct

SEQ ID NO: 635635 - DNA, 33 bp, Homo sapien
gtaaacagtatctgtgcaatgaataaattaacg

SEQ ID NO: 635636 - DNA, 33 bp, Homo sapien
gtaaacagtatctgtggaatgaataaattaacg

SEQ ID NO: 635637 - DNA, 33 bp, Homo sapien
caccctcaaaactttacgcttctgcactaactg

SEQ ID NO: 635638 - DNA, 33 bp, Homo sapien
caccctcaaaactttatgcttctgcactaactg

SEQ ID NO: 635639 - DNA, 33 bp, Homo sapien
aaagaccattgtcactaacatcattacaggatt

SEQ ID NO: 635640 - DNA, 33 bp, Homo sapien
aaagaccattgtcacttacatcattacaggatt

SEQ ID NO: 635641 - DNA, 33 bp, Homo sapien
aaaaagctgaattttacatgcatttgacaacca

SEQ ID NO: 635642 - DNA, 33 bp, Homo sapien
aaaaagctgaattttatatgcatttgacaacca

SEQ ID NO: 635643 - DNA, 33 bp, Homo sapien
agcaccaagtgttacacataatggttatttcag

SEQ ID NO: 635644 - DNA, 33 bp, Homo sapien
agcaccaagtgttacatataatggttatttcag

SEQ ID NO: 635645 - DNA, 33 bp, Homo sapien
atagtagaataggttacagaatggcaaaaactt

SEQ ID NO: 635646 - DNA, 33 bp, Homo sapien
atagtagaataggttagagaatggcaaaaactt

SEQ ID NO: 635647 - DNA, 33 bp, Homo sapien
tcgagagagtcagtaacagtggcacatcaaggc

SEQ ID NO: 635648 - DNA, 33 bp, Homo sapien
tcgagagagtcagtaatagtggcacatcaaggc

SEQ ID NO: 635649 - DNA, 33 bp, Homo sapien
tcgactttgctcccccaatttgtaaaatgagaa

SEQ ID NO: 635650 - DNA, 33 bp, Homo sapien
tcgactttgctccccccatttgtaaaatgagaa

SEQ ID NO: 635651 - DNA, 33 bp, Homo sapien
tttttgatttgaaaaacagagatgatgatagca

SEQ ID NO: 635652 - DNA, 33 bp, Homo sapien
tttttgatttgaaaaatagagatgatgatagca

SEQ ID NO: 635653 - DNA, 33 bp, Homo sapien
ttctgttgtgaatcaaattctgttggttgatac

SEQ ID NO: 635654 - DNA, 33 bp, Homo sapien
ttctgttgtgaatcaagttctgttggttgatac

SEQ ID NO: 635655 - DNA, 33 bp, Homo sapien
aattacacaagcgatcccatctagatttacaag

SEQ ID NO: 635656 - DNA, 33 bp, Homo sapien
aattacacaagcgatctcatctagatttacaag

SEQ ID NO: 635657 - DNA, 33 bp, Homo sapien
agttctttgcacataacagacattcattttgca

SEQ ID NO: 635658 - DNA, 33 bp, Homo sapien
agttctttgcacataatagacattcattttgca

SEQ ID NO: 635659 - DNA, 33 bp, Homo sapien
acacttgttgaattcactcagaggaaattcttt

SEQ ID NO: 635660 - DNA, 33 bp, Homo sapien
acacttgttgaattcattcagaggaaattcttt

SEQ ID NO: 635661 - DNA, 33 bp, Homo sapien
gttttatatctccttaactttaacttgataaca

SEQ ID NO: 635662 - DNA, 33 bp, Homo sapien
gttttatatctccttacctttaacttgataaca

SEQ ID NO: 635663 - DNA, 33 bp, Homo sapien
agggcacaaaaacagacacagtgtggaaagggt

SEQ ID NO: 635664 - DNA, 33 bp, Homo sapien
agggcacaaaaacagatacagtgtggaaagggt

SEQ ID NO: 635665 - DNA, 33 bp, Homo sapien
tgccatgcagaaaagcacaataaatgttaactg

SEQ ID NO: 635666 - DNA, 33 bp, Homo sapien
tgccatgcagaaaagcgcaataaatgttaactg

SEQ ID NO: 635667 - DNA, 33 bp, Homo sapien
atcatttctcctggacaggtcatgcttgaatca

SEQ ID NO: 635668 - DNA, 33 bp, Homo sapien
atcatttctcctggacgggtcatgcttgaatca

SEQ ID NO: 635669 - DNA, 33 bp, Homo sapien
ttcacaatctatgacccatgtaggtataaacct

SEQ ID NO: 635670 - DNA, 33 bp, Homo sapien
ttcacaatctatgacctatgtaggtataaacct

SEQ ID NO: 635671 - DNA, 33 bp, Homo sapien
gaaggcattttaaggacgtgacgctgtaccacc

SEQ ID NO: 635672 - DNA, 33 bp, Homo sapien
gaaggcattttaaggatgtgacgctgtaccacc

SEQ ID NO: 635673 - DNA, 33 bp, Homo sapien
caaaactttacttgaacagctgcaacctctagc

SEQ ID NO: 635674 - DNA, 33 bp, Homo sapien
caaaactttacttgaatagctgcaacctctagc

SEQ ID NO: 635675 - DNA, 33 bp, Homo sapien
gtacagttactagttacacttgcattcaggaaa

SEQ ID NO: 635676 - DNA, 33 bp, Homo sapien
gtacagttactagttagacttgcattcaggaaa

SEQ ID NO: 635677 - DNA, 33 bp, Homo sapien
agtatttctgagcaaaaggtgccagataatggg

SEQ ID NO: 635678 - DNA, 33 bp, Homo sapien
agtatttctgagcaaagggtgccagataatggg

SEQ ID NO: 635679 - DNA, 33 bp, Homo sapien
ttcctgtagacagaaaatttctcattgaatgga

SEQ ID NO: 635680 - DNA, 33 bp, Homo sapien
ttcctgtagacagaaattttctcattgaatgga

SEQ ID NO: 635681 - DNA, 33 bp, Homo sapien
aagattattcatcttcgacagtcaccactgctt

SEQ ID NO: 635682 - DNA, 33 bp, Homo sapien
aagattattcatcttctacagtcaccactgctt

SEQ ID NO: 635683 - DNA, 33 bp, Homo sapien
ccatcaactagaactcaaagagagaattttgta

SEQ ID NO: 635684 - DNA, 33 bp, Homo sapien
ccatcaactagaactccaagagagaattttgta

SEQ ID NO: 635685 - DNA, 33 bp, Homo sapien
tctctaaagaacaaaaacagtgtctatcttgtt

SEQ ID NO: 635686 - DNA, 33 bp, Homo sapien
tctctaaagaacaaaagcagtgtctatcttgtt

SEQ ID NO: 635687 - DNA, 33 bp, Homo sapien
ttgcattaattggaaacagaattgtggatttgt

SEQ ID NO: 635688 - DNA, 33 bp, Homo sapien
ttgcattaattggaaatagaattgtggatttgt

SEQ ID NO: 635689 - DNA, 33 bp, Homo sapien
gcttcgcttcaagtcaaactttgctgcgtgggg

SEQ ID NO: 635690 - DNA, 33 bp, Homo sapien
gcttcgcttcaagtcagactttgctgcgtgggg

SEQ ID NO: 635691 - DNA, 33 bp, Homo sapien
atgtcagaaaaaaaacccaggagactgctggat

SEQ ID NO: 635692 - DNA, 33 bp, Homo sapien
atgtcagaaaaaaaacgcaggagactgctggat

SEQ ID NO: 635693 - DNA, 33 bp, Homo sapien
ggcattattgaaataaaatcctcaaacattttg

SEQ ID NO: 635694 - DNA, 33 bp, Homo sapien
ggcattattgaaataagatcctcaaacattttg

SEQ ID NO: 635695 - DNA, 33 bp, Homo sapien
caatcgagtagagaaagaaaatggctttttgtg

SEQ ID NO: 635696 - DNA, 33 bp, Homo sapien
caatcgagtagagaaataaaatggctttttgtg

SEQ ID NO: 635697 - DNA, 33 bp, Homo sapien
acaagacctgatagaacctttcctatgagaatt

SEQ ID NO: 635698 - DNA, 33 bp, Homo sapien
acaagacctgatagaatctttcctatgagaatt

SEQ ID NO: 635699 - DNA, 33 bp, Homo sapien
caggggtgctctgtaccctggaagaacttgcta

SEQ ID NO: 635700 - DNA, 33 bp, Homo sapien
caggggtgctctgtactctggaagaacttgcta

SEQ ID NO: 635701 - DNA, 33 bp, Homo sapien
ggcttctgctcaccctcaaatgtccagtgttca

SEQ ID NO: 635702 - DNA, 33 bp, Homo sapien
ggcttctgctcacccttaaatgtccagtgttca

SEQ ID NO: 635703 - DNA, 33 bp, Homo sapien
tccctggcaggatggacattaaccaaacaccta

SEQ ID NO: 635704 - DNA, 33 bp, Homo sapien
tccctggcaggatggatattaaccaaacaccta

SEQ ID NO: 635705 - DNA, 33 bp, Homo sapien
taaaagaggtgagagacaaggagagcaatccta

SEQ ID NO: 635706 - DNA, 33 bp, Homo sapien
taaaagaggtgagagagaaggagagcaatccta

SEQ ID NO: 635707 - DNA, 33 bp, Homo sapien
catgaggtaagtagaacagaagcattaaccagg

SEQ ID NO: 635708 - DNA, 33 bp, Homo sapien
catgaggtaagtagaagagaagcattaaccagg

SEQ ID NO: 635709 - DNA, 33 bp, Homo sapien
ccatccatcttattaacctgctgtcaagaaagc

SEQ ID NO: 635710 - DNA, 33 bp, Homo sapien
ccatccatcttattaatctgctgtcaagaaagc

SEQ ID NO: 635711 - DNA, 33 bp, Homo sapien
ttcacatttatactcacgtgggatggattatca

SEQ ID NO: 635712 - DNA, 33 bp, Homo sapien
ttcacatttatactcatgtgggatggattatca

SEQ ID NO: 635713 - DNA, 33 bp, Homo sapien
tcacactggtgagcaaaacatggtccatttggt

SEQ ID NO: 635714 - DNA, 33 bp, Homo sapien
tcacactggtgagcaagacatggtccatttggt

SEQ ID NO: 635715 - DNA, 33 bp, Homo sapien
ctggtaacatttgccaatactcagctttgtaag

SEQ ID NO: 635716 - DNA, 33 bp, Homo sapien
ctggtaacatttgccagtactcagctttgtaag

SEQ ID NO: 635717 - DNA, 33 bp, Homo sapien
caccatttacagcgtcaaattgaatagtttcat

SEQ ID NO: 635718 - DNA, 33 bp, Homo sapien
caccatttacagcgtcgaattgaatagtttcat

SEQ ID NO: 635719 - DNA, 33 bp, Homo sapien
ccaactgatatgaaaacttatgaaattagaaaa

SEQ ID NO: 635720 - DNA, 33 bp, Homo sapien
ccaactgatatgaaaagttatgaaattagaaaa

SEQ ID NO: 635721 - DNA, 33 bp, Homo sapien
agagggaggcaagcgaatcagagtgagagaagg

SEQ ID NO: 635722 - DNA, 33 bp, Homo sapien
agagggaggcaagcgagtcagagtgagagaagg

SEQ ID NO: 635723 - DNA, 33 bp, Homo sapien
aaaaatgcaagagagacgatagttaatatccac

SEQ ID NO: 635724 - DNA, 33 bp, Homo sapien
aaaaatgcaagagagatgatagttaatatccac

SEQ ID NO: 635725 - DNA, 33 bp, Homo sapien
ggttgaaatgaaataaagatgtgagatcaatgg

SEQ ID NO: 635726 - DNA, 33 bp, Homo sapien
ggttgaaatgaaataaggatgtgagatcaatgg

SEQ ID NO: 635727 - DNA, 33 bp, Homo sapien
tgaaatttaaatgacaacaagtttaggatctgt

SEQ ID NO: 635728 - DNA, 33 bp, Homo sapien
tgaaatttaaatgacagcaagtttaggatctgt

SEQ ID NO: 635729 - DNA, 33 bp, Homo sapien
tgtgtagctggtgaaactatcacacttctcctc

SEQ ID NO: 635730 - DNA, 33 bp, Homo sapien
tgtgtagctggtgaaattatcacacttctcctc

SEQ ID NO: 635731 - DNA, 33 bp, Homo sapien
gttaaaatggtagtaaaattcagtgatttccag

SEQ ID NO: 635732 - DNA, 33 bp, Homo sapien
gttaaaatggtagtaacattcagtgatttccag

SEQ ID NO: 635733 - DNA, 33 bp, Homo sapien
aatctacaagggctcacaggtatgcagcaaatc

SEQ ID NO: 635734 - DNA, 33 bp, Homo sapien
aatctacaagggctcagaggtatgcagcaaatc

SEQ ID NO: 635735 - DNA, 33 bp, Homo sapien
tttcctggaagaaggaagaacacggctgaaatg

SEQ ID NO: 635736 - DNA, 33 bp, Homo sapien
tttcctggaagaaggacgaacacggctgaaatg

SEQ ID NO: 635737 - DNA, 33 bp, Homo sapien
aactcccactgtacggaagacctttatctcatt

SEQ ID NO: 635738 - DNA, 33 bp, Homo sapien
aactcccactgtacggcagacctttatctcatt

SEQ ID NO: 635739 - DNA, 33 bp, Homo sapien
ttagcgtcccacattcgctgggtttcctgggcc

SEQ ID NO: 635740 - DNA, 33 bp, Homo sapien
ttagcgtcccacattctctgggtttcctgggcc

SEQ ID NO: 635741 - DNA, 33 bp, Homo sapien
tccatctccatctccaatataagcacccttgtt

SEQ ID NO: 635742 - DNA, 33 bp, Homo sapien
tccatctccatctccagtataagcacccttgtt

SEQ ID NO: 635743 - DNA, 33 bp, Homo sapien
gataataaagcccttaagtattaatgtacagta

SEQ ID NO: 635744 - DNA, 33 bp, Homo sapien
gataataaagcccttaggtattaatgtacagta

SEQ ID NO: 635745 - DNA, 33 bp, Homo sapien
ccctaaagcatggaaaaacacacagatttaact

SEQ ID NO: 635746 - DNA, 33 bp, Homo sapien
ccctaaagcatggaaacacacacagatttaact

SEQ ID NO: 635747 - DNA, 33 bp, Homo sapien
tacttcagaaaatcaaagactaccttactaata

SEQ ID NO: 635748 - DNA, 33 bp, Homo sapien
tacttcagaaaatcaaggactaccttactaata

SEQ ID NO: 635749 - DNA, 33 bp, Homo sapien
gggaattgcctggagagagttaaatatactgtt

SEQ ID NO: 635750 - DNA, 33 bp, Homo sapien
gggaattgcctggagatagttaaatatactgtt

SEQ ID NO: 635751 - DNA, 33 bp, Homo sapien
aaagttggaccaataaagatgaaggattttttt

SEQ ID NO: 635752 - DNA, 33 bp, Homo sapien
aaagttggaccaataaggatgaaggattttttt

SEQ ID NO: 635753 - DNA, 33 bp, Homo sapien
atggatccaaagagaaagcctttcaccaaaatc

SEQ ID NO: 635754 - DNA, 33 bp, Homo sapien
atggatccaaagagaatgcctttcaccaaaatc

SEQ ID NO: 635755 - DNA, 33 bp, Homo sapien
aatacatttagccatgaactcactgataaagcc

SEQ ID NO: 635756 - DNA, 33 bp, Homo sapien
aatacatttagccatgcactcactgataaagcc

SEQ ID NO: 635757 - DNA, 33 bp, Homo sapien
cacagactgagaacaaactcactcattactgca

SEQ ID NO: 635758 - DNA, 33 bp, Homo sapien
cacagactgagaacaagctcactcattactgca

SEQ ID NO: 635759 - DNA, 33 bp, Homo sapien
cagttacttaaaaaaaatcttgctgacatctta

SEQ ID NO: 635760 - DNA, 33 bp, Homo sapien
cagttacttaaaaaaattcttgctgacatctta

SEQ ID NO: 635761 - DNA, 33 bp, Homo sapien
ttcactgctttcttgccgaccaccaggacttca

SEQ ID NO: 635762 - DNA, 33 bp, Homo sapien
ttcactgctttcttgctgaccaccaggacttca

SEQ ID NO: 635763 - DNA, 33 bp, Homo sapien
tgaggtccaaagcaaaatagtatccccaaattt

SEQ ID NO: 635764 - DNA, 33 bp, Homo sapien
tgaggtccaaagcaaactagtatccccaaattt

SEQ ID NO: 635765 - DNA, 33 bp, Homo sapien
gtctgcactgagcctcaagcaatttgtcaaaat

SEQ ID NO: 635766 - DNA, 33 bp, Homo sapien
gtctgcactgagcctccagcaatttgtcaaaat

SEQ ID NO: 635767 - DNA, 33 bp, Homo sapien
actaagaaaactgagaggtaatcataatataca

SEQ ID NO: 635768 - DNA, 33 bp, Homo sapien
actaagaaaactgagatgtaatcataatataca

SEQ ID NO: 635769 - DNA, 33 bp, Homo sapien
acacagaagcatctggaacttaaagctacagca

SEQ ID NO: 635770 - DNA, 33 bp, Homo sapien
acacagaagcatctggcacttaaagctacagca

SEQ ID NO: 635771 - DNA, 33 bp, Homo sapien
tagcttttacttgatactaggatctttgtggat

SEQ ID NO: 635772 - DNA, 33 bp, Homo sapien
tagcttttacttgatattaggatctttgtggat

SEQ ID NO: 635773 - DNA, 33 bp, Homo sapien
ggtttttgtgtggatccaagtttttgtgtttct

SEQ ID NO: 635774 - DNA, 33 bp, Homo sapien
ggtttttgtgtggatctaagtttttgtgtttct

SEQ ID NO: 635775 - DNA, 33 bp, Homo sapien
tccttttctcctggtacagatctgctaaaagta

SEQ ID NO: 635776 - DNA, 33 bp, Homo sapien
tccttttctcctggtagagatctgctaaaagta

SEQ ID NO: 635777 - DNA, 33 bp, Homo sapien
tagatgccaggaaacactctatgagctttactg

SEQ ID NO: 635778 - DNA, 33 bp, Homo sapien
tagatgccaggaaacagtctatgagctttactg

SEQ ID NO: 635779 - DNA, 33 bp, Homo sapien
ttcctgatggaaatgaagcagacagaaagaaaa

SEQ ID NO: 635780 - DNA, 33 bp, Homo sapien
ttcctgatggaaatgacgcagacagaaagaaaa

SEQ ID NO: 635781 - DNA, 33 bp, Homo sapien
gacttgagctgatagaagaagttggagagctgc

SEQ ID NO: 635782 - DNA, 33 bp, Homo sapien
gacttgagctgatagaggaagttggagagctgc

SEQ ID NO: 635783 - DNA, 33 bp, Homo sapien
aagaagaaaaacttgcccagaatggaattttga

SEQ ID NO: 635784 - DNA, 33 bp, Homo sapien
aagaagaaaaacttgctcagaatggaattttga

SEQ ID NO: 635785 - DNA, 33 bp, Homo sapien
atttcaggagatcctgcagtatattagcactaa

SEQ ID NO: 635786 - DNA, 33 bp, Homo sapien
atttcaggagatcctggagtatattagcactaa

SEQ ID NO: 635787 - DNA, 33 bp, Homo sapien
gtcatcacatgtgacaccccattaacttaccaa

SEQ ID NO: 635788 - DNA, 33 bp, Homo sapien
gtcatcacatgtgacatcccattaacttaccaa

SEQ ID NO: 635789 - DNA, 33 bp, Homo sapien
tggtaaataagggcaccggacaagaaaaacaag

SEQ ID NO: 635790 - DNA, 33 bp, Homo sapien
tggtaaataagggcactggacaagaaaaacaag

SEQ ID NO: 635791 - DNA, 33 bp, Homo sapien
ggatcccttccggctacagtttaatatcctttt

SEQ ID NO: 635792 - DNA, 33 bp, Homo sapien
ggatcccttccggctagagtttaatatcctttt

SEQ ID NO: 635793 - DNA, 33 bp, Homo sapien
ttggctgttactagcagagagatttggggccca

SEQ ID NO: 635794 - DNA, 33 bp, Homo sapien
ttggctgttactagcatagagatttggggccca

SEQ ID NO: 635795 - DNA, 33 bp, Homo sapien
agccatatagtggacgaatttgttctttttctg

SEQ ID NO: 635796 - DNA, 33 bp, Homo sapien
agccatatagtggacgcatttgttctttttctg

SEQ ID NO: 635797 - DNA, 33 bp, Homo sapien
gttcccctttgaatgcagaaattaagtagatcc

SEQ ID NO: 635798 - DNA, 33 bp, Homo sapien
gttcccctttgaatgcggaaattaagtagatcc

SEQ ID NO: 635799 - DNA, 33 bp, Homo sapien
cccctgtcctaaaccacgtttgcttctgccccc

SEQ ID NO: 635800 - DNA, 33 bp, Homo sapien
cccctgtcctaaaccatgtttgcttctgccccc

SEQ ID NO: 635801 - DNA, 33 bp, Homo sapien
actgtgtacgatatttaaaaaatggacgatgtc

SEQ ID NO: 635802 - DNA, 33 bp, Homo sapien
actgtgtacgatattttaaaaatggacgatgtc

SEQ ID NO: 635803 - DNA, 33 bp, Homo sapien
gtcacagcacaggaaaggttttactccagcttc

SEQ ID NO: 635804 - DNA, 33 bp, Homo sapien
gtcacagcacaggaaatgttttactccagcttc

SEQ ID NO: 635805 - DNA, 33 bp, Homo sapien
agaagagaaatgtaaaaatgctttctggaagaa

SEQ ID NO: 635806 - DNA, 33 bp, Homo sapien
agaagagaaatgtaaagatgctttctggaagaa

SEQ ID NO: 635807 - DNA, 33 bp, Homo sapien
acagaactttgaaaaagacttgcatctatatgg

SEQ ID NO: 635808 - DNA, 33 bp, Homo sapien
acagaactttgaaaaatacttgcatctatatgg

SEQ ID NO: 635809 - DNA, 33 bp, Homo sapien
gtgcatttcacttctacgtctgcactttcagca

SEQ ID NO: 635810 - DNA, 33 bp, Homo sapien
gtgcatttcacttctatgtctgcactttcagca

SEQ ID NO: 635811 - DNA, 33 bp, Homo sapien
gaacacagcagggaacaaccttgtacatacatc

SEQ ID NO: 635812 - DNA, 33 bp, Homo sapien
gaacacagcagggaaccaccttgtacatacatc

SEQ ID NO: 635813 - DNA, 33 bp, Homo sapien
acactatgccaggaataagcatctacagtgtat

SEQ ID NO: 635814 - DNA, 33 bp, Homo sapien
acactatgccaggaatgagcatctacagtgtat

SEQ ID NO: 635815 - DNA, 33 bp, Homo sapien
cagtgtatgcggttcaagagggtaaccaatcac

SEQ ID NO: 635816 - DNA, 33 bp, Homo sapien
cagtgtatgcggttcaggagggtaaccaatcac

SEQ ID NO: 635817 - DNA, 33 bp, Homo sapien
ttagacagtgctggtaaagaacttaaaaaaaat

SEQ ID NO: 635818 - DNA, 33 bp, Homo sapien
ttagacagtgctggtacagaacttaaaaaaaat

SEQ ID NO: 635819 - DNA, 33 bp, Homo sapien
atgtaatctgaaaagccgaaccaagttggggct

SEQ ID NO: 635820 - DNA, 33 bp, Homo sapien
atgtaatctgaaaagctgaaccaagttggggct

SEQ ID NO: 635821 - DNA, 33 bp, Homo sapien
gttgtctcaattgtgaacttagcccaagaataa

SEQ ID NO: 635822 - DNA, 33 bp, Homo sapien
gttgtctcaattgtgatcttagcccaagaataa

SEQ ID NO: 635823 - DNA, 33 bp, Homo sapien
ctggtaaaaatgcccacgcttgatagtaatgtg

SEQ ID NO: 635824 - DNA, 33 bp, Homo sapien
ctggtaaaaatgcccaggcttgatagtaatgtg

SEQ ID NO: 635825 - DNA, 33 bp, Homo sapien
aaaaagagttcaaaaaacatggttaccacataa

SEQ ID NO: 635826 - DNA, 33 bp, Homo sapien
aaaaagagttcaaaaagcatggttaccacataa

SEQ ID NO: 635827 - DNA, 33 bp, Homo sapien
cggctcgcgtccctctcacacgtacttgaggtg

SEQ ID NO: 635828 - DNA, 33 bp, Homo sapien
cggctcgcgtccctctgacacgtacttgaggtg

SEQ ID NO: 635829 - DNA, 33 bp, Homo sapien
gtcagaatatgcaagacgatgggctgcaggata

SEQ ID NO: 635830 - DNA, 33 bp, Homo sapien
gtcagaatatgcaagatgatgggctgcaggata

SEQ ID NO: 635831 - DNA, 33 bp, Homo sapien
caagttctatcatagaagatctctcatccaacc

SEQ ID NO: 635832 - DNA, 33 bp, Homo sapien
caagttctatcatagaggatctctcatccaacc

SEQ ID NO: 635833 - DNA, 33 bp, Homo sapien
ctaaggagtcactgtggatttgggcgcagacat

SEQ ID NO: 635834 - DNA, 33 bp, Homo sapien
ctaaggagtcactgtgtatttgggcgcagacat

SEQ ID NO: 635835 - DNA, 33 bp, Homo sapien
gccagcttttgctacccataagagtagtggaaa

SEQ ID NO: 635836 - DNA, 33 bp, Homo sapien
gccagcttttgctacctataagagtagtggaaa

SEQ ID NO: 635837 - DNA, 33 bp, Homo sapien
taatcctgtaagggcaaaaagtatactgaaaaa

SEQ ID NO: 635838 - DNA, 33 bp, Homo sapien
taatcctgtaagggcagaaagtatactgaaaaa

SEQ ID NO: 635839 - DNA, 33 bp, Homo sapien
tcttggctcttatgcaacctctagtaaaataac

SEQ ID NO: 635840 - DNA, 33 bp, Homo sapien
tcttggctcttatgcagcctctagtaaaataac

SEQ ID NO: 635841 - DNA, 33 bp, Homo sapien
agattttaagcactcaatctgtcagtggtgagc

SEQ ID NO: 635842 - DNA, 33 bp, Homo sapien
agattttaagcactcagtctgtcagtggtgagc

SEQ ID NO: 635843 - DNA, 33 bp, Homo sapien
gcttgttggagttcacagaggccagactcctgg

SEQ ID NO: 635844 - DNA, 33 bp, Homo sapien
gcttgttggagttcacggaggccagactcctgg

SEQ ID NO: 635845 - DNA, 33 bp, Homo sapien
cagcatggagtacacacacacagaggtgtagaa

SEQ ID NO: 635846 - DNA, 33 bp, Homo sapien
cagcatggagtacacagacacagaggtgtagaa

SEQ ID NO: 635847 - DNA, 33 bp, Homo sapien
ttcagagaatagatcacgagacttctcggcctc

SEQ ID NO: 635848 - DNA, 33 bp, Homo sapien
ttcagagaatagatcatgagacttctcggcctc

SEQ ID NO: 635849 - DNA, 33 bp, Homo sapien
ggtgttcaaaataaaacatatgcctgactataa

SEQ ID NO: 635850 - DNA, 33 bp, Homo sapien
ggtgttcaaaataaaatatatgcctgactataa

SEQ ID NO: 635851 - DNA, 33 bp, Homo sapien
agaggccatcttaggacatcagaactttctgtt

SEQ ID NO: 635852 - DNA, 33 bp, Homo sapien
agaggccatcttaggatatcagaactttctgtt

SEQ ID NO: 635853 - DNA, 33 bp, Homo sapien
gggagacggcttatacactcaacctgatcatgt

SEQ ID NO: 635854 - DNA, 33 bp, Homo sapien
gggagacggcttatactctcaacctgatcatgt

SEQ ID NO: 635855 - DNA, 33 bp, Homo sapien
ggatctctaaaacttaacagatggtttattgtg

SEQ ID NO: 635856 - DNA, 33 bp, Homo sapien
ggatctctaaaacttaccagatggtttattgtg

SEQ ID NO: 635857 - DNA, 33 bp, Homo sapien
aaatattatctgagcaatagaacagctttatat

SEQ ID NO: 635858 - DNA, 33 bp, Homo sapien
aaatattatctgagcagtagaacagctttatat

SEQ ID NO: 635859 - DNA, 33 bp, Homo sapien
atcagggaataatatgcactcaagaatggagct

SEQ ID NO: 635860 - DNA, 33 bp, Homo sapien
atcagggaataatatggactcaagaatggagct

SEQ ID NO: 635861 - DNA, 33 bp, Homo sapien
gaaaccaccacacaagacctaaacctgatatcc

SEQ ID NO: 635862 - DNA, 33 bp, Homo sapien
gaaaccaccacacaagccctaaacctgatatcc

SEQ ID NO: 635863 - DNA, 33 bp, Homo sapien
ttataaagtctacagaagcatacagtaatatct

SEQ ID NO: 635864 - DNA, 33 bp, Homo sapien
ttataaagtctacagaggcatacagtaatatct

SEQ ID NO: 635865 - DNA, 33 bp, Homo sapien
cagatttttatgaatacagtcatccatcgcttg

SEQ ID NO: 635866 - DNA, 33 bp, Homo sapien
cagatttttatgaatagagtcatccatcgcttg

SEQ ID NO: 635867 - DNA, 33 bp, Homo sapien
tcctaagccacttagaaaaaattggtcctcact

SEQ ID NO: 635868 - DNA, 33 bp, Homo sapien
tcctaagccacttagacaaaattggtcctcact

SEQ ID NO: 635869 - DNA, 33 bp, Homo sapien
aagatagagtaaaacactgaatgtactggtttg

SEQ ID NO: 635870 - DNA, 33 bp, Homo sapien
aagatagagtaaaacagtgaatgtactggtttg

SEQ ID NO: 635871 - DNA, 33 bp, Homo sapien
tttacaaatgcatagaaaatgtctttagtcatg

SEQ ID NO: 635872 - DNA, 33 bp, Homo sapien
tttacaaatgcatagataatgtctttagtcatg

SEQ ID NO: 635873 - DNA, 33 bp, Homo sapien
ttcacttcaaagtacagaactaaggaattcact

SEQ ID NO: 635874 - DNA, 33 bp, Homo sapien
ttcacttcaaagtacataactaaggaattcact

SEQ ID NO: 635875 - DNA, 33 bp, Homo sapien
catgttgttgcagtaacaggtattaaatgatta

SEQ ID NO: 635876 - DNA, 33 bp, Homo sapien
catgttgttgcagtaataggtattaaatgatta

SEQ ID NO: 635877 - DNA, 33 bp, Homo sapien
cagcccccaacgacatcaactgtgctatgcttg

SEQ ID NO: 635878 - DNA, 33 bp, Homo sapien
cagcccccaacgacatgaactgtgctatgcttg

SEQ ID NO: 635879 - DNA, 33 bp, Homo sapien
ctcctatgttctgagccactttcattgttaaaa

SEQ ID NO: 635880 - DNA, 33 bp, Homo sapien
ctcctatgttctgagctactttcattgttaaaa

SEQ ID NO: 635881 - DNA, 33 bp, Homo sapien
gaaatggaaatgtctacagtggtaaaggcattg

SEQ ID NO: 635882 - DNA, 33 bp, Homo sapien
gaaatggaaatgtctatagtggtaaaggcattg

SEQ ID NO: 635883 - DNA, 33 bp, Homo sapien
tacagtggttaggaaacgcctttatgaatccaa

SEQ ID NO: 635884 - DNA, 33 bp, Homo sapien
tacagtggttaggaaatgcctttatgaatccaa

SEQ ID NO: 635885 - DNA, 33 bp, Homo sapien
gccgtaatcctcagaacgctctatgtttgaagg

SEQ ID NO: 635886 - DNA, 33 bp, Homo sapien
gccgtaatcctcagaatgctctatgtttgaagg

SEQ ID NO: 635887 - DNA, 33 bp, Homo sapien
ttcgttttgaaataaagttggcttttaccactt

SEQ ID NO: 635888 - DNA, 33 bp, Homo sapien
ttcgttttgaaataaatttggcttttaccactt

SEQ ID NO: 635889 - DNA, 33 bp, Homo sapien
ttagagaattcatgtcaattttagaaaaacaaa

SEQ ID NO: 635890 - DNA, 33 bp, Homo sapien
ttagagaattcatgtccattttagaaaaacaaa

SEQ ID NO: 635891 - DNA, 33 bp, Homo sapien
aagagcttacaaagctaaagtcagaaatgcatc

SEQ ID NO: 635892 - DNA, 33 bp, Homo sapien
aagagcttacaaagctgaagtcagaaatgcatc

SEQ ID NO: 635893 - DNA, 33 bp, Homo sapien
tgtgccataatgttaaagggaagataggattaa

SEQ ID NO: 635894 - DNA, 33 bp, Homo sapien
tgtgccataatgttaaggggaagataggattaa

SEQ ID NO: 635895 - DNA, 33 bp, Homo sapien
acggataagagtgagccagcagtggttctgagt

SEQ ID NO: 635896 - DNA, 33 bp, Homo sapien
acggataagagtgagcgagcagtggttctgagt

SEQ ID NO: 635897 - DNA, 33 bp, Homo sapien
ttttactggtgaaggacgaaggctcaagttcta

SEQ ID NO: 635898 - DNA, 33 bp, Homo sapien
ttttactggtgaaggatgaaggctcaagttcta

SEQ ID NO: 635899 - DNA, 33 bp, Homo sapien
tggatgttgtcacctactaacatcaaatcacct

SEQ ID NO: 635900 - DNA, 33 bp, Homo sapien
tggatgttgtcacctattaacatcaaatcacct

SEQ ID NO: 635901 - DNA, 33 bp, Homo sapien
caaaacatttgctagaagaattgtctttttttt

SEQ ID NO: 635902 - DNA, 33 bp, Homo sapien
caaaacatttgctagacgaattgtctttttttt

SEQ ID NO: 635903 - DNA, 33 bp, Homo sapien
gtgtgtacagttaacaatattatctagtgcact

SEQ ID NO: 635904 - DNA, 33 bp, Homo sapien
gtgtgtacagttaacagtattatctagtgcact

SEQ ID NO: 635905 - DNA, 33 bp, Homo sapien
tacatcaactcctcaaccacatcaggagagttg

SEQ ID NO: 635906 - DNA, 33 bp, Homo sapien
tacatcaactcctcaatcacatcaggagagttg

SEQ ID NO: 635907 - DNA, 33 bp, Homo sapien
tgccctatgttatttgcactttggttgagttcc

SEQ ID NO: 635908 - DNA, 33 bp, Homo sapien
tgccctatgttatttgtactttggttgagttcc

SEQ ID NO: 635909 - DNA, 33 bp, Homo sapien
tctgtcttaaaagagaacattgaactaagaatg

SEQ ID NO: 635910 - DNA, 33 bp, Homo sapien
tctgtcttaaaagagatcattgaactaagaatg

SEQ ID NO: 635911 - DNA, 33 bp, Homo sapien
catctcaagtactccaaatgataacactgattt

SEQ ID NO: 635912 - DNA, 33 bp, Homo sapien
catctcaagtactccagatgataacactgattt

SEQ ID NO: 635913 - DNA, 33 bp, Homo sapien
ttaagaatgtaactacagattatggacacgtgc

SEQ ID NO: 635914 - DNA, 33 bp, Homo sapien
ttaagaatgtaactacggattatggacacgtgc

SEQ ID NO: 635915 - DNA, 33 bp, Homo sapien
ccaagtatctttgagaaggaaaaactcgctttg

SEQ ID NO: 635916 - DNA, 33 bp, Homo sapien
ccaagtatctttgagagggaaaaactcgctttg

SEQ ID NO: 635917 - DNA, 33 bp, Homo sapien
cagctactaccacaaagcaagcagggaagtcat

SEQ ID NO: 635918 - DNA, 33 bp, Homo sapien
cagctactaccacaaatcaagcagggaagtcat

SEQ ID NO: 635919 - DNA, 33 bp, Homo sapien
tggctgtatctacacaatcatggcacagtcctc

SEQ ID NO: 635920 - DNA, 33 bp, Homo sapien
tggctgtatctacacagtcatggcacagtcctc

SEQ ID NO: 635921 - DNA, 33 bp, Homo sapien
acatcaggctgtgacaatatgaccaggaataca

SEQ ID NO: 635922 - DNA, 33 bp, Homo sapien
acatcaggctgtgacagtatgaccaggaataca

SEQ ID NO: 635923 - DNA, 33 bp, Homo sapien
tcttcagaaaaccaaacctgattcccaagagac

SEQ ID NO: 635924 - DNA, 33 bp, Homo sapien
tcttcagaaaaccaaagctgattcccaagagac

SEQ ID NO: 635925 - DNA, 33 bp, Homo sapien
atgacctaagaagataccagctggtgaagggag

SEQ ID NO: 635926 - DNA, 33 bp, Homo sapien
atgacctaagaagatatcagctggtgaagggag

SEQ ID NO: 635927 - DNA, 33 bp, Homo sapien
ggcatacagttcgaagaaataaatgggcctaag

SEQ ID NO: 635928 - DNA, 33 bp, Homo sapien
ggcatacagttcgaagtaataaatgggcctaag

SEQ ID NO: 635929 - DNA, 33 bp, Homo sapien
atgttgattacaaaccaaagtgagttacagtaa

SEQ ID NO: 635930 - DNA, 33 bp, Homo sapien
atgttgattacaaaccgaagtgagttacagtaa

SEQ ID NO: 635931 - DNA, 33 bp, Homo sapien
caaagcaccacctttgcagttagccctattggt

SEQ ID NO: 635932 - DNA, 33 bp, Homo sapien
caaagcaccacctttgtagttagccctattggt

SEQ ID NO: 635933 - DNA, 33 bp, Homo sapien
gggcctgggccaatcaaccaacttgctcaaacc

SEQ ID NO: 635934 - DNA, 33 bp, Homo sapien
gggcctgggccaatcagccaacttgctcaaacc

SEQ ID NO: 635935 - DNA, 33 bp, Homo sapien
cctgtatttacatgaaagaaacgtgaggtttga

SEQ ID NO: 635936 - DNA, 33 bp, Homo sapien
cctgtatttacatgaaggaaacgtgaggtttga

SEQ ID NO: 635937 - DNA, 33 bp, Homo sapien
agtccccttcagcgtaacttttccactcatgcc

SEQ ID NO: 635938 - DNA, 33 bp, Homo sapien
agtccccttcagcgtatcttttccactcatgcc

SEQ ID NO: 635939 - DNA, 33 bp, Homo sapien
tacatctctcattgagaagatatgcaccatttg

SEQ ID NO: 635940 - DNA, 33 bp, Homo sapien
tacatctctcattgaggagatatgcaccatttg

SEQ ID NO: 635941 - DNA, 33 bp, Homo sapien
tagagctaatgtgtcaaaagtaccacatggaga

SEQ ID NO: 635942 - DNA, 33 bp, Homo sapien
tagagctaatgtgtcagaagtaccacatggaga

SEQ ID NO: 635943 - DNA, 33 bp, Homo sapien
ggctaggattattccccgatacattggccagca

SEQ ID NO: 635944 - DNA, 33 bp, Homo sapien
ggctaggattattccctgatacattggccagca

SEQ ID NO: 635945 - DNA, 33 bp, Homo sapien
tagaatgcatctggcaaaagtatgagaagagta

SEQ ID NO: 635946 - DNA, 33 bp, Homo sapien
tagaatgcatctggcagaagtatgagaagagta

SEQ ID NO: 635947 - DNA, 33 bp, Homo sapien
tatgtttagtgcagcgccatttacaatagcaaa

SEQ ID NO: 635948 - DNA, 33 bp, Homo sapien
tatgtttagtgcagcgtcatttacaatagcaaa

SEQ ID NO: 635949 - DNA, 33 bp, Homo sapien
aatagaggatcacaaaaagagctgaactgatca

SEQ ID NO: 635950 - DNA, 33 bp, Homo sapien
aatagaggatcacaaagagagctgaactgatca

SEQ ID NO: 635951 - DNA, 33 bp, Homo sapien
gtttaaatccatggctaaaaatgattaaaatat

SEQ ID NO: 635952 - DNA, 33 bp, Homo sapien
gtttaaatccatggctcaaaatgattaaaatat

SEQ ID NO: 635953 - DNA, 33 bp, Homo sapien
ctcacctgagaacaagccattctgtaaaatagg

SEQ ID NO: 635954 - DNA, 33 bp, Homo sapien
ctcacctgagaacaagtcattctgtaaaatagg

SEQ ID NO: 635955 - DNA, 33 bp, Homo sapien
agataaatagtggctacctacaacgagttatca

SEQ ID NO: 635956 - DNA, 33 bp, Homo sapien
agataaatagtggctatctacaacgagttatca

SEQ ID NO: 635957 - DNA, 33 bp, Homo sapien
gagtctgtgactcaaagtactgtttaaattttg

SEQ ID NO: 635958 - DNA, 33 bp, Homo sapien
gagtctgtgactcaaattactgtttaaattttg

SEQ ID NO: 635959 - DNA, 33 bp, Homo sapien
gagtcacagactcccacagttgcaatactatcc

SEQ ID NO: 635960 - DNA, 33 bp, Homo sapien
gagtcacagactcccagagttgcaatactatcc

SEQ ID NO: 635961 - DNA, 33 bp, Homo sapien
ttagtcataattggaaaagctggcgtaaatgtg

SEQ ID NO: 635962 - DNA, 33 bp, Homo sapien
ttagtcataattggaagagctggcgtaaatgtg

SEQ ID NO: 635963 - DNA, 33 bp, Homo sapien
ctaagctaatgcctctcacagttgactcacaga

SEQ ID NO: 635964 - DNA, 33 bp, Homo sapien
ctaagctaatgcctcttacagttgactcacaga

SEQ ID NO: 635965 - DNA, 33 bp, Homo sapien
gcgtaggagccaggaaatggaactcaaaacaaa

SEQ ID NO: 635966 - DNA, 33 bp, Homo sapien
gcgtaggagccaggaagtggaactcaaaacaaa

SEQ ID NO: 635967 - DNA, 33 bp, Homo sapien
atgactgagagaccgacgagtagacatgcaaca

SEQ ID NO: 635968 - DNA, 33 bp, Homo sapien
atgactgagagaccgatgagtagacatgcaaca

SEQ ID NO: 635969 - DNA, 33 bp, Homo sapien
cattagtaatacttgacggtactgtagctgaat

SEQ ID NO: 635970 - DNA, 33 bp, Homo sapien
cattagtaatacttgatggtactgtagctgaat

SEQ ID NO: 635971 - DNA, 33 bp, Homo sapien
ctaattttataagtgacaatgtattatgctaat

SEQ ID NO: 635972 - DNA, 33 bp, Homo sapien
ctaattttataagtgagaatgtattatgctaat

SEQ ID NO: 635973 - DNA, 33 bp, Homo sapien
tctcaaatggaatttgcaaaaagcccagtaaca

SEQ ID NO: 635974 - DNA, 33 bp, Homo sapien
tctcaaatggaatttgtaaaaagcccagtaaca

SEQ ID NO: 635975 - DNA, 33 bp, Homo sapien
ggtaggctaaggcaataaacaaatgttactggg

SEQ ID NO: 635976 - DNA, 33 bp, Homo sapien
ggtaggctaaggcaatgaacaaatgttactggg

SEQ ID NO: 635977 - DNA, 33 bp, Homo sapien
gccatggtaataagtaccatcctgaatcagatt

SEQ ID NO: 635978 - DNA, 33 bp, Homo sapien
gccatggtaataagtagcatcctgaatcagatt

SEQ ID NO: 635979 - DNA, 33 bp, Homo sapien
aaaatctacttaactccatactttccactttgg

SEQ ID NO: 635980 - DNA, 33 bp, Homo sapien
aaaatctacttaactctatactttccactttgg

SEQ ID NO: 635981 - DNA, 33 bp, Homo sapien
tgagaaaatctgaatacggaaaatatgatatta

SEQ ID NO: 635982 - DNA, 33 bp, Homo sapien
tgagaaaatctgaatatggaaaatatgatatta

SEQ ID NO: 635983 - DNA, 33 bp, Homo sapien
actactgtttgttagagggtttggcacaaagga

SEQ ID NO: 635984 - DNA, 33 bp, Homo sapien
actactgtttgttagatggtttggcacaaagga

SEQ ID NO: 635985 - DNA, 33 bp, Homo sapien
gaaattgaggctgaagaaaaatacctgggaaat

SEQ ID NO: 635986 - DNA, 33 bp, Homo sapien
gaaattgaggctgaaggaaaatacctgggaaat

SEQ ID NO: 635987 - DNA, 33 bp, Homo sapien
cttcactgagctggctaacacttaagctgtctg

SEQ ID NO: 635988 - DNA, 33 bp, Homo sapien
cttcactgagctggctgacacttaagctgtctg

SEQ ID NO: 635989 - DNA, 33 bp, Homo sapien
agacacagaagtcacacgaaagcgttcctacag

SEQ ID NO: 635990 - DNA, 33 bp, Homo sapien
agacacagaagtcacatgaaagcgttcctacag

SEQ ID NO: 635991 - DNA, 33 bp, Homo sapien
gatggagggaataaaacgtcaaagaatatgtga

SEQ ID NO: 635992 - DNA, 33 bp, Homo sapien
gatggagggaataaaatgtcaaagaatatgtga

SEQ ID NO: 635993 - DNA, 33 bp, Homo sapien
tgtgtcttctgagtcacgaaatgtactatattc

SEQ ID NO: 635994 - DNA, 33 bp, Homo sapien
tgtgtcttctgagtcatgaaatgtactatattc

SEQ ID NO: 635995 - DNA, 33 bp, Homo sapien
gtatacaataacttccaaatgttcatccattta

SEQ ID NO: 635996 - DNA, 33 bp, Homo sapien
gtatacaataacttccgaatgttcatccattta

SEQ ID NO: 635997 - DNA, 33 bp, Homo sapien
tcagattttactttaagtgaaagaaacagcaac

SEQ ID NO: 635998 - DNA, 33 bp, Homo sapien
tcagattttactttaattgaaagaaacagcaac

SEQ ID NO: 635999 - DNA, 33 bp, Homo sapien
agctctccaaaagcaactgtacctccctgcact

SEQ ID NO: 636000 - DNA, 33 bp, Homo sapien
agctctccaaaagcaattgtacctccctgcact

SEQ ID NO: 636001 - DNA, 33 bp, Homo sapien
cagttcaagagatttacgtgctaatactttaaa

SEQ ID NO: 636002 - DNA, 33 bp, Homo sapien
cagttcaagagatttatgtgctaatactttaaa

SEQ ID NO: 636003 - DNA, 33 bp, Homo sapien
atcctcattggcctatcagtggtttgaatggaa

SEQ ID NO: 636004 - DNA, 33 bp, Homo sapien
atcctcattggcctatgagtggtttgaatggaa

SEQ ID NO: 636005 - DNA, 33 bp, Homo sapien
ccacctgtcatactaactgttacacataaacat

SEQ ID NO: 636006 - DNA, 33 bp, Homo sapien
ccacctgtcatactaattgttacacataaacat

SEQ ID NO: 636007 - DNA, 33 bp, Homo sapien
ggtttgaaattggatgaagaaaaatgtgtggac

SEQ ID NO: 636008 - DNA, 33 bp, Homo sapien
ggtttgaaattggatggagaaaaatgtgtggac

SEQ ID NO: 636009 - DNA, 33 bp, Homo sapien
caaagtacctacttaactccttcagcatcagct

SEQ ID NO: 636010 - DNA, 33 bp, Homo sapien
caaagtacctacttaattccttcagcatcagct

SEQ ID NO: 636011 - DNA, 33 bp, Homo sapien
tcagtctcggctccagaaacaaaaaataaactt

SEQ ID NO: 636012 - DNA, 33 bp, Homo sapien
tcagtctcggctccaggaacaaaaaataaactt

SEQ ID NO: 636013 - DNA, 33 bp, Homo sapien
tgtgagagccaatactaaggcaaagacagtgaa

SEQ ID NO: 636014 - DNA, 33 bp, Homo sapien
tgtgagagccaatactgaggcaaagacagtgaa

SEQ ID NO: 636015 - DNA, 33 bp, Homo sapien
taatggaatactttcacggcaatatatagcttt

SEQ ID NO: 636016 - DNA, 33 bp, Homo sapien
taatggaatactttcatggcaatatatagcttt

SEQ ID NO: 636017 - DNA, 33 bp, Homo sapien
cttttattatcactccactctaaaactttgcta

SEQ ID NO: 636018 - DNA, 33 bp, Homo sapien
cttttattatcactccgctctaaaactttgcta

SEQ ID NO: 636019 - DNA, 33 bp, Homo sapien
aaaagccttaactccagacacttctaccaactg

SEQ ID NO: 636020 - DNA, 33 bp, Homo sapien
aaaagccttaactccatacacttctaccaactg

SEQ ID NO: 636021 - DNA, 33 bp, Homo sapien
cttccctgtctcctaaaaagatgttcagggatt

SEQ ID NO: 636022 - DNA, 33 bp, Homo sapien
cttccctgtctcctaacaagatgttcagggatt

SEQ ID NO: 636023 - DNA, 33 bp, Homo sapien
cagcactattcacaaacgtccaaaaatgtagta

SEQ ID NO: 636024 - DNA, 33 bp, Homo sapien
cagcactattcacaaatgtccaaaaatgtagta

SEQ ID NO: 636025 - DNA, 33 bp, Homo sapien
cctatggaaaaccaaacagacagactctgtggg

SEQ ID NO: 636026 - DNA, 33 bp, Homo sapien
cctatggaaaaccaaagagacagactctgtggg

SEQ ID NO: 636027 - DNA, 33 bp, Homo sapien
cacaacataataattaaaagactgataagcaat

SEQ ID NO: 636028 - DNA, 33 bp, Homo sapien
cacaacataataattagaagactgataagcaat

SEQ ID NO: 636029 - DNA, 33 bp, Homo sapien
cttcctcatttttgcaatgaaaccagggtgcaa

SEQ ID NO: 636030 - DNA, 33 bp, Homo sapien
cttcctcatttttgcagtgaaaccagggtgcaa

SEQ ID NO: 636031 - DNA, 33 bp, Homo sapien
aacaggctttgcgatacacaaaggcaaagacga

SEQ ID NO: 636032 - DNA, 33 bp, Homo sapien
aacaggctttgcgatagacaaaggcaaagacga

SEQ ID NO: 636033 - DNA, 33 bp, Homo sapien
gcaggagaacatgtcagagttaattagcgacat

SEQ ID NO: 636034 - DNA, 33 bp, Homo sapien
gcaggagaacatgtcatagttaattagcgacat

SEQ ID NO: 636035 - DNA, 33 bp, Homo sapien
catttactaacacaaaactatgaataaacccgc

SEQ ID NO: 636036 - DNA, 33 bp, Homo sapien
catttactaacacaaatctatgaataaacccgc

SEQ ID NO: 636037 - DNA, 33 bp, Homo sapien
cccacaagaggtctctcactaaccaagcgcttg

SEQ ID NO: 636038 - DNA, 33 bp, Homo sapien
cccacaagaggtctcttactaaccaagcgcttg

SEQ ID NO: 636039 - DNA, 33 bp, Homo sapien
agcccagagatacatacgctttccatcttctca

SEQ ID NO: 636040 - DNA, 33 bp, Homo sapien
agcccagagatacatatgctttccatcttctca

SEQ ID NO: 636041 - DNA, 33 bp, Homo sapien
tattgctaagatgttgaagtcttcctgtgttgg

SEQ ID NO: 636042 - DNA, 33 bp, Homo sapien
tattgctaagatgttggagtcttcctgtgttgg

SEQ ID NO: 636043 - DNA, 33 bp, Homo sapien
tttggttttggcctgaaccaagccgtttaaaat

SEQ ID NO: 636044 - DNA, 33 bp, Homo sapien
tttggttttggcctgagccaagccgtttaaaat

SEQ ID NO: 636045 - DNA, 33 bp, Homo sapien
agctcatctttttgaactcgatctttattttta

SEQ ID NO: 636046 - DNA, 33 bp, Homo sapien
agctcatctttttgaattcgatctttattttta

SEQ ID NO: 636047 - DNA, 33 bp, Homo sapien
ttcatgtttgaagacaccaggacgatatagtag

SEQ ID NO: 636048 - DNA, 33 bp, Homo sapien
ttcatgtttgaagacagcaggacgatatagtag

SEQ ID NO: 636049 - DNA, 33 bp, Homo sapien
tgaaaccagcaccacaagattacccatcaagac

SEQ ID NO: 636050 - DNA, 33 bp, Homo sapien
tgaaaccagcaccacaggattacccatcaagac

SEQ ID NO: 636051 - DNA, 33 bp, Homo sapien
tgcttctgcagaagaaaggatgtgtcagaggga

SEQ ID NO: 636052 - DNA, 33 bp, Homo sapien
tgcttctgcagaagaagggatgtgtcagaggga

SEQ ID NO: 636053 - DNA, 33 bp, Homo sapien
gggaagaaatgaatgcagatacaaccttcttaa

SEQ ID NO: 636054 - DNA, 33 bp, Homo sapien
gggaagaaatgaatgcggatacaaccttcttaa

SEQ ID NO: 636055 - DNA, 33 bp, Homo sapien
ttgctggataagagcacatctgtctattttgat

SEQ ID NO: 636056 - DNA, 33 bp, Homo sapien
ttgctggataagagcatatctgtctattttgat

SEQ ID NO: 636057 - DNA, 33 bp, Homo sapien
gcagttgtgattaaaaacaaaggtcagctgtcc

SEQ ID NO: 636058 - DNA, 33 bp, Homo sapien
gcagttgtgattaaaaccaaaggtcagctgtcc

SEQ ID NO: 636059 - DNA, 33 bp, Homo sapien
ggccagatttgagttacaacagagctccgtgcg

SEQ ID NO: 636060 - DNA, 33 bp, Homo sapien
ggccagatttgagttataacagagctccgtgcg

SEQ ID NO: 636061 - DNA, 33 bp, Homo sapien
atacaacaggtggaaacaaaaggtccaggaaga

SEQ ID NO: 636062 - DNA, 33 bp, Homo sapien
atacaacaggtggaaagaaaaggtccaggaaga

SEQ ID NO: 636063 - DNA, 33 bp, Homo sapien
agctataactgcacgacggcactggcaacagga

SEQ ID NO: 636064 - DNA, 33 bp, Homo sapien
agctataactgcacgatggcactggcaacagga

SEQ ID NO: 636065 - DNA, 33 bp, Homo sapien
aggcttgctttctcatgagtagatggtactttc

SEQ ID NO: 636066 - DNA, 33 bp, Homo sapien
aggcttgctttctcattagtagatggtactttc

SEQ ID NO: 636067 - DNA, 33 bp, Homo sapien
gttgctcattgaaagaaatacatttatactcac

SEQ ID NO: 636068 - DNA, 33 bp, Homo sapien
gttgctcattgaaagagatacatttatactcac

SEQ ID NO: 636069 - DNA, 33 bp, Homo sapien
ctctctgggtaaggcaccattgtgaatatccac

SEQ ID NO: 636070 - DNA, 33 bp, Homo sapien
ctctctgggtaaggcatcattgtgaatatccac

SEQ ID NO: 636071 - DNA, 33 bp, Homo sapien
taaactggtgccttctcaaactgacttctcaag

SEQ ID NO: 636072 - DNA, 33 bp, Homo sapien
taaactggtgccttctgaaactgacttctcaag

SEQ ID NO: 636073 - DNA, 33 bp, Homo sapien
ttatcatcctaaaaaagaattctaccatttgcc

SEQ ID NO: 636074 - DNA, 33 bp, Homo sapien
ttatcatcctaaaaaataattctaccatttgcc

SEQ ID NO: 636075 - DNA, 33 bp, Homo sapien
ccagttggtccaatgaaaaagaggattagattt

SEQ ID NO: 636076 - DNA, 33 bp, Homo sapien
ccagttggtccaatgagaaagaggattagattt

SEQ ID NO: 636077 - DNA, 33 bp, Homo sapien
tatcctgttattgggtcacagtagttcagtgac

SEQ ID NO: 636078 - DNA, 33 bp, Homo sapien
tatcctgttattgggttacagtagttcagtgac

SEQ ID NO: 636079 - DNA, 33 bp, Homo sapien
atcatggccacacctaaagatgtcaacgtttta

SEQ ID NO: 636080 - DNA, 33 bp, Homo sapien
atcatggccacacctagagatgtcaacgtttta

SEQ ID NO: 636081 - DNA, 33 bp, Homo sapien
ccgacttcaagagttacaacaaagctatagtaa

SEQ ID NO: 636082 - DNA, 33 bp, Homo sapien
ccgacttcaagagttagaacaaagctatagtaa

SEQ ID NO: 636083 - DNA, 33 bp, Homo sapien
tgacagtgtcttatatcaaggagacgttttcaa

SEQ ID NO: 636084 - DNA, 33 bp, Homo sapien
tgacagtgtcttatattaaggagacgttttcaa

SEQ ID NO: 636085 - DNA, 33 bp, Homo sapien
tgtggattttttgaaacgtacaaatctagattt

SEQ ID NO: 636086 - DNA, 33 bp, Homo sapien
tgtggattttttgaaaggtacaaatctagattt

SEQ ID NO: 636087 - DNA, 33 bp, Homo sapien
aagatgctgctgttgacagtcgtacaccttaac

SEQ ID NO: 636088 - DNA, 33 bp, Homo sapien
aagatgctgctgttgatagtcgtacaccttaac

SEQ ID NO: 636089 - DNA, 33 bp, Homo sapien
ttattctgcctttatccagtttttcttcttggt

SEQ ID NO: 636090 - DNA, 33 bp, Homo sapien
ttattctgcctttatctagtttttcttcttggt

SEQ ID NO: 636091 - DNA, 33 bp, Homo sapien
taaaaaatggataaaaagtctgaatagatattt

SEQ ID NO: 636092 - DNA, 33 bp, Homo sapien
taaaaaatggataaaaggtctgaatagatattt

SEQ ID NO: 636093 - DNA, 33 bp, Homo sapien
atagttttagcttttacatttgaggccaagatt

SEQ ID NO: 636094 - DNA, 33 bp, Homo sapien
atagttttagcttttatatttgaggccaagatt

SEQ ID NO: 636095 - DNA, 33 bp, Homo sapien
cattgtggtgataagcaattaaaaggaggctgg

SEQ ID NO: 636096 - DNA, 33 bp, Homo sapien
cattgtggtgataagccattaaaaggaggctgg

SEQ ID NO: 636097 - DNA, 33 bp, Homo sapien
ctctgcttgagaaatcacaatcaatagacgttg

SEQ ID NO: 636098 - DNA, 33 bp, Homo sapien
ctctgcttgagaaatcgcaatcaatagacgttg

SEQ ID NO: 636099 - DNA, 33 bp, Homo sapien
attcctaaactgcaaacatatgaagagaccaat

SEQ ID NO: 636100 - DNA, 33 bp, Homo sapien
attcctaaactgcaaatatatgaagagaccaat

SEQ ID NO: 636101 - DNA, 33 bp, Homo sapien
atatgaagagaccaataaactaagcaaaaatca

SEQ ID NO: 636102 - DNA, 33 bp, Homo sapien
atatgaagagaccaattaactaagcaaaaatca

SEQ ID NO: 636103 - DNA, 33 bp, Homo sapien
aatgttggagtaagagacctaagaggaccttag

SEQ ID NO: 636104 - DNA, 33 bp, Homo sapien
aatgttggagtaagaggcctaagaggaccttag

SEQ ID NO: 636105 - DNA, 33 bp, Homo sapien
cctaaagccattacccacttctagcttaaaacc

SEQ ID NO: 636106 - DNA, 33 bp, Homo sapien
cctaaagccattacccgcttctagcttaaaacc

SEQ ID NO: 636107 - DNA, 33 bp, Homo sapien
tctgactgctagctaaggtctctgcccgggaac

SEQ ID NO: 636108 - DNA, 33 bp, Homo sapien
tctgactgctagctaatgtctctgcccgggaac

SEQ ID NO: 636109 - DNA, 33 bp, Homo sapien
atctctctgcatattacatcacaattttagctc

SEQ ID NO: 636110 - DNA, 33 bp, Homo sapien
atctctctgcatattagatcacaattttagctc

SEQ ID NO: 636111 - DNA, 33 bp, Homo sapien
tgttgaaatccccaaactgttgagaaaacactg

SEQ ID NO: 636112 - DNA, 33 bp, Homo sapien
tgttgaaatccccaaattgttgagaaaacactg

SEQ ID NO: 636113 - DNA, 33 bp, Homo sapien
tcgctcttactgccccagctggaatgcaatggt

SEQ ID NO: 636114 - DNA, 33 bp, Homo sapien
tcgctcttactgccccggctggaatgcaatggt

SEQ ID NO: 636115 - DNA, 33 bp, Homo sapien
cagcagcagtaaaaagaactaatacactcagga

SEQ ID NO: 636116 - DNA, 33 bp, Homo sapien
cagcagcagtaaaaaggactaatacactcagga

SEQ ID NO: 636117 - DNA, 33 bp, Homo sapien
gtttagggaataatgacaataaaatgtctgtac

SEQ ID NO: 636118 - DNA, 33 bp, Homo sapien
gtttagggaataatgataataaaatgtctgtac

SEQ ID NO: 636119 - DNA, 33 bp, Homo sapien
ttacatttgcattcagcattataattaaagtta

SEQ ID NO: 636120 - DNA, 33 bp, Homo sapien
ttacatttgcattcagtattataattaaagtta

SEQ ID NO: 636121 - DNA, 33 bp, Homo sapien
tcttgactaatccatccccttttccaaataatc

SEQ ID NO: 636122 - DNA, 33 bp, Homo sapien
tcttgactaatccatctccttttccaaataatc

SEQ ID NO: 636123 - DNA, 33 bp, Homo sapien
tagacacctttggaagaccattatcctgcttac

SEQ ID NO: 636124 - DNA, 33 bp, Homo sapien
tagacacctttggaaggccattatcctgcttac

SEQ ID NO: 636125 - DNA, 33 bp, Homo sapien
gctgtgataattcatgcaaagcttgtagcagag

SEQ ID NO: 636126 - DNA, 33 bp, Homo sapien
gctgtgataattcatgtaaagcttgtagcagag

SEQ ID NO: 636127 - DNA, 33 bp, Homo sapien
ctagaaggaaccttaaaactgatctggttaaat

SEQ ID NO: 636128 - DNA, 33 bp, Homo sapien
ctagaaggaaccttaagactgatctggttaaat

SEQ ID NO: 636129 - DNA, 33 bp, Homo sapien
atcagtaagttgtaaacgttagaccactatttt

SEQ ID NO: 636130 - DNA, 33 bp, Homo sapien
atcagtaagttgtaaatgttagaccactatttt

SEQ ID NO: 636131 - DNA, 33 bp, Homo sapien
agatacttgtaacatacgaaagctttaaaaaac

SEQ ID NO: 636132 - DNA, 33 bp, Homo sapien
agatacttgtaacatatgaaagctttaaaaaac

SEQ ID NO: 636133 - DNA, 33 bp, Homo sapien
tcaacctttattatacaacagagaggtcacagt

SEQ ID NO: 636134 - DNA, 33 bp, Homo sapien
tcaacctttattatacgacagagaggtcacagt

SEQ ID NO: 636135 - DNA, 33 bp, Homo sapien
gagtgaacaataattaactcgacattttaaaac

SEQ ID NO: 636136 - DNA, 33 bp, Homo sapien
gagtgaacaataattacctcgacattttaaaac

SEQ ID NO: 636137 - DNA, 33 bp, Homo sapien
acatggatagagatgaacttaacagagtattta

SEQ ID NO: 636138 - DNA, 33 bp, Homo sapien
acatggatagagatgaccttaacagagtattta

SEQ ID NO: 636139 - DNA, 33 bp, Homo sapien
cttcatatgatccaaccactccgagctacagga

SEQ ID NO: 636140 - DNA, 33 bp, Homo sapien
cttcatatgatccaactactccgagctacagga

SEQ ID NO: 636141 - DNA, 33 bp, Homo sapien; identical to SEQ ID NO: 636139

SEQ ID NO: 636142 - DNA, 33 bp, Homo sapien; identical to SEQ ID NO: 636140

SEQ ID NO: 636143 - DNA, 33 bp, Homo sapien
attttcgcatctagaacaacattataacctagt

SEQ ID NO: 636144 - DNA, 33 bp, Homo sapien
attttcgcatctagaagaacattataacctagt

SEQ ID NO: 636145 - DNA, 33 bp, Homo sapien
atagatttttaaggtcaaattggagtgtagtta

SEQ ID NO: 636146 - DNA, 33 bp, Homo sapien
atagatttttaaggtccaattggagtgtagtta

SEQ ID NO: 636147 - DNA, 33 bp, Homo sapien
caggctaagaaatttgcatttacctgtaggtga

SEQ ID NO: 636148 - DNA, 33 bp, Homo sapien
caggctaagaaatttggatttacctgtaggtga

SEQ ID NO: 636149 - DNA, 33 bp, Homo sapien
tctattcattgtgcagaaaagagttaacacaga

SEQ ID NO: 636150 - DNA, 33 bp, Homo sapien
tctattcattgtgcaggaaagagttaacacaga

SEQ ID NO: 636151 - DNA, 33 bp, Homo sapien
tcaattacttccaatcggaaaattaggaatcat

SEQ ID NO: 636152 - DNA, 33 bp, Homo sapien
tcaattacttccaatctgaaaattaggaatcat

SEQ ID NO: 636153 - DNA, 33 bp, Homo sapien
ctcctttaattttaaactcattatcagagagca

SEQ ID NO: 636154 - DNA, 33 bp, Homo sapien
ctcctttaattttaaagtcattatcagagagca

SEQ ID NO: 636155 - DNA, 33 bp, Homo sapien
tttcttttttggcatacgtgaattttgttttgt

SEQ ID NO: 636156 - DNA, 33 bp, Homo sapien
tttcttttttggcatatgtgaattttgttttgt

SEQ ID NO: 636157 - DNA, 33 bp, Homo sapien
tggatttctgaagccaaaaggttaaagcctgtt

SEQ ID NO: 636158 - DNA, 33 bp, Homo sapien
tggatttctgaagccagaaggttaaagcctgtt

SEQ ID NO: 636159 - DNA, 33 bp, Homo sapien
catacattttacattgaaccttaggactcagtc

SEQ ID NO: 636160 - DNA, 33 bp, Homo sapien
catacattttacattgtaccttaggactcagtc

SEQ ID NO: 636161 - DNA, 33 bp, Homo sapien
tggggaggctacaaaaagagaagacatggaaac

SEQ ID NO: 636162 - DNA, 33 bp, Homo sapien
tggggaggctacaaaaggagaagacatggaaac

SEQ ID NO: 636163 - DNA, 33 bp, Homo sapien
ggtcctgtaatctccacgttgatgcccaggaag

SEQ ID NO: 636164 - DNA, 33 bp, Homo sapien
ggtcctgtaatctccatgttgatgcccaggaag

SEQ ID NO: 636165 - DNA, 33 bp, Homo sapien
acagagcatacatactaaaggctaaaagagtaa

SEQ ID NO: 636166 - DNA, 33 bp, Homo sapien
acagagcatacatactgaaggctaaaagagtaa

SEQ ID NO: 636167 - DNA, 33 bp, Homo sapien
aagatacaggctctctaaaaagtaatttctggt

SEQ ID NO: 636168 - DNA, 33 bp, Homo sapien
aagatacaggctctctgaaaagtaatttctggt

SEQ ID NO: 636169 - DNA, 33 bp, Homo sapien
tctaaatttacagacaagaaaccagtaaatgat

SEQ ID NO: 636170 - DNA, 33 bp, Homo sapien
tctaaatttacagacaggaaaccagtaaatgat

SEQ ID NO: 636171 - DNA, 33 bp, Homo sapien
taatcacatgaaaaaaatgttgaacatcattag

SEQ ID NO: 636172 - DNA, 33 bp, Homo sapien
taatcacatgaaaaaactgttgaacatcattag

SEQ ID NO: 636173 - DNA, 33 bp, Homo sapien
agagctgtgcgaacatcataattctttcagcaa

SEQ ID NO: 636174 - DNA, 33 bp, Homo sapien
agagctgtgcgaacatgataattctttcagcaa

SEQ ID NO: 636175 - DNA, 33 bp, Homo sapien
acattccattgctgggccagttactcttcactg

SEQ ID NO: 636176 - DNA, 33 bp, Homo sapien
acattccattgctgggtcagttactcttcactg

SEQ ID NO: 636177 - DNA, 33 bp, Homo sapien
ggaatgttacaaagtcaatatgcctgggcagat

SEQ ID NO: 636178 - DNA, 33 bp, Homo sapien
ggaatgttacaaagtccatatgcctgggcagat

SEQ ID NO: 636179 - DNA, 33 bp, Homo sapien
ttgccgtccacagcaggctactgacgaaaaacg

SEQ ID NO: 636180 - DNA, 33 bp, Homo sapien
ttgccgtccacagcagtctactgacgaaaaacg

SEQ ID NO: 636181 - DNA, 33 bp, Homo sapien
agtactttctcctgaccggcttccttatttgtg

SEQ ID NO: 636182 - DNA, 33 bp, Homo sapien
agtactttctcctgactggcttccttatttgtg

SEQ ID NO: 636183 - DNA, 33 bp, Homo sapien
aggagacaattggaaacgtggaaccagaaaacc

SEQ ID NO: 636184 - DNA, 33 bp, Homo sapien
aggagacaattggaaatgtggaaccagaaaacc

SEQ ID NO: 636185 - DNA, 33 bp, Homo sapien
tttaaagcatttttataaagcagatccaaaggc

SEQ ID NO: 636186 - DNA, 33 bp, Homo sapien
tttaaagcatttttatgaagcagatccaaaggc

SEQ ID NO: 636187 - DNA, 33 bp, Homo sapien
ttttttttccaactcaaattgtcccttagaagc

SEQ ID NO: 636188 - DNA, 33 bp, Homo sapien
ttttttttccaactcacattgtcccttagaagc

SEQ ID NO: 636189 - DNA, 33 bp, Homo sapien
gagagtgaacaagaagaaactgactttgttttg

SEQ ID NO: 636190 - DNA, 33 bp, Homo sapien
gagagtgaacaagaagcaactgactttgttttg

SEQ ID NO: 636191 - DNA, 33 bp, Homo sapien
agattgaacaaagcaacggcaacagagaaagaa

SEQ ID NO: 636192 - DNA, 33 bp, Homo sapien
agattgaacaaagcaatggcaacagagaaagaa

SEQ ID NO: 636193 - DNA, 33 bp, Homo sapien
acagagaaagaaagagaagccatttatggtttg

SEQ ID NO: 636194 - DNA, 33 bp, Homo sapien
acagagaaagaaagaggagccatttatggtttg

SEQ ID NO: 636195 - DNA, 33 bp, Homo sapien
agagccggtgaggacactgaacttagctcttcc

SEQ ID NO: 636196 - DNA, 33 bp, Homo sapien
agagccggtgaggacattgaacttagctcttcc

SEQ ID NO: 636197 - DNA, 33 bp, Homo sapien
gtaacatctaggataccaaggatttaattttat

SEQ ID NO: 636198 - DNA, 33 bp, Homo sapien
gtaacatctaggatacgaaggatttaattttat

SEQ ID NO: 636199 - DNA, 33 bp, Homo sapien
ttggctaagtcaaaagcctaactcttcatctag

SEQ ID NO: 636200 - DNA, 33 bp, Homo sapien
ttggctaagtcaaaagtctaactcttcatctag

SEQ ID NO: 636201 - DNA, 33 bp, Homo sapien
ctgactgtggcataacaaggaaaaaaatcaaaa

SEQ ID NO: 636202 - DNA, 33 bp, Homo sapien
ctgactgtggcataacgaggaaaaaaatcaaaa

SEQ ID NO: 636203 - DNA, 33 bp, Homo sapien
tccttcttcctaacaacttgaacttagccaagt

SEQ ID NO: 636204 - DNA, 33 bp, Homo sapien
tccttcttcctaacaatttgaacttagccaagt

SEQ ID NO: 636205 - DNA, 33 bp, Homo sapien
ataaagtctccacaaacgctgaattagcaaata

SEQ ID NO: 636206 - DNA, 33 bp, Homo sapien
ataaagtctccacaaatgctgaattagcaaata

SEQ ID NO: 636207 - DNA, 33 bp, Homo sapien
tagttactgtctccaaagaacttagatgtcaga

SEQ ID NO: 636208 - DNA, 33 bp, Homo sapien
tagttactgtctccaacgaacttagatgtcaga

SEQ ID NO: 636209 - DNA, 33 bp, Homo sapien
tcatcctcaaccaacaaatctaattaaaagctt

SEQ ID NO: 636210 - DNA, 33 bp, Homo sapien
tcatcctcaaccaacagatctaattaaaagctt

SEQ ID NO: 636211 - DNA, 33 bp, Homo sapien
cattactgatagactacgttagcattcactttg

SEQ ID NO: 636212 - DNA, 33 bp, Homo sapien
cattactgatagactatgttagcattcactttg

SEQ ID NO: 636213 - DNA, 33 bp, Homo sapien
tttagacaccgttttcacctctaatagccagca

SEQ ID NO: 636214 - DNA, 33 bp, Homo sapien
tttagacaccgttttctcctctaatagccagca

SEQ ID NO: 636215 - DNA, 33 bp, Homo sapien
gttctgtgtatagttaaggaacaatctacaaaa

SEQ ID NO: 636216 - DNA, 33 bp, Homo sapien
gttctgtgtatagttatggaacaatctacaaaa

SEQ ID NO: 636217 - DNA, 33 bp, Homo sapien
gggctctgttaaacagaaaggttggatattata

SEQ ID NO: 636218 - DNA, 33 bp, Homo sapien
gggctctgttaaacaggaaggttggatattata

SEQ ID NO: 636219 - DNA, 33 bp, Homo sapien
gataatctgatcaccacaaatggcaagggtgat

SEQ ID NO: 636220 - DNA, 33 bp, Homo sapien
gataatctgatcaccagaaatggcaagggtgat

SEQ ID NO: 636221 - DNA, 33 bp, Homo sapien
caagtcttccggttagcacttactgggcaaagg

SEQ ID NO: 636222 - DNA, 33 bp, Homo sapien
caagtcttccggttagtacttactgggcaaagg

SEQ ID NO: 636223 - DNA, 33 bp, Homo sapien
ttggattttgctaaccccttctgaagaaggctt

SEQ ID NO: 636224 - DNA, 33 bp, Homo sapien
ttggattttgctaacctcttctgaagaaggctt

SEQ ID NO: 636225 - DNA, 33 bp, Homo sapien
atgttttttccagtacactgaatcatttctaaa

SEQ ID NO: 636226 - DNA, 33 bp, Homo sapien
atgttttttccagtacgctgaatcatttctaaa

SEQ ID NO: 636227 - DNA, 33 bp, Homo sapien
gtgcttaaacatatacaacgcattaaatgaagc

SEQ ID NO: 636228 - DNA, 33 bp, Homo sapien
gtgcttaaacatatacgacgcattaaatgaagc

SEQ ID NO: 636229 - DNA, 33 bp, Homo sapien
atttctctgatgattacggacaatgagcatttt

SEQ ID NO: 636230 - DNA, 33 bp, Homo sapien
atttctctgatgattagggacaatgagcatttt

SEQ ID NO: 636231 - DNA, 33 bp, Homo sapien
gagcagctacataggacacagaagtagtaaaca

SEQ ID NO: 636232 - DNA, 33 bp, Homo sapien
gagcagctacataggatacagaagtagtaaaca

SEQ ID NO: 636233 - DNA, 33 bp, Homo sapien
tgacaagcaaaattgccaaatctgctgaagaac

SEQ ID NO: 636234 - DNA, 33 bp, Homo sapien
tgacaagcaaaattgcgaaatctgctgaagaac

SEQ ID NO: 636235 - DNA, 33 bp, Homo sapien
tatgaactaagtctgaagctggtggcagaggta

SEQ ID NO: 636236 - DNA, 33 bp, Homo sapien
tatgaactaagtctgaggctggtggcagaggta

SEQ ID NO: 636237 - DNA, 33 bp, Homo sapien
acacttagtatgccaagaacttttcatatatta

SEQ ID NO: 636238 - DNA, 33 bp, Homo sapien
acacttagtatgccaataacttttcatatatta

SEQ ID NO: 636239 - DNA, 33 bp, Homo sapien
aagatcaagtcccctccgagaggcagcatgaag

SEQ ID NO: 636240 - DNA, 33 bp, Homo sapien
aagatcaagtcccctctgagaggcagcatgaag

SEQ ID NO: 636241 - DNA, 33 bp, Homo sapien
taagcaaggagactgacgttttctgttaaaaac

SEQ ID NO: 636242 - DNA, 33 bp, Homo sapien
taagcaaggagactgaggttttctgttaaaaac

SEQ ID NO: 636243 - DNA, 33 bp, Homo sapien
ttggaacaacatccaacagttggaattgtgaag

SEQ ID NO: 636244 - DNA, 33 bp, Homo sapien
ttggaacaacatccaatagttggaattgtgaag

SEQ ID NO: 636245 - DNA, 33 bp, Homo sapien
ttcttgcttgttgttacgtcttttgaattggat

SEQ ID NO: 636246 - DNA, 33 bp, Homo sapien
ttcttgcttgttgttatgtcttttgaattggat

SEQ ID NO: 636247 - DNA, 33 bp, Homo sapien
gtttttgtctggatcaaagatgaatagacaggg

SEQ ID NO: 636248 - DNA, 33 bp, Homo sapien
gtttttgtctggatcacagatgaatagacaggg

SEQ ID NO: 636249 - DNA, 33 bp, Homo sapien
tcatcaagaaaaggagaagccagtagaagaaac

SEQ ID NO: 636250 - DNA, 33 bp, Homo sapien
tcatcaagaaaaggaggagccagtagaagaaac

SEQ ID NO: 636251 - DNA, 33 bp, Homo sapien
cctgataattgtgagacagagcactaaatatga

SEQ ID NO: 636252 - DNA, 33 bp, Homo sapien
cctgataattgtgagagagagcactaaatatga

SEQ ID NO: 636253 - DNA, 33 bp, Homo sapien
tatatgacctttctcaatgacaaacctgtgtgc

SEQ ID NO: 636254 - DNA, 33 bp, Homo sapien
tatatgacctttctcagtgacaaacctgtgtgc

SEQ ID NO: 636255 - DNA, 33 bp, Homo sapien
atgtatgagcaacagtaaagtgcatgcccacag

SEQ ID NO: 636256 - DNA, 33 bp, Homo sapien
atgtatgagcaacagtcaagtgcatgcccacag

SEQ ID NO: 636257 - DNA, 33 bp, Homo sapien
acccaagtttgtgagacgcggtaacctagaagg

SEQ ID NO: 636258 - DNA, 33 bp, Homo sapien
acccaagtttgtgagatgcggtaacctagaagg

SEQ ID NO: 636259 - DNA, 33 bp, Homo sapien
gtagtttgatagtagaaagcctgattaggagag

SEQ ID NO: 636260 - DNA, 33 bp, Homo sapien
gtagtttgatagtagagagcctgattaggagag

SEQ ID NO: 636261 - DNA, 33 bp, Homo sapien
atacagccctggctcaactctgggaaagaagca

SEQ ID NO: 636262 - DNA, 33 bp, Homo sapien
atacagccctggctcagctctgggaaagaagca

SEQ ID NO: 636263 - DNA, 33 bp, Homo sapien
ggcatgctataaactgaaactctgaaaagacat

SEQ ID NO: 636264 - DNA, 33 bp, Homo sapien
ggcatgctataaactggaactctgaaaagacat

SEQ ID NO: 636265 - DNA, 33 bp, Homo sapien
tgctgccttttgaaacactcaggaaatatagtt

SEQ ID NO: 636266 - DNA, 33 bp, Homo sapien
tgctgccttttgaaacgctcaggaaatatagtt

SEQ ID NO: 636267 - DNA, 33 bp, Homo sapien
tagaattctacgcatcaaattccaattcaaatt

SEQ ID NO: 636268 - DNA, 33 bp, Homo sapien
tagaattctacgcatccaattccaattcaaatt

SEQ ID NO: 636269 - DNA, 33 bp, Homo sapien
gcactgccattgtttccaatactctcagcttta

SEQ ID NO: 636270 - DNA, 33 bp, Homo sapien
gcactgccattgtttctaatactctcagcttta

SEQ ID NO: 636271 - DNA, 33 bp, Homo sapien
ggggttattatagggactaagtgagaaaatgtt

SEQ ID NO: 636272 - DNA, 33 bp, Homo sapien
ggggttattatagggattaagtgagaaaatgtt

SEQ ID NO: 636273 - DNA, 33 bp, Homo sapien
actttgagtttctgcaaattgtgagaaggtaaa

SEQ ID NO: 636274 - DNA, 33 bp, Homo sapien
actttgagtttctgcagattgtgagaaggtaaa

SEQ ID NO: 636275 - DNA, 33 bp, Homo sapien
tataatctgcctgataataataagcaacttgta

SEQ ID NO: 636276 - DNA, 33 bp, Homo sapien
tataatctgcctgatagtaataagcaacttgta

SEQ ID NO: 636277 - DNA, 33 bp, Homo sapien
aatatttgggggtctaaccttttagctggaagc

SEQ ID NO: 636278 - DNA, 33 bp, Homo sapien
aatatttgggggtctagccttttagctggaagc

SEQ ID NO: 636279 - DNA, 33 bp, Homo sapien
tagtggcagggaatagacagtaaaggcctcctt

SEQ ID NO: 636280 - DNA, 33 bp, Homo sapien
tagtggcagggaataggcagtaaaggcctcctt

SEQ ID NO: 636281 - DNA, 33 bp, Homo sapien
agcaagtcgggaataactacctcccttgacatc

SEQ ID NO: 636282 - DNA, 33 bp, Homo sapien
agcaagtcgggaataattacctcccttgacatc

SEQ ID NO: 636283 - DNA, 33 bp, Homo sapien
ttttcatggtaaaagcaagagagaacactgtag

SEQ ID NO: 636284 - DNA, 33 bp, Homo sapien
ttttcatggtaaaagccagagagaacactgtag

SEQ ID NO: 636285 - DNA, 33 bp, Homo sapien
tgttgtggcccttgtaagtgaacttccttgaat

SEQ ID NO: 636286 - DNA, 33 bp, Homo sapien
tgttgtggcccttgtaggtgaacttccttgaat

SEQ ID NO: 636287 - DNA, 33 bp, Homo sapien
gtcactgcaggaatcacctggctctagggggat

SEQ ID NO: 636288 - DNA, 33 bp, Homo sapien
gtcactgcaggaatcagctggctctagggggat

SEQ ID NO: 636289 - DNA, 33 bp, Homo sapien
ctgcccttcctcatacagcattctacatagcac

SEQ ID NO: 636290 - DNA, 33 bp, Homo sapien
ctgcccttcctcatacggcattctacatagcac

SEQ ID NO: 636291 - DNA, 33 bp, Homo sapien
tgttgcacagatgtcacaaagaccaatacattc

SEQ ID NO: 636292 - DNA, 33 bp, Homo sapien
tgttgcacagatgtcagaaagaccaatacattc

SEQ ID NO: 636293 - DNA, 33 bp, Homo sapien
atctgcttgtagtcacagtgaattttttaaaaa

SEQ ID NO: 636294 - DNA, 33 bp, Homo sapien
atctgcttgtagtcacggtgaattttttaaaaa

SEQ ID NO: 636295 - DNA, 33 bp, Homo sapien
tggtcagagagtgggacgctgtgaaacatactt

SEQ ID NO: 636296 - DNA, 33 bp, Homo sapien
tggtcagagagtgggatgctgtgaaacatactt

SEQ ID NO: 636297 - DNA, 33 bp, Homo sapien
tttcataacaagggcactattggcatttgggga

SEQ ID NO: 636298 - DNA, 33 bp, Homo sapien
tttcataacaagggcattattggcatttgggga

SEQ ID NO: 636299 - DNA, 33 bp, Homo sapien
caaagtaaaaaattcacatcctcagacacactg

SEQ ID NO: 636300 - DNA, 33 bp, Homo sapien
caaagtaaaaaattcagatcctcagacacactg

SEQ ID NO: 636301 - DNA, 33 bp, Homo sapien
atagactatgactatcacgtgttttctaagatc

SEQ ID NO: 636302 - DNA, 33 bp, Homo sapien
atagactatgactatcgcgtgttttctaagatc

SEQ ID NO: 636303 - DNA, 33 bp, Homo sapien
ctgtagggttactcagaacaacactataattgc

SEQ ID NO: 636304 - DNA, 33 bp, Homo sapien
ctgtagggttactcagcacaacactataattgc

SEQ ID NO: 636305 - DNA, 33 bp, Homo sapien
ttgactggagaatccactagggaatctgagcaa

SEQ ID NO: 636306 - DNA, 33 bp, Homo sapien
ttgactggagaatccattagggaatctgagcaa

SEQ ID NO: 636307 - DNA, 33 bp, Homo sapien
aaacttctttgcaatccctgcttttagctagcg

SEQ ID NO: 636308 - DNA, 33 bp, Homo sapien
aaacttctttgcaatctctgcttttagctagcg

SEQ ID NO: 636309 - DNA, 33 bp, Homo sapien
cccactttaaccagagaccgggaagaggaattt

SEQ ID NO: 636310 - DNA, 33 bp, Homo sapien
cccactttaaccagagtccgggaagaggaattt

SEQ ID NO: 636311 - DNA, 33 bp, Homo sapien
aagtgttccatgactcaaaaaacagtaatacta

SEQ ID NO: 636312 - DNA, 33 bp, Homo sapien
aagtgttccatgactcgaaaaacagtaatacta

SEQ ID NO: 636313 - DNA, 33 bp, Homo sapien
catgcaaacagattaccacagtataaaatgaca

SEQ ID NO: 636314 - DNA, 33 bp, Homo sapien
catgcaaacagattacgacagtataaaatgaca

SEQ ID NO: 636315 - DNA, 33 bp, Homo sapien
ctatatgctccctaaacgcaaggacgatttcct

SEQ ID NO: 636316 - DNA, 33 bp, Homo sapien
ctatatgctccctaaatgcaaggacgatttcct

SEQ ID NO: 636317 - DNA, 33 bp, Homo sapien
caaaatctgtctacaccgggtttaatcagacac

SEQ ID NO: 636318 - DNA, 33 bp, Homo sapien
caaaatctgtctacactgggtttaatcagacac

SEQ ID NO: 636319 - DNA, 33 bp, Homo sapien
agtcttgctggacatgcatatactgtacttctc

SEQ ID NO: 636320 - DNA, 33 bp, Homo sapien
agtcttgctggacatgtatatactgtacttctc

SEQ ID NO: 636321 - DNA, 33 bp, Homo sapien
tttcatttatatttcaacagaacttctgccctt

SEQ ID NO: 636322 - DNA, 33 bp, Homo sapien
tttcatttatatttcatcagaacttctgccctt

SEQ ID NO: 636323 - DNA, 33 bp, Homo sapien
agctcagcttggcatacgctgtttgttgaacat

SEQ ID NO: 636324 - DNA, 33 bp, Homo sapien
agctcagcttggcatatgctgtttgttgaacat

SEQ ID NO: 636325 - DNA, 33 bp, Homo sapien
aagtagtatctttttacctttggaattcggaaa

SEQ ID NO: 636326 - DNA, 33 bp, Homo sapien
aagtagtatctttttatctttggaattcggaaa

SEQ ID NO: 636327 - DNA, 33 bp, Homo sapien
ttaaatatgctaattcaccactacaatttaaaa

SEQ ID NO: 636328 - DNA, 33 bp, Homo sapien
ttaaatatgctaattcgccactacaatttaaaa

SEQ ID NO: 636329 - DNA, 33 bp, Homo sapien
ggaaatagtcccagttcaaatcatgtaaatgaa

SEQ ID NO: 636330 - DNA, 33 bp, Homo sapien
ggaaatagtcccagttgaaatcatgtaaatgaa

SEQ ID NO: 636331 - DNA, 33 bp, Homo sapien
aatgtggttatcaccacgtaatgaagacctgcc

SEQ ID NO: 636332 - DNA, 33 bp, Homo sapien
aatgtggttatcaccatgtaatgaagacctgcc

SEQ ID NO: 636333 - DNA, 33 bp, Homo sapien
tctgagatgcctattacatcatgttttaagttc

SEQ ID NO: 636334 - DNA, 33 bp, Homo sapien
tctgagatgcctattatatcatgttttaagttc

SEQ ID NO: 636335 - DNA, 33 bp, Homo sapien
atcaatctagtggacacgatggatatttaataa

SEQ ID NO: 636336 - DNA, 33 bp, Homo sapien
atcaatctagtggacaggatggatatttaataa

SEQ ID NO: 636337 - DNA, 33 bp, Homo sapien
ggaccaggaaatttaaatctacatccgaggacc

SEQ ID NO: 636338 - DNA, 33 bp, Homo sapien
ggaccaggaaatttaagtctacatccgaggacc

SEQ ID NO: 636339 - DNA, 33 bp, Homo sapien
taaaaggtactgtccacagtgttttataagcac

SEQ ID NO: 636340 - DNA, 33 bp, Homo sapien
taaaaggtactgtccatagtgttttataagcac

SEQ ID NO: 636341 - DNA, 33 bp, Homo sapien
tcttttctattttggacagaattctatgacaag

SEQ ID NO: 636342 - DNA, 33 bp, Homo sapien
tcttttctattttggagagaattctatgacaag

SEQ ID NO: 636343 - DNA, 33 bp, Homo sapien
agcatggtatctctgcacatatcttcaattatt

SEQ ID NO: 636344 - DNA, 33 bp, Homo sapien
agcatggtatctctgcgcatatcttcaattatt

SEQ ID NO: 636345 - DNA, 33 bp, Homo sapien
ttatctgctgcttggtaaatctggactaaacaa

SEQ ID NO: 636346 - DNA, 33 bp, Homo sapien
ttatctgctgcttggtcaatctggactaaacaa

SEQ ID NO: 636347 - DNA, 33 bp, Homo sapien
ctgctcattacgtaaaatatggttaatgtgatg

SEQ ID NO: 636348 - DNA, 33 bp, Homo sapien
ctgctcattacgtaaattatggttaatgtgatg

SEQ ID NO: 636349 - DNA, 33 bp, Homo sapien
cattcaatacgtttgcaagatctgcagtgtcat

SEQ ID NO: 636350 - DNA, 33 bp, Homo sapien
cattcaatacgtttgcgagatctgcagtgtcat

SEQ ID NO: 636351 - DNA, 33 bp, Homo sapien
tttgttaaactacccaaaatttactttgcatat

SEQ ID NO: 636352 - DNA, 33 bp, Homo sapien
tttgttaaactacccacaatttactttgcatat

SEQ ID NO: 636353 - DNA, 33 bp, Homo sapien
tagtatgtcagtcaggaagcctgaggtctaatt

SEQ ID NO: 636354 - DNA, 33 bp, Homo sapien
tagtatgtcagtcagggagcctgaggtctaatt

SEQ ID NO: 636355 - DNA, 33 bp, Homo sapien
ttctcatatgtaaactcaaaggattagactaaa

SEQ ID NO: 636356 - DNA, 33 bp, Homo sapien
ttctcatatgtaaactgaaaggattagactaaa

SEQ ID NO: 636357 - DNA, 33 bp, Homo sapien
aaacattactgaggagacagaagagtgaggtgg

SEQ ID NO: 636358 - DNA, 33 bp, Homo sapien
aaacattactgaggagccagaagagtgaggtgg

SEQ ID NO: 636359 - DNA, 33 bp, Homo sapien
tttttcatttacgtaacagtctggtatcagtgc

SEQ ID NO: 636360 - DNA, 33 bp, Homo sapien
tttttcatttacgtaagagtctggtatcagtgc

SEQ ID NO: 636361 - DNA, 33 bp, Homo sapien
tgctactagatttaggaaaactcaacacagacc

SEQ ID NO: 636362 - DNA, 33 bp, Homo sapien
tgctactagatttagggaaactcaacacagacc

SEQ ID NO: 636363 - DNA, 33 bp, Homo sapien
tctggaaacatcaatacgggatgtctgttatgt

SEQ ID NO: 636364 - DNA, 33 bp, Homo sapien
tctggaaacatcaatatgggatgtctgttatgt

SEQ ID NO: 636365 - DNA, 33 bp, Homo sapien
gcatgtaatttgtaaacgtgttatggtttcata

SEQ ID NO: 636366 - DNA, 33 bp, Homo sapien
gcatgtaatttgtaaatgtgttatggtttcata

SEQ ID NO: 636367 - DNA, 33 bp, Homo sapien
acacagagccagatgaagagtcaagcgtcacta

SEQ ID NO: 636368 - DNA, 33 bp, Homo sapien
acacagagccagatgaggagtcaagcgtcacta

SEQ ID NO: 636369 - DNA, 33 bp, Homo sapien
ttttctcacaacacaacactgttctatgccaac

SEQ ID NO: 636370 - DNA, 33 bp, Homo sapien
ttttctcacaacacaagactgttctatgccaac

SEQ ID NO: 636371 - DNA, 33 bp, Homo sapien
atgtggagacatcatccagggctgtagagttga

SEQ ID NO: 636372 - DNA, 33 bp, Homo sapien
atgtggagacatcatcgagggctgtagagttga

SEQ ID NO: 636373 - DNA, 33 bp, Homo sapien
gcagtgagataaattgaatacccataaactgaa

SEQ ID NO: 636374 - DNA, 33 bp, Homo sapien
gcagtgagataaattggatacccataaactgaa

SEQ ID NO: 636375 - DNA, 33 bp, Homo sapien
ctatttagaagtttgacggtatagttgtgacca

SEQ ID NO: 636376 - DNA, 33 bp, Homo sapien
ctatttagaagtttgatggtatagttgtgacca

SEQ ID NO: 636377 - DNA, 33 bp, Homo sapien
tgtgttcctgttgtgacatatgtttagttcaag

SEQ ID NO: 636378 - DNA, 33 bp, Homo sapien
tgtgttcctgttgtgatatatgtttagttcaag

SEQ ID NO: 636379 - DNA, 33 bp, Homo sapien
atattgtaactccctacgtttccattccaaact

SEQ ID NO: 636380 - DNA, 33 bp, Homo sapien
atattgtaactccctatgtttccattccaaact

SEQ ID NO: 636381 - DNA, 33 bp, Homo sapien
tgaagatgctgtgctacgcattccaaatggcgc

SEQ ID NO: 636382 - DNA, 33 bp, Homo sapien
tgaagatgctgtgctatgcattccaaatggcgc

SEQ ID NO: 636383 - DNA, 33 bp, Homo sapien
aaactaatcttgacgaagatgatgaagaagaaa

SEQ ID NO: 636384 - DNA, 33 bp, Homo sapien
aaactaatcttgacgaggatgatgaagaagaaa

SEQ ID NO: 636385 - DNA, 33 bp, Homo sapien
actagttctcaaatcaaccacatcgggtaggtt

SEQ ID NO: 636386 - DNA, 33 bp, Homo sapien
actagttctcaaatcagccacatcgggtaggtt

SEQ ID NO: 636387 - DNA, 33 bp, Homo sapien
tttaaaaacactttgacgatgacttagttccct

SEQ ID NO: 636388 - DNA, 33 bp, Homo sapien
tttaaaaacactttgaggatgacttagttccct

SEQ ID NO: 636389 - DNA, 33 bp, Homo sapien
tgtgccgctataacagaacctgagactaggtaa

SEQ ID NO: 636390 - DNA, 33 bp, Homo sapien
tgtgccgctataacaggacctgagactaggtaa

SEQ ID NO: 636391 - DNA, 33 bp, Homo sapien
gagatgagacagtaaaaactggaaggaaaaagg

SEQ ID NO: 636392 - DNA, 33 bp, Homo sapien
gagatgagacagtaaacactggaaggaaaaagg

SEQ ID NO: 636393 - DNA, 33 bp, Homo sapien
cactacaggcaatgctcaaccaattggtgggtt

SEQ ID NO: 636394 - DNA, 33 bp, Homo sapien
cactacaggcaatgcttaaccaattggtgggtt

SEQ ID NO: 636395 - DNA, 33 bp, Homo sapien
ctctgtaacaaaccataaccatgagtacatagt

SEQ ID NO: 636396 - DNA, 33 bp, Homo sapien
ctctgtaacaaaccatcaccatgagtacatagt

SEQ ID NO: 636397 - DNA, 33 bp, Homo sapien
taaaagtaccacctacagctttttatataatct

SEQ ID NO: 636398 - DNA, 33 bp, Homo sapien
taaaagtaccacctaccgctttttatataatct

SEQ ID NO: 636399 - DNA, 33 bp, Homo sapien
ccactgatttctttaacgagcattctatgaatc

SEQ ID NO: 636400 - DNA, 33 bp, Homo sapien
ccactgatttctttaatgagcattctatgaatc

SEQ ID NO: 636401 - DNA, 33 bp, Homo sapien
ttgaagccctaaacaactctgtagctcagtgaa

SEQ ID NO: 636402 - DNA, 33 bp, Homo sapien
ttgaagccctaaacaattctgtagctcagtgaa

SEQ ID NO: 636403 - DNA, 33 bp, Homo sapien
gatagtgtgtgccataagtagttagagaaggct

SEQ ID NO: 636404 - DNA, 33 bp, Homo sapien
gatagtgtgtgccatacgtagttagagaaggct

SEQ ID NO: 636405 - DNA, 33 bp, Homo sapien
ctggctctgtcacttacaagccacactgaatct

SEQ ID NO: 636406 - DNA, 33 bp, Homo sapien
ctggctctgtcacttataagccacactgaatct

SEQ ID NO: 636407 - DNA, 33 bp, Homo sapien
aataaatcacagtaggacaaatgttaataagac

SEQ ID NO: 636408 - DNA, 33 bp, Homo sapien
aataaatcacagtagggcaaatgttaataagac

SEQ ID NO: 636409 - DNA, 33 bp, Homo sapien
tgatgaaaataagcaccaatgattgtttttttt

SEQ ID NO: 636410 - DNA, 33 bp, Homo sapien
tgatgaaaataagcactaatgattgtttttttt

SEQ ID NO: 636411 - DNA, 33 bp, Homo sapien
ggctagttacctgttgcaaatgttgtttctgta

SEQ ID NO: 636412 - DNA, 33 bp, Homo sapien
ggctagttacctgttgtaaatgttgtttctgta

SEQ ID NO: 636413 - DNA, 33 bp, Homo sapien
aaggcatttctgtaaacgagaaaagtcttctga

SEQ ID NO: 636414 - DNA, 33 bp, Homo sapien
aaggcatttctgtaaatgagaaaagtcttctga

SEQ ID NO: 636415 - DNA, 33 bp, Homo sapien
gattttttagcctgcaaaagtgccacctttgaa

SEQ ID NO: 636416 - DNA, 33 bp, Homo sapien
gattttttagcctgcacaagtgccacctttgaa

SEQ ID NO: 636417 - DNA, 33 bp, Homo sapien
taaatgttgccattaacagagcaagcataatgt

SEQ ID NO: 636418 - DNA, 33 bp, Homo sapien
taaatgttgccattaagagagcaagcataatgt

SEQ ID NO: 636419 - DNA, 33 bp, Homo sapien
gctttagaaatagacactgcctgaatcccagtg

SEQ ID NO: 636420 - DNA, 33 bp, Homo sapien
gctttagaaatagacattgcctgaatcccagtg

SEQ ID NO: 636421 - DNA, 33 bp, Homo sapien
atgcttaaaatacgtacggctaagtgcttcagc

SEQ ID NO: 636422 - DNA, 33 bp, Homo sapien
atgcttaaaatacgtatggctaagtgcttcagc

SEQ ID NO: 636423 - DNA, 33 bp, Homo sapien
gggccccgtggcttgaagttgaaatcagcacat

SEQ ID NO: 636424 - DNA, 33 bp, Homo sapien
gggccccgtggcttgaggttgaaatcagcacat

SEQ ID NO: 636425 - DNA, 33 bp, Homo sapien
ttggtctctagttcttaaaaagcacttcggtag

SEQ ID NO: 636426 - DNA, 33 bp, Homo sapien
ttggtctctagttctttaaaagcacttcggtag

SEQ ID NO: 636427 - DNA, 33 bp, Homo sapien
ctattaatatgtatccaaaggttagcttttatt

SEQ ID NO: 636428 - DNA, 33 bp, Homo sapien
ctattaatatgtatccgaaggttagcttttatt

SEQ ID NO: 636429 - DNA, 33 bp, Homo sapien
agtttgcaactatgtacatctcctcacatcaaa

SEQ ID NO: 636430 - DNA, 33 bp, Homo sapien
agtttgcaactatgtatatctcctcacatcaaa

SEQ ID NO: 636431 - DNA, 33 bp, Homo sapien
ttgaattaaactgaaggaggtagattaattttt

SEQ ID NO: 636432 - DNA, 33 bp, Homo sapien
ttgaattaaactgaagtaggtagattaattttt

SEQ ID NO: 636433 - DNA, 33 bp, Homo sapien
gtaggtaatatctacaaacttcactttatgatg

SEQ ID NO: 636434 - DNA, 33 bp, Homo sapien
gtaggtaatatctacagacttcactttatgatg

SEQ ID NO: 636435 - DNA, 33 bp, Homo sapien
aggtgaagcattggcacgatgttgctaattaca

SEQ ID NO: 636436 - DNA, 33 bp, Homo sapien
aggtgaagcattggcatgatgttgctaattaca

SEQ ID NO: 636437 - DNA, 33 bp, Homo sapien
acaagaacccaaagaacgaatgctttttagcaa

SEQ ID NO: 636438 - DNA, 33 bp, Homo sapien
acaagaacccaaagaatgaatgctttttagcaa

SEQ ID NO: 636439 - DNA, 33 bp, Homo sapien
agtcagaaaatccagacagataaatgtcaatgg

SEQ ID NO: 636440 - DNA, 33 bp, Homo sapien
agtcagaaaatccagatagataaatgtcaatgg

SEQ ID NO: 636441 - DNA, 33 bp, Homo sapien
caaagcacaaaaagcacggtatagaagaaggct

SEQ ID NO: 636442 - DNA, 33 bp, Homo sapien
caaagcacaaaaagcatggtatagaagaaggct

SEQ ID NO: 636443 - DNA, 33 bp, Homo sapien
acggtggcatcagctacaagacagtaatggtgc

SEQ ID NO: 636444 - DNA, 33 bp, Homo sapien
acggtggcatcagctagaagacagtaatggtgc

SEQ ID NO: 636445 - DNA, 33 bp, Homo sapien
aatacacacagttcaagattaactcaaatctgt

SEQ ID NO: 636446 - DNA, 33 bp, Homo sapien
aatacacacagttcaatattaactcaaatctgt

SEQ ID NO: 636447 - DNA, 33 bp, Homo sapien
aggaatttacaatccactgaaaagagataatta

SEQ ID NO: 636448 - DNA, 33 bp, Homo sapien
aggaatttacaatccagtgaaaagagataatta

SEQ ID NO: 636449 - DNA, 33 bp, Homo sapien
ccacaacctggtcaaactaccttggttttactt

SEQ ID NO: 636450 - DNA, 33 bp, Homo sapien
ccacaacctggtcaaattaccttggttttactt

SEQ ID NO: 636451 - DNA, 33 bp, Homo sapien
cagcagtctgaatatcaaatcttcactactctt

SEQ ID NO: 636452 - DNA, 33 bp, Homo sapien
cagcagtctgaatatccaatcttcactactctt

SEQ ID NO: 636453 - DNA, 33 bp, Homo sapien
taatcaacagttgggccataaagatggaatcat

SEQ ID NO: 636454 - DNA, 33 bp, Homo sapien
taatcaacagttgggctataaagatggaatcat

SEQ ID NO: 636455 - DNA, 33 bp, Homo sapien
agtggcaataagtaaacagataactgatgaaca

SEQ ID NO: 636456 - DNA, 33 bp, Homo sapien
agtggcaataagtaaatagataactgatgaaca

SEQ ID NO: 636457 - DNA, 33 bp, Homo sapien
tcaaagagacagagaagaactgacatgatgctg

SEQ ID NO: 636458 - DNA, 33 bp, Homo sapien
tcaaagagacagagaataactgacatgatgctg

SEQ ID NO: 636459 - DNA, 33 bp, Homo sapien
aaggaaccagcatctacaataagaggtagaaca

SEQ ID NO: 636460 - DNA, 33 bp, Homo sapien
aaggaaccagcatctagaataagaggtagaaca

SEQ ID NO: 636461 - DNA, 33 bp, Homo sapien
caatgagcttcattcaaattatcctcaggaaag

SEQ ID NO: 636462 - DNA, 33 bp, Homo sapien
caatgagcttcattcagattatcctcaggaaag

SEQ ID NO: 636463 - DNA, 33 bp, Homo sapien
agacacaagtgatcatcatcatacgaacttaat

SEQ ID NO: 636464 - DNA, 33 bp, Homo sapien
agacacaagtgatcattatcatacgaacttaat

SEQ ID NO: 636465 - DNA, 33 bp, Homo sapien
aattgatgacaaccaaagaaggtagttttccta

SEQ ID NO: 636466 - DNA, 33 bp, Homo sapien
aattgatgacaaccaaggaaggtagttttccta

SEQ ID NO: 636467 - DNA, 33 bp, Homo sapien
agaaccagcttcacgaaactgtaagttattact

SEQ ID NO: 636468 - DNA, 33 bp, Homo sapien
agaaccagcttcacgatactgtaagttattact

SEQ ID NO: 636469 - DNA, 33 bp, Homo sapien
aaagaaccatggaaaaactgtggtgtagctgtc

SEQ ID NO: 636470 - DNA, 33 bp, Homo sapien
aaagaaccatggaaaagctgtggtgtagctgtc

SEQ ID NO: 636471 - DNA, 33 bp, Homo sapien
gaacaggtcagacttacgggctaagatgtaaat

SEQ ID NO: 636472 - DNA, 33 bp, Homo sapien
gaacaggtcagacttatgggctaagatgtaaat

SEQ ID NO: 636473 - DNA, 33 bp, Homo sapien
atgttttgcagatgcaatattaaaacaatccat

SEQ ID NO: 636474 - DNA, 33 bp, Homo sapien
atgttttgcagatgcattattaaaacaatccat

SEQ ID NO: 636475 - DNA, 33 bp, Homo sapien
ctatctcacttcctaactcaaaaattatgttta

SEQ ID NO: 636476 - DNA, 33 bp, Homo sapien
ctatctcacttcctaattcaaaaattatgttta

SEQ ID NO: 636477 - DNA, 33 bp, Homo sapien
ttgtccttatccattacacttcattttacagaa

SEQ ID NO: 636478 - DNA, 33 bp, Homo sapien
ttgtccttatccattagacttcattttacagaa

SEQ ID NO: 636479 - DNA, 33 bp, Homo sapien
cctcaatttcagctgcactagactctgactact

SEQ ID NO: 636480 - DNA, 33 bp, Homo sapien
cctcaatttcagctgcgctagactctgactact

SEQ ID NO: 636481 - DNA, 33 bp, Homo sapien
tgctctttgtttttcccgatgtaatggcaagag

SEQ ID NO: 636482 - DNA, 33 bp, Homo sapien
tgctctttgtttttcctgatgtaatggcaagag

SEQ ID NO: 636483 - DNA, 33 bp, Homo sapien
tggagacaggtattcaagagcaagtattttatt

SEQ ID NO: 636484 - DNA, 33 bp, Homo sapien
tggagacaggtattcacgagcaagtattttatt

SEQ ID NO: 636485 - DNA, 33 bp, Homo sapien
atgatgtgtcttcttacagtcatttcttccaaa

SEQ ID NO: 636486 - DNA, 33 bp, Homo sapien
atgatgtgtcttcttatagtcatttcttccaaa

SEQ ID NO: 636487 - DNA, 33 bp, Homo sapien
actggaggagagaatacaggagagaggttaaca

SEQ ID NO: 636488 - DNA, 33 bp, Homo sapien
actggaggagagaatataggagagaggttaaca

SEQ ID NO: 636489 - DNA, 33 bp, Homo sapien
gaaataatactgaaaaagtttacgccctttgat

SEQ ID NO: 636490 - DNA, 33 bp, Homo sapien
gaaataatactgaaaaggtttacgccctttgat

SEQ ID NO: 636491 - DNA, 33 bp, Homo sapien
gctctctcttagaacccagacatcattcagtta

SEQ ID NO: 636492 - DNA, 33 bp, Homo sapien
gctctctcttagaacctagacatcattcagtta

SEQ ID NO: 636493 - DNA, 33 bp, Homo sapien
accagaggaagacaacagccagataataccaga

SEQ ID NO: 636494 - DNA, 33 bp, Homo sapien
accagaggaagacaaccgccagataataccaga

SEQ ID NO: 636495 - DNA, 33 bp, Homo sapien
taaaaaactttccaccagaaaatcatccaataa

SEQ ID NO: 636496 - DNA, 33 bp, Homo sapien
taaaaaactttccaccggaaaatcatccaataa

SEQ ID NO: 636497 - DNA, 33 bp, Homo sapien
aactgataagggctcaaatacttgtcctcaatt

SEQ ID NO: 636498 - DNA, 33 bp, Homo sapien
aactgataagggctcatatacttgtcctcaatt

SEQ ID NO: 636499 - DNA, 33 bp, Homo sapien
tagcacttcatttgacacatatggattacagcc

SEQ ID NO: 636500 - DNA, 33 bp, Homo sapien
tagcacttcatttgacccatatggattacagcc

SEQ ID NO: 636501 - DNA, 33 bp, Homo sapien
caaggtcaaaattatcaaaaggcattttttcct

SEQ ID NO: 636502 - DNA, 33 bp, Homo sapien
caaggtcaaaattatccaaaggcattttttcct

SEQ ID NO: 636503 - DNA, 33 bp, Homo sapien
ctaaaatgcattaggagtcatttattctctgtc

SEQ ID NO: 636504 - DNA, 33 bp, Homo sapien
ctaaaatgcattaggattcatttattctctgtc

SEQ ID NO: 636505 - DNA, 33 bp, Homo sapien
agaaaatactgatgaaagtcaataataagtaag

SEQ ID NO: 636506 - DNA, 33 bp, Homo sapien
agaaaatactgatgaaggtcaataataagtaag

SEQ ID NO: 636507 - DNA, 33 bp, Homo sapien
tgcactgacctctttacgtggatcagtgaggtg

SEQ ID NO: 636508 - DNA, 33 bp, Homo sapien
tgcactgacctctttatgtggatcagtgaggtg

SEQ ID NO: 636509 - DNA, 33 bp, Homo sapien
gaaataatctagtcacagaaggataaataatgc

SEQ ID NO: 636510 - DNA, 33 bp, Homo sapien
gaaataatctagtcacggaaggataaataatgc

SEQ ID NO: 636511 - DNA, 33 bp, Homo sapien
agcattcttcctgctacacccaaagaactctgc

SEQ ID NO: 636512 - DNA, 33 bp, Homo sapien
agcattcttcctgctagacccaaagaactctgc

SEQ ID NO: 636513 - DNA, 33 bp, Homo sapien
tatgctctgaagatagaccccagcagctaccag

SEQ ID NO: 636514 - DNA, 33 bp, Homo sapien
tatgctctgaagataggccccagcagctaccag

SEQ ID NO: 636515 - DNA, 33 bp, Homo sapien
catcctatatgcaaataagacagcagggaacag

SEQ ID NO: 636516 - DNA, 33 bp, Homo sapien
catcctatatgcaaatgagacagcagggaacag

SEQ ID NO: 636517 - DNA, 33 bp, Homo sapien
taacacttgatgcacgaaatagcgggtggagag

SEQ ID NO: 636518 - DNA, 33 bp, Homo sapien
taacacttgatgcacggaatagcgggtggagag

SEQ ID NO: 636519 - DNA, 33 bp, Homo sapien
gccttacacagttccaagaaaatcataattaag

SEQ ID NO: 636520 - DNA, 33 bp, Homo sapien
gccttacacagttccaggaaaatcataattaag

SEQ ID NO: 636521 - DNA, 33 bp, Homo sapien
acataagcctaagttccagtcatctctttgagt

SEQ ID NO: 636522 - DNA, 33 bp, Homo sapien
acataagcctaagttctagtcatctctttgagt

SEQ ID NO: 636523 - DNA, 33 bp, Homo sapien
ttagtatttggaagaccgatggaacattgaggg

SEQ ID NO: 636524 - DNA, 33 bp, Homo sapien
ttagtatttggaagactgatggaacattgaggg

SEQ ID NO: 636525 - DNA, 33 bp, Homo sapien
ccaagattgttgaggacgttgaatgactggaac

SEQ ID NO: 636526 - DNA, 33 bp, Homo sapien
ccaagattgttgaggatgttgaatgactggaac

SEQ ID NO: 636527 - DNA, 33 bp, Homo sapien
accttctccctgcttccattaaaataactatta

SEQ ID NO: 636528 - DNA, 33 bp, Homo sapien
accttctccctgcttcgattaaaataactatta

SEQ ID NO: 636529 - DNA, 33 bp, Homo sapien
taccttcattttacgaatcaggaaactaaggct

SEQ ID NO: 636530 - DNA, 33 bp, Homo sapien
taccttcattttacgactcaggaaactaaggct

SEQ ID NO: 636531 - DNA, 33 bp, Homo sapien
cttaatctaacaaatactacacatgcacacaaa

SEQ ID NO: 636532 - DNA, 33 bp, Homo sapien
cttaatctaacaaatattacacatgcacacaaa

SEQ ID NO: 636533 - DNA, 33 bp, Homo sapien
cttgaatagtaagatacatgccttcctttgttc

SEQ ID NO: 636534 - DNA, 33 bp, Homo sapien
cttgaatagtaagatatatgccttcctttgttc

SEQ ID NO: 636535 - DNA, 33 bp, Homo sapien
tgggacagtaaaggcacgtactgaaaagcattt

SEQ ID NO: 636536 - DNA, 33 bp, Homo sapien
tgggacagtaaaggcatgtactgaaaagcattt

SEQ ID NO: 636537 - DNA, 33 bp, Homo sapien
gcgcttctcaaagtcaaataagtttacttagat

SEQ ID NO: 636538 - DNA, 33 bp, Homo sapien
gcgcttctcaaagtcacataagtttacttagat

SEQ ID NO: 636539 - DNA, 33 bp, Homo sapien
ttcactggcatagtcacacccataagttctcaa

SEQ ID NO: 636540 - DNA, 33 bp, Homo sapien
ttcactggcatagtcatacccataagttctcaa

SEQ ID NO: 636541 - DNA, 33 bp, Homo sapien
gatgactaatagcaaaaacagggacttaggatg

SEQ ID NO: 636542 - DNA, 33 bp, Homo sapien
gatgactaatagcaaatacagggacttaggatg

SEQ ID NO: 636543 - DNA, 33 bp, Homo sapien
tacttggttctaccaactcttactctactttta

SEQ ID NO: 636544 - DNA, 33 bp, Homo sapien
tacttggttctaccaattcttactctactttta

SEQ ID NO: 636545 - DNA, 33 bp, Homo sapien
tgcttcccatgtgtatcagtcaaagttttgtgg

SEQ ID NO: 636546 - DNA, 33 bp, Homo sapien
tgcttcccatgtgtattagtcaaagttttgtgg

SEQ ID NO: 636547 - DNA, 33 bp, Homo sapien
ataatgatgctcatcaaactgttatttataata

SEQ ID NO: 636548 - DNA, 33 bp, Homo sapien
ataatgatgctcatcagactgttatttataata

SEQ ID NO: 636549 - DNA, 33 bp, Homo sapien
aagatattgtgctgcacgttgccaaattgccct

SEQ ID NO: 636550 - DNA, 33 bp, Homo sapien
aagatattgtgctgcatgttgccaaattgccct

SEQ ID NO: 636551 - DNA, 33 bp, Homo sapien
tgtagctattttctaaatcctttcatacaatgg

SEQ ID NO: 636552 - DNA, 33 bp, Homo sapien
tgtagctattttctaagtcctttcatacaatgg

SEQ ID NO: 636553 - DNA, 33 bp, Homo sapien
tgggtgtgagaaggagaaatttaatgaggctct

SEQ ID NO: 636554 - DNA, 33 bp, Homo sapien
tgggtgtgagaaggaggaatttaatgaggctct

SEQ ID NO: 636555 - DNA, 33 bp, Homo sapien
ttgtgttcagtcgacaacaattcaaatgctctt

SEQ ID NO: 636556 - DNA, 33 bp, Homo sapien
ttgtgttcagtcgacagcaattcaaatgctctt

SEQ ID NO: 636557 - DNA, 33 bp, Homo sapien
aactatggccaaaaccaatgagcagtaacgtgg

SEQ ID NO: 636558 - DNA, 33 bp, Homo sapien
aactatggccaaaaccgatgagcagtaacgtgg

SEQ ID NO: 636559 - DNA, 33 bp, Homo sapien
aagcactgttattacagtcgttttagcgttgag

SEQ ID NO: 636560 - DNA, 33 bp, Homo sapien
aagcactgttattacattcgttttagcgttgag

SEQ ID NO: 636561 - DNA, 33 bp, Homo sapien
ctgagataggctaaaaactaggcctcttgtacc

SEQ ID NO: 636562 - DNA, 33 bp, Homo sapien
ctgagataggctaaaagctaggcctcttgtacc

SEQ ID NO: 636563 - DNA, 33 bp, Homo sapien
gggagagagaggaggacgaatgacttgtcagtg

SEQ ID NO: 636564 - DNA, 33 bp, Homo sapien
gggagagagaggaggaggaatgacttgtcagtg

SEQ ID NO: 636565 - DNA, 33 bp, Homo sapien
tcacccccattgtcctgagcctagcagctgagg

SEQ ID NO: 636566 - DNA, 33 bp, Homo sapien
tcacccccattgtccttagcctagcagctgagg

SEQ ID NO: 636567 - DNA, 33 bp, Homo sapien
tggaatgtgatttttacgtagccattatactat

SEQ ID NO: 636568 - DNA, 33 bp, Homo sapien
tggaatgtgatttttatgtagccattatactat

SEQ ID NO: 636569 - DNA, 33 bp, Homo sapien
gacaaccacagtgttacagcagaagtattagac

SEQ ID NO: 636570 - DNA, 33 bp, Homo sapien
gacaaccacagtgttagagcagaagtattagac

SEQ ID NO: 636571 - DNA, 33 bp, Homo sapien
cagatgagaacagtaaagcataaagtaatttac

SEQ ID NO: 636572 - DNA, 33 bp, Homo sapien
cagatgagaacagtaaggcataaagtaatttac

SEQ ID NO: 636573 - DNA, 33 bp, Homo sapien
atttgaaattatctgcaacattttgcgtttatg

SEQ ID NO: 636574 - DNA, 33 bp, Homo sapien
atttgaaattatctgcgacattttgcgtttatg

SEQ ID NO: 636575 - DNA, 33 bp, Homo sapien
gtcactcttatgtacacggattactggttaatg

SEQ ID NO: 636576 - DNA, 33 bp, Homo sapien
gtcactcttatgtacatggattactggttaatg

SEQ ID NO: 636577 - DNA, 33 bp, Homo sapien
actgcattaaggtacaccaatatggttaaatga

SEQ ID NO: 636578 - DNA, 33 bp, Homo sapien
actgcattaaggtacatcaatatggttaaatga

SEQ ID NO: 636579 - DNA, 33 bp, Homo sapien
gagctgagatagcggacgtgacagcaagcacag

SEQ ID NO: 636580 - DNA, 33 bp, Homo sapien
gagctgagatagcggaggtgacagcaagcacag

SEQ ID NO: 636581 - DNA, 33 bp, Homo sapien
aggaagtcataacaagaaagggtcacagtctga

SEQ ID NO: 636582 - DNA, 33 bp, Homo sapien
aggaagtcataacaaggaagggtcacagtctga

SEQ ID NO: 636583 - DNA, 33 bp, Homo sapien
ctatctttggaaatagccaagggaaaagtcctt

SEQ ID NO: 636584 - DNA, 33 bp, Homo sapien
ctatctttggaaatagtcaagggaaaagtcctt

SEQ ID NO: 636585 - DNA, 33 bp, Homo sapien
tacatacaattaaatacgttgggttagtgaaca

SEQ ID NO: 636586 - DNA, 33 bp, Homo sapien
tacatacaattaaatatgttgggttagtgaaca

SEQ ID NO: 636587 - DNA, 33 bp, Homo sapien
agggggtgcagaatacaagacggtgttttccct

SEQ ID NO: 636588 - DNA, 33 bp, Homo sapien
agggggtgcagaataccagacggtgttttccct

SEQ ID NO: 636589 - DNA, 33 bp, Homo sapien
acacaagatccagaacgagcttcgtttctcatt

SEQ ID NO: 636590 - DNA, 33 bp, Homo sapien
acacaagatccagaactagcttcgtttctcatt

SEQ ID NO: 636591 - DNA, 33 bp, Homo sapien
tggtggtcattgtatcaaaagtggccttggctg

SEQ ID NO: 636592 - DNA, 33 bp, Homo sapien
tggtggtcattgtatcgaaagtggccttggctg

SEQ ID NO: 636593 - DNA, 33 bp, Homo sapien
cccaccttagttccctcactctgcatttgattc

SEQ ID NO: 636594 - DNA, 33 bp, Homo sapien
cccaccttagttccctgactctgcatttgattc

SEQ ID NO: 636595 - DNA, 33 bp, Homo sapien
agagttgtgccaggaccaaaaagaatgtactgg

SEQ ID NO: 636596 - DNA, 33 bp, Homo sapien
agagttgtgccaggacgaaaaagaatgtactgg

SEQ ID NO: 636597 - DNA, 33 bp, Homo sapien
atcaacccttggttaacgtaggcattaaaagaa

SEQ ID NO: 636598 - DNA, 33 bp, Homo sapien
atcaacccttggttaaggtaggcattaaaagaa

SEQ ID NO: 636599 - DNA, 33 bp, Homo sapien
aagtcctcagattcccaaagataaaaagctcaa

SEQ ID NO: 636600 - DNA, 33 bp, Homo sapien
aagtcctcagattcccgaagataaaaagctcaa

SEQ ID NO: 636601 - DNA, 33 bp, Homo sapien
cattattggacagcaaatgttacaacttaaaat

SEQ ID NO: 636602 - DNA, 33 bp, Homo sapien
cattattggacagcaagtgttacaacttaaaat

SEQ ID NO: 636603 - DNA, 33 bp, Homo sapien
caaatagttcaccagcaaacacagacaattaag

SEQ ID NO: 636604 - DNA, 33 bp, Homo sapien
caaatagttcaccagcgaacacagacaattaag

SEQ ID NO: 636605 - DNA, 33 bp, Homo sapien
taactttgagcagctaagtaacactatataatc

SEQ ID NO: 636606 - DNA, 33 bp, Homo sapien
taactttgagcagctacgtaacactatataatc

SEQ ID NO: 636607 - DNA, 33 bp, Homo sapien
catcttagagtccccacagtcttacttcagtca

SEQ ID NO: 636608 - DNA, 33 bp, Homo sapien
catcttagagtccccagagtcttacttcagtca

SEQ ID NO: 636609 - DNA, 33 bp, Homo sapien
cacatccttgaattcaatcaacagcagatcaaa

SEQ ID NO: 636610 - DNA, 33 bp, Homo sapien
cacatccttgaattcagtcaacagcagatcaaa

SEQ ID NO: 636611 - DNA, 33 bp, Homo sapien
ctataccatttatttcaatcaaatatgcagtca

SEQ ID NO: 636612 - DNA, 33 bp, Homo sapien
ctataccatttatttccatcaaatatgcagtca

SEQ ID NO: 636613 - DNA, 33 bp, Homo sapien
caggacaatgacctaaaaccaaatcctacatgg

SEQ ID NO: 636614 - DNA, 33 bp, Homo sapien
caggacaatgacctaacaccaaatcctacatgg

SEQ ID NO: 636615 - DNA, 33 bp, Homo sapien
ttcacgggatttgtcaagggtaattttgactct

SEQ ID NO: 636616 - DNA, 33 bp, Homo sapien
ttcacgggatttgtcaggggtaattttgactct

SEQ ID NO: 636617 - DNA, 33 bp, Homo sapien
tatggaagagactcaccgatcctttgacctcca

SEQ ID NO: 636618 - DNA, 33 bp, Homo sapien
tatggaagagactcactgatcctttgacctcca

SEQ ID NO: 636619 - DNA, 33 bp, Homo sapien
attttcataaatggaaaaggtcatagtttagta

SEQ ID NO: 636620 - DNA, 33 bp, Homo sapien
attttcataaatggaagaggtcatagtttagta

SEQ ID NO: 636621 - DNA, 33 bp, Homo sapien
atcacttagagggctaccaccatattttaaccc

SEQ ID NO: 636622 - DNA, 33 bp, Homo sapien
atcacttagagggctatcaccatattttaaccc

SEQ ID NO: 636623 - DNA, 33 bp, Homo sapien
ttataaatggcctgtacaccctgagcaacccac

SEQ ID NO: 636624 - DNA, 33 bp, Homo sapien
ttataaatggcctgtataccctgagcaacccac

SEQ ID NO: 636625 - DNA, 33 bp, Homo sapien
ttcactgaattataaacgtgcaggtacactata

SEQ ID NO: 636626 - DNA, 33 bp, Homo sapien
ttcactgaattataaatgtgcaggtacactata

SEQ ID NO: 636627 - DNA, 33 bp, Homo sapien
gtggattatgttaagaaaatttgccagaaatac

SEQ ID NO: 636628 - DNA, 33 bp, Homo sapien
gtggattatgttaagacaatttgccagaaatac

SEQ ID NO: 636629 - DNA, 33 bp, Homo sapien
acacagttcagaaaatcaagagacaagggaact

SEQ ID NO: 636630 - DNA, 33 bp, Homo sapien
acacagttcagaaaattaagagacaagggaact

SEQ ID NO: 636631 - DNA, 33 bp, Homo sapien
aaaggactttcttgaacgatggcacttctgatt

SEQ ID NO: 636632 - DNA, 33 bp, Homo sapien
aaaggactttcttgaatgatggcacttctgatt

SEQ ID NO: 636633 - DNA, 33 bp, Homo sapien
atggggctattgatgcagattgaatttgcagag

SEQ ID NO: 636634 - DNA, 33 bp, Homo sapien
atggggctattgatgcggattgaatttgcagag

SEQ ID NO: 636635 - DNA, 33 bp, Homo sapien
acagacagtgctaaccacaatgtcatctttctg

SEQ ID NO: 636636 - DNA, 33 bp, Homo sapien
acagacagtgctaaccgcaatgtcatctttctg

SEQ ID NO: 636637 - DNA, 33 bp, Homo sapien
acttaagtttagataactgagataagccaggat

SEQ ID NO: 636638 - DNA, 33 bp, Homo sapien
acttaagtttagataattgagataagccaggat

SEQ ID NO: 636639 - DNA, 33 bp, Homo sapien
aaagctgagaccttgtaaaattcacatatggac

SEQ ID NO: 636640 - DNA, 33 bp, Homo sapien
aaagctgagaccttgttaaattcacatatggac

SEQ ID NO: 636641 - DNA, 33 bp, Homo sapien
tggatcttgattaaatcactacattgcctttta

SEQ ID NO: 636642 - DNA, 33 bp, Homo sapien
tggatcttgattaaattactacattgcctttta

SEQ ID NO: 636643 - DNA, 33 bp, Homo sapien
ctaataaaatcaggtgacaagtttcccttctcc

SEQ ID NO: 636644 - DNA, 33 bp, Homo sapien
ctaataaaatcaggtgccaagtttcccttctcc

SEQ ID NO: 636645 - DNA, 33 bp, Homo sapien
tgagcaaagaaagttgaaggcatgagggacggc

SEQ ID NO: 636646 - DNA, 33 bp, Homo sapien
tgagcaaagaaagttggaggcatgagggacggc

SEQ ID NO: 636647 - DNA, 33 bp, Homo sapien
gagcagtgaacaagaccaatcaaatccttaact

SEQ ID NO: 636648 - DNA, 33 bp, Homo sapien
gagcagtgaacaagactaatcaaatccttaact

SEQ ID NO: 636649 - DNA, 33 bp, Homo sapien
cgagtagcttccgatacgactgttttctttagt

SEQ ID NO: 636650 - DNA, 33 bp, Homo sapien
cgagtagcttccgatatgactgttttctttagt

SEQ ID NO: 636651 - DNA, 33 bp, Homo sapien
tttagtagaaagcaaacggcagtgtgtgggtgg

SEQ ID NO: 636652 - DNA, 33 bp, Homo sapien
tttagtagaaagcaaatggcagtgtgtgggtgg

SEQ ID NO: 636653 - DNA, 33 bp, Homo sapien
tgtgattcacatgcagcaacaatttttgtttta

SEQ ID NO: 636654 - DNA, 33 bp, Homo sapien
tgtgattcacatgcaggaacaatttttgtttta

SEQ ID NO: 636655 - DNA, 33 bp, Homo sapien
caattatgatattctactaaatggcagaaaaaa

SEQ ID NO: 636656 - DNA, 33 bp, Homo sapien
caattatgatattctattaaatggcagaaaaaa

SEQ ID NO: 636657 - DNA, 33 bp, Homo sapien
agggaagtgactggtacagtttcaaaaggtagc

SEQ ID NO: 636658 - DNA, 33 bp, Homo sapien
agggaagtgactggtagagtttcaaaaggtagc

SEQ ID NO: 636659 - DNA, 33 bp, Homo sapien
cacagcaggggagtcaagaattcggaggagtcg

SEQ ID NO: 636660 - DNA, 33 bp, Homo sapien
cacagcaggggagtcaggaattcggaggagtcg

SEQ ID NO: 636661 - DNA, 33 bp, Homo sapien
gaaaagtgggacaagccgaagagagtaaggtgt

SEQ ID NO: 636662 - DNA, 33 bp, Homo sapien
gaaaagtgggacaagctgaagagagtaaggtgt

SEQ ID NO: 636663 - DNA, 33 bp, Homo sapien
ctttccttaccgccagccatctgaaggcgactt

SEQ ID NO: 636664 - DNA, 33 bp, Homo sapien
ctttccttaccgccagtcatctgaaggcgactt

SEQ ID NO: 636665 - DNA, 33 bp, Homo sapien
tggcaaatactggctcagagaaaacccacacag

SEQ ID NO: 636666 - DNA, 33 bp, Homo sapien
tggcaaatactggctcggagaaaacccacacag

SEQ ID NO: 636667 - DNA, 33 bp, Homo sapien
aagtgcatggaagaaccgcatttttggtttgtt

SEQ ID NO: 636668 - DNA, 33 bp, Homo sapien
aagtgcatggaagaactgcatttttggtttgtt

SEQ ID NO: 636669 - DNA, 33 bp, Homo sapien
cagcagcacctagaaacgccaattctcaggctc

SEQ ID NO: 636670 - DNA, 33 bp, Homo sapien
cagcagcacctagaaatgccaattctcaggctc

SEQ ID NO: 636671 - DNA, 33 bp, Homo sapien
ggctttgtgctagacccctttccatgtcgaatc

SEQ ID NO: 636672 - DNA, 33 bp, Homo sapien
ggctttgtgctagacctctttccatgtcgaatc

SEQ ID NO: 636673 - DNA, 33 bp, Homo sapien
tttaaaagtaagtaaacgaaggcttagatataa

SEQ ID NO: 636674 - DNA, 33 bp, Homo sapien
tttaaaagtaagtaaatgaaggcttagatataa

SEQ ID NO: 636675 - DNA, 33 bp, Homo sapien
gtgggcccatagctgcaaggaataaagaccagc

SEQ ID NO: 636676 - DNA, 33 bp, Homo sapien
gtgggcccatagctgcgaggaataaagaccagc

SEQ ID NO: 636677 - DNA, 33 bp, Homo sapien
agatatctcaacagataatcaggccatgaaaat

SEQ ID NO: 636678 - DNA, 33 bp, Homo sapien
agatatctcaacagatcatcaggccatgaaaat

SEQ ID NO: 636679 - DNA, 33 bp, Homo sapien
cagctggtagctgaaccatttgtgatattttca

SEQ ID NO: 636680 - DNA, 33 bp, Homo sapien
cagctggtagctgaacgatttgtgatattttca

SEQ ID NO: 636681 - DNA, 33 bp, Homo sapien
gtgcatttatgcctctcaaatttgcctagcgtg

SEQ ID NO: 636682 - DNA, 33 bp, Homo sapien
gtgcatttatgcctctgaaatttgcctagcgtg

SEQ ID NO: 636683 - DNA, 33 bp, Homo sapien
gcaactaatgcaatacacatacacccatgcata

SEQ ID NO: 636684 - DNA, 33 bp, Homo sapien
gcaactaatgcaatacgcatacacccatgcata

SEQ ID NO: 636685 - DNA, 33 bp, Homo sapien
tatatctttaatggccagcagaaatggcaaaca

SEQ ID NO: 636686 - DNA, 33 bp, Homo sapien
tatatctttaatggccggcagaaatggcaaaca

SEQ ID NO: 636687 - DNA, 33 bp, Homo sapien
gaaaaccagacttaagaatccctgcatcaaagc

SEQ ID NO: 636688 - DNA, 33 bp, Homo sapien
gaaaaccagacttaagcatccctgcatcaaagc

SEQ ID NO: 636689 - DNA, 33 bp, Homo sapien
aacctgtgtgtaaagaccctcgggctccatttg

SEQ ID NO: 636690 - DNA, 33 bp, Homo sapien
aacctgtgtgtaaagatcctcgggctccatttg

SEQ ID NO: 636691 - DNA, 33 bp, Homo sapien
cctttgagctgagacacggaggaagactctcaa

SEQ ID NO: 636692 - DNA, 33 bp, Homo sapien
cctttgagctgagacatggaggaagactctcaa

SEQ ID NO: 636693 - DNA, 33 bp, Homo sapien
atatacaacttctgtaggccttgtgttgacaca

SEQ ID NO: 636694 - DNA, 33 bp, Homo sapien
atatacaacttctgtatgccttgtgttgacaca

SEQ ID NO: 636695 - DNA, 33 bp, Homo sapien
aattctagatgtcaaacactgagtacaaagttc

SEQ ID NO: 636696 - DNA, 33 bp, Homo sapien
aattctagatgtcaaatactgagtacaaagttc

SEQ ID NO: 636697 - DNA, 33 bp, Homo sapien
gaacaccactgtcacacagagcttcctacaagg

SEQ ID NO: 636698 - DNA, 33 bp, Homo sapien
gaacaccactgtcacatagagcttcctacaagg

SEQ ID NO: 636699 - DNA, 33 bp, Homo sapien
ctttctgaaaagcttgcatagtgccccagttgt

SEQ ID NO: 636700 - DNA, 33 bp, Homo sapien
ctttctgaaaagcttgtatagtgccccagttgt

SEQ ID NO: 636701 - DNA, 33 bp, Homo sapien
ccaaagatttcaaataaaaagtctaggcatttg

SEQ ID NO: 636702 - DNA, 33 bp, Homo sapien
ccaaagatttcaaatacaaagtctaggcatttg

SEQ ID NO: 636703 - DNA, 33 bp, Homo sapien
cagagggtaatcacatcatctgttcaccatatt

SEQ ID NO: 636704 - DNA, 33 bp, Homo sapien
cagagggtaatcacatgatctgttcaccatatt

SEQ ID NO: 636705 - DNA, 33 bp, Homo sapien
ttgagagtatctgccaaaaattgaggcaacaca

SEQ ID NO: 636706 - DNA, 33 bp, Homo sapien
ttgagagtatctgccagaaattgaggcaacaca

SEQ ID NO: 636707 - DNA, 33 bp, Homo sapien
actcaatttactgaccaatttaacacacgacta

SEQ ID NO: 636708 - DNA, 33 bp, Homo sapien
actcaatttactgaccgatttaacacacgacta

SEQ ID NO: 636709 - DNA, 33 bp, Homo sapien
aagttgggtatgcataacgctggtagattagga

SEQ ID NO: 636710 - DNA, 33 bp, Homo sapien
aagttgggtatgcatagcgctggtagattagga

SEQ ID NO: 636711 - DNA, 33 bp, Homo sapien
aagctgttcttgagcacaccacagaaattacag

SEQ ID NO: 636712 - DNA, 33 bp, Homo sapien
aagctgttcttgagcataccacagaaattacag

SEQ ID NO: 636713 - DNA, 33 bp, Homo sapien
ctgtgtcgaattgaaaacatgagggtcctcatg

SEQ ID NO: 636714 - DNA, 33 bp, Homo sapien
ctgtgtcgaattgaaagcatgagggtcctcatg

SEQ ID NO: 636715 - DNA, 33 bp, Homo sapien
acaagatctactagcacgtataacaactatcat

SEQ ID NO: 636716 - DNA, 33 bp, Homo sapien
acaagatctactagcaggtataacaactatcat

SEQ ID NO: 636717 - DNA, 33 bp, Homo sapien
gctacagtttgttctacaccagaggttgcagat

SEQ ID NO: 636718 - DNA, 33 bp, Homo sapien
gctacagtttgttctagaccagaggttgcagat

SEQ ID NO: 636719 - DNA, 33 bp, Homo sapien
ttcttaccagccaagaacttaacttgcaaattg

SEQ ID NO: 636720 - DNA, 33 bp, Homo sapien
ttcttaccagccaagaccttaacttgcaaattg

SEQ ID NO: 636721 - DNA, 33 bp, Homo sapien
tcatacctgacaactacgtcctagagcaagtat

SEQ ID NO: 636722 - DNA, 33 bp, Homo sapien
tcatacctgacaactatgtcctagagcaagtat

SEQ ID NO: 636723 - DNA, 33 bp, Homo sapien
atttttgttgaattgacaagcatcgaatatact

SEQ ID NO: 636724 - DNA, 33 bp, Homo sapien
atttttgttgaattgataagcatcgaatatact

SEQ ID NO: 636725 - DNA, 33 bp, Homo sapien
aggaggatcagtcaagcccaggaagtcaaggtt

SEQ ID NO: 636726 - DNA, 33 bp, Homo sapien
aggaggatcagtcaagtccaggaagtcaaggtt

SEQ ID NO: 636727 - DNA, 33 bp, Homo sapien
tcaaactcaatcaggcaactagaatgagaatat

SEQ ID NO: 636728 - DNA, 33 bp, Homo sapien
tcaaactcaatcaggcgactagaatgagaatat

SEQ ID NO: 636729 - DNA, 33 bp, Homo sapien
tagtctttcattttcagagtgcctggcccatgc

SEQ ID NO: 636730 - DNA, 33 bp, Homo sapien
tagtctttcattttcatagtgcctggcccatgc

SEQ ID NO: 636731 - DNA, 33 bp, Homo sapien
ctctgggttcacacagaacttccttgaaaggcc

SEQ ID NO: 636732 - DNA, 33 bp, Homo sapien
ctctgggttcacacagcacttccttgaaaggcc

SEQ ID NO: 636733 - DNA, 33 bp, Homo sapien
cctttccaatgcatccaacgccaaccatgtgta

SEQ ID NO: 636734 - DNA, 33 bp, Homo sapien
cctttccaatgcatccgacgccaaccatgtgta

SEQ ID NO: 636735 - DNA, 33 bp, Homo sapien
cattggctcaagtccaatactatcctatctgaa

SEQ ID NO: 636736 - DNA, 33 bp, Homo sapien
cattggctcaagtccagtactatcctatctgaa

SEQ ID NO: 636737 - DNA, 33 bp, Homo sapien
agaagttttttatctcgcagtttcatattgatt

SEQ ID NO: 636738 - DNA, 33 bp, Homo sapien
agaagttttttatctctcagtttcatattgatt

SEQ ID NO: 636739 - DNA, 33 bp, Homo sapien
atattggcagtaccacactgttttaaataccaa

SEQ ID NO: 636740 - DNA, 33 bp, Homo sapien
atattggcagtaccacgctgttttaaataccaa

SEQ ID NO: 636741 - DNA, 33 bp, Homo sapien
ctcccgtatggcatcaccttaactcattatatc

SEQ ID NO: 636742 - DNA, 33 bp, Homo sapien
ctcccgtatggcatcatcttaactcattatatc

SEQ ID NO: 636743 - DNA, 33 bp, Homo sapien
gcgttttgttaaaccaagttgttcctataatga

SEQ ID NO: 636744 - DNA, 33 bp, Homo sapien
gcgttttgttaaaccaggttgttcctataatga

SEQ ID NO: 636745 - DNA, 33 bp, Homo sapien
ccttttgcagttgggacaaacccatttcctctc

SEQ ID NO: 636746 - DNA, 33 bp, Homo sapien
ccttttgcagttgggagaaacccatttcctctc

SEQ ID NO: 636747 - DNA, 33 bp, Homo sapien
catccagcttcagtgacgttataattgggatga

SEQ ID NO: 636748 - DNA, 33 bp, Homo sapien
catccagcttcagtgatgttataattgggatga

SEQ ID NO: 636749 - DNA, 33 bp, Homo sapien
caccataatacaaagaccacaaagtaacctaga

SEQ ID NO: 636750 - DNA, 33 bp, Homo sapien
caccataatacaaagagcacaaagtaacctaga

SEQ ID NO: 636751 - DNA, 33 bp, Homo sapien
gtcactccttttcaaaatatatgtgctttaact

SEQ ID NO: 636752 - DNA, 33 bp, Homo sapien
gtcactccttttcaaagtatatgtgctttaact

SEQ ID NO: 636753 - DNA, 33 bp, Homo sapien
cttctccttgtgtcccaatcgctgagtatggag

SEQ ID NO: 636754 - DNA, 33 bp, Homo sapien
cttctccttgtgtcccgatcgctgagtatggag

SEQ ID NO: 636755 - DNA, 33 bp, Homo sapien
tctaattctctccaacggcaagcaaagtaacgg

SEQ ID NO: 636756 - DNA, 33 bp, Homo sapien
tctaattctctccaactgcaagcaaagtaacgg

SEQ ID NO: 636757 - DNA, 33 bp, Homo sapien
ctgcacttcccttttcccatcctgatacagatg

SEQ ID NO: 636758 - DNA, 33 bp, Homo sapien
ctgcacttcccttttctcatcctgatacagatg

SEQ ID NO: 636759 - DNA, 33 bp, Homo sapien
ggacttttgtagaaaaacacaaataagtgagat

SEQ ID NO: 636760 - DNA, 33 bp, Homo sapien
ggacttttgtagaaaagcacaaataagtgagat

SEQ ID NO: 636761 - DNA, 33 bp, Homo sapien
aaatgaaataatacaacttacctactctgccta

SEQ ID NO: 636762 - DNA, 33 bp, Homo sapien
aaatgaaataatacaagttacctactctgccta

SEQ ID NO: 636763 - DNA, 33 bp, Homo sapien
tgtggagaaaataaaacgttaggtatacactga

SEQ ID NO: 636764 - DNA, 33 bp, Homo sapien
tgtggagaaaataaaatgttaggtatacactga

SEQ ID NO: 636765 - DNA, 33 bp, Homo sapien
tttgtgtttgcaaagaataggaatgaaatgggg

SEQ ID NO: 636766 - DNA, 33 bp, Homo sapien
tttgtgtttgcaaagagtaggaatgaaatgggg

SEQ ID NO: 636767 - DNA, 33 bp, Homo sapien
tgtgactaatctctaagggaaatctccccagct

SEQ ID NO: 636768 - DNA, 33 bp, Homo sapien
tgtgactaatctctaatggaaatctccccagct

SEQ ID NO: 636769 - DNA, 33 bp, Homo sapien
acttaactgtgcatgaccaaccacatctgtatc

SEQ ID NO: 636770 - DNA, 33 bp, Homo sapien
acttaactgtgcatgatcaaccacatctgtatc

SEQ ID NO: 636771 - DNA, 33 bp, Homo sapien
taaggtatatgtgaaacttaaatgaatttcatg

SEQ ID NO: 636772 - DNA, 33 bp, Homo sapien
taaggtatatgtgaaagttaaatgaatttcatg

SEQ ID NO: 636773 - DNA, 33 bp, Homo sapien
gactcaggcaaaataaatctggtttggaaaatg

SEQ ID NO: 636774 - DNA, 33 bp, Homo sapien
gactcaggcaaaataagtctggtttggaaaatg

SEQ ID NO: 636775 - DNA, 33 bp, Homo sapien
gtgctatttcacattacaaaatttttagctact

SEQ ID NO: 636776 - DNA, 33 bp, Homo sapien
gtgctatttcacattataaaatttttagctact

SEQ ID NO: 636777 - DNA, 33 bp, Homo sapien
agacgcctgaggctgccagaaataatcacacta

SEQ ID NO: 636778 - DNA, 33 bp, Homo sapien
agacgcctgaggctgctagaaataatcacacta

SEQ ID NO: 636779 - DNA, 33 bp, Homo sapien
ttcccttgcagctagggatgtacatgtgaataa

SEQ ID NO: 636780 - DNA, 33 bp, Homo sapien
ttcccttgcagctaggtatgtacatgtgaataa

SEQ ID NO: 636781 - DNA, 33 bp, Homo sapien
gcatgatacacaacagaacaaataagctcccca

SEQ ID NO: 636782 - DNA, 33 bp, Homo sapien
gcatgatacacaacaggacaaataagctcccca

SEQ ID NO: 636783 - DNA, 33 bp, Homo sapien
ctgtcccacagggtaactgtcttagtctgtctg

SEQ ID NO: 636784 - DNA, 33 bp, Homo sapien
ctgtcccacagggtaattgtcttagtctgtctg

SEQ ID NO: 636785 - DNA, 33 bp, Homo sapien
ggttagttcagcaaaaagtcatattttatggca

SEQ ID NO: 636786 - DNA, 33 bp, Homo sapien
ggttagttcagcaaaatgtcatattttatggca

SEQ ID NO: 636787 - DNA, 33 bp, Homo sapien
atttgttgaacctaaaattgactcaataatata

SEQ ID NO: 636788 - DNA, 33 bp, Homo sapien
atttgttgaacctaaatttgactcaataatata

SEQ ID NO: 636789 - DNA, 33 bp, Homo sapien
agcttcatgaagaaagaaatttgaggtgtttgg

SEQ ID NO: 636790 - DNA, 33 bp, Homo sapien
agcttcatgaagaaaggaatttgaggtgtttgg

SEQ ID NO: 636791 - DNA, 33 bp, Homo sapien
taaagtggtcctaacaatcagtggtggctccca

SEQ ID NO: 636792 - DNA, 33 bp, Homo sapien
taaagtggtcctaacagtcagtggtggctccca

SEQ ID NO: 636793 - DNA, 33 bp, Homo sapien
aaagactgaagcagaacagaataaagttcaagg

SEQ ID NO: 636794 - DNA, 33 bp, Homo sapien
aaagactgaagcagaatagaataaagttcaagg

SEQ ID NO: 636795 - DNA, 33 bp, Homo sapien
cagagacagggatgacgcaaagcaatttcatta

SEQ ID NO: 636796 - DNA, 33 bp, Homo sapien
cagagacagggatgactcaaagcaatttcatta

SEQ ID NO: 636797 - DNA, 33 bp, Homo sapien
ttagcattaattctcaactcttctcagttaaac

SEQ ID NO: 636798 - DNA, 33 bp, Homo sapien
ttagcattaattctcagctcttctcagttaaac

SEQ ID NO: 636799 - DNA, 33 bp, Homo sapien
tttacccgattcaagaaaattccagccagccat

SEQ ID NO: 636800 - DNA, 33 bp, Homo sapien
tttacccgattcaagataattccagccagccat

SEQ ID NO: 636801 - DNA, 33 bp, Homo sapien
gtgagagacatccttgaattctccaaagaacct

SEQ ID NO: 636802 - DNA, 33 bp, Homo sapien
gtgagagacatccttgtattctccaaagaacct

SEQ ID NO: 636803 - DNA, 33 bp, Homo sapien
tctctttctagcatccccaagtataaaagcata

SEQ ID NO: 636804 - DNA, 33 bp, Homo sapien
tctctttctagcatccgcaagtataaaagcata

SEQ ID NO: 636805 - DNA, 33 bp, Homo sapien
ctttagtgattacagaataaaattgtcccctct

SEQ ID NO: 636806 - DNA, 33 bp, Homo sapien
ctttagtgattacagagtaaaattgtcccctct

SEQ ID NO: 636807 - DNA, 33 bp, Homo sapien
ttcatggcaaaaacaaatctattctagctccat

SEQ ID NO: 636808 - DNA, 33 bp, Homo sapien
ttcatggcaaaaacaagtctattctagctccat

SEQ ID NO: 636809 - DNA, 33 bp, Homo sapien
agagggcttaaatgaacaggccaaagtcaaccc

SEQ ID NO: 636810 - DNA, 33 bp, Homo sapien
agagggcttaaatgaataggccaaagtcaaccc

SEQ ID NO: 636811 - DNA, 33 bp, Homo sapien
ggggcagtgagtgaacaatagacaatatacgaa

SEQ ID NO: 636812 - DNA, 33 bp, Homo sapien
ggggcagtgagtgaacgatagacaatatacgaa

SEQ ID NO: 636813 - DNA, 33 bp, Homo sapien
tacaactaattgaaaccataggcctttgtgtac

SEQ ID NO: 636814 - DNA, 33 bp, Homo sapien
tacaactaattgaaactataggcctttgtgtac

SEQ ID NO: 636815 - DNA, 33 bp, Homo sapien
tcaaattcactgtaggccataaacttccatatt

SEQ ID NO: 636816 - DNA, 33 bp, Homo sapien
tcaaattcactgtaggtcataaacttccatatt

SEQ ID NO: 636817 - DNA, 33 bp, Homo sapien
taagtgctttcaaagaatcatctcacataattc

SEQ ID NO: 636818 - DNA, 33 bp, Homo sapien
taagtgctttcaaagagtcatctcacataattc

SEQ ID NO: 636819 - DNA, 33 bp, Homo sapien
gccacatctcaccatggaagtcctaaaatgaaa

SEQ ID NO: 636820 - DNA, 33 bp, Homo sapien
gccacatctcaccatgtaagtcctaaaatgaaa

SEQ ID NO: 636821 - DNA, 33 bp, Homo sapien
aatgttttccagcacactgcagggttcccaaca

SEQ ID NO: 636822 - DNA, 33 bp, Homo sapien
aatgttttccagcacattgcagggttcccaaca

SEQ ID NO: 636823 - DNA, 33 bp, Homo sapien
ttctgtcaaggatctcactgaaatgcatccatg

SEQ ID NO: 636824 - DNA, 33 bp, Homo sapien
ttctgtcaaggatctcgctgaaatgcatccatg

SEQ ID NO: 636825 - DNA, 33 bp, Homo sapien
gatctacgggactaaaacatgctccaaaacggg

SEQ ID NO: 636826 - DNA, 33 bp, Homo sapien
gatctacgggactaaaccatgctccaaaacggg

SEQ ID NO: 636827 - DNA, 33 bp, Homo sapien
aaaatttcattcagtaccaatgcctaaactgga

SEQ ID NO: 636828 - DNA, 33 bp, Homo sapien
aaaatttcattcagtagcaatgcctaaactgga

SEQ ID NO: 636829 - DNA, 33 bp, Homo sapien
ttaaaaaatactctgcaatgtcagaaaagtact

SEQ ID NO: 636830 - DNA, 33 bp, Homo sapien
ttaaaaaatactctgcgatgtcagaaaagtact

SEQ ID NO: 636831 - DNA, 33 bp, Homo sapien
catcacagtcatagggaatttgacaaagaggta

SEQ ID NO: 636832 - DNA, 33 bp, Homo sapien
catcacagtcatagggtatttgacaaagaggta

SEQ ID NO: 636833 - DNA, 33 bp, Homo sapien
aagctgaaagctgtcaatgaaacgtgttatctt

SEQ ID NO: 636834 - DNA, 33 bp, Homo sapien
aagctgaaagctgtcactgaaacgtgttatctt

SEQ ID NO: 636835 - DNA, 33 bp, Homo sapien
tcgagtgaaccctacaaacgtctaaaacctgtc

SEQ ID NO: 636836 - DNA, 33 bp, Homo sapien
tcgagtgaaccctacatacgtctaaaacctgtc

SEQ ID NO: 636837 - DNA, 33 bp, Homo sapien
cacagcttgcagagtacctagccaaagagtgac

SEQ ID NO: 636838 - DNA, 33 bp, Homo sapien
cacagcttgcagagtatctagccaaagagtgac

SEQ ID NO: 636839 - DNA, 33 bp, Homo sapien
tctagaaatgagtttgaaaataaccaccactga

SEQ ID NO: 636840 - DNA, 33 bp, Homo sapien
tctagaaatgagtttggaaataaccaccactga

SEQ ID NO: 636841 - DNA, 33 bp, Homo sapien
tgtgcctcagtttctaccactgttcaaatggtg

SEQ ID NO: 636842 - DNA, 33 bp, Homo sapien
tgtgcctcagtttctatcactgttcaaatggtg

SEQ ID NO: 636843 - DNA, 33 bp, Homo sapien
tccacacacttctaagacttaccacatggggga

SEQ ID NO: 636844 - DNA, 33 bp, Homo sapien
tccacacacttctaaggcttaccacatggggga

SEQ ID NO: 636845 - DNA, 33 bp, Homo sapien
ctaatgatttgccatcaattttatgaagtcgat

SEQ ID NO: 636846 - DNA, 33 bp, Homo sapien
ctaatgatttgccatccattttatgaagtcgat

SEQ ID NO: 636847 - DNA, 33 bp, Homo sapien
gaggtttctctcactccaagtcttccctaatca

SEQ ID NO: 636848 - DNA, 33 bp, Homo sapien
gaggtttctctcactctaagtcttccctaatca

SEQ ID NO: 636849 - DNA, 33 bp, Homo sapien
tgactatatatgcttaagtatttcagtacccac

SEQ ID NO: 636850 - DNA, 33 bp, Homo sapien
tgactatatatgcttaggtatttcagtacccac

SEQ ID NO: 636851 - DNA, 33 bp, Homo sapien
agtaaactttagaagggaaacggtgagattgag

SEQ ID NO: 636852 - DNA, 33 bp, Homo sapien
agtaaactttagaaggtaaacggtgagattgag

SEQ ID NO: 636853 - DNA, 33 bp, Homo sapien
agatgttagactccaccgagatttctataagga

SEQ ID NO: 636854 - DNA, 33 bp, Homo sapien
agatgttagactccactgagatttctataagga

SEQ ID NO: 636855 - DNA, 33 bp, Homo sapien
tcaacagaatctatgaccaacagaaaatggtac

SEQ ID NO: 636856 - DNA, 33 bp, Homo sapien
tcaacagaatctatgatcaacagaaaatggtac

SEQ ID NO: 636857 - DNA, 33 bp, Homo sapien
tgttaattgtgaaaaagctgtagaatgcagcaa

SEQ ID NO: 636858 - DNA, 33 bp, Homo sapien
tgttaattgtgaaaaatctgtagaatgcagcaa

SEQ ID NO: 636859 - DNA, 33 bp, Homo sapien
gtaaaggtagacaagcacactgtaacacaaaga

SEQ ID NO: 636860 - DNA, 33 bp, Homo sapien
gtaaaggtagacaagcgcactgtaacacaaaga

SEQ ID NO: 636861 - DNA, 33 bp, Homo sapien
acatttgaaaaattgaagtcacatgaaaagact

SEQ ID NO: 636862 - DNA, 33 bp, Homo sapien
acatttgaaaaattgaggtcacatgaaaagact

SEQ ID NO: 636863 - DNA, 33 bp, Homo sapien
ggtacaatcaatacacaatttgttttgttttac

SEQ ID NO: 636864 - DNA, 33 bp, Homo sapien
ggtacaatcaatacactatttgttttgttttac

SEQ ID NO: 636865 - DNA, 33 bp, Homo sapien
gtaacaacaataggaagagcagacaataataat

SEQ ID NO: 636866 - DNA, 33 bp, Homo sapien
gtaacaacaataggaatagcagacaataataat

SEQ ID NO: 636867 - DNA, 33 bp, Homo sapien
atgctgtccacattttaaaaacacataaattaa

SEQ ID NO: 636868 - DNA, 33 bp, Homo sapien
atgctgtccacatttttaaaacacataaattaa

SEQ ID NO: 636869 - DNA, 33 bp, Homo sapien
ctcaaaagagtagtcaaggtagttgttactaaa

SEQ ID NO: 636870 - DNA, 33 bp, Homo sapien
ctcaaaagagtagtcatggtagttgttactaaa

SEQ ID NO: 636871 - DNA, 33 bp, Homo sapien
ggaagagacagagacactgaatggtgaagtctt

SEQ ID NO: 636872 - DNA, 33 bp, Homo sapien
ggaagagacagagacagtgaatggtgaagtctt

SEQ ID NO: 636873 - DNA, 33 bp, Homo sapien
tattctcggcacttacaatatattcagtgttca

SEQ ID NO: 636874 - DNA, 33 bp, Homo sapien
tattctcggcacttaccatatattcagtgttca

SEQ ID NO: 636875 - DNA, 33 bp, Homo sapien
attagctcagtgcacaatcttgcatcctgtaag

SEQ ID NO: 636876 - DNA, 33 bp, Homo sapien
attagctcagtgcacagtcttgcatcctgtaag

SEQ ID NO: 636877 - DNA, 33 bp, Homo sapien
tagcacattgagagaacggcataatgttcataa

SEQ ID NO: 636878 - DNA, 33 bp, Homo sapien
tagcacattgagagaatggcataatgttcataa

SEQ ID NO: 636879 - DNA, 33 bp, Homo sapien
gtcaccttatgtaatacgcattttcccctctca

SEQ ID NO: 636880 - DNA, 33 bp, Homo sapien
gtcaccttatgtaatatgcattttcccctctca

SEQ ID NO: 636881 - DNA, 33 bp, Homo sapien
acctgttgacttgaccaccacttagtaaccaac

SEQ ID NO: 636882 - DNA, 33 bp, Homo sapien
acctgttgacttgaccgccacttagtaaccaac

SEQ ID NO: 636883 - DNA, 33 bp, Homo sapien
cattgaatacctgccaaataagacatgtaacca

SEQ ID NO: 636884 - DNA, 33 bp, Homo sapien
cattgaatacctgccagataagacatgtaacca

SEQ ID NO: 636885 - DNA, 33 bp, Homo sapien
atttcatctttataccgcgtccatgaacttatt

SEQ ID NO: 636886 - DNA, 33 bp, Homo sapien
atttcatctttatacctcgtccatgaacttatt

SEQ ID NO: 636887 - DNA, 33 bp, Homo sapien
tgacaactggactaacacttcttaccagggcat

SEQ ID NO: 636888 - DNA, 33 bp, Homo sapien
tgacaactggactaacgcttcttaccagggcat

SEQ ID NO: 636889 - DNA, 33 bp, Homo sapien
ttaaaactctgatctcaattgcaaatacctccc

SEQ ID NO: 636890 - DNA, 33 bp, Homo sapien
ttaaaactctgatctcgattgcaaatacctccc

SEQ ID NO: 636891 - DNA, 33 bp, Homo sapien
ggatctacagaaagtcacctatggatactgcca

SEQ ID NO: 636892 - DNA, 33 bp, Homo sapien
ggatctacagaaagtcgcctatggatactgcca

SEQ ID NO: 636893 - DNA, 33 bp, Homo sapien
catctccttctggtgtaacaattgctcataagc

SEQ ID NO: 636894 - DNA, 33 bp, Homo sapien
catctccttctggtgtgacaattgctcataagc

SEQ ID NO: 636895 - DNA, 33 bp, Homo sapien
ctgagaacacacatccaaaacaactaaaggctt

SEQ ID NO: 636896 - DNA, 33 bp, Homo sapien
ctgagaacacacatccgaaacaactaaaggctt

SEQ ID NO: 636897 - DNA, 33 bp, Homo sapien
tgtatagtgcaaaatgcagttttccagataaaa

SEQ ID NO: 636898 - DNA, 33 bp, Homo sapien
tgtatagtgcaaaatgtagttttccagataaaa

SEQ ID NO: 636899 - DNA, 33 bp, Homo sapien
tcagattgaacttaccggcttgacggagcaagt

SEQ ID NO: 636900 - DNA, 33 bp, Homo sapien
tcagattgaacttacctgcttgacggagcaagt

SEQ ID NO: 636901 - DNA, 33 bp, Homo sapien
tatatatgtataaaaactagcccgatatggtgg

SEQ ID NO: 636902 - DNA, 33 bp, Homo sapien
tatatatgtataaaaagtagcccgatatggtgg

SEQ ID NO: 636903 - DNA, 33 bp, Homo sapien
ggatgcatctccattccatagtgcgttcagagg

SEQ ID NO: 636904 - DNA, 33 bp, Homo sapien
ggatgcatctccattctatagtgcgttcagagg

SEQ ID NO: 636905 - DNA, 33 bp, Homo sapien
taaatgaatcatcaaccgcctaagcagcaagct

SEQ ID NO: 636906 - DNA, 33 bp, Homo sapien
taaatgaatcatcaactgcctaagcagcaagct

SEQ ID NO: 636907 - DNA, 33 bp, Homo sapien
ggtggattggaggatacgactggcaccagagga

SEQ ID NO: 636908 - DNA, 33 bp, Homo sapien
ggtggattggaggatatgactggcaccagagga

SEQ ID NO: 636909 - DNA, 33 bp, Homo sapien
ctgggatacaaatgacagcagttagaggttaca

SEQ ID NO: 636910 - DNA, 33 bp, Homo sapien
ctgggatacaaatgacggcagttagaggttaca

SEQ ID NO: 636911 - DNA, 33 bp, Homo sapien
ggctgacctgattagaaaatacctgtgtggcct

SEQ ID NO: 636912 - DNA, 33 bp, Homo sapien
ggctgacctgattagagaatacctgtgtggcct

SEQ ID NO: 636913 - DNA, 33 bp, Homo sapien
taactagagtggaaatcacaggctgagcagagg

SEQ ID NO: 636914 - DNA, 33 bp, Homo sapien
taactagagtggaaattacaggctgagcagagg

SEQ ID NO: 636915 - DNA, 33 bp, Homo sapien
atggaaacataattctcaacagggatgccaact

SEQ ID NO: 636916 - DNA, 33 bp, Homo sapien
atggaaacataattcttaacagggatgccaact

SEQ ID NO: 636917 - DNA, 33 bp, Homo sapien
tgtactcaataaagtcacgctggggaaaatatt

SEQ ID NO: 636918 - DNA, 33 bp, Homo sapien
tgtactcaataaagtcgcgctggggaaaatatt

SEQ ID NO: 636919 - DNA, 33 bp, Homo sapien
ttatctaatcattcaaatccttaagaatggcag

SEQ ID NO: 636920 - DNA, 33 bp, Homo sapien
ttatctaatcattcaagtccttaagaatggcag

SEQ ID NO: 636921 - DNA, 33 bp, Homo sapien
ttatgtaacagagtcagtaagaagcagaataag

SEQ ID NO: 636922 - DNA, 33 bp, Homo sapien
ttatgtaacagagtcattaagaagcagaataag

SEQ ID NO: 636923 - DNA, 33 bp, Homo sapien
cctcttgatccatacccgagtgacctgactacc

SEQ ID NO: 636924 - DNA, 33 bp, Homo sapien
cctcttgatccatacctgagtgacctgactacc

SEQ ID NO: 636925 - DNA, 33 bp, Homo sapien
taaattcagtcaatcacaatcgtctacccacac

SEQ ID NO: 636926 - DNA, 33 bp, Homo sapien
taaattcagtcaatcataatcgtctacccacac

SEQ ID NO: 636927 - DNA, 33 bp, Homo sapien
ttttgttctgctacaaatggcacgttctatcaa

SEQ ID NO: 636928 - DNA, 33 bp, Homo sapien
ttttgttctgctacaagtggcacgttctatcaa

SEQ ID NO: 636929 - DNA, 33 bp, Homo sapien
caggctgctcctgaaccggagaggtaaaacaga

SEQ ID NO: 636930 - DNA, 33 bp, Homo sapien
caggctgctcctgaactggagaggtaaaacaga

SEQ ID NO: 636931 - DNA, 33 bp, Homo sapien
tgaaatcaaacatcctcagaagtgcttgccctt

SEQ ID NO: 636932 - DNA, 33 bp, Homo sapien
tgaaatcaaacatcctgagaagtgcttgccctt

SEQ ID NO: 636933 - DNA, 33 bp, Homo sapien
aacatcacatccagccaatatcctcttgtggga

SEQ ID NO: 636934 - DNA, 33 bp, Homo sapien
aacatcacatccagccgatatcctcttgtggga

SEQ ID NO: 636935 - DNA, 33 bp, Homo sapien
acactgcacacacttccatctctcctaagcctc

SEQ ID NO: 636936 - DNA, 33 bp, Homo sapien
acactgcacacacttctatctctcctaagcctc

SEQ ID NO: 636937 - DNA, 33 bp, Homo sapien
ctgacacaggacataacgcacacatactcgatc

SEQ ID NO: 636938 - DNA, 33 bp, Homo sapien
ctgacacaggacataatgcacacatactcgatc

SEQ ID NO: 636939 - DNA, 33 bp, Homo sapien
ctactagactcagaaagttgacggggccctttg

SEQ ID NO: 636940 - DNA, 33 bp, Homo sapien
ctactagactcagaaatttgacggggccctttg

SEQ ID NO: 636941 - DNA, 33 bp, Homo sapien
atgtaatgggaatgacagcatgggaatggggct

SEQ ID NO: 636942 - DNA, 33 bp, Homo sapien
atgtaatgggaatgacggcatgggaatggggct

SEQ ID NO: 636943 - DNA, 33 bp, Homo sapien
taaatctgggcttacactgggccaggaactata

SEQ ID NO: 636944 - DNA, 33 bp, Homo sapien
taaatctgggcttacagtgggccaggaactata

SEQ ID NO: 636945 - DNA, 33 bp, Homo sapien
tttcagattccctgaaaaaagaatcccatgtga

SEQ ID NO: 636946 - DNA, 33 bp, Homo sapien
tttcagattccctgaagaaagaatcccatgtga

SEQ ID NO: 636947 - DNA, 33 bp, Homo sapien
ttttgtaactattcaaagagttgtgatatataa

SEQ ID NO: 636948 - DNA, 33 bp, Homo sapien
ttttgtaactattcaatgagttgtgatatataa

SEQ ID NO: 636949 - DNA, 33 bp, Homo sapien
atgttccagaaataaacggtggcaatgggtgca

SEQ ID NO: 636950 - DNA, 33 bp, Homo sapien
atgttccagaaataaatggtggcaatgggtgca

SEQ ID NO: 636951 - DNA, 33 bp, Homo sapien
ggaaagagccaaagcacggaacaagtccttttc

SEQ ID NO: 636952 - DNA, 33 bp, Homo sapien
ggaaagagccaaagcatggaacaagtccttttc

SEQ ID NO: 636953 - DNA, 33 bp, Homo sapien
tctgtgacaacagcccaatgaatgcataaaaca

SEQ ID NO: 636954 - DNA, 33 bp, Homo sapien
tctgtgacaacagcccgatgaatgcataaaaca

SEQ ID NO: 636955 - DNA, 33 bp, Homo sapien
aatgactcctgccttacgtaattaatttatttt

SEQ ID NO: 636956 - DNA, 33 bp, Homo sapien
aatgactcctgccttatgtaattaatttatttt

SEQ ID NO: 636957 - DNA, 33 bp, Homo sapien
tggggagttgcttagaaaacttactgagcatag

SEQ ID NO: 636958 - DNA, 33 bp, Homo sapien
tggggagttgcttagagaacttactgagcatag

SEQ ID NO: 636959 - DNA, 33 bp, Homo sapien
gcacatgaaaaatgcaatagcaccaagtgggat

SEQ ID NO: 636960 - DNA, 33 bp, Homo sapien
gcacatgaaaaatgcagtagcaccaagtgggat

SEQ ID NO: 636961 - DNA, 33 bp, Homo sapien
tgggtgcctttcaacacattcctctttgatttc

SEQ ID NO: 636962 - DNA, 33 bp, Homo sapien
tgggtgcctttcaacagattcctctttgatttc

SEQ ID NO: 636963 - DNA, 33 bp, Homo sapien
ctccagtgatttttgaatagtgacgaacatcaa

SEQ ID NO: 636964 - DNA, 33 bp, Homo sapien
ctccagtgatttttgagtagtgacgaacatcaa

SEQ ID NO: 636965 - DNA, 33 bp, Homo sapien
ttatctgaaaactcacaatattggcaaaactag

SEQ ID NO: 636966 - DNA, 33 bp, Homo sapien
ttatctgaaaactcacgatattggcaaaactag

SEQ ID NO: 636967 - DNA, 33 bp, Homo sapien
ggtacaagtgttattacagcattttcgctaatc

SEQ ID NO: 636968 - DNA, 33 bp, Homo sapien
ggtacaagtgttattatagcattttcgctaatc

SEQ ID NO: 636969 - DNA, 33 bp, Homo sapien
tgctatataaactgaaaagctgcttcctatata

SEQ ID NO: 636970 - DNA, 33 bp, Homo sapien
tgctatataaactgaagagctgcttcctatata

SEQ ID NO: 636971 - DNA, 33 bp, Homo sapien
ttactcatctatgctacggagttttccaatgta

SEQ ID NO: 636972 - DNA, 33 bp, Homo sapien
ttactcatctatgctatggagttttccaatgta

SEQ ID NO: 636973 - DNA, 33 bp, Homo sapien
caagccttcttttctaagtaatagctggaagtc

SEQ ID NO: 636974 - DNA, 33 bp, Homo sapien
caagccttcttttctaggtaatagctggaagtc

SEQ ID NO: 636975 - DNA, 33 bp, Homo sapien
ctttttgttcttgtcaaataaattctagagacc

SEQ ID NO: 636976 - DNA, 33 bp, Homo sapien
ctttttgttcttgtcagataaattctagagacc

SEQ ID NO: 636977 - DNA, 33 bp, Homo sapien
tccttttcttgtgataacgttggatgacaccat

SEQ ID NO: 636978 - DNA, 33 bp, Homo sapien
tccttttcttgtgatagcgttggatgacaccat

SEQ ID NO: 636979 - DNA, 33 bp, Homo sapien
tggcagattgggatgacaactggaaatgtaaac

SEQ ID NO: 636980 - DNA, 33 bp, Homo sapien
tggcagattgggatgataactggaaatgtaaac

SEQ ID NO: 636981 - DNA, 33 bp, Homo sapien
aaagtagtccaaacacacttcaatgaggacagt

SEQ ID NO: 636982 - DNA, 33 bp, Homo sapien
aaagtagtccaaacacgcttcaatgaggacagt

SEQ ID NO: 636983 - DNA, 33 bp, Homo sapien
aaccgactgtaaactccactcactttagactac

SEQ ID NO: 636984 - DNA, 33 bp, Homo sapien
aaccgactgtaaactcgactcactttagactac

SEQ ID NO: 636985 - DNA, 33 bp, Homo sapien
tagcctttccatttcaatcccaatgctatggcc

SEQ ID NO: 636986 - DNA, 33 bp, Homo sapien
tagcctttccatttcattcccaatgctatggcc

SEQ ID NO: 636987 - DNA, 33 bp, Homo sapien
ataaacagaaaaagtacagtgttatagaaagac

SEQ ID NO: 636988 - DNA, 33 bp, Homo sapien
ataaacagaaaaagtagagtgttatagaaagac

SEQ ID NO: 636989 - DNA, 33 bp, Homo sapien
gttagtattgcttacccgccatgttgatactgg

SEQ ID NO: 636990 - DNA, 33 bp, Homo sapien
gttagtattgcttacctgccatgttgatactgg

SEQ ID NO: 636991 - DNA, 33 bp, Homo sapien
ttgatttcatgatgcactaaagccttgtgatgt

SEQ ID NO: 636992 - DNA, 33 bp, Homo sapien
ttgatttcatgatgcagtaaagccttgtgatgt

SEQ ID NO: 636993 - DNA, 33 bp, Homo sapien
tctctgtttcatatcacaaattgcttaacaaat

SEQ ID NO: 636994 - DNA, 33 bp, Homo sapien
tctctgtttcatatcataaattgcttaacaaat

SEQ ID NO: 636995 - DNA, 33 bp, Homo sapien
gaggaggccagcataactggagtagagaagagg

SEQ ID NO: 636996 - DNA, 33 bp, Homo sapien
gaggaggccagcataattggagtagagaagagg

SEQ ID NO: 636997 - DNA, 33 bp, Homo sapien
ttgcctctgtgttttcacttaagttttcagaga

SEQ ID NO: 636998 - DNA, 33 bp, Homo sapien
ttgcctctgtgttttctcttaagttttcagaga

SEQ ID NO: 636999 - DNA, 33 bp, Homo sapien
tcagcccctccaaaccaagcgcggagcgcgctg

SEQ ID NO: 637000 - DNA, 33 bp, Homo sapien
tcagcccctccaaaccgagcgcggagcgcgctg

SEQ ID NO: 637001 - DNA, 33 bp, Homo sapien
atgttcaaagcctaaactaatctggaaacatct

SEQ ID NO: 637002 - DNA, 33 bp, Homo sapien
atgttcaaagcctaaagtaatctggaaacatct

SEQ ID NO: 637003 - DNA, 33 bp, Homo sapien
tatgaatcttccaaagacacaaactaaatatta

SEQ ID NO: 637004 - DNA, 33 bp, Homo sapien
tatgaatcttccaaagtcacaaactaaatatta

SEQ ID NO: 637005 - DNA, 33 bp, Homo sapien
ataaatcattgagctgcaggcttagaattcatg

SEQ ID NO: 637006 - DNA, 33 bp, Homo sapien
ataaatcattgagctgtaggcttagaattcatg

SEQ ID NO: 637007 - DNA, 33 bp, Homo sapien
aaaacacaaagttaaacggacttctctactaca

SEQ ID NO: 637008 - DNA, 33 bp, Homo sapien
aaaacacaaagttaaatggacttctctactaca

SEQ ID NO: 637009 - DNA, 33 bp, Homo sapien
gaagaaagaaatggtcagaactgagaaattcag

SEQ ID NO: 637010 - DNA, 33 bp, Homo sapien
gaagaaagaaatggtcggaactgagaaattcag

SEQ ID NO: 637011 - DNA, 33 bp, Homo sapien
atgtgattaagccccaatcagcttctaaccagg

SEQ ID NO: 637012 - DNA, 33 bp, Homo sapien
atgtgattaagccccagtcagcttctaaccagg

SEQ ID NO: 637013 - DNA, 33 bp, Homo sapien
ggcctcttaccaaaccacctcgtaagaacttaa

SEQ ID NO: 637014 - DNA, 33 bp, Homo sapien
ggcctcttaccaaaccgcctcgtaagaacttaa

SEQ ID NO: 637015 - DNA, 33 bp, Homo sapien
tttcctttaagaagagccacaaaagagataatg

SEQ ID NO: 637016 - DNA, 33 bp, Homo sapien
tttcctttaagaagagtcacaaaagagataatg

SEQ ID NO: 637017 - DNA, 33 bp, Homo sapien
ctgtgcagatgcagtcccagtggaaataagatt

SEQ ID NO: 637018 - DNA, 33 bp, Homo sapien
ctgtgcagatgcagtctcagtggaaataagatt

SEQ ID NO: 637019 - DNA, 33 bp, Homo sapien
tataaagtactcactaaaacagtttacatttta

SEQ ID NO: 637020 - DNA, 33 bp, Homo sapien
tataaagtactcactagaacagtttacatttta

SEQ ID NO: 637021 - DNA, 33 bp, Homo sapien
tggtgaaatgagaaaacgcatgagaaagtgctt

SEQ ID NO: 637022 - DNA, 33 bp, Homo sapien
tggtgaaatgagaaaaggcatgagaaagtgctt

SEQ ID NO: 637023 - DNA, 33 bp, Homo sapien
tgtgctttgtctacaccggtaagccaatattac

SEQ ID NO: 637024 - DNA, 33 bp, Homo sapien
tgtgctttgtctacactggtaagccaatattac

SEQ ID NO: 637025 - DNA, 33 bp, Homo sapien
tggagtggaagtaaaaaggatgagcagaggcag

SEQ ID NO: 637026 - DNA, 33 bp, Homo sapien
tggagtggaagtaaaagggatgagcagaggcag

SEQ ID NO: 637027 - DNA, 33 bp, Homo sapien
tgggagattcttcatacagtgaggctgttttaa

SEQ ID NO: 637028 - DNA, 33 bp, Homo sapien
tgggagattcttcatatagtgaggctgttttaa

SEQ ID NO: 637029 - DNA, 33 bp, Homo sapien
aaattaaggaggaacaggattctggaaaatatg

SEQ ID NO: 637030 - DNA, 33 bp, Homo sapien
aaattaaggaggaacatgattctggaaaatatg

SEQ ID NO: 637031 - DNA, 33 bp, Homo sapien
ggctttattaaggcccaatttgcctgatgcatc

SEQ ID NO: 637032 - DNA, 33 bp, Homo sapien
ggctttattaaggccccatttgcctgatgcatc

SEQ ID NO: 637033 - DNA, 33 bp, Homo sapien
tatagaaaggcatcaaaaccaatttccccaact

SEQ ID NO: 637034 - DNA, 33 bp, Homo sapien
tatagaaaggcatcaagaccaatttccccaact

SEQ ID NO: 637035 - DNA, 33 bp, Homo sapien
ttgtatttgtaaaatacgacatttcagctagac

SEQ ID NO: 637036 - DNA, 33 bp, Homo sapien
ttgtatttgtaaaatatgacatttcagctagac

SEQ ID NO: 637037 - DNA, 33 bp, Homo sapien
tgttgctcagacccaactagattgaaaccctca

SEQ ID NO: 637038 - DNA, 33 bp, Homo sapien
tgttgctcagacccaattagattgaaaccctca

SEQ ID NO: 637039 - DNA, 33 bp, Homo sapien
atctattttcttttacagggccatattttgaaa

SEQ ID NO: 637040 - DNA, 33 bp, Homo sapien
atctattttcttttactgggccatattttgaaa

SEQ ID NO: 637041 - DNA, 33 bp, Homo sapien
taatttgagagacaataaaacacacaaaaaatg

SEQ ID NO: 637042 - DNA, 33 bp, Homo sapien
taatttgagagacaatcaaacacacaaaaaatg

SEQ ID NO: 637043 - DNA, 33 bp, Homo sapien
aaaaagagaattccgcagcaggcttatctaagc

SEQ ID NO: 637044 - DNA, 33 bp, Homo sapien
aaaaagagaattccgctgcaggcttatctaagc

SEQ ID NO: 637045 - DNA, 33 bp, Homo sapien
ccttacagggaaaagacaacgatggctccaatg

SEQ ID NO: 637046 - DNA, 33 bp, Homo sapien
ccttacagggaaaagataacgatggctccaatg

SEQ ID NO: 637047 - DNA, 33 bp, Homo sapien
tggtctgagcttccaggaggacatttgatgaca

SEQ ID NO: 637048 - DNA, 33 bp, Homo sapien
tggtctgagcttccagtaggacatttgatgaca

SEQ ID NO: 637049 - DNA, 33 bp, Homo sapien
attattattcccatagaagagatgagcaaacgg

SEQ ID NO: 637050 - DNA, 33 bp, Homo sapien
attattattcccatagtagagatgagcaaacgg

SEQ ID NO: 637051 - DNA, 33 bp, Homo sapien
caggactgttgagttacattcagtttttgtttt

SEQ ID NO: 637052 - DNA, 33 bp, Homo sapien
caggactgttgagttatattcagtttttgtttt

SEQ ID NO: 637053 - DNA, 33 bp, Homo sapien
aacaactacagtgatcaatgtgagctcaggaga

SEQ ID NO: 637054 - DNA, 33 bp, Homo sapien
aacaactacagtgatcgatgtgagctcaggaga

SEQ ID NO: 637055 - DNA, 33 bp, Homo sapien
ttgagatttaccagagaatttgaaggcaaccta

SEQ ID NO: 637056 - DNA, 33 bp, Homo sapien
ttgagatttaccagaggatttgaaggcaaccta

SEQ ID NO: 637057 - DNA, 33 bp, Homo sapien
ttcagaaaaggtttacagatcacagcaaaaagt

SEQ ID NO: 637058 - DNA, 33 bp, Homo sapien
ttcagaaaaggtttactgatcacagcaaaaagt

SEQ ID NO: 637059 - DNA, 33 bp, Homo sapien
tcagtttttatcatctcagacacaaagcagaaa

SEQ ID NO: 637060 - DNA, 33 bp, Homo sapien
tcagtttttatcatctgagacacaaagcagaaa

SEQ ID NO: 637061 - DNA, 33 bp, Homo sapien
gaattttcgaaaacaacgaagtgaaatcaaaca

SEQ ID NO: 637062 - DNA, 33 bp, Homo sapien
gaattttcgaaaacaatgaagtgaaatcaaaca

SEQ ID NO: 637063 - DNA, 33 bp, Homo sapien
tatgtctaaaagcctaacaggtaccaccactga

SEQ ID NO: 637064 - DNA, 33 bp, Homo sapien
tatgtctaaaagcctagcaggtaccaccactga

SEQ ID NO: 637065 - DNA, 33 bp, Homo sapien
agattctttttctccaaagtctgcgtatcagga

SEQ ID NO: 637066 - DNA, 33 bp, Homo sapien
agattctttttctccatagtctgcgtatcagga

SEQ ID NO: 637067 - DNA, 33 bp, Homo sapien
gaggtataaatctgacaataccatggatttagg

SEQ ID NO: 637068 - DNA, 33 bp, Homo sapien
gaggtataaatctgaccataccatggatttagg

SEQ ID NO: 637069 - DNA, 33 bp, Homo sapien
gcctgctgcccagaggcacaaatggaccactta

SEQ ID NO: 637070 - DNA, 33 bp, Homo sapien
gcctgctgcccagaggtacaaatggaccactta

SEQ ID NO: 637071 - DNA, 33 bp, Homo sapien
catggttaccacaccactggtactctgaccatt

SEQ ID NO: 637072 - DNA, 33 bp, Homo sapien
catggttaccacaccattggtactctgaccatt

SEQ ID NO: 637073 - DNA, 33 bp, Homo sapien
ggaattcctgggagcaactgatagacagaattt

SEQ ID NO: 637074 - DNA, 33 bp, Homo sapien
ggaattcctgggagcatctgatagacagaattt

SEQ ID NO: 637075 - DNA, 33 bp, Homo sapien
atatttgaggaaagagaattgcagctgaaggaa

SEQ ID NO: 637076 - DNA, 33 bp, Homo sapien
atatttgaggaaagagcattgcagctgaaggaa

SEQ ID NO: 637077 - DNA, 33 bp, Homo sapien
ctgttgggaggattgaataaaaatataaaaact

SEQ ID NO: 637078 - DNA, 33 bp, Homo sapien
ctgttgggaggattgattaaaaatataaaaact

SEQ ID NO: 637079 - DNA, 33 bp, Homo sapien
agactgaatgagttcacgtggggaatgcactta

SEQ ID NO: 637080 - DNA, 33 bp, Homo sapien
agactgaatgagttcatgtggggaatgcactta

SEQ ID NO: 637081 - DNA, 33 bp, Homo sapien
ctgaggcttacagaacagacagcttatcagagc

SEQ ID NO: 637082 - DNA, 33 bp, Homo sapien
ctgaggcttacagaacggacagcttatcagagc

SEQ ID NO: 637083 - DNA, 33 bp, Homo sapien
ctatactatattagaaagtgtgtcaaatgcaag

SEQ ID NO: 637084 - DNA, 33 bp, Homo sapien
ctatactatattagaatgtgtgtcaaatgcaag

SEQ ID NO: 637085 - DNA, 33 bp, Homo sapien
tttcaaggaagatggcaagaggaggctttattg

SEQ ID NO: 637086 - DNA, 33 bp, Homo sapien
tttcaaggaagatggcgagaggaggctttattg

SEQ ID NO: 637087 - DNA, 33 bp, Homo sapien
ctgatgctcggttccacagagaacataaactct

SEQ ID NO: 637088 - DNA, 33 bp, Homo sapien
ctgatgctcggttccatagagaacataaactct

SEQ ID NO: 637089 - DNA, 33 bp, Homo sapien
tcatcagaaatctttaaaaagatcgctctgatc

SEQ ID NO: 637090 - DNA, 33 bp, Homo sapien
tcatcagaaatctttagaaagatcgctctgatc

SEQ ID NO: 637091 - DNA, 33 bp, Homo sapien
ctgataagtttatcaaccttgtgctgctgatga

SEQ ID NO: 637092 - DNA, 33 bp, Homo sapien
ctgataagtttatcaatcttgtgctgctgatga

SEQ ID NO: 637093 - DNA, 33 bp, Homo sapien
taatcctttgtagctcactcactctggtctctc

SEQ ID NO: 637094 - DNA, 33 bp, Homo sapien
taatcctttgtagctcgctcactctggtctctc

SEQ ID NO: 637095 - DNA, 33 bp, Homo sapien
ttcacaaataccatataagagaagactgcctca

SEQ ID NO: 637096 - DNA, 33 bp, Homo sapien
ttcacaaataccatatgagagaagactgcctca

SEQ ID NO: 637097 - DNA, 33 bp, Homo sapien
tgattacaaccaacaccactaacaacaataact

SEQ ID NO: 637098 - DNA, 33 bp, Homo sapien
tgattacaaccaacacgactaacaacaataact

SEQ ID NO: 637099 - DNA, 33 bp, Homo sapien
tggaagcaggggtgaaaggttgaattctagatt

SEQ ID NO: 637100 - DNA, 33 bp, Homo sapien
tggaagcaggggtgaagggttgaattctagatt

SEQ ID NO: 637101 - DNA, 33 bp, Homo sapien
atataggcccaggcacaaacacatctgtaaact

SEQ ID NO: 637102 - DNA, 33 bp, Homo sapien
atataggcccaggcacgaacacatctgtaaact

SEQ ID NO: 637103 - DNA, 33 bp, Homo sapien
tgcagacagaatcaaaaaggtcattgtagacat

SEQ ID NO: 637104 - DNA, 33 bp, Homo sapien
tgcagacagaatcaaagaggtcattgtagacat

SEQ ID NO: 637105 - DNA, 33 bp, Homo sapien
tgagcccagtgtcctgcagataccccactgtat

SEQ ID NO: 637106 - DNA, 33 bp, Homo sapien
tgagcccagtgtcctggagataccccactgtat

SEQ ID NO: 637107 - DNA, 33 bp, Homo sapien
attctactaagagtagaaagcattgacaaaaaa

SEQ ID NO: 637108 - DNA, 33 bp, Homo sapien
attctactaagagtaggaagcattgacaaaaaa

SEQ ID NO: 637109 - DNA, 33 bp, Homo sapien
acgtgaaataaattcaaagtaaaaagccagagt

SEQ ID NO: 637110 - DNA, 33 bp, Homo sapien
acgtgaaataaattcagagtaaaaagccagagt

SEQ ID NO: 637111 - DNA, 33 bp, Homo sapien
tatgacagagaatatagggccaacaaaccgaaa

SEQ ID NO: 637112 - DNA, 33 bp, Homo sapien
tatgacagagaatatatggccaacaaaccgaaa

SEQ ID NO: 637113 - DNA, 33 bp, Homo sapien
tgctcatctgggcatacccacaaagacgaacta

SEQ ID NO: 637114 - DNA, 33 bp, Homo sapien
tgctcatctgggcatatccacaaagacgaacta

SEQ ID NO: 637115 - DNA, 33 bp, Homo sapien
cctgttccacagtaccaccactttgaaagtgaa

SEQ ID NO: 637116 - DNA, 33 bp, Homo sapien
cctgttccacagtaccgccactttgaaagtgaa

SEQ ID NO: 637117 - DNA, 33 bp, Homo sapien
tcaaatcccctacgtacatcacaaatctgattt

SEQ ID NO: 637118 - DNA, 33 bp, Homo sapien
tcaaatcccctacgtatatcacaaatctgattt

SEQ ID NO: 637119 - DNA, 33 bp, Homo sapien
cacatctagtttgcaaccccacatttttgtata

SEQ ID NO: 637120 - DNA, 33 bp, Homo sapien
cacatctagtttgcaatcccacatttttgtata

SEQ ID NO: 637121 - DNA, 33 bp, Homo sapien
tagggatggtctaatacaggaaaaggcaaacta

SEQ ID NO: 637122 - DNA, 33 bp, Homo sapien
tagggatggtctaatataggaaaaggcaaacta

SEQ ID NO: 637123 - DNA, 33 bp, Homo sapien
atttatttttattgaccgaaacagtggtttaag

SEQ ID NO: 637124 - DNA, 33 bp, Homo sapien
atttatttttattgactgaaacagtggtttaag

SEQ ID NO: 637125 - DNA, 33 bp, Homo sapien
gattatccaagtataacggctgcaagcttagat

SEQ ID NO: 637126 - DNA, 33 bp, Homo sapien
gattatccaagtataatggctgcaagcttagat

SEQ ID NO: 637127 - DNA, 33 bp, Homo sapien
tacaagatttgtgcttgaagagtcacagtaccc

SEQ ID NO: 637128 - DNA, 33 bp, Homo sapien
tacaagatttgtgctttaagagtcacagtaccc

SEQ ID NO: 637129 - DNA, 33 bp, Homo sapien
agtgccatttgatgtcacgtctttgtgccatgt

SEQ ID NO: 637130 - DNA, 33 bp, Homo sapien
agtgccatttgatgtcccgtctttgtgccatgt

SEQ ID NO: 637131 - DNA, 33 bp, Homo sapien
gttccctgcagaaggaactccaaacgtcaacaa

SEQ ID NO: 637132 - DNA, 33 bp, Homo sapien
gttccctgcagaaggagctccaaacgtcaacaa

SEQ ID NO: 637133 - DNA, 33 bp, Homo sapien
tctgattgtaaatataaagtagccataaaaata

SEQ ID NO: 637134 - DNA, 33 bp, Homo sapien
tctgattgtaaatatagagtagccataaaaata

SEQ ID NO: 637135 - DNA, 33 bp, Homo sapien
aaaacggaaatcaaagacctttcgtgtcctaca

SEQ ID NO: 637136 - DNA, 33 bp, Homo sapien
aaaacggaaatcaaagtcctttcgtgtcctaca

SEQ ID NO: 637137 - DNA, 33 bp, Homo sapien
cctagagcctggaaaaatttaggtggtaggtaa

SEQ ID NO: 637138 - DNA, 33 bp, Homo sapien
cctagagcctggaaaattttaggtggtaggtaa

SEQ ID NO: 637139 - DNA, 33 bp, Homo sapien
tgaccttcagccattcactttctctcggtatat

SEQ ID NO: 637140 - DNA, 33 bp, Homo sapien
tgaccttcagccattcgctttctctcggtatat

SEQ ID NO: 637141 - DNA, 33 bp, Homo sapien
acatctgctcaacctccatcatcctatataccg

SEQ ID NO: 637142 - DNA, 33 bp, Homo sapien
acatctgctcaacctctatcatcctatataccg

SEQ ID NO: 637143 - DNA, 33 bp, Homo sapien
aaatgcacgatggagtaaaaaatcttcatatgt

SEQ ID NO: 637144 - DNA, 33 bp, Homo sapien
aaatgcacgatggagtgaaaaatcttcatatgt

SEQ ID NO: 637145 - DNA, 33 bp, Homo sapien
atgactttgaaataacacttgactatttggtct

SEQ ID NO: 637146 - DNA, 33 bp, Homo sapien
atgactttgaaataacgcttgactatttggtct

SEQ ID NO: 637147 - DNA, 33 bp, Homo sapien
atgaatctcaaaaacaacctggtctctagaaat

SEQ ID NO: 637148 - DNA, 33 bp, Homo sapien
atgaatctcaaaaacagcctggtctctagaaat

SEQ ID NO: 637149 - DNA, 33 bp, Homo sapien
gagccaaatgtagcgggacttggaacctagaaa

SEQ ID NO: 637150 - DNA, 33 bp, Homo sapien
gagccaaatgtagcggtacttggaacctagaaa

SEQ ID NO: 637151 - DNA, 33 bp, Homo sapien
actcacttcactataaaggtgcagatggatgtg

SEQ ID NO: 637152 - DNA, 33 bp, Homo sapien
actcacttcactataagggtgcagatggatgtg

SEQ ID NO: 637153 - DNA, 33 bp, Homo sapien
acaaataagtaactgacaaacacatagaaagta

SEQ ID NO: 637154 - DNA, 33 bp, Homo sapien
acaaataagtaactgataaacacatagaaagta

SEQ ID NO: 637155 - DNA, 33 bp, Homo sapien
gattcctcttcagtcaataggttggttgatttg

SEQ ID NO: 637156 - DNA, 33 bp, Homo sapien
gattcctcttcagtcagtaggttggttgatttg

SEQ ID NO: 637157 - DNA, 33 bp, Homo sapien
aagacaagaggcagtacggaataaattgacacc

SEQ ID NO: 637158 - DNA, 33 bp, Homo sapien
aagacaagaggcagtagggaataaattgacacc

SEQ ID NO: 637159 - DNA, 33 bp, Homo sapien
ctggttattttgccagcagcattctcatcatca

SEQ ID NO: 637160 - DNA, 33 bp, Homo sapien
ctggttattttgccagtagcattctcatcatca

SEQ ID NO: 637161 - DNA, 33 bp, Homo sapien
ccagtcgtccatcccaataaccacttgttgaca

SEQ ID NO: 637162 - DNA, 33 bp, Homo sapien
ccagtcgtccatcccagtaaccacttgttgaca

SEQ ID NO: 637163 - DNA, 33 bp, Homo sapien
ctgtagggccaatttaaacacaggcttgagata

SEQ ID NO: 637164 - DNA, 33 bp, Homo sapien
ctgtagggccaatttagacacaggcttgagata

SEQ ID NO: 637165 - DNA, 33 bp, Homo sapien
cctacctcataggatcaataagagattaaataa

SEQ ID NO: 637166 - DNA, 33 bp, Homo sapien
cctacctcataggatcgataagagattaaataa

SEQ ID NO: 637167 - DNA, 33 bp, Homo sapien
aagcaagagaggatgaatatgaaatcggtggtt

SEQ ID NO: 637168 - DNA, 33 bp, Homo sapien
aagcaagagaggatgattatgaaatcggtggtt

SEQ ID NO: 637169 - DNA, 33 bp, Homo sapien
caggtattttttagcaaaagcattcgatttgat

SEQ ID NO: 637170 - DNA, 33 bp, Homo sapien
caggtattttttagcagaagcattcgatttgat

SEQ ID NO: 637171 - DNA, 33 bp, Homo sapien
cagtttgttcccagtaccaaatccataaccaag

SEQ ID NO: 637172 - DNA, 33 bp, Homo sapien
cagtttgttcccagtatcaaatccataaccaag

SEQ ID NO: 637173 - DNA, 33 bp, Homo sapien
aaagagtaagcggccaaattctccaacagatgg

SEQ ID NO: 637174 - DNA, 33 bp, Homo sapien
aaagagtaagcggccatattctccaacagatgg

SEQ ID NO: 637175 - DNA, 33 bp, Homo sapien
ccataatcccatgtcaatcataagcaaggataa

SEQ ID NO: 637176 - DNA, 33 bp, Homo sapien
ccataatcccatgtcagtcataagcaaggataa

SEQ ID NO: 637177 - DNA, 33 bp, Homo sapien
ttaagcactttaaccaaaatctacaatcttttt

SEQ ID NO: 637178 - DNA, 33 bp, Homo sapien
ttaagcactttaaccagaatctacaatcttttt

SEQ ID NO: 637179 - DNA, 33 bp, Homo sapien
gcagaaattcaggaaacagtcttcataaactgt

SEQ ID NO: 637180 - DNA, 33 bp, Homo sapien
gcagaaattcaggaaatagtcttcataaactgt

SEQ ID NO: 637181 - DNA, 33 bp, Homo sapien
tagaaacttctgagggaagaaactatagctggc

SEQ ID NO: 637182 - DNA, 33 bp, Homo sapien
tagaaacttctgagggcagaaactatagctggc

SEQ ID NO: 637183 - DNA, 33 bp, Homo sapien
acactgagtgtctgaggatggcaagttcttaga

SEQ ID NO: 637184 - DNA, 33 bp, Homo sapien
acactgagtgtctgagtatggcaagttcttaga

SEQ ID NO: 637185 - DNA, 33 bp, Homo sapien
aaaatgcttatttaccgagtgccagatgtatac

SEQ ID NO: 637186 - DNA, 33 bp, Homo sapien
aaaatgcttatttacctagtgccagatgtatac

SEQ ID NO: 637187 - DNA, 33 bp, Homo sapien
agaattggaactggcaacttaagccttggtctt

SEQ ID NO: 637188 - DNA, 33 bp, Homo sapien
agaattggaactggcagcttaagccttggtctt

SEQ ID NO: 637189 - DNA, 33 bp, Homo sapien
tagataaagacttgaacggcacctctctaatga

SEQ ID NO: 637190 - DNA, 33 bp, Homo sapien
tagataaagacttgaatggcacctctctaatga

SEQ ID NO: 637191 - DNA, 33 bp, Homo sapien
tattgcaaaatatataccagagtttagacttta

SEQ ID NO: 637192 - DNA, 33 bp, Homo sapien
tattgcaaaatatatagcagagtttagacttta

SEQ ID NO: 637193 - DNA, 33 bp, Homo sapien
tgcaagctggagaaacaacattaagaggtgaac

SEQ ID NO: 637194 - DNA, 33 bp, Homo sapien
tgcaagctggagaaacgacattaagaggtgaac

SEQ ID NO: 637195 - DNA, 33 bp, Homo sapien
atgtcttgctttacacaaaatgaccttcctccc

SEQ ID NO: 637196 - DNA, 33 bp, Homo sapien
atgtcttgctttacaccaaatgaccttcctccc

SEQ ID NO: 637197 - DNA, 33 bp, Homo sapien
cccaattcactatgtacgaagctcattcagaga

SEQ ID NO: 637198 - DNA, 33 bp, Homo sapien
cccaattcactatgtatgaagctcattcagaga

SEQ ID NO: 637199 - DNA, 33 bp, Homo sapien
caaaccggttcctttcccatcttcgaaaataac

SEQ ID NO: 637200 - DNA, 33 bp, Homo sapien
caaaccggttcctttctcatcttcgaaaataac

SEQ ID NO: 637201 - DNA, 33 bp, Homo sapien
gttaacatgtgtcagacataggctttataggaa

SEQ ID NO: 637202 - DNA, 33 bp, Homo sapien
gttaacatgtgtcagatataggctttataggaa

SEQ ID NO: 637203 - DNA, 33 bp, Homo sapien
gtactattttaaatccacattttgcaaatgagg

SEQ ID NO: 637204 - DNA, 33 bp, Homo sapien
gtactattttaaatccgcattttgcaaatgagg

SEQ ID NO: 637205 - DNA, 33 bp, Homo sapien
aatcccagtctgggttcaaaacatgatgctaat

SEQ ID NO: 637206 - DNA, 33 bp, Homo sapien
aatcccagtctgggtttaaaacatgatgctaat

SEQ ID NO: 637207 - DNA, 33 bp, Homo sapien
agtgcagctcccttggacacagaagtgcccaca

SEQ ID NO: 637208 - DNA, 33 bp, Homo sapien
agtgcagctcccttggtcacagaagtgcccaca

SEQ ID NO: 637209 - DNA, 33 bp, Homo sapien
gaaggtttcgtggagaacaacagagaaatatga

SEQ ID NO: 637210 - DNA, 33 bp, Homo sapien
gaaggtttcgtggagagcaacagagaaatatga

SEQ ID NO: 637211 - DNA, 33 bp, Homo sapien
tctgcttgaatttcacagctaattcttgacaga

SEQ ID NO: 637212 - DNA, 33 bp, Homo sapien
tctgcttgaatttcacggctaattcttgacaga

SEQ ID NO: 637213 - DNA, 33 bp, Homo sapien
cacctagactgtcttacattgctggtagctgtg

SEQ ID NO: 637214 - DNA, 33 bp, Homo sapien
cacctagactgtcttagattgctggtagctgtg

SEQ ID NO: 637215 - DNA, 33 bp, Homo sapien
catgctcagagaaacaagtaaaatctgtctgca

SEQ ID NO: 637216 - DNA, 33 bp, Homo sapien
catgctcagagaaacatgtaaaatctgtctgca

SEQ ID NO: 637217 - DNA, 33 bp, Homo sapien
attaagttgtctgatacataataagcataatcc

SEQ ID NO: 637218 - DNA, 33 bp, Homo sapien
attaagttgtctgatatataataagcataatcc

SEQ ID NO: 637219 - DNA, 33 bp, Homo sapien
ttgggaagcactggaccggggtaggaatgtgac

SEQ ID NO: 637220 - DNA, 33 bp, Homo sapien
ttgggaagcactggacgggggtaggaatgtgac

SEQ ID NO: 637221 - DNA, 33 bp, Homo sapien
aatattctgcaggccactccttcaaagggtacc

SEQ ID NO: 637222 - DNA, 33 bp, Homo sapien
aatattctgcaggccattccttcaaagggtacc

SEQ ID NO: 637223 - DNA, 33 bp, Homo sapien
tgtccaaaatggtagccactacctcagtaaata

SEQ ID NO: 637224 - DNA, 33 bp, Homo sapien
tgtccaaaatggtagcgactacctcagtaaata

SEQ ID NO: 637225 - DNA, 33 bp, Homo sapien
aagagaaagatactgcacgacctgataccattt

SEQ ID NO: 637226 - DNA, 33 bp, Homo sapien
aagagaaagatactgcgcgacctgataccattt

SEQ ID NO: 637227 - DNA, 33 bp, Homo sapien
gatctcctaacctcgcaattaacctgcctcagc

SEQ ID NO: 637228 - DNA, 33 bp, Homo sapien
gatctcctaacctcgcgattaacctgcctcagc

SEQ ID NO: 637229 - DNA, 33 bp, Homo sapien
tcaaaagtggccataaccttccactctgattat

SEQ ID NO: 637230 - DNA, 33 bp, Homo sapien
tcaaaagtggccataatcttccactctgattat

SEQ ID NO: 637231 - DNA, 33 bp, Homo sapien
agagaaaacagaaaaccgacagaatggggagaa

SEQ ID NO: 637232 - DNA, 33 bp, Homo sapien
agagaaaacagaaaactgacagaatggggagaa

SEQ ID NO: 637233 - DNA, 33 bp, Homo sapien
ttcttaacagcctttccaacatctgttattttt

SEQ ID NO: 637234 - DNA, 33 bp, Homo sapien
ttcttaacagcctttctaacatctgttattttt

SEQ ID NO: 637235 - DNA, 33 bp, Homo sapien
aggaaggtggtagatacgtatgtattttgctaa

SEQ ID NO: 637236 - DNA, 33 bp, Homo sapien
aggaaggtggtagatatgtatgtattttgctaa

SEQ ID NO: 637237 - DNA, 33 bp, Homo sapien
acagccagtcagcaacaaagcttggatttgaac

SEQ ID NO: 637238 - DNA, 33 bp, Homo sapien
acagccagtcagcaacgaagcttggatttgaac

SEQ ID NO: 637239 - DNA, 33 bp, Homo sapien
ggaaagtttatgcctgaaagattactgtgaccc

SEQ ID NO: 637240 - DNA, 33 bp, Homo sapien
ggaaagtttatgcctggaagattactgtgaccc

SEQ ID NO: 637241 - DNA, 33 bp, Homo sapien
attcagcctgaattcacctgctggtactcctgt

SEQ ID NO: 637242 - DNA, 33 bp, Homo sapien
attcagcctgaattcatctgctggtactcctgt

SEQ ID NO: 637243 - DNA, 33 bp, Homo sapien
tatatgacaagaatgaagagattttacagatgt

SEQ ID NO: 637244 - DNA, 33 bp, Homo sapien
tatatgacaagaatgaggagattttacagatgt

SEQ ID NO: 637245 - DNA, 33 bp, Homo sapien
agggagactaacttcaagggccagacttaatca

SEQ ID NO: 637246 - DNA, 33 bp, Homo sapien
agggagactaacttcatgggccagacttaatca

SEQ ID NO: 637247 - DNA, 33 bp, Homo sapien
actgatcacactcttcccttctaaactaagtgc

SEQ ID NO: 637248 - DNA, 33 bp, Homo sapien
actgatcacactcttctcttctaaactaagtgc

SEQ ID NO: 637249 - DNA, 33 bp, Homo sapien
gtggataaatctcataaaagaaattcatactca

SEQ ID NO: 637250 - DNA, 33 bp, Homo sapien
gtggataaatctcatagaagaaattcatactca

SEQ ID NO: 637251 - DNA, 33 bp, Homo sapien
tgccttgtattacaccccagaaccatgtagctc

SEQ ID NO: 637252 - DNA, 33 bp, Homo sapien
tgccttgtattacacctcagaaccatgtagctc

SEQ ID NO: 637253 - DNA, 33 bp, Homo sapien
ggggcgagaaggtcaacgggaaaccagcacacg

SEQ ID NO: 637254 - DNA, 33 bp, Homo sapien
ggggcgagaaggtcaaggggaaaccagcacacg

SEQ ID NO: 637255 - DNA, 33 bp, Homo sapien
gttctcaagagcacacaggtttatttttgtcct

SEQ ID NO: 637256 - DNA, 33 bp, Homo sapien
gttctcaagagcacactggtttatttttgtcct

SEQ ID NO: 637257 - DNA, 33 bp, Homo sapien
attccaaacacagagaatatttacctggttcac

SEQ ID NO: 637258 - DNA, 33 bp, Homo sapien
attccaaacacagagagtatttacctggttcac

SEQ ID NO: 637259 - DNA, 33 bp, Homo sapien
ggtgaaaatttacctgcaatacatactcagaac

SEQ ID NO: 637260 - DNA, 33 bp, Homo sapien
ggtgaaaatttacctgtaatacatactcagaac

SEQ ID NO: 637261 - DNA, 33 bp, Homo sapien
ctctggtctccagcacactggtgtcttttttac

SEQ ID NO: 637262 - DNA, 33 bp, Homo sapien
ctctggtctccagcacgctggtgtcttttttac

SEQ ID NO: 637263 - DNA, 33 bp, Homo sapien
gagttctggcttattaaaatgctatttatcatt

SEQ ID NO: 637264 - DNA, 33 bp, Homo sapien
gagttctggcttattacaatgctatttatcatt

SEQ ID NO: 637265 - DNA, 33 bp, Homo sapien
tgcagccttctttcccacagtggtcatcttttt

SEQ ID NO: 637266 - DNA, 33 bp, Homo sapien
tgcagccttctttcccgcagtggtcatcttttt

SEQ ID NO: 637267 - DNA, 33 bp, Homo sapien
ctcacatcacacactaaaagagtcatttccaaa

SEQ ID NO: 637268 - DNA, 33 bp, Homo sapien
ctcacatcacacactagaagagtcatttccaaa

SEQ ID NO: 637269 - DNA, 33 bp, Homo sapien
ataataacaagagatcaacactagaaaagacag

SEQ ID NO: 637270 - DNA, 33 bp, Homo sapien
ataataacaagagatcgacactagaaaagacag

SEQ ID NO: 637271 - DNA, 33 bp, Homo sapien
ctttaataaaactgccaaaataagtatgacatt

SEQ ID NO: 637272 - DNA, 33 bp, Homo sapien
ctttaataaaactgccgaaataagtatgacatt

SEQ ID NO: 637273 - DNA, 33 bp, Homo sapien
atctaatgagaaaaggcattgcattcactgcct

SEQ ID NO: 637274 - DNA, 33 bp, Homo sapien
atctaatgagaaaaggtattgcattcactgcct

SEQ ID NO: 637275 - DNA, 33 bp, Homo sapien
aatcgggcaggacatacgccaagtacttataac

SEQ ID NO: 637276 - DNA, 33 bp, Homo sapien
aatcgggcaggacataggccaagtacttataac

SEQ ID NO: 637277 - DNA, 33 bp, Homo sapien
aattgaagtaacaatacgtatggttataagtac

SEQ ID NO: 637278 - DNA, 33 bp, Homo sapien
aattgaagtaacaatatgtatggttataagtac

SEQ ID NO: 637279 - DNA, 33 bp, Homo sapien
accattccaaaaagtcacattgcactatactgc

SEQ ID NO: 637280 - DNA, 33 bp, Homo sapien
accattccaaaaagtcccattgcactatactgc

SEQ ID NO: 637281 - DNA, 33 bp, Homo sapien
cccatcctttaaacagaaacagtttgtgaagat

SEQ ID NO: 637282 - DNA, 33 bp, Homo sapien
cccatcctttaaacaggaacagtttgtgaagat

SEQ ID NO: 637283 - DNA, 33 bp, Homo sapien
ttcttcaaaggaatccaaaacagacctgaatta

SEQ ID NO: 637284 - DNA, 33 bp, Homo sapien
ttcttcaaaggaatccgaaacagacctgaatta

SEQ ID NO: 637285 - DNA, 33 bp, Homo sapien
attttgaggaagaggaagtctattcgtatatag

SEQ ID NO: 637286 - DNA, 33 bp, Homo sapien
attttgaggaagaggaggtctattcgtatatag

SEQ ID NO: 637287 - DNA, 33 bp, Homo sapien
gtctgtatataaaagtcaaatgattagtacctt

SEQ ID NO: 637288 - DNA, 33 bp, Homo sapien
gtctgtatataaaagtgaaatgattagtacctt

SEQ ID NO: 637289 - DNA, 33 bp, Homo sapien
acataaggtggccttcaagtgaggtgacactgg

SEQ ID NO: 637290 - DNA, 33 bp, Homo sapien
acataaggtggccttcgagtgaggtgacactgg

SEQ ID NO: 637291 - DNA, 33 bp, Homo sapien
cgtgatgtttacaaaggctcttcagtcaacttt

SEQ ID NO: 637292 - DNA, 33 bp, Homo sapien
cgtgatgtttacaaagtctcttcagtcaacttt

SEQ ID NO: 637293 - DNA, 33 bp, Homo sapien
ctaagggattaaaggaataaaaaatcagagaat

SEQ ID NO: 637294 - DNA, 33 bp, Homo sapien
ctaagggattaaaggactaaaaaatcagagaat

SEQ ID NO: 637295 - DNA, 33 bp, Homo sapien
aacaagcaatgtagaacaaaaggctgtgaaatt

SEQ ID NO: 637296 - DNA, 33 bp, Homo sapien
aacaagcaatgtagaataaaaggctgtgaaatt

SEQ ID NO: 637297 - DNA, 33 bp, Homo sapien
caaggaactgggcaaaaggccaattagtaactg

SEQ ID NO: 637298 - DNA, 33 bp, Homo sapien
caaggaactgggcaaatggccaattagtaactg

SEQ ID NO: 637299 - DNA, 33 bp, Homo sapien
gagaaaacacaggtagaccaaagtaagcatccc

SEQ ID NO: 637300 - DNA, 33 bp, Homo sapien
gagaaaacacaggtaggccaaagtaagcatccc

SEQ ID NO: 637301 - DNA, 33 bp, Homo sapien
ttagggacctgatgaccaatggtttaaaagcat

SEQ ID NO: 637302 - DNA, 33 bp, Homo sapien
ttagggacctgatgactaatggtttaaaagcat

SEQ ID NO: 637303 - DNA, 33 bp, Homo sapien
tctggtgaagtttaccagcatcaacatctccca

SEQ ID NO: 637304 - DNA, 33 bp, Homo sapien
tctggtgaagtttaccggcatcaacatctccca

SEQ ID NO: 637305 - DNA, 33 bp, Homo sapien
aggagattttggtttacggtaagattcagatat

SEQ ID NO: 637306 - DNA, 33 bp, Homo sapien
aggagattttggtttatggtaagattcagatat

SEQ ID NO: 637307 - DNA, 33 bp, Homo sapien
ttagtgtatgccagaacgggatggtcctagaac

SEQ ID NO: 637308 - DNA, 33 bp, Homo sapien
ttagtgtatgccagaatgggatggtcctagaac

SEQ ID NO: 637309 - DNA, 33 bp, Homo sapien
ataccacttcttccacccagcctggccaaaggc

SEQ ID NO: 637310 - DNA, 33 bp, Homo sapien
ataccacttcttccacgcagcctggccaaaggc

SEQ ID NO: 637311 - DNA, 33 bp, Homo sapien
ccaagtagatgtgaaacgtgacatacatttaaa

SEQ ID NO: 637312 - DNA, 33 bp, Homo sapien
ccaagtagatgtgaaatgtgacatacatttaaa

SEQ ID NO: 637313 - DNA, 33 bp, Homo sapien
acctgatcactgaggaagagtacttggagttgg

SEQ ID NO: 637314 - DNA, 33 bp, Homo sapien
acctgatcactgaggaggagtacttggagttgg

SEQ ID NO: 637315 - DNA, 33 bp, Homo sapien
atttccatgtttaagacagttctcaggcatcct

SEQ ID NO: 637316 - DNA, 33 bp, Homo sapien
atttccatgtttaagatagttctcaggcatcct

SEQ ID NO: 637317 - DNA, 33 bp, Homo sapien
cacattgaccagtaaaataacatgcctggaaga

SEQ ID NO: 637318 - DNA, 33 bp, Homo sapien
cacattgaccagtaaagtaacatgcctggaaga

SEQ ID NO: 637319 - DNA, 33 bp, Homo sapien
tttttttttggtaggactagagtatcactatat

SEQ ID NO: 637320 - DNA, 33 bp, Homo sapien
tttttttttggtaggagtagagtatcactatat

SEQ ID NO: 637321 - DNA, 33 bp, Homo sapien
gaacacttagcaggtaagggagctcagtaacat

SEQ ID NO: 637322 - DNA, 33 bp, Homo sapien
gaacacttagcaggtaggggagctcagtaacat

SEQ ID NO: 637323 - DNA, 33 bp, Homo sapien
gacaatgagctgcttacggacaggagctaggta

SEQ ID NO: 637324 - DNA, 33 bp, Homo sapien
gacaatgagctgcttatggacaggagctaggta

SEQ ID NO: 637325 - DNA, 33 bp, Homo sapien
ctgtttccctgaataaccataaactttcctgtc

SEQ ID NO: 637326 - DNA, 33 bp, Homo sapien
ctgtttccctgaataatcataaactttcctgtc

SEQ ID NO: 637327 - DNA, 33 bp, Homo sapien
tatcataacatacacaccaatacttaattcaag

SEQ ID NO: 637328 - DNA, 33 bp, Homo sapien
tatcataacatacacatcaatacttaattcaag

SEQ ID NO: 637329 - DNA, 33 bp, Homo sapien
ggatggttctgtgtaaacttagggggcagtagg

SEQ ID NO: 637330 - DNA, 33 bp, Homo sapien
ggatggttctgtgtaaccttagggggcagtagg

SEQ ID NO: 637331 - DNA, 33 bp, Homo sapien
aatactaatccattataagatctatgcatctgt

SEQ ID NO: 637332 - DNA, 33 bp, Homo sapien
aatactaatccattatcagatctatgcatctgt

SEQ ID NO: 637333 - DNA, 33 bp, Homo sapien
catgtatatcatttacaatttggaacaaataaa

SEQ ID NO: 637334 - DNA, 33 bp, Homo sapien
catgtatatcatttacgatttggaacaaataaa

SEQ ID NO: 637335 - DNA, 33 bp, Homo sapien
tgaatttctgtatcagcagggagaggctagtat

SEQ ID NO: 637336 - DNA, 33 bp, Homo sapien
tgaatttctgtatcaggagggagaggctagtat

SEQ ID NO: 637337 - DNA, 33 bp, Homo sapien
gtgagttatcctcaaacggtctatagacggaga

SEQ ID NO: 637338 - DNA, 33 bp, Homo sapien
gtgagttatcctcaaatggtctatagacggaga

SEQ ID NO: 637339 - DNA, 33 bp, Homo sapien
catatttctagcccccagagaaagcctttgtgg

SEQ ID NO: 637340 - DNA, 33 bp, Homo sapien
catatttctagcccccggagaaagcctttgtgg

SEQ ID NO: 637341 - DNA, 33 bp, Homo sapien
actatgcataagacacagaaaccggagacattt

SEQ ID NO: 637342 - DNA, 33 bp, Homo sapien
actatgcataagacacggaaaccggagacattt

SEQ ID NO: 637343 - DNA, 33 bp, Homo sapien
tcccagagaactcaacacttgacacacagatat

SEQ ID NO: 637344 - DNA, 33 bp, Homo sapien
tcccagagaactcaacgcttgacacacagatat

SEQ ID NO: 637345 - DNA, 33 bp, Homo sapien
gtttatcattcgaggactatctaaggagtgccc

SEQ ID NO: 637346 - DNA, 33 bp, Homo sapien
gtttatcattcgaggattatctaaggagtgccc

SEQ ID NO: 637347 - DNA, 33 bp, Homo sapien
acgctggaggctgtgaacattacatcctcagag

SEQ ID NO: 637348 - DNA, 33 bp, Homo sapien
acgctggaggctgtgagcattacatcctcagag

SEQ ID NO: 637349 - DNA, 33 bp, Homo sapien
tgaatactgagttcagcaattggaaagctttta

SEQ ID NO: 637350 - DNA, 33 bp, Homo sapien
tgaatactgagttcaggaattggaaagctttta

SEQ ID NO: 637351 - DNA, 33 bp, Homo sapien
tgaagctcatggtttacatcatcttaatggtgt

SEQ ID NO: 637352 - DNA, 33 bp, Homo sapien
tgaagctcatggtttatatcatcttaatggtgt

SEQ ID NO: 637353 - DNA, 33 bp, Homo sapien
gagatggagaattgtcaaggccaaatgctcaac

SEQ ID NO: 637354 - DNA, 33 bp, Homo sapien
gagatggagaattgtccaggccaaatgctcaac

SEQ ID NO: 637355 - DNA, 33 bp, Homo sapien
ttatttctaagcagaagttcattgtatgaatat

SEQ ID NO: 637356 - DNA, 33 bp, Homo sapien
ttatttctaagcagaatttcattgtatgaatat

SEQ ID NO: 637357 - DNA, 33 bp, Homo sapien
cataacaatgaacatacccaatgtataatcttt

SEQ ID NO: 637358 - DNA, 33 bp, Homo sapien
cataacaatgaacatatccaatgtataatcttt

SEQ ID NO: 637359 - DNA, 33 bp, Homo sapien
tatgataaaagcttcacatgataactcttgaat

SEQ ID NO: 637360 - DNA, 33 bp, Homo sapien
tatgataaaagcttcatatgataactcttgaat

SEQ ID NO: 637361 - DNA, 33 bp, Homo sapien
cagcctgcctctctcaaaatttctgctctacca

SEQ ID NO: 637362 - DNA, 33 bp, Homo sapien
cagcctgcctctctcagaatttctgctctacca

SEQ ID NO: 637363 - DNA, 33 bp, Homo sapien
agattaattggatcaaatagaggtttatatttc

SEQ ID NO: 637364 - DNA, 33 bp, Homo sapien
agattaattggatcaagtagaggtttatatttc

SEQ ID NO: 637365 - DNA, 33 bp, Homo sapien
aaaaattttatgcaacaaggaatattttataga

SEQ ID NO: 637366 - DNA, 33 bp, Homo sapien
aaaaattttatgcaacgaggaatattttataga

SEQ ID NO: 637367 - DNA, 33 bp, Homo sapien
tccactcactacctgaacttttaaccagttacc

SEQ ID NO: 637368 - DNA, 33 bp, Homo sapien
tccactcactacctgaccttttaaccagttacc

SEQ ID NO: 637369 - DNA, 33 bp, Homo sapien
aactccagcggtgccactcctgcttctcctcaa

SEQ ID NO: 637370 - DNA, 33 bp, Homo sapien
aactccagcggtgccattcctgcttctcctcaa

SEQ ID NO: 637371 - DNA, 33 bp, Homo sapien
attcaaaggcgaatagcatttcatattcctgga

SEQ ID NO: 637372 - DNA, 33 bp, Homo sapien
attcaaaggcgaataggatttcatattcctgga

SEQ ID NO: 637373 - DNA, 33 bp, Homo sapien
agcaagtggcaagttacatttgatcccaaacga

SEQ ID NO: 637374 - DNA, 33 bp, Homo sapien
agcaagtggcaagttatatttgatcccaaacga

SEQ ID NO: 637375 - DNA, 33 bp, Homo sapien
tgtagttagctctaaacgctactgtggcaggct

SEQ ID NO: 637376 - DNA, 33 bp, Homo sapien
tgtagttagctctaaaggctactgtggcaggct

SEQ ID NO: 637377 - DNA, 33 bp, Homo sapien
ttaatgcttttgagtaaaataaacaaactgtca

SEQ ID NO: 637378 - DNA, 33 bp, Homo sapien
ttaatgcttttgagtacaataaacaaactgtca

SEQ ID NO: 637379 - DNA, 33 bp, Homo sapien
gtgtgccttgatagtacagacaagccaagacct

SEQ ID NO: 637380 - DNA, 33 bp, Homo sapien
gtgtgccttgatagtatagacaagccaagacct

SEQ ID NO: 637381 - DNA, 33 bp, Homo sapien
ccccagtagtcaaaaccggcttgagatgtagag

SEQ ID NO: 637382 - DNA, 33 bp, Homo sapien
ccccagtagtcaaaactggcttgagatgtagag

SEQ ID NO: 637383 - DNA, 33 bp, Homo sapien
tacacagctagtaaatagtagacccaggacttg

SEQ ID NO: 637384 - DNA, 33 bp, Homo sapien
tacacagctagtaaatggtagacccaggacttg

SEQ ID NO: 637385 - DNA, 33 bp, Homo sapien
tgtgatgtcagcccacgcttttccagcatgacg

SEQ ID NO: 637386 - DNA, 33 bp, Homo sapien
tgtgatgtcagcccactcttttccagcatgacg

SEQ ID NO: 637387 - DNA, 33 bp, Homo sapien
atggagtggtgttcacaaaatcctcttccaaga

SEQ ID NO: 637388 - DNA, 33 bp, Homo sapien
atggagtggtgttcacgaaatcctcttccaaga

SEQ ID NO: 637389 - DNA, 33 bp, Homo sapien
tggcattgtgctgcacacttttacacacagtac

SEQ ID NO: 637390 - DNA, 33 bp, Homo sapien
tggcattgtgctgcacccttttacacacagtac

SEQ ID NO: 637391 - DNA, 33 bp, Homo sapien
ctttcccctgcgtgtagaagataggcaagtcct

SEQ ID NO: 637392 - DNA, 33 bp, Homo sapien
ctttcccctgcgtgtataagataggcaagtcct

SEQ ID NO: 637393 - DNA, 33 bp, Homo sapien
tgcacgttcatatataagcaggctctgagtttg

SEQ ID NO: 637394 - DNA, 33 bp, Homo sapien
tgcacgttcatatataggcaggctctgagtttg

SEQ ID NO: 637395 - DNA, 33 bp, Homo sapien
ttttcttgttttcataatagtgtagagatctga

SEQ ID NO: 637396 - DNA, 33 bp, Homo sapien
ttttcttgttttcatagtagtgtagagatctga

SEQ ID NO: 637397 - DNA, 33 bp, Homo sapien
atatctaattgtaaaaatcatgtggttatgtgc

SEQ ID NO: 637398 - DNA, 33 bp, Homo sapien
atatctaattgtaaaagtcatgtggttatgtgc

SEQ ID NO: 637399 - DNA, 33 bp, Homo sapien
ctgagtcaggccttcacaagcaatgcagactgc

SEQ ID NO: 637400 - DNA, 33 bp, Homo sapien
ctgagtcaggccttcagaagcaatgcagactgc

SEQ ID NO: 637401 - DNA, 33 bp, Homo sapien
atcggaggtatttttacggaaatctttgaaata

SEQ ID NO: 637402 - DNA, 33 bp, Homo sapien
atcggaggtatttttatggaaatctttgaaata

SEQ ID NO: 637403 - DNA, 33 bp, Homo sapien
gccatgtgaactcttaacatcttatcctattgt

SEQ ID NO: 637404 - DNA, 33 bp, Homo sapien
gccatgtgaactcttagcatcttatcctattgt

SEQ ID NO: 637405 - DNA, 33 bp, Homo sapien
ctaaacattttcttgtcaattaacttcagcctg

SEQ ID NO: 637406 - DNA, 33 bp, Homo sapien
ctaaacattttcttgtgaattaacttcagcctg

SEQ ID NO: 637407 - DNA, 33 bp, Homo sapien
tggcatttcacaggcgaaaaaattttgaggcca

SEQ ID NO: 637408 - DNA, 33 bp, Homo sapien
tggcatttcacaggcggaaaaattttgaggcca

SEQ ID NO: 637409 - DNA, 33 bp, Homo sapien
tctaggaagataaaaaagacaacatgagcagag

SEQ ID NO: 637410 - DNA, 33 bp, Homo sapien
tctaggaagataaaaaggacaacatgagcagag

SEQ ID NO: 637411 - DNA, 33 bp, Homo sapien
acattaaatattagcaatgagcagtggctggga

SEQ ID NO: 637412 - DNA, 33 bp, Homo sapien
acattaaatattagcagtgagcagtggctggga

SEQ ID NO: 637413 - DNA, 33 bp, Homo sapien
gagaccgctaggctctcacaataggtttaactc

SEQ ID NO: 637414 - DNA, 33 bp, Homo sapien
gagaccgctaggctctgacaataggtttaactc

SEQ ID NO: 637415 - DNA, 33 bp, Homo sapien
atgaatgagaaatcaacggcaaagtctagactg

SEQ ID NO: 637416 - DNA, 33 bp, Homo sapien
atgaatgagaaatcaatggcaaagtctagactg

SEQ ID NO: 637417 - DNA, 33 bp, Homo sapien
tatttcccaggtgtgcaaattgtggcatggaaa

SEQ ID NO: 637418 - DNA, 33 bp, Homo sapien
tatttcccaggtgtgcgaattgtggcatggaaa

SEQ ID NO: 637419 - DNA, 33 bp, Homo sapien
caggcagaaattccagaaggagtggagaagctg

SEQ ID NO: 637420 - DNA, 33 bp, Homo sapien
caggcagaaattccagtaggagtggagaagctg

SEQ ID NO: 637421 - DNA, 33 bp, Homo sapien
gtacaatctacacccaaccaaccagattagcac

SEQ ID NO: 637422 - DNA, 33 bp, Homo sapien
gtacaatctacacccagccaaccagattagcac

SEQ ID NO: 637423 - DNA, 33 bp, Homo sapien
atgtttttttctatgaaggatcagatggtatta

SEQ ID NO: 637424 - DNA, 33 bp, Homo sapien
atgtttttttctatgacggatcagatggtatta

SEQ ID NO: 637425 - DNA, 33 bp, Homo sapien
aaactttgagcacaagcccattagaaaccatgc

SEQ ID NO: 637426 - DNA, 33 bp, Homo sapien
aaactttgagcacaagtccattagaaaccatgc

SEQ ID NO: 637427 - DNA, 33 bp, Homo sapien
tatggaaatttttagccacccaaagagcagagc

SEQ ID NO: 637428 - DNA, 33 bp, Homo sapien
tatggaaatttttagcgacccaaagagcagagc

SEQ ID NO: 637429 - DNA, 33 bp, Homo sapien
ggcttagattaagggacaggcttttctgtctag

SEQ ID NO: 637430 - DNA, 33 bp, Homo sapien
ggcttagattaagggataggcttttctgtctag

SEQ ID NO: 637431 - DNA, 33 bp, Homo sapien
gactaaaaatgtcttaacgacacagtcgctgga

SEQ ID NO: 637432 - DNA, 33 bp, Homo sapien
gactaaaaatgtcttaccgacacagtcgctgga

SEQ ID NO: 637433 - DNA, 33 bp, Homo sapien
tagcctttttcaaagacgaccagcaaggctctc

SEQ ID NO: 637434 - DNA, 33 bp, Homo sapien
tagcctttttcaaagatgaccagcaaggctctc

SEQ ID NO: 637435 - DNA, 33 bp, Homo sapien
aggcatgatcaagctgaagaaaaatatcagtga

SEQ ID NO: 637436 - DNA, 33 bp, Homo sapien
aggcatgatcaagctggagaaaaatatcagtga

SEQ ID NO: 637437 - DNA, 33 bp, Homo sapien
atcaatgtggctgtaaacctaatggcaggctaa

SEQ ID NO: 637438 - DNA, 33 bp, Homo sapien
atcaatgtggctgtaaccctaatggcaggctaa

SEQ ID NO: 637439 - DNA, 33 bp, Homo sapien
aatagatggatgagaacatgaatggatggttga

SEQ ID NO: 637440 - DNA, 33 bp, Homo sapien
aatagatggatgagaatatgaatggatggttga

SEQ ID NO: 637441 - DNA, 33 bp, Homo sapien
ttgtcagaccaccacaacaatcatactgctcat

SEQ ID NO: 637442 - DNA, 33 bp, Homo sapien
ttgtcagaccaccacatcaatcatactgctcat

SEQ ID NO: 637443 - DNA, 33 bp, Homo sapien
ttccagttctggctctgaaatatactagctgca

SEQ ID NO: 637444 - DNA, 33 bp, Homo sapien
ttccagttctggctcttaaatatactagctgca

SEQ ID NO: 637445 - DNA, 33 bp, Homo sapien
gcgatacaaagggccacagagaatgccaactga

SEQ ID NO: 637446 - DNA, 33 bp, Homo sapien
gcgatacaaagggccagagagaatgccaactga

SEQ ID NO: 637447 - DNA, 33 bp, Homo sapien
gaaaagtagtacacagccaggaaatatgcagac

SEQ ID NO: 637448 - DNA, 33 bp, Homo sapien
gaaaagtagtacacagtcaggaaatatgcagac

SEQ ID NO: 637449 - DNA, 33 bp, Homo sapien
gaggatctgggatacaaaacacagcccatctac

SEQ ID NO: 637450 - DNA, 33 bp, Homo sapien
gaggatctgggatacacaacacagcccatctac

SEQ ID NO: 637451 - DNA, 33 bp, Homo sapien
ccctagtctgtaaaacaggaatgggctcagtta

SEQ ID NO: 637452 - DNA, 33 bp, Homo sapien
ccctagtctgtaaaacgggaatgggctcagtta

SEQ ID NO: 637453 - DNA, 33 bp, Homo sapien
ttttgatgaagtccaacctatcaatttttcttt

SEQ ID NO: 637454 - DNA, 33 bp, Homo sapien
ttttgatgaagtccaatctatcaatttttcttt

SEQ ID NO: 637455 - DNA, 33 bp, Homo sapien
tgtctctgtcctgtaacggtgaaggtggatcct

SEQ ID NO: 637456 - DNA, 33 bp, Homo sapien
tgtctctgtcctgtaatggtgaaggtggatcct

SEQ ID NO: 637457 - DNA, 33 bp, Homo sapien
aggttatttgaccgcccccccaggagaattttt

SEQ ID NO: 637458 - DNA, 33 bp, Homo sapien
aggttatttgaccgcctccccaggagaattttt

SEQ ID NO: 637459 - DNA, 33 bp, Homo sapien
ctgtcaaaaaacttgaaaatttccagctttcaa

SEQ ID NO: 637460 - DNA, 33 bp, Homo sapien
ctgtcaaaaaacttgacaatttccagctttcaa

SEQ ID NO: 637461 - DNA, 33 bp, Homo sapien
gtgaaagggagtatcacaaatcagtattactca

SEQ ID NO: 637462 - DNA, 33 bp, Homo sapien
gtgaaagggagtatcataaatcagtattactca

SEQ ID NO: 637463 - DNA, 33 bp, Homo sapien
tcactttttagatgggaaaaatgtgaagtaact

SEQ ID NO: 637464 - DNA, 33 bp, Homo sapien
tcactttttagatgggcaaaatgtgaagtaact

SEQ ID NO: 637465 - DNA, 33 bp, Homo sapien
aggtttgactgcaatacaccttctcttttctct

SEQ ID NO: 637466 - DNA, 33 bp, Homo sapien
aggtttgactgcaatataccttctcttttctct

SEQ ID NO: 637467 - DNA, 33 bp, Homo sapien
gatgaatatgatgcctcaatttaagcgaaacaa

SEQ ID NO: 637468 - DNA, 33 bp, Homo sapien
gatgaatatgatgcctgaatttaagcgaaacaa

SEQ ID NO: 637469 - DNA, 33 bp, Homo sapien
ctgatgtgcaaagttacagaagtgcactgagct

SEQ ID NO: 637470 - DNA, 33 bp, Homo sapien
ctgatgtgcaaagttatagaagtgcactgagct

SEQ ID NO: 637471 - DNA, 33 bp, Homo sapien
aaagagcataggataaaaatgactaaagaaggt

SEQ ID NO: 637472 - DNA, 33 bp, Homo sapien
aaagagcataggataagaatgactaaagaaggt

SEQ ID NO: 637473 - DNA, 33 bp, Homo sapien
ttaggcagtatcctcacgttagcccagctatgt

SEQ ID NO: 637474 - DNA, 33 bp, Homo sapien
ttaggcagtatcctcatgttagcccagctatgt

SEQ ID NO: 637475 - DNA, 33 bp, Homo sapien
agatttttgtaagttacgttaggcttgaataca

SEQ ID NO: 637476 - DNA, 33 bp, Homo sapien
agatttttgtaagttatgttaggcttgaataca

SEQ ID NO: 637477 - DNA, 33 bp, Homo sapien
gtatatccagccttagaatggctatgtaacatg

SEQ ID NO: 637478 - DNA, 33 bp, Homo sapien
gtatatccagccttagcatggctatgtaacatg

SEQ ID NO: 637479 - DNA, 33 bp, Homo sapien
ccatcccctcatccccacgaaggtccaggtgag

SEQ ID NO: 637480 - DNA, 33 bp, Homo sapien
ccatcccctcatccccgcgaaggtccaggtgag

SEQ ID NO: 637481 - DNA, 33 bp, Homo sapien
aataaatacgagaaaaatcttcattgaggaggt

SEQ ID NO: 637482 - DNA, 33 bp, Homo sapien
aataaatacgagaaaagtcttcattgaggaggt

SEQ ID NO: 637483 - DNA, 33 bp, Homo sapien
atctaaatgaatatgaagttccatatcaacaag

SEQ ID NO: 637484 - DNA, 33 bp, Homo sapien
atctaaatgaatatgaggttccatatcaacaag

SEQ ID NO: 637485 - DNA, 33 bp, Homo sapien
acatttttattgtccgcactatgatcaaataaa

SEQ ID NO: 637486 - DNA, 33 bp, Homo sapien
acatttttattgtccgtactatgatcaaataaa

SEQ ID NO: 637487 - DNA, 33 bp, Homo sapien
tatttgataaaattgcaaaatggaaaaaccagt

SEQ ID NO: 637488 - DNA, 33 bp, Homo sapien
tatttgataaaattgctaaatggaaaaaccagt

SEQ ID NO: 637489 - DNA, 33 bp, Homo sapien
ggtatgagcaagtctgaatacaaatttctacct

SEQ ID NO: 637490 - DNA, 33 bp, Homo sapien
ggtatgagcaagtctggatacaaatttctacct

SEQ ID NO: 637491 - DNA, 33 bp, Homo sapien
tgaacctaaacgagaacgtctaatggaagaatt

SEQ ID NO: 637492 - DNA, 33 bp, Homo sapien
tgaacctaaacgagaatgtctaatggaagaatt

SEQ ID NO: 637493 - DNA, 33 bp, Homo sapien
actgtgtctctttcaaatgtacgaaattgtcta

SEQ ID NO: 637494 - DNA, 33 bp, Homo sapien
actgtgtctctttcaagtgtacgaaattgtcta

SEQ ID NO: 637495 - DNA, 33 bp, Homo sapien
agacacagtggccccaactgaattctccaggat

SEQ ID NO: 637496 - DNA, 33 bp, Homo sapien
agacacagtggccccacctgaattctccaggat

SEQ ID NO: 637497 - DNA, 33 bp, Homo sapien
agtgtcaatgtagataccactgtctagggaggt

SEQ ID NO: 637498 - DNA, 33 bp, Homo sapien
agtgtcaatgtagatatcactgtctagggaggt

SEQ ID NO: 637499 - DNA, 33 bp, Homo sapien
actatcaaatgaggaccataagagtcatgtctt

SEQ ID NO: 637500 - DNA, 33 bp, Homo sapien
actatcaaatgaggactataagagtcatgtctt

SEQ ID NO: 637501 - DNA, 33 bp, Homo sapien
tgaaaacagcagggacaatatacataatttctt

SEQ ID NO: 637502 - DNA, 33 bp, Homo sapien
tgaaaacagcagggacgatatacataatttctt

SEQ ID NO: 637503 - DNA, 33 bp, Homo sapien
taacagatccaaagaaagacgactcacacacac

SEQ ID NO: 637504 - DNA, 33 bp, Homo sapien
taacagatccaaagaatgacgactcacacacac

SEQ ID NO: 637505 - DNA, 33 bp, Homo sapien
ctaatatctccatgccaatctaactcttctatc

SEQ ID NO: 637506 - DNA, 33 bp, Homo sapien
ctaatatctccatgccgatctaactcttctatc

SEQ ID NO: 637507 - DNA, 33 bp, Homo sapien
tcatcctgtagtgctacctttaaaaaatgcctg

SEQ ID NO: 637508 - DNA, 33 bp, Homo sapien
tcatcctgtagtgctagctttaaaaaatgcctg

SEQ ID NO: 637509 - DNA, 33 bp, Homo sapien
atgccaggctgtaccacgtttgtgctacctaca

SEQ ID NO: 637510 - DNA, 33 bp, Homo sapien
atgccaggctgtaccatgtttgtgctacctaca

SEQ ID NO: 637511 - DNA, 33 bp, Homo sapien
tgaggcttagaaaaacaagtaatggttaggtgt

SEQ ID NO: 637512 - DNA, 33 bp, Homo sapien
tgaggcttagaaaaacgagtaatggttaggtgt

SEQ ID NO: 637513 - DNA, 33 bp, Homo sapien
aggcaactgtggtttcaatttatacaaataaga

SEQ ID NO: 637514 - DNA, 33 bp, Homo sapien
aggcaactgtggtttcgatttatacaaataaga

SEQ ID NO: 637515 - DNA, 33 bp, Homo sapien
gagccatgagattagacgtttcccacagttttt

SEQ ID NO: 637516 - DNA, 33 bp, Homo sapien
gagccatgagattagatgtttcccacagttttt

SEQ ID NO: 637517 - DNA, 33 bp, Homo sapien
tgatattaaccaaatgacattgatactaacttt

SEQ ID NO: 637518 - DNA, 33 bp, Homo sapien
tgatattaaccaaatgtcattgatactaacttt

SEQ ID NO: 637519 - DNA, 33 bp, Homo sapien
tgagtaccatagtgaaaaacacatcccagttct

SEQ ID NO: 637520 - DNA, 33 bp, Homo sapien
tgagtaccatagtgaataacacatcccagttct

SEQ ID NO: 637521 - DNA, 33 bp, Homo sapien
tctctgcattttcaccgaccagtgtctaaccca

SEQ ID NO: 637522 - DNA, 33 bp, Homo sapien
tctctgcattttcacctaccagtgtctaaccca

SEQ ID NO: 637523 - DNA, 33 bp, Homo sapien
tctcctccattaacccaagagcctttggattct

SEQ ID NO: 637524 - DNA, 33 bp, Homo sapien
tctcctccattaacccgagagcctttggattct

SEQ ID NO: 637525 - DNA, 33 bp, Homo sapien
gagcctgacatacatccatgagatgcataagac

SEQ ID NO: 637526 - DNA, 33 bp, Homo sapien
gagcctgacatacatcgatgagatgcataagac

SEQ ID NO: 637527 - DNA, 33 bp, Homo sapien
atattacagtgtccaaattagttttcacaataa

SEQ ID NO: 637528 - DNA, 33 bp, Homo sapien
atattacagtgtccaatttagttttcacaataa

SEQ ID NO: 637529 - DNA, 33 bp, Homo sapien
ggagcacataggcaaaaagggatgtctagaaga

SEQ ID NO: 637530 - DNA, 33 bp, Homo sapien
ggagcacataggcaaagagggatgtctagaaga

SEQ ID NO: 637531 - DNA, 33 bp, Homo sapien
aactgcaagtatggtcactcttattaatgtaaa

SEQ ID NO: 637532 - DNA, 33 bp, Homo sapien
aactgcaagtatggtctctcttattaatgtaaa

SEQ ID NO: 637533 - DNA, 33 bp, Homo sapien
tctgctgacagaagggaaagatggatgtagctg

SEQ ID NO: 637534 - DNA, 33 bp, Homo sapien
tctgctgacagaaggggaagatggatgtagctg

SEQ ID NO: 637535 - DNA, 33 bp, Homo sapien
gagattgcctaaagaactgaactaccatttggt

SEQ ID NO: 637536 - DNA, 33 bp, Homo sapien
gagattgcctaaagaattgaactaccatttggt

SEQ ID NO: 637537 - DNA, 33 bp, Homo sapien
agtacgtaaggtcctccctttatttgaaagaaa

SEQ ID NO: 637538 - DNA, 33 bp, Homo sapien
agtacgtaaggtcctctctttatttgaaagaaa

SEQ ID NO: 637539 - DNA, 33 bp, Homo sapien
atgcagaaggctcaccagatggcctcattaaaa

SEQ ID NO: 637540 - DNA, 33 bp, Homo sapien
atgcagaaggctcaccggatggcctcattaaaa

SEQ ID NO: 637541 - DNA, 33 bp, Homo sapien
atggacagtttccaccaagaatgatgggaggac

SEQ ID NO: 637542 - DNA, 33 bp, Homo sapien
atggacagtttccaccgagaatgatgggaggac

SEQ ID NO: 637543 - DNA, 33 bp, Homo sapien
tgtaaaacagctcaataaattttcagagggtga

SEQ ID NO: 637544 - DNA, 33 bp, Homo sapien
tgtaaaacagctcaatgaattttcagagggtga

SEQ ID NO: 637545 - DNA, 33 bp, Homo sapien
aaggaaaggataaaaccgatggctcagatttga

SEQ ID NO: 637546 - DNA, 33 bp, Homo sapien
aaggaaaggataaaactgatggctcagatttga

SEQ ID NO: 637547 - DNA, 33 bp, Homo sapien
atattaaaagccgaaaagtcttactaagagagt

SEQ ID NO: 637548 - DNA, 33 bp, Homo sapien
atattaaaagccgaaatgtcttactaagagagt

SEQ ID NO: 637549 - DNA, 33 bp, Homo sapien
atgcaagctggctgccggaaaaggaaatgcttc

SEQ ID NO: 637550 - DNA, 33 bp, Homo sapien
atgcaagctggctgcctgaaaaggaaatgcttc

SEQ ID NO: 637551 - DNA, 33 bp, Homo sapien
atgttgctttcgtctaacattgaattttctgga

SEQ ID NO: 637552 - DNA, 33 bp, Homo sapien
atgttgctttcgtctatcattgaattttctgga

SEQ ID NO: 637553 - DNA, 33 bp, Homo sapien
gaaatgcggccaaagaagtgagcaggagttgat

SEQ ID NO: 637554 - DNA, 33 bp, Homo sapien
gaaatgcggccaaagaggtgagcaggagttgat

SEQ ID NO: 637555 - DNA, 33 bp, Homo sapien
ttgttaaaccatcataactcctaagacttattc

SEQ ID NO: 637556 - DNA, 33 bp, Homo sapien
ttgttaaaccatcatatctcctaagacttattc

SEQ ID NO: 637557 - DNA, 33 bp, Homo sapien
gttaaccaccacagtcgacttggacaacttcta

SEQ ID NO: 637558 - DNA, 33 bp, Homo sapien
gttaaccaccacagtctacttggacaacttcta

SEQ ID NO: 637559 - DNA, 33 bp, Homo sapien
atgatattgtgtcttacaggccaagatcaagac

SEQ ID NO: 637560 - DNA, 33 bp, Homo sapien
atgatattgtgtcttataggccaagatcaagac

SEQ ID NO: 637561 - DNA, 33 bp, Homo sapien
taagccctaggaaaagaaaagtgagcaagtaaa

SEQ ID NO: 637562 - DNA, 33 bp, Homo sapien
taagccctaggaaaagcaaagtgagcaagtaaa

SEQ ID NO: 637563 - DNA, 33 bp, Homo sapien
gtctatcaacaacacaatcacttgtcaaatctt

SEQ ID NO: 637564 - DNA, 33 bp, Homo sapien
gtctatcaacaacacagtcacttgtcaaatctt

SEQ ID NO: 637565 - DNA, 33 bp, Homo sapien
ttgatagacattcaaacaaagcttcaacaagga

SEQ ID NO: 637566 - DNA, 33 bp, Homo sapien
ttgatagacattcaaagaaagcttcaacaagga

SEQ ID NO: 637567 - DNA, 33 bp, Homo sapien
acccagtatagggaaaatagatctcagagaata

SEQ ID NO: 637568 - DNA, 33 bp, Homo sapien
acccagtatagggaaagtagatctcagagaata

SEQ ID NO: 637569 - DNA, 33 bp, Homo sapien
gggggcataatttctacatggatctctcagcac

SEQ ID NO: 637570 - DNA, 33 bp, Homo sapien
gggggcataatttctagatggatctctcagcac

SEQ ID NO: 637571 - DNA, 33 bp, Homo sapien
agtgtctaaagtcatccaggaattaatatgttg

SEQ ID NO: 637572 - DNA, 33 bp, Homo sapien
agtgtctaaagtcatctaggaattaatatgttg

SEQ ID NO: 637573 - DNA, 33 bp, Homo sapien
tctatattccaccatagtaagcaacacattcat

SEQ ID NO: 637574 - DNA, 33 bp, Homo sapien
tctatattccaccatattaagcaacacattcat

SEQ ID NO: 637575 - DNA, 33 bp, Homo sapien
accctctaaatggtacccaggtggctgttaagt

SEQ ID NO: 637576 - DNA, 33 bp, Homo sapien
accctctaaatggtactcaggtggctgttaagt

SEQ ID NO: 637577 - DNA, 33 bp, Homo sapien
gaattaattgtggagcagatatcatacaaaaga

SEQ ID NO: 637578 - DNA, 33 bp, Homo sapien
gaattaattgtggagcggatatcatacaaaaga

SEQ ID NO: 637579 - DNA, 33 bp, Homo sapien
caaaataaccataaaccgagtagcttgtagaca

SEQ ID NO: 637580 - DNA, 33 bp, Homo sapien
caaaataaccataaactgagtagcttgtagaca

SEQ ID NO: 637581 - DNA, 33 bp, Homo sapien
ctagtgatgtccatcaagaatacaggcacagta

SEQ ID NO: 637582 - DNA, 33 bp, Homo sapien
ctagtgatgtccatcaggaatacaggcacagta

SEQ ID NO: 637583 - DNA, 33 bp, Homo sapien
tgtctagcccagagcagaaaatgaactatggaa

SEQ ID NO: 637584 - DNA, 33 bp, Homo sapien
tgtctagcccagagcataaaatgaactatggaa

SEQ ID NO: 637585 - DNA, 33 bp, Homo sapien
tgtaggcttgagtatacgaaattaaggatgaac

SEQ ID NO: 637586 - DNA, 33 bp, Homo sapien
tgtaggcttgagtatatgaaattaaggatgaac

SEQ ID NO: 637587 - DNA, 33 bp, Homo sapien
tatgcaatatttaggcaattcatttaggcaaac

SEQ ID NO: 637588 - DNA, 33 bp, Homo sapien
tatgcaatatttaggccattcatttaggcaaac

SEQ ID NO: 637589 - DNA, 33 bp, Homo sapien
cattgcactaactctacgtagtcagaaattacc

SEQ ID NO: 637590 - DNA, 33 bp, Homo sapien
cattgcactaactctatgtagtcagaaattacc

SEQ ID NO: 637591 - DNA, 33 bp, Homo sapien
tgtcatcaaataatgggatggattgttgtacct

SEQ ID NO: 637592 - DNA, 33 bp, Homo sapien
tgtcatcaaataatggtatggattgttgtacct

SEQ ID NO: 637593 - DNA, 33 bp, Homo sapien
ttcttctgttactccaatgagacctcgttgtaa

SEQ ID NO: 637594 - DNA, 33 bp, Homo sapien
ttcttctgttactccagtgagacctcgttgtaa

SEQ ID NO: 637595 - DNA, 33 bp, Homo sapien
catttctacaaattcaatacacttggaaccaag

SEQ ID NO: 637596 - DNA, 33 bp, Homo sapien
catttctacaaattcagtacacttggaaccaag

SEQ ID NO: 637597 - DNA, 33 bp, Homo sapien
gaaagttttgcaatcaatctgaatattcacaat

SEQ ID NO: 637598 - DNA, 33 bp, Homo sapien
gaaagttttgcaatcagtctgaatattcacaat

SEQ ID NO: 637599 - DNA, 33 bp, Homo sapien
actctaaaactatgtcaagccttgtagttctac

SEQ ID NO: 637600 - DNA, 33 bp, Homo sapien
actctaaaactatgtcgagccttgtagttctac

SEQ ID NO: 637601 - DNA, 33 bp, Homo sapien
tgactatcagaaatcacgtctattaaggaagaa

SEQ ID NO: 637602 - DNA, 33 bp, Homo sapien
tgactatcagaaatcatgtctattaaggaagaa

SEQ ID NO: 637603 - DNA, 33 bp, Homo sapien
aaggcagggaatttgacgcttgcaggagccaat

SEQ ID NO: 637604 - DNA, 33 bp, Homo sapien
aaggcagggaatttgatgcttgcaggagccaat

SEQ ID NO: 637605 - DNA, 33 bp, Homo sapien
ctctgaatattaagagccccattgcaagtaaaa

SEQ ID NO: 637606 - DNA, 33 bp, Homo sapien
ctctgaatattaagagtcccattgcaagtaaaa

SEQ ID NO: 637607 - DNA, 33 bp, Homo sapien
aaaaaagactttggacaactccaaattaacaac

SEQ ID NO: 637608 - DNA, 33 bp, Homo sapien
aaaaaagactttggacgactccaaattaacaac

SEQ ID NO: 637609 - DNA, 33 bp, Homo sapien
tattgggaccagtaacaaggcaatataataact

SEQ ID NO: 637610 - DNA, 33 bp, Homo sapien
tattgggaccagtaacgaggcaatataataact

SEQ ID NO: 637611 - DNA, 33 bp, Homo sapien
cattggacttgtagcactaagaaatgagaacat

SEQ ID NO: 637612 - DNA, 33 bp, Homo sapien
cattggacttgtagcattaagaaatgagaacat

SEQ ID NO: 637613 - DNA, 33 bp, Homo sapien
acaacttataaggtgacacaactggtgatggac

SEQ ID NO: 637614 - DNA, 33 bp, Homo sapien
acaacttataaggtgatacaactggtgatggac

SEQ ID NO: 637615 - DNA, 33 bp, Homo sapien
ataagagtcattaagcaaagaaatgtcacttat

SEQ ID NO: 637616 - DNA, 33 bp, Homo sapien
ataagagtcattaagcgaagaaatgtcacttat

SEQ ID NO: 637617 - DNA, 33 bp, Homo sapien
caaaaataactaaaaccgagattctgactctaa

SEQ ID NO: 637618 - DNA, 33 bp, Homo sapien
caaaaataactaaaactgagattctgactctaa

SEQ ID NO: 637619 - DNA, 33 bp, Homo sapien
ctggaccatttgagaaacaactcttaccgatgt

SEQ ID NO: 637620 - DNA, 33 bp, Homo sapien
ctggaccatttgagaatcaactcttaccgatgt

SEQ ID NO: 637621 - DNA, 33 bp, Homo sapien
tggcctggtcccgtaactggaatacatcaagac

SEQ ID NO: 637622 - DNA, 33 bp, Homo sapien
tggcctggtcccgtaattggaatacatcaagac

SEQ ID NO: 637623 - DNA, 33 bp, Homo sapien
gtatcatatttaactcaattacaatgccttgtg

SEQ ID NO: 637624 - DNA, 33 bp, Homo sapien
gtatcatatttaactcgattacaatgccttgtg

SEQ ID NO: 637625 - DNA, 33 bp, Homo sapien
agaaaactaagtgagacggaatatgtatttaca

SEQ ID NO: 637626 - DNA, 33 bp, Homo sapien
agaaaactaagtgagatggaatatgtatttaca

SEQ ID NO: 637627 - DNA, 33 bp, Homo sapien
ctttcttaccaaagacactatcttgacgtggcc

SEQ ID NO: 637628 - DNA, 33 bp, Homo sapien
ctttcttaccaaagacgctatcttgacgtggcc

SEQ ID NO: 637629 - DNA, 33 bp, Homo sapien
cttcctttagaaatgaccaagaaattcttttga

SEQ ID NO: 637630 - DNA, 33 bp, Homo sapien
cttcctttagaaatgagcaagaaattcttttga

SEQ ID NO: 637631 - DNA, 33 bp, Homo sapien
tgaagaagagcattgcacttggttcagctggaa

SEQ ID NO: 637632 - DNA, 33 bp, Homo sapien
tgaagaagagcattgcccttggttcagctggaa

SEQ ID NO: 637633 - DNA, 33 bp, Homo sapien
tcatcatagagacgtaccattgataccaatatt

SEQ ID NO: 637634 - DNA, 33 bp, Homo sapien
tcatcatagagacgtagcattgataccaatatt

SEQ ID NO: 637635 - DNA, 33 bp, Homo sapien
tggctggtggcattaaactcccttcttctcctg

SEQ ID NO: 637636 - DNA, 33 bp, Homo sapien
tggctggtggcattaagctcccttcttctcctg

SEQ ID NO: 637637 - DNA, 33 bp, Homo sapien
ctacttcaccaacaaacacataccaagtgccta

SEQ ID NO: 637638 - DNA, 33 bp, Homo sapien
ctacttcaccaacaaatacataccaagtgccta

SEQ ID NO: 637639 - DNA, 33 bp, Homo sapien
tacaattagttggagacgggagaaagacaaaga

SEQ ID NO: 637640 - DNA, 33 bp, Homo sapien
tacaattagttggagatgggagaaagacaaaga

SEQ ID NO: 637641 - DNA, 33 bp, Homo sapien
ggtgaagtcaagaaggccagtaaggaggtggct

SEQ ID NO: 637642 - DNA, 33 bp, Homo sapien
ggtgaagtcaagaaggtcagtaaggaggtggct

SEQ ID NO: 637643 - DNA, 33 bp, Homo sapien
cactaacctatttgaaataaatacacaggcaca

SEQ ID NO: 637644 - DNA, 33 bp, Homo sapien
cactaacctatttgaagtaaatacacaggcaca

SEQ ID NO: 637645 - DNA, 33 bp, Homo sapien
cttatttaataccatcaatttcctgctagaaat

SEQ ID NO: 637646 - DNA, 33 bp, Homo sapien
cttatttaataccatctatttcctgctagaaat

SEQ ID NO: 637647 - DNA, 33 bp, Homo sapien
gtcaccagtgcgaataataatgctcatcactct

SEQ ID NO: 637648 - DNA, 33 bp, Homo sapien
gtcaccagtgcgaatagtaatgctcatcactct

SEQ ID NO: 637649 - DNA, 33 bp, Homo sapien
catgatgaacaggagacattagcctatggtttg

SEQ ID NO: 637650 - DNA, 33 bp, Homo sapien
catgatgaacaggagagattagcctatggtttg

SEQ ID NO: 637651 - DNA, 33 bp, Homo sapien
tacctggctccaaaacactagttatttccccta

SEQ ID NO: 637652 - DNA, 33 bp, Homo sapien
tacctggctccaaaacgctagttatttccccta

SEQ ID NO: 637653 - DNA, 33 bp, Homo sapien
atgttgtgtgtttctaccttccaaatttgtttg

SEQ ID NO: 637654 - DNA, 33 bp, Homo sapien
atgttgtgtgtttctagcttccaaatttgtttg

SEQ ID NO: 637655 - DNA, 33 bp, Homo sapien
ttatttaatgctcagcagattaagctacctttt

SEQ ID NO: 637656 - DNA, 33 bp, Homo sapien
ttatttaatgctcagcggattaagctacctttt

SEQ ID NO: 637657 - DNA, 33 bp, Homo sapien
cagtgcagacatcgtaacctctcaacaaccttg

SEQ ID NO: 637658 - DNA, 33 bp, Homo sapien
cagtgcagacatcgtatcctctcaacaaccttg

SEQ ID NO: 637659 - DNA, 33 bp, Homo sapien
gttatagattaggtgaactgaggcaacaaggag

SEQ ID NO: 637660 - DNA, 33 bp, Homo sapien
gttatagattaggtgagctgaggcaacaaggag

SEQ ID NO: 637661 - DNA, 33 bp, Homo sapien
gagattgtagacatcactgagtacagtatttct

SEQ ID NO: 637662 - DNA, 33 bp, Homo sapien
gagattgtagacatcattgagtacagtatttct

SEQ ID NO: 637663 - DNA, 33 bp, Homo sapien
gctctgaagaacagggacaatttgaataggcag

SEQ ID NO: 637664 - DNA, 33 bp, Homo sapien
gctctgaagaacaggggcaatttgaataggcag

SEQ ID NO: 637665 - DNA, 33 bp, Homo sapien
tgatcctagaatgtgacagttgaacctgaaaag

SEQ ID NO: 637666 - DNA, 33 bp, Homo sapien
tgatcctagaatgtgatagttgaacctgaaaag

SEQ ID NO: 637667 - DNA, 33 bp, Homo sapien
aaattgccttgaaagacacagctattctctcat

SEQ ID NO: 637668 - DNA, 33 bp, Homo sapien
aaattgccttgaaagagacagctattctctcat

SEQ ID NO: 637669 - DNA, 33 bp, Homo sapien
gagtgagcttaaaaaaattattattgctcatgg

SEQ ID NO: 637670 - DNA, 33 bp, Homo sapien
gagtgagcttaaaaaacttattattgctcatgg

SEQ ID NO: 637671 - DNA, 33 bp, Homo sapien
gtttttgtgtttctagcatctgggacagggtat

SEQ ID NO: 637672 - DNA, 33 bp, Homo sapien
gtttttgtgtttctaggatctgggacagggtat

SEQ ID NO: 637673 - DNA, 33 bp, Homo sapien
aactcgagcccaggaactaaaacttgtgaaaat

SEQ ID NO: 637674 - DNA, 33 bp, Homo sapien
aactcgagcccaggaattaaaacttgtgaaaat

SEQ ID NO: 637675 - DNA, 33 bp, Homo sapien
aagatagctcagagcagtctccatttttaaagt

SEQ ID NO: 637676 - DNA, 33 bp, Homo sapien
aagatagctcagagcattctccatttttaaagt

SEQ ID NO: 637677 - DNA, 33 bp, Homo sapien
agctggaagtgtgggaaagttaacatttttgga

SEQ ID NO: 637678 - DNA, 33 bp, Homo sapien
agctggaagtgtgggagagttaacatttttgga

SEQ ID NO: 637679 - DNA, 33 bp, Homo sapien
tctcaaagtactactcaagtatatttcctccac

SEQ ID NO: 637680 - DNA, 33 bp, Homo sapien
tctcaaagtactactcgagtatatttcctccac

SEQ ID NO: 637681 - DNA, 33 bp, Homo sapien
gggcaaaatggaagtccgacattcgcaacttac

SEQ ID NO: 637682 - DNA, 33 bp, Homo sapien
gggcaaaatggaagtctgacattcgcaacttac

SEQ ID NO: 637683 - DNA, 33 bp, Homo sapien
tactagaatttatccaatatcaaagcaaacaga

SEQ ID NO: 637684 - DNA, 33 bp, Homo sapien
tactagaatttatccagtatcaaagcaaacaga

SEQ ID NO: 637685 - DNA, 33 bp, Homo sapien
ttgtatgggaggttaacagcaagagctttgggg

SEQ ID NO: 637686 - DNA, 33 bp, Homo sapien
ttgtatgggaggttaagagcaagagctttgggg

SEQ ID NO: 637687 - DNA, 33 bp, Homo sapien
tccttccacaccgggtaaaaggttttgtcaata

SEQ ID NO: 637688 - DNA, 33 bp, Homo sapien
tccttccacaccgggtgaaaggttttgtcaata

SEQ ID NO: 637689 - DNA, 33 bp, Homo sapien
tgtgaaattgtgataactgtggtgtgatttttt

SEQ ID NO: 637690 - DNA, 33 bp, Homo sapien
tgtgaaattgtgataattgtggtgtgatttttt

SEQ ID NO: 637691 - DNA, 33 bp, Homo sapien
actgaggcttggaaagaataatgaccttgcctg

SEQ ID NO: 637692 - DNA, 33 bp, Homo sapien
actgaggcttggaaaggataatgaccttgcctg

SEQ ID NO: 637693 - DNA, 33 bp, Homo sapien
cgtcttgcaatacagaatcactgaaacatgaga

SEQ ID NO: 637694 - DNA, 33 bp, Homo sapien
cgtcttgcaatacagattcactgaaacatgaga

SEQ ID NO: 637695 - DNA, 33 bp, Homo sapien
cactttttgagtctcaatgagaaaggatactgc

SEQ ID NO: 637696 - DNA, 33 bp, Homo sapien
cactttttgagtctcagtgagaaaggatactgc

SEQ ID NO: 637697 - DNA, 33 bp, Homo sapien
caggctatctgttccacgaagtatttcttcact

SEQ ID NO: 637698 - DNA, 33 bp, Homo sapien
caggctatctgttccatgaagtatttcttcact

SEQ ID NO: 637699 - DNA, 33 bp, Homo sapien
acagataagcgttagtaaccagtgactgaaagg

SEQ ID NO: 637700 - DNA, 33 bp, Homo sapien
acagataagcgttagtgaccagtgactgaaagg

SEQ ID NO: 637701 - DNA, 33 bp, Homo sapien
aggtaatggcaacagactagagagagcaataga

SEQ ID NO: 637702 - DNA, 33 bp, Homo sapien
aggtaatggcaacagattagagagagcaataga

SEQ ID NO: 637703 - DNA, 33 bp, Homo sapien
actatgtcatttaaaactcacagaactcctaga

SEQ ID NO: 637704 - DNA, 33 bp, Homo sapien
actatgtcatttaaaagtcacagaactcctaga

SEQ ID NO: 637705 - DNA, 33 bp, Homo sapien
tcacagaactcctagaagcgaagtgtttttatt

SEQ ID NO: 637706 - DNA, 33 bp, Homo sapien
tcacagaactcctagacgcgaagtgtttttatt

SEQ ID NO: 637707 - DNA, 33 bp, Homo sapien
tgcctttgtaaagaataaaaagtgaagagacag

SEQ ID NO: 637708 - DNA, 33 bp, Homo sapien
tgcctttgtaaagaatgaaaagtgaagagacag

SEQ ID NO: 637709 - DNA, 33 bp, Homo sapien
tggtttgtatttaggaccgtgttgtacaaaaat

SEQ ID NO: 637710 - DNA, 33 bp, Homo sapien
tggtttgtatttaggatcgtgttgtacaaaaat

SEQ ID NO: 637711 - DNA, 33 bp, Homo sapien
ttcagagctcccccgtcaagtgcttctcataat

SEQ ID NO: 637712 - DNA, 33 bp, Homo sapien
ttcagagctcccccgttaagtgcttctcataat

SEQ ID NO: 637713 - DNA, 33 bp, Homo sapien
ttgtgtcaagtagatacggctagttgttaatta

SEQ ID NO: 637714 - DNA, 33 bp, Homo sapien
ttgtgtcaagtagatatggctagttgttaatta

SEQ ID NO: 637715 - DNA, 33 bp, Homo sapien
ctggtctcctgggaccaaaaactccaaatctgg

SEQ ID NO: 637716 - DNA, 33 bp, Homo sapien
ctggtctcctgggaccgaaaactccaaatctgg

SEQ ID NO: 637717 - DNA, 33 bp, Homo sapien
agaatttttatactggaagattaacatgtgtta

SEQ ID NO: 637718 - DNA, 33 bp, Homo sapien
agaatttttatactgggagattaacatgtgtta

SEQ ID NO: 637719 - DNA, 33 bp, Homo sapien
tcattccttgcttttcacaattttgtcaaagat

SEQ ID NO: 637720 - DNA, 33 bp, Homo sapien
tcattccttgcttttctcaattttgtcaaagat

SEQ ID NO: 637721 - DNA, 33 bp, Homo sapien
cctgtctcctaccatcaaagagctttgtcagga

SEQ ID NO: 637722 - DNA, 33 bp, Homo sapien
cctgtctcctaccatccaagagctttgtcagga

SEQ ID NO: 637723 - DNA, 33 bp, Homo sapien
aagctaagggaaagcactgaaggatttttgagc

SEQ ID NO: 637724 - DNA, 33 bp, Homo sapien
aagctaagggaaagcattgaaggatttttgagc

SEQ ID NO: 637725 - DNA, 33 bp, Homo sapien
aaaccaccttgccagaccacaaaagtgctacca

SEQ ID NO: 637726 - DNA, 33 bp, Homo sapien
aaaccaccttgccagatcacaaaagtgctacca

SEQ ID NO: 637727 - DNA, 33 bp, Homo sapien
ccaggagtgagaaaaacaaaaggtgacagaaga

SEQ ID NO: 637728 - DNA, 33 bp, Homo sapien
ccaggagtgagaaaaataaaaggtgacagaaga

SEQ ID NO: 637729 - DNA, 33 bp, Homo sapien
cctcaatctccggccaaccctggtacaaatgcc

SEQ ID NO: 637730 - DNA, 33 bp, Homo sapien
cctcaatctccggccatccctggtacaaatgcc

SEQ ID NO: 637731 - DNA, 33 bp, Homo sapien
tttttctcccattacactgcaagataattaaag

SEQ ID NO: 637732 - DNA, 33 bp, Homo sapien
tttttctcccattacattgcaagataattaaag

SEQ ID NO: 637733 - DNA, 33 bp, Homo sapien
aggataccacagtttacgtatccattcttctgc

SEQ ID NO: 637734 - DNA, 33 bp, Homo sapien
aggataccacagtttatgtatccattcttctgc

SEQ ID NO: 637735 - DNA, 33 bp, Homo sapien
ggataatcactattcaagctatgataggctcca

SEQ ID NO: 637736 - DNA, 33 bp, Homo sapien
ggataatcactattcaggctatgataggctcca

SEQ ID NO: 637737 - DNA, 33 bp, Homo sapien
gcactttctgtaaaaacgagaggttgtatcagc

SEQ ID NO: 637738 - DNA, 33 bp, Homo sapien
gcactttctgtaaaaatgagaggttgtatcagc

SEQ ID NO: 637739 - DNA, 33 bp, Homo sapien
ggtaggtaataggcaccaaactggcaataactt

SEQ ID NO: 637740 - DNA, 33 bp, Homo sapien
ggtaggtaataggcactaaactggcaataactt

SEQ ID NO: 637741 - DNA, 33 bp, Homo sapien
ccttgagaagaaagaaccatgcagttcatatcc

SEQ ID NO: 637742 - DNA, 33 bp, Homo sapien
ccttgagaagaaagaatcatgcagttcatatcc

SEQ ID NO: 637743 - DNA, 33 bp, Homo sapien
tggttcttcaatcatacggtgatttctgccaca

SEQ ID NO: 637744 - DNA, 33 bp, Homo sapien
tggttcttcaatcatatggtgatttctgccaca

SEQ ID NO: 637745 - DNA, 33 bp, Homo sapien
aaggaagactgatatacgtgggtagctggccag

SEQ ID NO: 637746 - DNA, 33 bp, Homo sapien
aaggaagactgatataggtgggtagctggccag

SEQ ID NO: 637747 - DNA, 33 bp, Homo sapien
caatgtaagaaaaaaacgcttgtatacttggat

SEQ ID NO: 637748 - DNA, 33 bp, Homo sapien
caatgtaagaaaaaaatgcttgtatacttggat

SEQ ID NO: 637749 - DNA, 33 bp, Homo sapien
gaggattaggaatgcacggtgagtatatatttg

SEQ ID NO: 637750 - DNA, 33 bp, Homo sapien
gaggattaggaatgcagggtgagtatatatttg

SEQ ID NO: 637751 - DNA, 33 bp, Homo sapien
atgaatgcacatgactcaactcactacattctg

SEQ ID NO: 637752 - DNA, 33 bp, Homo sapien
atgaatgcacatgactgaactcactacattctg

SEQ ID NO: 637753 - DNA, 33 bp, Homo sapien
ggtggacaataatatacgacacacattctacat

SEQ ID NO: 637754 - DNA, 33 bp, Homo sapien
ggtggacaataatatatgacacacattctacat

SEQ ID NO: 637755 - DNA, 33 bp, Homo sapien
gcatattgtaaagggccaagtgcaactgaaaac

SEQ ID NO: 637756 - DNA, 33 bp, Homo sapien
gcatattgtaaagggctaagtgcaactgaaaac

SEQ ID NO: 637757 - DNA, 33 bp, Homo sapien
gttcacattgctaagaagtcgcaaagaaagtat

SEQ ID NO: 637758 - DNA, 33 bp, Homo sapien
gttcacattgctaagatgtcgcaaagaaagtat

SEQ ID NO: 637759 - DNA, 33 bp, Homo sapien
gttaaatgaatgaatccgaagaaaataagaaca

SEQ ID NO: 637760 - DNA, 33 bp, Homo sapien
gttaaatgaatgaatctgaagaaaataagaaca

SEQ ID NO: 637761 - DNA, 33 bp, Homo sapien
aggtaaacatgtaatacctgtaaagggtgataa

SEQ ID NO: 637762 - DNA, 33 bp, Homo sapien
aggtaaacatgtaatatctgtaaagggtgataa

SEQ ID NO: 637763 - DNA, 33 bp, Homo sapien
acaagttaccatgaagaaaattcgtatgctttg

SEQ ID NO: 637764 - DNA, 33 bp, Homo sapien
acaagttaccatgaaggaaattcgtatgctttg

SEQ ID NO: 637765 - DNA, 33 bp, Homo sapien
tgatattaggaatcaccgaataaaatgaagtcc

SEQ ID NO: 637766 - DNA, 33 bp, Homo sapien
tgatattaggaatcactgaataaaatgaagtcc

SEQ ID NO: 637767 - DNA, 33 bp, Homo sapien
atagccagtcagatagaattttaaaaagcacct

SEQ ID NO: 637768 - DNA, 33 bp, Homo sapien
atagccagtcagatagcattttaaaaagcacct

SEQ ID NO: 637769 - DNA, 33 bp, Homo sapien
aagcacctaaaggcacgactgggaagatacaaa

SEQ ID NO: 637770 - DNA, 33 bp, Homo sapien
aagcacctaaaggcactactgggaagatacaaa

SEQ ID NO: 637771 - DNA, 33 bp, Homo sapien
taattaagagacttgccccaagctggaagattt

SEQ ID NO: 637772 - DNA, 33 bp, Homo sapien
taattaagagacttgcgccaagctggaagattt

SEQ ID NO: 637773 - DNA, 33 bp, Homo sapien
tagtggtatatattcaataaggtcactatgatg

SEQ ID NO: 637774 - DNA, 33 bp, Homo sapien
tagtggtatatattcagtaaggtcactatgatg

SEQ ID NO: 637775 - DNA, 33 bp, Homo sapien
attgaacaatttttaaataattgcatacacagt

SEQ ID NO: 637776 - DNA, 33 bp, Homo sapien
attgaacaatttttaattaattgcatacacagt

SEQ ID NO: 637777 - DNA, 33 bp, Homo sapien
tagattctataattgacatctctcccagaggag

SEQ ID NO: 637778 - DNA, 33 bp, Homo sapien
tagattctataattgatatctctcccagaggag

SEQ ID NO: 637779 - DNA, 33 bp, Homo sapien
atgacttctaatctaactgtctgaggtcaaggt

SEQ ID NO: 637780 - DNA, 33 bp, Homo sapien
atgacttctaatctaattgtctgaggtcaaggt

SEQ ID NO: 637781 - DNA, 33 bp, Homo sapien
gtcacaactgctcaaccctgttgtgacatcccc

SEQ ID NO: 637782 - DNA, 33 bp, Homo sapien
gtcacaactgctcaactctgttgtgacatcccc

SEQ ID NO: 637783 - DNA, 33 bp, Homo sapien
catcgatttgaaacaccatttactatgaatcca

SEQ ID NO: 637784 - DNA, 33 bp, Homo sapien
catcgatttgaaacacgatttactatgaatcca

SEQ ID NO: 637785 - DNA, 33 bp, Homo sapien
aagtgtttaacaaatacggaaagcaagcaatac

SEQ ID NO: 637786 - DNA, 33 bp, Homo sapien
aagtgtttaacaaatatggaaagcaagcaatac

SEQ ID NO: 637787 - DNA, 33 bp, Homo sapien
agcaatacaagagtcaaggttccaagacaaggt

SEQ ID NO: 637788 - DNA, 33 bp, Homo sapien
agcaatacaagagtcagggttccaagacaaggt

SEQ ID NO: 637789 - DNA, 33 bp, Homo sapien
tgctcagcctgacatgaagccacatggtatatc

SEQ ID NO: 637790 - DNA, 33 bp, Homo sapien
tgctcagcctgacatggagccacatggtatatc

SEQ ID NO: 637791 - DNA, 33 bp, Homo sapien
cagataaggaaactgaagtctagaaagagaaag

SEQ ID NO: 637792 - DNA, 33 bp, Homo sapien
cagataaggaaactgaggtctagaaagagaaag

SEQ ID NO: 637793 - DNA, 33 bp, Homo sapien
taaataaatgcttaataagtgaataggcaaatg

SEQ ID NO: 637794 - DNA, 33 bp, Homo sapien
taaataaatgcttaatgagtgaataggcaaatg

SEQ ID NO: 637795 - DNA, 33 bp, Homo sapien
tatagaacatttagaacaatctgaaaagaatta

SEQ ID NO: 637796 - DNA, 33 bp, Homo sapien
tatagaacatttagaagaatctgaaaagaatta

SEQ ID NO: 637797 - DNA, 33 bp, Homo sapien
cctttgatctgaaaccacttggtgactgtgtag

SEQ ID NO: 637798 - DNA, 33 bp, Homo sapien
cctttgatctgaaaccgcttggtgactgtgtag

SEQ ID NO: 637799 - DNA, 33 bp, Homo sapien
tcgtctcccacatctagatttattcttcatcct

SEQ ID NO: 637800 - DNA, 33 bp, Homo sapien
tcgtctcccacatctatatttattcttcatcct

SEQ ID NO: 637801 - DNA, 33 bp, Homo sapien
actccaactctccataaaatgaaatgtctttgc

SEQ ID NO: 637802 - DNA, 33 bp, Homo sapien
actccaactctccatagaatgaaatgtctttgc

SEQ ID NO: 637803 - DNA, 33 bp, Homo sapien
ggtttctgtttacacaatgcaggaggctacatt

SEQ ID NO: 637804 - DNA, 33 bp, Homo sapien
ggtttctgtttacacattgcaggaggctacatt

SEQ ID NO: 637805 - DNA, 33 bp, Homo sapien
gagggagaagacaaacacaattcaagtctgaca

SEQ ID NO: 637806 - DNA, 33 bp, Homo sapien
gagggagaagacaaacgcaattcaagtctgaca

SEQ ID NO: 637807 - DNA, 33 bp, Homo sapien
ttttcaggtaccaccaggatattgcaattatag

SEQ ID NO: 637808 - DNA, 33 bp, Homo sapien
ttttcaggtaccaccatgatattgcaattatag

SEQ ID NO: 637809 - DNA, 33 bp, Homo sapien
cagtcactaattcgagactcatcagtggtgacc

SEQ ID NO: 637810 - DNA, 33 bp, Homo sapien
cagtcactaattcgagtctcatcagtggtgacc

SEQ ID NO: 637811 - DNA, 33 bp, Homo sapien
cctgttgagaagattcaatgagataattcaatt

SEQ ID NO: 637812 - DNA, 33 bp, Homo sapien
cctgttgagaagattcgatgagataattcaatt

SEQ ID NO: 637813 - DNA, 33 bp, Homo sapien
cactgaaggtgttaccaacgaaaagtgccttgt

SEQ ID NO: 637814 - DNA, 33 bp, Homo sapien
cactgaaggtgttaccgacgaaaagtgccttgt

SEQ ID NO: 637815 - DNA, 33 bp, Homo sapien
atgaatggccagtggaaaaaagcatatacattt

SEQ ID NO: 637816 - DNA, 33 bp, Homo sapien
atgaatggccagtggagaaaagcatatacattt

SEQ ID NO: 637817 - DNA, 33 bp, Homo sapien
acctcccaacgtttccagaacagagaatgaata

SEQ ID NO: 637818 - DNA, 33 bp, Homo sapien
acctcccaacgtttccggaacagagaatgaata

SEQ ID NO: 637819 - DNA, 33 bp, Homo sapien
gagtgggtcgagagaaaagagattgccatattt

SEQ ID NO: 637820 - DNA, 33 bp, Homo sapien
gagtgggtcgagagaagagagattgccatattt

SEQ ID NO: 637821 - DNA, 33 bp, Homo sapien
caatggcatgactaccagctacagtatgttaca

SEQ ID NO: 637822 - DNA, 33 bp, Homo sapien
caatggcatgactaccggctacagtatgttaca

SEQ ID NO: 637823 - DNA, 33 bp, Homo sapien
gaacatattcaaaatgccaagtagagtaattgc

SEQ ID NO: 637824 - DNA, 33 bp, Homo sapien
gaacatattcaaaatggcaagtagagtaattgc

SEQ ID NO: 637825 - DNA, 33 bp, Homo sapien
ggtggtgaagtatgaaaagccctggccctggaa

SEQ ID NO: 637826 - DNA, 33 bp, Homo sapien
ggtggtgaagtatgaagagccctggccctggaa

SEQ ID NO: 637827 - DNA, 33 bp, Homo sapien
tcgttgcaattatcccaaacttctttccacttc

SEQ ID NO: 637828 - DNA, 33 bp, Homo sapien
tcgttgcaattatcccgaacttctttccacttc

SEQ ID NO: 637829 - DNA, 33 bp, Homo sapien
atgctgagcttcaacactgtgagtttctggggg

SEQ ID NO: 637830 - DNA, 33 bp, Homo sapien
atgctgagcttcaacagtgtgagtttctggggg

SEQ ID NO: 637831 - DNA, 33 bp, Homo sapien
aagaaatcagtacataagaacatttgcataccc

SEQ ID NO: 637832 - DNA, 33 bp, Homo sapien
aagaaatcagtacatacgaacatttgcataccc

SEQ ID NO: 637833 - DNA, 33 bp, Homo sapien
ttgccttgctaagaacccgcaattaggccagtg

SEQ ID NO: 637834 - DNA, 33 bp, Homo sapien
ttgccttgctaagaactcgcaattaggccagtg

SEQ ID NO: 637835 - DNA, 33 bp, Homo sapien
gtccacacttgatgacaggttatttccttctca

SEQ ID NO: 637836 - DNA, 33 bp, Homo sapien
gtccacacttgatgacgggttatttccttctca

SEQ ID NO: 637837 - DNA, 33 bp, Homo sapien
cttttttaatccacacaaaatctgaggtacagt

SEQ ID NO: 637838 - DNA, 33 bp, Homo sapien
cttttttaatccacacgaaatctgaggtacagt

SEQ ID NO: 637839 - DNA, 33 bp, Homo sapien
aacatggcagtacacacgacaggtttgtctcac

SEQ ID NO: 637840 - DNA, 33 bp, Homo sapien
aacatggcagtacacatgacaggtttgtctcac

SEQ ID NO: 637841 - DNA, 33 bp, Homo sapien
gttttcaaattcagaacctttcacagtgactgt

SEQ ID NO: 637842 - DNA, 33 bp, Homo sapien
gttttcaaattcagaatctttcacagtgactgt

SEQ ID NO: 637843 - DNA, 33 bp, Homo sapien
agcatattgattctccacatggaacctggtcac

SEQ ID NO: 637844 - DNA, 33 bp, Homo sapien
agcatattgattctccgcatggaacctggtcac

SEQ ID NO: 637845 - DNA, 33 bp, Homo sapien
aatgctgtggtacctactacctgactggaataa

SEQ ID NO: 637846 - DNA, 33 bp, Homo sapien
aatgctgtggtacctattacctgactggaataa

SEQ ID NO: 637847 - DNA, 33 bp, Homo sapien
cacttgtttgatgtaacaccagaattttgtatt

SEQ ID NO: 637848 - DNA, 33 bp, Homo sapien
cacttgtttgatgtaataccagaattttgtatt

SEQ ID NO: 637849 - DNA, 33 bp, Homo sapien
gccttccaatttgttacactatctgtagttcaa

SEQ ID NO: 637850 - DNA, 33 bp, Homo sapien
gccttccaatttgttatactatctgtagttcaa

SEQ ID NO: 637851 - DNA, 33 bp, Homo sapien
aacttgagtgattggactcaactgccaataaga

SEQ ID NO: 637852 - DNA, 33 bp, Homo sapien
aacttgagtgattggagtcaactgccaataaga

SEQ ID NO: 637853 - DNA, 33 bp, Homo sapien
ttcaccaaagtcactcccaccgaatactagttc

SEQ ID NO: 637854 - DNA, 33 bp, Homo sapien
ttcaccaaagtcactctcaccgaatactagttc

SEQ ID NO: 637855 - DNA, 33 bp, Homo sapien
ccaatggctccctatcaaacttacttaaaactc

SEQ ID NO: 637856 - DNA, 33 bp, Homo sapien
ccaatggctccctatccaacttacttaaaactc

SEQ ID NO: 637857 - DNA, 33 bp, Homo sapien
ttttaacaacttgaaccgaaaggagatatttaa

SEQ ID NO: 637858 - DNA, 33 bp, Homo sapien
ttttaacaacttgaactgaaaggagatatttaa

SEQ ID NO: 637859 - DNA, 33 bp, Homo sapien
aagaggtaggagtagaagtacaacaagatggcc

SEQ ID NO: 637860 - DNA, 33 bp, Homo sapien
aagaggtaggagtagaggtacaacaagatggcc

SEQ ID NO: 637861 - DNA, 33 bp, Homo sapien
ttaggcctcagtaggaagacttcaggagatgca

SEQ ID NO: 637862 - DNA, 33 bp, Homo sapien
ttaggcctcagtaggatgacttcaggagatgca

SEQ ID NO: 637863 - DNA, 33 bp, Homo sapien
gtagaagcccaatgccccaagcaaaactattac

SEQ ID NO: 637864 - DNA, 33 bp, Homo sapien
gtagaagcccaatgcctcaagcaaaactattac

SEQ ID NO: 637865 - DNA, 33 bp, Homo sapien
aggtttacctgtttcccacaagcatgcctataa

SEQ ID NO: 637866 - DNA, 33 bp, Homo sapien
aggtttacctgtttcctacaagcatgcctataa

SEQ ID NO: 637867 - DNA, 33 bp, Homo sapien
ctacatcatccaggtcaagaaattcatccagca

SEQ ID NO: 637868 - DNA, 33 bp, Homo sapien
ctacatcatccaggtcgagaaattcatccagca

SEQ ID NO: 637869 - DNA, 33 bp, Homo sapien
ccattctagaggcgaaataaagcctatcttgtt

SEQ ID NO: 637870 - DNA, 33 bp, Homo sapien
ccattctagaggcgaagtaaagcctatcttgtt

SEQ ID NO: 637871 - DNA, 33 bp, Homo sapien
caggagcacagatggagtcaatgtgttttgcag

SEQ ID NO: 637872 - DNA, 33 bp, Homo sapien
caggagcacagatggattcaatgtgttttgcag

SEQ ID NO: 637873 - DNA, 33 bp, Homo sapien
agtcttacccaccctaactaatcacaaggactt

SEQ ID NO: 637874 - DNA, 33 bp, Homo sapien
agtcttacccaccctagctaatcacaaggactt

SEQ ID NO: 637875 - DNA, 33 bp, Homo sapien
gaaataatccatcggaggacccacctgtagtga

SEQ ID NO: 637876 - DNA, 33 bp, Homo sapien
gaaataatccatcggatgacccacctgtagtga

SEQ ID NO: 637877 - DNA, 33 bp, Homo sapien
atactctggttactaaactggttacactggact

SEQ ID NO: 637878 - DNA, 33 bp, Homo sapien
atactctggttactaagctggttacactggact

SEQ ID NO: 637879 - DNA, 33 bp, Homo sapien
ccacctcgaagagctcccagagattgtagaaag

SEQ ID NO: 637880 - DNA, 33 bp, Homo sapien
ccacctcgaagagctcgcagagattgtagaaag

SEQ ID NO: 637881 - DNA, 33 bp, Homo sapien
tgttgtctatgaccagaaatggcaaattgctga

SEQ ID NO: 637882 - DNA, 33 bp, Homo sapien
tgttgtctatgaccaggaatggcaaattgctga

SEQ ID NO: 637883 - DNA, 33 bp, Homo sapien
ccagttgagatgtactcagaagggcacactatc

SEQ ID NO: 637884 - DNA, 33 bp, Homo sapien
ccagttgagatgtactgagaagggcacactatc

SEQ ID NO: 637885 - DNA, 33 bp, Homo sapien
ccctttaagaggacaacgtagaaggatatgacc

SEQ ID NO: 637886 - DNA, 33 bp, Homo sapien
ccctttaagaggacaatgtagaaggatatgacc

SEQ ID NO: 637887 - DNA, 33 bp, Homo sapien
tgattattatctgtaacggtcaccttgctatgc

SEQ ID NO: 637888 - DNA, 33 bp, Homo sapien
tgattattatctgtaatggtcaccttgctatgc

SEQ ID NO: 637889 - DNA, 33 bp, Homo sapien
agaatattttgtactaaagaaggtgccacgagc

SEQ ID NO: 637890 - DNA, 33 bp, Homo sapien
agaatattttgtactagagaaggtgccacgagc

SEQ ID NO: 637891 - DNA, 33 bp, Homo sapien
gacaacatgcgtaaaaatgctttaaaagtgaca

SEQ ID NO: 637892 - DNA, 33 bp, Homo sapien
gacaacatgcgtaaaagtgctttaaaagtgaca

SEQ ID NO: 637893 - DNA, 33 bp, Homo sapien
cacttcctcaacggcacgtctcatacactagac

SEQ ID NO: 637894 - DNA, 33 bp, Homo sapien
cacttcctcaacggcatgtctcatacactagac

SEQ ID NO: 637895 - DNA, 33 bp, Homo sapien
tgtgtaaatttggccaagggtaagagcataggt

SEQ ID NO: 637896 - DNA, 33 bp, Homo sapien
tgtgtaaatttggccacgggtaagagcataggt

SEQ ID NO: 637897 - DNA, 33 bp, Homo sapien
acttacatttgcaccaatcgtacataagtgttc

SEQ ID NO: 637898 - DNA, 33 bp, Homo sapien
acttacatttgcaccagtcgtacataagtgttc

SEQ ID NO: 637899 - DNA, 33 bp, Homo sapien
gacagagattggagaccaagagcaggaaaagaa

SEQ ID NO: 637900 - DNA, 33 bp, Homo sapien
gacagagattggagacgaagagcaggaaaagaa

SEQ ID NO: 637901 - DNA, 33 bp, Homo sapien
ccctcttcctgtaggggaaaacgttcaagatag

SEQ ID NO: 637902 - DNA, 33 bp, Homo sapien
ccctcttcctgtagggtaaaacgttcaagatag

SEQ ID NO: 637903 - DNA, 33 bp, Homo sapien
tttagtttggtcttaacactatggttctcaata

SEQ ID NO: 637904 - DNA, 33 bp, Homo sapien
tttagtttggtcttaatactatggttctcaata

SEQ ID NO: 637905 - DNA, 33 bp, Homo sapien
ctcatccacagactcaaagaacaaattaactcc

SEQ ID NO: 637906 - DNA, 33 bp, Homo sapien
ctcatccacagactcagagaacaaattaactcc

SEQ ID NO: 637907 - DNA, 33 bp, Homo sapien
aagggccagatggtgcagagccatttagggcta

SEQ ID NO: 637908 - DNA, 33 bp, Homo sapien
aagggccagatggtgcggagccatttagggcta

SEQ ID NO: 637909 - DNA, 33 bp, Homo sapien
tctagtgaagttgatacacagtaaccatccaat

SEQ ID NO: 637910 - DNA, 33 bp, Homo sapien
tctagtgaagttgatagacagtaaccatccaat

SEQ ID NO: 637911 - DNA, 33 bp, Homo sapien
attctgctataactcacagggtaggcgctcatg

SEQ ID NO: 637912 - DNA, 33 bp, Homo sapien
attctgctataactcatagggtaggcgctcatg

SEQ ID NO: 637913 - DNA, 33 bp, Homo sapien
ttttctaagtactttccataaactaaactcact

SEQ ID NO: 637914 - DNA, 33 bp, Homo sapien
ttttctaagtactttctataaactaaactcact

SEQ ID NO: 637915 - DNA, 33 bp, Homo sapien
agacaagcctgctgaaaacgcacttggatggca

SEQ ID NO: 637916 - DNA, 33 bp, Homo sapien
agacaagcctgctgaagacgcacttggatggca

SEQ ID NO: 637917 - DNA, 33 bp, Homo sapien
aggtgttaagtactaaactcactgctgatgggt

SEQ ID NO: 637918 - DNA, 33 bp, Homo sapien
aggtgttaagtactaatctcactgctgatgggt

SEQ ID NO: 637919 - DNA, 33 bp, Homo sapien
aggctttcagacctaacgcaataaaagaagagt

SEQ ID NO: 637920 - DNA, 33 bp, Homo sapien
aggctttcagacctaatgcaataaaagaagagt

SEQ ID NO: 637921 - DNA, 33 bp, Homo sapien
tgtgctgattagagctcaccaaaggacccaggg

SEQ ID NO: 637922 - DNA, 33 bp, Homo sapien
tgtgctgattagagcttaccaaaggacccaggg

SEQ ID NO: 637923 - DNA, 33 bp, Homo sapien
tgagtcaagacattgcaccattttccctgacac

SEQ ID NO: 637924 - DNA, 33 bp, Homo sapien
tgagtcaagacattgcgccattttccctgacac

SEQ ID NO: 637925 - DNA, 33 bp, Homo sapien
cgcatagcatgggaaagatttggtggtagcttc

SEQ ID NO: 637926 - DNA, 33 bp, Homo sapien
cgcatagcatgggaaatatttggtggtagcttc

SEQ ID NO: 637927 - DNA, 33 bp, Homo sapien
ctcaccatgttaagataaaatcatctggggtgg

SEQ ID NO: 637928 - DNA, 33 bp, Homo sapien
ctcaccatgttaagatcaaatcatctggggtgg

SEQ ID NO: 637929 - DNA, 33 bp, Homo sapien
ggcatctcttatcctcaaaatctgattgctcat

SEQ ID NO: 637930 - DNA, 33 bp, Homo sapien
ggcatctcttatcctcgaaatctgattgctcat

SEQ ID NO: 637931 - DNA, 33 bp, Homo sapien
ggacagtctgctagtccacactttcaagagtac

SEQ ID NO: 637932 - DNA, 33 bp, Homo sapien
ggacagtctgctagtctacactttcaagagtac

SEQ ID NO: 637933 - DNA, 33 bp, Homo sapien
taatatgaaatgatgccgaaaattcaggagagt

SEQ ID NO: 637934 - DNA, 33 bp, Homo sapien
taatatgaaatgatgctgaaaattcaggagagt

SEQ ID NO: 637935 - DNA, 33 bp, Homo sapien
ttatttaacgacatgaccacctcttgcgaaaca

SEQ ID NO: 637936 - DNA, 33 bp, Homo sapien
ttatttaacgacatgagcacctcttgcgaaaca

SEQ ID NO: 637937 - DNA, 33 bp, Homo sapien
gggccagccttagacactatcagaaagggcttg

SEQ ID NO: 637938 - DNA, 33 bp, Homo sapien
gggccagccttagacagtatcagaaagggcttg

SEQ ID NO: 637939 - DNA, 33 bp, Homo sapien
taatcccctttgctcactgaaaaatttggaaag

SEQ ID NO: 637940 - DNA, 33 bp, Homo sapien
taatcccctttgctcagtgaaaaatttggaaag

SEQ ID NO: 637941 - DNA, 33 bp, Homo sapien
cataaaccttctgcacactctggaggtgggtat

SEQ ID NO: 637942 - DNA, 33 bp, Homo sapien
cataaaccttctgcacgctctggaggtgggtat

SEQ ID NO: 637943 - DNA, 33 bp, Homo sapien
aattttttgaagtccaggctcataactttccgt

SEQ ID NO: 637944 - DNA, 33 bp, Homo sapien
aattttttgaagtccatgctcataactttccgt

SEQ ID NO: 637945 - DNA, 33 bp, Homo sapien
aactttctacaagagaacaaataacttgcccaa

SEQ ID NO: 637946 - DNA, 33 bp, Homo sapien
aactttctacaagagatcaaataacttgcccaa

SEQ ID NO: 637947 - DNA, 33 bp, Homo sapien
gtttccactgaagacacgatctaagaagtaggt

SEQ ID NO: 637948 - DNA, 33 bp, Homo sapien
gtttccactgaagacatgatctaagaagtaggt

SEQ ID NO: 637949 - DNA, 33 bp, Homo sapien
gcaatacctggattcaataaatatcctgtataa

SEQ ID NO: 637950 - DNA, 33 bp, Homo sapien
gcaatacctggattcagtaaatatcctgtataa

SEQ ID NO: 637951 - DNA, 33 bp, Homo sapien
gctagtaatcatgacccgagaatagtggcctag

SEQ ID NO: 637952 - DNA, 33 bp, Homo sapien
gctagtaatcatgacctgagaatagtggcctag

SEQ ID NO: 637953 - DNA, 33 bp, Homo sapien
aatggatagagaatgaactttgaagtcagacct

SEQ ID NO: 637954 - DNA, 33 bp, Homo sapien
aatggatagagaatgagctttgaagtcagacct

SEQ ID NO: 637955 - DNA, 33 bp, Homo sapien
gcacattactcaataacgcagttgatttctacc

SEQ ID NO: 637956 - DNA, 33 bp, Homo sapien
gcacattactcaataatgcagttgatttctacc

SEQ ID NO: 637957 - DNA, 33 bp, Homo sapien
ttaatgctgctgaaaaatggtaaaaatgctaaa

SEQ ID NO: 637958 - DNA, 33 bp, Homo sapien
ttaatgctgctgaaaagtggtaaaaatgctaaa

SEQ ID NO: 637959 - DNA, 33 bp, Homo sapien
tgaaaatgctacacacaaatgagttgccagatc

SEQ ID NO: 637960 - DNA, 33 bp, Homo sapien
tgaaaatgctacacacgaatgagttgccagatc

SEQ ID NO: 637961 - DNA, 33 bp, Homo sapien
tgacagctcttccagaccctttcggaaactagg

SEQ ID NO: 637962 - DNA, 33 bp, Homo sapien
tgacagctcttccagatcctttcggaaactagg

SEQ ID NO: 637963 - DNA, 33 bp, Homo sapien
ccacttggcaattctacgtgtgttgagagagaa

SEQ ID NO: 637964 - DNA, 33 bp, Homo sapien
ccacttggcaattctatgtgtgttgagagagaa

SEQ ID NO: 637965 - DNA, 33 bp, Homo sapien
ttttgtaccactctaaaaattgccatagcaata

SEQ ID NO: 637966 - DNA, 33 bp, Homo sapien
ttttgtaccactctaataattgccatagcaata

SEQ ID NO: 637967 - DNA, 33 bp, Homo sapien
tgtcaactccttgctccagatcatatcaccctt

SEQ ID NO: 637968 - DNA, 33 bp, Homo sapien
tgtcaactccttgctctagatcatatcaccctt

SEQ ID NO: 637969 - DNA, 33 bp, Homo sapien
gtagaagttgctcaataagtcagttgtttcctt

SEQ ID NO: 637970 - DNA, 33 bp, Homo sapien
gtagaagttgctcaatgagtcagttgtttcctt

SEQ ID NO: 637971 - DNA, 33 bp, Homo sapien
cgcatcacactgaagacataaaagcctttggca

SEQ ID NO: 637972 - DNA, 33 bp, Homo sapien
cgcatcacactgaagagataaaagcctttggca

SEQ ID NO: 637973 - DNA, 33 bp, Homo sapien
agccaaaaactaggcaatcacacttggtatcta

SEQ ID NO: 637974 - DNA, 33 bp, Homo sapien
agccaaaaactaggcagtcacacttggtatcta

SEQ ID NO: 637975 - DNA, 33 bp, Homo sapien
gacataccagttatgaccttcctggagagtggt

SEQ ID NO: 637976 - DNA, 33 bp, Homo sapien
gacataccagttatgatcttcctggagagtggt

SEQ ID NO: 637977 - DNA, 33 bp, Homo sapien
cccatctcaaatgccaagataccatcattgagc

SEQ ID NO: 637978 - DNA, 33 bp, Homo sapien
cccatctcaaatgccacgataccatcattgagc

SEQ ID NO: 637979 - DNA, 33 bp, Homo sapien
ctggggaagtctcacaatgatggcagaaagcaa

SEQ ID NO: 637980 - DNA, 33 bp, Homo sapien
ctggggaagtctcacagtgatggcagaaagcaa

SEQ ID NO: 637981 - DNA, 33 bp, Homo sapien
cactgtttgagtttgaaatgaaattgaagcctt

SEQ ID NO: 637982 - DNA, 33 bp, Homo sapien
cactgtttgagtttgagatgaaattgaagcctt

SEQ ID NO: 637983 - DNA, 33 bp, Homo sapien
cttcaacatatttagccctaccacttctctgaa

SEQ ID NO: 637984 - DNA, 33 bp, Homo sapien
cttcaacatatttagctctaccacttctctgaa

SEQ ID NO: 637985 - DNA, 33 bp, Homo sapien
acagaactggaatgaggaaggaccagtaaggca

SEQ ID NO: 637986 - DNA, 33 bp, Homo sapien
acagaactggaatgagtaaggaccagtaaggca

SEQ ID NO: 637987 - DNA, 33 bp, Homo sapien
agtttttattttactaagtagaccactggatat

SEQ ID NO: 637988 - DNA, 33 bp, Homo sapien
agtttttattttactaggtagaccactggatat

SEQ ID NO: 637989 - DNA, 33 bp, Homo sapien
atggagaaaatggtttaaaaaatgcaggtaaaa

SEQ ID NO: 637990 - DNA, 33 bp, Homo sapien
atggagaaaatggttttaaaaatgcaggtaaaa

SEQ ID NO: 637991 - DNA, 33 bp, Homo sapien
ttgctgagaccatcgagtatattggtaaaaccc

SEQ ID NO: 637992 - DNA, 33 bp, Homo sapien
ttgctgagaccatcgattatattggtaaaaccc

SEQ ID NO: 637993 - DNA, 33 bp, Homo sapien
ggtttgaagtgatgtaagttatcgcagcattgg

SEQ ID NO: 637994 - DNA, 33 bp, Homo sapien
ggtttgaagtgatgtacgttatcgcagcattgg

SEQ ID NO: 637995 - DNA, 33 bp, Homo sapien
ctgacaatgtaccataactatagtgtagtaatt

SEQ ID NO: 637996 - DNA, 33 bp, Homo sapien
ctgacaatgtaccatatctatagtgtagtaatt

SEQ ID NO: 637997 - DNA, 33 bp, Homo sapien
taaacacaccatttcaaacaatgctattttact

SEQ ID NO: 637998 - DNA, 33 bp, Homo sapien
taaacacaccatttcagacaatgctattttact

SEQ ID NO: 637999 - DNA, 33 bp, Homo sapien
tacatattcatggcacactggagccctcccctg

SEQ ID NO: 638000 - DNA, 33 bp, Homo sapien
tacatattcatggcacgctggagccctcccctg

SEQ ID NO: 638001 - DNA, 33 bp, Homo sapien
gacatcatgtgttgaaatgactactgtacatga

SEQ ID NO: 638002 - DNA, 33 bp, Homo sapien
gacatcatgtgttgaagtgactactgtacatga

SEQ ID NO: 638003 - DNA, 33 bp, Homo sapien
caaaaaacaagcaacacccgaaaatgaaagttg

SEQ ID NO: 638004 - DNA, 33 bp, Homo sapien
caaaaaacaagcaacatccgaaaatgaaagttg

SEQ ID NO: 638005 - DNA, 33 bp, Homo sapien
atgcacagctctaaagactaggtataaacacag

SEQ ID NO: 638006 - DNA, 33 bp, Homo sapien
atgcacagctctaaaggctaggtataaacacag

SEQ ID NO: 638007 - DNA, 33 bp, Homo sapien
ctcaccctttactttcactcacagtgcttcctt

SEQ ID NO: 638008 - DNA, 33 bp, Homo sapien
ctcaccctttactttcgctcacagtgcttcctt

SEQ ID NO: 638009 - DNA, 33 bp, Homo sapien
agttcctgaagcttcaaatgaatttctttgttg

SEQ ID NO: 638010 - DNA, 33 bp, Homo sapien
agttcctgaagcttcagatgaatttctttgttg

SEQ ID NO: 638011 - DNA, 33 bp, Homo sapien
tcaatggtttgagggagatgtaagctgtagtta

SEQ ID NO: 638012 - DNA, 33 bp, Homo sapien
tcaatggtttgagggatatgtaagctgtagtta

SEQ ID NO: 638013 - DNA, 33 bp, Homo sapien
gtctacaccagaggtcaagaaactttgtaaagg

SEQ ID NO: 638014 - DNA, 33 bp, Homo sapien
gtctacaccagaggtcgagaaactttgtaaagg

SEQ ID NO: 638015 - DNA, 33 bp, Homo sapien
atcaaggccaaaatacggtaacttcccaaatgc

SEQ ID NO: 638016 - DNA, 33 bp, Homo sapien
atcaaggccaaaatactgtaacttcccaaatgc

SEQ ID NO: 638017 - DNA, 33 bp, Homo sapien
ttcatctggtcaccaaaatatagcagaaatata

SEQ ID NO: 638018 - DNA, 33 bp, Homo sapien
ttcatctggtcaccaacatatagcagaaatata

SEQ ID NO: 638019 - DNA, 33 bp, Homo sapien
aggcagacatgtagcaaaggaaagtaaaacctt

SEQ ID NO: 638020 - DNA, 33 bp, Homo sapien
aggcagacatgtagcataggaaagtaaaacctt

SEQ ID NO: 638021 - DNA, 33 bp, Homo sapien
attaggagttatagcacggaatttcattttcta

SEQ ID NO: 638022 - DNA, 33 bp, Homo sapien
attaggagttatagcatggaatttcattttcta

SEQ ID NO: 638023 - DNA, 33 bp, Homo sapien
gaacatacttgaactacaagacagcaagtagta

SEQ ID NO: 638024 - DNA, 33 bp, Homo sapien
gaacatacttgaactataagacagcaagtagta

SEQ ID NO: 638025 - DNA, 33 bp, Homo sapien
cctcttcccaccgtcacgcgtcctgggtcctgg

SEQ ID NO: 638026 - DNA, 33 bp, Homo sapien
cctcttcccaccgtcatgcgtcctgggtcctgg

SEQ ID NO: 638027 - DNA, 33 bp, Homo sapien
taaccttgtcaacaaaacatgtgggtttacaac

SEQ ID NO: 638028 - DNA, 33 bp, Homo sapien
taaccttgtcaacaaatcatgtgggtttacaac

SEQ ID NO: 638029 - DNA, 33 bp, Homo sapien
tcactcctaaacataaatgcaaatcttgagatt

SEQ ID NO: 638030 - DNA, 33 bp, Homo sapien
tcactcctaaacataagtgcaaatcttgagatt

SEQ ID NO: 638031 - DNA, 33 bp, Homo sapien
ctgcaagggcttcttcctcaaatatgttatgat

SEQ ID NO: 638032 - DNA, 33 bp, Homo sapien
ctgcaagggcttcttcttcaaatatgttatgat

SEQ ID NO: 638033 - DNA, 33 bp, Homo sapien
ccatgtgccccaaagactaggagaaatcaggtc

SEQ ID NO: 638034 - DNA, 33 bp, Homo sapien
ccatgtgccccaaagagtaggagaaatcaggtc

SEQ ID NO: 638035 - DNA, 33 bp, Homo sapien
aaaatcaggaagctctaactaaaaaaattaata

SEQ ID NO: 638036 - DNA, 33 bp, Homo sapien
aaaatcaggaagctctgactaaaaaaattaata

SEQ ID NO: 638037 - DNA, 33 bp, Homo sapien
atgagatcccaacggtaaattatacaacatcca

SEQ ID NO: 638038 - DNA, 33 bp, Homo sapien
atgagatcccaacggtgaattatacaacatcca

SEQ ID NO: 638039 - DNA, 33 bp, Homo sapien
attgttaaatctgttacgtggagatacattgta

SEQ ID NO: 638040 - DNA, 33 bp, Homo sapien
attgttaaatctgttatgtggagatacattgta

SEQ ID NO: 638041 - DNA, 33 bp, Homo sapien
gaagagacatcattcaaatacaaaaatagccaa

SEQ ID NO: 638042 - DNA, 33 bp, Homo sapien
gaagagacatcattcatatacaaaaatagccaa

SEQ ID NO: 638043 - DNA, 33 bp, Homo sapien
tcatatcactgactctaagaaaatgctgttttg

SEQ ID NO: 638044 - DNA, 33 bp, Homo sapien
tcatatcactgactcttagaaaatgctgttttg

SEQ ID NO: 638045 - DNA, 33 bp, Homo sapien
ttgcactcagaatgggaacttactcagagaaat

SEQ ID NO: 638046 - DNA, 33 bp, Homo sapien
ttgcactcagaatgggtacttactcagagaaat

SEQ ID NO: 638047 - DNA, 33 bp, Homo sapien
ttgaagtgcagttgaaaaaaaataaagagagat

SEQ ID NO: 638048 - DNA, 33 bp, Homo sapien
ttgaagtgcagttgaacaaaaataaagagagat

SEQ ID NO: 638049 - DNA, 33 bp, Homo sapien
cttctgttcatggttacgattaaaactgctgtg

SEQ ID NO: 638050 - DNA, 33 bp, Homo sapien
cttctgttcatggttatgattaaaactgctgtg

SEQ ID NO: 638051 - DNA, 33 bp, Homo sapien
aaacttcaggtgcaacacaaactggattcttgt

SEQ ID NO: 638052 - DNA, 33 bp, Homo sapien
aaacttcaggtgcaacgcaaactggattcttgt

SEQ ID NO: 638053 - DNA, 33 bp, Homo sapien
gttaggtaacctgccacgatgacaggaatggga

SEQ ID NO: 638054 - DNA, 33 bp, Homo sapien
gttaggtaacctgccatgatgacaggaatggga

SEQ ID NO: 638055 - DNA, 33 bp, Homo sapien
acaaacccttgggtgcagagtagatatggtttc

SEQ ID NO: 638056 - DNA, 33 bp, Homo sapien
acaaacccttgggtgcggagtagatatggtttc

SEQ ID NO: 638057 - DNA, 33 bp, Homo sapien
tctacttctaggcacaacataaactgtcaaaag

SEQ ID NO: 638058 - DNA, 33 bp, Homo sapien
tctacttctaggcacaccataaactgtcaaaag

SEQ ID NO: 638059 - DNA, 33 bp, Homo sapien
tcttcaaggaataccaaatctgcaaatgatgat

SEQ ID NO: 638060 - DNA, 33 bp, Homo sapien
tcttcaaggaataccagatctgcaaatgatgat

SEQ ID NO: 638061 - DNA, 33 bp, Homo sapien
aggggtcttgggtacacggaggtataaatatgg

SEQ ID NO: 638062 - DNA, 33 bp, Homo sapien
aggggtcttgggtacatggaggtataaatatgg

SEQ ID NO: 638063 - DNA, 33 bp, Homo sapien
cctgacgtgaggaaaaatttccccaggtagttg

SEQ ID NO: 638064 - DNA, 33 bp, Homo sapien
cctgacgtgaggaaaactttccccaggtagttg

SEQ ID NO: 638065 - DNA, 33 bp, Homo sapien
agctaacccacattcgaattacacttaaaacag

SEQ ID NO: 638066 - DNA, 33 bp, Homo sapien
agctaacccacattcggattacacttaaaacag

SEQ ID NO: 638067 - DNA, 33 bp, Homo sapien
gcccagctggtggtcacgggccgttcctctaat

SEQ ID NO: 638068 - DNA, 33 bp, Homo sapien
gcccagctggtggtcatgggccgttcctctaat

SEQ ID NO: 638069 - DNA, 33 bp, Homo sapien
cagttgggacatgtgcagactttaccaagaacc

SEQ ID NO: 638070 - DNA, 33 bp, Homo sapien
cagttgggacatgtgcggactttaccaagaacc

SEQ ID NO: 638071 - DNA, 33 bp, Homo sapien
agtttcaccaataagaacctgttttagcttccc

SEQ ID NO: 638072 - DNA, 33 bp, Homo sapien
agtttcaccaataagagcctgttttagcttccc

SEQ ID NO: 638073 - DNA, 33 bp, Homo sapien
actcttcagtcggagaacctcctgaaccaactg

SEQ ID NO: 638074 - DNA, 33 bp, Homo sapien
actcttcagtcggagagcctcctgaaccaactg

SEQ ID NO: 638075 - DNA, 33 bp, Homo sapien
gcccaaattctagaacaacaggagataacttcc

SEQ ID NO: 638076 - DNA, 33 bp, Homo sapien
gcccaaattctagaactacaggagataacttcc

SEQ ID NO: 638077 - DNA, 33 bp, Homo sapien
aagttgtgaatgaaaaatctaactcagttattt

SEQ ID NO: 638078 - DNA, 33 bp, Homo sapien
aagttgtgaatgaaaagtctaactcagttattt

SEQ ID NO: 638079 - DNA, 33 bp, Homo sapien
tatctgaattcctgaaactcagttaacagctga

SEQ ID NO: 638080 - DNA, 33 bp, Homo sapien
tatctgaattcctgaagctcagttaacagctga

SEQ ID NO: 638081 - DNA, 33 bp, Homo sapien
tgatgccaatccttaacattttgttctactgtt

SEQ ID NO: 638082 - DNA, 33 bp, Homo sapien
tgatgccaatccttaatattttgttctactgtt

SEQ ID NO: 638083 - DNA, 33 bp, Homo sapien
cagcctaacaacttaacctaactccacctaacc

SEQ ID NO: 638084 - DNA, 33 bp, Homo sapien
cagcctaacaacttaatctaactccacctaacc

SEQ ID NO: 638085 - DNA, 33 bp, Homo sapien
tggatggtgtcctaataaagtagcaatccagca

SEQ ID NO: 638086 - DNA, 33 bp, Homo sapien
tggatggtgtcctaatgaagtagcaatccagca

SEQ ID NO: 638087 - DNA, 33 bp, Homo sapien
gtgcggaaggtcaaaccgctggtattttgcagt

SEQ ID NO: 638088 - DNA, 33 bp, Homo sapien
gtgcggaaggtcaaactgctggtattttgcagt

SEQ ID NO: 638089 - DNA, 33 bp, Homo sapien
ctatctcagtcacaacaaactggataatccaag

SEQ ID NO: 638090 - DNA, 33 bp, Homo sapien
ctatctcagtcacaacgaactggataatccaag

SEQ ID NO: 638091 - DNA, 33 bp, Homo sapien
cttcactgtcacctgaatgagactatgagcaca

SEQ ID NO: 638092 - DNA, 33 bp, Homo sapien
cttcactgtcacctgagtgagactatgagcaca

SEQ ID NO: 638093 - DNA, 33 bp, Homo sapien
gagagcctaaagaaaacgggacatgaaagatga

SEQ ID NO: 638094 - DNA, 33 bp, Homo sapien
gagagcctaaagaaaatgggacatgaaagatga

SEQ ID NO: 638095 - DNA, 33 bp, Homo sapien
gatttgtattttcacccatgctccaaatttaag

SEQ ID NO: 638096 - DNA, 33 bp, Homo sapien
gatttgtattttcacctatgctccaaatttaag

SEQ ID NO: 638097 - DNA, 33 bp, Homo sapien
atgggtttgagcagcaaataatttagagaagtt

SEQ ID NO: 638098 - DNA, 33 bp, Homo sapien
atgggtttgagcagcagataatttagagaagtt

SEQ ID NO: 638099 - DNA, 33 bp, Homo sapien
taactaccagtgggaactgactactttgagtca

SEQ ID NO: 638100 - DNA, 33 bp, Homo sapien
taactaccagtgggaattgactactttgagtca

SEQ ID NO: 638101 - DNA, 33 bp, Homo sapien
gaaaagattcctgggaaatgaagaaagagagct

SEQ ID NO: 638102 - DNA, 33 bp, Homo sapien
gaaaagattcctgggagatgaagaaagagagct

SEQ ID NO: 638103 - DNA, 33 bp, Homo sapien
atccattcatttatccacagacatttgttgaat

SEQ ID NO: 638104 - DNA, 33 bp, Homo sapien
atccattcatttatccgcagacatttgttgaat

SEQ ID NO: 638105 - DNA, 33 bp, Homo sapien
aaggaattctccagtcaaaaaggtcaaaagtgc

SEQ ID NO: 638106 - DNA, 33 bp, Homo sapien
aaggaattctccagtccaaaaggtcaaaagtgc

SEQ ID NO: 638107 - DNA, 33 bp, Homo sapien
aactgaggatacatgacggcgaatgagtttccc

SEQ ID NO: 638108 - DNA, 33 bp, Homo sapien
aactgaggatacatgatggcgaatgagtttccc

SEQ ID NO: 638109 - DNA, 33 bp, Homo sapien
agtgtgtacctgataaagttttgcacatttttt

SEQ ID NO: 638110 - DNA, 33 bp, Homo sapien
agtgtgtacctgataatgttttgcacatttttt

SEQ ID NO: 638111 - DNA, 33 bp, Homo sapien
tgaaactgccaatttccaaacattagcaactga

SEQ ID NO: 638112 - DNA, 33 bp, Homo sapien
tgaaactgccaatttctaaacattagcaactga

SEQ ID NO: 638113 - DNA, 33 bp, Homo sapien
ggaagtcttacttataccagaagaaacatgtta

SEQ ID NO: 638114 - DNA, 33 bp, Homo sapien
ggaagtcttacttatagcagaagaaacatgtta

SEQ ID NO: 638115 - DNA, 33 bp, Homo sapien
ttcagtttccaaaccacacttgtccagcagatc

SEQ ID NO: 638116 - DNA, 33 bp, Homo sapien
ttcagtttccaaaccatacttgtccagcagatc

SEQ ID NO: 638117 - DNA, 33 bp, Homo sapien
ataaaactcatgtgcacagccagttttagcaaa

SEQ ID NO: 638118 - DNA, 33 bp, Homo sapien
ataaaactcatgtgcatagccagttttagcaaa

SEQ ID NO: 638119 - DNA, 33 bp, Homo sapien
atctccaatgcacatacacccaatgattcaatg

SEQ ID NO: 638120 - DNA, 33 bp, Homo sapien
atctccaatgcacatatacccaatgattcaatg

SEQ ID NO: 638121 - DNA, 33 bp, Homo sapien
tgtttacccatctaaactgtgtgatgaaatgtc

SEQ ID NO: 638122 - DNA, 33 bp, Homo sapien
tgtttacccatctaaattgtgtgatgaaatgtc

SEQ ID NO: 638123 - DNA, 33 bp, Homo sapien
ccatatctaggttgaaactccaaatttaaacat

SEQ ID NO: 638124 - DNA, 33 bp, Homo sapien
ccatatctaggttgaagctccaaatttaaacat

SEQ ID NO: 638125 - DNA, 33 bp, Homo sapien
ggtgtcctaagcacaaagtggccaaagatgggg

SEQ ID NO: 638126 - DNA, 33 bp, Homo sapien
ggtgtcctaagcacaaggtggccaaagatgggg

SEQ ID NO: 638127 - DNA, 33 bp, Homo sapien
ggccacgtaattattccgaaatcttttttgtgg

SEQ ID NO: 638128 - DNA, 33 bp, Homo sapien
ggccacgtaattattctgaaatcttttttgtgg

SEQ ID NO: 638129 - DNA, 33 bp, Homo sapien
ttcctatcgatgtgacactgggtaaaataatcc

SEQ ID NO: 638130 - DNA, 33 bp, Homo sapien
ttcctatcgatgtgaccctgggtaaaataatcc

SEQ ID NO: 638131 - DNA, 33 bp, Homo sapien
ttgcatgtaattgctacattggcctcttctctg

SEQ ID NO: 638132 - DNA, 33 bp, Homo sapien
ttgcatgtaattgctatattggcctcttctctg

SEQ ID NO: 638133 - DNA, 33 bp, Homo sapien
caagcaagtcgggattaaaaaaatgcatttgta

SEQ ID NO: 638134 - DNA, 33 bp, Homo sapien
caagcaagtcgggatttaaaaaatgcatttgta

SEQ ID NO: 638135 - DNA, 33 bp, Homo sapien
ctgctagccaatttcaatcacagccaaggggaa

SEQ ID NO: 638136 - DNA, 33 bp, Homo sapien
ctgctagccaatttcagtcacagccaaggggaa

SEQ ID NO: 638137 - DNA, 33 bp, Homo sapien
acacattagaaatgccccacagatgactgccaa

SEQ ID NO: 638138 - DNA, 33 bp, Homo sapien
acacattagaaatgccgcacagatgactgccaa

SEQ ID NO: 638139 - DNA, 33 bp, Homo sapien
ctctttcccgaaagcactcctcagtaatccaat

SEQ ID NO: 638140 - DNA, 33 bp, Homo sapien
ctctttcccgaaagcattcctcagtaatccaat

SEQ ID NO: 638141 - DNA, 33 bp, Homo sapien
ttttgagaagcatggacgaaagcgtagaatgtg

SEQ ID NO: 638142 - DNA, 33 bp, Homo sapien
ttttgagaagcatggatgaaagcgtagaatgtg

SEQ ID NO: 638143 - DNA, 33 bp, Homo sapien
ttgagaagtcgatagacagtccctaaaagaaag

SEQ ID NO: 638144 - DNA, 33 bp, Homo sapien
ttgagaagtcgatagatagtccctaaaagaaag

SEQ ID NO: 638145 - DNA, 33 bp, Homo sapien
atagggactttgagaacagaaatcgagaaacgg

SEQ ID NO: 638146 - DNA, 33 bp, Homo sapien
atagggactttgagaatagaaatcgagaaacgg

SEQ ID NO: 638147 - DNA, 33 bp, Homo sapien
gtggcataaccatgccagatgcaagacctttgc

SEQ ID NO: 638148 - DNA, 33 bp, Homo sapien
gtggcataaccatgccggatgcaagacctttgc

SEQ ID NO: 638149 - DNA, 33 bp, Homo sapien
caagagccaatattgcaactgaactccaaaggc

SEQ ID NO: 638150 - DNA, 33 bp, Homo sapien
caagagccaatattgccactgaactccaaaggc

SEQ ID NO: 638151 - DNA, 33 bp, Homo sapien
attcaaaagatttatcaaaggtccagtaaggtt

SEQ ID NO: 638152 - DNA, 33 bp, Homo sapien
attcaaaagatttatcgaaggtccagtaaggtt

SEQ ID NO: 638153 - DNA, 33 bp, Homo sapien
caagagaaccagtaacagcacagtttatcaggc

SEQ ID NO: 638154 - DNA, 33 bp, Homo sapien
caagagaaccagtaacggcacagtttatcaggc

SEQ ID NO: 638155 - DNA, 33 bp, Homo sapien
acatcagagagaccaaataaacagataaacata

SEQ ID NO: 638156 - DNA, 33 bp, Homo sapien
acatcagagagaccaactaaacagataaacata

SEQ ID NO: 638157 - DNA, 33 bp, Homo sapien
ctgaggtatgcctgtcacttaaacttgtagcat

SEQ ID NO: 638158 - DNA, 33 bp, Homo sapien
ctgaggtatgcctgtcgcttaaacttgtagcat

SEQ ID NO: 638159 - DNA, 33 bp, Homo sapien
cccaaaaatgaacaacactttcctcaattatct

SEQ ID NO: 638160 - DNA, 33 bp, Homo sapien
cccaaaaatgaacaacgctttcctcaattatct

SEQ ID NO: 638161 - DNA, 33 bp, Homo sapien
atgaaaggattatagccgagtggttaaagggac

SEQ ID NO: 638162 - DNA, 33 bp, Homo sapien
atgaaaggattatagctgagtggttaaagggac

SEQ ID NO: 638163 - DNA, 33 bp, Homo sapien
agacaagatcaatgaaactccagtggattctaa

SEQ ID NO: 638164 - DNA, 33 bp, Homo sapien
agacaagatcaatgaacctccagtggattctaa

SEQ ID NO: 638165 - DNA, 33 bp, Homo sapien
ttttgttgtcacccacacttttaggtagcaaat

SEQ ID NO: 638166 - DNA, 33 bp, Homo sapien
ttttgttgtcacccacgcttttaggtagcaaat

SEQ ID NO: 638167 - DNA, 33 bp, Homo sapien
agggcaattgcttcagcatgaaaatctgtaaag

SEQ ID NO: 638168 - DNA, 33 bp, Homo sapien
agggcaattgcttcagtatgaaaatctgtaaag

SEQ ID NO: 638169 - DNA, 33 bp, Homo sapien
tctaaagaggcttagcaataaaggccaagtgaa

SEQ ID NO: 638170 - DNA, 33 bp, Homo sapien
tctaaagaggcttagcgataaaggccaagtgaa

SEQ ID NO: 638171 - DNA, 33 bp, Homo sapien
tgcaatacccagagaacgttataaggggcccaa

SEQ ID NO: 638172 - DNA, 33 bp, Homo sapien
tgcaatacccagagaatgttataaggggcccaa

SEQ ID NO: 638173 - DNA, 33 bp, Homo sapien
gcattatcctccacgaacctctcctttgtaaaa

SEQ ID NO: 638174 - DNA, 33 bp, Homo sapien
gcattatcctccacgagcctctcctttgtaaaa

SEQ ID NO: 638175 - DNA, 33 bp, Homo sapien
gcataaaattctatcccattaaaccccattgtt

SEQ ID NO: 638176 - DNA, 33 bp, Homo sapien
gcataaaattctatcctattaaaccccattgtt

SEQ ID NO: 638177 - DNA, 33 bp, Homo sapien
atctcatcagtgcatccatggaattactttata

SEQ ID NO: 638178 - DNA, 33 bp, Homo sapien
atctcatcagtgcatctatggaattactttata

SEQ ID NO: 638179 - DNA, 33 bp, Homo sapien
cacacagaacaataagactgcaaatgtgataca

SEQ ID NO: 638180 - DNA, 33 bp, Homo sapien
cacacagaacaataagtctgcaaatgtgataca

SEQ ID NO: 638181 - DNA, 33 bp, Homo sapien
tgacaactcaaaggtcaaactctacaggcttct

SEQ ID NO: 638182 - DNA, 33 bp, Homo sapien
tgacaactcaaaggtcgaactctacaggcttct

SEQ ID NO: 638183 - DNA, 33 bp, Homo sapien
taggaaacacggccaacgtctctaagcaggaag

SEQ ID NO: 638184 - DNA, 33 bp, Homo sapien
taggaaacacggccaatgtctctaagcaggaag

SEQ ID NO: 638185 - DNA, 33 bp, Homo sapien
aaaagctgactgctaacgttcactgttcttatt

SEQ ID NO: 638186 - DNA, 33 bp, Homo sapien
aaaagctgactgctaatgttcactgttcttatt

SEQ ID NO: 638187 - DNA, 33 bp, Homo sapien
taacctttggtctcaaatacttcctctataatc

SEQ ID NO: 638188 - DNA, 33 bp, Homo sapien
taacctttggtctcaactacttcctctataatc

SEQ ID NO: 638189 - DNA, 33 bp, Homo sapien
acccagatagagtacaagtcttcagaatggtga

SEQ ID NO: 638190 - DNA, 33 bp, Homo sapien
acccagatagagtacacgtcttcagaatggtga

SEQ ID NO: 638191 - DNA, 33 bp, Homo sapien
ctctcccatttctgacaaactcaaatttactgg

SEQ ID NO: 638192 - DNA, 33 bp, Homo sapien
ctctcccatttctgactaactcaaatttactgg

SEQ ID NO: 638193 - DNA, 33 bp, Homo sapien
ctcagccaagtgtcccggcctttctaggtctcc

SEQ ID NO: 638194 - DNA, 33 bp, Homo sapien
ctcagccaagtgtccctgcctttctaggtctcc

SEQ ID NO: 638195 - DNA, 33 bp, Homo sapien
caacaagaactcagaacagggtcagctggtgtg

SEQ ID NO: 638196 - DNA, 33 bp, Homo sapien
caacaagaactcagaagagggtcagctggtgtg

SEQ ID NO: 638197 - DNA, 33 bp, Homo sapien
ttcataaaatccacaaagttgaactgggcatgt

SEQ ID NO: 638198 - DNA, 33 bp, Homo sapien
ttcataaaatccacaaggttgaactgggcatgt

SEQ ID NO: 638199 - DNA, 33 bp, Homo sapien
tgtggattttatgaatcaggacaaaggggagaa

SEQ ID NO: 638200 - DNA, 33 bp, Homo sapien
tgtggattttatgaatgaggacaaaggggagaa

SEQ ID NO: 638201 - DNA, 33 bp, Homo sapien
taaggagctatggaagcactacgtggcagagat

SEQ ID NO: 638202 - DNA, 33 bp, Homo sapien
taaggagctatggaaggactacgtggcagagat

SEQ ID NO: 638203 - DNA, 33 bp, Homo sapien
tccagcccaggcaatacggtgagtctccatctc

SEQ ID NO: 638204 - DNA, 33 bp, Homo sapien
tccagcccaggcaatatggtgagtctccatctc

SEQ ID NO: 638205 - DNA, 33 bp, Homo sapien
gagcagatggaaattcgatctagagctcagggt

SEQ ID NO: 638206 - DNA, 33 bp, Homo sapien
gagcagatggaaattctatctagagctcagggt

SEQ ID NO: 638207 - DNA, 33 bp, Homo sapien
gcagatcattgccccccacaccatggtcctggg

SEQ ID NO: 638208 - DNA, 33 bp, Homo sapien
gcagatcattgccccctacaccatggtcctggg

SEQ ID NO: 638209 - DNA, 33 bp, Homo sapien
gtaataagcacataaactgtaatgatctagcaa

SEQ ID NO: 638210 - DNA, 33 bp, Homo sapien
gtaataagcacataaattgtaatgatctagcaa

SEQ ID NO: 638211 - DNA, 33 bp, Homo sapien
attgctatctccttaactgggattccattattt

SEQ ID NO: 638212 - DNA, 33 bp, Homo sapien
attgctatctccttaagtgggattccattattt

SEQ ID NO: 638213 - DNA, 33 bp, Homo sapien
tcataagctgacagcaagttcggaggcagccca

SEQ ID NO: 638214 - DNA, 33 bp, Homo sapien
tcataagctgacagcacgttcggaggcagccca

SEQ ID NO: 638215 - DNA, 33 bp, Homo sapien
cactccgctgactgtacaatattcattttattt

SEQ ID NO: 638216 - DNA, 33 bp, Homo sapien
cactccgctgactgtataatattcattttattt

SEQ ID NO: 638217 - DNA, 33 bp, Homo sapien
taaggccattcctgaaagacgaggcagaaagat

SEQ ID NO: 638218 - DNA, 33 bp, Homo sapien
taaggccattcctgaatgacgaggcagaaagat

SEQ ID NO: 638219 - DNA, 33 bp, Homo sapien
cccatgttctaagcacaaagccactttggtaaa

SEQ ID NO: 638220 - DNA, 33 bp, Homo sapien
cccatgttctaagcacgaagccactttggtaaa

SEQ ID NO: 638221 - DNA, 33 bp, Homo sapien
gttgcatgcattgacaacagtccatactaactt

SEQ ID NO: 638222 - DNA, 33 bp, Homo sapien
gttgcatgcattgacatcagtccatactaactt

SEQ ID NO: 638223 - DNA, 33 bp, Homo sapien
tacctaacaattttcaatacctttactgtgagt

SEQ ID NO: 638224 - DNA, 33 bp, Homo sapien
tacctaacaattttcagtacctttactgtgagt

SEQ ID NO: 638225 - DNA, 33 bp, Homo sapien
tatcttcctgtgcacaatgcttatctagaccct

SEQ ID NO: 638226 - DNA, 33 bp, Homo sapien
tatcttcctgtgcacagtgcttatctagaccct

SEQ ID NO: 638227 - DNA, 33 bp, Homo sapien
aataccctgttggcaacgggcttatctaacaac

SEQ ID NO: 638228 - DNA, 33 bp, Homo sapien
aataccctgttggcaatgggcttatctaacaac

SEQ ID NO: 638229 - DNA, 33 bp, Homo sapien
ttcttactcaattacacgctctgttacaaacac

SEQ ID NO: 638230 - DNA, 33 bp, Homo sapien
ttcttactcaattacatgctctgttacaaacac

SEQ ID NO: 638231 - DNA, 33 bp, Homo sapien
gaagcccggaagcttgaacgctggcacctacac

SEQ ID NO: 638232 - DNA, 33 bp, Homo sapien
gaagcccggaagcttgcacgctggcacctacac

SEQ ID NO: 638233 - DNA, 33 bp, Homo sapien
gctatttaaacagatacagaatgaccaaatctg

SEQ ID NO: 638234 - DNA, 33 bp, Homo sapien
gctatttaaacagatagagaatgaccaaatctg

SEQ ID NO: 638235 - DNA, 33 bp, Homo sapien
aatgaccaaatctggacacacgtatttaaaata

SEQ ID NO: 638236 - DNA, 33 bp, Homo sapien
aatgaccaaatctggagacacgtatttaaaata

SEQ ID NO: 638237 - DNA, 33 bp, Homo sapien
gacttctctggctttacagggaacagatgtgag

SEQ ID NO: 638238 - DNA, 33 bp, Homo sapien
gacttctctggctttatagggaacagatgtgag

SEQ ID NO: 638239 - DNA, 33 bp, Homo sapien
cagcacaccaaacccaaattcgtctgcaccata

SEQ ID NO: 638240 - DNA, 33 bp, Homo sapien
cagcacaccaaacccatattcgtctgcaccata

SEQ ID NO: 638241 - DNA, 33 bp, Homo sapien
gctcaggagctattagaattttttttgtatcga

SEQ ID NO: 638242 - DNA, 33 bp, Homo sapien
gctcaggagctattaggattttttttgtatcga

SEQ ID NO: 638243 - DNA, 33 bp, Homo sapien
aatatttccactcttgcagaacaaaaagagccc

SEQ ID NO: 638244 - DNA, 33 bp, Homo sapien
aatatttccactcttggagaacaaaaagagccc

SEQ ID NO: 638245 - DNA, 33 bp, Homo sapien
gaaattagggagaaagaaaatttgtcattggcc

SEQ ID NO: 638246 - DNA, 33 bp, Homo sapien
gaaattagggagaaaggaaatttgtcattggcc

SEQ ID NO: 638247 - DNA, 33 bp, Homo sapien
aatgaagccagattgaataggtgttataattcc

SEQ ID NO: 638248 - DNA, 33 bp, Homo sapien
aatgaagccagattgagtaggtgttataattcc

SEQ ID NO: 638249 - DNA, 33 bp, Homo sapien
gatattttttcccctaagttaagtgaggctgaa

SEQ ID NO: 638250 - DNA, 33 bp, Homo sapien
gatattttttcccctacgttaagtgaggctgaa

SEQ ID NO: 638251 - DNA, 33 bp, Homo sapien
actacagtgatcaaaacagtctactggcataag

SEQ ID NO: 638252 - DNA, 33 bp, Homo sapien
actacagtgatcaaaatagtctactggcataag

SEQ ID NO: 638253 - DNA, 33 bp, Homo sapien
atgaatctagaaaacactgcggtatgtgaaaga

SEQ ID NO: 638254 - DNA, 33 bp, Homo sapien
atgaatctagaaaacattgcggtatgtgaaaga

SEQ ID NO: 638255 - DNA, 33 bp, Homo sapien
gtgaatttgttcaaacactcgtctgctcaagct

SEQ ID NO: 638256 - DNA, 33 bp, Homo sapien
gtgaatttgttcaaacgctcgtctgctcaagct

SEQ ID NO: 638257 - DNA, 33 bp, Homo sapien
aaaatgtggcccaattcaacagaagcatctgga

SEQ ID NO: 638258 - DNA, 33 bp, Homo sapien
aaaatgtggcccaatttaacagaagcatctgga

SEQ ID NO: 638259 - DNA, 33 bp, Homo sapien
tgaaagactgaagagaagattgttactgattgg

SEQ ID NO: 638260 - DNA, 33 bp, Homo sapien
tgaaagactgaagagaggattgttactgattgg

SEQ ID NO: 638261 - DNA, 33 bp, Homo sapien
cggaaatctaaatctgcacctagatcctgtgct

SEQ ID NO: 638262 - DNA, 33 bp, Homo sapien
cggaaatctaaatctgtacctagatcctgtgct

SEQ ID NO: 638263 - DNA, 33 bp, Homo sapien
gtgagaggagcagttacggtacgagtgtcatat

SEQ ID NO: 638264 - DNA, 33 bp, Homo sapien
gtgagaggagcagttatggtacgagtgtcatat

SEQ ID NO: 638265 - DNA, 33 bp, Homo sapien
tccttacatgagaaaccgagagatagtatatat

SEQ ID NO: 638266 - DNA, 33 bp, Homo sapien
tccttacatgagaaactgagagatagtatatat

SEQ ID NO: 638267 - DNA, 33 bp, Homo sapien
taaaagattaatacacaaacccagaccattatt

SEQ ID NO: 638268 - DNA, 33 bp, Homo sapien
taaaagattaatacaccaacccagaccattatt

SEQ ID NO: 638269 - DNA, 33 bp, Homo sapien
attcctaatcctggaacgaatagccctgcgtca

SEQ ID NO: 638270 - DNA, 33 bp, Homo sapien
attcctaatcctggaatgaatagccctgcgtca

SEQ ID NO: 638271 - DNA, 33 bp, Homo sapien
tacttttataagcccaagaaagatcccaaccca

SEQ ID NO: 638272 - DNA, 33 bp, Homo sapien
tacttttataagcccaggaaagatcccaaccca

SEQ ID NO: 638273 - DNA, 33 bp, Homo sapien
aagctgcatagatagacagtgagccttcagcta

SEQ ID NO: 638274 - DNA, 33 bp, Homo sapien
aagctgcatagatagatagtgagccttcagcta

SEQ ID NO: 638275 - DNA, 33 bp, Homo sapien
cctcttctcactgaaccgaggtgcatgattaat

SEQ ID NO: 638276 - DNA, 33 bp, Homo sapien
cctcttctcactgaactgaggtgcatgattaat

SEQ ID NO: 638277 - DNA, 33 bp, Homo sapien
cagagaaggaaggaagcagtatctggccactgc

SEQ ID NO: 638278 - DNA, 33 bp, Homo sapien
cagagaaggaaggaagtagtatctggccactgc

SEQ ID NO: 638279 - DNA, 33 bp, Homo sapien
ataacagtatcaggacaagcttctctaggaggg

SEQ ID NO: 638280 - DNA, 33 bp, Homo sapien
ataacagtatcaggacgagcttctctaggaggg

SEQ ID NO: 638281 - DNA, 33 bp, Homo sapien
ctttaacactgaaaaaaccactagtcttcctct

SEQ ID NO: 638282 - DNA, 33 bp, Homo sapien
ctttaacactgaaaaacccactagtcttcctct

SEQ ID NO: 638283 - DNA, 33 bp, Homo sapien
atattgccatgaatcaagtttactcaaaatttt

SEQ ID NO: 638284 - DNA, 33 bp, Homo sapien
atattgccatgaatcaggtttactcaaaatttt

SEQ ID NO: 638285 - DNA, 33 bp, Homo sapien
cagctctgctcatctgcaaccggataactgcta

SEQ ID NO: 638286 - DNA, 33 bp, Homo sapien
cagctctgctcatctgtaaccggataactgcta

SEQ ID NO: 638287 - DNA, 33 bp, Homo sapien
gtaattggatctttgaacagcctagcaggaagc

SEQ ID NO: 638288 - DNA, 33 bp, Homo sapien
gtaattggatctttgagcagcctagcaggaagc

SEQ ID NO: 638289 - DNA, 33 bp, Homo sapien
tacgggcttttctggaaccatctcgaatcgttc

SEQ ID NO: 638290 - DNA, 33 bp, Homo sapien
tacgggcttttctggacccatctcgaatcgttc

SEQ ID NO: 638291 - DNA, 33 bp, Homo sapien
aaaatcagaaccaaagactattgttaaaaacta

SEQ ID NO: 638292 - DNA, 33 bp, Homo sapien
aaaatcagaaccaaagtctattgttaaaaacta

SEQ ID NO: 638293 - DNA, 33 bp, Homo sapien
acactcttatctcccgcaatacgctgtctctgg

SEQ ID NO: 638294 - DNA, 33 bp, Homo sapien
acactcttatctcccgtaatacgctgtctctgg

SEQ ID NO: 638295 - DNA, 33 bp, Homo sapien
gggtctctctgattcccgagctcacactcttat

SEQ ID NO: 638296 - DNA, 33 bp, Homo sapien
gggtctctctgattcctgagctcacactcttat

SEQ ID NO: 638297 - DNA, 33 bp, Homo sapien
ctgaagagggatagaagatataactccataaat

SEQ ID NO: 638298 - DNA, 33 bp, Homo sapien
ctgaagagggatagaatatataactccataaat

SEQ ID NO: 638299 - DNA, 33 bp, Homo sapien
ttctaatagagtgaaacatacattaaccacaca

SEQ ID NO: 638300 - DNA, 33 bp, Homo sapien
ttctaatagagtgaaatatacattaaccacaca

SEQ ID NO: 638301 - DNA, 33 bp, Homo sapien
atcttcctcccaaagggcacttaggctgtttcc

SEQ ID NO: 638302 - DNA, 33 bp, Homo sapien
atcttcctcccaaaggtcacttaggctgtttcc

SEQ ID NO: 638303 - DNA, 33 bp, Homo sapien
tattttttttaactaacgcatcttcattgtctt

SEQ ID NO: 638304 - DNA, 33 bp, Homo sapien
tattttttttaactaaggcatcttcattgtctt

SEQ ID NO: 638305 - DNA, 33 bp, Homo sapien
catgtgaagcctatcacagacatgagtcctggg

SEQ ID NO: 638306 - DNA, 33 bp, Homo sapien
catgtgaagcctatcagagacatgagtcctggg

SEQ ID NO: 638307 - DNA, 33 bp, Homo sapien
tagtcctcagttcccaaagaaaccacgtgcgca

SEQ ID NO: 638308 - DNA, 33 bp, Homo sapien
tagtcctcagttcccacagaaaccacgtgcgca

SEQ ID NO: 638309 - DNA, 33 bp, Homo sapien
cctcaagcttttattgcatgtataacttttctt

SEQ ID NO: 638310 - DNA, 33 bp, Homo sapien
cctcaagcttttattgtatgtataacttttctt

SEQ ID NO: 638311 - DNA, 33 bp, Homo sapien
cttctgagacggacaacagccagttgccaatca

SEQ ID NO: 638312 - DNA, 33 bp, Homo sapien
cttctgagacggacaagagccagttgccaatca

SEQ ID NO: 638313 - DNA, 33 bp, Homo sapien
tacatgtgattcttaaaggcttaattctgcagc

SEQ ID NO: 638314 - DNA, 33 bp, Homo sapien
tacatgtgattcttaagggcttaattctgcagc

SEQ ID NO: 638315 - DNA, 33 bp, Homo sapien
ccttccttagagttaacagcctttcctgcccat

SEQ ID NO: 638316 - DNA, 33 bp, Homo sapien
ccttccttagagttaatagcctttcctgcccat

SEQ ID NO: 638317 - DNA, 33 bp, Homo sapien
tttcattcatccttcacgtcagactagttagct

SEQ ID NO: 638318 - DNA, 33 bp, Homo sapien
tttcattcatccttcatgtcagactagttagct

SEQ ID NO: 638319 - DNA, 33 bp, Homo sapien
aaactcttgaatagtaggttttgactgctacag

SEQ ID NO: 638320 - DNA, 33 bp, Homo sapien
aaactcttgaatagtatgttttgactgctacag

SEQ ID NO: 638321 - DNA, 33 bp, Homo sapien
tatagtttctagtttacgctctccacaggtaat

SEQ ID NO: 638322 - DNA, 33 bp, Homo sapien
tatagtttctagtttatgctctccacaggtaat

SEQ ID NO: 638323 - DNA, 33 bp, Homo sapien
taatgagtccctactacattcttggcactgtgc

SEQ ID NO: 638324 - DNA, 33 bp, Homo sapien
taatgagtccctactatattcttggcactgtgc

SEQ ID NO: 638325 - DNA, 33 bp, Homo sapien
ccctcagggccctaacgaatctggctcctagct

SEQ ID NO: 638326 - DNA, 33 bp, Homo sapien
ccctcagggccctaactaatctggctcctagct

SEQ ID NO: 638327 - DNA, 33 bp, Homo sapien
ctgagggccatgttacaatggaggaactgaggc

SEQ ID NO: 638328 - DNA, 33 bp, Homo sapien
ctgagggccatgttacgatggaggaactgaggc

SEQ ID NO: 638329 - DNA, 33 bp, Homo sapien
agcagtgtgtttagatcaggcttggtcacgtat

SEQ ID NO: 638330 - DNA, 33 bp, Homo sapien
agcagtgtgtttagattaggcttggtcacgtat

SEQ ID NO: 638331 - DNA, 33 bp, Homo sapien
agaaaagtcaagttgaaaaacctgctgggcctg

SEQ ID NO: 638332 - DNA, 33 bp, Homo sapien
agaaaagtcaagttgagaaacctgctgggcctg

SEQ ID NO: 638333 - DNA, 33 bp, Homo sapien
tgctttctgagtaggagacaatggagtggattg

SEQ ID NO: 638334 - DNA, 33 bp, Homo sapien
tgctttctgagtaggatacaatggagtggattg

SEQ ID NO: 638335 - DNA, 33 bp, Homo sapien
gaatccaaaacagacccgggttggaaggtagat

SEQ ID NO: 638336 - DNA, 33 bp, Homo sapien
gaatccaaaacagacctgggttggaaggtagat

SEQ ID NO: 638337 - DNA, 33 bp, Homo sapien
ctaaggttgagatttaacacatcacagatgcaa

SEQ ID NO: 638338 - DNA, 33 bp, Homo sapien
ctaaggttgagatttagcacatcacagatgcaa

SEQ ID NO: 638339 - DNA, 33 bp, Homo sapien
ttccagacatagattaacaagacttaattccag

SEQ ID NO: 638340 - DNA, 33 bp, Homo sapien
ttccagacatagattagcaagacttaattccag

SEQ ID NO: 638341 - DNA, 33 bp, Homo sapien
aacatgctaagttaacaactggaacattacaaa

SEQ ID NO: 638342 - DNA, 33 bp, Homo sapien
aacatgctaagttaacgactggaacattacaaa

SEQ ID NO: 638343 - DNA, 33 bp, Homo sapien
caactatgagccaagaaaaaggcctagaataga

SEQ ID NO: 638344 - DNA, 33 bp, Homo sapien
caactatgagccaagagaaaggcctagaataga

SEQ ID NO: 638345 - DNA, 33 bp, Homo sapien
gcctagagacagaaaaatatttcataacagagg

SEQ ID NO: 638346 - DNA, 33 bp, Homo sapien
gcctagagacagaaaagtatttcataacagagg

SEQ ID NO: 638347 - DNA, 33 bp, Homo sapien
tggaacagaatagagaacatagagaacccagaa

SEQ ID NO: 638348 - DNA, 33 bp, Homo sapien
tggaacagaatagagatcatagagaacccagaa

SEQ ID NO: 638349 - DNA, 33 bp, Homo sapien
aatcaatgaagctgtaaaaacatcacctttcac

SEQ ID NO: 638350 - DNA, 33 bp, Homo sapien
aatcaatgaagctgtagaaacatcacctttcac

SEQ ID NO: 638351 - DNA, 33 bp, Homo sapien
actgcttggtaagaagcagttctatgcagccat

SEQ ID NO: 638352 - DNA, 33 bp, Homo sapien
actgcttggtaagaagtagttctatgcagccat

SEQ ID NO: 638353 - DNA, 33 bp, Homo sapien
cccttcctttctatccacactctaactgctgtc

SEQ ID NO: 638354 - DNA, 33 bp, Homo sapien
cccttcctttctatccgcactctaactgctgtc

SEQ ID NO: 638355 - DNA, 33 bp, Homo sapien
atatgaaagtgtagaaaggatattagggtatca

SEQ ID NO: 638356 - DNA, 33 bp, Homo sapien
atatgaaagtgtagaacggatattagggtatca

SEQ ID NO: 638357 - DNA, 33 bp, Homo sapien
ccatttttgccgagtcaactactccaacaccaa

SEQ ID NO: 638358 - DNA, 33 bp, Homo sapien
ccatttttgccgagtcgactactccaacaccaa

SEQ ID NO: 638359 - DNA, 33 bp, Homo sapien
aaatacacaaaaatgaacccacatagaacaaaa

SEQ ID NO: 638360 - DNA, 33 bp, Homo sapien
aaatacacaaaaatgagcccacatagaacaaaa

SEQ ID NO: 638361 - DNA, 33 bp, Homo sapien
gggtggtctgtcaagaatattggatcagtttat

SEQ ID NO: 638362 - DNA, 33 bp, Homo sapien
gggtggtctgtcaagagtattggatcagtttat

SEQ ID NO: 638363 - DNA, 33 bp, Homo sapien
aggcaatcaagaagagaccataccaactttctc

SEQ ID NO: 638364 - DNA, 33 bp, Homo sapien
aggcaatcaagaagagcccataccaactttctc

SEQ ID NO: 638365 - DNA, 33 bp, Homo sapien
actttcactgattcaaattgaaagagatggggg

SEQ ID NO: 638366 - DNA, 33 bp, Homo sapien
actttcactgattcaacttgaaagagatggggg

SEQ ID NO: 638367 - DNA, 33 bp, Homo sapien
gcttacgccatttatccagcagttccaattaca

SEQ ID NO: 638368 - DNA, 33 bp, Homo sapien
gcttacgccatttatctagcagttccaattaca

SEQ ID NO: 638369 - DNA, 33 bp, Homo sapien
attatcttgtatataaaggatgctctatagatg

SEQ ID NO: 638370 - DNA, 33 bp, Homo sapien
attatcttgtatataatggatgctctatagatg

SEQ ID NO: 638371 - DNA, 33 bp, Homo sapien
gctatcaaccacagtgaaaataggagagtacaa

SEQ ID NO: 638372 - DNA, 33 bp, Homo sapien
gctatcaaccacagtggaaataggagagtacaa

SEQ ID NO: 638373 - DNA, 33 bp, Homo sapien
ccttgttttatttatgcagttcttggcaaggct

SEQ ID NO: 638374 - DNA, 33 bp, Homo sapien
ccttgttttatttatgtagttcttggcaaggct

SEQ ID NO: 638375 - DNA, 33 bp, Homo sapien
acagcctgagctaagacaagcacataatgtttc

SEQ ID NO: 638376 - DNA, 33 bp, Homo sapien
acagcctgagctaagagaagcacataatgtttc

SEQ ID NO: 638377 - DNA, 33 bp, Homo sapien
catgcagaaagccctcaataaatatcactgaat

SEQ ID NO: 638378 - DNA, 33 bp, Homo sapien
catgcagaaagccctcgataaatatcactgaat

SEQ ID NO: 638379 - DNA, 33 bp, Homo sapien
tctctttagctcttacacaggacaaggcgggac

SEQ ID NO: 638380 - DNA, 33 bp, Homo sapien
tctctttagctcttacgcaggacaaggcgggac

SEQ ID NO: 638381 - DNA, 33 bp, Homo sapien
gatatgtatgtgcaggaaaagtcaacacttctt

SEQ ID NO: 638382 - DNA, 33 bp, Homo sapien
gatatgtatgtgcaggcaaagtcaacacttctt

SEQ ID NO: 638383 - DNA, 33 bp, Homo sapien
tttcccctctaaattagaatctgaaggacatca

SEQ ID NO: 638384 - DNA, 33 bp, Homo sapien
tttcccctctaaattataatctgaaggacatca

SEQ ID NO: 638385 - DNA, 33 bp, Homo sapien
ataatctgattctccacagaaatgacgactgta

SEQ ID NO: 638386 - DNA, 33 bp, Homo sapien
ataatctgattctccatagaaatgacgactgta

SEQ ID NO: 638387 - DNA, 33 bp, Homo sapien
gttttagttgggtcccagaaaagctgctgttaa

SEQ ID NO: 638388 - DNA, 33 bp, Homo sapien
gttttagttgggtcccggaaaagctgctgttaa

SEQ ID NO: 638389 - DNA, 33 bp, Homo sapien
acagctactttgatagccaagttttttaagtca

SEQ ID NO: 638390 - DNA, 33 bp, Homo sapien
acagctactttgatagtcaagttttttaagtca

SEQ ID NO: 638391 - DNA, 33 bp, Homo sapien
agtacttatctgcaagcatgacttaaaaaactt

SEQ ID NO: 638392 - DNA, 33 bp, Homo sapien
agtacttatctgcaagtatgacttaaaaaactt

SEQ ID NO: 638393 - DNA, 33 bp, Homo sapien
gaagctgctgaatctacagaattaggctccaca

SEQ ID NO: 638394 - DNA, 33 bp, Homo sapien
gaagctgctgaatctatagaattaggctccaca

SEQ ID NO: 638395 - DNA, 33 bp, Homo sapien
gcttttaaaaatctcaaaaatgggctgtacgca

SEQ ID NO: 638396 - DNA, 33 bp, Homo sapien
gcttttaaaaatctcacaaatgggctgtacgca

SEQ ID NO: 638397 - DNA, 33 bp, Homo sapien
ggaatttgaaactagaacagagatagagaacag

SEQ ID NO: 638398 - DNA, 33 bp, Homo sapien
ggaatttgaaactagagcagagatagagaacag

SEQ ID NO: 638399 - DNA, 33 bp, Homo sapien
cctgtcgcttttttcaacccatctgctaagctg

SEQ ID NO: 638400 - DNA, 33 bp, Homo sapien
cctgtcgcttttttcagcccatctgctaagctg

SEQ ID NO: 638401 - DNA, 33 bp, Homo sapien
accggcatgacatggccaccttcaaagaatgca

SEQ ID NO: 638402 - DNA, 33 bp, Homo sapien
accggcatgacatggctaccttcaaagaatgca

SEQ ID NO: 638403 - DNA, 33 bp, Homo sapien
ttgatctttcatggtaaattcaaatgctaagac

SEQ ID NO: 638404 - DNA, 33 bp, Homo sapien
ttgatctttcatggtagattcaaatgctaagac

SEQ ID NO: 638405 - DNA, 33 bp, Homo sapien
aacaaactttttataactgacctatgtagcatg

SEQ ID NO: 638406 - DNA, 33 bp, Homo sapien
aacaaactttttataattgacctatgtagcatg

SEQ ID NO: 638407 - DNA, 33 bp, Homo sapien
ttttatcaatgcacacaatattagcaagttctt

SEQ ID NO: 638408 - DNA, 33 bp, Homo sapien
ttttatcaatgcacacgatattagcaagttctt

SEQ ID NO: 638409 - DNA, 33 bp, Homo sapien
acacatcctggtattcaataacaaaactttttt

SEQ ID NO: 638410 - DNA, 33 bp, Homo sapien
acacatcctggtattcgataacaaaactttttt

SEQ ID NO: 638411 - DNA, 33 bp, Homo sapien
ggacaacatgatgaaaacttatctctgcaaaac

SEQ ID NO: 638412 - DNA, 33 bp, Homo sapien
ggacaacatgatgaaaccttatctctgcaaaac

SEQ ID NO: 638413 - DNA, 33 bp, Homo sapien
ctaatgagagaggcaacctaggaagctggaaac

SEQ ID NO: 638414 - DNA, 33 bp, Homo sapien
ctaatgagagaggcaagctaggaagctggaaac

SEQ ID NO: 638415 - DNA, 33 bp, Homo sapien
atgattacaaaatcagaccatattgcagaaaag

SEQ ID NO: 638416 - DNA, 33 bp, Homo sapien
atgattacaaaatcaggccatattgcagaaaag

SEQ ID NO: 638417 - DNA, 33 bp, Homo sapien
ttttcacattttttggaagattgaaaatatata

SEQ ID NO: 638418 - DNA, 33 bp, Homo sapien
ttttcacattttttggcagattgaaaatatata

SEQ ID NO: 638419 - DNA, 33 bp, Homo sapien
attgaacagatgcacccggtaggaatttgattt

SEQ ID NO: 638420 - DNA, 33 bp, Homo sapien
attgaacagatgcacctggtaggaatttgattt

SEQ ID NO: 638421 - DNA, 33 bp, Homo sapien
tatatgaaatgttagactaggctaatgcataga

SEQ ID NO: 638422 - DNA, 33 bp, Homo sapien
tatatgaaatgttagagtaggctaatgcataga

SEQ ID NO: 638423 - DNA, 33 bp, Homo sapien
ctagcaaataaaaatgcattctttgcaaactct

SEQ ID NO: 638424 - DNA, 33 bp, Homo sapien
ctagcaaataaaaatgtattctttgcaaactct

SEQ ID NO: 638425 - DNA, 33 bp, Homo sapien
ccctgctgatgagaaaattaggattatcgttaa

SEQ ID NO: 638426 - DNA, 33 bp, Homo sapien
ccctgctgatgagaaagttaggattatcgttaa

SEQ ID NO: 638427 - DNA, 33 bp, Homo sapien
aatcaagccattagataaacatagaaaaatagt

SEQ ID NO: 638428 - DNA, 33 bp, Homo sapien
aatcaagccattagatgaacatagaaaaatagt

SEQ ID NO: 638429 - DNA, 33 bp, Homo sapien
tctgaaatgggctgtaagacttcaactccaagg

SEQ ID NO: 638430 - DNA, 33 bp, Homo sapien
tctgaaatgggctgtaggacttcaactccaagg

SEQ ID NO: 638431 - DNA, 33 bp, Homo sapien
gattacagttttcgtcaagtccattcagtgcaa

SEQ ID NO: 638432 - DNA, 33 bp, Homo sapien
gattacagttttcgtccagtccattcagtgcaa

SEQ ID NO: 638433 - DNA, 33 bp, Homo sapien
cagtttcagtgcttaaggataatctatggggat

SEQ ID NO: 638434 - DNA, 33 bp, Homo sapien
cagtttcagtgcttaatgataatctatggggat

SEQ ID NO: 638435 - DNA, 33 bp, Homo sapien
gtggagaagaacccaacgggagataactgaatc

SEQ ID NO: 638436 - DNA, 33 bp, Homo sapien
gtggagaagaacccaatgggagataactgaatc

SEQ ID NO: 638437 - DNA, 33 bp, Homo sapien
cactaacttgcagaaaggtggagaatgtacaaa

SEQ ID NO: 638438 - DNA, 33 bp, Homo sapien
cactaacttgcagaaatgtggagaatgtacaaa

SEQ ID NO: 638439 - DNA, 33 bp, Homo sapien
gcacctggagcttctacagaggtcagataagtt

SEQ ID NO: 638440 - DNA, 33 bp, Homo sapien
gcacctggagcttctatagaggtcagataagtt

SEQ ID NO: 638441 - DNA, 33 bp, Homo sapien
gttctagaccctgggaataaaaggtagacatgc

SEQ ID NO: 638442 - DNA, 33 bp, Homo sapien
gttctagaccctgggagtaaaaggtagacatgc

SEQ ID NO: 638443 - DNA, 33 bp, Homo sapien
ccctagggtcacaacccacagtctgaagaacac

SEQ ID NO: 638444 - DNA, 33 bp, Homo sapien
ccctagggtcacaacctacagtctgaagaacac

SEQ ID NO: 638445 - DNA, 33 bp, Homo sapien
tttagtaatagaacaagactccatctgcctaag

SEQ ID NO: 638446 - DNA, 33 bp, Homo sapien
tttagtaatagaacaatactccatctgcctaag

SEQ ID NO: 638447 - DNA, 33 bp, Homo sapien
gatatcgaaggtttaccatgtgtttgatttcac

SEQ ID NO: 638448 - DNA, 33 bp, Homo sapien
gatatcgaaggtttactatgtgtttgatttcac

SEQ ID NO: 638449 - DNA, 33 bp, Homo sapien
ttcccattaatccacaaaataaggatgtattat

SEQ ID NO: 638450 - DNA, 33 bp, Homo sapien
ttcccattaatccacacaataaggatgtattat

SEQ ID NO: 638451 - DNA, 33 bp, Homo sapien
ggggaagaagcttttacaggatgaacatggaag

SEQ ID NO: 638452 - DNA, 33 bp, Homo sapien
ggggaagaagcttttataggatgaacatggaag

SEQ ID NO: 638453 - DNA, 33 bp, Homo sapien
gatgtccgggaacaagacttactcctctctgta

SEQ ID NO: 638454 - DNA, 33 bp, Homo sapien
gatgtccgggaacaagtcttactcctctctgta

SEQ ID NO: 638455 - DNA, 33 bp, Homo sapien
aaaggtatgcctcaaacggggagaaactggtaa

SEQ ID NO: 638456 - DNA, 33 bp, Homo sapien
aaaggtatgcctcaaatggggagaaactggtaa

SEQ ID NO: 638457 - DNA, 33 bp, Homo sapien
agactgtgggttagaccaagcataaagcattcc

SEQ ID NO: 638458 - DNA, 33 bp, Homo sapien
agactgtgggttagactaagcataaagcattcc

SEQ ID NO: 638459 - DNA, 33 bp, Homo sapien
ggaatacccacttcacaatattccttgaactgt

SEQ ID NO: 638460 - DNA, 33 bp, Homo sapien
ggaatacccacttcacgatattccttgaactgt

SEQ ID NO: 638461 - DNA, 33 bp, Homo sapien
cttaaagggaccattgcatgatcttgcttgtgt

SEQ ID NO: 638462 - DNA, 33 bp, Homo sapien
cttaaagggaccattgtatgatcttgcttgtgt

SEQ ID NO: 638463 - DNA, 33 bp, Homo sapien
aatccatcattctgtacgttcagcctatctcct

SEQ ID NO: 638464 - DNA, 33 bp, Homo sapien
aatccatcattctgtatgttcagcctatctcct

SEQ ID NO: 638465 - DNA, 33 bp, Homo sapien
gcaacatagaactaagacactactatatgatgt

SEQ ID NO: 638466 - DNA, 33 bp, Homo sapien
gcaacatagaactaaggcactactatatgatgt

SEQ ID NO: 638467 - DNA, 33 bp, Homo sapien
tattaaggtctcattaaaaggtcactcttgggg

SEQ ID NO: 638468 - DNA, 33 bp, Homo sapien
tattaaggtctcattacaaggtcactcttgggg

SEQ ID NO: 638469 - DNA, 33 bp, Homo sapien
aaaatattatttagcaccttctctgtcaggcac

SEQ ID NO: 638470 - DNA, 33 bp, Homo sapien
aaaatattatttagcatcttctctgtcaggcac

SEQ ID NO: 638471 - DNA, 33 bp, Homo sapien
tagaatgtgtgtcttaagcaaagcgtttttcag

SEQ ID NO: 638472 - DNA, 33 bp, Homo sapien
tagaatgtgtgtcttaggcaaagcgtttttcag

SEQ ID NO: 638473 - DNA, 33 bp, Homo sapien
tcatgctacccttaaacggctggacagagtgac

SEQ ID NO: 638474 - DNA, 33 bp, Homo sapien
tcatgctacccttaaatggctggacagagtgac

SEQ ID NO: 638475 - DNA, 33 bp, Homo sapien
tcagtctttggagttcaatttatcaagactgtc

SEQ ID NO: 638476 - DNA, 33 bp, Homo sapien
tcagtctttggagttcgatttatcaagactgtc

SEQ ID NO: 638477 - DNA, 33 bp, Homo sapien
aactccaaagactgatcacagaattctcctctg

SEQ ID NO: 638478 - DNA, 33 bp, Homo sapien
aactccaaagactgatgacagaattctcctctg

SEQ ID NO: 638479 - DNA, 33 bp, Homo sapien
tttacttcgttccagccgattgaaccaagcctc

SEQ ID NO: 638480 - DNA, 33 bp, Homo sapien
tttacttcgttccagctgattgaaccaagcctc

SEQ ID NO: 638481 - DNA, 33 bp, Homo sapien
atacactaactcatagaaagggctcggtcaaaa

SEQ ID NO: 638482 - DNA, 33 bp, Homo sapien
atacactaactcatagtaagggctcggtcaaaa

SEQ ID NO: 638483 - DNA, 33 bp, Homo sapien
tcatttattcttttaggccaagtgtgagtaaaa

SEQ ID NO: 638484 - DNA, 33 bp, Homo sapien
tcatttattcttttagtccaagtgtgagtaaaa

SEQ ID NO: 638485 - DNA, 33 bp, Homo sapien
tcttactgacatctagaaagagacaactggcct

SEQ ID NO: 638486 - DNA, 33 bp, Homo sapien
tcttactgacatctaggaagagacaactggcct

SEQ ID NO: 638487 - DNA, 33 bp, Homo sapien
ggaatcttttttaagacgcaatggaatctttta

SEQ ID NO: 638488 - DNA, 33 bp, Homo sapien
ggaatcttttttaagaggcaatggaatctttta

SEQ ID NO: 638489 - DNA, 33 bp, Homo sapien
aaaggctatggtgccaaaatacttgggttcaac

SEQ ID NO: 638490 - DNA, 33 bp, Homo sapien
aaaggctatggtgccagaatacttgggttcaac

SEQ ID NO: 638491 - DNA, 33 bp, Homo sapien
cttgggttcaactcccagctctgtcacttactt

SEQ ID NO: 638492 - DNA, 33 bp, Homo sapien
cttgggttcaactccccgctctgtcacttactt

SEQ ID NO: 638493 - DNA, 33 bp, Homo sapien
ctcaaaaattttcagaccattgaacacatctaa

SEQ ID NO: 638494 - DNA, 33 bp, Homo sapien
ctcaaaaattttcagagcattgaacacatctaa

SEQ ID NO: 638495 - DNA, 33 bp, Homo sapien
tacttgttgtgtcagacactaggcagaacccac

SEQ ID NO: 638496 - DNA, 33 bp, Homo sapien
tacttgttgtgtcagatactaggcagaacccac

SEQ ID NO: 638497 - DNA, 33 bp, Homo sapien
tttagccagacagtatcagcaagatatttttag

SEQ ID NO: 638498 - DNA, 33 bp, Homo sapien
tttagccagacagtatgagcaagatatttttag

SEQ ID NO: 638499 - DNA, 33 bp, Homo sapien
tagggcctgtaactgacaaaaatatattgcgac

SEQ ID NO: 638500 - DNA, 33 bp, Homo sapien
tagggcctgtaactgataaaaatatattgcgac

SEQ ID NO: 638501 - DNA, 33 bp, Homo sapien
ggggcagcaatgaagactaaagttgtgatgtaa

SEQ ID NO: 638502 - DNA, 33 bp, Homo sapien
ggggcagcaatgaagattaaagttgtgatgtaa

SEQ ID NO: 638503 - DNA, 33 bp, Homo sapien
aaagctatatccttaacgtaactgtctccagta

SEQ ID NO: 638504 - DNA, 33 bp, Homo sapien
aaagctatatccttaatgtaactgtctccagta

SEQ ID NO: 638505 - DNA, 33 bp, Homo sapien
gggtcatggatttagagcttttgttgtgtttga

SEQ ID NO: 638506 - DNA, 33 bp, Homo sapien
gggtcatggatttagatcttttgttgtgtttga

SEQ ID NO: 638507 - DNA, 33 bp, Homo sapien
caaagtaacggccttccagcttacctgagtata

SEQ ID NO: 638508 - DNA, 33 bp, Homo sapien
caaagtaacggccttctagcttacctgagtata

SEQ ID NO: 638509 - DNA, 33 bp, Homo sapien
gccaaagtcgagacacacaattgaatttatgca

SEQ ID NO: 638510 - DNA, 33 bp, Homo sapien
gccaaagtcgagacacgcaattgaatttatgca

SEQ ID NO: 638511 - DNA, 33 bp, Homo sapien
ggtataaatatgcacaccttattaactttattg

SEQ ID NO: 638512 - DNA, 33 bp, Homo sapien
ggtataaatatgcacatcttattaactttattg

SEQ ID NO: 638513 - DNA, 33 bp, Homo sapien
ttatgctgccctgtccgctaagatatgagcttt

SEQ ID NO: 638514 - DNA, 33 bp, Homo sapien
ttatgctgccctgtcctctaagatatgagcttt

SEQ ID NO: 638515 - DNA, 33 bp, Homo sapien
atctactcctccctcaagtctcagctcaataaa

SEQ ID NO: 638516 - DNA, 33 bp, Homo sapien
atctactcctccctcaggtctcagctcaataaa

SEQ ID NO: 638517 - DNA, 33 bp, Homo sapien
ttctcttgtttattaacgcgacacataaaatat

SEQ ID NO: 638518 - DNA, 33 bp, Homo sapien
ttctcttgtttattaatgcgacacataaaatat

SEQ ID NO: 638519 - DNA, 33 bp, Homo sapien
actaccaaactataacaaatcaggctattgtta

SEQ ID NO: 638520 - DNA, 33 bp, Homo sapien
actaccaaactataaccaatcaggctattgtta

SEQ ID NO: 638521 - DNA, 33 bp, Homo sapien
ttttacttcatctaaacatgatatgcataaact

SEQ ID NO: 638522 - DNA, 33 bp, Homo sapien
ttttacttcatctaaatatgatatgcataaact

SEQ ID NO: 638523 - DNA, 33 bp, Homo sapien
tactatttctgcttacaacctgtaccattgttt

SEQ ID NO: 638524 - DNA, 33 bp, Homo sapien
tactatttctgcttaccacctgtaccattgttt

SEQ ID NO: 638525 - DNA, 33 bp, Homo sapien
ggtttccagcttcatacaggtccctacaaagga

SEQ ID NO: 638526 - DNA, 33 bp, Homo sapien
ggtttccagcttcatagaggtccctacaaagga

SEQ ID NO: 638527 - DNA, 33 bp, Homo sapien
tagttacatgcagctacgacatacttgaaatgt

SEQ ID NO: 638528 - DNA, 33 bp, Homo sapien
tagttacatgcagctatgacatacttgaaatgt

SEQ ID NO: 638529 - DNA, 33 bp, Homo sapien
ctaatggctactataccggaaagcacacacaga

SEQ ID NO: 638530 - DNA, 33 bp, Homo sapien
ctaatggctactatactggaaagcacacacaga

SEQ ID NO: 638531 - DNA, 33 bp, Homo sapien
aagaaaaaaatgttaactgactgtgccacgctc

SEQ ID NO: 638532 - DNA, 33 bp, Homo sapien
aagaaaaaaatgttaagtgactgtgccacgctc

SEQ ID NO: 638533 - DNA, 33 bp, Homo sapien
catatcacagatgccaagtatcatattctagat

SEQ ID NO: 638534 - DNA, 33 bp, Homo sapien
catatcacagatgccatgtatcatattctagat

SEQ ID NO: 638535 - DNA, 33 bp, Homo sapien
ttaatagtagaacaaaagataaaatgatagaag

SEQ ID NO: 638536 - DNA, 33 bp, Homo sapien
ttaatagtagaacaaaggataaaatgatagaag

SEQ ID NO: 638537 - DNA, 33 bp, Homo sapien
agagtaactacccttaagattgattaaattacc

SEQ ID NO: 638538 - DNA, 33 bp, Homo sapien
agagtaactacccttatgattgattaaattacc

SEQ ID NO: 638539 - DNA, 33 bp, Homo sapien
atttcaactgcgtttacagctatgaaaataatg

SEQ ID NO: 638540 - DNA, 33 bp, Homo sapien
atttcaactgcgtttatagctatgaaaataatg

SEQ ID NO: 638541 - DNA, 33 bp, Homo sapien
agtatgatgattttcaacaatgcccgtatcgct

SEQ ID NO: 638542 - DNA, 33 bp, Homo sapien
agtatgatgattttcagcaatgcccgtatcgct

SEQ ID NO: 638543 - DNA, 33 bp, Homo sapien
ttgagtcttgctttgaaagtagtgaattttttt

SEQ ID NO: 638544 - DNA, 33 bp, Homo sapien
ttgagtcttgctttgagagtagtgaattttttt

SEQ ID NO: 638545 - DNA, 33 bp, Homo sapien
ggatgctctggacaaaatggatgaaaggtgaca

SEQ ID NO: 638546 - DNA, 33 bp, Homo sapien
ggatgctctggacaaagtggatgaaaggtgaca

SEQ ID NO: 638547 - DNA, 33 bp, Homo sapien
ggctgtctagaaacccgaaggatgctctggaca

SEQ ID NO: 638548 - DNA, 33 bp, Homo sapien
ggctgtctagaaaccctaaggatgctctggaca

SEQ ID NO: 638549 - DNA, 33 bp, Homo sapien
caattatctccaaaggacaataagggacagata

SEQ ID NO: 638550 - DNA, 33 bp, Homo sapien
caattatctccaaagggcaataagggacagata

SEQ ID NO: 638551 - DNA, 33 bp, Homo sapien
ttcaagtctatgttgtcaaaacttacctgtctg

SEQ ID NO: 638552 - DNA, 33 bp, Homo sapien
ttcaagtctatgttgtgaaaacttacctgtctg

SEQ ID NO: 638553 - DNA, 33 bp, Homo sapien
tcctttctgcgtctcacggttttataacctagc

SEQ ID NO: 638554 - DNA, 33 bp, Homo sapien
tcctttctgcgtctcatggttttataacctagc

SEQ ID NO: 638555 - DNA, 33 bp, Homo sapien
gctttcaagacagagaataacaacaaatgactt

SEQ ID NO: 638556 - DNA, 33 bp, Homo sapien
gctttcaagacagagactaacaacaaatgactt

SEQ ID NO: 638557 - DNA, 33 bp, Homo sapien
cttacaagaagcctaaacatattaagtaacaga

SEQ ID NO: 638558 - DNA, 33 bp, Homo sapien
cttacaagaagcctaagcatattaagtaacaga

SEQ ID NO: 638559 - DNA, 33 bp, Homo sapien
ggctattttggttttacgttggaaagaagtgaa

SEQ ID NO: 638560 - DNA, 33 bp, Homo sapien
ggctattttggttttatgttggaaagaagtgaa

SEQ ID NO: 638561 - DNA, 33 bp, Homo sapien
ttcaatattctgaaaaattccctcacatatctc

SEQ ID NO: 638562 - DNA, 33 bp, Homo sapien
ttcaatattctgaaaagttccctcacatatctc

SEQ ID NO: 638563 - DNA, 33 bp, Homo sapien
aatgtgttccttcaacgaaaatggaatttagag

SEQ ID NO: 638564 - DNA, 33 bp, Homo sapien
aatgtgttccttcaactaaaatggaatttagag

SEQ ID NO: 638565 - DNA, 33 bp, Homo sapien
ataaccagaagattcacaatcagcataacagac

SEQ ID NO: 638566 - DNA, 33 bp, Homo sapien
ataaccagaagattcataatcagcataacagac

SEQ ID NO: 638567 - DNA, 33 bp, Homo sapien
tttctgccaagtggtaagttcatgagagcaagg

SEQ ID NO: 638568 - DNA, 33 bp, Homo sapien
tttctgccaagtggtacgttcatgagagcaagg

SEQ ID NO: 638569 - DNA, 33 bp, Homo sapien
gtttgttcatggtacaaatataacactcatatg

SEQ ID NO: 638570 - DNA, 33 bp, Homo sapien
gtttgttcatggtacatatataacactcatatg

SEQ ID NO: 638571 - DNA, 33 bp, Homo sapien
agtcttcacaagaaaggaagaaggctcatggaa

SEQ ID NO: 638572 - DNA, 33 bp, Homo sapien
agtcttcacaagaaagtaagaaggctcatggaa

SEQ ID NO: 638573 - DNA, 33 bp, Homo sapien
gaagactgcaagggtcagacaaaaatacttgag

SEQ ID NO: 638574 - DNA, 33 bp, Homo sapien
gaagactgcaagggtcggacaaaaatacttgag

SEQ ID NO: 638575 - DNA, 33 bp, Homo sapien
gctggtgtgaatatcacgaagtcttccacattt

SEQ ID NO: 638576 - DNA, 33 bp, Homo sapien
gctggtgtgaatatcatgaagtcttccacattt

SEQ ID NO: 638577 - DNA, 33 bp, Homo sapien
gtcacctgccacatataaaagagctcaaagatc

SEQ ID NO: 638578 - DNA, 33 bp, Homo sapien
gtcacctgccacatatgaaagagctcaaagatc

SEQ ID NO: 638579 - DNA, 33 bp, Homo sapien
tgtcagtggtaatacaccagcttctaatgattc

SEQ ID NO: 638580 - DNA, 33 bp, Homo sapien
tgtcagtggtaatacatcagcttctaatgattc

SEQ ID NO: 638581 - DNA, 33 bp, Homo sapien
taaatgcattttgaccagatcttacaaaaatac

SEQ ID NO: 638582 - DNA, 33 bp, Homo sapien
taaatgcattttgaccggatcttacaaaaatac

SEQ ID NO: 638583 - DNA, 33 bp, Homo sapien
ttcaccgtcctcttctaaaaatgatgagtatca

SEQ ID NO: 638584 - DNA, 33 bp, Homo sapien
ttcaccgtcctcttctgaaaatgatgagtatca

SEQ ID NO: 638585 - DNA, 33 bp, Homo sapien
cctattgtctagacccagcaaaggtggaagatt

SEQ ID NO: 638586 - DNA, 33 bp, Homo sapien
cctattgtctagacccggcaaaggtggaagatt

SEQ ID NO: 638587 - DNA, 33 bp, Homo sapien
tgaatctttagattaacgctctccaacccctat

SEQ ID NO: 638588 - DNA, 33 bp, Homo sapien
tgaatctttagattaatgctctccaacccctat

SEQ ID NO: 638589 - DNA, 33 bp, Homo sapien
ccatttgcttcaggaactaagttagaaaatcca

SEQ ID NO: 638590 - DNA, 33 bp, Homo sapien
ccatttgcttcaggaattaagttagaaaatcca

SEQ ID NO: 638591 - DNA, 33 bp, Homo sapien
gtcaatagaaaacacacgaaggaacagattgga

SEQ ID NO: 638592 - DNA, 33 bp, Homo sapien
gtcaatagaaaacacatgaaggaacagattgga

SEQ ID NO: 638593 - DNA, 33 bp, Homo sapien
cttaatcttgaggtaaccagactttttgatgat

SEQ ID NO: 638594 - DNA, 33 bp, Homo sapien
cttaatcttgaggtaagcagactttttgatgat

SEQ ID NO: 638595 - DNA, 33 bp, Homo sapien
taaattgttctcctaacgtaccagctctccact

SEQ ID NO: 638596 - DNA, 33 bp, Homo sapien
taaattgttctcctaatgtaccagctctccact

SEQ ID NO: 638597 - DNA, 33 bp, Homo sapien
atatccccacaaccctcaatcaactggttataa

SEQ ID NO: 638598 - DNA, 33 bp, Homo sapien
atatccccacaaccctgaatcaactggttataa

SEQ ID NO: 638599 - DNA, 33 bp, Homo sapien
ttcacagataatataacctactgacatgtaatt

SEQ ID NO: 638600 - DNA, 33 bp, Homo sapien
ttcacagataatataagctactgacatgtaatt

SEQ ID NO: 638601 - DNA, 33 bp, Homo sapien
tatgatatctcatcacaggtctacagctaaggg

SEQ ID NO: 638602 - DNA, 33 bp, Homo sapien
tatgatatctcatcactggtctacagctaaggg

SEQ ID NO: 638603 - DNA, 33 bp, Homo sapien
aatgcaaaacatcaataataccgatagcaatta

SEQ ID NO: 638604 - DNA, 33 bp, Homo sapien
aatgcaaaacatcaatgataccgatagcaatta

SEQ ID NO: 638605 - DNA, 33 bp, Homo sapien
tgttcagaattactgacagctctggccttccta

SEQ ID NO: 638606 - DNA, 33 bp, Homo sapien
tgttcagaattactgatagctctggccttccta

SEQ ID NO: 638607 - DNA, 33 bp, Homo sapien
aatatcataacgttcacactcactgagctatta

SEQ ID NO: 638608 - DNA, 33 bp, Homo sapien
aatatcataacgttcatactcactgagctatta

SEQ ID NO: 638609 - DNA, 33 bp, Homo sapien
taagggccatgagaaacattgactatcactgtg

SEQ ID NO: 638610 - DNA, 33 bp, Homo sapien
taagggccatgagaaatattgactatcactgtg

SEQ ID NO: 638611 - DNA, 33 bp, Homo sapien
gctgtgttatagatatcaacaactcattttccc

SEQ ID NO: 638612 - DNA, 33 bp, Homo sapien
gctgtgttatagatatgaacaactcattttccc

SEQ ID NO: 638613 - DNA, 33 bp, Homo sapien
tccttttcagaagtcacgataaatttcagtaaa

SEQ ID NO: 638614 - DNA, 33 bp, Homo sapien
tccttttcagaagtcatgataaatttcagtaaa

SEQ ID NO: 638615 - DNA, 33 bp, Homo sapien
aagtgagaagttaaaacatcgatcagttaggtg

SEQ ID NO: 638616 - DNA, 33 bp, Homo sapien
aagtgagaagttaaaagatcgatcagttaggtg

SEQ ID NO: 638617 - DNA, 33 bp, Homo sapien
accattacctcagatcgctgtactgatcttttt

SEQ ID NO: 638618 - DNA, 33 bp, Homo sapien
accattacctcagatctctgtactgatcttttt

SEQ ID NO: 638619 - DNA, 33 bp, Homo sapien
gctttctttgttcactaaatatcagagtctgtc

SEQ ID NO: 638620 - DNA, 33 bp, Homo sapien
gctttctttgttcactgaatatcagagtctgtc

SEQ ID NO: 638621 - DNA, 33 bp, Homo sapien
ctccttctactttcaaagtgccagatccctaag

SEQ ID NO: 638622 - DNA, 33 bp, Homo sapien
ctccttctactttcaatgtgccagatccctaag

SEQ ID NO: 638623 - DNA, 33 bp, Homo sapien
ttcattggaatgccatcatcctcctcatcattg

SEQ ID NO: 638624 - DNA, 33 bp, Homo sapien
ttcattggaatgccattatcctcctcatcattg

SEQ ID NO: 638625 - DNA, 33 bp, Homo sapien
ctgcagtgctttaaggaaagcaagagagagctt

SEQ ID NO: 638626 - DNA, 33 bp, Homo sapien
ctgcagtgctttaaggtaagcaagagagagctt

SEQ ID NO: 638627 - DNA, 33 bp, Homo sapien
tttctacctgtacaaacggctttacactccatg

SEQ ID NO: 638628 - DNA, 33 bp, Homo sapien
tttctacctgtacaaatggctttacactccatg

SEQ ID NO: 638629 - DNA, 33 bp, Homo sapien
ttccattcctaacagaaaaaaacaggctcctat

SEQ ID NO: 638630 - DNA, 33 bp, Homo sapien
ttccattcctaacagacaaaaacaggctcctat

SEQ ID NO: 638631 - DNA, 33 bp, Homo sapien
cgtttcacacataaagaaacaaaggcatggaga

SEQ ID NO: 638632 - DNA, 33 bp, Homo sapien
cgtttcacacataaaggaacaaaggcatggaga

SEQ ID NO: 638633 - DNA, 33 bp, Homo sapien
ttaggcaaattactcaatctctccatgcctttg

SEQ ID NO: 638634 - DNA, 33 bp, Homo sapien
ttaggcaaattactcagtctctccatgcctttg

SEQ ID NO: 638635 - DNA, 33 bp, Homo sapien
ctgatggcttgacacaccacttatacctgtata

SEQ ID NO: 638636 - DNA, 33 bp, Homo sapien
ctgatggcttgacacagcacttatacctgtata

SEQ ID NO: 638637 - DNA, 33 bp, Homo sapien
cttcgaactttaatagcaaccaaatctcatgca

SEQ ID NO: 638638 - DNA, 33 bp, Homo sapien
cttcgaactttaataggaaccaaatctcatgca

SEQ ID NO: 638639 - DNA, 33 bp, Homo sapien
ttttagctgatgcaaacaaagcagcaatgaatt

SEQ ID NO: 638640 - DNA, 33 bp, Homo sapien
ttttagctgatgcaaataaagcagcaatgaatt

SEQ ID NO: 638641 - DNA, 33 bp, Homo sapien
aagattgacagtttgcagcaaaagttaatctcc

SEQ ID NO: 638642 - DNA, 33 bp, Homo sapien
aagattgacagtttgctgcaaaagttaatctcc

SEQ ID NO: 638643 - DNA, 33 bp, Homo sapien
aaagatgcagctataaagaaagaagaaactgct

SEQ ID NO: 638644 - DNA, 33 bp, Homo sapien
aaagatgcagctataacgaaagaagaaactgct

SEQ ID NO: 638645 - DNA, 33 bp, Homo sapien
agttctgaaacactgaaaatcttagaaacctgt

SEQ ID NO: 638646 - DNA, 33 bp, Homo sapien
agttctgaaacactgagaatcttagaaacctgt

SEQ ID NO: 638647 - DNA, 33 bp, Homo sapien
gaaatgcttatcttagacaaaaatgtttcactt

SEQ ID NO: 638648 - DNA, 33 bp, Homo sapien
gaaatgcttatcttaggcaaaaatgtttcactt

SEQ ID NO: 638649 - DNA, 33 bp, Homo sapien
atgccccaaagtggcaatcttcacagctcctct

SEQ ID NO: 638650 - DNA, 33 bp, Homo sapien
atgccccaaagtggcagtcttcacagctcctct

SEQ ID NO: 638651 - DNA, 33 bp, Homo sapien
acattggataactctccacattcaggctaggca

SEQ ID NO: 638652 - DNA, 33 bp, Homo sapien
acattggataactctctacattcaggctaggca

SEQ ID NO: 638653 - DNA, 33 bp, Homo sapien
tgtcctgagtagcaaccctgatcctctctaagc

SEQ ID NO: 638654 - DNA, 33 bp, Homo sapien
tgtcctgagtagcaacgctgatcctctctaagc

SEQ ID NO: 638655 - DNA, 33 bp, Homo sapien
tgatgagcaatggagagaatttacaaggcagga

SEQ ID NO: 638656 - DNA, 33 bp, Homo sapien
tgatgagcaatggagataatttacaaggcagga

SEQ ID NO: 638657 - DNA, 33 bp, Homo sapien
cccaaatgtctagtccaccaaactctcattcat

SEQ ID NO: 638658 - DNA, 33 bp, Homo sapien
cccaaatgtctagtccgccaaactctcattcat

SEQ ID NO: 638659 - DNA, 33 bp, Homo sapien
agtggtgaggtctggaaattctagctcattact

SEQ ID NO: 638660 - DNA, 33 bp, Homo sapien
agtggtgaggtctggagattctagctcattact

SEQ ID NO: 638661 - DNA, 33 bp, Homo sapien
atcaaaggtgattttccaaacatgaatgaacat

SEQ ID NO: 638662 - DNA, 33 bp, Homo sapien
atcaaaggtgattttctaaacatgaatgaacat

SEQ ID NO: 638663 - DNA, 33 bp, Homo sapien
gaatggctagagactacgcgtcatttattacaa

SEQ ID NO: 638664 - DNA, 33 bp, Homo sapien
gaatggctagagactatgcgtcatttattacaa

SEQ ID NO: 638665 - DNA, 33 bp, Homo sapien
cttacacctaactatcacctagggctgtctatt

SEQ ID NO: 638666 - DNA, 33 bp, Homo sapien
cttacacctaactatcgcctagggctgtctatt

SEQ ID NO: 638667 - DNA, 33 bp, Homo sapien
ttctttgttaagcgcaaggctttgtcacacact

SEQ ID NO: 638668 - DNA, 33 bp, Homo sapien
ttctttgttaagcgcagggctttgtcacacact

SEQ ID NO: 638669 - DNA, 33 bp, Homo sapien
gcaggatattggatgcccagttgccttttatta

SEQ ID NO: 638670 - DNA, 33 bp, Homo sapien
gcaggatattggatgctcagttgccttttatta

SEQ ID NO: 638671 - DNA, 33 bp, Homo sapien
acttggggagataagacgattggtacgccaaga

SEQ ID NO: 638672 - DNA, 33 bp, Homo sapien
acttggggagataagatgattggtacgccaaga

SEQ ID NO: 638673 - DNA, 33 bp, Homo sapien
ctgggagcctggaaataatattcacaccacata

SEQ ID NO: 638674 - DNA, 33 bp, Homo sapien
ctgggagcctggaaatgatattcacaccacata

SEQ ID NO: 638675 - DNA, 33 bp, Homo sapien
aaatgtaatcagtgaacagaaagcctggttcat

SEQ ID NO: 638676 - DNA, 33 bp, Homo sapien
aaatgtaatcagtgaagagaaagcctggttcat

SEQ ID NO: 638677 - DNA, 33 bp, Homo sapien
attttgccacctcatcgcttcctgtatcttgtc

SEQ ID NO: 638678 - DNA, 33 bp, Homo sapien
attttgccacctcatctcttcctgtatcttgtc

SEQ ID NO: 638679 - DNA, 33 bp, Homo sapien
caaatacaaataatgacagtccgttcctaaagc

SEQ ID NO: 638680 - DNA, 33 bp, Homo sapien
caaatacaaataatgatagtccgttcctaaagc

SEQ ID NO: 638681 - DNA, 33 bp, Homo sapien
cagttatggctgcaagcaaggtcatcataagtg

SEQ ID NO: 638682 - DNA, 33 bp, Homo sapien
cagttatggctgcaaggaaggtcatcataagtg

SEQ ID NO: 638683 - DNA, 33 bp, Homo sapien
ggaagaatagaggaacaaaaaagacatgagccc

SEQ ID NO: 638684 - DNA, 33 bp, Homo sapien
ggaagaatagaggaacgaaaaagacatgagccc

SEQ ID NO: 638685 - DNA, 33 bp, Homo sapien
gggctgcttgccaaatcaggaagaacatgaggg

SEQ ID NO: 638686 - DNA, 33 bp, Homo sapien
gggctgcttgccaaatgaggaagaacatgaggg

SEQ ID NO: 638687 - DNA, 33 bp, Homo sapien
ttgcagaagccataggacagttattgaatgaat

SEQ ID NO: 638688 - DNA, 33 bp, Homo sapien
ttgcagaagccatagggcagttattgaatgaat

SEQ ID NO: 638689 - DNA, 33 bp, Homo sapien
caagagatatacctgacctaactaatattctcc

SEQ ID NO: 638690 - DNA, 33 bp, Homo sapien
caagagatatacctgagctaactaatattctcc

SEQ ID NO: 638691 - DNA, 33 bp, Homo sapien
tcaagacaatttattcaatctgtttgacctcaa

SEQ ID NO: 638692 - DNA, 33 bp, Homo sapien
tcaagacaatttattctatctgtttgacctcaa

SEQ ID NO: 638693 - DNA, 33 bp, Homo sapien
tgtacagtaaataccacgagattccattatatt

SEQ ID NO: 638694 - DNA, 33 bp, Homo sapien
tgtacagtaaataccatgagattccattatatt

SEQ ID NO: 638695 - DNA, 33 bp, Homo sapien
aaaggatacgtgcaaaagtttgcagataaggat

SEQ ID NO: 638696 - DNA, 33 bp, Homo sapien
aaaggatacgtgcaaaggtttgcagataaggat

SEQ ID NO: 638697 - DNA, 33 bp, Homo sapien
aaaataagccaaaaagcatatgtagtgtatgat

SEQ ID NO: 638698 - DNA, 33 bp, Homo sapien
aaaataagccaaaaagtatatgtagtgtatgat

SEQ ID NO: 638699 - DNA, 33 bp, Homo sapien
gttcactgttcatggaaactcagattgtttgca

SEQ ID NO: 638700 - DNA, 33 bp, Homo sapien
gttcactgttcatggacactcagattgtttgca

SEQ ID NO: 638701 - DNA, 33 bp, Homo sapien
ttgcagttttggactactagaaataaaactgct

SEQ ID NO: 638702 - DNA, 33 bp, Homo sapien
ttgcagttttggactattagaaataaaactgct

SEQ ID NO: 638703 - DNA, 33 bp, Homo sapien
tagtaataatatgaaacatgatgattttgctga

SEQ ID NO: 638704 - DNA, 33 bp, Homo sapien
tagtaataatatgaaagatgatgattttgctga

SEQ ID NO: 638705 - DNA, 33 bp, Homo sapien
tgagtttcttatacagcaccccacaatagtata

SEQ ID NO: 638706 - DNA, 33 bp, Homo sapien
tgagtttcttatacagtaccccacaatagtata

SEQ ID NO: 638707 - DNA, 33 bp, Homo sapien
cacatcgtcccagttaagtcatctcagcaataa

SEQ ID NO: 638708 - DNA, 33 bp, Homo sapien
cacatcgtcccagttaggtcatctcagcaataa

SEQ ID NO: 638709 - DNA, 33 bp, Homo sapien
tcctcctttaagtcaaagatattaaactgtgtg

SEQ ID NO: 638710 - DNA, 33 bp, Homo sapien
tcctcctttaagtcaaggatattaaactgtgtg

SEQ ID NO: 638711 - DNA, 33 bp, Homo sapien
aagttgcatttccaacactatgattaattgaat

SEQ ID NO: 638712 - DNA, 33 bp, Homo sapien
aagttgcatttccaacgctatgattaattgaat

SEQ ID NO: 638713 - DNA, 33 bp, Homo sapien
tcctcagcactctgggaaagaaatgacgggtag

SEQ ID NO: 638714 - DNA, 33 bp, Homo sapien
tcctcagcactctgggcaagaaatgacgggtag

SEQ ID NO: 638715 - DNA, 33 bp, Homo sapien
ttctgaaaatgctgaacgttctataaatcactg

SEQ ID NO: 638716 - DNA, 33 bp, Homo sapien
ttctgaaaatgctgaatgttctataaatcactg

SEQ ID NO: 638717 - DNA, 33 bp, Homo sapien
gagaggaaatacaggagaagacagcccagactc

SEQ ID NO: 638718 - DNA, 33 bp, Homo sapien
gagaggaaatacaggataagacagcccagactc

SEQ ID NO: 638719 - DNA, 33 bp, Homo sapien
acagcccagactctgccatcaaagacaactgtg

SEQ ID NO: 638720 - DNA, 33 bp, Homo sapien
acagcccagactctgctatcaaagacaactgtg

SEQ ID NO: 638721 - DNA, 33 bp, Homo sapien
catcttccaacatttagaaggttcaccttgatg

SEQ ID NO: 638722 - DNA, 33 bp, Homo sapien
catcttccaacatttataaggttcaccttgatg

SEQ ID NO: 638723 - DNA, 33 bp, Homo sapien
ccttgtcaacctagataagaaattcagcccctt

SEQ ID NO: 638724 - DNA, 33 bp, Homo sapien
ccttgtcaacctagatgagaaattcagcccctt

SEQ ID NO: 638725 - DNA, 33 bp, Homo sapien
accagaccctgctgcacggataccagacaacac

SEQ ID NO: 638726 - DNA, 33 bp, Homo sapien
accagaccctgctgcatggataccagacaacac

SEQ ID NO: 638727 - DNA, 33 bp, Homo sapien
agaaggtgaagaaagaacaaagacacatcctac

SEQ ID NO: 638728 - DNA, 33 bp, Homo sapien
agaaggtgaagaaagagcaaagacacatcctac

SEQ ID NO: 638729 - DNA, 33 bp, Homo sapien; identical to SEQ ID NO: 638727

SEQ ID NO: 638730 - DNA, 33 bp, Homo sapien; identical to SEQ ID NO: 638728

SEQ ID NO: 638731 - DNA, 33 bp, Homo sapien
gctgcatcaaagagtacatcaaagaacagtagg

SEQ ID NO: 638732 - DNA, 33 bp, Homo sapien
gctgcatcaaagagtatatcaaagaacagtagg

SEQ ID NO: 638733 - DNA, 33 bp, Homo sapien
tccttttggataacataaatgcaagaatagatt

SEQ ID NO: 638734 - DNA, 33 bp, Homo sapien
tccttttggataacattaatgcaagaatagatt

SEQ ID NO: 638735 - DNA, 33 bp, Homo sapien
aagtgacagaaggtaacacagaagtaagaaaac

SEQ ID NO: 638736 - DNA, 33 bp, Homo sapien
aagtgacagaaggtaagacagaagtaagaaaac

SEQ ID NO: 638737 - DNA, 33 bp, Homo sapien
aagagtatcctattcaagaagtaggaatgcctt

SEQ ID NO: 638738 - DNA, 33 bp, Homo sapien
aagagtatcctattcaggaagtaggaatgcctt

SEQ ID NO: 638739 - DNA, 33 bp, Homo sapien
ttaaaactggggtgaccggaccagcaataagcc

SEQ ID NO: 638740 - DNA, 33 bp, Homo sapien
ttaaaactggggtgactggaccagcaataagcc

SEQ ID NO: 638741 - DNA, 33 bp, Homo sapien
ttaagactccttcagcactgtttcaattaatgt

SEQ ID NO: 638742 - DNA, 33 bp, Homo sapien
ttaagactccttcagcgctgtttcaattaatgt

SEQ ID NO: 638743 - DNA, 33 bp, Homo sapien
aatgaaatcaggcaaaatagtaaagaggcaatt

SEQ ID NO: 638744 - DNA, 33 bp, Homo sapien
aatgaaatcaggcaaagtagtaaagaggcaatt

SEQ ID NO: 638745 - DNA, 33 bp, Homo sapien
gtgagcaagcattcagaatttcagaagagggtt

SEQ ID NO: 638746 - DNA, 33 bp, Homo sapien
gtgagcaagcattcaggatttcagaagagggtt

SEQ ID NO: 638747 - DNA, 33 bp, Homo sapien
cacataatgtagctctcaatgtgtatcaaagac

SEQ ID NO: 638748 - DNA, 33 bp, Homo sapien
cacataatgtagctcttaatgtgtatcaaagac

SEQ ID NO: 638749 - DNA, 33 bp, Homo sapien
ttaagcataataccaaaagaactgttcttaact

SEQ ID NO: 638750 - DNA, 33 bp, Homo sapien
ttaagcataataccaagagaactgttcttaact

SEQ ID NO: 638751 - DNA, 33 bp, Homo sapien
gtggctgtcagctcagcccaaacgaagcaacca

SEQ ID NO: 638752 - DNA, 33 bp, Homo sapien
gtggctgtcagctcagtccaaacgaagcaacca

SEQ ID NO: 638753 - DNA, 33 bp, Homo sapien
tagcttgctcttactacgaatggttttaacaag

SEQ ID NO: 638754 - DNA, 33 bp, Homo sapien
tagcttgctcttactatgaatggttttaacaag

SEQ ID NO: 638755 - DNA, 33 bp, Homo sapien
gcaagaaataaacctcgaatgtttggcgtgtat

SEQ ID NO: 638756 - DNA, 33 bp, Homo sapien
gcaagaaataaacctctaatgtttggcgtgtat

SEQ ID NO: 638757 - DNA, 33 bp, Homo sapien
gaacccaattgttggccctggtaggaagaataa

SEQ ID NO: 638758 - DNA, 33 bp, Homo sapien
gaacccaattgttggctctggtaggaagaataa

SEQ ID NO: 638759 - DNA, 33 bp, Homo sapien
taatacataaatgccaaaagtccactctgctct

SEQ ID NO: 638760 - DNA, 33 bp, Homo sapien
taatacataaatgccagaagtccactctgctct

SEQ ID NO: 638761 - DNA, 33 bp, Homo sapien
aaatattcgagtaaaaaatctgaaagagacctg

SEQ ID NO: 638762 - DNA, 33 bp, Homo sapien
aaatattcgagtaaaagatctgaaagagacctg

SEQ ID NO: 638763 - DNA, 33 bp, Homo sapien
tcccctcaaaggactacgaaaatctagtaccta

SEQ ID NO: 638764 - DNA, 33 bp, Homo sapien
tcccctcaaaggactatgaaaatctagtaccta

SEQ ID NO: 638765 - DNA, 33 bp, Homo sapien
taggctcttctgtcataatttggaccttaaggg

SEQ ID NO: 638766 - DNA, 33 bp, Homo sapien
taggctcttctgtcatgatttggaccttaaggg

SEQ ID NO: 638767 - DNA, 33 bp, Homo sapien
ttttacaaggagcataaggctgtaaaaatgctc

SEQ ID NO: 638768 - DNA, 33 bp, Homo sapien
ttttacaaggagcatacggctgtaaaaatgctc

SEQ ID NO: 638769 - DNA, 33 bp, Homo sapien
tgtgaacgtgcatccaaggttgtatctatgaag

SEQ ID NO: 638770 - DNA, 33 bp, Homo sapien
tgtgaacgtgcatccagggttgtatctatgaag

SEQ ID NO: 638771 - DNA, 33 bp, Homo sapien
agtaaggtgatggtaacgttgaggctacccgcc

SEQ ID NO: 638772 - DNA, 33 bp, Homo sapien
agtaaggtgatggtaatgttgaggctacccgcc

SEQ ID NO: 638773 - DNA, 33 bp, Homo sapien
gatggtaacactagaacggtgactaaattcaga

SEQ ID NO: 638774 - DNA, 33 bp, Homo sapien
gatggtaacactagaatggtgactaaattcaga

SEQ ID NO: 638775 - DNA, 33 bp, Homo sapien
tgtgtgttacacacaaatattaggctattttct

SEQ ID NO: 638776 - DNA, 33 bp, Homo sapien
tgtgtgttacacacaagtattaggctattttct

SEQ ID NO: 638777 - DNA, 33 bp, Homo sapien
ctaagcatttcaagccagaatagtcttatattt

SEQ ID NO: 638778 - DNA, 33 bp, Homo sapien
ctaagcatttcaagcccgaatagtcttatattt

SEQ ID NO: 638779 - DNA, 33 bp, Homo sapien
caatctcgtctttgaagcagtatttttctttat

SEQ ID NO: 638780 - DNA, 33 bp, Homo sapien
caatctcgtctttgaatcagtatttttctttat

SEQ ID NO: 638781 - DNA, 33 bp, Homo sapien
attacagatttgaatgcaggtattggcaaggat

SEQ ID NO: 638782 - DNA, 33 bp, Homo sapien
attacagatttgaatggaggtattggcaaggat

SEQ ID NO: 638783 - DNA, 33 bp, Homo sapien
aaaagcaaaaaactcaataaaagacctctgcat

SEQ ID NO: 638784 - DNA, 33 bp, Homo sapien
aaaagcaaaaaactcagtaaaagacctctgcat

SEQ ID NO: 638785 - DNA, 33 bp, Homo sapien
gacctgaggtgggcaacaccagggtagctggag

SEQ ID NO: 638786 - DNA, 33 bp, Homo sapien
gacctgaggtgggcaataccagggtagctggag

SEQ ID NO: 638787 - DNA, 33 bp, Homo sapien
tgtcaggccagggaaactgggaagacataatgg

SEQ ID NO: 638788 - DNA, 33 bp, Homo sapien
tgtcaggccagggaaattgggaagacataatgg

SEQ ID NO: 638789 - DNA, 33 bp, Homo sapien
ttatcgaggcaaagtcacaatggggtgcaggaa

SEQ ID NO: 638790 - DNA, 33 bp, Homo sapien
ttatcgaggcaaagtcgcaatggggtgcaggaa

SEQ ID NO: 638791 - DNA, 33 bp, Homo sapien
ggtttagagtctactacgataagattaatccta

SEQ ID NO: 638792 - DNA, 33 bp, Homo sapien
ggtttagagtctactatgataagattaatccta

SEQ ID NO: 638793 - DNA, 33 bp, Homo sapien
ccaaacaatgtacccccctccagagcaagctgg

SEQ ID NO: 638794 - DNA, 33 bp, Homo sapien
ccaaacaatgtacccctctccagagcaagctgg

SEQ ID NO: 638795 - DNA, 33 bp, Homo sapien
taatgttttctgtttcacttccaagaaaaacac

SEQ ID NO: 638796 - DNA, 33 bp, Homo sapien
taatgttttctgtttcgcttccaagaaaaacac

SEQ ID NO: 638797 - DNA, 33 bp, Homo sapien
cacaccttaatgagaactataaatcacacacga

SEQ ID NO: 638798 - DNA, 33 bp, Homo sapien
cacaccttaatgagaattataaatcacacacga

SEQ ID NO: 638799 - DNA, 33 bp, Homo sapien
ctctgaagtaaatacaatcttagctccattttg

SEQ ID NO: 638800 - DNA, 33 bp, Homo sapien
ctctgaagtaaatacagtcttagctccattttg

SEQ ID NO: 638801 - DNA, 33 bp, Homo sapien
gctaatgagaatgtaaaaatcactcacagaaca

SEQ ID NO: 638802 - DNA, 33 bp, Homo sapien
gctaatgagaatgtaataatcactcacagaaca

SEQ ID NO: 638803 - DNA, 33 bp, Homo sapien
tattaaatttgtgatacagccaacgcatgccta

SEQ ID NO: 638804 - DNA, 33 bp, Homo sapien
tattaaatttgtgatatagccaacgcatgccta

SEQ ID NO: 638805 - DNA, 33 bp, Homo sapien
tgggatttgaaagcagacaaccctgagcttgca

SEQ ID NO: 638806 - DNA, 33 bp, Homo sapien
tgggatttgaaagcaggcaaccctgagcttgca

SEQ ID NO: 638807 - DNA, 33 bp, Homo sapien
gaagttaaacaaagaactccactcacatctgtt

SEQ ID NO: 638808 - DNA, 33 bp, Homo sapien
gaagttaaacaaagaattccactcacatctgtt

SEQ ID NO: 638809 - DNA, 33 bp, Homo sapien
gatccaaacacttagacggctacaaaactaatt

SEQ ID NO: 638810 - DNA, 33 bp, Homo sapien
gatccaaacacttagatggctacaaaactaatt

SEQ ID NO: 638811 - DNA, 33 bp, Homo sapien
ccaagccattttataactgtaaactcaggctct

SEQ ID NO: 638812 - DNA, 33 bp, Homo sapien
ccaagccattttataattgtaaactcaggctct

SEQ ID NO: 638813 - DNA, 33 bp, Homo sapien
gattatgcaggattaacaaaaaaactgtgttta

SEQ ID NO: 638814 - DNA, 33 bp, Homo sapien
gattatgcaggattaagaaaaaaactgtgttta

SEQ ID NO: 638815 - DNA, 33 bp, Homo sapien
caaactacagagaaaacgtttacagactccaca

SEQ ID NO: 638816 - DNA, 33 bp, Homo sapien
caaactacagagaaaatgtttacagactccaca

SEQ ID NO: 638817 - DNA, 33 bp, Homo sapien
catgctgattactaaactcaaacaccatctccc

SEQ ID NO: 638818 - DNA, 33 bp, Homo sapien
catgctgattactaaattcaaacaccatctccc

SEQ ID NO: 638819 - DNA, 33 bp, Homo sapien
aggattatctcattcaatacacacaacaaactt

SEQ ID NO: 638820 - DNA, 33 bp, Homo sapien
aggattatctcattcagtacacacaacaaactt

SEQ ID NO: 638821 - DNA, 33 bp, Homo sapien
tgtttgctacaaaccacgctgtcacaaatatct

SEQ ID NO: 638822 - DNA, 33 bp, Homo sapien
tgtttgctacaaaccatgctgtcacaaatatct

SEQ ID NO: 638823 - DNA, 33 bp, Homo sapien
aagttacatttgaagacagcaattttttaaatt

SEQ ID NO: 638824 - DNA, 33 bp, Homo sapien
aagttacatttgaagagagcaattttttaaatt

SEQ ID NO: 638825 - DNA, 33 bp, Homo sapien
ttgctttgggaatttgacaaaagacagtccaat

SEQ ID NO: 638826 - DNA, 33 bp, Homo sapien
ttgctttgggaatttgtcaaaagacagtccaat

SEQ ID NO: 638827 - DNA, 33 bp, Homo sapien
cagtggaccatgctcaaatagaaacgaggatgt

SEQ ID NO: 638828 - DNA, 33 bp, Homo sapien
cagtggaccatgctcagatagaaacgaggatgt

SEQ ID NO: 638829 - DNA, 33 bp, Homo sapien
accaagataggctgaacgatagatcgcaacagg

SEQ ID NO: 638830 - DNA, 33 bp, Homo sapien
accaagataggctgaatgatagatcgcaacagg

SEQ ID NO: 638831 - DNA, 33 bp, Homo sapien
aggtgggagagggtcaagatcagctaatgatgg

SEQ ID NO: 638832 - DNA, 33 bp, Homo sapien
aggtgggagagggtcaggatcagctaatgatgg

SEQ ID NO: 638833 - DNA, 33 bp, Homo sapien
tcattgtaagttttcaataaagaattagccatc

SEQ ID NO: 638834 - DNA, 33 bp, Homo sapien
tcattgtaagttttcagtaaagaattagccatc

SEQ ID NO: 638835 - DNA, 33 bp, Homo sapien
aataatggcctaaaaaattctctatgatctcac

SEQ ID NO: 638836 - DNA, 33 bp, Homo sapien
aataatggcctaaaaagttctctatgatctcac

SEQ ID NO: 638837 - DNA, 33 bp, Homo sapien
atacaatgcactcctaccctgtaagctgcttta

SEQ ID NO: 638838 - DNA, 33 bp, Homo sapien
atacaatgcactcctatcctgtaagctgcttta

SEQ ID NO: 638839 - DNA, 33 bp, Homo sapien
aggtagacactggagaaataaagaccaaaggag

SEQ ID NO: 638840 - DNA, 33 bp, Homo sapien
aggtagacactggagagataaagaccaaaggag

SEQ ID NO: 638841 - DNA, 33 bp, Homo sapien
ttccatgccacagttccctgagagctaacatga

SEQ ID NO: 638842 - DNA, 33 bp, Homo sapien
ttccatgccacagttcgctgagagctaacatga

SEQ ID NO: 638843 - DNA, 33 bp, Homo sapien
tgtatgtaacagacacaaaatcaacagtgtgta

SEQ ID NO: 638844 - DNA, 33 bp, Homo sapien
tgtatgtaacagacaccaaatcaacagtgtgta

SEQ ID NO: 638845 - DNA, 33 bp, Homo sapien
taagcttcaaggatggaactctaacactgctag

SEQ ID NO: 638846 - DNA, 33 bp, Homo sapien
taagcttcaaggatgggactctaacactgctag

SEQ ID NO: 638847 - DNA, 33 bp, Homo sapien
aaatattagagttgtaacattgcttccttcttt

SEQ ID NO: 638848 - DNA, 33 bp, Homo sapien
aaatattagagttgtagcattgcttccttcttt

SEQ ID NO: 638849 - DNA, 33 bp, Homo sapien
gggcgggctgcaacggaaacttgtacattagtt

SEQ ID NO: 638850 - DNA, 33 bp, Homo sapien
gggcgggctgcaacggcaacttgtacattagtt

SEQ ID NO: 638851 - DNA, 33 bp, Homo sapien
gtttgtcagaagtgacacattatgaggggatgc

SEQ ID NO: 638852 - DNA, 33 bp, Homo sapien
gtttgtcagaagtgacgcattatgaggggatgc

SEQ ID NO: 638853 - DNA, 33 bp, Homo sapien
tttgcataagagatgcacttaaaacagcacaga

SEQ ID NO: 638854 - DNA, 33 bp, Homo sapien
tttgcataagagatgcgcttaaaacagcacaga

SEQ ID NO: 638855 - DNA, 33 bp, Homo sapien
attacacaaaacctatgaattcatctcataatt

SEQ ID NO: 638856 - DNA, 33 bp, Homo sapien
attacacaaaacctattaattcatctcataatt

SEQ ID NO: 638857 - DNA, 33 bp, Homo sapien
aacaccaaagtgctccagaatagatacttttag

SEQ ID NO: 638858 - DNA, 33 bp, Homo sapien
aacaccaaagtgctcctgaatagatacttttag

SEQ ID NO: 638859 - DNA, 33 bp, Homo sapien
attggctattaactaaaccatgtactattaaca

SEQ ID NO: 638860 - DNA, 33 bp, Homo sapien
attggctattaactaatccatgtactattaaca

SEQ ID NO: 638861 - DNA, 33 bp, Homo sapien
cctacctataatccacactgttacagaaggcag

SEQ ID NO: 638862 - DNA, 33 bp, Homo sapien
cctacctataatccacgctgttacagaaggcag

SEQ ID NO: 638863 - DNA, 33 bp, Homo sapien
ccaagtgagatatgcaaaaggagcaagattcca

SEQ ID NO: 638864 - DNA, 33 bp, Homo sapien
ccaagtgagatatgcagaaggagcaagattcca

SEQ ID NO: 638865 - DNA, 33 bp, Homo sapien
gtgagccctaaaatcaatcagtaattaatagaa

SEQ ID NO: 638866 - DNA, 33 bp, Homo sapien
gtgagccctaaaatcagtcagtaattaatagaa

SEQ ID NO: 638867 - DNA, 33 bp, Homo sapien
cctgcttattaatagacgtagaggctatcaata

SEQ ID NO: 638868 - DNA, 33 bp, Homo sapien
cctgcttattaatagatgtagaggctatcaata

SEQ ID NO: 638869 - DNA, 33 bp, Homo sapien
tgtctgtcatccatgaaaaataaaaatcaacca

SEQ ID NO: 638870 - DNA, 33 bp, Homo sapien
tgtctgtcatccatgagaaataaaaatcaacca

SEQ ID NO: 638871 - DNA, 33 bp, Homo sapien
tttctgtaccataataactgaatttgaggaaac

SEQ ID NO: 638872 - DNA, 33 bp, Homo sapien
tttctgtaccataatacctgaatttgaggaaac

SEQ ID NO: 638873 - DNA, 33 bp, Homo sapien
tctttccattcctacaatgcttctttctttctt

SEQ ID NO: 638874 - DNA, 33 bp, Homo sapien
tctttccattcctacagtgcttctttctttctt

SEQ ID NO: 638875 - DNA, 33 bp, Homo sapien
aaaattgttgttctcaaggagtttaagattcta

SEQ ID NO: 638876 - DNA, 33 bp, Homo sapien
aaaattgttgttctcagggagtttaagattcta

SEQ ID NO: 638877 - DNA, 33 bp, Homo sapien
catgttgaatctaccacaggggctagtgcaatg

SEQ ID NO: 638878 - DNA, 33 bp, Homo sapien
catgttgaatctaccataggggctagtgcaatg

SEQ ID NO: 638879 - DNA, 33 bp, Homo sapien
tggggccattgagatacgtggtcagtgtaaagt

SEQ ID NO: 638880 - DNA, 33 bp, Homo sapien
tggggccattgagatatgtggtcagtgtaaagt

SEQ ID NO: 638881 - DNA, 33 bp, Homo sapien
attcaccagttaaaggacagtagaattgttctc

SEQ ID NO: 638882 - DNA, 33 bp, Homo sapien
attcaccagttaaagggcagtagaattgttctc

SEQ ID NO: 638883 - DNA, 33 bp, Homo sapien
caagtgggctgtccagaagagtgtgggatctat

SEQ ID NO: 638884 - DNA, 33 bp, Homo sapien
caagtgggctgtccagcagagtgtgggatctat

SEQ ID NO: 638885 - DNA, 33 bp, Homo sapien
ctgcttttatgccacagtgggagtgttgagtag

SEQ ID NO: 638886 - DNA, 33 bp, Homo sapien
ctgcttttatgccacattgggagtgttgagtag

SEQ ID NO: 638887 - DNA, 33 bp, Homo sapien
aggccctgtggcagaactggtacctgcattttc

SEQ ID NO: 638888 - DNA, 33 bp, Homo sapien
aggccctgtggcagaagtggtacctgcattttc

SEQ ID NO: 638889 - DNA, 33 bp, Homo sapien
gatttagctttttctagtactatcaactctata

SEQ ID NO: 638890 - DNA, 33 bp, Homo sapien
gatttagctttttctattactatcaactctata

SEQ ID NO: 638891 - DNA, 33 bp, Homo sapien
aaggacaagtaagtaaagatgttgataattgga

SEQ ID NO: 638892 - DNA, 33 bp, Homo sapien
aaggacaagtaagtaacgatgttgataattgga

SEQ ID NO: 638893 - DNA, 33 bp, Homo sapien
gaatcatttggtcataccataaatttaactttt

SEQ ID NO: 638894 - DNA, 33 bp, Homo sapien
gaatcatttggtcatatcataaatttaactttt

SEQ ID NO: 638895 - DNA, 33 bp, Homo sapien
gagttccatcattattaaactgtgcctccctgg

SEQ ID NO: 638896 - DNA, 33 bp, Homo sapien
gagttccatcattatttaactgtgcctccctgg

SEQ ID NO: 638897 - DNA, 33 bp, Homo sapien
gtaatagtccaggcaaagagttttgtgccaaat

SEQ ID NO: 638898 - DNA, 33 bp, Homo sapien
gtaatagtccaggcaaggagttttgtgccaaat

SEQ ID NO: 638899 - DNA, 33 bp, Homo sapien
aacattatgaggagtacaaaaacaaatcaaaag

SEQ ID NO: 638900 - DNA, 33 bp, Homo sapien
aacattatgaggagtagaaaaacaaatcaaaag

SEQ ID NO: 638901 - DNA, 33 bp, Homo sapien
tagcaacgaattcttacgcttttgatttgtttt

SEQ ID NO: 638902 - DNA, 33 bp, Homo sapien
tagcaacgaattcttaggcttttgatttgtttt

SEQ ID NO: 638903 - DNA, 33 bp, Homo sapien
aagaattcgttgctagacatgaaagtcctctgt

SEQ ID NO: 638904 - DNA, 33 bp, Homo sapien
aagaattcgttgctagccatgaaagtcctctgt

SEQ ID NO: 638905 - DNA, 33 bp, Homo sapien
caacttgagagttacaaagaattggtttaaccc

SEQ ID NO: 638906 - DNA, 33 bp, Homo sapien
caacttgagagttacagagaattggtttaaccc

SEQ ID NO: 638907 - DNA, 33 bp, Homo sapien
aataaaattaaagccaaaggtgatcagggcttc

SEQ ID NO: 638908 - DNA, 33 bp, Homo sapien
aataaaattaaagccataggtgatcagggcttc

SEQ ID NO: 638909 - DNA, 33 bp, Homo sapien
acccttatttacatgacagaaatgaaaacaagt

SEQ ID NO: 638910 - DNA, 33 bp, Homo sapien
acccttatttacatgagagaaatgaaaacaagt

SEQ ID NO: 638911 - DNA, 33 bp, Homo sapien
ggtcatcaaactaaaactcccctctactgcaga

SEQ ID NO: 638912 - DNA, 33 bp, Homo sapien
ggtcatcaaactaaaattcccctctactgcaga

SEQ ID NO: 638913 - DNA, 33 bp, Homo sapien
aaaatcaagatgatggaatttaaacctaagctt

SEQ ID NO: 638914 - DNA, 33 bp, Homo sapien
aaaatcaagatgatggcatttaaacctaagctt

SEQ ID NO: 638915 - DNA, 33 bp, Homo sapien
acactctgtggggacactgatcatatcaacaaa

SEQ ID NO: 638916 - DNA, 33 bp, Homo sapien
acactctgtggggacattgatcatatcaacaaa

SEQ ID NO: 638917 - DNA, 33 bp, Homo sapien
tatagctttcttgtccaaagttttgggcatcat

SEQ ID NO: 638918 - DNA, 33 bp, Homo sapien
tatagctttcttgtccgaagttttgggcatcat

SEQ ID NO: 638919 - DNA, 33 bp, Homo sapien
cacctattagcctaaactgctggagtccaggac

SEQ ID NO: 638920 - DNA, 33 bp, Homo sapien
cacctattagcctaaattgctggagtccaggac

SEQ ID NO: 638921 - DNA, 33 bp, Homo sapien
gttgatatgttgtgaaagatatggaagatggag

SEQ ID NO: 638922 - DNA, 33 bp, Homo sapien
gttgatatgttgtgaaggatatggaagatggag

SEQ ID NO: 638923 - DNA, 33 bp, Homo sapien
tccatcaccatgataactacaatttattgccgg

SEQ ID NO: 638924 - DNA, 33 bp, Homo sapien
tccatcaccatgataagtacaatttattgccgg

SEQ ID NO: 638925 - DNA, 33 bp, Homo sapien
tgagacactttgaaaacggacaccagacttcac

SEQ ID NO: 638926 - DNA, 33 bp, Homo sapien
tgagacactttgaaaatggacaccagacttcac

SEQ ID NO: 638927 - DNA, 33 bp, Homo sapien
cattttacttgcataaggtttagaattgaaaag

SEQ ID NO: 638928 - DNA, 33 bp, Homo sapien
cattttacttgcataatgtttagaattgaaaag

SEQ ID NO: 638929 - DNA, 33 bp, Homo sapien
cattaacaccgaattcacagctaagagccctgt

SEQ ID NO: 638930 - DNA, 33 bp, Homo sapien
cattaacaccgaattcgcagctaagagccctgt

SEQ ID NO: 638931 - DNA, 33 bp, Homo sapien
aactgaaactcatgaactgtaatgatgttaata

SEQ ID NO: 638932 - DNA, 33 bp, Homo sapien
aactgaaactcatgaattgtaatgatgttaata

SEQ ID NO: 638933 - DNA, 33 bp, Homo sapien
aacttcagtcatcgaaccttaatttaggtgaac

SEQ ID NO: 638934 - DNA, 33 bp, Homo sapien
aacttcagtcatcgaatcttaatttaggtgaac

SEQ ID NO: 638935 - DNA, 33 bp, Homo sapien
agggacagcatccgtacactactctaagtggtg

SEQ ID NO: 638936 - DNA, 33 bp, Homo sapien
agggacagcatccgtatactactctaagtggtg

SEQ ID NO: 638937 - DNA, 33 bp, Homo sapien
aatatggtacacctcaacaaattatctatttaa

SEQ ID NO: 638938 - DNA, 33 bp, Homo sapien
aatatggtacacctcaccaaattatctatttaa

SEQ ID NO: 638939 - DNA, 33 bp, Homo sapien
gtctagtgttcaagaacgcaacaggagatgaca

SEQ ID NO: 638940 - DNA, 33 bp, Homo sapien
gtctagtgttcaagaatgcaacaggagatgaca

SEQ ID NO: 638941 - DNA, 33 bp, Homo sapien
gacattccttataagacggttgagatagcctct

SEQ ID NO: 638942 - DNA, 33 bp, Homo sapien
gacattccttataagatggttgagatagcctct

SEQ ID NO: 638943 - DNA, 33 bp, Homo sapien
aataatatgtgaataacacttagtgcaaggcca

SEQ ID NO: 638944 - DNA, 33 bp, Homo sapien
aataatatgtgaataagacttagtgcaaggcca

SEQ ID NO: 638945 - DNA, 33 bp, Homo sapien
acattcaattgcagaaaccctaatttatggctt

SEQ ID NO: 638946 - DNA, 33 bp, Homo sapien
acattcaattgcagaatccctaatttatggctt

SEQ ID NO: 638947 - DNA, 33 bp, Homo sapien
tgcccttcttgactaaagagtccgttttaaata

SEQ ID NO: 638948 - DNA, 33 bp, Homo sapien
tgcccttcttgactaaggagtccgttttaaata

SEQ ID NO: 638949 - DNA, 33 bp, Homo sapien
catcatccacaaaaaaactaacactgtacctag

SEQ ID NO: 638950 - DNA, 33 bp, Homo sapien
catcatccacaaaaaatctaacactgtacctag

SEQ ID NO: 638951 - DNA, 33 bp, Homo sapien
acaactccaaatgagactcctttgcaacacagt

SEQ ID NO: 638952 - DNA, 33 bp, Homo sapien
acaactccaaatgagattcctttgcaacacagt

SEQ ID NO: 638953 - DNA, 33 bp, Homo sapien
tactgtcctacttcaaatgaatgacttaattat

SEQ ID NO: 638954 - DNA, 33 bp, Homo sapien
tactgtcctacttcaattgaatgacttaattat

SEQ ID NO: 638955 - DNA, 33 bp, Homo sapien
cagaaactctaccaaacctttgaaaatcacaca

SEQ ID NO: 638956 - DNA, 33 bp, Homo sapien
cagaaactctaccaaatctttgaaaatcacaca

SEQ ID NO: 638957 - DNA, 33 bp, Homo sapien
tgtggatggtgtcctacagaaattacagctttc

SEQ ID NO: 638958 - DNA, 33 bp, Homo sapien
tgtggatggtgtcctagagaaattacagctttc

SEQ ID NO: 638959 - DNA, 33 bp, Homo sapien
tctatgggtcttgccaaaagagcactttgattt

SEQ ID NO: 638960 - DNA, 33 bp, Homo sapien
tctatgggtcttgccacaagagcactttgattt

SEQ ID NO: 638961 - DNA, 33 bp, Homo sapien
agcactttgatttctaacattctatttccaacc

SEQ ID NO: 638962 - DNA, 33 bp, Homo sapien
agcactttgatttctatcattctatttccaacc

SEQ ID NO: 638963 - DNA, 33 bp, Homo sapien
taagtgtcatgcccggaactaggtacagcctaa

SEQ ID NO: 638964 - DNA, 33 bp, Homo sapien
taagtgtcatgcccggtactaggtacagcctaa

SEQ ID NO: 638965 - DNA, 33 bp, Homo sapien
gctcactagatgtgccaagtgaatggatagata

SEQ ID NO: 638966 - DNA, 33 bp, Homo sapien
gctcactagatgtgccgagtgaatggatagata

SEQ ID NO: 638967 - DNA, 33 bp, Homo sapien
agacgccttgatgaggcacatttagagtgagat

SEQ ID NO: 638968 - DNA, 33 bp, Homo sapien
agacgccttgatgaggtacatttagagtgagat

SEQ ID NO: 638969 - DNA, 33 bp, Homo sapien
caccacgcctggcttagatctcactctaaatgt

SEQ ID NO: 638970 - DNA, 33 bp, Homo sapien
caccacgcctggcttatatctcactctaaatgt

SEQ ID NO: 638971 - DNA, 33 bp, Homo sapien
taagatgtcaaggattcaagtcggggtgggata

SEQ ID NO: 638972 - DNA, 33 bp, Homo sapien
taagatgtcaaggattgaagtcggggtgggata

SEQ ID NO: 638973 - DNA, 33 bp, Homo sapien
cagtgggggtggtaatcagaattcatttcttct

SEQ ID NO: 638974 - DNA, 33 bp, Homo sapien
cagtgggggtggtaattagaattcatttcttct

SEQ ID NO: 638975 - DNA, 33 bp, Homo sapien
aggttacaactatatacgtttatggccttcagg

SEQ ID NO: 638976 - DNA, 33 bp, Homo sapien
aggttacaactatatatgtttatggccttcagg

SEQ ID NO: 638977 - DNA, 33 bp, Homo sapien
attcaccaaaacaaaacgaaagtgtctaagctt

SEQ ID NO: 638978 - DNA, 33 bp, Homo sapien
attcaccaaaacaaaatgaaagtgtctaagctt

SEQ ID NO: 638979 - DNA, 33 bp, Homo sapien
catctacatcttatcaacaaagtcaaataggga

SEQ ID NO: 638980 - DNA, 33 bp, Homo sapien
catctacatcttatcatcaaagtcaaataggga

SEQ ID NO: 638981 - DNA, 33 bp, Homo sapien
cagaaaccactgttaaaaagaactatatagtat

SEQ ID NO: 638982 - DNA, 33 bp, Homo sapien
cagaaaccactgttaagaagaactatatagtat

SEQ ID NO: 638983 - DNA, 33 bp, Homo sapien
gataattccatttacaaattgttcacacggagg

SEQ ID NO: 638984 - DNA, 33 bp, Homo sapien
gataattccatttacacattgttcacacggagg

SEQ ID NO: 638985 - DNA, 33 bp, Homo sapien
gggaaggggcagaggccatcaaattaggggata

SEQ ID NO: 638986 - DNA, 33 bp, Homo sapien
gggaaggggcagaggctatcaaattaggggata

SEQ ID NO: 638987 - DNA, 33 bp, Homo sapien
caatactcaaactcaagattacacagggtcaga

SEQ ID NO: 638988 - DNA, 33 bp, Homo sapien
caatactcaaactcaatattacacagggtcaga

SEQ ID NO: 638989 - DNA, 33 bp, Homo sapien
agtatttgtaggagaaccatatataaccacaag

SEQ ID NO: 638990 - DNA, 33 bp, Homo sapien
agtatttgtaggagaagcatatataaccacaag

SEQ ID NO: 638991 - DNA, 33 bp, Homo sapien
cgagtgtctaacatacaggggtcctatttacca

SEQ ID NO: 638992 - DNA, 33 bp, Homo sapien
cgagtgtctaacatactggggtcctatttacca

SEQ ID NO: 638993 - DNA, 33 bp, Homo sapien
ttgatttcattcttcccccttttcttggacgga

SEQ ID NO: 638994 - DNA, 33 bp, Homo sapien
ttgatttcattcttcctccttttcttggacgga

SEQ ID NO: 638995 - DNA, 33 bp, Homo sapien
tggtttcaaccatcctaagctctctcttacttc

SEQ ID NO: 638996 - DNA, 33 bp, Homo sapien
tggtttcaaccatcctgagctctctcttacttc

SEQ ID NO: 638997 - DNA, 33 bp, Homo sapien
tgcttaacaggctaggcaagtttacgcttaccc

SEQ ID NO: 638998 - DNA, 33 bp, Homo sapien
tgcttaacaggctagggaagtttacgcttaccc

SEQ ID NO: 638999 - DNA, 33 bp, Homo sapien
cctccttcgaagctgaaaaacccaagaggggcg

SEQ ID NO: 639000 - DNA, 33 bp, Homo sapien
cctccttcgaagctgacaaacccaagaggggcg

SEQ ID NO: 639001 - DNA, 33 bp, Homo sapien
ctaggatactgtcccaactgatctgatcagcta

SEQ ID NO: 639002 - DNA, 33 bp, Homo sapien
ctaggatactgtcccacctgatctgatcagcta

SEQ ID NO: 639003 - DNA, 33 bp, Homo sapien
tcaacaaaaattgtaaccaagattcaggaagac

SEQ ID NO: 639004 - DNA, 33 bp, Homo sapien
tcaacaaaaattgtaagcaagattcaggaagac

SEQ ID NO: 639005 - DNA, 33 bp, Homo sapien
caagtgtagaagaaaaatttaagaccactagga

SEQ ID NO: 639006 - DNA, 33 bp, Homo sapien
caagtgtagaagaaaagtttaagaccactagga

SEQ ID NO: 639007 - DNA, 33 bp, Homo sapien
ttcagaaattgctaagaagaattatgtatcttt

SEQ ID NO: 639008 - DNA, 33 bp, Homo sapien
ttcagaaattgctaagcagaattatgtatcttt

SEQ ID NO: 639009 - DNA, 33 bp, Homo sapien
ggctttatttttaggaaccctgtgttagtacca

SEQ ID NO: 639010 - DNA, 33 bp, Homo sapien
ggctttatttttaggatccctgtgttagtacca

SEQ ID NO: 639011 - DNA, 33 bp, Homo sapien
tgatactaagattccaatgcaaaggtttagtct

SEQ ID NO: 639012 - DNA, 33 bp, Homo sapien
tgatactaagattccagtgcaaaggtttagtct

SEQ ID NO: 639013 - DNA, 33 bp, Homo sapien
tgatcttaaccagcaactctcaaagtatgaacc

SEQ ID NO: 639014 - DNA, 33 bp, Homo sapien
tgatcttaaccagcaattctcaaagtatgaacc

SEQ ID NO: 639015 - DNA, 33 bp, Homo sapien
agggcagagagtgagacgtcagtgatgataagg

SEQ ID NO: 639016 - DNA, 33 bp, Homo sapien
agggcagagagtgagatgtcagtgatgataagg

SEQ ID NO: 639017 - DNA, 33 bp, Homo sapien
acctaaaggaaatacaaagagcagaggaacatg

SEQ ID NO: 639018 - DNA, 33 bp, Homo sapien
acctaaaggaaatacagagagcagaggaacatg

SEQ ID NO: 639019 - DNA, 33 bp, Homo sapien
tttatatagctttatacggcataccacattgct

SEQ ID NO: 639020 - DNA, 33 bp, Homo sapien
tttatatagctttatatggcataccacattgct

SEQ ID NO: 639021 - DNA, 33 bp, Homo sapien
tgcctgttagtggaaaaaaagaatgtgccatgg

SEQ ID NO: 639022 - DNA, 33 bp, Homo sapien
tgcctgttagtggaaacaaagaatgtgccatgg

SEQ ID NO: 639023 - DNA, 33 bp, Homo sapien
agttaacaacacagccaaactgctcttgctccg

SEQ ID NO: 639024 - DNA, 33 bp, Homo sapien
agttaacaacacagccgaactgctcttgctccg

SEQ ID NO: 639025 - DNA, 33 bp, Homo sapien
ggtaccacaaccacaacgagctgattttgccaa

SEQ ID NO: 639026 - DNA, 33 bp, Homo sapien
ggtaccacaaccacaatgagctgattttgccaa

SEQ ID NO: 639027 - DNA, 33 bp, Homo sapien
gagaggtccaattgctaaaagtacatatagctg

SEQ ID NO: 639028 - DNA, 33 bp, Homo sapien
gagaggtccaattgctgaaagtacatatagctg

SEQ ID NO: 639029 - DNA, 33 bp, Homo sapien
ttttgtgtactttggaagagtggttaagttcaa

SEQ ID NO: 639030 - DNA, 33 bp, Homo sapien
ttttgtgtactttggaggagtggttaagttcaa

SEQ ID NO: 639031 - DNA, 33 bp, Homo sapien
aaatttgagttacttcacgctttgcattcgtat

SEQ ID NO: 639032 - DNA, 33 bp, Homo sapien
aaatttgagttacttcgcgctttgcattcgtat

SEQ ID NO: 639033 - DNA, 33 bp, Homo sapien
ttcgctctcctcatcaagttcctggtataggga

SEQ ID NO: 639034 - DNA, 33 bp, Homo sapien
ttcgctctcctcatcaggttcctggtataggga

SEQ ID NO: 639035 - DNA, 33 bp, Homo sapien
acatacacagagcaaaagaacagggaccaggca

SEQ ID NO: 639036 - DNA, 33 bp, Homo sapien
acatacacagagcaaaggaacagggaccaggca

SEQ ID NO: 639037 - DNA, 33 bp, Homo sapien
cttcacttagctcgccactttaattcttccata

SEQ ID NO: 639038 - DNA, 33 bp, Homo sapien
cttcacttagctcgccgctttaattcttccata

SEQ ID NO: 639039 - DNA, 33 bp, Homo sapien
cctcttcctttctgggaaggctcaaaactgatg

SEQ ID NO: 639040 - DNA, 33 bp, Homo sapien
cctcttcctttctggggaggctcaaaactgatg

SEQ ID NO: 639041 - DNA, 33 bp, Homo sapien
agaagaatagaaaaaacacctgattaggctgga

SEQ ID NO: 639042 - DNA, 33 bp, Homo sapien
agaagaatagaaaaaatacctgattaggctgga

SEQ ID NO: 639043 - DNA, 33 bp, Homo sapien
ccacctaacaaaactcactgttctactactgcc

SEQ ID NO: 639044 - DNA, 33 bp, Homo sapien
ccacctaacaaaactcgctgttctactactgcc

SEQ ID NO: 639045 - DNA, 33 bp, Homo sapien
gatcatggggccagggacacactcaaaaggatg

SEQ ID NO: 639046 - DNA, 33 bp, Homo sapien
gatcatggggccagggtcacactcaaaaggatg

SEQ ID NO: 639047 - DNA, 33 bp, Homo sapien
ttctgttaaggaatacagctccttgcctccctg

SEQ ID NO: 639048 - DNA, 33 bp, Homo sapien
ttctgttaaggaatacggctccttgcctccctg

SEQ ID NO: 639049 - DNA, 33 bp, Homo sapien
gaccagagagtactcaactggtataagaaattc

SEQ ID NO: 639050 - DNA, 33 bp, Homo sapien
gaccagagagtactcacctggtataagaaattc

SEQ ID NO: 639051 - DNA, 33 bp, Homo sapien
gggattgcaaactccaagtctttagagtcaaga

SEQ ID NO: 639052 - DNA, 33 bp, Homo sapien
gggattgcaaactccaggtctttagagtcaaga

SEQ ID NO: 639053 - DNA, 33 bp, Homo sapien
gcagatctggaacaaccggtaagacctcttgca

SEQ ID NO: 639054 - DNA, 33 bp, Homo sapien
gcagatctggaacaactggtaagacctcttgca

SEQ ID NO: 639055 - DNA, 33 bp, Homo sapien
acacacagacatagagaaacgtataaataaata

SEQ ID NO: 639056 - DNA, 33 bp, Homo sapien
acacacagacatagaggaacgtataaataaata

SEQ ID NO: 639057 - DNA, 33 bp, Homo sapien
acatagggctgacatacgaattccactgtgggt

SEQ ID NO: 639058 - DNA, 33 bp, Homo sapien
acatagggctgacatatgaattccactgtgggt

SEQ ID NO: 639059 - DNA, 33 bp, Homo sapien
acagccagcagcagtccagctgattgaccacag

SEQ ID NO: 639060 - DNA, 33 bp, Homo sapien
acagccagcagcagtcgagctgattgaccacag

SEQ ID NO: 639061 - DNA, 33 bp, Homo sapien
aaccaccagcatccacaggccaccagtttgcaa

SEQ ID NO: 639062 - DNA, 33 bp, Homo sapien
aaccaccagcatccactggccaccagtttgcaa

SEQ ID NO: 639063 - DNA, 33 bp, Homo sapien
gaattcagaaagcacagtaaatggcagggcttc

SEQ ID NO: 639064 - DNA, 33 bp, Homo sapien
gaattcagaaagcacattaaatggcagggcttc

SEQ ID NO: 639065 - DNA, 33 bp, Homo sapien
caagtctgcctgctgacaaaaatccccatgaat

SEQ ID NO: 639066 - DNA, 33 bp, Homo sapien
caagtctgcctgctgagaaaaatccccatgaat

SEQ ID NO: 639067 - DNA, 33 bp, Homo sapien
aggctgtggtcactaaactgtaatgcatcttta

SEQ ID NO: 639068 - DNA, 33 bp, Homo sapien
aggctgtggtcactaatctgtaatgcatcttta

SEQ ID NO: 639069 - DNA, 33 bp, Homo sapien
tgcaccagactcggccaaaaatttctcaacttg

SEQ ID NO: 639070 - DNA, 33 bp, Homo sapien
tgcaccagactcggccgaaaatttctcaacttg

SEQ ID NO: 639071 - DNA, 33 bp, Homo sapien
aacatacacacatataaggcatctgtatattat

SEQ ID NO: 639072 - DNA, 33 bp, Homo sapien
aacatacacacatatatggcatctgtatattat

SEQ ID NO: 639073 - DNA, 33 bp, Homo sapien
aaggttccatgacaacagtaaacattcatattg

SEQ ID NO: 639074 - DNA, 33 bp, Homo sapien
aaggttccatgacaacggtaaacattcatattg

SEQ ID NO: 639075 - DNA, 33 bp, Homo sapien
ttgttgaatgtccttgcagctaaatctttgtcc

SEQ ID NO: 639076 - DNA, 33 bp, Homo sapien
ttgttgaatgtccttgtagctaaatctttgtcc

SEQ ID NO: 639077 - DNA, 33 bp, Homo sapien
tcacatatcttgcagtcaatcacttacatactt

SEQ ID NO: 639078 - DNA, 33 bp, Homo sapien
tcacatatcttgcagttaatcacttacatactt

SEQ ID NO: 639079 - DNA, 33 bp, Homo sapien
tttaatttttgctcacacctttatcacctcttc

SEQ ID NO: 639080 - DNA, 33 bp, Homo sapien
tttaatttttgctcacgcctttatcacctcttc

SEQ ID NO: 639081 - DNA, 33 bp, Homo sapien
ggtgcttccttcttcacggagcttttacgtgct

SEQ ID NO: 639082 - DNA, 33 bp, Homo sapien
ggtgcttccttcttcatggagcttttacgtgct

SEQ ID NO: 639083 - DNA, 33 bp, Homo sapien
tacttgcgtctcaactcaaaatgtcccctgtca

SEQ ID NO: 639084 - DNA, 33 bp, Homo sapien
tacttgcgtctcaacttaaaatgtcccctgtca

SEQ ID NO: 639085 - DNA, 33 bp, Homo sapien
tttggtcctaagtgcaaaaaaaatctaccctga

SEQ ID NO: 639086 - DNA, 33 bp, Homo sapien
tttggtcctaagtgcagaaaaaatctaccctga

SEQ ID NO: 639087 - DNA, 33 bp, Homo sapien
tgacctgtggatgtagacatatggtgcatctct

SEQ ID NO: 639088 - DNA, 33 bp, Homo sapien
tgacctgtggatgtagtcatatggtgcatctct

SEQ ID NO: 639089 - DNA, 33 bp, Homo sapien
ctgcacctggcctatagacatgaatttcttact

SEQ ID NO: 639090 - DNA, 33 bp, Homo sapien
ctgcacctggcctatatacatgaatttcttact

SEQ ID NO: 639091 - DNA, 33 bp, Homo sapien
gacagaaacctgctgaacttccaactggctggt

SEQ ID NO: 639092 - DNA, 33 bp, Homo sapien
gacagaaacctgctgatcttccaactggctggt

SEQ ID NO: 639093 - DNA, 33 bp, Homo sapien
acctctcaaaaaaataataatagctctctcata

SEQ ID NO: 639094 - DNA, 33 bp, Homo sapien
acctctcaaaaaaatagtaatagctctctcata

SEQ ID NO: 639095 - DNA, 33 bp, Homo sapien
ctgtctggtgttaataagtatcagtcattgctc

SEQ ID NO: 639096 - DNA, 33 bp, Homo sapien
ctgtctggtgttaatatgtatcagtcattgctc

SEQ ID NO: 639097 - DNA, 33 bp, Homo sapien
gtgacaaagggagacaatgccgcaaaaaaaaag

SEQ ID NO: 639098 - DNA, 33 bp, Homo sapien
gtgacaaagggagacactgccgcaaaaaaaaag

SEQ ID NO: 639099 - DNA, 33 bp, Homo sapien
gcttcaattaggtgcccatgcctaaggcaatca

SEQ ID NO: 639100 - DNA, 33 bp, Homo sapien
gcttcaattaggtgccgatgcctaaggcaatca

SEQ ID NO: 639101 - DNA, 33 bp, Homo sapien
aaactgttcctatccactgacctaattctttat

SEQ ID NO: 639102 - DNA, 33 bp, Homo sapien
aaactgttcctatccagtgacctaattctttat

SEQ ID NO: 639103 - DNA, 33 bp, Homo sapien
tttattctgggctttaaattgtcctgtctcagt

SEQ ID NO: 639104 - DNA, 33 bp, Homo sapien
tttattctgggctttacattgtcctgtctcagt

SEQ ID NO: 639105 - DNA, 33 bp, Homo sapien
ccaaacttgagaaataactccgctcccggtgaa

SEQ ID NO: 639106 - DNA, 33 bp, Homo sapien
ccaaacttgagaaatacctccgctcccggtgaa

SEQ ID NO: 639107 - DNA, 33 bp, Homo sapien
aataaaggaatgaataggattgggctcagggtc

SEQ ID NO: 639108 - DNA, 33 bp, Homo sapien
aataaaggaatgaatatgattgggctcagggtc

SEQ ID NO: 639109 - DNA, 33 bp, Homo sapien
tatgaaagccagagccaatcaatcaagtcttgt

SEQ ID NO: 639110 - DNA, 33 bp, Homo sapien
tatgaaagccagagcctatcaatcaagtcttgt

SEQ ID NO: 639111 - DNA, 33 bp, Homo sapien
tggggttgctgggctacgttgctttgaagaaaa

SEQ ID NO: 639112 - DNA, 33 bp, Homo sapien
tggggttgctgggctatgttgctttgaagaaaa

SEQ ID NO: 639113 - DNA, 33 bp, Homo sapien
tctttgcagaggtgtcacatggttcccagtttc

SEQ ID NO: 639114 - DNA, 33 bp, Homo sapien
tctttgcagaggtgtcgcatggttcccagtttc

SEQ ID NO: 639115 - DNA, 33 bp, Homo sapien
acctctgcaaagagtcaataggtagataaactt

SEQ ID NO: 639116 - DNA, 33 bp, Homo sapien
acctctgcaaagagtcgataggtagataaactt

SEQ ID NO: 639117 - DNA, 33 bp, Homo sapien
ataaaggaaaagcttaggtgttaataggacatg

SEQ ID NO: 639118 - DNA, 33 bp, Homo sapien
ataaaggaaaagcttatgtgttaataggacatg

SEQ ID NO: 639119 - DNA, 33 bp, Homo sapien
agatgcctcgacttacaagacctgatacaaatg

SEQ ID NO: 639120 - DNA, 33 bp, Homo sapien
agatgcctcgacttacgagacctgatacaaatg

SEQ ID NO: 639121 - DNA, 33 bp, Homo sapien
agatgaagcaacttgaagacagatatttggagg

SEQ ID NO: 639122 - DNA, 33 bp, Homo sapien
agatgaagcaacttgaggacagatatttggagg

SEQ ID NO: 639123 - DNA, 33 bp, Homo sapien
acagctagaatgatcacagtggccagtttggta

SEQ ID NO: 639124 - DNA, 33 bp, Homo sapien
acagctagaatgatcatagtggccagtttggta

SEQ ID NO: 639125 - DNA, 33 bp, Homo sapien
ttagtttcaaaattgccattttctatttccagt

SEQ ID NO: 639126 - DNA, 33 bp, Homo sapien
ttagtttcaaaattgcgattttctatttccagt

SEQ ID NO: 639127 - DNA, 33 bp, Homo sapien
taagaagaccgttggactatcacaagctaaaca

SEQ ID NO: 639128 - DNA, 33 bp, Homo sapien
taagaagaccgttggagtatcacaagctaaaca

SEQ ID NO: 639129 - DNA, 33 bp, Homo sapien
tggttcctgtctggtgaacagctaaatcctcat

SEQ ID NO: 639130 - DNA, 33 bp, Homo sapien
tggttcctgtctggtggacagctaaatcctcat

SEQ ID NO: 639131 - DNA, 33 bp, Homo sapien
atgatcagagtctaaacagatgaaaaagcttta

SEQ ID NO: 639132 - DNA, 33 bp, Homo sapien
atgatcagagtctaaatagatgaaaaagcttta

SEQ ID NO: 639133 - DNA, 33 bp, Homo sapien
tgatcatcctatggtaccagaactttaaggagg

SEQ ID NO: 639134 - DNA, 33 bp, Homo sapien
tgatcatcctatggtatcagaactttaaggagg

SEQ ID NO: 639135 - DNA, 33 bp, Homo sapien
aaataaaacaggggaacgggattatgagtttta

SEQ ID NO: 639136 - DNA, 33 bp, Homo sapien
aaataaaacaggggaatgggattatgagtttta

SEQ ID NO: 639137 - DNA, 33 bp, Homo sapien
cctgatttctcaggcaccgattagattttgagt

SEQ ID NO: 639138 - DNA, 33 bp, Homo sapien
cctgatttctcaggcagcgattagattttgagt

SEQ ID NO: 639139 - DNA, 33 bp, Homo sapien
cacttttctcagacaacgaaaacatcgtcaatg

SEQ ID NO: 639140 - DNA, 33 bp, Homo sapien
cacttttctcagacaatgaaaacatcgtcaatg

SEQ ID NO: 639141 - DNA, 33 bp, Homo sapien
gagtcacctatgtcacagcccatttcccatttc

SEQ ID NO: 639142 - DNA, 33 bp, Homo sapien
gagtcacctatgtcacggcccatttcccatttc

SEQ ID NO: 639143 - DNA, 33 bp, Homo sapien
ctgacaacaaatcatcgctacatgatcttttcc

SEQ ID NO: 639144 - DNA, 33 bp, Homo sapien
ctgacaacaaatcatctctacatgatcttttcc

SEQ ID NO: 639145 - DNA, 33 bp, Homo sapien
tcataggtgtcaaatacgaagatgaatcagcat

SEQ ID NO: 639146 - DNA, 33 bp, Homo sapien
tcataggtgtcaaatatgaagatgaatcagcat

SEQ ID NO: 639147 - DNA, 33 bp, Homo sapien
ttatgaaagtcataaacggcaataaatgtaaat

SEQ ID NO: 639148 - DNA, 33 bp, Homo sapien
ttatgaaagtcataaatggcaataaatgtaaat

SEQ ID NO: 639149 - DNA, 33 bp, Homo sapien
agctggaagccaaacgccaacatggtgatacag

SEQ ID NO: 639150 - DNA, 33 bp, Homo sapien
agctggaagccaaacgtcaacatggtgatacag

SEQ ID NO: 639151 - DNA, 33 bp, Homo sapien
aactgacagaattttacggagaaatgaagaaaa

SEQ ID NO: 639152 - DNA, 33 bp, Homo sapien
aactgacagaattttatggagaaatgaagaaaa

SEQ ID NO: 639153 - DNA, 33 bp, Homo sapien
tttaaaaagaaaccaactactaacagatgctac

SEQ ID NO: 639154 - DNA, 33 bp, Homo sapien
tttaaaaagaaaccaagtactaacagatgctac

SEQ ID NO: 639155 - DNA, 33 bp, Homo sapien
aaggagctaaaccataaaacaagctgcctttgc

SEQ ID NO: 639156 - DNA, 33 bp, Homo sapien
aaggagctaaaccatagaacaagctgcctttgc

SEQ ID NO: 639157 - DNA, 33 bp, Homo sapien
attttagctgccctgccacaaacacaaaacaaa

SEQ ID NO: 639158 - DNA, 33 bp, Homo sapien
attttagctgccctgcgacaaacacaaaacaaa

SEQ ID NO: 639159 - DNA, 33 bp, Homo sapien
acatgggaattttcaaagagtcttgattttaga

SEQ ID NO: 639160 - DNA, 33 bp, Homo sapien
acatgggaattttcaatgagtcttgattttaga

SEQ ID NO: 639161 - DNA, 33 bp, Homo sapien
taattcacatccaagaatatgaggctgctctcc

SEQ ID NO: 639162 - DNA, 33 bp, Homo sapien
taattcacatccaagagtatgaggctgctctcc

SEQ ID NO: 639163 - DNA, 33 bp, Homo sapien
cttggggcactacaaggaacatttctgccctga

SEQ ID NO: 639164 - DNA, 33 bp, Homo sapien
cttggggcactacaagtaacatttctgccctga

SEQ ID NO: 639165 - DNA, 33 bp, Homo sapien
tacagaagatctaggagagagtgtctctggaaa

SEQ ID NO: 639166 - DNA, 33 bp, Homo sapien
tacagaagatctaggatagagtgtctctggaaa

SEQ ID NO: 639167 - DNA, 33 bp, Homo sapien
tcagttaccagagtaccaatcatcctagttaac

SEQ ID NO: 639168 - DNA, 33 bp, Homo sapien
tcagttaccagagtactaatcatcctagttaac

SEQ ID NO: 639169 - DNA, 33 bp, Homo sapien
ggactgataaaacacccaagtgtggaatgcagc

SEQ ID NO: 639170 - DNA, 33 bp, Homo sapien
ggactgataaaacacctaagtgtggaatgcagc

SEQ ID NO: 639171 - DNA, 33 bp, Homo sapien
gcaactatataccagaactttggtgtcttcact

SEQ ID NO: 639172 - DNA, 33 bp, Homo sapien
gcaactatataccagacctttggtgtcttcact

SEQ ID NO: 639173 - DNA, 33 bp, Homo sapien
gctatacaaatctatacgtacgctgaattcaca

SEQ ID NO: 639174 - DNA, 33 bp, Homo sapien
gctatacaaatctatatgtacgctgaattcaca

SEQ ID NO: 639175 - DNA, 33 bp, Homo sapien
aagtgttggagtactgacaagataagaacaaat

SEQ ID NO: 639176 - DNA, 33 bp, Homo sapien
aagtgttggagtactggcaagataagaacaaat

SEQ ID NO: 639177 - DNA, 33 bp, Homo sapien
atgtgaaaaagcagtacgataccatcccctgaa

SEQ ID NO: 639178 - DNA, 33 bp, Homo sapien
atgtgaaaaagcagtatgataccatcccctgaa

SEQ ID NO: 639179 - DNA, 33 bp, Homo sapien
aaccttcctccctctgaatttgcccacttggca

SEQ ID NO: 639180 - DNA, 33 bp, Homo sapien
aaccttcctccctctgcatttgcccacttggca

SEQ ID NO: 639181 - DNA, 33 bp, Homo sapien
agcagcggttctccaccatgtgttctgcacact

SEQ ID NO: 639182 - DNA, 33 bp, Homo sapien
agcagcggttctccactatgtgttctgcacact

SEQ ID NO: 639183 - DNA, 33 bp, Homo sapien
atctagctctaatacaaaagcacacctgcccag

SEQ ID NO: 639184 - DNA, 33 bp, Homo sapien
atctagctctaatacacaagcacacctgcccag

SEQ ID NO: 639185 - DNA, 33 bp, Homo sapien
tccactgcagctgtaacgagattgaaactgtag

SEQ ID NO: 639186 - DNA, 33 bp, Homo sapien
tccactgcagctgtaatgagattgaaactgtag

SEQ ID NO: 639187 - DNA, 33 bp, Homo sapien
ggcactctgtatgtccggcaatctagcccatag

SEQ ID NO: 639188 - DNA, 33 bp, Homo sapien
ggcactctgtatgtcctgcaatctagcccatag

SEQ ID NO: 639189 - DNA, 33 bp, Homo sapien
aaacagaagtggatcacctgacagaccttttag

SEQ ID NO: 639190 - DNA, 33 bp, Homo sapien
aaacagaagtggatcagctgacagaccttttag

SEQ ID NO: 639191 - DNA, 33 bp, Homo sapien
agcagctgtcgatgaacggaggtactgttaaat

SEQ ID NO: 639192 - DNA, 33 bp, Homo sapien
agcagctgtcgatgaatggaggtactgttaaat

SEQ ID NO: 639193 - DNA, 33 bp, Homo sapien
tagacaacaaatagaaacttaagggcataagtc

SEQ ID NO: 639194 - DNA, 33 bp, Homo sapien
tagacaacaaatagaagcttaagggcataagtc

SEQ ID NO: 639195 - DNA, 33 bp, Homo sapien
ttggttaacagaaggacgcagaattttaagaaa

SEQ ID NO: 639196 - DNA, 33 bp, Homo sapien
ttggttaacagaaggatgcagaattttaagaaa

SEQ ID NO: 639197 - DNA, 33 bp, Homo sapien
gggcccagtactggcactgcacaggcagcccag

SEQ ID NO: 639198 - DNA, 33 bp, Homo sapien
gggcccagtactggcattgcacaggcagcccag

SEQ ID NO: 639199 - DNA, 33 bp, Homo sapien
gagtgagcaaccaagacggaagggacagtcaga

SEQ ID NO: 639200 - DNA, 33 bp, Homo sapien
gagtgagcaaccaagatggaagggacagtcaga

SEQ ID NO: 639201 - DNA, 33 bp, Homo sapien
atgtgtctcttattgcagaatacttgctcccca

SEQ ID NO: 639202 - DNA, 33 bp, Homo sapien
atgtgtctcttattgcggaatacttgctcccca

SEQ ID NO: 639203 - DNA, 33 bp, Homo sapien
tttagtgatgataacaaccataataaaagcaag

SEQ ID NO: 639204 - DNA, 33 bp, Homo sapien
tttagtgatgataacagccataataaaagcaag

SEQ ID NO: 639205 - DNA, 33 bp, Homo sapien
tcttttgctaaatatacgtggttctactgacaa

SEQ ID NO: 639206 - DNA, 33 bp, Homo sapien
tcttttgctaaatatatgtggttctactgacaa

SEQ ID NO: 639207 - DNA, 33 bp, Homo sapien
acaaaagacagtggcccatagaaagtcatgaac

SEQ ID NO: 639208 - DNA, 33 bp, Homo sapien
acaaaagacagtggcctatagaaagtcatgaac

SEQ ID NO: 639209 - DNA, 33 bp, Homo sapien
gggcagttttaaagaacgaatccccaatttgta

SEQ ID NO: 639210 - DNA, 33 bp, Homo sapien
gggcagttttaaagaatgaatccccaatttgta

SEQ ID NO: 639211 - DNA, 33 bp, Homo sapien
ggaaacaagcaagtacggggcttccgcgcgctc

SEQ ID NO: 639212 - DNA, 33 bp, Homo sapien
ggaaacaagcaagtactgggcttccgcgcgctc

SEQ ID NO: 639213 - DNA, 33 bp, Homo sapien
ctgtccttcagaacacagtggccgggtcgtatg

SEQ ID NO: 639214 - DNA, 33 bp, Homo sapien
ctgtccttcagaacacggtggccgggtcgtatg

SEQ ID NO: 639215 - DNA, 33 bp, Homo sapien
attagaaataagcctcaaaatagccctggtgaa

SEQ ID NO: 639216 - DNA, 33 bp, Homo sapien
attagaaataagcctcgaaatagccctggtgaa

SEQ ID NO: 639217 - DNA, 33 bp, Homo sapien
ccatttattcagccatgaaaaacaggaatgaag

SEQ ID NO: 639218 - DNA, 33 bp, Homo sapien
ccatttattcagccattaaaaacaggaatgaag

SEQ ID NO: 639219 - DNA, 33 bp, Homo sapien
catggtgcattttcacaattccaactcaaagtg

SEQ ID NO: 639220 - DNA, 33 bp, Homo sapien
catggtgcattttcacgattccaactcaaagtg

SEQ ID NO: 639221 - DNA, 33 bp, Homo sapien
aacaaacagtccagccccatttgcaaagaatcc

SEQ ID NO: 639222 - DNA, 33 bp, Homo sapien
aacaaacagtccagcctcatttgcaaagaatcc

SEQ ID NO: 639223 - DNA, 33 bp, Homo sapien
cctaaaccagccttgcaaatgcgttccaaagtt

SEQ ID NO: 639224 - DNA, 33 bp, Homo sapien
cctaaaccagccttgcgaatgcgttccaaagtt

SEQ ID NO: 639225 - DNA, 33 bp, Homo sapien
tatctttctagtgtcacgcactgtaaaacaagt

SEQ ID NO: 639226 - DNA, 33 bp, Homo sapien
tatctttctagtgtcatgcactgtaaaacaagt

SEQ ID NO: 639227 - DNA, 33 bp, Homo sapien
tggctcttgtaagttacgaggctggactaggtc

SEQ ID NO: 639228 - DNA, 33 bp, Homo sapien
tggctcttgtaagttatgaggctggactaggtc

SEQ ID NO: 639229 - DNA, 33 bp, Homo sapien
aaaggagtgaaaatgacgaccacttgggtttgc

SEQ ID NO: 639230 - DNA, 33 bp, Homo sapien
aaaggagtgaaaatgatgaccacttgggtttgc

SEQ ID NO: 639231 - DNA, 33 bp, Homo sapien
ggccagtgcccttaaaattctgccaggagagcc

SEQ ID NO: 639232 - DNA, 33 bp, Homo sapien
ggccagtgcccttaaagttctgccaggagagcc

SEQ ID NO: 639233 - DNA, 33 bp, Homo sapien
ccatccagaacattcaaagtaaaaacttgagct

SEQ ID NO: 639234 - DNA, 33 bp, Homo sapien
ccatccagaacattcagagtaaaaacttgagct

SEQ ID NO: 639235 - DNA, 33 bp, Homo sapien
ctatttatatttaggacgactggagtggtcagc

SEQ ID NO: 639236 - DNA, 33 bp, Homo sapien
ctatttatatttaggatgactggagtggtcagc

SEQ ID NO: 639237 - DNA, 33 bp, Homo sapien
cttactgcctgaggaaataagagccactctcac

SEQ ID NO: 639238 - DNA, 33 bp, Homo sapien
cttactgcctgaggaagtaagagccactctcac

SEQ ID NO: 639239 - DNA, 33 bp, Homo sapien
cctcctttgcctggaactgcagagctgtcagga

SEQ ID NO: 639240 - DNA, 33 bp, Homo sapien
cctcctttgcctggaattgcagagctgtcagga

SEQ ID NO: 639241 - DNA, 33 bp, Homo sapien
ccatccttcaaaccagcagaaacttacacagta

SEQ ID NO: 639242 - DNA, 33 bp, Homo sapien
ccatccttcaaaccaggagaaacttacacagta

SEQ ID NO: 639243 - DNA, 33 bp, Homo sapien
tgtgctctatgttgcaaagtctgcgtggagtgg

SEQ ID NO: 639244 - DNA, 33 bp, Homo sapien
tgtgctctatgttgcagagtctgcgtggagtgg

SEQ ID NO: 639245 - DNA, 33 bp, Homo sapien
ccttcctggagtgtacagggccttttccccctt

SEQ ID NO: 639246 - DNA, 33 bp, Homo sapien
ccttcctggagtgtacggggccttttccccctt

SEQ ID NO: 639247 - DNA, 33 bp, Homo sapien
ctggctcaccacccccactctcaaagaaaggag

SEQ ID NO: 639248 - DNA, 33 bp, Homo sapien
ctggctcaccaccccctctctcaaagaaaggag

SEQ ID NO: 639249 - DNA, 33 bp, Homo sapien
actggccatccttcaacagtaaagctaaatcag

SEQ ID NO: 639250 - DNA, 33 bp, Homo sapien
actggccatccttcaatagtaaagctaaatcag

SEQ ID NO: 639251 - DNA, 33 bp, Homo sapien
cctgtgctttaagcagaaaggagctcctagcat

SEQ ID NO: 639252 - DNA, 33 bp, Homo sapien
cctgtgctttaagcagcaaggagctcctagcat

SEQ ID NO: 639253 - DNA, 33 bp, Homo sapien
ctgactgctgaagaaacaggggtaggatcagtg

SEQ ID NO: 639254 - DNA, 33 bp, Homo sapien
ctgactgctgaagaaataggggtaggatcagtg

SEQ ID NO: 639255 - DNA, 33 bp, Homo sapien
actgagtcacattacccaattcactggcacaaa

SEQ ID NO: 639256 - DNA, 33 bp, Homo sapien
actgagtcacattacctaattcactggcacaaa

SEQ ID NO: 639257 - DNA, 33 bp, Homo sapien
tggctagtttttgtgacctcatgtgacttcttt

SEQ ID NO: 639258 - DNA, 33 bp, Homo sapien
tggctagtttttgtgatctcatgtgacttcttt

SEQ ID NO: 639259 - DNA, 33 bp, Homo sapien
ttgtacttgcgatgcaaagtcaaggggataaaa

SEQ ID NO: 639260 - DNA, 33 bp, Homo sapien
ttgtacttgcgatgcacagtcaaggggataaaa

SEQ ID NO: 639261 - DNA, 33 bp, Homo sapien
gcactgaagaaagcaaatgggataattcaaggc

SEQ ID NO: 639262 - DNA, 33 bp, Homo sapien
gcactgaagaaagcaagtgggataattcaaggc

SEQ ID NO: 639263 - DNA, 33 bp, Homo sapien
cagcttgcctaagaaccctttcattgcttgcga

SEQ ID NO: 639264 - DNA, 33 bp, Homo sapien
cagcttgcctaagaactctttcattgcttgcga

SEQ ID NO: 639265 - DNA, 33 bp, Homo sapien
tgcaaaatccccaccactatctaaatctgtgct

SEQ ID NO: 639266 - DNA, 33 bp, Homo sapien
tgcaaaatccccaccattatctaaatctgtgct

SEQ ID NO: 639267 - DNA, 33 bp, Homo sapien
agtggctatcaaaatgcacaatgcagacagagg

SEQ ID NO: 639268 - DNA, 33 bp, Homo sapien
agtggctatcaaaatgtacaatgcagacagagg

SEQ ID NO: 639269 - DNA, 33 bp, Homo sapien
ttcaaagtggaaggaactggtcctaaatccgtg

SEQ ID NO: 639270 - DNA, 33 bp, Homo sapien
ttcaaagtggaaggaattggtcctaaatccgtg

SEQ ID NO: 639271 - DNA, 33 bp, Homo sapien
gggaagcatcacaatacaaaaaaaggtaagaac

SEQ ID NO: 639272 - DNA, 33 bp, Homo sapien
gggaagcatcacaatagaaaaaaaggtaagaac

SEQ ID NO: 639273 - DNA, 33 bp, Homo sapien
ataagggaaacctacaatgactcaaaataggag

SEQ ID NO: 639274 - DNA, 33 bp, Homo sapien
ataagggaaacctacagtgactcaaaataggag

SEQ ID NO: 639275 - DNA, 33 bp, Homo sapien
ttcactaactttcacacagtccttaagctctac

SEQ ID NO: 639276 - DNA, 33 bp, Homo sapien
ttcactaactttcacatagtccttaagctctac

SEQ ID NO: 639277 - DNA, 33 bp, Homo sapien
tacttcctctgggtgcaacagacacagattaaa

SEQ ID NO: 639278 - DNA, 33 bp, Homo sapien
tacttcctctgggtgcgacagacacagattaaa

SEQ ID NO: 639279 - DNA, 33 bp, Homo sapien
agtggatggttttctccctgtgcttatgtgagc

SEQ ID NO: 639280 - DNA, 33 bp, Homo sapien
agtggatggttttctctctgtgcttatgtgagc

SEQ ID NO: 639281 - DNA, 33 bp, Homo sapien
tctcacatctgaagtccaagctaaaaaggccca

SEQ ID NO: 639282 - DNA, 33 bp, Homo sapien
tctcacatctgaagtctaagctaaaaaggccca

SEQ ID NO: 639283 - DNA, 33 bp, Homo sapien
ggtgggccaggctcagccgctctcctctgtgtt

SEQ ID NO: 639284 - DNA, 33 bp, Homo sapien
ggtgggccaggctcaggcgctctcctctgtgtt

SEQ ID NO: 639285 - DNA, 33 bp, Homo sapien
tgctgcagaaaggtacactattattgcgacagt

SEQ ID NO: 639286 - DNA, 33 bp, Homo sapien
tgctgcagaaaggtacgctattattgcgacagt

SEQ ID NO: 639287 - DNA, 33 bp, Homo sapien
gactccacctgcattcaatacagtcaatccaaa

SEQ ID NO: 639288 - DNA, 33 bp, Homo sapien
gactccacctgcattcgatacagtcaatccaaa

SEQ ID NO: 639289 - DNA, 33 bp, Homo sapien
taaagttgttctagaacatgagaatttagggat

SEQ ID NO: 639290 - DNA, 33 bp, Homo sapien
taaagttgttctagaatatgagaatttagggat

SEQ ID NO: 639291 - DNA, 33 bp, Homo sapien
agttaatatggattcacagttcagctccactgt

SEQ ID NO: 639292 - DNA, 33 bp, Homo sapien
agttaatatggattcatagttcagctccactgt

SEQ ID NO: 639293 - DNA, 33 bp, Homo sapien
gtttgtcaattacaatgataaaacataggcctt

SEQ ID NO: 639294 - DNA, 33 bp, Homo sapien
gtttgtcaattacaattataaaacataggcctt

SEQ ID NO: 639295 - DNA, 33 bp, Homo sapien
gacctaatgcttcccaacgtaccacaggaatga

SEQ ID NO: 639296 - DNA, 33 bp, Homo sapien
gacctaatgcttcccagcgtaccacaggaatga

SEQ ID NO: 639297 - DNA, 33 bp, Homo sapien
gtcataagaactcagaatccaaatgcttccatt

SEQ ID NO: 639298 - DNA, 33 bp, Homo sapien
gtcataagaactcagactccaaatgcttccatt

SEQ ID NO: 639299 - DNA, 33 bp, Homo sapien
tggcttcttgcctttgaacgcctggatgagcca

SEQ ID NO: 639300 - DNA, 33 bp, Homo sapien
tggcttcttgcctttgcacgcctggatgagcca

SEQ ID NO: 639301 - DNA, 33 bp, Homo sapien
ctctgtctcaaaaaaaatcagatcccacttgcc

SEQ ID NO: 639302 - DNA, 33 bp, Homo sapien
ctctgtctcaaaaaaagtcagatcccacttgcc

SEQ ID NO: 639303 - DNA, 33 bp, Homo sapien
aggtggctaatggagcacctatggcacagagga

SEQ ID NO: 639304 - DNA, 33 bp, Homo sapien
aggtggctaatggagcgcctatggcacagagga

SEQ ID NO: 639305 - DNA, 33 bp, Homo sapien
atggcctagttttgtccagctgaccccagatgt

SEQ ID NO: 639306 - DNA, 33 bp, Homo sapien
atggcctagttttgtctagctgaccccagatgt

SEQ ID NO: 639307 - DNA, 33 bp, Homo sapien
gtctctctctcccccaactagactgtgagtccc

SEQ ID NO: 639308 - DNA, 33 bp, Homo sapien
gtctctctctcccccatctagactgtgagtccc

SEQ ID NO: 639309 - DNA, 33 bp, Homo sapien
atttgcctaaaaatgaaagcgattgcacacacg

SEQ ID NO: 639310 - DNA, 33 bp, Homo sapien
atttgcctaaaaatgagagcgattgcacacacg

SEQ ID NO: 639311 - DNA, 33 bp, Homo sapien
ttagaacacatagaagaaaaagttactctaacc

SEQ ID NO: 639312 - DNA, 33 bp, Homo sapien
ttagaacacatagaaggaaaagttactctaacc

SEQ ID NO: 639313 - DNA, 33 bp, Homo sapien
gcaaagagatgccaaaagaagcatttgacaaag

SEQ ID NO: 639314 - DNA, 33 bp, Homo sapien
gcaaagagatgccaaaggaagcatttgacaaag

SEQ ID NO: 639315 - DNA, 33 bp, Homo sapien
tgttagggataaaaaaatgttcgcgggcagtga

SEQ ID NO: 639316 - DNA, 33 bp, Homo sapien
tgttagggataaaaaattgttcgcgggcagtga

SEQ ID NO: 639317 - DNA, 33 bp, Homo sapien
cctgtctggcacgtgaatatgggtgagaagtaa

SEQ ID NO: 639318 - DNA, 33 bp, Homo sapien
cctgtctggcacgtgattatgggtgagaagtaa

SEQ ID NO: 639319 - DNA, 33 bp, Homo sapien
ctcttcaaatgacctacgcttttccatctccaa

SEQ ID NO: 639320 - DNA, 33 bp, Homo sapien
ctcttcaaatgacctatgcttttccatctccaa

SEQ ID NO: 639321 - DNA, 33 bp, Homo sapien
tccatctccaatgtccaaagaagtatcagagat

SEQ ID NO: 639322 - DNA, 33 bp, Homo sapien
tccatctccaatgtccgaagaagtatcagagat

SEQ ID NO: 639323 - DNA, 33 bp, Homo sapien
ttctatgcaattatacaatatgtgtagatttgt

SEQ ID NO: 639324 - DNA, 33 bp, Homo sapien
ttctatgcaattataccatatgtgtagatttgt

SEQ ID NO: 639325 - DNA, 33 bp, Homo sapien
atttcagtgttgaaggaaatgtaatttgagcat

SEQ ID NO: 639326 - DNA, 33 bp, Homo sapien
atttcagtgttgaagggaatgtaatttgagcat

SEQ ID NO: 639327 - DNA, 33 bp, Homo sapien
tctgcatcgcataattaaaaaaaaatggcaaca

SEQ ID NO: 639328 - DNA, 33 bp, Homo sapien
tctgcatcgcataatttaaaaaaaatggcaaca

SEQ ID NO: 639329 - DNA, 33 bp, Homo sapien
gtaggcctgagggatacactttaagagagggaa

SEQ ID NO: 639330 - DNA, 33 bp, Homo sapien
gtaggcctgagggatagactttaagagagggaa

SEQ ID NO: 639331 - DNA, 33 bp, Homo sapien
agatcagctaaatgtacggtacatggacaaatc

SEQ ID NO: 639332 - DNA, 33 bp, Homo sapien
agatcagctaaatgtatggtacatggacaaatc

SEQ ID NO: 639333 - DNA, 33 bp, Homo sapien
tggtaaagattgtagacgaaggaggtaaaaata

SEQ ID NO: 639334 - DNA, 33 bp, Homo sapien
tggtaaagattgtagatgaaggaggtaaaaata

SEQ ID NO: 639335 - DNA, 33 bp, Homo sapien
cgtgactggaagacagaaagtgagggagaggaa

SEQ ID NO: 639336 - DNA, 33 bp, Homo sapien
cgtgactggaagacaggaagtgagggagaggaa

SEQ ID NO: 639337 - DNA, 33 bp, Homo sapien
aaggccacagccagcaagatggtacaatgagaa

SEQ ID NO: 639338 - DNA, 33 bp, Homo sapien
aaggccacagccagcaggatggtacaatgagaa

SEQ ID NO: 639339 - DNA, 33 bp, Homo sapien
cacacaagtttgagaaatgttgactactttgtc

SEQ ID NO: 639340 - DNA, 33 bp, Homo sapien
cacacaagtttgagaagtgttgactactttgtc

SEQ ID NO: 639341 - DNA, 33 bp, Homo sapien
agttatgtatggccaacggttgggagagtttgt

SEQ ID NO: 639342 - DNA, 33 bp, Homo sapien
agttatgtatggccaatggttgggagagtttgt

SEQ ID NO: 639343 - DNA, 33 bp, Homo sapien
cggcaagaatcagaagaccgggaagccattcac

SEQ ID NO: 639344 - DNA, 33 bp, Homo sapien
cggcaagaatcagaaggccgggaagccattcac

SEQ ID NO: 639345 - DNA, 33 bp, Homo sapien
tcctgagaatgatgcaaaccttcagcagccagg

SEQ ID NO: 639346 - DNA, 33 bp, Homo sapien
tcctgagaatgatgcagaccttcagcagccagg

SEQ ID NO: 639347 - DNA, 33 bp, Homo sapien
tggtagatacccaagaaatattcattgagttaa

SEQ ID NO: 639348 - DNA, 33 bp, Homo sapien
tggtagatacccaagagatattcattgagttaa

SEQ ID NO: 639349 - DNA, 33 bp, Homo sapien
ttgagcctttgaaatccactttaaatgctgctg

SEQ ID NO: 639350 - DNA, 33 bp, Homo sapien
ttgagcctttgaaatctactttaaatgctgctg

SEQ ID NO: 639351 - DNA, 33 bp, Homo sapien
gccagtacaataatgggaggaaaggaataaaga

SEQ ID NO: 639352 - DNA, 33 bp, Homo sapien
gccagtacaataatggtaggaaaggaataaaga

SEQ ID NO: 639353 - DNA, 33 bp, Homo sapien
gtcccctgagcaatccaaggtaagcagtgacag

SEQ ID NO: 639354 - DNA, 33 bp, Homo sapien
gtcccctgagcaatccgaggtaagcagtgacag

SEQ ID NO: 639355 - DNA, 33 bp, Homo sapien
ttatttttcagggtccccaaacaactgctctat

SEQ ID NO: 639356 - DNA, 33 bp, Homo sapien
ttatttttcagggtcctcaaacaactgctctat

SEQ ID NO: 639357 - DNA, 33 bp, Homo sapien
cacatttggcagataaataatatctaataggtc

SEQ ID NO: 639358 - DNA, 33 bp, Homo sapien
cacatttggcagataagtaatatctaataggtc

SEQ ID NO: 639359 - DNA, 33 bp, Homo sapien
gactggaagaaacaataagcaatatgcacctcg

SEQ ID NO: 639360 - DNA, 33 bp, Homo sapien
gactggaagaaacaatgagcaatatgcacctcg

SEQ ID NO: 639361 - DNA, 33 bp, Homo sapien
agccaggtcatttgcacgaatcagtgtaaaaca

SEQ ID NO: 639362 - DNA, 33 bp, Homo sapien
agccaggtcatttgcatgaatcagtgtaaaaca

SEQ ID NO: 639363 - DNA, 33 bp, Homo sapien
gtaaataattaaattgaaactttggcctggcct

SEQ ID NO: 639364 - DNA, 33 bp, Homo sapien
gtaaataattaaattggaactttggcctggcct

SEQ ID NO: 639365 - DNA, 33 bp, Homo sapien
ttatgtgttcacggaaaaatcaacactaccccc

SEQ ID NO: 639366 - DNA, 33 bp, Homo sapien
ttatgtgttcacggaagaatcaacactaccccc

SEQ ID NO: 639367 - DNA, 33 bp, Homo sapien
caccactacgggcaaaaaagtaagatgggtcag

SEQ ID NO: 639368 - DNA, 33 bp, Homo sapien
caccactacgggcaaagaagtaagatgggtcag

SEQ ID NO: 639369 - DNA, 33 bp, Homo sapien
cttagggagaaaagtcacctttccgaagatcac

SEQ ID NO: 639370 - DNA, 33 bp, Homo sapien
cttagggagaaaagtcgcctttccgaagatcac

SEQ ID NO: 639371 - DNA, 33 bp, Homo sapien
gtagcttcagtaactaaaaccagtaggctgtcc

SEQ ID NO: 639372 - DNA, 33 bp, Homo sapien
gtagcttcagtaactagaaccagtaggctgtcc

SEQ ID NO: 639373 - DNA, 33 bp, Homo sapien
agagcagaacagactcacagacttcgatcattc

SEQ ID NO: 639374 - DNA, 33 bp, Homo sapien
agagcagaacagactcgcagacttcgatcattc

SEQ ID NO: 639375 - DNA, 33 bp, Homo sapien
aagagtcaattaataaacattccttgtcttaaa

SEQ ID NO: 639376 - DNA, 33 bp, Homo sapien
aagagtcaattaataaccattccttgtcttaaa

SEQ ID NO: 639377 - DNA, 33 bp, Homo sapien
cttaacctatatccccacagatcaaaagaagct

SEQ ID NO: 639378 - DNA, 33 bp, Homo sapien
cttaacctatatccccgcagatcaaaagaagct

SEQ ID NO: 639379 - DNA, 33 bp, Homo sapien
tattgctgcagcaagtgaaacctgcactctccc

SEQ ID NO: 639380 - DNA, 33 bp, Homo sapien
tattgctgcagcaagttaaacctgcactctccc

SEQ ID NO: 639381 - DNA, 33 bp, Homo sapien
ctatttgtgtttcactcagcatgttttcctgtc

SEQ ID NO: 639382 - DNA, 33 bp, Homo sapien
ctatttgtgtttcacttagcatgttttcctgtc

SEQ ID NO: 639383 - DNA, 33 bp, Homo sapien
tgggggtgccatgacccgcttactttggctcat

SEQ ID NO: 639384 - DNA, 33 bp, Homo sapien
tgggggtgccatgacctgcttactttggctcat

SEQ ID NO: 639385 - DNA, 33 bp, Homo sapien
ggagactgaaggggtacgtgcctctcattcctg

SEQ ID NO: 639386 - DNA, 33 bp, Homo sapien
ggagactgaaggggtatgtgcctctcattcctg

SEQ ID NO: 639387 - DNA, 33 bp, Homo sapien
ctcctatcaacaaacgaatgaggcctttgctgc

SEQ ID NO: 639388 - DNA, 33 bp, Homo sapien
ctcctatcaacaaacgtatgaggcctttgctgc

SEQ ID NO: 639389 - DNA, 33 bp, Homo sapien
gatggacagaactgtagactgggtatggatgag

SEQ ID NO: 639390 - DNA, 33 bp, Homo sapien
gatggacagaactgtatactgggtatggatgag

SEQ ID NO: 639391 - DNA, 33 bp, Homo sapien
attagttttcttcctcaaagtgatttaggagag

SEQ ID NO: 639392 - DNA, 33 bp, Homo sapien
attagttttcttcctcgaagtgatttaggagag

SEQ ID NO: 639393 - DNA, 33 bp, Homo sapien
aagaacacagtgtcacaagcagagtagagatga

SEQ ID NO: 639394 - DNA, 33 bp, Homo sapien
aagaacacagtgtcacgagcagagtagagatga

SEQ ID NO: 639395 - DNA, 33 bp, Homo sapien
gagtgggggcttatagacaatagaaagagaaag

SEQ ID NO: 639396 - DNA, 33 bp, Homo sapien
gagtgggggcttatagtcaatagaaagagaaag

SEQ ID NO: 639397 - DNA, 33 bp, Homo sapien
agaagtcaggtagcaaccaggctccgatgacat

SEQ ID NO: 639398 - DNA, 33 bp, Homo sapien
agaagtcaggtagcaatcaggctccgatgacat

SEQ ID NO: 639399 - DNA, 33 bp, Homo sapien
tatattaccataaattcaaagagcctgaatcac

SEQ ID NO: 639400 - DNA, 33 bp, Homo sapien
tatattaccataaatttaaagagcctgaatcac

SEQ ID NO: 639401 - DNA, 33 bp, Homo sapien
tatataggcatcgaacccttcacagtagttacc

SEQ ID NO: 639402 - DNA, 33 bp, Homo sapien
tatataggcatcgaactcttcacagtagttacc

SEQ ID NO: 639403 - DNA, 33 bp, Homo sapien
ctttcacgctacaagactatggtttccctactc

SEQ ID NO: 639404 - DNA, 33 bp, Homo sapien
ctttcacgctacaagattatggtttccctactc

SEQ ID NO: 639405 - DNA, 33 bp, Homo sapien
tgggttttagtctcaaattcagcatctactcca

SEQ ID NO: 639406 - DNA, 33 bp, Homo sapien
tgggttttagtctcaatttcagcatctactcca

SEQ ID NO: 639407 - DNA, 33 bp, Homo sapien
acacgaatttgtgtgacgatgttcagaaactgt

SEQ ID NO: 639408 - DNA, 33 bp, Homo sapien
acacgaatttgtgtgatgatgttcagaaactgt

SEQ ID NO: 639409 - DNA, 33 bp, Homo sapien
aattgagggccaaaataacttgtctaaggtcac

SEQ ID NO: 639410 - DNA, 33 bp, Homo sapien
aattgagggccaaaattacttgtctaaggtcac

SEQ ID NO: 639411 - DNA, 33 bp, Homo sapien
taaaaagatttaaccactggcccatttaatctg

SEQ ID NO: 639412 - DNA, 33 bp, Homo sapien
taaaaagatttaaccagtggcccatttaatctg

SEQ ID NO: 639413 - DNA, 33 bp, Homo sapien
ttatccatagtaacagcacaaaagtaatagcac

SEQ ID NO: 639414 - DNA, 33 bp, Homo sapien
ttatccatagtaacaggacaaaagtaatagcac

SEQ ID NO: 639415 - DNA, 33 bp, Homo sapien
aatggagcaaatggaaccttttataagagagga

SEQ ID NO: 639416 - DNA, 33 bp, Homo sapien
aatggagcaaatggaatcttttataagagagga

SEQ ID NO: 639417 - DNA, 33 bp, Homo sapien
tctggattattctaacacacactcaagtctgaa

SEQ ID NO: 639418 - DNA, 33 bp, Homo sapien
tctggattattctaacgcacactcaagtctgaa

SEQ ID NO: 639419 - DNA, 33 bp, Homo sapien
atggggccagcaggaacaaggaccagggttcaa

SEQ ID NO: 639420 - DNA, 33 bp, Homo sapien
atggggccagcaggaagaaggaccagggttcaa

SEQ ID NO: 639421 - DNA, 33 bp, Homo sapien
acacctgtagtccccactatcaattgttcccat

SEQ ID NO: 639422 - DNA, 33 bp, Homo sapien
acacctgtagtccccagtatcaattgttcccat

SEQ ID NO: 639423 - DNA, 33 bp, Homo sapien
gctgagggcctgactaaaataaaaaggcagaca

SEQ ID NO: 639424 - DNA, 33 bp, Homo sapien
gctgagggcctgactagaataaaaaggcagaca

SEQ ID NO: 639425 - DNA, 33 bp, Homo sapien
atgtaggtacacgatacgcacgtggatttttta

SEQ ID NO: 639426 - DNA, 33 bp, Homo sapien
atgtaggtacacgatatgcacgtggatttttta

SEQ ID NO: 639427 - DNA, 33 bp, Homo sapien
gagccacttggtgaacggcaaagcctatgctct

SEQ ID NO: 639428 - DNA, 33 bp, Homo sapien
gagccacttggtgaactgcaaagcctatgctct

SEQ ID NO: 639429 - DNA, 33 bp, Homo sapien
tgttggcagatccataaaatatgtgtgatggcc

SEQ ID NO: 639430 - DNA, 33 bp, Homo sapien
tgttggcagatccatacaatatgtgtgatggcc

SEQ ID NO: 639431 - DNA, 33 bp, Homo sapien
atacagattttcagatcaggaaatattacctga

SEQ ID NO: 639432 - DNA, 33 bp, Homo sapien
atacagattttcagattaggaaatattacctga

SEQ ID NO: 639433 - DNA, 33 bp, Homo sapien
tctgacttatgagataagagagaagatgagcat

SEQ ID NO: 639434 - DNA, 33 bp, Homo sapien
tctgacttatgagataggagagaagatgagcat

SEQ ID NO: 639435 - DNA, 33 bp, Homo sapien
agcctcccattaaagaacacagaagcttttgca

SEQ ID NO: 639436 - DNA, 33 bp, Homo sapien
agcctcccattaaagagcacagaagcttttgca

SEQ ID NO: 639437 - DNA, 33 bp, Homo sapien
atactgtggctcctccaaataaaggtaatgaca

SEQ ID NO: 639438 - DNA, 33 bp, Homo sapien
atactgtggctcctccgaataaaggtaatgaca

SEQ ID NO: 639439 - DNA, 33 bp, Homo sapien
cagactatcaaagagcaaggactgtacaaatgt

SEQ ID NO: 639440 - DNA, 33 bp, Homo sapien
cagactatcaaagagcgaggactgtacaaatgt

SEQ ID NO: 639441 - DNA, 33 bp, Homo sapien
acatcgtaaggttcacaggaggataagcacaca

SEQ ID NO: 639442 - DNA, 33 bp, Homo sapien
acatcgtaaggttcacgggaggataagcacaca

SEQ ID NO: 639443 - DNA, 33 bp, Homo sapien
tgaactaatacaaggccccaaacagggattcac

SEQ ID NO: 639444 - DNA, 33 bp, Homo sapien
tgaactaatacaaggctccaaacagggattcac

SEQ ID NO: 639445 - DNA, 33 bp, Homo sapien
ttaggtggtgagaaaagcaaaggtgtatagctg

SEQ ID NO: 639446 - DNA, 33 bp, Homo sapien
ttaggtggtgagaaaatcaaaggtgtatagctg

SEQ ID NO: 639447 - DNA, 33 bp, Homo sapien
aaatagacaaatattcagaaaacatacaaattc

SEQ ID NO: 639448 - DNA, 33 bp, Homo sapien
aaatagacaaatattcggaaaacatacaaattc

SEQ ID NO: 639449 - DNA, 33 bp, Homo sapien
gaagaacagactatcaatattgcaacaacttgg

SEQ ID NO: 639450 - DNA, 33 bp, Homo sapien
gaagaacagactatcagtattgcaacaacttgg

SEQ ID NO: 639451 - DNA, 33 bp, Homo sapien
cttcccctgaaatcacagaaaagtcttcaaatt

SEQ ID NO: 639452 - DNA, 33 bp, Homo sapien
cttcccctgaaatcacggaaaagtcttcaaatt

SEQ ID NO: 639453 - DNA, 33 bp, Homo sapien
tggcccacgaacaagacgacaatgtcaaaattc

SEQ ID NO: 639454 - DNA, 33 bp, Homo sapien
tggcccacgaacaagatgacaatgtcaaaattc

SEQ ID NO: 639455 - DNA, 33 bp, Homo sapien
ccaatcttcaacttgaatacaggagatcaaggt

SEQ ID NO: 639456 - DNA, 33 bp, Homo sapien
ccaatcttcaacttgactacaggagatcaaggt

SEQ ID NO: 639457 - DNA, 33 bp, Homo sapien
gaataattttctttgcggagccactgagattca

SEQ ID NO: 639458 - DNA, 33 bp, Homo sapien
gaataattttctttgctgagccactgagattca

SEQ ID NO: 639459 - DNA, 33 bp, Homo sapien
ctctgcaaagtttagccacggatccctgttaaa

SEQ ID NO: 639460 - DNA, 33 bp, Homo sapien
ctctgcaaagtttagctacggatccctgttaaa

SEQ ID NO: 639461 - DNA, 33 bp, Homo sapien
taaaccacacctgtagcattcccttcaacaaaa

SEQ ID NO: 639462 - DNA, 33 bp, Homo sapien
taaaccacacctgtagtattcccttcaacaaaa

SEQ ID NO: 639463 - DNA, 33 bp, Homo sapien
aaacccgagaccctaacgggcacagacacaagc

SEQ ID NO: 639464 - DNA, 33 bp, Homo sapien
aaacccgagaccctaatgggcacagacacaagc

SEQ ID NO: 639465 - DNA, 33 bp, Homo sapien
aagaacatacatactacatcaggctggccaata

SEQ ID NO: 639466 - DNA, 33 bp, Homo sapien
aagaacatacatactatatcaggctggccaata

SEQ ID NO: 639467 - DNA, 33 bp, Homo sapien
gacaagttttgactcaatatcgtttttcttttg

SEQ ID NO: 639468 - DNA, 33 bp, Homo sapien
gacaagttttgactcagtatcgtttttcttttg

SEQ ID NO: 639469 - DNA, 33 bp, Homo sapien
catcagctatggccagaaagatgtttagtgaat

SEQ ID NO: 639470 - DNA, 33 bp, Homo sapien
catcagctatggccaggaagatgtttagtgaat

SEQ ID NO: 639471 - DNA, 33 bp, Homo sapien
tttatgtaagtctccacgtttatgcacagaaaa

SEQ ID NO: 639472 - DNA, 33 bp, Homo sapien
tttatgtaagtctccatgtttatgcacagaaaa

SEQ ID NO: 639473 - DNA, 33 bp, Homo sapien
ttataaatccatcaaacgtttctgcaagtcagt

SEQ ID NO: 639474 - DNA, 33 bp, Homo sapien
ttataaatccatcaaatgtttctgcaagtcagt

SEQ ID NO: 639475 - DNA, 33 bp, Homo sapien
gctgtttgtttctaaaatatcaacacctggcac

SEQ ID NO: 639476 - DNA, 33 bp, Homo sapien
gctgtttgtttctaaagtatcaacacctggcac

SEQ ID NO: 639477 - DNA, 33 bp, Homo sapien
aagtattgccattttaacaatagtaagcctact

SEQ ID NO: 639478 - DNA, 33 bp, Homo sapien
aagtattgccattttagcaatagtaagcctact

SEQ ID NO: 639479 - DNA, 33 bp, Homo sapien
ataaactgatgggatgaagctaaagcagctatt

SEQ ID NO: 639480 - DNA, 33 bp, Homo sapien
ataaactgatgggatgcagctaaagcagctatt

SEQ ID NO: 639481 - DNA, 33 bp, Homo sapien
gagctaatttatactccccataacagtgtttaa

SEQ ID NO: 639482 - DNA, 33 bp, Homo sapien
gagctaatttatactctccataacagtgtttaa

SEQ ID NO: 639483 - DNA, 33 bp, Homo sapien
ataactctaattcaaaacagatgtgatacttgc

SEQ ID NO: 639484 - DNA, 33 bp, Homo sapien
ataactctaattcaaagcagatgtgatacttgc

SEQ ID NO: 639485 - DNA, 33 bp, Homo sapien
catagtagcatggctcccttgatgatttcttca

SEQ ID NO: 639486 - DNA, 33 bp, Homo sapien
catagtagcatggctctcttgatgatttcttca

SEQ ID NO: 639487 - DNA, 33 bp, Homo sapien
gcactatgctaggtacaactacaataaaagatt

SEQ ID NO: 639488 - DNA, 33 bp, Homo sapien
gcactatgctaggtaccactacaataaaagatt

SEQ ID NO: 639489 - DNA, 33 bp, Homo sapien
agtataacacctgtaactgctttagtccatata

SEQ ID NO: 639490 - DNA, 33 bp, Homo sapien
agtataacacctgtaattgctttagtccatata

SEQ ID NO: 639491 - DNA, 33 bp, Homo sapien
gcaagaaaaatataaccctcagacttttgaaac

SEQ ID NO: 639492 - DNA, 33 bp, Homo sapien
gcaagaaaaatataacgctcagacttttgaaac

SEQ ID NO: 639493 - DNA, 33 bp, Homo sapien
cttaattccttttatgccaaataatatcccatt

SEQ ID NO: 639494 - DNA, 33 bp, Homo sapien
cttaattccttttatgtcaaataatatcccatt

SEQ ID NO: 639495 - DNA, 33 bp, Homo sapien
tgtgtgattgattgggaatttagcttttgccca

SEQ ID NO: 639496 - DNA, 33 bp, Homo sapien
tgtgtgattgattgggcatttagcttttgccca

SEQ ID NO: 639497 - DNA, 33 bp, Homo sapien
ctaccagtgacattgacggcattaattagggga

SEQ ID NO: 639498 - DNA, 33 bp, Homo sapien
ctaccagtgacattgatggcattaattagggga

SEQ ID NO: 639499 - DNA, 33 bp, Homo sapien
attatgggttagcaaagtcatcccactcctctg

SEQ ID NO: 639500 - DNA, 33 bp, Homo sapien
attatgggttagcaaattcatcccactcctctg

SEQ ID NO: 639501 - DNA, 33 bp, Homo sapien
tattatacatatgggacgctgagaaagagatga

SEQ ID NO: 639502 - DNA, 33 bp, Homo sapien
tattatacatatgggatgctgagaaagagatga

SEQ ID NO: 639503 - DNA, 33 bp, Homo sapien
cttgtagtgagaaagacctgaattatgatttga

SEQ ID NO: 639504 - DNA, 33 bp, Homo sapien
cttgtagtgagaaagagctgaattatgatttga

SEQ ID NO: 639505 - DNA, 33 bp, Homo sapien
agggggtgagatgggaactaagccttcaagtag

SEQ ID NO: 639506 - DNA, 33 bp, Homo sapien
agggggtgagatgggagctaagccttcaagtag

SEQ ID NO: 639507 - DNA, 33 bp, Homo sapien
actccctcactttcagacctctgctcaatgtcg

SEQ ID NO: 639508 - DNA, 33 bp, Homo sapien
actccctcactttcaggcctctgctcaatgtcg

SEQ ID NO: 639509 - DNA, 33 bp, Homo sapien
caactttacggcctcaatcaaaaaggagtgtaa

SEQ ID NO: 639510 - DNA, 33 bp, Homo sapien
caactttacggcctcactcaaaaaggagtgtaa

SEQ ID NO: 639511 - DNA, 33 bp, Homo sapien
aagagaaagaaaaggactagcaaaatatacaga

SEQ ID NO: 639512 - DNA, 33 bp, Homo sapien
aagagaaagaaaaggagtagcaaaatatacaga

SEQ ID NO: 639513 - DNA, 33 bp, Homo sapien
aatatgatatatcaccaattaaaattctccaat

SEQ ID NO: 639514 - DNA, 33 bp, Homo sapien
aatatgatatatcacccattaaaattctccaat

SEQ ID NO: 639515 - DNA, 33 bp, Homo sapien
agtggcaggccagttaacataagcccatctgtg

SEQ ID NO: 639516 - DNA, 33 bp, Homo sapien
agtggcaggccagttaccataagcccatctgtg

SEQ ID NO: 639517 - DNA, 33 bp, Homo sapien
atagcagatgaggtaacttaaagaacaaagtcc

SEQ ID NO: 639518 - DNA, 33 bp, Homo sapien
atagcagatgaggtaatttaaagaacaaagtcc

SEQ ID NO: 639519 - DNA, 33 bp, Homo sapien
gtccaggagaatgggaaaattccctgatcttca

SEQ ID NO: 639520 - DNA, 33 bp, Homo sapien
gtccaggagaatgggacaattccctgatcttca

SEQ ID NO: 639521 - DNA, 33 bp, Homo sapien
caacagggaccaaggaagtaagacagctgaaga

SEQ ID NO: 639522 - DNA, 33 bp, Homo sapien
caacagggaccaaggaggtaagacagctgaaga

SEQ ID NO: 639523 - DNA, 33 bp, Homo sapien
gagaacattctgacccacactttctggcttcta

SEQ ID NO: 639524 - DNA, 33 bp, Homo sapien
gagaacattctgacccgcactttctggcttcta

SEQ ID NO: 639525 - DNA, 33 bp, Homo sapien
ttaagtgacacccacaacattcagaagctcaag

SEQ ID NO: 639526 - DNA, 33 bp, Homo sapien
ttaagtgacacccacagcattcagaagctcaag

SEQ ID NO: 639527 - DNA, 33 bp, Homo sapien
caagggcactgcagtaagatggaaagggcaagt

SEQ ID NO: 639528 - DNA, 33 bp, Homo sapien
caagggcactgcagtaggatggaaagggcaagt

SEQ ID NO: 639529 - DNA, 33 bp, Homo sapien
attttgtggtatagaaaaggttattcatcctcg

SEQ ID NO: 639530 - DNA, 33 bp, Homo sapien
attttgtggtatagaacaggttattcatcctcg

SEQ ID NO: 639531 - DNA, 33 bp, Homo sapien
taaaaacgtaaacaatcatagcaaaaaaaggac

SEQ ID NO: 639532 - DNA, 33 bp, Homo sapien
taaaaacgtaaacaatgatagcaaaaaaaggac

SEQ ID NO: 639533 - DNA, 33 bp, Homo sapien
aaagttaattcgtatgaaaacagaagcatgctc

SEQ ID NO: 639534 - DNA, 33 bp, Homo sapien
aaagttaattcgtatggaaacagaagcatgctc

SEQ ID NO: 639535 - DNA, 33 bp, Homo sapien
ttgtttccagtgtgaaccgaaaagatatgggta

SEQ ID NO: 639536 - DNA, 33 bp, Homo sapien
ttgtttccagtgtgaatcgaaaagatatgggta

SEQ ID NO: 639537 - DNA, 33 bp, Homo sapien
ttttgaaaatatagtcaactctttcatttggag

SEQ ID NO: 639538 - DNA, 33 bp, Homo sapien
ttttgaaaatatagtccactctttcatttggag

SEQ ID NO: 639539 - DNA, 33 bp, Homo sapien
tcacgtgaacattacaaggggatccaagatgct

SEQ ID NO: 639540 - DNA, 33 bp, Homo sapien
tcacgtgaacattacagggggatccaagatgct

SEQ ID NO: 639541 - DNA, 33 bp, Homo sapien
cactcaatagattgttgaaatgctatgggggtc

SEQ ID NO: 639542 - DNA, 33 bp, Homo sapien
cactcaatagattgtttaaatgctatgggggtc

SEQ ID NO: 639543 - DNA, 33 bp, Homo sapien
ttgtttttgcatttgaagaatgtatgtagcact

SEQ ID NO: 639544 - DNA, 33 bp, Homo sapien
ttgtttttgcatttgacgaatgtatgtagcact

SEQ ID NO: 639545 - DNA, 33 bp, Homo sapien
gcaattggttttcatcccttgcacttggctaaa

SEQ ID NO: 639546 - DNA, 33 bp, Homo sapien
gcaattggttttcatctcttgcacttggctaaa

SEQ ID NO: 639547 - DNA, 33 bp, Homo sapien
ctgcagaactctcaaccgggaatagtctagaaa

SEQ ID NO: 639548 - DNA, 33 bp, Homo sapien
ctgcagaactctcaactgggaatagtctagaaa

SEQ ID NO: 639549 - DNA, 33 bp, Homo sapien
tttagtgcaccctataactataagtgagaaaaa

SEQ ID NO: 639550 - DNA, 33 bp, Homo sapien
tttagtgcaccctatacctataagtgagaaaaa

SEQ ID NO: 639551 - DNA, 33 bp, Homo sapien
gcttttcaatgtatcaatcagaaaatataattt

SEQ ID NO: 639552 - DNA, 33 bp, Homo sapien
gcttttcaatgtatcagtcagaaaatataattt

SEQ ID NO: 639553 - DNA, 33 bp, Homo sapien
agctcactgcaaatctaaattattgcatttaaa

SEQ ID NO: 639554 - DNA, 33 bp, Homo sapien
agctcactgcaaatcttaattattgcatttaaa

SEQ ID NO: 639555 - DNA, 33 bp, Homo sapien
gacctatggaggcctcacttgatctggaccttg

SEQ ID NO: 639556 - DNA, 33 bp, Homo sapien
gacctatggaggcctcgcttgatctggaccttg

SEQ ID NO: 639557 - DNA, 33 bp, Homo sapien
ccattccaagtgataacatagtctgataccttt

SEQ ID NO: 639558 - DNA, 33 bp, Homo sapien
ccattccaagtgataagatagtctgataccttt

SEQ ID NO: 639559 - DNA, 33 bp, Homo sapien
agtccctggaccaaaaccatcaggatcacttgg

SEQ ID NO: 639560 - DNA, 33 bp, Homo sapien
agtccctggaccaaaagcatcaggatcacttgg

SEQ ID NO: 639561 - DNA, 33 bp, Homo sapien
ttcttcaaattggagaaagtttctgttttggag

SEQ ID NO: 639562 - DNA, 33 bp, Homo sapien
ttcttcaaattggagatagtttctgttttggag

SEQ ID NO: 639563 - DNA, 33 bp, Homo sapien
acagggttcattcagaaggaagagcgtagacct

SEQ ID NO: 639564 - DNA, 33 bp, Homo sapien
acagggttcattcagagggaagagcgtagacct

SEQ ID NO: 639565 - DNA, 33 bp, Homo sapien
tggagcacaagggaaacctgtaagagttttgaa

SEQ ID NO: 639566 - DNA, 33 bp, Homo sapien
tggagcacaagggaaatctgtaagagttttgaa

SEQ ID NO: 639567 - DNA, 33 bp, Homo sapien
agtcacaaaattgccaaacttctaaagaaagac

SEQ ID NO: 639568 - DNA, 33 bp, Homo sapien
agtcacaaaattgccagacttctaaagaaagac

SEQ ID NO: 639569 - DNA, 33 bp, Homo sapien
tgactagaaatatgccaaaggaacttaactcct

SEQ ID NO: 639570 - DNA, 33 bp, Homo sapien
tgactagaaatatgccgaaggaacttaactcct

SEQ ID NO: 639571 - DNA, 33 bp, Homo sapien
aactcctgttgctataagttagcctaggtaaaa

SEQ ID NO: 639572 - DNA, 33 bp, Homo sapien
aactcctgttgctataggttagcctaggtaaaa

SEQ ID NO: 639573 - DNA, 33 bp, Homo sapien
ttgtaaaatgttcgacacagatcttgcctcctg

SEQ ID NO: 639574 - DNA, 33 bp, Homo sapien
ttgtaaaatgttcgacccagatcttgcctcctg

SEQ ID NO: 639575 - DNA, 33 bp, Homo sapien
gattatgacggcaaataataatgataaataata

SEQ ID NO: 639576 - DNA, 33 bp, Homo sapien
gattatgacggcaaatgataatgataaataata

SEQ ID NO: 639577 - DNA, 33 bp, Homo sapien
gtcatttaatgccgataataacccaaagagtag

SEQ ID NO: 639578 - DNA, 33 bp, Homo sapien
gtcatttaatgccgatgataacccaaagagtag

SEQ ID NO: 639579 - DNA, 33 bp, Homo sapien
tttctggtgattacaccgggaatgtggattttt

SEQ ID NO: 639580 - DNA, 33 bp, Homo sapien
tttctggtgattacactgggaatgtggattttt

SEQ ID NO: 639581 - DNA, 33 bp, Homo sapien
gtccattggaatacaaagtatgcccatgttcca

SEQ ID NO: 639582 - DNA, 33 bp, Homo sapien
gtccattggaatacaaggtatgcccatgttcca

SEQ ID NO: 639583 - DNA, 33 bp, Homo sapien
ggtcattttttgttgaaccacagaactgggaaa

SEQ ID NO: 639584 - DNA, 33 bp, Homo sapien
ggtcattttttgttgagccacagaactgggaaa

SEQ ID NO: 639585 - DNA, 33 bp, Homo sapien
cattggtttgcttatcacacttaccttccctgg

SEQ ID NO: 639586 - DNA, 33 bp, Homo sapien
cattggtttgcttatcgcacttaccttccctgg

SEQ ID NO: 639587 - DNA, 33 bp, Homo sapien
attttatcctctcacaacagtaactggaaattc

SEQ ID NO: 639588 - DNA, 33 bp, Homo sapien
attttatcctctcacagcagtaactggaaattc

SEQ ID NO: 639589 - DNA, 33 bp, Homo sapien
gaccccaaaacatcccaaagagacacagattat

SEQ ID NO: 639590 - DNA, 33 bp, Homo sapien
gaccccaaaacatccccaagagacacagattat

SEQ ID NO: 639591 - DNA, 33 bp, Homo sapien
agaagtaagctggggacagagcatagagctttg

SEQ ID NO: 639592 - DNA, 33 bp, Homo sapien
agaagtaagctggggatagagcatagagctttg

SEQ ID NO: 639593 - DNA, 33 bp, Homo sapien
attcaataggagctaactggggattctgttttc

SEQ ID NO: 639594 - DNA, 33 bp, Homo sapien
attcaataggagctaagtggggattctgttttc

SEQ ID NO: 639595 - DNA, 33 bp, Homo sapien
tcctggaatactgtacaaccgacacatgcattg

SEQ ID NO: 639596 - DNA, 33 bp, Homo sapien
tcctggaatactgtacgaccgacacatgcattg

SEQ ID NO: 639597 - DNA, 33 bp, Homo sapien
ctagacagatcatttaacttaaaaaaataaata

SEQ ID NO: 639598 - DNA, 33 bp, Homo sapien
ctagacagatcatttaccttaaaaaaataaata

SEQ ID NO: 639599 - DNA, 33 bp, Homo sapien
gacattattagtgggaaagatgttcagaaactg

SEQ ID NO: 639600 - DNA, 33 bp, Homo sapien
gacattattagtgggagagatgttcagaaactg

SEQ ID NO: 639601 - DNA, 33 bp, Homo sapien
aagctaaatgcatttgcagttgatacaggagat

SEQ ID NO: 639602 - DNA, 33 bp, Homo sapien
aagctaaatgcatttgtagttgatacaggagat

SEQ ID NO: 639603 - DNA, 33 bp, Homo sapien
gcattcattcgtttagccagagtgtgtgtgaac

SEQ ID NO: 639604 - DNA, 33 bp, Homo sapien
gcattcattcgtttagtcagagtgtgtgtgaac

SEQ ID NO: 639605 - DNA, 33 bp, Homo sapien
gtcccgaatcattgtccatgtctaccacctggt

SEQ ID NO: 639606 - DNA, 33 bp, Homo sapien
gtcccgaatcattgtctatgtctaccacctggt

SEQ ID NO: 639607 - DNA, 33 bp, Homo sapien
agaggcagattggatcaagatacttggcctgat

SEQ ID NO: 639608 - DNA, 33 bp, Homo sapien
agaggcagattggatcgagatacttggcctgat

SEQ ID NO: 639609 - DNA, 33 bp, Homo sapien
ctctatcactaaacccaaagtcttgcattgagg

SEQ ID NO: 639610 - DNA, 33 bp, Homo sapien
ctctatcactaaaccccaagtcttgcattgagg

SEQ ID NO: 639611 - DNA, 33 bp, Homo sapien
gagcagggttttgcaacgccctgtggattcctg

SEQ ID NO: 639612 - DNA, 33 bp, Homo sapien
gagcagggttttgcaatgccctgtggattcctg

SEQ ID NO: 639613 - DNA, 33 bp, Homo sapien
aataacttcaccctctaagaatgaccttgtatg

SEQ ID NO: 639614 - DNA, 33 bp, Homo sapien
aataacttcaccctctgagaatgaccttgtatg

SEQ ID NO: 639615 - DNA, 33 bp, Homo sapien
aaacaggtaaatttgcaagtaataaggtcatct

SEQ ID NO: 639616 - DNA, 33 bp, Homo sapien
aaacaggtaaatttgcgagtaataaggtcatct

SEQ ID NO: 639617 - DNA, 33 bp, Homo sapien
tctagttaagatataaacaacaggacaatgaaa

SEQ ID NO: 639618 - DNA, 33 bp, Homo sapien
tctagttaagatataatcaacaggacaatgaaa

SEQ ID NO: 639619 - DNA, 33 bp, Homo sapien
tgaattttaactcccactatgtattattcaagc

SEQ ID NO: 639620 - DNA, 33 bp, Homo sapien
tgaattttaactcccagtatgtattattcaagc

SEQ ID NO: 639621 - DNA, 33 bp, Homo sapien
ccctgactcctaccatgagcctgttgaacactc

SEQ ID NO: 639622 - DNA, 33 bp, Homo sapien
ccctgactcctaccattagcctgttgaacactc

SEQ ID NO: 639623 - DNA, 33 bp, Homo sapien
atagcatggtggtaaggcatggagctgaagtca

SEQ ID NO: 639624 - DNA, 33 bp, Homo sapien
atagcatggtggtaagtcatggagctgaagtca

SEQ ID NO: 639625 - DNA, 33 bp, Homo sapien
gcagctacacagttgacagtggtctgtggactc

SEQ ID NO: 639626 - DNA, 33 bp, Homo sapien
gcagctacacagttgagagtggtctgtggactc

SEQ ID NO: 639627 - DNA, 33 bp, Homo sapien
cactgtgggaaatggagagtaaccactcaaaga

SEQ ID NO: 639628 - DNA, 33 bp, Homo sapien
cactgtgggaaatggatagtaaccactcaaaga

SEQ ID NO: 639629 - DNA, 33 bp, Homo sapien
ggtccctgcatcagaacagtgtatgccctgggg

SEQ ID NO: 639630 - DNA, 33 bp, Homo sapien
ggtccctgcatcagaagagtgtatgccctgggg

SEQ ID NO: 639631 - DNA, 33 bp, Homo sapien
tgcttaacatggattcactcatttaatgtaaac

SEQ ID NO: 639632 - DNA, 33 bp, Homo sapien
tgcttaacatggattctctcatttaatgtaaac

SEQ ID NO: 639633 - DNA, 33 bp, Homo sapien
ttttacctgaacagggacagtatgaatcctgtg

SEQ ID NO: 639634 - DNA, 33 bp, Homo sapien
ttttacctgaacagggtcagtatgaatcctgtg

SEQ ID NO: 639635 - DNA, 33 bp, Homo sapien
ttggttgagtgaggaaaactgaacaaattgtcc

SEQ ID NO: 639636 - DNA, 33 bp, Homo sapien
ttggttgagtgaggaacactgaacaaattgtcc

SEQ ID NO: 639637 - DNA, 33 bp, Homo sapien
attttggcaggattccccagaataaaataagaa

SEQ ID NO: 639638 - DNA, 33 bp, Homo sapien
attttggcaggattccgcagaataaaataagaa

SEQ ID NO: 639639 - DNA, 33 bp, Homo sapien
aaacttgcatctttctaaagaccagtaatgatt

SEQ ID NO: 639640 - DNA, 33 bp, Homo sapien
aaacttgcatctttctgaagaccagtaatgatt

SEQ ID NO: 639641 - DNA, 33 bp, Homo sapien
actcttatttggcaccaagtttagctctgagat

SEQ ID NO: 639642 - DNA, 33 bp, Homo sapien
actcttatttggcaccgagtttagctctgagat

SEQ ID NO: 639643 - DNA, 33 bp, Homo sapien
gctccttacactagtacggtgctatcattggta

SEQ ID NO: 639644 - DNA, 33 bp, Homo sapien
gctccttacactagtatggtgctatcattggta

SEQ ID NO: 639645 - DNA, 33 bp, Homo sapien
gactgtaattaagggaccttctcaaattgtatg

SEQ ID NO: 639646 - DNA, 33 bp, Homo sapien
gactgtaattaagggatcttctcaaattgtatg

SEQ ID NO: 639647 - DNA, 33 bp, Homo sapien
tgagcagagatacacaacagaccaaaagcacat

SEQ ID NO: 639648 - DNA, 33 bp, Homo sapien
tgagcagagatacacaccagaccaaaagcacat

SEQ ID NO: 639649 - DNA, 33 bp, Homo sapien
atagaatctttcagaaatgaacctgtttgtaag

SEQ ID NO: 639650 - DNA, 33 bp, Homo sapien
atagaatctttcagaactgaacctgtttgtaag

SEQ ID NO: 639651 - DNA, 33 bp, Homo sapien
tagcttgattctttaaatagatactagccttac

SEQ ID NO: 639652 - DNA, 33 bp, Homo sapien
tagcttgattctttaagtagatactagccttac

SEQ ID NO: 639653 - DNA, 33 bp, Homo sapien
aaggtaaaaataaaaagtgttcatatcatactt

SEQ ID NO: 639654 - DNA, 33 bp, Homo sapien
aaggtaaaaataaaaattgttcatatcatactt

SEQ ID NO: 639655 - DNA, 33 bp, Homo sapien
catactctctccaatccctttgttttgtacatg

SEQ ID NO: 639656 - DNA, 33 bp, Homo sapien
catactctctccaatctctttgttttgtacatg

SEQ ID NO: 639657 - DNA, 33 bp, Homo sapien
gactggagtcagattacgaagagtcttgtatgt

SEQ ID NO: 639658 - DNA, 33 bp, Homo sapien
gactggagtcagattatgaagagtcttgtatgt

SEQ ID NO: 639659 - DNA, 33 bp, Homo sapien
tagatcggtattttagaaatgtcactctagcta

SEQ ID NO: 639660 - DNA, 33 bp, Homo sapien
tagatcggtattttaggaatgtcactctagcta

SEQ ID NO: 639661 - DNA, 33 bp, Homo sapien
tcatttcaaaatggcagcttgtatagtgaaaat

SEQ ID NO: 639662 - DNA, 33 bp, Homo sapien
tcatttcaaaatggcatcttgtatagtgaaaat

SEQ ID NO: 639663 - DNA, 33 bp, Homo sapien
acctcccattggttgaacctggttagccactag

SEQ ID NO: 639664 - DNA, 33 bp, Homo sapien
acctcccattggttgagcctggttagccactag

SEQ ID NO: 639665 - DNA, 33 bp, Homo sapien
caaggggatattgaaagctataaggatgaatca

SEQ ID NO: 639666 - DNA, 33 bp, Homo sapien
caaggggatattgaaatctataaggatgaatca

SEQ ID NO: 639667 - DNA, 33 bp, Homo sapien
ggagtgaatacacaataagtaggaagagtgtca

SEQ ID NO: 639668 - DNA, 33 bp, Homo sapien
ggagtgaatacacaatgagtaggaagagtgtca

SEQ ID NO: 639669 - DNA, 33 bp, Homo sapien
cttccctaagccaaaactgtctgagaacatttt

SEQ ID NO: 639670 - DNA, 33 bp, Homo sapien
cttccctaagccaaaagtgtctgagaacatttt

SEQ ID NO: 639671 - DNA, 33 bp, Homo sapien
ttgtgagatctcctaactcagattctaaatctc

SEQ ID NO: 639672 - DNA, 33 bp, Homo sapien
ttgtgagatctcctaagtcagattctaaatctc

SEQ ID NO: 639673 - DNA, 33 bp, Homo sapien
gagaactctcacgcgacatagtagagaggaatg

SEQ ID NO: 639674 - DNA, 33 bp, Homo sapien
gagaactctcacgcgagatagtagagaggaatg

SEQ ID NO: 639675 - DNA, 33 bp, Homo sapien
ggatgagaagtaggaacggtctgccgctgggca

SEQ ID NO: 639676 - DNA, 33 bp, Homo sapien
ggatgagaagtaggaatggtctgccgctgggca

SEQ ID NO: 639677 - DNA, 33 bp, Homo sapien
ttcctgttctttgcataataccagattataaag

SEQ ID NO: 639678 - DNA, 33 bp, Homo sapien
ttcctgttctttgcatgataccagattataaag

SEQ ID NO: 639679 - DNA, 33 bp, Homo sapien
aggacattatcatattcaagcggttctgcagta

SEQ ID NO: 639680 - DNA, 33 bp, Homo sapien
aggacattatcatatttaagcggttctgcagta

SEQ ID NO: 639681 - DNA, 33 bp, Homo sapien
tggactttgagagaaaagccgtcagtggtaata

SEQ ID NO: 639682 - DNA, 33 bp, Homo sapien
tggactttgagagaaaggccgtcagtggtaata

SEQ ID NO: 639683 - DNA, 33 bp, Homo sapien
caaaaggattgatcgactcatgggttttccttt

SEQ ID NO: 639684 - DNA, 33 bp, Homo sapien
caaaaggattgatcgagtcatgggttttccttt

SEQ ID NO: 639685 - DNA, 33 bp, Homo sapien
tagaaaaagaagagacaatcaaaaaagtcggac

SEQ ID NO: 639686 - DNA, 33 bp, Homo sapien
tagaaaaagaagagaccatcaaaaaagtcggac

SEQ ID NO: 639687 - DNA, 33 bp, Homo sapien
gaacctgccagcatcacatggcctggtcatttc

SEQ ID NO: 639688 - DNA, 33 bp, Homo sapien
gaacctgccagcatcatatggcctggtcatttc

SEQ ID NO: 639689 - DNA, 33 bp, Homo sapien
gaatcgttttatggctgaatcatgctcctgatc

SEQ ID NO: 639690 - DNA, 33 bp, Homo sapien
gaatcgttttatggcttaatcatgctcctgatc

SEQ ID NO: 639691 - DNA, 33 bp, Homo sapien
aaaatggcttcacagaccatctgacagctttat

SEQ ID NO: 639692 - DNA, 33 bp, Homo sapien
aaaatggcttcacagatcatctgacagctttat

SEQ ID NO: 639693 - DNA, 33 bp, Homo sapien
aattctgttttgttaacacaggcttcttctctt

SEQ ID NO: 639694 - DNA, 33 bp, Homo sapien
aattctgttttgttaagacaggcttcttctctt

SEQ ID NO: 639695 - DNA, 33 bp, Homo sapien
atatccacctcaatccaattggagcaaggtaaa

SEQ ID NO: 639696 - DNA, 33 bp, Homo sapien
atatccacctcaatcctattggagcaaggtaaa

SEQ ID NO: 639697 - DNA, 33 bp, Homo sapien
agctaatcttgagcaacacacaaatgagccatc

SEQ ID NO: 639698 - DNA, 33 bp, Homo sapien
agctaatcttgagcaatacacaaatgagccatc

SEQ ID NO: 639699 - DNA, 33 bp, Homo sapien
tccttcatatttaaaagtcttaagtgcctcaaa

SEQ ID NO: 639700 - DNA, 33 bp, Homo sapien
tccttcatatttaaaattcttaagtgcctcaaa

SEQ ID NO: 639701 - DNA, 33 bp, Homo sapien
tagagactagtaaagaagttggggctggagaca

SEQ ID NO: 639702 - DNA, 33 bp, Homo sapien
tagagactagtaaagaggttggggctggagaca

SEQ ID NO: 639703 - DNA, 33 bp, Homo sapien
aaccaccaagatacaaattctccataagttctt

SEQ ID NO: 639704 - DNA, 33 bp, Homo sapien
aaccaccaagatacaagttctccataagttctt

SEQ ID NO: 639705 - DNA, 33 bp, Homo sapien
ggagagtagcaaaaaacagcatgacaggcatgg

SEQ ID NO: 639706 - DNA, 33 bp, Homo sapien
ggagagtagcaaaaaatagcatgacaggcatgg

SEQ ID NO: 639707 - DNA, 33 bp, Homo sapien
gcttttaaaaggggcaagctcaactgcatgacc

SEQ ID NO: 639708 - DNA, 33 bp, Homo sapien
gcttttaaaaggggcaggctcaactgcatgacc

SEQ ID NO: 639709 - DNA, 33 bp, Homo sapien
gttcataaaagaaaaccatgggtgacctactga

SEQ ID NO: 639710 - DNA, 33 bp, Homo sapien
gttcataaaagaaaactatgggtgacctactga

SEQ ID NO: 639711 - DNA, 33 bp, Homo sapien
ttgagcagtctgtcaaacaatacctggtgaaaa

SEQ ID NO: 639712 - DNA, 33 bp, Homo sapien
ttgagcagtctgtcaagcaatacctggtgaaaa

SEQ ID NO: 639713 - DNA, 33 bp, Homo sapien
aagctcagatccttacaatttagcctcttcttc

SEQ ID NO: 639714 - DNA, 33 bp, Homo sapien
aagctcagatccttacgatttagcctcttcttc

SEQ ID NO: 639715 - DNA, 33 bp, Homo sapien
ttgactggatgaattacatttgacagtgcctgt

SEQ ID NO: 639716 - DNA, 33 bp, Homo sapien
ttgactggatgaattagatttgacagtgcctgt

SEQ ID NO: 639717 - DNA, 33 bp, Homo sapien
agcctatgtctttagcccaggcaaacaaacaaa

SEQ ID NO: 639718 - DNA, 33 bp, Homo sapien
agcctatgtctttagctcaggcaaacaaacaaa

SEQ ID NO: 639719 - DNA, 33 bp, Homo sapien
acctctcagggtggaaaaagcatgatagacatt

SEQ ID NO: 639720 - DNA, 33 bp, Homo sapien
acctctcagggtggaacaagcatgatagacatt

SEQ ID NO: 639721 - DNA, 33 bp, Homo sapien
gaaaggaaatattaacaataagccagaaattaa

SEQ ID NO: 639722 - DNA, 33 bp, Homo sapien
gaaaggaaatattaactataagccagaaattaa

SEQ ID NO: 639723 - DNA, 33 bp, Homo sapien
atggtatttcatctgcaattaccacaagccttg

SEQ ID NO: 639724 - DNA, 33 bp, Homo sapien
atggtatttcatctgcgattaccacaagccttg

SEQ ID NO: 639725 - DNA, 33 bp, Homo sapien
aaactttgccggaagacaagttgcactgggaga

SEQ ID NO: 639726 - DNA, 33 bp, Homo sapien
aaactttgccggaagagaagttgcactgggaga

SEQ ID NO: 639727 - DNA, 33 bp, Homo sapien
ttttctttggacagtaccatattttaaaacaaa

SEQ ID NO: 639728 - DNA, 33 bp, Homo sapien
ttttctttggacagtatcatattttaaaacaaa

SEQ ID NO: 639729 - DNA, 33 bp, Homo sapien
ccgtattaagaaatcaatattgcatggactttt

SEQ ID NO: 639730 - DNA, 33 bp, Homo sapien
ccgtattaagaaatcagtattgcatggactttt

SEQ ID NO: 639731 - DNA, 33 bp, Homo sapien
ctttcgtttgtggcaactgaatcatctgaaata

SEQ ID NO: 639732 - DNA, 33 bp, Homo sapien
ctttcgtttgtggcaattgaatcatctgaaata

SEQ ID NO: 639733 - DNA, 33 bp, Homo sapien
attaaaaatagatacaactctgagaaatgtttt

SEQ ID NO: 639734 - DNA, 33 bp, Homo sapien
attaaaaatagatacagctctgagaaatgtttt

SEQ ID NO: 639735 - DNA, 33 bp, Homo sapien
catgcagaaatatttaacaggactcattacata

SEQ ID NO: 639736 - DNA, 33 bp, Homo sapien
catgcagaaatatttagcaggactcattacata

SEQ ID NO: 639737 - DNA, 33 bp, Homo sapien
tgaactgcaatactaccagacctcccacagata

SEQ ID NO: 639738 - DNA, 33 bp, Homo sapien
tgaactgcaatactacgagacctcccacagata

SEQ ID NO: 639739 - DNA, 33 bp, Homo sapien
attggagaagtggggaaagcaaccttgcccagt

SEQ ID NO: 639740 - DNA, 33 bp, Homo sapien
attggagaagtggggagagcaaccttgcccagt

SEQ ID NO: 639741 - DNA, 33 bp, Homo sapien
acaaccaacattagaaaactcagacttataaaa

SEQ ID NO: 639742 - DNA, 33 bp, Homo sapien
acaaccaacattagaacactcagacttataaaa

SEQ ID NO: 639743 - DNA, 33 bp, Homo sapien
attcctagatgcaaataagatacacgattttca

SEQ ID NO: 639744 - DNA, 33 bp, Homo sapien
attcctagatgcaaatgagatacacgattttca

SEQ ID NO: 639745 - DNA, 33 bp, Homo sapien
ttatggaattattctaagtcatgattctgtggt

SEQ ID NO: 639746 - DNA, 33 bp, Homo sapien
ttatggaattattctacgtcatgattctgtggt

SEQ ID NO: 639747 - DNA, 33 bp, Homo sapien
tatggatacaaagcagaattcttccctaaatag

SEQ ID NO: 639748 - DNA, 33 bp, Homo sapien
tatggatacaaagcagtattcttccctaaatag

SEQ ID NO: 639749 - DNA, 33 bp, Homo sapien
tgctcgaagcattagacagaaggaacagtagaa

SEQ ID NO: 639750 - DNA, 33 bp, Homo sapien
tgctcgaagcattagagagaaggaacagtagaa

SEQ ID NO: 639751 - DNA, 33 bp, Homo sapien
aaatgctggcactgaacagttatgaacacactt

SEQ ID NO: 639752 - DNA, 33 bp, Homo sapien
aaatgctggcactgaatagttatgaacacactt

SEQ ID NO: 639753 - DNA, 33 bp, Homo sapien
ctaactgaagtcataaatagtcactctggctag

SEQ ID NO: 639754 - DNA, 33 bp, Homo sapien
ctaactgaagtcataactagtcactctggctag

SEQ ID NO: 639755 - DNA, 33 bp, Homo sapien
tgcataaaatatcaaaagcacaaaaatattgaa

SEQ ID NO: 639756 - DNA, 33 bp, Homo sapien
tgcataaaatatcaaatgcacaaaaatattgaa

SEQ ID NO: 639757 - DNA, 33 bp, Homo sapien
aattttatgctagtccactccatttaagaaatt

SEQ ID NO: 639758 - DNA, 33 bp, Homo sapien
aattttatgctagtccgctccatttaagaaatt

SEQ ID NO: 639759 - DNA, 33 bp, Homo sapien
atccttggaagccaaacctcttcaggaccactg

SEQ ID NO: 639760 - DNA, 33 bp, Homo sapien
atccttggaagccaaagctcttcaggaccactg

SEQ ID NO: 639761 - DNA, 33 bp, Homo sapien
accagccatatttgcaacctgagcactcatagg

SEQ ID NO: 639762 - DNA, 33 bp, Homo sapien
accagccatatttgcagcctgagcactcatagg

SEQ ID NO: 639763 - DNA, 33 bp, Homo sapien
tacataagttttcacaatcatagaacatttgta

SEQ ID NO: 639764 - DNA, 33 bp, Homo sapien
tacataagttttcacagtcatagaacatttgta

SEQ ID NO: 639765 - DNA, 33 bp, Homo sapien
ttcaaacatcagacaacgggagaaactagaaga

SEQ ID NO: 639766 - DNA, 33 bp, Homo sapien
ttcaaacatcagacaatgggagaaactagaaga

SEQ ID NO: 639767 - DNA, 33 bp, Homo sapien
aagggtaaaggctgcaaactaaattttctccta

SEQ ID NO: 639768 - DNA, 33 bp, Homo sapien
aagggtaaaggctgcacactaaattttctccta

SEQ ID NO: 639769 - DNA, 33 bp, Homo sapien
tcctaatatgataaaactgcctccagcctttat

SEQ ID NO: 639770 - DNA, 33 bp, Homo sapien
tcctaatatgataaaagtgcctccagcctttat

SEQ ID NO: 639771 - DNA, 33 bp, Homo sapien
aggtcatatggactacaatgtgaatggcacctc

SEQ ID NO: 639772 - DNA, 33 bp, Homo sapien
aggtcatatggactacgatgtgaatggcacctc

SEQ ID NO: 639773 - DNA, 33 bp, Homo sapien
aggcaaagacatttagcaagctgggttcttgaa

SEQ ID NO: 639774 - DNA, 33 bp, Homo sapien
aggcaaagacatttaggaagctgggttcttgaa

SEQ ID NO: 639775 - DNA, 33 bp, Homo sapien
gttgttcactctaaaagggcagaaaagcagttc

SEQ ID NO: 639776 - DNA, 33 bp, Homo sapien
gttgttcactctaaaatggcagaaaagcagttc

SEQ ID NO: 639777 - DNA, 33 bp, Homo sapien
cacgccagtcagcaaaacctaatatgaacatta

SEQ ID NO: 639778 - DNA, 33 bp, Homo sapien
cacgccagtcagcaaagcctaatatgaacatta

SEQ ID NO: 639779 - DNA, 33 bp, Homo sapien
aaaggtctctatcagcaaattatattattgttt

SEQ ID NO: 639780 - DNA, 33 bp, Homo sapien
aaaggtctctatcagccaattatattattgttt

SEQ ID NO: 639781 - DNA, 33 bp, Homo sapien
gatgaagaattgaacaccaggaggaaggagcaa

SEQ ID NO: 639782 - DNA, 33 bp, Homo sapien
gatgaagaattgaacatcaggaggaaggagcaa

SEQ ID NO: 639783 - DNA, 33 bp, Homo sapien
ccattgtctaaaaaacacttcttaatgcttaaa

SEQ ID NO: 639784 - DNA, 33 bp, Homo sapien
ccattgtctaaaaaactcttcttaatgcttaaa

SEQ ID NO: 639785 - DNA, 33 bp, Homo sapien
ggtagtaaaaagtacaatgatctctcaggtgta

SEQ ID NO: 639786 - DNA, 33 bp, Homo sapien
ggtagtaaaaagtacagtgatctctcaggtgta

SEQ ID NO: 639787 - DNA, 33 bp, Homo sapien
ttgagttctagctcccagcaggctttggtgatc

SEQ ID NO: 639788 - DNA, 33 bp, Homo sapien
ttgagttctagctcccggcaggctttggtgatc

SEQ ID NO: 639789 - DNA, 33 bp, Homo sapien
tgtcctgacttgataaataggcataagaaaatc

SEQ ID NO: 639790 - DNA, 33 bp, Homo sapien
tgtcctgacttgataactaggcataagaaaatc

SEQ ID NO: 639791 - DNA, 33 bp, Homo sapien
attggggctactcccaaaaaagaaatctcccat

SEQ ID NO: 639792 - DNA, 33 bp, Homo sapien
attggggctactcccagaaaagaaatctcccat

SEQ ID NO: 639793 - DNA, 33 bp, Homo sapien
ttccaaataactgtagaatggagaggaacttgc

SEQ ID NO: 639794 - DNA, 33 bp, Homo sapien
ttccaaataactgtaggatggagaggaacttgc

SEQ ID NO: 639795 - DNA, 33 bp, Homo sapien
gtagttgtgacagagacgggctcaaaaaaccta

SEQ ID NO: 639796 - DNA, 33 bp, Homo sapien
gtagttgtgacagagatgggctcaaaaaaccta

SEQ ID NO: 639797 - DNA, 33 bp, Homo sapien
aaatagaaaactttcacagtaagccagctactt

SEQ ID NO: 639798 - DNA, 33 bp, Homo sapien
aaatagaaaactttcagagtaagccagctactt

SEQ ID NO: 639799 - DNA, 33 bp, Homo sapien
aacaaaatgctttctacctcaaagtgtctaaat

SEQ ID NO: 639800 - DNA, 33 bp, Homo sapien
aacaaaatgctttctatctcaaagtgtctaaat

SEQ ID NO: 639801 - DNA, 33 bp, Homo sapien
gctgactagagagaacagattaatgggttcctt

SEQ ID NO: 639802 - DNA, 33 bp, Homo sapien
gctgactagagagaacggattaatgggttcctt

SEQ ID NO: 639803 - DNA, 33 bp, Homo sapien
gtggctgtttcctccacagaaggtatcagagca

SEQ ID NO: 639804 - DNA, 33 bp, Homo sapien
gtggctgtttcctccatagaaggtatcagagca

SEQ ID NO: 639805 - DNA, 33 bp, Homo sapien
gatgttgatacatctacctagttgtgggagata

SEQ ID NO: 639806 - DNA, 33 bp, Homo sapien
gatgttgatacatctatctagttgtgggagata

SEQ ID NO: 639807 - DNA, 33 bp, Homo sapien
ttcttcccttaaacaactgtattcagaacaagt

SEQ ID NO: 639808 - DNA, 33 bp, Homo sapien
ttcttcccttaaacaattgtattcagaacaagt

SEQ ID NO: 639809 - DNA, 33 bp, Homo sapien
ttttcatttccactccgatttttagttttgaga

SEQ ID NO: 639810 - DNA, 33 bp, Homo sapien
ttttcatttccactcctatttttagttttgaga

SEQ ID NO: 639811 - DNA, 33 bp, Homo sapien
agactgtcaagagaaccgaattgcatccttgac

SEQ ID NO: 639812 - DNA, 33 bp, Homo sapien
agactgtcaagagaactgaattgcatccttgac

SEQ ID NO: 639813 - DNA, 33 bp, Homo sapien
tagctggtactaggaaacaatacacttttacaa

SEQ ID NO: 639814 - DNA, 33 bp, Homo sapien
tagctggtactaggaagcaatacacttttacaa

SEQ ID NO: 639815 - DNA, 33 bp, Homo sapien
agtctctgccttataccgatcaatatcatggga

SEQ ID NO: 639816 - DNA, 33 bp, Homo sapien
agtctctgccttatactgatcaatatcatggga

SEQ ID NO: 639817 - DNA, 33 bp, Homo sapien
gtataagccctcattgaaagatttactggaaca

SEQ ID NO: 639818 - DNA, 33 bp, Homo sapien
gtataagccctcattggaagatttactggaaca

SEQ ID NO: 639819 - DNA, 33 bp, Homo sapien
tccggaaacaggtaagcaatcagttcaaaagaa

SEQ ID NO: 639820 - DNA, 33 bp, Homo sapien
tccggaaacaggtaaggaatcagttcaaaagaa

SEQ ID NO: 639821 - DNA, 33 bp, Homo sapien
aaggatgcatacacacacttgtaaaattgcaca

SEQ ID NO: 639822 - DNA, 33 bp, Homo sapien
aaggatgcatacacacgcttgtaaaattgcaca

SEQ ID NO: 639823 - DNA, 33 bp, Homo sapien
ttaagaattgagaatcagaacttccactatgat

SEQ ID NO: 639824 - DNA, 33 bp, Homo sapien
ttaagaattgagaatcggaacttccactatgat

SEQ ID NO: 639825 - DNA, 33 bp, Homo sapien
tgcagagagccttgtacgcactccttacacctg

SEQ ID NO: 639826 - DNA, 33 bp, Homo sapien
tgcagagagccttgtatgcactccttacacctg

SEQ ID NO: 639827 - DNA, 33 bp, Homo sapien
tattctgtcttacaaaaatttggatgctctcac

SEQ ID NO: 639828 - DNA, 33 bp, Homo sapien
tattctgtcttacaaagatttggatgctctcac

SEQ ID NO: 639829 - DNA, 33 bp, Homo sapien
aactttctgcttccaactggttagccttaagtt

SEQ ID NO: 639830 - DNA, 33 bp, Homo sapien
aactttctgcttccaattggttagccttaagtt

SEQ ID NO: 639831 - DNA, 33 bp, Homo sapien
gaccactgatctgtgacgctatgtcaacagagc

SEQ ID NO: 639832 - DNA, 33 bp, Homo sapien
gaccactgatctgtgatgctatgtcaacagagc

SEQ ID NO: 639833 - DNA, 33 bp, Homo sapien
aactatttgtgttactgagctggtttttattca

SEQ ID NO: 639834 - DNA, 33 bp, Homo sapien
aactatttgtgttacttagctggtttttattca

SEQ ID NO: 639835 - DNA, 33 bp, Homo sapien
ggagagaaggaggaaaccaaagaaagtggcata

SEQ ID NO: 639836 - DNA, 33 bp, Homo sapien
ggagagaaggaggaaatcaaagaaagtggcata

SEQ ID NO: 639837 - DNA, 33 bp, Homo sapien
ttgagaaatccaaagcaaatgaatcaaaatccc

SEQ ID NO: 639838 - DNA, 33 bp, Homo sapien
ttgagaaatccaaagcgaatgaatcaaaatccc

SEQ ID NO: 639839 - DNA, 33 bp, Homo sapien
tgaatttcacagccaacggactgattgttattt

SEQ ID NO: 639840 - DNA, 33 bp, Homo sapien
tgaatttcacagccaagggactgattgttattt

SEQ ID NO: 639841 - DNA, 33 bp, Homo sapien
acatgacacacacttacatgcagagttcttaca

SEQ ID NO: 639842 - DNA, 33 bp, Homo sapien
acatgacacacacttatatgcagagttcttaca

SEQ ID NO: 639843 - DNA, 33 bp, Homo sapien
tttttataaattgcctcaatacaacatctggca

SEQ ID NO: 639844 - DNA, 33 bp, Homo sapien
tttttataaattgccttaatacaacatctggca

SEQ ID NO: 639845 - DNA, 33 bp, Homo sapien
aaatagtattttgacagggaaacacattaaata

SEQ ID NO: 639846 - DNA, 33 bp, Homo sapien
aaatagtattttgacatggaaacacattaaata

SEQ ID NO: 639847 - DNA, 33 bp, Homo sapien
aacttagactctcaccacataccatgcacaaaa

SEQ ID NO: 639848 - DNA, 33 bp, Homo sapien
aacttagactctcaccgcataccatgcacaaaa

SEQ ID NO: 639849 - DNA, 33 bp, Homo sapien
tttcatgcattgataaggggactgtaaaatggt

SEQ ID NO: 639850 - DNA, 33 bp, Homo sapien
tttcatgcattgataatgggactgtaaaatggt

SEQ ID NO: 639851 - DNA, 33 bp, Homo sapien
atcatgctacttgtaactcctttgctatcaaaa

SEQ ID NO: 639852 - DNA, 33 bp, Homo sapien
atcatgctacttgtaagtcctttgctatcaaaa

SEQ ID NO: 639853 - DNA, 33 bp, Homo sapien
tgttggagactaacaaatcaaaatctcatttcg

SEQ ID NO: 639854 - DNA, 33 bp, Homo sapien
tgttggagactaacaagtcaaaatctcatttcg

SEQ ID NO: 639855 - DNA, 33 bp, Homo sapien
tgggtaacaggcataaagagaggacaatgagcg

SEQ ID NO: 639856 - DNA, 33 bp, Homo sapien
tgggtaacaggcataacgagaggacaatgagcg

SEQ ID NO: 639857 - DNA, 33 bp, Homo sapien
gaggaaacagatgggacgtggataacaggggga

SEQ ID NO: 639858 - DNA, 33 bp, Homo sapien
gaggaaacagatgggatgtggataacaggggga

SEQ ID NO: 639859 - DNA, 33 bp, Homo sapien
tagcacaggcttcctccaagtaatgagattaga

SEQ ID NO: 639860 - DNA, 33 bp, Homo sapien
tagcacaggcttcctctaagtaatgagattaga

SEQ ID NO: 639861 - DNA, 33 bp, Homo sapien
gaaattaactctagctcaaataagcatgaacta

SEQ ID NO: 639862 - DNA, 33 bp, Homo sapien
gaaattaactctagctgaaataagcatgaacta

SEQ ID NO: 639863 - DNA, 33 bp, Homo sapien
ttcagtgagcatccccacctgtggcatacagac

SEQ ID NO: 639864 - DNA, 33 bp, Homo sapien
ttcagtgagcatccccgcctgtggcatacagac

SEQ ID NO: 639865 - DNA, 33 bp, Homo sapien
atatgcaaaggaaacactactcacaagaggaag

SEQ ID NO: 639866 - DNA, 33 bp, Homo sapien
atatgcaaaggaaacattactcacaagaggaag

SEQ ID NO: 639867 - DNA, 33 bp, Homo sapien
ttttactacacatttacgtaaagtcacttggta

SEQ ID NO: 639868 - DNA, 33 bp, Homo sapien
ttttactacacatttatgtaaagtcacttggta

SEQ ID NO: 639869 - DNA, 33 bp, Homo sapien
ggcaaaaaggttgtgcaatagtaacaaataacc

SEQ ID NO: 639870 - DNA, 33 bp, Homo sapien
ggcaaaaaggttgtgcgatagtaacaaataacc

SEQ ID NO: 639871 - DNA, 33 bp, Homo sapien
taaaacttctggatcaactgggtaacactattg

SEQ ID NO: 639872 - DNA, 33 bp, Homo sapien
taaaacttctggatcagctgggtaacactattg

SEQ ID NO: 639873 - DNA, 33 bp, Homo sapien
gggagggaggtggagacgtgaataggtgttgtc

SEQ ID NO: 639874 - DNA, 33 bp, Homo sapien
gggagggaggtggagatgtgaataggtgttgtc

SEQ ID NO: 639875 - DNA, 33 bp, Homo sapien
accccagtatttgaaacatgtgactaactggga

SEQ ID NO: 639876 - DNA, 33 bp, Homo sapien
accccagtatttgaaagatgtgactaactggga

SEQ ID NO: 639877 - DNA, 33 bp, Homo sapien
aggctctaaaaataccaaacatcctttcagaat

SEQ ID NO: 639878 - DNA, 33 bp, Homo sapien
aggctctaaaaataccgaacatcctttcagaat

SEQ ID NO: 639879 - DNA, 33 bp, Homo sapien
acagatgtcatttcttcaaaggtgaccactcag

SEQ ID NO: 639880 - DNA, 33 bp, Homo sapien
acagatgtcatttctttaaaggtgaccactcag

SEQ ID NO: 639881 - DNA, 33 bp, Homo sapien
ctttacctcatcaccaaactttatccagaatcc

SEQ ID NO: 639882 - DNA, 33 bp, Homo sapien
ctttacctcatcaccagactttatccagaatcc

SEQ ID NO: 639883 - DNA, 33 bp, Homo sapien
tctaatccacaagtaaactttacctcatcacca

SEQ ID NO: 639884 - DNA, 33 bp, Homo sapien
tctaatccacaagtaagctttacctcatcacca

SEQ ID NO: 639885 - DNA, 33 bp, Homo sapien
tttcttccctccaaaactcatatggcacttaat

SEQ ID NO: 639886 - DNA, 33 bp, Homo sapien
tttcttccctccaaaagtcatatggcacttaat

SEQ ID NO: 639887 - DNA, 33 bp, Homo sapien
acatctgtctttgccaatgcttaactcaatatg

SEQ ID NO: 639888 - DNA, 33 bp, Homo sapien
acatctgtctttgccagtgcttaactcaatatg

SEQ ID NO: 639889 - DNA, 33 bp, Homo sapien
aatgccagttaaagaaaaatgcttcctgtcaat

SEQ ID NO: 639890 - DNA, 33 bp, Homo sapien
aatgccagttaaagaacaatgcttcctgtcaat

SEQ ID NO: 639891 - DNA, 33 bp, Homo sapien
acattcaaatacatgacgaaaatcttcatgaca

SEQ ID NO: 639892 - DNA, 33 bp, Homo sapien
acattcaaatacatgaggaaaatcttcatgaca

SEQ ID NO: 639893 - DNA, 33 bp, Homo sapien
tgatacatctgaacaacgctctgcatttattcc

SEQ ID NO: 639894 - DNA, 33 bp, Homo sapien
tgatacatctgaacaaggctctgcatttattcc

SEQ ID NO: 639895 - DNA, 33 bp, Homo sapien
gctctgaccatttctacgagtgaaatcaactta

SEQ ID NO: 639896 - DNA, 33 bp, Homo sapien
gctctgaccatttctatgagtgaaatcaactta

SEQ ID NO: 639897 - DNA, 33 bp, Homo sapien
ctgccacctgtgacaccgaactggaataaaatg

SEQ ID NO: 639898 - DNA, 33 bp, Homo sapien
ctgccacctgtgacacggaactggaataaaatg

SEQ ID NO: 639899 - DNA, 33 bp, Homo sapien
ttttaaccatactcggacattgttatatattca

SEQ ID NO: 639900 - DNA, 33 bp, Homo sapien
ttttaaccatactcgggcattgttatatattca

SEQ ID NO: 639901 - DNA, 33 bp, Homo sapien
ccaaatgaccaaaggcaagtgtcactcaagggc

SEQ ID NO: 639902 - DNA, 33 bp, Homo sapien
ccaaatgaccaaaggcgagtgtcactcaagggc

SEQ ID NO: 639903 - DNA, 33 bp, Homo sapien
ccagtagatagtaaacaaatcaaagaataccaa

SEQ ID NO: 639904 - DNA, 33 bp, Homo sapien
ccagtagatagtaaaccaatcaaagaataccaa

SEQ ID NO: 639905 - DNA, 33 bp, Homo sapien
actaaagaacactttgaaaagattatttaaaat

SEQ ID NO: 639906 - DNA, 33 bp, Homo sapien
actaaagaacactttggaaagattatttaaaat

SEQ ID NO: 639907 - DNA, 33 bp, Homo sapien
gaaatggtggaaacaaaggtgatgacattcttt

SEQ ID NO: 639908 - DNA, 33 bp, Homo sapien
gaaatggtggaaacaagggtgatgacattcttt

SEQ ID NO: 639909 - DNA, 33 bp, Homo sapien
aaataatatggaacacaatacaagttagtaatt

SEQ ID NO: 639910 - DNA, 33 bp, Homo sapien
aaataatatggaacacgatacaagttagtaatt

SEQ ID NO: 639911 - DNA, 33 bp, Homo sapien
acctgggactccggctaacctcatgagggtctt

SEQ ID NO: 639912 - DNA, 33 bp, Homo sapien
acctgggactccggctgacctcatgagggtctt

SEQ ID NO: 639913 - DNA, 33 bp, Homo sapien
tcaaccattctattaacatgtcagaaacctaga

SEQ ID NO: 639914 - DNA, 33 bp, Homo sapien
tcaaccattctattaatatgtcagaaacctaga

SEQ ID NO: 639915 - DNA, 33 bp, Homo sapien
aggagttattgtcagaaagtgtgttggtcaaca

SEQ ID NO: 639916 - DNA, 33 bp, Homo sapien
aggagttattgtcagagagtgtgttggtcaaca

SEQ ID NO: 639917 - DNA, 33 bp, Homo sapien
caggctacactcatcaatgaatggagccattaa

SEQ ID NO: 639918 - DNA, 33 bp, Homo sapien
caggctacactcatcattgaatggagccattaa

SEQ ID NO: 639919 - DNA, 33 bp, Homo sapien
tgattataagctccaacggtctggttaaacaca

SEQ ID NO: 639920 - DNA, 33 bp, Homo sapien
tgattataagctccaatggtctggttaaacaca

SEQ ID NO: 639921 - DNA, 33 bp, Homo sapien
ggttttgatctttaaaatacaggataattttcc

SEQ ID NO: 639922 - DNA, 33 bp, Homo sapien
ggttttgatctttaaagtacaggataattttcc

SEQ ID NO: 639923 - DNA, 33 bp, Homo sapien
tgatcacactttgacactgaccatcactctctg

SEQ ID NO: 639924 - DNA, 33 bp, Homo sapien
tgatcacactttgacattgaccatcactctctg

SEQ ID NO: 639925 - DNA, 33 bp, Homo sapien
gtgtgtctctggatccaaacttctttttataag

SEQ ID NO: 639926 - DNA, 33 bp, Homo sapien
gtgtgtctctggatccgaacttctttttataag

SEQ ID NO: 639927 - DNA, 33 bp, Homo sapien
cttgtagcctgcagaacgatcagaaaataaatt

SEQ ID NO: 639928 - DNA, 33 bp, Homo sapien
cttgtagcctgcagaatgatcagaaaataaatt

SEQ ID NO: 639929 - DNA, 33 bp, Homo sapien
ttctgaaaatggaccaactcccgtctctgagcc

SEQ ID NO: 639930 - DNA, 33 bp, Homo sapien
ttctgaaaatggaccatctcccgtctctgagcc

SEQ ID NO: 639931 - DNA, 33 bp, Homo sapien
taaatggccattacagaaagtcggcctgagtgg

SEQ ID NO: 639932 - DNA, 33 bp, Homo sapien
taaatggccattacaggaagtcggcctgagtgg

SEQ ID NO: 639933 - DNA, 33 bp, Homo sapien
aacaatgtttttcaacaaagggcactatacaca

SEQ ID NO: 639934 - DNA, 33 bp, Homo sapien
aacaatgtttttcaaccaagggcactatacaca

SEQ ID NO: 639935 - DNA, 33 bp, Homo sapien
tgggcaaggagttctacagctgaaggaattata

SEQ ID NO: 639936 - DNA, 33 bp, Homo sapien
tgggcaaggagttctatagctgaaggaattata

SEQ ID NO: 639937 - DNA, 33 bp, Homo sapien
agccttggcctcaaagaaggatttctggactct

SEQ ID NO: 639938 - DNA, 33 bp, Homo sapien
agccttggcctcaaaggaggatttctggactct

SEQ ID NO: 639939 - DNA, 33 bp, Homo sapien
taaatatatgcttagcacagtgcctagcacaca

SEQ ID NO: 639940 - DNA, 33 bp, Homo sapien
taaatatatgcttagcgcagtgcctagcacaca

SEQ ID NO: 639941 - DNA, 33 bp, Homo sapien
tagcatagtctactgacgtcattttaccagttt

SEQ ID NO: 639942 - DNA, 33 bp, Homo sapien
tagcatagtctactgatgtcattttaccagttt

SEQ ID NO: 639943 - DNA, 33 bp, Homo sapien
acagccaaaatccacaatggaataattgcaaaa

SEQ ID NO: 639944 - DNA, 33 bp, Homo sapien
acagccaaaatccacattggaataattgcaaaa

SEQ ID NO: 639945 - DNA, 33 bp, Homo sapien
ctgcaagctcccagcaatctcccggtgtgttgt

SEQ ID NO: 639946 - DNA, 33 bp, Homo sapien
ctgcaagctcccagcattctcccggtgtgttgt

SEQ ID NO: 639947 - DNA, 33 bp, Homo sapien
ggccccaatgtacaacagcatttaaagagtttt

SEQ ID NO: 639948 - DNA, 33 bp, Homo sapien
ggccccaatgtacaacggcatttaaagagtttt

SEQ ID NO: 639949 - DNA, 33 bp, Homo sapien
gttgtctggttagaaacatagcaaaaggagagt

SEQ ID NO: 639950 - DNA, 33 bp, Homo sapien
gttgtctggttagaaatatagcaaaaggagagt

SEQ ID NO: 639951 - DNA, 33 bp, Homo sapien
catggtttgaaagaaaattatagagtgaaacca

SEQ ID NO: 639952 - DNA, 33 bp, Homo sapien
catggtttgaaagaaacttatagagtgaaacca

SEQ ID NO: 639953 - DNA, 33 bp, Homo sapien
caatgtacagtaaaaaagagcaagggctacttg

SEQ ID NO: 639954 - DNA, 33 bp, Homo sapien
caatgtacagtaaaaaggagcaagggctacttg

SEQ ID NO: 639955 - DNA, 33 bp, Homo sapien
cacaattgtgttcaaacgctattacaacgaatc

SEQ ID NO: 639956 - DNA, 33 bp, Homo sapien
cacaattgtgttcaaatgctattacaacgaatc

SEQ ID NO: 639957 - DNA, 33 bp, Homo sapien
agaaaatcttgtttaactaaacctgtctatgta

SEQ ID NO: 639958 - DNA, 33 bp, Homo sapien
agaaaatcttgtttaagtaaacctgtctatgta

SEQ ID NO: 639959 - DNA, 33 bp, Homo sapien
agggagcaatgagcccccaacagaaataagctg

SEQ ID NO: 639960 - DNA, 33 bp, Homo sapien
agggagcaatgagcccgcaacagaaataagctg

SEQ ID NO: 639961 - DNA, 33 bp, Homo sapien
ggtaatttggagaatacatgagagcattgcacc

SEQ ID NO: 639962 - DNA, 33 bp, Homo sapien
ggtaatttggagaatatatgagagcattgcacc

SEQ ID NO: 639963 - DNA, 33 bp, Homo sapien
caacctgttcacgttcaccaccttaaggatgtg

SEQ ID NO: 639964 - DNA, 33 bp, Homo sapien
caacctgttcacgttcgccaccttaaggatgtg

SEQ ID NO: 639965 - DNA, 33 bp, Homo sapien
catctcagtaaacgacagctctaccttttctga

SEQ ID NO: 639966 - DNA, 33 bp, Homo sapien
catctcagtaaacgactgctctaccttttctga

SEQ ID NO: 639967 - DNA, 33 bp, Homo sapien
aggtagatactatcatcaccaacatcattatca

SEQ ID NO: 639968 - DNA, 33 bp, Homo sapien
aggtagatactatcatgaccaacatcattatca

SEQ ID NO: 639969 - DNA, 33 bp, Homo sapien
ttcttgaacagcatgagcccatagagaagccat

SEQ ID NO: 639970 - DNA, 33 bp, Homo sapien
ttcttgaacagcatgatcccatagagaagccat

SEQ ID NO: 639971 - DNA, 33 bp, Homo sapien
taaggagactagaatacgtatgaaggttgtgtg

SEQ ID NO: 639972 - DNA, 33 bp, Homo sapien
taaggagactagaatatgtatgaaggttgtgtg

SEQ ID NO: 639973 - DNA, 33 bp, Homo sapien
actgctcagagcgagtaaatcagaaactttgga

SEQ ID NO: 639974 - DNA, 33 bp, Homo sapien
actgctcagagcgagtgaatcagaaactttgga

SEQ ID NO: 639975 - DNA, 33 bp, Homo sapien
gaaactttggagacggaatttagcaatgtgtgt

SEQ ID NO: 639976 - DNA, 33 bp, Homo sapien
gaaactttggagacgggatttagcaatgtgtgt

SEQ ID NO: 639977 - DNA, 33 bp, Homo sapien
gctgtgtgacctaagaatagttacttactttcc

SEQ ID NO: 639978 - DNA, 33 bp, Homo sapien
gctgtgtgacctaagattagttacttactttcc

SEQ ID NO: 639979 - DNA, 33 bp, Homo sapien
actttgtgcaaagcaacgttcagttactgaaac

SEQ ID NO: 639980 - DNA, 33 bp, Homo sapien
actttgtgcaaagcaatgttcagttactgaaac

SEQ ID NO: 639981 - DNA, 33 bp, Homo sapien
tgttttcttggggacactgtcaaaaacatttag

SEQ ID NO: 639982 - DNA, 33 bp, Homo sapien
tgttttcttggggacattgtcaaaaacatttag

SEQ ID NO: 639983 - DNA, 33 bp, Homo sapien
gatgagggcagggatcgctcatttattttgttc

SEQ ID NO: 639984 - DNA, 33 bp, Homo sapien
gatgagggcagggatctctcatttattttgttc

SEQ ID NO: 639985 - DNA, 33 bp, Homo sapien
tgtaaaacatattcaaagttatacagaattcta

SEQ ID NO: 639986 - DNA, 33 bp, Homo sapien
tgtaaaacatattcaaggttatacagaattcta

SEQ ID NO: 639987 - DNA, 33 bp, Homo sapien
ccactgcaaaataaagaactggaacaaaatggt

SEQ ID NO: 639988 - DNA, 33 bp, Homo sapien
ccactgcaaaataaagtactggaacaaaatggt

SEQ ID NO: 639989 - DNA, 33 bp, Homo sapien
agccctttctgctacccatgaggttttcctaat

SEQ ID NO: 639990 - DNA, 33 bp, Homo sapien
agccctttctgctaccgatgaggttttcctaat

SEQ ID NO: 639991 - DNA, 33 bp, Homo sapien
attttacttggtttgacaattactgaagctagg

SEQ ID NO: 639992 - DNA, 33 bp, Homo sapien
attttacttggtttgataattactgaagctagg

SEQ ID NO: 639993 - DNA, 33 bp, Homo sapien
atctagtcagtgttcaaatttctctgaatccat

SEQ ID NO: 639994 - DNA, 33 bp, Homo sapien
atctagtcagtgttcagatttctctgaatccat

SEQ ID NO: 639995 - DNA, 33 bp, Homo sapien
ttctcctgatttctaactaggcaagctttttta

SEQ ID NO: 639996 - DNA, 33 bp, Homo sapien
ttctcctgatttctaagtaggcaagctttttta

SEQ ID NO: 639997 - DNA, 33 bp, Homo sapien
tacttcctgatgcctaaatctcacacacaattc

SEQ ID NO: 639998 - DNA, 33 bp, Homo sapien
tacttcctgatgcctagatctcacacacaattc

SEQ ID NO: 639999 - DNA, 33 bp, Homo sapien
tgcaactgagtataaaagccttaagaggtgcca

SEQ ID NO: 640000 - DNA, 33 bp, Homo sapien
tgcaactgagtataaatgccttaagaggtgcca

SEQ ID NO: 640001 - DNA, 33 bp, Homo sapien
ttccgagcagggcgtacataagtggacattcca

SEQ ID NO: 640002 - DNA, 33 bp, Homo sapien
ttccgagcagggcgtagataagtggacattcca

SEQ ID NO: 640003 - DNA, 33 bp, Homo sapien
actgcctctgcaaaaccatacatctttccttaa

SEQ ID NO: 640004 - DNA, 33 bp, Homo sapien
actgcctctgcaaaacgatacatctttccttaa

SEQ ID NO: 640005 - DNA, 33 bp, Homo sapien
ctatctgggtatgtagaaagagtagtggctgga

SEQ ID NO: 640006 - DNA, 33 bp, Homo sapien
ctatctgggtatgtagcaagagtagtggctgga

SEQ ID NO: 640007 - DNA, 33 bp, Homo sapien
gttcacatccattggaagttaaggacaactgca

SEQ ID NO: 640008 - DNA, 33 bp, Homo sapien
gttcacatccattggaggttaaggacaactgca

SEQ ID NO: 640009 - DNA, 33 bp, Homo sapien
atctgaagttacttgcaatttcaggagatttaa

SEQ ID NO: 640010 - DNA, 33 bp, Homo sapien
atctgaagttacttgcgatttcaggagatttaa

SEQ ID NO: 640011 - DNA, 33 bp, Homo sapien
tcctgcattgctctggaactgaccactcctttc

SEQ ID NO: 640012 - DNA, 33 bp, Homo sapien
tcctgcattgctctgggactgaccactcctttc

SEQ ID NO: 640013 - DNA, 33 bp, Homo sapien
taaaatggctgaaattaaaaagactcactatac

SEQ ID NO: 640014 - DNA, 33 bp, Homo sapien
taaaatggctgaaattgaaaagactcactatac

SEQ ID NO: 640015 - DNA, 33 bp, Homo sapien
ttttacaaataatgccactttgaatattcactg

SEQ ID NO: 640016 - DNA, 33 bp, Homo sapien
ttttacaaataatgccgctttgaatattcactg

SEQ ID NO: 640017 - DNA, 33 bp, Homo sapien
tcattatcggtatgtacagattttaaagcagag

SEQ ID NO: 640018 - DNA, 33 bp, Homo sapien
tcattatcggtatgtatagattttaaagcagag

SEQ ID NO: 640019 - DNA, 33 bp, Homo sapien
tctaacttcaaaaaggcatgagtcactgtaagg

SEQ ID NO: 640020 - DNA, 33 bp, Homo sapien
tctaacttcaaaaaggtatgagtcactgtaagg

SEQ ID NO: 640021 - DNA, 33 bp, Homo sapien
ttaactatagatacaaatgacagcacagttgag

SEQ ID NO: 640022 - DNA, 33 bp, Homo sapien
ttaactatagatacaagtgacagcacagttgag

SEQ ID NO: 640023 - DNA, 33 bp, Homo sapien
cagttagtcaatggtcaagtccagatttgagca

SEQ ID NO: 640024 - DNA, 33 bp, Homo sapien
cagttagtcaatggtcgagtccagatttgagca

SEQ ID NO: 640025 - DNA, 33 bp, Homo sapien
cagacactggaactcacacaaatacacaaattc

SEQ ID NO: 640026 - DNA, 33 bp, Homo sapien
cagacactggaactcatacaaatacacaaattc

SEQ ID NO: 640027 - DNA, 33 bp, Homo sapien
gccacaagctgcttcacacgtgggcaaccctag

SEQ ID NO: 640028 - DNA, 33 bp, Homo sapien
gccacaagctgcttcatacgtgggcaaccctag

SEQ ID NO: 640029 - DNA, 33 bp, Homo sapien
cagaagctcaaaatacacattgttgttgttggt

SEQ ID NO: 640030 - DNA, 33 bp, Homo sapien
cagaagctcaaaatactcattgttgttgttggt

SEQ ID NO: 640031 - DNA, 33 bp, Homo sapien
tggaatttcaaaggtaagtctgctattgatcag

SEQ ID NO: 640032 - DNA, 33 bp, Homo sapien
tggaatttcaaaggtaggtctgctattgatcag

SEQ ID NO: 640033 - DNA, 33 bp, Homo sapien
ctgcatgaactgacccacctacttctctagcct

SEQ ID NO: 640034 - DNA, 33 bp, Homo sapien
ctgcatgaactgacccgcctacttctctagcct

SEQ ID NO: 640035 - DNA, 33 bp, Homo sapien
ttggacaatatatagcacagttgagcctttgta

SEQ ID NO: 640036 - DNA, 33 bp, Homo sapien
ttggacaatatatagcgcagttgagcctttgta

SEQ ID NO: 640037 - DNA, 33 bp, Homo sapien
tataattaaaaaacaacgaccacagcaattgaa

SEQ ID NO: 640038 - DNA, 33 bp, Homo sapien
tataattaaaaaacaaggaccacagcaattgaa

SEQ ID NO: 640039 - DNA, 33 bp, Homo sapien
tcaccaacaatgtcaccatacatcaccatacaa

SEQ ID NO: 640040 - DNA, 33 bp, Homo sapien
tcaccaacaatgtcacgatacatcaccatacaa

SEQ ID NO: 640041 - DNA, 33 bp, Homo sapien
atatggcaagtgtagaacaaacattgtctctat

SEQ ID NO: 640042 - DNA, 33 bp, Homo sapien
atatggcaagtgtagaccaaacattgtctctat

SEQ ID NO: 640043 - DNA, 33 bp, Homo sapien
agagcaaggatggaacagataaactgcctacta

SEQ ID NO: 640044 - DNA, 33 bp, Homo sapien
agagcaaggatggaacggataaactgcctacta

SEQ ID NO: 640045 - DNA, 33 bp, Homo sapien
gtctatgtgtttatgcactaattttcatgacat

SEQ ID NO: 640046 - DNA, 33 bp, Homo sapien
gtctatgtgtttatgcgctaattttcatgacat

SEQ ID NO: 640047 - DNA, 33 bp, Homo sapien
tttatttctgccattgcactcatcatatctgca

SEQ ID NO: 640048 - DNA, 33 bp, Homo sapien
tttatttctgccattggactcatcatatctgca

SEQ ID NO: 640049 - DNA, 33 bp, Homo sapien
aatggcaacaaaattaacattgctagtcacgag

SEQ ID NO: 640050 - DNA, 33 bp, Homo sapien
aatggcaacaaaattaccattgctagtcacgag

SEQ ID NO: 640051 - DNA, 33 bp, Homo sapien
aggtggagaggtaaaaacgtgatgaggtgggaa

SEQ ID NO: 640052 - DNA, 33 bp, Homo sapien
aggtggagaggtaaaatcgtgatgaggtgggaa

SEQ ID NO: 640053 - DNA, 33 bp, Homo sapien
ttgcctctaactctaacgttcagtaaatctata

SEQ ID NO: 640054 - DNA, 33 bp, Homo sapien
ttgcctctaactctaatgttcagtaaatctata

SEQ ID NO: 640055 - DNA, 33 bp, Homo sapien
aatatcatgaccaggacactaacaattcatttt

SEQ ID NO: 640056 - DNA, 33 bp, Homo sapien
aatatcatgaccaggatactaacaattcatttt

SEQ ID NO: 640057 - DNA, 33 bp, Homo sapien
agtatctgaaacacaaagtatgttcaaaaaata

SEQ ID NO: 640058 - DNA, 33 bp, Homo sapien
agtatctgaaacacaaggtatgttcaaaaaata

SEQ ID NO: 640059 - DNA, 33 bp, Homo sapien
gctaaagtgaatgaacaggtaactaaacatgtg

SEQ ID NO: 640060 - DNA, 33 bp, Homo sapien
gctaaagtgaatgaacgggtaactaaacatgtg

SEQ ID NO: 640061 - DNA, 33 bp, Homo sapien
tggaagcaaagggagacctgatgtatcatatgg

SEQ ID NO: 640062 - DNA, 33 bp, Homo sapien
tggaagcaaagggagatctgatgtatcatatgg

SEQ ID NO: 640063 - DNA, 33 bp, Homo sapien
aactaatctacaaaccacttttctattgacttt

SEQ ID NO: 640064 - DNA, 33 bp, Homo sapien
aactaatctacaaaccgcttttctattgacttt

SEQ ID NO: 640065 - DNA, 33 bp, Homo sapien
attattcatgtcattacggagcaaacataaagc

SEQ ID NO: 640066 - DNA, 33 bp, Homo sapien
attattcatgtcattatggagcaaacataaagc

SEQ ID NO: 640067 - DNA, 33 bp, Homo sapien
tcaagtgtttcagaaaattgtctctggttggag

SEQ ID NO: 640068 - DNA, 33 bp, Homo sapien
tcaagtgtttcagaaatttgtctctggttggag

SEQ ID NO: 640069 - DNA, 33 bp, Homo sapien
tggaactggcatagtactacaaaatatgttgca

SEQ ID NO: 640070 - DNA, 33 bp, Homo sapien
tggaactggcatagtattacaaaatatgttgca

SEQ ID NO: 640071 - DNA, 33 bp, Homo sapien
atacaaaatctaacacaatccagtgctcaacca

SEQ ID NO: 640072 - DNA, 33 bp, Homo sapien
atacaaaatctaacacgatccagtgctcaacca

SEQ ID NO: 640073 - DNA, 33 bp, Homo sapien
gagagtggaaagaataagaattttgctgggaaa

SEQ ID NO: 640074 - DNA, 33 bp, Homo sapien
gagagtggaaagaataggaattttgctgggaaa

SEQ ID NO: 640075 - DNA, 33 bp, Homo sapien
cagggaaaactgataaatgtaatttcccagtgt

SEQ ID NO: 640076 - DNA, 33 bp, Homo sapien
cagggaaaactgataagtgtaatttcccagtgt

SEQ ID NO: 640077 - DNA, 33 bp, Homo sapien
atgctggaccaaaaaaattaggcttatgattag

SEQ ID NO: 640078 - DNA, 33 bp, Homo sapien
atgctggaccaaaaaatttaggcttatgattag

SEQ ID NO: 640079 - DNA, 33 bp, Homo sapien
cagagctgtaaactaccggagcattggaggcat

SEQ ID NO: 640080 - DNA, 33 bp, Homo sapien
cagagctgtaaactactggagcattggaggcat

SEQ ID NO: 640081 - DNA, 33 bp, Homo sapien
tttgcattacagaagaccaaggttagcttacat

SEQ ID NO: 640082 - DNA, 33 bp, Homo sapien
tttgcattacagaagagcaaggttagcttacat

SEQ ID NO: 640083 - DNA, 33 bp, Homo sapien
ttgtgtttccattaggccattaagtgtcttaga

SEQ ID NO: 640084 - DNA, 33 bp, Homo sapien
ttgtgtttccattaggtcattaagtgtcttaga

SEQ ID NO: 640085 - DNA, 33 bp, Homo sapien
ctattttgcactaaggacagaaccatggtaggg

SEQ ID NO: 640086 - DNA, 33 bp, Homo sapien
ctattttgcactaaggtcagaaccatggtaggg

SEQ ID NO: 640087 - DNA, 33 bp, Homo sapien
caacagcaatattaacagcagcttcttttgtgc

SEQ ID NO: 640088 - DNA, 33 bp, Homo sapien
caacagcaatattaacggcagcttcttttgtgc

SEQ ID NO: 640089 - DNA, 33 bp, Homo sapien
taggctgtaatgagtgaaagcaagataagctgt

SEQ ID NO: 640090 - DNA, 33 bp, Homo sapien
taggctgtaatgagtggaagcaagataagctgt

SEQ ID NO: 640091 - DNA, 33 bp, Homo sapien
aggcagtatccaaaataactaggaaatcaatgt

SEQ ID NO: 640092 - DNA, 33 bp, Homo sapien
aggcagtatccaaaatgactaggaaatcaatgt

SEQ ID NO: 640093 - DNA, 33 bp, Homo sapien
atacttcagccaccaaagtagatagaaatgctg

SEQ ID NO: 640094 - DNA, 33 bp, Homo sapien
atacttcagccaccaaggtagatagaaatgctg

SEQ ID NO: 640095 - DNA, 33 bp, Homo sapien
ctctgccaccaccttactaagatctttttacag

SEQ ID NO: 640096 - DNA, 33 bp, Homo sapien
ctctgccaccaccttattaagatctttttacag

SEQ ID NO: 640097 - DNA, 33 bp, Homo sapien
tttggcaattggaaaactaccttctgcaggtag

SEQ ID NO: 640098 - DNA, 33 bp, Homo sapien
tttggcaattggaaaagtaccttctgcaggtag

SEQ ID NO: 640099 - DNA, 33 bp, Homo sapien
gtctccttataggtccagatgactttggctttc

SEQ ID NO: 640100 - DNA, 33 bp, Homo sapien
gtctccttataggtccggatgactttggctttc

SEQ ID NO: 640101 - DNA, 33 bp, Homo sapien
ccaagtgacactgctccacttttcacctggctc

SEQ ID NO: 640102 - DNA, 33 bp, Homo sapien
ccaagtgacactgctcgacttttcacctggctc

SEQ ID NO: 640103 - DNA, 33 bp, Homo sapien
tgttatttattttagcaaagtatgaacctggaa

SEQ ID NO: 640104 - DNA, 33 bp, Homo sapien
tgttatttattttagcgaagtatgaacctggaa

SEQ ID NO: 640105 - DNA, 33 bp, Homo sapien
gaacctattcaggagacagacgttcgctaacca

SEQ ID NO: 640106 - DNA, 33 bp, Homo sapien
gaacctattcaggagatagacgttcgctaacca

SEQ ID NO: 640107 - DNA, 33 bp, Homo sapien
gtgctgtcaataattccccacaaaggattccat

SEQ ID NO: 640108 - DNA, 33 bp, Homo sapien
gtgctgtcaataattctccacaaaggattccat

SEQ ID NO: 640109 - DNA, 33 bp, Homo sapien
agggaggaaggacagaagaatcttgcttccttc

SEQ ID NO: 640110 - DNA, 33 bp, Homo sapien
agggaggaaggacagaggaatcttgcttccttc

SEQ ID NO: 640111 - DNA, 33 bp, Homo sapien
atgtgatttgcaaataccttcttccaaactcta

SEQ ID NO: 640112 - DNA, 33 bp, Homo sapien
atgtgatttgcaaatatcttcttccaaactcta

SEQ ID NO: 640113 - DNA, 33 bp, Homo sapien
tgatagcagagttttaccgtagttccattttct

SEQ ID NO: 640114 - DNA, 33 bp, Homo sapien
tgatagcagagttttatcgtagttccattttct

SEQ ID NO: 640115 - DNA, 33 bp, Homo sapien
tgaatacatcaaccaccagtgtatgctgactaa

SEQ ID NO: 640116 - DNA, 33 bp, Homo sapien
tgaatacatcaaccacgagtgtatgctgactaa

SEQ ID NO: 640117 - DNA, 33 bp, Homo sapien
atttaagggaatgaaaagatataagccttatat

SEQ ID NO: 640118 - DNA, 33 bp, Homo sapien
atttaagggaatgaaatgatataagccttatat

SEQ ID NO: 640119 - DNA, 33 bp, Homo sapien
ctttctgccaaagataaaaatcactttacagaa

SEQ ID NO: 640120 - DNA, 33 bp, Homo sapien
ctttctgccaaagatagaaatcactttacagaa

SEQ ID NO: 640121 - DNA, 33 bp, Homo sapien
ccagggtagagacaacagtgagctaaactaggt

SEQ ID NO: 640122 - DNA, 33 bp, Homo sapien
ccagggtagagacaacggtgagctaaactaggt

SEQ ID NO: 640123 - DNA, 33 bp, Homo sapien
agaagtaagtcatacaaaaatggctgtgtttta

SEQ ID NO: 640124 - DNA, 33 bp, Homo sapien
agaagtaagtcatacacaaatggctgtgtttta

SEQ ID NO: 640125 - DNA, 33 bp, Homo sapien
ttaaggatagtagggacgaaaaacacagaaaga

SEQ ID NO: 640126 - DNA, 33 bp, Homo sapien
ttaaggatagtagggatgaaaaacacagaaaga

SEQ ID NO: 640127 - DNA, 33 bp, Homo sapien
aaaagtgaagttatcaaggaaaatgttgtccaa

SEQ ID NO: 640128 - DNA, 33 bp, Homo sapien
aaaagtgaagttatcacggaaaatgttgtccaa

SEQ ID NO: 640129 - DNA, 33 bp, Homo sapien
ataaatatcttatgaccgaagaataactatggt

SEQ ID NO: 640130 - DNA, 33 bp, Homo sapien
ataaatatcttatgactgaagaataactatggt

SEQ ID NO: 640131 - DNA, 33 bp, Homo sapien
ttttatgctttctgaccggatatggacaaaaga

SEQ ID NO: 640132 - DNA, 33 bp, Homo sapien
ttttatgctttctgactggatatggacaaaaga

SEQ ID NO: 640133 - DNA, 33 bp, Homo sapien
aatcctcatccccagcaaataattattgagtcc

SEQ ID NO: 640134 - DNA, 33 bp, Homo sapien
aatcctcatccccagcgaataattattgagtcc

SEQ ID NO: 640135 - DNA, 33 bp, Homo sapien
tatatgaaaagtggaaacgtctactctgttctg

SEQ ID NO: 640136 - DNA, 33 bp, Homo sapien
tatatgaaaagtggaatcgtctactctgttctg

SEQ ID NO: 640137 - DNA, 33 bp, Homo sapien
caacacaaatgtaaagaaaagctgaaggggaat

SEQ ID NO: 640138 - DNA, 33 bp, Homo sapien
caacacaaatgtaaaggaaagctgaaggggaat

SEQ ID NO: 640139 - DNA, 33 bp, Homo sapien
acagagttacacatacaaggacagtccgttcaa

SEQ ID NO: 640140 - DNA, 33 bp, Homo sapien
acagagttacacatacgaggacagtccgttcaa

SEQ ID NO: 640141 - DNA, 33 bp, Homo sapien
ggaaataccagaagaaaggcacctatgtctcca

SEQ ID NO: 640142 - DNA, 33 bp, Homo sapien
ggaaataccagaagaagggcacctatgtctcca

SEQ ID NO: 640143 - DNA, 33 bp, Homo sapien
tcaggtagacacaatagcacacttatctctcaa

SEQ ID NO: 640144 - DNA, 33 bp, Homo sapien
tcaggtagacacaatatcacacttatctctcaa

SEQ ID NO: 640145 - DNA, 33 bp, Homo sapien
ggtctaacatcaaagcccatacttcactcatgt

SEQ ID NO: 640146 - DNA, 33 bp, Homo sapien
ggtctaacatcaaagctcatacttcactcatgt

SEQ ID NO: 640147 - DNA, 33 bp, Homo sapien
gagccaaggatttatacgaattgacccatctaa

SEQ ID NO: 640148 - DNA, 33 bp, Homo sapien
gagccaaggatttatatgaattgacccatctaa

SEQ ID NO: 640149 - DNA, 33 bp, Homo sapien
ctgaactgtgcactggacagtaataccccaact

SEQ ID NO: 640150 - DNA, 33 bp, Homo sapien
ctgaactgtgcactgggcagtaataccccaact

SEQ ID NO: 640151 - DNA, 33 bp, Homo sapien
caaagagaattccaaaataaactgcataataaa

SEQ ID NO: 640152 - DNA, 33 bp, Homo sapien
caaagagaattccaaagtaaactgcataataaa

SEQ ID NO: 640153 - DNA, 33 bp, Homo sapien
gcaaggtatgttatcaatattcacaatttacaa

SEQ ID NO: 640154 - DNA, 33 bp, Homo sapien
gcaaggtatgttatcagtattcacaatttacaa

SEQ ID NO: 640155 - DNA, 33 bp, Homo sapien
tcaggtaaatatctcaaagctaaaaacttccaa

SEQ ID NO: 640156 - DNA, 33 bp, Homo sapien
tcaggtaaatatctcagagctaaaaacttccaa

SEQ ID NO: 640157 - DNA, 33 bp, Homo sapien
atctgaatatctatgtaaaatttcctcttctcc

SEQ ID NO: 640158 - DNA, 33 bp, Homo sapien
atctgaatatctatgtgaaatttcctcttctcc

SEQ ID NO: 640159 - DNA, 33 bp, Homo sapien
aatgacatttcagtgaccatgagaagaaaagga

SEQ ID NO: 640160 - DNA, 33 bp, Homo sapien
aatgacatttcagtgagcatgagaagaaaagga

SEQ ID NO: 640161 - DNA, 33 bp, Homo sapien
ggacaaaagtggcaacagcatattcaaaaacac

SEQ ID NO: 640162 - DNA, 33 bp, Homo sapien
ggacaaaagtggcaacggcatattcaaaaacac

SEQ ID NO: 640163 - DNA, 33 bp, Homo sapien
cttggagggatttccacgagtaagtacacatcc

SEQ ID NO: 640164 - DNA, 33 bp, Homo sapien
cttggagggatttccaggagtaagtacacatcc

SEQ ID NO: 640165 - DNA, 33 bp, Homo sapien
taaaaaaaagagctgccaagtagccagccattc

SEQ ID NO: 640166 - DNA, 33 bp, Homo sapien
taaaaaaaagagctgcgaagtagccagccattc

SEQ ID NO: 640167 - DNA, 33 bp, Homo sapien
gacgataaagtcctaccgcacccatatagacaa

SEQ ID NO: 640168 - DNA, 33 bp, Homo sapien
gacgataaagtcctacggcacccatatagacaa

SEQ ID NO: 640169 - DNA, 33 bp, Homo sapien
cacaattaagcattgaggaagaggttgtttatc

SEQ ID NO: 640170 - DNA, 33 bp, Homo sapien
cacaattaagcattgatgaagaggttgtttatc

SEQ ID NO: 640171 - DNA, 33 bp, Homo sapien
tcatcctgaaggctacaagttttattttaaagg

SEQ ID NO: 640172 - DNA, 33 bp, Homo sapien
tcatcctgaaggctacgagttttattttaaagg

SEQ ID NO: 640173 - DNA, 33 bp, Homo sapien
catatcatactgcaaaaacatgaagttcttcca

SEQ ID NO: 640174 - DNA, 33 bp, Homo sapien
catatcatactgcaaatacatgaagttcttcca

SEQ ID NO: 640175 - DNA, 33 bp, Homo sapien
gtctaaaaaacatacactaacagaatggtgaac

SEQ ID NO: 640176 - DNA, 33 bp, Homo sapien
gtctaaaaaacatacagtaacagaatggtgaac

SEQ ID NO: 640177 - DNA, 33 bp, Homo sapien
ttctctgcctcaaagtcacttccttctcatttt

SEQ ID NO: 640178 - DNA, 33 bp, Homo sapien
ttctctgcctcaaagttacttccttctcatttt

SEQ ID NO: 640179 - DNA, 33 bp, Homo sapien
ctatcaagtgggaacactctacctcataagatt

SEQ ID NO: 640180 - DNA, 33 bp, Homo sapien
ctatcaagtgggaacattctacctcataagatt

SEQ ID NO: 640181 - DNA, 33 bp, Homo sapien
gagacactgcagagtaaggtaatgggtaaaaac

SEQ ID NO: 640182 - DNA, 33 bp, Homo sapien
gagacactgcagagtagggtaatgggtaaaaac

SEQ ID NO: 640183 - DNA, 33 bp, Homo sapien
aagttctaataaggcacgttctaggaaggagac

SEQ ID NO: 640184 - DNA, 33 bp, Homo sapien
aagttctaataaggcaggttctaggaaggagac

SEQ ID NO: 640185 - DNA, 33 bp, Homo sapien
ctgtttgcatttgagtcaatttgtttcaccact

SEQ ID NO: 640186 - DNA, 33 bp, Homo sapien
ctgtttgcatttgagttaatttgtttcaccact

SEQ ID NO: 640187 - DNA, 33 bp, Homo sapien
caggttatctgctctaccccctttgccctttct

SEQ ID NO: 640188 - DNA, 33 bp, Homo sapien
caggttatctgctctatcccctttgccctttct

SEQ ID NO: 640189 - DNA, 33 bp, Homo sapien
gaatcgagttatttggaattctatcctagttct

SEQ ID NO: 640190 - DNA, 33 bp, Homo sapien
gaatcgagttatttgggattctatcctagttct

SEQ ID NO: 640191 - DNA, 33 bp, Homo sapien
ggactctggacccaaaccacgaaaccatttttc

SEQ ID NO: 640192 - DNA, 33 bp, Homo sapien
ggactctggacccaaatcacgaaaccatttttc

SEQ ID NO: 640193 - DNA, 33 bp, Homo sapien
tgggatcctctgcctaaatttcacaggttatat

SEQ ID NO: 640194 - DNA, 33 bp, Homo sapien
tgggatcctctgcctagatttcacaggttatat

SEQ ID NO: 640195 - DNA, 33 bp, Homo sapien
tctctatgctagactccaaatggcagtctatag

SEQ ID NO: 640196 - DNA, 33 bp, Homo sapien
tctctatgctagactctaaatggcagtctatag

SEQ ID NO: 640197 - DNA, 33 bp, Homo sapien
attatgtcctgagtgaaagcagaaaaacgactc

SEQ ID NO: 640198 - DNA, 33 bp, Homo sapien
attatgtcctgagtgagagcagaaaaacgactc

SEQ ID NO: 640199 - DNA, 33 bp, Homo sapien
cactcagtgaaatacactctttcaaatccatgt

SEQ ID NO: 640200 - DNA, 33 bp, Homo sapien
cactcagtgaaatacagtctttcaaatccatgt

SEQ ID NO: 640201 - DNA, 33 bp, Homo sapien
tgcttgttcttggacacgaaaccactgatagat

SEQ ID NO: 640202 - DNA, 33 bp, Homo sapien
tgcttgttcttggacatgaaaccactgatagat

SEQ ID NO: 640203 - DNA, 33 bp, Homo sapien
agttaagtttgtcacaacctttctggaaattag

SEQ ID NO: 640204 - DNA, 33 bp, Homo sapien
agttaagtttgtcacagcctttctggaaattag

SEQ ID NO: 640205 - DNA, 33 bp, Homo sapien
ccattggttgcatggccatattgcttgctgtaa

SEQ ID NO: 640206 - DNA, 33 bp, Homo sapien
ccattggttgcatggctatattgcttgctgtaa

SEQ ID NO: 640207 - DNA, 33 bp, Homo sapien
tccacgaggtttggctaaatttcctttaattgg

SEQ ID NO: 640208 - DNA, 33 bp, Homo sapien
tccacgaggtttggctgaatttcctttaattgg

SEQ ID NO: 640209 - DNA, 33 bp, Homo sapien
tgtcaacctttgcccaactagtcacagccagag

SEQ ID NO: 640210 - DNA, 33 bp, Homo sapien
tgtcaacctttgcccagctagtcacagccagag

SEQ ID NO: 640211 - DNA, 33 bp, Homo sapien
aacagatttcaaaacccctatactaacacttca

SEQ ID NO: 640212 - DNA, 33 bp, Homo sapien
aacagatttcaaaacctctatactaacacttca

SEQ ID NO: 640213 - DNA, 33 bp, Homo sapien
ataaagacttcaggcaataagaatgaagatcct

SEQ ID NO: 640214 - DNA, 33 bp, Homo sapien
ataaagacttcaggcagtaagaatgaagatcct

SEQ ID NO: 640215 - DNA, 33 bp, Homo sapien
caaaactgaattggcaatgaactcttctaagca

SEQ ID NO: 640216 - DNA, 33 bp, Homo sapien
caaaactgaattggcagtgaactcttctaagca

SEQ ID NO: 640217 - DNA, 33 bp, Homo sapien
aaaacttagtccacaccaatctcaagttaccac

SEQ ID NO: 640218 - DNA, 33 bp, Homo sapien
aaaacttagtccacacgaatctcaagttaccac

SEQ ID NO: 640219 - DNA, 33 bp, Homo sapien
acatcacacaactttgcaatcaccaatttgcct

SEQ ID NO: 640220 - DNA, 33 bp, Homo sapien
acatcacacaactttgtaatcaccaatttgcct

SEQ ID NO: 640221 - DNA, 33 bp, Homo sapien
ggatccttcttgttgacgctgggcttttgcaca

SEQ ID NO: 640222 - DNA, 33 bp, Homo sapien
ggatccttcttgttgatgctgggcttttgcaca

SEQ ID NO: 640223 - DNA, 33 bp, Homo sapien
tgaagcagggtctagacatttgcattttttaaa

SEQ ID NO: 640224 - DNA, 33 bp, Homo sapien
tgaagcagggtctagatatttgcattttttaaa

SEQ ID NO: 640225 - DNA, 33 bp, Homo sapien
cagagttgagaaccaaagctgtagtggttaaga

SEQ ID NO: 640226 - DNA, 33 bp, Homo sapien
cagagttgagaaccaaggctgtagtggttaaga

SEQ ID NO: 640227 - DNA, 33 bp, Homo sapien
aaggtagatactgttacgcccaccttacaaatg

SEQ ID NO: 640228 - DNA, 33 bp, Homo sapien
aaggtagatactgttatgcccaccttacaaatg

SEQ ID NO: 640229 - DNA, 33 bp, Homo sapien
cattagacattttaatgatctggtgatatggtc

SEQ ID NO: 640230 - DNA, 33 bp, Homo sapien
cattagacattttaattatctggtgatatggtc

SEQ ID NO: 640231 - DNA, 33 bp, Homo sapien
atagcaactttttggagaagtgtctacttgtct

SEQ ID NO: 640232 - DNA, 33 bp, Homo sapien
atagcaactttttggataagtgtctacttgtct

SEQ ID NO: 640233 - DNA, 33 bp, Homo sapien
gagacctgaggcttgggatctcaggtaatcatt

SEQ ID NO: 640234 - DNA, 33 bp, Homo sapien
gagacctgaggcttggtatctcaggtaatcatt

SEQ ID NO: 640235 - DNA, 33 bp, Homo sapien
gactatatttgtaggagagattctggaaaatgt

SEQ ID NO: 640236 - DNA, 33 bp, Homo sapien
gactatatttgtaggatagattctggaaaatgt

SEQ ID NO: 640237 - DNA, 33 bp, Homo sapien
acctagaaaagtaacaaagttgtcagtgaaaac

SEQ ID NO: 640238 - DNA, 33 bp, Homo sapien
acctagaaaagtaacagagttgtcagtgaaaac

SEQ ID NO: 640239 - DNA, 33 bp, Homo sapien
tgaatggattaatgaaaaagatgtaaatgggtt

SEQ ID NO: 640240 - DNA, 33 bp, Homo sapien
tgaatggattaatgaagaagatgtaaatgggtt

SEQ ID NO: 640241 - DNA, 33 bp, Homo sapien
gcaatctgagtctgcaaatcctggtattatgac

SEQ ID NO: 640242 - DNA, 33 bp, Homo sapien
gcaatctgagtctgcacatcctggtattatgac

SEQ ID NO: 640243 - DNA, 33 bp, Homo sapien
atggccttccagaagacgctgtttctaatattg

SEQ ID NO: 640244 - DNA, 33 bp, Homo sapien
atggccttccagaagatgctgtttctaatattg

SEQ ID NO: 640245 - DNA, 33 bp, Homo sapien
agttcagacttctctaacattttattggtcaag

SEQ ID NO: 640246 - DNA, 33 bp, Homo sapien
agttcagacttctctatcattttattggtcaag

SEQ ID NO: 640247 - DNA, 33 bp, Homo sapien
ccaagccacctggagaggttacgtgtaggttct

SEQ ID NO: 640248 - DNA, 33 bp, Homo sapien
ccaagccacctggagatgttacgtgtaggttct

SEQ ID NO: 640249 - DNA, 33 bp, Homo sapien
ccattaagtctgttaaatggagaacctacacgt

SEQ ID NO: 640250 - DNA, 33 bp, Homo sapien
ccattaagtctgttaactggagaacctacacgt

SEQ ID NO: 640251 - DNA, 33 bp, Homo sapien
ggaaaaagaagcaaaaagttatacaacaaccag

SEQ ID NO: 640252 - DNA, 33 bp, Homo sapien
ggaaaaagaagcaaaaggttatacaacaaccag

SEQ ID NO: 640253 - DNA, 33 bp, Homo sapien
aactggagaaatcatcaaagagatacgattttt

SEQ ID NO: 640254 - DNA, 33 bp, Homo sapien
aactggagaaatcatcgaagagatacgattttt

SEQ ID NO: 640255 - DNA, 33 bp, Homo sapien
tattagaagcaaagggaagttttgaaaatgtat

SEQ ID NO: 640256 - DNA, 33 bp, Homo sapien
tattagaagcaaagggcagttttgaaaatgtat

SEQ ID NO: 640257 - DNA, 33 bp, Homo sapien
aatgcaggtcataaccaaggcttgacagaattt

SEQ ID NO: 640258 - DNA, 33 bp, Homo sapien
aatgcaggtcataaccgaggcttgacagaattt

SEQ ID NO: 640259 - DNA, 33 bp, Homo sapien
acactacacgtctctacgctgtgtccaaactac

SEQ ID NO: 640260 - DNA, 33 bp, Homo sapien
acactacacgtctctatgctgtgtccaaactac

SEQ ID NO: 640261 - DNA, 33 bp, Homo sapien
cctaattatttcagaccattgatggattactaa

SEQ ID NO: 640262 - DNA, 33 bp, Homo sapien
cctaattatttcagactattgatggattactaa

SEQ ID NO: 640263 - DNA, 33 bp, Homo sapien
attatttctgtggttcccaagtttatccaaatt

SEQ ID NO: 640264 - DNA, 33 bp, Homo sapien
attatttctgtggttctcaagtttatccaaatt

SEQ ID NO: 640265 - DNA, 33 bp, Homo sapien
catgctcacaatgccaatgagtgtaagagaagc

SEQ ID NO: 640266 - DNA, 33 bp, Homo sapien
catgctcacaatgccagtgagtgtaagagaagc

SEQ ID NO: 640267 - DNA, 33 bp, Homo sapien
gctttatcagtttacaatccaggtttgttacca

SEQ ID NO: 640268 - DNA, 33 bp, Homo sapien
gctttatcagtttacactccaggtttgttacca

SEQ ID NO: 640269 - DNA, 33 bp, Homo sapien
tttcaccttgagttatcaggcttcaatgactaa

SEQ ID NO: 640270 - DNA, 33 bp, Homo sapien
tttcaccttgagttatgaggcttcaatgactaa

SEQ ID NO: 640271 - DNA, 33 bp, Homo sapien
atttcacgagcaagagaactgtgattgattatc

SEQ ID NO: 640272 - DNA, 33 bp, Homo sapien
atttcacgagcaagagtactgtgattgattatc

SEQ ID NO: 640273 - DNA, 33 bp, Homo sapien
aatgaggccaagagtcaaattctggtctgtcta

SEQ ID NO: 640274 - DNA, 33 bp, Homo sapien
aatgaggccaagagtccaattctggtctgtcta

SEQ ID NO: 640275 - DNA, 33 bp, Homo sapien
agactggagattgacaatggtgcatcaacactt

SEQ ID NO: 640276 - DNA, 33 bp, Homo sapien
agactggagattgacagtggtgcatcaacactt

SEQ ID NO: 640277 - DNA, 33 bp, Homo sapien
catttaccaagtgctcaatgaatattaattttc

SEQ ID NO: 640278 - DNA, 33 bp, Homo sapien
catttaccaagtgctcgatgaatattaattttc

SEQ ID NO: 640279 - DNA, 33 bp, Homo sapien
atcacttggcacaaacgcactactccttcactc

SEQ ID NO: 640280 - DNA, 33 bp, Homo sapien
atcacttggcacaaactcactactccttcactc

SEQ ID NO: 640281 - DNA, 33 bp, Homo sapien
gtggagagatagatgaagaaacatttaaaatac

SEQ ID NO: 640282 - DNA, 33 bp, Homo sapien
gtggagagatagatgaggaaacatttaaaatac

SEQ ID NO: 640283 - DNA, 33 bp, Homo sapien
cactgaatgacttaaaagaacaaaaatgtacca

SEQ ID NO: 640284 - DNA, 33 bp, Homo sapien
cactgaatgacttaaaggaacaaaaatgtacca

SEQ ID NO: 640285 - DNA, 33 bp, Homo sapien
ttactgctctttagaaacctgtcgtgaccatgc

SEQ ID NO: 640286 - DNA, 33 bp, Homo sapien
ttactgctctttagaaccctgtcgtgaccatgc

SEQ ID NO: 640287 - DNA, 33 bp, Homo sapien
taggcagactgaactacataaaagcatagcaga

SEQ ID NO: 640288 - DNA, 33 bp, Homo sapien
taggcagactgaactatataaaagcatagcaga

SEQ ID NO: 640289 - DNA, 33 bp, Homo sapien
tacccctgtgttccaagaagacagcttagagta

SEQ ID NO: 640290 - DNA, 33 bp, Homo sapien
tacccctgtgttccaataagacagcttagagta

SEQ ID NO: 640291 - DNA, 33 bp, Homo sapien
aagaaatacaatttgacctgtaaaaaatgatcg

SEQ ID NO: 640292 - DNA, 33 bp, Homo sapien
aagaaatacaatttgagctgtaaaaaatgatcg

SEQ ID NO: 640293 - DNA, 33 bp, Homo sapien
gagctggataataaacacatggataaataatag

SEQ ID NO: 640294 - DNA, 33 bp, Homo sapien
gagctggataataaacgcatggataaataatag

SEQ ID NO: 640295 - DNA, 33 bp, Homo sapien
gatttgtcttgattgaggtacttataacctact

SEQ ID NO: 640296 - DNA, 33 bp, Homo sapien
gatttgtcttgattgatgtacttataacctact

SEQ ID NO: 640297 - DNA, 33 bp, Homo sapien
ttattttcctttcacaacttgacctggaatata

SEQ ID NO: 640298 - DNA, 33 bp, Homo sapien
ttattttcctttcacaccttgacctggaatata

SEQ ID NO: 640299 - DNA, 33 bp, Homo sapien
ttaaaatgtactctacagaggccaaataaaaga

SEQ ID NO: 640300 - DNA, 33 bp, Homo sapien
ttaaaatgtactctacggaggccaaataaaaga

SEQ ID NO: 640301 - DNA, 33 bp, Homo sapien
ttctcaagaaatttgcaatgaaataagcacttt

SEQ ID NO: 640302 - DNA, 33 bp, Homo sapien
ttctcaagaaatttgcgatgaaataagcacttt

SEQ ID NO: 640303 - DNA, 33 bp, Homo sapien
caacagaatcaggaaaccatccaataagacagt

SEQ ID NO: 640304 - DNA, 33 bp, Homo sapien
caacagaatcaggaaatcatccaataagacagt

SEQ ID NO: 640305 - DNA, 33 bp, Homo sapien
ccctgtgtctctgctcactccactcaagacaga

SEQ ID NO: 640306 - DNA, 33 bp, Homo sapien
ccctgtgtctctgctcgctccactcaagacaga

SEQ ID NO: 640307 - DNA, 33 bp, Homo sapien
agaacaaaaaaatacaatgtaaatctgatcaag

SEQ ID NO: 640308 - DNA, 33 bp, Homo sapien
agaacaaaaaaatacattgtaaatctgatcaag

SEQ ID NO: 640309 - DNA, 33 bp, Homo sapien
tgataaaccaggagaaccaagcatttatcatgc

SEQ ID NO: 640310 - DNA, 33 bp, Homo sapien
tgataaaccaggagaatcaagcatttatcatgc

SEQ ID NO: 640311 - DNA, 33 bp, Homo sapien
tcacccgagagctgaccgccaatgttattttta

SEQ ID NO: 640312 - DNA, 33 bp, Homo sapien
tcacccgagagctgactgccaatgttattttta

SEQ ID NO: 640313 - DNA, 33 bp, Homo sapien
caagtaagtagtttgcaaagtttcagagctaac

SEQ ID NO: 640314 - DNA, 33 bp, Homo sapien
caagtaagtagtttgcgaagtttcagagctaac

SEQ ID NO: 640315 - DNA, 33 bp, Homo sapien
atcccagatatcagaaaaagaaaagacattcta

SEQ ID NO: 640316 - DNA, 33 bp, Homo sapien
atcccagatatcagaacaagaaaagacattcta

SEQ ID NO: 640317 - DNA, 33 bp, Homo sapien
gccatttcataagtgaaggcatatactaatgag

SEQ ID NO: 640318 - DNA, 33 bp, Homo sapien
gccatttcataagtgacggcatatactaatgag

SEQ ID NO: 640319 - DNA, 33 bp, Homo sapien
aagattcttggggtcactaaattagataacctt

SEQ ID NO: 640320 - DNA, 33 bp, Homo sapien
aagattcttggggtcattaaattagataacctt

SEQ ID NO: 640321 - DNA, 33 bp, Homo sapien
ggcaaagacatacagacgctaggttttgaaagt

SEQ ID NO: 640322 - DNA, 33 bp, Homo sapien
ggcaaagacatacagatgctaggttttgaaagt

SEQ ID NO: 640323 - DNA, 33 bp, Homo sapien
ggtgggatagctactgcatttgctacactgaat

SEQ ID NO: 640324 - DNA, 33 bp, Homo sapien
ggtgggatagctactgtatttgctacactgaat

SEQ ID NO: 640325 - DNA, 33 bp, Homo sapien
gttcttaatcatgcacagatagttaaataagaa

SEQ ID NO: 640326 - DNA, 33 bp, Homo sapien
gttcttaatcatgcacggatagttaaataagaa

SEQ ID NO: 640327 - DNA, 33 bp, Homo sapien
aggcctgaatgggccaaaaaggctaaccctccc

SEQ ID NO: 640328 - DNA, 33 bp, Homo sapien
aggcctgaatgggccagaaaggctaaccctccc

SEQ ID NO: 640329 - DNA, 33 bp, Homo sapien
tatactggtggtcaccacattggacactggaga

SEQ ID NO: 640330 - DNA, 33 bp, Homo sapien
tatactggtggtcaccccattggacactggaga

SEQ ID NO: 640331 - DNA, 33 bp, Homo sapien
acaatgtatacagaaaacaaactgcaatccttc

SEQ ID NO: 640332 - DNA, 33 bp, Homo sapien
acaatgtatacagaaagcaaactgcaatccttc

SEQ ID NO: 640333 - DNA, 33 bp, Homo sapien
gccatgtaagcaggaaaagagaaaatttatctt

SEQ ID NO: 640334 - DNA, 33 bp, Homo sapien
gccatgtaagcaggaagagagaaaatttatctt

SEQ ID NO: 640335 - DNA, 33 bp, Homo sapien
aagaaaaaaattcaagccaattgagtgaacatc

SEQ ID NO: 640336 - DNA, 33 bp, Homo sapien
aagaaaaaaattcaagtcaattgagtgaacatc

SEQ ID NO: 640337 - DNA, 33 bp, Homo sapien
ctcccatctccacaaccacttacctttcagcag

SEQ ID NO: 640338 - DNA, 33 bp, Homo sapien
ctcccatctccacaactacttacctttcagcag

SEQ ID NO: 640339 - DNA, 33 bp, Homo sapien
gctgatccagataagcaatttgggtttctaaca

SEQ ID NO: 640340 - DNA, 33 bp, Homo sapien
gctgatccagataagcgatttgggtttctaaca

SEQ ID NO: 640341 - DNA, 33 bp, Homo sapien
attatttaaagagtcaactttcctgaggataat

SEQ ID NO: 640342 - DNA, 33 bp, Homo sapien
attatttaaagagtcagctttcctgaggataat

SEQ ID NO: 640343 - DNA, 33 bp, Homo sapien
actgcagacttaactacattgacatttgaatca

SEQ ID NO: 640344 - DNA, 33 bp, Homo sapien
actgcagacttaactagattgacatttgaatca

SEQ ID NO: 640345 - DNA, 33 bp, Homo sapien
tctgacttggaaacaaagaaaaaacatgaaacg

SEQ ID NO: 640346 - DNA, 33 bp, Homo sapien
tctgacttggaaacaaggaaaaaacatgaaacg

SEQ ID NO: 640347 - DNA, 33 bp, Homo sapien
ctgcaaaaataccaaaaattctcatacctattt

SEQ ID NO: 640348 - DNA, 33 bp, Homo sapien
ctgcaaaaataccaaacattctcatacctattt

SEQ ID NO: 640349 - DNA, 33 bp, Homo sapien
ccctctgcaagaataaaatcaaataactgttag

SEQ ID NO: 640350 - DNA, 33 bp, Homo sapien
ccctctgcaagaataacatcaaataactgttag

SEQ ID NO: 640351 - DNA, 33 bp, Homo sapien
atgctgtcatgcggaaacgtatgaaacagatga

SEQ ID NO: 640352 - DNA, 33 bp, Homo sapien
atgctgtcatgcggaagcgtatgaaacagatga

SEQ ID NO: 640353 - DNA, 33 bp, Homo sapien
gcacacagcccgattcaaattatattacaaagc

SEQ ID NO: 640354 - DNA, 33 bp, Homo sapien
gcacacagcccgattccaattatattacaaagc

SEQ ID NO: 640355 - DNA, 33 bp, Homo sapien
gttgttctaacaaaagactcctgataaatggat

SEQ ID NO: 640356 - DNA, 33 bp, Homo sapien
gttgttctaacaaaaggctcctgataaatggat

SEQ ID NO: 640357 - DNA, 33 bp, Homo sapien
ttgattaagcctctcaatcttgcatttcgcatg

SEQ ID NO: 640358 - DNA, 33 bp, Homo sapien
ttgattaagcctctcagtcttgcatttcgcatg

SEQ ID NO: 640359 - DNA, 33 bp, Homo sapien
aattcaaaagagtggcaaaaggaagccccagac

SEQ ID NO: 640360 - DNA, 33 bp, Homo sapien
aattcaaaagagtggcgaaaggaagccccagac

SEQ ID NO: 640361 - DNA, 33 bp, Homo sapien
gaattatgcaacctaactgaatattgtgcaaat

SEQ ID NO: 640362 - DNA, 33 bp, Homo sapien
gaattatgcaacctaattgaatattgtgcaaat

SEQ ID NO: 640363 - DNA, 33 bp, Homo sapien
tcttcatctgtcaaaccaaaattttattagaaa

SEQ ID NO: 640364 - DNA, 33 bp, Homo sapien
tcttcatctgtcaaacgaaaattttattagaaa

SEQ ID NO: 640365 - DNA, 33 bp, Homo sapien
tcatatgcttctcgaccatttggtatcttcttt

SEQ ID NO: 640366 - DNA, 33 bp, Homo sapien
tcatatgcttctcgacgatttggtatcttcttt

SEQ ID NO: 640367 - DNA, 33 bp, Homo sapien
ttctaacaaaagtttcacatatctagagctgaa

SEQ ID NO: 640368 - DNA, 33 bp, Homo sapien
ttctaacaaaagtttcgcatatctagagctgaa

SEQ ID NO: 640369 - DNA, 33 bp, Homo sapien
taaagatttagtccataacagtaaacaactatt

SEQ ID NO: 640370 - DNA, 33 bp, Homo sapien
taaagatttagtccattacagtaaacaactatt

SEQ ID NO: 640371 - DNA, 33 bp, Homo sapien
acttcatagttaacaactgctttcaaggaatgc

SEQ ID NO: 640372 - DNA, 33 bp, Homo sapien
acttcatagttaacaattgctttcaaggaatgc

SEQ ID NO: 640373 - DNA, 33 bp, Homo sapien
aatgaaagcacagaatcaatcaaaataaatgtt

SEQ ID NO: 640374 - DNA, 33 bp, Homo sapien
aatgaaagcacagaatgaatcaaaataaatgtt

SEQ ID NO: 640375 - DNA, 33 bp, Homo sapien
aatatcttatctctcaacctctggcaagctcca

SEQ ID NO: 640376 - DNA, 33 bp, Homo sapien
aatatcttatctctcagcctctggcaagctcca

SEQ ID NO: 640377 - DNA, 33 bp, Homo sapien
cttcctggtacttgggcatgatcactgtggcat

SEQ ID NO: 640378 - DNA, 33 bp, Homo sapien
cttcctggtacttgggtatgatcactgtggcat

SEQ ID NO: 640379 - DNA, 33 bp, Homo sapien
tgacatgtagaaccatcataaatttacatcatt

SEQ ID NO: 640380 - DNA, 33 bp, Homo sapien
tgacatgtagaaccattataaatttacatcatt

SEQ ID NO: 640381 - DNA, 33 bp, Homo sapien
tttatgtgacacagaacgcaatgtttttggaaa

SEQ ID NO: 640382 - DNA, 33 bp, Homo sapien
tttatgtgacacagaatgcaatgtttttggaaa

SEQ ID NO: 640383 - DNA, 33 bp, Homo sapien
agctacctgactctaacggcagctacttttaag

SEQ ID NO: 640384 - DNA, 33 bp, Homo sapien
agctacctgactctaatggcagctacttttaag

SEQ ID NO: 640385 - DNA, 33 bp, Homo sapien
gcatttgtttttatcacatacttctacgtcgtt

SEQ ID NO: 640386 - DNA, 33 bp, Homo sapien
gcatttgtttttatcatatacttctacgtcgtt

SEQ ID NO: 640387 - DNA, 33 bp, Homo sapien
aacttcactaacacccagatgcaattcacaacc

SEQ ID NO: 640388 - DNA, 33 bp, Homo sapien
aacttcactaacacccggatgcaattcacaacc

SEQ ID NO: 640389 - DNA, 33 bp, Homo sapien
tcacaatgcgtgactaccaccctacacaattca

SEQ ID NO: 640390 - DNA, 33 bp, Homo sapien
tcacaatgcgtgactatcaccctacacaattca

SEQ ID NO: 640391 - DNA, 33 bp, Homo sapien
acatatccttcacccactctttgatggagttgt

SEQ ID NO: 640392 - DNA, 33 bp, Homo sapien
acatatccttcacccattctttgatggagttgt

SEQ ID NO: 640393 - DNA, 33 bp, Homo sapien
caagacctaatgctaaaaacagctctcaaaaag

SEQ ID NO: 640394 - DNA, 33 bp, Homo sapien
caagacctaatgctaagaacagctctcaaaaag

SEQ ID NO: 640395 - DNA, 33 bp, Homo sapien
aggtcacaggaaactccagttatatcttgtgtc

SEQ ID NO: 640396 - DNA, 33 bp, Homo sapien
aggtcacaggaaactctagttatatcttgtgtc

SEQ ID NO: 640397 - DNA, 33 bp, Homo sapien
cgtgtctgcattccagaaagaaagacaggaaag

SEQ ID NO: 640398 - DNA, 33 bp, Homo sapien
cgtgtctgcattccagcaagaaagacaggaaag

SEQ ID NO: 640399 - DNA, 33 bp, Homo sapien
tcccaccacaacaaaactcccaaactaagatgg

SEQ ID NO: 640400 - DNA, 33 bp, Homo sapien
tcccaccacaacaaaagtcccaaactaagatgg

SEQ ID NO: 640401 - DNA, 33 bp, Homo sapien
tttaacccattaggcagcctcttggggtaactt

SEQ ID NO: 640402 - DNA, 33 bp, Homo sapien
tttaacccattaggcatcctcttggggtaactt

SEQ ID NO: 640403 - DNA, 33 bp, Homo sapien
aatcagattccctttcaaaacagcatttaacga

SEQ ID NO: 640404 - DNA, 33 bp, Homo sapien
aatcagattccctttctaaacagcatttaacga

SEQ ID NO: 640405 - DNA, 33 bp, Homo sapien
ttagcaaatcagcaggccatgatagtcccttat

SEQ ID NO: 640406 - DNA, 33 bp, Homo sapien
ttagcaaatcagcaggtcatgatagtcccttat

SEQ ID NO: 640407 - DNA, 33 bp, Homo sapien
ggtacactgcgttaacggtgttattaatctgcg

SEQ ID NO: 640408 - DNA, 33 bp, Homo sapien
ggtacactgcgttaactgtgttattaatctgcg

SEQ ID NO: 640409 - DNA, 33 bp, Homo sapien
atctagtggcatcatcagaaaactatttcccca

SEQ ID NO: 640410 - DNA, 33 bp, Homo sapien
atctagtggcatcatcggaaaactatttcccca

SEQ ID NO: 640411 - DNA, 33 bp, Homo sapien
gagaatcttttcccaaactacccgaggaactct

SEQ ID NO: 640412 - DNA, 33 bp, Homo sapien
gagaatcttttcccaagctacccgaggaactct

SEQ ID NO: 640413 - DNA, 33 bp, Homo sapien
gaggtgagaagaagccaaatatgaacactgcat

SEQ ID NO: 640414 - DNA, 33 bp, Homo sapien
gaggtgagaagaagccgaatatgaacactgcat

SEQ ID NO: 640415 - DNA, 33 bp, Homo sapien
cagaaaacatgggatcaaacttggatgcaacaa

SEQ ID NO: 640416 - DNA, 33 bp, Homo sapien
cagaaaacatgggatcgaacttggatgcaacaa

SEQ ID NO: 640417 - DNA, 33 bp, Homo sapien
cccttcctgctgcagaaagttctttacaactat

SEQ ID NO: 640418 - DNA, 33 bp, Homo sapien
cccttcctgctgcagacagttctttacaactat

SEQ ID NO: 640419 - DNA, 33 bp, Homo sapien
gtggaaagtaatgcgacctaatagttcatatgc

SEQ ID NO: 640420 - DNA, 33 bp, Homo sapien
gtggaaagtaatgcgatctaatagttcatatgc

SEQ ID NO: 640421 - DNA, 33 bp, Homo sapien
ctctccgctcctgaacacaccaagcttatttta

SEQ ID NO: 640422 - DNA, 33 bp, Homo sapien
ctctccgctcctgaacgcaccaagcttatttta

SEQ ID NO: 640423 - DNA, 33 bp, Homo sapien
ctgtttctctcctgctgaaaactcttataccac

SEQ ID NO: 640424 - DNA, 33 bp, Homo sapien
ctgtttctctcctgcttaaaactcttataccac

SEQ ID NO: 640425 - DNA, 33 bp, Homo sapien
attgggattcattgaccgatttcctggtagaca

SEQ ID NO: 640426 - DNA, 33 bp, Homo sapien
attgggattcattgactgatttcctggtagaca

SEQ ID NO: 640427 - DNA, 33 bp, Homo sapien
tttaatctcagatgaaacgactggttctgaatc

SEQ ID NO: 640428 - DNA, 33 bp, Homo sapien
tttaatctcagatgaagcgactggttctgaatc

SEQ ID NO: 640429 - DNA, 33 bp, Homo sapien
cttattagtggtaatacgtttccgacccacacg

SEQ ID NO: 640430 - DNA, 33 bp, Homo sapien
cttattagtggtaatatgtttccgacccacacg

SEQ ID NO: 640431 - DNA, 33 bp, Homo sapien
ctcactgggagagtcagtctgttattttcccca

SEQ ID NO: 640432 - DNA, 33 bp, Homo sapien
ctcactgggagagtcattctgttattttcccca

SEQ ID NO: 640433 - DNA, 33 bp, Homo sapien
acaataatcctacccaacccaattaagtgtgtt

SEQ ID NO: 640434 - DNA, 33 bp, Homo sapien
acaataatcctacccatcccaattaagtgtgtt

SEQ ID NO: 640435 - DNA, 33 bp, Homo sapien
agggttacaaaggaccaatctgggtgctggaaa

SEQ ID NO: 640436 - DNA, 33 bp, Homo sapien
agggttacaaaggacccatctgggtgctggaaa

SEQ ID NO: 640437 - DNA, 33 bp, Homo sapien
tgcgatggtatgtaaacgaatgttgcatgacca

SEQ ID NO: 640438 - DNA, 33 bp, Homo sapien
tgcgatggtatgtaaatgaatgttgcatgacca

SEQ ID NO: 640439 - DNA, 33 bp, Homo sapien
agaaaaagtttgtcaacccctgctgctcaagtg

SEQ ID NO: 640440 - DNA, 33 bp, Homo sapien
agaaaaagtttgtcaatccctgctgctcaagtg

SEQ ID NO: 640441 - DNA, 33 bp, Homo sapien
ttcatgggaccgcatcactgacaatgatgaaag

SEQ ID NO: 640442 - DNA, 33 bp, Homo sapien
ttcatgggaccgcatcgctgacaatgatgaaag

SEQ ID NO: 640443 - DNA, 33 bp, Homo sapien
atggatactacgaagacagatactgagggccat

SEQ ID NO: 640444 - DNA, 33 bp, Homo sapien
atggatactacgaagatagatactgagggccat

SEQ ID NO: 640445 - DNA, 33 bp, Homo sapien
agcttttaacatctgccgagtcttaactataca

SEQ ID NO: 640446 - DNA, 33 bp, Homo sapien
agcttttaacatctgctgagtcttaactataca

SEQ ID NO: 640447 - DNA, 33 bp, Homo sapien
atgggctgatcaaacaaaaatgtacgtaatgtg

SEQ ID NO: 640448 - DNA, 33 bp, Homo sapien
atgggctgatcaaacagaaatgtacgtaatgtg

SEQ ID NO: 640449 - DNA, 33 bp, Homo sapien
aacagagcattaataaaaagcaactaggatatt

SEQ ID NO: 640450 - DNA, 33 bp, Homo sapien
aacagagcattaataacaagcaactaggatatt

SEQ ID NO: 640451 - DNA, 33 bp, Homo sapien
tcatccttacaatctgaaagaacttcactgcta

SEQ ID NO: 640452 - DNA, 33 bp, Homo sapien
tcatccttacaatctggaagaacttcactgcta

SEQ ID NO: 640453 - DNA, 33 bp, Homo sapien
catgaggtctaagccacaatttgccaaagtatc

SEQ ID NO: 640454 - DNA, 33 bp, Homo sapien
catgaggtctaagccagaatttgccaaagtatc

SEQ ID NO: 640455 - DNA, 33 bp, Homo sapien
tattggcggcagctaaccaattccacacttaaa

SEQ ID NO: 640456 - DNA, 33 bp, Homo sapien
tattggcggcagctaagcaattccacacttaaa

SEQ ID NO: 640457 - DNA, 33 bp, Homo sapien
aagcaagggctgttgccagaatactttaatacc

SEQ ID NO: 640458 - DNA, 33 bp, Homo sapien
aagcaagggctgttgcgagaatactttaatacc

SEQ ID NO: 640459 - DNA, 33 bp, Homo sapien
tccccagattgcttgaaatttggctgctgatgg

SEQ ID NO: 640460 - DNA, 33 bp, Homo sapien
tccccagattgcttgacatttggctgctgatgg

SEQ ID NO: 640461 - DNA, 33 bp, Homo sapien
tattagtgtctcaagaactaaaatggagcacag

SEQ ID NO: 640462 - DNA, 33 bp, Homo sapien
tattagtgtctcaagacctaaaatggagcacag

SEQ ID NO: 640463 - DNA, 33 bp, Homo sapien
gctttatctcatctcacgctttcaacagtcttc

SEQ ID NO: 640464 - DNA, 33 bp, Homo sapien
gctttatctcatctcatgctttcaacagtcttc

SEQ ID NO: 640465 - DNA, 33 bp, Homo sapien
ctcagggaatccgaaacatggctttcccagtcc

SEQ ID NO: 640466 - DNA, 33 bp, Homo sapien
ctcagggaatccgaaagatggctttcccagtcc

SEQ ID NO: 640467 - DNA, 33 bp, Homo sapien
caacattctgactcacaacactcatatgctcgg

SEQ ID NO: 640468 - DNA, 33 bp, Homo sapien
caacattctgactcacgacactcatatgctcgg

SEQ ID NO: 640469 - DNA, 33 bp, Homo sapien
tgcaatgcaatgtctcaagtcacttagcagact

SEQ ID NO: 640470 - DNA, 33 bp, Homo sapien
tgcaatgcaatgtctcgagtcacttagcagact

SEQ ID NO: 640471 - DNA, 33 bp, Homo sapien
tagaatgttcttttgactaagatttaccttgat

SEQ ID NO: 640472 - DNA, 33 bp, Homo sapien
tagaatgttcttttgattaagatttaccttgat

SEQ ID NO: 640473 - DNA, 33 bp, Homo sapien
tctcaagcattttgaaccaggatacctcttttc

SEQ ID NO: 640474 - DNA, 33 bp, Homo sapien
tctcaagcattttgaatcaggatacctcttttc

SEQ ID NO: 640475 - DNA, 33 bp, Homo sapien
atataattttgagagaatccatttaactcctga

SEQ ID NO: 640476 - DNA, 33 bp, Homo sapien
atataattttgagagactccatttaactcctga

SEQ ID NO: 640477 - DNA, 33 bp, Homo sapien
gattgggaaaatgtgacacaagaagattcagaa

SEQ ID NO: 640478 - DNA, 33 bp, Homo sapien
gattgggaaaatgtgatacaagaagattcagaa

SEQ ID NO: 640479 - DNA, 33 bp, Homo sapien
tacacattttctggaaacctgtatactttgtac

SEQ ID NO: 640480 - DNA, 33 bp, Homo sapien
tacacattttctggaagcctgtatactttgtac

SEQ ID NO: 640481 - DNA, 33 bp, Homo sapien
caatgaccaattctcaatctatctgaccttacc

SEQ ID NO: 640482 - DNA, 33 bp, Homo sapien
caatgaccaattctcagtctatctgaccttacc

SEQ ID NO: 640483 - DNA, 33 bp, Homo sapien
attaattttgataggaatataggtgtgcttact

SEQ ID NO: 640484 - DNA, 33 bp, Homo sapien
attaattttgataggagtataggtgtgcttact

SEQ ID NO: 640485 - DNA, 33 bp, Homo sapien
atttggggataccataatagttgtaggtgtggt

SEQ ID NO: 640486 - DNA, 33 bp, Homo sapien
atttggggataccatagtagttgtaggtgtggt

SEQ ID NO: 640487 - DNA, 33 bp, Homo sapien
agaagctcatgatggacgaatgtagaatacagg

SEQ ID NO: 640488 - DNA, 33 bp, Homo sapien
agaagctcatgatggatgaatgtagaatacagg

SEQ ID NO: 640489 - DNA, 33 bp, Homo sapien
ttagagtcatatttccagaagcagaagttaaag

SEQ ID NO: 640490 - DNA, 33 bp, Homo sapien
ttagagtcatatttcccgaagcagaagttaaag

SEQ ID NO: 640491 - DNA, 33 bp, Homo sapien
ctggccactgctccagaaagaatcagagcctct

SEQ ID NO: 640492 - DNA, 33 bp, Homo sapien
ctggccactgctccaggaagaatcagagcctct

SEQ ID NO: 640493 - DNA, 33 bp, Homo sapien
actgcgtatgtttggacgtgccagagagacaga

SEQ ID NO: 640494 - DNA, 33 bp, Homo sapien
actgcgtatgtttggatgtgccagagagacaga

SEQ ID NO: 640495 - DNA, 33 bp, Homo sapien
cacttttgtcctcacaaaattgattctcttcat

SEQ ID NO: 640496 - DNA, 33 bp, Homo sapien
cacttttgtcctcacagaattgattctcttcat

SEQ ID NO: 640497 - DNA, 33 bp, Homo sapien
ctcaaattccagcaaacaggcatctgattggct

SEQ ID NO: 640498 - DNA, 33 bp, Homo sapien
ctcaaattccagcaaataggcatctgattggct

SEQ ID NO: 640499 - DNA, 33 bp, Homo sapien
actgggcaggggctcaaatgttcctcatagaca

SEQ ID NO: 640500 - DNA, 33 bp, Homo sapien
actgggcaggggctcagatgttcctcatagaca

SEQ ID NO: 640501 - DNA, 33 bp, Homo sapien
accatgcatagactagcaagataatcagataaa

SEQ ID NO: 640502 - DNA, 33 bp, Homo sapien
accatgcatagactaggaagataatcagataaa

SEQ ID NO: 640503 - DNA, 33 bp, Homo sapien
aacacagacgctaggccaaagatgttgatatcc

SEQ ID NO: 640504 - DNA, 33 bp, Homo sapien
aacacagacgctaggctaaagatgttgatatcc

SEQ ID NO: 640505 - DNA, 33 bp, Homo sapien
ttgtgttagctggaaccagaattttaagtttat

SEQ ID NO: 640506 - DNA, 33 bp, Homo sapien
ttgtgttagctggaacgagaattttaagtttat

SEQ ID NO: 640507 - DNA, 33 bp, Homo sapien
aagtttattaacgaaaagagttccatgaggctt

SEQ ID NO: 640508 - DNA, 33 bp, Homo sapien
aagtttattaacgaaacgagttccatgaggctt

SEQ ID NO: 640509 - DNA, 33 bp, Homo sapien
caaatgaagaggaaaagttgtccaaatctgaag

SEQ ID NO: 640510 - DNA, 33 bp, Homo sapien
caaatgaagaggaaaatttgtccaaatctgaag

SEQ ID NO: 640511 - DNA, 33 bp, Homo sapien
gataaagatcgggtgacgcttctacaaaagcca

SEQ ID NO: 640512 - DNA, 33 bp, Homo sapien
gataaagatcgggtgatgcttctacaaaagcca

SEQ ID NO: 640513 - DNA, 33 bp, Homo sapien
gtcctagtcctgactaagcagaagagctgtagc

SEQ ID NO: 640514 - DNA, 33 bp, Homo sapien
gtcctagtcctgactatgcagaagagctgtagc

SEQ ID NO: 640515 - DNA, 33 bp, Homo sapien
gcagtgcctgagacgtcaatcagccctcaacaa

SEQ ID NO: 640516 - DNA, 33 bp, Homo sapien
gcagtgcctgagacgtgaatcagccctcaacaa

SEQ ID NO: 640517 - DNA, 33 bp, Homo sapien
cttttgagctgaaaaacgagtgaagcttttcat

SEQ ID NO: 640518 - DNA, 33 bp, Homo sapien
cttttgagctgaaaaaggagtgaagcttttcat

SEQ ID NO: 640519 - DNA, 33 bp, Homo sapien
tctttcactactttgaaaagcactactctagaa

SEQ ID NO: 640520 - DNA, 33 bp, Homo sapien
tctttcactactttgagaagcactactctagaa

SEQ ID NO: 640521 - DNA, 33 bp, Homo sapien
atgatttccatattccagattgatcttttttgt

SEQ ID NO: 640522 - DNA, 33 bp, Homo sapien
atgatttccatattcctgattgatcttttttgt

SEQ ID NO: 640523 - DNA, 33 bp, Homo sapien
ccgagttggagaattaacagccagaacaatagc

SEQ ID NO: 640524 - DNA, 33 bp, Homo sapien
ccgagttggagaattaccagccagaacaatagc

SEQ ID NO: 640525 - DNA, 33 bp, Homo sapien
ttccagaaagatttgcaactttgcctttccagc

SEQ ID NO: 640526 - DNA, 33 bp, Homo sapien
ttccagaaagatttgccactttgcctttccagc

SEQ ID NO: 640527 - DNA, 33 bp, Homo sapien
ttgccaacccctgaacgagattatctgacgttt

SEQ ID NO: 640528 - DNA, 33 bp, Homo sapien
ttgccaacccctgaactagattatctgacgttt

SEQ ID NO: 640529 - DNA, 33 bp, Homo sapien
ttgcaatgtacctctgaatgaccttaacaattt

SEQ ID NO: 640530 - DNA, 33 bp, Homo sapien
ttgcaatgtacctctgtatgaccttaacaattt

SEQ ID NO: 640531 - DNA, 33 bp, Homo sapien
gctttgtcagaggagaaatttaagagggtttga

SEQ ID NO: 640532 - DNA, 33 bp, Homo sapien
gctttgtcagaggagagatttaagagggtttga

SEQ ID NO: 640533 - DNA, 33 bp, Homo sapien
ccacctaaaaccgcctcacggatcatgagacca

SEQ ID NO: 640534 - DNA, 33 bp, Homo sapien
ccacctaaaaccgcctgacggatcatgagacca

SEQ ID NO: 640535 - DNA, 33 bp, Homo sapien
tactgtaaaaacacgcaacacctggattttatt

SEQ ID NO: 640536 - DNA, 33 bp, Homo sapien
tactgtaaaaacacgcgacacctggattttatt

SEQ ID NO: 640537 - DNA, 33 bp, Homo sapien
ctcacctgaagagtacaaggatgcacgactgct

SEQ ID NO: 640538 - DNA, 33 bp, Homo sapien
ctcacctgaagagtacgaggatgcacgactgct

SEQ ID NO: 640539 - DNA, 33 bp, Homo sapien
cttttgtttctgctatcaagtgactgccctcca

SEQ ID NO: 640540 - DNA, 33 bp, Homo sapien
cttttgtttctgctattaagtgactgccctcca

SEQ ID NO: 640541 - DNA, 33 bp, Homo sapien
gtatgactatacatcaatgactcacacggtggg

SEQ ID NO: 640542 - DNA, 33 bp, Homo sapien
gtatgactatacatcagtgactcacacggtggg

SEQ ID NO: 640543 - DNA, 33 bp, Homo sapien
acttaaatactgccagactccaagatcctcaat

SEQ ID NO: 640544 - DNA, 33 bp, Homo sapien
acttaaatactgccaggctccaagatcctcaat

SEQ ID NO: 640545 - DNA, 33 bp, Homo sapien
agagtaaaaattgttaaatccttcatcagcaca

SEQ ID NO: 640546 - DNA, 33 bp, Homo sapien
agagtaaaaattgttatatccttcatcagcaca

SEQ ID NO: 640547 - DNA, 33 bp, Homo sapien
ctcatttaaggaaaaaaccacaatccctgccat

SEQ ID NO: 640548 - DNA, 33 bp, Homo sapien
ctcatttaaggaaaaagccacaatccctgccat

SEQ ID NO: 640549 - DNA, 33 bp, Homo sapien
tggtccatcctgtttacaaagtgtgtatctaag

SEQ ID NO: 640550 - DNA, 33 bp, Homo sapien
tggtccatcctgtttataaagtgtgtatctaag

SEQ ID NO: 640551 - DNA, 33 bp, Homo sapien
aagatacttatcttgaaaagcattttgtcccac

SEQ ID NO: 640552 - DNA, 33 bp, Homo sapien
aagatacttatcttgagaagcattttgtcccac

SEQ ID NO: 640553 - DNA, 33 bp, Homo sapien
tcaggagaaagaataacactctgcatttaagca

SEQ ID NO: 640554 - DNA, 33 bp, Homo sapien
tcaggagaaagaataagactctgcatttaagca

SEQ ID NO: 640555 - DNA, 33 bp, Homo sapien
atttcagagggttgtaaggaagtaacagaagag

SEQ ID NO: 640556 - DNA, 33 bp, Homo sapien
atttcagagggttgtagggaagtaacagaagag

SEQ ID NO: 640557 - DNA, 33 bp, Homo sapien
tggggaggtgctgcaacggtaacgtaagaggtt

SEQ ID NO: 640558 - DNA, 33 bp, Homo sapien
tggggaggtgctgcaatggtaacgtaagaggtt

SEQ ID NO: 640559 - DNA, 33 bp, Homo sapien
ctcctgattattgcaaattagttccgaaaaact

SEQ ID NO: 640560 - DNA, 33 bp, Homo sapien
ctcctgattattgcaagttagttccgaaaaact

SEQ ID NO: 640561 - DNA, 33 bp, Homo sapien
tgctgggtcagacaaacccacactgtttttgtt

SEQ ID NO: 640562 - DNA, 33 bp, Homo sapien
tgctgggtcagacaaatccacactgtttttgtt

SEQ ID NO: 640563 - DNA, 33 bp, Homo sapien
cagtgttctcaacaacacactggaagtattaaa

SEQ ID NO: 640564 - DNA, 33 bp, Homo sapien
cagtgttctcaacaacgcactggaagtattaaa

SEQ ID NO: 640565 - DNA, 33 bp, Homo sapien
aacagattgaaggacacaatttgtacctagtag

SEQ ID NO: 640566 - DNA, 33 bp, Homo sapien
aacagattgaaggacataatttgtacctagtag

SEQ ID NO: 640567 - DNA, 33 bp, Homo sapien
tctttgaaaataagagaatgtcaaagattcata

SEQ ID NO: 640568 - DNA, 33 bp, Homo sapien
tctttgaaaataagaggatgtcaaagattcata

SEQ ID NO: 640569 - DNA, 33 bp, Homo sapien
cctcacaggacccatgaattaatatatatccaa

SEQ ID NO: 640570 - DNA, 33 bp, Homo sapien
cctcacaggacccatggattaatatatatccaa

SEQ ID NO: 640571 - DNA, 33 bp, Homo sapien
ggtgatgtggaaatgccgaaactgatactgggg

SEQ ID NO: 640572 - DNA, 33 bp, Homo sapien
ggtgatgtggaaatgcggaaactgatactgggg

SEQ ID NO: 640573 - DNA, 33 bp, Homo sapien
gactcgggacaaagcaacacttctagagggata

SEQ ID NO: 640574 - DNA, 33 bp, Homo sapien
gactcgggacaaagcagcacttctagagggata

SEQ ID NO: 640575 - DNA, 33 bp, Homo sapien
tcaatcaaaaatacccagaactgacacagacat

SEQ ID NO: 640576 - DNA, 33 bp, Homo sapien
tcaatcaaaaatacccggaactgacacagacat

SEQ ID NO: 640577 - DNA, 33 bp, Homo sapien
tcctatatcatgtgaaatatcttctaaaaccaa

SEQ ID NO: 640578 - DNA, 33 bp, Homo sapien
tcctatatcatgtgaattatcttctaaaaccaa

SEQ ID NO: 640579 - DNA, 33 bp, Homo sapien
gactgtattaaaaacacggggtcaatgaatttt

SEQ ID NO: 640580 - DNA, 33 bp, Homo sapien
gactgtattaaaaacatggggtcaatgaatttt

SEQ ID NO: 640581 - DNA, 33 bp, Homo sapien
atttagtcttcacttgaattttcccattgcctc

SEQ ID NO: 640582 - DNA, 33 bp, Homo sapien
atttagtcttcacttgtattttcccattgcctc

SEQ ID NO: 640583 - DNA, 33 bp, Homo sapien
ggcaccagggctggtcaccagaaagtagtggga

SEQ ID NO: 640584 - DNA, 33 bp, Homo sapien
ggcaccagggctggtcgccagaaagtagtggga

SEQ ID NO: 640585 - DNA, 33 bp, Homo sapien
atggagtgtatgaaaaatacatatgggctttgg

SEQ ID NO: 640586 - DNA, 33 bp, Homo sapien
atggagtgtatgaaaagtacatatgggctttgg

SEQ ID NO: 640587 - DNA, 33 bp, Homo sapien
ctgcagttaaatgcctaaaattactcatggtga

SEQ ID NO: 640588 - DNA, 33 bp, Homo sapien
ctgcagttaaatgcctgaaattactcatggtga

SEQ ID NO: 640589 - DNA, 33 bp, Homo sapien
taagcactgcataatagcttgcagaaagtgatg

SEQ ID NO: 640590 - DNA, 33 bp, Homo sapien
taagcactgcataatatcttgcagaaagtgatg

SEQ ID NO: 640591 - DNA, 33 bp, Homo sapien
tgttatttaggacataaaaaatagttaacattt

SEQ ID NO: 640592 - DNA, 33 bp, Homo sapien
tgttatttaggacatacaaaatagttaacattt

SEQ ID NO: 640593 - DNA, 33 bp, Homo sapien
aggggatgaaagatgccaagattctggctttga

SEQ ID NO: 640594 - DNA, 33 bp, Homo sapien
aggggatgaaagatgctaagattctggctttga

SEQ ID NO: 640595 - DNA, 33 bp, Homo sapien
tggactagttggacaacctcggaaaaggcacgt

SEQ ID NO: 640596 - DNA, 33 bp, Homo sapien
tggactagttggacaagctcggaaaaggcacgt

SEQ ID NO: 640597 - DNA, 33 bp, Homo sapien
atcgcatattaaaaaaactttagctaagcagga

SEQ ID NO: 640598 - DNA, 33 bp, Homo sapien
atcgcatattaaaaaacctttagctaagcagga

SEQ ID NO: 640599 - DNA, 33 bp, Homo sapien
tcacagataaccaagcagcaaggtgtttaatat

SEQ ID NO: 640600 - DNA, 33 bp, Homo sapien
tcacagataaccaagcggcaaggtgtttaatat

SEQ ID NO: 640601 - DNA, 33 bp, Homo sapien
tcagactcttaaagcaaagttcgatcaaaacta

SEQ ID NO: 640602 - DNA, 33 bp, Homo sapien
tcagactcttaaagcagagttcgatcaaaacta

SEQ ID NO: 640603 - DNA, 33 bp, Homo sapien
gtaaagctctgcaaaaatttacaacatggcaac

SEQ ID NO: 640604 - DNA, 33 bp, Homo sapien
gtaaagctctgcaaaagtttacaacatggcaac

SEQ ID NO: 640605 - DNA, 33 bp, Homo sapien
aatgatgtcattaatacgagaaagtcatctact

SEQ ID NO: 640606 - DNA, 33 bp, Homo sapien
aatgatgtcattaatatgagaaagtcatctact

SEQ ID NO: 640607 - DNA, 33 bp, Homo sapien
ttaggcacttaatgtagcaccttgattgcgaag

SEQ ID NO: 640608 - DNA, 33 bp, Homo sapien
ttaggcacttaatgtatcaccttgattgcgaag

SEQ ID NO: 640609 - DNA, 33 bp, Homo sapien
taacttgcattttatgaagatgagaacaaagga

SEQ ID NO: 640610 - DNA, 33 bp, Homo sapien
taacttgcattttatggagatgagaacaaagga

SEQ ID NO: 640611 - DNA, 33 bp, Homo sapien
atggccaccagctccaatgatgtttttgcgaag

SEQ ID NO: 640612 - DNA, 33 bp, Homo sapien
atggccaccagctccattgatgtttttgcgaag

SEQ ID NO: 640613 - DNA, 33 bp, Homo sapien
tacactatgaggtttaaatgagctgatgtacat

SEQ ID NO: 640614 - DNA, 33 bp, Homo sapien
tacactatgaggtttagatgagctgatgtacat

SEQ ID NO: 640615 - DNA, 33 bp, Homo sapien
aataggaaataatcaaaatacattatgcttgaa

SEQ ID NO: 640616 - DNA, 33 bp, Homo sapien
aataggaaataatcaacatacattatgcttgaa

SEQ ID NO: 640617 - DNA, 33 bp, Homo sapien
gatactactcagcgatcagaaaatgaatgaatt

SEQ ID NO: 640618 - DNA, 33 bp, Homo sapien
gatactactcagcgattagaaaatgaatgaatt

SEQ ID NO: 640619 - DNA, 33 bp, Homo sapien
acaaaaagtcacttaaacacaaatgcttctact

SEQ ID NO: 640620 - DNA, 33 bp, Homo sapien
acaaaaagtcacttaagcacaaatgcttctact

SEQ ID NO: 640621 - DNA, 33 bp, Homo sapien
agactttaaccagagccaggctgactcagaggc

SEQ ID NO: 640622 - DNA, 33 bp, Homo sapien
agactttaaccagagctaggctgactcagaggc

SEQ ID NO: 640623 - DNA, 33 bp, Homo sapien
taatttaaccagagtcaaattgtctcgatgaga

SEQ ID NO: 640624 - DNA, 33 bp, Homo sapien
taatttaaccagagtcgaattgtctcgatgaga

SEQ ID NO: 640625 - DNA, 33 bp, Homo sapien
tgctgtcttgacttgactaacagctactagata

SEQ ID NO: 640626 - DNA, 33 bp, Homo sapien
tgctgtcttgacttgagtaacagctactagata

SEQ ID NO: 640627 - DNA, 33 bp, Homo sapien
agcatttaactgctagaaccagactctgaagag

SEQ ID NO: 640628 - DNA, 33 bp, Homo sapien
agcatttaactgctaggaccagactctgaagag

SEQ ID NO: 640629 - DNA, 33 bp, Homo sapien
acttttgctcatactacctattcaatcactggt

SEQ ID NO: 640630 - DNA, 33 bp, Homo sapien
acttttgctcatactatctattcaatcactggt

SEQ ID NO: 640631 - DNA, 33 bp, Homo sapien
ctgagctttctatatgcagagaagagagggtac

SEQ ID NO: 640632 - DNA, 33 bp, Homo sapien
ctgagctttctatatggagagaagagagggtac

SEQ ID NO: 640633 - DNA, 33 bp, Homo sapien
cttgcttcagactgaaatgtgggtggttaattg

SEQ ID NO: 640634 - DNA, 33 bp, Homo sapien
cttgcttcagactgaagtgtgggtggttaattg

SEQ ID NO: 640635 - DNA, 33 bp, Homo sapien
tagctgtatcagtgcactcaagcttttcagttg

SEQ ID NO: 640636 - DNA, 33 bp, Homo sapien
tagctgtatcagtgcattcaagcttttcagttg

SEQ ID NO: 640637 - DNA, 33 bp, Homo sapien
aagcacccttctgcccacgttgcataccagcaa

SEQ ID NO: 640638 - DNA, 33 bp, Homo sapien
aagcacccttctgcccgcgttgcataccagcaa

SEQ ID NO: 640639 - DNA, 33 bp, Homo sapien
gcaaaggtgtttgtgaagaaatccccttgactt

SEQ ID NO: 640640 - DNA, 33 bp, Homo sapien
gcaaaggtgtttgtgaggaaatccccttgactt

SEQ ID NO: 640641 - DNA, 33 bp, Homo sapien
tttctagcaggaactcaatattcaaggagctta

SEQ ID NO: 640642 - DNA, 33 bp, Homo sapien
tttctagcaggaactccatattcaaggagctta

SEQ ID NO: 640643 - DNA, 33 bp, Homo sapien
gggtagatgagttacaatcacgcactatattag

SEQ ID NO: 640644 - DNA, 33 bp, Homo sapien
gggtagatgagttacagtcacgcactatattag

SEQ ID NO: 640645 - DNA, 33 bp, Homo sapien
ccatactgcacaaccactaagtttagactagat

SEQ ID NO: 640646 - DNA, 33 bp, Homo sapien
ccatactgcacaaccattaagtttagactagat

SEQ ID NO: 640647 - DNA, 33 bp, Homo sapien
ctggtcaaaagcgaaaacttttcttgccactta

SEQ ID NO: 640648 - DNA, 33 bp, Homo sapien
ctggtcaaaagcgaaatcttttcttgccactta

SEQ ID NO: 640649 - DNA, 33 bp, Homo sapien
tatttagagactgagaatatatagcaaatagca

SEQ ID NO: 640650 - DNA, 33 bp, Homo sapien
tatttagagactgagactatatagcaaatagca

SEQ ID NO: 640651 - DNA, 33 bp, Homo sapien
atgtgaattagactgcacaaaacgaactcctac

SEQ ID NO: 640652 - DNA, 33 bp, Homo sapien
atgtgaattagactgcccaaaacgaactcctac

SEQ ID NO: 640653 - DNA, 33 bp, Homo sapien
tttgttattaatttgccatttgcttacaaactc

SEQ ID NO: 640654 - DNA, 33 bp, Homo sapien
tttgttattaatttgcgatttgcttacaaactc

SEQ ID NO: 640655 - DNA, 33 bp, Homo sapien
atgtacaccttaatccactcatacattcattac

SEQ ID NO: 640656 - DNA, 33 bp, Homo sapien
atgtacaccttaatcctctcatacattcattac

SEQ ID NO: 640657 - DNA, 33 bp, Homo sapien
aagtgctagtacccaacctttcattttgtaatg

SEQ ID NO: 640658 - DNA, 33 bp, Homo sapien
aagtgctagtacccaagctttcattttgtaatg

SEQ ID NO: 640659 - DNA, 33 bp, Homo sapien
ttgctttgcctagaagacggggattctaattaa

SEQ ID NO: 640660 - DNA, 33 bp, Homo sapien
ttgctttgcctagaaggcggggattctaattaa

SEQ ID NO: 640661 - DNA, 33 bp, Homo sapien
tgggctttggagccaacgagaagtggaggtact

SEQ ID NO: 640662 - DNA, 33 bp, Homo sapien
tgggctttggagccaatgagaagtggaggtact

SEQ ID NO: 640663 - DNA, 33 bp, Homo sapien
tcttaaaatccatgctcacaactactacatcac

SEQ ID NO: 640664 - DNA, 33 bp, Homo sapien
tcttaaaatccatgctgacaactactacatcac

SEQ ID NO: 640665 - DNA, 33 bp, Homo sapien
atgactcgtttaggtacgggtacagaatccatg

SEQ ID NO: 640666 - DNA, 33 bp, Homo sapien
atgactcgtttaggtatgggtacagaatccatg

SEQ ID NO: 640667 - DNA, 33 bp, Homo sapien
ccttttggacactgaaaaaataggagtcagcca

SEQ ID NO: 640668 - DNA, 33 bp, Homo sapien
ccttttggacactgaagaaataggagtcagcca

SEQ ID NO: 640669 - DNA, 33 bp, Homo sapien
accacaatttgtctaaaaagtactcaagcccgt

SEQ ID NO: 640670 - DNA, 33 bp, Homo sapien
accacaatttgtctaagaagtactcaagcccgt

SEQ ID NO: 640671 - DNA, 33 bp, Homo sapien
cagtgtctcatagccaatagccggagatatcac

SEQ ID NO: 640672 - DNA, 33 bp, Homo sapien
cagtgtctcatagccagtagccggagatatcac

SEQ ID NO: 640673 - DNA, 33 bp, Homo sapien
tgtctgatgtggaagacggactgtttaacaacc

SEQ ID NO: 640674 - DNA, 33 bp, Homo sapien
tgtctgatgtggaagatggactgtttaacaacc

SEQ ID NO: 640675 - DNA, 33 bp, Homo sapien
tgtttgagggaaaaagaaaatgtcttgctgttg

SEQ ID NO: 640676 - DNA, 33 bp, Homo sapien
tgtttgagggaaaaaggaaatgtcttgctgttg

SEQ ID NO: 640677 - DNA, 33 bp, Homo sapien
gagggggcaggaagtacatctttcgtccaggga

SEQ ID NO: 640678 - DNA, 33 bp, Homo sapien
gagggggcaggaagtatatctttcgtccaggga

SEQ ID NO: 640679 - DNA, 33 bp, Homo sapien
agcagacactcggctaggcaggaggacctagat

SEQ ID NO: 640680 - DNA, 33 bp, Homo sapien
agcagacactcggctatgcaggaggacctagat

SEQ ID NO: 640681 - DNA, 33 bp, Homo sapien
aatgtaagtaatagcagtaactcacacaggttc

SEQ ID NO: 640682 - DNA, 33 bp, Homo sapien
aatgtaagtaatagcattaactcacacaggttc

SEQ ID NO: 640683 - DNA, 33 bp, Homo sapien
gatggtctgcccggtaacaaatactaactgttt

SEQ ID NO: 640684 - DNA, 33 bp, Homo sapien
gatggtctgcccggtagcaaatactaactgttt

SEQ ID NO: 640685 - DNA, 33 bp, Homo sapien
acttgtaagtggcagacagtctctttaaagcat

SEQ ID NO: 640686 - DNA, 33 bp, Homo sapien
acttgtaagtggcagatagtctctttaaagcat

SEQ ID NO: 640687 - DNA, 33 bp, Homo sapien
tttcacccaggaggccaccccaagagtttaaca

SEQ ID NO: 640688 - DNA, 33 bp, Homo sapien
tttcacccaggaggccgccccaagagtttaaca

SEQ ID NO: 640689 - DNA, 33 bp, Homo sapien
cgtttaatctttccaaagcctgaaaaatattcg

SEQ ID NO: 640690 - DNA, 33 bp, Homo sapien
cgtttaatctttccaacgcctgaaaaatattcg

SEQ ID NO: 640691 - DNA, 33 bp, Homo sapien
ccatcttggggcttcacaatacacatccctata

SEQ ID NO: 640692 - DNA, 33 bp, Homo sapien
ccatcttggggcttcagaatacacatccctata

SEQ ID NO: 640693 - DNA, 33 bp, Homo sapien
aagccccaagatgggcaaagaatcaatactatt

SEQ ID NO: 640694 - DNA, 33 bp, Homo sapien
aagccccaagatgggcgaagaatcaatactatt

SEQ ID NO: 640695 - DNA, 33 bp, Homo sapien
accaattagcctttaacggagctgttttttgtg

SEQ ID NO: 640696 - DNA, 33 bp, Homo sapien
accaattagcctttaatggagctgttttttgtg

SEQ ID NO: 640697 - DNA, 33 bp, Homo sapien
acttccagcaccttgaaaaaggggaaattgata

SEQ ID NO: 640698 - DNA, 33 bp, Homo sapien
acttccagcaccttgagaaaggggaaattgata

SEQ ID NO: 640699 - DNA, 33 bp, Homo sapien
atgtgcagcaggaatgaagccagataggtaaca

SEQ ID NO: 640700 - DNA, 33 bp, Homo sapien
atgtgcagcaggaatggagccagataggtaaca

SEQ ID NO: 640701 - DNA, 33 bp, Homo sapien
aaaaacaaacaaagaaatggaggatactgtttc

SEQ ID NO: 640702 - DNA, 33 bp, Homo sapien
aaaaacaaacaaagaagtggaggatactgtttc

SEQ ID NO: 640703 - DNA, 33 bp, Homo sapien
atgggcaaggcatagaaaaaacatttaacactt

SEQ ID NO: 640704 - DNA, 33 bp, Homo sapien
atgggcaaggcatagacaaaacatttaacactt

SEQ ID NO: 640705 - DNA, 33 bp, Homo sapien
atatgatcattctatccattgccattttggtgc

SEQ ID NO: 640706 - DNA, 33 bp, Homo sapien
atatgatcattctatcgattgccattttggtgc

SEQ ID NO: 640707 - DNA, 33 bp, Homo sapien
tctaactgatataaagcctcaacacatgacagc

SEQ ID NO: 640708 - DNA, 33 bp, Homo sapien
tctaactgatataaaggctcaacacatgacagc

SEQ ID NO: 640709 - DNA, 33 bp, Homo sapien
gtggtagatgttttgacggtacctcagagggat

SEQ ID NO: 640710 - DNA, 33 bp, Homo sapien
gtggtagatgttttgatggtacctcagagggat

SEQ ID NO: 640711 - DNA, 33 bp, Homo sapien
cacctacaaattattacaacactccacctccca

SEQ ID NO: 640712 - DNA, 33 bp, Homo sapien
cacctacaaattattagaacactccacctccca

SEQ ID NO: 640713 - DNA, 33 bp, Homo sapien
gcacatctctaaggaaaaaataacacagaccca

SEQ ID NO: 640714 - DNA, 33 bp, Homo sapien
gcacatctctaaggaagaaataacacagaccca

SEQ ID NO: 640715 - DNA, 33 bp, Homo sapien
tatgtgtgtaagataactatgaagatttcctgc

SEQ ID NO: 640716 - DNA, 33 bp, Homo sapien
tatgtgtgtaagataattatgaagatttcctgc

SEQ ID NO: 640717 - DNA, 33 bp, Homo sapien
ctttaagaagtagcaaaatatcttgaagtatat

SEQ ID NO: 640718 - DNA, 33 bp, Homo sapien
ctttaagaagtagcaacatatcttgaagtatat

SEQ ID NO: 640719 - DNA, 33 bp, Homo sapien
atactctgcaccttgaagacacaacacactgta

SEQ ID NO: 640720 - DNA, 33 bp, Homo sapien
atactctgcaccttgacgacacaacacactgta

SEQ ID NO: 640721 - DNA, 33 bp, Homo sapien
aaaaattggagatttcaacataaacatctggat

SEQ ID NO: 640722 - DNA, 33 bp, Homo sapien
aaaaattggagatttccacataaacatctggat

SEQ ID NO: 640723 - DNA, 33 bp, Homo sapien
gtgctgtgaaacatcccatcatgcataggacag

SEQ ID NO: 640724 - DNA, 33 bp, Homo sapien
gtgctgtgaaacatcctatcatgcataggacag

SEQ ID NO: 640725 - DNA, 33 bp, Homo sapien
gctcatcatattaagccagtggttctgagccgg

SEQ ID NO: 640726 - DNA, 33 bp, Homo sapien
gctcatcatattaagctagtggttctgagccgg

SEQ ID NO: 640727 - DNA, 33 bp, Homo sapien
tcttggttctcattcaaggctgactttgtcccc

SEQ ID NO: 640728 - DNA, 33 bp, Homo sapien
tcttggttctcattcagggctgactttgtcccc

SEQ ID NO: 640729 - DNA, 33 bp, Homo sapien
tggtcagttctacctgaaggtgttgagcctgta

SEQ ID NO: 640730 - DNA, 33 bp, Homo sapien
tggtcagttctacctgcaggtgttgagcctgta

SEQ ID NO: 640731 - DNA, 33 bp, Homo sapien
ctagttactctatcaaactggactatttagact

SEQ ID NO: 640732 - DNA, 33 bp, Homo sapien
ctagttactctatcaatctggactatttagact

SEQ ID NO: 640733 - DNA, 33 bp, Homo sapien
gtatgataccatcagtaaattccttaagaagaa

SEQ ID NO: 640734 - DNA, 33 bp, Homo sapien
gtatgataccatcagttaattccttaagaagaa

SEQ ID NO: 640735 - DNA, 33 bp, Homo sapien
tgcatcctcaggacaactgtagatgctagaacc

SEQ ID NO: 640736 - DNA, 33 bp, Homo sapien
tgcatcctcaggacaagtgtagatgctagaacc

SEQ ID NO: 640737 - DNA, 33 bp, Homo sapien
gatggatgaggatgcacacctttgtaaggcagg

SEQ ID NO: 640738 - DNA, 33 bp, Homo sapien
gatggatgaggatgcagacctttgtaaggcagg

SEQ ID NO: 640739 - DNA, 33 bp, Homo sapien
taatttgcaccaaaataatagaaggggataagt

SEQ ID NO: 640740 - DNA, 33 bp, Homo sapien
taatttgcaccaaaatgatagaaggggataagt

SEQ ID NO: 640741 - DNA, 33 bp, Homo sapien
aggcactggcaagtgaaaagtagtgaaccagat

SEQ ID NO: 640742 - DNA, 33 bp, Homo sapien
aggcactggcaagtgataagtagtgaaccagat

SEQ ID NO: 640743 - DNA, 33 bp, Homo sapien
cagatgttaattattcaagactactcttaatta

SEQ ID NO: 640744 - DNA, 33 bp, Homo sapien
cagatgttaattattcgagactactcttaatta

SEQ ID NO: 640745 - DNA, 33 bp, Homo sapien
ccactagatatttggaagtagatacacaaagaa

SEQ ID NO: 640746 - DNA, 33 bp, Homo sapien
ccactagatatttggaggtagatacacaaagaa

SEQ ID NO: 640747 - DNA, 33 bp, Homo sapien
caggagtggatgtcaaaagtttgagcttgtatt

SEQ ID NO: 640748 - DNA, 33 bp, Homo sapien
caggagtggatgtcaacagtttgagcttgtatt

SEQ ID NO: 640749 - DNA, 33 bp, Homo sapien
taattaaagtattggtcacatcttgggcagagg

SEQ ID NO: 640750 - DNA, 33 bp, Homo sapien
taattaaagtattggttacatcttgggcagagg

SEQ ID NO: 640751 - DNA, 33 bp, Homo sapien
gccagggaatataaccaattgctcttccaaata

SEQ ID NO: 640752 - DNA, 33 bp, Homo sapien
gccagggaatataaccgattgctcttccaaata

SEQ ID NO: 640753 - DNA, 33 bp, Homo sapien
gccattgaaaaaaaacagaacctgatcaattaa

SEQ ID NO: 640754 - DNA, 33 bp, Homo sapien
gccattgaaaaaaaacggaacctgatcaattaa

SEQ ID NO: 640755 - DNA, 33 bp, Homo sapien
gatgaagacaattcacacttgaatccctttggt

SEQ ID NO: 640756 - DNA, 33 bp, Homo sapien
gatgaagacaattcacgcttgaatccctttggt

SEQ ID NO: 640757 - DNA, 33 bp, Homo sapien
tcagggcaactaatacaacagaaagttttattg

SEQ ID NO: 640758 - DNA, 33 bp, Homo sapien
tcagggcaactaatacgacagaaagttttattg

SEQ ID NO: 640759 - DNA, 33 bp, Homo sapien
acacatagcgcgtaagcaccagggacacatggg

SEQ ID NO: 640760 - DNA, 33 bp, Homo sapien
acacatagcgcgtaagtaccagggacacatggg

SEQ ID NO: 640761 - DNA, 33 bp, Homo sapien
cccattgcaatctagaaagaaactacccactga

SEQ ID NO: 640762 - DNA, 33 bp, Homo sapien
cccattgcaatctagagagaaactacccactga

SEQ ID NO: 640763 - DNA, 33 bp, Homo sapien
aactcgacagtgtgtaaggcattagaaattaca

SEQ ID NO: 640764 - DNA, 33 bp, Homo sapien
aactcgacagtgtgtatggcattagaaattaca

SEQ ID NO: 640765 - DNA, 33 bp, Homo sapien
tctccaatgtccattacacccctctgtatgcct

SEQ ID NO: 640766 - DNA, 33 bp, Homo sapien
tctccaatgtccattatacccctctgtatgcct

SEQ ID NO: 640767 - DNA, 33 bp, Homo sapien
aatgctataaaatgccaagtattagtaacttct

SEQ ID NO: 640768 - DNA, 33 bp, Homo sapien
aatgctataaaatgccgagtattagtaacttct

SEQ ID NO: 640769 - DNA, 33 bp, Homo sapien
tggggtctcagatggcactagatcaacatggac

SEQ ID NO: 640770 - DNA, 33 bp, Homo sapien
tggggtctcagatggcgctagatcaacatggac

SEQ ID NO: 640771 - DNA, 33 bp, Homo sapien
tgctgaaggattttaaacatggaagagaaacaa

SEQ ID NO: 640772 - DNA, 33 bp, Homo sapien
tgctgaaggattttaagcatggaagagaaacaa

SEQ ID NO: 640773 - DNA, 33 bp, Homo sapien
catgataaagtccaaacttcacgtccacatgac

SEQ ID NO: 640774 - DNA, 33 bp, Homo sapien
catgataaagtccaaatttcacgtccacatgac

SEQ ID NO: 640775 - DNA, 33 bp, Homo sapien
ttcaaaccgtagcagacgtaatgaatgcaaagt

SEQ ID NO: 640776 - DNA, 33 bp, Homo sapien
ttcaaaccgtagcagatgtaatgaatgcaaagt

SEQ ID NO: 640777 - DNA, 33 bp, Homo sapien
agaaacattttgccagcaaacagccttaagtgg

SEQ ID NO: 640778 - DNA, 33 bp, Homo sapien
agaaacattttgccaggaaacagccttaagtgg

SEQ ID NO: 640779 - DNA, 33 bp, Homo sapien
gaaacttcctgttgaacggtgagagtgcgaaag

SEQ ID NO: 640780 - DNA, 33 bp, Homo sapien
gaaacttcctgttgaatggtgagagtgcgaaag

SEQ ID NO: 640781 - DNA, 33 bp, Homo sapien
gtctaggaatcactaacccaagcttaccctcag

SEQ ID NO: 640782 - DNA, 33 bp, Homo sapien
gtctaggaatcactaatccaagcttaccctcag

SEQ ID NO: 640783 - DNA, 33 bp, Homo sapien
cattttttttggtatcaagtctttgaaatccag

SEQ ID NO: 640784 - DNA, 33 bp, Homo sapien
cattttttttggtatctagtctttgaaatccag

SEQ ID NO: 640785 - DNA, 33 bp, Homo sapien
gcaataattttatgtgaatcagagtaagaagat

SEQ ID NO: 640786 - DNA, 33 bp, Homo sapien
gcaataattttatgtgcatcagagtaagaagat

SEQ ID NO: 640787 - DNA, 33 bp, Homo sapien
agattcctgccttcaaatctctataagttttca

SEQ ID NO: 640788 - DNA, 33 bp, Homo sapien
agattcctgccttcaagtctctataagttttca

SEQ ID NO: 640789 - DNA, 33 bp, Homo sapien
taaacatgacccggtgacaagaatgagttaatt

SEQ ID NO: 640790 - DNA, 33 bp, Homo sapien
taaacatgacccggtggcaagaatgagttaatt

SEQ ID NO: 640791 - DNA, 33 bp, Homo sapien
ctgatggccagtctaaatatcctttcgagaatg

SEQ ID NO: 640792 - DNA, 33 bp, Homo sapien
ctgatggccagtctaagtatcctttcgagaatg

SEQ ID NO: 640793 - DNA, 33 bp, Homo sapien
taacacaactaacgtacagcctcagattctttg

SEQ ID NO: 640794 - DNA, 33 bp, Homo sapien
taacacaactaacgtatagcctcagattctttg

SEQ ID NO: 640795 - DNA, 33 bp, Homo sapien
caggtctatgagagtccacgttttttgtctttt

SEQ ID NO: 640796 - DNA, 33 bp, Homo sapien
caggtctatgagagtctacgttttttgtctttt

SEQ ID NO: 640797 - DNA, 33 bp, Homo sapien
attcctaccaccaatcaaccttgaaagaggccc

SEQ ID NO: 640798 - DNA, 33 bp, Homo sapien
attcctaccaccaatcgaccttgaaagaggccc

SEQ ID NO: 640799 - DNA, 33 bp, Homo sapien
ttctatgcctatgatgaacatttgttaattgat

SEQ ID NO: 640800 - DNA, 33 bp, Homo sapien
ttctatgcctatgatggacatttgttaattgat

SEQ ID NO: 640801 - DNA, 33 bp, Homo sapien
gtttgggtcctttgagaaacaagaactggatgc

SEQ ID NO: 640802 - DNA, 33 bp, Homo sapien
gtttgggtcctttgaggaacaagaactggatgc

SEQ ID NO: 640803 - DNA, 33 bp, Homo sapien
agccataaaaaccagacagcataaaaaggctgg

SEQ ID NO: 640804 - DNA, 33 bp, Homo sapien
agccataaaaaccagagagcataaaaaggctgg

SEQ ID NO: 640805 - DNA, 33 bp, Homo sapien
ctatagacttaaacctcaggattctctttagtg

SEQ ID NO: 640806 - DNA, 33 bp, Homo sapien
ctatagacttaaaccttaggattctctttagtg

SEQ ID NO: 640807 - DNA, 33 bp, Homo sapien
gccagtcacatactgagaaaaactagttgacac

SEQ ID NO: 640808 - DNA, 33 bp, Homo sapien
gccagtcacatactgataaaaactagttgacac

SEQ ID NO: 640809 - DNA, 33 bp, Homo sapien
cagtatgtgactggcaccagtatgtttagtacc

SEQ ID NO: 640810 - DNA, 33 bp, Homo sapien
cagtatgtgactggcagcagtatgtttagtacc

SEQ ID NO: 640811 - DNA, 33 bp, Homo sapien
agaacaatttctccaacaacgttttcattacag

SEQ ID NO: 640812 - DNA, 33 bp, Homo sapien
agaacaatttctccaataacgttttcattacag

SEQ ID NO: 640813 - DNA, 33 bp, Homo sapien
tgcaatataaaaatgcccagtggtggaagggcc

SEQ ID NO: 640814 - DNA, 33 bp, Homo sapien
tgcaatataaaaatgctcagtggtggaagggcc

SEQ ID NO: 640815 - DNA, 33 bp, Homo sapien
tgtataaatgtgtttaacatagcacctagcact

SEQ ID NO: 640816 - DNA, 33 bp, Homo sapien
tgtataaatgtgtttagcatagcacctagcact

SEQ ID NO: 640817 - DNA, 33 bp, Homo sapien
atgcatccaaaacaaaatagacaagattgaggt

SEQ ID NO: 640818 - DNA, 33 bp, Homo sapien
atgcatccaaaacaaagtagacaagattgaggt

SEQ ID NO: 640819 - DNA, 33 bp, Homo sapien
tttgaattttttcagcaaaaggtggaaaggtat

SEQ ID NO: 640820 - DNA, 33 bp, Homo sapien
tttgaattttttcagcgaaaggtggaaaggtat

SEQ ID NO: 640821 - DNA, 33 bp, Homo sapien
tgcagcactttgacaaagataacaaggaaaata

SEQ ID NO: 640822 - DNA, 33 bp, Homo sapien
tgcagcactttgacaaggataacaaggaaaata

SEQ ID NO: 640823 - DNA, 33 bp, Homo sapien
agcagcagtaatttaacagcagtagtgagcatt

SEQ ID NO: 640824 - DNA, 33 bp, Homo sapien
agcagcagtaatttaatagcagtagtgagcatt

SEQ ID NO: 640825 - DNA, 33 bp, Homo sapien
acatgaaagatggtaccgagctcatgggattgt

SEQ ID NO: 640826 - DNA, 33 bp, Homo sapien
acatgaaagatggtactgagctcatgggattgt

SEQ ID NO: 640827 - DNA, 33 bp, Homo sapien
tcacatggatctcctaagtgtccaacattacat

SEQ ID NO: 640828 - DNA, 33 bp, Homo sapien
tcacatggatctcctacgtgtccaacattacat

SEQ ID NO: 640829 - DNA, 33 bp, Homo sapien
gttcaagaatagacaaaactaagtcagagtgat

SEQ ID NO: 640830 - DNA, 33 bp, Homo sapien
gttcaagaatagacaacactaagtcagagtgat

SEQ ID NO: 640831 - DNA, 33 bp, Homo sapien
gagactgaggcagaacaagatcagttacaggcc

SEQ ID NO: 640832 - DNA, 33 bp, Homo sapien
gagactgaggcagaaccagatcagttacaggcc

SEQ ID NO: 640833 - DNA, 33 bp, Homo sapien
atgataaatagtatgaaccccattttgcatgtg

SEQ ID NO: 640834 - DNA, 33 bp, Homo sapien
atgataaatagtatgacccccattttgcatgtg

SEQ ID NO: 640835 - DNA, 33 bp, Homo sapien
ccctgtgctacagaggacccattcaaaatttag

SEQ ID NO: 640836 - DNA, 33 bp, Homo sapien
ccctgtgctacagagggcccattcaaaatttag

SEQ ID NO: 640837 - DNA, 33 bp, Homo sapien
aggtagctgtcatttaccataacatgagatggt

SEQ ID NO: 640838 - DNA, 33 bp, Homo sapien
aggtagctgtcatttagcataacatgagatggt

SEQ ID NO: 640839 - DNA, 33 bp, Homo sapien
aaaacaaaatgaagcacgtgaagtcaattttac

SEQ ID NO: 640840 - DNA, 33 bp, Homo sapien
aaaacaaaatgaagcatgtgaagtcaattttac

SEQ ID NO: 640841 - DNA, 33 bp, Homo sapien
tctgatctactccagaataaagagtcacatcaa

SEQ ID NO: 640842 - DNA, 33 bp, Homo sapien
tctgatctactccagagtaaagagtcacatcaa

SEQ ID NO: 640843 - DNA, 33 bp, Homo sapien
ggctttgtctcactgcacatccacatctttagg

SEQ ID NO: 640844 - DNA, 33 bp, Homo sapien
ggctttgtctcactgcgcatccacatctttagg

SEQ ID NO: 640845 - DNA, 33 bp, Homo sapien
ctctgtgcagcttcaaagtaagagttgacttct

SEQ ID NO: 640846 - DNA, 33 bp, Homo sapien
ctctgtgcagcttcaaggtaagagttgacttct

SEQ ID NO: 640847 - DNA, 33 bp, Homo sapien
tgtacatagtttcaaacgttgtattttaagatg

SEQ ID NO: 640848 - DNA, 33 bp, Homo sapien
tgtacatagtttcaaaggttgtattttaagatg

SEQ ID NO: 640849 - DNA, 33 bp, Homo sapien
caagtagataatgttaactcacctagaataaag

SEQ ID NO: 640850 - DNA, 33 bp, Homo sapien
caagtagataatgttagctcacctagaataaag

SEQ ID NO: 640851 - DNA, 33 bp, Homo sapien
tatgatagtgacaaccaacatcacagcacacag

SEQ ID NO: 640852 - DNA, 33 bp, Homo sapien
tatgatagtgacaaccgacatcacagcacacag

SEQ ID NO: 640853 - DNA, 33 bp, Homo sapien
tcttgaggacccagataagttacctactgctat

SEQ ID NO: 640854 - DNA, 33 bp, Homo sapien
tcttgaggacccagattagttacctactgctat

SEQ ID NO: 640855 - DNA, 33 bp, Homo sapien
ctatatatggatttcacaacaatcttgatttcc

SEQ ID NO: 640856 - DNA, 33 bp, Homo sapien
ctatatatggatttcataacaatcttgatttcc

SEQ ID NO: 640857 - DNA, 33 bp, Homo sapien
gactgtacttctacacaactttgggtttttatt

SEQ ID NO: 640858 - DNA, 33 bp, Homo sapien
gactgtacttctacacgactttgggtttttatt

SEQ ID NO: 640859 - DNA, 33 bp, Homo sapien
caatcagctaagatccggcttttgagatgcatt

SEQ ID NO: 640860 - DNA, 33 bp, Homo sapien
caatcagctaagatcctgcttttgagatgcatt

SEQ ID NO: 640861 - DNA, 33 bp, Homo sapien
ctacattcattcatctaaacactccaaaaatat

SEQ ID NO: 640862 - DNA, 33 bp, Homo sapien
ctacattcattcatctgaacactccaaaaatat

SEQ ID NO: 640863 - DNA, 33 bp, Homo sapien
aggatctagattccaaatgtgccttgggttgaa

SEQ ID NO: 640864 - DNA, 33 bp, Homo sapien
aggatctagattccaactgtgccttgggttgaa

SEQ ID NO: 640865 - DNA, 33 bp, Homo sapien
ttctttcgcttaacatcatgtatgtgagattta

SEQ ID NO: 640866 - DNA, 33 bp, Homo sapien
ttctttcgcttaacattatgtatgtgagattta

SEQ ID NO: 640867 - DNA, 33 bp, Homo sapien
tagataacaaccaaaacaaaaatggactgtaag

SEQ ID NO: 640868 - DNA, 33 bp, Homo sapien
tagataacaaccaaaagaaaaatggactgtaag

SEQ ID NO: 640869 - DNA, 33 bp, Homo sapien
atgtctggaggtagtgacaacaccataacctca

SEQ ID NO: 640870 - DNA, 33 bp, Homo sapien
atgtctggaggtagtggcaacaccataacctca

SEQ ID NO: 640871 - DNA, 33 bp, Homo sapien
agtgtggggcacttcaactttatctgcttcata

SEQ ID NO: 640872 - DNA, 33 bp, Homo sapien
agtgtggggcacttcagctttatctgcttcata

SEQ ID NO: 640873 - DNA, 33 bp, Homo sapien
atttccttgaaaggaactgagtgttaagattgt

SEQ ID NO: 640874 - DNA, 33 bp, Homo sapien
atttccttgaaaggaattgagtgttaagattgt

SEQ ID NO: 640875 - DNA, 33 bp, Homo sapien
atgaggaaatggcaaaattcatatccttagttt

SEQ ID NO: 640876 - DNA, 33 bp, Homo sapien
atgaggaaatggcaaagttcatatccttagttt

SEQ ID NO: 640877 - DNA, 33 bp, Homo sapien
aagtattgggatttagcaaaacgtcagatagtt

SEQ ID NO: 640878 - DNA, 33 bp, Homo sapien
aagtattgggatttaggaaaacgtcagatagtt

SEQ ID NO: 640879 - DNA, 33 bp, Homo sapien
attcactcttgagaaactcatgcttcgaggtaa

SEQ ID NO: 640880 - DNA, 33 bp, Homo sapien
attcactcttgagaaagtcatgcttcgaggtaa

SEQ ID NO: 640881 - DNA, 33 bp, Homo sapien
actgctcttcacacataaccactctggacctca

SEQ ID NO: 640882 - DNA, 33 bp, Homo sapien
actgctcttcacacattaccactctggacctca

SEQ ID NO: 640883 - DNA, 33 bp, Homo sapien
ggcaggttggttggtacattttatgtcttaggg

SEQ ID NO: 640884 - DNA, 33 bp, Homo sapien
ggcaggttggttggtatattttatgtcttaggg

SEQ ID NO: 640885 - DNA, 33 bp, Homo sapien
gggagaagaggagaaaactagctaaggagagtg

SEQ ID NO: 640886 - DNA, 33 bp, Homo sapien
gggagaagaggagaaagctagctaaggagagtg

SEQ ID NO: 640887 - DNA, 33 bp, Homo sapien
gatctctgtctcttctaactagttcactacttc

SEQ ID NO: 640888 - DNA, 33 bp, Homo sapien
gatctctgtctcttctgactagttcactacttc

SEQ ID NO: 640889 - DNA, 33 bp, Homo sapien
aggacatccaacaatacctggtgaaagcccaaa

SEQ ID NO: 640890 - DNA, 33 bp, Homo sapien
aggacatccaacaatatctggtgaaagcccaaa

SEQ ID NO: 640891 - DNA, 33 bp, Homo sapien
gttattatgggtacagacataaagccactgcta

SEQ ID NO: 640892 - DNA, 33 bp, Homo sapien
gttattatgggtacagtcataaagccactgcta

SEQ ID NO: 640893 - DNA, 33 bp, Homo sapien
gctcaaaagacctacaaatactgaacacaaata

SEQ ID NO: 640894 - DNA, 33 bp, Homo sapien
gctcaaaagacctacatatactgaacacaaata

SEQ ID NO: 640895 - DNA, 33 bp, Homo sapien
tgattccataggtagaagtcattgtcattaaaa

SEQ ID NO: 640896 - DNA, 33 bp, Homo sapien
tgattccataggtagacgtcattgtcattaaaa

SEQ ID NO: 640897 - DNA, 33 bp, Homo sapien
aactttaggttcagctcactggtttttgctgga

SEQ ID NO: 640898 - DNA, 33 bp, Homo sapien
aactttaggttcagcttactggtttttgctgga

SEQ ID NO: 640899 - DNA, 33 bp, Homo sapien
acccaagttttgcaataaaatacagtcatgtgc

SEQ ID NO: 640900 - DNA, 33 bp, Homo sapien
acccaagttttgcaatcaaatacagtcatgtgc

SEQ ID NO: 640901 - DNA, 33 bp, Homo sapien
ctttctatcacctagtaacattgcagctgtcat

SEQ ID NO: 640902 - DNA, 33 bp, Homo sapien
ctttctatcacctagtgacattgcagctgtcat

SEQ ID NO: 640903 - DNA, 33 bp, Homo sapien
aaaaatatgattaggaatagcctgtcaatgtat

SEQ ID NO: 640904 - DNA, 33 bp, Homo sapien
aaaaatatgattaggagtagcctgtcaatgtat

SEQ ID NO: 640905 - DNA, 33 bp, Homo sapien
cacatgaattaacttacggatagctgaacttag

SEQ ID NO: 640906 - DNA, 33 bp, Homo sapien
cacatgaattaacttatggatagctgaacttag

SEQ ID NO: 640907 - DNA, 33 bp, Homo sapien
gctaaccaagcaaataaatgattagaacatttt

SEQ ID NO: 640908 - DNA, 33 bp, Homo sapien
gctaaccaagcaaatagatgattagaacatttt

SEQ ID NO: 640909 - DNA, 33 bp, Homo sapien
tactgtagccactgatcagtaatgccagccatg

SEQ ID NO: 640910 - DNA, 33 bp, Homo sapien
tactgtagccactgattagtaatgccagccatg

SEQ ID NO: 640911 - DNA, 33 bp, Homo sapien
atgacattcatctacaagtatttatggttaagt

SEQ ID NO: 640912 - DNA, 33 bp, Homo sapien
atgacattcatctacaggtatttatggttaagt

SEQ ID NO: 640913 - DNA, 33 bp, Homo sapien
aaggatagatcacttaccatgtaaccttagaca

SEQ ID NO: 640914 - DNA, 33 bp, Homo sapien
aaggatagatcacttatcatgtaaccttagaca

SEQ ID NO: 640915 - DNA, 33 bp, Homo sapien
atccgtgttcttcaccacaacattatagaacct

SEQ ID NO: 640916 - DNA, 33 bp, Homo sapien
atccgtgttcttcaccgcaacattatagaacct

SEQ ID NO: 640917 - DNA, 33 bp, Homo sapien
atataagaaagcagcccaaaacagcagcataaa

SEQ ID NO: 640918 - DNA, 33 bp, Homo sapien
atataagaaagcagccgaaaacagcagcataaa

SEQ ID NO: 640919 - DNA, 33 bp, Homo sapien
tgaaggagcctccaaaagattctagctccgagt

SEQ ID NO: 640920 - DNA, 33 bp, Homo sapien
tgaaggagcctccaaatgattctagctccgagt

SEQ ID NO: 640921 - DNA, 33 bp, Homo sapien
gcagctactgttgatcaagcgccttttacaatt

SEQ ID NO: 640922 - DNA, 33 bp, Homo sapien
gcagctactgttgatcgagcgccttttacaatt

SEQ ID NO: 640923 - DNA, 33 bp, Homo sapien
aaatgtaggatttgagaaaacaagctgtttgcc

SEQ ID NO: 640924 - DNA, 33 bp, Homo sapien
aaatgtaggatttgaggaaacaagctgtttgcc

SEQ ID NO: 640925 - DNA, 33 bp, Homo sapien
gtatctttcaaggaccaagtgaagaaccacgga

SEQ ID NO: 640926 - DNA, 33 bp, Homo sapien
gtatctttcaaggacctagtgaagaaccacgga

SEQ ID NO: 640927 - DNA, 33 bp, Homo sapien
caacaaaggaaaatcccaatgctttcctttgcc

SEQ ID NO: 640928 - DNA, 33 bp, Homo sapien
caacaaaggaaaatccgaatgctttcctttgcc

SEQ ID NO: 640929 - DNA, 33 bp, Homo sapien
gtatcattgaaatcaacttcttttctttacaat

SEQ ID NO: 640930 - DNA, 33 bp, Homo sapien
gtatcattgaaatcaagttcttttctttacaat

SEQ ID NO: 640931 - DNA, 33 bp, Homo sapien
aagttggtttcatttacaaaagctaaccaaatc

SEQ ID NO: 640932 - DNA, 33 bp, Homo sapien
aagttggtttcatttagaaaagctaaccaaatc

SEQ ID NO: 640933 - DNA, 33 bp, Homo sapien
caaatgcctgtcattacaccctatcacacaaca

SEQ ID NO: 640934 - DNA, 33 bp, Homo sapien
caaatgcctgtcattataccctatcacacaaca

SEQ ID NO: 640935 - DNA, 33 bp, Homo sapien
tgcataaaatatttcacagacagtatcttacaa

SEQ ID NO: 640936 - DNA, 33 bp, Homo sapien
tgcataaaatatttcatagacagtatcttacaa

SEQ ID NO: 640937 - DNA, 33 bp, Homo sapien
cagaaattgcccaaagaatcactgaaatattgc

SEQ ID NO: 640938 - DNA, 33 bp, Homo sapien
cagaaattgcccaaaggatcactgaaatattgc

SEQ ID NO: 640939 - DNA, 33 bp, Homo sapien
atgcaatttatgctccagaatgcctctcttgcc

SEQ ID NO: 640940 - DNA, 33 bp, Homo sapien
atgcaatttatgctcccgaatgcctctcttgcc

SEQ ID NO: 640941 - DNA, 33 bp, Homo sapien
tctcctaatacccaccacccttgttcactccat

SEQ ID NO: 640942 - DNA, 33 bp, Homo sapien
tctcctaatacccaccgcccttgttcactccat

SEQ ID NO: 640943 - DNA, 33 bp, Homo sapien
tctgtttgaacaacaactctgactgctttgtgt

SEQ ID NO: 640944 - DNA, 33 bp, Homo sapien
tctgtttgaacaacaattctgactgctttgtgt

SEQ ID NO: 640945 - DNA, 33 bp, Homo sapien
aggctgtaactatttacctaggagttatcaggt

SEQ ID NO: 640946 - DNA, 33 bp, Homo sapien
aggctgtaactatttatctaggagttatcaggt

SEQ ID NO: 640947 - DNA, 33 bp, Homo sapien
ttccagcacaatcctaacaaacagagtaaatgc

SEQ ID NO: 640948 - DNA, 33 bp, Homo sapien
ttccagcacaatcctagcaaacagagtaaatgc

SEQ ID NO: 640949 - DNA, 33 bp, Homo sapien
tttttttcagagactgaagtgggacatggggag

SEQ ID NO: 640950 - DNA, 33 bp, Homo sapien
tttttttcagagactggagtgggacatggggag

SEQ ID NO: 640951 - DNA, 33 bp, Homo sapien
atatcacagtgccctacatacttgtttctctca

SEQ ID NO: 640952 - DNA, 33 bp, Homo sapien
atatcacagtgccctatatacttgtttctctca

SEQ ID NO: 640953 - DNA, 33 bp, Homo sapien
agctgttcaccaaaaacttattgtggttgtgtg

SEQ ID NO: 640954 - DNA, 33 bp, Homo sapien
agctgttcaccaaaaagttattgtggttgtgtg

SEQ ID NO: 640955 - DNA, 33 bp, Homo sapien
ctgctgtaataacataaaagccattcttaacaa

SEQ ID NO: 640956 - DNA, 33 bp, Homo sapien
ctgctgtaataacatacaagccattcttaacaa

SEQ ID NO: 640957 - DNA, 33 bp, Homo sapien
agacttagaatgtcaaactggaagggctctcag

SEQ ID NO: 640958 - DNA, 33 bp, Homo sapien
agacttagaatgtcaacctggaagggctctcag

SEQ ID NO: 640959 - DNA, 33 bp, Homo sapien
ttcctgggtaggagtcaatgcggttcactttgt

SEQ ID NO: 640960 - DNA, 33 bp, Homo sapien
ttcctgggtaggagtccatgcggttcactttgt

SEQ ID NO: 640961 - DNA, 33 bp, Homo sapien
gctgtcctgtgccttacggatgtttagcaacat

SEQ ID NO: 640962 - DNA, 33 bp, Homo sapien
gctgtcctgtgccttatggatgtttagcaacat

SEQ ID NO: 640963 - DNA, 33 bp, Homo sapien
gggcaggagactgctaatagaatcttgtggata

SEQ ID NO: 640964 - DNA, 33 bp, Homo sapien
gggcaggagactgctactagaatcttgtggata

SEQ ID NO: 640965 - DNA, 33 bp, Homo sapien
ctttgggtgcaatgtcaaataatacaataaagg

SEQ ID NO: 640966 - DNA, 33 bp, Homo sapien
ctttgggtgcaatgtcgaataatacaataaagg

SEQ ID NO: 640967 - DNA, 33 bp, Homo sapien
ttttcctttgtatgaaaattttgtgaagttcat

SEQ ID NO: 640968 - DNA, 33 bp, Homo sapien
ttttcctttgtatgaatattttgtgaagttcat

SEQ ID NO: 640969 - DNA, 33 bp, Homo sapien
ttttctcaatgtcaagaaatcttcctcttccta

SEQ ID NO: 640970 - DNA, 33 bp, Homo sapien
ttttctcaatgtcaaggaatcttcctcttccta

SEQ ID NO: 640971 - DNA, 33 bp, Homo sapien
gtttataagctttacaataaaaaatctggagac

SEQ ID NO: 640972 - DNA, 33 bp, Homo sapien
gtttataagctttacagtaaaaaatctggagac

SEQ ID NO: 640973 - DNA, 33 bp, Homo sapien
cattagattgcaagaacaagtttgtaaagaaaa

SEQ ID NO: 640974 - DNA, 33 bp, Homo sapien
cattagattgcaagaataagtttgtaaagaaaa

SEQ ID NO: 640975 - DNA, 33 bp, Homo sapien
tgtttgatccttaagactatttctcagtatttc

SEQ ID NO: 640976 - DNA, 33 bp, Homo sapien
tgtttgatccttaagattatttctcagtatttc

SEQ ID NO: 640977 - DNA, 33 bp, Homo sapien
tcatagaaaaatgtcaagtgttccataggcgag

SEQ ID NO: 640978 - DNA, 33 bp, Homo sapien
tcatagaaaaatgtcaggtgttccataggcgag

SEQ ID NO: 640979 - DNA, 33 bp, Homo sapien
ttgcattcattctcgaacatttgcatatctggt

SEQ ID NO: 640980 - DNA, 33 bp, Homo sapien
ttgcattcattctcgagcatttgcatatctggt

SEQ ID NO: 640981 - DNA, 33 bp, Homo sapien
tgtactttatagtgacaaacctattctttatac

SEQ ID NO: 640982 - DNA, 33 bp, Homo sapien
tgtactttatagtgacgaacctattctttatac

SEQ ID NO: 640983 - DNA, 33 bp, Homo sapien
cacatctggccattcaaaaaagttcaagaatag

SEQ ID NO: 640984 - DNA, 33 bp, Homo sapien
cacatctggccattcagaaaagttcaagaatag

SEQ ID NO: 640985 - DNA, 33 bp, Homo sapien
ccagaggttgtaacaacgtaagtaaatctctct

SEQ ID NO: 640986 - DNA, 33 bp, Homo sapien
ccagaggttgtaacaatgtaagtaaatctctct

SEQ ID NO: 640987 - DNA, 33 bp, Homo sapien
gaaagtacaaacacaaccatggagggaagttgc

SEQ ID NO: 640988 - DNA, 33 bp, Homo sapien
gaaagtacaaacacaagcatggagggaagttgc

SEQ ID NO: 640989 - DNA, 33 bp, Homo sapien
tttttagagaaatgcaatacctaaaattaaaat

SEQ ID NO: 640990 - DNA, 33 bp, Homo sapien
tttttagagaaatgcagtacctaaaattaaaat

SEQ ID NO: 640991 - DNA, 33 bp, Homo sapien
gggttcgcaaactcaaaatgaccaggactaggc

SEQ ID NO: 640992 - DNA, 33 bp, Homo sapien
gggttcgcaaactcaagatgaccaggactaggc

SEQ ID NO: 640993 - DNA, 33 bp, Homo sapien
atctgaaagaatgaaagtgtagccctaaatcac

SEQ ID NO: 640994 - DNA, 33 bp, Homo sapien
atctgaaagaatgaaattgtagccctaaatcac

SEQ ID NO: 640995 - DNA, 33 bp, Homo sapien
aaatatagaatgagtaagtgatagaaatgagca

SEQ ID NO: 640996 - DNA, 33 bp, Homo sapien
aaatatagaatgagtatgtgatagaaatgagca

SEQ ID NO: 640997 - DNA, 33 bp, Homo sapien
ctcttcaggtgatataagcctgcagctgttatt

SEQ ID NO: 640998 - DNA, 33 bp, Homo sapien
ctcttcaggtgatatacgcctgcagctgttatt

SEQ ID NO: 640999 - DNA, 33 bp, Homo sapien
gaataatggccacccaaaatgtcaggtcctgat

SEQ ID NO: 641000 - DNA, 33 bp, Homo sapien
gaataatggccacccagaatgtcaggtcctgat

SEQ ID NO: 641001 - DNA, 33 bp, Homo sapien
tgaagaaatttatgcaaaagaggaacatgatca

SEQ ID NO: 641002 - DNA, 33 bp, Homo sapien
tgaagaaatttatgcagaagaggaacatgatca

SEQ ID NO: 641003 - DNA, 33 bp, Homo sapien
ttcctgtaaccaagaagttagggcattgacacg

SEQ ID NO: 641004 - DNA, 33 bp, Homo sapien
ttcctgtaaccaagaatttagggcattgacacg

SEQ ID NO: 641005 - DNA, 33 bp, Homo sapien
tacaggaaggcattcaagaacctcctgatctta

SEQ ID NO: 641006 - DNA, 33 bp, Homo sapien
tacaggaaggcattcaggaacctcctgatctta

SEQ ID NO: 641007 - DNA, 33 bp, Homo sapien
tataaatgaaatacaccgtgactcttgctttca

SEQ ID NO: 641008 - DNA, 33 bp, Homo sapien
tataaatgaaatacactgtgactcttgctttca

SEQ ID NO: 641009 - DNA, 33 bp, Homo sapien
ccaatatctcaaattcagaattcatgccttctc

SEQ ID NO: 641010 - DNA, 33 bp, Homo sapien
ccaatatctcaaattcggaattcatgccttctc

SEQ ID NO: 641011 - DNA, 33 bp, Homo sapien
tgagttgaggatattacgaagatggactagaag

SEQ ID NO: 641012 - DNA, 33 bp, Homo sapien
tgagttgaggatattatgaagatggactagaag

SEQ ID NO: 641013 - DNA, 33 bp, Homo sapien
ggtgacggctaatacacacagctacatttagca

SEQ ID NO: 641014 - DNA, 33 bp, Homo sapien
ggtgacggctaatacagacagctacatttagca

SEQ ID NO: 641015 - DNA, 33 bp, Homo sapien
tcatgatagaatacaccggacttgcattattca

SEQ ID NO: 641016 - DNA, 33 bp, Homo sapien
tcatgatagaatacactggacttgcattattca

SEQ ID NO: 641017 - DNA, 33 bp, Homo sapien
ggagcaaaataattccccccttgctttgctcct

SEQ ID NO: 641018 - DNA, 33 bp, Homo sapien
ggagcaaaataattcctcccttgctttgctcct

SEQ ID NO: 641019 - DNA, 33 bp, Homo sapien
tatatttcatctccaaacgcattgcaaattcct

SEQ ID NO: 641020 - DNA, 33 bp, Homo sapien
tatatttcatctccaaccgcattgcaaattcct

SEQ ID NO: 641021 - DNA, 33 bp, Homo sapien
tctgatcaaaaccctcgcagagctcccatgttc

SEQ ID NO: 641022 - DNA, 33 bp, Homo sapien
tctgatcaaaaccctctcagagctcccatgttc

SEQ ID NO: 641023 - DNA, 33 bp, Homo sapien
catgtaaggcggccagaaacccattatttgttc

SEQ ID NO: 641024 - DNA, 33 bp, Homo sapien
catgtaaggcggccagcaacccattatttgttc

SEQ ID NO: 641025 - DNA, 33 bp, Homo sapien
tagactgcatacattcccggatgctttcaccca

SEQ ID NO: 641026 - DNA, 33 bp, Homo sapien
tagactgcatacattctcggatgctttcaccca

SEQ ID NO: 641027 - DNA, 33 bp, Homo sapien
cagataagaaaactcaacctcagaggcccaagg

SEQ ID NO: 641028 - DNA, 33 bp, Homo sapien
cagataagaaaactcagcctcagaggcccaagg

SEQ ID NO: 641029 - DNA, 33 bp, Homo sapien
ccaggcaaaaagtgtacgaaacatcaggtgcaa

SEQ ID NO: 641030 - DNA, 33 bp, Homo sapien
ccaggcaaaaagtgtaggaaacatcaggtgcaa

SEQ ID NO: 641031 - DNA, 33 bp, Homo sapien
gttttatgagactataagcccacaaagcaggga

SEQ ID NO: 641032 - DNA, 33 bp, Homo sapien
gttttatgagactataggcccacaaagcaggga

SEQ ID NO: 641033 - DNA, 33 bp, Homo sapien
caagcacactgtttagacagactgtaaaggtaa

SEQ ID NO: 641034 - DNA, 33 bp, Homo sapien
caagcacactgtttaggcagactgtaaaggtaa

SEQ ID NO: 641035 - DNA, 33 bp, Homo sapien
caaaataaaaagcccaagcaagttaactacaat

SEQ ID NO: 641036 - DNA, 33 bp, Homo sapien
caaaataaaaagcccatgcaagttaactacaat

SEQ ID NO: 641037 - DNA, 33 bp, Homo sapien
tcctaaatgcaagcagcaataataatcccatca

SEQ ID NO: 641038 - DNA, 33 bp, Homo sapien
tcctaaatgcaagcaggaataataatcccatca

SEQ ID NO: 641039 - DNA, 33 bp, Homo sapien
atttgagctgaaagtagacaagattaagtgtag

SEQ ID NO: 641040 - DNA, 33 bp, Homo sapien
atttgagctgaaagtatacaagattaagtgtag

SEQ ID NO: 641041 - DNA, 33 bp, Homo sapien
taacacttcacatccacaagaaaggctaatatt

SEQ ID NO: 641042 - DNA, 33 bp, Homo sapien
taacacttcacatccataagaaaggctaatatt

SEQ ID NO: 641043 - DNA, 33 bp, Homo sapien
tgcttcatattgtctccaacactctttattgtc

SEQ ID NO: 641044 - DNA, 33 bp, Homo sapien
tgcttcatattgtctcgaacactctttattgtc

SEQ ID NO: 641045 - DNA, 33 bp, Homo sapien
accatctgacccttcacaaacctgataaaaaca

SEQ ID NO: 641046 - DNA, 33 bp, Homo sapien
accatctgacccttcagaaacctgataaaaaca

SEQ ID NO: 641047 - DNA, 33 bp, Homo sapien
aaacaggagatgatggcaggaatccagtagaga

SEQ ID NO: 641048 - DNA, 33 bp, Homo sapien
aaacaggagatgatggtaggaatccagtagaga

SEQ ID NO: 641049 - DNA, 33 bp, Homo sapien
ggagcatgaactcatcaaacttgtactttaaga

SEQ ID NO: 641050 - DNA, 33 bp, Homo sapien
ggagcatgaactcatcgaacttgtactttaaga

SEQ ID NO: 641051 - DNA, 33 bp, Homo sapien
tttttaagtgtgtggcccaatcagttttcagta

SEQ ID NO: 641052 - DNA, 33 bp, Homo sapien
tttttaagtgtgtggctcaatcagttttcagta

SEQ ID NO: 641053 - DNA, 33 bp, Homo sapien
tacagatgaagggcccaaagtccaggaacattc

SEQ ID NO: 641054 - DNA, 33 bp, Homo sapien
tacagatgaagggcccgaagtccaggaacattc

SEQ ID NO: 641055 - DNA, 33 bp, Homo sapien
aaaacataattcaagacctaagtatatgctctt

SEQ ID NO: 641056 - DNA, 33 bp, Homo sapien
aaaacataattcaagagctaagtatatgctctt

SEQ ID NO: 641057 - DNA, 33 bp, Homo sapien
tcttacagaattaatcaaaaggaatctcaagaa

SEQ ID NO: 641058 - DNA, 33 bp, Homo sapien
tcttacagaattaatcgaaaggaatctcaagaa

SEQ ID NO: 641059 - DNA, 33 bp, Homo sapien
gatgcctaagggtatacagaattttctctgcat

SEQ ID NO: 641060 - DNA, 33 bp, Homo sapien
gatgcctaagggtatatagaattttctctgcat

SEQ ID NO: 641061 - DNA, 33 bp, Homo sapien
tttactcggacctagaaagtgaggctcttccag

SEQ ID NO: 641062 - DNA, 33 bp, Homo sapien
tttactcggacctagagagtgaggctcttccag

SEQ ID NO: 641063 - DNA, 33 bp, Homo sapien
tgacaaagaagaaagacgagcatagggtatgtg

SEQ ID NO: 641064 - DNA, 33 bp, Homo sapien
tgacaaagaagaaagatgagcatagggtatgtg

SEQ ID NO: 641065 - DNA, 33 bp, Homo sapien
gaacaaggagacaagaaaaggtgacaagtttag

SEQ ID NO: 641066 - DNA, 33 bp, Homo sapien
gaacaaggagacaagacaaggtgacaagtttag

SEQ ID NO: 641067 - DNA, 33 bp, Homo sapien
tatgacacagtgaacccaatataccatggaaaa

SEQ ID NO: 641068 - DNA, 33 bp, Homo sapien
tatgacacagtgaacctaatataccatggaaaa

SEQ ID NO: 641069 - DNA, 33 bp, Homo sapien
tcactcacacgataaaactcatttgaaacacag

SEQ ID NO: 641070 - DNA, 33 bp, Homo sapien
tcactcacacgataaacctcatttgaaacacag

SEQ ID NO: 641071 - DNA, 33 bp, Homo sapien
aactgataagccactaggaaggatattcagtaa

SEQ ID NO: 641072 - DNA, 33 bp, Homo sapien
aactgataagccactatgaaggatattcagtaa

SEQ ID NO: 641073 - DNA, 33 bp, Homo sapien
atagtgaagacaattccgaatcatctcaacaga

SEQ ID NO: 641074 - DNA, 33 bp, Homo sapien
atagtgaagacaattctgaatcatctcaacaga

SEQ ID NO: 641075 - DNA, 33 bp, Homo sapien
cttctgaaaccactttcaaaggctttgctacac

SEQ ID NO: 641076 - DNA, 33 bp, Homo sapien
cttctgaaaccacttttaaaggctttgctacac

SEQ ID NO: 641077 - DNA, 33 bp, Homo sapien
aaaatgccccagctcacggcttatgtataaatt

SEQ ID NO: 641078 - DNA, 33 bp, Homo sapien
aaaatgccccagctcatggcttatgtataaatt

SEQ ID NO: 641079 - DNA, 33 bp, Homo sapien
ctcgcagggagactcaaactccatcggataagg

SEQ ID NO: 641080 - DNA, 33 bp, Homo sapien
ctcgcagggagactcagactccatcggataagg

SEQ ID NO: 641081 - DNA, 33 bp, Homo sapien
aaggtaggtgaccatgcagagtgatcattattc

SEQ ID NO: 641082 - DNA, 33 bp, Homo sapien
aaggtaggtgaccatggagagtgatcattattc

SEQ ID NO: 641083 - DNA, 33 bp, Homo sapien
aatccttcctgattccaaaactactgctttttt

SEQ ID NO: 641084 - DNA, 33 bp, Homo sapien
aatccttcctgattccgaaactactgctttttt

SEQ ID NO: 641085 - DNA, 33 bp, Homo sapien
ctggcttggctccaccactgcttatgttgcatg

SEQ ID NO: 641086 - DNA, 33 bp, Homo sapien
ctggcttggctccaccgctgcttatgttgcatg

SEQ ID NO: 641087 - DNA, 33 bp, Homo sapien
agatgacccgaccttcccattctctctcgactg

SEQ ID NO: 641088 - DNA, 33 bp, Homo sapien
agatgacccgaccttctcattctctctcgactg

SEQ ID NO: 641089 - DNA, 33 bp, Homo sapien
tgcataataagcagtgaaaaataaattctaagg

SEQ ID NO: 641090 - DNA, 33 bp, Homo sapien
tgcataataagcagtggaaaataaattctaagg

SEQ ID NO: 641091 - DNA, 33 bp, Homo sapien
catgcagttgcccaacaccattacccaatgact

SEQ ID NO: 641092 - DNA, 33 bp, Homo sapien
catgcagttgcccaacgccattacccaatgact

SEQ ID NO: 641093 - DNA, 33 bp, Homo sapien
aggtaataggcacatacaatcttaactaactag

SEQ ID NO: 641094 - DNA, 33 bp, Homo sapien
aggtaataggcacatataatcttaactaactag

SEQ ID NO: 641095 - DNA, 33 bp, Homo sapien
tatatgcttatagtccaaaaagtaaatggttta

SEQ ID NO: 641096 - DNA, 33 bp, Homo sapien
tatatgcttatagtccgaaaagtaaatggttta

SEQ ID NO: 641097 - DNA, 33 bp, Homo sapien
atcagtgagacactccaatccaccatagttatt

SEQ ID NO: 641098 - DNA, 33 bp, Homo sapien
atcagtgagacactccgatccaccatagttatt

SEQ ID NO: 641099 - DNA, 33 bp, Homo sapien
gaatgtatgtggtagtgaaggacagttgttaca

SEQ ID NO: 641100 - DNA, 33 bp, Homo sapien
gaatgtatgtggtagttaaggacagttgttaca

SEQ ID NO: 641101 - DNA, 33 bp, Homo sapien
gattatgtggaatttccaaattttttacagtga

SEQ ID NO: 641102 - DNA, 33 bp, Homo sapien
gattatgtggaatttcgaaattttttacagtga

SEQ ID NO: 641103 - DNA, 33 bp, Homo sapien
attcctttttcttccaccagctgctgagcttga

SEQ ID NO: 641104 - DNA, 33 bp, Homo sapien
attcctttttcttccatcagctgctgagcttga

SEQ ID NO: 641105 - DNA, 33 bp, Homo sapien
tgtagcatgaataaaaatgtgtagtgtgagcaa

SEQ ID NO: 641106 - DNA, 33 bp, Homo sapien
tgtagcatgaataaaactgtgtagtgtgagcaa

SEQ ID NO: 641107 - DNA, 33 bp, Homo sapien
tgtatccatcttgtatattttcaaaacactcat

SEQ ID NO: 641108 - DNA, 33 bp, Homo sapien
tgtatccatcttgtatcttttcaaaacactcat

SEQ ID NO: 641109 - DNA, 33 bp, Homo sapien
tagataagaccaaaggaaaaaaacatggtgaag

SEQ ID NO: 641110 - DNA, 33 bp, Homo sapien
tagataagaccaaagggaaaaaacatggtgaag

SEQ ID NO: 641111 - DNA, 33 bp, Homo sapien
agaatccaagctaggacacaacttctgatagcg

SEQ ID NO: 641112 - DNA, 33 bp, Homo sapien
agaatccaagctaggagacaacttctgatagcg

SEQ ID NO: 641113 - DNA, 33 bp, Homo sapien
gaggcacatgatggtacattctaaaacactgaa

SEQ ID NO: 641114 - DNA, 33 bp, Homo sapien
gaggcacatgatggtagattctaaaacactgaa

SEQ ID NO: 641115 - DNA, 33 bp, Homo sapien
ccatctctactaaaaactacctggatctggtgg

SEQ ID NO: 641116 - DNA, 33 bp, Homo sapien
ccatctctactaaaaattacctggatctggtgg

SEQ ID NO: 641117 - DNA, 33 bp, Homo sapien
gccattaagtcagtaaagtaattgtgaacagta

SEQ ID NO: 641118 - DNA, 33 bp, Homo sapien
gccattaagtcagtaaggtaattgtgaacagta

SEQ ID NO: 641119 - DNA, 33 bp, Homo sapien
tctttgctgtagataaatgattaaaactctttt

SEQ ID NO: 641120 - DNA, 33 bp, Homo sapien
tctttgctgtagataattgattaaaactctttt

SEQ ID NO: 641121 - DNA, 33 bp, Homo sapien
atgtgaaatgtcaaaaatatcataaccatacac

SEQ ID NO: 641122 - DNA, 33 bp, Homo sapien
atgtgaaatgtcaaaactatcataaccatacac

SEQ ID NO: 641123 - DNA, 33 bp, Homo sapien
cttataatctaatgaaaccaaaggaaaaggatt

SEQ ID NO: 641124 - DNA, 33 bp, Homo sapien
cttataatctaatgaatccaaaggaaaaggatt

SEQ ID NO: 641125 - DNA, 33 bp, Homo sapien
tgaacttcaggggagacatgcctactgactggg

SEQ ID NO: 641126 - DNA, 33 bp, Homo sapien
tgaacttcaggggagagatgcctactgactggg

SEQ ID NO: 641127 - DNA, 33 bp, Homo sapien
aacctcttgaaacagcaaacaggacttcttaaa

SEQ ID NO: 641128 - DNA, 33 bp, Homo sapien
aacctcttgaaacagcgaacaggacttcttaaa

SEQ ID NO: 641129 - DNA, 33 bp, Homo sapien
tatgcatgtatagtcactcccaaacatcatgct

SEQ ID NO: 641130 - DNA, 33 bp, Homo sapien
tatgcatgtatagtcattcccaaacatcatgct

SEQ ID NO: 641131 - DNA, 33 bp, Homo sapien
tttgagtaacaaattgaaaagtgtagaatttct

SEQ ID NO: 641132 - DNA, 33 bp, Homo sapien
tttgagtaacaaattggaaagtgtagaatttct

SEQ ID NO: 641133 - DNA, 33 bp, Homo sapien
ttcttttaaatcataacctccatgagtatatgg

SEQ ID NO: 641134 - DNA, 33 bp, Homo sapien
ttcttttaaatcataagctccatgagtatatgg

SEQ ID NO: 641135 - DNA, 33 bp, Homo sapien
cataaggactccatgacgttaactgcgttatca

SEQ ID NO: 641136 - DNA, 33 bp, Homo sapien
cataaggactccatgatgttaactgcgttatca

SEQ ID NO: 641137 - DNA, 33 bp, Homo sapien
ccaatttagtctcttaccagtgatgtataggaa

SEQ ID NO: 641138 - DNA, 33 bp, Homo sapien
ccaatttagtctcttatcagtgatgtataggaa

SEQ ID NO: 641139 - DNA, 33 bp, Homo sapien
tccccattctctttgccactaacatttgtctct

SEQ ID NO: 641140 - DNA, 33 bp, Homo sapien
tccccattctctttgctactaacatttgtctct

SEQ ID NO: 641141 - DNA, 33 bp, Homo sapien
tgattgaattataggcacagacttccccctggc

SEQ ID NO: 641142 - DNA, 33 bp, Homo sapien
tgattgaattataggcgcagacttccccctggc

SEQ ID NO: 641143 - DNA, 33 bp, Homo sapien
attacaatcatgttacaagacacaaaatgaaca

SEQ ID NO: 641144 - DNA, 33 bp, Homo sapien
attacaatcatgttacgagacacaaaatgaaca

SEQ ID NO: 641145 - DNA, 33 bp, Homo sapien
atgatatcatactttacgtattcctctgcaatt

SEQ ID NO: 641146 - DNA, 33 bp, Homo sapien
atgatatcatactttatgtattcctctgcaatt

SEQ ID NO: 641147 - DNA, 33 bp, Homo sapien
tctcacaggttaaaggcatataagaaaatgata

SEQ ID NO: 641148 - DNA, 33 bp, Homo sapien
tctcacaggttaaaggtatataagaaaatgata

SEQ ID NO: 641149 - DNA, 33 bp, Homo sapien
ggacactgcatttacactgatggggtgagtgag

SEQ ID NO: 641150 - DNA, 33 bp, Homo sapien
ggacactgcatttacagtgatggggtgagtgag

SEQ ID NO: 641151 - DNA, 33 bp, Homo sapien
ttacttttctcatacacacagatttctgatcta

SEQ ID NO: 641152 - DNA, 33 bp, Homo sapien
ttacttttctcatacatacagatttctgatcta

SEQ ID NO: 641153 - DNA, 33 bp, Homo sapien
acaatcacttataaacagtacttgaggaaaaaa

SEQ ID NO: 641154 - DNA, 33 bp, Homo sapien
acaatcacttataaacggtacttgaggaaaaaa

SEQ ID NO: 641155 - DNA, 33 bp, Homo sapien
gaaactgcgggaagaaaaagtataccatctctt

SEQ ID NO: 641156 - DNA, 33 bp, Homo sapien
gaaactgcgggaagaagaagtataccatctctt

SEQ ID NO: 641157 - DNA, 33 bp, Homo sapien
ttcatggtgcctttacaatacaggtagaattca

SEQ ID NO: 641158 - DNA, 33 bp, Homo sapien
ttcatggtgcctttacgatacaggtagaattca

SEQ ID NO: 641159 - DNA, 33 bp, Homo sapien
ctggggaaagactcataaacttagtagacatcc

SEQ ID NO: 641160 - DNA, 33 bp, Homo sapien
ctggggaaagactcatgaacttagtagacatcc

SEQ ID NO: 641161 - DNA, 33 bp, Homo sapien
agatagaaaagtctgacgttttcagtagccaat

SEQ ID NO: 641162 - DNA, 33 bp, Homo sapien
agatagaaaagtctgatgttttcagtagccaat

SEQ ID NO: 641163 - DNA, 33 bp, Homo sapien
attttgggacctaaagacaccttgaccttatgg

SEQ ID NO: 641164 - DNA, 33 bp, Homo sapien
attttgggacctaaaggcaccttgaccttatgg

SEQ ID NO: 641165 - DNA, 33 bp, Homo sapien
actgtttcttcagtaaggttgtctgcacttcta

SEQ ID NO: 641166 - DNA, 33 bp, Homo sapien
actgtttcttcagtaatgttgtctgcacttcta

SEQ ID NO: 641167 - DNA, 33 bp, Homo sapien
tacttgaagcattaagaatgtcaacaaaacagc

SEQ ID NO: 641168 - DNA, 33 bp, Homo sapien
tacttgaagcattaaggatgtcaacaaaacagc

SEQ ID NO: 641169 - DNA, 33 bp, Homo sapien
gcccgtgattatacagccaagatgggtgtagaa

SEQ ID NO: 641170 - DNA, 33 bp, Homo sapien
gcccgtgattatacagtcaagatgggtgtagaa

SEQ ID NO: 641171 - DNA, 33 bp, Homo sapien
cccgtgtctagtatgaacctggcccgtgattat

SEQ ID NO: 641172 - DNA, 33 bp, Homo sapien
cccgtgtctagtatgagcctggcccgtgattat

SEQ ID NO: 641173 - DNA, 33 bp, Homo sapien
agcttgttgggtatcaataaacatgcagggcct

SEQ ID NO: 641174 - DNA, 33 bp, Homo sapien
agcttgttgggtatcagtaaacatgcagggcct

SEQ ID NO: 641175 - DNA, 33 bp, Homo sapien
tgctcattgagtgacacacatatctccaatatg

SEQ ID NO: 641176 - DNA, 33 bp, Homo sapien
tgctcattgagtgacatacatatctccaatatg

SEQ ID NO: 641177 - DNA, 33 bp, Homo sapien
cccaatagatgttctgccaatttagcaaccaga

SEQ ID NO: 641178 - DNA, 33 bp, Homo sapien
cccaatagatgttctgtcaatttagcaaccaga

SEQ ID NO: 641179 - DNA, 33 bp, Homo sapien
tctgtgtcaaaaattcaagagccaggagctaga

SEQ ID NO: 641180 - DNA, 33 bp, Homo sapien
tctgtgtcaaaaattcgagagccaggagctaga

SEQ ID NO: 641181 - DNA, 33 bp, Homo sapien
tctttaaatcaaaagaagacaatctcaggcata

SEQ ID NO: 641182 - DNA, 33 bp, Homo sapien
tctttaaatcaaaagatgacaatctcaggcata

SEQ ID NO: 641183 - DNA, 33 bp, Homo sapien
agctgtgtagaagtcgcaggcttttctagattc

SEQ ID NO: 641184 - DNA, 33 bp, Homo sapien
agctgtgtagaagtcggaggcttttctagattc

SEQ ID NO: 641185 - DNA, 33 bp, Homo sapien
taactttcctgccttacgtatttgcaagaaggg

SEQ ID NO: 641186 - DNA, 33 bp, Homo sapien
taactttcctgccttatgtatttgcaagaaggg

SEQ ID NO: 641187 - DNA, 33 bp, Homo sapien
tctgtggactataaccacgcctatttggctttt

SEQ ID NO: 641188 - DNA, 33 bp, Homo sapien
tctgtggactataaccgcgcctatttggctttt

SEQ ID NO: 641189 - DNA, 33 bp, Homo sapien
ttccaagcattggataagttcgggggataccat

SEQ ID NO: 641190 - DNA, 33 bp, Homo sapien
ttccaagcattggataggttcgggggataccat

SEQ ID NO: 641191 - DNA, 33 bp, Homo sapien
tagtttcgagaaaggacagaatgtttaagatct

SEQ ID NO: 641192 - DNA, 33 bp, Homo sapien
tagtttcgagaaaggatagaatgtttaagatct

SEQ ID NO: 641193 - DNA, 33 bp, Homo sapien
atcatcttcaaatgaccgggataaattctggct

SEQ ID NO: 641194 - DNA, 33 bp, Homo sapien
atcatcttcaaatgactgggataaattctggct

SEQ ID NO: 641195 - DNA, 33 bp, Homo sapien
aaaaatgtaccagccaatgcccaaaggtcaaag

SEQ ID NO: 641196 - DNA, 33 bp, Homo sapien
aaaaatgtaccagccagtgcccaaaggtcaaag

SEQ ID NO: 641197 - DNA, 33 bp, Homo sapien
actcctagaactttaaagacaaccctgaaccat

SEQ ID NO: 641198 - DNA, 33 bp, Homo sapien
actcctagaactttaaggacaaccctgaaccat

SEQ ID NO: 641199 - DNA, 33 bp, Homo sapien
tatatgtcaaaatcataacccccaagtgatagt

SEQ ID NO: 641200 - DNA, 33 bp, Homo sapien
tatatgtcaaaatcatgacccccaagtgatagt

SEQ ID NO: 641201 - DNA, 33 bp, Homo sapien
ggatgagggtcctcccaaaaccattcgaactga

SEQ ID NO: 641202 - DNA, 33 bp, Homo sapien
ggatgagggtcctcccgaaaccattcgaactga

SEQ ID NO: 641203 - DNA, 33 bp, Homo sapien
tccatgacctgttctccctttcgtaagttgagg

SEQ ID NO: 641204 - DNA, 33 bp, Homo sapien
tccatgacctgttctctctttcgtaagttgagg

SEQ ID NO: 641205 - DNA, 33 bp, Homo sapien
aattactttctactgaccctcaacttacgaaag

SEQ ID NO: 641206 - DNA, 33 bp, Homo sapien
aattactttctactgatcctcaacttacgaaag

SEQ ID NO: 641207 - DNA, 33 bp, Homo sapien
tttaggtcctactatacgtacctatctgtctct

SEQ ID NO: 641208 - DNA, 33 bp, Homo sapien
tttaggtcctactatatgtacctatctgtctct

SEQ ID NO: 641209 - DNA, 33 bp, Homo sapien
gatgtctgttaccacaaggatctggcatttcac

SEQ ID NO: 641210 - DNA, 33 bp, Homo sapien
gatgtctgttaccacacggatctggcatttcac

SEQ ID NO: 641211 - DNA, 33 bp, Homo sapien
taagtgaagttcaagactaaagtttgtcaataa

SEQ ID NO: 641212 - DNA, 33 bp, Homo sapien
taagtgaagttcaagattaaagtttgtcaataa

SEQ ID NO: 641213 - DNA, 33 bp, Homo sapien
tctaactgctagtctactacttggctttctctg

SEQ ID NO: 641214 - DNA, 33 bp, Homo sapien
tctaactgctagtctagtacttggctttctctg

SEQ ID NO: 641215 - DNA, 33 bp, Homo sapien
attggctgggcttgagacctgtattcattttca

SEQ ID NO: 641216 - DNA, 33 bp, Homo sapien
attggctgggcttgaggcctgtattcattttca

SEQ ID NO: 641217 - DNA, 33 bp, Homo sapien
tgttcaccattgtactcaatgacatataatgca

SEQ ID NO: 641218 - DNA, 33 bp, Homo sapien
tgttcaccattgtactgaatgacatataatgca

SEQ ID NO: 641219 - DNA, 33 bp, Homo sapien
cctacagcagaaattacgcaagacaagaggctg

SEQ ID NO: 641220 - DNA, 33 bp, Homo sapien
cctacagcagaaattatgcaagacaagaggctg

SEQ ID NO: 641221 - DNA, 33 bp, Homo sapien
tgtgtaacttgctaaacatgggtgcgtcctggg

SEQ ID NO: 641222 - DNA, 33 bp, Homo sapien
tgtgtaacttgctaaatatgggtgcgtcctggg

SEQ ID NO: 641223 - DNA, 33 bp, Homo sapien
ctgtggtcttttccatgatagaatctgtcactg

SEQ ID NO: 641224 - DNA, 33 bp, Homo sapien
ctgtggtcttttccattatagaatctgtcactg

SEQ ID NO: 641225 - DNA, 33 bp, Homo sapien
attcctggccactagcagaacatttaggttccc

SEQ ID NO: 641226 - DNA, 33 bp, Homo sapien
attcctggccactagcggaacatttaggttccc

SEQ ID NO: 641227 - DNA, 33 bp, Homo sapien
tccctgtcctgggcaccgtagaattcttagcag

SEQ ID NO: 641228 - DNA, 33 bp, Homo sapien
tccctgtcctgggcactgtagaattcttagcag

SEQ ID NO: 641229 - DNA, 33 bp, Homo sapien
gaaactgtaccacttacacattgctttgctgat

SEQ ID NO: 641230 - DNA, 33 bp, Homo sapien
gaaactgtaccacttatacattgctttgctgat

SEQ ID NO: 641231 - DNA, 33 bp, Homo sapien
aacccacacccctgcacgtacgcagctctgacc

SEQ ID NO: 641232 - DNA, 33 bp, Homo sapien
aacccacacccctgcatgtacgcagctctgacc

SEQ ID NO: 641233 - DNA, 33 bp, Homo sapien
caaaagaatattctgcgattacttgaaacctat

SEQ ID NO: 641234 - DNA, 33 bp, Homo sapien
caaaagaatattctgctattacttgaaacctat

SEQ ID NO: 641235 - DNA, 33 bp, Homo sapien
tcaacaaacgtgagcactgattcctggtcttca

SEQ ID NO: 641236 - DNA, 33 bp, Homo sapien
tcaacaaacgtgagcattgattcctggtcttca

SEQ ID NO: 641237 - DNA, 33 bp, Homo sapien
tttttagcctgaaccacatttaataggagaaac

SEQ ID NO: 641238 - DNA, 33 bp, Homo sapien
tttttagcctgaaccagatttaataggagaaac

SEQ ID NO: 641239 - DNA, 33 bp, Homo sapien
ttgcctccagggagtacgatgctttgtgcactt

SEQ ID NO: 641240 - DNA, 33 bp, Homo sapien
ttgcctccagggagtatgatgctttgtgcactt

SEQ ID NO: 641241 - DNA, 33 bp, Homo sapien
aagtccaggaacagtacgtataagcatcagccc

SEQ ID NO: 641242 - DNA, 33 bp, Homo sapien
aagtccaggaacagtatgtataagcatcagccc

SEQ ID NO: 641243 - DNA, 33 bp, Homo sapien
tgggatcctgccttaacgcttccacccagagga

SEQ ID NO: 641244 - DNA, 33 bp, Homo sapien
tgggatcctgccttaatgcttccacccagagga

SEQ ID NO: 641245 - DNA, 33 bp, Homo sapien
aatcccttcagtccaaaaaagtaaactgggaca

SEQ ID NO: 641246 - DNA, 33 bp, Homo sapien
aatcccttcagtccaagaaagtaaactgggaca

SEQ ID NO: 641247 - DNA, 33 bp, Homo sapien
atggttatctccagacaccctgcagaacttctc

SEQ ID NO: 641248 - DNA, 33 bp, Homo sapien
atggttatctccagacgccctgcagaacttctc

SEQ ID NO: 641249 - DNA, 33 bp, Homo sapien
ctcactcctttgttaacgcatcccctcttgttt

SEQ ID NO: 641250 - DNA, 33 bp, Homo sapien
ctcactcctttgttaatgcatcccctcttgttt

SEQ ID NO: 641251 - DNA, 33 bp, Homo sapien
gagtggagaacaaccaacatagtcttctgtaat

SEQ ID NO: 641252 - DNA, 33 bp, Homo sapien
gagtggagaacaaccagcatagtcttctgtaat

SEQ ID NO: 641253 - DNA, 33 bp, Homo sapien
cttattcatcttgtcaataccaggatgtgccat

SEQ ID NO: 641254 - DNA, 33 bp, Homo sapien
cttattcatcttgtcagtaccaggatgtgccat

SEQ ID NO: 641255 - DNA, 33 bp, Homo sapien
tagtcctcacatctcaaagcacaatattgagag

SEQ ID NO: 641256 - DNA, 33 bp, Homo sapien
tagtcctcacatctcagagcacaatattgagag

SEQ ID NO: 641257 - DNA, 33 bp, Homo sapien
ttggataaagtttttacgagtacatcagaaaca

SEQ ID NO: 641258 - DNA, 33 bp, Homo sapien
ttggataaagtttttatgagtacatcagaaaca

SEQ ID NO: 641259 - DNA, 33 bp, Homo sapien
aaaacagaataactgcacaaaaaagcatctttg

SEQ ID NO: 641260 - DNA, 33 bp, Homo sapien
aaaacagaataactgcgcaaaaaagcatctttg

SEQ ID NO: 641261 - DNA, 33 bp, Homo sapien
tgacacttggaaagaacaggacttttctccaga

SEQ ID NO: 641262 - DNA, 33 bp, Homo sapien
tgacacttggaaagaataggacttttctccaga

SEQ ID NO: 641263 - DNA, 33 bp, Homo sapien
caaatgcaaattcctgcaccccatctcagacca

SEQ ID NO: 641264 - DNA, 33 bp, Homo sapien
caaatgcaaattcctgtaccccatctcagacca

SEQ ID NO: 641265 - DNA, 33 bp, Homo sapien
acacctgatctttggccagaacgatgtaccttt

SEQ ID NO: 641266 - DNA, 33 bp, Homo sapien
acacctgatctttggctagaacgatgtaccttt

SEQ ID NO: 641267 - DNA, 33 bp, Homo sapien
ttaggaatgagagctccctatgcaaatgacagg

SEQ ID NO: 641268 - DNA, 33 bp, Homo sapien
ttaggaatgagagctcgctatgcaaatgacagg

SEQ ID NO: 641269 - DNA, 33 bp, Homo sapien
gagctggaacatgatcacattaagattctagtt

SEQ ID NO: 641270 - DNA, 33 bp, Homo sapien
gagctggaacatgatcgcattaagattctagtt

SEQ ID NO: 641271 - DNA, 33 bp, Homo sapien
gattgacaccttgctgcagaatgggagtgacat

SEQ ID NO: 641272 - DNA, 33 bp, Homo sapien
gattgacaccttgctgtagaatgggagtgacat

SEQ ID NO: 641273 - DNA, 33 bp, Homo sapien
cccagaatccaggtaacgaaagagaagcaaagg

SEQ ID NO: 641274 - DNA, 33 bp, Homo sapien
cccagaatccaggtaatgaaagagaagcaaagg

SEQ ID NO: 641275 - DNA, 33 bp, Homo sapien
aacctggattgggagcacagtataaataaatgt

SEQ ID NO: 641276 - DNA, 33 bp, Homo sapien
aacctggattgggagcgcagtataaataaatgt

SEQ ID NO: 641277 - DNA, 33 bp, Homo sapien
tggtgcaataccatggaccagaagtgacaatgg

SEQ ID NO: 641278 - DNA, 33 bp, Homo sapien
tggtgcaataccatgggccagaagtgacaatgg

SEQ ID NO: 641279 - DNA, 33 bp, Homo sapien
agtccatgttccaaacacatggacgctcataag

SEQ ID NO: 641280 - DNA, 33 bp, Homo sapien
agtccatgttccaaacgcatggacgctcataag

SEQ ID NO: 641281 - DNA, 33 bp, Homo sapien
tgtgtgtttactcagcacctactgagtgtcata

SEQ ID NO: 641282 - DNA, 33 bp, Homo sapien
tgtgtgtttactcagcgcctactgagtgtcata

SEQ ID NO: 641283 - DNA, 33 bp, Homo sapien
cctttctacattaaaaagccataaaaccttcat

SEQ ID NO: 641284 - DNA, 33 bp, Homo sapien
cctttctacattaaaaggccataaaaccttcat

SEQ ID NO: 641285 - DNA, 33 bp, Homo sapien
gatgagtgaactcagtgaaccagagaggtgaaa

SEQ ID NO: 641286 - DNA, 33 bp, Homo sapien
gatgagtgaactcagttaaccagagaggtgaaa

SEQ ID NO: 641287 - DNA, 33 bp, Homo sapien
cataaacgtcaacagagagtacaaggaaaactg

SEQ ID NO: 641288 - DNA, 33 bp, Homo sapien
cataaacgtcaacagatagtacaaggaaaactg

SEQ ID NO: 641289 - DNA, 33 bp, Homo sapien
ccatttgtactattaacattttggggaacatta

SEQ ID NO: 641290 - DNA, 33 bp, Homo sapien
ccatttgtactattaatattttggggaacatta

SEQ ID NO: 641291 - DNA, 33 bp, Homo sapien
caccttcaataacatccgaatgcatctggatgg

SEQ ID NO: 641292 - DNA, 33 bp, Homo sapien
caccttcaataacatctgaatgcatctggatgg

SEQ ID NO: 641293 - DNA, 33 bp, Homo sapien
tctggtgcctgtagaacggttaactttaacatt

SEQ ID NO: 641294 - DNA, 33 bp, Homo sapien
tctggtgcctgtagaatggttaactttaacatt

SEQ ID NO: 641295 - DNA, 33 bp, Homo sapien
gaggccttctgtatcccgactgtgctggtgatt

SEQ ID NO: 641296 - DNA, 33 bp, Homo sapien
gaggccttctgtatcctgactgtgctggtgatt

SEQ ID NO: 641297 - DNA, 33 bp, Homo sapien
gttgatataaccaagacattgatttagccattg

SEQ ID NO: 641298 - DNA, 33 bp, Homo sapien
gttgatataaccaagatattgatttagccattg

SEQ ID NO: 641299 - DNA, 33 bp, Homo sapien
agctgcaatccatttgaaagtgtttggttggca

SEQ ID NO: 641300 - DNA, 33 bp, Homo sapien
agctgcaatccatttggaagtgtttggttggca

SEQ ID NO: 641301 - DNA, 33 bp, Homo sapien
aattaatccttaacaccctccaacttcccaaag

SEQ ID NO: 641302 - DNA, 33 bp, Homo sapien
aattaatccttaacactctccaacttcccaaag

SEQ ID NO: 641303 - DNA, 33 bp, Homo sapien
gcaagccacaaacaaacaattgagattgaaact

SEQ ID NO: 641304 - DNA, 33 bp, Homo sapien
gcaagccacaaacaaagaattgagattgaaact

SEQ ID NO: 641305 - DNA, 33 bp, Homo sapien
gaatgggcagttattcaaaaagtcttaaccatc

SEQ ID NO: 641306 - DNA, 33 bp, Homo sapien
gaatgggcagttattcgaaaagtcttaaccatc

SEQ ID NO: 641307 - DNA, 33 bp, Homo sapien
agagatcagccttcaactcaagtacccagtagc

SEQ ID NO: 641308 - DNA, 33 bp, Homo sapien
agagatcagccttcaattcaagtacccagtagc

SEQ ID NO: 641309 - DNA, 33 bp, Homo sapien
ccctgcttgttctgaaatgtgagaaaatatcga

SEQ ID NO: 641310 - DNA, 33 bp, Homo sapien
ccctgcttgttctgaattgtgagaaaatatcga

SEQ ID NO: 641311 - DNA, 33 bp, Homo sapien
tggggcactaattgcccacaagaaccggttccc

SEQ ID NO: 641312 - DNA, 33 bp, Homo sapien
tggggcactaattgcctacaagaaccggttccc

SEQ ID NO: 641313 - DNA, 33 bp, Homo sapien
gggggcaaaacaatgaaaacggcaggctcacac

SEQ ID NO: 641314 - DNA, 33 bp, Homo sapien
gggggcaaaacaatgagaacggcaggctcacac

SEQ ID NO: 641315 - DNA, 33 bp, Homo sapien
atccacttttgaattgaatcaacttaaaaaata

SEQ ID NO: 641316 - DNA, 33 bp, Homo sapien
atccacttttgaattggatcaacttaaaaaata

SEQ ID NO: 641317 - DNA, 33 bp, Homo sapien
cttttaaaattactcacgttgcatcattaagat

SEQ ID NO: 641318 - DNA, 33 bp, Homo sapien
cttttaaaattactcatgttgcatcattaagat

SEQ ID NO: 641319 - DNA, 33 bp, Homo sapien
gaaatgatacaaagcacaaactcactttaaaat

SEQ ID NO: 641320 - DNA, 33 bp, Homo sapien
gaaatgatacaaagcataaactcactttaaaat

SEQ ID NO: 641321 - DNA, 33 bp, Homo sapien
gtggttctattggaaacccttgtcatgagacag

SEQ ID NO: 641322 - DNA, 33 bp, Homo sapien
gtggttctattggaaatccttgtcatgagacag

SEQ ID NO: 641323 - DNA, 33 bp, Homo sapien
acttacggttaaaagaagagattcacataccca

SEQ ID NO: 641324 - DNA, 33 bp, Homo sapien
acttacggttaaaagaggagattcacataccca

SEQ ID NO: 641325 - DNA, 33 bp, Homo sapien
ggagatcatccgacaaaatggacaagccaagag

SEQ ID NO: 641326 - DNA, 33 bp, Homo sapien
ggagatcatccgacaatatggacaagccaagag

SEQ ID NO: 641327 - DNA, 33 bp, Homo sapien
aactttttggtgtataactcacttttctgtagg

SEQ ID NO: 641328 - DNA, 33 bp, Homo sapien
aactttttggtgtatatctcacttttctgtagg

SEQ ID NO: 641329 - DNA, 33 bp, Homo sapien
gatactcctttcctagcaccgttccttggctcc

SEQ ID NO: 641330 - DNA, 33 bp, Homo sapien
gatactcctttcctagtaccgttccttggctcc

SEQ ID NO: 641331 - DNA, 33 bp, Homo sapien
ggctgctacctggaacactactgccgttcaata

SEQ ID NO: 641332 - DNA, 33 bp, Homo sapien
ggctgctacctggaacgctactgccgttcaata

SEQ ID NO: 641333 - DNA, 33 bp, Homo sapien
tcattttattcatcgaagaatccattaaagctt

SEQ ID NO: 641334 - DNA, 33 bp, Homo sapien
tcattttattcatcgaggaatccattaaagctt

SEQ ID NO: 641335 - DNA, 33 bp, Homo sapien
gtgtacttgctgtgtaaaagatcagaacttgga

SEQ ID NO: 641336 - DNA, 33 bp, Homo sapien
gtgtacttgctgtgtagaagatcagaacttgga

SEQ ID NO: 641337 - DNA, 33 bp, Homo sapien
cttccacaaataactcaaagatttaactctgat

SEQ ID NO: 641338 - DNA, 33 bp, Homo sapien
cttccacaaataactcgaagatttaactctgat

SEQ ID NO: 641339 - DNA, 33 bp, Homo sapien
gagacagaggctgctcacgtaccaaaaaataga

SEQ ID NO: 641340 - DNA, 33 bp, Homo sapien
gagacagaggctgctcgcgtaccaaaaaataga

SEQ ID NO: 641341 - DNA, 33 bp, Homo sapien
taatctatttatcaaactttgactcttccttct

SEQ ID NO: 641342 - DNA, 33 bp, Homo sapien
taatctatttatcaaagtttgactcttccttct

SEQ ID NO: 641343 - DNA, 33 bp, Homo sapien
gcatttgattccttcaccatgcatttggcatga

SEQ ID NO: 641344 - DNA, 33 bp, Homo sapien
gcatttgattccttcatcatgcatttggcatga

SEQ ID NO: 641345 - DNA, 33 bp, Homo sapien
cacgagcttttcagaacttaaaccatggactga

SEQ ID NO: 641346 - DNA, 33 bp, Homo sapien
cacgagcttttcagaagttaaaccatggactga

SEQ ID NO: 641347 - DNA, 33 bp, Homo sapien
cttagatttgagggataataatgtaaaaggcca

SEQ ID NO: 641348 - DNA, 33 bp, Homo sapien
cttagatttgagggatgataatgtaaaaggcca

SEQ ID NO: 641349 - DNA, 33 bp, Homo sapien
ggcttatcttcacttaactttgttacagcttag

SEQ ID NO: 641350 - DNA, 33 bp, Homo sapien
ggcttatcttcacttagctttgttacagcttag

SEQ ID NO: 641351 - DNA, 33 bp, Homo sapien
ctaaattctcatgctacacaaaactcaactatt

SEQ ID NO: 641352 - DNA, 33 bp, Homo sapien
ctaaattctcatgctatacaaaactcaactatt

SEQ ID NO: 641353 - DNA, 33 bp, Homo sapien
ccctgttacactgttacgttgtctcttactaca

SEQ ID NO: 641354 - DNA, 33 bp, Homo sapien
ccctgttacactgttatgttgtctcttactaca

SEQ ID NO: 641355 - DNA, 33 bp, Homo sapien
cagactgccacttgaacgtgtctctgtttggtt

SEQ ID NO: 641356 - DNA, 33 bp, Homo sapien
cagactgccacttgaatgtgtctctgtttggtt

SEQ ID NO: 641357 - DNA, 33 bp, Homo sapien
gacgagcctggatctgcagaagagaaggggctt

SEQ ID NO: 641358 - DNA, 33 bp, Homo sapien
gacgagcctggatctggagaagagaaggggctt

SEQ ID NO: 641359 - DNA, 33 bp, Homo sapien
gtgctaaaatgctgaaatacttgtgtactcgct

SEQ ID NO: 641360 - DNA, 33 bp, Homo sapien
gtgctaaaatgctgaactacttgtgtactcgct

SEQ ID NO: 641361 - DNA, 33 bp, Homo sapien
cctcgtaaaaaggccccgcaggctggaagaaat

SEQ ID NO: 641362 - DNA, 33 bp, Homo sapien
cctcgtaaaaaggccctgcaggctggaagaaat

SEQ ID NO: 641363 - DNA, 33 bp, Homo sapien
tttttttctgacatgacgctttaattatatgaa

SEQ ID NO: 641364 - DNA, 33 bp, Homo sapien
tttttttctgacatgatgctttaattatatgaa

SEQ ID NO: 641365 - DNA, 33 bp, Homo sapien
gagtgcccaataatagcagattgccttaataaa

SEQ ID NO: 641366 - DNA, 33 bp, Homo sapien
gagtgcccaataatagtagattgccttaataaa

SEQ ID NO: 641367 - DNA, 33 bp, Homo sapien
aaccaagaggaaagataagagaaaggcctcccc

SEQ ID NO: 641368 - DNA, 33 bp, Homo sapien
aaccaagaggaaagattagagaaaggcctcccc

SEQ ID NO: 641369 - DNA, 33 bp, Homo sapien
atacaggataaatgtcgaattctttccctctat

SEQ ID NO: 641370 - DNA, 33 bp, Homo sapien
atacaggataaatgtctaattctttccctctat

SEQ ID NO: 641371 - DNA, 33 bp, Homo sapien
ctcataaacaccaaaagatgtttaacaataata

SEQ ID NO: 641372 - DNA, 33 bp, Homo sapien
ctcataaacaccaaaatatgtttaacaataata

SEQ ID NO: 641373 - DNA, 33 bp, Homo sapien
ttacttagtatctgtcaaacatctccatacact

SEQ ID NO: 641374 - DNA, 33 bp, Homo sapien
ttacttagtatctgtcgaacatctccatacact

SEQ ID NO: 641375 - DNA, 33 bp, Homo sapien
ccctccttcacagctacgttttagggatacgag

SEQ ID NO: 641376 - DNA, 33 bp, Homo sapien
ccctccttcacagctatgttttagggatacgag

SEQ ID NO: 641377 - DNA, 33 bp, Homo sapien
ggttttaggattcaccaagtctggaaaattact

SEQ ID NO: 641378 - DNA, 33 bp, Homo sapien
ggttttaggattcaccgagtctggaaaattact

SEQ ID NO: 641379 - DNA, 33 bp, Homo sapien
gttctagcagctgtcacggaatctggatcttcc

SEQ ID NO: 641380 - DNA, 33 bp, Homo sapien
gttctagcagctgtcatggaatctggatcttcc

SEQ ID NO: 641381 - DNA, 33 bp, Homo sapien
ggttatcctgccacaaacagggaatcgcctccg

SEQ ID NO: 641382 - DNA, 33 bp, Homo sapien
ggttatcctgccacaaccagggaatcgcctccg

SEQ ID NO: 641383 - DNA, 33 bp, Homo sapien
tatatttgttgttgacacgttgactgttggatg

SEQ ID NO: 641384 - DNA, 33 bp, Homo sapien
tatatttgttgttgacgcgttgactgttggatg

SEQ ID NO: 641385 - DNA, 33 bp, Homo sapien
atggtaggtatgcatgcagtcggtatttgttga

SEQ ID NO: 641386 - DNA, 33 bp, Homo sapien
atggtaggtatgcatgtagtcggtatttgttga

SEQ ID NO: 641387 - DNA, 33 bp, Homo sapien
aagaaagacatttcaacagctagtccatcaact

SEQ ID NO: 641388 - DNA, 33 bp, Homo sapien
aagaaagacatttcaatagctagtccatcaact

SEQ ID NO: 641389 - DNA, 33 bp, Homo sapien
ctttttatggctgtgaaacacgttaaaatttca

SEQ ID NO: 641390 - DNA, 33 bp, Homo sapien
ctttttatggctgtgagacacgttaaaatttca

SEQ ID NO: 641391 - DNA, 33 bp, Homo sapien
accagggtaatttgtcaagggtccagctgtagc

SEQ ID NO: 641392 - DNA, 33 bp, Homo sapien
accagggtaatttgtcgagggtccagctgtagc

SEQ ID NO: 641393 - DNA, 33 bp, Homo sapien
taattcatccattcaaagcatatctgctgagtg

SEQ ID NO: 641394 - DNA, 33 bp, Homo sapien
taattcatccattcaacgcatatctgctgagtg

SEQ ID NO: 641395 - DNA, 33 bp, Homo sapien
tcctcacaaaccactgcagtaagattaatccca

SEQ ID NO: 641396 - DNA, 33 bp, Homo sapien
tcctcacaaaccactggagtaagattaatccca

SEQ ID NO: 641397 - DNA, 33 bp, Homo sapien
aattttgagaataaaaaaagatgaagactcaat

SEQ ID NO: 641398 - DNA, 33 bp, Homo sapien
aattttgagaataaaagaagatgaagactcaat

SEQ ID NO: 641399 - DNA, 33 bp, Homo sapien
tttacaaggaagactgcataaccaatggcaaca

SEQ ID NO: 641400 - DNA, 33 bp, Homo sapien
tttacaaggaagactggataaccaatggcaaca

SEQ ID NO: 641401 - DNA, 33 bp, Homo sapien
aaataccaacattttcccattgatacttatttt

SEQ ID NO: 641402 - DNA, 33 bp, Homo sapien
aaataccaacattttctcattgatacttatttt

SEQ ID NO: 641403 - DNA, 33 bp, Homo sapien
ttcatctgtcatatttcaaagcaatgtagtgag

SEQ ID NO: 641404 - DNA, 33 bp, Homo sapien
ttcatctgtcatattttaaagcaatgtagtgag

SEQ ID NO: 641405 - DNA, 33 bp, Homo sapien
actacacggcactgcacaagaatttgaactgtt

SEQ ID NO: 641406 - DNA, 33 bp, Homo sapien
actacacggcactgcagaagaatttgaactgtt

SEQ ID NO: 641407 - DNA, 33 bp, Homo sapien
aaaaaaggatagaaacccagatgcttaaggtca

SEQ ID NO: 641408 - DNA, 33 bp, Homo sapien
aaaaaaggatagaaactcagatgcttaaggtca

SEQ ID NO: 641409 - DNA, 33 bp, Homo sapien
cttctctcagaatggcagacttactcttaaaac

SEQ ID NO: 641410 - DNA, 33 bp, Homo sapien
cttctctcagaatggctgacttactcttaaaac

SEQ ID NO: 641411 - DNA, 33 bp, Homo sapien
gtctttgccaaaggaacaccgcttcagggcctg

SEQ ID NO: 641412 - DNA, 33 bp, Homo sapien
gtctttgccaaaggaataccgcttcagggcctg

SEQ ID NO: 641413 - DNA, 33 bp, Homo sapien
tggtggaaatatcacaaatttagagtcaggaga

SEQ ID NO: 641414 - DNA, 33 bp, Homo sapien
tggtggaaatatcacacatttagagtcaggaga

SEQ ID NO: 641415 - DNA, 33 bp, Homo sapien
ctttttctgagtaaacactgagagtatggcaac

SEQ ID NO: 641416 - DNA, 33 bp, Homo sapien
ctttttctgagtaaacgctgagagtatggcaac

SEQ ID NO: 641417 - DNA, 33 bp, Homo sapien
acttgcaagtgtcagacaataatctacaaggtg

SEQ ID NO: 641418 - DNA, 33 bp, Homo sapien
acttgcaagtgtcagataataatctacaaggtg

SEQ ID NO: 641419 - DNA, 33 bp, Homo sapien
tgaggagacggttatacaccaggaagttgaggg

SEQ ID NO: 641420 - DNA, 33 bp, Homo sapien
tgaggagacggttatataccaggaagttgaggg

SEQ ID NO: 641421 - DNA, 33 bp, Homo sapien
gggagactattcaaaaaatttagtattaggcaa

SEQ ID NO: 641422 - DNA, 33 bp, Homo sapien
gggagactattcaaaagatttagtattaggcaa

SEQ ID NO: 641423 - DNA, 33 bp, Homo sapien
acacaggaagtgatacaagaggttttctcaaat

SEQ ID NO: 641424 - DNA, 33 bp, Homo sapien
acacaggaagtgatacgagaggttttctcaaat

SEQ ID NO: 641425 - DNA, 33 bp, Homo sapien
tttaaggagtttacagaccaacttgaagaaaca

SEQ ID NO: 641426 - DNA, 33 bp, Homo sapien
tttaaggagtttacagtccaacttgaagaaaca

SEQ ID NO: 641427 - DNA, 33 bp, Homo sapien
tagaattactagcccaaaggtagcctggagtta

SEQ ID NO: 641428 - DNA, 33 bp, Homo sapien
tagaattactagcccagaggtagcctggagtta

SEQ ID NO: 641429 - DNA, 33 bp, Homo sapien
atttacaaaaatttaccatgtgctaactctttt

SEQ ID NO: 641430 - DNA, 33 bp, Homo sapien
atttacaaaaatttactatgtgctaactctttt

SEQ ID NO: 641431 - DNA, 33 bp, Homo sapien
atgcactaaccttctcgcttctcaacattaaaa

SEQ ID NO: 641432 - DNA, 33 bp, Homo sapien
atgcactaaccttctctcttctcaacattaaaa

SEQ ID NO: 641433 - DNA, 33 bp, Homo sapien
atgtggctctgtcactaactgtggtcttgggta

SEQ ID NO: 641434 - DNA, 33 bp, Homo sapien
atgtggctctgtcactgactgtggtcttgggta

SEQ ID NO: 641435 - DNA, 33 bp, Homo sapien
ataagagccttgtcacagggagtacatgattaa

SEQ ID NO: 641436 - DNA, 33 bp, Homo sapien
ataagagccttgtcaccgggagtacatgattaa

SEQ ID NO: 641437 - DNA, 33 bp, Homo sapien
acatctcctgtctccacggcggcgtatctgcta

SEQ ID NO: 641438 - DNA, 33 bp, Homo sapien
acatctcctgtctccatggcggcgtatctgcta

SEQ ID NO: 641439 - DNA, 33 bp, Homo sapien
caagtccaagtccatacagattcacagcattga

SEQ ID NO: 641440 - DNA, 33 bp, Homo sapien
caagtccaagtccatatagattcacagcattga

SEQ ID NO: 641441 - DNA, 33 bp, Homo sapien
tgatgatgtactatgtaaagtctccgcagtttt

SEQ ID NO: 641442 - DNA, 33 bp, Homo sapien
tgatgatgtactatgtgaagtctccgcagtttt

SEQ ID NO: 641443 - DNA, 33 bp, Homo sapien
agggaattgactttcccgattctcagcgtcttc

SEQ ID NO: 641444 - DNA, 33 bp, Homo sapien
agggaattgactttcctgattctcagcgtcttc

SEQ ID NO: 641445 - DNA, 33 bp, Homo sapien
aaatagtgatatgtaaaaaagcagtgttagaat

SEQ ID NO: 641446 - DNA, 33 bp, Homo sapien
aaatagtgatatgtaacaaagcagtgttagaat

SEQ ID NO: 641447 - DNA, 33 bp, Homo sapien
acaggagttcttatctcactgaggcctggtgac

SEQ ID NO: 641448 - DNA, 33 bp, Homo sapien
acaggagttcttatctgactgaggcctggtgac

SEQ ID NO: 641449 - DNA, 33 bp, Homo sapien
ctgtattttcctggaaaggcacttgctaggggc

SEQ ID NO: 641450 - DNA, 33 bp, Homo sapien
ctgtattttcctggaagggcacttgctaggggc

SEQ ID NO: 641451 - DNA, 33 bp, Homo sapien
tcaactcagttaatacagccaacaactctttga

SEQ ID NO: 641452 - DNA, 33 bp, Homo sapien
tcaactcagttaatactgccaacaactctttga

SEQ ID NO: 641453 - DNA, 33 bp, Homo sapien
ccggttacctgtcttcactcaacatggtgcctt

SEQ ID NO: 641454 - DNA, 33 bp, Homo sapien
ccggttacctgtcttctctcaacatggtgcctt

SEQ ID NO: 641455 - DNA, 33 bp, Homo sapien
catgtggaaggagggcacttgaattaccaaact

SEQ ID NO: 641456 - DNA, 33 bp, Homo sapien
catgtggaaggagggcgcttgaattaccaaact

SEQ ID NO: 641457 - DNA, 33 bp, Homo sapien
atagcgaagcatttcactcattccctgacacgg

SEQ ID NO: 641458 - DNA, 33 bp, Homo sapien
atagcgaagcatttcattcattccctgacacgg

SEQ ID NO: 641459 - DNA, 33 bp, Homo sapien
tatcaagtcattaccacgcgactagcaccgctg

SEQ ID NO: 641460 - DNA, 33 bp, Homo sapien
tatcaagtcattaccatgcgactagcaccgctg

SEQ ID NO: 641461 - DNA, 33 bp, Homo sapien
cataatctaatctaccacataagaatccagggg

SEQ ID NO: 641462 - DNA, 33 bp, Homo sapien
cataatctaatctaccgcataagaatccagggg

SEQ ID NO: 641463 - DNA, 33 bp, Homo sapien
ttaggtaatgataaaacggtgcattgatggtgg

SEQ ID NO: 641464 - DNA, 33 bp, Homo sapien
ttaggtaatgataaaatggtgcattgatggtgg

SEQ ID NO: 641465 - DNA, 33 bp, Homo sapien
cagtggaaagtggaaactcactgtagggtgcag

SEQ ID NO: 641466 - DNA, 33 bp, Homo sapien
cagtggaaagtggaaattcactgtagggtgcag

SEQ ID NO: 641467 - DNA, 33 bp, Homo sapien
gaaatttgttccaacacgaccgacatattgaga

SEQ ID NO: 641468 - DNA, 33 bp, Homo sapien
gaaatttgttccaacatgaccgacatattgaga

SEQ ID NO: 641469 - DNA, 33 bp, Homo sapien
ccattggaggagaatcaaggcaataggtctcat

SEQ ID NO: 641470 - DNA, 33 bp, Homo sapien
ccattggaggagaatccaggcaataggtctcat

SEQ ID NO: 641471 - DNA, 33 bp, Homo sapien
tttggaaatgctcttgcacacagactacaagga

SEQ ID NO: 641472 - DNA, 33 bp, Homo sapien
tttggaaatgctcttggacacagactacaagga

SEQ ID NO: 641473 - DNA, 33 bp, Homo sapien
ttaatgacagcataaaagagcttccctcctaga

SEQ ID NO: 641474 - DNA, 33 bp, Homo sapien
ttaatgacagcataaaggagcttccctcctaga

SEQ ID NO: 641475 - DNA, 33 bp, Homo sapien
attggagtatttcccacgtgtttgctaaaggga

SEQ ID NO: 641476 - DNA, 33 bp, Homo sapien
attggagtatttcccatgtgtttgctaaaggga

SEQ ID NO: 641477 - DNA, 33 bp, Homo sapien
tgatatatgccaggaaatctgattgaaactaat

SEQ ID NO: 641478 - DNA, 33 bp, Homo sapien
tgatatatgccaggaagtctgattgaaactaat

SEQ ID NO: 641479 - DNA, 33 bp, Homo sapien
cattccaagtgctcaacacatattaactataat

SEQ ID NO: 641480 - DNA, 33 bp, Homo sapien
cattccaagtgctcaatacatattaactataat

SEQ ID NO: 641481 - DNA, 33 bp, Homo sapien
atgatacagtcacatactacaccacgtctatag

SEQ ID NO: 641482 - DNA, 33 bp, Homo sapien
atgatacagtcacatattacaccacgtctatag

SEQ ID NO: 641483 - DNA, 33 bp, Homo sapien
ctgggccaaagaccaacgtttaaagttacactc

SEQ ID NO: 641484 - DNA, 33 bp, Homo sapien
ctgggccaaagaccaatgtttaaagttacactc

SEQ ID NO: 641485 - DNA, 33 bp, Homo sapien
taatttagtcacttcaactgtgaaactgggtct

SEQ ID NO: 641486 - DNA, 33 bp, Homo sapien
taatttagtcacttcagctgtgaaactgggtct

SEQ ID NO: 641487 - DNA, 33 bp, Homo sapien
taattaacaaggtcaaatctcaccccacccaat

SEQ ID NO: 641488 - DNA, 33 bp, Homo sapien
taattaacaaggtcaagtctcaccccacccaat

SEQ ID NO: 641489 - DNA, 33 bp, Homo sapien
tatgaagtcccaggaaactgattgtaaggtgct

SEQ ID NO: 641490 - DNA, 33 bp, Homo sapien
tatgaagtcccaggaatctgattgtaaggtgct

SEQ ID NO: 641491 - DNA, 33 bp, Homo sapien
gcttcttatttctcaccaacaaccagatgtggg

SEQ ID NO: 641492 - DNA, 33 bp, Homo sapien
gcttcttatttctcactaacaaccagatgtggg

SEQ ID NO: 641493 - DNA, 33 bp, Homo sapien
cctaaggtgttttaatcaggataaaaggagatc

SEQ ID NO: 641494 - DNA, 33 bp, Homo sapien
cctaaggtgttttaatgaggataaaaggagatc

SEQ ID NO: 641495 - DNA, 33 bp, Homo sapien
aagttagcatttcttacgataacttgatttaga

SEQ ID NO: 641496 - DNA, 33 bp, Homo sapien
aagttagcatttcttatgataacttgatttaga

SEQ ID NO: 641497 - DNA, 33 bp, Homo sapien
agcccttgcctgaaaacccatatttaagtgctt

SEQ ID NO: 641498 - DNA, 33 bp, Homo sapien
agcccttgcctgaaaatccatatttaagtgctt

SEQ ID NO: 641499 - DNA, 33 bp, Homo sapien
atcactgttagatagacctgtggcttgcggcta

SEQ ID NO: 641500 - DNA, 33 bp, Homo sapien
atcactgttagatagatctgtggcttgcggcta

SEQ ID NO: 641501 - DNA, 33 bp, Homo sapien
taacaaatgccatagaaatccaaacttgagagt

SEQ ID NO: 641502 - DNA, 33 bp, Homo sapien
taacaaatgccatagatatccaaacttgagagt

SEQ ID NO: 641503 - DNA, 33 bp, Homo sapien
ctggagtcacagacataaggaagttagatctat

SEQ ID NO: 641504 - DNA, 33 bp, Homo sapien
ctggagtcacagacatgaggaagttagatctat

SEQ ID NO: 641505 - DNA, 33 bp, Homo sapien
atcctaacgataactcaagagatagagaccatt

SEQ ID NO: 641506 - DNA, 33 bp, Homo sapien
atcctaacgataactcgagagatagagaccatt

SEQ ID NO: 641507 - DNA, 33 bp, Homo sapien
cctcctgttaggcacacagattattaccagtga

SEQ ID NO: 641508 - DNA, 33 bp, Homo sapien
cctcctgttaggcacagagattattaccagtga

SEQ ID NO: 641509 - DNA, 33 bp, Homo sapien
agaaggctatgcataaatgaggataggataaat

SEQ ID NO: 641510 - DNA, 33 bp, Homo sapien
agaaggctatgcataagtgaggataggataaat

SEQ ID NO: 641511 - DNA, 33 bp, Homo sapien
tgactttagattaggaagtggtttcttggatat

SEQ ID NO: 641512 - DNA, 33 bp, Homo sapien
tgactttagattaggatgtggtttcttggatat

SEQ ID NO: 641513 - DNA, 33 bp, Homo sapien
tgcacagaagaaaaaaaaaatgagtgtgggtga

SEQ ID NO: 641514 - DNA, 33 bp, Homo sapien
tgcacagaagaaaaaacaaatgagtgtgggtga

SEQ ID NO: 641515 - DNA, 33 bp, Homo sapien
aggtgacagggtgccaagtcctagggctgactc

SEQ ID NO: 641516 - DNA, 33 bp, Homo sapien
aggtgacagggtgccaggtcctagggctgactc

SEQ ID NO: 641517 - DNA, 33 bp, Homo sapien
gaggtaagaagaatgcaaatgtggtaccaccga

SEQ ID NO: 641518 - DNA, 33 bp, Homo sapien
gaggtaagaagaatgcgaatgtggtaccaccga

SEQ ID NO: 641519 - DNA, 33 bp, Homo sapien
caccactggattaatagagacttgtgctcagaa

SEQ ID NO: 641520 - DNA, 33 bp, Homo sapien
caccactggattaatatagacttgtgctcagaa

SEQ ID NO: 641521 - DNA, 33 bp, Homo sapien
cagaagaggtttaaaccgttacttgtgtgtctc

SEQ ID NO: 641522 - DNA, 33 bp, Homo sapien
cagaagaggtttaaactgttacttgtgtgtctc

SEQ ID NO: 641523 - DNA, 33 bp, Homo sapien
gcttcctcatgtaatacaaaccttcctgacccc

SEQ ID NO: 641524 - DNA, 33 bp, Homo sapien
gcttcctcatgtaatataaaccttcctgacccc

SEQ ID NO: 641525 - DNA, 33 bp, Homo sapien
tctcaattgccagttacatagtaagtgctcaat

SEQ ID NO: 641526 - DNA, 33 bp, Homo sapien
tctcaattgccagttatatagtaagtgctcaat

SEQ ID NO: 641527 - DNA, 33 bp, Homo sapien
ggattctctaggtgaaatcttatcctaccaaaa

SEQ ID NO: 641528 - DNA, 33 bp, Homo sapien
ggattctctaggtgaagtcttatcctaccaaaa

SEQ ID NO: 641529 - DNA, 33 bp, Homo sapien
tcatttttttataccaacctctttgactctata

SEQ ID NO: 641530 - DNA, 33 bp, Homo sapien
tcatttttttataccatcctctttgactctata

SEQ ID NO: 641531 - DNA, 33 bp, Homo sapien
aaattagcaaatctgaaagtgtgtctgtcaccc

SEQ ID NO: 641532 - DNA, 33 bp, Homo sapien
aaattagcaaatctgagagtgtgtctgtcaccc

SEQ ID NO: 641533 - DNA, 33 bp, Homo sapien
ggagtaagaatgaggacgaagccaggtggatag

SEQ ID NO: 641534 - DNA, 33 bp, Homo sapien
ggagtaagaatgaggatgaagccaggtggatag

SEQ ID NO: 641535 - DNA, 33 bp, Homo sapien
cattaagtgttctctacgcatttactatcaagt

SEQ ID NO: 641536 - DNA, 33 bp, Homo sapien
cattaagtgttctctatgcatttactatcaagt

SEQ ID NO: 641537 - DNA, 33 bp, Homo sapien
gctttcaattacacaaaattctaagtcaattaa

SEQ ID NO: 641538 - DNA, 33 bp, Homo sapien
gctttcaattacacaagattctaagtcaattaa

SEQ ID NO: 641539 - DNA, 33 bp, Homo sapien
cttttggcattctagacgtaggttagctttttc

SEQ ID NO: 641540 - DNA, 33 bp, Homo sapien
cttttggcattctagatgtaggttagctttttc

SEQ ID NO: 641541 - DNA, 33 bp, Homo sapien
caattaggagctcaaacgtagtaaatctcattt

SEQ ID NO: 641542 - DNA, 33 bp, Homo sapien
caattaggagctcaaatgtagtaaatctcattt

SEQ ID NO: 641543 - DNA, 33 bp, Homo sapien
tgaatcaggtatcacaatagctgttgaagaaat

SEQ ID NO: 641544 - DNA, 33 bp, Homo sapien
tgaatcaggtatcacactagctgttgaagaaat

SEQ ID NO: 641545 - DNA, 33 bp, Homo sapien
acacgactctttgtaaactaaataccgatcact

SEQ ID NO: 641546 - DNA, 33 bp, Homo sapien
acacgactctttgtaagctaaataccgatcact

SEQ ID NO: 641547 - DNA, 33 bp, Homo sapien
tgaccagcagcaggagactaatctacaagggtc

SEQ ID NO: 641548 - DNA, 33 bp, Homo sapien
tgaccagcagcaggagcctaatctacaagggtc

SEQ ID NO: 641549 - DNA, 33 bp, Homo sapien
gttctgtgtcgtccttaaaatatcattacctgt

SEQ ID NO: 641550 - DNA, 33 bp, Homo sapien
gttctgtgtcgtccttgaaatatcattacctgt

SEQ ID NO: 641551 - DNA, 33 bp, Homo sapien
gtgtgtacagaatcatcaggtaacacattaata

SEQ ID NO: 641552 - DNA, 33 bp, Homo sapien
gtgtgtacagaatcattaggtaacacattaata

SEQ ID NO: 641553 - DNA, 33 bp, Homo sapien
tatggtggaagttaaaaacaattgtgggagatt

SEQ ID NO: 641554 - DNA, 33 bp, Homo sapien
tatggtggaagttaaagacaattgtgggagatt

SEQ ID NO: 641555 - DNA, 33 bp, Homo sapien
tatgagaaatcagaaacgtaccagacgtcttaa

SEQ ID NO: 641556 - DNA, 33 bp, Homo sapien
tatgagaaatcagaaatgtaccagacgtcttaa

SEQ ID NO: 641557 - DNA, 33 bp, Homo sapien
ggtgcattgacatttcacaactctgcatgcttt

SEQ ID NO: 641558 - DNA, 33 bp, Homo sapien
ggtgcattgacatttcgcaactctgcatgcttt

SEQ ID NO: 641559 - DNA, 33 bp, Homo sapien
tcccaggtagattcaactggagacactgatgga

SEQ ID NO: 641560 - DNA, 33 bp, Homo sapien
tcccaggtagattcaattggagacactgatgga

SEQ ID NO: 641561 - DNA, 33 bp, Homo sapien
acacagccattgtctacgacaccacctgaagca

SEQ ID NO: 641562 - DNA, 33 bp, Homo sapien
acacagccattgtctatgacaccacctgaagca

SEQ ID NO: 641563 - DNA, 33 bp, Homo sapien
caagatctggttgtcacagtggaaccactccag

SEQ ID NO: 641564 - DNA, 33 bp, Homo sapien
caagatctggttgtcatagtggaaccactccag

SEQ ID NO: 641565 - DNA, 33 bp, Homo sapien
cagatgagcaaaccgaagcacaaagaagtaact

SEQ ID NO: 641566 - DNA, 33 bp, Homo sapien
cagatgagcaaaccgaggcacaaagaagtaact

SEQ ID NO: 641567 - DNA, 33 bp, Homo sapien
tcattggactctgagaagaagataaagaatcaa

SEQ ID NO: 641568 - DNA, 33 bp, Homo sapien
tcattggactctgagaggaagataaagaatcaa

SEQ ID NO: 641569 - DNA, 33 bp, Homo sapien
agcacagaatgaacgacaaaccttttgttatag

SEQ ID NO: 641570 - DNA, 33 bp, Homo sapien
agcacagaatgaacgagaaaccttttgttatag

SEQ ID NO: 641571 - DNA, 33 bp, Homo sapien
ataggttttaaggggcaatctgagcttttggtc

SEQ ID NO: 641572 - DNA, 33 bp, Homo sapien
ataggttttaaggggcgatctgagcttttggtc

SEQ ID NO: 641573 - DNA, 33 bp, Homo sapien
aaggagaatccacttacagcatctaatatgtta

SEQ ID NO: 641574 - DNA, 33 bp, Homo sapien
aaggagaatccacttatagcatctaatatgtta

SEQ ID NO: 641575 - DNA, 33 bp, Homo sapien
atgctgtgtagtggataaaaaggaattacattt

SEQ ID NO: 641576 - DNA, 33 bp, Homo sapien
atgctgtgtagtggattaaaaggaattacattt

SEQ ID NO: 641577 - DNA, 33 bp, Homo sapien
tctctcacaccctgagaaaaccttcatagccac

SEQ ID NO: 641578 - DNA, 33 bp, Homo sapien
tctctcacaccctgaggaaaccttcatagccac

SEQ ID NO: 641579 - DNA, 33 bp, Homo sapien
gcttgaaacagtcttaaaaagaaggcaagctgg

SEQ ID NO: 641580 - DNA, 33 bp, Homo sapien
gcttgaaacagtcttagaaagaaggcaagctgg

SEQ ID NO: 641581 - DNA, 33 bp, Homo sapien
ttgtcccagttacagacgaccaagtagagtatc

SEQ ID NO: 641582 - DNA, 33 bp, Homo sapien
ttgtcccagttacagatgaccaagtagagtatc

SEQ ID NO: 641583 - DNA, 33 bp, Homo sapien
aattggaatgaagaagcattcacacaataaggt

SEQ ID NO: 641584 - DNA, 33 bp, Homo sapien
aattggaatgaagaaggattcacacaataaggt

SEQ ID NO: 641585 - DNA, 33 bp, Homo sapien
cctgcagtagttaacaagacctccaaagtggta

SEQ ID NO: 641586 - DNA, 33 bp, Homo sapien
cctgcagtagttaacaggacctccaaagtggta

SEQ ID NO: 641587 - DNA, 33 bp, Homo sapien
ttcgttgtacccttaccaggttctaggccctga

SEQ ID NO: 641588 - DNA, 33 bp, Homo sapien
ttcgttgtacccttactaggttctaggccctga

SEQ ID NO: 641589 - DNA, 33 bp, Homo sapien
ttctgcaggaagagagaagaggggtttggccct

SEQ ID NO: 641590 - DNA, 33 bp, Homo sapien
ttctgcaggaagagaggagaggggtttggccct

SEQ ID NO: 641591 - DNA, 33 bp, Homo sapien
gcaaatacctctatggacactaagtggctgcgc

SEQ ID NO: 641592 - DNA, 33 bp, Homo sapien
gcaaatacctctatggtcactaagtggctgcgc

SEQ ID NO: 641593 - DNA, 33 bp, Homo sapien
actgtctccgttgccaatcacgaactcatggtt

SEQ ID NO: 641594 - DNA, 33 bp, Homo sapien
actgtctccgttgccagtcacgaactcatggtt

SEQ ID NO: 641595 - DNA, 33 bp, Homo sapien
aaaaacaaactcccaacaagcgatgtacaagga

SEQ ID NO: 641596 - DNA, 33 bp, Homo sapien
aaaaacaaactcccaataagcgatgtacaagga

SEQ ID NO: 641597 - DNA, 33 bp, Homo sapien
aatttagataggaatgaagtagcattgtgatga

SEQ ID NO: 641598 - DNA, 33 bp, Homo sapien
aatttagataggaatggagtagcattgtgatga

SEQ ID NO: 641599 - DNA, 33 bp, Homo sapien
ctgtttttggcatcaccgtctagttggacttca

SEQ ID NO: 641600 - DNA, 33 bp, Homo sapien
ctgtttttggcatcactgtctagttggacttca

SEQ ID NO: 641601 - DNA, 33 bp, Homo sapien
ccccacatattataaaagggaactcagctgtat

SEQ ID NO: 641602 - DNA, 33 bp, Homo sapien
ccccacatattataaatgggaactcagctgtat

SEQ ID NO: 641603 - DNA, 33 bp, Homo sapien
cagaacctttgaactcccatattgcacagtgtc

SEQ ID NO: 641604 - DNA, 33 bp, Homo sapien
cagaacctttgaactctcatattgcacagtgtc

SEQ ID NO: 641605 - DNA, 33 bp, Homo sapien
tcgaggatctgccaataacaggtgatttctgga

SEQ ID NO: 641606 - DNA, 33 bp, Homo sapien
tcgaggatctgccaattacaggtgatttctgga

SEQ ID NO: 641607 - DNA, 33 bp, Homo sapien
ggttttgcctgggtaccatgtaggcctttgacc

SEQ ID NO: 641608 - DNA, 33 bp, Homo sapien
ggttttgcctgggtactatgtaggcctttgacc

SEQ ID NO: 641609 - DNA, 33 bp, Homo sapien
tgacctcatgagagacacttttccactggggcc

SEQ ID NO: 641610 - DNA, 33 bp, Homo sapien
tgacctcatgagagacgcttttccactggggcc

SEQ ID NO: 641611 - DNA, 33 bp, Homo sapien
tgaacatgtttttaaactcagaacttcagtttt

SEQ ID NO: 641612 - DNA, 33 bp, Homo sapien
tgaacatgtttttaaattcagaacttcagtttt

SEQ ID NO: 641613 - DNA, 33 bp, Homo sapien
ttttttaacaaaataaattatgcagtctctggt

SEQ ID NO: 641614 - DNA, 33 bp, Homo sapien
ttttttaacaaaataagttatgcagtctctggt

SEQ ID NO: 641615 - DNA, 33 bp, Homo sapien
tgtctataggaagaatgaatgaatgtctaagcc

SEQ ID NO: 641616 - DNA, 33 bp, Homo sapien
tgtctataggaagaattaatgaatgtctaagcc

SEQ ID NO: 641617 - DNA, 33 bp, Homo sapien
gtatgctcatgtattgaagcatataggtggctg

SEQ ID NO: 641618 - DNA, 33 bp, Homo sapien
gtatgctcatgtattggagcatataggtggctg

SEQ ID NO: 641619 - DNA, 33 bp, Homo sapien
ctgctcacacaggtcaactctgcttcattgtgg

SEQ ID NO: 641620 - DNA, 33 bp, Homo sapien
ctgctcacacaggtcagctctgcttcattgtgg

SEQ ID NO: 641621 - DNA, 33 bp, Homo sapien
tgatgggaagagaagaccactgggaaggacatt

SEQ ID NO: 641622 - DNA, 33 bp, Homo sapien
tgatgggaagagaagatcactgggaaggacatt

SEQ ID NO: 641623 - DNA, 33 bp, Homo sapien
gcctgaaattcttatacagagaacaaaggatga

SEQ ID NO: 641624 - DNA, 33 bp, Homo sapien
gcctgaaattcttatatagagaacaaaggatga

SEQ ID NO: 641625 - DNA, 33 bp, Homo sapien
cttgggagactgagacaagacgatcatttgagc

SEQ ID NO: 641626 - DNA, 33 bp, Homo sapien
cttgggagactgagacgagacgatcatttgagc

SEQ ID NO: 641627 - DNA, 33 bp, Homo sapien
atatacttttgggtatcaaaccacagaagttac

SEQ ID NO: 641628 - DNA, 33 bp, Homo sapien
atatacttttgggtatgaaaccacagaagttac

SEQ ID NO: 641629 - DNA, 33 bp, Homo sapien
gaattgggagcttatacaatgagtggatgagct

SEQ ID NO: 641630 - DNA, 33 bp, Homo sapien
gaattgggagcttatagaatgagtggatgagct

SEQ ID NO: 641631 - DNA, 33 bp, Homo sapien
cccttgaaatctatacaccaaatgtggcccctg

SEQ ID NO: 641632 - DNA, 33 bp, Homo sapien
cccttgaaatctatactccaaatgtggcccctg

SEQ ID NO: 641633 - DNA, 33 bp, Homo sapien
tcaagttcctgtttcacgcgtcccagctcttta

SEQ ID NO: 641634 - DNA, 33 bp, Homo sapien
tcaagttcctgtttcatgcgtcccagctcttta

SEQ ID NO: 641635 - DNA, 33 bp, Homo sapien
cctggttgcaggtaaccgaggccacttggataa

SEQ ID NO: 641636 - DNA, 33 bp, Homo sapien
cctggttgcaggtaacggaggccacttggataa

SEQ ID NO: 641637 - DNA, 33 bp, Homo sapien
ggtcagtaatgaggaaagcaaatggagtcagtg

SEQ ID NO: 641638 - DNA, 33 bp, Homo sapien
ggtcagtaatgaggaatgcaaatggagtcagtg

SEQ ID NO: 641639 - DNA, 33 bp, Homo sapien
ctgctgccgtgtaagacgcacctttcaccttct

SEQ ID NO: 641640 - DNA, 33 bp, Homo sapien
ctgctgccgtgtaagatgcacctttcaccttct

SEQ ID NO: 641641 - DNA, 33 bp, Homo sapien
tgaagacaaccttagaaccttatcagctagaag

SEQ ID NO: 641642 - DNA, 33 bp, Homo sapien
tgaagacaaccttagacccttatcagctagaag

SEQ ID NO: 641643 - DNA, 33 bp, Homo sapien
gcatctggtgtccacacaattagatgtgctggt

SEQ ID NO: 641644 - DNA, 33 bp, Homo sapien
gcatctggtgtccacataattagatgtgctggt

SEQ ID NO: 641645 - DNA, 33 bp, Homo sapien
cccatcagtcttggtcgcagaatctatcccatg

SEQ ID NO: 641646 - DNA, 33 bp, Homo sapien
cccatcagtcttggtctcagaatctatcccatg

SEQ ID NO: 641647 - DNA, 33 bp, Homo sapien
ctccatataaaaacataagtcgctggattaaag

SEQ ID NO: 641648 - DNA, 33 bp, Homo sapien
ctccatataaaaacatgagtcgctggattaaag

SEQ ID NO: 641649 - DNA, 33 bp, Homo sapien
gacaagacagagaagacgtttaccctcaggggg

SEQ ID NO: 641650 - DNA, 33 bp, Homo sapien
gacaagacagagaagatgtttaccctcaggggg

SEQ ID NO: 641651 - DNA, 33 bp, Homo sapien
ctagtcaggtgctggacctataggaggacaaga

SEQ ID NO: 641652 - DNA, 33 bp, Homo sapien
ctagtcaggtgctggatctataggaggacaaga

SEQ ID NO: 641653 - DNA, 33 bp, Homo sapien
tccgacaggttgtacacacatcttaggacagtg

SEQ ID NO: 641654 - DNA, 33 bp, Homo sapien
tccgacaggttgtacagacatcttaggacagtg

SEQ ID NO: 641655 - DNA, 33 bp, Homo sapien
agcttcagagagaaaaagaacttgccagaatct

SEQ ID NO: 641656 - DNA, 33 bp, Homo sapien
agcttcagagagaaaaggaacttgccagaatct

SEQ ID NO: 641657 - DNA, 33 bp, Homo sapien
gaagtagagaaataacaaagactgtctcctgaa

SEQ ID NO: 641658 - DNA, 33 bp, Homo sapien
gaagtagagaaataaccaagactgtctcctgaa

SEQ ID NO: 641659 - DNA, 33 bp, Homo sapien
ttctcaattccttctccactgaagaaagccaga

SEQ ID NO: 641660 - DNA, 33 bp, Homo sapien
ttctcaattccttctctactgaagaaagccaga

SEQ ID NO: 641661 - DNA, 33 bp, Homo sapien
ggctcctttctcttgaatagggaatgtgagctg

SEQ ID NO: 641662 - DNA, 33 bp, Homo sapien
ggctcctttctcttgagtagggaatgtgagctg

SEQ ID NO: 641663 - DNA, 33 bp, Homo sapien
ttcagtgactcaggaaaggcactgcttctattg

SEQ ID NO: 641664 - DNA, 33 bp, Homo sapien
ttcagtgactcaggaagggcactgcttctattg

SEQ ID NO: 641665 - DNA, 33 bp, Homo sapien
taggtgagctttctcaaagatctggagacctaa

SEQ ID NO: 641666 - DNA, 33 bp, Homo sapien
taggtgagctttctcagagatctggagacctaa

SEQ ID NO: 641667 - DNA, 33 bp, Homo sapien
gtgagccacttcttccaacctggcagtctcttt

SEQ ID NO: 641668 - DNA, 33 bp, Homo sapien
gtgagccacttcttccgacctggcagtctcttt

SEQ ID NO: 641669 - DNA, 33 bp, Homo sapien
gttacagccaggtaagaccatgtgattgagatt

SEQ ID NO: 641670 - DNA, 33 bp, Homo sapien
gttacagccaggtaaggccatgtgattgagatt

SEQ ID NO: 641671 - DNA, 33 bp, Homo sapien
tgcctgtccccagatacgcttcagtgaaggatt

SEQ ID NO: 641672 - DNA, 33 bp, Homo sapien
tgcctgtccccagatatgcttcagtgaaggatt

SEQ ID NO: 641673 - DNA, 33 bp, Homo sapien
gagcatcctccatgtaagttggtccctctgcct

SEQ ID NO: 641674 - DNA, 33 bp, Homo sapien
gagcatcctccatgtacgttggtccctctgcct

SEQ ID NO: 641675 - DNA, 33 bp, Homo sapien
ggttaaataggcaaaaaagaagagctctctcct

SEQ ID NO: 641676 - DNA, 33 bp, Homo sapien
ggttaaataggcaaaagagaagagctctctcct

SEQ ID NO: 641677 - DNA, 33 bp, Homo sapien
tggagactttcatggcaaacaaaacagacaagg

SEQ ID NO: 641678 - DNA, 33 bp, Homo sapien
tggagactttcatggccaacaaaacagacaagg

SEQ ID NO: 641679 - DNA, 33 bp, Homo sapien
ggaaactggcattgtcaattgttattaagttag

SEQ ID NO: 641680 - DNA, 33 bp, Homo sapien
ggaaactggcattgtcgattgttattaagttag

SEQ ID NO: 641681 - DNA, 33 bp, Homo sapien
gaccaggtgcttagtacataatgaatgagtgaa

SEQ ID NO: 641682 - DNA, 33 bp, Homo sapien
gaccaggtgcttagtagataatgaatgagtgaa

SEQ ID NO: 641683 - DNA, 33 bp, Homo sapien
cctcagtgccaaatccaagacatgcaggctgct

SEQ ID NO: 641684 - DNA, 33 bp, Homo sapien
cctcagtgccaaatcccagacatgcaggctgct

SEQ ID NO: 641685 - DNA, 33 bp, Homo sapien
gaagccttcagcaagaccctcttaacataaatg

SEQ ID NO: 641686 - DNA, 33 bp, Homo sapien
gaagccttcagcaagagcctcttaacataaatg

SEQ ID NO: 641687 - DNA, 33 bp, Homo sapien
acacaaaacacacccaggaaacaaattaacaga

SEQ ID NO: 641688 - DNA, 33 bp, Homo sapien
acacaaaacacacccatgaaacaaattaacaga

SEQ ID NO: 641689 - DNA, 33 bp, Homo sapien
tgacctaaattctcttcaaaatcctactttgct

SEQ ID NO: 641690 - DNA, 33 bp, Homo sapien
tgacctaaattctctttaaaatcctactttgct

SEQ ID NO: 641691 - DNA, 33 bp, Homo sapien
catgtctctggaaggcaccctcaagcttatgat

SEQ ID NO: 641692 - DNA, 33 bp, Homo sapien
catgtctctggaaggcgccctcaagcttatgat

SEQ ID NO: 641693 - DNA, 33 bp, Homo sapien
aaaatatgtggaatccactaaggaaattgcaaa

SEQ ID NO: 641694 - DNA, 33 bp, Homo sapien
aaaatatgtggaatccgctaaggaaattgcaaa

SEQ ID NO: 641695 - DNA, 33 bp, Homo sapien
aaacagaactgtgaccaatgttttgcaatttcc

SEQ ID NO: 641696 - DNA, 33 bp, Homo sapien
aaacagaactgtgaccgatgttttgcaatttcc

SEQ ID NO: 641697 - DNA, 33 bp, Homo sapien
taggagaagactatacacactcagctaatgaat

SEQ ID NO: 641698 - DNA, 33 bp, Homo sapien
taggagaagactatacccactcagctaatgaat

SEQ ID NO: 641699 - DNA, 33 bp, Homo sapien
caaattcctgactaccaagtttttaaaaatcca

SEQ ID NO: 641700 - DNA, 33 bp, Homo sapien
caaattcctgactaccgagtttttaaaaatcca

SEQ ID NO: 641701 - DNA, 33 bp, Homo sapien
tctaatccttgtcttacagatgatttctggagg

SEQ ID NO: 641702 - DNA, 33 bp, Homo sapien
tctaatccttgtcttagagatgatttctggagg

SEQ ID NO: 641703 - DNA, 33 bp, Homo sapien
ttgttatggcaacctgaactgactaatacacaa

SEQ ID NO: 641704 - DNA, 33 bp, Homo sapien
ttgttatggcaacctggactgactaatacacaa

SEQ ID NO: 641705 - DNA, 33 bp, Homo sapien
tgacctcatctagcctcaattacctcccgagag

SEQ ID NO: 641706 - DNA, 33 bp, Homo sapien
tgacctcatctagccttaattacctcccgagag

SEQ ID NO: 641707 - DNA, 33 bp, Homo sapien
cctgaactcgtttaataaggcatctgcagtcac

SEQ ID NO: 641708 - DNA, 33 bp, Homo sapien
cctgaactcgtttaatgaggcatctgcagtcac

SEQ ID NO: 641709 - DNA, 33 bp, Homo sapien
gatcagtgtgactctgaaactcacttaaccatt

SEQ ID NO: 641710 - DNA, 33 bp, Homo sapien
gatcagtgtgactctggaactcacttaaccatt

SEQ ID NO: 641711 - DNA, 33 bp, Homo sapien
tgcaaggagactctgagatggaatatggggtgc

SEQ ID NO: 641712 - DNA, 33 bp, Homo sapien
tgcaaggagactctgatatggaatatggggtgc

SEQ ID NO: 641713 - DNA, 33 bp, Homo sapien
atatcctttatgatgaaccattgcatggagggt

SEQ ID NO: 641714 - DNA, 33 bp, Homo sapien
atatcctttatgatgagccattgcatggagggt

SEQ ID NO: 641715 - DNA, 33 bp, Homo sapien
ttctctattcttccatgacccatgtgccagaat

SEQ ID NO: 641716 - DNA, 33 bp, Homo sapien
ttctctattcttccattacccatgtgccagaat

SEQ ID NO: 641717 - DNA, 33 bp, Homo sapien
ctaagaaaatcagcaaaataggccatgtgaact

SEQ ID NO: 641718 - DNA, 33 bp, Homo sapien
ctaagaaaatcagcaacataggccatgtgaact

SEQ ID NO: 641719 - DNA, 33 bp, Homo sapien
acaagtcctgagtgtcaccctcggatcatgcca

SEQ ID NO: 641720 - DNA, 33 bp, Homo sapien
acaagtcctgagtgtcgccctcggatcatgcca

SEQ ID NO: 641721 - DNA, 33 bp, Homo sapien
cactgcttatacattacaattacctggagaacc

SEQ ID NO: 641722 - DNA, 33 bp, Homo sapien
cactgcttatacattagaattacctggagaacc

SEQ ID NO: 641723 - DNA, 33 bp, Homo sapien
accatccggcctaccacaagtcctaaacgctca

SEQ ID NO: 641724 - DNA, 33 bp, Homo sapien
accatccggcctaccagaagtcctaaacgctca

SEQ ID NO: 641725 - DNA, 33 bp, Homo sapien
gtccccagtgggatagaaaaagagactaaagga

SEQ ID NO: 641726 - DNA, 33 bp, Homo sapien
gtccccagtgggataggaaaagagactaaagga

SEQ ID NO: 641727 - DNA, 33 bp, Homo sapien
attgagtggttgtaaaactctggtaaagtcaga

SEQ ID NO: 641728 - DNA, 33 bp, Homo sapien
attgagtggttgtaaacctctggtaaagtcaga

SEQ ID NO: 641729 - DNA, 33 bp, Homo sapien
ttcctttagtatttggaaagaaggtgtccttgc

SEQ ID NO: 641730 - DNA, 33 bp, Homo sapien
ttcctttagtatttggcaagaaggtgtccttgc

SEQ ID NO: 641731 - DNA, 33 bp, Homo sapien
tggtactttgttgttgcagccctggtggactta

SEQ ID NO: 641732 - DNA, 33 bp, Homo sapien
tggtactttgttgttgtagccctggtggactta

SEQ ID NO: 641733 - DNA, 33 bp, Homo sapien
ttgactttgcacgaagcaagtatagagtaattt

SEQ ID NO: 641734 - DNA, 33 bp, Homo sapien
ttgactttgcacgaaggaagtatagagtaattt

SEQ ID NO: 641735 - DNA, 33 bp, Homo sapien
caccttagtctgagaaagtgtgggaattcttat

SEQ ID NO: 641736 - DNA, 33 bp, Homo sapien
caccttagtctgagaatgtgtgggaattcttat

SEQ ID NO: 641737 - DNA, 33 bp, Homo sapien
tgggtgattgcggctaaccaaaagagtatccac

SEQ ID NO: 641738 - DNA, 33 bp, Homo sapien
tgggtgattgcggctatccaaaagagtatccac

SEQ ID NO: 641739 - DNA, 33 bp, Homo sapien
caaatttgggacataaatacactgattcagatg

SEQ ID NO: 641740 - DNA, 33 bp, Homo sapien
caaatttgggacataagtacactgattcagatg

SEQ ID NO: 641741 - DNA, 33 bp, Homo sapien
tctctgattccctaacgcaatcactggacttgc

SEQ ID NO: 641742 - DNA, 33 bp, Homo sapien
tctctgattccctaactcaatcactggacttgc

SEQ ID NO: 641743 - DNA, 33 bp, Homo sapien
ttccatatcccctcagccagaacatgttcttta

SEQ ID NO: 641744 - DNA, 33 bp, Homo sapien
ttccatatcccctcagtcagaacatgttcttta

SEQ ID NO: 641745 - DNA, 33 bp, Homo sapien
cattttatagttcaggaaactgagtttttgagt

SEQ ID NO: 641746 - DNA, 33 bp, Homo sapien
cattttatagttcagggaactgagtttttgagt

SEQ ID NO: 641747 - DNA, 33 bp, Homo sapien
ggtggttcatgggctacgtctaaacacataaac

SEQ ID NO: 641748 - DNA, 33 bp, Homo sapien
ggtggttcatgggctatgtctaaacacataaac

SEQ ID NO: 641749 - DNA, 33 bp, Homo sapien
gaaggaatgtgggcacaccctcaaagctgaaaa

SEQ ID NO: 641750 - DNA, 33 bp, Homo sapien
gaaggaatgtgggcacgccctcaaagctgaaaa

SEQ ID NO: 641751 - DNA, 33 bp, Homo sapien
ccaacaattatgtcaccctggcctcatcacatc

SEQ ID NO: 641752 - DNA, 33 bp, Homo sapien
ccaacaattatgtcactctggcctcatcacatc

SEQ ID NO: 641753 - DNA, 33 bp, Homo sapien
tcaccactgcgtggagacctcaaatgctctatc

SEQ ID NO: 641754 - DNA, 33 bp, Homo sapien
tcaccactgcgtggagtcctcaaatgctctatc

SEQ ID NO: 641755 - DNA, 33 bp, Homo sapien
cataatggtgtgttacagaacatctcttcccaa

SEQ ID NO: 641756 - DNA, 33 bp, Homo sapien
cataatggtgtgttacggaacatctcttcccaa

SEQ ID NO: 641757 - DNA, 33 bp, Homo sapien
cttaaaaagcaccctacccctgtcaaacccaag

SEQ ID NO: 641758 - DNA, 33 bp, Homo sapien
cttaaaaagcaccctatccctgtcaaacccaag

SEQ ID NO: 641759 - DNA, 33 bp, Homo sapien
attctaacacatgggcaaaacttggccaagttc

SEQ ID NO: 641760 - DNA, 33 bp, Homo sapien
attctaacacatgggcgaaacttggccaagttc

SEQ ID NO: 641761 - DNA, 33 bp, Homo sapien
cgcaggtaagttcagaagtgggcaacggaagac

SEQ ID NO: 641762 - DNA, 33 bp, Homo sapien
cgcaggtaagttcagaggtgggcaacggaagac

SEQ ID NO: 641763 - DNA, 33 bp, Homo sapien
ttctcctatctccacagaattctaaatctcctc

SEQ ID NO: 641764 - DNA, 33 bp, Homo sapien
ttctcctatctccacataattctaaatctcctc

SEQ ID NO: 641765 - DNA, 33 bp, Homo sapien
ctcattgtaatggacaatgatggttttgtctgc

SEQ ID NO: 641766 - DNA, 33 bp, Homo sapien
ctcattgtaatggacagtgatggttttgtctgc

SEQ ID NO: 641767 - DNA, 33 bp, Homo sapien
caatagacactggagaatactagagcagagagg

SEQ ID NO: 641768 - DNA, 33 bp, Homo sapien
caatagacactggagagtactagagcagagagg

SEQ ID NO: 641769 - DNA, 33 bp, Homo sapien
agggtcatgtaggttacatttgcacactgttac

SEQ ID NO: 641770 - DNA, 33 bp, Homo sapien
agggtcatgtaggttagatttgcacactgttac

SEQ ID NO: 641771 - DNA, 33 bp, Homo sapien
cttcccccactcctagccaccacaacttagcca

SEQ ID NO: 641772 - DNA, 33 bp, Homo sapien
cttcccccactcctagtcaccacaacttagcca

SEQ ID NO: 641773 - DNA, 33 bp, Homo sapien
gactctagagcccgcaggtttcgtagtaaccaa

SEQ ID NO: 641774 - DNA, 33 bp, Homo sapien
gactctagagcccgcatgtttcgtagtaaccaa

SEQ ID NO: 641775 - DNA, 33 bp, Homo sapien
ctgtttcataaccccacagttttcctgtagcca

SEQ ID NO: 641776 - DNA, 33 bp, Homo sapien
ctgtttcataaccccatagttttcctgtagcca

SEQ ID NO: 641777 - DNA, 33 bp, Homo sapien
tgtcggacacatttacacacagagaaaaatagg

SEQ ID NO: 641778 - DNA, 33 bp, Homo sapien
tgtcggacacatttacgcacagagaaaaatagg

SEQ ID NO: 641779 - DNA, 33 bp, Homo sapien
aaaagtgctcagctacacattattgagtgaatg

SEQ ID NO: 641780 - DNA, 33 bp, Homo sapien
aaaagtgctcagctacgcattattgagtgaatg

SEQ ID NO: 641781 - DNA, 33 bp, Homo sapien
agaactatttatgaaactctcacttgtgcctga

SEQ ID NO: 641782 - DNA, 33 bp, Homo sapien
agaactatttatgaaattctcacttgtgcctga

SEQ ID NO: 641783 - DNA, 33 bp, Homo sapien
ccttgtctttcattccagcctctgttcagatgt

SEQ ID NO: 641784 - DNA, 33 bp, Homo sapien
ccttgtctttcattccggcctctgttcagatgt

SEQ ID NO: 641785 - DNA, 33 bp, Homo sapien
tgacaaatgacctgtcactccaacagaaaccgc

SEQ ID NO: 641786 - DNA, 33 bp, Homo sapien
tgacaaatgacctgtcgctccaacagaaaccgc

SEQ ID NO: 641787 - DNA, 33 bp, Homo sapien
gcatccgacaaatgtccaatgtctagaatccgt

SEQ ID NO: 641788 - DNA, 33 bp, Homo sapien
gcatccgacaaatgtctaatgtctagaatccgt

SEQ ID NO: 641789 - DNA, 33 bp, Homo sapien
gtggagaaccttatacacagctgatgggaatgt

SEQ ID NO: 641790 - DNA, 33 bp, Homo sapien
gtggagaaccttatacgcagctgatgggaatgt

SEQ ID NO: 641791 - DNA, 33 bp, Homo sapien
tgacaatccaagataacagccaataatgagtat

SEQ ID NO: 641792 - DNA, 33 bp, Homo sapien
tgacaatccaagataatagccaataatgagtat

SEQ ID NO: 641793 - DNA, 33 bp, Homo sapien
aatatcagttttatgtcaaattcaaagttaact

SEQ ID NO: 641794 - DNA, 33 bp, Homo sapien
aatatcagttttatgtgaaattcaaagttaact

SEQ ID NO: 641795 - DNA, 33 bp, Homo sapien
tagagctggagacagacacatctttgcgttaga

SEQ ID NO: 641796 - DNA, 33 bp, Homo sapien
tagagctggagacagatacatctttgcgttaga

SEQ ID NO: 641797 - DNA, 33 bp, Homo sapien
aaggagttttctgcatgactttccactcaattt

SEQ ID NO: 641798 - DNA, 33 bp, Homo sapien
aaggagttttctgcattactttccactcaattt

SEQ ID NO: 641799 - DNA, 33 bp, Homo sapien
ttacttacagagcaaaatataattcactaaaat

SEQ ID NO: 641800 - DNA, 33 bp, Homo sapien
ttacttacagagcaaagtataattcactaaaat

SEQ ID NO: 641801 - DNA, 33 bp, Homo sapien
ggctgatccaatcaaagtccattttcaagaaat

SEQ ID NO: 641802 - DNA, 33 bp, Homo sapien
ggctgatccaatcaaattccattttcaagaaat

SEQ ID NO: 641803 - DNA, 33 bp, Homo sapien
cgacttgagactcttacacaaacagcccaaact

SEQ ID NO: 641804 - DNA, 33 bp, Homo sapien
cgacttgagactcttatacaaacagcccaaact

SEQ ID NO: 641805 - DNA, 33 bp, Homo sapien
gccatttcagcccagcaaggggacagtgacagg

SEQ ID NO: 641806 - DNA, 33 bp, Homo sapien
gccatttcagcccagcgaggggacagtgacagg

SEQ ID NO: 641807 - DNA, 33 bp, Homo sapien
gacagtaaatttgtgcgactccgagccacccag

SEQ ID NO: 641808 - DNA, 33 bp, Homo sapien
gacagtaaatttgtgctactccgagccacccag

SEQ ID NO: 641809 - DNA, 33 bp, Homo sapien
ccctcacctctgatgaccttttcattcctcaac

SEQ ID NO: 641810 - DNA, 33 bp, Homo sapien
ccctcacctctgatgatcttttcattcctcaac

SEQ ID NO: 641811 - DNA, 33 bp, Homo sapien
cacacatcctctaaccaattaaaagaattactg

SEQ ID NO: 641812 - DNA, 33 bp, Homo sapien
cacacatcctctaaccgattaaaagaattactg

SEQ ID NO: 641813 - DNA, 33 bp, Homo sapien
caaagactgcctgcgacatttttaaagcccagt

SEQ ID NO: 641814 - DNA, 33 bp, Homo sapien
caaagactgcctgcgatatttttaaagcccagt

SEQ ID NO: 641815 - DNA, 33 bp, Homo sapien
ctttgagatgcaagtgcaatggcgaagggtgag

SEQ ID NO: 641816 - DNA, 33 bp, Homo sapien
ctttgagatgcaagtgtaatggcgaagggtgag

SEQ ID NO: 641817 - DNA, 33 bp, Homo sapien
tgggagccctacttaacatcccttctctggcac

SEQ ID NO: 641818 - DNA, 33 bp, Homo sapien
tgggagccctacttaatatcccttctctggcac

SEQ ID NO: 641819 - DNA, 33 bp, Homo sapien
gcttggtggtaatatccagtctgcattcattca

SEQ ID NO: 641820 - DNA, 33 bp, Homo sapien
gcttggtggtaatatctagtctgcattcattca

SEQ ID NO: 641821 - DNA, 33 bp, Homo sapien
gctgcctccaagtccacgcttccggacaaaaga

SEQ ID NO: 641822 - DNA, 33 bp, Homo sapien
gctgcctccaagtccaggcttccggacaaaaga

SEQ ID NO: 641823 - DNA, 33 bp, Homo sapien
gggactggaaggagaaagtgctctgcttatgga

SEQ ID NO: 641824 - DNA, 33 bp, Homo sapien
gggactggaaggagaaggtgctctgcttatgga

SEQ ID NO: 641825 - DNA, 33 bp, Homo sapien
cacttcatccacacaaagtgtttcttgctttct

SEQ ID NO: 641826 - DNA, 33 bp, Homo sapien
cacttcatccacacaaggtgtttcttgctttct

SEQ ID NO: 641827 - DNA, 33 bp, Homo sapien
cagcaatcaggactgaataaattatagcatgtc

SEQ ID NO: 641828 - DNA, 33 bp, Homo sapien
cagcaatcaggactgagtaaattatagcatgtc

SEQ ID NO: 641829 - DNA, 33 bp, Homo sapien
cacctcataagcgctcactacaccaggccctta

SEQ ID NO: 641830 - DNA, 33 bp, Homo sapien
cacctcataagcgctcgctacaccaggccctta

SEQ ID NO: 641831 - DNA, 33 bp, Homo sapien
tagaggtgagaatgtcaaggctcaaagggtgtt

SEQ ID NO: 641832 - DNA, 33 bp, Homo sapien
tagaggtgagaatgtccaggctcaaagggtgtt

SEQ ID NO: 641833 - DNA, 33 bp, Homo sapien
gttgggggccatagtcacgggatgctgaggagc

SEQ ID NO: 641834 - DNA, 33 bp, Homo sapien
gttgggggccatagtcgcgggatgctgaggagc

SEQ ID NO: 641835 - DNA, 33 bp, Homo sapien
tatttcactgaagtagaagtctagaggtagggt

SEQ ID NO: 641836 - DNA, 33 bp, Homo sapien
tatttcactgaagtagtagtctagaggtagggt

SEQ ID NO: 641837 - DNA, 33 bp, Homo sapien
gtgttttggagatgcacgtgaactgagcacaga

SEQ ID NO: 641838 - DNA, 33 bp, Homo sapien
gtgttttggagatgcatgtgaactgagcacaga

SEQ ID NO: 641839 - DNA, 33 bp, Homo sapien
cagtggttccaagagacggtgaaaaaaacaagt

SEQ ID NO: 641840 - DNA, 33 bp, Homo sapien
cagtggttccaagagatggtgaaaaaaacaagt

SEQ ID NO: 641841 - DNA, 33 bp, Homo sapien
caacgatgatggagacagcaatttacaggagtg

SEQ ID NO: 641842 - DNA, 33 bp, Homo sapien
caacgatgatggagacggcaatttacaggagtg

SEQ ID NO: 641843 - DNA, 33 bp, Homo sapien
atgtggtgggtgcttaataaacatagttccctt

SEQ ID NO: 641844 - DNA, 33 bp, Homo sapien
atgtggtgggtgcttactaaacatagttccctt

SEQ ID NO: 641845 - DNA, 33 bp, Homo sapien
gaaagaagggaccaaacgtctgatgctgggttc

SEQ ID NO: 641846 - DNA, 33 bp, Homo sapien
gaaagaagggaccaaatgtctgatgctgggttc

SEQ ID NO: 641847 - DNA, 33 bp, Homo sapien
catgatctttctaaaacgcaaatttgaaacaat

SEQ ID NO: 641848 - DNA, 33 bp, Homo sapien
catgatctttctaaaatgcaaatttgaaacaat

SEQ ID NO: 641849 - DNA, 33 bp, Homo sapien
gtcccggggaacatgacgtctcttctctttctc

SEQ ID NO: 641850 - DNA, 33 bp, Homo sapien
gtcccggggaacatgatgtctcttctctttctc

SEQ ID NO: 641851 - DNA, 33 bp, Homo sapien
tcttgaggatttatggcaagacccatgatgatt

SEQ ID NO: 641852 - DNA, 33 bp, Homo sapien
tcttgaggatttatggtaagacccatgatgatt

SEQ ID NO: 641853 - DNA, 33 bp, Homo sapien
gtcaccaaaggaaaataatctcttaggtgacaa

SEQ ID NO: 641854 - DNA, 33 bp, Homo sapien
gtcaccaaaggaaaatcatctcttaggtgacaa

SEQ ID NO: 641855 - DNA, 33 bp, Homo sapien
agggactttcttttccagattagtcattgagca

SEQ ID NO: 641856 - DNA, 33 bp, Homo sapien
agggactttcttttccggattagtcattgagca

SEQ ID NO: 641857 - DNA, 33 bp, Homo sapien
ggccacagttcagccaaagtgtcagccccagcc

SEQ ID NO: 641858 - DNA, 33 bp, Homo sapien
ggccacagttcagccagagtgtcagccccagcc

SEQ ID NO: 641859 - DNA, 33 bp, Homo sapien
caggaagtcctccccagagataaaattgcctat

SEQ ID NO: 641860 - DNA, 33 bp, Homo sapien
caggaagtcctccccatagataaaattgcctat

SEQ ID NO: 641861 - DNA, 33 bp, Homo sapien
tttggaagaaacatcacgactacataggcaatg

SEQ ID NO: 641862 - DNA, 33 bp, Homo sapien
tttggaagaaacatcatgactacataggcaatg

SEQ ID NO: 641863 - DNA, 33 bp, Homo sapien
ggctggcacctgcaaaaaatccagaaagattaa

SEQ ID NO: 641864 - DNA, 33 bp, Homo sapien
ggctggcacctgcaaagaatccagaaagattaa

SEQ ID NO: 641865 - DNA, 33 bp, Homo sapien
gctcagttgttactgcacgtaaagaaagctaag

SEQ ID NO: 641866 - DNA, 33 bp, Homo sapien
gctcagttgttactgcgcgtaaagaaagctaag

SEQ ID NO: 641867 - DNA, 33 bp, Homo sapien
gtttcaagctgacgtaaggagacagtctttacc

SEQ ID NO: 641868 - DNA, 33 bp, Homo sapien
gtttcaagctgacgtagggagacagtctttacc

SEQ ID NO: 641869 - DNA, 33 bp, Homo sapien
gacctacttgctagccacagccacatgagcgag

SEQ ID NO: 641870 - DNA, 33 bp, Homo sapien
gacctacttgctagccgcagccacatgagcgag

SEQ ID NO: 641871 - DNA, 33 bp, Homo sapien
tggtttggctcaatgacgcctgtcagcctctta

SEQ ID NO: 641872 - DNA, 33 bp, Homo sapien
tggtttggctcaatgatgcctgtcagcctctta

SEQ ID NO: 641873 - DNA, 33 bp, Homo sapien
atagatgaataggtgaatagatacatatagagc

SEQ ID NO: 641874 - DNA, 33 bp, Homo sapien
atagatgaataggtgactagatacatatagagc

SEQ ID NO: 641875 - DNA, 33 bp, Homo sapien
ttttgagaaaaactgaaccttatccttctctat

SEQ ID NO: 641876 - DNA, 33 bp, Homo sapien
ttttgagaaaaactgacccttatccttctctat

SEQ ID NO: 641877 - DNA, 33 bp, Homo sapien
aaagtggaaatgagaacagtcttgtggtccagg

SEQ ID NO: 641878 - DNA, 33 bp, Homo sapien
aaagtggaaatgagaagagtcttgtggtccagg

SEQ ID NO: 641879 - DNA, 33 bp, Homo sapien
ttacaaagatcagctcaattttgagaaaagaca

SEQ ID NO: 641880 - DNA, 33 bp, Homo sapien
ttacaaagatcagctcgattttgagaaaagaca

SEQ ID NO: 641881 - DNA, 33 bp, Homo sapien
tctgcattcccaaatacggagttcaaggactca

SEQ ID NO: 641882 - DNA, 33 bp, Homo sapien
tctgcattcccaaatatggagttcaaggactca

SEQ ID NO: 641883 - DNA, 33 bp, Homo sapien
gactatttttacacacgagctttgaatcccagg

SEQ ID NO: 641884 - DNA, 33 bp, Homo sapien
gactatttttacacactagctttgaatcccagg

SEQ ID NO: 641885 - DNA, 33 bp, Homo sapien
tgacagcccaagcatcacaatacattaagaaaa

SEQ ID NO: 641886 - DNA, 33 bp, Homo sapien
tgacagcccaagcatcgcaatacattaagaaaa

SEQ ID NO: 641887 - DNA, 33 bp, Homo sapien
tggggtggcgaggacacgatccaatccattaca

SEQ ID NO: 641888 - DNA, 33 bp, Homo sapien
tggggtggcgaggacatgatccaatccattaca

SEQ ID NO: 641889 - DNA, 33 bp, Homo sapien
aataccttttttcgtacagctgctgtgtttaat

SEQ ID NO: 641890 - DNA, 33 bp, Homo sapien
aataccttttttcgtagagctgctgtgtttaat

SEQ ID NO: 641891 - DNA, 33 bp, Homo sapien
gatttttcctatacaacgaggtcatattaatac

SEQ ID NO: 641892 - DNA, 33 bp, Homo sapien
gatttttcctatacaatgaggtcatattaatac

SEQ ID NO: 641893 - DNA, 33 bp, Homo sapien
cacgaaggcagcaaacaaataggggaataagag

SEQ ID NO: 641894 - DNA, 33 bp, Homo sapien
cacgaaggcagcaaactaataggggaataagag

SEQ ID NO: 641895 - DNA, 33 bp, Homo sapien
ggactcgatgccttacagtaagcccccacccag

SEQ ID NO: 641896 - DNA, 33 bp, Homo sapien
ggactcgatgccttaccgtaagcccccacccag

SEQ ID NO: 641897 - DNA, 33 bp, Homo sapien
ctcagacatgagtagacgtctggaaaatggatg

SEQ ID NO: 641898 - DNA, 33 bp, Homo sapien
ctcagacatgagtagaggtctggaaaatggatg

SEQ ID NO: 641899 - DNA, 33 bp, Homo sapien
ggttcagctccatctgaactcttcatggactcc

SEQ ID NO: 641900 - DNA, 33 bp, Homo sapien
ggttcagctccatctggactcttcatggactcc

SEQ ID NO: 641901 - DNA, 33 bp, Homo sapien
ccacccctgacacacacgcaaggctgtactctt

SEQ ID NO: 641902 - DNA, 33 bp, Homo sapien
ccacccctgacacacatgcaaggctgtactctt

SEQ ID NO: 641903 - DNA, 33 bp, Homo sapien
agtagtgctgtaggatcactgtcccatttgagg

SEQ ID NO: 641904 - DNA, 33 bp, Homo sapien
agtagtgctgtaggattactgtcccatttgagg

SEQ ID NO: 641905 - DNA, 33 bp, Homo sapien
ttagttaagacgattacgttcagaacacaccgc

SEQ ID NO: 641906 - DNA, 33 bp, Homo sapien
ttagttaagacgattatgttcagaacacaccgc

SEQ ID NO: 641907 - DNA, 33 bp, Homo sapien
gatacaaaggactatacgttgaaactttaacct

SEQ ID NO: 641908 - DNA, 33 bp, Homo sapien
gatacaaaggactatatgttgaaactttaacct

SEQ ID NO: 641909 - DNA, 33 bp, Homo sapien
cacaggctcgtacagcaaagtcatccatataaa

SEQ ID NO: 641910 - DNA, 33 bp, Homo sapien
cacaggctcgtacagcgaagtcatccatataaa

SEQ ID NO: 641911 - DNA, 33 bp, Homo sapien
gacttactatatgtaaaccaaccatactcctaa

SEQ ID NO: 641912 - DNA, 33 bp, Homo sapien
gacttactatatgtaacccaaccatactcctaa

SEQ ID NO: 641913 - DNA, 33 bp, Homo sapien
aggggtctgagtagcaaggctgacatattggtg

SEQ ID NO: 641914 - DNA, 33 bp, Homo sapien
aggggtctgagtagcagggctgacatattggtg

SEQ ID NO: 641915 - DNA, 33 bp, Homo sapien
atgagttgttgatacacgtttgctgtataaggt

SEQ ID NO: 641916 - DNA, 33 bp, Homo sapien
atgagttgttgatacatgtttgctgtataaggt

SEQ ID NO: 641917 - DNA, 33 bp, Homo sapien
tctctcaccttacataagttttcttctctgtta

SEQ ID NO: 641918 - DNA, 33 bp, Homo sapien
tctctcaccttacataggttttcttctctgtta

SEQ ID NO: 641919 - DNA, 33 bp, Homo sapien
agtgacagtggttagaaaaggcactaagggaga

SEQ ID NO: 641920 - DNA, 33 bp, Homo sapien
agtgacagtggttagacaaggcactaagggaga

SEQ ID NO: 641921 - DNA, 33 bp, Homo sapien
ggtcttttaaagcaacactaaatgttcattgtt

SEQ ID NO: 641922 - DNA, 33 bp, Homo sapien
ggtcttttaaagcaacgctaaatgttcattgtt

SEQ ID NO: 641923 - DNA, 33 bp, Homo sapien
ctttccaagtagctgggaacataggtatgtgct

SEQ ID NO: 641924 - DNA, 33 bp, Homo sapien
ctttccaagtagctggtaacataggtatgtgct

SEQ ID NO: 641925 - DNA, 33 bp, Homo sapien
cacagtggtagtttcccaggtaatattttaaaa

SEQ ID NO: 641926 - DNA, 33 bp, Homo sapien
cacagtggtagtttcctaggtaatattttaaaa

SEQ ID NO: 641927 - DNA, 33 bp, Homo sapien
ccccaaagagttaccacgagctgggtcttgaag

SEQ ID NO: 641928 - DNA, 33 bp, Homo sapien
ccccaaagagttaccatgagctgggtcttgaag

SEQ ID NO: 641929 - DNA, 33 bp, Homo sapien
tgtgttaagatgtgataagcaacgacattcctg

SEQ ID NO: 641930 - DNA, 33 bp, Homo sapien
tgtgttaagatgtgattagcaacgacattcctg

SEQ ID NO: 641931 - DNA, 33 bp, Homo sapien
caggaggtagagagcaagaaatatttggccatc

SEQ ID NO: 641932 - DNA, 33 bp, Homo sapien
caggaggtagagagcaggaaatatttggccatc

SEQ ID NO: 641933 - DNA, 33 bp, Homo sapien
ggaatgagaacatggtcaagctgtttaatggaa

SEQ ID NO: 641934 - DNA, 33 bp, Homo sapien
ggaatgagaacatggttaagctgtttaatggaa

SEQ ID NO: 641935 - DNA, 33 bp, Homo sapien
cattaagcatgctcaccggataaatgtatgcca

SEQ ID NO: 641936 - DNA, 33 bp, Homo sapien
cattaagcatgctcactggataaatgtatgcca

SEQ ID NO: 641937 - DNA, 33 bp, Homo sapien
caattctggttggaaacatgttgaacatccaag

SEQ ID NO: 641938 - DNA, 33 bp, Homo sapien
caattctggttggaaatatgttgaacatccaag

SEQ ID NO: 641939 - DNA, 33 bp, Homo sapien
tatgtgtgttcatcctcaagtatatacatttta

SEQ ID NO: 641940 - DNA, 33 bp, Homo sapien
tatgtgtgttcatcctgaagtatatacatttta

SEQ ID NO: 641941 - DNA, 33 bp, Homo sapien
cctctcttcatcagccagaaacaaacaaaatgc

SEQ ID NO: 641942 - DNA, 33 bp, Homo sapien
cctctcttcatcagccggaaacaaacaaaatgc

SEQ ID NO: 641943 - DNA, 33 bp, Homo sapien
ggagttaactgacataaaagacgaagagaagag

SEQ ID NO: 641944 - DNA, 33 bp, Homo sapien
ggagttaactgacatagaagacgaagagaagag

SEQ ID NO: 641945 - DNA, 33 bp, Homo sapien
cagggtgccaactgctcaccctcttgacccgcc

SEQ ID NO: 641946 - DNA, 33 bp, Homo sapien
cagggtgccaactgcttaccctcttgacccgcc

SEQ ID NO: 641947 - DNA, 33 bp, Homo sapien
agcaagtgtgaggatcccagagacaaggtttag

SEQ ID NO: 641948 - DNA, 33 bp, Homo sapien
agcaagtgtgaggatctcagagacaaggtttag

SEQ ID NO: 641949 - DNA, 33 bp, Homo sapien
gttcttttgctggaccaatgacgacagcctgta

SEQ ID NO: 641950 - DNA, 33 bp, Homo sapien
gttcttttgctggaccgatgacgacagcctgta

SEQ ID NO: 641951 - DNA, 33 bp, Homo sapien
ataataacagcaataacagcaacaacataaata

SEQ ID NO: 641952 - DNA, 33 bp, Homo sapien
ataataacagcaataagagcaacaacataaata

SEQ ID NO: 641953 - DNA, 33 bp, Homo sapien
ataggttcaaactgcacgagtccatttatctgt

SEQ ID NO: 641954 - DNA, 33 bp, Homo sapien
ataggttcaaactgcatgagtccatttatctgt

SEQ ID NO: 641955 - DNA, 33 bp, Homo sapien
tcaaccactcatggccaatcttatctgtactcc

SEQ ID NO: 641956 - DNA, 33 bp, Homo sapien
tcaaccactcatggccgatcttatctgtactcc

SEQ ID NO: 641957 - DNA, 33 bp, Homo sapien
catgcaaatatttctacagttcctcaaagtcac

SEQ ID NO: 641958 - DNA, 33 bp, Homo sapien
catgcaaatatttctatagttcctcaaagtcac

SEQ ID NO: 641959 - DNA, 33 bp, Homo sapien
gacataaaccatcccacaaaaagagagcaagag

SEQ ID NO: 641960 - DNA, 33 bp, Homo sapien
gacataaaccatcccataaaaagagagcaagag

SEQ ID NO: 641961 - DNA, 33 bp, Homo sapien
cctctggaaattcacaatacattttgaacacag

SEQ ID NO: 641962 - DNA, 33 bp, Homo sapien
cctctggaaattcacagtacattttgaacacag

SEQ ID NO: 641963 - DNA, 33 bp, Homo sapien
taataataaaaaacaccgagctcgtattttgta

SEQ ID NO: 641964 - DNA, 33 bp, Homo sapien
taataataaaaaacactgagctcgtattttgta

SEQ ID NO: 641965 - DNA, 33 bp, Homo sapien
tgagccaaatgtttaactgatgctaaggaattt

SEQ ID NO: 641966 - DNA, 33 bp, Homo sapien
tgagccaaatgtttaattgatgctaaggaattt

SEQ ID NO: 641967 - DNA, 33 bp, Homo sapien
tggttcccaggtgccacagattacccttttttt

SEQ ID NO: 641968 - DNA, 33 bp, Homo sapien
tggttcccaggtgccagagattacccttttttt

SEQ ID NO: 641969 - DNA, 33 bp, Homo sapien
ttcctgtattccaaaaaaccaagcaaagaatag

SEQ ID NO: 641970 - DNA, 33 bp, Homo sapien
ttcctgtattccaaaacaccaagcaaagaatag

SEQ ID NO: 641971 - DNA, 33 bp, Homo sapien
gagcaaaagaggtgccacaaggttacaaaatga

SEQ ID NO: 641972 - DNA, 33 bp, Homo sapien
gagcaaaagaggtgccgcaaggttacaaaatga

SEQ ID NO: 641973 - DNA, 33 bp, Homo sapien
atgcctaagactctgccaacccagtgtttaatg

SEQ ID NO: 641974 - DNA, 33 bp, Homo sapien
atgcctaagactctgcgaacccagtgtttaatg

SEQ ID NO: 641975 - DNA, 33 bp, Homo sapien
agagagatacgcatacaaggagtaatgaccaat

SEQ ID NO: 641976 - DNA, 33 bp, Homo sapien
agagagatacgcatacgaggagtaatgaccaat

SEQ ID NO: 641977 - DNA, 33 bp, Homo sapien
gcaagagccgacaaaagcctggtacatgtcact

SEQ ID NO: 641978 - DNA, 33 bp, Homo sapien
gcaagagccgacaaaatcctggtacatgtcact

SEQ ID NO: 641979 - DNA, 33 bp, Homo sapien
agggttctaggaggaaacaagtgtggggacatt

SEQ ID NO: 641980 - DNA, 33 bp, Homo sapien
agggttctaggaggaagcaagtgtggggacatt

SEQ ID NO: 641981 - DNA, 33 bp, Homo sapien
tgtcctggctcaggtaagctctcacctagtgac

SEQ ID NO: 641982 - DNA, 33 bp, Homo sapien
tgtcctggctcaggtaggctctcacctagtgac

SEQ ID NO: 641983 - DNA, 33 bp, Homo sapien
tatataaccaacagaacgtggtagaagtggctc

SEQ ID NO: 641984 - DNA, 33 bp, Homo sapien
tatataaccaacagaatgtggtagaagtggctc

SEQ ID NO: 641985 - DNA, 33 bp, Homo sapien
attgtgagaagagtccacgggatgagctgtgac

SEQ ID NO: 641986 - DNA, 33 bp, Homo sapien
attgtgagaagagtccgcgggatgagctgtgac

SEQ ID NO: 641987 - DNA, 33 bp, Homo sapien
gaaaagctgtatgcgaatccaatgctggtcaag

SEQ ID NO: 641988 - DNA, 33 bp, Homo sapien
gaaaagctgtatgcgagtccaatgctggtcaag

SEQ ID NO: 641989 - DNA, 33 bp, Homo sapien
tgtaagtgcactctgaaatgcttgcacaatgat

SEQ ID NO: 641990 - DNA, 33 bp, Homo sapien
tgtaagtgcactctgagatgcttgcacaatgat

SEQ ID NO: 641991 - DNA, 33 bp, Homo sapien
gttaagggaacttgaaaactacatcataaaaat

SEQ ID NO: 641992 - DNA, 33 bp, Homo sapien
gttaagggaacttgaagactacatcataaaaat

SEQ ID NO: 641993 - DNA, 33 bp, Homo sapien
atgaccacactgcaacagaggaagttgagatct

SEQ ID NO: 641994 - DNA, 33 bp, Homo sapien
atgaccacactgcaacggaggaagttgagatct

SEQ ID NO: 641995 - DNA, 33 bp, Homo sapien
aaagtcaggaaccatcagaactgcttacaaagg

SEQ ID NO: 641996 - DNA, 33 bp, Homo sapien
aaagtcaggaaccatcggaactgcttacaaagg

SEQ ID NO: 641997 - DNA, 33 bp, Homo sapien
atgacgagacgatgccagcaatgctgagatcaa

SEQ ID NO: 641998 - DNA, 33 bp, Homo sapien
atgacgagacgatgccggcaatgctgagatcaa

SEQ ID NO: 641999 - DNA, 33 bp, Homo sapien
ttcctgcaaaagtccaagccaaatgaggccacg

SEQ ID NO: 642000 - DNA, 33 bp, Homo sapien
ttcctgcaaaagtccaggccaaatgaggccacg

SEQ ID NO: 642001 - DNA, 33 bp, Homo sapien
gatggtttgtcttgccacagtagatcattaaaa

SEQ ID NO: 642002 - DNA, 33 bp, Homo sapien
gatggtttgtcttgccgcagtagatcattaaaa

SEQ ID NO: 642003 - DNA, 33 bp, Homo sapien
ccatcacttctaccacccttaccacaattacca

SEQ ID NO: 642004 - DNA, 33 bp, Homo sapien
ccatcacttctaccactcttaccacaattacca

SEQ ID NO: 642005 - DNA, 33 bp, Homo sapien
ttaagtagtagtgataccatttcatccgattcc

SEQ ID NO: 642006 - DNA, 33 bp, Homo sapien
ttaagtagtagtgatagcatttcatccgattcc

SEQ ID NO: 642007 - DNA, 33 bp, Homo sapien
gataattacaactggaacgaggaataactggtt

SEQ ID NO: 642008 - DNA, 33 bp, Homo sapien
gataattacaactggatcgaggaataactggtt

SEQ ID NO: 642009 - DNA, 33 bp, Homo sapien
cagcctcctggagtcactaagatgaatggctgt

SEQ ID NO: 642010 - DNA, 33 bp, Homo sapien
cagcctcctggagtcagtaagatgaatggctgt

SEQ ID NO: 642011 - DNA, 33 bp, Homo sapien
aaagggaacttgaacagaagttttctgtgttct

SEQ ID NO: 642012 - DNA, 33 bp, Homo sapien
aaagggaacttgaacataagttttctgtgttct

SEQ ID NO: 642013 - DNA, 33 bp, Homo sapien
gttgtcacagatatttaaaagtaacattttaca

SEQ ID NO: 642014 - DNA, 33 bp, Homo sapien
gttgtcacagatattttaaagtaacattttaca

SEQ ID NO: 642015 - DNA, 33 bp, Homo sapien
gaatccaaatgcctaccagaaccttcactcttg

SEQ ID NO: 642016 - DNA, 33 bp, Homo sapien
gaatccaaatgcctactagaaccttcactcttg

SEQ ID NO: 642017 - DNA, 33 bp, Homo sapien
accctcatgagaacagaattaagtatgattaag

SEQ ID NO: 642018 - DNA, 33 bp, Homo sapien
accctcatgagaacaggattaagtatgattaag

SEQ ID NO: 642019 - DNA, 33 bp, Homo sapien
atatggtttaaataaccctttagcttgcagcct

SEQ ID NO: 642020 - DNA, 33 bp, Homo sapien
atatggtttaaataactctttagcttgcagcct

SEQ ID NO: 642021 - DNA, 33 bp, Homo sapien
acagatactcaagtctaaagcagtcacaattaa

SEQ ID NO: 642022 - DNA, 33 bp, Homo sapien
acagatactcaagtctgaagcagtcacaattaa

SEQ ID NO: 642023 - DNA, 33 bp, Homo sapien
ctatagtcaccaataaagctccccagttttgct

SEQ ID NO: 642024 - DNA, 33 bp, Homo sapien
ctatagtcaccaataacgctccccagttttgct

SEQ ID NO: 642025 - DNA, 33 bp, Homo sapien
atgtgcttttgaagggaataggattatgctaag

SEQ ID NO: 642026 - DNA, 33 bp, Homo sapien
atgtgcttttgaaggggataggattatgctaag

SEQ ID NO: 642027 - DNA, 33 bp, Homo sapien
tatgcatattgaagacaaaaagtgctgctctct

SEQ ID NO: 642028 - DNA, 33 bp, Homo sapien
tatgcatattgaagacgaaaagtgctgctctct

SEQ ID NO: 642029 - DNA, 33 bp, Homo sapien
tgttcttagcatagaccctgacagtcacttatc

SEQ ID NO: 642030 - DNA, 33 bp, Homo sapien
tgttcttagcatagactctgacagtcacttatc

SEQ ID NO: 642031 - DNA, 33 bp, Homo sapien
ctttcccaacaaaccacgtctccatcctctctc

SEQ ID NO: 642032 - DNA, 33 bp, Homo sapien
ctttcccaacaaaccatgtctccatcctctctc

SEQ ID NO: 642033 - DNA, 33 bp, Homo sapien
taaacaattgcaactgaaaatcatacctcaaac

SEQ ID NO: 642034 - DNA, 33 bp, Homo sapien
taaacaattgcaactggaaatcatacctcaaac

SEQ ID NO: 642035 - DNA, 33 bp, Homo sapien
agaaacaatcttttcccacaagtctaacgtatg

SEQ ID NO: 642036 - DNA, 33 bp, Homo sapien
agaaacaatcttttcctacaagtctaacgtatg

SEQ ID NO: 642037 - DNA, 33 bp, Homo sapien
atctggttccagtgaaagtacaatgtaatagac

SEQ ID NO: 642038 - DNA, 33 bp, Homo sapien
atctggttccagtgaatgtacaatgtaatagac

SEQ ID NO: 642039 - DNA, 33 bp, Homo sapien
tccctaattttagcacagtattttaatgaggtg

SEQ ID NO: 642040 - DNA, 33 bp, Homo sapien
tccctaattttagcacggtattttaatgaggtg

SEQ ID NO: 642041 - DNA, 33 bp, Homo sapien
atacagattttaattcaaagtacatttcaagga

SEQ ID NO: 642042 - DNA, 33 bp, Homo sapien
atacagattttaattcgaagtacatttcaagga

SEQ ID NO: 642043 - DNA, 33 bp, Homo sapien
tggcctaagaaggtaacagcttagaattaacca

SEQ ID NO: 642044 - DNA, 33 bp, Homo sapien
tggcctaagaaggtaatagcttagaattaacca

SEQ ID NO: 642045 - DNA, 33 bp, Homo sapien
ttaaattcttactgcagagaaaattatatttgc

SEQ ID NO: 642046 - DNA, 33 bp, Homo sapien
ttaaattcttactgcatagaaaattatatttgc

SEQ ID NO: 642047 - DNA, 33 bp, Homo sapien
gagaatgagatcattacaaagggtttgctgcag

SEQ ID NO: 642048 - DNA, 33 bp, Homo sapien
gagaatgagatcattataaagggtttgctgcag

SEQ ID NO: 642049 - DNA, 33 bp, Homo sapien
ctcctgaccgctctataaagtaggcattatata

SEQ ID NO: 642050 - DNA, 33 bp, Homo sapien
ctcctgaccgctctatgaagtaggcattatata

SEQ ID NO: 642051 - DNA, 33 bp, Homo sapien
gtgctccattctctaccctgctttttgcatatc

SEQ ID NO: 642052 - DNA, 33 bp, Homo sapien
gtgctccattctctactctgctttttgcatatc

SEQ ID NO: 642053 - DNA, 33 bp, Homo sapien
agtaatggacttgctcactacaataattaaaac

SEQ ID NO: 642054 - DNA, 33 bp, Homo sapien
agtaatggacttgctcgctacaataattaaaac

SEQ ID NO: 642055 - DNA, 33 bp, Homo sapien
attctgtcttgtcaccaccaggtaagaagtgcc

SEQ ID NO: 642056 - DNA, 33 bp, Homo sapien
attctgtcttgtcaccgccaggtaagaagtgcc

SEQ ID NO: 642057 - DNA, 33 bp, Homo sapien
tctgtgaaatgagcaaattaatccaaaagttgt

SEQ ID NO: 642058 - DNA, 33 bp, Homo sapien
tctgtgaaatgagcaagttaatccaaaagttgt

SEQ ID NO: 642059 - DNA, 33 bp, Homo sapien
ttttgctattttaacaaggagaaagtctgcaaa

SEQ ID NO: 642060 - DNA, 33 bp, Homo sapien
ttttgctattttaacatggagaaagtctgcaaa

SEQ ID NO: 642061 - DNA, 33 bp, Homo sapien
cgcttaaaagtctcaaacgtgcgacttaattaa

SEQ ID NO: 642062 - DNA, 33 bp, Homo sapien
cgcttaaaagtctcaagcgtgcgacttaattaa

SEQ ID NO: 642063 - DNA, 33 bp, Homo sapien
aaaagcatcaagctgaaactttattgttgttgg

SEQ ID NO: 642064 - DNA, 33 bp, Homo sapien
aaaagcatcaagctgagactttattgttgttgg

SEQ ID NO: 642065 - DNA, 33 bp, Homo sapien
acgcaagaccatttccacttacataatacaagt

SEQ ID NO: 642066 - DNA, 33 bp, Homo sapien
acgcaagaccatttccgcttacataatacaagt

SEQ ID NO: 642067 - DNA, 33 bp, Homo sapien
tcccccagcgtaggtacacacgtgacctttgca

SEQ ID NO: 642068 - DNA, 33 bp, Homo sapien
tcccccagcgtaggtatacacgtgacctttgca

SEQ ID NO: 642069 - DNA, 33 bp, Homo sapien
tctaacttgtgttttaaagaagacactctggtt

SEQ ID NO: 642070 - DNA, 33 bp, Homo sapien
tctaacttgtgttttagagaagacactctggtt

SEQ ID NO: 642071 - DNA, 33 bp, Homo sapien
caaaccaagttagtgacctggcttcaccaaccc

SEQ ID NO: 642072 - DNA, 33 bp, Homo sapien
caaaccaagttagtgagctggcttcaccaaccc

SEQ ID NO: 642073 - DNA, 33 bp, Homo sapien
gtggttcaaatgtcacagattctcactcttctt

SEQ ID NO: 642074 - DNA, 33 bp, Homo sapien
gtggttcaaatgtcaccgattctcactcttctt

SEQ ID NO: 642075 - DNA, 33 bp, Homo sapien
aacaaaacagaaaaggaagcattatatagcaac

SEQ ID NO: 642076 - DNA, 33 bp, Homo sapien
aacaaaacagaaaagggagcattatatagcaac

SEQ ID NO: 642077 - DNA, 33 bp, Homo sapien
gatgttacctagatacagaagatcccagccctc

SEQ ID NO: 642078 - DNA, 33 bp, Homo sapien
gatgttacctagatacggaagatcccagccctc

SEQ ID NO: 642079 - DNA, 33 bp, Homo sapien
ttgaggaatgagtgtcaatcaagaggtagagac

SEQ ID NO: 642080 - DNA, 33 bp, Homo sapien
ttgaggaatgagtgtcgatcaagaggtagagac

SEQ ID NO: 642081 - DNA, 33 bp, Homo sapien
agtagcctgataggtaaataatgctaccaactt

SEQ ID NO: 642082 - DNA, 33 bp, Homo sapien
agtagcctgataggtacataatgctaccaactt

SEQ ID NO: 642083 - DNA, 33 bp, Homo sapien
taccagagtgtcaataagctgattttggaaatt

SEQ ID NO: 642084 - DNA, 33 bp, Homo sapien
taccagagtgtcaatatgctgattttggaaatt

SEQ ID NO: 642085 - DNA, 33 bp, Homo sapien
aatcattgtttaagacaaggaaaggtgtttttc

SEQ ID NO: 642086 - DNA, 33 bp, Homo sapien
aatcattgtttaagacgaggaaaggtgtttttc

SEQ ID NO: 642087 - DNA, 33 bp, Homo sapien
ccttaagatacctgaactctgttatctgtattt

SEQ ID NO: 642088 - DNA, 33 bp, Homo sapien
ccttaagatacctgaattctgttatctgtattt

SEQ ID NO: 642089 - DNA, 33 bp, Homo sapien
atggattaaggcatgaactaagaggctgggcct

SEQ ID NO: 642090 - DNA, 33 bp, Homo sapien
atggattaaggcatgacctaagaggctgggcct

SEQ ID NO: 642091 - DNA, 33 bp, Homo sapien
gtcagtctattacccaacactgcaattatgcac

SEQ ID NO: 642092 - DNA, 33 bp, Homo sapien
gtcagtctattacccagcactgcaattatgcac

SEQ ID NO: 642093 - DNA, 33 bp, Homo sapien
gactcagactcaccttcaagagtgtgaactcag

SEQ ID NO: 642094 - DNA, 33 bp, Homo sapien
gactcagactcacctttaagagtgtgaactcag

SEQ ID NO: 642095 - DNA, 33 bp, Homo sapien
aggggcagtctcatgaccacacgagtcaaatca

SEQ ID NO: 642096 - DNA, 33 bp, Homo sapien
aggggcagtctcatgatcacacgagtcaaatca

SEQ ID NO: 642097 - DNA, 33 bp, Homo sapien
atgtaatttcaaagtacaggagtgtgatttttt

SEQ ID NO: 642098 - DNA, 33 bp, Homo sapien
atgtaatttcaaagtagaggagtgtgatttttt

SEQ ID NO: 642099 - DNA, 33 bp, Homo sapien
ataactggtataactccatgctttgggaatatt

SEQ ID NO: 642100 - DNA, 33 bp, Homo sapien
ataactggtataactctatgctttgggaatatt

SEQ ID NO: 642101 - DNA, 33 bp, Homo sapien
aaaatgatagtctttacgcttttagtacagagc

SEQ ID NO: 642102 - DNA, 33 bp, Homo sapien
aaaatgatagtctttatgcttttagtacagagc

SEQ ID NO: 642103 - DNA, 33 bp, Homo sapien
acttgaaatctactacaacaaaacaatgaattc

SEQ ID NO: 642104 - DNA, 33 bp, Homo sapien
acttgaaatctactacgacaaaacaatgaattc

SEQ ID NO: 642105 - DNA, 33 bp, Homo sapien
gtatgagggcagtttcacaaaccatcaggcttc

SEQ ID NO: 642106 - DNA, 33 bp, Homo sapien
gtatgagggcagtttcgcaaaccatcaggcttc

SEQ ID NO: 642107 - DNA, 33 bp, Homo sapien
taaagatggtaaattacataagtgtgcaagtgt

SEQ ID NO: 642108 - DNA, 33 bp, Homo sapien
taaagatggtaaattatataagtgtgcaagtgt

SEQ ID NO: 642109 - DNA, 33 bp, Homo sapien
gacatgacattactccaccatcaccacatgcta

SEQ ID NO: 642110 - DNA, 33 bp, Homo sapien
gacatgacattactccgccatcaccacatgcta

SEQ ID NO: 642111 - DNA, 33 bp, Homo sapien
ccttggagatcatctaatacaagcctctcattt

SEQ ID NO: 642112 - DNA, 33 bp, Homo sapien
ccttggagatcatctattacaagcctctcattt

SEQ ID NO: 642113 - DNA, 33 bp, Homo sapien
atatgacattactggacacctgtcaaaaacttc

SEQ ID NO: 642114 - DNA, 33 bp, Homo sapien
atatgacattactggatacctgtcaaaaacttc

SEQ ID NO: 642115 - DNA, 33 bp, Homo sapien
tttagtttcccataaactctgcctgttgtagcc

SEQ ID NO: 642116 - DNA, 33 bp, Homo sapien
tttagtttcccataaattctgcctgttgtagcc

SEQ ID NO: 642117 - DNA, 33 bp, Homo sapien
tggtatggatttagtaaacttctccacacttcc

SEQ ID NO: 642118 - DNA, 33 bp, Homo sapien
tggtatggatttagtagacttctccacacttcc

SEQ ID NO: 642119 - DNA, 33 bp, Homo sapien
agctccacatcctccaatacaaaggacatcctc

SEQ ID NO: 642120 - DNA, 33 bp, Homo sapien
agctccacatcctccagtacaaaggacatcctc

SEQ ID NO: 642121 - DNA, 33 bp, Homo sapien
gattaacagcctaataataaaccctgtaggcat

SEQ ID NO: 642122 - DNA, 33 bp, Homo sapien
gattaacagcctaatagtaaaccctgtaggcat

SEQ ID NO: 642123 - DNA, 33 bp, Homo sapien
gctagttcagctggcaacggtctaaataaaggt

SEQ ID NO: 642124 - DNA, 33 bp, Homo sapien
gctagttcagctggcagcggtctaaataaaggt

SEQ ID NO: 642125 - DNA, 33 bp, Homo sapien
ttgaaataaaagacgactcactatgtctaagta

SEQ ID NO: 642126 - DNA, 33 bp, Homo sapien
ttgaaataaaagacgagtcactatgtctaagta

SEQ ID NO: 642127 - DNA, 33 bp, Homo sapien
gtctcagaaatctcgacgcataaatccctgtgg

SEQ ID NO: 642128 - DNA, 33 bp, Homo sapien
gtctcagaaatctcgatgcataaatccctgtgg

SEQ ID NO: 642129 - DNA, 33 bp, Homo sapien
agggccagctgtctgcactttctgtcaagacct

SEQ ID NO: 642130 - DNA, 33 bp, Homo sapien
agggccagctgtctgcgctttctgtcaagacct

SEQ ID NO: 642131 - DNA, 33 bp, Homo sapien
taagctccctatgggcaacttccattctatatg

SEQ ID NO: 642132 - DNA, 33 bp, Homo sapien
taagctccctatgggcgacttccattctatatg

SEQ ID NO: 642133 - DNA, 33 bp, Homo sapien
ggcgcctatgctttgaagctctcgtcatagtat

SEQ ID NO: 642134 - DNA, 33 bp, Homo sapien
ggcgcctatgctttgatgctctcgtcatagtat

SEQ ID NO: 642135 - DNA, 33 bp, Homo sapien
acggtgtgtaagcctcaacgccgggcctggagg

SEQ ID NO: 642136 - DNA, 33 bp, Homo sapien
acggtgtgtaagcctcgacgccgggcctggagg

SEQ ID NO: 642137 - DNA, 33 bp, Homo sapien
gttccgggtagaattacggatttggaagcctag

SEQ ID NO: 642138 - DNA, 33 bp, Homo sapien
gttccgggtagaattatggatttggaagcctag

SEQ ID NO: 642139 - DNA, 33 bp, Homo sapien
ctccagctataagccacgcattgtggaagatac

SEQ ID NO: 642140 - DNA, 33 bp, Homo sapien
ctccagctataagccaggcattgtggaagatac

SEQ ID NO: 642141 - DNA, 33 bp, Homo sapien
tatgaaatattgggtgaatggtccaaagcaaaa

SEQ ID NO: 642142 - DNA, 33 bp, Homo sapien
tatgaaatattgggtggatggtccaaagcaaaa

SEQ ID NO: 642143 - DNA, 33 bp, Homo sapien
gaagagagaaggactaaattaagctcctccttt

SEQ ID NO: 642144 - DNA, 33 bp, Homo sapien
gaagagagaaggactacattaagctcctccttt

SEQ ID NO: 642145 - DNA, 33 bp, Homo sapien
acgctatttgaaacaacgcaagtgccagataca

SEQ ID NO: 642146 - DNA, 33 bp, Homo sapien
acgctatttgaaacaatgcaagtgccagataca

SEQ ID NO: 642147 - DNA, 33 bp, Homo sapien
gatagttctgtgggaaaagagactgcagaagtg

SEQ ID NO: 642148 - DNA, 33 bp, Homo sapien
gatagttctgtgggaagagagactgcagaagtg

SEQ ID NO: 642149 - DNA, 33 bp, Homo sapien
cagtagcagtactctccacctccccttcatgtc

SEQ ID NO: 642150 - DNA, 33 bp, Homo sapien
cagtagcagtactctctacctccccttcatgtc

SEQ ID NO: 642151 - DNA, 33 bp, Homo sapien
atacagctgctcccaccattttttgtacttgag

SEQ ID NO: 642152 - DNA, 33 bp, Homo sapien
atacagctgctcccactattttttgtacttgag

SEQ ID NO: 642153 - DNA, 33 bp, Homo sapien
atcctaaatgcatatgcaccaagcaacagagct

SEQ ID NO: 642154 - DNA, 33 bp, Homo sapien
atcctaaatgcatatgtaccaagcaacagagct

SEQ ID NO: 642155 - DNA, 33 bp, Homo sapien
gtggctatagtaagtcaaataaagcagagctga

SEQ ID NO: 642156 - DNA, 33 bp, Homo sapien
gtggctatagtaagtccaataaagcagagctga

SEQ ID NO: 642157 - DNA, 33 bp, Homo sapien
taggagtttatttagcactttccaaagagacta

SEQ ID NO: 642158 - DNA, 33 bp, Homo sapien
taggagtttatttagcgctttccaaagagacta

SEQ ID NO: 642159 - DNA, 33 bp, Homo sapien
tcttacctcaatagcagggatggaaagcatgtg

SEQ ID NO: 642160 - DNA, 33 bp, Homo sapien
tcttacctcaatagcatggatggaaagcatgtg

SEQ ID NO: 642161 - DNA, 33 bp, Homo sapien
atacatctggtcaccaatgggatgttcacaaac

SEQ ID NO: 642162 - DNA, 33 bp, Homo sapien
atacatctggtcaccactgggatgttcacaaac

SEQ ID NO: 642163 - DNA, 33 bp, Homo sapien
accatgagctctttaccaggctgaaatgaaatt

SEQ ID NO: 642164 - DNA, 33 bp, Homo sapien
accatgagctctttacgaggctgaaatgaaatt

SEQ ID NO: 642165 - DNA, 33 bp, Homo sapien
ctttgtcatacagtacaccctggtagagacagt

SEQ ID NO: 642166 - DNA, 33 bp, Homo sapien
ctttgtcatacagtacgccctggtagagacagt

SEQ ID NO: 642167 - DNA, 33 bp, Homo sapien
atatacagttgattaagtgacattgaactcaca

SEQ ID NO: 642168 - DNA, 33 bp, Homo sapien
atatacagttgattaattgacattgaactcaca

SEQ ID NO: 642169 - DNA, 33 bp, Homo sapien
taagccccacaaattacgtagccagttctgccc

SEQ ID NO: 642170 - DNA, 33 bp, Homo sapien
taagccccacaaattatgtagccagttctgccc

SEQ ID NO: 642171 - DNA, 33 bp, Homo sapien
ctgactatggggacaacccacacctgctcagtg

SEQ ID NO: 642172 - DNA, 33 bp, Homo sapien
ctgactatggggacaatccacacctgctcagtg

SEQ ID NO: 642173 - DNA, 33 bp, Homo sapien
caaagtgaagaggggaataagagagttacctgt

SEQ ID NO: 642174 - DNA, 33 bp, Homo sapien
caaagtgaagaggggagtaagagagttacctgt

SEQ ID NO: 642175 - DNA, 33 bp, Homo sapien
gctgcaatgatcatataagtgcaattgtcttta

SEQ ID NO: 642176 - DNA, 33 bp, Homo sapien
gctgcaatgatcatatgagtgcaattgtcttta

SEQ ID NO: 642177 - DNA, 33 bp, Homo sapien
gattgggcataagaaacagtgagatactgggtg

SEQ ID NO: 642178 - DNA, 33 bp, Homo sapien
gattgggcataagaaagagtgagatactgggtg

SEQ ID NO: 642179 - DNA, 33 bp, Homo sapien
agcattgccatcttccaattatcatgcactgaa

SEQ ID NO: 642180 - DNA, 33 bp, Homo sapien
agcattgccatcttcctattatcatgcactgaa

SEQ ID NO: 642181 - DNA, 33 bp, Homo sapien
acccactcattatacgaaggtgccagcccctga

SEQ ID NO: 642182 - DNA, 33 bp, Homo sapien
acccactcattatacggaggtgccagcccctga

SEQ ID NO: 642183 - DNA, 33 bp, Homo sapien
cctctgcgtccccttcacaaggacatgtgccca

SEQ ID NO: 642184 - DNA, 33 bp, Homo sapien
cctctgcgtccccttcgcaaggacatgtgccca

SEQ ID NO: 642185 - DNA, 33 bp, Homo sapien
cagtggtcacaagatacatataggcccaaaaga

SEQ ID NO: 642186 - DNA, 33 bp, Homo sapien
cagtggtcacaagatatatataggcccaaaaga

SEQ ID NO: 642187 - DNA, 33 bp, Homo sapien
gttttaagaacaaagactctgtcagatgtctga

SEQ ID NO: 642188 - DNA, 33 bp, Homo sapien
gttttaagaacaaagagtctgtcagatgtctga

SEQ ID NO: 642189 - DNA, 33 bp, Homo sapien
attttgtacatcagaagactttttgctttctac

SEQ ID NO: 642190 - DNA, 33 bp, Homo sapien
attttgtacatcagaatactttttgctttctac

SEQ ID NO: 642191 - DNA, 33 bp, Homo sapien
gctcagtatcacactcaagcctgaggaccccag

SEQ ID NO: 642192 - DNA, 33 bp, Homo sapien
gctcagtatcacactcgagcctgaggaccccag

SEQ ID NO: 642193 - DNA, 33 bp, Homo sapien
aacacatctttcacaccctcacattggacatcc

SEQ ID NO: 642194 - DNA, 33 bp, Homo sapien
aacacatctttcacactctcacattggacatcc

SEQ ID NO: 642195 - DNA, 33 bp, Homo sapien
tttgatggggtcagtaagaccagattgaatgct

SEQ ID NO: 642196 - DNA, 33 bp, Homo sapien
tttgatggggtcagtacgaccagattgaatgct

SEQ ID NO: 642197 - DNA, 33 bp, Homo sapien
attcagctttgtgagacgttattggtgcaaaaa

SEQ ID NO: 642198 - DNA, 33 bp, Homo sapien
attcagctttgtgagatgttattggtgcaaaaa

SEQ ID NO: 642199 - DNA, 33 bp, Homo sapien
agggggagccacatgtaaaaaaggctggaattg

SEQ ID NO: 642200 - DNA, 33 bp, Homo sapien
agggggagccacatgttaaaaaggctggaattg

SEQ ID NO: 642201 - DNA, 33 bp, Homo sapien
atactaaaggagcactcaacagaggtttgtaac

SEQ ID NO: 642202 - DNA, 33 bp, Homo sapien
atactaaaggagcacttaacagaggtttgtaac

SEQ ID NO: 642203 - DNA, 33 bp, Homo sapien
gactttctggacattcaatccagtaggcttccc

SEQ ID NO: 642204 - DNA, 33 bp, Homo sapien
gactttctggacattcgatccagtaggcttccc

SEQ ID NO: 642205 - DNA, 33 bp, Homo sapien
taactaatctagtacaactttttaactggctgt

SEQ ID NO: 642206 - DNA, 33 bp, Homo sapien
taactaatctagtacagctttttaactggctgt

SEQ ID NO: 642207 - DNA, 33 bp, Homo sapien
actctaaatgtagtagcaattggatgaaaagta

SEQ ID NO: 642208 - DNA, 33 bp, Homo sapien
actctaaatgtagtagtaattggatgaaaagta

SEQ ID NO: 642209 - DNA, 33 bp, Homo sapien
actattggcttagaaacatatccatgatagaat

SEQ ID NO: 642210 - DNA, 33 bp, Homo sapien
actattggcttagaaagatatccatgatagaat

SEQ ID NO: 642211 - DNA, 33 bp, Homo sapien
ctgggaagatgaacaactatgccaatagaaaat

SEQ ID NO: 642212 - DNA, 33 bp, Homo sapien
ctgggaagatgaacaattatgccaatagaaaat

SEQ ID NO: 642213 - DNA, 33 bp, Homo sapien
cagtgttgtcctttcaactatactgagatcccc

SEQ ID NO: 642214 - DNA, 33 bp, Homo sapien
cagtgttgtcctttcagctatactgagatcccc

SEQ ID NO: 642215 - DNA, 33 bp, Homo sapien
ctccctattcagtaaaagctactgggataactg

SEQ ID NO: 642216 - DNA, 33 bp, Homo sapien
ctccctattcagtaaatgctactgggataactg

SEQ ID NO: 642217 - DNA, 33 bp, Homo sapien
ccaaaagcgattacaacgaaagcaaaaattgac

SEQ ID NO: 642218 - DNA, 33 bp, Homo sapien
ccaaaagcgattacaatgaaagcaaaaattgac

SEQ ID NO: 642219 - DNA, 33 bp, Homo sapien
caagctaagcatttgaagagtgagaaactgaaa

SEQ ID NO: 642220 - DNA, 33 bp, Homo sapien
caagctaagcatttgaggagtgagaaactgaaa

SEQ ID NO: 642221 - DNA, 33 bp, Homo sapien
aaaaataaaaggcaacaatagtcagaccacaga

SEQ ID NO: 642222 - DNA, 33 bp, Homo sapien
aaaaataaaaggcaacgatagtcagaccacaga

SEQ ID NO: 642223 - DNA, 33 bp, Homo sapien
tttgcatgacagtggcagacttgaatagctggg

SEQ ID NO: 642224 - DNA, 33 bp, Homo sapien
tttgcatgacagtggccgacttgaatagctggg

SEQ ID NO: 642225 - DNA, 33 bp, Homo sapien
agatttagatacctcaaagagactaattttttt

SEQ ID NO: 642226 - DNA, 33 bp, Homo sapien
agatttagatacctcatagagactaattttttt

SEQ ID NO: 642227 - DNA, 33 bp, Homo sapien
acaagagagatgtaaggaaggaagtaatatatt

SEQ ID NO: 642228 - DNA, 33 bp, Homo sapien
acaagagagatgtaagtaaggaagtaatatatt

SEQ ID NO: 642229 - DNA, 33 bp, Homo sapien
ttaggcaggaaacagaagcatctacctgctatg

SEQ ID NO: 642230 - DNA, 33 bp, Homo sapien
ttaggcaggaaacagaggcatctacctgctatg

SEQ ID NO: 642231 - DNA, 33 bp, Homo sapien
aataggatgtttagtacggagtaatggtgattg

SEQ ID NO: 642232 - DNA, 33 bp, Homo sapien
aataggatgtttagtatggagtaatggtgattg

SEQ ID NO: 642233 - DNA, 33 bp, Homo sapien
caacgaaatgaaacaacgtacagcaggtcctca

SEQ ID NO: 642234 - DNA, 33 bp, Homo sapien
caacgaaatgaaacaatgtacagcaggtcctca

SEQ ID NO: 642235 - DNA, 33 bp, Homo sapien
ctggtttcagatgccaactccacagctttctgg

SEQ ID NO: 642236 - DNA, 33 bp, Homo sapien
ctggtttcagatgccagctccacagctttctgg

SEQ ID NO: 642237 - DNA, 33 bp, Homo sapien
tgggggttattcgaataatagagcgacaagctg

SEQ ID NO: 642238 - DNA, 33 bp, Homo sapien
tgggggttattcgaatgatagagcgacaagctg

SEQ ID NO: 642239 - DNA, 33 bp, Homo sapien
aattttttttccctaactcaaatctcaatcaga

SEQ ID NO: 642240 - DNA, 33 bp, Homo sapien
aattttttttccctaattcaaatctcaatcaga

SEQ ID NO: 642241 - DNA, 33 bp, Homo sapien
gaatgctagttagacacgcatacactttaattt

SEQ ID NO: 642242 - DNA, 33 bp, Homo sapien
gaatgctagttagacatgcatacactttaattt

SEQ ID NO: 642243 - DNA, 33 bp, Homo sapien
catgttccagatattaagaatctaaacaagtaa

SEQ ID NO: 642244 - DNA, 33 bp, Homo sapien
catgttccagatattaggaatctaaacaagtaa

SEQ ID NO: 642245 - DNA, 33 bp, Homo sapien
tgcacgcaatttaaacactggttttctctggtc

SEQ ID NO: 642246 - DNA, 33 bp, Homo sapien
tgcacgcaatttaaacgctggttttctctggtc

SEQ ID NO: 642247 - DNA, 33 bp, Homo sapien
taattttaaaagacaacgtgttcttatgatatc

SEQ ID NO: 642248 - DNA, 33 bp, Homo sapien
taattttaaaagacaaggtgttcttatgatatc

SEQ ID NO: 642249 - DNA, 33 bp, Homo sapien
taaatttcgttatgtgcactttatctcagtgtt

SEQ ID NO: 642250 - DNA, 33 bp, Homo sapien
taaatttcgttatgtgtactttatctcagtgtt

SEQ ID NO: 642251 - DNA, 33 bp, Homo sapien
aaaattgtcttcttccacttttaatgtgtatat

SEQ ID NO: 642252 - DNA, 33 bp, Homo sapien
aaaattgtcttcttccgcttttaatgtgtatat

SEQ ID NO: 642253 - DNA, 33 bp, Homo sapien
ctgcagtgtgttctcaaaagggcttgctggctg

SEQ ID NO: 642254 - DNA, 33 bp, Homo sapien
ctgcagtgtgttctcagaagggcttgctggctg

SEQ ID NO: 642255 - DNA, 33 bp, Homo sapien
ctgtgcattgattagcactaagttacattctag

SEQ ID NO: 642256 - DNA, 33 bp, Homo sapien
ctgtgcattgattagcgctaagttacattctag

SEQ ID NO: 642257 - DNA, 33 bp, Homo sapien
gtgtggagacagagtaccaacagaagcaaaacc

SEQ ID NO: 642258 - DNA, 33 bp, Homo sapien
gtgtggagacagagtagcaacagaagcaaaacc

SEQ ID NO: 642259 - DNA, 33 bp, Homo sapien
tcactttaatcctttccatctgaaggagcctgc

SEQ ID NO: 642260 - DNA, 33 bp, Homo sapien
tcactttaatcctttcgatctgaaggagcctgc

SEQ ID NO: 642261 - DNA, 33 bp, Homo sapien
caggttccaggcagcacgaaggagaaagaagag

SEQ ID NO: 642262 - DNA, 33 bp, Homo sapien
caggttccaggcagcatgaaggagaaagaagag

SEQ ID NO: 642263 - DNA, 33 bp, Homo sapien
aagatgtaaatagaaacgttgtgtgagactccc

SEQ ID NO: 642264 - DNA, 33 bp, Homo sapien
aagatgtaaatagaaatgttgtgtgagactccc

SEQ ID NO: 642265 - DNA, 33 bp, Homo sapien
gtttgaaggcaatgtacccagttgaaaaccagg

SEQ ID NO: 642266 - DNA, 33 bp, Homo sapien
gtttgaaggcaatgtatccagttgaaaaccagg

SEQ ID NO: 642267 - DNA, 33 bp, Homo sapien
cctcctgggtcccttaagaacgtctcatctaag

SEQ ID NO: 642268 - DNA, 33 bp, Homo sapien
cctcctgggtcccttaggaacgtctcatctaag

SEQ ID NO: 642269 - DNA, 33 bp, Homo sapien
gctactaaatacaagaataactaggaagtagaa

SEQ ID NO: 642270 - DNA, 33 bp, Homo sapien
gctactaaatacaagagtaactaggaagtagaa

SEQ ID NO: 642271 - DNA, 33 bp, Homo sapien
agactggtgggacctcaaaccaagaaaacagcc

SEQ ID NO: 642272 - DNA, 33 bp, Homo sapien
agactggtgggacctcgaaccaagaaaacagcc

SEQ ID NO: 642273 - DNA, 33 bp, Homo sapien
catatcttttacgttgaaacctgatacacacat

SEQ ID NO: 642274 - DNA, 33 bp, Homo sapien
catatcttttacgttgcaacctgatacacacat

SEQ ID NO: 642275 - DNA, 33 bp, Homo sapien
agctctgaaccaggccactacattgccaccaaa

SEQ ID NO: 642276 - DNA, 33 bp, Homo sapien
agctctgaaccaggccgctacattgccaccaaa

SEQ ID NO: 642277 - DNA, 33 bp, Homo sapien
caaaagcttgtactgacacaaacacataaattc

SEQ ID NO: 642278 - DNA, 33 bp, Homo sapien
caaaagcttgtactgatacaaacacataaattc

SEQ ID NO: 642279 - DNA, 33 bp, Homo sapien
caagttgtagtagagacacattggggactccag

SEQ ID NO: 642280 - DNA, 33 bp, Homo sapien
caagttgtagtagagatacattggggactccag

SEQ ID NO: 642281 - DNA, 33 bp, Homo sapien
tttagcaggggtttaaagtctgaagagattaag

SEQ ID NO: 642282 - DNA, 33 bp, Homo sapien
tttagcaggggtttaaggtctgaagagattaag

SEQ ID NO: 642283 - DNA, 33 bp, Homo sapien
aggaccaaagcttacccctggccacctattagt

SEQ ID NO: 642284 - DNA, 33 bp, Homo sapien
aggaccaaagcttacctctggccacctattagt

SEQ ID NO: 642285 - DNA, 33 bp, Homo sapien
tgatgattaaaccaaagtagttggctaactgct

SEQ ID NO: 642286 - DNA, 33 bp, Homo sapien
tgatgattaaaccaaattagttggctaactgct

SEQ ID NO: 642287 - DNA, 33 bp, Homo sapien
ggttgaatcactgtcactaaaagatcaaaacca

SEQ ID NO: 642288 - DNA, 33 bp, Homo sapien
ggttgaatcactgtcattaaaagatcaaaacca

SEQ ID NO: 642289 - DNA, 33 bp, Homo sapien
ggatactgtggcaaatcaatcaggtttacatgg

SEQ ID NO: 642290 - DNA, 33 bp, Homo sapien
ggatactgtggcaaattaatcaggtttacatgg

SEQ ID NO: 642291 - DNA, 33 bp, Homo sapien
gtgtaatcaaaatgagcccaaatcaagtcaaat

SEQ ID NO: 642292 - DNA, 33 bp, Homo sapien
gtgtaatcaaaatgagtccaaatcaagtcaaat

SEQ ID NO: 642293 - DNA, 33 bp, Homo sapien
ctgaggttatgattcgcattgattaatctcatg

SEQ ID NO: 642294 - DNA, 33 bp, Homo sapien
ctgaggttatgattcgtattgattaatctcatg

SEQ ID NO: 642295 - DNA, 33 bp, Homo sapien
gggcaagtggtgcctaagtccagcttacatttc

SEQ ID NO: 642296 - DNA, 33 bp, Homo sapien
gggcaagtggtgcctaggtccagcttacatttc

SEQ ID NO: 642297 - DNA, 33 bp, Homo sapien
aaaaggctcttgcagacaaactcagctctgaac

SEQ ID NO: 642298 - DNA, 33 bp, Homo sapien
aaaaggctcttgcagataaactcagctctgaac

SEQ ID NO: 642299 - DNA, 33 bp, Homo sapien
tctcagaatattcaagaccttactccattgctt

SEQ ID NO: 642300 - DNA, 33 bp, Homo sapien
tctcagaatattcaaggccttactccattgctt

SEQ ID NO: 642301 - DNA, 33 bp, Homo sapien
tctctctcctctctacccacttcccagacaatg

SEQ ID NO: 642302 - DNA, 33 bp, Homo sapien
tctctctcctctctacgcacttcccagacaatg

SEQ ID NO: 642303 - DNA, 33 bp, Homo sapien
atttcaaatgaaaccaatcagcacggttgtaac

SEQ ID NO: 642304 - DNA, 33 bp, Homo sapien
atttcaaatgaaaccagtcagcacggttgtaac

SEQ ID NO: 642305 - DNA, 33 bp, Homo sapien
aggcgccacttgcaatgacagtgctaagcctat

SEQ ID NO: 642306 - DNA, 33 bp, Homo sapien
aggcgccacttgcaattacagtgctaagcctat

SEQ ID NO: 642307 - DNA, 33 bp, Homo sapien
gcatttttgaaaacaagatggagtcaacgtact

SEQ ID NO: 642308 - DNA, 33 bp, Homo sapien
gcatttttgaaaacaatatggagtcaacgtact

SEQ ID NO: 642309 - DNA, 33 bp, Homo sapien
accacgctgaaaggaaaatggtgtagtgagaaa

SEQ ID NO: 642310 - DNA, 33 bp, Homo sapien
accacgctgaaaggaagatggtgtagtgagaaa

SEQ ID NO: 642311 - DNA, 33 bp, Homo sapien
tctgccttcctcttcacgtggtgtcctgtgtgt

SEQ ID NO: 642312 - DNA, 33 bp, Homo sapien
tctgccttcctcttcatgtggtgtcctgtgtgt

SEQ ID NO: 642313 - DNA, 33 bp, Homo sapien
tttgagctcaagtcacaccggactgtctgtctg

SEQ ID NO: 642314 - DNA, 33 bp, Homo sapien
tttgagctcaagtcacgccggactgtctgtctg

SEQ ID NO: 642315 - DNA, 33 bp, Homo sapien
ttcaggattagttgcaactgaaagctaaagaaa

SEQ ID NO: 642316 - DNA, 33 bp, Homo sapien
ttcaggattagttgcagctgaaagctaaagaaa

SEQ ID NO: 642317 - DNA, 33 bp, Homo sapien
tttgttcttgtgtttacgcagaagaagcacgac

SEQ ID NO: 642318 - DNA, 33 bp, Homo sapien
tttgttcttgtgtttatgcagaagaagcacgac

SEQ ID NO: 642319 - DNA, 33 bp, Homo sapien
aatgacccttagaagcaattccaggatggttag

SEQ ID NO: 642320 - DNA, 33 bp, Homo sapien
aatgacccttagaagcgattccaggatggttag

SEQ ID NO: 642321 - DNA, 33 bp, Homo sapien
atgtgtagtgaggccacacaagttaaactaatt

SEQ ID NO: 642322 - DNA, 33 bp, Homo sapien
atgtgtagtgaggccagacaagttaaactaatt

SEQ ID NO: 642323 - DNA, 33 bp, Homo sapien
tctggtcagtcagttcaagaaggttaattaata

SEQ ID NO: 642324 - DNA, 33 bp, Homo sapien
tctggtcagtcagttcgagaaggttaattaata

SEQ ID NO: 642325 - DNA, 33 bp, Homo sapien
aaacagatactgacaacggaagaagggctgtaa

SEQ ID NO: 642326 - DNA, 33 bp, Homo sapien
aaacagatactgacaatggaagaagggctgtaa

SEQ ID NO: 642327 - DNA, 33 bp, Homo sapien
gagaaaacacaggggcaaccctaacatcagctg

SEQ ID NO: 642328 - DNA, 33 bp, Homo sapien
gagaaaacacaggggcgaccctaacatcagctg

SEQ ID NO: 642329 - DNA, 33 bp, Homo sapien
caatggactttttaaacagcgaaaggattatta

SEQ ID NO: 642330 - DNA, 33 bp, Homo sapien
caatggactttttaaagagcgaaaggattatta

SEQ ID NO: 642331 - DNA, 33 bp, Homo sapien
aagtcgtctttgtgtccaactgatgtgtctcac

SEQ ID NO: 642332 - DNA, 33 bp, Homo sapien
aagtcgtctttgtgtctaactgatgtgtctcac

SEQ ID NO: 642333 - DNA, 33 bp, Homo sapien
ctataatatctggagcaactgcttcaaattatc

SEQ ID NO: 642334 - DNA, 33 bp, Homo sapien
ctataatatctggagctactgcttcaaattatc

SEQ ID NO: 642335 - DNA, 33 bp, Homo sapien
gaaaactaaggcatcaagagatgaataacctgc

SEQ ID NO: 642336 - DNA, 33 bp, Homo sapien
gaaaactaaggcatcaggagatgaataacctgc

SEQ ID NO: 642337 - DNA, 33 bp, Homo sapien
atccttattctgaagacgggatgaaatcatgtg

SEQ ID NO: 642338 - DNA, 33 bp, Homo sapien
atccttattctgaagatgggatgaaatcatgtg

SEQ ID NO: 642339 - DNA, 33 bp, Homo sapien
gacctgggctgtaaagcaaaggaggccgaggtg

SEQ ID NO: 642340 - DNA, 33 bp, Homo sapien
gacctgggctgtaaaggaaaggaggccgaggtg

SEQ ID NO: 642341 - DNA, 33 bp, Homo sapien
tgtgctgagcatggagacattcgcaatcattat

SEQ ID NO: 642342 - DNA, 33 bp, Homo sapien
tgtgctgagcatggagtcattcgcaatcattat

SEQ ID NO: 642343 - DNA, 33 bp, Homo sapien
tgcatcagtgtagttagcaagtgtgcccagctg

SEQ ID NO: 642344 - DNA, 33 bp, Homo sapien
tgcatcagtgtagttatcaagtgtgcccagctg

SEQ ID NO: 642345 - DNA, 33 bp, Homo sapien
atcagcttgtgataaaaaataagctgaaatagt

SEQ ID NO: 642346 - DNA, 33 bp, Homo sapien
atcagcttgtgataaagaataagctgaaatagt

SEQ ID NO: 642347 - DNA, 33 bp, Homo sapien
cgagacacacctgagacgtgaataaaccagtcc

SEQ ID NO: 642348 - DNA, 33 bp, Homo sapien
cgagacacacctgagatgtgaataaaccagtcc

SEQ ID NO: 642349 - DNA, 33 bp, Homo sapien
tgccgctgtcttgaggacattttctttgggctg

SEQ ID NO: 642350 - DNA, 33 bp, Homo sapien
tgccgctgtcttgagggcattttctttgggctg

SEQ ID NO: 642351 - DNA, 33 bp, Homo sapien
tacagagtctgtaaatgactggcctgctgaaca

SEQ ID NO: 642352 - DNA, 33 bp, Homo sapien
tacagagtctgtaaattactggcctgctgaaca

SEQ ID NO: 642353 - DNA, 33 bp, Homo sapien
cacatgggcaaagagactacccatggaccatga

SEQ ID NO: 642354 - DNA, 33 bp, Homo sapien
cacatgggcaaagagattacccatggaccatga

SEQ ID NO: 642355 - DNA, 33 bp, Homo sapien
gcctttgatacattgggcacattcacatgggca

SEQ ID NO: 642356 - DNA, 33 bp, Homo sapien
gcctttgatacattggtcacattcacatgggca

SEQ ID NO: 642357 - DNA, 33 bp, Homo sapien
cctagacagagtctcaatctgattcacactccc

SEQ ID NO: 642358 - DNA, 33 bp, Homo sapien
cctagacagagtctcagtctgattcacactccc

SEQ ID NO: 642359 - DNA, 33 bp, Homo sapien
acatgtcatgtgtacacaaaaaaagtatgtgtt

SEQ ID NO: 642360 - DNA, 33 bp, Homo sapien
acatgtcatgtgtacataaaaaaagtatgtgtt

SEQ ID NO: 642361 - DNA, 33 bp, Homo sapien
ttgcctttcaactgcaaactttcccaatcaaaa

SEQ ID NO: 642362 - DNA, 33 bp, Homo sapien
ttgcctttcaactgcagactttcccaatcaaaa

SEQ ID NO: 642363 - DNA, 33 bp, Homo sapien
gggagaaacacattccaaattgacttagacaac

SEQ ID NO: 642364 - DNA, 33 bp, Homo sapien
gggagaaacacattccgaattgacttagacaac

SEQ ID NO: 642365 - DNA, 33 bp, Homo sapien
ccatttattatgtcacacagttgctgaatgtca

SEQ ID NO: 642366 - DNA, 33 bp, Homo sapien
ccatttattatgtcacgcagttgctgaatgtca

SEQ ID NO: 642367 - DNA, 33 bp, Homo sapien
tgaaagtgcctatcaacgtggcagtgggagcaa

SEQ ID NO: 642368 - DNA, 33 bp, Homo sapien
tgaaagtgcctatcaatgtggcagtgggagcaa

SEQ ID NO: 642369 - DNA, 33 bp, Homo sapien
ttagaaatactgcataggtaaagtaaacttcct

SEQ ID NO: 642370 - DNA, 33 bp, Homo sapien
ttagaaatactgcatatgtaaagtaaacttcct

SEQ ID NO: 642371 - DNA, 33 bp, Homo sapien
ttggtttatgttgagactactgagcaaatgcta

SEQ ID NO: 642372 - DNA, 33 bp, Homo sapien
ttggtttatgttgagagtactgagcaaatgcta

SEQ ID NO: 642373 - DNA, 33 bp, Homo sapien
gtggttgcacctacccacaaaatgtaccacaga

SEQ ID NO: 642374 - DNA, 33 bp, Homo sapien
gtggttgcacctacccgcaaaatgtaccacaga

SEQ ID NO: 642375 - DNA, 33 bp, Homo sapien
tactttggccaaatcccgaatctgtatagaact

SEQ ID NO: 642376 - DNA, 33 bp, Homo sapien
tactttggccaaatcctgaatctgtatagaact

SEQ ID NO: 642377 - DNA, 33 bp, Homo sapien
tctctggcatggacaggctcctttttgccagca

SEQ ID NO: 642378 - DNA, 33 bp, Homo sapien
tctctggcatggacagtctcctttttgccagca

SEQ ID NO: 642379 - DNA, 33 bp, Homo sapien
caagccgagagacttaggtgtgcagaaaaccaa

SEQ ID NO: 642380 - DNA, 33 bp, Homo sapien
caagccgagagacttatgtgtgcagaaaaccaa

SEQ ID NO: 642381 - DNA, 33 bp, Homo sapien
cctacatggctctgagccctctgacacaaagac

SEQ ID NO: 642382 - DNA, 33 bp, Homo sapien
cctacatggctctgagtcctctgacacaaagac

SEQ ID NO: 642383 - DNA, 33 bp, Homo sapien
acagaatttctgtgtaaggtaatgaaaaggtta

SEQ ID NO: 642384 - DNA, 33 bp, Homo sapien
acagaatttctgtgtagggtaatgaaaaggtta

SEQ ID NO: 642385 - DNA, 33 bp, Homo sapien
gcagtccttcaacgcacggggcttctatttcct

SEQ ID NO: 642386 - DNA, 33 bp, Homo sapien
gcagtccttcaacgcatggggcttctatttcct

SEQ ID NO: 642387 - DNA, 33 bp, Homo sapien
agaatcagagaattaaaaagtagaaggccattt

SEQ ID NO: 642388 - DNA, 33 bp, Homo sapien
agaatcagagaattaagaagtagaaggccattt

SEQ ID NO: 642389 - DNA, 33 bp, Homo sapien
catgagatcaggactcaccggtcttcactgatg

SEQ ID NO: 642390 - DNA, 33 bp, Homo sapien
catgagatcaggactcgccggtcttcactgatg

SEQ ID NO: 642391 - DNA, 33 bp, Homo sapien
ctaagagagtcgtcccacttcctgcttgggcct

SEQ ID NO: 642392 - DNA, 33 bp, Homo sapien
ctaagagagtcgtcccgcttcctgcttgggcct

SEQ ID NO: 642393 - DNA, 33 bp, Homo sapien
gttttattttgtttgacagtggcagcctgaccc

SEQ ID NO: 642394 - DNA, 33 bp, Homo sapien
gttttattttgtttgatagtggcagcctgaccc

SEQ ID NO: 642395 - DNA, 33 bp, Homo sapien
catatctgtaatttacacatctgctttgaaaat

SEQ ID NO: 642396 - DNA, 33 bp, Homo sapien
catatctgtaatttacgcatctgctttgaaaat

SEQ ID NO: 642397 - DNA, 33 bp, Homo sapien
acgtacttaagatgaaacaggtctaattgcaaa

SEQ ID NO: 642398 - DNA, 33 bp, Homo sapien
acgtacttaagatgaatcaggtctaattgcaaa

SEQ ID NO: 642399 - DNA, 33 bp, Homo sapien
ctataaaatggagataaccccagcttttgcaaa

SEQ ID NO: 642400 - DNA, 33 bp, Homo sapien
ctataaaatggagatacccccagcttttgcaaa

SEQ ID NO: 642401 - DNA, 33 bp, Homo sapien
ctttgatatgtttacaaccttgactattaaaaa

SEQ ID NO: 642402 - DNA, 33 bp, Homo sapien
ctttgatatgtttacagccttgactattaaaaa

SEQ ID NO: 642403 - DNA, 33 bp, Homo sapien
gtttattctgaagctacgctaattccattggca

SEQ ID NO: 642404 - DNA, 33 bp, Homo sapien
gtttattctgaagctatgctaattccattggca

SEQ ID NO: 642405 - DNA, 33 bp, Homo sapien
caaggacaccaggagaatatggaatggagcact

SEQ ID NO: 642406 - DNA, 33 bp, Homo sapien
caaggacaccaggagagtatggaatggagcact

SEQ ID NO: 642407 - DNA, 33 bp, Homo sapien
gtgctgaccctaaactcaggactgtccacaaag

SEQ ID NO: 642408 - DNA, 33 bp, Homo sapien
gtgctgaccctaaacttaggactgtccacaaag

SEQ ID NO: 642409 - DNA, 33 bp, Homo sapien
taaaaatacacgttccccttcaccaggcctttc

SEQ ID NO: 642410 - DNA, 33 bp, Homo sapien
taaaaatacacgttcctcttcaccaggcctttc

SEQ ID NO: 642411 - DNA, 33 bp, Homo sapien
tagagtccaacatatgcaaataattaaggcatt

SEQ ID NO: 642412 - DNA, 33 bp, Homo sapien
tagagtccaacatatggaaataattaaggcatt

SEQ ID NO: 642413 - DNA, 33 bp, Homo sapien
gtcttgttcctaaatccccatttgacagattgt

SEQ ID NO: 642414 - DNA, 33 bp, Homo sapien
gtcttgttcctaaatctccatttgacagattgt

SEQ ID NO: 642415 - DNA, 33 bp, Homo sapien
acacagcagagaagaaaacaagagtcctgcctt

SEQ ID NO: 642416 - DNA, 33 bp, Homo sapien
acacagcagagaagaatacaagagtcctgcctt

SEQ ID NO: 642417 - DNA, 33 bp, Homo sapien
ctggccaaaaagtaaacgctgcgtatgaataca

SEQ ID NO: 642418 - DNA, 33 bp, Homo sapien
ctggccaaaaagtaaaggctgcgtatgaataca

SEQ ID NO: 642419 - DNA, 33 bp, Homo sapien
taatctattgctccaaatgaccggctgcctaga

SEQ ID NO: 642420 - DNA, 33 bp, Homo sapien
taatctattgctccaattgaccggctgcctaga

SEQ ID NO: 642421 - DNA, 33 bp, Homo sapien
atcatgctttttaatgcagggcttccatggtag

SEQ ID NO: 642422 - DNA, 33 bp, Homo sapien
atcatgctttttaatgtagggcttccatggtag

SEQ ID NO: 642423 - DNA, 33 bp, Homo sapien
ctgcatcctcaagaccaatgtgtcccataatca

SEQ ID NO: 642424 - DNA, 33 bp, Homo sapien
ctgcatcctcaagacctatgtgtcccataatca

SEQ ID NO: 642425 - DNA, 33 bp, Homo sapien
tgtgaagagggctgtcaagacaggagctgtgca

SEQ ID NO: 642426 - DNA, 33 bp, Homo sapien
tgtgaagagggctgtccagacaggagctgtgca

SEQ ID NO: 642427 - DNA, 33 bp, Homo sapien
tctgcaagtaaaatagcacaggatggcctctgg

SEQ ID NO: 642428 - DNA, 33 bp, Homo sapien
tctgcaagtaaaataggacaggatggcctctgg

SEQ ID NO: 642429 - DNA, 33 bp, Homo sapien
ctatgatgatgcaaacaaccaccagttaatgcc

SEQ ID NO: 642430 - DNA, 33 bp, Homo sapien
ctatgatgatgcaaacgaccaccagttaatgcc

SEQ ID NO: 642431 - DNA, 33 bp, Homo sapien
tgtttttaattggtcaccttgttaattctggaa

SEQ ID NO: 642432 - DNA, 33 bp, Homo sapien
tgtttttaattggtcatcttgttaattctggaa

SEQ ID NO: 642433 - DNA, 33 bp, Homo sapien
tatgtatatcagcaagaatgtggagctgctata

SEQ ID NO: 642434 - DNA, 33 bp, Homo sapien
tatgtatatcagcaagtatgtggagctgctata

SEQ ID NO: 642435 - DNA, 33 bp, Homo sapien
cataaacaagaagaaaacagatctcagaaaagt

SEQ ID NO: 642436 - DNA, 33 bp, Homo sapien
cataaacaagaagaaatcagatctcagaaaagt

SEQ ID NO: 642437 - DNA, 33 bp, Homo sapien
ttgccttccgaagcagacattgtatcaatgctc

SEQ ID NO: 642438 - DNA, 33 bp, Homo sapien
ttgccttccgaagcaggcattgtatcaatgctc

SEQ ID NO: 642439 - DNA, 33 bp, Homo sapien
tgtagaaggagtacaccctagaatgacaataaa

SEQ ID NO: 642440 - DNA, 33 bp, Homo sapien
tgtagaaggagtacactctagaatgacaataaa

SEQ ID NO: 642441 - DNA, 33 bp, Homo sapien
tttttctaaagagagaagacttcgcgttctttg

SEQ ID NO: 642442 - DNA, 33 bp, Homo sapien
tttttctaaagagagaggacttcgcgttctttg

SEQ ID NO: 642443 - DNA, 33 bp, Homo sapien
ggttactttcacagtaaaaggttagagttgaga

SEQ ID NO: 642444 - DNA, 33 bp, Homo sapien
ggttactttcacagtacaaggttagagttgaga

SEQ ID NO: 642445 - DNA, 33 bp, Homo sapien
agcatgtattttggagacagatctggttttgag

SEQ ID NO: 642446 - DNA, 33 bp, Homo sapien
agcatgtattttggagtcagatctggttttgag

SEQ ID NO: 642447 - DNA, 33 bp, Homo sapien
accagctgggggatggaacagacagtgactgtc

SEQ ID NO: 642448 - DNA, 33 bp, Homo sapien
accagctgggggatgggacagacagtgactgtc

SEQ ID NO: 642449 - DNA, 33 bp, Homo sapien
acaaaggcagaggaagaacagattttctctttc

SEQ ID NO: 642450 - DNA, 33 bp, Homo sapien
acaaaggcagaggaaggacagattttctctttc

SEQ ID NO: 642451 - DNA, 33 bp, Homo sapien
ctgtgccatctgcttccacattcagagcctcca

SEQ ID NO: 642452 - DNA, 33 bp, Homo sapien
ctgtgccatctgcttcgacattcagagcctcca

SEQ ID NO: 642453 - DNA, 33 bp, Homo sapien
agctaccagggcattacgaacgaaaaacataat

SEQ ID NO: 642454 - DNA, 33 bp, Homo sapien
agctaccagggcattatgaacgaaaaacataat

SEQ ID NO: 642455 - DNA, 33 bp, Homo sapien
accatggctagcttcaaaagcaacaaccagtgc

SEQ ID NO: 642456 - DNA, 33 bp, Homo sapien
accatggctagcttcagaagcaacaaccagtgc

SEQ ID NO: 642457 - DNA, 33 bp, Homo sapien
atgctctaccctgaaaaagcctcctgtcacagc

SEQ ID NO: 642458 - DNA, 33 bp, Homo sapien
atgctctaccctgaaatagcctcctgtcacagc

SEQ ID NO: 642459 - DNA, 33 bp, Homo sapien
tgcatggaagagtgaacccaaagggatgacaca

SEQ ID NO: 642460 - DNA, 33 bp, Homo sapien
tgcatggaagagtgaatccaaagggatgacaca

SEQ ID NO: 642461 - DNA, 33 bp, Homo sapien
cataggtttggctgaaacattgaccactggtca

SEQ ID NO: 642462 - DNA, 33 bp, Homo sapien
cataggtttggctgaagcattgaccactggtca

SEQ ID NO: 642463 - DNA, 33 bp, Homo sapien
taaaaagtcatgtcaaagaagtactaaagtgac

SEQ ID NO: 642464 - DNA, 33 bp, Homo sapien
taaaaagtcatgtcaaggaagtactaaagtgac

SEQ ID NO: 642465 - DNA, 33 bp, Homo sapien
ctaatcatgttggtcagtccaatcttctgtact

SEQ ID NO: 642466 - DNA, 33 bp, Homo sapien
ctaatcatgttggtcattccaatcttctgtact

SEQ ID NO: 642467 - DNA, 33 bp, Homo sapien
aatataaggatgaagacgttaacatgggactag

SEQ ID NO: 642468 - DNA, 33 bp, Homo sapien
aatataaggatgaagaggttaacatgggactag

SEQ ID NO: 642469 - DNA, 33 bp, Homo sapien
tatgtacgcaggagtgaaagaagttgatgtgtt

SEQ ID NO: 642470 - DNA, 33 bp, Homo sapien
tatgtacgcaggagtggaagaagttgatgtgtt

SEQ ID NO: 642471 - DNA, 33 bp, Homo sapien
aaagaggttagagttaagaaggataggaaatac

SEQ ID NO: 642472 - DNA, 33 bp, Homo sapien
aaagaggttagagttaggaaggataggaaatac

SEQ ID NO: 642473 - DNA, 33 bp, Homo sapien
taaagcaatcttgtgacgaatgcaggattattg

SEQ ID NO: 642474 - DNA, 33 bp, Homo sapien
taaagcaatcttgtgaggaatgcaggattattg

SEQ ID NO: 642475 - DNA, 33 bp, Homo sapien
tcatgagaccttgcagacaaagggctaggtgta

SEQ ID NO: 642476 - DNA, 33 bp, Homo sapien
tcatgagaccttgcaggcaaagggctaggtgta

SEQ ID NO: 642477 - DNA, 33 bp, Homo sapien
ccttctcatatcaggacgcaataaacatttgtt

SEQ ID NO: 642478 - DNA, 33 bp, Homo sapien
ccttctcatatcaggatgcaataaacatttgtt

SEQ ID NO: 642479 - DNA, 33 bp, Homo sapien
aaaagaaaaatttctcacggcctctcctgataa

SEQ ID NO: 642480 - DNA, 33 bp, Homo sapien
aaaagaaaaatttctcgcggcctctcctgataa

SEQ ID NO: 642481 - DNA, 33 bp, Homo sapien
aattattggctaaaatcagagaaaaatctcaga

SEQ ID NO: 642482 - DNA, 33 bp, Homo sapien
aattattggctaaaattagagaaaaatctcaga

SEQ ID NO: 642483 - DNA, 33 bp, Homo sapien
aggcatctacgttgtaagcttcttaagagaatc

SEQ ID NO: 642484 - DNA, 33 bp, Homo sapien
aggcatctacgttgtacgcttcttaagagaatc

SEQ ID NO: 642485 - DNA, 33 bp, Homo sapien
aatatttagagtacgcacatgggaaagatattc

SEQ ID NO: 642486 - DNA, 33 bp, Homo sapien
aatatttagagtacgcgcatgggaaagatattc

SEQ ID NO: 642487 - DNA, 33 bp, Homo sapien
atttcatagatcaccaaagaagccctagttatc

SEQ ID NO: 642488 - DNA, 33 bp, Homo sapien
atttcatagatcaccagagaagccctagttatc

SEQ ID NO: 642489 - DNA, 33 bp, Homo sapien
caaactctcttataaacgtgatgaaggaaggga

SEQ ID NO: 642490 - DNA, 33 bp, Homo sapien
caaactctcttataaatgtgatgaaggaaggga

SEQ ID NO: 642491 - DNA, 33 bp, Homo sapien
ggtgtcagaatactcaatgagcaacacgtatat

SEQ ID NO: 642492 - DNA, 33 bp, Homo sapien
ggtgtcagaatactcagtgagcaacacgtatat

SEQ ID NO: 642493 - DNA, 33 bp, Homo sapien
ccacactgcaagaagacgagttattttaaaatg

SEQ ID NO: 642494 - DNA, 33 bp, Homo sapien
ccacactgcaagaagatgagttattttaaaatg

SEQ ID NO: 642495 - DNA, 33 bp, Homo sapien
tacccttctcatcatgcattaagtgaaagtaat

SEQ ID NO: 642496 - DNA, 33 bp, Homo sapien
tacccttctcatcatgtattaagtgaaagtaat

SEQ ID NO: 642497 - DNA, 33 bp, Homo sapien
tccagttaacaaagaacatacaagcaggtgaaa

SEQ ID NO: 642498 - DNA, 33 bp, Homo sapien
tccagttaacaaagaatatacaagcaggtgaaa

SEQ ID NO: 642499 - DNA, 33 bp, Homo sapien
ggccatttaacttccaggcaccttaggctcttc

SEQ ID NO: 642500 - DNA, 33 bp, Homo sapien
ggccatttaacttccatgcaccttaggctcttc

SEQ ID NO: 642501 - DNA, 33 bp, Homo sapien
agatgcatgaggtcaccgtgaaaatgatctgta

SEQ ID NO: 642502 - DNA, 33 bp, Homo sapien
agatgcatgaggtcactgtgaaaatgatctgta

SEQ ID NO: 642503 - DNA, 33 bp, Homo sapien
atttttgagcttacacagtcaggaaaagataaa

SEQ ID NO: 642504 - DNA, 33 bp, Homo sapien
atttttgagcttacacggtcaggaaaagataaa

SEQ ID NO: 642505 - DNA, 33 bp, Homo sapien
tctaacagtgtaactactagaacagacaaggag

SEQ ID NO: 642506 - DNA, 33 bp, Homo sapien
tctaacagtgtaactagtagaacagacaaggag

SEQ ID NO: 642507 - DNA, 33 bp, Homo sapien
ctagttatctgctaaaatgaagacagagaagat

SEQ ID NO: 642508 - DNA, 33 bp, Homo sapien
ctagttatctgctaaactgaagacagagaagat

SEQ ID NO: 642509 - DNA, 33 bp, Homo sapien
tcctaaaagcttaccaaggattatctcattcaa

SEQ ID NO: 642510 - DNA, 33 bp, Homo sapien
tcctaaaagcttaccatggattatctcattcaa

SEQ ID NO: 642511 - DNA, 33 bp, Homo sapien
cataaacattgtttcccgatttgatctttggca

SEQ ID NO: 642512 - DNA, 33 bp, Homo sapien
cataaacattgtttcctgatttgatctttggca

SEQ ID NO: 642513 - DNA, 33 bp, Homo sapien
atgggaccacagttaaaaacgaggtatcctata

SEQ ID NO: 642514 - DNA, 33 bp, Homo sapien
atgggaccacagttaataacgaggtatcctata

SEQ ID NO: 642515 - DNA, 33 bp, Homo sapien
tacttctgtacaagtcccaggttttcacctgac

SEQ ID NO: 642516 - DNA, 33 bp, Homo sapien
tacttctgtacaagtcgcaggttttcacctgac

SEQ ID NO: 642517 - DNA, 33 bp, Homo sapien
tggacttgtatgaaaacggtggctctgctgcat

SEQ ID NO: 642518 - DNA, 33 bp, Homo sapien
tggacttgtatgaaaatggtggctctgctgcat

SEQ ID NO: 642519 - DNA, 33 bp, Homo sapien
aatcctgttagttctacctgaaaatgtgtccag

SEQ ID NO: 642520 - DNA, 33 bp, Homo sapien
aatcctgttagttctatctgaaaatgtgtccag

SEQ ID NO: 642521 - DNA, 33 bp, Homo sapien
tacacagagcaggagacggaatagcagttcaac

SEQ ID NO: 642522 - DNA, 33 bp, Homo sapien
tacacagagcaggagatggaatagcagttcaac

SEQ ID NO: 642523 - DNA, 33 bp, Homo sapien
ctgatgatttagatgaatatggggaattagaat

SEQ ID NO: 642524 - DNA, 33 bp, Homo sapien
ctgatgatttagatgagtatggggaattagaat

SEQ ID NO: 642525 - DNA, 33 bp, Homo sapien
gtagagtgcttgatcacagtacctaatatatat

SEQ ID NO: 642526 - DNA, 33 bp, Homo sapien
gtagagtgcttgatcatagtacctaatatatat

SEQ ID NO: 642527 - DNA, 33 bp, Homo sapien
agaaagcttgaggataaagcctaggcaggtaca

SEQ ID NO: 642528 - DNA, 33 bp, Homo sapien
agaaagcttgaggatacagcctaggcaggtaca

SEQ ID NO: 642529 - DNA, 33 bp, Homo sapien
aaaacgtactcaagacacttcctggtaaagagt

SEQ ID NO: 642530 - DNA, 33 bp, Homo sapien
aaaacgtactcaagactcttcctggtaaagagt

SEQ ID NO: 642531 - DNA, 33 bp, Homo sapien
tattgccgtaagtatacacactagttggattca

SEQ ID NO: 642532 - DNA, 33 bp, Homo sapien
tattgccgtaagtatatacactagttggattca

SEQ ID NO: 642533 - DNA, 33 bp, Homo sapien
agaattgggatgtgaacgacaatctgtttaaaa

SEQ ID NO: 642534 - DNA, 33 bp, Homo sapien
agaattgggatgtgaatgacaatctgtttaaaa

SEQ ID NO: 642535 - DNA, 33 bp, Homo sapien
atcatttgtcaggagacagaacgtgaatcagag

SEQ ID NO: 642536 - DNA, 33 bp, Homo sapien
atcatttgtcaggagatagaacgtgaatcagag

SEQ ID NO: 642537 - DNA, 33 bp, Homo sapien
ttttttgtatatgtccacttcaaaataaagagt

SEQ ID NO: 642538 - DNA, 33 bp, Homo sapien
ttttttgtatatgtccgcttcaaaataaagagt

SEQ ID NO: 642539 - DNA, 33 bp, Homo sapien
acaattttaaagaaacaaatagtaatgaggatc

SEQ ID NO: 642540 - DNA, 33 bp, Homo sapien
acaattttaaagaaacgaatagtaatgaggatc

SEQ ID NO: 642541 - DNA, 33 bp, Homo sapien
agcttcttgaggtgctcacttagctcgttggct

SEQ ID NO: 642542 - DNA, 33 bp, Homo sapien
agcttcttgaggtgcttacttagctcgttggct

SEQ ID NO: 642543 - DNA, 33 bp, Homo sapien
ctcatatttctctgcacgaccttttcaatctgc

SEQ ID NO: 642544 - DNA, 33 bp, Homo sapien
ctcatatttctctgcatgaccttttcaatctgc

SEQ ID NO: 642545 - DNA, 33 bp, Homo sapien
gatgtagctgaatctaagaagatgtgtacttgt

SEQ ID NO: 642546 - DNA, 33 bp, Homo sapien
gatgtagctgaatctatgaagatgtgtacttgt

SEQ ID NO: 642547 - DNA, 33 bp, Homo sapien
attgttgtggaaaagacgagaatatgtgtaaaa

SEQ ID NO: 642548 - DNA, 33 bp, Homo sapien
attgttgtggaaaagatgagaatatgtgtaaaa

SEQ ID NO: 642549 - DNA, 33 bp, Homo sapien
aacttactttattgcccacctactacatgacag

SEQ ID NO: 642550 - DNA, 33 bp, Homo sapien
aacttactttattgcctacctactacatgacag

SEQ ID NO: 642551 - DNA, 33 bp, Homo sapien
agatccatgaaatcaacgctaagaaatctgggc

SEQ ID NO: 642552 - DNA, 33 bp, Homo sapien
agatccatgaaatcaatgctaagaaatctgggc

SEQ ID NO: 642553 - DNA, 33 bp, Homo sapien
tctcacactgctataaagaaacacctcagactg

SEQ ID NO: 642554 - DNA, 33 bp, Homo sapien
tctcacactgctataaggaaacacctcagactg

SEQ ID NO: 642555 - DNA, 33 bp, Homo sapien
ctttttggaagactacaaagagctttattattt

SEQ ID NO: 642556 - DNA, 33 bp, Homo sapien
ctttttggaagactaccaagagctttattattt

SEQ ID NO: 642557 - DNA, 33 bp, Homo sapien; identical to SEQ ID NO: 642555

SEQ ID NO: 642558 - DNA, 33 bp, Homo sapien; identical to SEQ ID NO: 642556

SEQ ID NO: 642559 - DNA, 33 bp, Homo sapien
cataatgactaataaccgtggctgatatcattg

SEQ ID NO: 642560 - DNA, 33 bp, Homo sapien
cataatgactaataactgtggctgatatcattg

SEQ ID NO: 642561 - DNA, 33 bp, Homo sapien
aggcactcaaaatataaacactcagcataagac

SEQ ID NO: 642562 - DNA, 33 bp, Homo sapien
aggcactcaaaatatagacactcagcataagac

SEQ ID NO: 642563 - DNA, 33 bp, Homo sapien
gataaggacaatgatcaaaagaggccaacagac

SEQ ID NO: 642564 - DNA, 33 bp, Homo sapien
gataaggacaatgatcgaaagaggccaacagac

SEQ ID NO: 642565 - DNA, 33 bp, Homo sapien; identical to SEQ ID NO: 642563

SEQ ID NO: 642566 - DNA, 33 bp, Homo sapien; identical to SEQ ID NO: 642564

SEQ ID NO: 642567 - DNA, 33 bp, Homo sapien
ttcagtctctgtcacacgagtaaagtaatattt

SEQ ID NO: 642568 - DNA, 33 bp, Homo sapien
ttcagtctctgtcacatgagtaaagtaatattt

SEQ ID NO: 642569 - DNA, 33 bp, Homo sapien
cccaaatttgagtaaaattatgcccagtgtaat

SEQ ID NO: 642570 - DNA, 33 bp, Homo sapien
cccaaatttgagtaaacttatgcccagtgtaat

SEQ ID NO: 642571 - DNA, 33 bp, Homo sapien
ttgttgtgaagtcaaaactgaatgttagagcac

SEQ ID NO: 642572 - DNA, 33 bp, Homo sapien
ttgttgtgaagtcaaagctgaatgttagagcac

SEQ ID NO: 642573 - DNA, 33 bp, Homo sapien
tattagtcctacaaaactctggtttgcaaatcc

SEQ ID NO: 642574 - DNA, 33 bp, Homo sapien
tattagtcctacaaaattctggtttgcaaatcc

SEQ ID NO: 642575 - DNA, 33 bp, Homo sapien
ctgatggacattaccaactaatactccccttat

SEQ ID NO: 642576 - DNA, 33 bp, Homo sapien
ctgatggacattaccagctaatactccccttat

SEQ ID NO: 642577 - DNA, 33 bp, Homo sapien
tgaacaaatactatgacctaccacatatgcgat

SEQ ID NO: 642578 - DNA, 33 bp, Homo sapien
tgaacaaatactatgatctaccacatatgcgat

SEQ ID NO: 642579 - DNA, 33 bp, Homo sapien
tggagatgtgaggaaagaacacttgtcccaagt

SEQ ID NO: 642580 - DNA, 33 bp, Homo sapien
tggagatgtgaggaaataacacttgtcccaagt

SEQ ID NO: 642581 - DNA, 33 bp, Homo sapien
agtcttgagtgagtagaacccagtgagaaaaaa

SEQ ID NO: 642582 - DNA, 33 bp, Homo sapien
agtcttgagtgagtaggacccagtgagaaaaaa

SEQ ID NO: 642583 - DNA, 33 bp, Homo sapien
ggggagagggaaagaaagttcaggactccaact

SEQ ID NO: 642584 - DNA, 33 bp, Homo sapien
ggggagagggaaagaaggttcaggactccaact

SEQ ID NO: 642585 - DNA, 33 bp, Homo sapien
ctaggtgaacgttttacagtttgggtagagaga

SEQ ID NO: 642586 - DNA, 33 bp, Homo sapien
ctaggtgaacgttttatagtttgggtagagaga

SEQ ID NO: 642587 - DNA, 33 bp, Homo sapien
ttattcatttacaaaaacacagatccctgtctg

SEQ ID NO: 642588 - DNA, 33 bp, Homo sapien
ttattcatttacaaaaccacagatccctgtctg

SEQ ID NO: 642589 - DNA, 33 bp, Homo sapien
atctgagtcagatctcaatcatttagaggttta

SEQ ID NO: 642590 - DNA, 33 bp, Homo sapien
atctgagtcagatctctatcatttagaggttta

SEQ ID NO: 642591 - DNA, 33 bp, Homo sapien
tttaccctcatgctcccgattattgaaatttca

SEQ ID NO: 642592 - DNA, 33 bp, Homo sapien
tttaccctcatgctcctgattattgaaatttca

SEQ ID NO: 642593 - DNA, 33 bp, Homo sapien
tacctcatttaaaatccataaagcagtataaca

SEQ ID NO: 642594 - DNA, 33 bp, Homo sapien
tacctcatttaaaatctataaagcagtataaca

SEQ ID NO: 642595 - DNA, 33 bp, Homo sapien
attttgtaccataaaacaaatcctgagatcttg

SEQ ID NO: 642596 - DNA, 33 bp, Homo sapien
attttgtaccataaaataaatcctgagatcttg

SEQ ID NO: 642597 - DNA, 33 bp, Homo sapien
agaagcatcatggagacggtagaaatgcagtac

SEQ ID NO: 642598 - DNA, 33 bp, Homo sapien
agaagcatcatggagagggtagaaatgcagtac

SEQ ID NO: 642599 - DNA, 33 bp, Homo sapien
agatggagctggaggtcaatatcctcagaagac

SEQ ID NO: 642600 - DNA, 33 bp, Homo sapien
agatggagctggaggtgaatatcctcagaagac

SEQ ID NO: 642601 - DNA, 33 bp, Homo sapien
taactgtggtccatgaaaactcctaattcaaga

SEQ ID NO: 642602 - DNA, 33 bp, Homo sapien
taactgtggtccatgagaactcctaattcaaga

SEQ ID NO: 642603 - DNA, 33 bp, Homo sapien
acagagaaaagccaaacacttagaactgtagga

SEQ ID NO: 642604 - DNA, 33 bp, Homo sapien
acagagaaaagccaaagacttagaactgtagga

SEQ ID NO: 642605 - DNA, 33 bp, Homo sapien
tatggctctctatgacagagaataggaaagata

SEQ ID NO: 642606 - DNA, 33 bp, Homo sapien
tatggctctctatgacggagaataggaaagata

SEQ ID NO: 642607 - DNA, 33 bp, Homo sapien
cttgactcccaatctcattatctttccattttg

SEQ ID NO: 642608 - DNA, 33 bp, Homo sapien
cttgactcccaatctcgttatctttccattttg

SEQ ID NO: 642609 - DNA, 33 bp, Homo sapien
ttggcaatgggttctccgaaatcttttattttg

SEQ ID NO: 642610 - DNA, 33 bp, Homo sapien
ttggcaatgggttctctgaaatcttttattttg

SEQ ID NO: 642611 - DNA, 33 bp, Homo sapien
ggctagccttgagggagaatccgactgagagac

SEQ ID NO: 642612 - DNA, 33 bp, Homo sapien
ggctagccttgagggataatccgactgagagac

SEQ ID NO: 642613 - DNA, 33 bp, Homo sapien
tatgcttccattctccaaagtaaattatttaaa

SEQ ID NO: 642614 - DNA, 33 bp, Homo sapien
tatgcttccattctccgaagtaaattatttaaa

SEQ ID NO: 642615 - DNA, 33 bp, Homo sapien
tcatctcaagcaggaaatacttctctctaaacc

SEQ ID NO: 642616 - DNA, 33 bp, Homo sapien
tcatctcaagcaggaattacttctctctaaacc

SEQ ID NO: 642617 - DNA, 33 bp, Homo sapien
tttatttcttgtgttacatattgccaagtcttg

SEQ ID NO: 642618 - DNA, 33 bp, Homo sapien
tttatttcttgtgttatatattgccaagtcttg

SEQ ID NO: 642619 - DNA, 33 bp, Homo sapien
aaggcaatactgtaaacaaagtgtgtctctggc

SEQ ID NO: 642620 - DNA, 33 bp, Homo sapien
aaggcaatactgtaaataaagtgtgtctctggc

SEQ ID NO: 642621 - DNA, 33 bp, Homo sapien
tttcatgaaagaaaagaatgaaaaagtcactag

SEQ ID NO: 642622 - DNA, 33 bp, Homo sapien
tttcatgaaagaaaaggatgaaaaagtcactag

SEQ ID NO: 642623 - DNA, 33 bp, Homo sapien
cccctgtatctggatgcacttttgacatttttc

SEQ ID NO: 642624 - DNA, 33 bp, Homo sapien
cccctgtatctggatgtacttttgacatttttc

SEQ ID NO: 642625 - DNA, 33 bp, Homo sapien
tgataagagaatgcacaatccagctgtcataca

SEQ ID NO: 642626 - DNA, 33 bp, Homo sapien
tgataagagaatgcacgatccagctgtcataca

SEQ ID NO: 642627 - DNA, 33 bp, Homo sapien
ggctttgtggtgattaaaatgcgcaatctctat

SEQ ID NO: 642628 - DNA, 33 bp, Homo sapien
ggctttgtggtgattataatgcgcaatctctat

SEQ ID NO: 642629 - DNA, 33 bp, Homo sapien
caagtcactatcactagccttcaaataaagcat

SEQ ID NO: 642630 - DNA, 33 bp, Homo sapien
caagtcactatcactatccttcaaataaagcat

SEQ ID NO: 642631 - DNA, 33 bp, Homo sapien
tgagtttaccgaagaaaagcttgccttcccgaa

SEQ ID NO: 642632 - DNA, 33 bp, Homo sapien
tgagtttaccgaagaacagcttgccttcccgaa

SEQ ID NO: 642633 - DNA, 33 bp, Homo sapien
accagtttactgactcagaatgaatgacagatt

SEQ ID NO: 642634 - DNA, 33 bp, Homo sapien
accagtttactgactcggaatgaatgacagatt

SEQ ID NO: 642635 - DNA, 33 bp, Homo sapien
aaactcatagcttcaactctttgtttggttctc

SEQ ID NO: 642636 - DNA, 33 bp, Homo sapien
aaactcatagcttcaattctttgtttggttctc

SEQ ID NO: 642637 - DNA, 33 bp, Homo sapien
tgcttttacctgacgactagtgtaactttgctg

SEQ ID NO: 642638 - DNA, 33 bp, Homo sapien
tgcttttacctgacgagtagtgtaactttgctg

SEQ ID NO: 642639 - DNA, 33 bp, Homo sapien
gtcacaggatttataaatattgaggcaaaattc

SEQ ID NO: 642640 - DNA, 33 bp, Homo sapien
gtcacaggatttataagtattgaggcaaaattc

SEQ ID NO: 642641 - DNA, 33 bp, Homo sapien
aatattcttttgtcaacatctcaagtggggcaa

SEQ ID NO: 642642 - DNA, 33 bp, Homo sapien
aatattcttttgtcaatatctcaagtggggcaa

SEQ ID NO: 642643 - DNA, 33 bp, Homo sapien
ttatagagaccaagaaagtaaataagtagattg

SEQ ID NO: 642644 - DNA, 33 bp, Homo sapien
ttatagagaccaagaaggtaaataagtagattg

SEQ ID NO: 642645 - DNA, 33 bp, Homo sapien
actccaaagaagctggaacatgccaaactttcc

SEQ ID NO: 642646 - DNA, 33 bp, Homo sapien
actccaaagaagctggcacatgccaaactttcc

SEQ ID NO: 642647 - DNA, 33 bp, Homo sapien
gcactcattggactcactcaaggggtagagagt

SEQ ID NO: 642648 - DNA, 33 bp, Homo sapien
gcactcattggactcattcaaggggtagagagt

SEQ ID NO: 642649 - DNA, 33 bp, Homo sapien
tctcataaatgttgaagtaagcaggttttatgg

SEQ ID NO: 642650 - DNA, 33 bp, Homo sapien
tctcataaatgttgaattaagcaggttttatgg

SEQ ID NO: 642651 - DNA, 33 bp, Homo sapien
cacccgtaaaatgaggacaatagtagtacctac

SEQ ID NO: 642652 - DNA, 33 bp, Homo sapien
cacccgtaaaatgagggcaatagtagtacctac

SEQ ID NO: 642653 - DNA, 33 bp, Homo sapien
agatgatttatggggcaaaatttgacatagaat

SEQ ID NO: 642654 - DNA, 33 bp, Homo sapien
agatgatttatggggcgaaatttgacatagaat

SEQ ID NO: 642655 - DNA, 33 bp, Homo sapien
tcctgcacaacaacaaaggactagagcccagca

SEQ ID NO: 642656 - DNA, 33 bp, Homo sapien
tcctgcacaacaacaacggactagagcccagca

SEQ ID NO: 642657 - DNA, 33 bp, Homo sapien
cgatggtaataagaacagtcaaatacagccaag

SEQ ID NO: 642658 - DNA, 33 bp, Homo sapien
cgatggtaataagaacggtcaaatacagccaag

SEQ ID NO: 642659 - DNA, 33 bp, Homo sapien
accagactcactattacatctcaacttagcctg

SEQ ID NO: 642660 - DNA, 33 bp, Homo sapien
accagactcactattatatctcaacttagcctg

SEQ ID NO: 642661 - DNA, 33 bp, Homo sapien
gcaggtaaaaaagagcaaacagctagaacttca

SEQ ID NO: 642662 - DNA, 33 bp, Homo sapien
gcaggtaaaaaagagcgaacagctagaacttca

SEQ ID NO: 642663 - DNA, 33 bp, Homo sapien
cattcaagtagcccaacgtgcccttaagctacc

SEQ ID NO: 642664 - DNA, 33 bp, Homo sapien
cattcaagtagcccaatgtgcccttaagctacc

SEQ ID NO: 642665 - DNA, 33 bp, Homo sapien
gaacccatgtgtggtagattaaagttcacaaag

SEQ ID NO: 642666 - DNA, 33 bp, Homo sapien
gaacccatgtgtggtatattaaagttcacaaag

SEQ ID NO: 642667 - DNA, 33 bp, Homo sapien
ctgtaaagaactaactcagactgggtaattcat

SEQ ID NO: 642668 - DNA, 33 bp, Homo sapien
ctgtaaagaactaactgagactgggtaattcat

SEQ ID NO: 642669 - DNA, 33 bp, Homo sapien
ctcctaccaccatttgaaaaaggtccttgattc

SEQ ID NO: 642670 - DNA, 33 bp, Homo sapien
ctcctaccaccatttggaaaaggtccttgattc

SEQ ID NO: 642671 - DNA, 33 bp, Homo sapien
tgctgctgatcatctactaaaccttcttctttg

SEQ ID NO: 642672 - DNA, 33 bp, Homo sapien
tgctgctgatcatctattaaaccttcttctttg

SEQ ID NO: 642673 - DNA, 33 bp, Homo sapien
cacaggtttctccctacggtaattggttcagaa

SEQ ID NO: 642674 - DNA, 33 bp, Homo sapien
cacaggtttctccctatggtaattggttcagaa

SEQ ID NO: 642675 - DNA, 33 bp, Homo sapien
aacacagttgaaggcaaagttccctcctagata

SEQ ID NO: 642676 - DNA, 33 bp, Homo sapien
aacacagttgaaggcagagttccctcctagata

SEQ ID NO: 642677 - DNA, 33 bp, Homo sapien
tcatatcctggtgacaataacccagttgtcact

SEQ ID NO: 642678 - DNA, 33 bp, Homo sapien
tcatatcctggtgacagtaacccagttgtcact

SEQ ID NO: 642679 - DNA, 33 bp, Homo sapien
tgcataacaactcagaacctccaggacttactt

SEQ ID NO: 642680 - DNA, 33 bp, Homo sapien
tgcataacaactcagagcctccaggacttactt

SEQ ID NO: 642681 - DNA, 33 bp, Homo sapien
gaggtaaactcaagaaatatgtggaggccagat

SEQ ID NO: 642682 - DNA, 33 bp, Homo sapien
gaggtaaactcaagaagtatgtggaggccagat

SEQ ID NO: 642683 - DNA, 33 bp, Homo sapien
gctctcatgcttaagcccagggacttctctctc

SEQ ID NO: 642684 - DNA, 33 bp, Homo sapien
gctctcatgcttaagcgcagggacttctctctc

SEQ ID NO: 642685 - DNA, 33 bp, Homo sapien
ggtgcagctccactgcaaatttaaagccatgaa

SEQ ID NO: 642686 - DNA, 33 bp, Homo sapien
ggtgcagctccactgcgaatttaaagccatgaa

SEQ ID NO: 642687 - DNA, 33 bp, Homo sapien
cccatagagatacacaagcataaattctgtact

SEQ ID NO: 642688 - DNA, 33 bp, Homo sapien
cccatagagatacacaggcataaattctgtact

SEQ ID NO: 642689 - DNA, 33 bp, Homo sapien
aagatgaagttaaaaaatattcacggtggtcca

SEQ ID NO: 642690 - DNA, 33 bp, Homo sapien
aagatgaagttaaaaagtattcacggtggtcca

SEQ ID NO: 642691 - DNA, 33 bp, Homo sapien
atgaagtaaagggtcaagatgacaacaccagcc

SEQ ID NO: 642692 - DNA, 33 bp, Homo sapien
atgaagtaaagggtcaggatgacaacaccagcc

SEQ ID NO: 642693 - DNA, 33 bp, Homo sapien
gtagggcattttaggaactcaaagtaataaagc

SEQ ID NO: 642694 - DNA, 33 bp, Homo sapien
gtagggcattttaggagctcaaagtaataaagc

SEQ ID NO: 642695 - DNA, 33 bp, Homo sapien
ctgagcctggtagagccaagcattcagtatatg

SEQ ID NO: 642696 - DNA, 33 bp, Homo sapien
ctgagcctggtagagctaagcattcagtatatg

SEQ ID NO: 642697 - DNA, 33 bp, Homo sapien
ctggatggaatgcacaacttataaacttggaca

SEQ ID NO: 642698 - DNA, 33 bp, Homo sapien
ctggatggaatgcacatcttataaacttggaca

SEQ ID NO: 642699 - DNA, 33 bp, Homo sapien
tttgtccttctgatcaggagtgtatttttagga

SEQ ID NO: 642700 - DNA, 33 bp, Homo sapien
tttgtccttctgatcatgagtgtatttttagga

SEQ ID NO: 642701 - DNA, 33 bp, Homo sapien
aagagggctggagagacagacattaaatcccac

SEQ ID NO: 642702 - DNA, 33 bp, Homo sapien
aagagggctggagagagagacattaaatcccac

SEQ ID NO: 642703 - DNA, 33 bp, Homo sapien
cttctctagctattccaaccttgtcattgttcc

SEQ ID NO: 642704 - DNA, 33 bp, Homo sapien
cttctctagctattccgaccttgtcattgttcc

SEQ ID NO: 642705 - DNA, 33 bp, Homo sapien
tgtataaatggagggaaaattcaaattctcatt

SEQ ID NO: 642706 - DNA, 33 bp, Homo sapien
tgtataaatggagggacaattcaaattctcatt

SEQ ID NO: 642707 - DNA, 33 bp, Homo sapien
agttgcaaagcattaccataggcactgagcgag

SEQ ID NO: 642708 - DNA, 33 bp, Homo sapien
agttgcaaagcattacgataggcactgagcgag

SEQ ID NO: 642709 - DNA, 33 bp, Homo sapien
ttacaacttggtcccaatcttcaggaactgatt

SEQ ID NO: 642710 - DNA, 33 bp, Homo sapien
ttacaacttggtcccagtcttcaggaactgatt

SEQ ID NO: 642711 - DNA, 33 bp, Homo sapien
ttttgataagaacgctcacaaaatcttacaact

SEQ ID NO: 642712 - DNA, 33 bp, Homo sapien
ttttgataagaacgctgacaaaatcttacaact

SEQ ID NO: 642713 - DNA, 33 bp, Homo sapien
ttttttttgcttaaataatccagtctgtgactt

SEQ ID NO: 642714 - DNA, 33 bp, Homo sapien
ttttttttgcttaaatcatccagtctgtgactt

SEQ ID NO: 642715 - DNA, 33 bp, Homo sapien
attttgttttcttccaaaatccagctcttcagt

SEQ ID NO: 642716 - DNA, 33 bp, Homo sapien
attttgttttcttccataatccagctcttcagt

SEQ ID NO: 642717 - DNA, 33 bp, Homo sapien
gaatttgttcaacaggaaattatcatgcacaaa

SEQ ID NO: 642718 - DNA, 33 bp, Homo sapien
gaatttgttcaacaggtaattatcatgcacaaa

SEQ ID NO: 642719 - DNA, 33 bp, Homo sapien
tgtggttattgcttcaaccaatctttctctctc

SEQ ID NO: 642720 - DNA, 33 bp, Homo sapien
tgtggttattgcttcagccaatctttctctctc

SEQ ID NO: 642721 - DNA, 33 bp, Homo sapien
ttcctgaggtcatataaaacacgtcactctaga

SEQ ID NO: 642722 - DNA, 33 bp, Homo sapien
ttcctgaggtcatatagaacacgtcactctaga

SEQ ID NO: 642723 - DNA, 33 bp, Homo sapien
atgatgggtaaccttacaggaaagagaaatttg

SEQ ID NO: 642724 - DNA, 33 bp, Homo sapien
atgatgggtaaccttataggaaagagaaatttg

SEQ ID NO: 642725 - DNA, 33 bp, Homo sapien
cttgaaccccttcatgacaaatttagggtgata

SEQ ID NO: 642726 - DNA, 33 bp, Homo sapien
cttgaaccccttcatgccaaatttagggtgata

SEQ ID NO: 642727 - DNA, 33 bp, Homo sapien
atggaagctgcataaaggtagtggccttatcat

SEQ ID NO: 642728 - DNA, 33 bp, Homo sapien
atggaagctgcataaatgtagtggccttatcat

SEQ ID NO: 642729 - DNA, 33 bp, Homo sapien
tggagctgaacaatatcaggaccccagagatct

SEQ ID NO: 642730 - DNA, 33 bp, Homo sapien
tggagctgaacaatattaggaccccagagatct

SEQ ID NO: 642731 - DNA, 33 bp, Homo sapien
ttttaagaagacaatgcaatgctttttagtaaa

SEQ ID NO: 642732 - DNA, 33 bp, Homo sapien
ttttaagaagacaatggaatgctttttagtaaa

SEQ ID NO: 642733 - DNA, 33 bp, Homo sapien
agaaaatgatacctacaaattagccgggcatgg

SEQ ID NO: 642734 - DNA, 33 bp, Homo sapien
agaaaatgatacctacgaattagccgggcatgg

SEQ ID NO: 642735 - DNA, 33 bp, Homo sapien
ataggaaaagttagtacgctggaagtctgtgag

SEQ ID NO: 642736 - DNA, 33 bp, Homo sapien
ataggaaaagttagtatgctggaagtctgtgag

SEQ ID NO: 642737 - DNA, 33 bp, Homo sapien
tagagttcttcaacatcactctaatattacagc

SEQ ID NO: 642738 - DNA, 33 bp, Homo sapien
tagagttcttcaacatgactctaatattacagc

SEQ ID NO: 642739 - DNA, 33 bp, Homo sapien
tgaggttgacaagaaacacgaggaaagaatatg

SEQ ID NO: 642740 - DNA, 33 bp, Homo sapien
tgaggttgacaagaaatacgaggaaagaatatg

SEQ ID NO: 642741 - DNA, 33 bp, Homo sapien
acacttttgagaacaaaaacgaattgattttgt

SEQ ID NO: 642742 - DNA, 33 bp, Homo sapien
acacttttgagaacaataacgaattgattttgt

SEQ ID NO: 642743 - DNA, 33 bp, Homo sapien
aaagcagagcaaataaaatactggcatcagtga

SEQ ID NO: 642744 - DNA, 33 bp, Homo sapien
aaagcagagcaaataacatactggcatcagtga

SEQ ID NO: 642745 - DNA, 33 bp, Homo sapien
tttttcacataccagacgttacattaagtttta

SEQ ID NO: 642746 - DNA, 33 bp, Homo sapien
tttttcacataccagatgttacattaagtttta

SEQ ID NO: 642747 - DNA, 33 bp, Homo sapien
aaagttcggttttgaacgtgcactttacataca

SEQ ID NO: 642748 - DNA, 33 bp, Homo sapien
aaagttcggttttgaatgtgcactttacataca

SEQ ID NO: 642749 - DNA, 33 bp, Homo sapien
ttatatgctatttgcccactaaattatatatat

SEQ ID NO: 642750 - DNA, 33 bp, Homo sapien
ttatatgctatttgcctactaaattatatatat

SEQ ID NO: 642751 - DNA, 33 bp, Homo sapien
ccagagaaacagaaatgacattaatccagtatt

SEQ ID NO: 642752 - DNA, 33 bp, Homo sapien
ccagagaaacagaaattacattaatccagtatt

SEQ ID NO: 642753 - DNA, 33 bp, Homo sapien
tttaatttgggggggaacattttggaagagata

SEQ ID NO: 642754 - DNA, 33 bp, Homo sapien
tttaatttgggggggagcattttggaagagata

SEQ ID NO: 642755 - DNA, 33 bp, Homo sapien
ttaaagaagctacaccaatttataggatacagc

SEQ ID NO: 642756 - DNA, 33 bp, Homo sapien
ttaaagaagctacaccgatttataggatacagc

SEQ ID NO: 642757 - DNA, 33 bp, Homo sapien
tgaagctcagaccagaactttcatgcttaaaaa

SEQ ID NO: 642758 - DNA, 33 bp, Homo sapien
tgaagctcagaccagacctttcatgcttaaaaa

SEQ ID NO: 642759 - DNA, 33 bp, Homo sapien
gctgcttgggggtaaaacagatgatgtgtttag

SEQ ID NO: 642760 - DNA, 33 bp, Homo sapien
gctgcttgggggtaaagcagatgatgtgtttag

SEQ ID NO: 642761 - DNA, 33 bp, Homo sapien
aaggataatcaaaggaacgatgtcagaaaaggg

SEQ ID NO: 642762 - DNA, 33 bp, Homo sapien
aaggataatcaaaggatcgatgtcagaaaaggg

SEQ ID NO: 642763 - DNA, 33 bp, Homo sapien
agattagatagttagagtcattgagtgttgaat

SEQ ID NO: 642764 - DNA, 33 bp, Homo sapien
agattagatagttagattcattgagtgttgaat

SEQ ID NO: 642765 - DNA, 33 bp, Homo sapien
gatgcagatttatgaactgaacatcttaacatt

SEQ ID NO: 642766 - DNA, 33 bp, Homo sapien
gatgcagatttatgaattgaacatcttaacatt

SEQ ID NO: 642767 - DNA, 33 bp, Homo sapien
gacaatggcagaaggacaagaacgtaacccaat

SEQ ID NO: 642768 - DNA, 33 bp, Homo sapien
gacaatggcagaaggataagaacgtaacccaat

SEQ ID NO: 642769 - DNA, 33 bp, Homo sapien
tagttttcctattcctgaaatgtgtgcataact

SEQ ID NO: 642770 - DNA, 33 bp, Homo sapien
tagttttcctattccttaaatgtgtgcataact

SEQ ID NO: 642771 - DNA, 33 bp, Homo sapien
taatgagatacagcaaagtcaaaaaaatttgaa

SEQ ID NO: 642772 - DNA, 33 bp, Homo sapien
taatgagatacagcaaggtcaaaaaaatttgaa

SEQ ID NO: 642773 - DNA, 33 bp, Homo sapien
gagattgatttggggggatctattcaacctact

SEQ ID NO: 642774 - DNA, 33 bp, Homo sapien
gagattgatttgggggtatctattcaacctact

SEQ ID NO: 642775 - DNA, 33 bp, Homo sapien
atgatgtgatcgtgtcccactacagcctccacc

SEQ ID NO: 642776 - DNA, 33 bp, Homo sapien
atgatgtgatcgtgtctcactacagcctccacc

SEQ ID NO: 642777 - DNA, 33 bp, Homo sapien
ggactattaattttaactcaatggtatcaaagg

SEQ ID NO: 642778 - DNA, 33 bp, Homo sapien
ggactattaattttaagtcaatggtatcaaagg

SEQ ID NO: 642779 - DNA, 33 bp, Homo sapien
atttacagggtcaccactggaataaatcagttt

SEQ ID NO: 642780 - DNA, 33 bp, Homo sapien
atttacagggtcaccattggaataaatcagttt

SEQ ID NO: 642781 - DNA, 33 bp, Homo sapien
tgagagaagcaatgaagataccaaatgagccta

SEQ ID NO: 642782 - DNA, 33 bp, Homo sapien
tgagagaagcaatgaatataccaaatgagccta

SEQ ID NO: 642783 - DNA, 33 bp, Homo sapien
aaaaaactaaattagacggatttatgctaggca

SEQ ID NO: 642784 - DNA, 33 bp, Homo sapien
aaaaaactaaattagatggatttatgctaggca

SEQ ID NO: 642785 - DNA, 33 bp, Homo sapien
cagagcttttataagacatgaatccaagtatga

SEQ ID NO: 642786 - DNA, 33 bp, Homo sapien
cagagcttttataagatatgaatccaagtatga

SEQ ID NO: 642787 - DNA, 33 bp, Homo sapien
ttgacttccttcaataagttccttctaaaatgg

SEQ ID NO: 642788 - DNA, 33 bp, Homo sapien
ttgacttccttcaatatgttccttctaaaatgg

SEQ ID NO: 642789 - DNA, 33 bp, Homo sapien
tgtacatttcattcgaaccttctgataaaaacc

SEQ ID NO: 642790 - DNA, 33 bp, Homo sapien
tgtacatttcattcgacccttctgataaaaacc

SEQ ID NO: 642791 - DNA, 33 bp, Homo sapien
atgctgtttgtctacacataaaaacgcatctgt

SEQ ID NO: 642792 - DNA, 33 bp, Homo sapien
atgctgtttgtctacatataaaaacgcatctgt

SEQ ID NO: 642793 - DNA, 33 bp, Homo sapien
ggcatgaaacttctaacgatgcatgagaatata

SEQ ID NO: 642794 - DNA, 33 bp, Homo sapien
ggcatgaaacttctaatgatgcatgagaatata

SEQ ID NO: 642795 - DNA, 33 bp, Homo sapien
gagtgttcgtgtttacaactacagcatgtgctt

SEQ ID NO: 642796 - DNA, 33 bp, Homo sapien
gagtgttcgtgtttacgactacagcatgtgctt

SEQ ID NO: 642797 - DNA, 33 bp, Homo sapien
cctcagtccttagagccaagaaggtagactaag

SEQ ID NO: 642798 - DNA, 33 bp, Homo sapien
cctcagtccttagagctaagaaggtagactaag

SEQ ID NO: 642799 - DNA, 33 bp, Homo sapien
ataaaaaaagccggcactatgagaatatgagac

SEQ ID NO: 642800 - DNA, 33 bp, Homo sapien
ataaaaaaagccggcattatgagaatatgagac

SEQ ID NO: 642801 - DNA, 33 bp, Homo sapien
gacatcaccattgaaaactccaggcaataatat

SEQ ID NO: 642802 - DNA, 33 bp, Homo sapien
gacatcaccattgaaagctccaggcaataatat

SEQ ID NO: 642803 - DNA, 33 bp, Homo sapien
gatttttggttttcgacgtctaggaatttcctt

SEQ ID NO: 642804 - DNA, 33 bp, Homo sapien
gatttttggttttcgatgtctaggaatttcctt

SEQ ID NO: 642805 - DNA, 33 bp, Homo sapien
atccccccagcagctacggcaagacctgctgta

SEQ ID NO: 642806 - DNA, 33 bp, Homo sapien
atccccccagcagctatggcaagacctgctgta

SEQ ID NO: 642807 - DNA, 33 bp, Homo sapien
tttgatgcgtttccaggatttgcttcaagattt

SEQ ID NO: 642808 - DNA, 33 bp, Homo sapien
tttgatgcgtttccagtatttgcttcaagattt

SEQ ID NO: 642809 - DNA, 33 bp, Homo sapien
ttggaaaaacgcttctaaacattagcttaggca

SEQ ID NO: 642810 - DNA, 33 bp, Homo sapien
ttggaaaaacgcttctcaacattagcttaggca

SEQ ID NO: 642811 - DNA, 33 bp, Homo sapien
agtgcttaagtaatcacagtcagtgcccaataa

SEQ ID NO: 642812 - DNA, 33 bp, Homo sapien
agtgcttaagtaatcatagtcagtgcccaataa

SEQ ID NO: 642813 - DNA, 33 bp, Homo sapien
caatattcaaaacagacaaaagtgacagcccta

SEQ ID NO: 642814 - DNA, 33 bp, Homo sapien
caatattcaaaacagagaaaagtgacagcccta

SEQ ID NO: 642815 - DNA, 33 bp, Homo sapien
gcaaacctcacaaagaacttcaatcagagaagc

SEQ ID NO: 642816 - DNA, 33 bp, Homo sapien
gcaaacctcacaaagatcttcaatcagagaagc

SEQ ID NO: 642817 - DNA, 33 bp, Homo sapien
agataccgctgctcctcactcttcatccagtaa

SEQ ID NO: 642818 - DNA, 33 bp, Homo sapien
agataccgctgctcctgactcttcatccagtaa

SEQ ID NO: 642819 - DNA, 33 bp, Homo sapien
gcagctgtgcagccccaactggtgaagtcacct

SEQ ID NO: 642820 - DNA, 33 bp, Homo sapien
gcagctgtgcagcccccactggtgaagtcacct

SEQ ID NO: 642821 - DNA, 33 bp, Homo sapien
ttggtttgctccctaaatatagttttcattgca

SEQ ID NO: 642822 - DNA, 33 bp, Homo sapien
ttggtttgctccctaagtatagttttcattgca

SEQ ID NO: 642823 - DNA, 33 bp, Homo sapien
gtctatttacttgcacaagggtgacacttcttt

SEQ ID NO: 642824 - DNA, 33 bp, Homo sapien
gtctatttacttgcaccagggtgacacttcttt

SEQ ID NO: 642825 - DNA, 33 bp, Homo sapien
gatgctttggcttacaaatccatttactgttaa

SEQ ID NO: 642826 - DNA, 33 bp, Homo sapien
gatgctttggcttacagatccatttactgttaa

SEQ ID NO: 642827 - DNA, 33 bp, Homo sapien
aaaatacaggggaaaagttaatcatatcctctc

SEQ ID NO: 642828 - DNA, 33 bp, Homo sapien
aaaatacaggggaaaatttaatcatatcctctc

SEQ ID NO: 642829 - DNA, 33 bp, Homo sapien
ttccatatgagcttgagaaaaatgtgtaacctg

SEQ ID NO: 642830 - DNA, 33 bp, Homo sapien
ttccatatgagcttgataaaaatgtgtaacctg

SEQ ID NO: 642831 - DNA, 33 bp, Homo sapien
accttggctctagacagtctttatttctaaagt

SEQ ID NO: 642832 - DNA, 33 bp, Homo sapien
accttggctctagacattctttatttctaaagt

SEQ ID NO: 642833 - DNA, 33 bp, Homo sapien
aaagttaactataaaacagtctcatataggtcc

SEQ ID NO: 642834 - DNA, 33 bp, Homo sapien
aaagttaactataaaagagtctcatataggtcc

SEQ ID NO: 642835 - DNA, 33 bp, Homo sapien
atcaagttgcagtacaagagttcatatatcatt

SEQ ID NO: 642836 - DNA, 33 bp, Homo sapien
atcaagttgcagtacaggagttcatatatcatt

SEQ ID NO: 642837 - DNA, 33 bp, Homo sapien
cattatgggaacacaccggatattccaactgta

SEQ ID NO: 642838 - DNA, 33 bp, Homo sapien
cattatgggaacacactggatattccaactgta

SEQ ID NO: 642839 - DNA, 33 bp, Homo sapien
cctcagcaccatttacactcagaagtgcacttg

SEQ ID NO: 642840 - DNA, 33 bp, Homo sapien
cctcagcaccatttacgctcagaagtgcacttg

SEQ ID NO: 642841 - DNA, 33 bp, Homo sapien
atttattgcttccctacaatgtcttttgctgtt

SEQ ID NO: 642842 - DNA, 33 bp, Homo sapien
atttattgcttccctataatgtcttttgctgtt

SEQ ID NO: 642843 - DNA, 33 bp, Homo sapien
gaaaacaaatagagaaattacctgattggtgac

SEQ ID NO: 642844 - DNA, 33 bp, Homo sapien
gaaaacaaatagagaagttacctgattggtgac

SEQ ID NO: 642845 - DNA, 33 bp, Homo sapien
acacagactttaccaactgtatttcacgttatc

SEQ ID NO: 642846 - DNA, 33 bp, Homo sapien
acacagactttaccaattgtatttcacgttatc

SEQ ID NO: 642847 - DNA, 33 bp, Homo sapien
acctttaaccctggtaccatttcaaagtccaac

SEQ ID NO: 642848 - DNA, 33 bp, Homo sapien
acctttaaccctggtatcatttcaaagtccaac

SEQ ID NO: 642849 - DNA, 33 bp, Homo sapien
gttttaaataaaagccaaatctcaaaaggaagg

SEQ ID NO: 642850 - DNA, 33 bp, Homo sapien
gttttaaataaaagccgaatctcaaaaggaagg

SEQ ID NO: 642851 - DNA, 33 bp, Homo sapien
cattttggctgttaaaagcttatatcttcacaa

SEQ ID NO: 642852 - DNA, 33 bp, Homo sapien
cattttggctgttaaatgcttatatcttcacaa

SEQ ID NO: 642853 - DNA, 33 bp, Homo sapien
gaatacatttttaaaaatttggccagttataca

SEQ ID NO: 642854 - DNA, 33 bp, Homo sapien
gaatacatttttaaaactttggccagttataca

SEQ ID NO: 642855 - DNA, 33 bp, Homo sapien
cagttccagattgtacagatttagatgctaaaa

SEQ ID NO: 642856 - DNA, 33 bp, Homo sapien
cagttccagattgtacggatttagatgctaaaa

SEQ ID NO: 642857 - DNA, 33 bp, Homo sapien
tgaagacttttatacaccagaaatggtccatgt

SEQ ID NO: 642858 - DNA, 33 bp, Homo sapien
tgaagacttttatacatcagaaatggtccatgt

SEQ ID NO: 642859 - DNA, 33 bp, Homo sapien
atagagcaagaaataacgaaaataatgattgag

SEQ ID NO: 642860 - DNA, 33 bp, Homo sapien
atagagcaagaaataatgaaaataatgattgag

SEQ ID NO: 642861 - DNA, 33 bp, Homo sapien
catgtctgtctctccaagaacaccataatttct

SEQ ID NO: 642862 - DNA, 33 bp, Homo sapien
catgtctgtctctccaggaacaccataatttct

SEQ ID NO: 642863 - DNA, 33 bp, Homo sapien
aagattcagcaactataataatagctcacattt

SEQ ID NO: 642864 - DNA, 33 bp, Homo sapien
aagattcagcaactatgataatagctcacattt

SEQ ID NO: 642865 - DNA, 33 bp, Homo sapien
gctactaggggaataactcattctggcagaccc

SEQ ID NO: 642866 - DNA, 33 bp, Homo sapien
gctactaggggaataagtcattctggcagaccc

SEQ ID NO: 642867 - DNA, 33 bp, Homo sapien
cacatatgtgtaaaaaattagagccagatgccc

SEQ ID NO: 642868 - DNA, 33 bp, Homo sapien
cacatatgtgtaaaaagttagagccagatgccc

SEQ ID NO: 642869 - DNA, 33 bp, Homo sapien
tactatggaagccacaatatgtagacaaatggg

SEQ ID NO: 642870 - DNA, 33 bp, Homo sapien
tactatggaagccacagtatgtagacaaatggg

SEQ ID NO: 642871 - DNA, 33 bp, Homo sapien
cagaactcagtagctacgagaccatatggccca

SEQ ID NO: 642872 - DNA, 33 bp, Homo sapien
cagaactcagtagctatgagaccatatggccca

SEQ ID NO: 642873 - DNA, 33 bp, Homo sapien
ttccagctggaagagaacatacatggaaagaaa

SEQ ID NO: 642874 - DNA, 33 bp, Homo sapien
ttccagctggaagagagcatacatggaaagaaa

SEQ ID NO: 642875 - DNA, 33 bp, Homo sapien
cactcttcctcatgccaaatcaatctatcgcca

SEQ ID NO: 642876 - DNA, 33 bp, Homo sapien
cactcttcctcatgccgaatcaatctatcgcca

SEQ ID NO: 642877 - DNA, 33 bp, Homo sapien
tgcaagatctctgaccagcctatcttcgaagtc

SEQ ID NO: 642878 - DNA, 33 bp, Homo sapien
tgcaagatctctgacccgcctatcttcgaagtc

SEQ ID NO: 642879 - DNA, 33 bp, Homo sapien
acaagcaatagaaactcaatgcagaactggctt

SEQ ID NO: 642880 - DNA, 33 bp, Homo sapien
acaagcaatagaaactgaatgcagaactggctt

SEQ ID NO: 642881 - DNA, 33 bp, Homo sapien
aagagtccaaattaaaacaagtggaacctgagc

SEQ ID NO: 642882 - DNA, 33 bp, Homo sapien
aagagtccaaattaaagcaagtggaacctgagc

SEQ ID NO: 642883 - DNA, 33 bp, Homo sapien
tggtttctttggggtacgataataactctctaa

SEQ ID NO: 642884 - DNA, 33 bp, Homo sapien
tggtttctttggggtatgataataactctctaa

SEQ ID NO: 642885 - DNA, 33 bp, Homo sapien
aatatactagaaacacggaattgtatactctaa

SEQ ID NO: 642886 - DNA, 33 bp, Homo sapien
aatatactagaaacactgaattgtatactctaa

SEQ ID NO: 642887 - DNA, 33 bp, Homo sapien
tgagcaaatgcaggaccgtattaccaaagctaa

SEQ ID NO: 642888 - DNA, 33 bp, Homo sapien
tgagcaaatgcaggactgtattaccaaagctaa

SEQ ID NO: 642889 - DNA, 33 bp, Homo sapien
atttcatttattgaacaaatattgaatgagcat

SEQ ID NO: 642890 - DNA, 33 bp, Homo sapien
atttcatttattgaactaatattgaatgagcat

SEQ ID NO: 642891 - DNA, 33 bp, Homo sapien
gctaaagatcaaattcacatcaaaaatttaaaa

SEQ ID NO: 642892 - DNA, 33 bp, Homo sapien
gctaaagatcaaattcgcatcaaaaatttaaaa

SEQ ID NO: 642893 - DNA, 33 bp, Homo sapien
tgcctatattgccgctaactgatttttttttcc

SEQ ID NO: 642894 - DNA, 33 bp, Homo sapien
tgcctatattgccgcttactgatttttttttcc

SEQ ID NO: 642895 - DNA, 33 bp, Homo sapien
tagaaatgtccaatcaactaatgctaagatgaa

SEQ ID NO: 642896 - DNA, 33 bp, Homo sapien
tagaaatgtccaatcagctaatgctaagatgaa

SEQ ID NO: 642897 - DNA, 33 bp, Homo sapien
ttcaatctcattgtaactgctgatagtgctgaa

SEQ ID NO: 642898 - DNA, 33 bp, Homo sapien
ttcaatctcattgtaattgctgatagtgctgaa

SEQ ID NO: 642899 - DNA, 33 bp, Homo sapien
gtgaacacatttatcaccaaattattcgtaaga

SEQ ID NO: 642900 - DNA, 33 bp, Homo sapien
gtgaacacatttatcagcaaattattcgtaaga

SEQ ID NO: 642901 - DNA, 33 bp, Homo sapien
tttggcaaaaaggctacgacaagaaagacttgg

SEQ ID NO: 642902 - DNA, 33 bp, Homo sapien
tttggcaaaaaggctatgacaagaaagacttgg

SEQ ID NO: 642903 - DNA, 33 bp, Homo sapien
tgaacttgctcatgccacctaaccactcttagg

SEQ ID NO: 642904 - DNA, 33 bp, Homo sapien
tgaacttgctcatgccgcctaaccactcttagg

SEQ ID NO: 642905 - DNA, 33 bp, Homo sapien
gtaacattcggattgacgctaaactttactttt

SEQ ID NO: 642906 - DNA, 33 bp, Homo sapien
gtaacattcggattgatgctaaactttactttt

SEQ ID NO: 642907 - DNA, 33 bp, Homo sapien
aattcagaatgaggaacgattactacaagggag

SEQ ID NO: 642908 - DNA, 33 bp, Homo sapien
aattcagaatgaggaatgattactacaagggag

SEQ ID NO: 642909 - DNA, 33 bp, Homo sapien
cttctagaaatggagaaattgttagaatttatt

SEQ ID NO: 642910 - DNA, 33 bp, Homo sapien
cttctagaaatggagagattgttagaatttatt

SEQ ID NO: 642911 - DNA, 33 bp, Homo sapien
atcagcgattgggagacagatgtgtgtgtgcac

SEQ ID NO: 642912 - DNA, 33 bp, Homo sapien
atcagcgattgggagatagatgtgtgtgtgcac

SEQ ID NO: 642913 - DNA, 33 bp, Homo sapien
ccatctacaacatgggaaggcctggaatgcaca

SEQ ID NO: 642914 - DNA, 33 bp, Homo sapien
ccatctacaacatgggcaggcctggaatgcaca

SEQ ID NO: 642915 - DNA, 33 bp, Homo sapien
aaaaacagctcagggacatatattaacatgttg

SEQ ID NO: 642916 - DNA, 33 bp, Homo sapien
aaaaacagctcagggatatatattaacatgttg

SEQ ID NO: 642917 - DNA, 33 bp, Homo sapien
ttaaccaaactcaaatcagagagccagaatcca

SEQ ID NO: 642918 - DNA, 33 bp, Homo sapien
ttaaccaaactcaaattagagagccagaatcca

SEQ ID NO: 642919 - DNA, 33 bp, Homo sapien
taggtctgtgtatcgcacatacttgatcattaa

SEQ ID NO: 642920 - DNA, 33 bp, Homo sapien
taggtctgtgtatcgcgcatacttgatcattaa

SEQ ID NO: 642921 - DNA, 33 bp, Homo sapien
ttaggtgcctgcaatccaatatatattcttggg

SEQ ID NO: 642922 - DNA, 33 bp, Homo sapien
ttaggtgcctgcaatctaatatatattcttggg

SEQ ID NO: 642923 - DNA, 33 bp, Homo sapien
cctgaaacaattttcaaatggtggccagttccc

SEQ ID NO: 642924 - DNA, 33 bp, Homo sapien
cctgaaacaattttcacatggtggccagttccc

SEQ ID NO: 642925 - DNA, 33 bp, Homo sapien
cttggtatggatttatgaggtggcagataggct

SEQ ID NO: 642926 - DNA, 33 bp, Homo sapien
cttggtatggatttattaggtggcagataggct

SEQ ID NO: 642927 - DNA, 33 bp, Homo sapien
tctgtattaatataaccggcaattgaaagttta

SEQ ID NO: 642928 - DNA, 33 bp, Homo sapien
tctgtattaatataactggcaattgaaagttta

SEQ ID NO: 642929 - DNA, 33 bp, Homo sapien
tattgttaatccattggaaaagtttattaatgc

SEQ ID NO: 642930 - DNA, 33 bp, Homo sapien
tattgttaatccattgtaaaagtttattaatgc

SEQ ID NO: 642931 - DNA, 33 bp, Homo sapien
attgtgttttatgctagcatcgtgaatcattgc

SEQ ID NO: 642932 - DNA, 33 bp, Homo sapien
attgtgttttatgctatcatcgtgaatcattgc

SEQ ID NO: 642933 - DNA, 33 bp, Homo sapien
tttttaggagactgctaaattgtcttccaaaat

SEQ ID NO: 642934 - DNA, 33 bp, Homo sapien
tttttaggagactgctgaattgtcttccaaaat

SEQ ID NO: 642935 - DNA, 33 bp, Homo sapien
ttaagtatatgaagcaaacattgaaagaaatat

SEQ ID NO: 642936 - DNA, 33 bp, Homo sapien
ttaagtatatgaagcacacattgaaagaaatat

SEQ ID NO: 642937 - DNA, 33 bp, Homo sapien
cttacatctacaagtgccaaattccagaatgtt

SEQ ID NO: 642938 - DNA, 33 bp, Homo sapien
cttacatctacaagtggcaaattccagaatgtt

SEQ ID NO: 642939 - DNA, 33 bp, Homo sapien
ggcacagaatcctgagcaagcactagaagctag

SEQ ID NO: 642940 - DNA, 33 bp, Homo sapien
ggcacagaatcctgaggaagcactagaagctag

SEQ ID NO: 642941 - DNA, 33 bp, Homo sapien
ctttttgtagagacaccagtcattgggtgtagg

SEQ ID NO: 642942 - DNA, 33 bp, Homo sapien
ctttttgtagagacactagtcattgggtgtagg

SEQ ID NO: 642943 - DNA, 33 bp, Homo sapien
gctcctgtggtagacgaattatgtggccccttg

SEQ ID NO: 642944 - DNA, 33 bp, Homo sapien
gctcctgtggtagacgcattatgtggccccttg

SEQ ID NO: 642945 - DNA, 33 bp, Homo sapien
accactttaagcactacagtgactacataacct

SEQ ID NO: 642946 - DNA, 33 bp, Homo sapien
accactttaagcactagagtgactacataacct

SEQ ID NO: 642947 - DNA, 33 bp, Homo sapien
agttttcttgggtatacgaatatgagtaggact

SEQ ID NO: 642948 - DNA, 33 bp, Homo sapien
agttttcttgggtatatgaatatgagtaggact

SEQ ID NO: 642949 - DNA, 33 bp, Homo sapien
atagaatcataaaatacgtggccttttgtggtt

SEQ ID NO: 642950 - DNA, 33 bp, Homo sapien
atagaatcataaaatatgtggccttttgtggtt

SEQ ID NO: 642951 - DNA, 33 bp, Homo sapien
aagcacagttggttgacgacagtttttttattt

SEQ ID NO: 642952 - DNA, 33 bp, Homo sapien
aagcacagttggttgatgacagtttttttattt

SEQ ID NO: 642953 - DNA, 33 bp, Homo sapien
catttttgcatctacaagtaaaacagtaaactc

SEQ ID NO: 642954 - DNA, 33 bp, Homo sapien
catttttgcatctacaggtaaaacagtaaactc

SEQ ID NO: 642955 - DNA, 33 bp, Homo sapien
ctaattacagcaatagaaagtgcgtgcataaac

SEQ ID NO: 642956 - DNA, 33 bp, Homo sapien
ctaattacagcaataggaagtgcgtgcataaac

SEQ ID NO: 642957 - DNA, 33 bp, Homo sapien
tgaagatcctaaggaaagatttaggagagcaaa

SEQ ID NO: 642958 - DNA, 33 bp, Homo sapien
tgaagatcctaaggaaggatttaggagagcaaa

SEQ ID NO: 642959 - DNA, 33 bp, Homo sapien
ccccctccatgtcataactatttcaaaattgtg

SEQ ID NO: 642960 - DNA, 33 bp, Homo sapien
ccccctccatgtcatatctatttcaaaattgtg

SEQ ID NO: 642961 - DNA, 33 bp, Homo sapien
aactcggtgaaaacagccatatatgtgtttttt

SEQ ID NO: 642962 - DNA, 33 bp, Homo sapien
aactcggtgaaaacaggcatatatgtgtttttt

SEQ ID NO: 642963 - DNA, 33 bp, Homo sapien
ataaagtatgaataaaatgtgtgaatgacaaaa

SEQ ID NO: 642964 - DNA, 33 bp, Homo sapien
ataaagtatgaataaattgtgtgaatgacaaaa

SEQ ID NO: 642965 - DNA, 33 bp, Homo sapien
gagtcacatatgtttacgttaagcagcctttgg

SEQ ID NO: 642966 - DNA, 33 bp, Homo sapien
gagtcacatatgtttatgttaagcagcctttgg

SEQ ID NO: 642967 - DNA, 33 bp, Homo sapien
aaaaatgagtccaaagaccaaagtgaagattca

SEQ ID NO: 642968 - DNA, 33 bp, Homo sapien
aaaaatgagtccaaagcccaaagtgaagattca

SEQ ID NO: 642969 - DNA, 33 bp, Homo sapien
atggataaatcttgaaagcatagtgccaaatga

SEQ ID NO: 642970 - DNA, 33 bp, Homo sapien
atggataaatcttgaacgcatagtgccaaatga

SEQ ID NO: 642971 - DNA, 33 bp, Homo sapien
tttgtcatatttcttcacaattcttttgctact

SEQ ID NO: 642972 - DNA, 33 bp, Homo sapien
tttgtcatatttcttcgcaattcttttgctact

SEQ ID NO: 642973 - DNA, 33 bp, Homo sapien
agaaataatgacccaaagttcccaaatttgatg

SEQ ID NO: 642974 - DNA, 33 bp, Homo sapien
agaaataatgacccaacgttcccaaatttgatg

SEQ ID NO: 642975 - DNA, 33 bp, Homo sapien
atattgcttcacttgacggtgtctcaattcttt

SEQ ID NO: 642976 - DNA, 33 bp, Homo sapien
atattgcttcacttgatggtgtctcaattcttt

SEQ ID NO: 642977 - DNA, 33 bp, Homo sapien
gaagataggttggttgaaattttcaggtctgag

SEQ ID NO: 642978 - DNA, 33 bp, Homo sapien
gaagataggttggttggaattttcaggtctgag

SEQ ID NO: 642979 - DNA, 33 bp, Homo sapien
aaaaaagactatctgaatatgttttgttttatc

SEQ ID NO: 642980 - DNA, 33 bp, Homo sapien
aaaaaagactatctgattatgttttgttttatc

SEQ ID NO: 642981 - DNA, 33 bp, Homo sapien
ttgaatctatcactaactccttctctaggcgta

SEQ ID NO: 642982 - DNA, 33 bp, Homo sapien
ttgaatctatcactaagtccttctctaggcgta

SEQ ID NO: 642983 - DNA, 33 bp, Homo sapien
tgtattaacacaaaaaatcatacacccttgtac

SEQ ID NO: 642984 - DNA, 33 bp, Homo sapien
tgtattaacacaaaaactcatacacccttgtac

SEQ ID NO: 642985 - DNA, 33 bp, Homo sapien
cccaactgcctgcagaaagattaaggtcaaatt

SEQ ID NO: 642986 - DNA, 33 bp, Homo sapien
cccaactgcctgcagagagattaaggtcaaatt

SEQ ID NO: 642987 - DNA, 33 bp, Homo sapien
ttgaatttatgataacaagtgatactgacctaa

SEQ ID NO: 642988 - DNA, 33 bp, Homo sapien
ttgaatttatgataaccagtgatactgacctaa

SEQ ID NO: 642989 - DNA, 33 bp, Homo sapien
tttatgaaagaagtaacaccaatcttagacaac

SEQ ID NO: 642990 - DNA, 33 bp, Homo sapien
tttatgaaagaagtaataccaatcttagacaac

SEQ ID NO: 642991 - DNA, 33 bp, Homo sapien
gcatttgagtttcaaaattgggactattataat

SEQ ID NO: 642992 - DNA, 33 bp, Homo sapien
gcatttgagtttcaaatttgggactattataat

SEQ ID NO: 642993 - DNA, 33 bp, Homo sapien
aaagaaacccacaaagaataattatataccatg

SEQ ID NO: 642994 - DNA, 33 bp, Homo sapien
aaagaaacccacaaaggataattatataccatg

SEQ ID NO: 642995 - DNA, 33 bp, Homo sapien
tctccacaaaaaaacactctgtcctaagggata

SEQ ID NO: 642996 - DNA, 33 bp, Homo sapien
tctccacaaaaaaacattctgtcctaagggata

SEQ ID NO: 642997 - DNA, 33 bp, Homo sapien
agactcggtgtggtccagcggctgccacctctc

SEQ ID NO: 642998 - DNA, 33 bp, Homo sapien
agactcggtgtggtccggcggctgccacctctc

SEQ ID NO: 642999 - DNA, 33 bp, Homo sapien
tttaactaaaaggctacctattcaggatgaact

SEQ ID NO: 643000 - DNA, 33 bp, Homo sapien
tttaactaaaaggctatctattcaggatgaact

SEQ ID NO: 643001 - DNA, 33 bp, Homo sapien
tgtgaatactgggatgaaaccactcagatggaa

SEQ ID NO: 643002 - DNA, 33 bp, Homo sapien
tgtgaatactgggatggaaccactcagatggaa

SEQ ID NO: 643003 - DNA, 33 bp, Homo sapien
ttacaattttgctaataaaatgccatctcaata

SEQ ID NO: 643004 - DNA, 33 bp, Homo sapien
ttacaattttgctaatcaaatgccatctcaata

SEQ ID NO: 643005 - DNA, 33 bp, Homo sapien
ttgggtgattgacccaacattggcttaaatcat

SEQ ID NO: 643006 - DNA, 33 bp, Homo sapien
ttgggtgattgacccatcattggcttaaatcat

SEQ ID NO: 643007 - DNA, 33 bp, Homo sapien
ggtcagttgaagtcctcactgttcaagtctaaa

SEQ ID NO: 643008 - DNA, 33 bp, Homo sapien
ggtcagttgaagtccttactgttcaagtctaaa

SEQ ID NO: 643009 - DNA, 33 bp, Homo sapien
ggaattgtcagctggtaaactaaaaactgaaac

SEQ ID NO: 643010 - DNA, 33 bp, Homo sapien
ggaattgtcagctggtgaactaaaaactgaaac

SEQ ID NO: 643011 - DNA, 33 bp, Homo sapien
ctcttaggtgtacacacaaaataattgaaaact

SEQ ID NO: 643012 - DNA, 33 bp, Homo sapien
ctcttaggtgtacacagaaaataattgaaaact

SEQ ID NO: 643013 - DNA, 33 bp, Homo sapien
cagagtagttattaccaaaaaagatacatcctc

SEQ ID NO: 643014 - DNA, 33 bp, Homo sapien
cagagtagttattaccgaaaaagatacatcctc

SEQ ID NO: 643015 - DNA, 33 bp, Homo sapien
ccaatgtaatctgataagaattgttaaagagac

SEQ ID NO: 643016 - DNA, 33 bp, Homo sapien
ccaatgtaatctgataggaattgttaaagagac

SEQ ID NO: 643017 - DNA, 33 bp, Homo sapien
aaaagcaaagctaggaaggaaaagttttggctt

SEQ ID NO: 643018 - DNA, 33 bp, Homo sapien
aaaagcaaagctaggagggaaaagttttggctt

SEQ ID NO: 643019 - DNA, 33 bp, Homo sapien
tccaacagaggaaagaaggatgtgatcttttga

SEQ ID NO: 643020 - DNA, 33 bp, Homo sapien
tccaacagaggaaagacggatgtgatcttttga

SEQ ID NO: 643021 - DNA, 33 bp, Homo sapien
gaggccttttgttctacagagatggtgttacat

SEQ ID NO: 643022 - DNA, 33 bp, Homo sapien
gaggccttttgttctatagagatggtgttacat

SEQ ID NO: 643023 - DNA, 33 bp, Homo sapien
tcatttcatctgattccagagttcttattttta

SEQ ID NO: 643024 - DNA, 33 bp, Homo sapien
tcatttcatctgattctagagttcttattttta

SEQ ID NO: 643025 - DNA, 33 bp, Homo sapien
ttcttgatttgcaaaacataagtaaaaatgata

SEQ ID NO: 643026 - DNA, 33 bp, Homo sapien
ttcttgatttgcaaaatataagtaaaaatgata

SEQ ID NO: 643027 - DNA, 33 bp, Homo sapien
caaagaattaaaatcacctctggttattactgg

SEQ ID NO: 643028 - DNA, 33 bp, Homo sapien
caaagaattaaaatcatctctggttattactgg

SEQ ID NO: 643029 - DNA, 33 bp, Homo sapien
agtagtggacctagtaacttttacaagcacata

SEQ ID NO: 643030 - DNA, 33 bp, Homo sapien
agtagtggacctagtaccttttacaagcacata

SEQ ID NO: 643031 - DNA, 33 bp, Homo sapien
cttatgttatatttcaaaatgttgaagtgaagg

SEQ ID NO: 643032 - DNA, 33 bp, Homo sapien
cttatgttatatttcagaatgttgaagtgaagg

SEQ ID NO: 643033 - DNA, 33 bp, Homo sapien
taaatcatgctactcacataattttcaaaatca

SEQ ID NO: 643034 - DNA, 33 bp, Homo sapien
taaatcatgctactcatataattttcaaaatca

SEQ ID NO: 643035 - DNA, 33 bp, Homo sapien
catcatgtctgacaccagaagtagtacataaaa

SEQ ID NO: 643036 - DNA, 33 bp, Homo sapien
catcatgtctgacacccgaagtagtacataaaa

SEQ ID NO: 643037 - DNA, 33 bp, Homo sapien
tggtttgggaattaaaatgagtaggttcaaatt

SEQ ID NO: 643038 - DNA, 33 bp, Homo sapien
tggtttgggaattaaactgagtaggttcaaatt

SEQ ID NO: 643039 - DNA, 33 bp, Homo sapien
tgttggatcatttatcaaacagggtgtctgatg

SEQ ID NO: 643040 - DNA, 33 bp, Homo sapien
tgttggatcatttatcgaacagggtgtctgatg

SEQ ID NO: 643041 - DNA, 33 bp, Homo sapien
gcaaagactataaagtaacattgcttggattca

SEQ ID NO: 643042 - DNA, 33 bp, Homo sapien
gcaaagactataaagtcacattgcttggattca

SEQ ID NO: 643043 - DNA, 33 bp, Homo sapien
atactaagccaccatcagaaactggaagacttg

SEQ ID NO: 643044 - DNA, 33 bp, Homo sapien
atactaagccaccatcggaaactggaagacttg

SEQ ID NO: 643045 - DNA, 33 bp, Homo sapien
caatctggcctgaaaaagttgataaaggtctct

SEQ ID NO: 643046 - DNA, 33 bp, Homo sapien
caatctggcctgaaaaggttgataaaggtctct

SEQ ID NO: 643047 - DNA, 33 bp, Homo sapien
aatcaatcagctgggaagaaaagaaaagaagta

SEQ ID NO: 643048 - DNA, 33 bp, Homo sapien
aatcaatcagctgggatgaaaagaaaagaagta

SEQ ID NO: 643049 - DNA, 33 bp, Homo sapien
gccactcagaatttgaactaatctttattgaat

SEQ ID NO: 643050 - DNA, 33 bp, Homo sapien
gccactcagaatttgagctaatctttattgaat

SEQ ID NO: 643051 - DNA, 33 bp, Homo sapien
tccatatgccttaacacgttgtgccatcactgt

SEQ ID NO: 643052 - DNA, 33 bp, Homo sapien
tccatatgccttaacatgttgtgccatcactgt

SEQ ID NO: 643053 - DNA, 33 bp, Homo sapien
tttctgacatcacccaagagtattgctagatta

SEQ ID NO: 643054 - DNA, 33 bp, Homo sapien
tttctgacatcacccacgagtattgctagatta

SEQ ID NO: 643055 - DNA, 33 bp, Homo sapien
ctttccatgtttgtgacagatctttctccattc

SEQ ID NO: 643056 - DNA, 33 bp, Homo sapien
ctttccatgtttgtgatagatctttctccattc

SEQ ID NO: 643057 - DNA, 33 bp, Homo sapien
tcacttcaaaatgaaaaacaagattccaggcaa

SEQ ID NO: 643058 - DNA, 33 bp, Homo sapien
tcacttcaaaatgaaatacaagattccaggcaa

SEQ ID NO: 643059 - DNA, 33 bp, Homo sapien
ttttaaacattagaataatacagaggctaatct

SEQ ID NO: 643060 - DNA, 33 bp, Homo sapien
ttttaaacattagaatgatacagaggctaatct

SEQ ID NO: 643061 - DNA, 33 bp, Homo sapien
ctcatttctataaggcacagatttctagtagct

SEQ ID NO: 643062 - DNA, 33 bp, Homo sapien
ctcatttctataaggcgcagatttctagtagct

SEQ ID NO: 643063 - DNA, 33 bp, Homo sapien
tggataaagagaagaacgaaaacatggatgagg

SEQ ID NO: 643064 - DNA, 33 bp, Homo sapien
tggataaagagaagaatgaaaacatggatgagg

SEQ ID NO: 643065 - DNA, 33 bp, Homo sapien
ttacttatctctcttaaaagtccattaaccaaa

SEQ ID NO: 643066 - DNA, 33 bp, Homo sapien
ttacttatctctcttagaagtccattaaccaaa

SEQ ID NO: 643067 - DNA, 33 bp, Homo sapien
tcctgtccaccatgataaacttaagcctctaaa

SEQ ID NO: 643068 - DNA, 33 bp, Homo sapien
tcctgtccaccatgatgaacttaagcctctaaa

SEQ ID NO: 643069 - DNA, 33 bp, Homo sapien
aaatatatattcataaactgttgggcaacaaga

SEQ ID NO: 643070 - DNA, 33 bp, Homo sapien
aaatatatattcataatctgttgggcaacaaga

SEQ ID NO: 643071 - DNA, 33 bp, Homo sapien
tcaaccatgtgtttaaatcattattggtaattc

SEQ ID NO: 643072 - DNA, 33 bp, Homo sapien
tcaaccatgtgtttaagtcattattggtaattc

SEQ ID NO: 643073 - DNA, 33 bp, Homo sapien
gtagtttgcatttgaagataatattgcatggta

SEQ ID NO: 643074 - DNA, 33 bp, Homo sapien
gtagtttgcatttgaatataatattgcatggta

SEQ ID NO: 643075 - DNA, 33 bp, Homo sapien
ataatttattcttaaaagtatccactgtgttct

SEQ ID NO: 643076 - DNA, 33 bp, Homo sapien
ataatttattcttaaaggtatccactgtgttct

SEQ ID NO: 643077 - DNA, 33 bp, Homo sapien
aaatgtgccacgaatacacaatgaggaaaagac

SEQ ID NO: 643078 - DNA, 33 bp, Homo sapien
aaatgtgccacgaatatacaatgaggaaaagac

SEQ ID NO: 643079 - DNA, 33 bp, Homo sapien
agtgatcttatgtgtaccattcaagtattctaa

SEQ ID NO: 643080 - DNA, 33 bp, Homo sapien
agtgatcttatgtgtatcattcaagtattctaa

SEQ ID NO: 643081 - DNA, 33 bp, Homo sapien
gagattatgttgacaaatacctgtgttacaatt

SEQ ID NO: 643082 - DNA, 33 bp, Homo sapien
gagattatgttgacaagtacctgtgttacaatt

SEQ ID NO: 643083 - DNA, 33 bp, Homo sapien
atcaggtactacgttcactatttggatgttggg

SEQ ID NO: 643084 - DNA, 33 bp, Homo sapien
atcaggtactacgttcgctatttggatgttggg

SEQ ID NO: 643085 - DNA, 33 bp, Homo sapien
tgcaaactacatcacacaggtatagccttctag

SEQ ID NO: 643086 - DNA, 33 bp, Homo sapien
tgcaaactacatcacataggtatagccttctag

SEQ ID NO: 643087 - DNA, 33 bp, Homo sapien
tgttcttgggatcaaactggagtcctgaaaatg

SEQ ID NO: 643088 - DNA, 33 bp, Homo sapien
tgttcttgggatcaaattggagtcctgaaaatg

SEQ ID NO: 643089 - DNA, 33 bp, Homo sapien
actattgtgttattcaccaccactatttataat

SEQ ID NO: 643090 - DNA, 33 bp, Homo sapien
actattgtgttattcatcaccactatttataat

SEQ ID NO: 643091 - DNA, 33 bp, Homo sapien
ttaattatgtcaaataaatttcaggaagcttgg

SEQ ID NO: 643092 - DNA, 33 bp, Homo sapien
ttaattatgtcaaatacatttcaggaagcttgg

SEQ ID NO: 643093 - DNA, 33 bp, Homo sapien
aagcatggcttgagaaactcaaaactctctggg

SEQ ID NO: 643094 - DNA, 33 bp, Homo sapien
aagcatggcttgagaagctcaaaactctctggg

SEQ ID NO: 643095 - DNA, 33 bp, Homo sapien
gtaggcctggtccaaagcacctcccagtaaaga

SEQ ID NO: 643096 - DNA, 33 bp, Homo sapien
gtaggcctggtccaaatcacctcccagtaaaga

SEQ ID NO: 643097 - DNA, 33 bp, Homo sapien
tagtatgtgttagaacagggagatacaatagcc

SEQ ID NO: 643098 - DNA, 33 bp, Homo sapien
tagtatgtgttagaaccgggagatacaatagcc

SEQ ID NO: 643099 - DNA, 33 bp, Homo sapien
cttgtagatgttcaagaaagaaatagaagcctg

SEQ ID NO: 643100 - DNA, 33 bp, Homo sapien
cttgtagatgttcaaggaagaaatagaagcctg

SEQ ID NO: 643101 - DNA, 33 bp, Homo sapien
tcaagacagactagctgaagagttggcacaaat

SEQ ID NO: 643102 - DNA, 33 bp, Homo sapien
tcaagacagactagcttaagagttggcacaaat

SEQ ID NO: 643103 - DNA, 33 bp, Homo sapien
ctgtatttgtagtgaccctatcttccttgctga

SEQ ID NO: 643104 - DNA, 33 bp, Homo sapien
ctgtatttgtagtgactctatcttccttgctga

SEQ ID NO: 643105 - DNA, 33 bp, Homo sapien
cttggcggtcttccaaaccttcatttattcata

SEQ ID NO: 643106 - DNA, 33 bp, Homo sapien
cttggcggtcttccaagccttcatttattcata

SEQ ID NO: 643107 - DNA, 33 bp, Homo sapien
aaggtctccttgaggcaaaaagaaaggcatgtg

SEQ ID NO: 643108 - DNA, 33 bp, Homo sapien
aaggtctccttgaggcgaaaagaaaggcatgtg

SEQ ID NO: 643109 - DNA, 33 bp, Homo sapien
gtgtagtgctataaacaagctccataagtgcag

SEQ ID NO: 643110 - DNA, 33 bp, Homo sapien
gtgtagtgctataaacgagctccataagtgcag

SEQ ID NO: 643111 - DNA, 33 bp, Homo sapien
aaaatgagatatcaagccaaactatgcattttt

SEQ ID NO: 643112 - DNA, 33 bp, Homo sapien
aaaatgagatatcaaggcaaactatgcattttt

SEQ ID NO: 643113 - DNA, 33 bp, Homo sapien
tttgtttgatgacacaatccttttctgggtaac

SEQ ID NO: 643114 - DNA, 33 bp, Homo sapien
tttgtttgatgacacagtccttttctgggtaac

SEQ ID NO: 643115 - DNA, 33 bp, Homo sapien
ataggaagattatcccagactttcaaggtggac

SEQ ID NO: 643116 - DNA, 33 bp, Homo sapien
ataggaagattatcccggactttcaaggtggac

SEQ ID NO: 643117 - DNA, 33 bp, Homo sapien
ccgttcagcactgcataagcaaaacaaagtcca

SEQ ID NO: 643118 - DNA, 33 bp, Homo sapien
ccgttcagcactgcatcagcaaaacaaagtcca

SEQ ID NO: 643119 - DNA, 33 bp, Homo sapien
caatccactctaaacactgctaaaaaattaatt

SEQ ID NO: 643120 - DNA, 33 bp, Homo sapien
caatccactctaaacagtgctaaaaaattaatt

SEQ ID NO: 643121 - DNA, 33 bp, Homo sapien
accatgtgaaacagcaataacgaaagggggttt

SEQ ID NO: 643122 - DNA, 33 bp, Homo sapien
accatgtgaaacagcagtaacgaaagggggttt

SEQ ID NO: 643123 - DNA, 33 bp, Homo sapien
catatcttgagtgccaaaagtaacagtgaaacg

SEQ ID NO: 643124 - DNA, 33 bp, Homo sapien
catatcttgagtgccagaagtaacagtgaaacg

SEQ ID NO: 643125 - DNA, 33 bp, Homo sapien
ccttcctgggagaggacgatgaacttggtggtc

SEQ ID NO: 643126 - DNA, 33 bp, Homo sapien
ccttcctgggagaggatgatgaacttggtggtc

SEQ ID NO: 643127 - DNA, 33 bp, Homo sapien
tcttgagctgcataagcaaaaccagatgggcca

SEQ ID NO: 643128 - DNA, 33 bp, Homo sapien
tcttgagctgcataagtaaaaccagatgggcca

SEQ ID NO: 643129 - DNA, 33 bp, Homo sapien
ttccatattcccttcaatcttgctgtagggctt

SEQ ID NO: 643130 - DNA, 33 bp, Homo sapien
ttccatattcccttcattcttgctgtagggctt

SEQ ID NO: 643131 - DNA, 33 bp, Homo sapien
gagtgaatgttcagaacgagcctgttctcagac

SEQ ID NO: 643132 - DNA, 33 bp, Homo sapien
gagtgaatgttcagaaggagcctgttctcagac

SEQ ID NO: 643133 - DNA, 33 bp, Homo sapien
tccaactcaccactccactgtactggtgtagag

SEQ ID NO: 643134 - DNA, 33 bp, Homo sapien
tccaactcaccactccgctgtactggtgtagag

SEQ ID NO: 643135 - DNA, 33 bp, Homo sapien
gttccctttgaagagacgcctacgtaacatccc

SEQ ID NO: 643136 - DNA, 33 bp, Homo sapien
gttccctttgaagagatgcctacgtaacatccc

SEQ ID NO: 643137 - DNA, 33 bp, Homo sapien
gttgcttcagatcacacagccagggccatgagt

SEQ ID NO: 643138 - DNA, 33 bp, Homo sapien
gttgcttcagatcacatagccagggccatgagt

SEQ ID NO: 643139 - DNA, 33 bp, Homo sapien
aggaatcattgttacaagaaagttctggtttgg

SEQ ID NO: 643140 - DNA, 33 bp, Homo sapien
aggaatcattgttacacgaaagttctggtttgg

SEQ ID NO: 643141 - DNA, 33 bp, Homo sapien
gataggaaaagtctaacaggctagaaaagctgg

SEQ ID NO: 643142 - DNA, 33 bp, Homo sapien
gataggaaaagtctaataggctagaaaagctgg

SEQ ID NO: 643143 - DNA, 33 bp, Homo sapien
ccaaatattttccttaagctttgaacatgagct

SEQ ID NO: 643144 - DNA, 33 bp, Homo sapien
ccaaatattttccttaggctttgaacatgagct

SEQ ID NO: 643145 - DNA, 33 bp, Homo sapien
tcactcctcaaacaacgcatgggcacagcctcc

SEQ ID NO: 643146 - DNA, 33 bp, Homo sapien
tcactcctcaaacaactcatgggcacagcctcc

SEQ ID NO: 643147 - DNA, 33 bp, Homo sapien
aacaactgactcttcacggacacaactttcctt

SEQ ID NO: 643148 - DNA, 33 bp, Homo sapien
aacaactgactcttcatggacacaactttcctt

SEQ ID NO: 643149 - DNA, 33 bp, Homo sapien; identical to SEQ ID NO: 643147

SEQ ID NO: 643150 - DNA, 33 bp, Homo sapien; identical to SEQ ID NO: 643148

SEQ ID NO: 643151 - DNA, 33 bp, Homo sapien
ctgccatcccccaacgaaacagacacccagggt

SEQ ID NO: 643152 - DNA, 33 bp, Homo sapien
ctgccatcccccaacggaacagacacccagggt

SEQ ID NO: 643153 - DNA, 33 bp, Homo sapien
caaaggagaaccatctaactgggagaggcgatg

SEQ ID NO: 643154 - DNA, 33 bp, Homo sapien
caaaggagaaccatctcactgggagaggcgatg

SEQ ID NO: 643155 - DNA, 33 bp, Homo sapien
cagcacgtgaggttgaccaaaagggacatggtg

SEQ ID NO: 643156 - DNA, 33 bp, Homo sapien
cagcacgtgaggttgatcaaaagggacatggtg

SEQ ID NO: 643157 - DNA, 33 bp, Homo sapien
aattccattcttttaacgcaaactagaaaataa

SEQ ID NO: 643158 - DNA, 33 bp, Homo sapien
aattccattcttttaatgcaaactagaaaataa

SEQ ID NO: 643159 - DNA, 33 bp, Homo sapien
ctatgaatgcagcatcaaactgggattgggcca

SEQ ID NO: 643160 - DNA, 33 bp, Homo sapien
ctatgaatgcagcatcgaactgggattgggcca

SEQ ID NO: 643161 - DNA, 33 bp, Homo sapien; identical to SEQ ID NO: 643159

SEQ ID NO: 643162 - DNA, 33 bp, Homo sapien; identical to SEQ ID NO: 643160

SEQ ID NO: 643163 - DNA, 33 bp, Homo sapien
atcccagtggccactaaaatacagggattccaa

SEQ ID NO: 643164 - DNA, 33 bp, Homo sapien
atcccagtggccactataatacagggattccaa

SEQ ID NO: 643165 - DNA, 33 bp, Homo sapien
ttccaaactgcaactcaccagaagaagaacaag

SEQ ID NO: 643166 - DNA, 33 bp, Homo sapien
ttccaaactgcaactcgccagaagaagaacaag

SEQ ID NO: 643167 - DNA, 33 bp, Homo sapien
tgttccatctaggggacgaagatactgaagcat

SEQ ID NO: 643168 - DNA, 33 bp, Homo sapien
tgttccatctaggggatgaagatactgaagcat

SEQ ID NO: 643169 - DNA, 33 bp, Homo sapien
atgaggaacttgtcagaaactggcacaaaggtg

SEQ ID NO: 643170 - DNA, 33 bp, Homo sapien
atgaggaacttgtcaggaactggcacaaaggtg

SEQ ID NO: 643171 - DNA, 33 bp, Homo sapien
agtaataattcaataaagcatttagaaaaattg

SEQ ID NO: 643172 - DNA, 33 bp, Homo sapien
agtaataattcaataaggcatttagaaaaattg

SEQ ID NO: 643173 - DNA, 33 bp, Homo sapien
aaccacctctttcctcaatgatgtgatgaaagc

SEQ ID NO: 643174 - DNA, 33 bp, Homo sapien
aaccacctctttcctctatgatgtgatgaaagc

SEQ ID NO: 643175 - DNA, 33 bp, Homo sapien; identical to SEQ ID NO: 643173

SEQ ID NO: 643176 - DNA, 33 bp, Homo sapien; identical to SEQ ID NO: 643174

SEQ ID NO: 643177 - DNA, 33 bp, Homo sapien
gaagaaaatcctctccgctgcagacaaaatgga

SEQ ID NO: 643178 - DNA, 33 bp, Homo sapien
gaagaaaatcctctcctctgcagacaaaatgga

SEQ ID NO: 643179 - DNA, 33 bp, Homo sapien
ctaattttgtctgtgaaccctctcaacttctca

SEQ ID NO: 643180 - DNA, 33 bp, Homo sapien
ctaattttgtctgtgacccctctcaacttctca

SEQ ID NO: 643181 - DNA, 33 bp, Homo sapien
ctaatatcaaagtggaggtacaccatgtgtgta

SEQ ID NO: 643182 - DNA, 33 bp, Homo sapien
ctaatatcaaagtggatgtacaccatgtgtgta

SEQ ID NO: 643183 - DNA, 33 bp, Homo sapien
tatgactcccaaaatcacaggggtcgtacatcc

SEQ ID NO: 643184 - DNA, 33 bp, Homo sapien
tatgactcccaaaatcgcaggggtcgtacatcc

SEQ ID NO: 643185 - DNA, 33 bp, Homo sapien; identical to SEQ ID NO: 643183

SEQ ID NO: 643186 - DNA, 33 bp, Homo sapien; identical to SEQ ID NO: 643184

SEQ ID NO: 643187 - DNA, 33 bp, Homo sapien; identical to SEQ ID NO: 643183

SEQ ID NO: 643188 - DNA, 33 bp, Homo sapien; identical to SEQ ID NO: 643184

SEQ ID NO: 643189 - DNA, 33 bp, Homo sapien
cagaaaagtaaagttcaccttgctaagagatca

SEQ ID NO: 643190 - DNA, 33 bp, Homo sapien
cagaaaagtaaagttcgccttgctaagagatca

SEQ ID NO: 643191 - DNA, 33 bp, Homo sapien
cactttccctcagggccgcatgtggaggagctg

SEQ ID NO: 643192 - DNA, 33 bp, Homo sapien
cactttccctcagggctgcatgtggaggagctg

SEQ ID NO: 643193 - DNA, 33 bp, Homo sapien
tgtcattcatactgtacagtgccattgggtagt

SEQ ID NO: 643194 - DNA, 33 bp, Homo sapien
tgtcattcatactgtatagtgccattgggtagt

SEQ ID NO: 643195 - DNA, 33 bp, Homo sapien
aatataagaaaatgtacgcatcactattcatgt

SEQ ID NO: 643196 - DNA, 33 bp, Homo sapien
aatataagaaaatgtatgcatcactattcatgt

SEQ ID NO: 643197 - DNA, 33 bp, Homo sapien
agatgatgaaataaaaatgcagagaaaaaataa

SEQ ID NO: 643198 - DNA, 33 bp, Homo sapien
agatgatgaaataaaagtgcagagaaaaaataa

SEQ ID NO: 643199 - DNA, 33 bp, Homo sapien
tgtgttatgtgcgtagaattgaaggaatggtgg

SEQ ID NO: 643200 - DNA, 33 bp, Homo sapien
tgtgttatgtgcgtagcattgaaggaatggtgg

SEQ ID NO: 643201 - DNA, 33 bp, Homo sapien; identical to SEQ ID NO: 643199

SEQ ID NO: 643202 - DNA, 33 bp, Homo sapien; identical to SEQ ID NO: 643200

SEQ ID NO: 643203 - DNA, 33 bp, Homo sapien
ttattattccactctcgacatcaatacctacac

SEQ ID NO: 643204 - DNA, 33 bp, Homo sapien
ttattattccactctctacatcaatacctacac

SEQ ID NO: 643205 - DNA, 33 bp, Homo sapien
ggcagagacagagtaaaagggcagaatagaagc

SEQ ID NO: 643206 - DNA, 33 bp, Homo sapien
ggcagagacagagtaagagggcagaatagaagc

SEQ ID NO: 643207 - DNA, 33 bp, Homo sapien
aataaactcagtactaacccctcacagtgaaaa

SEQ ID NO: 643208 - DNA, 33 bp, Homo sapien
aataaactcagtactaccccctcacagtgaaaa

SEQ ID NO: 643209 - DNA, 33 bp, Homo sapien
tggtgaggtgtgcaacacgttattaatttcttc

SEQ ID NO: 643210 - DNA, 33 bp, Homo sapien
tggtgaggtgtgcaacgcgttattaatttcttc

SEQ ID NO: 643211 - DNA, 33 bp, Homo sapien
ttggaggaatcaagtacggagacaaaatgaatg

SEQ ID NO: 643212 - DNA, 33 bp, Homo sapien
ttggaggaatcaagtagggagacaaaatgaatg

SEQ ID NO: 643213 - DNA, 33 bp, Homo sapien
ttgacctgtttgatctcagagcctaatttcata

SEQ ID NO: 643214 - DNA, 33 bp, Homo sapien
ttgacctgtttgatctgagagcctaatttcata

SEQ ID NO: 643215 - DNA, 33 bp, Homo sapien
actcccaggacaattccacacttaactaagcaa

SEQ ID NO: 643216 - DNA, 33 bp, Homo sapien
actcccaggacaattctacacttaactaagcaa

SEQ ID NO: 643217 - DNA, 33 bp, Homo sapien; identical to SEQ ID NO: 643215

SEQ ID NO: 643218 - DNA, 33 bp, Homo sapien; identical to SEQ ID NO: 643216

SEQ ID NO: 643219 - DNA, 33 bp, Homo sapien
atgtgcctcataatgaacattttaatcaataat

SEQ ID NO: 643220 - DNA, 33 bp, Homo sapien
atgtgcctcataatgaccattttaatcaataat

SEQ ID NO: 643221 - DNA, 33 bp, Homo sapien
tagtgcacttatgaaacaggccaaatgaagctt

SEQ ID NO: 643222 - DNA, 33 bp, Homo sapien
tagtgcacttatgaaagaggccaaatgaagctt

SEQ ID NO: 643223 - DNA, 33 bp, Homo sapien
ctttaaaaactgaaaacaatggaatgtaatatc

SEQ ID NO: 643224 - DNA, 33 bp, Homo sapien
ctttaaaaactgaaaagaatggaatgtaatatc

SEQ ID NO: 643225 - DNA, 33 bp, Homo sapien
tcctacctgagttatcacttggacaataacagc

SEQ ID NO: 643226 - DNA, 33 bp, Homo sapien
tcctacctgagttatcccttggacaataacagc

SEQ ID NO: 643227 - DNA, 33 bp, Homo sapien
gaagaccttcttcacaaccattgtaagttggat

SEQ ID NO: 643228 - DNA, 33 bp, Homo sapien
gaagaccttcttcacatccattgtaagttggat

SEQ ID NO: 643229 - DNA, 33 bp, Homo sapien
aagtagcatttccgtacagcaaaaatgtttaaa

SEQ ID NO: 643230 - DNA, 33 bp, Homo sapien
aagtagcatttccgtatagcaaaaatgtttaaa

SEQ ID NO: 643231 - DNA, 33 bp, Homo sapien
aatttaaactttacaacgaactcattatttcca

SEQ ID NO: 643232 - DNA, 33 bp, Homo sapien
aatttaaactttacaatgaactcattatttcca

SEQ ID NO: 643233 - DNA, 33 bp, Homo sapien
taaagttccaaaacgccctcacttattctttcc

SEQ ID NO: 643234 - DNA, 33 bp, Homo sapien
taaagttccaaaacgctctcacttattctttcc

SEQ ID NO: 643235 - DNA, 33 bp, Homo sapien
gttgggcggaggacaacctggttacaattgagg

SEQ ID NO: 643236 - DNA, 33 bp, Homo sapien
gttgggcggaggacaagctggttacaattgagg

SEQ ID NO: 643237 - DNA, 33 bp, Homo sapien
ctcaggaagactttcagtaacttcttataaaat

SEQ ID NO: 643238 - DNA, 33 bp, Homo sapien
ctcaggaagactttcattaacttcttataaaat

SEQ ID NO: 643239 - DNA, 33 bp, Homo sapien; identical to SEQ ID NO: 643237

SEQ ID NO: 643240 - DNA, 33 bp, Homo sapien; identical to SEQ ID NO: 643238

SEQ ID NO: 643241 - DNA, 33 bp, Homo sapien
atatttttatgtacaacaatctctaaggcttct

SEQ ID NO: 643242 - DNA, 33 bp, Homo sapien
atatttttatgtacaagaatctctaaggcttct

SEQ ID NO: 643243 - DNA, 33 bp, Homo sapien
caaagccagacactccacctttatttttacctc

SEQ ID NO: 643244 - DNA, 33 bp, Homo sapien
caaagccagacactccgcctttatttttacctc

SEQ ID NO: 643245 - DNA, 33 bp, Homo sapien
tttgatactatagggaaccaggacatgacacta

SEQ ID NO: 643246 - DNA, 33 bp, Homo sapien
tttgatactatagggagccaggacatgacacta

SEQ ID NO: 643247 - DNA, 33 bp, Homo sapien
aacatgagcaggttgtaaagtgtttcagctatc

SEQ ID NO: 643248 - DNA, 33 bp, Homo sapien
aacatgagcaggttgtgaagtgtttcagctatc

SEQ ID NO: 643249 - DNA, 33 bp, Homo sapien
ctcaaatgcaatgtcaatcttgcacaaaacatt

SEQ ID NO: 643250 - DNA, 33 bp, Homo sapien
ctcaaatgcaatgtcagtcttgcacaaaacatt

SEQ ID NO: 643251 - DNA, 33 bp, Homo sapien
atctccagaaaaattacactttcttcgacattg

SEQ ID NO: 643252 - DNA, 33 bp, Homo sapien
atctccagaaaaattatactttcttcgacattg

SEQ ID NO: 643253 - DNA, 33 bp, Homo sapien
tcaaaaggtcatcctactaagggtcattattct

SEQ ID NO: 643254 - DNA, 33 bp, Homo sapien
tcaaaaggtcatcctattaagggtcattattct

SEQ ID NO: 643255 - DNA, 33 bp, Homo sapien
attgagcaaaagatctaaagccttaaataaatg

SEQ ID NO: 643256 - DNA, 33 bp, Homo sapien
attgagcaaaagatctgaagccttaaataaatg

SEQ ID NO: 643257 - DNA, 33 bp, Homo sapien
tcatttattaaaaaacagcctgaaatcaattcc

SEQ ID NO: 643258 - DNA, 33 bp, Homo sapien
tcatttattaaaaaacggcctgaaatcaattcc

SEQ ID NO: 643259 - DNA, 33 bp, Homo sapien
taaaattatgtcaactcaagtgtgtagggtaga

SEQ ID NO: 643260 - DNA, 33 bp, Homo sapien
taaaattatgtcaactgaagtgtgtagggtaga

SEQ ID NO: 643261 - DNA, 33 bp, Homo sapien; identical to SEQ ID NO: 643259

SEQ ID NO: 643262 - DNA, 33 bp, Homo sapien; identical to SEQ ID NO: 643260

SEQ ID NO: 643263 - DNA, 33 bp, Homo sapien
cctcaaggcattctgaagttggaagatcaaatc

SEQ ID NO: 643264 - DNA, 33 bp, Homo sapien
cctcaaggcattctgacgttggaagatcaaatc

SEQ ID NO: 643265 - DNA, 33 bp, Homo sapien
aatgcactataaataccgtatggaaataaatgt

SEQ ID NO: 643266 - DNA, 33 bp, Homo sapien
aatgcactataaatactgtatggaaataaatgt

SEQ ID NO: 643267 - DNA, 33 bp, Homo sapien
tgttcacctttgttaaagaactgaaggattaca

SEQ ID NO: 643268 - DNA, 33 bp, Homo sapien
tgttcacctttgttaaggaactgaaggattaca

SEQ ID NO: 643269 - DNA, 33 bp, Homo sapien
cattttagtctaatagcagtaagtagaccaaaa

SEQ ID NO: 643270 - DNA, 33 bp, Homo sapien
cattttagtctaataggagtaagtagaccaaaa

SEQ ID NO: 643271 - DNA, 33 bp, Homo sapien
gtcttgtgaattttgacgagaggtaaggcatta

SEQ ID NO: 643272 - DNA, 33 bp, Homo sapien
gtcttgtgaattttgatgagaggtaaggcatta

SEQ ID NO: 643273 - DNA, 33 bp, Homo sapien
aaggaacatggcaatgaatttttacatttccaa

SEQ ID NO: 643274 - DNA, 33 bp, Homo sapien
aaggaacatggcaatggatttttacatttccaa

SEQ ID NO: 643275 - DNA, 33 bp, Homo sapien
aacatcagggctacaacgtgtatcaacttgccc

SEQ ID NO: 643276 - DNA, 33 bp, Homo sapien
aacatcagggctacaatgtgtatcaacttgccc

SEQ ID NO: 643277 - DNA, 33 bp, Homo sapien; identical to SEQ ID NO: 643275

SEQ ID NO: 643278 - DNA, 33 bp, Homo sapien; identical to SEQ ID NO: 643276

SEQ ID NO: 643279 - DNA, 33 bp, Homo sapien
aggaagtcctcttctaaatgacaacaaatctga

SEQ ID NO: 643280 - DNA, 33 bp, Homo sapien
aggaagtcctcttctacatgacaacaaatctga

SEQ ID NO: 643281 - DNA, 33 bp, Homo sapien
tagaactaatccctcacggagaacgtggaacca

SEQ ID NO: 643282 - DNA, 33 bp, Homo sapien
tagaactaatccctcatggagaacgtggaacca

SEQ ID NO: 643283 - DNA, 33 bp, Homo sapien
gattacacgcacaaaccaccgtgcccagtcgcc

SEQ ID NO: 643284 - DNA, 33 bp, Homo sapien
gattacacgcacaaacgaccgtgcccagtcgcc

SEQ ID NO: 643285 - DNA, 33 bp, Homo sapien
tgtagggaggcgataacgcaaatattagacaat

SEQ ID NO: 643286 - DNA, 33 bp, Homo sapien
tgtagggaggcgataatgcaaatattagacaat

SEQ ID NO: 643287 - DNA, 33 bp, Homo sapien
aggtcatagagcactcagaaaaaatatgatcat

SEQ ID NO: 643288 - DNA, 33 bp, Homo sapien
aggtcatagagcactcggaaaaaatatgatcat

SEQ ID NO: 643289 - DNA, 33 bp, Homo sapien
ttaagatcgtgggttacggcatcagagagattt

SEQ ID NO: 643290 - DNA, 33 bp, Homo sapien
ttaagatcgtgggttatggcatcagagagattt

SEQ ID NO: 643291 - DNA, 33 bp, Homo sapien
aagacatttagccatactaatctatcctattgg

SEQ ID NO: 643292 - DNA, 33 bp, Homo sapien
aagacatttagccatattaatctatcctattgg

SEQ ID NO: 643293 - DNA, 33 bp, Homo sapien
cctcagactgatcacagtcaccttctaatcatg

SEQ ID NO: 643294 - DNA, 33 bp, Homo sapien
cctcagactgatcacattcaccttctaatcatg

SEQ ID NO: 643295 - DNA, 33 bp, Homo sapien
gacattttaccatagcaaacttacccatgcttg

SEQ ID NO: 643296 - DNA, 33 bp, Homo sapien
gacattttaccatagcgaacttacccatgcttg

SEQ ID NO: 643297 - DNA, 33 bp, Homo sapien
acattttgttttcatccgagaaagctgactata

SEQ ID NO: 643298 - DNA, 33 bp, Homo sapien
acattttgttttcatctgagaaagctgactata

SEQ ID NO: 643299 - DNA, 33 bp, Homo sapien
gttacatgattaatacagtacaatctttgaggc

SEQ ID NO: 643300 - DNA, 33 bp, Homo sapien
gttacatgattaatactgtacaatctttgaggc

SEQ ID NO: 643301 - DNA, 33 bp, Homo sapien
gattcacctatgaatcaccttaaaatatattgt

SEQ ID NO: 643302 - DNA, 33 bp, Homo sapien
gattcacctatgaatcgccttaaaatatattgt

SEQ ID NO: 643303 - DNA, 33 bp, Homo sapien
aaatagaatactccacagcattgtgaatgaggg

SEQ ID NO: 643304 - DNA, 33 bp, Homo sapien
aaatagaatactccacggcattgtgaatgaggg

SEQ ID NO: 643305 - DNA, 33 bp, Homo sapien
ccccacacaatttgcacgaaaataattgttgca

SEQ ID NO: 643306 - DNA, 33 bp, Homo sapien
ccccacacaatttgcatgaaaataattgttgca

SEQ ID NO: 643307 - DNA, 33 bp, Homo sapien
aacattatactcaataggcagtttattaaccct

SEQ ID NO: 643308 - DNA, 33 bp, Homo sapien
aacattatactcaatatgcagtttattaaccct

SEQ ID NO: 643309 - DNA, 33 bp, Homo sapien
tgtatttttaatcccaaaagtgttgaatgagtc

SEQ ID NO: 643310 - DNA, 33 bp, Homo sapien
tgtatttttaatcccagaagtgttgaatgagtc

SEQ ID NO: 643311 - DNA, 33 bp, Homo sapien
ttaaagaaaatatcacacaatttaaaggtttta

SEQ ID NO: 643312 - DNA, 33 bp, Homo sapien
ttaaagaaaatatcacgcaatttaaaggtttta

SEQ ID NO: 643313 - DNA, 33 bp, Homo sapien
tgaagggttatgattagaaatggaacatgagtg

SEQ ID NO: 643314 - DNA, 33 bp, Homo sapien
tgaagggttatgattataaatggaacatgagtg

SEQ ID NO: 643315 - DNA, 33 bp, Homo sapien
aaataggtagagtgacaatttccacttgatgaa

SEQ ID NO: 643316 - DNA, 33 bp, Homo sapien
aaataggtagagtgacgatttccacttgatgaa

SEQ ID NO: 643317 - DNA, 33 bp, Homo sapien
atttcagacaaaattcagaataaccacttcact

SEQ ID NO: 643318 - DNA, 33 bp, Homo sapien
atttcagacaaaattcggaataaccacttcact

SEQ ID NO: 643319 - DNA, 33 bp, Homo sapien
ccatgtgtatttcttccccttagcacttaccaa

SEQ ID NO: 643320 - DNA, 33 bp, Homo sapien
ccatgtgtatttcttctccttagcacttaccaa

SEQ ID NO: 643321 - DNA, 33 bp, Homo sapien
tgaaatgtgagcaaagacgcaaaggaacagaga

SEQ ID NO: 643322 - DNA, 33 bp, Homo sapien
tgaaatgtgagcaaagtcgcaaaggaacagaga

SEQ ID NO: 643323 - DNA, 33 bp, Homo sapien
caagtctgcttttaaagtgaataccagttgaag

SEQ ID NO: 643324 - DNA, 33 bp, Homo sapien
caagtctgcttttaaattgaataccagttgaag

SEQ ID NO: 643325 - DNA, 33 bp, Homo sapien
atctctgcaatgtcgaacataagagatgaccac

SEQ ID NO: 643326 - DNA, 33 bp, Homo sapien
atctctgcaatgtcgaccataagagatgaccac

SEQ ID NO: 643327 - DNA, 33 bp, Homo sapien
ggaaaatgatacaggtcacaaagtcatatctac

SEQ ID NO: 643328 - DNA, 33 bp, Homo sapien
ggaaaatgatacaggttacaaagtcatatctac

SEQ ID NO: 643329 - DNA, 33 bp, Homo sapien
acgcagtgcttatgccaaagttgatttccagga

SEQ ID NO: 643330 - DNA, 33 bp, Homo sapien
acgcagtgcttatgccgaagttgatttccagga

SEQ ID NO: 643331 - DNA, 33 bp, Homo sapien
gcagctgagtccaataaggagaaggaatatgga

SEQ ID NO: 643332 - DNA, 33 bp, Homo sapien
gcagctgagtccaatacggagaaggaatatgga

SEQ ID NO: 643333 - DNA, 33 bp, Homo sapien
tgggcatcttgtcaaaatttcagaatgcactaa

SEQ ID NO: 643334 - DNA, 33 bp, Homo sapien
tgggcatcttgtcaaagtttcagaatgcactaa

SEQ ID NO: 643335 - DNA, 33 bp, Homo sapien
actggttttaaccaaaattcaacatatcagtat

SEQ ID NO: 643336 - DNA, 33 bp, Homo sapien
actggttttaaccaaagttcaacatatcagtat

SEQ ID NO: 643337 - DNA, 33 bp, Homo sapien
atgcatctttctatcactctgcaaatattcata

SEQ ID NO: 643338 - DNA, 33 bp, Homo sapien
atgcatctttctatcattctgcaaatattcata

SEQ ID NO: 643339 - DNA, 33 bp, Homo sapien
atacaatccaaacaaacgaaatcttacctaaaa

SEQ ID NO: 643340 - DNA, 33 bp, Homo sapien
atacaatccaaacaaatgaaatcttacctaaaa

SEQ ID NO: 643341 - DNA, 33 bp, Homo sapien
cataagaagggaagaactgattcctaattttct

SEQ ID NO: 643342 - DNA, 33 bp, Homo sapien
cataagaagggaagaattgattcctaattttct

SEQ ID NO: 643343 - DNA, 33 bp, Homo sapien
attacatattatagaacgagatgagcttttaag

SEQ ID NO: 643344 - DNA, 33 bp, Homo sapien
attacatattatagaaggagatgagcttttaag

SEQ ID NO: 643345 - DNA, 33 bp, Homo sapien
gttatttatcagactgaaaaagaagccatatag

SEQ ID NO: 643346 - DNA, 33 bp, Homo sapien
gttatttatcagactgcaaaagaagccatatag

SEQ ID NO: 643347 - DNA, 33 bp, Homo sapien
taactttttcagttcaaacttttctgaggccat

SEQ ID NO: 643348 - DNA, 33 bp, Homo sapien
taactttttcagttcacacttttctgaggccat

SEQ ID NO: 643349 - DNA, 33 bp, Homo sapien
tggcacgcttgctctccgacagaccctttctct

SEQ ID NO: 643350 - DNA, 33 bp, Homo sapien
tggcacgcttgctctctgacagaccctttctct

SEQ ID NO: 643351 - DNA, 33 bp, Homo sapien
atggaatcttcttccaatacgaggctgttttgt

SEQ ID NO: 643352 - DNA, 33 bp, Homo sapien
atggaatcttcttccagtacgaggctgttttgt

SEQ ID NO: 643353 - DNA, 33 bp, Homo sapien
ctctgttgtttgctgaaatagtttgctctccct

SEQ ID NO: 643354 - DNA, 33 bp, Homo sapien
ctctgttgtttgctgagatagtttgctctccct

SEQ ID NO: 643355 - DNA, 33 bp, Homo sapien
aaacccagaagaggaaccagccgttctgttaag

SEQ ID NO: 643356 - DNA, 33 bp, Homo sapien
aaacccagaagaggaatcagccgttctgttaag

SEQ ID NO: 643357 - DNA, 33 bp, Homo sapien
attagctgcttgaacaaacaaaccaacgctctt

SEQ ID NO: 643358 - DNA, 33 bp, Homo sapien
attagctgcttgaacagacaaaccaacgctctt

SEQ ID NO: 643359 - DNA, 33 bp, Homo sapien
ggaaagaaaaactacacaggatgagagaacttc

SEQ ID NO: 643360 - DNA, 33 bp, Homo sapien
ggaaagaaaaactacataggatgagagaacttc

SEQ ID NO: 643361 - DNA, 33 bp, Homo sapien
ggtcctgttctcacaacggttttctcctctctt

SEQ ID NO: 643362 - DNA, 33 bp, Homo sapien
ggtcctgttctcacaatggttttctcctctctt

SEQ ID NO: 643363 - DNA, 33 bp, Homo sapien
gagtgctttcaagatgcaatgtcagaactatat

SEQ ID NO: 643364 - DNA, 33 bp, Homo sapien
gagtgctttcaagatgtaatgtcagaactatat

SEQ ID NO: 643365 - DNA, 33 bp, Homo sapien
ctgtaactttcacatacgtttggagcattatgt

SEQ ID NO: 643366 - DNA, 33 bp, Homo sapien
ctgtaactttcacatatgtttggagcattatgt

SEQ ID NO: 643367 - DNA, 33 bp, Homo sapien
ttctcagaggatttaaaatattttctcaccctt

SEQ ID NO: 643368 - DNA, 33 bp, Homo sapien
ttctcagaggatttaagatattttctcaccctt

SEQ ID NO: 643369 - DNA, 33 bp, Homo sapien
tcagtgctttatcccaccacaaaggatgttgct

SEQ ID NO: 643370 - DNA, 33 bp, Homo sapien
tcagtgctttatcccagcacaaaggatgttgct

SEQ ID NO: 643371 - DNA, 33 bp, Homo sapien
atgctaggtaataaaacacatggactcttagta

SEQ ID NO: 643372 - DNA, 33 bp, Homo sapien
atgctaggtaataaaatacatggactcttagta

SEQ ID NO: 643373 - DNA, 33 bp, Homo sapien
tatgataatttgtctgaaagcgagtacctctgt

SEQ ID NO: 643374 - DNA, 33 bp, Homo sapien
tatgataatttgtctggaagcgagtacctctgt

SEQ ID NO: 643375 - DNA, 33 bp, Homo sapien
atagtctagtattggcaaaacaatcatatccac

SEQ ID NO: 643376 - DNA, 33 bp, Homo sapien
atagtctagtattggcgaaacaatcatatccac

SEQ ID NO: 643377 - DNA, 33 bp, Homo sapien
catgccaaattgtaaacatcgtcgaggctagga

SEQ ID NO: 643378 - DNA, 33 bp, Homo sapien
catgccaaattgtaaagatcgtcgaggctagga

SEQ ID NO: 643379 - DNA, 33 bp, Homo sapien
ccttgaatcctgagtaaccacaaactagcacat

SEQ ID NO: 643380 - DNA, 33 bp, Homo sapien
ccttgaatcctgagtatccacaaactagcacat

SEQ ID NO: 643381 - DNA, 33 bp, Homo sapien
cgtgttctaagacagcaattttcccctcaaacc

SEQ ID NO: 643382 - DNA, 33 bp, Homo sapien
cgtgttctaagacagcgattttcccctcaaacc

SEQ ID NO: 643383 - DNA, 33 bp, Homo sapien
gcctgtttcactcccaacgtgcctgcaaagccc

SEQ ID NO: 643384 - DNA, 33 bp, Homo sapien
gcctgtttcactcccatcgtgcctgcaaagccc

SEQ ID NO: 643385 - DNA, 33 bp, Homo sapien
agcttcatgtctagaacggcctgtgctctgcct

SEQ ID NO: 643386 - DNA, 33 bp, Homo sapien
agcttcatgtctagaatggcctgtgctctgcct

SEQ ID NO: 643387 - DNA, 33 bp, Homo sapien
ttttcatttcactccaatcatagcacttagatt

SEQ ID NO: 643388 - DNA, 33 bp, Homo sapien
ttttcatttcactccagtcatagcacttagatt

SEQ ID NO: 643389 - DNA, 33 bp, Homo sapien
tgagcagcatcaaatacgtttgagtacgtcaaa

SEQ ID NO: 643390 - DNA, 33 bp, Homo sapien
tgagcagcatcaaatatgtttgagtacgtcaaa

SEQ ID NO: 643391 - DNA, 33 bp, Homo sapien
tgtagtctttcacaccaagagagatttctaagt

SEQ ID NO: 643392 - DNA, 33 bp, Homo sapien
tgtagtctttcacaccgagagagatttctaagt

SEQ ID NO: 643393 - DNA, 33 bp, Homo sapien
gcatatacgtctcctacgttgccttatatttta

SEQ ID NO: 643394 - DNA, 33 bp, Homo sapien
gcatatacgtctcctatgttgccttatatttta

SEQ ID NO: 643395 - DNA, 33 bp, Homo sapien
aatgccaaaaggtagacgacacattacaaaatt

SEQ ID NO: 643396 - DNA, 33 bp, Homo sapien
aatgccaaaaggtagatgacacattacaaaatt

SEQ ID NO: 643397 - DNA, 33 bp, Homo sapien
actgcatacttctaccaaattggttccaaatct

SEQ ID NO: 643398 - DNA, 33 bp, Homo sapien
actgcatacttctaccgaattggttccaaatct

SEQ ID NO: 643399 - DNA, 33 bp, Homo sapien
ttacaggtttattgcaatgacaaaatgggacaa

SEQ ID NO: 643400 - DNA, 33 bp, Homo sapien
ttacaggtttattgcagtgacaaaatgggacaa

SEQ ID NO: 643401 - DNA, 33 bp, Homo sapien
gttgtacgagtttggaaccaatatagaccaaga

SEQ ID NO: 643402 - DNA, 33 bp, Homo sapien
gttgtacgagtttggatccaatatagaccaaga

SEQ ID NO: 643403 - DNA, 33 bp, Homo sapien
ggtgcatatatacatcaagaaaaatctttctag

SEQ ID NO: 643404 - DNA, 33 bp, Homo sapien
ggtgcatatatacatcgagaaaaatctttctag

SEQ ID NO: 643405 - DNA, 33 bp, Homo sapien
aaggcgaggctacatcacaggaactcagaatct

SEQ ID NO: 643406 - DNA, 33 bp, Homo sapien
aaggcgaggctacatcgcaggaactcagaatct

SEQ ID NO: 643407 - DNA, 33 bp, Homo sapien
accactttgaagaaaacgatgttgggaagcgta

SEQ ID NO: 643408 - DNA, 33 bp, Homo sapien
accactttgaagaaaatgatgttgggaagcgta

SEQ ID NO: 643409 - DNA, 33 bp, Homo sapien
ctcttgcctttgaaaacgctcctgaagttcaaa

SEQ ID NO: 643410 - DNA, 33 bp, Homo sapien
ctcttgcctttgaaaatgctcctgaagttcaaa

SEQ ID NO: 643411 - DNA, 33 bp, Homo sapien
atgtcgttaaaaccaaacagaggaatctagagg

SEQ ID NO: 643412 - DNA, 33 bp, Homo sapien
atgtcgttaaaaccaagcagaggaatctagagg

SEQ ID NO: 643413 - DNA, 33 bp, Homo sapien
aatcatgctacctgcccgagaaggttgttgtga

SEQ ID NO: 643414 - DNA, 33 bp, Homo sapien
aatcatgctacctgcctgagaaggttgttgtga

SEQ ID NO: 643415 - DNA, 33 bp, Homo sapien
actttggttagtcataaagcaatttgatgacta

SEQ ID NO: 643416 - DNA, 33 bp, Homo sapien
actttggttagtcatatagcaatttgatgacta

SEQ ID NO: 643417 - DNA, 33 bp, Homo sapien
tagtttgaaacaaataccatcagtacctttgct

SEQ ID NO: 643418 - DNA, 33 bp, Homo sapien
tagtttgaaacaaatagcatcagtacctttgct

SEQ ID NO: 643419 - DNA, 33 bp, Homo sapien
tctctctataatataccggcttcctgtacattt

SEQ ID NO: 643420 - DNA, 33 bp, Homo sapien
tctctctataatatactggcttcctgtacattt

SEQ ID NO: 643421 - DNA, 33 bp, Homo sapien
attaaagctggaaaacagaaaagagatctaaac

SEQ ID NO: 643422 - DNA, 33 bp, Homo sapien
attaaagctggaaaaccgaaaagagatctaaac

SEQ ID NO: 643423 - DNA, 33 bp, Homo sapien
cctctcttttcagcaacggctttgtaattctga

SEQ ID NO: 643424 - DNA, 33 bp, Homo sapien
cctctcttttcagcaatggctttgtaattctga

SEQ ID NO: 643425 - DNA, 33 bp, Homo sapien
tgcacacagaaaaaaaatattgggcttctgaaa

SEQ ID NO: 643426 - DNA, 33 bp, Homo sapien
tgcacacagaaaaaaagtattgggcttctgaaa

SEQ ID NO: 643427 - DNA, 33 bp, Homo sapien
aaattacacacaaataatacttgacatggtttt

SEQ ID NO: 643428 - DNA, 33 bp, Homo sapien
aaattacacacaaatactacttgacatggtttt

SEQ ID NO: 643429 - DNA, 33 bp, Homo sapien
tgggagccatgtagaacagcacctaatacttgc

SEQ ID NO: 643430 - DNA, 33 bp, Homo sapien
tgggagccatgtagaagagcacctaatacttgc

SEQ ID NO: 643431 - DNA, 33 bp, Homo sapien
aatgatggactgatgaccagatttacttgactg

SEQ ID NO: 643432 - DNA, 33 bp, Homo sapien
aatgatggactgatgagcagatttacttgactg

SEQ ID NO: 643433 - DNA, 33 bp, Homo sapien
atatgtaaattaacagcaatagtttagacagca

SEQ ID NO: 643434 - DNA, 33 bp, Homo sapien
atatgtaaattaacaggaatagtttagacagca

SEQ ID NO: 643435 - DNA, 33 bp, Homo sapien
tgtttttaattaagtcaccagtgcccagacagt

SEQ ID NO: 643436 - DNA, 33 bp, Homo sapien
tgtttttaattaagtcgccagtgcccagacagt

SEQ ID NO: 643437 - DNA, 33 bp, Homo sapien
tatgccatttccagtactaactctgcttcaaac

SEQ ID NO: 643438 - DNA, 33 bp, Homo sapien
tatgccatttccagtattaactctgcttcaaac

SEQ ID NO: 643439 - DNA, 33 bp, Homo sapien
atctgaagtgtcattcaccaataagcagaaaca

SEQ ID NO: 643440 - DNA, 33 bp, Homo sapien
atctgaagtgtcattcgccaataagcagaaaca

SEQ ID NO: 643441 - DNA, 33 bp, Homo sapien
actaaatgaagggtaacagaaattatgtgagag

SEQ ID NO: 643442 - DNA, 33 bp, Homo sapien
actaaatgaagggtaagagaaattatgtgagag

SEQ ID NO: 643443 - DNA, 33 bp, Homo sapien
cctaagatataagcaacgtttttgattaaacac

SEQ ID NO: 643444 - DNA, 33 bp, Homo sapien
cctaagatataagcaatgtttttgattaaacac

SEQ ID NO: 643445 - DNA, 33 bp, Homo sapien
tgtgtctccacagaaaattgtcattccaatcca

SEQ ID NO: 643446 - DNA, 33 bp, Homo sapien
tgtgtctccacagaaagttgtcattccaatcca

SEQ ID NO: 643447 - DNA, 33 bp, Homo sapien
gcaattgctgaaaacaatagccgaaaaaaggtt

SEQ ID NO: 643448 - DNA, 33 bp, Homo sapien
gcaattgctgaaaacagtagccgaaaaaaggtt

SEQ ID NO: 643449 - DNA, 33 bp, Homo sapien
taggtctaaatcaataataacacagcctagatc

SEQ ID NO: 643450 - DNA, 33 bp, Homo sapien
taggtctaaatcaatagtaacacagcctagatc

SEQ ID NO: 643451 - DNA, 33 bp, Homo sapien
tagtagtcactcaaaaattttccatgaccaaat

SEQ ID NO: 643452 - DNA, 33 bp, Homo sapien
tagtagtcactcaaaacttttccatgaccaaat

SEQ ID NO: 643453 - DNA, 33 bp, Homo sapien
aaataattgatgctaactgggaaactgtgacta

SEQ ID NO: 643454 - DNA, 33 bp, Homo sapien
aaataattgatgctaagtgggaaactgtgacta

SEQ ID NO: 643455 - DNA, 33 bp, Homo sapien
agcttatttaagtatacggacagagctgcaggc

SEQ ID NO: 643456 - DNA, 33 bp, Homo sapien
agcttatttaagtatatggacagagctgcaggc

SEQ ID NO: 643457 - DNA, 33 bp, Homo sapien; identical to SEQ ID NO: 643455

SEQ ID NO: 643458 - DNA, 33 bp, Homo sapien; identical to SEQ ID NO: 643456

SEQ ID NO: 643459 - DNA, 33 bp, Homo sapien
ctccactgtaaaacacaaacttcatgtggcatg

SEQ ID NO: 643460 - DNA, 33 bp, Homo sapien
ctccactgtaaaacaccaacttcatgtggcatg

SEQ ID NO: 643461 - DNA, 33 bp, Homo sapien
gagcccagaaagtgcaggagtacctgtctattg

SEQ ID NO: 643462 - DNA, 33 bp, Homo sapien
gagcccagaaagtgcatgagtacctgtctattg

SEQ ID NO: 643463 - DNA, 33 bp, Homo sapien
ataaaaattgaacaaaacaatggaatgtcatta

SEQ ID NO: 643464 - DNA, 33 bp, Homo sapien
ataaaaattgaacaaaccaatggaatgtcatta

SEQ ID NO: 643465 - DNA, 33 bp, Homo sapien
tgtcgattactaaataaatagaactatggaaaa

SEQ ID NO: 643466 - DNA, 33 bp, Homo sapien
tgtcgattactaaatagatagaactatggaaaa

SEQ ID NO: 643467 - DNA, 33 bp, Homo sapien
aaaatttgcccaaagacggacaaagggtagcac

SEQ ID NO: 643468 - DNA, 33 bp, Homo sapien
aaaatttgcccaaagagggacaaagggtagcac

SEQ ID NO: 643469 - DNA, 33 bp, Homo sapien
cttcataatatttgaaagttaacatcaagccat

SEQ ID NO: 643470 - DNA, 33 bp, Homo sapien
cttcataatatttgaaggttaacatcaagccat

SEQ ID NO: 643471 - DNA, 33 bp, Homo sapien
acagagatcaaaaggacaaaatgtatggtagga

SEQ ID NO: 643472 - DNA, 33 bp, Homo sapien
acagagatcaaaaggagaaaatgtatggtagga

SEQ ID NO: 643473 - DNA, 33 bp, Homo sapien
aacacagtaagatcgacgtaggtgatcccaagg

SEQ ID NO: 643474 - DNA, 33 bp, Homo sapien
aacacagtaagatcgatgtaggtgatcccaagg

SEQ ID NO: 643475 - DNA, 33 bp, Homo sapien
gcataatttttggatacctaaatcttgttttct

SEQ ID NO: 643476 - DNA, 33 bp, Homo sapien
gcataatttttggatagctaaatcttgttttct

SEQ ID NO: 643477 - DNA, 33 bp, Homo sapien
atataaaattggctaagagtttgtcgctgccct

SEQ ID NO: 643478 - DNA, 33 bp, Homo sapien
atataaaattggctaatagtttgtcgctgccct

SEQ ID NO: 643479 - DNA, 33 bp, Homo sapien
gaggaagacgagagcaacatggagcagaggaag

SEQ ID NO: 643480 - DNA, 33 bp, Homo sapien
gaggaagacgagagcagcatggagcagaggaag

SEQ ID NO: 643481 - DNA, 33 bp, Homo sapien
ccatagggaatgatcaaattaatatttctgtca

SEQ ID NO: 643482 - DNA, 33 bp, Homo sapien
ccatagggaatgatcagattaatatttctgtca

SEQ ID NO: 643483 - DNA, 33 bp, Homo sapien
atacctctagtttctccgacaagttaactcaaa

SEQ ID NO: 643484 - DNA, 33 bp, Homo sapien
atacctctagtttctctgacaagttaactcaaa

SEQ ID NO: 643485 - DNA, 33 bp, Homo sapien
acagtcttcaaacttccagactctcattctctt

SEQ ID NO: 643486 - DNA, 33 bp, Homo sapien
acagtcttcaaacttctagactctcattctctt

SEQ ID NO: 643487 - DNA, 33 bp, Homo sapien
gttaacagtgtgtgaacttaggctggatgtgat

SEQ ID NO: 643488 - DNA, 33 bp, Homo sapien
gttaacagtgtgtgaagttaggctggatgtgat

SEQ ID NO: 643489 - DNA, 33 bp, Homo sapien
tacaaacacaccatgacattgaagttactatat

SEQ ID NO: 643490 - DNA, 33 bp, Homo sapien
tacaaacacaccatgatattgaagttactatat

SEQ ID NO: 643491 - DNA, 33 bp, Homo sapien
aataatagctaacaacactagattaagttttgg

SEQ ID NO: 643492 - DNA, 33 bp, Homo sapien
aataatagctaacaacgctagattaagttttgg

SEQ ID NO: 643493 - DNA, 33 bp, Homo sapien
gaattaaactgacatacgacagattaagaggag

SEQ ID NO: 643494 - DNA, 33 bp, Homo sapien
gaattaaactgacatatgacagattaagaggag

SEQ ID NO: 643495 - DNA, 33 bp, Homo sapien
taagaaaagagaatgaccgtaattaatctataa

SEQ ID NO: 643496 - DNA, 33 bp, Homo sapien
taagaaaagagaatgatcgtaattaatctataa

SEQ ID NO: 643497 - DNA, 33 bp, Homo sapien
cacatacctggcacaactgaacacttaataata

SEQ ID NO: 643498 - DNA, 33 bp, Homo sapien
cacatacctggcacaattgaacacttaataata

SEQ ID NO: 643499 - DNA, 33 bp, Homo sapien
agtgccaaaattataccacgagtagaaaattct

SEQ ID NO: 643500 - DNA, 33 bp, Homo sapien
agtgccaaaattatacgacgagtagaaaattct

SEQ ID NO: 643501 - DNA, 33 bp, Homo sapien
attctttcaatatacaatcaagatcttcattta

SEQ ID NO: 643502 - DNA, 33 bp, Homo sapien
attctttcaatatacagtcaagatcttcattta

SEQ ID NO: 643503 - DNA, 33 bp, Homo sapien
acacttcattcaggcaatcatgtatctaacctc

SEQ ID NO: 643504 - DNA, 33 bp, Homo sapien
acacttcattcaggcagtcatgtatctaacctc

SEQ ID NO: 643505 - DNA, 33 bp, Homo sapien
ctgtatcaagttctggaatcataaaatgggtta

SEQ ID NO: 643506 - DNA, 33 bp, Homo sapien
ctgtatcaagttctgggatcataaaatgggtta

SEQ ID NO: 643507 - DNA, 33 bp, Homo sapien
taaaacaggaatagcaatagcaactgtatcaag

SEQ ID NO: 643508 - DNA, 33 bp, Homo sapien
taaaacaggaatagcagtagcaactgtatcaag

SEQ ID NO: 643509 - DNA, 33 bp, Homo sapien
ctttctggccacagataaactggaaacgccatt

SEQ ID NO: 643510 - DNA, 33 bp, Homo sapien
ctttctggccacagatgaactggaaacgccatt

SEQ ID NO: 643511 - DNA, 33 bp, Homo sapien
tctcaaattaggcaaccgttctagcaactcaca

SEQ ID NO: 643512 - DNA, 33 bp, Homo sapien
tctcaaattaggcaactgttctagcaactcaca

SEQ ID NO: 643513 - DNA, 33 bp, Homo sapien
aaaaccagtgcaaaaaaggaaacagttctacat

SEQ ID NO: 643514 - DNA, 33 bp, Homo sapien
aaaaccagtgcaaaaagggaaacagttctacat

SEQ ID NO: 643515 - DNA, 33 bp, Homo sapien
aattaaatatacctgaagaaatctgtacccagt

SEQ ID NO: 643516 - DNA, 33 bp, Homo sapien
aattaaatatacctgaggaaatctgtacccagt

SEQ ID NO: 643517 - DNA, 33 bp, Homo sapien
ttgactaatttaacgggcatcatgtcattgtga

SEQ ID NO: 643518 - DNA, 33 bp, Homo sapien
ttgactaatttaacggtcatcatgtcattgtga

SEQ ID NO: 643519 - DNA, 33 bp, Homo sapien
tggaaatagtataaaacatgaggcttgagtggg

SEQ ID NO: 643520 - DNA, 33 bp, Homo sapien
tggaaatagtataaaatatgaggcttgagtggg

SEQ ID NO: 643521 - DNA, 33 bp, Homo sapien
catgtcaactcccataacacactcatcatcgta

SEQ ID NO: 643522 - DNA, 33 bp, Homo sapien
catgtcaactcccatagcacactcatcatcgta

SEQ ID NO: 643523 - DNA, 33 bp, Homo sapien
tctacttttgagttgactatgttacctagatat

SEQ ID NO: 643524 - DNA, 33 bp, Homo sapien
tctacttttgagttgagtatgttacctagatat

SEQ ID NO: 643525 - DNA, 33 bp, Homo sapien
aaactgcaacttttcacctatttgctaagcttt

SEQ ID NO: 643526 - DNA, 33 bp, Homo sapien
aaactgcaacttttcatctatttgctaagcttt

SEQ ID NO: 643527 - DNA, 33 bp, Homo sapien
catatattgaagtctcaactcctagtacttcag

SEQ ID NO: 643528 - DNA, 33 bp, Homo sapien
catatattgaagtctcgactcctagtacttcag

SEQ ID NO: 643529 - DNA, 33 bp, Homo sapien
tcactaaaaattttcccagacaattcatcacaa

SEQ ID NO: 643530 - DNA, 33 bp, Homo sapien
tcactaaaaattttcctagacaattcatcacaa

SEQ ID NO: 643531 - DNA, 33 bp, Homo sapien
gtgctcccatgtggtaagtacctgtattagtcc

SEQ ID NO: 643532 - DNA, 33 bp, Homo sapien
gtgctcccatgtggtacgtacctgtattagtcc

SEQ ID NO: 643533 - DNA, 33 bp, Homo sapien
ggagaggttgtgaagcaaaaggaatgcttatac

SEQ ID NO: 643534 - DNA, 33 bp, Homo sapien
ggagaggttgtgaagcgaaaggaatgcttatac

SEQ ID NO: 643535 - DNA, 33 bp, Homo sapien
gtctagagaggaataacagtctctgtcagtaac

SEQ ID NO: 643536 - DNA, 33 bp, Homo sapien
gtctagagaggaataagagtctctgtcagtaac

SEQ ID NO: 643537 - DNA, 33 bp, Homo sapien
tcagtgaaggacattaccattatgtattagcac

SEQ ID NO: 643538 - DNA, 33 bp, Homo sapien
tcagtgaaggacattatcattatgtattagcac

SEQ ID NO: 643539 - DNA, 33 bp, Homo sapien
acaaagtaaatagccactgaaagctcaaagtga

SEQ ID NO: 643540 - DNA, 33 bp, Homo sapien
acaaagtaaatagccattgaaagctcaaagtga

SEQ ID NO: 643541 - DNA, 33 bp, Homo sapien
tgtccctcagtacaccccaaatgtgcataaaaa

SEQ ID NO: 643542 - DNA, 33 bp, Homo sapien
tgtccctcagtacaccgcaaatgtgcataaaaa

SEQ ID NO: 643543 - DNA, 33 bp, Homo sapien
cagacaaaaataaacccgagcacattggcaaga

SEQ ID NO: 643544 - DNA, 33 bp, Homo sapien
cagacaaaaataaacctgagcacattggcaaga

SEQ ID NO: 643545 - DNA, 33 bp, Homo sapien
catggcattggcaacccccagaattctcagaaa

SEQ ID NO: 643546 - DNA, 33 bp, Homo sapien
catggcattggcaacctccagaattctcagaaa

SEQ ID NO: 643547 - DNA, 33 bp, Homo sapien
tttaaagtcagaaagtaaccatccagagtgcat

SEQ ID NO: 643548 - DNA, 33 bp, Homo sapien
tttaaagtcagaaagtgaccatccagagtgcat

SEQ ID NO: 643549 - DNA, 33 bp, Homo sapien
aactttaagtactggcagatgtgtacagatgat

SEQ ID NO: 643550 - DNA, 33 bp, Homo sapien
aactttaagtactggcggatgtgtacagatgat

SEQ ID NO: 643551 - DNA, 33 bp, Homo sapien
tagtgacctgggaacacggcctggttgaattca

SEQ ID NO: 643552 - DNA, 33 bp, Homo sapien
tagtgacctgggaacatggcctggttgaattca

SEQ ID NO: 643553 - DNA, 33 bp, Homo sapien
cttcaagttagtcctacgggaaggtcagtgcaa

SEQ ID NO: 643554 - DNA, 33 bp, Homo sapien
cttcaagttagtcctatgggaaggtcagtgcaa

SEQ ID NO: 643555 - DNA, 33 bp, Homo sapien
cactaatacaatgaccacctgtttgtacctcac

SEQ ID NO: 643556 - DNA, 33 bp, Homo sapien
cactaatacaatgaccgcctgtttgtacctcac

SEQ ID NO: 643557 - DNA, 33 bp, Homo sapien
gatgtaacagcatgaaacttgcaccacattgct

SEQ ID NO: 643558 - DNA, 33 bp, Homo sapien
gatgtaacagcatgaagcttgcaccacattgct

SEQ ID NO: 643559 - DNA, 33 bp, Homo sapien
attaaagctgaatataataagtgtcttatatga

SEQ ID NO: 643560 - DNA, 33 bp, Homo sapien
attaaagctgaatatagtaagtgtcttatatga

SEQ ID NO: 643561 - DNA, 33 bp, Homo sapien
ctgagttccaattgacagcagtctctcaagtcc

SEQ ID NO: 643562 - DNA, 33 bp, Homo sapien
ctgagttccaattgacggcagtctctcaagtcc

SEQ ID NO: 643563 - DNA, 33 bp, Homo sapien
ctgaagcaacctcacaatcttcagatttcagcc

SEQ ID NO: 643564 - DNA, 33 bp, Homo sapien
ctgaagcaacctcacagtcttcagatttcagcc

SEQ ID NO: 643565 - DNA, 33 bp, Homo sapien
gtttacagattttagcactgaattgtttagcag

SEQ ID NO: 643566 - DNA, 33 bp, Homo sapien
gtttacagattttagcgctgaattgtttagcag

SEQ ID NO: 643567 - DNA, 33 bp, Homo sapien
gtgtgcaggtaattaaagctaaacattgtgcaa

SEQ ID NO: 643568 - DNA, 33 bp, Homo sapien
gtgtgcaggtaattaatgctaaacattgtgcaa

SEQ ID NO: 643569 - DNA, 33 bp, Homo sapien
actcacagctttagacagtcaaactgttttctt

SEQ ID NO: 643570 - DNA, 33 bp, Homo sapien
actcacagctttagaccgtcaaactgttttctt

SEQ ID NO: 643571 - DNA, 33 bp, Homo sapien
ttagtttatcttcaaaatagaaggttcatacac

SEQ ID NO: 643572 - DNA, 33 bp, Homo sapien
ttagtttatcttcaaattagaaggttcatacac

SEQ ID NO: 643573 - DNA, 33 bp, Homo sapien
gaaacattttctaatcagaggaagcatcttata

SEQ ID NO: 643574 - DNA, 33 bp, Homo sapien
gaaacattttctaatccgaggaagcatcttata

SEQ ID NO: 643575 - DNA, 33 bp, Homo sapien
cctgctttcaacctgcaagtcactctgttctct

SEQ ID NO: 643576 - DNA, 33 bp, Homo sapien
cctgctttcaacctgcgagtcactctgttctct

SEQ ID NO: 643577 - DNA, 33 bp, Homo sapien
gatcctgcaagagtaacgctcttctggctttaa

SEQ ID NO: 643578 - DNA, 33 bp, Homo sapien
gatcctgcaagagtaatgctcttctggctttaa

SEQ ID NO: 643579 - DNA, 33 bp, Homo sapien
atgctttacattacaaccaattaatactctaag

SEQ ID NO: 643580 - DNA, 33 bp, Homo sapien
atgctttacattacaatcaattaatactctaag

SEQ ID NO: 643581 - DNA, 33 bp, Homo sapien
accaatgccaatagccacagaacttcagatctt

SEQ ID NO: 643582 - DNA, 33 bp, Homo sapien
accaatgccaatagccgcagaacttcagatctt

SEQ ID NO: 643583 - DNA, 33 bp, Homo sapien
actcactttcctgcttaaaatctcctgtccagc

SEQ ID NO: 643584 - DNA, 33 bp, Homo sapien
actcactttcctgcttcaaatctcctgtccagc

SEQ ID NO: 643585 - DNA, 33 bp, Homo sapien
ttagtgccttctgggcgctataataaatgacca

SEQ ID NO: 643586 - DNA, 33 bp, Homo sapien
ttagtgccttctgggctctataataaatgacca

SEQ ID NO: 643587 - DNA, 33 bp, Homo sapien
ggtttcttagcatttgaagggacccaatcttga

SEQ ID NO: 643588 - DNA, 33 bp, Homo sapien
ggtttcttagcatttgtagggacccaatcttga

SEQ ID NO: 643589 - DNA, 33 bp, Homo sapien
agcacattactcaaaagaaattggccaaataaa

SEQ ID NO: 643590 - DNA, 33 bp, Homo sapien
agcacattactcaaaataaattggccaaataaa

SEQ ID NO: 643591 - DNA, 33 bp, Homo sapien
tatttccaacaaggcgcatggaactggaagtca

SEQ ID NO: 643592 - DNA, 33 bp, Homo sapien
tatttccaacaaggcggatggaactggaagtca

SEQ ID NO: 643593 - DNA, 33 bp, Homo sapien
attcttttctgcctcacatattttagattacca

SEQ ID NO: 643594 - DNA, 33 bp, Homo sapien
attcttttctgcctcatatattttagattacca

SEQ ID NO: 643595 - DNA, 33 bp, Homo sapien
acccttcactatacaacttctctagagtaaagt

SEQ ID NO: 643596 - DNA, 33 bp, Homo sapien
acccttcactatacaatttctctagagtaaagt

SEQ ID NO: 643597 - DNA, 33 bp, Homo sapien
aaaaaggcctatgagtaaagagataccaattct

SEQ ID NO: 643598 - DNA, 33 bp, Homo sapien
aaaaaggcctatgagtgaagagataccaattct

SEQ ID NO: 643599 - DNA, 33 bp, Homo sapien
acagactaagtagaaccagctagaaaagattat

SEQ ID NO: 643600 - DNA, 33 bp, Homo sapien
acagactaagtagaacgagctagaaaagattat

SEQ ID NO: 643601 - DNA, 33 bp, Homo sapien
aacttccttgttgtaacggacaatatctttttt

SEQ ID NO: 643602 - DNA, 33 bp, Homo sapien
aacttccttgttgtaatggacaatatctttttt

SEQ ID NO: 643603 - DNA, 33 bp, Homo sapien
tatactcactaaaatcaaatcaattatacaact

SEQ ID NO: 643604 - DNA, 33 bp, Homo sapien
tatactcactaaaatcgaatcaattatacaact

SEQ ID NO: 643605 - DNA, 33 bp, Homo sapien
atatgatatctgggtacgagcaacacaacagct

SEQ ID NO: 643606 - DNA, 33 bp, Homo sapien
atatgatatctgggtatgagcaacacaacagct

SEQ ID NO: 643607 - DNA, 33 bp, Homo sapien
atataatatattttccaagccaggacacttttg

SEQ ID NO: 643608 - DNA, 33 bp, Homo sapien
atataatatattttcccagccaggacacttttg

SEQ ID NO: 643609 - DNA, 33 bp, Homo sapien
ttaaattggcaagtaacggcaacaaaaattctt

SEQ ID NO: 643610 - DNA, 33 bp, Homo sapien
ttaaattggcaagtaatggcaacaaaaattctt

SEQ ID NO: 643611 - DNA, 33 bp, Homo sapien
actatttattgcattacacaaagtcacaacttt

SEQ ID NO: 643612 - DNA, 33 bp, Homo sapien
actatttattgcattatacaaagtcacaacttt

SEQ ID NO: 643613 - DNA, 33 bp, Homo sapien
ggtcaaaactcagccacccaatattctaaattc

SEQ ID NO: 643614 - DNA, 33 bp, Homo sapien
ggtcaaaactcagccagccaatattctaaattc

SEQ ID NO: 643615 - DNA, 33 bp, Homo sapien
catgttgcaaaggctacggagaaacaaagaatg

SEQ ID NO: 643616 - DNA, 33 bp, Homo sapien
catgttgcaaaggctatggagaaacaaagaatg

SEQ ID NO: 643617 - DNA, 33 bp, Homo sapien
aaattctaaagtactacggtgacagtcttcaat

SEQ ID NO: 643618 - DNA, 33 bp, Homo sapien
aaattctaaagtactatggtgacagtcttcaat

SEQ ID NO: 643619 - DNA, 33 bp, Homo sapien
aattcaataaatagcaaaagtcctccaatatca

SEQ ID NO: 643620 - DNA, 33 bp, Homo sapien
aattcaataaatagcacaagtcctccaatatca

SEQ ID NO: 643621 - DNA, 33 bp, Homo sapien
tgaacagatcttaataacagatatggatctcag

SEQ ID NO: 643622 - DNA, 33 bp, Homo sapien
tgaacagatcttaatagcagatatggatctcag

SEQ ID NO: 643623 - DNA, 33 bp, Homo sapien
accagtttgaggactacatcaagaagcctttcc

SEQ ID NO: 643624 - DNA, 33 bp, Homo sapien
accagtttgaggactagatcaagaagcctttcc

SEQ ID NO: 643625 - DNA, 33 bp, Homo sapien
ttaggaagactcttcaagacattggcctaggca

SEQ ID NO: 643626 - DNA, 33 bp, Homo sapien
ttaggaagactcttcaggacattggcctaggca

SEQ ID NO: 643627 - DNA, 33 bp, Homo sapien
tttcaaggtcttatcaaaattgttttcagcaaa

SEQ ID NO: 643628 - DNA, 33 bp, Homo sapien
tttcaaggtcttatcacaattgttttcagcaaa

SEQ ID NO: 643629 - DNA, 33 bp, Homo sapien
ggatatctctttagaaatattcttacaactcca

SEQ ID NO: 643630 - DNA, 33 bp, Homo sapien
ggatatctctttagaagtattcttacaactcca

SEQ ID NO: 643631 - DNA, 33 bp, Homo sapien
aatgttgttatctgtagcccacaagtgtgccta

SEQ ID NO: 643632 - DNA, 33 bp, Homo sapien
aatgttgttatctgtatcccacaagtgtgccta

SEQ ID NO: 643633 - DNA, 33 bp, Homo sapien
tgatttttatttgacccatggattttttagaag

SEQ ID NO: 643634 - DNA, 33 bp, Homo sapien
tgatttttatttgacctatggattttttagaag

SEQ ID NO: 643635 - DNA, 33 bp, Homo sapien
aaccaaatcgacctaactgatatttgcagaaca

SEQ ID NO: 643636 - DNA, 33 bp, Homo sapien
aaccaaatcgacctaattgatatttgcagaaca

SEQ ID NO: 643637 - DNA, 33 bp, Homo sapien
tttgtaatttgaaaaaatatgtggcattttaat

SEQ ID NO: 643638 - DNA, 33 bp, Homo sapien
tttgtaatttgaaaaactatgtggcattttaat

SEQ ID NO: 643639 - DNA, 33 bp, Homo sapien
aagccttggactcagacacaatagagtttaaag

SEQ ID NO: 643640 - DNA, 33 bp, Homo sapien
aagccttggactcagatacaatagagtttaaag

SEQ ID NO: 643641 - DNA, 33 bp, Homo sapien
aagctaaaataacctacgtgcttaaactcacaa

SEQ ID NO: 643642 - DNA, 33 bp, Homo sapien
aagctaaaataacctatgtgcttaaactcacaa

SEQ ID NO: 643643 - DNA, 33 bp, Homo sapien
cagcagccaattcttccaaccttcagattccct

SEQ ID NO: 643644 - DNA, 33 bp, Homo sapien
cagcagccaattcttctaaccttcagattccct

SEQ ID NO: 643645 - DNA, 33 bp, Homo sapien
tgataatgagcaaggaactccctttgtccctgc

SEQ ID NO: 643646 - DNA, 33 bp, Homo sapien
tgataatgagcaaggatctccctttgtccctgc

SEQ ID NO: 643647 - DNA, 33 bp, Homo sapien
atagaagcaaatatgcaaagctctaaagtccat

SEQ ID NO: 643648 - DNA, 33 bp, Homo sapien
atagaagcaaatatgccaagctctaaagtccat

SEQ ID NO: 643649 - DNA, 33 bp, Homo sapien
tgagtttatactgagacagaacaaacgacaata

SEQ ID NO: 643650 - DNA, 33 bp, Homo sapien
tgagtttatactgagagagaacaaacgacaata

SEQ ID NO: 643651 - DNA, 33 bp, Homo sapien
actaccagggttggaacgctacaaaaacataac

SEQ ID NO: 643652 - DNA, 33 bp, Homo sapien
actaccagggttggaatgctacaaaaacataac

SEQ ID NO: 643653 - DNA, 33 bp, Homo sapien
aataaagcagaaaaaaaccaaatcatttgagtt

SEQ ID NO: 643654 - DNA, 33 bp, Homo sapien
aataaagcagaaaaaacccaaatcatttgagtt

SEQ ID NO: 643655 - DNA, 33 bp, Homo sapien
ctcaccatttattccagattaccaaataaatgt

SEQ ID NO: 643656 - DNA, 33 bp, Homo sapien
ctcaccatttattccatattaccaaataaatgt

SEQ ID NO: 643657 - DNA, 33 bp, Homo sapien
ggatgagaattgttaaagggcccctctaaacta

SEQ ID NO: 643658 - DNA, 33 bp, Homo sapien
ggatgagaattgttaacgggcccctctaaacta

SEQ ID NO: 643659 - DNA, 33 bp, Homo sapien
tgaccagctggagagacgtggtataaaggcttc

SEQ ID NO: 643660 - DNA, 33 bp, Homo sapien
tgaccagctggagagatgtggtataaaggcttc

SEQ ID NO: 643661 - DNA, 33 bp, Homo sapien
cttcttaatagtgtcaccttttgttaatcagga

SEQ ID NO: 643662 - DNA, 33 bp, Homo sapien
cttcttaatagtgtcatcttttgttaatcagga

SEQ ID NO: 643663 - DNA, 33 bp, Homo sapien
taatgtattcctaggcaaaatggaaaaatgata

SEQ ID NO: 643664 - DNA, 33 bp, Homo sapien
taatgtattcctaggccaaatggaaaaatgata

SEQ ID NO: 643665 - DNA, 33 bp, Homo sapien
ttattttgattttgaaagagtcatttttttcat

SEQ ID NO: 643666 - DNA, 33 bp, Homo sapien
ttattttgattttgaaggagtcatttttttcat

SEQ ID NO: 643667 - DNA, 33 bp, Homo sapien
tttgttaaatagacgacaagtccatatctttat

SEQ ID NO: 643668 - DNA, 33 bp, Homo sapien
tttgttaaatagacgagaagtccatatctttat

SEQ ID NO: 643669 - DNA, 33 bp, Homo sapien
tagtttttctcgacataaattactatgactgtc

SEQ ID NO: 643670 - DNA, 33 bp, Homo sapien
tagtttttctcgacattaattactatgactgtc

SEQ ID NO: 643671 - DNA, 33 bp, Homo sapien
atgtaaatatttgtcaaaatcagtacagtaaaa

SEQ ID NO: 643672 - DNA, 33 bp, Homo sapien
atgtaaatatttgtcagaatcagtacagtaaaa

SEQ ID NO: 643673 - DNA, 33 bp, Homo sapien
gaggacatcttgtaccaaccactttgacctagg

SEQ ID NO: 643674 - DNA, 33 bp, Homo sapien
gaggacatcttgtaccgaccactttgacctagg

SEQ ID NO: 643675 - DNA, 33 bp, Homo sapien
ttttaagtagatgtgaagtttatcatgtaaatt

SEQ ID NO: 643676 - DNA, 33 bp, Homo sapien
ttttaagtagatgtgaggtttatcatgtaaatt

SEQ ID NO: 643677 - DNA, 33 bp, Homo sapien
ttaatttttgtcaatcactgggaggctgagtgc

SEQ ID NO: 643678 - DNA, 33 bp, Homo sapien
ttaatttttgtcaatcgctgggaggctgagtgc

SEQ ID NO: 643679 - DNA, 33 bp, Homo sapien
gcttcctgcttaggtaacctttagcttgtaaga

SEQ ID NO: 643680 - DNA, 33 bp, Homo sapien
gcttcctgcttaggtagcctttagcttgtaaga

SEQ ID NO: 643681 - DNA, 33 bp, Homo sapien
aaaagaataagcttgacactaaatgctcatata

SEQ ID NO: 643682 - DNA, 33 bp, Homo sapien
aaaagaataagcttgatactaaatgctcatata

SEQ ID NO: 643683 - DNA, 33 bp, Homo sapien
cccttttcttttggacgccaaagcctattctgg

SEQ ID NO: 643684 - DNA, 33 bp, Homo sapien
cccttttcttttggactccaaagcctattctgg

SEQ ID NO: 643685 - DNA, 33 bp, Homo sapien
ttcatagaaaatgggcactcggatataatgaag

SEQ ID NO: 643686 - DNA, 33 bp, Homo sapien
ttcatagaaaatgggcgctcggatataatgaag

SEQ ID NO: 643687 - DNA, 33 bp, Homo sapien
gaaatcatagctacaacgcagacttctgaaatt

SEQ ID NO: 643688 - DNA, 33 bp, Homo sapien
gaaatcatagctacaatgcagacttctgaaatt

SEQ ID NO: 643689 - DNA, 33 bp, Homo sapien
tattataactgcactcgaatactttccagacat

SEQ ID NO: 643690 - DNA, 33 bp, Homo sapien
tattataactgcactctaatactttccagacat

SEQ ID NO: 643691 - DNA, 33 bp, Homo sapien
acattttctgatttgaaggcttaaaggcttgta

SEQ ID NO: 643692 - DNA, 33 bp, Homo sapien
acattttctgatttgacggcttaaaggcttgta

SEQ ID NO: 643693 - DNA, 33 bp, Homo sapien
aaacgtgatgattctcccttactgtttatgaaa

SEQ ID NO: 643694 - DNA, 33 bp, Homo sapien
aaacgtgatgattctctcttactgtttatgaaa

SEQ ID NO: 643695 - DNA, 33 bp, Homo sapien
aatgtttccagatatgcaattgggatcattctt

SEQ ID NO: 643696 - DNA, 33 bp, Homo sapien
aatgtttccagatatgtaattgggatcattctt

SEQ ID NO: 643697 - DNA, 33 bp, Homo sapien
ggagctcaatcagtggacatctctgcacaaaaa

SEQ ID NO: 643698 - DNA, 33 bp, Homo sapien
ggagctcaatcagtggtcatctctgcacaaaaa

SEQ ID NO: 643699 - DNA, 33 bp, Homo sapien
tctggtgctctagcgaaattctcctaaaaattg

SEQ ID NO: 643700 - DNA, 33 bp, Homo sapien
tctggtgctctagcgacattctcctaaaaattg

SEQ ID NO: 643701 - DNA, 33 bp, Homo sapien
tccaatgttcacctaacgtcatgtgagtacttc

SEQ ID NO: 643702 - DNA, 33 bp, Homo sapien
tccaatgttcacctaatgtcatgtgagtacttc

SEQ ID NO: 643703 - DNA, 33 bp, Homo sapien
tatgtaatcttacaacacgagtagttctctgaa

SEQ ID NO: 643704 - DNA, 33 bp, Homo sapien
tatgtaatcttacaacgcgagtagttctctgaa

SEQ ID NO: 643705 - DNA, 33 bp, Homo sapien
ctctgttagacacgacactaggaactaggtttg

SEQ ID NO: 643706 - DNA, 33 bp, Homo sapien
ctctgttagacacgacgctaggaactaggtttg

SEQ ID NO: 643707 - DNA, 33 bp, Homo sapien
gcatataatagcctacaagcctcaaatttaaaa

SEQ ID NO: 643708 - DNA, 33 bp, Homo sapien
gcatataatagcctacgagcctcaaatttaaaa

SEQ ID NO: 643709 - DNA, 33 bp, Homo sapien
tgatagctgcagcttacaaacagttaaggaaat

SEQ ID NO: 643710 - DNA, 33 bp, Homo sapien
tgatagctgcagcttataaacagttaaggaaat

SEQ ID NO: 643711 - DNA, 33 bp, Homo sapien
ttttgattacttaggcccattgtggtttaaccg

SEQ ID NO: 643712 - DNA, 33 bp, Homo sapien
ttttgattacttaggcgcattgtggtttaaccg

SEQ ID NO: 643713 - DNA, 33 bp, Homo sapien
agtggtggtacaaaaaatctatgagaactgatg

SEQ ID NO: 643714 - DNA, 33 bp, Homo sapien
agtggtggtacaaaaagtctatgagaactgatg

SEQ ID NO: 643715 - DNA, 33 bp, Homo sapien
gagtctgttagcctacgatatctacagctgaag

SEQ ID NO: 643716 - DNA, 33 bp, Homo sapien
gagtctgttagcctactatatctacagctgaag

SEQ ID NO: 643717 - DNA, 33 bp, Homo sapien
tgagccatcggataaaatgcatgaatttcagga

SEQ ID NO: 643718 - DNA, 33 bp, Homo sapien
tgagccatcggataaagtgcatgaatttcagga

SEQ ID NO: 643719 - DNA, 33 bp, Homo sapien
gttctaagattctttacacatgttcagctaacc

SEQ ID NO: 643720 - DNA, 33 bp, Homo sapien
gttctaagattctttagacatgttcagctaacc

SEQ ID NO: 643721 - DNA, 33 bp, Homo sapien
gcatagtcctgacagacaaatggaattagccat

SEQ ID NO: 643722 - DNA, 33 bp, Homo sapien
gcatagtcctgacagataaatggaattagccat

SEQ ID NO: 643723 - DNA, 33 bp, Homo sapien
aggagaaagcagagacagaaactggcagagatt

SEQ ID NO: 643724 - DNA, 33 bp, Homo sapien
aggagaaagcagagactgaaactggcagagatt

SEQ ID NO: 643725 - DNA, 33 bp, Homo sapien
actcactaccattcatcagagcagcacacagga

SEQ ID NO: 643726 - DNA, 33 bp, Homo sapien
actcactaccattcatgagagcagcacacagga

SEQ ID NO: 643727 - DNA, 33 bp, Homo sapien
actggtttgatccatgcaatctttatgctaaaa

SEQ ID NO: 643728 - DNA, 33 bp, Homo sapien
actggtttgatccatgtaatctttatgctaaaa

SEQ ID NO: 643729 - DNA, 33 bp, Homo sapien
aaaatgagcataacgacgtcaggctaatcttaa

SEQ ID NO: 643730 - DNA, 33 bp, Homo sapien
aaaatgagcataacgatgtcaggctaatcttaa

SEQ ID NO: 643731 - DNA, 33 bp, Homo sapien
agggtaaggagtatggcaaacaaagctggctac

SEQ ID NO: 643732 - DNA, 33 bp, Homo sapien
agggtaaggagtatggtaaacaaagctggctac

SEQ ID NO: 643733 - DNA, 33 bp, Homo sapien
ttgtttttgcttagcagtctttaaccactaatg

SEQ ID NO: 643734 - DNA, 33 bp, Homo sapien
ttgtttttgcttagcattctttaaccactaatg

SEQ ID NO: 643735 - DNA, 33 bp, Homo sapien
ggtcactgctatccaactagaaccttatcaaag

SEQ ID NO: 643736 - DNA, 33 bp, Homo sapien
ggtcactgctatccaattagaaccttatcaaag

SEQ ID NO: 643737 - DNA, 33 bp, Homo sapien
acatctaggctaaaagaagggacaatcagggcc

SEQ ID NO: 643738 - DNA, 33 bp, Homo sapien
acatctaggctaaaagcagggacaatcagggcc

SEQ ID NO: 643739 - DNA, 33 bp, Homo sapien
cagcagcttctttcaaaccactggagtactcct

SEQ ID NO: 643740 - DNA, 33 bp, Homo sapien
cagcagcttctttcaacccactggagtactcct

SEQ ID NO: 643741 - DNA, 33 bp, Homo sapien
tgtgattccaaagatacaacctggctttaaaac

SEQ ID NO: 643742 - DNA, 33 bp, Homo sapien
tgtgattccaaagatataacctggctttaaaac

SEQ ID NO: 643743 - DNA, 33 bp, Homo sapien
aaatggacttctgtgacgcatttttttctgagg

SEQ ID NO: 643744 - DNA, 33 bp, Homo sapien
aaatggacttctgtgatgcatttttttctgagg

SEQ ID NO: 643745 - DNA, 33 bp, Homo sapien
catggctttttcagccaggccccaaaatatttc

SEQ ID NO: 643746 - DNA, 33 bp, Homo sapien
catggctttttcagccgggccccaaaatatttc

SEQ ID NO: 643747 - DNA, 33 bp, Homo sapien
gttcagctgtttttatcacaggttgaaagtcag

SEQ ID NO: 643748 - DNA, 33 bp, Homo sapien
gttcagctgtttttattacaggttgaaagtcag

SEQ ID NO: 643749 - DNA, 33 bp, Homo sapien
aaagaaagagtcaagaatagtatcaacgatcag

SEQ ID NO: 643750 - DNA, 33 bp, Homo sapien
aaagaaagagtcaagagtagtatcaacgatcag

SEQ ID NO: 643751 - DNA, 33 bp, Homo sapien
taaagttactagaaaacacaggttagttattaa

SEQ ID NO: 643752 - DNA, 33 bp, Homo sapien
taaagttactagaaaagacaggttagttattaa

SEQ ID NO: 643753 - DNA, 33 bp, Homo sapien
atgacttgccaagaaaaagtgaatgctacatga

SEQ ID NO: 643754 - DNA, 33 bp, Homo sapien
atgacttgccaagaaagagtgaatgctacatga

SEQ ID NO: 643755 - DNA, 33 bp, Homo sapien
gtatccaatcttacttcaaatgtgtgaatcttt

SEQ ID NO: 643756 - DNA, 33 bp, Homo sapien
gtatccaatcttacttgaaatgtgtgaatcttt

SEQ ID NO: 643757 - DNA, 33 bp, Homo sapien
cagagcatgaaaccaaagctctcgaggaacacc

SEQ ID NO: 643758 - DNA, 33 bp, Homo sapien
cagagcatgaaaccaaggctctcgaggaacacc

SEQ ID NO: 643759 - DNA, 33 bp, Homo sapien
ttttattgtgcacccaatgatttctcaggcaat

SEQ ID NO: 643760 - DNA, 33 bp, Homo sapien
ttttattgtgcacccagtgatttctcaggcaat

SEQ ID NO: 643761 - DNA, 33 bp, Homo sapien
ataggaaataactatgcatgaacagaaaagaaa

SEQ ID NO: 643762 - DNA, 33 bp, Homo sapien
ataggaaataactatgtatgaacagaaaagaaa

SEQ ID NO: 643763 - DNA, 33 bp, Homo sapien
tgataataatatgtcaagatatgtcattttaac

SEQ ID NO: 643764 - DNA, 33 bp, Homo sapien
tgataataatatgtcaggatatgtcattttaac

SEQ ID NO: 643765 - DNA, 33 bp, Homo sapien
gtaaagtttgaagtaaagtgtcaacgtgtcaga

SEQ ID NO: 643766 - DNA, 33 bp, Homo sapien
gtaaagtttgaagtaaggtgtcaacgtgtcaga

SEQ ID NO: 643767 - DNA, 33 bp, Homo sapien
agcaaatagggacgtcacacaatcattcaggtc

SEQ ID NO: 643768 - DNA, 33 bp, Homo sapien
agcaaatagggacgtcgcacaatcattcaggtc

SEQ ID NO: 643769 - DNA, 33 bp, Homo sapien
ccctatttgctttcacggccccgacactcgttc

SEQ ID NO: 643770 - DNA, 33 bp, Homo sapien
ccctatttgctttcactgccccgacactcgttc

SEQ ID NO: 643771 - DNA, 33 bp, Homo sapien
gtgtgacctcttggaaacctcctcctggtagct

SEQ ID NO: 643772 - DNA, 33 bp, Homo sapien
gtgtgacctcttggaagcctcctcctggtagct

SEQ ID NO: 643773 - DNA, 33 bp, Homo sapien
cctgcactcttgggcacctttcagaatccttct

SEQ ID NO: 643774 - DNA, 33 bp, Homo sapien
cctgcactcttgggcatctttcagaatccttct

SEQ ID NO: 643775 - DNA, 33 bp, Homo sapien
ttaaagtagctgaggaatagctgaacaagacct

SEQ ID NO: 643776 - DNA, 33 bp, Homo sapien
ttaaagtagctgaggagtagctgaacaagacct

SEQ ID NO: 643777 - DNA, 33 bp, Homo sapien
acaaactagattgcaactaagatcatttttgtg

SEQ ID NO: 643778 - DNA, 33 bp, Homo sapien
acaaactagattgcaagtaagatcatttttgtg

SEQ ID NO: 643779 - DNA, 33 bp, Homo sapien
tgagattgacaacaagaaaggatgaattgctaa

SEQ ID NO: 643780 - DNA, 33 bp, Homo sapien
tgagattgacaacaagcaaggatgaattgctaa

SEQ ID NO: 643781 - DNA, 33 bp, Homo sapien
gcccaacaaaatgccaagtaatcttgtaagtaa

SEQ ID NO: 643782 - DNA, 33 bp, Homo sapien
gcccaacaaaatgccacgtaatcttgtaagtaa

SEQ ID NO: 643783 - DNA, 33 bp, Homo sapien
acacagagttttctcactgacaatgttgatatc

SEQ ID NO: 643784 - DNA, 33 bp, Homo sapien
acacagagttttctcattgacaatgttgatatc

SEQ ID NO: 643785 - DNA, 33 bp, Homo sapien
tcttagctattcattccctgcaaaatcacatca

SEQ ID NO: 643786 - DNA, 33 bp, Homo sapien
tcttagctattcattctctgcaaaatcacatca

SEQ ID NO: 643787 - DNA, 33 bp, Homo sapien
tttcttatacgtggaaagtaaatattgtgcaca

SEQ ID NO: 643788 - DNA, 33 bp, Homo sapien
tttcttatacgtggaaggtaaatattgtgcaca

SEQ ID NO: 643789 - DNA, 33 bp, Homo sapien
ttcagtaccagctaaacaaaacggctagattac

SEQ ID NO: 643790 - DNA, 33 bp, Homo sapien
ttcagtaccagctaaataaaacggctagattac

SEQ ID NO: 643791 - DNA, 33 bp, Homo sapien
aaactctaatttctaacagcacaattgaacata

SEQ ID NO: 643792 - DNA, 33 bp, Homo sapien
aaactctaatttctaatagcacaattgaacata

SEQ ID NO: 643793 - DNA, 33 bp, Homo sapien
gtgaagtcttcatatacagacagtaaaattctt

SEQ ID NO: 643794 - DNA, 33 bp, Homo sapien
gtgaagtcttcatatagagacagtaaaattctt

SEQ ID NO: 643795 - DNA, 33 bp, Homo sapien
tataccaccttgaatacgtgatgtttgacagaa

SEQ ID NO: 643796 - DNA, 33 bp, Homo sapien
tataccaccttgaatatgtgatgtttgacagaa

SEQ ID NO: 643797 - DNA, 33 bp, Homo sapien
gtttgagtagcaagaaaatatagtttagaaaat

SEQ ID NO: 643798 - DNA, 33 bp, Homo sapien
gtttgagtagcaagaagatatagtttagaaaat

SEQ ID NO: 643799 - DNA, 33 bp, Homo sapien
tgcaaagttcttttaaaaaactgctccataggc

SEQ ID NO: 643800 - DNA, 33 bp, Homo sapien
tgcaaagttcttttaataaactgctccataggc

SEQ ID NO: 643801 - DNA, 33 bp, Homo sapien
tctaagagagctcaaacgaatggcaacctccat

SEQ ID NO: 643802 - DNA, 33 bp, Homo sapien
tctaagagagctcaaatgaatggcaacctccat

SEQ ID NO: 643803 - DNA, 33 bp, Homo sapien
gctatatgcacacttactaacacattcactcat

SEQ ID NO: 643804 - DNA, 33 bp, Homo sapien
gctatatgcacacttattaacacattcactcat

SEQ ID NO: 643805 - DNA, 33 bp, Homo sapien
tgtgaaagaaataatacgtgcttcaagatttga

SEQ ID NO: 643806 - DNA, 33 bp, Homo sapien
tgtgaaagaaataatatgtgcttcaagatttga

SEQ ID NO: 643807 - DNA, 33 bp, Homo sapien
cattttcactaacaaccgttcctctgattcttg

SEQ ID NO: 643808 - DNA, 33 bp, Homo sapien
cattttcactaacaacggttcctctgattcttg

SEQ ID NO: 643809 - DNA, 33 bp, Homo sapien
tctatggacccttcaaaagtatcacagacacaa

SEQ ID NO: 643810 - DNA, 33 bp, Homo sapien
tctatggacccttcaacagtatcacagacacaa

SEQ ID NO: 643811 - DNA, 33 bp, Homo sapien
ttaagtcaaaacaaacactagtgaatatgtcat

SEQ ID NO: 643812 - DNA, 33 bp, Homo sapien
ttaagtcaaaacaaactctagtgaatatgtcat

SEQ ID NO: 643813 - DNA, 33 bp, Homo sapien
aactatctattaggcaaatactggttgtactca

SEQ ID NO: 643814 - DNA, 33 bp, Homo sapien
aactatctattaggcacatactggttgtactca

SEQ ID NO: 643815 - DNA, 33 bp, Homo sapien
tgatcctcatttgacaatacagattatactcct

SEQ ID NO: 643816 - DNA, 33 bp, Homo sapien
tgatcctcatttgacagtacagattatactcct

SEQ ID NO: 643817 - DNA, 33 bp, Homo sapien
ttctgatgtgttgatccaagtctccctaaaacc

SEQ ID NO: 643818 - DNA, 33 bp, Homo sapien
ttctgatgtgttgatctaagtctccctaaaacc

SEQ ID NO: 643819 - DNA, 33 bp, Homo sapien
acaaaatagaagctacacattattcacaagtgt

SEQ ID NO: 643820 - DNA, 33 bp, Homo sapien
acaaaatagaagctacgcattattcacaagtgt

SEQ ID NO: 643821 - DNA, 33 bp, Homo sapien
atgagaacacgacaaaactaactgattctggga

SEQ ID NO: 643822 - DNA, 33 bp, Homo sapien
atgagaacacgacaaagctaactgattctggga

SEQ ID NO: 643823 - DNA, 33 bp, Homo sapien
tgacctgaaaagggaaaaagcttggcatggttt

SEQ ID NO: 643824 - DNA, 33 bp, Homo sapien
tgacctgaaaagggaagaagcttggcatggttt

SEQ ID NO: 643825 - DNA, 33 bp, Homo sapien
acaggccagatgtcagacagagccttacaaacc

SEQ ID NO: 643826 - DNA, 33 bp, Homo sapien
acaggccagatgtcaggcagagccttacaaacc

SEQ ID NO: 643827 - DNA, 33 bp, Homo sapien
agatttagtacttcaacttctacacttggcatc

SEQ ID NO: 643828 - DNA, 33 bp, Homo sapien
agatttagtacttcaatttctacacttggcatc

SEQ ID NO: 643829 - DNA, 33 bp, Homo sapien
tggtgactgataaagaagtggtcaggcccttgg

SEQ ID NO: 643830 - DNA, 33 bp, Homo sapien
tggtgactgataaagaggtggtcaggcccttgg

SEQ ID NO: 643831 - DNA, 33 bp, Homo sapien
tcaatgaactttgtcactcagtatctattatca

SEQ ID NO: 643832 - DNA, 33 bp, Homo sapien
tcaatgaactttgtcagtcagtatctattatca

SEQ ID NO: 643833 - DNA, 33 bp, Homo sapien
aaggagttcctctcaacgcaccgccttgcctgc

SEQ ID NO: 643834 - DNA, 33 bp, Homo sapien
aaggagttcctctcaatgcaccgccttgcctgc

SEQ ID NO: 643835 - DNA, 33 bp, Homo sapien
ctccattctgggtagaccttaaattatcttcac

SEQ ID NO: 643836 - DNA, 33 bp, Homo sapien
ctccattctgggtagatcttaaattatcttcac

SEQ ID NO: 643837 - DNA, 33 bp, Homo sapien
tttttcaaaccatcacacttttgttataacaat

SEQ ID NO: 643838 - DNA, 33 bp, Homo sapien
tttttcaaaccatcacgcttttgttataacaat

SEQ ID NO: 643839 - DNA, 33 bp, Homo sapien
atgtgaattccgtttcaagcaatgtagtatgac

SEQ ID NO: 643840 - DNA, 33 bp, Homo sapien
atgtgaattccgtttcgagcaatgtagtatgac

SEQ ID NO: 643841 - DNA, 33 bp, Homo sapien
tttctctgttaaaaaccgtcttgcattgtgcct

SEQ ID NO: 643842 - DNA, 33 bp, Homo sapien
tttctctgttaaaaactgtcttgcattgtgcct

SEQ ID NO: 643843 - DNA, 33 bp, Homo sapien
atgaaagccttattaaaccgctcacattcccaa

SEQ ID NO: 643844 - DNA, 33 bp, Homo sapien
atgaaagccttattaagccgctcacattcccaa

SEQ ID NO: 643845 - DNA, 33 bp, Homo sapien
aatctacaaggtgcagaacaaaaggagcagcta

SEQ ID NO: 643846 - DNA, 33 bp, Homo sapien
aatctacaaggtgcaggacaaaaggagcagcta

SEQ ID NO: 643847 - DNA, 33 bp, Homo sapien
agggatgtggattaaagaacctacagatgtctt

SEQ ID NO: 643848 - DNA, 33 bp, Homo sapien
agggatgtggattaaataacctacagatgtctt

SEQ ID NO: 643849 - DNA, 33 bp, Homo sapien
attaaatggtgcattccccaggcccaccatgga

SEQ ID NO: 643850 - DNA, 33 bp, Homo sapien
attaaatggtgcattctccaggcccaccatgga

SEQ ID NO: 643851 - DNA, 33 bp, Homo sapien
atggtttctagtcacaccacgaatcatattaag

SEQ ID NO: 643852 - DNA, 33 bp, Homo sapien
atggtttctagtcacatcacgaatcatattaag

SEQ ID NO: 643853 - DNA, 33 bp, Homo sapien
atgctaacttgaacaactcataaaacagagtat

SEQ ID NO: 643854 - DNA, 33 bp, Homo sapien
atgctaacttgaacaattcataaaacagagtat

SEQ ID NO: 643855 - DNA, 33 bp, Homo sapien
aggtcacaatcttttacaaactgatcttggaag

SEQ ID NO: 643856 - DNA, 33 bp, Homo sapien
aggtcacaatcttttataaactgatcttggaag

SEQ ID NO: 643857 - DNA, 33 bp, Homo sapien
ttaccttcgatgaacacaatgttacaaagtggt

SEQ ID NO: 643858 - DNA, 33 bp, Homo sapien
ttaccttcgatgaacagaatgttacaaagtggt

SEQ ID NO: 643859 - DNA, 33 bp, Homo sapien
tataaactgagagtgaacaatttgtgctgaatt

SEQ ID NO: 643860 - DNA, 33 bp, Homo sapien
tataaactgagagtgagcaatttgtgctgaatt

SEQ ID NO: 643861 - DNA, 33 bp, Homo sapien
ggtgttggaatgtccaagaacagaaatagtaaa

SEQ ID NO: 643862 - DNA, 33 bp, Homo sapien
ggtgttggaatgtccacgaacagaaatagtaaa

SEQ ID NO: 643863 - DNA, 33 bp, Homo sapien
gtgggtgctagtgtgcggcaagggtgaactatg

SEQ ID NO: 643864 - DNA, 33 bp, Homo sapien
gtgggtgctagtgtgctgcaagggtgaactatg

SEQ ID NO: 643865 - DNA, 33 bp, Homo sapien
tggtcactgaacgttaacattgaaagcccacaa

SEQ ID NO: 643866 - DNA, 33 bp, Homo sapien
tggtcactgaacgttagcattgaaagcccacaa

SEQ ID NO: 643867 - DNA, 33 bp, Homo sapien
aacttttcatgttagacaggtagatagttttaa

SEQ ID NO: 643868 - DNA, 33 bp, Homo sapien
aacttttcatgttagataggtagatagttttaa

SEQ ID NO: 643869 - DNA, 33 bp, Homo sapien
tggtattagtagaagacgtttgtaaatgtgagg

SEQ ID NO: 643870 - DNA, 33 bp, Homo sapien
tggtattagtagaagaggtttgtaaatgtgagg

SEQ ID NO: 643871 - DNA, 33 bp, Homo sapien
aatagagcttccaaacaattaatctaaacacat

SEQ ID NO: 643872 - DNA, 33 bp, Homo sapien
aatagagcttccaaactattaatctaaacacat

SEQ ID NO: 643873 - DNA, 33 bp, Homo sapien
gagggaggcaaggaccagattatctaaaacttt

SEQ ID NO: 643874 - DNA, 33 bp, Homo sapien
gagggaggcaaggaccggattatctaaaacttt

SEQ ID NO: 643875 - DNA, 33 bp, Homo sapien
ttattataatcttttcaaacttcagtgatcctc

SEQ ID NO: 643876 - DNA, 33 bp, Homo sapien
ttattataatcttttccaacttcagtgatcctc

SEQ ID NO: 643877 - DNA, 33 bp, Homo sapien
taagtatattgccaacccttacaagcacattaa

SEQ ID NO: 643878 - DNA, 33 bp, Homo sapien
taagtatattgccaactcttacaagcacattaa

SEQ ID NO: 643879 - DNA, 33 bp, Homo sapien
ctcaggagcaaaatggccagagttgtattcatg

SEQ ID NO: 643880 - DNA, 33 bp, Homo sapien
ctcaggagcaaaatggtcagagttgtattcatg

SEQ ID NO: 643881 - DNA, 33 bp, Homo sapien
atgaatccaggaggaacggagaaggaaaagatt

SEQ ID NO: 643882 - DNA, 33 bp, Homo sapien
atgaatccaggaggaatggagaaggaaaagatt

SEQ ID NO: 643883 - DNA, 33 bp, Homo sapien
ttctagaaagtttagaaggaaaatatctccagg

SEQ ID NO: 643884 - DNA, 33 bp, Homo sapien
ttctagaaagtttagatggaaaatatctccagg

SEQ ID NO: 643885 - DNA, 33 bp, Homo sapien
tgtatgttgcagataaacacatgtaagctttaa

SEQ ID NO: 643886 - DNA, 33 bp, Homo sapien
tgtatgttgcagataatcacatgtaagctttaa

SEQ ID NO: 643887 - DNA, 33 bp, Homo sapien
ataacattcaattaaaagcccaggacacatttt

SEQ ID NO: 643888 - DNA, 33 bp, Homo sapien
ataacattcaattaaaggcccaggacacatttt

SEQ ID NO: 643889 - DNA, 33 bp, Homo sapien
ttctgtccaaagcctacgttttattctatattc

SEQ ID NO: 643890 - DNA, 33 bp, Homo sapien
ttctgtccaaagcctatgttttattctatattc

SEQ ID NO: 643891 - DNA, 33 bp, Homo sapien
cacctgttttatgaacaataacagtcacattaa

SEQ ID NO: 643892 - DNA, 33 bp, Homo sapien
cacctgttttatgaacgataacagtcacattaa

SEQ ID NO: 643893 - DNA, 33 bp, Homo sapien
tattgctgatatgaagaaagttttagagtctgg

SEQ ID NO: 643894 - DNA, 33 bp, Homo sapien
tattgctgatatgaaggaagttttagagtctgg

SEQ ID NO: 643895 - DNA, 33 bp, Homo sapien
tttcaacctaaagtcaccaactgcattagttac

SEQ ID NO: 643896 - DNA, 33 bp, Homo sapien
tttcaacctaaagtcatcaactgcattagttac

SEQ ID NO: 643897 - DNA, 33 bp, Homo sapien
attctaagggtcatagaatttttgaaatagtaa

SEQ ID NO: 643898 - DNA, 33 bp, Homo sapien
attctaagggtcataggatttttgaaatagtaa

SEQ ID NO: 643899 - DNA, 33 bp, Homo sapien
attcctttcaaaatatgacttctcatctacgtg

SEQ ID NO: 643900 - DNA, 33 bp, Homo sapien
attcctttcaaaatattacttctcatctacgtg

SEQ ID NO: 643901 - DNA, 33 bp, Homo sapien
ttgaattactgtctacagcagctatagccttgg

SEQ ID NO: 643902 - DNA, 33 bp, Homo sapien
ttgaattactgtctacggcagctatagccttgg

SEQ ID NO: 643903 - DNA, 33 bp, Homo sapien
taacaaatgattcaaaatatcacataaacttaa

SEQ ID NO: 643904 - DNA, 33 bp, Homo sapien
taacaaatgattcaaagtatcacataaacttaa

SEQ ID NO: 643905 - DNA, 33 bp, Homo sapien
tttttacataggatcactagaattccttacact

SEQ ID NO: 643906 - DNA, 33 bp, Homo sapien
tttttacataggatcattagaattccttacact

SEQ ID NO: 643907 - DNA, 33 bp, Homo sapien
cttaacctgagggaaaactacaatcttgtcctt

SEQ ID NO: 643908 - DNA, 33 bp, Homo sapien
cttaacctgagggaaacctacaatcttgtcctt

SEQ ID NO: 643909 - DNA, 33 bp, Homo sapien
tgtggtttgctatggacggattcacaacgtatg

SEQ ID NO: 643910 - DNA, 33 bp, Homo sapien
tgtggtttgctatggatggattcacaacgtatg

SEQ ID NO: 643911 - DNA, 33 bp, Homo sapien
cgtaaaagcttaataaccaatgacgcctctgtc

SEQ ID NO: 643912 - DNA, 33 bp, Homo sapien
cgtaaaagcttaataatcaatgacgcctctgtc

SEQ ID NO: 643913 - DNA, 33 bp, Homo sapien
tctctagtcctggaaacgtcttctaacaagtaa

SEQ ID NO: 643914 - DNA, 33 bp, Homo sapien
tctctagtcctggaaatgtcttctaacaagtaa

SEQ ID NO: 643915 - DNA, 33 bp, Homo sapien
ttatttattgctctggaagtaacagaaagtttg

SEQ ID NO: 643916 - DNA, 33 bp, Homo sapien
ttatttattgctctggcagtaacagaaagtttg

SEQ ID NO: 643917 - DNA, 33 bp, Homo sapien
gagcacctgctcatcaagaaacaagaatgtccc

SEQ ID NO: 643918 - DNA, 33 bp, Homo sapien
gagcacctgctcatcaggaaacaagaatgtccc

SEQ ID NO: 643919 - DNA, 33 bp, Homo sapien
ttctaatacatgtacaatgcacactagaggata

SEQ ID NO: 643920 - DNA, 33 bp, Homo sapien
ttctaatacatgtacagtgcacactagaggata

SEQ ID NO: 643921 - DNA, 33 bp, Homo sapien
taagaagtgaagtttacgccacccaatgtatag

SEQ ID NO: 643922 - DNA, 33 bp, Homo sapien
taagaagtgaagtttatgccacccaatgtatag

SEQ ID NO: 643923 - DNA, 33 bp, Homo sapien
atgtacaatctgctttaaaaaatagtctcctag

SEQ ID NO: 643924 - DNA, 33 bp, Homo sapien
atgtacaatctgctttgaaaaatagtctcctag

SEQ ID NO: 643925 - DNA, 33 bp, Homo sapien
aacactccagtgacttaaagaaatggaatcagt

SEQ ID NO: 643926 - DNA, 33 bp, Homo sapien
aacactccagtgacttgaagaaatggaatcagt

SEQ ID NO: 643927 - DNA, 33 bp, Homo sapien
tctcaaaaaatcacccactttgccagcaagatg

SEQ ID NO: 643928 - DNA, 33 bp, Homo sapien
tctcaaaaaatcaccctctttgccagcaagatg

SEQ ID NO: 643929 - DNA, 33 bp, Homo sapien
cacagatttataaagaccaaagatagcctacct

SEQ ID NO: 643930 - DNA, 33 bp, Homo sapien
cacagatttataaagatcaaagatagcctacct

SEQ ID NO: 643931 - DNA, 33 bp, Homo sapien
atgatttcattaacaaaagaagcctcattaaag

SEQ ID NO: 643932 - DNA, 33 bp, Homo sapien
atgatttcattaacaacagaagcctcattaaag

SEQ ID NO: 643933 - DNA, 33 bp, Homo sapien
caaccaaatgtctgaacccgtctacatagaaaa

SEQ ID NO: 643934 - DNA, 33 bp, Homo sapien
caaccaaatgtctgaatccgtctacatagaaaa

SEQ ID NO: 643935 - DNA, 33 bp, Homo sapien
tttgtctccccctcaacttgaaagtgttaccag

SEQ ID NO: 643936 - DNA, 33 bp, Homo sapien
tttgtctccccctcaatttgaaagtgttaccag

SEQ ID NO: 643937 - DNA, 33 bp, Homo sapien
tttgggtgactatatccgactaacacctgttta

SEQ ID NO: 643938 - DNA, 33 bp, Homo sapien
tttgggtgactatatctgactaacacctgttta

SEQ ID NO: 643939 - DNA, 33 bp, Homo sapien
gactgtgaaactgagcactggagaagtggacta

SEQ ID NO: 643940 - DNA, 33 bp, Homo sapien
gactgtgaaactgagcgctggagaagtggacta

SEQ ID NO: 643941 - DNA, 33 bp, Homo sapien
aaatgaggatgagagacacttggaaggaacgac

SEQ ID NO: 643942 - DNA, 33 bp, Homo sapien
aaatgaggatgagagatacttggaaggaacgac

SEQ ID NO: 643943 - DNA, 33 bp, Homo sapien
cctttccatcaagagaaaatgtgagtgggaaaa

SEQ ID NO: 643944 - DNA, 33 bp, Homo sapien
cctttccatcaagagacaatgtgagtgggaaaa

SEQ ID NO: 643945 - DNA, 33 bp, Homo sapien
attgccatgtatctacgactcattgcatttttc

SEQ ID NO: 643946 - DNA, 33 bp, Homo sapien
attgccatgtatctactactcattgcatttttc

SEQ ID NO: 643947 - DNA, 33 bp, Homo sapien
tcatctcttgtttgaaccattacatattgccat

SEQ ID NO: 643948 - DNA, 33 bp, Homo sapien
tcatctcttgtttgaatcattacatattgccat

SEQ ID NO: 643949 - DNA, 33 bp, Homo sapien
atgatgaaggtctcacacagaacagacaggagg

SEQ ID NO: 643950 - DNA, 33 bp, Homo sapien
atgatgaaggtctcacgcagaacagacaggagg

SEQ ID NO: 643951 - DNA, 33 bp, Homo sapien
tttccaactttccttacgtgctatattctctgg

SEQ ID NO: 643952 - DNA, 33 bp, Homo sapien
tttccaactttccttatgtgctatattctctgg

SEQ ID NO: 643953 - DNA, 33 bp, Homo sapien
tggcttgaatattaaacacactgtgatttccca

SEQ ID NO: 643954 - DNA, 33 bp, Homo sapien
tggcttgaatattaaatacactgtgatttccca

SEQ ID NO: 643955 - DNA, 33 bp, Homo sapien
aggtattgcagggaaggagtaggtggtcagtga

SEQ ID NO: 643956 - DNA, 33 bp, Homo sapien
aggtattgcagggaagtagtaggtggtcagtga

SEQ ID NO: 643957 - DNA, 33 bp, Homo sapien
agcgtctcctgatgataagtatactaaacacct

SEQ ID NO: 643958 - DNA, 33 bp, Homo sapien
agcgtctcctgatgatgagtatactaaacacct

SEQ ID NO: 643959 - DNA, 33 bp, Homo sapien
tgtcccaaatccttccaagcagataaagaatga

SEQ ID NO: 643960 - DNA, 33 bp, Homo sapien
tgtcccaaatccttccgagcagataaagaatga

SEQ ID NO: 643961 - DNA, 33 bp, Homo sapien
acaacataccttctcaaggagttacttcttagt

SEQ ID NO: 643962 - DNA, 33 bp, Homo sapien
acaacataccttctcagggagttacttcttagt

SEQ ID NO: 643963 - DNA, 33 bp, Homo sapien
gtataattgatgtaagaaaagttttggaagctg

SEQ ID NO: 643964 - DNA, 33 bp, Homo sapien
gtataattgatgtaaggaaagttttggaagctg

SEQ ID NO: 643965 - DNA, 33 bp, Homo sapien
ttgtgagaaaatttcaagtgagttgatggaaga

SEQ ID NO: 643966 - DNA, 33 bp, Homo sapien
ttgtgagaaaatttcaggtgagttgatggaaga

SEQ ID NO: 643967 - DNA, 33 bp, Homo sapien
gttttggttaacagaacgaggcagaaattaagg

SEQ ID NO: 643968 - DNA, 33 bp, Homo sapien
gttttggttaacagaatgaggcagaaattaagg

SEQ ID NO: 643969 - DNA, 33 bp, Homo sapien
tgcaggaacaaggcacaaacttggaagcagaga

SEQ ID NO: 643970 - DNA, 33 bp, Homo sapien
tgcaggaacaaggcacgaacttggaagcagaga

SEQ ID NO: 643971 - DNA, 33 bp, Homo sapien
atttaattaccttcaaatgaaagccccaacact

SEQ ID NO: 643972 - DNA, 33 bp, Homo sapien
atttaattaccttcaagtgaaagccccaacact

SEQ ID NO: 643973 - DNA, 33 bp, Homo sapien; identical to SEQ ID NO: 643971

SEQ ID NO: 643974 - DNA, 33 bp, Homo sapien; identical to SEQ ID NO: 643972

SEQ ID NO: 643975 - DNA, 33 bp, Homo sapien
tacatttacttggtcaatcctacaaatcaccta

SEQ ID NO: 643976 - DNA, 33 bp, Homo sapien
tacatttacttggtcagtcctacaaatcaccta

SEQ ID NO: 643977 - DNA, 33 bp, Homo sapien
cctctacattttccacaaccaaataacagctat

SEQ ID NO: 643978 - DNA, 33 bp, Homo sapien
cctctacattttccacgaccaaataacagctat

SEQ ID NO: 643979 - DNA, 33 bp, Homo sapien
cacccattagccaagactagaacaagatgatga

SEQ ID NO: 643980 - DNA, 33 bp, Homo sapien
cacccattagccaagagtagaacaagatgatga

SEQ ID NO: 643981 - DNA, 33 bp, Homo sapien
tttaggaaggccatacaacaaaaccaattacta

SEQ ID NO: 643982 - DNA, 33 bp, Homo sapien
tttaggaaggccatacgacaaaaccaattacta

SEQ ID NO: 643983 - DNA, 33 bp, Homo sapien
catgtgaaaggcactacacaaaataaaataatg

SEQ ID NO: 643984 - DNA, 33 bp, Homo sapien
catgtgaaaggcactatacaaaataaaataatg

SEQ ID NO: 643985 - DNA, 33 bp, Homo sapien
taacaaagcctgttccgcatcgactcatagaac

SEQ ID NO: 643986 - DNA, 33 bp, Homo sapien
taacaaagcctgttcctcatcgactcatagaac

SEQ ID NO: 643987 - DNA, 33 bp, Homo sapien
agactaaaaatgccagaacacagcaatcagaag

SEQ ID NO: 643988 - DNA, 33 bp, Homo sapien
agactaaaaatgccaggacacagcaatcagaag

SEQ ID NO: 643989 - DNA, 33 bp, Homo sapien
ccactataattgaatacgccaaatttcatttta

SEQ ID NO: 643990 - DNA, 33 bp, Homo sapien
ccactataattgaatatgccaaatttcatttta

SEQ ID NO: 643991 - DNA, 33 bp, Homo sapien
ctttatgtgcctcaaacagactccactgccttt

SEQ ID NO: 643992 - DNA, 33 bp, Homo sapien
ctttatgtgcctcaaatagactccactgccttt

SEQ ID NO: 643993 - DNA, 33 bp, Homo sapien
tttataattgaatacgacacaacatattcaaga

SEQ ID NO: 643994 - DNA, 33 bp, Homo sapien
tttataattgaatacggcacaacatattcaaga

SEQ ID NO: 643995 - DNA, 33 bp, Homo sapien
tcactgagattattccagataacttatcatctc

SEQ ID NO: 643996 - DNA, 33 bp, Homo sapien
tcactgagattattccggataacttatcatctc

SEQ ID NO: 643997 - DNA, 33 bp, Homo sapien
agacaagttgacacgtaaaaatcaactatcaca

SEQ ID NO: 643998 - DNA, 33 bp, Homo sapien
agacaagttgacacgtgaaaatcaactatcaca

SEQ ID NO: 643999 - DNA, 33 bp, Homo sapien
taaaaatgtctttacccgaagagtgatgggatg

SEQ ID NO: 644000 - DNA, 33 bp, Homo sapien
taaaaatgtctttacctgaagagtgatgggatg

SEQ ID NO: 644001 - DNA, 33 bp, Homo sapien
aagtcccagctcttgacgtgtacaagatgagag

SEQ ID NO: 644002 - DNA, 33 bp, Homo sapien
aagtcccagctcttgaggtgtacaagatgagag

SEQ ID NO: 644003 - DNA, 33 bp, Homo sapien
gtaaaactttctcttaccaatttgctctaggtt

SEQ ID NO: 644004 - DNA, 33 bp, Homo sapien
gtaaaactttctcttatcaatttgctctaggtt

SEQ ID NO: 644005 - DNA, 33 bp, Homo sapien
atttaaccccgagacactaataagttaggcaca

SEQ ID NO: 644006 - DNA, 33 bp, Homo sapien
atttaaccccgagacagtaataagttaggcaca

SEQ ID NO: 644007 - DNA, 33 bp, Homo sapien
tgaaatactgtaccccaagtagctaagtggtgg

SEQ ID NO: 644008 - DNA, 33 bp, Homo sapien
tgaaatactgtaccccgagtagctaagtggtgg

SEQ ID NO: 644009 - DNA, 33 bp, Homo sapien
gcttttggtctcacacaggactttaaatttgga

SEQ ID NO: 644010 - DNA, 33 bp, Homo sapien
gcttttggtctcacacgggactttaaatttgga

SEQ ID NO: 644011 - DNA, 33 bp, Homo sapien
gtttgtgactgccttgcaaggaggtgagatttt

SEQ ID NO: 644012 - DNA, 33 bp, Homo sapien
gtttgtgactgccttgtaaggaggtgagatttt

SEQ ID NO: 644013 - DNA, 33 bp, Homo sapien
tgaagccctagcccccaaagtgactctggagat

SEQ ID NO: 644014 - DNA, 33 bp, Homo sapien
tgaagccctagcccccgaagtgactctggagat

SEQ ID NO: 644015 - DNA, 33 bp, Homo sapien
atagtagtgaactctacgtaaacagtcatgtgc

SEQ ID NO: 644016 - DNA, 33 bp, Homo sapien
atagtagtgaactctatgtaaacagtcatgtgc

SEQ ID NO: 644017 - DNA, 33 bp, Homo sapien
gaatcacagttcaacaatagagataaagtgaga

SEQ ID NO: 644018 - DNA, 33 bp, Homo sapien
gaatcacagttcaacagtagagataaagtgaga

SEQ ID NO: 644019 - DNA, 33 bp, Homo sapien
aggtgatggtaaaaaaggtgaagatttaacaga

SEQ ID NO: 644020 - DNA, 33 bp, Homo sapien
aggtgatggtaaaaaatgtgaagatttaacaga

SEQ ID NO: 644021 - DNA, 33 bp, Homo sapien
tatgatttccctcaacaactcctgaagccattt

SEQ ID NO: 644022 - DNA, 33 bp, Homo sapien
tatgatttccctcaacgactcctgaagccattt

SEQ ID NO: 644023 - DNA, 33 bp, Homo sapien
aaaaataatgaaaactcaataactctctcactg

SEQ ID NO: 644024 - DNA, 33 bp, Homo sapien
aaaaataatgaaaactgaataactctctcactg

SEQ ID NO: 644025 - DNA, 33 bp, Homo sapien
aaagcatagaggagataacctggctgaatctga

SEQ ID NO: 644026 - DNA, 33 bp, Homo sapien
aaagcatagaggagatgacctggctgaatctga

SEQ ID NO: 644027 - DNA, 33 bp, Homo sapien
ttccacgttcactgaagtattattcaccatggt

SEQ ID NO: 644028 - DNA, 33 bp, Homo sapien
ttccacgttcactgaattattattcaccatggt

SEQ ID NO: 644029 - DNA, 33 bp, Homo sapien
aggagtagcctactgaaaatagagatgagcaat

SEQ ID NO: 644030 - DNA, 33 bp, Homo sapien
aggagtagcctactgacaatagagatgagcaat

SEQ ID NO: 644031 - DNA, 33 bp, Homo sapien
agtggactgcagctccacaatgtcatccaaagt

SEQ ID NO: 644032 - DNA, 33 bp, Homo sapien
agtggactgcagctcctcaatgtcatccaaagt

SEQ ID NO: 644033 - DNA, 33 bp, Homo sapien
taccaaatgtattggcactccattgcatggtta

SEQ ID NO: 644034 - DNA, 33 bp, Homo sapien
taccaaatgtattggcgctccattgcatggtta

SEQ ID NO: 644035 - DNA, 33 bp, Homo sapien
tccctaatgccaagcacaatgtctgggaataaa

SEQ ID NO: 644036 - DNA, 33 bp, Homo sapien
tccctaatgccaagcagaatgtctgggaataaa

SEQ ID NO: 644037 - DNA, 33 bp, Homo sapien
gctgttttcacttaggaccaaggttgcaggctt

SEQ ID NO: 644038 - DNA, 33 bp, Homo sapien
gctgttttcacttagggccaaggttgcaggctt

SEQ ID NO: 644039 - DNA, 33 bp, Homo sapien
cccggaaatttcattaccacaggtagacgacta

SEQ ID NO: 644040 - DNA, 33 bp, Homo sapien
cccggaaatttcattatcacaggtagacgacta

SEQ ID NO: 644041 - DNA, 33 bp, Homo sapien
acaaatctccacaaaacatagctttgcagggct

SEQ ID NO: 644042 - DNA, 33 bp, Homo sapien
acaaatctccacaaaagatagctttgcagggct

SEQ ID NO: 644043 - DNA, 33 bp, Homo sapien
gagactaccagaactaaatttacatacaagttg

SEQ ID NO: 644044 - DNA, 33 bp, Homo sapien
gagactaccagaactagatttacatacaagttg

SEQ ID NO: 644045 - DNA, 33 bp, Homo sapien
tagacatcaacactaaaaggaaccttgagaatt

SEQ ID NO: 644046 - DNA, 33 bp, Homo sapien
tagacatcaacactaagaggaaccttgagaatt

SEQ ID NO: 644047 - DNA, 33 bp, Homo sapien
ccaattcttgggcctccaagtgacttccttgga

SEQ ID NO: 644048 - DNA, 33 bp, Homo sapien
ccaattcttgggcctctaagtgacttccttgga

SEQ ID NO: 644049 - DNA, 33 bp, Homo sapien
aactatctaggtcaaaaatttcacagactaaga

SEQ ID NO: 644050 - DNA, 33 bp, Homo sapien
aactatctaggtcaaagatttcacagactaaga

SEQ ID NO: 644051 - DNA, 33 bp, Homo sapien
tcctgtcttggccctaaaaaattacaaatcaaa

SEQ ID NO: 644052 - DNA, 33 bp, Homo sapien
tcctgtcttggccctacaaaattacaaatcaaa

SEQ ID NO: 644053 - DNA, 33 bp, Homo sapien
ctcttgttggcagttgcagtaaaccatctgaaa

SEQ ID NO: 644054 - DNA, 33 bp, Homo sapien
ctcttgttggcagttgtagtaaaccatctgaaa

SEQ ID NO: 644055 - DNA, 33 bp, Homo sapien
ccaactttctgtcactaaagaaaaaacatagtt

SEQ ID NO: 644056 - DNA, 33 bp, Homo sapien
ccaactttctgtcactgaagaaaaaacatagtt

SEQ ID NO: 644057 - DNA, 33 bp, Homo sapien
cctaagtctccttttacgctatcttctaccaaa

SEQ ID NO: 644058 - DNA, 33 bp, Homo sapien
cctaagtctccttttatgctatcttctaccaaa

SEQ ID NO: 644059 - DNA, 33 bp, Homo sapien
ccactgacactttagaacttacggaacatctag

SEQ ID NO: 644060 - DNA, 33 bp, Homo sapien
ccactgacactttagatcttacggaacatctag

SEQ ID NO: 644061 - DNA, 33 bp, Homo sapien
cagagattagtgccaccaacaaagacttaaaag

SEQ ID NO: 644062 - DNA, 33 bp, Homo sapien
cagagattagtgccacgaacaaagacttaaaag

SEQ ID NO: 644063 - DNA, 33 bp, Homo sapien
agttaataagccatcaaacttctcttgctgcct

SEQ ID NO: 644064 - DNA, 33 bp, Homo sapien
agttaataagccatcacacttctcttgctgcct

SEQ ID NO: 644065 - DNA, 33 bp, Homo sapien
ttcaggaatgtggggaataagtctgaaccacag

SEQ ID NO: 644066 - DNA, 33 bp, Homo sapien
ttcaggaatgtggggagtaagtctgaaccacag

SEQ ID NO: 644067 - DNA, 33 bp, Homo sapien
ccatatgcttgccccccgaaatcattttcttgc

SEQ ID NO: 644068 - DNA, 33 bp, Homo sapien
ccatatgcttgccccctgaaatcattttcttgc

SEQ ID NO: 644069 - DNA, 33 bp, Homo sapien
cctttctcctaaacaacccattttgctctatta

SEQ ID NO: 644070 - DNA, 33 bp, Homo sapien
cctttctcctaaacaatccattttgctctatta

SEQ ID NO: 644071 - DNA, 33 bp, Homo sapien
tatgaagccatttagacagcagttgacttgaaa

SEQ ID NO: 644072 - DNA, 33 bp, Homo sapien
tatgaagccatttagatagcagttgacttgaaa

SEQ ID NO: 644073 - DNA, 33 bp, Homo sapien
ttttttctgagctctgaaggattattcctaaag

SEQ ID NO: 644074 - DNA, 33 bp, Homo sapien
ttttttctgagctctggaggattattcctaaag

SEQ ID NO: 644075 - DNA, 33 bp, Homo sapien
cctagaatcacttggacaaggaagcaatgtgct

SEQ ID NO: 644076 - DNA, 33 bp, Homo sapien
cctagaatcacttggataaggaagcaatgtgct

SEQ ID NO: 644077 - DNA, 33 bp, Homo sapien
tactgagctcatcatgaaatactgtaatggagt

SEQ ID NO: 644078 - DNA, 33 bp, Homo sapien
tactgagctcatcatggaatactgtaatggagt

SEQ ID NO: 644079 - DNA, 33 bp, Homo sapien
gctaagcaggttaaaagaattttttgcatctat

SEQ ID NO: 644080 - DNA, 33 bp, Homo sapien
gctaagcaggttaaaataattttttgcatctat

SEQ ID NO: 644081 - DNA, 33 bp, Homo sapien
atgatagaattagctaagactttggtgaactgt

SEQ ID NO: 644082 - DNA, 33 bp, Homo sapien
atgatagaattagctaggactttggtgaactgt

SEQ ID NO: 644083 - DNA, 33 bp, Homo sapien; identical to SEQ ID NO: 644081

SEQ ID NO: 644084 - DNA, 33 bp, Homo sapien; identical to SEQ ID NO: 644082

SEQ ID NO: 644085 - DNA, 33 bp, Homo sapien
ttgtttacagggtgaacttcaagttacataatg

SEQ ID NO: 644086 - DNA, 33 bp, Homo sapien
ttgtttacagggtgaatttcaagttacataatg

SEQ ID NO: 644087 - DNA, 33 bp, Homo sapien
gaaaagtctaataagagaaaaagaggcaggaat

SEQ ID NO: 644088 - DNA, 33 bp, Homo sapien
gaaaagtctaataagataaaaagaggcaggaat

SEQ ID NO: 644089 - DNA, 33 bp, Homo sapien
gatactgagagacatacctcggtttctttcaaa

SEQ ID NO: 644090 - DNA, 33 bp, Homo sapien
gatactgagagacatagctcggtttctttcaaa

SEQ ID NO: 644091 - DNA, 33 bp, Homo sapien
taatgagaagcgttgtaaagcatctgggctgtc

SEQ ID NO: 644092 - DNA, 33 bp, Homo sapien
taatgagaagcgttgtgaagcatctgggctgtc

SEQ ID NO: 644093 - DNA, 33 bp, Homo sapien
gaactgaactgtgcaccgatcaaaaccttctgc

SEQ ID NO: 644094 - DNA, 33 bp, Homo sapien
gaactgaactgtgcactgatcaaaaccttctgc

SEQ ID NO: 644095 - DNA, 33 bp, Homo sapien
cataaccaggaaaaacaaagttctgatcacatc

SEQ ID NO: 644096 - DNA, 33 bp, Homo sapien
cataaccaggaaaaacgaagttctgatcacatc

SEQ ID NO: 644097 - DNA, 33 bp, Homo sapien
aaaatggtcacctagaaaagtttagtaggacaa

SEQ ID NO: 644098 - DNA, 33 bp, Homo sapien
aaaatggtcacctagagaagtttagtaggacaa

SEQ ID NO: 644099 - DNA, 33 bp, Homo sapien
tgggtaactctcaaaaagacgtggtaacatcat

SEQ ID NO: 644100 - DNA, 33 bp, Homo sapien
tgggtaactctcaaaacgacgtggtaacatcat

SEQ ID NO: 644101 - DNA, 33 bp, Homo sapien
tgctaagagttggccaatcatgcctaatatgtc

SEQ ID NO: 644102 - DNA, 33 bp, Homo sapien
tgctaagagttggccagtcatgcctaatatgtc

SEQ ID NO: 644103 - DNA, 33 bp, Homo sapien
caattacgtttcatgaacatacttattggtgca

SEQ ID NO: 644104 - DNA, 33 bp, Homo sapien
caattacgtttcatgagcatacttattggtgca

SEQ ID NO: 644105 - DNA, 33 bp, Homo sapien
aggcagtgtaaggaaacggaaagtattgttctg

SEQ ID NO: 644106 - DNA, 33 bp, Homo sapien
aggcagtgtaaggaaagggaaagtattgttctg

SEQ ID NO: 644107 - DNA, 33 bp, Homo sapien
attatacctagccataaggttcctaaaatgttc

SEQ ID NO: 644108 - DNA, 33 bp, Homo sapien
attatacctagccatagggttcctaaaatgttc

SEQ ID NO: 644109 - DNA, 33 bp, Homo sapien
tgaaaacattcagaccaaaaacttagtccacag

SEQ ID NO: 644110 - DNA, 33 bp, Homo sapien
tgaaaacattcagaccgaaaacttagtccacag

SEQ ID NO: 644111 - DNA, 33 bp, Homo sapien
ctgacgcagagtgctacaagcccaccaggtcta

SEQ ID NO: 644112 - DNA, 33 bp, Homo sapien
ctgacgcagagtgctagaagcccaccaggtcta

SEQ ID NO: 644113 - DNA, 33 bp, Homo sapien
aaagtagccatctaggacatcagcagtgaaagt

SEQ ID NO: 644114 - DNA, 33 bp, Homo sapien
aaagtagccatctaggccatcagcagtgaaagt

SEQ ID NO: 644115 - DNA, 33 bp, Homo sapien
atgcttgaataatagactagaaggaattgaggt

SEQ ID NO: 644116 - DNA, 33 bp, Homo sapien
atgcttgaataatagattagaaggaattgaggt

SEQ ID NO: 644117 - DNA, 33 bp, Homo sapien
gtcctgcatagagtaaacctcaagatggcctta

SEQ ID NO: 644118 - DNA, 33 bp, Homo sapien
gtcctgcatagagtaaccctcaagatggcctta

SEQ ID NO: 644119 - DNA, 33 bp, Homo sapien
tgcaggccaatagaaacaatctgctcactgggc

SEQ ID NO: 644120 - DNA, 33 bp, Homo sapien
tgcaggccaatagaaataatctgctcactgggc

SEQ ID NO: 644121 - DNA, 33 bp, Homo sapien
aagactctggctctcaacttctctgaaatcagc

SEQ ID NO: 644122 - DNA, 33 bp, Homo sapien
aagactctggctctcagcttctctgaaatcagc

SEQ ID NO: 644123 - DNA, 33 bp, Homo sapien
gttggtttccagaagacgaataacattaaatca

SEQ ID NO: 644124 - DNA, 33 bp, Homo sapien
gttggtttccagaagatgaataacattaaatca

SEQ ID NO: 644125 - DNA, 33 bp, Homo sapien
tctaggtttattttcccccttgcctcaaagctt

SEQ ID NO: 644126 - DNA, 33 bp, Homo sapien
tctaggtttattttcctccttgcctcaaagctt

SEQ ID NO: 644127 - DNA, 33 bp, Homo sapien
ggaagacactttttccgcggctccaaatccaac

SEQ ID NO: 644128 - DNA, 33 bp, Homo sapien
ggaagacactttttcctcggctccaaatccaac

SEQ ID NO: 644129 - DNA, 33 bp, Homo sapien
aaggaacaaatcaataaggtggtagtggaagaa

SEQ ID NO: 644130 - DNA, 33 bp, Homo sapien
aaggaacaaatcaatagggtggtagtggaagaa

SEQ ID NO: 644131 - DNA, 33 bp, Homo sapien
aatcatgagcaataaacggtggttgtattagta

SEQ ID NO: 644132 - DNA, 33 bp, Homo sapien
aatcatgagcaataaatggtggttgtattagta

SEQ ID NO: 644133 - DNA, 33 bp, Homo sapien
atagctaagagtgcctaacgtgcagagagtaaa

SEQ ID NO: 644134 - DNA, 33 bp, Homo sapien
atagctaagagtgcctgacgtgcagagagtaaa

SEQ ID NO: 644135 - DNA, 33 bp, Homo sapien
aaaagcatggcttataactcactagacgaggca

SEQ ID NO: 644136 - DNA, 33 bp, Homo sapien
aaaagcatggcttatacctcactagacgaggca

SEQ ID NO: 644137 - DNA, 33 bp, Homo sapien
tatcttctggagattgcagaaaaataaggcaga

SEQ ID NO: 644138 - DNA, 33 bp, Homo sapien
tatcttctggagattgtagaaaaataaggcaga

SEQ ID NO: 644139 - DNA, 33 bp, Homo sapien
cataggatgaagtccaaactacttaaactgaca

SEQ ID NO: 644140 - DNA, 33 bp, Homo sapien
cataggatgaagtccacactacttaaactgaca

SEQ ID NO: 644141 - DNA, 33 bp, Homo sapien
atcaacaaatggataaacattataccacatgaa

SEQ ID NO: 644142 - DNA, 33 bp, Homo sapien
atcaacaaatggataaccattataccacatgaa

SEQ ID NO: 644143 - DNA, 33 bp, Homo sapien
gtggataaaaacctgcaaatacaggagagctaa

SEQ ID NO: 644144 - DNA, 33 bp, Homo sapien
gtggataaaaacctgccaatacaggagagctaa

SEQ ID NO: 644145 - DNA, 33 bp, Homo sapien
gacaacatatgatgacaataacatgaaggtact

SEQ ID NO: 644146 - DNA, 33 bp, Homo sapien
gacaacatatgatgacgataacatgaaggtact

SEQ ID NO: 644147 - DNA, 33 bp, Homo sapien
gggcctctaccatgaaactaagatgggaagaaa

SEQ ID NO: 644148 - DNA, 33 bp, Homo sapien
gggcctctaccatgaacctaagatgggaagaaa

SEQ ID NO: 644149 - DNA, 33 bp, Homo sapien
tgcattgtagctctgactaaatttgatttgggg

SEQ ID NO: 644150 - DNA, 33 bp, Homo sapien
tgcattgtagctctgattaaatttgatttgggg

SEQ ID NO: 644151 - DNA, 33 bp, Homo sapien
gaaacaggtatagagaaaaacatctgaacaaac

SEQ ID NO: 644152 - DNA, 33 bp, Homo sapien
gaaacaggtatagagagaaacatctgaacaaac

SEQ ID NO: 644153 - DNA, 33 bp, Homo sapien
caaggaacacaaagaactggactatgtgcttaa

SEQ ID NO: 644154 - DNA, 33 bp, Homo sapien
caaggaacacaaagaattggactatgtgcttaa

SEQ ID NO: 644155 - DNA, 33 bp, Homo sapien
gttctagagcaagaacaaaaggaagcaaagtac

SEQ ID NO: 644156 - DNA, 33 bp, Homo sapien
gttctagagcaagaacgaaaggaagcaaagtac

SEQ ID NO: 644157 - DNA, 33 bp, Homo sapien
gtgatgaaatgcatcacggtgtatcacctgaat

SEQ ID NO: 644158 - DNA, 33 bp, Homo sapien
gtgatgaaatgcatcatggtgtatcacctgaat

SEQ ID NO: 644159 - DNA, 33 bp, Homo sapien
gactagacattccacaccaatttttgctaagat

SEQ ID NO: 644160 - DNA, 33 bp, Homo sapien
gactagacattccacatcaatttttgctaagat

SEQ ID NO: 644161 - DNA, 33 bp, Homo sapien
tgtgtggaataccatacgaagtaagtgatgaag

SEQ ID NO: 644162 - DNA, 33 bp, Homo sapien
tgtgtggaataccataggaagtaagtgatgaag

SEQ ID NO: 644163 - DNA, 33 bp, Homo sapien
aatcagataaaggttcaacagtgacttactctt

SEQ ID NO: 644164 - DNA, 33 bp, Homo sapien
aatcagataaaggttcgacagtgacttactctt

SEQ ID NO: 644165 - DNA, 33 bp, Homo sapien
ggggtgaaagttgtgacgagtagaatggaaaga

SEQ ID NO: 644166 - DNA, 33 bp, Homo sapien
ggggtgaaagttgtgatgagtagaatggaaaga

SEQ ID NO: 644167 - DNA, 33 bp, Homo sapien
atggtatcaagtgttacgaagagaagctgcaga

SEQ ID NO: 644168 - DNA, 33 bp, Homo sapien
atggtatcaagtgttatgaagagaagctgcaga

SEQ ID NO: 644169 - DNA, 33 bp, Homo sapien
gttcttttcattcaccaagccaactgtgacaaa

SEQ ID NO: 644170 - DNA, 33 bp, Homo sapien
gttcttttcattcaccgagccaactgtgacaaa

SEQ ID NO: 644171 - DNA, 33 bp, Homo sapien
tattacttatagaagcaacctacttacatattt

SEQ ID NO: 644172 - DNA, 33 bp, Homo sapien
tattacttatagaagcgacctacttacatattt

SEQ ID NO: 644173 - DNA, 33 bp, Homo sapien
aattgagagcaaataaagcacttctttcccata

SEQ ID NO: 644174 - DNA, 33 bp, Homo sapien
aattgagagcaaataaggcacttctttcccata

SEQ ID NO: 644175 - DNA, 33 bp, Homo sapien
ataaatgactaagcaaaacactcgagtatctgc

SEQ ID NO: 644176 - DNA, 33 bp, Homo sapien
ataaatgactaagcaagacactcgagtatctgc

SEQ ID NO: 644177 - DNA, 33 bp, Homo sapien
tctgggcatagtaatacacttctctgtgtgtgg

SEQ ID NO: 644178 - DNA, 33 bp, Homo sapien
tctgggcatagtaatatacttctctgtgtgtgg

SEQ ID NO: 644179 - DNA, 33 bp, Homo sapien
cacatagttaggctaaatggttaagaagattag

SEQ ID NO: 644180 - DNA, 33 bp, Homo sapien
cacatagttaggctaagtggttaagaagattag

SEQ ID NO: 644181 - DNA, 33 bp, Homo sapien
gttctgctacttagaaaaactccaaactggaag

SEQ ID NO: 644182 - DNA, 33 bp, Homo sapien
gttctgctacttagaagaactccaaactggaag

SEQ ID NO: 644183 - DNA, 33 bp, Homo sapien
tgttaagctctagtcaccaaaacctttcagtta

SEQ ID NO: 644184 - DNA, 33 bp, Homo sapien
tgttaagctctagtcatcaaaacctttcagtta

SEQ ID NO: 644185 - DNA, 33 bp, Homo sapien
cacacatgaacaatttcaaatctaaccatatct

SEQ ID NO: 644186 - DNA, 33 bp, Homo sapien
cacacatgaacaattttaaatctaaccatatct

SEQ ID NO: 644187 - DNA, 33 bp, Homo sapien
accactcttattttcccgattacgtaaactgaa

SEQ ID NO: 644188 - DNA, 33 bp, Homo sapien
accactcttattttcctgattacgtaaactgaa

SEQ ID NO: 644189 - DNA, 33 bp, Homo sapien
ctattattcaccaacaagacttttaatgactgt

SEQ ID NO: 644190 - DNA, 33 bp, Homo sapien
ctattattcaccaacaggacttttaatgactgt

SEQ ID NO: 644191 - DNA, 33 bp, Homo sapien
ttctttttgtggattacgcctgctgatccattt

SEQ ID NO: 644192 - DNA, 33 bp, Homo sapien
ttctttttgtggattatgcctgctgatccattt

SEQ ID NO: 644193 - DNA, 33 bp, Homo sapien
gattatggggtgcttacgcaaatacagttgttg

SEQ ID NO: 644194 - DNA, 33 bp, Homo sapien
gattatggggtgcttatgcaaatacagttgttg

SEQ ID NO: 644195 - DNA, 33 bp, Homo sapien
taggaattttggattaagttgccaccccagcat

SEQ ID NO: 644196 - DNA, 33 bp, Homo sapien
taggaattttggattaggttgccaccccagcat

SEQ ID NO: 644197 - DNA, 33 bp, Homo sapien
tggttttttgatccacaaaatatctcattcaaa

SEQ ID NO: 644198 - DNA, 33 bp, Homo sapien
tggttttttgatccacgaaatatctcattcaaa

SEQ ID NO: 644199 - DNA, 33 bp, Homo sapien
tcaaaaatgtgctttggacataacagacctttc

SEQ ID NO: 644200 - DNA, 33 bp, Homo sapien
tcaaaaatgtgctttgtacataacagacctttc

SEQ ID NO: 644201 - DNA, 33 bp, Homo sapien
ttatgttcgaagctcacgtgttcgaaaaagtgt

SEQ ID NO: 644202 - DNA, 33 bp, Homo sapien
ttatgttcgaagctcatgtgttcgaaaaagtgt

SEQ ID NO: 644203 - DNA, 33 bp, Homo sapien
agactaaattgacaagcataagtgtaccctaat

SEQ ID NO: 644204 - DNA, 33 bp, Homo sapien
agactaaattgacaagtataagtgtaccctaat

SEQ ID NO: 644205 - DNA, 33 bp, Homo sapien
ctggccctgcaaaagacctaaacatccaaattc

SEQ ID NO: 644206 - DNA, 33 bp, Homo sapien
ctggccctgcaaaagagctaaacatccaaattc

SEQ ID NO: 644207 - DNA, 33 bp, Homo sapien
tctggtctattgtgtacagcaggcttactgtct

SEQ ID NO: 644208 - DNA, 33 bp, Homo sapien
tctggtctattgtgtatagcaggcttactgtct

SEQ ID NO: 644209 - DNA, 33 bp, Homo sapien
ttaaataaattatacaagacacacttaaaaagg

SEQ ID NO: 644210 - DNA, 33 bp, Homo sapien
ttaaataaattatacatgacacacttaaaaagg

SEQ ID NO: 644211 - DNA, 33 bp, Homo sapien
cctcaatttgtttgctcaccctgtggaaactct

SEQ ID NO: 644212 - DNA, 33 bp, Homo sapien
cctcaatttgtttgcttaccctgtggaaactct

SEQ ID NO: 644213 - DNA, 33 bp, Homo sapien
ctagatagtatgaatcaagaagagttgttctca

SEQ ID NO: 644214 - DNA, 33 bp, Homo sapien
ctagatagtatgaatctagaagagttgttctca

SEQ ID NO: 644215 - DNA, 33 bp, Homo sapien
ttgattccatgacttccacctactttctctgct

SEQ ID NO: 644216 - DNA, 33 bp, Homo sapien
ttgattccatgacttctacctactttctctgct

SEQ ID NO: 644217 - DNA, 33 bp, Homo sapien
aaagagcagtaaggcacggcaaaaaatgtcctt

SEQ ID NO: 644218 - DNA, 33 bp, Homo sapien
aaagagcagtaaggcatggcaaaaaatgtcctt

SEQ ID NO: 644219 - DNA, 33 bp, Homo sapien
ttaaaagaagttatcaatcatcttcatgtttac

SEQ ID NO: 644220 - DNA, 33 bp, Homo sapien
ttaaaagaagttatcagtcatcttcatgtttac

SEQ ID NO: 644221 - DNA, 33 bp, Homo sapien
aggactaattcaaaataactgagccaataccaa

SEQ ID NO: 644222 - DNA, 33 bp, Homo sapien
aggactaattcaaaattactgagccaataccaa

SEQ ID NO: 644223 - DNA, 33 bp, Homo sapien
atccttcatcttagtcaccattcacatcttacc

SEQ ID NO: 644224 - DNA, 33 bp, Homo sapien
atccttcatcttagtcgccattcacatcttacc

SEQ ID NO: 644225 - DNA, 33 bp, Homo sapien
tgtctcttgtgccatacagtgtggtgtctttaa

SEQ ID NO: 644226 - DNA, 33 bp, Homo sapien
tgtctcttgtgccatagagtgtggtgtctttaa

SEQ ID NO: 644227 - DNA, 33 bp, Homo sapien
aataacttatttcatacgctattatctccacaa

SEQ ID NO: 644228 - DNA, 33 bp, Homo sapien
aataacttatttcataggctattatctccacaa

SEQ ID NO: 644229 - DNA, 33 bp, Homo sapien
actggcatataccgaaatgaatagcatggtaag

SEQ ID NO: 644230 - DNA, 33 bp, Homo sapien
actggcatataccgaagtgaatagcatggtaag

SEQ ID NO: 644231 - DNA, 33 bp, Homo sapien
atttgtctttgaatacaggtaaacattatagtt

SEQ ID NO: 644232 - DNA, 33 bp, Homo sapien
atttgtctttgaatacgggtaaacattatagtt

SEQ ID NO: 644233 - DNA, 33 bp, Homo sapien
cacccaaatgtttaaagtaaatccaaactctgt

SEQ ID NO: 644234 - DNA, 33 bp, Homo sapien
cacccaaatgtttaaattaaatccaaactctgt

SEQ ID NO: 644235 - DNA, 33 bp, Homo sapien
aatctgttccactgacaaccttttgccctattg

SEQ ID NO: 644236 - DNA, 33 bp, Homo sapien
aatctgttccactgaccaccttttgccctattg

SEQ ID NO: 644237 - DNA, 33 bp, Homo sapien
atagaacagggaaatcaattaatcaaatctagg

SEQ ID NO: 644238 - DNA, 33 bp, Homo sapien
atagaacagggaaatcgattaatcaaatctagg

SEQ ID NO: 644239 - DNA, 33 bp, Homo sapien
aaatgaaaccaggaaacgttatcaggatcaaaa

SEQ ID NO: 644240 - DNA, 33 bp, Homo sapien
aaatgaaaccaggaaatgttatcaggatcaaaa

SEQ ID NO: 644241 - DNA, 33 bp, Homo sapien
ttgtgaactacgtaaagagcatagaaagcagca

SEQ ID NO: 644242 - DNA, 33 bp, Homo sapien
ttgtgaactacgtaaatagcatagaaagcagca

SEQ ID NO: 644243 - DNA, 33 bp, Homo sapien
actggacatagctctcaaatagaggatatacat

SEQ ID NO: 644244 - DNA, 33 bp, Homo sapien
actggacatagctctcgaatagaggatatacat

SEQ ID NO: 644245 - DNA, 33 bp, Homo sapien
gatatttcttggaaaacctgtctcatgttcatc

SEQ ID NO: 644246 - DNA, 33 bp, Homo sapien
gatatttcttggaaaatctgtctcatgttcatc

SEQ ID NO: 644247 - DNA, 33 bp, Homo sapien
agtcacacaggccttgcatgaaaaatttgcacc

SEQ ID NO: 644248 - DNA, 33 bp, Homo sapien
agtcacacaggccttggatgaaaaatttgcacc

SEQ ID NO: 644249 - DNA, 33 bp, Homo sapien
taaaaaatgaatgaaccattgatgtgtgtaaac

SEQ ID NO: 644250 - DNA, 33 bp, Homo sapien
taaaaaatgaatgaactattgatgtgtgtaaac

SEQ ID NO: 644251 - DNA, 33 bp, Homo sapien
aatgtgattcttcaagaatggaacaatggccag

SEQ ID NO: 644252 - DNA, 33 bp, Homo sapien
aatgtgattcttcaagcatggaacaatggccag

SEQ ID NO: 644253 - DNA, 33 bp, Homo sapien
atccaaattatatgaaaaggctatgcaaatact

SEQ ID NO: 644254 - DNA, 33 bp, Homo sapien
atccaaattatatgaacaggctatgcaaatact

SEQ ID NO: 644255 - DNA, 33 bp, Homo sapien
aaggctgagatagtccactattttgattccaat

SEQ ID NO: 644256 - DNA, 33 bp, Homo sapien
aaggctgagatagtccgctattttgattccaat

SEQ ID NO: 644257 - DNA, 33 bp, Homo sapien
tgttgcatccaaatatcaggtttaaattgtttc

SEQ ID NO: 644258 - DNA, 33 bp, Homo sapien
tgttgcatccaaatatgaggtttaaattgtttc

SEQ ID NO: 644259 - DNA, 33 bp, Homo sapien
cagtgtctaaccataaaggaagtaaagagaaaa

SEQ ID NO: 644260 - DNA, 33 bp, Homo sapien
cagtgtctaaccataatggaagtaaagagaaaa

SEQ ID NO: 644261 - DNA, 33 bp, Homo sapien
ggaagtaatgaccaataacagaatctggatgtc

SEQ ID NO: 644262 - DNA, 33 bp, Homo sapien
ggaagtaatgaccaattacagaatctggatgtc

SEQ ID NO: 644263 - DNA, 33 bp, Homo sapien
gttcctgataagcgcaaagactcaccggcacag

SEQ ID NO: 644264 - DNA, 33 bp, Homo sapien
gttcctgataagcgcagagactcaccggcacag

SEQ ID NO: 644265 - DNA, 33 bp, Homo sapien
aagcagcagtaaggacaaaagaacacgccaaga

SEQ ID NO: 644266 - DNA, 33 bp, Homo sapien
aagcagcagtaaggacgaaagaacacgccaaga

SEQ ID NO: 644267 - DNA, 33 bp, Homo sapien
ttctgatatgatgaaacaagggagaattgcatt

SEQ ID NO: 644268 - DNA, 33 bp, Homo sapien
ttctgatatgatgaaagaagggagaattgcatt

SEQ ID NO: 644269 - DNA, 33 bp, Homo sapien
aattctcctaaattggcatcatagttaacagct

SEQ ID NO: 644270 - DNA, 33 bp, Homo sapien
aattctcctaaattgggatcatagttaacagct

SEQ ID NO: 644271 - DNA, 33 bp, Homo sapien
tttgaccagcacaccactgatgcgacgtacatc

SEQ ID NO: 644272 - DNA, 33 bp, Homo sapien
tttgaccagcacaccattgatgcgacgtacatc

SEQ ID NO: 644273 - DNA, 33 bp, Homo sapien
atatcacacgggcagaaaagcagagtgagatca

SEQ ID NO: 644274 - DNA, 33 bp, Homo sapien
atatcacacgggcagagaagcagagtgagatca

SEQ ID NO: 644275 - DNA, 33 bp, Homo sapien
agggtacatacaatcactcaagtgtaggaggtt

SEQ ID NO: 644276 - DNA, 33 bp, Homo sapien
agggtacatacaatcagtcaagtgtaggaggtt

SEQ ID NO: 644277 - DNA, 33 bp, Homo sapien
atccctgtgacctttaaaaaacctgaaggaata

SEQ ID NO: 644278 - DNA, 33 bp, Homo sapien
atccctgtgacctttagaaaacctgaaggaata

SEQ ID NO: 644279 - DNA, 33 bp, Homo sapien
attccttccttctgcaacctctgctttataatt

SEQ ID NO: 644280 - DNA, 33 bp, Homo sapien
attccttccttctgcaccctctgctttataatt

SEQ ID NO: 644281 - DNA, 33 bp, Homo sapien
gatttaggcatgatagaagaaatagacaaagcc

SEQ ID NO: 644282 - DNA, 33 bp, Homo sapien
gatttaggcatgataggagaaatagacaaagcc

SEQ ID NO: 644283 - DNA, 33 bp, Homo sapien
agtatttcagtgaatccatgttaggaatgagta

SEQ ID NO: 644284 - DNA, 33 bp, Homo sapien
agtatttcagtgaatctatgttaggaatgagta

SEQ ID NO: 644285 - DNA, 33 bp, Homo sapien
ataaacatccgcataaggaaataggaattagta

SEQ ID NO: 644286 - DNA, 33 bp, Homo sapien
ataaacatccgcataatgaaataggaattagta

SEQ ID NO: 644287 - DNA, 33 bp, Homo sapien
atgacccatcataacactgacttttttccttta

SEQ ID NO: 644288 - DNA, 33 bp, Homo sapien
atgacccatcataacattgacttttttccttta

SEQ ID NO: 644289 - DNA, 33 bp, Homo sapien
atttgtcttatccatacggcttttagacctgcc

SEQ ID NO: 644290 - DNA, 33 bp, Homo sapien
atttgtcttatccatagggcttttagacctgcc

SEQ ID NO: 644291 - DNA, 33 bp, Homo sapien
aatttagaaagctggacaatgccaaatgttgga

SEQ ID NO: 644292 - DNA, 33 bp, Homo sapien
aatttagaaagctggataatgccaaatgttgga

SEQ ID NO: 644293 - DNA, 33 bp, Homo sapien
cataaactaatcggagaaaggagtttgtgatat

SEQ ID NO: 644294 - DNA, 33 bp, Homo sapien
cataaactaatcggaggaaggagtttgtgatat

SEQ ID NO: 644295 - DNA, 33 bp, Homo sapien
tccaattagtacctacaggagaactcatgctaa

SEQ ID NO: 644296 - DNA, 33 bp, Homo sapien
tccaattagtacctaccggagaactcatgctaa

SEQ ID NO: 644297 - DNA, 33 bp, Homo sapien
ctgcaactcctcttaacggcacaccaagtcttc

SEQ ID NO: 644298 - DNA, 33 bp, Homo sapien
ctgcaactcctcttaatggcacaccaagtcttc

SEQ ID NO: 644299 - DNA, 33 bp, Homo sapien
agggtgaagacagaaacggaagttgtttacagg

SEQ ID NO: 644300 - DNA, 33 bp, Homo sapien
agggtgaagacagaaatggaagttgtttacagg

SEQ ID NO: 644301 - DNA, 33 bp, Homo sapien
gatctgaagctcagtacggaagaccgaggtaga

SEQ ID NO: 644302 - DNA, 33 bp, Homo sapien
gatctgaagctcagtagggaagaccgaggtaga

SEQ ID NO: 644303 - DNA, 33 bp, Homo sapien
tttccagtttaaataactccttctgcctcatta

SEQ ID NO: 644304 - DNA, 33 bp, Homo sapien
tttccagtttaaataagtccttctgcctcatta

SEQ ID NO: 644305 - DNA, 33 bp, Homo sapien
atttttcttagtacgacgctctttacattgcaa

SEQ ID NO: 644306 - DNA, 33 bp, Homo sapien
atttttcttagtacgatgctctttacattgcaa

SEQ ID NO: 644307 - DNA, 33 bp, Homo sapien
atgatatcgaaagatacggtcggtttataaact

SEQ ID NO: 644308 - DNA, 33 bp, Homo sapien
atgatatcgaaagatatggtcggtttataaact

SEQ ID NO: 644309 - DNA, 33 bp, Homo sapien
cttgtcaacaatgcaacaatggaaatagcacgc

SEQ ID NO: 644310 - DNA, 33 bp, Homo sapien
cttgtcaacaatgcaataatggaaatagcacgc

SEQ ID NO: 644311 - DNA, 33 bp, Homo sapien
agaagaaagataattgcaggcagaggaaattgt

SEQ ID NO: 644312 - DNA, 33 bp, Homo sapien
agaagaaagataattgtaggcagaggaaattgt

SEQ ID NO: 644313 - DNA, 33 bp, Homo sapien
tggcagggttatctctcacttctatcaggtctt

SEQ ID NO: 644314 - DNA, 33 bp, Homo sapien
tggcagggttatctctgacttctatcaggtctt

SEQ ID NO: 644315 - DNA, 33 bp, Homo sapien
ttgctgattggccaaaacacatactatttctta

SEQ ID NO: 644316 - DNA, 33 bp, Homo sapien
ttgctgattggccaaagcacatactatttctta

SEQ ID NO: 644317 - DNA, 33 bp, Homo sapien
gtttctatcataagcccggccccgtcttcacag

SEQ ID NO: 644318 - DNA, 33 bp, Homo sapien
gtttctatcataagcctggccccgtcttcacag

SEQ ID NO: 644319 - DNA, 33 bp, Homo sapien
tatggaagcgactgtacaggaagatataagagt

SEQ ID NO: 644320 - DNA, 33 bp, Homo sapien
tatggaagcgactgtataggaagatataagagt

SEQ ID NO: 644321 - DNA, 33 bp, Homo sapien
attactcattcagaaaagcttgctgtgttctga

SEQ ID NO: 644322 - DNA, 33 bp, Homo sapien
attactcattcagaaacgcttgctgtgttctga

SEQ ID NO: 644323 - DNA, 33 bp, Homo sapien
taataaagttaaagagaagatttccagacatta

SEQ ID NO: 644324 - DNA, 33 bp, Homo sapien
taataaagttaaagagcagatttccagacatta

SEQ ID NO: 644325 - DNA, 33 bp, Homo sapien
ctttctccctcaactaaatgtatgccccattat

SEQ ID NO: 644326 - DNA, 33 bp, Homo sapien
ctttctccctcaactagatgtatgccccattat

SEQ ID NO: 644327 - DNA, 33 bp, Homo sapien
cgaacttccatgttaacgtggcctgagttggta

SEQ ID NO: 644328 - DNA, 33 bp, Homo sapien
cgaacttccatgttaaggtggcctgagttggta

SEQ ID NO: 644329 - DNA, 33 bp, Homo sapien
ttatttctaatggtcccgatagtttgtgtatac

SEQ ID NO: 644330 - DNA, 33 bp, Homo sapien
ttatttctaatggtccggatagtttgtgtatac

SEQ ID NO: 644331 - DNA, 33 bp, Homo sapien
ccatatcaagaggatgcaaattttttgtggagg

SEQ ID NO: 644332 - DNA, 33 bp, Homo sapien
ccatatcaagaggatgtaaattttttgtggagg

SEQ ID NO: 644333 - DNA, 33 bp, Homo sapien
tttgttagagccttcacattatagagcagaggt

SEQ ID NO: 644334 - DNA, 33 bp, Homo sapien
tttgttagagccttcatattatagagcagaggt

SEQ ID NO: 644335 - DNA, 33 bp, Homo sapien
agctgactagatttcacataaggttctactctt

SEQ ID NO: 644336 - DNA, 33 bp, Homo sapien
agctgactagatttcatataaggttctactctt

SEQ ID NO: 644337 - DNA, 33 bp, Homo sapien
gaaactagaccttttaagaagtagcaactctaa

SEQ ID NO: 644338 - DNA, 33 bp, Homo sapien
gaaactagaccttttaggaagtagcaactctaa

SEQ ID NO: 644339 - DNA, 33 bp, Homo sapien
gtagtatactagaaacactggcaaaaatagcaa

SEQ ID NO: 644340 - DNA, 33 bp, Homo sapien
gtagtatactagaaacgctggcaaaaatagcaa

SEQ ID NO: 644341 - DNA, 33 bp, Homo sapien
atatcaaaccaactccaagcatgaagtccgaat

SEQ ID NO: 644342 - DNA, 33 bp, Homo sapien
atatcaaaccaactccgagcatgaagtccgaat

SEQ ID NO: 644343 - DNA, 33 bp, Homo sapien
tattcccaaattctaaactctctactctctctt

SEQ ID NO: 644344 - DNA, 33 bp, Homo sapien
tattcccaaattctaagctctctactctctctt

SEQ ID NO: 644345 - DNA, 33 bp, Homo sapien
tatgcctggatcttcccattaacaatacatctt

SEQ ID NO: 644346 - DNA, 33 bp, Homo sapien
tatgcctggatcttcctattaacaatacatctt

SEQ ID NO: 644347 - DNA, 33 bp, Homo sapien
ttaatctctcaggttccctgtatctttggaaat

SEQ ID NO: 644348 - DNA, 33 bp, Homo sapien
ttaatctctcaggttctctgtatctttggaaat

SEQ ID NO: 644349 - DNA, 33 bp, Homo sapien
gcttctaggggaagaacgttgtcttgggttaga

SEQ ID NO: 644350 - DNA, 33 bp, Homo sapien
gcttctaggggaagaaggttgtcttgggttaga

SEQ ID NO: 644351 - DNA, 33 bp, Homo sapien
aaaaagaaagatacatcaagcttgtccaatcga

SEQ ID NO: 644352 - DNA, 33 bp, Homo sapien
aaaaagaaagatacatgaagcttgtccaatcga

SEQ ID NO: 644353 - DNA, 33 bp, Homo sapien
tatgttgattttatgacgtagactattgcccag

SEQ ID NO: 644354 - DNA, 33 bp, Homo sapien
tatgttgattttatgatgtagactattgcccag

SEQ ID NO: 644355 - DNA, 33 bp, Homo sapien
ttacaaaattacaagactcgagatggtaggtag

SEQ ID NO: 644356 - DNA, 33 bp, Homo sapien
ttacaaaattacaagattcgagatggtaggtag

SEQ ID NO: 644357 - DNA, 33 bp, Homo sapien
aagcactactcctcaactgacactaacaccttt

SEQ ID NO: 644358 - DNA, 33 bp, Homo sapien
aagcactactcctcaattgacactaacaccttt

SEQ ID NO: 644359 - DNA, 33 bp, Homo sapien
gaaccaggaaagttaccgattcctgagaattca

SEQ ID NO: 644360 - DNA, 33 bp, Homo sapien
gaaccaggaaagttactgattcctgagaattca

SEQ ID NO: 644361 - DNA, 33 bp, Homo sapien
gtgaggcttggttacacggttaagattactgcc

SEQ ID NO: 644362 - DNA, 33 bp, Homo sapien
gtgaggcttggttacatggttaagattactgcc

SEQ ID NO: 644363 - DNA, 33 bp, Homo sapien
agcatttataatagcaccattaagttcacccac

SEQ ID NO: 644364 - DNA, 33 bp, Homo sapien
agcatttataatagcatcattaagttcacccac

SEQ ID NO: 644365 - DNA, 33 bp, Homo sapien
atctgattgtaggttacgtaagacatggtctat

SEQ ID NO: 644366 - DNA, 33 bp, Homo sapien
atctgattgtaggttaggtaagacatggtctat

SEQ ID NO: 644367 - DNA, 33 bp, Homo sapien
tgtaccatatagcctccatcagtcatcatctag

SEQ ID NO: 644368 - DNA, 33 bp, Homo sapien
tgtaccatatagcctctatcagtcatcatctag

SEQ ID NO: 644369 - DNA, 33 bp, Homo sapien
agcaaactaacagacacatcagcctcaagatac

SEQ ID NO: 644370 - DNA, 33 bp, Homo sapien
agcaaactaacagacatatcagcctcaagatac

SEQ ID NO: 644371 - DNA, 33 bp, Homo sapien
aataataatggacttaaccagatcaaaaagctg

SEQ ID NO: 644372 - DNA, 33 bp, Homo sapien
aataataatggacttacccagatcaaaaagctg

SEQ ID NO: 644373 - DNA, 33 bp, Homo sapien
attatgacttacagaaaccttagacaattttgc

SEQ ID NO: 644374 - DNA, 33 bp, Homo sapien
attatgacttacagaagccttagacaattttgc

SEQ ID NO: 644375 - DNA, 33 bp, Homo sapien
ctctagagtaggtgtacattagtcagtcataat

SEQ ID NO: 644376 - DNA, 33 bp, Homo sapien
ctctagagtaggtgtagattagtcagtcataat

SEQ ID NO: 644377 - DNA, 33 bp, Homo sapien
acctaatgttatatccacagggcatgatgaaga

SEQ ID NO: 644378 - DNA, 33 bp, Homo sapien
acctaatgttatatccgcagggcatgatgaaga

SEQ ID NO: 644379 - DNA, 33 bp, Homo sapien
agaatcgatggcaaatcaaacttacaaatcctt

SEQ ID NO: 644380 - DNA, 33 bp, Homo sapien
agaatcgatggcaaattaaacttacaaatcctt

SEQ ID NO: 644381 - DNA, 33 bp, Homo sapien
aaaatagaataaaaaacgcttgaacattggttt

SEQ ID NO: 644382 - DNA, 33 bp, Homo sapien
aaaatagaataaaaaatgcttgaacattggttt

SEQ ID NO: 644383 - DNA, 33 bp, Homo sapien
ggttttggtttgaggacgatactagttccatag

SEQ ID NO: 644384 - DNA, 33 bp, Homo sapien
ggttttggtttgaggatgatactagttccatag

SEQ ID NO: 644385 - DNA, 33 bp, Homo sapien
acctgtagcaagtcaacggattctagaactttg

SEQ ID NO: 644386 - DNA, 33 bp, Homo sapien
acctgtagcaagtcaatggattctagaactttg

SEQ ID NO: 644387 - DNA, 33 bp, Homo sapien
gtgggatcaggttaggaaaaagtttgaaaaatg

SEQ ID NO: 644388 - DNA, 33 bp, Homo sapien
gtgggatcaggttagggaaaagtttgaaaaatg

SEQ ID NO: 644389 - DNA, 33 bp, Homo sapien
agaatttgttaatagacggaaagttgaggttga

SEQ ID NO: 644390 - DNA, 33 bp, Homo sapien
agaatttgttaatagatggaaagttgaggttga

SEQ ID NO: 644391 - DNA, 33 bp, Homo sapien
atacaacaattctagcggacttgatggagtgcc

SEQ ID NO: 644392 - DNA, 33 bp, Homo sapien
atacaacaattctagctgacttgatggagtgcc

SEQ ID NO: 644393 - DNA, 33 bp, Homo sapien
agaggtttaatggacacatagttcctcgtggct

SEQ ID NO: 644394 - DNA, 33 bp, Homo sapien
agaggtttaatggacagatagttcctcgtggct

SEQ ID NO: 644395 - DNA, 33 bp, Homo sapien
catctgcacaattgtcaataaaaaggtatagct

SEQ ID NO: 644396 - DNA, 33 bp, Homo sapien
catctgcacaattgtcgataaaaaggtatagct

SEQ ID NO: 644397 - DNA, 33 bp, Homo sapien
ctccagtggaggtgctaaatgagaacatagcca

SEQ ID NO: 644398 - DNA, 33 bp, Homo sapien
ctccagtggaggtgctcaatgagaacatagcca

SEQ ID NO: 644399 - DNA, 33 bp, Homo sapien
ctggattcctttcccaatggcctctggcactta

SEQ ID NO: 644400 - DNA, 33 bp, Homo sapien
ctggattcctttcccagtggcctctggcactta

SEQ ID NO: 644401 - DNA, 33 bp, Homo sapien
atttttctgaatgataaccattgtctgttttgt

SEQ ID NO: 644402 - DNA, 33 bp, Homo sapien
atttttctgaatgatatccattgtctgttttgt

SEQ ID NO: 644403 - DNA, 33 bp, Homo sapien
gctaagtgaaagaaggacaatatataaagccag

SEQ ID NO: 644404 - DNA, 33 bp, Homo sapien
gctaagtgaaagaagggcaatatataaagccag

SEQ ID NO: 644405 - DNA, 33 bp, Homo sapien
ctacatttagcagtaaagcatttcaacataatt

SEQ ID NO: 644406 - DNA, 33 bp, Homo sapien
ctacatttagcagtaaggcatttcaacataatt

SEQ ID NO: 644407 - DNA, 33 bp, Homo sapien
tgccccatatgatagaaaatacactgcccaata

SEQ ID NO: 644408 - DNA, 33 bp, Homo sapien
tgccccatatgatagacaatacactgcccaata

SEQ ID NO: 644409 - DNA, 33 bp, Homo sapien
caagctagagggcaataacttcagtagcacaat

SEQ ID NO: 644410 - DNA, 33 bp, Homo sapien
caagctagagggcaatgacttcagtagcacaat

SEQ ID NO: 644411 - DNA, 33 bp, Homo sapien
atggatataatcgttaacaccagaattactcca

SEQ ID NO: 644412 - DNA, 33 bp, Homo sapien
atggatataatcgttaccaccagaattactcca

SEQ ID NO: 644413 - DNA, 33 bp, Homo sapien
aaataagggatgtgtgaagaaaaataaatacta

SEQ ID NO: 644414 - DNA, 33 bp, Homo sapien
aaataagggatgtgtgtagaaaaataaatacta

SEQ ID NO: 644415 - DNA, 33 bp, Homo sapien
tagggaatataaactcactttcattctacaaat

SEQ ID NO: 644416 - DNA, 33 bp, Homo sapien
tagggaatataaactctctttcattctacaaat

SEQ ID NO: 644417 - DNA, 33 bp, Homo sapien
acctgaaacaatcagacaatttaagaaaacaga

SEQ ID NO: 644418 - DNA, 33 bp, Homo sapien
acctgaaacaatcagagaatttaagaaaacaga

SEQ ID NO: 644419 - DNA, 33 bp, Homo sapien
tagaggacattgacacacctcattagaagtaca

SEQ ID NO: 644420 - DNA, 33 bp, Homo sapien
tagaggacattgacacgcctcattagaagtaca

SEQ ID NO: 644421 - DNA, 33 bp, Homo sapien
ttctttctgacgtataaagtgtaaagggctttg

SEQ ID NO: 644422 - DNA, 33 bp, Homo sapien
ttctttctgacgtatagagtgtaaagggctttg

SEQ ID NO: 644423 - DNA, 33 bp, Homo sapien
tctaaactctaatgacaactactttggttggag

SEQ ID NO: 644424 - DNA, 33 bp, Homo sapien
tctaaactctaatgactactactttggttggag

SEQ ID NO: 644425 - DNA, 33 bp, Homo sapien
attcacacagctggcaaaagggatttgaaatga

SEQ ID NO: 644426 - DNA, 33 bp, Homo sapien
attcacacagctggcagaagggatttgaaatga

SEQ ID NO: 644427 - DNA, 33 bp, Homo sapien
tgaacattatccataaagcgacaaaccaaaatt

SEQ ID NO: 644428 - DNA, 33 bp, Homo sapien
tgaacattatccataatgcgacaaaccaaaatt

SEQ ID NO: 644429 - DNA, 33 bp, Homo sapien
ttttcagcaataataacggagaggttacatcaa

SEQ ID NO: 644430 - DNA, 33 bp, Homo sapien
ttttcagcaataataatggagaggttacatcaa

SEQ ID NO: 644431 - DNA, 33 bp, Homo sapien
tgtgtatccattcaacagaataccacacagcca

SEQ ID NO: 644432 - DNA, 33 bp, Homo sapien
tgtgtatccattcaacggaataccacacagcca

SEQ ID NO: 644433 - DNA, 33 bp, Homo sapien
gaaattgggttcttaaagagatattagcattct

SEQ ID NO: 644434 - DNA, 33 bp, Homo sapien
gaaattgggttcttaaggagatattagcattct

SEQ ID NO: 644435 - DNA, 33 bp, Homo sapien
gacagagcaggaaataaggaataaggaggatat

SEQ ID NO: 644436 - DNA, 33 bp, Homo sapien
gacagagcaggaaatagggaataaggaggatat

SEQ ID NO: 644437 - DNA, 33 bp, Homo sapien
ctgcataacgtcacacacttggactgctgctgg

SEQ ID NO: 644438 - DNA, 33 bp, Homo sapien
ctgcataacgtcacacgcttggactgctgctgg

SEQ ID NO: 644439 - DNA, 33 bp, Homo sapien
gagaaaaatatgggaaaacatacctaagaactc

SEQ ID NO: 644440 - DNA, 33 bp, Homo sapien
gagaaaaatatgggaacacatacctaagaactc

SEQ ID NO: 644441 - DNA, 33 bp, Homo sapien
ttggatcaacgttgaagaggtgaattatattgc

SEQ ID NO: 644442 - DNA, 33 bp, Homo sapien
ttggatcaacgttgaataggtgaattatattgc

SEQ ID NO: 644443 - DNA, 33 bp, Homo sapien
ttagagtatctaggacaccagaaatcaatggac

SEQ ID NO: 644444 - DNA, 33 bp, Homo sapien
ttagagtatctaggacgccagaaatcaatggac

SEQ ID NO: 644445 - DNA, 33 bp, Homo sapien
tatcataccttcttcacgtaattcctcattctc

SEQ ID NO: 644446 - DNA, 33 bp, Homo sapien
tatcataccttcttcatgtaattcctcattctc

SEQ ID NO: 644447 - DNA, 33 bp, Homo sapien
tattggtagactgcggcagacatggagctgtgc

SEQ ID NO: 644448 - DNA, 33 bp, Homo sapien
tattggtagactgcgggagacatggagctgtgc

SEQ ID NO: 644449 - DNA, 33 bp, Homo sapien
acttggtaagcactcaatatgtgttagttactg

SEQ ID NO: 644450 - DNA, 33 bp, Homo sapien
acttggtaagcactcattatgtgttagttactg

SEQ ID NO: 644451 - DNA, 33 bp, Homo sapien
tttgacactggccgcaaggatgatatagcatct

SEQ ID NO: 644452 - DNA, 33 bp, Homo sapien
tttgacactggccgcatggatgatatagcatct

SEQ ID NO: 644453 - DNA, 33 bp, Homo sapien
aaaaatctgaagctaacaaggtacccacctggc

SEQ ID NO: 644454 - DNA, 33 bp, Homo sapien
aaaaatctgaagctaataaggtacccacctggc

SEQ ID NO: 644455 - DNA, 33 bp, Homo sapien
aagtgaacatctttacacacaactcttattata

SEQ ID NO: 644456 - DNA, 33 bp, Homo sapien
aagtgaacatctttacgcacaactcttattata

SEQ ID NO: 644457 - DNA, 33 bp, Homo sapien
tctcacctcctacctcaataccactgtttatat

SEQ ID NO: 644458 - DNA, 33 bp, Homo sapien
tctcacctcctacctcgataccactgtttatat

SEQ ID NO: 644459 - DNA, 33 bp, Homo sapien
catgacttttataaacactgacaaagattattc

SEQ ID NO: 644460 - DNA, 33 bp, Homo sapien
catgacttttataaacgctgacaaagattattc

SEQ ID NO: 644461 - DNA, 33 bp, Homo sapien
cttaaaaccctcaaaaatttgtccagcatcctc

SEQ ID NO: 644462 - DNA, 33 bp, Homo sapien
cttaaaaccctcaaaagtttgtccagcatcctc

SEQ ID NO: 644463 - DNA, 33 bp, Homo sapien
ttcctagtctataagccacctcctagttgtagg

SEQ ID NO: 644464 - DNA, 33 bp, Homo sapien
ttcctagtctataagctacctcctagttgtagg

SEQ ID NO: 644465 - DNA, 33 bp, Homo sapien
cactatctaacattgacgggtagctttaattgg

SEQ ID NO: 644466 - DNA, 33 bp, Homo sapien
cactatctaacattgatgggtagctttaattgg

SEQ ID NO: 644467 - DNA, 33 bp, Homo sapien
gcagagacaaaacagggacttacatctgagaag

SEQ ID NO: 644468 - DNA, 33 bp, Homo sapien
gcagagacaaaacaggtacttacatctgagaag

SEQ ID NO: 644469 - DNA, 33 bp, Homo sapien
tatatatgtcatggaaaactaaaaaagattaaa

SEQ ID NO: 644470 - DNA, 33 bp, Homo sapien
tatatatgtcatggaacactaaaaaagattaaa

SEQ ID NO: 644471 - DNA, 33 bp, Homo sapien
gaattgcatattttaccggctattttacactct

SEQ ID NO: 644472 - DNA, 33 bp, Homo sapien
gaattgcatattttactggctattttacactct

SEQ ID NO: 644473 - DNA, 33 bp, Homo sapien
gttgttccctgacaaacttgaatagtattgact

SEQ ID NO: 644474 - DNA, 33 bp, Homo sapien
gttgttccctgacaaatttgaatagtattgact

SEQ ID NO: 644475 - DNA, 33 bp, Homo sapien
gggagataacaagacaacaagcgagacagaaaa

SEQ ID NO: 644476 - DNA, 33 bp, Homo sapien
gggagataacaagacagcaagcgagacagaaaa

SEQ ID NO: 644477 - DNA, 33 bp, Homo sapien
cagacagctgcaagtgcagaggatttaacgaag

SEQ ID NO: 644478 - DNA, 33 bp, Homo sapien
cagacagctgcaagtgtagaggatttaacgaag

SEQ ID NO: 644479 - DNA, 33 bp, Homo sapien
ctctctagggaatccaacctgacaattagtaca

SEQ ID NO: 644480 - DNA, 33 bp, Homo sapien
ctctctagggaatccagcctgacaattagtaca

SEQ ID NO: 644481 - DNA, 33 bp, Homo sapien
ttccctagagagcagaacctgaagtagagttta

SEQ ID NO: 644482 - DNA, 33 bp, Homo sapien
ttccctagagagcagaccctgaagtagagttta

SEQ ID NO: 644483 - DNA, 33 bp, Homo sapien
ctgtgtgtcaaatgcacggtgttaaaaaatttg

SEQ ID NO: 644484 - DNA, 33 bp, Homo sapien
ctgtgtgtcaaatgcagggtgttaaaaaatttg

SEQ ID NO: 644485 - DNA, 33 bp, Homo sapien
cacttgactttaagaccgtatttctttctgatt

SEQ ID NO: 644486 - DNA, 33 bp, Homo sapien
cacttgactttaagactgtatttctttctgatt

SEQ ID NO: 644487 - DNA, 33 bp, Homo sapien
tatttttcctgaaagtcaactctttaatatgtg

SEQ ID NO: 644488 - DNA, 33 bp, Homo sapien
tatttttcctgaaagttaactctttaatatgtg

SEQ ID NO: 644489 - DNA, 33 bp, Homo sapien
atcctctgaagggaaaagacagctcctgcagga

SEQ ID NO: 644490 - DNA, 33 bp, Homo sapien
atcctctgaagggaaaggacagctcctgcagga

SEQ ID NO: 644491 - DNA, 33 bp, Homo sapien
agtgttatcttgaaaccataaatggagctcacc

SEQ ID NO: 644492 - DNA, 33 bp, Homo sapien
agtgttatcttgaaactataaatggagctcacc

SEQ ID NO: 644493 - DNA, 33 bp, Homo sapien
tagtcattgttacttacgcccctaataaatgca

SEQ ID NO: 644494 - DNA, 33 bp, Homo sapien
tagtcattgttacttatgcccctaataaatgca

SEQ ID NO: 644495 - DNA, 33 bp, Homo sapien
atgaggatactgtttacaccttcaggctcaggt

SEQ ID NO: 644496 - DNA, 33 bp, Homo sapien
atgaggatactgtttataccttcaggctcaggt

SEQ ID NO: 644497 - DNA, 33 bp, Homo sapien
aattgtgactatctacagctatgcaaatggaaa

SEQ ID NO: 644498 - DNA, 33 bp, Homo sapien
aattgtgactatctacggctatgcaaatggaaa

SEQ ID NO: 644499 - DNA, 33 bp, Homo sapien
tgaaactgaggcaaataagagtgcaatgcttgt

SEQ ID NO: 644500 - DNA, 33 bp, Homo sapien
tgaaactgaggcaaattagagtgcaatgcttgt

SEQ ID NO: 644501 - DNA, 33 bp, Homo sapien
agtggtatagtggtgaataaaataatggataaa

SEQ ID NO: 644502 - DNA, 33 bp, Homo sapien
agtggtatagtggtgactaaaataatggataaa

SEQ ID NO: 644503 - DNA, 33 bp, Homo sapien
tatatacctcttgaaaaaggcaaaggttgaagt

SEQ ID NO: 644504 - DNA, 33 bp, Homo sapien
tatatacctcttgaaacaggcaaaggttgaagt

SEQ ID NO: 644505 - DNA, 33 bp, Homo sapien
attaaaaagtgggtcaaatctcaaataaatcat

SEQ ID NO: 644506 - DNA, 33 bp, Homo sapien
attaaaaagtgggtcagatctcaaataaatcat

SEQ ID NO: 644507 - DNA, 33 bp, Homo sapien
tataaagccctgtgtaaattaatacagaactct

SEQ ID NO: 644508 - DNA, 33 bp, Homo sapien
tataaagccctgtgtagattaatacagaactct

SEQ ID NO: 644509 - DNA, 33 bp, Homo sapien
catattggtgacttatcagatgcagtgatttca

SEQ ID NO: 644510 - DNA, 33 bp, Homo sapien
catattggtgacttatgagatgcagtgatttca

SEQ ID NO: 644511 - DNA, 33 bp, Homo sapien
acctgtgtggccaagacggtttttctctcattt

SEQ ID NO: 644512 - DNA, 33 bp, Homo sapien
acctgtgtggccaagatggtttttctctcattt

SEQ ID NO: 644513 - DNA, 33 bp, Homo sapien
ctggttctactgtctcccagttctataaccaaa

SEQ ID NO: 644514 - DNA, 33 bp, Homo sapien
ctggttctactgtctctcagttctataaccaaa

SEQ ID NO: 644515 - DNA, 33 bp, Homo sapien
acattgtttgtgaatgcagtctttctgtatgtg

SEQ ID NO: 644516 - DNA, 33 bp, Homo sapien
acattgtttgtgaatgtagtctttctgtatgtg

SEQ ID NO: 644517 - DNA, 33 bp, Homo sapien
ataaggtgtgggatctaaagtagacctgcagca

SEQ ID NO: 644518 - DNA, 33 bp, Homo sapien
ataaggtgtgggatctgaagtagacctgcagca

SEQ ID NO: 644519 - DNA, 33 bp, Homo sapien
tacaacttgtattaaaagtaactggctctttta

SEQ ID NO: 644520 - DNA, 33 bp, Homo sapien
tacaacttgtattaaaggtaactggctctttta

SEQ ID NO: 644521 - DNA, 33 bp, Homo sapien
acccataactgctttcaatcatatctattctta

SEQ ID NO: 644522 - DNA, 33 bp, Homo sapien
acccataactgctttcgatcatatctattctta

SEQ ID NO: 644523 - DNA, 33 bp, Homo sapien
ttaggaaaacctgtcaaagaaagagaagggtag

SEQ ID NO: 644524 - DNA, 33 bp, Homo sapien
ttaggaaaacctgtcagagaaagagaagggtag

SEQ ID NO: 644525 - DNA, 33 bp, Homo sapien; identical to SEQ ID NO: 644523

SEQ ID NO: 644526 - DNA, 33 bp, Homo sapien; identical to SEQ ID NO: 644524

SEQ ID NO: 644527 - DNA, 33 bp, Homo sapien
gtggtggacagggttacggaaaccaggacagtg

SEQ ID NO: 644528 - DNA, 33 bp, Homo sapien
gtggtggacagggttatggaaaccaggacagtg

SEQ ID NO: 644529 - DNA, 33 bp, Homo sapien
gtacatttgaaatggacattctcttgtcagaat

SEQ ID NO: 644530 - DNA, 33 bp, Homo sapien
gtacatttgaaatggatattctcttgtcagaat

SEQ ID NO: 644531 - DNA, 33 bp, Homo sapien
ttgaccctagacatacacatattagcaggttgt

SEQ ID NO: 644532 - DNA, 33 bp, Homo sapien
ttgaccctagacatactcatattagcaggttgt

SEQ ID NO: 644533 - DNA, 33 bp, Homo sapien
aaatatatggaaacaaactatatgatttgatat

SEQ ID NO: 644534 - DNA, 33 bp, Homo sapien
aaatatatggaaacaagctatatgatttgatat

SEQ ID NO: 644535 - DNA, 33 bp, Homo sapien
cacacagagaaaggatcagtgatgagatatagg

SEQ ID NO: 644536 - DNA, 33 bp, Homo sapien
cacacagagaaaggattagtgatgagatatagg

SEQ ID NO: 644537 - DNA, 33 bp, Homo sapien
ttcacaggctacttcacaaaagaaactcaaacc

SEQ ID NO: 644538 - DNA, 33 bp, Homo sapien
ttcacaggctacttcataaaagaaactcaaacc

SEQ ID NO: 644539 - DNA, 33 bp, Homo sapien
ctgatatttccgataaaaaccaatagaaactta

SEQ ID NO: 644540 - DNA, 33 bp, Homo sapien
ctgatatttccgataataaccaatagaaactta

SEQ ID NO: 644541 - DNA, 33 bp, Homo sapien
ataaatgacaccgttacaagcaacagtaaaaat

SEQ ID NO: 644542 - DNA, 33 bp, Homo sapien
ataaatgacaccgttagaagcaacagtaaaaat

SEQ ID NO: 644543 - DNA, 33 bp, Homo sapien
accaaatcctaataagcccatccaaataggttg

SEQ ID NO: 644544 - DNA, 33 bp, Homo sapien
accaaatcctaataagtccatccaaataggttg

SEQ ID NO: 644545 - DNA, 33 bp, Homo sapien
tgtagcgagaaagtcaaaggaataagtaaatgt

SEQ ID NO: 644546 - DNA, 33 bp, Homo sapien
tgtagcgagaaagtcagaggaataagtaaatgt

SEQ ID NO: 644547 - DNA, 33 bp, Homo sapien
aacatcttctagtaccaaaaagtaagaaatgct

SEQ ID NO: 644548 - DNA, 33 bp, Homo sapien
aacatcttctagtaccgaaaagtaagaaatgct

SEQ ID NO: 644549 - DNA, 33 bp, Homo sapien
tgtacccttgcttataaatcagtcaagtagtat

SEQ ID NO: 644550 - DNA, 33 bp, Homo sapien
tgtacccttgcttatacatcagtcaagtagtat

SEQ ID NO: 644551 - DNA, 33 bp, Homo sapien
gcctgtaccctcatcacatcttggaagtaacta

SEQ ID NO: 644552 - DNA, 33 bp, Homo sapien
gcctgtaccctcatcatatcttggaagtaacta

SEQ ID NO: 644553 - DNA, 33 bp, Homo sapien
accaggtatttctctcacttcctgagctgcaat

SEQ ID NO: 644554 - DNA, 33 bp, Homo sapien
accaggtatttctctcgcttcctgagctgcaat

SEQ ID NO: 644555 - DNA, 33 bp, Homo sapien
actaatatagaaaaaaacagagaggattcaaat

SEQ ID NO: 644556 - DNA, 33 bp, Homo sapien
actaatatagaaaaaagcagagaggattcaaat

SEQ ID NO: 644557 - DNA, 33 bp, Homo sapien
aattatatgcaggaacaaaaatgtgggcactaa

SEQ ID NO: 644558 - DNA, 33 bp, Homo sapien
aattatatgcaggaaccaaaatgtgggcactaa

SEQ ID NO: 644559 - DNA, 33 bp, Homo sapien
aaatgtgctatacctacgatggaatattactca

SEQ ID NO: 644560 - DNA, 33 bp, Homo sapien
aaatgtgctatacctatgatggaatattactca

SEQ ID NO: 644561 - DNA, 33 bp, Homo sapien
caataaatgcctatgtcaaaaacgtagaaaaat

SEQ ID NO: 644562 - DNA, 33 bp, Homo sapien
caataaatgcctatgtgaaaaacgtagaaaaat

SEQ ID NO: 644563 - DNA, 33 bp, Homo sapien
aagtaatcttgtccaaactttcaaacttgaatt

SEQ ID NO: 644564 - DNA, 33 bp, Homo sapien
aagtaatcttgtccaagctttcaaacttgaatt

SEQ ID NO: 644565 - DNA, 33 bp, Homo sapien
attgtgaattgttcctcacttccctcctcttcc

SEQ ID NO: 644566 - DNA, 33 bp, Homo sapien
attgtgaattgttccttacttccctcctcttcc

SEQ ID NO: 644567 - DNA, 33 bp, Homo sapien
actgaaacaagtaaataatatgcatacagttgt

SEQ ID NO: 644568 - DNA, 33 bp, Homo sapien
actgaaacaagtaaatcatatgcatacagttgt

SEQ ID NO: 644569 - DNA, 33 bp, Homo sapien
ctaggtatttaaaggcagaagtatctaaccatg

SEQ ID NO: 644570 - DNA, 33 bp, Homo sapien
ctaggtatttaaaggcggaagtatctaaccatg

SEQ ID NO: 644571 - DNA, 33 bp, Homo sapien
atataataaaaccgcaaaagcagtgaagaaagt

SEQ ID NO: 644572 - DNA, 33 bp, Homo sapien
atataataaaaccgcagaagcagtgaagaaagt

SEQ ID NO: 644573 - DNA, 33 bp, Homo sapien
acatttgataagtttacgtttgcttaaagctag

SEQ ID NO: 644574 - DNA, 33 bp, Homo sapien
acatttgataagtttatgtttgcttaaagctag

SEQ ID NO: 644575 - DNA, 33 bp, Homo sapien
tcacgtgtacaggaccaaagaaatggccaacat

SEQ ID NO: 644576 - DNA, 33 bp, Homo sapien
tcacgtgtacaggaccgaagaaatggccaacat

SEQ ID NO: 644577 - DNA, 33 bp, Homo sapien
gtttaatttcgcctatgaaacttttgctttcaa

SEQ ID NO: 644578 - DNA, 33 bp, Homo sapien
gtttaatttcgcctattaaacttttgctttcaa

SEQ ID NO: 644579 - DNA, 33 bp, Homo sapien
gttactgtttataagacgcctacaataaagaac

SEQ ID NO: 644580 - DNA, 33 bp, Homo sapien
gttactgtttataagatgcctacaataaagaac

SEQ ID NO: 644581 - DNA, 33 bp, Homo sapien
attacagttgggattgaattactatcttccata

SEQ ID NO: 644582 - DNA, 33 bp, Homo sapien
attacagttgggattgcattactatcttccata

SEQ ID NO: 644583 - DNA, 33 bp, Homo sapien
gtacccggatgactaccgggaattcagcagaaa

SEQ ID NO: 644584 - DNA, 33 bp, Homo sapien
gtacccggatgactactgggaattcagcagaaa

SEQ ID NO: 644585 - DNA, 33 bp, Homo sapien
atgattacagctgaaccgttaagagggagagat

SEQ ID NO: 644586 - DNA, 33 bp, Homo sapien
atgattacagctgaactgttaagagggagagat

SEQ ID NO: 644587 - DNA, 33 bp, Homo sapien
ataaaaggactaaaaaatctattcatctttatc

SEQ ID NO: 644588 - DNA, 33 bp, Homo sapien
ataaaaggactaaaaactctattcatctttatc

SEQ ID NO: 644589 - DNA, 33 bp, Homo sapien
ttctgatgctaagctcaatgcaatttacctagg

SEQ ID NO: 644590 - DNA, 33 bp, Homo sapien
ttctgatgctaagctccatgcaatttacctagg

SEQ ID NO: 644591 - DNA, 33 bp, Homo sapien
acataaaagctttgtacgttctgtttatatgct

SEQ ID NO: 644592 - DNA, 33 bp, Homo sapien
acataaaagctttgtaggttctgtttatatgct

SEQ ID NO: 644593 - DNA, 33 bp, Homo sapien
aagagattatcacccaactttacaggcagaatg

SEQ ID NO: 644594 - DNA, 33 bp, Homo sapien
aagagattatcacccagctttacaggcagaatg

SEQ ID NO: 644595 - DNA, 33 bp, Homo sapien
ggtccatgctagaacaaaagcttagatttccag

SEQ ID NO: 644596 - DNA, 33 bp, Homo sapien
ggtccatgctagaacacaagcttagatttccag

SEQ ID NO: 644597 - DNA, 33 bp, Homo sapien
gaaaggacctttaggacgtgatgaaaattaaat

SEQ ID NO: 644598 - DNA, 33 bp, Homo sapien
gaaaggacctttaggatgtgatgaaaattaaat

SEQ ID NO: 644599 - DNA, 33 bp, Homo sapien
ctaaaggatgttgctaaggattggattgtgttt

SEQ ID NO: 644600 - DNA, 33 bp, Homo sapien
ctaaaggatgttgctatggattggattgtgttt

SEQ ID NO: 644601 - DNA, 33 bp, Homo sapien
cgtcatctgaaactacacaggacaaatgaagct

SEQ ID NO: 644602 - DNA, 33 bp, Homo sapien
cgtcatctgaaactacgcaggacaaatgaagct

SEQ ID NO: 644603 - DNA, 33 bp, Homo sapien
cagagactttcttagcaaaataatctctccttt

SEQ ID NO: 644604 - DNA, 33 bp, Homo sapien
cagagactttcttagcgaaataatctctccttt

SEQ ID NO: 644605 - DNA, 33 bp, Homo sapien
tccatcatgcttaaggaagaaagagggtcacca

SEQ ID NO: 644606 - DNA, 33 bp, Homo sapien
tccatcatgcttaaggtagaaagagggtcacca

SEQ ID NO: 644607 - DNA, 33 bp, Homo sapien
ttctgaaaaagtttacaatcttgtgaccattat

SEQ ID NO: 644608 - DNA, 33 bp, Homo sapien
ttctgaaaaagtttactatcttgtgaccattat

SEQ ID NO: 644609 - DNA, 33 bp, Homo sapien
gtttttacagctaagaagtttactaatttgggg

SEQ ID NO: 644610 - DNA, 33 bp, Homo sapien
gtttttacagctaagatgtttactaatttgggg

SEQ ID NO: 644611 - DNA, 33 bp, Homo sapien
tgtatgagattctagaagtaacgtctatggatt

SEQ ID NO: 644612 - DNA, 33 bp, Homo sapien
tgtatgagattctagaggtaacgtctatggatt

SEQ ID NO: 644613 - DNA, 33 bp, Homo sapien
gccttcatatggcacactcttagagtagaataa

SEQ ID NO: 644614 - DNA, 33 bp, Homo sapien
gccttcatatggcacattcttagagtagaataa

SEQ ID NO: 644615 - DNA, 33 bp, Homo sapien
tataaccagttgaaaaattacccatgagtcagg

SEQ ID NO: 644616 - DNA, 33 bp, Homo sapien
tataaccagttgaaaagttacccatgagtcagg

SEQ ID NO: 644617 - DNA, 33 bp, Homo sapien
aaatgcataaaaggaaagactggtgacacgaag

SEQ ID NO: 644618 - DNA, 33 bp, Homo sapien
aaatgcataaaaggaaggactggtgacacgaag

SEQ ID NO: 644619 - DNA, 33 bp, Homo sapien
gatactaagaagatgacgagtgttctcagggca

SEQ ID NO: 644620 - DNA, 33 bp, Homo sapien
gatactaagaagatgatgagtgttctcagggca

SEQ ID NO: 644621 - DNA, 33 bp, Homo sapien
ctgacaacactatgccctttcactctttgtctt

SEQ ID NO: 644622 - DNA, 33 bp, Homo sapien
ctgacaacactatgccttttcactctttgtctt

SEQ ID NO: 644623 - DNA, 33 bp, Homo sapien
aagaaaggaaatgcaagcaattaaaggaatact

SEQ ID NO: 644624 - DNA, 33 bp, Homo sapien
aagaaaggaaatgcaatcaattaaaggaatact

SEQ ID NO: 644625 - DNA, 33 bp, Homo sapien
aacaagctgcgtcctgaaaccattcccccatgc

SEQ ID NO: 644626 - DNA, 33 bp, Homo sapien
aacaagctgcgtcctggaaccattcccccatgc

SEQ ID NO: 644627 - DNA, 33 bp, Homo sapien
gcgtttgcttgaaaatcaattctttgtctaagt

SEQ ID NO: 644628 - DNA, 33 bp, Homo sapien
gcgtttgcttgaaaatgaattctttgtctaagt

SEQ ID NO: 644629 - DNA, 33 bp, Homo sapien
ccaaagttacatggacaccatatttagacaaaa

SEQ ID NO: 644630 - DNA, 33 bp, Homo sapien
ccaaagttacatggacgccatatttagacaaaa

SEQ ID NO: 644631 - DNA, 33 bp, Homo sapien
cttgtcttatgtaaagaaatcaaggacattgtg

SEQ ID NO: 644632 - DNA, 33 bp, Homo sapien
cttgtcttatgtaaagtaatcaaggacattgtg

SEQ ID NO: 644633 - DNA, 33 bp, Homo sapien
tccagatattaaaacaatcatcctgcagaagaa

SEQ ID NO: 644634 - DNA, 33 bp, Homo sapien
tccagatattaaaacagtcatcctgcagaagaa

SEQ ID NO: 644635 - DNA, 33 bp, Homo sapien
aacaattagtaaatccaaattttcatgaatcat

SEQ ID NO: 644636 - DNA, 33 bp, Homo sapien
aacaattagtaaatccgaattttcatgaatcat

SEQ ID NO: 644637 - DNA, 33 bp, Homo sapien
tcaggaatattcctagcaaccgtccaaccgctt

SEQ ID NO: 644638 - DNA, 33 bp, Homo sapien
tcaggaatattcctagtaaccgtccaaccgctt

SEQ ID NO: 644639 - DNA, 33 bp, Homo sapien
ttctcttcgctcatagaataatgaattactctt

SEQ ID NO: 644640 - DNA, 33 bp, Homo sapien
ttctcttcgctcatagcataatgaattactctt

SEQ ID NO: 644641 - DNA, 33 bp, Homo sapien
gtgatgtttgcgagacagaatggacaacagcat

SEQ ID NO: 644642 - DNA, 33 bp, Homo sapien
gtgatgtttgcgagacggaatggacaacagcat

SEQ ID NO: 644643 - DNA, 33 bp, Homo sapien
tcatgtagtctaataaagtaaaggccactatat

SEQ ID NO: 644644 - DNA, 33 bp, Homo sapien
tcatgtagtctaataatgtaaaggccactatat

SEQ ID NO: 644645 - DNA, 33 bp, Homo sapien
tcagagttagcttaccactctgatacttttaac

SEQ ID NO: 644646 - DNA, 33 bp, Homo sapien
tcagagttagcttaccgctctgatacttttaac

SEQ ID NO: 644647 - DNA, 33 bp, Homo sapien
agtttccattagacaacggctggagatctatta

SEQ ID NO: 644648 - DNA, 33 bp, Homo sapien
agtttccattagacaagggctggagatctatta

SEQ ID NO: 644649 - DNA, 33 bp, Homo sapien
ctttttcgtgggagcactccttcaacaaatcac

SEQ ID NO: 644650 - DNA, 33 bp, Homo sapien
ctttttcgtgggagcattccttcaacaaatcac

SEQ ID NO: 644651 - DNA, 33 bp, Homo sapien
ttcttcatagtgaacactgtaagatttatcaac

SEQ ID NO: 644652 - DNA, 33 bp, Homo sapien
ttcttcatagtgaacagtgtaagatttatcaac

SEQ ID NO: 644653 - DNA, 33 bp, Homo sapien
actgaaactaaatgaaatcatctattggcaaca

SEQ ID NO: 644654 - DNA, 33 bp, Homo sapien
actgaaactaaatgaactcatctattggcaaca

SEQ ID NO: 644655 - DNA, 33 bp, Homo sapien
aagtgcattacagctacgaaactctaatcacat

SEQ ID NO: 644656 - DNA, 33 bp, Homo sapien
aagtgcattacagctatgaaactctaatcacat

SEQ ID NO: 644657 - DNA, 33 bp, Homo sapien
ctgttttcaacacataaatcctgatggaatatt

SEQ ID NO: 644658 - DNA, 33 bp, Homo sapien
ctgttttcaacacatacatcctgatggaatatt

SEQ ID NO: 644659 - DNA, 33 bp, Homo sapien
aattcataaaaacttacgttggtatctaggttt

SEQ ID NO: 644660 - DNA, 33 bp, Homo sapien
aattcataaaaacttatgttggtatctaggttt

SEQ ID NO: 644661 - DNA, 33 bp, Homo sapien
ggcataaccacctatacgctaggtttaccactt

SEQ ID NO: 644662 - DNA, 33 bp, Homo sapien
ggcataaccacctatatgctaggtttaccactt

SEQ ID NO: 644663 - DNA, 33 bp, Homo sapien
taataatggaaaactgcatttgaacttgcaggc

SEQ ID NO: 644664 - DNA, 33 bp, Homo sapien
taataatggaaaactgtatttgaacttgcaggc

SEQ ID NO: 644665 - DNA, 33 bp, Homo sapien
atagtacaactataggaaatccattacaaggca

SEQ ID NO: 644666 - DNA, 33 bp, Homo sapien
atagtacaactatagggaatccattacaaggca

SEQ ID NO: 644667 - DNA, 33 bp, Homo sapien
tggtgtgcacaacattcaaacgggctgtcctat

SEQ ID NO: 644668 - DNA, 33 bp, Homo sapien
tggtgtgcacaacattgaaacgggctgtcctat

SEQ ID NO: 644669 - DNA, 33 bp, Homo sapien
aaggtcaaatgtgtaaaaagctgttaagattat

SEQ ID NO: 644670 - DNA, 33 bp, Homo sapien
aaggtcaaatgtgtaagaagctgttaagattat

SEQ ID NO: 644671 - DNA, 33 bp, Homo sapien
ttttatattatgttgcaattttccgaactatca

SEQ ID NO: 644672 - DNA, 33 bp, Homo sapien
ttttatattatgttgcgattttccgaactatca

SEQ ID NO: 644673 - DNA, 33 bp, Homo sapien
cttgatgcacctagtacgttatttttacagaat

SEQ ID NO: 644674 - DNA, 33 bp, Homo sapien
cttgatgcacctagtatgttatttttacagaat

SEQ ID NO: 644675 - DNA, 33 bp, Homo sapien
agcatggcttaatgtaacatcaaacttggaaga

SEQ ID NO: 644676 - DNA, 33 bp, Homo sapien
agcatggcttaatgtatcatcaaacttggaaga

SEQ ID NO: 644677 - DNA, 33 bp, Homo sapien
acttggcaatattcctaacaccatttaatgaaa

SEQ ID NO: 644678 - DNA, 33 bp, Homo sapien
acttggcaatattcctgacaccatttaatgaaa

SEQ ID NO: 644679 - DNA, 33 bp, Homo sapien
cagacttaatctctccccaagtatttgcctctc

SEQ ID NO: 644680 - DNA, 33 bp, Homo sapien
cagacttaatctctccgcaagtatttgcctctc

SEQ ID NO: 644681 - DNA, 33 bp, Homo sapien
tgtgtgctggacgtatcaccttttggaagtgta

SEQ ID NO: 644682 - DNA, 33 bp, Homo sapien
tgtgtgctggacgtatgaccttttggaagtgta

SEQ ID NO: 644683 - DNA, 33 bp, Homo sapien
ggataagactggcttcaaaaaatgatttgggaa

SEQ ID NO: 644684 - DNA, 33 bp, Homo sapien
ggataagactggcttcgaaaaatgatttgggaa

SEQ ID NO: 644685 - DNA, 33 bp, Homo sapien
ttaattccaaataacccatacttacacacaaat

SEQ ID NO: 644686 - DNA, 33 bp, Homo sapien
ttaattccaaataacctatacttacacacaaat

SEQ ID NO: 644687 - DNA, 33 bp, Homo sapien
gtgcatctgagattgcagataagaattcaaatc

SEQ ID NO: 644688 - DNA, 33 bp, Homo sapien
gtgcatctgagattgcggataagaattcaaatc

SEQ ID NO: 644689 - DNA, 33 bp, Homo sapien
gatgaagtatcaaatggaaatgaagcacatatt

SEQ ID NO: 644690 - DNA, 33 bp, Homo sapien
gatgaagtatcaaatgtaaatgaagcacatatt

SEQ ID NO: 644691 - DNA, 33 bp, Homo sapien
gacatgagtacctggaaaagaaaagacagacag

SEQ ID NO: 644692 - DNA, 33 bp, Homo sapien
gacatgagtacctggacaagaaaagacagacag

SEQ ID NO: 644693 - DNA, 33 bp, Homo sapien
ctaaacaaccatggaaaagtaaacatttttgga

SEQ ID NO: 644694 - DNA, 33 bp, Homo sapien
ctaaacaaccatggaagagtaaacatttttgga

SEQ ID NO: 644695 - DNA, 33 bp, Homo sapien
gaatcagtttagctaacacatgatctcaaggag

SEQ ID NO: 644696 - DNA, 33 bp, Homo sapien
gaatcagtttagctaatacatgatctcaaggag

SEQ ID NO: 644697 - DNA, 33 bp, Homo sapien
atactggagtagggtacgcacttaatccaatat

SEQ ID NO: 644698 - DNA, 33 bp, Homo sapien
atactggagtagggtatgcacttaatccaatat

SEQ ID NO: 644699 - DNA, 33 bp, Homo sapien
gctgccttttgggtgaagtagaatgaaaattat

SEQ ID NO: 644700 - DNA, 33 bp, Homo sapien
gctgccttttgggtgaggtagaatgaaaattat

SEQ ID NO: 644701 - DNA, 33 bp, Homo sapien
cacaccttgcctattcactcagtcaagcttaca

SEQ ID NO: 644702 - DNA, 33 bp, Homo sapien
cacaccttgcctattcgctcagtcaagcttaca

SEQ ID NO: 644703 - DNA, 33 bp, Homo sapien
acatgaccagtgtcccaaattcattcgttgccc

SEQ ID NO: 644704 - DNA, 33 bp, Homo sapien
acatgaccagtgtcccgaattcattcgttgccc

SEQ ID NO: 644705 - DNA, 33 bp, Homo sapien
ctgggttggtacatgccacttttgcgtcttgat

SEQ ID NO: 644706 - DNA, 33 bp, Homo sapien
ctgggttggtacatgcgacttttgcgtcttgat

SEQ ID NO: 644707 - DNA, 33 bp, Homo sapien
gtgacatttagaaagaaagattatctgcatgtg

SEQ ID NO: 644708 - DNA, 33 bp, Homo sapien
gtgacatttagaaagagagattatctgcatgtg

SEQ ID NO: 644709 - DNA, 33 bp, Homo sapien
tgtatcccagacgatacagttgaaatggctaga

SEQ ID NO: 644710 - DNA, 33 bp, Homo sapien
tgtatcccagacgatatagttgaaatggctaga

SEQ ID NO: 644711 - DNA, 33 bp, Homo sapien
aaaactgaagaaataacgtagatgtgagttttc

SEQ ID NO: 644712 - DNA, 33 bp, Homo sapien
aaaactgaagaaataaggtagatgtgagttttc

SEQ ID NO: 644713 - DNA, 33 bp, Homo sapien
tagacacacctagtaactgcttggggaaaaggg

SEQ ID NO: 644714 - DNA, 33 bp, Homo sapien
tagacacacctagtaattgcttggggaaaaggg

SEQ ID NO: 644715 - DNA, 33 bp, Homo sapien
ttcttttgagccccgcaaactgttccagcctct

SEQ ID NO: 644716 - DNA, 33 bp, Homo sapien
ttcttttgagccccgcgaactgttccagcctct

SEQ ID NO: 644717 - DNA, 33 bp, Homo sapien
tcagcaaaaatgcatacaggttcaatccataga

SEQ ID NO: 644718 - DNA, 33 bp, Homo sapien
tcagcaaaaatgcatataggttcaatccataga

SEQ ID NO: 644719 - DNA, 33 bp, Homo sapien
cccaagtggccatcaccgaattaatggataaag

SEQ ID NO: 644720 - DNA, 33 bp, Homo sapien
cccaagtggccatcactgaattaatggataaag

SEQ ID NO: 644721 - DNA, 33 bp, Homo sapien
gtggtaatatttgtgaactactgtgcaagtcac

SEQ ID NO: 644722 - DNA, 33 bp, Homo sapien
gtggtaatatttgtgagctactgtgcaagtcac

SEQ ID NO: 644723 - DNA, 33 bp, Homo sapien
tcttaaacataaacacacttgacctaaaagaca

SEQ ID NO: 644724 - DNA, 33 bp, Homo sapien
tcttaaacataaacactcttgacctaaaagaca

SEQ ID NO: 644725 - DNA, 33 bp, Homo sapien
tgtaaagatcgttgacactatgaacaaactgca

SEQ ID NO: 644726 - DNA, 33 bp, Homo sapien
tgtaaagatcgttgacgctatgaacaaactgca

SEQ ID NO: 644727 - DNA, 33 bp, Homo sapien
cttagaggcactctgacgagacctgtggatgta

SEQ ID NO: 644728 - DNA, 33 bp, Homo sapien
cttagaggcactctgatgagacctgtggatgta

SEQ ID NO: 644729 - DNA, 33 bp, Homo sapien
aaatgtaacgcacaaaaagatttaatgtcaact

SEQ ID NO: 644730 - DNA, 33 bp, Homo sapien
aaatgtaacgcacaaacagatttaatgtcaact

SEQ ID NO: 644731 - DNA, 33 bp, Homo sapien
gtgagcctgatggtaactgaggttgataaaggc

SEQ ID NO: 644732 - DNA, 33 bp, Homo sapien
gtgagcctgatggtaattgaggttgataaaggc

SEQ ID NO: 644733 - DNA, 33 bp, Homo sapien
aaaaaccttcaaacaaagcatatcaaaaaagac

SEQ ID NO: 644734 - DNA, 33 bp, Homo sapien
aaaaaccttcaaacaaggcatatcaaaaaagac

SEQ ID NO: 644735 - DNA, 33 bp, Homo sapien
gtcgtaaagtgtaaagcatatcttatgagctct

SEQ ID NO: 644736 - DNA, 33 bp, Homo sapien
gtcgtaaagtgtaaagtatatcttatgagctct

SEQ ID NO: 644737 - DNA, 33 bp, Homo sapien
atacccattttaataaacataagccaaacactg

SEQ ID NO: 644738 - DNA, 33 bp, Homo sapien
atacccattttaataatcataagccaaacactg

SEQ ID NO: 644739 - DNA, 33 bp, Homo sapien
agttttaaaacatgtcaacacatcagcacagtt

SEQ ID NO: 644740 - DNA, 33 bp, Homo sapien
agttttaaaacatgtcgacacatcagcacagtt

SEQ ID NO: 644741 - DNA, 33 bp, Homo sapien
cgtactttatcactaaccaaccatttcctccag

SEQ ID NO: 644742 - DNA, 33 bp, Homo sapien
cgtactttatcactaagcaaccatttcctccag

SEQ ID NO: 644743 - DNA, 33 bp, Homo sapien
gtaataagctgaatggaaaattactgaatttct

SEQ ID NO: 644744 - DNA, 33 bp, Homo sapien
gtaataagctgaatggcaaattactgaatttct

SEQ ID NO: 644745 - DNA, 33 bp, Homo sapien
atgtatgtgaaagatactactatgacttatcta

SEQ ID NO: 644746 - DNA, 33 bp, Homo sapien
atgtatgtgaaagatattactatgacttatcta

SEQ ID NO: 644747 - DNA, 33 bp, Homo sapien
taaaagaaattttatcacttgcttcagcatatt

SEQ ID NO: 644748 - DNA, 33 bp, Homo sapien
taaaagaaattttatcgcttgcttcagcatatt

SEQ ID NO: 644749 - DNA, 33 bp, Homo sapien
tgatcaagtgtagcaacagagtttgaagttcat

SEQ ID NO: 644750 - DNA, 33 bp, Homo sapien
tgatcaagtgtagcaagagagtttgaagttcat

SEQ ID NO: 644751 - DNA, 33 bp, Homo sapien
tcagctggttgtagaggatctcctcctattgcc

SEQ ID NO: 644752 - DNA, 33 bp, Homo sapien
tcagctggttgtagagtatctcctcctattgcc

SEQ ID NO: 644753 - DNA, 33 bp, Homo sapien
ctttagtaacacataaattaaagggcttacagt

SEQ ID NO: 644754 - DNA, 33 bp, Homo sapien
ctttagtaacacataatttaaagggcttacagt

SEQ ID NO: 644755 - DNA, 33 bp, Homo sapien
aatgatatgaactagggccaaatgagtgacata

SEQ ID NO: 644756 - DNA, 33 bp, Homo sapien
aatgatatgaactaggtccaaatgagtgacata

SEQ ID NO: 644757 - DNA, 33 bp, Homo sapien
gtgtaaaggtgaggagaacaccagaaatataca

SEQ ID NO: 644758 - DNA, 33 bp, Homo sapien
gtgtaaaggtgaggaggacaccagaaatataca

SEQ ID NO: 644759 - DNA, 33 bp, Homo sapien
ctggttgtgtaaatgcaccattagaaggcttta

SEQ ID NO: 644760 - DNA, 33 bp, Homo sapien
ctggttgtgtaaatgcgccattagaaggcttta

SEQ ID NO: 644761 - DNA, 33 bp, Homo sapien
cagctgcttctgatgacatggcacatggaaaca

SEQ ID NO: 644762 - DNA, 33 bp, Homo sapien
cagctgcttctgatgatatggcacatggaaaca

SEQ ID NO: 644763 - DNA, 33 bp, Homo sapien
gtgatagactactgaactgagtgccaattttaa

SEQ ID NO: 644764 - DNA, 33 bp, Homo sapien
gtgatagactactgaattgagtgccaattttaa

SEQ ID NO: 644765 - DNA, 33 bp, Homo sapien
gctgcattttgaacaacgaggaattctttgctg

SEQ ID NO: 644766 - DNA, 33 bp, Homo sapien
gctgcattttgaacaatgaggaattctttgctg

SEQ ID NO: 644767 - DNA, 33 bp, Homo sapien
cttcagctgtgggcaactgtaattcaaacttgc

SEQ ID NO: 644768 - DNA, 33 bp, Homo sapien
cttcagctgtgggcaattgtaattcaaacttgc

SEQ ID NO: 644769 - DNA, 33 bp, Homo sapien
taaagagcaaaattcagcagtgactacaaatga

SEQ ID NO: 644770 - DNA, 33 bp, Homo sapien
taaagagcaaaattcatcagtgactacaaatga

SEQ ID NO: 644771 - DNA, 33 bp, Homo sapien
ctaatattgtgcctcacacaaattagcaggatt

SEQ ID NO: 644772 - DNA, 33 bp, Homo sapien
ctaatattgtgcctcatacaaattagcaggatt

SEQ ID NO: 644773 - DNA, 33 bp, Homo sapien
tcaatattacccaagaaacctgagactaagaaa

SEQ ID NO: 644774 - DNA, 33 bp, Homo sapien
tcaatattacccaagagacctgagactaagaaa

SEQ ID NO: 644775 - DNA, 33 bp, Homo sapien
tagaatttagctccataagaaaccagagttagt

SEQ ID NO: 644776 - DNA, 33 bp, Homo sapien
tagaatttagctccatgagaaaccagagttagt

SEQ ID NO: 644777 - DNA, 33 bp, Homo sapien
taaacctaagaactgacgtttctgagcccattg

SEQ ID NO: 644778 - DNA, 33 bp, Homo sapien
taaacctaagaactgatgtttctgagcccattg

SEQ ID NO: 644779 - DNA, 33 bp, Homo sapien
caccaggttggaaataagctttaggcagaatca

SEQ ID NO: 644780 - DNA, 33 bp, Homo sapien
caccaggttggaaatatgctttaggcagaatca

SEQ ID NO: 644781 - DNA, 33 bp, Homo sapien
cctacaatgaaaaaccaaatatcccttagcaga

SEQ ID NO: 644782 - DNA, 33 bp, Homo sapien
cctacaatgaaaaaccgaatatcccttagcaga

SEQ ID NO: 644783 - DNA, 33 bp, Homo sapien
gagaagggtagtgaggcaaagcttttaagggtc

SEQ ID NO: 644784 - DNA, 33 bp, Homo sapien
gagaagggtagtgagggaaagcttttaagggtc

SEQ ID NO: 644785 - DNA, 33 bp, Homo sapien
ctgcaaactgaacacccaggggagcttttagtg

SEQ ID NO: 644786 - DNA, 33 bp, Homo sapien
ctgcaaactgaacacctaggggagcttttagtg

SEQ ID NO: 644787 - DNA, 33 bp, Homo sapien
tagaagttgatggtgaatagttgaggcaggaat

SEQ ID NO: 644788 - DNA, 33 bp, Homo sapien
tagaagttgatggtgattagttgaggcaggaat

SEQ ID NO: 644789 - DNA, 33 bp, Homo sapien
ggattgtgcttttgaacaattttgtgtttgcct

SEQ ID NO: 644790 - DNA, 33 bp, Homo sapien
ggattgtgcttttgaataattttgtgtttgcct

SEQ ID NO: 644791 - DNA, 33 bp, Homo sapien
tgaataatcattatccacctaggcaataattca

SEQ ID NO: 644792 - DNA, 33 bp, Homo sapien
tgaataatcattatcctcctaggcaataattca

SEQ ID NO: 644793 - DNA, 33 bp, Homo sapien
cttatttcttagaaaagtatctccagtgccctg

SEQ ID NO: 644794 - DNA, 33 bp, Homo sapien
cttatttcttagaaaattatctccagtgccctg

SEQ ID NO: 644795 - DNA, 33 bp, Homo sapien
aatctcttcttctgggaaatttgtgagcacctg

SEQ ID NO: 644796 - DNA, 33 bp, Homo sapien
aatctcttcttctgggcaatttgtgagcacctg

SEQ ID NO: 644797 - DNA, 33 bp, Homo sapien
gggaaatttaagtctgcagatgttactgctgcc

SEQ ID NO: 644798 - DNA, 33 bp, Homo sapien
gggaaatttaagtctgtagatgttactgctgcc

SEQ ID NO: 644799 - DNA, 33 bp, Homo sapien
tatactatgtgagtaacaagagcactaaaatat

SEQ ID NO: 644800 - DNA, 33 bp, Homo sapien
tatactatgtgagtaagaagagcactaaaatat

SEQ ID NO: 644801 - DNA, 33 bp, Homo sapien
aaactcatacaatcacaaaagtctctcaagcag

SEQ ID NO: 644802 - DNA, 33 bp, Homo sapien
aaactcatacaatcacgaaagtctctcaagcag

SEQ ID NO: 644803 - DNA, 33 bp, Homo sapien
atttgtgaaagatgccccaaattatggtgttat

SEQ ID NO: 644804 - DNA, 33 bp, Homo sapien
atttgtgaaagatgcctcaaattatggtgttat

SEQ ID NO: 644805 - DNA, 33 bp, Homo sapien
gagataattattccaaaaaagagtgaatgaatc

SEQ ID NO: 644806 - DNA, 33 bp, Homo sapien
gagataattattccaacaaagagtgaatgaatc

SEQ ID NO: 644807 - DNA, 33 bp, Homo sapien
agtctatgacactaaacactcagtgctacaatt

SEQ ID NO: 644808 - DNA, 33 bp, Homo sapien
agtctatgacactaaatactcagtgctacaatt

SEQ ID NO: 644809 - DNA, 33 bp, Homo sapien
gaaagtttcatgaaaaatcacgagtttttaata

SEQ ID NO: 644810 - DNA, 33 bp, Homo sapien
gaaagtttcatgaaaattcacgagtttttaata

SEQ ID NO: 644811 - DNA, 33 bp, Homo sapien
aaatcccaagaagatacgcagtaagcaagctgg

SEQ ID NO: 644812 - DNA, 33 bp, Homo sapien
aaatcccaagaagatatgcagtaagcaagctgg

SEQ ID NO: 644813 - DNA, 33 bp, Homo sapien
aagcttttggccagacggtagagcaatgtggca

SEQ ID NO: 644814 - DNA, 33 bp, Homo sapien
aagcttttggccagactgtagagcaatgtggca

SEQ ID NO: 644815 - DNA, 33 bp, Homo sapien
ctatgtgaacttccaaaacctatccatttctac

SEQ ID NO: 644816 - DNA, 33 bp, Homo sapien
ctatgtgaacttccaagacctatccatttctac

SEQ ID NO: 644817 - DNA, 33 bp, Homo sapien
tgctgatctcacaaatcatatttcggttggaaa

SEQ ID NO: 644818 - DNA, 33 bp, Homo sapien
tgctgatctcacaaattatatttcggttggaaa

SEQ ID NO: 644819 - DNA, 33 bp, Homo sapien
ttagtttgagttttccaaagcaaattccaagag

SEQ ID NO: 644820 - DNA, 33 bp, Homo sapien
ttagtttgagttttccgaagcaaattccaagag

SEQ ID NO: 644821 - DNA, 33 bp, Homo sapien
gtcaatgcatactacacagtttggtgaacctcg

SEQ ID NO: 644822 - DNA, 33 bp, Homo sapien
gtcaatgcatactacatagtttggtgaacctcg

SEQ ID NO: 644823 - DNA, 33 bp, Homo sapien
gtcaggcttaggtgtcaagtggttacctcttat

SEQ ID NO: 644824 - DNA, 33 bp, Homo sapien
gtcaggcttaggtgtcgagtggttacctcttat

SEQ ID NO: 644825 - DNA, 33 bp, Homo sapien
actggattcaagataaaattgatcgaacatcac

SEQ ID NO: 644826 - DNA, 33 bp, Homo sapien
actggattcaagataagattgatcgaacatcac

SEQ ID NO: 644827 - DNA, 33 bp, Homo sapien
taattccaggttctacaggtaacaagcatagat

SEQ ID NO: 644828 - DNA, 33 bp, Homo sapien
taattccaggttctacgggtaacaagcatagat

SEQ ID NO: 644829 - DNA, 33 bp, Homo sapien
catctcaggtaaattaaaagtctctgtctctaa

SEQ ID NO: 644830 - DNA, 33 bp, Homo sapien
catctcaggtaaattagaagtctctgtctctaa

SEQ ID NO: 644831 - DNA, 33 bp, Homo sapien
actcaggtctggcgaaggaggaaacacgttgtg

SEQ ID NO: 644832 - DNA, 33 bp, Homo sapien
actcaggtctggcgaatgaggaaacacgttgtg

SEQ ID NO: 644833 - DNA, 33 bp, Homo sapien
gctccccatgaataaacgtccaaagcatccctt

SEQ ID NO: 644834 - DNA, 33 bp, Homo sapien
gctccccatgaataaatgtccaaagcatccctt

SEQ ID NO: 644835 - DNA, 33 bp, Homo sapien
agtccagaatcagtccaaatatttcaactatga

SEQ ID NO: 644836 - DNA, 33 bp, Homo sapien
agtccagaatcagtccgaatatttcaactatga

SEQ ID NO: 644837 - DNA, 33 bp, Homo sapien
ttactttggtagaaaacagtgacataacttggc

SEQ ID NO: 644838 - DNA, 33 bp, Homo sapien
ttactttggtagaaaatagtgacataacttggc

SEQ ID NO: 644839 - DNA, 33 bp, Homo sapien
tgtatttctgagtgcaccttcttgcctttaaat

SEQ ID NO: 644840 - DNA, 33 bp, Homo sapien
tgtatttctgagtgcatcttcttgcctttaaat

SEQ ID NO: 644841 - DNA, 33 bp, Homo sapien
tggttcaaaatttagccctgacatcagttttgc

SEQ ID NO: 644842 - DNA, 33 bp, Homo sapien
tggttcaaaatttagctctgacatcagttttgc

SEQ ID NO: 644843 - DNA, 33 bp, Homo sapien
agattcagggtgcccacatagcacgctattgca

SEQ ID NO: 644844 - DNA, 33 bp, Homo sapien
agattcagggtgcccagatagcacgctattgca

SEQ ID NO: 644845 - DNA, 33 bp, Homo sapien
gatttactatgattcacggcaaagccttaaatt

SEQ ID NO: 644846 - DNA, 33 bp, Homo sapien
gatttactatgattcagggcaaagccttaaatt

SEQ ID NO: 644847 - DNA, 33 bp, Homo sapien
tccagtgtcagcagaaaagataacttttgggat

SEQ ID NO: 644848 - DNA, 33 bp, Homo sapien
tccagtgtcagcagaagagataacttttgggat

SEQ ID NO: 644849 - DNA, 33 bp, Homo sapien
aaggtatgaaaaggtaataaaggctgattgtaa

SEQ ID NO: 644850 - DNA, 33 bp, Homo sapien
aaggtatgaaaaggtagtaaaggctgattgtaa

SEQ ID NO: 644851 - DNA, 33 bp, Homo sapien
taattttatcgtcttcaccatttggaaattctg

SEQ ID NO: 644852 - DNA, 33 bp, Homo sapien
taattttatcgtcttcgccatttggaaattctg

SEQ ID NO: 644853 - DNA, 33 bp, Homo sapien
ttgttcttagtttaaagttgctgtcttttaact

SEQ ID NO: 644854 - DNA, 33 bp, Homo sapien
ttgttcttagtttaaatttgctgtcttttaact

SEQ ID NO: 644855 - DNA, 33 bp, Homo sapien
cacattctgcttcaaaagaatagagcagaacac

SEQ ID NO: 644856 - DNA, 33 bp, Homo sapien
cacattctgcttcaaaggaatagagcagaacac

SEQ ID NO: 644857 - DNA, 33 bp, Homo sapien
aaatgatatagccctccaagaattgtcaaatcg

SEQ ID NO: 644858 - DNA, 33 bp, Homo sapien
aaatgatatagccctctaagaattgtcaaatcg

SEQ ID NO: 644859 - DNA, 33 bp, Homo sapien
agtgagaggaaaggaaatctttcatactggtaa

SEQ ID NO: 644860 - DNA, 33 bp, Homo sapien
agtgagaggaaaggaactctttcatactggtaa

SEQ ID NO: 644861 - DNA, 33 bp, Homo sapien
attattacaaaaattaactcacgaaatcactaa

SEQ ID NO: 644862 - DNA, 33 bp, Homo sapien
attattacaaaaattacctcacgaaatcactaa

SEQ ID NO: 644863 - DNA, 33 bp, Homo sapien
aactatttttctgtcaaactcccacatcaaaat

SEQ ID NO: 644864 - DNA, 33 bp, Homo sapien
aactatttttctgtcagactcccacatcaaaat

SEQ ID NO: 644865 - DNA, 33 bp, Homo sapien
tgcagtgtatgaatgaaatcaaaagtaaaaaaa

SEQ ID NO: 644866 - DNA, 33 bp, Homo sapien
tgcagtgtatgaatgagatcaaaagtaaaaaaa

SEQ ID NO: 644867 - DNA, 33 bp, Homo sapien
atattagaagtagtcaagtatcactctcatttt

SEQ ID NO: 644868 - DNA, 33 bp, Homo sapien
atattagaagtagtcaggtatcactctcatttt

SEQ ID NO: 644869 - DNA, 33 bp, Homo sapien
gtatagtaaagaaggacactctcaccaatgtag

SEQ ID NO: 644870 - DNA, 33 bp, Homo sapien
gtatagtaaagaaggatactctcaccaatgtag

SEQ ID NO: 644871 - DNA, 33 bp, Homo sapien
gtgagagccaaggttacactgaaacagacaaaa

SEQ ID NO: 644872 - DNA, 33 bp, Homo sapien
gtgagagccaaggttagactgaaacagacaaaa

SEQ ID NO: 644873 - DNA, 33 bp, Homo sapien
caccacgtccatcctaaaagatacattttaagt

SEQ ID NO: 644874 - DNA, 33 bp, Homo sapien
caccacgtccatcctagaagatacattttaagt

SEQ ID NO: 644875 - DNA, 33 bp, Homo sapien
ttagatgttttttgggaataaagccttgctggt

SEQ ID NO: 644876 - DNA, 33 bp, Homo sapien
ttagatgttttttggggataaagccttgctggt

SEQ ID NO: 644877 - DNA, 33 bp, Homo sapien
tttaccattttaatccaacaggctgagagttcc

SEQ ID NO: 644878 - DNA, 33 bp, Homo sapien
tttaccattttaatccgacaggctgagagttcc

SEQ ID NO: 644879 - DNA, 33 bp, Homo sapien
tagtttatcttcattcactcagtttgtggcctc

SEQ ID NO: 644880 - DNA, 33 bp, Homo sapien
tagtttatcttcattcgctcagtttgtggcctc

SEQ ID NO: 644881 - DNA, 33 bp, Homo sapien
aataggtcagtttatggcatactggagtataga

SEQ ID NO: 644882 - DNA, 33 bp, Homo sapien
aataggtcagtttatgtcatactggagtataga

SEQ ID NO: 644883 - DNA, 33 bp, Homo sapien
acctcagttctcatgcacttaacattctaatgg

SEQ ID NO: 644884 - DNA, 33 bp, Homo sapien
acctcagttctcatgcgcttaacattctaatgg

SEQ ID NO: 644885 - DNA, 33 bp, Homo sapien
taataagtactgtagcaagaaaataaccaagga

SEQ ID NO: 644886 - DNA, 33 bp, Homo sapien
taataagtactgtagcgagaaaataaccaagga

SEQ ID NO: 644887 - DNA, 33 bp, Homo sapien
actagattccaactgtcaagcaactctaatgct

SEQ ID NO: 644888 - DNA, 33 bp, Homo sapien
actagattccaactgttaagcaactctaatgct

SEQ ID NO: 644889 - DNA, 33 bp, Homo sapien
ttctaaaactcagtaacgtgtaaccagatacac

SEQ ID NO: 644890 - DNA, 33 bp, Homo sapien
ttctaaaactcagtaatgtgtaaccagatacac

SEQ ID NO: 644891 - DNA, 33 bp, Homo sapien
taagctgtattgtccaactcttttcatgatttg

SEQ ID NO: 644892 - DNA, 33 bp, Homo sapien
taagctgtattgtccatctcttttcatgatttg

SEQ ID NO: 644893 - DNA, 33 bp, Homo sapien
tgactacgaaggcctgacaattagagggcctgt

SEQ ID NO: 644894 - DNA, 33 bp, Homo sapien
tgactacgaaggcctggcaattagagggcctgt

SEQ ID NO: 644895 - DNA, 33 bp, Homo sapien
ttggtttctcaggatacgttgacccagatggga

SEQ ID NO: 644896 - DNA, 33 bp, Homo sapien
ttggtttctcaggataggttgacccagatggga

SEQ ID NO: 644897 - DNA, 33 bp, Homo sapien
tcactgctatgcaccaagaagaaaatataaggc

SEQ ID NO: 644898 - DNA, 33 bp, Homo sapien
tcactgctatgcaccaggaagaaaatataaggc

SEQ ID NO: 644899 - DNA, 33 bp, Homo sapien
ttattgtcaattcaaaactgctccacagaacta

SEQ ID NO: 644900 - DNA, 33 bp, Homo sapien
ttattgtcaattcaaacctgctccacagaacta

SEQ ID NO: 644901 - DNA, 33 bp, Homo sapien
gcggctgtgaatagtgcataatgaacacacagc

SEQ ID NO: 644902 - DNA, 33 bp, Homo sapien
gcggctgtgaatagtgtataatgaacacacagc

SEQ ID NO: 644903 - DNA, 33 bp, Homo sapien
ctattaatgtggaaaacagcctatacctcataa

SEQ ID NO: 644904 - DNA, 33 bp, Homo sapien
ctattaatgtggaaaatagcctatacctcataa

SEQ ID NO: 644905 - DNA, 33 bp, Homo sapien
atgtttaatggtaacaagcaaggatatccgagg

SEQ ID NO: 644906 - DNA, 33 bp, Homo sapien
atgtttaatggtaacaggcaaggatatccgagg

SEQ ID NO: 644907 - DNA, 33 bp, Homo sapien
aagaaggacatttctaccacagtctccaactac

SEQ ID NO: 644908 - DNA, 33 bp, Homo sapien
aagaaggacatttctagcacagtctccaactac

SEQ ID NO: 644909 - DNA, 33 bp, Homo sapien
ataagttaagatcgagcccagttattactgtga

SEQ ID NO: 644910 - DNA, 33 bp, Homo sapien
ataagttaagatcgagtccagttattactgtga

SEQ ID NO: 644911 - DNA, 33 bp, Homo sapien
ttaggattttgcaaaacgtagtcaatagaaaag

SEQ ID NO: 644912 - DNA, 33 bp, Homo sapien
ttaggattttgcaaaatgtagtcaatagaaaag

SEQ ID NO: 644913 - DNA, 33 bp, Homo sapien
gaaagctgataaaagacatgctaatggcaatga

SEQ ID NO: 644914 - DNA, 33 bp, Homo sapien
gaaagctgataaaagagatgctaatggcaatga

SEQ ID NO: 644915 - DNA, 33 bp, Homo sapien
tattctcaattctttccaactggttttactctt

SEQ ID NO: 644916 - DNA, 33 bp, Homo sapien
tattctcaattctttctaactggttttactctt

SEQ ID NO: 644917 - DNA, 33 bp, Homo sapien
gtgttcaggtttacaacgaaggagtagcttaga

SEQ ID NO: 644918 - DNA, 33 bp, Homo sapien
gtgttcaggtttacaatgaaggagtagcttaga

SEQ ID NO: 644919 - DNA, 33 bp, Homo sapien
ctcccagctttggggaaatgatcttcttaggcg

SEQ ID NO: 644920 - DNA, 33 bp, Homo sapien
ctcccagctttggggagatgatcttcttaggcg

SEQ ID NO: 644921 - DNA, 33 bp, Homo sapien
gcacccttgagccctcactcttaaaaatatata

SEQ ID NO: 644922 - DNA, 33 bp, Homo sapien
gcacccttgagccctctctcttaaaaatatata

SEQ ID NO: 644923 - DNA, 33 bp, Homo sapien
gtgagttgctggattacgggttgtgaggaaagt

SEQ ID NO: 644924 - DNA, 33 bp, Homo sapien
gtgagttgctggattatgggttgtgaggaaagt

SEQ ID NO: 644925 - DNA, 33 bp, Homo sapien
ttaatgtgccttttacacaacgaatgatcaatt

SEQ ID NO: 644926 - DNA, 33 bp, Homo sapien
ttaatgtgccttttacgcaacgaatgatcaatt

SEQ ID NO: 644927 - DNA, 33 bp, Homo sapien
attgtgttccctgggcaatgtagacacagaact

SEQ ID NO: 644928 - DNA, 33 bp, Homo sapien
attgtgttccctgggcgatgtagacacagaact

SEQ ID NO: 644929 - DNA, 33 bp, Homo sapien
tagagttgggaggtgcacgtaagtcaaatgtag

SEQ ID NO: 644930 - DNA, 33 bp, Homo sapien
tagagttgggaggtgcgcgtaagtcaaatgtag

SEQ ID NO: 644931 - DNA, 33 bp, Homo sapien
attaactatatgttacaccaagtaagttaagac

SEQ ID NO: 644932 - DNA, 33 bp, Homo sapien
attaactatatgttacgccaagtaagttaagac

SEQ ID NO: 644933 - DNA, 33 bp, Homo sapien
aaaggcagggaatcaaagtaggtgcccatgaat

SEQ ID NO: 644934 - DNA, 33 bp, Homo sapien
aaaggcagggaatcaacgtaggtgcccatgaat

SEQ ID NO: 644935 - DNA, 33 bp, Homo sapien
cctgggcttctgagtccaaaggtggtacttcct

SEQ ID NO: 644936 - DNA, 33 bp, Homo sapien
cctgggcttctgagtctaaaggtggtacttcct

SEQ ID NO: 644937 - DNA, 33 bp, Homo sapien
aaagtcaagatactaacagcaagcaaaactata

SEQ ID NO: 644938 - DNA, 33 bp, Homo sapien
aaagtcaagatactaagagcaagcaaaactata

SEQ ID NO: 644939 - DNA, 33 bp, Homo sapien
gtgcgatgagttaataccgtcctctgatagttt

SEQ ID NO: 644940 - DNA, 33 bp, Homo sapien
gtgcgatgagttaatatcgtcctctgatagttt

SEQ ID NO: 644941 - DNA, 33 bp, Homo sapien
ctaagagcaaaattccaattgggactccttctc

SEQ ID NO: 644942 - DNA, 33 bp, Homo sapien
ctaagagcaaaattccgattgggactccttctc

SEQ ID NO: 644943 - DNA, 33 bp, Homo sapien
agaattaaaaaatggcaaatgtcacactgatat

SEQ ID NO: 644944 - DNA, 33 bp, Homo sapien
agaattaaaaaatggcgaatgtcacactgatat

SEQ ID NO: 644945 - DNA, 33 bp, Homo sapien
agaagagctgaaagggaccaggaatgtggtgct

SEQ ID NO: 644946 - DNA, 33 bp, Homo sapien
agaagagctgaaaggggccaggaatgtggtgct

SEQ ID NO: 644947 - DNA, 33 bp, Homo sapien
ctggctctttgaagcaaggtctgcatattggga

SEQ ID NO: 644948 - DNA, 33 bp, Homo sapien
ctggctctttgaagcagggtctgcatattggga

SEQ ID NO: 644949 - DNA, 33 bp, Homo sapien
aggcacacaactgaaaagtccttcctacatagt

SEQ ID NO: 644950 - DNA, 33 bp, Homo sapien
aggcacacaactgaaatgtccttcctacatagt

SEQ ID NO: 644951 - DNA, 33 bp, Homo sapien
gtgtagaatgaagaaacaactatcacaagtaaa

SEQ ID NO: 644952 - DNA, 33 bp, Homo sapien
gtgtagaatgaagaaataactatcacaagtaaa

SEQ ID NO: 644953 - DNA, 33 bp, Homo sapien
caccaacaccactaccaacattagcattcattt

SEQ ID NO: 644954 - DNA, 33 bp, Homo sapien
caccaacaccactacctacattagcattcattt

SEQ ID NO: 644955 - DNA, 33 bp, Homo sapien
ggtgctaaaagactgtcaagttgaggcaagtca

SEQ ID NO: 644956 - DNA, 33 bp, Homo sapien
ggtgctaaaagactgttaagttgaggcaagtca

SEQ ID NO: 644957 - DNA, 33 bp, Homo sapien
ttgggaatatctttcacgcttggagattcataa

SEQ ID NO: 644958 - DNA, 33 bp, Homo sapien
ttgggaatatctttcatgcttggagattcataa

SEQ ID NO: 644959 - DNA, 33 bp, Homo sapien
tgactgaattaggaaacgatagcatttccgtga

SEQ ID NO: 644960 - DNA, 33 bp, Homo sapien
tgactgaattaggaaaggatagcatttccgtga

SEQ ID NO: 644961 - DNA, 33 bp, Homo sapien
taaaggagggaaagccaaccacttttatgtttt

SEQ ID NO: 644962 - DNA, 33 bp, Homo sapien
taaaggagggaaagccgaccacttttatgtttt

SEQ ID NO: 644963 - DNA, 33 bp, Homo sapien
atttcaaaagaaggtcactagatgaaatccctt

SEQ ID NO: 644964 - DNA, 33 bp, Homo sapien
atttcaaaagaaggtcgctagatgaaatccctt

SEQ ID NO: 644965 - DNA, 33 bp, Homo sapien
tcattttctcagcctgaaaaactgctacacacc

SEQ ID NO: 644966 - DNA, 33 bp, Homo sapien
tcattttctcagcctggaaaactgctacacacc

SEQ ID NO: 644967 - DNA, 33 bp, Homo sapien
gtataattataaggtaaccttgagagacagttg

SEQ ID NO: 644968 - DNA, 33 bp, Homo sapien
gtataattataaggtatccttgagagacagttg

SEQ ID NO: 644969 - DNA, 33 bp, Homo sapien
catgaactgccattaaaaatgagcttatataaa

SEQ ID NO: 644970 - DNA, 33 bp, Homo sapien
catgaactgccattaacaatgagcttatataaa

SEQ ID NO: 644971 - DNA, 33 bp, Homo sapien
aggtcctgacttagaacgatttagagagacaga

SEQ ID NO: 644972 - DNA, 33 bp, Homo sapien
aggtcctgacttagaatgatttagagagacaga

SEQ ID NO: 644973 - DNA, 33 bp, Homo sapien
aaaaatggcataaaatgagtttcctgattattc

SEQ ID NO: 644974 - DNA, 33 bp, Homo sapien
aaaaatggcataaaattagtttcctgattattc

SEQ ID NO: 644975 - DNA, 33 bp, Homo sapien
tttaaggttgaatatccagagagtagcctgagt

SEQ ID NO: 644976 - DNA, 33 bp, Homo sapien
tttaaggttgaatatcgagagagtagcctgagt

SEQ ID NO: 644977 - DNA, 33 bp, Homo sapien
tcataaggtatgataccaacattgaaagtaaaa

SEQ ID NO: 644978 - DNA, 33 bp, Homo sapien
tcataaggtatgatacgaacattgaaagtaaaa

SEQ ID NO: 644979 - DNA, 33 bp, Homo sapien
ctcagtgtggaaattaagttgactggatgttac

SEQ ID NO: 644980 - DNA, 33 bp, Homo sapien
ctcagtgtggaaattaggttgactggatgttac

SEQ ID NO: 644981 - DNA, 33 bp, Homo sapien
tgaatgctaattgacaactgattcataattagt

SEQ ID NO: 644982 - DNA, 33 bp, Homo sapien
tgaatgctaattgacagctgattcataattagt

SEQ ID NO: 644983 - DNA, 33 bp, Homo sapien
attcttctggatattaaacacaaaggagccctg

SEQ ID NO: 644984 - DNA, 33 bp, Homo sapien
attcttctggatattacacacaaaggagccctg

SEQ ID NO: 644985 - DNA, 33 bp, Homo sapien
gtgttgtaacttacaggattcctttcagctctc

SEQ ID NO: 644986 - DNA, 33 bp, Homo sapien
gtgttgtaacttacagtattcctttcagctctc

SEQ ID NO: 644987 - DNA, 33 bp, Homo sapien
aaaccaagatgctccacgaagtcatttgaaggc

SEQ ID NO: 644988 - DNA, 33 bp, Homo sapien
aaaccaagatgctccatgaagtcatttgaaggc

SEQ ID NO: 644989 - DNA, 33 bp, Homo sapien
cataccagtgagtctacggtcaattcacctgga

SEQ ID NO: 644990 - DNA, 33 bp, Homo sapien
cataccagtgagtctatggtcaattcacctgga

SEQ ID NO: 644991 - DNA, 33 bp, Homo sapien
tcaaacatatcatgtaaattcacagagagggga

SEQ ID NO: 644992 - DNA, 33 bp, Homo sapien
tcaaacatatcatgtagattcacagagagggga

SEQ ID NO: 644993 - DNA, 33 bp, Homo sapien
agttctgggttttaacaagaaaaatatcctcaa

SEQ ID NO: 644994 - DNA, 33 bp, Homo sapien
agttctgggttttaacgagaaaaatatcctcaa

SEQ ID NO: 644995 - DNA, 33 bp, Homo sapien
aactcaagcagtgaatcacaattagtttaagct

SEQ ID NO: 644996 - DNA, 33 bp, Homo sapien
aactcaagcagtgaatgacaattagtttaagct

SEQ ID NO: 644997 - DNA, 33 bp, Homo sapien
tatctcaaatgcctggaaatgaagaaagaagag

SEQ ID NO: 644998 - DNA, 33 bp, Homo sapien
tatctcaaatgcctggcaatgaagaaagaagag

SEQ ID NO: 644999 - DNA, 33 bp, Homo sapien
ctaaattctgattggcacttcatcatttgtaac

SEQ ID NO: 645000 - DNA, 33 bp, Homo sapien
ctaaattctgattggcgcttcatcatttgtaac

SEQ ID NO: 645001 - DNA, 33 bp, Homo sapien
gccaccggataactaaatggcagccttgtaaac

SEQ ID NO: 645002 - DNA, 33 bp, Homo sapien
gccaccggataactaagtggcagccttgtaaac

SEQ ID NO: 645003 - DNA, 33 bp, Homo sapien
gagtacatggctgatacgatttggtgtgttccc

SEQ ID NO: 645004 - DNA, 33 bp, Homo sapien
gagtacatggctgatatgatttggtgtgttccc

SEQ ID NO: 645005 - DNA, 33 bp, Homo sapien
atgtctttgataaacacgagaaaaagagaacat

SEQ ID NO: 645006 - DNA, 33 bp, Homo sapien
atgtctttgataaacatgagaaaaagagaacat

SEQ ID NO: 645007 - DNA, 33 bp, Homo sapien
ctgatggatagtatacacacaatctagagtatt

SEQ ID NO: 645008 - DNA, 33 bp, Homo sapien
ctgatggatagtatacgcacaatctagagtatt

SEQ ID NO: 645009 - DNA, 33 bp, Homo sapien
agtcttgaatggcatacctatccttgtcgggaa

SEQ ID NO: 645010 - DNA, 33 bp, Homo sapien
agtcttgaatggcatatctatccttgtcgggaa

SEQ ID NO: 645011 - DNA, 33 bp, Homo sapien
cttcgaatcaaaggccacggatacctagcacag

SEQ ID NO: 645012 - DNA, 33 bp, Homo sapien
cttcgaatcaaaggccgcggatacctagcacag

SEQ ID NO: 645013 - DNA, 33 bp, Homo sapien
ataggtgacaatgatacgtagaagcaaacgtaa

SEQ ID NO: 645014 - DNA, 33 bp, Homo sapien
ataggtgacaatgatatgtagaagcaaacgtaa

SEQ ID NO: 645015 - DNA, 33 bp, Homo sapien
ttaatttagaactcagaatgcttcaaaaagatc

SEQ ID NO: 645016 - DNA, 33 bp, Homo sapien
ttaatttagaactcagtatgcttcaaaaagatc

SEQ ID NO: 645017 - DNA, 33 bp, Homo sapien
cttattcttccaaagcagaactctgatcagaaa

SEQ ID NO: 645018 - DNA, 33 bp, Homo sapien
cttattcttccaaagcggaactctgatcagaaa

SEQ ID NO: 645019 - DNA, 33 bp, Homo sapien
ctctgactgcctttacaaagtccaaaataaaac

SEQ ID NO: 645020 - DNA, 33 bp, Homo sapien
ctctgactgcctttacgaagtccaaaataaaac

SEQ ID NO: 645021 - DNA, 33 bp, Homo sapien
tacttaaatcagtaggacacaaatgcagatacc

SEQ ID NO: 645022 - DNA, 33 bp, Homo sapien
tacttaaatcagtagggcacaaatgcagatacc

SEQ ID NO: 645023 - DNA, 33 bp, Homo sapien
tctcctctagctttgaaatgtcatggagtaata

SEQ ID NO: 645024 - DNA, 33 bp, Homo sapien
tctcctctagctttgagatgtcatggagtaata

SEQ ID NO: 645025 - DNA, 33 bp, Homo sapien
ctatgtccaacgaaccaaaagagaacccatgtg

SEQ ID NO: 645026 - DNA, 33 bp, Homo sapien
ctatgtccaacgaaccgaaagagaacccatgtg

SEQ ID NO: 645027 - DNA, 33 bp, Homo sapien
accactttcctgagatcagaaattaggaaaagc

SEQ ID NO: 645028 - DNA, 33 bp, Homo sapien
accactttcctgagatgagaaattaggaaaagc

SEQ ID NO: 645029 - DNA, 33 bp, Homo sapien
ttattttatgactatcaacatggtaggaagatg

SEQ ID NO: 645030 - DNA, 33 bp, Homo sapien
ttattttatgactatcgacatggtaggaagatg

SEQ ID NO: 645031 - DNA, 33 bp, Homo sapien
agttaagatgaagactaagccgctataataaaa

SEQ ID NO: 645032 - DNA, 33 bp, Homo sapien
agttaagatgaagactgagccgctataataaaa

SEQ ID NO: 645033 - DNA, 33 bp, Homo sapien
tttttttgggacattaaatttcatagattggct

SEQ ID NO: 645034 - DNA, 33 bp, Homo sapien
tttttttgggacattacatttcatagattggct

SEQ ID NO: 645035 - DNA, 33 bp, Homo sapien
ggttttaggtaattgaagtttcctcattccatt

SEQ ID NO: 645036 - DNA, 33 bp, Homo sapien
ggttttaggtaattgacgtttcctcattccatt

SEQ ID NO: 645037 - DNA, 33 bp, Homo sapien
actgaatttaaatggcactgcaaaaagtaaagg

SEQ ID NO: 645038 - DNA, 33 bp, Homo sapien
actgaatttaaatggcgctgcaaaaagtaaagg

SEQ ID NO: 645039 - DNA, 33 bp, Homo sapien
cttatatggctaataacggaatgatctaagtca

SEQ ID NO: 645040 - DNA, 33 bp, Homo sapien
cttatatggctaataatggaatgatctaagtca

SEQ ID NO: 645041 - DNA, 33 bp, Homo sapien
acaggttttgaaaccaatcaaattaatcacagc

SEQ ID NO: 645042 - DNA, 33 bp, Homo sapien
acaggttttgaaaccagtcaaattaatcacagc

SEQ ID NO: 645043 - DNA, 33 bp, Homo sapien
ttctgggaatgtgtgcaagtatttctatggctt

SEQ ID NO: 645044 - DNA, 33 bp, Homo sapien
ttctgggaatgtgtgcgagtatttctatggctt

SEQ ID NO: 645045 - DNA, 33 bp, Homo sapien
aaacctctaatacatacgctctaatcagcttca

SEQ ID NO: 645046 - DNA, 33 bp, Homo sapien
aaacctctaatacatatgctctaatcagcttca

SEQ ID NO: 645047 - DNA, 33 bp, Homo sapien
caagcaaattggttcaagagactgtgtttttct

SEQ ID NO: 645048 - DNA, 33 bp, Homo sapien
caagcaaattggttcaggagactgtgtttttct

SEQ ID NO: 645049 - DNA, 33 bp, Homo sapien
gctgcatggagagccaaactaataactcagatt

SEQ ID NO: 645050 - DNA, 33 bp, Homo sapien
gctgcatggagagccagactaataactcagatt

SEQ ID NO: 645051 - DNA, 33 bp, Homo sapien
aatcataccattagccaaagagtgtaagaagcc

SEQ ID NO: 645052 - DNA, 33 bp, Homo sapien
aatcataccattagccgaagagtgtaagaagcc

SEQ ID NO: 645053 - DNA, 33 bp, Homo sapien
atctgtgttttgtaatcatggctttcccaacat

SEQ ID NO: 645054 - DNA, 33 bp, Homo sapien
atctgtgttttgtaattatggctttcccaacat

SEQ ID NO: 645055 - DNA, 33 bp, Homo sapien
ttactaggagctgtcaaatgtcaaaataacaac

SEQ ID NO: 645056 - DNA, 33 bp, Homo sapien
ttactaggagctgtcagatgtcaaaataacaac

SEQ ID NO: 645057 - DNA, 33 bp, Homo sapien
caaggggtttcaagaacgcaatagcctatgtag

SEQ ID NO: 645058 - DNA, 33 bp, Homo sapien
caaggggtttcaagaatgcaatagcctatgtag

SEQ ID NO: 645059 - DNA, 33 bp, Homo sapien
tggcaactttacattacaccattcattcagttt

SEQ ID NO: 645060 - DNA, 33 bp, Homo sapien
tggcaactttacattataccattcattcagttt

SEQ ID NO: 645061 - DNA, 33 bp, Homo sapien
catccttgtgaaaggaaagaagacacctcttac

SEQ ID NO: 645062 - DNA, 33 bp, Homo sapien
catccttgtgaaaggagagaagacacctcttac

SEQ ID NO: 645063 - DNA, 33 bp, Homo sapien
tcttgatttgagaaaaaagaaagattttgctga

SEQ ID NO: 645064 - DNA, 33 bp, Homo sapien
tcttgatttgagaaaagagaaagattttgctga

SEQ ID NO: 645065 - DNA, 33 bp, Homo sapien
tatgcattgggaaaacagtcaccttcttcagcc

SEQ ID NO: 645066 - DNA, 33 bp, Homo sapien
tatgcattgggaaaacggtcaccttcttcagcc

SEQ ID NO: 645067 - DNA, 33 bp, Homo sapien
agtgacggaggggataaaatgagtcatggccaa

SEQ ID NO: 645068 - DNA, 33 bp, Homo sapien
agtgacggaggggatataatgagtcatggccaa

SEQ ID NO: 645069 - DNA, 33 bp, Homo sapien
aatccagctgttgtgcaagatttatattcattt

SEQ ID NO: 645070 - DNA, 33 bp, Homo sapien
aatccagctgttgtgcgagatttatattcattt

SEQ ID NO: 645071 - DNA, 33 bp, Homo sapien
aggtttagggcttaacgacaagaaaatacaagt

SEQ ID NO: 645072 - DNA, 33 bp, Homo sapien
aggtttagggcttaactacaagaaaatacaagt

SEQ ID NO: 645073 - DNA, 33 bp, Homo sapien
cttttgcctaatttaactaaaacgatcctttaa

SEQ ID NO: 645074 - DNA, 33 bp, Homo sapien
cttttgcctaatttaagtaaaacgatcctttaa

SEQ ID NO: 645075 - DNA, 33 bp, Homo sapien
aagtgaaaatgcatgaagtattttttccagttt

SEQ ID NO: 645076 - DNA, 33 bp, Homo sapien
aagtgaaaatgcatgaggtattttttccagttt

SEQ ID NO: 645077 - DNA, 33 bp, Homo sapien
tttaatgtgctttccaatatcttcgctttaatt

SEQ ID NO: 645078 - DNA, 33 bp, Homo sapien
tttaatgtgctttccagtatcttcgctttaatt

SEQ ID NO: 645079 - DNA, 33 bp, Homo sapien
ggagtgaagaatcaaccctgaattaacactcac

SEQ ID NO: 645080 - DNA, 33 bp, Homo sapien
ggagtgaagaatcaactctgaattaacactcac

SEQ ID NO: 645081 - DNA, 33 bp, Homo sapien
aactaaattccgaggcacttcaaccatgtgaat

SEQ ID NO: 645082 - DNA, 33 bp, Homo sapien
aactaaattccgaggcgcttcaaccatgtgaat

SEQ ID NO: 645083 - DNA, 33 bp, Homo sapien
tccaggaggaaaataaaactgctattttggtta

SEQ ID NO: 645084 - DNA, 33 bp, Homo sapien
tccaggaggaaaataagactgctattttggtta

SEQ ID NO: 645085 - DNA, 33 bp, Homo sapien
caatatcaacacagacaagaaaatgagaagtaa

SEQ ID NO: 645086 - DNA, 33 bp, Homo sapien
caatatcaacacagactagaaaatgagaagtaa

SEQ ID NO: 645087 - DNA, 33 bp, Homo sapien
gggtaatggtagtagagtaaccacagtaatgtg

SEQ ID NO: 645088 - DNA, 33 bp, Homo sapien
gggtaatggtagtagattaaccacagtaatgtg

SEQ ID NO: 645089 - DNA, 33 bp, Homo sapien
ctatgtaccatgccaaagagtccggcagttatt

SEQ ID NO: 645090 - DNA, 33 bp, Homo sapien
ctatgtaccatgccaaggagtccggcagttatt

SEQ ID NO: 645091 - DNA, 33 bp, Homo sapien
ctcagatgctcaaaaactgatgaaccaggtagt

SEQ ID NO: 645092 - DNA, 33 bp, Homo sapien
ctcagatgctcaaaaattgatgaaccaggtagt

SEQ ID NO: 645093 - DNA, 33 bp, Homo sapien
ctatcctgatttacttcaacatgaatcagtaag

SEQ ID NO: 645094 - DNA, 33 bp, Homo sapien
ctatcctgatttactttaacatgaatcagtaag

SEQ ID NO: 645095 - DNA, 33 bp, Homo sapien
taaattagttccacgacaacaaatactgaaata

SEQ ID NO: 645096 - DNA, 33 bp, Homo sapien
taaattagttccacgataacaaatactgaaata

SEQ ID NO: 645097 - DNA, 33 bp, Homo sapien
atagttttggttttaacgctgttccttgaagta

SEQ ID NO: 645098 - DNA, 33 bp, Homo sapien
atagttttggttttaatgctgttccttgaagta

SEQ ID NO: 645099 - DNA, 33 bp, Homo sapien
tgcttttatgcataggcagagaagcaatcaaca

SEQ ID NO: 645100 - DNA, 33 bp, Homo sapien
tgcttttatgcataggtagagaagcaatcaaca

SEQ ID NO: 645101 - DNA, 33 bp, Homo sapien
tccacagtttggctaacagatggattcaataat

SEQ ID NO: 645102 - DNA, 33 bp, Homo sapien
tccacagtttggctaatagatggattcaataat

SEQ ID NO: 645103 - DNA, 33 bp, Homo sapien
gagaacatttttcccactatatttggagtcaga

SEQ ID NO: 645104 - DNA, 33 bp, Homo sapien
gagaacatttttcccattatatttggagtcaga

SEQ ID NO: 645105 - DNA, 33 bp, Homo sapien
agagtatgttttcagaaatttcagttataatag

SEQ ID NO: 645106 - DNA, 33 bp, Homo sapien
agagtatgttttcagatatttcagttataatag

SEQ ID NO: 645107 - DNA, 33 bp, Homo sapien
gctaaacaaaggaactcaggatgtggaaatgaa

SEQ ID NO: 645108 - DNA, 33 bp, Homo sapien
gctaaacaaaggaacttaggatgtggaaatgaa

SEQ ID NO: 645109 - DNA, 33 bp, Homo sapien
tacaagcaaacttattaaagaatcaccactaat

SEQ ID NO: 645110 - DNA, 33 bp, Homo sapien
tacaagcaaacttattgaagaatcaccactaat

SEQ ID NO: 645111 - DNA, 33 bp, Homo sapien
attcagataatgggacccaaatgaggttagtga

SEQ ID NO: 645112 - DNA, 33 bp, Homo sapien
attcagataatgggactcaaatgaggttagtga

SEQ ID NO: 645113 - DNA, 33 bp, Homo sapien
aaaagcttttcaagaaccccactagtccatcta

SEQ ID NO: 645114 - DNA, 33 bp, Homo sapien
aaaagcttttcaagaatcccactagtccatcta

SEQ ID NO: 645115 - DNA, 33 bp, Homo sapien
attaacccaactgaaaaggagatgaataattaa

SEQ ID NO: 645116 - DNA, 33 bp, Homo sapien
attaacccaactgaaacggagatgaataattaa

SEQ ID NO: 645117 - DNA, 33 bp, Homo sapien
ctcagttatggcacaaatgctgtgtgagcagtg

SEQ ID NO: 645118 - DNA, 33 bp, Homo sapien
ctcagttatggcacaagtgctgtgtgagcagtg

SEQ ID NO: 645119 - DNA, 33 bp, Homo sapien
ctgcacagtctaacaactatatgaacaaagaaa

SEQ ID NO: 645120 - DNA, 33 bp, Homo sapien
ctgcacagtctaacaattatatgaacaaagaaa

SEQ ID NO: 645121 - DNA, 33 bp, Homo sapien
gtgagaactcaatcatgaaacaacactaggggg

SEQ ID NO: 645122 - DNA, 33 bp, Homo sapien
gtgagaactcaatcattaaacaacactaggggg

SEQ ID NO: 645123 - DNA, 33 bp, Homo sapien
aatgcctagaaaagtacagaaagtaagcaatta

SEQ ID NO: 645124 - DNA, 33 bp, Homo sapien
aatgcctagaaaagtatagaaagtaagcaatta

SEQ ID NO: 645125 - DNA, 33 bp, Homo sapien
agacaaatgtctcacaatacagttacagaattt

SEQ ID NO: 645126 - DNA, 33 bp, Homo sapien
agacaaatgtctcacagtacagttacagaattt

SEQ ID NO: 645127 - DNA, 33 bp, Homo sapien
ataaatggatcttggaggtcataataattctga

SEQ ID NO: 645128 - DNA, 33 bp, Homo sapien
ataaatggatcttggatgtcataataattctga

SEQ ID NO: 645129 - DNA, 33 bp, Homo sapien
caaagtttgccacacactactttttaccacata

SEQ ID NO: 645130 - DNA, 33 bp, Homo sapien
caaagtttgccacacattactttttaccacata

SEQ ID NO: 645131 - DNA, 33 bp, Homo sapien
aggtttcaaaggaatgccaatcagttaaacatc

SEQ ID NO: 645132 - DNA, 33 bp, Homo sapien
aggtttcaaaggaatgtcaatcagttaaacatc

SEQ ID NO: 645133 - DNA, 33 bp, Homo sapien
acatatctcagcttaacatgcgtgggtgatgtg

SEQ ID NO: 645134 - DNA, 33 bp, Homo sapien
acatatctcagcttaatatgcgtgggtgatgtg

SEQ ID NO: 645135 - DNA, 33 bp, Homo sapien
cttgaaacatctggaacggctgagtgatctggt

SEQ ID NO: 645136 - DNA, 33 bp, Homo sapien
cttgaaacatctggaatggctgagtgatctggt

SEQ ID NO: 645137 - DNA, 33 bp, Homo sapien
catcatcaaggcccagaaatgaacaaggaaagt

SEQ ID NO: 645138 - DNA, 33 bp, Homo sapien
catcatcaaggcccaggaatgaacaaggaaagt

SEQ ID NO: 645139 - DNA, 33 bp, Homo sapien
ctgagctaacatccccaaggtattaggtttggc

SEQ ID NO: 645140 - DNA, 33 bp, Homo sapien
ctgagctaacatcccccaggtattaggtttggc

SEQ ID NO: 645141 - DNA, 33 bp, Homo sapien
tatagtatttcggcaaactttatgtttttaagg

SEQ ID NO: 645142 - DNA, 33 bp, Homo sapien
tatagtatttcggcaagctttatgtttttaagg

SEQ ID NO: 645143 - DNA, 33 bp, Homo sapien
aatgaaaaacaattataagtggactccaaagtt

SEQ ID NO: 645144 - DNA, 33 bp, Homo sapien
aatgaaaaacaattatgagtggactccaaagtt

SEQ ID NO: 645145 - DNA, 33 bp, Homo sapien
ataattagggttgttaagcatgttttcctacat

SEQ ID NO: 645146 - DNA, 33 bp, Homo sapien
ataattagggttgttatgcatgttttcctacat

SEQ ID NO: 645147 - DNA, 33 bp, Homo sapien
gagagacaattatcaccggttctcacataatat

SEQ ID NO: 645148 - DNA, 33 bp, Homo sapien
gagagacaattatcactggttctcacataatat

SEQ ID NO: 645149 - DNA, 33 bp, Homo sapien
gaaaatgactagcaacagtagaaaggctaaagc

SEQ ID NO: 645150 - DNA, 33 bp, Homo sapien
gaaaatgactagcaaccgtagaaaggctaaagc

SEQ ID NO: 645151 - DNA, 33 bp, Homo sapien
gaaggagagagtaactaaaaaccttccttgtct

SEQ ID NO: 645152 - DNA, 33 bp, Homo sapien
gaaggagagagtaacttaaaaccttccttgtct

SEQ ID NO: 645153 - DNA, 33 bp, Homo sapien
agtagacaaggcaaccaggggaagagtttagag

SEQ ID NO: 645154 - DNA, 33 bp, Homo sapien
agtagacaaggcaaccgggggaagagtttagag

SEQ ID NO: 645155 - DNA, 33 bp, Homo sapien
agacactcaaactttaccactccagccatcatc

SEQ ID NO: 645156 - DNA, 33 bp, Homo sapien
agacactcaaactttatcactccagccatcatc

SEQ ID NO: 645157 - DNA, 33 bp, Homo sapien
attcctattctccagaatactcttttccaaatt

SEQ ID NO: 645158 - DNA, 33 bp, Homo sapien
attcctattctccagagtactcttttccaaatt

SEQ ID NO: 645159 - DNA, 33 bp, Homo sapien
ctcgaaggttcctgcaattctaacatttgatct

SEQ ID NO: 645160 - DNA, 33 bp, Homo sapien
ctcgaaggttcctgcagttctaacatttgatct

SEQ ID NO: 645161 - DNA, 33 bp, Homo sapien
ttccttagctgatttacgggtcggcaattcaca

SEQ ID NO: 645162 - DNA, 33 bp, Homo sapien
ttccttagctgatttatgggtcggcaattcaca

SEQ ID NO: 645163 - DNA, 33 bp, Homo sapien
catgaaaatttgttaaggcttagtaccaacaga

SEQ ID NO: 645164 - DNA, 33 bp, Homo sapien
catgaaaatttgttaatgcttagtaccaacaga

SEQ ID NO: 645165 - DNA, 33 bp, Homo sapien
gttagatgaagactataagatacagcatttgca

SEQ ID NO: 645166 - DNA, 33 bp, Homo sapien
gttagatgaagactatcagatacagcatttgca

SEQ ID NO: 645167 - DNA, 33 bp, Homo sapien
acaataagagagaaacaagtaaagctttggaaa

SEQ ID NO: 645168 - DNA, 33 bp, Homo sapien
acaataagagagaaaccagtaaagctttggaaa

SEQ ID NO: 645169 - DNA, 33 bp, Homo sapien
gagttcatctcctgacagaaaacgaaagaaaac

SEQ ID NO: 645170 - DNA, 33 bp, Homo sapien
gagttcatctcctgacggaaaacgaaagaaaac

SEQ ID NO: 645171 - DNA, 33 bp, Homo sapien
attactagagaacgtcaaattgaagagtaaata

SEQ ID NO: 645172 - DNA, 33 bp, Homo sapien
attactagagaacgtctaattgaagagtaaata

SEQ ID NO: 645173 - DNA, 33 bp, Homo sapien
agggaaaattctctgacggaaataaaggcaaaa

SEQ ID NO: 645174 - DNA, 33 bp, Homo sapien
agggaaaattctctgatggaaataaaggcaaaa

SEQ ID NO: 645175 - DNA, 33 bp, Homo sapien
gcgccgatggtggaaacgggggaaaaatgtcaa

SEQ ID NO: 645176 - DNA, 33 bp, Homo sapien
gcgccgatggtggaaatgggggaaaaatgtcaa

SEQ ID NO: 645177 - DNA, 33 bp, Homo sapien
catgacaagtactatgcaagttctaaaaattaa

SEQ ID NO: 645178 - DNA, 33 bp, Homo sapien
catgacaagtactatgtaagttctaaaaattaa

SEQ ID NO: 645179 - DNA, 33 bp, Homo sapien
aactgaacataattccacttgtggtctaacaac

SEQ ID NO: 645180 - DNA, 33 bp, Homo sapien
aactgaacataattccccttgtggtctaacaac

SEQ ID NO: 645181 - DNA, 33 bp, Homo sapien
tccaaaatgtaatttccagtagcacacttctag

SEQ ID NO: 645182 - DNA, 33 bp, Homo sapien
tccaaaatgtaatttctagtagcacacttctag

SEQ ID NO: 645183 - DNA, 33 bp, Homo sapien
aagagtcccagtactaagatgaggtcgttttcc

SEQ ID NO: 645184 - DNA, 33 bp, Homo sapien
aagagtcccagtactatgatgaggtcgttttcc

SEQ ID NO: 645185 - DNA, 33 bp, Homo sapien
ctcaatgctttatctaaaatacgccaggcattt

SEQ ID NO: 645186 - DNA, 33 bp, Homo sapien
ctcaatgctttatctagaatacgccaggcattt

SEQ ID NO: 645187 - DNA, 33 bp, Homo sapien
ttcactggacacataaattaatcagtatatata

SEQ ID NO: 645188 - DNA, 33 bp, Homo sapien
ttcactggacacataatttaatcagtatatata

SEQ ID NO: 645189 - DNA, 33 bp, Homo sapien
tgagtcacaatagggaaaactgcccaaatccac

SEQ ID NO: 645190 - DNA, 33 bp, Homo sapien
tgagtcacaatagggacaactgcccaaatccac

SEQ ID NO: 645191 - DNA, 33 bp, Homo sapien
ttacttttgacaatgcagacacctgggtaatcc

SEQ ID NO: 645192 - DNA, 33 bp, Homo sapien
ttacttttgacaatgcggacacctgggtaatcc

SEQ ID NO: 645193 - DNA, 33 bp, Homo sapien
caagcaaacagatcaccatggtagaaatcagaa

SEQ ID NO: 645194 - DNA, 33 bp, Homo sapien
caagcaaacagatcacgatggtagaaatcagaa

SEQ ID NO: 645195 - DNA, 33 bp, Homo sapien
tcaaagtaagcaatccagaaaacaatgactgca

SEQ ID NO: 645196 - DNA, 33 bp, Homo sapien
tcaaagtaagcaatccggaaaacaatgactgca

SEQ ID NO: 645197 - DNA, 33 bp, Homo sapien
catgtgcttaagggaaaaaaagctcctgagact

SEQ ID NO: 645198 - DNA, 33 bp, Homo sapien
catgtgcttaagggaagaaaagctcctgagact

SEQ ID NO: 645199 - DNA, 33 bp, Homo sapien
ctgtctttaggtccaccacactgtcttccataa

SEQ ID NO: 645200 - DNA, 33 bp, Homo sapien
ctgtctttaggtccactacactgtcttccataa

SEQ ID NO: 645201 - DNA, 33 bp, Homo sapien
gagcgtgtgcatacctaagcagatcacaagagc

SEQ ID NO: 645202 - DNA, 33 bp, Homo sapien
gagcgtgtgcatacctgagcagatcacaagagc

SEQ ID NO: 645203 - DNA, 33 bp, Homo sapien
ttatctataggatatgccagaatatgcttaata

SEQ ID NO: 645204 - DNA, 33 bp, Homo sapien
ttatctataggatatgtcagaatatgcttaata

SEQ ID NO: 645205 - DNA, 33 bp, Homo sapien
ggaacactggaacttacatatgtctctctctac

SEQ ID NO: 645206 - DNA, 33 bp, Homo sapien
ggaacactggaacttatatatgtctctctctac

SEQ ID NO: 645207 - DNA, 33 bp, Homo sapien
atagacattggtagaaattagttccacccttaa

SEQ ID NO: 645208 - DNA, 33 bp, Homo sapien
atagacattggtagaagttagttccacccttaa

SEQ ID NO: 645209 - DNA, 33 bp, Homo sapien
tgtagggaaactctgcacttaacctatctctgt

SEQ ID NO: 645210 - DNA, 33 bp, Homo sapien
tgtagggaaactctgcgcttaacctatctctgt

SEQ ID NO: 645211 - DNA, 33 bp, Homo sapien
tgcataactgatttaacgtgagagaagaaagaa

SEQ ID NO: 645212 - DNA, 33 bp, Homo sapien
tgcataactgatttaatgtgagagaagaaagaa

SEQ ID NO: 645213 - DNA, 33 bp, Homo sapien
tgcatcgaatgctataatagactttttttctaa

SEQ ID NO: 645214 - DNA, 33 bp, Homo sapien
tgcatcgaatgctatagtagactttttttctaa

SEQ ID NO: 645215 - DNA, 33 bp, Homo sapien
ataaatgattgtaggcaaattgagaatttaatt

SEQ ID NO: 645216 - DNA, 33 bp, Homo sapien
ataaatgattgtaggctaattgagaatttaatt

SEQ ID NO: 645217 - DNA, 33 bp, Homo sapien
gagctgttagagaatcccatggcacaaagagct

SEQ ID NO: 645218 - DNA, 33 bp, Homo sapien
gagctgttagagaatctcatggcacaaagagct

SEQ ID NO: 645219 - DNA, 33 bp, Homo sapien
aaggccactcgtagtacgaaactcttcaagatt

SEQ ID NO: 645220 - DNA, 33 bp, Homo sapien
aaggccactcgtagtatgaaactcttcaagatt

SEQ ID NO: 645221 - DNA, 33 bp, Homo sapien
ctgatgtttttaaaaaaagttctcctgcacaag

SEQ ID NO: 645222 - DNA, 33 bp, Homo sapien
ctgatgtttttaaaaagagttctcctgcacaag

SEQ ID NO: 645223 - DNA, 33 bp, Homo sapien
ggctcacaggcagaaggaactcgccttgtctta

SEQ ID NO: 645224 - DNA, 33 bp, Homo sapien
ggctcacaggcagaagtaactcgccttgtctta

SEQ ID NO: 645225 - DNA, 33 bp, Homo sapien
cattggcttggcaatgcatttctgtcaatacct

SEQ ID NO: 645226 - DNA, 33 bp, Homo sapien
cattggcttggcaatgtatttctgtcaatacct

SEQ ID NO: 645227 - DNA, 33 bp, Homo sapien
tgtcttcagcataaaacttcagagaaagaagtt

SEQ ID NO: 645228 - DNA, 33 bp, Homo sapien
tgtcttcagcataaaatttcagagaaagaagtt

SEQ ID NO: 645229 - DNA, 33 bp, Homo sapien
gcattgtgctaggcaccgggtatgttcagagga

SEQ ID NO: 645230 - DNA, 33 bp, Homo sapien
gcattgtgctaggcactgggtatgttcagagga

SEQ ID NO: 645231 - DNA, 33 bp, Homo sapien
accatttttcatcggagaatttgtgaaacagaa

SEQ ID NO: 645232 - DNA, 33 bp, Homo sapien
accatttttcatcggataatttgtgaaacagaa

SEQ ID NO: 645233 - DNA, 33 bp, Homo sapien
aagattgtgttttgccaatgtgtactggtacaa

SEQ ID NO: 645234 - DNA, 33 bp, Homo sapien
aagattgtgttttgcccatgtgtactggtacaa

SEQ ID NO: 645235 - DNA, 33 bp, Homo sapien
gacctaattaacctaacgagtttctccacagca

SEQ ID NO: 645236 - DNA, 33 bp, Homo sapien
gacctaattaacctaaggagtttctccacagca

SEQ ID NO: 645237 - DNA, 33 bp, Homo sapien
ctttaaaatatagagacgaaacagagaattcga

SEQ ID NO: 645238 - DNA, 33 bp, Homo sapien
ctttaaaatatagagatgaaacagagaattcga

SEQ ID NO: 645239 - DNA, 33 bp, Homo sapien
atagatattagaaaccaagagaacatcaagtag

SEQ ID NO: 645240 - DNA, 33 bp, Homo sapien
atagatattagaaaccgagagaacatcaagtag

SEQ ID NO: 645241 - DNA, 33 bp, Homo sapien
atggagacaatttataagagagagcaccagtac

SEQ ID NO: 645242 - DNA, 33 bp, Homo sapien
atggagacaatttataggagagagcaccagtac

SEQ ID NO: 645243 - DNA, 33 bp, Homo sapien
atggagaaggagcaaacgaaagaaagagggatg

SEQ ID NO: 645244 - DNA, 33 bp, Homo sapien
atggagaaggagcaaaggaaagaaagagggatg

SEQ ID NO: 645245 - DNA, 33 bp, Homo sapien
cattggtattttaatacaagaggcagtggcact

SEQ ID NO: 645246 - DNA, 33 bp, Homo sapien
cattggtattttaatataagaggcagtggcact

SEQ ID NO: 645247 - DNA, 33 bp, Homo sapien
catacttagttgatgaaatctatacaatttatg

SEQ ID NO: 645248 - DNA, 33 bp, Homo sapien
catacttagttgatgatatctatacaatttatg

SEQ ID NO: 645249 - DNA, 33 bp, Homo sapien
atcttgattcaaatataaattgcaaaaaacggc

SEQ ID NO: 645250 - DNA, 33 bp, Homo sapien
atcttgattcaaatatcaattgcaaaaaacggc

SEQ ID NO: 645251 - DNA, 33 bp, Homo sapien
atgttgttatctatcacctttacaaaactttag

SEQ ID NO: 645252 - DNA, 33 bp, Homo sapien
atgttgttatctatcatctttacaaaactttag

SEQ ID NO: 645253 - DNA, 33 bp, Homo sapien
acttgcaatattctaaactccttgagtgtctat

SEQ ID NO: 645254 - DNA, 33 bp, Homo sapien
acttgcaatattctaatctccttgagtgtctat

SEQ ID NO: 645255 - DNA, 33 bp, Homo sapien
tcttaactggaatgcaaatacctctaatgccag

SEQ ID NO: 645256 - DNA, 33 bp, Homo sapien
tcttaactggaatgcagatacctctaatgccag

SEQ ID NO: 645257 - DNA, 33 bp, Homo sapien
caaactaaggactgaaaggtgtatgcctgagag

SEQ ID NO: 645258 - DNA, 33 bp, Homo sapien
caaactaaggactgaagggtgtatgcctgagag

SEQ ID NO: 645259 - DNA, 33 bp, Homo sapien
gcttcagaaacaaggaaatgtaagtcaaagagg

SEQ ID NO: 645260 - DNA, 33 bp, Homo sapien
gcttcagaaacaaggagatgtaagtcaaagagg

SEQ ID NO: 645261 - DNA, 33 bp, Homo sapien
attttgaagacccttacgtgtatgtatgtgtat

SEQ ID NO: 645262 - DNA, 33 bp, Homo sapien
attttgaagacccttatgtgtatgtatgtgtat

SEQ ID NO: 645263 - DNA, 33 bp, Homo sapien
aattgttccagtaggccaagcacagtggctcat

SEQ ID NO: 645264 - DNA, 33 bp, Homo sapien
aattgttccagtaggctaagcacagtggctcat

SEQ ID NO: 645265 - DNA, 33 bp, Homo sapien
tggcacattctgctcaatcttccacttcgacct

SEQ ID NO: 645266 - DNA, 33 bp, Homo sapien
tggcacattctgctcagtcttccacttcgacct

SEQ ID NO: 645267 - DNA, 33 bp, Homo sapien
gaagcaggatggacgacgatcccgtaagggtag

SEQ ID NO: 645268 - DNA, 33 bp, Homo sapien
gaagcaggatggacgatgatcccgtaagggtag

SEQ ID NO: 645269 - DNA, 33 bp, Homo sapien
ccaaagaagatatagagaaagcaataaacatac

SEQ ID NO: 645270 - DNA, 33 bp, Homo sapien
ccaaagaagatatagataaagcaataaacatac

SEQ ID NO: 645271 - DNA, 33 bp, Homo sapien
atcctgtcatttgtgacaaaatgggcaaagaaa

SEQ ID NO: 645272 - DNA, 33 bp, Homo sapien
atcctgtcatttgtgataaaatgggcaaagaaa

SEQ ID NO: 645273 - DNA, 33 bp, Homo sapien
ttattatagccattacagaaaaaactatggagg

SEQ ID NO: 645274 - DNA, 33 bp, Homo sapien
ttattatagccattacggaaaaaactatggagg

SEQ ID NO: 645275 - DNA, 33 bp, Homo sapien
agccatcaaatgtgaagaataaacctgcacaat

SEQ ID NO: 645276 - DNA, 33 bp, Homo sapien
agccatcaaatgtgaataataaacctgcacaat

SEQ ID NO: 645277 - DNA, 33 bp, Homo sapien
tttaatgtcttaagtccatctgtctcacttaaa

SEQ ID NO: 645278 - DNA, 33 bp, Homo sapien
tttaatgtcttaagtctatctgtctcacttaaa

SEQ ID NO: 645279 - DNA, 33 bp, Homo sapien
taggattgttcctgtacagggtgcctgaaaacc

SEQ ID NO: 645280 - DNA, 33 bp, Homo sapien
taggattgttcctgtatagggtgcctgaaaacc

SEQ ID NO: 645281 - DNA, 33 bp, Homo sapien
ctaagttttctggtccaaagagactgcggccac

SEQ ID NO: 645282 - DNA, 33 bp, Homo sapien
ctaagttttctggtccgaagagactgcggccac

SEQ ID NO: 645283 - DNA, 33 bp, Homo sapien
ggcagatgacagatgaaccagctcaagaaggga

SEQ ID NO: 645284 - DNA, 33 bp, Homo sapien
ggcagatgacagatgagccagctcaagaaggga

SEQ ID NO: 645285 - DNA, 33 bp, Homo sapien
agtgaggtacagaaacagtgaaattggttacag

SEQ ID NO: 645286 - DNA, 33 bp, Homo sapien
agtgaggtacagaaacggtgaaattggttacag

SEQ ID NO: 645287 - DNA, 33 bp, Homo sapien
tttgtaagggtttcagattaaacattttgtttt

SEQ ID NO: 645288 - DNA, 33 bp, Homo sapien
tttgtaagggtttcaggttaaacattttgtttt

SEQ ID NO: 645289 - DNA, 33 bp, Homo sapien
tagttttggctttgtacgtagagagtctctgtt

SEQ ID NO: 645290 - DNA, 33 bp, Homo sapien
tagttttggctttgtaggtagagagtctctgtt

SEQ ID NO: 645291 - DNA, 33 bp, Homo sapien
gataaaaacaccaagcacagataatcttttgtg

SEQ ID NO: 645292 - DNA, 33 bp, Homo sapien
gataaaaacaccaagcgcagataatcttttgtg

SEQ ID NO: 645293 - DNA, 33 bp, Homo sapien
gtcactttcttatttaactttgtagctgcatta

SEQ ID NO: 645294 - DNA, 33 bp, Homo sapien
gtcactttcttatttacctttgtagctgcatta

SEQ ID NO: 645295 - DNA, 33 bp, Homo sapien
aaaacaactataatcaagtgtagctttgctttc

SEQ ID NO: 645296 - DNA, 33 bp, Homo sapien
aaaacaactataatcaggtgtagctttgctttc

SEQ ID NO: 645297 - DNA, 33 bp, Homo sapien
ttcacagggtaaaatgaaacagcggggacatca

SEQ ID NO: 645298 - DNA, 33 bp, Homo sapien
ttcacagggtaaaatggaacagcggggacatca

SEQ ID NO: 645299 - DNA, 33 bp, Homo sapien
attatcaaaaattatgcaacaggagtgcagtat

SEQ ID NO: 645300 - DNA, 33 bp, Homo sapien
attatcaaaaattatgtaacaggagtgcagtat

SEQ ID NO: 645301 - DNA, 33 bp, Homo sapien
tcccacagcttatttaagttcattctattgcta

SEQ ID NO: 645302 - DNA, 33 bp, Homo sapien
tcccacagcttatttaggttcattctattgcta

SEQ ID NO: 645303 - DNA, 33 bp, Homo sapien
ccaatttattgcctaccagaaaacttatataat

SEQ ID NO: 645304 - DNA, 33 bp, Homo sapien
ccaatttattgcctacgagaaaacttatataat

SEQ ID NO: 645305 - DNA, 33 bp, Homo sapien
cttgcgtcagttctacacctgtaattatgtgga

SEQ ID NO: 645306 - DNA, 33 bp, Homo sapien
cttgcgtcagttctactcctgtaattatgtgga

SEQ ID NO: 645307 - DNA, 33 bp, Homo sapien
ggcactggcaatttaaatattagttgtttgcag

SEQ ID NO: 645308 - DNA, 33 bp, Homo sapien
ggcactggcaatttaagtattagttgtttgcag

SEQ ID NO: 645309 - DNA, 33 bp, Homo sapien
ttataatgtattgaaaccttccctaattgtaag

SEQ ID NO: 645310 - DNA, 33 bp, Homo sapien
ttataatgtattgaaatcttccctaattgtaag

SEQ ID NO: 645311 - DNA, 33 bp, Homo sapien
aggtgttcttaaaatcaagtgataaatcaatta

SEQ ID NO: 645312 - DNA, 33 bp, Homo sapien
aggtgttcttaaaatccagtgataaatcaatta

SEQ ID NO: 645313 - DNA, 33 bp, Homo sapien
aaattgcatttgtgggaaatttagttggcacag

SEQ ID NO: 645314 - DNA, 33 bp, Homo sapien
aaattgcatttgtgggcaatttagttggcacag

SEQ ID NO: 645315 - DNA, 33 bp, Homo sapien
ataggaatcactcttacagaagaaagatggaaa

SEQ ID NO: 645316 - DNA, 33 bp, Homo sapien
ataggaatcactcttatagaagaaagatggaaa

SEQ ID NO: 645317 - DNA, 33 bp, Homo sapien
actataaaatcaaataatatctcaaccctggca

SEQ ID NO: 645318 - DNA, 33 bp, Homo sapien
actataaaatcaaatagtatctcaaccctggca

SEQ ID NO: 645319 - DNA, 33 bp, Homo sapien
gtattttgcattggtaaaatagcagtgcacact

SEQ ID NO: 645320 - DNA, 33 bp, Homo sapien
gtattttgcattggtagaatagcagtgcacact

SEQ ID NO: 645321 - DNA, 33 bp, Homo sapien
atcttgtaatataaccaccactgcaggctatat

SEQ ID NO: 645322 - DNA, 33 bp, Homo sapien
atcttgtaatataaccgccactgcaggctatat

SEQ ID NO: 645323 - DNA, 33 bp, Homo sapien
ggctatgctttaatgaaatgctaaactcttgac

SEQ ID NO: 645324 - DNA, 33 bp, Homo sapien
ggctatgctttaatgagatgctaaactcttgac

SEQ ID NO: 645325 - DNA, 33 bp, Homo sapien
gtgtgtaaaaggctcaaatgggctatgctttaa

SEQ ID NO: 645326 - DNA, 33 bp, Homo sapien
gtgtgtaaaaggctcatatgggctatgctttaa

SEQ ID NO: 645327 - DNA, 33 bp, Homo sapien
ctgtcacctattagcacggaaatttttggcaag

SEQ ID NO: 645328 - DNA, 33 bp, Homo sapien
ctgtcacctattagcatggaaatttttggcaag

SEQ ID NO: 645329 - DNA, 33 bp, Homo sapien
gagtttttacagctacagaagctattatagata

SEQ ID NO: 645330 - DNA, 33 bp, Homo sapien
gagtttttacagctacggaagctattatagata

SEQ ID NO: 645331 - DNA, 33 bp, Homo sapien
gaaaatgaatttttggacatttgtgtatatgga

SEQ ID NO: 645332 - DNA, 33 bp, Homo sapien
gaaaatgaatttttgggcatttgtgtatatgga

SEQ ID NO: 645333 - DNA, 33 bp, Homo sapien
tatgatggatgttttaaccaagaactttgcatc

SEQ ID NO: 645334 - DNA, 33 bp, Homo sapien
tatgatggatgttttacccaagaactttgcatc

SEQ ID NO: 645335 - DNA, 33 bp, Homo sapien
taataaaagggttgaaagcaaagcctggtttct

SEQ ID NO: 645336 - DNA, 33 bp, Homo sapien
taataaaagggttgaatgcaaagcctggtttct

SEQ ID NO: 645337 - DNA, 33 bp, Homo sapien
ggttccctgtgtctgaagcttggactgagcgag

SEQ ID NO: 645338 - DNA, 33 bp, Homo sapien
ggttccctgtgtctgaggcttggactgagcgag

SEQ ID NO: 645339 - DNA, 33 bp, Homo sapien
gttaggttatccaggaaggatcatggtgaagag

SEQ ID NO: 645340 - DNA, 33 bp, Homo sapien
gttaggttatccaggagggatcatggtgaagag

SEQ ID NO: 645341 - DNA, 33 bp, Homo sapien
agaaaatgtgattggaccatagcactattgaga

SEQ ID NO: 645342 - DNA, 33 bp, Homo sapien
agaaaatgtgattggatcatagcactattgaga

SEQ ID NO: 645343 - DNA, 33 bp, Homo sapien
gtatcatgatgtgtaaccctgacactcttttga

SEQ ID NO: 645344 - DNA, 33 bp, Homo sapien
gtatcatgatgtgtaatcctgacactcttttga

SEQ ID NO: 645345 - DNA, 33 bp, Homo sapien
tgttttcccatttttgaaagtcacaatgtgtat

SEQ ID NO: 645346 - DNA, 33 bp, Homo sapien
tgttttcccatttttggaagtcacaatgtgtat

SEQ ID NO: 645347 - DNA, 33 bp, Homo sapien
aatattctcttctaaaccaaaggacattatatg

SEQ ID NO: 645348 - DNA, 33 bp, Homo sapien
aatattctcttctaaatcaaaggacattatatg

SEQ ID NO: 645349 - DNA, 33 bp, Homo sapien
ggagtggcctggttaacgtcaggtaaaaatcta

SEQ ID NO: 645350 - DNA, 33 bp, Homo sapien
ggagtggcctggttaatgtcaggtaaaaatcta

SEQ ID NO: 645351 - DNA, 33 bp, Homo sapien
tttccttcggggctataaaggatggcctgcata

SEQ ID NO: 645352 - DNA, 33 bp, Homo sapien
tttccttcggggctattaaggatggcctgcata

SEQ ID NO: 645353 - DNA, 33 bp, Homo sapien
tgttgccttgatacaaactaataatcttagtct

SEQ ID NO: 645354 - DNA, 33 bp, Homo sapien
tgttgccttgatacaagctaataatcttagtct

SEQ ID NO: 645355 - DNA, 33 bp, Homo sapien
attttcatgaatttagcagtctgtcttagctat

SEQ ID NO: 645356 - DNA, 33 bp, Homo sapien
attttcatgaatttaggagtctgtcttagctat

SEQ ID NO: 645357 - DNA, 33 bp, Homo sapien
agaattctgcatacacaagaaattttattcaag

SEQ ID NO: 645358 - DNA, 33 bp, Homo sapien
agaattctgcatacacgagaaattttattcaag

SEQ ID NO: 645359 - DNA, 33 bp, Homo sapien
acctattacgagtcaaaagctacttcagattaa

SEQ ID NO: 645360 - DNA, 33 bp, Homo sapien
acctattacgagtcaacagctacttcagattaa

SEQ ID NO: 645361 - DNA, 33 bp, Homo sapien
aatgcagtaagcaaacacagtaagagggtagaa

SEQ ID NO: 645362 - DNA, 33 bp, Homo sapien
aatgcagtaagcaaacgcagtaagagggtagaa

SEQ ID NO: 645363 - DNA, 33 bp, Homo sapien
gtccaccgattacacaactgccaaataaagtta

SEQ ID NO: 645364 - DNA, 33 bp, Homo sapien
gtccaccgattacacacctgccaaataaagtta

SEQ ID NO: 645365 - DNA, 33 bp, Homo sapien
cagaaagtgatgatgacaggagagtttcctatt

SEQ ID NO: 645366 - DNA, 33 bp, Homo sapien
cagaaagtgatgatgataggagagtttcctatt

SEQ ID NO: 645367 - DNA, 33 bp, Homo sapien
atgagaagtgtgtgataagaaaataacctagag

SEQ ID NO: 645368 - DNA, 33 bp, Homo sapien
atgagaagtgtgtgatgagaaaataacctagag

SEQ ID NO: 645369 - DNA, 33 bp, Homo sapien
atttcagtgacctcacagctacctagtgacatt

SEQ ID NO: 645370 - DNA, 33 bp, Homo sapien
atttcagtgacctcacggctacctagtgacatt

SEQ ID NO: 645371 - DNA, 33 bp, Homo sapien
ccttggtaaatagccaactgaggaaatacataa

SEQ ID NO: 645372 - DNA, 33 bp, Homo sapien
ccttggtaaatagccagctgaggaaatacataa

SEQ ID NO: 645373 - DNA, 33 bp, Homo sapien
gtaaagattaaactgaactgggatgaatgggat

SEQ ID NO: 645374 - DNA, 33 bp, Homo sapien
gtaaagattaaactgagctgggatgaatgggat

SEQ ID NO: 645375 - DNA, 33 bp, Homo sapien
gctgtacggtaatatcggaggcctctgcattga

SEQ ID NO: 645376 - DNA, 33 bp, Homo sapien
gctgtacggtaatatctgaggcctctgcattga

SEQ ID NO: 645377 - DNA, 33 bp, Homo sapien
atcagaaatgaagaagctgcataatgatgaagc

SEQ ID NO: 645378 - DNA, 33 bp, Homo sapien
atcagaaatgaagaagttgcataatgatgaagc

SEQ ID NO: 645379 - DNA, 33 bp, Homo sapien
gagttgtcatggcataaaaatgaatacagcagc

SEQ ID NO: 645380 - DNA, 33 bp, Homo sapien
gagttgtcatggcatacaaatgaatacagcagc

SEQ ID NO: 645381 - DNA, 33 bp, Homo sapien
acaaacatacaaatcaatgaaagagtccaaaac

SEQ ID NO: 645382 - DNA, 33 bp, Homo sapien
acaaacatacaaatcattgaaagagtccaaaac

SEQ ID NO: 645383 - DNA, 33 bp, Homo sapien
actgtactgagtactgcagacaatgttaaataa

SEQ ID NO: 645384 - DNA, 33 bp, Homo sapien
actgtactgagtactgtagacaatgttaaataa

SEQ ID NO: 645385 - DNA, 33 bp, Homo sapien
gtcttcagagaaaaggaaatgtctatacacttg

SEQ ID NO: 645386 - DNA, 33 bp, Homo sapien
gtcttcagagaaaagggaatgtctatacacttg

SEQ ID NO: 645387 - DNA, 33 bp, Homo sapien
cttgtttggagaaatacctagttagactttttg

SEQ ID NO: 645388 - DNA, 33 bp, Homo sapien
cttgtttggagaaatatctagttagactttttg

SEQ ID NO: 645389 - DNA, 33 bp, Homo sapien
ataaagtggctgtgaacatttaatttgcgaata

SEQ ID NO: 645390 - DNA, 33 bp, Homo sapien
ataaagtggctgtgaagatttaatttgcgaata

SEQ ID NO: 645391 - DNA, 33 bp, Homo sapien
gtacttgggtccttacagagttaaaccttatat

SEQ ID NO: 645392 - DNA, 33 bp, Homo sapien
gtacttgggtccttactgagttaaaccttatat

SEQ ID NO: 645393 - DNA, 33 bp, Homo sapien
ttgtgtgtttcatgcacatcgattctcccattc

SEQ ID NO: 645394 - DNA, 33 bp, Homo sapien
ttgtgtgtttcatgcatatcgattctcccattc

SEQ ID NO: 645395 - DNA, 33 bp, Homo sapien
gaatttcttagtttcaagtgaaagctcatttta

SEQ ID NO: 645396 - DNA, 33 bp, Homo sapien
gaatttcttagtttcaggtgaaagctcatttta

SEQ ID NO: 645397 - DNA, 33 bp, Homo sapien
ttaatgtgctttaaatcagaagtgttcagggag

SEQ ID NO: 645398 - DNA, 33 bp, Homo sapien
ttaatgtgctttaaattagaagtgttcagggag

SEQ ID NO: 645399 - DNA, 33 bp, Homo sapien
aagtaatcattaaaaaaattggccacattgtct

SEQ ID NO: 645400 - DNA, 33 bp, Homo sapien
aagtaatcattaaaaatattggccacattgtct

SEQ ID NO: 645401 - DNA, 33 bp, Homo sapien
tttttgttgacttaaagaagtttcaccttggat

SEQ ID NO: 645402 - DNA, 33 bp, Homo sapien
tttttgttgacttaaataagtttcaccttggat

SEQ ID NO: 645403 - DNA, 33 bp, Homo sapien
agtgtggaatttatgcacagaaaaatgttaaga

SEQ ID NO: 645404 - DNA, 33 bp, Homo sapien
agtgtggaatttatgcgcagaaaaatgttaaga

SEQ ID NO: 645405 - DNA, 33 bp, Homo sapien
tttttcagatacgtaaactgactagcacaggtt

SEQ ID NO: 645406 - DNA, 33 bp, Homo sapien
tttttcagatacgtaagctgactagcacaggtt

SEQ ID NO: 645407 - DNA, 33 bp, Homo sapien
gtggtttttgaagatacctaccactgcaaggtt

SEQ ID NO: 645408 - DNA, 33 bp, Homo sapien
gtggtttttgaagatatctaccactgcaaggtt

SEQ ID NO: 645409 - DNA, 33 bp, Homo sapien
cagctgacaatacttacaccacaggaatttaat

SEQ ID NO: 645410 - DNA, 33 bp, Homo sapien
cagctgacaatacttataccacaggaatttaat

SEQ ID NO: 645411 - DNA, 33 bp, Homo sapien
cagtgagtgagggttacaattactctgaattcc

SEQ ID NO: 645412 - DNA, 33 bp, Homo sapien
cagtgagtgagggttataattactctgaattcc

SEQ ID NO: 645413 - DNA, 33 bp, Homo sapien
acctcccaacatcaccacattggagattaatat

SEQ ID NO: 645414 - DNA, 33 bp, Homo sapien
acctcccaacatcaccgcattggagattaatat

SEQ ID NO: 645415 - DNA, 33 bp, Homo sapien
tgtgactattcaaaaaattttattccaaccaga

SEQ ID NO: 645416 - DNA, 33 bp, Homo sapien
tgtgactattcaaaaagttttattccaaccaga

SEQ ID NO: 645417 - DNA, 33 bp, Homo sapien
gtacccttaatgctacaatttcttgaaaatctg

SEQ ID NO: 645418 - DNA, 33 bp, Homo sapien
gtacccttaatgctaccatttcttgaaaatctg

SEQ ID NO: 645419 - DNA, 33 bp, Homo sapien
aatgtactcctgtgataaatactgaactattta

SEQ ID NO: 645420 - DNA, 33 bp, Homo sapien
aatgtactcctgtgatgaatactgaactattta

SEQ ID NO: 645421 - DNA, 33 bp, Homo sapien
ctcagtacatcacttgaaattttctgggggatg

SEQ ID NO: 645422 - DNA, 33 bp, Homo sapien
ctcagtacatcacttgcaattttctgggggatg

SEQ ID NO: 645423 - DNA, 33 bp, Homo sapien
tagggagtacaaaaaaattactagtaagactgt

SEQ ID NO: 645424 - DNA, 33 bp, Homo sapien
tagggagtacaaaaaagttactagtaagactgt

SEQ ID NO: 645425 - DNA, 33 bp, Homo sapien
acgctgctcctagtaccactccagatggatttt

SEQ ID NO: 645426 - DNA, 33 bp, Homo sapien
acgctgctcctagtactactccagatggatttt

SEQ ID NO: 645427 - DNA, 33 bp, Homo sapien
tttacttatggagatactagttctaagccattc

SEQ ID NO: 645428 - DNA, 33 bp, Homo sapien
tttacttatggagatagtagttctaagccattc

SEQ ID NO: 645429 - DNA, 33 bp, Homo sapien
aagagacttaaaaaaacttggaagtgctaaatt

SEQ ID NO: 645430 - DNA, 33 bp, Homo sapien
aagagacttaaaaaaatttggaagtgctaaatt

SEQ ID NO: 645431 - DNA, 33 bp, Homo sapien
agcttctcaagtatacacagtggcttctctgtt

SEQ ID NO: 645432 - DNA, 33 bp, Homo sapien
agcttctcaagtatacccagtggcttctctgtt

SEQ ID NO: 645433 - DNA, 33 bp, Homo sapien
gctgcaaaatggcaaacatgatctcagtaagga

SEQ ID NO: 645434 - DNA, 33 bp, Homo sapien
gctgcaaaatggcaaatatgatctcagtaagga

SEQ ID NO: 645435 - DNA, 33 bp, Homo sapien
ctccatattgtagaagcctccatcatgttgaaa

SEQ ID NO: 645436 - DNA, 33 bp, Homo sapien
ctccatattgtagaaggctccatcatgttgaaa

SEQ ID NO: 645437 - DNA, 33 bp, Homo sapien
tatgccctcattgggaaatagagtcttttcaga

SEQ ID NO: 645438 - DNA, 33 bp, Homo sapien
tatgccctcattgggatatagagtcttttcaga

SEQ ID NO: 645439 - DNA, 33 bp, Homo sapien
cctgtatgacttcataataatttgattctatct

SEQ ID NO: 645440 - DNA, 33 bp, Homo sapien
cctgtatgacttcatattaatttgattctatct

SEQ ID NO: 645441 - DNA, 33 bp, Homo sapien
tggtattctcgggtcaaaattgtcaatgtattt

SEQ ID NO: 645442 - DNA, 33 bp, Homo sapien
tggtattctcgggtcacaattgtcaatgtattt

SEQ ID NO: 645443 - DNA, 33 bp, Homo sapien
cagttgaaaatattgacgacctcagtgtaggtg

SEQ ID NO: 645444 - DNA, 33 bp, Homo sapien
cagttgaaaatattgatgacctcagtgtaggtg

SEQ ID NO: 645445 - DNA, 33 bp, Homo sapien
atgtctaattaaaaaaacatatccaaatccagg

SEQ ID NO: 645446 - DNA, 33 bp, Homo sapien
atgtctaattaaaaaaccatatccaaatccagg

SEQ ID NO: 645447 - DNA, 33 bp, Homo sapien
gtgttggttaaacataatatcacacatacacac

SEQ ID NO: 645448 - DNA, 33 bp, Homo sapien
gtgttggttaaacatagtatcacacatacacac

SEQ ID NO: 645449 - DNA, 33 bp, Homo sapien
catgaggttcatgttcactatataccacagtta

SEQ ID NO: 645450 - DNA, 33 bp, Homo sapien
catgaggttcatgttcgctatataccacagtta

SEQ ID NO: 645451 - DNA, 33 bp, Homo sapien
taacaatcagaatcagacaaatatgaaaggcca

SEQ ID NO: 645452 - DNA, 33 bp, Homo sapien
taacaatcagaatcaggcaaatatgaaaggcca

SEQ ID NO: 645453 - DNA, 33 bp, Homo sapien
ggaacaagcagaaatccaggttgagctaattag

SEQ ID NO: 645454 - DNA, 33 bp, Homo sapien
ggaacaagcagaaatctaggttgagctaattag

SEQ ID NO: 645455 - DNA, 33 bp, Homo sapien
ctaaaaagcctctgcacggcaacagaaataatc

SEQ ID NO: 645456 - DNA, 33 bp, Homo sapien
ctaaaaagcctctgcatggcaacagaaataatc

SEQ ID NO: 645457 - DNA, 33 bp, Homo sapien
caacctacttcgatggaaaattcaaagactcta

SEQ ID NO: 645458 - DNA, 33 bp, Homo sapien
caacctacttcgatgggaaattcaaagactcta

SEQ ID NO: 645459 - DNA, 33 bp, Homo sapien
atgatgtggattataaatcttgaaagccatttg

SEQ ID NO: 645460 - DNA, 33 bp, Homo sapien
atgatgtggattataagtcttgaaagccatttg

SEQ ID NO: 645461 - DNA, 33 bp, Homo sapien
taattgtcagcacgaacgtttcataggtaaaaa

SEQ ID NO: 645462 - DNA, 33 bp, Homo sapien
taattgtcagcacgaatgtttcataggtaaaaa

SEQ ID NO: 645463 - DNA, 33 bp, Homo sapien
aaagagaaaattgtaaatgaagtagtatcaagc

SEQ ID NO: 645464 - DNA, 33 bp, Homo sapien
aaagagaaaattgtaattgaagtagtatcaagc

SEQ ID NO: 645465 - DNA, 33 bp, Homo sapien
aagataaacagttgcacagcctgacaaattttt

SEQ ID NO: 645466 - DNA, 33 bp, Homo sapien
aagataaacagttgcagagcctgacaaattttt

SEQ ID NO: 645467 - DNA, 33 bp, Homo sapien
agtatgctaatcaagacgtccataggcttttat

SEQ ID NO: 645468 - DNA, 33 bp, Homo sapien
agtatgctaatcaagatgtccataggcttttat

SEQ ID NO: 645469 - DNA, 33 bp, Homo sapien
tttttaactgtcaagaatccagaacctttatgt

SEQ ID NO: 645470 - DNA, 33 bp, Homo sapien
tttttaactgtcaagactccagaacctttatgt

SEQ ID NO: 645471 - DNA, 33 bp, Homo sapien
tactgatcttggaaagacataaagcaataatga

SEQ ID NO: 645472 - DNA, 33 bp, Homo sapien
tactgatcttggaaaggcataaagcaataatga

SEQ ID NO: 645473 - DNA, 33 bp, Homo sapien
atgcaaataattgttaactgaatcactgcaggt

SEQ ID NO: 645474 - DNA, 33 bp, Homo sapien
atgcaaataattgttagctgaatcactgcaggt

SEQ ID NO: 645475 - DNA, 33 bp, Homo sapien
tttttgccttcaactaagtaagtattcatcaac

SEQ ID NO: 645476 - DNA, 33 bp, Homo sapien
tttttgccttcaactatgtaagtattcatcaac

SEQ ID NO: 645477 - DNA, 33 bp, Homo sapien
cgagctctgaaattgccattgtcttgtatttga

SEQ ID NO: 645478 - DNA, 33 bp, Homo sapien
cgagctctgaaattgctattgtcttgtatttga

SEQ ID NO: 645479 - DNA, 33 bp, Homo sapien
acgctggtaagtccaacacaggaaatactacaa

SEQ ID NO: 645480 - DNA, 33 bp, Homo sapien
acgctggtaagtccaagacaggaaatactacaa

SEQ ID NO: 645481 - DNA, 33 bp, Homo sapien
cagtgagaggggacccaaaagtgagttgtcagc

SEQ ID NO: 645482 - DNA, 33 bp, Homo sapien
cagtgagaggggacccgaaagtgagttgtcagc

SEQ ID NO: 645483 - DNA, 33 bp, Homo sapien
tttcttgattgatgagaagttcgtgatgtggaa

SEQ ID NO: 645484 - DNA, 33 bp, Homo sapien
tttcttgattgatgaggagttcgtgatgtggaa

SEQ ID NO: 645485 - DNA, 33 bp, Homo sapien
taaatataaaaacacaatgatagaaaggaagga

SEQ ID NO: 645486 - DNA, 33 bp, Homo sapien
taaatataaaaacacagtgatagaaaggaagga

SEQ ID NO: 645487 - DNA, 33 bp, Homo sapien
agcaaaaactgtgtacaacttatggagcattgt

SEQ ID NO: 645488 - DNA, 33 bp, Homo sapien
agcaaaaactgtgtaccacttatggagcattgt

SEQ ID NO: 645489 - DNA, 33 bp, Homo sapien
cacacagacgtacttacgtgtaattaggcagct

SEQ ID NO: 645490 - DNA, 33 bp, Homo sapien
cacacagacgtacttatgtgtaattaggcagct

SEQ ID NO: 645491 - DNA, 33 bp, Homo sapien
ttagcaatgcctgccaggtactccagacacggg

SEQ ID NO: 645492 - DNA, 33 bp, Homo sapien
ttagcaatgcctgccatgtactccagacacggg

SEQ ID NO: 645493 - DNA, 33 bp, Homo sapien
cagataaagattcgctcactcacccattgctca

SEQ ID NO: 645494 - DNA, 33 bp, Homo sapien
cagataaagattcgcttactcacccattgctca

SEQ ID NO: 645495 - DNA, 33 bp, Homo sapien
acaaaaaaaaaatgtacagtggcaaagtcttca

SEQ ID NO: 645496 - DNA, 33 bp, Homo sapien
acaaaaaaaaaatgtatagtggcaaagtcttca

SEQ ID NO: 645497 - DNA, 33 bp, Homo sapien
atactctgcactagatgagaaaatggccaacta

SEQ ID NO: 645498 - DNA, 33 bp, Homo sapien
atactctgcactagattagaaaatggccaacta

SEQ ID NO: 645499 - DNA, 33 bp, Homo sapien
gacagagctcacggtacgcatagagaaatcatt

SEQ ID NO: 645500 - DNA, 33 bp, Homo sapien
gacagagctcacggtatgcatagagaaatcatt

SEQ ID NO: 645501 - DNA, 33 bp, Homo sapien
ctaaattttgactgccacaccttgaagcaatga

SEQ ID NO: 645502 - DNA, 33 bp, Homo sapien
ctaaattttgactgccgcaccttgaagcaatga

SEQ ID NO: 645503 - DNA, 33 bp, Homo sapien
atgatgtttagaaagcaaaatggtatgttcatt

SEQ ID NO: 645504 - DNA, 33 bp, Homo sapien
atgatgtttagaaagcgaaatggtatgttcatt

SEQ ID NO: 645505 - DNA, 33 bp, Homo sapien
ttgctatttatcttgactatcctccagtctcta

SEQ ID NO: 645506 - DNA, 33 bp, Homo sapien
ttgctatttatcttgagtatcctccagtctcta

SEQ ID NO: 645507 - DNA, 33 bp, Homo sapien
atcctttgtaattctaaagaactgtcacaacaa

SEQ ID NO: 645508 - DNA, 33 bp, Homo sapien
atcctttgtaattctatagaactgtcacaacaa

SEQ ID NO: 645509 - DNA, 33 bp, Homo sapien
ccatcttcatggtctgcattcttagagagatgt

SEQ ID NO: 645510 - DNA, 33 bp, Homo sapien
ccatcttcatggtctgtattcttagagagatgt

SEQ ID NO: 645511 - DNA, 33 bp, Homo sapien
tgacctaaacttggaagtgatgtttcagatgtt

SEQ ID NO: 645512 - DNA, 33 bp, Homo sapien
tgacctaaacttggaattgatgtttcagatgtt

SEQ ID NO: 645513 - DNA, 33 bp, Homo sapien
ttgcaactttatgtaaacctaaaattatttgta

SEQ ID NO: 645514 - DNA, 33 bp, Homo sapien
ttgcaactttatgtaagcctaaaattatttgta

SEQ ID NO: 645515 - DNA, 33 bp, Homo sapien
gtatacggagtgaccaaatagtggtggagtgag

SEQ ID NO: 645516 - DNA, 33 bp, Homo sapien
gtatacggagtgaccagatagtggtggagtgag

SEQ ID NO: 645517 - DNA, 33 bp, Homo sapien
aatttgatggccccagaaactgagaatccagaa

SEQ ID NO: 645518 - DNA, 33 bp, Homo sapien
aatttgatggccccaggaactgagaatccagaa

SEQ ID NO: 645519 - DNA, 33 bp, Homo sapien
atgacgttgtattgccggatgactcaatttttt

SEQ ID NO: 645520 - DNA, 33 bp, Homo sapien
atgacgttgtattgcctgatgactcaatttttt

SEQ ID NO: 645521 - DNA, 33 bp, Homo sapien
gtgtgggtcaaagagacgatacaaagaatcaga

SEQ ID NO: 645522 - DNA, 33 bp, Homo sapien
gtgtgggtcaaagagatgatacaaagaatcaga

SEQ ID NO: 645523 - DNA, 33 bp, Homo sapien
aacactctcaccacaactatgtgtactaatcaa

SEQ ID NO: 645524 - DNA, 33 bp, Homo sapien
aacactctcaccacaattatgtgtactaatcaa

SEQ ID NO: 645525 - DNA, 33 bp, Homo sapien
ttagttcttataattacatcgatgatccattta

SEQ ID NO: 645526 - DNA, 33 bp, Homo sapien
ttagttcttataattatatcgatgatccattta

SEQ ID NO: 645527 - DNA, 33 bp, Homo sapien
atacattgactcatggaaggttggctagtagag

SEQ ID NO: 645528 - DNA, 33 bp, Homo sapien
atacattgactcatggtaggttggctagtagag

SEQ ID NO: 645529 - DNA, 33 bp, Homo sapien
tagtgtagtttctccacgcttacttgtctcagc

SEQ ID NO: 645530 - DNA, 33 bp, Homo sapien
tagtgtagtttctccatgcttacttgtctcagc

SEQ ID NO: 645531 - DNA, 33 bp, Homo sapien
gattattttttctatcaagcctcagtttttttt

SEQ ID NO: 645532 - DNA, 33 bp, Homo sapien
gattattttttctatcgagcctcagtttttttt

SEQ ID NO: 645533 - DNA, 33 bp, Homo sapien
ttgatattgatattagaagaggttattccatgt

SEQ ID NO: 645534 - DNA, 33 bp, Homo sapien
ttgatattgatattaggagaggttattccatgt

SEQ ID NO: 645535 - DNA, 33 bp, Homo sapien
gtctgacgataagcagaagaaagtcatttttat

SEQ ID NO: 645536 - DNA, 33 bp, Homo sapien
gtctgacgataagcaggagaaagtcatttttat

SEQ ID NO: 645537 - DNA, 33 bp, Homo sapien
aaaattacatctctaacgcattaatcttccaat

SEQ ID NO: 645538 - DNA, 33 bp, Homo sapien
aaaattacatctctaatgcattaatcttccaat

SEQ ID NO: 645539 - DNA, 33 bp, Homo sapien
gcctttaggcctttgaagaatcaagacactatc

SEQ ID NO: 645540 - DNA, 33 bp, Homo sapien
gcctttaggcctttgaggaatcaagacactatc

SEQ ID NO: 645541 - DNA, 33 bp, Homo sapien
ttcagtaactgtttagaccaacaagagctaatg

SEQ ID NO: 645542 - DNA, 33 bp, Homo sapien
ttcagtaactgtttaggccaacaagagctaatg

SEQ ID NO: 645543 - DNA, 33 bp, Homo sapien
atggatcagttggcaccactcagatcaataaac

SEQ ID NO: 645544 - DNA, 33 bp, Homo sapien
atggatcagttggcacgactcagatcaataaac

SEQ ID NO: 645545 - DNA, 33 bp, Homo sapien
acttttcttctccaaaaccattcttttcatttt

SEQ ID NO: 645546 - DNA, 33 bp, Homo sapien
acttttcttctccaaatccattcttttcatttt

SEQ ID NO: 645547 - DNA, 33 bp, Homo sapien
ttgacactgctattaaaaattgcctaagagtat

SEQ ID NO: 645548 - DNA, 33 bp, Homo sapien
ttgacactgctattaagaattgcctaagagtat

SEQ ID NO: 645549 - DNA, 33 bp, Homo sapien
attaatgggcatgttaccagggacatggacagg

SEQ ID NO: 645550 - DNA, 33 bp, Homo sapien
attaatgggcatgttatcagggacatggacagg

SEQ ID NO: 645551 - DNA, 33 bp, Homo sapien
ggatgaatttctagcacaagtatcacttcaaag

SEQ ID NO: 645552 - DNA, 33 bp, Homo sapien
ggatgaatttctagcataagtatcacttcaaag

SEQ ID NO: 645553 - DNA, 33 bp, Homo sapien
gatttggagtctgttaacccattcttcgtcgat

SEQ ID NO: 645554 - DNA, 33 bp, Homo sapien
gatttggagtctgttagcccattcttcgtcgat

SEQ ID NO: 645555 - DNA, 33 bp, Homo sapien
ttttactgggtatagaatcattgtttgccaggt

SEQ ID NO: 645556 - DNA, 33 bp, Homo sapien
ttttactgggtatagattcattgtttgccaggt

SEQ ID NO: 645557 - DNA, 33 bp, Homo sapien
gttggtggaagtatgaagtagttcaaccattgt

SEQ ID NO: 645558 - DNA, 33 bp, Homo sapien
gttggtggaagtatgaggtagttcaaccattgt

SEQ ID NO: 645559 - DNA, 33 bp, Homo sapien
taagataattgccccaaaactatgcatatttct

SEQ ID NO: 645560 - DNA, 33 bp, Homo sapien
taagataattgccccagaactatgcatatttct

SEQ ID NO: 645561 - DNA, 33 bp, Homo sapien
taacaatgagaatgcaaggataaaaagagagga

SEQ ID NO: 645562 - DNA, 33 bp, Homo sapien
taacaatgagaatgcatggataaaaagagagga

SEQ ID NO: 645563 - DNA, 33 bp, Homo sapien
ttggtctgacatctaacgtgtcattgccaaact

SEQ ID NO: 645564 - DNA, 33 bp, Homo sapien
ttggtctgacatctaatgtgtcattgccaaact

SEQ ID NO: 645565 - DNA, 33 bp, Homo sapien
gtctatacataaactcaaaaaagcacaaatata

SEQ ID NO: 645566 - DNA, 33 bp, Homo sapien
gtctatacataaactcgaaaaagcacaaatata

SEQ ID NO: 645567 - DNA, 33 bp, Homo sapien
tatataattagaagaactcacttatcaagtttt

SEQ ID NO: 645568 - DNA, 33 bp, Homo sapien
tatataattagaagaagtcacttatcaagtttt

SEQ ID NO: 645569 - DNA, 33 bp, Homo sapien
gtagaagttggcttaaagataatgacgattatt

SEQ ID NO: 645570 - DNA, 33 bp, Homo sapien
gtagaagttggcttaaggataatgacgattatt

SEQ ID NO: 645571 - DNA, 33 bp, Homo sapien
tacatgatgatgggaaagtgactaataacattt

SEQ ID NO: 645572 - DNA, 33 bp, Homo sapien
tacatgatgatgggaatgtgactaataacattt

SEQ ID NO: 645573 - DNA, 33 bp, Homo sapien
tgggaaagttcattaacggtggagagggcaaga

SEQ ID NO: 645574 - DNA, 33 bp, Homo sapien
tgggaaagttcattaatggtggagagggcaaga

SEQ ID NO: 645575 - DNA, 33 bp, Homo sapien
attatgttaaggattaggggaaactcttgagta

SEQ ID NO: 645576 - DNA, 33 bp, Homo sapien
attatgttaaggattatgggaaactcttgagta

SEQ ID NO: 645577 - DNA, 33 bp, Homo sapien
ctgtcccatgagttataaacttccttgtacttc

SEQ ID NO: 645578 - DNA, 33 bp, Homo sapien
ctgtcccatgagttattaacttccttgtacttc

SEQ ID NO: 645579 - DNA, 33 bp, Homo sapien
taaatgtcgataaccacggaaaggtgatatgtc

SEQ ID NO: 645580 - DNA, 33 bp, Homo sapien
taaatgtcgataaccatggaaaggtgatatgtc

SEQ ID NO: 645581 - DNA, 33 bp, Homo sapien
cattttagtgcctatggagataattgcaaatag

SEQ ID NO: 645582 - DNA, 33 bp, Homo sapien
cattttagtgcctatgtagataattgcaaatag

SEQ ID NO: 645583 - DNA, 33 bp, Homo sapien
cctattctgctgtgcactaacactataattctc

SEQ ID NO: 645584 - DNA, 33 bp, Homo sapien
cctattctgctgtgcattaacactataattctc

SEQ ID NO: 645585 - DNA, 33 bp, Homo sapien
agcttaaatttcattgcagtggatgtttctaaa

SEQ ID NO: 645586 - DNA, 33 bp, Homo sapien
agcttaaatttcattgtagtggatgtttctaaa

SEQ ID NO: 645587 - DNA, 33 bp, Homo sapien
tcatctgaataggatccatgtggaaatagccac

SEQ ID NO: 645588 - DNA, 33 bp, Homo sapien
tcatctgaataggatctatgtggaaatagccac

SEQ ID NO: 645589 - DNA, 33 bp, Homo sapien
gggcaaggaatagccaatctttaaacagaatct

SEQ ID NO: 645590 - DNA, 33 bp, Homo sapien
gggcaaggaatagccagtctttaaacagaatct

SEQ ID NO: 645591 - DNA, 33 bp, Homo sapien
gactaatgatcaaataagaaaggcaaaatggac

SEQ ID NO: 645592 - DNA, 33 bp, Homo sapien
gactaatgatcaaatacgaaaggcaaaatggac

SEQ ID NO: 645593 - DNA, 33 bp, Homo sapien
tacatagtcacctatccatgttacgtatgtaag

SEQ ID NO: 645594 - DNA, 33 bp, Homo sapien
tacatagtcacctatcgatgttacgtatgtaag

SEQ ID NO: 645595 - DNA, 33 bp, Homo sapien
actgctggttgcttaaactgccagcagcagata

SEQ ID NO: 645596 - DNA, 33 bp, Homo sapien
actgctggttgcttaatctgccagcagcagata

SEQ ID NO: 645597 - DNA, 33 bp, Homo sapien
ttaccatacaatctgaacttcccatgttgaact

SEQ ID NO: 645598 - DNA, 33 bp, Homo sapien
ttaccatacaatctgagcttcccatgttgaact

SEQ ID NO: 645599 - DNA, 33 bp, Homo sapien
atccttcctgaatacactgatgctatatgccaa

SEQ ID NO: 645600 - DNA, 33 bp, Homo sapien
atccttcctgaatacagtgatgctatatgccaa

SEQ ID NO: 645601 - DNA, 33 bp, Homo sapien
acatagatacctcataacatctgtagccagttt

SEQ ID NO: 645602 - DNA, 33 bp, Homo sapien
acatagatacctcataccatctgtagccagttt

SEQ ID NO: 645603 - DNA, 33 bp, Homo sapien
gacagatcctgtaacaaccctgtctatttaggt

SEQ ID NO: 645604 - DNA, 33 bp, Homo sapien
gacagatcctgtaacatccctgtctatttaggt

SEQ ID NO: 645605 - DNA, 33 bp, Homo sapien
catttctgtgtgacaaagtctaattatctctcc

SEQ ID NO: 645606 - DNA, 33 bp, Homo sapien
catttctgtgtgacaatgtctaattatctctcc

SEQ ID NO: 645607 - DNA, 33 bp, Homo sapien
tgttatattattttgaccccaaatttgataaca

SEQ ID NO: 645608 - DNA, 33 bp, Homo sapien
tgttatattattttgatcccaaatttgataaca

SEQ ID NO: 645609 - DNA, 33 bp, Homo sapien
tttattaagatcccatgatacatcagatatatt

SEQ ID NO: 645610 - DNA, 33 bp, Homo sapien
tttattaagatcccattatacatcagatatatt

SEQ ID NO: 645611 - DNA, 33 bp, Homo sapien
ctgtcctggttctccacgagtccatgtttgatg

SEQ ID NO: 645612 - DNA, 33 bp, Homo sapien
ctgtcctggttctccatgagtccatgtttgatg

SEQ ID NO: 645613 - DNA, 33 bp, Homo sapien
aaaatacactgtaacacgataatctaccgttac

SEQ ID NO: 645614 - DNA, 33 bp, Homo sapien
aaaatacactgtaacatgataatctaccgttac

SEQ ID NO: 645615 - DNA, 33 bp, Homo sapien
ttgagtgaaataataactggactttaagaggat

SEQ ID NO: 645616 - DNA, 33 bp, Homo sapien
ttgagtgaaataataagtggactttaagaggat

SEQ ID NO: 645617 - DNA, 33 bp, Homo sapien
aaaacttctcacaaaaggtatgttaggttatat

SEQ ID NO: 645618 - DNA, 33 bp, Homo sapien
aaaacttctcacaaaatgtatgttaggttatat

SEQ ID NO: 645619 - DNA, 33 bp, Homo sapien
gaaccatgaagaccaacctttagtgaaggacca

SEQ ID NO: 645620 - DNA, 33 bp, Homo sapien
gaaccatgaagaccaatctttagtgaaggacca

SEQ ID NO: 645621 - DNA, 33 bp, Homo sapien
tgaaattggtaatataacaaacatctcatatac

SEQ ID NO: 645622 - DNA, 33 bp, Homo sapien
tgaaattggtaatatagcaaacatctcatatac

SEQ ID NO: 645623 - DNA, 33 bp, Homo sapien
tcacaatgaaggctagaattttggagcaaggcc

SEQ ID NO: 645624 - DNA, 33 bp, Homo sapien
tcacaatgaaggctaggattttggagcaaggcc

SEQ ID NO: 645625 - DNA, 33 bp, Homo sapien
cctctcagcctcggtccatggaaaatttgtctt

SEQ ID NO: 645626 - DNA, 33 bp, Homo sapien
cctctcagcctcggtctatggaaaatttgtctt

SEQ ID NO: 645627 - DNA, 33 bp, Homo sapien
acccctactcttcccaaactctggtaaacagca

SEQ ID NO: 645628 - DNA, 33 bp, Homo sapien
acccctactcttcccagactctggtaaacagca

SEQ ID NO: 645629 - DNA, 33 bp, Homo sapien
catgagaattgaataccatttttcatgagacct

SEQ ID NO: 645630 - DNA, 33 bp, Homo sapien
catgagaattgaatacgatttttcatgagacct

SEQ ID NO: 645631 - DNA, 33 bp, Homo sapien
accttaatccactttacaagaccaagcacatgg

SEQ ID NO: 645632 - DNA, 33 bp, Homo sapien
accttaatccactttagaagaccaagcacatgg

SEQ ID NO: 645633 - DNA, 33 bp, Homo sapien
atgttgtaagtctaaaagcaaatggctgtcaaa

SEQ ID NO: 645634 - DNA, 33 bp, Homo sapien
atgttgtaagtctaaaggcaaatggctgtcaaa

SEQ ID NO: 645635 - DNA, 33 bp, Homo sapien
attgattacaattctgacaatatttttccatca

SEQ ID NO: 645636 - DNA, 33 bp, Homo sapien
attgattacaattctggcaatatttttccatca

SEQ ID NO: 645637 - DNA, 33 bp, Homo sapien
ctaaggaactagatcactgagttaaaaagtcgt

SEQ ID NO: 645638 - DNA, 33 bp, Homo sapien
ctaaggaactagatcattgagttaaaaagtcgt

SEQ ID NO: 645639 - DNA, 33 bp, Homo sapien
aactccactaaggacacagctaacctctctaaa

SEQ ID NO: 645640 - DNA, 33 bp, Homo sapien
aactccactaaggacagagctaacctctctaaa

SEQ ID NO: 645641 - DNA, 33 bp, Homo sapien
caaggtgagaaaaaaaagagctgtgatcctaaa

SEQ ID NO: 645642 - DNA, 33 bp, Homo sapien
caaggtgagaaaaaaaggagctgtgatcctaaa

SEQ ID NO: 645643 - DNA, 33 bp, Homo sapien
attatacttttttccacgtaagagcacctgatt

SEQ ID NO: 645644 - DNA, 33 bp, Homo sapien
attatacttttttccatgtaagagcacctgatt

SEQ ID NO: 645645 - DNA, 33 bp, Homo sapien
gagtttagaatctgtacggtaagtaagctcatc

SEQ ID NO: 645646 - DNA, 33 bp, Homo sapien
gagtttagaatctgtatggtaagtaagctcatc

SEQ ID NO: 645647 - DNA, 33 bp, Homo sapien
atggtcaaatggtaacagactagaaaatctatg

SEQ ID NO: 645648 - DNA, 33 bp, Homo sapien
atggtcaaatggtaacggactagaaaatctatg

SEQ ID NO: 645649 - DNA, 33 bp, Homo sapien
acacgtagactcattacagtaaaatgaaaaatg

SEQ ID NO: 645650 - DNA, 33 bp, Homo sapien
acacgtagactcattatagtaaaatgaaaaatg

SEQ ID NO: 645651 - DNA, 33 bp, Homo sapien
aaacttttaaaacactcaccatctgggaatctc

SEQ ID NO: 645652 - DNA, 33 bp, Homo sapien
aaacttttaaaacacttaccatctgggaatctc

SEQ ID NO: 645653 - DNA, 33 bp, Homo sapien
aaagtgttattaatccaagcctatattccacat

SEQ ID NO: 645654 - DNA, 33 bp, Homo sapien
aaagtgttattaatccgagcctatattccacat

SEQ ID NO: 645655 - DNA, 33 bp, Homo sapien
tttccttataaattgcccatccttagatattcc

SEQ ID NO: 645656 - DNA, 33 bp, Homo sapien
tttccttataaattgcgcatccttagatattcc

SEQ ID NO: 645657 - DNA, 33 bp, Homo sapien
gactctgaagcttagcaagtttaggttactttc

SEQ ID NO: 645658 - DNA, 33 bp, Homo sapien
gactctgaagcttagcgagtttaggttactttc

SEQ ID NO: 645659 - DNA, 33 bp, Homo sapien
actaaaatagagtcaagatgccatttaaagttt

SEQ ID NO: 645660 - DNA, 33 bp, Homo sapien
actaaaatagagtcaatatgccatttaaagttt

SEQ ID NO: 645661 - DNA, 33 bp, Homo sapien
caaggaaattatgttacgcatattgcttaattt

SEQ ID NO: 645662 - DNA, 33 bp, Homo sapien
caaggaaattatgttatgcatattgcttaattt

SEQ ID NO: 645663 - DNA, 33 bp, Homo sapien
cacagagaatggcaataacatattctcctctcc

SEQ ID NO: 645664 - DNA, 33 bp, Homo sapien
cacagagaatggcaatcacatattctcctctcc

SEQ ID NO: 645665 - DNA, 33 bp, Homo sapien
aatccctgtttacatcaatggagactagtacga

SEQ ID NO: 645666 - DNA, 33 bp, Homo sapien
aatccctgtttacatcgatggagactagtacga

SEQ ID NO: 645667 - DNA, 33 bp, Homo sapien
ttcagtgataacaaaaacaatttacgtttgaat

SEQ ID NO: 645668 - DNA, 33 bp, Homo sapien
ttcagtgataacaaaagcaatttacgtttgaat

SEQ ID NO: 645669 - DNA, 33 bp, Homo sapien
gaccatgtagcaggaaatggtgacagagaagag

SEQ ID NO: 645670 - DNA, 33 bp, Homo sapien
gaccatgtagcaggaagtggtgacagagaagag

SEQ ID NO: 645671 - DNA, 33 bp, Homo sapien
agaatcactaagaggcaatatgaaaggtaaggg

SEQ ID NO: 645672 - DNA, 33 bp, Homo sapien
agaatcactaagaggcgatatgaaaggtaaggg

SEQ ID NO: 645673 - DNA, 33 bp, Homo sapien
ttataatgtacacctacgtttattgcaacacta

SEQ ID NO: 645674 - DNA, 33 bp, Homo sapien
ttataatgtacacctatgtttattgcaacacta

SEQ ID NO: 645675 - DNA, 33 bp, Homo sapien
ggttccaagtaatacgaattaaaggatatggag

SEQ ID NO: 645676 - DNA, 33 bp, Homo sapien
ggttccaagtaatacgcattaaaggatatggag

SEQ ID NO: 645677 - DNA, 33 bp, Homo sapien
taattagactaataatcaaggctctctgtcaat

SEQ ID NO: 645678 - DNA, 33 bp, Homo sapien
taattagactaataatgaaggctctctgtcaat

SEQ ID NO: 645679 - DNA, 33 bp, Homo sapien
ctacagtctgaatgaaaattgagaaaaatcaac

SEQ ID NO: 645680 - DNA, 33 bp, Homo sapien
ctacagtctgaatgaacattgagaaaaatcaac

SEQ ID NO: 645681 - DNA, 33 bp, Homo sapien
caacaacatttttccactcccatttactagtca

SEQ ID NO: 645682 - DNA, 33 bp, Homo sapien
caacaacatttttccattcccatttactagtca

SEQ ID NO: 645683 - DNA, 33 bp, Homo sapien
ccttctgatgatggtacgtttctggaggcctcc

SEQ ID NO: 645684 - DNA, 33 bp, Homo sapien
ccttctgatgatggtatgtttctggaggcctcc

SEQ ID NO: 645685 - DNA, 33 bp, Homo sapien
tgaaacctatacaatccaagagaggtagcttta

SEQ ID NO: 645686 - DNA, 33 bp, Homo sapien
tgaaacctatacaatctaagagaggtagcttta

SEQ ID NO: 645687 - DNA, 33 bp, Homo sapien
tcagaccttcagcagagcactggctaccgggga

SEQ ID NO: 645688 - DNA, 33 bp, Homo sapien
tcagaccttcagcagatcactggctaccgggga

SEQ ID NO: 645689 - DNA, 33 bp, Homo sapien
gttttaggtttcagaacgaatgatattttgtga

SEQ ID NO: 645690 - DNA, 33 bp, Homo sapien
gttttaggtttcagaatgaatgatattttgtga

SEQ ID NO: 645691 - DNA, 33 bp, Homo sapien
tcaaatttaacacatcacaagctgaactcacta

SEQ ID NO: 645692 - DNA, 33 bp, Homo sapien
tcaaatttaacacatcccaagctgaactcacta

SEQ ID NO: 645693 - DNA, 33 bp, Homo sapien
gacaatttggtaatcaacaatttgtcacaagag

SEQ ID NO: 645694 - DNA, 33 bp, Homo sapien
gacaatttggtaatcagcaatttgtcacaagag

SEQ ID NO: 645695 - DNA, 33 bp, Homo sapien
tagtgcagtgacataaaagctgaggttccccaa

SEQ ID NO: 645696 - DNA, 33 bp, Homo sapien
tagtgcagtgacataagagctgaggttccccaa

SEQ ID NO: 645697 - DNA, 33 bp, Homo sapien
attttaccctgccaaaatggaatacctgagaca

SEQ ID NO: 645698 - DNA, 33 bp, Homo sapien
attttaccctgccaaactggaatacctgagaca

SEQ ID NO: 645699 - DNA, 33 bp, Homo sapien
tagactaataatgaaacgagtggtcacaaataa

SEQ ID NO: 645700 - DNA, 33 bp, Homo sapien
tagactaataatgaaatgagtggtcacaaataa

SEQ ID NO: 645701 - DNA, 33 bp, Homo sapien
atgtatgtctggaataataactaaattgtgctt

SEQ ID NO: 645702 - DNA, 33 bp, Homo sapien
atgtatgtctggaatagtaactaaattgtgctt

SEQ ID NO: 645703 - DNA, 33 bp, Homo sapien
taatcctgtttttgacaatacttaagaatatgt

SEQ ID NO: 645704 - DNA, 33 bp, Homo sapien
taatcctgtttttgacgatacttaagaatatgt

SEQ ID NO: 645705 - DNA, 33 bp, Homo sapien
actttctccttttaaggactagcttcccactat

SEQ ID NO: 645706 - DNA, 33 bp, Homo sapien
actttctccttttaagtactagcttcccactat

SEQ ID NO: 645707 - DNA, 33 bp, Homo sapien
cagacttttgagtataaccaaaggaatataaat

SEQ ID NO: 645708 - DNA, 33 bp, Homo sapien
cagacttttgagtatacccaaaggaatataaat

SEQ ID NO: 645709 - DNA, 33 bp, Homo sapien
tctgagaagcaagtaacaagtgacagaatccag

SEQ ID NO: 645710 - DNA, 33 bp, Homo sapien
tctgagaagcaagtaagaagtgacagaatccag

SEQ ID NO: 645711 - DNA, 33 bp, Homo sapien
cattaattctctccccaaaagccttatgtccaa

SEQ ID NO: 645712 - DNA, 33 bp, Homo sapien
cattaattctctcccccaaagccttatgtccaa

SEQ ID NO: 645713 - DNA, 33 bp, Homo sapien
ccggctgcaacagggcactgatcatgcttttcg

SEQ ID NO: 645714 - DNA, 33 bp, Homo sapien
ccggctgcaacagggcgctgatcatgcttttcg

SEQ ID NO: 645715 - DNA, 33 bp, Homo sapien
aagagtttaataattacagattcagctaaatga

SEQ ID NO: 645716 - DNA, 33 bp, Homo sapien
aagagtttaataattagagattcagctaaatga

SEQ ID NO: 645717 - DNA, 33 bp, Homo sapien
ggggactcctttgctaaaactaactctcactct

SEQ ID NO: 645718 - DNA, 33 bp, Homo sapien
ggggactcctttgctataactaactctcactct

SEQ ID NO: 645719 - DNA, 33 bp, Homo sapien
actaatgtccttaaaaattatgccaaatgtact

SEQ ID NO: 645720 - DNA, 33 bp, Homo sapien
actaatgtccttaaaagttatgccaaatgtact

SEQ ID NO: 645721 - DNA, 33 bp, Homo sapien
aagacttctctttaaaacttgatgctgtttggc

SEQ ID NO: 645722 - DNA, 33 bp, Homo sapien
aagacttctctttaaaccttgatgctgtttggc

SEQ ID NO: 645723 - DNA, 33 bp, Homo sapien
attagttgaccttgcccatctgctgagtacaaa

SEQ ID NO: 645724 - DNA, 33 bp, Homo sapien
attagttgaccttgcctatctgctgagtacaaa

SEQ ID NO: 645725 - DNA, 33 bp, Homo sapien
tagtattccacacatcacattgcaacagtctta

SEQ ID NO: 645726 - DNA, 33 bp, Homo sapien
tagtattccacacatcgcattgcaacagtctta

SEQ ID NO: 645727 - DNA, 33 bp, Homo sapien
ttcctttcacagaaaaacatagaaaatgcataa

SEQ ID NO: 645728 - DNA, 33 bp, Homo sapien
ttcctttcacagaaaagcatagaaaatgcataa

SEQ ID NO: 645729 - DNA, 33 bp, Homo sapien
atggaatgaggcagaaagtctttgaaaaccatg

SEQ ID NO: 645730 - DNA, 33 bp, Homo sapien
atggaatgaggcagaacgtctttgaaaaccatg

SEQ ID NO: 645731 - DNA, 33 bp, Homo sapien
aaacagatcaaagcagcaaaatcataaacatgg

SEQ ID NO: 645732 - DNA, 33 bp, Homo sapien
aaacagatcaaagcaggaaaatcataaacatgg

SEQ ID NO: 645733 - DNA, 33 bp, Homo sapien
attaaaaacaaagtaacagcaatagagacctct

SEQ ID NO: 645734 - DNA, 33 bp, Homo sapien
attaaaaacaaagtaagagcaatagagacctct

SEQ ID NO: 645735 - DNA, 33 bp, Homo sapien
ctgttacattttacacacgaataaacataaaat

SEQ ID NO: 645736 - DNA, 33 bp, Homo sapien
ctgttacattttacacgcgaataaacataaaat

SEQ ID NO: 645737 - DNA, 33 bp, Homo sapien
taagtgagttaacccaagtacagaaagacaaat

SEQ ID NO: 645738 - DNA, 33 bp, Homo sapien
taagtgagttaacccaggtacagaaagacaaat

SEQ ID NO: 645739 - DNA, 33 bp, Homo sapien
gtctctggagtgtcacaacaaaagttacatcaa

SEQ ID NO: 645740 - DNA, 33 bp, Homo sapien
gtctctggagtgtcacgacaaaagttacatcaa

SEQ ID NO: 645741 - DNA, 33 bp, Homo sapien
accaaataactgctgccctagattgctggggga

SEQ ID NO: 645742 - DNA, 33 bp, Homo sapien
accaaataactgctgctctagattgctggggga

SEQ ID NO: 645743 - DNA, 33 bp, Homo sapien
ttgattctgcataacaaatttacaaccaagtta

SEQ ID NO: 645744 - DNA, 33 bp, Homo sapien
ttgattctgcataacagatttacaaccaagtta

SEQ ID NO: 645745 - DNA, 33 bp, Homo sapien
atagggtgtctcccagcagttttccgagtgagc

SEQ ID NO: 645746 - DNA, 33 bp, Homo sapien
atagggtgtctcccagtagttttccgagtgagc

SEQ ID NO: 645747 - DNA, 33 bp, Homo sapien
tcaacagcagactcaaccatgtggaagaaagaa

SEQ ID NO: 645748 - DNA, 33 bp, Homo sapien
tcaacagcagactcaatcatgtggaagaaagaa

SEQ ID NO: 645749 - DNA, 33 bp, Homo sapien
tgtctggatgatctacacaatgttgaatgtgga

SEQ ID NO: 645750 - DNA, 33 bp, Homo sapien
tgtctggatgatctacgcaatgttgaatgtgga

SEQ ID NO: 645751 - DNA, 33 bp, Homo sapien
tactgtaggctataaaccaatgatgagtttgag

SEQ ID NO: 645752 - DNA, 33 bp, Homo sapien
tactgtaggctataaatcaatgatgagtttgag

SEQ ID NO: 645753 - DNA, 33 bp, Homo sapien
gctctggaaacaagacgagaaaagagctatcca

SEQ ID NO: 645754 - DNA, 33 bp, Homo sapien
gctctggaaacaagactagaaaagagctatcca

SEQ ID NO: 645755 - DNA, 33 bp, Homo sapien
atgagagagctaagaagacatggcaaagatttc

SEQ ID NO: 645756 - DNA, 33 bp, Homo sapien
atgagagagctaagaatacatggcaaagatttc

SEQ ID NO: 645757 - DNA, 33 bp, Homo sapien
aggaagggacttgttgaaggatcagagccccac

SEQ ID NO: 645758 - DNA, 33 bp, Homo sapien
aggaagggacttgttgcaggatcagagccccac

SEQ ID NO: 645759 - DNA, 33 bp, Homo sapien
actctttggactttccaaaacgtcatttattta

SEQ ID NO: 645760 - DNA, 33 bp, Homo sapien
actctttggactttccgaaacgtcatttattta

SEQ ID NO: 645761 - DNA, 33 bp, Homo sapien
aggtatcagaatgaacagaagttatgaatgtca

SEQ ID NO: 645762 - DNA, 33 bp, Homo sapien
aggtatcagaatgaacggaagttatgaatgtca

SEQ ID NO: 645763 - DNA, 33 bp, Homo sapien
caaacacacagagaaacgcctggcaaagctgcc

SEQ ID NO: 645764 - DNA, 33 bp, Homo sapien
caaacacacagagaaaggcctggcaaagctgcc

SEQ ID NO: 645765 - DNA, 33 bp, Homo sapien
atagcttccactgagaagatctaattagcattt

SEQ ID NO: 645766 - DNA, 33 bp, Homo sapien
atagcttccactgagaggatctaattagcattt

SEQ ID NO: 645767 - DNA, 33 bp, Homo sapien
aatctttccgtaaaatcaatactttttgtgcaa

SEQ ID NO: 645768 - DNA, 33 bp, Homo sapien
aatctttccgtaaaatgaatactttttgtgcaa

SEQ ID NO: 645769 - DNA, 33 bp, Homo sapien
tattaagttttcctaaatcagagatgcatacat

SEQ ID NO: 645770 - DNA, 33 bp, Homo sapien
tattaagttttcctaagtcagagatgcatacat

SEQ ID NO: 645771 - DNA, 33 bp, Homo sapien
aagggtgcatttgaaaagataagatgatatgcc

SEQ ID NO: 645772 - DNA, 33 bp, Homo sapien
aagggtgcatttgaaacgataagatgatatgcc

SEQ ID NO: 645773 - DNA, 33 bp, Homo sapien
cagtacaacataaaacagtagctcttcttatta

SEQ ID NO: 645774 - DNA, 33 bp, Homo sapien
cagtacaacataaaacggtagctcttcttatta

SEQ ID NO: 645775 - DNA, 33 bp, Homo sapien
ccttgaaaacaagccacatttggtacccagagc

SEQ ID NO: 645776 - DNA, 33 bp, Homo sapien
ccttgaaaacaagccatatttggtacccagagc

SEQ ID NO: 645777 - DNA, 33 bp, Homo sapien
tgtcccaattactgtcaatatcaattgtttctg

SEQ ID NO: 645778 - DNA, 33 bp, Homo sapien
tgtcccaattactgtcgatatcaattgtttctg

SEQ ID NO: 645779 - DNA, 33 bp, Homo sapien
ctatggattacttagaaaacaacttgctagagt

SEQ ID NO: 645780 - DNA, 33 bp, Homo sapien
ctatggattacttagataacaacttgctagagt

SEQ ID NO: 645781 - DNA, 33 bp, Homo sapien
gatggtaaaagagctacccagattaacaaatga

SEQ ID NO: 645782 - DNA, 33 bp, Homo sapien
gatggtaaaagagctatccagattaacaaatga

SEQ ID NO: 645783 - DNA, 33 bp, Homo sapien
gttggtgccaactgcaaacataattttcatgag

SEQ ID NO: 645784 - DNA, 33 bp, Homo sapien
gttggtgccaactgcagacataattttcatgag

SEQ ID NO: 645785 - DNA, 33 bp, Homo sapien
atccaagttacaagcagaaactcaaacaatctg

SEQ ID NO: 645786 - DNA, 33 bp, Homo sapien
atccaagttacaagcataaactcaaacaatctg

SEQ ID NO: 645787 - DNA, 33 bp, Homo sapien
tagtagtctttattcaaatgcaatggcacagct

SEQ ID NO: 645788 - DNA, 33 bp, Homo sapien
tagtagtctttattcacatgcaatggcacagct

SEQ ID NO: 645789 - DNA, 33 bp, Homo sapien
acataaaattggtgcaatctatatagccctgtt

SEQ ID NO: 645790 - DNA, 33 bp, Homo sapien
acataaaattggtgcagtctatatagccctgtt

SEQ ID NO: 645791 - DNA, 33 bp, Homo sapien
tttaaatttagcccccacaatatctaagaaaga

SEQ ID NO: 645792 - DNA, 33 bp, Homo sapien
tttaaatttagcccccgcaatatctaagaaaga

SEQ ID NO: 645793 - DNA, 33 bp, Homo sapien
aaaatgatagggaagaaatgatctagaaaggga

SEQ ID NO: 645794 - DNA, 33 bp, Homo sapien
aaaatgatagggaagagatgatctagaaaggga

SEQ ID NO: 645795 - DNA, 33 bp, Homo sapien
gggaaagagaatgcaaatacaatatatcaggat

SEQ ID NO: 645796 - DNA, 33 bp, Homo sapien
gggaaagagaatgcaagtacaatatatcaggat

SEQ ID NO: 645797 - DNA, 33 bp, Homo sapien
acaccattcatatgtaccactataactactctt

SEQ ID NO: 645798 - DNA, 33 bp, Homo sapien
acaccattcatatgtatcactataactactctt

SEQ ID NO: 645799 - DNA, 33 bp, Homo sapien
atagcactgtgtttaacaattatcaaatgtgcc

SEQ ID NO: 645800 - DNA, 33 bp, Homo sapien
atagcactgtgtttaagaattatcaaatgtgcc

SEQ ID NO: 645801 - DNA, 33 bp, Homo sapien
tgttctctctgcattacgaagggatacattcca

SEQ ID NO: 645802 - DNA, 33 bp, Homo sapien
tgttctctctgcattatgaagggatacattcca

SEQ ID NO: 645803 - DNA, 33 bp, Homo sapien
cactatccaatgttcccaagatgtctacttagg

SEQ ID NO: 645804 - DNA, 33 bp, Homo sapien
cactatccaatgttcctaagatgtctacttagg

SEQ ID NO: 645805 - DNA, 33 bp, Homo sapien
gtagtacattatgttacagatagtaggagagtg

SEQ ID NO: 645806 - DNA, 33 bp, Homo sapien
gtagtacattatgttatagatagtaggagagtg

SEQ ID NO: 645807 - DNA, 33 bp, Homo sapien
gtcaagcaaacagttaacaaactcctgtataaa

SEQ ID NO: 645808 - DNA, 33 bp, Homo sapien
gtcaagcaaacagttatcaaactcctgtataaa

SEQ ID NO: 645809 - DNA, 33 bp, Homo sapien
cttaaggtatattttccagacgaagccattcat

SEQ ID NO: 645810 - DNA, 33 bp, Homo sapien
cttaaggtatattttctagacgaagccattcat

SEQ ID NO: 645811 - DNA, 33 bp, Homo sapien
tgaccagctacagaaccgaccaaggtataaaga

SEQ ID NO: 645812 - DNA, 33 bp, Homo sapien
tgaccagctacagaactgaccaaggtataaaga

SEQ ID NO: 645813 - DNA, 33 bp, Homo sapien
tttctaaaggtagccaacttcctatctatatgt

SEQ ID NO: 645814 - DNA, 33 bp, Homo sapien
tttctaaaggtagccagcttcctatctatatgt

SEQ ID NO: 645815 - DNA, 33 bp, Homo sapien
ctttctgctgaccaaccattttataaatgtata

SEQ ID NO: 645816 - DNA, 33 bp, Homo sapien
ctttctgctgaccaacgattttataaatgtata

SEQ ID NO: 645817 - DNA, 33 bp, Homo sapien
agtctcatttcctatgacacaaattcattctct

SEQ ID NO: 645818 - DNA, 33 bp, Homo sapien
agtctcatttcctatggcacaaattcattctct

SEQ ID NO: 645819 - DNA, 33 bp, Homo sapien
ggaagaacagttttgaccacattgtgtggcgga

SEQ ID NO: 645820 - DNA, 33 bp, Homo sapien
ggaagaacagttttgatcacattgtgtggcgga

SEQ ID NO: 645821 - DNA, 33 bp, Homo sapien
caatctacgtttgccccaaacaatacagtttct

SEQ ID NO: 645822 - DNA, 33 bp, Homo sapien
caatctacgtttgccctaaacaatacagtttct

SEQ ID NO: 645823 - DNA, 33 bp, Homo sapien
taattgattcaaaaaacgtcagtagagccacaa

SEQ ID NO: 645824 - DNA, 33 bp, Homo sapien
taattgattcaaaaaatgtcagtagagccacaa

SEQ ID NO: 645825 - DNA, 33 bp, Homo sapien
accaccaaggtggaacaaatacaggtctgcaag

SEQ ID NO: 645826 - DNA, 33 bp, Homo sapien
accaccaaggtggaaccaatacaggtctgcaag

SEQ ID NO: 645827 - DNA, 33 bp, Homo sapien
aacttagacagcagctcaaccagagtagaatgc

SEQ ID NO: 645828 - DNA, 33 bp, Homo sapien
aacttagacagcagcttaaccagagtagaatgc

SEQ ID NO: 645829 - DNA, 33 bp, Homo sapien
tcagcacacatacaaacagctctgttagttcat

SEQ ID NO: 645830 - DNA, 33 bp, Homo sapien
tcagcacacatacaaagagctctgttagttcat

SEQ ID NO: 645831 - DNA, 33 bp, Homo sapien
ttataatcaattctaagaggatgtgaagtgaat

SEQ ID NO: 645832 - DNA, 33 bp, Homo sapien
ttataatcaattctaataggatgtgaagtgaat

SEQ ID NO: 645833 - DNA, 33 bp, Homo sapien
tagatccttgtgagaactgagtgaaaaaaatat

SEQ ID NO: 645834 - DNA, 33 bp, Homo sapien
tagatccttgtgagaattgagtgaaaaaaatat

SEQ ID NO: 645835 - DNA, 33 bp, Homo sapien
aattaaacgaagaatgaaagatggcatatatat

SEQ ID NO: 645836 - DNA, 33 bp, Homo sapien
aattaaacgaagaatggaagatggcatatatat

SEQ ID NO: 645837 - DNA, 33 bp, Homo sapien
agtccctgtagctaatcacttcaataaatatgt

SEQ ID NO: 645838 - DNA, 33 bp, Homo sapien
agtccctgtagctaatgacttcaataaatatgt

SEQ ID NO: 645839 - DNA, 33 bp, Homo sapien
aatgaaagtcaggataaaattgatgtcttccta

SEQ ID NO: 645840 - DNA, 33 bp, Homo sapien
aatgaaagtcaggatataattgatgtcttccta

SEQ ID NO: 645841 - DNA, 33 bp, Homo sapien
tatccacagcaaacacagatgtaggagttcatt

SEQ ID NO: 645842 - DNA, 33 bp, Homo sapien
tatccacagcaaacacggatgtaggagttcatt

SEQ ID NO: 645843 - DNA, 33 bp, Homo sapien
cagataacaacaagaagtaagcaaagctggata

SEQ ID NO: 645844 - DNA, 33 bp, Homo sapien
cagataacaacaagaattaagcaaagctggata

SEQ ID NO: 645845 - DNA, 33 bp, Homo sapien
tagttactgtaatatccccacatctggtattga

SEQ ID NO: 645846 - DNA, 33 bp, Homo sapien
tagttactgtaatatctccacatctggtattga

SEQ ID NO: 645847 - DNA, 33 bp, Homo sapien
ttcgccatgataaccaagctggccttgaactcc

SEQ ID NO: 645848 - DNA, 33 bp, Homo sapien
ttcgccatgataaccaggctggccttgaactcc

SEQ ID NO: 645849 - DNA, 33 bp, Homo sapien
aagaaaaatatcttgacctattacctacatatg

SEQ ID NO: 645850 - DNA, 33 bp, Homo sapien
aagaaaaatatcttgatctattacctacatatg

SEQ ID NO: 645851 - DNA, 33 bp, Homo sapien
aaactctgaatatttacggttatacagaaaatt

SEQ ID NO: 645852 - DNA, 33 bp, Homo sapien
aaactctgaatatttagggttatacagaaaatt

SEQ ID NO: 645853 - DNA, 33 bp, Homo sapien
atctctgaataggagacaaaagatggcatttag

SEQ ID NO: 645854 - DNA, 33 bp, Homo sapien
atctctgaataggagataaaagatggcatttag

SEQ ID NO: 645855 - DNA, 33 bp, Homo sapien
agctgattttgattgcaaattagggattaaaat

SEQ ID NO: 645856 - DNA, 33 bp, Homo sapien
agctgattttgattgcgaattagggattaaaat

SEQ ID NO: 645857 - DNA, 33 bp, Homo sapien
tggatactgtggaagcaaaattgatatttcacc

SEQ ID NO: 645858 - DNA, 33 bp, Homo sapien
tggatactgtggaagccaaattgatatttcacc

SEQ ID NO: 645859 - DNA, 33 bp, Homo sapien
agagctgttggtaataaattgttctaccaaagg

SEQ ID NO: 645860 - DNA, 33 bp, Homo sapien
agagctgttggtaatacattgttctaccaaagg

SEQ ID NO: 645861 - DNA, 33 bp, Homo sapien
agcttccaactacgaacgatattttagaagaga

SEQ ID NO: 645862 - DNA, 33 bp, Homo sapien
agcttccaactacgaatgatattttagaagaga

SEQ ID NO: 645863 - DNA, 33 bp, Homo sapien
tttagagtttatacacgatccacctcctaaaaa

SEQ ID NO: 645864 - DNA, 33 bp, Homo sapien
tttagagtttatacactatccacctcctaaaaa

SEQ ID NO: 645865 - DNA, 33 bp, Homo sapien
actcctgtaaaaaggcaaagtgtttctcaaagg

SEQ ID NO: 645866 - DNA, 33 bp, Homo sapien
actcctgtaaaaaggcgaagtgtttctcaaagg

SEQ ID NO: 645867 - DNA, 33 bp, Homo sapien
agatatagatatatagcagcatcaatgaagaca

SEQ ID NO: 645868 - DNA, 33 bp, Homo sapien
agatatagatatatagtagcatcaatgaagaca

SEQ ID NO: 645869 - DNA, 33 bp, Homo sapien
ccaaaagaattgaggaaatggtcagacacttgt

SEQ ID NO: 645870 - DNA, 33 bp, Homo sapien
ccaaaagaattgaggagatggtcagacacttgt

SEQ ID NO: 645871 - DNA, 33 bp, Homo sapien
ctcctttagttgtgaaccagttgtgttgtattt

SEQ ID NO: 645872 - DNA, 33 bp, Homo sapien
ctcctttagttgtgaatcagttgtgttgtattt

SEQ ID NO: 645873 - DNA, 33 bp, Homo sapien
gggatgattctttacgaagaaagtgattaccaa

SEQ ID NO: 645874 - DNA, 33 bp, Homo sapien
gggatgattctttacggagaaagtgattaccaa

SEQ ID NO: 645875 - DNA, 33 bp, Homo sapien
caaaaccaaagactccaaaaagagacaataata

SEQ ID NO: 645876 - DNA, 33 bp, Homo sapien
caaaaccaaagactccgaaaagagacaataata

SEQ ID NO: 645877 - DNA, 33 bp, Homo sapien
ctaaattatcagaaaagaaactgctttgtgtga

SEQ ID NO: 645878 - DNA, 33 bp, Homo sapien
ctaaattatcagaaaataaactgctttgtgtga

SEQ ID NO: 645879 - DNA, 33 bp, Homo sapien
atctttttatttctcaagattatcccagtgttt

SEQ ID NO: 645880 - DNA, 33 bp, Homo sapien
atctttttatttctcatgattatcccagtgttt

SEQ ID NO: 645881 - DNA, 33 bp, Homo sapien
taaaacacagtgaagcagcaaatttgtgataga

SEQ ID NO: 645882 - DNA, 33 bp, Homo sapien
taaaacacagtgaagcggcaaatttgtgataga

SEQ ID NO: 645883 - DNA, 33 bp, Homo sapien
tatgattaaaacataccgacttactgctaaatc

SEQ ID NO: 645884 - DNA, 33 bp, Homo sapien
tatgattaaaacatactgacttactgctaaatc

SEQ ID NO: 645885 - DNA, 33 bp, Homo sapien
cttcatgtatttctctcaccacgtgtcataacc

SEQ ID NO: 645886 - DNA, 33 bp, Homo sapien
cttcatgtatttctcttaccacgtgtcataacc

SEQ ID NO: 645887 - DNA, 33 bp, Homo sapien
taagatcattgggctaagttaaaaaaaaggtgt

SEQ ID NO: 645888 - DNA, 33 bp, Homo sapien
taagatcattgggctaggttaaaaaaaaggtgt

SEQ ID NO: 645889 - DNA, 33 bp, Homo sapien
ttaccatgttccttaaataacgctgtccaaata

SEQ ID NO: 645890 - DNA, 33 bp, Homo sapien
ttaccatgttccttaagtaacgctgtccaaata

SEQ ID NO: 645891 - DNA, 33 bp, Homo sapien
ttgaacaattcatttaagtctaccattcaggat

SEQ ID NO: 645892 - DNA, 33 bp, Homo sapien
ttgaacaattcatttaggtctaccattcaggat

SEQ ID NO: 645893 - DNA, 33 bp, Homo sapien
ttaagaatacgataaccactgataatcatgcta

SEQ ID NO: 645894 - DNA, 33 bp, Homo sapien
ttaagaatacgataactactgataatcatgcta

SEQ ID NO: 645895 - DNA, 33 bp, Homo sapien
ttactgtacgtggattaaaaaataatggtgaat

SEQ ID NO: 645896 - DNA, 33 bp, Homo sapien
ttactgtacgtggattcaaaaataatggtgaat

SEQ ID NO: 645897 - DNA, 33 bp, Homo sapien
aaaatgtggattcaaaagtcttagatattaagt

SEQ ID NO: 645898 - DNA, 33 bp, Homo sapien
aaaatgtggattcaaaggtcttagatattaagt

SEQ ID NO: 645899 - DNA, 33 bp, Homo sapien
aatgtataaagaatagaatggcctggttttatt

SEQ ID NO: 645900 - DNA, 33 bp, Homo sapien
aatgtataaagaataggatggcctggttttatt

SEQ ID NO: 645901 - DNA, 33 bp, Homo sapien
gtgagtagaaataagacgtatgcagagccaatg

SEQ ID NO: 645902 - DNA, 33 bp, Homo sapien
gtgagtagaaataagatgtatgcagagccaatg

SEQ ID NO: 645903 - DNA, 33 bp, Homo sapien
tgcatttggactaccacgtattatgctgtggga

SEQ ID NO: 645904 - DNA, 33 bp, Homo sapien
tgcatttggactaccatgtattatgctgtggga

SEQ ID NO: 645905 - DNA, 33 bp, Homo sapien
tccttctgaccactatctcttgccacttcagtg

SEQ ID NO: 645906 - DNA, 33 bp, Homo sapien
tccttctgaccactatttcttgccacttcagtg

SEQ ID NO: 645907 - DNA, 33 bp, Homo sapien
ctacttacggctatacacttatcgatatcattt

SEQ ID NO: 645908 - DNA, 33 bp, Homo sapien
ctacttacggctatacgcttatcgatatcattt

SEQ ID NO: 645909 - DNA, 33 bp, Homo sapien
ctttggagaaaaaatgcaatcctcgttataatg

SEQ ID NO: 645910 - DNA, 33 bp, Homo sapien
ctttggagaaaaaatgtaatcctcgttataatg

SEQ ID NO: 645911 - DNA, 33 bp, Homo sapien
aaaagtgatctttgtccctaagtgcagatggaa

SEQ ID NO: 645912 - DNA, 33 bp, Homo sapien
aaaagtgatctttgtctctaagtgcagatggaa

SEQ ID NO: 645913 - DNA, 33 bp, Homo sapien
tacttagcaaagacccaatcgctaagtgctcaa

SEQ ID NO: 645914 - DNA, 33 bp, Homo sapien
tacttagcaaagaccccatcgctaagtgctcaa

SEQ ID NO: 645915 - DNA, 33 bp, Homo sapien
aaatgttttgatggcaatattgaggaaactgca

SEQ ID NO: 645916 - DNA, 33 bp, Homo sapien
aaatgttttgatggcagtattgaggaaactgca

SEQ ID NO: 645917 - DNA, 33 bp, Homo sapien
taatttcctaaatttcaataaaatctcagaaaa

SEQ ID NO: 645918 - DNA, 33 bp, Homo sapien
taatttcctaaatttcgataaaatctcagaaaa

SEQ ID NO: 645919 - DNA, 33 bp, Homo sapien
aaatttggcttacacaaactttattcaaatggc

SEQ ID NO: 645920 - DNA, 33 bp, Homo sapien
aaatttggcttacacagactttattcaaatggc

SEQ ID NO: 645921 - DNA, 33 bp, Homo sapien
acattgggtactagaaaaacaaactcagttctg

SEQ ID NO: 645922 - DNA, 33 bp, Homo sapien
acattgggtactagaataacaaactcagttctg

SEQ ID NO: 645923 - DNA, 33 bp, Homo sapien
ttttcatgagagaagactatgagaagttgattt

SEQ ID NO: 645924 - DNA, 33 bp, Homo sapien
ttttcatgagagaagattatgagaagttgattt

SEQ ID NO: 645925 - DNA, 33 bp, Homo sapien
tgtcaaaacctatacactggctctgtccttgca

SEQ ID NO: 645926 - DNA, 33 bp, Homo sapien
tgtcaaaacctatacattggctctgtccttgca

SEQ ID NO: 645927 - DNA, 33 bp, Homo sapien
tttagagtaagtgaatgatgagtagatgaacat

SEQ ID NO: 645928 - DNA, 33 bp, Homo sapien
tttagagtaagtgaattatgagtagatgaacat

SEQ ID NO: 645929 - DNA, 33 bp, Homo sapien
gagaccaagaatcaatgatagacgcttaatatg

SEQ ID NO: 645930 - DNA, 33 bp, Homo sapien
gagaccaagaatcaattatagacgcttaatatg

SEQ ID NO: 645931 - DNA, 33 bp, Homo sapien
aaatgtgcatctgaataaaagggcatacgtaag

SEQ ID NO: 645932 - DNA, 33 bp, Homo sapien
aaatgtgcatctgaatgaaagggcatacgtaag

SEQ ID NO: 645933 - DNA, 33 bp, Homo sapien
tgagtaacaaaaccacagcaatttggtgagtga

SEQ ID NO: 645934 - DNA, 33 bp, Homo sapien
tgagtaacaaaaccacggcaatttggtgagtga

SEQ ID NO: 645935 - DNA, 33 bp, Homo sapien
ggtgtcagtgtaatgacgttgaacttaatttgc

SEQ ID NO: 645936 - DNA, 33 bp, Homo sapien
ggtgtcagtgtaatgatgttgaacttaatttgc

SEQ ID NO: 645937 - DNA, 33 bp, Homo sapien
ccattttgaaagttggacaaggactcacaatca

SEQ ID NO: 645938 - DNA, 33 bp, Homo sapien
ccattttgaaagttgggcaaggactcacaatca

SEQ ID NO: 645939 - DNA, 33 bp, Homo sapien
ataaacagaaaaactccatgaggtatggataaa

SEQ ID NO: 645940 - DNA, 33 bp, Homo sapien
ataaacagaaaaactctatgaggtatggataaa

SEQ ID NO: 645941 - DNA, 33 bp, Homo sapien
tgaaatagtcattaacggcaggatacaatacag

SEQ ID NO: 645942 - DNA, 33 bp, Homo sapien
tgaaatagtcattaactgcaggatacaatacag

SEQ ID NO: 645943 - DNA, 33 bp, Homo sapien
gcatgtaaattgttgcacctatcagcggcttgt

SEQ ID NO: 645944 - DNA, 33 bp, Homo sapien
gcatgtaaattgttgcgcctatcagcggcttgt

SEQ ID NO: 645945 - DNA, 33 bp, Homo sapien
cagcctatatataaaaatgtgtgcttctaatgg

SEQ ID NO: 645946 - DNA, 33 bp, Homo sapien
cagcctatatataaaagtgtgtgcttctaatgg

SEQ ID NO: 645947 - DNA, 33 bp, Homo sapien
tttacataaaaatttaccatactgttagataac

SEQ ID NO: 645948 - DNA, 33 bp, Homo sapien
tttacataaaaatttagcatactgttagataac

SEQ ID NO: 645949 - DNA, 33 bp, Homo sapien
ttttactcagctaaatcattgtcaatggctttg

SEQ ID NO: 645950 - DNA, 33 bp, Homo sapien
ttttactcagctaaatgattgtcaatggctttg

SEQ ID NO: 645951 - DNA, 33 bp, Homo sapien
ctctcaaacaaggttgcaactctcacatctggg

SEQ ID NO: 645952 - DNA, 33 bp, Homo sapien
ctctcaaacaaggttggaactctcacatctggg

SEQ ID NO: 645953 - DNA, 33 bp, Homo sapien
aatagtttgtcataaacaccaacccagaagtga

SEQ ID NO: 645954 - DNA, 33 bp, Homo sapien
aatagtttgtcataaataccaacccagaagtga

SEQ ID NO: 645955 - DNA, 33 bp, Homo sapien
tgtcaaaccaattcaacttacttgtaagaagga

SEQ ID NO: 645956 - DNA, 33 bp, Homo sapien
tgtcaaaccaattcaatttacttgtaagaagga

SEQ ID NO: 645957 - DNA, 33 bp, Homo sapien
attgtaaatccttactcaccctatttctattcc

SEQ ID NO: 645958 - DNA, 33 bp, Homo sapien
attgtaaatccttactgaccctatttctattcc

SEQ ID NO: 645959 - DNA, 33 bp, Homo sapien
tgggagtgctgttaaaccaaattatttgatcca

SEQ ID NO: 645960 - DNA, 33 bp, Homo sapien
tgggagtgctgttaaagcaaattatttgatcca

SEQ ID NO: 645961 - DNA, 33 bp, Homo sapien
tttttatgatctgaaaacttgagaaggcaagat

SEQ ID NO: 645962 - DNA, 33 bp, Homo sapien
tttttatgatctgaaagcttgagaaggcaagat

SEQ ID NO: 645963 - DNA, 33 bp, Homo sapien
caactaaacattattcaaagagtcaacccaaat

SEQ ID NO: 645964 - DNA, 33 bp, Homo sapien
caactaaacattattcgaagagtcaacccaaat

SEQ ID NO: 645965 - DNA, 33 bp, Homo sapien
ataaatggagtttaaacttatgggcgtatacgg

SEQ ID NO: 645966 - DNA, 33 bp, Homo sapien
ataaatggagtttaaatttatgggcgtatacgg

SEQ ID NO: 645967 - DNA, 33 bp, Homo sapien
tcagattgataaatccaatggccaattcacagt

SEQ ID NO: 645968 - DNA, 33 bp, Homo sapien
tcagattgataaatccgatggccaattcacagt

SEQ ID NO: 645969 - DNA, 33 bp, Homo sapien
catattcccactcagcgctttttttcattaagt

SEQ ID NO: 645970 - DNA, 33 bp, Homo sapien
catattcccactcagctctttttttcattaagt

SEQ ID NO: 645971 - DNA, 33 bp, Homo sapien
agaaatcaccattccaaatatgataaagtgatt

SEQ ID NO: 645972 - DNA, 33 bp, Homo sapien
agaaatcaccattccacatatgataaagtgatt

SEQ ID NO: 645973 - DNA, 33 bp, Homo sapien
ctgttgaaggaaataacataggacacaaacaaa

SEQ ID NO: 645974 - DNA, 33 bp, Homo sapien
ctgttgaaggaaataagataggacacaaacaaa

SEQ ID NO: 645975 - DNA, 33 bp, Homo sapien
cacatttacattttatcaggtgaaattatctca

SEQ ID NO: 645976 - DNA, 33 bp, Homo sapien
cacatttacattttattaggtgaaattatctca

SEQ ID NO: 645977 - DNA, 33 bp, Homo sapien
gtacctaaaaaaacaccaattctgacagaacta

SEQ ID NO: 645978 - DNA, 33 bp, Homo sapien
gtacctaaaaaaacacgaattctgacagaacta

SEQ ID NO: 645979 - DNA, 33 bp, Homo sapien
cactggaattctcatgaaccaccactgagaatg

SEQ ID NO: 645980 - DNA, 33 bp, Homo sapien
cactggaattctcatgcaccaccactgagaatg

SEQ ID NO: 645981 - DNA, 33 bp, Homo sapien
ccagcttttggtaaacactattctactcttatt

SEQ ID NO: 645982 - DNA, 33 bp, Homo sapien
ccagcttttggtaaacgctattctactcttatt

SEQ ID NO: 645983 - DNA, 33 bp, Homo sapien
agactgaattcctctacgtgtatgtgtgtgtct

SEQ ID NO: 645984 - DNA, 33 bp, Homo sapien
agactgaattcctctatgtgtatgtgtgtgtct

SEQ ID NO: 645985 - DNA, 33 bp, Homo sapien
gacttgtatcatttacactatttgtcccagaac

SEQ ID NO: 645986 - DNA, 33 bp, Homo sapien
gacttgtatcatttacgctatttgtcccagaac

SEQ ID NO: 645987 - DNA, 33 bp, Homo sapien
taaataggtcactcaccgtcatgatctggttgt

SEQ ID NO: 645988 - DNA, 33 bp, Homo sapien
taaataggtcactcactgtcatgatctggttgt

SEQ ID NO: 645989 - DNA, 33 bp, Homo sapien
agtctcagaaagaaaacagtcaacacgattcag

SEQ ID NO: 645990 - DNA, 33 bp, Homo sapien
agtctcagaaagaaaatagtcaacacgattcag

SEQ ID NO: 645991 - DNA, 33 bp, Homo sapien
gacaccatttaccgtacgttataatttgacaag

SEQ ID NO: 645992 - DNA, 33 bp, Homo sapien
gacaccatttaccgtatgttataatttgacaag

SEQ ID NO: 645993 - DNA, 33 bp, Homo sapien
ttgtaatgaggcttccaagaaagaaagttatga

SEQ ID NO: 645994 - DNA, 33 bp, Homo sapien
ttgtaatgaggcttccgagaaagaaagttatga

SEQ ID NO: 645995 - DNA, 33 bp, Homo sapien
tctcaatgaatgttagaccccttgactagattt

SEQ ID NO: 645996 - DNA, 33 bp, Homo sapien
tctcaatgaatgttaggccccttgactagattt

SEQ ID NO: 645997 - DNA, 33 bp, Homo sapien
tactactattgtcagaagagacatttacctaat

SEQ ID NO: 645998 - DNA, 33 bp, Homo sapien
tactactattgtcagaggagacatttacctaat

SEQ ID NO: 645999 - DNA, 33 bp, Homo sapien
gagttgccagagccaacgaggggcacagtttaa

SEQ ID NO: 646000 - DNA, 33 bp, Homo sapien
gagttgccagagccaatgaggggcacagtttaa

SEQ ID NO: 646001 - DNA, 33 bp, Homo sapien
tggcatatggtgactacagaatcttcctcttta

SEQ ID NO: 646002 - DNA, 33 bp, Homo sapien
tggcatatggtgactatagaatcttcctcttta

SEQ ID NO: 646003 - DNA, 33 bp, Homo sapien
gaggggaagacaatgaagttatgtttcacctac

SEQ ID NO: 646004 - DNA, 33 bp, Homo sapien
gaggggaagacaatgatgttatgtttcacctac

SEQ ID NO: 646005 - DNA, 33 bp, Homo sapien
acatttaatctttagcacaggaagagagatgga

SEQ ID NO: 646006 - DNA, 33 bp, Homo sapien
acatttaatctttagcgcaggaagagagatgga

SEQ ID NO: 646007 - DNA, 33 bp, Homo sapien
tcaatatcctgaaaaaataactctcctggtcct

SEQ ID NO: 646008 - DNA, 33 bp, Homo sapien
tcaatatcctgaaaaagtaactctcctggtcct

SEQ ID NO: 646009 - DNA, 33 bp, Homo sapien
tacaagcaccacttgaggttatgctggaactat

SEQ ID NO: 646010 - DNA, 33 bp, Homo sapien
tacaagcaccacttgatgttatgctggaactat

SEQ ID NO: 646011 - DNA, 33 bp, Homo sapien
tcaaaattgcagttccaccttcaacaacggtta

SEQ ID NO: 646012 - DNA, 33 bp, Homo sapien
tcaaaattgcagttccgccttcaacaacggtta

SEQ ID NO: 646013 - DNA, 33 bp, Homo sapien
atgaagccattattggaaattctttaaacataa

SEQ ID NO: 646014 - DNA, 33 bp, Homo sapien
atgaagccattattggcaattctttaaacataa

SEQ ID NO: 646015 - DNA, 33 bp, Homo sapien
atttagctgatacttcgattgtgcactaaggtt

SEQ ID NO: 646016 - DNA, 33 bp, Homo sapien
atttagctgatacttctattgtgcactaaggtt

SEQ ID NO: 646017 - DNA, 33 bp, Homo sapien
tgtatctttatatatcaaaatgttgacgcatag

SEQ ID NO: 646018 - DNA, 33 bp, Homo sapien
tgtatctttatatatcgaaatgttgacgcatag

SEQ ID NO: 646019 - DNA, 33 bp, Homo sapien
aaagatgaatagctcacggaccagaaaaggtga

SEQ ID NO: 646020 - DNA, 33 bp, Homo sapien
aaagatgaatagctcatggaccagaaaaggtga

SEQ ID NO: 646021 - DNA, 33 bp, Homo sapien
tagcttttcaaccctcactccctgcaaccctcc

SEQ ID NO: 646022 - DNA, 33 bp, Homo sapien
tagcttttcaaccctcgctccctgcaaccctcc

SEQ ID NO: 646023 - DNA, 33 bp, Homo sapien
tattttaatgataaagaaaacaatgacaccaac

SEQ ID NO: 646024 - DNA, 33 bp, Homo sapien
tattttaatgataaaggaaacaatgacaccaac

SEQ ID NO: 646025 - DNA, 33 bp, Homo sapien
atttaaattattttccaagcatctagcatacca

SEQ ID NO: 646026 - DNA, 33 bp, Homo sapien
atttaaattattttcctagcatctagcatacca

SEQ ID NO: 646027 - DNA, 33 bp, Homo sapien
ctgtctctgggaacaactattgagatgctatta

SEQ ID NO: 646028 - DNA, 33 bp, Homo sapien
ctgtctctgggaacaattattgagatgctatta

SEQ ID NO: 646029 - DNA, 33 bp, Homo sapien
ctgcctataatggcaaaagaaggaaattaataa

SEQ ID NO: 646030 - DNA, 33 bp, Homo sapien
ctgcctataatggcaagagaaggaaattaataa

SEQ ID NO: 646031 - DNA, 33 bp, Homo sapien
aaatcttgccctttccacaaagtcacataagac

SEQ ID NO: 646032 - DNA, 33 bp, Homo sapien
aaatcttgccctttccgcaaagtcacataagac

SEQ ID NO: 646033 - DNA, 33 bp, Homo sapien
tcagttgagataattacagaataggaggcaaca

SEQ ID NO: 646034 - DNA, 33 bp, Homo sapien
tcagttgagataattagagaataggaggcaaca

SEQ ID NO: 646035 - DNA, 33 bp, Homo sapien
ggtaagaattgcaagactctaaactgtgcatta

SEQ ID NO: 646036 - DNA, 33 bp, Homo sapien
ggtaagaattgcaagagtctaaactgtgcatta

SEQ ID NO: 646037 - DNA, 33 bp, Homo sapien
cataaaggcagaagaaataactatgttgtggtt

SEQ ID NO: 646038 - DNA, 33 bp, Homo sapien
cataaaggcagaagaagtaactatgttgtggtt

SEQ ID NO: 646039 - DNA, 33 bp, Homo sapien
agcagaacatgaaaggaaataagtgcacagtaa

SEQ ID NO: 646040 - DNA, 33 bp, Homo sapien
agcagaacatgaaaggcaataagtgcacagtaa

SEQ ID NO: 646041 - DNA, 33 bp, Homo sapien
actaggtgatccagaaagtggccagatgagtgg

SEQ ID NO: 646042 - DNA, 33 bp, Homo sapien
actaggtgatccagaaggtggccagatgagtgg

SEQ ID NO: 646043 - DNA, 33 bp, Homo sapien
gaatcctttgaatccacgggatcgatgttgctc

SEQ ID NO: 646044 - DNA, 33 bp, Homo sapien
gaatcctttgaatccaggggatcgatgttgctc

SEQ ID NO: 646045 - DNA, 33 bp, Homo sapien
tagtcagattttacccagcttgcaagttaagct

SEQ ID NO: 646046 - DNA, 33 bp, Homo sapien
tagtcagattttaccctgcttgcaagttaagct

SEQ ID NO: 646047 - DNA, 33 bp, Homo sapien
ctgctgtacttgtagacataagactctggaggc

SEQ ID NO: 646048 - DNA, 33 bp, Homo sapien
ctgctgtacttgtagatataagactctggaggc

SEQ ID NO: 646049 - DNA, 33 bp, Homo sapien
gtacaagttgaaattaactcaggcctgaggtct

SEQ ID NO: 646050 - DNA, 33 bp, Homo sapien
gtacaagttgaaattatctcaggcctgaggtct

SEQ ID NO: 646051 - DNA, 33 bp, Homo sapien
tttctgcctctagtgaaagctgtttgaaaatca

SEQ ID NO: 646052 - DNA, 33 bp, Homo sapien
tttctgcctctagtgacagctgtttgaaaatca

SEQ ID NO: 646053 - DNA, 33 bp, Homo sapien
atgaaatgatagaaagaccctaacaggggctaa

SEQ ID NO: 646054 - DNA, 33 bp, Homo sapien
atgaaatgatagaaagtccctaacaggggctaa

SEQ ID NO: 646055 - DNA, 33 bp, Homo sapien
ataaagtttatggccactatctcacaaagtaaa

SEQ ID NO: 646056 - DNA, 33 bp, Homo sapien
ataaagtttatggccattatctcacaaagtaaa

SEQ ID NO: 646057 - DNA, 33 bp, Homo sapien
tgaacataacttagtacatgaaaaagcaatcag

SEQ ID NO: 646058 - DNA, 33 bp, Homo sapien
tgaacataacttagtagatgaaaaagcaatcag

SEQ ID NO: 646059 - DNA, 33 bp, Homo sapien
acatattaagtttttacgagccaatacactaga

SEQ ID NO: 646060 - DNA, 33 bp, Homo sapien
acatattaagtttttatgagccaatacactaga

SEQ ID NO: 646061 - DNA, 33 bp, Homo sapien
agggtccttcacaaaacgcttcacctcctttcc

SEQ ID NO: 646062 - DNA, 33 bp, Homo sapien
agggtccttcacaaaatgcttcacctcctttcc

SEQ ID NO: 646063 - DNA, 33 bp, Homo sapien
cttgaaatagtcaaggaaatactagcctgcatt

SEQ ID NO: 646064 - DNA, 33 bp, Homo sapien
cttgaaatagtcaaggcaatactagcctgcatt

SEQ ID NO: 646065 - DNA, 33 bp, Homo sapien
tacccttctgatcaccaaatattttttcacctc

SEQ ID NO: 646066 - DNA, 33 bp, Homo sapien
tacccttctgatcaccgaatattttttcacctc

SEQ ID NO: 646067 - DNA, 33 bp, Homo sapien
acagaagtaagttgtacaaactgcatcatcaat

SEQ ID NO: 646068 - DNA, 33 bp, Homo sapien
acagaagtaagttgtataaactgcatcatcaat

SEQ ID NO: 646069 - DNA, 33 bp, Homo sapien
ttagacttgattttgacggaggacaatcaattt

SEQ ID NO: 646070 - DNA, 33 bp, Homo sapien
ttagacttgattttgatggaggacaatcaattt

SEQ ID NO: 646071 - DNA, 33 bp, Homo sapien
aatatctcaatcaaaactacaggctcatttgta

SEQ ID NO: 646072 - DNA, 33 bp, Homo sapien
aatatctcaatcaaaagtacaggctcatttgta

SEQ ID NO: 646073 - DNA, 33 bp, Homo sapien
gttgtccactaaattaccttgatgtccaaagaa

SEQ ID NO: 646074 - DNA, 33 bp, Homo sapien
gttgtccactaaattatcttgatgtccaaagaa

SEQ ID NO: 646075 - DNA, 33 bp, Homo sapien
caatgagatatgaatcgaaatttaaaactcagg

SEQ ID NO: 646076 - DNA, 33 bp, Homo sapien
caatgagatatgaatctaaatttaaaactcagg

SEQ ID NO: 646077 - DNA, 33 bp, Homo sapien
gtgttctatttactcaatattgtacctccagat

SEQ ID NO: 646078 - DNA, 33 bp, Homo sapien
gtgttctatttactcagtattgtacctccagat

SEQ ID NO: 646079 - DNA, 33 bp, Homo sapien
tgtattaacttttgagaatatttggctaacatc

SEQ ID NO: 646080 - DNA, 33 bp, Homo sapien
tgtattaacttttgagtatatttggctaacatc

SEQ ID NO: 646081 - DNA, 33 bp, Homo sapien
tgatattagaataaatcagtaggtgttaaccag

SEQ ID NO: 646082 - DNA, 33 bp, Homo sapien
tgatattagaataaatgagtaggtgttaaccag

SEQ ID NO: 646083 - DNA, 33 bp, Homo sapien
aaggaatgctgttgcgccaagtagcaatttaaa

SEQ ID NO: 646084 - DNA, 33 bp, Homo sapien
aaggaatgctgttgcgtcaagtagcaatttaaa

SEQ ID NO: 646085 - DNA, 33 bp, Homo sapien
gtagccgtgtgagaataaactaaaacagtgtgt

SEQ ID NO: 646086 - DNA, 33 bp, Homo sapien
gtagccgtgtgagaatgaactaaaacagtgtgt

SEQ ID NO: 646087 - DNA, 33 bp, Homo sapien
caaagactgtcatggcaagctgtgctcagggaa

SEQ ID NO: 646088 - DNA, 33 bp, Homo sapien
caaagactgtcatggcgagctgtgctcagggaa

SEQ ID NO: 646089 - DNA, 33 bp, Homo sapien
tggcccatttgaataccaagcattttcaggaat

SEQ ID NO: 646090 - DNA, 33 bp, Homo sapien
tggcccatttgaatacgaagcattttcaggaat

SEQ ID NO: 646091 - DNA, 33 bp, Homo sapien
tttgtcagtaattaaaagtatctacaattatat

SEQ ID NO: 646092 - DNA, 33 bp, Homo sapien
tttgtcagtaattaaaggtatctacaattatat

SEQ ID NO: 646093 - DNA, 33 bp, Homo sapien
taacctcaaaatggtacaaatgcatcaaccatc

SEQ ID NO: 646094 - DNA, 33 bp, Homo sapien
taacctcaaaatggtataaatgcatcaaccatc

SEQ ID NO: 646095 - DNA, 33 bp, Homo sapien
tttaaaatgccagaagaccaactttatgcctac

SEQ ID NO: 646096 - DNA, 33 bp, Homo sapien
tttaaaatgccagaaggccaactttatgcctac

SEQ ID NO: 646097 - DNA, 33 bp, Homo sapien
atgaatagaatggagacgaatatgtgtacctgt

SEQ ID NO: 646098 - DNA, 33 bp, Homo sapien
atgaatagaatggagatgaatatgtgtacctgt

SEQ ID NO: 646099 - DNA, 33 bp, Homo sapien
aaggaaaataaagacactctacagagcaattca

SEQ ID NO: 646100 - DNA, 33 bp, Homo sapien
aaggaaaataaagacattctacagagcaattca

SEQ ID NO: 646101 - DNA, 33 bp, Homo sapien
tttttaaatctgggcaacaagtccttacataaa

SEQ ID NO: 646102 - DNA, 33 bp, Homo sapien
tttttaaatctgggcagcaagtccttacataaa

SEQ ID NO: 646103 - DNA, 33 bp, Homo sapien
gatcagaagtccactacaatccttctttcctaa

SEQ ID NO: 646104 - DNA, 33 bp, Homo sapien
gatcagaagtccactagaatccttctttcctaa

SEQ ID NO: 646105 - DNA, 33 bp, Homo sapien
gcgctcatcacgccagaacaaactttttgccta

SEQ ID NO: 646106 - DNA, 33 bp, Homo sapien
gcgctcatcacgccaggacaaactttttgccta

SEQ ID NO: 646107 - DNA, 33 bp, Homo sapien
gtataattataagccaaagactgaaagcaaaca

SEQ ID NO: 646108 - DNA, 33 bp, Homo sapien
gtataattataagccagagactgaaagcaaaca

SEQ ID NO: 646109 - DNA, 33 bp, Homo sapien
aaaaagatgatggtcacgattcccaagctgtag

SEQ ID NO: 646110 - DNA, 33 bp, Homo sapien
aaaaagatgatggtcatgattcccaagctgtag

SEQ ID NO: 646111 - DNA, 33 bp, Homo sapien
aagaaggataaccactcaaggaatcctaagact

SEQ ID NO: 646112 - DNA, 33 bp, Homo sapien
aagaaggataaccactgaaggaatcctaagact

SEQ ID NO: 646113 - DNA, 33 bp, Homo sapien
gtgttaccttatcacactactcaatttcccttt

SEQ ID NO: 646114 - DNA, 33 bp, Homo sapien
gtgttaccttatcacattactcaatttcccttt

SEQ ID NO: 646115 - DNA, 33 bp, Homo sapien
ttttcaagaaagcacaatgtaatcacaacatga

SEQ ID NO: 646116 - DNA, 33 bp, Homo sapien
ttttcaagaaagcacagtgtaatcacaacatga

SEQ ID NO: 646117 - DNA, 33 bp, Homo sapien
tgcagaaaattttgacccaataatcccattact

SEQ ID NO: 646118 - DNA, 33 bp, Homo sapien
tgcagaaaattttgacgcaataatcccattact

SEQ ID NO: 646119 - DNA, 33 bp, Homo sapien
aacaagaaaaaaatccaaacatgagtatgtaaa

SEQ ID NO: 646120 - DNA, 33 bp, Homo sapien
aacaagaaaaaaatccgaacatgagtatgtaaa

SEQ ID NO: 646121 - DNA, 33 bp, Homo sapien
agctttacctgtgtgccccatattgagaagcct

SEQ ID NO: 646122 - DNA, 33 bp, Homo sapien
agctttacctgtgtgcgccatattgagaagcct

SEQ ID NO: 646123 - DNA, 33 bp, Homo sapien
aggaaagtggcaaaagccttgaagcaaaatatt

SEQ ID NO: 646124 - DNA, 33 bp, Homo sapien
aggaaagtggcaaaagtcttgaagcaaaatatt

SEQ ID NO: 646125 - DNA, 33 bp, Homo sapien
gattgattaccctcgcagattcagcagttgaca

SEQ ID NO: 646126 - DNA, 33 bp, Homo sapien
gattgattaccctcgcggattcagcagttgaca

SEQ ID NO: 646127 - DNA, 33 bp, Homo sapien
tccctgctaaatgtaaagcttaattggagggat

SEQ ID NO: 646128 - DNA, 33 bp, Homo sapien
tccctgctaaatgtaaggcttaattggagggat

SEQ ID NO: 646129 - DNA, 33 bp, Homo sapien
attcttcttcagttttcaaaacagatataaaat

SEQ ID NO: 646130 - DNA, 33 bp, Homo sapien
attcttcttcagttttgaaaacagatataaaat

SEQ ID NO: 646131 - DNA, 33 bp, Homo sapien
catgcttctgcacaggacagtgaaagctctgac

SEQ ID NO: 646132 - DNA, 33 bp, Homo sapien
catgcttctgcacaggccagtgaaagctctgac

SEQ ID NO: 646133 - DNA, 33 bp, Homo sapien
aatttcctcaacattcaaattcatttgtaagca

SEQ ID NO: 646134 - DNA, 33 bp, Homo sapien
aatttcctcaacattccaattcatttgtaagca

SEQ ID NO: 646135 - DNA, 33 bp, Homo sapien
gcttagagttctgagacaaagtaaattccattg

SEQ ID NO: 646136 - DNA, 33 bp, Homo sapien
gcttagagttctgagagaaagtaaattccattg

SEQ ID NO: 646137 - DNA, 33 bp, Homo sapien
catggtagagacaatgcaaatggtcagtttctg

SEQ ID NO: 646138 - DNA, 33 bp, Homo sapien
catggtagagacaatgtaaatggtcagtttctg

SEQ ID NO: 646139 - DNA, 33 bp, Homo sapien
tgacaacccccgtacaggtatcactacttcaga

SEQ ID NO: 646140 - DNA, 33 bp, Homo sapien
tgacaacccccgtacatgtatcactacttcaga

SEQ ID NO: 646141 - DNA, 33 bp, Homo sapien
tgtgccagtgacacccacagacagggcatgaaa

SEQ ID NO: 646142 - DNA, 33 bp, Homo sapien
tgtgccagtgacacccgcagacagggcatgaaa

SEQ ID NO: 646143 - DNA, 33 bp, Homo sapien
tagaaagtttcagagcagcaagaatataaacct

SEQ ID NO: 646144 - DNA, 33 bp, Homo sapien
tagaaagtttcagagccgcaagaatataaacct

SEQ ID NO: 646145 - DNA, 33 bp, Homo sapien
gctttagatataaccactatgtaaggaattggg

SEQ ID NO: 646146 - DNA, 33 bp, Homo sapien
gctttagatataaccattatgtaaggaattggg

SEQ ID NO: 646147 - DNA, 33 bp, Homo sapien
ctgacactgggccttacgttctcagccatacct

SEQ ID NO: 646148 - DNA, 33 bp, Homo sapien
ctgacactgggccttatgttctcagccatacct

SEQ ID NO: 646149 - DNA, 33 bp, Homo sapien
cactaagcaccgcaaccaagtaaaattgttacc

SEQ ID NO: 646150 - DNA, 33 bp, Homo sapien
cactaagcaccgcaactaagtaaaattgttacc

SEQ ID NO: 646151 - DNA, 33 bp, Homo sapien
gagaaagagaaccaggaagaaagcgtatttcat

SEQ ID NO: 646152 - DNA, 33 bp, Homo sapien
gagaaagagaaccagggagaaagcgtatttcat

SEQ ID NO: 646153 - DNA, 33 bp, Homo sapien
aacaatgactagctaactcaccacacccattta

SEQ ID NO: 646154 - DNA, 33 bp, Homo sapien
aacaatgactagctaattcaccacacccattta

SEQ ID NO: 646155 - DNA, 33 bp, Homo sapien
aacccagttctctagaaagatcaatgtcagtca

SEQ ID NO: 646156 - DNA, 33 bp, Homo sapien
aacccagttctctagatagatcaatgtcagtca

SEQ ID NO: 646157 - DNA, 33 bp, Homo sapien
gcttcatcaatatcgaaatgttaaaagtgtggg

SEQ ID NO: 646158 - DNA, 33 bp, Homo sapien
gcttcatcaatatcgagatgttaaaagtgtggg

SEQ ID NO: 646159 - DNA, 33 bp, Homo sapien
aatggtaaacaacaaacgcaactgagtattact

SEQ ID NO: 646160 - DNA, 33 bp, Homo sapien
aatggtaaacaacaaatgcaactgagtattact

SEQ ID NO: 646161 - DNA, 33 bp, Homo sapien
ctctaagaggttatcaataccctgaatactgag

SEQ ID NO: 646162 - DNA, 33 bp, Homo sapien
ctctaagaggttatcattaccctgaatactgag

SEQ ID NO: 646163 - DNA, 33 bp, Homo sapien
tgtgatggtttctgaactatttcctttgacagt

SEQ ID NO: 646164 - DNA, 33 bp, Homo sapien
tgtgatggtttctgaagtatttcctttgacagt

SEQ ID NO: 646165 - DNA, 33 bp, Homo sapien
agagaatatgaagaaacggaatttgataattgt

SEQ ID NO: 646166 - DNA, 33 bp, Homo sapien
agagaatatgaagaaatggaatttgataattgt

SEQ ID NO: 646167 - DNA, 33 bp, Homo sapien
tttttatataacactacgctgaatattaatgat

SEQ ID NO: 646168 - DNA, 33 bp, Homo sapien
tttttatataacactatgctgaatattaatgat

SEQ ID NO: 646169 - DNA, 33 bp, Homo sapien
ttatactggttgactacggatatgctgtgtatc

SEQ ID NO: 646170 - DNA, 33 bp, Homo sapien
ttatactggttgactatggatatgctgtgtatc

SEQ ID NO: 646171 - DNA, 33 bp, Homo sapien
atatatcagtttgaaagaataagcatatatcgc

SEQ ID NO: 646172 - DNA, 33 bp, Homo sapien
atatatcagtttgaaataataagcatatatcgc

SEQ ID NO: 646173 - DNA, 33 bp, Homo sapien
ccagaaattgtttacacgaggaaaattaatcta

SEQ ID NO: 646174 - DNA, 33 bp, Homo sapien
ccagaaattgtttacaggaggaaaattaatcta

SEQ ID NO: 646175 - DNA, 33 bp, Homo sapien
agatccttcagttgcaatattaggttttttttt

SEQ ID NO: 646176 - DNA, 33 bp, Homo sapien
agatccttcagttgcactattaggttttttttt

SEQ ID NO: 646177 - DNA, 33 bp, Homo sapien
ttttgaaaccttgagaaagtatataagtttctg

SEQ ID NO: 646178 - DNA, 33 bp, Homo sapien
ttttgaaaccttgagatagtatataagtttctg

SEQ ID NO: 646179 - DNA, 33 bp, Homo sapien
cataaatagtcatggcccctaaagcttactgaa

SEQ ID NO: 646180 - DNA, 33 bp, Homo sapien
cataaatagtcatggctcctaaagcttactgaa

SEQ ID NO: 646181 - DNA, 33 bp, Homo sapien
ggtgcctggcgtacacaagtttttataaccagc

SEQ ID NO: 646182 - DNA, 33 bp, Homo sapien
ggtgcctggcgtacacgagtttttataaccagc

SEQ ID NO: 646183 - DNA, 33 bp, Homo sapien
taatgtctctcttcacaattagaatttacttct

SEQ ID NO: 646184 - DNA, 33 bp, Homo sapien
taatgtctctcttcaccattagaatttacttct

SEQ ID NO: 646185 - DNA, 33 bp, Homo sapien
ttaaaagacggagaataaccgtgttgcacagac

SEQ ID NO: 646186 - DNA, 33 bp, Homo sapien
ttaaaagacggagaatcaccgtgttgcacagac

SEQ ID NO: 646187 - DNA, 33 bp, Homo sapien
atgtattaagaccataatatatgccagttacta

SEQ ID NO: 646188 - DNA, 33 bp, Homo sapien
atgtattaagaccatagtatatgccagttacta

SEQ ID NO: 646189 - DNA, 33 bp, Homo sapien
tagacaacaagttttcaatgtttaacaatagta

SEQ ID NO: 646190 - DNA, 33 bp, Homo sapien
tagacaacaagttttccatgtttaacaatagta

SEQ ID NO: 646191 - DNA, 33 bp, Homo sapien
aggtatgaactttgacaaacttggagctgatac

SEQ ID NO: 646192 - DNA, 33 bp, Homo sapien
aggtatgaactttgacgaacttggagctgatac

SEQ ID NO: 646193 - DNA, 33 bp, Homo sapien
tagaagcaagagcttcccaagatgtctttttaa

SEQ ID NO: 646194 - DNA, 33 bp, Homo sapien
tagaagcaagagcttcgcaagatgtctttttaa

SEQ ID NO: 646195 - DNA, 33 bp, Homo sapien
ggtgacagtgcacaccaacttatttaactacta

SEQ ID NO: 646196 - DNA, 33 bp, Homo sapien
ggtgacagtgcacaccgacttatttaactacta

SEQ ID NO: 646197 - DNA, 33 bp, Homo sapien
cataaatatccttgcacatgatgacaaattgtg

SEQ ID NO: 646198 - DNA, 33 bp, Homo sapien
cataaatatccttgcatatgatgacaaattgtg

SEQ ID NO: 646199 - DNA, 33 bp, Homo sapien
cttctctgttgcaataacattggatacaagaaa

SEQ ID NO: 646200 - DNA, 33 bp, Homo sapien
cttctctgttgcaatagcattggatacaagaaa

SEQ ID NO: 646201 - DNA, 33 bp, Homo sapien
ggagtctcttataaagccactaatcccaataat

SEQ ID NO: 646202 - DNA, 33 bp, Homo sapien
ggagtctcttataaaggcactaatcccaataat

SEQ ID NO: 646203 - DNA, 33 bp, Homo sapien
ctatgaaattagcaaaatatgtacaagtgaccc

SEQ ID NO: 646204 - DNA, 33 bp, Homo sapien
ctatgaaattagcaaactatgtacaagtgaccc

SEQ ID NO: 646205 - DNA, 33 bp, Homo sapien
cattgtcgtgactaaaggtagaaggcttgaaga

SEQ ID NO: 646206 - DNA, 33 bp, Homo sapien
cattgtcgtgactaaatgtagaaggcttgaaga

SEQ ID NO: 646207 - DNA, 33 bp, Homo sapien
ccagttgaagaaaataacataatggccagcagt

SEQ ID NO: 646208 - DNA, 33 bp, Homo sapien
ccagttgaagaaaatagcataatggccagcagt

SEQ ID NO: 646209 - DNA, 33 bp, Homo sapien
aatagccaaagctatccgaacaaaaagaacaac

SEQ ID NO: 646210 - DNA, 33 bp, Homo sapien
aatagccaaagctatcggaacaaaaagaacaac

SEQ ID NO: 646211 - DNA, 33 bp, Homo sapien
ctttcttaagcataaggagtcttgccttaacac

SEQ ID NO: 646212 - DNA, 33 bp, Homo sapien
ctttcttaagcataagtagtcttgccttaacac

SEQ ID NO: 646213 - DNA, 33 bp, Homo sapien
cccctctcctgagttcacagaatcactctctgc

SEQ ID NO: 646214 - DNA, 33 bp, Homo sapien
cccctctcctgagttcgcagaatcactctctgc

SEQ ID NO: 646215 - DNA, 33 bp, Homo sapien
ggtactgtaagtgctcaccttatttttggttct

SEQ ID NO: 646216 - DNA, 33 bp, Homo sapien
ggtactgtaagtgctcgccttatttttggttct

SEQ ID NO: 646217 - DNA, 33 bp, Homo sapien
atgaatctcagaacaaatgcctgaaagttatag

SEQ ID NO: 646218 - DNA, 33 bp, Homo sapien
atgaatctcagaacaagtgcctgaaagttatag

SEQ ID NO: 646219 - DNA, 33 bp, Homo sapien
tttggagagatgagaaaagttgaagagtagcta

SEQ ID NO: 646220 - DNA, 33 bp, Homo sapien
tttggagagatgagaagagttgaagagtagcta

SEQ ID NO: 646221 - DNA, 33 bp, Homo sapien
catcatgtaataataaagcacattttcactttc

SEQ ID NO: 646222 - DNA, 33 bp, Homo sapien
catcatgtaataataaggcacattttcactttc

SEQ ID NO: 646223 - DNA, 33 bp, Homo sapien
gagggaaaagactaaaatatgtgaaaagttgct

SEQ ID NO: 646224 - DNA, 33 bp, Homo sapien
gagggaaaagactaaagtatgtgaaaagttgct

SEQ ID NO: 646225 - DNA, 33 bp, Homo sapien
aatgcaaaaacagaatcaactactctattattc

SEQ ID NO: 646226 - DNA, 33 bp, Homo sapien
aatgcaaaaacagaatgaactactctattattc

SEQ ID NO: 646227 - DNA, 33 bp, Homo sapien
tactaacagcaaaaacaacaacttggctgaaat

SEQ ID NO: 646228 - DNA, 33 bp, Homo sapien
tactaacagcaaaaacgacaacttggctgaaat

SEQ ID NO: 646229 - DNA, 33 bp, Homo sapien
ttgcagtaacatgtgccaattatttgttactgg

SEQ ID NO: 646230 - DNA, 33 bp, Homo sapien
ttgcagtaacatgtgctaattatttgttactgg

SEQ ID NO: 646231 - DNA, 33 bp, Homo sapien
aagtggcctttacctacaggctccaacacttta

SEQ ID NO: 646232 - DNA, 33 bp, Homo sapien
aagtggcctttacctagaggctccaacacttta

SEQ ID NO: 646233 - DNA, 33 bp, Homo sapien
tattttaggattgaaaacatttgaagcttttag

SEQ ID NO: 646234 - DNA, 33 bp, Homo sapien
tattttaggattgaaagcatttgaagcttttag

SEQ ID NO: 646235 - DNA, 33 bp, Homo sapien
catggagatctgaaaacaaatactgggacttga

SEQ ID NO: 646236 - DNA, 33 bp, Homo sapien
catggagatctgaaaataaatactgggacttga

SEQ ID NO: 646237 - DNA, 33 bp, Homo sapien
gtgggggctctaactccacatttctcctgagca

SEQ ID NO: 646238 - DNA, 33 bp, Homo sapien
gtgggggctctaactcgacatttctcctgagca

SEQ ID NO: 646239 - DNA, 33 bp, Homo sapien
taccactttatagtcactattccagatatatga

SEQ ID NO: 646240 - DNA, 33 bp, Homo sapien
taccactttatagtcagtattccagatatatga

SEQ ID NO: 646241 - DNA, 33 bp, Homo sapien
ttctgttaaattctcaaggtccttattgaatga

SEQ ID NO: 646242 - DNA, 33 bp, Homo sapien
ttctgttaaattctcagggtccttattgaatga

SEQ ID NO: 646243 - DNA, 33 bp, Homo sapien
atcttcattcaagacactgccttatactcaatg

SEQ ID NO: 646244 - DNA, 33 bp, Homo sapien
atcttcattcaagacattgccttatactcaatg

SEQ ID NO: 646245 - DNA, 33 bp, Homo sapien
cttcagactcagtctgaaaaaagtacactgtgc

SEQ ID NO: 646246 - DNA, 33 bp, Homo sapien
cttcagactcagtctggaaaaagtacactgtgc

SEQ ID NO: 646247 - DNA, 33 bp, Homo sapien
gtcaggaactgcagtcaaagttcaaatattaga

SEQ ID NO: 646248 - DNA, 33 bp, Homo sapien
gtcaggaactgcagtcgaagttcaaatattaga

SEQ ID NO: 646249 - DNA, 33 bp, Homo sapien
ctcattccacactttaaggtcatattaaccaag

SEQ ID NO: 646250 - DNA, 33 bp, Homo sapien
ctcattccacactttacggtcatattaaccaag

SEQ ID NO: 646251 - DNA, 33 bp, Homo sapien
tgtgagggtgactaaactcaagcagggcagtca

SEQ ID NO: 646252 - DNA, 33 bp, Homo sapien
tgtgagggtgactaaattcaagcagggcagtca

SEQ ID NO: 646253 - DNA, 33 bp, Homo sapien
ttttgaattccaaactgaagcttagagatggtt

SEQ ID NO: 646254 - DNA, 33 bp, Homo sapien
ttttgaattccaaacttaagcttagagatggtt

SEQ ID NO: 646255 - DNA, 33 bp, Homo sapien
agcagattgcactaaacgtattttattcctgca

SEQ ID NO: 646256 - DNA, 33 bp, Homo sapien
agcagattgcactaaatgtattttattcctgca

SEQ ID NO: 646257 - DNA, 33 bp, Homo sapien
atgcaaattgcatcaaaaccctttgccttcaaa

SEQ ID NO: 646258 - DNA, 33 bp, Homo sapien
atgcaaattgcatcaagaccctttgccttcaaa

SEQ ID NO: 646259 - DNA, 33 bp, Homo sapien
ttagacatagtaaatgaacccttagctaccatt

SEQ ID NO: 646260 - DNA, 33 bp, Homo sapien
ttagacatagtaaatgcacccttagctaccatt

SEQ ID NO: 646261 - DNA, 33 bp, Homo sapien
gcctgctttagtgctcaaggtcctgacctgctg

SEQ ID NO: 646262 - DNA, 33 bp, Homo sapien
gcctgctttagtgctcgaggtcctgacctgctg

SEQ ID NO: 646263 - DNA, 33 bp, Homo sapien
ctaacttgtgattgaaccagtcaatgagttgct

SEQ ID NO: 646264 - DNA, 33 bp, Homo sapien
ctaacttgtgattgaatcagtcaatgagttgct

SEQ ID NO: 646265 - DNA, 33 bp, Homo sapien
gtgtgatgagttctcagggcgttagttctacaa

SEQ ID NO: 646266 - DNA, 33 bp, Homo sapien
gtgtgatgagttctcatggcgttagttctacaa

SEQ ID NO: 646267 - DNA, 33 bp, Homo sapien
gttctagtatccccccaaaaaaatgttccttag

SEQ ID NO: 646268 - DNA, 33 bp, Homo sapien
gttctagtatcccccccaaaaaatgttccttag

SEQ ID NO: 646269 - DNA, 33 bp, Homo sapien
agaccaatctgtctcaaaatatgaagcgaaaaa

SEQ ID NO: 646270 - DNA, 33 bp, Homo sapien
agaccaatctgtctcataatatgaagcgaaaaa

SEQ ID NO: 646271 - DNA, 33 bp, Homo sapien
taccagaagcaggaaaggctagtgggctgaagt

SEQ ID NO: 646272 - DNA, 33 bp, Homo sapien
taccagaagcaggaaatgctagtgggctgaagt

SEQ ID NO: 646273 - DNA, 33 bp, Homo sapien
cagccacagaaaacaaagagatcctgtcatttg

SEQ ID NO: 646274 - DNA, 33 bp, Homo sapien
cagccacagaaaacaatgagatcctgtcatttg

SEQ ID NO: 646275 - DNA, 33 bp, Homo sapien
gacatccctcagacagaagagagaataagcagc

SEQ ID NO: 646276 - DNA, 33 bp, Homo sapien
gacatccctcagacaggagagagaataagcagc

SEQ ID NO: 646277 - DNA, 33 bp, Homo sapien
ttaactcaggcggttacatagattttacatgta

SEQ ID NO: 646278 - DNA, 33 bp, Homo sapien
ttaactcaggcggttatatagattttacatgta

SEQ ID NO: 646279 - DNA, 33 bp, Homo sapien
tcgggcaattttccaaagctacatagagaactg

SEQ ID NO: 646280 - DNA, 33 bp, Homo sapien
tcgggcaattttccaatgctacatagagaactg

SEQ ID NO: 646281 - DNA, 33 bp, Homo sapien
attgaataggaagaaacgtacagataaacaacc

SEQ ID NO: 646282 - DNA, 33 bp, Homo sapien
attgaataggaagaaatgtacagataaacaacc

SEQ ID NO: 646283 - DNA, 33 bp, Homo sapien
attctttcttacacaaacatcatgttgaataca

SEQ ID NO: 646284 - DNA, 33 bp, Homo sapien
attctttcttacacaatcatcatgttgaataca

SEQ ID NO: 646285 - DNA, 33 bp, Homo sapien
tattttgtgtatttgcaatgaataatgtttatg

SEQ ID NO: 646286 - DNA, 33 bp, Homo sapien
tattttgtgtatttgctatgaataatgtttatg

SEQ ID NO: 646287 - DNA, 33 bp, Homo sapien
agatagcgtttgtacacacaaatattcaaaaga

SEQ ID NO: 646288 - DNA, 33 bp, Homo sapien
agatagcgtttgtacagacaaatattcaaaaga

SEQ ID NO: 646289 - DNA, 33 bp, Homo sapien
actttcgcttctgcaccgatatgagtaatttcc

SEQ ID NO: 646290 - DNA, 33 bp, Homo sapien
actttcgcttctgcactgatatgagtaatttcc

SEQ ID NO: 646291 - DNA, 33 bp, Homo sapien
atcaatcatcttcttccatgtacatttggtaaa

SEQ ID NO: 646292 - DNA, 33 bp, Homo sapien
atcaatcatcttcttctatgtacatttggtaaa

SEQ ID NO: 646293 - DNA, 33 bp, Homo sapien
attgatatgcctcctggagtggtcttaaaattg

SEQ ID NO: 646294 - DNA, 33 bp, Homo sapien
attgatatgcctcctgtagtggtcttaaaattg

SEQ ID NO: 646295 - DNA, 33 bp, Homo sapien
gctagcacttccaataatataccaaatccagca

SEQ ID NO: 646296 - DNA, 33 bp, Homo sapien
gctagcacttccaatactataccaaatccagca

SEQ ID NO: 646297 - DNA, 33 bp, Homo sapien
tctgctgagagctgggaagacaggacaacctcc

SEQ ID NO: 646298 - DNA, 33 bp, Homo sapien
tctgctgagagctggggagacaggacaacctcc

SEQ ID NO: 646299 - DNA, 33 bp, Homo sapien
tgaatcacgcttggcaagtatgggacccaggct

SEQ ID NO: 646300 - DNA, 33 bp, Homo sapien
tgaatcacgcttggcaggtatgggacccaggct

SEQ ID NO: 646301 - DNA, 33 bp, Homo sapien
agtggtaatcaatataagcacaggattcccaaa

SEQ ID NO: 646302 - DNA, 33 bp, Homo sapien
agtggtaatcaatatatgcacaggattcccaaa

SEQ ID NO: 646303 - DNA, 33 bp, Homo sapien
agataaattgcaaacccaggtaacaaatcagca

SEQ ID NO: 646304 - DNA, 33 bp, Homo sapien
agataaattgcaaaccgaggtaacaaatcagca

SEQ ID NO: 646305 - DNA, 33 bp, Homo sapien
ctgcttctgttcattgcagcaaatagtttttgt

SEQ ID NO: 646306 - DNA, 33 bp, Homo sapien
ctgcttctgttcattgtagcaaatagtttttgt

SEQ ID NO: 646307 - DNA, 33 bp, Homo sapien
tccctgctgggtcagaaatagagattcaacaat

SEQ ID NO: 646308 - DNA, 33 bp, Homo sapien
tccctgctgggtcagagatagagattcaacaat

SEQ ID NO: 646309 - DNA, 33 bp, Homo sapien
ccttacacagttgtccaaatctcagttaatgat

SEQ ID NO: 646310 - DNA, 33 bp, Homo sapien
ccttacacagttgtcccaatctcagttaatgat

SEQ ID NO: 646311 - DNA, 33 bp, Homo sapien
taaggagcaagtttgacgagtaaaatgagaaaa

SEQ ID NO: 646312 - DNA, 33 bp, Homo sapien
taaggagcaagtttgatgagtaaaatgagaaaa

SEQ ID NO: 646313 - DNA, 33 bp, Homo sapien
gagatgccagcaactcaaaatttataattactc

SEQ ID NO: 646314 - DNA, 33 bp, Homo sapien
gagatgccagcaactccaaatttataattactc

SEQ ID NO: 646315 - DNA, 33 bp, Homo sapien
actcctggtattatcaagcagtcatgaaaaagt

SEQ ID NO: 646316 - DNA, 33 bp, Homo sapien
actcctggtattatcacgcagtcatgaaaaagt

SEQ ID NO: 646317 - DNA, 33 bp, Homo sapien
agttaatatttaagcaagtattcaaaggaaggg

SEQ ID NO: 646318 - DNA, 33 bp, Homo sapien
agttaatatttaagcaggtattcaaaggaaggg

SEQ ID NO: 646319 - DNA, 33 bp, Homo sapien
aggggacatgacaaataaatgcaaagtggcatc

SEQ ID NO: 646320 - DNA, 33 bp, Homo sapien
aggggacatgacaaatcaatgcaaagtggcatc

SEQ ID NO: 646321 - DNA, 33 bp, Homo sapien
gatgtaattcagattgcaatttatggaaatgct

SEQ ID NO: 646322 - DNA, 33 bp, Homo sapien
gatgtaattcagattgtaatttatggaaatgct

SEQ ID NO: 646323 - DNA, 33 bp, Homo sapien
tggtacaaatttagcaaactagtccgtttcatg

SEQ ID NO: 646324 - DNA, 33 bp, Homo sapien
tggtacaaatttagcatactagtccgtttcatg

SEQ ID NO: 646325 - DNA, 33 bp, Homo sapien
ggccacttctgcttcaatgaaactcagtaatga

SEQ ID NO: 646326 - DNA, 33 bp, Homo sapien
ggccacttctgcttcagtgaaactcagtaatga

SEQ ID NO: 646327 - DNA, 33 bp, Homo sapien
gttctccataaaaaaaaagagacaaagcactgc

SEQ ID NO: 646328 - DNA, 33 bp, Homo sapien
gttctccataaaaaaatagagacaaagcactgc

SEQ ID NO: 646329 - DNA, 33 bp, Homo sapien
gcatatgtcacacctaaggttcctgtgaaattg

SEQ ID NO: 646330 - DNA, 33 bp, Homo sapien
gcatatgtcacacctagggttcctgtgaaattg

SEQ ID NO: 646331 - DNA, 33 bp, Homo sapien
tctatcagattctgcaataaaaatttactactc

SEQ ID NO: 646332 - DNA, 33 bp, Homo sapien
tctatcagattctgcagtaaaaatttactactc

SEQ ID NO: 646333 - DNA, 33 bp, Homo sapien
atactgccttttgtgacgtgatgttcatattta

SEQ ID NO: 646334 - DNA, 33 bp, Homo sapien
atactgccttttgtgatgtgatgttcatattta

SEQ ID NO: 646335 - DNA, 33 bp, Homo sapien
caattcttcaggttcccattgtagtgatacaac

SEQ ID NO: 646336 - DNA, 33 bp, Homo sapien
caattcttcaggttcctattgtagtgatacaac

SEQ ID NO: 646337 - DNA, 33 bp, Homo sapien
tctcaattgcctgtcccaatagcatgttctaca

SEQ ID NO: 646338 - DNA, 33 bp, Homo sapien
tctcaattgcctgtcctaatagcatgttctaca

SEQ ID NO: 646339 - DNA, 33 bp, Homo sapien
gagtaatttgctttgcgcatcgaatactgattt

SEQ ID NO: 646340 - DNA, 33 bp, Homo sapien
gagtaatttgctttgctcatcgaatactgattt

SEQ ID NO: 646341 - DNA, 33 bp, Homo sapien
ccaagataccaataaacaggagaaaatgagcct

SEQ ID NO: 646342 - DNA, 33 bp, Homo sapien
ccaagataccaataaagaggagaaaatgagcct

SEQ ID NO: 646343 - DNA, 33 bp, Homo sapien
tacaagtatgggaactaagtcagaaagtggaag

SEQ ID NO: 646344 - DNA, 33 bp, Homo sapien
tacaagtatgggaactgagtcagaaagtggaag

SEQ ID NO: 646345 - DNA, 33 bp, Homo sapien
attctgaagcactataataactacatgaaacat

SEQ ID NO: 646346 - DNA, 33 bp, Homo sapien
attctgaagcactatagtaactacatgaaacat

SEQ ID NO: 646347 - DNA, 33 bp, Homo sapien
agctagagtttctctaagtgggccttcaatttt

SEQ ID NO: 646348 - DNA, 33 bp, Homo sapien
agctagagtttctctacgtgggccttcaatttt

SEQ ID NO: 646349 - DNA, 33 bp, Homo sapien
tatgctgtaaactagaacctttaatactcggtc

SEQ ID NO: 646350 - DNA, 33 bp, Homo sapien
tatgctgtaaactagaccctttaatactcggtc

SEQ ID NO: 646351 - DNA, 33 bp, Homo sapien
gtattattctagtgacaaaatgagctttctctg

SEQ ID NO: 646352 - DNA, 33 bp, Homo sapien
gtattattctagtgacgaaatgagctttctctg

SEQ ID NO: 646353 - DNA, 33 bp, Homo sapien
gagctggtgaaaatagaagcattaaagctgatc

SEQ ID NO: 646354 - DNA, 33 bp, Homo sapien
gagctggtgaaaataggagcattaaagctgatc

SEQ ID NO: 646355 - DNA, 33 bp, Homo sapien
gaacacaacttaataacgttctgacaactgtag

SEQ ID NO: 646356 - DNA, 33 bp, Homo sapien
gaacacaacttaataatgttctgacaactgtag

SEQ ID NO: 646357 - DNA, 33 bp, Homo sapien
aaattccatttatgaccggcttctatttctcct

SEQ ID NO: 646358 - DNA, 33 bp, Homo sapien
aaattccatttatgactggcttctatttctcct

SEQ ID NO: 646359 - DNA, 33 bp, Homo sapien
cagttaaaatggctgcaatcaaaaggaaaacaa

SEQ ID NO: 646360 - DNA, 33 bp, Homo sapien
cagttaaaatggctgcgatcaaaaggaaaacaa

SEQ ID NO: 646361 - DNA, 33 bp, Homo sapien
atagatagaaaacagacctgaggttggtaggag

SEQ ID NO: 646362 - DNA, 33 bp, Homo sapien
atagatagaaaacagatctgaggttggtaggag

SEQ ID NO: 646363 - DNA, 33 bp, Homo sapien
atgagctatcaagcaaacaaaatacttggagaa

SEQ ID NO: 646364 - DNA, 33 bp, Homo sapien
atgagctatcaagcaatcaaaatacttggagaa

SEQ ID NO: 646365 - DNA, 33 bp, Homo sapien
aaaaaagcaacacacgaaagctattaaatttta

SEQ ID NO: 646366 - DNA, 33 bp, Homo sapien
aaaaaagcaacacacggaagctattaaatttta

SEQ ID NO: 646367 - DNA, 33 bp, Homo sapien
ttgtatggagtgaagccatctcttagccagatt

SEQ ID NO: 646368 - DNA, 33 bp, Homo sapien
ttgtatggagtgaagctatctcttagccagatt

SEQ ID NO: 646369 - DNA, 33 bp, Homo sapien
gttgcctagaaacccacagcaaagatgttgccc

SEQ ID NO: 646370 - DNA, 33 bp, Homo sapien
gttgcctagaaacccagagcaaagatgttgccc

SEQ ID NO: 646371 - DNA, 33 bp, Homo sapien
ttttttcatttgcctcacaatattgactatttt

SEQ ID NO: 646372 - DNA, 33 bp, Homo sapien
ttttttcatttgcctcgcaatattgactatttt

SEQ ID NO: 646373 - DNA, 33 bp, Homo sapien
ggaaatacaacaggaacaggaatcaaataaggc

SEQ ID NO: 646374 - DNA, 33 bp, Homo sapien
ggaaatacaacaggaagaggaatcaaataaggc

SEQ ID NO: 646375 - DNA, 33 bp, Homo sapien
gttctttcaactggacccatatctgaatcttga

SEQ ID NO: 646376 - DNA, 33 bp, Homo sapien
gttctttcaactggactcatatctgaatcttga

SEQ ID NO: 646377 - DNA, 33 bp, Homo sapien
ctcctttcaatgttcacagtatcaaaataatat

SEQ ID NO: 646378 - DNA, 33 bp, Homo sapien
ctcctttcaatgttcatagtatcaaaataatat

SEQ ID NO: 646379 - DNA, 33 bp, Homo sapien
aatttgcaatcggaaccaagagtttatatttat

SEQ ID NO: 646380 - DNA, 33 bp, Homo sapien
aatttgcaatcggaactaagagtttatatttat

SEQ ID NO: 646381 - DNA, 33 bp, Homo sapien
tcagaagccaaagagaaaaaggggtcatcattg

SEQ ID NO: 646382 - DNA, 33 bp, Homo sapien
tcagaagccaaagagagaaaggggtcatcattg

SEQ ID NO: 646383 - DNA, 33 bp, Homo sapien
ttccgaaacttgggtcactcatcaaaatactaa

SEQ ID NO: 646384 - DNA, 33 bp, Homo sapien
ttccgaaacttgggtctctcatcaaaatactaa

SEQ ID NO: 646385 - DNA, 33 bp, Homo sapien
tacccatgcataacaaatgaccttcaaaactta

SEQ ID NO: 646386 - DNA, 33 bp, Homo sapien
tacccatgcataacaagtgaccttcaaaactta

SEQ ID NO: 646387 - DNA, 33 bp, Homo sapien
ttctcactcaagtctacggaaacaaggaaataa

SEQ ID NO: 646388 - DNA, 33 bp, Homo sapien
ttctcactcaagtctatggaaacaaggaaataa

SEQ ID NO: 646389 - DNA, 33 bp, Homo sapien
aggagcaaattaccccccataagatgtgcttta

SEQ ID NO: 646390 - DNA, 33 bp, Homo sapien
aggagcaaattacccctcataagatgtgcttta

SEQ ID NO: 646391 - DNA, 33 bp, Homo sapien
tatgaagcagctttaaaagactgacacattctg

SEQ ID NO: 646392 - DNA, 33 bp, Homo sapien
tatgaagcagctttaacagactgacacattctg

SEQ ID NO: 646393 - DNA, 33 bp, Homo sapien
tgttagattatgggacacatggtagcctaaata

SEQ ID NO: 646394 - DNA, 33 bp, Homo sapien
tgttagattatgggacgcatggtagcctaaata

SEQ ID NO: 646395 - DNA, 33 bp, Homo sapien
gaaaagtgtaaagagaggtaattcaaagaggag

SEQ ID NO: 646396 - DNA, 33 bp, Homo sapien
gaaaagtgtaaagagatgtaattcaaagaggag

SEQ ID NO: 646397 - DNA, 33 bp, Homo sapien
agagaacaaaagtacacaggtagtttatcttga

SEQ ID NO: 646398 - DNA, 33 bp, Homo sapien
agagaacaaaagtacagaggtagtttatcttga

SEQ ID NO: 646399 - DNA, 33 bp, Homo sapien
caagtcttttaaacaaactgagaaaacaagtga

SEQ ID NO: 646400 - DNA, 33 bp, Homo sapien
caagtcttttaaacaacctgagaaaacaagtga

SEQ ID NO: 646401 - DNA, 33 bp, Homo sapien
gaatcctattagaatgacaaactcttaaaaaca

SEQ ID NO: 646402 - DNA, 33 bp, Homo sapien
gaatcctattagaatgtcaaactcttaaaaaca

SEQ ID NO: 646403 - DNA, 33 bp, Homo sapien
agtgagaaatgagaatcaggactaggttcccat

SEQ ID NO: 646404 - DNA, 33 bp, Homo sapien
agtgagaaatgagaattaggactaggttcccat

SEQ ID NO: 646405 - DNA, 33 bp, Homo sapien
ttaatttacaagggaaaatttcaactccgttta

SEQ ID NO: 646406 - DNA, 33 bp, Homo sapien
ttaatttacaagggaagatttcaactccgttta

SEQ ID NO: 646407 - DNA, 33 bp, Homo sapien
aacattctttccttcaatcaaagtacataaatc

SEQ ID NO: 646408 - DNA, 33 bp, Homo sapien
aacattctttccttcattcaaagtacataaatc

SEQ ID NO: 646409 - DNA, 33 bp, Homo sapien
cagaagctgaggtcaacgacaagtatatccagg

SEQ ID NO: 646410 - DNA, 33 bp, Homo sapien
cagaagctgaggtcaatgacaagtatatccagg

SEQ ID NO: 646411 - DNA, 33 bp, Homo sapien
aggttttctttccaagcatatggggctgggaca

SEQ ID NO: 646412 - DNA, 33 bp, Homo sapien
aggttttctttccaagtatatggggctgggaca

SEQ ID NO: 646413 - DNA, 33 bp, Homo sapien
cacttgacttacatcaagagggaagaaccacct

SEQ ID NO: 646414 - DNA, 33 bp, Homo sapien
cacttgacttacatcatgagggaagaaccacct

SEQ ID NO: 646415 - DNA, 33 bp, Homo sapien
taggaactctcacttaccaagactgtgtatttt

SEQ ID NO: 646416 - DNA, 33 bp, Homo sapien
taggaactctcacttatcaagactgtgtatttt

SEQ ID NO: 646417 - DNA, 33 bp, Homo sapien
gtttcagtatctgttaagtgagcggtcagctaa

SEQ ID NO: 646418 - DNA, 33 bp, Homo sapien
gtttcagtatctgttatgtgagcggtcagctaa

SEQ ID NO: 646419 - DNA, 33 bp, Homo sapien
ctaggaagacttttccaaaatagaatcagaaat

SEQ ID NO: 646420 - DNA, 33 bp, Homo sapien
ctaggaagacttttccgaaatagaatcagaaat

SEQ ID NO: 646421 - DNA, 33 bp, Homo sapien
acatgaatggcttcagacaaagagagagagctt

SEQ ID NO: 646422 - DNA, 33 bp, Homo sapien
acatgaatggcttcaggcaaagagagagagctt

SEQ ID NO: 646423 - DNA, 33 bp, Homo sapien
tcttcaagaagaaaaccgtggatggtgagttcc

SEQ ID NO: 646424 - DNA, 33 bp, Homo sapien
tcttcaagaagaaaactgtggatggtgagttcc

SEQ ID NO: 646425 - DNA, 33 bp, Homo sapien
aaatacctcattagtaaatcctgagtattagat

SEQ ID NO: 646426 - DNA, 33 bp, Homo sapien
aaatacctcattagtagatcctgagtattagat

SEQ ID NO: 646427 - DNA, 33 bp, Homo sapien
ctggagcaatgtctaccacagcaaaagtaagtg

SEQ ID NO: 646428 - DNA, 33 bp, Homo sapien
ctggagcaatgtctactacagcaaaagtaagtg

SEQ ID NO: 646429 - DNA, 33 bp, Homo sapien
agaacatataatgagacaagaaggtcaaaaatc

SEQ ID NO: 646430 - DNA, 33 bp, Homo sapien
agaacatataatgagataagaaggtcaaaaatc

SEQ ID NO: 646431 - DNA, 33 bp, Homo sapien
ataaaccagtatcctaacatttatggttaaatg

SEQ ID NO: 646432 - DNA, 33 bp, Homo sapien
ataaaccagtatcctagcatttatggttaaatg

SEQ ID NO: 646433 - DNA, 33 bp, Homo sapien
tccttctataaaggcactgaagcacagtttttg

SEQ ID NO: 646434 - DNA, 33 bp, Homo sapien
tccttctataaaggcattgaagcacagtttttg

SEQ ID NO: 646435 - DNA, 33 bp, Homo sapien
cggttatgtttatgtaaggctttatggctttat

SEQ ID NO: 646436 - DNA, 33 bp, Homo sapien
cggttatgtttatgtacggctttatggctttat

SEQ ID NO: 646437 - DNA, 33 bp, Homo sapien
tccttgaaagtttaagacatgatctagagattt

SEQ ID NO: 646438 - DNA, 33 bp, Homo sapien
tccttgaaagtttaaggcatgatctagagattt

SEQ ID NO: 646439 - DNA, 33 bp, Homo sapien
atacttctggaacttaccaaaaagttatagcca

SEQ ID NO: 646440 - DNA, 33 bp, Homo sapien
atacttctggaacttatcaaaaagttatagcca

SEQ ID NO: 646441 - DNA, 33 bp, Homo sapien
tgtatagccactaaggcataaagcttgggttta

SEQ ID NO: 646442 - DNA, 33 bp, Homo sapien
tgtatagccactaaggtataaagcttgggttta

SEQ ID NO: 646443 - DNA, 33 bp, Homo sapien
tccttcctctgccatacgaccttgaagtgcact

SEQ ID NO: 646444 - DNA, 33 bp, Homo sapien
tccttcctctgccatatgaccttgaagtgcact

SEQ ID NO: 646445 - DNA, 33 bp, Homo sapien
agttagaagcaagtccactataaatatctgatc

SEQ ID NO: 646446 - DNA, 33 bp, Homo sapien
agttagaagcaagtccgctataaatatctgatc

SEQ ID NO: 646447 - DNA, 33 bp, Homo sapien
gcaagcatccagattcaaaaccatctacatttt

SEQ ID NO: 646448 - DNA, 33 bp, Homo sapien
gcaagcatccagattcgaaaccatctacatttt

SEQ ID NO: 646449 - DNA, 33 bp, Homo sapien
gtttcacatcagccatcaaaaatttgtgtttaa

SEQ ID NO: 646450 - DNA, 33 bp, Homo sapien
gtttcacatcagccattaaaaatttgtgtttaa

SEQ ID NO: 646451 - DNA, 33 bp, Homo sapien
gaccattaaagcacccagagtattgattgtggg

SEQ ID NO: 646452 - DNA, 33 bp, Homo sapien
gaccattaaagcacccggagtattgattgtggg

SEQ ID NO: 646453 - DNA, 33 bp, Homo sapien
caaacgaagcttatctaacacacatattttctc

SEQ ID NO: 646454 - DNA, 33 bp, Homo sapien
caaacgaagcttatctgacacacatattttctc

SEQ ID NO: 646455 - DNA, 33 bp, Homo sapien
gggcttatcattttaccggctctggttatgtga

SEQ ID NO: 646456 - DNA, 33 bp, Homo sapien
gggcttatcattttactggctctggttatgtga

SEQ ID NO: 646457 - DNA, 33 bp, Homo sapien
ttaggttctgtcattccaaaacatgacacaaaa

SEQ ID NO: 646458 - DNA, 33 bp, Homo sapien
ttaggttctgtcattcgaaaacatgacacaaaa

SEQ ID NO: 646459 - DNA, 33 bp, Homo sapien
tttagttccttgccaaaatattatagaattata

SEQ ID NO: 646460 - DNA, 33 bp, Homo sapien
tttagttccttgccaagatattatagaattata

SEQ ID NO: 646461 - DNA, 33 bp, Homo sapien
ggaggatgtaataacaataacagtacctactac

SEQ ID NO: 646462 - DNA, 33 bp, Homo sapien
ggaggatgtaataacactaacagtacctactac

SEQ ID NO: 646463 - DNA, 33 bp, Homo sapien
gaaataatcgaggttaaataaggtcataagagt

SEQ ID NO: 646464 - DNA, 33 bp, Homo sapien
gaaataatcgaggttacataaggtcataagagt

SEQ ID NO: 646465 - DNA, 33 bp, Homo sapien
aacctgctgccttgaaaagaagaatatagtcct

SEQ ID NO: 646466 - DNA, 33 bp, Homo sapien
aacctgctgccttgaagagaagaatatagtcct

SEQ ID NO: 646467 - DNA, 33 bp, Homo sapien
cctgctgatcaaagggccatttggctctgaatt

SEQ ID NO: 646468 - DNA, 33 bp, Homo sapien
cctgctgatcaaagggtcatttggctctgaatt

SEQ ID NO: 646469 - DNA, 33 bp, Homo sapien
gctttcctggaggccgccatcacagatgctgag

SEQ ID NO: 646470 - DNA, 33 bp, Homo sapien
gctttcctggaggccgtcatcacagatgctgag

SEQ ID NO: 646471 - DNA, 33 bp, Homo sapien; identical to SEQ ID NO: 646469

SEQ ID NO: 646472 - DNA, 33 bp, Homo sapien; identical to SEQ ID NO: 646470

SEQ ID NO: 646473 - DNA, 33 bp, Homo sapien
cagttttgttcttttcactctggatagcttttg

SEQ ID NO: 646474 - DNA, 33 bp, Homo sapien
cagttttgttcttttcgctctggatagcttttg

SEQ ID NO: 646475 - DNA, 33 bp, Homo sapien; identical to SEQ ID NO: 646473

SEQ ID NO: 646476 - DNA, 33 bp, Homo sapien; identical to SEQ ID NO: 646474

SEQ ID NO: 646477 - DNA, 33 bp, Homo sapien
gcttcttttgctgtacaggaagtttttaacttg

SEQ ID NO: 646478 - DNA, 33 bp, Homo sapien
gcttcttttgctgtacgggaagtttttaacttg

SEQ ID NO: 646479 - DNA, 33 bp, Homo sapien
ttaagaatctgttgataaaaccacaaaataatc

SEQ ID NO: 646480 - DNA, 33 bp, Homo sapien
ttaagaatctgttgatgaaaccacaaaataatc

SEQ ID NO: 646481 - DNA, 33 bp, Homo sapien
ctaaatctcaaaaataggtacaaaggtttgtat

SEQ ID NO: 646482 - DNA, 33 bp, Homo sapien
ctaaatctcaaaaatatgtacaaaggtttgtat

SEQ ID NO: 646483 - DNA, 33 bp, Homo sapien
gtgccacaacttcatgaaactcaattgcaccaa

SEQ ID NO: 646484 - DNA, 33 bp, Homo sapien
gtgccacaacttcatggaactcaattgcaccaa

SEQ ID NO: 646485 - DNA, 33 bp, Homo sapien
ttactcattcaatcacaactcccattgccttac

SEQ ID NO: 646486 - DNA, 33 bp, Homo sapien
ttactcattcaatcactactcccattgccttac

SEQ ID NO: 646487 - DNA, 33 bp, Homo sapien
agggagtttgatgaaacgcacggcagaggaaat

SEQ ID NO: 646488 - DNA, 33 bp, Homo sapien
agggagtttgatgaaatgcacggcagaggaaat

SEQ ID NO: 646489 - DNA, 33 bp, Homo sapien
caaggacacaacagaaaaagatatgaagtcagg

SEQ ID NO: 646490 - DNA, 33 bp, Homo sapien
caaggacacaacagaacaagatatgaagtcagg

SEQ ID NO: 646491 - DNA, 33 bp, Homo sapien
actggcttacttttcaccaattttatgacactc

SEQ ID NO: 646492 - DNA, 33 bp, Homo sapien
actggcttacttttcatcaattttatgacactc

SEQ ID NO: 646493 - DNA, 33 bp, Homo sapien
gcatagtgaataaagcagcaaaatactctaaag

SEQ ID NO: 646494 - DNA, 33 bp, Homo sapien
gcatagtgaataaagcggcaaaatactctaaag

SEQ ID NO: 646495 - DNA, 33 bp, Homo sapien
attctcactattctaccgaacttagttttcttt

SEQ ID NO: 646496 - DNA, 33 bp, Homo sapien
attctcactattctactgaacttagttttcttt

SEQ ID NO: 646497 - DNA, 33 bp, Homo sapien
cccagggcacttgcacagtagtttggcaaaatg

SEQ ID NO: 646498 - DNA, 33 bp, Homo sapien
cccagggcacttgcacggtagtttggcaaaatg

SEQ ID NO: 646499 - DNA, 33 bp, Homo sapien
aattttgggtgatgagaatagaatgggactcaa

SEQ ID NO: 646500 - DNA, 33 bp, Homo sapien
aattttgggtgatgagcatagaatgggactcaa

SEQ ID NO: 646501 - DNA, 33 bp, Homo sapien
cgtgttcattatacaccggtatcaggtgatttg

SEQ ID NO: 646502 - DNA, 33 bp, Homo sapien
cgtgttcattatacactggtatcaggtgatttg

SEQ ID NO: 646503 - DNA, 33 bp, Homo sapien
ttgcgaacaactgaaaaagcttctgctttgact

SEQ ID NO: 646504 - DNA, 33 bp, Homo sapien
ttgcgaacaactgaaagagcttctgctttgact

SEQ ID NO: 646505 - DNA, 33 bp, Homo sapien
tcccattaaattcaccaaactgtttctctgatt

SEQ ID NO: 646506 - DNA, 33 bp, Homo sapien
tcccattaaattcaccgaactgtttctctgatt

SEQ ID NO: 646507 - DNA, 33 bp, Homo sapien
tggaaccaaaaatgagcccacattgtcaagtca

SEQ ID NO: 646508 - DNA, 33 bp, Homo sapien
tggaaccaaaaatgaggccacattgtcaagtca

SEQ ID NO: 646509 - DNA, 33 bp, Homo sapien
gatgtatccactacaactacagctctacataat

SEQ ID NO: 646510 - DNA, 33 bp, Homo sapien
gatgtatccactacaattacagctctacataat

SEQ ID NO: 646511 - DNA, 33 bp, Homo sapien
tctcactaagatttaaagttgtcatcgctacaa

SEQ ID NO: 646512 - DNA, 33 bp, Homo sapien
tctcactaagatttaatgttgtcatcgctacaa

SEQ ID NO: 646513 - DNA, 33 bp, Homo sapien
ttgtgttaattaccaagatgtcacggcaatgaa

SEQ ID NO: 646514 - DNA, 33 bp, Homo sapien
ttgtgttaattaccaatatgtcacggcaatgaa

SEQ ID NO: 646515 - DNA, 33 bp, Homo sapien
tatagaaatcaaaaataaatctgacagcatgaa

SEQ ID NO: 646516 - DNA, 33 bp, Homo sapien
tatagaaatcaaaaattaatctgacagcatgaa

SEQ ID NO: 646517 - DNA, 33 bp, Homo sapien
aatctgacagcatgaaaaagtcgggaaggaaat

SEQ ID NO: 646518 - DNA, 33 bp, Homo sapien
aatctgacagcatgaagaagtcgggaaggaaat

SEQ ID NO: 646519 - DNA, 33 bp, Homo sapien
tagccagtattatggcaagcattccttcactaa

SEQ ID NO: 646520 - DNA, 33 bp, Homo sapien
tagccagtattatggcgagcattccttcactaa

SEQ ID NO: 646521 - DNA, 33 bp, Homo sapien
aggtgacattgcctaacgaactgggtcccactt

SEQ ID NO: 646522 - DNA, 33 bp, Homo sapien
aggtgacattgcctaatgaactgggtcccactt

SEQ ID NO: 646523 - DNA, 33 bp, Homo sapien
gttttgaatggtgaggcaaataccaatactaac

SEQ ID NO: 646524 - DNA, 33 bp, Homo sapien
gttttgaatggtgaggtaaataccaatactaac

SEQ ID NO: 646525 - DNA, 33 bp, Homo sapien
tgagattttttcccaaagatttacaagatccaa

SEQ ID NO: 646526 - DNA, 33 bp, Homo sapien
tgagattttttcccaaggatttacaagatccaa

SEQ ID NO: 646527 - DNA, 33 bp, Homo sapien
atgagaatggcttcaaaccaggagtcggaggtt

SEQ ID NO: 646528 - DNA, 33 bp, Homo sapien
atgagaatggcttcaacccaggagtcggaggtt

SEQ ID NO: 646529 - DNA, 33 bp, Homo sapien
attgtgatctttgaaccgtaagattgcatttac

SEQ ID NO: 646530 - DNA, 33 bp, Homo sapien
attgtgatctttgaactgtaagattgcatttac

SEQ ID NO: 646531 - DNA, 33 bp, Homo sapien
tcctgcaacttcagaccctttcaatgcaacata

SEQ ID NO: 646532 - DNA, 33 bp, Homo sapien
tcctgcaacttcagactctttcaatgcaacata

SEQ ID NO: 646533 - DNA, 33 bp, Homo sapien
gcaagagtaatatcacaaccaacaaacacatga

SEQ ID NO: 646534 - DNA, 33 bp, Homo sapien
gcaagagtaatatcacgaccaacaaacacatga

SEQ ID NO: 646535 - DNA, 33 bp, Homo sapien
tttggaactcgggatgaaaccctgaatgaagga

SEQ ID NO: 646536 - DNA, 33 bp, Homo sapien
tttggaactcgggatgcaaccctgaatgaagga

SEQ ID NO: 646537 - DNA, 33 bp, Homo sapien
acagtctggtgagcaggattggacaatttaaat

SEQ ID NO: 646538 - DNA, 33 bp, Homo sapien
acagtctggtgagcagtattggacaatttaaat

SEQ ID NO: 646539 - DNA, 33 bp, Homo sapien
ttcatttgttcttgaaatgtgcaagtaggtcat

SEQ ID NO: 646540 - DNA, 33 bp, Homo sapien
ttcatttgttcttgaattgtgcaagtaggtcat

SEQ ID NO: 646541 - DNA, 33 bp, Homo sapien
gagaaaactcaaactcaaatgatcttcttttat

SEQ ID NO: 646542 - DNA, 33 bp, Homo sapien
gagaaaactcaaactcgaatgatcttcttttat

SEQ ID NO: 646543 - DNA, 33 bp, Homo sapien
aaatgtcaaacaaatacaggcatatcaaataca

SEQ ID NO: 646544 - DNA, 33 bp, Homo sapien
aaatgtcaaacaaatataggcatatcaaataca

SEQ ID NO: 646545 - DNA, 33 bp, Homo sapien
gttgtgaatatgcaaaaaaaaaaggtgggcgtt

SEQ ID NO: 646546 - DNA, 33 bp, Homo sapien
gttgtgaatatgcaaagaaaaaaggtgggcgtt

SEQ ID NO: 646547 - DNA, 33 bp, Homo sapien
caatgtatatgttgaaacctaacccctagtact

SEQ ID NO: 646548 - DNA, 33 bp, Homo sapien
caatgtatatgttgaagcctaacccctagtact

SEQ ID NO: 646549 - DNA, 33 bp, Homo sapien
aaacttcaagataacactacttacgaattaaca

SEQ ID NO: 646550 - DNA, 33 bp, Homo sapien
aaacttcaagataacagtacttacgaattaaca

SEQ ID NO: 646551 - DNA, 33 bp, Homo sapien
tttttttctcattgaactaatttaagagtatta

SEQ ID NO: 646552 - DNA, 33 bp, Homo sapien
tttttttctcattgaagtaatttaagagtatta

SEQ ID NO: 646553 - DNA, 33 bp, Homo sapien
gtatggtagtcttacacgtgacaagtgacaaaa

SEQ ID NO: 646554 - DNA, 33 bp, Homo sapien
gtatggtagtcttacatgtgacaagtgacaaaa

SEQ ID NO: 646555 - DNA, 33 bp, Homo sapien
cctccttctgtaacacacaaacttgatttggaa

SEQ ID NO: 646556 - DNA, 33 bp, Homo sapien
cctccttctgtaacacgcaaacttgatttggaa

SEQ ID NO: 646557 - DNA, 33 bp, Homo sapien
tgtatgattccatctacataaaatgtccataaa

SEQ ID NO: 646558 - DNA, 33 bp, Homo sapien
tgtatgattccatctatataaaatgtccataaa

SEQ ID NO: 646559 - DNA, 33 bp, Homo sapien
ggggagattgccatgcaaagacagggcagagat

SEQ ID NO: 646560 - DNA, 33 bp, Homo sapien
ggggagattgccatgcgaagacagggcagagat

SEQ ID NO: 646561 - DNA, 33 bp, Homo sapien
cctaaaccaagagttagcaaggtgcattaagaa

SEQ ID NO: 646562 - DNA, 33 bp, Homo sapien
cctaaaccaagagttatcaaggtgcattaagaa

SEQ ID NO: 646563 - DNA, 33 bp, Homo sapien
tatgctactccattaactcagacttggaagcta

SEQ ID NO: 646564 - DNA, 33 bp, Homo sapien
tatgctactccattaagtcagacttggaagcta

SEQ ID NO: 646565 - DNA, 33 bp, Homo sapien
acaagtaacatttaacaactgctggcagaattg

SEQ ID NO: 646566 - DNA, 33 bp, Homo sapien
acaagtaacatttaactactgctggcagaattg

SEQ ID NO: 646567 - DNA, 33 bp, Homo sapien
aaaacactttctagtacgtacaaaagctcaaca

SEQ ID NO: 646568 - DNA, 33 bp, Homo sapien
aaaacactttctagtatgtacaaaagctcaaca

SEQ ID NO: 646569 - DNA, 33 bp, Homo sapien
ggaatgtgacacagcaataaaaagaaagaacta

SEQ ID NO: 646570 - DNA, 33 bp, Homo sapien
ggaatgtgacacagcagtaaaaagaaagaacta

SEQ ID NO: 646571 - DNA, 33 bp, Homo sapien
ttgttgttaatcgaagcataaatgatctgtaac

SEQ ID NO: 646572 - DNA, 33 bp, Homo sapien
ttgttgttaatcgaagtataaatgatctgtaac

SEQ ID NO: 646573 - DNA, 33 bp, Homo sapien
tgtgactctgagcttacgtagaaaagtatttat

SEQ ID NO: 646574 - DNA, 33 bp, Homo sapien
tgtgactctgagcttatgtagaaaagtatttat

SEQ ID NO: 646575 - DNA, 33 bp, Homo sapien
tagttcaaggttaagaaaatgcatcctgagaat

SEQ ID NO: 646576 - DNA, 33 bp, Homo sapien
tagttcaaggttaagagaatgcatcctgagaat

SEQ ID NO: 646577 - DNA, 33 bp, Homo sapien
aagtctatcactataaaccattgatggtcatat

SEQ ID NO: 646578 - DNA, 33 bp, Homo sapien
aagtctatcactataatccattgatggtcatat

SEQ ID NO: 646579 - DNA, 33 bp, Homo sapien
aacaaacaaaagattaggctgaaatattcatga

SEQ ID NO: 646580 - DNA, 33 bp, Homo sapien
aacaaacaaaagattatgctgaaatattcatga

SEQ ID NO: 646581 - DNA, 33 bp, Homo sapien
taatcagaagtgtatgcattgatctgctaggta

SEQ ID NO: 646582 - DNA, 33 bp, Homo sapien
taatcagaagtgtatgtattgatctgctaggta

SEQ ID NO: 646583 - DNA, 33 bp, Homo sapien
tcctttgctgcacataaactttttggcttaata

SEQ ID NO: 646584 - DNA, 33 bp, Homo sapien
tcctttgctgcacatacactttttggcttaata

SEQ ID NO: 646585 - DNA, 33 bp, Homo sapien
tcctgctatacaggaaacgttaagtcagaaaaa

SEQ ID NO: 646586 - DNA, 33 bp, Homo sapien
tcctgctatacaggaagcgttaagtcagaaaaa

SEQ ID NO: 646587 - DNA, 33 bp, Homo sapien
acactaagctgcctgacgagtggacaggaagtt

SEQ ID NO: 646588 - DNA, 33 bp, Homo sapien
acactaagctgcctgatgagtggacaggaagtt

SEQ ID NO: 646589 - DNA, 33 bp, Homo sapien
taatgccattaaactccctgcccaggatgaaac

SEQ ID NO: 646590 - DNA, 33 bp, Homo sapien
taatgccattaaactctctgcccaggatgaaac

SEQ ID NO: 646591 - DNA, 33 bp, Homo sapien
cagtgcacttcgataacgtctctttaagcctgt

SEQ ID NO: 646592 - DNA, 33 bp, Homo sapien
cagtgcacttcgataatgtctctttaagcctgt

SEQ ID NO: 646593 - DNA, 33 bp, Homo sapien
gttaagagctcattggaaacaaaggttgaatgt

SEQ ID NO: 646594 - DNA, 33 bp, Homo sapien
gttaagagctcattgggaacaaaggttgaatgt

SEQ ID NO: 646595 - DNA, 33 bp, Homo sapien
tatcagagtctggagaccaaactgaggtgcagc

SEQ ID NO: 646596 - DNA, 33 bp, Homo sapien
tatcagagtctggagatcaaactgaggtgcagc

SEQ ID NO: 646597 - DNA, 33 bp, Homo sapien
actttctcttctgccaaatttggaggacttgga

SEQ ID NO: 646598 - DNA, 33 bp, Homo sapien
actttctcttctgccagatttggaggacttgga

SEQ ID NO: 646599 - DNA, 33 bp, Homo sapien
attgatctgaatatttaaaaagcctaatgaaat

SEQ ID NO: 646600 - DNA, 33 bp, Homo sapien
attgatctgaatattttaaaagcctaatgaaat

SEQ ID NO: 646601 - DNA, 33 bp, Homo sapien
tactggaaatggggttaaaattctacataaata

SEQ ID NO: 646602 - DNA, 33 bp, Homo sapien
tactggaaatggggtttaaattctacataaata

SEQ ID NO: 646603 - DNA, 33 bp, Homo sapien
gatgccttgacctaaaatgatatcttattagaa

SEQ ID NO: 646604 - DNA, 33 bp, Homo sapien
gatgccttgacctaaattgatatcttattagaa

SEQ ID NO: 646605 - DNA, 33 bp, Homo sapien
tctatatctatgcagactattttgaaattttct

SEQ ID NO: 646606 - DNA, 33 bp, Homo sapien
tctatatctatgcagagtattttgaaattttct

SEQ ID NO: 646607 - DNA, 33 bp, Homo sapien
catttgcttgcataagaacatggcataatgact

SEQ ID NO: 646608 - DNA, 33 bp, Homo sapien
catttgcttgcataaggacatggcataatgact

SEQ ID NO: 646609 - DNA, 33 bp, Homo sapien
ggattttgttcatcggcaaaaagttgagatggt

SEQ ID NO: 646610 - DNA, 33 bp, Homo sapien
ggattttgttcatcggtaaaaagttgagatggt

SEQ ID NO: 646611 - DNA, 33 bp, Homo sapien
gttggtatcaaccccaagcattaattctagtac

SEQ ID NO: 646612 - DNA, 33 bp, Homo sapien
gttggtatcaaccccacgcattaattctagtac

SEQ ID NO: 646613 - DNA, 33 bp, Homo sapien
caatgctggtgcccataaatgagctgtgagcaa

SEQ ID NO: 646614 - DNA, 33 bp, Homo sapien
caatgctggtgcccatcaatgagctgtgagcaa

SEQ ID NO: 646615 - DNA, 33 bp, Homo sapien
tactgtcctttgacaacgctaggcaagccaaat

SEQ ID NO: 646616 - DNA, 33 bp, Homo sapien
tactgtcctttgacaatgctaggcaagccaaat

SEQ ID NO: 646617 - DNA, 33 bp, Homo sapien
aagaaaaggaagtaagaaggcaagggagtagaa

SEQ ID NO: 646618 - DNA, 33 bp, Homo sapien
aagaaaaggaagtaaggaggcaagggagtagaa

SEQ ID NO: 646619 - DNA, 33 bp, Homo sapien
aatgaacttttaaggcagcagaatcaaaaagtg

SEQ ID NO: 646620 - DNA, 33 bp, Homo sapien
aatgaacttttaaggcggcagaatcaaaaagtg

SEQ ID NO: 646621 - DNA, 33 bp, Homo sapien
aataagcataaaaaaacgtttacaacatcatta

SEQ ID NO: 646622 - DNA, 33 bp, Homo sapien
aataagcataaaaaaaggtttacaacatcatta

SEQ ID NO: 646623 - DNA, 33 bp, Homo sapien
cttacactttgctgacaagagtgtaaaaaggtt

SEQ ID NO: 646624 - DNA, 33 bp, Homo sapien
cttacactttgctgacgagagtgtaaaaaggtt

SEQ ID NO: 646625 - DNA, 33 bp, Homo sapien
tagaccaactgagagaacttgaaaataaagtcg

SEQ ID NO: 646626 - DNA, 33 bp, Homo sapien
tagaccaactgagagaccttgaaaataaagtcg

SEQ ID NO: 646627 - DNA, 33 bp, Homo sapien
tgaaagtatgtcagtgaataaagcttgtattaa

SEQ ID NO: 646628 - DNA, 33 bp, Homo sapien
tgaaagtatgtcagtggataaagcttgtattaa

SEQ ID NO: 646629 - DNA, 33 bp, Homo sapien
gagaatcaaaagctgcagaaggtggttcatttc

SEQ ID NO: 646630 - DNA, 33 bp, Homo sapien
gagaatcaaaagctgcggaaggtggttcatttc

SEQ ID NO: 646631 - DNA, 33 bp, Homo sapien
actagcttttagactcagacagctctttttcac

SEQ ID NO: 646632 - DNA, 33 bp, Homo sapien
actagcttttagactcggacagctctttttcac

SEQ ID NO: 646633 - DNA, 33 bp, Homo sapien
tagtctaagcaactcaactggtgataatgtgat

SEQ ID NO: 646634 - DNA, 33 bp, Homo sapien
tagtctaagcaactcagctggtgataatgtgat

SEQ ID NO: 646635 - DNA, 33 bp, Homo sapien
agggttaacacatgctaagagtttaacattgcc

SEQ ID NO: 646636 - DNA, 33 bp, Homo sapien
agggttaacacatgctgagagtttaacattgcc

SEQ ID NO: 646637 - DNA, 33 bp, Homo sapien
gtgacaataaacaaataactagaccattctgag

SEQ ID NO: 646638 - DNA, 33 bp, Homo sapien
gtgacaataaacaaatcactagaccattctgag

SEQ ID NO: 646639 - DNA, 33 bp, Homo sapien
aagataagccgagagaaatttatgcacaacaga

SEQ ID NO: 646640 - DNA, 33 bp, Homo sapien
aagataagccgagagagatttatgcacaacaga

SEQ ID NO: 646641 - DNA, 33 bp, Homo sapien
atagactcattagtacaagccagtcaaaacaac

SEQ ID NO: 646642 - DNA, 33 bp, Homo sapien
atagactcattagtacgagccagtcaaaacaac

SEQ ID NO: 646643 - DNA, 33 bp, Homo sapien
tccaggtgctactgcagtctcctcatttagata

SEQ ID NO: 646644 - DNA, 33 bp, Homo sapien
tccaggtgctactgcattctcctcatttagata

SEQ ID NO: 646645 - DNA, 33 bp, Homo sapien
ttgtattatatgttaacagttttcatggccaaa

SEQ ID NO: 646646 - DNA, 33 bp, Homo sapien
ttgtattatatgttaagagttttcatggccaaa

SEQ ID NO: 646647 - DNA, 33 bp, Homo sapien
tgttatttttgtgctaataaatctgagagttat

SEQ ID NO: 646648 - DNA, 33 bp, Homo sapien
tgttatttttgtgctactaaatctgagagttat

SEQ ID NO: 646649 - DNA, 33 bp, Homo sapien
attatattgagattcaaccatatgggagtgctt

SEQ ID NO: 646650 - DNA, 33 bp, Homo sapien
attatattgagattcagccatatgggagtgctt

SEQ ID NO: 646651 - DNA, 33 bp, Homo sapien
gtaaaagccagaagaaaagtacatactatttta

SEQ ID NO: 646652 - DNA, 33 bp, Homo sapien
gtaaaagccagaagaagagtacatactatttta

SEQ ID NO: 646653 - DNA, 33 bp, Homo sapien
accatatttttcatcacctgcaagaagctgtct

SEQ ID NO: 646654 - DNA, 33 bp, Homo sapien
accatatttttcatcatctgcaagaagctgtct

SEQ ID NO: 646655 - DNA, 33 bp, Homo sapien
catttgttttcatcaaagaactcaacttacagc

SEQ ID NO: 646656 - DNA, 33 bp, Homo sapien
catttgttttcatcaaggaactcaacttacagc

SEQ ID NO: 646657 - DNA, 33 bp, Homo sapien
agccaccactgagttcacagtctgccagtggca

SEQ ID NO: 646658 - DNA, 33 bp, Homo sapien
agccaccactgagttcgcagtctgccagtggca

SEQ ID NO: 646659 - DNA, 33 bp, Homo sapien
ctaccgttaaatgaggacaaatcaccttaaaac

SEQ ID NO: 646660 - DNA, 33 bp, Homo sapien
ctaccgttaaatgagggcaaatcaccttaaaac

SEQ ID NO: 646661 - DNA, 33 bp, Homo sapien
ctgtggtttgacttaccccagctaccgttaaat

SEQ ID NO: 646662 - DNA, 33 bp, Homo sapien
ctgtggtttgacttactccagctaccgttaaat

SEQ ID NO: 646663 - DNA, 33 bp, Homo sapien
actattttcagaatacaaaaagatacacaatca

SEQ ID NO: 646664 - DNA, 33 bp, Homo sapien
actattttcagaatacgaaaagatacacaatca

SEQ ID NO: 646665 - DNA, 33 bp, Homo sapien
tgtgacagttaactaaatacatgaattatacag

SEQ ID NO: 646666 - DNA, 33 bp, Homo sapien
tgtgacagttaactaagtacatgaattatacag

SEQ ID NO: 646667 - DNA, 33 bp, Homo sapien
agttggcctagtacagaaaggagatagggacta

SEQ ID NO: 646668 - DNA, 33 bp, Homo sapien
agttggcctagtacaggaaggagatagggacta

SEQ ID NO: 646669 - DNA, 33 bp, Homo sapien
attccttttaacagtacgattgtatggaatatt

SEQ ID NO: 646670 - DNA, 33 bp, Homo sapien
attccttttaacagtatgattgtatggaatatt

SEQ ID NO: 646671 - DNA, 33 bp, Homo sapien
tgtgtattacttaggcggccataggaaaatgct

SEQ ID NO: 646672 - DNA, 33 bp, Homo sapien
tgtgtattacttaggctgccataggaaaatgct

SEQ ID NO: 646673 - DNA, 33 bp, Homo sapien
atcagagaatgaagagaagtagactgtggagaa

SEQ ID NO: 646674 - DNA, 33 bp, Homo sapien
atcagagaatgaagaggagtagactgtggagaa

SEQ ID NO: 646675 - DNA, 33 bp, Homo sapien
tgtatagctctccttacggaagaaaactctgta

SEQ ID NO: 646676 - DNA, 33 bp, Homo sapien
tgtatagctctccttatggaagaaaactctgta

SEQ ID NO: 646677 - DNA, 33 bp, Homo sapien
ttatctttgcattaacaatacaaatcagtgttt

SEQ ID NO: 646678 - DNA, 33 bp, Homo sapien
ttatctttgcattaactatacaaatcagtgttt

SEQ ID NO: 646679 - DNA, 33 bp, Homo sapien
gatcaggcagtgacacgaaacattcctctattc

SEQ ID NO: 646680 - DNA, 33 bp, Homo sapien
gatcaggcagtgacactaaacattcctctattc

SEQ ID NO: 646681 - DNA, 33 bp, Homo sapien
gattgacagaataataaggaagtcagagataaa

SEQ ID NO: 646682 - DNA, 33 bp, Homo sapien
gattgacagaataatagggaagtcagagataaa

SEQ ID NO: 646683 - DNA, 33 bp, Homo sapien
ttcagttccttagttgaactaaacagtacaaga

SEQ ID NO: 646684 - DNA, 33 bp, Homo sapien
ttcagttccttagttgcactaaacagtacaaga

SEQ ID NO: 646685 - DNA, 33 bp, Homo sapien
tggccctatgcgacaccgtcaccaaccgcctgg

SEQ ID NO: 646686 - DNA, 33 bp, Homo sapien
tggccctatgcgacactgtcaccaaccgcctgg

SEQ ID NO: 646687 - DNA, 33 bp, Homo sapien
aggaccaccaataggacagataaatgatagata

SEQ ID NO: 646688 - DNA, 33 bp, Homo sapien
aggaccaccaataggatagataaatgatagata

SEQ ID NO: 646689 - DNA, 33 bp, Homo sapien
aacttcatgccaaaccactgcagtatatatctt

SEQ ID NO: 646690 - DNA, 33 bp, Homo sapien
aacttcatgccaaacctctgcagtatatatctt

SEQ ID NO: 646691 - DNA, 33 bp, Homo sapien
cttgactcaaggatatgaccacagcagtctatc

SEQ ID NO: 646692 - DNA, 33 bp, Homo sapien
cttgactcaaggatattaccacagcagtctatc

SEQ ID NO: 646693 - DNA, 33 bp, Homo sapien
ttattgatatgctaaacttgttatagttgggag

SEQ ID NO: 646694 - DNA, 33 bp, Homo sapien
ttattgatatgctaaatttgttatagttgggag

SEQ ID NO: 646695 - DNA, 33 bp, Homo sapien
ttcttgtttgatcaccgcaagccttgtcattac

SEQ ID NO: 646696 - DNA, 33 bp, Homo sapien
ttcttgtttgatcacctcaagccttgtcattac

SEQ ID NO: 646697 - DNA, 33 bp, Homo sapien
aaatgagtttctaggactaaaagtgcatagcaa

SEQ ID NO: 646698 - DNA, 33 bp, Homo sapien
aaatgagtttctaggagtaaaagtgcatagcaa

SEQ ID NO: 646699 - DNA, 33 bp, Homo sapien
gtcatatggaataataacaaataccaccacagt

SEQ ID NO: 646700 - DNA, 33 bp, Homo sapien
gtcatatggaataatagcaaataccaccacagt

SEQ ID NO: 646701 - DNA, 33 bp, Homo sapien
tgaaaagaaggctaaccaggtaaagaacgtttc

SEQ ID NO: 646702 - DNA, 33 bp, Homo sapien
tgaaaagaaggctaacgaggtaaagaacgtttc

SEQ ID NO: 646703 - DNA, 33 bp, Homo sapien
gatgtgtcttaagtaacggtgattcagttcacc

SEQ ID NO: 646704 - DNA, 33 bp, Homo sapien
gatgtgtcttaagtaatggtgattcagttcacc

SEQ ID NO: 646705 - DNA, 33 bp, Homo sapien
agtctggtggttggtaagccgtggtctagggac

SEQ ID NO: 646706 - DNA, 33 bp, Homo sapien
agtctggtggttggtatgccgtggtctagggac

SEQ ID NO: 646707 - DNA, 33 bp, Homo sapien
cagaacatttctcttgaatttagacttagaata

SEQ ID NO: 646708 - DNA, 33 bp, Homo sapien
cagaacatttctcttgtatttagacttagaata

SEQ ID NO: 646709 - DNA, 33 bp, Homo sapien
aaaaatatgaatcaccaatgtttcaatagaaat

SEQ ID NO: 646710 - DNA, 33 bp, Homo sapien
aaaaatatgaatcaccgatgtttcaatagaaat

SEQ ID NO: 646711 - DNA, 33 bp, Homo sapien
ctattataaaagcctacgtagcaacccataaaa

SEQ ID NO: 646712 - DNA, 33 bp, Homo sapien
ctattataaaagcctatgtagcaacccataaaa

SEQ ID NO: 646713 - DNA, 33 bp, Homo sapien
aatattgagcatactgaataagcttacaattat

SEQ ID NO: 646714 - DNA, 33 bp, Homo sapien
aatattgagcatactgcataagcttacaattat

SEQ ID NO: 646715 - DNA, 33 bp, Homo sapien
tatgttcacttgtatacgcacaaagagggctca

SEQ ID NO: 646716 - DNA, 33 bp, Homo sapien
tatgttcacttgtatatgcacaaagagggctca

SEQ ID NO: 646717 - DNA, 33 bp, Homo sapien
gccgcctatcattgagacaaagatttccttgga

SEQ ID NO: 646718 - DNA, 33 bp, Homo sapien
gccgcctatcattgaggcaaagatttccttgga

SEQ ID NO: 646719 - DNA, 33 bp, Homo sapien
atggtggaccacagtacaaagcagatgccttag

SEQ ID NO: 646720 - DNA, 33 bp, Homo sapien
atggtggaccacagtataaagcagatgccttag

SEQ ID NO: 646721 - DNA, 33 bp, Homo sapien
acacactgaccctgaaaacactcagctcccttt

SEQ ID NO: 646722 - DNA, 33 bp, Homo sapien
acacactgaccctgaagacactcagctcccttt

SEQ ID NO: 646723 - DNA, 33 bp, Homo sapien
gttttattttagtttcacacttcttacagtaat

SEQ ID NO: 646724 - DNA, 33 bp, Homo sapien
gttttattttagtttctcacttcttacagtaat

SEQ ID NO: 646725 - DNA, 33 bp, Homo sapien
atttttgtcaatcctaaggtaacgttattttac

SEQ ID NO: 646726 - DNA, 33 bp, Homo sapien
atttttgtcaatcctacggtaacgttattttac

SEQ ID NO: 646727 - DNA, 33 bp, Homo sapien
tataaaagtctcctgcaaagatcaatatgacat

SEQ ID NO: 646728 - DNA, 33 bp, Homo sapien
tataaaagtctcctgcgaagatcaatatgacat

SEQ ID NO: 646729 - DNA, 33 bp, Homo sapien
acatcagttactaaaaagcttttatgctccaag

SEQ ID NO: 646730 - DNA, 33 bp, Homo sapien
acatcagttactaaaaggcttttatgctccaag

SEQ ID NO: 646731 - DNA, 33 bp, Homo sapien
aatctaaaagtatctacggacaatgtaaacaaa

SEQ ID NO: 646732 - DNA, 33 bp, Homo sapien
aatctaaaagtatctatggacaatgtaaacaaa

SEQ ID NO: 646733 - DNA, 33 bp, Homo sapien
caagcccttgtcaacagaggaaatacctacaag

SEQ ID NO: 646734 - DNA, 33 bp, Homo sapien
caagcccttgtcaacataggaaatacctacaag

SEQ ID NO: 646735 - DNA, 33 bp, Homo sapien
gtacctaattttttcaagggcttatatggagag

SEQ ID NO: 646736 - DNA, 33 bp, Homo sapien
gtacctaattttttcaggggcttatatggagag

SEQ ID NO: 646737 - DNA, 33 bp, Homo sapien
caattggaaattaagaagttttcagcatagaga

SEQ ID NO: 646738 - DNA, 33 bp, Homo sapien
caattggaaattaagaggttttcagcatagaga

SEQ ID NO: 646739 - DNA, 33 bp, Homo sapien
tttgttgttcttagccaaagtctttcccacata

SEQ ID NO: 646740 - DNA, 33 bp, Homo sapien
tttgttgttcttagccgaagtctttcccacata

SEQ ID NO: 646741 - DNA, 33 bp, Homo sapien
caaaactgttcctgccacaattattatttactt

SEQ ID NO: 646742 - DNA, 33 bp, Homo sapien
caaaactgttcctgccgcaattattatttactt

SEQ ID NO: 646743 - DNA, 33 bp, Homo sapien
ttcagtatctaaacacagccttttctaggcaga

SEQ ID NO: 646744 - DNA, 33 bp, Homo sapien
ttcagtatctaaacaccgccttttctaggcaga

SEQ ID NO: 646745 - DNA, 33 bp, Homo sapien
ttctccaatgacataaagactcttaagatagta

SEQ ID NO: 646746 - DNA, 33 bp, Homo sapien
ttctccaatgacataacgactcttaagatagta

SEQ ID NO: 646747 - DNA, 33 bp, Homo sapien
agggtgatggtggtgcagaagtagagtagattg

SEQ ID NO: 646748 - DNA, 33 bp, Homo sapien
agggtgatggtggtgcggaagtagagtagattg

SEQ ID NO: 646749 - DNA, 33 bp, Homo sapien
atacatggaggaaatacgagaagaactcagcct

SEQ ID NO: 646750 - DNA, 33 bp, Homo sapien
atacatggaggaaatatgagaagaactcagcct

SEQ ID NO: 646751 - DNA, 33 bp, Homo sapien
tcatttttcacataccccaaaactacatatata

SEQ ID NO: 646752 - DNA, 33 bp, Homo sapien
tcatttttcacatacctcaaaactacatatata

SEQ ID NO: 646753 - DNA, 33 bp, Homo sapien
tgcaaaacagttataaatgttatgctgctatgc

SEQ ID NO: 646754 - DNA, 33 bp, Homo sapien
tgcaaaacagttataattgttatgctgctatgc

SEQ ID NO: 646755 - DNA, 33 bp, Homo sapien
gggcagatagtcccaacaaatctgtgacatgag

SEQ ID NO: 646756 - DNA, 33 bp, Homo sapien
gggcagatagtcccaataaatctgtgacatgag

SEQ ID NO: 646757 - DNA, 33 bp, Homo sapien
acaaaaatccttcataagaaaaatcagaactcc

SEQ ID NO: 646758 - DNA, 33 bp, Homo sapien
acaaaaatccttcataggaaaaatcagaactcc

SEQ ID NO: 646759 - DNA, 33 bp, Homo sapien
cagcttgactaactagaaaatgtttgtatctat

SEQ ID NO: 646760 - DNA, 33 bp, Homo sapien
cagcttgactaactaggaaatgtttgtatctat

SEQ ID NO: 646761 - DNA, 33 bp, Homo sapien
atcattacagaaaacactaaatttgacccttat

SEQ ID NO: 646762 - DNA, 33 bp, Homo sapien
atcattacagaaaacattaaatttgacccttat

SEQ ID NO: 646763 - DNA, 33 bp, Homo sapien
acatacagcagtttcacagaacaaacggataat

SEQ ID NO: 646764 - DNA, 33 bp, Homo sapien
acatacagcagtttcatagaacaaacggataat

SEQ ID NO: 646765 - DNA, 33 bp, Homo sapien
aaaaacaagtgaattacggtactaataagatat

SEQ ID NO: 646766 - DNA, 33 bp, Homo sapien
aaaaacaagtgaattatggtactaataagatat

SEQ ID NO: 646767 - DNA, 33 bp, Homo sapien
tagaaatttctctttacgtcaaggtgacttttc

SEQ ID NO: 646768 - DNA, 33 bp, Homo sapien
tagaaatttctctttatgtcaaggtgacttttc

SEQ ID NO: 646769 - DNA, 33 bp, Homo sapien
atttaaaatctgaagaaccaaccttggaccctg

SEQ ID NO: 646770 - DNA, 33 bp, Homo sapien
atttaaaatctgaagagccaaccttggaccctg

SEQ ID NO: 646771 - DNA, 33 bp, Homo sapien
aatggtgaattcagaaacctatcacagaagctc

SEQ ID NO: 646772 - DNA, 33 bp, Homo sapien
aatggtgaattcagaatcctatcacagaagctc

SEQ ID NO: 646773 - DNA, 33 bp, Homo sapien
caagcatcagaacacaccttcaataggcctcca

SEQ ID NO: 646774 - DNA, 33 bp, Homo sapien
caagcatcagaacacatcttcaataggcctcca

SEQ ID NO: 646775 - DNA, 33 bp, Homo sapien
gttatattcatcttgaactactctttgatgaag

SEQ ID NO: 646776 - DNA, 33 bp, Homo sapien
gttatattcatcttgatctactctttgatgaag

SEQ ID NO: 646777 - DNA, 33 bp, Homo sapien
ttcacgttcagtcataccagttaaggtaaaatg

SEQ ID NO: 646778 - DNA, 33 bp, Homo sapien
ttcacgttcagtcatatcagttaaggtaaaatg

SEQ ID NO: 646779 - DNA, 33 bp, Homo sapien
gacaaacagtgctacactgacatttgtttttat

SEQ ID NO: 646780 - DNA, 33 bp, Homo sapien
gacaaacagtgctacattgacatttgtttttat

SEQ ID NO: 646781 - DNA, 33 bp, Homo sapien
atgtctatcgtgaaaaagttctcaatataattc

SEQ ID NO: 646782 - DNA, 33 bp, Homo sapien
atgtctatcgtgaaaacgttctcaatataattc

SEQ ID NO: 646783 - DNA, 33 bp, Homo sapien
cctttgattcaaattcgaaatttcatccaactc

SEQ ID NO: 646784 - DNA, 33 bp, Homo sapien
cctttgattcaaattctaaatttcatccaactc

SEQ ID NO: 646785 - DNA, 33 bp, Homo sapien
acacaatgctggaggtaaaggtaataaatattt

SEQ ID NO: 646786 - DNA, 33 bp, Homo sapien
acacaatgctggaggttaaggtaataaatattt

SEQ ID NO: 646787 - DNA, 33 bp, Homo sapien
atcttgaaatgggataccttctgtaaacacaaa

SEQ ID NO: 646788 - DNA, 33 bp, Homo sapien
atcttgaaatgggatagcttctgtaaacacaaa

SEQ ID NO: 646789 - DNA, 33 bp, Homo sapien
aatgatatttgagatacattgttgagtcaaaga

SEQ ID NO: 646790 - DNA, 33 bp, Homo sapien
aatgatatttgagatatattgttgagtcaaaga

SEQ ID NO: 646791 - DNA, 33 bp, Homo sapien
cataattctcaccttacgtccttgaagtttgaa

SEQ ID NO: 646792 - DNA, 33 bp, Homo sapien
cataattctcaccttatgtccttgaagtttgaa

SEQ ID NO: 646793 - DNA, 33 bp, Homo sapien
ctgttcttaaggagagaccgtaaaatatatgtt

SEQ ID NO: 646794 - DNA, 33 bp, Homo sapien
ctgttcttaaggagagtccgtaaaatatatgtt

SEQ ID NO: 646795 - DNA, 33 bp, Homo sapien
aacgatctacttcaacccatagaggctcaaaac

SEQ ID NO: 646796 - DNA, 33 bp, Homo sapien
aacgatctacttcaactcatagaggctcaaaac

SEQ ID NO: 646797 - DNA, 33 bp, Homo sapien
ccctgagcaccagatgaaatatgggtttgaatg

SEQ ID NO: 646798 - DNA, 33 bp, Homo sapien
ccctgagcaccagatggaatatgggtttgaatg

SEQ ID NO: 646799 - DNA, 33 bp, Homo sapien
cagtggcacacactacccaccacctcgaatgcc

SEQ ID NO: 646800 - DNA, 33 bp, Homo sapien
cagtggcacacactactcaccacctcgaatgcc

SEQ ID NO: 646801 - DNA, 33 bp, Homo sapien
ctggacctctctgataagcagggtttgctggtg

SEQ ID NO: 646802 - DNA, 33 bp, Homo sapien
ctggacctctctgataggcagggtttgctggtg

SEQ ID NO: 646803 - DNA, 33 bp, Homo sapien
ataataataatagccacagtgaattttcaatct

SEQ ID NO: 646804 - DNA, 33 bp, Homo sapien
ataataataatagccatagtgaattttcaatct

SEQ ID NO: 646805 - DNA, 33 bp, Homo sapien
gcaaaaaagattcggcaagattgaatatggagt

SEQ ID NO: 646806 - DNA, 33 bp, Homo sapien
gcaaaaaagattcggcgagattgaatatggagt

SEQ ID NO: 646807 - DNA, 33 bp, Homo sapien
gttggagagtgctttaaggaagaatatcaccaa

SEQ ID NO: 646808 - DNA, 33 bp, Homo sapien
gttggagagtgctttagggaagaatatcaccaa

SEQ ID NO: 646809 - DNA, 33 bp, Homo sapien
gtggatttacatttgaaaacttgtataggctac

SEQ ID NO: 646810 - DNA, 33 bp, Homo sapien
gtggatttacatttgacaacttgtataggctac

SEQ ID NO: 646811 - DNA, 33 bp, Homo sapien
tctattgtgatgtaacagcaaaagtaggaccac

SEQ ID NO: 646812 - DNA, 33 bp, Homo sapien
tctattgtgatgtaactgcaaaagtaggaccac

SEQ ID NO: 646813 - DNA, 33 bp, Homo sapien
taattcttacttacacaagcataacattttagg

SEQ ID NO: 646814 - DNA, 33 bp, Homo sapien
taattcttacttacactagcataacattttagg

SEQ ID NO: 646815 - DNA, 33 bp, Homo sapien
gaattcattgatttcaatccttgggcaagagac

SEQ ID NO: 646816 - DNA, 33 bp, Homo sapien
gaattcattgatttcagtccttgggcaagagac

SEQ ID NO: 646817 - DNA, 33 bp, Homo sapien
atctgacactacccacagactttataattacac

SEQ ID NO: 646818 - DNA, 33 bp, Homo sapien
atctgacactacccacggactttataattacac

SEQ ID NO: 646819 - DNA, 33 bp, Homo sapien
caactcaaataaataacgaactgtgtgcatgat

SEQ ID NO: 646820 - DNA, 33 bp, Homo sapien
caactcaaataaataatgaactgtgtgcatgat

SEQ ID NO: 646821 - DNA, 33 bp, Homo sapien
caggtcttttcgttaacgagcgacagataattt

SEQ ID NO: 646822 - DNA, 33 bp, Homo sapien
caggtcttttcgttaatgagcgacagataattt

SEQ ID NO: 646823 - DNA, 33 bp, Homo sapien
acccattccgaattaaactctcttcttaatccc

SEQ ID NO: 646824 - DNA, 33 bp, Homo sapien
acccattccgaattaagctctcttcttaatccc

SEQ ID NO: 646825 - DNA, 33 bp, Homo sapien
tgtaggtacatatcaccgtaaacattcctctta

SEQ ID NO: 646826 - DNA, 33 bp, Homo sapien
tgtaggtacatatcactgtaaacattcctctta

SEQ ID NO: 646827 - DNA, 33 bp, Homo sapien
gagaaatttgatagtgaatagcaaaaataatta

SEQ ID NO: 646828 - DNA, 33 bp, Homo sapien
gagaaatttgatagtgcatagcaaaaataatta

SEQ ID NO: 646829 - DNA, 33 bp, Homo sapien
aagaattacacagaccaatgtacaatggaccaa

SEQ ID NO: 646830 - DNA, 33 bp, Homo sapien
aagaattacacagaccgatgtacaatggaccaa

SEQ ID NO: 646831 - DNA, 33 bp, Homo sapien
ttccatgcctgaacgacattttcaatagctata

SEQ ID NO: 646832 - DNA, 33 bp, Homo sapien
ttccatgcctgaacgatattttcaatagctata

SEQ ID NO: 646833 - DNA, 33 bp, Homo sapien
tccttgctactaggataacaccatatcatttct

SEQ ID NO: 646834 - DNA, 33 bp, Homo sapien
tccttgctactaggattacaccatatcatttct

SEQ ID NO: 646835 - DNA, 33 bp, Homo sapien
tcatacattttctacaaatttcctttctattgc

SEQ ID NO: 646836 - DNA, 33 bp, Homo sapien
tcatacattttctacacatttcctttctattgc

SEQ ID NO: 646837 - DNA, 33 bp, Homo sapien
acattatgtatccagccagtattgattatcttc

SEQ ID NO: 646838 - DNA, 33 bp, Homo sapien
acattatgtatccagctagtattgattatcttc

SEQ ID NO: 646839 - DNA, 33 bp, Homo sapien
acagatttttttcttaaacttcatgaaccagcc

SEQ ID NO: 646840 - DNA, 33 bp, Homo sapien
acagatttttttcttagacttcatgaaccagcc

SEQ ID NO: 646841 - DNA, 33 bp, Homo sapien
tcaggatatttacaatcaatccaaagaggtaac

SEQ ID NO: 646842 - DNA, 33 bp, Homo sapien
tcaggatatttacaatgaatccaaagaggtaac

SEQ ID NO: 646843 - DNA, 33 bp, Homo sapien
aggtggcaggcagattaaaagcattttatttat

SEQ ID NO: 646844 - DNA, 33 bp, Homo sapien
aggtggcaggcagattgaaagcattttatttat

SEQ ID NO: 646845 - DNA, 33 bp, Homo sapien
acaagctgtgtagaggacaaacacaaggttaag

SEQ ID NO: 646846 - DNA, 33 bp, Homo sapien
acaagctgtgtagagggcaaacacaaggttaag

SEQ ID NO: 646847 - DNA, 33 bp, Homo sapien
aaaatctagtaaggtaataacaggatcatattc

SEQ ID NO: 646848 - DNA, 33 bp, Homo sapien
aaaatctagtaaggtagtaacaggatcatattc

SEQ ID NO: 646849 - DNA, 33 bp, Homo sapien
tttcagggtttcagaactgcttgctttcatgta

SEQ ID NO: 646850 - DNA, 33 bp, Homo sapien
tttcagggtttcagaagtgcttgctttcatgta

SEQ ID NO: 646851 - DNA, 33 bp, Homo sapien
aatgtaaaggtatgtgcacaagtagagggtgtg

SEQ ID NO: 646852 - DNA, 33 bp, Homo sapien
aatgtaaaggtatgtgtacaagtagagggtgtg

SEQ ID NO: 646853 - DNA, 33 bp, Homo sapien
atgacaagctttaatgcatgcagggcagcactg

SEQ ID NO: 646854 - DNA, 33 bp, Homo sapien
atgacaagctttaatgtatgcagggcagcactg

SEQ ID NO: 646855 - DNA, 33 bp, Homo sapien
gatgagaatgaaagaaagaatgcttaagaatta

SEQ ID NO: 646856 - DNA, 33 bp, Homo sapien
gatgagaatgaaagaaggaatgcttaagaatta

SEQ ID NO: 646857 - DNA, 33 bp, Homo sapien
gcttgtctgtctcttgcagtgctttgctagatg

SEQ ID NO: 646858 - DNA, 33 bp, Homo sapien
gcttgtctgtctcttgtagtgctttgctagatg

SEQ ID NO: 646859 - DNA, 33 bp, Homo sapien
cttgttttccaatccactgataatctgaacatg

SEQ ID NO: 646860 - DNA, 33 bp, Homo sapien
cttgttttccaatccattgataatctgaacatg

SEQ ID NO: 646861 - DNA, 33 bp, Homo sapien
tttgaattgagacaacaaacgtatttaaaaatg

SEQ ID NO: 646862 - DNA, 33 bp, Homo sapien
tttgaattgagacaacgaacgtatttaaaaatg

SEQ ID NO: 646863 - DNA, 33 bp, Homo sapien
tgaagactcaaagtcacagatttaaatacacac

SEQ ID NO: 646864 - DNA, 33 bp, Homo sapien
tgaagactcaaagtcatagatttaaatacacac

SEQ ID NO: 646865 - DNA, 33 bp, Homo sapien
tttcatacttagtgaaggctctttcaatagaca

SEQ ID NO: 646866 - DNA, 33 bp, Homo sapien
tttcatacttagtgaatgctctttcaatagaca

SEQ ID NO: 646867 - DNA, 33 bp, Homo sapien
tattgatgaaaaagagcccttaatctccttctg

SEQ ID NO: 646868 - DNA, 33 bp, Homo sapien
tattgatgaaaaagagtccttaatctccttctg

SEQ ID NO: 646869 - DNA, 33 bp, Homo sapien
ccctggcctcatgaggaatgttttaaaggcaga

SEQ ID NO: 646870 - DNA, 33 bp, Homo sapien
ccctggcctcatgagggatgttttaaaggcaga

SEQ ID NO: 646871 - DNA, 33 bp, Homo sapien
tgctacattttatggccacacagagacaagcat

SEQ ID NO: 646872 - DNA, 33 bp, Homo sapien
tgctacattttatggctacacagagacaagcat

SEQ ID NO: 646873 - DNA, 33 bp, Homo sapien
atacaaggaagcattaaacagattctggcagtg

SEQ ID NO: 646874 - DNA, 33 bp, Homo sapien
atacaaggaagcattatacagattctggcagtg

SEQ ID NO: 646875 - DNA, 33 bp, Homo sapien
ttttgtctgtaaaatacgagagattttgtagtg

SEQ ID NO: 646876 - DNA, 33 bp, Homo sapien
ttttgtctgtaaaatatgagagattttgtagtg

SEQ ID NO: 646877 - DNA, 33 bp, Homo sapien
tatttattgtgtgcaaataaagaagaatgtaag

SEQ ID NO: 646878 - DNA, 33 bp, Homo sapien
tatttattgtgtgcaagtaaagaagaatgtaag

SEQ ID NO: 646879 - DNA, 33 bp, Homo sapien
agtgtggagactcattaaaaaactaaaagtaga

SEQ ID NO: 646880 - DNA, 33 bp, Homo sapien
agtgtggagactcatttaaaaactaaaagtaga

SEQ ID NO: 646881 - DNA, 33 bp, Homo sapien
ttttattacattcatacggttttgcttttcttt

SEQ ID NO: 646882 - DNA, 33 bp, Homo sapien
ttttattacattcatatggttttgcttttcttt

SEQ ID NO: 646883 - DNA, 33 bp, Homo sapien
acaacactgacttacacaggctttgtgttttca

SEQ ID NO: 646884 - DNA, 33 bp, Homo sapien
acaacactgacttacataggctttgtgttttca

SEQ ID NO: 646885 - DNA, 33 bp, Homo sapien
ataatatgattgttgacgtttcgtaggtttgcc

SEQ ID NO: 646886 - DNA, 33 bp, Homo sapien
ataatatgattgttgaggtttcgtaggtttgcc

SEQ ID NO: 646887 - DNA, 33 bp, Homo sapien
ttgtagctgtaagataaagatcacagtggaaaa

SEQ ID NO: 646888 - DNA, 33 bp, Homo sapien
ttgtagctgtaagatagagatcacagtggaaaa

SEQ ID NO: 646889 - DNA, 33 bp, Homo sapien
tctgaacttctaaacaggggaaaaattgctctt

SEQ ID NO: 646890 - DNA, 33 bp, Homo sapien
tctgaacttctaaacatgggaaaaattgctctt

SEQ ID NO: 646891 - DNA, 33 bp, Homo sapien
taaaggtgatgataaactgcttgttcaattctt

SEQ ID NO: 646892 - DNA, 33 bp, Homo sapien
taaaggtgatgataaattgcttgttcaattctt

SEQ ID NO: 646893 - DNA, 33 bp, Homo sapien
ttaagaagcaagagatcagtatttagtataaca

SEQ ID NO: 646894 - DNA, 33 bp, Homo sapien
ttaagaagcaagagattagtatttagtataaca

SEQ ID NO: 646895 - DNA, 33 bp, Homo sapien
agaagaatgcttggaacatagtaggtacttagt

SEQ ID NO: 646896 - DNA, 33 bp, Homo sapien
agaagaatgcttggaatatagtaggtacttagt

SEQ ID NO: 646897 - DNA, 33 bp, Homo sapien
ttacctggtgaggttaaaaaatatcagataaaa

SEQ ID NO: 646898 - DNA, 33 bp, Homo sapien
ttacctggtgaggttataaaatatcagataaaa

SEQ ID NO: 646899 - DNA, 33 bp, Homo sapien
tagtttattgcaggaagaatttctcatcagtgt

SEQ ID NO: 646900 - DNA, 33 bp, Homo sapien
tagtttattgcaggaataatttctcatcagtgt

SEQ ID NO: 646901 - DNA, 33 bp, Homo sapien
cctggaagtcttcttcaacaatatattctgtca

SEQ ID NO: 646902 - DNA, 33 bp, Homo sapien
cctggaagtcttcttcgacaatatattctgtca

SEQ ID NO: 646903 - DNA, 33 bp, Homo sapien
ggtagaaaactatgcaatcatccaggggaaaat

SEQ ID NO: 646904 - DNA, 33 bp, Homo sapien
ggtagaaaactatgcagtcatccaggggaaaat

SEQ ID NO: 646905 - DNA, 33 bp, Homo sapien
agacaacattccttaccgaagtctggcccaggg

SEQ ID NO: 646906 - DNA, 33 bp, Homo sapien
agacaacattccttactgaagtctggcccaggg

SEQ ID NO: 646907 - DNA, 33 bp, Homo sapien
cagcaagaagcagttacagcggtcgtcggtgaa

SEQ ID NO: 646908 - DNA, 33 bp, Homo sapien
cagcaagaagcagttagagcggtcgtcggtgaa

SEQ ID NO: 646909 - DNA, 33 bp, Homo sapien
atagtatatgtatctaagtaattagcctatatc

SEQ ID NO: 646910 - DNA, 33 bp, Homo sapien
atagtatatgtatctaggtaattagcctatatc

SEQ ID NO: 646911 - DNA, 33 bp, Homo sapien
ttatgaggcctggaaaccttacaatgctcttca

SEQ ID NO: 646912 - DNA, 33 bp, Homo sapien
ttatgaggcctggaaatcttacaatgctcttca

SEQ ID NO: 646913 - DNA, 33 bp, Homo sapien
ccctaatttcttcacaagagtagctaaaggcaa

SEQ ID NO: 646914 - DNA, 33 bp, Homo sapien
ccctaatttcttcacaggagtagctaaaggcaa

SEQ ID NO: 646915 - DNA, 33 bp, Homo sapien
gaaggaaatgattctgcagtcctcgaagattct

SEQ ID NO: 646916 - DNA, 33 bp, Homo sapien
gaaggaaatgattctgtagtcctcgaagattct

SEQ ID NO: 646917 - DNA, 33 bp, Homo sapien
gtctctataatggttgaagcataaatcctattg

SEQ ID NO: 646918 - DNA, 33 bp, Homo sapien
gtctctataatggttgtagcataaatcctattg

SEQ ID NO: 646919 - DNA, 33 bp, Homo sapien
ctcaacctgtaggatccgaacctatgcccaggt

SEQ ID NO: 646920 - DNA, 33 bp, Homo sapien
ctcaacctgtaggatctgaacctatgcccaggt

SEQ ID NO: 646921 - DNA, 33 bp, Homo sapien
actttataagcattgaaggaaatactgttttca

SEQ ID NO: 646922 - DNA, 33 bp, Homo sapien
actttataagcattgagggaaatactgttttca

SEQ ID NO: 646923 - DNA, 33 bp, Homo sapien
tctgaagattagaacgaaaaaagcccagagaac

SEQ ID NO: 646924 - DNA, 33 bp, Homo sapien
tctgaagattagaacgcaaaaagcccagagaac

SEQ ID NO: 646925 - DNA, 33 bp, Homo sapien
aacaatggtgtcattaccacaatcatccaaaaa

SEQ ID NO: 646926 - DNA, 33 bp, Homo sapien
aacaatggtgtcattatcacaatcatccaaaaa

SEQ ID NO: 646927 - DNA, 33 bp, Homo sapien
tatatagggtttggtacagtacactgatggtct

SEQ ID NO: 646928 - DNA, 33 bp, Homo sapien
tatatagggtttggtatagtacactgatggtct

SEQ ID NO: 646929 - DNA, 33 bp, Homo sapien
ataaaccaggtataaacggccaggtaaaaatat

SEQ ID NO: 646930 - DNA, 33 bp, Homo sapien
ataaaccaggtataaatggccaggtaaaaatat

SEQ ID NO: 646931 - DNA, 33 bp, Homo sapien
aatagttgaaaaggaaaagtactgcataatctt

SEQ ID NO: 646932 - DNA, 33 bp, Homo sapien
aatagttgaaaaggaagagtactgcataatctt

SEQ ID NO: 646933 - DNA, 33 bp, Homo sapien
agatgtcagctggttcccttaagtcatcatata

SEQ ID NO: 646934 - DNA, 33 bp, Homo sapien
agatgtcagctggttctcttaagtcatcatata

SEQ ID NO: 646935 - DNA, 33 bp, Homo sapien
agaaaaaaagagaaaaatctctggtgtcagcat

SEQ ID NO: 646936 - DNA, 33 bp, Homo sapien
agaaaaaaagagaaaactctctggtgtcagcat

SEQ ID NO: 646937 - DNA, 33 bp, Homo sapien
aacaagtgggctctagcatttgactcctatatg

SEQ ID NO: 646938 - DNA, 33 bp, Homo sapien
aacaagtgggctctagtatttgactcctatatg

SEQ ID NO: 646939 - DNA, 33 bp, Homo sapien
aaataatctgaatgacaaggagctggataagat

SEQ ID NO: 646940 - DNA, 33 bp, Homo sapien
aaataatctgaatgacgaggagctggataagat

SEQ ID NO: 646941 - DNA, 33 bp, Homo sapien
cctgtgtggaaacaaaaaatatgatagtcaaaa

SEQ ID NO: 646942 - DNA, 33 bp, Homo sapien
cctgtgtggaaacaaagaatatgatagtcaaaa

SEQ ID NO: 646943 - DNA, 33 bp, Homo sapien
tcatagtctgttataacgaagagctactttgga

SEQ ID NO: 646944 - DNA, 33 bp, Homo sapien
tcatagtctgttataatgaagagctactttgga

SEQ ID NO: 646945 - DNA, 33 bp, Homo sapien
gatcctcactgaaaaacatcatgtttaaaaagg

SEQ ID NO: 646946 - DNA, 33 bp, Homo sapien
gatcctcactgaaaaatatcatgtttaaaaagg

SEQ ID NO: 646947 - DNA, 33 bp, Homo sapien
accctgttgctacaacaaacttcattgccatta

SEQ ID NO: 646948 - DNA, 33 bp, Homo sapien
accctgttgctacaaccaacttcattgccatta

SEQ ID NO: 646949 - DNA, 33 bp, Homo sapien
tttatttaagcaagttcaaattcagttaactga

SEQ ID NO: 646950 - DNA, 33 bp, Homo sapien
tttatttaagcaagttgaaattcagttaactga

SEQ ID NO: 646951 - DNA, 33 bp, Homo sapien
gaaactgctgaaataaaaacagaacatatcagt

SEQ ID NO: 646952 - DNA, 33 bp, Homo sapien
gaaactgctgaaataagaacagaacatatcagt

SEQ ID NO: 646953 - DNA, 33 bp, Homo sapien
tcatcaggtacagtgaagcaaatattagagttg

SEQ ID NO: 646954 - DNA, 33 bp, Homo sapien
tcatcaggtacagtgaggcaaatattagagttg

SEQ ID NO: 646955 - DNA, 33 bp, Homo sapien
acagtagggacaaggaaagagatgagaggaaag

SEQ ID NO: 646956 - DNA, 33 bp, Homo sapien
acagtagggacaaggagagagatgagaggaaag

SEQ ID NO: 646957 - DNA, 33 bp, Homo sapien
ccacttccaatagtagcccattgttttcacaaa

SEQ ID NO: 646958 - DNA, 33 bp, Homo sapien
ccacttccaatagtaggccattgttttcacaaa

SEQ ID NO: 646959 - DNA, 33 bp, Homo sapien
ttttgagatacgttccactgatacctcgtttac

SEQ ID NO: 646960 - DNA, 33 bp, Homo sapien
ttttgagatacgttcccctgatacctcgtttac

SEQ ID NO: 646961 - DNA, 33 bp, Homo sapien
tttactgtattttaacggatatccactgaatta

SEQ ID NO: 646962 - DNA, 33 bp, Homo sapien
tttactgtattttaactgatatccactgaatta

SEQ ID NO: 646963 - DNA, 33 bp, Homo sapien
tttgttttgaaagaacaccactgtagaataaat

SEQ ID NO: 646964 - DNA, 33 bp, Homo sapien
tttgttttgaaagaaccccactgtagaataaat

SEQ ID NO: 646965 - DNA, 33 bp, Homo sapien
gttttcaagcttccaaatgttcttttgtatgaa

SEQ ID NO: 646966 - DNA, 33 bp, Homo sapien
gttttcaagcttccaagtgttcttttgtatgaa

SEQ ID NO: 646967 - DNA, 33 bp, Homo sapien
agtgtaataagcctaaaggtccaaataattaaa

SEQ ID NO: 646968 - DNA, 33 bp, Homo sapien
agtgtaataagcctaagggtccaaataattaaa

SEQ ID NO: 646969 - DNA, 33 bp, Homo sapien
agcattcctgctctgaagataattatgtgttca

SEQ ID NO: 646970 - DNA, 33 bp, Homo sapien
agcattcctgctctgaggataattatgtgttca

SEQ ID NO: 646971 - DNA, 33 bp, Homo sapien
agcacacattctattaacactaattgtatgctc

SEQ ID NO: 646972 - DNA, 33 bp, Homo sapien
agcacacattctattagcactaattgtatgctc

SEQ ID NO: 646973 - DNA, 33 bp, Homo sapien
acctattaaacaggtccatttgaatgtctgcct

SEQ ID NO: 646974 - DNA, 33 bp, Homo sapien
acctattaaacaggtctatttgaatgtctgcct

SEQ ID NO: 646975 - DNA, 33 bp, Homo sapien
aaaacatattccaggcaacacaaaattcaacaa

SEQ ID NO: 646976 - DNA, 33 bp, Homo sapien
aaaacatattccaggcgacacaaaattcaacaa

SEQ ID NO: 646977 - DNA, 33 bp, Homo sapien
agtcagtctggataaaactctgctctactaata

SEQ ID NO: 646978 - DNA, 33 bp, Homo sapien
agtcagtctggataaatctctgctctactaata

SEQ ID NO: 646979 - DNA, 33 bp, Homo sapien
aaattctcttctctccagcaactctgacattgt

SEQ ID NO: 646980 - DNA, 33 bp, Homo sapien
aaattctcttctctccggcaactctgacattgt

SEQ ID NO: 646981 - DNA, 33 bp, Homo sapien
atttctaagtagttggccatttgtaataattct

SEQ ID NO: 646982 - DNA, 33 bp, Homo sapien
atttctaagtagttggtcatttgtaataattct

SEQ ID NO: 646983 - DNA, 33 bp, Homo sapien
taatgcagttataacacagatagacaggatagc

SEQ ID NO: 646984 - DNA, 33 bp, Homo sapien
taatgcagttataacagagatagacaggatagc

SEQ ID NO: 646985 - DNA, 33 bp, Homo sapien
tgtgtatcaggctctacattgataatgcagtta

SEQ ID NO: 646986 - DNA, 33 bp, Homo sapien
tgtgtatcaggctctatattgataatgcagtta

SEQ ID NO: 646987 - DNA, 33 bp, Homo sapien
ttcacttaatcccaaaatttacttagcattagg

SEQ ID NO: 646988 - DNA, 33 bp, Homo sapien
ttcacttaatcccaaactttacttagcattagg

SEQ ID NO: 646989 - DNA, 33 bp, Homo sapien
ttctctctctaaacagccattgaaagagaaaaa

SEQ ID NO: 646990 - DNA, 33 bp, Homo sapien
ttctctctctaaacagtcattgaaagagaaaaa

SEQ ID NO: 646991 - DNA, 33 bp, Homo sapien
gtcaaatgtgcttacacgaattattattatgtg

SEQ ID NO: 646992 - DNA, 33 bp, Homo sapien
gtcaaatgtgcttacatgaattattattatgtg

SEQ ID NO: 646993 - DNA, 33 bp, Homo sapien
tttttgcctttttataccaccattgccaatctt

SEQ ID NO: 646994 - DNA, 33 bp, Homo sapien
tttttgcctttttatatcaccattgccaatctt

SEQ ID NO: 646995 - DNA, 33 bp, Homo sapien
aaaatactgtcacagcaaggtaattcagaattt

SEQ ID NO: 646996 - DNA, 33 bp, Homo sapien
aaaatactgtcacagcgaggtaattcagaattt

SEQ ID NO: 646997 - DNA, 33 bp, Homo sapien
ggactgcacttctaacaggatcaccaggttatc

SEQ ID NO: 646998 - DNA, 33 bp, Homo sapien
ggactgcacttctaacgggatcaccaggttatc

SEQ ID NO: 646999 - DNA, 33 bp, Homo sapien
atactgtagagatataaagactccatcctctga

SEQ ID NO: 647000 - DNA, 33 bp, Homo sapien
atactgtagagatatacagactccatcctctga

SEQ ID NO: 647001 - DNA, 33 bp, Homo sapien
attctccattgccagaggctgtttagttattcc

SEQ ID NO: 647002 - DNA, 33 bp, Homo sapien
attctccattgccagatgctgtttagttattcc

SEQ ID NO: 647003 - DNA, 33 bp, Homo sapien
ctttcaatctcataaaaccattcttttcaaaga

SEQ ID NO: 647004 - DNA, 33 bp, Homo sapien
ctttcaatctcataaatccattcttttcaaaga

SEQ ID NO: 647005 - DNA, 33 bp, Homo sapien
tgtttgaacaacttcaaatggctggaaaagcaa

SEQ ID NO: 647006 - DNA, 33 bp, Homo sapien
tgtttgaacaacttcagatggctggaaaagcaa

SEQ ID NO: 647007 - DNA, 33 bp, Homo sapien
ttaaatcaaaaatccaatcaagatcacatatca

SEQ ID NO: 647008 - DNA, 33 bp, Homo sapien
ttaaatcaaaaatccagtcaagatcacatatca

SEQ ID NO: 647009 - DNA, 33 bp, Homo sapien
gataaagtcaattccactaaaaccaatgacagg

SEQ ID NO: 647010 - DNA, 33 bp, Homo sapien
gataaagtcaattccattaaaaccaatgacagg

SEQ ID NO: 647011 - DNA, 33 bp, Homo sapien
tgtggcttgatgttcaatcctatgaatctgcag

SEQ ID NO: 647012 - DNA, 33 bp, Homo sapien
tgtggcttgatgttcagtcctatgaatctgcag

SEQ ID NO: 647013 - DNA, 33 bp, Homo sapien
gaattgtttcttttggaatttaaatgcatccct

SEQ ID NO: 647014 - DNA, 33 bp, Homo sapien
gaattgtttcttttggcatttaaatgcatccct

SEQ ID NO: 647015 - DNA, 33 bp, Homo sapien
aatttcactttcctcaaagaacattgtaaaatt

SEQ ID NO: 647016 - DNA, 33 bp, Homo sapien
aatttcactttcctcagagaacattgtaaaatt

SEQ ID NO: 647017 - DNA, 33 bp, Homo sapien
tggaacattagtttccaaaatgtgaattccaga

SEQ ID NO: 647018 - DNA, 33 bp, Homo sapien
tggaacattagtttccgaaatgtgaattccaga

SEQ ID NO: 647019 - DNA, 33 bp, Homo sapien
tctacatgactaaaacaggtggactaacagctg

SEQ ID NO: 647020 - DNA, 33 bp, Homo sapien
tctacatgactaaaacgggtggactaacagctg

SEQ ID NO: 647021 - DNA, 33 bp, Homo sapien
cattctccaaaagtgcagaaaactttgacagcc

SEQ ID NO: 647022 - DNA, 33 bp, Homo sapien
cattctccaaaagtgcggaaaactttgacagcc

SEQ ID NO: 647023 - DNA, 33 bp, Homo sapien
agtaacagtatgagaaatcctttaagctcttga

SEQ ID NO: 647024 - DNA, 33 bp, Homo sapien
agtaacagtatgagaactcctttaagctcttga

SEQ ID NO: 647025 - DNA, 33 bp, Homo sapien
gtttccaaaacaccaaagattctgtctaggtcc

SEQ ID NO: 647026 - DNA, 33 bp, Homo sapien
gtttccaaaacaccaaggattctgtctaggtcc

SEQ ID NO: 647027 - DNA, 33 bp, Homo sapien
cattatcctgattttacggatgggagaatttta

SEQ ID NO: 647028 - DNA, 33 bp, Homo sapien
cattatcctgattttatggatgggagaatttta

SEQ ID NO: 647029 - DNA, 33 bp, Homo sapien
atgcccattaattacaaaccagataaagaagat

SEQ ID NO: 647030 - DNA, 33 bp, Homo sapien
atgcccattaattacagaccagataaagaagat

SEQ ID NO: 647031 - DNA, 33 bp, Homo sapien
acagtgtatgcctacaaagatgaaggtgaatag

SEQ ID NO: 647032 - DNA, 33 bp, Homo sapien
acagtgtatgcctacagagatgaaggtgaatag

SEQ ID NO: 647033 - DNA, 33 bp, Homo sapien
tcctgtgtgtatagtaagtgatagaggaagaaa

SEQ ID NO: 647034 - DNA, 33 bp, Homo sapien
tcctgtgtgtatagtaggtgatagaggaagaaa

SEQ ID NO: 647035 - DNA, 33 bp, Homo sapien
tgttgaaatctaatgaacaatatgttggtttta

SEQ ID NO: 647036 - DNA, 33 bp, Homo sapien
tgttgaaatctaatgaccaatatgttggtttta

SEQ ID NO: 647037 - DNA, 33 bp, Homo sapien
agaacagcaatggataactgctgagtatagacg

SEQ ID NO: 647038 - DNA, 33 bp, Homo sapien
agaacagcaatggatacctgctgagtatagacg

SEQ ID NO: 647039 - DNA, 33 bp, Homo sapien
agttagccactatgaaagagacaaatgtgagcc

SEQ ID NO: 647040 - DNA, 33 bp, Homo sapien
agttagccactatgaaggagacaaatgtgagcc

SEQ ID NO: 647041 - DNA, 33 bp, Homo sapien
tcctagtggtttcatacaattagatcagaatac

SEQ ID NO: 647042 - DNA, 33 bp, Homo sapien
tcctagtggtttcatataattagatcagaatac

SEQ ID NO: 647043 - DNA, 33 bp, Homo sapien
ttttttttatgggaagcctacatcttacgaatt

SEQ ID NO: 647044 - DNA, 33 bp, Homo sapien
ttttttttatgggaaggctacatcttacgaatt

SEQ ID NO: 647045 - DNA, 33 bp, Homo sapien
ataccaaacagctaaacgaggcagcattctaag

SEQ ID NO: 647046 - DNA, 33 bp, Homo sapien
ataccaaacagctaaatgaggcagcattctaag

SEQ ID NO: 647047 - DNA, 33 bp, Homo sapien
tgaggaaatggaaaaacaccatcagcaggaaga

SEQ ID NO: 647048 - DNA, 33 bp, Homo sapien
tgaggaaatggaaaaataccatcagcaggaaga

SEQ ID NO: 647049 - DNA, 33 bp, Homo sapien
agatgctgcaaagaatcataataagggaaggac

SEQ ID NO: 647050 - DNA, 33 bp, Homo sapien
agatgctgcaaagaatgataataagggaaggac

SEQ ID NO: 647051 - DNA, 33 bp, Homo sapien
ttgaacttgtgaagtaaaaaggattgaggtaat

SEQ ID NO: 647052 - DNA, 33 bp, Homo sapien
ttgaacttgtgaagtagaaaggattgaggtaat

SEQ ID NO: 647053 - DNA, 33 bp, Homo sapien
ttttccacagagtatgaaaatagagtcagaacc

SEQ ID NO: 647054 - DNA, 33 bp, Homo sapien
ttttccacagagtatgtaaatagagtcagaacc

SEQ ID NO: 647055 - DNA, 33 bp, Homo sapien
tgaacaatctaggctacactcacagcaggacat

SEQ ID NO: 647056 - DNA, 33 bp, Homo sapien
tgaacaatctaggctatactcacagcaggacat

SEQ ID NO: 647057 - DNA, 33 bp, Homo sapien
gatatcactaccttccacacaacaggtgactgg

SEQ ID NO: 647058 - DNA, 33 bp, Homo sapien
gatatcactaccttccgcacaacaggtgactgg

SEQ ID NO: 647059 - DNA, 33 bp, Homo sapien
tgagatttgtttgacacacagtgaacccttcaa

SEQ ID NO: 647060 - DNA, 33 bp, Homo sapien
tgagatttgtttgacatacagtgaacccttcaa

SEQ ID NO: 647061 - DNA, 33 bp, Homo sapien
ttataaacagcacacacaaacaagaatcaaaca

SEQ ID NO: 647062 - DNA, 33 bp, Homo sapien
ttataaacagcacacataaacaagaatcaaaca

SEQ ID NO: 647063 - DNA, 33 bp, Homo sapien
tgtttgtgaggaaaggaagttgtacatttgttt

SEQ ID NO: 647064 - DNA, 33 bp, Homo sapien
tgtttgtgaggaaagggagttgtacatttgttt

SEQ ID NO: 647065 - DNA, 33 bp, Homo sapien
aatgcttctttgggtaaaatcattctcactact

SEQ ID NO: 647066 - DNA, 33 bp, Homo sapien
aatgcttctttgggtacaatcattctcactact

SEQ ID NO: 647067 - DNA, 33 bp, Homo sapien
tattgttaccgcccacacattcatcatactctt

SEQ ID NO: 647068 - DNA, 33 bp, Homo sapien
tattgttaccgcccacgcattcatcatactctt

SEQ ID NO: 647069 - DNA, 33 bp, Homo sapien
attgctaagctagaggaacaaagaaaaaaagtg

SEQ ID NO: 647070 - DNA, 33 bp, Homo sapien
attgctaagctagagggacaaagaaaaaaagtg

SEQ ID NO: 647071 - DNA, 33 bp, Homo sapien
gatgtaagtctgataaaagtgggtttaagacaa

SEQ ID NO: 647072 - DNA, 33 bp, Homo sapien
gatgtaagtctgataatagtgggtttaagacaa

SEQ ID NO: 647073 - DNA, 33 bp, Homo sapien
aagccattgcaaacaaaaaagctctatgtcaca

SEQ ID NO: 647074 - DNA, 33 bp, Homo sapien
aagccattgcaaacaagaaagctctatgtcaca

SEQ ID NO: 647075 - DNA, 33 bp, Homo sapien
agttttattattcattaaacttgcatttggttg

SEQ ID NO: 647076 - DNA, 33 bp, Homo sapien
agttttattattcatttaacttgcatttggttg

SEQ ID NO: 647077 - DNA, 33 bp, Homo sapien
agcaacagtgtgtgtcaaggcaaagctgtggcc

SEQ ID NO: 647078 - DNA, 33 bp, Homo sapien
agcaacagtgtgtgtcgaggcaaagctgtggcc

SEQ ID NO: 647079 - DNA, 33 bp, Homo sapien
ttagtcatttggagagacccaaaacatctctgc

SEQ ID NO: 647080 - DNA, 33 bp, Homo sapien
ttagtcatttggagaggcccaaaacatctctgc

SEQ ID NO: 647081 - DNA, 33 bp, Homo sapien
aaggacagacttgaagaatttgggagttaagag

SEQ ID NO: 647082 - DNA, 33 bp, Homo sapien
aaggacagacttgaaggatttgggagttaagag

SEQ ID NO: 647083 - DNA, 33 bp, Homo sapien
agctttgcagtattacacaatgatcagactgaa

SEQ ID NO: 647084 - DNA, 33 bp, Homo sapien
agctttgcagtattacccaatgatcagactgaa

SEQ ID NO: 647085 - DNA, 33 bp, Homo sapien
atgagacagaaaaaaaatacaatggcttctgaa

SEQ ID NO: 647086 - DNA, 33 bp, Homo sapien
atgagacagaaaaaaattacaatggcttctgaa

SEQ ID NO: 647087 - DNA, 33 bp, Homo sapien
gactccttctttaatacgcttcatgattgtgga

SEQ ID NO: 647088 - DNA, 33 bp, Homo sapien
gactccttctttaatatgcttcatgattgtgga

SEQ ID NO: 647089 - DNA, 33 bp, Homo sapien
atgattttttcttttccaggacactatgccatt

SEQ ID NO: 647090 - DNA, 33 bp, Homo sapien
atgattttttcttttctaggacactatgccatt

SEQ ID NO: 647091 - DNA, 33 bp, Homo sapien
taccccaaagaactataaggcctagccaacatt

SEQ ID NO: 647092 - DNA, 33 bp, Homo sapien
taccccaaagaactatgaggcctagccaacatt

SEQ ID NO: 647093 - DNA, 33 bp, Homo sapien
gaattttgtgtgccaagaaatactcaaagtttt

SEQ ID NO: 647094 - DNA, 33 bp, Homo sapien
gaattttgtgtgccaataaatactcaaagtttt

SEQ ID NO: 647095 - DNA, 33 bp, Homo sapien
tgttggccctgagtacaaaatgtcatctctcca

SEQ ID NO: 647096 - DNA, 33 bp, Homo sapien
tgttggccctgagtacgaaatgtcatctctcca

SEQ ID NO: 647097 - DNA, 33 bp, Homo sapien
caatttatccttatgggagaagaaaacacatac

SEQ ID NO: 647098 - DNA, 33 bp, Homo sapien
caatttatccttatggtagaagaaaacacatac

SEQ ID NO: 647099 - DNA, 33 bp, Homo sapien
gcagtgggacactctccactttatgcacaggct

SEQ ID NO: 647100 - DNA, 33 bp, Homo sapien
gcagtgggacactctctactttatgcacaggct

SEQ ID NO: 647101 - DNA, 33 bp, Homo sapien
cctacaactggctctccatgtattcaacaagat

SEQ ID NO: 647102 - DNA, 33 bp, Homo sapien
cctacaactggctctctatgtattcaacaagat

SEQ ID NO: 647103 - DNA, 33 bp, Homo sapien
aaacactaagttctcccggacataaagatgcca

SEQ ID NO: 647104 - DNA, 33 bp, Homo sapien
aaacactaagttctcctggacataaagatgcca

SEQ ID NO: 647105 - DNA, 33 bp, Homo sapien
aaacgcagagtaccgagtccctagactgcacac

SEQ ID NO: 647106 - DNA, 33 bp, Homo sapien
aaacgcagagtaccgattccctagactgcacac

SEQ ID NO: 647107 - DNA, 33 bp, Homo sapien
tctgcagcacaaagaacaagtatagaagaatat

SEQ ID NO: 647108 - DNA, 33 bp, Homo sapien
tctgcagcacaaagaataagtatagaagaatat

SEQ ID NO: 647109 - DNA, 33 bp, Homo sapien
tagtaaattgatgagaaggaacaatatttttgt

SEQ ID NO: 647110 - DNA, 33 bp, Homo sapien
tagtaaattgatgagatggaacaatatttttgt

SEQ ID NO: 647111 - DNA, 33 bp, Homo sapien
ttctcatttctgcaatcaccagcacctaaattc

SEQ ID NO: 647112 - DNA, 33 bp, Homo sapien
ttctcatttctgcaattaccagcacctaaattc

SEQ ID NO: 647113 - DNA, 33 bp, Homo sapien
gtgcaataaggctagacgtcacacttaatggta

SEQ ID NO: 647114 - DNA, 33 bp, Homo sapien
gtgcaataaggctagatgtcacacttaatggta

SEQ ID NO: 647115 - DNA, 33 bp, Homo sapien
tctgctaattcctcataaaagaattgtcaatct

SEQ ID NO: 647116 - DNA, 33 bp, Homo sapien
tctgctaattcctcatcaaagaattgtcaatct

SEQ ID NO: 647117 - DNA, 33 bp, Homo sapien
gagccatttcataccaacattgcagacttactt

SEQ ID NO: 647118 - DNA, 33 bp, Homo sapien
gagccatttcataccaccattgcagacttactt

SEQ ID NO: 647119 - DNA, 33 bp, Homo sapien
taacaaactagacctaagtgacatttatagaga

SEQ ID NO: 647120 - DNA, 33 bp, Homo sapien
taacaaactagacctatgtgacatttatagaga

SEQ ID NO: 647121 - DNA, 33 bp, Homo sapien
agaatttataatggtaactcttttcaaaataag

SEQ ID NO: 647122 - DNA, 33 bp, Homo sapien
agaatttataatggtagctcttttcaaaataag

SEQ ID NO: 647123 - DNA, 33 bp, Homo sapien
aagtccttctccaagcaataaattgtcatttat

SEQ ID NO: 647124 - DNA, 33 bp, Homo sapien
aagtccttctccaagcgataaattgtcatttat

SEQ ID NO: 647125 - DNA, 33 bp, Homo sapien
attgcataaacatccaaagttggcacagaaaat

SEQ ID NO: 647126 - DNA, 33 bp, Homo sapien
attgcataaacatccagagttggcacagaaaat

SEQ ID NO: 647127 - DNA, 33 bp, Homo sapien
ctaggaggcaattgccaaagttcaagtaagaga

SEQ ID NO: 647128 - DNA, 33 bp, Homo sapien
ctaggaggcaattgccgaagttcaagtaagaga

SEQ ID NO: 647129 - DNA, 33 bp, Homo sapien
tgtgttatatgtctcaactgatttttgattaaa

SEQ ID NO: 647130 - DNA, 33 bp, Homo sapien
tgtgttatatgtctcagctgatttttgattaaa

SEQ ID NO: 647131 - DNA, 33 bp, Homo sapien
ggagagttgccctataacttgatgctgtgactg

SEQ ID NO: 647132 - DNA, 33 bp, Homo sapien
ggagagttgccctatagcttgatgctgtgactg

SEQ ID NO: 647133 - DNA, 33 bp, Homo sapien
ccaccctggagggtgaatacgttatattattta

SEQ ID NO: 647134 - DNA, 33 bp, Homo sapien
ccaccctggagggtgagtacgttatattattta

SEQ ID NO: 647135 - DNA, 33 bp, Homo sapien
ttaaaattctggcctgcataagattgctgagat

SEQ ID NO: 647136 - DNA, 33 bp, Homo sapien
ttaaaattctggcctgtataagattgctgagat

SEQ ID NO: 647137 - DNA, 33 bp, Homo sapien
tagtagagctgttatgaagaagaatgtgaaaac

SEQ ID NO: 647138 - DNA, 33 bp, Homo sapien
tagtagagctgttatggagaagaatgtgaaaac

SEQ ID NO: 647139 - DNA, 33 bp, Homo sapien
taatgcctgccttccacatgaaattgaatcctg

SEQ ID NO: 647140 - DNA, 33 bp, Homo sapien
taatgcctgccttccatatgaaattgaatcctg

SEQ ID NO: 647141 - DNA, 33 bp, Homo sapien
catgcactatttacctcaaccattcattcgtaa

SEQ ID NO: 647142 - DNA, 33 bp, Homo sapien
catgcactatttaccttaaccattcattcgtaa

SEQ ID NO: 647143 - DNA, 33 bp, Homo sapien
gctcttatgttcttacaaaatgtatattgctgt

SEQ ID NO: 647144 - DNA, 33 bp, Homo sapien
gctcttatgttcttaccaaatgtatattgctgt

SEQ ID NO: 647145 - DNA, 33 bp, Homo sapien
cacctatctaaggagcccagattataacgaggt

SEQ ID NO: 647146 - DNA, 33 bp, Homo sapien
cacctatctaaggagcgcagattataacgaggt

SEQ ID NO: 647147 - DNA, 33 bp, Homo sapien
cttcatcagtgtaatgaattctcacattgcagt

SEQ ID NO: 647148 - DNA, 33 bp, Homo sapien
cttcatcagtgtaatggattctcacattgcagt

SEQ ID NO: 647149 - DNA, 33 bp, Homo sapien
cttttctctgtttcaaagggtacttgagaagtg

SEQ ID NO: 647150 - DNA, 33 bp, Homo sapien
cttttctctgtttcaaggggtacttgagaagtg

SEQ ID NO: 647151 - DNA, 33 bp, Homo sapien
gtgtccccacttgatacatcaaatcattcctca

SEQ ID NO: 647152 - DNA, 33 bp, Homo sapien
gtgtccccacttgatagatcaaatcattcctca

SEQ ID NO: 647153 - DNA, 33 bp, Homo sapien
ccgtctttcattcctgacaattcgtagttactt

SEQ ID NO: 647154 - DNA, 33 bp, Homo sapien
ccgtctttcattcctggcaattcgtagttactt

SEQ ID NO: 647155 - DNA, 33 bp, Homo sapien
ttgaaaagatgagaaacaccattacgcagacaa

SEQ ID NO: 647156 - DNA, 33 bp, Homo sapien
ttgaaaagatgagaaataccattacgcagacaa

SEQ ID NO: 647157 - DNA, 33 bp, Homo sapien
gataagaggaagggtaaaattttctatgagtcc

SEQ ID NO: 647158 - DNA, 33 bp, Homo sapien
gataagaggaagggtacaattttctatgagtcc

SEQ ID NO: 647159 - DNA, 33 bp, Homo sapien
ttcagacaggagaaatgaggtgaatagtcctgt

SEQ ID NO: 647160 - DNA, 33 bp, Homo sapien
ttcagacaggagaaattaggtgaatagtcctgt

SEQ ID NO: 647161 - DNA, 33 bp, Homo sapien
acagactaattcccacaacacataaagtattct

SEQ ID NO: 647162 - DNA, 33 bp, Homo sapien
acagactaattcccacgacacataaagtattct

SEQ ID NO: 647163 - DNA, 33 bp, Homo sapien
ttccttttgtctgtaacagatttgaatatgtgt

SEQ ID NO: 647164 - DNA, 33 bp, Homo sapien
ttccttttgtctgtaatagatttgaatatgtgt

SEQ ID NO: 647165 - DNA, 33 bp, Homo sapien
aaattcctacaagggaactggttttattatttt

SEQ ID NO: 647166 - DNA, 33 bp, Homo sapien
aaattcctacaagggacctggttttattatttt

SEQ ID NO: 647167 - DNA, 33 bp, Homo sapien
gaaaatatctggtagcaagtatctggttgttag

SEQ ID NO: 647168 - DNA, 33 bp, Homo sapien
gaaaatatctggtagcgagtatctggttgttag

SEQ ID NO: 647169 - DNA, 33 bp, Homo sapien
tttatatagttgtaacaacacccatctcctcac

SEQ ID NO: 647170 - DNA, 33 bp, Homo sapien
tttatatagttgtaaccacacccatctcctcac

SEQ ID NO: 647171 - DNA, 33 bp, Homo sapien
ctttatacacgtgagaacttacacagcctttaa

SEQ ID NO: 647172 - DNA, 33 bp, Homo sapien
ctttatacacgtgagatcttacacagcctttaa

SEQ ID NO: 647173 - DNA, 33 bp, Homo sapien
aaggaagctagaaaaccggatatgggaagtaaa

SEQ ID NO: 647174 - DNA, 33 bp, Homo sapien
aaggaagctagaaaactggatatgggaagtaaa

SEQ ID NO: 647175 - DNA, 33 bp, Homo sapien
caagtgtctttaacaccaggcttctcaaagatg

SEQ ID NO: 647176 - DNA, 33 bp, Homo sapien
caagtgtctttaacacgaggcttctcaaagatg

SEQ ID NO: 647177 - DNA, 33 bp, Homo sapien
gattgaaagagtgaaagccagggaagaacagcg

SEQ ID NO: 647178 - DNA, 33 bp, Homo sapien
gattgaaagagtgaaatccagggaagaacagcg

SEQ ID NO: 647179 - DNA, 33 bp, Homo sapien
ctctgcattggcgtaaaactcagtggcattatg

SEQ ID NO: 647180 - DNA, 33 bp, Homo sapien
ctctgcattggcgtaagactcagtggcattatg

SEQ ID NO: 647181 - DNA, 33 bp, Homo sapien
cactatatagctggcaaccaaatttacagagat

SEQ ID NO: 647182 - DNA, 33 bp, Homo sapien
cactatatagctggcacccaaatttacagagat

SEQ ID NO: 647183 - DNA, 33 bp, Homo sapien
tatttgaagacttaggaagcctctgctaggcat

SEQ ID NO: 647184 - DNA, 33 bp, Homo sapien
tatttgaagacttaggcagcctctgctaggcat

SEQ ID NO: 647185 - DNA, 33 bp, Homo sapien
gatttagttacagtagacagatagctagacaga

SEQ ID NO: 647186 - DNA, 33 bp, Homo sapien
gatttagttacagtagtcagatagctagacaga

SEQ ID NO: 647187 - DNA, 33 bp, Homo sapien
ttagcatattagcacacgtttctttattggatt

SEQ ID NO: 647188 - DNA, 33 bp, Homo sapien
ttagcatattagcacaggtttctttattggatt

SEQ ID NO: 647189 - DNA, 33 bp, Homo sapien
atgggttttgcctttacgtaaccacttgcttgg

SEQ ID NO: 647190 - DNA, 33 bp, Homo sapien
atgggttttgcctttatgtaaccacttgcttgg

SEQ ID NO: 647191 - DNA, 33 bp, Homo sapien
aaaaaatagtgatagccaggaaaagtaattcaa

SEQ ID NO: 647192 - DNA, 33 bp, Homo sapien
aaaaaatagtgatagctaggaaaagtaattcaa

SEQ ID NO: 647193 - DNA, 33 bp, Homo sapien
ttaagatgtcactgctaaaaactctatatcctg

SEQ ID NO: 647194 - DNA, 33 bp, Homo sapien
ttaagatgtcactgctgaaaactctatatcctg

SEQ ID NO: 647195 - DNA, 33 bp, Homo sapien
ctacaaattgctgttaacaaatagatcttccaa

SEQ ID NO: 647196 - DNA, 33 bp, Homo sapien
ctacaaattgctgttatcaaatagatcttccaa

SEQ ID NO: 647197 - DNA, 33 bp, Homo sapien
tttgaagctttaatacaactcattttgccagta

SEQ ID NO: 647198 - DNA, 33 bp, Homo sapien
tttgaagctttaatacgactcattttgccagta

SEQ ID NO: 647199 - DNA, 33 bp, Homo sapien
tctaggtctagtcggtaaacatcacccattaac

SEQ ID NO: 647200 - DNA, 33 bp, Homo sapien
tctaggtctagtcggtgaacatcacccattaac

SEQ ID NO: 647201 - DNA, 33 bp, Homo sapien
tcttgtctcatttggcgatttcttccaccccac

SEQ ID NO: 647202 - DNA, 33 bp, Homo sapien
tcttgtctcatttggctatttcttccaccccac

SEQ ID NO: 647203 - DNA, 33 bp, Homo sapien
ctcaatagatttgaacaaagaaatgtggacttt

SEQ ID NO: 647204 - DNA, 33 bp, Homo sapien
ctcaatagatttgaacgaagaaatgtggacttt

SEQ ID NO: 647205 - DNA, 33 bp, Homo sapien
atcaggttccaagctacacttagagaaaatcct

SEQ ID NO: 647206 - DNA, 33 bp, Homo sapien
atcaggttccaagctatacttagagaaaatcct

SEQ ID NO: 647207 - DNA, 33 bp, Homo sapien
cagacattccagggtaaactctatggaagctag

SEQ ID NO: 647208 - DNA, 33 bp, Homo sapien
cagacattccagggtagactctatggaagctag

SEQ ID NO: 647209 - DNA, 33 bp, Homo sapien
ggtctttgtttcctgagactgtgctgtggaaag

SEQ ID NO: 647210 - DNA, 33 bp, Homo sapien
ggtctttgtttcctgatactgtgctgtggaaag

SEQ ID NO: 647211 - DNA, 33 bp, Homo sapien
gcacaacttgaacaaacagttacattagtaaca

SEQ ID NO: 647212 - DNA, 33 bp, Homo sapien
gcacaacttgaacaaagagttacattagtaaca

SEQ ID NO: 647213 - DNA, 33 bp, Homo sapien
atatcacaggaagaaaaagcagagttgacgcca

SEQ ID NO: 647214 - DNA, 33 bp, Homo sapien
atatcacaggaagaaagagcagagttgacgcca

SEQ ID NO: 647215 - DNA, 33 bp, Homo sapien
cttatgactgcagagagtcccttcgtatcgcat

SEQ ID NO: 647216 - DNA, 33 bp, Homo sapien
cttatgactgcagagattcccttcgtatcgcat

SEQ ID NO: 647217 - DNA, 33 bp, Homo sapien
ggatgcagtgtttgaacgaccagtgctcttaaa

SEQ ID NO: 647218 - DNA, 33 bp, Homo sapien
ggatgcagtgtttgaatgaccagtgctcttaaa

SEQ ID NO: 647219 - DNA, 33 bp, Homo sapien
ataaacattataggcactcttcatttcaagaaa

SEQ ID NO: 647220 - DNA, 33 bp, Homo sapien
ataaacattataggcattcttcatttcaagaaa

SEQ ID NO: 647221 - DNA, 33 bp, Homo sapien
aagttctaggcagtagcaacttatcgtagctgc

SEQ ID NO: 647222 - DNA, 33 bp, Homo sapien
aagttctaggcagtagtaacttatcgtagctgc

SEQ ID NO: 647223 - DNA, 33 bp, Homo sapien
tttaaaactcagagtaaaagtcaagatccacac

SEQ ID NO: 647224 - DNA, 33 bp, Homo sapien
tttaaaactcagagtagaagtcaagatccacac

SEQ ID NO: 647225 - DNA, 33 bp, Homo sapien
tttcaggttatagctccgaaagttactacaccc

SEQ ID NO: 647226 - DNA, 33 bp, Homo sapien
tttcaggttatagctctgaaagttactacaccc

SEQ ID NO: 647227 - DNA, 33 bp, Homo sapien
ccctcttgcaggtcccaagatcattcaaatatc

SEQ ID NO: 647228 - DNA, 33 bp, Homo sapien
ccctcttgcaggtcccgagatcattcaaatatc

SEQ ID NO: 647229 - DNA, 33 bp, Homo sapien
tctgccaagatgaaaactgtcttagtccgtgca

SEQ ID NO: 647230 - DNA, 33 bp, Homo sapien
tctgccaagatgaaaattgtcttagtccgtgca

SEQ ID NO: 647231 - DNA, 33 bp, Homo sapien
cactaagttgacttgacgtctgaaatagtttca

SEQ ID NO: 647232 - DNA, 33 bp, Homo sapien
cactaagttgacttgatgtctgaaatagtttca

SEQ ID NO: 647233 - DNA, 33 bp, Homo sapien
aacaaggctctgaaaaatttccttaggtgagta

SEQ ID NO: 647234 - DNA, 33 bp, Homo sapien
aacaaggctctgaaaagtttccttaggtgagta

SEQ ID NO: 647235 - DNA, 33 bp, Homo sapien
tttctctccttccccactgagaagccaaagtga

SEQ ID NO: 647236 - DNA, 33 bp, Homo sapien
tttctctccttccccattgagaagccaaagtga

SEQ ID NO: 647237 - DNA, 33 bp, Homo sapien
tgaaggaataatgttgacaaacctgctgttacc

SEQ ID NO: 647238 - DNA, 33 bp, Homo sapien
tgaaggaataatgttggcaaacctgctgttacc

SEQ ID NO: 647239 - DNA, 33 bp, Homo sapien
tttaaaacaaagtcacagcgtgataaatcaaca

SEQ ID NO: 647240 - DNA, 33 bp, Homo sapien
tttaaaacaaagtcacggcgtgataaatcaaca

SEQ ID NO: 647241 - DNA, 33 bp, Homo sapien
gagcatattagaactcacatgacatgatcagtc

SEQ ID NO: 647242 - DNA, 33 bp, Homo sapien
gagcatattagaactcgcatgacatgatcagtc

SEQ ID NO: 647243 - DNA, 33 bp, Homo sapien
ctaagacttctagtagcatggtgaaaagaattg

SEQ ID NO: 647244 - DNA, 33 bp, Homo sapien
ctaagacttctagtagtatggtgaaaagaattg

SEQ ID NO: 647245 - DNA, 33 bp, Homo sapien
attgtgaaactgacaccaacctctctcttcttt

SEQ ID NO: 647246 - DNA, 33 bp, Homo sapien
attgtgaaactgacacgaacctctctcttcttt

SEQ ID NO: 647247 - DNA, 33 bp, Homo sapien
taggacttgaatcacacaatcccctctgttgct

SEQ ID NO: 647248 - DNA, 33 bp, Homo sapien
taggacttgaatcacataatcccctctgttgct

SEQ ID NO: 647249 - DNA, 33 bp, Homo sapien
ataaaggcaattttccgctagaagcatctacac

SEQ ID NO: 647250 - DNA, 33 bp, Homo sapien
ataaaggcaattttcctctagaagcatctacac

SEQ ID NO: 647251 - DNA, 33 bp, Homo sapien
ccagagacaccacaaagcctttttatctaccac

SEQ ID NO: 647252 - DNA, 33 bp, Homo sapien
ccagagacaccacaaatcctttttatctaccac

SEQ ID NO: 647253 - DNA, 33 bp, Homo sapien
taaagaactactttcagcaagaagcacctgtaa

SEQ ID NO: 647254 - DNA, 33 bp, Homo sapien
taaagaactactttcatcaagaagcacctgtaa

SEQ ID NO: 647255 - DNA, 33 bp, Homo sapien
actgaaataagtaacccaggaagcatgatgggg

SEQ ID NO: 647256 - DNA, 33 bp, Homo sapien
actgaaataagtaacctaggaagcatgatgggg

SEQ ID NO: 647257 - DNA, 33 bp, Homo sapien
aaagcaacccttatgcactgttagtgagagtat

SEQ ID NO: 647258 - DNA, 33 bp, Homo sapien
aaagcaacccttatgcgctgttagtgagagtat

SEQ ID NO: 647259 - DNA, 33 bp, Homo sapien
aaaaggcataaaaggaagcaacagaagacttac

SEQ ID NO: 647260 - DNA, 33 bp, Homo sapien
aaaaggcataaaaggaggcaacagaagacttac

SEQ ID NO: 647261 - DNA, 33 bp, Homo sapien
aaccattgtctgccaaatgaaagttaatcgatt

SEQ ID NO: 647262 - DNA, 33 bp, Homo sapien
aaccattgtctgccaagtgaaagttaatcgatt

SEQ ID NO: 647263 - DNA, 33 bp, Homo sapien
tatgctgaaaattccactgaaatgctaccgatg

SEQ ID NO: 647264 - DNA, 33 bp, Homo sapien
tatgctgaaaattccattgaaatgctaccgatg

SEQ ID NO: 647265 - DNA, 33 bp, Homo sapien
tatattcacatctcaccggcaaaacacatcaca

SEQ ID NO: 647266 - DNA, 33 bp, Homo sapien
tatattcacatctcactggcaaaacacatcaca

SEQ ID NO: 647267 - DNA, 33 bp, Homo sapien
catcactggataccacaatagaaaagatataga

SEQ ID NO: 647268 - DNA, 33 bp, Homo sapien
catcactggataccacgatagaaaagatataga

SEQ ID NO: 647269 - DNA, 33 bp, Homo sapien
cttattaaagacaccacgtttgagttggcattc

SEQ ID NO: 647270 - DNA, 33 bp, Homo sapien
cttattaaagacaccatgtttgagttggcattc

SEQ ID NO: 647271 - DNA, 33 bp, Homo sapien
gatgctattgtttccacgtttccctttcaaaat

SEQ ID NO: 647272 - DNA, 33 bp, Homo sapien
gatgctattgtttccatgtttccctttcaaaat

SEQ ID NO: 647273 - DNA, 33 bp, Homo sapien
tgtgaagaggtataataaaagttgaggctgaaa

SEQ ID NO: 647274 - DNA, 33 bp, Homo sapien
tgtgaagaggtataatgaaagttgaggctgaaa

SEQ ID NO: 647275 - DNA, 33 bp, Homo sapien
ttaagaaagaagcaaactgaccctctggaactg

SEQ ID NO: 647276 - DNA, 33 bp, Homo sapien
ttaagaaagaagcaaagtgaccctctggaactg

SEQ ID NO: 647277 - DNA, 33 bp, Homo sapien
gaatctcagagcttaaagactggtttttcaagt

SEQ ID NO: 647278 - DNA, 33 bp, Homo sapien
gaatctcagagcttaaggactggtttttcaagt

SEQ ID NO: 647279 - DNA, 33 bp, Homo sapien
acttttttaatgtccaccattgcagatgagaat

SEQ ID NO: 647280 - DNA, 33 bp, Homo sapien
acttttttaatgtccatcattgcagatgagaat

SEQ ID NO: 647281 - DNA, 33 bp, Homo sapien
gatggaccagttcataatatcgttggaaaatgg

SEQ ID NO: 647282 - DNA, 33 bp, Homo sapien
gatggaccagttcatattatcgttggaaaatgg

SEQ ID NO: 647283 - DNA, 33 bp, Homo sapien
gcctgcttctctttcacgttccaccataattat

SEQ ID NO: 647284 - DNA, 33 bp, Homo sapien
gcctgcttctctttcatgttccaccataattat

SEQ ID NO: 647285 - DNA, 33 bp, Homo sapien
agtgagagaaccattcagaagtgaggtcatgat

SEQ ID NO: 647286 - DNA, 33 bp, Homo sapien
agtgagagaaccattcggaagtgaggtcatgat

SEQ ID NO: 647287 - DNA, 33 bp, Homo sapien
gactattttgtctccaaaactcaagaaaggcta

SEQ ID NO: 647288 - DNA, 33 bp, Homo sapien
gactattttgtctccagaactcaagaaaggcta

SEQ ID NO: 647289 - DNA, 33 bp, Homo sapien
agctccaaagtaaaaaacaagttgctgtgactc

SEQ ID NO: 647290 - DNA, 33 bp, Homo sapien
agctccaaagtaaaaatcaagttgctgtgactc

SEQ ID NO: 647291 - DNA, 33 bp, Homo sapien
ttttcccaggaaaccacgaatgaaagctttagc

SEQ ID NO: 647292 - DNA, 33 bp, Homo sapien
ttttcccaggaaaccatgaatgaaagctttagc

SEQ ID NO: 647293 - DNA, 33 bp, Homo sapien
ctgaacagtgggcaaaaaggatagttagatggg

SEQ ID NO: 647294 - DNA, 33 bp, Homo sapien
ctgaacagtgggcaaagaggatagttagatggg

SEQ ID NO: 647295 - DNA, 33 bp, Homo sapien
gtcaaacactgtgtgacgatgaacttcccaaat

SEQ ID NO: 647296 - DNA, 33 bp, Homo sapien
gtcaaacactgtgtgatgatgaacttcccaaat

SEQ ID NO: 647297 - DNA, 33 bp, Homo sapien
catagtaaaaatgtctcaaaatgtaaaatatca

SEQ ID NO: 647298 - DNA, 33 bp, Homo sapien
catagtaaaaatgtctgaaaatgtaaaatatca

SEQ ID NO: 647299 - DNA, 33 bp, Homo sapien
gccattaataatacaacgtccttgtcctaatgg

SEQ ID NO: 647300 - DNA, 33 bp, Homo sapien
gccattaataatacaatgtccttgtcctaatgg

SEQ ID NO: 647301 - DNA, 33 bp, Homo sapien
aaattgtgagtataataaagttgttgttgcttc

SEQ ID NO: 647302 - DNA, 33 bp, Homo sapien
aaattgtgagtataatgaagttgttgttgcttc

SEQ ID NO: 647303 - DNA, 33 bp, Homo sapien
tagacaaattagttcacaaaggtggtatagaaa

SEQ ID NO: 647304 - DNA, 33 bp, Homo sapien
tagacaaattagttcataaaggtggtatagaaa

SEQ ID NO: 647305 - DNA, 33 bp, Homo sapien
tctcctttctcctggaacttgtcatgaggtaat

SEQ ID NO: 647306 - DNA, 33 bp, Homo sapien
tctcctttctcctggagcttgtcatgaggtaat

SEQ ID NO: 647307 - DNA, 33 bp, Homo sapien
cactgcaggaccagaaagcagtgacatcccctg

SEQ ID NO: 647308 - DNA, 33 bp, Homo sapien
cactgcaggaccagaaggcagtgacatcccctg

SEQ ID NO: 647309 - DNA, 33 bp, Homo sapien
agtcttcagtctcgacagtaaggtctctgggta

SEQ ID NO: 647310 - DNA, 33 bp, Homo sapien
agtcttcagtctcgacggtaaggtctctgggta

SEQ ID NO: 647311 - DNA, 33 bp, Homo sapien
cttattactgatgcttaaactactcaatacgta

SEQ ID NO: 647312 - DNA, 33 bp, Homo sapien
cttattactgatgcttgaactactcaatacgta

SEQ ID NO: 647313 - DNA, 33 bp, Homo sapien
gatagctttagcttgacctgaaacattatagaa

SEQ ID NO: 647314 - DNA, 33 bp, Homo sapien
gatagctttagcttgatctgaaacattatagaa

SEQ ID NO: 647315 - DNA, 33 bp, Homo sapien
ttgatgcaaggagataataatggaagctcagca

SEQ ID NO: 647316 - DNA, 33 bp, Homo sapien
ttgatgcaaggagatagtaatggaagctcagca

SEQ ID NO: 647317 - DNA, 33 bp, Homo sapien
cttcctagagttcaggaaggtgaaagcagaaag

SEQ ID NO: 647318 - DNA, 33 bp, Homo sapien
cttcctagagttcagggaggtgaaagcagaaag

SEQ ID NO: 647319 - DNA, 33 bp, Homo sapien
ctaggaaaatgtggaaagctacaactcagtagg

SEQ ID NO: 647320 - DNA, 33 bp, Homo sapien
ctaggaaaatgtggaaggctacaactcagtagg

SEQ ID NO: 647321 - DNA, 33 bp, Homo sapien
atggctgggaagtactcacaatcattttggaag

SEQ ID NO: 647322 - DNA, 33 bp, Homo sapien
atggctgggaagtactgacaatcattttggaag

SEQ ID NO: 647323 - DNA, 33 bp, Homo sapien
cctcatctttaattcacattgtgtcctcattcc

SEQ ID NO: 647324 - DNA, 33 bp, Homo sapien
cctcatctttaattcatattgtgtcctcattcc

SEQ ID NO: 647325 - DNA, 33 bp, Homo sapien
ataacccattaattaaataacgcaataacccat

SEQ ID NO: 647326 - DNA, 33 bp, Homo sapien
ataacccattaattaattaacgcaataacccat

SEQ ID NO: 647327 - DNA, 33 bp, Homo sapien
gtaagaagtagtcaagccaatagaagttagaag

SEQ ID NO: 647328 - DNA, 33 bp, Homo sapien
gtaagaagtagtcaagtcaatagaagttagaag

SEQ ID NO: 647329 - DNA, 33 bp, Homo sapien
gtctatctaaaatcaccgagactcttgtataat

SEQ ID NO: 647330 - DNA, 33 bp, Homo sapien
gtctatctaaaatcactgagactcttgtataat

SEQ ID NO: 647331 - DNA, 33 bp, Homo sapien
aaaaggcataccttaaagtaagttgaaattgaa

SEQ ID NO: 647332 - DNA, 33 bp, Homo sapien
aaaaggcataccttaatgtaagttgaaattgaa

SEQ ID NO: 647333 - DNA, 33 bp, Homo sapien
actctaatggaggacacaggatattatgcttta

SEQ ID NO: 647334 - DNA, 33 bp, Homo sapien
actctaatggaggacagaggatattatgcttta

SEQ ID NO: 647335 - DNA, 33 bp, Homo sapien
catacaccgaccagagcattaagtattatatct

SEQ ID NO: 647336 - DNA, 33 bp, Homo sapien
catacaccgaccagaggattaagtattatatct

SEQ ID NO: 647337 - DNA, 33 bp, Homo sapien
tctttcactgctcgaaaaggttcagttttaggg

SEQ ID NO: 647338 - DNA, 33 bp, Homo sapien
tctttcactgctcgaagaggttcagttttaggg

SEQ ID NO: 647339 - DNA, 33 bp, Homo sapien
tttgtgttcatgaaaaatatatgagaagttctg

SEQ ID NO: 647340 - DNA, 33 bp, Homo sapien
tttgtgttcatgaaaagtatatgagaagttctg

SEQ ID NO: 647341 - DNA, 33 bp, Homo sapien
aaagtattttcaacaaagacttcaattaatacc

SEQ ID NO: 647342 - DNA, 33 bp, Homo sapien
aaagtattttcaacaaggacttcaattaatacc

SEQ ID NO: 647343 - DNA, 33 bp, Homo sapien
atgttggcttttgacaaaactggattttatttc

SEQ ID NO: 647344 - DNA, 33 bp, Homo sapien
atgttggcttttgacacaactggattttatttc

SEQ ID NO: 647345 - DNA, 33 bp, Homo sapien
atcacaaaatccttaaatacaccacatctacaa

SEQ ID NO: 647346 - DNA, 33 bp, Homo sapien
atcacaaaatccttaattacaccacatctacaa

SEQ ID NO: 647347 - DNA, 33 bp, Homo sapien
taagatgctcacacaaccacataaaaatctttg

SEQ ID NO: 647348 - DNA, 33 bp, Homo sapien
taagatgctcacacaatcacataaaaatctttg

SEQ ID NO: 647349 - DNA, 33 bp, Homo sapien
tggtacaaaaccaggaatatagatcttttgttg

SEQ ID NO: 647350 - DNA, 33 bp, Homo sapien
tggtacaaaaccaggactatagatcttttgttg

SEQ ID NO: 647351 - DNA, 33 bp, Homo sapien
gccacctaccagacacccttcagtgctgttttt

SEQ ID NO: 647352 - DNA, 33 bp, Homo sapien
gccacctaccagacactcttcagtgctgttttt

SEQ ID NO: 647353 - DNA, 33 bp, Homo sapien
ctcctaatccaagagaataggtgctacaaatcc

SEQ ID NO: 647354 - DNA, 33 bp, Homo sapien
ctcctaatccaagagagtaggtgctacaaatcc

SEQ ID NO: 647355 - DNA, 33 bp, Homo sapien
tgcaggcattttccccaacttcggatggagatc

SEQ ID NO: 647356 - DNA, 33 bp, Homo sapien
tgcaggcattttccccgacttcggatggagatc

SEQ ID NO: 647357 - DNA, 33 bp, Homo sapien
agagaataggacagaaaaattaacaatgaaagc

SEQ ID NO: 647358 - DNA, 33 bp, Homo sapien
agagaataggacagaacaattaacaatgaaagc

SEQ ID NO: 647359 - DNA, 33 bp, Homo sapien
ggctttcaacaattacacaattcaaataagatt

SEQ ID NO: 647360 - DNA, 33 bp, Homo sapien
ggctttcaacaattacgcaattcaaataagatt

SEQ ID NO: 647361 - DNA, 33 bp, Homo sapien
ggagaaatatataagaatacatccagaacactc

SEQ ID NO: 647362 - DNA, 33 bp, Homo sapien
ggagaaatatataagattacatccagaacactc

SEQ ID NO: 647363 - DNA, 33 bp, Homo sapien
tttgtgttttcaagaaaaatcattagtgcttaa

SEQ ID NO: 647364 - DNA, 33 bp, Homo sapien
tttgtgttttcaagaacaatcattagtgcttaa

SEQ ID NO: 647365 - DNA, 33 bp, Homo sapien
ctggtatgaatcaactaaaatcaagatatcagc

SEQ ID NO: 647366 - DNA, 33 bp, Homo sapien
ctggtatgaatcaactgaaatcaagatatcagc

SEQ ID NO: 647367 - DNA, 33 bp, Homo sapien
cagtttcataaatttcaacgttttatgtcaaat

SEQ ID NO: 647368 - DNA, 33 bp, Homo sapien
cagtttcataaatttccacgttttatgtcaaat

SEQ ID NO: 647369 - DNA, 33 bp, Homo sapien
atgttccctcttttccccagcattctcattgtt

SEQ ID NO: 647370 - DNA, 33 bp, Homo sapien
atgttccctcttttcctcagcattctcattgtt

SEQ ID NO: 647371 - DNA, 33 bp, Homo sapien
ccagagaaaggagcaaagataaaggcaaggaag

SEQ ID NO: 647372 - DNA, 33 bp, Homo sapien
ccagagaaaggagcaaggataaaggcaaggaag

SEQ ID NO: 647373 - DNA, 33 bp, Homo sapien
cattctcaaatgtgtcgccatcgttgagcaaac

SEQ ID NO: 647374 - DNA, 33 bp, Homo sapien
cattctcaaatgtgtctccatcgttgagcaaac

SEQ ID NO: 647375 - DNA, 33 bp, Homo sapien
gaaagacattattgggccataaagttgacaaaa

SEQ ID NO: 647376 - DNA, 33 bp, Homo sapien
gaaagacattattgggtcataaagttgacaaaa

SEQ ID NO: 647377 - DNA, 33 bp, Homo sapien
ggtggatcagcatagacagaaaagacataaggg

SEQ ID NO: 647378 - DNA, 33 bp, Homo sapien
ggtggatcagcatagagagaaaagacataaggg

SEQ ID NO: 647379 - DNA, 33 bp, Homo sapien
atcagttgggaacctgaaaggaaacagagaata

SEQ ID NO: 647380 - DNA, 33 bp, Homo sapien
atcagttgggaacctggaaggaaacagagaata

SEQ ID NO: 647381 - DNA, 33 bp, Homo sapien
ttctatatgatttttacggaacactgtatatac

SEQ ID NO: 647382 - DNA, 33 bp, Homo sapien
ttctatatgatttttatggaacactgtatatac

SEQ ID NO: 647383 - DNA, 33 bp, Homo sapien
tgactagttttcctaactgagctgagacaatat

SEQ ID NO: 647384 - DNA, 33 bp, Homo sapien
tgactagttttcctaattgagctgagacaatat

SEQ ID NO: 647385 - DNA, 33 bp, Homo sapien
ttttagcctatgttcaatatctactaaggtttt

SEQ ID NO: 647386 - DNA, 33 bp, Homo sapien
ttttagcctatgttcagtatctactaaggtttt

SEQ ID NO: 647387 - DNA, 33 bp, Homo sapien
ttgaagacaaagaatcacatttctcctaagata

SEQ ID NO: 647388 - DNA, 33 bp, Homo sapien
ttgaagacaaagaatcgcatttctcctaagata

SEQ ID NO: 647389 - DNA, 33 bp, Homo sapien
gctgggactgatatccagattttattgctggta

SEQ ID NO: 647390 - DNA, 33 bp, Homo sapien
gctgggactgatatcccgattttattgctggta

SEQ ID NO: 647391 - DNA, 33 bp, Homo sapien
acaagttgcttaccacaaagaatgtagtgaaga

SEQ ID NO: 647392 - DNA, 33 bp, Homo sapien
acaagttgcttaccacgaagaatgtagtgaaga

SEQ ID NO: 647393 - DNA, 33 bp, Homo sapien
ctctacaaaataaataactgggcataatggcat

SEQ ID NO: 647394 - DNA, 33 bp, Homo sapien
ctctacaaaataaatagctgggcataatggcat

SEQ ID NO: 647395 - DNA, 33 bp, Homo sapien
tggtaagtgtactatacaggtgtgccatttatt

SEQ ID NO: 647396 - DNA, 33 bp, Homo sapien
tggtaagtgtactatagaggtgtgccatttatt

SEQ ID NO: 647397 - DNA, 33 bp, Homo sapien
gaaatgatagaaataaaaaatctagttacagca

SEQ ID NO: 647398 - DNA, 33 bp, Homo sapien
gaaatgatagaaataagaaatctagttacagca

SEQ ID NO: 647399 - DNA, 33 bp, Homo sapien
cttgaagaaggagacaacaaccatttggcaaat

SEQ ID NO: 647400 - DNA, 33 bp, Homo sapien
cttgaagaaggagacagcaaccatttggcaaat

SEQ ID NO: 647401 - DNA, 33 bp, Homo sapien
atttgcaaaactagacaagcatatctcaaagct

SEQ ID NO: 647402 - DNA, 33 bp, Homo sapien
atttgcaaaactagacgagcatatctcaaagct

SEQ ID NO: 647403 - DNA, 33 bp, Homo sapien
tctgaatttttatgagaagattggattgggagg

SEQ ID NO: 647404 - DNA, 33 bp, Homo sapien
tctgaatttttatgaggagattggattgggagg

SEQ ID NO: 647405 - DNA, 33 bp, Homo sapien
acgaaagctactgatacggtccacttcttatac

SEQ ID NO: 647406 - DNA, 33 bp, Homo sapien
acgaaagctactgatatggtccacttcttatac

SEQ ID NO: 647407 - DNA, 33 bp, Homo sapien
ggggtagccaataagcagccaatggagaattct

SEQ ID NO: 647408 - DNA, 33 bp, Homo sapien
ggggtagccaataagcggccaatggagaattct

SEQ ID NO: 647409 - DNA, 33 bp, Homo sapien
ttagctattgtaataaagagaatcactaagact

SEQ ID NO: 647410 - DNA, 33 bp, Homo sapien
ttagctattgtaataatgagaatcactaagact

SEQ ID NO: 647411 - DNA, 33 bp, Homo sapien
atagagtcacaaatgaaatcaacttccctagaa

SEQ ID NO: 647412 - DNA, 33 bp, Homo sapien
atagagtcacaaatgagatcaacttccctagaa

SEQ ID NO: 647413 - DNA, 33 bp, Homo sapien
taaggatttagacaaaatgaaaatcaatgaatt

SEQ ID NO: 647414 - DNA, 33 bp, Homo sapien
taaggatttagacaaagtgaaaatcaatgaatt

SEQ ID NO: 647415 - DNA, 33 bp, Homo sapien
agataatctgcctacaatggagagaatgacatg

SEQ ID NO: 647416 - DNA, 33 bp, Homo sapien
agataatctgcctacagtggagagaatgacatg

SEQ ID NO: 647417 - DNA, 33 bp, Homo sapien
acactctagcctcatagagactctttgattgca

SEQ ID NO: 647418 - DNA, 33 bp, Homo sapien
acactctagcctcatatagactctttgattgca

SEQ ID NO: 647419 - DNA, 33 bp, Homo sapien
tgctcttagtgcaagactaatcactgctttctt

SEQ ID NO: 647420 - DNA, 33 bp, Homo sapien
tgctcttagtgcaagattaatcactgctttctt

SEQ ID NO: 647421 - DNA, 33 bp, Homo sapien
gtaattctgtgagatgcaacagttaatatcccc

SEQ ID NO: 647422 - DNA, 33 bp, Homo sapien
gtaattctgtgagatggaacagttaatatcccc

SEQ ID NO: 647423 - DNA, 33 bp, Homo sapien
aagtactaaacatcaaaacctatgataaatgcc

SEQ ID NO: 647424 - DNA, 33 bp, Homo sapien
aagtactaaacatcaagacctatgataaatgcc

SEQ ID NO: 647425 - DNA, 33 bp, Homo sapien
ttgaaatctaatgttaacttgtgcacagattgg

SEQ ID NO: 647426 - DNA, 33 bp, Homo sapien
ttgaaatctaatgttatcttgtgcacagattgg

SEQ ID NO: 647427 - DNA, 33 bp, Homo sapien
aaatattttaaggtgccgatagatttgcttagc

SEQ ID NO: 647428 - DNA, 33 bp, Homo sapien
aaatattttaaggtgctgatagatttgcttagc

SEQ ID NO: 647429 - DNA, 33 bp, Homo sapien
aatattggaaatattaacattggctttaacatt

SEQ ID NO: 647430 - DNA, 33 bp, Homo sapien
aatattggaaatattaccattggctttaacatt

SEQ ID NO: 647431 - DNA, 33 bp, Homo sapien
tttttgtgtaataccacgctgtacattcgagcc

SEQ ID NO: 647432 - DNA, 33 bp, Homo sapien
tttttgtgtaataccatgctgtacattcgagcc

SEQ ID NO: 647433 - DNA, 33 bp, Homo sapien
tgacatgataaaatttcaaaatgtcctagggaa

SEQ ID NO: 647434 - DNA, 33 bp, Homo sapien
tgacatgataaaatttgaaaatgtcctagggaa

SEQ ID NO: 647435 - DNA, 33 bp, Homo sapien
tctttgaagcagagagaccttatcagacactga

SEQ ID NO: 647436 - DNA, 33 bp, Homo sapien
tctttgaagcagagagcccttatcagacactga

SEQ ID NO: 647437 - DNA, 33 bp, Homo sapien
cattccttgatgcccaacccttcattttagatt

SEQ ID NO: 647438 - DNA, 33 bp, Homo sapien
cattccttgatgcccagcccttcattttagatt

SEQ ID NO: 647439 - DNA, 33 bp, Homo sapien
agatggctctttataactgaaatggtcagatgc

SEQ ID NO: 647440 - DNA, 33 bp, Homo sapien
agatggctctttataattgaaatggtcagatgc

SEQ ID NO: 647441 - DNA, 33 bp, Homo sapien
tgagttccttgcagaaaggatgacagccaacac

SEQ ID NO: 647442 - DNA, 33 bp, Homo sapien
tgagttccttgcagaagggatgacagccaacac

SEQ ID NO: 647443 - DNA, 33 bp, Homo sapien; identical to SEQ ID NO: 647441

SEQ ID NO: 647444 - DNA, 33 bp, Homo sapien; identical to SEQ ID NO: 647442

SEQ ID NO: 647445 - DNA, 33 bp, Homo sapien
gacaagtcagtctgacactattacaaatgtatg

SEQ ID NO: 647446 - DNA, 33 bp, Homo sapien
gacaagtcagtctgacgctattacaaatgtatg

SEQ ID NO: 647447 - DNA, 33 bp, Homo sapien
tctaaacctttctataccttacaacagcacaat

SEQ ID NO: 647448 - DNA, 33 bp, Homo sapien
tctaaacctttctatatcttacaacagcacaat

SEQ ID NO: 647449 - DNA, 33 bp, Homo sapien
gtacctttcaactggaaataactaggagctcct

SEQ ID NO: 647450 - DNA, 33 bp, Homo sapien
gtacctttcaactggagataactaggagctcct

SEQ ID NO: 647451 - DNA, 33 bp, Homo sapien
gctaaacatacctaaaatgctgaacaaaggttt

SEQ ID NO: 647452 - DNA, 33 bp, Homo sapien
gctaaacatacctaaagtgctgaacaaaggttt

SEQ ID NO: 647453 - DNA, 33 bp, Homo sapien
cttcctctcttgaacaccaaaacttattcattt

SEQ ID NO: 647454 - DNA, 33 bp, Homo sapien
cttcctctcttgaacatcaaaacttattcattt

SEQ ID NO: 647455 - DNA, 33 bp, Homo sapien
tctttctctgctgcgccactctgctgctctgct

SEQ ID NO: 647456 - DNA, 33 bp, Homo sapien
tctttctctgctgcgcgactctgctgctctgct

SEQ ID NO: 647457 - DNA, 33 bp, Homo sapien
atagtgattgaacttaaatgataaaagagctac

SEQ ID NO: 647458 - DNA, 33 bp, Homo sapien
atagtgattgaacttagatgataaaagagctac

SEQ ID NO: 647459 - DNA, 33 bp, Homo sapien
cttttacattgacatcgatggtccagaattcat

SEQ ID NO: 647460 - DNA, 33 bp, Homo sapien
cttttacattgacatctatggtccagaattcat

SEQ ID NO: 647461 - DNA, 33 bp, Homo sapien
ttggttcagttcaggaagacaggataactggaa

SEQ ID NO: 647462 - DNA, 33 bp, Homo sapien
ttggttcagttcaggacgacaggataactggaa

SEQ ID NO: 647463 - DNA, 33 bp, Homo sapien
ctcatagatgttcttcaaattagtaagctataa

SEQ ID NO: 647464 - DNA, 33 bp, Homo sapien
ctcatagatgttcttcgaattagtaagctataa

SEQ ID NO: 647465 - DNA, 33 bp, Homo sapien
tttttttcatggcaggaatatacatcgctcctc

SEQ ID NO: 647466 - DNA, 33 bp, Homo sapien
tttttttcatggcaggtatatacatcgctcctc

SEQ ID NO: 647467 - DNA, 33 bp, Homo sapien
attgtagtaaagaaaagcaggctaaattatctc

SEQ ID NO: 647468 - DNA, 33 bp, Homo sapien
attgtagtaaagaaaatcaggctaaattatctc

SEQ ID NO: 647469 - DNA, 33 bp, Homo sapien
ttagagcaattagcaaaggctttaattgtgaaa

SEQ ID NO: 647470 - DNA, 33 bp, Homo sapien
ttagagcaattagcaagggctttaattgtgaaa

SEQ ID NO: 647471 - DNA, 33 bp, Homo sapien
cttagtgacaaaaccaatctttcataatatgac

SEQ ID NO: 647472 - DNA, 33 bp, Homo sapien
cttagtgacaaaaccagtctttcataatatgac

SEQ ID NO: 647473 - DNA, 33 bp, Homo sapien
ttgaagacctggataacgtggccatgatgctgg

SEQ ID NO: 647474 - DNA, 33 bp, Homo sapien
ttgaagacctggataatgtggccatgatgctgg

SEQ ID NO: 647475 - DNA, 33 bp, Homo sapien
tttctctctttgtaaacgttgctaatttgaaca

SEQ ID NO: 647476 - DNA, 33 bp, Homo sapien
tttctctctttgtaaatgttgctaatttgaaca

SEQ ID NO: 647477 - DNA, 33 bp, Homo sapien
agtaaaaacctaaaacagcctattgattcactt

SEQ ID NO: 647478 - DNA, 33 bp, Homo sapien
agtaaaaacctaaaactgcctattgattcactt

SEQ ID NO: 647479 - DNA, 33 bp, Homo sapien
ctgaggtgaggaataactatttacagtttgttt

SEQ ID NO: 647480 - DNA, 33 bp, Homo sapien
ctgaggtgaggaataagtatttacagtttgttt

SEQ ID NO: 647481 - DNA, 33 bp, Homo sapien
gagcttgaggaacttacaacttgaggaagatga

SEQ ID NO: 647482 - DNA, 33 bp, Homo sapien
gagcttgaggaacttagaacttgaggaagatga

SEQ ID NO: 647483 - DNA, 33 bp, Homo sapien
tacaagtgttatcaggaatgtattgagcaatgt

SEQ ID NO: 647484 - DNA, 33 bp, Homo sapien
tacaagtgttatcagggatgtattgagcaatgt

SEQ ID NO: 647485 - DNA, 33 bp, Homo sapien
ttcatatccattcctaagcacattgctcaatac

SEQ ID NO: 647486 - DNA, 33 bp, Homo sapien
ttcatatccattcctacgcacattgctcaatac

SEQ ID NO: 647487 - DNA, 33 bp, Homo sapien
ggtgtctgaagaattaagcagtgatagattcga

SEQ ID NO: 647488 - DNA, 33 bp, Homo sapien
ggtgtctgaagaattaggcagtgatagattcga

SEQ ID NO: 647489 - DNA, 33 bp, Homo sapien
tataagagacttgaaacgataatcctacaggaa

SEQ ID NO: 647490 - DNA, 33 bp, Homo sapien
tataagagacttgaaatgataatcctacaggaa

SEQ ID NO: 647491 - DNA, 33 bp, Homo sapien
taggtttcctggaagacgactttaagagggaga

SEQ ID NO: 647492 - DNA, 33 bp, Homo sapien
taggtttcctggaagatgactttaagagggaga

SEQ ID NO: 647493 - DNA, 33 bp, Homo sapien
tatgtattgttgtggactaatttttacagtgct

SEQ ID NO: 647494 - DNA, 33 bp, Homo sapien
tatgtattgttgtggattaatttttacagtgct

SEQ ID NO: 647495 - DNA, 33 bp, Homo sapien
tcaatcctttccaaaccgactgctgctttatca

SEQ ID NO: 647496 - DNA, 33 bp, Homo sapien
tcaatcctttccaaactgactgctgctttatca

SEQ ID NO: 647497 - DNA, 33 bp, Homo sapien
ccctgccaggtcagcaagaaagtcatccacctc

SEQ ID NO: 647498 - DNA, 33 bp, Homo sapien
ccctgccaggtcagcaggaaagtcatccacctc

SEQ ID NO: 647499 - DNA, 33 bp, Homo sapien
agaaaggctgtctataggtgcacccattctgag

SEQ ID NO: 647500 - DNA, 33 bp, Homo sapien
agaaaggctgtctatatgtgcacccattctgag

SEQ ID NO: 647501 - DNA, 33 bp, Homo sapien
gtaatctcaaaatttcaagtgaaaaaggacatc

SEQ ID NO: 647502 - DNA, 33 bp, Homo sapien
gtaatctcaaaatttctagtgaaaaaggacatc

SEQ ID NO: 647503 - DNA, 33 bp, Homo sapien
cattttctatacctggaacatatatagaagcat

SEQ ID NO: 647504 - DNA, 33 bp, Homo sapien
cattttctatacctgggacatatatagaagcat

SEQ ID NO: 647505 - DNA, 33 bp, Homo sapien
cgtttcattaatagtaacatactctgcacatac

SEQ ID NO: 647506 - DNA, 33 bp, Homo sapien
cgtttcattaatagtagcatactctgcacatac

SEQ ID NO: 647507 - DNA, 33 bp, Homo sapien
tgattgtgatttctgaggtgaatgaaaatattt

SEQ ID NO: 647508 - DNA, 33 bp, Homo sapien
tgattgtgatttctgatgtgaatgaaaatattt

SEQ ID NO: 647509 - DNA, 33 bp, Homo sapien
gaactagaggcagaacaatatagaaatatgctg

SEQ ID NO: 647510 - DNA, 33 bp, Homo sapien
gaactagaggcagaacgatatagaaatatgctg

SEQ ID NO: 647511 - DNA, 33 bp, Homo sapien
tatagaaatatgctgacgcacaggttacatttt

SEQ ID NO: 647512 - DNA, 33 bp, Homo sapien
tatagaaatatgctgatgcacaggttacatttt

SEQ ID NO: 647513 - DNA, 33 bp, Homo sapien
atctatctattttttacggagagaagaagtctt

SEQ ID NO: 647514 - DNA, 33 bp, Homo sapien
atctatctattttttatggagagaagaagtctt

SEQ ID NO: 647515 - DNA, 33 bp, Homo sapien
tcagatacgaactctgcatttttattcccctca

SEQ ID NO: 647516 - DNA, 33 bp, Homo sapien
tcagatacgaactctggatttttattcccctca

SEQ ID NO: 647517 - DNA, 33 bp, Homo sapien
aataatgataacaaccagaacgcagctgactca

SEQ ID NO: 647518 - DNA, 33 bp, Homo sapien
aataatgataacaaccggaacgcagctgactca

SEQ ID NO: 647519 - DNA, 33 bp, Homo sapien
tctttctgaaataagcacagttttttaaccttg

SEQ ID NO: 647520 - DNA, 33 bp, Homo sapien
tctttctgaaataagcgcagttttttaaccttg

SEQ ID NO: 647521 - DNA, 33 bp, Homo sapien
aaactgacttcaaaaccgataacttactgtatc

SEQ ID NO: 647522 - DNA, 33 bp, Homo sapien
aaactgacttcaaaactgataacttactgtatc

SEQ ID NO: 647523 - DNA, 33 bp, Homo sapien
ttgtatccagaaaaaaatatcacggaaggacag

SEQ ID NO: 647524 - DNA, 33 bp, Homo sapien
ttgtatccagaaaaaagtatcacggaaggacag

SEQ ID NO: 647525 - DNA, 33 bp, Homo sapien
gctaagttgaacctgtcaaattgagttctcctc

SEQ ID NO: 647526 - DNA, 33 bp, Homo sapien
gctaagttgaacctgttaaattgagttctcctc

SEQ ID NO: 647527 - DNA, 33 bp, Homo sapien
ttccctaaacagcatcccttgccatcaggaagc

SEQ ID NO: 647528 - DNA, 33 bp, Homo sapien
ttccctaaacagcatcgcttgccatcaggaagc

SEQ ID NO: 647529 - DNA, 33 bp, Homo sapien
atagcaggccactatacgcccatttcacttgct

SEQ ID NO: 647530 - DNA, 33 bp, Homo sapien
atagcaggccactatatgcccatttcacttgct

SEQ ID NO: 647531 - DNA, 33 bp, Homo sapien
agtaccaaaggatacaaggaaaatactcagcat

SEQ ID NO: 647532 - DNA, 33 bp, Homo sapien
agtaccaaaggatacatggaaaatactcagcat

SEQ ID NO: 647533 - DNA, 33 bp, Homo sapien
accataaataacacagaatttattgcacagaac

SEQ ID NO: 647534 - DNA, 33 bp, Homo sapien
accataaataacacaggatttattgcacagaac

SEQ ID NO: 647535 - DNA, 33 bp, Homo sapien
ctcactgtataaaagcaatattttctagcagta

SEQ ID NO: 647536 - DNA, 33 bp, Homo sapien
ctcactgtataaaagccatattttctagcagta

SEQ ID NO: 647537 - DNA, 33 bp, Homo sapien
gttacatttcctttgaccataagattttacaag

SEQ ID NO: 647538 - DNA, 33 bp, Homo sapien
gttacatttcctttgagcataagattttacaag

SEQ ID NO: 647539 - DNA, 33 bp, Homo sapien
agataatattctccaagaccatgtcctctaaaa

SEQ ID NO: 647540 - DNA, 33 bp, Homo sapien
agataatattctccaataccatgtcctctaaaa

SEQ ID NO: 647541 - DNA, 33 bp, Homo sapien
tagtaggcattaccaacgtgtaatctcttataa

SEQ ID NO: 647542 - DNA, 33 bp, Homo sapien
tagtaggcattaccaatgtgtaatctcttataa

SEQ ID NO: 647543 - DNA, 33 bp, Homo sapien
acatatcactacgataccttttctaaagtattt

SEQ ID NO: 647544 - DNA, 33 bp, Homo sapien
acatatcactacgatagcttttctaaagtattt

SEQ ID NO: 647545 - DNA, 33 bp, Homo sapien
aattactagacctgaaaattttacaatacacct

SEQ ID NO: 647546 - DNA, 33 bp, Homo sapien
aattactagacctgaacattttacaatacacct

SEQ ID NO: 647547 - DNA, 33 bp, Homo sapien
gtcatatcaatgggcacataaaaacttttcttt

SEQ ID NO: 647548 - DNA, 33 bp, Homo sapien
gtcatatcaatgggcatataaaaacttttcttt

SEQ ID NO: 647549 - DNA, 33 bp, Homo sapien
agaatcccactgcttcaccaatcactcaagtaa

SEQ ID NO: 647550 - DNA, 33 bp, Homo sapien
agaatcccactgcttcgccaatcactcaagtaa

SEQ ID NO: 647551 - DNA, 33 bp, Homo sapien
gaagcagaaccatactaaacctgttgacacttt

SEQ ID NO: 647552 - DNA, 33 bp, Homo sapien
gaagcagaaccatactgaacctgttgacacttt

SEQ ID NO: 647553 - DNA, 33 bp, Homo sapien
ctgaagataaatatgcaagaacgtatttttctt

SEQ ID NO: 647554 - DNA, 33 bp, Homo sapien
ctgaagataaatatgcgagaacgtatttttctt

SEQ ID NO: 647555 - DNA, 33 bp, Homo sapien
tgagggtatggtgtggccattggattttcagtt

SEQ ID NO: 647556 - DNA, 33 bp, Homo sapien
tgagggtatggtgtggtcattggattttcagtt

SEQ ID NO: 647557 - DNA, 33 bp, Homo sapien
aggtcttgcattgaaacgttttatccatcttgg

SEQ ID NO: 647558 - DNA, 33 bp, Homo sapien
aggtcttgcattgaaatgttttatccatcttgg

SEQ ID NO: 647559 - DNA, 33 bp, Homo sapien
aataggaagagaaggagtcaacctacctctctt

SEQ ID NO: 647560 - DNA, 33 bp, Homo sapien
aataggaagagaaggattcaacctacctctctt

SEQ ID NO: 647561 - DNA, 33 bp, Homo sapien
cttaagcagtccatcaaacattgtgttcttgtc

SEQ ID NO: 647562 - DNA, 33 bp, Homo sapien
cttaagcagtccatcagacattgtgttcttgtc

SEQ ID NO: 647563 - DNA, 33 bp, Homo sapien
ggtaattaggaaatcaaaaccttgaggaattat

SEQ ID NO: 647564 - DNA, 33 bp, Homo sapien
ggtaattaggaaatcagaaccttgaggaattat

SEQ ID NO: 647565 - DNA, 33 bp, Homo sapien
gtggattggtaattaaagccactgtagggtaat

SEQ ID NO: 647566 - DNA, 33 bp, Homo sapien
gtggattggtaattaaggccactgtagggtaat

SEQ ID NO: 647567 - DNA, 33 bp, Homo sapien
ccctggtttctgagtcaccacaatggcaatcat

SEQ ID NO: 647568 - DNA, 33 bp, Homo sapien
ccctggtttctgagtcgccacaatggcaatcat

SEQ ID NO: 647569 - DNA, 33 bp, Homo sapien
aatatttgtttatgacagagcaagtggtcttct

SEQ ID NO: 647570 - DNA, 33 bp, Homo sapien
aatatttgtttatgacggagcaagtggtcttct

SEQ ID NO: 647571 - DNA, 33 bp, Homo sapien
tacatgatttttatccgattactcatcttgtga

SEQ ID NO: 647572 - DNA, 33 bp, Homo sapien
tacatgatttttatcctattactcatcttgtga

SEQ ID NO: 647573 - DNA, 33 bp, Homo sapien
ttttctaactatttgaagtttggtaatttaaca

SEQ ID NO: 647574 - DNA, 33 bp, Homo sapien
ttttctaactatttgaggtttggtaatttaaca

SEQ ID NO: 647575 - DNA, 33 bp, Homo sapien
aactttgaagcattcccaagaagggcatatatt

SEQ ID NO: 647576 - DNA, 33 bp, Homo sapien
aactttgaagcattcctaagaagggcatatatt

SEQ ID NO: 647577 - DNA, 33 bp, Homo sapien
catcaccctatgaagcagcaaacagatcttcac

SEQ ID NO: 647578 - DNA, 33 bp, Homo sapien
catcaccctatgaagcggcaaacagatcttcac

SEQ ID NO: 647579 - DNA, 33 bp, Homo sapien
gtaagcctaaaactgccgaaacaattaaataag

SEQ ID NO: 647580 - DNA, 33 bp, Homo sapien
gtaagcctaaaactgctgaaacaattaaataag

SEQ ID NO: 647581 - DNA, 33 bp, Homo sapien
ctttaacaaattaacagtcacgtttatccaaaa

SEQ ID NO: 647582 - DNA, 33 bp, Homo sapien
ctttaacaaattaacattcacgtttatccaaaa

SEQ ID NO: 647583 - DNA, 33 bp, Homo sapien
ttggcctagactagaccctcgatatttcattga

SEQ ID NO: 647584 - DNA, 33 bp, Homo sapien
ttggcctagactagactctcgatatttcattga

SEQ ID NO: 647585 - DNA, 33 bp, Homo sapien
gctgtgctaatttcaactccattcattctgcca

SEQ ID NO: 647586 - DNA, 33 bp, Homo sapien
gctgtgctaatttcaagtccattcattctgcca

SEQ ID NO: 647587 - DNA, 33 bp, Homo sapien
tgagcttaaacatttacgggagattatgaacct

SEQ ID NO: 647588 - DNA, 33 bp, Homo sapien
tgagcttaaacatttaggggagattatgaacct

SEQ ID NO: 647589 - DNA, 33 bp, Homo sapien
ccatctgcaaactacaatcagattagttttcat

SEQ ID NO: 647590 - DNA, 33 bp, Homo sapien
ccatctgcaaactacagtcagattagttttcat

SEQ ID NO: 647591 - DNA, 33 bp, Homo sapien
tacacagtgtaagtgacataaaaacagaaacac

SEQ ID NO: 647592 - DNA, 33 bp, Homo sapien
tacacagtgtaagtgagataaaaacagaaacac

SEQ ID NO: 647593 - DNA, 33 bp, Homo sapien
ttataggttgttgatcaaaaaggacaacggagg

SEQ ID NO: 647594 - DNA, 33 bp, Homo sapien
ttataggttgttgatctaaaaggacaacggagg

SEQ ID NO: 647595 - DNA, 33 bp, Homo sapien
gaggctagaggttcaaaatcgaggtgtcagtat

SEQ ID NO: 647596 - DNA, 33 bp, Homo sapien
gaggctagaggttcaagatcgaggtgtcagtat

SEQ ID NO: 647597 - DNA, 33 bp, Homo sapien
atagtgcatttgttgaaaacattaaatgatggt

SEQ ID NO: 647598 - DNA, 33 bp, Homo sapien
atagtgcatttgttgacaacattaaatgatggt

SEQ ID NO: 647599 - DNA, 33 bp, Homo sapien
ctgtgcttttagccaccgactgaggcacagctt

SEQ ID NO: 647600 - DNA, 33 bp, Homo sapien
ctgtgcttttagccactgactgaggcacagctt

SEQ ID NO: 647601 - DNA, 33 bp, Homo sapien
tacacctaatatcagaccacccagtttcataaa

SEQ ID NO: 647602 - DNA, 33 bp, Homo sapien
tacacctaatatcagatcacccagtttcataaa

SEQ ID NO: 647603 - DNA, 33 bp, Homo sapien
catgtctaaccgtgataagttaaaatagaacta

SEQ ID NO: 647604 - DNA, 33 bp, Homo sapien
catgtctaaccgtgatgagttaaaatagaacta

SEQ ID NO: 647605 - DNA, 33 bp, Homo sapien
gagtacaaaaactgaaaagtcagtggagactag

SEQ ID NO: 647606 - DNA, 33 bp, Homo sapien
gagtacaaaaactgaacagtcagtggagactag

SEQ ID NO: 647607 - DNA, 33 bp, Homo sapien
taaacatttaccattagatgacttatccaggag

SEQ ID NO: 647608 - DNA, 33 bp, Homo sapien
taaacatttaccattatatgacttatccaggag

SEQ ID NO: 647609 - DNA, 33 bp, Homo sapien
atagtgaatatcattacgctccacctagatttc

SEQ ID NO: 647610 - DNA, 33 bp, Homo sapien
atagtgaatatcattatgctccacctagatttc

SEQ ID NO: 647611 - DNA, 33 bp, Homo sapien
tcacttctcaaaaacaaacattcacatggccaa

SEQ ID NO: 647612 - DNA, 33 bp, Homo sapien
tcacttctcaaaaacagacattcacatggccaa

SEQ ID NO: 647613 - DNA, 33 bp, Homo sapien
aaaacaaaaggtctcaaaaagctatcaaacaat

SEQ ID NO: 647614 - DNA, 33 bp, Homo sapien
aaaacaaaaggtctcataaagctatcaaacaat

SEQ ID NO: 647615 - DNA, 33 bp, Homo sapien
tgccaacataacaccacgagtggaaaattccac

SEQ ID NO: 647616 - DNA, 33 bp, Homo sapien
tgccaacataacaccatgagtggaaaattccac

SEQ ID NO: 647617 - DNA, 33 bp, Homo sapien
acagtaattcaacataccagaacaatttgtgtt

SEQ ID NO: 647618 - DNA, 33 bp, Homo sapien
acagtaattcaacatagcagaacaatttgtgtt

SEQ ID NO: 647619 - DNA, 33 bp, Homo sapien
gtctagcattccattaaatttgtacgtgtattt

SEQ ID NO: 647620 - DNA, 33 bp, Homo sapien
gtctagcattccattagatttgtacgtgtattt

SEQ ID NO: 647621 - DNA, 33 bp, Homo sapien
ctgctttttttcgacaactaaatagtactccat

SEQ ID NO: 647622 - DNA, 33 bp, Homo sapien
ctgctttttttcgacagctaaatagtactccat

SEQ ID NO: 647623 - DNA, 33 bp, Homo sapien
tttccccagaacggtcaagattcactgacagag

SEQ ID NO: 647624 - DNA, 33 bp, Homo sapien
tttccccagaacggtccagattcactgacagag

SEQ ID NO: 647625 - DNA, 33 bp, Homo sapien
aagcagcccatctaaacgcaatcaacagtattt

SEQ ID NO: 647626 - DNA, 33 bp, Homo sapien
aagcagcccatctaaaggcaatcaacagtattt

SEQ ID NO: 647627 - DNA, 33 bp, Homo sapien
ccagtcacagccttacaattttatcatggaggc

SEQ ID NO: 647628 - DNA, 33 bp, Homo sapien
ccagtcacagccttaccattttatcatggaggc

SEQ ID NO: 647629 - DNA, 33 bp, Homo sapien
acctgcttaactaaaaatctattgcttaactaa

SEQ ID NO: 647630 - DNA, 33 bp, Homo sapien
acctgcttaactaaaagtctattgcttaactaa

SEQ ID NO: 647631 - DNA, 33 bp, Homo sapien
attctgtttatatgtcaagccacatttattgat

SEQ ID NO: 647632 - DNA, 33 bp, Homo sapien
attctgtttatatgtcgagccacatttattgat

SEQ ID NO: 647633 - DNA, 33 bp, Homo sapien
gggagtagatacggcactattctgttgagaaat

SEQ ID NO: 647634 - DNA, 33 bp, Homo sapien
gggagtagatacggcattattctgttgagaaat

SEQ ID NO: 647635 - DNA, 33 bp, Homo sapien
acttcttggactatggaatcattagaagcccaa

SEQ ID NO: 647636 - DNA, 33 bp, Homo sapien
acttcttggactatgggatcattagaagcccaa

SEQ ID NO: 647637 - DNA, 33 bp, Homo sapien
ctagcagaaatgccaaatctttgggtcagagtt

SEQ ID NO: 647638 - DNA, 33 bp, Homo sapien
ctagcagaaatgccaagtctttgggtcagagtt

SEQ ID NO: 647639 - DNA, 33 bp, Homo sapien
ctgtgatggtacctgaccacttcccacagggcc

SEQ ID NO: 647640 - DNA, 33 bp, Homo sapien
ctgtgatggtacctgatcacttcccacagggcc

SEQ ID NO: 647641 - DNA, 33 bp, Homo sapien
gtatcaggcagagtgacgtaagttctgctccca

SEQ ID NO: 647642 - DNA, 33 bp, Homo sapien
gtatcaggcagagtgatgtaagttctgctccca

SEQ ID NO: 647643 - DNA, 33 bp, Homo sapien
attagcctgagattaaactcttggaagcagtgg

SEQ ID NO: 647644 - DNA, 33 bp, Homo sapien
attagcctgagattaagctcttggaagcagtgg

SEQ ID NO: 647645 - DNA, 33 bp, Homo sapien
caacgaatcacatccaataaagaggttgtttat

SEQ ID NO: 647646 - DNA, 33 bp, Homo sapien
caacgaatcacatccattaaagaggttgtttat

SEQ ID NO: 647647 - DNA, 33 bp, Homo sapien
taatgtgtcaaatagtcaaatctaacaaataga

SEQ ID NO: 647648 - DNA, 33 bp, Homo sapien
taatgtgtcaaatagtgaaatctaacaaataga

SEQ ID NO: 647649 - DNA, 33 bp, Homo sapien
ccttgggtagatacaaggtagcatggtagataa

SEQ ID NO: 647650 - DNA, 33 bp, Homo sapien
ccttgggtagatacaatgtagcatggtagataa

SEQ ID NO: 647651 - DNA, 33 bp, Homo sapien
cttttcctgttagagcaaacatacccatagcct

SEQ ID NO: 647652 - DNA, 33 bp, Homo sapien
cttttcctgttagagcgaacatacccatagcct

SEQ ID NO: 647653 - DNA, 33 bp, Homo sapien
aatttgttggatgcctaagaacaattttatctg

SEQ ID NO: 647654 - DNA, 33 bp, Homo sapien
aatttgttggatgcctgagaacaattttatctg

SEQ ID NO: 647655 - DNA, 33 bp, Homo sapien
agaactaggatgctaccaggttaaagtcccttc

SEQ ID NO: 647656 - DNA, 33 bp, Homo sapien
agaactaggatgctacgaggttaaagtcccttc

SEQ ID NO: 647657 - DNA, 33 bp, Homo sapien
aacaggcagcaccaaacttatattctaacagtt

SEQ ID NO: 647658 - DNA, 33 bp, Homo sapien
aacaggcagcaccaaatttatattctaacagtt

SEQ ID NO: 647659 - DNA, 33 bp, Homo sapien
tcctgtcagccaagggcattttcattaatttga

SEQ ID NO: 647660 - DNA, 33 bp, Homo sapien
tcctgtcagccaagggtattttcattaatttga

SEQ ID NO: 647661 - DNA, 33 bp, Homo sapien
gactgaggggtagagaagtgagttgttagcttt

SEQ ID NO: 647662 - DNA, 33 bp, Homo sapien
gactgaggggtagagaggtgagttgttagcttt

SEQ ID NO: 647663 - DNA, 33 bp, Homo sapien
tcacaatagacactatcactcaaaaggaggaag

SEQ ID NO: 647664 - DNA, 33 bp, Homo sapien
tcacaatagacactatgactcaaaaggaggaag

SEQ ID NO: 647665 - DNA, 33 bp, Homo sapien
atcaatgaaactgaaactgcttgtttggaaaga

SEQ ID NO: 647666 - DNA, 33 bp, Homo sapien
atcaatgaaactgaaattgcttgtttggaaaga

SEQ ID NO: 647667 - DNA, 33 bp, Homo sapien
atgatgtaggcacttacaaataaacttttgtct

SEQ ID NO: 647668 - DNA, 33 bp, Homo sapien
atgatgtaggcacttataaataaacttttgtct

SEQ ID NO: 647669 - DNA, 33 bp, Homo sapien
tcacagctacatttgaggcattgctacctttct

SEQ ID NO: 647670 - DNA, 33 bp, Homo sapien
tcacagctacatttgatgcattgctacctttct

SEQ ID NO: 647671 - DNA, 33 bp, Homo sapien
aagtggccttgatcaacacaactcctagctggc

SEQ ID NO: 647672 - DNA, 33 bp, Homo sapien
aagtggccttgatcaatacaactcctagctggc

SEQ ID NO: 647673 - DNA, 33 bp, Homo sapien
tcttatggcacttgtgcaggggccagctaggag

SEQ ID NO: 647674 - DNA, 33 bp, Homo sapien
tcttatggcacttgtgtaggggccagctaggag

SEQ ID NO: 647675 - DNA, 33 bp, Homo sapien
aatttgaaataggtaacagaggcagaagatgat

SEQ ID NO: 647676 - DNA, 33 bp, Homo sapien
aatttgaaataggtaatagaggcagaagatgat

SEQ ID NO: 647677 - DNA, 33 bp, Homo sapien
attatgtattctcaacaaacttctagataatgc

SEQ ID NO: 647678 - DNA, 33 bp, Homo sapien
attatgtattctcaacgaacttctagataatgc

SEQ ID NO: 647679 - DNA, 33 bp, Homo sapien
ataatgtaaggctccacattaaaaattttcatc

SEQ ID NO: 647680 - DNA, 33 bp, Homo sapien
ataatgtaaggctccatattaaaaattttcatc

SEQ ID NO: 647681 - DNA, 33 bp, Homo sapien
atgcaatagaagatggaaaatcaaaatattaca

SEQ ID NO: 647682 - DNA, 33 bp, Homo sapien
atgcaatagaagatgggaaatcaaaatattaca

SEQ ID NO: 647683 - DNA, 33 bp, Homo sapien
tcaggttgcagtggcacatttcacaaagacttg

SEQ ID NO: 647684 - DNA, 33 bp, Homo sapien
tcaggttgcagtggcatatttcacaaagacttg

SEQ ID NO: 647685 - DNA, 33 bp, Homo sapien
tttcattgaaagaagcccagcagaattggaagt

SEQ ID NO: 647686 - DNA, 33 bp, Homo sapien
tttcattgaaagaagcgcagcagaattggaagt

SEQ ID NO: 647687 - DNA, 33 bp, Homo sapien
aaaaagagaagctgcactcccaatagcaatcac

SEQ ID NO: 647688 - DNA, 33 bp, Homo sapien
aaaaagagaagctgcattcccaatagcaatcac

SEQ ID NO: 647689 - DNA, 33 bp, Homo sapien
tatcaaagtgctcaaaatccgtatgtttttgat

SEQ ID NO: 647690 - DNA, 33 bp, Homo sapien
tatcaaagtgctcaaactccgtatgtttttgat

SEQ ID NO: 647691 - DNA, 33 bp, Homo sapien
aagcatacatgagtatcaatagccaaatcgatc

SEQ ID NO: 647692 - DNA, 33 bp, Homo sapien
aagcatacatgagtatgaatagccaaatcgatc

SEQ ID NO: 647693 - DNA, 33 bp, Homo sapien
caaatacactataggaaatttaagatagcacac

SEQ ID NO: 647694 - DNA, 33 bp, Homo sapien
caaatacactataggagatttaagatagcacac

SEQ ID NO: 647695 - DNA, 33 bp, Homo sapien
gtgcccaacaggtggaagaaaaattactcaaca

SEQ ID NO: 647696 - DNA, 33 bp, Homo sapien
gtgcccaacaggtggacgaaaaattactcaaca

SEQ ID NO: 647697 - DNA, 33 bp, Homo sapien
ctttcatgcaattttccatgataccttctcagt

SEQ ID NO: 647698 - DNA, 33 bp, Homo sapien
ctttcatgcaattttctatgataccttctcagt

SEQ ID NO: 647699 - DNA, 33 bp, Homo sapien
ctactcattaaaagacaattttctcaattattt

SEQ ID NO: 647700 - DNA, 33 bp, Homo sapien
ctactcattaaaagaccattttctcaattattt

SEQ ID NO: 647701 - DNA, 33 bp, Homo sapien
aaaattgccttttctacgtttgaattctcaggt

SEQ ID NO: 647702 - DNA, 33 bp, Homo sapien
aaaattgccttttctatgtttgaattctcaggt

SEQ ID NO: 647703 - DNA, 33 bp, Homo sapien
aaatatgtaacattggacagcaatcacacaact

SEQ ID NO: 647704 - DNA, 33 bp, Homo sapien
aaatatgtaacattgggcagcaatcacacaact

SEQ ID NO: 647705 - DNA, 33 bp, Homo sapien
aactcagaacatactgccaaaaaaagaacaaga

SEQ ID NO: 647706 - DNA, 33 bp, Homo sapien
aactcagaacatactgtcaaaaaaagaacaaga

SEQ ID NO: 647707 - DNA, 33 bp, Homo sapien
gagaacacagtgtctacccaattgttgagtttc

SEQ ID NO: 647708 - DNA, 33 bp, Homo sapien
gagaacacagtgtctatccaattgttgagtttc

SEQ ID NO: 647709 - DNA, 33 bp, Homo sapien
cactttgggactactcgcctttgcgtaagggct

SEQ ID NO: 647710 - DNA, 33 bp, Homo sapien
cactttgggactactctcctttgcgtaagggct

SEQ ID NO: 647711 - DNA, 33 bp, Homo sapien
atgcacatatgagaaagtaggcttctgagatct

SEQ ID NO: 647712 - DNA, 33 bp, Homo sapien
atgcacatatgagaaattaggcttctgagatct

SEQ ID NO: 647713 - DNA, 33 bp, Homo sapien
caacttagatgcccatcaacagagaactgtaaa

SEQ ID NO: 647714 - DNA, 33 bp, Homo sapien
caacttagatgcccatgaacagagaactgtaaa

SEQ ID NO: 647715 - DNA, 33 bp, Homo sapien
ctccagtgctaggaagaacctattcccataaaa

SEQ ID NO: 647716 - DNA, 33 bp, Homo sapien
ctccagtgctaggaaggacctattcccataaaa

SEQ ID NO: 647717 - DNA, 33 bp, Homo sapien
acttttattctcggggacagctgatggaatgag

SEQ ID NO: 647718 - DNA, 33 bp, Homo sapien
acttttattctcggggtcagctgatggaatgag

SEQ ID NO: 647719 - DNA, 33 bp, Homo sapien
cagggcccagaccccaactatatctggtcgact

SEQ ID NO: 647720 - DNA, 33 bp, Homo sapien
cagggcccagaccccagctatatctggtcgact

SEQ ID NO: 647721 - DNA, 33 bp, Homo sapien
atgtaattctcaataacagactaacgttgggtt

SEQ ID NO: 647722 - DNA, 33 bp, Homo sapien
atgtaattctcaataatagactaacgttgggtt

SEQ ID NO: 647723 - DNA, 33 bp, Homo sapien
ttttactttcatggccacaaacaataatgagct

SEQ ID NO: 647724 - DNA, 33 bp, Homo sapien
ttttactttcatggccgcaaacaataatgagct

SEQ ID NO: 647725 - DNA, 33 bp, Homo sapien
ggcccatattactgcaccatagaaagttttata

SEQ ID NO: 647726 - DNA, 33 bp, Homo sapien
ggcccatattactgcatcatagaaagttttata

SEQ ID NO: 647727 - DNA, 33 bp, Homo sapien
gttaaaaatttgcagacgaataaagttattcca

SEQ ID NO: 647728 - DNA, 33 bp, Homo sapien
gttaaaaatttgcagatgaataaagttattcca

SEQ ID NO: 647729 - DNA, 33 bp, Homo sapien
agctttagaacaacccccatactgttttccatt

SEQ ID NO: 647730 - DNA, 33 bp, Homo sapien
agctttagaacaaccctcatactgttttccatt

SEQ ID NO: 647731 - DNA, 33 bp, Homo sapien
actgagttagatgataaggaggctcgttctata

SEQ ID NO: 647732 - DNA, 33 bp, Homo sapien
actgagttagatgatagggaggctcgttctata

SEQ ID NO: 647733 - DNA, 33 bp, Homo sapien
taatgcacaccaacacagtcaagaaaaatgaag

SEQ ID NO: 647734 - DNA, 33 bp, Homo sapien
taatgcacaccaacacggtcaagaaaaatgaag

SEQ ID NO: 647735 - DNA, 33 bp, Homo sapien
ggaacacaatgaaaggaaatacaaacattaaga

SEQ ID NO: 647736 - DNA, 33 bp, Homo sapien
ggaacacaatgaaaggtaatacaaacattaaga

SEQ ID NO: 647737 - DNA, 33 bp, Homo sapien
tagtgtaatgttctccaattctatgttatcaca

SEQ ID NO: 647738 - DNA, 33 bp, Homo sapien
tagtgtaatgttctcccattctatgttatcaca

SEQ ID NO: 647739 - DNA, 33 bp, Homo sapien
gtaataagccatgaaacgccgtcttggagctat

SEQ ID NO: 647740 - DNA, 33 bp, Homo sapien
gtaataagccatgaaatgccgtcttggagctat

SEQ ID NO: 647741 - DNA, 33 bp, Homo sapien
gctagctgtgagaagaaccctttgaaaaatcca

SEQ ID NO: 647742 - DNA, 33 bp, Homo sapien
gctagctgtgagaagacccctttgaaaaatcca

SEQ ID NO: 647743 - DNA, 33 bp, Homo sapien
acaaaaagcacccttgaaatgattagctctgaa

SEQ ID NO: 647744 - DNA, 33 bp, Homo sapien
acaaaaagcacccttggaatgattagctctgaa

SEQ ID NO: 647745 - DNA, 33 bp, Homo sapien
gaaaatcagagcaataataaatgaagggatgga

SEQ ID NO: 647746 - DNA, 33 bp, Homo sapien
gaaaatcagagcaatagtaaatgaagggatgga

SEQ ID NO: 647747 - DNA, 33 bp, Homo sapien
cttttgatgggaagccaacttttgatttgtcag

SEQ ID NO: 647748 - DNA, 33 bp, Homo sapien
cttttgatgggaagcctacttttgatttgtcag

SEQ ID NO: 647749 - DNA, 33 bp, Homo sapien
tttcaggttttattgaacattccatcaattgcc

SEQ ID NO: 647750 - DNA, 33 bp, Homo sapien
tttcaggttttattgaccattccatcaattgcc

SEQ ID NO: 647751 - DNA, 33 bp, Homo sapien
caaaatattaaccaccgagcaattaaccaggaa

SEQ ID NO: 647752 - DNA, 33 bp, Homo sapien
caaaatattaaccacctagcaattaaccaggaa

SEQ ID NO: 647753 - DNA, 33 bp, Homo sapien
acatttattacactcaaggagaaaatgaaacac

SEQ ID NO: 647754 - DNA, 33 bp, Homo sapien
acatttattacactcagggagaaaatgaaacac

SEQ ID NO: 647755 - DNA, 33 bp, Homo sapien
ttctgtatgtaaacaaatatggtttccttatca

SEQ ID NO: 647756 - DNA, 33 bp, Homo sapien
ttctgtatgtaaacaagtatggtttccttatca

SEQ ID NO: 647757 - DNA, 33 bp, Homo sapien
tgatggagacctaatgcaatcagaatttctaat

SEQ ID NO: 647758 - DNA, 33 bp, Homo sapien
tgatggagacctaatggaatcagaatttctaat

SEQ ID NO: 647759 - DNA, 33 bp, Homo sapien
taatccttaaagcatcccaagaatatcaggact

SEQ ID NO: 647760 - DNA, 33 bp, Homo sapien
taatccttaaagcatctcaagaatatcaggact

SEQ ID NO: 647761 - DNA, 33 bp, Homo sapien
acatactcatttggacgacagaggtgaattaat

SEQ ID NO: 647762 - DNA, 33 bp, Homo sapien
acatactcatttggactacagaggtgaattaat

SEQ ID NO: 647763 - DNA, 33 bp, Homo sapien
agtattcgctaattcaaggctcgtggtgacttt

SEQ ID NO: 647764 - DNA, 33 bp, Homo sapien
agtattcgctaattcagggctcgtggtgacttt

SEQ ID NO: 647765 - DNA, 33 bp, Homo sapien
tgaagtcatatgaaacaaaagagcaatggattt

SEQ ID NO: 647766 - DNA, 33 bp, Homo sapien
tgaagtcatatgaaacgaaagagcaatggattt

SEQ ID NO: 647767 - DNA, 33 bp, Homo sapien
ttatgaccttaaagcaccttgtgaacgaagttt

SEQ ID NO: 647768 - DNA, 33 bp, Homo sapien
ttatgaccttaaagcatcttgtgaacgaagttt

SEQ ID NO: 647769 - DNA, 33 bp, Homo sapien
tgactttcttgttggccgatacgtactatcaag

SEQ ID NO: 647770 - DNA, 33 bp, Homo sapien
tgactttcttgttggctgatacgtactatcaag

SEQ ID NO: 647771 - DNA, 33 bp, Homo sapien
aaaaacagtatttcgaacaattaatgctgtagt

SEQ ID NO: 647772 - DNA, 33 bp, Homo sapien
aaaaacagtatttcgagcaattaatgctgtagt

SEQ ID NO: 647773 - DNA, 33 bp, Homo sapien
tgtgaaaaggataatacgatacattgtaaccaa

SEQ ID NO: 647774 - DNA, 33 bp, Homo sapien
tgtgaaaaggataatatgatacattgtaaccaa

SEQ ID NO: 647775 - DNA, 33 bp, Homo sapien
ttccttagttttgacaaatgtaccatagtaaaa

SEQ ID NO: 647776 - DNA, 33 bp, Homo sapien
ttccttagttttgacagatgtaccatagtaaaa

SEQ ID NO: 647777 - DNA, 33 bp, Homo sapien
atgcctacattagaaaaccataaagatctcaaa

SEQ ID NO: 647778 - DNA, 33 bp, Homo sapien
atgcctacattagaaagccataaagatctcaaa

SEQ ID NO: 647779 - DNA, 33 bp, Homo sapien
cttggaattatttgaagtattgccagcatagta

SEQ ID NO: 647780 - DNA, 33 bp, Homo sapien
cttggaattatttgaattattgccagcatagta

SEQ ID NO: 647781 - DNA, 33 bp, Homo sapien
ctacaagtgcacactaacaaacccagccaattt

SEQ ID NO: 647782 - DNA, 33 bp, Homo sapien
ctacaagtgcacactaccaaacccagccaattt

SEQ ID NO: 647783 - DNA, 33 bp, Homo sapien
atcctaagtgtttctaccacaaattaatggcat

SEQ ID NO: 647784 - DNA, 33 bp, Homo sapien
atcctaagtgtttctatcacaaattaatggcat

SEQ ID NO: 647785 - DNA, 33 bp, Homo sapien
tcatatagaagatttacgtttgcattgaaattc

SEQ ID NO: 647786 - DNA, 33 bp, Homo sapien
tcatatagaagatttatgtttgcattgaaattc

SEQ ID NO: 647787 - DNA, 33 bp, Homo sapien
atctcaaaggaaaggcagatgaactctacacca

SEQ ID NO: 647788 - DNA, 33 bp, Homo sapien
atctcaaaggaaaggcggatgaactctacacca

SEQ ID NO: 647789 - DNA, 33 bp, Homo sapien
tttgaatgcacaccccgcacttctgctctttcc

SEQ ID NO: 647790 - DNA, 33 bp, Homo sapien
tttgaatgcacacccctcacttctgctctttcc

SEQ ID NO: 647791 - DNA, 33 bp, Homo sapien
gatctttataagaaagccaggagagtcagagtc

SEQ ID NO: 647792 - DNA, 33 bp, Homo sapien
gatctttataagaaagtcaggagagtcagagtc

SEQ ID NO: 647793 - DNA, 33 bp, Homo sapien
gctgggcctgtggggacgacgggaagcaagaac

SEQ ID NO: 647794 - DNA, 33 bp, Homo sapien
gctgggcctgtggggatgacgggaagcaagaac

SEQ ID NO: 647795 - DNA, 33 bp, Homo sapien
accttttgaccttggacgattcatgccttcaaa

SEQ ID NO: 647796 - DNA, 33 bp, Homo sapien
accttttgaccttggatgattcatgccttcaaa

SEQ ID NO: 647797 - DNA, 33 bp, Homo sapien
atataaggtaagcgagcaagaattcatttatat

SEQ ID NO: 647798 - DNA, 33 bp, Homo sapien
atataaggtaagcgaggaagaattcatttatat

SEQ ID NO: 647799 - DNA, 33 bp, Homo sapien
tctctttgattttgaaggactatcttgcttcgg

SEQ ID NO: 647800 - DNA, 33 bp, Homo sapien
tctctttgattttgaatgactatcttgcttcgg

SEQ ID NO: 647801 - DNA, 33 bp, Homo sapien
gattctagatgtatccacagtaactattcctaa

SEQ ID NO: 647802 - DNA, 33 bp, Homo sapien
gattctagatgtatccgcagtaactattcctaa

SEQ ID NO: 647803 - DNA, 33 bp, Homo sapien
agatatagacggtaggcagagataaggcaaaga

SEQ ID NO: 647804 - DNA, 33 bp, Homo sapien
agatatagacggtaggtagagataaggcaaaga

SEQ ID NO: 647805 - DNA, 33 bp, Homo sapien
gaagcacgagcttataagtggacaaaagtaaga

SEQ ID NO: 647806 - DNA, 33 bp, Homo sapien
gaagcacgagcttataggtggacaaaagtaaga

SEQ ID NO: 647807 - DNA, 33 bp, Homo sapien
gtcagagatgtaaccacgtaacagaaaatttac

SEQ ID NO: 647808 - DNA, 33 bp, Homo sapien
gtcagagatgtaaccatgtaacagaaaatttac

SEQ ID NO: 647809 - DNA, 33 bp, Homo sapien
agtaagatttttaacacagaacactgaacccac

SEQ ID NO: 647810 - DNA, 33 bp, Homo sapien
agtaagatttttaacatagaacactgaacccac

SEQ ID NO: 647811 - DNA, 33 bp, Homo sapien
tacccacatgagaagacgccctcaactactagg

SEQ ID NO: 647812 - DNA, 33 bp, Homo sapien
tacccacatgagaagatgccctcaactactagg

SEQ ID NO: 647813 - DNA, 33 bp, Homo sapien
gacactgggtaatggaccataataatttattta

SEQ ID NO: 647814 - DNA, 33 bp, Homo sapien
gacactgggtaatggatcataataatttattta

SEQ ID NO: 647815 - DNA, 33 bp, Homo sapien
caccttttcattgagaacgagctcatagttcta

SEQ ID NO: 647816 - DNA, 33 bp, Homo sapien
caccttttcattgagaccgagctcatagttcta

SEQ ID NO: 647817 - DNA, 33 bp, Homo sapien
aaataaattcaatttgaagaagaaaggcagtaa

SEQ ID NO: 647818 - DNA, 33 bp, Homo sapien
aaataaattcaatttggagaagaaaggcagtaa

SEQ ID NO: 647819 - DNA, 33 bp, Homo sapien
ttggcatagatattacaaatgatatatatgcca

SEQ ID NO: 647820 - DNA, 33 bp, Homo sapien
ttggcatagatattacgaatgatatatatgcca

SEQ ID NO: 647821 - DNA, 33 bp, Homo sapien
cacttgctgaacaggaaagaagaagccactgag

SEQ ID NO: 647822 - DNA, 33 bp, Homo sapien
cacttgctgaacaggagagaagaagccactgag

SEQ ID NO: 647823 - DNA, 33 bp, Homo sapien
aggcaaggttttattcccgttgcctaagctgga

SEQ ID NO: 647824 - DNA, 33 bp, Homo sapien
aggcaaggttttattctcgttgcctaagctgga

SEQ ID NO: 647825 - DNA, 33 bp, Homo sapien
catttaggtatatccaactgtttttttcatacc

SEQ ID NO: 647826 - DNA, 33 bp, Homo sapien
catttaggtatatccagctgtttttttcatacc

SEQ ID NO: 647827 - DNA, 33 bp, Homo sapien
tacagttgagcattcacaataccaaccacgagt

SEQ ID NO: 647828 - DNA, 33 bp, Homo sapien
tacagttgagcattcagaataccaaccacgagt

SEQ ID NO: 647829 - DNA, 33 bp, Homo sapien
agtgagtagaacttaacagtgcagaagagcccc

SEQ ID NO: 647830 - DNA, 33 bp, Homo sapien
agtgagtagaacttaatagtgcagaagagcccc

SEQ ID NO: 647831 - DNA, 33 bp, Homo sapien
taaatgacctgaggaaactcttattatgcctct

SEQ ID NO: 647832 - DNA, 33 bp, Homo sapien
taaatgacctgaggaacctcttattatgcctct

SEQ ID NO: 647833 - DNA, 33 bp, Homo sapien
actccagggacttaagaacattgatgcttctat

SEQ ID NO: 647834 - DNA, 33 bp, Homo sapien
actccagggacttaagcacattgatgcttctat

SEQ ID NO: 647835 - DNA, 33 bp, Homo sapien
acattagaaagtcttacgtgtataatctactac

SEQ ID NO: 647836 - DNA, 33 bp, Homo sapien
acattagaaagtcttatgtgtataatctactac

SEQ ID NO: 647837 - DNA, 33 bp, Homo sapien
ccaagaaaataagttaccatagcaactctaaaa

SEQ ID NO: 647838 - DNA, 33 bp, Homo sapien
ccaagaaaataagttatcatagcaactctaaaa

SEQ ID NO: 647839 - DNA, 33 bp, Homo sapien
ggtgcaattatggaaactgattcgaaatcttga

SEQ ID NO: 647840 - DNA, 33 bp, Homo sapien
ggtgcaattatggaaattgattcgaaatcttga

SEQ ID NO: 647841 - DNA, 33 bp, Homo sapien
tcagagaaaaattcagacctgccaatggcactg

SEQ ID NO: 647842 - DNA, 33 bp, Homo sapien
tcagagaaaaattcagtcctgccaatggcactg

SEQ ID NO: 647843 - DNA, 33 bp, Homo sapien
agaaacaacggcagaaactgaacaccggagtgg

SEQ ID NO: 647844 - DNA, 33 bp, Homo sapien
agaaacaacggcagaagctgaacaccggagtgg

SEQ ID NO: 647845 - DNA, 33 bp, Homo sapien
atagaatatggggtgaataagactatcacagtg

SEQ ID NO: 647846 - DNA, 33 bp, Homo sapien
atagaatatggggtgagtaagactatcacagtg

SEQ ID NO: 647847 - DNA, 33 bp, Homo sapien
cattttatggggacacaaacatttcgaccatag

SEQ ID NO: 647848 - DNA, 33 bp, Homo sapien
cattttatggggacacgaacatttcgaccatag

SEQ ID NO: 647849 - DNA, 33 bp, Homo sapien
acatctgtgaaactacccttttcaagtaggcag

SEQ ID NO: 647850 - DNA, 33 bp, Homo sapien
acatctgtgaaactactcttttcaagtaggcag

SEQ ID NO: 647851 - DNA, 33 bp, Homo sapien
gggaccatagcaagcaaatacatcagggaggga

SEQ ID NO: 647852 - DNA, 33 bp, Homo sapien
gggaccatagcaagcatatacatcagggaggga

SEQ ID NO: 647853 - DNA, 33 bp, Homo sapien
cagttttattttatgcaacaaaacagtattatt

SEQ ID NO: 647854 - DNA, 33 bp, Homo sapien
cagttttattttatgcgacaaaacagtattatt

SEQ ID NO: 647855 - DNA, 33 bp, Homo sapien
attaaggagtgtaaaagctagggacgaagattg

SEQ ID NO: 647856 - DNA, 33 bp, Homo sapien
attaaggagtgtaaaatctagggacgaagattg

SEQ ID NO: 647857 - DNA, 33 bp, Homo sapien
gtgctgaaatgttgacgcaaatccaactaagac

SEQ ID NO: 647858 - DNA, 33 bp, Homo sapien
gtgctgaaatgttgactcaaatccaactaagac

SEQ ID NO: 647859 - DNA, 33 bp, Homo sapien
attaacatttgaattacgtctcaactatgtttt

SEQ ID NO: 647860 - DNA, 33 bp, Homo sapien
attaacatttgaattatgtctcaactatgtttt

SEQ ID NO: 647861 - DNA, 33 bp, Homo sapien
ttgaatgaaagctgaaataccttaatggctatg

SEQ ID NO: 647862 - DNA, 33 bp, Homo sapien
ttgaatgaaagctgaagtaccttaatggctatg

SEQ ID NO: 647863 - DNA, 33 bp, Homo sapien
tctcttgatgtagaaaaaagtgattgtgcacat

SEQ ID NO: 647864 - DNA, 33 bp, Homo sapien
tctcttgatgtagaaagaagtgattgtgcacat

SEQ ID NO: 647865 - DNA, 33 bp, Homo sapien
tcatggtcatattatcacaggttgaagatgaat

SEQ ID NO: 647866 - DNA, 33 bp, Homo sapien
tcatggtcatattatcgcaggttgaagatgaat

SEQ ID NO: 647867 - DNA, 33 bp, Homo sapien
tgagaacacagtgggacaatgatggggatataa

SEQ ID NO: 647868 - DNA, 33 bp, Homo sapien
tgagaacacagtgggataatgatggggatataa

SEQ ID NO: 647869 - DNA, 33 bp, Homo sapien
gtgtaagattctgaggcccaaaggtaaataaat

SEQ ID NO: 647870 - DNA, 33 bp, Homo sapien
gtgtaagattctgaggtccaaaggtaaataaat

SEQ ID NO: 647871 - DNA, 33 bp, Homo sapien
acagacaggtttggaagaatgcttactgtacca

SEQ ID NO: 647872 - DNA, 33 bp, Homo sapien
acagacaggtttggaataatgcttactgtacca

SEQ ID NO: 647873 - DNA, 33 bp, Homo sapien
tgccataaagctatctgagaccaacagacctta

SEQ ID NO: 647874 - DNA, 33 bp, Homo sapien
tgccataaagctatcttagaccaacagacctta

SEQ ID NO: 647875 - DNA, 33 bp, Homo sapien
gcagcaagttcagatcactgggattggaaattc

SEQ ID NO: 647876 - DNA, 33 bp, Homo sapien
gcagcaagttcagatcgctgggattggaaattc

SEQ ID NO: 647877 - DNA, 33 bp, Homo sapien
ttaatcatatgttagggatatcataaggatcat

SEQ ID NO: 647878 - DNA, 33 bp, Homo sapien
ttaatcatatgttaggtatatcataaggatcat

SEQ ID NO: 647879 - DNA, 33 bp, Homo sapien
ccaccgtactaatttaggtcaatacgtttgcct

SEQ ID NO: 647880 - DNA, 33 bp, Homo sapien
ccaccgtactaatttatgtcaatacgtttgcct

SEQ ID NO: 647881 - DNA, 33 bp, Homo sapien
tatcctttattgtgtcaagaaacattccctcta

SEQ ID NO: 647882 - DNA, 33 bp, Homo sapien
tatcctttattgtgtcgagaaacattccctcta

SEQ ID NO: 647883 - DNA, 33 bp, Homo sapien
agacaaattacggtaaagctaaagctcagtagc

SEQ ID NO: 647884 - DNA, 33 bp, Homo sapien
agacaaattacggtaaggctaaagctcagtagc

SEQ ID NO: 647885 - DNA, 33 bp, Homo sapien
tagactttttttgaaccgaaagatagtgaacta

SEQ ID NO: 647886 - DNA, 33 bp, Homo sapien
tagactttttttgaactgaaagatagtgaacta

SEQ ID NO: 647887 - DNA, 33 bp, Homo sapien
gaactgcaacagattcaataggatgttattata

SEQ ID NO: 647888 - DNA, 33 bp, Homo sapien
gaactgcaacagattcgataggatgttattata

SEQ ID NO: 647889 - DNA, 33 bp, Homo sapien
atcaccgatgtgcaaaaagattcgttaccagag

SEQ ID NO: 647890 - DNA, 33 bp, Homo sapien
atcaccgatgtgcaaatagattcgttaccagag

SEQ ID NO: 647891 - DNA, 33 bp, Homo sapien
agagcattttcccaataataaatatctcatttg

SEQ ID NO: 647892 - DNA, 33 bp, Homo sapien
agagcattttcccaatgataaatatctcatttg

SEQ ID NO: 647893 - DNA, 33 bp, Homo sapien
aggacaggtggacaagacattcctaagcactca

SEQ ID NO: 647894 - DNA, 33 bp, Homo sapien
aggacaggtggacaagccattcctaagcactca

SEQ ID NO: 647895 - DNA, 33 bp, Homo sapien
agtctggaacttagtccatatgtagaaatcttg

SEQ ID NO: 647896 - DNA, 33 bp, Homo sapien
agtctggaacttagtctatatgtagaaatcttg

SEQ ID NO: 647897 - DNA, 33 bp, Homo sapien
tggaccattttcagtacgatgtctttaatacct

SEQ ID NO: 647898 - DNA, 33 bp, Homo sapien
tggaccattttcagtatgatgtctttaatacct

SEQ ID NO: 647899 - DNA, 33 bp, Homo sapien
gcccataacggagatacagtttgagagagaaat

SEQ ID NO: 647900 - DNA, 33 bp, Homo sapien
gcccataacggagatatagtttgagagagaaat

SEQ ID NO: 647901 - DNA, 33 bp, Homo sapien
tgtacttggaaaatagcagtgaacatgacaaaa

SEQ ID NO: 647902 - DNA, 33 bp, Homo sapien
tgtacttggaaaatagtagtgaacatgacaaaa

SEQ ID NO: 647903 - DNA, 33 bp, Homo sapien
tttaaatgttggcacaaatgaattgataagcaa

SEQ ID NO: 647904 - DNA, 33 bp, Homo sapien
tttaaatgttggcacagatgaattgataagcaa

SEQ ID NO: 647905 - DNA, 33 bp, Homo sapien
ttaatagagactaaaactcatggagaatgaggc

SEQ ID NO: 647906 - DNA, 33 bp, Homo sapien
ttaatagagactaaaattcatggagaatgaggc

SEQ ID NO: 647907 - DNA, 33 bp, Homo sapien
ttgtgcttacaaataaatcacaggaacttaaat

SEQ ID NO: 647908 - DNA, 33 bp, Homo sapien
ttgtgcttacaaataagtcacaggaacttaaat

SEQ ID NO: 647909 - DNA, 33 bp, Homo sapien
cagatcctttcattataacgttccataatagtt

SEQ ID NO: 647910 - DNA, 33 bp, Homo sapien
cagatcctttcattatgacgttccataatagtt

SEQ ID NO: 647911 - DNA, 33 bp, Homo sapien
aaacatctgggaaatacgaataaccatcattga

SEQ ID NO: 647912 - DNA, 33 bp, Homo sapien
aaacatctgggaaataggaataaccatcattga

SEQ ID NO: 647913 - DNA, 33 bp, Homo sapien
atgcccagaaataagagagaaagatgaggatac

SEQ ID NO: 647914 - DNA, 33 bp, Homo sapien
atgcccagaaataagatagaaagatgaggatac

SEQ ID NO: 647915 - DNA, 33 bp, Homo sapien
ttaggatagttaccccaaagtattgtgtagaat

SEQ ID NO: 647916 - DNA, 33 bp, Homo sapien
ttaggatagttaccccgaagtattgtgtagaat

SEQ ID NO: 647917 - DNA, 33 bp, Homo sapien
tagcaagcacaggcaaggtcaatgttggttctc

SEQ ID NO: 647918 - DNA, 33 bp, Homo sapien
tagcaagcacaggcaatgtcaatgttggttctc

SEQ ID NO: 647919 - DNA, 33 bp, Homo sapien
atgactacttcaatagaaaacagacatggataa

SEQ ID NO: 647920 - DNA, 33 bp, Homo sapien
atgactacttcaatagcaaacagacatggataa

SEQ ID NO: 647921 - DNA, 33 bp, Homo sapien
aaaaccagatataaaccgaactaagtatgccaa

SEQ ID NO: 647922 - DNA, 33 bp, Homo sapien
aaaaccagatataaactgaactaagtatgccaa

SEQ ID NO: 647923 - DNA, 33 bp, Homo sapien
aaagctgctttccttccatgaaaccttacttct

SEQ ID NO: 647924 - DNA, 33 bp, Homo sapien
aaagctgctttccttctatgaaaccttacttct

SEQ ID NO: 647925 - DNA, 33 bp, Homo sapien
gctataacttttcagcgacttgagttattagtt

SEQ ID NO: 647926 - DNA, 33 bp, Homo sapien
gctataacttttcagctacttgagttattagtt

SEQ ID NO: 647927 - DNA, 33 bp, Homo sapien
tcactgtttcaaaatacagttgaggagatattg

SEQ ID NO: 647928 - DNA, 33 bp, Homo sapien
tcactgtttcaaaatatagttgaggagatattg

SEQ ID NO: 647929 - DNA, 33 bp, Homo sapien
cgctctcctcttttcaaattatatcaccttcca

SEQ ID NO: 647930 - DNA, 33 bp, Homo sapien
cgctctcctcttttcagattatatcaccttcca

SEQ ID NO: 647931 - DNA, 33 bp, Homo sapien
agactgacactaaaataaacagctgagtgctta

SEQ ID NO: 647932 - DNA, 33 bp, Homo sapien
agactgacactaaaatgaacagctgagtgctta

SEQ ID NO: 647933 - DNA, 33 bp, Homo sapien
tatttaagaccattgcagagagaaataggtaat

SEQ ID NO: 647934 - DNA, 33 bp, Homo sapien
tatttaagaccattgcggagagaaataggtaat

SEQ ID NO: 647935 - DNA, 33 bp, Homo sapien
cctctcataaaatctacataccacatacaattc

SEQ ID NO: 647936 - DNA, 33 bp, Homo sapien
cctctcataaaatctatataccacatacaattc

SEQ ID NO: 647937 - DNA, 33 bp, Homo sapien
aaatagtgtgttttccaaatactatcagagtct

SEQ ID NO: 647938 - DNA, 33 bp, Homo sapien
aaatagtgtgttttcccaatactatcagagtct

SEQ ID NO: 647939 - DNA, 33 bp, Homo sapien
tccttgagtatgctcaaatgactgtaatagcag

SEQ ID NO: 647940 - DNA, 33 bp, Homo sapien
tccttgagtatgctcagatgactgtaatagcag

SEQ ID NO: 647941 - DNA, 33 bp, Homo sapien
aggcggactcctagttcaacaatttaataggtc

SEQ ID NO: 647942 - DNA, 33 bp, Homo sapien
aggcggactcctagttgaacaatttaataggtc

SEQ ID NO: 647943 - DNA, 33 bp, Homo sapien
ggaagaagaagaggaaaggttggtttttctgtc

SEQ ID NO: 647944 - DNA, 33 bp, Homo sapien
ggaagaagaagaggaagggttggtttttctgtc

SEQ ID NO: 647945 - DNA, 33 bp, Homo sapien
catgtacaacactccaaggactgagcagagggc

SEQ ID NO: 647946 - DNA, 33 bp, Homo sapien
catgtacaacactccagggactgagcagagggc

SEQ ID NO: 647947 - DNA, 33 bp, Homo sapien
ttcgatgcacaggtgacaaaaacgtatattctg

SEQ ID NO: 647948 - DNA, 33 bp, Homo sapien
ttcgatgcacaggtgagaaaaacgtatattctg

SEQ ID NO: 647949 - DNA, 33 bp, Homo sapien
aggcttgctttatgacaaagcatatggtcaatt

SEQ ID NO: 647950 - DNA, 33 bp, Homo sapien
aggcttgctttatgactaagcatatggtcaatt

SEQ ID NO: 647951 - DNA, 33 bp, Homo sapien
gcccagctttcctctacctcagaaattctacat

SEQ ID NO: 647952 - DNA, 33 bp, Homo sapien
gcccagctttcctctatctcagaaattctacat

SEQ ID NO: 647953 - DNA, 33 bp, Homo sapien
tcattcctgcagattaagccccaggtattaaaa

SEQ ID NO: 647954 - DNA, 33 bp, Homo sapien
tcattcctgcagattacgccccaggtattaaaa

SEQ ID NO: 647955 - DNA, 33 bp, Homo sapien
gttttgtatgaacagacatttccactagttctt

SEQ ID NO: 647956 - DNA, 33 bp, Homo sapien
gttttgtatgaacagatatttccactagttctt

SEQ ID NO: 647957 - DNA, 33 bp, Homo sapien
aaaagctgtacacatacaaaattttgtgtaaat

SEQ ID NO: 647958 - DNA, 33 bp, Homo sapien
aaaagctgtacacatataaaattttgtgtaaat

SEQ ID NO: 647959 - DNA, 33 bp, Homo sapien
tctttgtagacaggaacaccatcagtagaacat

SEQ ID NO: 647960 - DNA, 33 bp, Homo sapien
tctttgtagacaggaagaccatcagtagaacat

SEQ ID NO: 647961 - DNA, 33 bp, Homo sapien
cacactctgttagggcaacccaaatgctattct

SEQ ID NO: 647962 - DNA, 33 bp, Homo sapien
cacactctgttagggcgacccaaatgctattct

SEQ ID NO: 647963 - DNA, 33 bp, Homo sapien
tctgcttcctcaaatacgggcaatgctggatag

SEQ ID NO: 647964 - DNA, 33 bp, Homo sapien
tctgcttcctcaaatatgggcaatgctggatag

SEQ ID NO: 647965 - DNA, 33 bp, Homo sapien
tttaaattcctgtgccaatgatttcagttccta

SEQ ID NO: 647966 - DNA, 33 bp, Homo sapien
tttaaattcctgtgcccatgatttcagttccta

SEQ ID NO: 647967 - DNA, 33 bp, Homo sapien
atttattctagtagccaagctcatctaattaac

SEQ ID NO: 647968 - DNA, 33 bp, Homo sapien
atttattctagtagccgagctcatctaattaac

SEQ ID NO: 647969 - DNA, 33 bp, Homo sapien
attataaggaaaataaactggttgctatgacat

SEQ ID NO: 647970 - DNA, 33 bp, Homo sapien
attataaggaaaataacctggttgctatgacat

SEQ ID NO: 647971 - DNA, 33 bp, Homo sapien
tagagtgtggcatccaatatatgcaggtaataa

SEQ ID NO: 647972 - DNA, 33 bp, Homo sapien
tagagtgtggcatccagtatatgcaggtaataa

SEQ ID NO: 647973 - DNA, 33 bp, Homo sapien
atatgagagatttatgaatgtttataataccca

SEQ ID NO: 647974 - DNA, 33 bp, Homo sapien
atatgagagatttatggatgtttataataccca

SEQ ID NO: 647975 - DNA, 33 bp, Homo sapien
tctcctcctgtattaactggcttaggataatgc

SEQ ID NO: 647976 - DNA, 33 bp, Homo sapien
tctcctcctgtattaattggcttaggataatgc

SEQ ID NO: 647977 - DNA, 33 bp, Homo sapien
tagtcttttcatctacagcatagatatcctcct

SEQ ID NO: 647978 - DNA, 33 bp, Homo sapien
tagtcttttcatctacggcatagatatcctcct

SEQ ID NO: 647979 - DNA, 33 bp, Homo sapien
tcccctgcagtaccaaacatatccgttccaccc

SEQ ID NO: 647980 - DNA, 33 bp, Homo sapien
tcccctgcagtaccaagcatatccgttccaccc

SEQ ID NO: 647981 - DNA, 33 bp, Homo sapien
tcaccataatcctaacggttactccaaactagg

SEQ ID NO: 647982 - DNA, 33 bp, Homo sapien
tcaccataatcctaactgttactccaaactagg

SEQ ID NO: 647983 - DNA, 33 bp, Homo sapien
tctagagtgtatctaacggtgggggcagattca

SEQ ID NO: 647984 - DNA, 33 bp, Homo sapien
tctagagtgtatctaatggtgggggcagattca

SEQ ID NO: 647985 - DNA, 33 bp, Homo sapien
actatttacctcaaacaacctctaatcaatcat

SEQ ID NO: 647986 - DNA, 33 bp, Homo sapien
actatttacctcaaactacctctaatcaatcat

SEQ ID NO: 647987 - DNA, 33 bp, Homo sapien
tatccatccagttaccaggcaaacagacttggg

SEQ ID NO: 647988 - DNA, 33 bp, Homo sapien
tatccatccagttaccgggcaaacagacttggg

SEQ ID NO: 647989 - DNA, 33 bp, Homo sapien
cattcattatttattcaattcctggttatgtac

SEQ ID NO: 647990 - DNA, 33 bp, Homo sapien
cattcattatttattcgattcctggttatgtac

SEQ ID NO: 647991 - DNA, 33 bp, Homo sapien
tattatgatatgaatgaaaaagcaaagaatgaa

SEQ ID NO: 647992 - DNA, 33 bp, Homo sapien
tattatgatatgaatggaaaagcaaagaatgaa

SEQ ID NO: 647993 - DNA, 33 bp, Homo sapien
aaatctcatcattacaagttgatttccagcaat

SEQ ID NO: 647994 - DNA, 33 bp, Homo sapien
aaatctcatcattacaggttgatttccagcaat

SEQ ID NO: 647995 - DNA, 33 bp, Homo sapien
aaagaaattccaggagaataatcatgcaaagtg

SEQ ID NO: 647996 - DNA, 33 bp, Homo sapien
aaagaaattccaggaggataatcatgcaaagtg

SEQ ID NO: 647997 - DNA, 33 bp, Homo sapien
tgactcattctaaatacgctgctcaaatgccac

SEQ ID NO: 647998 - DNA, 33 bp, Homo sapien
tgactcattctaaatatgctgctcaaatgccac

SEQ ID NO: 647999 - DNA, 33 bp, Homo sapien
acaaaaatgatcaaataaaaagtgacaaattac

SEQ ID NO: 648000 - DNA, 33 bp, Homo sapien
acaaaaatgatcaaatgaaaagtgacaaattac

SEQ ID NO: 648001 - DNA, 33 bp, Homo sapien
acagaaaacaaagaagcatttgctcaaacaaaa

SEQ ID NO: 648002 - DNA, 33 bp, Homo sapien
acagaaaacaaagaagtatttgctcaaacaaaa

SEQ ID NO: 648003 - DNA, 33 bp, Homo sapien
tgtgttcaatgatagacattccatgcattcaca

SEQ ID NO: 648004 - DNA, 33 bp, Homo sapien
tgtgttcaatgatagatattccatgcattcaca

SEQ ID NO: 648005 - DNA, 33 bp, Homo sapien
caattattgaggtcaaatgaactgtcagcactc

SEQ ID NO: 648006 - DNA, 33 bp, Homo sapien
caattattgaggtcaactgaactgtcagcactc

SEQ ID NO: 648007 - DNA, 33 bp, Homo sapien
aaagcaatggctatacactgttggtggcagtgt

SEQ ID NO: 648008 - DNA, 33 bp, Homo sapien
aaagcaatggctataccctgttggtggcagtgt

SEQ ID NO: 648009 - DNA, 33 bp, Homo sapien
attgaatattgctgctcaaactcctaatttaca

SEQ ID NO: 648010 - DNA, 33 bp, Homo sapien
attgaatattgctgcttaaactcctaatttaca

SEQ ID NO: 648011 - DNA, 33 bp, Homo sapien
catctctgacaatccaaaataaatattctccgc

SEQ ID NO: 648012 - DNA, 33 bp, Homo sapien
catctctgacaatccagaataaatattctccgc

SEQ ID NO: 648013 - DNA, 33 bp, Homo sapien
tacttcctacactgaacttagtctttgtcattc

SEQ ID NO: 648014 - DNA, 33 bp, Homo sapien
tacttcctacactgaagttagtctttgtcattc

SEQ ID NO: 648015 - DNA, 33 bp, Homo sapien
ccgtgggagaagtggaataattggtagttatgg

SEQ ID NO: 648016 - DNA, 33 bp, Homo sapien
ccgtgggagaagtggagtaattggtagttatgg

SEQ ID NO: 648017 - DNA, 33 bp, Homo sapien
ttaaaggtagactttcactgaaagaattattaa

SEQ ID NO: 648018 - DNA, 33 bp, Homo sapien
ttaaaggtagactttcgctgaaagaattattaa

SEQ ID NO: 648019 - DNA, 33 bp, Homo sapien
gtgtgccatgacctcaaaaagagaatagaaaca

SEQ ID NO: 648020 - DNA, 33 bp, Homo sapien
gtgtgccatgacctcagaaagagaatagaaaca

SEQ ID NO: 648021 - DNA, 33 bp, Homo sapien
gccccttgctgttttccagcgtatgaagatttt

SEQ ID NO: 648022 - DNA, 33 bp, Homo sapien
gccccttgctgttttctagcgtatgaagatttt

SEQ ID NO: 648023 - DNA, 33 bp, Homo sapien
gggccaatggaaaataataaccctgtggacagg

SEQ ID NO: 648024 - DNA, 33 bp, Homo sapien
gggccaatggaaaatagtaaccctgtggacagg

SEQ ID NO: 648025 - DNA, 33 bp, Homo sapien
aagaatatgtcttcacaaacctctttactgcta

SEQ ID NO: 648026 - DNA, 33 bp, Homo sapien
aagaatatgtcttcacgaacctctttactgcta

SEQ ID NO: 648027 - DNA, 33 bp, Homo sapien
tcttgtgatttccttaagtaccaagaaaaatag

SEQ ID NO: 648028 - DNA, 33 bp, Homo sapien
tcttgtgatttccttatgtaccaagaaaaatag

SEQ ID NO: 648029 - DNA, 33 bp, Homo sapien
ttctgcgtggagaagaaattgaaagggggctag

SEQ ID NO: 648030 - DNA, 33 bp, Homo sapien
ttctgcgtggagaagagattgaaagggggctag

SEQ ID NO: 648031 - DNA, 33 bp, Homo sapien
tgtaaaccatctgagactaagttaagctgaatt

SEQ ID NO: 648032 - DNA, 33 bp, Homo sapien
tgtaaaccatctgagattaagttaagctgaatt

SEQ ID NO: 648033 - DNA, 33 bp, Homo sapien
ctatctgctctctgcaagaaatgcatttaacat

SEQ ID NO: 648034 - DNA, 33 bp, Homo sapien
ctatctgctctctgcaggaaatgcatttaacat

SEQ ID NO: 648035 - DNA, 33 bp, Homo sapien
acaaggtaatttactcaatgaaaaacaaaatat

SEQ ID NO: 648036 - DNA, 33 bp, Homo sapien
acaaggtaatttactccatgaaaaacaaaatat

SEQ ID NO: 648037 - DNA, 33 bp, Homo sapien
gaattaaaaagtttggaaacaatgataattgca

SEQ ID NO: 648038 - DNA, 33 bp, Homo sapien
gaattaaaaagtttggcaacaatgataattgca

SEQ ID NO: 648039 - DNA, 33 bp, Homo sapien
tcagatgtttgcttagcacaaatataaaataaa

SEQ ID NO: 648040 - DNA, 33 bp, Homo sapien
tcagatgtttgcttagtacaaatataaaataaa

SEQ ID NO: 648041 - DNA, 33 bp, Homo sapien
tttgctcagtacttaacgtgctgatttactgct

SEQ ID NO: 648042 - DNA, 33 bp, Homo sapien
tttgctcagtacttaatgtgctgatttactgct

SEQ ID NO: 648043 - DNA, 33 bp, Homo sapien
tgatccgctttgggacagcctttatttgatcag

SEQ ID NO: 648044 - DNA, 33 bp, Homo sapien
tgatccgctttgggacggcctttatttgatcag

SEQ ID NO: 648045 - DNA, 33 bp, Homo sapien
aggcagaaagggataaatattcatctgacatag

SEQ ID NO: 648046 - DNA, 33 bp, Homo sapien
aggcagaaagggataagtattcatctgacatag

SEQ ID NO: 648047 - DNA, 33 bp, Homo sapien
tgttctcctttcactgaatccgtgtcaacatct

SEQ ID NO: 648048 - DNA, 33 bp, Homo sapien
tgttctcctttcactgcatccgtgtcaacatct

SEQ ID NO: 648049 - DNA, 33 bp, Homo sapien
tacctctagaaccagaaaggcctagtatcaaat

SEQ ID NO: 648050 - DNA, 33 bp, Homo sapien
tacctctagaaccagagaggcctagtatcaaat

SEQ ID NO: 648051 - DNA, 33 bp, Homo sapien
ggctgtgtccatgaggaatgtctgtaattatca

SEQ ID NO: 648052 - DNA, 33 bp, Homo sapien
ggctgtgtccatgagggatgtctgtaattatca

SEQ ID NO: 648053 - DNA, 33 bp, Homo sapien
tgtcatctcaaatatactaccctgtgcaaacct

SEQ ID NO: 648054 - DNA, 33 bp, Homo sapien
tgtcatctcaaatatagtaccctgtgcaaacct

SEQ ID NO: 648055 - DNA, 33 bp, Homo sapien
ctttctttcttcaccagaaatcttccactaatc

SEQ ID NO: 648056 - DNA, 33 bp, Homo sapien
ctttctttcttcaccataaatcttccactaatc

SEQ ID NO: 648057 - DNA, 33 bp, Homo sapien
caacactgctattagacgtagcacaaaagcagc

SEQ ID NO: 648058 - DNA, 33 bp, Homo sapien
caacactgctattagatgtagcacaaaagcagc

SEQ ID NO: 648059 - DNA, 33 bp, Homo sapien
actaccagctaattaccgacaaagacaaaagct

SEQ ID NO: 648060 - DNA, 33 bp, Homo sapien
actaccagctaattactgacaaagacaaaagct

SEQ ID NO: 648061 - DNA, 33 bp, Homo sapien
gcacagatcctattgactaggggcccagaattg

SEQ ID NO: 648062 - DNA, 33 bp, Homo sapien
gcacagatcctattgattaggggcccagaattg

SEQ ID NO: 648063 - DNA, 33 bp, Homo sapien
cctgaatttaaagagcactgtttcagatatctc

SEQ ID NO: 648064 - DNA, 33 bp, Homo sapien
cctgaatttaaagagcgctgtttcagatatctc

SEQ ID NO: 648065 - DNA, 33 bp, Homo sapien
taatttttaagaacaaaatgtagggtcacttat

SEQ ID NO: 648066 - DNA, 33 bp, Homo sapien
taatttttaagaacaacatgtagggtcacttat

SEQ ID NO: 648067 - DNA, 33 bp, Homo sapien
agtcaccctctccctcaacatggaaagaatttg

SEQ ID NO: 648068 - DNA, 33 bp, Homo sapien
agtcaccctctccctcgacatggaaagaatttg

SEQ ID NO: 648069 - DNA, 33 bp, Homo sapien
gatctggagttccaggaaaagaccaggtttaga

SEQ ID NO: 648070 - DNA, 33 bp, Homo sapien
gatctggagttccagggaaagaccaggtttaga

SEQ ID NO: 648071 - DNA, 33 bp, Homo sapien
tccctatagtggaaagaatactcagatctggta

SEQ ID NO: 648072 - DNA, 33 bp, Homo sapien
tccctatagtggaaagcatactcagatctggta

SEQ ID NO: 648073 - DNA, 33 bp, Homo sapien
gttcttgtaccccagagatacggccctgggaat

SEQ ID NO: 648074 - DNA, 33 bp, Homo sapien
gttcttgtaccccagatatacggccctgggaat

SEQ ID NO: 648075 - DNA, 33 bp, Homo sapien
cccttcctgactgaaagaactccctgtggaaaa

SEQ ID NO: 648076 - DNA, 33 bp, Homo sapien
cccttcctgactgaaataactccctgtggaaaa

SEQ ID NO: 648077 - DNA, 33 bp, Homo sapien
ccaccatgaccagctccaaatgctatggaaagt

SEQ ID NO: 648078 - DNA, 33 bp, Homo sapien
ccaccatgaccagctctaaatgctatggaaagt

SEQ ID NO: 648079 - DNA, 33 bp, Homo sapien
acatttgttagccaatcaaatgtaacttttgtt

SEQ ID NO: 648080 - DNA, 33 bp, Homo sapien
acatttgttagccaatgaaatgtaacttttgtt

SEQ ID NO: 648081 - DNA, 33 bp, Homo sapien
ccctcctcttggatcaccaggttgatattgttc

SEQ ID NO: 648082 - DNA, 33 bp, Homo sapien
ccctcctcttggatcatcaggttgatattgttc

SEQ ID NO: 648083 - DNA, 33 bp, Homo sapien
ctaatattcccacttaggtgctaacctcattaa

SEQ ID NO: 648084 - DNA, 33 bp, Homo sapien
ctaatattcccacttatgtgctaacctcattaa

SEQ ID NO: 648085 - DNA, 33 bp, Homo sapien
acatgattttcagtcagatttctgaagttgact

SEQ ID NO: 648086 - DNA, 33 bp, Homo sapien
acatgattttcagtcatatttctgaagttgact

SEQ ID NO: 648087 - DNA, 33 bp, Homo sapien
ctctagacacaatgagaaaagcactcagtctat

SEQ ID NO: 648088 - DNA, 33 bp, Homo sapien
ctctagacacaatgaggaaagcactcagtctat

SEQ ID NO: 648089 - DNA, 33 bp, Homo sapien
attttcatgttttagaagcctacaatgaggatg

SEQ ID NO: 648090 - DNA, 33 bp, Homo sapien
attttcatgttttagatgcctacaatgaggatg

SEQ ID NO: 648091 - DNA, 33 bp, Homo sapien
ggaagatccacacataaatagtctgtagtaaca

SEQ ID NO: 648092 - DNA, 33 bp, Homo sapien
ggaagatccacacatagatagtctgtagtaaca

SEQ ID NO: 648093 - DNA, 33 bp, Homo sapien
atcagaggttcataaaaggcccctgagcaggtt

SEQ ID NO: 648094 - DNA, 33 bp, Homo sapien
atcagaggttcataaagggcccctgagcaggtt

SEQ ID NO: 648095 - DNA, 33 bp, Homo sapien
ctatgaaggaaatgaactgaaacacctcggagg

SEQ ID NO: 648096 - DNA, 33 bp, Homo sapien
ctatgaaggaaatgaattgaaacacctcggagg

SEQ ID NO: 648097 - DNA, 33 bp, Homo sapien
gtatcttttctgtgaccgccccaggaattaact

SEQ ID NO: 648098 - DNA, 33 bp, Homo sapien
gtatcttttctgtgactgccccaggaattaact

SEQ ID NO: 648099 - DNA, 33 bp, Homo sapien
acgaggtagggatggaaaatgaaggcatacatg

SEQ ID NO: 648100 - DNA, 33 bp, Homo sapien
acgaggtagggatggagaatgaaggcatacatg

SEQ ID NO: 648101 - DNA, 33 bp, Homo sapien
aatattgcaatgtgaaaactgggtcttaagaga

SEQ ID NO: 648102 - DNA, 33 bp, Homo sapien
aatattgcaatgtgaacactgggtcttaagaga

SEQ ID NO: 648103 - DNA, 33 bp, Homo sapien
tgagtttgtcacttaaggtgctccaaaatttgg

SEQ ID NO: 648104 - DNA, 33 bp, Homo sapien
tgagtttgtcacttaatgtgctccaaaatttgg

SEQ ID NO: 648105 - DNA, 33 bp, Homo sapien
aaatgcattaggggaaaaagaaagacattgtct

SEQ ID NO: 648106 - DNA, 33 bp, Homo sapien
aaatgcattaggggaagaagaaagacattgtct

SEQ ID NO: 648107 - DNA, 33 bp, Homo sapien
gctcaatccatactcaataaaccctcagcggca

SEQ ID NO: 648108 - DNA, 33 bp, Homo sapien
gctcaatccatactcagtaaaccctcagcggca

SEQ ID NO: 648109 - DNA, 33 bp, Homo sapien
ctcagcggcagtcctaagcaaacaaagaagtga

SEQ ID NO: 648110 - DNA, 33 bp, Homo sapien
ctcagcggcagtcctaggcaaacaaagaagtga

SEQ ID NO: 648111 - DNA, 33 bp, Homo sapien
aaaagtaaaatggctaagacaaataattttcac

SEQ ID NO: 648112 - DNA, 33 bp, Homo sapien
aaaagtaaaatggctaggacaaataattttcac

SEQ ID NO: 648113 - DNA, 33 bp, Homo sapien
caggaaaatgcaaaagaagctctgaagcaaaaa

SEQ ID NO: 648114 - DNA, 33 bp, Homo sapien
caggaaaatgcaaaagtagctctgaagcaaaaa

SEQ ID NO: 648115 - DNA, 33 bp, Homo sapien
ggctcggattcatgataagccagtctcccaagg

SEQ ID NO: 648116 - DNA, 33 bp, Homo sapien
ggctcggattcatgatgagccagtctcccaagg

SEQ ID NO: 648117 - DNA, 33 bp, Homo sapien
cacaagatttcaaatcagaagccttgttatttt

SEQ ID NO: 648118 - DNA, 33 bp, Homo sapien
cacaagatttcaaatccgaagccttgttatttt

SEQ ID NO: 648119 - DNA, 33 bp, Homo sapien
acgtttctcacgttacaatgatataatgaaaat

SEQ ID NO: 648120 - DNA, 33 bp, Homo sapien
acgtttctcacgttacgatgatataatgaaaat

SEQ ID NO: 648121 - DNA, 33 bp, Homo sapien
cggaagtaataggataagggacaatcgactaac

SEQ ID NO: 648122 - DNA, 33 bp, Homo sapien
cggaagtaataggatacgggacaatcgactaac

SEQ ID NO: 648123 - DNA, 33 bp, Homo sapien
caaaagctaggatctccaggtgatagcctcttc

SEQ ID NO: 648124 - DNA, 33 bp, Homo sapien
caaaagctaggatctcgaggtgatagcctcttc

SEQ ID NO: 648125 - DNA, 33 bp, Homo sapien
tgaggtgcttattcaccagaaatgtaagtgatg

SEQ ID NO: 648126 - DNA, 33 bp, Homo sapien
tgaggtgcttattcactagaaatgtaagtgatg

SEQ ID NO: 648127 - DNA, 33 bp, Homo sapien
gtgttctcatctgggtcaagctggagaaagaat

SEQ ID NO: 648128 - DNA, 33 bp, Homo sapien
gtgttctcatctgggttaagctggagaaagaat

SEQ ID NO: 648129 - DNA, 33 bp, Homo sapien
actctgaatcaccaaaaggagtagaatagtctt

SEQ ID NO: 648130 - DNA, 33 bp, Homo sapien
actctgaatcaccaaatggagtagaatagtctt

SEQ ID NO: 648131 - DNA, 33 bp, Homo sapien
gcagaagaaaataagactctggtgactcacttt

SEQ ID NO: 648132 - DNA, 33 bp, Homo sapien
gcagaagaaaataagattctggtgactcacttt

SEQ ID NO: 648133 - DNA, 33 bp, Homo sapien
atctggccttgtcctcacacctcttgaaaagtc

SEQ ID NO: 648134 - DNA, 33 bp, Homo sapien
atctggccttgtcctcgcacctcttgaaaagtc

SEQ ID NO: 648135 - DNA, 33 bp, Homo sapien
atgaaggatccgtgcacagatagtagaaatatt

SEQ ID NO: 648136 - DNA, 33 bp, Homo sapien
atgaaggatccgtgcagagatagtagaaatatt

SEQ ID NO: 648137 - DNA, 33 bp, Homo sapien
gggtaccaagcatcacaaactgtccttatcact

SEQ ID NO: 648138 - DNA, 33 bp, Homo sapien
gggtaccaagcatcacgaactgtccttatcact

SEQ ID NO: 648139 - DNA, 33 bp, Homo sapien
tcaacaccatattttacacagcaccttcatcag

SEQ ID NO: 648140 - DNA, 33 bp, Homo sapien
tcaacaccatattttatacagcaccttcatcag

SEQ ID NO: 648141 - DNA, 33 bp, Homo sapien
aaatctacttgcaaaagttcagcagagaaatct

SEQ ID NO: 648142 - DNA, 33 bp, Homo sapien
aaatctacttgcaaaatttcagcagagaaatct

SEQ ID NO: 648143 - DNA, 33 bp, Homo sapien
ggcagagagtgcaacaataaggaccaaggtaaa

SEQ ID NO: 648144 - DNA, 33 bp, Homo sapien
ggcagagagtgcaacattaaggaccaaggtaaa

SEQ ID NO: 648145 - DNA, 33 bp, Homo sapien
tgaatagagaaattcgccattgcctgctgattt

SEQ ID NO: 648146 - DNA, 33 bp, Homo sapien
tgaatagagaaattcgtcattgcctgctgattt

SEQ ID NO: 648147 - DNA, 33 bp, Homo sapien
ccatcatcctaaagtcaaaatgaatttaaaggt

SEQ ID NO: 648148 - DNA, 33 bp, Homo sapien
ccatcatcctaaagtccaaatgaatttaaaggt

SEQ ID NO: 648149 - DNA, 33 bp, Homo sapien
tatacatttgtccaaaagcatagaatgcacaaa

SEQ ID NO: 648150 - DNA, 33 bp, Homo sapien
tatacatttgtccaaacgcatagaatgcacaaa

SEQ ID NO: 648151 - DNA, 33 bp, Homo sapien
gagttttgacattatacatttggaaattatcct

SEQ ID NO: 648152 - DNA, 33 bp, Homo sapien
gagttttgacattatagatttggaaattatcct

SEQ ID NO: 648153 - DNA, 33 bp, Homo sapien
catgtaagcccattgaaaacttttagggactaa

SEQ ID NO: 648154 - DNA, 33 bp, Homo sapien
catgtaagcccattgagaacttttagggactaa

SEQ ID NO: 648155 - DNA, 33 bp, Homo sapien
tcaccctttgcataaacaagtcaacaagtcttg

SEQ ID NO: 648156 - DNA, 33 bp, Homo sapien
tcaccctttgcataaataagtcaacaagtcttg

SEQ ID NO: 648157 - DNA, 33 bp, Homo sapien
gataaaaaatgtacgaacatcttgggagtcaca

SEQ ID NO: 648158 - DNA, 33 bp, Homo sapien
gataaaaaatgtacgagcatcttgggagtcaca

SEQ ID NO: 648159 - DNA, 33 bp, Homo sapien
ctgtctctttgttctacggcactctcttcttca

SEQ ID NO: 648160 - DNA, 33 bp, Homo sapien
ctgtctctttgttctatggcactctcttcttca

SEQ ID NO: 648161 - DNA, 33 bp, Homo sapien
ttcattacttatggtaccttatacacagggcag

SEQ ID NO: 648162 - DNA, 33 bp, Homo sapien
ttcattacttatggtatcttatacacagggcag

SEQ ID NO: 648163 - DNA, 33 bp, Homo sapien
atgaaatatgagtcacagatcacattgcccatt

SEQ ID NO: 648164 - DNA, 33 bp, Homo sapien
atgaaatatgagtcacggatcacattgcccatt

SEQ ID NO: 648165 - DNA, 33 bp, Homo sapien
gacatgaaaactcggcagaaagatctgaagcat

SEQ ID NO: 648166 - DNA, 33 bp, Homo sapien
gacatgaaaactcggcggaaagatctgaagcat

SEQ ID NO: 648167 - DNA, 33 bp, Homo sapien
actttgaggccactgaatatcctttcacaagac

SEQ ID NO: 648168 - DNA, 33 bp, Homo sapien
actttgaggccactgagtatcctttcacaagac

SEQ ID NO: 648169 - DNA, 33 bp, Homo sapien
ctaggaagaagacaaaaagcaaatgtaaaacaa

SEQ ID NO: 648170 - DNA, 33 bp, Homo sapien
ctaggaagaagacaaagagcaaatgtaaaacaa

SEQ ID NO: 648171 - DNA, 33 bp, Homo sapien; identical to SEQ ID NO: 648169

SEQ ID NO: 648172 - DNA, 33 bp, Homo sapien; identical to SEQ ID NO: 648170

SEQ ID NO: 648173 - DNA, 33 bp, Homo sapien
ggatcagtgtatttaactggccatcctagatca

SEQ ID NO: 648174 - DNA, 33 bp, Homo sapien
ggatcagtgtatttaattggccatcctagatca

SEQ ID NO: 648175 - DNA, 33 bp, Homo sapien
tttgcaatggcattatcagttgaaattggggaa

SEQ ID NO: 648176 - DNA, 33 bp, Homo sapien
tttgcaatggcattatgagttgaaattggggaa

SEQ ID NO: 648177 - DNA, 33 bp, Homo sapien
ttcccagctatgattacatgattttagacaacc

SEQ ID NO: 648178 - DNA, 33 bp, Homo sapien
ttcccagctatgattatatgattttagacaacc

SEQ ID NO: 648179 - DNA, 33 bp, Homo sapien
ttagaataacaaaaacaaagtgtccataaaaga

SEQ ID NO: 648180 - DNA, 33 bp, Homo sapien
ttagaataacaaaaacgaagtgtccataaaaga

SEQ ID NO: 648181 - DNA, 33 bp, Homo sapien
gttagaaacacaacacaagaccagaattaaaga

SEQ ID NO: 648182 - DNA, 33 bp, Homo sapien
gttagaaacacaacacgagaccagaattaaaga

SEQ ID NO: 648183 - DNA, 33 bp, Homo sapien
gtgttggtcagtatcccataattgagaagtgaa

SEQ ID NO: 648184 - DNA, 33 bp, Homo sapien
gtgttggtcagtatcctataattgagaagtgaa

SEQ ID NO: 648185 - DNA, 33 bp, Homo sapien
acactgctttaagagaatagaaattgtaactta

SEQ ID NO: 648186 - DNA, 33 bp, Homo sapien
acactgctttaagagagtagaaattgtaactta

SEQ ID NO: 648187 - DNA, 33 bp, Homo sapien
tcaacatgaattgaccagaatgttttacaaatc

SEQ ID NO: 648188 - DNA, 33 bp, Homo sapien
tcaacatgaattgacccgaatgttttacaaatc

SEQ ID NO: 648189 - DNA, 33 bp, Homo sapien
cagggacataggccaacggaaaagagcagaaaa

SEQ ID NO: 648190 - DNA, 33 bp, Homo sapien
cagggacataggccaatggaaaagagcagaaaa

SEQ ID NO: 648191 - DNA, 33 bp, Homo sapien
aggtttgtaaaaatcaataatattgcaaggttg

SEQ ID NO: 648192 - DNA, 33 bp, Homo sapien
aggtttgtaaaaatcagtaatattgcaaggttg

SEQ ID NO: 648193 - DNA, 33 bp, Homo sapien
atggcgcccagtaagacgaagcaaaaacatgaa

SEQ ID NO: 648194 - DNA, 33 bp, Homo sapien
atggcgcccagtaagaggaagcaaaaacatgaa

SEQ ID NO: 648195 - DNA, 33 bp, Homo sapien
gtctctttttaagaagcccttgttacgaccttt

SEQ ID NO: 648196 - DNA, 33 bp, Homo sapien
gtctctttttaagaaggccttgttacgaccttt

SEQ ID NO: 648197 - DNA, 33 bp, Homo sapien
atatacacacatatagacacaatcaggtagcaa

SEQ ID NO: 648198 - DNA, 33 bp, Homo sapien
atatacacacatataggcacaatcaggtagcaa

SEQ ID NO: 648199 - DNA, 33 bp, Homo sapien
ataatagaaacccaacccactgtgaatgataaa

SEQ ID NO: 648200 - DNA, 33 bp, Homo sapien
ataatagaaacccaactcactgtgaatgataaa

SEQ ID NO: 648201 - DNA, 33 bp, Homo sapien
ctcacttcacagcaaacgaattggagcaatggg

SEQ ID NO: 648202 - DNA, 33 bp, Homo sapien
ctcacttcacagcaaatgaattggagcaatggg

SEQ ID NO: 648203 - DNA, 33 bp, Homo sapien
gcattacagacttctgcagtcacaaacatcatt

SEQ ID NO: 648204 - DNA, 33 bp, Homo sapien
gcattacagacttctggagtcacaaacatcatt

SEQ ID NO: 648205 - DNA, 33 bp, Homo sapien; identical to SEQ ID NO: 648203

SEQ ID NO: 648206 - DNA, 33 bp, Homo sapien; identical to SEQ ID NO: 648204

SEQ ID NO: 648207 - DNA, 33 bp, Homo sapien
aatataatgttggcaacaatgaggagaattcag

SEQ ID NO: 648208 - DNA, 33 bp, Homo sapien
aatataatgttggcaataatgaggagaattcag

SEQ ID NO: 648209 - DNA, 33 bp, Homo sapien
cataccaactagcttaacatccatgatctaagt

SEQ ID NO: 648210 - DNA, 33 bp, Homo sapien
cataccaactagcttaccatccatgatctaagt

SEQ ID NO: 648211 - DNA, 33 bp, Homo sapien
gaacaaggtttatgtcaaaaatttgagctgtaa

SEQ ID NO: 648212 - DNA, 33 bp, Homo sapien
gaacaaggtttatgtctaaaatttgagctgtaa

SEQ ID NO: 648213 - DNA, 33 bp, Homo sapien
gtatattcatcaactacagcactgataaataaa

SEQ ID NO: 648214 - DNA, 33 bp, Homo sapien
gtatattcatcaactatagcactgataaataaa

SEQ ID NO: 648215 - DNA, 33 bp, Homo sapien
ctatattgcctgagacccccatcacatttaact

SEQ ID NO: 648216 - DNA, 33 bp, Homo sapien
ctatattgcctgagacgcccatcacatttaact

SEQ ID NO: 648217 - DNA, 33 bp, Homo sapien
tcaattcctcagatcaaccaggtctgccttctt

SEQ ID NO: 648218 - DNA, 33 bp, Homo sapien
tcaattcctcagatcacccaggtctgccttctt

SEQ ID NO: 648219 - DNA, 33 bp, Homo sapien
atcgtcttctggcaaacgtacagagttgtacaa

SEQ ID NO: 648220 - DNA, 33 bp, Homo sapien
atcgtcttctggcaaatgtacagagttgtacaa

SEQ ID NO: 648221 - DNA, 33 bp, Homo sapien
tttttgtggactctaccgaatgtaatagaaaaa

SEQ ID NO: 648222 - DNA, 33 bp, Homo sapien
tttttgtggactctactgaatgtaatagaaaaa

SEQ ID NO: 648223 - DNA, 33 bp, Homo sapien
agttgaaactggggataaagtgttgaaataaac

SEQ ID NO: 648224 - DNA, 33 bp, Homo sapien
agttgaaactggggatgaagtgttgaaataaac

SEQ ID NO: 648225 - DNA, 33 bp, Homo sapien
cacagggagggtaacactaagcatcagagcctg

SEQ ID NO: 648226 - DNA, 33 bp, Homo sapien
cacagggagggtaacattaagcatcagagcctg

SEQ ID NO: 648227 - DNA, 33 bp, Homo sapien
attatttactacagtcacccttttgtgatatca

SEQ ID NO: 648228 - DNA, 33 bp, Homo sapien
attatttactacagtcgcccttttgtgatatca

SEQ ID NO: 648229 - DNA, 33 bp, Homo sapien
ctgcttgagaaaaacacagagaaaagtaaatgg

SEQ ID NO: 648230 - DNA, 33 bp, Homo sapien
ctgcttgagaaaaacagagagaaaagtaaatgg

SEQ ID NO: 648231 - DNA, 33 bp, Homo sapien
tggcgggggcacatataatatactgagacacca

SEQ ID NO: 648232 - DNA, 33 bp, Homo sapien
tggcgggggcacatatgatatactgagacacca

SEQ ID NO: 648233 - DNA, 33 bp, Homo sapien
ctacatccatgtcccaaacagatttttttcatt

SEQ ID NO: 648234 - DNA, 33 bp, Homo sapien
ctacatccatgtcccagacagatttttttcatt

SEQ ID NO: 648235 - DNA, 33 bp, Homo sapien
ctgagagttaaaaagacgcattatctgaatgta

SEQ ID NO: 648236 - DNA, 33 bp, Homo sapien
ctgagagttaaaaagatgcattatctgaatgta

SEQ ID NO: 648237 - DNA, 33 bp, Homo sapien; identical to SEQ ID NO: 648235

SEQ ID NO: 648238 - DNA, 33 bp, Homo sapien; identical to SEQ ID NO: 648236

SEQ ID NO: 648239 - DNA, 33 bp, Homo sapien
aacatttgcaatggaactgtgagttgaaattgg

SEQ ID NO: 648240 - DNA, 33 bp, Homo sapien
aacatttgcaatggaattgtgagttgaaattgg

SEQ ID NO: 648241 - DNA, 33 bp, Homo sapien; identical to SEQ ID NO: 648239

SEQ ID NO: 648242 - DNA, 33 bp, Homo sapien; identical to SEQ ID NO: 648240

SEQ ID NO: 648243 - DNA, 33 bp, Homo sapien
actctggatccagccagcactaggacttgccta

SEQ ID NO: 648244 - DNA, 33 bp, Homo sapien
actctggatccagccatcactaggacttgccta

SEQ ID NO: 648245 - DNA, 33 bp, Homo sapien
ctggtgaagtgacagcaaaaacaatcctgcatc

SEQ ID NO: 648246 - DNA, 33 bp, Homo sapien
ctggtgaagtgacagcgaaaacaatcctgcatc

SEQ ID NO: 648247 - DNA, 33 bp, Homo sapien
taagacttatacagcaaatactgggggagggaa

SEQ ID NO: 648248 - DNA, 33 bp, Homo sapien
taagacttatacagcagatactgggggagggaa

SEQ ID NO: 648249 - DNA, 33 bp, Homo sapien
catacacaccttgaagaaagttatcatttcaat

SEQ ID NO: 648250 - DNA, 33 bp, Homo sapien
catacacaccttgaagtaagttatcatttcaat

SEQ ID NO: 648251 - DNA, 33 bp, Homo sapien
aacaacctaacatcacaagtaaaacaactagag

SEQ ID NO: 648252 - DNA, 33 bp, Homo sapien
aacaacctaacatcaccagtaaaacaactagag

SEQ ID NO: 648253 - DNA, 33 bp, Homo sapien; identical to SEQ ID NO: 648251

SEQ ID NO: 648254 - DNA, 33 bp, Homo sapien; identical to SEQ ID NO: 648252

SEQ ID NO: 648255 - DNA, 33 bp, Homo sapien
tgggatagagtactaaacaggatcttgtggtct

SEQ ID NO: 648256 - DNA, 33 bp, Homo sapien
tgggatagagtactaagcaggatcttgtggtct

SEQ ID NO: 648257 - DNA, 33 bp, Homo sapien
gtaatcccctgtggaacaatctgaacttttcat

SEQ ID NO: 648258 - DNA, 33 bp, Homo sapien
gtaatcccctgtggaataatctgaacttttcat

SEQ ID NO: 648259 - DNA, 33 bp, Homo sapien
tttaagattaggtttacaagatgtcagaatagg

SEQ ID NO: 648260 - DNA, 33 bp, Homo sapien
tttaagattaggtttataagatgtcagaatagg

SEQ ID NO: 648261 - DNA, 33 bp, Homo sapien
aatagattgaaaagaactcagaatgtagagtca

SEQ ID NO: 648262 - DNA, 33 bp, Homo sapien
aatagattgaaaagaattcagaatgtagagtca

SEQ ID NO: 648263 - DNA, 33 bp, Homo sapien
taaaaatacatattccgagacctcattcttgaa

SEQ ID NO: 648264 - DNA, 33 bp, Homo sapien
taaaaatacatattcctagacctcattcttgaa

SEQ ID NO: 648265 - DNA, 33 bp, Homo sapien
tgtttattcatgcacactctattatcaggcaaa

SEQ ID NO: 648266 - DNA, 33 bp, Homo sapien
tgtttattcatgcacattctattatcaggcaaa

SEQ ID NO: 648267 - DNA, 33 bp, Homo sapien
catgactgcttgtaaccatccatatgcttgtta

SEQ ID NO: 648268 - DNA, 33 bp, Homo sapien
catgactgcttgtaactatccatatgcttgtta

SEQ ID NO: 648269 - DNA, 33 bp, Homo sapien
aaggccaatcagggaactagacctttaaaatgg

SEQ ID NO: 648270 - DNA, 33 bp, Homo sapien
aaggccaatcagggaagtagacctttaaaatgg

SEQ ID NO: 648271 - DNA, 33 bp, Homo sapien
ggtcatcctttgattgaaattcacatagcatac

SEQ ID NO: 648272 - DNA, 33 bp, Homo sapien
ggtcatcctttgattggaattcacatagcatac

SEQ ID NO: 648273 - DNA, 33 bp, Homo sapien
caaatgcacatggtccccacttctgctacactg

SEQ ID NO: 648274 - DNA, 33 bp, Homo sapien
caaatgcacatggtccgcacttctgctacactg

SEQ ID NO: 648275 - DNA, 33 bp, Homo sapien
tcctgcttctctgatcacttccttcagtatctt

SEQ ID NO: 648276 - DNA, 33 bp, Homo sapien
tcctgcttctctgatcgcttccttcagtatctt

SEQ ID NO: 648277 - DNA, 33 bp, Homo sapien
caggccagctacactacgtgggagacaaagtta

SEQ ID NO: 648278 - DNA, 33 bp, Homo sapien
caggccagctacactatgtgggagacaaagtta

SEQ ID NO: 648279 - DNA, 33 bp, Homo sapien
ttgagtttttccttccactttgtgtactctcca

SEQ ID NO: 648280 - DNA, 33 bp, Homo sapien
ttgagtttttccttcctctttgtgtactctcca

SEQ ID NO: 648281 - DNA, 33 bp, Homo sapien
gtttatgtacttcagcaccctcttttgccgtaa

SEQ ID NO: 648282 - DNA, 33 bp, Homo sapien
gtttatgtacttcagcgccctcttttgccgtaa

SEQ ID NO: 648283 - DNA, 33 bp, Homo sapien
aaaatggccctgttgaagcacgtagatgccttg

SEQ ID NO: 648284 - DNA, 33 bp, Homo sapien
aaaatggccctgttgaggcacgtagatgccttg

SEQ ID NO: 648285 - DNA, 33 bp, Homo sapien
catgcatacacagagaagtctatttctagcccg

SEQ ID NO: 648286 - DNA, 33 bp, Homo sapien
catgcatacacagagaggtctatttctagcccg

SEQ ID NO: 648287 - DNA, 33 bp, Homo sapien
ggaatcctgagcataaccttgcaaaatcagtca

SEQ ID NO: 648288 - DNA, 33 bp, Homo sapien
ggaatcctgagcataatcttgcaaaatcagtca

SEQ ID NO: 648289 - DNA, 33 bp, Homo sapien
tttcttaggatcataaagatagcttattctatc

SEQ ID NO: 648290 - DNA, 33 bp, Homo sapien
tttcttaggatcataatgatagcttattctatc

SEQ ID NO: 648291 - DNA, 33 bp, Homo sapien
gtattttgaaagccataagtttgggacactatc

SEQ ID NO: 648292 - DNA, 33 bp, Homo sapien
gtattttgaaagccattagtttgggacactatc

SEQ ID NO: 648293 - DNA, 33 bp, Homo sapien
accagatcctctgacaatagtctaagggagata

SEQ ID NO: 648294 - DNA, 33 bp, Homo sapien
accagatcctctgacagtagtctaagggagata

SEQ ID NO: 648295 - DNA, 33 bp, Homo sapien
taatacaaagaaactaaagtatgcttcttagcc

SEQ ID NO: 648296 - DNA, 33 bp, Homo sapien
taatacaaagaaactagagtatgcttcttagcc

SEQ ID NO: 648297 - DNA, 33 bp, Homo sapien
tggtttctgcagactactagctttaaaggaaag

SEQ ID NO: 648298 - DNA, 33 bp, Homo sapien
tggtttctgcagactattagctttaaaggaaag

SEQ ID NO: 648299 - DNA, 33 bp, Homo sapien
gagtattgactacaaccccaggctggttttcct

SEQ ID NO: 648300 - DNA, 33 bp, Homo sapien
gagtattgactacaactccaggctggttttcct

SEQ ID NO: 648301 - DNA, 33 bp, Homo sapien
ttaagcttatttggcaaagatgttttattcatg

SEQ ID NO: 648302 - DNA, 33 bp, Homo sapien
ttaagcttatttggcagagatgttttattcatg

SEQ ID NO: 648303 - DNA, 33 bp, Homo sapien
tgtctacagaaatacaatggtagagctcaggaa

SEQ ID NO: 648304 - DNA, 33 bp, Homo sapien
tgtctacagaaatacagtggtagagctcaggaa

SEQ ID NO: 648305 - DNA, 33 bp, Homo sapien
tgacccaagccagctgcatgtagaccacatcca

SEQ ID NO: 648306 - DNA, 33 bp, Homo sapien
tgacccaagccagctgtatgtagaccacatcca

SEQ ID NO: 648307 - DNA, 33 bp, Homo sapien
tgccatggactccaggaagctactaatactggt

SEQ ID NO: 648308 - DNA, 33 bp, Homo sapien
tgccatggactccaggcagctactaatactggt

SEQ ID NO: 648309 - DNA, 33 bp, Homo sapien
agctgcttggttttgaaggttgtgtgaaatctg

SEQ ID NO: 648310 - DNA, 33 bp, Homo sapien
agctgcttggttttgagggttgtgtgaaatctg

SEQ ID NO: 648311 - DNA, 33 bp, Homo sapien
taattcaacatggtaccgcaagtcctagcaaaa

SEQ ID NO: 648312 - DNA, 33 bp, Homo sapien
taattcaacatggtactgcaagtcctagcaaaa

SEQ ID NO: 648313 - DNA, 33 bp, Homo sapien
ataaaaccatgccatacgcagagaggaacaatt

SEQ ID NO: 648314 - DNA, 33 bp, Homo sapien
ataaaaccatgccatatgcagagaggaacaatt

SEQ ID NO: 648315 - DNA, 33 bp, Homo sapien
aaaattgcaatagctcactgtcaatggatccaa

SEQ ID NO: 648316 - DNA, 33 bp, Homo sapien
aaaattgcaatagctcgctgtcaatggatccaa

SEQ ID NO: 648317 - DNA, 33 bp, Homo sapien; identical to SEQ ID NO: 648315

SEQ ID NO: 648318 - DNA, 33 bp, Homo sapien; identical to SEQ ID NO: 648316

SEQ ID NO: 648319 - DNA, 33 bp, Homo sapien
tgactgccaatctgaccgcttaataccatttta

SEQ ID NO: 648320 - DNA, 33 bp, Homo sapien
tgactgccaatctgactgcttaataccatttta

SEQ ID NO: 648321 - DNA, 33 bp, Homo sapien
atagttaatatcaggaaactttatcaataaata

SEQ ID NO: 648322 - DNA, 33 bp, Homo sapien
atagttaatatcaggacactttatcaataaata

SEQ ID NO: 648323 - DNA, 33 bp, Homo sapien
tgttggaaagatggtacggatagacttgtttga

SEQ ID NO: 648324 - DNA, 33 bp, Homo sapien
tgttggaaagatggtatggatagacttgtttga

SEQ ID NO: 648325 - DNA, 33 bp, Homo sapien
aagtgagtggtcaaaaagttcaactgacttcag

SEQ ID NO: 648326 - DNA, 33 bp, Homo sapien
aagtgagtggtcaaaatgttcaactgacttcag

SEQ ID NO: 648327 - DNA, 33 bp, Homo sapien
ctaagattcaaaattaagcatcctgattccaga

SEQ ID NO: 648328 - DNA, 33 bp, Homo sapien
ctaagattcaaaattaggcatcctgattccaga

SEQ ID NO: 648329 - DNA, 33 bp, Homo sapien
ttggggcaaggtataaaagaaagacattaacca

SEQ ID NO: 648330 - DNA, 33 bp, Homo sapien
ttggggcaaggtataagagaaagacattaacca

SEQ ID NO: 648331 - DNA, 33 bp, Homo sapien
tttccagtaattgcacaaattttagataacact

SEQ ID NO: 648332 - DNA, 33 bp, Homo sapien
tttccagtaattgcaccaattttagataacact

SEQ ID NO: 648333 - DNA, 33 bp, Homo sapien
aaaataggtcaatggcagaacagaaaaatatga

SEQ ID NO: 648334 - DNA, 33 bp, Homo sapien
aaaataggtcaatggcggaacagaaaaatatga

SEQ ID NO: 648335 - DNA, 33 bp, Homo sapien
tactcctcaggctgcactgattttcagctaaaa

SEQ ID NO: 648336 - DNA, 33 bp, Homo sapien
tactcctcaggctgcattgattttcagctaaaa

SEQ ID NO: 648337 - DNA, 33 bp, Homo sapien
tatacactgacagcgacgaagatgaaactcaaa

SEQ ID NO: 648338 - DNA, 33 bp, Homo sapien
tatacactgacagcgatgaagatgaaactcaaa

SEQ ID NO: 648339 - DNA, 33 bp, Homo sapien
attaaccttgaggacacaaggctgattgaaata

SEQ ID NO: 648340 - DNA, 33 bp, Homo sapien
attaaccttgaggacataaggctgattgaaata

SEQ ID NO: 648341 - DNA, 33 bp, Homo sapien
aagttctgtgctctcaatatttctctcaagacc

SEQ ID NO: 648342 - DNA, 33 bp, Homo sapien
aagttctgtgctctcagtatttctctcaagacc

SEQ ID NO: 648343 - DNA, 33 bp, Homo sapien
tgcagctttgctaacacgtaaaatcaatatctg

SEQ ID NO: 648344 - DNA, 33 bp, Homo sapien
tgcagctttgctaacatgtaaaatcaatatctg

SEQ ID NO: 648345 - DNA, 33 bp, Homo sapien
tgtctgcatcatattacactaggatttcaaatt

SEQ ID NO: 648346 - DNA, 33 bp, Homo sapien
tgtctgcatcatattatactaggatttcaaatt

SEQ ID NO: 648347 - DNA, 33 bp, Homo sapien
caaatttcttaacctaacaactctgcatcaaga

SEQ ID NO: 648348 - DNA, 33 bp, Homo sapien
caaatttcttaacctaccaactctgcatcaaga

SEQ ID NO: 648349 - DNA, 33 bp, Homo sapien
caatgtactagaagcaaagatagtggcaaatgt

SEQ ID NO: 648350 - DNA, 33 bp, Homo sapien
caatgtactagaagcagagatagtggcaaatgt

SEQ ID NO: 648351 - DNA, 33 bp, Homo sapien
tgtcagcaacaaagaaagaagtgttaatgatag

SEQ ID NO: 648352 - DNA, 33 bp, Homo sapien
tgtcagcaacaaagaaggaagtgttaatgatag

SEQ ID NO: 648353 - DNA, 33 bp, Homo sapien
aggcagataatcgaccagggctgaaaataaggg

SEQ ID NO: 648354 - DNA, 33 bp, Homo sapien
aggcagataatcgaccggggctgaaaataaggg

SEQ ID NO: 648355 - DNA, 33 bp, Homo sapien
ttctatttggaaacaaccattgtaatatttgag

SEQ ID NO: 648356 - DNA, 33 bp, Homo sapien
ttctatttggaaacaatcattgtaatatttgag

SEQ ID NO: 648357 - DNA, 33 bp, Homo sapien
ttccagattcgagtggaagggaattagatccca

SEQ ID NO: 648358 - DNA, 33 bp, Homo sapien
ttccagattcgagtggtagggaattagatccca

SEQ ID NO: 648359 - DNA, 33 bp, Homo sapien
ccattttcctaagaaacgtgtgtatgaaatgcc

SEQ ID NO: 648360 - DNA, 33 bp, Homo sapien
ccattttcctaagaaatgtgtgtatgaaatgcc

SEQ ID NO: 648361 - DNA, 33 bp, Homo sapien
aagtatcaagtgaaagaaggaaagagtggtaaa

SEQ ID NO: 648362 - DNA, 33 bp, Homo sapien
aagtatcaagtgaaaggaggaaagagtggtaaa

SEQ ID NO: 648363 - DNA, 33 bp, Homo sapien
agcaaccattttgtgaataagactctgaaagtc

SEQ ID NO: 648364 - DNA, 33 bp, Homo sapien
agcaaccattttgtgactaagactctgaaagtc

SEQ ID NO: 648365 - DNA, 33 bp, Homo sapien
gtacaagttctttaacagagcataaaaagacca

SEQ ID NO: 648366 - DNA, 33 bp, Homo sapien
gtacaagttctttaaccgagcataaaaagacca

SEQ ID NO: 648367 - DNA, 33 bp, Homo sapien
gttaatatctgagggacctttttttacatatga

SEQ ID NO: 648368 - DNA, 33 bp, Homo sapien
gttaatatctgagggagctttttttacatatga

SEQ ID NO: 648369 - DNA, 33 bp, Homo sapien
ctcttttcctctactaatacagggtccactggt

SEQ ID NO: 648370 - DNA, 33 bp, Homo sapien
ctcttttcctctactattacagggtccactggt

SEQ ID NO: 648371 - DNA, 33 bp, Homo sapien
aagttactctttgagaagcactgactcaaagca

SEQ ID NO: 648372 - DNA, 33 bp, Homo sapien
aagttactctttgagaggcactgactcaaagca

SEQ ID NO: 648373 - DNA, 33 bp, Homo sapien
cagtctttgccctcaaaggatgcaaattaaggt

SEQ ID NO: 648374 - DNA, 33 bp, Homo sapien
cagtctttgccctcaagggatgcaaattaaggt

SEQ ID NO: 648375 - DNA, 33 bp, Homo sapien
ttagcaactaactgaccctgaaagcaagtatat

SEQ ID NO: 648376 - DNA, 33 bp, Homo sapien
ttagcaactaactgactctgaaagcaagtatat

SEQ ID NO: 648377 - DNA, 33 bp, Homo sapien
atgttttcaccatacactaaatttcacttttct

SEQ ID NO: 648378 - DNA, 33 bp, Homo sapien
atgttttcaccatacagtaaatttcacttttct

SEQ ID NO: 648379 - DNA, 33 bp, Homo sapien
taggtcaccattaacacctacttttgcagtaac

SEQ ID NO: 648380 - DNA, 33 bp, Homo sapien
taggtcaccattaacatctacttttgcagtaac

SEQ ID NO: 648381 - DNA, 33 bp, Homo sapien
atgtgtctggagttgaaaactattgtaactagg

SEQ ID NO: 648382 - DNA, 33 bp, Homo sapien
atgtgtctggagttgagaactattgtaactagg

SEQ ID NO: 648383 - DNA, 33 bp, Homo sapien
ctgaattttaagaaagactaggtgattcatatg

SEQ ID NO: 648384 - DNA, 33 bp, Homo sapien
ctgaattttaagaaagtctaggtgattcatatg

SEQ ID NO: 648385 - DNA, 33 bp, Homo sapien
gctgactctgagatcactataatggcaagactt

SEQ ID NO: 648386 - DNA, 33 bp, Homo sapien
gctgactctgagatcattataatggcaagactt

SEQ ID NO: 648387 - DNA, 33 bp, Homo sapien
agtgtaccagggaaaccgaaataattcacggat

SEQ ID NO: 648388 - DNA, 33 bp, Homo sapien
agtgtaccagggaaactgaaataattcacggat

SEQ ID NO: 648389 - DNA, 33 bp, Homo sapien
aaagactaaattacaacggtcatataggaaaat

SEQ ID NO: 648390 - DNA, 33 bp, Homo sapien
aaagactaaattacaagggtcatataggaaaat

SEQ ID NO: 648391 - DNA, 33 bp, Homo sapien
cagaaggctgggaaataagatatactcgtgaag

SEQ ID NO: 648392 - DNA, 33 bp, Homo sapien
cagaaggctgggaaattagatatactcgtgaag

SEQ ID NO: 648393 - DNA, 33 bp, Homo sapien; identical to SEQ ID NO: 648391

SEQ ID NO: 648394 - DNA, 33 bp, Homo sapien; identical to SEQ ID NO: 648392

SEQ ID NO: 648395 - DNA, 33 bp, Homo sapien
tttatgtatattggcaagtattcagtaatctta

SEQ ID NO: 648396 - DNA, 33 bp, Homo sapien
tttatgtatattggcatgtattcagtaatctta

SEQ ID NO: 648397 - DNA, 33 bp, Homo sapien
tcataaggcaaagttcacctgtcctaattgctg

SEQ ID NO: 648398 - DNA, 33 bp, Homo sapien
tcataaggcaaagttcccctgtcctaattgctg

SEQ ID NO: 648399 - DNA, 33 bp, Homo sapien
atttatagatgtgcaacaaactgcctaccttct

SEQ ID NO: 648400 - DNA, 33 bp, Homo sapien
atttatagatgtgcaataaactgcctaccttct

SEQ ID NO: 648401 - DNA, 33 bp, Homo sapien
agaagttgtcatctatgagaaagcaagccttct

SEQ ID NO: 648402 - DNA, 33 bp, Homo sapien
agaagttgtcatctattagaaagcaagccttct

SEQ ID NO: 648403 - DNA, 33 bp, Homo sapien
ttttgtgaatgagtatcaagctgtcaactgaaa

SEQ ID NO: 648404 - DNA, 33 bp, Homo sapien
ttttgtgaatgagtattaagctgtcaactgaaa

SEQ ID NO: 648405 - DNA, 33 bp, Homo sapien
ataaaatagcatatgaaaacacaccaaaaatca

SEQ ID NO: 648406 - DNA, 33 bp, Homo sapien
ataaaatagcatatgagaacacaccaaaaatca

SEQ ID NO: 648407 - DNA, 33 bp, Homo sapien
aaataggacaatacagaccctccagaagggtac

SEQ ID NO: 648408 - DNA, 33 bp, Homo sapien
aaataggacaatacaggccctccagaagggtac

SEQ ID NO: 648409 - DNA, 33 bp, Homo sapien
tctctaaactgactcaaaaactgcctctcttgc

SEQ ID NO: 648410 - DNA, 33 bp, Homo sapien
tctctaaactgactcacaaactgcctctcttgc

SEQ ID NO: 648411 - DNA, 33 bp, Homo sapien
catactgacggggctgaaaaaatgagcgcattg

SEQ ID NO: 648412 - DNA, 33 bp, Homo sapien
catactgacggggctgcaaaaatgagcgcattg

SEQ ID NO: 648413 - DNA, 33 bp, Homo sapien
taaatgctctattctaccaaacaaatacatcac

SEQ ID NO: 648414 - DNA, 33 bp, Homo sapien
taaatgctctattctatcaaacaaatacatcac

SEQ ID NO: 648415 - DNA, 33 bp, Homo sapien
agaaccaacagctgacagcaagggaggagtgaa

SEQ ID NO: 648416 - DNA, 33 bp, Homo sapien
agaaccaacagctgacggcaagggaggagtgaa

SEQ ID NO: 648417 - DNA, 33 bp, Homo sapien
cttctctcccaagaaacgtaatgctaagaaatg

SEQ ID NO: 648418 - DNA, 33 bp, Homo sapien
cttctctcccaagaaaggtaatgctaagaaatg

SEQ ID NO: 648419 - DNA, 33 bp, Homo sapien
ggttatttgccattcactctttatctagagtct

SEQ ID NO: 648420 - DNA, 33 bp, Homo sapien
ggttatttgccattcattctttatctagagtct

SEQ ID NO: 648421 - DNA, 33 bp, Homo sapien
ttttcatgtaaatgaactctgcaggtaaacttg

SEQ ID NO: 648422 - DNA, 33 bp, Homo sapien
ttttcatgtaaatgaattctgcaggtaaacttg

SEQ ID NO: 648423 - DNA, 33 bp, Homo sapien
atagctgtctttaccaatattctgcatcatttc

SEQ ID NO: 648424 - DNA, 33 bp, Homo sapien
atagctgtctttaccagtattctgcatcatttc

SEQ ID NO: 648425 - DNA, 33 bp, Homo sapien
cataaatatcttacctaactaaagcacctgtgt

SEQ ID NO: 648426 - DNA, 33 bp, Homo sapien
cataaatatcttacctgactaaagcacctgtgt

SEQ ID NO: 648427 - DNA, 33 bp, Homo sapien
tatgctgttggacagacggacaagtgagagatt

SEQ ID NO: 648428 - DNA, 33 bp, Homo sapien
tatgctgttggacagatggacaagtgagagatt

SEQ ID NO: 648429 - DNA, 33 bp, Homo sapien
agccaccatcatattaaacccgaatacagcaac

SEQ ID NO: 648430 - DNA, 33 bp, Homo sapien
agccaccatcatattatacccgaatacagcaac

SEQ ID NO: 648431 - DNA, 33 bp, Homo sapien
ctcttcacatctaatacggcaacaaatcccgat

SEQ ID NO: 648432 - DNA, 33 bp, Homo sapien
ctcttcacatctaatatggcaacaaatcccgat

SEQ ID NO: 648433 - DNA, 33 bp, Homo sapien
aacttaataaatgataacactctccagccaatc

SEQ ID NO: 648434 - DNA, 33 bp, Homo sapien
aacttaataaatgataccactctccagccaatc

SEQ ID NO: 648435 - DNA, 33 bp, Homo sapien
attccttttcatgaaacagttggttgatcaaag

SEQ ID NO: 648436 - DNA, 33 bp, Homo sapien
attccttttcatgaaatagttggttgatcaaag

SEQ ID NO: 648437 - DNA, 33 bp, Homo sapien
gtcagaagaggtatgacctgaagaaagaattac

SEQ ID NO: 648438 - DNA, 33 bp, Homo sapien
gtcagaagaggtatgagctgaagaaagaattac

SEQ ID NO: 648439 - DNA, 33 bp, Homo sapien
tacctgcagcatgagaaagtaattcatctttgt

SEQ ID NO: 648440 - DNA, 33 bp, Homo sapien
tacctgcagcatgagagagtaattcatctttgt

SEQ ID NO: 648441 - DNA, 33 bp, Homo sapien
aaaaataagaaaactgaaggctgtccaggtcct

SEQ ID NO: 648442 - DNA, 33 bp, Homo sapien
aaaaataagaaaactgcaggctgtccaggtcct

SEQ ID NO: 648443 - DNA, 33 bp, Homo sapien
gatgagaaagtttaataagtgttgctagtacaa

SEQ ID NO: 648444 - DNA, 33 bp, Homo sapien
gatgagaaagtttaattagtgttgctagtacaa

SEQ ID NO: 648445 - DNA, 33 bp, Homo sapien
ttgtgataatttattaagaagcaaagtaaaaca

SEQ ID NO: 648446 - DNA, 33 bp, Homo sapien
ttgtgataatttattatgaagcaaagtaaaaca

SEQ ID NO: 648447 - DNA, 33 bp, Homo sapien
aacaggtagtaagggtcaagacatggctctgtt

SEQ ID NO: 648448 - DNA, 33 bp, Homo sapien
aacaggtagtaagggtgaagacatggctctgtt

SEQ ID NO: 648449 - DNA, 33 bp, Homo sapien
cacacactcatctccgaataatacattccacac

SEQ ID NO: 648450 - DNA, 33 bp, Homo sapien
cacacactcatctccggataatacattccacac

SEQ ID NO: 648451 - DNA, 33 bp, Homo sapien
gatggatattttagtcaaaagctcagattgaga

SEQ ID NO: 648452 - DNA, 33 bp, Homo sapien
gatggatattttagtcgaaagctcagattgaga

SEQ ID NO: 648453 - DNA, 33 bp, Homo sapien
ttatttacccaagaatcactcaggagcaggttg

SEQ ID NO: 648454 - DNA, 33 bp, Homo sapien
ttatttacccaagaatgactcaggagcaggttg

SEQ ID NO: 648455 - DNA, 33 bp, Homo sapien
ttctttttatatctgaagtgacatattgctagg

SEQ ID NO: 648456 - DNA, 33 bp, Homo sapien
ttctttttatatctgaggtgacatattgctagg

SEQ ID NO: 648457 - DNA, 33 bp, Homo sapien
atcattattaaaatccactaactctgaaattca

SEQ ID NO: 648458 - DNA, 33 bp, Homo sapien
atcattattaaaatcctctaactctgaaattca

SEQ ID NO: 648459 - DNA, 33 bp, Homo sapien
aatcaaatcagatggcaagaatgagaaatattg

SEQ ID NO: 648460 - DNA, 33 bp, Homo sapien
aatcaaatcagatggcgagaatgagaaatattg

SEQ ID NO: 648461 - DNA, 33 bp, Homo sapien
tatacctgactagctccaaagcatgtgcataat

SEQ ID NO: 648462 - DNA, 33 bp, Homo sapien
tatacctgactagctctaaagcatgtgcataat

SEQ ID NO: 648463 - DNA, 33 bp, Homo sapien
gtttagttgatatgtacactgctgtcaataata

SEQ ID NO: 648464 - DNA, 33 bp, Homo sapien
gtttagttgatatgtatactgctgtcaataata

SEQ ID NO: 648465 - DNA, 33 bp, Homo sapien
cacatttcattgcccaaagtaactaatgaccaa

SEQ ID NO: 648466 - DNA, 33 bp, Homo sapien
cacatttcattgcccagagtaactaatgaccaa

SEQ ID NO: 648467 - DNA, 33 bp, Homo sapien
gtacctctggtgtttacggtgacattaaaagag

SEQ ID NO: 648468 - DNA, 33 bp, Homo sapien
gtacctctggtgtttatggtgacattaaaagag

SEQ ID NO: 648469 - DNA, 33 bp, Homo sapien
cctgaatgaaaaggagaatctatgttcctgtga

SEQ ID NO: 648470 - DNA, 33 bp, Homo sapien
cctgaatgaaaaggaggatctatgttcctgtga

SEQ ID NO: 648471 - DNA, 33 bp, Homo sapien
tgacaatcctggttgactacttcttttcaagct

SEQ ID NO: 648472 - DNA, 33 bp, Homo sapien
tgacaatcctggttgattacttcttttcaagct

SEQ ID NO: 648473 - DNA, 33 bp, Homo sapien
aaaccacaagctgagaaagagatgctcatttgg

SEQ ID NO: 648474 - DNA, 33 bp, Homo sapien
aaaccacaagctgagagagagatgctcatttgg

SEQ ID NO: 648475 - DNA, 33 bp, Homo sapien
ttacatagcggcaaacaaaagagagtcagaatc

SEQ ID NO: 648476 - DNA, 33 bp, Homo sapien
ttacatagcggcaaacgaaagagagtcagaatc

SEQ ID NO: 648477 - DNA, 33 bp, Homo sapien
ttgtagatagtaaatacgccacaactagtaaac

SEQ ID NO: 648478 - DNA, 33 bp, Homo sapien
ttgtagatagtaaatatgccacaactagtaaac

SEQ ID NO: 648479 - DNA, 33 bp, Homo sapien
acaaaaagagaggtaaatcagataagcacaatc

SEQ ID NO: 648480 - DNA, 33 bp, Homo sapien
acaaaaagagaggtaattcagataagcacaatc

SEQ ID NO: 648481 - DNA, 33 bp, Homo sapien
cactagacttactgaagattatgctagaggatg

SEQ ID NO: 648482 - DNA, 33 bp, Homo sapien
cactagacttactgaatattatgctagaggatg

SEQ ID NO: 648483 - DNA, 33 bp, Homo sapien
tcagtggtgttttgatcaatgtttaacaattgg

SEQ ID NO: 648484 - DNA, 33 bp, Homo sapien
tcagtggtgttttgatgaatgtttaacaattgg

SEQ ID NO: 648485 - DNA, 33 bp, Homo sapien
gaagaggacacatgtaagttctttggtagagcc

SEQ ID NO: 648486 - DNA, 33 bp, Homo sapien
gaagaggacacatgtaggttctttggtagagcc

SEQ ID NO: 648487 - DNA, 33 bp, Homo sapien
gcctcaggaagattccaattatagtggaagcta

SEQ ID NO: 648488 - DNA, 33 bp, Homo sapien
gcctcaggaagattcccattatagtggaagcta

SEQ ID NO: 648489 - DNA, 33 bp, Homo sapien
attcaaatagttcaaaatggtacatgatgacag

SEQ ID NO: 648490 - DNA, 33 bp, Homo sapien
attcaaatagttcaaattggtacatgatgacag

SEQ ID NO: 648491 - DNA, 33 bp, Homo sapien
atttcttatcagtgagaatttaggttgctttta

SEQ ID NO: 648492 - DNA, 33 bp, Homo sapien
atttcttatcagtgagcatttaggttgctttta

SEQ ID NO: 648493 - DNA, 33 bp, Homo sapien
tttgccattttaatgacgaatattagccaggtt

SEQ ID NO: 648494 - DNA, 33 bp, Homo sapien
tttgccattttaatgatgaatattagccaggtt

SEQ ID NO: 648495 - DNA, 33 bp, Homo sapien
ctataaagaaatgcctcagacggggtaattata

SEQ ID NO: 648496 - DNA, 33 bp, Homo sapien
ctataaagaaatgcctgagacggggtaattata

SEQ ID NO: 648497 - DNA, 33 bp, Homo sapien
ctacccacttttcaacaaccagattttgtgaga

SEQ ID NO: 648498 - DNA, 33 bp, Homo sapien
ctacccacttttcaacgaccagattttgtgaga

SEQ ID NO: 648499 - DNA, 33 bp, Homo sapien
ctatttggagatagagcctttcaagaaatgact

SEQ ID NO: 648500 - DNA, 33 bp, Homo sapien
ctatttggagatagaggctttcaagaaatgact

SEQ ID NO: 648501 - DNA, 33 bp, Homo sapien
ctcaggttatcatcaaacaggatgaggagggtt

SEQ ID NO: 648502 - DNA, 33 bp, Homo sapien
ctcaggttatcatcaagcaggatgaggagggtt

SEQ ID NO: 648503 - DNA, 33 bp, Homo sapien
acctgtatttagtagacgttcactgacaataat

SEQ ID NO: 648504 - DNA, 33 bp, Homo sapien
acctgtatttagtagatgttcactgacaataat

SEQ ID NO: 648505 - DNA, 33 bp, Homo sapien
ttgtaaaggcttgggaacatataatgaaaaaga

SEQ ID NO: 648506 - DNA, 33 bp, Homo sapien
ttgtaaaggcttgggatcatataatgaaaaaga

SEQ ID NO: 648507 - DNA, 33 bp, Homo sapien
tccaggacctgtctaacgaaacaatgaattaat

SEQ ID NO: 648508 - DNA, 33 bp, Homo sapien
tccaggacctgtctaatgaaacaatgaattaat

SEQ ID NO: 648509 - DNA, 33 bp, Homo sapien
tgctgactgtttcctacgccagatttccaaata

SEQ ID NO: 648510 - DNA, 33 bp, Homo sapien
tgctgactgtttcctatgccagatttccaaata

SEQ ID NO: 648511 - DNA, 33 bp, Homo sapien
actgtacaagagtttacaaggtattcagatcca

SEQ ID NO: 648512 - DNA, 33 bp, Homo sapien
actgtacaagagtttataaggtattcagatcca

SEQ ID NO: 648513 - DNA, 33 bp, Homo sapien
tcccaggtctaagaaacaacctcacaggccact

SEQ ID NO: 648514 - DNA, 33 bp, Homo sapien
tcccaggtctaagaaataacctcacaggccact

SEQ ID NO: 648515 - DNA, 33 bp, Homo sapien
aagtatctcctttccaatgaagtctaccctaac

SEQ ID NO: 648516 - DNA, 33 bp, Homo sapien
aagtatctcctttccagtgaagtctaccctaac

SEQ ID NO: 648517 - DNA, 33 bp, Homo sapien
cagagggaatagccaacgcaaaggcctttagag

SEQ ID NO: 648518 - DNA, 33 bp, Homo sapien
cagagggaatagccaatgcaaaggcctttagag

SEQ ID NO: 648519 - DNA, 33 bp, Homo sapien
atacaggactctattcaatatctttaactacaa

SEQ ID NO: 648520 - DNA, 33 bp, Homo sapien
atacaggactctattctatatctttaactacaa

SEQ ID NO: 648521 - DNA, 33 bp, Homo sapien
ggggtgagattttatccagttgtagttttgatt

SEQ ID NO: 648522 - DNA, 33 bp, Homo sapien
ggggtgagattttatcgagttgtagttttgatt

SEQ ID NO: 648523 - DNA, 33 bp, Homo sapien
ttgctgaacaacactccataaaagcaaatctaa

SEQ ID NO: 648524 - DNA, 33 bp, Homo sapien
ttgctgaacaacactctataaaagcaaatctaa

SEQ ID NO: 648525 - DNA, 33 bp, Homo sapien
tgcagtaggtgtaccacagtattgcttctcttg

SEQ ID NO: 648526 - DNA, 33 bp, Homo sapien
tgcagtaggtgtaccatagtattgcttctcttg

SEQ ID NO: 648527 - DNA, 33 bp, Homo sapien
gtactggaagtgtcacaaaatggaagttctctt

SEQ ID NO: 648528 - DNA, 33 bp, Homo sapien
gtactggaagtgtcacgaaatggaagttctctt

SEQ ID NO: 648529 - DNA, 33 bp, Homo sapien
gtacagttctgtacaactcagtcctcattttaa

SEQ ID NO: 648530 - DNA, 33 bp, Homo sapien
gtacagttctgtacaattcagtcctcattttaa

SEQ ID NO: 648531 - DNA, 33 bp, Homo sapien
ttatgtttggctttacaaaggccagatttttta

SEQ ID NO: 648532 - DNA, 33 bp, Homo sapien
ttatgtttggctttactaaggccagatttttta

SEQ ID NO: 648533 - DNA, 33 bp, Homo sapien
aggacgatgtcacttgaaatatgcaatactact

SEQ ID NO: 648534 - DNA, 33 bp, Homo sapien
aggacgatgtcacttggaatatgcaatactact

SEQ ID NO: 648535 - DNA, 33 bp, Homo sapien
aggcaccctctgtggcaccagtgttttactaac

SEQ ID NO: 648536 - DNA, 33 bp, Homo sapien
aggcaccctctgtggcgccagtgttttactaac

SEQ ID NO: 648537 - DNA, 33 bp, Homo sapien
ccacagagggtgcctaggtctgtcctgaacaca

SEQ ID NO: 648538 - DNA, 33 bp, Homo sapien
ccacagagggtgcctatgtctgtcctgaacaca

SEQ ID NO: 648539 - DNA, 33 bp, Homo sapien
tggaggagattcaaatcaaaggaaaagaagtta

SEQ ID NO: 648540 - DNA, 33 bp, Homo sapien
tggaggagattcaaattaaaggaaaagaagtta

SEQ ID NO: 648541 - DNA, 33 bp, Homo sapien
ctcaactgatcattgccaattgctattccctgt

SEQ ID NO: 648542 - DNA, 33 bp, Homo sapien
ctcaactgatcattgctaattgctattccctgt

SEQ ID NO: 648543 - DNA, 33 bp, Homo sapien
acattcattcacttgaaaaatacaggcaatgag

SEQ ID NO: 648544 - DNA, 33 bp, Homo sapien
acattcattcacttgagaaatacaggcaatgag

SEQ ID NO: 648545 - DNA, 33 bp, Homo sapien
gctctttgttctgaaagtcaagaccttcctaaa

SEQ ID NO: 648546 - DNA, 33 bp, Homo sapien
gctctttgttctgaaattcaagaccttcctaaa

SEQ ID NO: 648547 - DNA, 33 bp, Homo sapien
atgttgagaatgagaacagcacggagggagtat

SEQ ID NO: 648548 - DNA, 33 bp, Homo sapien
atgttgagaatgagaatagcacggagggagtat

SEQ ID NO: 648549 - DNA, 33 bp, Homo sapien
atgtatacccttggaagtgtgactacaaaatag

SEQ ID NO: 648550 - DNA, 33 bp, Homo sapien
atgtatacccttggaattgtgactacaaaatag

SEQ ID NO: 648551 - DNA, 33 bp, Homo sapien
gatgagtgtagctgaaacatagttgtcaaggga

SEQ ID NO: 648552 - DNA, 33 bp, Homo sapien
gatgagtgtagctgaagcatagttgtcaaggga

SEQ ID NO: 648553 - DNA, 33 bp, Homo sapien
aacagctggaagtccaaagcaatggggaaggca

SEQ ID NO: 648554 - DNA, 33 bp, Homo sapien
aacagctggaagtccagagcaatggggaaggca

SEQ ID NO: 648555 - DNA, 33 bp, Homo sapien
cgttcttcatgttttcaaagaagtttacagccc

SEQ ID NO: 648556 - DNA, 33 bp, Homo sapien
cgttcttcatgttttcgaagaagtttacagccc

SEQ ID NO: 648557 - DNA, 33 bp, Homo sapien
gaatatatgagtgaagcccaaaaaagagaaagc

SEQ ID NO: 648558 - DNA, 33 bp, Homo sapien
gaatatatgagtgaaggccaaaaaagagaaagc

SEQ ID NO: 648559 - DNA, 33 bp, Homo sapien
atcaccacttacacaaaaacaggttcaaacaga

SEQ ID NO: 648560 - DNA, 33 bp, Homo sapien
atcaccacttacacaagaacaggttcaaacaga

SEQ ID NO: 648561 - DNA, 33 bp, Homo sapien
tctcattgggccagaaatagctttttaaaaatg

SEQ ID NO: 648562 - DNA, 33 bp, Homo sapien
tctcattgggccagaagtagctttttaaaaatg

SEQ ID NO: 648563 - DNA, 33 bp, Homo sapien
tcgagatctaattagaactctcttctaggaaca

SEQ ID NO: 648564 - DNA, 33 bp, Homo sapien
tcgagatctaattagagctctcttctaggaaca

SEQ ID NO: 648565 - DNA, 33 bp, Homo sapien
aagcagctctgaactgaaaactcaatgaagtgg

SEQ ID NO: 648566 - DNA, 33 bp, Homo sapien
aagcagctctgaactggaaactcaatgaagtgg

SEQ ID NO: 648567 - DNA, 33 bp, Homo sapien
tttcagttctaacctaccttgtcaaatgagttg

SEQ ID NO: 648568 - DNA, 33 bp, Homo sapien
tttcagttctaacctatcttgtcaaatgagttg

SEQ ID NO: 648569 - DNA, 33 bp, Homo sapien
tgtttctgtaattagcaaaagatgatgggggtg

SEQ ID NO: 648570 - DNA, 33 bp, Homo sapien
tgtttctgtaattagcgaaagatgatgggggtg

SEQ ID NO: 648571 - DNA, 33 bp, Homo sapien
accattatgagaccccaaaattcaattgggcaa

SEQ ID NO: 648572 - DNA, 33 bp, Homo sapien
accattatgagaccccgaaattcaattgggcaa

SEQ ID NO: 648573 - DNA, 33 bp, Homo sapien
ctttggattactttggacaacgttctttaatct

SEQ ID NO: 648574 - DNA, 33 bp, Homo sapien
ctttggattactttgggcaacgttctttaatct

SEQ ID NO: 648575 - DNA, 33 bp, Homo sapien
atatctttccaaataaaaaatggctgtggtcag

SEQ ID NO: 648576 - DNA, 33 bp, Homo sapien
atatctttccaaataacaaatggctgtggtcag

SEQ ID NO: 648577 - DNA, 33 bp, Homo sapien
agttgaagaatatagacatgtaggcatttcaac

SEQ ID NO: 648578 - DNA, 33 bp, Homo sapien
agttgaagaatatagagatgtaggcatttcaac

SEQ ID NO: 648579 - DNA, 33 bp, Homo sapien
tagaactgcaattaaacatgcatcacatttaca

SEQ ID NO: 648580 - DNA, 33 bp, Homo sapien
tagaactgcaattaaatatgcatcacatttaca

SEQ ID NO: 648581 - DNA, 33 bp, Homo sapien
agactcttttccgatacgaatatgaagggaagt

SEQ ID NO: 648582 - DNA, 33 bp, Homo sapien
agactcttttccgatatgaatatgaagggaagt

SEQ ID NO: 648583 - DNA, 33 bp, Homo sapien
caaaatagtcaactccgattctctacgtgtgta

SEQ ID NO: 648584 - DNA, 33 bp, Homo sapien
caaaatagtcaactcctattctctacgtgtgta

SEQ ID NO: 648585 - DNA, 33 bp, Homo sapien
gggatgcatatatactcaagctgcttttacttt

SEQ ID NO: 648586 - DNA, 33 bp, Homo sapien
gggatgcatatatactgaagctgcttttacttt

SEQ ID NO: 648587 - DNA, 33 bp, Homo sapien
tgaggaatgtacaggaagacaataaataagtat

SEQ ID NO: 648588 - DNA, 33 bp, Homo sapien
tgaggaatgtacaggaggacaataaataagtat

SEQ ID NO: 648589 - DNA, 33 bp, Homo sapien
atgtggtattgtgtgacgtagagaagtaatctt

SEQ ID NO: 648590 - DNA, 33 bp, Homo sapien
atgtggtattgtgtgaggtagagaagtaatctt

SEQ ID NO: 648591 - DNA, 33 bp, Homo sapien
tttttgtttcggggtacatttagagatttgtta

SEQ ID NO: 648592 - DNA, 33 bp, Homo sapien
tttttgtttcggggtatatttagagatttgtta

SEQ ID NO: 648593 - DNA, 33 bp, Homo sapien
ctcagaacacagtgcaatgaaactaggactcag

SEQ ID NO: 648594 - DNA, 33 bp, Homo sapien
ctcagaacacagtgcagtgaaactaggactcag

SEQ ID NO: 648595 - DNA, 33 bp, Homo sapien
tcaatgaagaatatgaaacaggaaaggagtgta

SEQ ID NO: 648596 - DNA, 33 bp, Homo sapien
tcaatgaagaatatgagacaggaaaggagtgta

SEQ ID NO: 648597 - DNA, 33 bp, Homo sapien
ataaaaacagctttagcaagtttatctgcacaa

SEQ ID NO: 648598 - DNA, 33 bp, Homo sapien
ataaaaacagctttagtaagtttatctgcacaa

SEQ ID NO: 648599 - DNA, 33 bp, Homo sapien
ccaaaatggagaaaaacgccaaaagtaaggggc

SEQ ID NO: 648600 - DNA, 33 bp, Homo sapien
ccaaaatggagaaaaaggccaaaagtaaggggc

SEQ ID NO: 648601 - DNA, 33 bp, Homo sapien
ggactgtaactcctgaacatgtcccagggctga

SEQ ID NO: 648602 - DNA, 33 bp, Homo sapien
ggactgtaactcctgagcatgtcccagggctga

SEQ ID NO: 648603 - DNA, 33 bp, Homo sapien
tgtgaccgagctggtagccaagatggaaaacaa

SEQ ID NO: 648604 - DNA, 33 bp, Homo sapien
tgtgaccgagctggtatccaagatggaaaacaa

SEQ ID NO: 648605 - DNA, 33 bp, Homo sapien
tgaataccactaccagcaaaaatttatcactca

SEQ ID NO: 648606 - DNA, 33 bp, Homo sapien
tgaataccactaccagtaaaaatttatcactca

SEQ ID NO: 648607 - DNA, 33 bp, Homo sapien
tcctgatgtcagcaaaaaacaatattgaggtga

SEQ ID NO: 648608 - DNA, 33 bp, Homo sapien
tcctgatgtcagcaaacaacaatattgaggtga

SEQ ID NO: 648609 - DNA, 33 bp, Homo sapien
gcaatcacatctattaagaagggtcaacgttag

SEQ ID NO: 648610 - DNA, 33 bp, Homo sapien
gcaatcacatctattaggaagggtcaacgttag

SEQ ID NO: 648611 - DNA, 33 bp, Homo sapien
gaaaacattaattgaactgacattgtagaagac

SEQ ID NO: 648612 - DNA, 33 bp, Homo sapien
gaaaacattaattgaattgacattgtagaagac

SEQ ID NO: 648613 - DNA, 33 bp, Homo sapien
gacttcacatagtgccacctagttcttccaatg

SEQ ID NO: 648614 - DNA, 33 bp, Homo sapien
gacttcacatagtgccgcctagttcttccaatg

SEQ ID NO: 648615 - DNA, 33 bp, Homo sapien
acttccttaagcagaacgcggctatagcttcac

SEQ ID NO: 648616 - DNA, 33 bp, Homo sapien
acttccttaagcagaatgcggctatagcttcac

SEQ ID NO: 648617 - DNA, 33 bp, Homo sapien
gtcggtgatacggttaccagagtccatcacaat

SEQ ID NO: 648618 - DNA, 33 bp, Homo sapien
gtcggtgatacggttatcagagtccatcacaat

SEQ ID NO: 648619 - DNA, 33 bp, Homo sapien
aaaacctagaactagactcatcttggcagaagg

SEQ ID NO: 648620 - DNA, 33 bp, Homo sapien
aaaacctagaactagagtcatcttggcagaagg

SEQ ID NO: 648621 - DNA, 33 bp, Homo sapien
cgttcaggattatccaagatccatgctttcaat

SEQ ID NO: 648622 - DNA, 33 bp, Homo sapien
cgttcaggattatccatgatccatgctttcaat

SEQ ID NO: 648623 - DNA, 33 bp, Homo sapien
tcagtcactcctcaaaactcttctttagctcct

SEQ ID NO: 648624 - DNA, 33 bp, Homo sapien
tcagtcactcctcaaacctcttctttagctcct

SEQ ID NO: 648625 - DNA, 33 bp, Homo sapien
cagggaggagtaatggaaaggacatgaagaagg

SEQ ID NO: 648626 - DNA, 33 bp, Homo sapien
cagggaggagtaatggtaaggacatgaagaagg

SEQ ID NO: 648627 - DNA, 33 bp, Homo sapien
atacaaagaagtaaaaaagttccagatatttcc

SEQ ID NO: 648628 - DNA, 33 bp, Homo sapien
atacaaagaagtaaaagagttccagatatttcc

SEQ ID NO: 648629 - DNA, 33 bp, Homo sapien
tttcacctaactcaaaccacataaaggactttc

SEQ ID NO: 648630 - DNA, 33 bp, Homo sapien
tttcacctaactcaaatcacataaaggactttc

SEQ ID NO: 648631 - DNA, 33 bp, Homo sapien
attactgactgatcaaacaaatggaacatagca

SEQ ID NO: 648632 - DNA, 33 bp, Homo sapien
attactgactgatcaagcaaatggaacatagca

SEQ ID NO: 648633 - DNA, 33 bp, Homo sapien
agcggtgactattggaaagctgattctttctca

SEQ ID NO: 648634 - DNA, 33 bp, Homo sapien
agcggtgactattggagagctgattctttctca

SEQ ID NO: 648635 - DNA, 33 bp, Homo sapien
tgaaaaatatgtattacatgatcaaacttgtat

SEQ ID NO: 648636 - DNA, 33 bp, Homo sapien
tgaaaaatatgtattatatgatcaaacttgtat

SEQ ID NO: 648637 - DNA, 33 bp, Homo sapien
ttttaccatttctacaagagtccaggcaccatg

SEQ ID NO: 648638 - DNA, 33 bp, Homo sapien
ttttaccatttctacaggagtccaggcaccatg

SEQ ID NO: 648639 - DNA, 33 bp, Homo sapien
gtagaaatggtaaaaacagaagcagatgaaata

SEQ ID NO: 648640 - DNA, 33 bp, Homo sapien
gtagaaatggtaaaaatagaagcagatgaaata

SEQ ID NO: 648641 - DNA, 33 bp, Homo sapien
agacaaacgcctgctaaggatgtggatattacc

SEQ ID NO: 648642 - DNA, 33 bp, Homo sapien
agacaaacgcctgctatggatgtggatattacc

SEQ ID NO: 648643 - DNA, 33 bp, Homo sapien
agttttctgaaattcaaatttaattgcaaatcc

SEQ ID NO: 648644 - DNA, 33 bp, Homo sapien
agttttctgaaattcagatttaattgcaaatcc

SEQ ID NO: 648645 - DNA, 33 bp, Homo sapien
ggcagtggaaaaagtacgttaaaagatgtatgc

SEQ ID NO: 648646 - DNA, 33 bp, Homo sapien
ggcagtggaaaaagtatgttaaaagatgtatgc

SEQ ID NO: 648647 - DNA, 33 bp, Homo sapien
ttacattgctgtatataagttatagagaaaggg

SEQ ID NO: 648648 - DNA, 33 bp, Homo sapien
ttacattgctgtatatgagttatagagaaaggg

SEQ ID NO: 648649 - DNA, 33 bp, Homo sapien
aagttcactgaataaaatgatgaaagaaagtaa

SEQ ID NO: 648650 - DNA, 33 bp, Homo sapien
aagttcactgaataaagtgatgaaagaaagtaa

SEQ ID NO: 648651 - DNA, 33 bp, Homo sapien
tggagagttgtccataaaggaatcaggagggat

SEQ ID NO: 648652 - DNA, 33 bp, Homo sapien
tggagagttgtccatagaggaatcaggagggat

SEQ ID NO: 648653 - DNA, 33 bp, Homo sapien
aaacatggaagaaagcacagattagttggtgtt

SEQ ID NO: 648654 - DNA, 33 bp, Homo sapien
aaacatggaagaaagcgcagattagttggtgtt

SEQ ID NO: 648655 - DNA, 33 bp, Homo sapien
tgaggaagggtacttaaagaagcccaaagtcat

SEQ ID NO: 648656 - DNA, 33 bp, Homo sapien
tgaggaagggtacttagagaagcccaaagtcat

SEQ ID NO: 648657 - DNA, 33 bp, Homo sapien
atgtgcttgaatcgaaatcaatgggaatttctc

SEQ ID NO: 648658 - DNA, 33 bp, Homo sapien
atgtgcttgaatcgaagtcaatgggaatttctc

SEQ ID NO: 648659 - DNA, 33 bp, Homo sapien
tagttataatgttactcaggtaaagggggttag

SEQ ID NO: 648660 - DNA, 33 bp, Homo sapien
tagttataatgttactgaggtaaagggggttag

SEQ ID NO: 648661 - DNA, 33 bp, Homo sapien
tttattttttagttccgcactcagagtcctctc

SEQ ID NO: 648662 - DNA, 33 bp, Homo sapien
tttattttttagttcctcactcagagtcctctc

SEQ ID NO: 648663 - DNA, 33 bp, Homo sapien
gataattttggagaccactattatcttgttagt

SEQ ID NO: 648664 - DNA, 33 bp, Homo sapien
gataattttggagaccgctattatcttgttagt

SEQ ID NO: 648665 - DNA, 33 bp, Homo sapien
tgccagccagtaagtcactgaacctgagtacaa

SEQ ID NO: 648666 - DNA, 33 bp, Homo sapien
tgccagccagtaagtcgctgaacctgagtacaa

SEQ ID NO: 648667 - DNA, 33 bp, Homo sapien
atgcctgcattctctcaagcgtgcattattgta

SEQ ID NO: 648668 - DNA, 33 bp, Homo sapien
atgcctgcattctctcgagcgtgcattattgta

SEQ ID NO: 648669 - DNA, 33 bp, Homo sapien
ggaattctcatttactcagcttttttgttctat

SEQ ID NO: 648670 - DNA, 33 bp, Homo sapien
ggaattctcatttacttagcttttttgttctat

SEQ ID NO: 648671 - DNA, 33 bp, Homo sapien
gatggcaggaaggacacagttcaccaagatcaa

SEQ ID NO: 648672 - DNA, 33 bp, Homo sapien
gatggcaggaaggacagagttcaccaagatcaa

SEQ ID NO: 648673 - DNA, 33 bp, Homo sapien
aaacaagagttcctacaatatataaacaaatga

SEQ ID NO: 648674 - DNA, 33 bp, Homo sapien
aaacaagagttcctacgatatataaacaaatga

SEQ ID NO: 648675 - DNA, 33 bp, Homo sapien
atatgaggtatatacaaaggaaggaatactgtc

SEQ ID NO: 648676 - DNA, 33 bp, Homo sapien
atatgaggtatatacagaggaaggaatactgtc

SEQ ID NO: 648677 - DNA, 33 bp, Homo sapien
caactctactccaagaaaagcaaatagttgtat

SEQ ID NO: 648678 - DNA, 33 bp, Homo sapien
caactctactccaagacaagcaaatagttgtat

SEQ ID NO: 648679 - DNA, 33 bp, Homo sapien
taaggggatttttaaaatattgtctggtgagta

SEQ ID NO: 648680 - DNA, 33 bp, Homo sapien
taaggggatttttaaattattgtctggtgagta

SEQ ID NO: 648681 - DNA, 33 bp, Homo sapien
gttatttgacgatatacagttgaaagagaaaaa

SEQ ID NO: 648682 - DNA, 33 bp, Homo sapien
gttatttgacgatatagagttgaaagagaaaaa

SEQ ID NO: 648683 - DNA, 33 bp, Homo sapien
gccagtatatgtacgggactcatgtcagtttgt

SEQ ID NO: 648684 - DNA, 33 bp, Homo sapien
gccagtatatgtacggtactcatgtcagtttgt

SEQ ID NO: 648685 - DNA, 33 bp, Homo sapien
agacttggaggactacaactgagtaatttacag

SEQ ID NO: 648686 - DNA, 33 bp, Homo sapien
agacttggaggactactactgagtaatttacag

SEQ ID NO: 648687 - DNA, 33 bp, Homo sapien
attctgttttaatatgccaggttttatgaaaac

SEQ ID NO: 648688 - DNA, 33 bp, Homo sapien
attctgttttaatatggcaggttttatgaaaac

SEQ ID NO: 648689 - DNA, 33 bp, Homo sapien
tcaaaataatattccacaagactgttgttgata

SEQ ID NO: 648690 - DNA, 33 bp, Homo sapien
tcaaaataatattccataagactgttgttgata

SEQ ID NO: 648691 - DNA, 33 bp, Homo sapien
aaagtataaatgtgacagaaccaatcaacgttg

SEQ ID NO: 648692 - DNA, 33 bp, Homo sapien
aaagtataaatgtgacggaaccaatcaacgttg

SEQ ID NO: 648693 - DNA, 33 bp, Homo sapien
gctgctctatcattccaaaattatattaccatg

SEQ ID NO: 648694 - DNA, 33 bp, Homo sapien
gctgctctatcattcccaaattatattaccatg

SEQ ID NO: 648695 - DNA, 33 bp, Homo sapien
aggcttcctctgaaggcacatctaaagtgcacc

SEQ ID NO: 648696 - DNA, 33 bp, Homo sapien
aggcttcctctgaaggtacatctaaagtgcacc

SEQ ID NO: 648697 - DNA, 33 bp, Homo sapien
ttgtgtaaataatgcgcaaaaaagtttatattt

SEQ ID NO: 648698 - DNA, 33 bp, Homo sapien
ttgtgtaaataatgcgtaaaaaagtttatattt

SEQ ID NO: 648699 - DNA, 33 bp, Homo sapien
tttaaatcacaatccaataataaacctagtatt

SEQ ID NO: 648700 - DNA, 33 bp, Homo sapien
tttaaatcacaatccagtaataaacctagtatt

SEQ ID NO: 648701 - DNA, 33 bp, Homo sapien
gaatacaacaatacacgggacacagatttgagg

SEQ ID NO: 648702 - DNA, 33 bp, Homo sapien
gaatacaacaatacactggacacagatttgagg

SEQ ID NO: 648703 - DNA, 33 bp, Homo sapien
cttttaagcctttggcacatatttgaatcacct

SEQ ID NO: 648704 - DNA, 33 bp, Homo sapien
cttttaagcctttggcgcatatttgaatcacct

SEQ ID NO: 648705 - DNA, 33 bp, Homo sapien
gtgagtgtggaagtacccaactattattgtatt

SEQ ID NO: 648706 - DNA, 33 bp, Homo sapien
gtgagtgtggaagtactcaactattattgtatt

SEQ ID NO: 648707 - DNA, 33 bp, Homo sapien
aatgaagataaggaagaaacctagtagaataac

SEQ ID NO: 648708 - DNA, 33 bp, Homo sapien
aatgaagataaggaagcaacctagtagaataac

SEQ ID NO: 648709 - DNA, 33 bp, Homo sapien
ttcagttaggctaacacggttgtgcttctttag

SEQ ID NO: 648710 - DNA, 33 bp, Homo sapien
ttcagttaggctaacatggttgtgcttctttag

SEQ ID NO: 648711 - DNA, 33 bp, Homo sapien
catttctgtccaagaaagagccttggtgcttag

SEQ ID NO: 648712 - DNA, 33 bp, Homo sapien
catttctgtccaagaaggagccttggtgcttag

SEQ ID NO: 648713 - DNA, 33 bp, Homo sapien
tctactactcaaaacacaggatgctgacatgga

SEQ ID NO: 648714 - DNA, 33 bp, Homo sapien
tctactactcaaaacataggatgctgacatgga

SEQ ID NO: 648715 - DNA, 33 bp, Homo sapien
gattttcaccaaaagactcaaccaaaataaaga

SEQ ID NO: 648716 - DNA, 33 bp, Homo sapien
gattttcaccaaaagagtcaaccaaaataaaga

SEQ ID NO: 648717 - DNA, 33 bp, Homo sapien
tcagaaattcttgacaatactacctaaaactcc

SEQ ID NO: 648718 - DNA, 33 bp, Homo sapien
tcagaaattcttgacagtactacctaaaactcc

SEQ ID NO: 648719 - DNA, 33 bp, Homo sapien
ttgggtttgtctgacaccaaaaccaatgtttcc

SEQ ID NO: 648720 - DNA, 33 bp, Homo sapien
ttgggtttgtctgacagcaaaaccaatgtttcc

SEQ ID NO: 648721 - DNA, 33 bp, Homo sapien
ggccattgacttagcaaatgtgttattttccat

SEQ ID NO: 648722 - DNA, 33 bp, Homo sapien
ggccattgacttagcagatgtgttattttccat

SEQ ID NO: 648723 - DNA, 33 bp, Homo sapien
acaatattgcatttcaacaagaatggtagaaat

SEQ ID NO: 648724 - DNA, 33 bp, Homo sapien
acaatattgcatttcagcaagaatggtagaaat

SEQ ID NO: 648725 - DNA, 33 bp, Homo sapien
aagatacctggtgaaaagaaatgcacaagtatg

SEQ ID NO: 648726 - DNA, 33 bp, Homo sapien
aagatacctggtgaaaggaaatgcacaagtatg

SEQ ID NO: 648727 - DNA, 33 bp, Homo sapien
ttactggtgttgttcccaagagctctctcccac

SEQ ID NO: 648728 - DNA, 33 bp, Homo sapien
ttactggtgttgttcctaagagctctctcccac

SEQ ID NO: 648729 - DNA, 33 bp, Homo sapien
aggaacttgttgggaaatggaattaatgtgact

SEQ ID NO: 648730 - DNA, 33 bp, Homo sapien
aggaacttgttgggaagtggaattaatgtgact

SEQ ID NO: 648731 - DNA, 33 bp, Homo sapien
cctctggaaaacttcacaagaatggagataaaa

SEQ ID NO: 648732 - DNA, 33 bp, Homo sapien
cctctggaaaacttcataagaatggagataaaa

SEQ ID NO: 648733 - DNA, 33 bp, Homo sapien
tgtttcaggtttttaactgtgtgctaagggaca

SEQ ID NO: 648734 - DNA, 33 bp, Homo sapien
tgtttcaggtttttaattgtgtgctaagggaca

SEQ ID NO: 648735 - DNA, 33 bp, Homo sapien
gccaattattctttccggagtcttcctcgtgtt

SEQ ID NO: 648736 - DNA, 33 bp, Homo sapien
gccaattattctttcctgagtcttcctcgtgtt

SEQ ID NO: 648737 - DNA, 33 bp, Homo sapien
ctctatgctcttgccacattgcccttctagagt

SEQ ID NO: 648738 - DNA, 33 bp, Homo sapien
ctctatgctcttgccatattgcccttctagagt

SEQ ID NO: 648739 - DNA, 33 bp, Homo sapien
ttatattgacttatacaagagagactttgtttg

SEQ ID NO: 648740 - DNA, 33 bp, Homo sapien
ttatattgacttatacgagagagactttgtttg

SEQ ID NO: 648741 - DNA, 33 bp, Homo sapien
tagcttccagtaagagcaatggattcttatcca

SEQ ID NO: 648742 - DNA, 33 bp, Homo sapien
tagcttccagtaagagtaatggattcttatcca

SEQ ID NO: 648743 - DNA, 33 bp, Homo sapien
gtacataccagaggtcacaaacccctctatata

SEQ ID NO: 648744 - DNA, 33 bp, Homo sapien
gtacataccagaggtcgcaaacccctctatata

SEQ ID NO: 648745 - DNA, 33 bp, Homo sapien
gatgagaaactcctaaagaatacagtgttagct

SEQ ID NO: 648746 - DNA, 33 bp, Homo sapien
gatgagaaactcctaaggaatacagtgttagct

SEQ ID NO: 648747 - DNA, 33 bp, Homo sapien
agattcaaagaaaagaagatcctccctgccatt

SEQ ID NO: 648748 - DNA, 33 bp, Homo sapien
agattcaaagaaaagacgatcctccctgccatt

SEQ ID NO: 648749 - DNA, 33 bp, Homo sapien
cattgtttcctagacaatgaaagtgtttgttac

SEQ ID NO: 648750 - DNA, 33 bp, Homo sapien
cattgtttcctagacagtgaaagtgtttgttac

SEQ ID NO: 648751 - DNA, 33 bp, Homo sapien
gtcttccaaagcttaacatatatgtctggtgaa

SEQ ID NO: 648752 - DNA, 33 bp, Homo sapien
gtcttccaaagcttaatatatatgtctggtgaa

SEQ ID NO: 648753 - DNA, 33 bp, Homo sapien
acttcagaaactgagagcaaattgaattttcat

SEQ ID NO: 648754 - DNA, 33 bp, Homo sapien
acttcagaaactgagatcaaattgaattttcat

SEQ ID NO: 648755 - DNA, 33 bp, Homo sapien
aaaattatgagggccaatataactatggcagta

SEQ ID NO: 648756 - DNA, 33 bp, Homo sapien
aaaattatgagggccagtataactatggcagta

SEQ ID NO: 648757 - DNA, 33 bp, Homo sapien
tatataatttgaaagaataaggcaagtaaaaaa

SEQ ID NO: 648758 - DNA, 33 bp, Homo sapien
tatataatttgaaagagtaaggcaagtaaaaaa

SEQ ID NO: 648759 - DNA, 33 bp, Homo sapien
tgaatgatcacactaactgtaaatgtattaaat

SEQ ID NO: 648760 - DNA, 33 bp, Homo sapien
tgaatgatcacactaattgtaaatgtattaaat

SEQ ID NO: 648761 - DNA, 33 bp, Homo sapien
tgcccacaatggtccaaaaatgattggagttcc

SEQ ID NO: 648762 - DNA, 33 bp, Homo sapien
tgcccacaatggtccacaaatgattggagttcc

SEQ ID NO: 648763 - DNA, 33 bp, Homo sapien
tcttgggatatgttgacgaacgtttatcatttt

SEQ ID NO: 648764 - DNA, 33 bp, Homo sapien
tcttgggatatgttgatgaacgtttatcatttt

SEQ ID NO: 648765 - DNA, 33 bp, Homo sapien
gaagagaagggtctaaaagataaagggcgtgag

SEQ ID NO: 648766 - DNA, 33 bp, Homo sapien
gaagagaagggtctaagagataaagggcgtgag

SEQ ID NO: 648767 - DNA, 33 bp, Homo sapien
ttgctctctgcagccaagaaaagggcaagcctt

SEQ ID NO: 648768 - DNA, 33 bp, Homo sapien
ttgctctctgcagccaggaaaagggcaagcctt

SEQ ID NO: 648769 - DNA, 33 bp, Homo sapien
aaaccttagtttcttaactgtgaagtggagata

SEQ ID NO: 648770 - DNA, 33 bp, Homo sapien
aaaccttagtttcttatctgtgaagtggagata

SEQ ID NO: 648771 - DNA, 33 bp, Homo sapien
tccacttaggtatgtacgttggaaaccttgtca

SEQ ID NO: 648772 - DNA, 33 bp, Homo sapien
tccacttaggtatgtatgttggaaaccttgtca

SEQ ID NO: 648773 - DNA, 33 bp, Homo sapien
tttagaattttcctggcagtagtctgtcaggac

SEQ ID NO: 648774 - DNA, 33 bp, Homo sapien
tttagaattttcctggtagtagtctgtcaggac

SEQ ID NO: 648775 - DNA, 33 bp, Homo sapien
ttgaagacatgagaacactttgtttttcataat

SEQ ID NO: 648776 - DNA, 33 bp, Homo sapien
ttgaagacatgagaactctttgtttttcataat

SEQ ID NO: 648777 - DNA, 33 bp, Homo sapien
gacacaattcctaactcacatagcttattatca

SEQ ID NO: 648778 - DNA, 33 bp, Homo sapien
gacacaattcctaactgacatagcttattatca

SEQ ID NO: 648779 - DNA, 33 bp, Homo sapien
aattgcctatttgaaactgaccatttagttttc

SEQ ID NO: 648780 - DNA, 33 bp, Homo sapien
aattgcctatttgaaattgaccatttagttttc

SEQ ID NO: 648781 - DNA, 33 bp, Homo sapien
ctcctaggagattccagaaataatacctaggga

SEQ ID NO: 648782 - DNA, 33 bp, Homo sapien
ctcctaggagattccataaataatacctaggga

SEQ ID NO: 648783 - DNA, 33 bp, Homo sapien
ataaaggaacagttatcaaatggagtctcttgt

SEQ ID NO: 648784 - DNA, 33 bp, Homo sapien
ataaaggaacagttattaaatggagtctcttgt

SEQ ID NO: 648785 - DNA, 33 bp, Homo sapien
taggtacggctcattacgcagtgaactgaggta

SEQ ID NO: 648786 - DNA, 33 bp, Homo sapien
taggtacggctcattatgcagtgaactgaggta

SEQ ID NO: 648787 - DNA, 33 bp, Homo sapien
tataatatacatagacaaaaatgccaattggaa

SEQ ID NO: 648788 - DNA, 33 bp, Homo sapien
tataatatacatagacgaaaatgccaattggaa

SEQ ID NO: 648789 - DNA, 33 bp, Homo sapien
agtggtgtaatagcccagcattcttttgtctgg

SEQ ID NO: 648790 - DNA, 33 bp, Homo sapien
agtggtgtaatagcccggcattcttttgtctgg

SEQ ID NO: 648791 - DNA, 33 bp, Homo sapien
gattctagttcctcaacttccttaccaacattt

SEQ ID NO: 648792 - DNA, 33 bp, Homo sapien
gattctagttcctcaatttccttaccaacattt

SEQ ID NO: 648793 - DNA, 33 bp, Homo sapien
agatggtggtttcttaaggaaaagatatatggt

SEQ ID NO: 648794 - DNA, 33 bp, Homo sapien
agatggtggtttcttagggaaaagatatatggt

SEQ ID NO: 648795 - DNA, 33 bp, Homo sapien
atagaaagtagtttaacggttgccaggaaccag

SEQ ID NO: 648796 - DNA, 33 bp, Homo sapien
atagaaagtagtttaatggttgccaggaaccag

SEQ ID NO: 648797 - DNA, 33 bp, Homo sapien
tgaccaccaaagttgaagagagcattttcccaa

SEQ ID NO: 648798 - DNA, 33 bp, Homo sapien
tgaccaccaaagttgaggagagcattttcccaa

SEQ ID NO: 648799 - DNA, 33 bp, Homo sapien
gataatgaggtcaaaacagagaggccactaggc

SEQ ID NO: 648800 - DNA, 33 bp, Homo sapien
gataatgaggtcaaaatagagaggccactaggc

SEQ ID NO: 648801 - DNA, 33 bp, Homo sapien
aggaatgaggaacacactcaaaatatcaagaaa

SEQ ID NO: 648802 - DNA, 33 bp, Homo sapien
aggaatgaggaacacagtcaaaatatcaagaaa

SEQ ID NO: 648803 - DNA, 33 bp, Homo sapien
tcaaatagaggggtccaaaagactgcgggctcc

SEQ ID NO: 648804 - DNA, 33 bp, Homo sapien
tcaaatagaggggtccgaaagactgcgggctcc

SEQ ID NO: 648805 - DNA, 33 bp, Homo sapien
catccccatgaagtcaactcaacatacaatgat

SEQ ID NO: 648806 - DNA, 33 bp, Homo sapien
catccccatgaagtcagctcaacatacaatgat

SEQ ID NO: 648807 - DNA, 33 bp, Homo sapien
catggtgtctacactcggacgataagcctaaac

SEQ ID NO: 648808 - DNA, 33 bp, Homo sapien
catggtgtctacactctgacgataagcctaaac

SEQ ID NO: 648809 - DNA, 33 bp, Homo sapien
tttttctgtataaacactgatgaatcccaggta

SEQ ID NO: 648810 - DNA, 33 bp, Homo sapien
tttttctgtataaacattgatgaatcccaggta

SEQ ID NO: 648811 - DNA, 33 bp, Homo sapien
ctctctacatatcttagagtgacattcagtatg

SEQ ID NO: 648812 - DNA, 33 bp, Homo sapien
ctctctacatatcttatagtgacattcagtatg

SEQ ID NO: 648813 - DNA, 33 bp, Homo sapien
gtcttgtcctatcatgaaggaaaaaaataaaaa

SEQ ID NO: 648814 - DNA, 33 bp, Homo sapien
gtcttgtcctatcatggaggaaaaaaataaaaa

SEQ ID NO: 648815 - DNA, 33 bp, Homo sapien
atgacctgaataaaaaacactgaagttagcata

SEQ ID NO: 648816 - DNA, 33 bp, Homo sapien
atgacctgaataaaaagcactgaagttagcata

SEQ ID NO: 648817 - DNA, 33 bp, Homo sapien
tggggagttaagaggcaatgagaaggcagggtg

SEQ ID NO: 648818 - DNA, 33 bp, Homo sapien
tggggagttaagaggcgatgagaaggcagggtg

SEQ ID NO: 648819 - DNA, 33 bp, Homo sapien
tcactactttctttcacagtttgtttcctctag

SEQ ID NO: 648820 - DNA, 33 bp, Homo sapien
tcactactttctttcatagtttgtttcctctag

SEQ ID NO: 648821 - DNA, 33 bp, Homo sapien
aacagctatatttgtaacctgctcttttactcc

SEQ ID NO: 648822 - DNA, 33 bp, Homo sapien
aacagctatatttgtaccctgctcttttactcc

SEQ ID NO: 648823 - DNA, 33 bp, Homo sapien
taccaacaagttctcaaactaaatacatgacat

SEQ ID NO: 648824 - DNA, 33 bp, Homo sapien
taccaacaagttctcatactaaatacatgacat

SEQ ID NO: 648825 - DNA, 33 bp, Homo sapien
gaggtatcatctgaaaattcaactggagaaaga

SEQ ID NO: 648826 - DNA, 33 bp, Homo sapien
gaggtatcatctgaaagttcaactggagaaaga

SEQ ID NO: 648827 - DNA, 33 bp, Homo sapien
gtggaaagtttcctgaaggccattcctgttatc

SEQ ID NO: 648828 - DNA, 33 bp, Homo sapien
gtggaaagtttcctgagggccattcctgttatc

SEQ ID NO: 648829 - DNA, 33 bp, Homo sapien
ctcacatcagaaattcaatggtaaataaaatct

SEQ ID NO: 648830 - DNA, 33 bp, Homo sapien
ctcacatcagaaattcgatggtaaataaaatct

SEQ ID NO: 648831 - DNA, 33 bp, Homo sapien
ttcatggtatcatgaccatcagtttgatgacaa

SEQ ID NO: 648832 - DNA, 33 bp, Homo sapien
ttcatggtatcatgactatcagtttgatgacaa

SEQ ID NO: 648833 - DNA, 33 bp, Homo sapien
ctgtggttgtttgagacatacttggttttttga

SEQ ID NO: 648834 - DNA, 33 bp, Homo sapien
ctgtggttgtttgagatatacttggttttttga

SEQ ID NO: 648835 - DNA, 33 bp, Homo sapien
taggagggagagaggaccggaaaagcaggaaaa

SEQ ID NO: 648836 - DNA, 33 bp, Homo sapien
taggagggagagaggatcggaaaagcaggaaaa

SEQ ID NO: 648837 - DNA, 33 bp, Homo sapien
acggaacttccagaaaataaccagaacgtggtc

SEQ ID NO: 648838 - DNA, 33 bp, Homo sapien
acggaacttccagaaagtaaccagaacgtggtc

SEQ ID NO: 648839 - DNA, 33 bp, Homo sapien
gctaactagagccaaacaaaatatgggtggtca

SEQ ID NO: 648840 - DNA, 33 bp, Homo sapien
gctaactagagccaaataaaatatgggtggtca

SEQ ID NO: 648841 - DNA, 33 bp, Homo sapien
cctgttgacacctcacagcagaatttcacaaaa

SEQ ID NO: 648842 - DNA, 33 bp, Homo sapien
cctgttgacacctcacggcagaatttcacaaaa

SEQ ID NO: 648843 - DNA, 33 bp, Homo sapien
catgaaagttggagaacgtctgctctatactga

SEQ ID NO: 648844 - DNA, 33 bp, Homo sapien
catgaaagttggagaatgtctgctctatactga

SEQ ID NO: 648845 - DNA, 33 bp, Homo sapien
aaagagagatagtgacacataaggaaattcctt

SEQ ID NO: 648846 - DNA, 33 bp, Homo sapien
aaagagagatagtgacgcataaggaaattcctt

SEQ ID NO: 648847 - DNA, 33 bp, Homo sapien
acctcatctgctgtgcacagagtagagcaagag

SEQ ID NO: 648848 - DNA, 33 bp, Homo sapien
acctcatctgctgtgcgcagagtagagcaagag

SEQ ID NO: 648849 - DNA, 33 bp, Homo sapien
ggaagatgtgtgagaacgcccaaatcattgctg

SEQ ID NO: 648850 - DNA, 33 bp, Homo sapien
ggaagatgtgtgagaatgcccaaatcattgctg

SEQ ID NO: 648851 - DNA, 33 bp, Homo sapien
aacatgatcactcttccactactcccttccctt

SEQ ID NO: 648852 - DNA, 33 bp, Homo sapien
aacatgatcactcttctactactcccttccctt

SEQ ID NO: 648853 - DNA, 33 bp, Homo sapien
tacactattttatggcgccatgtgcttgtatat

SEQ ID NO: 648854 - DNA, 33 bp, Homo sapien
tacactattttatggctccatgtgcttgtatat

SEQ ID NO: 648855 - DNA, 33 bp, Homo sapien
agaatgtaagctttaaaggtagaatggcatttt

SEQ ID NO: 648856 - DNA, 33 bp, Homo sapien
agaatgtaagctttaagggtagaatggcatttt

SEQ ID NO: 648857 - DNA, 33 bp, Homo sapien
tacaaaggaacacttaaaaatattacatcatat

SEQ ID NO: 648858 - DNA, 33 bp, Homo sapien
tacaaaggaacacttagaaatattacatcatat

SEQ ID NO: 648859 - DNA, 33 bp, Homo sapien
cattcatgtgtagacccgagagactgtcatttc

SEQ ID NO: 648860 - DNA, 33 bp, Homo sapien
cattcatgtgtagacctgagagactgtcatttc

SEQ ID NO: 648861 - DNA, 33 bp, Homo sapien
atcactaaggattatgcaacttgctctttgaat

SEQ ID NO: 648862 - DNA, 33 bp, Homo sapien
atcactaaggattatgtaacttgctctttgaat

SEQ ID NO: 648863 - DNA, 33 bp, Homo sapien
atttatacttgaattacgggatggtttgacatg

SEQ ID NO: 648864 - DNA, 33 bp, Homo sapien
atttatacttgaattatgggatggtttgacatg

SEQ ID NO: 648865 - DNA, 33 bp, Homo sapien
tcaggaaacccaattcactggctgtcatttact

SEQ ID NO: 648866 - DNA, 33 bp, Homo sapien
tcaggaaacccaattccctggctgtcatttact

SEQ ID NO: 648867 - DNA, 33 bp, Homo sapien
catgtttgggaagcacaagaccctcttttggca

SEQ ID NO: 648868 - DNA, 33 bp, Homo sapien
catgtttgggaagcacgagaccctcttttggca

SEQ ID NO: 648869 - DNA, 33 bp, Homo sapien
tggaagatctaaaatccagaggcagctctacag

SEQ ID NO: 648870 - DNA, 33 bp, Homo sapien
tggaagatctaaaatctagaggcagctctacag

SEQ ID NO: 648871 - DNA, 33 bp, Homo sapien
ttagtgtatttagaaaaattgtaaagcttgaat

SEQ ID NO: 648872 - DNA, 33 bp, Homo sapien
ttagtgtatttagaaagattgtaaagcttgaat

SEQ ID NO: 648873 - DNA, 33 bp, Homo sapien
gcccttcctaccataacgattcatatttcattg

SEQ ID NO: 648874 - DNA, 33 bp, Homo sapien
gcccttcctaccataatgattcatatttcattg

SEQ ID NO: 648875 - DNA, 33 bp, Homo sapien
gttgtttcagcctaaaatatgtgaattatgttt

SEQ ID NO: 648876 - DNA, 33 bp, Homo sapien
gttgtttcagcctaaagtatgtgaattatgttt

SEQ ID NO: 648877 - DNA, 33 bp, Homo sapien
accactcatttaatcacctgaaagaactgtgga

SEQ ID NO: 648878 - DNA, 33 bp, Homo sapien
accactcatttaatcatctgaaagaactgtgga

SEQ ID NO: 648879 - DNA, 33 bp, Homo sapien
ttcaaacagtcatctacaagggtagacacagtc

SEQ ID NO: 648880 - DNA, 33 bp, Homo sapien
ttcaaacagtcatctataagggtagacacagtc

SEQ ID NO: 648881 - DNA, 33 bp, Homo sapien
gctctcatgtgtctcaaatagggatggggcatg

SEQ ID NO: 648882 - DNA, 33 bp, Homo sapien
gctctcatgtgtctcagatagggatggggcatg

SEQ ID NO: 648883 - DNA, 33 bp, Homo sapien
gatcagtagttctcaactggaggtgactgcccc

SEQ ID NO: 648884 - DNA, 33 bp, Homo sapien
gatcagtagttctcaattggaggtgactgcccc

SEQ ID NO: 648885 - DNA, 33 bp, Homo sapien
ttcatttgttcattcccatgctttctgctccac

SEQ ID NO: 648886 - DNA, 33 bp, Homo sapien
ttcatttgttcattcctatgctttctgctccac

SEQ ID NO: 648887 - DNA, 33 bp, Homo sapien
atcggatccatggcaaagttatccagtgctcag

SEQ ID NO: 648888 - DNA, 33 bp, Homo sapien
atcggatccatggcaaggttatccagtgctcag

SEQ ID NO: 648889 - DNA, 33 bp, Homo sapien
tttctgttgactcaggacaataccctagcagcc

SEQ ID NO: 648890 - DNA, 33 bp, Homo sapien
tttctgttgactcagggcaataccctagcagcc

SEQ ID NO: 648891 - DNA, 33 bp, Homo sapien
tggaagtagttgaataagccatttgagattggt

SEQ ID NO: 648892 - DNA, 33 bp, Homo sapien
tggaagtagttgaatacgccatttgagattggt

SEQ ID NO: 648893 - DNA, 33 bp, Homo sapien
aagatgattcatttgcaaaccactggctagaaa

SEQ ID NO: 648894 - DNA, 33 bp, Homo sapien
aagatgattcatttgcgaaccactggctagaaa

SEQ ID NO: 648895 - DNA, 33 bp, Homo sapien
gacacaccacacaagcaaagtcctgaagagtac

SEQ ID NO: 648896 - DNA, 33 bp, Homo sapien
gacacaccacacaagcgaagtcctgaagagtac

SEQ ID NO: 648897 - DNA, 33 bp, Homo sapien
ttcgagtaaatctctaagtcgttcaagtacggc

SEQ ID NO: 648898 - DNA, 33 bp, Homo sapien
ttcgagtaaatctctatgtcgttcaagtacggc

SEQ ID NO: 648899 - DNA, 33 bp, Homo sapien
ttattatatccattgcaagacctaatccaagct

SEQ ID NO: 648900 - DNA, 33 bp, Homo sapien
ttattatatccattgccagacctaatccaagct

SEQ ID NO: 648901 - DNA, 33 bp, Homo sapien
acatcactcaaaatcacgtatataaaaggcact

SEQ ID NO: 648902 - DNA, 33 bp, Homo sapien
acatcactcaaaatcatgtatataaaaggcact

SEQ ID NO: 648903 - DNA, 33 bp, Homo sapien
caattctgacacacatgagctaagtcacctggg

SEQ ID NO: 648904 - DNA, 33 bp, Homo sapien
caattctgacacacattagctaagtcacctggg

SEQ ID NO: 648905 - DNA, 33 bp, Homo sapien
gaggcagacactagatcaagtatgaagatcata

SEQ ID NO: 648906 - DNA, 33 bp, Homo sapien
gaggcagacactagatgaagtatgaagatcata

SEQ ID NO: 648907 - DNA, 33 bp, Homo sapien
accagaaagccagtaaaggttcaactcttatga

SEQ ID NO: 648908 - DNA, 33 bp, Homo sapien
accagaaagccagtaagggttcaactcttatga

SEQ ID NO: 648909 - DNA, 33 bp, Homo sapien
gtttgataggaagtggaatagaagttttataga

SEQ ID NO: 648910 - DNA, 33 bp, Homo sapien
gtttgataggaagtgggatagaagttttataga

SEQ ID NO: 648911 - DNA, 33 bp, Homo sapien
cagggattcgagtataacatctttccccgttcc

SEQ ID NO: 648912 - DNA, 33 bp, Homo sapien
cagggattcgagtatagcatctttccccgttcc

SEQ ID NO: 648913 - DNA, 33 bp, Homo sapien
taagggctaagtaagaacaaaggctgaaaaatg

SEQ ID NO: 648914 - DNA, 33 bp, Homo sapien
taagggctaagtaagagcaaaggctgaaaaatg

SEQ ID NO: 648915 - DNA, 33 bp, Homo sapien
tattaagtgcctactaagtaaatacatattatt

SEQ ID NO: 648916 - DNA, 33 bp, Homo sapien
tattaagtgcctactaggtaaatacatattatt

SEQ ID NO: 648917 - DNA, 33 bp, Homo sapien
caaagtgtttgattaccgggaaccagagggcat

SEQ ID NO: 648918 - DNA, 33 bp, Homo sapien
caaagtgtttgattactgggaaccagagggcat

SEQ ID NO: 648919 - DNA, 33 bp, Homo sapien
actgttaaagaaattgaaccatagaagaggcag

SEQ ID NO: 648920 - DNA, 33 bp, Homo sapien
actgttaaagaaattggaccatagaagaggcag

SEQ ID NO: 648921 - DNA, 33 bp, Homo sapien
ttattgtctcccaacacaaaattcttatttcct

SEQ ID NO: 648922 - DNA, 33 bp, Homo sapien
ttattgtctcccaacataaaattcttatttcct

SEQ ID NO: 648923 - DNA, 33 bp, Homo sapien
tatcaactctagggacaatgcttttctagattc

SEQ ID NO: 648924 - DNA, 33 bp, Homo sapien
tatcaactctagggacgatgcttttctagattc

SEQ ID NO: 648925 - DNA, 33 bp, Homo sapien
ccagggcactgataaccctatgaatctaatcct

SEQ ID NO: 648926 - DNA, 33 bp, Homo sapien
ccagggcactgataactctatgaatctaatcct

SEQ ID NO: 648927 - DNA, 33 bp, Homo sapien
aagggaggttaatacaccaccacagtgtcatat

SEQ ID NO: 648928 - DNA, 33 bp, Homo sapien
aagggaggttaatacagcaccacagtgtcatat

SEQ ID NO: 648929 - DNA, 33 bp, Homo sapien
tttctgtgtgtatgtaccatctcctgattttta

SEQ ID NO: 648930 - DNA, 33 bp, Homo sapien
tttctgtgtgtatgtatcatctcctgattttta

SEQ ID NO: 648931 - DNA, 33 bp, Homo sapien
ttgaatccctggctccaattattcccattcctc

SEQ ID NO: 648932 - DNA, 33 bp, Homo sapien
ttgaatccctggctccgattattcccattcctc

SEQ ID NO: 648933 - DNA, 33 bp, Homo sapien
tgcttcacaaaattaacggtgtcaacactgggt

SEQ ID NO: 648934 - DNA, 33 bp, Homo sapien
tgcttcacaaaattaatggtgtcaacactgggt

SEQ ID NO: 648935 - DNA, 33 bp, Homo sapien
tccatacatgtcacaaaatctgtttttcagcat

SEQ ID NO: 648936 - DNA, 33 bp, Homo sapien
tccatacatgtcacaacatctgtttttcagcat

SEQ ID NO: 648937 - DNA, 33 bp, Homo sapien
tgtactatttcctcccaccaattttgttcagta

SEQ ID NO: 648938 - DNA, 33 bp, Homo sapien
tgtactatttcctccctccaattttgttcagta

SEQ ID NO: 648939 - DNA, 33 bp, Homo sapien
agttattctgtcaccaaaagtgtagccatgttc

SEQ ID NO: 648940 - DNA, 33 bp, Homo sapien
agttattctgtcaccagaagtgtagccatgttc

SEQ ID NO: 648941 - DNA, 33 bp, Homo sapien
atggaatggtctcttccagcagctattacaaac

SEQ ID NO: 648942 - DNA, 33 bp, Homo sapien
atggaatggtctcttctagcagctattacaaac

SEQ ID NO: 648943 - DNA, 33 bp, Homo sapien
ggttcttaacttaggggcccaaagaaaatacat

SEQ ID NO: 648944 - DNA, 33 bp, Homo sapien
ggttcttaacttagggtcccaaagaaaatacat

SEQ ID NO: 648945 - DNA, 33 bp, Homo sapien
acttaagaggatatgtgaagtcacacaaaacag

SEQ ID NO: 648946 - DNA, 33 bp, Homo sapien
acttaagaggatatgttaagtcacacaaaacag

SEQ ID NO: 648947 - DNA, 33 bp, Homo sapien
aaactaaccattctcacgtatggtgccaaagct

SEQ ID NO: 648948 - DNA, 33 bp, Homo sapien
aaactaaccattctcatgtatggtgccaaagct

SEQ ID NO: 648949 - DNA, 33 bp, Homo sapien
gacctccagtgttatacgtaaactcccaccagg

SEQ ID NO: 648950 - DNA, 33 bp, Homo sapien
gacctccagtgttatatgtaaactcccaccagg

SEQ ID NO: 648951 - DNA, 33 bp, Homo sapien
catggaaggaagaaccagaacgaaagggattgg

SEQ ID NO: 648952 - DNA, 33 bp, Homo sapien
catggaaggaagaaccggaacgaaagggattgg

SEQ ID NO: 648953 - DNA, 33 bp, Homo sapien
gaaggacactgatcgaagggaattgaagcactt

SEQ ID NO: 648954 - DNA, 33 bp, Homo sapien
gaaggacactgatcgatgggaattgaagcactt

SEQ ID NO: 648955 - DNA, 33 bp, Homo sapien
gggtggaagacatgaaatgaaacgtgttccaaa

SEQ ID NO: 648956 - DNA, 33 bp, Homo sapien
gggtggaagacatgaactgaaacgtgttccaaa

SEQ ID NO: 648957 - DNA, 33 bp, Homo sapien
actatatccacagaaacgaatggtatgtaggct

SEQ ID NO: 648958 - DNA, 33 bp, Homo sapien
actatatccacagaaaggaatggtatgtaggct

SEQ ID NO: 648959 - DNA, 33 bp, Homo sapien
atatgataaagggaccagctatattccaaaagg

SEQ ID NO: 648960 - DNA, 33 bp, Homo sapien
atatgataaagggaccggctatattccaaaagg

SEQ ID NO: 648961 - DNA, 33 bp, Homo sapien
gatctgcatggtactgcacccacttccaaggcc

SEQ ID NO: 648962 - DNA, 33 bp, Homo sapien
gatctgcatggtactggacccacttccaaggcc

SEQ ID NO: 648963 - DNA, 33 bp, Homo sapien
aatgtggtggcacaaactaagccatgaaaccac

SEQ ID NO: 648964 - DNA, 33 bp, Homo sapien
aatgtggtggcacaaattaagccatgaaaccac

SEQ ID NO: 648965 - DNA, 33 bp, Homo sapien
taccagtcttaggctacagaagagatacgtaag

SEQ ID NO: 648966 - DNA, 33 bp, Homo sapien
taccagtcttaggctagagaagagatacgtaag

SEQ ID NO: 648967 - DNA, 33 bp, Homo sapien
ttcacacaaaatgtaaatattccttacctgacc

SEQ ID NO: 648968 - DNA, 33 bp, Homo sapien
ttcacacaaaatgtaattattccttacctgacc

SEQ ID NO: 648969 - DNA, 33 bp, Homo sapien
gtacagttgtttttgaacccgaaagtgatgcat

SEQ ID NO: 648970 - DNA, 33 bp, Homo sapien
gtacagttgtttttgatcccgaaagtgatgcat

SEQ ID NO: 648971 - DNA, 33 bp, Homo sapien
aaaaataatttccaaggagtgtggagataagag

SEQ ID NO: 648972 - DNA, 33 bp, Homo sapien
aaaaataatttccaagtagtgtggagataagag

SEQ ID NO: 648973 - DNA, 33 bp, Homo sapien
tgtgtgaaacataccactgacaaaaatggttga

SEQ ID NO: 648974 - DNA, 33 bp, Homo sapien
tgtgtgaaacataccagtgacaaaaatggttga

SEQ ID NO: 648975 - DNA, 33 bp, Homo sapien
tttctttatttgtaaaatgatgttaatgatacc

SEQ ID NO: 648976 - DNA, 33 bp, Homo sapien
tttctttatttgtaaagtgatgttaatgatacc

SEQ ID NO: 648977 - DNA, 33 bp, Homo sapien
cctatctcacaaagaaccttgctaaggtcatcc

SEQ ID NO: 648978 - DNA, 33 bp, Homo sapien
cctatctcacaaagaatcttgctaaggtcatcc

SEQ ID NO: 648979 - DNA, 33 bp, Homo sapien
tgaattcctttaatacaaacacgtaagtcacac

SEQ ID NO: 648980 - DNA, 33 bp, Homo sapien
tgaattcctttaatacgaacacgtaagtcacac

SEQ ID NO: 648981 - DNA, 33 bp, Homo sapien
tcagatttataatgtacgatttacctctttcct

SEQ ID NO: 648982 - DNA, 33 bp, Homo sapien
tcagatttataatgtatgatttacctctttcct

SEQ ID NO: 648983 - DNA, 33 bp, Homo sapien
gcttggggacattgaaagactaagttgacttga

SEQ ID NO: 648984 - DNA, 33 bp, Homo sapien
gcttggggacattgaaggactaagttgacttga

SEQ ID NO: 648985 - DNA, 33 bp, Homo sapien
aaatgctcctttactcccaacagtgtaaaccat

SEQ ID NO: 648986 - DNA, 33 bp, Homo sapien
aaatgctcctttactcgcaacagtgtaaaccat

SEQ ID NO: 648987 - DNA, 33 bp, Homo sapien
ctaatcttttgttgcacagggaataaaagctgc

SEQ ID NO: 648988 - DNA, 33 bp, Homo sapien
ctaatcttttgttgcagagggaataaaagctgc

SEQ ID NO: 648989 - DNA, 33 bp, Homo sapien
ctatggagctaccatacatttcctaacagactc

SEQ ID NO: 648990 - DNA, 33 bp, Homo sapien
ctatggagctaccatatatttcctaacagactc

SEQ ID NO: 648991 - DNA, 33 bp, Homo sapien
ggcttatatccaaatacgaagcatacacaagtg

SEQ ID NO: 648992 - DNA, 33 bp, Homo sapien
ggcttatatccaaataggaagcatacacaagtg

SEQ ID NO: 648993 - DNA, 33 bp, Homo sapien
caaaacacccacaataaagcaaaactaggaatc

SEQ ID NO: 648994 - DNA, 33 bp, Homo sapien
caaaacacccacaatacagcaaaactaggaatc

SEQ ID NO: 648995 - DNA, 33 bp, Homo sapien
ttagcacctagaagaacagagaaaagtccacag

SEQ ID NO: 648996 - DNA, 33 bp, Homo sapien
ttagcacctagaagaagagagaaaagtccacag

SEQ ID NO: 648997 - DNA, 33 bp, Homo sapien
ggaaccatactctatcaatcactaattgttttc

SEQ ID NO: 648998 - DNA, 33 bp, Homo sapien
ggaaccatactctatcgatcactaattgttttc

SEQ ID NO: 648999 - DNA, 33 bp, Homo sapien
cttatgtccttgtatccgagtcccagcgacctt

SEQ ID NO: 649000 - DNA, 33 bp, Homo sapien
cttatgtccttgtatctgagtcccagcgacctt

SEQ ID NO: 649001 - DNA, 33 bp, Homo sapien
caccttttgtccctgacgcaagagtctcttgtc

SEQ ID NO: 649002 - DNA, 33 bp, Homo sapien
caccttttgtccctgatgcaagagtctcttgtc

SEQ ID NO: 649003 - DNA, 33 bp, Homo sapien
ataataatggcacctacatcatggggttgtctc

SEQ ID NO: 649004 - DNA, 33 bp, Homo sapien
ataataatggcacctatatcatggggttgtctc

SEQ ID NO: 649005 - DNA, 33 bp, Homo sapien
gttctgaaatgcagggaatagaaaaaggctatc

SEQ ID NO: 649006 - DNA, 33 bp, Homo sapien
gttctgaaatgcaggggatagaaaaaggctatc

SEQ ID NO: 649007 - DNA, 33 bp, Homo sapien
cattcccgttgcctccaaaagatagcacattgc

SEQ ID NO: 649008 - DNA, 33 bp, Homo sapien
cattcccgttgcctccgaaagatagcacattgc

SEQ ID NO: 649009 - DNA, 33 bp, Homo sapien
aaaaacactggttttaagattgtctgttctgtg

SEQ ID NO: 649010 - DNA, 33 bp, Homo sapien
aaaaacactggttttaggattgtctgttctgtg

SEQ ID NO: 649011 - DNA, 33 bp, Homo sapien
gtggaaatgtggaacacggggctctctcccttc

SEQ ID NO: 649012 - DNA, 33 bp, Homo sapien
gtggaaatgtggaacatggggctctctcccttc

SEQ ID NO: 649013 - DNA, 33 bp, Homo sapien
gtatgctggtgaaatcgacttgagcattaagca

SEQ ID NO: 649014 - DNA, 33 bp, Homo sapien
gtatgctggtgaaatctacttgagcattaagca

SEQ ID NO: 649015 - DNA, 33 bp, Homo sapien
ggaatgtgttacagggaaaataaagcaggaaaa

SEQ ID NO: 649016 - DNA, 33 bp, Homo sapien
ggaatgtgttacagggtaaataaagcaggaaaa

SEQ ID NO: 649017 - DNA, 33 bp, Homo sapien
aggtatataactggagcaccaaaatgctgccta

SEQ ID NO: 649018 - DNA, 33 bp, Homo sapien
aggtatataactggaggaccaaaatgctgccta

SEQ ID NO: 649019 - DNA, 33 bp, Homo sapien
acttgtcgcatccctgcagcctagagcacatgc

SEQ ID NO: 649020 - DNA, 33 bp, Homo sapien
acttgtcgcatccctgtagcctagagcacatgc

SEQ ID NO: 649021 - DNA, 33 bp, Homo sapien
gtagtgaataacactcacatttgtcccttgatt

SEQ ID NO: 649022 - DNA, 33 bp, Homo sapien
gtagtgaataacactcgcatttgtcccttgatt

SEQ ID NO: 649023 - DNA, 33 bp, Homo sapien
tctatatttggttttcccagggatccttgttct

SEQ ID NO: 649024 - DNA, 33 bp, Homo sapien
tctatatttggttttctcagggatccttgttct

SEQ ID NO: 649025 - DNA, 33 bp, Homo sapien
tcttgtcaaatgttaaatggggagaaaaatagt

SEQ ID NO: 649026 - DNA, 33 bp, Homo sapien
tcttgtcaaatgttaagtggggagaaaaatagt

SEQ ID NO: 649027 - DNA, 33 bp, Homo sapien
gaaatacagactctcacgggccacctagaccta

SEQ ID NO: 649028 - DNA, 33 bp, Homo sapien
gaaatacagactctcatgggccacctagaccta

SEQ ID NO: 649029 - DNA, 33 bp, Homo sapien
ttatctgtcttcctacactaaaagataagttcc

SEQ ID NO: 649030 - DNA, 33 bp, Homo sapien
ttatctgtcttcctacgctaaaagataagttcc

SEQ ID NO: 649031 - DNA, 33 bp, Homo sapien
cctttccttatagcaaacttgaatcccttatag

SEQ ID NO: 649032 - DNA, 33 bp, Homo sapien
cctttccttatagcaatcttgaatcccttatag

SEQ ID NO: 649033 - DNA, 33 bp, Homo sapien
taaagtttaaatttctaaaactggcattcaggg

SEQ ID NO: 649034 - DNA, 33 bp, Homo sapien
taaagtttaaatttctgaaactggcattcaggg

SEQ ID NO: 649035 - DNA, 33 bp, Homo sapien
ttctctagaaacgaaacgatgaggagtgtacca

SEQ ID NO: 649036 - DNA, 33 bp, Homo sapien
ttctctagaaacgaaatgatgaggagtgtacca

SEQ ID NO: 649037 - DNA, 33 bp, Homo sapien
tcctactacttcataccgctctcttctgtctat

SEQ ID NO: 649038 - DNA, 33 bp, Homo sapien
tcctactacttcatactgctctcttctgtctat

SEQ ID NO: 649039 - DNA, 33 bp, Homo sapien
cacctctcctgctgtcactctagctcctgctag

SEQ ID NO: 649040 - DNA, 33 bp, Homo sapien
cacctctcctgctgtctctctagctcctgctag

SEQ ID NO: 649041 - DNA, 33 bp, Homo sapien
acactcaggcaaattaataacatccaaaatttg

SEQ ID NO: 649042 - DNA, 33 bp, Homo sapien
acactcaggcaaattagtaacatccaaaatttg

SEQ ID NO: 649043 - DNA, 33 bp, Homo sapien
acacaggacgtataaaacaaaaacacaatttta

SEQ ID NO: 649044 - DNA, 33 bp, Homo sapien
acacaggacgtataaagcaaaaacacaatttta

SEQ ID NO: 649045 - DNA, 33 bp, Homo sapien; identical to SEQ ID NO: 649043

SEQ ID NO: 649046 - DNA, 33 bp, Homo sapien; identical to SEQ ID NO: 649044

SEQ ID NO: 649047 - DNA, 33 bp, Homo sapien
gctcacccccattccccacagcagctgaagcaa

SEQ ID NO: 649048 - DNA, 33 bp, Homo sapien
gctcacccccattcccgacagcagctgaagcaa

SEQ ID NO: 649049 - DNA, 33 bp, Homo sapien
tggtcagagatgtatacagcaattttttgctgt

SEQ ID NO: 649050 - DNA, 33 bp, Homo sapien
tggtcagagatgtatatagcaattttttgctgt

SEQ ID NO: 649051 - DNA, 33 bp, Homo sapien
ggactcaccttgtgtacaggttgaatatcagca

SEQ ID NO: 649052 - DNA, 33 bp, Homo sapien
ggactcaccttgtgtataggttgaatatcagca

SEQ ID NO: 649053 - DNA, 33 bp, Homo sapien
agacctatgaatcttacgatcctttttgcatct

SEQ ID NO: 649054 - DNA, 33 bp, Homo sapien
agacctatgaatcttatgatcctttttgcatct

SEQ ID NO: 649055 - DNA, 33 bp, Homo sapien
aaaaaagacaggctctcaagaggtaggtatggt

SEQ ID NO: 649056 - DNA, 33 bp, Homo sapien
aaaaaagacaggctctgaagaggtaggtatggt

SEQ ID NO: 649057 - DNA, 33 bp, Homo sapien
cacagtaagtggataacgttagtggaaagatac

SEQ ID NO: 649058 - DNA, 33 bp, Homo sapien
cacagtaagtggataaggttagtggaaagatac

SEQ ID NO: 649059 - DNA, 33 bp, Homo sapien
ccacacacatatacacagtaatttctactctca

SEQ ID NO: 649060 - DNA, 33 bp, Homo sapien
ccacacacatatacacggtaatttctactctca

SEQ ID NO: 649061 - DNA, 33 bp, Homo sapien
aataaaatacaaagaacatacgaatggaaaaca

SEQ ID NO: 649062 - DNA, 33 bp, Homo sapien
aataaaatacaaagaagatacgaatggaaaaca

SEQ ID NO: 649063 - DNA, 33 bp, Homo sapien; identical to SEQ ID NO: 649061

SEQ ID NO: 649064 - DNA, 33 bp, Homo sapien; identical to SEQ ID NO: 649062

SEQ ID NO: 649065 - DNA, 33 bp, Homo sapien
agaggttcgtaacaaaatgttaatggtaaaatg

SEQ ID NO: 649066 - DNA, 33 bp, Homo sapien
agaggttcgtaacaaagtgttaatggtaaaatg

SEQ ID NO: 649067 - DNA, 33 bp, Homo sapien
agaaggcacaatttgaactttgtgttactggta

SEQ ID NO: 649068 - DNA, 33 bp, Homo sapien
agaaggcacaatttgatctttgtgttactggta

SEQ ID NO: 649069 - DNA, 33 bp, Homo sapien
gtgtgggtcagactgactaccagtaacacaaag

SEQ ID NO: 649070 - DNA, 33 bp, Homo sapien
gtgtgggtcagactgattaccagtaacacaaag

SEQ ID NO: 649071 - DNA, 33 bp, Homo sapien
gttattacaaatagcagtacctccttttttaag

SEQ ID NO: 649072 - DNA, 33 bp, Homo sapien
gttattacaaatagcattacctccttttttaag

SEQ ID NO: 649073 - DNA, 33 bp, Homo sapien
taatcttgtctggcacagtagttttacaggtgt

SEQ ID NO: 649074 - DNA, 33 bp, Homo sapien
taatcttgtctggcacggtagttttacaggtgt

SEQ ID NO: 649075 - DNA, 33 bp, Homo sapien
aactcctcacatggaaaggggggaaaaaatcct

SEQ ID NO: 649076 - DNA, 33 bp, Homo sapien
aactcctcacatggaatggggggaaaaaatcct

SEQ ID NO: 649077 - DNA, 33 bp, Homo sapien
ttaacccttcttcagacgaaacatggaaaataa

SEQ ID NO: 649078 - DNA, 33 bp, Homo sapien
ttaacccttcttcagatgaaacatggaaaataa

SEQ ID NO: 649079 - DNA, 33 bp, Homo sapien
cataggctcccaataacgaatgaatggatttat

SEQ ID NO: 649080 - DNA, 33 bp, Homo sapien
cataggctcccaataatgaatgaatggatttat

SEQ ID NO: 649081 - DNA, 33 bp, Homo sapien
gcaaagcttgaaagtaaagggctaggaaaagag

SEQ ID NO: 649082 - DNA, 33 bp, Homo sapien
gcaaagcttgaaagtagagggctaggaaaagag

SEQ ID NO: 649083 - DNA, 33 bp, Homo sapien
attctttttatcatcacaaagtgactattacta

SEQ ID NO: 649084 - DNA, 33 bp, Homo sapien
attctttttatcatcataaagtgactattacta

SEQ ID NO: 649085 - DNA, 33 bp, Homo sapien
tcatgtctgcaatgccaatatccccctactcca

SEQ ID NO: 649086 - DNA, 33 bp, Homo sapien
tcatgtctgcaatgccgatatccccctactcca

SEQ ID NO: 649087 - DNA, 33 bp, Homo sapien
catgtttctaaaatcaaaactatgtgtattatt

SEQ ID NO: 649088 - DNA, 33 bp, Homo sapien
catgtttctaaaatcagaactatgtgtattatt

SEQ ID NO: 649089 - DNA, 33 bp, Homo sapien
caaaaagataatgcacaatgagattgcctacca

SEQ ID NO: 649090 - DNA, 33 bp, Homo sapien
caaaaagataatgcacgatgagattgcctacca

SEQ ID NO: 649091 - DNA, 33 bp, Homo sapien
caagaacaatttccaaaacaaagcaaactttca

SEQ ID NO: 649092 - DNA, 33 bp, Homo sapien
caagaacaatttccaagacaaagcaaactttca

SEQ ID NO: 649093 - DNA, 33 bp, Homo sapien
acagaaatcacacacacatggggtattttcaca

SEQ ID NO: 649094 - DNA, 33 bp, Homo sapien
acagaaatcacacacatatggggtattttcaca

SEQ ID NO: 649095 - DNA, 33 bp, Homo sapien
ttttatttcacagttacgtacacttaagctcca

SEQ ID NO: 649096 - DNA, 33 bp, Homo sapien
ttttatttcacagttatgtacacttaagctcca

SEQ ID NO: 649097 - DNA, 33 bp, Homo sapien
gaaccaaatttagcaacagggaggagatgcttt

SEQ ID NO: 649098 - DNA, 33 bp, Homo sapien
gaaccaaatttagcaatagggaggagatgcttt

SEQ ID NO: 649099 - DNA, 33 bp, Homo sapien
taagaagagatgttgaaaagttaatacagaata

SEQ ID NO: 649100 - DNA, 33 bp, Homo sapien
taagaagagatgttgagaagttaatacagaata

SEQ ID NO: 649101 - DNA, 33 bp, Homo sapien
ataatccactgatggacggagttcttcctaatg

SEQ ID NO: 649102 - DNA, 33 bp, Homo sapien
ataatccactgatggatggagttcttcctaatg

SEQ ID NO: 649103 - DNA, 33 bp, Homo sapien
acaattctgcttgttacgggattgagctaggtt

SEQ ID NO: 649104 - DNA, 33 bp, Homo sapien
acaattctgcttgttatgggattgagctaggtt

SEQ ID NO: 649105 - DNA, 33 bp, Homo sapien
gtttcagttctctggccgactccatgcatggct

SEQ ID NO: 649106 - DNA, 33 bp, Homo sapien
gtttcagttctctggctgactccatgcatggct

SEQ ID NO: 649107 - DNA, 33 bp, Homo sapien
gtgaaatttaggcagacctctatgcagacttta

SEQ ID NO: 649108 - DNA, 33 bp, Homo sapien
gtgaaatttaggcagatctctatgcagacttta

SEQ ID NO: 649109 - DNA, 33 bp, Homo sapien
gaaaaaagactagcaacctaaatcagctagagg

SEQ ID NO: 649110 - DNA, 33 bp, Homo sapien
gaaaaaagactagcaagctaaatcagctagagg

SEQ ID NO: 649111 - DNA, 33 bp, Homo sapien
ttttttggccaatggacattggtagatatgaca

SEQ ID NO: 649112 - DNA, 33 bp, Homo sapien
ttttttggccaatggatattggtagatatgaca

SEQ ID NO: 649113 - DNA, 33 bp, Homo sapien
ttcctgaccctagtgactatgagccacaataag

SEQ ID NO: 649114 - DNA, 33 bp, Homo sapien
ttcctgaccctagtgagtatgagccacaataag

SEQ ID NO: 649115 - DNA, 33 bp, Homo sapien
gtgcaacagtacaggaatatgttttggaggcaa

SEQ ID NO: 649116 - DNA, 33 bp, Homo sapien
gtgcaacagtacaggagtatgttttggaggcaa

SEQ ID NO: 649117 - DNA, 33 bp, Homo sapien
aaaaggtggccagttaccataaatgaaatccca

SEQ ID NO: 649118 - DNA, 33 bp, Homo sapien
aaaaggtggccagttatcataaatgaaatccca

SEQ ID NO: 649119 - DNA, 33 bp, Homo sapien
ggctagtaataaccacaagattattgaggggct

SEQ ID NO: 649120 - DNA, 33 bp, Homo sapien
ggctagtaataaccacgagattattgaggggct

SEQ ID NO: 649121 - DNA, 33 bp, Homo sapien
gaagaaaatgatcagacgacagtaagtactctg

SEQ ID NO: 649122 - DNA, 33 bp, Homo sapien
gaagaaaatgatcagatgacagtaagtactctg

SEQ ID NO: 649123 - DNA, 33 bp, Homo sapien
ccccagatctttccaccgagccacacagctgcc

SEQ ID NO: 649124 - DNA, 33 bp, Homo sapien
ccccagatctttccactgagccacacagctgcc

SEQ ID NO: 649125 - DNA, 33 bp, Homo sapien
aattgctgaggggtgaactatgtaaatccagag

SEQ ID NO: 649126 - DNA, 33 bp, Homo sapien
aattgctgaggggtgagctatgtaaatccagag

SEQ ID NO: 649127 - DNA, 33 bp, Homo sapien
tgatctagttcatgtaaatcactcttatgctga

SEQ ID NO: 649128 - DNA, 33 bp, Homo sapien
tgatctagttcatgtacatcactcttatgctga

SEQ ID NO: 649129 - DNA, 33 bp, Homo sapien
tgttcagctcatcccaatggacctttccaactt

SEQ ID NO: 649130 - DNA, 33 bp, Homo sapien
tgttcagctcatcccagtggacctttccaactt

SEQ ID NO: 649131 - DNA, 33 bp, Homo sapien
aggaaaaggcctaagaagagaaggttggcaatg

SEQ ID NO: 649132 - DNA, 33 bp, Homo sapien
aggaaaaggcctaagaggagaaggttggcaatg

SEQ ID NO: 649133 - DNA, 33 bp, Homo sapien
ctatgatattatccaacatttaagaactatcta

SEQ ID NO: 649134 - DNA, 33 bp, Homo sapien
ctatgatattatccaagatttaagaactatcta

SEQ ID NO: 649135 - DNA, 33 bp, Homo sapien
accatgattcatgcccaagtctcttaattttta

SEQ ID NO: 649136 - DNA, 33 bp, Homo sapien
accatgattcatgcccgagtctcttaattttta

SEQ ID NO: 649137 - DNA, 33 bp, Homo sapien
tcagctttggatttgaatataaagcatagaaca

SEQ ID NO: 649138 - DNA, 33 bp, Homo sapien
tcagctttggatttgagtataaagcatagaaca

SEQ ID NO: 649139 - DNA, 33 bp, Homo sapien
tttggttgaactaaaacgtgtttgggataaaga

SEQ ID NO: 649140 - DNA, 33 bp, Homo sapien
tttggttgaactaaaatgtgtttgggataaaga

SEQ ID NO: 649141 - DNA, 33 bp, Homo sapien
attgtgtaggctgtgactaagtgccttttaaaa

SEQ ID NO: 649142 - DNA, 33 bp, Homo sapien
attgtgtaggctgtgattaagtgccttttaaaa

SEQ ID NO: 649143 - DNA, 33 bp, Homo sapien
gctacgcttcttcccccgaaaaccctgagtgag

SEQ ID NO: 649144 - DNA, 33 bp, Homo sapien
gctacgcttcttcccctgaaaaccctgagtgag

SEQ ID NO: 649145 - DNA, 33 bp, Homo sapien
gcctggagccaaaatgcaccagtacctacataa

SEQ ID NO: 649146 - DNA, 33 bp, Homo sapien
gcctggagccaaaatgtaccagtacctacataa

SEQ ID NO: 649147 - DNA, 33 bp, Homo sapien
agaggaacttaactccaaatgggttagaggggg

SEQ ID NO: 649148 - DNA, 33 bp, Homo sapien
agaggaacttaactccgaatgggttagaggggg

SEQ ID NO: 649149 - DNA, 33 bp, Homo sapien
gaatatgttgaaaacaaatccagaaaatagtaa

SEQ ID NO: 649150 - DNA, 33 bp, Homo sapien
gaatatgttgaaaacagatccagaaaatagtaa

SEQ ID NO: 649151 - DNA, 33 bp, Homo sapien
ttgcctttcttcattaacagcctgattttaggc

SEQ ID NO: 649152 - DNA, 33 bp, Homo sapien
ttgcctttcttcattagcagcctgattttaggc

SEQ ID NO: 649153 - DNA, 33 bp, Homo sapien
ttatcactgcaactcaaaaaagctacatttttt

SEQ ID NO: 649154 - DNA, 33 bp, Homo sapien
ttatcactgcaactcataaaagctacatttttt

SEQ ID NO: 649155 - DNA, 33 bp, Homo sapien
tgtattcaatttaagacaggcacttccctcaaa

SEQ ID NO: 649156 - DNA, 33 bp, Homo sapien
tgtattcaatttaagataggcacttccctcaaa

SEQ ID NO: 649157 - DNA, 33 bp, Homo sapien
tttgttcaatttctacagcaccatttcttccaa

SEQ ID NO: 649158 - DNA, 33 bp, Homo sapien
tttgttcaatttctaccgcaccatttcttccaa

SEQ ID NO: 649159 - DNA, 33 bp, Homo sapien
caaataaaaattctcacaggagttagaggctat

SEQ ID NO: 649160 - DNA, 33 bp, Homo sapien
caaataaaaattctcagaggagttagaggctat

SEQ ID NO: 649161 - DNA, 33 bp, Homo sapien
gaggagatattgacaaagggtaggaagtttcag

SEQ ID NO: 649162 - DNA, 33 bp, Homo sapien
gaggagatattgacaacgggtaggaagtttcag

SEQ ID NO: 649163 - DNA, 33 bp, Homo sapien
acattttgtacttagcacacgttttgttgaatg

SEQ ID NO: 649164 - DNA, 33 bp, Homo sapien
acattttgtacttagcgcacgttttgttgaatg

SEQ ID NO: 649165 - DNA, 33 bp, Homo sapien
cacatgaatggaacaaagtttctgttctgagtt

SEQ ID NO: 649166 - DNA, 33 bp, Homo sapien
cacatgaatggaacaacgtttctgttctgagtt

SEQ ID NO: 649167 - DNA, 33 bp, Homo sapien
atacaattgattctgaaaagtggtttgatactt

SEQ ID NO: 649168 - DNA, 33 bp, Homo sapien
atacaattgattctgagaagtggtttgatactt

SEQ ID NO: 649169 - DNA, 33 bp, Homo sapien
tctaattaaggagtccacagaatagccccatgg

SEQ ID NO: 649170 - DNA, 33 bp, Homo sapien
tctaattaaggagtccgcagaatagccccatgg

SEQ ID NO: 649171 - DNA, 33 bp, Homo sapien
ggtaaataaagttgagcagtaatgaaggaagct

SEQ ID NO: 649172 - DNA, 33 bp, Homo sapien
ggtaaataaagttgagtagtaatgaaggaagct

SEQ ID NO: 649173 - DNA, 33 bp, Homo sapien
agtggaaaagggatggaaactagtgagaaggga

SEQ ID NO: 649174 - DNA, 33 bp, Homo sapien
agtggaaaagggatggcaactagtgagaaggga

SEQ ID NO: 649175 - DNA, 33 bp, Homo sapien
tctaagcctttgcttccccagtgatcccctctc

SEQ ID NO: 649176 - DNA, 33 bp, Homo sapien
tctaagcctttgcttctccagtgatcccctctc

SEQ ID NO: 649177 - DNA, 33 bp, Homo sapien
taaagtgctaaggcataatcattctcttgacat

SEQ ID NO: 649178 - DNA, 33 bp, Homo sapien
taaagtgctaaggcatgatcattctcttgacat

SEQ ID NO: 649179 - DNA, 33 bp, Homo sapien
ttgtagctttgcaaaacttcatggtagcttgaa

SEQ ID NO: 649180 - DNA, 33 bp, Homo sapien
ttgtagctttgcaaaatttcatggtagcttgaa

SEQ ID NO: 649181 - DNA, 33 bp, Homo sapien
atcgagtctgatattcacccctggcagctgtct

SEQ ID NO: 649182 - DNA, 33 bp, Homo sapien
atcgagtctgatattcgcccctggcagctgtct

SEQ ID NO: 649183 - DNA, 33 bp, Homo sapien
aaacaattcatgaagaagccaaatgtctaagca

SEQ ID NO: 649184 - DNA, 33 bp, Homo sapien
aaacaattcatgaagatgccaaatgtctaagca

SEQ ID NO: 649185 - DNA, 33 bp, Homo sapien
aataaattatccatataacagttgaacaaaagg

SEQ ID NO: 649186 - DNA, 33 bp, Homo sapien
aataaattatccatatgacagttgaacaaaagg

SEQ ID NO: 649187 - DNA, 33 bp, Homo sapien
caccttgctcaaaacccgcataaaacatggaga

SEQ ID NO: 649188 - DNA, 33 bp, Homo sapien
caccttgctcaaaacctgcataaaacatggaga

SEQ ID NO: 649189 - DNA, 33 bp, Homo sapien
gtgcctcaaacaccataagcaaattagagaaac

SEQ ID NO: 649190 - DNA, 33 bp, Homo sapien
gtgcctcaaacaccatgagcaaattagagaaac

SEQ ID NO: 649191 - DNA, 33 bp, Homo sapien
gggtatcactctatcacctaaatttttttctac

SEQ ID NO: 649192 - DNA, 33 bp, Homo sapien
gggtatcactctatcagctaaatttttttctac

SEQ ID NO: 649193 - DNA, 33 bp, Homo sapien
ctttctcagatgtttacaaggaatgtgcattga

SEQ ID NO: 649194 - DNA, 33 bp, Homo sapien
ctttctcagatgtttataaggaatgtgcattga

SEQ ID NO: 649195 - DNA, 33 bp, Homo sapien
atatcaatatttaaaacttgagttgttcacaaa

SEQ ID NO: 649196 - DNA, 33 bp, Homo sapien
atatcaatatttaaaatttgagttgttcacaaa

SEQ ID NO: 649197 - DNA, 33 bp, Homo sapien
tgcaggcatttaataccatttcaacatataaac

SEQ ID NO: 649198 - DNA, 33 bp, Homo sapien
tgcaggcatttaatactatttcaacatataaac

SEQ ID NO: 649199 - DNA, 33 bp, Homo sapien
gctctcagagaagcaacgcctgttaggtctcac

SEQ ID NO: 649200 - DNA, 33 bp, Homo sapien
gctctcagagaagcaaggcctgttaggtctcac

SEQ ID NO: 649201 - DNA, 33 bp, Homo sapien
ctcttgtaaggtaggaaatgaggtggtgtgaac

SEQ ID NO: 649202 - DNA, 33 bp, Homo sapien
ctcttgtaaggtaggagatgaggtggtgtgaac

SEQ ID NO: 649203 - DNA, 33 bp, Homo sapien
gatggaaaacatcagaagtaatgcagagctgca

SEQ ID NO: 649204 - DNA, 33 bp, Homo sapien
gatggaaaacatcagaggtaatgcagagctgca

SEQ ID NO: 649205 - DNA, 33 bp, Homo sapien
caatttagccaagaaaagggggagtgtcctgtc

SEQ ID NO: 649206 - DNA, 33 bp, Homo sapien
caatttagccaagaaaggggggagtgtcctgtc

SEQ ID NO: 649207 - DNA, 33 bp, Homo sapien
cgatcagtgcctaacacggagcaagcatttaaa

SEQ ID NO: 649208 - DNA, 33 bp, Homo sapien
cgatcagtgcctaacatggagcaagcatttaaa

SEQ ID NO: 649209 - DNA, 33 bp, Homo sapien
catagagcctgacacacaggaaacatttactaa

SEQ ID NO: 649210 - DNA, 33 bp, Homo sapien
catagagcctgacacataggaaacatttactaa

SEQ ID NO: 649211 - DNA, 33 bp, Homo sapien
caaaaaacatgtgtcaaaagctataaagtgggc

SEQ ID NO: 649212 - DNA, 33 bp, Homo sapien
caaaaaacatgtgtcacaagctataaagtgggc

SEQ ID NO: 649213 - DNA, 33 bp, Homo sapien
cccttaaaaaaatcaaacatgaattggccaggc

SEQ ID NO: 649214 - DNA, 33 bp, Homo sapien
cccttaaaaaaatcaagcatgaattggccaggc

SEQ ID NO: 649215 - DNA, 33 bp, Homo sapien
catttgaaataatgaaattaacgttgagccctt

SEQ ID NO: 649216 - DNA, 33 bp, Homo sapien
catttgaaataatgaagttaacgttgagccctt

SEQ ID NO: 649217 - DNA, 33 bp, Homo sapien
agatgccttagacaaactgaagaataacctgca

SEQ ID NO: 649218 - DNA, 33 bp, Homo sapien
agatgccttagacaaattgaagaataacctgca

SEQ ID NO: 649219 - DNA, 33 bp, Homo sapien
attagttgaatttgcacggtcctaggtatgttc

SEQ ID NO: 649220 - DNA, 33 bp, Homo sapien
attagttgaatttgcatggtcctaggtatgttc

SEQ ID NO: 649221 - DNA, 33 bp, Homo sapien
aggcaccgagagggaaaagggtgagattgaaaa

SEQ ID NO: 649222 - DNA, 33 bp, Homo sapien
aggcaccgagagggaagagggtgagattgaaaa

SEQ ID NO: 649223 - DNA, 33 bp, Homo sapien
tgggaagatgatgaaacggtatataggaagttg

SEQ ID NO: 649224 - DNA, 33 bp, Homo sapien
tgggaagatgatgaaatggtatataggaagttg

SEQ ID NO: 649225 - DNA, 33 bp, Homo sapien
cttccgaaacaggatgcactgtatcacccaagc

SEQ ID NO: 649226 - DNA, 33 bp, Homo sapien
cttccgaaacaggatgtactgtatcacccaagc

SEQ ID NO: 649227 - DNA, 33 bp, Homo sapien
caggagcaaaaaggaaaccatgagtcacacaga

SEQ ID NO: 649228 - DNA, 33 bp, Homo sapien
caggagcaaaaaggaacccatgagtcacacaga

SEQ ID NO: 649229 - DNA, 33 bp, Homo sapien
agtcacacagaaaagaaagattaaatacataaa

SEQ ID NO: 649230 - DNA, 33 bp, Homo sapien
agtcacacagaaaagagagattaaatacataaa

SEQ ID NO: 649231 - DNA, 33 bp, Homo sapien
agtttcttcccgattcaaaagtcaatagttggc

SEQ ID NO: 649232 - DNA, 33 bp, Homo sapien
agtttcttcccgattcgaaagtcaatagttggc

SEQ ID NO: 649233 - DNA, 33 bp, Homo sapien
aaaatgaataaatctaaggcatcacatgacttc

SEQ ID NO: 649234 - DNA, 33 bp, Homo sapien
aaaatgaataaatctacggcatcacatgacttc

SEQ ID NO: 649235 - DNA, 33 bp, Homo sapien
aagcatgatcccctcaatactggctgctaagtt

SEQ ID NO: 649236 - DNA, 33 bp, Homo sapien
aagcatgatcccctcagtactggctgctaagtt

SEQ ID NO: 649237 - DNA, 33 bp, Homo sapien
tattctcaagcatgaaatccacagcctctgaaa

SEQ ID NO: 649238 - DNA, 33 bp, Homo sapien
tattctcaagcatgaagtccacagcctctgaaa

SEQ ID NO: 649239 - DNA, 33 bp, Homo sapien
ctctccagtgacaaacagtccagagatcactaa

SEQ ID NO: 649240 - DNA, 33 bp, Homo sapien
ctctccagtgacaaacggtccagagatcactaa

SEQ ID NO: 649241 - DNA, 33 bp, Homo sapien
tgtgtctaagtccaacaaatgcttttgggtgat

SEQ ID NO: 649242 - DNA, 33 bp, Homo sapien
tgtgtctaagtccaacgaatgcttttgggtgat

SEQ ID NO: 649243 - DNA, 33 bp, Homo sapien
tccagagtttatgctacgtaactggtcacttgg

SEQ ID NO: 649244 - DNA, 33 bp, Homo sapien
tccagagtttatgctatgtaactggtcacttgg

SEQ ID NO: 649245 - DNA, 33 bp, Homo sapien
attgccttatgtgacaactcactccatctaatt

SEQ ID NO: 649246 - DNA, 33 bp, Homo sapien
attgccttatgtgacacctcactccatctaatt

SEQ ID NO: 649247 - DNA, 33 bp, Homo sapien
acatacagcgatgctcaatgcaattagagagga

SEQ ID NO: 649248 - DNA, 33 bp, Homo sapien
acatacagcgatgctcgatgcaattagagagga

SEQ ID NO: 649249 - DNA, 33 bp, Homo sapien
tgattactccagtcaacaattttataacttgcc

SEQ ID NO: 649250 - DNA, 33 bp, Homo sapien
tgattactccagtcaagaattttataacttgcc

SEQ ID NO: 649251 - DNA, 33 bp, Homo sapien
cctaattctctatcaactaaacttcctcttaag

SEQ ID NO: 649252 - DNA, 33 bp, Homo sapien
cctaattctctatcaagtaaacttcctcttaag

SEQ ID NO: 649253 - DNA, 33 bp, Homo sapien
catgactcttgtttagcatcacatgtaattata

SEQ ID NO: 649254 - DNA, 33 bp, Homo sapien
catgactcttgtttagtatcacatgtaattata

SEQ ID NO: 649255 - DNA, 33 bp, Homo sapien
gagttcagaacataaacgtgtaattgcaagaat

SEQ ID NO: 649256 - DNA, 33 bp, Homo sapien
gagttcagaacataaatgtgtaattgcaagaat

SEQ ID NO: 649257 - DNA, 33 bp, Homo sapien
ccttcctttgttggcccaagagccgtgtctagt

SEQ ID NO: 649258 - DNA, 33 bp, Homo sapien
ccttcctttgttggcctaagagccgtgtctagt

SEQ ID NO: 649259 - DNA, 33 bp, Homo sapien
acaggctgctttctggaaatcccttggtcattt

SEQ ID NO: 649260 - DNA, 33 bp, Homo sapien
acaggctgctttctggcaatcccttggtcattt

SEQ ID NO: 649261 - DNA, 33 bp, Homo sapien
atagtagatacaaagaactgctacagtaataat

SEQ ID NO: 649262 - DNA, 33 bp, Homo sapien
atagtagatacaaagagctgctacagtaataat

SEQ ID NO: 649263 - DNA, 33 bp, Homo sapien
tgcaatatgcctaagtcaaggatttttagatgg

SEQ ID NO: 649264 - DNA, 33 bp, Homo sapien
tgcaatatgcctaagtgaaggatttttagatgg

SEQ ID NO: 649265 - DNA, 33 bp, Homo sapien
aaatcagagtccaaaacaggtcttcagggctgt

SEQ ID NO: 649266 - DNA, 33 bp, Homo sapien
aaatcagagtccaaaataggtcttcagggctgt

SEQ ID NO: 649267 - DNA, 33 bp, Homo sapien
tccaaggtcttctggaaaatccatgagcaactg

SEQ ID NO: 649268 - DNA, 33 bp, Homo sapien
tccaaggtcttctggagaatccatgagcaactg

SEQ ID NO: 649269 - DNA, 33 bp, Homo sapien
ccgcagcccagttttaaacaattgagactgatt

SEQ ID NO: 649270 - DNA, 33 bp, Homo sapien
ccgcagcccagttttatacaattgagactgatt

SEQ ID NO: 649271 - DNA, 33 bp, Homo sapien
ttagaacactctgctacgctattggaatgtttt

SEQ ID NO: 649272 - DNA, 33 bp, Homo sapien
ttagaacactctgctatgctattggaatgtttt

SEQ ID NO: 649273 - DNA, 33 bp, Homo sapien
ctgtgtagctatttgaagatatgctggcctgta

SEQ ID NO: 649274 - DNA, 33 bp, Homo sapien
ctgtgtagctatttgacgatatgctggcctgta

SEQ ID NO: 649275 - DNA, 33 bp, Homo sapien
ttggatagccgtcatacgagtcctctctaattt

SEQ ID NO: 649276 - DNA, 33 bp, Homo sapien
ttggatagccgtcatatgagtcctctctaattt

SEQ ID NO: 649277 - DNA, 33 bp, Homo sapien
tagttgtagtattgaactaactgttaattcagt

SEQ ID NO: 649278 - DNA, 33 bp, Homo sapien
tagttgtagtattgaagtaactgttaattcagt

SEQ ID NO: 649279 - DNA, 33 bp, Homo sapien
gggccaaatagtgacaatcctctgggaatgcat

SEQ ID NO: 649280 - DNA, 33 bp, Homo sapien
gggccaaatagtgacagtcctctgggaatgcat

SEQ ID NO: 649281 - DNA, 33 bp, Homo sapien
tcaagttagagatgtaactgccttaaaacttgc

SEQ ID NO: 649282 - DNA, 33 bp, Homo sapien
tcaagttagagatgtagctgccttaaaacttgc

SEQ ID NO: 649283 - DNA, 33 bp, Homo sapien
catgagtgagtagccacgtcttttattttgctt

SEQ ID NO: 649284 - DNA, 33 bp, Homo sapien
catgagtgagtagccatgtcttttattttgctt

SEQ ID NO: 649285 - DNA, 33 bp, Homo sapien
attttagataatgccaaatagactttatagcta

SEQ ID NO: 649286 - DNA, 33 bp, Homo sapien
attttagataatgccagatagactttatagcta

SEQ ID NO: 649287 - DNA, 33 bp, Homo sapien
ggattattgaatttgcactttataactaatgtc

SEQ ID NO: 649288 - DNA, 33 bp, Homo sapien
ggattattgaatttgcgctttataactaatgtc

SEQ ID NO: 649289 - DNA, 33 bp, Homo sapien
actagaaaccattttaactgcacaaggtcagct

SEQ ID NO: 649290 - DNA, 33 bp, Homo sapien
actagaaaccattttatctgcacaaggtcagct

SEQ ID NO: 649291 - DNA, 33 bp, Homo sapien
aacttattcttacacactcagacatctctatct

SEQ ID NO: 649292 - DNA, 33 bp, Homo sapien
aacttattcttacacattcagacatctctatct

SEQ ID NO: 649293 - DNA, 33 bp, Homo sapien
cactcagataagtgcaacttgtgtaatatttcc

SEQ ID NO: 649294 - DNA, 33 bp, Homo sapien
cactcagataagtgcatcttgtgtaatatttcc

SEQ ID NO: 649295 - DNA, 33 bp, Homo sapien
ttaagaagctgttgaactaatctaagaatggag

SEQ ID NO: 649296 - DNA, 33 bp, Homo sapien
ttaagaagctgttgaagtaatctaagaatggag

SEQ ID NO: 649297 - DNA, 33 bp, Homo sapien
agactactgaggtaaaagcaacaaaaccagaaa

SEQ ID NO: 649298 - DNA, 33 bp, Homo sapien
agactactgaggtaaacgcaacaaaaccagaaa

SEQ ID NO: 649299 - DNA, 33 bp, Homo sapien
tttgtggggcctcaagacaattacagtggtaac

SEQ ID NO: 649300 - DNA, 33 bp, Homo sapien
tttgtggggcctcaagtcaattacagtggtaac

SEQ ID NO: 649301 - DNA, 33 bp, Homo sapien
tgtcctgataattccactgatggccattccccc

SEQ ID NO: 649302 - DNA, 33 bp, Homo sapien
tgtcctgataattccattgatggccattccccc

SEQ ID NO: 649303 - DNA, 33 bp, Homo sapien
ctggtagagatgtaaacagatttctgttcagta

SEQ ID NO: 649304 - DNA, 33 bp, Homo sapien
ctggtagagatgtaaatagatttctgttcagta

SEQ ID NO: 649305 - DNA, 33 bp, Homo sapien
tcactttcaaccatgaggttcccaatacagtct

SEQ ID NO: 649306 - DNA, 33 bp, Homo sapien
tcactttcaaccatgatgttcccaatacagtct

SEQ ID NO: 649307 - DNA, 33 bp, Homo sapien
tgagaccaatttccagcactctttgcatcttgc

SEQ ID NO: 649308 - DNA, 33 bp, Homo sapien
tgagaccaatttccaggactctttgcatcttgc

SEQ ID NO: 649309 - DNA, 33 bp, Homo sapien
cctctctgcttttaaaattccctcttatgtaac

SEQ ID NO: 649310 - DNA, 33 bp, Homo sapien
cctctctgcttttaaagttccctcttatgtaac

SEQ ID NO: 649311 - DNA, 33 bp, Homo sapien
gcagaaggaatcagagaagtcaccttgagagaa

SEQ ID NO: 649312 - DNA, 33 bp, Homo sapien
gcagaaggaatcagaggagtcaccttgagagaa

SEQ ID NO: 649313 - DNA, 33 bp, Homo sapien
atagcctgaaccgaaaacccactgggcagtgag

SEQ ID NO: 649314 - DNA, 33 bp, Homo sapien
atagcctgaaccgaaatcccactgggcagtgag

SEQ ID NO: 649315 - DNA, 33 bp, Homo sapien
actgcagagaccattacgtgactatgagacacg

SEQ ID NO: 649316 - DNA, 33 bp, Homo sapien
actgcagagaccattatgtgactatgagacacg

SEQ ID NO: 649317 - DNA, 33 bp, Homo sapien
caaagacgctggaatcaagctccttctaacaca

SEQ ID NO: 649318 - DNA, 33 bp, Homo sapien
caaagacgctggaatcgagctccttctaacaca

SEQ ID NO: 649319 - DNA, 33 bp, Homo sapien
ttgtaacttggcaatacatatgagaagcattca

SEQ ID NO: 649320 - DNA, 33 bp, Homo sapien
ttgtaacttggcaatatatatgagaagcattca

SEQ ID NO: 649321 - DNA, 33 bp, Homo sapien
tgccatgaatctcaaaccagtactgaccagata

SEQ ID NO: 649322 - DNA, 33 bp, Homo sapien
tgccatgaatctcaaatcagtactgaccagata

SEQ ID NO: 649323 - DNA, 33 bp, Homo sapien
ctggcaaatgtggatacagtcgatgtctcccag

SEQ ID NO: 649324 - DNA, 33 bp, Homo sapien
ctggcaaatgtggatatagtcgatgtctcccag

SEQ ID NO: 649325 - DNA, 33 bp, Homo sapien
gatacacaatgtcttgcacaaaaatttgaaggg

SEQ ID NO: 649326 - DNA, 33 bp, Homo sapien
gatacacaatgtcttggacaaaaatttgaaggg

SEQ ID NO: 649327 - DNA, 33 bp, Homo sapien
ctcccttagttcacccacattcatatcgagaag

SEQ ID NO: 649328 - DNA, 33 bp, Homo sapien
ctcccttagttcacccgcattcatatcgagaag

SEQ ID NO: 649329 - DNA, 33 bp, Homo sapien
ctttccaaaagtgtcaaagtttgggtcaaaata

SEQ ID NO: 649330 - DNA, 33 bp, Homo sapien
ctttccaaaagtgtcagagtttgggtcaaaata

SEQ ID NO: 649331 - DNA, 33 bp, Homo sapien
cataatcatcattcaccataaggagctcattaa

SEQ ID NO: 649332 - DNA, 33 bp, Homo sapien
cataatcatcattcactataaggagctcattaa

SEQ ID NO: 649333 - DNA, 33 bp, Homo sapien
aaagtaactaccttcacgatcatttatatagga

SEQ ID NO: 649334 - DNA, 33 bp, Homo sapien
aaagtaactaccttcatgatcatttatatagga

SEQ ID NO: 649335 - DNA, 33 bp, Homo sapien
ttttgaaaagctacagactccactttttccaca

SEQ ID NO: 649336 - DNA, 33 bp, Homo sapien
ttttgaaaagctacaggctccactttttccaca

SEQ ID NO: 649337 - DNA, 33 bp, Homo sapien
aaatcctcataggcataaacttgtaggcttaat

SEQ ID NO: 649338 - DNA, 33 bp, Homo sapien
aaatcctcataggcatcaacttgtaggcttaat

SEQ ID NO: 649339 - DNA, 33 bp, Homo sapien
gttcacatcatttggcaataaaagatgatctca

SEQ ID NO: 649340 - DNA, 33 bp, Homo sapien
gttcacatcatttggccataaaagatgatctca

SEQ ID NO: 649341 - DNA, 33 bp, Homo sapien
tatgcacactcttccccaaacctaccatggtgt

SEQ ID NO: 649342 - DNA, 33 bp, Homo sapien
tatgcacactcttcccgaaacctaccatggtgt

SEQ ID NO: 649343 - DNA, 33 bp, Homo sapien
atgatgtgacggtcacaattctcaaatccattg

SEQ ID NO: 649344 - DNA, 33 bp, Homo sapien
atgatgtgacggtcactattctcaaatccattg

SEQ ID NO: 649345 - DNA, 33 bp, Homo sapien
aaatgggcccagtggaaagtgtctaattatcca

SEQ ID NO: 649346 - DNA, 33 bp, Homo sapien
aaatgggcccagtggagagtgtctaattatcca

SEQ ID NO: 649347 - DNA, 33 bp, Homo sapien
ataacaggaatgtttcaaccctttagaagcctc

SEQ ID NO: 649348 - DNA, 33 bp, Homo sapien
ataacaggaatgtttcgaccctttagaagcctc

SEQ ID NO: 649349 - DNA, 33 bp, Homo sapien
cactcatccagggtctcaacagtaacagaatca

SEQ ID NO: 649350 - DNA, 33 bp, Homo sapien
cactcatccagggtcttaacagtaacagaatca

SEQ ID NO: 649351 - DNA, 33 bp, Homo sapien
acagctatttccaaagacattaatcacatggaa

SEQ ID NO: 649352 - DNA, 33 bp, Homo sapien
acagctatttccaaaggcattaatcacatggaa

SEQ ID NO: 649353 - DNA, 33 bp, Homo sapien
ctcatctgagagatcactgaaatcataaaacct

SEQ ID NO: 649354 - DNA, 33 bp, Homo sapien
ctcatctgagagatcattgaaatcataaaacct

SEQ ID NO: 649355 - DNA, 33 bp, Homo sapien
acttgaaaattctaaaatgttcccagattactg

SEQ ID NO: 649356 - DNA, 33 bp, Homo sapien
acttgaaaattctaaagtgttcccagattactg

SEQ ID NO: 649357 - DNA, 33 bp, Homo sapien
atgatgggtattctcaactacaattctcaacta

SEQ ID NO: 649358 - DNA, 33 bp, Homo sapien
atgatgggtattctcagctacaattctcaacta

SEQ ID NO: 649359 - DNA, 33 bp, Homo sapien
atttgaatagtggaaacgggagttaatggagta

SEQ ID NO: 649360 - DNA, 33 bp, Homo sapien
atttgaatagtggaaatgggagttaatggagta

SEQ ID NO: 649361 - DNA, 33 bp, Homo sapien
tttatgtagttaagaaaagaagctatctttata

SEQ ID NO: 649362 - DNA, 33 bp, Homo sapien
tttatgtagttaagaatagaagctatctttata

SEQ ID NO: 649363 - DNA, 33 bp, Homo sapien
ggggaggaacatcagaataacagtggacttctc

SEQ ID NO: 649364 - DNA, 33 bp, Homo sapien
ggggaggaacatcagactaacagtggacttctc

SEQ ID NO: 649365 - DNA, 33 bp, Homo sapien; identical to SEQ ID NO: 649363

SEQ ID NO: 649366 - DNA, 33 bp, Homo sapien; identical to SEQ ID NO: 649364

SEQ ID NO: 649367 - DNA, 33 bp, Homo sapien
acgcaacttttaatcacggcacctcacatttta

SEQ ID NO: 649368 - DNA, 33 bp, Homo sapien
acgcaacttttaatcatggcacctcacatttta

SEQ ID NO: 649369 - DNA, 33 bp, Homo sapien
agaattgtgggagctcaaagaataatggtagct

SEQ ID NO: 649370 - DNA, 33 bp, Homo sapien
agaattgtgggagctcgaagaataatggtagct

SEQ ID NO: 649371 - DNA, 33 bp, Homo sapien
agagaaatgcaaacaacgtaaatgcccattgac

SEQ ID NO: 649372 - DNA, 33 bp, Homo sapien
agagaaatgcaaacaatgtaaatgcccattgac

SEQ ID NO: 649373 - DNA, 33 bp, Homo sapien
caaagatgaaacaaaacggatgaagacatggag

SEQ ID NO: 649374 - DNA, 33 bp, Homo sapien
caaagatgaaacaaaatggatgaagacatggag

SEQ ID NO: 649375 - DNA, 33 bp, Homo sapien
gatccagatactgtaactggcagataagaactt

SEQ ID NO: 649376 - DNA, 33 bp, Homo sapien
gatccagatactgtaattggcagataagaactt

SEQ ID NO: 649377 - DNA, 33 bp, Homo sapien
atacaacagatatctcaatagagctgctgtttt

SEQ ID NO: 649378 - DNA, 33 bp, Homo sapien
atacaacagatatctcgatagagctgctgtttt

SEQ ID NO: 649379 - DNA, 33 bp, Homo sapien
aaagcaatgaaactgaataagtcaattctagaa

SEQ ID NO: 649380 - DNA, 33 bp, Homo sapien
aaagcaatgaaactgagtaagtcaattctagaa

SEQ ID NO: 649381 - DNA, 33 bp, Homo sapien
ttaccaagtctgcccccaatatatggtttattc

SEQ ID NO: 649382 - DNA, 33 bp, Homo sapien
ttaccaagtctgcccctaatatatggtttattc

SEQ ID NO: 649383 - DNA, 33 bp, Homo sapien
aggctccttaaaagggcaagagattggtagcat

SEQ ID NO: 649384 - DNA, 33 bp, Homo sapien
aggctccttaaaagggtaagagattggtagcat

SEQ ID NO: 649385 - DNA, 33 bp, Homo sapien
gaagaggcttctgttccaagattggagatgcta

SEQ ID NO: 649386 - DNA, 33 bp, Homo sapien
gaagaggcttctgttcgaagattggagatgcta

SEQ ID NO: 649387 - DNA, 33 bp, Homo sapien
tcagatccttgccaaggagaaacatttgatagc

SEQ ID NO: 649388 - DNA, 33 bp, Homo sapien
tcagatccttgccaagtagaaacatttgatagc

SEQ ID NO: 649389 - DNA, 33 bp, Homo sapien
acccacagaatgagacaaaatatttgcaaatcc

SEQ ID NO: 649390 - DNA, 33 bp, Homo sapien
acccacagaatgagacgaaatatttgcaaatcc

SEQ ID NO: 649391 - DNA, 33 bp, Homo sapien
gaagtacctgtcctcacgctccctgatggagtg

SEQ ID NO: 649392 - DNA, 33 bp, Homo sapien
gaagtacctgtcctcatgctccctgatggagtg

SEQ ID NO: 649393 - DNA, 33 bp, Homo sapien
ccctactcacgtcaccaataaagacatacattg

SEQ ID NO: 649394 - DNA, 33 bp, Homo sapien
ccctactcacgtcacctataaagacatacattg

SEQ ID NO: 649395 - DNA, 33 bp, Homo sapien
ccatcagtggataatgaaaatacggtgtctgta

SEQ ID NO: 649396 - DNA, 33 bp, Homo sapien
ccatcagtggataatggaaatacggtgtctgta

SEQ ID NO: 649397 - DNA, 33 bp, Homo sapien
ccttgaaaattcattcccttagtgacaatttta

SEQ ID NO: 649398 - DNA, 33 bp, Homo sapien
ccttgaaaattcattctcttagtgacaatttta

SEQ ID NO: 649399 - DNA, 33 bp, Homo sapien
gggtctggaactgaaccggccctgtctccaagt

SEQ ID NO: 649400 - DNA, 33 bp, Homo sapien
gggtctggaactgaactggccctgtctccaagt

SEQ ID NO: 649401 - DNA, 33 bp, Homo sapien
ggcactatgactaaaaaaatgcacatcccctaa

SEQ ID NO: 649402 - DNA, 33 bp, Homo sapien
ggcactatgactaaaacaatgcacatcccctaa

SEQ ID NO: 649403 - DNA, 33 bp, Homo sapien
cctatcttaatttacaaagttagctgatgtttc

SEQ ID NO: 649404 - DNA, 33 bp, Homo sapien
cctatcttaatttacagagttagctgatgtttc

SEQ ID NO: 649405 - DNA, 33 bp, Homo sapien
tgaaatgacctgaaagaagatttgcatatatag

SEQ ID NO: 649406 - DNA, 33 bp, Homo sapien
tgaaatgacctgaaaggagatttgcatatatag

SEQ ID NO: 649407 - DNA, 33 bp, Homo sapien
attttgttcaacttaccacatttgaaataatat

SEQ ID NO: 649408 - DNA, 33 bp, Homo sapien
attttgttcaacttacgacatttgaaataatat

SEQ ID NO: 649409 - DNA, 33 bp, Homo sapien
ccaactttttagcatacagttgttgatattaat

SEQ ID NO: 649410 - DNA, 33 bp, Homo sapien
ccaactttttagcatatagttgttgatattaat

SEQ ID NO: 649411 - DNA, 33 bp, Homo sapien
taagaatttttgtttacggatctgataaaatct

SEQ ID NO: 649412 - DNA, 33 bp, Homo sapien
taagaatttttgtttatggatctgataaaatct

SEQ ID NO: 649413 - DNA, 33 bp, Homo sapien
atacttaaaatcacagaaagttagagactgaaa

SEQ ID NO: 649414 - DNA, 33 bp, Homo sapien
atacttaaaatcacagcaagttagagactgaaa

SEQ ID NO: 649415 - DNA, 33 bp, Homo sapien
ggacaaactgatctgacgattaattgctagagg

SEQ ID NO: 649416 - DNA, 33 bp, Homo sapien
ggacaaactgatctgatgattaattgctagagg

SEQ ID NO: 649417 - DNA, 33 bp, Homo sapien
tgttattgatgtgtagaaattctttgtataata

SEQ ID NO: 649418 - DNA, 33 bp, Homo sapien
tgttattgatgtgtaggaattctttgtataata

SEQ ID NO: 649419 - DNA, 33 bp, Homo sapien
ttacttggattgcagacggctttttctctgggc

SEQ ID NO: 649420 - DNA, 33 bp, Homo sapien
ttacttggattgcagatggctttttctctgggc

SEQ ID NO: 649421 - DNA, 33 bp, Homo sapien
cacgactgcaattccacaggaaagggatgattt

SEQ ID NO: 649422 - DNA, 33 bp, Homo sapien
cacgactgcaattccataggaaagggatgattt

SEQ ID NO: 649423 - DNA, 33 bp, Homo sapien
cgctgacctggtaacaaggttcaaggtggcata

SEQ ID NO: 649424 - DNA, 33 bp, Homo sapien
cgctgacctggtaacagggttcaaggtggcata

SEQ ID NO: 649425 - DNA, 33 bp, Homo sapien
agcccgcaaatgacaccagctaagcattgtgcg

SEQ ID NO: 649426 - DNA, 33 bp, Homo sapien
agcccgcaaatgacacgagctaagcattgtgcg

SEQ ID NO: 649427 - DNA, 33 bp, Homo sapien
attagattgtttcaccacggcctcgatgtaaaa

SEQ ID NO: 649428 - DNA, 33 bp, Homo sapien
attagattgtttcaccgcggcctcgatgtaaaa

SEQ ID NO: 649429 - DNA, 33 bp, Homo sapien
ggtgtgtaccactaagaccaaatacttcttgta

SEQ ID NO: 649430 - DNA, 33 bp, Homo sapien
ggtgtgtaccactaagcccaaatacttcttgta

SEQ ID NO: 649431 - DNA, 33 bp, Homo sapien
agatattatagttgtcacctcacaaattacaca

SEQ ID NO: 649432 - DNA, 33 bp, Homo sapien
agatattatagttgtcgcctcacaaattacaca

SEQ ID NO: 649433 - DNA, 33 bp, Homo sapien
tgtctccttgccgttaaaagaaagtagtgctgt

SEQ ID NO: 649434 - DNA, 33 bp, Homo sapien
tgtctccttgccgttacaagaaagtagtgctgt

SEQ ID NO: 649435 - DNA, 33 bp, Homo sapien
gcagcatgtaaaagaccactggactggcagttg

SEQ ID NO: 649436 - DNA, 33 bp, Homo sapien
gcagcatgtaaaagactactggactggcagttg

SEQ ID NO: 649437 - DNA, 33 bp, Homo sapien
agaccttgatgcccaaaactggttatgagagca

SEQ ID NO: 649438 - DNA, 33 bp, Homo sapien
agaccttgatgcccaacactggttatgagagca

SEQ ID NO: 649439 - DNA, 33 bp, Homo sapien
ccctgtagcctttatgcaagattagaaaattag

SEQ ID NO: 649440 - DNA, 33 bp, Homo sapien
ccctgtagcctttatgtaagattagaaaattag

SEQ ID NO: 649441 - DNA, 33 bp, Homo sapien
tcattatacagccaagccaatatttttatttat

SEQ ID NO: 649442 - DNA, 33 bp, Homo sapien
tcattatacagccaagtcaatatttttatttat

SEQ ID NO: 649443 - DNA, 33 bp, Homo sapien
ctcaacaaactactccaggaatttagctaagga

SEQ ID NO: 649444 - DNA, 33 bp, Homo sapien
ctcaacaaactactccgggaatttagctaagga

SEQ ID NO: 649445 - DNA, 33 bp, Homo sapien
tagtcattggtatctcacctaccatttgctaat

SEQ ID NO: 649446 - DNA, 33 bp, Homo sapien
tagtcattggtatctcgcctaccatttgctaat

SEQ ID NO: 649447 - DNA, 33 bp, Homo sapien
attaggaatgcagttaaattactaagaaagtga

SEQ ID NO: 649448 - DNA, 33 bp, Homo sapien
attaggaatgcagttagattactaagaaagtga

SEQ ID NO: 649449 - DNA, 33 bp, Homo sapien
tgcagttcatggaataaccattttccttagagt

SEQ ID NO: 649450 - DNA, 33 bp, Homo sapien
tgcagttcatggaatagccattttccttagagt

SEQ ID NO: 649451 - DNA, 33 bp, Homo sapien
aggaagaagttgcatacgttataggcccaacta

SEQ ID NO: 649452 - DNA, 33 bp, Homo sapien
aggaagaagttgcatatgttataggcccaacta

SEQ ID NO: 649453 - DNA, 33 bp, Homo sapien
atctggctacatcaaaatgtttagaataattat

SEQ ID NO: 649454 - DNA, 33 bp, Homo sapien
atctggctacatcaaattgtttagaataattat

SEQ ID NO: 649455 - DNA, 33 bp, Homo sapien
gtctctccacaggtacacttaactctgagaaat

SEQ ID NO: 649456 - DNA, 33 bp, Homo sapien
gtctctccacaggtacgcttaactctgagaaat

SEQ ID NO: 649457 - DNA, 33 bp, Homo sapien
tctgagagtgatttaccatgttgaagttcatgt

SEQ ID NO: 649458 - DNA, 33 bp, Homo sapien
tctgagagtgatttacgatgttgaagttcatgt

SEQ ID NO: 649459 - DNA, 33 bp, Homo sapien
actgtgactacgataagcttccgataaccaacg

SEQ ID NO: 649460 - DNA, 33 bp, Homo sapien
actgtgactacgataatcttccgataaccaacg

SEQ ID NO: 649461 - DNA, 33 bp, Homo sapien
ttatatagtaaaacacacaagaacagtttaagc

SEQ ID NO: 649462 - DNA, 33 bp, Homo sapien
ttatatagtaaaacacgcaagaacagtttaagc

SEQ ID NO: 649463 - DNA, 33 bp, Homo sapien
agtacataattcaaaccagaattggtcattttg

SEQ ID NO: 649464 - DNA, 33 bp, Homo sapien
agtacataattcaaactagaattggtcattttg

SEQ ID NO: 649465 - DNA, 33 bp, Homo sapien
gtacactaatactacactgtagacataaaccag

SEQ ID NO: 649466 - DNA, 33 bp, Homo sapien
gtacactaatactacattgtagacataaaccag

SEQ ID NO: 649467 - DNA, 33 bp, Homo sapien
cctctctaagaacgcaagatttacagtattaga

SEQ ID NO: 649468 - DNA, 33 bp, Homo sapien
cctctctaagaacgcatgatttacagtattaga

SEQ ID NO: 649469 - DNA, 33 bp, Homo sapien
aagatacgaaaccttaccacagaagagcagggt

SEQ ID NO: 649470 - DNA, 33 bp, Homo sapien
aagatacgaaaccttatcacagaagagcagggt

SEQ ID NO: 649471 - DNA, 33 bp, Homo sapien
ttagtggttggctaaccaagatgactggtgtag

SEQ ID NO: 649472 - DNA, 33 bp, Homo sapien
ttagtggttggctaacgaagatgactggtgtag

SEQ ID NO: 649473 - DNA, 33 bp, Homo sapien
catcaggacagattaacatcaatctacaaacca

SEQ ID NO: 649474 - DNA, 33 bp, Homo sapien
catcaggacagattaagatcaatctacaaacca

SEQ ID NO: 649475 - DNA, 33 bp, Homo sapien
aaacatacttgctagacactggttcaactatga

SEQ ID NO: 649476 - DNA, 33 bp, Homo sapien
aaacatacttgctagatactggttcaactatga

SEQ ID NO: 649477 - DNA, 33 bp, Homo sapien
acaacactagattcctcagcttaattgatctgg

SEQ ID NO: 649478 - DNA, 33 bp, Homo sapien
acaacactagattccttagcttaattgatctgg

SEQ ID NO: 649479 - DNA, 33 bp, Homo sapien
gttaccagggaagaacgccaaaagctgcagcac

SEQ ID NO: 649480 - DNA, 33 bp, Homo sapien
gttaccagggaagaactccaaaagctgcagcac

SEQ ID NO: 649481 - DNA, 33 bp, Homo sapien
agtagctatactaaaaaatagaagtcaacacaa

SEQ ID NO: 649482 - DNA, 33 bp, Homo sapien
agtagctatactaaaagatagaagtcaacacaa

SEQ ID NO: 649483 - DNA, 33 bp, Homo sapien
gtgtcttctccctgtaacttttgtcttgaatga

SEQ ID NO: 649484 - DNA, 33 bp, Homo sapien
gtgtcttctccctgtagcttttgtcttgaatga

SEQ ID NO: 649485 - DNA, 33 bp, Homo sapien
gtgctgttggaacaagactaattagagatccac

SEQ ID NO: 649486 - DNA, 33 bp, Homo sapien
gtgctgttggaacaaggctaattagagatccac

SEQ ID NO: 649487 - DNA, 33 bp, Homo sapien
atagcattttcgttatcagggcttttgatagag

SEQ ID NO: 649488 - DNA, 33 bp, Homo sapien
atagcattttcgttatgagggcttttgatagag

SEQ ID NO: 649489 - DNA, 33 bp, Homo sapien
tgagaggtggttccataaatgtgttccctttct

SEQ ID NO: 649490 - DNA, 33 bp, Homo sapien
tgagaggtggttccatcaatgtgttccctttct

SEQ ID NO: 649491 - DNA, 33 bp, Homo sapien
acctgtatatgcaatgaaagtaggtacatatgt

SEQ ID NO: 649492 - DNA, 33 bp, Homo sapien
acctgtatatgcaatgcaagtaggtacatatgt

SEQ ID NO: 649493 - DNA, 33 bp, Homo sapien
ttaaggtatttttccaatctattctagcctctg

SEQ ID NO: 649494 - DNA, 33 bp, Homo sapien
ttaaggtatttttccagtctattctagcctctg

SEQ ID NO: 649495 - DNA, 33 bp, Homo sapien
ctcttaatagcaactacgtataggagttccctc

SEQ ID NO: 649496 - DNA, 33 bp, Homo sapien
ctcttaatagcaactatgtataggagttccctc

SEQ ID NO: 649497 - DNA, 33 bp, Homo sapien
gcagaagtaataccacagaggcgctatatgctg

SEQ ID NO: 649498 - DNA, 33 bp, Homo sapien
gcagaagtaataccacggaggcgctatatgctg

SEQ ID NO: 649499 - DNA, 33 bp, Homo sapien
tagatggttggagctacataatagaaaatgtaa

SEQ ID NO: 649500 - DNA, 33 bp, Homo sapien
tagatggttggagctatataatagaaaatgtaa

SEQ ID NO: 649501 - DNA, 33 bp, Homo sapien
gcagtttttcccaaccaagcgtctacctttgat

SEQ ID NO: 649502 - DNA, 33 bp, Homo sapien
gcagtttttcccaaccgagcgtctacctttgat

SEQ ID NO: 649503 - DNA, 33 bp, Homo sapien
tgtaacaaaaattgtacgacaaatgcttctaga

SEQ ID NO: 649504 - DNA, 33 bp, Homo sapien
tgtaacaaaaattgtatgacaaatgcttctaga

SEQ ID NO: 649505 - DNA, 33 bp, Homo sapien
caagacctctagaaaacggaaactggagcaaag

SEQ ID NO: 649506 - DNA, 33 bp, Homo sapien
caagacctctagaaaatggaaactggagcaaag

SEQ ID NO: 649507 - DNA, 33 bp, Homo sapien
gctttacctgatggaaagcgggaaacctgaaaa

SEQ ID NO: 649508 - DNA, 33 bp, Homo sapien
gctttacctgatggaaggcgggaaacctgaaaa

SEQ ID NO: 649509 - DNA, 33 bp, Homo sapien
atcagtactaacacaactatttttacataaacc

SEQ ID NO: 649510 - DNA, 33 bp, Homo sapien
atcagtactaacacaattatttttacataaacc

SEQ ID NO: 649511 - DNA, 33 bp, Homo sapien
gttagtactgattaaaattctaaagggctagta

SEQ ID NO: 649512 - DNA, 33 bp, Homo sapien
gttagtactgattaaagttctaaagggctagta

SEQ ID NO: 649513 - DNA, 33 bp, Homo sapien
taggattgtattcagacaagccctggttggttg

SEQ ID NO: 649514 - DNA, 33 bp, Homo sapien
taggattgtattcagagaagccctggttggttg

SEQ ID NO: 649515 - DNA, 33 bp, Homo sapien
ctgggcagagaaaaagaacaatattcaggctag

SEQ ID NO: 649516 - DNA, 33 bp, Homo sapien
ctgggcagagaaaaagtacaatattcaggctag

SEQ ID NO: 649517 - DNA, 33 bp, Homo sapien
ttcggttgttgggggaatcattggtgcaaaagc

SEQ ID NO: 649518 - DNA, 33 bp, Homo sapien
ttcggttgttgggggattcattggtgcaaaagc

SEQ ID NO: 649519 - DNA, 33 bp, Homo sapien
gccaggaacctagaaggaatgtgattggaaaat

SEQ ID NO: 649520 - DNA, 33 bp, Homo sapien
gccaggaacctagaagtaatgtgattggaaaat

SEQ ID NO: 649521 - DNA, 33 bp, Homo sapien
aattaagtccataacactctcccaaggagaggt

SEQ ID NO: 649522 - DNA, 33 bp, Homo sapien
aattaagtccataacattctcccaaggagaggt

SEQ ID NO: 649523 - DNA, 33 bp, Homo sapien
gctcaagcaaggatgaaagcagccacaggtttc

SEQ ID NO: 649524 - DNA, 33 bp, Homo sapien
gctcaagcaaggatgagagcagccacaggtttc

SEQ ID NO: 649525 - DNA, 33 bp, Homo sapien
agttgctggaaaaaaaattatagaatgtgctca

SEQ ID NO: 649526 - DNA, 33 bp, Homo sapien
agttgctggaaaaaaatttatagaatgtgctca

SEQ ID NO: 649527 - DNA, 33 bp, Homo sapien
tcctctctcaagtcaacgtttgattggtgtgtg

SEQ ID NO: 649528 - DNA, 33 bp, Homo sapien
tcctctctcaagtcaatgtttgattggtgtgtg

SEQ ID NO: 649529 - DNA, 33 bp, Homo sapien
tgcttttcgtcagttacctggcacagctagcct

SEQ ID NO: 649530 - DNA, 33 bp, Homo sapien
tgcttttcgtcagttatctggcacagctagcct

SEQ ID NO: 649531 - DNA, 33 bp, Homo sapien
acaagcctccataaacacaacatatggagttag

SEQ ID NO: 649532 - DNA, 33 bp, Homo sapien
acaagcctccataaacgcaacatatggagttag

SEQ ID NO: 649533 - DNA, 33 bp, Homo sapien
atttgcaatgtagaaaggagttctatgaaggca

SEQ ID NO: 649534 - DNA, 33 bp, Homo sapien
atttgcaatgtagaaatgagttctatgaaggca

SEQ ID NO: 649535 - DNA, 33 bp, Homo sapien
acactattggtaaacaaagcagaagtaatgtca

SEQ ID NO: 649536 - DNA, 33 bp, Homo sapien
acactattggtaaacagagcagaagtaatgtca

SEQ ID NO: 649537 - DNA, 33 bp, Homo sapien
aaatattactccttggcaaagaaagcaattgcc

SEQ ID NO: 649538 - DNA, 33 bp, Homo sapien
aaatattactccttggtaaagaaagcaattgcc

SEQ ID NO: 649539 - DNA, 33 bp, Homo sapien
tcctctgtgccagactcaaaacatgaagtagac

SEQ ID NO: 649540 - DNA, 33 bp, Homo sapien
tcctctgtgccagactgaaaacatgaagtagac

SEQ ID NO: 649541 - DNA, 33 bp, Homo sapien
ataaatctatgctatacacagaatgacatgtga

SEQ ID NO: 649542 - DNA, 33 bp, Homo sapien
ataaatctatgctatatacagaatgacatgtga

SEQ ID NO: 649543 - DNA, 33 bp, Homo sapien
cataaatattataacaaaagtgtgttgaataaa

SEQ ID NO: 649544 - DNA, 33 bp, Homo sapien
cataaatattataacagaagtgtgttgaataaa

SEQ ID NO: 649545 - DNA, 33 bp, Homo sapien
gaatgaaaataaaaagccttttccatgcttaca

SEQ ID NO: 649546 - DNA, 33 bp, Homo sapien
gaatgaaaataaaaaggcttttccatgcttaca

SEQ ID NO: 649547 - DNA, 33 bp, Homo sapien
ttggatttagatttgacgtgataggaatttaga

SEQ ID NO: 649548 - DNA, 33 bp, Homo sapien
ttggatttagatttgatgtgataggaatttaga

SEQ ID NO: 649549 - DNA, 33 bp, Homo sapien
ggtcagtctccatctgcaggaacatgtgggtgc

SEQ ID NO: 649550 - DNA, 33 bp, Homo sapien
ggtcagtctccatctgtaggaacatgtgggtgc

SEQ ID NO: 649551 - DNA, 33 bp, Homo sapien
atactccagcaagaaacaatgataagcaaagaa

SEQ ID NO: 649552 - DNA, 33 bp, Homo sapien
atactccagcaagaaataatgataagcaaagaa

SEQ ID NO: 649553 - DNA, 33 bp, Homo sapien
acttccttcaaaagcaagtttaagagaataagg

SEQ ID NO: 649554 - DNA, 33 bp, Homo sapien
acttccttcaaaagcaggtttaagagaataagg

SEQ ID NO: 649555 - DNA, 33 bp, Homo sapien
ggattgccatgtgtgacgcaacccttcctagag

SEQ ID NO: 649556 - DNA, 33 bp, Homo sapien
ggattgccatgtgtgatgcaacccttcctagag

SEQ ID NO: 649557 - DNA, 33 bp, Homo sapien
gttgctccgtgtaactcagaaaaaagtattgga

SEQ ID NO: 649558 - DNA, 33 bp, Homo sapien
gttgctccgtgtaactgagaaaaaagtattgga

SEQ ID NO: 649559 - DNA, 33 bp, Homo sapien
aagcccactacaaggaactgagcaacatggtca

SEQ ID NO: 649560 - DNA, 33 bp, Homo sapien
aagcccactacaaggatctgagcaacatggtca

SEQ ID NO: 649561 - DNA, 33 bp, Homo sapien
attttggaactgcaggaagctgagaagttggta

SEQ ID NO: 649562 - DNA, 33 bp, Homo sapien
attttggaactgcaggcagctgagaagttggta

SEQ ID NO: 649563 - DNA, 33 bp, Homo sapien
ttcccctgtgttgttaccaccagaacaattaca

SEQ ID NO: 649564 - DNA, 33 bp, Homo sapien
ttcccctgtgttgttatcaccagaacaattaca

SEQ ID NO: 649565 - DNA, 33 bp, Homo sapien
tgtgctctatcaatgaagcaacaaagcgtggat

SEQ ID NO: 649566 - DNA, 33 bp, Homo sapien
tgtgctctatcaatgaggcaacaaagcgtggat

SEQ ID NO: 649567 - DNA, 33 bp, Homo sapien
taattaggaattaaccaatcaatgaaaggtaag

SEQ ID NO: 649568 - DNA, 33 bp, Homo sapien
taattaggaattaaccgatcaatgaaaggtaag

SEQ ID NO: 649569 - DNA, 33 bp, Homo sapien
accaggcttgcatttacgggtgattcccacagg

SEQ ID NO: 649570 - DNA, 33 bp, Homo sapien
accaggcttgcatttatgggtgattcccacagg

SEQ ID NO: 649571 - DNA, 33 bp, Homo sapien
ttcagcccccatagacccaggcttcatgctggc

SEQ ID NO: 649572 - DNA, 33 bp, Homo sapien
ttcagcccccatagactcaggcttcatgctggc

SEQ ID NO: 649573 - DNA, 33 bp, Homo sapien
tgaataacaacttgaaagaaaatagcttcacaa

SEQ ID NO: 649574 - DNA, 33 bp, Homo sapien
tgaataacaacttgaacgaaaatagcttcacaa

SEQ ID NO: 649575 - DNA, 33 bp, Homo sapien
tagtgaaaattaacaaaatgaatcatccaaatt

SEQ ID NO: 649576 - DNA, 33 bp, Homo sapien
tagtgaaaattaacaagatgaatcatccaaatt

SEQ ID NO: 649577 - DNA, 33 bp, Homo sapien
ctcaaggagacctcaacgcctattgttctcttc

SEQ ID NO: 649578 - DNA, 33 bp, Homo sapien
ctcaaggagacctcaatgcctattgttctcttc

SEQ ID NO: 649579 - DNA, 33 bp, Homo sapien
ctcaagtctaacatcacaggagtcagatctatc

SEQ ID NO: 649580 - DNA, 33 bp, Homo sapien
ctcaagtctaacatcagaggagtcagatctatc

SEQ ID NO: 649581 - DNA, 33 bp, Homo sapien
aaattagtgggcatgaggcattttttgctacgt

SEQ ID NO: 649582 - DNA, 33 bp, Homo sapien
aaattagtgggcatgatgcattttttgctacgt

SEQ ID NO: 649583 - DNA, 33 bp, Homo sapien
gctgtgtccagtgttccacatctgggctcagct

SEQ ID NO: 649584 - DNA, 33 bp, Homo sapien
gctgtgtccagtgttctacatctgggctcagct

SEQ ID NO: 649585 - DNA, 33 bp, Homo sapien
gaaatgcctgctgtaactgaagcattgcgtcaa

SEQ ID NO: 649586 - DNA, 33 bp, Homo sapien
gaaatgcctgctgtaattgaagcattgcgtcaa

SEQ ID NO: 649587 - DNA, 33 bp, Homo sapien
gggaactcagaaagtgaaggataattggtaaca

SEQ ID NO: 649588 - DNA, 33 bp, Homo sapien
gggaactcagaaagtgcaggataattggtaaca

SEQ ID NO: 649589 - DNA, 33 bp, Homo sapien
tccactatatgcataacctactgttaaagattt

SEQ ID NO: 649590 - DNA, 33 bp, Homo sapien
tccactatatgcataatctactgttaaagattt

SEQ ID NO: 649591 - DNA, 33 bp, Homo sapien
aaagttgctagaggtcaataggaattagttcca

SEQ ID NO: 649592 - DNA, 33 bp, Homo sapien
aaagttgctagaggtcgataggaattagttcca

SEQ ID NO: 649593 - DNA, 33 bp, Homo sapien
agtgttgtctcccgtcacagtacaggagacaca

SEQ ID NO: 649594 - DNA, 33 bp, Homo sapien
agtgttgtctcccgtcgcagtacaggagacaca

SEQ ID NO: 649595 - DNA, 33 bp, Homo sapien
tctcttcttgaacttccaattcagtgattgctt

SEQ ID NO: 649596 - DNA, 33 bp, Homo sapien
tctcttcttgaacttctaattcagtgattgctt

SEQ ID NO: 649597 - DNA, 33 bp, Homo sapien
acaatacggctccaaaaacttaccattccaacc

SEQ ID NO: 649598 - DNA, 33 bp, Homo sapien
acaatacggctccaaatacttaccattccaacc

SEQ ID NO: 649599 - DNA, 33 bp, Homo sapien
acagcttaccttaacaacacagttacttcctgt

SEQ ID NO: 649600 - DNA, 33 bp, Homo sapien
acagcttaccttaacaccacagttacttcctgt

SEQ ID NO: 649601 - DNA, 33 bp, Homo sapien
gatgaacagaggtaagaaagtgtgaaaatatgt

SEQ ID NO: 649602 - DNA, 33 bp, Homo sapien
gatgaacagaggtaagcaagtgtgaaaatatgt

SEQ ID NO: 649603 - DNA, 33 bp, Homo sapien
gccactagaattaaaaatcctcagcttgagctg

SEQ ID NO: 649604 - DNA, 33 bp, Homo sapien
gccactagaattaaaagtcctcagcttgagctg

SEQ ID NO: 649605 - DNA, 33 bp, Homo sapien
ccaaattaacaccaagaagatcactcaaaaact

SEQ ID NO: 649606 - DNA, 33 bp, Homo sapien
ccaaattaacaccaaggagatcactcaaaaact

SEQ ID NO: 649607 - DNA, 33 bp, Homo sapien
ctgtaaatgtctattaagttgaattggtcaagt

SEQ ID NO: 649608 - DNA, 33 bp, Homo sapien
ctgtaaatgtctattacgttgaattggtcaagt

SEQ ID NO: 649609 - DNA, 33 bp, Homo sapien
aaattttgtctctttacgtaatctcatatttct

SEQ ID NO: 649610 - DNA, 33 bp, Homo sapien
aaattttgtctctttatgtaatctcatatttct

SEQ ID NO: 649611 - DNA, 33 bp, Homo sapien
agatccagcattttcaaattttaaggctcaact

SEQ ID NO: 649612 - DNA, 33 bp, Homo sapien
agatccagcattttcagattttaaggctcaact

SEQ ID NO: 649613 - DNA, 33 bp, Homo sapien
cctaagttgtcccaaaaagtataaaagaaagag

SEQ ID NO: 649614 - DNA, 33 bp, Homo sapien
cctaagttgtcccaaacagtataaaagaaagag

SEQ ID NO: 649615 - DNA, 33 bp, Homo sapien
tctattttattctaaacttggctccccttatgt

SEQ ID NO: 649616 - DNA, 33 bp, Homo sapien
tctattttattctaaagttggctccccttatgt

SEQ ID NO: 649617 - DNA, 33 bp, Homo sapien
cttccttcctgctaaaaataggtatagatatat

SEQ ID NO: 649618 - DNA, 33 bp, Homo sapien
cttccttcctgctaaatataggtatagatatat

SEQ ID NO: 649619 - DNA, 33 bp, Homo sapien
ttttttctcctacttacagtcttgtgtcttctg

SEQ ID NO: 649620 - DNA, 33 bp, Homo sapien
ttttttctcctacttatagtcttgtgtcttctg

SEQ ID NO: 649621 - DNA, 33 bp, Homo sapien
tagaagtgtacgaaaaggtgagtaagagcatct

SEQ ID NO: 649622 - DNA, 33 bp, Homo sapien
tagaagtgtacgaaaatgtgagtaagagcatct

SEQ ID NO: 649623 - DNA, 33 bp, Homo sapien
caaagcaaggatgcaactagattattttatccc

SEQ ID NO: 649624 - DNA, 33 bp, Homo sapien
caaagcaaggatgcaagtagattattttatccc

SEQ ID NO: 649625 - DNA, 33 bp, Homo sapien
ctctaacccttcattaagcaactgaagaaaatt

SEQ ID NO: 649626 - DNA, 33 bp, Homo sapien
ctctaacccttcattaggcaactgaagaaaatt

SEQ ID NO: 649627 - DNA, 33 bp, Homo sapien
caaatcagtttgatcccgcaagtggaagcaact

SEQ ID NO: 649628 - DNA, 33 bp, Homo sapien
caaatcagtttgatcctgcaagtggaagcaact

SEQ ID NO: 649629 - DNA, 33 bp, Homo sapien
cagtgacaacataaaccgctctagtatagacga

SEQ ID NO: 649630 - DNA, 33 bp, Homo sapien
cagtgacaacataaactgctctagtatagacga

SEQ ID NO: 649631 - DNA, 33 bp, Homo sapien
agtaaatgttttggaacgatggaaatgttctag

SEQ ID NO: 649632 - DNA, 33 bp, Homo sapien
agtaaatgttttggaatgatggaaatgttctag

SEQ ID NO: 649633 - DNA, 33 bp, Homo sapien
ttatgctgataagtacaaaatttctatctccca

SEQ ID NO: 649634 - DNA, 33 bp, Homo sapien
ttatgctgataagtaccaaatttctatctccca

SEQ ID NO: 649635 - DNA, 33 bp, Homo sapien
gctgggccaggaagagacatggggactgagatg

SEQ ID NO: 649636 - DNA, 33 bp, Homo sapien
gctgggccaggaagaggcatggggactgagatg

SEQ ID NO: 649637 - DNA, 33 bp, Homo sapien
catatgaaagtcatgccagtctgtgactcctca

SEQ ID NO: 649638 - DNA, 33 bp, Homo sapien
catatgaaagtcatgctagtctgtgactcctca

SEQ ID NO: 649639 - DNA, 33 bp, Homo sapien
tttaatatagattgtacgtttatttgaggtgcc

SEQ ID NO: 649640 - DNA, 33 bp, Homo sapien
tttaatatagattgtatgtttatttgaggtgcc

SEQ ID NO: 649641 - DNA, 33 bp, Homo sapien
ctaacagaaggcttgaagtcatgtggtataagg

SEQ ID NO: 649642 - DNA, 33 bp, Homo sapien
ctaacagaaggcttgaggtcatgtggtataagg

SEQ ID NO: 649643 - DNA, 33 bp, Homo sapien
tgtcagacttctagataaggtggaaaactggaa

SEQ ID NO: 649644 - DNA, 33 bp, Homo sapien
tgtcagacttctagatgaggtggaaaactggaa

SEQ ID NO: 649645 - DNA, 33 bp, Homo sapien
aagtggacctaagggaaagtgatgcaggttgat

SEQ ID NO: 649646 - DNA, 33 bp, Homo sapien
aagtggacctaagggagagtgatgcaggttgat

SEQ ID NO: 649647 - DNA, 33 bp, Homo sapien
catgccctgtttcataagtcctggatttcatca

SEQ ID NO: 649648 - DNA, 33 bp, Homo sapien
catgccctgtttcatatgtcctggatttcatca

SEQ ID NO: 649649 - DNA, 33 bp, Homo sapien
tgaaacagggcatggaaaagcagaatggtttag

SEQ ID NO: 649650 - DNA, 33 bp, Homo sapien
tgaaacagggcatggacaagcagaatggtttag

SEQ ID NO: 649651 - DNA, 33 bp, Homo sapien
attattgcctggcatcaaaaatatgggggaagg

SEQ ID NO: 649652 - DNA, 33 bp, Homo sapien
attattgcctggcatcgaaaatatgggggaagg

SEQ ID NO: 649653 - DNA, 33 bp, Homo sapien
ttgattttttttgtaagaacatgggctgcttaa

SEQ ID NO: 649654 - DNA, 33 bp, Homo sapien
ttgattttttttgtaataacatgggctgcttaa

SEQ ID NO: 649655 - DNA, 33 bp, Homo sapien
tattaaggcaggaatgcaaagatgtcatgaaac

SEQ ID NO: 649656 - DNA, 33 bp, Homo sapien
tattaaggcaggaatgtaaagatgtcatgaaac

SEQ ID NO: 649657 - DNA, 33 bp, Homo sapien
cagacgacatggccgcacagaagaaaagtcatg

SEQ ID NO: 649658 - DNA, 33 bp, Homo sapien
cagacgacatggccgcgcagaagaaaagtcatg

SEQ ID NO: 649659 - DNA, 33 bp, Homo sapien
tttagaccacattataacaacaccaaaggcact

SEQ ID NO: 649660 - DNA, 33 bp, Homo sapien
tttagaccacattataccaacaccaaaggcact

SEQ ID NO: 649661 - DNA, 33 bp, Homo sapien
aatggattaatgaaaaagatggattaatgaatg

SEQ ID NO: 649662 - DNA, 33 bp, Homo sapien
aatggattaatgaaaaggatggattaatgaatg

SEQ ID NO: 649663 - DNA, 33 bp, Homo sapien
aatcaaggtagcgtgcagagcaaggttgataga

SEQ ID NO: 649664 - DNA, 33 bp, Homo sapien
aatcaaggtagcgtgccgagcaaggttgataga

SEQ ID NO: 649665 - DNA, 33 bp, Homo sapien
ttcaacaaacactgacggaagcttactgtatat

SEQ ID NO: 649666 - DNA, 33 bp, Homo sapien
ttcaacaaacactgactgaagcttactgtatat

SEQ ID NO: 649667 - DNA, 33 bp, Homo sapien
cattgagggtcacagaggtcctagttcatatta

SEQ ID NO: 649668 - DNA, 33 bp, Homo sapien
cattgagggtcacagatgtcctagttcatatta

SEQ ID NO: 649669 - DNA, 33 bp, Homo sapien
cacttcaacggctataccatcctagttcaagcc

SEQ ID NO: 649670 - DNA, 33 bp, Homo sapien
cacttcaacggctatatcatcctagttcaagcc

SEQ ID NO: 649671 - DNA, 33 bp, Homo sapien
ccctatctcgtatttcaatctttcacctagcac

SEQ ID NO: 649672 - DNA, 33 bp, Homo sapien
ccctatctcgtatttcgatctttcacctagcac

SEQ ID NO: 649673 - DNA, 33 bp, Homo sapien
gtgactctgccgggtaaaatcccctcagctgct

SEQ ID NO: 649674 - DNA, 33 bp, Homo sapien
gtgactctgccgggtacaatcccctcagctgct

SEQ ID NO: 649675 - DNA, 33 bp, Homo sapien
atgatgagagactgtaagaaaatttgattctaa

SEQ ID NO: 649676 - DNA, 33 bp, Homo sapien
atgatgagagactgtaggaaaatttgattctaa

SEQ ID NO: 649677 - DNA, 33 bp, Homo sapien
tatcacctaagaaaagccctcagtaaatctcct

SEQ ID NO: 649678 - DNA, 33 bp, Homo sapien
tatcacctaagaaaagtcctcagtaaatctcct

SEQ ID NO: 649679 - DNA, 33 bp, Homo sapien
acatattttactctgaagccagccaattttcct

SEQ ID NO: 649680 - DNA, 33 bp, Homo sapien
acatattttactctgaggccagccaattttcct

SEQ ID NO: 649681 - DNA, 33 bp, Homo sapien
ttcattcattgtaacacgaggtaagacagaaat

SEQ ID NO: 649682 - DNA, 33 bp, Homo sapien
ttcattcattgtaacatgaggtaagacagaaat

SEQ ID NO: 649683 - DNA, 33 bp, Homo sapien
aatgcacttttagccacactgctttgtagtaat

SEQ ID NO: 649684 - DNA, 33 bp, Homo sapien
aatgcacttttagccatactgctttgtagtaat

SEQ ID NO: 649685 - DNA, 33 bp, Homo sapien
atatttgagatattggaatttctgagataatgt

SEQ ID NO: 649686 - DNA, 33 bp, Homo sapien
atatttgagatattggtatttctgagataatgt

SEQ ID NO: 649687 - DNA, 33 bp, Homo sapien
cttatgaagttcaaaaatgagtaaaactaacac

SEQ ID NO: 649688 - DNA, 33 bp, Homo sapien
cttatgaagttcaaaagtgagtaaaactaacac

SEQ ID NO: 649689 - DNA, 33 bp, Homo sapien
ttcctttgcactctgacggttatttgggggaat

SEQ ID NO: 649690 - DNA, 33 bp, Homo sapien
ttcctttgcactctgatggttatttgggggaat

SEQ ID NO: 649691 - DNA, 33 bp, Homo sapien
ttctctggctgaatataaggttctcattggctt

SEQ ID NO: 649692 - DNA, 33 bp, Homo sapien
ttctctggctgaatatgaggttctcattggctt

SEQ ID NO: 649693 - DNA, 33 bp, Homo sapien
ctaagtggattagcgaaaaaagatttccaattt

SEQ ID NO: 649694 - DNA, 33 bp, Homo sapien
ctaagtggattagcgagaaaagatttccaattt

SEQ ID NO: 649695 - DNA, 33 bp, Homo sapien
taatgaggcaaataaacatttatcagttcccca

SEQ ID NO: 649696 - DNA, 33 bp, Homo sapien
taatgaggcaaataaagatttatcagttcccca

SEQ ID NO: 649697 - DNA, 33 bp, Homo sapien
tcagtcccctcatcccaaagatagagtatccag

SEQ ID NO: 649698 - DNA, 33 bp, Homo sapien
tcagtcccctcatcccgaagatagagtatccag

SEQ ID NO: 649699 - DNA, 33 bp, Homo sapien
gctgtaccctccatcacggatttatggactgtt

SEQ ID NO: 649700 - DNA, 33 bp, Homo sapien
gctgtaccctccatcatggatttatggactgtt

SEQ ID NO: 649701 - DNA, 33 bp, Homo sapien
gccaaaccatgtggcacgacctctgggaaatag

SEQ ID NO: 649702 - DNA, 33 bp, Homo sapien
gccaaaccatgtggcatgacctctgggaaatag

SEQ ID NO: 649703 - DNA, 33 bp, Homo sapien
tttggtagaagaaagaagaaggtatcttggtta

SEQ ID NO: 649704 - DNA, 33 bp, Homo sapien
tttggtagaagaaagacgaaggtatcttggtta

SEQ ID NO: 649705 - DNA, 33 bp, Homo sapien
agaataaaaatggtgccaggcatttagccacag

SEQ ID NO: 649706 - DNA, 33 bp, Homo sapien
agaataaaaatggtgcgaggcatttagccacag

SEQ ID NO: 649707 - DNA, 33 bp, Homo sapien
cctactaggaaaaaaactggacaatcctggtaa

SEQ ID NO: 649708 - DNA, 33 bp, Homo sapien
cctactaggaaaaaaattggacaatcctggtaa

SEQ ID NO: 649709 - DNA, 33 bp, Homo sapien
aattttattttttgcacgatgcttcgctaacct

SEQ ID NO: 649710 - DNA, 33 bp, Homo sapien
aattttattttttgcatgatgcttcgctaacct

SEQ ID NO: 649711 - DNA, 33 bp, Homo sapien
aaacacaggtcaaacaacatcgaatctttaagc

SEQ ID NO: 649712 - DNA, 33 bp, Homo sapien
aaacacaggtcaaacagcatcgaatctttaagc

SEQ ID NO: 649713 - DNA, 33 bp, Homo sapien
gattaaccctcttccccagaaagtgcaaaacaa

SEQ ID NO: 649714 - DNA, 33 bp, Homo sapien
gattaaccctcttccctagaaagtgcaaaacaa

SEQ ID NO: 649715 - DNA, 33 bp, Homo sapien
tattatctaaatagacccttctcaagcgatgag

SEQ ID NO: 649716 - DNA, 33 bp, Homo sapien
tattatctaaatagactcttctcaagcgatgag

SEQ ID NO: 649717 - DNA, 33 bp, Homo sapien
tgctatcaaatgagtaaatttatgaagcagtct

SEQ ID NO: 649718 - DNA, 33 bp, Homo sapien
tgctatcaaatgagtagatttatgaagcagtct

SEQ ID NO: 649719 - DNA, 33 bp, Homo sapien
catatggacagtgataactagacacaaccagct

SEQ ID NO: 649720 - DNA, 33 bp, Homo sapien
catatggacagtgatatctagacacaaccagct

SEQ ID NO: 649721 - DNA, 33 bp, Homo sapien
caaactttcactgtccgatctattacggataat

SEQ ID NO: 649722 - DNA, 33 bp, Homo sapien
caaactttcactgtcctatctattacggataat

SEQ ID NO: 649723 - DNA, 33 bp, Homo sapien
aattgtgagtatactaagtaagatgaaaccaaa

SEQ ID NO: 649724 - DNA, 33 bp, Homo sapien
aattgtgagtatactatgtaagatgaaaccaaa

SEQ ID NO: 649725 - DNA, 33 bp, Homo sapien
caaaatattaagctaaaattggtctatttaatt

SEQ ID NO: 649726 - DNA, 33 bp, Homo sapien
caaaatattaagctaagattggtctatttaatt

SEQ ID NO: 649727 - DNA, 33 bp, Homo sapien
atattgtccttttatagaggttatgatcctatc

SEQ ID NO: 649728 - DNA, 33 bp, Homo sapien
atattgtccttttatataggttatgatcctatc

SEQ ID NO: 649729 - DNA, 33 bp, Homo sapien
acggtatgtagggtaaatgcacaaaagtacatg

SEQ ID NO: 649730 - DNA, 33 bp, Homo sapien
acggtatgtagggtaagtgcacaaaagtacatg

SEQ ID NO: 649731 - DNA, 33 bp, Homo sapien
tgcagaactaggaacactcttacactgttggtg

SEQ ID NO: 649732 - DNA, 33 bp, Homo sapien
tgcagaactaggaacattcttacactgttggtg

SEQ ID NO: 649733 - DNA, 33 bp, Homo sapien
gtacaaagacatttaaaaccttgattattacca

SEQ ID NO: 649734 - DNA, 33 bp, Homo sapien
gtacaaagacatttaagaccttgattattacca

SEQ ID NO: 649735 - DNA, 33 bp, Homo sapien
atcctacctaactacagggtgaaagtaaccaga

SEQ ID NO: 649736 - DNA, 33 bp, Homo sapien
atcctacctaactacatggtgaaagtaaccaga

SEQ ID NO: 649737 - DNA, 33 bp, Homo sapien
gggaatagagtgacgacaagaaattgtatttta

SEQ ID NO: 649738 - DNA, 33 bp, Homo sapien
gggaatagagtgacgataagaaattgtatttta

SEQ ID NO: 649739 - DNA, 33 bp, Homo sapien
aaatcttctcccagccactgaatttgtaactca

SEQ ID NO: 649740 - DNA, 33 bp, Homo sapien
aaatcttctcccagccgctgaatttgtaactca

SEQ ID NO: 649741 - DNA, 33 bp, Homo sapien
ttaatggtctgattcagcatttctcaaaacgat

SEQ ID NO: 649742 - DNA, 33 bp, Homo sapien
ttaatggtctgattcatcatttctcaaaacgat

SEQ ID NO: 649743 - DNA, 33 bp, Homo sapien
tttacctagaaatcacccgggaactttgtgaaa

SEQ ID NO: 649744 - DNA, 33 bp, Homo sapien
tttacctagaaatcacgcgggaactttgtgaaa

SEQ ID NO: 649745 - DNA, 33 bp, Homo sapien
gacatagaaaagacaaattgcatacagatatgc

SEQ ID NO: 649746 - DNA, 33 bp, Homo sapien
gacatagaaaagacaagttgcatacagatatgc

SEQ ID NO: 649747 - DNA, 33 bp, Homo sapien
accatttcttcttacacctgaccccaaatttta

SEQ ID NO: 649748 - DNA, 33 bp, Homo sapien
accatttcttcttacagctgaccccaaatttta

SEQ ID NO: 649749 - DNA, 33 bp, Homo sapien
acttcctacacaagacccagtgaccacaggctc

SEQ ID NO: 649750 - DNA, 33 bp, Homo sapien
acttcctacacaagactcagtgaccacaggctc

SEQ ID NO: 649751 - DNA, 33 bp, Homo sapien
tatggatggaagcttgaaatatcatcggataga

SEQ ID NO: 649752 - DNA, 33 bp, Homo sapien
tatggatggaagcttggaatatcatcggataga

SEQ ID NO: 649753 - DNA, 33 bp, Homo sapien
cttttataccccttagaaattccacattgttct

SEQ ID NO: 649754 - DNA, 33 bp, Homo sapien
cttttataccccttagtaattccacattgttct

SEQ ID NO: 649755 - DNA, 33 bp, Homo sapien
acatgttggatctgaaaccagaagtatttgatt

SEQ ID NO: 649756 - DNA, 33 bp, Homo sapien
acatgttggatctgaagccagaagtatttgatt

SEQ ID NO: 649757 - DNA, 33 bp, Homo sapien
cccattttaaattctaagagaaaatcccaaagc

SEQ ID NO: 649758 - DNA, 33 bp, Homo sapien
cccattttaaattctatgagaaaatcccaaagc

SEQ ID NO: 649759 - DNA, 33 bp, Homo sapien
aggacaagaattctgcgaaatcatctggtaaaa

SEQ ID NO: 649760 - DNA, 33 bp, Homo sapien
aggacaagaattctgctaaatcatctggtaaaa

SEQ ID NO: 649761 - DNA, 33 bp, Homo sapien
gatgtgtctgcttttcaaatccatttttatccc

SEQ ID NO: 649762 - DNA, 33 bp, Homo sapien
gatgtgtctgcttttcgaatccatttttatccc

SEQ ID NO: 649763 - DNA, 33 bp, Homo sapien
agatttcttttcatggacaaggtagattatcta

SEQ ID NO: 649764 - DNA, 33 bp, Homo sapien
agatttcttttcatgggcaaggtagattatcta

SEQ ID NO: 649765 - DNA, 33 bp, Homo sapien
ctccagaatgcaagaaatgttatctcaaagaat

SEQ ID NO: 649766 - DNA, 33 bp, Homo sapien
ctccagaatgcaagaattgttatctcaaagaat

SEQ ID NO: 649767 - DNA, 33 bp, Homo sapien
gataagtcatctagcaagtaaggctatcaatta

SEQ ID NO: 649768 - DNA, 33 bp, Homo sapien
gataagtcatctagcacgtaaggctatcaatta

SEQ ID NO: 649769 - DNA, 33 bp, Homo sapien
ggctgagttaagccacaatattaaatagagaga

SEQ ID NO: 649770 - DNA, 33 bp, Homo sapien
ggctgagttaagccacgatattaaatagagaga

SEQ ID NO: 649771 - DNA, 33 bp, Homo sapien
taagtgttcacctgaccatagattacttatcgt

SEQ ID NO: 649772 - DNA, 33 bp, Homo sapien
taagtgttcacctgactatagattacttatcgt

SEQ ID NO: 649773 - DNA, 33 bp, Homo sapien
cgttgtaaataagtcaacatgatctttctttat

SEQ ID NO: 649774 - DNA, 33 bp, Homo sapien
cgttgtaaataagtcatcatgatctttctttat

SEQ ID NO: 649775 - DNA, 33 bp, Homo sapien
tacaatggtaataaaaatgtcatgtaggatttg

SEQ ID NO: 649776 - DNA, 33 bp, Homo sapien
tacaatggtaataaaactgtcatgtaggatttg

SEQ ID NO: 649777 - DNA, 33 bp, Homo sapien
gataaagaaattgaaccgtggagagaataaatt

SEQ ID NO: 649778 - DNA, 33 bp, Homo sapien
gataaagaaattgaactgtggagagaataaatt

SEQ ID NO: 649779 - DNA, 33 bp, Homo sapien
aggtgggggccagggcaataaaaattttagtgt

SEQ ID NO: 649780 - DNA, 33 bp, Homo sapien
aggtgggggccagggccataaaaattttagtgt

SEQ ID NO: 649781 - DNA, 33 bp, Homo sapien
atcaaacatcacaggaatattaaatcacttaaa

SEQ ID NO: 649782 - DNA, 33 bp, Homo sapien
atcaaacatcacaggagtattaaatcacttaaa

SEQ ID NO: 649783 - DNA, 33 bp, Homo sapien
tatataacaatggtacgctgattcatgacttcc

SEQ ID NO: 649784 - DNA, 33 bp, Homo sapien
tatataacaatggtactctgattcatgacttcc

SEQ ID NO: 649785 - DNA, 33 bp, Homo sapien
atctttggtggagttacgccatttaaagaaata

SEQ ID NO: 649786 - DNA, 33 bp, Homo sapien
atctttggtggagttatgccatttaaagaaata

SEQ ID NO: 649787 - DNA, 33 bp, Homo sapien
ttccccagggggtcaccgaagttctctcctatt

SEQ ID NO: 649788 - DNA, 33 bp, Homo sapien
ttccccagggggtcactgaagttctctcctatt

SEQ ID NO: 649789 - DNA, 33 bp, Homo sapien
tctgatagttcctgtgcatcagtagtgacaggc

SEQ ID NO: 649790 - DNA, 33 bp, Homo sapien
tctgatagttcctgtgtatcagtagtgacaggc

SEQ ID NO: 649791 - DNA, 33 bp, Homo sapien
ttttgcaaccactgagacaataagaacaacttc

SEQ ID NO: 649792 - DNA, 33 bp, Homo sapien
ttttgcaaccactgaggcaataagaacaacttc

SEQ ID NO: 649793 - DNA, 33 bp, Homo sapien
atacccatgtaagtaaactgcacgtgcactccc

SEQ ID NO: 649794 - DNA, 33 bp, Homo sapien
atacccatgtaagtaacctgcacgtgcactccc

SEQ ID NO: 649795 - DNA, 33 bp, Homo sapien
aagtaactacgtggtaaaaaatggccacttccc

SEQ ID NO: 649796 - DNA, 33 bp, Homo sapien
aagtaactacgtggtagaaaatggccacttccc

SEQ ID NO: 649797 - DNA, 33 bp, Homo sapien
atgaaaagattgtcaacggtttctggttggaag

SEQ ID NO: 649798 - DNA, 33 bp, Homo sapien
atgaaaagattgtcaatggtttctggttggaag

SEQ ID NO: 649799 - DNA, 33 bp, Homo sapien
gtttcacaatgttcatcaggtcttccaaccaga

SEQ ID NO: 649800 - DNA, 33 bp, Homo sapien
gtttcacaatgttcattaggtcttccaaccaga

SEQ ID NO: 649801 - DNA, 33 bp, Homo sapien
tttgaataagaagtagaccaagatatggtatgt

SEQ ID NO: 649802 - DNA, 33 bp, Homo sapien
tttgaataagaagtagtccaagatatggtatgt

SEQ ID NO: 649803 - DNA, 33 bp, Homo sapien
taagaagaatattctaagaatgtggtgtatgtt

SEQ ID NO: 649804 - DNA, 33 bp, Homo sapien
taagaagaatattctaggaatgtggtgtatgtt

SEQ ID NO: 649805 - DNA, 33 bp, Homo sapien
ttctgcctgaagaacaatccttaaaacttattt

SEQ ID NO: 649806 - DNA, 33 bp, Homo sapien
ttctgcctgaagaacattccttaaaacttattt

SEQ ID NO: 649807 - DNA, 33 bp, Homo sapien
aattctcttagatcagactaactaaaccttata

SEQ ID NO: 649808 - DNA, 33 bp, Homo sapien
aattctcttagatcaggctaactaaaccttata

SEQ ID NO: 649809 - DNA, 33 bp, Homo sapien
atgccaataccaagggaagtcggctagtgaaga

SEQ ID NO: 649810 - DNA, 33 bp, Homo sapien
atgccaataccaaggggagtcggctagtgaaga

SEQ ID NO: 649811 - DNA, 33 bp, Homo sapien
aaggatacaaaacatacgcatgactggcaccct

SEQ ID NO: 649812 - DNA, 33 bp, Homo sapien
aaggatacaaaacatatgcatgactggcaccct

SEQ ID NO: 649813 - DNA, 33 bp, Homo sapien
tctgtcactgctgctacacccaggggaaggctt

SEQ ID NO: 649814 - DNA, 33 bp, Homo sapien
tctgtcactgctgctagacccaggggaaggctt

SEQ ID NO: 649815 - DNA, 33 bp, Homo sapien
ttccccttttcttaaaatctagctcatattatt

SEQ ID NO: 649816 - DNA, 33 bp, Homo sapien
ttccccttttcttaaagtctagctcatattatt

SEQ ID NO: 649817 - DNA, 33 bp, Homo sapien
ttgttgatttccaaaaatgcatacgagatatgc

SEQ ID NO: 649818 - DNA, 33 bp, Homo sapien
ttgttgatttccaaaactgcatacgagatatgc

SEQ ID NO: 649819 - DNA, 33 bp, Homo sapien
cacagactttggagtaagagacttagagtttga

SEQ ID NO: 649820 - DNA, 33 bp, Homo sapien
cacagactttggagtaggagacttagagtttga

SEQ ID NO: 649821 - DNA, 33 bp, Homo sapien
aatctagacccagatacggcaaaaagtccttat

SEQ ID NO: 649822 - DNA, 33 bp, Homo sapien
aatctagacccagatatggcaaaaagtccttat

SEQ ID NO: 649823 - DNA, 33 bp, Homo sapien
tttacgttatcgtataggttttgatatgctatg

SEQ ID NO: 649824 - DNA, 33 bp, Homo sapien
tttacgttatcgtatatgttttgatatgctatg

SEQ ID NO: 649825 - DNA, 33 bp, Homo sapien
tcaaattgaggctgaaactgttttgattccctc

SEQ ID NO: 649826 - DNA, 33 bp, Homo sapien
tcaaattgaggctgaacctgttttgattccctc

SEQ ID NO: 649827 - DNA, 33 bp, Homo sapien
tctaggcgtttaataacgaaactccaaaaaggt

SEQ ID NO: 649828 - DNA, 33 bp, Homo sapien
tctaggcgtttaataatgaaactccaaaaaggt

SEQ ID NO: 649829 - DNA, 33 bp, Homo sapien
ctcctccataagtgcccgagagcaaggaatcag

SEQ ID NO: 649830 - DNA, 33 bp, Homo sapien
ctcctccataagtgcctgagagcaaggaatcag

SEQ ID NO: 649831 - DNA, 33 bp, Homo sapien
gtttttatattcactacaacatcaatggaaaac

SEQ ID NO: 649832 - DNA, 33 bp, Homo sapien
gtttttatattcactagaacatcaatggaaaac

SEQ ID NO: 649833 - DNA, 33 bp, Homo sapien
acaatagtcttcggataactagatcagattatt

SEQ ID NO: 649834 - DNA, 33 bp, Homo sapien
acaatagtcttcggattactagatcagattatt

SEQ ID NO: 649835 - DNA, 33 bp, Homo sapien
acctaccagatgttcactattgcctttcttttt

SEQ ID NO: 649836 - DNA, 33 bp, Homo sapien
acctaccagatgttcattattgcctttcttttt

SEQ ID NO: 649837 - DNA, 33 bp, Homo sapien
tgaaatggtgactgtgaaagcctgtttgtttta

SEQ ID NO: 649838 - DNA, 33 bp, Homo sapien
tgaaatggtgactgtgcaagcctgtttgtttta

SEQ ID NO: 649839 - DNA, 33 bp, Homo sapien
gacctcttctacagcacattctggtttgttccc

SEQ ID NO: 649840 - DNA, 33 bp, Homo sapien
gacctcttctacagcatattctggtttgttccc

SEQ ID NO: 649841 - DNA, 33 bp, Homo sapien
gtgacattaggcattgcaactaatcccagtggc

SEQ ID NO: 649842 - DNA, 33 bp, Homo sapien
gtgacattaggcattggaactaatcccagtggc

SEQ ID NO: 649843 - DNA, 33 bp, Homo sapien
tgttttctccacgtaaatctctactaccaagaa

SEQ ID NO: 649844 - DNA, 33 bp, Homo sapien
tgttttctccacgtaagtctctactaccaagaa

SEQ ID NO: 649845 - DNA, 33 bp, Homo sapien
tgactcctgctagagacctcaaaaaggaaggtt

SEQ ID NO: 649846 - DNA, 33 bp, Homo sapien
tgactcctgctagagatctcaaaaaggaaggtt

SEQ ID NO: 649847 - DNA, 33 bp, Homo sapien
atttaaacaatgcagtcacaaactactctctgc

SEQ ID NO: 649848 - DNA, 33 bp, Homo sapien
atttaaacaatgcagtgacaaactactctctgc

SEQ ID NO: 649849 - DNA, 33 bp, Homo sapien
actgagtcaaaatctacggaacatacaacacca

SEQ ID NO: 649850 - DNA, 33 bp, Homo sapien
actgagtcaaaatctatggaacatacaacacca

SEQ ID NO: 649851 - DNA, 33 bp, Homo sapien
caggcacacttttgaaactacaaacttttgaat

SEQ ID NO: 649852 - DNA, 33 bp, Homo sapien
caggcacacttttgaagctacaaacttttgaat

SEQ ID NO: 649853 - DNA, 33 bp, Homo sapien
tcacctttctgaattaacagaacttaactattc

SEQ ID NO: 649854 - DNA, 33 bp, Homo sapien
tcacctttctgaattagcagaacttaactattc

SEQ ID NO: 649855 - DNA, 33 bp, Homo sapien
cctatgcaactttaacaactctttgctcttaat

SEQ ID NO: 649856 - DNA, 33 bp, Homo sapien
cctatgcaactttaacgactctttgctcttaat

SEQ ID NO: 649857 - DNA, 33 bp, Homo sapien
atacattcaaaccataaccagctttaaactcaa

SEQ ID NO: 649858 - DNA, 33 bp, Homo sapien
atacattcaaaccatagccagctttaaactcaa

SEQ ID NO: 649859 - DNA, 33 bp, Homo sapien
atgaaagaatgtttcaataaaatgcaggaaaat

SEQ ID NO: 649860 - DNA, 33 bp, Homo sapien
atgaaagaatgtttcactaaaatgcaggaaaat

SEQ ID NO: 649861 - DNA, 33 bp, Homo sapien
aatgaacatgggagtgcaggtatatctgatagg

SEQ ID NO: 649862 - DNA, 33 bp, Homo sapien
aatgaacatgggagtgtaggtatatctgatagg

SEQ ID NO: 649863 - DNA, 33 bp, Homo sapien
gtactagctcaggttgaagcaaatctaaaatgg

SEQ ID NO: 649864 - DNA, 33 bp, Homo sapien
gtactagctcaggttgtagcaaatctaaaatgg

SEQ ID NO: 649865 - DNA, 33 bp, Homo sapien
tgtgaagatgttagcaataattggatacatatt

SEQ ID NO: 649866 - DNA, 33 bp, Homo sapien
tgtgaagatgttagcagtaattggatacatatt

SEQ ID NO: 649867 - DNA, 33 bp, Homo sapien
taatagagatgctgtaataaagtgactgaggat

SEQ ID NO: 649868 - DNA, 33 bp, Homo sapien
taatagagatgctgtactaaagtgactgaggat

SEQ ID NO: 649869 - DNA, 33 bp, Homo sapien
agtgactgaggataatcaccgaatgttttcaaa

SEQ ID NO: 649870 - DNA, 33 bp, Homo sapien
agtgactgaggataattaccgaatgttttcaaa

SEQ ID NO: 649871 - DNA, 33 bp, Homo sapien
tgatgaagttcaataacatggaagatattttgg

SEQ ID NO: 649872 - DNA, 33 bp, Homo sapien
tgatgaagttcaataagatggaagatattttgg

SEQ ID NO: 649873 - DNA, 33 bp, Homo sapien
attgtggctaactatacggttactaatatgcca

SEQ ID NO: 649874 - DNA, 33 bp, Homo sapien
attgtggctaactatatggttactaatatgcca

SEQ ID NO: 649875 - DNA, 33 bp, Homo sapien
tgataaataagataggaagacattatgccaaga

SEQ ID NO: 649876 - DNA, 33 bp, Homo sapien
tgataaataagataggtagacattatgccaaga

SEQ ID NO: 649877 - DNA, 33 bp, Homo sapien
tctgatagttcacaacgaattggaatatgtgcc

SEQ ID NO: 649878 - DNA, 33 bp, Homo sapien
tctgatagttcacaactaattggaatatgtgcc

SEQ ID NO: 649879 - DNA, 33 bp, Homo sapien
acttcaaatggatactcagatgatagtggaaag

SEQ ID NO: 649880 - DNA, 33 bp, Homo sapien
acttcaaatggatacttagatgatagtggaaag

SEQ ID NO: 649881 - DNA, 33 bp, Homo sapien
gttctaaataaaagcactacttagcccaggtca

SEQ ID NO: 649882 - DNA, 33 bp, Homo sapien
gttctaaataaaagcattacttagcccaggtca

SEQ ID NO: 649883 - DNA, 33 bp, Homo sapien
attaaaatgtgatcaacgaataaaaattatata

SEQ ID NO: 649884 - DNA, 33 bp, Homo sapien
attaaaatgtgatcaatgaataaaaattatata

SEQ ID NO: 649885 - DNA, 33 bp, Homo sapien
gcttaaaatctataaagcagtgtgtaaatgcaa

SEQ ID NO: 649886 - DNA, 33 bp, Homo sapien
gcttaaaatctataaatcagtgtgtaaatgcaa

SEQ ID NO: 649887 - DNA, 33 bp, Homo sapien
aatgtccccagtattacaatttcctgctgcttg

SEQ ID NO: 649888 - DNA, 33 bp, Homo sapien
aatgtccccagtattagaatttcctgctgcttg

SEQ ID NO: 649889 - DNA, 33 bp, Homo sapien
tttaaaccttcaggccaatatgtaaatctgttt

SEQ ID NO: 649890 - DNA, 33 bp, Homo sapien
tttaaaccttcaggccgatatgtaaatctgttt

SEQ ID NO: 649891 - DNA, 33 bp, Homo sapien
agctattttctctggacgttgagatttcatttg

SEQ ID NO: 649892 - DNA, 33 bp, Homo sapien
agctattttctctggatgttgagatttcatttg

SEQ ID NO: 649893 - DNA, 33 bp, Homo sapien
ggcgctacctagtggaactataagagggtgaca

SEQ ID NO: 649894 - DNA, 33 bp, Homo sapien
ggcgctacctagtggagctataagagggtgaca

SEQ ID NO: 649895 - DNA, 33 bp, Homo sapien
gggacttgctgttcaacgcttataatttttcat

SEQ ID NO: 649896 - DNA, 33 bp, Homo sapien
gggacttgctgttcaatgcttataatttttcat

SEQ ID NO: 649897 - DNA, 33 bp, Homo sapien
gaatttttggctgttaagagcttcctttcctgt

SEQ ID NO: 649898 - DNA, 33 bp, Homo sapien
gaatttttggctgttaggagcttcctttcctgt

SEQ ID NO: 649899 - DNA, 33 bp, Homo sapien
tgtaatgctgtgaaaacgagtctcaatatgtac

SEQ ID NO: 649900 - DNA, 33 bp, Homo sapien
tgtaatgctgtgaaaatgagtctcaatatgtac

SEQ ID NO: 649901 - DNA, 33 bp, Homo sapien
tcatttttatgcaatacatgccccccaacacac

SEQ ID NO: 649902 - DNA, 33 bp, Homo sapien
tcatttttatgcaatatatgccccccaacacac

SEQ ID NO: 649903 - DNA, 33 bp, Homo sapien
ttatttcctcattctcacttctattggaaaaat

SEQ ID NO: 649904 - DNA, 33 bp, Homo sapien
ttatttcctcattctcgcttctattggaaaaat

SEQ ID NO: 649905 - DNA, 33 bp, Homo sapien
taagcatgaaaaagagaaaaaagttaatgagag

SEQ ID NO: 649906 - DNA, 33 bp, Homo sapien
taagcatgaaaaagaggaaaaagttaatgagag

SEQ ID NO: 649907 - DNA, 33 bp, Homo sapien
tctgattataaatggacggactcttattccttt

SEQ ID NO: 649908 - DNA, 33 bp, Homo sapien
tctgattataaatggatggactcttattccttt

SEQ ID NO: 649909 - DNA, 33 bp, Homo sapien
acttaatcacttctcaaaggatccattttgaaa

SEQ ID NO: 649910 - DNA, 33 bp, Homo sapien
acttaatcacttctcagaggatccattttgaaa

SEQ ID NO: 649911 - DNA, 33 bp, Homo sapien
ggaggcagtactcgaactggatcttgaagattg

SEQ ID NO: 649912 - DNA, 33 bp, Homo sapien
ggaggcagtactcgaattggatcttgaagattg

SEQ ID NO: 649913 - DNA, 33 bp, Homo sapien
gaggacccttgttctaagtaattcaggcttgat

SEQ ID NO: 649914 - DNA, 33 bp, Homo sapien
gaggacccttgttctacgtaattcaggcttgat

SEQ ID NO: 649915 - DNA, 33 bp, Homo sapien
ggacagatttgaaactaagtgtcctttctttct

SEQ ID NO: 649916 - DNA, 33 bp, Homo sapien
ggacagatttgaaactgagtgtcctttctttct

SEQ ID NO: 649917 - DNA, 33 bp, Homo sapien
gaaaaatactaggatagcttgcctctaatctta

SEQ ID NO: 649918 - DNA, 33 bp, Homo sapien
gaaaaatactaggatatcttgcctctaatctta

SEQ ID NO: 649919 - DNA, 33 bp, Homo sapien
tggacttttcttctggccagtaacattattcta

SEQ ID NO: 649920 - DNA, 33 bp, Homo sapien
tggacttttcttctggtcagtaacattattcta

SEQ ID NO: 649921 - DNA, 33 bp, Homo sapien
taaattctccctcctacgcaacggtggtcaggc

SEQ ID NO: 649922 - DNA, 33 bp, Homo sapien
taaattctccctcctatgcaacggtggtcaggc

SEQ ID NO: 649923 - DNA, 33 bp, Homo sapien
attcacagtggttttgaagaataattttcgaag

SEQ ID NO: 649924 - DNA, 33 bp, Homo sapien
attcacagtggttttgcagaataattttcgaag

SEQ ID NO: 649925 - DNA, 33 bp, Homo sapien
agaaggattatttcaccgtagccacctcagcta

SEQ ID NO: 649926 - DNA, 33 bp, Homo sapien
agaaggattatttcactgtagccacctcagcta

SEQ ID NO: 649927 - DNA, 33 bp, Homo sapien
caatagaaaatagaaaccaattccaagaagatc

SEQ ID NO: 649928 - DNA, 33 bp, Homo sapien
caatagaaaatagaaagcaattccaagaagatc

SEQ ID NO: 649929 - DNA, 33 bp, Homo sapien
agtttttaatgcaaaacgttggtaagggatcaa

SEQ ID NO: 649930 - DNA, 33 bp, Homo sapien
agtttttaatgcaaaatgttggtaagggatcaa

SEQ ID NO: 649931 - DNA, 33 bp, Homo sapien
gtaactatttagaagcacttgtcaagaatagct

SEQ ID NO: 649932 - DNA, 33 bp, Homo sapien
gtaactatttagaagcccttgtcaagaatagct

SEQ ID NO: 649933 - DNA, 33 bp, Homo sapien
aaaatatcttcttatcacaggattcactattac

SEQ ID NO: 649934 - DNA, 33 bp, Homo sapien
aaaatatcttcttatctcaggattcactattac

SEQ ID NO: 649935 - DNA, 33 bp, Homo sapien
gcgcctgttcagtacacaaatttttaagcactc

SEQ ID NO: 649936 - DNA, 33 bp, Homo sapien
gcgcctgttcagtacataaatttttaagcactc

SEQ ID NO: 649937 - DNA, 33 bp, Homo sapien
tttttaatcgaaggaaactgtatctcttaaagt

SEQ ID NO: 649938 - DNA, 33 bp, Homo sapien
tttttaatcgaaggaatctgtatctcttaaagt

SEQ ID NO: 649939 - DNA, 33 bp, Homo sapien
gccttgcaaagtattgccaaccaattgggattg

SEQ ID NO: 649940 - DNA, 33 bp, Homo sapien
gccttgcaaagtattgtcaaccaattgggattg

SEQ ID NO: 649941 - DNA, 33 bp, Homo sapien
caatatgcagataccacacaaaaatggacagct

SEQ ID NO: 649942 - DNA, 33 bp, Homo sapien
caatatgcagataccagacaaaaatggacagct

SEQ ID NO: 649943 - DNA, 33 bp, Homo sapien
acccatgaggagatgcactacattcaaaaagaa

SEQ ID NO: 649944 - DNA, 33 bp, Homo sapien
acccatgaggagatgcgctacattcaaaaagaa

SEQ ID NO: 649945 - DNA, 33 bp, Homo sapien
gatgatctgagatatacatgatttctgtagttg

SEQ ID NO: 649946 - DNA, 33 bp, Homo sapien
gatgatctgagatatagatgatttctgtagttg

SEQ ID NO: 649947 - DNA, 33 bp, Homo sapien
atccaaaaatcggtaaaatctctatacaccaat

SEQ ID NO: 649948 - DNA, 33 bp, Homo sapien
atccaaaaatcggtaacatctctatacaccaat

SEQ ID NO: 649949 - DNA, 33 bp, Homo sapien
aaattaagatgaagacaaaaagcaatggagttt

SEQ ID NO: 649950 - DNA, 33 bp, Homo sapien
aaattaagatgaagactaaaagcaatggagttt

SEQ ID NO: 649951 - DNA, 33 bp, Homo sapien
ttatacagagtttggaactatttgaggtttcag

SEQ ID NO: 649952 - DNA, 33 bp, Homo sapien
ttatacagagtttggagctatttgaggtttcag

SEQ ID NO: 649953 - DNA, 33 bp, Homo sapien
tatttcttcctgtaaacatctgccctggctgct

SEQ ID NO: 649954 - DNA, 33 bp, Homo sapien
tatttcttcctgtaaatatctgccctggctgct

SEQ ID NO: 649955 - DNA, 33 bp, Homo sapien
acaggaaaatgtgtgaaatttgaaacttcctag

SEQ ID NO: 649956 - DNA, 33 bp, Homo sapien
acaggaaaatgtgtgagatttgaaacttcctag

SEQ ID NO: 649957 - DNA, 33 bp, Homo sapien
cgaagactctctaagcaaagataaccaataaaa

SEQ ID NO: 649958 - DNA, 33 bp, Homo sapien
cgaagactctctaagcgaagataaccaataaaa

SEQ ID NO: 649959 - DNA, 33 bp, Homo sapien
ggaggtcccaaaaagaaatcatcagtgtggtag

SEQ ID NO: 649960 - DNA, 33 bp, Homo sapien
ggaggtcccaaaaagagatcatcagtgtggtag

SEQ ID NO: 649961 - DNA, 33 bp, Homo sapien
gaggctctgcagaaatgagtcaataaaacctct

SEQ ID NO: 649962 - DNA, 33 bp, Homo sapien
gaggctctgcagaaattagtcaataaaacctct

SEQ ID NO: 649963 - DNA, 33 bp, Homo sapien
agctgccaagagtggccgaaaaaaattggctga

SEQ ID NO: 649964 - DNA, 33 bp, Homo sapien
agctgccaagagtggctgaaaaaaattggctga

SEQ ID NO: 649965 - DNA, 33 bp, Homo sapien
ctataatagttaacccaatgctcggtgtagctc

SEQ ID NO: 649966 - DNA, 33 bp, Homo sapien
ctataatagttaacccgatgctcggtgtagctc

SEQ ID NO: 649967 - DNA, 33 bp, Homo sapien
gatactcctttatagcacatattttaaatgaaa

SEQ ID NO: 649968 - DNA, 33 bp, Homo sapien
gatactcctttatagcgcatattttaaatgaaa

SEQ ID NO: 649969 - DNA, 33 bp, Homo sapien
aaggcaattatagcctaagcaatgataatcatt

SEQ ID NO: 649970 - DNA, 33 bp, Homo sapien
aaggcaattatagcctgagcaatgataatcatt

SEQ ID NO: 649971 - DNA, 33 bp, Homo sapien
tcaacaacaatttataacattgggcataatgtg

SEQ ID NO: 649972 - DNA, 33 bp, Homo sapien
tcaacaacaatttatagcattgggcataatgtg

SEQ ID NO: 649973 - DNA, 33 bp, Homo sapien
tgtttctattttactgcaataatgtagacctat

SEQ ID NO: 649974 - DNA, 33 bp, Homo sapien
tgtttctattttactggaataatgtagacctat

SEQ ID NO: 649975 - DNA, 33 bp, Homo sapien
tgtcttgggctatatacgaagaaataaatgtgt

SEQ ID NO: 649976 - DNA, 33 bp, Homo sapien
tgtcttgggctatatatgaagaaataaatgtgt

SEQ ID NO: 649977 - DNA, 33 bp, Homo sapien
aagcaaatctaaattacatcttgcactagttac

SEQ ID NO: 649978 - DNA, 33 bp, Homo sapien
aagcaaatctaaattatatcttgcactagttac

SEQ ID NO: 649979 - DNA, 33 bp, Homo sapien
tcttactgctttggtcacatgattggtcctttt

SEQ ID NO: 649980 - DNA, 33 bp, Homo sapien
tcttactgctttggtcgcatgattggtcctttt

SEQ ID NO: 649981 - DNA, 33 bp, Homo sapien
gacaggtcctttcaaaccgatgtgagccattta

SEQ ID NO: 649982 - DNA, 33 bp, Homo sapien
gacaggtcctttcaaatcgatgtgagccattta

SEQ ID NO: 649983 - DNA, 33 bp, Homo sapien
gttggctactgtactcactgttcataaactgtt

SEQ ID NO: 649984 - DNA, 33 bp, Homo sapien
gttggctactgtactcgctgttcataaactgtt

SEQ ID NO: 649985 - DNA, 33 bp, Homo sapien
gatagagcctttcaacggaaggattaagttaaa

SEQ ID NO: 649986 - DNA, 33 bp, Homo sapien
gatagagcctttcaactgaaggattaagttaaa

SEQ ID NO: 649987 - DNA, 33 bp, Homo sapien
acttcgacaaattattcaacatctccgtatctc

SEQ ID NO: 649988 - DNA, 33 bp, Homo sapien
acttcgacaaattatttaacatctccgtatctc

SEQ ID NO: 649989 - DNA, 33 bp, Homo sapien
ctccaaatattagtgacctacaccacttctttc

SEQ ID NO: 649990 - DNA, 33 bp, Homo sapien
ctccaaatattagtgagctacaccacttctttc

SEQ ID NO: 649991 - DNA, 33 bp, Homo sapien
cttacaaaccttatgagagtctaaaacgagaat

SEQ ID NO: 649992 - DNA, 33 bp, Homo sapien
cttacaaaccttatgatagtctaaaacgagaat

SEQ ID NO: 649993 - DNA, 33 bp, Homo sapien
caaaaaccctcaacacaactgcagacatccaca

SEQ ID NO: 649994 - DNA, 33 bp, Homo sapien
caaaaaccctcaacacgactgcagacatccaca

SEQ ID NO: 649995 - DNA, 33 bp, Homo sapien
aaagctttcaagtggcactgatgttgctagtcc

SEQ ID NO: 649996 - DNA, 33 bp, Homo sapien
aaagctttcaagtggctctgatgttgctagtcc

SEQ ID NO: 649997 - DNA, 33 bp, Homo sapien
catttgttcagttacagattcactaagcactta

SEQ ID NO: 649998 - DNA, 33 bp, Homo sapien
catttgttcagttacatattcactaagcactta

SEQ ID NO: 649999 - DNA, 33 bp, Homo sapien
tttggtaaatagttcaccatcttgtaactgtca

SEQ ID NO: 650000 - DNA, 33 bp, Homo sapien
tttggtaaatagttcatcatcttgtaactgtca

SEQ ID NO: 650001 - DNA, 33 bp, Homo sapien
tgtatacaactagagacagggttctaaaatcta

SEQ ID NO: 650002 - DNA, 33 bp, Homo sapien
tgtatacaactagagatagggttctaaaatcta

SEQ ID NO: 650003 - DNA, 33 bp, Homo sapien
ctagttgtatacagcacgtctcctctatagaaa

SEQ ID NO: 650004 - DNA, 33 bp, Homo sapien
ctagttgtatacagcaggtctcctctatagaaa

SEQ ID NO: 650005 - DNA, 33 bp, Homo sapien
aggggttgtatttagagagggacattttgcctg

SEQ ID NO: 650006 - DNA, 33 bp, Homo sapien
aggggttgtatttagatagggacattttgcctg

SEQ ID NO: 650007 - DNA, 33 bp, Homo sapien
agtgaaataaaatagcaagtatgtctacacatg

SEQ ID NO: 650008 - DNA, 33 bp, Homo sapien
agtgaaataaaatagcgagtatgtctacacatg

SEQ ID NO: 650009 - DNA, 33 bp, Homo sapien
atattaaacctgatgactaatgtcttttccaag

SEQ ID NO: 650010 - DNA, 33 bp, Homo sapien
atattaaacctgatgattaatgtcttttccaag

SEQ ID NO: 650011 - DNA, 33 bp, Homo sapien
actgtaattttcaatacggtcaccttttcacca

SEQ ID NO: 650012 - DNA, 33 bp, Homo sapien
actgtaattttcaatagggtcaccttttcacca

SEQ ID NO: 650013 - DNA, 33 bp, Homo sapien
catgtttttcaaaggacgcaatggaacactatt

SEQ ID NO: 650014 - DNA, 33 bp, Homo sapien
catgtttttcaaaggatgcaatggaacactatt

SEQ ID NO: 650015 - DNA, 33 bp, Homo sapien
cttcatcacgagtagagtttgtttcaagaaacc

SEQ ID NO: 650016 - DNA, 33 bp, Homo sapien
cttcatcacgagtagattttgtttcaagaaacc

SEQ ID NO: 650017 - DNA, 33 bp, Homo sapien
aagatgctgtgaaggacaggaggtcaaaatgtc

SEQ ID NO: 650018 - DNA, 33 bp, Homo sapien
aagatgctgtgaaggataggaggtcaaaatgtc

SEQ ID NO: 650019 - DNA, 33 bp, Homo sapien
ataggaaaatgtaagccctcccaaataatattt

SEQ ID NO: 650020 - DNA, 33 bp, Homo sapien
ataggaaaatgtaagcgctcccaaataatattt

SEQ ID NO: 650021 - DNA, 33 bp, Homo sapien
ttaactgcttgagccacaaacaaaataaactac

SEQ ID NO: 650022 - DNA, 33 bp, Homo sapien
ttaactgcttgagccataaacaaaataaactac

SEQ ID NO: 650023 - DNA, 33 bp, Homo sapien
aaaattagtcacttaaataggaaaacacaagag

SEQ ID NO: 650024 - DNA, 33 bp, Homo sapien
aaaattagtcacttaagtaggaaaacacaagag

SEQ ID NO: 650025 - DNA, 33 bp, Homo sapien
ttcaaataatttcttccacttgaacaactgagc

SEQ ID NO: 650026 - DNA, 33 bp, Homo sapien
ttcaaataatttcttctacttgaacaactgagc

SEQ ID NO: 650027 - DNA, 33 bp, Homo sapien
ggaagcctcaatatcacggtaggattgtggaat

SEQ ID NO: 650028 - DNA, 33 bp, Homo sapien
ggaagcctcaatatcatggtaggattgtggaat

SEQ ID NO: 650029 - DNA, 33 bp, Homo sapien
atgtggtcctcaaaaaccctccaaagacaagaa

SEQ ID NO: 650030 - DNA, 33 bp, Homo sapien
atgtggtcctcaaaaatcctccaaagacaagaa

SEQ ID NO: 650031 - DNA, 33 bp, Homo sapien
ttcagcaaatccgatacgtgtcatagaatggtt

SEQ ID NO: 650032 - DNA, 33 bp, Homo sapien
ttcagcaaatccgatatgtgtcatagaatggtt

SEQ ID NO: 650033 - DNA, 33 bp, Homo sapien
cctggaaatgactacaaaactggtccataaggc

SEQ ID NO: 650034 - DNA, 33 bp, Homo sapien
cctggaaatgactacataactggtccataaggc

SEQ ID NO: 650035 - DNA, 33 bp, Homo sapien
ttatgcctaacacagcaaattggtcatcataag

SEQ ID NO: 650036 - DNA, 33 bp, Homo sapien
ttatgcctaacacagcgaattggtcatcataag

SEQ ID NO: 650037 - DNA, 33 bp, Homo sapien
caagagctttacacgaataatcttttcctcaga

SEQ ID NO: 650038 - DNA, 33 bp, Homo sapien
caagagctttacacgagtaatcttttcctcaga

SEQ ID NO: 650039 - DNA, 33 bp, Homo sapien
tgcagcttggtattgaccttcaacttggaatgt

SEQ ID NO: 650040 - DNA, 33 bp, Homo sapien
tgcagcttggtattgatcttcaacttggaatgt

SEQ ID NO: 650041 - DNA, 33 bp, Homo sapien
cttcaatacgtcatgaaataaacaacatattaa

SEQ ID NO: 650042 - DNA, 33 bp, Homo sapien
cttcaatacgtcatgagataaacaacatattaa

SEQ ID NO: 650043 - DNA, 33 bp, Homo sapien
ataaattattcatagacaagatagtgcctagaa

SEQ ID NO: 650044 - DNA, 33 bp, Homo sapien
ataaattattcatagagaagatagtgcctagaa

SEQ ID NO: 650045 - DNA, 33 bp, Homo sapien
aataaataattccacaaaaaaaatctgcattcc

SEQ ID NO: 650046 - DNA, 33 bp, Homo sapien
aataaataattccacacaaaaaatctgcattcc

SEQ ID NO: 650047 - DNA, 33 bp, Homo sapien
gtgtgttgtctcctcccgccgcacacatctaaa

SEQ ID NO: 650048 - DNA, 33 bp, Homo sapien
gtgtgttgtctcctcctgccgcacacatctaaa

SEQ ID NO: 650049 - DNA, 33 bp, Homo sapien
gttctaattgtttaatcaaggcaaaacattgtg

SEQ ID NO: 650050 - DNA, 33 bp, Homo sapien
gttctaattgtttaatgaaggcaaaacattgtg

SEQ ID NO: 650051 - DNA, 33 bp, Homo sapien
ttggtctagtgatgaacagagtctgaataaaag

SEQ ID NO: 650052 - DNA, 33 bp, Homo sapien
ttggtctagtgatgaatagagtctgaataaaag

SEQ ID NO: 650053 - DNA, 33 bp, Homo sapien
ggatatgtgtctcctacaatgtaagtgctcaag

SEQ ID NO: 650054 - DNA, 33 bp, Homo sapien
ggatatgtgtctcctataatgtaagtgctcaag

SEQ ID NO: 650055 - DNA, 33 bp, Homo sapien
aaagagtcaataagacaaatgaatgcaaatgag

SEQ ID NO: 650056 - DNA, 33 bp, Homo sapien
aaagagtcaataagacgaatgaatgcaaatgag

SEQ ID NO: 650057 - DNA, 33 bp, Homo sapien
tagcatgggtacagtaaactcttaatgactcct

SEQ ID NO: 650058 - DNA, 33 bp, Homo sapien
tagcatgggtacagtagactcttaatgactcct

SEQ ID NO: 650059 - DNA, 33 bp, Homo sapien
gatatacattcaattacaacctccattctactc

SEQ ID NO: 650060 - DNA, 33 bp, Homo sapien
gatatacattcaattataacctccattctactc

SEQ ID NO: 650061 - DNA, 33 bp, Homo sapien
catcatctaaaacaaaacctcaatgcaactaca

SEQ ID NO: 650062 - DNA, 33 bp, Homo sapien
catcatctaaaacaaagcctcaatgcaactaca

SEQ ID NO: 650063 - DNA, 33 bp, Homo sapien
atgtggcctcctctcaaacaagtggcaataaaa

SEQ ID NO: 650064 - DNA, 33 bp, Homo sapien
atgtggcctcctctcagacaagtggcaataaaa

SEQ ID NO: 650065 - DNA, 33 bp, Homo sapien
tgtatgggtaatcttccattgggggataatgtt

SEQ ID NO: 650066 - DNA, 33 bp, Homo sapien
tgtatgggtaatcttctattgggggataatgtt

SEQ ID NO: 650067 - DNA, 33 bp, Homo sapien
ttattattgttcaaaacgtaatcatatgccacc

SEQ ID NO: 650068 - DNA, 33 bp, Homo sapien
ttattattgttcaaaatgtaatcatatgccacc

SEQ ID NO: 650069 - DNA, 33 bp, Homo sapien
tgtaaaacaatctcagacaggcccttcagaaga

SEQ ID NO: 650070 - DNA, 33 bp, Homo sapien
tgtaaaacaatctcaggcaggcccttcagaaga

SEQ ID NO: 650071 - DNA, 33 bp, Homo sapien
ttcttgtgtcatttcactcttactttctaagtc

SEQ ID NO: 650072 - DNA, 33 bp, Homo sapien
ttcttgtgtcatttcagtcttactttctaagtc

SEQ ID NO: 650073 - DNA, 33 bp, Homo sapien
gagtgttaagaggacacagtagaatggggtctt

SEQ ID NO: 650074 - DNA, 33 bp, Homo sapien
gagtgttaagaggacagagtagaatggggtctt

SEQ ID NO: 650075 - DNA, 33 bp, Homo sapien
tttcttagaattcttacagttgcacagagaaat

SEQ ID NO: 650076 - DNA, 33 bp, Homo sapien
tttcttagaattcttatagttgcacagagaaat

SEQ ID NO: 650077 - DNA, 33 bp, Homo sapien
acaaaattcaagaccacagcgaaaaaacacaaa

SEQ ID NO: 650078 - DNA, 33 bp, Homo sapien
acaaaattcaagaccatagcgaaaaaacacaaa

SEQ ID NO: 650079 - DNA, 33 bp, Homo sapien
cttctgcagaccggacggagaacttatggtgct

SEQ ID NO: 650080 - DNA, 33 bp, Homo sapien
cttctgcagaccggactgagaacttatggtgct

SEQ ID NO: 650081 - DNA, 33 bp, Homo sapien
ttctgcctttctcttacggttagcagactttaa

SEQ ID NO: 650082 - DNA, 33 bp, Homo sapien
ttctgcctttctcttatggttagcagactttaa

SEQ ID NO: 650083 - DNA, 33 bp, Homo sapien
tacctctaatttggacaaaagggttcaagggaa

SEQ ID NO: 650084 - DNA, 33 bp, Homo sapien
tacctctaatttggacgaaagggttcaagggaa

SEQ ID NO: 650085 - DNA, 33 bp, Homo sapien
tatttttttcccactacggttcactcttctttc

SEQ ID NO: 650086 - DNA, 33 bp, Homo sapien
tatttttttcccactatggttcactcttctttc

SEQ ID NO: 650087 - DNA, 33 bp, Homo sapien
agtgtctatatgaataaccaaaagatgaataaa

SEQ ID NO: 650088 - DNA, 33 bp, Homo sapien
agtgtctatatgaatagccaaaagatgaataaa

SEQ ID NO: 650089 - DNA, 33 bp, Homo sapien
aatacggagtccttccaccattgcttgtctttg

SEQ ID NO: 650090 - DNA, 33 bp, Homo sapien
aatacggagtccttccgccattgcttgtctttg

SEQ ID NO: 650091 - DNA, 33 bp, Homo sapien
catggaatactgtgaaaccataaaaggaaatga

SEQ ID NO: 650092 - DNA, 33 bp, Homo sapien
catggaatactgtgaatccataaaaggaaatga

SEQ ID NO: 650093 - DNA, 33 bp, Homo sapien
taattaaatctgcaaaaatttcaacaataaggt

SEQ ID NO: 650094 - DNA, 33 bp, Homo sapien
taattaaatctgcaaacatttcaacaataaggt

SEQ ID NO: 650095 - DNA, 33 bp, Homo sapien
taatagaaattgcctcaaaactctgaaaatgtg

SEQ ID NO: 650096 - DNA, 33 bp, Homo sapien
taatagaaattgcctcgaaactctgaaaatgtg

SEQ ID NO: 650097 - DNA, 33 bp, Homo sapien
cttgttcaattgttcacgtttcttacagattct

SEQ ID NO: 650098 - DNA, 33 bp, Homo sapien
cttgttcaattgttcatgtttcttacagattct

SEQ ID NO: 650099 - DNA, 33 bp, Homo sapien
aagaggtcgccatgtaccagataaaattaatga

SEQ ID NO: 650100 - DNA, 33 bp, Homo sapien
aagaggtcgccatgtatcagataaaattaatga

SEQ ID NO: 650101 - DNA, 33 bp, Homo sapien
acaaaatttactgtgcagcaaaataagaaagtt

SEQ ID NO: 650102 - DNA, 33 bp, Homo sapien
acaaaatttactgtgcggcaaaataagaaagtt

SEQ ID NO: 650103 - DNA, 33 bp, Homo sapien
ttagagcctatttgtacactcttcaaaactgca

SEQ ID NO: 650104 - DNA, 33 bp, Homo sapien
ttagagcctatttgtatactcttcaaaactgca

SEQ ID NO: 650105 - DNA, 33 bp, Homo sapien
tatatcacctgcaaaaaagcataatttgattta

SEQ ID NO: 650106 - DNA, 33 bp, Homo sapien
tatatcacctgcaaaacagcataatttgattta

SEQ ID NO: 650107 - DNA, 33 bp, Homo sapien
gtgtctgccatttgtagaagtgatgaacacatg

SEQ ID NO: 650108 - DNA, 33 bp, Homo sapien
gtgtctgccatttgtataagtgatgaacacatg

SEQ ID NO: 650109 - DNA, 33 bp, Homo sapien
tgagtgccttgtgagaatagtttaaccccaaga

SEQ ID NO: 650110 - DNA, 33 bp, Homo sapien
tgagtgccttgtgagattagtttaaccccaaga

SEQ ID NO: 650111 - DNA, 33 bp, Homo sapien
caaagaaggaaagttacctagagtagtctttat

SEQ ID NO: 650112 - DNA, 33 bp, Homo sapien
caaagaaggaaagttatctagagtagtctttat

SEQ ID NO: 650113 - DNA, 33 bp, Homo sapien
gcttagccattgaaaaagtatgtttatcacttg

SEQ ID NO: 650114 - DNA, 33 bp, Homo sapien
gcttagccattgaaaatgtatgtttatcacttg

SEQ ID NO: 650115 - DNA, 33 bp, Homo sapien
actcttgaaggaggaaatgtcggagtagatagt

SEQ ID NO: 650116 - DNA, 33 bp, Homo sapien
actcttgaaggaggaagtgtcggagtagatagt

SEQ ID NO: 650117 - DNA, 33 bp, Homo sapien
acaaaccgaagagaaactggctatagctatgta

SEQ ID NO: 650118 - DNA, 33 bp, Homo sapien
acaaaccgaagagaaattggctatagctatgta

SEQ ID NO: 650119 - DNA, 33 bp, Homo sapien
tgaatgagatttggaacggaaagttaagtcacg

SEQ ID NO: 650120 - DNA, 33 bp, Homo sapien
tgaatgagatttggaatggaaagttaagtcacg

SEQ ID NO: 650121 - DNA, 33 bp, Homo sapien
agaggtgccttggaaacgacaaaatagaaagtg

SEQ ID NO: 650122 - DNA, 33 bp, Homo sapien
agaggtgccttggaaatgacaaaatagaaagtg

SEQ ID NO: 650123 - DNA, 33 bp, Homo sapien
atatgattagactgaacggttaatctagctgat

SEQ ID NO: 650124 - DNA, 33 bp, Homo sapien
atatgattagactgaatggttaatctagctgat

SEQ ID NO: 650125 - DNA, 33 bp, Homo sapien
cacctcatctctggggaagaaccttattcctcc

SEQ ID NO: 650126 - DNA, 33 bp, Homo sapien
cacctcatctctggggtagaaccttattcctcc

SEQ ID NO: 650127 - DNA, 33 bp, Homo sapien
acctcagcgcaaaacaaatggctttgccagtca

SEQ ID NO: 650128 - DNA, 33 bp, Homo sapien
acctcagcgcaaaacagatggctttgccagtca

SEQ ID NO: 650129 - DNA, 33 bp, Homo sapien
ttggaggaagagtcacaagaaagttgttttctg

SEQ ID NO: 650130 - DNA, 33 bp, Homo sapien
ttggaggaagagtcacgagaaagttgttttctg

SEQ ID NO: 650131 - DNA, 33 bp, Homo sapien
tacatctcttgaagacaggataccattgggtct

SEQ ID NO: 650132 - DNA, 33 bp, Homo sapien
tacatctcttgaagaccggataccattgggtct

SEQ ID NO: 650133 - DNA, 33 bp, Homo sapien
atgaccatactattccccagcaagagtgattaa

SEQ ID NO: 650134 - DNA, 33 bp, Homo sapien
atgaccatactattccgcagcaagagtgattaa

SEQ ID NO: 650135 - DNA, 33 bp, Homo sapien
tggagtcttaggccaaaagggtccacccagtga

SEQ ID NO: 650136 - DNA, 33 bp, Homo sapien
tggagtcttaggccaagagggtccacccagtga

SEQ ID NO: 650137 - DNA, 33 bp, Homo sapien
tgtataaaaaaaaagacgagagacctaagctct

SEQ ID NO: 650138 - DNA, 33 bp, Homo sapien
tgtataaaaaaaaagatgagagacctaagctct

SEQ ID NO: 650139 - DNA, 33 bp, Homo sapien
tgcttgggttgataaacatcctgtagttagaga

SEQ ID NO: 650140 - DNA, 33 bp, Homo sapien
tgcttgggttgataaagatcctgtagttagaga

SEQ ID NO: 650141 - DNA, 33 bp, Homo sapien
gctgcttccacttggccatcttggtctcctctc

SEQ ID NO: 650142 - DNA, 33 bp, Homo sapien
gctgcttccacttggctatcttggtctcctctc

SEQ ID NO: 650143 - DNA, 33 bp, Homo sapien
gctgtacccactcgacacttttgttcttctttg

SEQ ID NO: 650144 - DNA, 33 bp, Homo sapien
gctgtacccactcgacgcttttgttcttctttg

SEQ ID NO: 650145 - DNA, 33 bp, Homo sapien
ttagattttgacattgcaacttctctaaatcca

SEQ ID NO: 650146 - DNA, 33 bp, Homo sapien
ttagattttgacattgtaacttctctaaatcca

SEQ ID NO: 650147 - DNA, 33 bp, Homo sapien
cttgaggcaaatccaactgagttccttcattcc

SEQ ID NO: 650148 - DNA, 33 bp, Homo sapien
cttgaggcaaatccaattgagttccttcattcc

SEQ ID NO: 650149 - DNA, 33 bp, Homo sapien
aggctggagtacaagcaatatgcatcctggcag

SEQ ID NO: 650150 - DNA, 33 bp, Homo sapien
aggctggagtacaagctatatgcatcctggcag

SEQ ID NO: 650151 - DNA, 33 bp, Homo sapien
ttgttgacagctgttacaatacacaaagtacca

SEQ ID NO: 650152 - DNA, 33 bp, Homo sapien
ttgttgacagctgttataatacacaaagtacca

SEQ ID NO: 650153 - DNA, 33 bp, Homo sapien
tgtaagaaggaactaacacacctgagtaaaaag

SEQ ID NO: 650154 - DNA, 33 bp, Homo sapien
tgtaagaaggaactaatacacctgagtaaaaag

SEQ ID NO: 650155 - DNA, 33 bp, Homo sapien
tatgggaagaggttaacctagaaccagctcaaa

SEQ ID NO: 650156 - DNA, 33 bp, Homo sapien
tatgggaagaggttaatctagaaccagctcaaa

SEQ ID NO: 650157 - DNA, 33 bp, Homo sapien
aaatttctacatgatacgtttgtgaaaagtaag

SEQ ID NO: 650158 - DNA, 33 bp, Homo sapien
aaatttctacatgataggtttgtgaaaagtaag

SEQ ID NO: 650159 - DNA, 33 bp, Homo sapien
tgcacaagtcaaggaaaaataagatgctggctc

SEQ ID NO: 650160 - DNA, 33 bp, Homo sapien
tgcacaagtcaaggaagaataagatgctggctc

SEQ ID NO: 650161 - DNA, 33 bp, Homo sapien
tacacagtaactagaagggccactaccaggaaa

SEQ ID NO: 650162 - DNA, 33 bp, Homo sapien
tacacagtaactagaatggccactaccaggaaa

SEQ ID NO: 650163 - DNA, 33 bp, Homo sapien
aatctagttcattgacaatttatgcatagtcct

SEQ ID NO: 650164 - DNA, 33 bp, Homo sapien
aatctagttcattgacgatttatgcatagtcct

SEQ ID NO: 650165 - DNA, 33 bp, Homo sapien
gagctacctccactcaataaaacttggcactca

SEQ ID NO: 650166 - DNA, 33 bp, Homo sapien
gagctacctccactcagtaaaacttggcactca

SEQ ID NO: 650167 - DNA, 33 bp, Homo sapien
cttggaatgtttagcccggactctcttcctccg

SEQ ID NO: 650168 - DNA, 33 bp, Homo sapien
cttggaatgtttagcctggactctcttcctccg

SEQ ID NO: 650169 - DNA, 33 bp, Homo sapien
atattaacttccaaacaaacgacacaggatatt

SEQ ID NO: 650170 - DNA, 33 bp, Homo sapien
atattaacttccaaaccaacgacacaggatatt

SEQ ID NO: 650171 - DNA, 33 bp, Homo sapien
tttgaacatggctgtgaattaaatgataatatt

SEQ ID NO: 650172 - DNA, 33 bp, Homo sapien
tttgaacatggctgtggattaaatgataatatt

SEQ ID NO: 650173 - DNA, 33 bp, Homo sapien
atcctctaacattacaaggcaatatttcacttt

SEQ ID NO: 650174 - DNA, 33 bp, Homo sapien
atcctctaacattacatggcaatatttcacttt

SEQ ID NO: 650175 - DNA, 33 bp, Homo sapien
aatattcattaaagtaagagagctacagggtcc

SEQ ID NO: 650176 - DNA, 33 bp, Homo sapien
aatattcattaaagtaggagagctacagggtcc

SEQ ID NO: 650177 - DNA, 33 bp, Homo sapien
agcaatgttgctagacacttttaaattaaactg

SEQ ID NO: 650178 - DNA, 33 bp, Homo sapien
agcaatgttgctagacgcttttaaattaaactg

SEQ ID NO: 650179 - DNA, 33 bp, Homo sapien
ttgttcatagttatcactcattgtcaacataat

SEQ ID NO: 650180 - DNA, 33 bp, Homo sapien
ttgttcatagttatcattcattgtcaacataat

SEQ ID NO: 650181 - DNA, 33 bp, Homo sapien
ctatacagatgtaccacgtttaccttttgtatt

SEQ ID NO: 650182 - DNA, 33 bp, Homo sapien
ctatacagatgtaccatgtttaccttttgtatt

SEQ ID NO: 650183 - DNA, 33 bp, Homo sapien
ttccaaaatgtaaagacggaacaaccataaaca

SEQ ID NO: 650184 - DNA, 33 bp, Homo sapien
ttccaaaatgtaaagatggaacaaccataaaca

SEQ ID NO: 650185 - DNA, 33 bp, Homo sapien
gacttatagaattggccatcatggaattttgcc

SEQ ID NO: 650186 - DNA, 33 bp, Homo sapien
gacttatagaattggctatcatggaattttgcc

SEQ ID NO: 650187 - DNA, 33 bp, Homo sapien
atgtgggtttatctgaacatcttcctgttgggc

SEQ ID NO: 650188 - DNA, 33 bp, Homo sapien
atgtgggtttatctgagcatcttcctgttgggc

SEQ ID NO: 650189 - DNA, 33 bp, Homo sapien
atcagtcaagtcaaagcattcttagtgatagcc

SEQ ID NO: 650190 - DNA, 33 bp, Homo sapien
atcagtcaagtcaaaggattcttagtgatagcc

SEQ ID NO: 650191 - DNA, 33 bp, Homo sapien
tgaagcctaacacaaacctgctcttagtttcat

SEQ ID NO: 650192 - DNA, 33 bp, Homo sapien
tgaagcctaacacaaatctgctcttagtttcat

SEQ ID NO: 650193 - DNA, 33 bp, Homo sapien
ccctgacacctccaccggaatagaccctggtat

SEQ ID NO: 650194 - DNA, 33 bp, Homo sapien
ccctgacacctccacctgaatagaccctggtat

SEQ ID NO: 650195 - DNA, 33 bp, Homo sapien
acctgacaacttttgacccaaagccttctgata

SEQ ID NO: 650196 - DNA, 33 bp, Homo sapien
acctgacaacttttgatccaaagccttctgata

SEQ ID NO: 650197 - DNA, 33 bp, Homo sapien
aaaacggaaaattgtgaatgtgtaatgtaccac

SEQ ID NO: 650198 - DNA, 33 bp, Homo sapien
aaaacggaaaattgtgtatgtgtaatgtaccac

SEQ ID NO: 650199 - DNA, 33 bp, Homo sapien
gctaagttttatccatgaaaagagacctgttag

SEQ ID NO: 650200 - DNA, 33 bp, Homo sapien
gctaagttttatccattaaaagagacctgttag

SEQ ID NO: 650201 - DNA, 33 bp, Homo sapien
ataacttgagaggaagactcaccaggaaagaaa

SEQ ID NO: 650202 - DNA, 33 bp, Homo sapien
ataacttgagaggaaggctcaccaggaaagaaa

SEQ ID NO: 650203 - DNA, 33 bp, Homo sapien
atttgtctaataactacgagtatcacaggacac

SEQ ID NO: 650204 - DNA, 33 bp, Homo sapien
atttgtctaataactaggagtatcacaggacac

SEQ ID NO: 650205 - DNA, 33 bp, Homo sapien
tttctgtgcccttacactgatacctgcacatct

SEQ ID NO: 650206 - DNA, 33 bp, Homo sapien
tttctgtgcccttacattgatacctgcacatct

SEQ ID NO: 650207 - DNA, 33 bp, Homo sapien
ctgcttcagagaggaaactcacacttggtccca

SEQ ID NO: 650208 - DNA, 33 bp, Homo sapien
ctgcttcagagaggaagctcacacttggtccca

SEQ ID NO: 650209 - DNA, 33 bp, Homo sapien
tatcattatgcagtcaatagaattgctaaaata

SEQ ID NO: 650210 - DNA, 33 bp, Homo sapien
tatcattatgcagtcactagaattgctaaaata

SEQ ID NO: 650211 - DNA, 33 bp, Homo sapien
aaaaatttcagctttcaacatgagtataatatt

SEQ ID NO: 650212 - DNA, 33 bp, Homo sapien
aaaaatttcagctttcgacatgagtataatatt

SEQ ID NO: 650213 - DNA, 33 bp, Homo sapien
gaagagattctagtggacacctgaaggtcaaaa

SEQ ID NO: 650214 - DNA, 33 bp, Homo sapien
gaagagattctagtgggcacctgaaggtcaaaa

SEQ ID NO: 650215 - DNA, 33 bp, Homo sapien
aaaatgcaatatatcacgttcctgcagccaggg

SEQ ID NO: 650216 - DNA, 33 bp, Homo sapien
aaaatgcaatatatcatgttcctgcagccaggg

SEQ ID NO: 650217 - DNA, 33 bp, Homo sapien
tcatggttaatgtttaaatcttccattgatcaa

SEQ ID NO: 650218 - DNA, 33 bp, Homo sapien
tcatggttaatgtttatatcttccattgatcaa

SEQ ID NO: 650219 - DNA, 33 bp, Homo sapien
tatttgttgaatggtacggagattttatgactt

SEQ ID NO: 650220 - DNA, 33 bp, Homo sapien
tatttgttgaatggtatggagattttatgactt

SEQ ID NO: 650221 - DNA, 33 bp, Homo sapien
agtttctatattttcacggctttgattcagaaa

SEQ ID NO: 650222 - DNA, 33 bp, Homo sapien
agtttctatattttcatggctttgattcagaaa

SEQ ID NO: 650223 - DNA, 33 bp, Homo sapien
aacaaaaaatcttaaaagcgtcatttgcattgc

SEQ ID NO: 650224 - DNA, 33 bp, Homo sapien
aacaaaaaatcttaaaggcgtcatttgcattgc

SEQ ID NO: 650225 - DNA, 33 bp, Homo sapien
cttccagctggtgatacctgtggaagttatctt

SEQ ID NO: 650226 - DNA, 33 bp, Homo sapien
cttccagctggtgatatctgtggaagttatctt

SEQ ID NO: 650227 - DNA, 33 bp, Homo sapien
gatatctggggggaaactccattatgcaaatgt

SEQ ID NO: 650228 - DNA, 33 bp, Homo sapien
gatatctggggggaaattccattatgcaaatgt

SEQ ID NO: 650229 - DNA, 33 bp, Homo sapien
tatttatctctgtatcaatatacctttacatct

SEQ ID NO: 650230 - DNA, 33 bp, Homo sapien
tatttatctctgtatctatatacctttacatct

SEQ ID NO: 650231 - DNA, 33 bp, Homo sapien
catagaaagttaagaacctctgtactgacttta

SEQ ID NO: 650232 - DNA, 33 bp, Homo sapien
catagaaagttaagaatctctgtactgacttta

SEQ ID NO: 650233 - DNA, 33 bp, Homo sapien
agaatgaataacagacaaaggagagaatccata

SEQ ID NO: 650234 - DNA, 33 bp, Homo sapien
agaatgaataacagacgaaggagagaatccata

SEQ ID NO: 650235 - DNA, 33 bp, Homo sapien
aattcaattcagtttcaagaattatatatgtgt

SEQ ID NO: 650236 - DNA, 33 bp, Homo sapien
aattcaattcagtttccagaattatatatgtgt

SEQ ID NO: 650237 - DNA, 33 bp, Homo sapien
agtatgaaacatagtcaagcaacaattttctac

SEQ ID NO: 650238 - DNA, 33 bp, Homo sapien
agtatgaaacatagtcgagcaacaattttctac

SEQ ID NO: 650239 - DNA, 33 bp, Homo sapien
ccaaagcacctgagaaaagttattttagcttgc

SEQ ID NO: 650240 - DNA, 33 bp, Homo sapien
ccaaagcacctgagaagagttattttagcttgc

SEQ ID NO: 650241 - DNA, 33 bp, Homo sapien
catttcagctgacttaaactcttagactttaga

SEQ ID NO: 650242 - DNA, 33 bp, Homo sapien
catttcagctgacttagactcttagactttaga

SEQ ID NO: 650243 - DNA, 33 bp, Homo sapien
gaatccccaggcgaaaactataacaccacctgg

SEQ ID NO: 650244 - DNA, 33 bp, Homo sapien
gaatccccaggcgaaagctataacaccacctgg

SEQ ID NO: 650245 - DNA, 33 bp, Homo sapien
atgggcaccagagaataagtaaggcagagaaga

SEQ ID NO: 650246 - DNA, 33 bp, Homo sapien
atgggcaccagagaatgagtaaggcagagaaga

SEQ ID NO: 650247 - DNA, 33 bp, Homo sapien
cagagagcccatgaccagagtgagaacttcctc

SEQ ID NO: 650248 - DNA, 33 bp, Homo sapien
cagagagcccatgaccggagtgagaacttcctc

SEQ ID NO: 650249 - DNA, 33 bp, Homo sapien
ttgtggcagaccagtacagatttactgccggga

SEQ ID NO: 650250 - DNA, 33 bp, Homo sapien
ttgtggcagaccagtatagatttactgccggga

SEQ ID NO: 650251 - DNA, 33 bp, Homo sapien
tactgatggcaaacaacatctcaattatctgtt

SEQ ID NO: 650252 - DNA, 33 bp, Homo sapien
tactgatggcaaacaatatctcaattatctgtt

SEQ ID NO: 650253 - DNA, 33 bp, Homo sapien
gctatgaagccctgaaagataacctaggaaata

SEQ ID NO: 650254 - DNA, 33 bp, Homo sapien
gctatgaagccctgaaggataacctaggaaata

SEQ ID NO: 650255 - DNA, 33 bp, Homo sapien
tgggtcatgcccaggacagtttaatttcctttt

SEQ ID NO: 650256 - DNA, 33 bp, Homo sapien
tgggtcatgcccaggatagtttaatttcctttt

SEQ ID NO: 650257 - DNA, 33 bp, Homo sapien
gtgatgagagaagatacaaacagataatttgtc

SEQ ID NO: 650258 - DNA, 33 bp, Homo sapien
gtgatgagagaagatataaacagataatttgtc

SEQ ID NO: 650259 - DNA, 33 bp, Homo sapien
ctaaatcacaaagatacactatagcaaaaaaca

SEQ ID NO: 650260 - DNA, 33 bp, Homo sapien
ctaaatcacaaagatatactatagcaaaaaaca

SEQ ID NO: 650261 - DNA, 33 bp, Homo sapien
atcatgttctctgaaagtccacttacaatcagt

SEQ ID NO: 650262 - DNA, 33 bp, Homo sapien
atcatgttctctgaaattccacttacaatcagt

SEQ ID NO: 650263 - DNA, 33 bp, Homo sapien
tgatttagaattgtgacgctttggcatactgaa

SEQ ID NO: 650264 - DNA, 33 bp, Homo sapien
tgatttagaattgtgatgctttggcatactgaa

SEQ ID NO: 650265 - DNA, 33 bp, Homo sapien
ttccgcaataatttaggatgctagttaacattt

SEQ ID NO: 650266 - DNA, 33 bp, Homo sapien
ttccgcaataatttagtatgctagttaacattt

SEQ ID NO: 650267 - DNA, 33 bp, Homo sapien
gaatagtcctttaatacgtatccctcatggaca

SEQ ID NO: 650268 - DNA, 33 bp, Homo sapien
gaatagtcctttaatatgtatccctcatggaca

SEQ ID NO: 650269 - DNA, 33 bp, Homo sapien
ttcaagaaggttgaaaaatgaatgaaacactgg

SEQ ID NO: 650270 - DNA, 33 bp, Homo sapien
ttcaagaaggttgaaagatgaatgaaacactgg

SEQ ID NO: 650271 - DNA, 33 bp, Homo sapien
agagatgtaagttaaacggcatggtcatgtccc

SEQ ID NO: 650272 - DNA, 33 bp, Homo sapien
agagatgtaagttaaatggcatggtcatgtccc

SEQ ID NO: 650273 - DNA, 33 bp, Homo sapien
ttggcaactaatccacagtcatataggcctctt

SEQ ID NO: 650274 - DNA, 33 bp, Homo sapien
ttggcaactaatccacggtcatataggcctctt

SEQ ID NO: 650275 - DNA, 33 bp, Homo sapien
gcttggaaattgtttcaacatcagatcttacag

SEQ ID NO: 650276 - DNA, 33 bp, Homo sapien
gcttggaaattgtttcgacatcagatcttacag

SEQ ID NO: 650277 - DNA, 33 bp, Homo sapien
gagaaagtagtttctcaaaggattaagtgttgg

SEQ ID NO: 650278 - DNA, 33 bp, Homo sapien
gagaaagtagtttctcgaaggattaagtgttgg

SEQ ID NO: 650279 - DNA, 33 bp, Homo sapien
gtggtcagtggtaaaaatttgtcagcaactttt

SEQ ID NO: 650280 - DNA, 33 bp, Homo sapien
gtggtcagtggtaaaactttgtcagcaactttt

SEQ ID NO: 650281 - DNA, 33 bp, Homo sapien
ggccttactgactctgaaaagattactccttgc

SEQ ID NO: 650282 - DNA, 33 bp, Homo sapien
ggccttactgactctggaaagattactccttgc

SEQ ID NO: 650283 - DNA, 33 bp, Homo sapien
gtgagaatagaagtcaataagagaaggatatgg

SEQ ID NO: 650284 - DNA, 33 bp, Homo sapien
gtgagaatagaagtcagtaagagaaggatatgg

SEQ ID NO: 650285 - DNA, 33 bp, Homo sapien
gggaatactactgagacgataatttttatatgt

SEQ ID NO: 650286 - DNA, 33 bp, Homo sapien
gggaatactactgagatgataatttttatatgt

SEQ ID NO: 650287 - DNA, 33 bp, Homo sapien
ttctgggattccaggggagagttcaatcctttc

SEQ ID NO: 650288 - DNA, 33 bp, Homo sapien
ttctgggattccagggtagagttcaatcctttc

SEQ ID NO: 650289 - DNA, 33 bp, Homo sapien
tggctctcttcttccaaccccactaagcagtgc

SEQ ID NO: 650290 - DNA, 33 bp, Homo sapien
tggctctcttcttccagccccactaagcagtgc

SEQ ID NO: 650291 - DNA, 33 bp, Homo sapien
caacaatacaatgtaactctgctggatctctta

SEQ ID NO: 650292 - DNA, 33 bp, Homo sapien
caacaatacaatgtaattctgctggatctctta

SEQ ID NO: 650293 - DNA, 33 bp, Homo sapien
tactttagttaagcaaagtatgacaggcaaaat

SEQ ID NO: 650294 - DNA, 33 bp, Homo sapien
tactttagttaagcaaggtatgacaggcaaaat

SEQ ID NO: 650295 - DNA, 33 bp, Homo sapien
ctttagattggactaccaacctttagaagtctt

SEQ ID NO: 650296 - DNA, 33 bp, Homo sapien
ctttagattggactactaacctttagaagtctt

SEQ ID NO: 650297 - DNA, 33 bp, Homo sapien
aatgtaggattttgcaatgaattaaataagtgt

SEQ ID NO: 650298 - DNA, 33 bp, Homo sapien
aatgtaggattttgcagtgaattaaataagtgt

SEQ ID NO: 650299 - DNA, 33 bp, Homo sapien
tgtttgtttgagaatacggtccctcttttggtc

SEQ ID NO: 650300 - DNA, 33 bp, Homo sapien
tgtttgtttgagaatatggtccctcttttggtc

SEQ ID NO: 650301 - DNA, 33 bp, Homo sapien
tttgcctggaattctgcaaggaatagctggtag

SEQ ID NO: 650302 - DNA, 33 bp, Homo sapien
tttgcctggaattctggaaggaatagctggtag

SEQ ID NO: 650303 - DNA, 33 bp, Homo sapien
tgtgaacttctgaagacggaaaaatgactctat

SEQ ID NO: 650304 - DNA, 33 bp, Homo sapien
tgtgaacttctgaagatggaaaaatgactctat

SEQ ID NO: 650305 - DNA, 33 bp, Homo sapien
aatgccccaggtaggaagaagcaggatagtgtg

SEQ ID NO: 650306 - DNA, 33 bp, Homo sapien
aatgccccaggtaggatgaagcaggatagtgtg

SEQ ID NO: 650307 - DNA, 33 bp, Homo sapien
ttcataatcttataaaattccaggaagctgaat

SEQ ID NO: 650308 - DNA, 33 bp, Homo sapien
ttcataatcttataaagttccaggaagctgaat

SEQ ID NO: 650309 - DNA, 33 bp, Homo sapien
ctattcaggagaaaaaatacaatggttagttat

SEQ ID NO: 650310 - DNA, 33 bp, Homo sapien
ctattcaggagaaaaagtacaatggttagttat

SEQ ID NO: 650311 - DNA, 33 bp, Homo sapien
actgtccaggtttatcacttgaatgcctgttta

SEQ ID NO: 650312 - DNA, 33 bp, Homo sapien
actgtccaggtttatcgcttgaatgcctgttta

SEQ ID NO: 650313 - DNA, 33 bp, Homo sapien
gattgtagattttgcaaacttcagaaacttgct

SEQ ID NO: 650314 - DNA, 33 bp, Homo sapien
gattgtagattttgcatacttcagaaacttgct

SEQ ID NO: 650315 - DNA, 33 bp, Homo sapien
tcctcaatgttatacacggagtcagaaaagtag

SEQ ID NO: 650316 - DNA, 33 bp, Homo sapien
tcctcaatgttatacatggagtcagaaaagtag

SEQ ID NO: 650317 - DNA, 33 bp, Homo sapien
atgaattgtattgtaaaagaagtgcatacaagg

SEQ ID NO: 650318 - DNA, 33 bp, Homo sapien
atgaattgtattgtaacagaagtgcatacaagg

SEQ ID NO: 650319 - DNA, 33 bp, Homo sapien
accatgtgtgaatgaaccagcttattgaatact

SEQ ID NO: 650320 - DNA, 33 bp, Homo sapien
accatgtgtgaatgaatcagcttattgaatact

SEQ ID NO: 650321 - DNA, 33 bp, Homo sapien
gtcataaaaggactaaatcaagattcaaagatt

SEQ ID NO: 650322 - DNA, 33 bp, Homo sapien
gtcataaaaggactaagtcaagattcaaagatt

SEQ ID NO: 650323 - DNA, 33 bp, Homo sapien
gtcttctatttaagtacgtaactgcttttaaga

SEQ ID NO: 650324 - DNA, 33 bp, Homo sapien
gtcttctatttaagtatgtaactgcttttaaga

SEQ ID NO: 650325 - DNA, 33 bp, Homo sapien
taaaggggccgatcaaaaagcaacttgtaaagt

SEQ ID NO: 650326 - DNA, 33 bp, Homo sapien
taaaggggccgatcaacaagcaacttgtaaagt

SEQ ID NO: 650327 - DNA, 33 bp, Homo sapien
gcattaggtctgtgtacaaatattttatggcag

SEQ ID NO: 650328 - DNA, 33 bp, Homo sapien
gcattaggtctgtgtagaaatattttatggcag

SEQ ID NO: 650329 - DNA, 33 bp, Homo sapien
gaaattaaaatctttgaaatcaatgcatcaagg

SEQ ID NO: 650330 - DNA, 33 bp, Homo sapien
gaaattaaaatctttggaatcaatgcatcaagg

SEQ ID NO: 650331 - DNA, 33 bp, Homo sapien
ccagtgaaaatcattaactgcattcaaactact

SEQ ID NO: 650332 - DNA, 33 bp, Homo sapien
ccagtgaaaatcattatctgcattcaaactact

SEQ ID NO: 650333 - DNA, 33 bp, Homo sapien
tttcattgtgtgcataacattgactttctattt

SEQ ID NO: 650334 - DNA, 33 bp, Homo sapien
tttcattgtgtgcatagcattgactttctattt

SEQ ID NO: 650335 - DNA, 33 bp, Homo sapien
cacggtgtaaaatgtaaatgatggaaattaact

SEQ ID NO: 650336 - DNA, 33 bp, Homo sapien
cacggtgtaaaatgtagatgatggaaattaact

SEQ ID NO: 650337 - DNA, 33 bp, Homo sapien
gcattgcaaactaaaaacatagtgcaatcatta

SEQ ID NO: 650338 - DNA, 33 bp, Homo sapien
gcattgcaaactaaaagcatagtgcaatcatta

SEQ ID NO: 650339 - DNA, 33 bp, Homo sapien
gtgatacttggaactacagcaagacaatgttaa

SEQ ID NO: 650340 - DNA, 33 bp, Homo sapien
gtgatacttggaactatagcaagacaatgttaa

SEQ ID NO: 650341 - DNA, 33 bp, Homo sapien
tggctttacaggctgacagttctacagatctgg

SEQ ID NO: 650342 - DNA, 33 bp, Homo sapien
tggctttacaggctgatagttctacagatctgg

SEQ ID NO: 650343 - DNA, 33 bp, Homo sapien
aatattggtgccagaagaatttgttgtatacgt

SEQ ID NO: 650344 - DNA, 33 bp, Homo sapien
aatattggtgccagaataatttgttgtatacgt

SEQ ID NO: 650345 - DNA, 33 bp, Homo sapien
accagtctttccaaaaccacagtggaagtttaa

SEQ ID NO: 650346 - DNA, 33 bp, Homo sapien
accagtctttccaaaatcacagtggaagtttaa

SEQ ID NO: 650347 - DNA, 33 bp, Homo sapien
gaattatacaagaataaaatctaatgagcgtca

SEQ ID NO: 650348 - DNA, 33 bp, Homo sapien
gaattatacaagaatagaatctaatgagcgtca

SEQ ID NO: 650349 - DNA, 33 bp, Homo sapien
actaatgtgtgaataagggaaagtagactgcat

SEQ ID NO: 650350 - DNA, 33 bp, Homo sapien
actaatgtgtgaataatggaaagtagactgcat

SEQ ID NO: 650351 - DNA, 33 bp, Homo sapien
tgttttaggaatatacaatttgctgtctcttca

SEQ ID NO: 650352 - DNA, 33 bp, Homo sapien
tgttttaggaatatactatttgctgtctcttca

SEQ ID NO: 650353 - DNA, 33 bp, Homo sapien
tacgttattcttatacactttatgctataaaca

SEQ ID NO: 650354 - DNA, 33 bp, Homo sapien
tacgttattcttatacgctttatgctataaaca

SEQ ID NO: 650355 - DNA, 33 bp, Homo sapien
ggcaagaccatgtgagcatgaatttaccgagtt

SEQ ID NO: 650356 - DNA, 33 bp, Homo sapien
ggcaagaccatgtgagtatgaatttaccgagtt

SEQ ID NO: 650357 - DNA, 33 bp, Homo sapien
cattgtacaacatttcacaaattaaataacttg

SEQ ID NO: 650358 - DNA, 33 bp, Homo sapien
cattgtacaacatttcgcaaattaaataacttg

SEQ ID NO: 650359 - DNA, 33 bp, Homo sapien
aacctatcaaatttcaagtagtagactgttctc

SEQ ID NO: 650360 - DNA, 33 bp, Homo sapien
aacctatcaaatttcatgtagtagactgttctc

SEQ ID NO: 650361 - DNA, 33 bp, Homo sapien
tttaagaaacctgagcaaaactgtgaagccttt

SEQ ID NO: 650362 - DNA, 33 bp, Homo sapien
tttaagaaacctgagctaaactgtgaagccttt

SEQ ID NO: 650363 - DNA, 33 bp, Homo sapien
ttttcttatgtactgacgtctgtatctatggta

SEQ ID NO: 650364 - DNA, 33 bp, Homo sapien
ttttcttatgtactgatgtctgtatctatggta

SEQ ID NO: 650365 - DNA, 33 bp, Homo sapien
ctctcaggtgtatcaaatatgtttgaaaatata

SEQ ID NO: 650366 - DNA, 33 bp, Homo sapien
ctctcaggtgtatcaactatgtttgaaaatata

SEQ ID NO: 650367 - DNA, 33 bp, Homo sapien
aaccataacaatgtcaatcagtttagccttaca

SEQ ID NO: 650368 - DNA, 33 bp, Homo sapien
aaccataacaatgtcagtcagtttagccttaca

SEQ ID NO: 650369 - DNA, 33 bp, Homo sapien
catttccttgatttaactggtcattttcagaag

SEQ ID NO: 650370 - DNA, 33 bp, Homo sapien
catttccttgatttaattggtcattttcagaag

SEQ ID NO: 650371 - DNA, 33 bp, Homo sapien
tcacatcacagatataagattggtattagtatt

SEQ ID NO: 650372 - DNA, 33 bp, Homo sapien
tcacatcacagatataggattggtattagtatt

SEQ ID NO: 650373 - DNA, 33 bp, Homo sapien
tcaatcgcctctagacactgttattcttgattg

SEQ ID NO: 650374 - DNA, 33 bp, Homo sapien
tcaatcgcctctagacgctgttattcttgattg

SEQ ID NO: 650375 - DNA, 33 bp, Homo sapien
ttttatctataatccacgtttacttgcacacat

SEQ ID NO: 650376 - DNA, 33 bp, Homo sapien
ttttatctataatccatgtttacttgcacacat

SEQ ID NO: 650377 - DNA, 33 bp, Homo sapien
ttaaacagctcatgacagtatattacgtatatg

SEQ ID NO: 650378 - DNA, 33 bp, Homo sapien
ttaaacagctcatgacggtatattacgtatatg

SEQ ID NO: 650379 - DNA, 33 bp, Homo sapien
taaaagactaatacaaatgcctataaatcctac

SEQ ID NO: 650380 - DNA, 33 bp, Homo sapien
taaaagactaatacaactgcctataaatcctac

SEQ ID NO: 650381 - DNA, 33 bp, Homo sapien
gggtagttgatactgccgacctcccgagtacac

SEQ ID NO: 650382 - DNA, 33 bp, Homo sapien
gggtagttgatactgctgacctcccgagtacac

SEQ ID NO: 650383 - DNA, 33 bp, Homo sapien
tattgctattttgtgcagaagtttggatggtgt

SEQ ID NO: 650384 - DNA, 33 bp, Homo sapien
tattgctattttgtgcggaagtttggatggtgt

SEQ ID NO: 650385 - DNA, 33 bp, Homo sapien
tccttaattaaaggacacctaacacaatacagg

SEQ ID NO: 650386 - DNA, 33 bp, Homo sapien
tccttaattaaaggacgcctaacacaatacagg

SEQ ID NO: 650387 - DNA, 33 bp, Homo sapien
attcccatggttttccagaaagacaaatgaacc

SEQ ID NO: 650388 - DNA, 33 bp, Homo sapien
attcccatggttttccggaaagacaaatgaacc

SEQ ID NO: 650389 - DNA, 33 bp, Homo sapien
acctctatttagtcacaaatttctgcaatatca

SEQ ID NO: 650390 - DNA, 33 bp, Homo sapien
acctctatttagtcacgaatttctgcaatatca

SEQ ID NO: 650391 - DNA, 33 bp, Homo sapien
tttattacttcccacaatataatggttccctga

SEQ ID NO: 650392 - DNA, 33 bp, Homo sapien
tttattacttcccacagtataatggttccctga

SEQ ID NO: 650393 - DNA, 33 bp, Homo sapien
ttgatctgttgtttacaaattcgacagtaagaa

SEQ ID NO: 650394 - DNA, 33 bp, Homo sapien
ttgatctgttgtttactaattcgacagtaagaa

SEQ ID NO: 650395 - DNA, 33 bp, Homo sapien
gtcatatttttttgaggatgtattctatggata

SEQ ID NO: 650396 - DNA, 33 bp, Homo sapien
gtcatatttttttgagtatgtattctatggata

SEQ ID NO: 650397 - DNA, 33 bp, Homo sapien
gtgtcgattagatataaatgaagtaaagcttct

SEQ ID NO: 650398 - DNA, 33 bp, Homo sapien
gtgtcgattagatatacatgaagtaaagcttct

SEQ ID NO: 650399 - DNA, 33 bp, Homo sapien
ttgttatatgttttcaacgtgaatcttgtaatt

SEQ ID NO: 650400 - DNA, 33 bp, Homo sapien
ttgttatatgttttcaccgtgaatcttgtaatt

SEQ ID NO: 650401 - DNA, 33 bp, Homo sapien
aaatatgcacaacaacaaaaatgtctaggtttg

SEQ ID NO: 650402 - DNA, 33 bp, Homo sapien
aaatatgcacaacaacgaaaatgtctaggtttg

SEQ ID NO: 650403 - DNA, 33 bp, Homo sapien
agaaaagatgagaggcacaatgtaaagtaatgg

SEQ ID NO: 650404 - DNA, 33 bp, Homo sapien
agaaaagatgagaggcgcaatgtaaagtaatgg

SEQ ID NO: 650405 - DNA, 33 bp, Homo sapien
tgattaatgtgttaaaagctctactataaaagg

SEQ ID NO: 650406 - DNA, 33 bp, Homo sapien
tgattaatgtgttaaacgctctactataaaagg

SEQ ID NO: 650407 - DNA, 33 bp, Homo sapien
attaagttgttttacaaagtgatgaagagaggt

SEQ ID NO: 650408 - DNA, 33 bp, Homo sapien
attaagttgttttacatagtgatgaagagaggt

SEQ ID NO: 650409 - DNA, 33 bp, Homo sapien
aaactggtcatgctggaagaatttacaccacag

SEQ ID NO: 650410 - DNA, 33 bp, Homo sapien
aaactggtcatgctgggagaatttacaccacag

SEQ ID NO: 650411 - DNA, 33 bp, Homo sapien
accacctctttcaaagacctatcttcaagtaca

SEQ ID NO: 650412 - DNA, 33 bp, Homo sapien
accacctctttcaaaggcctatcttcaagtaca

SEQ ID NO: 650413 - DNA, 33 bp, Homo sapien
caaatcctccctcaagcccatcctcaaatacca

SEQ ID NO: 650414 - DNA, 33 bp, Homo sapien
caaatcctccctcaagtccatcctcaaatacca

SEQ ID NO: 650415 - DNA, 33 bp, Homo sapien
ttaaagctatacgacacgatgagatcatctgga

SEQ ID NO: 650416 - DNA, 33 bp, Homo sapien
ttaaagctatacgacaggatgagatcatctgga

SEQ ID NO: 650417 - DNA, 33 bp, Homo sapien
cagagacttcaaaatagtaagaacacaattagc

SEQ ID NO: 650418 - DNA, 33 bp, Homo sapien
cagagacttcaaaatattaagaacacaattagc

SEQ ID NO: 650419 - DNA, 33 bp, Homo sapien
aataatgttatttttcgaaggcaagtatattta

SEQ ID NO: 650420 - DNA, 33 bp, Homo sapien
aataatgttatttttctaaggcaagtatattta

SEQ ID NO: 650421 - DNA, 33 bp, Homo sapien
gtgcctggcctctacaaagtattttacaaaaag

SEQ ID NO: 650422 - DNA, 33 bp, Homo sapien
gtgcctggcctctacatagtattttacaaaaag

SEQ ID NO: 650423 - DNA, 33 bp, Homo sapien
gacacacacttcaagacagcggttcttaacctg

SEQ ID NO: 650424 - DNA, 33 bp, Homo sapien
gacacacacttcaagatagcggttcttaacctg

SEQ ID NO: 650425 - DNA, 33 bp, Homo sapien
aaggctcggtgcaaaaatagatttcttaagata

SEQ ID NO: 650426 - DNA, 33 bp, Homo sapien
aaggctcggtgcaaaagtagatttcttaagata

SEQ ID NO: 650427 - DNA, 33 bp, Homo sapien
ttcactactcactctgcaacagacactggtgaa

SEQ ID NO: 650428 - DNA, 33 bp, Homo sapien
ttcactactcactctggaacagacactggtgaa

SEQ ID NO: 650429 - DNA, 33 bp, Homo sapien
ttcagctgatacaatcactgaaaattctgatag

SEQ ID NO: 650430 - DNA, 33 bp, Homo sapien
ttcagctgatacaatccctgaaaattctgatag

SEQ ID NO: 650431 - DNA, 33 bp, Homo sapien
acaatttatgacatagacacacaaaggcctcag

SEQ ID NO: 650432 - DNA, 33 bp, Homo sapien
acaatttatgacatagtcacacaaaggcctcag

SEQ ID NO: 650433 - DNA, 33 bp, Homo sapien
attgggtaggcaactaatagtatcaacaacaga

SEQ ID NO: 650434 - DNA, 33 bp, Homo sapien
attgggtaggcaactagtagtatcaacaacaga

SEQ ID NO: 650435 - DNA, 33 bp, Homo sapien
aattataaggtctcacaattactaggccataag

SEQ ID NO: 650436 - DNA, 33 bp, Homo sapien
aattataaggtctcacgattactaggccataag

SEQ ID NO: 650437 - DNA, 33 bp, Homo sapien
agtgagaaatgcaatacgtgtggtttatagctt

SEQ ID NO: 650438 - DNA, 33 bp, Homo sapien
agtgagaaatgcaatatgtgtggtttatagctt

SEQ ID NO: 650439 - DNA, 33 bp, Homo sapien
caacagccctatctccaataccaattctgtcca

SEQ ID NO: 650440 - DNA, 33 bp, Homo sapien
caacagccctatctcccataccaattctgtcca

SEQ ID NO: 650441 - DNA, 33 bp, Homo sapien
aagggcacattgatgaatacacactacactaga

SEQ ID NO: 650442 - DNA, 33 bp, Homo sapien
aagggcacattgatgagtacacactacactaga

SEQ ID NO: 650443 - DNA, 33 bp, Homo sapien
ttaatatctgggtgacgaaacaatccgcctaaa

SEQ ID NO: 650444 - DNA, 33 bp, Homo sapien
ttaatatctgggtgactaaacaatccgcctaaa

SEQ ID NO: 650445 - DNA, 33 bp, Homo sapien
gatatactgtaaacaactgatttgaccgtaatg

SEQ ID NO: 650446 - DNA, 33 bp, Homo sapien
gatatactgtaaacaattgatttgaccgtaatg

SEQ ID NO: 650447 - DNA, 33 bp, Homo sapien
gaatgaaaggagacaacgtacggccttatagat

SEQ ID NO: 650448 - DNA, 33 bp, Homo sapien
gaatgaaaggagacaatgtacggccttatagat

SEQ ID NO: 650449 - DNA, 33 bp, Homo sapien
ctgtaatctcaccacaacaagttataattatat

SEQ ID NO: 650450 - DNA, 33 bp, Homo sapien
ctgtaatctcaccacaccaagttataattatat

SEQ ID NO: 650451 - DNA, 33 bp, Homo sapien
gctatgctccttatccactagctgggatattca

SEQ ID NO: 650452 - DNA, 33 bp, Homo sapien
gctatgctccttatccgctagctgggatattca

SEQ ID NO: 650453 - DNA, 33 bp, Homo sapien
cctaattacaacaatacgttcagagcttgtaag

SEQ ID NO: 650454 - DNA, 33 bp, Homo sapien
cctaattacaacaatatgttcagagcttgtaag

SEQ ID NO: 650455 - DNA, 33 bp, Homo sapien
agtatctgaaaatgcaagacaaatgtgaaacac

SEQ ID NO: 650456 - DNA, 33 bp, Homo sapien
agtatctgaaaatgcatgacaaatgtgaaacac

SEQ ID NO: 650457 - DNA, 33 bp, Homo sapien
aaaagaatccaacacaataactaatcaggaaag

SEQ ID NO: 650458 - DNA, 33 bp, Homo sapien
aaaagaatccaacacagtaactaatcaggaaag

SEQ ID NO: 650459 - DNA, 33 bp, Homo sapien
ggggaaagctattttgcactctcttactgtctc

SEQ ID NO: 650460 - DNA, 33 bp, Homo sapien
ggggaaagctattttgtactctcttactgtctc

SEQ ID NO: 650461 - DNA, 33 bp, Homo sapien
ctagtaatattcagcactgacttaagtggctta

SEQ ID NO: 650462 - DNA, 33 bp, Homo sapien
ctagtaatattcagcattgacttaagtggctta

SEQ ID NO: 650463 - DNA, 33 bp, Homo sapien
tagaatttgggtaaaactgccagtgaatatgtt

SEQ ID NO: 650464 - DNA, 33 bp, Homo sapien
tagaatttgggtaaaattgccagtgaatatgtt

SEQ ID NO: 650465 - DNA, 33 bp, Homo sapien
gggtatgttcatatcacagtgtacaaagatgat

SEQ ID NO: 650466 - DNA, 33 bp, Homo sapien
gggtatgttcatatcatagtgtacaaagatgat

SEQ ID NO: 650467 - DNA, 33 bp, Homo sapien
ttactcagcatcaaaactaatacagcattgaac

SEQ ID NO: 650468 - DNA, 33 bp, Homo sapien
ttactcagcatcaaaattaatacagcattgaac

SEQ ID NO: 650469 - DNA, 33 bp, Homo sapien
cattcctctaatgcaaatatggtctcagcctct

SEQ ID NO: 650470 - DNA, 33 bp, Homo sapien
cattcctctaatgcaagtatggtctcagcctct

SEQ ID NO: 650471 - DNA, 33 bp, Homo sapien
acacttacccattccactcagttgaattgccat

SEQ ID NO: 650472 - DNA, 33 bp, Homo sapien
acacttacccattccattcagttgaattgccat

SEQ ID NO: 650473 - DNA, 33 bp, Homo sapien
tttggcagaaaataagccattgaaggtttatgt

SEQ ID NO: 650474 - DNA, 33 bp, Homo sapien
tttggcagaaaataaggcattgaaggtttatgt

SEQ ID NO: 650475 - DNA, 33 bp, Homo sapien
aatgttttgagtatgtcaagtagtcaatattat

SEQ ID NO: 650476 - DNA, 33 bp, Homo sapien
aatgttttgagtatgtgaagtagtcaatattat

SEQ ID NO: 650477 - DNA, 33 bp, Homo sapien
ctttagcaaagaaaaccggtgctattgtaactc

SEQ ID NO: 650478 - DNA, 33 bp, Homo sapien
ctttagcaaagaaaactggtgctattgtaactc

SEQ ID NO: 650479 - DNA, 33 bp, Homo sapien
ttccttgatagcttaaatcctgaattctgttct

SEQ ID NO: 650480 - DNA, 33 bp, Homo sapien
ttccttgatagcttaagtcctgaattctgttct

SEQ ID NO: 650481 - DNA, 33 bp, Homo sapien
agtggttcaagttgcaaaattcaaagtctatct

SEQ ID NO: 650482 - DNA, 33 bp, Homo sapien
agtggttcaagttgcagaattcaaagtctatct

SEQ ID NO: 650483 - DNA, 33 bp, Homo sapien
ctgttcaggaatataccattggaaacaacaata

SEQ ID NO: 650484 - DNA, 33 bp, Homo sapien
ctgttcaggaatatactattggaaacaacaata

SEQ ID NO: 650485 - DNA, 33 bp, Homo sapien
taattgatatgtggtaagtatgaaacacatact

SEQ ID NO: 650486 - DNA, 33 bp, Homo sapien
taattgatatgtggtaggtatgaaacacatact

SEQ ID NO: 650487 - DNA, 33 bp, Homo sapien
cttttactctctcttacgatcccccaaatttac

SEQ ID NO: 650488 - DNA, 33 bp, Homo sapien
cttttactctctcttatgatcccccaaatttac

SEQ ID NO: 650489 - DNA, 33 bp, Homo sapien
tgattattagttatcgcccagtagaaatttgaa

SEQ ID NO: 650490 - DNA, 33 bp, Homo sapien
tgattattagttatcgtccagtagaaatttgaa

SEQ ID NO: 650491 - DNA, 33 bp, Homo sapien
aaactgactctcgaaaagtttaaaagtgtgcat

SEQ ID NO: 650492 - DNA, 33 bp, Homo sapien
aaactgactctcgaaaggtttaaaagtgtgcat

SEQ ID NO: 650493 - DNA, 33 bp, Homo sapien
catctaagaaaaatcaaatttctaatgtatgat

SEQ ID NO: 650494 - DNA, 33 bp, Homo sapien
catctaagaaaaatcagatttctaatgtatgat

SEQ ID NO: 650495 - DNA, 33 bp, Homo sapien
tcataaggaaaggaagcaaatgaatatcagagg

SEQ ID NO: 650496 - DNA, 33 bp, Homo sapien
tcataaggaaaggaaggaaatgaatatcagagg

SEQ ID NO: 650497 - DNA, 33 bp, Homo sapien
ttataggctaaacacaaagtagtggacagggaa

SEQ ID NO: 650498 - DNA, 33 bp, Homo sapien
ttataggctaaacacagagtagtggacagggaa

SEQ ID NO: 650499 - DNA, 33 bp, Homo sapien
tatgttcctcaagttcaaggtatccataaggta

SEQ ID NO: 650500 - DNA, 33 bp, Homo sapien
tatgttcctcaagttccaggtatccataaggta

SEQ ID NO: 650501 - DNA, 33 bp, Homo sapien
tgtagtgaaaggcaccccttagtgaatagcttt

SEQ ID NO: 650502 - DNA, 33 bp, Homo sapien
tgtagtgaaaggcacctcttagtgaatagcttt

SEQ ID NO: 650503 - DNA, 33 bp, Homo sapien
aaaactcagtagaaaaatcttgacccgccatcc

SEQ ID NO: 650504 - DNA, 33 bp, Homo sapien
aaaactcagtagaaaagtcttgacccgccatcc

SEQ ID NO: 650505 - DNA, 33 bp, Homo sapien
catcaaggcaaagagaccttccgtcttcatctt

SEQ ID NO: 650506 - DNA, 33 bp, Homo sapien
catcaaggcaaagagatcttccgtcttcatctt

SEQ ID NO: 650507 - DNA, 33 bp, Homo sapien
gtttgtgtttaggggaagagtgtggatagttaa

SEQ ID NO: 650508 - DNA, 33 bp, Homo sapien
gtttgtgtttaggggaggagtgtggatagttaa

SEQ ID NO: 650509 - DNA, 33 bp, Homo sapien
ttttgcaaatgaagtacggataactaggttaag

SEQ ID NO: 650510 - DNA, 33 bp, Homo sapien
ttttgcaaatgaagtatggataactaggttaag

SEQ ID NO: 650511 - DNA, 33 bp, Homo sapien
gataaatagatagataacctacatatgtcaata

SEQ ID NO: 650512 - DNA, 33 bp, Homo sapien
gataaatagatagatagcctacatatgtcaata

SEQ ID NO: 650513 - DNA, 33 bp, Homo sapien
tattgctctaggctcaaattaattctgctatct

SEQ ID NO: 650514 - DNA, 33 bp, Homo sapien
tattgctctaggctcatattaattctgctatct

SEQ ID NO: 650515 - DNA, 33 bp, Homo sapien
caaatctggaaactgaaaagaaagagataatta

SEQ ID NO: 650516 - DNA, 33 bp, Homo sapien
caaatctggaaactgagaagaaagagataatta

SEQ ID NO: 650517 - DNA, 33 bp, Homo sapien
aggataatatctgcgaagagaaagaagatagag

SEQ ID NO: 650518 - DNA, 33 bp, Homo sapien
aggataatatctgcgaggagaaagaagatagag

SEQ ID NO: 650519 - DNA, 33 bp, Homo sapien
caacacagtaaaataaaactaaaattctcaaaa

SEQ ID NO: 650520 - DNA, 33 bp, Homo sapien
caacacagtaaaataagactaaaattctcaaaa

SEQ ID NO: 650521 - DNA, 33 bp, Homo sapien
caaggtgtcatgagaaaagaataagtcatgaga

SEQ ID NO: 650522 - DNA, 33 bp, Homo sapien
caaggtgtcatgagaagagaataagtcatgaga

SEQ ID NO: 650523 - DNA, 33 bp, Homo sapien
ctcatactttatcgacggattcaaacgaatttt

SEQ ID NO: 650524 - DNA, 33 bp, Homo sapien
ctcatactttatcgactgattcaaacgaatttt

SEQ ID NO: 650525 - DNA, 33 bp, Homo sapien
tccttttagttacatgcagtcatttttgtccac

SEQ ID NO: 650526 - DNA, 33 bp, Homo sapien
tccttttagttacatggagtcatttttgtccac

SEQ ID NO: 650527 - DNA, 33 bp, Homo sapien
gcataggtgcttaaaagtctgagagaaaattct

SEQ ID NO: 650528 - DNA, 33 bp, Homo sapien
gcataggtgcttaaaattctgagagaaaattct

SEQ ID NO: 650529 - DNA, 33 bp, Homo sapien
atccgtagtagcttccacagtatccattctttt

SEQ ID NO: 650530 - DNA, 33 bp, Homo sapien
atccgtagtagcttccgcagtatccattctttt

SEQ ID NO: 650531 - DNA, 33 bp, Homo sapien
aaagccaagacacaaaagatgccagaatttaga

SEQ ID NO: 650532 - DNA, 33 bp, Homo sapien
aaagccaagacacaaaggatgccagaatttaga

SEQ ID NO: 650533 - DNA, 33 bp, Homo sapien
ttagggcagaccagtaagttggagacacaggca

SEQ ID NO: 650534 - DNA, 33 bp, Homo sapien
ttagggcagaccagtaggttggagacacaggca

SEQ ID NO: 650535 - DNA, 33 bp, Homo sapien
gtgttttggtcaaacactagtttagatgttgct

SEQ ID NO: 650536 - DNA, 33 bp, Homo sapien
gtgttttggtcaaacagtagtttagatgttgct

SEQ ID NO: 650537 - DNA, 33 bp, Homo sapien
tctccaccttcgcttgcaatattttccttctag

SEQ ID NO: 650538 - DNA, 33 bp, Homo sapien
tctccaccttcgcttgtaatattttccttctag

SEQ ID NO: 650539 - DNA, 33 bp, Homo sapien
ttggctattatttggccaattcaaaatatccag

SEQ ID NO: 650540 - DNA, 33 bp, Homo sapien
ttggctattatttggctaattcaaaatatccag

SEQ ID NO: 650541 - DNA, 33 bp, Homo sapien
ggccaatacctggaaaataattacctgtttctt

SEQ ID NO: 650542 - DNA, 33 bp, Homo sapien
ggccaatacctggaaagtaattacctgtttctt

SEQ ID NO: 650543 - DNA, 33 bp, Homo sapien
tttctacccaatactccctagtgcagcgcttac

SEQ ID NO: 650544 - DNA, 33 bp, Homo sapien
tttctacccaatactctctagtgcagcgcttac

SEQ ID NO: 650545 - DNA, 33 bp, Homo sapien
aattatctagctctgaaagtggaagggactcag

SEQ ID NO: 650546 - DNA, 33 bp, Homo sapien
aattatctagctctgagagtggaagggactcag

SEQ ID NO: 650547 - DNA, 33 bp, Homo sapien
cttcactaccattgtcaagtaaaaaaaagaaac

SEQ ID NO: 650548 - DNA, 33 bp, Homo sapien
cttcactaccattgtccagtaaaaaaaagaaac

SEQ ID NO: 650549 - DNA, 33 bp, Homo sapien
tgtataaattgtgtaacgatcagttcaggacaa

SEQ ID NO: 650550 - DNA, 33 bp, Homo sapien
tgtataaattgtgtaatgatcagttcaggacaa

SEQ ID NO: 650551 - DNA, 33 bp, Homo sapien
gattttccttgtgacacggctgctggttttgtt

SEQ ID NO: 650552 - DNA, 33 bp, Homo sapien
gattttccttgtgacatggctgctggttttgtt

SEQ ID NO: 650553 - DNA, 33 bp, Homo sapien
aagacaatcaaatagagaaatggcccaaagact

SEQ ID NO: 650554 - DNA, 33 bp, Homo sapien
aagacaatcaaatagataaatggcccaaagact

SEQ ID NO: 650555 - DNA, 33 bp, Homo sapien
tgagataaggactcaggattcccaaggctcagg

SEQ ID NO: 650556 - DNA, 33 bp, Homo sapien
tgagataaggactcagtattcccaaggctcagg

SEQ ID NO: 650557 - DNA, 33 bp, Homo sapien
tctgtgtttctccaatcaccaaagtctttttca

SEQ ID NO: 650558 - DNA, 33 bp, Homo sapien
tctgtgtttctccaatgaccaaagtctttttca

SEQ ID NO: 650559 - DNA, 33 bp, Homo sapien
tcaagcactttgactaagtttacttcatatata

SEQ ID NO: 650560 - DNA, 33 bp, Homo sapien
tcaagcactttgactaggtttacttcatatata

SEQ ID NO: 650561 - DNA, 33 bp, Homo sapien
tttgtataaggtaagaggagaatccagtttcat

SEQ ID NO: 650562 - DNA, 33 bp, Homo sapien
tttgtataaggtaagatgagaatccagtttcat

SEQ ID NO: 650563 - DNA, 33 bp, Homo sapien
tatatcttgccattcaagtagacccagttctaa

SEQ ID NO: 650564 - DNA, 33 bp, Homo sapien
tatatcttgccattcaggtagacccagttctaa

SEQ ID NO: 650565 - DNA, 33 bp, Homo sapien
gctttctctgtaaacagaattacttgctttcat

SEQ ID NO: 650566 - DNA, 33 bp, Homo sapien
gctttctctgtaaacataattacttgctttcat

SEQ ID NO: 650567 - DNA, 33 bp, Homo sapien
ttcattatacttttgccagtggcttgctttgat

SEQ ID NO: 650568 - DNA, 33 bp, Homo sapien
ttcattatacttttgctagtggcttgctttgat

SEQ ID NO: 650569 - DNA, 33 bp, Homo sapien
ttgctcatcgctatgacaacaagctcaggctgt

SEQ ID NO: 650570 - DNA, 33 bp, Homo sapien
ttgctcatcgctatgagaacaagctcaggctgt

SEQ ID NO: 650571 - DNA, 33 bp, Homo sapien
gttcttcccaaactgacgaccaaatcatttaaa

SEQ ID NO: 650572 - DNA, 33 bp, Homo sapien
gttcttcccaaactgaggaccaaatcatttaaa

SEQ ID NO: 650573 - DNA, 33 bp, Homo sapien
gactatggcttcattacacgcagaagctcttat

SEQ ID NO: 650574 - DNA, 33 bp, Homo sapien
gactatggcttcattatacgcagaagctcttat

SEQ ID NO: 650575 - DNA, 33 bp, Homo sapien
aatgatttgcaatataactaacctgctaaaata

SEQ ID NO: 650576 - DNA, 33 bp, Homo sapien
aatgatttgcaatatatctaacctgctaaaata

SEQ ID NO: 650577 - DNA, 33 bp, Homo sapien
gtctacatgaggtacaccatatttttacttaga

SEQ ID NO: 650578 - DNA, 33 bp, Homo sapien
gtctacatgaggtacatcatatttttacttaga

SEQ ID NO: 650579 - DNA, 33 bp, Homo sapien
atgccatgtaagatgacataagcccccaaataa

SEQ ID NO: 650580 - DNA, 33 bp, Homo sapien
atgccatgtaagatgatataagcccccaaataa

SEQ ID NO: 650581 - DNA, 33 bp, Homo sapien
atgcttcttgaattaacgtttccagcaattttt

SEQ ID NO: 650582 - DNA, 33 bp, Homo sapien
atgcttcttgaattaatgtttccagcaattttt

SEQ ID NO: 650583 - DNA, 33 bp, Homo sapien
agagaacggcaaagccaagagtttggtaacaga

SEQ ID NO: 650584 - DNA, 33 bp, Homo sapien
agagaacggcaaagccgagagtttggtaacaga

SEQ ID NO: 650585 - DNA, 33 bp, Homo sapien
aagcaaatggaacatacgaatttctggcttttc

SEQ ID NO: 650586 - DNA, 33 bp, Homo sapien
aagcaaatggaacatatgaatttctggcttttc

SEQ ID NO: 650587 - DNA, 33 bp, Homo sapien
tttctctatgtcaggacagtgttcagagaatgt

SEQ ID NO: 650588 - DNA, 33 bp, Homo sapien
tttctctatgtcaggatagtgttcagagaatgt

SEQ ID NO: 650589 - DNA, 33 bp, Homo sapien
aaaaacaatattggatgaagagtcacaagagtc

SEQ ID NO: 650590 - DNA, 33 bp, Homo sapien
aaaaacaatattggattaagagtcacaagagtc

SEQ ID NO: 650591 - DNA, 33 bp, Homo sapien
tgttgaagatagaaccaagttaaggaaatgact

SEQ ID NO: 650592 - DNA, 33 bp, Homo sapien
tgttgaagatagaaccgagttaaggaaatgact

SEQ ID NO: 650593 - DNA, 33 bp, Homo sapien
aagactccagctgtagaaaatatttctgttatt

SEQ ID NO: 650594 - DNA, 33 bp, Homo sapien
aagactccagctgtaggaaatatttctgttatt

SEQ ID NO: 650595 - DNA, 33 bp, Homo sapien
aattcctgacttcaggaagtggattcccaatct

SEQ ID NO: 650596 - DNA, 33 bp, Homo sapien
aattcctgacttcagggagtggattcccaatct

SEQ ID NO: 650597 - DNA, 33 bp, Homo sapien
taggactaaataatcactgaacacaagctaagg

SEQ ID NO: 650598 - DNA, 33 bp, Homo sapien
taggactaaataatcagtgaacacaagctaagg

SEQ ID NO: 650599 - DNA, 33 bp, Homo sapien
ctcaaaacttcttttaaggatgatgatgctatt

SEQ ID NO: 650600 - DNA, 33 bp, Homo sapien
ctcaaaacttcttttacggatgatgatgctatt

SEQ ID NO: 650601 - DNA, 33 bp, Homo sapien
ttagtgacaccctctcggagagctcaatagatg

SEQ ID NO: 650602 - DNA, 33 bp, Homo sapien
ttagtgacaccctctctgagagctcaatagatg

SEQ ID NO: 650603 - DNA, 33 bp, Homo sapien
tgctaatgtgttgttccaatctgatctcacctc

SEQ ID NO: 650604 - DNA, 33 bp, Homo sapien
tgctaatgtgttgttcgaatctgatctcacctc

SEQ ID NO: 650605 - DNA, 33 bp, Homo sapien
ttggaaactccagaaactcaggcaatgcagagt

SEQ ID NO: 650606 - DNA, 33 bp, Homo sapien
ttggaaactccagaaagtcaggcaatgcagagt

SEQ ID NO: 650607 - DNA, 33 bp, Homo sapien
gtgaggtgattctttcaaaaggctcagcaggca

SEQ ID NO: 650608 - DNA, 33 bp, Homo sapien
gtgaggtgattctttcgaaaggctcagcaggca

SEQ ID NO: 650609 - DNA, 33 bp, Homo sapien
gtgtgtaaaagtttaactggattttagtgcatt

SEQ ID NO: 650610 - DNA, 33 bp, Homo sapien
gtgtgtaaaagtttaattggattttagtgcatt

SEQ ID NO: 650611 - DNA, 33 bp, Homo sapien
gctttctcatctcttcacctttgcttatgtgac

SEQ ID NO: 650612 - DNA, 33 bp, Homo sapien
gctttctcatctcttcgcctttgcttatgtgac

SEQ ID NO: 650613 - DNA, 33 bp, Homo sapien
ggagggatcgcaatcacaaccttttcctttggt

SEQ ID NO: 650614 - DNA, 33 bp, Homo sapien
ggagggatcgcaatcataaccttttcctttggt

SEQ ID NO: 650615 - DNA, 33 bp, Homo sapien
attacctttataagaaactgtggagaaatattt

SEQ ID NO: 650616 - DNA, 33 bp, Homo sapien
attacctttataagaagctgtggagaaatattt

SEQ ID NO: 650617 - DNA, 33 bp, Homo sapien
ttgttttagatagtccactgggatcagttttct

SEQ ID NO: 650618 - DNA, 33 bp, Homo sapien
ttgttttagatagtccgctgggatcagttttct

SEQ ID NO: 650619 - DNA, 33 bp, Homo sapien
tgccagtaattgtccactgaatggctggctttg

SEQ ID NO: 650620 - DNA, 33 bp, Homo sapien
tgccagtaattgtccattgaatggctggctttg

SEQ ID NO: 650621 - DNA, 33 bp, Homo sapien
tctaggaaaattaagaagttagcaaaagcttcc

SEQ ID NO: 650622 - DNA, 33 bp, Homo sapien
tctaggaaaattaagaggttagcaaaagcttcc

SEQ ID NO: 650623 - DNA, 33 bp, Homo sapien
tcatctgactttctcacggaatctttgtttttg

SEQ ID NO: 650624 - DNA, 33 bp, Homo sapien
tcatctgactttctcatggaatctttgtttttg

SEQ ID NO: 650625 - DNA, 33 bp, Homo sapien
atgttgataaagtcaccgcaaggcctagaaaac

SEQ ID NO: 650626 - DNA, 33 bp, Homo sapien
atgttgataaagtcactgcaaggcctagaaaac

SEQ ID NO: 650627 - DNA, 33 bp, Homo sapien
actttgagaacatctccagtggtaagtccttga

SEQ ID NO: 650628 - DNA, 33 bp, Homo sapien
actttgagaacatctctagtggtaagtccttga

SEQ ID NO: 650629 - DNA, 33 bp, Homo sapien
caactttcctgcccgacataggagaattcattg

SEQ ID NO: 650630 - DNA, 33 bp, Homo sapien
caactttcctgcccgatataggagaattcattg

SEQ ID NO: 650631 - DNA, 33 bp, Homo sapien
atctcacactagacacaaaattttagatagatc

SEQ ID NO: 650632 - DNA, 33 bp, Homo sapien
atctcacactagacacgaaattttagatagatc

SEQ ID NO: 650633 - DNA, 33 bp, Homo sapien
gtgttacggctgaaagaaagtccttttaacaag

SEQ ID NO: 650634 - DNA, 33 bp, Homo sapien
gtgttacggctgaaaggaagtccttttaacaag

SEQ ID NO: 650635 - DNA, 33 bp, Homo sapien
tctggggtttcagtacaaagactgatgtgtttg

SEQ ID NO: 650636 - DNA, 33 bp, Homo sapien
tctggggtttcagtaccaagactgatgtgtttg

SEQ ID NO: 650637 - DNA, 33 bp, Homo sapien
tctactttgaagctaacggcatttgggaattat

SEQ ID NO: 650638 - DNA, 33 bp, Homo sapien
tctactttgaagctaagggcatttgggaattat

SEQ ID NO: 650639 - DNA, 33 bp, Homo sapien
ttgtcacaattccagacacagagtggttgagcc

SEQ ID NO: 650640 - DNA, 33 bp, Homo sapien
ttgtcacaattccagatacagagtggttgagcc

SEQ ID NO: 650641 - DNA, 33 bp, Homo sapien
agaagaaaatgtgaaccagggataaaaccaact

SEQ ID NO: 650642 - DNA, 33 bp, Homo sapien
agaagaaaatgtgaactagggataaaaccaact

SEQ ID NO: 650643 - DNA, 33 bp, Homo sapien
tcctaatgaccaatgacatgaattactgaaaac

SEQ ID NO: 650644 - DNA, 33 bp, Homo sapien
tcctaatgaccaatgatatgaattactgaaaac

SEQ ID NO: 650645 - DNA, 33 bp, Homo sapien
gagacacgaatctaaaagatcaccggcaacagc

SEQ ID NO: 650646 - DNA, 33 bp, Homo sapien
gagacacgaatctaaaggatcaccggcaacagc

SEQ ID NO: 650647 - DNA, 33 bp, Homo sapien
caaggcctcacttctaataagttgtagatccat

SEQ ID NO: 650648 - DNA, 33 bp, Homo sapien
caaggcctcacttctagtaagttgtagatccat

SEQ ID NO: 650649 - DNA, 33 bp, Homo sapien
taggatggcagcaatactaattgtatcagagct

SEQ ID NO: 650650 - DNA, 33 bp, Homo sapien
taggatggcagcaatattaattgtatcagagct

SEQ ID NO: 650651 - DNA, 33 bp, Homo sapien
tcgccattacaactaacgagatgagctttctat

SEQ ID NO: 650652 - DNA, 33 bp, Homo sapien
tcgccattacaactaatgagatgagctttctat

SEQ ID NO: 650653 - DNA, 33 bp, Homo sapien
aagaaaaaaatatctcacgtaccaaataataga

SEQ ID NO: 650654 - DNA, 33 bp, Homo sapien
aagaaaaaaatatctctcgtaccaaataataga

SEQ ID NO: 650655 - DNA, 33 bp, Homo sapien
ttataggtgtgcattacactttaaaatctaaat

SEQ ID NO: 650656 - DNA, 33 bp, Homo sapien
ttataggtgtgcattatactttaaaatctaaat

SEQ ID NO: 650657 - DNA, 33 bp, Homo sapien
caagaacgtttcctggaacccactgggctcaaa

SEQ ID NO: 650658 - DNA, 33 bp, Homo sapien
caagaacgtttcctggcacccactgggctcaaa

SEQ ID NO: 650659 - DNA, 33 bp, Homo sapien
tggtactgtattgatcactaaattcattcatat

SEQ ID NO: 650660 - DNA, 33 bp, Homo sapien
tggtactgtattgatcgctaaattcattcatat

SEQ ID NO: 650661 - DNA, 33 bp, Homo sapien
atagacctatgataagaacatttccacggtatt

SEQ ID NO: 650662 - DNA, 33 bp, Homo sapien
atagacctatgataaggacatttccacggtatt

SEQ ID NO: 650663 - DNA, 33 bp, Homo sapien
tttgaaagatgctctgaagattttgtaggaaaa

SEQ ID NO: 650664 - DNA, 33 bp, Homo sapien
tttgaaagatgctctggagattttgtaggaaaa

SEQ ID NO: 650665 - DNA, 33 bp, Homo sapien
ttactttccatttgagatacagctctggattgt

SEQ ID NO: 650666 - DNA, 33 bp, Homo sapien
ttactttccatttgagttacagctctggattgt

SEQ ID NO: 650667 - DNA, 33 bp, Homo sapien
tcattttgaacaacagaaaattaaggtacagtg

SEQ ID NO: 650668 - DNA, 33 bp, Homo sapien
tcattttgaacaacaggaaattaaggtacagtg

SEQ ID NO: 650669 - DNA, 33 bp, Homo sapien
gggatgaatactatgacgaatgcctctaataaa

SEQ ID NO: 650670 - DNA, 33 bp, Homo sapien
gggatgaatactatgatgaatgcctctaataaa

SEQ ID NO: 650671 - DNA, 33 bp, Homo sapien
acccttgtttcaaggcaactcagaagagggaat

SEQ ID NO: 650672 - DNA, 33 bp, Homo sapien
acccttgtttcaaggcgactcagaagagggaat

SEQ ID NO: 650673 - DNA, 33 bp, Homo sapien
cctgtggcagcccaacaggttcaccaaaggtag

SEQ ID NO: 650674 - DNA, 33 bp, Homo sapien
cctgtggcagcccaacgggttcaccaaaggtag

SEQ ID NO: 650675 - DNA, 33 bp, Homo sapien
ttgtcttaagattagagagatgaacatgaagga

SEQ ID NO: 650676 - DNA, 33 bp, Homo sapien
ttgtcttaagattagatagatgaacatgaagga

SEQ ID NO: 650677 - DNA, 33 bp, Homo sapien
tcagtatgttcacttacaggtattaccaactag

SEQ ID NO: 650678 - DNA, 33 bp, Homo sapien
tcagtatgttcacttataggtattaccaactag

SEQ ID NO: 650679 - DNA, 33 bp, Homo sapien
tattcataaagtgaaaagggatatggtctcctt

SEQ ID NO: 650680 - DNA, 33 bp, Homo sapien
tattcataaagtgaaaggggatatggtctcctt

SEQ ID NO: 650681 - DNA, 33 bp, Homo sapien
gagactttgtatttgccgatgcctttacttgaa

SEQ ID NO: 650682 - DNA, 33 bp, Homo sapien
gagactttgtatttgctgatgcctttacttgaa

SEQ ID NO: 650683 - DNA, 33 bp, Homo sapien
atgataagtagaaaaaaagaagccagcgaaaaa

SEQ ID NO: 650684 - DNA, 33 bp, Homo sapien
atgataagtagaaaaagagaagccagcgaaaaa

SEQ ID NO: 650685 - DNA, 33 bp, Homo sapien
tattcagttgtccaataaaatgcttttgaattt

SEQ ID NO: 650686 - DNA, 33 bp, Homo sapien
tattcagttgtccaatcaaatgcttttgaattt

SEQ ID NO: 650687 - DNA, 33 bp, Homo sapien
ctagttccttctaacacacaacgaatcccaagg

SEQ ID NO: 650688 - DNA, 33 bp, Homo sapien
ctagttccttctaacatacaacgaatcccaagg

SEQ ID NO: 650689 - DNA, 33 bp, Homo sapien
accagtgctttggtaccgctaaggctgtgattg

SEQ ID NO: 650690 - DNA, 33 bp, Homo sapien
accagtgctttggtactgctaaggctgtgattg

SEQ ID NO: 650691 - DNA, 33 bp, Homo sapien
tgaaagctacagtaagaaaagaggctaggggca

SEQ ID NO: 650692 - DNA, 33 bp, Homo sapien
tgaaagctacagtaaggaaagaggctaggggca

SEQ ID NO: 650693 - DNA, 33 bp, Homo sapien
tatattttattccctcaactgccaggttcatta

SEQ ID NO: 650694 - DNA, 33 bp, Homo sapien
tatattttattccctcgactgccaggttcatta

SEQ ID NO: 650695 - DNA, 33 bp, Homo sapien
tctattctctgaagccacataccactttgccac

SEQ ID NO: 650696 - DNA, 33 bp, Homo sapien
tctattctctgaagccgcataccactttgccac

SEQ ID NO: 650697 - DNA, 33 bp, Homo sapien
tatagtatgtgttgaactaatgcataaatgaat

SEQ ID NO: 650698 - DNA, 33 bp, Homo sapien
tatagtatgtgttgaattaatgcataaatgaat

SEQ ID NO: 650699 - DNA, 33 bp, Homo sapien
agcctgtaacatataccagtgggatgaaaaaaa

SEQ ID NO: 650700 - DNA, 33 bp, Homo sapien
agcctgtaacatatactagtgggatgaaaaaaa

SEQ ID NO: 650701 - DNA, 33 bp, Homo sapien
taactatctccttaaacctatcttccactccaa

SEQ ID NO: 650702 - DNA, 33 bp, Homo sapien
taactatctccttaaatctatcttccactccaa

SEQ ID NO: 650703 - DNA, 33 bp, Homo sapien
ctgtactgcaatctcaaactgctgtcaagaatt

SEQ ID NO: 650704 - DNA, 33 bp, Homo sapien
ctgtactgcaatctcacactgctgtcaagaatt

SEQ ID NO: 650705 - DNA, 33 bp, Homo sapien
ttacagaatcaaagaaacaattctgtagtgaat

SEQ ID NO: 650706 - DNA, 33 bp, Homo sapien
ttacagaatcaaagaatcaattctgtagtgaat

SEQ ID NO: 650707 - DNA, 33 bp, Homo sapien
ctgagcttagagctagcaaattatagatgacta

SEQ ID NO: 650708 - DNA, 33 bp, Homo sapien
ctgagcttagagctaggaaattatagatgacta

SEQ ID NO: 650709 - DNA, 33 bp, Homo sapien
cagcttgaagtactaccgcttatgtcctaaaat

SEQ ID NO: 650710 - DNA, 33 bp, Homo sapien
cagcttgaagtactactgcttatgtcctaaaat

SEQ ID NO: 650711 - DNA, 33 bp, Homo sapien
taagctggtagcactcaatttacagtgtgtttg

SEQ ID NO: 650712 - DNA, 33 bp, Homo sapien
taagctggtagcactccatttacagtgtgtttg

SEQ ID NO: 650713 - DNA, 33 bp, Homo sapien
taacgttatttaggcaatcaaaaagatgggcaa

SEQ ID NO: 650714 - DNA, 33 bp, Homo sapien
taacgttatttaggcagtcaaaaagatgggcaa

SEQ ID NO: 650715 - DNA, 33 bp, Homo sapien
ataatgttagctggaaaccagtgatgtaaaaat

SEQ ID NO: 650716 - DNA, 33 bp, Homo sapien
ataatgttagctggaagccagtgatgtaaaaat

SEQ ID NO: 650717 - DNA, 33 bp, Homo sapien
aaatgcattttatcacagattgtttcataggca

SEQ ID NO: 650718 - DNA, 33 bp, Homo sapien
aaatgcattttatcacggattgtttcataggca

SEQ ID NO: 650719 - DNA, 33 bp, Homo sapien
attcaaagccagagaccagggccctttcccaaa

SEQ ID NO: 650720 - DNA, 33 bp, Homo sapien
attcaaagccagagacgagggccctttcccaaa

SEQ ID NO: 650721 - DNA, 33 bp, Homo sapien
gtcaatacgtggcagccagaatcacagaaactt

SEQ ID NO: 650722 - DNA, 33 bp, Homo sapien
gtcaatacgtggcagctagaatcacagaaactt

SEQ ID NO: 650723 - DNA, 33 bp, Homo sapien
ttgccgtatggaaatacatcctgtgacttgaga

SEQ ID NO: 650724 - DNA, 33 bp, Homo sapien
ttgccgtatggaaatatatcctgtgacttgaga

SEQ ID NO: 650725 - DNA, 33 bp, Homo sapien
gttaaaaagcatcagaagaggttgactgggaca

SEQ ID NO: 650726 - DNA, 33 bp, Homo sapien
gttaaaaagcatcagaggaggttgactgggaca

SEQ ID NO: 650727 - DNA, 33 bp, Homo sapien
cacccattcttgactgcaatattcttaaaggcc

SEQ ID NO: 650728 - DNA, 33 bp, Homo sapien
cacccattcttgactggaatattcttaaaggcc

SEQ ID NO: 650729 - DNA, 33 bp, Homo sapien
agtgtattttcaggtaaaatgagatgtaaaagt

SEQ ID NO: 650730 - DNA, 33 bp, Homo sapien
agtgtattttcaggtagaatgagatgtaaaagt

SEQ ID NO: 650731 - DNA, 33 bp, Homo sapien
gagagaggagcaaaaaaatgtgaggatctcagt

SEQ ID NO: 650732 - DNA, 33 bp, Homo sapien
gagagaggagcaaaaagatgtgaggatctcagt

SEQ ID NO: 650733 - DNA, 33 bp, Homo sapien
tccagagaaccatagcccaggagaatttgtttc

SEQ ID NO: 650734 - DNA, 33 bp, Homo sapien
tccagagaaccatagctcaggagaatttgtttc

SEQ ID NO: 650735 - DNA, 33 bp, Homo sapien
atccaagatcccatgaaattcagaatctacgtt

SEQ ID NO: 650736 - DNA, 33 bp, Homo sapien
atccaagatcccatgacattcagaatctacgtt

SEQ ID NO: 650737 - DNA, 33 bp, Homo sapien
gcctacatgtttgagcaattaggctattcactt

SEQ ID NO: 650738 - DNA, 33 bp, Homo sapien
gcctacatgtttgagcgattaggctattcactt

SEQ ID NO: 650739 - DNA, 33 bp, Homo sapien
gatccatcacactacaccaggatttagcggaat

SEQ ID NO: 650740 - DNA, 33 bp, Homo sapien
gatccatcacactacatcaggatttagcggaat

SEQ ID NO: 650741 - DNA, 33 bp, Homo sapien
catgtttttattacacacaagaatgacttgatc

SEQ ID NO: 650742 - DNA, 33 bp, Homo sapien
catgtttttattacactcaagaatgacttgatc

SEQ ID NO: 650743 - DNA, 33 bp, Homo sapien
ttctggggattctagcaaaaatcaacacaagtc

SEQ ID NO: 650744 - DNA, 33 bp, Homo sapien
ttctggggattctagcgaaaatcaacacaagtc

SEQ ID NO: 650745 - DNA, 33 bp, Homo sapien
tgtaatgatgaaatcaaagtaattagcatatcc

SEQ ID NO: 650746 - DNA, 33 bp, Homo sapien
tgtaatgatgaaatcagagtaattagcatatcc

SEQ ID NO: 650747 - DNA, 33 bp, Homo sapien
cacagtcgcctatgacacaacaggacaccagaa

SEQ ID NO: 650748 - DNA, 33 bp, Homo sapien
cacagtcgcctatgacgcaacaggacaccagaa

SEQ ID NO: 650749 - DNA, 33 bp, Homo sapien
gacaatgaacataataagactgaattttagaat

SEQ ID NO: 650750 - DNA, 33 bp, Homo sapien
gacaatgaacataatatgactgaattttagaat

SEQ ID NO: 650751 - DNA, 33 bp, Homo sapien
cacttgttttctgtgaccttttgacttctcaaa

SEQ ID NO: 650752 - DNA, 33 bp, Homo sapien
cacttgttttctgtgatcttttgacttctcaaa

SEQ ID NO: 650753 - DNA, 33 bp, Homo sapien
ccttatgtagctggtcactatgtaaaactacca

SEQ ID NO: 650754 - DNA, 33 bp, Homo sapien
ccttatgtagctggtcgctatgtaaaactacca

SEQ ID NO: 650755 - DNA, 33 bp, Homo sapien
aaaaaaattagagcataatgatactgcaaaagt

SEQ ID NO: 650756 - DNA, 33 bp, Homo sapien
aaaaaaattagagcatgatgatactgcaaaagt

SEQ ID NO: 650757 - DNA, 33 bp, Homo sapien
atcatagcttcagaggaaaacattcaaattgag

SEQ ID NO: 650758 - DNA, 33 bp, Homo sapien
atcatagcttcagagggaaacattcaaattgag

SEQ ID NO: 650759 - DNA, 33 bp, Homo sapien
ccctttggcctccacgaaagatattcacaggta

SEQ ID NO: 650760 - DNA, 33 bp, Homo sapien
ccctttggcctccacggaagatattcacaggta

SEQ ID NO: 650761 - DNA, 33 bp, Homo sapien
aaaatgcacattgatgcaaataccatgtcacat

SEQ ID NO: 650762 - DNA, 33 bp, Homo sapien
aaaatgcacattgatgtaaataccatgtcacat

SEQ ID NO: 650763 - DNA, 33 bp, Homo sapien
tataatagctctgtagcatactttcaagtcagg

SEQ ID NO: 650764 - DNA, 33 bp, Homo sapien
tataatagctctgtagtatactttcaagtcagg

SEQ ID NO: 650765 - DNA, 33 bp, Homo sapien
gaaattgccattgaaacgagttaaggcctaccc

SEQ ID NO: 650766 - DNA, 33 bp, Homo sapien
gaaattgccattgaaatgagttaaggcctaccc

SEQ ID NO: 650767 - DNA, 33 bp, Homo sapien
tggaatatataattcacaaaggtttgctaagtg

SEQ ID NO: 650768 - DNA, 33 bp, Homo sapien
tggaatatataattcataaaggtttgctaagtg

SEQ ID NO: 650769 - DNA, 33 bp, Homo sapien
tgatttacagagttccaataagtggaaatccgc

SEQ ID NO: 650770 - DNA, 33 bp, Homo sapien
tgatttacagagttccgataagtggaaatccgc

SEQ ID NO: 650771 - DNA, 33 bp, Homo sapien
atacatatacaggtgcacatttttctatggaaa

SEQ ID NO: 650772 - DNA, 33 bp, Homo sapien
atacatatacaggtgcgcatttttctatggaaa

SEQ ID NO: 650773 - DNA, 33 bp, Homo sapien
ggatgatggcactgtacgaccagtcaccaccca

SEQ ID NO: 650774 - DNA, 33 bp, Homo sapien
ggatgatggcactgtatgaccagtcaccaccca

SEQ ID NO: 650775 - DNA, 33 bp, Homo sapien
tagtaaagacctgagacaggaacaaatgaagag

SEQ ID NO: 650776 - DNA, 33 bp, Homo sapien
tagtaaagacctgagagaggaacaaatgaagag

SEQ ID NO: 650777 - DNA, 33 bp, Homo sapien
acatgaatgatagaaacaaaacctacaaatata

SEQ ID NO: 650778 - DNA, 33 bp, Homo sapien
acatgaatgatagaaagaaaacctacaaatata

SEQ ID NO: 650779 - DNA, 33 bp, Homo sapien
taacaagactgaaatccaactagctggaaatgt

SEQ ID NO: 650780 - DNA, 33 bp, Homo sapien
taacaagactgaaatctaactagctggaaatgt

SEQ ID NO: 650781 - DNA, 33 bp, Homo sapien
tgaaatgaccaagattaaagagtctgatgtcat

SEQ ID NO: 650782 - DNA, 33 bp, Homo sapien
tgaaatgaccaagattgaagagtctgatgtcat

SEQ ID NO: 650783 - DNA, 33 bp, Homo sapien
tgtggctccttatagaagcactcagtttagatt

SEQ ID NO: 650784 - DNA, 33 bp, Homo sapien
tgtggctccttatagacgcactcagtttagatt

SEQ ID NO: 650785 - DNA, 33 bp, Homo sapien
caaggccatatataaacgttagagtgacactga

SEQ ID NO: 650786 - DNA, 33 bp, Homo sapien
caaggccatatataaatgttagagtgacactga

SEQ ID NO: 650787 - DNA, 33 bp, Homo sapien
attggataggagagacaagacctaactgtgagt

SEQ ID NO: 650788 - DNA, 33 bp, Homo sapien
attggataggagagacgagacctaactgtgagt

SEQ ID NO: 650789 - DNA, 33 bp, Homo sapien
tgatctccaaaaataaatagtaactgagatgat

SEQ ID NO: 650790 - DNA, 33 bp, Homo sapien
tgatctccaaaaataagtagtaactgagatgat

SEQ ID NO: 650791 - DNA, 33 bp, Homo sapien
atgtcagatttgatacaatgccatcttaaagtt

SEQ ID NO: 650792 - DNA, 33 bp, Homo sapien
atgtcagatttgataccatgccatcttaaagtt

SEQ ID NO: 650793 - DNA, 33 bp, Homo sapien
tgaacaactgagcccaaacatggttgattaaac

SEQ ID NO: 650794 - DNA, 33 bp, Homo sapien
tgaacaactgagcccagacatggttgattaaac

SEQ ID NO: 650795 - DNA, 33 bp, Homo sapien
catgatgtttaacatacgtcagggtttatatgg

SEQ ID NO: 650796 - DNA, 33 bp, Homo sapien
catgatgtttaacatatgtcagggtttatatgg

SEQ ID NO: 650797 - DNA, 33 bp, Homo sapien
agttttgagaacagatcatcaacagtgtcaaat

SEQ ID NO: 650798 - DNA, 33 bp, Homo sapien
agttttgagaacagattatcaacagtgtcaaat

SEQ ID NO: 650799 - DNA, 33 bp, Homo sapien
attagcccaaggacaccgattgataaatggtgc

SEQ ID NO: 650800 - DNA, 33 bp, Homo sapien
attagcccaaggacactgattgataaatggtgc

SEQ ID NO: 650801 - DNA, 33 bp, Homo sapien
agcaccttgtcagtgaaatcacttttagtcgtt

SEQ ID NO: 650802 - DNA, 33 bp, Homo sapien
agcaccttgtcagtgagatcacttttagtcgtt

SEQ ID NO: 650803 - DNA, 33 bp, Homo sapien
tgtaacaaggaataaacgcgtagatctattatg

SEQ ID NO: 650804 - DNA, 33 bp, Homo sapien
tgtaacaaggaataaaggcgtagatctattatg

SEQ ID NO: 650805 - DNA, 33 bp, Homo sapien
taaacctctggcttgcaaacttggagaatgagg

SEQ ID NO: 650806 - DNA, 33 bp, Homo sapien
taaacctctggcttgcgaacttggagaatgagg

SEQ ID NO: 650807 - DNA, 33 bp, Homo sapien
gtcagattttatcctaccacatcttttcagtgc

SEQ ID NO: 650808 - DNA, 33 bp, Homo sapien
gtcagattttatcctatcacatcttttcagtgc

SEQ ID NO: 650809 - DNA, 33 bp, Homo sapien
cttactatgtcaccaaaacctctaagtacaatt

SEQ ID NO: 650810 - DNA, 33 bp, Homo sapien
cttactatgtcaccaacacctctaagtacaatt

SEQ ID NO: 650811 - DNA, 33 bp, Homo sapien
ttatgttttacttggacctctcatctgaacccc

SEQ ID NO: 650812 - DNA, 33 bp, Homo sapien
ttatgttttacttggatctctcatctgaacccc

SEQ ID NO: 650813 - DNA, 33 bp, Homo sapien
gacttattctgacttacagatcctgaggccatg

SEQ ID NO: 650814 - DNA, 33 bp, Homo sapien
gacttattctgacttatagatcctgaggccatg

SEQ ID NO: 650815 - DNA, 33 bp, Homo sapien
gcaaaccttgcatccgacctgcattttaccaat

SEQ ID NO: 650816 - DNA, 33 bp, Homo sapien
gcaaaccttgcatccggcctgcattttaccaat

SEQ ID NO: 650817 - DNA, 33 bp, Homo sapien
ggactatcagaaaagtcaaagcatgtatagaga

SEQ ID NO: 650818 - DNA, 33 bp, Homo sapien
ggactatcagaaaagtgaaagcatgtatagaga

SEQ ID NO: 650819 - DNA, 33 bp, Homo sapien
gaatcaaaatggagaagtacaaagacagtaagc

SEQ ID NO: 650820 - DNA, 33 bp, Homo sapien
gaatcaaaatggagaattacaaagacagtaagc

SEQ ID NO: 650821 - DNA, 33 bp, Homo sapien
ctcagtaggtcctggtaaattattttcttcaca

SEQ ID NO: 650822 - DNA, 33 bp, Homo sapien
ctcagtaggtcctggttaattattttcttcaca

SEQ ID NO: 650823 - DNA, 33 bp, Homo sapien
tttcttttcactctaactgagcaaacttattca

SEQ ID NO: 650824 - DNA, 33 bp, Homo sapien
tttcttttcactctaattgagcaaacttattca

SEQ ID NO: 650825 - DNA, 33 bp, Homo sapien
actggcgtggaacgaagatatgctgtatatagg

SEQ ID NO: 650826 - DNA, 33 bp, Homo sapien
actggcgtggaacgaatatatgctgtatatagg

SEQ ID NO: 650827 - DNA, 33 bp, Homo sapien
tattattggtgcactacacatgattgaagctga

SEQ ID NO: 650828 - DNA, 33 bp, Homo sapien
tattattggtgcactatacatgattgaagctga

SEQ ID NO: 650829 - DNA, 33 bp, Homo sapien
gtaaatatgagttataaacatagcctacatctt

SEQ ID NO: 650830 - DNA, 33 bp, Homo sapien
gtaaatatgagttatatacatagcctacatctt

SEQ ID NO: 650831 - DNA, 33 bp, Homo sapien
aatcattattcaagatcagataagcatgattac

SEQ ID NO: 650832 - DNA, 33 bp, Homo sapien
aatcattattcaagattagataagcatgattac

SEQ ID NO: 650833 - DNA, 33 bp, Homo sapien
ttgtaacattcaaaatcatcacagcaaccaaaa

SEQ ID NO: 650834 - DNA, 33 bp, Homo sapien
ttgtaacattcaaaatgatcacagcaaccaaaa

SEQ ID NO: 650835 - DNA, 33 bp, Homo sapien
ctgagtcttctcatcactcaattaatgttaata

SEQ ID NO: 650836 - DNA, 33 bp, Homo sapien
ctgagtcttctcatcagtcaattaatgttaata

SEQ ID NO: 650837 - DNA, 33 bp, Homo sapien
ataactaacgcagccaaattatggtgtttctaa

SEQ ID NO: 650838 - DNA, 33 bp, Homo sapien
ataactaacgcagccatattatggtgtttctaa

SEQ ID NO: 650839 - DNA, 33 bp, Homo sapien
tattcaaatacaaaagcctgcaggagcaaaaaa

SEQ ID NO: 650840 - DNA, 33 bp, Homo sapien
tattcaaatacaaaagtctgcaggagcaaaaaa

SEQ ID NO: 650841 - DNA, 33 bp, Homo sapien
ataaaaacattatcatcagctatttttgagaca

SEQ ID NO: 650842 - DNA, 33 bp, Homo sapien
ataaaaacattatcatgagctatttttgagaca

SEQ ID NO: 650843 - DNA, 33 bp, Homo sapien
ttttatatgccaataacgaacaatatgaagaag

SEQ ID NO: 650844 - DNA, 33 bp, Homo sapien
ttttatatgccaataatgaacaatatgaagaag

SEQ ID NO: 650845 - DNA, 33 bp, Homo sapien
aaggtaaagcaccaggcaaaatcttgggtttat

SEQ ID NO: 650846 - DNA, 33 bp, Homo sapien
aaggtaaagcaccagggaaaatcttgggtttat

SEQ ID NO: 650847 - DNA, 33 bp, Homo sapien
ggactttatcattctaactcccatagctgggaa

SEQ ID NO: 650848 - DNA, 33 bp, Homo sapien
ggactttatcattctagctcccatagctgggaa

SEQ ID NO: 650849 - DNA, 33 bp, Homo sapien
gggtgagactctgagaggtactggcttcaagtg

SEQ ID NO: 650850 - DNA, 33 bp, Homo sapien
gggtgagactctgagatgtactggcttcaagtg

SEQ ID NO: 650851 - DNA, 33 bp, Homo sapien
gccttgaagaaagagcaagaatagccaggtgta

SEQ ID NO: 650852 - DNA, 33 bp, Homo sapien
gccttgaagaaagagcgagaatagccaggtgta

SEQ ID NO: 650853 - DNA, 33 bp, Homo sapien
gttcagtacatagtagccaacaaccttgtttgc

SEQ ID NO: 650854 - DNA, 33 bp, Homo sapien
gttcagtacatagtagtcaacaaccttgtttgc

SEQ ID NO: 650855 - DNA, 33 bp, Homo sapien
acatcgattttatttacccgctcccatttcaat

SEQ ID NO: 650856 - DNA, 33 bp, Homo sapien
acatcgattttatttatccgctcccatttcaat

SEQ ID NO: 650857 - DNA, 33 bp, Homo sapien
aaatgcttagagagtacattagtgagattagtg

SEQ ID NO: 650858 - DNA, 33 bp, Homo sapien
aaatgcttagagagtagattagtgagattagtg

SEQ ID NO: 650859 - DNA, 33 bp, Homo sapien
cgccctgctattataacggtagcttcagtgccc

SEQ ID NO: 650860 - DNA, 33 bp, Homo sapien
cgccctgctattataatggtagcttcagtgccc

SEQ ID NO: 650861 - DNA, 33 bp, Homo sapien
tgtctctgatggcgaaacttagtccatcgcacc

SEQ ID NO: 650862 - DNA, 33 bp, Homo sapien
tgtctctgatggcgaagcttagtccatcgcacc

SEQ ID NO: 650863 - DNA, 33 bp, Homo sapien
tgctgcctttgacttaaatgttcaaggtctcca

SEQ ID NO: 650864 - DNA, 33 bp, Homo sapien
tgctgcctttgacttagatgttcaaggtctcca

SEQ ID NO: 650865 - DNA, 33 bp, Homo sapien
ctgtcttgcaggattacagttaaattacacttg

SEQ ID NO: 650866 - DNA, 33 bp, Homo sapien
ctgtcttgcaggattatagttaaattacacttg

SEQ ID NO: 650867 - DNA, 33 bp, Homo sapien
tctctattagttcttaaagtaggaattgtggtt

SEQ ID NO: 650868 - DNA, 33 bp, Homo sapien
tctctattagttcttagagtaggaattgtggtt

SEQ ID NO: 650869 - DNA, 33 bp, Homo sapien
ggaccttataatcagaaaagaaacctatgccca

SEQ ID NO: 650870 - DNA, 33 bp, Homo sapien
ggaccttataatcagagaagaaacctatgccca

SEQ ID NO: 650871 - DNA, 33 bp, Homo sapien
ctctttctgttactaaacatatctcatctagga

SEQ ID NO: 650872 - DNA, 33 bp, Homo sapien
ctctttctgttactaagcatatctcatctagga

SEQ ID NO: 650873 - DNA, 33 bp, Homo sapien
tttagaccagaggaacagaagactgagattaaa

SEQ ID NO: 650874 - DNA, 33 bp, Homo sapien
tttagaccagaggaactgaagactgagattaaa

SEQ ID NO: 650875 - DNA, 33 bp, Homo sapien
ctctggtctaaacaaccgacaataacccataac

SEQ ID NO: 650876 - DNA, 33 bp, Homo sapien
ctctggtctaaacaactgacaataacccataac

SEQ ID NO: 650877 - DNA, 33 bp, Homo sapien
gagagccgtaacattacggaaacacggccaaca

SEQ ID NO: 650878 - DNA, 33 bp, Homo sapien
gagagccgtaacattatggaaacacggccaaca

SEQ ID NO: 650879 - DNA, 33 bp, Homo sapien
ttaagcagcaaacctcacctgagtatgatcaaa

SEQ ID NO: 650880 - DNA, 33 bp, Homo sapien
ttaagcagcaaacctcgcctgagtatgatcaaa

SEQ ID NO: 650881 - DNA, 33 bp, Homo sapien
gtcatgcttcctgggaaattatctaataggttt

SEQ ID NO: 650882 - DNA, 33 bp, Homo sapien
gtcatgcttcctgggatattatctaataggttt

SEQ ID NO: 650883 - DNA, 33 bp, Homo sapien
atatttactgaacaaaatcctcatacactgaac

SEQ ID NO: 650884 - DNA, 33 bp, Homo sapien
atatttactgaacaaagtcctcatacactgaac

SEQ ID NO: 650885 - DNA, 33 bp, Homo sapien
cagctttcacagtggggagtgtaatgcatgatg

SEQ ID NO: 650886 - DNA, 33 bp, Homo sapien
cagctttcacagtgggtagtgtaatgcatgatg

SEQ ID NO: 650887 - DNA, 33 bp, Homo sapien
tttttccggaccattgaacagaaactagttcat

SEQ ID NO: 650888 - DNA, 33 bp, Homo sapien
tttttccggaccattggacagaaactagttcat

SEQ ID NO: 650889 - DNA, 33 bp, Homo sapien
tcccagccttaagtgacactccacctctacctc

SEQ ID NO: 650890 - DNA, 33 bp, Homo sapien
tcccagccttaagtgatactccacctctacctc

SEQ ID NO: 650891 - DNA, 33 bp, Homo sapien
aataaacaacatgggacctctgaagaaaaacag

SEQ ID NO: 650892 - DNA, 33 bp, Homo sapien
aataaacaacatgggatctctgaagaaaaacag

SEQ ID NO: 650893 - DNA, 33 bp, Homo sapien
aaatggtctagctttcacagggtaattaactcc

SEQ ID NO: 650894 - DNA, 33 bp, Homo sapien
aaatggtctagctttctcagggtaattaactcc

SEQ ID NO: 650895 - DNA, 33 bp, Homo sapien
ttatatgttgatttgaatattgcaactttactg

SEQ ID NO: 650896 - DNA, 33 bp, Homo sapien
ttatatgttgatttgagtattgcaactttactg

SEQ ID NO: 650897 - DNA, 33 bp, Homo sapien
ttgttattggtctatcgagtctttatatgtctt

SEQ ID NO: 650898 - DNA, 33 bp, Homo sapien
ttgttattggtctatctagtctttatatgtctt

SEQ ID NO: 650899 - DNA, 33 bp, Homo sapien
attgcttttgctttaacccataggttttggtat

SEQ ID NO: 650900 - DNA, 33 bp, Homo sapien
attgcttttgctttaagccataggttttggtat

SEQ ID NO: 650901 - DNA, 33 bp, Homo sapien
tctttccccaacacaaaatgcaaaataataaat

SEQ ID NO: 650902 - DNA, 33 bp, Homo sapien
tctttccccaacacaagatgcaaaataataaat

SEQ ID NO: 650903 - DNA, 33 bp, Homo sapien
tccctatcctcagtacccagaagaatttttggc

SEQ ID NO: 650904 - DNA, 33 bp, Homo sapien
tccctatcctcagtactcagaagaatttttggc

SEQ ID NO: 650905 - DNA, 33 bp, Homo sapien
cttgagaccagaataacggggaaacatggcaag

SEQ ID NO: 650906 - DNA, 33 bp, Homo sapien
cttgagaccagaataatggggaaacatggcaag

SEQ ID NO: 650907 - DNA, 33 bp, Homo sapien
ttctttggagaaattgaatgatcaaaattttaa

SEQ ID NO: 650908 - DNA, 33 bp, Homo sapien
ttctttggagaaattgcatgatcaaaattttaa

SEQ ID NO: 650909 - DNA, 33 bp, Homo sapien
aaaattttaagcacaacatttattgctggttaa

SEQ ID NO: 650910 - DNA, 33 bp, Homo sapien
aaaattttaagcacaagatttattgctggttaa

SEQ ID NO: 650911 - DNA, 33 bp, Homo sapien
ctgcagaaaactaagaacttcacgtgaaacatt

SEQ ID NO: 650912 - DNA, 33 bp, Homo sapien
ctgcagaaaactaagaccttcacgtgaaacatt

SEQ ID NO: 650913 - DNA, 33 bp, Homo sapien
cctaatttcctgtggcacttaagaaagctttat

SEQ ID NO: 650914 - DNA, 33 bp, Homo sapien
cctaatttcctgtggctcttaagaaagctttat

SEQ ID NO: 650915 - DNA, 33 bp, Homo sapien
tttatataattctacacggcatgatggaacaat

SEQ ID NO: 650916 - DNA, 33 bp, Homo sapien
tttatataattctacatggcatgatggaacaat

SEQ ID NO: 650917 - DNA, 33 bp, Homo sapien
aggataaaggtcaaaaaatttcctgttgggtgc

SEQ ID NO: 650918 - DNA, 33 bp, Homo sapien
aggataaaggtcaaaacatttcctgttgggtgc

SEQ ID NO: 650919 - DNA, 33 bp, Homo sapien
gctggggtctgtttcacacctagtcactttcga

SEQ ID NO: 650920 - DNA, 33 bp, Homo sapien
gctggggtctgtttcatacctagtcactttcga

SEQ ID NO: 650921 - DNA, 33 bp, Homo sapien
ttaagaacacttaaacacatacatttgccaaat

SEQ ID NO: 650922 - DNA, 33 bp, Homo sapien
ttaagaacacttaaacccatacatttgccaaat

SEQ ID NO: 650923 - DNA, 33 bp, Homo sapien
actcataaattcctaacggtgctgcaactacac

SEQ ID NO: 650924 - DNA, 33 bp, Homo sapien
actcataaattcctaatggtgctgcaactacac

SEQ ID NO: 650925 - DNA, 33 bp, Homo sapien
aatttagggaccaaacgcaaaggtttcatccat

SEQ ID NO: 650926 - DNA, 33 bp, Homo sapien
aatttagggaccaaactcaaaggtttcatccat

SEQ ID NO: 650927 - DNA, 33 bp, Homo sapien
aagcccacagtttctacggcctaattatcaggt

SEQ ID NO: 650928 - DNA, 33 bp, Homo sapien
aagcccacagtttctatggcctaattatcaggt

SEQ ID NO: 650929 - DNA, 33 bp, Homo sapien
aaataacaaatcttatcactctaccaaatctgc

SEQ ID NO: 650930 - DNA, 33 bp, Homo sapien
aaataacaaatcttatgactctaccaaatctgc

SEQ ID NO: 650931 - DNA, 33 bp, Homo sapien
tgaggcaggtcaggtacaatttttttgctagat

SEQ ID NO: 650932 - DNA, 33 bp, Homo sapien
tgaggcaggtcaggtataatttttttgctagat

SEQ ID NO: 650933 - DNA, 33 bp, Homo sapien
aagataatgcactttgcaacagcatgtaaatca

SEQ ID NO: 650934 - DNA, 33 bp, Homo sapien
aagataatgcactttgtaacagcatgtaaatca

SEQ ID NO: 650935 - DNA, 33 bp, Homo sapien
acactactaccacagcccctggaatggtagtct

SEQ ID NO: 650936 - DNA, 33 bp, Homo sapien
acactactaccacagctcctggaatggtagtct

SEQ ID NO: 650937 - DNA, 33 bp, Homo sapien
tacagagctattgccccagttaaagtccaatag

SEQ ID NO: 650938 - DNA, 33 bp, Homo sapien
tacagagctattgccctagttaaagtccaatag

SEQ ID NO: 650939 - DNA, 33 bp, Homo sapien
aaatttggtgtatctacgccagaaaatatacca

SEQ ID NO: 650940 - DNA, 33 bp, Homo sapien
aaatttggtgtatctatgccagaaaatatacca

SEQ ID NO: 650941 - DNA, 33 bp, Homo sapien
cactttcttaattatagagacgaatacatcata

SEQ ID NO: 650942 - DNA, 33 bp, Homo sapien
cactttcttaattatatagacgaatacatcata

SEQ ID NO: 650943 - DNA, 33 bp, Homo sapien
ttttccactaaactgaggagagctttttttttt

SEQ ID NO: 650944 - DNA, 33 bp, Homo sapien
ttttccactaaactgatgagagctttttttttt

SEQ ID NO: 650945 - DNA, 33 bp, Homo sapien
cctaactgcttatcctcaaatagacctgctcac

SEQ ID NO: 650946 - DNA, 33 bp, Homo sapien
cctaactgcttatccttaaatagacctgctcac

SEQ ID NO: 650947 - DNA, 33 bp, Homo sapien
aggccaacttctcaaccgttcctgttgctcctc

SEQ ID NO: 650948 - DNA, 33 bp, Homo sapien
aggccaacttctcaactgttcctgttgctcctc

SEQ ID NO: 650949 - DNA, 33 bp, Homo sapien
gaaaaaaatcattaaccatgcttcggatgtgtt

SEQ ID NO: 650950 - DNA, 33 bp, Homo sapien
gaaaaaaatcattaactatgcttcggatgtgtt

SEQ ID NO: 650951 - DNA, 33 bp, Homo sapien
ctgagttgtttggtaacgagcattgctccagga

SEQ ID NO: 650952 - DNA, 33 bp, Homo sapien
ctgagttgtttggtaatgagcattgctccagga

SEQ ID NO: 650953 - DNA, 33 bp, Homo sapien
tatgttcactacagaaatattcacaatagcaaa

SEQ ID NO: 650954 - DNA, 33 bp, Homo sapien
tatgttcactacagaactattcacaatagcaaa

SEQ ID NO: 650955 - DNA, 33 bp, Homo sapien
catggaaaactacacaataatggaaaaaggata

SEQ ID NO: 650956 - DNA, 33 bp, Homo sapien
catggaaaactacacagtaatggaaaaaggata

SEQ ID NO: 650957 - DNA, 33 bp, Homo sapien
gtgtggtatgaaattgaagagtgagatctctgc

SEQ ID NO: 650958 - DNA, 33 bp, Homo sapien
gtgtggtatgaaattgcagagtgagatctctgc

SEQ ID NO: 650959 - DNA, 33 bp, Homo sapien
agagactaaaaattccacacacaataaagatga

SEQ ID NO: 650960 - DNA, 33 bp, Homo sapien
agagactaaaaattccgcacacaataaagatga

SEQ ID NO: 650961 - DNA, 33 bp, Homo sapien
gttgcgaggaagtcagacaggatttaaagtgtc

SEQ ID NO: 650962 - DNA, 33 bp, Homo sapien
gttgcgaggaagtcagtcaggatttaaagtgtc

SEQ ID NO: 650963 - DNA, 33 bp, Homo sapien
gtcttcaggtcaacagaagctcactgggattag

SEQ ID NO: 650964 - DNA, 33 bp, Homo sapien
gtcttcaggtcaacaggagctcactgggattag

SEQ ID NO: 650965 - DNA, 33 bp, Homo sapien
tctcaaagattcgccacgaggtccacaaaactc

SEQ ID NO: 650966 - DNA, 33 bp, Homo sapien
tctcaaagattcgccatgaggtccacaaaactc

SEQ ID NO: 650967 - DNA, 33 bp, Homo sapien
tggagatctgcagatacgtcatttagcctctgc

SEQ ID NO: 650968 - DNA, 33 bp, Homo sapien
tggagatctgcagatatgtcatttagcctctgc

SEQ ID NO: 650969 - DNA, 33 bp, Homo sapien
aagagaagagacaaaactccctcaatgctttgc

SEQ ID NO: 650970 - DNA, 33 bp, Homo sapien
aagagaagagacaaaattccctcaatgctttgc

SEQ ID NO: 650971 - DNA, 33 bp, Homo sapien
agggaagggtgctcacagaggggcccatcctga

SEQ ID NO: 650972 - DNA, 33 bp, Homo sapien
agggaagggtgctcaccgaggggcccatcctga

SEQ ID NO: 650973 - DNA, 33 bp, Homo sapien
aagtagacgtaatttaacaggagttcagatggg

SEQ ID NO: 650974 - DNA, 33 bp, Homo sapien
aagtagacgtaatttatcaggagttcagatggg

SEQ ID NO: 650975 - DNA, 33 bp, Homo sapien
aatctaactcagtctgaattatgtcttcctcac

SEQ ID NO: 650976 - DNA, 33 bp, Homo sapien
aatctaactcagtctggattatgtcttcctcac

SEQ ID NO: 650977 - DNA, 33 bp, Homo sapien
tataataaagtgttgaatacctcgtgtaactta

SEQ ID NO: 650978 - DNA, 33 bp, Homo sapien
tataataaagtgttgactacctcgtgtaactta

SEQ ID NO: 650979 - DNA, 33 bp, Homo sapien
attttcaatttaaaacaggttcattggaacata

SEQ ID NO: 650980 - DNA, 33 bp, Homo sapien
attttcaatttaaaacgggttcattggaacata

SEQ ID NO: 650981 - DNA, 33 bp, Homo sapien
tttgttacagtagtccccgcaaactaatacaga

SEQ ID NO: 650982 - DNA, 33 bp, Homo sapien
tttgttacagtagtcctcgcaaactaatacaga

SEQ ID NO: 650983 - DNA, 33 bp, Homo sapien
atctttagtgatcacacataaaggatgcatcta

SEQ ID NO: 650984 - DNA, 33 bp, Homo sapien
atctttagtgatcacagataaaggatgcatcta

SEQ ID NO: 650985 - DNA, 33 bp, Homo sapien
gggaaaaatgccatacaggaggtaagaacagag

SEQ ID NO: 650986 - DNA, 33 bp, Homo sapien
gggaaaaatgccatacgggaggtaagaacagag

SEQ ID NO: 650987 - DNA, 33 bp, Homo sapien
actgaaattgatacgaaaggttataggaacaca

SEQ ID NO: 650988 - DNA, 33 bp, Homo sapien
actgaaattgatacgagaggttataggaacaca

SEQ ID NO: 650989 - DNA, 33 bp, Homo sapien
caagtaatattatggacgaatggtatgaaggaa

SEQ ID NO: 650990 - DNA, 33 bp, Homo sapien
caagtaatattatggatgaatggtatgaaggaa

SEQ ID NO: 650991 - DNA, 33 bp, Homo sapien
gatttgaagatagctcccaggtttctcatgtag

SEQ ID NO: 650992 - DNA, 33 bp, Homo sapien
gatttgaagatagctctcaggtttctcatgtag

SEQ ID NO: 650993 - DNA, 33 bp, Homo sapien
atgaaaagaatgatggccaataaaacgtgctag

SEQ ID NO: 650994 - DNA, 33 bp, Homo sapien
atgaaaagaatgatggtcaataaaacgtgctag

SEQ ID NO: 650995 - DNA, 33 bp, Homo sapien
tacttttgcactaaccgaataatatcaatgttg

SEQ ID NO: 650996 - DNA, 33 bp, Homo sapien
tacttttgcactaacctaataatatcaatgttg

SEQ ID NO: 650997 - DNA, 33 bp, Homo sapien
aatattgaaatacagcacttttatatggaatct

SEQ ID NO: 650998 - DNA, 33 bp, Homo sapien
aatattgaaatacagcccttttatatggaatct

SEQ ID NO: 650999 - DNA, 33 bp, Homo sapien
ttctagcaacttataccggaaaattcctactta

SEQ ID NO: 651000 - DNA, 33 bp, Homo sapien
ttctagcaacttatactggaaaattcctactta

SEQ ID NO: 651001 - DNA, 33 bp, Homo sapien
cattaggaggtatatcaaagaagtctcatttga

SEQ ID NO: 651002 - DNA, 33 bp, Homo sapien
cattaggaggtatatcgaagaagtctcatttga

SEQ ID NO: 651003 - DNA, 33 bp, Homo sapien
actagctcagataatcaattgctttctagtcat

SEQ ID NO: 651004 - DNA, 33 bp, Homo sapien
actagctcagataatctattgctttctagtcat

SEQ ID NO: 651005 - DNA, 33 bp, Homo sapien
agaccgatcacagaagaagtagtacattatcct

SEQ ID NO: 651006 - DNA, 33 bp, Homo sapien
agaccgatcacagaagtagtagtacattatcct

SEQ ID NO: 651007 - DNA, 33 bp, Homo sapien
gaaaaagctcatcgtaactataacccttgtcat

SEQ ID NO: 651008 - DNA, 33 bp, Homo sapien
gaaaaagctcatcgtagctataacccttgtcat

SEQ ID NO: 651009 - DNA, 33 bp, Homo sapien
atggtgaccacagacccaagaccagctgaggtg

SEQ ID NO: 651010 - DNA, 33 bp, Homo sapien
atggtgaccacagaccgaagaccagctgaggtg

SEQ ID NO: 651011 - DNA, 33 bp, Homo sapien
ttctgttttcagatacaattcttatttccaaac

SEQ ID NO: 651012 - DNA, 33 bp, Homo sapien
ttctgttttcagataccattcttatttccaaac

SEQ ID NO: 651013 - DNA, 33 bp, Homo sapien
aattggaaaagataaaacacattgcctacgaga

SEQ ID NO: 651014 - DNA, 33 bp, Homo sapien
aattggaaaagataaatcacattgcctacgaga

SEQ ID NO: 651015 - DNA, 33 bp, Homo sapien
gaagaacagatttccaatgacagttatgaaagg

SEQ ID NO: 651016 - DNA, 33 bp, Homo sapien
gaagaacagatttccactgacagttatgaaagg

SEQ ID NO: 651017 - DNA, 33 bp, Homo sapien
cagacttacacaggaccagttccagattaatgt

SEQ ID NO: 651018 - DNA, 33 bp, Homo sapien
cagacttacacaggacgagttccagattaatgt

SEQ ID NO: 651019 - DNA, 33 bp, Homo sapien
gtaagtctaaattgaacgcatattggcttctga

SEQ ID NO: 651020 - DNA, 33 bp, Homo sapien
gtaagtctaaattgaatgcatattggcttctga

SEQ ID NO: 651021 - DNA, 33 bp, Homo sapien
gttcttgccatttatcagactcaaaaatctgtg

SEQ ID NO: 651022 - DNA, 33 bp, Homo sapien
gttcttgccatttatccgactcaaaaatctgtg

SEQ ID NO: 651023 - DNA, 33 bp, Homo sapien
caaagaaaaactactcactgtatcataatgatt

SEQ ID NO: 651024 - DNA, 33 bp, Homo sapien
caaagaaaaactactcgctgtatcataatgatt

SEQ ID NO: 651025 - DNA, 33 bp, Homo sapien
cataccacagagcctacggtattactaaacggg

SEQ ID NO: 651026 - DNA, 33 bp, Homo sapien
cataccacagagcctatggtattactaaacggg

SEQ ID NO: 651027 - DNA, 33 bp, Homo sapien
cccattctcaatcatcactgctcacagttagtc

SEQ ID NO: 651028 - DNA, 33 bp, Homo sapien
cccattctcaatcatcgctgctcacagttagtc

SEQ ID NO: 651029 - DNA, 33 bp, Homo sapien
acattaggagaagaaacaaaatggtgtgaagga

SEQ ID NO: 651030 - DNA, 33 bp, Homo sapien
acattaggagaagaaagaaaatggtgtgaagga

SEQ ID NO: 651031 - DNA, 33 bp, Homo sapien
catcaagttgccatgaagctaggagaaaccaat

SEQ ID NO: 651032 - DNA, 33 bp, Homo sapien
catcaagttgccatgaggctaggagaaaccaat

SEQ ID NO: 651033 - DNA, 33 bp, Homo sapien
tgtagaggtaagataaattagaatatgggctct

SEQ ID NO: 651034 - DNA, 33 bp, Homo sapien
tgtagaggtaagataagttagaatatgggctct

SEQ ID NO: 651035 - DNA, 33 bp, Homo sapien
gggacacacaatggaaagcccaaaattgtcatc

SEQ ID NO: 651036 - DNA, 33 bp, Homo sapien
gggacacacaatggaaggcccaaaattgtcatc

SEQ ID NO: 651037 - DNA, 33 bp, Homo sapien
taaacaaagggtaataaattggaagagcagtag

SEQ ID NO: 651038 - DNA, 33 bp, Homo sapien
taaacaaagggtaatacattggaagagcagtag

SEQ ID NO: 651039 - DNA, 33 bp, Homo sapien
taaacttttcttaatacgtggcaatggttcaac

SEQ ID NO: 651040 - DNA, 33 bp, Homo sapien
taaacttttcttaatatgtggcaatggttcaac

SEQ ID NO: 651041 - DNA, 33 bp, Homo sapien
acaaaacaacatttaccctgaggaaggaacact

SEQ ID NO: 651042 - DNA, 33 bp, Homo sapien
acaaaacaacatttacgctgaggaaggaacact

SEQ ID NO: 651043 - DNA, 33 bp, Homo sapien
tgctttgctttcagtaacattagctgaagtaat

SEQ ID NO: 651044 - DNA, 33 bp, Homo sapien
tgctttgctttcagtagcattagctgaagtaat

SEQ ID NO: 651045 - DNA, 33 bp, Homo sapien
ctcagcacctcaattactaaatgtatccacaga

SEQ ID NO: 651046 - DNA, 33 bp, Homo sapien
ctcagcacctcaattattaaatgtatccacaga

SEQ ID NO: 651047 - DNA, 33 bp, Homo sapien
ttcaaaagatgacaacaaaatgacactttctaa

SEQ ID NO: 651048 - DNA, 33 bp, Homo sapien
ttcaaaagatgacaacgaaatgacactttctaa

SEQ ID NO: 651049 - DNA, 33 bp, Homo sapien
tttttctgatatttaacgtaccaacatatgata

SEQ ID NO: 651050 - DNA, 33 bp, Homo sapien
tttttctgatatttaatgtaccaacatatgata

SEQ ID NO: 651051 - DNA, 33 bp, Homo sapien
aatctggcttcatgttaaaaaaagaattgtcaa

SEQ ID NO: 651052 - DNA, 33 bp, Homo sapien
aatctggcttcatgtttaaaaaagaattgtcaa

SEQ ID NO: 651053 - DNA, 33 bp, Homo sapien
tttgacgtctatgtacagaaaggtgagtgtctt

SEQ ID NO: 651054 - DNA, 33 bp, Homo sapien
tttgacgtctatgtacggaaaggtgagtgtctt

SEQ ID NO: 651055 - DNA, 33 bp, Homo sapien
aacatagtatgaaagccccatgtcttagcctgt

SEQ ID NO: 651056 - DNA, 33 bp, Homo sapien
aacatagtatgaaagctccatgtcttagcctgt

SEQ ID NO: 651057 - DNA, 33 bp, Homo sapien
cctgaaataccacttggaggggcagtaatgtgt

SEQ ID NO: 651058 - DNA, 33 bp, Homo sapien
cctgaaataccacttgtaggggcagtaatgtgt

SEQ ID NO: 651059 - DNA, 33 bp, Homo sapien
ggcagtaatgtgtagcacttatgaggacggggc

SEQ ID NO: 651060 - DNA, 33 bp, Homo sapien
ggcagtaatgtgtagcgcttatgaggacggggc

SEQ ID NO: 651061 - DNA, 33 bp, Homo sapien
cattaatttagtagcgaaactcttcatatccat

SEQ ID NO: 651062 - DNA, 33 bp, Homo sapien
cattaatttagtagcggaactcttcatatccat

SEQ ID NO: 651063 - DNA, 33 bp, Homo sapien
actatactacttactcaaggccttcagacacta

SEQ ID NO: 651064 - DNA, 33 bp, Homo sapien
actatactacttactcgaggccttcagacacta

SEQ ID NO: 651065 - DNA, 33 bp, Homo sapien
cttcaggggtttgaataagaacagccacaataa

SEQ ID NO: 651066 - DNA, 33 bp, Homo sapien
cttcaggggtttgaatgagaacagccacaataa

SEQ ID NO: 651067 - DNA, 33 bp, Homo sapien
aaaaagctgtcttctcaaactggcactggataa

SEQ ID NO: 651068 - DNA, 33 bp, Homo sapien
aaaaagctgtcttctctaactggcactggataa

SEQ ID NO: 651069 - DNA, 33 bp, Homo sapien
ctaaaactctcactcaacttcaaactggactac

SEQ ID NO: 651070 - DNA, 33 bp, Homo sapien
ctaaaactctcactcagcttcaaactggactac

SEQ ID NO: 651071 - DNA, 33 bp, Homo sapien
tctgagtgtatctaccacatttaaaattctctg

SEQ ID NO: 651072 - DNA, 33 bp, Homo sapien
tctgagtgtatctaccgcatttaaaattctctg

SEQ ID NO: 651073 - DNA, 33 bp, Homo sapien
agagataggagaatacacttttggtaactagaa

SEQ ID NO: 651074 - DNA, 33 bp, Homo sapien
agagataggagaatacccttttggtaactagaa

SEQ ID NO: 651075 - DNA, 33 bp, Homo sapien
atataaattgtgtatccaatcccaacgctaatg

SEQ ID NO: 651076 - DNA, 33 bp, Homo sapien
atataaattgtgtatcgaatcccaacgctaatg

SEQ ID NO: 651077 - DNA, 33 bp, Homo sapien
ccatttgcagtccatcactaagtgctacaaaat

SEQ ID NO: 651078 - DNA, 33 bp, Homo sapien
ccatttgcagtccatcgctaagtgctacaaaat

SEQ ID NO: 651079 - DNA, 33 bp, Homo sapien
tggtgttaaatgaagcgaaccaatttccacttt

SEQ ID NO: 651080 - DNA, 33 bp, Homo sapien
tggtgttaaatgaagctaaccaatttccacttt

SEQ ID NO: 651081 - DNA, 33 bp, Homo sapien
ggttgttaacatggggaatagaccacaacagaa

SEQ ID NO: 651082 - DNA, 33 bp, Homo sapien
ggttgttaacatggggcatagaccacaacagaa

SEQ ID NO: 651083 - DNA, 33 bp, Homo sapien
tcatcatgtctaaatccgaactcttgatcctcc

SEQ ID NO: 651084 - DNA, 33 bp, Homo sapien
tcatcatgtctaaatctgaactcttgatcctcc

SEQ ID NO: 651085 - DNA, 33 bp, Homo sapien
aagcaaatggcagtgccaagtaggagacacaag

SEQ ID NO: 651086 - DNA, 33 bp, Homo sapien
aagcaaatggcagtgctaagtaggagacacaag

SEQ ID NO: 651087 - DNA, 33 bp, Homo sapien
atcaagaagaatttagccagcattgaacatatt

SEQ ID NO: 651088 - DNA, 33 bp, Homo sapien
atcaagaagaatttagtcagcattgaacatatt

SEQ ID NO: 651089 - DNA, 33 bp, Homo sapien
acatttaacactctcaatccagtagaaactatc

SEQ ID NO: 651090 - DNA, 33 bp, Homo sapien
acatttaacactctcagtccagtagaaactatc

SEQ ID NO: 651091 - DNA, 33 bp, Homo sapien
taccaatggtgtgtgaagaatggctcaaggaga

SEQ ID NO: 651092 - DNA, 33 bp, Homo sapien
taccaatggtgtgtgaggaatggctcaaggaga

SEQ ID NO: 651093 - DNA, 33 bp, Homo sapien
aattaagtgctttaccagaagtggtacggtaaa

SEQ ID NO: 651094 - DNA, 33 bp, Homo sapien
aattaagtgctttaccggaagtggtacggtaaa

SEQ ID NO: 651095 - DNA, 33 bp, Homo sapien
taaaatacatcctgtcactatttaccaccaggt

SEQ ID NO: 651096 - DNA, 33 bp, Homo sapien
taaaatacatcctgtcgctatttaccaccaggt

SEQ ID NO: 651097 - DNA, 33 bp, Homo sapien
catgagttggtacaaacgacttaaaatttacat

SEQ ID NO: 651098 - DNA, 33 bp, Homo sapien
catgagttggtacaaatgacttaaaatttacat

SEQ ID NO: 651099 - DNA, 33 bp, Homo sapien
tagaaagaaagataaaggaaataacctgctatt

SEQ ID NO: 651100 - DNA, 33 bp, Homo sapien
tagaaagaaagataaatgaaataacctgctatt

SEQ ID NO: 651101 - DNA, 33 bp, Homo sapien
ggacattgacaatgacactcacttggagaagaa

SEQ ID NO: 651102 - DNA, 33 bp, Homo sapien
ggacattgacaatgacgctcacttggagaagaa

SEQ ID NO: 651103 - DNA, 33 bp, Homo sapien
gcaaaacttccaccataagtatatctaactctc

SEQ ID NO: 651104 - DNA, 33 bp, Homo sapien
gcaaaacttccaccattagtatatctaactctc

SEQ ID NO: 651105 - DNA, 33 bp, Homo sapien
gttataacatatagcacagagataagggaccag

SEQ ID NO: 651106 - DNA, 33 bp, Homo sapien
gttataacatatagcagagagataagggaccag

SEQ ID NO: 651107 - DNA, 33 bp, Homo sapien
cagtgtgtgtacaaatcagaagaagctagattt

SEQ ID NO: 651108 - DNA, 33 bp, Homo sapien
cagtgtgtgtacaaatgagaagaagctagattt

SEQ ID NO: 651109 - DNA, 33 bp, Homo sapien
tcttttgatccctgtcacctagtcttttctttt

SEQ ID NO: 651110 - DNA, 33 bp, Homo sapien
tcttttgatccctgtctcctagtcttttctttt

SEQ ID NO: 651111 - DNA, 33 bp, Homo sapien
tgaatagatatggaaaacataggaaagagaagc

SEQ ID NO: 651112 - DNA, 33 bp, Homo sapien
tgaatagatatggaaagcataggaaagagaagc

SEQ ID NO: 651113 - DNA, 33 bp, Homo sapien
cattaacgctttgcaacttctggctttaaagaa

SEQ ID NO: 651114 - DNA, 33 bp, Homo sapien
cattaacgctttgcaatttctggctttaaagaa

SEQ ID NO: 651115 - DNA, 33 bp, Homo sapien
tctttaaagccagaaagtgcaaagcgttaatgg

SEQ ID NO: 651116 - DNA, 33 bp, Homo sapien
tctttaaagccagaaattgcaaagcgttaatgg

SEQ ID NO: 651117 - DNA, 33 bp, Homo sapien
tctttcttatattatggcagtaactgatggaag

SEQ ID NO: 651118 - DNA, 33 bp, Homo sapien
tctttcttatattatgtcagtaactgatggaag

SEQ ID NO: 651119 - DNA, 33 bp, Homo sapien
tatatgtaatagcaaaataatatctattgagtc

SEQ ID NO: 651120 - DNA, 33 bp, Homo sapien
tatatgtaatagcaaagtaatatctattgagtc

SEQ ID NO: 651121 - DNA, 33 bp, Homo sapien
cccaaatgtgccttgaagtcagacctgatattg

SEQ ID NO: 651122 - DNA, 33 bp, Homo sapien
cccaaatgtgccttgaggtcagacctgatattg

SEQ ID NO: 651123 - DNA, 33 bp, Homo sapien
cgaacccccagaaaaccgacctgtatattcaat

SEQ ID NO: 651124 - DNA, 33 bp, Homo sapien
cgaacccccagaaaactgacctgtatattcaat

SEQ ID NO: 651125 - DNA, 33 bp, Homo sapien
atggaacaagtgtgtacggttgggcgagagtga

SEQ ID NO: 651126 - DNA, 33 bp, Homo sapien
atggaacaagtgtgtatggttgggcgagagtga

SEQ ID NO: 651127 - DNA, 33 bp, Homo sapien
tcccacaatcactcacactcagtgtcctccatt

SEQ ID NO: 651128 - DNA, 33 bp, Homo sapien
tcccacaatcactcacgctcagtgtcctccatt

SEQ ID NO: 651129 - DNA, 33 bp, Homo sapien
gataaaaactactccactatcggagcctgttct

SEQ ID NO: 651130 - DNA, 33 bp, Homo sapien
gataaaaactactccattatcggagcctgttct

SEQ ID NO: 651131 - DNA, 33 bp, Homo sapien
tgtgtgttggggaggaatagggatgaattcagt

SEQ ID NO: 651132 - DNA, 33 bp, Homo sapien
tgtgtgttggggaggactagggatgaattcagt

SEQ ID NO: 651133 - DNA, 33 bp, Homo sapien
agcttgaattttcaggacaaagtatcaacaagg

SEQ ID NO: 651134 - DNA, 33 bp, Homo sapien
agcttgaattttcagggcaaagtatcaacaagg

SEQ ID NO: 651135 - DNA, 33 bp, Homo sapien
gctgtagcacaattccaataaagtttaaggtca

SEQ ID NO: 651136 - DNA, 33 bp, Homo sapien
gctgtagcacaattccgataaagtttaaggtca

SEQ ID NO: 651137 - DNA, 33 bp, Homo sapien
aaccatcacaccttcaaaagggtcagatgaatg

SEQ ID NO: 651138 - DNA, 33 bp, Homo sapien
aaccatcacaccttcataagggtcagatgaatg

SEQ ID NO: 651139 - DNA, 33 bp, Homo sapien
taaaacaaaaatcataaggacaaaaatctgctg

SEQ ID NO: 651140 - DNA, 33 bp, Homo sapien
taaaacaaaaatcatagggacaaaaatctgctg

SEQ ID NO: 651141 - DNA, 33 bp, Homo sapien
aacctatccaacaaccactttgtcttttgtgct

SEQ ID NO: 651142 - DNA, 33 bp, Homo sapien
aacctatccaacaaccgctttgtcttttgtgct

SEQ ID NO: 651143 - DNA, 33 bp, Homo sapien
ttgttcatgtctcttcaacttcacatggccttg

SEQ ID NO: 651144 - DNA, 33 bp, Homo sapien
ttgttcatgtctcttcgacttcacatggccttg

SEQ ID NO: 651145 - DNA, 33 bp, Homo sapien
ccaataatttagattccatgtcaaatttcttct

SEQ ID NO: 651146 - DNA, 33 bp, Homo sapien
ccaataatttagattcgatgtcaaatttcttct

SEQ ID NO: 651147 - DNA, 33 bp, Homo sapien
ctcttccatgccagaacctaaagtcattttaag

SEQ ID NO: 651148 - DNA, 33 bp, Homo sapien
ctcttccatgccagaatctaaagtcattttaag

SEQ ID NO: 651149 - DNA, 33 bp, Homo sapien
gggtgaagattgagcccaaagtgaggcttaagc

SEQ ID NO: 651150 - DNA, 33 bp, Homo sapien
gggtgaagattgagcctaaagtgaggcttaagc

SEQ ID NO: 651151 - DNA, 33 bp, Homo sapien
caacttttatttttccagacacaagagaaaact

SEQ ID NO: 651152 - DNA, 33 bp, Homo sapien
caacttttatttttccggacacaagagaaaact

SEQ ID NO: 651153 - DNA, 33 bp, Homo sapien
agaacttggatggagcaacaagggagagaactt

SEQ ID NO: 651154 - DNA, 33 bp, Homo sapien
agaacttggatggagcgacaagggagagaactt

SEQ ID NO: 651155 - DNA, 33 bp, Homo sapien
ggtgagtgaactctgcaatctggtggagaggga

SEQ ID NO: 651156 - DNA, 33 bp, Homo sapien
ggtgagtgaactctgcgatctggtggagaggga

SEQ ID NO: 651157 - DNA, 33 bp, Homo sapien
aaatttgtttgctaagccatagtcaaatgaact

SEQ ID NO: 651158 - DNA, 33 bp, Homo sapien
aaatttgtttgctaaggcatagtcaaatgaact

SEQ ID NO: 651159 - DNA, 33 bp, Homo sapien
acttaagagctctaaactgaaaaacctggattg

SEQ ID NO: 651160 - DNA, 33 bp, Homo sapien
acttaagagctctaaagtgaaaaacctggattg

SEQ ID NO: 651161 - DNA, 33 bp, Homo sapien
caatcagggtgataaaagaaaatgtaactagag

SEQ ID NO: 651162 - DNA, 33 bp, Homo sapien
caatcagggtgataaaggaaaatgtaactagag

SEQ ID NO: 651163 - DNA, 33 bp, Homo sapien
tatccagtctaccaccaatcagcacttaagttg

SEQ ID NO: 651164 - DNA, 33 bp, Homo sapien
tatccagtctaccaccgatcagcacttaagttg

SEQ ID NO: 651165 - DNA, 33 bp, Homo sapien
actcaactaggagataagacgtttggactttga

SEQ ID NO: 651166 - DNA, 33 bp, Homo sapien
actcaactaggagataggacgtttggactttga

SEQ ID NO: 651167 - DNA, 33 bp, Homo sapien
tcgttagtgtactttacgtatggctcaagacaa

SEQ ID NO: 651168 - DNA, 33 bp, Homo sapien
tcgttagtgtactttatgtatggctcaagacaa

SEQ ID NO: 651169 - DNA, 33 bp, Homo sapien
aattagaagatagctccgagaaaataattttta

SEQ ID NO: 651170 - DNA, 33 bp, Homo sapien
aattagaagatagctcggagaaaataattttta

SEQ ID NO: 651171 - DNA, 33 bp, Homo sapien
cctgaacttaggcaggctatcccaagaaaaagc

SEQ ID NO: 651172 - DNA, 33 bp, Homo sapien
cctgaacttaggcaggttatcccaagaaaaagc

SEQ ID NO: 651173 - DNA, 33 bp, Homo sapien
ctctttcttgtagtctaaaagtaatgtaagtat

SEQ ID NO: 651174 - DNA, 33 bp, Homo sapien
ctctttcttgtagtcttaaagtaatgtaagtat

SEQ ID NO: 651175 - DNA, 33 bp, Homo sapien
ttgccctggcgataaacagatgaaagattttcc

SEQ ID NO: 651176 - DNA, 33 bp, Homo sapien
ttgccctggcgataaatagatgaaagattttcc

SEQ ID NO: 651177 - DNA, 33 bp, Homo sapien
gcttccttcagcctgaaaccttgcctacattat

SEQ ID NO: 651178 - DNA, 33 bp, Homo sapien
gcttccttcagcctgagaccttgcctacattat

SEQ ID NO: 651179 - DNA, 33 bp, Homo sapien
tcactttacttccttaccacaaggctcatcaag

SEQ ID NO: 651180 - DNA, 33 bp, Homo sapien
tcactttacttccttagcacaaggctcatcaag

SEQ ID NO: 651181 - DNA, 33 bp, Homo sapien
ctcaggttcctcctcaataggttggaccagttt

SEQ ID NO: 651182 - DNA, 33 bp, Homo sapien
ctcaggttcctcctcagtaggttggaccagttt

SEQ ID NO: 651183 - DNA, 33 bp, Homo sapien
gctacagatgaaaaaaaacaatagtgataataa

SEQ ID NO: 651184 - DNA, 33 bp, Homo sapien
gctacagatgaaaaaacacaatagtgataataa

SEQ ID NO: 651185 - DNA, 33 bp, Homo sapien
ccgatatctcccttcactatctacccccaaaaa

SEQ ID NO: 651186 - DNA, 33 bp, Homo sapien
ccgatatctcccttcattatctacccccaaaaa

SEQ ID NO: 651187 - DNA, 33 bp, Homo sapien
aaagtctgtgatctgacgtaaaagacttggcaa

SEQ ID NO: 651188 - DNA, 33 bp, Homo sapien
aaagtctgtgatctgatgtaaaagacttggcaa

SEQ ID NO: 651189 - DNA, 33 bp, Homo sapien
cttagatcaggttagcagatgaaaagtctgaat

SEQ ID NO: 651190 - DNA, 33 bp, Homo sapien
cttagatcaggttagcggatgaaaagtctgaat

SEQ ID NO: 651191 - DNA, 33 bp, Homo sapien
tctggcattcctattacgttcatggtatatctt

SEQ ID NO: 651192 - DNA, 33 bp, Homo sapien
tctggcattcctattatgttcatggtatatctt

SEQ ID NO: 651193 - DNA, 33 bp, Homo sapien
tctttttacatcttgactattttccttaaacat

SEQ ID NO: 651194 - DNA, 33 bp, Homo sapien
tctttttacatcttgattattttccttaaacat

SEQ ID NO: 651195 - DNA, 33 bp, Homo sapien
ggtctgctgcacaagcacgaggttattgctctg

SEQ ID NO: 651196 - DNA, 33 bp, Homo sapien
ggtctgctgcacaagcgcgaggttattgctctg

SEQ ID NO: 651197 - DNA, 33 bp, Homo sapien
cagctgtacgtagtaagagtaccacccatcttt

SEQ ID NO: 651198 - DNA, 33 bp, Homo sapien
cagctgtacgtagtaatagtaccacccatcttt

SEQ ID NO: 651199 - DNA, 33 bp, Homo sapien
cacatcaagactagggaataagagcaaaggccc

SEQ ID NO: 651200 - DNA, 33 bp, Homo sapien
cacatcaagactaggggataagagcaaaggccc

SEQ ID NO: 651201 - DNA, 33 bp, Homo sapien
aggcagcttggctgaaacggaaaaagtgataaa

SEQ ID NO: 651202 - DNA, 33 bp, Homo sapien
aggcagcttggctgaagcggaaaaagtgataaa

SEQ ID NO: 651203 - DNA, 33 bp, Homo sapien
aactcctgtgataccacgaagtcttcgggaggc

SEQ ID NO: 651204 - DNA, 33 bp, Homo sapien
aactcctgtgataccatgaagtcttcgggaggc

SEQ ID NO: 651205 - DNA, 33 bp, Homo sapien
tgttttataggtataccgaacacaattttcaat

SEQ ID NO: 651206 - DNA, 33 bp, Homo sapien
tgttttataggtatactgaacacaattttcaat

SEQ ID NO: 651207 - DNA, 33 bp, Homo sapien
tcatacaagtcaaagacaaactaaaggatacag

SEQ ID NO: 651208 - DNA, 33 bp, Homo sapien
tcatacaagtcaaagataaactaaaggatacag

SEQ ID NO: 651209 - DNA, 33 bp, Homo sapien
tctcacacacaatgtacgcttgattccaaaaat

SEQ ID NO: 651210 - DNA, 33 bp, Homo sapien
tctcacacacaatgtatgcttgattccaaaaat

SEQ ID NO: 651211 - DNA, 33 bp, Homo sapien
acctttagttgttgaacgcctacttcgagtaag

SEQ ID NO: 651212 - DNA, 33 bp, Homo sapien
acctttagttgttgaatgcctacttcgagtaag

SEQ ID NO: 651213 - DNA, 33 bp, Homo sapien
cacagtatagtgcctgcaatgagaacaattaga

SEQ ID NO: 651214 - DNA, 33 bp, Homo sapien
cacagtatagtgcctgtaatgagaacaattaga

SEQ ID NO: 651215 - DNA, 33 bp, Homo sapien
gcacgtggaatctaaccccttgtagccctgact

SEQ ID NO: 651216 - DNA, 33 bp, Homo sapien
gcacgtggaatctaactccttgtagccctgact

SEQ ID NO: 651217 - DNA, 33 bp, Homo sapien
acttgaagttgcttaaccctagaggttcataac

SEQ ID NO: 651218 - DNA, 33 bp, Homo sapien
acttgaagttgcttaagcctagaggttcataac

SEQ ID NO: 651219 - DNA, 33 bp, Homo sapien
cctagaaaagccactccgaaaggtgatctgaaa

SEQ ID NO: 651220 - DNA, 33 bp, Homo sapien
cctagaaaagccactctgaaaggtgatctgaaa

SEQ ID NO: 651221 - DNA, 33 bp, Homo sapien
ttggactgtagaatgaagtaaacaaaaaaaagt

SEQ ID NO: 651222 - DNA, 33 bp, Homo sapien
ttggactgtagaatgaggtaaacaaaaaaaagt

SEQ ID NO: 651223 - DNA, 33 bp, Homo sapien
acacccactcccatcacattgagaagaattgta

SEQ ID NO: 651224 - DNA, 33 bp, Homo sapien
acacccactcccatcatattgagaagaattgta

SEQ ID NO: 651225 - DNA, 33 bp, Homo sapien
atgacacatgccttcacgggctgtattagaaat

SEQ ID NO: 651226 - DNA, 33 bp, Homo sapien
atgacacatgccttcatgggctgtattagaaat

SEQ ID NO: 651227 - DNA, 33 bp, Homo sapien
tatatttcatattttcaaagagtcttgagggca

SEQ ID NO: 651228 - DNA, 33 bp, Homo sapien
tatatttcatattttcgaagagtcttgagggca

SEQ ID NO: 651229 - DNA, 33 bp, Homo sapien
gtggccacaactgagacgatcaagagaactata

SEQ ID NO: 651230 - DNA, 33 bp, Homo sapien
gtggccacaactgagatgatcaagagaactata

SEQ ID NO: 651231 - DNA, 33 bp, Homo sapien
attaaaattgagaaatcagagcttcttatgcta

SEQ ID NO: 651232 - DNA, 33 bp, Homo sapien
attaaaattgagaaattagagcttcttatgcta

SEQ ID NO: 651233 - DNA, 33 bp, Homo sapien
tttggctagggtagtaaaggacactttgcttgc

SEQ ID NO: 651234 - DNA, 33 bp, Homo sapien
tttggctagggtagtagaggacactttgcttgc

SEQ ID NO: 651235 - DNA, 33 bp, Homo sapien
atattgcaaacatactaactgaaatacagccaa

SEQ ID NO: 651236 - DNA, 33 bp, Homo sapien
atattgcaaacatactgactgaaatacagccaa

SEQ ID NO: 651237 - DNA, 33 bp, Homo sapien
gagctctaggttccacgcctgctgcctctattg

SEQ ID NO: 651238 - DNA, 33 bp, Homo sapien
gagctctaggttccactcctgctgcctctattg

SEQ ID NO: 651239 - DNA, 33 bp, Homo sapien
acctgggaatattaaaacttccatctgtaaaac

SEQ ID NO: 651240 - DNA, 33 bp, Homo sapien
acctgggaatattaaagcttccatctgtaaaac

SEQ ID NO: 651241 - DNA, 33 bp, Homo sapien
catagatttatagacaggaaaagttaagttcta

SEQ ID NO: 651242 - DNA, 33 bp, Homo sapien
catagatttatagacatgaaaagttaagttcta

SEQ ID NO: 651243 - DNA, 33 bp, Homo sapien
ttaaattaacccggaagctagaatcagagggat

SEQ ID NO: 651244 - DNA, 33 bp, Homo sapien
ttaaattaacccggaatctagaatcagagggat

SEQ ID NO: 651245 - DNA, 33 bp, Homo sapien
gagttaccacactgggccaggattagaattctt

SEQ ID NO: 651246 - DNA, 33 bp, Homo sapien
gagttaccacactggggcaggattagaattctt

SEQ ID NO: 651247 - DNA, 33 bp, Homo sapien
cctccaaatgaataccaaagttagattttgcat

SEQ ID NO: 651248 - DNA, 33 bp, Homo sapien
cctccaaatgaataccgaagttagattttgcat

SEQ ID NO: 651249 - DNA, 33 bp, Homo sapien
tcaaaagttttagtaaatagcaagttttctaaa

SEQ ID NO: 651250 - DNA, 33 bp, Homo sapien
tcaaaagttttagtaattagcaagttttctaaa

SEQ ID NO: 651251 - DNA, 33 bp, Homo sapien
caacctgtcaaatgcaagagtagcaaatttgga

SEQ ID NO: 651252 - DNA, 33 bp, Homo sapien
caacctgtcaaatgcaggagtagcaaatttgga

SEQ ID NO: 651253 - DNA, 33 bp, Homo sapien
cagcctggattgagtaaccatttcatgctggag

SEQ ID NO: 651254 - DNA, 33 bp, Homo sapien
cagcctggattgagtagccatttcatgctggag

SEQ ID NO: 651255 - DNA, 33 bp, Homo sapien
ctgacaaaggtcccacaaaatgattatttataa

SEQ ID NO: 651256 - DNA, 33 bp, Homo sapien
ctgacaaaggtcccacgaaatgattatttataa

SEQ ID NO: 651257 - DNA, 33 bp, Homo sapien
ggctttagttttatacagaagctgtagaggaaa

SEQ ID NO: 651258 - DNA, 33 bp, Homo sapien
ggctttagttttatacggaagctgtagaggaaa

SEQ ID NO: 651259 - DNA, 33 bp, Homo sapien
gggagtgaccagaataccgaagaacctagaaaa

SEQ ID NO: 651260 - DNA, 33 bp, Homo sapien
gggagtgaccagaatagcgaagaacctagaaaa

SEQ ID NO: 651261 - DNA, 33 bp, Homo sapien
catctcctcattttgcagatgaagaaatggaag

SEQ ID NO: 651262 - DNA, 33 bp, Homo sapien
catctcctcattttgcggatgaagaaatggaag

SEQ ID NO: 651263 - DNA, 33 bp, Homo sapien
ggcttactggctaccaccttatcttaccggatt

SEQ ID NO: 651264 - DNA, 33 bp, Homo sapien
ggcttactggctaccatcttatcttaccggatt

SEQ ID NO: 651265 - DNA, 33 bp, Homo sapien
cactgaagcgaaacaccgtattccaaatgagtc

SEQ ID NO: 651266 - DNA, 33 bp, Homo sapien
cactgaagcgaaacactgtattccaaatgagtc

SEQ ID NO: 651267 - DNA, 33 bp, Homo sapien
gtatatatgtggttcaatattttcatctttttt

SEQ ID NO: 651268 - DNA, 33 bp, Homo sapien
gtatatatgtggttcagtattttcatctttttt

SEQ ID NO: 651269 - DNA, 33 bp, Homo sapien
gcctcatacacattacacaatttgtagtactga

SEQ ID NO: 651270 - DNA, 33 bp, Homo sapien
gcctcatacacattacgcaatttgtagtactga

SEQ ID NO: 651271 - DNA, 33 bp, Homo sapien
ctacacactgtagaaactggatatcactttctg

SEQ ID NO: 651272 - DNA, 33 bp, Homo sapien
ctacacactgtagaaattggatatcactttctg

SEQ ID NO: 651273 - DNA, 33 bp, Homo sapien
gacagagtgatggtcaaaagttcatatacttta

SEQ ID NO: 651274 - DNA, 33 bp, Homo sapien
gacagagtgatggtcagaagttcatatacttta

SEQ ID NO: 651275 - DNA, 33 bp, Homo sapien
tgctgttcccagtgtgaaggtttaattaattta

SEQ ID NO: 651276 - DNA, 33 bp, Homo sapien
tgctgttcccagtgtggaggtttaattaattta

SEQ ID NO: 651277 - DNA, 33 bp, Homo sapien
attatggattactcaacgaagacagtgactcaa

SEQ ID NO: 651278 - DNA, 33 bp, Homo sapien
attatggattactcaatgaagacagtgactcaa

SEQ ID NO: 651279 - DNA, 33 bp, Homo sapien
tatgctgcgtgaacagcagtcacttaacaaatg

SEQ ID NO: 651280 - DNA, 33 bp, Homo sapien
tatgctgcgtgaacagtagtcacttaacaaatg

SEQ ID NO: 651281 - DNA, 33 bp, Homo sapien
gtgatgagggggtaaacagaggcaatggaatct

SEQ ID NO: 651282 - DNA, 33 bp, Homo sapien
gtgatgagggggtaaagagaggcaatggaatct

SEQ ID NO: 651283 - DNA, 33 bp, Homo sapien
aagggtagtgagacaaggacttaggaatcctac

SEQ ID NO: 651284 - DNA, 33 bp, Homo sapien
aagggtagtgagacaatgacttaggaatcctac

SEQ ID NO: 651285 - DNA, 33 bp, Homo sapien
ctcttttaaaaagtaccagagtggccaggtgcc

SEQ ID NO: 651286 - DNA, 33 bp, Homo sapien
ctcttttaaaaagtacgagagtggccaggtgcc

SEQ ID NO: 651287 - DNA, 33 bp, Homo sapien
atttcacccagcatgaagcaagtataaaacaaa

SEQ ID NO: 651288 - DNA, 33 bp, Homo sapien
atttcacccagcatgacgcaagtataaaacaaa

SEQ ID NO: 651289 - DNA, 33 bp, Homo sapien
tgtgtggctgactcaagaatacaagaagttatt

SEQ ID NO: 651290 - DNA, 33 bp, Homo sapien
tgtgtggctgactcaataatacaagaagttatt

SEQ ID NO: 651291 - DNA, 33 bp, Homo sapien
tcggctgacaaaccaaagaagtctgagatctta

SEQ ID NO: 651292 - DNA, 33 bp, Homo sapien
tcggctgacaaaccaaggaagtctgagatctta

SEQ ID NO: 651293 - DNA, 33 bp, Homo sapien
ctctaacaatgacagaacttcaggtgaagatgc

SEQ ID NO: 651294 - DNA, 33 bp, Homo sapien
ctctaacaatgacagagcttcaggtgaagatgc

SEQ ID NO: 651295 - DNA, 33 bp, Homo sapien
cgtaaaccgtctataaatctccagaatgcactg

SEQ ID NO: 651296 - DNA, 33 bp, Homo sapien
cgtaaaccgtctataattctccagaatgcactg

SEQ ID NO: 651297 - DNA, 33 bp, Homo sapien
acaactggactaggtgaaacggtgatttaaata

SEQ ID NO: 651298 - DNA, 33 bp, Homo sapien
acaactggactaggtggaacggtgatttaaata

SEQ ID NO: 651299 - DNA, 33 bp, Homo sapien
ttccttgtgcgaatcacaatgcattttagactc

SEQ ID NO: 651300 - DNA, 33 bp, Homo sapien
ttccttgtgcgaatcagaatgcattttagactc

SEQ ID NO: 651301 - DNA, 33 bp, Homo sapien
acctgagggaatagacaataggtatcaaatatt

SEQ ID NO: 651302 - DNA, 33 bp, Homo sapien
acctgagggaatagacgataggtatcaaatatt

SEQ ID NO: 651303 - DNA, 33 bp, Homo sapien
tagctccctatcctgcaacagatcccagtgtgt

SEQ ID NO: 651304 - DNA, 33 bp, Homo sapien
tagctccctatcctgcgacagatcccagtgtgt

SEQ ID NO: 651305 - DNA, 33 bp, Homo sapien
tggctatttcaatttaacaatatctttctaaga

SEQ ID NO: 651306 - DNA, 33 bp, Homo sapien
tggctatttcaatttagcaatatctttctaaga

SEQ ID NO: 651307 - DNA, 33 bp, Homo sapien
gctcatacgacagatacgatactcgaagacaga

SEQ ID NO: 651308 - DNA, 33 bp, Homo sapien
gctcatacgacagatatgatactcgaagacaga

SEQ ID NO: 651309 - DNA, 33 bp, Homo sapien
tttcccagaatacgtccccagagtgaatgtctg

SEQ ID NO: 651310 - DNA, 33 bp, Homo sapien
tttcccagaatacgtctccagagtgaatgtctg

SEQ ID NO: 651311 - DNA, 33 bp, Homo sapien
agtattttgttagttaagagatccaatacttta

SEQ ID NO: 651312 - DNA, 33 bp, Homo sapien
agtattttgttagttaggagatccaatacttta

SEQ ID NO: 651313 - DNA, 33 bp, Homo sapien
gaacacttcagaacaaatccactgggctagttt

SEQ ID NO: 651314 - DNA, 33 bp, Homo sapien
gaacacttcagaacaagtccactgggctagttt

SEQ ID NO: 651315 - DNA, 33 bp, Homo sapien
gttttgttccagaaaactacttctcggatacag

SEQ ID NO: 651316 - DNA, 33 bp, Homo sapien
gttttgttccagaaaattacttctcggatacag

SEQ ID NO: 651317 - DNA, 33 bp, Homo sapien
ccttactgcacagtcaatctacatgaaagaaag

SEQ ID NO: 651318 - DNA, 33 bp, Homo sapien
ccttactgcacagtcagtctacatgaaagaaag

SEQ ID NO: 651319 - DNA, 33 bp, Homo sapien
agtgaatggtagagaacgttagctcttttcatg

SEQ ID NO: 651320 - DNA, 33 bp, Homo sapien
agtgaatggtagagaatgttagctcttttcatg

SEQ ID NO: 651321 - DNA, 33 bp, Homo sapien
accgaaagatcttgaccaagattattaacctct

SEQ ID NO: 651322 - DNA, 33 bp, Homo sapien
accgaaagatcttgactaagattattaacctct

SEQ ID NO: 651323 - DNA, 33 bp, Homo sapien
tctgctttaacaggtaagggctcaagttacagc

SEQ ID NO: 651324 - DNA, 33 bp, Homo sapien
tctgctttaacaggtaggggctcaagttacagc

SEQ ID NO: 651325 - DNA, 33 bp, Homo sapien
atttccttcttattaaatgaaactcacatcatg

SEQ ID NO: 651326 - DNA, 33 bp, Homo sapien
atttccttcttattaagtgaaactcacatcatg

SEQ ID NO: 651327 - DNA, 33 bp, Homo sapien
ctaagactcactggaaagaataagaaccaaatc

SEQ ID NO: 651328 - DNA, 33 bp, Homo sapien
ctaagactcactggaaggaataagaaccaaatc

SEQ ID NO: 651329 - DNA, 33 bp, Homo sapien
ctgatatttgtactcagatttgtcactgtcacc

SEQ ID NO: 651330 - DNA, 33 bp, Homo sapien
ctgatatttgtactcatatttgtcactgtcacc

SEQ ID NO: 651331 - DNA, 33 bp, Homo sapien
tgttgagtatctactacgtgtgggaccatacca

SEQ ID NO: 651332 - DNA, 33 bp, Homo sapien
tgttgagtatctactatgtgtgggaccatacca

SEQ ID NO: 651333 - DNA, 33 bp, Homo sapien
tagccatagttattcccgagtttgatcttgact

SEQ ID NO: 651334 - DNA, 33 bp, Homo sapien
tagccatagttattcctgagtttgatcttgact

SEQ ID NO: 651335 - DNA, 33 bp, Homo sapien
tgtacaaattgagtgcagatccttagacgagct

SEQ ID NO: 651336 - DNA, 33 bp, Homo sapien
tgtacaaattgagtgccgatccttagacgagct

SEQ ID NO: 651337 - DNA, 33 bp, Homo sapien
gcatggtgtgcaatcaaaattttttttataatt

SEQ ID NO: 651338 - DNA, 33 bp, Homo sapien
gcatggtgtgcaatcagaattttttttataatt

SEQ ID NO: 651339 - DNA, 33 bp, Homo sapien
tttgttataaacaaacaccagcattaccacaaa

SEQ ID NO: 651340 - DNA, 33 bp, Homo sapien
tttgttataaacaaacgccagcattaccacaaa

SEQ ID NO: 651341 - DNA, 33 bp, Homo sapien
tgatcattccatgtaacgtgactactcaacagg

SEQ ID NO: 651342 - DNA, 33 bp, Homo sapien
tgatcattccatgtaatgtgactactcaacagg

SEQ ID NO: 651343 - DNA, 33 bp, Homo sapien
ctagggaccctaggaacgcttctttgtctctgt

SEQ ID NO: 651344 - DNA, 33 bp, Homo sapien
ctagggaccctaggaatgcttctttgtctctgt

SEQ ID NO: 651345 - DNA, 33 bp, Homo sapien
aaggcagaaagcaaaccagggagggtggcacca

SEQ ID NO: 651346 - DNA, 33 bp, Homo sapien
aaggcagaaagcaaacgagggagggtggcacca

SEQ ID NO: 651347 - DNA, 33 bp, Homo sapien
ttgaaccagttttccaaatatgcacacaccacg

SEQ ID NO: 651348 - DNA, 33 bp, Homo sapien
ttgaaccagttttccagatatgcacacaccacg

SEQ ID NO: 651349 - DNA, 33 bp, Homo sapien
gcaaggcaggacttcggattcccactgctgtgc

SEQ ID NO: 651350 - DNA, 33 bp, Homo sapien
gcaaggcaggacttcgtattcccactgctgtgc

SEQ ID NO: 651351 - DNA, 33 bp, Homo sapien
ccacctgcaaacagtcacctcttggccattctt

SEQ ID NO: 651352 - DNA, 33 bp, Homo sapien
ccacctgcaaacagtcgcctcttggccattctt

SEQ ID NO: 651353 - DNA, 33 bp, Homo sapien
tcaagctgttttgctgaatacctagttggtcca

SEQ ID NO: 651354 - DNA, 33 bp, Homo sapien
tcaagctgttttgctggatacctagttggtcca

SEQ ID NO: 651355 - DNA, 33 bp, Homo sapien
aggggactttgtggacagataaaaatgttccat

SEQ ID NO: 651356 - DNA, 33 bp, Homo sapien
aggggactttgtggacggataaaaatgttccat

SEQ ID NO: 651357 - DNA, 33 bp, Homo sapien
attatttctagtggaagtgtaaatcaacacaaa

SEQ ID NO: 651358 - DNA, 33 bp, Homo sapien
attatttctagtggaattgtaaatcaacacaaa

SEQ ID NO: 651359 - DNA, 33 bp, Homo sapien
gagaaaagagggactaaagaagaaattgttgca

SEQ ID NO: 651360 - DNA, 33 bp, Homo sapien
gagaaaagagggactatagaagaaattgttgca

SEQ ID NO: 651361 - DNA, 33 bp, Homo sapien
gcagcaaccttaatgcagaagttggctgccagt

SEQ ID NO: 651362 - DNA, 33 bp, Homo sapien
gcagcaaccttaatgcggaagttggctgccagt

SEQ ID NO: 651363 - DNA, 33 bp, Homo sapien
ctattggcttaataacaagaggtctgcatttta

SEQ ID NO: 651364 - DNA, 33 bp, Homo sapien
ctattggcttaataaccagaggtctgcatttta

SEQ ID NO: 651365 - DNA, 33 bp, Homo sapien
tcaatgttaggtgtaactgattatggtctgcat

SEQ ID NO: 651366 - DNA, 33 bp, Homo sapien
tcaatgttaggtgtaattgattatggtctgcat

SEQ ID NO: 651367 - DNA, 33 bp, Homo sapien
gagaatttaggcagaaatgtcctctgctttctc

SEQ ID NO: 651368 - DNA, 33 bp, Homo sapien
gagaatttaggcagaagtgtcctctgctttctc

SEQ ID NO: 651369 - DNA, 33 bp, Homo sapien
gtttcgatgttgattaccttttgctattgagta

SEQ ID NO: 651370 - DNA, 33 bp, Homo sapien
gtttcgatgttgattatcttttgctattgagta

SEQ ID NO: 651371 - DNA, 33 bp, Homo sapien
actcttgtgtaaagaaaagcttagctcttagca

SEQ ID NO: 651372 - DNA, 33 bp, Homo sapien
actcttgtgtaaagaatagcttagctcttagca

SEQ ID NO: 651373 - DNA, 33 bp, Homo sapien
attcatcaggaaattacgaaggcttgaggagct

SEQ ID NO: 651374 - DNA, 33 bp, Homo sapien
attcatcaggaaattatgaaggcttgaggagct

SEQ ID NO: 651375 - DNA, 33 bp, Homo sapien
tcttcctgctgcagaaaagtcttgaaatactgc

SEQ ID NO: 651376 - DNA, 33 bp, Homo sapien
tcttcctgctgcagaagagtcttgaaatactgc

SEQ ID NO: 651377 - DNA, 33 bp, Homo sapien
cttctaccgaggaagacagaactatctgtgatg

SEQ ID NO: 651378 - DNA, 33 bp, Homo sapien
cttctaccgaggaagagagaactatctgtgatg

SEQ ID NO: 651379 - DNA, 33 bp, Homo sapien
aaaatgtccctgattgaaggattccacaggctt

SEQ ID NO: 651380 - DNA, 33 bp, Homo sapien
aaaatgtccctgattggaggattccacaggctt

SEQ ID NO: 651381 - DNA, 33 bp, Homo sapien
ccacacacaattaaaaactttgtcgacagggac

SEQ ID NO: 651382 - DNA, 33 bp, Homo sapien
ccacacacaattaaaatctttgtcgacagggac

SEQ ID NO: 651383 - DNA, 33 bp, Homo sapien
accccagtcttagaaactctgggtctggagtga

SEQ ID NO: 651384 - DNA, 33 bp, Homo sapien
accccagtcttagaaattctgggtctggagtga

SEQ ID NO: 651385 - DNA, 33 bp, Homo sapien
ttttttttttaaagcccatccatgaaggtaacc

SEQ ID NO: 651386 - DNA, 33 bp, Homo sapien
ttttttttttaaagccgatccatgaaggtaacc

SEQ ID NO: 651387 - DNA, 33 bp, Homo sapien
gaagaagactccagacaatggtgaccaccttct

SEQ ID NO: 651388 - DNA, 33 bp, Homo sapien
gaagaagactccagactatggtgaccaccttct

SEQ ID NO: 651389 - DNA, 33 bp, Homo sapien
ctctcctgccaatcccaatgcaactctggcaag

SEQ ID NO: 651390 - DNA, 33 bp, Homo sapien
ctctcctgccaatcccgatgcaactctggcaag

SEQ ID NO: 651391 - DNA, 33 bp, Homo sapien
aggatttgagcatttaggtaaagtgcagagctt

SEQ ID NO: 651392 - DNA, 33 bp, Homo sapien
aggatttgagcatttatgtaaagtgcagagctt

SEQ ID NO: 651393 - DNA, 33 bp, Homo sapien
gctagcaaggaaacacgagaactaaagactcag

SEQ ID NO: 651394 - DNA, 33 bp, Homo sapien
gctagcaaggaaacactagaactaaagactcag

SEQ ID NO: 651395 - DNA, 33 bp, Homo sapien
tcctgagaagctgacaaggcagatctgtcccca

SEQ ID NO: 651396 - DNA, 33 bp, Homo sapien
tcctgagaagctgacagggcagatctgtcccca

SEQ ID NO: 651397 - DNA, 33 bp, Homo sapien
tagttgagctacctgaagtccagagaggttata

SEQ ID NO: 651398 - DNA, 33 bp, Homo sapien
tagttgagctacctgaggtccagagaggttata

SEQ ID NO: 651399 - DNA, 33 bp, Homo sapien
ccgagtttcaagagggacaaggaaacgagatcc

SEQ ID NO: 651400 - DNA, 33 bp, Homo sapien
ccgagtttcaagagggtcaaggaaacgagatcc

SEQ ID NO: 651401 - DNA, 33 bp, Homo sapien
tcagcccctgttaggaactgcatttattcttag

SEQ ID NO: 651402 - DNA, 33 bp, Homo sapien
tcagcccctgttaggagctgcatttattcttag

SEQ ID NO: 651403 - DNA, 33 bp, Homo sapien
ccccaggtgcatttcacgtatggtcaaggtgga

SEQ ID NO: 651404 - DNA, 33 bp, Homo sapien
ccccaggtgcatttcatgtatggtcaaggtgga

SEQ ID NO: 651405 - DNA, 33 bp, Homo sapien
caactaatgagtggaacgatgggtccaagacac

SEQ ID NO: 651406 - DNA, 33 bp, Homo sapien
caactaatgagtggaatgatgggtccaagacac

SEQ ID NO: 651407 - DNA, 33 bp, Homo sapien
aagatgaccttctagaacccctaaaatctctat

SEQ ID NO: 651408 - DNA, 33 bp, Homo sapien
aagatgaccttctagagcccctaaaatctctat

SEQ ID NO: 651409 - DNA, 33 bp, Homo sapien
ccaggcagcaatactaccctcactcccatttgt

SEQ ID NO: 651410 - DNA, 33 bp, Homo sapien
ccaggcagcaatactatcctcactcccatttgt

SEQ ID NO: 651411 - DNA, 33 bp, Homo sapien
tggaggtgcttgctgaaatcagaagccagtgga

SEQ ID NO: 651412 - DNA, 33 bp, Homo sapien
tggaggtgcttgctgagatcagaagccagtgga

SEQ ID NO: 651413 - DNA, 33 bp, Homo sapien
attgtctggtgcttgacctgtgcagaggacagt

SEQ ID NO: 651414 - DNA, 33 bp, Homo sapien
attgtctggtgcttgatctgtgcagaggacagt

SEQ ID NO: 651415 - DNA, 33 bp, Homo sapien
cctggtctgataaatgaacccagtcctggactt

SEQ ID NO: 651416 - DNA, 33 bp, Homo sapien
cctggtctgataaatggacccagtcctggactt

SEQ ID NO: 651417 - DNA, 33 bp, Homo sapien
ttacttcggtttctcacgcaggatttgagagaa

SEQ ID NO: 651418 - DNA, 33 bp, Homo sapien
ttacttcggtttctcatgcaggatttgagagaa

SEQ ID NO: 651419 - DNA, 33 bp, Homo sapien
gtgtctgtttttagacactgtagttgctaagct

SEQ ID NO: 651420 - DNA, 33 bp, Homo sapien
gtgtctgtttttagacgctgtagttgctaagct

SEQ ID NO: 651421 - DNA, 33 bp, Homo sapien
gatttgcaaagcaggtaaacgatattttgaggc

SEQ ID NO: 651422 - DNA, 33 bp, Homo sapien
gatttgcaaagcaggtgaacgatattttgaggc

SEQ ID NO: 651423 - DNA, 33 bp, Homo sapien
atgttttacccaattacggtgccaggtaataaa

SEQ ID NO: 651424 - DNA, 33 bp, Homo sapien
atgttttacccaattatggtgccaggtaataaa

SEQ ID NO: 651425 - DNA, 33 bp, Homo sapien
atggtggtgaccacaacgacaaaaatgattact

SEQ ID NO: 651426 - DNA, 33 bp, Homo sapien
atggtggtgaccacaatgacaaaaatgattact

SEQ ID NO: 651427 - DNA, 33 bp, Homo sapien
actgatgattgtctccaagtatctcattttcag

SEQ ID NO: 651428 - DNA, 33 bp, Homo sapien
actgatgattgtctccgagtatctcattttcag

SEQ ID NO: 651429 - DNA, 33 bp, Homo sapien
ggaattgacatcaggaatagagtatgcaggctg

SEQ ID NO: 651430 - DNA, 33 bp, Homo sapien
ggaattgacatcaggagtagagtatgcaggctg

SEQ ID NO: 651431 - DNA, 33 bp, Homo sapien
gtcagtaacagctttaaggttttagggaatgct

SEQ ID NO: 651432 - DNA, 33 bp, Homo sapien
gtcagtaacagctttatggttttagggaatgct

SEQ ID NO: 651433 - DNA, 33 bp, Homo sapien
ctaccattgcctctgacgagttgaggtccccag

SEQ ID NO: 651434 - DNA, 33 bp, Homo sapien
ctaccattgcctctgatgagttgaggtccccag

SEQ ID NO: 651435 - DNA, 33 bp, Homo sapien
atgctgtttttgttaaagtaaggttgcctgggc

SEQ ID NO: 651436 - DNA, 33 bp, Homo sapien
atgctgtttttgttaaggtaaggttgcctgggc

SEQ ID NO: 651437 - DNA, 33 bp, Homo sapien
catgacacagtctagcaatgaacataacatatg

SEQ ID NO: 651438 - DNA, 33 bp, Homo sapien
catgacacagtctagcgatgaacataacatatg

SEQ ID NO: 651439 - DNA, 33 bp, Homo sapien
ccaccagccagtgtaacaagtggctgatttggg

SEQ ID NO: 651440 - DNA, 33 bp, Homo sapien
ccaccagccagtgtaagaagtggctgatttggg

SEQ ID NO: 651441 - DNA, 33 bp, Homo sapien
aaaatcaagtctatcacgctaagtttccatgac

SEQ ID NO: 651442 - DNA, 33 bp, Homo sapien
aaaatcaagtctatcatgctaagtttccatgac

SEQ ID NO: 651443 - DNA, 33 bp, Homo sapien
ttacagatggtctatcaaggaacgtctcagcct

SEQ ID NO: 651444 - DNA, 33 bp, Homo sapien
ttacagatggtctatcgaggaacgtctcagcct

SEQ ID NO: 651445 - DNA, 33 bp, Homo sapien
atcccaccgccatacccgatttcaatgacacag

SEQ ID NO: 651446 - DNA, 33 bp, Homo sapien
atcccaccgccatacctgatttcaatgacacag

SEQ ID NO: 651447 - DNA, 33 bp, Homo sapien
gactcagagaggctcacgtagtagcatcaataa

SEQ ID NO: 651448 - DNA, 33 bp, Homo sapien
gactcagagaggctcatgtagtagcatcaataa

SEQ ID NO: 651449 - DNA, 33 bp, Homo sapien
aggagccgtaggcagaaatgacctgtggactta

SEQ ID NO: 651450 - DNA, 33 bp, Homo sapien
aggagccgtaggcagacatgacctgtggactta

SEQ ID NO: 651451 - DNA, 33 bp, Homo sapien
taacaaactcaacgcagtagtgggaaaaggaca

SEQ ID NO: 651452 - DNA, 33 bp, Homo sapien
taacaaactcaacgcattagtgggaaaaggaca

SEQ ID NO: 651453 - DNA, 33 bp, Homo sapien
gaaggaaggaagtcaactgagagtgacacagtt

SEQ ID NO: 651454 - DNA, 33 bp, Homo sapien
gaaggaaggaagtcaattgagagtgacacagtt

SEQ ID NO: 651455 - DNA, 33 bp, Homo sapien
tggttttagggagatacaagtgtgtgtctgtgt

SEQ ID NO: 651456 - DNA, 33 bp, Homo sapien
tggttttagggagatataagtgtgtgtctgtgt

SEQ ID NO: 651457 - DNA, 33 bp, Homo sapien
ataaggaagctgtaaccaaaagataaataaagg

SEQ ID NO: 651458 - DNA, 33 bp, Homo sapien
ataaggaagctgtaacgaaaagataaataaagg

SEQ ID NO: 651459 - DNA, 33 bp, Homo sapien
agtctccttcagtctaaaacaatttctctgcac

SEQ ID NO: 651460 - DNA, 33 bp, Homo sapien
agtctccttcagtctagaacaatttctctgcac

SEQ ID NO: 651461 - DNA, 33 bp, Homo sapien
tctgaatgacagatgaagggttgatcaccctcc

SEQ ID NO: 651462 - DNA, 33 bp, Homo sapien
tctgaatgacagatgaggggttgatcaccctcc

SEQ ID NO: 651463 - DNA, 33 bp, Homo sapien
ttgtatatatcaacaaagactttgaacactctc

SEQ ID NO: 651464 - DNA, 33 bp, Homo sapien
ttgtatatatcaacaaggactttgaacactctc

SEQ ID NO: 651465 - DNA, 33 bp, Homo sapien
tgagaatagacttctacgagtatgagtcaatgt

SEQ ID NO: 651466 - DNA, 33 bp, Homo sapien
tgagaatagacttctaggagtatgagtcaatgt

SEQ ID NO: 651467 - DNA, 33 bp, Homo sapien
ctgaaggcccaataacagggagcaccaatttat

SEQ ID NO: 651468 - DNA, 33 bp, Homo sapien
ctgaaggcccaataactgggagcaccaatttat

SEQ ID NO: 651469 - DNA, 33 bp, Homo sapien
agatattcatgcattcactgtagaagatactat

SEQ ID NO: 651470 - DNA, 33 bp, Homo sapien
agatattcatgcattcgctgtagaagatactat

SEQ ID NO: 651471 - DNA, 33 bp, Homo sapien
gagcaggtgcattccacagcaaaagcaggagca

SEQ ID NO: 651472 - DNA, 33 bp, Homo sapien
gagcaggtgcattccatagcaaaagcaggagca

SEQ ID NO: 651473 - DNA, 33 bp, Homo sapien
gtacaaggttgctcagcagaataaggtccatta

SEQ ID NO: 651474 - DNA, 33 bp, Homo sapien
gtacaaggttgctcagtagaataaggtccatta

SEQ ID NO: 651475 - DNA, 33 bp, Homo sapien
attctgtggtccattgaatgcaactttaataat

SEQ ID NO: 651476 - DNA, 33 bp, Homo sapien
attctgtggtccattggatgcaactttaataat

SEQ ID NO: 651477 - DNA, 33 bp, Homo sapien
gattcagagagagactcacttccatatagagcg

SEQ ID NO: 651478 - DNA, 33 bp, Homo sapien
gattcagagagagactgacttccatatagagcg

SEQ ID NO: 651479 - DNA, 33 bp, Homo sapien
ctttgggaggagtctaatacaaaaactgaaaac

SEQ ID NO: 651480 - DNA, 33 bp, Homo sapien
ctttgggaggagtctagtacaaaaactgaaaac

SEQ ID NO: 651481 - DNA, 33 bp, Homo sapien
catactggcagtttgacgtaaagaaagggggca

SEQ ID NO: 651482 - DNA, 33 bp, Homo sapien
catactggcagtttgatgtaaagaaagggggca

SEQ ID NO: 651483 - DNA, 33 bp, Homo sapien
tgctcatgaaacagaaaaatgcttaaggataaa

SEQ ID NO: 651484 - DNA, 33 bp, Homo sapien
tgctcatgaaacagaagaatgcttaaggataaa

SEQ ID NO: 651485 - DNA, 33 bp, Homo sapien
ggttgcttctctcgaaatgttttaaatgtcaat

SEQ ID NO: 651486 - DNA, 33 bp, Homo sapien
ggttgcttctctcgaagtgttttaaatgtcaat

SEQ ID NO: 651487 - DNA, 33 bp, Homo sapien
accttactagaaccatcactaaaacaaggataa

SEQ ID NO: 651488 - DNA, 33 bp, Homo sapien
accttactagaaccattactaaaacaaggataa

SEQ ID NO: 651489 - DNA, 33 bp, Homo sapien
ctaagcactactggtaaatcaacacatataatt

SEQ ID NO: 651490 - DNA, 33 bp, Homo sapien
ctaagcactactggtacatcaacacatataatt

SEQ ID NO: 651491 - DNA, 33 bp, Homo sapien
actgtaaatttctgcaagatttggcttccaatt

SEQ ID NO: 651492 - DNA, 33 bp, Homo sapien
actgtaaatttctgcaggatttggcttccaatt

SEQ ID NO: 651493 - DNA, 33 bp, Homo sapien
aaagtccaagtccaaaaacaaggttaatctgag

SEQ ID NO: 651494 - DNA, 33 bp, Homo sapien
aaagtccaagtccaaagacaaggttaatctgag

SEQ ID NO: 651495 - DNA, 33 bp, Homo sapien
ggtcagggctcacataacactagcaaggcatat

SEQ ID NO: 651496 - DNA, 33 bp, Homo sapien
ggtcagggctcacataccactagcaaggcatat

SEQ ID NO: 651497 - DNA, 33 bp, Homo sapien
ctgacctaccaatcacaagatgtgacattgaaa

SEQ ID NO: 651498 - DNA, 33 bp, Homo sapien
ctgacctaccaatcaccagatgtgacattgaaa

SEQ ID NO: 651499 - DNA, 33 bp, Homo sapien
cgtggaattctgtggactagccttgaagcctaa

SEQ ID NO: 651500 - DNA, 33 bp, Homo sapien
cgtggaattctgtggattagccttgaagcctaa

SEQ ID NO: 651501 - DNA, 33 bp, Homo sapien
caattggtctgcagataaggattagctcggcat

SEQ ID NO: 651502 - DNA, 33 bp, Homo sapien
caattggtctgcagattaggattagctcggcat

SEQ ID NO: 651503 - DNA, 33 bp, Homo sapien
ctgcagaccaattggaagtagagggcaggggta

SEQ ID NO: 651504 - DNA, 33 bp, Homo sapien
ctgcagaccaattggatgtagagggcaggggta

SEQ ID NO: 651505 - DNA, 33 bp, Homo sapien
acaaaacatgagctccccttttcttcatatgtc

SEQ ID NO: 651506 - DNA, 33 bp, Homo sapien
acaaaacatgagctcctcttttcttcatatgtc

SEQ ID NO: 651507 - DNA, 33 bp, Homo sapien
ttcaaccttaaggacacgataataaagccaatg

SEQ ID NO: 651508 - DNA, 33 bp, Homo sapien
ttcaaccttaaggacatgataataaagccaatg

SEQ ID NO: 651509 - DNA, 33 bp, Homo sapien
tagttctacatatggaagtgttcaccaactgac

SEQ ID NO: 651510 - DNA, 33 bp, Homo sapien
tagttctacatatggaggtgttcaccaactgac

SEQ ID NO: 651511 - DNA, 33 bp, Homo sapien
gatactgctgctctcaaaaccatacttggagaa

SEQ ID NO: 651512 - DNA, 33 bp, Homo sapien
gatactgctgctctcagaaccatacttggagaa

SEQ ID NO: 651513 - DNA, 33 bp, Homo sapien
atatttgacatttggaatataactaacaaataa

SEQ ID NO: 651514 - DNA, 33 bp, Homo sapien
atatttgacatttggagtataactaacaaataa

SEQ ID NO: 651515 - DNA, 33 bp, Homo sapien
caacagaaccttaaggacattttgttttcattt

SEQ ID NO: 651516 - DNA, 33 bp, Homo sapien
caacagaaccttaaggccattttgttttcattt

SEQ ID NO: 651517 - DNA, 33 bp, Homo sapien
ttgctttacgaggcaccgcttttaaagatttac

SEQ ID NO: 651518 - DNA, 33 bp, Homo sapien
ttgctttacgaggcactgcttttaaagatttac

SEQ ID NO: 651519 - DNA, 33 bp, Homo sapien
caaatataagaagccaatcagcaatttgttctg

SEQ ID NO: 651520 - DNA, 33 bp, Homo sapien
caaatataagaagccagtcagcaatttgttctg

SEQ ID NO: 651521 - DNA, 33 bp, Homo sapien
cagttctgaaatctaactagagagttggtcaga

SEQ ID NO: 651522 - DNA, 33 bp, Homo sapien
cagttctgaaatctaattagagagttggtcaga

SEQ ID NO: 651523 - DNA, 33 bp, Homo sapien
acaccttgtcctagaacctgtttaataatcact

SEQ ID NO: 651524 - DNA, 33 bp, Homo sapien
acaccttgtcctagaatctgtttaataatcact

SEQ ID NO: 651525 - DNA, 33 bp, Homo sapien
gatataccctttacccagcataccccaatggta

SEQ ID NO: 651526 - DNA, 33 bp, Homo sapien
gatataccctttacccggcataccccaatggta

SEQ ID NO: 651527 - DNA, 33 bp, Homo sapien
tctaggttcctgtagacagcaatagttgattcc

SEQ ID NO: 651528 - DNA, 33 bp, Homo sapien
tctaggttcctgtagatagcaatagttgattcc

SEQ ID NO: 651529 - DNA, 33 bp, Homo sapien
catcacttctcagaaacccagacagtggatgaa

SEQ ID NO: 651530 - DNA, 33 bp, Homo sapien
catcacttctcagaaatccagacagtggatgaa

SEQ ID NO: 651531 - DNA, 33 bp, Homo sapien
atctccttttaagagaaaacctgtaatgaggag

SEQ ID NO: 651532 - DNA, 33 bp, Homo sapien
atctccttttaagagagaacctgtaatgaggag

SEQ ID NO: 651533 - DNA, 33 bp, Homo sapien
aatcactaaactgctccacatttttataatttt

SEQ ID NO: 651534 - DNA, 33 bp, Homo sapien
aatcactaaactgctctacatttttataatttt

SEQ ID NO: 651535 - DNA, 33 bp, Homo sapien
gcttcatttaggatgaagaaacaggtgctaaga

SEQ ID NO: 651536 - DNA, 33 bp, Homo sapien
gcttcatttaggatgaggaaacaggtgctaaga

SEQ ID NO: 651537 - DNA, 33 bp, Homo sapien
attctagacctgaatacgaagcaataccaggaa

SEQ ID NO: 651538 - DNA, 33 bp, Homo sapien
attctagacctgaatatgaagcaataccaggaa

SEQ ID NO: 651539 - DNA, 33 bp, Homo sapien
aatctcctattaaaaacctgaacttgccttaaa

SEQ ID NO: 651540 - DNA, 33 bp, Homo sapien
aatctcctattaaaaatctgaacttgccttaaa

SEQ ID NO: 651541 - DNA, 33 bp, Homo sapien
aaatgaaatcaaaatcaaactgggacttaaaag

SEQ ID NO: 651542 - DNA, 33 bp, Homo sapien
aaatgaaatcaaaatcgaactgggacttaaaag

SEQ ID NO: 651543 - DNA, 33 bp, Homo sapien
attcctggacttttcagatctgtactgactcag

SEQ ID NO: 651544 - DNA, 33 bp, Homo sapien
attcctggacttttcatatctgtactgactcag

SEQ ID NO: 651545 - DNA, 33 bp, Homo sapien
actagaatgcagttagcaggtgcagcttgttat

SEQ ID NO: 651546 - DNA, 33 bp, Homo sapien
actagaatgcagttagtaggtgcagcttgttat

SEQ ID NO: 651547 - DNA, 33 bp, Homo sapien
gaatggttctagacaacaacttttcatggaggg

SEQ ID NO: 651548 - DNA, 33 bp, Homo sapien
gaatggttctagacaataacttttcatggaggg

SEQ ID NO: 651549 - DNA, 33 bp, Homo sapien
tagctttgtatttgccacccacatttaaaaaat

SEQ ID NO: 651550 - DNA, 33 bp, Homo sapien
tagctttgtatttgccgcccacatttaaaaaat

SEQ ID NO: 651551 - DNA, 33 bp, Homo sapien
aggagggtatggtcaccgctgttaggtaaagtt

SEQ ID NO: 651552 - DNA, 33 bp, Homo sapien
aggagggtatggtcactgctgttaggtaaagtt

SEQ ID NO: 651553 - DNA, 33 bp, Homo sapien
tcaggcagaaggaaaaggataccaggtggaagc

SEQ ID NO: 651554 - DNA, 33 bp, Homo sapien
tcaggcagaaggaaaatgataccaggtggaagc

SEQ ID NO: 651555 - DNA, 33 bp, Homo sapien
ccttactgccttttaccccaatgaagtccaatg

SEQ ID NO: 651556 - DNA, 33 bp, Homo sapien
ccttactgccttttactccaatgaagtccaatg

SEQ ID NO: 651557 - DNA, 33 bp, Homo sapien
tctgctcatttagaaaccccattttcattgcac

SEQ ID NO: 651558 - DNA, 33 bp, Homo sapien
tctgctcatttagaaatcccattttcattgcac

SEQ ID NO: 651559 - DNA, 33 bp, Homo sapien
ctttctgaatccacaaattagctccccatcctt

SEQ ID NO: 651560 - DNA, 33 bp, Homo sapien
ctttctgaatccacaagttagctccccatcctt

SEQ ID NO: 651561 - DNA, 33 bp, Homo sapien
tgctggtggtggtaaagtatgccttttggacca

SEQ ID NO: 651562 - DNA, 33 bp, Homo sapien
tgctggtggtggtaaattatgccttttggacca

SEQ ID NO: 651563 - DNA, 33 bp, Homo sapien
ttgccagggttaacacagcagacagcaggcatt

SEQ ID NO: 651564 - DNA, 33 bp, Homo sapien
ttgccagggttaacacggcagacagcaggcatt

SEQ ID NO: 651565 - DNA, 33 bp, Homo sapien
ggatgaagcacttgaacaggaatccacattaca

SEQ ID NO: 651566 - DNA, 33 bp, Homo sapien
ggatgaagcacttgaataggaatccacattaca

SEQ ID NO: 651567 - DNA, 33 bp, Homo sapien
tgtggcattttaactgcatgatgctttgtgttt

SEQ ID NO: 651568 - DNA, 33 bp, Homo sapien
tgtggcattttaactgtatgatgctttgtgttt

SEQ ID NO: 651569 - DNA, 33 bp, Homo sapien
taagtgccagtggtgtaaactatgatgttattt

SEQ ID NO: 651570 - DNA, 33 bp, Homo sapien
taagtgccagtggtgttaactatgatgttattt

SEQ ID NO: 651571 - DNA, 33 bp, Homo sapien
cgtctttttcctaatacgccatgagcttccttc

SEQ ID NO: 651572 - DNA, 33 bp, Homo sapien
cgtctttttcctaatatgccatgagcttccttc

SEQ ID NO: 651573 - DNA, 33 bp, Homo sapien
ttatgtaaaatacagtcaagcctgcaatctatt

SEQ ID NO: 651574 - DNA, 33 bp, Homo sapien
ttatgtaaaatacagttaagcctgcaatctatt

SEQ ID NO: 651575 - DNA, 33 bp, Homo sapien
tgaaatgacccataagaaaagaacaatgcagtt

SEQ ID NO: 651576 - DNA, 33 bp, Homo sapien
tgaaatgacccataaggaaagaacaatgcagtt

SEQ ID NO: 651577 - DNA, 33 bp, Homo sapien
caggccctaactgaatgactagtaaccctgcaa

SEQ ID NO: 651578 - DNA, 33 bp, Homo sapien
caggccctaactgaattactagtaaccctgcaa

SEQ ID NO: 651579 - DNA, 33 bp, Homo sapien
ctgtggaaagagttcactctgaattttgagccg

SEQ ID NO: 651580 - DNA, 33 bp, Homo sapien
ctgtggaaagagttcattctgaattttgagccg

SEQ ID NO: 651581 - DNA, 33 bp, Homo sapien
tcagtaacatcagcaaccacttctagctttttt

SEQ ID NO: 651582 - DNA, 33 bp, Homo sapien
tcagtaacatcagcaagcacttctagctttttt

SEQ ID NO: 651583 - DNA, 33 bp, Homo sapien
ggtcagactaacctccccctggctgtatgggaa

SEQ ID NO: 651584 - DNA, 33 bp, Homo sapien
ggtcagactaacctcctcctggctgtatgggaa

SEQ ID NO: 651585 - DNA, 33 bp, Homo sapien
caatatgatgcaaaataactagcctagagagag

SEQ ID NO: 651586 - DNA, 33 bp, Homo sapien
caatatgatgcaaaatcactagcctagagagag

SEQ ID NO: 651587 - DNA, 33 bp, Homo sapien
cagtcactgtggcaaccaaaatgatcccacaga

SEQ ID NO: 651588 - DNA, 33 bp, Homo sapien
cagtcactgtggcaactaaaatgatcccacaga

SEQ ID NO: 651589 - DNA, 33 bp, Homo sapien
actgcattatgtccccaccaaaatttacacgtt

SEQ ID NO: 651590 - DNA, 33 bp, Homo sapien
actgcattatgtccccgccaaaatttacacgtt

SEQ ID NO: 651591 - DNA, 33 bp, Homo sapien
caggtttggtttctcccgatgatcctccttggc

SEQ ID NO: 651592 - DNA, 33 bp, Homo sapien
caggtttggtttctcctgatgatcctccttggc

SEQ ID NO: 651593 - DNA, 33 bp, Homo sapien
cctcaccagagtggaaaacatggcttggcagca

SEQ ID NO: 651594 - DNA, 33 bp, Homo sapien
cctcaccagagtggaagacatggcttggcagca

SEQ ID NO: 651595 - DNA, 33 bp, Homo sapien
tgattgtagtaaaaacaggaactatctatcttg

SEQ ID NO: 651596 - DNA, 33 bp, Homo sapien
tgattgtagtaaaaacgggaactatctatcttg

SEQ ID NO: 651597 - DNA, 33 bp, Homo sapien
tttcactttgggtgaccgatcatactggactgc

SEQ ID NO: 651598 - DNA, 33 bp, Homo sapien
tttcactttgggtgactgatcatactggactgc

SEQ ID NO: 651599 - DNA, 33 bp, Homo sapien
tccatagtggttgataataatgaataaactatg

SEQ ID NO: 651600 - DNA, 33 bp, Homo sapien
tccatagtggttgatagtaatgaataaactatg

SEQ ID NO: 651601 - DNA, 33 bp, Homo sapien
gtatgctatggaaatgcaagaactgggagacaa

SEQ ID NO: 651602 - DNA, 33 bp, Homo sapien
gtatgctatggaaatggaagaactgggagacaa

SEQ ID NO: 651603 - DNA, 33 bp, Homo sapien
tggccagtttctcgaacgatgccatcaacctca

SEQ ID NO: 651604 - DNA, 33 bp, Homo sapien
tggccagtttctcgaatgatgccatcaacctca

SEQ ID NO: 651605 - DNA, 33 bp, Homo sapien
ttcttaccatttccacacaccattgactaagtt

SEQ ID NO: 651606 - DNA, 33 bp, Homo sapien
ttcttaccatttccacgcaccattgactaagtt

SEQ ID NO: 651607 - DNA, 33 bp, Homo sapien
gagttcatctcttccacagaattgtgtgacctt

SEQ ID NO: 651608 - DNA, 33 bp, Homo sapien
gagttcatctcttccatagaattgtgtgacctt

SEQ ID NO: 651609 - DNA, 33 bp, Homo sapien
ggtcatgggctacatacaaactttaaattaaga

SEQ ID NO: 651610 - DNA, 33 bp, Homo sapien
ggtcatgggctacatagaaactttaaattaaga

SEQ ID NO: 651611 - DNA, 33 bp, Homo sapien
ttaaaagacatcttgccaattaaatcacttcac

SEQ ID NO: 651612 - DNA, 33 bp, Homo sapien
ttaaaagacatcttgctaattaaatcacttcac

SEQ ID NO: 651613 - DNA, 33 bp, Homo sapien
tatgaattgctgacaaagaattcaaaacaatga

SEQ ID NO: 651614 - DNA, 33 bp, Homo sapien
tatgaattgctgacaaggaattcaaaacaatga

SEQ ID NO: 651615 - DNA, 33 bp, Homo sapien
aaagtgtgatacaaaaaaatgatgctgcagttt

SEQ ID NO: 651616 - DNA, 33 bp, Homo sapien
aaagtgtgatacaaaacaatgatgctgcagttt

SEQ ID NO: 651617 - DNA, 33 bp, Homo sapien
gagtttgagaccaaaccgagcaacatgtggaaa

SEQ ID NO: 651618 - DNA, 33 bp, Homo sapien
gagtttgagaccaaacggagcaacatgtggaaa

SEQ ID NO: 651619 - DNA, 33 bp, Homo sapien
gcaagggtctgacagaaactatatggtccttta

SEQ ID NO: 651620 - DNA, 33 bp, Homo sapien
gcaagggtctgacagagactatatggtccttta

SEQ ID NO: 651621 - DNA, 33 bp, Homo sapien
ttggactcaaaaaccactgaatgaaaagtattg

SEQ ID NO: 651622 - DNA, 33 bp, Homo sapien
ttggactcaaaaaccagtgaatgaaaagtattg

SEQ ID NO: 651623 - DNA, 33 bp, Homo sapien
cctgcacattttatctgaatggtgtttgtgtgc

SEQ ID NO: 651624 - DNA, 33 bp, Homo sapien
cctgcacattttatcttaatggtgtttgtgtgc

SEQ ID NO: 651625 - DNA, 33 bp, Homo sapien
gctagtatgtctggcacagtcattctgttgaat

SEQ ID NO: 651626 - DNA, 33 bp, Homo sapien
gctagtatgtctggcatagtcattctgttgaat

SEQ ID NO: 651627 - DNA, 33 bp, Homo sapien
attcataatagacagaacatacaaacaacccag

SEQ ID NO: 651628 - DNA, 33 bp, Homo sapien
attcataatagacagagcatacaaacaacccag

SEQ ID NO: 651629 - DNA, 33 bp, Homo sapien
gtacttccattcctaccctggatactcagaggc

SEQ ID NO: 651630 - DNA, 33 bp, Homo sapien
gtacttccattcctacgctggatactcagaggc

SEQ ID NO: 651631 - DNA, 33 bp, Homo sapien
aagtgttactctattacgcagatcgtgggtcac

SEQ ID NO: 651632 - DNA, 33 bp, Homo sapien
aagtgttactctattatgcagatcgtgggtcac

SEQ ID NO: 651633 - DNA, 33 bp, Homo sapien
agagggcatcttccacacagatttgctacagat

SEQ ID NO: 651634 - DNA, 33 bp, Homo sapien
agagggcatcttccacgcagatttgctacagat

SEQ ID NO: 651635 - DNA, 33 bp, Homo sapien
gaaaaacagttgttcaagaacatcactccactc

SEQ ID NO: 651636 - DNA, 33 bp, Homo sapien
gaaaaacagttgttcaggaacatcactccactc

SEQ ID NO: 651637 - DNA, 33 bp, Homo sapien
cagttgtctcaaagcacgaattttcaacatact

SEQ ID NO: 651638 - DNA, 33 bp, Homo sapien
cagttgtctcaaagcatgaattttcaacatact

SEQ ID NO: 651639 - DNA, 33 bp, Homo sapien
tgatcagatccgtaaccatactagaaattcaag

SEQ ID NO: 651640 - DNA, 33 bp, Homo sapien
tgatcagatccgtaactatactagaaattcaag

SEQ ID NO: 651641 - DNA, 33 bp, Homo sapien
ttcaaacctttagaaaaattgcaagatagtaaa

SEQ ID NO: 651642 - DNA, 33 bp, Homo sapien
ttcaaacctttagaaagattgcaagatagtaaa

SEQ ID NO: 651643 - DNA, 33 bp, Homo sapien
caaatgcttcactaaaatccagtgatacaacct

SEQ ID NO: 651644 - DNA, 33 bp, Homo sapien
caaatgcttcactaaactccagtgatacaacct

SEQ ID NO: 651645 - DNA, 33 bp, Homo sapien
aaggacatgaagtcaactatcctgaagagacac

SEQ ID NO: 651646 - DNA, 33 bp, Homo sapien
aaggacatgaagtcaagtatcctgaagagacac

SEQ ID NO: 651647 - DNA, 33 bp, Homo sapien
ctggagcactgtcctactacattctccctatat

SEQ ID NO: 651648 - DNA, 33 bp, Homo sapien
ctggagcactgtcctattacattctccctatat

SEQ ID NO: 651649 - DNA, 33 bp, Homo sapien
ggcccgttttgtcacacactgaaaaagctctga

SEQ ID NO: 651650 - DNA, 33 bp, Homo sapien
ggcccgttttgtcacagactgaaaaagctctga

SEQ ID NO: 651651 - DNA, 33 bp, Homo sapien
cattccatcactatcacctgtaatctatgttgc

SEQ ID NO: 651652 - DNA, 33 bp, Homo sapien
cattccatcactatcatctgtaatctatgttgc

SEQ ID NO: 651653 - DNA, 33 bp, Homo sapien
gttcaaagccaaaaagcaattagcgggagaggc

SEQ ID NO: 651654 - DNA, 33 bp, Homo sapien
gttcaaagccaaaaaggaattagcgggagaggc

SEQ ID NO: 651655 - DNA, 33 bp, Homo sapien
aactagtgtctccaaacgtgccatgaagttggg

SEQ ID NO: 651656 - DNA, 33 bp, Homo sapien
aactagtgtctccaaaggtgccatgaagttggg

SEQ ID NO: 651657 - DNA, 33 bp, Homo sapien
tgagaacaaatgaatacaagcccgctgcatctt

SEQ ID NO: 651658 - DNA, 33 bp, Homo sapien
tgagaacaaatgaatataagcccgctgcatctt

SEQ ID NO: 651659 - DNA, 33 bp, Homo sapien
cctggaaccaggagacagactcatggcaggaga

SEQ ID NO: 651660 - DNA, 33 bp, Homo sapien
cctggaaccaggagacggactcatggcaggaga

SEQ ID NO: 651661 - DNA, 33 bp, Homo sapien
gcctgataatctgtcaatccaagtgtggggaac

SEQ ID NO: 651662 - DNA, 33 bp, Homo sapien
gcctgataatctgtcagtccaagtgtggggaac

SEQ ID NO: 651663 - DNA, 33 bp, Homo sapien
ccttggacataatgacgaatgcaatgttatcag

SEQ ID NO: 651664 - DNA, 33 bp, Homo sapien
ccttggacataatgactaatgcaatgttatcag

SEQ ID NO: 651665 - DNA, 33 bp, Homo sapien
cattcatgcctgtttaactacctgtgacaggaa

SEQ ID NO: 651666 - DNA, 33 bp, Homo sapien
cattcatgcctgtttagctacctgtgacaggaa

SEQ ID NO: 651667 - DNA, 33 bp, Homo sapien
cctcttccaccatgtacgttcctggacttcagt

SEQ ID NO: 651668 - DNA, 33 bp, Homo sapien
cctcttccaccatgtatgttcctggacttcagt

SEQ ID NO: 651669 - DNA, 33 bp, Homo sapien
cactgaattgactcaccatctgtgcttatccta

SEQ ID NO: 651670 - DNA, 33 bp, Homo sapien
cactgaattgactcactatctgtgcttatccta

SEQ ID NO: 651671 - DNA, 33 bp, Homo sapien
acttttcttgatgaaactctcagtctgtggagg

SEQ ID NO: 651672 - DNA, 33 bp, Homo sapien
acttttcttgatgaaattctcagtctgtggagg

SEQ ID NO: 651673 - DNA, 33 bp, Homo sapien
tatgaatcatgggtgacaggctatgcgattcta

SEQ ID NO: 651674 - DNA, 33 bp, Homo sapien
tatgaatcatgggtgataggctatgcgattcta

SEQ ID NO: 651675 - DNA, 33 bp, Homo sapien
gaaagcaataggaagagtcaccacctgcctttg

SEQ ID NO: 651676 - DNA, 33 bp, Homo sapien
gaaagcaataggaagattcaccacctgcctttg

SEQ ID NO: 651677 - DNA, 33 bp, Homo sapien
gtaaaaagtgcataaacgaaccatgcctttttt

SEQ ID NO: 651678 - DNA, 33 bp, Homo sapien
gtaaaaagtgcataaatgaaccatgcctttttt

SEQ ID NO: 651679 - DNA, 33 bp, Homo sapien
gggagacaggacgtagaaaggcctcaaggtggg

SEQ ID NO: 651680 - DNA, 33 bp, Homo sapien
gggagacaggacgtaggaaggcctcaaggtggg

SEQ ID NO: 651681 - DNA, 33 bp, Homo sapien
cccgataaggctagcacctgggccttctgtggt

SEQ ID NO: 651682 - DNA, 33 bp, Homo sapien
cccgataaggctagcatctgggccttctgtggt

SEQ ID NO: 651683 - DNA, 33 bp, Homo sapien
tatttagttttatgcacctctacttctctcagg

SEQ ID NO: 651684 - DNA, 33 bp, Homo sapien
tatttagttttatgcatctctacttctctcagg

SEQ ID NO: 651685 - DNA, 33 bp, Homo sapien
aagctgcagtgatttacccaagtccacatgaaa

SEQ ID NO: 651686 - DNA, 33 bp, Homo sapien
aagctgcagtgatttatccaagtccacatgaaa

SEQ ID NO: 651687 - DNA, 33 bp, Homo sapien
tttaagaagcttttcaaaattgcccatcttctg

SEQ ID NO: 651688 - DNA, 33 bp, Homo sapien
tttaagaagcttttcagaattgcccatcttctg

SEQ ID NO: 651689 - DNA, 33 bp, Homo sapien
caccttctattcatcaagtaagtcattaaattc

SEQ ID NO: 651690 - DNA, 33 bp, Homo sapien
caccttctattcatcaggtaagtcattaaattc

SEQ ID NO: 651691 - DNA, 33 bp, Homo sapien
cataaaagtgtttgtggagtacgccctaaaact

SEQ ID NO: 651692 - DNA, 33 bp, Homo sapien
cataaaagtgtttgtgtagtacgccctaaaact

SEQ ID NO: 651693 - DNA, 33 bp, Homo sapien
taatcttccaattaaaactcagcctttcagtgg

SEQ ID NO: 651694 - DNA, 33 bp, Homo sapien
taatcttccaattaaatctcagcctttcagtgg

SEQ ID NO: 651695 - DNA, 33 bp, Homo sapien
tctcctaaacactcgtaaatgaaactacacact

SEQ ID NO: 651696 - DNA, 33 bp, Homo sapien
tctcctaaacactcgtgaatgaaactacacact

SEQ ID NO: 651697 - DNA, 33 bp, Homo sapien
atttcacaatatttaagggtaaaatgtggataa

SEQ ID NO: 651698 - DNA, 33 bp, Homo sapien
atttcacaatatttaatggtaaaatgtggataa

SEQ ID NO: 651699 - DNA, 33 bp, Homo sapien
gggatatccttttgcccagtaatccaggttctc

SEQ ID NO: 651700 - DNA, 33 bp, Homo sapien
gggatatccttttgcctagtaatccaggttctc

SEQ ID NO: 651701 - DNA, 33 bp, Homo sapien
acagccaaaatatcaacagaggagttaaaaatg

SEQ ID NO: 651702 - DNA, 33 bp, Homo sapien
acagccaaaatatcaagagaggagttaaaaatg

SEQ ID NO: 651703 - DNA, 33 bp, Homo sapien
ggaggaaaggctcaccagacacaaatttaatgg

SEQ ID NO: 651704 - DNA, 33 bp, Homo sapien
ggaggaaaggctcaccggacacaaatttaatgg

SEQ ID NO: 651705 - DNA, 33 bp, Homo sapien
gatacactaaactgataagtaaatagtaagcaa

SEQ ID NO: 651706 - DNA, 33 bp, Homo sapien
gatacactaaactgatgagtaaatagtaagcaa

SEQ ID NO: 651707 - DNA, 33 bp, Homo sapien
aaatgagccgtagtgaaaagttcagaggttaca

SEQ ID NO: 651708 - DNA, 33 bp, Homo sapien
aaatgagccgtagtgagaagttcagaggttaca

SEQ ID NO: 651709 - DNA, 33 bp, Homo sapien
gtgagacaaaacacacaaacaatgagttacata

SEQ ID NO: 651710 - DNA, 33 bp, Homo sapien
gtgagacaaaacacacgaacaatgagttacata

SEQ ID NO: 651711 - DNA, 33 bp, Homo sapien
gtaaatgtgtaataaacctcaggagcaaatgtt

SEQ ID NO: 651712 - DNA, 33 bp, Homo sapien
gtaaatgtgtaataaagctcaggagcaaatgtt

SEQ ID NO: 651713 - DNA, 33 bp, Homo sapien
tacaagtacagccaaaataatcaagtgcaggaa

SEQ ID NO: 651714 - DNA, 33 bp, Homo sapien
tacaagtacagccaaagtaatcaagtgcaggaa

SEQ ID NO: 651715 - DNA, 33 bp, Homo sapien
tcatactgctgctgtaagggagagagactccag

SEQ ID NO: 651716 - DNA, 33 bp, Homo sapien
tcatactgctgctgtaggggagagagactccag

SEQ ID NO: 651717 - DNA, 33 bp, Homo sapien
ataagttatgtatgcacataggtacggttactg

SEQ ID NO: 651718 - DNA, 33 bp, Homo sapien
ataagttatgtatgcatataggtacggttactg

SEQ ID NO: 651719 - DNA, 33 bp, Homo sapien
cttacacttgctatgccacattggaggttagct

SEQ ID NO: 651720 - DNA, 33 bp, Homo sapien
cttacacttgctatgctacattggaggttagct

SEQ ID NO: 651721 - DNA, 33 bp, Homo sapien
atttactataccacacaacccaagactgagcca

SEQ ID NO: 651722 - DNA, 33 bp, Homo sapien
atttactataccacacgacccaagactgagcca

SEQ ID NO: 651723 - DNA, 33 bp, Homo sapien
cagcctcaactcatacaacacttcccctgtgct

SEQ ID NO: 651724 - DNA, 33 bp, Homo sapien
cagcctcaactcatacgacacttcccctgtgct

SEQ ID NO: 651725 - DNA, 33 bp, Homo sapien
tggaccaggttagagacgggagtcagggaccag

SEQ ID NO: 651726 - DNA, 33 bp, Homo sapien
tggaccaggttagagatgggagtcagggaccag

SEQ ID NO: 651727 - DNA, 33 bp, Homo sapien
aactaaaacacatcaccgaagcagtacacacat

SEQ ID NO: 651728 - DNA, 33 bp, Homo sapien
aactaaaacacatcactgaagcagtacacacat

SEQ ID NO: 651729 - DNA, 33 bp, Homo sapien
tttatctgtactctggacacttgacttactaat

SEQ ID NO: 651730 - DNA, 33 bp, Homo sapien
tttatctgtactctggtcacttgacttactaat

SEQ ID NO: 651731 - DNA, 33 bp, Homo sapien
attttcattggcaacaacaccagtgaatgcttt

SEQ ID NO: 651732 - DNA, 33 bp, Homo sapien
attttcattggcaacaccaccagtgaatgcttt

SEQ ID NO: 651733 - DNA, 33 bp, Homo sapien
catcctggttttaaaagaaatcagcctgtgtag

SEQ ID NO: 651734 - DNA, 33 bp, Homo sapien
catcctggttttaaaataaatcagcctgtgtag

SEQ ID NO: 651735 - DNA, 33 bp, Homo sapien
ttgtgaacacctataaatctccctaaatcatgt

SEQ ID NO: 651736 - DNA, 33 bp, Homo sapien
ttgtgaacacctataactctccctaaatcatgt

SEQ ID NO: 651737 - DNA, 33 bp, Homo sapien
ctagggctggcagtgaaagattaggaaatggaa

SEQ ID NO: 651738 - DNA, 33 bp, Homo sapien
ctagggctggcagtgagagattaggaaatggaa

SEQ ID NO: 651739 - DNA, 33 bp, Homo sapien
ctcactagaatgggtaaaatgggttctggcttt

SEQ ID NO: 651740 - DNA, 33 bp, Homo sapien
ctcactagaatgggtagaatgggttctggcttt

SEQ ID NO: 651741 - DNA, 33 bp, Homo sapien
tctcatttctcagctacgatgtaagtgtagtcc

SEQ ID NO: 651742 - DNA, 33 bp, Homo sapien
tctcatttctcagctaggatgtaagtgtagtcc

SEQ ID NO: 651743 - DNA, 33 bp, Homo sapien
cataactggctacagactctaggtgtctcaact

SEQ ID NO: 651744 - DNA, 33 bp, Homo sapien
cataactggctacagattctaggtgtctcaact

SEQ ID NO: 651745 - DNA, 33 bp, Homo sapien
tgaaagaagtgaaaaactttgattattactcat

SEQ ID NO: 651746 - DNA, 33 bp, Homo sapien
tgaaagaagtgaaaaattttgattattactcat

SEQ ID NO: 651747 - DNA, 33 bp, Homo sapien
gattgccaggagcaaactcacatagttaacatc

SEQ ID NO: 651748 - DNA, 33 bp, Homo sapien
gattgccaggagcaaattcacatagttaacatc

SEQ ID NO: 651749 - DNA, 33 bp, Homo sapien
acctatctcttaggcaatgaatgtctttatgaa

SEQ ID NO: 651750 - DNA, 33 bp, Homo sapien
acctatctcttaggcagtgaatgtctttatgaa

SEQ ID NO: 651751 - DNA, 33 bp, Homo sapien
gccacatacacctacaaccttttctcccagtct

SEQ ID NO: 651752 - DNA, 33 bp, Homo sapien
gccacatacacctacagccttttctcccagtct

SEQ ID NO: 651753 - DNA, 33 bp, Homo sapien
catatgtaaaagtgagcctacttaagttgtttc

SEQ ID NO: 651754 - DNA, 33 bp, Homo sapien
catatgtaaaagtgagtctacttaagttgtttc

SEQ ID NO: 651755 - DNA, 33 bp, Homo sapien
ctggccattggttcctcaaaggcagtgaaagtg

SEQ ID NO: 651756 - DNA, 33 bp, Homo sapien
ctggccattggttccttaaaggcagtgaaagtg

SEQ ID NO: 651757 - DNA, 33 bp, Homo sapien
gtagtgtttgcaggccagatggatattccatca

SEQ ID NO: 651758 - DNA, 33 bp, Homo sapien
gtagtgtttgcaggccggatggatattccatca

SEQ ID NO: 651759 - DNA, 33 bp, Homo sapien
agattaacttatctgcccagttttaaaaccaag

SEQ ID NO: 651760 - DNA, 33 bp, Homo sapien
agattaacttatctgcgcagttttaaaaccaag

SEQ ID NO: 651761 - DNA, 33 bp, Homo sapien
aaagattctgaactaaaatacaaaagaatgtgt

SEQ ID NO: 651762 - DNA, 33 bp, Homo sapien
aaagattctgaactaagatacaaaagaatgtgt

SEQ ID NO: 651763 - DNA, 33 bp, Homo sapien
gtaggagtagactctacggaacgagaactcagc

SEQ ID NO: 651764 - DNA, 33 bp, Homo sapien
gtaggagtagactctatggaacgagaactcagc

SEQ ID NO: 651765 - DNA, 33 bp, Homo sapien
attcttagcaaatttcaaagttttacagtgcat

SEQ ID NO: 651766 - DNA, 33 bp, Homo sapien
attcttagcaaatttcgaagttttacagtgcat

SEQ ID NO: 651767 - DNA, 33 bp, Homo sapien
gtcccctaaccagtaaatggagagctacaggaa

SEQ ID NO: 651768 - DNA, 33 bp, Homo sapien
gtcccctaaccagtaagtggagagctacaggaa

SEQ ID NO: 651769 - DNA, 33 bp, Homo sapien
aattcattgtcccaaccgaaagtctgtggcagt

SEQ ID NO: 651770 - DNA, 33 bp, Homo sapien
aattcattgtcccaactgaaagtctgtggcagt

SEQ ID NO: 651771 - DNA, 33 bp, Homo sapien
actgaaatatgagttaaaaccccttcttctggt

SEQ ID NO: 651772 - DNA, 33 bp, Homo sapien
actgaaatatgagttagaaccccttcttctggt

SEQ ID NO: 651773 - DNA, 33 bp, Homo sapien
ctatttaggagcaatccgatgtggaagagagtg

SEQ ID NO: 651774 - DNA, 33 bp, Homo sapien
ctatttaggagcaatctgatgtggaagagagtg

SEQ ID NO: 651775 - DNA, 33 bp, Homo sapien
aacacaggatttaactaaaacaaaatgagctcc

SEQ ID NO: 651776 - DNA, 33 bp, Homo sapien
aacacaggatttaactgaaacaaaatgagctcc

SEQ ID NO: 651777 - DNA, 33 bp, Homo sapien
agactgccaaccagacagaaagggatatttggt

SEQ ID NO: 651778 - DNA, 33 bp, Homo sapien
agactgccaaccagaccgaaagggatatttggt

SEQ ID NO: 651779 - DNA, 33 bp, Homo sapien
ggtgaaagtctttgtaccagcatccagagtgca

SEQ ID NO: 651780 - DNA, 33 bp, Homo sapien
ggtgaaagtctttgtagcagcatccagagtgca

SEQ ID NO: 651781 - DNA, 33 bp, Homo sapien
cccagtagacttgaacccaattccacagatgcc

SEQ ID NO: 651782 - DNA, 33 bp, Homo sapien
cccagtagacttgaactcaattccacagatgcc

SEQ ID NO: 651783 - DNA, 33 bp, Homo sapien
ttctcaaacagtagaaacaggtaggaagaaaga

SEQ ID NO: 651784 - DNA, 33 bp, Homo sapien
ttctcaaacagtagaagcaggtaggaagaaaga

SEQ ID NO: 651785 - DNA, 33 bp, Homo sapien
atgtcaatcactgacgaaaaaatcaagtagcta

SEQ ID NO: 651786 - DNA, 33 bp, Homo sapien
atgtcaatcactgacggaaaaatcaagtagcta

SEQ ID NO: 651787 - DNA, 33 bp, Homo sapien
agaaactgggtctgaacgcctggaaagcagctt

SEQ ID NO: 651788 - DNA, 33 bp, Homo sapien
agaaactgggtctgaatgcctggaaagcagctt

SEQ ID NO: 651789 - DNA, 33 bp, Homo sapien
atgaaaaaacggggaccgtcatcatcataattt

SEQ ID NO: 651790 - DNA, 33 bp, Homo sapien
atgaaaaaacggggactgtcatcatcataattt

SEQ ID NO: 651791 - DNA, 33 bp, Homo sapien
atcaaaattagaaggaaaattcaagacagagag

SEQ ID NO: 651792 - DNA, 33 bp, Homo sapien
atcaaaattagaaggagaattcaagacagagag

SEQ ID NO: 651793 - DNA, 33 bp, Homo sapien
tgttgctggtgaatcaaatacttgacccatttg

SEQ ID NO: 651794 - DNA, 33 bp, Homo sapien
tgttgctggtgaatcacatacttgacccatttg

SEQ ID NO: 651795 - DNA, 33 bp, Homo sapien
tacctacctttatggaacacattttctacattc

SEQ ID NO: 651796 - DNA, 33 bp, Homo sapien
tacctacctttatggaccacattttctacattc

SEQ ID NO: 651797 - DNA, 33 bp, Homo sapien
caacctttaaacatagaacatattctaccacct

SEQ ID NO: 651798 - DNA, 33 bp, Homo sapien
caacctttaaacatagtacatattctaccacct

SEQ ID NO: 651799 - DNA, 33 bp, Homo sapien
tgaatatggagggaaacgggctaaagagagctt

SEQ ID NO: 651800 - DNA, 33 bp, Homo sapien
tgaatatggagggaaatgggctaaagagagctt

SEQ ID NO: 651801 - DNA, 33 bp, Homo sapien
agtttcaaggtccaccgatatatggcactggct

SEQ ID NO: 651802 - DNA, 33 bp, Homo sapien
agtttcaaggtccacctatatatggcactggct

SEQ ID NO: 651803 - DNA, 33 bp, Homo sapien
tctcaggttatgaagaagtgagatgagatgatg

SEQ ID NO: 651804 - DNA, 33 bp, Homo sapien
tctcaggttatgaagaggtgagatgagatgatg

SEQ ID NO: 651805 - DNA, 33 bp, Homo sapien
ttctacagctccaaataatgtgcaaggtcttgc

SEQ ID NO: 651806 - DNA, 33 bp, Homo sapien
ttctacagctccaaatgatgtgcaaggtcttgc

SEQ ID NO: 651807 - DNA, 33 bp, Homo sapien
acccagcacaactttgcagctatttatgaatca

SEQ ID NO: 651808 - DNA, 33 bp, Homo sapien
acccagcacaactttggagctatttatgaatca

SEQ ID NO: 651809 - DNA, 33 bp, Homo sapien
atgtaagtaaaaataaccttcaactggcatagg

SEQ ID NO: 651810 - DNA, 33 bp, Homo sapien
atgtaagtaaaaataagcttcaactggcatagg

SEQ ID NO: 651811 - DNA, 33 bp, Homo sapien
tccactcacccttcaaatctcagttaaattatc

SEQ ID NO: 651812 - DNA, 33 bp, Homo sapien
tccactcacccttcaagtctcagttaaattatc

SEQ ID NO: 651813 - DNA, 33 bp, Homo sapien
atctgtttagatgctacactagtttgttttttt

SEQ ID NO: 651814 - DNA, 33 bp, Homo sapien
atctgtttagatgctatactagtttgttttttt

SEQ ID NO: 651815 - DNA, 33 bp, Homo sapien
acatcagggatttgcactgagtcctgaagaact

SEQ ID NO: 651816 - DNA, 33 bp, Homo sapien
acatcagggatttgcattgagtcctgaagaact

SEQ ID NO: 651817 - DNA, 33 bp, Homo sapien
tccagacaagaatgcacaaacaaaggcctgcag

SEQ ID NO: 651818 - DNA, 33 bp, Homo sapien
tccagacaagaatgcagaaacaaaggcctgcag

SEQ ID NO: 651819 - DNA, 33 bp, Homo sapien
acaatcatccttgtcacacaatagaaggtagaa

SEQ ID NO: 651820 - DNA, 33 bp, Homo sapien
acaatcatccttgtcatacaatagaaggtagaa

SEQ ID NO: 651821 - DNA, 33 bp, Homo sapien
acattttcttacactcaaaattgtcatggttac

SEQ ID NO: 651822 - DNA, 33 bp, Homo sapien
acattttcttacactcgaaattgtcatggttac

SEQ ID NO: 651823 - DNA, 33 bp, Homo sapien
tcatacattacataaaatgattacactagggat

SEQ ID NO: 651824 - DNA, 33 bp, Homo sapien
tcatacattacataaagtgattacactagggat

SEQ ID NO: 651825 - DNA, 33 bp, Homo sapien
ggtagtaaaatataaaattactcagtgttatta

SEQ ID NO: 651826 - DNA, 33 bp, Homo sapien
ggtagtaaaatataaacttactcagtgttatta

SEQ ID NO: 651827 - DNA, 33 bp, Homo sapien
atgggacttacactgaataggttttagctgctc

SEQ ID NO: 651828 - DNA, 33 bp, Homo sapien
atgggacttacactgagtaggttttagctgctc

SEQ ID NO: 651829 - DNA, 33 bp, Homo sapien
agggtatcatttgctaacccccactccttacct

SEQ ID NO: 651830 - DNA, 33 bp, Homo sapien
agggtatcatttgctagcccccactccttacct

SEQ ID NO: 651831 - DNA, 33 bp, Homo sapien
tgggtactatgctcaacaccagggtgacaagtt

SEQ ID NO: 651832 - DNA, 33 bp, Homo sapien
tgggtactatgctcaataccagggtgacaagtt

SEQ ID NO: 651833 - DNA, 33 bp, Homo sapien
atgtacaaggttgttacagaggtatattttgtg

SEQ ID NO: 651834 - DNA, 33 bp, Homo sapien
atgtacaaggttgttatagaggtatattttgtg

SEQ ID NO: 651835 - DNA, 33 bp, Homo sapien
tctccacgtaaggcgacagatttgtaaaacgag

SEQ ID NO: 651836 - DNA, 33 bp, Homo sapien
tctccacgtaaggcgatagatttgtaaaacgag

SEQ ID NO: 651837 - DNA, 33 bp, Homo sapien
ctccgcatttcatctaacagattggatttctcc

SEQ ID NO: 651838 - DNA, 33 bp, Homo sapien
ctccgcatttcatctatcagattggatttctcc

SEQ ID NO: 651839 - DNA, 33 bp, Homo sapien
ttggcaaagagcatacaactgtctaagccttta

SEQ ID NO: 651840 - DNA, 33 bp, Homo sapien
ttggcaaagagcataccactgtctaagccttta

SEQ ID NO: 651841 - DNA, 33 bp, Homo sapien
gaagtttctcttttacagaagggtggcaggcat

SEQ ID NO: 651842 - DNA, 33 bp, Homo sapien
gaagtttctcttttaccgaagggtggcaggcat

SEQ ID NO: 651843 - DNA, 33 bp, Homo sapien
tatgaactgtgtggagaaactcataataaaaga

SEQ ID NO: 651844 - DNA, 33 bp, Homo sapien
tatgaactgtgtggagcaactcataataaaaga

SEQ ID NO: 651845 - DNA, 33 bp, Homo sapien
gtaaacagaagatatacgtgaactgtgatcatt

SEQ ID NO: 651846 - DNA, 33 bp, Homo sapien
gtaaacagaagatatatgtgaactgtgatcatt

SEQ ID NO: 651847 - DNA, 33 bp, Homo sapien
actctgtgaagataaccgaagaaagatgagtta

SEQ ID NO: 651848 - DNA, 33 bp, Homo sapien
actctgtgaagataactgaagaaagatgagtta

SEQ ID NO: 651849 - DNA, 33 bp, Homo sapien
taggctgtctgtattcaagtgttgcactacaaa

SEQ ID NO: 651850 - DNA, 33 bp, Homo sapien
taggctgtctgtattcgagtgttgcactacaaa

SEQ ID NO: 651851 - DNA, 33 bp, Homo sapien
acaggaacttctaaaaataggcatgtgagagaa

SEQ ID NO: 651852 - DNA, 33 bp, Homo sapien
acaggaacttctaaaagtaggcatgtgagagaa

SEQ ID NO: 651853 - DNA, 33 bp, Homo sapien
tggccatttaggaccactctcagttctccagcc

SEQ ID NO: 651854 - DNA, 33 bp, Homo sapien
tggccatttaggaccattctcagttctccagcc

SEQ ID NO: 651855 - DNA, 33 bp, Homo sapien
caatggcaatgctaccactctttacaaataaag

SEQ ID NO: 651856 - DNA, 33 bp, Homo sapien
caatggcaatgctaccgctctttacaaataaag

SEQ ID NO: 651857 - DNA, 33 bp, Homo sapien
tctgaactgaggacgcaatatatttcatggcct

SEQ ID NO: 651858 - DNA, 33 bp, Homo sapien
tctgaactgaggacgcgatatatttcatggcct

SEQ ID NO: 651859 - DNA, 33 bp, Homo sapien
taggattttataaggaagaatcactgtaaagag

SEQ ID NO: 651860 - DNA, 33 bp, Homo sapien
taggattttataaggaggaatcactgtaaagag

SEQ ID NO: 651861 - DNA, 33 bp, Homo sapien
gactcctttctgacaccggcatattaatgctgg

SEQ ID NO: 651862 - DNA, 33 bp, Homo sapien
gactcctttctgacactggcatattaatgctgg

SEQ ID NO: 651863 - DNA, 33 bp, Homo sapien
tgtgctctgaatgaaaggcagcttacatctgtc

SEQ ID NO: 651864 - DNA, 33 bp, Homo sapien
tgtgctctgaatgaaatgcagcttacatctgtc

SEQ ID NO: 651865 - DNA, 33 bp, Homo sapien
ttggatatggaagggaagatgactttttctcac

SEQ ID NO: 651866 - DNA, 33 bp, Homo sapien
ttggatatggaagggaggatgactttttctcac

SEQ ID NO: 651867 - DNA, 33 bp, Homo sapien
gcagaaaaatttgaaacgtatcttgaaatgagg

SEQ ID NO: 651868 - DNA, 33 bp, Homo sapien
gcagaaaaatttgaaatgtatcttgaaatgagg

SEQ ID NO: 651869 - DNA, 33 bp, Homo sapien
ccatcagattttcttcccaagagtagtaagccc

SEQ ID NO: 651870 - DNA, 33 bp, Homo sapien
ccatcagattttcttctcaagagtagtaagccc

SEQ ID NO: 651871 - DNA, 33 bp, Homo sapien
ctctcctcttcctcaacgcaggtaggatcagtc

SEQ ID NO: 651872 - DNA, 33 bp, Homo sapien
ctctcctcttcctcaatgcaggtaggatcagtc

SEQ ID NO: 651873 - DNA, 33 bp, Homo sapien
tcctaagaatgaatgacggtttctgtaaagtct

SEQ ID NO: 651874 - DNA, 33 bp, Homo sapien
tcctaagaatgaatgatggtttctgtaaagtct

SEQ ID NO: 651875 - DNA, 33 bp, Homo sapien
gagactaaaatactcacgtttacgttcatgttt

SEQ ID NO: 651876 - DNA, 33 bp, Homo sapien
gagactaaaatactcatgtttacgttcatgttt

SEQ ID NO: 651877 - DNA, 33 bp, Homo sapien
cgccatttttgttggaagaccctgcaaaccagt

SEQ ID NO: 651878 - DNA, 33 bp, Homo sapien
cgccatttttgttggaggaccctgcaaaccagt

SEQ ID NO: 651879 - DNA, 33 bp, Homo sapien
tgtccgtactccacataactgggtcttaaccgg

SEQ ID NO: 651880 - DNA, 33 bp, Homo sapien
tgtccgtactccacatgactgggtcttaaccgg

SEQ ID NO: 651881 - DNA, 33 bp, Homo sapien
gctgtacagaaagcacagctgggaagttctcag

SEQ ID NO: 651882 - DNA, 33 bp, Homo sapien
gctgtacagaaagcacggctgggaagttctcag

SEQ ID NO: 651883 - DNA, 33 bp, Homo sapien
cttggaaggaacaaagaactgacctatcgtaag

SEQ ID NO: 651884 - DNA, 33 bp, Homo sapien
cttggaaggaacaaaggactgacctatcgtaag

SEQ ID NO: 651885 - DNA, 33 bp, Homo sapien
ataaatgtatgggaagacactaatggagtaagg

SEQ ID NO: 651886 - DNA, 33 bp, Homo sapien
ataaatgtatgggaagtcactaatggagtaagg

SEQ ID NO: 651887 - DNA, 33 bp, Homo sapien
atcctttttgccatataacagaacatattcaca

SEQ ID NO: 651888 - DNA, 33 bp, Homo sapien
atcctttttgccatattacagaacatattcaca

SEQ ID NO: 651889 - DNA, 33 bp, Homo sapien
ttattattacccaaaacgtgttagtatggtgtt

SEQ ID NO: 651890 - DNA, 33 bp, Homo sapien
ttattattacccaaaatgtgttagtatggtgtt

SEQ ID NO: 651891 - DNA, 33 bp, Homo sapien
aagagaagttattaagacaatgtttccaaatga

SEQ ID NO: 651892 - DNA, 33 bp, Homo sapien
aagagaagttattaaggcaatgtttccaaatga

SEQ ID NO: 651893 - DNA, 33 bp, Homo sapien
tggagagcggcctggactatgagatgccaataa

SEQ ID NO: 651894 - DNA, 33 bp, Homo sapien
tggagagcggcctggagtatgagatgccaataa

SEQ ID NO: 651895 - DNA, 33 bp, Homo sapien
tcttagtctgtagaagcaacatttgtctttgta

SEQ ID NO: 651896 - DNA, 33 bp, Homo sapien
tcttagtctgtagaaggaacatttgtctttgta

SEQ ID NO: 651897 - DNA, 33 bp, Homo sapien
gaagtaaaatgtggtacgttcatctaatgaaat

SEQ ID NO: 651898 - DNA, 33 bp, Homo sapien
gaagtaaaatgtggtatgttcatctaatgaaat

SEQ ID NO: 651899 - DNA, 33 bp, Homo sapien
tggacaaatttggagaaaatacaacgtggtaag

SEQ ID NO: 651900 - DNA, 33 bp, Homo sapien
tggacaaatttggagagaatacaacgtggtaag

SEQ ID NO: 651901 - DNA, 33 bp, Homo sapien
ggtctgggagctgttacgtccagtcaaagaagg

SEQ ID NO: 651902 - DNA, 33 bp, Homo sapien
ggtctgggagctgttatgtccagtcaaagaagg

SEQ ID NO: 651903 - DNA, 33 bp, Homo sapien
atcgactttccaggtgcatctttctggcataaa

SEQ ID NO: 651904 - DNA, 33 bp, Homo sapien
atcgactttccaggtgtatctttctggcataaa

SEQ ID NO: 651905 - DNA, 33 bp, Homo sapien
gactgcagagaacaccagatcatttaatattta

SEQ ID NO: 651906 - DNA, 33 bp, Homo sapien
gactgcagagaacaccggatcatttaatattta

SEQ ID NO: 651907 - DNA, 33 bp, Homo sapien
aaaagatgaggacctgaaagtttgtaattttgt

SEQ ID NO: 651908 - DNA, 33 bp, Homo sapien
aaaagatgaggacctggaagtttgtaattttgt

SEQ ID NO: 651909 - DNA, 33 bp, Homo sapien
aatgcgaaagatcgccaatacattgctttgatg

SEQ ID NO: 651910 - DNA, 33 bp, Homo sapien
aatgcgaaagatcgccgatacattgctttgatg

SEQ ID NO: 651911 - DNA, 33 bp, Homo sapien
tccagcaaacattcaaatgtctaattatacagc

SEQ ID NO: 651912 - DNA, 33 bp, Homo sapien
tccagcaaacattcaattgtctaattatacagc

SEQ ID NO: 651913 - DNA, 33 bp, Homo sapien
ttagtgtaatgttgtcaaggttaatttatgtta

SEQ ID NO: 651914 - DNA, 33 bp, Homo sapien
ttagtgtaatgttgtccaggttaatttatgtta

SEQ ID NO: 651915 - DNA, 33 bp, Homo sapien
cctattctggccttcacctttaagtgatgttct

SEQ ID NO: 651916 - DNA, 33 bp, Homo sapien
cctattctggccttcatctttaagtgatgttct

SEQ ID NO: 651917 - DNA, 33 bp, Homo sapien
gagatgctgcaggacactatggcagagttgcac

SEQ ID NO: 651918 - DNA, 33 bp, Homo sapien
gagatgctgcaggacattatggcagagttgcac

SEQ ID NO: 651919 - DNA, 33 bp, Homo sapien
cctgtagctttaagcaccatatccccaaccttg

SEQ ID NO: 651920 - DNA, 33 bp, Homo sapien
cctgtagctttaagcatcatatccccaaccttg

SEQ ID NO: 651921 - DNA, 33 bp, Homo sapien
ttattttaaaaagacaacaatcacacctaaaaa

SEQ ID NO: 651922 - DNA, 33 bp, Homo sapien
ttattttaaaaagacatcaatcacacctaaaaa

SEQ ID NO: 651923 - DNA, 33 bp, Homo sapien
gtggacaaatgacttcagaagattccttcaagg

SEQ ID NO: 651924 - DNA, 33 bp, Homo sapien
gtggacaaatgacttcggaagattccttcaagg

SEQ ID NO: 651925 - DNA, 33 bp, Homo sapien
taagatgtaggagtaaagagagcaagatgctgt

SEQ ID NO: 651926 - DNA, 33 bp, Homo sapien
taagatgtaggagtaatgagagcaagatgctgt

SEQ ID NO: 651927 - DNA, 33 bp, Homo sapien
gcgacggtagggaccgaacgaatcatgatcaga

SEQ ID NO: 651928 - DNA, 33 bp, Homo sapien
gcgacggtagggaccggacgaatcatgatcaga

SEQ ID NO: 651929 - DNA, 33 bp, Homo sapien
ggaatgtggcaaaatacgaagcaggtgttctca

SEQ ID NO: 651930 - DNA, 33 bp, Homo sapien
ggaatgtggcaaaatatgaagcaggtgttctca

SEQ ID NO: 651931 - DNA, 33 bp, Homo sapien
tggacgctgattcaaacagattgttaaaaaaaa

SEQ ID NO: 651932 - DNA, 33 bp, Homo sapien
tggacgctgattcaaatagattgttaaaaaaaa

SEQ ID NO: 651933 - DNA, 33 bp, Homo sapien
atttgggctaaatactcaaggaaggagattgct

SEQ ID NO: 651934 - DNA, 33 bp, Homo sapien
atttgggctaaatactgaaggaaggagattgct

SEQ ID NO: 651935 - DNA, 33 bp, Homo sapien
acttgcttggcatagaaagattatcaaaacact

SEQ ID NO: 651936 - DNA, 33 bp, Homo sapien
acttgcttggcatagagagattatcaaaacact

SEQ ID NO: 651937 - DNA, 33 bp, Homo sapien
tgagaatgattactaaataactgtggcttcaaa

SEQ ID NO: 651938 - DNA, 33 bp, Homo sapien
tgagaatgattactaactaactgtggcttcaaa

SEQ ID NO: 651939 - DNA, 33 bp, Homo sapien
tttgttggaattgacccctggctcttgctaatg

SEQ ID NO: 651940 - DNA, 33 bp, Homo sapien
tttgttggaattgacctctggctcttgctaatg

SEQ ID NO: 651941 - DNA, 33 bp, Homo sapien
agttaactgctctcataagtaggcaacaagatg

SEQ ID NO: 651942 - DNA, 33 bp, Homo sapien
agttaactgctctcattagtaggcaacaagatg

SEQ ID NO: 651943 - DNA, 33 bp, Homo sapien
gctgcagggagctggcgaataggtagaacttgg

SEQ ID NO: 651944 - DNA, 33 bp, Homo sapien
gctgcagggagctggctaataggtagaacttgg

SEQ ID NO: 651945 - DNA, 33 bp, Homo sapien
acaagaaactgacaacagtagtggcctttgagg

SEQ ID NO: 651946 - DNA, 33 bp, Homo sapien
acaagaaactgacaacggtagtggcctttgagg

SEQ ID NO: 651947 - DNA, 33 bp, Homo sapien
tctcattgttcttaggaaaaaggctaaattcct

SEQ ID NO: 651948 - DNA, 33 bp, Homo sapien
tctcattgttcttagggaaaaggctaaattcct

SEQ ID NO: 651949 - DNA, 33 bp, Homo sapien
aaaggattgctgaataagtctgtatggctccaa

SEQ ID NO: 651950 - DNA, 33 bp, Homo sapien
aaaggattgctgaataggtctgtatggctccaa

SEQ ID NO: 651951 - DNA, 33 bp, Homo sapien
aaatggcatcacacataacgatcagagactgaa

SEQ ID NO: 651952 - DNA, 33 bp, Homo sapien
aaatggcatcacacatgacgatcagagactgaa

SEQ ID NO: 651953 - DNA, 33 bp, Homo sapien
ggacccacttgaaacacgagagttgatacgaag

SEQ ID NO: 651954 - DNA, 33 bp, Homo sapien
ggacccacttgaaacatgagagttgatacgaag

SEQ ID NO: 651955 - DNA, 33 bp, Homo sapien
aaagaaatccagctagaacgccgcatacaagga

SEQ ID NO: 651956 - DNA, 33 bp, Homo sapien
aaagaaatccagctagcacgccgcatacaagga

SEQ ID NO: 651957 - DNA, 33 bp, Homo sapien; identical to SEQ ID NO: 651955

SEQ ID NO: 651958 - DNA, 33 bp, Homo sapien; identical to SEQ ID NO: 651956

SEQ ID NO: 651959 - DNA, 33 bp, Homo sapien
tcaggacttgaaaacaaatctacgcttccagag

SEQ ID NO: 651960 - DNA, 33 bp, Homo sapien
tcaggacttgaaaacagatctacgcttccagag

SEQ ID NO: 651961 - DNA, 33 bp, Homo sapien; identical to SEQ ID NO: 651959

SEQ ID NO: 651962 - DNA, 33 bp, Homo sapien; identical to SEQ ID NO: 651960

SEQ ID NO: 651963 - DNA, 33 bp, Homo sapien
actgctgttgctgatacccccttccttttgctc

SEQ ID NO: 651964 - DNA, 33 bp, Homo sapien
actgctgttgctgatatccccttccttttgctc

SEQ ID NO: 651965 - DNA, 33 bp, Homo sapien
tgcccactgattagcacatgtgtttgaggaaac

SEQ ID NO: 651966 - DNA, 33 bp, Homo sapien
tgcccactgattagcatatgtgtttgaggaaac

SEQ ID NO: 651967 - DNA, 33 bp, Homo sapien
tatcatacaaatgtaaaacaataagagggaaaa

SEQ ID NO: 651968 - DNA, 33 bp, Homo sapien
tatcatacaaatgtaagacaataagagggaaaa

SEQ ID NO: 651969 - DNA, 33 bp, Homo sapien
aaggaaaacctctacaatgctaatggtaatgta

SEQ ID NO: 651970 - DNA, 33 bp, Homo sapien
aaggaaaacctctacactgctaatggtaatgta

SEQ ID NO: 651971 - DNA, 33 bp, Homo sapien
gttgctagactttaaaaacgcacaattatctgt

SEQ ID NO: 651972 - DNA, 33 bp, Homo sapien
gttgctagactttaaagacgcacaattatctgt

SEQ ID NO: 651973 - DNA, 33 bp, Homo sapien
gcaaggaacatttccaagatcaacttgtgcagg

SEQ ID NO: 651974 - DNA, 33 bp, Homo sapien
gcaaggaacatttccaggatcaacttgtgcagg

SEQ ID NO: 651975 - DNA, 33 bp, Homo sapien
atagccaaatacaaacagtagaactcatttaga

SEQ ID NO: 651976 - DNA, 33 bp, Homo sapien
atagccaaatacaaacggtagaactcatttaga

SEQ ID NO: 651977 - DNA, 33 bp, Homo sapien
gtcagaaaagtaacaacagtcagataaaacagg

SEQ ID NO: 651978 - DNA, 33 bp, Homo sapien
gtcagaaaagtaacaagagtcagataaaacagg

SEQ ID NO: 651979 - DNA, 33 bp, Homo sapien
gaaattggggattgagaagattggatcttaaaa

SEQ ID NO: 651980 - DNA, 33 bp, Homo sapien
gaaattggggattgaggagattggatcttaaaa

SEQ ID NO: 651981 - DNA, 33 bp, Homo sapien
aaaatacagttggatccacattatgtttctgac

SEQ ID NO: 651982 - DNA, 33 bp, Homo sapien
aaaatacagttggatctacattatgtttctgac

SEQ ID NO: 651983 - DNA, 33 bp, Homo sapien
atgaagtggctgattacaggtagaattcagaaa

SEQ ID NO: 651984 - DNA, 33 bp, Homo sapien
atgaagtggctgattagaggtagaattcagaaa

SEQ ID NO: 651985 - DNA, 33 bp, Homo sapien
tactaagagcacaaaaaaattatgtaagcatgg

SEQ ID NO: 651986 - DNA, 33 bp, Homo sapien
tactaagagcacaaaagaattatgtaagcatgg

SEQ ID NO: 651987 - DNA, 33 bp, Homo sapien
agtgtgctatagagtccaaagtgctaaccaaaa

SEQ ID NO: 651988 - DNA, 33 bp, Homo sapien
agtgtgctatagagtctaaagtgctaaccaaaa

SEQ ID NO: 651989 - DNA, 33 bp, Homo sapien
actataaaaattcttgaaaacaatctaggaaat

SEQ ID NO: 651990 - DNA, 33 bp, Homo sapien
actataaaaattcttggaaacaatctaggaaat

SEQ ID NO: 651991 - DNA, 33 bp, Homo sapien
cttctgggtatatacaccatgaaactggaagca

SEQ ID NO: 651992 - DNA, 33 bp, Homo sapien
cttctgggtatatacatcatgaaactggaagca

SEQ ID NO: 651993 - DNA, 33 bp, Homo sapien
gttaattgaagactagacccacaattaatttgt

SEQ ID NO: 651994 - DNA, 33 bp, Homo sapien
gttaattgaagactaggcccacaattaatttgt

SEQ ID NO: 651995 - DNA, 33 bp, Homo sapien
ggagaacaaattactgccaagccttcagcaaat

SEQ ID NO: 651996 - DNA, 33 bp, Homo sapien
ggagaacaaattactgtcaagccttcagcaaat

SEQ ID NO: 651997 - DNA, 33 bp, Homo sapien
acacccttcctctacaatattttctggattctc

SEQ ID NO: 651998 - DNA, 33 bp, Homo sapien
acacccttcctctacagtattttctggattctc

SEQ ID NO: 651999 - DNA, 33 bp, Homo sapien
gttttacctttcacagacattacttcccaataa

SEQ ID NO: 652000 - DNA, 33 bp, Homo sapien
gttttacctttcacaggcattacttcccaataa

SEQ ID NO: 652001 - DNA, 33 bp, Homo sapien
tatgccaagatgacaaatgagaagtgcaagtgt

SEQ ID NO: 652002 - DNA, 33 bp, Homo sapien
tatgccaagatgacaagtgagaagtgcaagtgt

SEQ ID NO: 652003 - DNA, 33 bp, Homo sapien
gggagtgtctgttttacgtggttaaggactgaa

SEQ ID NO: 652004 - DNA, 33 bp, Homo sapien
gggagtgtctgttttatgtggttaaggactgaa

SEQ ID NO: 652005 - DNA, 33 bp, Homo sapien
gtaggaccatgatggcaaccccgagctgtaaaa

SEQ ID NO: 652006 - DNA, 33 bp, Homo sapien
gtaggaccatgatggcgaccccgagctgtaaaa

SEQ ID NO: 652007 - DNA, 33 bp, Homo sapien
ggtgatggtataagtaagacaatgatacttgtg

SEQ ID NO: 652008 - DNA, 33 bp, Homo sapien
ggtgatggtataagtacgacaatgatacttgtg

SEQ ID NO: 652009 - DNA, 33 bp, Homo sapien
ggctactttctatgccccagttagaactttctc

SEQ ID NO: 652010 - DNA, 33 bp, Homo sapien
ggctactttctatgccgcagttagaactttctc

SEQ ID NO: 652011 - DNA, 33 bp, Homo sapien
caccagaatccagcatcagggtcagcttcatga

SEQ ID NO: 652012 - DNA, 33 bp, Homo sapien
caccagaatccagcattagggtcagcttcatga

SEQ ID NO: 652013 - DNA, 33 bp, Homo sapien
tgaacacatttgaaacagggtaatttatgagaa

SEQ ID NO: 652014 - DNA, 33 bp, Homo sapien
tgaacacatttgaaacggggtaatttatgagaa

SEQ ID NO: 652015 - DNA, 33 bp, Homo sapien
acccactttgtgaaggaaagtaaaataactgat

SEQ ID NO: 652016 - DNA, 33 bp, Homo sapien
acccactttgtgaaggtaagtaaaataactgat

SEQ ID NO: 652017 - DNA, 33 bp, Homo sapien
gtaaaccagggtttgccataaaatgttatgtta

SEQ ID NO: 652018 - DNA, 33 bp, Homo sapien
gtaaaccagggtttgctataaaatgttatgtta

SEQ ID NO: 652019 - DNA, 33 bp, Homo sapien
aaaattgccactcaaaacaaggagtatagcagt

SEQ ID NO: 652020 - DNA, 33 bp, Homo sapien
aaaattgccactcaaagcaaggagtatagcagt

SEQ ID NO: 652021 - DNA, 33 bp, Homo sapien
tgacaaaactatgagacagaaaacactcgtgtt

SEQ ID NO: 652022 - DNA, 33 bp, Homo sapien
tgacaaaactatgagatagaaaacactcgtgtt

SEQ ID NO: 652023 - DNA, 33 bp, Homo sapien
caaagactgcatggacacaaaaaagggaacaac

SEQ ID NO: 652024 - DNA, 33 bp, Homo sapien
caaagactgcatggacccaaaaaagggaacaac

SEQ ID NO: 652025 - DNA, 33 bp, Homo sapien
atagtgtgcctacatcagagtatttttgagggg

SEQ ID NO: 652026 - DNA, 33 bp, Homo sapien
atagtgtgcctacatcggagtatttttgagggg

SEQ ID NO: 652027 - DNA, 33 bp, Homo sapien
atcagaacctttgtgaagaaatactcaagtctc

SEQ ID NO: 652028 - DNA, 33 bp, Homo sapien
atcagaacctttgtgacgaaatactcaagtctc

SEQ ID NO: 652029 - DNA, 33 bp, Homo sapien
ccagaatatttctccaagctctttctgctcaac

SEQ ID NO: 652030 - DNA, 33 bp, Homo sapien
ccagaatatttctccatgctctttctgctcaac

SEQ ID NO: 652031 - DNA, 33 bp, Homo sapien
attaaaaatggcattacgctataagtactgggt

SEQ ID NO: 652032 - DNA, 33 bp, Homo sapien
attaaaaatggcattatgctataagtactgggt

SEQ ID NO: 652033 - DNA, 33 bp, Homo sapien
gtttgtaataagcagacgttataattcttttgc

SEQ ID NO: 652034 - DNA, 33 bp, Homo sapien
gtttgtaataagcagatgttataattcttttgc

SEQ ID NO: 652035 - DNA, 33 bp, Homo sapien
attctgactgaaaaataaaaactgagcaaactt

SEQ ID NO: 652036 - DNA, 33 bp, Homo sapien
attctgactgaaaaatcaaaactgagcaaactt

SEQ ID NO: 652037 - DNA, 33 bp, Homo sapien
agttccaggccatgcacctgctcccagttgaat

SEQ ID NO: 652038 - DNA, 33 bp, Homo sapien
agttccaggccatgcatctgctcccagttgaat

SEQ ID NO: 652039 - DNA, 33 bp, Homo sapien
tagaagagattggtcaacagtctgaaaatcaga

SEQ ID NO: 652040 - DNA, 33 bp, Homo sapien
tagaagagattggtcagcagtctgaaaatcaga

SEQ ID NO: 652041 - DNA, 33 bp, Homo sapien
aggaggctcgtgaaaaatatattctgcatcaca

SEQ ID NO: 652042 - DNA, 33 bp, Homo sapien
aggaggctcgtgaaaagtatattctgcatcaca

SEQ ID NO: 652043 - DNA, 33 bp, Homo sapien
gtaacagtccaaaagcggtctctcaaaaggaga

SEQ ID NO: 652044 - DNA, 33 bp, Homo sapien
gtaacagtccaaaagctgtctctcaaaaggaga

SEQ ID NO: 652045 - DNA, 33 bp, Homo sapien; identical to SEQ ID NO: 652043

SEQ ID NO: 652046 - DNA, 33 bp, Homo sapien; identical to SEQ ID NO: 652044

SEQ ID NO: 652047 - DNA, 33 bp, Homo sapien
gcattaataggaaaaacggttgtgtggcaggaa

SEQ ID NO: 652048 - DNA, 33 bp, Homo sapien
gcattaataggaaaaatggttgtgtggcaggaa

SEQ ID NO: 652049 - DNA, 33 bp, Homo sapien
ccatttcctcctctcaagtgtttgtaagcatta

SEQ ID NO: 652050 - DNA, 33 bp, Homo sapien
ccatttcctcctctcaggtgtttgtaagcatta

SEQ ID NO: 652051 - DNA, 33 bp, Homo sapien
acaataaacatacaaaccaggtaacacacatag

SEQ ID NO: 652052 - DNA, 33 bp, Homo sapien
acaataaacatacaaagcaggtaacacacatag

SEQ ID NO: 652053 - DNA, 33 bp, Homo sapien
tgtttcagagagtttaactacataatggcaggg

SEQ ID NO: 652054 - DNA, 33 bp, Homo sapien
tgtttcagagagtttagctacataatggcaggg

SEQ ID NO: 652055 - DNA, 33 bp, Homo sapien
tacaatgaggtgcacaagcttttccatcattta

SEQ ID NO: 652056 - DNA, 33 bp, Homo sapien
tacaatgaggtgcacatgcttttccatcattta

SEQ ID NO: 652057 - DNA, 33 bp, Homo sapien
gaggattcagactgtaagccatttctccagcaa

SEQ ID NO: 652058 - DNA, 33 bp, Homo sapien
gaggattcagactgtatgccatttctccagcaa

SEQ ID NO: 652059 - DNA, 33 bp, Homo sapien
tgcaatagagactcaacaaatgatagccatctt

SEQ ID NO: 652060 - DNA, 33 bp, Homo sapien
tgcaatagagactcaataaatgatagccatctt

SEQ ID NO: 652061 - DNA, 33 bp, Homo sapien
aagaaattgtgtgagtcaaaccaaagtaattct

SEQ ID NO: 652062 - DNA, 33 bp, Homo sapien
aagaaattgtgtgagttaaaccaaagtaattct

SEQ ID NO: 652063 - DNA, 33 bp, Homo sapien
gcagtcataagctaacaagctccctgtaaaagc

SEQ ID NO: 652064 - DNA, 33 bp, Homo sapien
gcagtcataagctaactagctccctgtaaaagc

SEQ ID NO: 652065 - DNA, 33 bp, Homo sapien
tcagattacatgcctccaaaatcaggacagtaa

SEQ ID NO: 652066 - DNA, 33 bp, Homo sapien
tcagattacatgcctctaaaatcaggacagtaa

SEQ ID NO: 652067 - DNA, 33 bp, Homo sapien
ttaaaaagctgagaaaactgaaaaatcaacaac

SEQ ID NO: 652068 - DNA, 33 bp, Homo sapien
ttaaaaagctgagaaacctgaaaaatcaacaac

SEQ ID NO: 652069 - DNA, 33 bp, Homo sapien
tgtaatttatgtgtaactggaatactagataga

SEQ ID NO: 652070 - DNA, 33 bp, Homo sapien
tgtaatttatgtgtaattggaatactagataga

SEQ ID NO: 652071 - DNA, 33 bp, Homo sapien
atgtccaaagcaatccaagattcaacattattc

SEQ ID NO: 652072 - DNA, 33 bp, Homo sapien
atgtccaaagcaatcccagattcaacattattc

SEQ ID NO: 652073 - DNA, 33 bp, Homo sapien
ctttcccaacagttccccaaaatcttaactcat

SEQ ID NO: 652074 - DNA, 33 bp, Homo sapien
ctttcccaacagttccgcaaaatcttaactcat

SEQ ID NO: 652075 - DNA, 33 bp, Homo sapien
atcaggtagctgaagaataagttacaagagaat

SEQ ID NO: 652076 - DNA, 33 bp, Homo sapien
atcaggtagctgaagagtaagttacaagagaat

SEQ ID NO: 652077 - DNA, 33 bp, Homo sapien
tagtaggcttcagagaaattaagttgtaaaatg

SEQ ID NO: 652078 - DNA, 33 bp, Homo sapien
tagtaggcttcagagagattaagttgtaaaatg

SEQ ID NO: 652079 - DNA, 33 bp, Homo sapien
tatttttggtttacaccgctatcttagatttct

SEQ ID NO: 652080 - DNA, 33 bp, Homo sapien
tatttttggtttacactgctatcttagatttct

SEQ ID NO: 652081 - DNA, 33 bp, Homo sapien
ggtacttggagaaagcacattaccactttgaac

SEQ ID NO: 652082 - DNA, 33 bp, Homo sapien
ggtacttggagaaagcgcattaccactttgaac

SEQ ID NO: 652083 - DNA, 33 bp, Homo sapien
agcctagtggtgctatcaaaagacagccaccat

SEQ ID NO: 652084 - DNA, 33 bp, Homo sapien
agcctagtggtgctatgaaaagacagccaccat

SEQ ID NO: 652085 - DNA, 33 bp, Homo sapien
tctaacagagcctaccaaaaagagaaggaacca

SEQ ID NO: 652086 - DNA, 33 bp, Homo sapien
tctaacagagcctaccgaaaagagaaggaacca

SEQ ID NO: 652087 - DNA, 33 bp, Homo sapien; identical to SEQ ID NO: 652085

SEQ ID NO: 652088 - DNA, 33 bp, Homo sapien; identical to SEQ ID NO: 652086

SEQ ID NO: 652089 - DNA, 33 bp, Homo sapien
cagaagaaaaaccactcacttatgatgccagtg

SEQ ID NO: 652090 - DNA, 33 bp, Homo sapien
cagaagaaaaaccactgacttatgatgccagtg

SEQ ID NO: 652091 - DNA, 33 bp, Homo sapien
tgatgaagagaaagaacgtcagcacctagcctc

SEQ ID NO: 652092 - DNA, 33 bp, Homo sapien
tgatgaagagaaagaatgtcagcacctagcctc

SEQ ID NO: 652093 - DNA, 33 bp, Homo sapien
cattctaaaagcatgaacaaagaaaagtatcct

SEQ ID NO: 652094 - DNA, 33 bp, Homo sapien
cattctaaaagcatgaccaaagaaaagtatcct

SEQ ID NO: 652095 - DNA, 33 bp, Homo sapien
taattcatgttttcaaaaatacacagagataaa

SEQ ID NO: 652096 - DNA, 33 bp, Homo sapien
taattcatgttttcaacaatacacagagataaa

SEQ ID NO: 652097 - DNA, 33 bp, Homo sapien
aaccatcattctactcactaattctatgagatc

SEQ ID NO: 652098 - DNA, 33 bp, Homo sapien
aaccatcattctactctctaattctatgagatc

SEQ ID NO: 652099 - DNA, 33 bp, Homo sapien
cctctagtcctaagccacagggaatctactttc

SEQ ID NO: 652100 - DNA, 33 bp, Homo sapien
cctctagtcctaagccgcagggaatctactttc

SEQ ID NO: 652101 - DNA, 33 bp, Homo sapien
ttgcatactgttctcaccctcctgaaagtcagt

SEQ ID NO: 652102 - DNA, 33 bp, Homo sapien
ttgcatactgttctcatcctcctgaaagtcagt

SEQ ID NO: 652103 - DNA, 33 bp, Homo sapien
attatagttctcatcaacctctaaaatcatgtt

SEQ ID NO: 652104 - DNA, 33 bp, Homo sapien
attatagttctcatcagcctctaaaatcatgtt

SEQ ID NO: 652105 - DNA, 33 bp, Homo sapien
aatcctgatttccacactccgagtctataactt

SEQ ID NO: 652106 - DNA, 33 bp, Homo sapien
aatcctgatttccacattccgagtctataactt

SEQ ID NO: 652107 - DNA, 33 bp, Homo sapien
taatgcaaccaccttcaaaaatgatttggtgtt

SEQ ID NO: 652108 - DNA, 33 bp, Homo sapien
taatgcaaccaccttcgaaaatgatttggtgtt

SEQ ID NO: 652109 - DNA, 33 bp, Homo sapien
tcctgtgacaatgtagaacaggataagtattac

SEQ ID NO: 652110 - DNA, 33 bp, Homo sapien
tcctgtgacaatgtaggacaggataagtattac

SEQ ID NO: 652111 - DNA, 33 bp, Homo sapien
agggaaatcactcaaaaaattcacaaggtgaat

SEQ ID NO: 652112 - DNA, 33 bp, Homo sapien
agggaaatcactcaaataattcacaaggtgaat

SEQ ID NO: 652113 - DNA, 33 bp, Homo sapien
ctctggttctaagttacacagagaagaagggaa

SEQ ID NO: 652114 - DNA, 33 bp, Homo sapien
ctctggttctaagttatacagagaagaagggaa

SEQ ID NO: 652115 - DNA, 33 bp, Homo sapien
ggagttggtcacacaaactggtgagacacattt

SEQ ID NO: 652116 - DNA, 33 bp, Homo sapien
ggagttggtcacacaacctggtgagacacattt

SEQ ID NO: 652117 - DNA, 33 bp, Homo sapien
tcagaaacaccacaaacgaagaaaaccatacaa

SEQ ID NO: 652118 - DNA, 33 bp, Homo sapien
tcagaaacaccacaaaggaagaaaaccatacaa

SEQ ID NO: 652119 - DNA, 33 bp, Homo sapien
ctatgtgagcgggacactgagttcttccccagt

SEQ ID NO: 652120 - DNA, 33 bp, Homo sapien
ctatgtgagcgggacagtgagttcttccccagt

SEQ ID NO: 652121 - DNA, 33 bp, Homo sapien
tctttaggctaaaattaaaaatcatacatgctt

SEQ ID NO: 652122 - DNA, 33 bp, Homo sapien
tctttaggctaaaatttaaaatcatacatgctt

SEQ ID NO: 652123 - DNA, 33 bp, Homo sapien
ctgagacttcctaagaagatgatgttgctgaag

SEQ ID NO: 652124 - DNA, 33 bp, Homo sapien
ctgagacttcctaagatgatgatgttgctgaag

SEQ ID NO: 652125 - DNA, 33 bp, Homo sapien
ctacacattgggaatcaccaagaatctctttgt

SEQ ID NO: 652126 - DNA, 33 bp, Homo sapien
ctacacattgggaatcgccaagaatctctttgt

SEQ ID NO: 652127 - DNA, 33 bp, Homo sapien
cctgtatggttgctccaaaaactccagtggctt

SEQ ID NO: 652128 - DNA, 33 bp, Homo sapien
cctgtatggttgctccgaaaactccagtggctt

SEQ ID NO: 652129 - DNA, 33 bp, Homo sapien
ttctctgttctagcataagaatcttttatctct

SEQ ID NO: 652130 - DNA, 33 bp, Homo sapien
ttctctgttctagcatgagaatcttttatctct

SEQ ID NO: 652131 - DNA, 33 bp, Homo sapien
ttagatgaaaattctaaggaaaaacccaggata

SEQ ID NO: 652132 - DNA, 33 bp, Homo sapien
ttagatgaaaattctatggaaaaacccaggata

SEQ ID NO: 652133 - DNA, 33 bp, Homo sapien
ggcctcatgaaaaaggaagcttaaactgtagtc

SEQ ID NO: 652134 - DNA, 33 bp, Homo sapien
ggcctcatgaaaaaggcagcttaaactgtagtc

SEQ ID NO: 652135 - DNA, 33 bp, Homo sapien
gttaaggtatccattacggctgactagctcata

SEQ ID NO: 652136 - DNA, 33 bp, Homo sapien
gttaaggtatccattatggctgactagctcata

SEQ ID NO: 652137 - DNA, 33 bp, Homo sapien
agtaagtgttcaataccgctaccatactcttta

SEQ ID NO: 652138 - DNA, 33 bp, Homo sapien
agtaagtgttcaatactgctaccatactcttta

SEQ ID NO: 652139 - DNA, 33 bp, Homo sapien
gaagttctgcaaggtgaattttcatggcagcca

SEQ ID NO: 652140 - DNA, 33 bp, Homo sapien
gaagttctgcaaggtgtattttcatggcagcca

SEQ ID NO: 652141 - DNA, 33 bp, Homo sapien
tttagtatctgttggaactttgttggtaatacc

SEQ ID NO: 652142 - DNA, 33 bp, Homo sapien
tttagtatctgttggatctttgttggtaatacc

SEQ ID NO: 652143 - DNA, 33 bp, Homo sapien
accaatatagaaaaaaagttatcattgtccagg

SEQ ID NO: 652144 - DNA, 33 bp, Homo sapien
accaatatagaaaaaaggttatcattgtccagg

SEQ ID NO: 652145 - DNA, 33 bp, Homo sapien
aatctctccttgatcacagtccatgtgtacttc

SEQ ID NO: 652146 - DNA, 33 bp, Homo sapien
aatctctccttgatcatagtccatgtgtacttc

SEQ ID NO: 652147 - DNA, 33 bp, Homo sapien
gacttaattaactccagtcatgtttttgatgtt

SEQ ID NO: 652148 - DNA, 33 bp, Homo sapien
gacttaattaactccattcatgtttttgatgtt

SEQ ID NO: 652149 - DNA, 33 bp, Homo sapien
catgaattgtcctttacggttaactatccatat

SEQ ID NO: 652150 - DNA, 33 bp, Homo sapien
catgaattgtcctttatggttaactatccatat

SEQ ID NO: 652151 - DNA, 33 bp, Homo sapien
atttaaaatgttatcaaaatgtcattattatga

SEQ ID NO: 652152 - DNA, 33 bp, Homo sapien
atttaaaatgttatcacaatgtcattattatga

SEQ ID NO: 652153 - DNA, 33 bp, Homo sapien
caacatttttagtctaaatccattctcagggaa

SEQ ID NO: 652154 - DNA, 33 bp, Homo sapien
caacatttttagtctatatccattctcagggaa

SEQ ID NO: 652155 - DNA, 33 bp, Homo sapien
gaatcggaggacatgaggagaggtataaaaatt

SEQ ID NO: 652156 - DNA, 33 bp, Homo sapien
gaatcggaggacatgatgagaggtataaaaatt

SEQ ID NO: 652157 - DNA, 33 bp, Homo sapien
tgcaaatgtcaaatacagatagccaaggtaatt

SEQ ID NO: 652158 - DNA, 33 bp, Homo sapien
tgcaaatgtcaaatacggatagccaaggtaatt

SEQ ID NO: 652159 - DNA, 33 bp, Homo sapien
tacttacctctgcatcactctgatagagaaatg

SEQ ID NO: 652160 - DNA, 33 bp, Homo sapien
tacttacctctgcatcgctctgatagagaaatg

SEQ ID NO: 652161 - DNA, 33 bp, Homo sapien
aagatctcagagaggacgtagctgaagatcaag

SEQ ID NO: 652162 - DNA, 33 bp, Homo sapien
aagatctcagagaggatgtagctgaagatcaag

SEQ ID NO: 652163 - DNA, 33 bp, Homo sapien
tcagttcaacagtcagacagatagaaaaaaggg

SEQ ID NO: 652164 - DNA, 33 bp, Homo sapien
tcagttcaacagtcaggcagatagaaaaaaggg

SEQ ID NO: 652165 - DNA, 33 bp, Homo sapien
cccttaggaattaatgcaggcaggtagaagaat

SEQ ID NO: 652166 - DNA, 33 bp, Homo sapien
cccttaggaattaatggaggcaggtagaagaat

SEQ ID NO: 652167 - DNA, 33 bp, Homo sapien
gatggaattaaacatgaaaaagatttgtaggac

SEQ ID NO: 652168 - DNA, 33 bp, Homo sapien
gatggaattaaacatggaaaagatttgtaggac

SEQ ID NO: 652169 - DNA, 33 bp, Homo sapien
tgtctctgcctggaccaaatgcacttgtcacca

SEQ ID NO: 652170 - DNA, 33 bp, Homo sapien
tgtctctgcctggaccgaatgcacttgtcacca

SEQ ID NO: 652171 - DNA, 33 bp, Homo sapien
aaaaacacaacatcagaaagagcatacaacaaa

SEQ ID NO: 652172 - DNA, 33 bp, Homo sapien
aaaaacacaacatcaggaagagcatacaacaaa

SEQ ID NO: 652173 - DNA, 33 bp, Homo sapien
gaattattgaaagtaaagcatactggagaaaag

SEQ ID NO: 652174 - DNA, 33 bp, Homo sapien
gaattattgaaagtaatgcatactggagaaaag

SEQ ID NO: 652175 - DNA, 33 bp, Homo sapien
attgtgcctatagttaacagtattgtatagtgc

SEQ ID NO: 652176 - DNA, 33 bp, Homo sapien
attgtgcctatagttagcagtattgtatagtgc

SEQ ID NO: 652177 - DNA, 33 bp, Homo sapien
ggtgagttccaagagaagtagacagtaaaatat

SEQ ID NO: 652178 - DNA, 33 bp, Homo sapien
ggtgagttccaagagaggtagacagtaaaatat

SEQ ID NO: 652179 - DNA, 33 bp, Homo sapien
ttccctttagaacaccaactggctattatctca

SEQ ID NO: 652180 - DNA, 33 bp, Homo sapien
ttccctttagaacacctactggctattatctca

SEQ ID NO: 652181 - DNA, 33 bp, Homo sapien
ctctatactttctgaacttcacatgtggtgtcc

SEQ ID NO: 652182 - DNA, 33 bp, Homo sapien
ctctatactttctgaatttcacatgtggtgtcc

SEQ ID NO: 652183 - DNA, 33 bp, Homo sapien
gaagggaaaacagtgaaaaatgactcaaaagct

SEQ ID NO: 652184 - DNA, 33 bp, Homo sapien
gaagggaaaacagtgagaaatgactcaaaagct

SEQ ID NO: 652185 - DNA, 33 bp, Homo sapien
gtttcttgtactttctaaaaaaattctgacaaa

SEQ ID NO: 652186 - DNA, 33 bp, Homo sapien
gtttcttgtactttctgaaaaaattctgacaaa

SEQ ID NO: 652187 - DNA, 33 bp, Homo sapien
attactgtatgtatcactgaggtgtttatatat

SEQ ID NO: 652188 - DNA, 33 bp, Homo sapien
attactgtatgtatcattgaggtgtttatatat

SEQ ID NO: 652189 - DNA, 33 bp, Homo sapien
tacaagttaggacaaagaagggtctggcaaaaa

SEQ ID NO: 652190 - DNA, 33 bp, Homo sapien
tacaagttaggacaaataagggtctggcaaaaa

SEQ ID NO: 652191 - DNA, 33 bp, Homo sapien
cacactgctttaaagaactgcctaagactgagt

SEQ ID NO: 652192 - DNA, 33 bp, Homo sapien
cacactgctttaaagagctgcctaagactgagt

SEQ ID NO: 652193 - DNA, 33 bp, Homo sapien
tattctacttcgcttaacaacataagttccaat

SEQ ID NO: 652194 - DNA, 33 bp, Homo sapien
tattctacttcgcttatcaacataagttccaat

SEQ ID NO: 652195 - DNA, 33 bp, Homo sapien
tctcctttgttttttaaatggaagcttacagta

SEQ ID NO: 652196 - DNA, 33 bp, Homo sapien
tctcctttgttttttagatggaagcttacagta

SEQ ID NO: 652197 - DNA, 33 bp, Homo sapien
atgtaactgtggctaacctttcttactctgata

SEQ ID NO: 652198 - DNA, 33 bp, Homo sapien
atgtaactgtggctaatctttcttactctgata

SEQ ID NO: 652199 - DNA, 33 bp, Homo sapien
aggtaaatagaacagtaaagatcgaggaaaatc

SEQ ID NO: 652200 - DNA, 33 bp, Homo sapien
aggtaaatagaacagtgaagatcgaggaaaatc

SEQ ID NO: 652201 - DNA, 33 bp, Homo sapien
tgcttcccagaatcaggaaaattattagttgtt

SEQ ID NO: 652202 - DNA, 33 bp, Homo sapien
tgcttcccagaatcagtaaaattattagttgtt

SEQ ID NO: 652203 - DNA, 33 bp, Homo sapien
taaagatggaaggcacacattagtattagacct

SEQ ID NO: 652204 - DNA, 33 bp, Homo sapien
taaagatggaaggcacgcattagtattagacct

SEQ ID NO: 652205 - DNA, 33 bp, Homo sapien
ttgtcctgcgataaaacaacctcataatagagc

SEQ ID NO: 652206 - DNA, 33 bp, Homo sapien
ttgtcctgcgataaaataacctcataatagagc

SEQ ID NO: 652207 - DNA, 33 bp, Homo sapien
ttaattggtagggtgcaagaaagtagaacagca

SEQ ID NO: 652208 - DNA, 33 bp, Homo sapien
ttaattggtagggtgcgagaaagtagaacagca

SEQ ID NO: 652209 - DNA, 33 bp, Homo sapien
gaacggttttacgaaccagatgggagaagcaac

SEQ ID NO: 652210 - DNA, 33 bp, Homo sapien
gaacggttttacgaactagatgggagaagcaac

SEQ ID NO: 652211 - DNA, 33 bp, Homo sapien
gaaattaggcttagacaagcataaaaatgaagg

SEQ ID NO: 652212 - DNA, 33 bp, Homo sapien
gaaattaggcttagactagcataaaaatgaagg

SEQ ID NO: 652213 - DNA, 33 bp, Homo sapien
cccaaagtgaatccaaatgggagatacctggga

SEQ ID NO: 652214 - DNA, 33 bp, Homo sapien
cccaaagtgaatccaagtgggagatacctggga

SEQ ID NO: 652215 - DNA, 33 bp, Homo sapien
aaaggtgttaatatcaacatcaagaaactcact

SEQ ID NO: 652216 - DNA, 33 bp, Homo sapien
aaaggtgttaatatcaccatcaagaaactcact

SEQ ID NO: 652217 - DNA, 33 bp, Homo sapien
acacacttccaaacaaacatgtctcctgagaac

SEQ ID NO: 652218 - DNA, 33 bp, Homo sapien
acacacttccaaacaaccatgtctcctgagaac

SEQ ID NO: 652219 - DNA, 33 bp, Homo sapien
aagttaatggatgcaacaatctactctcatcat

SEQ ID NO: 652220 - DNA, 33 bp, Homo sapien
aagttaatggatgcaataatctactctcatcat

SEQ ID NO: 652221 - DNA, 33 bp, Homo sapien
tgtacatctctgcctcgcattttactaatctgt

SEQ ID NO: 652222 - DNA, 33 bp, Homo sapien
tgtacatctctgcctctcattttactaatctgt

SEQ ID NO: 652223 - DNA, 33 bp, Homo sapien
gtattattaggaaaacagatggaatcattcaag

SEQ ID NO: 652224 - DNA, 33 bp, Homo sapien
gtattattaggaaaaccgatggaatcattcaag

SEQ ID NO: 652225 - DNA, 33 bp, Homo sapien
tcccagatgacttataaaacagaaggaagactt

SEQ ID NO: 652226 - DNA, 33 bp, Homo sapien
tcccagatgacttatacaacagaaggaagactt

SEQ ID NO: 652227 - DNA, 33 bp, Homo sapien
caacgtgactcacccaaagactttttcccaagg

SEQ ID NO: 652228 - DNA, 33 bp, Homo sapien
caacgtgactcacccagagactttttcccaagg

SEQ ID NO: 652229 - DNA, 33 bp, Homo sapien
tttgtggaagctccaagtagtatttgaaatttt

SEQ ID NO: 652230 - DNA, 33 bp, Homo sapien
tttgtggaagctccaattagtatttgaaatttt

SEQ ID NO: 652231 - DNA, 33 bp, Homo sapien
gaaaatactccaaacaaaaatggtgttgattga

SEQ ID NO: 652232 - DNA, 33 bp, Homo sapien
gaaaatactccaaacagaaatggtgttgattga

SEQ ID NO: 652233 - DNA, 33 bp, Homo sapien
gcttataaagtgacacaaaaaatgttattcgag

SEQ ID NO: 652234 - DNA, 33 bp, Homo sapien
gcttataaagtgacacgaaaaatgttattcgag

SEQ ID NO: 652235 - DNA, 33 bp, Homo sapien
ctgtgctaaaatgttcactaaaaagtaatgcta

SEQ ID NO: 652236 - DNA, 33 bp, Homo sapien
ctgtgctaaaatgttcgctaaaaagtaatgcta

SEQ ID NO: 652237 - DNA, 33 bp, Homo sapien
aatggagaaagatgcaatagaataacgagatca

SEQ ID NO: 652238 - DNA, 33 bp, Homo sapien
aatggagaaagatgcactagaataacgagatca

SEQ ID NO: 652239 - DNA, 33 bp, Homo sapien
ttgccatgcttcattcactgtgtagttagtttt

SEQ ID NO: 652240 - DNA, 33 bp, Homo sapien
ttgccatgcttcattcgctgtgtagttagtttt

SEQ ID NO: 652241 - DNA, 33 bp, Homo sapien
ttcacagtactctactaacagaatttacacatg

SEQ ID NO: 652242 - DNA, 33 bp, Homo sapien
ttcacagtactctactcacagaatttacacatg

SEQ ID NO: 652243 - DNA, 33 bp, Homo sapien
tagaaagattcactaaaatgttaataagcaggc

SEQ ID NO: 652244 - DNA, 33 bp, Homo sapien
tagaaagattcactaagatgttaataagcaggc

SEQ ID NO: 652245 - DNA, 33 bp, Homo sapien
aaatcccaggtacttcactaaaatgtaccccaa

SEQ ID NO: 652246 - DNA, 33 bp, Homo sapien
aaatcccaggtacttcgctaaaatgtaccccaa

SEQ ID NO: 652247 - DNA, 33 bp, Homo sapien
gatccagaaagtggtcactagcaatatattcct

SEQ ID NO: 652248 - DNA, 33 bp, Homo sapien
gatccagaaagtggtcgctagcaatatattcct

SEQ ID NO: 652249 - DNA, 33 bp, Homo sapien
tttttgggctgactacaagaaaaatgaatggga

SEQ ID NO: 652250 - DNA, 33 bp, Homo sapien
tttttgggctgactaccagaaaaatgaatggga

SEQ ID NO: 652251 - DNA, 33 bp, Homo sapien
agagaaggcattctgactatgatgcatgaatga

SEQ ID NO: 652252 - DNA, 33 bp, Homo sapien
agagaaggcattctgattatgatgcatgaatga

SEQ ID NO: 652253 - DNA, 33 bp, Homo sapien
tttcttacacaagtacacacattcactagatat

SEQ ID NO: 652254 - DNA, 33 bp, Homo sapien
tttcttacacaagtacgcacattcactagatat

SEQ ID NO: 652255 - DNA, 33 bp, Homo sapien
aactgccttggcccagaagtagtactcatagtt

SEQ ID NO: 652256 - DNA, 33 bp, Homo sapien
aactgccttggcccagcagtagtactcatagtt

SEQ ID NO: 652257 - DNA, 33 bp, Homo sapien
tcctctgcttgctggagaaataagttgcctgtt

SEQ ID NO: 652258 - DNA, 33 bp, Homo sapien
tcctctgcttgctggataaataagttgcctgtt

SEQ ID NO: 652259 - DNA, 33 bp, Homo sapien
ctgcactttggaatgcacatttggaatagagac

SEQ ID NO: 652260 - DNA, 33 bp, Homo sapien
ctgcactttggaatgcgcatttggaatagagac

SEQ ID NO: 652261 - DNA, 33 bp, Homo sapien
agaggggtgccttaaaaaatgtttttgcattag

SEQ ID NO: 652262 - DNA, 33 bp, Homo sapien
agaggggtgccttaaataatgtttttgcattag

SEQ ID NO: 652263 - DNA, 33 bp, Homo sapien
gtctccaagtttttcccattacattttgcttaa

SEQ ID NO: 652264 - DNA, 33 bp, Homo sapien
gtctccaagtttttcctattacattttgcttaa

SEQ ID NO: 652265 - DNA, 33 bp, Homo sapien
cataagaaaattgtaactgtctattgatggaaa

SEQ ID NO: 652266 - DNA, 33 bp, Homo sapien
cataagaaaattgtaagtgtctattgatggaaa

SEQ ID NO: 652267 - DNA, 33 bp, Homo sapien
ataaacattgtactcaagcagtttcaaagaaat

SEQ ID NO: 652268 - DNA, 33 bp, Homo sapien
ataaacattgtactcacgcagtttcaaagaaat

SEQ ID NO: 652269 - DNA, 33 bp, Homo sapien
tacttattactgtagacactgctaaattgcatc

SEQ ID NO: 652270 - DNA, 33 bp, Homo sapien
tacttattactgtagatactgctaaattgcatc

SEQ ID NO: 652271 - DNA, 33 bp, Homo sapien
aagtcctccctcgaaaatgggaatgtttgagca

SEQ ID NO: 652272 - DNA, 33 bp, Homo sapien
aagtcctccctcgaaactgggaatgtttgagca

SEQ ID NO: 652273 - DNA, 33 bp, Homo sapien
ttaatcctggtaataaatgatggaacagtgtca

SEQ ID NO: 652274 - DNA, 33 bp, Homo sapien
ttaatcctggtaataattgatggaacagtgtca

SEQ ID NO: 652275 - DNA, 33 bp, Homo sapien
acactaccagtcaacactgttaagaaagctctt

SEQ ID NO: 652276 - DNA, 33 bp, Homo sapien
acactaccagtcaacattgttaagaaagctctt

SEQ ID NO: 652277 - DNA, 33 bp, Homo sapien
cgtgtgagacggtataaatatattgtcatggaa

SEQ ID NO: 652278 - DNA, 33 bp, Homo sapien
cgtgtgagacggtatacatatattgtcatggaa

SEQ ID NO: 652279 - DNA, 33 bp, Homo sapien
gtgataggaagaaccaacggagaaaaggcaaat

SEQ ID NO: 652280 - DNA, 33 bp, Homo sapien
gtgataggaagaaccagcggagaaaaggcaaat

SEQ ID NO: 652281 - DNA, 33 bp, Homo sapien
acgcgccttccagagccatttgggcaactcgct

SEQ ID NO: 652282 - DNA, 33 bp, Homo sapien
acgcgccttccagagctatttgggcaactcgct

SEQ ID NO: 652283 - DNA, 33 bp, Homo sapien
aggaagtaacatttacgggcacacttttcaggt

SEQ ID NO: 652284 - DNA, 33 bp, Homo sapien
aggaagtaacatttactggcacacttttcaggt

SEQ ID NO: 652285 - DNA, 33 bp, Homo sapien
ataatctacaatggcaaaacacagattcacaga

SEQ ID NO: 652286 - DNA, 33 bp, Homo sapien
ataatctacaatggcagaacacagattcacaga

SEQ ID NO: 652287 - DNA, 33 bp, Homo sapien
ctccaaagaagctgtaataagtaaactttatgg

SEQ ID NO: 652288 - DNA, 33 bp, Homo sapien
ctccaaagaagctgtagtaagtaaactttatgg

SEQ ID NO: 652289 - DNA, 33 bp, Homo sapien
gtgcagatataatggaactagcaagataactag

SEQ ID NO: 652290 - DNA, 33 bp, Homo sapien
gtgcagatataatggagctagcaagataactag

SEQ ID NO: 652291 - DNA, 33 bp, Homo sapien
ttaactctttaacaaccccactgattcttcagg

SEQ ID NO: 652292 - DNA, 33 bp, Homo sapien
ttaactctttaacaactccactgattcttcagg

SEQ ID NO: 652293 - DNA, 33 bp, Homo sapien
gaaaagactaggggcaacaaatgataaacacta

SEQ ID NO: 652294 - DNA, 33 bp, Homo sapien
gaaaagactaggggcagcaaatgataaacacta

SEQ ID NO: 652295 - DNA, 33 bp, Homo sapien
gtgccacagctggcagaaacaaagaggtaatac

SEQ ID NO: 652296 - DNA, 33 bp, Homo sapien
gtgccacagctggcaggaacaaagaggtaatac

SEQ ID NO: 652297 - DNA, 33 bp, Homo sapien
tctccagaatgcacaaaggtagagtaattgaat

SEQ ID NO: 652298 - DNA, 33 bp, Homo sapien
tctccagaatgcacaagggtagagtaattgaat

SEQ ID NO: 652299 - DNA, 33 bp, Homo sapien
cttcagctattcatagacctcctggtaatttga

SEQ ID NO: 652300 - DNA, 33 bp, Homo sapien
cttcagctattcatagtcctcctggtaatttga

SEQ ID NO: 652301 - DNA, 33 bp, Homo sapien
tgtggacagctatgcactgatgaaatttgtagc

SEQ ID NO: 652302 - DNA, 33 bp, Homo sapien
tgtggacagctatgcattgatgaaatttgtagc

SEQ ID NO: 652303 - DNA, 33 bp, Homo sapien
ctgtccacagggcataacacaccttgaggggaa

SEQ ID NO: 652304 - DNA, 33 bp, Homo sapien
ctgtccacagggcatagcacaccttgaggggaa

SEQ ID NO: 652305 - DNA, 33 bp, Homo sapien
tttcttcagccagcacaatttgcagctactgag

SEQ ID NO: 652306 - DNA, 33 bp, Homo sapien
tttcttcagccagcacgatttgcagctactgag

SEQ ID NO: 652307 - DNA, 33 bp, Homo sapien
aacttgcccatttagcaaaacagcacttatctg

SEQ ID NO: 652308 - DNA, 33 bp, Homo sapien
aacttgcccatttagcgaaacagcacttatctg

SEQ ID NO: 652309 - DNA, 33 bp, Homo sapien
actgatgttggggcaactgatgatttgaaaaaa

SEQ ID NO: 652310 - DNA, 33 bp, Homo sapien
actgatgttggggcaattgatgatttgaaaaaa

SEQ ID NO: 652311 - DNA, 33 bp, Homo sapien
gaagtttcttcatgtacatatctgacacatggc

SEQ ID NO: 652312 - DNA, 33 bp, Homo sapien
gaagtttcttcatgtatatatctgacacatggc

SEQ ID NO: 652313 - DNA, 33 bp, Homo sapien
gattcaagattgtttcaagagaagaatgaaaga

SEQ ID NO: 652314 - DNA, 33 bp, Homo sapien
gattcaagattgtttccagagaagaatgaaaga

SEQ ID NO: 652315 - DNA, 33 bp, Homo sapien
ctcccttccaggaccacgtcttctctcgaaagt

SEQ ID NO: 652316 - DNA, 33 bp, Homo sapien
ctcccttccaggaccatgtcttctctcgaaagt

SEQ ID NO: 652317 - DNA, 33 bp, Homo sapien
tttgtaggaaagaaaaactactcaattttagaa

SEQ ID NO: 652318 - DNA, 33 bp, Homo sapien
tttgtaggaaagaaaagctactcaattttagaa

SEQ ID NO: 652319 - DNA, 33 bp, Homo sapien
atgatttagatacagtaactgatcagcattaat

SEQ ID NO: 652320 - DNA, 33 bp, Homo sapien
atgatttagatacagtgactgatcagcattaat

SEQ ID NO: 652321 - DNA, 33 bp, Homo sapien
tcaagagtagcattgaagatgagaggtgacaac

SEQ ID NO: 652322 - DNA, 33 bp, Homo sapien
tcaagagtagcattgaggatgagaggtgacaac

SEQ ID NO: 652323 - DNA, 33 bp, Homo sapien
tgtcagaaatagctgagagactttggccatgct

SEQ ID NO: 652324 - DNA, 33 bp, Homo sapien
tgtcagaaatagctgatagactttggccatgct

SEQ ID NO: 652325 - DNA, 33 bp, Homo sapien
agcagcattacagaaaagtactgatcagaaaat

SEQ ID NO: 652326 - DNA, 33 bp, Homo sapien
agcagcattacagaaaggtactgatcagaaaat

SEQ ID NO: 652327 - DNA, 33 bp, Homo sapien
cgttacacattgtggtaaaattggctatttatt

SEQ ID NO: 652328 - DNA, 33 bp, Homo sapien
cgttacacattgtggtcaaattggctatttatt

SEQ ID NO: 652329 - DNA, 33 bp, Homo sapien
aattgtgtccacagaaatatcaccttcaattgt

SEQ ID NO: 652330 - DNA, 33 bp, Homo sapien
aattgtgtccacagaactatcaccttcaattgt

SEQ ID NO: 652331 - DNA, 33 bp, Homo sapien
gcagttttgaatgaagaatatcatttattatga

SEQ ID NO: 652332 - DNA, 33 bp, Homo sapien
gcagttttgaatgaaggatatcatttattatga

SEQ ID NO: 652333 - DNA, 33 bp, Homo sapien
tcaagcatagatcatacgttaggctgcaaaaca

SEQ ID NO: 652334 - DNA, 33 bp, Homo sapien
tcaagcatagatcatatgttaggctgcaaaaca

SEQ ID NO: 652335 - DNA, 33 bp, Homo sapien
gacctactatgtgtccacaattttctctatgct

SEQ ID NO: 652336 - DNA, 33 bp, Homo sapien
gacctactatgtgtccgcaattttctctatgct

SEQ ID NO: 652337 - DNA, 33 bp, Homo sapien
gtgaaagaatgagcaacatttgatggtttctat

SEQ ID NO: 652338 - DNA, 33 bp, Homo sapien
gtgaaagaatgagcaatatttgatggtttctat

SEQ ID NO: 652339 - DNA, 33 bp, Homo sapien
gagtggccaatgaataacactgctggagtatat

SEQ ID NO: 652340 - DNA, 33 bp, Homo sapien
gagtggccaatgaatagcactgctggagtatat

SEQ ID NO: 652341 - DNA, 33 bp, Homo sapien
agaatgattgaactgcaataaatgtaaacactg

SEQ ID NO: 652342 - DNA, 33 bp, Homo sapien
agaatgattgaactgcgataaatgtaaacactg

SEQ ID NO: 652343 - DNA, 33 bp, Homo sapien
ttccctgctgggattacaccaatcatcctcaat

SEQ ID NO: 652344 - DNA, 33 bp, Homo sapien
ttccctgctgggattataccaatcatcctcaat

SEQ ID NO: 652345 - DNA, 33 bp, Homo sapien
ctgaggaagataaaataagatgatttggcttaa

SEQ ID NO: 652346 - DNA, 33 bp, Homo sapien
ctgaggaagataaaatgagatgatttggcttaa

SEQ ID NO: 652347 - DNA, 33 bp, Homo sapien
ctttttccagcaagacagaagaagccaaagact

SEQ ID NO: 652348 - DNA, 33 bp, Homo sapien
ctttttccagcaagacggaagaagccaaagact

SEQ ID NO: 652349 - DNA, 33 bp, Homo sapien
catgtctttctgtcacagattgtaagctctctg

SEQ ID NO: 652350 - DNA, 33 bp, Homo sapien
catgtctttctgtcacggattgtaagctctctg

SEQ ID NO: 652351 - DNA, 33 bp, Homo sapien
ctggtaggagttattggatcatggatgtgaacc

SEQ ID NO: 652352 - DNA, 33 bp, Homo sapien
ctggtaggagttattgtatcatggatgtgaacc

SEQ ID NO: 652353 - DNA, 33 bp, Homo sapien
aacactcacataaataactttcttgttgctctt

SEQ ID NO: 652354 - DNA, 33 bp, Homo sapien
aacactcacataaatagctttcttgttgctctt

SEQ ID NO: 652355 - DNA, 33 bp, Homo sapien
aacacctattgtgacccgaaagatgatcagata

SEQ ID NO: 652356 - DNA, 33 bp, Homo sapien
aacacctattgtgacctgaaagatgatcagata

SEQ ID NO: 652357 - DNA, 33 bp, Homo sapien
cattatctgcaataacaccctttgggtaatcaa

SEQ ID NO: 652358 - DNA, 33 bp, Homo sapien
cattatctgcaataacgccctttgggtaatcaa

SEQ ID NO: 652359 - DNA, 33 bp, Homo sapien
tttgagcaaaggcttcaaggagtgaaggatacg

SEQ ID NO: 652360 - DNA, 33 bp, Homo sapien
tttgagcaaaggcttcgaggagtgaaggatacg

SEQ ID NO: 652361 - DNA, 33 bp, Homo sapien
gttgtatacttcaagacgataagtgcattggag

SEQ ID NO: 652362 - DNA, 33 bp, Homo sapien
gttgtatacttcaagatgataagtgcattggag

SEQ ID NO: 652363 - DNA, 33 bp, Homo sapien
tgtttacttctctttcccttggcatcaattgtt

SEQ ID NO: 652364 - DNA, 33 bp, Homo sapien
tgtttacttctctttctcttggcatcaattgtt

SEQ ID NO: 652365 - DNA, 33 bp, Homo sapien
ttaaggaaacgtcatcactcaaaactgcctttg

SEQ ID NO: 652366 - DNA, 33 bp, Homo sapien
ttaaggaaacgtcatcgctcaaaactgcctttg

SEQ ID NO: 652367 - DNA, 33 bp, Homo sapien
gaaaatcattatattacgtgtggtgagaaaata

SEQ ID NO: 652368 - DNA, 33 bp, Homo sapien
gaaaatcattatattatgtgtggtgagaaaata

SEQ ID NO: 652369 - DNA, 33 bp, Homo sapien
tcaaatcaaacactcacatcaatctctctgaaa

SEQ ID NO: 652370 - DNA, 33 bp, Homo sapien
tcaaatcaaacactcatatcaatctctctgaaa

SEQ ID NO: 652371 - DNA, 33 bp, Homo sapien
gtttttgaggctatcaataacagtataggttta

SEQ ID NO: 652372 - DNA, 33 bp, Homo sapien
gtttttgaggctatcagtaacagtataggttta

SEQ ID NO: 652373 - DNA, 33 bp, Homo sapien
tttgctaaaggaaatacgacttgtttctagaaa

SEQ ID NO: 652374 - DNA, 33 bp, Homo sapien
tttgctaaaggaaatatgacttgtttctagaaa

SEQ ID NO: 652375 - DNA, 33 bp, Homo sapien
ggtcggaacttgtgagaaccagtttgctaaagg

SEQ ID NO: 652376 - DNA, 33 bp, Homo sapien
ggtcggaacttgtgaggaccagtttgctaaagg

SEQ ID NO: 652377 - DNA, 33 bp, Homo sapien
tcttatgatactcttaataaacaagcagagata

SEQ ID NO: 652378 - DNA, 33 bp, Homo sapien
tcttatgatactcttagtaaacaagcagagata

SEQ ID NO: 652379 - DNA, 33 bp, Homo sapien
gatgtttttgatggaacaaatagaaaaggacaa

SEQ ID NO: 652380 - DNA, 33 bp, Homo sapien
gatgtttttgatggaataaatagaaaaggacaa

SEQ ID NO: 652381 - DNA, 33 bp, Homo sapien
atttccatatactacactggattaggatcttct

SEQ ID NO: 652382 - DNA, 33 bp, Homo sapien
atttccatatactacattggattaggatcttct

SEQ ID NO: 652383 - DNA, 33 bp, Homo sapien
gcagtttttcagcaccactctgtgttttagaat

SEQ ID NO: 652384 - DNA, 33 bp, Homo sapien
gcagtttttcagcacccctctgtgttttagaat

SEQ ID NO: 652385 - DNA, 33 bp, Homo sapien
gctctcatacaagtgaacatggcctgtaatgaa

SEQ ID NO: 652386 - DNA, 33 bp, Homo sapien
gctctcatacaagtgatcatggcctgtaatgaa

SEQ ID NO: 652387 - DNA, 33 bp, Homo sapien
ctgataggcagtactagagattattgtaattat

SEQ ID NO: 652388 - DNA, 33 bp, Homo sapien
ctgataggcagtactatagattattgtaattat

SEQ ID NO: 652389 - DNA, 33 bp, Homo sapien
ggaatgggatggtccccgacattgtggaactcg

SEQ ID NO: 652390 - DNA, 33 bp, Homo sapien
ggaatgggatggtccctgacattgtggaactcg

SEQ ID NO: 652391 - DNA, 33 bp, Homo sapien
aaaatttaccatgcacagattttcctctaacat

SEQ ID NO: 652392 - DNA, 33 bp, Homo sapien
aaaatttaccatgcacggattttcctctaacat

SEQ ID NO: 652393 - DNA, 33 bp, Homo sapien
ctatttgaagagtgagaaaaatgggatttcttg

SEQ ID NO: 652394 - DNA, 33 bp, Homo sapien
ctatttgaagagtgaggaaaatgggatttcttg

SEQ ID NO: 652395 - DNA, 33 bp, Homo sapien
ttcattctttaatttcaatatggactcacttac

SEQ ID NO: 652396 - DNA, 33 bp, Homo sapien
ttcattctttaatttcgatatggactcacttac

SEQ ID NO: 652397 - DNA, 33 bp, Homo sapien
cccataaaagttgatacggagataggactcaag

SEQ ID NO: 652398 - DNA, 33 bp, Homo sapien
cccataaaagttgatatggagataggactcaag

SEQ ID NO: 652399 - DNA, 33 bp, Homo sapien
cacaagctgattgtaacgaacctctcctcagga

SEQ ID NO: 652400 - DNA, 33 bp, Homo sapien
cacaagctgattgtaatgaacctctcctcagga

SEQ ID NO: 652401 - DNA, 33 bp, Homo sapien
tatcctgcagtgggaacgtatagtggtattgtt

SEQ ID NO: 652402 - DNA, 33 bp, Homo sapien
tatcctgcagtgggaatgtatagtggtattgtt

SEQ ID NO: 652403 - DNA, 33 bp, Homo sapien
atgccaaagctctatgcattagcaggtaaccaa

SEQ ID NO: 652404 - DNA, 33 bp, Homo sapien
atgccaaagctctatgtattagcaggtaaccaa

SEQ ID NO: 652405 - DNA, 33 bp, Homo sapien
agggagaatatcaacaccaaatcttggaaacag

SEQ ID NO: 652406 - DNA, 33 bp, Homo sapien
agggagaatatcaacagcaaatcttggaaacag

SEQ ID NO: 652407 - DNA, 33 bp, Homo sapien
aatgaaatcagtttcaccgaattatctaaatta

SEQ ID NO: 652408 - DNA, 33 bp, Homo sapien
aatgaaatcagtttcatcgaattatctaaatta

SEQ ID NO: 652409 - DNA, 33 bp, Homo sapien
ttgactaagcagttgcaagcaaagcagtgtcct

SEQ ID NO: 652410 - DNA, 33 bp, Homo sapien
ttgactaagcagttgcgagcaaagcagtgtcct

SEQ ID NO: 652411 - DNA, 33 bp, Homo sapien
aatttctgagatcccccaatgtgactgtggatg

SEQ ID NO: 652412 - DNA, 33 bp, Homo sapien
aatttctgagatcccctaatgtgactgtggatg

SEQ ID NO: 652413 - DNA, 33 bp, Homo sapien
caacttccctgtattacgtctcactgactttga

SEQ ID NO: 652414 - DNA, 33 bp, Homo sapien
caacttccctgtattatgtctcactgactttga

SEQ ID NO: 652415 - DNA, 33 bp, Homo sapien
ttcattgttgttgagacagatgcctagtagcct

SEQ ID NO: 652416 - DNA, 33 bp, Homo sapien
ttcattgttgttgagatagatgcctagtagcct

SEQ ID NO: 652417 - DNA, 33 bp, Homo sapien
atgaaaacagacatacaccatactagaatttct

SEQ ID NO: 652418 - DNA, 33 bp, Homo sapien
atgaaaacagacatacgccatactagaatttct

SEQ ID NO: 652419 - DNA, 33 bp, Homo sapien
atgtgtcttttgtcttcaaagtccaggcaacac

SEQ ID NO: 652420 - DNA, 33 bp, Homo sapien
atgtgtcttttgtctttaaagtccaggcaacac

SEQ ID NO: 652421 - DNA, 33 bp, Homo sapien
caagcccttataccaaatgcttactattcaagg

SEQ ID NO: 652422 - DNA, 33 bp, Homo sapien
caagcccttataccaattgcttactattcaagg

SEQ ID NO: 652423 - DNA, 33 bp, Homo sapien
ttctgtcaatttctgggacaataattctattac

SEQ ID NO: 652424 - DNA, 33 bp, Homo sapien
ttctgtcaatttctggtacaataattctattac

SEQ ID NO: 652425 - DNA, 33 bp, Homo sapien
ttctccacatactctcaagaatttgttattgcc

SEQ ID NO: 652426 - DNA, 33 bp, Homo sapien
ttctccacatactctcgagaatttgttattgcc

SEQ ID NO: 652427 - DNA, 33 bp, Homo sapien
gcaatacatttctaaaaattctccagtgcacct

SEQ ID NO: 652428 - DNA, 33 bp, Homo sapien
gcaatacatttctaaagattctccagtgcacct

SEQ ID NO: 652429 - DNA, 33 bp, Homo sapien
cagttcacacccaccaaaccataatcagctcca

SEQ ID NO: 652430 - DNA, 33 bp, Homo sapien
cagttcacacccaccagaccataatcagctcca

SEQ ID NO: 652431 - DNA, 33 bp, Homo sapien
ccttaatgaggcatggaataatctgtcaactaa

SEQ ID NO: 652432 - DNA, 33 bp, Homo sapien
ccttaatgaggcatggcataatctgtcaactaa

SEQ ID NO: 652433 - DNA, 33 bp, Homo sapien
atgaaagtgcggtgtacatcaagctcatgtaca

SEQ ID NO: 652434 - DNA, 33 bp, Homo sapien
atgaaagtgcggtgtatatcaagctcatgtaca

SEQ ID NO: 652435 - DNA, 33 bp, Homo sapien
ctgtattattacaaaacagtcatttcagtttgt

SEQ ID NO: 652436 - DNA, 33 bp, Homo sapien
ctgtattattacaaaatagtcatttcagtttgt

SEQ ID NO: 652437 - DNA, 33 bp, Homo sapien
agtttcctaaacaggacggcataaatgagtgaa

SEQ ID NO: 652438 - DNA, 33 bp, Homo sapien
agtttcctaaacaggatggcataaatgagtgaa

SEQ ID NO: 652439 - DNA, 33 bp, Homo sapien
ataaaataaggaagtacggtgcaggtccacgac

SEQ ID NO: 652440 - DNA, 33 bp, Homo sapien
ataaaataaggaagtatggtgcaggtccacgac

SEQ ID NO: 652441 - DNA, 33 bp, Homo sapien
cgtgcatttaaattccgcagtcaagggttccat

SEQ ID NO: 652442 - DNA, 33 bp, Homo sapien
cgtgcatttaaattcctcagtcaagggttccat

SEQ ID NO: 652443 - DNA, 33 bp, Homo sapien
ggtaaaaaaatgcaacggcctatatggcaagtg

SEQ ID NO: 652444 - DNA, 33 bp, Homo sapien
ggtaaaaaaatgcaactgcctatatggcaagtg

SEQ ID NO: 652445 - DNA, 33 bp, Homo sapien
agtgttttgattcaacaattgacaggaaaattt

SEQ ID NO: 652446 - DNA, 33 bp, Homo sapien
agtgttttgattcaacgattgacaggaaaattt

SEQ ID NO: 652447 - DNA, 33 bp, Homo sapien
gatataaaaggtgccacgaatagaacaaaggga

SEQ ID NO: 652448 - DNA, 33 bp, Homo sapien
gatataaaaggtgccatgaatagaacaaaggga

SEQ ID NO: 652449 - DNA, 33 bp, Homo sapien
aaaatagattcagaaccgctatattcagtgatt

SEQ ID NO: 652450 - DNA, 33 bp, Homo sapien
aaaatagattcagaactgctatattcagtgatt

SEQ ID NO: 652451 - DNA, 33 bp, Homo sapien
gagtaattcatagtcaatctctttgtggggtcc

SEQ ID NO: 652452 - DNA, 33 bp, Homo sapien
gagtaattcatagtcagtctctttgtggggtcc

SEQ ID NO: 652453 - DNA, 33 bp, Homo sapien
attaatgtggaagtgaaaatcctatttggaaat

SEQ ID NO: 652454 - DNA, 33 bp, Homo sapien
attaatgtggaagtgataatcctatttggaaat

SEQ ID NO: 652455 - DNA, 33 bp, Homo sapien
atttttgctcagcagacgagtcattttactgga

SEQ ID NO: 652456 - DNA, 33 bp, Homo sapien
atttttgctcagcagaggagtcattttactgga

SEQ ID NO: 652457 - DNA, 33 bp, Homo sapien
aaataagccggagtcacctgcatggatgatcca

SEQ ID NO: 652458 - DNA, 33 bp, Homo sapien
aaataagccggagtcagctgcatggatgatcca

SEQ ID NO: 652459 - DNA, 33 bp, Homo sapien
gcatagcaaaagaaaacttcagataccagaaaa

SEQ ID NO: 652460 - DNA, 33 bp, Homo sapien
gcatagcaaaagaaaatttcagataccagaaaa

SEQ ID NO: 652461 - DNA, 33 bp, Homo sapien
aagctgcataaaaatgaagagtttgtgcagaaa

SEQ ID NO: 652462 - DNA, 33 bp, Homo sapien
aagctgcataaaaatggagagtttgtgcagaaa

SEQ ID NO: 652463 - DNA, 33 bp, Homo sapien
ggaatgatgggtgaaacaataagtgagcagagc

SEQ ID NO: 652464 - DNA, 33 bp, Homo sapien
ggaatgatgggtgaaagaataagtgagcagagc

SEQ ID NO: 652465 - DNA, 33 bp, Homo sapien
agaatatcaaaatgcaaatgcccggctggaatg

SEQ ID NO: 652466 - DNA, 33 bp, Homo sapien
agaatatcaaaatgcagatgcccggctggaatg

SEQ ID NO: 652467 - DNA, 33 bp, Homo sapien
agagtttctccaccaaggattgaaaacctgtta

SEQ ID NO: 652468 - DNA, 33 bp, Homo sapien
agagtttctccaccaatgattgaaaacctgtta

SEQ ID NO: 652469 - DNA, 33 bp, Homo sapien
tgaacacagacggaaacaatgtaagggacctcc

SEQ ID NO: 652470 - DNA, 33 bp, Homo sapien
tgaacacagacggaaagaatgtaagggacctcc

SEQ ID NO: 652471 - DNA, 33 bp, Homo sapien
tattagtaaattctaccgcttggagttctaagt

SEQ ID NO: 652472 - DNA, 33 bp, Homo sapien
tattagtaaattctactgcttggagttctaagt

SEQ ID NO: 652473 - DNA, 33 bp, Homo sapien
tgctttttgatgggaactggaatgtaataaatc

SEQ ID NO: 652474 - DNA, 33 bp, Homo sapien
tgctttttgatgggaattggaatgtaataaatc

SEQ ID NO: 652475 - DNA, 33 bp, Homo sapien
cctatacctagtaccactaaacataataaaatt

SEQ ID NO: 652476 - DNA, 33 bp, Homo sapien
cctatacctagtaccagtaaacataataaaatt

SEQ ID NO: 652477 - DNA, 33 bp, Homo sapien
ctaataaatggaggatgaataaaaccaaactag

SEQ ID NO: 652478 - DNA, 33 bp, Homo sapien
ctaataaatggaggattaataaaaccaaactag

SEQ ID NO: 652479 - DNA, 33 bp, Homo sapien
attttaagtgaaaaaaacgagatatgccacagt

SEQ ID NO: 652480 - DNA, 33 bp, Homo sapien
attttaagtgaaaaaagcgagatatgccacagt

SEQ ID NO: 652481 - DNA, 33 bp, Homo sapien
taatgcactttgtattcaagtgtgatgttcctg

SEQ ID NO: 652482 - DNA, 33 bp, Homo sapien
taatgcactttgtattgaagtgtgatgttcctg

SEQ ID NO: 652483 - DNA, 33 bp, Homo sapien
cctcacctaacatccagcataaatgctactgat

SEQ ID NO: 652484 - DNA, 33 bp, Homo sapien
cctcacctaacatccatcataaatgctactgat

SEQ ID NO: 652485 - DNA, 33 bp, Homo sapien
aatgaatacagaaatgcagaagggcatcaccac

SEQ ID NO: 652486 - DNA, 33 bp, Homo sapien
aatgaatacagaaatggagaagggcatcaccac

SEQ ID NO: 652487 - DNA, 33 bp, Homo sapien
gggacttgtgaggttccagtaataatgtttgtt

SEQ ID NO: 652488 - DNA, 33 bp, Homo sapien
gggacttgtgaggttctagtaataatgtttgtt

SEQ ID NO: 652489 - DNA, 33 bp, Homo sapien
ctgcatctaacttgacaagaggtggtgtaatca

SEQ ID NO: 652490 - DNA, 33 bp, Homo sapien
ctgcatctaacttgacgagaggtggtgtaatca

SEQ ID NO: 652491 - DNA, 33 bp, Homo sapien
ggttattagcggaaatcaacttctggaagagac

SEQ ID NO: 652492 - DNA, 33 bp, Homo sapien
ggttattagcggaaattaacttctggaagagac

SEQ ID NO: 652493 - DNA, 33 bp, Homo sapien
taaaggcaaagcaacaaaagttaacatgttctg

SEQ ID NO: 652494 - DNA, 33 bp, Homo sapien
taaaggcaaagcaacagaagttaacatgttctg

SEQ ID NO: 652495 - DNA, 33 bp, Homo sapien
tgtttctaaatggagactcatgttctatattta

SEQ ID NO: 652496 - DNA, 33 bp, Homo sapien
tgtttctaaatggagattcatgttctatattta

SEQ ID NO: 652497 - DNA, 33 bp, Homo sapien
tcttggaggaaagagacagcattgtttttaagc

SEQ ID NO: 652498 - DNA, 33 bp, Homo sapien
tcttggaggaaagagagagcattgtttttaagc

SEQ ID NO: 652499 - DNA, 33 bp, Homo sapien
tttctcagtgtccaaactcctcctgctagagcg

SEQ ID NO: 652500 - DNA, 33 bp, Homo sapien
tttctcagtgtccaaagtcctcctgctagagcg

SEQ ID NO: 652501 - DNA, 33 bp, Homo sapien
ccagagaaaagtgtacagagtaggctcactata

SEQ ID NO: 652502 - DNA, 33 bp, Homo sapien
ccagagaaaagtgtacggagtaggctcactata

SEQ ID NO: 652503 - DNA, 33 bp, Homo sapien
aatatccaaataataacgtgtgattctaataag

SEQ ID NO: 652504 - DNA, 33 bp, Homo sapien
aatatccaaataataatgtgtgattctaataag

SEQ ID NO: 652505 - DNA, 33 bp, Homo sapien
ttttacctgtgcttaaagaggaaagtgtcacgc

SEQ ID NO: 652506 - DNA, 33 bp, Homo sapien
ttttacctgtgcttaaggaggaaagtgtcacgc

SEQ ID NO: 652507 - DNA, 33 bp, Homo sapien
tgagaagcatagaaagcctccctccccgggaga

SEQ ID NO: 652508 - DNA, 33 bp, Homo sapien
tgagaagcatagaaagtctccctccccgggaga

SEQ ID NO: 652509 - DNA, 33 bp, Homo sapien
gagaattgactcacgagattatatagaggctga

SEQ ID NO: 652510 - DNA, 33 bp, Homo sapien
gagaattgactcacgatattatatagaggctga

SEQ ID NO: 652511 - DNA, 33 bp, Homo sapien
catctatcttcatcaccactattattattatta

SEQ ID NO: 652512 - DNA, 33 bp, Homo sapien
catctatcttcatcactactattattattatta

SEQ ID NO: 652513 - DNA, 33 bp, Homo sapien; identical to SEQ ID NO: 652511

SEQ ID NO: 652514 - DNA, 33 bp, Homo sapien; identical to SEQ ID NO: 652512

SEQ ID NO: 652515 - DNA, 33 bp, Homo sapien
agaggcacatttggaaatattacttggggcagg

SEQ ID NO: 652516 - DNA, 33 bp, Homo sapien
agaggcacatttggaagtattacttggggcagg

SEQ ID NO: 652517 - DNA, 33 bp, Homo sapien
agaattcagcaatctcccatactcctagacagt

SEQ ID NO: 652518 - DNA, 33 bp, Homo sapien
agaattcagcaatctcgcatactcctagacagt

SEQ ID NO: 652519 - DNA, 33 bp, Homo sapien
ttccattttgcacagacgactgtaatacatttg

SEQ ID NO: 652520 - DNA, 33 bp, Homo sapien
ttccattttgcacagatgactgtaatacatttg

SEQ ID NO: 652521 - DNA, 33 bp, Homo sapien
tctatctaattctcacaacaactcttaaagtca

SEQ ID NO: 652522 - DNA, 33 bp, Homo sapien
tctatctaattctcacgacaactcttaaagtca

SEQ ID NO: 652523 - DNA, 33 bp, Homo sapien
ctacttggttaattaccgaatggcctgtgatat

SEQ ID NO: 652524 - DNA, 33 bp, Homo sapien
ctacttggttaattactgaatggcctgtgatat

SEQ ID NO: 652525 - DNA, 33 bp, Homo sapien
tggaatttaatatgcaaaatttcagtcaggtag

SEQ ID NO: 652526 - DNA, 33 bp, Homo sapien
tggaatttaatatgcagaatttcagtcaggtag

SEQ ID NO: 652527 - DNA, 33 bp, Homo sapien
catcaatatcttcctaatagcacctcagcaatg

SEQ ID NO: 652528 - DNA, 33 bp, Homo sapien
catcaatatcttcctagtagcacctcagcaatg

SEQ ID NO: 652529 - DNA, 33 bp, Homo sapien
agtagtgtggccatcactataaggctaataata

SEQ ID NO: 652530 - DNA, 33 bp, Homo sapien
agtagtgtggccatcattataaggctaataata

SEQ ID NO: 652531 - DNA, 33 bp, Homo sapien
tggtgtaaaattgtgcactatgaggtattaaca

SEQ ID NO: 652532 - DNA, 33 bp, Homo sapien
tggtgtaaaattgtgcgctatgaggtattaaca

SEQ ID NO: 652533 - DNA, 33 bp, Homo sapien
aaggattggaatgacaataactagatcttattg

SEQ ID NO: 652534 - DNA, 33 bp, Homo sapien
aaggattggaatgacagtaactagatcttattg

SEQ ID NO: 652535 - DNA, 33 bp, Homo sapien
caaacaaatacatacacactatgcctggataga

SEQ ID NO: 652536 - DNA, 33 bp, Homo sapien
caaacaaatacatacatactatgcctggataga

SEQ ID NO: 652537 - DNA, 33 bp, Homo sapien
aatcttctctaagtggcaattttcattatatca

SEQ ID NO: 652538 - DNA, 33 bp, Homo sapien
aatcttctctaagtggtaattttcattatatca

SEQ ID NO: 652539 - DNA, 33 bp, Homo sapien
ttactttatgactcaaaccaccttgcattgttc

SEQ ID NO: 652540 - DNA, 33 bp, Homo sapien
ttactttatgactcaatccaccttgcattgttc

SEQ ID NO: 652541 - DNA, 33 bp, Homo sapien
aaaagacggagcagaaatgagagaagtccaagg

SEQ ID NO: 652542 - DNA, 33 bp, Homo sapien
aaaagacggagcagaagtgagagaagtccaagg

SEQ ID NO: 652543 - DNA, 33 bp, Homo sapien
gacgttttccatagtaacgcaaccacggagttt

SEQ ID NO: 652544 - DNA, 33 bp, Homo sapien
gacgttttccatagtagcgcaaccacggagttt

SEQ ID NO: 652545 - DNA, 33 bp, Homo sapien
actatacagttagccacagtttgtacctctgct

SEQ ID NO: 652546 - DNA, 33 bp, Homo sapien
actatacagttagccatagtttgtacctctgct

SEQ ID NO: 652547 - DNA, 33 bp, Homo sapien
ggcaacccaaagatgaggtaaattgctcctgct

SEQ ID NO: 652548 - DNA, 33 bp, Homo sapien
ggcaacccaaagatgatgtaaattgctcctgct

SEQ ID NO: 652549 - DNA, 33 bp, Homo sapien
ctgaaattcaaactaacaaaatgtacatgctga

SEQ ID NO: 652550 - DNA, 33 bp, Homo sapien
ctgaaattcaaactaataaaatgtacatgctga

SEQ ID NO: 652551 - DNA, 33 bp, Homo sapien
aactccttcactcgaacctccaagtcagtgtct

SEQ ID NO: 652552 - DNA, 33 bp, Homo sapien
aactccttcactcgaatctccaagtcagtgtct

SEQ ID NO: 652553 - DNA, 33 bp, Homo sapien
actattatcacccaagaagtttgtatccagtaa

SEQ ID NO: 652554 - DNA, 33 bp, Homo sapien
actattatcacccaagcagtttgtatccagtaa

SEQ ID NO: 652555 - DNA, 33 bp, Homo sapien
ccaaccaatgcaaaaccagtgtgataaacaaaa

SEQ ID NO: 652556 - DNA, 33 bp, Homo sapien
ccaaccaatgcaaaactagtgtgataaacaaaa

SEQ ID NO: 652557 - DNA, 33 bp, Homo sapien
acccactacctgagaaacttataaaaggagacc

SEQ ID NO: 652558 - DNA, 33 bp, Homo sapien
acccactacctgagaagcttataaaaggagacc

SEQ ID NO: 652559 - DNA, 33 bp, Homo sapien
ctcataaccagtaaaagaattgcttatattggc

SEQ ID NO: 652560 - DNA, 33 bp, Homo sapien
ctcataaccagtaaaataattgcttatattggc

SEQ ID NO: 652561 - DNA, 33 bp, Homo sapien
cacattcatacaactagaactcatttttttaat

SEQ ID NO: 652562 - DNA, 33 bp, Homo sapien
cacattcatacaactataactcatttttttaat

SEQ ID NO: 652563 - DNA, 33 bp, Homo sapien
acattgccttagttgagagagagaactaggtag

SEQ ID NO: 652564 - DNA, 33 bp, Homo sapien
acattgccttagttgatagagagaactaggtag

SEQ ID NO: 652565 - DNA, 33 bp, Homo sapien
gcacgcaaatcattaccgctactcctgagtatg

SEQ ID NO: 652566 - DNA, 33 bp, Homo sapien
gcacgcaaatcattactgctactcctgagtatg

SEQ ID NO: 652567 - DNA, 33 bp, Homo sapien
tactatacgccaggaactgcactaaggactttc

SEQ ID NO: 652568 - DNA, 33 bp, Homo sapien
tactatacgccaggaattgcactaaggactttc

SEQ ID NO: 652569 - DNA, 33 bp, Homo sapien
tctctcactaaatctgaagcgtttattttggaa

SEQ ID NO: 652570 - DNA, 33 bp, Homo sapien
tctctcactaaatctgcagcgtttattttggaa

SEQ ID NO: 652571 - DNA, 33 bp, Homo sapien
agggttcatcagcctcaactcattaaccaatat

SEQ ID NO: 652572 - DNA, 33 bp, Homo sapien
agggttcatcagcctctactcattaaccaatat

SEQ ID NO: 652573 - DNA, 33 bp, Homo sapien
atgggaatgcaaactacagaaatttccagggaa

SEQ ID NO: 652574 - DNA, 33 bp, Homo sapien
atgggaatgcaaactatagaaatttccagggaa

SEQ ID NO: 652575 - DNA, 33 bp, Homo sapien
tatagggtgctactataaattgggtcattttga

SEQ ID NO: 652576 - DNA, 33 bp, Homo sapien
tatagggtgctactatgaattgggtcattttga

SEQ ID NO: 652577 - DNA, 33 bp, Homo sapien
tgggtcattttgaaagaaagttggcgataaatc

SEQ ID NO: 652578 - DNA, 33 bp, Homo sapien
tgggtcattttgaaaggaagttggcgataaatc

SEQ ID NO: 652579 - DNA, 33 bp, Homo sapien
atagccagataagagacaagtagcaaagggaat

SEQ ID NO: 652580 - DNA, 33 bp, Homo sapien
atagccagataagagagaagtagcaaagggaat

SEQ ID NO: 652581 - DNA, 33 bp, Homo sapien
ttgtgcttcaaaagacacaaaatcacaaaaata

SEQ ID NO: 652582 - DNA, 33 bp, Homo sapien
ttgtgcttcaaaagacgcaaaatcacaaaaata

SEQ ID NO: 652583 - DNA, 33 bp, Homo sapien
ccaccctgactgatcacaatttgttattgcttc

SEQ ID NO: 652584 - DNA, 33 bp, Homo sapien
ccaccctgactgatcataatttgttattgcttc

SEQ ID NO: 652585 - DNA, 33 bp, Homo sapien
tggactttgccatctcacattggctctacacca

SEQ ID NO: 652586 - DNA, 33 bp, Homo sapien
tggactttgccatctcgcattggctctacacca

SEQ ID NO: 652587 - DNA, 33 bp, Homo sapien
ggaataagcttgaaaagccatttacaaagagct

SEQ ID NO: 652588 - DNA, 33 bp, Homo sapien
ggaataagcttgaaaatccatttacaaagagct

SEQ ID NO: 652589 - DNA, 33 bp, Homo sapien
aatccatgcagtgacccatggagagttgacaca

SEQ ID NO: 652590 - DNA, 33 bp, Homo sapien
aatccatgcagtgacctatggagagttgacaca

SEQ ID NO: 652591 - DNA, 33 bp, Homo sapien
caaaggttagaggtctaaatctgctccaatatc

SEQ ID NO: 652592 - DNA, 33 bp, Homo sapien
caaaggttagaggtcttaatctgctccaatatc

SEQ ID NO: 652593 - DNA, 33 bp, Homo sapien
ctgatcaagtagtttacagcagaactttactta

SEQ ID NO: 652594 - DNA, 33 bp, Homo sapien
ctgatcaagtagtttatagcagaactttactta

SEQ ID NO: 652595 - DNA, 33 bp, Homo sapien
agtcacatactttacaaagctcacgtatctcag

SEQ ID NO: 652596 - DNA, 33 bp, Homo sapien
agtcacatactttacagagctcacgtatctcag

SEQ ID NO: 652597 - DNA, 33 bp, Homo sapien
tgcatatactgaaccaggtttgaatccatgaga

SEQ ID NO: 652598 - DNA, 33 bp, Homo sapien
tgcatatactgaaccatgtttgaatccatgaga

SEQ ID NO: 652599 - DNA, 33 bp, Homo sapien
catgacaacttcagaaaacatgaagcccaaact

SEQ ID NO: 652600 - DNA, 33 bp, Homo sapien
catgacaacttcagaatacatgaagcccaaact

SEQ ID NO: 652601 - DNA, 33 bp, Homo sapien
aaggcacaattgaaaacgcatctcgataagaat

SEQ ID NO: 652602 - DNA, 33 bp, Homo sapien
aaggcacaattgaaaatgcatctcgataagaat

SEQ ID NO: 652603 - DNA, 33 bp, Homo sapien
tgtgtgattctgagaacgaaatgccttaagaaa

SEQ ID NO: 652604 - DNA, 33 bp, Homo sapien
tgtgtgattctgagaatgaaatgccttaagaaa

SEQ ID NO: 652605 - DNA, 33 bp, Homo sapien
gacttgcctgcacgttgaaaagaaaatcaagaa

SEQ ID NO: 652606 - DNA, 33 bp, Homo sapien
gacttgcctgcacgtttaaaagaaaatcaagaa

SEQ ID NO: 652607 - DNA, 33 bp, Homo sapien
tgttcatttttgtttccccagagctggtaaaga

SEQ ID NO: 652608 - DNA, 33 bp, Homo sapien
tgttcatttttgtttctccagagctggtaaaga

SEQ ID NO: 652609 - DNA, 33 bp, Homo sapien
gtgatttcttctagacaggcaatgtgagatgtt

SEQ ID NO: 652610 - DNA, 33 bp, Homo sapien
gtgatttcttctagacgggcaatgtgagatgtt

SEQ ID NO: 652611 - DNA, 33 bp, Homo sapien
aagcagagggtgccaaccttcaactcttgcatt

SEQ ID NO: 652612 - DNA, 33 bp, Homo sapien
aagcagagggtgccaagcttcaactcttgcatt

SEQ ID NO: 652613 - DNA, 33 bp, Homo sapien
gcatgactgtacattagcattatcaactatagt

SEQ ID NO: 652614 - DNA, 33 bp, Homo sapien
gcatgactgtacattatcattatcaactatagt

SEQ ID NO: 652615 - DNA, 33 bp, Homo sapien
gaggactgagaagtataagccagctctattgat

SEQ ID NO: 652616 - DNA, 33 bp, Homo sapien
gaggactgagaagtatgagccagctctattgat

SEQ ID NO: 652617 - DNA, 33 bp, Homo sapien
aaggatggcataagcaaaagtgctgcagtgaaa

SEQ ID NO: 652618 - DNA, 33 bp, Homo sapien
aaggatggcataagcagaagtgctgcagtgaaa

SEQ ID NO: 652619 - DNA, 33 bp, Homo sapien
aaatgggaaatcaaaaatccttaaatggactga

SEQ ID NO: 652620 - DNA, 33 bp, Homo sapien
aaatgggaaatcaaaattccttaaatggactga

SEQ ID NO: 652621 - DNA, 33 bp, Homo sapien
tttagtggatgaattaggaaatttacagttaga

SEQ ID NO: 652622 - DNA, 33 bp, Homo sapien
tttagtggatgaattatgaaatttacagttaga

SEQ ID NO: 652623 - DNA, 33 bp, Homo sapien
tatcaacagcagtatccatctattgcctaatga

SEQ ID NO: 652624 - DNA, 33 bp, Homo sapien
tatcaacagcagtatctatctattgcctaatga

SEQ ID NO: 652625 - DNA, 33 bp, Homo sapien
agaggaaccagctgggaagatgtgccattcatc

SEQ ID NO: 652626 - DNA, 33 bp, Homo sapien
agaggaaccagctgggcagatgtgccattcatc

SEQ ID NO: 652627 - DNA, 33 bp, Homo sapien
tctgagctaaaagaacggaaaacaatgatggtg

SEQ ID NO: 652628 - DNA, 33 bp, Homo sapien
tctgagctaaaagaactgaaaacaatgatggtg

SEQ ID NO: 652629 - DNA, 33 bp, Homo sapien
taactgtacaaattcacggtaaaatatgtgtgt

SEQ ID NO: 652630 - DNA, 33 bp, Homo sapien
taactgtacaaattcatggtaaaatatgtgtgt

SEQ ID NO: 652631 - DNA, 33 bp, Homo sapien
tttcctccacttattcaaactttcacctggatg

SEQ ID NO: 652632 - DNA, 33 bp, Homo sapien
tttcctccacttattcgaactttcacctggatg

SEQ ID NO: 652633 - DNA, 33 bp, Homo sapien
taagaaaaaatatctaagtgtggctagagaaaa

SEQ ID NO: 652634 - DNA, 33 bp, Homo sapien
taagaaaaaatatctacgtgtggctagagaaaa

SEQ ID NO: 652635 - DNA, 33 bp, Homo sapien
atgaaactttataggagattttgattccatgcc

SEQ ID NO: 652636 - DNA, 33 bp, Homo sapien
atgaaactttataggatattttgattccatgcc

SEQ ID NO: 652637 - DNA, 33 bp, Homo sapien
ccttatgtgcagcagactataaggcagaagaaa

SEQ ID NO: 652638 - DNA, 33 bp, Homo sapien
ccttatgtgcagcagagtataaggcagaagaaa

SEQ ID NO: 652639 - DNA, 33 bp, Homo sapien
aggtgttcaaatgcggaattctgttgatactac

SEQ ID NO: 652640 - DNA, 33 bp, Homo sapien
aggtgttcaaatgcgggattctgttgatactac

SEQ ID NO: 652641 - DNA, 33 bp, Homo sapien
aaataggaaacaaaaccatcttcagctagagag

SEQ ID NO: 652642 - DNA, 33 bp, Homo sapien
aaataggaaacaaaacgatcttcagctagagag

SEQ ID NO: 652643 - DNA, 33 bp, Homo sapien
ttttgttacagttacaccagatgaatggaacag

SEQ ID NO: 652644 - DNA, 33 bp, Homo sapien
ttttgttacagttacagcagatgaatggaacag

SEQ ID NO: 652645 - DNA, 33 bp, Homo sapien
ctccaaaaacacttatgactacatcctgggaaa

SEQ ID NO: 652646 - DNA, 33 bp, Homo sapien
ctccaaaaacacttattactacatcctgggaaa

SEQ ID NO: 652647 - DNA, 33 bp, Homo sapien
agctctgaggaaaccccggaattaagccagttg

SEQ ID NO: 652648 - DNA, 33 bp, Homo sapien
agctctgaggaaaccctggaattaagccagttg

SEQ ID NO: 652649 - DNA, 33 bp, Homo sapien
cctcagagattatttgaacaaaagcattcatat

SEQ ID NO: 652650 - DNA, 33 bp, Homo sapien
cctcagagattatttgcacaaaagcattcatat

SEQ ID NO: 652651 - DNA, 33 bp, Homo sapien
tctacttttaactcaccgccggttaatcatggc

SEQ ID NO: 652652 - DNA, 33 bp, Homo sapien
tctacttttaactcactgccggttaatcatggc

SEQ ID NO: 652653 - DNA, 33 bp, Homo sapien
ttagagtaaaacactaggtccagtctgcctcta

SEQ ID NO: 652654 - DNA, 33 bp, Homo sapien
ttagagtaaaacactatgtccagtctgcctcta

SEQ ID NO: 652655 - DNA, 33 bp, Homo sapien
ggatgtggtgaacagaaaacgcttctaccctgc

SEQ ID NO: 652656 - DNA, 33 bp, Homo sapien
ggatgtggtgaacagagaacgcttctaccctgc

SEQ ID NO: 652657 - DNA, 33 bp, Homo sapien
tgaggatagtatgaaccgtgagttggccctaaa

SEQ ID NO: 652658 - DNA, 33 bp, Homo sapien
tgaggatagtatgaactgtgagttggccctaaa

SEQ ID NO: 652659 - DNA, 33 bp, Homo sapien
ctgaggagttggtttccaacacgtgatctgacc

SEQ ID NO: 652660 - DNA, 33 bp, Homo sapien
ctgaggagttggtttctaacacgtgatctgacc

SEQ ID NO: 652661 - DNA, 33 bp, Homo sapien
tatctttggttcaagggactactaagtggcccc

SEQ ID NO: 652662 - DNA, 33 bp, Homo sapien
tatctttggttcaaggtactactaagtggcccc

SEQ ID NO: 652663 - DNA, 33 bp, Homo sapien
ccagagagatttcctgaaacttatgcctgcata

SEQ ID NO: 652664 - DNA, 33 bp, Homo sapien
ccagagagatttcctgcaacttatgcctgcata

SEQ ID NO: 652665 - DNA, 33 bp, Homo sapien
tgatgaacttaggacactgagtgctatttatct

SEQ ID NO: 652666 - DNA, 33 bp, Homo sapien
tgatgaacttaggacattgagtgctatttatct

SEQ ID NO: 652667 - DNA, 33 bp, Homo sapien
aaagtcaattagatgtcaaacagtttgctggac

SEQ ID NO: 652668 - DNA, 33 bp, Homo sapien
aaagtcaattagatgttaaacagtttgctggac

SEQ ID NO: 652669 - DNA, 33 bp, Homo sapien
gctatctaattgtacaaccaggctcaattctgc

SEQ ID NO: 652670 - DNA, 33 bp, Homo sapien
gctatctaattgtacagccaggctcaattctgc

SEQ ID NO: 652671 - DNA, 33 bp, Homo sapien
cagaggcctcaggagacatgaaatctgatgaca

SEQ ID NO: 652672 - DNA, 33 bp, Homo sapien
cagaggcctcaggagatatgaaatctgatgaca

SEQ ID NO: 652673 - DNA, 33 bp, Homo sapien
ggtagccctagcaaatcaatgcagtccctgagc

SEQ ID NO: 652674 - DNA, 33 bp, Homo sapien
ggtagccctagcaaattaatgcagtccctgagc

SEQ ID NO: 652675 - DNA, 33 bp, Homo sapien
ttaacataaagtttacactcaataaaattcaca

SEQ ID NO: 652676 - DNA, 33 bp, Homo sapien
ttaacataaagtttacgctcaataaaattcaca

SEQ ID NO: 652677 - DNA, 33 bp, Homo sapien
gcactgtgggacacaacgctaagtggaaggccc

SEQ ID NO: 652678 - DNA, 33 bp, Homo sapien
gcactgtgggacacaatgctaagtggaaggccc

SEQ ID NO: 652679 - DNA, 33 bp, Homo sapien
aataacaaatgtaaaactgcaaatgtacagagc

SEQ ID NO: 652680 - DNA, 33 bp, Homo sapien
aataacaaatgtaaaattgcaaatgtacagagc

SEQ ID NO: 652681 - DNA, 33 bp, Homo sapien
caattagaaaaatacacaaattgtcatagtgaa

SEQ ID NO: 652682 - DNA, 33 bp, Homo sapien
caattagaaaaatacagaaattgtcatagtgaa

SEQ ID NO: 652683 - DNA, 33 bp, Homo sapien
tacccctaggaaataactgtccaagtatatatc

SEQ ID NO: 652684 - DNA, 33 bp, Homo sapien
tacccctaggaaataattgtccaagtatatatc

SEQ ID NO: 652685 - DNA, 33 bp, Homo sapien
ttcctgctaaatcatccaccaattaacacaaag

SEQ ID NO: 652686 - DNA, 33 bp, Homo sapien
ttcctgctaaatcatctaccaattaacacaaag

SEQ ID NO: 652687 - DNA, 33 bp, Homo sapien
tttcattaaccaaaacactaggagaaagaaagt

SEQ ID NO: 652688 - DNA, 33 bp, Homo sapien
tttcattaaccaaaacgctaggagaaagaaagt

SEQ ID NO: 652689 - DNA, 33 bp, Homo sapien
tctaaggatctgatcaaataatttagaaagaac

SEQ ID NO: 652690 - DNA, 33 bp, Homo sapien
tctaaggatctgatcacataatttagaaagaac

SEQ ID NO: 652691 - DNA, 33 bp, Homo sapien
atgatgaggatgcacaataacaccaaagcaagg

SEQ ID NO: 652692 - DNA, 33 bp, Homo sapien
atgatgaggatgcacactaacaccaaagcaagg

SEQ ID NO: 652693 - DNA, 33 bp, Homo sapien
agcctggatttttagaaaggaagactgtgaatc

SEQ ID NO: 652694 - DNA, 33 bp, Homo sapien
agcctggatttttagagaggaagactgtgaatc

SEQ ID NO: 652695 - DNA, 33 bp, Homo sapien
ttgattcttcactgagcaatgcaaatttccagt

SEQ ID NO: 652696 - DNA, 33 bp, Homo sapien
ttgattcttcactgagtaatgcaaatttccagt

SEQ ID NO: 652697 - DNA, 33 bp, Homo sapien
aaagttgacgtaatcaagaccttaaagattggt

SEQ ID NO: 652698 - DNA, 33 bp, Homo sapien
aaagttgacgtaatcaggaccttaaagattggt

SEQ ID NO: 652699 - DNA, 33 bp, Homo sapien
aatggaatttgtgaagccccttaataacaagtt

SEQ ID NO: 652700 - DNA, 33 bp, Homo sapien
aatggaatttgtgaagtcccttaataacaagtt

SEQ ID NO: 652701 - DNA, 33 bp, Homo sapien
ggacccattagcaaaacatagcttgttgtctct

SEQ ID NO: 652702 - DNA, 33 bp, Homo sapien
ggacccattagcaaaatatagcttgttgtctct

SEQ ID NO: 652703 - DNA, 33 bp, Homo sapien
gacgtcatctcttgtaagctgtgtgcccttaga

SEQ ID NO: 652704 - DNA, 33 bp, Homo sapien
gacgtcatctcttgtaggctgtgtgcccttaga

SEQ ID NO: 652705 - DNA, 33 bp, Homo sapien
agcataaacagtgtgtgaagagttgactctcca

SEQ ID NO: 652706 - DNA, 33 bp, Homo sapien
agcataaacagtgtgttaagagttgactctcca

SEQ ID NO: 652707 - DNA, 33 bp, Homo sapien
agccctgtgcagtttgcagttcgctattatgtt

SEQ ID NO: 652708 - DNA, 33 bp, Homo sapien
agccctgtgcagtttgtagttcgctattatgtt

SEQ ID NO: 652709 - DNA, 33 bp, Homo sapien
aacttaggaattctcacgtctctgtgaagaaaa

SEQ ID NO: 652710 - DNA, 33 bp, Homo sapien
aacttaggaattctcatgtctctgtgaagaaaa

SEQ ID NO: 652711 - DNA, 33 bp, Homo sapien
tgcttctatacttaaactcaagaaaggagtgct

SEQ ID NO: 652712 - DNA, 33 bp, Homo sapien
tgcttctatacttaaattcaagaaaggagtgct

SEQ ID NO: 652713 - DNA, 33 bp, Homo sapien
ttaactttaatgaatacgcttttctgataattc

SEQ ID NO: 652714 - DNA, 33 bp, Homo sapien
ttaactttaatgaatatgcttttctgataattc

SEQ ID NO: 652715 - DNA, 33 bp, Homo sapien
tattttcatgtttccccgacattgtcttgggtt

SEQ ID NO: 652716 - DNA, 33 bp, Homo sapien
tattttcatgtttccctgacattgtcttgggtt

SEQ ID NO: 652717 - DNA, 33 bp, Homo sapien
tcatattttctttataccacacattgtgctatt

SEQ ID NO: 652718 - DNA, 33 bp, Homo sapien
tcatattttctttatatcacacattgtgctatt

SEQ ID NO: 652719 - DNA, 33 bp, Homo sapien
gcactgaactatgagactagcttaaggtttgac

SEQ ID NO: 652720 - DNA, 33 bp, Homo sapien
gcactgaactatgagagtagcttaaggtttgac

SEQ ID NO: 652721 - DNA, 33 bp, Homo sapien
gagattatttatcaaaagcctacttactttcaa

SEQ ID NO: 652722 - DNA, 33 bp, Homo sapien
gagattatttatcaaatgcctacttactttcaa

SEQ ID NO: 652723 - DNA, 33 bp, Homo sapien
tgttttcagttgatacaaatggagtttaagaca

SEQ ID NO: 652724 - DNA, 33 bp, Homo sapien
tgttttcagttgatacgaatggagtttaagaca

SEQ ID NO: 652725 - DNA, 33 bp, Homo sapien
tatagggttatagtgaagttataaaggagataa

SEQ ID NO: 652726 - DNA, 33 bp, Homo sapien
tatagggttatagtgacgttataaaggagataa

SEQ ID NO: 652727 - DNA, 33 bp, Homo sapien
gtatgtaaactcagtacgtaaaaaactcagtaa

SEQ ID NO: 652728 - DNA, 33 bp, Homo sapien
gtatgtaaactcagtatgtaaaaaactcagtaa

SEQ ID NO: 652729 - DNA, 33 bp, Homo sapien
tgataacttctgcaggacaaaactagcttttgc

SEQ ID NO: 652730 - DNA, 33 bp, Homo sapien
tgataacttctgcaggccaaaactagcttttgc

SEQ ID NO: 652731 - DNA, 33 bp, Homo sapien
aagcaatgcccgactgcatatgaaactttcctc

SEQ ID NO: 652732 - DNA, 33 bp, Homo sapien
aagcaatgcccgactgtatatgaaactttcctc

SEQ ID NO: 652733 - DNA, 33 bp, Homo sapien
acctcactatgttcctaaaaggagaagaactgg

SEQ ID NO: 652734 - DNA, 33 bp, Homo sapien
acctcactatgttcctgaaaggagaagaactgg

SEQ ID NO: 652735 - DNA, 33 bp, Homo sapien
agtatggcaagccaacaagaggtgatgttagtt

SEQ ID NO: 652736 - DNA, 33 bp, Homo sapien
agtatggcaagccaacgagaggtgatgttagtt

SEQ ID NO: 652737 - DNA, 33 bp, Homo sapien
tgaccaccaaccagtcaaaatggatgtcacaag

SEQ ID NO: 652738 - DNA, 33 bp, Homo sapien
tgaccaccaaccagtccaaatggatgtcacaag

SEQ ID NO: 652739 - DNA, 33 bp, Homo sapien
ctcaggatgtagcaaacggaagggccacatcag

SEQ ID NO: 652740 - DNA, 33 bp, Homo sapien
ctcaggatgtagcaaatggaagggccacatcag

SEQ ID NO: 652741 - DNA, 33 bp, Homo sapien
attaagtgaaggaggactattgattgtttctgg

SEQ ID NO: 652742 - DNA, 33 bp, Homo sapien
attaagtgaaggaggattattgattgtttctgg

SEQ ID NO: 652743 - DNA, 33 bp, Homo sapien
tttaatggcatcgaaaatggtgaattctttcca

SEQ ID NO: 652744 - DNA, 33 bp, Homo sapien
tttaatggcatcgaaactggtgaattctttcca

SEQ ID NO: 652745 - DNA, 33 bp, Homo sapien
tgtgcgtgaagaatcaactttaatttccttcaa

SEQ ID NO: 652746 - DNA, 33 bp, Homo sapien
tgtgcgtgaagaatcacctttaatttccttcaa

SEQ ID NO: 652747 - DNA, 33 bp, Homo sapien
taaaatataagatgacagagaggtactgagcct

SEQ ID NO: 652748 - DNA, 33 bp, Homo sapien
taaaatataagatgaccgagaggtactgagcct

SEQ ID NO: 652749 - DNA, 33 bp, Homo sapien
aagatagaagagggaaatctagggaatttaagc

SEQ ID NO: 652750 - DNA, 33 bp, Homo sapien
aagatagaagagggaagtctagggaatttaagc

SEQ ID NO: 652751 - DNA, 33 bp, Homo sapien
attagcatacaaaataccaatagtaatctgcac

SEQ ID NO: 652752 - DNA, 33 bp, Homo sapien
attagcatacaaaatatcaatagtaatctgcac

SEQ ID NO: 652753 - DNA, 33 bp, Homo sapien
ggctgagctggaaagacgaaacaaaagtgtaat

SEQ ID NO: 652754 - DNA, 33 bp, Homo sapien
ggctgagctggaaagaggaaacaaaagtgtaat

SEQ ID NO: 652755 - DNA, 33 bp, Homo sapien
ttggcttctgggagataatctatgtcatactca

SEQ ID NO: 652756 - DNA, 33 bp, Homo sapien
ttggcttctgggagattatctatgtcatactca

SEQ ID NO: 652757 - DNA, 33 bp, Homo sapien
atgaggtacctgcacaaaaatgggtcacatttc

SEQ ID NO: 652758 - DNA, 33 bp, Homo sapien
atgaggtacctgcacagaaatgggtcacatttc

SEQ ID NO: 652759 - DNA, 33 bp, Homo sapien
acttattgtctagtaacgtgctggggatccata

SEQ ID NO: 652760 - DNA, 33 bp, Homo sapien
acttattgtctagtaatgtgctggggatccata

SEQ ID NO: 652761 - DNA, 33 bp, Homo sapien
atacttgtgcttaaaactaattctctaacttcc

SEQ ID NO: 652762 - DNA, 33 bp, Homo sapien
atacttgtgcttaaaattaattctctaacttcc

SEQ ID NO: 652763 - DNA, 33 bp, Homo sapien
tctagctttttcatcactactgacttaatactt

SEQ ID NO: 652764 - DNA, 33 bp, Homo sapien
tctagctttttcatcattactgacttaatactt

SEQ ID NO: 652765 - DNA, 33 bp, Homo sapien
ctctcctttggctgcaaaaagggttttaagaag

SEQ ID NO: 652766 - DNA, 33 bp, Homo sapien
ctctcctttggctgcagaaagggttttaagaag

SEQ ID NO: 652767 - DNA, 33 bp, Homo sapien
tatatctactgtgataaactttctaaaaacttt

SEQ ID NO: 652768 - DNA, 33 bp, Homo sapien
tatatctactgtgatagactttctaaaaacttt

SEQ ID NO: 652769 - DNA, 33 bp, Homo sapien
gtctgcgattaatcaacacagaaatggattatt

SEQ ID NO: 652770 - DNA, 33 bp, Homo sapien
gtctgcgattaatcaatacagaaatggattatt

SEQ ID NO: 652771 - DNA, 33 bp, Homo sapien
ggcctccaaagcctatgcctgaataagtagcaa

SEQ ID NO: 652772 - DNA, 33 bp, Homo sapien
ggcctccaaagcctattcctgaataagtagcaa

SEQ ID NO: 652773 - DNA, 33 bp, Homo sapien
tcttgagctgaagcaaataggcaaaatatcctt

SEQ ID NO: 652774 - DNA, 33 bp, Homo sapien
tcttgagctgaagcaagtaggcaaaatatcctt

SEQ ID NO: 652775 - DNA, 33 bp, Homo sapien
agattcccatataagcaagctagagagcctaga

SEQ ID NO: 652776 - DNA, 33 bp, Homo sapien
agattcccatataagcgagctagagagcctaga

SEQ ID NO: 652777 - DNA, 33 bp, Homo sapien
tattaacatctgaatcagagcttgcccaacaga

SEQ ID NO: 652778 - DNA, 33 bp, Homo sapien
tattaacatctgaatcggagcttgcccaacaga

SEQ ID NO: 652779 - DNA, 33 bp, Homo sapien
ccagcacaacccaggcaatgagtggcattcact

SEQ ID NO: 652780 - DNA, 33 bp, Homo sapien
ccagcacaacccaggcgatgagtggcattcact

SEQ ID NO: 652781 - DNA, 33 bp, Homo sapien
tggaacacagaggctacatcctatcttatctcc

SEQ ID NO: 652782 - DNA, 33 bp, Homo sapien
tggaacacagaggctatatcctatcttatctcc

SEQ ID NO: 652783 - DNA, 33 bp, Homo sapien
tttctttctattaatcaaatgggaaggttagta

SEQ ID NO: 652784 - DNA, 33 bp, Homo sapien
tttctttctattaatcgaatgggaaggttagta

SEQ ID NO: 652785 - DNA, 33 bp, Homo sapien
actaccccttcaaacaactatttctctctggat

SEQ ID NO: 652786 - DNA, 33 bp, Homo sapien
actaccccttcaaacagctatttctctctggat

SEQ ID NO: 652787 - DNA, 33 bp, Homo sapien
tccctgagttttcacactgaggaaaaaccaacc

SEQ ID NO: 652788 - DNA, 33 bp, Homo sapien
tccctgagttttcacattgaggaaaaaccaacc

SEQ ID NO: 652789 - DNA, 33 bp, Homo sapien
cataaagggtctgtaacgcagaagagggttggt

SEQ ID NO: 652790 - DNA, 33 bp, Homo sapien
cataaagggtctgtaatgcagaagagggttggt

SEQ ID NO: 652791 - DNA, 33 bp, Homo sapien
ataatttgaatttcacgaagtttcaggtcttga

SEQ ID NO: 652792 - DNA, 33 bp, Homo sapien
ataatttgaatttcactaagtttcaggtcttga

SEQ ID NO: 652793 - DNA, 33 bp, Homo sapien
ttttctaacttccccacgtgcttcctctgtgac

SEQ ID NO: 652794 - DNA, 33 bp, Homo sapien
ttttctaacttccccatgtgcttcctctgtgac

SEQ ID NO: 652795 - DNA, 33 bp, Homo sapien
atcctcagacacagaacagctgtcttctaggaa

SEQ ID NO: 652796 - DNA, 33 bp, Homo sapien
atcctcagacacagaatagctgtcttctaggaa

SEQ ID NO: 652797 - DNA, 33 bp, Homo sapien
gttgtatttgttttcaccagcaaatccaggtgc

SEQ ID NO: 652798 - DNA, 33 bp, Homo sapien
gttgtatttgttttcagcagcaaatccaggtgc

SEQ ID NO: 652799 - DNA, 33 bp, Homo sapien
gagaatgaaataaggcccacagagaacaggagc

SEQ ID NO: 652800 - DNA, 33 bp, Homo sapien
gagaatgaaataaggctcacagagaacaggagc

SEQ ID NO: 652801 - DNA, 33 bp, Homo sapien
gtacagaaaggcagctaagacaaaagttgggcc

SEQ ID NO: 652802 - DNA, 33 bp, Homo sapien
gtacagaaaggcagctgagacaaaagttgggcc

SEQ ID NO: 652803 - DNA, 33 bp, Homo sapien
aacctaaaagtgcttacaagtagctaaaatgga

SEQ ID NO: 652804 - DNA, 33 bp, Homo sapien
aacctaaaagtgcttataagtagctaaaatgga

SEQ ID NO: 652805 - DNA, 33 bp, Homo sapien
gtatgccaaggtacaacgtcatccttcatgcca

SEQ ID NO: 652806 - DNA, 33 bp, Homo sapien
gtatgccaaggtacaatgtcatccttcatgcca

SEQ ID NO: 652807 - DNA, 33 bp, Homo sapien
tgtttgatagcactgcccccttgaatctggtca

SEQ ID NO: 652808 - DNA, 33 bp, Homo sapien
tgtttgatagcactgctcccttgaatctggtca

SEQ ID NO: 652809 - DNA, 33 bp, Homo sapien
gaatgctggaaggatacggctggacacccagga

SEQ ID NO: 652810 - DNA, 33 bp, Homo sapien
gaatgctggaaggatatggctggacacccagga

SEQ ID NO: 652811 - DNA, 33 bp, Homo sapien
gaggagctcaggaaaacggaagcggagtctttg

SEQ ID NO: 652812 - DNA, 33 bp, Homo sapien
gaggagctcaggaaaatggaagcggagtctttg

SEQ ID NO: 652813 - DNA, 33 bp, Homo sapien
gtgctggcaagtctaccggtgctctttttacct

SEQ ID NO: 652814 - DNA, 33 bp, Homo sapien
gtgctggcaagtctactggtgctctttttacct

SEQ ID NO: 652815 - DNA, 33 bp, Homo sapien
tacagtagtgctgcacactattatgccattaaa

SEQ ID NO: 652816 - DNA, 33 bp, Homo sapien
tacagtagtgctgcactctattatgccattaaa

SEQ ID NO: 652817 - DNA, 33 bp, Homo sapien
actcagggggtgcagtcaccttaagcttgttta

SEQ ID NO: 652818 - DNA, 33 bp, Homo sapien
actcagggggtgcagttaccttaagcttgttta

SEQ ID NO: 652819 - DNA, 33 bp, Homo sapien
gatgagatgcactaaaatgtgggttgtggttat

SEQ ID NO: 652820 - DNA, 33 bp, Homo sapien
gatgagatgcactaaattgtgggttgtggttat

SEQ ID NO: 652821 - DNA, 33 bp, Homo sapien
atcccaaagaaaaaaacttacatgacatctgca

SEQ ID NO: 652822 - DNA, 33 bp, Homo sapien
atcccaaagaaaaaaagttacatgacatctgca

SEQ ID NO: 652823 - DNA, 33 bp, Homo sapien
aaacaactgctccagcactatatggctcctcaa

SEQ ID NO: 652824 - DNA, 33 bp, Homo sapien
aaacaactgctccagcgctatatggctcctcaa

SEQ ID NO: 652825 - DNA, 33 bp, Homo sapien
caaagggacccaagtaaagttcaggctgctgtt

SEQ ID NO: 652826 - DNA, 33 bp, Homo sapien
caaagggacccaagtacagttcaggctgctgtt

SEQ ID NO: 652827 - DNA, 33 bp, Homo sapien
gttagcttctccaccaaattcatctcagtaatg

SEQ ID NO: 652828 - DNA, 33 bp, Homo sapien
gttagcttctccaccagattcatctcagtaatg

SEQ ID NO: 652829 - DNA, 33 bp, Homo sapien
tcctgtcacatatactaaccctgttctgtcaaa

SEQ ID NO: 652830 - DNA, 33 bp, Homo sapien
tcctgtcacatatactgaccctgttctgtcaaa

SEQ ID NO: 652831 - DNA, 33 bp, Homo sapien
agttacagggtatgaactgcaaggtgtaatatt

SEQ ID NO: 652832 - DNA, 33 bp, Homo sapien
agttacagggtatgaattgcaaggtgtaatatt

SEQ ID NO: 652833 - DNA, 33 bp, Homo sapien
ctcagagtaacctgacaacactttggtcaagaa

SEQ ID NO: 652834 - DNA, 33 bp, Homo sapien
ctcagagtaacctgactacactttggtcaagaa

SEQ ID NO: 652835 - DNA, 33 bp, Homo sapien
aatgtatgtatataaaccaaaagatgctcctat

SEQ ID NO: 652836 - DNA, 33 bp, Homo sapien
aatgtatgtatataaagcaaaagatgctcctat

SEQ ID NO: 652837 - DNA, 33 bp, Homo sapien
gtagtccttagatcctaacacagagcttctaag

SEQ ID NO: 652838 - DNA, 33 bp, Homo sapien
gtagtccttagatcctgacacagagcttctaag

SEQ ID NO: 652839 - DNA, 33 bp, Homo sapien
cttgggcaattatgtaagtggttttcaaattac

SEQ ID NO: 652840 - DNA, 33 bp, Homo sapien
cttgggcaattatgtacgtggttttcaaattac

SEQ ID NO: 652841 - DNA, 33 bp, Homo sapien
aagacgttgggtcagactactgtactatgaaaa

SEQ ID NO: 652842 - DNA, 33 bp, Homo sapien
aagacgttgggtcagattactgtactatgaaaa

SEQ ID NO: 652843 - DNA, 33 bp, Homo sapien
aatacttcagatacctcaactattctttttcag

SEQ ID NO: 652844 - DNA, 33 bp, Homo sapien
aatacttcagataccttaactattctttttcag

SEQ ID NO: 652845 - DNA, 33 bp, Homo sapien
gcctgagctcctaatgacataaatactgccacg

SEQ ID NO: 652846 - DNA, 33 bp, Homo sapien
gcctgagctcctaatggcataaatactgccacg

SEQ ID NO: 652847 - DNA, 33 bp, Homo sapien
tggttgacgagtaatccgaccgaagcccagctg

SEQ ID NO: 652848 - DNA, 33 bp, Homo sapien
tggttgacgagtaatctgaccgaagcccagctg

SEQ ID NO: 652849 - DNA, 33 bp, Homo sapien
ttgggcacaaatacggcataaaagtagtgtatc

SEQ ID NO: 652850 - DNA, 33 bp, Homo sapien
ttgggcacaaatacggtataaaagtagtgtatc

SEQ ID NO: 652851 - DNA, 33 bp, Homo sapien
gcctcagataagcagcaagtctgaggaggagag

SEQ ID NO: 652852 - DNA, 33 bp, Homo sapien
gcctcagataagcagcgagtctgaggaggagag

SEQ ID NO: 652853 - DNA, 33 bp, Homo sapien
gatgctgataagtctcaagtcaccccgctccac

SEQ ID NO: 652854 - DNA, 33 bp, Homo sapien
gatgctgataagtctcgagtcaccccgctccac

SEQ ID NO: 652855 - DNA, 33 bp, Homo sapien
gtgaaaacctgtgtaacgtaagaattgcctgct

SEQ ID NO: 652856 - DNA, 33 bp, Homo sapien
gtgaaaacctgtgtaatgtaagaattgcctgct

SEQ ID NO: 652857 - DNA, 33 bp, Homo sapien
taccaaattcaaatgacatgaataccaagatag

SEQ ID NO: 652858 - DNA, 33 bp, Homo sapien
taccaaattcaaatgatatgaataccaagatag

SEQ ID NO: 652859 - DNA, 33 bp, Homo sapien
gaaaattcactcaacaatgtcctaagcaaatgc

SEQ ID NO: 652860 - DNA, 33 bp, Homo sapien
gaaaattcactcaacagtgtcctaagcaaatgc

SEQ ID NO: 652861 - DNA, 33 bp, Homo sapien
gagcagctcaagtgaactcagggaaatacctgc

SEQ ID NO: 652862 - DNA, 33 bp, Homo sapien
gagcagctcaagtgaattcagggaaatacctgc

SEQ ID NO: 652863 - DNA, 33 bp, Homo sapien
agaataaattatttcaacacctctccaagatct

SEQ ID NO: 652864 - DNA, 33 bp, Homo sapien
agaataaattatttcaccacctctccaagatct

SEQ ID NO: 652865 - DNA, 33 bp, Homo sapien
agtgttgttaaacatcacccacgaagaaagtag

SEQ ID NO: 652866 - DNA, 33 bp, Homo sapien
agtgttgttaaacatcgcccacgaagaaagtag

SEQ ID NO: 652867 - DNA, 33 bp, Homo sapien
gccacattgtacaaacagttgaggcacagtgag

SEQ ID NO: 652868 - DNA, 33 bp, Homo sapien
gccacattgtacaaacggttgaggcacagtgag

SEQ ID NO: 652869 - DNA, 33 bp, Homo sapien
taagaaaggcctcctcaaaattggtcctggctg

SEQ ID NO: 652870 - DNA, 33 bp, Homo sapien
taagaaaggcctcctcgaaattggtcctggctg

SEQ ID NO: 652871 - DNA, 33 bp, Homo sapien
aatacaggggtttgccactatcaaaataaaaag

SEQ ID NO: 652872 - DNA, 33 bp, Homo sapien
aatacaggggtttgcctctatcaaaataaaaag

SEQ ID NO: 652873 - DNA, 33 bp, Homo sapien
aattattctagcaaaactcatattctaatgtca

SEQ ID NO: 652874 - DNA, 33 bp, Homo sapien
aattattctagcaaaattcatattctaatgtca

SEQ ID NO: 652875 - DNA, 33 bp, Homo sapien
agagagcaaaatgtaacgttccacactcttacc

SEQ ID NO: 652876 - DNA, 33 bp, Homo sapien
agagagcaaaatgtaatgttccacactcttacc

SEQ ID NO: 652877 - DNA, 33 bp, Homo sapien
gggaggcggctaaatccctggcacatgcatttg

SEQ ID NO: 652878 - DNA, 33 bp, Homo sapien
gggaggcggctaaatctctggcacatgcatttg

SEQ ID NO: 652879 - DNA, 33 bp, Homo sapien
tggaatgagttcttacgccagtttctacgtgct

SEQ ID NO: 652880 - DNA, 33 bp, Homo sapien
tggaatgagttcttactccagtttctacgtgct

SEQ ID NO: 652881 - DNA, 33 bp, Homo sapien
atcagctagagttccaagtgaaagaattttgct

SEQ ID NO: 652882 - DNA, 33 bp, Homo sapien
atcagctagagttccacgtgaaagaattttgct

SEQ ID NO: 652883 - DNA, 33 bp, Homo sapien
tagatataatttgaggaacactaaggaaaagat

SEQ ID NO: 652884 - DNA, 33 bp, Homo sapien
tagatataatttgagggacactaaggaaaagat

SEQ ID NO: 652885 - DNA, 33 bp, Homo sapien
agcagttgcaatagtaacaaatgtgaagacagg

SEQ ID NO: 652886 - DNA, 33 bp, Homo sapien
agcagttgcaatagtagcaaatgtgaagacagg

SEQ ID NO: 652887 - DNA, 33 bp, Homo sapien
gcctctctctggacacggatactctcaagggtc

SEQ ID NO: 652888 - DNA, 33 bp, Homo sapien
gcctctctctggacactgatactctcaagggtc

SEQ ID NO: 652889 - DNA, 33 bp, Homo sapien
tatggaaaagtggccaaactattacatggagct

SEQ ID NO: 652890 - DNA, 33 bp, Homo sapien
tatggaaaagtggccagactattacatggagct

SEQ ID NO: 652891 - DNA, 33 bp, Homo sapien
acctactcctaagaaagggactgaatccagggg

SEQ ID NO: 652892 - DNA, 33 bp, Homo sapien
acctactcctaagaaatggactgaatccagggg

SEQ ID NO: 652893 - DNA, 33 bp, Homo sapien
tgttcatatatgcagacgtctttgactcctggt

SEQ ID NO: 652894 - DNA, 33 bp, Homo sapien
tgttcatatatgcagatgtctttgactcctggt

SEQ ID NO: 652895 - DNA, 33 bp, Homo sapien
attgatcagattacaagttctaaacagattaaa

SEQ ID NO: 652896 - DNA, 33 bp, Homo sapien
attgatcagattacaatttctaaacagattaaa

SEQ ID NO: 652897 - DNA, 33 bp, Homo sapien
cctcagcaaagaaacacagagaagtgaagttaa

SEQ ID NO: 652898 - DNA, 33 bp, Homo sapien
cctcagcaaagaaacagagagaagtgaagttaa

SEQ ID NO: 652899 - DNA, 33 bp, Homo sapien
tatgttccacaacctccatactctaccctgcaa

SEQ ID NO: 652900 - DNA, 33 bp, Homo sapien
tatgttccacaacctctatactctaccctgcaa

SEQ ID NO: 652901 - DNA, 33 bp, Homo sapien
gaaagatgagtgtaaaccctttggagattagtg

SEQ ID NO: 652902 - DNA, 33 bp, Homo sapien
gaaagatgagtgtaaatcctttggagattagtg

SEQ ID NO: 652903 - DNA, 33 bp, Homo sapien
tttgttaggctctgtacaccttcctatcagaat

SEQ ID NO: 652904 - DNA, 33 bp, Homo sapien
tttgttaggctctgtataccttcctatcagaat

SEQ ID NO: 652905 - DNA, 33 bp, Homo sapien
ttcctcaggtaaattgcactctagcactactta

SEQ ID NO: 652906 - DNA, 33 bp, Homo sapien
ttcctcaggtaaattgtactctagcactactta

SEQ ID NO: 652907 - DNA, 33 bp, Homo sapien
atgatcccttagaataccgaaaaagcagactac

SEQ ID NO: 652908 - DNA, 33 bp, Homo sapien
atgatcccttagaatatcgaaaaagcagactac

SEQ ID NO: 652909 - DNA, 33 bp, Homo sapien
aaaagtagcgacaatgaaaaggcaaattcagac

SEQ ID NO: 652910 - DNA, 33 bp, Homo sapien
aaaagtagcgacaatggaaaggcaaattcagac

SEQ ID NO: 652911 - DNA, 33 bp, Homo sapien
atgattaattaattgccgattgaagactgggta

SEQ ID NO: 652912 - DNA, 33 bp, Homo sapien
atgattaattaattgctgattgaagactgggta

SEQ ID NO: 652913 - DNA, 33 bp, Homo sapien
tctatacactagaaagaactgatctgaaaatga

SEQ ID NO: 652914 - DNA, 33 bp, Homo sapien
tctatacactagaaagtactgatctgaaaatga

SEQ ID NO: 652915 - DNA, 33 bp, Homo sapien
ctccttggcttttcaaagaatttacctgctgct

SEQ ID NO: 652916 - DNA, 33 bp, Homo sapien
ctccttggcttttcaaggaatttacctgctgct

SEQ ID NO: 652917 - DNA, 33 bp, Homo sapien
caccaactttgaggaaaccactgcttattttgg

SEQ ID NO: 652918 - DNA, 33 bp, Homo sapien
caccaactttgaggaagccactgcttattttgg

SEQ ID NO: 652919 - DNA, 33 bp, Homo sapien
acttttagagtagacacgtttgcatttcccttt

SEQ ID NO: 652920 - DNA, 33 bp, Homo sapien
acttttagagtagacatgtttgcatttcccttt

SEQ ID NO: 652921 - DNA, 33 bp, Homo sapien
gaattgagatatcaaaatacaacagctattaga

SEQ ID NO: 652922 - DNA, 33 bp, Homo sapien
gaattgagatatcaaagtacaacagctattaga

SEQ ID NO: 652923 - DNA, 33 bp, Homo sapien
aaccctgtcctcaaaggagtagcacctgagaag

SEQ ID NO: 652924 - DNA, 33 bp, Homo sapien
aaccctgtcctcaaagtagtagcacctgagaag

SEQ ID NO: 652925 - DNA, 33 bp, Homo sapien
gaggcaactgtttcacaagatctgaagatatca

SEQ ID NO: 652926 - DNA, 33 bp, Homo sapien
gaggcaactgtttcacgagatctgaagatatca

SEQ ID NO: 652927 - DNA, 33 bp, Homo sapien
cagacacaataaaatcaaaaagcaattcattat

SEQ ID NO: 652928 - DNA, 33 bp, Homo sapien
cagacacaataaaatcgaaaagcaattcattat

SEQ ID NO: 652929 - DNA, 33 bp, Homo sapien
aattcattatgtgaataagaaactcaacaaaaa

SEQ ID NO: 652930 - DNA, 33 bp, Homo sapien
aattcattatgtgaatgagaaactcaacaaaaa

SEQ ID NO: 652931 - DNA, 33 bp, Homo sapien
atatagaaatacagaaaactgaggatagcccta

SEQ ID NO: 652932 - DNA, 33 bp, Homo sapien
atatagaaatacagaagactgaggatagcccta

SEQ ID NO: 652933 - DNA, 33 bp, Homo sapien
caacacacacgtgaaacatgtgaaaatcgctat

SEQ ID NO: 652934 - DNA, 33 bp, Homo sapien
caacacacacgtgaaatatgtgaaaatcgctat

SEQ ID NO: 652935 - DNA, 33 bp, Homo sapien
tgtttcagctgaaaacactgtatttactcaccc

SEQ ID NO: 652936 - DNA, 33 bp, Homo sapien
tgtttcagctgaaaacgctgtatttactcaccc

SEQ ID NO: 652937 - DNA, 33 bp, Homo sapien
ttctgggggtctgcttaaacctccagttgcttc

SEQ ID NO: 652938 - DNA, 33 bp, Homo sapien
ttctgggggtctgcttgaacctccagttgcttc

SEQ ID NO: 652939 - DNA, 33 bp, Homo sapien
gtcagcagcaatttcaaaactctctgggacaga

SEQ ID NO: 652940 - DNA, 33 bp, Homo sapien
gtcagcagcaatttcagaactctctgggacaga

SEQ ID NO: 652941 - DNA, 33 bp, Homo sapien
ccctttaagatttggaacaatgtaaaaatgtct

SEQ ID NO: 652942 - DNA, 33 bp, Homo sapien
ccctttaagatttggagcaatgtaaaaatgtct

SEQ ID NO: 652943 - DNA, 33 bp, Homo sapien
aataggatccaattgacatttatggaaattata

SEQ ID NO: 652944 - DNA, 33 bp, Homo sapien
aataggatccaattgatatttatggaaattata

SEQ ID NO: 652945 - DNA, 33 bp, Homo sapien
tattctaggacctgagcatttaaccataagcac

SEQ ID NO: 652946 - DNA, 33 bp, Homo sapien
tattctaggacctgaggatttaaccataagcac

SEQ ID NO: 652947 - DNA, 33 bp, Homo sapien
tcccctgattagcctgcagatgtcatttctgat

SEQ ID NO: 652948 - DNA, 33 bp, Homo sapien
tcccctgattagcctgtagatgtcatttctgat

SEQ ID NO: 652949 - DNA, 33 bp, Homo sapien
tgcaaagggaggtgacacaatatggcactcaga

SEQ ID NO: 652950 - DNA, 33 bp, Homo sapien
tgcaaagggaggtgacgcaatatggcactcaga

SEQ ID NO: 652951 - DNA, 33 bp, Homo sapien
tggaagtacctaaagacgatgtacctttctgtg

SEQ ID NO: 652952 - DNA, 33 bp, Homo sapien
tggaagtacctaaagatgatgtacctttctgtg

SEQ ID NO: 652953 - DNA, 33 bp, Homo sapien
tggagagttcctgatactactcacttccatcca

SEQ ID NO: 652954 - DNA, 33 bp, Homo sapien
tggagagttcctgatattactcacttccatcca

SEQ ID NO: 652955 - DNA, 33 bp, Homo sapien
aactaaaactgaaagacgttgaagcaactttac

SEQ ID NO: 652956 - DNA, 33 bp, Homo sapien
aactaaaactgaaagatgttgaagcaactttac

SEQ ID NO: 652957 - DNA, 33 bp, Homo sapien; identical to SEQ ID NO: 652955

SEQ ID NO: 652958 - DNA, 33 bp, Homo sapien; identical to SEQ ID NO: 652956

SEQ ID NO: 652959 - DNA, 33 bp, Homo sapien
aatgttacagaagataaagctgactatgggaat

SEQ ID NO: 652960 - DNA, 33 bp, Homo sapien
aatgttacagaagatacagctgactatgggaat

SEQ ID NO: 652961 - DNA, 33 bp, Homo sapien
gttcacaaagagttgacgtaaaaagcataatgg

SEQ ID NO: 652962 - DNA, 33 bp, Homo sapien
gttcacaaagagttgatgtaaaaagcataatgg

SEQ ID NO: 652963 - DNA, 33 bp, Homo sapien
ccaacttgaatgagaacggacaataaaagacac

SEQ ID NO: 652964 - DNA, 33 bp, Homo sapien
ccaacttgaatgagaatggacaataaaagacac

SEQ ID NO: 652965 - DNA, 33 bp, Homo sapien
gttatattttttagacaaacacaaagcacaatg

SEQ ID NO: 652966 - DNA, 33 bp, Homo sapien
gttatattttttagaccaacacaaagcacaatg

SEQ ID NO: 652967 - DNA, 33 bp, Homo sapien
gactcctcatcagatgaaacaagtgtctctcgt

SEQ ID NO: 652968 - DNA, 33 bp, Homo sapien
gactcctcatcagatggaacaagtgtctctcgt

SEQ ID NO: 652969 - DNA, 33 bp, Homo sapien
tggtttctcccggaaccgtctctttcacacact

SEQ ID NO: 652970 - DNA, 33 bp, Homo sapien
tggtttctcccggaacggtctctttcacacact

SEQ ID NO: 652971 - DNA, 33 bp, Homo sapien
ccttaatctcccgcaaagccttttttaaagttc

SEQ ID NO: 652972 - DNA, 33 bp, Homo sapien
ccttaatctcccgcaacgccttttttaaagttc

SEQ ID NO: 652973 - DNA, 33 bp, Homo sapien
tataagtctgacagacacccaatacaccctttt

SEQ ID NO: 652974 - DNA, 33 bp, Homo sapien
tataagtctgacagacccccaatacaccctttt

SEQ ID NO: 652975 - DNA, 33 bp, Homo sapien
taatttatctggactacatcttgaattctgtcc

SEQ ID NO: 652976 - DNA, 33 bp, Homo sapien
taatttatctggactagatcttgaattctgtcc

SEQ ID NO: 652977 - DNA, 33 bp, Homo sapien
tgataaaagactcttgaaaggactagtctcata

SEQ ID NO: 652978 - DNA, 33 bp, Homo sapien
tgataaaagactcttggaaggactagtctcata

SEQ ID NO: 652979 - DNA, 33 bp, Homo sapien
acttactgaagcctgaaatgtagcccattaatt

SEQ ID NO: 652980 - DNA, 33 bp, Homo sapien
acttactgaagcctgagatgtagcccattaatt

SEQ ID NO: 652981 - DNA, 33 bp, Homo sapien
aaaggatacagccatgacaaaagaggaaacatt

SEQ ID NO: 652982 - DNA, 33 bp, Homo sapien
aaaggatacagccatggcaaaagaggaaacatt

SEQ ID NO: 652983 - DNA, 33 bp, Homo sapien
tagtctttctcaagaaaatactacatagtcatt

SEQ ID NO: 652984 - DNA, 33 bp, Homo sapien
tagtctttctcaagaacatactacatagtcatt

SEQ ID NO: 652985 - DNA, 33 bp, Homo sapien
tacagatgagaaaacgcagtctcagtgatgtta

SEQ ID NO: 652986 - DNA, 33 bp, Homo sapien
tacagatgagaaaacgtagtctcagtgatgtta

SEQ ID NO: 652987 - DNA, 33 bp, Homo sapien
aattacagaacttgcagattatttccactctat

SEQ ID NO: 652988 - DNA, 33 bp, Homo sapien
aattacagaacttgcatattatttccactctat

SEQ ID NO: 652989 - DNA, 33 bp, Homo sapien
gctaaataccataaaagaatagacagagccaaa

SEQ ID NO: 652990 - DNA, 33 bp, Homo sapien
gctaaataccataaaataatagacagagccaaa

SEQ ID NO: 652991 - DNA, 33 bp, Homo sapien
ttgtcagtgaaaaaaaatatagcactaaagcag

SEQ ID NO: 652992 - DNA, 33 bp, Homo sapien
ttgtcagtgaaaaaaattatagcactaaagcag

SEQ ID NO: 652993 - DNA, 33 bp, Homo sapien
atgaaaataaggcagcaaaggaaaaaattaaag

SEQ ID NO: 652994 - DNA, 33 bp, Homo sapien
atgaaaataaggcagcgaaggaaaaaattaaag

SEQ ID NO: 652995 - DNA, 33 bp, Homo sapien
aacaacgaaatgtagaagttatataggctcata

SEQ ID NO: 652996 - DNA, 33 bp, Homo sapien
aacaacgaaatgtagacgttatataggctcata

SEQ ID NO: 652997 - DNA, 33 bp, Homo sapien
ggacaatgttctggagaatcttgaagctttggc

SEQ ID NO: 652998 - DNA, 33 bp, Homo sapien
ggacaatgttctggaggatcttgaagctttggc

SEQ ID NO: 652999 - DNA, 33 bp, Homo sapien
agaacattgtcccataaatctctttacctatgt

SEQ ID NO: 653000 - DNA, 33 bp, Homo sapien
agaacattgtcccatacatctctttacctatgt

SEQ ID NO: 653001 - DNA, 33 bp, Homo sapien
gactgcaggactcagaccaggtgcttaactgat

SEQ ID NO: 653002 - DNA, 33 bp, Homo sapien
gactgcaggactcagatcaggtgcttaactgat

SEQ ID NO: 653003 - DNA, 33 bp, Homo sapien
ctttaaaatgggtgacaaaagcacttcagatag

SEQ ID NO: 653004 - DNA, 33 bp, Homo sapien
ctttaaaatgggtgacgaaagcacttcagatag

SEQ ID NO: 653005 - DNA, 33 bp, Homo sapien
ctgtgtagttttgaagcactgactcttgatgaa

SEQ ID NO: 653006 - DNA, 33 bp, Homo sapien
ctgtgtagttttgaaggactgactcttgatgaa

SEQ ID NO: 653007 - DNA, 33 bp, Homo sapien
acttctctgcattttccacaatttcctcaataa

SEQ ID NO: 653008 - DNA, 33 bp, Homo sapien
acttctctgcattttctacaatttcctcaataa

SEQ ID NO: 653009 - DNA, 33 bp, Homo sapien
atatgcacagttttgacgttacactttattctg

SEQ ID NO: 653010 - DNA, 33 bp, Homo sapien
atatgcacagttttgaggttacactttattctg

SEQ ID NO: 653011 - DNA, 33 bp, Homo sapien
caaaacacacaaacaaagcgaggaaagcaaggg

SEQ ID NO: 653012 - DNA, 33 bp, Homo sapien
caaaacacacaaacaacgcgaggaaagcaaggg

SEQ ID NO: 653013 - DNA, 33 bp, Homo sapien
gcagtttgatctctaacgccatgttaaaatcaa

SEQ ID NO: 653014 - DNA, 33 bp, Homo sapien
gcagtttgatctctaatgccatgttaaaatcaa

SEQ ID NO: 653015 - DNA, 33 bp, Homo sapien
cagatttttgtatggacgtgtttctaactaata

SEQ ID NO: 653016 - DNA, 33 bp, Homo sapien
cagatttttgtatggatgtgtttctaactaata

SEQ ID NO: 653017 - DNA, 33 bp, Homo sapien
gagaatgtggagcaacagggactctcttttatt

SEQ ID NO: 653018 - DNA, 33 bp, Homo sapien
gagaatgtggagcaaccgggactctcttttatt

SEQ ID NO: 653019 - DNA, 33 bp, Homo sapien
ttaccatgtttctaaacgttgaactgcatctca

SEQ ID NO: 653020 - DNA, 33 bp, Homo sapien
ttaccatgtttctaaatgttgaactgcatctca

SEQ ID NO: 653021 - DNA, 33 bp, Homo sapien
cttttgtgaaactccacgtaactatcagactca

SEQ ID NO: 653022 - DNA, 33 bp, Homo sapien
cttttgtgaaactccatgtaactatcagactca

SEQ ID NO: 653023 - DNA, 33 bp, Homo sapien
gacaatgatggcagccagcagaatttgtttttg

SEQ ID NO: 653024 - DNA, 33 bp, Homo sapien
gacaatgatggcagcccgcagaatttgtttttg

SEQ ID NO: 653025 - DNA, 33 bp, Homo sapien
ttataatgaccactgcacactctaatgttagtc

SEQ ID NO: 653026 - DNA, 33 bp, Homo sapien
ttataatgaccactgcgcactctaatgttagtc

SEQ ID NO: 653027 - DNA, 33 bp, Homo sapien
atatctttggagactacgacattagaatagagg

SEQ ID NO: 653028 - DNA, 33 bp, Homo sapien
atatctttggagactatgacattagaatagagg

SEQ ID NO: 653029 - DNA, 33 bp, Homo sapien; identical to SEQ ID NO: 653027

SEQ ID NO: 653030 - DNA, 33 bp, Homo sapien; identical to SEQ ID NO: 653028

SEQ ID NO: 653031 - DNA, 33 bp, Homo sapien
cctaacagagtgccaactacaacatagaaggcc

SEQ ID NO: 653032 - DNA, 33 bp, Homo sapien
cctaacagagtgccaagtacaacatagaaggcc

SEQ ID NO: 653033 - DNA, 33 bp, Homo sapien
cctcctgctttggggacataaacgtcttgctct

SEQ ID NO: 653034 - DNA, 33 bp, Homo sapien
cctcctgctttggggatataaacgtcttgctct

SEQ ID NO: 653035 - DNA, 33 bp, Homo sapien
ggaccctggtggcacaacatgcctgatcctata

SEQ ID NO: 653036 - DNA, 33 bp, Homo sapien
ggaccctggtggcacagcatgcctgatcctata

SEQ ID NO: 653037 - DNA, 33 bp, Homo sapien
tgagatgatttttcagaatgcagcctattaaaa

SEQ ID NO: 653038 - DNA, 33 bp, Homo sapien
tgagatgatttttcaggatgcagcctattaaaa

SEQ ID NO: 653039 - DNA, 33 bp, Homo sapien
acttttgctatctgcaatagaccagtgttttaa

SEQ ID NO: 653040 - DNA, 33 bp, Homo sapien
acttttgctatctgcagtagaccagtgttttaa

SEQ ID NO: 653041 - DNA, 33 bp, Homo sapien
aaggaggcacaactcactcccgtcagcccaaga

SEQ ID NO: 653042 - DNA, 33 bp, Homo sapien
aaggaggcacaactcattcccgtcagcccaaga

SEQ ID NO: 653043 - DNA, 33 bp, Homo sapien
tctgtggctgtctaaaactttttgtatgtcaag

SEQ ID NO: 653044 - DNA, 33 bp, Homo sapien
tctgtggctgtctaaatctttttgtatgtcaag

SEQ ID NO: 653045 - DNA, 33 bp, Homo sapien
agctacagaatattccacccaacagccacagaa

SEQ ID NO: 653046 - DNA, 33 bp, Homo sapien
agctacagaatattccgcccaacagccacagaa

SEQ ID NO: 653047 - DNA, 33 bp, Homo sapien
acaaatctagcggccaagttctaacgagtgtac

SEQ ID NO: 653048 - DNA, 33 bp, Homo sapien
acaaatctagcggccatgttctaacgagtgtac

SEQ ID NO: 653049 - DNA, 33 bp, Homo sapien
ggttatcccattcaaagtcaacaatctgtgcac

SEQ ID NO: 653050 - DNA, 33 bp, Homo sapien
ggttatcccattcaaattcaacaatctgtgcac

SEQ ID NO: 653051 - DNA, 33 bp, Homo sapien
tacatctggaatctcaactaaaagcatactttt

SEQ ID NO: 653052 - DNA, 33 bp, Homo sapien
tacatctggaatctcagctaaaagcatactttt

SEQ ID NO: 653053 - DNA, 33 bp, Homo sapien
aaatactccagctgcccgataaaggaatctaaa

SEQ ID NO: 653054 - DNA, 33 bp, Homo sapien
aaatactccagctgcctgataaaggaatctaaa

SEQ ID NO: 653055 - DNA, 33 bp, Homo sapien
ttaacagagacctcatcagaaatgttgattgga

SEQ ID NO: 653056 - DNA, 33 bp, Homo sapien
ttaacagagacctcatgagaaatgttgattgga

SEQ ID NO: 653057 - DNA, 33 bp, Homo sapien
tcataggatatgcaacaaaaatggtacatcaga

SEQ ID NO: 653058 - DNA, 33 bp, Homo sapien
tcataggatatgcaactaaaatggtacatcaga

SEQ ID NO: 653059 - DNA, 33 bp, Homo sapien
acaatttatttcagtaagtggcttctcttcctc

SEQ ID NO: 653060 - DNA, 33 bp, Homo sapien
acaatttatttcagtatgtggcttctcttcctc

SEQ ID NO: 653061 - DNA, 33 bp, Homo sapien
gttatttcacatcctaaccagcatttagtgttg

SEQ ID NO: 653062 - DNA, 33 bp, Homo sapien
gttatttcacatcctagccagcatttagtgttg

SEQ ID NO: 653063 - DNA, 33 bp, Homo sapien
aggatgtgaaataacaataagtctcatttattg

SEQ ID NO: 653064 - DNA, 33 bp, Homo sapien
aggatgtgaaataacagtaagtctcatttattg

SEQ ID NO: 653065 - DNA, 33 bp, Homo sapien
tttcaatctgtttaagactgtcaattgggttcc

SEQ ID NO: 653066 - DNA, 33 bp, Homo sapien
tttcaatctgtttaagcctgtcaattgggttcc

SEQ ID NO: 653067 - DNA, 33 bp, Homo sapien
cctcttgctttcttgccgagcagacgtggctct

SEQ ID NO: 653068 - DNA, 33 bp, Homo sapien
cctcttgctttcttgctgagcagacgtggctct

SEQ ID NO: 653069 - DNA, 33 bp, Homo sapien
ggtactgtgacaagtaagttttatcttttgatt

SEQ ID NO: 653070 - DNA, 33 bp, Homo sapien
ggtactgtgacaagtaggttttatcttttgatt

SEQ ID NO: 653071 - DNA, 33 bp, Homo sapien
aatgttaggatgaagacgcagatcaactcaaac

SEQ ID NO: 653072 - DNA, 33 bp, Homo sapien
aatgttaggatgaagatgcagatcaactcaaac

SEQ ID NO: 653073 - DNA, 33 bp, Homo sapien
ttctagactcaagatgcaataacacaggggcag

SEQ ID NO: 653074 - DNA, 33 bp, Homo sapien
ttctagactcaagatgtaataacacaggggcag

SEQ ID NO: 653075 - DNA, 33 bp, Homo sapien
acgaggattacaggaaaacataaatggtacaat

SEQ ID NO: 653076 - DNA, 33 bp, Homo sapien
acgaggattacaggaatacataaatggtacaat

SEQ ID NO: 653077 - DNA, 33 bp, Homo sapien
taagaacccctctcccccagtagctgatcaacc

SEQ ID NO: 653078 - DNA, 33 bp, Homo sapien
taagaacccctctccctcagtagctgatcaacc

SEQ ID NO: 653079 - DNA, 33 bp, Homo sapien
ctcctgctctgttgagaagtaagcttttccttt

SEQ ID NO: 653080 - DNA, 33 bp, Homo sapien
ctcctgctctgttgaggagtaagcttttccttt

SEQ ID NO: 653081 - DNA, 33 bp, Homo sapien
gatgtggagactaagacgccacgtctaatcaga

SEQ ID NO: 653082 - DNA, 33 bp, Homo sapien
gatgtggagactaagatgccacgtctaatcaga

SEQ ID NO: 653083 - DNA, 33 bp, Homo sapien
aacctctcaactctaaccaattagcttttctta

SEQ ID NO: 653084 - DNA, 33 bp, Homo sapien
aacctctcaactctaatcaattagcttttctta

SEQ ID NO: 653085 - DNA, 33 bp, Homo sapien
acttgctaaggctgacaagctctcaactgaaga

SEQ ID NO: 653086 - DNA, 33 bp, Homo sapien
acttgctaaggctgacgagctctcaactgaaga

SEQ ID NO: 653087 - DNA, 33 bp, Homo sapien
aattctagactgtttacaatgatttctgggaaa

SEQ ID NO: 653088 - DNA, 33 bp, Homo sapien
aattctagactgtttagaatgatttctgggaaa

SEQ ID NO: 653089 - DNA, 33 bp, Homo sapien
tatagcactcgactcactaataagccaataaat

SEQ ID NO: 653090 - DNA, 33 bp, Homo sapien
tatagcactcgactcattaataagccaataaat

SEQ ID NO: 653091 - DNA, 33 bp, Homo sapien
gcaaaacagtgttttaagacttagaataaaaaa

SEQ ID NO: 653092 - DNA, 33 bp, Homo sapien
gcaaaacagtgttttaggacttagaataaaaaa

SEQ ID NO: 653093 - DNA, 33 bp, Homo sapien
gggcatggagaaaagcacaacaataatctaagt

SEQ ID NO: 653094 - DNA, 33 bp, Homo sapien
gggcatggagaaaagcgcaacaataatctaagt

SEQ ID NO: 653095 - DNA, 33 bp, Homo sapien
actagtacctgctaaaaaaagatcccgtccata

SEQ ID NO: 653096 - DNA, 33 bp, Homo sapien
actagtacctgctaaagaaagatcccgtccata

SEQ ID NO: 653097 - DNA, 33 bp, Homo sapien
tacttccaagtactcacgataaagactccctgt

SEQ ID NO: 653098 - DNA, 33 bp, Homo sapien
tacttccaagtactcatgataaagactccctgt

SEQ ID NO: 653099 - DNA, 33 bp, Homo sapien
aaggtaccttaagcaaattagcagttttcacaa

SEQ ID NO: 653100 - DNA, 33 bp, Homo sapien
aaggtaccttaagcaatttagcagttttcacaa

SEQ ID NO: 653101 - DNA, 33 bp, Homo sapien
aattttttgctgtgtaataaacccatgaacaat

SEQ ID NO: 653102 - DNA, 33 bp, Homo sapien
aattttttgctgtgtagtaaacccatgaacaat

SEQ ID NO: 653103 - DNA, 33 bp, Homo sapien
taatgcagggttgggacagagcacaattacagg

SEQ ID NO: 653104 - DNA, 33 bp, Homo sapien
taatgcagggttgggatagagcacaattacagg

SEQ ID NO: 653105 - DNA, 33 bp, Homo sapien
tcttgcagtcctttcacggccgatcccagacca

SEQ ID NO: 653106 - DNA, 33 bp, Homo sapien
tcttgcagtcctttcatggccgatcccagacca

SEQ ID NO: 653107 - DNA, 33 bp, Homo sapien
atgaaaaatggcaacaactccaagaatataaca

SEQ ID NO: 653108 - DNA, 33 bp, Homo sapien
atgaaaaatggcaacagctccaagaatataaca

SEQ ID NO: 653109 - DNA, 33 bp, Homo sapien
ttcttaaaaagaatataaggctacaaaagcagg

SEQ ID NO: 653110 - DNA, 33 bp, Homo sapien
ttcttaaaaagaatatgaggctacaaaagcagg

SEQ ID NO: 653111 - DNA, 33 bp, Homo sapien
aggggataacttgacaaattactctataactct

SEQ ID NO: 653112 - DNA, 33 bp, Homo sapien
aggggataacttgacagattactctataactct

SEQ ID NO: 653113 - DNA, 33 bp, Homo sapien
agtgaaccaagaagagcaaaaggaagagagaga

SEQ ID NO: 653114 - DNA, 33 bp, Homo sapien
agtgaaccaagaagaggaaaaggaagagagaga

SEQ ID NO: 653115 - DNA, 33 bp, Homo sapien
ccgtgtcatgagctgcaaccttgtatcttaatg

SEQ ID NO: 653116 - DNA, 33 bp, Homo sapien
ccgtgtcatgagctgcgaccttgtatcttaatg

SEQ ID NO: 653117 - DNA, 33 bp, Homo sapien
ccagtctagtcttcaacagcactcatttggttc

SEQ ID NO: 653118 - DNA, 33 bp, Homo sapien
ccagtctagtcttcaatagcactcatttggttc

SEQ ID NO: 653119 - DNA, 33 bp, Homo sapien
tcttgacccagtttcacgaatttttcgacactg

SEQ ID NO: 653120 - DNA, 33 bp, Homo sapien
tcttgacccagtttcatgaatttttcgacactg

SEQ ID NO: 653121 - DNA, 33 bp, Homo sapien
aaaaatccaggaaacaaatggttgaatcctagt

SEQ ID NO: 653122 - DNA, 33 bp, Homo sapien
aaaaatccaggaaacagatggttgaatcctagt

SEQ ID NO: 653123 - DNA, 33 bp, Homo sapien
gatcaaggatctcaacaaagacctggtcatcat

SEQ ID NO: 653124 - DNA, 33 bp, Homo sapien
gatcaaggatctcaaccaagacctggtcatcat

SEQ ID NO: 653125 - DNA, 33 bp, Homo sapien
ggtgatctatataaccggaggagtgttggccag

SEQ ID NO: 653126 - DNA, 33 bp, Homo sapien
ggtgatctatataacctgaggagtgttggccag

SEQ ID NO: 653127 - DNA, 33 bp, Homo sapien
cacagtacaggttcagccacagtctggcatcta

SEQ ID NO: 653128 - DNA, 33 bp, Homo sapien
cacagtacaggttcagtcacagtctggcatcta

SEQ ID NO: 653129 - DNA, 33 bp, Homo sapien
cctaagggcacggagaaaggtacaattggaatg

SEQ ID NO: 653130 - DNA, 33 bp, Homo sapien
cctaagggcacggagagaggtacaattggaatg

SEQ ID NO: 653131 - DNA, 33 bp, Homo sapien
ctgctcacttgagaaaacaacatctttttttac

SEQ ID NO: 653132 - DNA, 33 bp, Homo sapien
ctgctcacttgagaaagcaacatctttttttac

SEQ ID NO: 653133 - DNA, 33 bp, Homo sapien
agggttttaagagcaaagtgtcaggaatcagga

SEQ ID NO: 653134 - DNA, 33 bp, Homo sapien
agggttttaagagcaatgtgtcaggaatcagga

SEQ ID NO: 653135 - DNA, 33 bp, Homo sapien
gaaaccttgatgaccacagactgacagctaaca

SEQ ID NO: 653136 - DNA, 33 bp, Homo sapien
gaaaccttgatgaccatagactgacagctaaca

SEQ ID NO: 653137 - DNA, 33 bp, Homo sapien
tgtttgcatcatagaacctccatttttcggaac

SEQ ID NO: 653138 - DNA, 33 bp, Homo sapien
tgtttgcatcatagaagctccatttttcggaac

SEQ ID NO: 653139 - DNA, 33 bp, Homo sapien
ctggcacattgcagaacagtaaattctttccat

SEQ ID NO: 653140 - DNA, 33 bp, Homo sapien
ctggcacattgcagaagagtaaattctttccat

SEQ ID NO: 653141 - DNA, 33 bp, Homo sapien
cccgcactccagagataactaagcagctgattc

SEQ ID NO: 653142 - DNA, 33 bp, Homo sapien
cccgcactccagagatgactaagcagctgattc

SEQ ID NO: 653143 - DNA, 33 bp, Homo sapien
gggaggcttagagaaacaggtagctgcaggagg

SEQ ID NO: 653144 - DNA, 33 bp, Homo sapien
gggaggcttagagaaataggtagctgcaggagg

SEQ ID NO: 653145 - DNA, 33 bp, Homo sapien
gtgatctggagattcacaggaaagagtcacatc

SEQ ID NO: 653146 - DNA, 33 bp, Homo sapien
gtgatctggagattcataggaaagagtcacatc

SEQ ID NO: 653147 - DNA, 33 bp, Homo sapien
tctatctacaggtgaacagataaagtggatgat

SEQ ID NO: 653148 - DNA, 33 bp, Homo sapien
tctatctacaggtgaatagataaagtggatgat

SEQ ID NO: 653149 - DNA, 33 bp, Homo sapien
tggcttgcaggacgaaacccatcttcactggga

SEQ ID NO: 653150 - DNA, 33 bp, Homo sapien
tggcttgcaggacgaagcccatcttcactggga

SEQ ID NO: 653151 - DNA, 33 bp, Homo sapien
acatcctcctctctggaccaatatgttttttcc

SEQ ID NO: 653152 - DNA, 33 bp, Homo sapien
acatcctcctctctgggccaatatgttttttcc

SEQ ID NO: 653153 - DNA, 33 bp, Homo sapien
tttctcttcctcaataaggtggtgagctggtga

SEQ ID NO: 653154 - DNA, 33 bp, Homo sapien
tttctcttcctcaatacggtggtgagctggtga

SEQ ID NO: 653155 - DNA, 33 bp, Homo sapien
taactcaagatagactaaagacttaaatgtaaa

SEQ ID NO: 653156 - DNA, 33 bp, Homo sapien
taactcaagatagactgaagacttaaatgtaaa

SEQ ID NO: 653157 - DNA, 33 bp, Homo sapien
ttgttcctggacacacggctggcttacattttc

SEQ ID NO: 653158 - DNA, 33 bp, Homo sapien
ttgttcctggacacactgctggcttacattttc

SEQ ID NO: 653159 - DNA, 33 bp, Homo sapien
aaatttcctgactgaacgaagaaatgtggtaca

SEQ ID NO: 653160 - DNA, 33 bp, Homo sapien
aaatttcctgactgaatgaagaaatgtggtaca

SEQ ID NO: 653161 - DNA, 33 bp, Homo sapien
tggctgcaataaattacgaacctgcctaagttc

SEQ ID NO: 653162 - DNA, 33 bp, Homo sapien
tggctgcaataaattatgaacctgcctaagttc

SEQ ID NO: 653163 - DNA, 33 bp, Homo sapien
caccagatttattttacagctttgtctatggtt

SEQ ID NO: 653164 - DNA, 33 bp, Homo sapien
caccagatttattttagagctttgtctatggtt

SEQ ID NO: 653165 - DNA, 33 bp, Homo sapien
gaggaaggagtaattgaatcttctgaaaaagta

SEQ ID NO: 653166 - DNA, 33 bp, Homo sapien
gaggaaggagtaattgcatcttctgaaaaagta

SEQ ID NO: 653167 - DNA, 33 bp, Homo sapien
agtggctatagtttcccgaaatcaactgaagtc

SEQ ID NO: 653168 - DNA, 33 bp, Homo sapien
agtggctatagtttcctgaaatcaactgaagtc

SEQ ID NO: 653169 - DNA, 33 bp, Homo sapien
agttctatagagccacaataaaattacaaagtc

SEQ ID NO: 653170 - DNA, 33 bp, Homo sapien
agttctatagagccacgataaaattacaaagtc

SEQ ID NO: 653171 - DNA, 33 bp, Homo sapien
tttggcactttaataaatgaattgcatgtcctg

SEQ ID NO: 653172 - DNA, 33 bp, Homo sapien
tttggcactttaataagtgaattgcatgtcctg

SEQ ID NO: 653173 - DNA, 33 bp, Homo sapien
gcatataatgaatggcaaaacactgaaccaagc

SEQ ID NO: 653174 - DNA, 33 bp, Homo sapien
gcatataatgaatggcgaaacactgaaccaagc

SEQ ID NO: 653175 - DNA, 33 bp, Homo sapien
gggtaacagttaaatcacatcactctgactcag

SEQ ID NO: 653176 - DNA, 33 bp, Homo sapien
gggtaacagttaaatcgcatcactctgactcag

SEQ ID NO: 653177 - DNA, 33 bp, Homo sapien
taatatgtctaggcttaaacagataaaaatagc

SEQ ID NO: 653178 - DNA, 33 bp, Homo sapien
taatatgtctaggcttgaacagataaaaatagc

SEQ ID NO: 653179 - DNA, 33 bp, Homo sapien
atttccacactacaagaatatccaagctgctca

SEQ ID NO: 653180 - DNA, 33 bp, Homo sapien
atttccacactacaaggatatccaagctgctca

SEQ ID NO: 653181 - DNA, 33 bp, Homo sapien
cgggcccaagtcctaacgcaaagctcgtttcaa

SEQ ID NO: 653182 - DNA, 33 bp, Homo sapien
cgggcccaagtcctaatgcaaagctcgtttcaa

SEQ ID NO: 653183 - DNA, 33 bp, Homo sapien
caaagccacaaagaccacatttaactctcctca

SEQ ID NO: 653184 - DNA, 33 bp, Homo sapien
caaagccacaaagaccgcatttaactctcctca

SEQ ID NO: 653185 - DNA, 33 bp, Homo sapien
tttgagtccatttgaaaagtggtttgtgtcaag

SEQ ID NO: 653186 - DNA, 33 bp, Homo sapien
tttgagtccatttgaagagtggtttgtgtcaag

SEQ ID NO: 653187 - DNA, 33 bp, Homo sapien
tacatcatttgctttacggctgaaggtgagtat

SEQ ID NO: 653188 - DNA, 33 bp, Homo sapien
tacatcatttgctttatggctgaaggtgagtat

SEQ ID NO: 653189 - DNA, 33 bp, Homo sapien
gccaatgagagaaggtaaaactgttgacatcac

SEQ ID NO: 653190 - DNA, 33 bp, Homo sapien
gccaatgagagaaggtgaaactgttgacatcac

SEQ ID NO: 653191 - DNA, 33 bp, Homo sapien
tgctttcttcatcaaacttaagtgtaaaaacgg

SEQ ID NO: 653192 - DNA, 33 bp, Homo sapien
tgctttcttcatcaaatttaagtgtaaaaacgg

SEQ ID NO: 653193 - DNA, 33 bp, Homo sapien
aagagtggaattgtcaaagaaaataatgagaga

SEQ ID NO: 653194 - DNA, 33 bp, Homo sapien
aagagtggaattgtcagagaaaataatgagaga

SEQ ID NO: 653195 - DNA, 33 bp, Homo sapien
taatatactttccaggccaacgtgaattatggg

SEQ ID NO: 653196 - DNA, 33 bp, Homo sapien
taatatactttccaggtcaacgtgaattatggg

SEQ ID NO: 653197 - DNA, 33 bp, Homo sapien
tgtaaaatggatgataactttattatgcacata

SEQ ID NO: 653198 - DNA, 33 bp, Homo sapien
tgtaaaatggatgatacctttattatgcacata

SEQ ID NO: 653199 - DNA, 33 bp, Homo sapien
actccagtcttaaagaatcacccttctcaaaaa

SEQ ID NO: 653200 - DNA, 33 bp, Homo sapien
actccagtcttaaagagtcacccttctcaaaaa

SEQ ID NO: 653201 - DNA, 33 bp, Homo sapien
tctcgtcatatagcaacgcttgtggagctttca

SEQ ID NO: 653202 - DNA, 33 bp, Homo sapien
tctcgtcatatagcaatgcttgtggagctttca

SEQ ID NO: 653203 - DNA, 33 bp, Homo sapien
gccaagtagacaaaacaaatcactattttacaa

SEQ ID NO: 653204 - DNA, 33 bp, Homo sapien
gccaagtagacaaaacgaatcactattttacaa

SEQ ID NO: 653205 - DNA, 33 bp, Homo sapien
atgaaataccatcttacgcaattaaaatggctt

SEQ ID NO: 653206 - DNA, 33 bp, Homo sapien
atgaaataccatcttatgcaattaaaatggctt

SEQ ID NO: 653207 - DNA, 33 bp, Homo sapien
caaggaaaaaacgaaactgaacttgctactggc

SEQ ID NO: 653208 - DNA, 33 bp, Homo sapien
caaggaaaaaacgaaattgaacttgctactggc

SEQ ID NO: 653209 - DNA, 33 bp, Homo sapien
ctgtaggcaggccagagaaatactacaggaaga

SEQ ID NO: 653210 - DNA, 33 bp, Homo sapien
ctgtaggcaggccagataaatactacaggaaga

SEQ ID NO: 653211 - DNA, 33 bp, Homo sapien
ccaaaaggtagagtaacagttgcaggggttgct

SEQ ID NO: 653212 - DNA, 33 bp, Homo sapien
ccaaaaggtagagtaagagttgcaggggttgct

SEQ ID NO: 653213 - DNA, 33 bp, Homo sapien
gagagaagactcagaaatccctctgttccccta

SEQ ID NO: 653214 - DNA, 33 bp, Homo sapien
gagagaagactcagaattccctctgttccccta

SEQ ID NO: 653215 - DNA, 33 bp, Homo sapien
ggagtgcaagttaacacatccatttcagagagc

SEQ ID NO: 653216 - DNA, 33 bp, Homo sapien
ggagtgcaagttaacatatccatttcagagagc

SEQ ID NO: 653217 - DNA, 33 bp, Homo sapien
aggagaaacaggagaaatgaaatctatgaaatt

SEQ ID NO: 653218 - DNA, 33 bp, Homo sapien
aggagaaacaggagaactgaaatctatgaaatt

SEQ ID NO: 653219 - DNA, 33 bp, Homo sapien
tgtagctatctgcttaagaataaaaggaaaggt

SEQ ID NO: 653220 - DNA, 33 bp, Homo sapien
tgtagctatctgcttaggaataaaaggaaaggt

SEQ ID NO: 653221 - DNA, 33 bp, Homo sapien
cctgaaataatcaaaacgatcagaatccagttt

SEQ ID NO: 653222 - DNA, 33 bp, Homo sapien
cctgaaataatcaaaaggatcagaatccagttt

SEQ ID NO: 653223 - DNA, 33 bp, Homo sapien
tgacaaaaagcatctcccaagtgccaaataaaa

SEQ ID NO: 653224 - DNA, 33 bp, Homo sapien
tgacaaaaagcatctctcaagtgccaaataaaa

SEQ ID NO: 653225 - DNA, 33 bp, Homo sapien
ttctactcatatccaagaatttttttaaaagag

SEQ ID NO: 653226 - DNA, 33 bp, Homo sapien
ttctactcatatccaataatttttttaaaagag

SEQ ID NO: 653227 - DNA, 33 bp, Homo sapien
tgatctatagataagacgtatgaagtaagaggc

SEQ ID NO: 653228 - DNA, 33 bp, Homo sapien
tgatctatagataagatgtatgaagtaagaggc

SEQ ID NO: 653229 - DNA, 33 bp, Homo sapien
tggtgacattgtcaaacatagcctttggatatt

SEQ ID NO: 653230 - DNA, 33 bp, Homo sapien
tggtgacattgtcaaatatagcctttggatatt

SEQ ID NO: 653231 - DNA, 33 bp, Homo sapien
ctacatttacacctgagaattggattgaatata

SEQ ID NO: 653232 - DNA, 33 bp, Homo sapien
ctacatttacacctgataattggattgaatata

SEQ ID NO: 653233 - DNA, 33 bp, Homo sapien
acattgtgttggcttacgagatgcatgagaatc

SEQ ID NO: 653234 - DNA, 33 bp, Homo sapien
acattgtgttggcttatgagatgcatgagaatc

SEQ ID NO: 653235 - DNA, 33 bp, Homo sapien
catttggagaaaggagaataattggaccagctc

SEQ ID NO: 653236 - DNA, 33 bp, Homo sapien
catttggagaaaggagtataattggaccagctc

SEQ ID NO: 653237 - DNA, 33 bp, Homo sapien
gggggaactgcagaaaagtaaggaaaaagtgct

SEQ ID NO: 653238 - DNA, 33 bp, Homo sapien
gggggaactgcagaaaggtaaggaaaaagtgct

SEQ ID NO: 653239 - DNA, 33 bp, Homo sapien
tacccaccctggatgtaaaaaagtggttggaga

SEQ ID NO: 653240 - DNA, 33 bp, Homo sapien
tacccaccctggatgtcaaaaagtggttggaga

SEQ ID NO: 653241 - DNA, 33 bp, Homo sapien
aaagaacctatgaccaagtgtttaggtaaccat

SEQ ID NO: 653242 - DNA, 33 bp, Homo sapien
aaagaacctatgaccatgtgtttaggtaaccat

SEQ ID NO: 653243 - DNA, 33 bp, Homo sapien
ctgcagagccctaaaacggtgtcacagccctgg

SEQ ID NO: 653244 - DNA, 33 bp, Homo sapien
ctgcagagccctaaaagggtgtcacagccctgg

SEQ ID NO: 653245 - DNA, 33 bp, Homo sapien
ggcataaattattggaaaaaagaggccagggga

SEQ ID NO: 653246 - DNA, 33 bp, Homo sapien
ggcataaattattggagaaaagaggccagggga

SEQ ID NO: 653247 - DNA, 33 bp, Homo sapien
ttgtttcaaccaaacaagacaaatactgaggcc

SEQ ID NO: 653248 - DNA, 33 bp, Homo sapien
ttgtttcaaccaaacatgacaaatactgaggcc

SEQ ID NO: 653249 - DNA, 33 bp, Homo sapien
aaagagacaaagagccaagattaattacctctt

SEQ ID NO: 653250 - DNA, 33 bp, Homo sapien
aaagagacaaagagccgagattaattacctctt

SEQ ID NO: 653251 - DNA, 33 bp, Homo sapien
acaacttcacaccaaccagggttgccataataa

SEQ ID NO: 653252 - DNA, 33 bp, Homo sapien
acaacttcacaccaacgagggttgccataataa

SEQ ID NO: 653253 - DNA, 33 bp, Homo sapien
ttcgcagtttctgaacacttggaaccttgttct

SEQ ID NO: 653254 - DNA, 33 bp, Homo sapien
ttcgcagtttctgaacgcttggaaccttgttct

SEQ ID NO: 653255 - DNA, 33 bp, Homo sapien
tggcctatcctgctagcaatacgtccaatagta

SEQ ID NO: 653256 - DNA, 33 bp, Homo sapien
tggcctatcctgctagtaatacgtccaatagta

SEQ ID NO: 653257 - DNA, 33 bp, Homo sapien
atactgcttgtagctaatacactcatagaagaa

SEQ ID NO: 653258 - DNA, 33 bp, Homo sapien
atactgcttgtagctactacactcatagaagaa

SEQ ID NO: 653259 - DNA, 33 bp, Homo sapien
atcaaaaaaaacagtaataagcatgtgaatcct

SEQ ID NO: 653260 - DNA, 33 bp, Homo sapien
atcaaaaaaaacagtagtaagcatgtgaatcct

SEQ ID NO: 653261 - DNA, 33 bp, Homo sapien
attttccatgcttctacgccaaagcaacctagc

SEQ ID NO: 653262 - DNA, 33 bp, Homo sapien
attttccatgcttctatgccaaagcaacctagc

SEQ ID NO: 653263 - DNA, 33 bp, Homo sapien
tcagcttctgctagtaaaaatttaatgagagag

SEQ ID NO: 653264 - DNA, 33 bp, Homo sapien
tcagcttctgctagtacaaatttaatgagagag

SEQ ID NO: 653265 - DNA, 33 bp, Homo sapien
agctacttggaagctcaactagttaatggttgg

SEQ ID NO: 653266 - DNA, 33 bp, Homo sapien
agctacttggaagctctactagttaatggttgg

SEQ ID NO: 653267 - DNA, 33 bp, Homo sapien
tctgtactattctcctaaactcatctctttatt

SEQ ID NO: 653268 - DNA, 33 bp, Homo sapien
tctgtactattctcctcaactcatctctttatt

SEQ ID NO: 653269 - DNA, 33 bp, Homo sapien
ttcagtgcaatgatcgaagttgcctgtgatgta

SEQ ID NO: 653270 - DNA, 33 bp, Homo sapien
ttcagtgcaatgatcgcagttgcctgtgatgta

SEQ ID NO: 653271 - DNA, 33 bp, Homo sapien
tatgcataaatgttcacagtggccttatttgca

SEQ ID NO: 653272 - DNA, 33 bp, Homo sapien
tatgcataaatgttcatagtggccttatttgca

SEQ ID NO: 653273 - DNA, 33 bp, Homo sapien
tatgtgtgttaaaacccaatgtttctgatgctg

SEQ ID NO: 653274 - DNA, 33 bp, Homo sapien
tatgtgtgttaaaacctaatgtttctgatgctg

SEQ ID NO: 653275 - DNA, 33 bp, Homo sapien
ctccctctgtccttcactaagcctgtttgacct

SEQ ID NO: 653276 - DNA, 33 bp, Homo sapien
ctccctctgtccttcattaagcctgtttgacct

SEQ ID NO: 653277 - DNA, 33 bp, Homo sapien
atactgccaaacagaaagaactcgctttgtaca

SEQ ID NO: 653278 - DNA, 33 bp, Homo sapien
atactgccaaacagaaggaactcgctttgtaca

SEQ ID NO: 653279 - DNA, 33 bp, Homo sapien
aggagaattggaaaacgggtagagtaaaaggtt

SEQ ID NO: 653280 - DNA, 33 bp, Homo sapien
aggagaattggaaaactggtagagtaaaaggtt

SEQ ID NO: 653281 - DNA, 33 bp, Homo sapien
ttgcatggctcttgaacacttactgcaaagatt

SEQ ID NO: 653282 - DNA, 33 bp, Homo sapien
ttgcatggctcttgaatacttactgcaaagatt

SEQ ID NO: 653283 - DNA, 33 bp, Homo sapien
aactctctggcttagacatctggcctgacttac

SEQ ID NO: 653284 - DNA, 33 bp, Homo sapien
aactctctggcttagatatctggcctgacttac

SEQ ID NO: 653285 - DNA, 33 bp, Homo sapien
caaaattagtattgaaaggaatcaagtctggtg

SEQ ID NO: 653286 - DNA, 33 bp, Homo sapien
caaaattagtattgaagggaatcaagtctggtg

SEQ ID NO: 653287 - DNA, 33 bp, Homo sapien
cttaattggaacaagaaaggtcaagggaaaaga

SEQ ID NO: 653288 - DNA, 33 bp, Homo sapien
cttaattggaacaagagaggtcaagggaaaaga

SEQ ID NO: 653289 - DNA, 33 bp, Homo sapien
taaaacaagtgcttcagatccagaaatttgtta

SEQ ID NO: 653290 - DNA, 33 bp, Homo sapien
taaaacaagtgcttcatatccagaaatttgtta

SEQ ID NO: 653291 - DNA, 33 bp, Homo sapien
gatttatttggaaaaactaactgatacagaata

SEQ ID NO: 653292 - DNA, 33 bp, Homo sapien
gatttatttggaaaaagtaactgatacagaata

SEQ ID NO: 653293 - DNA, 33 bp, Homo sapien
accgttaagccctgaaatgtctaatgtctaaat

SEQ ID NO: 653294 - DNA, 33 bp, Homo sapien
accgttaagccctgaagtgtctaatgtctaaat

SEQ ID NO: 653295 - DNA, 33 bp, Homo sapien
agaggaagggacttacagaattgggacccagac

SEQ ID NO: 653296 - DNA, 33 bp, Homo sapien
agaggaagggacttacggaattgggacccagac

SEQ ID NO: 653297 - DNA, 33 bp, Homo sapien
agtattttgaggaaaaaggcagaaatctcatgt

SEQ ID NO: 653298 - DNA, 33 bp, Homo sapien
agtattttgaggaaaagggcagaaatctcatgt

SEQ ID NO: 653299 - DNA, 33 bp, Homo sapien
gtgagtgaagaaattaggacttggaactcaatt

SEQ ID NO: 653300 - DNA, 33 bp, Homo sapien
gtgagtgaagaaattatgacttggaactcaatt

SEQ ID NO: 653301 - DNA, 33 bp, Homo sapien
tctggaaggatgttacaacctagattaatgtgg

SEQ ID NO: 653302 - DNA, 33 bp, Homo sapien
tctggaaggatgttaccacctagattaatgtgg

SEQ ID NO: 653303 - DNA, 33 bp, Homo sapien
attgaggttagagtcaatccatctttaccaagc

SEQ ID NO: 653304 - DNA, 33 bp, Homo sapien
attgaggttagagtcagtccatctttaccaagc

SEQ ID NO: 653305 - DNA, 33 bp, Homo sapien
gcagatgtaataataaaacagcattggaaattc

SEQ ID NO: 653306 - DNA, 33 bp, Homo sapien
gcagatgtaataataagacagcattggaaattc

SEQ ID NO: 653307 - DNA, 33 bp, Homo sapien
aactgtgccaagtaaacgaaatattgcagcagg

SEQ ID NO: 653308 - DNA, 33 bp, Homo sapien
aactgtgccaagtaaatgaaatattgcagcagg

SEQ ID NO: 653309 - DNA, 33 bp, Homo sapien
tgttgaaatgacaacaaagcatttagaatagtg

SEQ ID NO: 653310 - DNA, 33 bp, Homo sapien
tgttgaaatgacaacagagcatttagaatagtg

SEQ ID NO: 653311 - DNA, 33 bp, Homo sapien
gatactaaagaatttgaaagtcatctgcagaga

SEQ ID NO: 653312 - DNA, 33 bp, Homo sapien
gatactaaagaatttggaagtcatctgcagaga

SEQ ID NO: 653313 - DNA, 33 bp, Homo sapien
agatgtcattttggaacgggggaaatgtgtgaa

SEQ ID NO: 653314 - DNA, 33 bp, Homo sapien
agatgtcattttggaatgggggaaatgtgtgaa

SEQ ID NO: 653315 - DNA, 33 bp, Homo sapien
agtaaggcattgtaaaatcacaccttaggctct

SEQ ID NO: 653316 - DNA, 33 bp, Homo sapien
agtaaggcattgtaaagtcacaccttaggctct

SEQ ID NO: 653317 - DNA, 33 bp, Homo sapien
gaagggactgtttatacgtaagaatgtttgtct

SEQ ID NO: 653318 - DNA, 33 bp, Homo sapien
gaagggactgtttatatgtaagaatgtttgtct

SEQ ID NO: 653319 - DNA, 33 bp, Homo sapien
atgcaaaagacaaccaagtgaaagaaatgaata

SEQ ID NO: 653320 - DNA, 33 bp, Homo sapien
atgcaaaagacaaccacgtgaaagaaatgaata

SEQ ID NO: 653321 - DNA, 33 bp, Homo sapien
aatgaatatggatatgaaaattgtcaaaaatgg

SEQ ID NO: 653322 - DNA, 33 bp, Homo sapien
aatgaatatggatatggaaattgtcaaaaatgg

SEQ ID NO: 653323 - DNA, 33 bp, Homo sapien
gggactccattagaccactaacgaatatagcga

SEQ ID NO: 653324 - DNA, 33 bp, Homo sapien
gggactccattagacctctaacgaatatagcga

SEQ ID NO: 653325 - DNA, 33 bp, Homo sapien
caaattatggctttcaataatgtcctctttttt

SEQ ID NO: 653326 - DNA, 33 bp, Homo sapien
caaattatggctttcagtaatgtcctctttttt

SEQ ID NO: 653327 - DNA, 33 bp, Homo sapien
tgggaatatagatagcacagccgttctggagag

SEQ ID NO: 653328 - DNA, 33 bp, Homo sapien
tgggaatatagatagcgcagccgttctggagag

SEQ ID NO: 653329 - DNA, 33 bp, Homo sapien
tcatgtatctggctaccggctcaatcaagtacc

SEQ ID NO: 653330 - DNA, 33 bp, Homo sapien
tcatgtatctggctactggctcaatcaagtacc

SEQ ID NO: 653331 - DNA, 33 bp, Homo sapien
tataagaactctaaggaatcaggagagagagag

SEQ ID NO: 653332 - DNA, 33 bp, Homo sapien
tataagaactctaagggatcaggagagagagag

SEQ ID NO: 653333 - DNA, 33 bp, Homo sapien
cttttcattttctaaggaacactgcaaggtagt

SEQ ID NO: 653334 - DNA, 33 bp, Homo sapien
cttttcattttctaagtaacactgcaaggtagt

SEQ ID NO: 653335 - DNA, 33 bp, Homo sapien
ctgatgtcaggtgctacgcacacaatgtttctt

SEQ ID NO: 653336 - DNA, 33 bp, Homo sapien
ctgatgtcaggtgctatgcacacaatgtttctt

SEQ ID NO: 653337 - DNA, 33 bp, Homo sapien
gatccacctcatccaaactaagtttcttgtttc

SEQ ID NO: 653338 - DNA, 33 bp, Homo sapien
gatccacctcatccaatctaagtttcttgtttc

SEQ ID NO: 653339 - DNA, 33 bp, Homo sapien
gtgaatttttctgacacgaccatctgattttta

SEQ ID NO: 653340 - DNA, 33 bp, Homo sapien
gtgaatttttctgacatgaccatctgattttta

SEQ ID NO: 653341 - DNA, 33 bp, Homo sapien
aggttaaatgattgccaaaggtcacataggtag

SEQ ID NO: 653342 - DNA, 33 bp, Homo sapien
aggttaaatgattgcccaaggtcacataggtag

SEQ ID NO: 653343 - DNA, 33 bp, Homo sapien
gggtacattttgtggaaggaagagaattgtggg

SEQ ID NO: 653344 - DNA, 33 bp, Homo sapien
gggtacattttgtggagggaagagaattgtggg

SEQ ID NO: 653345 - DNA, 33 bp, Homo sapien
gaccataaatagcaacagccattttaaagtaac

SEQ ID NO: 653346 - DNA, 33 bp, Homo sapien
gaccataaatagcaacggccattttaaagtaac

SEQ ID NO: 653347 - DNA, 33 bp, Homo sapien
ctgtagtactttctaacaagagtcggaaaactg

SEQ ID NO: 653348 - DNA, 33 bp, Homo sapien
ctgtagtactttctaataagagtcggaaaactg

SEQ ID NO: 653349 - DNA, 33 bp, Homo sapien
acttacaagcgcacaacaggattaatccatcag

SEQ ID NO: 653350 - DNA, 33 bp, Homo sapien
acttacaagcgcacaataggattaatccatcag

SEQ ID NO: 653351 - DNA, 33 bp, Homo sapien
acagactgccaagaaaaacagtgcccttctgct

SEQ ID NO: 653352 - DNA, 33 bp, Homo sapien
acagactgccaagaaagacagtgcccttctgct

SEQ ID NO: 653353 - DNA, 33 bp, Homo sapien
ttaatttagccaaaatcaatccaactttcctag

SEQ ID NO: 653354 - DNA, 33 bp, Homo sapien
ttaatttagccaaaatgaatccaactttcctag

SEQ ID NO: 653355 - DNA, 33 bp, Homo sapien
ttagtttgttacacatcatcttttagacattgt

SEQ ID NO: 653356 - DNA, 33 bp, Homo sapien
ttagtttgttacacatgatcttttagacattgt

SEQ ID NO: 653357 - DNA, 33 bp, Homo sapien
acatgctgagatttctaaaaaagtgggccttta

SEQ ID NO: 653358 - DNA, 33 bp, Homo sapien
acatgctgagatttcttaaaaagtgggccttta

SEQ ID NO: 653359 - DNA, 33 bp, Homo sapien
tgggaatggtaccgaaaacaggtgctataagaa

SEQ ID NO: 653360 - DNA, 33 bp, Homo sapien
tgggaatggtaccgaagacaggtgctataagaa

SEQ ID NO: 653361 - DNA, 33 bp, Homo sapien
tttgatgtcttttaagcccgaagtgaacacata

SEQ ID NO: 653362 - DNA, 33 bp, Homo sapien
tttgatgtcttttaagtccgaagtgaacacata

SEQ ID NO: 653363 - DNA, 33 bp, Homo sapien
gtgggtggggtgaaagcctatagaggtaggcat

SEQ ID NO: 653364 - DNA, 33 bp, Homo sapien
gtgggtggggtgaaaggctatagaggtaggcat

SEQ ID NO: 653365 - DNA, 33 bp, Homo sapien
ttgagaaactttgtgcaatgaaggttcttacag

SEQ ID NO: 653366 - DNA, 33 bp, Homo sapien
ttgagaaactttgtgcgatgaaggttcttacag

SEQ ID NO: 653367 - DNA, 33 bp, Homo sapien
aactgagaggagtggcccagaagctctactaac

SEQ ID NO: 653368 - DNA, 33 bp, Homo sapien
aactgagaggagtggctcagaagctctactaac

SEQ ID NO: 653369 - DNA, 33 bp, Homo sapien
gggttggagctcgatcactttgaaggagataaa

SEQ ID NO: 653370 - DNA, 33 bp, Homo sapien
gggttggagctcgatcgctttgaaggagataaa

SEQ ID NO: 653371 - DNA, 33 bp, Homo sapien
ctaagagaggtgtaaagaatgtgcctattctat

SEQ ID NO: 653372 - DNA, 33 bp, Homo sapien
ctaagagaggtgtaaataatgtgcctattctat

SEQ ID NO: 653373 - DNA, 33 bp, Homo sapien
gataaaagtacttatgccacagggctgttcaga

SEQ ID NO: 653374 - DNA, 33 bp, Homo sapien
gataaaagtacttatgtcacagggctgttcaga

SEQ ID NO: 653375 - DNA, 33 bp, Homo sapien
ttgatgatcttaagcaatatccttgtaggctgc

SEQ ID NO: 653376 - DNA, 33 bp, Homo sapien
ttgatgatcttaagcagtatccttgtaggctgc

SEQ ID NO: 653377 - DNA, 33 bp, Homo sapien
acaaaatgttgatggcactagcagtggagccca

SEQ ID NO: 653378 - DNA, 33 bp, Homo sapien
acaaaatgttgatggcgctagcagtggagccca

SEQ ID NO: 653379 - DNA, 33 bp, Homo sapien
cacatcttctttatccactcatctgtctatgga

SEQ ID NO: 653380 - DNA, 33 bp, Homo sapien
cacatcttctttatccgctcatctgtctatgga

SEQ ID NO: 653381 - DNA, 33 bp, Homo sapien
tagaatagatagcctaaaaacaaaccatcttat

SEQ ID NO: 653382 - DNA, 33 bp, Homo sapien
tagaatagatagcctagaaacaaaccatcttat

SEQ ID NO: 653383 - DNA, 33 bp, Homo sapien
cattgagaatcagaaaacagctgtatattcttt

SEQ ID NO: 653384 - DNA, 33 bp, Homo sapien
cattgagaatcagaaaccagctgtatattcttt

SEQ ID NO: 653385 - DNA, 33 bp, Homo sapien
tttctccttcataagacacctgcgattctctga

SEQ ID NO: 653386 - DNA, 33 bp, Homo sapien
tttctccttcataagatacctgcgattctctga

SEQ ID NO: 653387 - DNA, 33 bp, Homo sapien
ggggcgcaagattccaaatgaaagcaaaaactc

SEQ ID NO: 653388 - DNA, 33 bp, Homo sapien
ggggcgcaagattccagatgaaagcaaaaactc

SEQ ID NO: 653389 - DNA, 33 bp, Homo sapien
cctaactcaacttgggcaagcacagaagccaat

SEQ ID NO: 653390 - DNA, 33 bp, Homo sapien
cctaactcaacttgggtaagcacagaagccaat

SEQ ID NO: 653391 - DNA, 33 bp, Homo sapien
tctggagccacttccaagtttgagattgtgcag

SEQ ID NO: 653392 - DNA, 33 bp, Homo sapien
tctggagccacttccaggtttgagattgtgcag

SEQ ID NO: 653393 - DNA, 33 bp, Homo sapien
tgttttccaagcatgcacaaatttaagcgtttg

SEQ ID NO: 653394 - DNA, 33 bp, Homo sapien
tgttttccaagcatgcgcaaatttaagcgtttg

SEQ ID NO: 653395 - DNA, 33 bp, Homo sapien
ttgaatctaggatccacgtgatatgcaccacta

SEQ ID NO: 653396 - DNA, 33 bp, Homo sapien
ttgaatctaggatccaggtgatatgcaccacta

SEQ ID NO: 653397 - DNA, 33 bp, Homo sapien
gtcagatgggaaagaaagtaaactgtcatgact

SEQ ID NO: 653398 - DNA, 33 bp, Homo sapien
gtcagatgggaaagaaggtaaactgtcatgact

SEQ ID NO: 653399 - DNA, 33 bp, Homo sapien
ccaagtgcagtaaaaacaaggcactctgcttag

SEQ ID NO: 653400 - DNA, 33 bp, Homo sapien
ccaagtgcagtaaaaataaggcactctgcttag

SEQ ID NO: 653401 - DNA, 33 bp, Homo sapien
gggagttgaatgttgaagaggttctaagcactt

SEQ ID NO: 653402 - DNA, 33 bp, Homo sapien
gggagttgaatgttgatgaggttctaagcactt

SEQ ID NO: 653403 - DNA, 33 bp, Homo sapien
aaatccttgccttttacgtcactgctcagagga

SEQ ID NO: 653404 - DNA, 33 bp, Homo sapien
aaatccttgccttttatgtcactgctcagagga

SEQ ID NO: 653405 - DNA, 33 bp, Homo sapien
cagagtggtgcgagtaactcacaggtgtccttt

SEQ ID NO: 653406 - DNA, 33 bp, Homo sapien
cagagtggtgcgagtatctcacaggtgtccttt

SEQ ID NO: 653407 - DNA, 33 bp, Homo sapien
atgttctccactgaaacaatctcttccaaacag

SEQ ID NO: 653408 - DNA, 33 bp, Homo sapien
atgttctccactgaaataatctcttccaaacag

SEQ ID NO: 653409 - DNA, 33 bp, Homo sapien
gatggtcctaataaccactcttatttcttttat

SEQ ID NO: 653410 - DNA, 33 bp, Homo sapien
gatggtcctaataaccgctcttatttcttttat

SEQ ID NO: 653411 - DNA, 33 bp, Homo sapien
ttcaacagagcaaagtaaaggccaagtgacttg

SEQ ID NO: 653412 - DNA, 33 bp, Homo sapien
ttcaacagagcaaagtgaaggccaagtgacttg

SEQ ID NO: 653413 - DNA, 33 bp, Homo sapien
gccaggcatatactcccgaatggtcctgtctct

SEQ ID NO: 653414 - DNA, 33 bp, Homo sapien
gccaggcatatactcctgaatggtcctgtctct

SEQ ID NO: 653415 - DNA, 33 bp, Homo sapien
ttttctcaaagtcagaaattcatgaggttgagt

SEQ ID NO: 653416 - DNA, 33 bp, Homo sapien
ttttctcaaagtcagagattcatgaggttgagt

SEQ ID NO: 653417 - DNA, 33 bp, Homo sapien
aactggtataatggaaaaaacaagaagctaaaa

SEQ ID NO: 653418 - DNA, 33 bp, Homo sapien
aactggtataatggaagaaacaagaagctaaaa

SEQ ID NO: 653419 - DNA, 33 bp, Homo sapien
ttataaagagagaactaacccattcctgtgact

SEQ ID NO: 653420 - DNA, 33 bp, Homo sapien
ttataaagagagaacttacccattcctgtgact

SEQ ID NO: 653421 - DNA, 33 bp, Homo sapien
aagaaaggataaagcaaggactcaggatacaaa

SEQ ID NO: 653422 - DNA, 33 bp, Homo sapien
aagaaaggataaagcagggactcaggatacaaa

SEQ ID NO: 653423 - DNA, 33 bp, Homo sapien
taggcatccacgatgacaagtaacaggcctgag

SEQ ID NO: 653424 - DNA, 33 bp, Homo sapien
taggcatccacgatgagaagtaacaggcctgag

SEQ ID NO: 653425 - DNA, 33 bp, Homo sapien
tctggcctttggtgacaatgatggtttgggcct

SEQ ID NO: 653426 - DNA, 33 bp, Homo sapien
tctggcctttggtgacgatgatggtttgggcct

SEQ ID NO: 653427 - DNA, 33 bp, Homo sapien
aggcctcacaagaacacccgccactgtcagagc

SEQ ID NO: 653428 - DNA, 33 bp, Homo sapien
aggcctcacaagaacatccgccactgtcagagc

SEQ ID NO: 653429 - DNA, 33 bp, Homo sapien
aggtgatataaggacccgccacgggcctctcgt

SEQ ID NO: 653430 - DNA, 33 bp, Homo sapien
aggtgatataaggacctgccacgggcctctcgt

SEQ ID NO: 653431 - DNA, 33 bp, Homo sapien
gcaaagaacataatcacgagaagatcacaaagg

SEQ ID NO: 653432 - DNA, 33 bp, Homo sapien
gcaaagaacataatcaggagaagatcacaaagg

SEQ ID NO: 653433 - DNA, 33 bp, Homo sapien
gtcagatgcacctcctaacagcaaagctaaagt

SEQ ID NO: 653434 - DNA, 33 bp, Homo sapien
gtcagatgcacctcctgacagcaaagctaaagt

SEQ ID NO: 653435 - DNA, 33 bp, Homo sapien
agaggaggtaagctgaccagatgttttgccatc

SEQ ID NO: 653436 - DNA, 33 bp, Homo sapien
agaggaggtaagctgagcagatgttttgccatc

SEQ ID NO: 653437 - DNA, 33 bp, Homo sapien
aagagagaatgatgtacacaagagccacagtct

SEQ ID NO: 653438 - DNA, 33 bp, Homo sapien
aagagagaatgatgtatacaagagccacagtct

SEQ ID NO: 653439 - DNA, 33 bp, Homo sapien
ggtgggaggataagaccgcctttcctacgcaaa

SEQ ID NO: 653440 - DNA, 33 bp, Homo sapien
ggtgggaggataagactgcctttcctacgcaaa

SEQ ID NO: 653441 - DNA, 33 bp, Homo sapien
gaaataactccgatgaagaaacagaagatttca

SEQ ID NO: 653442 - DNA, 33 bp, Homo sapien
gaaataactccgatgaggaaacagaagatttca

SEQ ID NO: 653443 - DNA, 33 bp, Homo sapien
taaccttctcaaacacggccttgatccttcact

SEQ ID NO: 653444 - DNA, 33 bp, Homo sapien
taaccttctcaaacactgccttgatccttcact

SEQ ID NO: 653445 - DNA, 33 bp, Homo sapien
agccatgcaataaggcaagaaaatgaaataggc

SEQ ID NO: 653446 - DNA, 33 bp, Homo sapien
agccatgcaataaggccagaaaatgaaataggc

SEQ ID NO: 653447 - DNA, 33 bp, Homo sapien
ggactaacaataatcacgtggccaaaatacaga

SEQ ID NO: 653448 - DNA, 33 bp, Homo sapien
ggactaacaataatcatgtggccaaaatacaga

SEQ ID NO: 653449 - DNA, 33 bp, Homo sapien
gacaatggagaaggcaacctgggttcttaatta

SEQ ID NO: 653450 - DNA, 33 bp, Homo sapien
gacaatggagaaggcaccctgggttcttaatta

SEQ ID NO: 653451 - DNA, 33 bp, Homo sapien
aaatgttaaggcgctacgtagatttccagaagc

SEQ ID NO: 653452 - DNA, 33 bp, Homo sapien
aaatgttaaggcgctatgtagatttccagaagc

SEQ ID NO: 653453 - DNA, 33 bp, Homo sapien
tcctggagagatgttacgttacttttcaatcag

SEQ ID NO: 653454 - DNA, 33 bp, Homo sapien
tcctggagagatgttatgttacttttcaatcag

SEQ ID NO: 653455 - DNA, 33 bp, Homo sapien
aagggtaactcattcacaaaaccactaaccaag

SEQ ID NO: 653456 - DNA, 33 bp, Homo sapien
aagggtaactcattcagaaaaccactaaccaag

SEQ ID NO: 653457 - DNA, 33 bp, Homo sapien
gatgctgtttgatcgaatatccacatggttaat

SEQ ID NO: 653458 - DNA, 33 bp, Homo sapien
gatgctgtttgatcgattatccacatggttaat

SEQ ID NO: 653459 - DNA, 33 bp, Homo sapien
tcagtgtttgaattaacgttgtttatccttcct

SEQ ID NO: 653460 - DNA, 33 bp, Homo sapien
tcagtgtttgaattaatgttgtttatccttcct

SEQ ID NO: 653461 - DNA, 33 bp, Homo sapien
gtggtgaatataaaccaactcagtgcttggttt

SEQ ID NO: 653462 - DNA, 33 bp, Homo sapien
gtggtgaatataaaccgactcagtgcttggttt

SEQ ID NO: 653463 - DNA, 33 bp, Homo sapien
cctagctaattcctgaacatccttttgttatca

SEQ ID NO: 653464 - DNA, 33 bp, Homo sapien
cctagctaattcctgagcatccttttgttatca

SEQ ID NO: 653465 - DNA, 33 bp, Homo sapien
agcctcaggacagtcacacactttttacatggt

SEQ ID NO: 653466 - DNA, 33 bp, Homo sapien
agcctcaggacagtcatacactttttacatggt

SEQ ID NO: 653467 - DNA, 33 bp, Homo sapien
atgccagattaaacagactaatttgagaaaagt

SEQ ID NO: 653468 - DNA, 33 bp, Homo sapien
atgccagattaaacaggctaatttgagaaaagt

SEQ ID NO: 653469 - DNA, 33 bp, Homo sapien
aaatagccgaattggtaacagcttggcatctgc

SEQ ID NO: 653470 - DNA, 33 bp, Homo sapien
aaatagccgaattggttacagcttggcatctgc

SEQ ID NO: 653471 - DNA, 33 bp, Homo sapien
ttcatatagatgtttcaactaactcttaaacta

SEQ ID NO: 653472 - DNA, 33 bp, Homo sapien
ttcatatagatgtttcgactaactcttaaacta

SEQ ID NO: 653473 - DNA, 33 bp, Homo sapien
tttagtttctctagagccgtcttcctaaaattg

SEQ ID NO: 653474 - DNA, 33 bp, Homo sapien
tttagtttctctagagtcgtcttcctaaaattg

SEQ ID NO: 653475 - DNA, 33 bp, Homo sapien
acgtagcttgagtctacagtctcagtagattct

SEQ ID NO: 653476 - DNA, 33 bp, Homo sapien
acgtagcttgagtctagagtctcagtagattct

SEQ ID NO: 653477 - DNA, 33 bp, Homo sapien
tttgtgtctttcaattcaagctagcagtatttc

SEQ ID NO: 653478 - DNA, 33 bp, Homo sapien
tttgtgtctttcaatttaagctagcagtatttc

SEQ ID NO: 653479 - DNA, 33 bp, Homo sapien
acaaaaaaatgcacaacgaaggaaataaagaca

SEQ ID NO: 653480 - DNA, 33 bp, Homo sapien
acaaaaaaatgcacaatgaaggaaataaagaca

SEQ ID NO: 653481 - DNA, 33 bp, Homo sapien
agacaaagtcaaactaaagggaattctgtaaaa

SEQ ID NO: 653482 - DNA, 33 bp, Homo sapien
agacaaagtcaaactagagggaattctgtaaaa

SEQ ID NO: 653483 - DNA, 33 bp, Homo sapien
accaaacttcttgaaagagttgttccaccctcc

SEQ ID NO: 653484 - DNA, 33 bp, Homo sapien
accaaacttcttgaaatagttgttccaccctcc

SEQ ID NO: 653485 - DNA, 33 bp, Homo sapien
gaaatgagtggtcagaaaagtaagggaaggcaa

SEQ ID NO: 653486 - DNA, 33 bp, Homo sapien
gaaatgagtggtcagagaagtaagggaaggcaa

SEQ ID NO: 653487 - DNA, 33 bp, Homo sapien
actagagtctctccaacgtgaatcaaattgaag

SEQ ID NO: 653488 - DNA, 33 bp, Homo sapien
actagagtctctccaatgtgaatcaaattgaag

SEQ ID NO: 653489 - DNA, 33 bp, Homo sapien
tgggcaatggccagacaataaatagcaatacaa

SEQ ID NO: 653490 - DNA, 33 bp, Homo sapien
tgggcaatggccagaccataaatagcaatacaa

SEQ ID NO: 653491 - DNA, 33 bp, Homo sapien
aggttaatttcccacaataagtggcttttgagg

SEQ ID NO: 653492 - DNA, 33 bp, Homo sapien
aggttaatttcccacagtaagtggcttttgagg

SEQ ID NO: 653493 - DNA, 33 bp, Homo sapien
taggccatactgttccaacaatttaccaccagg

SEQ ID NO: 653494 - DNA, 33 bp, Homo sapien
taggccatactgttccgacaatttaccaccagg

SEQ ID NO: 653495 - DNA, 33 bp, Homo sapien
acgctctctttcaggcactggtttgtcactatc

SEQ ID NO: 653496 - DNA, 33 bp, Homo sapien
acgctctctttcaggcgctggtttgtcactatc

SEQ ID NO: 653497 - DNA, 33 bp, Homo sapien
ccatcattgcttatcccacactcactaagaggc

SEQ ID NO: 653498 - DNA, 33 bp, Homo sapien
ccatcattgcttatcctacactcactaagaggc

SEQ ID NO: 653499 - DNA, 33 bp, Homo sapien
aaatagagatgtatgaccccagacctacgatct

SEQ ID NO: 653500 - DNA, 33 bp, Homo sapien
aaatagagatgtatgatcccagacctacgatct

SEQ ID NO: 653501 - DNA, 33 bp, Homo sapien
aaccagtcatgtccaaacttctgctctaaagat

SEQ ID NO: 653502 - DNA, 33 bp, Homo sapien
aaccagtcatgtccaagcttctgctctaaagat

SEQ ID NO: 653503 - DNA, 33 bp, Homo sapien
agtaagcattcctatacgagacatggagaactc

SEQ ID NO: 653504 - DNA, 33 bp, Homo sapien
agtaagcattcctatatgagacatggagaactc

SEQ ID NO: 653505 - DNA, 33 bp, Homo sapien
ataaatctcagggggaaaacaggatttgctgaa

SEQ ID NO: 653506 - DNA, 33 bp, Homo sapien
ataaatctcagggggagaacaggatttgctgaa

SEQ ID NO: 653507 - DNA, 33 bp, Homo sapien
gtggaaaaatatcagaacaatgactcttaatgc

SEQ ID NO: 653508 - DNA, 33 bp, Homo sapien
gtggaaaaatatcagagcaatgactcttaatgc

SEQ ID NO: 653509 - DNA, 33 bp, Homo sapien
agctccaaagttaaacaatgtaggaagagctgg

SEQ ID NO: 653510 - DNA, 33 bp, Homo sapien
agctccaaagttaaacgatgtaggaagagctgg

SEQ ID NO: 653511 - DNA, 33 bp, Homo sapien
tggctctgaatcagaacgtaaagaacaaaattt

SEQ ID NO: 653512 - DNA, 33 bp, Homo sapien
tggctctgaatcagaatgtaaagaacaaaattt

SEQ ID NO: 653513 - DNA, 33 bp, Homo sapien
taaattgcatgatcaaaagacacgactgtgaaa

SEQ ID NO: 653514 - DNA, 33 bp, Homo sapien
taaattgcatgatcaatagacacgactgtgaaa

SEQ ID NO: 653515 - DNA, 33 bp, Homo sapien
acctatcttaaataaacgcctacctggagcata

SEQ ID NO: 653516 - DNA, 33 bp, Homo sapien
acctatcttaaataaatgcctacctggagcata

SEQ ID NO: 653517 - DNA, 33 bp, Homo sapien
actcacacctcacagcaattttagagtctccct

SEQ ID NO: 653518 - DNA, 33 bp, Homo sapien
actcacacctcacagccattttagagtctccct

SEQ ID NO: 653519 - DNA, 33 bp, Homo sapien
tagttacagagctgtaagttagtctgtggcttc

SEQ ID NO: 653520 - DNA, 33 bp, Homo sapien
tagttacagagctgtacgttagtctgtggcttc

SEQ ID NO: 653521 - DNA, 33 bp, Homo sapien
ttctccatttctctgccctggaaaagaaatata

SEQ ID NO: 653522 - DNA, 33 bp, Homo sapien
ttctccatttctctgcgctggaaaagaaatata

SEQ ID NO: 653523 - DNA, 33 bp, Homo sapien
gaaaatgatatgagaaccaaatggcaatatatg

SEQ ID NO: 653524 - DNA, 33 bp, Homo sapien
gaaaatgatatgagaagcaaatggcaatatatg

SEQ ID NO: 653525 - DNA, 33 bp, Homo sapien
ggaaattaggaggaaacagaatagcatagatgt

SEQ ID NO: 653526 - DNA, 33 bp, Homo sapien
ggaaattaggaggaaagagaatagcatagatgt

SEQ ID NO: 653527 - DNA, 33 bp, Homo sapien
cattgaagaaaactaaacatagtgaagttgcct

SEQ ID NO: 653528 - DNA, 33 bp, Homo sapien
cattgaagaaaactaagcatagtgaagttgcct

SEQ ID NO: 653529 - DNA, 33 bp, Homo sapien
agtgttatacccatacagaaacgtggacagata

SEQ ID NO: 653530 - DNA, 33 bp, Homo sapien
agtgttatacccatacggaaacgtggacagata

SEQ ID NO: 653531 - DNA, 33 bp, Homo sapien
ctgtgtttaagactacaatttatgtcctctctt

SEQ ID NO: 653532 - DNA, 33 bp, Homo sapien
ctgtgtttaagactaccatttatgtcctctctt

SEQ ID NO: 653533 - DNA, 33 bp, Homo sapien
gattttcttggctggcaacatgacttctcctta

SEQ ID NO: 653534 - DNA, 33 bp, Homo sapien
gattttcttggctggcgacatgacttctcctta

SEQ ID NO: 653535 - DNA, 33 bp, Homo sapien
aattggcacccccaataagtagactgaaatctt

SEQ ID NO: 653536 - DNA, 33 bp, Homo sapien
aattggcacccccaatgagtagactgaaatctt

SEQ ID NO: 653537 - DNA, 33 bp, Homo sapien
gagatacttgagaaaaaaaacgaaagatagaaa

SEQ ID NO: 653538 - DNA, 33 bp, Homo sapien
gagatacttgagaaaagaaacgaaagatagaaa

SEQ ID NO: 653539 - DNA, 33 bp, Homo sapien
tcgcaccaatctaatactaaaactcactaaatt

SEQ ID NO: 653540 - DNA, 33 bp, Homo sapien
tcgcaccaatctaatattaaaactcactaaatt

SEQ ID NO: 653541 - DNA, 33 bp, Homo sapien
tcaatattattgacatcataggccagataattc

SEQ ID NO: 653542 - DNA, 33 bp, Homo sapien
tcaatattattgacattataggccagataattc

SEQ ID NO: 653543 - DNA, 33 bp, Homo sapien
tcacaaattttcaacacagaatgcaatattatt

SEQ ID NO: 653544 - DNA, 33 bp, Homo sapien
tcacaaattttcaacatagaatgcaatattatt

SEQ ID NO: 653545 - DNA, 33 bp, Homo sapien
ttgtaagccagctttgcaggtttttagcatgtt

SEQ ID NO: 653546 - DNA, 33 bp, Homo sapien
ttgtaagccagctttgtaggtttttagcatgtt

SEQ ID NO: 653547 - DNA, 33 bp, Homo sapien
tttctttttacactaacacaggagtcaccaaaa

SEQ ID NO: 653548 - DNA, 33 bp, Homo sapien
tttctttttacactaatacaggagtcaccaaaa

SEQ ID NO: 653549 - DNA, 33 bp, Homo sapien
attccctcatgagtgaagagtctgcagggccaa

SEQ ID NO: 653550 - DNA, 33 bp, Homo sapien
attccctcatgagtgaggagtctgcagggccaa

SEQ ID NO: 653551 - DNA, 33 bp, Homo sapien
tgaatgcaatgtaaacaatcatctttccccttt

SEQ ID NO: 653552 - DNA, 33 bp, Homo sapien
tgaatgcaatgtaaacgatcatctttccccttt

SEQ ID NO: 653553 - DNA, 33 bp, Homo sapien
ttagcttgacgtacagaagggccttgatcgcca

SEQ ID NO: 653554 - DNA, 33 bp, Homo sapien
ttagcttgacgtacagcagggccttgatcgcca

SEQ ID NO: 653555 - DNA, 33 bp, Homo sapien
gaagtcccaacacgaaaccagtcaaatatttaa

SEQ ID NO: 653556 - DNA, 33 bp, Homo sapien
gaagtcccaacacgaagccagtcaaatatttaa

SEQ ID NO: 653557 - DNA, 33 bp, Homo sapien
tatgtaaattatggccaaggcattttatggaat

SEQ ID NO: 653558 - DNA, 33 bp, Homo sapien
tatgtaaattatggccgaggcattttatggaat

SEQ ID NO: 653559 - DNA, 33 bp, Homo sapien
gcttactcctgatccaaatgctttcttaatact

SEQ ID NO: 653560 - DNA, 33 bp, Homo sapien
gcttactcctgatccagatgctttcttaatact

SEQ ID NO: 653561 - DNA, 33 bp, Homo sapien
ctaagctacaaaagcaagtatcatgtgacaatc

SEQ ID NO: 653562 - DNA, 33 bp, Homo sapien
ctaagctacaaaagcaggtatcatgtgacaatc

SEQ ID NO: 653563 - DNA, 33 bp, Homo sapien
gataggagacggtttacgctttttaagcagtcg

SEQ ID NO: 653564 - DNA, 33 bp, Homo sapien
gataggagacggtttatgctttttaagcagtcg

SEQ ID NO: 653565 - DNA, 33 bp, Homo sapien
gaaattgagtcatttcacaaagtacctgttcaa

SEQ ID NO: 653566 - DNA, 33 bp, Homo sapien
gaaattgagtcatttcccaaagtacctgttcaa

SEQ ID NO: 653567 - DNA, 33 bp, Homo sapien
caggagggtagcagaaagggggcttccagagtg

SEQ ID NO: 653568 - DNA, 33 bp, Homo sapien
caggagggtagcagaaggggggcttccagagtg

SEQ ID NO: 653569 - DNA, 33 bp, Homo sapien
tttgtaaaaattcatgcacacgattcaagcact

SEQ ID NO: 653570 - DNA, 33 bp, Homo sapien
tttgtaaaaattcatgtacacgattcaagcact

SEQ ID NO: 653571 - DNA, 33 bp, Homo sapien
aggttggtggatatcactgaggcagaaaggaga

SEQ ID NO: 653572 - DNA, 33 bp, Homo sapien
aggttggtggatatcattgaggcagaaaggaga

SEQ ID NO: 653573 - DNA, 33 bp, Homo sapien
atggaaaaggaaatatcagtgtctttttttttt

SEQ ID NO: 653574 - DNA, 33 bp, Homo sapien
atggaaaaggaaatatgagtgtctttttttttt

SEQ ID NO: 653575 - DNA, 33 bp, Homo sapien
agatgctcttaatcaaattcaggaagttctctt

SEQ ID NO: 653576 - DNA, 33 bp, Homo sapien
agatgctcttaatcaagttcaggaagttctctt

SEQ ID NO: 653577 - DNA, 33 bp, Homo sapien
ctacgggacaacatcaaagaaaccaaaatacat

SEQ ID NO: 653578 - DNA, 33 bp, Homo sapien
ctacgggacaacatcagagaaaccaaaatacat

SEQ ID NO: 653579 - DNA, 33 bp, Homo sapien
agttttctgaaaggtacagtcgtccctgaagca

SEQ ID NO: 653580 - DNA, 33 bp, Homo sapien
agttttctgaaaggtatagtcgtccctgaagca

SEQ ID NO: 653581 - DNA, 33 bp, Homo sapien
agggtccccactccagcaaagtgaaagcatttg

SEQ ID NO: 653582 - DNA, 33 bp, Homo sapien
agggtccccactccagtaaagtgaaagcatttg

SEQ ID NO: 653583 - DNA, 33 bp, Homo sapien
ctataaattatgtcacaaatgattgtagtgaca

SEQ ID NO: 653584 - DNA, 33 bp, Homo sapien
ctataaattatgtcacgaatgattgtagtgaca

SEQ ID NO: 653585 - DNA, 33 bp, Homo sapien
ccagctttctcctttaacctgcgcaacattatc

SEQ ID NO: 653586 - DNA, 33 bp, Homo sapien
ccagctttctcctttagcctgcgcaacattatc

SEQ ID NO: 653587 - DNA, 33 bp, Homo sapien
aatacaaacacttctacactgccatgctattac

SEQ ID NO: 653588 - DNA, 33 bp, Homo sapien
aatacaaacacttctatactgccatgctattac

SEQ ID NO: 653589 - DNA, 33 bp, Homo sapien
gttcctgcagtagttcgctcaggataatggcct

SEQ ID NO: 653590 - DNA, 33 bp, Homo sapien
gttcctgcagtagttctctcaggataatggcct

SEQ ID NO: 653591 - DNA, 33 bp, Homo sapien
ttgggctgaaggctagcaccaagtcttgtctgg

SEQ ID NO: 653592 - DNA, 33 bp, Homo sapien
ttgggctgaaggctagtaccaagtcttgtctgg

SEQ ID NO: 653593 - DNA, 33 bp, Homo sapien
gaatgactggggaaaactacatgaagagtgtga

SEQ ID NO: 653594 - DNA, 33 bp, Homo sapien
gaatgactggggaaaattacatgaagagtgtga

SEQ ID NO: 653595 - DNA, 33 bp, Homo sapien
tctgaggaggaggtacactacaggaccagaatc

SEQ ID NO: 653596 - DNA, 33 bp, Homo sapien
tctgaggaggaggtacgctacaggaccagaatc

SEQ ID NO: 653597 - DNA, 33 bp, Homo sapien
ggcttttcccacacaaaatcactcatcttttga

SEQ ID NO: 653598 - DNA, 33 bp, Homo sapien
ggcttttcccacacaagatcactcatcttttga

SEQ ID NO: 653599 - DNA, 33 bp, Homo sapien
tagtaatgaaagtcacagacctacaccccagaa

SEQ ID NO: 653600 - DNA, 33 bp, Homo sapien
tagtaatgaaagtcacggacctacaccccagaa

SEQ ID NO: 653601 - DNA, 33 bp, Homo sapien
tgtggaatactatgacagtagataaggtgaatc

SEQ ID NO: 653602 - DNA, 33 bp, Homo sapien
tgtggaatactatgacggtagataaggtgaatc

SEQ ID NO: 653603 - DNA, 33 bp, Homo sapien
ctgatccccccttgctcagagaataagcttaaa

SEQ ID NO: 653604 - DNA, 33 bp, Homo sapien
ctgatccccccttgctgagagaataagcttaaa

SEQ ID NO: 653605 - DNA, 33 bp, Homo sapien
actccattaatcctcagatcaaatgcataatat

SEQ ID NO: 653606 - DNA, 33 bp, Homo sapien
actccattaatcctcatatcaaatgcataatat

SEQ ID NO: 653607 - DNA, 33 bp, Homo sapien
gcataccatggccactgaaaataacaagatttt

SEQ ID NO: 653608 - DNA, 33 bp, Homo sapien
gcataccatggccacttaaaataacaagatttt

SEQ ID NO: 653609 - DNA, 33 bp, Homo sapien
tagcatatgatatttaagcacatggtttactaa

SEQ ID NO: 653610 - DNA, 33 bp, Homo sapien
tagcatatgatatttaggcacatggtttactaa

SEQ ID NO: 653611 - DNA, 33 bp, Homo sapien
ttagtagttcttcatacgtgtatagggcattca

SEQ ID NO: 653612 - DNA, 33 bp, Homo sapien
ttagtagttcttcatatgtgtatagggcattca

SEQ ID NO: 653613 - DNA, 33 bp, Homo sapien
atataatggaatttggaaaaagatgtctcaaac

SEQ ID NO: 653614 - DNA, 33 bp, Homo sapien
atataatggaatttggcaaaagatgtctcaaac

SEQ ID NO: 653615 - DNA, 33 bp, Homo sapien
tcacctagtcaagaaaaattaatccactgccaa

SEQ ID NO: 653616 - DNA, 33 bp, Homo sapien
tcacctagtcaagaaagattaatccactgccaa

SEQ ID NO: 653617 - DNA, 33 bp, Homo sapien
cccaacaaatctgtaaacaccctagaagtatga

SEQ ID NO: 653618 - DNA, 33 bp, Homo sapien
cccaacaaatctgtaagcaccctagaagtatga

SEQ ID NO: 653619 - DNA, 33 bp, Homo sapien
atccaaattggtgaacagtacaaaatggcaact

SEQ ID NO: 653620 - DNA, 33 bp, Homo sapien
atccaaattggtgaacggtacaaaatggcaact

SEQ ID NO: 653621 - DNA, 33 bp, Homo sapien
actcccattactgatgccataaaagccagatat

SEQ ID NO: 653622 - DNA, 33 bp, Homo sapien
actcccattactgatggcataaaagccagatat

SEQ ID NO: 653623 - DNA, 33 bp, Homo sapien
gacagagcaaaaaccacgcagagaaaggaaaat

SEQ ID NO: 653624 - DNA, 33 bp, Homo sapien
gacagagcaaaaaccaggcagagaaaggaaaat

SEQ ID NO: 653625 - DNA, 33 bp, Homo sapien
cattagaggaaacagacgtcaagggaacacaca

SEQ ID NO: 653626 - DNA, 33 bp, Homo sapien
cattagaggaaacagatgtcaagggaacacaca

SEQ ID NO: 653627 - DNA, 33 bp, Homo sapien
cgggacaccaaggatgacaacaagatgggcagt

SEQ ID NO: 653628 - DNA, 33 bp, Homo sapien
cgggacaccaaggatggcaacaagatgggcagt

SEQ ID NO: 653629 - DNA, 33 bp, Homo sapien
aagttagtaatcttaaactttgtgctaacctcc

SEQ ID NO: 653630 - DNA, 33 bp, Homo sapien
aagttagtaatcttaagctttgtgctaacctcc

SEQ ID NO: 653631 - DNA, 33 bp, Homo sapien
caatgtacacatcgggcagtcaccgaagtcctt

SEQ ID NO: 653632 - DNA, 33 bp, Homo sapien
caatgtacacatcgggtagtcaccgaagtcctt

SEQ ID NO: 653633 - DNA, 33 bp, Homo sapien
tgtttcagaatgtttccaagctttacaagctga

SEQ ID NO: 653634 - DNA, 33 bp, Homo sapien
tgtttcagaatgtttctaagctttacaagctga

SEQ ID NO: 653635 - DNA, 33 bp, Homo sapien
gactggatttgagtgacgggactcttcctaata

SEQ ID NO: 653636 - DNA, 33 bp, Homo sapien
gactggatttgagtgatgggactcttcctaata

SEQ ID NO: 653637 - DNA, 33 bp, Homo sapien
taaacattcaggacgacattcatgatggcattc

SEQ ID NO: 653638 - DNA, 33 bp, Homo sapien
taaacattcaggacgatattcatgatggcattc

SEQ ID NO: 653639 - DNA, 33 bp, Homo sapien
gggagatgaaagcaaaaatgagtgagatgctag

SEQ ID NO: 653640 - DNA, 33 bp, Homo sapien
gggagatgaaagcaaagatgagtgagatgctag

SEQ ID NO: 653641 - DNA, 33 bp, Homo sapien
aagcaaatgcaacaaggatatagcaaggatata

SEQ ID NO: 653642 - DNA, 33 bp, Homo sapien
aagcaaatgcaacaagtatatagcaaggatata

SEQ ID NO: 653643 - DNA, 33 bp, Homo sapien
cattaaaattttgaaacagtaatggccaaaatt

SEQ ID NO: 653644 - DNA, 33 bp, Homo sapien
cattaaaattttgaaagagtaatggccaaaatt

SEQ ID NO: 653645 - DNA, 33 bp, Homo sapien
ttggaggcccacacaacgaggatttatctttca

SEQ ID NO: 653646 - DNA, 33 bp, Homo sapien
ttggaggcccacacaatgaggatttatctttca

SEQ ID NO: 653647 - DNA, 33 bp, Homo sapien
tgaagcccaaaaaacacacttaactgccactct

SEQ ID NO: 653648 - DNA, 33 bp, Homo sapien
tgaagcccaaaaaacatacttaactgccactct

SEQ ID NO: 653649 - DNA, 33 bp, Homo sapien
tctccagcttccacaacctttgaaaaagtaacc

SEQ ID NO: 653650 - DNA, 33 bp, Homo sapien
tctccagcttccacaatctttgaaaaagtaacc

SEQ ID NO: 653651 - DNA, 33 bp, Homo sapien
ttgtattctgtgtagcagccatcctctttcctg

SEQ ID NO: 653652 - DNA, 33 bp, Homo sapien
ttgtattctgtgtagcggccatcctctttcctg

SEQ ID NO: 653653 - DNA, 33 bp, Homo sapien
ttccaaacagctgctacgacgagcaaagagggg

SEQ ID NO: 653654 - DNA, 33 bp, Homo sapien
ttccaaacagctgctatgacgagcaaagagggg

SEQ ID NO: 653655 - DNA, 33 bp, Homo sapien
gtgaggtggcctggcacgttgacttttagcaaa

SEQ ID NO: 653656 - DNA, 33 bp, Homo sapien
gtgaggtggcctggcaggttgacttttagcaaa

SEQ ID NO: 653657 - DNA, 33 bp, Homo sapien
aagaataacaactggcgactagatagggctgtt

SEQ ID NO: 653658 - DNA, 33 bp, Homo sapien
aagaataacaactggctactagatagggctgtt

SEQ ID NO: 653659 - DNA, 33 bp, Homo sapien
ttgctgagtttatctacagtgtctctaggaccc

SEQ ID NO: 653660 - DNA, 33 bp, Homo sapien
ttgctgagtttatctatagtgtctctaggaccc

SEQ ID NO: 653661 - DNA, 33 bp, Homo sapien
tgaagtagaatagagcactagatggattcctaa

SEQ ID NO: 653662 - DNA, 33 bp, Homo sapien
tgaagtagaatagagcgctagatggattcctaa

SEQ ID NO: 653663 - DNA, 33 bp, Homo sapien
cttcatatgaatgagcaaggaaagtggtttctt

SEQ ID NO: 653664 - DNA, 33 bp, Homo sapien
cttcatatgaatgagctaggaaagtggtttctt

SEQ ID NO: 653665 - DNA, 33 bp, Homo sapien
gggaaatgaaggtgcaaatttcttctctgtggc

SEQ ID NO: 653666 - DNA, 33 bp, Homo sapien
gggaaatgaaggtgcacatttcttctctgtggc

SEQ ID NO: 653667 - DNA, 33 bp, Homo sapien
agaaataaacactccaaaaatgtagggttaggc

SEQ ID NO: 653668 - DNA, 33 bp, Homo sapien
agaaataaacactccagaaatgtagggttaggc

SEQ ID NO: 653669 - DNA, 33 bp, Homo sapien
aaactatgagctggtgcactgactctaacattt

SEQ ID NO: 653670 - DNA, 33 bp, Homo sapien
aaactatgagctggtgtactgactctaacattt

SEQ ID NO: 653671 - DNA, 33 bp, Homo sapien
cagcgtacactcccagaatctggaaaatgggag

SEQ ID NO: 653672 - DNA, 33 bp, Homo sapien
cagcgtacactcccagcatctggaaaatgggag

SEQ ID NO: 653673 - DNA, 33 bp, Homo sapien
aatgctaactagtccacggaaactgcacttact

SEQ ID NO: 653674 - DNA, 33 bp, Homo sapien
aatgctaactagtccatggaaactgcacttact

SEQ ID NO: 653675 - DNA, 33 bp, Homo sapien
gttggggtaactgaaccgcttatttctgtttaa

SEQ ID NO: 653676 - DNA, 33 bp, Homo sapien
gttggggtaactgaactgcttatttctgtttaa

SEQ ID NO: 653677 - DNA, 33 bp, Homo sapien
actaaaatgtaatgacaaaaagggagtagtgtt

SEQ ID NO: 653678 - DNA, 33 bp, Homo sapien
actaaaatgtaatgacgaaaagggagtagtgtt

SEQ ID NO: 653679 - DNA, 33 bp, Homo sapien
cacccaactaaggcaacaaagcataagcagata

SEQ ID NO: 653680 - DNA, 33 bp, Homo sapien
cacccaactaaggcaataaagcataagcagata

SEQ ID NO: 653681 - DNA, 33 bp, Homo sapien
gatttttccaaacgagaatgatccattaagcaa

SEQ ID NO: 653682 - DNA, 33 bp, Homo sapien
gatttttccaaacgaggatgatccattaagcaa

SEQ ID NO: 653683 - DNA, 33 bp, Homo sapien
gtcttactaaatggggaatattttcagattagt

SEQ ID NO: 653684 - DNA, 33 bp, Homo sapien
gtcttactaaatggggtatattttcagattagt

SEQ ID NO: 653685 - DNA, 33 bp, Homo sapien
aaatttctgcaagttcaaagtcaaatttctgca

SEQ ID NO: 653686 - DNA, 33 bp, Homo sapien
aaatttctgcaagttcgaagtcaaatttctgca

SEQ ID NO: 653687 - DNA, 33 bp, Homo sapien
agtgtctgagagcagcaaatcagaacatatttg

SEQ ID NO: 653688 - DNA, 33 bp, Homo sapien
agtgtctgagagcagcgaatcagaacatatttg

SEQ ID NO: 653689 - DNA, 33 bp, Homo sapien
tctgtttccccagcataaaaagcagagggtatt

SEQ ID NO: 653690 - DNA, 33 bp, Homo sapien
tctgtttccccagcatgaaaagcagagggtatt

SEQ ID NO: 653691 - DNA, 33 bp, Homo sapien
cataggctgaagttcacgttaaaaagagcaaat

SEQ ID NO: 653692 - DNA, 33 bp, Homo sapien
cataggctgaagttcatgttaaaaagagcaaat

SEQ ID NO: 653693 - DNA, 33 bp, Homo sapien
ccattttatatagtgccgagtatgagctaccac

SEQ ID NO: 653694 - DNA, 33 bp, Homo sapien
ccattttatatagtgcggagtatgagctaccac

SEQ ID NO: 653695 - DNA, 33 bp, Homo sapien
tttactttccagtttgaatacagcatagactaa

SEQ ID NO: 653696 - DNA, 33 bp, Homo sapien
tttactttccagtttggatacagcatagactaa

SEQ ID NO: 653697 - DNA, 33 bp, Homo sapien; identical to SEQ ID NO: 653695

SEQ ID NO: 653698 - DNA, 33 bp, Homo sapien; identical to SEQ ID NO: 653696

SEQ ID NO: 653699 - DNA, 33 bp, Homo sapien
caggtcttcattacccagctttctgccacacct

SEQ ID NO: 653700 - DNA, 33 bp, Homo sapien
caggtcttcattacccggctttctgccacacct

SEQ ID NO: 653701 - DNA, 33 bp, Homo sapien
caccacaggaacgggcaattttcctggtgggaa

SEQ ID NO: 653702 - DNA, 33 bp, Homo sapien
caccacaggaacgggctattttcctggtgggaa

SEQ ID NO: 653703 - DNA, 33 bp, Homo sapien
tgtcattactattacactgaagattgccaggca

SEQ ID NO: 653704 - DNA, 33 bp, Homo sapien
tgtcattactattacattgaagattgccaggca

SEQ ID NO: 653705 - DNA, 33 bp, Homo sapien
atgtatatatttcacactcttttgcacatattg

SEQ ID NO: 653706 - DNA, 33 bp, Homo sapien
atgtatatatttcacattcttttgcacatattg

SEQ ID NO: 653707 - DNA, 33 bp, Homo sapien
gtcattgctgtggctacactacaccatgagctc

SEQ ID NO: 653708 - DNA, 33 bp, Homo sapien
gtcattgctgtggctatactacaccatgagctc

SEQ ID NO: 653709 - DNA, 33 bp, Homo sapien
tgagtttttcttcatcacagagtaactatgctg

SEQ ID NO: 653710 - DNA, 33 bp, Homo sapien
tgagtttttcttcatcgcagagtaactatgctg

SEQ ID NO: 653711 - DNA, 33 bp, Homo sapien
gctggttattggttcactcgttcctttgtccat

SEQ ID NO: 653712 - DNA, 33 bp, Homo sapien
gctggttattggttcattcgttcctttgtccat

SEQ ID NO: 653713 - DNA, 33 bp, Homo sapien
atcataaggctggacaaattattgacacttcac

SEQ ID NO: 653714 - DNA, 33 bp, Homo sapien
atcataaggctggacagattattgacacttcac

SEQ ID NO: 653715 - DNA, 33 bp, Homo sapien
atgacctctctgctaaatatttcttagatgtat

SEQ ID NO: 653716 - DNA, 33 bp, Homo sapien
atgacctctctgctaattatttcttagatgtat

SEQ ID NO: 653717 - DNA, 33 bp, Homo sapien
agcaagacttcatatcactttaacaggttaaat

SEQ ID NO: 653718 - DNA, 33 bp, Homo sapien
agcaagacttcatatcgctttaacaggttaaat

SEQ ID NO: 653719 - DNA, 33 bp, Homo sapien
tttaacttttatgagaagccaaagcctagaact

SEQ ID NO: 653720 - DNA, 33 bp, Homo sapien
tttaacttttatgagatgccaaagcctagaact

SEQ ID NO: 653721 - DNA, 33 bp, Homo sapien
aagattaaatgtactacgacagctaatgattca

SEQ ID NO: 653722 - DNA, 33 bp, Homo sapien
aagattaaatgtactatgacagctaatgattca

SEQ ID NO: 653723 - DNA, 33 bp, Homo sapien
tgaaaacaatgtaacaatgacaaaaattctgtg

SEQ ID NO: 653724 - DNA, 33 bp, Homo sapien
tgaaaacaatgtaacactgacaaaaattctgtg

SEQ ID NO: 653725 - DNA, 33 bp, Homo sapien
taaacacatccattaacacatgaggctggagat

SEQ ID NO: 653726 - DNA, 33 bp, Homo sapien
taaacacatccattaatacatgaggctggagat

SEQ ID NO: 653727 - DNA, 33 bp, Homo sapien
ttgaagtaacttgataacaaggagtcttttcgg

SEQ ID NO: 653728 - DNA, 33 bp, Homo sapien
ttgaagtaacttgatagcaaggagtcttttcgg

SEQ ID NO: 653729 - DNA, 33 bp, Homo sapien
ttgtagagcttgagaactgttccccttgtttag

SEQ ID NO: 653730 - DNA, 33 bp, Homo sapien
ttgtagagcttgagaattgttccccttgtttag

SEQ ID NO: 653731 - DNA, 33 bp, Homo sapien
ctctcaagtggttttgcacagattattactgat

SEQ ID NO: 653732 - DNA, 33 bp, Homo sapien
ctctcaagtggttttggacagattattactgat

SEQ ID NO: 653733 - DNA, 33 bp, Homo sapien
ttggttatcagagctaacatattcttaattatc

SEQ ID NO: 653734 - DNA, 33 bp, Homo sapien
ttggttatcagagctatcatattcttaattatc

SEQ ID NO: 653735 - DNA, 33 bp, Homo sapien
gaagtgtgagaggtaaagtgacctgtttagatg

SEQ ID NO: 653736 - DNA, 33 bp, Homo sapien
gaagtgtgagaggtaaggtgacctgtttagatg

SEQ ID NO: 653737 - DNA, 33 bp, Homo sapien
tgtaaatagaacttaaatctgtcttgtgctgtg

SEQ ID NO: 653738 - DNA, 33 bp, Homo sapien
tgtaaatagaacttaattctgtcttgtgctgtg

SEQ ID NO: 653739 - DNA, 33 bp, Homo sapien
tgtctttcattgctcagacaccattttcaggac

SEQ ID NO: 653740 - DNA, 33 bp, Homo sapien
tgtctttcattgctcatacaccattttcaggac

SEQ ID NO: 653741 - DNA, 33 bp, Homo sapien
agtgtataagtgtccacgctccttccaatttta

SEQ ID NO: 653742 - DNA, 33 bp, Homo sapien
agtgtataagtgtccaggctccttccaatttta

SEQ ID NO: 653743 - DNA, 33 bp, Homo sapien
aagaggaagctagacacaaaggccaggtctctc

SEQ ID NO: 653744 - DNA, 33 bp, Homo sapien
aagaggaagctagacagaaaggccaggtctctc

SEQ ID NO: 653745 - DNA, 33 bp, Homo sapien
tgttttgccaagaaagaaactgggagcaatgcc

SEQ ID NO: 653746 - DNA, 33 bp, Homo sapien
tgttttgccaagaaagcaactgggagcaatgcc

SEQ ID NO: 653747 - DNA, 33 bp, Homo sapien
acactgtttcttaatcactgtattagaagatta

SEQ ID NO: 653748 - DNA, 33 bp, Homo sapien
acactgtttcttaatcgctgtattagaagatta

SEQ ID NO: 653749 - DNA, 33 bp, Homo sapien
acctggtcaccgaaaaactctgatggagatgta

SEQ ID NO: 653750 - DNA, 33 bp, Homo sapien
acctggtcaccgaaaagctctgatggagatgta

SEQ ID NO: 653751 - DNA, 33 bp, Homo sapien
cctctcttggtcttcacagaattgaggagtcag

SEQ ID NO: 653752 - DNA, 33 bp, Homo sapien
cctctcttggtcttcatagaattgaggagtcag

SEQ ID NO: 653753 - DNA, 33 bp, Homo sapien
atattctcagtaacaacctatgagagcttctcc

SEQ ID NO: 653754 - DNA, 33 bp, Homo sapien
atattctcagtaacaatctatgagagcttctcc

SEQ ID NO: 653755 - DNA, 33 bp, Homo sapien
ggtctcagggtcaatactacaaaagatgaagag

SEQ ID NO: 653756 - DNA, 33 bp, Homo sapien
ggtctcagggtcaatattacaaaagatgaagag

SEQ ID NO: 653757 - DNA, 33 bp, Homo sapien
catttctgagtcctcacgaaactatttcagtat

SEQ ID NO: 653758 - DNA, 33 bp, Homo sapien
catttctgagtcctcatgaaactatttcagtat

SEQ ID NO: 653759 - DNA, 33 bp, Homo sapien
tttagaggtgaggaaaatgaagtcttagataaa

SEQ ID NO: 653760 - DNA, 33 bp, Homo sapien
tttagaggtgaggaaagtgaagtcttagataaa

SEQ ID NO: 653761 - DNA, 33 bp, Homo sapien
ttgctctttgatttgacaacagaagttaagcct

SEQ ID NO: 653762 - DNA, 33 bp, Homo sapien
ttgctctttgatttgataacagaagttaagcct

SEQ ID NO: 653763 - DNA, 33 bp, Homo sapien
aaatacatacataaaaacaaagcatatcagaag

SEQ ID NO: 653764 - DNA, 33 bp, Homo sapien
aaatacatacataaaaccaaagcatatcagaag

SEQ ID NO: 653765 - DNA, 33 bp, Homo sapien
aaaattaggccttgtacgtaactggggttgact

SEQ ID NO: 653766 - DNA, 33 bp, Homo sapien
aaaattaggccttgtatgtaactggggttgact

SEQ ID NO: 653767 - DNA, 33 bp, Homo sapien
aaccatcccagactcacgttatatgcttgagat

SEQ ID NO: 653768 - DNA, 33 bp, Homo sapien
aaccatcccagactcatgttatatgcttgagat

SEQ ID NO: 653769 - DNA, 33 bp, Homo sapien
tatagataggactgccgcctgaaaatagagaga

SEQ ID NO: 653770 - DNA, 33 bp, Homo sapien
tatagataggactgcctcctgaaaatagagaga

SEQ ID NO: 653771 - DNA, 33 bp, Homo sapien
aagattaaagctctaactccaaatggaaagaaa

SEQ ID NO: 653772 - DNA, 33 bp, Homo sapien
aagattaaagctctaattccaaatggaaagaaa

SEQ ID NO: 653773 - DNA, 33 bp, Homo sapien
aaactccatatacagaacaatttctcctggccg

SEQ ID NO: 653774 - DNA, 33 bp, Homo sapien
aaactccatatacagagcaatttctcctggccg

SEQ ID NO: 653775 - DNA, 33 bp, Homo sapien
agtgagcaacttgagaccatgttgtattcatct

SEQ ID NO: 653776 - DNA, 33 bp, Homo sapien
agtgagcaacttgagagcatgttgtattcatct

SEQ ID NO: 653777 - DNA, 33 bp, Homo sapien
acaaatgtcagaggtacatcatgaacaaagtgc

SEQ ID NO: 653778 - DNA, 33 bp, Homo sapien
acaaatgtcagaggtatatcatgaacaaagtgc

SEQ ID NO: 653779 - DNA, 33 bp, Homo sapien
tggtactttctgactacatgagctgaccaagct

SEQ ID NO: 653780 - DNA, 33 bp, Homo sapien
tggtactttctgactatatgagctgaccaagct

SEQ ID NO: 653781 - DNA, 33 bp, Homo sapien
taattaggcagtcgcaaatatacacaaatcaaa

SEQ ID NO: 653782 - DNA, 33 bp, Homo sapien
taattaggcagtcgcagatatacacaaatcaaa

SEQ ID NO: 653783 - DNA, 33 bp, Homo sapien
agtatagtcctaacacgagctaactacaatagg

SEQ ID NO: 653784 - DNA, 33 bp, Homo sapien
agtatagtcctaacactagctaactacaatagg

SEQ ID NO: 653785 - DNA, 33 bp, Homo sapien
aacccagtaagatggaatacctctagaaaagaa

SEQ ID NO: 653786 - DNA, 33 bp, Homo sapien
aacccagtaagatggagtacctctagaaaagaa

SEQ ID NO: 653787 - DNA, 33 bp, Homo sapien
ttctttatttggaagcacagagtaatttgaagt

SEQ ID NO: 653788 - DNA, 33 bp, Homo sapien
ttctttatttggaagcgcagagtaatttgaagt

SEQ ID NO: 653789 - DNA, 33 bp, Homo sapien
attcttctgtcaaaataagaagcactattcagc

SEQ ID NO: 653790 - DNA, 33 bp, Homo sapien
attcttctgtcaaaatgagaagcactattcagc

SEQ ID NO: 653791 - DNA, 33 bp, Homo sapien
tcagctcaaataatccaatgtatcctaacctaa

SEQ ID NO: 653792 - DNA, 33 bp, Homo sapien
tcagctcaaataatccgatgtatcctaacctaa

SEQ ID NO: 653793 - DNA, 33 bp, Homo sapien
agttgactgttacactcaaagatcaactgagaa

SEQ ID NO: 653794 - DNA, 33 bp, Homo sapien
agttgactgttacactgaaagatcaactgagaa

SEQ ID NO: 653795 - DNA, 33 bp, Homo sapien
gcccttttgtgtgtaaacagcttctcaagaact

SEQ ID NO: 653796 - DNA, 33 bp, Homo sapien
gcccttttgtgtgtaatcagcttctcaagaact

SEQ ID NO: 653797 - DNA, 33 bp, Homo sapien
tatgactgcttttaaaaggaaatctccaatcag

SEQ ID NO: 653798 - DNA, 33 bp, Homo sapien
tatgactgcttttaaagggaaatctccaatcag

SEQ ID NO: 653799 - DNA, 33 bp, Homo sapien
gattaaaactgagaaacatgaaaggatctattc

SEQ ID NO: 653800 - DNA, 33 bp, Homo sapien
gattaaaactgagaaatatgaaaggatctattc

SEQ ID NO: 653801 - DNA, 33 bp, Homo sapien
taataaatgttacttaacagacatcacactgac

SEQ ID NO: 653802 - DNA, 33 bp, Homo sapien
taataaatgttacttaccagacatcacactgac

SEQ ID NO: 653803 - DNA, 33 bp, Homo sapien
tgttagggttagcctgaataaatggagaggaac

SEQ ID NO: 653804 - DNA, 33 bp, Homo sapien
tgttagggttagcctggataaatggagaggaac

SEQ ID NO: 653805 - DNA, 33 bp, Homo sapien
atggaggttctaataagtcaagaaagggccatt

SEQ ID NO: 653806 - DNA, 33 bp, Homo sapien
atggaggttctaataattcaagaaagggccatt

SEQ ID NO: 653807 - DNA, 33 bp, Homo sapien
gatgtgacgagaaatcaaagtcttcttagtggc

SEQ ID NO: 653808 - DNA, 33 bp, Homo sapien
gatgtgacgagaaatccaagtcttcttagtggc

SEQ ID NO: 653809 - DNA, 33 bp, Homo sapien
aataaactttattggacgcataacacaggatca

SEQ ID NO: 653810 - DNA, 33 bp, Homo sapien
aataaactttattggatgcataacacaggatca

SEQ ID NO: 653811 - DNA, 33 bp, Homo sapien
gcccattcatatgccaagttaatgtgcttcatt

SEQ ID NO: 653812 - DNA, 33 bp, Homo sapien
gcccattcatatgccaggttaatgtgcttcatt

SEQ ID NO: 653813 - DNA, 33 bp, Homo sapien
ttgtatatttaagaaggctatttgtgtgtgact

SEQ ID NO: 653814 - DNA, 33 bp, Homo sapien
ttgtatatttaagaagtctatttgtgtgtgact

SEQ ID NO: 653815 - DNA, 33 bp, Homo sapien
aggtcagggtccttcaagtggtagctttgagtt

SEQ ID NO: 653816 - DNA, 33 bp, Homo sapien
aggtcagggtccttcatgtggtagctttgagtt

SEQ ID NO: 653817 - DNA, 33 bp, Homo sapien
ggggctcattgctaccaaaattcttcttcattc

SEQ ID NO: 653818 - DNA, 33 bp, Homo sapien
ggggctcattgctaccgaaattcttcttcattc

SEQ ID NO: 653819 - DNA, 33 bp, Homo sapien
agggagagcataaagggaatgagagagaaagag

SEQ ID NO: 653820 - DNA, 33 bp, Homo sapien
agggagagcataaaggtaatgagagagaaagag

SEQ ID NO: 653821 - DNA, 33 bp, Homo sapien
gatggcagacaaaaaaaatgttgtgtttgaaga

SEQ ID NO: 653822 - DNA, 33 bp, Homo sapien
gatggcagacaaaaaacatgttgtgtttgaaga

SEQ ID NO: 653823 - DNA, 33 bp, Homo sapien
cagacctggaaagaagcccaaataaagttttac

SEQ ID NO: 653824 - DNA, 33 bp, Homo sapien
cagacctggaaagaagtccaaataaagttttac

SEQ ID NO: 653825 - DNA, 33 bp, Homo sapien
ttaattgttatgaattaaaaagtctcgaagcta

SEQ ID NO: 653826 - DNA, 33 bp, Homo sapien
ttaattgttatgaatttaaaagtctcgaagcta

SEQ ID NO: 653827 - DNA, 33 bp, Homo sapien
gactgataagtagttgcatattgtaacagtttt

SEQ ID NO: 653828 - DNA, 33 bp, Homo sapien
gactgataagtagttgtatattgtaacagtttt

SEQ ID NO: 653829 - DNA, 33 bp, Homo sapien
atccaccctttgtgtcaaaccttagataattca

SEQ ID NO: 653830 - DNA, 33 bp, Homo sapien
atccaccctttgtgtcgaaccttagataattca

SEQ ID NO: 653831 - DNA, 33 bp, Homo sapien
aagattgctctctaaacagtactcagttccttc

SEQ ID NO: 653832 - DNA, 33 bp, Homo sapien
aagattgctctctaaatagtactcagttccttc

SEQ ID NO: 653833 - DNA, 33 bp, Homo sapien
agctgtaaactgcaaactgctgtataaaagtaa

SEQ ID NO: 653834 - DNA, 33 bp, Homo sapien
agctgtaaactgcaaagtgctgtataaaagtaa

SEQ ID NO: 653835 - DNA, 33 bp, Homo sapien
acataagccacacatactaagttgtagtttctt

SEQ ID NO: 653836 - DNA, 33 bp, Homo sapien
acataagccacacatattaagttgtagtttctt

SEQ ID NO: 653837 - DNA, 33 bp, Homo sapien
aaaatcctccagagaagagaccagtaaattcaa

SEQ ID NO: 653838 - DNA, 33 bp, Homo sapien
aaaatcctccagagaatagaccagtaaattcaa

SEQ ID NO: 653839 - DNA, 33 bp, Homo sapien
attctagtaaaactcaagtaatgtggaagaact

SEQ ID NO: 653840 - DNA, 33 bp, Homo sapien
attctagtaaaactcaggtaatgtggaagaact

SEQ ID NO: 653841 - DNA, 33 bp, Homo sapien
caccttactccattacaactgcatcttaattag

SEQ ID NO: 653842 - DNA, 33 bp, Homo sapien
caccttactccattacgactgcatcttaattag

SEQ ID NO: 653843 - DNA, 33 bp, Homo sapien
aacaccttatctcccccctgcaaaatgtttaac

SEQ ID NO: 653844 - DNA, 33 bp, Homo sapien
aacaccttatctcccctctgcaaaatgtttaac

SEQ ID NO: 653845 - DNA, 33 bp, Homo sapien
aagacaaaaactgtcccattcacttttgctcag

SEQ ID NO: 653846 - DNA, 33 bp, Homo sapien
aagacaaaaactgtccgattcacttttgctcag

SEQ ID NO: 653847 - DNA, 33 bp, Homo sapien
catgtagtccaattcaagaaatcagtatacttt

SEQ ID NO: 653848 - DNA, 33 bp, Homo sapien
catgtagtccaattcatgaaatcagtatacttt

SEQ ID NO: 653849 - DNA, 33 bp, Homo sapien
cattatcttagttgacagaagaatgctataaaa

SEQ ID NO: 653850 - DNA, 33 bp, Homo sapien
cattatcttagttgaccgaagaatgctataaaa

SEQ ID NO: 653851 - DNA, 33 bp, Homo sapien
aggtttggatggaataccaggttgatacaacag

SEQ ID NO: 653852 - DNA, 33 bp, Homo sapien
aggtttggatggaatatcaggttgatacaacag

SEQ ID NO: 653853 - DNA, 33 bp, Homo sapien
ccccattttacagtacacaaagaagaccggaat

SEQ ID NO: 653854 - DNA, 33 bp, Homo sapien
ccccattttacagtacccaaagaagaccggaat

SEQ ID NO: 653855 - DNA, 33 bp, Homo sapien
attgatagtgagccacacattcagtcaatcaac

SEQ ID NO: 653856 - DNA, 33 bp, Homo sapien
attgatagtgagccacgcattcagtcaatcaac

SEQ ID NO: 653857 - DNA, 33 bp, Homo sapien
ttagtactcagtgaagaacagctattatttaaa

SEQ ID NO: 653858 - DNA, 33 bp, Homo sapien
ttagtactcagtgaaggacagctattatttaaa

SEQ ID NO: 653859 - DNA, 33 bp, Homo sapien
ttcacacaatccttgaaatctcagcagtagggt

SEQ ID NO: 653860 - DNA, 33 bp, Homo sapien
ttcacacaatccttgacatctcagcagtagggt

SEQ ID NO: 653861 - DNA, 33 bp, Homo sapien
catgtcattcatattcactgtcctaaagtctat

SEQ ID NO: 653862 - DNA, 33 bp, Homo sapien
catgtcattcatattcgctgtcctaaagtctat

SEQ ID NO: 653863 - DNA, 33 bp, Homo sapien
gcaatctatatgattcaattactgggcctcagt

SEQ ID NO: 653864 - DNA, 33 bp, Homo sapien
gcaatctatatgattcgattactgggcctcagt

SEQ ID NO: 653865 - DNA, 33 bp, Homo sapien
tcttccttatttatacagatttgaggcagtact

SEQ ID NO: 653866 - DNA, 33 bp, Homo sapien
tcttccttatttatacggatttgaggcagtact

SEQ ID NO: 653867 - DNA, 33 bp, Homo sapien
actttcaaaggcggcccggactctgcgtgctaa

SEQ ID NO: 653868 - DNA, 33 bp, Homo sapien
actttcaaaggcggcctggactctgcgtgctaa

SEQ ID NO: 653869 - DNA, 33 bp, Homo sapien
tgacttgttgaatctaaccttgattaatgctct

SEQ ID NO: 653870 - DNA, 33 bp, Homo sapien
tgacttgttgaatctatccttgattaatgctct

SEQ ID NO: 653871 - DNA, 33 bp, Homo sapien
aagcagagaaattagacggattgtgatctcaac

SEQ ID NO: 653872 - DNA, 33 bp, Homo sapien
aagcagagaaattagatggattgtgatctcaac

SEQ ID NO: 653873 - DNA, 33 bp, Homo sapien
aattcataaaaaataccaaggtgctaaggctac

SEQ ID NO: 653874 - DNA, 33 bp, Homo sapien
aattcataaaaaatacgaaggtgctaaggctac

SEQ ID NO: 653875 - DNA, 33 bp, Homo sapien
gagtttacagtctggcagaggagaaaaacatta

SEQ ID NO: 653876 - DNA, 33 bp, Homo sapien
gagtttacagtctggcggaggagaaaaacatta

SEQ ID NO: 653877 - DNA, 33 bp, Homo sapien
agacagtactttgacaaccataccaattgttgg

SEQ ID NO: 653878 - DNA, 33 bp, Homo sapien
agacagtactttgacagccataccaattgttgg

SEQ ID NO: 653879 - DNA, 33 bp, Homo sapien
gaattgctagattgtacggtaattccattttca

SEQ ID NO: 653880 - DNA, 33 bp, Homo sapien
gaattgctagattgtatggtaattccattttca

SEQ ID NO: 653881 - DNA, 33 bp, Homo sapien
acatagattgtactcaaaggttctatacaaagt

SEQ ID NO: 653882 - DNA, 33 bp, Homo sapien
acatagattgtactcagaggttctatacaaagt

SEQ ID NO: 653883 - DNA, 33 bp, Homo sapien
attcactggaaaaaaccgatgtctttgatattg

SEQ ID NO: 653884 - DNA, 33 bp, Homo sapien
attcactggaaaaaactgatgtctttgatattg

SEQ ID NO: 653885 - DNA, 33 bp, Homo sapien
attacaaggtgtgttacatatgcctcaaggtga

SEQ ID NO: 653886 - DNA, 33 bp, Homo sapien
attacaaggtgtgttatatatgcctcaaggtga

SEQ ID NO: 653887 - DNA, 33 bp, Homo sapien
ttctgtatttcctccactattgtgtttcctcca

SEQ ID NO: 653888 - DNA, 33 bp, Homo sapien
ttctgtatttcctccattattgtgtttcctcca

SEQ ID NO: 653889 - DNA, 33 bp, Homo sapien
ctaagctgttcgataacgatttggtatattagg

SEQ ID NO: 653890 - DNA, 33 bp, Homo sapien
ctaagctgttcgataatgatttggtatattagg

SEQ ID NO: 653891 - DNA, 33 bp, Homo sapien
tagagtttgtcctccaagatgaatggaggtcag

SEQ ID NO: 653892 - DNA, 33 bp, Homo sapien
tagagtttgtcctccaggatgaatggaggtcag

SEQ ID NO: 653893 - DNA, 33 bp, Homo sapien
agaactttgacattaccctgttgacatacagga

SEQ ID NO: 653894 - DNA, 33 bp, Homo sapien
agaactttgacattactctgttgacatacagga

SEQ ID NO: 653895 - DNA, 33 bp, Homo sapien
ttcagctacatgaacactgcatgacacattgta

SEQ ID NO: 653896 - DNA, 33 bp, Homo sapien
ttcagctacatgaacattgcatgacacattgta

SEQ ID NO: 653897 - DNA, 33 bp, Homo sapien
cttcctcagttaaagaaatattatgccctttaa

SEQ ID NO: 653898 - DNA, 33 bp, Homo sapien
cttcctcagttaaagagatattatgccctttaa

SEQ ID NO: 653899 - DNA, 33 bp, Homo sapien
catgccactgtaagtacgaaagtaatttaggct

SEQ ID NO: 653900 - DNA, 33 bp, Homo sapien
catgccactgtaagtaggaaagtaatttaggct

SEQ ID NO: 653901 - DNA, 33 bp, Homo sapien
tggttaagagatcccacaggcgaagttccttaa

SEQ ID NO: 653902 - DNA, 33 bp, Homo sapien
tggttaagagatcccataggcgaagttccttaa

SEQ ID NO: 653903 - DNA, 33 bp, Homo sapien
tacatagtggtacaacaacagaaataaatccca

SEQ ID NO: 653904 - DNA, 33 bp, Homo sapien
tacatagtggtacaacgacagaaataaatccca

SEQ ID NO: 653905 - DNA, 33 bp, Homo sapien
ctgtagtcatcatgtacctgtattcaaagtaca

SEQ ID NO: 653906 - DNA, 33 bp, Homo sapien
ctgtagtcatcatgtatctgtattcaaagtaca

SEQ ID NO: 653907 - DNA, 33 bp, Homo sapien
caaccaagaaacagaaaacagagcctataaaca

SEQ ID NO: 653908 - DNA, 33 bp, Homo sapien
caaccaagaaacagaagacagagcctataaaca

SEQ ID NO: 653909 - DNA, 33 bp, Homo sapien
aaattctatcatggcaaaaattccaataaaatt

SEQ ID NO: 653910 - DNA, 33 bp, Homo sapien
aaattctatcatggcagaaattccaataaaatt

SEQ ID NO: 653911 - DNA, 33 bp, Homo sapien
gctgttatgtgaaccaatacatttattatttaa

SEQ ID NO: 653912 - DNA, 33 bp, Homo sapien
gctgttatgtgaaccattacatttattatttaa

SEQ ID NO: 653913 - DNA, 33 bp, Homo sapien
tcagcatctgatccaacagcaaccttctactgt

SEQ ID NO: 653914 - DNA, 33 bp, Homo sapien
tcagcatctgatccaagagcaaccttctactgt

SEQ ID NO: 653915 - DNA, 33 bp, Homo sapien
atgtttgggctatccacgaatgttttcacaagc

SEQ ID NO: 653916 - DNA, 33 bp, Homo sapien
atgtttgggctatccatgaatgttttcacaagc

SEQ ID NO: 653917 - DNA, 33 bp, Homo sapien
gcctgatggtaaaagaagagtcagatatttgaa

SEQ ID NO: 653918 - DNA, 33 bp, Homo sapien
gcctgatggtaaaagaggagtcagatatttgaa

SEQ ID NO: 653919 - DNA, 33 bp, Homo sapien
tgtgtcttcaagtagagagtgaacttctggagg

SEQ ID NO: 653920 - DNA, 33 bp, Homo sapien
tgtgtcttcaagtagatagtgaacttctggagg

SEQ ID NO: 653921 - DNA, 33 bp, Homo sapien
ctaatatttacagaaacgagtcatctgttttat

SEQ ID NO: 653922 - DNA, 33 bp, Homo sapien
ctaatatttacagaaaggagtcatctgttttat

SEQ ID NO: 653923 - DNA, 33 bp, Homo sapien
atcacattacttaccaactcaaaaattttatct

SEQ ID NO: 653924 - DNA, 33 bp, Homo sapien
atcacattacttaccagctcaaaaattttatct

SEQ ID NO: 653925 - DNA, 33 bp, Homo sapien
tgcttattccaatccaactgtatgttaatttta

SEQ ID NO: 653926 - DNA, 33 bp, Homo sapien
tgcttattccaatccagctgtatgttaatttta

SEQ ID NO: 653927 - DNA, 33 bp, Homo sapien
tgttttctaggagagcaattagctaagtttagg

SEQ ID NO: 653928 - DNA, 33 bp, Homo sapien
tgttttctaggagagcgattagctaagtttagg

SEQ ID NO: 653929 - DNA, 33 bp, Homo sapien
tcctcacagcaatttacaactttaggaaggaaa

SEQ ID NO: 653930 - DNA, 33 bp, Homo sapien
tcctcacagcaatttagaactttaggaaggaaa

SEQ ID NO: 653931 - DNA, 33 bp, Homo sapien
actttaggaactcacagtattgacagcatttta

SEQ ID NO: 653932 - DNA, 33 bp, Homo sapien
actttaggaactcacattattgacagcatttta

SEQ ID NO: 653933 - DNA, 33 bp, Homo sapien
gaacctatctagtcaacggtttaattttacaaa

SEQ ID NO: 653934 - DNA, 33 bp, Homo sapien
gaacctatctagtcaatggtttaattttacaaa

SEQ ID NO: 653935 - DNA, 33 bp, Homo sapien
attaacctctacttaccagcctaactcatgtac

SEQ ID NO: 653936 - DNA, 33 bp, Homo sapien
attaacctctacttactagcctaactcatgtac

SEQ ID NO: 653937 - DNA, 33 bp, Homo sapien
ggtgtgtggttctatcaccctttcatgagcagt

SEQ ID NO: 653938 - DNA, 33 bp, Homo sapien
ggtgtgtggttctatcgccctttcatgagcagt

SEQ ID NO: 653939 - DNA, 33 bp, Homo sapien
ttgaatactttgaaaaaaccattggatgattct

SEQ ID NO: 653940 - DNA, 33 bp, Homo sapien
ttgaatactttgaaaagaccattggatgattct

SEQ ID NO: 653941 - DNA, 33 bp, Homo sapien
aggagttttatgtcagcaaacaggattgaagaa

SEQ ID NO: 653942 - DNA, 33 bp, Homo sapien
aggagttttatgtcaggaaacaggattgaagaa

SEQ ID NO: 653943 - DNA, 33 bp, Homo sapien
gccttaattcaagtgcaaagagcatcataacgc

SEQ ID NO: 653944 - DNA, 33 bp, Homo sapien
gccttaattcaagtgcgaagagcatcataacgc

SEQ ID NO: 653945 - DNA, 33 bp, Homo sapien
aatcaacatggtagacagacattatactgaatt

SEQ ID NO: 653946 - DNA, 33 bp, Homo sapien
aatcaacatggtagacggacattatactgaatt

SEQ ID NO: 653947 - DNA, 33 bp, Homo sapien
cattttgtttattgctcacttaatcaggtgcct

SEQ ID NO: 653948 - DNA, 33 bp, Homo sapien
cattttgtttattgctgacttaatcaggtgcct

SEQ ID NO: 653949 - DNA, 33 bp, Homo sapien
gatcagggaaaaaaaactgacatcctacactta

SEQ ID NO: 653950 - DNA, 33 bp, Homo sapien
gatcagggaaaaaaaattgacatcctacactta

SEQ ID NO: 653951 - DNA, 33 bp, Homo sapien
cagcactaaacaaggcacatacaaaatccttcc

SEQ ID NO: 653952 - DNA, 33 bp, Homo sapien
cagcactaaacaaggcgcatacaaaatccttcc

SEQ ID NO: 653953 - DNA, 33 bp, Homo sapien
agagaaacacaagtcactactagtcagtccgct

SEQ ID NO: 653954 - DNA, 33 bp, Homo sapien
agagaaacacaagtcattactagtcagtccgct

SEQ ID NO: 653955 - DNA, 33 bp, Homo sapien
gttcttcctccccgatcaaactgttgaacctag

SEQ ID NO: 653956 - DNA, 33 bp, Homo sapien
gttcttcctccccgattaaactgttgaacctag

SEQ ID NO: 653957 - DNA, 33 bp, Homo sapien
ttttgtgagtggtttacggaagaatagcctttg

SEQ ID NO: 653958 - DNA, 33 bp, Homo sapien
ttttgtgagtggtttatggaagaatagcctttg

SEQ ID NO: 653959 - DNA, 33 bp, Homo sapien
agatacctagcgtctagctacatacagtttctc

SEQ ID NO: 653960 - DNA, 33 bp, Homo sapien
agatacctagcgtctatctacatacagtttctc

SEQ ID NO: 653961 - DNA, 33 bp, Homo sapien
gtcaaagggaggcaaacgtgtcttcttgagttg

SEQ ID NO: 653962 - DNA, 33 bp, Homo sapien
gtcaaagggaggcaaatgtgtcttcttgagttg

SEQ ID NO: 653963 - DNA, 33 bp, Homo sapien
cagaactatattaaaacgcaatgaatactcctc

SEQ ID NO: 653964 - DNA, 33 bp, Homo sapien
cagaactatattaaaatgcaatgaatactcctc

SEQ ID NO: 653965 - DNA, 33 bp, Homo sapien
ttcactgagcacttacaattttcctggtgctct

SEQ ID NO: 653966 - DNA, 33 bp, Homo sapien
ttcactgagcacttacgattttcctggtgctct

SEQ ID NO: 653967 - DNA, 33 bp, Homo sapien
tgatccagacaagaaacatattatcagattatt

SEQ ID NO: 653968 - DNA, 33 bp, Homo sapien
tgatccagacaagaaagatattatcagattatt

SEQ ID NO: 653969 - DNA, 33 bp, Homo sapien
taagctctctgaaaaaccctacacctttacacg

SEQ ID NO: 653970 - DNA, 33 bp, Homo sapien
taagctctctgaaaaatcctacacctttacacg

SEQ ID NO: 653971 - DNA, 33 bp, Homo sapien
cctaagctcaccgttacactgttgcctttccct

SEQ ID NO: 653972 - DNA, 33 bp, Homo sapien
cctaagctcaccgttatactgttgcctttccct

SEQ ID NO: 653973 - DNA, 33 bp, Homo sapien
tctcatggcactgcccacaaggaaacattcacc

SEQ ID NO: 653974 - DNA, 33 bp, Homo sapien
tctcatggcactgcccgcaaggaaacattcacc

SEQ ID NO: 653975 - DNA, 33 bp, Homo sapien
ggagtgtacacataaccatgtatctattggttc

SEQ ID NO: 653976 - DNA, 33 bp, Homo sapien
ggagtgtacacataacgatgtatctattggttc

SEQ ID NO: 653977 - DNA, 33 bp, Homo sapien
ttcacgtgattcacacagtaaatttattccatc

SEQ ID NO: 653978 - DNA, 33 bp, Homo sapien
ttcacgtgattcacacggtaaatttattccatc

SEQ ID NO: 653979 - DNA, 33 bp, Homo sapien
taggtacaaggatagacggaaagataggctgga

SEQ ID NO: 653980 - DNA, 33 bp, Homo sapien
taggtacaaggatagagggaaagataggctgga

SEQ ID NO: 653981 - DNA, 33 bp, Homo sapien
ttctgggaattctgaaaaggtcccaacaccctg

SEQ ID NO: 653982 - DNA, 33 bp, Homo sapien
ttctgggaattctgaataggtcccaacaccctg

SEQ ID NO: 653983 - DNA, 33 bp, Homo sapien
aggcagatgttggcaccataagggtaggctctg

SEQ ID NO: 653984 - DNA, 33 bp, Homo sapien
aggcagatgttggcactataagggtaggctctg

SEQ ID NO: 653985 - DNA, 33 bp, Homo sapien
cccccaaacaccatccaccaaaggcaccgtacc

SEQ ID NO: 653986 - DNA, 33 bp, Homo sapien
cccccaaacaccatccgccaaaggcaccgtacc

SEQ ID NO: 653987 - DNA, 33 bp, Homo sapien
cagtacaaagagctaaatgagagcaaatataag

SEQ ID NO: 653988 - DNA, 33 bp, Homo sapien
cagtacaaagagctaagtgagagcaaatataag

SEQ ID NO: 653989 - DNA, 33 bp, Homo sapien
aaggtgaaaagaaaaaaccagagagaaatagaa

SEQ ID NO: 653990 - DNA, 33 bp, Homo sapien
aaggtgaaaagaaaaagccagagagaaatagaa
